(19) United States
(12) Patent Application Publication
(10) Pub. No.: US 2007/0042982 A1
(43) Pub. Date: Feb. 22, 2007

(54) BIOINFORMATICALLY DETECTABLE GROUP OF NOVEL REGULATORY BACTERIAL AND BACTERIAL ASSOCIATED OLIGONUCLEOTIDES AND USES THEREOF

(75) Inventor: Itzhak Bentwich, Kfar Daniel (IL)

Correspondence Address: HOWREY LLP, C/O IP DOCKETING DEPARTMENT, 2941 FAIRVIEW PARK DR, SUITE 200, FALLS CHURCH, VA, 22042-2924, US

(73) Assignee: ROSETTA GENOMICS, Rehovot (IL)

(21) Appl. No.: 10/708,951

(22) Filed: Apr. 2, 2004

(51) Int. Cl. A61K 48/00; C12Q 1/68; G06F 19/00; G01N 33/48; G01N 33/50; C07H 21/02

(52) U.S. Cl. 514/44; 536/23.1; 702/20

(57) ABSTRACT

The present invention relates to a first group of novel bacterial and human associated oligonucleotides, here identified as Genomic Address Messenger or GAM oligonucleotide, and a second group of novel operon-like bacterial and human polynucleotides, here identified as Genomic Record or GR polynucleotide. GAM oligonucleotides selectively inhibit translation of known ‘target’ genes, many of which are known to be involved in various bacterial diseases. Nucleic acid molecules are provided respectively encoding 6444 GAM precursors oligonucleotides, and 726 GR polynucleotides, as are vectors and probes both comprising the nucleic acid molecules, and methods and systems for detecting GAM oligonucleotides and GR polynucleotides and specific functions and utilities thereof, for detecting expression of GAM oligonucleotides and GR polynucleotides, and for selectively enhancing and selectively inhibiting translation of the respective target genes thereof.

### REFERENCES CITED

[0001] Altschul, S. F., Gish, W., Miller, W., Myers, E. W., and Lipman, D. J. (1990). Basic local alignment search tool. J. Mol. Biol. 215, 403-410.
[0002] Ambros, V., Lee, R. C., Lavanway, A., Williams, P. T., and Jewell, D. (2003). MicroRNAs and Other Tiny Endogenous RNAs in C. elegans 1. Curr. Biol. 13, 807-818.
[0003] Dan Gusfield, Algorithms on strings, trees, and sequences: computer science and computational biology, Cambridge University Press, 1997.
[0004] Elbashir, S. M., Lendeckel, W., and Tuschl, T. (2001). RNA interference is mediated by 21- and 22-nucleotide RNAs. Genes Dev. 15, 188-200.
[0005] Gibbs, W. W. (2003). The unseen genome: gems among the junk. Sci. Am. 289, 46-53.
[0006] Gussow, D. and Clackson, T. (1989). Direct clone characterization from plaques and colonies by the polymerase chain reaction. Nucleic Acids Res. 17, 4000.
[0007] Hamosh A, Scott A F, Amberger J, Bocchini C, Valle D and McKusick V A. (2002). Online Mendelian Inheritance in Man (OMIM), a knowledgebase of human genes and genetic disorders. Nucleic Acids Res. 30: 52-55.
[0008] Jenuth, J. P. (2000). The NCBI. Publicly available tools and resources on the Web. Methods Mol. Biol. 132, 301-312.
[0009] Kirkness, E. F. and Kerlavage, A. R. (1997). The TIGR human cDNA database. Methods Mol. Biol. 69, 261-268.
[0010] Lagos-Quintana, M., Rauhut, R., Lendeckel, W., and Tuschl, T. (2001). Identification of novel genes coding for small expressed RNAs. Science 294, 853-858.
[0011] Lau, N. C., Lim, L. P., Weinstein, E. G., and Bartel, D. P. (2001). An abundant class of tiny RNAs with probable regulatory roles in Caenorhabditis elegans. Science 294, 858-862.
[0012] Lau, N. C. and Bartel, D. P. (2003). Censors of the genome. Sci. Am. 289, 34-41.

[0013] Lim, L. P., Glasner, M. E., Yekta, S., Burge, C. B., and Bartel, D. P. (2003). Vertebrate microRNA genes. Science 299, 1540.
[0014] Mathews, D. H., Sabina, J., Zuker, M., and Turner, D. H. (1999). Expanded sequence dependence of thermodynamic parameters improves prediction of RNA secondary structure. J. Mol. Biol. 288, 911-940.
[0015] Reinhart, B. J., Slack, F. J., Basson, M., Pasquinelli, A. E., Bettinger, J. C., Rougvie, A. E., Horvitz, H. R., and Ruvkun, G. (2000). The 21-nucleotide let-7 RNA regulates developmental timing in Caenorhabditis elegans. Nature 403, 901-906.
[0016] Southern, E. M. (1992). Detection of specific sequences among DNA fragments separated by gel electrophoresis. 1975. Biotechnology 24, 122-139.
[0017] Tom M. Mitchell, Machine Learning, McGraw Hill, 1997.
[0018] Wightman, B., Ha, I., and Ruvkun, G. (1993). Posttranscriptional regulation of the heterochronic gene lin-14 by lin-4 mediates temporal pattern formation in C. elegans. Cell 75, 855-862.
[0019] Zhang, H., Kolb, F. A., Brondani, V., Billy, E., and Filipowicz, W. (2002). Human Dicer preferentially cleaves dsRNAs at their termini without a requirement for ATP. EMBO J. 21, 5875-5885.
[0020] Zuker, M. (2003). M fold web server for nucleic acid folding and hybridization prediction. Nucleic Acids Res. 31, 3406-3415.

### BACKGROUND OF THE INVENTION

[0021] 1. Field of the Invention

[0022] The present invention relates to a group of bioinformatically detectable novel bacterial oligonucleotides and to a group of bioinformatically detectable novel human oligonucleotides associated with bacterial infections, both are identified here as Genomic Address Messenger or GAM oligonucleotides.

[0023] All of which are believed to be related to the micro RNA (miRNA) group of oligonucleotides.

[0024] 2. Description of Prior Art

[0025] Micro RNAs (miRNA), are short ˜22 nt non-coding regulatory RNA oligonucleotides, found in a wide range of species, believed to function as specific gene translation repressors, sometimes involved in cell-differentiation.

[0026] The ability to detect novel miRNAs is limited by the methodologies used to detect such oligonucleotides. All miRNAs identified so far either present a visibly discernable whole body phenotype, as do Lin-4 and Let-7 (Wightman, B., Ha, I., and Ruvkun, G., Cell 75:855-862 (1993); Reinhart et al. Nature 403: 901-906 (2000)), or produce sufficient quantities of RNA so as to be detected by the standard molecular biological techniques.

[0027] Studies reporting miRNAs (Lau et al., Science 294:858-862 (2001), Lagos-Quintana et al., Science 294: 853-858 (2001)) discovered 93 miRNAs in several species, by sequencing a limited number of clones (300 by Lau and 100 by Lagos-Quintana) of small segments (i.e. size fractionated) RNA. miRNAs detected in these studies therefore, represent the more prevalent among the miRNA oligonucleotide family, and can not be much rarer than 1% of all small ˜20 nt-long RNA oligonucleotides.

[0028] The aforesaid studies provide no basis for detection of miRNA oligonucleotides which either do not present a visually discernable whole body phenotype, or are rare (e.g. rarer than 0.1% of all size fractionated ˜20 nt-long RNA segments expressed in the tissues examined), and therefore do not produce significant enough quantities of RNA so as to be detected by standard biological techniques. To date, miRNAs have not been detected in bacteria.

[0029] The following U.S. patents relate to bioinformatic detection of genes: U.S. Pat. No. 348,935, entitled “Statistical algorithms for folding and target accessibility prediction and design of nucleic acids”, U.S. Pat. No. 6,369,195, entitled “Prostate-specific gene for diagnosis, prognosis and management of prostate cancer”, and U.S. Pat. No. 6,291,666 entitled “Spike tissue-specific promoter”, each of which is hereby incorporated by reference herein.

### BRIEF DESCRIPTION OF SEQUENCE LISTING, LARGE TABLES AND COMPUTER PROGRAM LISTING

[0030] A sequence listing is attached to the present invention, comprising 59824 genomic sequences, is contained in a file named SEQ_LIST.txt (9477 KB, 01-Apr-04), and is hereby incorporated by reference herein.

[0031] Large tables relating to genomic sequences are attached to the present application, appear in 10 table files (size, creation date), incorporated herein: TABLE1.txt (1824 KB, 01-Apr-04); TABLE2.txt (70377 KB, 01-Apr-04); TABLE3.txt (733 KB, 01-Apr-04); TABLE4.txt (3621 KB, 01-Apr-04), TABLE5.txt (660 KB, 01-Apr-04), TABLE6.txt (3556 KB, 01-Apr-04) and TABLE7.txt (8434 KB, 01-Apr-04), TABLE8.txt (23003 KB, 01-Apr-04), TABLE9.txt (29018 KB, 01-Apr-04) and TABLE10.txt (5265 KB, 01-Apr-04), all of which are incorporated by reference herein.

[0032] A computer program listing of a computer program constructed and operative in accordance with a preferred embodiment of the present invention is enclosed on an electronic medium in computer readable form, and is hereby incorporated by reference herein. The computer program listing is contained in 6 files, the name, sizes and creation date of which are as follows: AUXILARY_FILES.txt (117K, 14-Nov-03); EDIT_DISTANCE.txt (144K, 24-Nov-03); FIRST-K.txt (96K, 24-Nov-03); HAIRPIN_PREDICTION.txt (19K, 25-Mar-04); TWO_PHASED_SIDE_SELECTOR.txt (4K, 14-Nov-03); and TWO_PHASED_PREDICTOR.txt (74K, 14-Nov-03).

LENGTHY TABLES FILED ON CD
The patent application contains a lengthy table section. A copy of the table is available in electronic form from the USPTO web site (http://seqdata.uspto.gov/?pageRequest=docDetail&DocID=US20070042982A1). An electronic copy of the table will also be available from the USPTO upon request and payment of the fee set forth in 37 CFR 1.19(b)(3).

### SUMMARY OF THE INVENTION

[0033] The present invention relates to a novel group of bioinformatically detectable bacterial regulatory RNA oligonucleotides, which repress expression of human target genes, by means of complementary hybridization to binding sites in untranslated regions of these target genes. It is believed that this novel group of bacterial oligonucleotides represents a pervasive bacterial mechanism of attacking a host, and therefore knowledge of this novel group of bacterial oligonucleotides may be useful in preventing and treating bacterial diseases.

[0034] Additionally, the present invention relates to a novel group of bioinformatically detectable human regulatory RNA oligonucleotides, which repress expression of human target genes associated with the bacterial infection, by means of complementary hybridization to binding sites in untranslated regions of these target genes. It is believed that this novel group of human oligonucleotides represents a pervasive novel host response mechanism, and therefore knowledge of this novel group of human oligonucleotides may be useful in preventing and treating bacterial diseases.

[0035] In various preferred embodiments, the present invention seeks to provide improved method and system for detection and prevention of bacterial diseases, which are mediated by this group of novel oligonucleotides.

[0036] Accordingly, the invention provides several substantially pure nucleic acids (e.g., genomic DNA, cDNA or synthetic DNA) each comprising a novel GAM oligonucleotide, vectors comprising the DNAs, probes comprising the DNAs, a method and system for selectively modulating translation of known human target genes utilizing the vectors, and a method and system utilizing the GAM probes to modulate expression of human target genes.

[0037] The present invention represents a scientific breakthrough, disclosing novel miRNA-like oligonucleotides the number of which is dramatically larger than previously believed existed. Prior-art studies reporting miRNAs ((Lau et al., Science 294:858-862 (2001), Lagos-Quintana et al., Science 294: 853-858 (2001)) discovered 93 miRNAs in several species, including 21 in human, using conventional molecular biology methods, such as cloning and sequencing.

[0038] Molecular biology methodologies employed by these studies are limited in their ability to detect rare miRNA oligonucleotides, since these studies relied on sequencing of a limited number of clones (300 clones by Lau and 100 clones by Lagos-Quintana) of small segments (i.e. size fractionated) of RNA. MicroRNAs detected in these studies therefore, represent the more prevalent among the miRNA oligonucleotide family, and are typically not be much rarer than 1% of all small ˜20 nt-long RNA oligonucleotides present in the tissue from the RNA was extracted.

[0039] Recent studies state the number of miRNA oligonucleotides to be limited, and describe the limited sensitivity of available methods for detection of miRNA: The estimate of 255 human miRNA oligonucleotides is an upper bound implying that no more than 40 miRNA oligonucleotides remain to be identified in mammals (Lim et al., Science, 299:1540 (2003)); Estimates place the total number of vertebrate miRNA genes at about 200-250 (Ambros et al. Curr. Biol. 13:807-818 (2003)); and Confirmation of very low abundance miRNAs awaits the application of detection methods more sensitive than Northern blots (Ambros et al. Curr. Biol. 13:807-818 (2003)).

[0040] The oligonucleotides of the present invention represent a revolutionary new dimension of genomics and of biology: a dimension comprising a huge number of non-protein coding oligonucleotides which modulate expression of thousands of proteins and are associated with numerous major diseases. This new dimension disclosed by the present invention dismantles a central dogma that has dominated life-sciences during the past 50 years, a dogma which has emphasized the importance of protein coding regions of the genome, holding non-protein coding regions to be of little consequence, often dubbing them junk DNA.

[0041] Indeed, only in November, 2003 has this long held belief as to the low importance of non-protein coding regions been vocally challenged. As an example, an article titled The Unseen Genome—Gems in the Junk (Gibbs, W. W. Sci. Am. 289:46-53 (2003)) asserts that the failure to recognize the importance of non-protein-coding regions may well go down as one of the biggest mistakes in the history of molecular biology. Gibbs further asserts that what was dammned as junk because it was not understood, may in fact turn out to be the very basis of human complexity. The present invention provides a dramatic leap in understanding specific important roles of non-protein coding regions.

[0042] An additional scientific breakthrough of the present invention is a novel conceptual model disclosed by the present invention, which conceptual model is preferably used to encode in a genome the determination of cell-differentiation, utilizing oligonucleotides and polynucleotides of the present invention.

[0043] In various preferred embodiments, the present invention seeks to provide an improved method and system for specific modulation of the expression of specific target genes involved in significant human diseases. It also provides an improved method and system for detection of the expression of novel oligonucleotides of the present invention, which modulate these target genes. In many cases the target genes may be known and fully characterized, however in alternative embodiments of the present invention, unknown or less well characterized genes may be targeted.

[0044] A Nucleic acid is defined as a ribonucleic acid (RNA) molecule, or a deoxyribonucleic acid (DNA) molecule, or complementary deoxyribonucleic acid (cDNA), comprising either naturally occurring nucleotides or non-naturally occurring nucleotides.

[0045] Substantially pure nucleic acid, Isolated Nucleic Acid, Isolated Oligoucleotide and Isolated Polynucleotide are defined as a nucleic acid that is free of the genome of the organism from which the nucleic acid is derived, and include, for example, a recombinant nucleic acid which is incorporated into a vector, into an autonomously replicating plasmid or virus, or into the genomic nucleic acid of a prokaryote or eukaryote at a site other than its natural site; or which exists as a separate molecule (e.g., a cDNA or a genomic or cDNA fragment produced by PCR or restriction endonuclease digestion) independent of other nucleic acids.

[0046] An Oligonucleotide is defined as a nucleic acid comprising 2-139 nucleotides, or preferably 16-120 nucleotides. A Polynucleotide is defined as a nucleic acid comprising 140-5000 nucleotides, or preferably 140-1000 nucleotides.

[0047] A Complementary sequence is defined as a first nucleotide sequence which reverses complementary of a second nucleotide sequence: the first nucleotide sequence is reversed relative to a second nucleotide sequence, and wherein each nucleotide in the first nucleotide sequence is complementary to a corresponding nucleotide in the second nucleotide sequence (e.g. ATGGC is the complementary sequence of GCCAT).

[0048] Hybridization, Binding and Annealing are defined as hybridization, under in-vivo physiologic conditions, of a first nucleic acid to a second nucleic acid, which second nucleic acid is at least partially complementary to the first nucleic acid.

[0049] A Hairpin Structure is defined as an oligonucleotide having a nucleotide sequence that is 50-140 nucleotides in length, the first half of which nucleotide sequence is at least partially complementary to the second part thereof, thereby causing the nucleic acid to fold onto itself, forming a secondary hairpin structure.

[0050] A Hairpin Shaped Precursor is defined as a Hairpin Structure which is processed by a Dicer enzyme complex, yielding an oligonucleotide which is about 19 to about 24 nucleotides in length.

[0051] “Inhibiting translation” is defined as the ability to prevent synthesis of a specific protein encoded by a respective gene by means of inhibiting the translation of the mRNA of this gene. For example, inhibiting translation may include the following steps: (1) a DNA segment encodes an RNA, the first half of whose sequence is partially complementary to the second half thereof; (2) the precursor folds onto itself forming a hairpin-shaped precursor; (3) a Dicer enzyme complex cuts the hairpin shaped precursor yielding an oligonucleotide that is approximately 22 nt in length; (4) the oligonucleotide binds complementarily to at least one binding site, having a nucleotide sequence that is at least partially complementary to the oligonucleotide, which binding site is located in the mRNA of a target gene, preferably in the untranslated region (UTR) of a target gene, such that the binding inhibits translation of the target protein.

[0052] A “Translation inhibitor site” is defined as the minimal nucleotide sequence sufficient to inhibit translation.

[0053] There is thus provided in accordance with a preferred embodiment of the present invention a bioinformatically detectable isolated oligonucleotide which is endogenously processed from a hairpin-shaped precursor, and anneals to a portion of a mRNA transcript of a target gene, wherein binding of the oligonucleotide to the mRNA transcript represses expression of the target gene, and wherein the oligonucleotide has at least 80% sequence identity with a nucleotide sequence selected from the group consisting of SEQ ID NOs: 1-6456.

[0054] There is further provided in accordance with another preferred embodiment of the present invention a bioinformatically detectable isolated oligonucleotide having a nucleotide sequence selected from the group consisting of SEQ ID NOs: 1-6456.

[0055] There is still further provided in accordance with another preferred embodiment of the present invention a bioinformatically detectable first oligonucleotide which is a portion of a mRNA transcript of a target gene, and anneals to a second oligonucleotide that is endogenously processed from a hairpin precursor, wherein binding of the first oligonucleotide to the second oligonucleotide represses expression of the target gene, and wherein nucleotide sequence of the second nucleotide is selected from the group consisting of SEQ ID NOs: 1-6456.

[0056] There is additionally provided in accordance with another preferred embodiment of the present invention a bioinformatically detectable oligonucleotide having a nucleotide sequence selected from the group consisting of SEQ ID NOs: 1-6456.

[0057] There is moreover provided in accordance with another preferred embodiment of the present invention a bioinformatically detectable isolated oligonucleotide which anneals to a portion of a mRNA transcript of a target gene associated with Escherichia coli CFT073 infection, wherein binding of the oligonucleotide to the mRNA transcript represses expression of the target gene, and wherein the oligonucleotide has at least 80% sequence identity with a nucleotide sequence selected from the group consisting of: (a) a sequence selected from the group consisting of SEQ ID NOs: 6 and 7044-8222, and (b) the complement of a sequence selected from the group consisting of SEQ ID NOs: 19991 and 18424-21435.

[0058] There is further provided in accordance with another preferred embodiment of the present invention a bioinformatically detectable first oligonucleotide which is a portion of a mRNA transcript of a target gene associated with Escherichia coli CFT073, and anneals to a second oligonucleotide that is endogenously processed from a hairpin precursor, wherein binding of the first oligonucleotide to the second oligonucleotide represses expression of the target gene, and wherein nucleotide sequence of the second nucleotide is selected from the group consisting of SEQ ID NOs: 6 and 7044-8222.

[0059] There is still further provided in accordance with another preferred embodiment of the present invention a bioinformatically detectable isolated oligonucleotide which anneals to a portion of a mRNA transcript of a target gene associated with Mycobacterium avium subsp. paratuberculosis infection, wherein binding of the oligonucleotide to the mRNA transcript represses expression of the target gene, and wherein the oligonucleotide has at least 80% sequence identity with a nucleotide sequence selected from the group consisting of: (a) a sequence selected from the group consisting of SEQ ID NOs: 1, 2, 3, 4, 5 and 8468-10252, and (b) the complement of a sequence selected from the group consisting of SEQ ID NOs: 24070, 24503, 24604, 24799, 24951 and 21948-25640.

[0060] There is additionally provided in accordance with another preferred embodiment of the present invention a bioinformatically detectable first oligonucleotide which is a portion of a mRNA transcript of a target gene associated with Mycobacterium avium subsp. paratuberculosis, and anneals to a second oligonucleotide that is endogenously processed from a hairpin precursor, wherein binding of the first oligonucleotide to the second oligonucleotide represses expression of the target gene, and wherein nucleotide sequence of the second nucleotide is selected from the group consisting of SEQ ID NOs: 1, 2, 3, 4, 5 and 8468-10252.

[0061] There is moreover provided in accordance with another preferred embodiment of the present invention a bioinformatically detectable isolated oligonucleotide which anneals to a portion of a mRNA transcript of a target gene associated with Mycobacterium bovis subsp bovis AF2122/97 infection, wherein binding of the oligonucleotide to the mRNA transcript represses expression of the target gene, and wherein the oligonucleotide has at least 80% sequence identity with a nucleotide sequence selected from the group consisting of: (a) a sequence selected from the group consisting of SEQ ID NOs: 1, 2, 3, 4, 5 and 10253-11953, and (b) the complement of a sequence selected from the group consisting of SEQ ID NOs: 26741, 27115, 27315, 27443, 27664, 28350 and 25641-29147.

[0062] There is further provided in accordance with another preferred embodiment of the present invention a bioinformatically detectable first oligonucleotide which is a portion of a mRNA transcript of a target gene associated with Mycobacterium bovis subsp bovis AF2122/97, and anneals to a second oligonucleotide that is endogenously processed from a hairpin precursor, wherein binding of the first oligonucleotide to the second oligonucleotide represses expression of the target gene, and wherein nucleotide sequence of the second nucleotide is selected from the group consisting of SEQ ID NOs: 1, 2, 3, 4, 5 and 10253-11953.

[0063] There is still further provided in accordance with another preferred embodiment of the present invention a bioinformatically detectable isolated oligonucleotide which anneals to a portion of a mRNA transcript of a target gene associated with Mycobacterium tuberculosis CDC1551 infection, wherein binding of the oligonucleotide to the mRNA transcript represses expression of the target gene, and wherein the oligonucleotide has at least 80% sequence identity with a nucleotide sequence selected from the group consisting of: (a) a sequence selected from the group consisting of SEQ ID NOs: 1, 2, 3, 4, 5 and 12752-14275, and (b) the complement of a sequence selected from the group consisting of SEQ ID NOs: 32492, 33020, 33133, 33366, 33675 and 30886-33928.

[0064] There is additionally provided in accordance with another preferred embodiment of the present invention a bioinformatically detectable first oligonucleotide which is a portion of a mRNA transcript of a target gene associated with Mycobacterium tuberculosis CDC1551, and anneals to a second oligonucleotide that is endogenously processed from a hairpin precursor, wherein binding of the first oligonucleotide to the second oligonucleotide represses expression of the target gene, and wherein nucleotide sequence of the second nucleotide is selected from the group consisting of SEQ ID NOs: 1, 2, 3, 4, 5 and 12752-14275.

[0065] There is moreover provided in accordance with another preferred embodiment of the present invention a method for bioinformatic detection of microRNA oligonucleotides, the method including: bioinformatically detecting a hairpin shaped precursor oligonucleotide, bioinformatically detecting an oligonucleotide which is endogenously processed from the hairpin shaped precursor oligonucleotide, and bioinformatically detecting a target gene of the oligonucleotide wherein the oligonucleotide anneals to at least one portion of a mRNA transcript of the target gene, and wherein the binding represses expression of the target gene, and the target gene is associated with a disease.

### BRIEF DESCRIPTION OF DRAWINGS

[0066] FIG. 1 is a simplified diagram illustrating a mode by which oligonucleotide of a novel group of oligonucleotides of the present invention modulates expression of known target genes;

[0067] FIG. 2 is a simplified block diagram illustrating a bioinformatic oligonucleotide detection system capable of detecting oligonucleotides of the novel group of oligonucleotides of the present invention, which system is constructed and operative in accordance with a preferred embodiment of the present invention;

[0068] FIG. 3 is a simplified flowchart illustrating operation of a mechanism for training of a computer system to recognize the novel oligonucleotides of the present invention, which mechanism is constructed and operative in accordance with a preferred embodiment of the present invention;

[0069] FIG. 4A is a simplified block diagram of a non-coding genomic sequence detector constructed and operative in accordance with a preferred embodiment of the present invention;

[0070] FIG. 4B is a simplified flowchart illustrating operation of a non-coding genomic sequence detector constructed and operative in accordance with a preferred embodiment of the present invention;

[0071] FIG. 5A is a simplified block diagram of a hairpin detector constructed and operative in accordance with a preferred embodiment of the present invention;

[0072] FIG. 5B is a simplified flowchart illustrating operation of a hairpin detector constructed and operative in accordance with a preferred embodiment of the present invention;

[0073] FIG. 6A is a simplified block diagram of a dicer-cut location detector constructed and operative in accordance with a preferred embodiment of the present invention;

[0074] FIG. 6B is a simplified flowchart illustrating training of a dicer-cut location detector constructed and operative in accordance with a preferred embodiment of the present invention;

[0075] FIG. 6C is a simplified flowchart illustrating operation of a dicer-cut location detector constructed and operative in accordance with a preferred embodiment of the present invention;

[0076] FIG. 7A is a simplified block diagram of a target gene binding-site detector constructed and operative in accordance with a preferred embodiment of the present invention;

[0077] FIG. 7B is a simplified flowchart illustrating operation of a target gene binding-site detector constructed and operative in accordance with a preferred embodiment of the present invention;

[0078] FIG. 8 is a simplified flowchart illustrating operation of a function & utility analyzer constructed and operative in accordance with a preferred embodiment of the present invention;

[0079] FIG. 9 is a simplified diagram describing a novel bioinformatically detected group of regulatory polynucleotides, referred to here as Genomic Record (GR) polynucleotides, each of which encodes an ‘operon-like’ cluster of novel miRNA-like oligonucleotides, which in turn modulate expression of one or more target genes;

[0080] FIG. 10 is a block diagram illustrating different utilities of novel oligonucleotides and novel operon-like polynucleotides, both of the present invention;

[0081] FIGS. 11A and 11B are simplified diagrams, which when taken together illustrate a mode of oligonucleotide therapy applicable to novel oligonucleotides of the present invention;

[0082] FIG. 12A is a histogram representing the distribution of known miRNA oligonucleotides and that of predicted miRNA-like hairpin structures extracted from expressed genome sequences with respect to their hairpin detector score;

[0083] FIG. 12B is a table summarizing laboratory validation results which validate efficacy of a bioinformatic oligonucleotide detection system constructed and operative in accordance with a preferred embodiment of the present invention;

[0084] FIG. 13A and FIG. 13B are a picture and a summary table of laboratory results validating the expression of novel human oligonucleotides detected by a bioinformatic oligonucleotide detection engine constructed and operative in accordance with a preferred embodiment of the present invention, thereby validating the efficacy of the oligonucleotide detection engine of the present invention;

[0085] FIG. 14A is a schematic representation of an “operon-like” cluster of novel human hairpin sequences detected bioinformatically by a bioinformatic oligonucleotide detection engine constructed and operative in accordance with a preferred embodiment of the present invention, and non-GAM hairpin useful as negative controls thereto;

[0086] FIG. 14B is a schematic representation of secondary folding of hairpins of the operon-like cluster of FIG. 14A;

[0087] FIG. 14C is a picture of laboratory results demonstrating expression of novel oligonucleotides of FIGS. 14A and 14B, and lack of expression of the negative controls, thereby validating efficacy of bioinformatic detection of GAM oligonucleotides and GR polynucleotides detected by a bioinformatic oligonucleotide detection engine, constructed and operative in accordance with a preferred embodiment of the present invention;

[0088] FIG. 15A is an annotated sequence of EST72223 comprising known human miRNA oligonucleotide MIR98 and novel human oligonucleotide GAM25 PRECURSOR detected by the oligonucleotide detection system of the present invention; and

[0089] FIGS. 15B, 15C and 15D are pictures of laboratory results demonstrating laboratory confirmation of expression of known human oligonucleotide MIR98 and of novel bioinformatically detected human GAM25 RNA respectively, both of FIG. 15A, thus validating the bioinformatic oligonucleotide detection system of the present invention;

### BRIEF DESCRIPTION OF SEQUENCES

[0090] A Sequence Listing of genomic sequences of the present invention designated SEQ ID NO:1 through SEQ ID: 59824 is attached to this application, and is hereby incorporated herein. The genomic listing comprises the following nucleotide sequences: nucleotide sequences of 6444 GAM precursors of respective novel oligonucleotides of the present invention; nucleotide sequences of 6456 GAM RNA oligonucleotides of respective novel oligonucleotides of the present invention; and nucleotide sequences of 13640 target gene binding sites of respective novel oligonucleotides of the present invention.

### DETAILED DESCRIPTION

[0091] Reference is now made to FIG. 1, which is a simplified diagram describing a plurality of novel bioinformatically detected oligonucleotide of the present invention referred to here as Genomic Address Messenger (GAM) oligonucleotide, which modulates expression of respective target genes whose function and utility is known in the art.

[0092] GAM is a novel bioinformatically detectable regulatory, non protein coding, microRNA (miRNA)-like oligonucleotide. The method by which GAM is detected is described with additional reference to FIGS. 1-8.

[0093] GAM PRECURSOR is preferably encoded by a bacterial genome. Alternatively or additionally GAM PRECURSOR is preferably encoded by the human genome. GAM TARGET GENE is a gene encoded by the human genome.

[0094] GAM PRECURSOR encodes a GAM PRECURSOR RNA. Similar to other miRNA oligonucleotides GAM PRECURSOR RNA does not encode a protein.

[0095] GAM PRECURSOR RNA folds onto itself, forming GAM FOLDED PRECURSOR RNA which has a two-dimensional ‘hairpin structure’. As is well known in the art, this ‘hairpin structure’, is typical of RNA encoded by known miRNA oligonucleotides, and is due to the fact that the nucleotide sequence of the first half of the RNA encoded by a miRNA oligonucleotide is a fully or partially complementary sequence of the nucleotide sequence of the second half thereof. By complementary is meant a sequence which is reversed and wherein each nucleotide is replaced by a complementary nucleotide, as is well known in the art (e.g. ATGGC is the complementary sequence of GCCAT). An enzyme complex designated DICER COMPLEX, ‘dices’ the GAM FOLDED PRECURSOR RNA yielding a GAM RNA in the form of a single stranded ˜22 nt long RNA segment. As is known in the art, ‘dicing’ of a hairpin structured RNA precursor product to yield a short ˜22 nt RNA segment is catalyzed by an enzyme complex Dicer RNaseIII together with other necessary proteins.

[0096] GAM TARGET GENE encodes a corresponding messenger RNA, GAM TARGET RNA. Each of the GAM TARGET RNAs of the present invention comprises three regions, as is typical of mRNA of a protein coding gene: a 5 untranslated region, a protein coding region and a 3′ untranslated region, designated 5′UTR, PROTEIN CODING and 3′UTR respectively.

[0097] GAM RNA binds complementarily to one or more target binding sites located in untranslated regions of each of the GAM TARGET RNAs of the present invention. This complementary binding is due to the fact that the nucleotide sequence of GAM RNA is a partial or fully complementary sequence of the nucleotide sequence of each of the target binding sites. As an illustration, FIG. 1 shows three such target binding sites, designated BINDING SITE I, BINDING SITE II and BINDING SITE III respectively. It is appreciated that the number of target binding sites shown in FIG. 1 is only illustrative and that any suitable number of target binding sites may be present. It is further appreciated that although FIG. 1 shows target binding sites only in the 3′UTR region these target binding sites may be located instead in the 5′UTR region or in both 3′UTR and 5′UTR regions.

[0098] The complementary binding of GAM RNA to target binding sites on GAM TARGET RNA, such as BINDING SITE I, BINDING SITE II and BINDING SITE III, inhibits translation of each of the GAM TARGET RNAs of the present invention into GAM TARGET PROTEIN, which is shown surrounded by a broken line.

[0099] It is appreciated that GAM TARGET GENE in fact represents a plurality of GAM target genes. The mRNA of each one of this plurality of GAM target genes comprises one or more target binding sites, each having a nucleotide sequence which is at least partly complementary to GAM RNA and which when bound by GAM RNA causes inhibition of translation of the GAM target mRNA into a corresponding GAM target protein.

[0100] The mechanism of the translational inhibition exerted by GAM RNA on one or more GAM TARGET GENEs may be similar or identical to the known mechanism of translational inhibition exerted by known miRNA oligonucleotides.

[0101] Nucleotide sequences of each of a plurality of GAM oligonucleotides described by FIG. 1 and their respective genomic sources and genomic locations are set forth in Tables 1-3, hereby incorporated herein.

[0102] Nucleotide sequences of GAM PRECURSOR RNAs, and a schematic representation of a predicted secondary folding of GAM FOLDED PRECURSOR RNAs, of each of a plurality of GAM oligonucleotides described by FIG. 1 are set forth in Table 4, hereby incorporated herein.

[0103] Nucleotide sequences of diced’ GAM RNAs of each of a plurality of GAM oligonucleotides described by FIG. 1 are set forth in Table 5, hereby incorporated herein.

[0104] Nucleotide sequences of target binding sites, such as BINDING SITE I, BINDING SITE II and BINDING SITE III found on GAM TARGET RNAs of each of a plurality of GAM oligonucleotides described by FIG. 1, and a schematic representation of the complementarity of each of these target binding sites to each of a plurality of GAM RNAs described by FIG. 1 are set forth in Tables 6-7, hereby incorporated herein.

[0105] It is appreciated that specific functions and accordingly utilities of each of a plurality of GAM oligonucleotides described by FIG. 1 are correlated with, and may be deduced from the identity of the GAM TARGET GENEs inhibited thereby, and whose functions are set forth in Table 8, hereby incorporated herein.

[0106] Studies documenting well known correlations between each of a plurality of GAM TARGET GENEs of the GAM oligonucleotides of FIG. 1, and known functions and diseases are listed in Table 9, hereby incorporated herein.

[0107] The present invention discloses a novel group of bacterial and human oligonucleotides, belonging to the miRNA-like oligonucleotides group, here termed GAM oligonucleotides, for which a specific complementary binding has been determined bioinformatically.

[0108] Reference is now made to FIG. 2 which is a simplified block diagram illustrating a bioinformatic oligonucleotide detection system and method constructed and operative in accordance with a preferred embodiment of the present invention.

[0109] An important feature of the present invention is a BIOINFORMATIC OLIGONUCLEOTIDE DETECTION ENGINE 100, which is capable of bioinformatically detecting oligonucleotides of the present invention.

[0110] The functionality of the BIOINFORMATIC OLIGONUCLEOTIDE DETECTION ENGINE 100 includes receiving EXPRESSED RNA DATA 102, SEQUENCED DNA DATA 104, and PROTEIN FUNCTION DATA 106; performing a complex process of analysis of this data as elaborated hereinbelow, and based on this analysis provides information, designated by reference numeral 108, identifying and describing features of novel oligonucleotides.

[0111] EXPRESSED RNA DATA 102 comprises published expressed sequence tags (EST) data, published mRNA data, as well as other published RNA data. SEQUENCED DNA DATA 104 comprises alphanumeric data representing genomic sequences and preferably including annotations such as information indicating the location of known protein coding regions relative to the genomic sequences.

[0112] PROTEIN FUNCTION DATA 106 comprises information from scientific publications e.g. physiological functions of known proteins and their connection, involvement and possible utility in treatment and diagnosis of various diseases.

[0113] EXPRESSED RNA DATA 102 and SEQUENCED DNA DATA 104 may preferably be obtained from data published by the National Center for Biotechnology Information (NCBI) at the National Institute of Health (NIH) (Jenuth, J. P. (2000). Methods Mol. Biol. 132:301-312 (2000), herein incorporated by reference) as well as from various other published data sources. PROTEIN FUNCTION DATA 106 may preferably be obtained from any one of numerous relevant published data sources, such as the Online Mendelian Inherited Disease In Man (OMIM™, Hamosh et al., Nucleic Acids Res. 30: 52-55 (2002)) database developed by John Hopkins University, and also published by NCBI (2000).

[0114] Prior to or during actual detection of BIOINFORMATICALLY DETECTED GROUP OF NOVEL OLIGONUCLEOTIDES 108 by the BIOINFORMATIC OLIGONUCLEOTIDE DETECTION ENGINE 100, BIOINFORMATIC OLIGONUCLEOTIDE DETECTION ENGINE TRAINING & VALIDATION FUNCTIONALITY 110 is operative. This functionality uses one or more known miRNA oligonucleotides as a training set to train the BIOINFORMATIC OLIGONUCLEOTIDE DETECTION ENGINE 100 to bioinformatically recognize miRNA-like oligonucleotides, and their respective potential target binding sites. BIOINFORMATIC OLIGONUCLEOTIDE DETECTION ENGINE TRAINING &VALIDATION FUNCTIONALITY 110 is further described hereinbelow with reference to FIG. 3.

[0115] The BIOINFORMATIC OLIGONUCLEOTIDE DETECTION ENGINE 100 preferably comprises several modules which are preferably activated sequentially, and are described as follows:

[0116] A NON-CODING GENOMIC SEQUENCE DETECTOR 112 operative to bioinformatically detect non-protein coding genomic sequences. The NON-CODING GENOMIC SEQUENCE DETECTOR 112 is further described herein below with reference to FIGS. 4A and 4B.

[0117] A HAIRPIN DETECTOR 114 operative to bioinformatically detect genomic ‘hairpin-shaped’ sequences, similar to GAM FOLDED PRECURSOR RNA (FIG. 1). The HAIRPIN DETECTOR 114 is further described herein below with reference to FIGS. 5A and 5B.

[0118] A DICER-CUT LOCATION DETECTOR 116 operative to bioinformatically detect the location on a GAM FOLDED PRECURSOR RNA which is enzymatically cut by DICER COMPLEX (FIG. 1), yielding diced GAM RNA. The DICER-CUT LOCATION DETECTOR 116 is further described herein below with reference to FIGS. 6A-6C.

[0119] A TARGET GENE BINDING-SITE DETECTOR 118 operative to bioinformatically detect target genes having binding sites, the nucleotide sequence of which is partially complementary to that of a given genomic sequence, such as a nucleotide sequence cut by DICER COMPLEX. The TARGET GENE BINDING-SITE DETECTOR 118 is further described hereinbelow with reference to FIGS. 7A and 7B.

[0120] A FUNCTION & UTILITY ANALYZER 120 operative to analyze the function and utility of target genes in order to identify target genes which have a significant clinical function and utility. The FUNCTION & UTILITY ANALYZER 120 is further described hereinbelow with reference to FIG. 8.

[0121] According to a preferred embodiment of the present invention the engine 100 may employ a cluster of 40 PCs (XEON®, 2.8 GHz, with 80 GB storage each), connected by Ethernet to 8 servers (2-CPU, XEON™ 1.2-2.2 GHz, with ˜200 GB storage each), combined with an 8-processor server (8-CPU, Xeon 550 Mhz w/8 GB RAM) connected via 2 HBA fiber-channels to an EMC CLARIION™ 100-disks, 3.6 Terabyte storage device. A preferred embodiment of the present invention may also preferably comprise software which utilizes a commercial database software program, such as MICROSOFT™ SQL Server 2000. It is appreciated that the above mentioned hardware configuration is not meant to be limiting, and is given as an illustration only. The present invention may be implemented in a wide variety of hardware and software configurations.

[0122] The present invention discloses 6444 novel oligonucleotides of the GAM group of oligonucleotides, which have been detected bioinformatically and 726 novel polynucleotides of the GR group of polynucleotides, which have been detected bioinformatically. Laboratory confirmation of bioinformatically predicted oligonucleotides of the GAM group of oligonucleotides, and several bioinformatically predicted polynucleotides of the GR group of polynucleotides, is described hereinbelow with reference to FIGS. 12-15D.

[0123] Reference is now made to FIG. 3 which is a simplified flowchart illustrating operation of a preferred embodiment of the BIOINFORMATIC OLIGONUCLEOTIDE DETECTION ENGINE TRAINING &VALIDATION FUNCTIONALITY 110 described hereinabove with reference to FIG. 2.

[0124] BIOINFORMATIC OLIGONUCLEOTIDE DETECTION ENGINE TRAINING & VALIDATION FUNCTIONALITY 110 begins by training the BIOINFORMATIC OLIGONUCLEOTIDE DETECTION ENGINE 100 (FIG. 2) to recognize one or more known miRNA oligonucleotides, as designated by reference numeral 122. This training step comprises HAIRPIN DETECTOR TRAINING & VALIDATION FUNCTIONALITY 124, further described hereinbelow with reference to FIG. 5A, DICER-CUT LOCATION DETECTOR TRAINING & VALIDATION FUNCTIONALITY 126, further described hereinbelow with reference to FIGS. 6A and 6B, and TARGET GENE BINDING-SITE DETECTOR TRAINING & VALIDATION FUNCTIONALITY 128, further described hereinbelow with reference to FIG. 7A.

[0125] Next, the BIOINFORMATIC OLIGONUCLEOTIDE DETECTION ENGINE TRAINING & VALIDATION FUNCTIONALITY 110 is operative bioinformatically detect novel oligonucleotides, using BIOINFORMATIC OLIGONUCLEOTIDE DETECTION ENGINE 100 (FIG. 2), as designated by reference numeral 130. Wet lab experiments are preferably conducted in order to validate expression and preferably function of some samples of the novel oligonucleotides detected by the BIOINFORMATIC OLIGONUCLEOTIDE DETECTION ENGINE 100, as designated by reference numeral 132. FIGS. 13A-15D illustrate examples of wet-lab validation of sample novel human oligonucleotides bioinformatically detected in accordance with a preferred embodiment of the present invention.

[0126] Reference is now made to FIG. 4A which is a simplified block diagram of a preferred implementation of the NON-CODING GENOMIC SEQUENCE DETECTOR 112 described hereinabove with reference to FIG. 2. The NON-PROTEIN CODING GENOMIC SEQUENCE DETECTOR 112 preferably receives at least two types of published genomic data: EXPRESSED RNA DATA 102 and SEQUENCED DNA DATA 104. The EXPRESSED RNA DATA 102 may include, inter alia, EST data, EST clusters data, EST genome alignment data and mRNA data. Sources for EXPRESSED RNA DATA 102 include NCBI dbEST, NCBI UniGene clusters and mapping data, and TIGR gene indices (Kirkness F. and Kerlavage, A. R., Methods Mol. Biol. 69:261-268 (1997)). SEQUENCED DNA DATA 104 may include sequence data (FASTA format files), and feature annotations (GenBank file format) mainly from NCBI databases. Based on the above mentioned input data, the NON-PROTEIN CODING GENOMIC SEQUENCE DETECTOR 112 produces a plurality of NON-PROTEIN CODING GENOMIC SEQUENCES 136. Preferred operation of the NON-PROTEIN CODING GENOMIC SEQUENCE DETECTOR 112 is described hereinbelow with reference to FIG. 4B.

[0127] Reference is now made to FIG. 4B which is a simplified flowchart illustrating a preferred operation of the NON-CODING GENOMIC SEQUENCE DETECTOR 112 of FIG. 2. Detection of NON-PROTEIN CODING GENOMIC SEQUENCES 136, generally preferably progresses along one of the following two paths:

[0128] A first path for detecting NON-PROTEIN CODING GENOMIC SEQUENCES 136 (FIG. 4A) begins with receipt of a plurality of known RNA sequences, such as EST data. Each RNA sequence is first compared with known protein-coding DNA sequences, in order to select only those RNA sequences which are non-protein coding, i.e. intergenic or intronic sequences. This can preferably be performed by using one of many alignment algorithms known in the art, such as BLAST (Altschul et al., J. Mol. Biol. 215:403-410 (1990)). This sequence comparison preferably also provides localization of the RNA sequence on the DNA sequences.

[0129] Alternatively, selection of non-protein coding RNA sequences and their localization on the DNA sequences can be performed by using publicly available EST cluster data and genomic mapping databases, such as the UNIGENE database published by NCBI or the TIGR database. Such databases, map expressed RNA sequences to DNA sequences encoding them, find the correct orientation of EST sequences, and indicate mapping of ESTs to protein coding DNA regions, as is well known in the art. Public databases, such as TIGR, may also be used to map an EST to a cluster of ESTs, known in the art as Tentative Human Consensus and assumed to be expressed as one segment. Publicly available genome annotation databases, such as NCBIs GenBank, may also be used to deduce expressed intronic sequences.

[0130] Optionally, an attempt may be made to “expand” the non-protein RNA sequences thus found, by searching for transcription start and end signals, respectively upstream and downstream of the location of the RNA on the DNA, as is well known in the art.

[0131] A second path for detecting NON-PROTEIN CODING GENOMIC SEQUENCES 136 (FIG. 4A) begins with receipt of DNA sequences. The DNA sequences are parsed into non protein coding sequences, using published DNA annotation data, by extracting those DNA sequences which are between known protein coding sequences. Next, transcription start and end signals are sought. If such signals are found, and depending on their robustness, probable expressed non-protein coding genomic sequences are obtained. Such approach is especially useful for identifying novel GAM oligonucleotides which are found in proximity to other known miRNA oligonucleotides, or other wet-lab validated GAM oligonucleotides. Since, as described hereinbelow with reference to FIG. 9, GAM oligonucleotides are frequently found in clusters; sequences located near known miRNA oligonucleotides are more likely to contain novel GAM oligonucleotides. Optionally, sequence orthology, i.e. sequence conservation in an evolutionary related species, may be used to select genomic sequences having a relatively high probability of containing expressed novel GAM oligonucleotides. It is appreciated that in detecting non-human GAM oligonucleotides of the present invention the BIOINFORMATIC OLIGONUCLEOTIDE DETECTION ENGINE 100 utilizes the input genomic sequences, without filtering protein coding regions detected by the NON-CODING GENOMIC SEQUENCE DETECTOR 112, hence NON-PROTEIN CODING GENOMIC SEQUENCES 136 refers to GENOMIC SEQUENCES only.

[0132] Reference is now made to FIG. 5A which is a simplified block diagram of a preferred implementation of the HAIRPIN DETECTOR 114 described hereinabove with reference to FIG. 2.

[0133] The goal of the HAIRPIN DETECTOR 114 is to detect hairpin-shaped genomic sequences, similar to those of known miRNA oligonucleotides. A hairpin-shaped genomic sequence is a genomic sequence, having a first half which is at least partially complementary to a second half thereof, which causes the halves to folds onto themselves, thereby forming a hairpin structure, as mentioned hereinabove with reference to FIG. 1.

[0134] The HAIRPIN DETECTOR 114 (FIG. 2) receives a plurality of NON-PROTEIN CODING GENOMIC SEQUENCES 136 (FIG. 4A). Following operation of HAIRPIN DETECTOR TRAINING & VALIDATION FUNCTIONALITY 124 (FIG. 3), the HAIRPIN DETECTOR 114 is operative to detect and output hairpin-shaped sequences, which are found in the NON-PROTEIN CODING GENOMIC SEQUENCES 136. The hairpin-shaped sequences detected by the HAIRPIN DETECTOR 114 are designated HAIRPINS STRUCTURES ON GENOMIC SEQUENCES 138. A preferred mode of operation of the HAIRPIN DETECTOR 114 is described hereinbelow with reference to FIG. 5B.

[0135] HAIRPIN DETECTOR TRAINING & VALIDATION FUNCTIONALITY 124 includes an iterative process of applying the HAIRPIN DETECTOR 114 to known hairpin shaped miRNA precursor sequences, calibrating the HAIRPIN DETECTOR 114 such that it identifies a training set of known hairpin-shaped miRNA precursor sequences, as well as other similarly hairpin-shaped sequences. In a preferred embodiment of the present invention, the HAIRPIN DETECTOR TRAINING & VALIDATION FUNCTIONALITY 124 trains the HAIRPIN DETECTOR 114 and validates each of the steps of operation thereof described hereinbelow with reference to FIG. 5B

[0136] The HAIRPIN DETECTOR TRAINING & VALIDATION FUNCTIONALITY 124 preferably uses two sets of data: the aforesaid training set of known hairpin-shaped miRNA precursor sequences, such as hairpin-shaped miRNA precursor sequences of 440 miRNA oligonucleotides of H. sapiens, M. musculus, C. elegans, C. Brigssae and D. Melanogaster, annotated in the RFAM database (Griffiths-Jones 2003), and a background set of about 1000 hairpin-shaped sequences found in expressed non-protein coding human genomic sequences. The background set is expected to comprise some valid, previously undetected hairpin-shaped miRNA-like precursor sequences, and many hairpin-shaped sequences which are not hairpin-shaped miRNA-like precursors.

[0137] In a preferred embodiment of the present invention the efficacy of the HAIRPIN DETECTOR 114 (FIG. 2) is confirmed. For example, when a similarity threshold is chosen such that 87% of the known hairpin-shaped miRNA precursors are successfully predicted, only 21.8% of the 1000 background set of hairpin-shaped sequences are predicted to be hairpin-shaped miRNA-like precursors.

[0138] Reference is now made to FIG. 5B which is a simplified flowchart illustrating preferred operation of the HAIRPIN DETECTOR 114 of FIG. 2. The HAIRPIN DETECTOR 114 preferably initially uses a secondary structure folding algorithm based on free-energy minimization, such as the MFOLD algorithm, described in Mathews et al. J. Mol. Biol. 288:911-940 (1999) and Zuker, M. Nucleic Acids Res. 31: 3406-3415 (2003), the disclosure of which is hereby incorporated by reference. This algorithm is operative to calculate probable secondary structure folding patterns of the NON-PROTEIN CODING GENOMIC SEQUENCES 136 (FIG. 4A) as well as the free-energy of each of these probable secondary folding patterns. The secondary structure folding algorithm, such as the MFOLD algorithm (Mathews, 1997; Zuker 2003), typically provides a listing of the base-pairing of the folded shape, i.e. a listing of each pair of connected nucleotides in the sequence.

[0139] Next, the HAIRPIN DETECTOR 114 analyzes the results of the secondary structure folding patterns, in order to determine the presence and location of hairpin folding structures. The goal of this second step is to assess the base-pairing listing provided by the secondary structure folding algorithm, in order to determine whether the base-pairing listing describes one or more hairpin type bonding pattern. Preferably, sequence segment corresponding to a hairpin structure is then separately analyzed by the secondary structure folding algorithm in order to determine its exact folding pattern and free-energy.

[0140] The HAIRPIN DETECTOR 114 then assesses the hairpin structures found by the previous step, comparing them to hairpin structures of known miRNA precursors, using various characteristic hairpin structure features such as its free-energy and its thermodynamic stability, the amount and type of mismatched nucleotides and the existence of sequence repeat-elements, number of mismatched nucleotides in positions 18-22 counting from loop, and Percent of G nucleotide. Only hairpins that bear statistically significant resemblance to the training set of hairpin structures of known miRNA precursors, according to the abovementioned parameters, are accepted.

[0141] In a preferred embodiment of the present invention, similarity to the training set of hairpin structures of known miRNA precursors is determined using a “similarity score” which is calculated using a multiplicity of terms, where each term is a function of one of the abovementioned hairpin structure features. The parameters of each function are found heuristically from the set of hairpin structures of known miRNA precursors, as described hereinabove with reference to HAIRPIN DETECTOR TRAINING & VALIDATION FUNCTIONALITY 124 (FIG. 3). The selection of the features and their function parameters is optimized so as to achieve maximized separation between the distribution of similarity scores validated miRNA-precursor hairpin structures, and the distribution of similarity scores of hairpin structures detected in the background set mentioned hereinabove with reference to FIG. 5B.

[0142] In an alternative preferred embodiment of the present invention, the step described in the preceding paragraph may be split into two stages. A first stage implements a simplified scoring method, typically based on thresholding a subset of the hairpin structure features described hereinabove, and may employ a minimum threshold for hairpin structure length and a maximum threshold for free energy. A second stage is preferably more stringent, and preferably employs a full calculation of the weighted sum of terms described hereinabove. The second stage preferably is performed only on the subset of hairpin structures that survived the first stage.

[0143] The HAIRPIN DETECTOR 114 also attempts to select hairpin structures whose thermodynamic stability is similar to that of hairpin structures of known miRNA precursors. This may be achieved in various ways. A preferred embodiment of the present invention utilizes the following methodology, preferably comprising three logical steps:

[0144] First, the HAIRPIN DETECTOR 114 attempts to group hairpin structures into “families” of closely related hairpin structures. As is known in the art, a secondary structure folding algorithm typically provides multiple alternative folding patterns, for a given genomic sequence and indicates the free energy of each alternative folding pattern. It is a particular feature of the present invention that the HAIRPIN DETECTOR 114 preferably assesses the various hairpin structures appearing in the various alternative folding patterns and groups' hairpin structures which appear at identical or similar sequence locations in various alternative folding patterns into common sequence location based “families” of hairpins. For example, all hairpin structures whose center is within 7 nucleotides of each other may be grouped into a family”. Hairpin structures may also be grouped into a family” if their nucleotide sequences are identical or overlap to a predetermined degree.

[0145] It is also a particular feature of the present invention that the hairpin structure “families” are assessed in order to select only those families which represent hairpin structures that are as thermodynamically stable as those of hairpin structures of known miRNA precursors. Preferably only families which are represented in at least a selected majority of the alternative secondary structure folding patterns, typically 65%, 80% or 100% are considered to be sufficiently stable. Our tests suggest that only about 50% of the hairpin structures, predicted by the MFOLD algorithm with default parameters, are members of sufficiently stable families, comparing to about 90% of the hairpin structures that contain known miRNAs. This percent depends on the size of the fraction that was fold. In an alternative embodiment of the present invention we use fractions of size 1000 nts as preferable size. Different embodiment uses other sizes of genomics sequences, more or less strict demand for representation in the alternative secondary structure folding patterns.

[0146] It is an additional particular feature of the present invention that the most suitable hairpin structure is selected from each selected family. For example, a hairpin structure which has the greatest similarity to the hairpin structures appearing in alternative folding patterns of the family may be preferred. Alternatively or additionally, the hairpin structures having relatively low free energy may be preferred.

[0147] Alternatively or additionally considerations of homology to hairpin structures of other organisms and the existence of clusters of thermodynamically stable hairpin structures located adjacent to each other along a sequence may be important in selection of hairpin structures. The tightness of the clusters in terms of their location and the occurrence of both homology and clusters may be of significance.

[0148] Reference is now made to FIGS. 6A-6C which together describe the structure and operation of the DICER-CUT LOCATION DETECTOR 116, described hereinabove with FIG. 2.

[0149] FIG. 6A is a simplified block diagram of a preferred implementation of the DICER-CUT LOCATION DETECTOR 116. The goal of the DICER-CUT LOCATION DETECTOR 116 is to detect the location in which the DICER COMPLEX, described hereinabove with reference to FIG. 1, dices GAM FOLDED PRECURSOR RNA, yielding GAM RNA.

[0150] The DICER-CUT LOCATION DETECTOR 116 therefore receives a plurality of HAIRPIN STRUCTURES ON GENOMIC SEQUENCES 138 (FIG. 5A), and following operation of DICER-CUT LOCATION DETECTOR TRAINING & VALIDATION FUNCTIONALITY 126 (FIG. 3), is operative to detect a plurality of DICER-CUT SEQUENCES FROM HAIRPIN STRUCTURES 140.

[0151] Reference is now made to FIG. 6B which is a simplified flowchart illustrating a preferred implementation of DICER-CUT LOCATION DETECTOR TRAINING & VALIDATION FUNCTIONALITY 126.

[0152] A general goal of the DICER-CUT LOCATION DETECTOR TRAINING & VALIDATION FUNCTIONALITY 126 is to analyze the dicer-cut locations of known diced miRNA on respective hairpin shaped miRNA precursors in order to determine a common pattern in these locations, which can be used to predict dicer cut locations on GAM folded precursor RNAs.

[0153] The dicer-cut locations of known miRNA precursors are obtained and studied. Locations of the 5′ and/or 3′ ends of the known diced miRNAs are preferably represented by their respective distances from the 5′ end of the corresponding hairpin shaped miRNA precursor. Additionally or alternatively, the 5′ and/or 3′ ends of the known diced miRNAs are preferably represented by the relationship between their locations and the locations of one or more nucleotides along the hairpin shaped miRNA precursor. Additionally or alternatively, the 5′ and/or 3′ ends of the known diced miRNAs are preferably represented by the relationship between their locations and the locations of one or more bound nucleotide pairs along the hairpin shaped miRNA precursor. Additionally or alternatively, the 5′ and/or 3′ ends of the known diced miRNAs are preferably represented by the relationship between their locations and the locations of one or more mismatched nucleotide pairs along the hairpin shaped miRNA precursor. Additionally or alternatively, the 5′ and/or 3′ ends of the known diced miRNAs are preferably represented by the relationship between their locations and the locations of one or more unmatched nucleotides along the hairpin shaped miRNA precursor. Additionally or alternatively, locations of the 5′ and/or 3′ ends of the known diced miRNAs are preferably represented by their respective distances from the loop located at the center of the corresponding hairpin shaped miRNA precursor.

[0154] One or more of the foregoing location metrics may be employed in the training and validation functionality. Additionally, metrics related to the nucleotide content of the diced miRNA and/or of the hairpin shaped miRNA precursor may be employed.

[0155] In a preferred embodiment of the present invention, DICER-CUT LOCATION DETECTOR TRAINING & VALIDATION FUNCTIONALITY 126 preferably employs standard machine learning techniques known in the art of machine learning for analysis of existing patterns in a given “training set” of examples. These techniques are capable, to a certain degree, of detecting similar patterns in other, previously unseen examples. Such machine learning techniques include, but are not limited to neural networks, Bayesian networks, Support Vector Machines (SVM), Genetic Algorithms, Markovian modeling, Maximum Likelihood modeling, Nearest Neighbor algorithms, Decision trees and other techniques, as is well known in the art.

[0156] In accordance with one embodiment of the present invention, machine learning predictors, such as a Support Vector Machine (SVM) predictor, are applied to the aforementioned training set and are operative, for example to test every possible nucleotide on a hairpin as a candidate for being the 5′ end or the 3′ end of a diced GAM RNA. More preferred machine learning predictors include predictors based on Nearest Neighbor, Bayesian modeling, and K-nearest-neighbor algorithms. A training set of the known miRNA precursor sequences is preferably used for training multiple separate classifiers or predictors, each of which produces a model for the 5′ and/or 3′ end locations of a diced miRNA with respect to its hairpin precursor. The models take into account one or more of the various miRNA location metrics described above.

[0157] Performance of the resulting predictors, evaluated on the abovementioned validation set of 440 published miRNAs using k-fold cross validation (Mitchell, 1997) with k=3, is found to be as follows: in 70% of known miRNAs 5′-end location is correctly determined by an SVM predictor within up to 2 nucleotides; a Nearest Neighbor (EDIT DISTANCE) predictor achieves 56% accuracy (247/440); a Two-Phased predictor that uses Bayesian modeling (TWO PHASED) achieves 80% accuracy (352/440), when only the first phase is used. When the second phase (strand choice) is implemented by a nave Bayesian model the accuracy is 55% (244/440), and when the K-nearest-neighbor modeling is used for the second phase, 374/440 decision are made and the accuracy is 65% (242/374). A K-nearest-neighbor predictor (FIRST-K) achieves 61% accuracy (268/440). The accuracies of all predictors are considerably higher on top scoring subsets of published miRNA.

[0158] Finally, in order to validate the efficacy and accuracy of the DICER-CUT LOCATION DETECTOR 116, a sample of novel oligonucleotides detected thereby is preferably selected, and validated by wet lab. Laboratory results validating the efficacy of the DICER-CUT LOCATION DETECTOR 116 are described hereinbelow with reference to FIGS. 12-15D.

[0159] Reference is now made to FIG. 6C which is a simplified flowchart illustrating operation of DICER-CUT LOCATION DETECTOR 116 (FIG. 2), constructed and operative in accordance with a preferred embodiment of the present invention. The DICER CUT LOCATION DETECTOR 116 preferably comprises a machine learning computer program module, which is trained to recognize dicer-cut locations on known hairpin-shaped miRNA precursors, and based on this training, is operable to detect dicer-cut locations of novel GAM RNAs (FIG. 1) on GAM FOLDED PRECURSOR RNAs (FIG. 1). In a preferred embodiment of the present invention, the dicer-cut location module preferably utilizes machine learning algorithms, such as known Support Vector Machine (SVM) and more preferably: known Bayesian modeling, Nearest Neighbors, and K-nearest-neighbor algorithms.

[0160] When initially assessing a novel GAM FOLDED PRECURSOR RNA, all 19-24 nucleotide long segments thereof are initially considered as “potential GAM RNAs”, since the dicer-cut location is initially unknown.

[0161] For each such potential GAM RNA, the location of its 5′ end or the locations of its 5′ and 3′ ends are scored by at least one recognition classifier or predictor.

[0162] In a preferred embodiment of the present invention, the DICER-CUT LOCATION DETECTOR 116 (FIG. 2) may use a Support Vector Machine predictor trained on and operating on features such as the following:

[0163] Locations of the 5′ and/or 3′ ends of the known diced miRNAs, which are preferably represented by their respective distances from the 5 end of the corresponding hairpin shaped miRNA precursor. Additionally or alternatively, the 5′ and/or 3′ ends of the known diced miRNAs are preferably represented by the relationship between their locations and the locations of one or more nucleotides along the hairpin shaped miRNA precursor. Additionally or alternatively, the 5′ and/or 3′ ends of the known diced miRNAs are preferably represented by the relationship between their locations and the locations of one or more bound nucleotide pairs along the hairpin shaped miRNA precursor. Additionally or alternatively, the 5′ and/or 3′ ends of the known diced miRNAs are preferably represented by the relationship between their locations and the locations of one or more mismatched nucleotide pairs along the hairpin shaped miRNA precursor. Additionally or alternatively, the 5′ and/or 3′ ends of the known diced miRNAs are preferably represented by the relationship between their locations and the locations of one or more unmatched nucleotides along the hairpin shaped miRNA precursor. Additionally or alternatively, locations of the 5′ and/or 3′ ends of the known diced miRNAs are preferably represented by their respective distances from the loop located at the center of the corresponding hairpin shaped miRNA precursor; and secondarily

[0164] Metrics related to the nucleotide content of the diced miRNA and/or of the hairpin shaped miRNA precursor.

[0165] In another preferred embodiment of the present invention, the DICER-CUT LOCATION DETECTOR 116 (FIG. 2) preferably employs an “EDIT DISTANCE” predictor, which seeks sequences that are similar to those of known miRNAs, utilizing a Nearest Neighbor algorithm, where a similarity metric between two sequences is a variant of the Edit Distance algorithm (Gusfield, 1997). The EDIT DISTANCE predictor is based on an observation that miRNA oligonucleotides tend to form clusters, the members of which show marked sequence similarity.

[0166] In yet another preferred embodiment of the present invention, the DICER-CUT LOCATION DETECTOR 116 (FIG. 2) preferably uses a “TWO PHASE” predictor, which predicts the dicer-cut location in two distinct phases: (a) selecting a double-stranded segment of the GAM FOLDED PRECURSOR RNA (FIG. 1) comprising the GAM RNA by nave Bayesian modeling and (b) detecting which strand of the double-stranded segment contains GAM RNA (FIG. 1) by employing either nave or by K-nearest-neighbor modeling. K-nearest-neighbor modeling is a variant of the ‘FIRST-K’ predictor described hereinbelow, with parameters optimized for this specific task. The ‘TWO PHASE’ predictor may be operated in two modes: either utilizing only the first phase and thereby producing two alternative dicer-cut location predictions, or utilizing both phases and thereby producing only one final dicer-cut location.

[0167] In still another preferred embodiment of the present invention, the DICER-CUT LOCATION DETECTOR 116 preferably uses a “FIRST-K” predictor, which utilizes a K-nearest-neighbor algorithm. The similarity metric between any two sequences is 1−E/L, where L is a parameter, preferably 8-10 and E is the edit distance between the two sequences, taking into account only the first L nucleotides of each sequence. If the K-nearest-neighbor scores of two or more locations on the GAM FOLDED PRECURSOR RNA (FIG. 1) are not significantly different, these locations are further ranked by a Bayesian model, similar to the one described hereinabove.

[0168] The TWO PHASE and FIRST-K predictors preferably are trained on and operate on features such as the following:

[0169] Locations of the 5′ and/or 3′ ends of the known diced miRNAs, which are preferably represented by their respective distances from the 5′ end of the corresponding hairpin shaped miRNA precursor. Additionally or alternatively, the 5′ and/or 3′ ends of the known diced miRNAs are preferably represented by the relationship between their locations and the locations of one or more nucleotides along the hairpin shaped miRNA precursor. Additionally or alternatively, the 5′ and/or 3′ ends of the known diced miRNAs are preferably represented by the relationship between their locations and the locations of one or more bound nucleotide pairs along the hairpin shaped miRNA precursor. Additionally or alternatively, the 5′ and/or 3′ ends of the known diced miRNAs are preferably represented by the relationship between their locations and the locations of one or more mismatched nucleotide pairs along the hairpin shaped miRNA precursor. Additionally or alternatively, the 5′ and/or 3′ ends of the known diced miRNAs are preferably represented by the relationship between their locations and the locations of one or more unmatched nucleotides along the hairpin shaped miRNA precursor. Additionally or alternatively, locations of the 5′ and/or 3′ ends of the known diced miRNAs are preferably represented by their respective distances from the loop located at the center of the corresponding hairpin shaped miRNA precursor; and secondarily Metrics related to the nucleotide content of the diced miRNA and/or of the hairpin shaped miRNA precursor.

[0170] In accordance with an embodiment of the present invention scores of two or more of the abovementioned classifiers or predictors are integrated, yielding an integrated score for each “potential GAM RNA”. As an example, FIG. 6C illustrates integration of scores from two classifiers, a 3′ end recognition classifier and a 5′ end recognition classifier, the scores of which are integrated to yield an integrated score. Most preferably, the INTEGRATED SCORE of FIG. 6C preferably implements a “best-of-breed” approach employing a pair of classifiers and accepting only “potential GAM RNAs” that score highly on one of the above mentioned “EDIT DISTANCE”, or “TWO-PHASE” predictors. In this context, “high scores” means scores which have been demonstrated to have low false positive value when scoring known miRNA oligonucleotides. Alternatively, the INTEGRATED SCORE may be derived from operation of more or less than two classifiers.

[0171] The INTEGRATED SCORE is evaluated as follows: (a) the “potential GAM RNA” having the highest score is preferably taken to be the most probable GAM RNA, and (b) if the integrated score of this most probable GAM RNA is higher than a pre-defined threshold, then the most probable GAM RNA is accepted as a PREDICTED GAM RNA. Preferably, this evaluation technique is not limited to the highest scoring potential GAM RNA.

[0172] As a final optional stage we may filter PREDICTED GAM RNAs with low complexity, which have high probability to be part of repeated element in the DNA (for example ATATATA sequences). For each PREDICTED GAM RNA sequence we count the number of occurrences of each 2 nucleotides combination (AA, AT, AC), we filter out sequences where the sum of the most 2 probable combination is higher then 9. Using this criteria we filter 2% of the known miRNA and around 30% of the PREDICTED GAM RNAs.

[0173] Reference is now made to FIG. 7A which is a simplified block diagram of a preferred implementation of the TARGET GENE BINDING-SITE DETECTOR 118 described hereinabove with reference to FIG. 2. The goal of the TARGET GENE BINDING-SITE DETECTOR 118 is to detect one or more binding sites such as BINDING SITE I, BINDING SITE II and BINDING SITE III (FIG. 1) located in 3′ untranslated regions of the mRNA of a known gene, the nucleotide sequence of which binding sites is partially or fully complementary to a GAM RNA, thereby determining that the above mentioned known gene is a target gene thereof.

[0174] The TARGET GENE BINDING-SITE DETECTOR 118 (FIG. 2) receives a plurality of DICER-CUT SEQUENCES FROM HAIRPIN STRUCTURES 140 (FIG. 6A), and a plurality of POTENTIAL TARGET GENE SEQUENCES 142 which are derived from SEQUENCED DNA DATA 104 (FIG. 2).

[0175] TARGET GENE BINDING-SITE DETECTOR TRAINING & VALIDATION FUNCTIONALITY 128 (FIG. 3) is operative to train the TARGET GENE BINDING-SITE DETECTOR 118 on known miRNAs and their respective target genes and to build a background model for evaluation of a P value for the TARGET GENE BINDING-SITE DETECTOR 118 resultsIt Construct the model by analyzing both heuristically and computationally the results of the TARGET GENE BINDING-SITE DETECTOR 118.

[0176] Following operation of TARGET GENE BINDING-SITE DETECTOR TRAINING & VALIDATION FUNCTIONALITY 128 (FIG. 3), the TARGET GENE BINDING-SITE DETECTOR 118 is operative to detect a plurality of POTENTIAL NOVEL TARGET GENES HAVING BINDING-SITE/S 144 the nucleotide sequence of which is partially or fully complementary to that of each of the plurality of DICER-CUT SEQUENCES FROM HAIRPIN STRUCTURES 140. Preferred operation of the TARGET GENE BINDING-SITE DETECTOR 118 is further described hereinbelow with reference to FIG. 7B.

[0177] Reference is now made to FIG. 7B which is a simplified flowchart illustrating a preferred operation of the TARGET GENE BINDING-SITE DETECTOR 118 of FIG. 2. In a preferred embodiment of the present invention, the TARGET GENE BINDING-SITE DETECTOR 118 employs a match search tool, described hereinbelow, in order to compare the nucleotide sequence of each of the plurality of DICER-CUT SEQUENCES FROM HAIRPIN STRUCTURES 140 (FIG. 6A), to the POTENTIAL TARGET GENE SEQUENCES 142 (FIG. 7A), such as 3 untranslated regions of known mRNAs, in order to find crude potential matches. Alternatively, a sequence comparison algorithm such as BLAST can be used.

[0178] The match search tool compare the DICER-CUT SEQUENCES FROM HAIRPIN STRUCTURES 140 (FIG. 7A) to POTENTIAL TARGET GENE SEQUENCES 142 (FIG. 7A). the methodology of the match search tool is to match Nucleotides 1:8 of DICER-CUT SEQUENCES FROM HAIRPIN STRUCTURES 140 (FIG. 7A) to POTENTIAL TARGET GENE SEQUENCES 142 (FIG. 7A). The results are preferably filtered to allow at most 1 edit distance between the DICER-CUT SEQUENCES FROM HAIRPIN STRUCTURES 140 (FIG. 7A) complementary sequence and POTENTIAL TARGET GENE SEQUENCES 142 (FIG. 7A).

[0179] In a preferred implementation of the match search tool, it first calculates two preprocess data structures: the first, store for every 9 nts sequences all its appearances in the POTENTIAL TARGET GENE SEQUENCES 142 (FIG. 7A).

[0180] The second is a map of all the 8 nts sequence to 9 nts sequences that can be accepted by adding one nucleotide and performing one or less editing actions to the 8 nts complementary sequence. This two data structures help to improve performance and to perform the binding site filtering stage as an integral part of the search. The match search tool in this implementation returns for every DICER-CUT SEQUENCES FROM HAIRPIN STRUCTURES 140 (FIG. 7A all the appearances of the 9 nts sequence in the POTENTIAL TARGET GENE SEQUENCES 142 (FIG. 7A) that are calculated using the second, describe hereinabove, data structure from its first 8 nts. The 9 nts sequences appearances are the potentially 3 of the POTENTIAL TARGET GENE SEQUENCES 142 (FIG. 7A) binding site of each DICER-CUT SEQUENCES FROM HAIRPIN STRUCTURES 140 (FIG. 7A

[0181] Next the binding sites are expanded, and determinations are made whether if nucleotide sequences immediately upstream to the binding sites 3 part matchs with the 3′ end of the DICER-CUT SEQUENCES FROM HAIRPIN STRUCTURES. The alignment of the binding site 5 part is made by the alignment algorithm with specific weighting parameters describes hereinbelow with reference to FIG. 5). Alternatively the alignment can include also the 3 part of the binding site.

[0182] The alignment algorithm (implemented here) with specific weighting parameters. The weighting parameters are based on analyze of known miRNA binding sites (references: Wightman et al. Cell 1993, Moss Cell 1997, Reinhart Nature 2000, Abrahante Developmental Cell 2003 and Lin Developmental Cell 2003, Brennecke Cell 2003, Stark PLOS 2003, lewis et al. Cell 2003). It was heuristically found to best distinguish between known miRNA binding sites and sequences which are known not to be miRNA binding sites.

[0183] According to a preferred embodiment of the present invention a good matching at 5′ end of the miRNA (nucleotides 1-8), and at 3′ end of the miRNA, (the last 9 nucleotides) is required. The matching at 5′ end is crucial for the binding while the 3′ end binding is less important but can compensate on few mismatches at the 5′. The nucleotides at the middle of the miRNA have no punishment for any editing operation (reference: Doench et al. Gene and Development 2004). In this preferred embodiment the alignment of the 5 end of the miRNA (3 of the binding site) is a result of the match search tool, while the middle and 3 miRNA (5 of the binding site) is done by the alignment algorithm. The alignment is a combination of both. Alternatively, the alignment is done for all the miRNA and all the binding site sequence. The alignment algorithm finds the lowest free-energy spatial structure and heuristic constrain that were found to distinct the known binding sites in the best way. The alignment yields 2 scores for 5′ end and 3′ end. Each score represents the inverse of its probability to obtain such or higher score by running random sequences, with 22 nucleotides length and same base composition as known miRNA, with randomly chosen 3 un translated region sequences. The final score is the multiplicity of the two scores.

[0184] The binding site detector, then analyze the spatial structure of the miRNA with all its potential target gene 3 un translated region. It assesses the list of binding sites of each miRNA—Target gene pair with their positions and respective scores. The TARGET GENE BINDING-SITE DETECTOR 118 (FIG. 7A) then uses the fact that Many of the known binding sites are clustered, to evaluate the P value of obtaining cluster of few binding sites on the same target gene 3 un translated region in the following way: It scans different scores threshold, and calculate for each threshold the number and positions of possible binding sites with score above the threshold. It then gets from a preprocess calculated background matrixes, describe hereinbelow, a P value for each threshold and number and positions of binding sites combination. The output score for each miRNA and target gene pair is the minimal P value, normalized with the number of thresholds trying using Bernoulli distribution. A preference of low P value pairs is made.

[0185] As mentioned hereinabove, for each target gene a preprocess calculated background matrixes were build. The matrixes includes rows for each number of miRNA binding site (In the preferred embodiment the matrix include 7 rows for 0 to 6 binding site.), and columns for each different score threshold (In the preferred embodiment the matrix include 5 columns for 5 different threshold). Each matrix cell, corresponding to specific number of binding site and threshold, was set to be the probability to get equal or more binding sites with equal or more score by random sequences with 22 nucleotides length with the same letter distribution as known miRNAs (29.5% T, 24.5% A, 25% G and 21% C). Those probabilities are calculated by running the above procedure for 10000 random sequences. The P value can be estimated as the number of random sequences obeys the matrix cell requirement divided by the total number of random sequences (10000). In the preferred embodiment 2 matrixes are calculated. The P values are of the second matrix are calculated under constrain that at least two of the binding site position are under a heuristically determine constant value. The second matrix values are calculated without this constrain. The TARGET GENE BINDING-SITE DETECTOR uses the second matrix if the binding sites position agree with the constrain, else it uses the first. In an alternative embodiment only one matrix is calculated without any constrain on the binding sites positions.

[0186] Test preformed using the TARGET GENE BINDING-SITE DETECTOR showed that all of the known miRNA target genes are found using this algorithm with a P value of less than 0.5%. Running known miRNA against 3400 potential 3′ UTR of target genes sequences yield on average 32 target genes for each miRNA with P value less than 0.5%, while background sequences, as well as inverse or complement sequence of known miRNA (which preserve their high order sequence statistics) found, as excepted, on average 17 target genes. This reflects the algorithm performance to detect real target genes with 47% accuracy.

[0187] Scoring of all potential binding sites are calculated and P value for obtaining such binding sites list for DICER-CUT SEQUENCE FROM HAIRPIN STRUCTURE and POTENTIAL TARGET GENE SEQUENCE pair is evaluate using the background matrix. In accordance with another preferred embodiment of the present invention, binding sites are searched by a reversed process. Sequences of K (preferably 22) nucleotides of a untranslated regions of a target gene are assessed as potential binding sites. A sequence comparison algorithm, such as BLAST or EDIT DISTANCE varinet, is then used to search elsewhere in the genome for partially or fully complementary sequences which are found in known miRNA oligonucleotides or computationally predicted GAM oligonucleotides. Only complementary sequences, which meet predetermined spatial structure and free energy criteria as described hereinabove, are accepted. Clustered binding sites are strongly preferred and potential binding sites and potential GAM oligonucleotides which occur in evolutionarily conserved genomic sequences are also preferred. Scoring of candidate binding sites takes into account free energy and spatial structure of the binding site complexes, as well as the aforesaid preferences.

[0188] Reference is now made to FIG. 8 which is a simplified flowchart illustrating a preferred operation of the FUNCTION & UTILITY ANALYZER 120 described hereinabove with reference to FIG. 2. The goal of the FUNCTION & UTILITY ANALYZER 120 is to determine if a potential target gene is in fact a valid clinically useful target gene. Since a potential novel GAM oligonucleotide binding a binding site in the UTR of a target gene is understood to inhibit expression of that target gene, and if that target gene is shown to have a valid clinical utility, then in such a case it follows that the potential novel oligonucleotide itself also has a valid useful function which is the opposite of that of the target gene.

[0189] The FUNCTION & UTILITY ANALYZER 120 preferably receives as input a plurality of POTENTIAL NOVEL TARGET GENES HAVING BINDING-SITE/S 144 (FIG. 7A), generated by the TARGET GENE BINDING-SITE DETECTOR 118 (FIG. 2). Each potential oligonucleotide is evaluated as follows: First, the system checks to see if the function of the potential target gene is scientifically well established. Preferably, this can be achieved bioinformatically by searching various published data sources presenting information on known function of proteins. Many such data sources exist and are published as is well known in the art. Next, for those target genes the function of which is scientifically known and is well documented, the system then checks if scientific research data exists which links them to known diseases. For example, a preferred embodiment of the present invention utilizes the OMIM™ (Hamosh et al, 2002) database published by NCBI, which summarizes research publications relating to genes which have been shown to be associated with diseases. Finally, the specific possible utility of the target gene is evaluated. While this process too may be facilitated by bioinformatic means, it might require manual evaluation of published scientific research regarding the target gene, in order to determine the utility of the target gene to the diagnosis and or treatment of specific disease. Only potential novel oligonucleotides, the target genes of which have passed all three examinations, are accepted as novel oligonucleotide.

[0190] Reference is now made to FIG. 9, which is a simplified diagram describing each of a plurality of novel bioinformatically detected regulatory polynucleotide referred to here as Genomic Record (GR) polynucleotide, which encodes an ‘operon-like’ cluster of novel microRNA-like oligonucleotides, each of which in turn modulates expression of at least one target gene; the function and utility of which at least one target gene is known in the art.

[0191] GR PRECURSOR is a novel bioinformatically detected regulatory, non protein coding polynucleotide. The method by which GR PRECURSOR is detected is described hereinabove with additional reference to FIGS. 1-9.

[0192] GR PRECURSOR is preferably encoded by the bacterial genome and contains cluster of novel bacterial oligonucleotides, which preferably binds to a human target genes or to the bacterium self-genes. Alternatively or additionally, GR PRECURSOR is encoded by the human genome and contains cluster of novel human oligonucleotides, which preferably binds to bacterial target genes or to human self-genes.

[0193] GR PRECURSOR encodes GR PRECURSOR RNA, an RNA molecule, typically several hundred to several thousand nucleotides long. GR PRECURSOR RNA folds spatially, forming GR FOLDED PRECURSOR RNA. It is appreciated that GR FOLDED PRECURSOR RNA comprises a plurality of what is known in the art as ‘hairpin’ structures. These ‘hairpin’ structures are due to the fact that the nucleotide sequence of GR PRECURSOR RNA comprises a plurality of segments, the first half of each such segment having a nucleotide sequence which is at least a partial or accurate reverse-complement sequence of the second half thereof, as is well known in the art.

[0194] GR FOLDED PRECURSOR RNA is naturally processed by cellular enzymatic activity into a plurality of separate GAM precursor RNAs, herein schematically represented by GAM1 FOLDED PRECURSOR RNA through GAM3 FOLDED PRECURSOR RNA, each of which GAM folded precursor RNAs being a hairpin shaped RNA segment, corresponding to GAM FOLDED PRECURSOR RNA of FIG. 1.

[0195] The above mentioned GAM folded precursor RNAs are diced by DICER COMPLEX of FIG. 1, yielding respective short RNA segments of about 22 nucleotides in length, schematically represented by GAM1 RNA through GAM3 RNA, each of which GAM RNAs corresponding to GAM RNA of FIG. 1. GAM1 RNA, GAM2 RNA and GAM3 RNA, each bind complementarily to binding sites located in untranslated regions of respective target genes, designated GAM1 TARGET RNA, GAM2 TARGET RNA and GAM3 TARGET RNA, respectively, which target binding site corresponds to a target binding site such as BINDING SITE I, BINDING SITE II or BINDING SITE III of FIG. 1. This binding inhibits translation of the respective target proteins designated GAM1 TARGET PROTEIN, GAM2 TARGET PROTEIN and GAM3 TARGET PROTEIN respectively.

[0196] It is appreciated that specific functions, and accordingly utilities of GR polynucleotide are correlated with and may be deduced from the identity of the target genes, which are inhibited by GAM RNAs comprised in the ‘operon-like’ cluster of GR polynucleotide, schematically represented by GAM1 TARGET PROTEIN through GAM3 TARGET PROTEIN. The function of these target genes is elaborated in Table 8, hereby incorporated herein.

[0197] Reference is now made to FIG. 10 which is a block diagram illustrating different utilities of oligonucleotide of the novel group of oligonucleotides of the present invention referred to here as GAM oligonucleotides and GR polynucleotides. The present invention discloses a first plurality of novel oligonucleotides referred to here as GAM oligonucleotides and a second plurality of operon-like polynucleotides referred to here as GR polynucleotides, each of the GR polynucleotide encoding a plurality of GAM oligonucleotides. The present invention further discloses a very large number of known target genes, which are bound by, and the expression of which is modulated by each of the novel oligonucleotides of the present invention. Published scientific data referenced by the present invention provides specific, substantial, and credible evidence that the above mentioned target genes modulated by novel oligonucleotides of the present invention, are associated with various diseases. Specific novel oligonucleotides of the present invention, target genes thereof and diseases associated therewith, are described hereinbelow with reference to Tables 1 through 10. It is therefore appreciated that a function of GAM oligonucleotides and GR polynucleotides of the present invention is modulation of expression of target genes related to known bacterial diseases, and that therefore utilities of novel oligonucleotides of the present invention include diagnosis and treatment of the above mentioned diseases.

[0198] FIG. 10 describes various types of diagnostic and therapeutic utilities of novel oligonucleotides of the present invention. A utility of novel oligonucleotide of the present invention is detection of GAM oligonucleotides and of GR polynucleotides. It is appreciated that since GAM oligonucleotides and GR polynucleotides modulate expression of disease related target genes, that detection of expression of GAM oligonucleotides in clinical scenarios associated with said bacterial diseases is a specific, substantial and credible utility. Diagnosis of novel oligonucleotides of the present invention may preferably be implemented by RNA expression detection techniques, including but not limited to biochips, as is well known in the art. Diagnosis of expression of oligonucleotides of the present invention may be useful for research purposes, in order to further understand the connection between the novel oligonucleotides of the present invention and the above mentioned related bacterial diseases, for disease diagnosis and prevention purposes, and for monitoring disease progress.

[0199] Another utility of novel oligonucleotides of the present invention is anti-GAM therapy, a mode of therapy which allows up regulation of a bacterial disease-related target gene of a novel GAM oligonucleotide of the present invention, by lowering levels of the novel GAM oligonucleotide which naturally inhibits expression of that target gene. This mode of therapy is particularly useful with respect to target genes which have been shown to be under-expressed in association with a specific bacterial disease. Anti-GAM therapy is further discussed hereinbelow with reference to FIGS. 11A and 11B.

[0200] A further utility of novel oligonucleotides of the present invention is GAM replacement therapy, a mode of therapy which achieves down regulation of a bacterial disease related target gene of a novel GAM oligonucleotide of the present invention, by raising levels of the GAM which naturally inhibits expression of that target gene. This mode of therapy is particularly useful with respect to target genes which have been shown to be over-expressed in association with a specific bacterial disease. GAM replacement therapy involves introduction of supplementary GAM products into a cell, or stimulation of a cell to produce excess GAM products. GAM replacement therapy may preferably be achieved by transfecting cells with an artificial DNA molecule encoding a GAM which causes the cells to produce the GAM product, as is well known in the art.

[0201] Yet a further utility of novel oligonucleotides of the present invention is modified GAM therapy. Disease conditions are likely to exist, in which a mutation in a binding site of a GAM RNA prevents natural GAM RNA to effectively bind inhibit a bacterial disease related target gene, causing up regulation of that target gene, and thereby contributing to the disease pathology. In such conditions, a modified GAM oligonucleotides is designed which effectively binds the mutated GAM binding site, i.e. is an effective anti-sense of the mutated GAM binding site, and is introduced in disease effected cells. Modified GAM therapy is preferably achieved by transfecting cells with an artificial DNA molecule encoding the modified GAM which causes the cells to produce the modified GAM product, as is well known in the art.

[0202] Reference is now made to FIGS. 11A and 11B, simplified diagrams which when taken together illustrate anti-GAM therapy mentioned hereinabove with reference to FIG. 10. A utility of novel GAMs of the present invention is anti-GAM therapy, a mode of therapy which allows up regulation of a bacterial disease-related target gene of a novel GAM of the present invention, by lowering levels of the novel GAM which naturally inhibits expression of that target gene. FIG. 11A shows a normal GAM inhibiting translation of a target gene by binding of GAM RNA to a BINDING SITE found in an untranslated region of GAM TARGET RNA, as described hereinabove with reference to FIG. 1.

[0203] FIG. 11B shows an example of anti-GAM therapy. ANTI-GAM RNA is short artificial RNA molecule the sequence of which is an anti-sense of GAM RNA. Anti-GAM treatment comprises transfecting diseased cells with ANTI-GAM RNA, or with a DNA encoding thereof. The ANTI-GAM RNA binds the natural GAM RNA, thereby preventing binding of natural GAM RNA to its BINDING SITE. This prevents natural translation inhibition of GAM TARGET RNA by GAM RNA, thereby up regulating expression of GAM TARGET PROTEIN.

[0204] It is appreciated that anti-GAM therapy is particularly useful with respect to target genes which have been shown to be under-expressed in association with a specific bacterial disease.

[0205] Furthermore, anti-GAM therapy is particularly useful, since it may be used in situations in which technologies known in the art as RNAi and siRNA can not be utilized. As in known in the art, RNAi and siRNA are technologies which offer means for artificially inhibiting expression of a target protein, by artificially designed short RNA segments which bind complementarily to mRNA of said target protein. However, RNAi and siRNA can not be used to directly up regulate translation of target proteins.

[0206] Reference is now made to FIG. 12A, which is a histogram representing the distribution of known miRNA oligonucleotides and that of hairpin structures extracted from expressed human genome sequences with respect to their HAIRPIN DETECTOR score (this analysis preferably uses the previous version of the Hairpin Detector program). The known miRNA oligonucleotides set is taken from RFAM database, Release 2.1 and includes 440 miRNA oligonucleotides from H. sapienas, M. musculus, C. elegans, C. brigassae and D. melanogaster. Folding of expressed genome sequences taken from public databases of ESTs (Unigene-NCBI and TIGR) identified 342,882 hairpin structures. ˜154,000 out of the 342,882 hairpin structures did not pass the filter of being identified as hairpins in several secondary structure folding versions of the given genomic sequence, as described hereinabove with reference to FIG. 5B, and hence did not receive a Hairpin detector score. Furthermore, ˜133,000 hairpin structures did not pass the filter of minimum score of the DICER-CUT LOCATION DETECTOR 116 (FIG. 2) (those ˜287,000 hairpin structures are not represented in the histogram). Hairpin structures are considered as miRNA-like precursor oligonucleotides here referred to as GAM precursor, if their Hairpin detector score is above 0.3. Thus, the GAM precursor set is comprised of ˜40,000 hairpin structures, of those ˜5100 received a high Hairpin detector score (>=0.7). These are much higher numbers than those of the known miRNA oligonucleotides and of the upper bound of ˜255 human miRNA oligonucleotides, estimated by Bartel et al. (Science, 299, 1540, March 2003). Of the reference set that pass the above filter (408/440), 284 (69%) received a high Hairpin detector score (>=0.7).

[0207] Reference is now made to FIG. 12B, which is a table summarizing laboratory validation results that validate efficacy of the BIOINFORMATIC OLIGONUCLEOTIDE DETECTION ENGINE 100 (FIG. 2). In order to assess efficacy of the BIOINFORMATIC OLIGONUCLEOTIDE DETECTION ENGINE 100, novel oligonucleotides predicted thereby are preferably filtered using the scores of HAIRPIN DETECTOR 114 (FIG. 2) and DICER-CUT LOCATION DETECTOR 116 (FIG. 2) as follows: covering 85% (second column) of published hairpin our algorithm enable to filter 95% of background (third column), leaving only dozens of predicted hairpins with relatively high probability of being a real hairpin carrying a ‘diced’ miRNA for lab validation.

[0208] Group A (selected for the present invention, first column): The score of the HAIRPIN-DETECTOR is above 0, the overall score of the two-phased predictor is above 0.55, and the score of the second phase of the two-phased predictor is above 0.75, or the score of the EDIT-DISTANCE predictor is equal or above 17. In this group, one Dicer cut location is predicted for each hairpin.

[0209] Sample of novel bioinformatically predicted human GAMs are sent to the laboratory for validation (fourth column), and the number (fifth column) and percent (sixth column) of successful validation of predicted human GAM is noted for each of the groups, as well as overall (bottom line). The information about the above lab validation is based on previous patents group selections, there is a high correlation between the old group A predicted hairpin and the present one indicate that the update results should be approximately the same or better, due to improvement in the predictions.

[0210] It is appreciated that the present invention comprises 6444 novel GAM oligonucleotides, which fall into group A, and that the BIOINFORMATIC OLIGONUCLEOTIDE DETECTION ENGINE 100 (FIG. 2) is substantiated by a group of 37 novel human GAM oligonucleotides validated by laboratory means, out of 101 human GAM oligonucleotides which were tested in the lab, resulting in validation of an overall 31% accuracy. The selected group demonstrated 37% accuracy. Pictures of test-results of specific human GAM oligonucleotides as well as the methodology used for validating the expression of predicted oligonucleotides are elaborated hereinbelow with reference to FIG. 13.

[0211] It is further appreciated that failure to detect a predicted oligonucleotide in the lab does not necessarily indicate a mistaken bioinformatic prediction. Rather, it may be due to technical sensitivity limitation of the lab test, or because the predicted oligonucleotides are not expressed in the tissue examined, or at the development phase tested.

[0212] It is still further appreciated that in general these findings are in agreement with the expected bioinformatic accuracy, as describe hereinabove with reference to FIG. 6B: assuming 80% accuracy of the HAIRPIN DETECTOR 114 and 80% accuracy of the DICER-CUT LOCATION DETECTOR 116 and 80% accuracy of the lab validation, this would result in 50% overall accuracy of the predicted oligonucleotide validated in the lab.

[0213] Reference is now made to FIG. 13A which is a picture of laboratory results validating the expression of 43 novel human GAM oligonucleotides detected by the BIOINFORMATIC OLIGONUCLEOTIDE DETECTION ENGINE 100 (FIG. 2).

[0214] Reference is now made to FIG. 13A and FIG. 13B which are pictures and a summary table of laboratory results validating the expression of 43 novel human GAM oligonucleotides detected by the BIOINFORMATIC OLIGONUCLEOTIDE DETECTION ENGINE 100. In each row in FIG. 13A, pictures of several oligonucleotides validated by hybridization of Polymerase Chain Reaction (PCR)-product southern-blots, are provided, each corresponding to a specific GAM oligonucleotide, as elaborated hereinbelow. To test our validation method, we used a reference set of 8 known human miRNA oligonucleotides, as a blind test to our laboratory. These PCR-product hybridization pictures are designated 1 through 8 for the reference set known miRNA oligonucleotides; and 9 through 51 for predicted GAM oligonucleotides.

[0215] In each PCR hybridization picture, 2 lanes are seen: the test lane, designated “+” and the control lane, designated “−”. The control reaction contained all the components of the test reaction except library template. For convenience of viewing the results, all PCR-product hybridization pictures of FIG. 22A have been shrunk ×4 vertically. It is appreciated that for each of the tested GAM oligonucleotides a clear hybridization band appears in the test (“+”) lane, but not in the control (“−”) lane.

[0216] Specifically, FIG. 13A shows pictures of PCR-product hybridization validation by southern-blot, the methodology of which is described hereinbelow, to the following novel human GAM oligonucleotides (RosettaGenomics Ltd. Nomenclature, ‘A’ and ‘B’ referred to the Dicer Cut Location as described hereinabelow with reference to the description of large tables:

[0217] (1) hsa-MIR-21; (2) hsa-MIR-27b; (3) hsa-MIR-186; (4) hsa-MIR-93; (5) hsa-MIR-26a; (6) hsa-MIR-191; (7) hsa-MIR-31; (8) hsa-MIR-92; (9) GAM3418-A (later published by other researchers as hsa-MIR23); (10) GAM4426-A; (11) GAM281-A; (12) GAM7553-A; (13) GAM5385-A; (14) GAM2608-A; (15) GAM1032-A; (16) GAM3431-A; (17) GAM7933-A; (18) GAM3298-A; (19) GAM7080-A; (20) GAM895-A; (21) GAM3770.1; (22) GAM337162-A; (23) GAM 8678-A; (24) GAM2033-A; (25) GAM7776-A; (26) GAM8145-A; (27) GAM25-A; (28) GAM7352.1; (29) GAM337624-A; (30) GAM1479-A; (31) GAM2270-A; (32) GAM7591-A; (33) GAM8285-A; (34) GAM6773-A; (35) GAM336818-A; (36) GAM336487-A; (37) GAM337620-A; (38) GAM336809-A; (39) GAM5346-A; (40) GAM8554-A; (41) GAM2071-A; (42) GAM7957-A; (43) GAM391-A; (44) GAM6633-A; (45) GAM19; (46) GAM8358-A; (47) GAM3229-A; an) GAM 7052-A; (49) GAM3027-A; (50) GAM21 and (51) GAM oligonucleotide similar to mmu-MIR-30e.

[0218] The next validated GAM oligonucleotides are highly similar or identical to known mouse-miRNA oligonucleotides: GAM3027-A, similar to mmu-MIR-29c; GAM21, similar to mmu-MIR-130b; and GAM oligonucleotide which is highly similar to mmu-MIR-30e (picture number 51). In addition to the PCR—product hybridization detection, the following GAMs were also cloned and sequenced: GAM3418-A, GAM5385-A, GAM1032-A, GAM3298-A, GAM7080-A, GAM1338-A, GAM7776-A, GAM25-A, GAM337624-A, GAM1479-A, GAM6773-A, GAM336818-A, GAM336487-A, GAM337620-A, GAM336809-A, GAM3027-A, GAM21, and GAM oligonucleotide similar to mmu-MIR-30e (picture number 51). Furthermore, the following GAM oligonucleotides were sequenced directly from the ligation reaction by the method described hereinbelow under LIGATION-PCR DIAGNOSTIC METHOD: GAM4426-A, GAM7553-A, GAM2270-A, and GAM7591-A.

[0219] In order to validate the expression of predicted novel GAMs and assuming that these novel GAM oligonucleotides are probably expressed at low concentrations, a PCR product cloning approach was set up through the following strategy: two types of cDNA libraries designated “One tailed” and “Ligation” were prepared from frozen HeLa S100 extract (4c Biotech, Belgium) size fractionated RNA. Essentially, Total S100 RNA was prepared through an SDS-Proteinase K incubation followed by an acid Phenol-Chloroform purification and Isopropanol precipitation. Alternatively, total HeLa RNA was also used as starting material for these libraries.

[0220] Fractionation was done by loading up to 500 g per YM100 Amicon Microcon column (Millipore) followed by a 500 g centrifugation for 40 minutes at 4 C. Flow through “YM100” RNA consisting of about of the total RNA was used for library preparation or fractionated further by loading onto a YM30 Amicon Microcon column (Millipore) followed by a 13,500 g centrifugation for 25 minutes at 4 C. Flowthrough “YM30” was used for library preparation as is and consists of less than 0.5% of total RNA. For the both the “ligation” and the “One-tailed” libraries, RNA was dephosphorilated and ligated to an RNA (lowercase)-DNA (UPPERCASE) hybrid 5-phosphorilated, 3 idT blocked 3-adapter (5-P-uuuAACCGCATCCTTCTC-idT-3 Dharmacon # P-002045-01-05) (as elaborated in Elbashir et al., Genes Dev. 15:188-200 (2001)) resulting in ligation only of RNase III type cleavage products. 3-Ligated RNA was excised and purified from a half 6%, half 13% polyacrylamide gel to remove excess adapter with a Nanosep 0.2M centrifugal device (Pall) according to instructions, and precipitated with glycogen and 3 volumes of Ethanol. Pellet was resuspended in a minimal volume of water.

[0221] For the “ligation” library a DNA (UPPERCASE)-RNA (lowercase) hybrid 5-adapter (5-TACTAATACGACTCACTaaa-3 Dharmacon # P-002046-01-05) was ligated to the 3-adapted RNA, reverse transcribed with “EcoRI-RT”: (5-GACTAGCTGGAATTCAAGGATGCGGTTAAA-3), PCR amplified with two external primers essentially as in Elbashir et al 2001 except that primers were “EcoRI-RT” and “PstI Fwd” (5-CAGCCAACGCTGCAGATACGACTCACTAAA-3). This PCR product was used as a template for a second round of PCR with one hemispecific and one external primer or with two hemispecific primers.

[0222] For the “One tailed” library the 3-Adapted RNA was annealed to 20 pmol primer “EcoRI RT” by heating to 70 C and cooling 0.1 C/sec to 30 C and then reverse transcribed with Superscript II RT (According to instructions, Invitrogen) in a 20 l volume for 10 alternating 5 minute cycles of 37 C and 45 C. Subsequently, RNA was digested with 1 l 2M NaOH, 2 mM EDTA at 65 C for 10 minutes. cDNA was loaded on a polyacrylamide gel, excised and gel-purified from excess primer as above (invisible, judged by primer run alongside) and resuspended in 13 l of water. Purified cDNA was then oligo-dC tailed with 400 U of recombinant terminal transferase (Roche molecular biochemicals), 1 l 100M dCTP, 1 l 15 mM CoCl2, and 4 l reaction buffer, to a final volume of 20 l for 15 minutes at 37 C. Reaction was stopped with 2 l 0.2M EDTA and 15 l 3M NaOAc pH 5.2. Volume was adjusted to 150 l with water, Phenol: Bromochloropropane 10:1 extracted and subsequently precipitated with glycogen and 3 volumes of Ethanol. C-tailed cDNA was used as a template for PCR with the external primers “T3-PstBsg(G/1) 18” (5-AATTAACCCTCACTAAAGGCTGCAG GTGCAGGIGGGIIGGGIIGGGIIGN-3 where I stands for Inosine and N for any of the 4 possible deoxynucleotides), and with “EcoRI Nested” (5-GGAATTCAAGGATGCGGTTA-3). This PCR product was used as a template for a second round of PCR with one hemispecific and one external primer or with two hemispecific primers.

[0223] Hemispecific primers were constructed for each predicted GAM RNA oligonucleotide by an in-house program designed to choose about half of the 5 or 3 sequence of the GAM RNA corresponding to a TM of about 30-34 C constrained by an optimized 3 clamp, appended to the cloning adapter sequence (for “One-tailed” libraries 5-GGNNGGGNNG on the 5 end of the GAM RNA, or TTTAACCGCATC-3 on the 3 end of the GAM RNA. For “Ligation” libraries the same 3 adapter and 5-CGACTCACTAAA on the 5 end). Consequently, a fully complementary primer of a TM higher than 60 C was created covering only one half of the GAM RNA sequence permitting the unbiased elucidation by sequencing of the other half.

[0224] CONFIRMATION OF GAM OLIGONUCLEOTIDE SEQUENCE AUTHENTICITY OF PCR PRODUCTS:

[0225] SOUTHERN BLOT: PCR-product sequences were confirmed by southern blot (Southern E. M., Biotechnology, 1992, 24:122-39 (1975)) and hybridization with DNA oligonucleotide probes synthesized as complimentary (antisense) to predicted GAM RNA oligonucleotides. Gels were transferred onto a Biodyne PLUS 0.45m, (Pall) positively charged nylon membrane and UV cross-linked. Hybridization was performed overnight with DIG-labeled probes at 420 C in DIG Easy-Hyb buffer (Roche). Membranes were washed twice with 2×SSC and 0.1% SDS for 10 minutes at 420 C and then washed twice with 0.5×SSC and 0.1% SDS for 5 min at 420 C. The membrane was then developed by using a DIG luminescent detection kit (Roche) using anti-DIG and CSPD reaction, according to the manufacturer's protocol. All probes were prepared according to the manufacturers (Roche Molecular Biochemicals) protocols: Digoxigenin (DIG) labeled antisense transcripts was prepared from purified PCR products using a DIG RNA labeling kit with T3 RNA polymerase. DIG labeled PCR was prepared by using a DIG PCR labeling kit. 3-DIG-tailed oligo ssDNA antisense probes, containing DIG-dUTP and dATP at an average tail length of 50 nucleotides were prepared from 100 pmole oligonucleotides with the DIG Oligonucleotide Labeling Kit.

[0226] CLONE-SEQUENCING: PCR products were inserted into pGEM-T (Promega) or pTZ57/T (MBI Fermentas), heatshock transformed into competent JM109 E. coli (Promega) and sown on LB-Ampiccilin plates with IPTG and Xgal. White and light-blue colonies were transferred to duplicate gridded plates, one of which was blotted onto a membrane (Biodyne Plus, Pall) for hybridization with DIG tailed oligo probes (according to instructions, Roche) complimentary to the expected GAM. Plasmid DNA from positive colonies was sequenced.

[0227] LIGATION-PCR DIAGNOSTIC METHOD: To further validate predicted GAM PCR product sequence derived from hemi-primers, a PCR based diagnostic technique was devised to amplify only those products containing also at least two additional nucleotides of the non hemi-primer defined part of the predicted GAM RNA oligonucleotide. In essence, a diagnostic primer was designed so that its 3 end, which is the specificity determining side, was identical to the desired GAM RNA oligonucleotide, 2-10 nucleotides (typically 4-7, chosen for maximum specificity) further into its 3 end than the nucleotide stretch primed by the hemi-primer. The hemi-primer PCR product was first ligated into a T-cloning vector (pTZ57/T or pGEM-T) as described hereinabove. The ligation reaction mixture was used as template for the diagnostic PCR under strict annealing conditions with the new diagnostic primer in conjunction with a general plasmid-homologous primer, resulting in a distinct ˜200 base-pair product. This PCR product can be directly sequenced, permitting the elucidation of the remaining nucleotides up to the 3 of the mature GAM RNA oligonucleotide adjacent to the 3 adapter. Alternatively, following analysis of the diagnostic PCR reaction on an agarose gel, positive ligation reactions (containing a band of the expected size) were transformed into E. coli. Using this same diagnostic technique and as an alternative to screening by Southern-blot colonyhybridization, transformed bacterial colonies were screened by colony-PCR (Gussow, D. and Clackson, T, Nucleic Acids Res. 17: 4000 (1989)) prior to plasmid purification and sequencing.

[0228] Reference is now made to FIG. 13B which is a table summarizing laboratory results which validate the expression of 8 known human miRNA oligonucleotides and 43 novel GAM oligonucleotides detected by the BIOINFORMATIC OLIGONUCLEOTIDE DETECTION ENGINE 100. The table gives additional information on the above GAM oligonucleotides and contains the following fields: NUMBER: refers to the hybridization picture number of FIG. 13A; NAME: indicates the known MIR name for the reference set, or the GAM's name as given by RosettaGenomics nomenclature method; SEQUENCE: 5′ to 3′ sequence of the mature, ‘diced’ oligonucleotide; SEQUENCED: ‘+’ indicates the additional validation of the GAM RNA sequence by sequencing procedure as described hereinabove with reference to FIG. 13A.

[0229] Reference is now made to FIG. 14A, which is a schematic representation of a novel human GR polynucleotide herein designated GR12731 (RosettaGenomics Ltd. nomenclature), located on chromosome 9, comprising 2 known human MIR oligonucleotides—MIR24 and MIR23, and 2 novel GAM oligonucleotides, herein designated GAM22 and GAM116, all marked by solid black boxes. FIG. 14A also schematically illustrates 6 non-GAM hairpin sequences, and one non-hairpin sequence, all marked by white boxes, and serving as negative controls. By “non-GAM hairpin sequences” is meant sequences of a similar length to known MIR PRECURSOR sequences, which form hairpin secondary folding pattern similar to MIR PRECURSOR hairpins, and yet which are assessed by the BIOINFORMATIC OLIGONUCLEOTIDE DETECTION ENGINE 100 not to be valid GAM PRECURSOR hairpins. It is appreciated that FIG. 14A is a simplified schematic representation, reflecting only the order in which the segments of interest appear relative to one another, and not a proportional distance between the segments.

[0230] Reference is now made to FIG. 14B, which is a schematic representation of secondary folding of each of the MIRs and GAMs of GR GR12731 MIR24, MIR23, GAM22 and GAM116, and of the negative control non-GAM hairpins, herein designated N2, N3, N116, N4, N6 and N7. N0 is a non-hairpin control, of a similar length to that of known MIR PRECURSOR hairpins. It is appreciated that the negative controls are situated adjacent to and in between real MIR oligonucleotides and GAM predicted oligonucleotides and demonstrates similar secondary folding patterns to that of known MIRs and GAMs.

[0231] Reference is now made to FIG. 14C, which is a picture of laboratory results of a PCR test upon a YM100 size-fractionated “ligation”-library, utilizing a set of specific primer pairs located directly inside the boundaries of the hairpins. Due to the nature of the library the only PCR amplifiable products can result from RNaseIII type enzyme cleaved RNA, as expected for legitimate hairpin precursors presumed to be produced by DROSHA (Lee et al, Nature 425 415-419, 2003). FIG. 14C demonstrates expression of hairpin precursors of known MIR oligonucleotides MIRhsa-23 and MIRhsa-24, and of novel bioinformatically detected GAM22 and GAM116 hairpins predicted bioinformatically by a system constructed and operative in accordance with a preferred embodiment of the present invention. FIG. 14C also shows that none of the 7 controls (6 hairpins designated N2, N3, N23, N4, N6 and N7 and 1 non-hairpin sequence designated N0) were expressed. N116 is a negative control sequence partially overlapping GAM116.

[0232] In the picture, test lanes including template are designated “+” and the control lane is designated “−”. The control reaction contained all the components of the test reaction except library template. It is appreciated that for each of the tested hairpins, a clear PCR band appears in the test (“+”) lane, but not in the control (“−”) lane.

[0233] FIGS. 14A through 14C, when taken together validate the efficacy of the bioinformatic oligonucleotide detection engine in: (a) detecting known MIR oligonucleotides; (b) detecting novel GAM PRECURSOR hairpins which are found adjacent to these MIR oligonucleotides, and which despite exhaustive prior biological efforts and bioinformatic detection efforts, went undetected; (c) discerning between GAM (or MIR) PRECURSOR hairpins, and non-GAM hairpins.

[0234] It is appreciated that the ability to discern GAM-hairpins from non-GAM-hairpins is very significant in detecting GAM oligonucleotides since hairpins are highly abundant in the genome. Other MIR prediction programs have not been able to address this challenge successfully.

[0235] Reference is now made to FIG. 15A which is an annotated sequence of an EST comprising a novel GAM oligonucleotides detected by the oligonucleotide detection system of the present invention. FIG. 15A shows the nucleotide sequence of a known human non-protein coding EST (Expressed Sequence Tag), identified as EST72223. The EST72223 clone obtained from TIGR database (Kirkness and Kerlavage, 1997) was sequenced to yield the above 705 bp transcript with a polyadenyl tail. It is appreciated that the sequence of this EST comprises sequences of one known miRNA oligonucleotide, identified as hsa-MIR98, and of one novel GAM oligonucleotide referred to here as GAM25, detected by the BIOINFORMATIC OLIGONUCLEOTIDE DETECTION ENGINE 100 (FIG. 2) of the present invention.

[0236] The sequences of the precursors of the known MIR98 and of the predicted GAM25 precursors are marked in bold, the sequences of the established miRNA 98 and of the predicted miRNA-like oligonucleotide GAM25 are underlined.

[0237] Reference is now made to FIGS. 15B, 15C and 15D that are pictures of laboratory results, which when taken together demonstrate laboratory confirmation of expression of the bioinformatically detected novel oligonucleotide of FIG. 15A. In two parallel experiments, an enzymatically synthesized capped, EST72223 RNA transcript, was incubated with Hela S100 lysate for 0 minutes, 4 hours and 24 hours. RNA was subsequently harvested, run on a denaturing polyacrylamide gel, and reacted with either a 102 nt antisense MIR98 probe or a 145 nt antisenseGAM25 precursor transcript probe respectively. The Northern blot results of these experiments demonstrated processing of EST72223 RNA by Hela lysate (lanes 2-4, in 15B and 15C), into ˜80 bp and ˜22 bp segments, which reacted with the MIR98 precursor probe (15B), and into ˜100 bp and ˜24 bp segments, which reacted with the GAM25 precursor probe (15C). These results demonstrate the processing of EST72223 by Hela lysate into MIR98 precursor and GAM25 precursor. It is also appreciated from FIG. 15C (lane 1) that Hela lysate itself reacted with the GAM25 precursor probe, in a number of bands, including a ˜100 bp band, indicating that GAM25-precursor is endogenously expressed in Hela cells. The presence of additional bands, higher than 100 bp in lanes 5-9 probably corresponds to the presence of nucleotide sequences in Hela lysate, which contain the GAM25 sequence.

[0238] In addition, in order to demonstrate the kinetics and specificity of the processing of MIR98 and GAM25 precursors into their respective mature, ‘diced’ segments, transcripts of MIR98 and of the bioinformatically predicted GAM25 precursors were similarly incubated with Hela S100 lysate, for 0 minutes, 30 minutes, 1 hour and 24 hours, and for 24 hours with the addition of EDTA, added to inhibit Dicer activity, following which RNA was harvested, run on a polyacrylamide gel and reacted with MIR98 and GAM25 precursor probes. Capped transcripts were prepared for in-vitro RNA cleavage assays with T7 RNA polymerase, including a m7G(5′)ppp(5′)G-capping reaction using the T7-mMessage mMachine kit (Ambion). Purified PCR products were used as template for the reaction. These were amplified for each assay with specific primers containing a T7 promoter at the 5 end and a T3 RNA polymerase promoter at the 3 end. Capped RNA transcripts were incubated at 30 C in supplemented, dialysis concentrated, Hela S100 cytoplasmic extract (4C Biotech, Seneffe, Belgium). The Hela S100 was supplemented by dialysis to a final concentration of 20 mM Hepes, 100 mM KCl, 2.5 mM MgCl2, 0.5 mM DTT, 20% glycerol and protease inhibitor cocktail tablets (Complete mini Roche Molecular Biochemicals). After addition of all components, final concentrations were 100 mM capped target RNA, 2 mM ATP, 0.2 mM GTP, 500 U/ml RNasin, 25 g/ml creatine kinase, 25 mM creatine phosphate, 2.5 mM DTT and 50% S100 extract. Proteinase K, used to enhance Dicer activity (Zhang et al., EMBO J. 21, 5875-5885 (2002)) was dissolved in 50 mM Tris-HCl pH 8, 5 mM CaCl2, and 50% glycerol, was added to a final concentration of 0.6 mg/ml. Cleavage reactions were stopped by the addition of 8 volumes of proteinase K buffer (200 Mm Tris-Hcl, pH 7.5, 25 mM EDTA, 300 mM NaCl, and 2% SDS) and incubated at 65 C for 15 min at different time points (0, 0.5, 1, 4, 24 h) and subjected to phenol/chloroform extraction. Pellets were dissolved in water and kept frozen. Samples were analyzed on a segmented half 6%, half 13% polyacrylamide 1×TBE-7M Urea gel.

[0239] The Northern blot results of these experiments demonstrated an accumulation of a ˜22 bp segment which reacted with the MIR98 precursor probe, and of a ˜24 bp segment which reacted with the GAM25 precursor probe, over time (lanes 5-8). Absence of these segments when incubated with EDTA (lane 9), which is known to inhibit Dicer enzyme (Zhang et al., 2002), supports the notion that the processing of MIR98 and GAM25 precursors into their ‘diced’ segments is mediated by Dicer enzyme, found in Hela lysate. Other RNases do not utilize divalent cations and are thus not inhibited by EDTA. The molecular sizes of EST72223, MIR-98 and GAM25 and their corresponding precursors are indicated by arrows.

[0240] FIG. 15D present Northern blot results of same above experiments with GAM25 probe (24 nt). The results clearly demonstrated the accumulation of mature GAM25 oligonucleotide after 24 h.

[0241] To validate the identity of the band shown by the lower arrow in FIGS. 15C and 15D, a RNA band parallel to a marker of 24 base was excised from the gel and cloned as in Elbashir et al (2001) and sequenced. 90 clones corresponded to the sequence of mature GAM25 oligonucleotide, three corresponded to GAM25* (the opposite arm of the hairpin with a 1-3 nucleotide 3 overhang) and two to the hairpin-loop.

[0242] GAM25 was also validated endogenously by sequencing from both sides from a HeLa YM100 total-RNA “ligation” libraries, utilizing hemispecific primers as described in FIG. 13.

[0243] Taken together, these results validate the presence and processing of a novel MIR-like oligonucleotide, GAM25, which was predicted bioinformatically. The processing of this novel GAM oligonucleotide product, by Hela lysate from EST72223, through its precursor, to its final form was similar to that observed for known miRNA oligonucleotide, MIR98.

[0244] Transcript products were 705 nt (EST72223), 102 nt (MIR98 precursor), 125 nt (GAM25 precursor) long. EST72223 was PCR amplified with T7-EST 72223 forward primer: 5-TAATACGACTCACTATAGGCCCTTATTAGAGGATTCTGCT-3 and T3-EST72223 reverse primer:”-AATTAACCCTCACTAAAGGTTTTTTTTTCCTGAGA CAGAGT-3.MIR98 was PCR amplified using EST72223 as a template with T7MIR98 forward primer: 5-TAATACGACTCACTATAGGGTGAGGTAGTAAGTTGTATTG TT-3 and T3MIR98 reverse primer: 5-AATTAACCCTCACTAAAGGGAAAGTAGTAAGTTGTATAGT T-3.GAM25 was PCR amplified using EST72223 as a template with GAM25 forward primer: 5-GAGGCAGGAGAATTGCTTGA-3 and T3-EST72223 reverse primer: 5-AATTAACCCTCACTAAAGGCCTGAGACAGAGTCT TGCTC-3.

[0245] It is appreciated that the data presented in FIGS. 15A, 15B, 15C and 15D when taken together validate the function of the bioinformatic oligonucleotide detection engine 100 of FIG. 2. FIG. 15A shows a novel GAM oligonucleotide bioinformatically detected by the BIOINFORMATIC OLIGONUCLEOTIDE DETECTION ENGINE 100, and FIGS. 15C and 15D show laboratory confirmation of the expression of this novel oligonucleotide. This is in accord with the engine training and validation methodology described hereinabove with reference to FIG. 3.

### DETAILED DESCRIPTION OF LARGE TABLES

[0246] Table 1 comprises data relating the SEQ ID NO of oligonucleotides of the present invention to their corresponding GAM NAME, and contains the following fields: GAM SEQ-ID: GAM SEQ ID NO, as in the Sequence Listing; GAM NAME: Rosetta Genomics Ltd. nomenclature (see below); GAM RNA SEQUENCE: Sequence (5′ to 3′) of the mature, ‘diced’ GAM RNA; GAM ORGANISM: identity of the organism encoding the GAM oligonucleotide; GAM POS: Dicer cut location (see below); and

[0247] Table 2 comprises detailed textual description according to the description of FIG. 1 of each of a plurality of novel GAM oligonucleotides of the present invention, and contains the following fields: GAM NAME: Rosetta Genomics Ltd. nomenclature (see below); GAM ORGANISM: identity of the organism encoding the GAM oligonucleotide; PRECUR SEQ-ID: GAM precursor Seq-ID, as in the Sequence Listing; PRECURSOR SEQUENCE: Sequence (5′ to 3′) of the GAM precursor; GAM DESCRIPTION: Detailed description of GAM oligonucleotide with reference to FIG. 1; and

[0248] Table 3 comprises data relating to the source and location of novel GAM oligonucleotides of the present invention, and contains the following fields: GAM NAME: Rosetta Genomics Ltd. nomenclature (see below); PRECUR SEQ-ID: GAM precursor SEQ ID NO, as in the Sequence Listing; GAM ORGANISM: identity of the organism encodes the GAM oligonucleotide; SOURCE: For human GAM-chromosome encoding the human GAM oligonucleotide, otherwise—accession ID (GenBank, NCBI); STRAND: Orientation of the strand, ‘+’ for the plus strand, ‘−’ for the minus strand; SRC-START OFFSET: Start offset of GAM precursor sequence relative to the SOURCE; SRC-END OFFSET: End offset of GAM precursor sequence relative to the SOURCE; and

[0249] Table 4 comprises data relating to GAM precursors of novel GAM oligonucleotides of the present invention, and contains the following fields: GAM NAME: Rosetta Genomics Ltd. nomenclature (see below); PRECUR SEQ-ID: GAM precursor Seq-ID, as in the Sequence Listing; GAM ORGANISM: identity of the organism encoding the GAM oligonucleotide; PRECURSOR-SEQUENCE: GAM precursor nucleotide sequence (5′ to 3′); GAM FOLDED PRECURSOR RNA: Schematic representation of the GAM folded precursor, beginning 5′ end (beginning of upper row) to 3′ end (beginning of lower row), where the hairpin loop is positioned at the right part of the draw; and

[0250] Table 5 comprises data relating to GAM oligonucleotides of the present invention, and contains the following fields: GAM NAME: Rosetta Genomics Ltd. nomenclature (see below); GAM ORGANISM: identity of the organism encoding the GAM oligonucleotide; GAM RNA SEQUENCE: Sequence (5′ to 3′) of the mature, ‘diced’ GAM RNA; PRECUR SEQ-ID: GAM precursor Seq-ID, as in the Sequence Listing; GAM POS: Dicer cut location (see below); and

[0251] Table 6 comprises data relating SEQ ID NO of the GAM target gene binding site sequence to TARGET gene name and target binding site sequence, and contains the following fields: TARGET BINDING SITE SEQ-ID: Target binding site SEQ ID NO, as in the Sequence Listing; TARGET ORGANISM: identity of organism encode the TARGET gene; TARGET: GAM target gene name; TARGET BINDING SITE SEQUENCE: Nucleotide sequence (5′ to 3′) of the target binding site; and

[0252] Table 7 comprises data relating to target-genes and binding sites of GAM oligonucleotides of the present invention, and contains the following fields: GAM NAME: Rosetta Genomics Ltd. nomenclature (see below); GAM ORGANISM: identity of the organism encoding the GAM oligonucleotide; GAM RNA SEQUENCE: Sequence (5′ to 3′) of the mature, ‘diced’ GAM RNA; TARGET: GAM target gene name; TARGET REF-ID: Target accession number (GenBank); TARGET ORGANISM: identity of organism encode the TARGET gene; UTR: Untranslated region of binding site/s (3″ or 5″); TARGET BS-SEQ: Nucleotide sequence (5′ to 3′) of the target binding site; BINDING-SITE-DRAW: Schematic representation of the binding site, upper row represent 5′ to 3′ sequence of the GAM, Lower row represent 3′ to 5′ Sequence of the target; GAM POS: Dicer cut location (see below); and

[0253] Table 8 comprises data relating to functions and utilities of novel GAM oligonucleotides of the present invention, and contains the following fields: GAM NAME: Rosetta Genomics Ltd. nomenclature (see below); GAM RNA SEQUENCE: Sequence (5′ to 3′) of the mature, ‘diced’ GAM RNA; GAM ORGANISM: identity of the organism encoding the GAM oligonucleotide; TARGET: GAM target gene name; TARGET ORGANISM: identity of organism encode the TARGET gene; GAM FUNCTION: Description of the GAM functions and utilities; GAM POS: Dicer cut location (see below); and

[0254] Table 9 comprises data of gene function references—Bibliography and contains the following fields: GAM NAME: Rosetta Genomics Ltd. nomenclature (see below); GAM RNA SEQUENCE: Sequence (5′ to 3′) of the mature, ‘diced’ GAM RNA gene; GAM ORGANISM: identity of the organism encoding the GAM oligonucleotide; TARGET: GAM target gene name; TARGET ORGANISM: identity of organism encode the TARGET gene; REFERENCES: list of references relating to the target gene; GAM POS: Dicer cut location (see below); and

[0255] Table 10 comprises data relating to novel GR (Genomic Record) polynucleotides of the present invention, and contains the following fields: GR NAME: Rosetta Genomics Ltd. nomenclature (see below); GR ORGANISM: identity of the organism encoding the GR polynucleotide; GR DESCRIPTION: Detailed description of a GR gene cluster, with reference to FIG. 9; and

[0256] The following conventions and abbreviations are used in the tables: The nucleotide ‘U’ is represented as ‘T’ in the tables, and

[0257] GAM NAME or GR NAME are names for nucleotide sequences of the present invention given by RosettaGenomics Ltd. nomenclature method. All GAMs/GRs are designated by GAMx/GRx where x is a unique ID.

[0258] GAM POS is a position of the GAM RNA on the GAM PRECURSOR RNA sequence. This position is the Dicer cut location: A indicates a probable Dicer cut location; B indicates an alternative Dicer cut location.

[0259] All human nucleotide sequences of the present invention as well as their chromosomal location and strand orientation are derived from sequence records of UCSC-hg16 version, which is based on NCBI, Build34 database (April, 2003).

[0260] All bacteria sequences of the present invention as well as their genomic location are derived from NCBI, RefSeq database.

The application's sequence listing, which the Patent Office published only in electronic form, follows.

SEQUENCE LISTING (59824 sequences)

SEQ ID NO: 1 - RNA, 22 nt, Homo sapiens
aauugcuugaacccaggaagug

SEQ ID NO: 2 - RNA, 22 nt, Homo sapiens
acugcacuccagccugggcaac

SEQ ID NO: 3 - RNA, 22 nt, Homo sapiens
cacugcaaccuccaccuccugg

SEQ ID NO: 4 - RNA, 22 nt, Homo sapiens
cacugcacuccagccugggcaa

SEQ ID NO: 5 - RNA, 22 nt, Homo sapiens
cauugcacuccagccugggcaa

SEQ ID NO: 6 - RNA, 22 nt, Homo sapiens
gaaguuugaagccuguuguuca

SEQ ID NO: 7 - RNA, 22 nt, Bordetella pertussis
aagaacaagggcgucaacaggg

SEQ ID NO: 8 - RNA, 22 nt, Bordetella pertussis
aagcaggggguugccgacgggg

SEQ ID NO: 9 - RNA, 22 nt, Bordetella pertussis
aagccgugaaggcaaucgcgcc

SEQ ID NO: 10 - RNA, 22 nt, Bordetella pertussis
aaggcagcgccucgaucaccuc

SEQ ID NO: 11 - RNA, 22 nt, Bordetella pertussis
aagggcagcgugcuggccauca

SEQ ID NO: 12 - RNA, 22 nt, Bordetella pertussis
acagcaggaugucggcggccau

SEQ ID NO: 13 - RNA, 19 nt, Bordetella pertussis
acaucucgugcaccagccc

SEQ ID NO: 14 - RNA, 22 nt, Bordetella pertussis
accgugggcagcuggucguagu

SEQ ID NO: 15 - RNA, 22 nt, Bordetella pertussis
acgaccaggaagaggcgcuguc

SEQ ID NO: 16 - RNA, 22 nt, Bordetella pertussis
acgaucuggccgccgagcuggc

SEQ ID NO: 17 - RNA, 22 nt, Bordetella pertussis
acuguaaaccuuuuagaagugc

SEQ ID NO: 18 - RNA, 22 nt, Bordetella pertussis
acuuucaugcccggccaguuau

SEQ ID NO: 19 - RNA, 22 nt, Bordetella pertussis
agccagcaguugcagcggcugg

SEQ ID NO: 20 - RNA, 22 nt, Bordetella pertussis
aggaugaggucggcgcgcucga

SEQ ID NO: 21 - RNA, 22 nt, Bordetella pertussis
agggccugcguuucgcuggcau

SEQ ID NO: 22 - RNA, 19 nt, Bordetella pertussis
agggccuggggcccgagca

SEQ ID NO: 23 - RNA, 22 nt, Bordetella pertussis
aggugcaggccgcccucggcgc

SEQ ID NO: 24 - RNA, 22 nt, Bordetella pertussis
agguugaucgcccaugugccau

SEQ ID NO: 25 - RNA, 23 nt, Bordetella pertussis
agugggcagggugcaugcgcgcc

SEQ ID NO: 26 - RNA, 22 nt, Bordetella pertussis
aguuccagcccuucgauggugu

SEQ ID NO: 27 - RNA, 22 nt, Bordetella pertussis
auagacuuuggcgcuugauucc

SEQ ID NO: 28 - RNA, 22 nt, Bordetella pertussis
aucaacuuccagaucaugggca

SEQ ID NO: 29 - RNA, 22 nt, Bordetella pertussis
auccagcccggcggccuggcgc

SEQ ID NO: 30 - RNA, 22 nt, Bordetella pertussis
auccagccguucgguucgcaag

SEQ ID NO: 31 - RNA, 22 nt, Bordetella pertussis
auggggccgagcgcccagucgc

SEQ ID NO: 32 - RNA, 22 nt, Bordetella pertussis
auguagcucgccagcagcguca

SEQ ID NO: 33 - RNA, 22 nt, Bordetella pertussis
augugcagcgccaccaggcugg

SEQ ID NO: 34 - RNA, 22 nt, Bordetella pertussis
caccagauacugcgccuggccc

SEQ ID NO: 35 - RNA, 22 nt, Bordetella pertussis
cagcagggccagcaccgagcca

SEQ ID NO: 36 - RNA, 22 nt, Bordetella pertussis
cagcaggguggguuugauguug

SEQ ID NO: 37 - RNA, 22 nt, Bordetella pertussis
caggaacucguggcugacgccu

SEQ ID NO: 38 - RNA, 22 nt, Bordetella pertussis
cagggcagcgcgcaggaccuga

SEQ ID NO: 39 - RNA, 22 nt, Bordetella pertussis
caggugaaccuggacuggcugg

SEQ ID NO: 40 - RNA, 22 nt, Bordetella pertussis
ccagcaggcgcuugcgcgucag

SEQ ID NO: 41 - RNA, 22 nt, Bordetella pertussis
ccagcaggugcggcgucagguu

SEQ ID NO: 42 - RNA, 22 nt, Bordetella pertussis
ccagcaggugcgugucggcaaa

SEQ ID NO: 43 - RNA, 22 nt, Bordetella pertussis
ccagcagguccagcgccugcug

SEQ ID NO: 44 - RNA, 22 nt, Bordetella pertussis
ccagggacgggagggugccgaa

SEQ ID NO: 45 - RNA, 22 nt, Bordetella pertussis
ccaguuggucaccucguagccc

SEQ ID NO: 46 - RNA, 22 nt, Bordetella pertussis
ccgccgugagccacagaaugcc

SEQ ID NO: 47 - RNA, 22 nt, Bordetella pertussis
ccggcacaggaagcgccagcaa

SEQ ID NO: 48 - RNA, 20 nt, Bordetella pertussis
ccgugggcacgcugaccuug

SEQ ID NO: 49 - RNA, 22 nt, Bordetella pertussis
ccgugggcagcgucgugcuggg

SEQ ID NO: 50 - RNA, 21 nt, Bordetella pertussis
ccgugggcgaguaccuugugc

SEQ ID NO: 51 - RNA, 22 nt, Bordetella pertussis
ccugaaugauggcgguuccgug

SEQ ID NO: 52 - RNA, 22 nt, Bordetella pertussis
ccugauggaccacuggcagccg

SEQ ID NO: 53 - RNA, 22 nt, Bordetella pertussis
ccuguauggcgcugauggccgg

SEQ ID NO: 54 - RNA, 21 nt, Bordetella pertussis
cgaagaauacgcugacgucgu

SEQ ID NO: 55 - RNA, 22 nt, Bordetella pertussis
cgaagggcgcguuggugaugua

SEQ ID NO: 56 - RNA, 22 nt, Bordetella pertussis
cgaccagaucaugcgcuugggu

SEQ ID NO: 57 - RNA, 22 nt, Bordetella pertussis
cgacggcaccgacagcaaggag

SEQ ID NO: 58 - RNA, 22 nt, Bordetella pertussis
cgagggcaggccguggcagguu

SEQ ID NO: 59 - RNA, 20 nt, Bordetella pertussis
cgaucugcugccaugccggu

SEQ ID NO: 60 - RNA, 22 nt, Bordetella pertussis
cgcagcaagcggcugagcugaa

SEQ ID NO: 61 - RNA, 22 nt, Bordetella pertussis
cgcagcucgugcgagacguugg

SEQ ID NO: 62 - RNA, 22 nt, Bordetella pertussis
cgccgugguggcggccgacaua

SEQ ID NO: 63 - RNA, 22 nt, Bordetella pertussis
cgcuccaguagaacgccucgag

SEQ ID NO: 64 - RNA, 22 nt, Bordetella pertussis
cggcagcaggaacagcgacacg

SEQ ID NO: 65 - RNA, 22 nt, Bordetella pertussis
cggcagcaucgucagcggcgug

SEQ ID NO: 66 - RNA, 22 nt, Bordetella pertussis
cggcaucagcgccugcaggcgc

SEQ ID NO: 67 - RNA, 22 nt, Bordetella pertussis
cggcauccccguggucagcgac

SEQ ID NO: 68 - RNA, 22 nt, Bordetella pertussis
cggccuguccagcgagaacgug

SEQ ID NO: 69 - RNA, 22 nt, Bordetella pertussis
cggccuguccaucaugugcuuc

SEQ ID NO: 70 - RNA, 22 nt, Bordetella pertussis
cgggacggcccugcaggaacuc

SEQ ID NO: 71 - RNA, 22 nt, Bordetella pertussis
cgggccuggcccgccauccgcg

SEQ ID NO: 72 - RNA, 16 nt, Bordetella pertussis
cgggccuguucgccag

SEQ ID NO: 73 - RNA, 22 nt, Bordetella pertussis
cguggaugauggccucggcgcg

SEQ ID NO: 74 - RNA, 22 nt, Bordetella pertussis
cgugugggccguggccgguacg

SEQ ID NO: 75 - RNA, 22 nt, Bordetella pertussis
cuacaacaugaagcugccgcca

SEQ ID NO: 76 - RNA, 22 nt, Bordetella pertussis
cuggaugacgcgaugcguggaa

SEQ ID NO: 77 - RNA, 22 nt, Bordetella pertussis
gaacagauuguccgggccgggg

SEQ ID NO: 78 - RNA, 22 nt, Bordetella pertussis
gaacucuuccgcaaagcggucg

SEQ ID NO: 79 - RNA, 22 nt, Bordetella pertussis
gacagcacgcgccgcaagggca

SEQ ID NO: 80 - RNA, 22 nt, Bordetella pertussis
gacggcacggcacaggucgacg

SEQ ID NO: 81 - RNA, 22 nt, Bordetella pertussis
gagaaauaugcugcuaugaagc

SEQ ID NO: 82 - RNA, 22 nt, Bordetella pertussis
gcagcaggcacccggccagcgu

SEQ ID NO: 83 - RNA, 17 nt, Bordetella pertussis
gcaggugcgccugaagg

SEQ ID NO: 84 - RNA, 22 nt, Bordetella pertussis
gccagccgcugggggguaccca

SEQ ID NO: 85 - RNA, 22 nt, Bordetella pertussis
gccagccggcccacgaaggcga

SEQ ID NO: 86 - RNA, 22 nt, Bordetella pertussis
gccagccggugccggccgacca

SEQ ID NO: 87 - RNA, 22 nt, Bordetella pertussis
gccgugugcuugaugaauggag

SEQ ID NO: 88 - RNA, 22 nt, Bordetella pertussis
gcgccagccugcgcaaccugcu

SEQ ID NO: 89 - RNA, 22 nt, Bordetella pertussis
gcgugggcacgcaaucgcuuuc

SEQ ID NO: 90 - RNA, 22 nt, Bordetella pertussis
gcgugggcauuuugcugcgccc

SEQ ID NO: 91 - RNA, 22 nt, Bordetella pertussis
gcgugggccgggcccggcacug

SEQ ID NO: 92 - RNA, 22 nt, Bordetella pertussis
gcuagcuccugucgugggucgc

SEQ ID NO: 93 - RNA, 22 nt, Bordetella pertussis
gcucugggcggagucgauaugc

SEQ ID NO: 94 - RNA, 23 nt, Bordetella pertussis
gcucuggguggccgaggucuggc

SEQ ID NO: 95 - RNA, 22 nt, Bordetella pertussis
gcugcugguggucgacggucag

SEQ ID NO: 96 - RNA, 22 nt, Bordetella pertussis
gcuguagcugaagccgucggcc

SEQ ID NO: 97 - RNA, 22 nt, Bordetella pertussis
ggauggaguucagcagcucgca

SEQ ID NO: 98 - RNA, 22 nt, Bordetella pertussis
ggcagcacgccgaagccgucga

SEQ ID NO: 99 - RNA, 23 nt, Bordetella pertussis
ggcagcaggaacaccgccggcgg

SEQ ID NO: 100 - RNA, 22 nt, Bordetella pertussis
ggcagcaggauguugcggcgaa

SEQ ID NO: 101 - RNA, 22 nt, Bordetella pertussis
ggcagccucgccgagaccguca

SEQ ID NO: 102 - RNA, 22 nt, Bordetella pertussis
ggcagcucggccucgggcgcca

SEQ ID NO: 103 - RNA, 22 nt, Bordetella pertussis
ggcauccugcacaguccggacg

SEQ ID NO: 104 - RNA, 22 nt, Bordetella pertussis
ggccgugggcgccgacgugcgu

SEQ ID NO: 105 - RNA, 22 nt, Bordetella pertussis
gggcaaggucgccguggcagcg

SEQ ID NO: 106 - RNA, 22 nt, Bordetella pertussis
gggccugaccgugcugggcgcu

SEQ ID NO: 107 - RNA, 22 nt, Bordetella pertussis
gggcgaagucaccgucagcauc

SEQ ID NO: 108 - RNA, 22 nt, Bordetella pertussis
guccagccauucgagcagggcc

SEQ ID NO: 109 - RNA, 22 nt, Bordetella pertussis
gugcagcgcuugcagccggcgu

SEQ ID NO: 110 - RNA, 22 nt, Bordetella pertussis
gugcaggccaugaacgaccgcu

SEQ ID NO: 111 - RNA, 22 nt, Bordetella pertussis
gugccuguccccgcauggggga

SEQ ID NO: 112 - RNA, 22 nt, Bordetella pertussis
gugcgagccgcucaggcccgcg

SEQ ID NO: 113 - RNA, 22 nt, Bordetella pertussis
uauuacgugcggcugcuggccg

SEQ ID NO: 114 - RNA, 22 nt, Bordetella pertussis
ucagauggucgagcacauuguc

SEQ ID NO: 115 - RNA, 22 nt, Bordetella pertussis
ugaaaauuccuugagcgcccgg

SEQ ID NO: 116 - RNA, 22 nt, Bordetella pertussis
ugaaugccagcgcgaccucgca

SEQ ID NO: 117 - RNA, 22 nt, Bordetella pertussis
ugcacagggucgcccuggcgcc

SEQ ID NO: 118 - RNA, 22 nt, Bordetella pertussis
ugcagcagcgcggcaucgaccg

SEQ ID NO: 119 - RNA, 19 nt, Bordetella pertussis
ugcagcaggaucugcuggu

SEQ ID NO: 120 - RNA, 22 nt, Bordetella pertussis
ugcaggaacacgagauccggcc

SEQ ID NO: 121 - RNA, 23 nt, Bordetella pertussis
uggacaaggcgcgcgagguggug

SEQ ID NO: 122 - RNA, 22 nt, Bordetella pertussis
uggaccagcucgcgggcgcgau

SEQ ID NO: 123 - RNA, 22 nt, Bordetella pertussis
uggcagcagaucgacuacggcu

SEQ ID NO: 124 - RNA, 23 nt, Bordetella pertussis
uggcauccgacgccgugcucgcg

SEQ ID NO: 125 - RNA, 22 nt, Bordetella pertussis
ugggcagcgaauucuggcacgg

SEQ ID NO: 126 - RNA, 22 nt, Bordetella pertussis
ugggccugaacgguggcggcca

SEQ ID NO: 127 - RNA, 22 nt, Bordetella pertussis
ugggccugcugggcaaccuggu

SEQ ID NO: 128 - RNA, 22 nt, Bordetella pertussis
ugggccuggauggcgccgcauu

SEQ ID NO: 129 - RNA, 22 nt, Bordetella pertussis
uggugcagcucgucguugucgg

SEQ ID NO: 130 - RNA, 22 nt, Bordetella pertussis
uggugcaggagcgccugcuguu

SEQ ID NO: 131 - RNA, 22 nt, Bordetella pertussis
uguggauguucucccugguggu

SEQ ID NO: 132 - RNA, 22 nt, Bordetella pertussis
uguuccauugccuucugaaccg

SEQ ID NO: 133 - RNA, 22 nt, Bordetella pertussis
uugcagcacgugccguaucgag

SEQ ID NO: 134 - RNA, 22 nt, Bordetella pertussis
uuggggccguggccggcgcugu

SEQ ID NO: 135 - RNA, 22 nt, Chlamydia trachomatis
uugauuaucccgaagauauaac

SEQ ID NO: 136 - RNA, 22 nt, Chlamydia trachomatis
uggaaguaucgaggaucucugg

SEQ ID NO: 137 - RNA, 22 nt, Chlamydia trachomatis
uagaagaagacccuucguuugu

SEQ ID NO: 138 - RNA, 22 nt, Chlamydia trachomatis
guauauuuauauugcccuucuu

SEQ ID NO: 139 - RNA, 22 nt, Chlamydia trachomatis
gauucucugguauuaacugguu

SEQ ID NO: 140 - RNA, 22 nt, Chlamydophila pneumoniae AR39
cuuuauauacccucgcucuuaa

SEQ ID NO: 141 - RNA, 22 nt, Chlamydophila pneumoniae AR39
uagaaguauuaagccaagauuu

SEQ ID NO: 142 - RNA, 22 nt, Chlamydophila pneumoniae AR39
aucuauaaaacaucaguugcuu

SEQ ID NO: 143 - RNA, 21 nt, Chlamydophila pneumoniae AR39
auaguaaguucaugcuuguua

SEQ ID NO: 144 - RNA, 22 nt, Chlamydophila pneumoniae AR39
auauauuuagccucuccugauu

SEQ ID NO: 145 - RNA, 22 nt, Chlamydophila pneumoniae AR39
agcuuuuggauauccuuccuua

SEQ ID NO: 146 - RNA, 22 nt, Chlamydophila pneumoniae AR39
aagaagaagaauccguggauga

SEQ ID NO: 147 - RNA, 22 nt, Chlamydophila pneumoniae CWL029
ucuuuaauuuucugaaagauua

SEQ ID NO: 148 - RNA, 22 nt, Chlamydophila pneumoniae CWL029
uguaugaguuucucuucaucca

SEQ ID NO: 149 - RNA, 22 nt, Chlamydophila pneumoniae J138
uuuguuauuacuaguugucuga

SEQ ID NO: 150 - RNA, 22 nt, Chlamydophila pneumoniae J138
gcagaacuuagagcuucaauau

SEQ ID NO: 151 - RNA, 22 nt, Escherichia coli CFT073
gcacgggcgacauuuggcaggc

SEQ ID NO: 152 - RNA, 22 nt, Escherichia coli CFT073
gcagaauuuuguccgauagugg

SEQ ID NO: 153 - RNA, 22 nt, Escherichia coli CFT073
gcagcagcgccuguucaagcgc

SEQ ID NO: 154 - RNA, 22 nt, Escherichia coli CFT073
gcagggcauugauugggcgcac

SEQ ID NO: 155 - RNA, 21 nt, Escherichia coli CFT073
gcaggcagcgaccggaguagg

SEQ ID NO: 156 - RNA, 22 nt, Escherichia coli CFT073
gccagccauaacccgauggauu

SEQ ID NO: 157 - RNA, 22 nt, Escherichia coli CFT073
gccaguuugcuggacucugcca

SEQ ID NO: 158 - RNA, 22 nt, Escherichia coli CFT073
gccaugucggaucgaugcgcuc

SEQ ID NO: 159 - RNA, 22 nt, Escherichia coli CFT073
gcauggcaugcagggaacgccg

SEQ ID NO: 160 - RNA, 21 nt, Escherichia coli CFT073
gcauggcuguuaucaucuucc

SEQ ID NO: 161 - RNA, 22 nt, Escherichia coli CFT073
gcauguacaugcagcugauaau

SEQ ID NO: 162 - RNA, 22 nt, Escherichia coli CFT073
gccaagucgagcaacguuuuac

SEQ ID NO: 163 - RNA, 22 nt, Escherichia coli CFT073
gcaaaaauggcccggaagagau

SEQ ID NO: 164 - RNA, 22 nt, Escherichia coli CFT073
gauguacagcgcguuacuccug

SEQ ID NO: 165 - RNA, 23 nt, Escherichia coli CFT073
gaugcgcagauggcauacagcgg

SEQ ID NO: 166 - RNA, 22 nt, Escherichia coli CFT073
gauauuuauacaucccaauaaa

SEQ ID NO: 167 - RNA, 22 nt, Escherichia coli CFT073
gauauuuuacgcgcaauaacug

SEQ ID NO: 168 - RNA, 22 nt, Escherichia coli CFT073
gaucauuuucgcuauuuugccu

SEQ ID NO: 169 - RNA, 22 nt, Escherichia coli CFT073
gaugauuauguuguugauaucc

SEQ ID NO: 170 - RNA, 21 nt, Escherichia coli CFT073
gagauucagcaucucuuucug

SEQ ID NO: 171 - RNA, 22 nt, Escherichia coli CFT073
gaggaagaaucccgguguauuc

SEQ ID NO: 172 - RNA, 23 nt, Escherichia coli CFT073
cuucagaguuccggcugcgucag

SEQ ID NO: 173 - RNA, 22 nt, Escherichia coli CFT073
cuucucuucaaucgggauuauc

SEQ ID NO: 174 - RNA, 22 nt, Escherichia coli CFT073
cugggaggccaguggcaagaaa

SEQ ID NO: 175 - RNA, 22 nt, Escherichia coli CFT073
cugggauacugguugcucauug

SEQ ID NO: 176 - RNA, 22 nt, Escherichia coli CFT073
cugggauguauggauauguugu

SEQ ID NO: 177 - RNA, 22 nt, Escherichia coli CFT073
cuggugaaaaugcucggccucg

SEQ ID NO: 178 - RNA, 19 nt, Escherichia coli CFT073
cuguuuauucuguuugccc

SEQ ID NO: 179 - RNA, 22 nt, Escherichia coli CFT073
cuggagaguaauacccagucug

SEQ ID NO: 180 - RNA, 22 nt, Escherichia coli CFT073
cugagaggcucuuugcuaagug

SEQ ID NO: 181 - RNA, 22 nt, Escherichia coli CFT073
cugcaacuggcugauggcagca

SEQ ID NO: 182 - RNA, 22 nt, Escherichia coli CFT073
cugccagcuacuuugugucagu

SEQ ID NO: 183 - RNA, 22 nt, Escherichia coli CFT073
gacuucauggagucgaguugca

SEQ ID NO: 184 - RNA, 22 nt, Escherichia coli CFT073
gacuuuauuaaacugcuggagg

SEQ ID NO: 185 - RNA, 22 nt, Escherichia coli CFT073
gacacauuucuucccggcuccg

SEQ ID NO: 186 - RNA, 22 nt, Escherichia coli CFT073
gacauugaggaacacuuccaga

SEQ ID NO: 187 - RNA, 19 nt, Escherichia coli CFT073
gacauugauggucccacug

SEQ ID NO: 188 - RNA, 22 nt, Escherichia coli CFT073
gacccagugcuaacaaauguuc

SEQ ID NO: 189 - RNA, 23 nt, Escherichia coli CFT073
gaacugaauaccaaugaggagac

SEQ ID NO: 190 - RNA, 22 nt, Escherichia coli CFT073
gaaguaaggggacaucauguca

SEQ ID NO: 191 - RNA, 22 nt, Escherichia coli CFT073
gaaguggcagcgcagcagguuu

SEQ ID NO: 192 - RNA, 22 nt, Escherichia coli CFT073
gaagugggcucgccaggaagga

SEQ ID NO: 193 - RNA, 22 nt, Escherichia coli CFT073
gaaaccuggauggugcauauuu

SEQ ID NO: 194 - RNA, 22 nt, Escherichia coli CFT073
gaaacgcucgaaaaacuggcag

SEQ ID NO: 195 - RNA, 22 nt, Escherichia coli CFT073
gaaacuuugucgcguggaccca

SEQ ID NO: 196 - RNA, 22 nt, Escherichia coli CFT073
gaaagugacggauuuaacgcgg

SEQ ID NO: 197 - RNA, 18 nt, Escherichia coli CFT073
gaaauugaugccucuggc

SEQ ID NO: 198 - RNA, 19 nt, Escherichia coli CFT073
ggcagcugucaggugugcg

SEQ ID NO: 199 - RNA, 22 nt, Escherichia coli CFT073
ggcauccucaauauucaccagc

SEQ ID NO: 200 - RNA, 23 nt, Escherichia coli CFT073
ggcagaagccgguugcagugccg

SEQ ID NO: 201 - RNA, 22 nt, Escherichia coli CFT073
gcugguuaagcguauuagccaa

SEQ ID NO: 202 - RNA, 22 nt, Escherichia coli CFT073
gcugguuaucggaagagaugaa

SEQ ID NO: 203 - RNA, 22 nt, Escherichia coli CFT073
gcugguauuuucaaucgguacg

SEQ ID NO: 204 - RNA, 22 nt, Escherichia coli CFT073
gcuuaaaagcgacgcaaucaca

SEQ ID NO: 205 - RNA, 22 nt, Escherichia coli CFT073
ggaauagaaagcaggcagcuaa

SEQ ID NO: 206 - RNA, 22 nt, Escherichia coli CFT073
ggagaugcugcgugaagccgug

SEQ ID NO: 207 - RNA, 22 nt, Escherichia coli CFT073
gcuggcgagaucuuccggugua

SEQ ID NO: 208 - RNA, 22 nt, Escherichia coli CFT073
gcugccauccuccgguaccacg

SEQ ID NO: 209 - RNA, 22 nt, Escherichia coli CFT073
gcugauggcgcagguagcgccu

SEQ ID NO: 210 - RNA, 22 nt, Escherichia coli CFT073
gcguaaggcgugggaugugcuc

SEQ ID NO: 211 - RNA, 22 nt, Escherichia coli CFT073
gcgcaggcaggguaaucgggga

SEQ ID NO: 212 - RNA, 22 nt, Escherichia coli CFT073
gcccuuuuuuacuuaguagaga

SEQ ID NO: 213 - RNA, 22 nt, Escherichia coli CFT073
uagcaugugauucaauguaagc

SEQ ID NO: 214 - RNA, 22 nt, Escherichia coli CFT073
uagcggacgucgacuacuggaa

SEQ ID NO: 215 - RNA, 22 nt, Escherichia coli CFT073
uagggcugguggaggcgggacu

SEQ ID NO: 216 - RNA, 22 nt, Escherichia coli CFT073
uaguaucacuuuaucagccaag

SEQ ID NO: 217 - RNA, 22 nt, Escherichia coli CFT073
uaaguaaagggaguuugauaug

SEQ ID NO: 218 - RNA, 18 nt, Escherichia coli CFT073
uaagugaagggaguguga

SEQ ID NO: 219 - RNA, 22 nt, Escherichia coli CFT073
uacaaucuuagugcuaaauggc

SEQ ID NO: 220 - RNA, 22 nt, Escherichia coli CFT073
uacagaaaaaguuuggcaucuu

SEQ ID NO: 221 - RNA, 22 nt, Escherichia coli CFT073
uauggcaaucaucgacaaacgu

SEQ ID NO: 222 - RNA, 22 nt, Escherichia coli CFT073
uauuaaauaugaaaaguuauga

SEQ ID NO: 223 - RNA, 22 nt, Escherichia coli CFT073
uauuauguguuggguauacguc

SEQ ID NO: 224 - RNA, 22 nt, Escherichia coli CFT073
uauucccauaaacucagaucua

SEQ ID NO: 225 - RNA, 19 nt, Escherichia coli CFT073
uauuucuccggauuuuuga

SEQ ID NO: 226 - RNA, 22 nt, Escherichia coli CFT073
uauuucugccccgcaggucugg

SEQ ID NO: 227 - RNA, 22 nt, Escherichia coli CFT073
uaucaauuuaucgaccugcagc

SEQ ID NO: 228 - RNA, 23 nt, Escherichia coli CFT073
uauccacaccggacgugagaguc

SEQ ID NO: 229 - RNA, 22 nt, Escherichia coli CFT073
uaucugggaagugccuggcggu

SEQ ID NO: 230 - RNA, 22 nt, Escherichia coli CFT073
uaucuugugcuuguggcugauc

SEQ ID NO: 231 - RNA, 22 nt, Escherichia coli CFT073
uaugcaaaacugcggcgcauua

SEQ ID NO: 232 - RNA, 22 nt, Escherichia coli CFT073
uaugcauaaaaagcagcggcug

SEQ ID NO: 233 - RNA, 22 nt, Escherichia coli CFT073
uauguacaauaauaagcgaaau

SEQ ID NO: 234 - RNA, 22 nt, Escherichia coli CFT073
ucagccacugaccgcugagcaa

SEQ ID NO: 235 - RNA, 21 nt, Escherichia coli CFT073
ucaaugauggugccucgcugu

SEQ ID NO: 236 - RNA, 22 nt, Escherichia coli CFT073
ucaccagucccugaaugucucc

SEQ ID NO: 237 - RNA, 22 nt, Escherichia coli CFT073
ucaggaugccgaaguggaugau

SEQ ID NO: 238 - RNA, 22 nt, Escherichia coli CFT073
ucaggucacgcucuggaacagc

SEQ ID NO: 239 - RNA, 22 nt, Escherichia coli CFT073
ucaugaaaucgacauguacgca

SEQ ID NO: 240 - RNA, 22 nt, Escherichia coli CFT073
ucaguugggcugcgaaguuuuc

SEQ ID NO: 241 - RNA, 23 nt, Escherichia coli CFT073
ucauuuucauugguuaacucggc

SEQ ID NO: 242 - RNA, 22 nt, Escherichia coli CFT073
uccaggcaaacgccaguaaaaa

SEQ ID NO: 243 - RNA, 22 nt, Escherichia coli CFT073
ucccacaaugccaauacacuug

SEQ ID NO: 244 - RNA, 22 nt, Escherichia coli CFT073
uccggccuacaaaaucgugcaa

SEQ ID NO: 245 - RNA, 22 nt, Escherichia coli CFT073
uccuccuuucagagugcuccgc

SEQ ID NO: 246 - RNA, 16 nt, Escherichia coli CFT073
uccugggaggcagagc

SEQ ID NO: 247 - RNA, 19 nt, Escherichia coli CFT073
uccuguuccagcagucggc

SEQ ID NO: 248 - RNA, 21 nt, Escherichia coli CFT073
ucggcaauuccacgcuccagc

SEQ ID NO: 249 - RNA, 22 nt, Escherichia coli CFT073
ucggccucucuugcggucuggu

SEQ ID NO: 250 - RNA, 22 nt, Escherichia coli CFT073
guauuuccguacgucauaaccc

SEQ ID NO: 251 - RNA, 22 nt, Escherichia coli CFT073
guauuauuucugcggcagguuu

SEQ ID NO: 252 - RNA, 22 nt, Escherichia coli CFT073
gucaguuuuucacgagagauac

SEQ ID NO: 253 - RNA, 22 nt, Escherichia coli CFT073
guaaauaguccggaagaugcgc

SEQ ID NO: 254 - RNA, 22 nt, Escherichia coli CFT073
gguaaaggaguucgagaaaaau

SEQ ID NO: 255 - RNA, 22 nt, Escherichia coli CFT073
ggucagauugucuauaugaacu

SEQ ID NO: 256 - RNA, 23 nt, Escherichia coli CFT073
ggucuuccagcucaaucacuucc

SEQ ID NO: 257 - RNA, 22 nt, Escherichia coli CFT073
ggugagaaugugguggccauca

SEQ ID NO: 258 - RNA, 22 nt, Escherichia coli CFT073
gggaaucaauaucggauugauu

SEQ ID NO: 259 - RNA, 22 nt, Escherichia coli CFT073
gggacguagaagcugacgacgu

SEQ ID NO: 260 - RNA, 22 nt, Escherichia coli CFT073
ggcucagccacugacgccaggc

SEQ ID NO: 261 - RNA, 22 nt, Escherichia coli CFT073
ggcuggagcuggcgguaaucuc

SEQ ID NO: 262 - RNA, 22 nt, Escherichia coli CFT073
ggcuggcaguucaccauugccc

SEQ ID NO: 263 - RNA, 22 nt, Escherichia coli CFT073
gugaaagccugcgcgcuggcga

SEQ ID NO: 264 - RNA, 22 nt, Escherichia coli CFT073
gugaaagguuuuggucucgaug

SEQ ID NO: 265 - RNA, 22 nt, Escherichia coli CFT073
gugauuauggaugaaccgacuu

SEQ ID NO: 266 - RNA, 19 nt, Escherichia coli CFT073
gucugguggugcgcggauc

SEQ ID NO: 267 - RNA, 22 nt, Escherichia coli CFT073
gugcuggucaggaugccggacc

SEQ ID NO: 268 - RNA, 22 nt, Escherichia coli CFT073
guggcaggaucugucuccucau

SEQ ID NO: 269 - RNA, 22 nt, Escherichia coli CFT073
guugauauuguggucaagcgcg

SEQ ID NO: 270 - RNA, 22 nt, Escherichia coli CFT073
guuuuguuagcguuaaaaacac

SEQ ID NO: 271 - RNA, 22 nt, Escherichia coli CFT073
uaaacacugcacuguguauuca

SEQ ID NO: 272 - RNA, 22 nt, Escherichia coli CFT073
uaaagugaucuucuaagcccgc

SEQ ID NO: 273 - RNA, 22 nt, Escherichia coli CFT073
uaaaguuccgcguauugcguuc

SEQ ID NO: 274 - RNA, 22 nt, Escherichia coli CFT073
uaaaucaugcuguaauaaaugg

SEQ ID NO: 275 - RNA, 22 nt, Escherichia coli CFT073
uaaaucugcgcuuuguugauau

SEQ ID NO: 276 - RNA, 22 nt, Escherichia coli CFT073
aagaauuagcugacccagcguu

SEQ ID NO: 277 - RNA, 22 nt, Escherichia coli CFT073
aagagaugucauuacugaugcu

SEQ ID NO: 278 - RNA, 22 nt, Escherichia coli CFT073
aagcaguuccuuuuggcucugu

SEQ ID NO: 279 - RNA, 18 nt, Escherichia coli CFT073
aacauuuuuaaagcccgg

SEQ ID NO: 280 - RNA, 22 nt, Escherichia coli CFT073
aacgcugcgguuuugugcuggu

SEQ ID NO: 281 - RNA, 22 nt, Escherichia coli CFT073
aacagcauggggaaugaucaga

SEQ ID NO: 282 - RNA, 22 nt, Escherichia coli CFT073
aaaaaguggcggagaucccgga

SEQ ID NO: 283 - RNA, 22 nt, Escherichia coli CFT073
aaaaaucuccuugacaauuuau

SEQ ID NO: 284 - RNA, 20 nt, Escherichia coli CFT073
aaaacgugauuuuuacuggc

SEQ ID NO: 285 - RNA, 22 nt, Escherichia coli CFT073
aaaacugucugaaguggauuuu

SEQ ID NO: 286 - RNA, 22 nt, Escherichia coli CFT073
aaaagugauauuacggucucgu

SEQ ID NO: 287 - RNA, 22 nt, Escherichia coli CFT073
aaaaguggaaacagguuauccc

SEQ ID NO: 288 - RNA, 22 nt, Escherichia coli CFT073
aaaauaccgaagacagguguuc

SEQ ID NO: 289 - RNA, 22 nt, Escherichia coli CFT073
aaaaugcauuauacgguucugg

SEQ ID NO: 290 - RNA, 20 nt, Escherichia coli CFT073
aaaaugucaaugacacugua

SEQ ID NO: 291 - RNA, 22 nt, Escherichia coli CFT073
aaaauuuuggucgcagcgccau

SEQ ID NO: 292 - RNA, 22 nt, Escherichia coli CFT073
aaacugaggcugaugccagcgu

SEQ ID NO: 293 - RNA, 22 nt, Escherichia coli CFT073
aaagaaauggcgcaaauuaguu

SEQ ID NO: 294 - RNA, 22 nt, Escherichia coli CFT073
aaauaugcgacuggaaagagug

SEQ ID NO: 295 - RNA, 21 nt, Escherichia coli CFT073
aaauuuaacuacugaugauug

SEQ ID NO: 296 - RNA, 18 nt, Escherichia coli CFT073
aagggcagggcaaguacc

SEQ ID NO: 297 - RNA, 22 nt, Escherichia coli CFT073
aaguuacaucaacaaacucagg

SEQ ID NO: 298 - RNA, 22 nt, Escherichia coli CFT073
aaguuugccguggcaguggcga

SEQ ID NO: 299 - RNA, 22 nt, Escherichia coli CFT073
aauaacagacagugccaguuca

SEQ ID NO: 300 - RNA, 22 nt, Escherichia coli CFT073
aauagcauucgcuuuuggacga

SEQ ID NO: 301 - RNA, 20 nt, Escherichia coli CFT073
aagcugcaucagggcgauau

SEQ ID NO: 302 - RNA, 22 nt, Escherichia coli CFT073
aauauuugugguuuaccuucug

SEQ ID NO: 303 - RNA, 22 nt, Escherichia coli CFT073
aaucaugagcaucgaaacguuc

SEQ ID NO: 304 - RNA, 19 nt, Escherichia coli CFT073
aaucuggguuaagcguguc

SEQ ID NO: 305 - RNA, 22 nt, Escherichia coli CFT073
aauguacaaucaaaccaguuga

SEQ ID NO: 306 - RNA, 20 nt, Escherichia coli CFT073
aaugugcaggaugcguucgg

SEQ ID NO: 307 - RNA, 22 nt, Escherichia coli CFT073
aauguugucggucgccauauaa

SEQ ID NO: 308 - RNA, 22 nt, Escherichia coli CFT073
aauuaagaaagccgugcaggca

SEQ ID NO: 309 - RNA, 22 nt, Escherichia coli CFT073
aauuucaaucgcgucgcccagc

SEQ ID NO: 310 - RNA, 22 nt, Escherichia coli CFT073
aauuuuauccaguaacgccugg

SEQ ID NO: 311 - RNA, 19 nt, Escherichia coli CFT073
acaauagccaugugcaaua

SEQ ID NO: 312 - RNA, 22 nt, Escherichia coli CFT073
acuuaacagcccguuaacuuug

SEQ ID NO: 313 - RNA, 22 nt, Escherichia coli CFT073
acugucaucaaucaucuugaca

SEQ ID NO: 314 - RNA, 22 nt, Escherichia coli CFT073
agaaauaccaucaaaaucguga

SEQ ID NO: 315 - RNA, 22 nt, Escherichia coli CFT073
agaaauauuugcccggcgcguu

SEQ ID NO: 316 - RNA, 15 nt, Escherichia coli CFT073
agaagcagccaguuu

SEQ ID NO: 317 - RNA, 22 nt, Escherichia coli CFT073
acugcgaaucgggaauuaucuu

SEQ ID NO: 318 - RNA, 22 nt, Escherichia coli CFT073
agacaacaguuggaugcucauu

SEQ ID NO: 319 - RNA, 22 nt, Escherichia coli CFT073
agagcaugaucgcgugggccga

SEQ ID NO: 320 - RNA, 22 nt, Escherichia coli CFT073
agauccuucacuuaauuucauu

SEQ ID NO: 321 - RNA, 22 nt, Escherichia coli CFT073
agaucucuucgccaaagugcag

SEQ ID NO: 322 - RNA, 23 nt, Escherichia coli CFT073
agcaaacagcacgacugcucacc

SEQ ID NO: 323 - RNA, 22 nt, Escherichia coli CFT073
agcagacaaacagcgucgaggu

SEQ ID NO: 324 - RNA, 22 nt, Escherichia coli CFT073
acuaauuagccaucgauaaaaa

SEQ ID NO: 325 - RNA, 22 nt, Escherichia coli CFT073
acuacuucauuaugagcaaacu

SEQ ID NO: 326 - RNA, 22 nt, Escherichia coli CFT073
acccagguggagacguucucca

SEQ ID NO: 327 - RNA, 22 nt, Escherichia coli CFT073
acagagauguuuaauccuggcg

SEQ ID NO: 328 - RNA, 22 nt, Escherichia coli CFT073
acagggcuguagcaugcgucga

SEQ ID NO: 329 - RNA, 22 nt, Escherichia coli CFT073
acagggcuugcuaaugcugaug

SEQ ID NO: 330 - RNA, 22 nt, Escherichia coli CFT073
aggaaauugugucagcgaauug

SEQ ID NO: 331 - RNA, 22 nt, Escherichia coli CFT073
aggaagaugccucucaguugcg

SEQ ID NO: 332 - RNA, 22 nt, Escherichia coli CFT073
agcagcaacgcuggcuggagca

SEQ ID NO: 333 - RNA, 22 nt, Escherichia coli CFT073
agcaggccaucacgaccuugcu

SEQ ID NO: 334 - RNA, 22 nt, Escherichia coli CFT073
aguuccuuauaauauucaauga

SEQ ID NO: 335 - RNA, 22 nt, Escherichia coli CFT073
aguuccuuauaguauucaauga

SEQ ID NO: 336 - RNA, 22 nt, Escherichia coli CFT073
aguuuacaacgcauuguuaaag

SEQ ID NO: 337 - RNA, 20 nt, Escherichia coli CFT073
agugaaauccaacaguagcc

SEQ ID NO: 338 - RNA, 22 nt, Escherichia coli CFT073
auacagaaagcuuauaaugcga

SEQ ID NO: 339 - RNA, 19 nt, Escherichia coli CFT073
aggugauugaaaccgaucu

SEQ ID NO: 340 - RNA, 22 nt, Escherichia coli CFT073
aguaaaagugcgcaguuauggc

SEQ ID NO: 341 - RNA, 22 nt, Escherichia coli CFT073
agguggcaaaauuugggacaaa

SEQ ID NO: 342 - RNA, 22 nt, Escherichia coli CFT073
aguaacugcuugguaucuuucg

SEQ ID NO: 343 - RNA, 22 nt, Escherichia coli CFT073
aguaucaauagugauaucgcca

SEQ ID NO: 344 - RNA, 22 nt, Escherichia coli CFT073
aggcucaguacgcagcugaaga

SEQ ID NO: 345 - RNA, 22 nt, Escherichia coli CFT073
aggcacauaacagcuaaguauu

SEQ ID NO: 346 - RNA, 22 nt, Escherichia coli CFT073
agggcugcuugcuguucuccau

SEQ ID NO: 347 - RNA, 22 nt, Escherichia coli CFT073
aggucaaucaucuguucacuau

SEQ ID NO: 348 - RNA, 22 nt, Escherichia coli CFT073
auaucguugcuaauaauucuaa

SEQ ID NO: 349 - RNA, 22 nt, Escherichia coli CFT073
auagcaccgagaacaguaccgc

SEQ ID NO: 350 - RNA, 22 nt, Escherichia coli CFT073
auagcagcgugcuugucccugu

SEQ ID NO: 351 - RNA, 20 nt, Escherichia coli CFT073
aucaaaaggcagauaacguc

SEQ ID NO: 352 - RNA, 22 nt, Escherichia coli CFT073
aucaaacaggugcuggaguggu

SEQ ID NO: 353 - RNA, 22 nt, Escherichia coli CFT073
auauugaaggggcgagcaaaca

SEQ ID NO: 354 - RNA, 22 nt, Escherichia coli CFT073
auccuuaaccaugccgauaacg

SEQ ID NO: 355 - RNA, 22 nt, Escherichia coli CFT073
auccuucccgaaaaauauguau

SEQ ID NO: 356 - RNA, 21 nt, Escherichia coli CFT073
aucauucaccuguuguaacuc

SEQ ID NO: 357 - RNA, 22 nt, Escherichia coli CFT073
aucauaaugguacacuuuauag

SEQ ID NO: 358 - RNA, 22 nt, Escherichia coli CFT073
auggcgauauagucuuucacgc

SEQ ID NO: 359 - RNA, 22 nt, Escherichia coli CFT073
auggcgaucaggugcuggcuca

SEQ ID NO: 360 - RNA, 22 nt, Escherichia coli CFT073
auggaaggaucuggauucugga

SEQ ID NO: 361 - RNA, 22 nt, Escherichia coli CFT073
auggaagggauugaagagccgc

SEQ ID NO: 362 - RNA, 22 nt, Escherichia coli CFT073
auggcaauugccgguucgcugg

SEQ ID NO: 363 - RNA, 22 nt, Escherichia coli CFT073
aucuugaagugccaugggcgca

SEQ ID NO: 364 - RNA, 22 nt, Escherichia coli CFT073
aucuucucugcuuuuggcuggg

SEQ ID NO: 365 - RNA, 22 nt, Escherichia coli CFT073
augaaaacucugcggcauggcg

SEQ ID NO: 366 - RNA, 22 nt, Escherichia coli CFT073
augaauauuuagacuaaagagu

SEQ ID NO: 367 - RNA, 20 nt, Escherichia coli CFT073
augaaucagagaaaaaguga

SEQ ID NO: 368 - RNA, 22 nt, Escherichia coli CFT073
augacaaucgacggcuuuagau

SEQ ID NO: 369 - RNA, 22 nt, Escherichia coli CFT073
augauaaaacucacuaaacugu

SEQ ID NO: 370 - RNA, 22 nt, Escherichia coli CFT073
cguuuuauccggccuacaauga

SEQ ID NO: 371 - RNA, 22 nt, Escherichia coli CFT073
cugagaagugaugcugucagca

SEQ ID NO: 372 - RNA, 22 nt, Escherichia coli CFT073
cggcccagcuuuucccucucuc

SEQ ID NO: 373 - RNA, 22 nt, Escherichia coli CFT073
cggagagcgaguccagccugau

SEQ ID NO: 374 - RNA, 22 nt, Escherichia coli CFT073
cggaggacagccgugcauggug

SEQ ID NO: 375 - RNA, 22 nt, Escherichia coli CFT073
cgcacaggauuauuacggugug

SEQ ID NO: 376 - RNA, 22 nt, Escherichia coli CFT073
cgagcuggaaaccuuccugcug

SEQ ID NO: 377 - RNA, 22 nt, Escherichia coli CFT073
ccugggaagauguaagccgcca

SEQ ID NO: 378 - RNA, 21 nt, Escherichia coli CFT073
ccucgcuggucguuauccugc

SEQ ID NO: 379 - RNA, 22 nt, Escherichia coli CFT073
ccguaaaacgcaaucaaaauga

SEQ ID NO: 380 - RNA, 22 nt, Escherichia coli CFT073
ccaguuucuccugcaaugacaa

SEQ ID NO: 381 - RNA, 22 nt, Escherichia coli CFT073
cccaguccaacaccagcgggcg

SEQ ID NO: 382 - RNA, 22 nt, Escherichia coli CFT073
ccccccuauaguauauugcaug

SEQ ID NO: 383 - RNA, 21 nt, Escherichia coli CFT073
caguaaaacgcaccauacugu

SEQ ID NO: 384 - RNA, 22 nt, Escherichia coli CFT073
caguaacacuuccgcacugacc

SEQ ID NO: 385 - RNA, 20 nt, Escherichia coli CFT073
caguuugcuucugcauccac

SEQ ID NO: 386 - RNA, 22 nt, Escherichia coli CFT073
caucccccgugguccgccagua

SEQ ID NO: 387 - RNA, 22 nt, Escherichia coli CFT073
caucgugucuucauagcccugc

SEQ ID NO: 388 - RNA, 22 nt, Escherichia coli CFT073
caugaaaacaguguuauguugu

SEQ ID NO: 389 - RNA, 22 nt, Escherichia coli CFT073
caugaugggcaugaaugucaua

SEQ ID NO: 390 - RNA, 22 nt, Escherichia coli CFT073
cauguguaguaucgcaaacaua

SEQ ID NO: 391 - RNA, 22 nt, Escherichia coli CFT073
cauugaaaauaaauauccuccg

SEQ ID NO: 392 - RNA, 20 nt, Escherichia coli CFT073
cauuggcugguuguuggggc

SEQ ID NO: 393 - RNA, 22 nt, Escherichia coli CFT073
ccagaauucagguugcauccgu

SEQ ID NO: 394 - RNA, 22 nt, Escherichia coli CFT073
cagggcgcgaaugacagcagug

SEQ ID NO: 395 - RNA, 22 nt, Escherichia coli CFT073
cagccaguuaacgcuggcgcag

SEQ ID NO: 396 - RNA, 22 nt, Escherichia coli CFT073
cagcagcaguaugcagacgcug

SEQ ID NO: 397 - RNA, 22 nt, Escherichia coli CFT073
cagagcuggcccgacagauggc

SEQ ID NO: 398 - RNA, 22 nt, Escherichia coli CFT073
cagaaacguuguuaacccggca

SEQ ID NO: 399 - RNA, 22 nt, Escherichia coli CFT073
caccaaaaugacgcacuuugcc

SEQ ID NO: 400 - RNA, 22 nt, Escherichia coli CFT073
cacacgauccgcucgguuccga

SEQ ID NO: 401 - RNA, 22 nt, Escherichia coli CFT073
auguguucugggaucugcagga

SEQ ID NO: 402 - RNA, 22 nt, Escherichia coli CFT073
auguuuuaagcucugugagcga

SEQ ID NO: 403 - RNA, 22 nt, Escherichia coli CFT073
auuaauuugcuggaaauauuua

SEQ ID NO: 404 - RNA, 22 nt, Escherichia coli CFT073
auuaucaacggcgaagugcccg

SEQ ID NO: 405 - RNA, 22 nt, Escherichia coli CFT073
auugagcauaacuuuaaugcgc

SEQ ID NO: 406 - RNA, 22 nt, Escherichia coli CFT073
auuguaucccugauuauucaga

SEQ ID NO: 407 - RNA, 17 nt, Escherichia coli CFT073
auuucugcucauccagc

SEQ ID NO: 408 - RNA, 22 nt, Escherichia coli CFT073
caaaacugaugcagaaugcaga

SEQ ID NO: 409 - RNA, 22 nt, Escherichia coli CFT073
caaauuuuaccucguugguauc

SEQ ID NO: 410 - RNA, 22 nt, Escherichia coli CFT073
caauucugaacuacagccguag

SEQ ID NO: 411 - RNA, 22 nt, Escherichia coli CFT073
cacacagggcugaugauguucc

SEQ ID NO: 412 - RNA, 22 nt, Escherichia coli CFT073
uuuuacuggcgaugaaguacac

SEQ ID NO: 413 - RNA, 22 nt, Escherichia coli CFT073
uuuuauacucuaagaaaucagg

SEQ ID NO: 414 - RNA, 22 nt, Escherichia coli CFT073
uuuuauauuagccaggaacuuu

SEQ ID NO: 415 - RNA, 22 nt, Escherichia coli CFT073
uuuguaacguugcaggaugucg

SEQ ID NO: 416 - RNA, 22 nt, Escherichia coli CFT073
uuugcaggccugauaagcguag

SEQ ID NO: 417 - RNA, 22 nt, Escherichia coli CFT073
uuuggcuucagcguuuugcagg

SEQ ID NO: 418 - RNA, 20 nt, Escherichia coli CFT073
uuuugaccaacagugcuggc

SEQ ID NO: 419 - RNA, 22 nt, Escherichia coli CFT073
uuuugguguugcagccguggca

SEQ ID NO: 420 - RNA, 21 nt, Escherichia coli CFT073
uuuauagagcgaggccaguga

SEQ ID NO: 421 - RNA, 22 nt, Escherichia coli CFT073
uuuaugaugugugaaaaguuag

SEQ ID NO: 422 - RNA, 22 nt, Escherichia coli CFT073
uuuaugcucauuuguaggucgg

SEQ ID NO: 423 - RNA, 22 nt, Escherichia coli CFT073
uuucaaaaugauaacuucgcaa

SEQ ID NO: 424 - RNA, 22 nt, Escherichia coli CFT073
uuucaauacuuaucgauuccuu

SEQ ID NO: 425 - RNA, 22 nt, Escherichia coli CFT073
uuucacggucggccaguauuug

SEQ ID NO: 426 - RNA, 22 nt, Escherichia coli CFT073
uguggcauauguucgcgcaugg

SEQ ID NO: 427 - RNA, 22 nt, Escherichia coli CFT073
uguaauuaaaaccuggcucaua

SEQ ID NO: 428 - RNA, 22 nt, Escherichia coli CFT073
uguagcagcugccagcgaagcg

SEQ ID NO: 429 - RNA, 17 nt, Escherichia coli CFT073
uggugaacuggaaagcc

SEQ ID NO: 430 - RNA, 23 nt, Escherichia coli CFT073
ugguggcagagauugccgaucgg

SEQ ID NO: 431 - RNA, 22 nt, Escherichia coli CFT073
ugguuuggcgcugacgucauua

SEQ ID NO: 432 - RNA, 22 nt, Escherichia coli CFT073
uggggauguuaagcuggaguug

SEQ ID NO: 433 - RNA, 22 nt, Escherichia coli CFT073
uggucugucauacuuuguuacc

SEQ ID NO: 434 - RNA, 22 nt, Escherichia coli CFT073
ugugguguaagcacaguaguag

SEQ ID NO: 435 - RNA, 21 nt, Escherichia coli CFT073
uuaaaaaccggaggcaacaug

SEQ ID NO: 436 - RNA, 22 nt, Escherichia coli CFT073
uuaaauaucacccuguuugcca

SEQ ID NO: 437 - RNA, 22 nt, Escherichia coli CFT073
uuaaauuguuuaaugguauuga

SEQ ID NO: 438 - RNA, 22 nt, Escherichia coli CFT073
uuaagcuuugcacuccauuuau

SEQ ID NO: 439 - RNA, 22 nt, Escherichia coli CFT073
uuaccauaaugauuuucaugug

SEQ ID NO: 440 - RNA, 22 nt, Escherichia coli CFT073
uuauauguauuccagagguuua

SEQ ID NO: 441 - RNA, 22 nt, Escherichia coli CFT073
uuauuucugccgcguugcaaac

SEQ ID NO: 442 - RNA, 22 nt, Escherichia coli CFT073
uucaaaaccggcuuuuugcaau

SEQ ID NO: 443 - RNA, 22 nt, Escherichia coli CFT073
uucaaaauggugcggaauuuua

SEQ ID NO: 444 - RNA, 22 nt, Escherichia coli CFT073
uucagaauuuggcgaucugaaa

SEQ ID NO: 445 - RNA, 20 nt, Escherichia coli CFT073
uugaugaauuugcuguaaga

SEQ ID NO: 446 - RNA, 21 nt, Escherichia coli CFT073
uugaccugguugcagcacagc

SEQ ID NO: 447 - RNA, 20 nt, Escherichia coli CFT073
uucuggauuuugccaucaau

SEQ ID NO: 448 - RNA, 22 nt, Escherichia coli CFT073
uucuucaaucugacgcaucagg

SEQ ID NO: 449 - RNA, 22 nt, Escherichia coli CFT073
uucuucauuuuguaaggcgaac

SEQ ID NO: 450 - RNA, 22 nt, Escherichia coli CFT073
uucuucugguuauuaugccugc

SEQ ID NO: 451 - RNA, 22 nt, Escherichia coli CFT073
uucccugugacaaugauacagu

SEQ ID NO: 452 - RNA, 22 nt, Escherichia coli CFT073
uuccggguccaggagcaucauu

SEQ ID NO: 453 - RNA, 22 nt, Escherichia coli CFT073
uuccuguucgcgcugcucuuca

SEQ ID NO: 454 - RNA, 22 nt, Escherichia coli CFT073
uuccuguuuauaaaaggagagg

SEQ ID NO: 455 - RNA, 22 nt, Escherichia coli CFT073
uucucucugccugccgaggcca

SEQ ID NO: 456 - RNA, 22 nt, Escherichia coli CFT073
uugguaucguugggcugguguu

SEQ ID NO: 457 - RNA, 22 nt, Escherichia coli CFT073
uuguaaauuuccucuuugcuaa

SEQ ID NO: 458 - RNA, 22 nt, Escherichia coli CFT073
uuguuguucauguaugcauguu

SEQ ID NO: 459 - RNA, 22 nt, Escherichia coli CFT073
uuuaaguuaaucgaccauacug

SEQ ID NO: 460 - RNA, 22 nt, Escherichia coli CFT073
ucugguggcgaugucccugugg

SEQ ID NO: 461 - RNA, 22 nt, Escherichia coli CFT073
ucuuauuucaucgguucaugug

SEQ ID NO: 462 - RNA, 22 nt, Escherichia coli CFT073
ucuucuuuagccgcuucaauau

SEQ ID NO: 463 - RNA, 22 nt, Escherichia coli CFT073
ucuccugcggccacagcaguaa

SEQ ID NO: 464 - RNA, 22 nt, Escherichia coli CFT073
ucugacauaagggcacugcuga

SEQ ID NO: 465 - RNA, 18 nt, Escherichia coli CFT073
ucugaaagcugacaaugc

SEQ ID NO: 466 - RNA, 22 nt, Escherichia coli CFT073
ucuggcggcacucucugucccu

SEQ ID NO: 467 - RNA, 22 nt, Escherichia coli CFT073
ucuggcggcgguagaccgagag

SEQ ID NO: 468 - RNA, 22 nt, Escherichia coli CFT073
ugaagcagguauggcccaucac

SEQ ID NO: 469 - RNA, 22 nt, Escherichia coli CFT073
ugaauaaaccaucaugauuuuu

SEQ ID NO: 470 - RNA, 22 nt, Escherichia coli CFT073
ugaauacacagugcaguguuua

SEQ ID NO: 471 - RNA, 22 nt, Escherichia coli CFT073
ugaauauggcguggagucgcug

SEQ ID NO: 472 - RNA, 22 nt, Escherichia coli CFT073
ugaaaaacggcugcggaauuag

SEQ ID NO: 473 - RNA, 22 nt, Escherichia coli CFT073
ugaaaaguaaaguguuagauga

SEQ ID NO: 474 - RNA, 22 nt, Escherichia coli CFT073
ugaaagagcuggggaugcauuc

SEQ ID NO: 475 - RNA, 19 nt, Escherichia coli CFT073
ugaaaggcgcuggaugacg

SEQ ID NO: 476 - RNA, 22 nt, Escherichia coli CFT073
ugaaaggguuagcaguauauga

SEQ ID NO: 477 - RNA, 23 nt, Escherichia coli CFT073
ugaaauccuuaugaaacaaagua

SEQ ID NO: 478 - RNA, 22 nt, Escherichia coli CFT073
ugaagagcguucaagcgccguu

SEQ ID NO: 479 - RNA, 22 nt, Escherichia coli CFT073
ugcagcaugucaucugcauuuu

SEQ ID NO: 480 - RNA, 22 nt, Escherichia coli CFT073
ugcaacuggaguuaauuucguu

SEQ ID NO: 481 - RNA, 22 nt, Escherichia coli CFT073
ugauuaucgcuggucugcugcc

SEQ ID NO: 482 - RNA, 22 nt, Escherichia coli CFT073
ugaggcugccgggaaaguuuug

SEQ ID NO: 483 - RNA, 22 nt, Escherichia coli CFT073
ugaggcugcgcagcagucgcca

SEQ ID NO: 484 - RNA, 22 nt, Escherichia coli CFT073
ugaucacaguauuaucaaugac

SEQ ID NO: 485 - RNA, 22 nt, Escherichia coli CFT073
ugaugccuggcagccacuucaa

SEQ ID NO: 486 - RNA, 22 nt, Escherichia coli CFT073
ugaaugacagcgccgggcaugc

SEQ ID NO: 487 - RNA, 20 nt, Escherichia coli CFT073
ugcugcagcaagguaaaggc

SEQ ID NO: 488 - RNA, 22 nt, Escherichia coli CFT073
ugcugggauuaaccuucuuuuc

SEQ ID NO: 489 - RNA, 22 nt, Escherichia coli CFT073
ugcuggggaaaacauggucgau

SEQ ID NO: 490 - RNA, 22 nt, Escherichia coli CFT073
ugcuaucuggugagagugucgg

SEQ ID NO: 491 - RNA, 22 nt, Escherichia coli CFT073
ugcugaaacagaaacaguaugc

SEQ ID NO: 492 - RNA, 22 nt, Escherichia coli CFT073
ugcuggagucugccggacugga

SEQ ID NO: 493 - RNA, 18 nt, Escherichia coli CFT073
ugcauaauccuucugagc

SEQ ID NO: 494 - RNA, 22 nt, Escherichia coli CFT073
ugcaucacaaaccugaaaagaa

SEQ ID NO: 495 - RNA, 22 nt, Escherichia coli CFT073
ugccaucacgucgauuaucgcc

SEQ ID NO: 496 - RNA, 20 nt, Escherichia coli CFT073
uggccuguggcuguaugcgc

SEQ ID NO: 497 - RNA, 22 nt, Escherichia coli CFT073
uggccuuggaacgauguauccu

SEQ ID NO: 498 - RNA, 22 nt, Escherichia coli CFT073
uggcgauaagucucuuccuggu

SEQ ID NO: 499 - RNA, 20 nt, Escherichia coli CFT073
uggcaugguaagcgaagcgc

SEQ ID NO: 500 - RNA, 22 nt, Escherichia coli CFT073
uggcaggccauuggguugagaa

SEQ ID NO: 501 - RNA, 22 nt, Escherichia coli CFT073
uggauagccaggcaggguugua

SEQ ID NO: 502 - RNA, 22 nt, Escherichia coli CFT073
uggaauaucucggcagcuucug

SEQ ID NO: 503 - RNA, 21 nt, Escherichia coli CFT073
uggaggacgagguauugacca

SEQ ID NO: 504 - RNA, 19 nt, Haemophilus influenzae Rd
ugccggcguggcgauugca

SEQ ID NO: 505 - RNA, 22 nt, Haemophilus influenzae Rd
ugcgguaaaaaauucgaggguu

SEQ ID NO: 506 - RNA, 22 nt, Haemophilus influenzae Rd
ucuuccuuaaaacaacagcuuu

SEQ ID NO: 507 - RNA, 22 nt, Haemophilus influenzae Rd
uugcggaaaacagucguuuauu

SEQ ID NO: 508 - RNA, 21 nt, Haemophilus influenzae Rd
uucuuucguuuguccaggcaa

SEQ ID NO: 509 - RNA, 22 nt, Haemophilus influenzae Rd
uugacaauggguuuugaugaug

SEQ ID NO: 510 - RNA, 22 nt, Haemophilus influenzae Rd
uuauaaauaucaguauagcaac

SEQ ID NO: 511 - RNA, 22 nt, Haemophilus influenzae Rd
uuaauaaagguggugcgaccgu

SEQ ID NO: 512 - RNA, 18 nt, Haemophilus influenzae Rd
uuagaacuuuaucaugcu

SEQ ID NO: 513 - RNA, 22 nt, Haemophilus influenzae Rd
uuaaugcacgaccacgguuugu

SEQ ID NO: 514 - RNA, 21 nt, Haemophilus influenzae Rd
uuuccagugcuuuauauuaag

SEQ ID NO: 515 - RNA, 22 nt, Haemophilus influenzae Rd
caaaugaucggcuucuuuuucu

SEQ ID NO: 516 - RNA, 19 nt, Haemophilus influenzae Rd
auuuucuaccaacauugca

SEQ ID NO: 517 - RNA, 22 nt, Haemophilus influenzae Rd
auuacuuauaugaucauagccu

SEQ ID NO: 518 - RNA, 22 nt, Haemophilus influenzae Rd
auuuaaaauggcaucggcuugu

SEQ ID NO: 519 - RNA, 22 nt, Haemophilus influenzae Rd
auuaaugaauuacgauuucacc

SEQ ID NO: 520 - RNA, 22 nt, Haemophilus influenzae Rd
auguuggaucgggcgcaauaag

SEQ ID NO: 521 - RNA, 22 nt, Haemophilus influenzae Rd
auguggaaaaugugagcaagcu

SEQ ID NO: 522 - RNA, 22 nt, Haemophilus influenzae Rd
cacuagaacaguuuuagaaugc

SEQ ID NO: 523 - RNA, 22 nt, Haemophilus influenzae Rd
caucuuguuuuuaugccugaaa

SEQ ID NO: 524 - RNA, 22 nt, Haemophilus influenzae Rd
ccccuucaaauauaacgacguu

SEQ ID NO: 525 - RNA, 22 nt, Haemophilus influenzae Rd
ccccuuccgcccuucgggcacc

SEQ ID NO: 526 - RNA, 22 nt, Haemophilus influenzae Rd
cggaagcguuagcagcagcaaa

SEQ ID NO: 527 - RNA, 22 nt, Haemophilus influenzae Rd
auguauuccguucaagaacaaa

SEQ ID NO: 528 - RNA, 22 nt, Haemophilus influenzae Rd
auauucuuauugcaacuuaugc

SEQ ID NO: 529 - RNA, 23 nt, Haemophilus influenzae Rd
auauuguggcucaauuggcuugg

SEQ ID NO: 530 - RNA, 22 nt, Haemophilus influenzae Rd
aucaacuugcuaaagauuuagu

SEQ ID NO: 531 - RNA, 22 nt, Haemophilus influenzae Rd
auauuucacaaugucagaagau

SEQ ID NO: 532 - RNA, 22 nt, Haemophilus influenzae Rd
auaggauggguuucugcccacc

SEQ ID NO: 533 - RNA, 22 nt, Haemophilus influenzae Rd
auacaauauuggcuaugaugca

SEQ ID NO: 534 - RNA, 22 nt, Haemophilus influenzae Rd
agcagcugauuguauuggaaga

SEQ ID NO: 535 - RNA, 22 nt, Haemophilus influenzae Rd
aauuuauccucugauguagggc

SEQ ID NO: 536 - RNA, 22 nt, Haemophilus influenzae Rd
accauuuacuaauaagcgauug

SEQ ID NO: 537 - RNA, 22 nt, Haemophilus influenzae Rd
acgagcgugguaucaacguuug

SEQ ID NO: 538 - RNA, 22 nt, Haemophilus influenzae Rd
agcaacuuuuacuuuaaugagu

SEQ ID NO: 539 - RNA, 20 nt, Haemophilus influenzae Rd
agauuguuguggcaaauuuc

SEQ ID NO: 540 - RNA, 18 nt, Haemophilus influenzae Rd
acuuuuaacacuuaguca

SEQ ID NO: 541 - RNA, 22 nt, Haemophilus influenzae Rd
aauuaaaacaucagguuuauua

SEQ ID NO: 542 - RNA, 22 nt, Haemophilus influenzae Rd
aauaaauugaagcaauugguug

SEQ ID NO: 543 - RNA, 22 nt, Haemophilus influenzae Rd
aauaacaugguacgagaugcgu

SEQ ID NO: 544 - RNA, 22 nt, Haemophilus influenzae Rd
aaauauugugacaaaugauauu

SEQ ID NO: 545 - RNA, 22 nt, Haemophilus influenzae Rd
aaacaucacaucagaaagauca

SEQ ID NO: 546 - RNA, 22 nt, Haemophilus influenzae Rd
aaaaaaagaggcgugauuauag

SEQ ID NO: 547 - RNA, 22 nt, Haemophilus influenzae Rd
aacaaugccacugccauaacga

SEQ ID NO: 548 - RNA, 22 nt, Haemophilus influenzae Rd
aacuaggauuagcaagcauauu

SEQ ID NO: 549 - RNA, 22 nt, Haemophilus influenzae Rd
uaaauauuacguaacugaaaug

SEQ ID NO: 550 - RNA, 22 nt, Haemophilus influenzae Rd
guugggaacccuggauguggug

SEQ ID NO: 551 - RNA, 22 nt, Haemophilus influenzae Rd
gugggaugcucguuuaacugca

SEQ ID NO: 552 - RNA, 22 nt, Haemophilus influenzae Rd
guauuucaucacgucuuacuuu

SEQ ID NO: 553 - RNA, 22 nt, Haemophilus influenzae Rd
ucgcuagaaugaggcguuuaau

SEQ ID NO: 554 - RNA, 22 nt, Haemophilus influenzae Rd
ucaucuuuuacgaagugcaucg

SEQ ID NO: 555 - RNA, 22 nt, Haemophilus influenzae Rd
ucccaauuuagcugccgugauu

SEQ ID NO: 556 - RNA, 22 nt, Haemophilus influenzae Rd
uauuuuaacggugaugacaauc

SEQ ID NO: 557 - RNA, 22 nt, Haemophilus influenzae Rd
uaugaacucgcgaacgaagaga

SEQ ID NO: 558 - RNA, 22 nt, Haemophilus influenzae Rd
uauuguuaaagugaaaaauggu

SEQ ID NO: 559 - RNA, 22 nt, Haemophilus influenzae Rd
uaaugauuuacaaagcauacau

SEQ ID NO: 560 - RNA, 22 nt, Haemophilus influenzae Rd
uaauuauuggcaucguuuuagg

SEQ ID NO: 561 - RNA, 22 nt, Haemophilus influenzae Rd
uacaaaauuaccgcacuuuagg

SEQ ID NO: 562 - RNA, 22 nt, Haemophilus influenzae Rd
uaauauaacggacguagaugac

SEQ ID NO: 563 - RNA, 22 nt, Haemophilus influenzae Rd
gaaaaugugcggugcaaaacau

SEQ ID NO: 564 - RNA, 22 nt, Haemophilus influenzae Rd
gcauaacagaacccaguuaaac

SEQ ID NO: 565 - RNA, 21 nt, Haemophilus influenzae Rd
gcaaaugugauuugccccuac

SEQ ID NO: 566 - RNA, 22 nt, Homo sapiens
gcaagacaugucuaagguuuaa

SEQ ID NO: 567 - RNA, 22 nt, Homo sapiens
gcacauauguaaauagcugccu

SEQ ID NO: 568 - RNA, 22 nt, Homo sapiens
gcaccacugcacucucagcuug

SEQ ID NO: 569 - RNA, 22 nt, Homo sapiens
gcaccaugguagaauaauggua

SEQ ID NO: 570 - RNA, 22 nt, Homo sapiens
gcaaugcugucugugcacagau

SEQ ID NO: 571 - RNA, 22 nt, Homo sapiens
gcagcacauggcagaacauauu

SEQ ID NO: 572 - RNA, 22 nt, Homo sapiens
gcagaauugguuucuucuaagg

SEQ ID NO: 573 - RNA, 22 nt, Homo sapiens
gcagagaaacaggucuaaggag

SEQ ID NO: 574 - RNA, 22 nt, Homo sapiens
gcaggcaugacauuucacucuu

SEQ ID NO: 575 - RNA, 22 nt, Homo sapiens
gcagucacagggagauggugac

SEQ ID NO: 576 - RNA, 22 nt, Homo sapiens
gcaguggugugugccagccuag

SEQ ID NO: 577 - RNA, 22 nt, Homo sapiens
gcaguguggguagagggcaaga

SEQ ID NO: 578 - RNA, 22 nt, Homo sapiens
gcagcaucaaaucacacaagau

SEQ ID NO: 579 - RNA, 20 nt, Homo sapiens
gcauaugucuuuauagcaga

SEQ ID NO: 580 - RNA, 22 nt, Homo sapiens
gcauggagaaggggacugauuc

SEQ ID NO: 581 - RNA, 22 nt, Homo sapiens
gccaagaagugucuaagcagga

SEQ ID NO: 582 - RNA, 22 nt, Homo sapiens
gcauggccuuuaaaugucacag

SEQ ID NO: 583 - RNA, 22 nt, Homo sapiens
gaggaguagggcacaaagccuu

SEQ ID NO: 584 - RNA, 22 nt, Homo sapiens
gaggagucagacugugcaaggu

SEQ ID NO: 585 - RNA, 22 nt, Homo sapiens
gaggcuagauggggaugugucc

SEQ ID NO: 586 - RNA, 22 nt, Homo sapiens
gagcacugauuuauuuuugucu

SEQ ID NO: 587 - RNA, 22 nt, Homo sapiens
gagcaucaguggccucaucuca

SEQ ID NO: 588 - RNA, 22 nt, Homo sapiens
gagcuagguuuugaauccagac

SEQ ID NO: 589 - RNA, 22 nt, Homo sapiens
gagcugaucuuuucugauucca

SEQ ID NO: 590 - RNA, 22 nt, Homo sapiens
gagcuggacuucuuaccuuuuc

SEQ ID NO: 591 - RNA, 22 nt, Homo sapiens
gagauugucaugauuacauugu

SEQ ID NO: 592 - RNA, 22 nt, Homo sapiens
gagagcuaggccacuggggcuu

SEQ ID NO: 593 - RNA, 22 nt, Homo sapiens
gagagguaguuuuuuggucguc

SEQ ID NO: 594 - RNA, 22 nt, Homo sapiens
gagagugcuuggcaucugcuga

SEQ ID NO: 595 - RNA, 22 nt, Homo sapiens
gagauacacccagugcagaggc

SEQ ID NO: 596 - RNA, 22 nt, Homo sapiens
gagauacuugguuucuguuucu

SEQ ID NO: 597 - RNA, 22 nt, Homo sapiens
gagauauuauuucccuuucaca

SEQ ID NO: 598 - RNA, 22 nt, Homo sapiens
gagauauucugguuuacuaaau

SEQ ID NO: 599 - RNA, 22 nt, Homo sapiens
gagauauuuagaaauguguucu

SEQ ID NO: 600 - RNA, 22 nt, Homo sapiens
gagaucauguacuagaacaccu

SEQ ID NO: 601 - RNA, 23 nt, Homo sapiens
gagaucauucuggaauuagagug

SEQ ID NO: 602 - RNA, 22 nt, Homo sapiens
gagaaccauuuggagaaaaagu

SEQ ID NO: 603 - RNA, 22 nt, Homo sapiens
gagauggugugcuguuggaagu

SEQ ID NO: 604 - RNA, 22 nt, Homo sapiens
gagauguuuuguuaucaaagga

SEQ ID NO: 605 - RNA, 22 nt, Homo sapiens
gaugcagcuaggauuugugaca

SEQ ID NO: 606 - RNA, 22 nt, Homo sapiens
gaugaggcuagagacaugugua

SEQ ID NO: 607 - RNA, 22 nt, Homo sapiens
gaugagguagaagacucagcaa

SEQ ID NO: 608 - RNA, 22 nt, Homo sapiens
gaucacauuguuucauacauau

SEQ ID NO: 609 - RNA, 22 nt, Homo sapiens
gaggugauaucucauugugguu

SEQ ID NO: 610 - RNA, 22 nt, Homo sapiens
gaucugugugauuggaugcauu

SEQ ID NO: 611 - RNA, 19 nt, Homo sapiens
gaucuguugaucaaugugu

SEQ ID NO: 612 - RNA, 22 nt, Homo sapiens
gaucuguuuuccuauuguuugu

SEQ ID NO: 613 - RNA, 22 nt, Homo sapiens
gagguaaguggauuaugagguc

SEQ ID NO: 614 - RNA, 21 nt, Homo sapiens
gagguaccucauguaagugga

SEQ ID NO: 615 - RNA, 22 nt, Homo sapiens
gagguauagaacaccuuucaag

SEQ ID NO: 616 - RNA, 22 nt, Homo sapiens
gagguaucauuauguugcccag

SEQ ID NO: 617 - RNA, 22 nt, Homo sapiens
gagguauggauaucuggagagg

SEQ ID NO: 618 - RNA, 22 nt, Homo sapiens
gaggugaaggucucaauaaaua

SEQ ID NO: 619 - RNA, 22 nt, Homo sapiens
gaguaacagcauaaauuuguga

SEQ ID NO: 620 - RNA, 22 nt, Homo sapiens
gaguuagguugucaaugucuua

SEQ ID NO: 621 - RNA, 22 nt, Homo sapiens
gauaaagauagcaauagggaca

SEQ ID NO: 622 - RNA, 22 nt, Homo sapiens
gauaaaguauuggguacuaugc

SEQ ID NO: 623 - RNA, 22 nt, Homo sapiens
gauaacagauaaugucaguuau

SEQ ID NO: 624 - RNA, 18 nt, Homo sapiens
gauaacaguggacuaugc

SEQ ID NO: 625 - RNA, 22 nt, Homo sapiens
gauagcagccauucuuuuuauu

SEQ ID NO: 626 - RNA, 22 nt, Homo sapiens
gauagguucuaagcagguguug

SEQ ID NO: 627 - RNA, 21 nt, Homo sapiens
gauaucuuuauucccaagagc

SEQ ID NO: 628 - RNA, 22 nt, Homo sapiens
gauaucuuuuguauggugagcu

SEQ ID NO: 629 - RNA, 22 nt, Homo sapiens
gauauguaguaguugaaaaaga

SEQ ID NO: 630 - RNA, 19 nt, Homo sapiens
gauauguugagcacccuuu

SEQ ID NO: 631 - RNA, 22 nt, Homo sapiens
gaugccuuuuuguccucaguua

SEQ ID NO: 632 - RNA, 22 nt, Homo sapiens
gauggaguaauguaaucuugag

SEQ ID NO: 633 - RNA, 22 nt, Homo sapiens
gauggaguugucgccugggcug

SEQ ID NO: 634 - RNA, 22 nt, Homo sapiens
gauggcacuaagccauguagga

SEQ ID NO: 635 - RNA, 22 nt, Homo sapiens
gauggcacuuaagagcaagagc

SEQ ID NO: 636 - RNA, 22 nt, Homo sapiens
gaugugaaaucauaguuucuag

SEQ ID NO: 637 - RNA, 22 nt, Homo sapiens
gauguguugggaagauuucaag

SEQ ID NO: 638 - RNA, 22 nt, Homo sapiens
gauguguuuccaggauuuguuu

SEQ ID NO: 639 - RNA, 22 nt, Homo sapiens
gauguguuuuaggaucucagca

SEQ ID NO: 640 - RNA, 20 nt, Homo sapiens
gauuagagagaggcugugca

SEQ ID NO: 641 - RNA, 22 nt, Homo sapiens
gauuccauugcgaauuuucaga

SEQ ID NO: 642 - RNA, 22 nt, Homo sapiens
gauuuuccaguggcccugauca

SEQ ID NO: 643 - RNA, 22 nt, Homo sapiens
gcaaagaaugcagauuugccuc

SEQ ID NO: 644 - RNA, 22 nt, Homo sapiens
gcaaaugcuacaccauuuugua

SEQ ID NO: 645 - RNA, 22 nt, Homo sapiens
gcaaaugcuaugccauuuuaua

SEQ ID NO: 646 - RNA, 20 nt, Homo sapiens
gcaaauggaucccacaagcc

SEQ ID NO: 647 - RNA, 21 nt, Homo sapiens
gaaauacugccuuaggagcug

SEQ ID NO: 648 - RNA, 22 nt, Homo sapiens
gaaauggaucagagcaagcuuu

SEQ ID NO: 649 - RNA, 22 nt, Homo sapiens
gaaagacuuucugcuguggaua

SEQ ID NO: 650 - RNA, 22 nt, Homo sapiens
gaaagauuuccugagcuagaaa

SEQ ID NO: 651 - RNA, 22 nt, Homo sapiens
gaaagauuuuaacugggagacu

SEQ ID NO: 652 - RNA, 22 nt, Homo sapiens
gaaagguaggaacagggugcag

SEQ ID NO: 653 - RNA, 22 nt, Homo sapiens
cuuucucagugagacccgagau

SEQ ID NO: 654 - RNA, 22 nt, Homo sapiens
cuuucugaggagaauagagaac

SEQ ID NO: 655 - RNA, 22 nt, Homo sapiens
gaaaacugcuucucuggguuuc

SEQ ID NO: 656 - RNA, 22 nt, Homo sapiens
cuuugauuauaaaaggguguuu

SEQ ID NO: 657 - RNA, 18 nt, Homo sapiens
cuuugcagcuuccagagg

SEQ ID NO: 658 - RNA, 22 nt, Homo sapiens
cuuuggagaaaaguucuugggc

SEQ ID NO: 659 - RNA, 20 nt, Homo sapiens
cuuuggcaaugagaacaggg

SEQ ID NO: 660 - RNA, 22 nt, Homo sapiens
cuuuggcaaugucauuuucaau

SEQ ID NO: 661 - RNA, 22 nt, Homo sapiens
cuuuggcauuagccuguauaga

SEQ ID NO: 662 - RNA, 22 nt, Homo sapiens
cuuuggccauagcuaaaugauu

SEQ ID NO: 663 - RNA, 22 nt, Homo sapiens
cuuugguguauuuucagagacc

SEQ ID NO: 664 - RNA, 22 nt, Homo sapiens
cuuuguaugucaugacaacugu

SEQ ID NO: 665 - RNA, 23 nt, Homo sapiens
cuuuguccccacccaaaucucau

SEQ ID NO: 666 - RNA, 22 nt, Homo sapiens
cuuuuggcuuaagauugucuug

SEQ ID NO: 667 - RNA, 22 nt, Homo sapiens
cuuuuggcuuagaauugucuug

SEQ ID NO: 668 - RNA, 22 nt, Homo sapiens
gaauaaacuagagaggacugag

SEQ ID NO: 669 - RNA, 22 nt, Homo sapiens
gaaucaauugaucuaugugucu

SEQ ID NO: 670 - RNA, 22 nt, Homo sapiens
gaaucacagauuaugaguaucu

SEQ ID NO: 671 - RNA, 22 nt, Homo sapiens
gaaucacaguuauuagagcagc

SEQ ID NO: 672 - RNA, 22 nt, Homo sapiens
gaaucacugugguaucccaugc

SEQ ID NO: 673 - RNA, 22 nt, Homo sapiens
gaaucauuguuucuaaguuugu

SEQ ID NO: 674 - RNA, 22 nt, Homo sapiens
gaaugaauguuuauccuuagau

SEQ ID NO: 675 - RNA, 22 nt, Homo sapiens
gaaugauacuguuaacgaaaga

SEQ ID NO: 676 - RNA, 22 nt, Homo sapiens
gaaugcuaagcaugugggaauu

SEQ ID NO: 677 - RNA, 22 nt, Homo sapiens
gaaugcuaccagcaucuagugg

SEQ ID NO: 678 - RNA, 22 nt, Homo sapiens
gaauggaacugacuauagcuga

SEQ ID NO: 679 - RNA, 22 nt, Homo sapiens
gaauucugucgcuuacuagaug

SEQ ID NO: 680 - RNA, 22 nt, Homo sapiens
gaauuguacugcaaucagggga

SEQ ID NO: 681 - RNA, 22 nt, Homo sapiens
gaagugcuuuuggacuaacagu

SEQ ID NO: 682 - RNA, 22 nt, Homo sapiens
gaagauucaaccaaaccagaac

SEQ ID NO: 683 - RNA, 22 nt, Homo sapiens
gaagcauugauccacaggcgug

SEQ ID NO: 684 - RNA, 22 nt, Homo sapiens
gaagcgaggugauuagcagaca

SEQ ID NO: 685 - RNA, 22 nt, Homo sapiens
gaacuguuucuggugaaagagu

SEQ ID NO: 686 - RNA, 22 nt, Homo sapiens
gaacccuggaggcggagguugc

SEQ ID NO: 687 - RNA, 21 nt, Homo sapiens
gaccacagcagggaaugucag

SEQ ID NO: 688 - RNA, 22 nt, Homo sapiens
gacaccugguguggaacuggag

SEQ ID NO: 689 - RNA, 22 nt, Homo sapiens
gacacugucuucugcucuuaaa

SEQ ID NO: 690 - RNA, 21 nt, Homo sapiens
gacauggcgauacuccgucuc

SEQ ID NO: 691 - RNA, 22 nt, Homo sapiens
gacauguaaggcucucucuguu

SEQ ID NO: 692 - RNA, 22 nt, Homo sapiens
gacagugagaugucaugugaaa

SEQ ID NO: 693 - RNA, 18 nt, Homo sapiens
gacagugugaagauuccu

SEQ ID NO: 694 - RNA, 22 nt, Homo sapiens
gacagugugauacuuagucuca

SEQ ID NO: 695 - RNA, 18 nt, Homo sapiens
gacaguguggcaauuccu

SEQ ID NO: 696 - RNA, 18 nt, Homo sapiens
gacaguguggcgauuccu

SEQ ID NO: 697 - RNA, 22 nt, Homo sapiens
gacaguguggcgauuccucaag

SEQ ID NO: 698 - RNA, 18 nt, Homo sapiens
gacaguguggugauuccu

SEQ ID NO: 699 - RNA, 20 nt, Homo sapiens
gacauagagacucucaaaaa

SEQ ID NO: 700 - RNA, 22 nt, Homo sapiens
gacuagaaauuauuuagugagc

SEQ ID NO: 701 - RNA, 22 nt, Homo sapiens
gacuaggagagcagcugcccau

SEQ ID NO: 702 - RNA, 22 nt, Homo sapiens
gacuaggagauauguuuucuuc

SEQ ID NO: 703 - RNA, 19 nt, Homo sapiens
gacuccagaguugugugcu

SEQ ID NO: 704 - RNA, 22 nt, Homo sapiens
gagaacauacggcauuugguuu

SEQ ID NO: 705 - RNA, 22 nt, Homo sapiens
gagaacauuaauaguuaauuuu

SEQ ID NO: 706 - RNA, 22 nt, Homo sapiens
gagaacauuuaagccacucagg

SEQ ID NO: 707 - RNA, 22 nt, Homo sapiens
gagaacugagauaagugauauu

SEQ ID NO: 708 - RNA, 22 nt, Homo sapiens
gagaaugaugauuuccaauuuc

SEQ ID NO: 709 - RNA, 22 nt, Homo sapiens
gagaaugcaugaaagacuuaca

SEQ ID NO: 710 - RNA, 23 nt, Homo sapiens
gagaccagcuucagaaagcacga

SEQ ID NO: 711 - RNA, 22 nt, Homo sapiens
gagacggagucucgcucuguca

SEQ ID NO: 712 - RNA, 22 nt, Homo sapiens
gagacggagucucgcucugucg

SEQ ID NO: 713 - RNA, 22 nt, Homo sapiens
gagacggagucuugcucuguug

SEQ ID NO: 714 - RNA, 22 nt, Homo sapiens
gagacugagucucacucuguca

SEQ ID NO: 715 - RNA, 22 nt, Homo sapiens
gagacugagucuugcucuguca

SEQ ID NO: 716 - RNA, 22 nt, Homo sapiens
gagacugagucuugcucugucg

SEQ ID NO: 717 - RNA, 22 nt, Homo sapiens
gagacugagucuugcuuuguca

SEQ ID NO: 718 - RNA, 22 nt, Homo sapiens
gagacugaguuuugcucuuguu

SEQ ID NO: 719 - RNA, 22 nt, Homo sapiens
gagagcauuaagccaucaucau

SEQ ID NO: 720 - RNA, 18 nt, Homo sapiens
cugccagugugcucuccg

SEQ ID NO: 721 - RNA, 22 nt, Homo sapiens
cugcaguaaccacuguaggugu

SEQ ID NO: 722 - RNA, 22 nt, Homo sapiens
cugccacugacaccucaaggac

SEQ ID NO: 723 - RNA, 20 nt, Homo sapiens
cugcacauccacucuacuuc

SEQ ID NO: 724 - RNA, 22 nt, Homo sapiens
cugagauggagucucgcauugu

SEQ ID NO: 725 - RNA, 22 nt, Homo sapiens
cugaggacaucagggaagcauc

SEQ ID NO: 726 - RNA, 22 nt, Homo sapiens
cugauacugagaccuuggguua

SEQ ID NO: 727 - RNA, 22 nt, Homo sapiens
cugauugucaucaauauuauua

SEQ ID NO: 728 - RNA, 22 nt, Homo sapiens
cuggaggccugaacauaaaugg

SEQ ID NO: 729 - RNA, 22 nt, Homo sapiens
cuggaguaugaaccauguauca

SEQ ID NO: 730 - RNA, 22 nt, Homo sapiens
cuggauauguugcaacauuucc

SEQ ID NO: 731 - RNA, 20 nt, Homo sapiens
cuggaugucgaggcagaggu

SEQ ID NO: 732 - RNA, 18 nt, Homo sapiens
cuggaugucgaguguguu

SEQ ID NO: 733 - RNA, 22 nt, Homo sapiens
cuggaagaaaaucacgccaucu

SEQ ID NO: 734 - RNA, 22 nt, Homo sapiens
cuggaauguuccuaaagauuca

SEQ ID NO: 735 - RNA, 22 nt, Homo sapiens
cuggcagucugccucuucacug

SEQ ID NO: 736 - RNA, 22 nt, Homo sapiens
cuggccagagacauucauuaaa

SEQ ID NO: 737 - RNA, 22 nt, Homo sapiens
cuggcaagaggauaaaguccua

SEQ ID NO: 738 - RNA, 22 nt, Homo sapiens
cuggcaauaaauuuuuguguug

SEQ ID NO: 739 - RNA, 22 nt, Homo sapiens
cuggcaauaggcagugucccaa

SEQ ID NO: 740 - RNA, 22 nt, Homo sapiens
cuguuugaggguuugcuuucag

SEQ ID NO: 741 - RNA, 22 nt, Homo sapiens
cuuaaagcgaauauugguggua

SEQ ID NO: 742 - RNA, 22 nt, Homo sapiens
cuuaacagugguauugaugacc

SEQ ID NO: 743 - RNA, 18 nt, Homo sapiens
cuuaacauugggaugaua

SEQ ID NO: 744 - RNA, 22 nt, Homo sapiens
cugguuuguaaaguuccugaga

SEQ ID NO: 745 - RNA, 22 nt, Homo sapiens
cuguaauguaaugagacuacau

SEQ ID NO: 746 - RNA, 22 nt, Homo sapiens
cuguagcuuuuauaugcuuagc

SEQ ID NO: 747 - RNA, 22 nt, Homo sapiens
cuguaugugagaaauaauaagu

SEQ ID NO: 748 - RNA, 22 nt, Homo sapiens
cugucucagccucuccaguagc

SEQ ID NO: 749 - RNA, 22 nt, Homo sapiens
cugugcaaagcgcucucggggu

SEQ ID NO: 750 - RNA, 22 nt, Homo sapiens
cugugcauggauuuuaagauug

SEQ ID NO: 751 - RNA, 19 nt, Homo sapiens
cugugcauuucuguggaag

SEQ ID NO: 752 - RNA, 22 nt, Homo sapiens
cugugcuugagagaugacacag

SEQ ID NO: 753 - RNA, 22 nt, Homo sapiens
cugugcuugauuauaugagugu

SEQ ID NO: 754 - RNA, 22 nt, Homo sapiens
cuggugauugguuucauucagu

SEQ ID NO: 755 - RNA, 22 nt, Homo sapiens
cugggaugugacuguugccccc

SEQ ID NO: 756 - RNA, 22 nt, Homo sapiens
cuggcugagugguaaguagagg

SEQ ID NO: 757 - RNA, 22 nt, Homo sapiens
cuucuugagacuuaggcuuugg

SEQ ID NO: 758 - RNA, 22 nt, Homo sapiens
cuucaugucuucaauggggggg

SEQ ID NO: 759 - RNA, 21 nt, Homo sapiens
cugguccccuuuauguaugug

SEQ ID NO: 760 - RNA, 22 nt, Homo sapiens
cuucaaaguuggcuaggagaca

SEQ ID NO: 761 - RNA, 17 nt, Homo sapiens
cuucaaauaauuucccc

SEQ ID NO: 762 - RNA, 22 nt, Homo sapiens
cuucaaguguggccaccugacc

SEQ ID NO: 763 - RNA, 20 nt, Homo sapiens
cuucacagaaguggaaucau

SEQ ID NO: 764 - RNA, 22 nt, Homo sapiens
cuuuaugagguuggauggaucu

SEQ ID NO: 765 - RNA, 22 nt, Homo sapiens
cuuuaguugucuccucaagggu

SEQ ID NO: 766 - RNA, 18 nt, Homo sapiens
cuugucaaaucuuuccuc

SEQ ID NO: 767 - RNA, 22 nt, Homo sapiens
cuuguggugcuuuuacgugggc

SEQ ID NO: 768 - RNA, 22 nt, Homo sapiens
cuuguuguggaggggagugcag

SEQ ID NO: 769 - RNA, 22 nt, Homo sapiens
cuuuacaguuggacucacgagg

SEQ ID NO: 770 - RNA, 22 nt, Homo sapiens
cuugaucaaugugguacuugau

SEQ ID NO: 771 - RNA, 22 nt, Homo sapiens
cuugcacucagaagauucaguu

SEQ ID NO: 772 - RNA, 22 nt, Homo sapiens
cuugcacuccacuguucuccug

SEQ ID NO: 773 - RNA, 22 nt, Homo sapiens
cuugcacuugaaauuccaguuu

SEQ ID NO: 774 - RNA, 20 nt, Homo sapiens
cuugccuagcccuuugccuc

SEQ ID NO: 775 - RNA, 22 nt, Homo sapiens
cuguucaaauuguuugugaagu

SEQ ID NO: 776 - RNA, 22 nt, Homo sapiens
cuucucagugcucaucuuauuu

SEQ ID NO: 777 - RNA, 20 nt, Homo sapiens
cuuggcuuucuugguguuaa

SEQ ID NO: 778 - RNA, 22 nt, Homo sapiens
gccccgggugaugcagccguca

SEQ ID NO: 779 - RNA, 22 nt, Homo sapiens
gccuagagaaguaaauauuauc

SEQ ID NO: 780 - RNA, 22 nt, Homo sapiens
gccugagaggauaugauccccu

SEQ ID NO: 781 - RNA, 22 nt, Homo sapiens
gccuguagaagaguagaugacc

SEQ ID NO: 782 - RNA, 22 nt, Homo sapiens
gcuaggagauccacugcucucu

SEQ ID NO: 783 - RNA, 22 nt, Homo sapiens
gcuaggagaucugcugcucucu

SEQ ID NO: 784 - RNA, 22 nt, Homo sapiens
gcgguagcauagacugcaggac

SEQ ID NO: 785 - RNA, 22 nt, Homo sapiens
gcugauguugaccuugaucacc

SEQ ID NO: 786 - RNA, 22 nt, Homo sapiens
gcugcacuuuaaggcauccccu

SEQ ID NO: 787 - RNA, 22 nt, Homo sapiens
gcgugguguuagaaugagaagu

SEQ ID NO: 788 - RNA, 22 nt, Homo sapiens
gcugagaucucuugccugaacu

SEQ ID NO: 789 - RNA, 22 nt, Homo sapiens
gcuggaauuaacauagaugugc

SEQ ID NO: 790 - RNA, 22 nt, Homo sapiens
gcuggcuuucuccugaucucag

SEQ ID NO: 791 - RNA, 22 nt, Homo sapiens
gcuggguucagagugggcugcg

SEQ ID NO: 792 - RNA, 22 nt, Homo sapiens
gcugcuguuucucuuucagcau

SEQ ID NO: 793 - RNA, 22 nt, Homo sapiens
ggacagugaaugccacuccucc

SEQ ID NO: 794 - RNA, 22 nt, Homo sapiens
ggacuaggagcuaggaagaucu

SEQ ID NO: 795 - RNA, 22 nt, Homo sapiens
ggacuagggacauggggagcug

SEQ ID NO: 796 - RNA, 22 nt, Homo sapiens
ggacuguacuccuggccagugu

SEQ ID NO: 797 - RNA, 22 nt, Homo sapiens
ggagaauguaauugguauuuug

SEQ ID NO: 798 - RNA, 22 nt, Homo sapiens
ggagaugauuaugaaucacuua

SEQ ID NO: 799 - RNA, 20 nt, Homo sapiens
ggaauagucuacacucugac

SEQ ID NO: 800 - RNA, 22 nt, Homo sapiens
ggaaucugaaccaugggaaugg

SEQ ID NO: 801 - RNA, 23 nt, Homo sapiens
ggaaugaaaccugguuaugauau

SEQ ID NO: 802 - RNA, 22 nt, Homo sapiens
ggaaauguuuagcauccacuuu

SEQ ID NO: 803 - RNA, 22 nt, Homo sapiens
ggaagaauaaugggccuuagag

SEQ ID NO: 804 - RNA, 22 nt, Homo sapiens
ggaagaauauuaggggauuucg

SEQ ID NO: 805 - RNA, 22 nt, Homo sapiens
ggaagguaauugucagcucaua

SEQ ID NO: 806 - RNA, 22 nt, Homo sapiens
ggaaggucaaagggaaagcaga

SEQ ID NO: 807 - RNA, 18 nt, Homo sapiens
gcuguugucagagcacau

SEQ ID NO: 808 - RNA, 22 nt, Homo sapiens
gcugugauucuguguagauagu

SEQ ID NO: 809 - RNA, 20 nt, Homo sapiens
gcugugcuuaauacacuuuc

SEQ ID NO: 810 - RNA, 22 nt, Homo sapiens
gcuguguugugcccagcaucau

SEQ ID NO: 811 - RNA, 22 nt, Homo sapiens
gcuggugacuuuaaguugaagc

SEQ ID NO: 812 - RNA, 22 nt, Homo sapiens
gcuuguguuuacuguaguuacu

SEQ ID NO: 813 - RNA, 18 nt, Homo sapiens
ggaaaacuuuucuaagua

SEQ ID NO: 814 - RNA, 23 nt, Homo sapiens
ggaaacauccagucuuucaccau

SEQ ID NO: 815 - RNA, 22 nt, Homo sapiens
ggaaagacaccuuacuauguua

SEQ ID NO: 816 - RNA, 22 nt, Homo sapiens
ggaaagauguaauauuaucuaa

SEQ ID NO: 817 - RNA, 22 nt, Homo sapiens
ggaaagcuagguguggguguac

SEQ ID NO: 818 - RNA, 22 nt, Homo sapiens
gcuuuguugauggugagucugu

SEQ ID NO: 819 - RNA, 22 nt, Homo sapiens
ggcagacuguggaguucuuucu

SEQ ID NO: 820 - RNA, 23 nt, Homo sapiens
ggcaagaucucagcucacugcaa

SEQ ID NO: 821 - RNA, 22 nt, Homo sapiens
ggcaagaucuuggcucacugaa

SEQ ID NO: 822 - RNA, 19 nt, Homo sapiens
ggcaauacuuucuuguugg

SEQ ID NO: 823 - RNA, 22 nt, Homo sapiens
ggcaaugaggcggaccagcagg

SEQ ID NO: 824 - RNA, 22 nt, Homo sapiens
ggcacaaugucagcucacugca

SEQ ID NO: 825 - RNA, 22 nt, Homo sapiens
ggagcugugauuugaguccaga

SEQ ID NO: 826 - RNA, 22 nt, Homo sapiens
ggagcucaucuagcauagaggu

SEQ ID NO: 827 - RNA, 22 nt, Homo sapiens
ggagucugauuuuuauguugcu

SEQ ID NO: 828 - RNA, 23 nt, Homo sapiens
ggaguguaaugacucgaucucgg

SEQ ID NO: 829 - RNA, 23 nt, Homo sapiens
ggaguguauuggcacgaucucag

SEQ ID NO: 830 - RNA, 22 nt, Homo sapiens
ggaguguguaggagaaagguaa

SEQ ID NO: 831 - RNA, 22 nt, Homo sapiens
ggaucacuugagaccaggaguu

SEQ ID NO: 832 - RNA, 22 nt, Homo sapiens
ggaucauaugauagcucaauuu

SEQ ID NO: 833 - RNA, 22 nt, Homo sapiens
ggcaguuuguuugugaggucca

SEQ ID NO: 834 - RNA, 22 nt, Homo sapiens
ggcagcucaggccccgcgcuga

SEQ ID NO: 835 - RNA, 22 nt, Homo sapiens
ggcagcuguguccuucguaagg

SEQ ID NO: 836 - RNA, 22 nt, Homo sapiens
ggcagcaugggugccuuuguga

SEQ ID NO: 837 - RNA, 22 nt, Homo sapiens
ggcagcauugccuuugcaguga

SEQ ID NO: 838 - RNA, 23 nt, Homo sapiens
ggauggaaaguuuugagggccac

SEQ ID NO: 839 - RNA, 22 nt, Homo sapiens
ggcacuguggcucaagccugua

SEQ ID NO: 840 - RNA, 22 nt, Homo sapiens
ggccggguggccauggcugccc

SEQ ID NO: 841 - RNA, 22 nt, Homo sapiens
ggccuguaaacuagagacccug

SEQ ID NO: 842 - RNA, 22 nt, Homo sapiens
ggccuguaggguauugguaggg

SEQ ID NO: 843 - RNA, 22 nt, Homo sapiens
uaauauguuuugaaaucaggaa

SEQ ID NO: 844 - RNA, 22 nt, Homo sapiens
uaaucacagagguuuggccuca

SEQ ID NO: 845 - RNA, 22 nt, Homo sapiens
uaauccuagcacuuuggaagac

SEQ ID NO: 846 - RNA, 22 nt, Homo sapiens
uaagugaauauggacaguuagc

SEQ ID NO: 847 - RNA, 22 nt, Homo sapiens
uaaguucauucaugaaacuuag

SEQ ID NO: 848 - RNA, 22 nt, Homo sapiens
uaauacuguaauggugguuccg

SEQ ID NO: 849 - RNA, 22 nt, Homo sapiens
uaauagcaguguuacuaggacu

SEQ ID NO: 850 - RNA, 22 nt, Homo sapiens
uaagugaauguuggcuacugaa

SEQ ID NO: 851 - RNA, 22 nt, Homo sapiens
uaagugaauuucacuacugagu

SEQ ID NO: 852 - RNA, 22 nt, Homo sapiens
uaagugaauuugacagguaaug

SEQ ID NO: 853 - RNA, 20 nt, Homo sapiens
uaagugcauaggauauuucu

SEQ ID NO: 854 - RNA, 22 nt, Homo sapiens
uaagugcaugauuacaugcaua

SEQ ID NO: 855 - RNA, 22 nt, Homo sapiens
uaagugcuguguuguuaccuaa

SEQ ID NO: 856 - RNA, 22 nt, Homo sapiens
uaagugcuugacuuugauguuu

SEQ ID NO: 857 - RNA, 20 nt, Homo sapiens
uaagugcuugagacuucuga

SEQ ID NO: 858 - RNA, 20 nt, Homo sapiens
uaagugcuugaugaaugaac

SEQ ID NO: 859 - RNA, 18 nt, Homo sapiens
uaagugcuuuaaacacau

SEQ ID NO: 860 - RNA, 20 nt, Homo sapiens
uaagugcuuuauauugauua

SEQ ID NO: 861 - RNA, 22 nt, Homo sapiens
uaaguaaaugaaagguugauuu

SEQ ID NO: 862 - RNA, 22 nt, Homo sapiens
uaaguagaggaaucauuuugug

SEQ ID NO: 863 - RNA, 22 nt, Homo sapiens
uaaguaguauaagguuuuuuga

SEQ ID NO: 864 - RNA, 22 nt, Homo sapiens
uaaguagugugcauguauguau

SEQ ID NO: 865 - RNA, 22 nt, Homo sapiens
uaaguauuaugugcugcauuuu

SEQ ID NO: 866 - RNA, 23 nt, Homo sapiens
uaagucacacagauuaauuuauu

SEQ ID NO: 867 - RNA, 22 nt, Homo sapiens
uaagucacuccagguuaaagug

SEQ ID NO: 868 - RNA, 22 nt, Homo sapiens
uaacuaaagagaagucaauguc

SEQ ID NO: 869 - RNA, 22 nt, Homo sapiens
uaacuagaaaggagacaguugc

SEQ ID NO: 870 - RNA, 22 nt, Homo sapiens
uaagacacuuaaaauguuacau

SEQ ID NO: 871 - RNA, 22 nt, Homo sapiens
uaagcagugcaagaauggaaua

SEQ ID NO: 872 - RNA, 21 nt, Homo sapiens
uaagcuaaacauucaguuaac

SEQ ID NO: 873 - RNA, 22 nt, Homo sapiens
uaagcuauagugaauaaauugc

SEQ ID NO: 874 - RNA, 22 nt, Homo sapiens
uaaggaacucugauaucuggaa

SEQ ID NO: 875 - RNA, 22 nt, Homo sapiens
uaagguccuuaaauguguaacc

SEQ ID NO: 876 - RNA, 22 nt, Homo sapiens
uaagugaaggaaguguguuuac

SEQ ID NO: 877 - RNA, 22 nt, Homo sapiens
uacaaagcuuucugcaaaucau

SEQ ID NO: 878 - RNA, 22 nt, Homo sapiens
uacaaagugggaaacgaagguu

SEQ ID NO: 879 - RNA, 22 nt, Homo sapiens
uacaagcacaggcagcaggcug

SEQ ID NO: 880 - RNA, 22 nt, Homo sapiens
uacaagcaggaaaugguauaug

SEQ ID NO: 881 - RNA, 22 nt, Homo sapiens
uacaaguggguuugugcaggag

SEQ ID NO: 882 - RNA, 22 nt, Homo sapiens
uacaauagugacaaaucagcau

SEQ ID NO: 883 - RNA, 22 nt, Homo sapiens
uaauucacauaaagcacuuaga

SEQ ID NO: 884 - RNA, 22 nt, Homo sapiens
uaaugcacauuuauuuuaccuu

SEQ ID NO: 885 - RNA, 22 nt, Homo sapiens
uaaugcacucgaaucauggaau

SEQ ID NO: 886 - RNA, 22 nt, Homo sapiens
uaaugcacuuuccuccaaggcu

SEQ ID NO: 887 - RNA, 22 nt, Homo sapiens
uaaugcuaucugggccaggggu

SEQ ID NO: 888 - RNA, 22 nt, Homo sapiens
uaaugugaauagugcuguaaug

SEQ ID NO: 889 - RNA, 21 nt, Homo sapiens
uacaaugcacaggagagccuc

SEQ ID NO: 890 - RNA, 22 nt, Homo sapiens
uacacagucaaaaauuuccagg

SEQ ID NO: 891 - RNA, 22 nt, Homo sapiens
uaccaaguauuuucacaugaac

SEQ ID NO: 892 - RNA, 22 nt, Homo sapiens
uaccacccuuuuuccagaagcc

SEQ ID NO: 893 - RNA, 22 nt, Homo sapiens
uaccacugccgagaaaacagau

SEQ ID NO: 894 - RNA, 22 nt, Homo sapiens
uaccagcauuucucuuuaagua

SEQ ID NO: 895 - RNA, 19 nt, Homo sapiens
uacccagaagcagcauugu

SEQ ID NO: 896 - RNA, 22 nt, Homo sapiens
uacagccacauaauguaugauu

SEQ ID NO: 897 - RNA, 22 nt, Homo sapiens
uacaguagaaugucuuucaaaa

SEQ ID NO: 898 - RNA, 22 nt, Homo sapiens
uacagucacauuccugaccaua

SEQ ID NO: 899 - RNA, 22 nt, Homo sapiens
uacagucauaaugccuagugac

SEQ ID NO: 900 - RNA, 22 nt, Homo sapiens
uacauacuucacagacuuuaaa

SEQ ID NO: 901 - RNA, 19 nt, Homo sapiens
uacauaguauuuaguggca

SEQ ID NO: 902 - RNA, 22 nt, Homo sapiens
uacaugcaugggcaugugugca

SEQ ID NO: 903 - RNA, 22 nt, Homo sapiens
uacauugucauauucucucucu

SEQ ID NO: 904 - RNA, 16 nt, Homo sapiens
uacauuuguuacaugg

SEQ ID NO: 905 - RNA, 22 nt, Homo sapiens
uaguauguuuauagcauugagu

SEQ ID NO: 906 - RNA, 22 nt, Homo sapiens
uagucacacacucaacuuuuca

SEQ ID NO: 907 - RNA, 22 nt, Homo sapiens
uagugaauguuggcuauuaaua

SEQ ID NO: 908 - RNA, 22 nt, Homo sapiens
uaggucaguuuuggcuuggcuu

SEQ ID NO: 909 - RNA, 22 nt, Homo sapiens
uaggugaaugcuggaagaaaug

SEQ ID NO: 910 - RNA, 22 nt, Homo sapiens
uaguaaacauaguucuuuugcu

SEQ ID NO: 911 - RNA, 22 nt, Homo sapiens
uaguaguuuuguguauaauaau

SEQ ID NO: 912 - RNA, 22 nt, Homo sapiens
uagcugagacuacaguaggugc

SEQ ID NO: 913 - RNA, 22 nt, Homo sapiens
uagcuggaauuacuugcaccug

SEQ ID NO: 914 - RNA, 22 nt, Homo sapiens
uagcuggaguuuuuguuauagg

SEQ ID NO: 915 - RNA, 22 nt, Homo sapiens
uaggaaguuucuugauuacuua

SEQ ID NO: 916 - RNA, 22 nt, Homo sapiens
uaggcagccagcuguggauuga

SEQ ID NO: 917 - RNA, 19 nt, Homo sapiens
uagggcacgaggcagaguc

SEQ ID NO: 918 - RNA, 22 nt, Homo sapiens
uagccucacaaagugcuuaaga

SEQ ID NO: 919 - RNA, 22 nt, Homo sapiens
uagaaagcaugaccuucagaua

SEQ ID NO: 920 - RNA, 22 nt, Homo sapiens
uagaacauuccaggugauguug

SEQ ID NO: 921 - RNA, 22 nt, Homo sapiens
uacgccuguaauaucagcauuu

SEQ ID NO: 922 - RNA, 22 nt, Homo sapiens
uacuagaaccuuauucagagug

SEQ ID NO: 923 - RNA, 22 nt, Homo sapiens
uacucaauugcagucaccuggc

SEQ ID NO: 924 - RNA, 22 nt, Homo sapiens
uacucuuuagcuccuuaaggaa

SEQ ID NO: 925 - RNA, 22 nt, Homo sapiens
uacugagagaggaauauugaaa

SEQ ID NO: 926 - RNA, 19 nt, Homo sapiens
uacuggcucgggaauuuuc

SEQ ID NO: 927 - RNA, 22 nt, Homo sapiens
uacugguuuuauauauuucucc

SEQ ID NO: 928 - RNA, 22 nt, Homo sapiens
uacuguacugcaguucugcaaa

SEQ ID NO: 929 - RNA, 18 nt, Homo sapiens
uagaauauaggucauucu

SEQ ID NO: 930 - RNA, 22 nt, Homo sapiens
uagaauggaaggcauguuugcc

SEQ ID NO: 931 - RNA, 22 nt, Homo sapiens
uagaauggaagguugagaagaa

SEQ ID NO: 932 - RNA, 22 nt, Homo sapiens
uagaauguaaauuccaagggca

SEQ ID NO: 933 - RNA, 22 nt, Homo sapiens
uagaaugucagcuucuugaggg

SEQ ID NO: 934 - RNA, 22 nt, Homo sapiens
uagacaacugaaacacugugca

SEQ ID NO: 935 - RNA, 22 nt, Homo sapiens
uagacacuagauaugugacuga

SEQ ID NO: 936 - RNA, 22 nt, Homo sapiens
uagacacugcauauuuuuuuaa

SEQ ID NO: 937 - RNA, 21 nt, Homo sapiens
uagagagcaauaccuccagag

SEQ ID NO: 938 - RNA, 22 nt, Homo sapiens
uagagcacauuaucauuuccaa

SEQ ID NO: 939 - RNA, 22 nt, Homo sapiens
uagagcucaucuucuuuaaacu

SEQ ID NO: 940 - RNA, 22 nt, Homo sapiens
uagagguagagugacuucccca

SEQ ID NO: 941 - RNA, 22 nt, Homo sapiens
uagagguaggucuucgagucuc

SEQ ID NO: 942 - RNA, 22 nt, Homo sapiens
uagagguagguguaugaacuag

SEQ ID NO: 943 - RNA, 22 nt, Homo sapiens
uagagguauaccaaaaaggcau

SEQ ID NO: 944 - RNA, 22 nt, Homo sapiens
uagagguauguauaguauucuu

SEQ ID NO: 945 - RNA, 22 nt, Homo sapiens
uagagguauuaacaguagaaga

SEQ ID NO: 946 - RNA, 22 nt, Homo sapiens
uagaucauauacuugccaugac

SEQ ID NO: 947 - RNA, 22 nt, Homo sapiens
uagauuauuggcugauuugauc

SEQ ID NO: 948 - RNA, 21 nt, Homo sapiens
uagcaaauugcuauuaaggca

SEQ ID NO: 949 - RNA, 22 nt, Homo sapiens
uagcaacauucagcucagguac

SEQ ID NO: 950 - RNA, 22 nt, Homo sapiens
uagcaagaugaauuugugcaaa

SEQ ID NO: 951 - RNA, 22 nt, Homo sapiens
uagcacaucuucuuggccugca

SEQ ID NO: 952 - RNA, 22 nt, Homo sapiens
uagcaccaaacauauacucagu

SEQ ID NO: 953 - RNA, 22 nt, Homo sapiens
uagcaccucuuuggccuuucgu

SEQ ID NO: 954 - RNA, 22 nt, Homo sapiens
uagcaccugugcacaccaggca

SEQ ID NO: 955 - RNA, 22 nt, Homo sapiens
uagcaccuuagcauuucuagug

SEQ ID NO: 956 - RNA, 22 nt, Homo sapiens
uagcagaauauaccucuuacuu

SEQ ID NO: 957 - RNA, 22 nt, Homo sapiens
uagcagcaccccacucuacugg

SEQ ID NO: 958 - RNA, 22 nt, Homo sapiens
uagcagcauaaauggacuaaga

SEQ ID NO: 959 - RNA, 22 nt, Homo sapiens
uagcagguguuccacaaauauu

SEQ ID NO: 960 - RNA, 22 nt, Homo sapiens
uagcaguaaagaaugugauguu

SEQ ID NO: 961 - RNA, 22 nt, Homo sapiens
uagcaguaagaaacugacauug

SEQ ID NO: 962 - RNA, 22 nt, Homo sapiens
uagcaguaccccaguauccugg

SEQ ID NO: 963 - RNA, 22 nt, Homo sapiens
uagcaguagacagacuuuggcu

SEQ ID NO: 964 - RNA, 22 nt, Homo sapiens
uagcaguauacguacugggucc

SEQ ID NO: 965 - RNA, 22 nt, Homo sapiens
uagcaguauaugagagcuauug

SEQ ID NO: 966 - RNA, 22 nt, Homo sapiens
uagcaguaucccaccaucuggu

SEQ ID NO: 967 - RNA, 22 nt, Homo sapiens
uagcaguauggagcgaggccca

SEQ ID NO: 968 - RNA, 22 nt, Homo sapiens
uagcaguauugaaagaugaggg

SEQ ID NO: 969 - RNA, 22 nt, Homo sapiens
uagcaucagauuccauauucua

SEQ ID NO: 970 - RNA, 22 nt, Homo sapiens
uauuucaguugcguuucccgag

SEQ ID NO: 971 - RNA, 22 nt, Homo sapiens
uauuucaguugugcagguaguu

SEQ ID NO: 972 - RNA, 22 nt, Homo sapiens
uauuugauugacuuuagcagga

SEQ ID NO: 973 - RNA, 22 nt, Homo sapiens
uauuuguccccuccaaaaguca

SEQ ID NO: 974 - RNA, 22 nt, Homo sapiens
uauugauuaauugugauuaggc

SEQ ID NO: 975 - RNA, 22 nt, Homo sapiens
uauugcacaugaggagacauug

SEQ ID NO: 976 - RNA, 22 nt, Homo sapiens
uauugcacgccagccugagcaa

SEQ ID NO: 977 - RNA, 23 nt, Homo sapiens
uauugcacuaugguaacccuuuu

SEQ ID NO: 978 - RNA, 22 nt, Homo sapiens
uauugcacuccagccuuggcaa

SEQ ID NO: 979 - RNA, 20 nt, Homo sapiens
uauugcacuccagucugggc

SEQ ID NO: 980 - RNA, 22 nt, Homo sapiens
uauugcacuccucaugcauuug

SEQ ID NO: 981 - RNA, 22 nt, Homo sapiens
uauugcacuuuuccauaggagu

SEQ ID NO: 982 - RNA, 22 nt, Homo sapiens
uauugcagaaugugaguuggca

SEQ ID NO: 983 - RNA, 22 nt, Homo sapiens
uauugcagauacccaggaaguu

SEQ ID NO: 984 - RNA, 22 nt, Homo sapiens
uauugcagugagauccaucugg

SEQ ID NO: 985 - RNA, 22 nt, Homo sapiens
uauugccuugccuacuuuucca

SEQ ID NO: 986 - RNA, 22 nt, Homo sapiens
uauugcucaugcauuuaauuuc

SEQ ID NO: 987 - RNA, 22 nt, Homo sapiens
uauugcuugaggaaaugguaau

SEQ ID NO: 988 - RNA, 22 nt, Homo sapiens
uauuguacauguuauagauuuu

SEQ ID NO: 989 - RNA, 18 nt, Homo sapiens
uauuccucuuccucuauc

SEQ ID NO: 990 - RNA, 22 nt, Homo sapiens
uauuccuuuugcauuuccacau

SEQ ID NO: 991 - RNA, 22 nt, Homo sapiens
uauugaacgugggauauugaag

SEQ ID NO: 992 - RNA, 22 nt, Homo sapiens
uauugaauuugagcugucucuu

SEQ ID NO: 993 - RNA, 20 nt, Homo sapiens
uauucacucuccagucuugc

SEQ ID NO: 994 - RNA, 22 nt, Homo sapiens
uauuccacaauaugauuuuuaa

SEQ ID NO: 995 - RNA, 22 nt, Homo sapiens
uauuccauuugugaaaggaagu

SEQ ID NO: 996 - RNA, 22 nt, Homo sapiens
uauuacauccauaggcucugcu

SEQ ID NO: 997 - RNA, 22 nt, Homo sapiens
uauggcaaugcauaggaaggaa

SEQ ID NO: 998 - RNA, 22 nt, Homo sapiens
uauggcacuaguacuggaaagc

SEQ ID NO: 999 - RNA, 22 nt, Homo sapiens
uauuacuugucugugucucaau

SEQ ID NO: 1000 - RNA, 22 nt, Homo sapiens
uauuagugccuaagucuuaggg

SEQ ID NO: 1001 - RNA, 22 nt, Homo sapiens
uauuaguuuucuguggauuaca

SEQ ID NO: 1002 - RNA, 22 nt, Homo sapiens
ucaaaguaaagccucaggaugg

SEQ ID NO: 1003 - RNA, 22 nt, Homo sapiens
ucaaagugacaaaguugcagca

SEQ ID NO: 1004 - RNA, 22 nt, Homo sapiens
ucaaagugagcuccuucucacu

SEQ ID NO: 1005 - RNA, 22 nt, Homo sapiens
ucaaaugcacguagagaaaaua

SEQ ID NO: 1006 - RNA, 17 nt, Homo sapiens
ucaaaugcucccaguga

SEQ ID NO: 1007 - RNA, 22 nt, Homo sapiens
ucaaaugcucuuugcagagagg

SEQ ID NO: 1008 - RNA, 22 nt, Homo sapiens
ucaaaugcuguauuguaguaau

SEQ ID NO: 1009 - RNA, 22 nt, Homo sapiens
ucaaaugguccacgugaacauu

SEQ ID NO: 1010 - RNA, 22 nt, Homo sapiens
ucaaauuccaagucuagguagg

SEQ ID NO: 1011 - RNA, 20 nt, Homo sapiens
ucaaauucuuggccuccagc

SEQ ID NO: 1012 - RNA, 22 nt, Homo sapiens
ucaacaggucaauugcauagaa

SEQ ID NO: 1013 - RNA, 22 nt, Homo sapiens
ucaacagugggcacuguaaaug

SEQ ID NO: 1014 - RNA, 22 nt, Homo sapiens
ucaacauugcugucaggcaucu

SEQ ID NO: 1015 - RNA, 22 nt, Homo sapiens
ucaagcaauucuccucucagcc

SEQ ID NO: 1016 - RNA, 22 nt, Homo sapiens
ucaagcaauucuccugccucag

SEQ ID NO: 1017 - RNA, 22 nt, Homo sapiens
ucaagcaauucugcugccucag

SEQ ID NO: 1018 - RNA, 20 nt, Homo sapiens
ucaaggcacgaauaaaaguu

SEQ ID NO: 1019 - RNA, 18 nt, Homo sapiens
ucacaaccacagugcugu

SEQ ID NO: 1020 - RNA, 20 nt, Homo sapiens
ucacaagccaagaucacguc

SEQ ID NO: 1021 - RNA, 22 nt, Homo sapiens
ucacaaguguauagacaugucc

SEQ ID NO: 1022 - RNA, 21 nt, Homo sapiens
ucacaaugaacagcagcagaa

SEQ ID NO: 1023 - RNA, 22 nt, Homo sapiens
ucacacgugaacucaucacaga

SEQ ID NO: 1024 - RNA, 22 nt, Homo sapiens
ucacacugaauuugaagcaaug

SEQ ID NO: 1025 - RNA, 19 nt, Homo sapiens
ucacacuguggcuucuuua

SEQ ID NO: 1026 - RNA, 22 nt, Homo sapiens
ucacacuguuuugauuauuaua

SEQ ID NO: 1027 - RNA, 22 nt, Homo sapiens
ucacaggguguuauuagaauua

SEQ ID NO: 1028 - RNA, 18 nt, Homo sapiens
ucacagguaaaguugaca

SEQ ID NO: 1029 - RNA, 22 nt, Homo sapiens
ucacaguccuguuuaggagagg

SEQ ID NO: 1030 - RNA, 22 nt, Homo sapiens
ucacagugcaggaucaguuaau

SEQ ID NO: 1031 - RNA, 23 nt, Homo sapiens
ucacaguggcugcuuaauuguga

SEQ ID NO: 1032 - RNA, 22 nt, Homo sapiens
ucacaguucagcauggcugagg

SEQ ID NO: 1033 - RNA, 22 nt, Homo sapiens
ucacaugaagauuuuaguauac

SEQ ID NO: 1034 - RNA, 22 nt, Homo sapiens
ucacaugggugcaauauaauca

SEQ ID NO: 1035 - RNA, 22 nt, Homo sapiens
ucacaugugcguuuuggcaugu

SEQ ID NO: 1036 - RNA, 22 nt, Homo sapiens
ucacauuguacaaacagguaag

SEQ ID NO: 1037 - RNA, 22 nt, Homo sapiens
ucacauuguuauguaaauguuu

SEQ ID NO: 1038 - RNA, 22 nt, Homo sapiens
uaugacauaguccuuaacccuc

SEQ ID NO: 1039 - RNA, 22 nt, Homo sapiens
uaugaaagcuacuucucacaau

SEQ ID NO: 1040 - RNA, 22 nt, Homo sapiens
uaugcacacacguguuuaugug

SEQ ID NO: 1041 - RNA, 22 nt, Homo sapiens
uaugcacacguguccaugugca

SEQ ID NO: 1042 - RNA, 22 nt, Homo sapiens
uaugcacacucucccaggaggg

SEQ ID NO: 1043 - RNA, 22 nt, Homo sapiens
uaugcacaugcaugcuugaaua

SEQ ID NO: 1044 - RNA, 22 nt, Homo sapiens
uaugcacaugugccugggugug

SEQ ID NO: 1045 - RNA, 22 nt, Homo sapiens
uaugcagacauuguuccaacca

SEQ ID NO: 1046 - RNA, 22 nt, Homo sapiens
uaucccaauguaauaucacaaa

SEQ ID NO: 1047 - RNA, 23 nt, Homo sapiens
uaucucaaugcacagagaggaaa

SEQ ID NO: 1048 - RNA, 22 nt, Homo sapiens
uaucucauccuccuugauccca

SEQ ID NO: 1049 - RNA, 22 nt, Homo sapiens
uaucaacaggguggccagugua

SEQ ID NO: 1050 - RNA, 22 nt, Homo sapiens
uaucaagaugacaaacuuugcu

SEQ ID NO: 1051 - RNA, 22 nt, Homo sapiens
uaucucuguggguagugcugaa

SEQ ID NO: 1052 - RNA, 19 nt, Homo sapiens
uauguaguuuucucaauau

SEQ ID NO: 1053 - RNA, 22 nt, Homo sapiens
uaugucaugggguuuuugagau

SEQ ID NO: 1054 - RNA, 22 nt, Homo sapiens
uaugucuauuauguagcaggaa

SEQ ID NO: 1055 - RNA, 23 nt, Homo sapiens
uaugucuauucuaaugccagcac

SEQ ID NO: 1056 - RNA, 22 nt, Homo sapiens
uaugucuggaguuacugagcug

SEQ ID NO: 1057 - RNA, 22 nt, Homo sapiens
uaugucuucuuuagagaaaugu

SEQ ID NO: 1058 - RNA, 22 nt, Homo sapiens
uaugucuuuugcuugcaaauag

SEQ ID NO: 1059 - RNA, 22 nt, Homo sapiens
uaugugcaaauuaauugcuaga

SEQ ID NO: 1060 - RNA, 22 nt, Homo sapiens
uaugugcacaugcccuggugac

SEQ ID NO: 1061 - RNA, 22 nt, Homo sapiens
uaugccuuuuggcucaagaaac

SEQ ID NO: 1062 - RNA, 19 nt, Homo sapiens
uaugcuauuuauuagaagu

SEQ ID NO: 1063 - RNA, 22 nt, Homo sapiens
uaugcuuauaaacauuugucag

SEQ ID NO: 1064 - RNA, 22 nt, Homo sapiens
uaugcuuauugucucauccacu

SEQ ID NO: 1065 - RNA, 22 nt, Homo sapiens
uauggauuugccuauucuguau

SEQ ID NO: 1066 - RNA, 22 nt, Homo sapiens
uauggauuuucagauucuuauc

SEQ ID NO: 1067 - RNA, 22 nt, Homo sapiens
uauggauuuuuuugacaagagc

SEQ ID NO: 1068 - RNA, 22 nt, Homo sapiens
uaucacaaacuuagcaguuuaa

SEQ ID NO: 1069 - RNA, 22 nt, Homo sapiens
uaucacagaggguauccuagag

SEQ ID NO: 1070 - RNA, 22 nt, Homo sapiens
uaucacagcauugucuauaaua

SEQ ID NO: 1071 - RNA, 22 nt, Homo sapiens
uaucacaggucaggaaccuugu

SEQ ID NO: 1072 - RNA, 22 nt, Homo sapiens
uaucacaggucaggaaucuugc

SEQ ID NO: 1073 - RNA, 22 nt, Homo sapiens
uaucacagguggacugcacacc

SEQ ID NO: 1074 - RNA, 21 nt, Homo sapiens
uaucacaguagaauaggaucu

SEQ ID NO: 1075 - RNA, 22 nt, Homo sapiens
uaucacagugcuggaguauucc

SEQ ID NO: 1076 - RNA, 20 nt, Homo sapiens
uaucacaguucaggaacucu

SEQ ID NO: 1077 - RNA, 22 nt, Homo sapiens
uaucacaguugcauauuuaagg

SEQ ID NO: 1078 - RNA, 22 nt, Homo sapiens
uaucacuguuguuuguuuaagg

SEQ ID NO: 1079 - RNA, 22 nt, Homo sapiens
uaucacuuugauaguuuaaaug

SEQ ID NO: 1080 - RNA, 21 nt, Homo sapiens
uaucagagacauugagaggca

SEQ ID NO: 1081 - RNA, 22 nt, Homo sapiens
uaucagagcugucagccuaccu

SEQ ID NO: 1082 - RNA, 22 nt, Homo sapiens
uaucagcagagucauacuucaa

SEQ ID NO: 1083 - RNA, 22 nt, Homo sapiens
uaucaguauggauucauggauu

SEQ ID NO: 1084 - RNA, 22 nt, Homo sapiens
uaucauggggacugcagccuag

SEQ ID NO: 1085 - RNA, 22 nt, Homo sapiens
uaucaugucuguguguaccuag

SEQ ID NO: 1086 - RNA, 22 nt, Homo sapiens
uaucauugccucaaucuguauu

SEQ ID NO: 1087 - RNA, 22 nt, Homo sapiens
uauacagcaaguuacugugcug

SEQ ID NO: 1088 - RNA, 22 nt, Homo sapiens
uauacugucuuuguaugccuag

SEQ ID NO: 1089 - RNA, 21 nt, Homo sapiens
uauagcagcacgauuuauaau

SEQ ID NO: 1090 - RNA, 21 nt, Homo sapiens
uauagcagcacgauuuauagu

SEQ ID NO: 1091 - RNA, 22 nt, Homo sapiens
uauagcagccugaacaaaguaa

SEQ ID NO: 1092 - RNA, 22 nt, Homo sapiens
uauagcagugaguauugacuaa

SEQ ID NO: 1093 - RNA, 22 nt, Homo sapiens
uauagcaguguaagaaucgagu

SEQ ID NO: 1094 - RNA, 22 nt, Homo sapiens
uauagcuaugggauguauuugc

SEQ ID NO: 1095 - RNA, 22 nt, Homo sapiens
uauaacaaugcaagaauggccu

SEQ ID NO: 1096 - RNA, 20 nt, Homo sapiens
uauaacaguuuggacccagu

SEQ ID NO: 1097 - RNA, 22 nt, Homo sapiens
uauaagacgagcaaaaagcuug

SEQ ID NO: 1098 - RNA, 22 nt, Homo sapiens
uaguuauggaguaauuuuaagc

SEQ ID NO: 1099 - RNA, 22 nt, Homo sapiens
uaguucauuuuucuugcuuaga

SEQ ID NO: 1100 - RNA, 22 nt, Homo sapiens
uauauguuuucauaaggcuaga

SEQ ID NO: 1101 - RNA, 22 nt, Homo sapiens
ucacugugagaguuuauccugu

SEQ ID NO: 1102 - RNA, 22 nt, Homo sapiens
ucacugugguuuugaugugcau

SEQ ID NO: 1103 - RNA, 22 nt, Homo sapiens
ucacuguguauguauaugcagg

SEQ ID NO: 1104 - RNA, 22 nt, Homo sapiens
ucacugugugucucuguaucug

SEQ ID NO: 1105 - RNA, 18 nt, Homo sapiens
ucacugugugucuugggu

SEQ ID NO: 1106 - RNA, 22 nt, Homo sapiens
ucacuguugaugggcaugcagg

SEQ ID NO: 1107 - RNA, 22 nt, Homo sapiens
ucacuuugacggccaacuucua

SEQ ID NO: 1108 - RNA, 22 nt, Homo sapiens
ucagaaccuccuagcaguguuc

SEQ ID NO: 1109 - RNA, 22 nt, Homo sapiens
ucagaaccucugauuuauacuu

SEQ ID NO: 1110 - RNA, 22 nt, Homo sapiens
ucagaacugauacuagaacuuu

SEQ ID NO: 1111 - RNA, 22 nt, Homo sapiens
ucagacacugagcaaacgacua

SEQ ID NO: 1112 - RNA, 22 nt, Homo sapiens
ucagacacugcccuccaccugu

SEQ ID NO: 1113 - RNA, 22 nt, Homo sapiens
ucagacacuguggccuuuggac

SEQ ID NO: 1114 - RNA, 22 nt, Homo sapiens
ucagaccauuucauuacagacu

SEQ ID NO: 1115 - RNA, 22 nt, Homo sapiens
ucagaguagaaacacuuccaua

SEQ ID NO: 1116 - RNA, 22 nt, Homo sapiens
ucagaguagagcgacuucuccu

SEQ ID NO: 1117 - RNA, 22 nt, Homo sapiens
ucagaguagcugucugaggugc

SEQ ID NO: 1118 - RNA, 22 nt, Homo sapiens
ucagauacuggugacaugaaug

SEQ ID NO: 1119 - RNA, 22 nt, Homo sapiens
ucagcagugugaaaacaaacua

SEQ ID NO: 1120 - RNA, 22 nt, Homo sapiens
ucagcagugugaaaauggacua

SEQ ID NO: 1121 - RNA, 20 nt, Homo sapiens
ucacuggagcucauuugauu

SEQ ID NO: 1122 - RNA, 20 nt, Homo sapiens
ucacugugaacuucuugagg

SEQ ID NO: 1123 - RNA, 18 nt, Homo sapiens
ucacggggagcagcagcc

SEQ ID NO: 1124 - RNA, 22 nt, Homo sapiens
ucacuaaagaaaauggcaugga

SEQ ID NO: 1125 - RNA, 18 nt, Homo sapiens
ucacuagacacugaaucu

SEQ ID NO: 1126 - RNA, 23 nt, Homo sapiens
ucacuagaguccuggaguuugag

SEQ ID NO: 1127 - RNA, 22 nt, Homo sapiens
ucacuagaucaagggagagaaa

SEQ ID NO: 1128 - RNA, 22 nt, Homo sapiens
ucacuagggagaaacugaggcu

SEQ ID NO: 1129 - RNA, 22 nt, Homo sapiens
ucacucagaccuggugauaugc

SEQ ID NO: 1130 - RNA, 22 nt, Homo sapiens
ucacugaaaccacugccuccug

SEQ ID NO: 1131 - RNA, 22 nt, Homo sapiens
ucacugagaaugauguuucuga

SEQ ID NO: 1132 - RNA, 21 nt, Homo sapiens
ucacugagcaucaugguuuca

SEQ ID NO: 1133 - RNA, 22 nt, Homo sapiens
ucacugaggucugagcuuuaug

SEQ ID NO: 1134 - RNA, 22 nt, Homo sapiens
ucacugcgaccucugccucccg

SEQ ID NO: 1135 - RNA, 22 nt, Homo sapiens
uccaguuguuauuuuuauaaag

SEQ ID NO: 1136 - RNA, 22 nt, Homo sapiens
uccaguuuggaggcuugaugug

SEQ ID NO: 1137 - RNA, 18 nt, Homo sapiens
uccaguuuucccagcauc

SEQ ID NO: 1138 - RNA, 20 nt, Homo sapiens
uccaguuuuggagacauucu

SEQ ID NO: 1139 - RNA, 22 nt, Homo sapiens
uccaguuuuguuaacauauggu

SEQ ID NO: 1140 - RNA, 22 nt, Homo sapiens
ucauugcaaucucugccucccg

SEQ ID NO: 1141 - RNA, 22 nt, Homo sapiens
ucauugcauguuaauuaaacag

SEQ ID NO: 1142 - RNA, 22 nt, Homo sapiens
ucauuggaugucugaaaugauu

SEQ ID NO: 1143 - RNA, 19 nt, Homo sapiens
uccaccgcgugcaccucua

SEQ ID NO: 1144 - RNA, 22 nt, Homo sapiens
ucauucauucauccagcuugag

SEQ ID NO: 1145 - RNA, 22 nt, Homo sapiens
ucauucauuugcucacuccaca

SEQ ID NO: 1146 - RNA, 22 nt, Homo sapiens
ucaugucuuguuguauuuauuu

SEQ ID NO: 1147 - RNA, 22 nt, Homo sapiens
ucaugugaggauaacaauagug

SEQ ID NO: 1148 - RNA, 22 nt, Homo sapiens
ucauguguugcacugaggaccu

SEQ ID NO: 1149 - RNA, 23 nt, Homo sapiens
ucaugaggccauucaaauccauu

SEQ ID NO: 1150 - RNA, 22 nt, Homo sapiens
ucauggcacugaugagaguuuc

SEQ ID NO: 1151 - RNA, 22 nt, Homo sapiens
ucauggcauuguuaaggguuuu

SEQ ID NO: 1152 - RNA, 22 nt, Homo sapiens
ucauaucauuagaucuacugua

SEQ ID NO: 1153 - RNA, 22 nt, Homo sapiens
ucaucagaguuuacaagcucag

SEQ ID NO: 1154 - RNA, 22 nt, Homo sapiens
ucaucaggcucauucaagcuga

SEQ ID NO: 1155 - RNA, 21 nt, Homo sapiens
ucaucagucaaagacaauggu

SEQ ID NO: 1156 - RNA, 22 nt, Homo sapiens
ucaucagugcuugcaaauuauu

SEQ ID NO: 1157 - RNA, 20 nt, Homo sapiens
ucaucaguuggugcucgcug

SEQ ID NO: 1158 - RNA, 22 nt, Homo sapiens
ucaucuggcgaaugugaagagu

SEQ ID NO: 1159 - RNA, 22 nt, Homo sapiens
ucagguccuuacugugcucccu

SEQ ID NO: 1160 - RNA, 22 nt, Homo sapiens
ucaggcuuuucccagagugaug

SEQ ID NO: 1161 - RNA, 22 nt, Homo sapiens
ucagggacgcuugacacaagcc

SEQ ID NO: 1162 - RNA, 22 nt, Homo sapiens
ucagggacuuacaaaccagaag

SEQ ID NO: 1163 - RNA, 22 nt, Homo sapiens
ucaggguacuuguggccaaagu

SEQ ID NO: 1164 - RNA, 22 nt, Homo sapiens
ucaggcaccuuccucuuaucug

SEQ ID NO: 1165 - RNA, 22 nt, Homo sapiens
ucaggcacuaguaagaaaaagg

SEQ ID NO: 1166 - RNA, 22 nt, Homo sapiens
ucaggcaugcagcaaugcagug

SEQ ID NO: 1167 - RNA, 18 nt, Homo sapiens
ucagucacugccuggcuu

SEQ ID NO: 1168 - RNA, 22 nt, Homo sapiens
ucagucuuuuuuuggcaagcau

SEQ ID NO: 1169 - RNA, 23 nt, Homo sapiens
ucagugaaggaacaacuaaauag

SEQ ID NO: 1170 - RNA, 22 nt, Homo sapiens
ucagugccucaguuuuuaaaga

SEQ ID NO: 1171 - RNA, 22 nt, Homo sapiens
ucagugcuuuuuguugucauca

SEQ ID NO: 1172 - RNA, 22 nt, Homo sapiens
ucagugucugugauggagaggu

SEQ ID NO: 1173 - RNA, 22 nt, Homo sapiens
ucaguguuuggaaucucaauuu

SEQ ID NO: 1174 - RNA, 21 nt, Homo sapiens
ucaguuacugagagagaagug

SEQ ID NO: 1175 - RNA, 22 nt, Homo sapiens
ucaguaaaugcuguucucuuuu

SEQ ID NO: 1176 - RNA, 23 nt, Homo sapiens
ucaguacuccacuuucaauagug

SEQ ID NO: 1177 - RNA, 22 nt, Homo sapiens
ucaguagcauugcuuauacagu

SEQ ID NO: 1178 - RNA, 22 nt, Homo sapiens
ucauacaguaguccucacuugu

SEQ ID NO: 1179 - RNA, 22 nt, Homo sapiens
ucauaggucacuguaaccucgu

SEQ ID NO: 1180 - RNA, 22 nt, Homo sapiens
ucauaggucugagaagaaaaua

SEQ ID NO: 1181 - RNA, 22 nt, Homo sapiens
ucauaguagucacuuaauaaau

SEQ ID NO: 1182 - RNA, 19 nt, Homo sapiens
ucauagucuaagaugagaa

SEQ ID NO: 1183 - RNA, 22 nt, Homo sapiens
ucauagucuaagguucuuuugc

SEQ ID NO: 1184 - RNA, 22 nt, Homo sapiens
uccauugucuagauguaacaca

SEQ ID NO: 1185 - RNA, 18 nt, Homo sapiens
uccauuuguaugggaugg

SEQ ID NO: 1186 - RNA, 22 nt, Homo sapiens
uccaugugaaaaggucgugaua

SEQ ID NO: 1187 - RNA, 22 nt, Homo sapiens
uccaugugaaaucuaugaggac

SEQ ID NO: 1188 - RNA, 22 nt, Homo sapiens
ucccaguuuuucugaauaguca

SEQ ID NO: 1189 - RNA, 22 nt, Homo sapiens
ucccauguagcuaggauuacag

SEQ ID NO: 1190 - RNA, 17 nt, Homo sapiens
ucccauguuucuucuac

SEQ ID NO: 1191 - RNA, 22 nt, Homo sapiens
uccccgagcccaggcugugacu

SEQ ID NO: 1192 - RNA, 23 nt, Homo sapiens
uccccgggagcaccagcuuguug

SEQ ID NO: 1193 - RNA, 19 nt, Homo sapiens
uccccgggucuagugcagc

SEQ ID NO: 1194 - RNA, 18 nt, Homo sapiens
ucccucagaauuauagaa

SEQ ID NO: 1195 - RNA, 22 nt, Homo sapiens
ucccugaguaucuaauguguuu

SEQ ID NO: 1196 - RNA, 22 nt, Homo sapiens
uccuucaguccaguggguuuug

SEQ ID NO: 1197 - RNA, 22 nt, Homo sapiens
uccugagaauagaguugcaugu

SEQ ID NO: 1198 - RNA, 22 nt, Homo sapiens
uccugagacucacaggcucccc

SEQ ID NO: 1199 - RNA, 22 nt, Homo sapiens
uccugagacugaggagcuuugg

SEQ ID NO: 1200 - RNA, 21 nt, Homo sapiens
uccugagagaggaguaacucu

SEQ ID NO: 1201 - RNA, 22 nt, Homo sapiens
uccugagagcagacccucuaua

SEQ ID NO: 1202 - RNA, 20 nt, Homo sapiens
uccugagauucccaguucuc

SEQ ID NO: 1203 - RNA, 22 nt, Homo sapiens
ucgcugcgaccuccaccucccg

SEQ ID NO: 1204 - RNA, 23 nt, Homo sapiens
ucgcagcauucaauaccaggcag

SEQ ID NO: 1205 - RNA, 19 nt, Homo sapiens
ucgcgccauucuccugccu

SEQ ID NO: 1206 - RNA, 22 nt, Homo sapiens
ucgcgccauucuccugccucag

SEQ ID NO: 1207 - RNA, 22 nt, Homo sapiens
ucggcucagugcaagcucugcc

SEQ ID NO: 1208 - RNA, 23 nt, Homo sapiens
ucgguccccuuggcugcccucgg

SEQ ID NO: 1209 - RNA, 19 nt, Homo sapiens
ucuaaaucucuugauagac

SEQ ID NO: 1210 - RNA, 17 nt, Homo sapiens
ucuaauaauaugcauuu

SEQ ID NO: 1211 - RNA, 22 nt, Homo sapiens
ucuaauguaaccugcaaauauu

SEQ ID NO: 1212 - RNA, 22 nt, Homo sapiens
ucuacagccaguucaggaagaa

SEQ ID NO: 1213 - RNA, 22 nt, Homo sapiens
ucuagccuaugaagcuugucca

SEQ ID NO: 1214 - RNA, 22 nt, Homo sapiens
ucucaaccucccaaguagcugg

SEQ ID NO: 1215 - RNA, 22 nt, Homo sapiens
ucucaaguggucgcaguuagau

SEQ ID NO: 1216 - RNA, 22 nt, Homo sapiens
ucucacaccccucucauauacc

SEQ ID NO: 1217 - RNA, 22 nt, Homo sapiens
ucucacagaguugaacuuucuu

SEQ ID NO: 1218 - RNA, 22 nt, Homo sapiens
ucucacagaguugaauguuucu

SEQ ID NO: 1219 - RNA, 22 nt, Homo sapiens
ucucagugaauguggaaaaagc

SEQ ID NO: 1220 - RNA, 22 nt, Homo sapiens
ucucaguggcuuccucacuuuu

SEQ ID NO: 1221 - RNA, 22 nt, Homo sapiens
ucucaguguuaucuaucugccu

SEQ ID NO: 1222 - RNA, 20 nt, Homo sapiens
ucucauggagggaaagagca

SEQ ID NO: 1223 - RNA, 22 nt, Homo sapiens
ucucauggagucaggagcagaa

SEQ ID NO: 1224 - RNA, 20 nt, Homo sapiens
guccauuugcugccauugcu

SEQ ID NO: 1225 - RNA, 22 nt, Homo sapiens
gucauugcuuaaggguucaugc

SEQ ID NO: 1226 - RNA, 22 nt, Homo sapiens
gucauugguucuguuuauguga

SEQ ID NO: 1227 - RNA, 22 nt, Homo sapiens
guccaaauccaugggauguaca

SEQ ID NO: 1228 - RNA, 22 nt, Homo sapiens
guccuggagaagcguggaccgg

SEQ ID NO: 1229 - RNA, 20 nt, Homo sapiens
gucugucuccgaguagaauu

SEQ ID NO: 1230 - RNA, 22 nt, Homo sapiens
gucuggcuuaucucacuuacca

SEQ ID NO: 1231 - RNA, 22 nt, Homo sapiens
gucuuuguuuggucuguaucag

SEQ ID NO: 1232 - RNA, 22 nt, Homo sapiens
gugaaaagaugagcaccauaca

SEQ ID NO: 1233 - RNA, 22 nt, Homo sapiens
gucucacagcuagcugcuuuau

SEQ ID NO: 1234 - RNA, 18 nt, Homo sapiens
gucucacaugguggaagc

SEQ ID NO: 1235 - RNA, 22 nt, Homo sapiens
gucuggcacagggaaaguacaa

SEQ ID NO: 1236 - RNA, 22 nt, Homo sapiens
gugaaguuuuugugaggccuaa

SEQ ID NO: 1237 - RNA, 22 nt, Homo sapiens
gugaaguuuuuugcugagaguc

SEQ ID NO: 1238 - RNA, 22 nt, Homo sapiens
gugacagucaaagacaugacuu

SEQ ID NO: 1239 - RNA, 22 nt, Homo sapiens
gugacaguggagacuuacuuca

SEQ ID NO: 1240 - RNA, 22 nt, Homo sapiens
gugacauuauuucagcuacaug

SEQ ID NO: 1241 - RNA, 22 nt, Homo sapiens
gugacauuuuuacugaugagag

SEQ ID NO: 1242 - RNA, 22 nt, Homo sapiens
gugacugcauccauccaggcuu

SEQ ID NO: 1243 - RNA, 22 nt, Homo sapiens
gugacugggaguggugaagaua

SEQ ID NO: 1244 - RNA, 22 nt, Homo sapiens
gugagaacugugucuuauaaac

SEQ ID NO: 1245 - RNA, 22 nt, Homo sapiens
gugagaagaaaaauauggcugu

SEQ ID NO: 1246 - RNA, 18 nt, Homo sapiens
gugagaaugacuguucug

SEQ ID NO: 1247 - RNA, 16 nt, Homo sapiens
gugagagaugacaaac

SEQ ID NO: 1248 - RNA, 22 nt, Homo sapiens
gugagauacuagagauauagug

SEQ ID NO: 1249 - RNA, 22 nt, Homo sapiens
gugagauaucuagacuagggaa

SEQ ID NO: 1250 - RNA, 22 nt, Homo sapiens
gugauuauuaugcacugcaugc

SEQ ID NO: 1251 - RNA, 22 nt, Homo sapiens
gugcaaaucucugaguaucuuu

SEQ ID NO: 1252 - RNA, 22 nt, Homo sapiens
gugcaaauuccagcucaacucc

SEQ ID NO: 1253 - RNA, 22 nt, Homo sapiens
gugcaaugagaaggggcucugg

SEQ ID NO: 1254 - RNA, 22 nt, Homo sapiens
gugcacaaaucuuaaauguaca

SEQ ID NO: 1255 - RNA, 22 nt, Homo sapiens
gugcacaacaugcagguuuguu

SEQ ID NO: 1256 - RNA, 22 nt, Homo sapiens
gugcacaacaugcaguuuuguu

SEQ ID NO: 1257 - RNA, 22 nt, Homo sapiens
gugcacaacgugcaaguuuguu

SEQ ID NO: 1258 - RNA, 22 nt, Homo sapiens
gugcacaacgugcaggcuuguu

SEQ ID NO: 1259 - RNA, 22 nt, Homo sapiens
gugcacaacgugcagguuaguu

SEQ ID NO: 1260 - RNA, 22 nt, Homo sapiens
gugcacaacgugcagguuuguu

SEQ ID NO: 1261 - RNA, 22 nt, Homo sapiens
gugcacaacguguagguuuguu

SEQ ID NO: 1262 - RNA, 22 nt, Homo sapiens
gugcacaaucgugcauuccuug

SEQ ID NO: 1263 - RNA, 22 nt, Homo sapiens
gugcacaaugugcagguuuguu

SEQ ID NO: 1264 - RNA, 22 nt, Homo sapiens
gugcacauauggugcauaagug

SEQ ID NO: 1265 - RNA, 22 nt, Homo sapiens
gugaaagacagcauuaauggcu

SEQ ID NO: 1266 - RNA, 22 nt, Homo sapiens
gugaaagacauauaugguuuga

SEQ ID NO: 1267 - RNA, 22 nt, Homo sapiens
gugaaagauuaaaccagugugu

SEQ ID NO: 1268 - RNA, 22 nt, Homo sapiens
gugaacagaaccugggaucgaa

SEQ ID NO: 1269 - RNA, 22 nt, Homo sapiens
gugaggaaggaaaccugcuagc

SEQ ID NO: 1270 - RNA, 22 nt, Homo sapiens
gugaggcacugcugcuuuccag

SEQ ID NO: 1271 - RNA, 22 nt, Homo sapiens
gugagguacgugucaagaacca

SEQ ID NO: 1272 - RNA, 20 nt, Homo sapiens
gugagguagaggguuaccug

SEQ ID NO: 1273 - RNA, 17 nt, Homo sapiens
gugagguauccucaaaa

SEQ ID NO: 1274 - RNA, 22 nt, Homo sapiens
gugaggucguagucauaggcaa

SEQ ID NO: 1275 - RNA, 17 nt, Homo sapiens
gugagguggguaguauc

SEQ ID NO: 1276 - RNA, 22 nt, Homo sapiens
gugauagaucugggauucagaa

SEQ ID NO: 1277 - RNA, 22 nt, Homo sapiens
gugauauguuaggaucuaaguc

SEQ ID NO: 1278 - RNA, 22 nt, Homo sapiens
gugaucuguccuucauagccug

SEQ ID NO: 1279 - RNA, 22 nt, Homo sapiens
gugcuaggugcuaggaagauag

SEQ ID NO: 1280 - RNA, 22 nt, Homo sapiens
guggaaaacauaugcuuguuga

SEQ ID NO: 1281 - RNA, 22 nt, Homo sapiens
guggaaaaguaguugcgguuuu

SEQ ID NO: 1282 - RNA, 22 nt, Homo sapiens
guggaaaauuauugcuguuuuu

SEQ ID NO: 1283 - RNA, 22 nt, Homo sapiens
guggaagaaaucagguuauuug

SEQ ID NO: 1284 - RNA, 22 nt, Homo sapiens
guggaagaccagacuuuccaac

SEQ ID NO: 1285 - RNA, 20 nt, Homo sapiens
guggaagauaaguagccuga

SEQ ID NO: 1286 - RNA, 22 nt, Homo sapiens
guggaagauaguguguuaaugu

SEQ ID NO: 1287 - RNA, 22 nt, Homo sapiens
guggaagucuuugguauuggua

SEQ ID NO: 1288 - RNA, 22 nt, Homo sapiens
gugccuuuucugagcaaugagc

SEQ ID NO: 1289 - RNA, 22 nt, Homo sapiens
gugcacaucuguguuccagcua

SEQ ID NO: 1290 - RNA, 22 nt, Homo sapiens
gugcacaugguagguauugagu

SEQ ID NO: 1291 - RNA, 22 nt, Homo sapiens
gugcacauuguuuaugucuguu

SEQ ID NO: 1292 - RNA, 22 nt, Homo sapiens
gugcauaugcaugugcaugcac

SEQ ID NO: 1293 - RNA, 22 nt, Homo sapiens
gugccacugcaccuggccuaag

SEQ ID NO: 1294 - RNA, 22 nt, Homo sapiens
gugccacugcacuccggccugg

SEQ ID NO: 1295 - RNA, 22 nt, Homo sapiens
gugggcucguucguguuagaca

SEQ ID NO: 1296 - RNA, 22 nt, Homo sapiens
guggcaguuuuaaauaugaaaa

SEQ ID NO: 1297 - RNA, 22 nt, Homo sapiens
guggcgagaucauagcucauug

SEQ ID NO: 1298 - RNA, 22 nt, Homo sapiens
gugauuauccacgucuuuguga

SEQ ID NO: 1299 - RNA, 16 nt, Homo sapiens
gugcuguguuguuagg

SEQ ID NO: 1300 - RNA, 22 nt, Homo sapiens
guggaagugucuggggccaggg

SEQ ID NO: 1301 - RNA, 22 nt, Homo sapiens
guggaaugaaaacucucucaca

SEQ ID NO: 1302 - RNA, 22 nt, Homo sapiens
guggaaugauaucucauugugg

SEQ ID NO: 1303 - RNA, 22 nt, Homo sapiens
guggaaugcaguguugauucaa

SEQ ID NO: 1304 - RNA, 22 nt, Homo sapiens
guggaauggaaugauuguguau

SEQ ID NO: 1305 - RNA, 22 nt, Homo sapiens
guggacaugaauuuuggaggca

SEQ ID NO: 1306 - RNA, 22 nt, Homo sapiens
gugguguuugagcugccaggga

SEQ ID NO: 1307 - RNA, 22 nt, Homo sapiens
gugguuuucaacuccaccugca

SEQ ID NO: 1308 - RNA, 22 nt, Homo sapiens
gugguuuuuaaaguaccugugg

SEQ ID NO: 1309 - RNA, 22 nt, Homo sapiens
gugguuuuuuucugccuuauag

SEQ ID NO: 1310 - RNA, 22 nt, Homo sapiens
guguaaaacaauuagaggauuu

SEQ ID NO: 1311 - RNA, 22 nt, Homo sapiens
guguauauccuauuaguucugu

SEQ ID NO: 1312 - RNA, 22 nt, Homo sapiens
guguauguuucucccugucccu

SEQ ID NO: 1313 - RNA, 21 nt, Homo sapiens
gugucacagacaugacagaug

SEQ ID NO: 1314 - RNA, 22 nt, Homo sapiens
gugucaugagggggacaggaag

SEQ ID NO: 1315 - RNA, 22 nt, Homo sapiens
gugucccagugugcauacaggu

SEQ ID NO: 1316 - RNA, 22 nt, Homo sapiens
guguccucgaguacacaucagg

SEQ ID NO: 1317 - RNA, 22 nt, Homo sapiens
gugucucagcccagaccuauuu

SEQ ID NO: 1318 - RNA, 22 nt, Homo sapiens
gugucuccugccuucaugcagc

SEQ ID NO: 1319 - RNA, 22 nt, Homo sapiens
gugggaagcuggaacucccucc

SEQ ID NO: 1320 - RNA, 22 nt, Homo sapiens
gugugauuauuucaauugaugc

SEQ ID NO: 1321 - RNA, 22 nt, Homo sapiens
gugugauuguuaauuuuaggug

SEQ ID NO: 1322 - RNA, 22 nt, Homo sapiens
gugugcucaucacaugcaauag

SEQ ID NO: 1323 - RNA, 22 nt, Homo sapiens
guuauguaucuugauugggugg

SEQ ID NO: 1324 - RNA, 22 nt, Homo sapiens
guucaagugauagcugggauua

SEQ ID NO: 1325 - RNA, 21 nt, Homo sapiens
guucaagugauccuccugucu

SEQ ID NO: 1326 - RNA, 22 nt, Homo sapiens
guucaagugauucuacugccuc

SEQ ID NO: 1327 - RNA, 22 nt, Homo sapiens
guucaaguuuucucuugugggu

SEQ ID NO: 1328 - RNA, 20 nt, Homo sapiens
guucacaggcuuccuuucag

SEQ ID NO: 1329 - RNA, 22 nt, Homo sapiens
guucacagugguugccuuccag

SEQ ID NO: 1330 - RNA, 20 nt, Homo sapiens
guucauguaauuaguucagg

SEQ ID NO: 1331 - RNA, 22 nt, Homo sapiens
guuugccuuuuagauaggaaug

SEQ ID NO: 1332 - RNA, 17 nt, Homo sapiens
guuuggguacuggguaa

SEQ ID NO: 1333 - RNA, 22 nt, Homo sapiens
guugcucaggccggagugcagu

SEQ ID NO: 1334 - RNA, 22 nt, Homo sapiens
guugcucaggcuggagugcagu

SEQ ID NO: 1335 - RNA, 22 nt, Homo sapiens
guuggaauguauugcuacuucu

SEQ ID NO: 1336 - RNA, 22 nt, Homo sapiens
guuggcaaguggcugagcuggg

SEQ ID NO: 1337 - RNA, 22 nt, Homo sapiens
guucuggagauaaagccaaggu

SEQ ID NO: 1338 - RNA, 22 nt, Homo sapiens
guguucaaacccaggucugucu

SEQ ID NO: 1339 - RNA, 22 nt, Homo sapiens
guguucaaagcugauugagauu

SEQ ID NO: 1340 - RNA, 22 nt, Homo sapiens
guguucaaauucugacagagag

SEQ ID NO: 1341 - RNA, 22 nt, Homo sapiens
guuaagaaguguaacuuaaguu

SEQ ID NO: 1342 - RNA, 22 nt, Homo sapiens
uaaacugucuugcaguuacaug

SEQ ID NO: 1343 - RNA, 22 nt, Homo sapiens
uaaagccauugucaaguuugua

SEQ ID NO: 1344 - RNA, 22 nt, Homo sapiens
uaaagcgaggucuccuacaaga

SEQ ID NO: 1345 - RNA, 22 nt, Homo sapiens
uaaagcuaucacauuggugauu

SEQ ID NO: 1346 - RNA, 22 nt, Homo sapiens
uaaagcuuagauccaugguggc

SEQ ID NO: 1347 - RNA, 21 nt, Homo sapiens
uaaagcuuagcuauaguggcu

SEQ ID NO: 1348 - RNA, 22 nt, Homo sapiens
uaaagcuuggauuuaggcuaau

SEQ ID NO: 1349 - RNA, 22 nt, Homo sapiens
uaaagugaggauggcaguaggu

SEQ ID NO: 1350 - RNA, 22 nt, Homo sapiens
guuuuuggggucacuauuaccg

SEQ ID NO: 1351 - RNA, 21 nt, Homo sapiens
uaaaacuguaacuuuguccug

SEQ ID NO: 1352 - RNA, 22 nt, Homo sapiens
uaaaagucaucacaacuggagu

SEQ ID NO: 1353 - RNA, 22 nt, Homo sapiens
uaaaugcucuuuaaaagugcuu

SEQ ID NO: 1354 - RNA, 22 nt, Homo sapiens
uaaaugcuuaauugaaugugga

SEQ ID NO: 1355 - RNA, 22 nt, Homo sapiens
uaaauggauaaaugaauaccua

SEQ ID NO: 1356 - RNA, 22 nt, Homo sapiens
uaaauggauauugccaucuccu

SEQ ID NO: 1357 - RNA, 22 nt, Homo sapiens
uaaauugcauaaguacaaauga

SEQ ID NO: 1358 - RNA, 18 nt, Homo sapiens
uaaauugcuucaccugag

SEQ ID NO: 1359 - RNA, 21 nt, Homo sapiens
uaacagcuccacuccauucuc

SEQ ID NO: 1360 - RNA, 22 nt, Homo sapiens
uaacagcucuacagcugcucuu

SEQ ID NO: 1361 - RNA, 22 nt, Homo sapiens
uaacaggcaaggucacaccuug

SEQ ID NO: 1362 - RNA, 22 nt, Homo sapiens
uaacaguguauuccuuuggaca

SEQ ID NO: 1363 - RNA, 22 nt, Homo sapiens
uaacauagucauauacuugcuu

SEQ ID NO: 1364 - RNA, 22 nt, Homo sapiens
uaacauucacaugcugcaaaaa

SEQ ID NO: 1365 - RNA, 22 nt, Homo sapiens
uaacauuguugauuauacuaag

SEQ ID NO: 1366 - RNA, 22 nt, Homo sapiens
ggcucguguuuucuguccaguu

SEQ ID NO: 1367 - RNA, 22 nt, Homo sapiens
gggaagugugcagaguucucuu

SEQ ID NO: 1368 - RNA, 22 nt, Homo sapiens
gggaucaacuuauacuaaaauu

SEQ ID NO: 1369 - RNA, 22 nt, Homo sapiens
gggaauguagcaaaucugcaau

SEQ ID NO: 1370 - RNA, 22 nt, Homo sapiens
ggcuuggaggaaugugagggcu

SEQ ID NO: 1371 - RNA, 22 nt, Homo sapiens
gggaggucauuguucaaugcug

SEQ ID NO: 1372 - RNA, 22 nt, Homo sapiens
ggugagguaggaaaaguuagga

SEQ ID NO: 1373 - RNA, 22 nt, Homo sapiens
ggugcagcacaccaacauggca

SEQ ID NO: 1374 - RNA, 22 nt, Homo sapiens
gguggugguauuucagaaaaug

SEQ ID NO: 1375 - RNA, 19 nt, Homo sapiens
ggucacagggguuacaagg

SEQ ID NO: 1376 - RNA, 22 nt, Homo sapiens
ggucacauuggacuaucaaguu

SEQ ID NO: 1377 - RNA, 22 nt, Homo sapiens
ggguucaaaucuuggcucuuac

SEQ ID NO: 1378 - RNA, 22 nt, Homo sapiens
guaaaucucuguuuucauggac

SEQ ID NO: 1379 - RNA, 18 nt, Homo sapiens
guaaauguaucuauugcc

SEQ ID NO: 1380 - RNA, 22 nt, Homo sapiens
guaacacaugcugcucucuggu

SEQ ID NO: 1381 - RNA, 22 nt, Homo sapiens
guaacacucuaaagggaugcac

SEQ ID NO: 1382 - RNA, 20 nt, Homo sapiens
guaacagcacuuucccaaag

SEQ ID NO: 1383 - RNA, 22 nt, Homo sapiens
guaauaacuguggaaaaagguu

SEQ ID NO: 1384 - RNA, 22 nt, Homo sapiens
guaaucucaccuacuugggagg

SEQ ID NO: 1385 - RNA, 22 nt, Homo sapiens
guaaucucagcuacucaggagg

SEQ ID NO: 1386 - RNA, 22 nt, Homo sapiens
guaaucucagcuacucgggaga

SEQ ID NO: 1387 - RNA, 22 nt, Homo sapiens
guaaucucagcuacucgggagg

SEQ ID NO: 1388 - RNA, 22 nt, Homo sapiens
guaaucucagcuacuugggagc

SEQ ID NO: 1389 - RNA, 22 nt, Homo sapiens
guaaucucagcuacuugggagg

SEQ ID NO: 1390 - RNA, 22 nt, Homo sapiens
guaaucucagcuacuugggagu

SEQ ID NO: 1391 - RNA, 22 nt, Homo sapiens
guaaucucagcuucuugggagg

SEQ ID NO: 1392 - RNA, 22 nt, Homo sapiens
guacaagugcaguuucguuaca

SEQ ID NO: 1393 - RNA, 22 nt, Homo sapiens
guacacauacauauaugugugu

SEQ ID NO: 1394 - RNA, 22 nt, Homo sapiens
guacaguacugaaugaauguau

SEQ ID NO: 1395 - RNA, 22 nt, Homo sapiens
guacaguaguaaaagugaauga

SEQ ID NO: 1396 - RNA, 22 nt, Homo sapiens
guacaguauaguaauaggauuu

SEQ ID NO: 1397 - RNA, 22 nt, Homo sapiens
guacaguuuucaguguucacug

SEQ ID NO: 1398 - RNA, 22 nt, Homo sapiens
guaaacuuccccucaugaauga

SEQ ID NO: 1399 - RNA, 22 nt, Homo sapiens
guaaaguaaagcacaucaaggu

SEQ ID NO: 1400 - RNA, 22 nt, Homo sapiens
guaaauaccaguuucuggaaca

SEQ ID NO: 1401 - RNA, 22 nt, Homo sapiens
guagagguagacuuccuugucu

SEQ ID NO: 1402 - RNA, 22 nt, Homo sapiens
guagcagaacauguuccuugua

SEQ ID NO: 1403 - RNA, 22 nt, Homo sapiens
guagcagaauaucagauaauuu

SEQ ID NO: 1404 - RNA, 22 nt, Homo sapiens
guacaugcaugcaugggugugc

SEQ ID NO: 1405 - RNA, 22 nt, Homo sapiens
gucagucugucccugccuggcg

SEQ ID NO: 1406 - RNA, 22 nt, Homo sapiens
gucagugugauaucugcagggg

SEQ ID NO: 1407 - RNA, 22 nt, Homo sapiens
gucaucaggacgggucaucugc

SEQ ID NO: 1408 - RNA, 22 nt, Homo sapiens
gucaugucugcacauaguaaaa

SEQ ID NO: 1409 - RNA, 22 nt, Homo sapiens
gucauguuuaacuucuugagga

SEQ ID NO: 1410 - RNA, 18 nt, Homo sapiens
guauuccagccugaguga

SEQ ID NO: 1411 - RNA, 22 nt, Homo sapiens
gucacuggcugucuuguaugau

SEQ ID NO: 1412 - RNA, 22 nt, Homo sapiens
gucacugucuacuguaauagcc

SEQ ID NO: 1413 - RNA, 22 nt, Homo sapiens
gucacuguggagaagaaagugg

SEQ ID NO: 1414 - RNA, 22 nt, Homo sapiens
gucacuguuuccuauuauauuu

SEQ ID NO: 1415 - RNA, 22 nt, Homo sapiens
gucaggcaccgauacaguuuuu

SEQ ID NO: 1416 - RNA, 22 nt, Homo sapiens
guauuugauuauagcaugcuua

SEQ ID NO: 1417 - RNA, 22 nt, Homo sapiens
guauuuguugcagcagcacuau

SEQ ID NO: 1418 - RNA, 22 nt, Homo sapiens
gucacauugaugcccauggugg

SEQ ID NO: 1419 - RNA, 22 nt, Homo sapiens
guagugcaguuugagaaucagu

SEQ ID NO: 1420 - RNA, 22 nt, Homo sapiens
guauaguaguacaaaaguuuuu

SEQ ID NO: 1421 - RNA, 22 nt, Homo sapiens
guaucacacuuauugaccugca

SEQ ID NO: 1422 - RNA, 22 nt, Homo sapiens
guaugauacuguaacagugggu

SEQ ID NO: 1423 - RNA, 22 nt, Homo sapiens
guaugcacauauguguauguau

SEQ ID NO: 1424 - RNA, 22 nt, Homo sapiens
guauggaagucaguuuguuggc

SEQ ID NO: 1425 - RNA, 22 nt, Homo sapiens
guauggguuuuguuucuucugg

SEQ ID NO: 1426 - RNA, 22 nt, Homo sapiens
guaugucuugucuauggcugcu

SEQ ID NO: 1427 - RNA, 22 nt, Homo sapiens
guaugucuuuauagcagugugg

SEQ ID NO: 1428 - RNA, 22 nt, Homo sapiens
aaccuguaaccauaugaucagu

SEQ ID NO: 1429 - RNA, 22 nt, Homo sapiens
aacugguauuucccaugaauuu

SEQ ID NO: 1430 - RNA, 22 nt, Homo sapiens
aaauaguagcugaaugagggaa

SEQ ID NO: 1431 - RNA, 22 nt, Homo sapiens
aacugcuguuuggguacuggug

SEQ ID NO: 1432 - RNA, 22 nt, Homo sapiens
aacacuguuuccagucaugauc

SEQ ID NO: 1433 - RNA, 22 nt, Homo sapiens
aacagaauccucuuuuccuggg

SEQ ID NO: 1434 - RNA, 22 nt, Homo sapiens
aacaccauucucuguaacaaga

SEQ ID NO: 1435 - RNA, 22 nt, Homo sapiens
aacacggcccgcagagcaagcu

SEQ ID NO: 1436 - RNA, 22 nt, Homo sapiens
aacacuaucugccuuacaggga

SEQ ID NO: 1437 - RNA, 22 nt, Homo sapiens
aacagucaauugcugaugaccu

SEQ ID NO: 1438 - RNA, 22 nt, Homo sapiens
aacagugcauuccuguccauau

SEQ ID NO: 1439 - RNA, 22 nt, Homo sapiens
aacagugcuguuauaaauguac

SEQ ID NO: 1440 - RNA, 21 nt, Homo sapiens
aacagugcuuaguagauguuc

SEQ ID NO: 1441 - RNA, 20 nt, Homo sapiens
aacaguguguaaguuuccuu

SEQ ID NO: 1442 - RNA, 22 nt, Homo sapiens
aacauuaaaccacccgauucac

SEQ ID NO: 1443 - RNA, 21 nt, Homo sapiens
aagcaugguguaucuuuccau

SEQ ID NO: 1444 - RNA, 22 nt, Homo sapiens
aagccagugugacaggaaacuu

SEQ ID NO: 1445 - RNA, 22 nt, Homo sapiens
aagcaggugucugugucuguaa

SEQ ID NO: 1446 - RNA, 21 nt, Homo sapiens
aagcacauugaguguguguga

SEQ ID NO: 1447 - RNA, 22 nt, Homo sapiens
aagcacccuuugucuggacaug

SEQ ID NO: 1448 - RNA, 22 nt, Homo sapiens
aagaguuaguaaaauuuccucu

SEQ ID NO: 1449 - RNA, 22 nt, Homo sapiens
aagauauguuaguuauaaacuc

SEQ ID NO: 1450 - RNA, 22 nt, Homo sapiens
aagaucaucauagagggcauga

SEQ ID NO: 1451 - RNA, 22 nt, Homo sapiens
aagaugauguucuuuuucuuag

SEQ ID NO: 1452 - RNA, 22 nt, Homo sapiens
aagaugauguuguguuuucacu

SEQ ID NO: 1453 - RNA, 22 nt, Homo sapiens
aagagguaauaacaaagcuucu

SEQ ID NO: 1454 - RNA, 22 nt, Homo sapiens
aagagguagaagcuugccuucu

SEQ ID NO: 1455 - RNA, 22 nt, Homo sapiens
aagagguagcagucacaaaaga

SEQ ID NO: 1456 - RNA, 22 nt, Homo sapiens
aagagguaggaaauggucauuu

SEQ ID NO: 1457 - RNA, 22 nt, Homo sapiens
aagagguagucugucccuuagc

SEQ ID NO: 1458 - RNA, 23 nt, Homo sapiens
aagagguaugacuaugaagugga

SEQ ID NO: 1459 - RNA, 20 nt, Homo sapiens
aagacacuguccccacugga

SEQ ID NO: 1460 - RNA, 22 nt, Homo sapiens
aagaccuaugcaggaagaaaug

SEQ ID NO: 1461 - RNA, 22 nt, Homo sapiens
aagacuguaauccaucuugagu

SEQ ID NO: 1462 - RNA, 22 nt, Homo sapiens
aagagaugaagguccugacugu

SEQ ID NO: 1463 - RNA, 18 nt, Homo sapiens
aaaaagugcucaggccua

SEQ ID NO: 1464 - RNA, 22 nt, Homo sapiens
aaaaguucuuugagccuugaca

SEQ ID NO: 1465 - RNA, 22 nt, Homo sapiens
aaaagucuguagugaaagguga

SEQ ID NO: 1466 - RNA, 22 nt, Homo sapiens
aaaggcuucggaucagaaggua

SEQ ID NO: 1467 - RNA, 22 nt, Homo sapiens
aaagguaguacuucuagaaggg

SEQ ID NO: 1468 - RNA, 22 nt, Homo sapiens
aaagucuagaggaucaugugug

SEQ ID NO: 1469 - RNA, 22 nt, Homo sapiens
aaagucuguuacagcuauuucu

SEQ ID NO: 1470 - RNA, 22 nt, Homo sapiens
aaagugaauguaucccguaagu

SEQ ID NO: 1471 - RNA, 22 nt, Homo sapiens
aaagugauguccaggcuuucag

SEQ ID NO: 1472 - RNA, 22 nt, Homo sapiens
aaagugcuaggauuaccugggg

SEQ ID NO: 1473 - RNA, 22 nt, Homo sapiens
aaagugcugagacagacuggga

SEQ ID NO: 1474 - RNA, 22 nt, Homo sapiens
aaagugcugagaguucuaacuu

SEQ ID NO: 1475 - RNA, 22 nt, Homo sapiens
aaagugcugagauuguaggcau

SEQ ID NO: 1476 - RNA, 22 nt, Homo sapiens
aaagugcugagucuaggcgggg

SEQ ID NO: 1477 - RNA, 22 nt, Homo sapiens
aaagugcugggaucacacugaa

SEQ ID NO: 1478 - RNA, 22 nt, Homo sapiens
aaagugcugggauuaggccagg

SEQ ID NO: 1479 - RNA, 22 nt, Homo sapiens
aaagugcugggauuggccgggc

SEQ ID NO: 1480 - RNA, 22 nt, Homo sapiens
aaagugcugggauuggcugggc

SEQ ID NO: 1481 - RNA, 22 nt, Homo sapiens
aaagugcugggauuuuaggcau

SEQ ID NO: 1482 - RNA, 22 nt, Homo sapiens
aaagugcuguagacugggcgca

SEQ ID NO: 1483 - RNA, 22 nt, Homo sapiens
aaagugcuuacuaaguugccaa

SEQ ID NO: 1484 - RNA, 22 nt, Homo sapiens
aaagugcuuccuuuuugagggu

SEQ ID NO: 1485 - RNA, 22 nt, Homo sapiens
aaagugcuucucuuuggugggu

SEQ ID NO: 1486 - RNA, 22 nt, Homo sapiens
aaaguggacuaagugaauauga

SEQ ID NO: 1487 - RNA, 22 nt, Homo sapiens
aaaguggugggauuccaggcau

SEQ ID NO: 1488 - RNA, 22 nt, Homo sapiens
aaaguggugugaguauguaucu

SEQ ID NO: 1489 - RNA, 22 nt, Homo sapiens
aaaguucuugcugaaggauuau

SEQ ID NO: 1490 - RNA, 22 nt, Homo sapiens
aaaccaccauuacuuuugcacc

SEQ ID NO: 1491 - RNA, 22 nt, Homo sapiens
aaacugaucugaaggccaggcu

SEQ ID NO: 1492 - RNA, 20 nt, Homo sapiens
aaacucugucuucuuuauca

SEQ ID NO: 1493 - RNA, 18 nt, Homo sapiens
aaacugcuuccuuggccu

SEQ ID NO: 1494 - RNA, 22 nt, Homo sapiens
aaacugcuuuccaugguggcug

SEQ ID NO: 1495 - RNA, 23 nt, Homo sapiens
aaauuugccuauuauuccuaugg

SEQ ID NO: 1496 - RNA, 22 nt, Homo sapiens
aaauucaucaaaugguuuguau

SEQ ID NO: 1497 - RNA, 22 nt, Homo sapiens
aaauugcacaaguggugauuug

SEQ ID NO: 1498 - RNA, 22 nt, Homo sapiens
aaauugcaguuaggaugauggu

SEQ ID NO: 1499 - RNA, 22 nt, Homo sapiens
aaauugcauugagcugcuuauu

SEQ ID NO: 1500 - RNA, 22 nt, Homo sapiens
aaauugcuuuugaagacuuagu

SEQ ID NO: 1501 - RNA, 22 nt, Homo sapiens
aaaucccuugcucucucagacc

SEQ ID NO: 1502 - RNA, 22 nt, Homo sapiens
aaaugcacaaagauuuugcacu

SEQ ID NO: 1503 - RNA, 22 nt, Homo sapiens
aaaugcacagaaaggaugugga

SEQ ID NO: 1504 - RNA, 21 nt, Homo sapiens
aaaugcacauuacugcuggug

SEQ ID NO: 1505 - RNA, 22 nt, Homo sapiens
aaaugcaccacucuggugcagg

SEQ ID NO: 1506 - RNA, 22 nt, Homo sapiens
aaaugcacgcuacccagcuaga

SEQ ID NO: 1507 - RNA, 22 nt, Homo sapiens
aaaugcagucuuuguucugggc

SEQ ID NO: 1508 - RNA, 22 nt, Homo sapiens
aaaugcauaucaagauugcccu

SEQ ID NO: 1509 - RNA, 22 nt, Homo sapiens
aaaugccucccauucuacugac

SEQ ID NO: 1510 - RNA, 22 nt, Homo sapiens
aaaugcucucuacacguuucug

SEQ ID NO: 1511 - RNA, 22 nt, Homo sapiens
aaaugcuucuauguggcauguu

SEQ ID NO: 1512 - RNA, 22 nt, Homo sapiens
aaaugcuuucuuggaccauuug

SEQ ID NO: 1513 - RNA, 20 nt, Homo sapiens
aauaacagccccagggaggu

SEQ ID NO: 1514 - RNA, 22 nt, Homo sapiens
aauaaagcagcuuuuugggacu

SEQ ID NO: 1515 - RNA, 22 nt, Homo sapiens
aauaaagcauggcuacuccaua

SEQ ID NO: 1516 - RNA, 22 nt, Homo sapiens
aauaaagcugaauccuuccuga

SEQ ID NO: 1517 - RNA, 22 nt, Homo sapiens
aauaaagucugaagugugcuua

SEQ ID NO: 1518 - RNA, 22 nt, Homo sapiens
aaguuaauguuuaagacuccua

SEQ ID NO: 1519 - RNA, 22 nt, Homo sapiens
aagugaaugaugugaaguguaa

SEQ ID NO: 1520 - RNA, 19 nt, Homo sapiens
aagugaaugcuuuguucac

SEQ ID NO: 1521 - RNA, 22 nt, Homo sapiens
aagugaaugugcuggaauagcu

SEQ ID NO: 1522 - RNA, 22 nt, Homo sapiens
aagugacauugugcccauuuga

SEQ ID NO: 1523 - RNA, 20 nt, Homo sapiens
aagugaguguuaaacugaac

SEQ ID NO: 1524 - RNA, 22 nt, Homo sapiens
aagugcaaauucccaggcucug

SEQ ID NO: 1525 - RNA, 22 nt, Homo sapiens
aauagcauugaaucuaccaauu

SEQ ID NO: 1526 - RNA, 22 nt, Homo sapiens
aauacagcacacagaugggucu

SEQ ID NO: 1527 - RNA, 21 nt, Homo sapiens
aauacucuagguuaagagagc

SEQ ID NO: 1528 - RNA, 22 nt, Homo sapiens
aauacugaaaguauuuucaaau

SEQ ID NO: 1529 - RNA, 22 nt, Homo sapiens
aauacugagaugugagguacua

SEQ ID NO: 1530 - RNA, 22 nt, Homo sapiens
aauacuggcacugaagaccaug

SEQ ID NO: 1531 - RNA, 22 nt, Homo sapiens
aauacugugauaucgagcgauu

SEQ ID NO: 1532 - RNA, 22 nt, Homo sapiens
aaucacacuugauguugagcaa

SEQ ID NO: 1533 - RNA, 22 nt, Homo sapiens
aaucacaggucuuggcugcaug

SEQ ID NO: 1534 - RNA, 22 nt, Homo sapiens
aaucacaguguucuugugaggg

SEQ ID NO: 1535 - RNA, 21 nt, Homo sapiens
aaucacaguuguucugccuuc

SEQ ID NO: 1536 - RNA, 22 nt, Homo sapiens
aaucacauugaaucugcuaccu

SEQ ID NO: 1537 - RNA, 21 nt, Homo sapiens
aaucacugucuguuuccccuu

SEQ ID NO: 1538 - RNA, 22 nt, Homo sapiens
aaucacuuugcuacaaggcagu

SEQ ID NO: 1539 - RNA, 17 nt, Homo sapiens
aaucagauuucugagga

SEQ ID NO: 1540 - RNA, 22 nt, Homo sapiens
aagcuggagugcaguggugcaa

SEQ ID NO: 1541 - RNA, 22 nt, Homo sapiens
aagcuggagugcaguggugcga

SEQ ID NO: 1542 - RNA, 22 nt, Homo sapiens
aagcuggauuuaguguggagca

SEQ ID NO: 1543 - RNA, 22 nt, Homo sapiens
aagcuggauuucgcauccuguu

SEQ ID NO: 1544 - RNA, 22 nt, Homo sapiens
aaggaacuggaauauuuugaac

SEQ ID NO: 1545 - RNA, 22 nt, Homo sapiens
aaggaauucaaauuuucucugg

SEQ ID NO: 1546 - RNA, 22 nt, Homo sapiens
aaggaguagaauagaugcaccu

SEQ ID NO: 1547 - RNA, 22 nt, Homo sapiens
aaggaguagaggaauagcaaug

SEQ ID NO: 1548 - RNA, 22 nt, Homo sapiens
aagcuacauuuuauuuauguca

SEQ ID NO: 1549 - RNA, 22 nt, Homo sapiens
aagggaaugugguagcugguuu

SEQ ID NO: 1550 - RNA, 22 nt, Homo sapiens
aagggaauguuguagcugguuu

SEQ ID NO: 1551 - RNA, 22 nt, Homo sapiens
aagggaauguuguggcugguug

SEQ ID NO: 1552 - RNA, 22 nt, Homo sapiens
aagggaauguuguggcugguuu

SEQ ID NO: 1553 - RNA, 22 nt, Homo sapiens
aagggagcugcauaaucuugug

SEQ ID NO: 1554 - RNA, 22 nt, Homo sapiens
aaggugcuguaagcauccaugu

SEQ ID NO: 1555 - RNA, 17 nt, Homo sapiens
aaggugcuucgaccucc

SEQ ID NO: 1556 - RNA, 22 nt, Homo sapiens
aaguaaauauccgguaguccca

SEQ ID NO: 1557 - RNA, 22 nt, Homo sapiens
aaguacuguuuaaauugcagaa

SEQ ID NO: 1558 - RNA, 22 nt, Homo sapiens
aaguagcuggaugcaguggcac

SEQ ID NO: 1559 - RNA, 22 nt, Homo sapiens
aaguauguaucaagucauacuu

SEQ ID NO: 1560 - RNA, 22 nt, Homo sapiens
aagucaaggagagaagcuucag

SEQ ID NO: 1561 - RNA, 22 nt, Homo sapiens
aagucaguuugggagaagcuau

SEQ ID NO: 1562 - RNA, 20 nt, Homo sapiens
aagugcaucguugugucugc

SEQ ID NO: 1563 - RNA, 22 nt, Homo sapiens
aagugcucuugaaacugccuua

SEQ ID NO: 1564 - RNA, 22 nt, Homo sapiens
aagugcuuacagggaacaugau

SEQ ID NO: 1565 - RNA, 22 nt, Homo sapiens
aagugcuuaggauagugugugg

SEQ ID NO: 1566 - RNA, 22 nt, Homo sapiens
aagugcuucagaagacaauauu

SEQ ID NO: 1567 - RNA, 22 nt, Homo sapiens
aagugcuuccuuucagaggguu

SEQ ID NO: 1568 - RNA, 20 nt, Homo sapiens
aagugcuuccuuuuagaggg

SEQ ID NO: 1569 - RNA, 22 nt, Homo sapiens
aagugcuucuuuccucgagaag

SEQ ID NO: 1570 - RNA, 22 nt, Homo sapiens
aagugcuuuacacaugcaugau

SEQ ID NO: 1571 - RNA, 22 nt, Homo sapiens
aagugcuuuguacagggguuga

SEQ ID NO: 1572 - RNA, 22 nt, Homo sapiens
aagugcuuuuuagauaugguuu

SEQ ID NO: 1573 - RNA, 22 nt, Homo sapiens
aaguggaauguuuguggcacaa

SEQ ID NO: 1574 - RNA, 22 nt, Homo sapiens
aauaucacaggguguacacuca

SEQ ID NO: 1575 - RNA, 22 nt, Homo sapiens
aauaauggcaccaaagcacaag

SEQ ID NO: 1576 - RNA, 22 nt, Homo sapiens
aaucugucuuuuguuauugagg

SEQ ID NO: 1577 - RNA, 22 nt, Homo sapiens
aaucccuuuguccagucucuuu

SEQ ID NO: 1578 - RNA, 22 nt, Homo sapiens
aaugcacauaaaauccuccagg

SEQ ID NO: 1579 - RNA, 22 nt, Homo sapiens
aaugcacauauauuuccuuauu

SEQ ID NO: 1580 - RNA, 22 nt, Homo sapiens
aaugguguuuccguuaagcuga

SEQ ID NO: 1581 - RNA, 22 nt, Homo sapiens
aaugugcacuauuagggugaua

SEQ ID NO: 1582 - RNA, 22 nt, Homo sapiens
aauggcaaauguuuucuguuga

SEQ ID NO: 1583 - RNA, 22 nt, Homo sapiens
aauggcaagagccacagaggcg

SEQ ID NO: 1584 - RNA, 22 nt, Homo sapiens
aaugacuaagaugguacauuuu

SEQ ID NO: 1585 - RNA, 22 nt, Homo sapiens
aaucugggguuguuuggggagu

SEQ ID NO: 1586 - RNA, 22 nt, Homo sapiens
acaauguauauuuuacuguagg

SEQ ID NO: 1587 - RNA, 22 nt, Homo sapiens
acacaaugguaaguguuugugu

SEQ ID NO: 1588 - RNA, 23 nt, Homo sapiens
acacaguaaacuaaaagcuagcu

SEQ ID NO: 1589 - RNA, 22 nt, Homo sapiens
acaagacuucuuguauucuagu

SEQ ID NO: 1590 - RNA, 22 nt, Homo sapiens
acaagcacaaauuuaauccugu

SEQ ID NO: 1591 - RNA, 22 nt, Homo sapiens
acaaagcgcuucucuuuagagu

SEQ ID NO: 1592 - RNA, 22 nt, Homo sapiens
acaaaguauggaauguuggugu

SEQ ID NO: 1593 - RNA, 20 nt, Homo sapiens
acaaaugcauucugugacau

SEQ ID NO: 1594 - RNA, 22 nt, Homo sapiens
aauuacauggcaauugggaaau

SEQ ID NO: 1595 - RNA, 22 nt, Homo sapiens
aauuaguugucgugagaguggu

SEQ ID NO: 1596 - RNA, 23 nt, Homo sapiens
aauugcacauuccuugcuggcag

SEQ ID NO: 1597 - RNA, 22 nt, Homo sapiens
aauugcaccaucuagaucaaga

SEQ ID NO: 1598 - RNA, 22 nt, Homo sapiens
aauugcacuaagcauaguccag

SEQ ID NO: 1599 - RNA, 22 nt, Homo sapiens
aauugcacuacugcacucccac

SEQ ID NO: 1600 - RNA, 22 nt, Homo sapiens
aauugcacuggaaguaacugag

SEQ ID NO: 1601 - RNA, 22 nt, Homo sapiens
aauugcauugaauuuguagcuu

SEQ ID NO: 1602 - RNA, 22 nt, Homo sapiens
aauuggcagugcucuugccaca

SEQ ID NO: 1603 - RNA, 22 nt, Homo sapiens
acuuuuugaugaggucguuugu

SEQ ID NO: 1604 - RNA, 22 nt, Homo sapiens
acuuuuugauggggagaacauu

SEQ ID NO: 1605 - RNA, 22 nt, Homo sapiens
agaaacauucucuugccuccuu

SEQ ID NO: 1606 - RNA, 22 nt, Homo sapiens
agaauguaaacagaauagagga

SEQ ID NO: 1607 - RNA, 22 nt, Homo sapiens
agaauguauauucuguaguugu

SEQ ID NO: 1608 - RNA, 22 nt, Homo sapiens
agaaugucaguauuggcuaaaa

SEQ ID NO: 1609 - RNA, 22 nt, Homo sapiens
agaacacugaguucagggucag

SEQ ID NO: 1610 - RNA, 22 nt, Homo sapiens
agaaccaaucccacauggauac

SEQ ID NO: 1611 - RNA, 22 nt, Homo sapiens
agaacuguccauucagcaugaa

SEQ ID NO: 1612 - RNA, 22 nt, Homo sapiens
acuguauagauggaguugauuu

SEQ ID NO: 1613 - RNA, 22 nt, Homo sapiens
acuucauucucuggaucagaau

SEQ ID NO: 1614 - RNA, 22 nt, Homo sapiens
acuggacuuaaugaugaauugu

SEQ ID NO: 1615 - RNA, 22 nt, Homo sapiens
acuggauguuagggauuuuauu

SEQ ID NO: 1616 - RNA, 22 nt, Homo sapiens
acuggcuuauuucacuuagcau

SEQ ID NO: 1617 - RNA, 22 nt, Homo sapiens
acugaguguugauuuagauuaa

SEQ ID NO: 1618 - RNA, 22 nt, Homo sapiens
acugacaugaucaggcauguuc

SEQ ID NO: 1619 - RNA, 22 nt, Homo sapiens
acugagacugagaauguuucuu

SEQ ID NO: 1620 - RNA, 22 nt, Homo sapiens
acugagaucuuuaaauaaauaa

SEQ ID NO: 1621 - RNA, 22 nt, Homo sapiens
acuagguaguaaucugcagaga

SEQ ID NO: 1622 - RNA, 22 nt, Homo sapiens
acuauacugaagcaaauuaaca

SEQ ID NO: 1623 - RNA, 22 nt, Homo sapiens
acuauacuguaacuguauucag

SEQ ID NO: 1624 - RNA, 22 nt, Homo sapiens
acuccauuucauuuuagcucuu

SEQ ID NO: 1625 - RNA, 22 nt, Homo sapiens
acugaucaauguuaaggcuuau

SEQ ID NO: 1626 - RNA, 22 nt, Homo sapiens
acugcacuccacccuuggcagc

SEQ ID NO: 1627 - RNA, 18 nt, Homo sapiens
acugcacuccaccuuggg

SEQ ID NO: 1628 - RNA, 22 nt, Homo sapiens
acugcacuccaccuugggcaac

SEQ ID NO: 1629 - RNA, 22 nt, Homo sapiens
acugcacuccagccuccugggu

SEQ ID NO: 1630 - RNA, 22 nt, Homo sapiens
acugcacuccagccucggcaau

SEQ ID NO: 1631 - RNA, 22 nt, Homo sapiens
acugcacuccagccuuggcaac

SEQ ID NO: 1632 - RNA, 22 nt, Homo sapiens
acugcacuccagccuuggccac

SEQ ID NO: 1633 - RNA, 22 nt, Homo sapiens
acugcacuccagccuuggcggc

SEQ ID NO: 1634 - RNA, 22 nt, Homo sapiens
acugcacuccaguuugggcagc

SEQ ID NO: 1635 - RNA, 22 nt, Homo sapiens
acugcacuccggccuggcaaca

SEQ ID NO: 1636 - RNA, 19 nt, Homo sapiens
acugcacuccuccuugggu

SEQ ID NO: 1637 - RNA, 22 nt, Homo sapiens
acugcacucuagccuuggcaac

SEQ ID NO: 1638 - RNA, 22 nt, Homo sapiens
acugcacuuauccuccaauguu

SEQ ID NO: 1639 - RNA, 22 nt, Homo sapiens
acugcacuucagccuuggcuac

SEQ ID NO: 1640 - RNA, 22 nt, Homo sapiens
acugcacuucagccuugggaaa

SEQ ID NO: 1641 - RNA, 22 nt, Homo sapiens
agaugauguuuacugagcauca

SEQ ID NO: 1642 - RNA, 22 nt, Homo sapiens
agaugcauugguggcauauuca

SEQ ID NO: 1643 - RNA, 22 nt, Homo sapiens
agauggguuuucacauguuggc

SEQ ID NO: 1644 - RNA, 22 nt, Homo sapiens
agaugguauuauagguuucugu

SEQ ID NO: 1645 - RNA, 22 nt, Homo sapiens
agaucauaugcaguaaugaacu

SEQ ID NO: 1646 - RNA, 22 nt, Homo sapiens
agcaagauuguucccauuuucu

SEQ ID NO: 1647 - RNA, 22 nt, Homo sapiens
agcaauaugacauugcuacauc

SEQ ID NO: 1648 - RNA, 22 nt, Homo sapiens
agcaccaauaacaguuucuagc

SEQ ID NO: 1649 - RNA, 22 nt, Homo sapiens
agcaccaauaaucagaguucuu

SEQ ID NO: 1650 - RNA, 22 nt, Homo sapiens
agcaccauuagcguugggccgg

SEQ ID NO: 1651 - RNA, 22 nt, Homo sapiens
agcagagcaguggauuuuguga

SEQ ID NO: 1652 - RNA, 22 nt, Homo sapiens
agcagagcauauucauucgggg

SEQ ID NO: 1653 - RNA, 23 nt, Homo sapiens
agcaccuuuccuccacuaucugc

SEQ ID NO: 1654 - RNA, 22 nt, Homo sapiens
agagugaagcuuuuuauauucu

SEQ ID NO: 1655 - RNA, 22 nt, Homo sapiens
agagugcaaagguuggggcugg

SEQ ID NO: 1656 - RNA, 23 nt, Homo sapiens
agagugcaauggugccaucucgg

SEQ ID NO: 1657 - RNA, 22 nt, Homo sapiens
agagugcuauagauuagauuuc

SEQ ID NO: 1658 - RNA, 22 nt, Homo sapiens
agagguaagcaguggcaagugc

SEQ ID NO: 1659 - RNA, 22 nt, Homo sapiens
agagguauuggaaggaguguca

SEQ ID NO: 1660 - RNA, 22 nt, Homo sapiens
agaggucuuaucaaacaugcuu

SEQ ID NO: 1661 - RNA, 22 nt, Homo sapiens
agagguuuaauugauucacagu

SEQ ID NO: 1662 - RNA, 22 nt, Homo sapiens
agagguuuugcccucgagauaa

SEQ ID NO: 1663 - RNA, 22 nt, Homo sapiens
agagguuuuggggcugagagcu

SEQ ID NO: 1664 - RNA, 22 nt, Homo sapiens
agaguacaggcaaguuagucau

SEQ ID NO: 1665 - RNA, 21 nt, Homo sapiens
agagucaucucuaucuguacc

SEQ ID NO: 1666 - RNA, 22 nt, Homo sapiens
agacacugaaauguauugaaga

SEQ ID NO: 1667 - RNA, 22 nt, Homo sapiens
agacacuguugaaaaggcccca

SEQ ID NO: 1668 - RNA, 22 nt, Homo sapiens
agacaguguguguauauauggu

SEQ ID NO: 1669 - RNA, 20 nt, Homo sapiens
agacuagggagcagaaagcc

SEQ ID NO: 1670 - RNA, 21 nt, Homo sapiens
agagaacugaaacaugugacu

SEQ ID NO: 1671 - RNA, 22 nt, Homo sapiens
agagaacugauuggaugugggc

SEQ ID NO: 1672 - RNA, 19 nt, Homo sapiens
agagacucauuguagcauu

SEQ ID NO: 1673 - RNA, 22 nt, Homo sapiens
agagagguggguggagccccca

SEQ ID NO: 1674 - RNA, 22 nt, Homo sapiens
agagauuauccuggcuucucug

SEQ ID NO: 1675 - RNA, 18 nt, Homo sapiens
agagcacugaguuuuaga

SEQ ID NO: 1676 - RNA, 22 nt, Homo sapiens
accugguuuuaacauuguauua

SEQ ID NO: 1677 - RNA, 23 nt, Homo sapiens
accuucauucauucagcugaagu

SEQ ID NO: 1678 - RNA, 22 nt, Homo sapiens
acccaguagccagauguagcug

SEQ ID NO: 1679 - RNA, 22 nt, Homo sapiens
acccauguaggugggauuacag

SEQ ID NO: 1680 - RNA, 22 nt, Homo sapiens
acccagaguuccuugucuuuca

SEQ ID NO: 1681 - RNA, 22 nt, Homo sapiens
acccgcccagguguggccggga

SEQ ID NO: 1682 - RNA, 22 nt, Homo sapiens
acccuggauucguggccuugaa

SEQ ID NO: 1683 - RNA, 22 nt, Homo sapiens
acccugucauccacauggugcu

SEQ ID NO: 1684 - RNA, 22 nt, Homo sapiens
acccugugaauauuuaaacuuc

SEQ ID NO: 1685 - RNA, 22 nt, Homo sapiens
acccuuaagcacuaguucagcu

SEQ ID NO: 1686 - RNA, 22 nt, Homo sapiens
accucagcccggggaaguugag

SEQ ID NO: 1687 - RNA, 21 nt, Homo sapiens
acccucuaguuuucaacaggc

SEQ ID NO: 1688 - RNA, 22 nt, Homo sapiens
accugagacuaggcauuuuaua

SEQ ID NO: 1689 - RNA, 22 nt, Homo sapiens
accugagauuacaggugcuggc

SEQ ID NO: 1690 - RNA, 22 nt, Homo sapiens
accuggcacuuagcaaaucuga

SEQ ID NO: 1691 - RNA, 22 nt, Homo sapiens
accagucucagguaugucuuua

SEQ ID NO: 1692 - RNA, 22 nt, Homo sapiens
accaguuuuuuauacaucuucu

SEQ ID NO: 1693 - RNA, 22 nt, Homo sapiens
accaugcaguccaauaugcaca

SEQ ID NO: 1694 - RNA, 22 nt, Homo sapiens
acaucuguacaguggguguggu

SEQ ID NO: 1695 - RNA, 19 nt, Homo sapiens
acauggauuuugugcaaac

SEQ ID NO: 1696 - RNA, 22 nt, Homo sapiens
acauggcacugcgggcuucuug

SEQ ID NO: 1697 - RNA, 22 nt, Homo sapiens
acauguaauugauuuuguguua

SEQ ID NO: 1698 - RNA, 22 nt, Homo sapiens
acauucagcuguuguuucaaug

SEQ ID NO: 1699 - RNA, 18 nt, Homo sapiens
acauucagcuugaagaua

SEQ ID NO: 1700 - RNA, 22 nt, Homo sapiens
acauaaagaagcaggacauugu

SEQ ID NO: 1701 - RNA, 22 nt, Homo sapiens
acauaguagacacugaaaauau

SEQ ID NO: 1702 - RNA, 22 nt, Homo sapiens
acauauaaggagacuagggcau

SEQ ID NO: 1703 - RNA, 22 nt, Homo sapiens
acauaugaguacaugugccaug

SEQ ID NO: 1704 - RNA, 22 nt, Homo sapiens
acaucccuuucccacccuucac

SEQ ID NO: 1705 - RNA, 19 nt, Homo sapiens
acagcugguuuugguuucu

SEQ ID NO: 1706 - RNA, 22 nt, Homo sapiens
acagaaccauucacuccccugg

SEQ ID NO: 1707 - RNA, 22 nt, Homo sapiens
acagaacugggcuugcuuuugg

SEQ ID NO: 1708 - RNA, 22 nt, Homo sapiens
acaagugaauacaggauucucu

SEQ ID NO: 1709 - RNA, 22 nt, Homo sapiens
acaccaugucuguuucugguuu

SEQ ID NO: 1710 - RNA, 22 nt, Homo sapiens
acaccuguggucccaguaacuu

SEQ ID NO: 1711 - RNA, 22 nt, Homo sapiens
acacuggaguuaaaggugauuu

SEQ ID NO: 1712 - RNA, 20 nt, Homo sapiens
acacuggcuuugagauuuag

SEQ ID NO: 1713 - RNA, 22 nt, Homo sapiens
acacuguagcugagggcaugcg

SEQ ID NO: 1714 - RNA, 22 nt, Homo sapiens
acacuuucuggagcugcacaua

SEQ ID NO: 1715 - RNA, 22 nt, Homo sapiens
acaguaaugggccccuuuuccu

SEQ ID NO: 1716 - RNA, 22 nt, Homo sapiens
acagucacaauuuguaccuuuu

SEQ ID NO: 1717 - RNA, 22 nt, Homo sapiens
acagugcuguuguguuuucacg

SEQ ID NO: 1718 - RNA, 22 nt, Homo sapiens
acagugcuucugauaugaugcc

SEQ ID NO: 1719 - RNA, 22 nt, Homo sapiens
acagugcuuggcacacaguaau

SEQ ID NO: 1720 - RNA, 22 nt, Homo sapiens
acagugcuuucaauguucagua

SEQ ID NO: 1721 - RNA, 22 nt, Homo sapiens
acaguguagugacugccaacuu

SEQ ID NO: 1722 - RNA, 18 nt, Homo sapiens
acaguguguaaggguucu

SEQ ID NO: 1723 - RNA, 22 nt, Homo sapiens
acaguguguguguucaccuaga

SEQ ID NO: 1724 - RNA, 22 nt, Homo sapiens
acagccauuccagccaaauacu

SEQ ID NO: 1725 - RNA, 21 nt, Homo sapiens
agcagcuuugguugaagcaga

SEQ ID NO: 1726 - RNA, 22 nt, Homo sapiens
agcccauguggcugaggcuucu

SEQ ID NO: 1727 - RNA, 22 nt, Homo sapiens
agccaguauuuccacagagugg

SEQ ID NO: 1728 - RNA, 22 nt, Homo sapiens
agccauacaacguaugcaugua

SEQ ID NO: 1729 - RNA, 22 nt, Homo sapiens
agcagguguccacaauguuugc

SEQ ID NO: 1730 - RNA, 22 nt, Homo sapiens
agcaguacauaaaaagcauccu

SEQ ID NO: 1731 - RNA, 19 nt, Homo sapiens
agcaguguggagauuucuc

SEQ ID NO: 1732 - RNA, 22 nt, Homo sapiens
agcaguguggccuuagacccgg

SEQ ID NO: 1733 - RNA, 22 nt, Homo sapiens
agcaggucuuaacuugugaggu

SEQ ID NO: 1734 - RNA, 22 nt, Homo sapiens
agcauggucacuuugggcccca

SEQ ID NO: 1735 - RNA, 22 nt, Homo sapiens
agcauuaguugugaagccuuua

SEQ ID NO: 1736 - RNA, 22 nt, Homo sapiens
agccuguguugaauuauagaaa

SEQ ID NO: 1737 - RNA, 22 nt, Homo sapiens
agcgccacugcacuccagccug

SEQ ID NO: 1738 - RNA, 22 nt, Homo sapiens
aggaagguaaacuaacuugccu

SEQ ID NO: 1739 - RNA, 23 nt, Homo sapiens
aggaaguaacuaucuuuucuguc

SEQ ID NO: 1740 - RNA, 22 nt, Homo sapiens
aggaaguaauaaguuugguucu

SEQ ID NO: 1741 - RNA, 23 nt, Homo sapiens
aggaauggaaaaccaaguaucau

SEQ ID NO: 1742 - RNA, 22 nt, Homo sapiens
aggaauguuaguacuucuuagu

SEQ ID NO: 1743 - RNA, 22 nt, Homo sapiens
aggaauuuaauguaugauaaua

SEQ ID NO: 1744 - RNA, 22 nt, Homo sapiens
aggacacugauguaugcugugg

SEQ ID NO: 1745 - RNA, 22 nt, Homo sapiens
aggaagacugaaauugcuguuc

SEQ ID NO: 1746 - RNA, 22 nt, Homo sapiens
agcuuuuugggcagcuauugac

SEQ ID NO: 1747 - RNA, 22 nt, Homo sapiens
agcuugugauuuagagugagag

SEQ ID NO: 1748 - RNA, 22 nt, Homo sapiens
agcuuguggugaauacugcuag

SEQ ID NO: 1749 - RNA, 22 nt, Homo sapiens
agcuuguuuuauagaaagucaa

SEQ ID NO: 1750 - RNA, 22 nt, Homo sapiens
aggcaugauuguauuuugcucu

SEQ ID NO: 1751 - RNA, 23 nt, Homo sapiens
aggcauuguacaguaauggaaaa

SEQ ID NO: 1752 - RNA, 21 nt, Homo sapiens
agcuaaauuggaaauuucugu

SEQ ID NO: 1753 - RNA, 22 nt, Homo sapiens
agcuauauugaggaugccauuc

SEQ ID NO: 1754 - RNA, 22 nt, Homo sapiens
agcugcauuuacuuuugcacaa

SEQ ID NO: 1755 - RNA, 22 nt, Homo sapiens
agcugauggucuuguaugaugu

SEQ ID NO: 1756 - RNA, 22 nt, Homo sapiens
agcugcaaagggagagaugauu

SEQ ID NO: 1757 - RNA, 22 nt, Homo sapiens
agcugcaauguuuaguauaaua

SEQ ID NO: 1758 - RNA, 22 nt, Homo sapiens
agcucuuguuaguauuagcagu

SEQ ID NO: 1759 - RNA, 22 nt, Homo sapiens
agcuggauguauguuaagugaa

SEQ ID NO: 1760 - RNA, 22 nt, Homo sapiens
agcuggcuguagcugcaagucu

SEQ ID NO: 1761 - RNA, 22 nt, Homo sapiens
agcugguauuuugucaaggaua

SEQ ID NO: 1762 - RNA, 22 nt, Homo sapiens
agcugguauuuugucgaggacu

SEQ ID NO: 1763 - RNA, 22 nt, Homo sapiens
agcuggucuacguguguaugag

SEQ ID NO: 1764 - RNA, 22 nt, Homo sapiens
agcugugucuucuuaaagauuu

SEQ ID NO: 1765 - RNA, 22 nt, Homo sapiens
agcuguuguuuuaagauacuaa

SEQ ID NO: 1766 - RNA, 22 nt, Homo sapiens
auacacauuccugggccucacc

SEQ ID NO: 1767 - RNA, 22 nt, Homo sapiens
auacacgguaggcacauauuua

SEQ ID NO: 1768 - RNA, 19 nt, Homo sapiens
auacacguguauacauaca

SEQ ID NO: 1769 - RNA, 22 nt, Homo sapiens
auacaguaaugucuuaggcugu

SEQ ID NO: 1770 - RNA, 22 nt, Homo sapiens
auacaguaucuucuggcaagca

SEQ ID NO: 1771 - RNA, 22 nt, Homo sapiens
auacaguauggagggcccagcu

SEQ ID NO: 1772 - RNA, 22 nt, Homo sapiens
auacaguugccauuucuugugc

SEQ ID NO: 1773 - RNA, 22 nt, Homo sapiens
auacaucugccauguuggugug

SEQ ID NO: 1774 - RNA, 22 nt, Homo sapiens
agugguuuuaaguagagcauac

SEQ ID NO: 1775 - RNA, 22 nt, Homo sapiens
agugguuuuggaauggaauuca

SEQ ID NO: 1776 - RNA, 22 nt, Homo sapiens
aguggcaaugugauguccugaa

SEQ ID NO: 1777 - RNA, 22 nt, Homo sapiens
aguucaaaucgagccuggccau

SEQ ID NO: 1778 - RNA, 22 nt, Homo sapiens
auaaagacacuuggcaugauuu

SEQ ID NO: 1779 - RNA, 22 nt, Homo sapiens
auaaagcaagucucuggccuca

SEQ ID NO: 1780 - RNA, 22 nt, Homo sapiens
auaaagccaugagcuugagaug

SEQ ID NO: 1781 - RNA, 22 nt, Homo sapiens
auaaaguucugcuggcauauau

SEQ ID NO: 1782 - RNA, 22 nt, Homo sapiens
auaaauaguaguugugguggcc

SEQ ID NO: 1783 - RNA, 22 nt, Homo sapiens
auaaaugcaaugguauuuuuga

SEQ ID NO: 1784 - RNA, 19 nt, Homo sapiens
auaaaugccuacaagggug

SEQ ID NO: 1785 - RNA, 22 nt, Homo sapiens
auaaaugccuguuguuuuaagc

SEQ ID NO: 1786 - RNA, 22 nt, Homo sapiens
auaaaugcuuagaucuguauau

SEQ ID NO: 1787 - RNA, 22 nt, Homo sapiens
auaaauucauuuaagcuccuua

SEQ ID NO: 1788 - RNA, 22 nt, Homo sapiens
auaacagcauuauugcauacgu

SEQ ID NO: 1789 - RNA, 22 nt, Homo sapiens
auaacagcugcaaggcaaaagc

SEQ ID NO: 1790 - RNA, 22 nt, Homo sapiens
auaacucuguuuuuuucaugca

SEQ ID NO: 1791 - RNA, 22 nt, Homo sapiens
auaagauaguggaagugggauu

SEQ ID NO: 1792 - RNA, 23 nt, Homo sapiens
auaagccuuuucuuucugcccca

SEQ ID NO: 1793 - RNA, 22 nt, Homo sapiens
auaaggaguaucauauuaaaac

SEQ ID NO: 1794 - RNA, 22 nt, Homo sapiens
auaaguauuuggacuuuacugu

SEQ ID NO: 1795 - RNA, 22 nt, Homo sapiens
auaagugagugauucaguguua

SEQ ID NO: 1796 - RNA, 22 nt, Homo sapiens
auaauagcugaucauuuagaag

SEQ ID NO: 1797 - RNA, 22 nt, Homo sapiens
agugaaaucugaagaaggucau

SEQ ID NO: 1798 - RNA, 22 nt, Homo sapiens
agugacaugggaucaaaucuga

SEQ ID NO: 1799 - RNA, 22 nt, Homo sapiens
aguccauuugaugaugauucca

SEQ ID NO: 1800 - RNA, 22 nt, Homo sapiens
agugauuuuaacuuccagcaau

SEQ ID NO: 1801 - RNA, 22 nt, Homo sapiens
agugcaauaaggauguagaacu

SEQ ID NO: 1802 - RNA, 22 nt, Homo sapiens
agugcaauggugccaucauagc

SEQ ID NO: 1803 - RNA, 22 nt, Homo sapiens
agugcauugcaucucugcuuca

SEQ ID NO: 1804 - RNA, 22 nt, Homo sapiens
agugcauuugcaucucaauaua

SEQ ID NO: 1805 - RNA, 22 nt, Homo sapiens
agugcauuuguucugugucagg

SEQ ID NO: 1806 - RNA, 22 nt, Homo sapiens
agugccaaaucgagggcucuga

SEQ ID NO: 1807 - RNA, 22 nt, Homo sapiens
aguggaaucuguuauacuaacu

SEQ ID NO: 1808 - RNA, 22 nt, Homo sapiens
aguggaauuaagaaacugaauu

SEQ ID NO: 1809 - RNA, 22 nt, Homo sapiens
aguggaguguaaagcgucuuuu

SEQ ID NO: 1810 - RNA, 22 nt, Homo sapiens
aguggauguuguggccugggag

SEQ ID NO: 1811 - RNA, 22 nt, Homo sapiens
aguguuuuuaacaagaaagggu

SEQ ID NO: 1812 - RNA, 22 nt, Homo sapiens
aguguuuuuacaagcacucugg

SEQ ID NO: 1813 - RNA, 22 nt, Homo sapiens
aguguuuuuaucaugaaagggu

SEQ ID NO: 1814 - RNA, 22 nt, Homo sapiens
agguagcauagcgggaauauca

SEQ ID NO: 1815 - RNA, 22 nt, Homo sapiens
agguauguauguaugggagaaa

SEQ ID NO: 1816 - RNA, 22 nt, Homo sapiens
aggucccauguccucccugacc

SEQ ID NO: 1817 - RNA, 22 nt, Homo sapiens
agggcuuguuuaacuaucauua

SEQ ID NO: 1818 - RNA, 22 nt, Homo sapiens
agguaagaugugacuugguguu

SEQ ID NO: 1819 - RNA, 22 nt, Homo sapiens
aggagguaggaauugugcuagg

SEQ ID NO: 1820 - RNA, 21 nt, Homo sapiens
aggauaguagauuaaauauuu

SEQ ID NO: 1821 - RNA, 22 nt, Homo sapiens
aggaucauugacuauuauaagg

SEQ ID NO: 1822 - RNA, 22 nt, Homo sapiens
aggcagcuguuauauacugagu

SEQ ID NO: 1823 - RNA, 22 nt, Homo sapiens
aguaucacaggcaaaacagaau

SEQ ID NO: 1824 - RNA, 22 nt, Homo sapiens
aguauguagugcaaucagucag

SEQ ID NO: 1825 - RNA, 20 nt, Homo sapiens
aguauucacuuuuuucaugg

SEQ ID NO: 1826 - RNA, 22 nt, Homo sapiens
aguauugcuaauaagagauuug

SEQ ID NO: 1827 - RNA, 22 nt, Homo sapiens
aguacaauguugaguagaagug

SEQ ID NO: 1828 - RNA, 22 nt, Homo sapiens
aguagcaauggcucugagcuau

SEQ ID NO: 1829 - RNA, 22 nt, Homo sapiens
aguagguguugguagagguuuc

SEQ ID NO: 1830 - RNA, 22 nt, Homo sapiens
agucaaaugcuuauguauaaag

SEQ ID NO: 1831 - RNA, 22 nt, Homo sapiens
agucaagaaucucagcaucuuu

SEQ ID NO: 1832 - RNA, 22 nt, Homo sapiens
agucacagccuuuuacuuuaga

SEQ ID NO: 1833 - RNA, 22 nt, Homo sapiens
agucacagguucuugggauuag

SEQ ID NO: 1834 - RNA, 22 nt, Homo sapiens
agucacagugaccuugucugac

SEQ ID NO: 1835 - RNA, 22 nt, Homo sapiens
aggugaaugcucacauucuaau

SEQ ID NO: 1836 - RNA, 22 nt, Homo sapiens
aguaaaucacuaauggcuuccg

SEQ ID NO: 1837 - RNA, 22 nt, Homo sapiens
aguaaauuucugugcuuucaua

SEQ ID NO: 1838 - RNA, 22 nt, Homo sapiens
aguaacaggauccaaagaaugu

SEQ ID NO: 1839 - RNA, 22 nt, Homo sapiens
aggugguuuugaugagcaggua

SEQ ID NO: 1840 - RNA, 21 nt, Homo sapiens
auagggcuuguugauaguuaa

SEQ ID NO: 1841 - RNA, 22 nt, Homo sapiens
auagguuuucacuguagauucu

SEQ ID NO: 1842 - RNA, 22 nt, Homo sapiens
auacaagcaguccaacuccaua

SEQ ID NO: 1843 - RNA, 22 nt, Homo sapiens
auacaagugccauguuggugug

SEQ ID NO: 1844 - RNA, 21 nt, Homo sapiens
auagcacuucacuugguuaga

SEQ ID NO: 1845 - RNA, 22 nt, Homo sapiens
auagcagaacagugucucacug

SEQ ID NO: 1846 - RNA, 22 nt, Homo sapiens
auagcagaagaagggacaauuc

SEQ ID NO: 1847 - RNA, 22 nt, Homo sapiens
auagcagaauuuggucaagucu

SEQ ID NO: 1848 - RNA, 22 nt, Homo sapiens
auagcagaccaccucucccacu

SEQ ID NO: 1849 - RNA, 22 nt, Homo sapiens
auaucugcauugccauuuaugu

SEQ ID NO: 1850 - RNA, 22 nt, Homo sapiens
auaucacucccaauaucgcagg

SEQ ID NO: 1851 - RNA, 22 nt, Homo sapiens
auaucccagugaugauugauag

SEQ ID NO: 1852 - RNA, 22 nt, Homo sapiens
auagugcagugaugaaccuagg

SEQ ID NO: 1853 - RNA, 22 nt, Homo sapiens
auagcagcuugucagggcagac

SEQ ID NO: 1854 - RNA, 22 nt, Homo sapiens
auagcaggagaauggucauggg

SEQ ID NO: 1855 - RNA, 22 nt, Homo sapiens
auagcagugugaaaacagacua

SEQ ID NO: 1856 - RNA, 22 nt, Homo sapiens
auagcagugugaaaacagacug

SEQ ID NO: 1857 - RNA, 22 nt, Homo sapiens
auagcagugugaaaauggacua

SEQ ID NO: 1858 - RNA, 22 nt, Homo sapiens
auagcagugugaaaauguacua

SEQ ID NO: 1859 - RNA, 22 nt, Homo sapiens
auagcagugugaaaauugacug

SEQ ID NO: 1860 - RNA, 22 nt, Homo sapiens
auagcagugugagaaugaacua

SEQ ID NO: 1861 - RNA, 22 nt, Homo sapiens
auagcagugugaggacagacua

SEQ ID NO: 1862 - RNA, 22 nt, Homo sapiens
auagcauagucagcuucgcuga

SEQ ID NO: 1863 - RNA, 22 nt, Homo sapiens
auagcauaucccacaugucaga

SEQ ID NO: 1864 - RNA, 23 nt, Homo sapiens
auagagcuaggaugcagacagau

SEQ ID NO: 1865 - RNA, 22 nt, Homo sapiens
auagcaaugcaagaauggcuua

SEQ ID NO: 1866 - RNA, 22 nt, Homo sapiens
auagcacaguguguguacacca

SEQ ID NO: 1867 - RNA, 22 nt, Homo sapiens
auagcacaugugcaaauggcug

SEQ ID NO: 1868 - RNA, 22 nt, Homo sapiens
auacuagucaagaauguaugag

SEQ ID NO: 1869 - RNA, 22 nt, Homo sapiens
auacuguacugaaguacccauu

SEQ ID NO: 1870 - RNA, 22 nt, Homo sapiens
auacuguauaggauuguagccu

SEQ ID NO: 1871 - RNA, 22 nt, Homo sapiens
auacuguuuuacaucauugccu

SEQ ID NO: 1872 - RNA, 22 nt, Homo sapiens
auagaaucaucugugcacuagu

SEQ ID NO: 1873 - RNA, 22 nt, Homo sapiens
auagaauguauuaguaaauuug

SEQ ID NO: 1874 - RNA, 22 nt, Homo sapiens
auagacacugaaaucccugcca

SEQ ID NO: 1875 - RNA, 22 nt, Homo sapiens
aucaaaguaucucaauauggua

SEQ ID NO: 1876 - RNA, 22 nt, Homo sapiens
aucaaagugaauuaaugagaau

SEQ ID NO: 1877 - RNA, 22 nt, Homo sapiens
aucaaaguuucccagaaguugu

SEQ ID NO: 1878 - RNA, 22 nt, Homo sapiens
aucaaaugcuggcagagugccu

SEQ ID NO: 1879 - RNA, 18 nt, Homo sapiens
auauugcauuggauggau

SEQ ID NO: 1880 - RNA, 18 nt, Homo sapiens
auauugccuucagacuag

SEQ ID NO: 1881 - RNA, 22 nt, Homo sapiens
auauuggccuaaaauucucuuu

SEQ ID NO: 1882 - RNA, 17 nt, Homo sapiens
auaugaauuuuggagau

SEQ ID NO: 1883 - RNA, 22 nt, Homo sapiens
auaugacugccagggcccaguc

SEQ ID NO: 1884 - RNA, 22 nt, Homo sapiens
auaugcacgugcauacacacuu

SEQ ID NO: 1885 - RNA, 22 nt, Homo sapiens
auaugcacuauacacacguaua

SEQ ID NO: 1886 - RNA, 20 nt, Homo sapiens
auaugcagacacauacauac

SEQ ID NO: 1887 - RNA, 22 nt, Homo sapiens
auaugcauacauguaugcagga

SEQ ID NO: 1888 - RNA, 22 nt, Homo sapiens
auaugcauacccucaccaacua

SEQ ID NO: 1889 - RNA, 22 nt, Homo sapiens
auaugcauguacccacacaggc

SEQ ID NO: 1890 - RNA, 22 nt, Homo sapiens
auaugcuuauuagcaagaaaua

SEQ ID NO: 1891 - RNA, 21 nt, Homo sapiens
auauggaacuggugacguguu

SEQ ID NO: 1892 - RNA, 22 nt, Homo sapiens
auauguauuuuaacguguaagg

SEQ ID NO: 1893 - RNA, 22 nt, Homo sapiens
auaugucuauuauuagggcagg

SEQ ID NO: 1894 - RNA, 17 nt, Homo sapiens
auaugucugcuggggga

SEQ ID NO: 1895 - RNA, 22 nt, Homo sapiens
auaugucuguuuagucuguaau

SEQ ID NO: 1896 - RNA, 22 nt, Homo sapiens
auaugucuuaguuaccuugggc

SEQ ID NO: 1897 - RNA, 22 nt, Homo sapiens
auauuacagagaggaccuggga

SEQ ID NO: 1898 - RNA, 22 nt, Homo sapiens
auauucacagguaucagagauu

SEQ ID NO: 1899 - RNA, 22 nt, Homo sapiens
aucauacuguuuugauuacugu

SEQ ID NO: 1900 - RNA, 22 nt, Homo sapiens
aucauauccuagauauaacuuc

SEQ ID NO: 1901 - RNA, 22 nt, Homo sapiens
aucaggaaccuuuuuggugugu

SEQ ID NO: 1902 - RNA, 22 nt, Homo sapiens
aucauggaguauuugcaagucu

SEQ ID NO: 1903 - RNA, 22 nt, Homo sapiens
aucaugucuucccagugauucu

SEQ ID NO: 1904 - RNA, 22 nt, Homo sapiens
auccacaugcaguuggaaacag

SEQ ID NO: 1905 - RNA, 22 nt, Homo sapiens
aucacauuuauaguggcacgca

SEQ ID NO: 1906 - RNA, 22 nt, Homo sapiens
aucaccuggaggugaucacuug

SEQ ID NO: 1907 - RNA, 22 nt, Homo sapiens
aucacuagaucauagguaaaca

SEQ ID NO: 1908 - RNA, 20 nt, Homo sapiens
aucacuggagaaggaaaccu

SEQ ID NO: 1909 - RNA, 22 nt, Homo sapiens
aucacuguaaguuuacacuuug

SEQ ID NO: 1910 - RNA, 22 nt, Homo sapiens
aucacugugauuucuacugugc

SEQ ID NO: 1911 - RNA, 23 nt, Homo sapiens
aucacuguuaacaauuucuuccu

SEQ ID NO: 1912 - RNA, 22 nt, Homo sapiens
aucacuguuuugaugcucggac

SEQ ID NO: 1913 - RNA, 16 nt, Homo sapiens
aucacuugcuucuuuu

SEQ ID NO: 1914 - RNA, 22 nt, Homo sapiens
aucagaaucucuagaggacugu

SEQ ID NO: 1915 - RNA, 22 nt, Homo sapiens
aucagaaucucuagugggacca

SEQ ID NO: 1916 - RNA, 20 nt, Homo sapiens
aucagagacuaggauugcca

SEQ ID NO: 1917 - RNA, 22 nt, Homo sapiens
aucagagugaugguuuaaguau

SEQ ID NO: 1918 - RNA, 22 nt, Homo sapiens
aucagaguggguuuuaaaagug

SEQ ID NO: 1919 - RNA, 22 nt, Homo sapiens
auccuuuagacuguccaguuga

SEQ ID NO: 1920 - RNA, 22 nt, Homo sapiens
aucccuugacguggagucucug

SEQ ID NO: 1921 - RNA, 22 nt, Homo sapiens
aucccuuucugauacuuucccu

SEQ ID NO: 1922 - RNA, 22 nt, Homo sapiens
auccugaagcuuuacugaauuc

SEQ ID NO: 1923 - RNA, 22 nt, Homo sapiens
auccaucagacggcaggcguug

SEQ ID NO: 1924 - RNA, 22 nt, Homo sapiens
aucccagaaacucggguuucuc

SEQ ID NO: 1925 - RNA, 22 nt, Homo sapiens
aucucaguuaauuccaucuuuc

SEQ ID NO: 1926 - RNA, 22 nt, Homo sapiens
aucucaguucaggcuggccaca

SEQ ID NO: 1927 - RNA, 22 nt, Homo sapiens
aucucuugccagucagaauggu

SEQ ID NO: 1928 - RNA, 22 nt, Homo sapiens
aucugcacaucuguguuuuugu

SEQ ID NO: 1929 - RNA, 22 nt, Homo sapiens
aucugggguuggcaaaguuugg

SEQ ID NO: 1930 - RNA, 22 nt, Homo sapiens
aucuggguccguucugcuucuc

SEQ ID NO: 1931 - RNA, 22 nt, Homo sapiens
aucagugcauguuuguugagcu

SEQ ID NO: 1932 - RNA, 22 nt, Homo sapiens
aucgcgccauuguacuccagcc

SEQ ID NO: 1933 - RNA, 22 nt, Homo sapiens
aucuacagccagucugguuugu

SEQ ID NO: 1934 - RNA, 22 nt, Homo sapiens
augucaaagaggaaaacuggau

SEQ ID NO: 1935 - RNA, 22 nt, Homo sapiens
augucaaggugaagaaagauca

SEQ ID NO: 1936 - RNA, 22 nt, Homo sapiens
auguagugugauuuucacuaga

SEQ ID NO: 1937 - RNA, 22 nt, Homo sapiens
auguauacaugcaggucacagg

SEQ ID NO: 1938 - RNA, 22 nt, Homo sapiens
augguuuauuuguaagcagagu

SEQ ID NO: 1939 - RNA, 22 nt, Homo sapiens
auguaacugggacacaagccuc

SEQ ID NO: 1940 - RNA, 20 nt, Homo sapiens
auguaauguaugauauguac

SEQ ID NO: 1941 - RNA, 22 nt, Homo sapiens
auguaauguuaaauugcuaauu

SEQ ID NO: 1942 - RNA, 22 nt, Homo sapiens
auggccgggugcgguggcucac

SEQ ID NO: 1943 - RNA, 22 nt, Homo sapiens
auggcuauuccauaggcagagc

SEQ ID NO: 1944 - RNA, 22 nt, Homo sapiens
auggcuuuuuaaaucauguugu

SEQ ID NO: 1945 - RNA, 22 nt, Homo sapiens
augggaaaaucagaaggccugg

SEQ ID NO: 1946 - RNA, 20 nt, Homo sapiens
augguaguagcaccuuuaca

SEQ ID NO: 1947 - RNA, 22 nt, Homo sapiens
augguauggaaggucuggagga

SEQ ID NO: 1948 - RNA, 22 nt, Homo sapiens
auggucccauucauucacguau

SEQ ID NO: 1949 - RNA, 22 nt, Homo sapiens
auggcacagaguagaugcucaa

SEQ ID NO: 1950 - RNA, 22 nt, Homo sapiens
auggcacugccuggcuucaugg

SEQ ID NO: 1951 - RNA, 22 nt, Homo sapiens
auggaaugccauuuauaaugga

SEQ ID NO: 1952 - RNA, 22 nt, Homo sapiens
auggaauguaaguuauguuugc

SEQ ID NO: 1953 - RNA, 22 nt, Homo sapiens
auggaauguauagucauguagg

SEQ ID NO: 1954 - RNA, 22 nt, Homo sapiens
auggacagaaaaaaauagaugu

SEQ ID NO: 1955 - RNA, 22 nt, Homo sapiens
auggacagacacuggccuucug

SEQ ID NO: 1956 - RNA, 22 nt, Homo sapiens
auggagagaauuauucucucag

SEQ ID NO: 1957 - RNA, 22 nt, Homo sapiens
auggaggacaaugucaccuuca

SEQ ID NO: 1958 - RNA, 22 nt, Homo sapiens
auggaggccuacagaauuuugg

SEQ ID NO: 1959 - RNA, 22 nt, Homo sapiens
auggagguguggggagugaguu

SEQ ID NO: 1960 - RNA, 22 nt, Homo sapiens
auggaguguaauauugagagcu

SEQ ID NO: 1961 - RNA, 22 nt, Homo sapiens
auggaguguggaacugggaauc

SEQ ID NO: 1962 - RNA, 22 nt, Homo sapiens
auggauguucuagggaugugau

SEQ ID NO: 1963 - RNA, 22 nt, Homo sapiens
auggauugucuccuugugccau

SEQ ID NO: 1964 - RNA, 22 nt, Homo sapiens
auggcaauaauagcuaccauuu

SEQ ID NO: 1965 - RNA, 22 nt, Homo sapiens
auggcaauaugaugcacuguuu

SEQ ID NO: 1966 - RNA, 22 nt, Homo sapiens
auggcaaugcgaugaugacuga

SEQ ID NO: 1967 - RNA, 22 nt, Homo sapiens
auggcaaugcgauggugacuga

SEQ ID NO: 1968 - RNA, 22 nt, Homo sapiens
auggcaauguaagucagaaaaa

SEQ ID NO: 1969 - RNA, 22 nt, Homo sapiens
augccuagagucaguggaggug

SEQ ID NO: 1970 - RNA, 22 nt, Homo sapiens
augcuguuuuguagcucccucu

SEQ ID NO: 1971 - RNA, 21 nt, Homo sapiens
auggaaagacugccucuucaa

SEQ ID NO: 1972 - RNA, 22 nt, Homo sapiens
auggaacuggagaugguuauau

SEQ ID NO: 1973 - RNA, 22 nt, Homo sapiens
auggaagaaacgauuuucugga

SEQ ID NO: 1974 - RNA, 22 nt, Homo sapiens
auggaagaaaguuggguucuug

SEQ ID NO: 1975 - RNA, 22 nt, Homo sapiens
auggaagaauugucggggaugu

SEQ ID NO: 1976 - RNA, 22 nt, Homo sapiens
auggaagacuccucuuugggua

SEQ ID NO: 1977 - RNA, 22 nt, Homo sapiens
auggaaggagaggaaugaauga

SEQ ID NO: 1978 - RNA, 22 nt, Homo sapiens
augauaaguuauuagaagaaga

SEQ ID NO: 1979 - RNA, 22 nt, Homo sapiens
augauacuggcuucauagaaug

SEQ ID NO: 1980 - RNA, 22 nt, Homo sapiens
augauagucuugagaagcauuu

SEQ ID NO: 1981 - RNA, 22 nt, Homo sapiens
augaccuuguccucagugucau

SEQ ID NO: 1982 - RNA, 22 nt, Homo sapiens
augauggagguagauuguccau

SEQ ID NO: 1983 - RNA, 22 nt, Homo sapiens
augauguaggccauggguuucu

SEQ ID NO: 1984 - RNA, 22 nt, Homo sapiens
augaugucauuuuaauuucuaa

SEQ ID NO: 1985 - RNA, 22 nt, Homo sapiens
augcacauggcuaacuuuuuuc

SEQ ID NO: 1986 - RNA, 22 nt, Homo sapiens
augcacuguauaggaucuugcg

SEQ ID NO: 1987 - RNA, 22 nt, Homo sapiens
augcacuuggcaggaugauucc

SEQ ID NO: 1988 - RNA, 22 nt, Homo sapiens
augcagagaaaucuaaaauaug

SEQ ID NO: 1989 - RNA, 22 nt, Homo sapiens
augcagaucacauuuuucuguc

SEQ ID NO: 1990 - RNA, 22 nt, Homo sapiens
augcagugugcaacagauuaag

SEQ ID NO: 1991 - RNA, 23 nt, Homo sapiens
augacacuccugugcgcacccug

SEQ ID NO: 1992 - RNA, 22 nt, Homo sapiens
augacauguauuuccaggauuu

SEQ ID NO: 1993 - RNA, 22 nt, Homo sapiens
augacauuccacagccguagag

SEQ ID NO: 1994 - RNA, 22 nt, Homo sapiens
augacauugaaaagcaagugga

SEQ ID NO: 1995 - RNA, 22 nt, Homo sapiens
augacauugaugcucuggcugg

SEQ ID NO: 1996 - RNA, 19 nt, Homo sapiens
augacauuuggggguggac

SEQ ID NO: 1997 - RNA, 22 nt, Homo sapiens
augaccaaugggcagagcuaga

SEQ ID NO: 1998 - RNA, 22 nt, Homo sapiens
augagggaagcucacgugucca

SEQ ID NO: 1999 - RNA, 22 nt, Homo sapiens
augagggagggguggugccgca

SEQ ID NO: 2000 - RNA, 22 nt, Homo sapiens
augagguaguagaaagucaggu

SEQ ID NO: 2001 - RNA, 22 nt, Homo sapiens
augaggugaguaaauaaaugaa

SEQ ID NO: 2002 - RNA, 22 nt, Homo sapiens
augaguaguugcuaaauauuga

SEQ ID NO: 2003 - RNA, 22 nt, Homo sapiens
augaguaugagaauacauuaag

SEQ ID NO: 2004 - RNA, 22 nt, Homo sapiens
augaguauguucuguauuuuca

SEQ ID NO: 2005 - RNA, 22 nt, Homo sapiens
augagucacuuauuauuggggu

SEQ ID NO: 2006 - RNA, 19 nt, Homo sapiens
augagucugcaagaaccag

SEQ ID NO: 2007 - RNA, 22 nt, Homo sapiens
augaaaagcauaaacgcugaag

SEQ ID NO: 2008 - RNA, 22 nt, Homo sapiens
aucuucucuugaagggugggga

SEQ ID NO: 2009 - RNA, 22 nt, Homo sapiens
aucuugcauuugcuaaaaugca

SEQ ID NO: 2010 - RNA, 22 nt, Homo sapiens
aucuuguguugaauggugcaga

SEQ ID NO: 2011 - RNA, 22 nt, Homo sapiens
aucuuuaguggcuguuuucaga

SEQ ID NO: 2012 - RNA, 22 nt, Homo sapiens
augaaaacaugauuugccuguu

SEQ ID NO: 2013 - RNA, 22 nt, Homo sapiens
augaaacuggcuaauuuuugua

SEQ ID NO: 2014 - RNA, 22 nt, Homo sapiens
augaaagguauguuuucuguga

SEQ ID NO: 2015 - RNA, 22 nt, Homo sapiens
augaaagguugucuuaagccau

SEQ ID NO: 2016 - RNA, 22 nt, Homo sapiens
augaaaguguguggaaacuuga

SEQ ID NO: 2017 - RNA, 22 nt, Homo sapiens
augaaaucuuuggcagaucuua

SEQ ID NO: 2018 - RNA, 22 nt, Homo sapiens
augaaauugcuaucgcaguacu

SEQ ID NO: 2019 - RNA, 22 nt, Homo sapiens
augaagacaucgucugggauua

SEQ ID NO: 2020 - RNA, 22 nt, Homo sapiens
augaagaucucugccuuguguc

SEQ ID NO: 2021 - RNA, 22 nt, Homo sapiens
augaagauguugccuuuuuaau

SEQ ID NO: 2022 - RNA, 18 nt, Homo sapiens
augaagucaucacuuuua

SEQ ID NO: 2023 - RNA, 22 nt, Homo sapiens
augaagucguuacuaccaauug

SEQ ID NO: 2024 - RNA, 20 nt, Homo sapiens
augaagugaaguuagggaac

SEQ ID NO: 2025 - RNA, 22 nt, Homo sapiens
augaauacugcugcaaugaaca

SEQ ID NO: 2026 - RNA, 22 nt, Homo sapiens
augacuagaggagggauggcca

SEQ ID NO: 2027 - RNA, 22 nt, Homo sapiens
augacuauugcacuuuccuggu

SEQ ID NO: 2028 - RNA, 22 nt, Homo sapiens
augacugaguagcauuccauua

SEQ ID NO: 2029 - RNA, 22 nt, Homo sapiens
augacugucagggcagucauug

SEQ ID NO: 2030 - RNA, 22 nt, Homo sapiens
augagaacauaucaagugauug

SEQ ID NO: 2031 - RNA, 22 nt, Homo sapiens
augagaacugucaaugagagcu

SEQ ID NO: 2032 - RNA, 22 nt, Homo sapiens
augagaauguaaguuaaugaaa

SEQ ID NO: 2033 - RNA, 22 nt, Homo sapiens
augagacauuaaaguguguuug

SEQ ID NO: 2034 - RNA, 22 nt, Homo sapiens
augagauaaaccaucucuuaag

SEQ ID NO: 2035 - RNA, 22 nt, Homo sapiens
augagauacuacaaaugaguuu

SEQ ID NO: 2036 - RNA, 22 nt, Homo sapiens
augagauauguuaaaaguuaaa

SEQ ID NO: 2037 - RNA, 22 nt, Homo sapiens
augagauauuuuauaagaucau

SEQ ID NO: 2038 - RNA, 22 nt, Homo sapiens
augagaugaauaccgacgaugu

SEQ ID NO: 2039 - RNA, 22 nt, Homo sapiens
augagaugaggaauggcccucc

SEQ ID NO: 2040 - RNA, 22 nt, Homo sapiens
augagaugcaagauuagauggg

SEQ ID NO: 2041 - RNA, 22 nt, Homo sapiens
augagauucuuagagaagucug

SEQ ID NO: 2042 - RNA, 22 nt, Homo sapiens
augagcuaauauggguaaguug

SEQ ID NO: 2043 - RNA, 22 nt, Homo sapiens
augagcuaguguaggguacuga

SEQ ID NO: 2044 - RNA, 22 nt, Homo sapiens
augaggauagguuucuauuagg

SEQ ID NO: 2045 - RNA, 22 nt, Homo sapiens
augaggcaggaaaggcguaucu

SEQ ID NO: 2046 - RNA, 22 nt, Homo sapiens
cugagacacucuuaucugcaua

SEQ ID NO: 2047 - RNA, 22 nt, Homo sapiens
cugacuuuagaacccaaaaagu

SEQ ID NO: 2048 - RNA, 22 nt, Homo sapiens
cugagaagaaacagguaaggac

SEQ ID NO: 2049 - RNA, 22 nt, Homo sapiens
cugaaucauugcauuaucaagg

SEQ ID NO: 2050 - RNA, 22 nt, Homo sapiens
cugacagucucauugauuugcu

SEQ ID NO: 2051 - RNA, 22 nt, Homo sapiens
cugacauuguugaucacagcca

SEQ ID NO: 2052 - RNA, 22 nt, Homo sapiens
cucucaagaugcugggauuaca

SEQ ID NO: 2053 - RNA, 22 nt, Homo sapiens
cugaaagagcauguaacacagu

SEQ ID NO: 2054 - RNA, 22 nt, Homo sapiens
cugaaagagcauuugaaugggu

SEQ ID NO: 2055 - RNA, 22 nt, Homo sapiens
cugaaagguauacgcuuguuau

SEQ ID NO: 2056 - RNA, 22 nt, Homo sapiens
cugaaaguuauucaggggcaag

SEQ ID NO: 2057 - RNA, 22 nt, Homo sapiens
cuccuguagccccaucaucuuu

SEQ ID NO: 2058 - RNA, 20 nt, Homo sapiens
cuccuucauuccuuuggacc

SEQ ID NO: 2059 - RNA, 22 nt, Homo sapiens
cuauaacagugugguuuggaga

SEQ ID NO: 2060 - RNA, 21 nt, Homo sapiens
cuaucucaguguuuacauuug

SEQ ID NO: 2061 - RNA, 22 nt, Homo sapiens
cuaugagucugcagaucuauua

SEQ ID NO: 2062 - RNA, 22 nt, Homo sapiens
cuaugucuuucauauuuugggg

SEQ ID NO: 2063 - RNA, 22 nt, Homo sapiens
cuauucacaggcaauauguaca

SEQ ID NO: 2064 - RNA, 19 nt, Homo sapiens
cuauugcacauagcugaag

SEQ ID NO: 2065 - RNA, 21 nt, Homo sapiens
cucaaaguacugauauuacag

SEQ ID NO: 2066 - RNA, 22 nt, Homo sapiens
cucaaagucaagggaaagcagg

SEQ ID NO: 2067 - RNA, 22 nt, Homo sapiens
cucaaguaauccucccgccuug

SEQ ID NO: 2068 - RNA, 22 nt, Homo sapiens
cucaaguacaugggauuacagg

SEQ ID NO: 2069 - RNA, 22 nt, Homo sapiens
cucacaugcucaccugguguuc

SEQ ID NO: 2070 - RNA, 22 nt, Homo sapiens
cucacggcccugcgcacuggca

SEQ ID NO: 2071 - RNA, 22 nt, Homo sapiens
cucacuaggaaguaaaguuugu

SEQ ID NO: 2072 - RNA, 22 nt, Homo sapiens
cucacuaguaaggcuguuuagu

SEQ ID NO: 2073 - RNA, 22 nt, Homo sapiens
cuaggcuguagagaaguucagu

SEQ ID NO: 2074 - RNA, 22 nt, Homo sapiens
cucacugucaacauguauuugg

SEQ ID NO: 2075 - RNA, 22 nt, Homo sapiens
cucagcuacuugggaagcugag

SEQ ID NO: 2076 - RNA, 22 nt, Homo sapiens
cucaguggauuagauaaugcac

SEQ ID NO: 2077 - RNA, 22 nt, Homo sapiens
cucaguuuugccuuguuuaagg

SEQ ID NO: 2078 - RNA, 22 nt, Homo sapiens
cucauggaauacuucacagcca

SEQ ID NO: 2079 - RNA, 19 nt, Homo sapiens
cucauggagaaggagaaua

SEQ ID NO: 2080 - RNA, 22 nt, Homo sapiens
cucauggagauagagaauagaa

SEQ ID NO: 2081 - RNA, 22 nt, Homo sapiens
cucauugcaaucuccaccuccc

SEQ ID NO: 2082 - RNA, 22 nt, Homo sapiens
cucauugcaaucucugccuccc

SEQ ID NO: 2083 - RNA, 22 nt, Homo sapiens
cucauuggcuacugaggcuugu

SEQ ID NO: 2084 - RNA, 22 nt, Homo sapiens
cuccauuuaucugaaauuuuau

SEQ ID NO: 2085 - RNA, 22 nt, Homo sapiens
cuccauuuggaacagauguccu

SEQ ID NO: 2086 - RNA, 22 nt, Homo sapiens
cucccagagccaguuauaggcu

SEQ ID NO: 2087 - RNA, 22 nt, Homo sapiens
cuaaaacuuucugagugcagca

SEQ ID NO: 2088 - RNA, 22 nt, Homo sapiens
cuaaagauagugacaugauuug

SEQ ID NO: 2089 - RNA, 22 nt, Homo sapiens
cuaaagugcuuaaaaucucauu

SEQ ID NO: 2090 - RNA, 22 nt, Homo sapiens
cuaacacagggcaagucaggcu

SEQ ID NO: 2091 - RNA, 21 nt, Homo sapiens
cuaaggaaagcuaugaacccu

SEQ ID NO: 2092 - RNA, 22 nt, Homo sapiens
cuaaggaaggacugaaaggaca

SEQ ID NO: 2093 - RNA, 19 nt, Homo sapiens
cuaaguccccuugauuaga

SEQ ID NO: 2094 - RNA, 22 nt, Homo sapiens
cuacacaugcaggcucccugcc

SEQ ID NO: 2095 - RNA, 22 nt, Homo sapiens
cuacagcacugagcugugugca

SEQ ID NO: 2096 - RNA, 22 nt, Homo sapiens
cuacagcagcccaguccccgaa

SEQ ID NO: 2097 - RNA, 22 nt, Homo sapiens
cuacaguagagaggauguagaa

SEQ ID NO: 2098 - RNA, 22 nt, Homo sapiens
cuacaguaugaaaccuuuacuc

SEQ ID NO: 2099 - RNA, 22 nt, Homo sapiens
cuagaacuagaacugcuggggu

SEQ ID NO: 2100 - RNA, 22 nt, Homo sapiens
cuagacacugacguuccuccga

SEQ ID NO: 2101 - RNA, 22 nt, Homo sapiens
cuagcagaacaauacaauucgg

SEQ ID NO: 2102 - RNA, 22 nt, Homo sapiens
cuagcagacacuuccagagagu

SEQ ID NO: 2103 - RNA, 22 nt, Homo sapiens
cuagcagacaugggcugaacca

SEQ ID NO: 2104 - RNA, 22 nt, Homo sapiens
cuagcugcacuuccugcuacug

SEQ ID NO: 2105 - RNA, 22 nt, Homo sapiens
cuagcuuuugauguaaagugag

SEQ ID NO: 2106 - RNA, 22 nt, Homo sapiens
ccucacaaccuuuauugaagag

SEQ ID NO: 2107 - RNA, 22 nt, Homo sapiens
ccucauggagaacaucugcuag

SEQ ID NO: 2108 - RNA, 22 nt, Homo sapiens
ccugagacgaauggagugaaca

SEQ ID NO: 2109 - RNA, 22 nt, Homo sapiens
ccugagacuugagggggcuucu

SEQ ID NO: 2110 - RNA, 22 nt, Homo sapiens
ccugagaucauacuguuaguaa

SEQ ID NO: 2111 - RNA, 19 nt, Homo sapiens
ccugcuguucuuuugcacc

SEQ ID NO: 2112 - RNA, 22 nt, Homo sapiens
ccuuggcaauggcuggggcuga

SEQ ID NO: 2113 - RNA, 22 nt, Homo sapiens
ccuguguuaugguuucuaaugu

SEQ ID NO: 2114 - RNA, 18 nt, Homo sapiens
ccuuaguuauagagaguc

SEQ ID NO: 2115 - RNA, 22 nt, Homo sapiens
ccuucuuuuguaaggcugaaua

SEQ ID NO: 2116 - RNA, 22 nt, Homo sapiens
cccuguguuguucaaggaucug

SEQ ID NO: 2117 - RNA, 22 nt, Homo sapiens
cccuguguuuagcugaagguuu

SEQ ID NO: 2118 - RNA, 22 nt, Homo sapiens
ccuguagcauccaagaagcugc

SEQ ID NO: 2119 - RNA, 23 nt, Homo sapiens
cccaguuaauccuuaaucuccac

SEQ ID NO: 2120 - RNA, 22 nt, Homo sapiens
cccaguuuugcuucucaugagg

SEQ ID NO: 2121 - RNA, 18 nt, Homo sapiens
ccauucaacagauuuguc

SEQ ID NO: 2122 - RNA, 22 nt, Homo sapiens
ccauugaacaugaaggaaugug

SEQ ID NO: 2123 - RNA, 22 nt, Homo sapiens
ccauuucacucuuccugaagga

SEQ ID NO: 2124 - RNA, 22 nt, Homo sapiens
cccagagacagaaugauaaacu

SEQ ID NO: 2125 - RNA, 22 nt, Homo sapiens
cccagaguucuuaaauacugag

SEQ ID NO: 2126 - RNA, 20 nt, Homo sapiens
ccccaguuuuucuauuagcu

SEQ ID NO: 2127 - RNA, 22 nt, Homo sapiens
ccccauguucucucugcagcuc

SEQ ID NO: 2128 - RNA, 17 nt, Homo sapiens
cccuaguagcugggacu

SEQ ID NO: 2129 - RNA, 22 nt, Homo sapiens
cccugaagauacagaguuuggg

SEQ ID NO: 2130 - RNA, 22 nt, Homo sapiens
cccugagaaaacuuuguccuua

SEQ ID NO: 2131 - RNA, 22 nt, Homo sapiens
cccugagagcagggucuuucuc

SEQ ID NO: 2132 - RNA, 22 nt, Homo sapiens
cccugagaugcuguuaaucugu

SEQ ID NO: 2133 - RNA, 22 nt, Homo sapiens
cccugagaugugaauuucagag

SEQ ID NO: 2134 - RNA, 22 nt, Homo sapiens
ccagucuuggugucuguagcac

SEQ ID NO: 2135 - RNA, 22 nt, Homo sapiens
ccaguguucuggaaggcugagu

SEQ ID NO: 2136 - RNA, 22 nt, Homo sapiens
ccaggguuccacgccuggcugu

SEQ ID NO: 2137 - RNA, 22 nt, Homo sapiens
ccaucacaggccucagugggaa

SEQ ID NO: 2138 - RNA, 19 nt, Homo sapiens
ccauggcaaugaucugaug

SEQ ID NO: 2139 - RNA, 21 nt, Homo sapiens
ccauggcaaugguaaacugac

SEQ ID NO: 2140 - RNA, 22 nt, Homo sapiens
ccauggcaauggucagucuauu

SEQ ID NO: 2141 - RNA, 22 nt, Homo sapiens
caugacacuggcauguuucuuu

SEQ ID NO: 2142 - RNA, 22 nt, Homo sapiens
caugcacugaguccaccucugg

SEQ ID NO: 2143 - RNA, 22 nt, Homo sapiens
caugcauuggucuauuauguga

SEQ ID NO: 2144 - RNA, 22 nt, Homo sapiens
cauugcaacuucugccucccag

SEQ ID NO: 2145 - RNA, 22 nt, Homo sapiens
cauugcacacauuuaccuaugu

SEQ ID NO: 2146 - RNA, 22 nt, Homo sapiens
cauggauuuuuuugaauggcag

SEQ ID NO: 2147 - RNA, 22 nt, Homo sapiens
cauggcccugggcugggcgaac

SEQ ID NO: 2148 - RNA, 19 nt, Homo sapiens
cauggcuuauaauuuuaau

SEQ ID NO: 2149 - RNA, 22 nt, Homo sapiens
caugguguuaggcacugggaau

SEQ ID NO: 2150 - RNA, 21 nt, Homo sapiens
caugucacugcacucuagccu

SEQ ID NO: 2151 - RNA, 22 nt, Homo sapiens
caugucuuuuaaacauucaacu

SEQ ID NO: 2152 - RNA, 22 nt, Homo sapiens
caugucuuuuauucugugugau

SEQ ID NO: 2153 - RNA, 19 nt, Homo sapiens
caugugcacuacuggcuuc

SEQ ID NO: 2154 - RNA, 22 nt, Homo sapiens
cauaaagauggaggaggccagg

SEQ ID NO: 2155 - RNA, 22 nt, Homo sapiens
caucacaugcuuauuuuccuca

SEQ ID NO: 2156 - RNA, 22 nt, Homo sapiens
caucagagugagauauaagauc

SEQ ID NO: 2157 - RNA, 21 nt, Homo sapiens
cauaaugcuacuuauuuuaug

SEQ ID NO: 2158 - RNA, 22 nt, Homo sapiens
cauacaagcuacaaucacaaag

SEQ ID NO: 2159 - RNA, 22 nt, Homo sapiens
cauacagcuaguaaguguaaga

SEQ ID NO: 2160 - RNA, 22 nt, Homo sapiens
cauagguugggcguuugauuuu

SEQ ID NO: 2161 - RNA, 19 nt, Homo sapiens
caguaucauugcacauagu

SEQ ID NO: 2162 - RNA, 22 nt, Homo sapiens
caggugcauuggcugacaccug

SEQ ID NO: 2163 - RNA, 22 nt, Homo sapiens
caggugcuuacuuaauagccau

SEQ ID NO: 2164 - RNA, 22 nt, Homo sapiens
cagucacagugacaggaugugg

SEQ ID NO: 2165 - RNA, 20 nt, Homo sapiens
cagucaugaagaacugugag

SEQ ID NO: 2166 - RNA, 22 nt, Homo sapiens
cagugcauaggaucuaaaauuu

SEQ ID NO: 2167 - RNA, 22 nt, Homo sapiens
cagugcaugacuguauauuauc

SEQ ID NO: 2168 - RNA, 22 nt, Homo sapiens
cagugcuuguuauuguucuauu

SEQ ID NO: 2169 - RNA, 22 nt, Homo sapiens
cagugcuuuaucaaguccucca

SEQ ID NO: 2170 - RNA, 22 nt, Homo sapiens
cauuugcacugagacucagcuu

SEQ ID NO: 2171 - RNA, 22 nt, Homo sapiens
ccacaguggauuaaaguuacug

SEQ ID NO: 2172 - RNA, 22 nt, Homo sapiens
ccacauuaccuugcuugcucca

SEQ ID NO: 2173 - RNA, 19 nt, Homo sapiens
cauugcacuccacccuggg

SEQ ID NO: 2174 - RNA, 22 nt, Homo sapiens
cauugcacuccaccuuggguaa

SEQ ID NO: 2175 - RNA, 22 nt, Homo sapiens
cauugcacuccacuccugaaca

SEQ ID NO: 2176 - RNA, 22 nt, Homo sapiens
cauugcacuccagcccagguga

SEQ ID NO: 2177 - RNA, 22 nt, Homo sapiens
cauugcacuccagcccuggcaa

SEQ ID NO: 2178 - RNA, 22 nt, Homo sapiens
cauugcacuccagccuagccaa

SEQ ID NO: 2179 - RNA, 22 nt, Homo sapiens
cauugcacuccagccuaggcaa

SEQ ID NO: 2180 - RNA, 22 nt, Homo sapiens
cauugcacuccagccucggcaa

SEQ ID NO: 2181 - RNA, 22 nt, Homo sapiens
cauugcacuccagccugaccaa

SEQ ID NO: 2182 - RNA, 22 nt, Homo sapiens
cauugcacuccagccugaggga

SEQ ID NO: 2183 - RNA, 22 nt, Homo sapiens
cauugcacuccagccugaguga

SEQ ID NO: 2184 - RNA, 22 nt, Homo sapiens
cauugcacuccagccugcacga

SEQ ID NO: 2185 - RNA, 22 nt, Homo sapiens
cauugcacuccagccugccugg

SEQ ID NO: 2186 - RNA, 20 nt, Homo sapiens
cauugcacuccagccugcug

SEQ ID NO: 2187 - RNA, 22 nt, Homo sapiens
cauugcacuccagccugcugac

SEQ ID NO: 2188 - RNA, 22 nt, Homo sapiens
cauugcacuccagccuggcaac

SEQ ID NO: 2189 - RNA, 22 nt, Homo sapiens
cauugcacuccagccuggccaa

SEQ ID NO: 2190 - RNA, 22 nt, Homo sapiens
cauugcacuccagccuuggcaa

SEQ ID NO: 2191 - RNA, 22 nt, Homo sapiens
cauugcacuccagccuugguga

SEQ ID NO: 2192 - RNA, 22 nt, Homo sapiens
cauugcacuccagcucugggcg

SEQ ID NO: 2193 - RNA, 20 nt, Homo sapiens
cauugcacuccagcuugggc

SEQ ID NO: 2194 - RNA, 22 nt, Homo sapiens
cauugcacuccagcuugggcaa

SEQ ID NO: 2195 - RNA, 22 nt, Homo sapiens
cauugcacuccagcuugggcga

SEQ ID NO: 2196 - RNA, 22 nt, Homo sapiens
cauugcacuccagucugggcaa

SEQ ID NO: 2197 - RNA, 22 nt, Homo sapiens
cauugcacuccaucccgggaaa

SEQ ID NO: 2198 - RNA, 22 nt, Homo sapiens
cauugcacuccauccuuggcaa

SEQ ID NO: 2199 - RNA, 22 nt, Homo sapiens
cauugcacuccaucuugggcaa

SEQ ID NO: 2200 - RNA, 16 nt, Homo sapiens
cauugcacucuagccu

SEQ ID NO: 2201 - RNA, 22 nt, Homo sapiens
cauugcacucuagccucggcaa

SEQ ID NO: 2202 - RNA, 22 nt, Homo sapiens
cauugcacucuagucuggguga

SEQ ID NO: 2203 - RNA, 22 nt, Homo sapiens
cauugcacucuaucccgguggg

SEQ ID NO: 2204 - RNA, 22 nt, Homo sapiens
cauugcacucugcauuccaguc

SEQ ID NO: 2205 - RNA, 22 nt, Homo sapiens
cauugcacugcagcccgggcaa

SEQ ID NO: 2206 - RNA, 22 nt, Homo sapiens
cauugcacugcauucugggcaa

SEQ ID NO: 2207 - RNA, 22 nt, Homo sapiens
cauugcacugcuucuugggugu

SEQ ID NO: 2208 - RNA, 22 nt, Homo sapiens
cauugcacuuagacaacuuuug

SEQ ID NO: 2209 - RNA, 22 nt, Homo sapiens
cauugcagauccuucaaaugac

SEQ ID NO: 2210 - RNA, 22 nt, Homo sapiens
cauugcaguaagagugggcucu

SEQ ID NO: 2211 - RNA, 22 nt, Homo sapiens
cauugcaguggaguggggaaga

SEQ ID NO: 2212 - RNA, 22 nt, Homo sapiens
cauugcaguuuuugguguaucu

SEQ ID NO: 2213 - RNA, 22 nt, Homo sapiens
cacugcacuccagucccgucuc

SEQ ID NO: 2214 - RNA, 22 nt, Homo sapiens
cacugcaguaaauugcgucggu

SEQ ID NO: 2215 - RNA, 22 nt, Homo sapiens
cacugcgacguccgccucccgg

SEQ ID NO: 2216 - RNA, 22 nt, Homo sapiens
cacacugucuucaauggguggu

SEQ ID NO: 2217 - RNA, 22 nt, Homo sapiens
cacacugucuucauuacuguag

SEQ ID NO: 2218 - RNA, 22 nt, Homo sapiens
cacacugucuuucagaaugguu

SEQ ID NO: 2219 - RNA, 22 nt, Homo sapiens
cacacuguuuuccauggggguu

SEQ ID NO: 2220 - RNA, 22 nt, Homo sapiens
cacagaauucauuggauuaccu

SEQ ID NO: 2221 - RNA, 22 nt, Homo sapiens
cacagugaaugucaucauugcc

SEQ ID NO: 2222 - RNA, 22 nt, Homo sapiens
cacaguguucauagccaucagg

SEQ ID NO: 2223 - RNA, 22 nt, Homo sapiens
cacaguguuccagcuauuugaa

SEQ ID NO: 2224 - RNA, 22 nt, Homo sapiens
cacauugcaggaaaguucauua

SEQ ID NO: 2225 - RNA, 22 nt, Homo sapiens
cacccuaucagauguccagaga

SEQ ID NO: 2226 - RNA, 22 nt, Homo sapiens
cacccuugcagggacagcuuug

SEQ ID NO: 2227 - RNA, 22 nt, Homo sapiens
cagagguaagcaagucagcauu

SEQ ID NO: 2228 - RNA, 22 nt, Homo sapiens
cagagguauugcaaaagccuag

SEQ ID NO: 2229 - RNA, 22 nt, Homo sapiens
cacuuugguucaccugaguuuc

SEQ ID NO: 2230 - RNA, 22 nt, Homo sapiens
cagagaacauucagagcuguag

SEQ ID NO: 2231 - RNA, 22 nt, Homo sapiens
cagagaaugucuuuuuuaacca

SEQ ID NO: 2232 - RNA, 22 nt, Homo sapiens
cagagaucaugcaacugcucgc

SEQ ID NO: 2233 - RNA, 20 nt, Homo sapiens
cagcaaccugcucucuuccu

SEQ ID NO: 2234 - RNA, 22 nt, Homo sapiens
cagcacauuacaaguacuuggu

SEQ ID NO: 2235 - RNA, 22 nt, Homo sapiens
cagcagguuuuuaucaguuaag

SEQ ID NO: 2236 - RNA, 22 nt, Homo sapiens
cagcaucauucaucugggguaa

SEQ ID NO: 2237 - RNA, 22 nt, Homo sapiens
cagcuaaauuguuaaauccaag

SEQ ID NO: 2238 - RNA, 22 nt, Homo sapiens
cagccgggugagguggcuuguu

SEQ ID NO: 2239 - RNA, 22 nt, Homo sapiens
cagggaauguuauuuaauagca

SEQ ID NO: 2240 - RNA, 22 nt, Homo sapiens
caggaaugugaggguucccugc

SEQ ID NO: 2241 - RNA, 22 nt, Homo sapiens
auguggaaagcagcaugauaug

SEQ ID NO: 2242 - RNA, 22 nt, Homo sapiens
auguggcacuugacuuucucgc

SEQ ID NO: 2243 - RNA, 22 nt, Homo sapiens
auguguucaucacagcacaauu

SEQ ID NO: 2244 - RNA, 20 nt, Homo sapiens
augucaggaagggagucagg

SEQ ID NO: 2245 - RNA, 22 nt, Homo sapiens
augucuggcagaagacuucuca

SEQ ID NO: 2246 - RNA, 22 nt, Homo sapiens
augugaacaucauagaaugcac

SEQ ID NO: 2247 - RNA, 22 nt, Homo sapiens
augugaaugugaucggauaguc

SEQ ID NO: 2248 - RNA, 17 nt, Homo sapiens
augugaauguucaaaua

SEQ ID NO: 2249 - RNA, 22 nt, Homo sapiens
augugacuugugaaaaguucag

SEQ ID NO: 2250 - RNA, 22 nt, Homo sapiens
augugcaaagcacuguucagca

SEQ ID NO: 2251 - RNA, 22 nt, Homo sapiens
augugcaaauucauguucuuua

SEQ ID NO: 2252 - RNA, 22 nt, Homo sapiens
augugcaaauuuccaaacucuu

SEQ ID NO: 2253 - RNA, 22 nt, Homo sapiens
augugcaacugcuggaacaguc

SEQ ID NO: 2254 - RNA, 18 nt, Homo sapiens
augugcaauuuuguauuu

SEQ ID NO: 2255 - RNA, 22 nt, Homo sapiens
augugcacaugcuuacauguga

SEQ ID NO: 2256 - RNA, 21 nt, Homo sapiens
augugcacuaugucauuuaau

SEQ ID NO: 2257 - RNA, 22 nt, Homo sapiens
augugcagauguuacaaauugu

SEQ ID NO: 2258 - RNA, 22 nt, Homo sapiens
auuaacaucuagaguuuuggug

SEQ ID NO: 2259 - RNA, 22 nt, Homo sapiens
auuaagugcuugcagaagucca

SEQ ID NO: 2260 - RNA, 22 nt, Homo sapiens
auuaagugcuugccagugcugg

SEQ ID NO: 2261 - RNA, 22 nt, Homo sapiens
auuaaguuaggauuuugagaua

SEQ ID NO: 2262 - RNA, 22 nt, Homo sapiens
auuaaguugugccugaaaacuu

SEQ ID NO: 2263 - RNA, 22 nt, Homo sapiens
auuaaucaggcaaugcuugcua

SEQ ID NO: 2264 - RNA, 22 nt, Homo sapiens
auuaucacaguuuugcauaugg

SEQ ID NO: 2265 - RNA, 22 nt, Homo sapiens
auuauugcucccaauuuuucac

SEQ ID NO: 2266 - RNA, 22 nt, Homo sapiens
auuacacuuucuauucaaugag

SEQ ID NO: 2267 - RNA, 22 nt, Homo sapiens
auuacauagucaaggugucuca

SEQ ID NO: 2268 - RNA, 22 nt, Homo sapiens
auuacaugucuauccaugaaca

SEQ ID NO: 2269 - RNA, 22 nt, Homo sapiens
auuacccuuagacuccagagug

SEQ ID NO: 2270 - RNA, 22 nt, Homo sapiens
auguugcaguuuaauuauccua

SEQ ID NO: 2271 - RNA, 22 nt, Homo sapiens
auucccuuagcugccucagccu

SEQ ID NO: 2272 - RNA, 22 nt, Homo sapiens
auuccuuaggcccuuugguuag

SEQ ID NO: 2273 - RNA, 18 nt, Homo sapiens
auucuacaggccuuuuga

SEQ ID NO: 2274 - RNA, 22 nt, Homo sapiens
auucuauaguccuaggauuggg

SEQ ID NO: 2275 - RNA, 22 nt, Homo sapiens
auucaaagugcauguucccacu

SEQ ID NO: 2276 - RNA, 20 nt, Homo sapiens
auucaaguaugccuugagaa

SEQ ID NO: 2277 - RNA, 22 nt, Homo sapiens
auucacuuuuauagacaggucu

SEQ ID NO: 2278 - RNA, 22 nt, Homo sapiens
auucagaggggcagcugucuug

SEQ ID NO: 2279 - RNA, 22 nt, Homo sapiens
auucauagugcuaagguguauc

SEQ ID NO: 2280 - RNA, 21 nt, Homo sapiens
auuccacuuuuccuucaggga

SEQ ID NO: 2281 - RNA, 22 nt, Homo sapiens
auuccagguggcgccauucaca

SEQ ID NO: 2282 - RNA, 22 nt, Homo sapiens
auuccaguuugugagaagcugu

SEQ ID NO: 2283 - RNA, 22 nt, Homo sapiens
auuccauuuguguggaauggcu

SEQ ID NO: 2284 - RNA, 22 nt, Homo sapiens
auuccauuuguuaucacacccg

SEQ ID NO: 2285 - RNA, 22 nt, Homo sapiens
auugauaguuuaauaggaauug

SEQ ID NO: 2286 - RNA, 22 nt, Homo sapiens
auugcaaagcguagacucuaaa

SEQ ID NO: 2287 - RNA, 22 nt, Homo sapiens
auugcacaaagagggaaacuga

SEQ ID NO: 2288 - RNA, 21 nt, Homo sapiens
auugcacaauauacccaugua

SEQ ID NO: 2289 - RNA, 22 nt, Homo sapiens
auugcacacagaaucaggguaa

SEQ ID NO: 2290 - RNA, 18 nt, Homo sapiens
auugcacaccagccuggg

SEQ ID NO: 2291 - RNA, 22 nt, Homo sapiens
auugcacaccagucugggcaaa

SEQ ID NO: 2292 - RNA, 22 nt, Homo sapiens
auugcacaucugcacuacagcc

SEQ ID NO: 2293 - RNA, 22 nt, Homo sapiens
auugcacuccagccuuggggau

SEQ ID NO: 2294 - RNA, 20 nt, Homo sapiens
auugcagcaugauuuauaau

SEQ ID NO: 2295 - RNA, 22 nt, Homo sapiens
auugcagcccacccugggugau

SEQ ID NO: 2296 - RNA, 22 nt, Homo sapiens
auugcagcuugcagggugugua

SEQ ID NO: 2297 - RNA, 22 nt, Homo sapiens
auugcauaaacacauuucuuau

SEQ ID NO: 2298 - RNA, 22 nt, Homo sapiens
auugcaugucauguuuagugua

SEQ ID NO: 2299 - RNA, 22 nt, Homo sapiens
auugcuauuauuugaccauugu

SEQ ID NO: 2300 - RNA, 22 nt, Homo sapiens
auugcucaaaucaguacuugag

SEQ ID NO: 2301 - RNA, 22 nt, Homo sapiens
auuuggguaaugagugcaaggg

SEQ ID NO: 2302 - RNA, 22 nt, Homo sapiens
auuuggguuuuacaucaggcua

SEQ ID NO: 2303 - RNA, 22 nt, Homo sapiens
auuuguccugccuuuuccuccu

SEQ ID NO: 2304 - RNA, 22 nt, Homo sapiens
caaaagugauugcgguuuuugc

SEQ ID NO: 2305 - RNA, 22 nt, Homo sapiens
caaaagugguucuuauccuuuu

SEQ ID NO: 2306 - RNA, 22 nt, Homo sapiens
caaaggauucauuuccaggagu

SEQ ID NO: 2307 - RNA, 22 nt, Homo sapiens
caaaggcuuccacugcauccuu

SEQ ID NO: 2308 - RNA, 22 nt, Homo sapiens
caaaggcuucugaaacugcaga

SEQ ID NO: 2309 - RNA, 22 nt, Homo sapiens
caaagucuauucuacccuuacc

SEQ ID NO: 2310 - RNA, 22 nt, Homo sapiens
caaagucuucucauuaugucuu

SEQ ID NO: 2311 - RNA, 22 nt, Homo sapiens
caaauacuuucauguugucuug

SEQ ID NO: 2312 - RNA, 21 nt, Homo sapiens
auuguauguaaaccaaaugag

SEQ ID NO: 2313 - RNA, 22 nt, Homo sapiens
auugucacccgggcaguaagca

SEQ ID NO: 2314 - RNA, 22 nt, Homo sapiens
auugucccucuuaaucccagca

SEQ ID NO: 2315 - RNA, 20 nt, Homo sapiens
auuguccuugauuacacaga

SEQ ID NO: 2316 - RNA, 23 nt, Homo sapiens
auugaacacuuucauaugugagg

SEQ ID NO: 2317 - RNA, 22 nt, Homo sapiens
auugaacaugccauauguacca

SEQ ID NO: 2318 - RNA, 22 nt, Homo sapiens
auugaacuuuugucacugacau

SEQ ID NO: 2319 - RNA, 22 nt, Homo sapiens
auugaaucuaaaaugagucucu

SEQ ID NO: 2320 - RNA, 22 nt, Homo sapiens
auuggcagaaaucuuuauagua

SEQ ID NO: 2321 - RNA, 22 nt, Homo sapiens
auuguaauuuuagagaaagugg

SEQ ID NO: 2322 - RNA, 22 nt, Homo sapiens
auuguacuacaccauaguacug

SEQ ID NO: 2323 - RNA, 22 nt, Homo sapiens
auuguacuccagccuuggggac

SEQ ID NO: 2324 - RNA, 22 nt, Homo sapiens
caacacuguuuauuggauagcc

SEQ ID NO: 2325 - RNA, 22 nt, Homo sapiens
caacaguaaagcauuuuuaagu

SEQ ID NO: 2326 - RNA, 22 nt, Homo sapiens
caacagucagcccauccacaga

SEQ ID NO: 2327 - RNA, 22 nt, Homo sapiens
caacauccaccuccuggguuca

SEQ ID NO: 2328 - RNA, 22 nt, Homo sapiens
caagagaccugagugucauucu

SEQ ID NO: 2329 - RNA, 22 nt, Homo sapiens
caaaugacaucauuucauucaa

SEQ ID NO: 2330 - RNA, 22 nt, Homo sapiens
cacaaaguagauuagucuucca

SEQ ID NO: 2331 - RNA, 22 nt, Homo sapiens
caagugaauaguugcucucaga

SEQ ID NO: 2332 - RNA, 22 nt, Homo sapiens
caagugcuacagagaaaucuuu

SEQ ID NO: 2333 - RNA, 22 nt, Homo sapiens
caagugcucuaggauccugagu

SEQ ID NO: 2334 - RNA, 22 nt, Homo sapiens
caagugcuugaugaaugaucaa

SEQ ID NO: 2335 - RNA, 22 nt, Homo sapiens
caagugcuuucuuggggauuua

SEQ ID NO: 2336 - RNA, 22 nt, Homo sapiens
caauacuguguugaauaagagu

SEQ ID NO: 2337 - RNA, 19 nt, Homo sapiens
caauacuucuuggcauaca

SEQ ID NO: 2338 - RNA, 22 nt, Homo sapiens
caaugcauuauucucccacuuc

SEQ ID NO: 2339 - RNA, 22 nt, Homo sapiens
caauggcaaugaaauagugaga

SEQ ID NO: 2340 - RNA, 21 nt, Homo sapiens
caauggcacaaucucugcuca

SEQ ID NO: 2341 - RNA, 22 nt, Homo sapiens
caauggcacgaucucgucucac

SEQ ID NO: 2342 - RNA, 22 nt, Homo sapiens
uuucccauuguucugcucugug

SEQ ID NO: 2343 - RNA, 22 nt, Homo sapiens
uuucccugaaggcucugaaguc

SEQ ID NO: 2344 - RNA, 22 nt, Homo sapiens
uuucccuuuagcuuagugauuu

SEQ ID NO: 2345 - RNA, 16 nt, Homo sapiens
uuucccuuugguguuu

SEQ ID NO: 2346 - RNA, 22 nt, Homo sapiens
uuuccaagaugcuuacuuucuc

SEQ ID NO: 2347 - RNA, 22 nt, Homo sapiens
uuuccagguggccaacauuuua

SEQ ID NO: 2348 - RNA, 22 nt, Homo sapiens
uuucuacagggcuugccaggua

SEQ ID NO: 2349 - RNA, 22 nt, Homo sapiens
uuucuacagugaacgauuucua

SEQ ID NO: 2350 - RNA, 22 nt, Homo sapiens
uuucuauguugaccagucuaga

SEQ ID NO: 2351 - RNA, 22 nt, Homo sapiens
uuucugagaccaaaacuuguaa

SEQ ID NO: 2352 - RNA, 22 nt, Homo sapiens
uuuccuguaggaaggaaauaga

SEQ ID NO: 2353 - RNA, 22 nt, Homo sapiens
uuuccuguagggggcaaggccu

SEQ ID NO: 2354 - RNA, 22 nt, Homo sapiens
uuucugaggccucaccagaagc

SEQ ID NO: 2355 - RNA, 21 nt, Homo sapiens
uuucugggggagcauggcagg

SEQ ID NO: 2356 - RNA, 22 nt, Homo sapiens
uuucugggggugcugauggaaa

SEQ ID NO: 2357 - RNA, 19 nt, Homo sapiens
uuugaauauaaugcagcua

SEQ ID NO: 2358 - RNA, 22 nt, Homo sapiens
uuugaauggaaguuuugugaaa

SEQ ID NO: 2359 - RNA, 22 nt, Homo sapiens
uuugacuuuuagaauaugaguu

SEQ ID NO: 2360 - RNA, 22 nt, Homo sapiens
uuugagaaugcuaccagagaag

SEQ ID NO: 2361 - RNA, 23 nt, Homo sapiens
uuugagugugauaaacacuguca

SEQ ID NO: 2362 - RNA, 21 nt, Homo sapiens
uuugaucauuaaaagugaauc

SEQ ID NO: 2363 - RNA, 22 nt, Homo sapiens
uuugauguugagacuauaaagc

SEQ ID NO: 2364 - RNA, 22 nt, Homo sapiens
uuugauguugauacuaccuuca

SEQ ID NO: 2365 - RNA, 23 nt, Homo sapiens
uuucuugggcaugcuaugucagu

SEQ ID NO: 2366 - RNA, 20 nt, Homo sapiens
uuugcagaaucuaagaagag

SEQ ID NO: 2367 - RNA, 22 nt, Homo sapiens
uuugcagagucuuucgcugggc

SEQ ID NO: 2368 - RNA, 22 nt, Homo sapiens
uuucagagucaucugcccaagu

SEQ ID NO: 2369 - RNA, 17 nt, Homo sapiens
uuucagaguggaagugu

SEQ ID NO: 2370 - RNA, 18 nt, Homo sapiens
uuucaggguggacaugag

SEQ ID NO: 2371 - RNA, 19 nt, Homo sapiens
uuucaauguaaggauggag

SEQ ID NO: 2372 - RNA, 22 nt, Homo sapiens
uuucacagcaauugccuauugu

SEQ ID NO: 2373 - RNA, 22 nt, Homo sapiens
uuucaguguggcaggcauagcu

SEQ ID NO: 2374 - RNA, 22 nt, Homo sapiens
uuucauagaucaugcuuuugga

SEQ ID NO: 2375 - RNA, 22 nt, Homo sapiens
uuucauagccuucuaaugaguu

SEQ ID NO: 2376 - RNA, 22 nt, Homo sapiens
uuucauagccuuugucgucuga

SEQ ID NO: 2377 - RNA, 22 nt, Homo sapiens
uuucauaguuugcauagggcau

SEQ ID NO: 2378 - RNA, 22 nt, Homo sapiens
uuucauggaauauagucauuuu

SEQ ID NO: 2379 - RNA, 22 nt, Homo sapiens
uuucauggaggauuugcuucuu

SEQ ID NO: 2380 - RNA, 18 nt, Homo sapiens
uuucaagucuuaggugac

SEQ ID NO: 2381 - RNA, 22 nt, Homo sapiens
uuucaagugcugucuuagcugu

SEQ ID NO: 2382 - RNA, 22 nt, Homo sapiens
uuuauggagagauauuuauggu

SEQ ID NO: 2383 - RNA, 22 nt, Homo sapiens
uuuaucuguuuaaaacuguuca

SEQ ID NO: 2384 - RNA, 22 nt, Homo sapiens
uuuagguuacauauaauccaaa

SEQ ID NO: 2385 - RNA, 22 nt, Homo sapiens
uuuaguccucugaaaaucuaua

SEQ ID NO: 2386 - RNA, 22 nt, Homo sapiens
uuuaguucauuaaggaaucucc

SEQ ID NO: 2387 - RNA, 22 nt, Homo sapiens
uugugguuuuuaaaacuaggug

SEQ ID NO: 2388 - RNA, 22 nt, Homo sapiens
uuguguacuacaguaugccaca

SEQ ID NO: 2389 - RNA, 22 nt, Homo sapiens
uuuacagucuuuugugugaguc

SEQ ID NO: 2390 - RNA, 22 nt, Homo sapiens
uuuuccagugggacucccauua

SEQ ID NO: 2391 - RNA, 22 nt, Homo sapiens
uuuugcaccauccuaauaguau

SEQ ID NO: 2392 - RNA, 22 nt, Homo sapiens
uuuugcacuguuuuaucugaca

SEQ ID NO: 2393 - RNA, 19 nt, Homo sapiens
uuuugcucuuuauaccuau

SEQ ID NO: 2394 - RNA, 17 nt, Homo sapiens
uuuuggauuagaaaucc

SEQ ID NO: 2395 - RNA, 22 nt, Homo sapiens
uuuuggcuagaaauauaccucc

SEQ ID NO: 2396 - RNA, 22 nt, Homo sapiens
uuuuggcucugucuguaucuuu

SEQ ID NO: 2397 - RNA, 22 nt, Homo sapiens
uuuuuggaggagguuagaucau

SEQ ID NO: 2398 - RNA, 22 nt, Homo sapiens
uuuuuggauaaugguacaugua

SEQ ID NO: 2399 - RNA, 22 nt, Homo sapiens
uuuuuuaguuagcugggcauga

SEQ ID NO: 2400 - RNA, 21 nt, Homo sapiens
uuuggcuucucugcugcagcc

SEQ ID NO: 2401 - RNA, 18 nt, Homo sapiens
uuuggcuguucaugacuc

SEQ ID NO: 2402 - RNA, 22 nt, Homo sapiens
uuuggcuuaagauugacugcaa

SEQ ID NO: 2403 - RNA, 19 nt, Homo sapiens
uuugcauagugagaauaua

SEQ ID NO: 2404 - RNA, 22 nt, Homo sapiens
uuugccuuugugauauggucua

SEQ ID NO: 2405 - RNA, 22 nt, Homo sapiens
uuugcuauagugaauagugcug

SEQ ID NO: 2406 - RNA, 22 nt, Homo sapiens
uuugcuugaggucuagcuaccc

SEQ ID NO: 2407 - RNA, 22 nt, Homo sapiens
uuuggcuuugagaagcagugga

SEQ ID NO: 2408 - RNA, 22 nt, Homo sapiens
uuuggcuuuuguaauaacugcc

SEQ ID NO: 2409 - RNA, 22 nt, Homo sapiens
uuugggaaugaguuuaucauuu

SEQ ID NO: 2410 - RNA, 22 nt, Homo sapiens
uuugguaguuuguugggaccca

SEQ ID NO: 2411 - RNA, 22 nt, Homo sapiens
uuuggucacugccgccgccagc

SEQ ID NO: 2412 - RNA, 18 nt, Homo sapiens
uuugguccuuuauaaaca

SEQ ID NO: 2413 - RNA, 22 nt, Homo sapiens
uuugguguauaaaaaugcuagu

SEQ ID NO: 2414 - RNA, 22 nt, Homo sapiens
uuuguauguuggagauuggaga

SEQ ID NO: 2415 - RNA, 19 nt, Homo sapiens
uuuguauguuuccaguaau

SEQ ID NO: 2416 - RNA, 22 nt, Homo sapiens
uuuguccccgcccagaucucau

SEQ ID NO: 2417 - RNA, 22 nt, Homo sapiens
uuugucccucucaccaacgggg

SEQ ID NO: 2418 - RNA, 22 nt, Homo sapiens
uuugucccuuugcaguggcaca

SEQ ID NO: 2419 - RNA, 19 nt, Homo sapiens
uuuguccugcccuuucuca

SEQ ID NO: 2420 - RNA, 22 nt, Homo sapiens
uuugugaaugucauaagcucca

SEQ ID NO: 2421 - RNA, 23 nt, Homo sapiens
uuuguguccccacccaaaucuca

SEQ ID NO: 2422 - RNA, 22 nt, Homo sapiens
uuuuaguggaauauuuacaguu

SEQ ID NO: 2423 - RNA, 22 nt, Homo sapiens
uuuuaguggacaaagguauuua

SEQ ID NO: 2424 - RNA, 22 nt, Homo sapiens
uuaauguaauugauugauugac

SEQ ID NO: 2425 - RNA, 22 nt, Homo sapiens
uuaauguaucuaucacaucaca

SEQ ID NO: 2426 - RNA, 22 nt, Homo sapiens
uuaauuguccaaguucaucucu

SEQ ID NO: 2427 - RNA, 21 nt, Homo sapiens
uuacaauggcuccuugaaggu

SEQ ID NO: 2428 - RNA, 22 nt, Homo sapiens
uuacagauggauggcagcuggc

SEQ ID NO: 2429 - RNA, 22 nt, Homo sapiens
uuacagcagugccccacuccca

SEQ ID NO: 2430 - RNA, 22 nt, Homo sapiens
uuacaguagaugaggguauaau

SEQ ID NO: 2431 - RNA, 22 nt, Homo sapiens
uuacaguaugaguaagaguucu

SEQ ID NO: 2432 - RNA, 22 nt, Homo sapiens
uuacaguauugcaaggacuagg

SEQ ID NO: 2433 - RNA, 22 nt, Homo sapiens
uuacaguucugguggagaggua

SEQ ID NO: 2434 - RNA, 22 nt, Homo sapiens
uuacaguugugagccaccaugc

SEQ ID NO: 2435 - RNA, 22 nt, Homo sapiens
uuacaucaucacauuaguuugc

SEQ ID NO: 2436 - RNA, 22 nt, Homo sapiens
uuacaugucuugguaagguuag

SEQ ID NO: 2437 - RNA, 22 nt, Homo sapiens
uuaaggaaagcauuuaauucag

SEQ ID NO: 2438 - RNA, 22 nt, Homo sapiens
uuaaggaaggagucuuaaaugg

SEQ ID NO: 2439 - RNA, 22 nt, Homo sapiens
uuaaggcuuuaaguaaacacag

SEQ ID NO: 2440 - RNA, 22 nt, Homo sapiens
uuaaguaaucagagaagagaac

SEQ ID NO: 2441 - RNA, 22 nt, Homo sapiens
uuaagucacacuagacaacuga

SEQ ID NO: 2442 - RNA, 22 nt, Homo sapiens
uuaagugcucaguuacucaguu

SEQ ID NO: 2443 - RNA, 22 nt, Homo sapiens
uuaaguuaggcuucagcagucu

SEQ ID NO: 2444 - RNA, 22 nt, Homo sapiens
uuagaauggaaaugcgagguua

SEQ ID NO: 2445 - RNA, 22 nt, Homo sapiens
uuagaucaacauggaacucuau

SEQ ID NO: 2446 - RNA, 22 nt, Homo sapiens
uuagcaauagccugcaucugca

SEQ ID NO: 2447 - RNA, 22 nt, Homo sapiens
uuaaaagcuaucuccaagguca

SEQ ID NO: 2448 - RNA, 22 nt, Homo sapiens
uuaaaaguauaggccuggcaua

SEQ ID NO: 2449 - RNA, 22 nt, Homo sapiens
uuacuugagauggggugucacu

SEQ ID NO: 2450 - RNA, 22 nt, Homo sapiens
uuaauacugcuuaacuuuagga

SEQ ID NO: 2451 - RNA, 22 nt, Homo sapiens
uuaaucaggccguuuccuaaga

SEQ ID NO: 2452 - RNA, 22 nt, Homo sapiens
uuaaucuguucucuguauucua

SEQ ID NO: 2453 - RNA, 22 nt, Homo sapiens
uuaaugaacuuuauuuuguaga

SEQ ID NO: 2454 - RNA, 22 nt, Homo sapiens
uuaccuuuuuaagacagguuag

SEQ ID NO: 2455 - RNA, 22 nt, Homo sapiens
uuacugcucuuuugucaugagu

SEQ ID NO: 2456 - RNA, 22 nt, Homo sapiens
uuacuguagugucauaucguau

SEQ ID NO: 2457 - RNA, 22 nt, Homo sapiens
uuacuguauagaaucaucuuga

SEQ ID NO: 2458 - RNA, 22 nt, Homo sapiens
uuaacacugccauugauacugu

SEQ ID NO: 2459 - RNA, 22 nt, Homo sapiens
uuaacagcacaugcugucccuu

SEQ ID NO: 2460 - RNA, 22 nt, Homo sapiens
uuaacagcacuacguggggauc

SEQ ID NO: 2461 - RNA, 22 nt, Homo sapiens
uuaacagucacuuagcucauuu

SEQ ID NO: 2462 - RNA, 22 nt, Homo sapiens
uuaagaugcauuuugaaguuaa

SEQ ID NO: 2463 - RNA, 20 nt, Homo sapiens
uuaaaucuagugcagacuca

SEQ ID NO: 2464 - RNA, 22 nt, Homo sapiens
uuaaaugcacauacuugagaaa

SEQ ID NO: 2465 - RNA, 22 nt, Homo sapiens
uuaaaugcauagaauguguagu

SEQ ID NO: 2466 - RNA, 22 nt, Homo sapiens
uuaaaugcuagaauuuucuuug

SEQ ID NO: 2467 - RNA, 22 nt, Homo sapiens
uuaaaugcucacauaaagguag

SEQ ID NO: 2468 - RNA, 22 nt, Homo sapiens
uguggaguguaugugacagaga

SEQ ID NO: 2469 - RNA, 22 nt, Homo sapiens
uuaaagcuggcguuacaguuug

SEQ ID NO: 2470 - RNA, 22 nt, Homo sapiens
uuaaagugaucauaaggauagu

SEQ ID NO: 2471 - RNA, 22 nt, Homo sapiens
uuaaaguguuugcagacaggug

SEQ ID NO: 2472 - RNA, 22 nt, Homo sapiens
uuaaauacagcaugguguuucu

SEQ ID NO: 2473 - RNA, 22 nt, Homo sapiens
ugugguuuuaguaaaacuaugu

SEQ ID NO: 2474 - RNA, 22 nt, Homo sapiens
ugugguuuuucacauuuagaga

SEQ ID NO: 2475 - RNA, 22 nt, Homo sapiens
ugugguuuuuuucuccaauagg

SEQ ID NO: 2476 - RNA, 22 nt, Homo sapiens
uguguaauaccuuugacuauau

SEQ ID NO: 2477 - RNA, 22 nt, Homo sapiens
ugugucuccugaaaauucacau

SEQ ID NO: 2478 - RNA, 22 nt, Homo sapiens
ugugucuuuuaucacacaaugu

SEQ ID NO: 2479 - RNA, 22 nt, Homo sapiens
uguucuugaguugggaguacaa

SEQ ID NO: 2480 - RNA, 19 nt, Homo sapiens
uguugcacauaucaauaug

SEQ ID NO: 2481 - RNA, 22 nt, Homo sapiens
uguugcacuccagccuagguga

SEQ ID NO: 2482 - RNA, 22 nt, Homo sapiens
uguugcacuccagccugggcaa

SEQ ID NO: 2483 - RNA, 22 nt, Homo sapiens
uguugcacuccagccuggguga

SEQ ID NO: 2484 - RNA, 22 nt, Homo sapiens
uguugcacuccauccugggcga

SEQ ID NO: 2485 - RNA, 22 nt, Homo sapiens
uguugcacucuagccugggcaa

SEQ ID NO: 2486 - RNA, 18 nt, Homo sapiens
uguugguguucacucacu

SEQ ID NO: 2487 - RNA, 22 nt, Homo sapiens
uuauacuacuauaaagagguag

SEQ ID NO: 2488 - RNA, 22 nt, Homo sapiens
uuauacucgucugaaugauucu

SEQ ID NO: 2489 - RNA, 22 nt, Homo sapiens
uuauagcuaacaucugugaaaa

SEQ ID NO: 2490 - RNA, 20 nt, Homo sapiens
uuauagcuacaucuugacug

SEQ ID NO: 2491 - RNA, 22 nt, Homo sapiens
uuaggcuuuauugaaaacaaua

SEQ ID NO: 2492 - RNA, 22 nt, Homo sapiens
uuagggaguaaucuaaaaaugg

SEQ ID NO: 2493 - RNA, 22 nt, Homo sapiens
uuagucaaguguacugugaaug

SEQ ID NO: 2494 - RNA, 22 nt, Homo sapiens
uuagugaaugcaccacuucuga

SEQ ID NO: 2495 - RNA, 22 nt, Homo sapiens
uuaucauagugcaguuuucuga

SEQ ID NO: 2496 - RNA, 17 nt, Homo sapiens
uuaugagacuucuuagc

SEQ ID NO: 2497 - RNA, 22 nt, Homo sapiens
uuaugcagcaaagugcuugaaa

SEQ ID NO: 2498 - RNA, 22 nt, Homo sapiens
uuaugucuuugagcaaugcugu

SEQ ID NO: 2499 - RNA, 22 nt, Homo sapiens
uuaugucuuuuguguucagcua

SEQ ID NO: 2500 - RNA, 22 nt, Homo sapiens
uuauuagagauauuugguuagg

SEQ ID NO: 2501 - RNA, 22 nt, Homo sapiens
uuauuagguuaaccuauagcua

SEQ ID NO: 2502 - RNA, 22 nt, Homo sapiens
uuauuagguuagugcaaaaguu

SEQ ID NO: 2503 - RNA, 22 nt, Homo sapiens
uuauuagguugguggaaaagua

SEQ ID NO: 2504 - RNA, 22 nt, Homo sapiens
uuauucauuaacagggaccaaa

SEQ ID NO: 2505 - RNA, 22 nt, Homo sapiens
uuauucauuaauugcuaagguu

SEQ ID NO: 2506 - RNA, 22 nt, Homo sapiens
uucaaaguaaaaauguguucac

SEQ ID NO: 2507 - RNA, 22 nt, Homo sapiens
uucaaaguaaagggauggagac

SEQ ID NO: 2508 - RNA, 22 nt, Homo sapiens
uucaaaguguugguuuugggcu

SEQ ID NO: 2509 - RNA, 22 nt, Homo sapiens
uucaaaguuggaggacaaacug

SEQ ID NO: 2510 - RNA, 22 nt, Homo sapiens
uucaacagugauggccuuugua

SEQ ID NO: 2511 - RNA, 22 nt, Homo sapiens
uucaagaauuaaaguggcuuuu

SEQ ID NO: 2512 - RNA, 22 nt, Homo sapiens
uucaagcuauggugaucuuuuc

SEQ ID NO: 2513 - RNA, 22 nt, Homo sapiens
uucaagucaacaagcacuugag

SEQ ID NO: 2514 - RNA, 22 nt, Homo sapiens
uucaagucaaggaaagaggucu

SEQ ID NO: 2515 - RNA, 22 nt, Homo sapiens
uucaagucuuggcuuugccacc

SEQ ID NO: 2516 - RNA, 22 nt, Homo sapiens
uucaauacuguugauccuuaug

SEQ ID NO: 2517 - RNA, 22 nt, Homo sapiens
uucaauaugucauuggcaggca

SEQ ID NO: 2518 - RNA, 22 nt, Homo sapiens
uucacacugggccuacucugug

SEQ ID NO: 2519 - RNA, 22 nt, Homo sapiens
uucacagagagaacucaaacca

SEQ ID NO: 2520 - RNA, 22 nt, Homo sapiens
uucacaguacucccuggaauua

SEQ ID NO: 2521 - RNA, 22 nt, Homo sapiens
uucacagucacccuucuccaug

SEQ ID NO: 2522 - RNA, 22 nt, Homo sapiens
uucacagugugaucuaugggca

SEQ ID NO: 2523 - RNA, 23 nt, Homo sapiens
uucaccguguuggccaggcuggu

SEQ ID NO: 2524 - RNA, 22 nt, Homo sapiens
uucacuguagccucagccucuu

SEQ ID NO: 2525 - RNA, 22 nt, Homo sapiens
uucacuguuaagcaguuaaacu

SEQ ID NO: 2526 - RNA, 22 nt, Homo sapiens
uuagaacaguguuugccucgcu

SEQ ID NO: 2527 - RNA, 22 nt, Homo sapiens
uuagaacuagaggaguuugagu

SEQ ID NO: 2528 - RNA, 22 nt, Homo sapiens
uuauugcacuccagccugggua

SEQ ID NO: 2529 - RNA, 16 nt, Homo sapiens
uuauugcauucuucuc

SEQ ID NO: 2530 - RNA, 22 nt, Homo sapiens
uucaggcaccauggucauugau

SEQ ID NO: 2531 - RNA, 22 nt, Homo sapiens
uucaggcaccauugucauugau

SEQ ID NO: 2532 - RNA, 22 nt, Homo sapiens
uucagagugaggcucucggaac

SEQ ID NO: 2533 - RNA, 20 nt, Homo sapiens
uucagcaaaggaaugggagu

SEQ ID NO: 2534 - RNA, 22 nt, Homo sapiens
uucagggacuuuagacaagaga

SEQ ID NO: 2535 - RNA, 22 nt, Homo sapiens
uucaguaaauguucuuacuaua

SEQ ID NO: 2536 - RNA, 22 nt, Homo sapiens
uucaguagucaaaagauaaggg

SEQ ID NO: 2537 - RNA, 22 nt, Homo sapiens
uucaguauugcaccuggagucc

SEQ ID NO: 2538 - RNA, 22 nt, Homo sapiens
uucaguccauuuccuuggucac

SEQ ID NO: 2539 - RNA, 20 nt, Homo sapiens
uucagugcagguaacaaucc

SEQ ID NO: 2540 - RNA, 22 nt, Homo sapiens
uucauacaguggcugcacucca

SEQ ID NO: 2541 - RNA, 22 nt, Homo sapiens
uucauaguaacaguaacuaugg

SEQ ID NO: 2542 - RNA, 22 nt, Homo sapiens
uucauagucacauucgaugucu

SEQ ID NO: 2543 - RNA, 22 nt, Homo sapiens
uucauagucuaugcaaguaaga

SEQ ID NO: 2544 - RNA, 22 nt, Homo sapiens
uucauaguucuuuuagucauua

SEQ ID NO: 2545 - RNA, 22 nt, Homo sapiens
uucauaguuuauacugauauuu

SEQ ID NO: 2546 - RNA, 20 nt, Homo sapiens
uucaucaggauauuggucua

SEQ ID NO: 2547 - RNA, 23 nt, Homo sapiens
uucaucagggauauuggccugaa

SEQ ID NO: 2548 - RNA, 22 nt, Homo sapiens
uucaucaguuauauuggccuga

SEQ ID NO: 2549 - RNA, 22 nt, Homo sapiens
uucaucaguugagcugguugcu

SEQ ID NO: 2550 - RNA, 22 nt, Homo sapiens
uucaucuggcaauucagagauu

SEQ ID NO: 2551 - RNA, 22 nt, Homo sapiens
uggucuucuggccuccagaacc

SEQ ID NO: 2552 - RNA, 22 nt, Homo sapiens
ugguccuuuccauuggagacac

SEQ ID NO: 2553 - RNA, 22 nt, Homo sapiens
uggucaguugaguccuugccaa

SEQ ID NO: 2554 - RNA, 21 nt, Homo sapiens
uggucaguuuucucacuagga

SEQ ID NO: 2555 - RNA, 21 nt, Homo sapiens
uggucccauaagauuacaaug

SEQ ID NO: 2556 - RNA, 21 nt, Homo sapiens
uggucccauaagauuauaaug

SEQ ID NO: 2557 - RNA, 22 nt, Homo sapiens
uggucccaugaacuuuagguca

SEQ ID NO: 2558 - RNA, 22 nt, Homo sapiens
uggguaggaccagaaaugcacu

SEQ ID NO: 2559 - RNA, 23 nt, Homo sapiens
uggguucauucuugaagucagug

SEQ ID NO: 2560 - RNA, 22 nt, Homo sapiens
ugguaccuuuuaaugacuaauu

SEQ ID NO: 2561 - RNA, 22 nt, Homo sapiens
ugguauguaugauuaacaugga

SEQ ID NO: 2562 - RNA, 22 nt, Homo sapiens
uggucaccugaauuaugcaugu

SEQ ID NO: 2563 - RNA, 20 nt, Homo sapiens
uggucaccuucaggagguuc

SEQ ID NO: 2564 - RNA, 22 nt, Homo sapiens
uggucaccuucuugcucugucu

SEQ ID NO: 2565 - RNA, 22 nt, Homo sapiens
uguaaaucugguuaauuggaua

SEQ ID NO: 2566 - RNA, 22 nt, Homo sapiens
uguaacacacacuguuuacucc

SEQ ID NO: 2567 - RNA, 22 nt, Homo sapiens
uguaaugaucaaaucagaguaa

SEQ ID NO: 2568 - RNA, 22 nt, Homo sapiens
ugguguuugagaagcugauguc

SEQ ID NO: 2569 - RNA, 20 nt, Homo sapiens
uggugguuuuaugugguuua

SEQ ID NO: 2570 - RNA, 22 nt, Homo sapiens
uggugagaaaugagaugcuuuu

SEQ ID NO: 2571 - RNA, 22 nt, Homo sapiens
uguagcuuuugagauuuauauu

SEQ ID NO: 2572 - RNA, 22 nt, Homo sapiens
uguagucauuccuuuuugcuuu

SEQ ID NO: 2573 - RNA, 22 nt, Homo sapiens
uguaugagagacauggcugcuu

SEQ ID NO: 2574 - RNA, 22 nt, Homo sapiens
uguaugagagugaaagcauuuc

SEQ ID NO: 2575 - RNA, 22 nt, Homo sapiens
uguaugaguuguuuauaaauuu

SEQ ID NO: 2576 - RNA, 22 nt, Homo sapiens
uguaauuuaaaugauccuugga

SEQ ID NO: 2577 - RNA, 22 nt, Homo sapiens
uguacuucaagauuaugguuua

SEQ ID NO: 2578 - RNA, 22 nt, Homo sapiens
uguagcagccauaaacacagug

SEQ ID NO: 2579 - RNA, 22 nt, Homo sapiens
ugucacagagauuuugguaugu

SEQ ID NO: 2580 - RNA, 22 nt, Homo sapiens
ugucacaguuuguacuuuauag

SEQ ID NO: 2581 - RNA, 22 nt, Homo sapiens
ugucacccuuuauccauuuccu

SEQ ID NO: 2582 - RNA, 22 nt, Homo sapiens
ugucaguuucuugagauggaac

SEQ ID NO: 2583 - RNA, 22 nt, Homo sapiens
ugucaguuuuaacuagggaaua

SEQ ID NO: 2584 - RNA, 22 nt, Homo sapiens
ugucauagaugauuuuuuucgg

SEQ ID NO: 2585 - RNA, 22 nt, Homo sapiens
ugucaugaacucacauucuggg

SEQ ID NO: 2586 - RNA, 22 nt, Homo sapiens
ugucauguaaagaguaaauggu

SEQ ID NO: 2587 - RNA, 22 nt, Homo sapiens
ugucauguuucuacugaccaaa

SEQ ID NO: 2588 - RNA, 22 nt, Homo sapiens
ugucauucaggaaauucuaagu

SEQ ID NO: 2589 - RNA, 22 nt, Homo sapiens
ugucuugagagaggacaugacu

SEQ ID NO: 2590 - RNA, 22 nt, Homo sapiens
ugucuuguagacaauguauagu

SEQ ID NO: 2591 - RNA, 22 nt, Homo sapiens
ugugaaaucagauagccuuuuu

SEQ ID NO: 2592 - RNA, 22 nt, Homo sapiens
ugugaacaaaauuuguugcaua

SEQ ID NO: 2593 - RNA, 22 nt, Homo sapiens
ugugaacacagaggcuauggca

SEQ ID NO: 2594 - RNA, 22 nt, Homo sapiens
ugugaacagaauuagucaccua

SEQ ID NO: 2595 - RNA, 19 nt, Homo sapiens
ugugaacaucacagagugu

SEQ ID NO: 2596 - RNA, 21 nt, Homo sapiens
ugugaacauguuggguggcau

SEQ ID NO: 2597 - RNA, 22 nt, Homo sapiens
ugugaacauuuuguauauauua

SEQ ID NO: 2598 - RNA, 22 nt, Homo sapiens
ugugaagaaagucauugguagc

SEQ ID NO: 2599 - RNA, 22 nt, Homo sapiens
ugugaagauggacuaauauagu

SEQ ID NO: 2600 - RNA, 22 nt, Homo sapiens
ugugaagauguuucuuaauuga

SEQ ID NO: 2601 - RNA, 22 nt, Homo sapiens
ugugaauggugcugcaaugaac

SEQ ID NO: 2602 - RNA, 22 nt, Homo sapiens
ugugaauguaagaaaauccaac

SEQ ID NO: 2603 - RNA, 18 nt, Homo sapiens
ugugacauugagcauguc

SEQ ID NO: 2604 - RNA, 22 nt, Homo sapiens
uguggaaauaaaagaaagguua

SEQ ID NO: 2605 - RNA, 22 nt, Homo sapiens
ugugcucaucucagucaacugu

SEQ ID NO: 2606 - RNA, 20 nt, Homo sapiens
ugugauuauuuaguugcaug

SEQ ID NO: 2607 - RNA, 17 nt, Homo sapiens
ugugauugaagucaucc

SEQ ID NO: 2608 - RNA, 22 nt, Homo sapiens
ugugcaaucagcuucauuacau

SEQ ID NO: 2609 - RNA, 23 nt, Homo sapiens
ugugcacauuuacauauauacac

SEQ ID NO: 2610 - RNA, 22 nt, Homo sapiens
ugugcauaugucuuuauaguag

SEQ ID NO: 2611 - RNA, 22 nt, Homo sapiens
ugugcaugacagcauacaaacg

SEQ ID NO: 2612 - RNA, 22 nt, Homo sapiens
ugugccacuccagcucuagcuu

SEQ ID NO: 2613 - RNA, 22 nt, Homo sapiens
ugugccacugcacucccgccug

SEQ ID NO: 2614 - RNA, 22 nt, Homo sapiens
ugugccacugcacuccugccug

SEQ ID NO: 2615 - RNA, 22 nt, Homo sapiens
ugugccacugcacucuggccug

SEQ ID NO: 2616 - RNA, 22 nt, Homo sapiens
ugugccacugcacuucagccug

SEQ ID NO: 2617 - RNA, 22 nt, Homo sapiens
uguauguagugaccagggccag

SEQ ID NO: 2618 - RNA, 22 nt, Homo sapiens
uguauguuguaagacuuagacc

SEQ ID NO: 2619 - RNA, 16 nt, Homo sapiens
uguauugcuaaaaaga

SEQ ID NO: 2620 - RNA, 22 nt, Homo sapiens
uguauuuguuguuaaauggaga

SEQ ID NO: 2621 - RNA, 16 nt, Homo sapiens
uguccaaauaaauaca

SEQ ID NO: 2622 - RNA, 22 nt, Homo sapiens
ugucccaguuggguauugaauu

SEQ ID NO: 2623 - RNA, 21 nt, Homo sapiens
ugugaccucugucucugaguc

SEQ ID NO: 2624 - RNA, 22 nt, Homo sapiens
ugugauaguuggcuaaagcagu

SEQ ID NO: 2625 - RNA, 22 nt, Homo sapiens
ugugaugaagaguccaagaaca

SEQ ID NO: 2626 - RNA, 22 nt, Homo sapiens
uugacagaccuuggucauaucc

SEQ ID NO: 2627 - RNA, 20 nt, Homo sapiens
uugacaguggguuguuaaag

SEQ ID NO: 2628 - RNA, 22 nt, Homo sapiens
uugacauaaucauuucacagug

SEQ ID NO: 2629 - RNA, 22 nt, Homo sapiens
uugacauaguuucugaaauaga

SEQ ID NO: 2630 - RNA, 22 nt, Homo sapiens
uugacauugcuguaguguccag

SEQ ID NO: 2631 - RNA, 22 nt, Homo sapiens
uugaccuaugggaguuugacua

SEQ ID NO: 2632 - RNA, 22 nt, Homo sapiens
uugacuucagagcugauucaag

SEQ ID NO: 2633 - RNA, 22 nt, Homo sapiens
uugagguaauaaacagccauuc

SEQ ID NO: 2634 - RNA, 22 nt, Homo sapiens
uugaguuuaucuaaagaccugg

SEQ ID NO: 2635 - RNA, 22 nt, Homo sapiens
uugaguuugaguauucuaaagc

SEQ ID NO: 2636 - RNA, 22 nt, Homo sapiens
uugauauucugagaagcugaag

SEQ ID NO: 2637 - RNA, 22 nt, Homo sapiens
uugaugauguuucugccuugcc

SEQ ID NO: 2638 - RNA, 22 nt, Homo sapiens
uugauagacacauauccaugug

SEQ ID NO: 2639 - RNA, 22 nt, Homo sapiens
uugauagacaucugaguuguug

SEQ ID NO: 2640 - RNA, 22 nt, Homo sapiens
uugauagaucagggauuugauu

SEQ ID NO: 2641 - RNA, 22 nt, Homo sapiens
uugauaguuuuaaaauuaaucu

SEQ ID NO: 2642 - RNA, 22 nt, Homo sapiens
uugauauguaguuggacuugau

SEQ ID NO: 2643 - RNA, 22 nt, Homo sapiens
uugauauguuguuagauucagu

SEQ ID NO: 2644 - RNA, 22 nt, Homo sapiens
uugauauguuguuggauucacu

SEQ ID NO: 2645 - RNA, 22 nt, Homo sapiens
uucugaguggcuuucaacacug

SEQ ID NO: 2646 - RNA, 22 nt, Homo sapiens
uucuggaaaucagcagagggug

SEQ ID NO: 2647 - RNA, 22 nt, Homo sapiens
uucuuagucauguaauagucca

SEQ ID NO: 2648 - RNA, 18 nt, Homo sapiens
uucuuguguugauauuuu

SEQ ID NO: 2649 - RNA, 22 nt, Homo sapiens
uugacaaggagccauugcaucu

SEQ ID NO: 2650 - RNA, 22 nt, Homo sapiens
uugacaaugcacugugcuaagu

SEQ ID NO: 2651 - RNA, 22 nt, Homo sapiens
uucuggccccucccaaucucau

SEQ ID NO: 2652 - RNA, 22 nt, Homo sapiens
uucuggccuccauuuuucuccu

SEQ ID NO: 2653 - RNA, 22 nt, Homo sapiens
uugagacggagucuugcucuuu

SEQ ID NO: 2654 - RNA, 22 nt, Homo sapiens
uugagacggaguuuugcucuug

SEQ ID NO: 2655 - RNA, 22 nt, Homo sapiens
uugagagaaaaaauuuauuggu

SEQ ID NO: 2656 - RNA, 22 nt, Homo sapiens
uugagagaaaaggccaugccuu

SEQ ID NO: 2657 - RNA, 22 nt, Homo sapiens
uugagauaggagcuguuguucu

SEQ ID NO: 2658 - RNA, 22 nt, Homo sapiens
uugagaucaugcuacugcacuc

SEQ ID NO: 2659 - RNA, 22 nt, Homo sapiens
uugagaugauggauaugcuaau

SEQ ID NO: 2660 - RNA, 22 nt, Homo sapiens
uugagauggaguuucaauauug

SEQ ID NO: 2661 - RNA, 22 nt, Homo sapiens
uugagauguaagauguuaauau

SEQ ID NO: 2662 - RNA, 22 nt, Homo sapiens
uugagauguauguauauaaugu

SEQ ID NO: 2663 - RNA, 22 nt, Homo sapiens
uugagauuuuccucaaauauuu

SEQ ID NO: 2664 - RNA, 22 nt, Homo sapiens
uugagcaauccuccugccaugu

SEQ ID NO: 2665 - RNA, 22 nt, Homo sapiens
uugagccaaggauugucuuucc

SEQ ID NO: 2666 - RNA, 22 nt, Homo sapiens
uugagcccuggagguggaggcu

SEQ ID NO: 2667 - RNA, 22 nt, Homo sapiens
uugaggaaugucauuuguguuu

SEQ ID NO: 2668 - RNA, 22 nt, Homo sapiens
uugaggaaugugauuucaaaua

SEQ ID NO: 2669 - RNA, 22 nt, Homo sapiens
uugaaagaaaggagacugaguu

SEQ ID NO: 2670 - RNA, 22 nt, Homo sapiens
uugaaagacagaggggcaaguu

SEQ ID NO: 2671 - RNA, 22 nt, Homo sapiens
uugaaagacaucaccuacugcu

SEQ ID NO: 2672 - RNA, 22 nt, Homo sapiens
uugaaagaugaacuggauugga

SEQ ID NO: 2673 - RNA, 22 nt, Homo sapiens
uugaaagcuaucagagauucca

SEQ ID NO: 2674 - RNA, 22 nt, Homo sapiens
uugaaagcuaucucaaaucgcu

SEQ ID NO: 2675 - RNA, 22 nt, Homo sapiens
uugaaagucauuucuucuaagu

SEQ ID NO: 2676 - RNA, 22 nt, Homo sapiens
uugaaagucuaggcuuacagua

SEQ ID NO: 2677 - RNA, 22 nt, Homo sapiens
uugaaauguuuagaaguuugga

SEQ ID NO: 2678 - RNA, 22 nt, Homo sapiens
uugaaccauucuuuugauagag

SEQ ID NO: 2679 - RNA, 22 nt, Homo sapiens
uugaacuagaaccugcaaauuu

SEQ ID NO: 2680 - RNA, 22 nt, Homo sapiens
uugaaggaggugcucacucucg

SEQ ID NO: 2681 - RNA, 22 nt, Homo sapiens
uugaaguagaaagacgaaauuu

SEQ ID NO: 2682 - RNA, 22 nt, Homo sapiens
uugaagugaagaacaauaucac

SEQ ID NO: 2683 - RNA, 22 nt, Homo sapiens
uugaauagaagguuuuuuguuc

SEQ ID NO: 2684 - RNA, 22 nt, Homo sapiens
uugaauagaaguguugaaagug

SEQ ID NO: 2685 - RNA, 18 nt, Homo sapiens
uugaauaguguccaaucu

SEQ ID NO: 2686 - RNA, 22 nt, Homo sapiens
uucucuguggauugggugagag

SEQ ID NO: 2687 - RNA, 22 nt, Homo sapiens
uucuaaacaucuuacaaugcau

SEQ ID NO: 2688 - RNA, 22 nt, Homo sapiens
uucuaaguaauuuugcaugccu

SEQ ID NO: 2689 - RNA, 22 nt, Homo sapiens
uucuacaggcuguucaagaagc

SEQ ID NO: 2690 - RNA, 20 nt, Homo sapiens
uucuacagucacaggaagau

SEQ ID NO: 2691 - RNA, 22 nt, Homo sapiens
uucuacagugacugcagccaua

SEQ ID NO: 2692 - RNA, 22 nt, Homo sapiens
uucuauggucacagaugcuuga

SEQ ID NO: 2693 - RNA, 20 nt, Homo sapiens
uucuauggugaugaguccug

SEQ ID NO: 2694 - RNA, 22 nt, Homo sapiens
uucuauguuugaaaaugccaaa

SEQ ID NO: 2695 - RNA, 22 nt, Homo sapiens
uucucaauggcaacuuguugcu

SEQ ID NO: 2696 - RNA, 21 nt, Homo sapiens
uucucagaggcaggggauaaa

SEQ ID NO: 2697 - RNA, 22 nt, Homo sapiens
uucucaguuccuacuuugguga

SEQ ID NO: 2698 - RNA, 17 nt, Homo sapiens
uucucaguucugaucuc

SEQ ID NO: 2699 - RNA, 22 nt, Homo sapiens
uucuccugguggacccuaaacg

SEQ ID NO: 2700 - RNA, 20 nt, Homo sapiens
uuccuuaggcauuggaagaa

SEQ ID NO: 2701 - RNA, 22 nt, Homo sapiens
uuccuugugacuaguagugacc

SEQ ID NO: 2702 - RNA, 22 nt, Homo sapiens
uucccugagcaucuguugagcc

SEQ ID NO: 2703 - RNA, 22 nt, Homo sapiens
uuccuggagaguuuucccaaag

SEQ ID NO: 2704 - RNA, 22 nt, Homo sapiens
uucccuuucugccuugaaucuu

SEQ ID NO: 2705 - RNA, 20 nt, Homo sapiens
uuccagcacauuagggaagc

SEQ ID NO: 2706 - RNA, 22 nt, Homo sapiens
uuccaguguguucauccucaga

SEQ ID NO: 2707 - RNA, 22 nt, Homo sapiens
uuccaguuauuauaccucuuaa

SEQ ID NO: 2708 - RNA, 22 nt, Homo sapiens
uucauggaacaaguggguucaa

SEQ ID NO: 2709 - RNA, 22 nt, Homo sapiens
uucauggaauauugaccauuuu

SEQ ID NO: 2710 - RNA, 22 nt, Homo sapiens
uucauguaauauuucacagcuu

SEQ ID NO: 2711 - RNA, 22 nt, Homo sapiens
uucauguaauuccauaagguaa

SEQ ID NO: 2712 - RNA, 22 nt, Homo sapiens
uucaugucuuggcuguuagagu

SEQ ID NO: 2713 - RNA, 22 nt, Homo sapiens
uuccacaauggcugaacuaguu

SEQ ID NO: 2714 - RNA, 22 nt, Homo sapiens
uuccacaaugguugaacuaauu

SEQ ID NO: 2715 - RNA, 22 nt, Homo sapiens
uuccacaaugguugaacuagcu

SEQ ID NO: 2716 - RNA, 22 nt, Homo sapiens
uuccacaaugguugaacuaguu

SEQ ID NO: 2717 - RNA, 22 nt, Homo sapiens
uuccaguugugagcuauccggg

SEQ ID NO: 2718 - RNA, 22 nt, Homo sapiens
uuccaugagaugcaucaaagcu

SEQ ID NO: 2719 - RNA, 22 nt, Homo sapiens
uuccauguaguugagcaguuuu

SEQ ID NO: 2720 - RNA, 22 nt, Homo sapiens
uuccaugugggcuugucaagua

SEQ ID NO: 2721 - RNA, 22 nt, Homo sapiens
uugcugagucuuucuagguugc

SEQ ID NO: 2722 - RNA, 22 nt, Homo sapiens
uuggcagcuguggaaucugggc

SEQ ID NO: 2723 - RNA, 22 nt, Homo sapiens
uuggcaguaucuacuacagcua

SEQ ID NO: 2724 - RNA, 22 nt, Homo sapiens
uuggcagugcccgaugcugggg

SEQ ID NO: 2725 - RNA, 22 nt, Homo sapiens
uuggccagugucuuuuuuuccu

SEQ ID NO: 2726 - RNA, 22 nt, Homo sapiens
uuggccauaugacuugcuuugg

SEQ ID NO: 2727 - RNA, 22 nt, Homo sapiens
uuggcuuggagaguugaaaugu

SEQ ID NO: 2728 - RNA, 22 nt, Homo sapiens
uugggacuggaaggaguaaggg

SEQ ID NO: 2729 - RNA, 22 nt, Homo sapiens
uugggauaaucacaaaguaaaa

SEQ ID NO: 2730 - RNA, 22 nt, Homo sapiens
uugccuaggcuggagugcagua

SEQ ID NO: 2731 - RNA, 22 nt, Homo sapiens
uugccuaggcuggagugcagug

SEQ ID NO: 2732 - RNA, 22 nt, Homo sapiens
uugccuaggcuggaguucagug

SEQ ID NO: 2733 - RNA, 22 nt, Homo sapiens
uugccuaggcuggauugcagug

SEQ ID NO: 2734 - RNA, 22 nt, Homo sapiens
uugcgcuuuuccuauguugccc

SEQ ID NO: 2735 - RNA, 22 nt, Homo sapiens
uuggagugugagagcagccugg

SEQ ID NO: 2736 - RNA, 22 nt, Homo sapiens
uuggagugugcucauaacugcu

SEQ ID NO: 2737 - RNA, 22 nt, Homo sapiens
uuggauuuuaacaaacuaggug

SEQ ID NO: 2738 - RNA, 22 nt, Homo sapiens
uuggcaaauagguuuuauugca

SEQ ID NO: 2739 - RNA, 22 nt, Homo sapiens
uuggcaacauagugagaccccc

SEQ ID NO: 2740 - RNA, 22 nt, Homo sapiens
uuggcaaguccccaccucucuc

SEQ ID NO: 2741 - RNA, 22 nt, Homo sapiens
uuggcaauauuuacugaaguug

SEQ ID NO: 2742 - RNA, 22 nt, Homo sapiens
uuggcaaucaauucugacgucu

SEQ ID NO: 2743 - RNA, 22 nt, Homo sapiens
uuggcaauucagauucuuuuau

SEQ ID NO: 2744 - RNA, 22 nt, Homo sapiens
uuggcaauugcuaugauuugaa

SEQ ID NO: 2745 - RNA, 22 nt, Homo sapiens
uuggcagcacgcaguccagagg

SEQ ID NO: 2746 - RNA, 22 nt, Homo sapiens
uuggcagcauuccagccaagca

SEQ ID NO: 2747 - RNA, 22 nt, Homo sapiens
uugcauaagugcauucugugau

SEQ ID NO: 2748 - RNA, 23 nt, Homo sapiens
uugcauagacauccucauagauu

SEQ ID NO: 2749 - RNA, 22 nt, Homo sapiens
uugcauagaccgaugucuugga

SEQ ID NO: 2750 - RNA, 22 nt, Homo sapiens
uugcaucagcaggcauaauugg

SEQ ID NO: 2751 - RNA, 22 nt, Homo sapiens
uugcaaagaccucuucacuucc

SEQ ID NO: 2752 - RNA, 18 nt, Homo sapiens
uugcaaauucuucccugu

SEQ ID NO: 2753 - RNA, 22 nt, Homo sapiens
uugcaacuuagaaaaaucauuu

SEQ ID NO: 2754 - RNA, 22 nt, Homo sapiens
uugcaaugugaugugauuugga

SEQ ID NO: 2755 - RNA, 22 nt, Homo sapiens
uugcacaauccugugagugagu

SEQ ID NO: 2756 - RNA, 22 nt, Homo sapiens
uugcacaauggaauuuaucuuu

SEQ ID NO: 2757 - RNA, 22 nt, Homo sapiens
uugcacauggcaggugcucaau

SEQ ID NO: 2758 - RNA, 22 nt, Homo sapiens
uugcacauggcuggggaggccu

SEQ ID NO: 2759 - RNA, 22 nt, Homo sapiens
uugcacauguugaaccagcaaa

SEQ ID NO: 2760 - RNA, 22 nt, Homo sapiens
uugcacauugauuuuguauccu

SEQ ID NO: 2761 - RNA, 22 nt, Homo sapiens
uugcacauugauuuuguaucuu

SEQ ID NO: 2762 - RNA, 22 nt, Homo sapiens
uugcacauugcaccuuuuguau

SEQ ID NO: 2763 - RNA, 22 nt, Homo sapiens
uugcacauuuuuucuggcagaa

SEQ ID NO: 2764 - RNA, 20 nt, Homo sapiens
uugcagagcccaacccugga

SEQ ID NO: 2765 - RNA, 22 nt, Homo sapiens
uugcuuuguuacugcaguuucc

SEQ ID NO: 2766 - RNA, 22 nt, Homo sapiens
uuggaaaaauccaccuugaucu

SEQ ID NO: 2767 - RNA, 22 nt, Homo sapiens
uuggaaagagguguuuaugacu

SEQ ID NO: 2768 - RNA, 22 nt, Homo sapiens
uuggaaaguuguuguaguuauu

SEQ ID NO: 2769 - RNA, 22 nt, Homo sapiens
uuggaaauguguuugcauucag

SEQ ID NO: 2770 - RNA, 22 nt, Homo sapiens
uuggaagacaaugcugauucuc

SEQ ID NO: 2771 - RNA, 22 nt, Homo sapiens
uuggaagacauucugucugcua

SEQ ID NO: 2772 - RNA, 22 nt, Homo sapiens
uuggaagagaagggagauaaac

SEQ ID NO: 2773 - RNA, 22 nt, Homo sapiens
uuggaagauuacuuaguuuucu

SEQ ID NO: 2774 - RNA, 22 nt, Homo sapiens
uuggaauguacucuagccuaug

SEQ ID NO: 2775 - RNA, 22 nt, Homo sapiens
uuggacuggaacuauaccauug

SEQ ID NO: 2776 - RNA, 22 nt, Homo sapiens
uuggacuucucaaggcaauaaa

SEQ ID NO: 2777 - RNA, 22 nt, Homo sapiens
uuggagagaaaggcaguuccug

SEQ ID NO: 2778 - RNA, 22 nt, Homo sapiens
uuggagagagaggacucccggc

SEQ ID NO: 2779 - RNA, 22 nt, Homo sapiens
uuggagagucacuaguuagugc

SEQ ID NO: 2780 - RNA, 22 nt, Homo sapiens
uuggagagugauauucagaugc

SEQ ID NO: 2781 - RNA, 22 nt, Homo sapiens
uuuaaugcaucccaaaauguag

SEQ ID NO: 2782 - RNA, 22 nt, Homo sapiens
uuuaaugcgucucugaguuuug

SEQ ID NO: 2783 - RNA, 17 nt, Homo sapiens
uuuaaugcuaggacucu

SEQ ID NO: 2784 - RNA, 22 nt, Homo sapiens
uuuaaagcacggaguuuguggc

SEQ ID NO: 2785 - RNA, 22 nt, Homo sapiens
uuuaaagcaugacgagaagaag

SEQ ID NO: 2786 - RNA, 22 nt, Homo sapiens
uuuaaagcuaaaauauguuuau

SEQ ID NO: 2787 - RNA, 22 nt, Homo sapiens
uuuaaagcuccaagcaugucug

SEQ ID NO: 2788 - RNA, 22 nt, Homo sapiens
uuuaacauuggaugagaucguc

SEQ ID NO: 2789 - RNA, 22 nt, Homo sapiens
uuuaaggcaugccuguacaugc

SEQ ID NO: 2790 - RNA, 21 nt, Homo sapiens
uuggggaauggagagguuuuc

SEQ ID NO: 2791 - RNA, 22 nt, Homo sapiens
uugucuccuagacgaccaggcg

SEQ ID NO: 2792 - RNA, 22 nt, Homo sapiens
uugugaaaaaccucucguggaa

SEQ ID NO: 2793 - RNA, 22 nt, Homo sapiens
uugugaaaucuaggcagagguu

SEQ ID NO: 2794 - RNA, 22 nt, Homo sapiens
uugugaaugaugccgcaauaaa

SEQ ID NO: 2795 - RNA, 22 nt, Homo sapiens
uugugaaugaugucgcaauaaa

SEQ ID NO: 2796 - RNA, 22 nt, Homo sapiens
uugugaaugaugucgcaguaaa

SEQ ID NO: 2797 - RNA, 22 nt, Homo sapiens
uugugaauggaguagcaggauc

SEQ ID NO: 2798 - RNA, 22 nt, Homo sapiens
uugugaauggugccacaauaaa

SEQ ID NO: 2799 - RNA, 22 nt, Homo sapiens
uugugaauggugccgcaauaaa

SEQ ID NO: 2800 - RNA, 22 nt, Homo sapiens
uugugaauggugccgcaguaaa

SEQ ID NO: 2801 - RNA, 22 nt, Homo sapiens
uugugaauggugccgcgauaaa

SEQ ID NO: 2802 - RNA, 22 nt, Homo sapiens
uugugaauggugccucaguaaa

SEQ ID NO: 2803 - RNA, 22 nt, Homo sapiens
uugugaauggugcugcaguaaa

SEQ ID NO: 2804 - RNA, 22 nt, Homo sapiens
uugugaucauugucaaauagug

SEQ ID NO: 2805 - RNA, 22 nt, Homo sapiens
uugugcauaucagagguuugcu

SEQ ID NO: 2806 - RNA, 22 nt, Homo sapiens
uugugcaugaugcauacauggu

SEQ ID NO: 2807 - RNA, 22 nt, Homo sapiens
uuguaacaugcuuucacuucag

SEQ ID NO: 2808 - RNA, 22 nt, Homo sapiens
uuguaaucaacacaucauuggg

SEQ ID NO: 2809 - RNA, 22 nt, Homo sapiens
uuguacuuuuaguagagacggg

SEQ ID NO: 2810 - RNA, 22 nt, Homo sapiens
uuguauaggcucaguaagaauc

SEQ ID NO: 2811 - RNA, 22 nt, Homo sapiens
uugguucucuuagccaucuuaa

SEQ ID NO: 2812 - RNA, 22 nt, Homo sapiens
uuguaaacaucuguacauugcu

SEQ ID NO: 2813 - RNA, 22 nt, Homo sapiens
uuguaaagaucauaugcuguuc

SEQ ID NO: 2814 - RNA, 22 nt, Homo sapiens
uuguaaaguucucucccgaaaa

SEQ ID NO: 2815 - RNA, 22 nt, Homo sapiens
uugucaacaugaaacuguguuu

SEQ ID NO: 2816 - RNA, 22 nt, Homo sapiens
uugucacccuacauaacaggga

SEQ ID NO: 2817 - RNA, 22 nt, Homo sapiens
uugucauuuucagaguguuacg

SEQ ID NO: 2818 - RNA, 22 nt, Homo sapiens
uugucccauggggucuuccuuu

SEQ ID NO: 2819 - RNA, 22 nt, Homo sapiens
uuggucaggcuaaucucgaacg

SEQ ID NO: 2820 - RNA, 22 nt, Homo sapiens
uuggucaucucccuccuuuuag

SEQ ID NO: 2821 - RNA, 22 nt, Homo sapiens
uugguccccuucaaccagcugu

SEQ ID NO: 2822 - RNA, 22 nt, Homo sapiens
uugguccucccaugcucaagag

SEQ ID NO: 2823 - RNA, 22 nt, Homo sapiens
uuggucucaucaagagcagcuu

SEQ ID NO: 2824 - RNA, 22 nt, Homo sapiens
ugaaacacacauugcccuuuau

SEQ ID NO: 2825 - RNA, 22 nt, Homo sapiens
ugaaacacaccuccucuccauc

SEQ ID NO: 2826 - RNA, 22 nt, Homo sapiens
ugaaacauacacucugaugggg

SEQ ID NO: 2827 - RNA, 22 nt, Homo sapiens
ugaaagacugaaagcuuuucuu

SEQ ID NO: 2828 - RNA, 22 nt, Homo sapiens
ugaaagacugaagaauaggcau

SEQ ID NO: 2829 - RNA, 22 nt, Homo sapiens
ucuugcuuguuguucccuucau

SEQ ID NO: 2830 - RNA, 22 nt, Homo sapiens
ucuugggugaguuugugaauaa

SEQ ID NO: 2831 - RNA, 22 nt, Homo sapiens
ucuuugauuuuguuacuaagac

SEQ ID NO: 2832 - RNA, 19 nt, Homo sapiens
ucuuugcuuuucuaagagg

SEQ ID NO: 2833 - RNA, 22 nt, Homo sapiens
ucuuuggaggcgaucuguuuga

SEQ ID NO: 2834 - RNA, 22 nt, Homo sapiens
ucuuuggauggaaauuggaguc

SEQ ID NO: 2835 - RNA, 22 nt, Homo sapiens
ucuuuggucuacuuucauaugu

SEQ ID NO: 2836 - RNA, 22 nt, Homo sapiens
ucuugcacaaauuauuuuaacu

SEQ ID NO: 2837 - RNA, 22 nt, Homo sapiens
ucuugccacuucauccccuuuc

SEQ ID NO: 2838 - RNA, 22 nt, Homo sapiens
ucuucaugcuugaaauaauagc

SEQ ID NO: 2839 - RNA, 22 nt, Homo sapiens
ucugguggugaugagagacagu

SEQ ID NO: 2840 - RNA, 22 nt, Homo sapiens
ucugucuugugguuugagugcc

SEQ ID NO: 2841 - RNA, 22 nt, Homo sapiens
ucugugaaugaacacuugaaaa

SEQ ID NO: 2842 - RNA, 22 nt, Homo sapiens
ucugugcauuacacuuuucuca

SEQ ID NO: 2843 - RNA, 22 nt, Homo sapiens
ucuggcuuauuucacuuagcau

SEQ ID NO: 2844 - RNA, 18 nt, Homo sapiens
ucuggcuucuuuguucca

SEQ ID NO: 2845 - RNA, 22 nt, Homo sapiens
ucuggcuugugaacugucuucu

SEQ ID NO: 2846 - RNA, 22 nt, Homo sapiens
ucugacacagugauuaguaaau

SEQ ID NO: 2847 - RNA, 22 nt, Homo sapiens
ucugccuuuucaugugggaugg

SEQ ID NO: 2848 - RNA, 23 nt, Homo sapiens
ucugcggguguggacccuagugc

SEQ ID NO: 2849 - RNA, 22 nt, Homo sapiens
ucuggagugugaaguggauaug

SEQ ID NO: 2850 - RNA, 22 nt, Homo sapiens
ucugagaucaugucugugcugu

SEQ ID NO: 2851 - RNA, 22 nt, Homo sapiens
ucugagaugagacuuugaauuu

SEQ ID NO: 2852 - RNA, 22 nt, Homo sapiens
ucucugagaaaaguuucuccca

SEQ ID NO: 2853 - RNA, 22 nt, Homo sapiens
ucucuggauaucuacuuauguu

SEQ ID NO: 2854 - RNA, 22 nt, Homo sapiens
ucucuguuugucuguuacuggu

SEQ ID NO: 2855 - RNA, 23 nt, Homo sapiens
ucucauuccuugaaaauaaugac

SEQ ID NO: 2856 - RNA, 22 nt, Homo sapiens
ucuccauuguccagaugaggaa

SEQ ID NO: 2857 - RNA, 22 nt, Homo sapiens
ugaacugagacuagacuuguuc

SEQ ID NO: 2858 - RNA, 22 nt, Homo sapiens
ugaagacauuuuugggugugua

SEQ ID NO: 2859 - RNA, 21 nt, Homo sapiens
ugaacacuggacugagugucc

SEQ ID NO: 2860 - RNA, 22 nt, Homo sapiens
ugaacagcacguuuauucagaa

SEQ ID NO: 2861 - RNA, 22 nt, Homo sapiens
ugaacagucaucucucuuguau

SEQ ID NO: 2862 - RNA, 21 nt, Homo sapiens
ugaaccccugcucucaagaaa

SEQ ID NO: 2863 - RNA, 22 nt, Homo sapiens
ugaaaugaucaguuugguuacu

SEQ ID NO: 2864 - RNA, 21 nt, Homo sapiens
ugaaaugcaugugcacauuaa

SEQ ID NO: 2865 - RNA, 22 nt, Homo sapiens
ugaaaugccuuuaaugaauuua

SEQ ID NO: 2866 - RNA, 22 nt, Homo sapiens
ugaaauguuaaacaaguggcuc

SEQ ID NO: 2867 - RNA, 22 nt, Homo sapiens
ugaaauuauucuuaccaaggug

SEQ ID NO: 2868 - RNA, 22 nt, Homo sapiens
ugaaauuguuugcaaggauagg

SEQ ID NO: 2869 - RNA, 22 nt, Homo sapiens
ugaaagguauagguucuggagg

SEQ ID NO: 2870 - RNA, 22 nt, Homo sapiens
ugaaagguuuaauucugugaga

SEQ ID NO: 2871 - RNA, 22 nt, Homo sapiens
ugaaagcuacaggaaaguauuu

SEQ ID NO: 2872 - RNA, 22 nt, Homo sapiens
ugaaagcuacagucuccuagga

SEQ ID NO: 2873 - RNA, 22 nt, Homo sapiens
ugaaaguuauauugugaaauuc

SEQ ID NO: 2874 - RNA, 22 nt, Homo sapiens
ugaaauacuuaauuucuccaug

SEQ ID NO: 2875 - RNA, 22 nt, Homo sapiens
ucuuuuggguauggagccauca

SEQ ID NO: 2876 - RNA, 22 nt, Homo sapiens
ugaaaucauguaguuauugcaa

SEQ ID NO: 2877 - RNA, 22 nt, Homo sapiens
ugaauauguuucuaaaagugca

SEQ ID NO: 2878 - RNA, 22 nt, Homo sapiens
ugaaucauuucuugucuucagu

SEQ ID NO: 2879 - RNA, 22 nt, Homo sapiens
ugaagugaagacucacagaagg

SEQ ID NO: 2880 - RNA, 22 nt, Homo sapiens
ugaauaguuugacagaacucuu

SEQ ID NO: 2881 - RNA, 22 nt, Homo sapiens
ugaauacugugcaaaggauuug

SEQ ID NO: 2882 - RNA, 22 nt, Homo sapiens
ugaauagacacuaaagacugua

SEQ ID NO: 2883 - RNA, 22 nt, Homo sapiens
ugaaguaauguuuuauucuauu

SEQ ID NO: 2884 - RNA, 22 nt, Homo sapiens
ugaagcuaacuugauugugaug

SEQ ID NO: 2885 - RNA, 22 nt, Homo sapiens
ugaaggacauaaggcagaguga

SEQ ID NO: 2886 - RNA, 22 nt, Homo sapiens
ugaaggacauucuaugguagau

SEQ ID NO: 2887 - RNA, 22 nt, Homo sapiens
ugaaugcuucaugucugggcug

SEQ ID NO: 2888 - RNA, 22 nt, Homo sapiens
ugaauguaagaugucugcuggu

SEQ ID NO: 2889 - RNA, 18 nt, Homo sapiens
ugacaucauuuagaaagg

SEQ ID NO: 2890 - RNA, 19 nt, Homo sapiens
ugacaugaaacccaagauc

SEQ ID NO: 2891 - RNA, 22 nt, Homo sapiens
ugacaugaugagcaauaauggc

SEQ ID NO: 2892 - RNA, 22 nt, Homo sapiens
ugacaugauuguauauuuagaa

SEQ ID NO: 2893 - RNA, 22 nt, Homo sapiens
ugacauggagguggaggaagau

SEQ ID NO: 2894 - RNA, 22 nt, Homo sapiens
ugacauuacagucacuugcugu

SEQ ID NO: 2895 - RNA, 22 nt, Homo sapiens
ugacaacugauuaacuccuuua

SEQ ID NO: 2896 - RNA, 20 nt, Homo sapiens
ugacaagugagaauuauggg

SEQ ID NO: 2897 - RNA, 19 nt, Homo sapiens
ugacacuguuggugggagg

SEQ ID NO: 2898 - RNA, 21 nt, Homo sapiens
ugacagaaaauugaguuugcu

SEQ ID NO: 2899 - RNA, 17 nt, Homo sapiens
ugacagaaacuuguugu

SEQ ID NO: 2900 - RNA, 22 nt, Homo sapiens
ugacagagaagcauugaguuca

SEQ ID NO: 2901 - RNA, 22 nt, Homo sapiens
ugacagcugaagauguugaacc

SEQ ID NO: 2902 - RNA, 22 nt, Homo sapiens
ugacagguuggaauuaugggag

SEQ ID NO: 2903 - RNA, 23 nt, Homo sapiens
ugacagucucccgauggcuaggc

SEQ ID NO: 2904 - RNA, 22 nt, Homo sapiens
ugacauagcuauuaagugaugc

SEQ ID NO: 2905 - RNA, 22 nt, Homo sapiens
ugagaaugacugggcaugcugc

SEQ ID NO: 2906 - RNA, 22 nt, Homo sapiens
ugagaaugaugauuuccaguuu

SEQ ID NO: 2907 - RNA, 22 nt, Homo sapiens
ugagaaugcagaaucucgugca

SEQ ID NO: 2908 - RNA, 22 nt, Homo sapiens
ugagacacugaauccggccuga

SEQ ID NO: 2909 - RNA, 22 nt, Homo sapiens
ugagacacuucccagaucccuu

SEQ ID NO: 2910 - RNA, 22 nt, Homo sapiens
ugagacgaagucuugcucuguu

SEQ ID NO: 2911 - RNA, 22 nt, Homo sapiens
ugagacggagucuugcucuguc

SEQ ID NO: 2912 - RNA, 22 nt, Homo sapiens
ugagacugguuaauugauaaag

SEQ ID NO: 2913 - RNA, 22 nt, Homo sapiens
ugagagacagacauuaucuuau

SEQ ID NO: 2914 - RNA, 22 nt, Homo sapiens
ugacggaggcauuggaagcuug

SEQ ID NO: 2915 - RNA, 22 nt, Homo sapiens
ugacuagagcaauuggaaacaa

SEQ ID NO: 2916 - RNA, 22 nt, Homo sapiens
ugacuaggaaauuagaacuuuu

SEQ ID NO: 2917 - RNA, 22 nt, Homo sapiens
ugacuaggaggcuggaggauga

SEQ ID NO: 2918 - RNA, 22 nt, Homo sapiens
ugacuagggacauucuuccacg

SEQ ID NO: 2919 - RNA, 21 nt, Homo sapiens
ugacuagggauaugugccacu

SEQ ID NO: 2920 - RNA, 22 nt, Homo sapiens
ugacuagggcucuaaacagcuc

SEQ ID NO: 2921 - RNA, 22 nt, Homo sapiens
ugacuaggggcccuggcuucuu

SEQ ID NO: 2922 - RNA, 22 nt, Homo sapiens
ugacuagugcccuuugcugccu

SEQ ID NO: 2923 - RNA, 22 nt, Homo sapiens
ugacuauaggauaacaugcauu

SEQ ID NO: 2924 - RNA, 22 nt, Homo sapiens
ugacucaguuguuagucuucau

SEQ ID NO: 2925 - RNA, 22 nt, Homo sapiens
ugacucaguuucucagguagua

SEQ ID NO: 2926 - RNA, 18 nt, Homo sapiens
ugacuguccagguggacc

SEQ ID NO: 2927 - RNA, 20 nt, Homo sapiens
ugacuuguccgagguccccc

SEQ ID NO: 2928 - RNA, 22 nt, Homo sapiens
ugagaacagauggcuuuauuau

SEQ ID NO: 2929 - RNA, 22 nt, Homo sapiens
ugagaacaugcacuugagguug

SEQ ID NO: 2930 - RNA, 22 nt, Homo sapiens
ugagaacuaaaaugugguauau

SEQ ID NO: 2931 - RNA, 22 nt, Homo sapiens
ugagaacugguagcacuuguga

SEQ ID NO: 2932 - RNA, 22 nt, Homo sapiens
ugagaacuuauggugauuuuuu

SEQ ID NO: 2933 - RNA, 22 nt, Homo sapiens
ugagaagcauaccagugucugu

SEQ ID NO: 2934 - RNA, 22 nt, Homo sapiens
ugagaggugauaaagcaagggu

SEQ ID NO: 2935 - RNA, 22 nt, Homo sapiens
ugagaguauaaauugaugcagc

SEQ ID NO: 2936 - RNA, 22 nt, Homo sapiens
ugagauaaggaaauugaggcuc

SEQ ID NO: 2937 - RNA, 22 nt, Homo sapiens
ugagauaauuuacuuguugagg

SEQ ID NO: 2938 - RNA, 22 nt, Homo sapiens
ugagauaggaucuugcucuguu

SEQ ID NO: 2939 - RNA, 22 nt, Homo sapiens
ugagauagggucucacucuguc

SEQ ID NO: 2940 - RNA, 22 nt, Homo sapiens
ugagauauugggaguaauguca

SEQ ID NO: 2941 - RNA, 22 nt, Homo sapiens
ugagaucaacugagucagagca

SEQ ID NO: 2942 - RNA, 22 nt, Homo sapiens
ugagaucaaggugggcccuggg

SEQ ID NO: 2943 - RNA, 22 nt, Homo sapiens
ugagaucacgccacugcacucc

SEQ ID NO: 2944 - RNA, 22 nt, Homo sapiens
ugagaucacuaagagguaaugg

SEQ ID NO: 2945 - RNA, 22 nt, Homo sapiens
ugagaucaugccacugcacuuc

SEQ ID NO: 2946 - RNA, 22 nt, Homo sapiens
ugagaucugucuuuauaguauu

SEQ ID NO: 2947 - RNA, 22 nt, Homo sapiens
ugagaugaacuugauuguuuua

SEQ ID NO: 2948 - RNA, 22 nt, Homo sapiens
ugagaugaagcuagaagaaugg

SEQ ID NO: 2949 - RNA, 22 nt, Homo sapiens
ugagaugaagugauguaaaaca

SEQ ID NO: 2950 - RNA, 22 nt, Homo sapiens
ugagaugagaaucaguucuaau

SEQ ID NO: 2951 - RNA, 22 nt, Homo sapiens
ugagaugagagaaugcuugccu

SEQ ID NO: 2952 - RNA, 22 nt, Homo sapiens
ugagaugagucucgcucuguca

SEQ ID NO: 2953 - RNA, 22 nt, Homo sapiens
ugagaugaguugcgcucugucg

SEQ ID NO: 2954 - RNA, 22 nt, Homo sapiens
ugagaugauagauauguuaauu

SEQ ID NO: 2955 - RNA, 22 nt, Homo sapiens
ugagaugcauauucuggcuccu

SEQ ID NO: 2956 - RNA, 22 nt, Homo sapiens
ugagaugcuccucuugcaaagc

SEQ ID NO: 2957 - RNA, 22 nt, Homo sapiens
ugagaugcuuguaaauucauuu

SEQ ID NO: 2958 - RNA, 22 nt, Homo sapiens
ugagauggagucuugucgccua

SEQ ID NO: 2959 - RNA, 22 nt, Homo sapiens
ugagauggguaauuaaauggug

SEQ ID NO: 2960 - RNA, 23 nt, Homo sapiens
ugagaugucugauugcgaggguc

SEQ ID NO: 2961 - RNA, 22 nt, Homo sapiens
ugagaugugaagaucacaugaa

SEQ ID NO: 2962 - RNA, 21 nt, Homo sapiens
ugagaugugaccagggcauca

SEQ ID NO: 2963 - RNA, 22 nt, Homo sapiens
ugagaugugaucaccugaaggg

SEQ ID NO: 2964 - RNA, 22 nt, Homo sapiens
ugagauguggcuagagagguug

SEQ ID NO: 2965 - RNA, 22 nt, Homo sapiens
ugagaugugugcauucaacuca

SEQ ID NO: 2966 - RNA, 22 nt, Homo sapiens
ugagauuaaucuuuaaguaaga

SEQ ID NO: 2967 - RNA, 23 nt, Homo sapiens
ugagauuacccagaaagaguaua

SEQ ID NO: 2968 - RNA, 23 nt, Homo sapiens
ugagauuauaaucuuuuacuucu

SEQ ID NO: 2969 - RNA, 22 nt, Homo sapiens
ugagauuauauuucuuaacaga

SEQ ID NO: 2970 - RNA, 22 nt, Homo sapiens
ugagauuaucuugaucuugaaa

SEQ ID NO: 2971 - RNA, 22 nt, Homo sapiens
ugagauuguaucugcaaugugu

SEQ ID NO: 2972 - RNA, 22 nt, Homo sapiens
ugagcacauuuacaucaguucc

SEQ ID NO: 2973 - RNA, 22 nt, Homo sapiens
ugagcagaaagcugcaaggucg

SEQ ID NO: 2974 - RNA, 22 nt, Homo sapiens
ugagcagagaagugcccugcgc

SEQ ID NO: 2975 - RNA, 22 nt, Homo sapiens
ugagcagagggagaaguaaauu

SEQ ID NO: 2976 - RNA, 22 nt, Homo sapiens
ugaugacacugauuucuucaau

SEQ ID NO: 2977 - RNA, 22 nt, Homo sapiens
ugaugacauugucacagucuga

SEQ ID NO: 2978 - RNA, 22 nt, Homo sapiens
ugaucucagcucacugguugaa

SEQ ID NO: 2979 - RNA, 22 nt, Homo sapiens
ugaggucauguucugucagguu

SEQ ID NO: 2980 - RNA, 22 nt, Homo sapiens
ugagguuauuuguucaagaagu

SEQ ID NO: 2981 - RNA, 22 nt, Homo sapiens
ugagguuggguaauuuaugaag

SEQ ID NO: 2982 - RNA, 22 nt, Homo sapiens
ugagguugguauuacugucucu

SEQ ID NO: 2983 - RNA, 22 nt, Homo sapiens
ugauauauugaaugaugaaaca

SEQ ID NO: 2984 - RNA, 22 nt, Homo sapiens
ugauauggcuuggcuaugucac

SEQ ID NO: 2985 - RNA, 21 nt, Homo sapiens
ugauaugguuuggauaugugu

SEQ ID NO: 2986 - RNA, 22 nt, Homo sapiens
ugauauguaacuacuccuuaua

SEQ ID NO: 2987 - RNA, 22 nt, Homo sapiens
ugagacauauuauacugcuuuu

SEQ ID NO: 2988 - RNA, 22 nt, Homo sapiens
ugagaggugaauggcaggcuca

SEQ ID NO: 2989 - RNA, 22 nt, Homo sapiens
ugaggaacuagcuacccuaaua

SEQ ID NO: 2990 - RNA, 22 nt, Homo sapiens
ugaggagugaacuauuucugau

SEQ ID NO: 2991 - RNA, 22 nt, Homo sapiens
ugaggauaguguugaaggcagg

SEQ ID NO: 2992 - RNA, 22 nt, Homo sapiens
ugaggcacucccuagcggggug

SEQ ID NO: 2993 - RNA, 22 nt, Homo sapiens
ugaguagaacuccuggagaugu

SEQ ID NO: 2994 - RNA, 22 nt, Homo sapiens
ugaguagagaauucagcuaagg

SEQ ID NO: 2995 - RNA, 22 nt, Homo sapiens
ugaguauguuuagaaguaaagg

SEQ ID NO: 2996 - RNA, 22 nt, Homo sapiens
ugagucuguucucacauugcua

SEQ ID NO: 2997 - RNA, 22 nt, Homo sapiens
ugaguuagguaauaauaaauau

SEQ ID NO: 2998 - RNA, 22 nt, Homo sapiens
ugaguucuuuguagauucugug

SEQ ID NO: 2999 - RNA, 22 nt, Homo sapiens
ugauaacauuucuucugguaca

SEQ ID NO: 3000 - RNA, 17 nt, Homo sapiens
ugauaagugugagguga

SEQ ID NO: 3001 - RNA, 22 nt, Homo sapiens
ugauacugugcauuagaggcua

SEQ ID NO: 3002 - RNA, 22 nt, Homo sapiens
ugauagaucugggcaaaguaaa

SEQ ID NO: 3003 - RNA, 22 nt, Homo sapiens
ugauaggucuguuuugaaaagg

SEQ ID NO: 3004 - RNA, 22 nt, Homo sapiens
ugauugcacaccugcacucaag

SEQ ID NO: 3005 - RNA, 20 nt, Homo sapiens
ugaugcaaaucuuuaaaagu

SEQ ID NO: 3006 - RNA, 19 nt, Homo sapiens
ugcaaauucuaaaaacuga

SEQ ID NO: 3007 - RNA, 22 nt, Homo sapiens
ugauuugucugcaggaauagug

SEQ ID NO: 3008 - RNA, 22 nt, Homo sapiens
ugauuuguuucaggaguuuucu

SEQ ID NO: 3009 - RNA, 22 nt, Homo sapiens
ugcaaaugcugcuauuucucuu

SEQ ID NO: 3010 - RNA, 22 nt, Homo sapiens
ugcaaauguuaggugucauuau

SEQ ID NO: 3011 - RNA, 22 nt, Homo sapiens
ugaugcuaccuaaagcaaccau

SEQ ID NO: 3012 - RNA, 22 nt, Homo sapiens
ugauggcaauggcauucauuuu

SEQ ID NO: 3013 - RNA, 22 nt, Homo sapiens
ugauggcacagugaguuccagg

SEQ ID NO: 3014 - RNA, 22 nt, Homo sapiens
ugaugguuuuaaaaagaggagu

SEQ ID NO: 3015 - RNA, 22 nt, Homo sapiens
ugaugucuugcaggcacgagau

SEQ ID NO: 3016 - RNA, 22 nt, Homo sapiens
ugaugugucaucugagagagug

SEQ ID NO: 3017 - RNA, 22 nt, Homo sapiens
ugauguguuuuguaguucaacu

SEQ ID NO: 3018 - RNA, 17 nt, Homo sapiens
ugcaauuuaagcuagau

SEQ ID NO: 3019 - RNA, 21 nt, Homo sapiens
ugcagccauucagcccuaugc

SEQ ID NO: 3020 - RNA, 22 nt, Homo sapiens
ugcagagaaacauuuuguauuu

SEQ ID NO: 3021 - RNA, 19 nt, Homo sapiens
ugcagcaauguaaaagaca

SEQ ID NO: 3022 - RNA, 22 nt, Homo sapiens
ugcgccauugcacuccagccug

SEQ ID NO: 3023 - RNA, 22 nt, Homo sapiens
ugcgccauugcauuccagccug

SEQ ID NO: 3024 - RNA, 22 nt, Homo sapiens
ugcuaugucagccaggcugguc

SEQ ID NO: 3025 - RNA, 21 nt, Homo sapiens
ugcuauguuguccaggcuggc

SEQ ID NO: 3026 - RNA, 22 nt, Homo sapiens
ugcucaguuuaaaacuuuugag

SEQ ID NO: 3027 - RNA, 22 nt, Homo sapiens
ugcugcaaacaggcaucugugg

SEQ ID NO: 3028 - RNA, 22 nt, Homo sapiens
ugcugcaaacaugagaggaagu

SEQ ID NO: 3029 - RNA, 22 nt, Homo sapiens
ugcugcaaucucggcacuuugg

SEQ ID NO: 3030 - RNA, 22 nt, Homo sapiens
ugcuuguguucagguaaccuuu

SEQ ID NO: 3031 - RNA, 22 nt, Homo sapiens
ugcuuugguagaaaucuuuggu

SEQ ID NO: 3032 - RNA, 21 nt, Homo sapiens
ugcuuuggucauacuucuucc

SEQ ID NO: 3033 - RNA, 22 nt, Homo sapiens
ugcuguguugcuggcuuaaaga

SEQ ID NO: 3034 - RNA, 22 nt, Homo sapiens
ugcuguuguuugaugaaguaau

SEQ ID NO: 3035 - RNA, 23 nt, Homo sapiens
uggaaguauggaggaggcagaau

SEQ ID NO: 3036 - RNA, 22 nt, Homo sapiens
uggaagccuagauucuuuucuu

SEQ ID NO: 3037 - RNA, 22 nt, Homo sapiens
uggaagguaaguuuugagcauu

SEQ ID NO: 3038 - RNA, 22 nt, Homo sapiens
uggaaguaaccaugaauggaau

SEQ ID NO: 3039 - RNA, 20 nt, Homo sapiens
uggaaguaagaauauaggug

SEQ ID NO: 3040 - RNA, 22 nt, Homo sapiens
uggaaguaaucaugagguagca

SEQ ID NO: 3041 - RNA, 22 nt, Homo sapiens
uggaaguagauagauuguguca

SEQ ID NO: 3042 - RNA, 22 nt, Homo sapiens
uggaaguauagauaauugaaag

SEQ ID NO: 3043 - RNA, 20 nt, Homo sapiens
uggaaaguaagucaugauau

SEQ ID NO: 3044 - RNA, 22 nt, Homo sapiens
uggaaaguacugagguccaccu

SEQ ID NO: 3045 - RNA, 22 nt, Homo sapiens
uggaaaguacuugaguuuguau

SEQ ID NO: 3046 - RNA, 22 nt, Homo sapiens
uggaaaguaguucuaaucuaag

SEQ ID NO: 3047 - RNA, 22 nt, Homo sapiens
uggaaaguccaagccaaccggg

SEQ ID NO: 3048 - RNA, 22 nt, Homo sapiens
uggaaaucuaaguuuggauuga

SEQ ID NO: 3049 - RNA, 22 nt, Homo sapiens
uggaaauuaacagggauugucc

SEQ ID NO: 3050 - RNA, 20 nt, Homo sapiens
uggaaauuaaccuuucaggu

SEQ ID NO: 3051 - RNA, 19 nt, Homo sapiens
uggaacugauucaguucug

SEQ ID NO: 3052 - RNA, 20 nt, Homo sapiens
uggaacuuaauugauggaca

SEQ ID NO: 3053 - RNA, 19 nt, Homo sapiens
ugccauguagcacaugguc

SEQ ID NO: 3054 - RNA, 22 nt, Homo sapiens
ugcauguucuuacucauacaug

SEQ ID NO: 3055 - RNA, 19 nt, Homo sapiens
ugcauugucugggaaaugg

SEQ ID NO: 3056 - RNA, 22 nt, Homo sapiens
ugcauuguuuagaaacacuggg

SEQ ID NO: 3057 - RNA, 19 nt, Homo sapiens
ugccaagaaagucagcuua

SEQ ID NO: 3058 - RNA, 23 nt, Homo sapiens
ugccuagaugcugcccugggaca

SEQ ID NO: 3059 - RNA, 22 nt, Homo sapiens
ugccuaguagaaggugaacaug

SEQ ID NO: 3060 - RNA, 22 nt, Homo sapiens
ugccuaguggaaggagagcaaa

SEQ ID NO: 3061 - RNA, 22 nt, Homo sapiens
ugcagugucaauaauaauuagu

SEQ ID NO: 3062 - RNA, 22 nt, Homo sapiens
ugcaguuuaggaacugguaaca

SEQ ID NO: 3063 - RNA, 22 nt, Homo sapiens
ugcauccauucuagacucaucu

SEQ ID NO: 3064 - RNA, 22 nt, Homo sapiens
ugcaugaugcugagauuuggga

SEQ ID NO: 3065 - RNA, 22 nt, Homo sapiens
ugcauacacaagcauacaugua

SEQ ID NO: 3066 - RNA, 18 nt, Homo sapiens
ugcauacuaucugauuuu

SEQ ID NO: 3067 - RNA, 22 nt, Homo sapiens
ugcauauguugagaugcauauu

SEQ ID NO: 3068 - RNA, 22 nt, Homo sapiens
ugcauauucgaguuauuuuggg

SEQ ID NO: 3069 - RNA, 21 nt, Homo sapiens
ugcauauuggaacuuucucuc

SEQ ID NO: 3070 - RNA, 22 nt, Homo sapiens
uggacugagauuucagcugcca

SEQ ID NO: 3071 - RNA, 22 nt, Homo sapiens
uggacuguaauagagaacagaa

SEQ ID NO: 3072 - RNA, 22 nt, Homo sapiens
uggagaacauucauuugcaaga

SEQ ID NO: 3073 - RNA, 22 nt, Homo sapiens
uggagacugaucccucuuuccu

SEQ ID NO: 3074 - RNA, 22 nt, Homo sapiens
uggagagucauuuauaguauuu

SEQ ID NO: 3075 - RNA, 22 nt, Homo sapiens
uggagagugauaaguaaaugga

SEQ ID NO: 3076 - RNA, 19 nt, Homo sapiens
uggagucaucaugcugcua

SEQ ID NO: 3077 - RNA, 22 nt, Homo sapiens
uggagucuugaugauuuucaaa

SEQ ID NO: 3078 - RNA, 20 nt, Homo sapiens
uggagugaagguucuggacc

SEQ ID NO: 3079 - RNA, 22 nt, Homo sapiens
uggagugagaacuucaaugaug

SEQ ID NO: 3080 - RNA, 22 nt, Homo sapiens
uggagugauaugguuauauggg

SEQ ID NO: 3081 - RNA, 22 nt, Homo sapiens
uggagugcaauggcaccaucuu

SEQ ID NO: 3082 - RNA, 22 nt, Homo sapiens
uggaguguaaauuaguucagcc

SEQ ID NO: 3083 - RNA, 22 nt, Homo sapiens
uggaguguagaagccagccucc

SEQ ID NO: 3084 - RNA, 22 nt, Homo sapiens
uggaguguguugcagaugaagg

SEQ ID NO: 3085 - RNA, 20 nt, Homo sapiens
uggaguuugaguucuuggag

SEQ ID NO: 3086 - RNA, 19 nt, Homo sapiens
uggaaugaaauguuagggg

SEQ ID NO: 3087 - RNA, 18 nt, Homo sapiens
uggacagugauuauccau

SEQ ID NO: 3088 - RNA, 22 nt, Homo sapiens
uggacauguacauauguguaug

SEQ ID NO: 3089 - RNA, 20 nt, Homo sapiens
uggaccagagagguggggac

SEQ ID NO: 3090 - RNA, 22 nt, Homo sapiens
uggaagucuucauuauguauag

SEQ ID NO: 3091 - RNA, 22 nt, Homo sapiens
uggaagugaacaaccaaggcag

SEQ ID NO: 3092 - RNA, 22 nt, Homo sapiens
uggaagugucugugcccagcuc

SEQ ID NO: 3093 - RNA, 22 nt, Homo sapiens
uggaauaucaugagaguuuguu

SEQ ID NO: 3094 - RNA, 22 nt, Homo sapiens
uggaaugguaucuuguuggggu

SEQ ID NO: 3095 - RNA, 22 nt, Homo sapiens
uggaauguaacuugaaacuuuu

SEQ ID NO: 3096 - RNA, 22 nt, Homo sapiens
uggaauguagcguugacacgag

SEQ ID NO: 3097 - RNA, 22 nt, Homo sapiens
uggaaugucagcuacaagaggg

SEQ ID NO: 3098 - RNA, 22 nt, Homo sapiens
uggaaugugaauaacuuccuuc

SEQ ID NO: 3099 - RNA, 21 nt, Homo sapiens
uggaauuaauggagagguguu

SEQ ID NO: 3100 - RNA, 22 nt, Homo sapiens
uggaauuaauuaaaauauacug

SEQ ID NO: 3101 - RNA, 22 nt, Homo sapiens
uggauaguaaagucagauuccc

SEQ ID NO: 3102 - RNA, 22 nt, Homo sapiens
uggauaguaauaaacauauagg

SEQ ID NO: 3103 - RNA, 18 nt, Homo sapiens
uggauaguuguuggcaga

SEQ ID NO: 3104 - RNA, 22 nt, Homo sapiens
uggauaguuuacugaagagugg

SEQ ID NO: 3105 - RNA, 22 nt, Homo sapiens
uggauggagaggcuugugaugc

SEQ ID NO: 3106 - RNA, 22 nt, Homo sapiens
uggauguacagucaguauuugu

SEQ ID NO: 3107 - RNA, 22 nt, Homo sapiens
uggauugaaagcuuuaauauug

SEQ ID NO: 3108 - RNA, 22 nt, Homo sapiens
uggauugagaagcuguggcuca

SEQ ID NO: 3109 - RNA, 22 nt, Homo sapiens
uggcaaaaaucacaaguaccuu

SEQ ID NO: 3110 - RNA, 22 nt, Homo sapiens
uggcaaaucagaggcauggaca

SEQ ID NO: 3111 - RNA, 22 nt, Homo sapiens
uggcaaaugaaagaaagccagu

SEQ ID NO: 3112 - RNA, 21 nt, Homo sapiens
uggcaacauggauggauucug

SEQ ID NO: 3113 - RNA, 23 nt, Homo sapiens
uggcaagaauucuuaccgugugg

SEQ ID NO: 3114 - RNA, 22 nt, Homo sapiens
uggcaagaccccaucucuacaa

SEQ ID NO: 3115 - RNA, 22 nt, Homo sapiens
uggcaagagauaugugucuaua

SEQ ID NO: 3116 - RNA, 22 nt, Homo sapiens
uggcaagauuguuccgguuugg

SEQ ID NO: 3117 - RNA, 18 nt, Homo sapiens
uggcaagugccauacggu

SEQ ID NO: 3118 - RNA, 22 nt, Homo sapiens
uggcaauaaaaugcaguuacuu

SEQ ID NO: 3119 - RNA, 18 nt, Homo sapiens
uggcaauaugguucuacc

SEQ ID NO: 3120 - RNA, 19 nt, Homo sapiens
uggcaaugucagcagagau

SEQ ID NO: 3121 - RNA, 22 nt, Homo sapiens
uggcaauguggaaugguccagg

SEQ ID NO: 3122 - RNA, 19 nt, Homo sapiens
uggcacauguauacauaug

SEQ ID NO: 3123 - RNA, 22 nt, Homo sapiens
uggcagugggagauauuuuauu

SEQ ID NO: 3124 - RNA, 22 nt, Homo sapiens
uggcaguuuacaaaugccauga

SEQ ID NO: 3125 - RNA, 22 nt, Homo sapiens
uggcauauaauauagaagacua

SEQ ID NO: 3126 - RNA, 23 nt, Homo sapiens
uggcauuuuaguuagcuucagug

SEQ ID NO: 3127 - RNA, 23 nt, Homo sapiens
uggaggacaagcauggauaguga

SEQ ID NO: 3128 - RNA, 22 nt, Homo sapiens
uggcagcugcuucaugggaugc

SEQ ID NO: 3129 - RNA, 22 nt, Homo sapiens
uggcaccauccaggugucucua

SEQ ID NO: 3130 - RNA, 20 nt, Homo sapiens
uggcaccugacagauagcca

SEQ ID NO: 3131 - RNA, 22 nt, Homo sapiens
uggcagauaggauacaggacua

SEQ ID NO: 3132 - RNA, 22 nt, Homo sapiens
uggcagaugagccgcgcuccaa

SEQ ID NO: 3133 - RNA, 22 nt, Homo sapiens
uggcgagaugcucgugugcaga

SEQ ID NO: 3134 - RNA, 19 nt, Homo sapiens
uggcuagagcagauauccu

SEQ ID NO: 3135 - RNA, 22 nt, Homo sapiens
uggcuagaugagauguacugca

SEQ ID NO: 3136 - RNA, 21 nt, Homo sapiens
uggcuauuucuguggcauaca

SEQ ID NO: 3137 - RNA, 22 nt, Homo sapiens
uggcuccguuguacaggcugga

SEQ ID NO: 3138 - RNA, 22 nt, Homo sapiens
ugggcggagacgugcagccgcc

SEQ ID NO: 3139 - RNA, 22 nt, Homo sapiens
ugggagacuacauuuuuaacaa

SEQ ID NO: 3140 - RNA, 22 nt, Homo sapiens
uggcucuuucuagacuuaauua

SEQ ID NO: 3141 - RNA, 20 nt, Homo sapiens
uggcucuuugcugcuaaagu

SEQ ID NO: 3142 - RNA, 22 nt, Homo sapiens
uggcuugauggcacaagguuuc

SEQ ID NO: 3143 - RNA, 22 nt, Mycobacterium avium subsp. paratuberculosis
uggcuggccgucaucaccggcg

SEQ ID NO: 3144 - RNA, 22 nt, Mycobacterium avium subsp. paratuberculosis
uggcugaccagaaagucgacca

SEQ ID NO: 3145 - RNA, 22 nt, Mycobacterium avium subsp. paratuberculosis
ugggccaacggaauguagucgg

SEQ ID NO: 3146 - RNA, 22 nt, Mycobacterium avium subsp. paratuberculosis
ugggccgacggcggcauccggc

SEQ ID NO: 3147 - RNA, 22 nt, Mycobacterium avium subsp. paratuberculosis
ugggcggugguccucaaugcgc

SEQ ID NO: 3148 - RNA, 22 nt, Mycobacterium avium subsp. paratuberculosis
ugggcucaccaggacgucgcgc

SEQ ID NO: 3149 - RNA, 22 nt, Mycobacterium avium subsp. paratuberculosis
ugggcucagccugcuggucgaa

SEQ ID NO: 3150 - RNA, 22 nt, Mycobacterium avium subsp. paratuberculosis
ugggcgcacuuucgccggacgc

SEQ ID NO: 3151 - RNA, 22 nt, Mycobacterium avium subsp. paratuberculosis
ugggcgcgugcguugcagccgg

SEQ ID NO: 3152 - RNA, 22 nt, Mycobacterium avium subsp. paratuberculosis
uggcguggcccugcugcacgcg

SEQ ID NO: 3153 - RNA, 22 nt, Mycobacterium avium subsp. paratuberculosis
uggccagccggccguguagcuc

SEQ ID NO: 3154 - RNA, 22 nt, Mycobacterium avium subsp. paratuberculosis
uggccagcuugguggugucggu

SEQ ID NO: 3155 - RNA, 22 nt, Mycobacterium avium subsp. paratuberculosis
uggcgcaauuggcggacaugcu

SEQ ID NO: 3156 - RNA, 23 nt, Mycobacterium avium subsp. paratuberculosis
uggcaggccggccugaugguggc

SEQ ID NO: 3157 - RNA, 22 nt, Mycobacterium avium subsp. paratuberculosis
uggcaccaagaaguggggggug

SEQ ID NO: 3158 - RNA, 22 nt, Mycobacterium avium subsp. paratuberculosis
uggacgcgggccugucccacgu

SEQ ID NO: 3159 - RNA, 22 nt, Mycobacterium avium subsp. paratuberculosis
ugcaggauccgccaggcgacuu

SEQ ID NO: 3160 - RNA, 22 nt, Mycobacterium avium subsp. paratuberculosis
ugcaggccgucgcggguguugu

SEQ ID NO: 3161 - RNA, 22 nt, Mycobacterium avium subsp. paratuberculosis
ugcgcagcccugggaagcggcc

SEQ ID NO: 3162 - RNA, 22 nt, Mycobacterium avium subsp. paratuberculosis
ugcgccaccaagauaucgggcg

SEQ ID NO: 3163 - RNA, 22 nt, Mycobacterium avium subsp. paratuberculosis
ugcgccaccgguggaacggucg

SEQ ID NO: 3164 - RNA, 22 nt, Mycobacterium avium subsp. paratuberculosis
ugcgcgcggaccugcuccacca

SEQ ID NO: 3165 - RNA, 22 nt, Mycobacterium avium subsp. paratuberculosis
ugcccaccacgccgucgggcca

SEQ ID NO: 3166 - RNA, 22 nt, Mycobacterium avium subsp. paratuberculosis
ugccccuacuugucccgcucgg

SEQ ID NO: 3167 - RNA, 22 nt, Mycobacterium avium subsp. paratuberculosis
ugcccggcggugcgccuaccgg

SEQ ID NO: 3168 - RNA, 22 nt, Mycobacterium avium subsp. paratuberculosis
ugcccggcugggaagccggcau

SEQ ID NO: 3169 - RNA, 22 nt, Mycobacterium avium subsp. paratuberculosis
ugcccggcuucaucgacucgac

SEQ ID NO: 3170 - RNA, 22 nt, Mycobacterium avium subsp. paratuberculosis
ugcugggcggugccgcagccga

SEQ ID NO: 3171 - RNA, 22 nt, Mycobacterium avium subsp. paratuberculosis
ugcugggcucgcugcggaucgg

SEQ ID NO: 3172 - RNA, 22 nt, Mycobacterium avium subsp. paratuberculosis
ugcugcgcacuuugccgcuccu

SEQ ID NO: 3173 - RNA, 22 nt, Mycobacterium avium subsp. paratuberculosis
ugcuggucgagcggaugcaguc

SEQ ID NO: 3174 - RNA, 22 nt, Mycobacterium avium subsp. paratuberculosis
ugcuuggacuccucggggaugu

SEQ ID NO: 3175 - RNA, 22 nt, Mycobacterium avium subsp. paratuberculosis
uggaaaagauggguccgguccg

SEQ ID NO: 3176 - RNA, 23 nt, Mycobacterium avium subsp. paratuberculosis
ugcuggcccccguguucuccucc

SEQ ID NO: 3177 - RNA, 22 nt, Mycobacterium avium subsp. paratuberculosis
ugcuggccgacauggcgagaau

SEQ ID NO: 3178 - RNA, 22 nt, Mycobacterium avium subsp. paratuberculosis
ugcugggaucgcuccccgacau

SEQ ID NO: 3179 - RNA, 22 nt, Mycobacterium avium subsp. paratuberculosis
ugcacugccgugaagagugcuc

SEQ ID NO: 3180 - RNA, 23 nt, Mycobacterium avium subsp. paratuberculosis
ugcacgucugccucgccgacccc

SEQ ID NO: 3181 - RNA, 22 nt, Mycobacterium avium subsp. paratuberculosis
ugagaggugacgcaauugacgc

SEQ ID NO: 3182 - RNA, 22 nt, Mycobacterium avium subsp. paratuberculosis
ugaccugcgaccaggaccgguc

SEQ ID NO: 3183 - RNA, 22 nt, Mycobacterium avium subsp. paratuberculosis
ugaccugcgcggcccggccacu

SEQ ID NO: 3184 - RNA, 22 nt, Mycobacterium avium subsp. paratuberculosis
ugacgccaguucuccgcgccga

SEQ ID NO: 3185 - RNA, 22 nt, Mycobacterium avium subsp. paratuberculosis
ucucggccggccgcgccguguc

SEQ ID NO: 3186 - RNA, 17 nt, Mycobacterium avium subsp. paratuberculosis
ucugcagcugcgccugc

SEQ ID NO: 3187 - RNA, 19 nt, Mycobacterium avium subsp. paratuberculosis
ucugcaggguggcccaguu

SEQ ID NO: 3188 - RNA, 22 nt, Mycobacterium avium subsp. paratuberculosis
ucugcauucgaaaguacuauuu

SEQ ID NO: 3189 - RNA, 22 nt, Mycobacterium avium subsp. paratuberculosis
ucugccaacauaagagccgacg

SEQ ID NO: 3190 - RNA, 22 nt, Mycobacterium avium subsp. paratuberculosis
ucuggccaccaccaaacgccug

SEQ ID NO: 3191 - RNA, 22 nt, Mycobacterium avium subsp. paratuberculosis
ucugucucaggugcaggacgac

SEQ ID NO: 3192 - RNA, 23 nt, Mycobacterium avium subsp. paratuberculosis
ucuggccucggagccgccgagcc

SEQ ID NO: 3193 - RNA, 22 nt, Mycobacterium avium subsp. paratuberculosis
ucugggcccgucacggugccgg

SEQ ID NO: 3194 - RNA, 22 nt, Mycobacterium avium subsp. paratuberculosis
ucuugcagggccuggagcuugg

SEQ ID NO: 3195 - RNA, 22 nt, Mycobacterium avium subsp. paratuberculosis
ucuuggugcacgaucagcucgc

SEQ ID NO: 3196 - RNA, 22 nt, Mycobacterium avium subsp. paratuberculosis
uuggucucgcucagcucggugg

SEQ ID NO: 3197 - RNA, 22 nt, Mycobacterium avium subsp. paratuberculosis
uuggugguggucgucgacgagc

SEQ ID NO: 3198 - RNA, 22 nt, Mycobacterium avium subsp. paratuberculosis
uuggucacccugaccucaccga

SEQ ID NO: 3199 - RNA, 21 nt, Mycobacterium avium subsp. paratuberculosis
uugucaccgccguccggcgac

SEQ ID NO: 3200 - RNA, 22 nt, Mycobacterium avium subsp. paratuberculosis
uuguaugaccucgguugaugcu

SEQ ID NO: 3201 - RNA, 22 nt, Mycobacterium avium subsp. paratuberculosis
uuguggccggugucucaugucg

SEQ ID NO: 3202 - RNA, 21 nt, Mycobacterium avium subsp. paratuberculosis
uugguguugcggcugcggucc

SEQ ID NO: 3203 - RNA, 22 nt, Mycobacterium avium subsp. paratuberculosis
uuguuuuuggccggauggccgu

SEQ ID NO: 3204 - RNA, 22 nt, Mycobacterium avium subsp. paratuberculosis
uugcgcugcugccauaccugcu

SEQ ID NO: 3205 - RNA, 22 nt, Mycobacterium avium subsp. paratuberculosis
uugcuggcaccgcugcgcuggg

SEQ ID NO: 3206 - RNA, 22 nt, Mycobacterium avium subsp. paratuberculosis
uucggggagcgcgacaccguuu

SEQ ID NO: 3207 - RNA, 22 nt, Mycobacterium avium subsp. paratuberculosis
uugaggaucagguucagcuggc

SEQ ID NO: 3208 - RNA, 22 nt, Mycobacterium avium subsp. paratuberculosis
uucugguccuucauccggugcg

SEQ ID NO: 3209 - RNA, 22 nt, Mycobacterium avium subsp. paratuberculosis
uugagguugaacuugccggugc

SEQ ID NO: 3210 - RNA, 22 nt, Mycobacterium avium subsp. paratuberculosis
uguccgcagaucgagcagccgu

SEQ ID NO: 3211 - RNA, 22 nt, Mycobacterium avium subsp. paratuberculosis
uguccugcgacccgucgcgcgg

SEQ ID NO: 3212 - RNA, 22 nt, Mycobacterium avium subsp. paratuberculosis
ugucgccaccggcuccgcaucg

SEQ ID NO: 3213 - RNA, 23 nt, Mycobacterium avium subsp. paratuberculosis
ugugcuuccgggugucgucggac

SEQ ID NO: 3214 - RNA, 22 nt, Mycobacterium avium subsp. paratuberculosis
ugugaccuccggugggcugauc

SEQ ID NO: 3215 - RNA, 22 nt, Mycobacterium avium subsp. paratuberculosis
ugguggagcagguccgcgcgca

SEQ ID NO: 3216 - RNA, 22 nt, Mycobacterium avium subsp. paratuberculosis
ugguggcgcuggucgcggugcu

SEQ ID NO: 3217 - RNA, 22 nt, Mycobacterium avium subsp. paratuberculosis
ugguggucgcgcugacgcucgc

SEQ ID NO: 3218 - RNA, 22 nt, Mycobacterium avium subsp. paratuberculosis
ugguggucuugcgcgccagccg

SEQ ID NO: 3219 - RNA, 22 nt, Mycobacterium avium subsp. paratuberculosis
ugguggugcccggcgucggcgc

SEQ ID NO: 3220 - RNA, 22 nt, Mycobacterium avium subsp. paratuberculosis
uggugguggucaucgcgauccu

SEQ ID NO: 3221 - RNA, 22 nt, Mycobacterium avium subsp. paratuberculosis
uggugguccgagugaccauggu

SEQ ID NO: 3222 - RNA, 22 nt, Mycobacterium avium subsp. paratuberculosis
ugguuggucaccaucaccgacg

SEQ ID NO: 3223 - RNA, 18 nt, Mycobacterium avium subsp. paratuberculosis
uggguccaaguauccuga

SEQ ID NO: 3224 - RNA, 22 nt, Mycobacterium avium subsp. paratuberculosis
ugggcuggcgcgccgccgaggu

SEQ ID NO: 3225 - RNA, 18 nt, Mycobacterium avium subsp. paratuberculosis
ugggcuggcgguccugcg

SEQ ID NO: 3226 - RNA, 22 nt, Mycobacterium avium subsp. paratuberculosis
uggucagccgccaggcgucggc

SEQ ID NO: 3227 - RNA, 22 nt, Mycobacterium avium subsp. paratuberculosis
uuacuuaucgguaagucaguua

SEQ ID NO: 3228 - RNA, 22 nt, Mycobacterium avium subsp. paratuberculosis
uucagggucucgccgaucaccc

SEQ ID NO: 3229 - RNA, 22 nt, Mycobacterium avium subsp. paratuberculosis
uucaagguugaagcccuaaccu

SEQ ID NO: 3230 - RNA, 22 nt, Mycobacterium avium subsp. paratuberculosis
ugugggaugaggugcaggugca

SEQ ID NO: 3231 - RNA, 22 nt, Mycobacterium avium subsp. paratuberculosis
ugugguaccggcccguugcugc

SEQ ID NO: 3232 - RNA, 22 nt, Mycobacterium avium subsp. paratuberculosis
uuuggcugagcacgucgacccg

SEQ ID NO: 3233 - RNA, 22 nt, Mycobacterium avium subsp. paratuberculosis
uugucaccggccuggcccuggu

SEQ ID NO: 3234 - RNA, 22 nt, Mycobacterium avium subsp. paratuberculosis
uuucugaguucgcgggucaccg

SEQ ID NO: 3235 - RNA, 22 nt, Mycobacterium avium subsp. paratuberculosis
uuucauucgcccguuggguugg

SEQ ID NO: 3236 - RNA, 22 nt, Mycobacterium avium subsp. paratuberculosis
caauuucuacgugaugcgcaac

SEQ ID NO: 3237 - RNA, 22 nt, Mycobacterium avium subsp. paratuberculosis
caagcugcgcgccggaccgugg

SEQ ID NO: 3238 - RNA, 20 nt, Mycobacterium avium subsp. paratuberculosis
caagggaguauucgggguuc

SEQ ID NO: 3239 - RNA, 22 nt, Mycobacterium avium subsp. paratuberculosis
auugcucagcagcuuguucagg

SEQ ID NO: 3240 - RNA, 22 nt, Mycobacterium avium subsp. paratuberculosis
auuggcacgucguagaauuggg

SEQ ID NO: 3241 - RNA, 22 nt, Mycobacterium avium subsp. paratuberculosis
auguuggccagccacgcguccg

SEQ ID NO: 3242 - RNA, 22 nt, Mycobacterium avium subsp. paratuberculosis
cagcuuggccaggucucccucg

SEQ ID NO: 3243 - RNA, 22 nt, Mycobacterium avium subsp. paratuberculosis
cagcuugucgccgacgugcgcg

SEQ ID NO: 3244 - RNA, 22 nt, Mycobacterium avium subsp. paratuberculosis
caggaugaagccgacuucgacc

SEQ ID NO: 3245 - RNA, 22 nt, Mycobacterium avium subsp. paratuberculosis
caggauguggcugaccugcagg

SEQ ID NO: 3246 - RNA, 22 nt, Mycobacterium avium subsp. paratuberculosis
caggcugcccggcugcugccca

SEQ ID NO: 3247 - RNA, 22 nt, Mycobacterium avium subsp. paratuberculosis
caggcuggcaucgucggcgccg

SEQ ID NO: 3248 - RNA, 22 nt, Mycobacterium avium subsp. paratuberculosis
cagcccggccagcucgucgggg

SEQ ID NO: 3249 - RNA, 22 nt, Mycobacterium avium subsp. paratuberculosis
cagcgcgccgcggguggaguug

SEQ ID NO: 3250 - RNA, 22 nt, Mycobacterium avium subsp. paratuberculosis
cagcgggugcucggccugccgc

SEQ ID NO: 3251 - RNA, 22 nt, Mycobacterium avium subsp. paratuberculosis
cagcucgcccgcggccuggccg

SEQ ID NO: 3252 - RNA, 22 nt, Mycobacterium avium subsp. paratuberculosis
cagcugcaggguggccagcgac

SEQ ID NO: 3253 - RNA, 22 nt, Mycobacterium avium subsp. paratuberculosis
cagcauccgacgcgccggagcc

SEQ ID NO: 3254 - RNA, 22 nt, Mycobacterium avium subsp. paratuberculosis
cagcaugucgaucgaccagguc

SEQ ID NO: 3255 - RNA, 22 nt, Mycobacterium avium subsp. paratuberculosis
cagcaggucauguucuagcggc

SEQ ID NO: 3256 - RNA, 22 nt, Mycobacterium avium subsp. paratuberculosis
cagcacgcggcguccaucaucg

SEQ ID NO: 3257 - RNA, 22 nt, Mycobacterium avium subsp. paratuberculosis
cagcaaggcgcaugucggagcg

SEQ ID NO: 3258 - RNA, 22 nt, Mycobacterium avium subsp. paratuberculosis
cagcacaccgcgguguucaacg

SEQ ID NO: 3259 - RNA, 22 nt, Mycobacterium avium subsp. paratuberculosis
cacuuccauuucccuugcccgc

SEQ ID NO: 3260 - RNA, 22 nt, Mycobacterium avium subsp. paratuberculosis
cacaccugggaagagcgcuggg

SEQ ID NO: 3261 - RNA, 22 nt, Mycobacterium avium subsp. paratuberculosis
caccagcaggauugggacgucg

SEQ ID NO: 3262 - RNA, 22 nt, Mycobacterium avium subsp. paratuberculosis
cacaggugaucaucgaugcggc

SEQ ID NO: 3263 - RNA, 22 nt, Mycobacterium avium subsp. paratuberculosis
cacggcccgcucggacacccgc

SEQ ID NO: 3264 - RNA, 22 nt, Mycobacterium avium subsp. paratuberculosis
cacgaugcuggagaucaccagg

SEQ ID NO: 3265 - RNA, 22 nt, Mycobacterium avium subsp. paratuberculosis
cacgcacugaccgggcugcagg

SEQ ID NO: 3266 - RNA, 23 nt, Mycobacterium avium subsp. paratuberculosis
cacgccagcgugacgcucggugc

SEQ ID NO: 3267 - RNA, 22 nt, Mycobacterium avium subsp. paratuberculosis
ccaccaccugcggcagcucgaa

SEQ ID NO: 3268 - RNA, 22 nt, Mycobacterium avium subsp. paratuberculosis
ccacacccgcugcgagaucagc

SEQ ID NO: 3269 - RNA, 22 nt, Mycobacterium avium subsp. paratuberculosis
ccaacaacucgacguucggcgg

SEQ ID NO: 3270 - RNA, 22 nt, Mycobacterium avium subsp. paratuberculosis
ccaaccgcaucggcagcgccac

SEQ ID NO: 3271 - RNA, 22 nt, Mycobacterium avium subsp. paratuberculosis
ccagagccuuuccagcaggccc

SEQ ID NO: 3272 - RNA, 22 nt, Mycobacterium avium subsp. paratuberculosis
ccacagagacucacgcgauggc

SEQ ID NO: 3273 - RNA, 22 nt, Mycobacterium avium subsp. paratuberculosis
ccagcagcgagaugacccggug

SEQ ID NO: 3274 - RNA, 22 nt, Mycobacterium avium subsp. paratuberculosis
ccacccgcaucccgugccaggc

SEQ ID NO: 3275 - RNA, 22 nt, Mycobacterium avium subsp. paratuberculosis
caguuccucgucgcagucggcg

SEQ ID NO: 3276 - RNA, 22 nt, Mycobacterium avium subsp. paratuberculosis
caguucggcuuugagcucgucg

SEQ ID NO: 3277 - RNA, 22 nt, Mycobacterium avium subsp. paratuberculosis
cagguucgugccuucggacagg

SEQ ID NO: 3278 - RNA, 22 nt, Mycobacterium avium subsp. paratuberculosis
caguauggauuggccggcgcgc

SEQ ID NO: 3279 - RNA, 18 nt, Mycobacterium avium subsp. paratuberculosis
cagggucuuucuggugcc

SEQ ID NO: 3280 - RNA, 22 nt, Mycobacterium avium subsp. paratuberculosis
cagggugccgccuccaggucgc

SEQ ID NO: 3281 - RNA, 22 nt, Mycobacterium avium subsp. paratuberculosis
caggucuuccagaaggcggucg

SEQ ID NO: 3282 - RNA, 22 nt, Mycobacterium avium subsp. paratuberculosis
caucucgggcgcgauguaggcg

SEQ ID NO: 3283 - RNA, 22 nt, Mycobacterium avium subsp. paratuberculosis
caucugcacgcaggccugcacg

SEQ ID NO: 3284 - RNA, 22 nt, Mycobacterium avium subsp. paratuberculosis
cauccaccuggagggcccgugg

SEQ ID NO: 3285 - RNA, 22 nt, Mycobacterium avium subsp. paratuberculosis
caugaggugacguucgaauccg

SEQ ID NO: 3286 - RNA, 22 nt, Mycobacterium avium subsp. paratuberculosis
caugaguacaagugaguaccga

SEQ ID NO: 3287 - RNA, 22 nt, Mycobacterium avium subsp. paratuberculosis
cauccugggcgccaccgcgcac

SEQ ID NO: 3288 - RNA, 22 nt, Mycobacterium avium subsp. paratuberculosis
ccagguugcgguggucccggug

SEQ ID NO: 3289 - RNA, 22 nt, Mycobacterium avium subsp. paratuberculosis
ccaguucgacggcgucgacgcc

SEQ ID NO: 3290 - RNA, 22 nt, Mycobacterium avium subsp. paratuberculosis
ccauaaguaguccuaauugccc

SEQ ID NO: 3291 - RNA, 22 nt, Mycobacterium avium subsp. paratuberculosis
ccagcaggucgcgguuggccag

SEQ ID NO: 3292 - RNA, 22 nt, Mycobacterium avium subsp. paratuberculosis
ccagccgcggucgggcagccag

SEQ ID NO: 3293 - RNA, 22 nt, Mycobacterium avium subsp. paratuberculosis
ccagcccgaacuaucggcugug

SEQ ID NO: 3294 - RNA, 22 nt, Mycobacterium avium subsp. paratuberculosis
ccagcccuaugagcagcccggc

SEQ ID NO: 3295 - RNA, 22 nt, Mycobacterium avium subsp. paratuberculosis
ccagccgcagcccguccuccau

SEQ ID NO: 3296 - RNA, 22 nt, Mycobacterium avium subsp. paratuberculosis
ccagccguggcaggacaacgag

SEQ ID NO: 3297 - RNA, 22 nt, Mycobacterium avium subsp. paratuberculosis
ccagccguugucgaacagcagc

SEQ ID NO: 3298 - RNA, 22 nt, Mycobacterium avium subsp. paratuberculosis
ccagcugggcgccaccugcaac

SEQ ID NO: 3299 - RNA, 22 nt, Mycobacterium avium subsp. paratuberculosis
ccagcugguccagcacgucggg

SEQ ID NO: 3300 - RNA, 22 nt, Mycobacterium avium subsp. paratuberculosis
cccugggccugacauacgugcg

SEQ ID NO: 3301 - RNA, 22 nt, Mycobacterium avium subsp. paratuberculosis
cccgcgcccggguucgaggcca

SEQ ID NO: 3302 - RNA, 22 nt, Mycobacterium avium subsp. paratuberculosis
cccagcagcugcaggccgacag

SEQ ID NO: 3303 - RNA, 22 nt, Mycobacterium avium subsp. paratuberculosis
cccagcagcuggaggggcucgc

SEQ ID NO: 3304 - RNA, 22 nt, Mycobacterium avium subsp. paratuberculosis
cccagcagcuggauccgcaggc

SEQ ID NO: 3305 - RNA, 22 nt, Mycobacterium avium subsp. paratuberculosis
ccaugguggcguccaggaugcg

SEQ ID NO: 3306 - RNA, 18 nt, Mycobacterium avium subsp. paratuberculosis
cccaugaguuuugccgcc

SEQ ID NO: 3307 - RNA, 22 nt, Mycobacterium avium subsp. paratuberculosis
ccccagccgagcgugcaccggc

SEQ ID NO: 3308 - RNA, 22 nt, Mycobacterium avium subsp. paratuberculosis
cccaggcuggccaggaugccca

SEQ ID NO: 3309 - RNA, 22 nt, Mycobacterium avium subsp. paratuberculosis
ccuugugaccgcgcuguacguc

SEQ ID NO: 3310 - RNA, 22 nt, Mycobacterium avium subsp. paratuberculosis
cgaccugcggccgucggaugcg

SEQ ID NO: 3311 - RNA, 22 nt, Mycobacterium avium subsp. paratuberculosis
cgagcucaagauccaugccgcc

SEQ ID NO: 3312 - RNA, 22 nt, Mycobacterium avium subsp. paratuberculosis
cgagcugcucgacaucgacgag

SEQ ID NO: 3313 - RNA, 22 nt, Mycobacterium avium subsp. paratuberculosis
cgacuugagcgcggccaggaug

SEQ ID NO: 3314 - RNA, 19 nt, Mycobacterium avium subsp. paratuberculosis
cgcaagggccuagucggga

SEQ ID NO: 3315 - RNA, 22 nt, Mycobacterium avium subsp. paratuberculosis
cgcauccagccgcuggcgcccg

SEQ ID NO: 3316 - RNA, 22 nt, Mycobacterium avium subsp. paratuberculosis
cgcacccuguccggcgggcagc

SEQ ID NO: 3317 - RNA, 21 nt, Mycobacterium avium subsp. paratuberculosis
cgcagcagucggucgauguuc

SEQ ID NO: 3318 - RNA, 22 nt, Mycobacterium avium subsp. paratuberculosis
cgcagcauugcguccgccuaac

SEQ ID NO: 3319 - RNA, 22 nt, Mycobacterium avium subsp. paratuberculosis
cgcagcauuucuucgaucgcgg

SEQ ID NO: 3320 - RNA, 22 nt, Mycobacterium avium subsp. paratuberculosis
cgccacccccgagcaggcggcg

SEQ ID NO: 3321 - RNA, 22 nt, Mycobacterium avium subsp. paratuberculosis
cgccccaccgauugcucgaaau

SEQ ID NO: 3322 - RNA, 22 nt, Mycobacterium avium subsp. paratuberculosis
cgcccggcgccgcgacugguga

SEQ ID NO: 3323 - RNA, 22 nt, Mycobacterium avium subsp. paratuberculosis
cgcccggcgcgaccuuccuguc

SEQ ID NO: 3324 - RNA, 22 nt, Mycobacterium avium subsp. paratuberculosis
cgccuugggcucccaguggucg

SEQ ID NO: 3325 - RNA, 22 nt, Mycobacterium avium subsp. paratuberculosis
cgcgcgccguagacguccagca

SEQ ID NO: 3326 - RNA, 22 nt, Mycobacterium avium subsp. paratuberculosis
ccgacgaguucggccuguucga

SEQ ID NO: 3327 - RNA, 17 nt, Mycobacterium avium subsp. paratuberculosis
ccgagcaccaccagcac

SEQ ID NO: 3328 - RNA, 22 nt, Mycobacterium avium subsp. paratuberculosis
ccgagcaccggauccaguccgc

SEQ ID NO: 3329 - RNA, 22 nt, Mycobacterium avium subsp. paratuberculosis
ccgagcucgcgcugcugaccgc

SEQ ID NO: 3330 - RNA, 22 nt, Mycobacterium avium subsp. paratuberculosis
ccgccuccccguuggggugauu

SEQ ID NO: 3331 - RNA, 22 nt, Mycobacterium avium subsp. paratuberculosis
ccuugagcaccgguccggcguu

SEQ ID NO: 3332 - RNA, 20 nt, Mycobacterium avium subsp. paratuberculosis
ccugggccaaaaaucgcacc

SEQ ID NO: 3333 - RNA, 22 nt, Mycobacterium avium subsp. paratuberculosis
ccuggccgacaccaaccccgaa

SEQ ID NO: 3334 - RNA, 22 nt, Mycobacterium avium subsp. paratuberculosis
ccugccagucccgcucgauggg

SEQ ID NO: 3335 - RNA, 22 nt, Mycobacterium avium subsp. paratuberculosis
ccuccuggccgcccagggcgug

SEQ ID NO: 3336 - RNA, 23 nt, Mycobacterium avium subsp. paratuberculosis
ccgguuugcggugcagcacuguc

SEQ ID NO: 3337 - RNA, 22 nt, Mycobacterium avium subsp. paratuberculosis
ccguggccuugccgccggauga

SEQ ID NO: 3338 - RNA, 22 nt, Mycobacterium avium subsp. paratuberculosis
ccgcucccaccgccgggcugau

SEQ ID NO: 3339 - RNA, 22 nt, Mycobacterium avium subsp. paratuberculosis
ccgccacuucccgcagguuguc

SEQ ID NO: 3340 - RNA, 22 nt, Mycobacterium avium subsp. paratuberculosis
ccgggccagcuccacgcacugg

SEQ ID NO: 3341 - RNA, 22 nt, Mycobacterium avium subsp. paratuberculosis
cgugguggcgcagaccaagacc

SEQ ID NO: 3342 - RNA, 22 nt, Mycobacterium avium subsp. paratuberculosis
cguggugguagccggcggucag

SEQ ID NO: 3343 - RNA, 22 nt, Mycobacterium avium subsp. paratuberculosis
cguggagggcugcacggcgccg

SEQ ID NO: 3344 - RNA, 22 nt, Mycobacterium avium subsp. paratuberculosis
cggucaggccacugcucggccc

SEQ ID NO: 3345 - RNA, 23 nt, Mycobacterium avium subsp. paratuberculosis
cggucagggugaugaugccguuc

SEQ ID NO: 3346 - RNA, 22 nt, Mycobacterium avium subsp. paratuberculosis
cggucaccccguagcgggccag

SEQ ID NO: 3347 - RNA, 22 nt, Mycobacterium avium subsp. paratuberculosis
cggucaccgccgcgccggacgg

SEQ ID NO: 3348 - RNA, 22 nt, Mycobacterium avium subsp. paratuberculosis
cggucaccgguguggagauguu

SEQ ID NO: 3349 - RNA, 22 nt, Mycobacterium avium subsp. paratuberculosis
cggugguggccggcagccaguc

SEQ ID NO: 3350 - RNA, 22 nt, Mycobacterium avium subsp. paratuberculosis
cggugguggcgccgcugcuguc

SEQ ID NO: 3351 - RNA, 22 nt, Mycobacterium avium subsp. paratuberculosis
cgugccccgcgacaagccaggc

SEQ ID NO: 3352 - RNA, 22 nt, Mycobacterium avium subsp. paratuberculosis
cucccggggcgagcugcacggc

SEQ ID NO: 3353 - RNA, 22 nt, Mycobacterium avium subsp. paratuberculosis
cucccuggcugccgcuggagcg

SEQ ID NO: 3354 - RNA, 22 nt, Mycobacterium avium subsp. paratuberculosis
cucacuccucguucaccugugu

SEQ ID NO: 3355 - RNA, 22 nt, Mycobacterium avium subsp. paratuberculosis
cucacgccgucggugcugggcc

SEQ ID NO: 3356 - RNA, 19 nt, Mycobacterium avium subsp. paratuberculosis
cucuagccuacgcagcccg

SEQ ID NO: 3357 - RNA, 22 nt, Mycobacterium avium subsp. paratuberculosis
cucgcugguggccgcggugcug

SEQ ID NO: 3358 - RNA, 22 nt, Mycobacterium avium subsp. paratuberculosis
cucggccaagggcccgcacgcc

SEQ ID NO: 3359 - RNA, 22 nt, Mycobacterium avium subsp. paratuberculosis
cucggccaggcucgcggcgaug

SEQ ID NO: 3360 - RNA, 22 nt, Mycobacterium avium subsp. paratuberculosis
cuccgggcugaucgcccgcacc

SEQ ID NO: 3361 - RNA, 20 nt, Mycobacterium avium subsp. paratuberculosis
cuaccugguggagcaggccc

SEQ ID NO: 3362 - RNA, 22 nt, Mycobacterium avium subsp. paratuberculosis
cuccuggaagccggccgcgacg

SEQ ID NO: 3363 - RNA, 22 nt, Mycobacterium avium subsp. paratuberculosis
cucugcugcgcugccuggucga

SEQ ID NO: 3364 - RNA, 22 nt, Mycobacterium avium subsp. paratuberculosis
cugaccccggcgcgccagucgg

SEQ ID NO: 3365 - RNA, 21 nt, Mycobacterium avium subsp. paratuberculosis
cgcugcccggcgcgauguugg

SEQ ID NO: 3366 - RNA, 22 nt, Mycobacterium avium subsp. paratuberculosis
cgccuugagacaggacacgucg

SEQ ID NO: 3367 - RNA, 22 nt, Mycobacterium avium subsp. paratuberculosis
cgcccggccaccgacgugaugg

SEQ ID NO: 3368 - RNA, 22 nt, Mycobacterium avium subsp. paratuberculosis
cggagaccauguucgccgagca

SEQ ID NO: 3369 - RNA, 22 nt, Mycobacterium avium subsp. paratuberculosis
cgggccaaccggcuggcccggc

SEQ ID NO: 3370 - RNA, 22 nt, Mycobacterium avium subsp. paratuberculosis
cggguucaccgcggugauccug

SEQ ID NO: 3371 - RNA, 22 nt, Mycobacterium avium subsp. paratuberculosis
cggcugcaacgacugaccggcg

SEQ ID NO: 3372 - RNA, 22 nt, Mycobacterium avium subsp. paratuberculosis
aucuucuucuccgcggugcuga

SEQ ID NO: 3373 - RNA, 22 nt, Mycobacterium avium subsp. paratuberculosis
augauggugguaagcauuucgg

SEQ ID NO: 3374 - RNA, 22 nt, Mycobacterium avium subsp. paratuberculosis
augcuuggggguucucagcggu

SEQ ID NO: 3375 - RNA, 22 nt, Mycobacterium avium subsp. paratuberculosis
augccucacucucgcaacgguc

SEQ ID NO: 3376 - RNA, 22 nt, Mycobacterium avium subsp. paratuberculosis
auggacaaccacuucgugccga

SEQ ID NO: 3377 - RNA, 22 nt, Mycobacterium avium subsp. paratuberculosis
auggcagcagcaucgugguggc

SEQ ID NO: 3378 - RNA, 22 nt, Mycobacterium avium subsp. paratuberculosis
auggcagcggauccucgacauc

SEQ ID NO: 3379 - RNA, 22 nt, Mycobacterium avium subsp. paratuberculosis
auggucaggaugucgaccucga

SEQ ID NO: 3380 - RNA, 22 nt, Mycobacterium avium subsp. paratuberculosis
auggcgaucggcgggcacggcc

SEQ ID NO: 3381 - RNA, 22 nt, Mycobacterium avium subsp. paratuberculosis
augguggccagcacccccggca

SEQ ID NO: 3382 - RNA, 22 nt, Mycobacterium avium subsp. paratuberculosis
auccaggccgccgagaucgagc

SEQ ID NO: 3383 - RNA, 23 nt, Mycobacterium avium subsp. paratuberculosis
auccaggcgcugcgcgagcaccg

SEQ ID NO: 3384 - RNA, 22 nt, Mycobacterium avium subsp. paratuberculosis
auccaggcgguguucggcuuca

SEQ ID NO: 3385 - RNA, 22 nt, Mycobacterium avium subsp. paratuberculosis
auccaggcguugaucgacggcc

SEQ ID NO: 3386 - RNA, 18 nt, Mycobacterium avium subsp. paratuberculosis
auccugcacugcgacggc

SEQ ID NO: 3387 - RNA, 22 nt, Mycobacterium avium subsp. paratuberculosis
aucagcagcgaccgcacgugcg

SEQ ID NO: 3388 - RNA, 22 nt, Mycobacterium avium subsp. paratuberculosis
aucaccuuggucagcagcgcgg

SEQ ID NO: 3389 - RNA, 22 nt, Mycobacterium avium subsp. paratuberculosis
aucaccugcaugagcugguggc

SEQ ID NO: 3390 - RNA, 22 nt, Mycobacterium avium subsp. paratuberculosis
auccagcagcggccggucccgc

SEQ ID NO: 3391 - RNA, 22 nt, Mycobacterium avium subsp. paratuberculosis
aucaggucggugcggugcuugg

SEQ ID NO: 3392 - RNA, 22 nt, Mycobacterium avium subsp. paratuberculosis
aggugcugcgcggacucuugcu

SEQ ID NO: 3393 - RNA, 22 nt, Mycobacterium avium subsp. paratuberculosis
aggggcugcacgucggccaccc

SEQ ID NO: 3394 - RNA, 22 nt, Mycobacterium avium subsp. paratuberculosis
agggucuaguugaacgagucgc

SEQ ID NO: 3395 - RNA, 22 nt, Mycobacterium avium subsp. paratuberculosis
aggcuugcgcuggcaacucaac

SEQ ID NO: 3396 - RNA, 22 nt, Mycobacterium avium subsp. paratuberculosis
aggucacccugggcgaguuggu

SEQ ID NO: 3397 - RNA, 22 nt, Mycobacterium avium subsp. paratuberculosis
aggucaccgaagagguugccgc

SEQ ID NO: 3398 - RNA, 22 nt, Mycobacterium avium subsp. paratuberculosis
aguccuugaccaggaacuucag

SEQ ID NO: 3399 - RNA, 22 nt, Mycobacterium avium subsp. paratuberculosis
agucccugcugcagcgggguca

SEQ ID NO: 3400 - RNA, 22 nt, Mycobacterium avium subsp. paratuberculosis
agcuggucucggaucuggugcg

SEQ ID NO: 3401 - RNA, 22 nt, Mycobacterium avium subsp. paratuberculosis
agcucagcgaccacacgguguc

SEQ ID NO: 3402 - RNA, 22 nt, Mycobacterium avium subsp. paratuberculosis
agcccggccgcagccuggagcg

SEQ ID NO: 3403 - RNA, 22 nt, Mycobacterium avium subsp. paratuberculosis
agcccggcgaucugcuggcugc

SEQ ID NO: 3404 - RNA, 22 nt, Mycobacterium avium subsp. paratuberculosis
agccgggcgugcucguuggcgu

SEQ ID NO: 3405 - RNA, 22 nt, Mycobacterium avium subsp. paratuberculosis
agcagguggugcgcugcagcga

SEQ ID NO: 3406 - RNA, 21 nt, Mycobacterium avium subsp. paratuberculosis
agcaugaagccggugcucagc

SEQ ID NO: 3407 - RNA, 22 nt, Mycobacterium avium subsp. paratuberculosis
agcagcaugccgucgcggcgaa

SEQ ID NO: 3408 - RNA, 22 nt, Mycobacterium avium subsp. paratuberculosis
acagccgcagcacgggcuggcg

SEQ ID NO: 3409 - RNA, 22 nt, Mycobacterium avium subsp. paratuberculosis
acagcugcgaccacgucagggu

SEQ ID NO: 3410 - RNA, 22 nt, Mycobacterium avium subsp. paratuberculosis
acagaugucaauagugugaguu

SEQ ID NO: 3411 - RNA, 22 nt, Mycobacterium avium subsp. paratuberculosis
accauggccgcccggguggugu

SEQ ID NO: 3412 - RNA, 18 nt, Mycobacterium avium subsp. paratuberculosis
accacccaggagaucguc

SEQ ID NO: 3413 - RNA, 22 nt, Mycobacterium avium subsp. paratuberculosis
accacgaggaccagcgucgcga

SEQ ID NO: 3414 - RNA, 22 nt, Mycobacterium avium subsp. paratuberculosis
accagcagcgcgucacgcugag

SEQ ID NO: 3415 - RNA, 22 nt, Mycobacterium avium subsp. paratuberculosis
accagcagcugcccgggcggua

SEQ ID NO: 3416 - RNA, 22 nt, Mycobacterium avium subsp. paratuberculosis
accagcaguaugggcgccgguu

SEQ ID NO: 3417 - RNA, 22 nt, Mycobacterium avium subsp. paratuberculosis
accugggccagaugcucgacuu

SEQ ID NO: 3418 - RNA, 22 nt, Mycobacterium avium subsp. paratuberculosis
accugggcgcgccggucgagcc

SEQ ID NO: 3419 - RNA, 22 nt, Mycobacterium avium subsp. paratuberculosis
accuccagcacccgggucagcg

SEQ ID NO: 3420 - RNA, 22 nt, Mycobacterium avium subsp. paratuberculosis
accucccagcccucggugaacu

SEQ ID NO: 3421 - RNA, 22 nt, Mycobacterium avium subsp. paratuberculosis
accggcaucaccacggcgaugg

SEQ ID NO: 3422 - RNA, 22 nt, Mycobacterium avium subsp. paratuberculosis
acccggcugccggaccaccuca

SEQ ID NO: 3423 - RNA, 22 nt, Mycobacterium avium subsp. paratuberculosis
acccggcugggcgccuacgcgc

SEQ ID NO: 3424 - RNA, 22 nt, Mycobacterium avium subsp. paratuberculosis
acccggcuggucgaggaccugc

SEQ ID NO: 3425 - RNA, 22 nt, Mycobacterium avium subsp. paratuberculosis
accuugacggcgugcccgacgu

SEQ ID NO: 3426 - RNA, 22 nt, Mycobacterium avium subsp. paratuberculosis
accuugacguccucaucguggg

SEQ ID NO: 3427 - RNA, 22 nt, Mycobacterium avium subsp. paratuberculosis
acgagcuguggguuuccaggua

SEQ ID NO: 3428 - RNA, 22 nt, Mycobacterium avium subsp. paratuberculosis
acgcacccgccgaucgaggacc

SEQ ID NO: 3429 - RNA, 22 nt, Mycobacterium avium subsp. paratuberculosis
acgccgugguacuccggcgcga

SEQ ID NO: 3430 - RNA, 22 nt, Mycobacterium avium subsp. paratuberculosis
acguugggcagaaacgcuuuuc

SEQ ID NO: 3431 - RNA, 22 nt, Mycobacterium avium subsp. paratuberculosis
acgcugggcuacgaggugcgcu

SEQ ID NO: 3432 - RNA, 20 nt, Mycobacterium avium subsp. paratuberculosis
acgucccaauccugcuggug

SEQ ID NO: 3433 - RNA, 22 nt, Mycobacterium avium subsp. paratuberculosis
acguccuggauguggcccgcgc

SEQ ID NO: 3434 - RNA, 22 nt, Mycobacterium avium subsp. paratuberculosis
agacccagcagcaccgacgcga

SEQ ID NO: 3435 - RNA, 22 nt, Mycobacterium avium subsp. paratuberculosis
agaccgagcuguuggccggcgc

SEQ ID NO: 3436 - RNA, 22 nt, Mycobacterium avium subsp. paratuberculosis
agagucucaugggcaucaucgg

SEQ ID NO: 3437 - RNA, 22 nt, Mycobacterium avium subsp. paratuberculosis
agcaccgccagcacccacgaca

SEQ ID NO: 3438 - RNA, 22 nt, Mycobacterium avium subsp. paratuberculosis
agcaccgccgucaccugcccga

SEQ ID NO: 3439 - RNA, 22 nt, Mycobacterium avium subsp. paratuberculosis
agcagagccuugcgcugacgau

SEQ ID NO: 3440 - RNA, 22 nt, Mycobacterium avium subsp. paratuberculosis
agauccagccgagcagcaccau

SEQ ID NO: 3441 - RNA, 22 nt, Mycobacterium avium subsp. paratuberculosis
agagcuccagcgagaacgggcc

SEQ ID NO: 3442 - RNA, 22 nt, Mycobacterium avium subsp. paratuberculosis
agaggaacaucgcgauggcccu

SEQ ID NO: 3443 - RNA, 21 nt, Mycobacterium avium subsp. paratuberculosis
agcaacaauggcgcucggccg

SEQ ID NO: 3444 - RNA, 22 nt, Mycobacterium avium subsp. paratuberculosis
acugccacaacgacucccgcgu

SEQ ID NO: 3445 - RNA, 19 nt, Mycobacterium avium subsp. paratuberculosis
acugcgacgaucaaccggc

SEQ ID NO: 3446 - RNA, 22 nt, Mycobacterium avium subsp. paratuberculosis
acucgcccggcgcccugcugcg

SEQ ID NO: 3447 - RNA, 22 nt, Mycobacterium avium subsp. paratuberculosis
acugggccgcccuguaccggaa

SEQ ID NO: 3448 - RNA, 22 nt, Mycobacterium avium subsp. paratuberculosis
aaugccucaucgaggcgcugca

SEQ ID NO: 3449 - RNA, 22 nt, Mycobacterium avium subsp. paratuberculosis
aauccacaucgccgacggcgug

SEQ ID NO: 3450 - RNA, 22 nt, Mycobacterium avium subsp. paratuberculosis
aaguaucuagaugaauucagug

SEQ ID NO: 3451 - RNA, 22 nt, Mycobacterium avium subsp. paratuberculosis
aaaccagcacugagugcccacc

SEQ ID NO: 3452 - RNA, 22 nt, Mycobacterium avium subsp. paratuberculosis
aaaguuugcgguuucagcauuc

SEQ ID NO: 3453 - RNA, 22 nt, Mycobacterium avium subsp. paratuberculosis
aagacaacgcgugucauuggcg

SEQ ID NO: 3454 - RNA, 22 nt, Mycobacterium avium subsp. paratuberculosis
aagaaggcccagucgcggcugc

SEQ ID NO: 3455 - RNA, 22 nt, Mycobacterium avium subsp. paratuberculosis
aagcaguacgcgaugucggauc

SEQ ID NO: 3456 - RNA, 22 nt, Mycobacterium avium subsp. paratuberculosis
aacugcuggcccggcacagugu

SEQ ID NO: 3457 - RNA, 22 nt, Mycobacterium avium subsp. paratuberculosis
aacaggccgcggcguugcaacu

SEQ ID NO: 3458 - RNA, 22 nt, Mycobacterium avium subsp. paratuberculosis
aacgugaagcuaguuucacguu

SEQ ID NO: 3459 - RNA, 22 nt, Mycobacterium avium subsp. paratuberculosis
gucaccaucaguugccacgacg

SEQ ID NO: 3460 - RNA, 22 nt, Mycobacterium avium subsp. paratuberculosis
gucacgccagcgugacgcucgg

SEQ ID NO: 3461 - RNA, 22 nt, Mycobacterium avium subsp. paratuberculosis
gucacgcuagcgugacgcucgc

SEQ ID NO: 3462 - RNA, 22 nt, Mycobacterium avium subsp. paratuberculosis
guacaugccgccgcaggcgccc

SEQ ID NO: 3463 - RNA, 23 nt, Mycobacterium avium subsp. paratuberculosis
gguucuucuuacggucgcuguca

SEQ ID NO: 3464 - RNA, 22 nt, Mycobacterium avium subsp. paratuberculosis
gguugguggcggcgaucaggau

SEQ ID NO: 3465 - RNA, 22 nt, Mycobacterium avium subsp. paratuberculosis
ggguaucaccucgggcgaggcc

SEQ ID NO: 3466 - RNA, 22 nt, Mycobacterium avium subsp. paratuberculosis
ggguugaugccgaccgucucgu

SEQ ID NO: 3467 - RNA, 22 nt, Mycobacterium avium subsp. paratuberculosis
gggucaccggauggucgaugac

SEQ ID NO: 3468 - RNA, 22 nt, Mycobacterium avium subsp. paratuberculosis
gggugcuuucgcgucugcucgc

SEQ ID NO: 3469 - RNA, 22 nt, Mycobacterium avium subsp. paratuberculosis
ggguggcucaacaccccggacg

SEQ ID NO: 3470 - RNA, 22 nt, Mycobacterium avium subsp. paratuberculosis
ggguggucagcgcgaucuucag

SEQ ID NO: 3471 - RNA, 22 nt, Mycobacterium avium subsp. paratuberculosis
ggucacccgcaacggcgagcag

SEQ ID NO: 3472 - RNA, 22 nt, Mycobacterium avium subsp. paratuberculosis
ggucacccgguugggggucacc

SEQ ID NO: 3473 - RNA, 22 nt, Mycobacterium avium subsp. paratuberculosis
ggugacgccgcaucugcuggug

SEQ ID NO: 3474 - RNA, 22 nt, Mycobacterium avium subsp. paratuberculosis
ggucaccuccaucgcgacgucg

SEQ ID NO: 3475 - RNA, 22 nt, Mycobacterium avium subsp. paratuberculosis
ggucaccuucuccgagcgggcc

SEQ ID NO: 3476 - RNA, 22 nt, Mycobacterium avium subsp. paratuberculosis
ggugguggucgacgaggcgcag

SEQ ID NO: 3477 - RNA, 22 nt, Mycobacterium avium subsp. paratuberculosis
gguucaaggugaugcccgacga

SEQ ID NO: 3478 - RNA, 22 nt, Mycobacterium avium subsp. paratuberculosis
ggugguggcccggaucgacugg

SEQ ID NO: 3479 - RNA, 22 nt, Mycobacterium avium subsp. paratuberculosis
ggguuugguccucgaucacgcg

SEQ ID NO: 3480 - RNA, 22 nt, Mycobacterium avium subsp. paratuberculosis
ggugcugcggcuccacgaaguc

SEQ ID NO: 3481 - RNA, 21 nt, Mycobacterium avium subsp. paratuberculosis
ggugcuuuugugucugcucgc

SEQ ID NO: 3482 - RNA, 22 nt, Mycobacterium avium subsp. paratuberculosis
gggcaccaccgaguagcugccg

SEQ ID NO: 3483 - RNA, 22 nt, Mycobacterium avium subsp. paratuberculosis
ggcuugacaucuauuccggacu

SEQ ID NO: 3484 - RNA, 22 nt, Mycobacterium avium subsp. paratuberculosis
ggcuugaggucgucgcggucac

SEQ ID NO: 3485 - RNA, 22 nt, Mycobacterium avium subsp. paratuberculosis
gggccagaaccaccaggugcgc

SEQ ID NO: 3486 - RNA, 22 nt, Mycobacterium avium subsp. paratuberculosis
gggcgcuggcgcuggacagcga

SEQ ID NO: 3487 - RNA, 22 nt, Mycobacterium avium subsp. paratuberculosis
gggcggcacggugacggccagg

SEQ ID NO: 3488 - RNA, 22 nt, Mycobacterium avium subsp. paratuberculosis
gggcgggucgaucugcagcggg

SEQ ID NO: 3489 - RNA, 21 nt, Mycobacterium avium subsp. paratuberculosis
gggcucagccgaagccggcgc

SEQ ID NO: 3490 - RNA, 22 nt, Mycobacterium avium subsp. paratuberculosis
gggcugaccggcgauggccauc

SEQ ID NO: 3491 - RNA, 22 nt, Mycobacterium avium subsp. paratuberculosis
gggcugcacgacggccuugacu

SEQ ID NO: 3492 - RNA, 22 nt, Mycobacterium avium subsp. paratuberculosis
gggcugguucucggucggcgac

SEQ ID NO: 3493 - RNA, 22 nt, Mycobacterium avium subsp. paratuberculosis
gggcuuggcgcagcgccgcaua

SEQ ID NO: 3494 - RNA, 22 nt, Mycobacterium avium subsp. paratuberculosis
gggguucaucuccgcggcgucg

SEQ ID NO: 3495 - RNA, 22 nt, Mycobacterium avium subsp. paratuberculosis
gggguugacgaucgcugcggcg

SEQ ID NO: 3496 - RNA, 21 nt, Mycobacterium avium subsp. paratuberculosis
gggguuggcacaugaucaccg

SEQ ID NO: 3497 - RNA, 22 nt, Mycobacterium avium subsp. paratuberculosis
ggcugauuuugcgggccgcccg

SEQ ID NO: 3498 - RNA, 22 nt, Mycobacterium avium subsp. paratuberculosis
ggcuggauaacacaggacgacg

SEQ ID NO: 3499 - RNA, 22 nt, Mycobacterium avium subsp. paratuberculosis
ggcuggucaaacagcuugcgcc

SEQ ID NO: 3500 - RNA, 22 nt, Mycobacterium avium subsp. paratuberculosis
ggcugugcucgggcggcagguc

SEQ ID NO: 3501 - RNA, 22 nt, Mycobacterium avium subsp. paratuberculosis
ggcgcgggcgucccgguggugc

SEQ ID NO: 3502 - RNA, 22 nt, Mycobacterium avium subsp. paratuberculosis
ggcgcgggcguuggccacccag

SEQ ID NO: 3503 - RNA, 22 nt, Mycobacterium avium subsp. paratuberculosis
ggcggcgccggcgaucacggug

SEQ ID NO: 3504 - RNA, 22 nt, Mycobacterium avium subsp. paratuberculosis
ggcgagcagacgcaaaagcccc

SEQ ID NO: 3505 - RNA, 22 nt, Mycobacterium avium subsp. paratuberculosis
gugguggugucggccgacguug

SEQ ID NO: 3506 - RNA, 22 nt, Mycobacterium avium subsp. paratuberculosis
gugguguccaccccgccggcgg

SEQ ID NO: 3507 - RNA, 22 nt, Mycobacterium avium subsp. paratuberculosis
guuccagcucggcgagcgugcg

SEQ ID NO: 3508 - RNA, 22 nt, Mycobacterium avium subsp. paratuberculosis
guugaugugcaccaucucugcg

SEQ ID NO: 3509 - RNA, 22 nt, Mycobacterium avium subsp. paratuberculosis
guugcagcgccgucugcagcug

SEQ ID NO: 3510 - RNA, 22 nt, Mycobacterium avium subsp. paratuberculosis
guugguggaucgucgcgaaguc

SEQ ID NO: 3511 - RNA, 22 nt, Mycobacterium avium subsp. paratuberculosis
guugggggcgcugggauuugcc

SEQ ID NO: 3512 - RNA, 22 nt, Mycobacterium avium subsp. paratuberculosis
gugguggcggcgcuggcgcaca

SEQ ID NO: 3513 - RNA, 22 nt, Mycobacterium avium subsp. paratuberculosis
gugugaaaacgcccgcgacuac

SEQ ID NO: 3514 - RNA, 22 nt, Mycobacterium avium subsp. paratuberculosis
guggcgucgaugcgaaucccgg

SEQ ID NO: 3515 - RNA, 22 nt, Mycobacterium avium subsp. paratuberculosis
guggcuggccgaguucgcgcug

SEQ ID NO: 3516 - RNA, 22 nt, Mycobacterium avium subsp. paratuberculosis
guggcugggucuggucgccaac

SEQ ID NO: 3517 - RNA, 22 nt, Mycobacterium avium subsp. paratuberculosis
gugguggccgcggugaccaaug

SEQ ID NO: 3518 - RNA, 22 nt, Mycobacterium avium subsp. paratuberculosis
gugguggucaaucacgcucggc

SEQ ID NO: 3519 - RNA, 22 nt, Mycobacterium avium subsp. paratuberculosis
guggcagccagcauucggccgc

SEQ ID NO: 3520 - RNA, 22 nt, Mycobacterium avium subsp. paratuberculosis
gugcuuuugcgucugcucgcca

SEQ ID NO: 3521 - RNA, 19 nt, Mycobacterium avium subsp. paratuberculosis
guggccaagacggccagca

SEQ ID NO: 3522 - RNA, 22 nt, Mycobacterium avium subsp. paratuberculosis
guggccacgaucgccgcggugg

SEQ ID NO: 3523 - RNA, 22 nt, Mycobacterium avium subsp. paratuberculosis
guggccagccgggcgaccgucu

SEQ ID NO: 3524 - RNA, 22 nt, Mycobacterium avium subsp. paratuberculosis
gugggcugucggugaccuggcu

SEQ ID NO: 3525 - RNA, 20 nt, Mycobacterium avium subsp. paratuberculosis
guggucaccggcgauggugc

SEQ ID NO: 3526 - RNA, 22 nt, Mycobacterium avium subsp. paratuberculosis
gugggccaacgugagcuccagu

SEQ ID NO: 3527 - RNA, 22 nt, Mycobacterium avium subsp. paratuberculosis
gugccccagcagcucggugagc

SEQ ID NO: 3528 - RNA, 22 nt, Mycobacterium avium subsp. paratuberculosis
gugcaccugcuggaucacggcg

SEQ ID NO: 3529 - RNA, 22 nt, Mycobacterium avium subsp. paratuberculosis
gugaagccgccgcggcccagcu

SEQ ID NO: 3530 - RNA, 22 nt, Mycobacterium avium subsp. paratuberculosis
gugauggcggcgaccaccaucg

SEQ ID NO: 3531 - RNA, 22 nt, Mycobacterium avium subsp. paratuberculosis
gugcucacgcugcugcuggccg

SEQ ID NO: 3532 - RNA, 20 nt, Mycobacterium avium subsp. paratuberculosis
gugcacaucgacccggcgga

SEQ ID NO: 3533 - RNA, 22 nt, Mycobacterium avium subsp. paratuberculosis
gugaccagggugcccagcugga

SEQ ID NO: 3534 - RNA, 22 nt, Mycobacterium avium subsp. paratuberculosis
gucggcuccuugcuggacggcc

SEQ ID NO: 3535 - RNA, 22 nt, Mycobacterium avium subsp. paratuberculosis
guccagccgucgaauugugccc

SEQ ID NO: 3536 - RNA, 22 nt, Mycobacterium avium subsp. paratuberculosis
gucaucagcuggcugucggcca

SEQ ID NO: 3537 - RNA, 22 nt, Mycobacterium avium subsp. paratuberculosis
ucucauuccugagacuuucuug

SEQ ID NO: 3538 - RNA, 22 nt, Mycobacterium avium subsp. paratuberculosis
ucggcucaccgacgacgaggug

SEQ ID NO: 3539 - RNA, 22 nt, Mycobacterium avium subsp. paratuberculosis
ucgguggcugcagcucggccug

SEQ ID NO: 3540 - RNA, 22 nt, Mycobacterium avium subsp. paratuberculosis
ucgauguuguggucaacuucca

SEQ ID NO: 3541 - RNA, 22 nt, Mycobacterium avium subsp. paratuberculosis
ucgccugcggcaaugagcccua

SEQ ID NO: 3542 - RNA, 22 nt, Mycobacterium avium subsp. paratuberculosis
ucgcuggacugccacagguucg

SEQ ID NO: 3543 - RNA, 22 nt, Mycobacterium avium subsp. paratuberculosis
ucgcugggcgcccaggcgcguu

SEQ ID NO: 3544 - RNA, 22 nt, Mycobacterium avium subsp. paratuberculosis
ucgcugggcggcagcucggcau

SEQ ID NO: 3545 - RNA, 22 nt, Mycobacterium avium subsp. paratuberculosis
ucggcagcagcuggcucagcga

SEQ ID NO: 3546 - RNA, 22 nt, Mycobacterium avium subsp. paratuberculosis
uccugcgccgccacgacagcaa

SEQ ID NO: 3547 - RNA, 22 nt, Mycobacterium avium subsp. paratuberculosis
uccuggggccgggcccgagcau

SEQ ID NO: 3548 - RNA, 22 nt, Mycobacterium avium subsp. paratuberculosis
uccuggugaucuccagcaucgu

SEQ ID NO: 3549 - RNA, 22 nt, Mycobacterium avium subsp. paratuberculosis
uccuggugcguccaagcggagu

SEQ ID NO: 3550 - RNA, 22 nt, Mycobacterium avium subsp. paratuberculosis
uccugggcaucgccaagucggu

SEQ ID NO: 3551 - RNA, 22 nt, Mycobacterium avium subsp. paratuberculosis
ucgagcagccgaccagcgucac

SEQ ID NO: 3552 - RNA, 22 nt, Mycobacterium avium subsp. paratuberculosis
uccgcgccucgacgcccggaua

SEQ ID NO: 3553 - RNA, 22 nt, Mycobacterium avium subsp. paratuberculosis
uccauucucggccgggugcaca

SEQ ID NO: 3554 - RNA, 22 nt, Mycobacterium avium subsp. paratuberculosis
ucccaaggcuguucgugggcgu

SEQ ID NO: 3555 - RNA, 22 nt, Mycobacterium avium subsp. paratuberculosis
ucaggccgguggcgguguugcu

SEQ ID NO: 3556 - RNA, 22 nt, Mycobacterium avium subsp. paratuberculosis
ucaggcuggaagugcucggcuu

SEQ ID NO: 3557 - RNA, 22 nt, Mycobacterium avium subsp. paratuberculosis
ucagguugguggcucccaguau

SEQ ID NO: 3558 - RNA, 22 nt, Mycobacterium avium subsp. paratuberculosis
ucauuuggugcucaccgugcag

SEQ ID NO: 3559 - RNA, 22 nt, Mycobacterium avium subsp. paratuberculosis
uccacccgcagagaucccaagg

SEQ ID NO: 3560 - RNA, 22 nt, Mycobacterium avium subsp. paratuberculosis
uccaccgcccaggucgaugcgc

SEQ ID NO: 3561 - RNA, 22 nt, Mycobacterium avium subsp. paratuberculosis
uccagcagcugggcgcgcauuc

SEQ ID NO: 3562 - RNA, 22 nt, Mycobacterium avium subsp. paratuberculosis
uccagccaggcgcggcggcuca

SEQ ID NO: 3563 - RNA, 22 nt, Mycobacterium avium subsp. paratuberculosis
uccagcuggucgacgccgccag

SEQ ID NO: 3564 - RNA, 22 nt, Mycobacterium avium subsp. paratuberculosis
ucagcaggucgaugcgguugcg

SEQ ID NO: 3565 - RNA, 22 nt, Mycobacterium avium subsp. paratuberculosis
ucagcgucgucgcgccggcuuu

SEQ ID NO: 3566 - RNA, 22 nt, Mycobacterium avium subsp. paratuberculosis
ucagccucggccuggacagucg

SEQ ID NO: 3567 - RNA, 22 nt, Mycobacterium avium subsp. paratuberculosis
ucaauuccgguggugugcugaa

SEQ ID NO: 3568 - RNA, 22 nt, Mycobacterium avium subsp. paratuberculosis
ucaccaugcacccagaucucgc

SEQ ID NO: 3569 - RNA, 22 nt, Mycobacterium avium subsp. paratuberculosis
ucaccgccggcguggaccggcu

SEQ ID NO: 3570 - RNA, 23 nt, Mycobacterium avium subsp. paratuberculosis
guuuggguacguuaugggcuugc

SEQ ID NO: 3571 - RNA, 22 nt, Mycobacterium avium subsp. paratuberculosis
ggccuggucaucgagcuggcgg

SEQ ID NO: 3572 - RNA, 22 nt, Mycobacterium avium subsp. paratuberculosis
ggccuggucggcguucagcguc

SEQ ID NO: 3573 - RNA, 22 nt, Mycobacterium avium subsp. paratuberculosis
ggccucccacagcgggcggugc

SEQ ID NO: 3574 - RNA, 22 nt, Mycobacterium avium subsp. paratuberculosis
ggccugcagaaugcgcguuuug

SEQ ID NO: 3575 - RNA, 22 nt, Mycobacterium avium subsp. paratuberculosis
ggcgccacgcccgggcaccugg

SEQ ID NO: 3576 - RNA, 22 nt, Mycobacterium avium subsp. paratuberculosis
ggcgccacgcggaaucgccagc

SEQ ID NO: 3577 - RNA, 22 nt, Mycobacterium avium subsp. paratuberculosis
ggccagcucggcgaucgcccgu

SEQ ID NO: 3578 - RNA, 22 nt, Mycobacterium avium subsp. paratuberculosis
ggccagcagggugggguuacgg

SEQ ID NO: 3579 - RNA, 22 nt, Mycobacterium avium subsp. paratuberculosis
ggccagccgggcgacggucugc

SEQ ID NO: 3580 - RNA, 22 nt, Mycobacterium avium subsp. paratuberculosis
ggcccggcuucuggcacggcgc

SEQ ID NO: 3581 - RNA, 22 nt, Mycobacterium avium subsp. paratuberculosis
ggccgcgcucaaacaccugggc

SEQ ID NO: 3582 - RNA, 22 nt, Mycobacterium avium subsp. paratuberculosis
ggcagcacgugcagcgcggucu

SEQ ID NO: 3583 - RNA, 22 nt, Mycobacterium avium subsp. paratuberculosis
ggcagcagcgagaagugcaggu

SEQ ID NO: 3584 - RNA, 22 nt, Mycobacterium avium subsp. paratuberculosis
ggcagcacccgcagcaggucgu

SEQ ID NO: 3585 - RNA, 22 nt, Mycobacterium avium subsp. paratuberculosis
ggcagcaugcucuccucguggu

SEQ ID NO: 3586 - RNA, 22 nt, Mycobacterium avium subsp. paratuberculosis
ggcagccuguaucaccacuucu

SEQ ID NO: 3587 - RNA, 22 nt, Mycobacterium avium subsp. paratuberculosis
ggcagcgaugcggccggucuca

SEQ ID NO: 3588 - RNA, 22 nt, Mycobacterium avium subsp. paratuberculosis
ggccagcacgguguugacggug

SEQ ID NO: 3589 - RNA, 22 nt, Mycobacterium avium subsp. paratuberculosis
ggaguuucuggccggcaagaag

SEQ ID NO: 3590 - RNA, 22 nt, Mycobacterium avium subsp. paratuberculosis
ggagggucgcuaucugcgcggc

SEQ ID NO: 3591 - RNA, 23 nt, Mycobacterium avium subsp. paratuberculosis
ggaaagugugaucccgaugaugg

SEQ ID NO: 3592 - RNA, 22 nt, Mycobacterium avium subsp. paratuberculosis
gcuucuucgcgcaugcgcugcc

SEQ ID NO: 3593 - RNA, 22 nt, Mycobacterium avium subsp. paratuberculosis
ggaccugcgacugcaccccacc

SEQ ID NO: 3594 - RNA, 22 nt, Mycobacterium avium subsp. paratuberculosis
ggaccugcuggaccggcugcac

SEQ ID NO: 3595 - RNA, 22 nt, Mycobacterium avium subsp. paratuberculosis
ggagccggccgagguugcgcug

SEQ ID NO: 3596 - RNA, 18 nt, Mycobacterium avium subsp. paratuberculosis
gcugcggcugcagcagga

SEQ ID NO: 3597 - RNA, 22 nt, Mycobacterium avium subsp. paratuberculosis
gcuggccaacugcggagacgcc

SEQ ID NO: 3598 - RNA, 22 nt, Mycobacterium avium subsp. paratuberculosis
gcuggccaccggcaccgcggcg

SEQ ID NO: 3599 - RNA, 22 nt, Mycobacterium avium subsp. paratuberculosis
gcuggccacgcucggcccgcug

SEQ ID NO: 3600 - RNA, 22 nt, Mycobacterium avium subsp. paratuberculosis
gcugguagacgacgacgccgag

SEQ ID NO: 3601 - RNA, 22 nt, Mycobacterium avium subsp. paratuberculosis
gcugggcacgccggagcugcgg

SEQ ID NO: 3602 - RNA, 22 nt, Mycobacterium avium subsp. paratuberculosis
gcugggccgcugguugcccgag

SEQ ID NO: 3603 - RNA, 19 nt, Mycobacterium avium subsp. paratuberculosis
gcugggccuggucgcgucc

SEQ ID NO: 3604 - RNA, 22 nt, Mycobacterium avium subsp. paratuberculosis
gcuggcgccacugcagcccggu

SEQ ID NO: 3605 - RNA, 22 nt, Mycobacterium avium subsp. paratuberculosis
gcugaaccugauccucaagggc

SEQ ID NO: 3606 - RNA, 22 nt, Mycobacterium avium subsp. paratuberculosis
gcguggugaucguguuccccgg

SEQ ID NO: 3607 - RNA, 22 nt, Mycobacterium avium subsp. paratuberculosis
gcugcaucgcgaaccggucgcc

SEQ ID NO: 3608 - RNA, 21 nt, Mycobacterium avium subsp. paratuberculosis
gcugccagggcacgcugcggg

SEQ ID NO: 3609 - RNA, 22 nt, Mycobacterium avium subsp. paratuberculosis
gcugccagucggccgccuuggu

SEQ ID NO: 3610 - RNA, 22 nt, Mycobacterium avium subsp. paratuberculosis
gcugcggcccgaggucgagggu

SEQ ID NO: 3611 - RNA, 22 nt, Mycobacterium avium subsp. paratuberculosis
gcgccgcugcaggcugcacucg

SEQ ID NO: 3612 - RNA, 21 nt, Mycobacterium avium subsp. paratuberculosis
gccugggcaccaggucgacga

SEQ ID NO: 3613 - RNA, 22 nt, Mycobacterium avium subsp. paratuberculosis
gccuccagcgccaucaccagcu

SEQ ID NO: 3614 - RNA, 22 nt, Mycobacterium avium subsp. paratuberculosis
gccucgacgugcgugucgccgc

SEQ ID NO: 3615 - RNA, 22 nt, Mycobacterium avium subsp. paratuberculosis
gccugcagauaguccagcgugu

SEQ ID NO: 3616 - RNA, 22 nt, Mycobacterium avium subsp. paratuberculosis
gccugccaccggucucgaacuc

SEQ ID NO: 3617 - RNA, 22 nt, Mycobacterium avium subsp. paratuberculosis
gccugcugacggggucgcugga

SEQ ID NO: 3618 - RNA, 22 nt, Mycobacterium avium subsp. paratuberculosis
gccuggaccuggacuggcgccc

SEQ ID NO: 3619 - RNA, 22 nt, Mycobacterium avium subsp. paratuberculosis
gcgaugaggaucugucucaucg

SEQ ID NO: 3620 - RNA, 22 nt, Mycobacterium avium subsp. paratuberculosis
gcgaccuggauggcguggcugc

SEQ ID NO: 3621 - RNA, 22 nt, Mycobacterium avium subsp. paratuberculosis
gccccgacucgacgcuggcggu

SEQ ID NO: 3622 - RNA, 22 nt, Mycobacterium avium subsp. paratuberculosis
gcccgccaugcccgggaucugg

SEQ ID NO: 3623 - RNA, 22 nt, Mycobacterium avium subsp. paratuberculosis
gcccgccucugagcgacaauca

SEQ ID NO: 3624 - RNA, 22 nt, Mycobacterium avium subsp. paratuberculosis
gccgaacugcugggccugggca

SEQ ID NO: 3625 - RNA, 20 nt, Mycobacterium avium subsp. paratuberculosis
gccaugagugcacguugggc

SEQ ID NO: 3626 - RNA, 21 nt, Mycobacterium avium subsp. paratuberculosis
gccguggcguuacgagcgagc

SEQ ID NO: 3627 - RNA, 22 nt, Mycobacterium avium subsp. paratuberculosis
gccguggugguuagcggcauga

SEQ ID NO: 3628 - RNA, 22 nt, Mycobacterium avium subsp. paratuberculosis
cuugacgugcucggcgcucagc

SEQ ID NO: 3629 - RNA, 22 nt, Mycobacterium avium subsp. paratuberculosis
cugugucuguccgcggcaucgc

SEQ ID NO: 3630 - RNA, 22 nt, Mycobacterium avium subsp. paratuberculosis
cuucuugcgauugcggcuggcg

SEQ ID NO: 3631 - RNA, 22 nt, Mycobacterium avium subsp. paratuberculosis
cuugaaccgguucaucgcgcug

SEQ ID NO: 3632 - RNA, 22 nt, Mycobacterium avium subsp. paratuberculosis
cugggcgcgcugccacagcgug

SEQ ID NO: 3633 - RNA, 22 nt, Mycobacterium avium subsp. paratuberculosis
cugggcgcggugguggccgcca

SEQ ID NO: 3634 - RNA, 22 nt, Mycobacterium avium subsp. paratuberculosis
cugggccaucgaccgcggcgcg

SEQ ID NO: 3635 - RNA, 22 nt, Mycobacterium avium subsp. paratuberculosis
cuggugaaucggcccauagcgg

SEQ ID NO: 3636 - RNA, 22 nt, Mycobacterium avium subsp. paratuberculosis
cuggugaucagcgccggcaucc

SEQ ID NO: 3637 - RNA, 22 nt, Mycobacterium avium subsp. paratuberculosis
cuggucacgcuguucgucaucu

SEQ ID NO: 3638 - RNA, 22 nt, Mycobacterium avium subsp. paratuberculosis
cuggcgcaguuuucggccgaag

SEQ ID NO: 3639 - RNA, 22 nt, Mycobacterium avium subsp. paratuberculosis
cuggacugggacaagggcaaga

SEQ ID NO: 3640 - RNA, 22 nt, Mycobacterium avium subsp. paratuberculosis
cuggcugacgucagcgacuucg

SEQ ID NO: 3641 - RNA, 22 nt, Mycobacterium avium subsp. paratuberculosis
cuggccagcuugcgggccgacu

SEQ ID NO: 3642 - RNA, 22 nt, Mycobacterium avium subsp. paratuberculosis
cuggccauggcguucggccggu

SEQ ID NO: 3643 - RNA, 22 nt, Mycobacterium avium subsp. paratuberculosis
cuggcccacuacgccgggcugg

SEQ ID NO: 3644 - RNA, 22 nt, Mycobacterium avium subsp. paratuberculosis
cuggccgacgcgcuggugcgac

SEQ ID NO: 3645 - RNA, 22 nt, Mycobacterium avium subsp. paratuberculosis
cuggccgaggccggccacaccg

SEQ ID NO: 3646 - RNA, 22 nt, Mycobacterium avium subsp. paratuberculosis
cugcagacccgcgccgucuggc

SEQ ID NO: 3647 - RNA, 22 nt, Mycobacterium avium subsp. paratuberculosis
cugcccaaggacaccgcggcgc

SEQ ID NO: 3648 - RNA, 20 nt, Mycobacterium avium subsp. paratuberculosis
cugccccggcgggauggcga

SEQ ID NO: 3649 - RNA, 22 nt, Mycobacterium avium subsp. paratuberculosis
cugcccgaccaggaccugccgu

SEQ ID NO: 3650 - RNA, 22 nt, Mycobacterium avium subsp. paratuberculosis
cugcgagccgguauugugaucg

SEQ ID NO: 3651 - RNA, 22 nt, Mycobacterium avium subsp. paratuberculosis
gagacccacccaggucugccgg

SEQ ID NO: 3652 - RNA, 22 nt, Mycobacterium avium subsp. paratuberculosis
gagaaccaguccucgggcguca

SEQ ID NO: 3653 - RNA, 20 nt, Mycobacterium avium subsp. paratuberculosis
gacguucuccacgcugcggc

SEQ ID NO: 3654 - RNA, 22 nt, Mycobacterium avium subsp. paratuberculosis
gaccagguggccgcccgcaccc

SEQ ID NO: 3655 - RNA, 22 nt, Mycobacterium avium subsp. paratuberculosis
gaccagguuggucaccggcacc

SEQ ID NO: 3656 - RNA, 20 nt, Mycobacterium avium subsp. paratuberculosis
gaccaugcagcaggaccgcu

SEQ ID NO: 3657 - RNA, 22 nt, Mycobacterium avium subsp. paratuberculosis
gaccccagucggacaggucgcg

SEQ ID NO: 3658 - RNA, 22 nt, Mycobacterium avium subsp. paratuberculosis
gaccugcagccggaugugcuga

SEQ ID NO: 3659 - RNA, 22 nt, Mycobacterium avium subsp. paratuberculosis
gaccugcucgacgggugggugg

SEQ ID NO: 3660 - RNA, 22 nt, Mycobacterium avium subsp. paratuberculosis
gaagugcaccugguugcugauc

SEQ ID NO: 3661 - RNA, 22 nt, Mycobacterium avium subsp. paratuberculosis
gaagugcugcgcgaugauaagc

SEQ ID NO: 3662 - RNA, 22 nt, Mycobacterium avium subsp. paratuberculosis
cuuugaaauaggcgugcaggcg

SEQ ID NO: 3663 - RNA, 22 nt, Mycobacterium avium subsp. paratuberculosis
gaaagugcaaccagcgacgugu

SEQ ID NO: 3664 - RNA, 22 nt, Mycobacterium avium subsp. paratuberculosis
gauggugccgcggaacuucucg

SEQ ID NO: 3665 - RNA, 22 nt, Mycobacterium avium subsp. paratuberculosis
gauggugucgcgcuggcuggac

SEQ ID NO: 3666 - RNA, 22 nt, Mycobacterium avium subsp. paratuberculosis
gauggcgacggauucgcggguc

SEQ ID NO: 3667 - RNA, 22 nt, Mycobacterium avium subsp. paratuberculosis
gaugccuucgacaaggcgaaga

SEQ ID NO: 3668 - RNA, 22 nt, Mycobacterium avium subsp. paratuberculosis
gaugggucugcgccucgaucag

SEQ ID NO: 3669 - RNA, 22 nt, Mycobacterium avium subsp. paratuberculosis
gagauacacccgggcauccgac

SEQ ID NO: 3670 - RNA, 22 nt, Mycobacterium avium subsp. paratuberculosis
gagacgagcgccuguaugaccg

SEQ ID NO: 3671 - RNA, 22 nt, Mycobacterium avium subsp. paratuberculosis
gagcaggaaggccaccagcgca

SEQ ID NO: 3672 - RNA, 22 nt, Mycobacterium avium subsp. paratuberculosis
gagcucacccggcucgccgugc

SEQ ID NO: 3673 - RNA, 22 nt, Mycobacterium avium subsp. paratuberculosis
gagggccugggcuacuacugcg

SEQ ID NO: 3674 - RNA, 22 nt, Mycobacterium avium subsp. paratuberculosis
gaggguggcguacagggugccg

SEQ ID NO: 3675 - RNA, 22 nt, Mycobacterium avium subsp. paratuberculosis
gcauggcccugcccgucgucag

SEQ ID NO: 3676 - RNA, 22 nt, Mycobacterium avium subsp. paratuberculosis
gccaccaccgucugcucggcgg

SEQ ID NO: 3677 - RNA, 22 nt, Mycobacterium avium subsp. paratuberculosis
gccacccugcugggcaugcugg

SEQ ID NO: 3678 - RNA, 22 nt, Mycobacterium avium subsp. paratuberculosis
gccaccucggcacccuggugau

SEQ ID NO: 3679 - RNA, 22 nt, Mycobacterium avium subsp. paratuberculosis
gccagcacccgcaacagcuguu

SEQ ID NO: 3680 - RNA, 22 nt, Mycobacterium avium subsp. paratuberculosis
gccagcaccgcgcugugcgugg

SEQ ID NO: 3681 - RNA, 22 nt, Mycobacterium avium subsp. paratuberculosis
gccagcagccgcgaggugucac

SEQ ID NO: 3682 - RNA, 22 nt, Mycobacterium avium subsp. paratuberculosis
gccauuuucccgagucccggca

SEQ ID NO: 3683 - RNA, 22 nt, Mycobacterium avium subsp. paratuberculosis
gcccacaaguccgaggugcugg

SEQ ID NO: 3684 - RNA, 22 nt, Mycobacterium avium subsp. paratuberculosis
gccaggccuccugcacggcguc

SEQ ID NO: 3685 - RNA, 22 nt, Mycobacterium avium subsp. paratuberculosis
gccagccagccguugccggauc

SEQ ID NO: 3686 - RNA, 22 nt, Mycobacterium avium subsp. paratuberculosis
gccaggcugggcgagcugcuag

SEQ ID NO: 3687 - RNA, 22 nt, Mycobacterium avium subsp. paratuberculosis
gccagguuguuguuggugcggc

SEQ ID NO: 3688 - RNA, 23 nt, Mycobacterium avium subsp. paratuberculosis
gccagcucgacggggugcucggc

SEQ ID NO: 3689 - RNA, 22 nt, Mycobacterium avium subsp. paratuberculosis
gcagcaugucccagucguggua

SEQ ID NO: 3690 - RNA, 22 nt, Mycobacterium avium subsp. paratuberculosis
gcagcauguccugccggcgggu

SEQ ID NO: 3691 - RNA, 22 nt, Mycobacterium avium subsp. paratuberculosis
gcagcaggacgagcucaccucg

SEQ ID NO: 3692 - RNA, 22 nt, Mycobacterium avium subsp. paratuberculosis
gcagcgugaugagcgaugccgc

SEQ ID NO: 3693 - RNA, 22 nt, Mycobacterium avium subsp. paratuberculosis
gcacgcccgcgagcaccgccau

SEQ ID NO: 3694 - RNA, 20 nt, Mycobacterium avium subsp. paratuberculosis
gcaaggggcgaucgcggcaa

SEQ ID NO: 3695 - RNA, 22 nt, Mycobacterium avium subsp. paratuberculosis
gcaacugcucagccacuccuug

SEQ ID NO: 3696 - RNA, 22 nt, Mycobacterium avium subsp. paratuberculosis
gcaacaaccccacguucggcgu

SEQ ID NO: 3697 - RNA, 22 nt, Mycobacterium bovis subsp bovis AF2122/97
gcacggccaaaggcaucgccga

SEQ ID NO: 3698 - RNA, 22 nt, Mycobacterium bovis subsp bovis AF2122/97
gcacggccuccggaccgagcaa

SEQ ID NO: 3699 - RNA, 22 nt, Mycobacterium bovis subsp bovis AF2122/97
gcaccccagagcacugauacgc

SEQ ID NO: 3700 - RNA, 22 nt, Mycobacterium bovis subsp bovis AF2122/97
gcagagccgaucguccuguugc

SEQ ID NO: 3701 - RNA, 22 nt, Mycobacterium bovis subsp bovis AF2122/97
gcagaugagugcagaggaucuc

SEQ ID NO: 3702 - RNA, 22 nt, Mycobacterium bovis subsp bovis AF2122/97
gcacggguucguugcugugcau

SEQ ID NO: 3703 - RNA, 22 nt, Mycobacterium bovis subsp bovis AF2122/97
gcagacacggcggugacgcgag

SEQ ID NO: 3704 - RNA, 22 nt, Mycobacterium bovis subsp bovis AF2122/97
gcagcgugucaccgucgaggac

SEQ ID NO: 3705 - RNA, 21 nt, Mycobacterium bovis subsp bovis AF2122/97
gccagcauggucgaggaugca

SEQ ID NO: 3706 - RNA, 22 nt, Mycobacterium bovis subsp bovis AF2122/97
gccagcagcucggcgauaucgg

SEQ ID NO: 3707 - RNA, 22 nt, Mycobacterium bovis subsp bovis AF2122/97
gccagguugacguugguuucgg

SEQ ID NO: 3708 - RNA, 22 nt, Mycobacterium bovis subsp bovis AF2122/97
gccaggcuagguacuggguugc

SEQ ID NO: 3709 - RNA, 22 nt, Mycobacterium bovis subsp bovis AF2122/97
gccagcaccaucugcgaucccg

SEQ ID NO: 3710 - RNA, 21 nt, Mycobacterium bovis subsp bovis AF2122/97
gccagcacgguguucaaguug

SEQ ID NO: 3711 - RNA, 22 nt, Mycobacterium bovis subsp bovis AF2122/97
gccagcacgucacgcaggccga

SEQ ID NO: 3712 - RNA, 22 nt, Mycobacterium bovis subsp bovis AF2122/97
gccaccacucaggccgcgguca

SEQ ID NO: 3713 - RNA, 22 nt, Mycobacterium bovis subsp bovis AF2122/97
gccacucggggccgcugcggcc

SEQ ID NO: 3714 - RNA, 22 nt, Mycobacterium bovis subsp bovis AF2122/97
gccagaacugccggccccaggg

SEQ ID NO: 3715 - RNA, 22 nt, Mycobacterium bovis subsp bovis AF2122/97
gccaagacgcgucggggccacc

SEQ ID NO: 3716 - RNA, 21 nt, Mycobacterium bovis subsp bovis AF2122/97
gccaacucaggcggacgaauc

SEQ ID NO: 3717 - RNA, 22 nt, Mycobacterium bovis subsp bovis AF2122/97
gcauggcagcaggcccgucccg

SEQ ID NO: 3718 - RNA, 22 nt, Mycobacterium bovis subsp bovis AF2122/97
gcagcgugaucaccgaaccugg

SEQ ID NO: 3719 - RNA, 22 nt, Mycobacterium bovis subsp bovis AF2122/97
gcauccagggggccgacgcauu

SEQ ID NO: 3720 - RNA, 22 nt, Mycobacterium bovis subsp bovis AF2122/97
gaggggcagcucggcuccgcgu

SEQ ID NO: 3721 - RNA, 22 nt, Mycobacterium bovis subsp bovis AF2122/97
gagggacuuaugcgucugcuag

SEQ ID NO: 3722 - RNA, 22 nt, Mycobacterium bovis subsp bovis AF2122/97
gagcaugggcguggacguuguc

SEQ ID NO: 3723 - RNA, 22 nt, Mycobacterium bovis subsp bovis AF2122/97
gagaugagccgaaauuacccug

SEQ ID NO: 3724 - RNA, 22 nt, Mycobacterium bovis subsp bovis AF2122/97
gauggcgaugcgcaccccgucg

SEQ ID NO: 3725 - RNA, 23 nt, Mycobacterium bovis subsp bovis AF2122/97
gauguuaacgcgagucagacaug

SEQ ID NO: 3726 - RNA, 22 nt, Mycobacterium bovis subsp bovis AF2122/97
gaguaccugcaggugccgucgc

SEQ ID NO: 3727 - RNA, 22 nt, Mycobacterium bovis subsp bovis AF2122/97
gaugacagcgaggugcacucgg

SEQ ID NO: 3728 - RNA, 22 nt, Mycobacterium bovis subsp bovis AF2122/97
gaucucugcgggguaguucggc

SEQ ID NO: 3729 - RNA, 22 nt, Mycobacterium bovis subsp bovis AF2122/97
gaagcugcugggccaguucgug

SEQ ID NO: 3730 - RNA, 22 nt, Mycobacterium bovis subsp bovis AF2122/97
gaagccagugugaccgccugga

SEQ ID NO: 3731 - RNA, 22 nt, Mycobacterium bovis subsp bovis AF2122/97
gaacagcuugcccuggaugccg

SEQ ID NO: 3732 - RNA, 22 nt, Mycobacterium bovis subsp bovis AF2122/97
gacaaaguuccacccgccgucc

SEQ ID NO: 3733 - RNA, 22 nt, Mycobacterium bovis subsp bovis AF2122/97
gaaucauugcccggcuccuggc

SEQ ID NO: 3734 - RNA, 22 nt, Mycobacterium bovis subsp bovis AF2122/97
gaauacaucggugucggcggcc

SEQ ID NO: 3735 - RNA, 22 nt, Mycobacterium bovis subsp bovis AF2122/97
gacagcuuucagcgaaucaccg

SEQ ID NO: 3736 - RNA, 22 nt, Mycobacterium bovis subsp bovis AF2122/97
gacugcccaggcugcgcguggc

SEQ ID NO: 3737 - RNA, 22 nt, Mycobacterium bovis subsp bovis AF2122/97
gagacccaucagagccgagucg

SEQ ID NO: 3738 - RNA, 22 nt, Mycobacterium bovis subsp bovis AF2122/97
cugccacuggugucacgucaug

SEQ ID NO: 3739 - RNA, 22 nt, Mycobacterium bovis subsp bovis AF2122/97
cugguccagccgcagcgugcgc

SEQ ID NO: 3740 - RNA, 22 nt, Mycobacterium bovis subsp bovis AF2122/97
cuggguucgacccaguccaagc

SEQ ID NO: 3741 - RNA, 17 nt, Mycobacterium bovis subsp bovis AF2122/97
cuggucacgaucauggc

SEQ ID NO: 3742 - RNA, 22 nt, Mycobacterium bovis subsp bovis AF2122/97
cugguggcgcgggaugccgacg

SEQ ID NO: 3743 - RNA, 22 nt, Mycobacterium bovis subsp bovis AF2122/97
cuggcuugccuccugccgcgac

SEQ ID NO: 3744 - RNA, 22 nt, Mycobacterium bovis subsp bovis AF2122/97
cuguggaguucggcgguguccu

SEQ ID NO: 3745 - RNA, 22 nt, Mycobacterium bovis subsp bovis AF2122/97
cuugaccuugcaccauggcguc

SEQ ID NO: 3746 - RNA, 23 nt, Mycobacterium bovis subsp bovis AF2122/97
cuugacgugaucgcugagacccu

SEQ ID NO: 3747 - RNA, 22 nt, Mycobacterium bovis subsp bovis AF2122/97
cuuccuggaguugccggaccag

SEQ ID NO: 3748 - RNA, 22 nt, Mycobacterium bovis subsp bovis AF2122/97
cuugggcguuugcguucgccgc

SEQ ID NO: 3749 - RNA, 22 nt, Mycobacterium bovis subsp bovis AF2122/97
cuugcugguaugccgggccacc

SEQ ID NO: 3750 - RNA, 22 nt, Mycobacterium bovis subsp bovis AF2122/97
gccgccaccgcuaccacccgug

SEQ ID NO: 3751 - RNA, 22 nt, Mycobacterium bovis subsp bovis AF2122/97
gccgcaccgacuaccaccgacu

SEQ ID NO: 3752 - RNA, 22 nt, Mycobacterium bovis subsp bovis AF2122/97
gccgaagccgaccggcccagcg

SEQ ID NO: 3753 - RNA, 22 nt, Mycobacterium bovis subsp bovis AF2122/97
gcccagagugcgcaggcucucg

SEQ ID NO: 3754 - RNA, 22 nt, Mycobacterium bovis subsp bovis AF2122/97
gccgcccaauucuccggucgcg

SEQ ID NO: 3755 - RNA, 22 nt, Mycobacterium bovis subsp bovis AF2122/97
gcgaaacacgggaucgggcgag

SEQ ID NO: 3756 - RNA, 22 nt, Mycobacterium bovis subsp bovis AF2122/97
gcgcacgcccuugcgcugcaau

SEQ ID NO: 3757 - RNA, 22 nt, Mycobacterium bovis subsp bovis AF2122/97
gcgcagcagcgacaggguggcg

SEQ ID NO: 3758 - RNA, 21 nt, Mycobacterium bovis subsp bovis AF2122/97
gcgcagcaucucagccagugc

SEQ ID NO: 3759 - RNA, 22 nt, Mycobacterium bovis subsp bovis AF2122/97
gccuggacuccgcuuuuggcac

SEQ ID NO: 3760 - RNA, 22 nt, Mycobacterium bovis subsp bovis AF2122/97
gccucagcguugcggcggguac

SEQ ID NO: 3761 - RNA, 22 nt, Mycobacterium bovis subsp bovis AF2122/97
gccuggugcaccggucgccggg

SEQ ID NO: 3762 - RNA, 22 nt, Mycobacterium bovis subsp bovis AF2122/97
gccugguguccgagcggcccuu

SEQ ID NO: 3763 - RNA, 22 nt, Mycobacterium bovis subsp bovis AF2122/97
gccuugacgagcgggccggcaa

SEQ ID NO: 3764 - RNA, 22 nt, Mycobacterium bovis subsp bovis AF2122/97
gccuugaauucgccccggccug

SEQ ID NO: 3765 - RNA, 22 nt, Mycobacterium bovis subsp bovis AF2122/97
gccuugaccgccuugauggcgg

SEQ ID NO: 3766 - RNA, 22 nt, Mycobacterium bovis subsp bovis AF2122/97
gccuugucgagaucgucgccgu

SEQ ID NO: 3767 - RNA, 22 nt, Mycobacterium bovis subsp bovis AF2122/97
gcgccgccggggaucccgaccu

SEQ ID NO: 3768 - RNA, 22 nt, Mycobacterium bovis subsp bovis AF2122/97
gcgauagccgaaccacccgccg

SEQ ID NO: 3769 - RNA, 22 nt, Mycobacterium bovis subsp bovis AF2122/97
gcgccacuggggucaccgacgg

SEQ ID NO: 3770 - RNA, 22 nt, Mycobacterium bovis subsp bovis AF2122/97
gcgccagugcugcgcgugcaca

SEQ ID NO: 3771 - RNA, 22 nt, Mycobacterium bovis subsp bovis AF2122/97
gcgcgcccgacgggcggugauc

SEQ ID NO: 3772 - RNA, 22 nt, Mycobacterium bovis subsp bovis AF2122/97
gcggcaugcgcgaucugcagag

SEQ ID NO: 3773 - RNA, 22 nt, Mycobacterium bovis subsp bovis AF2122/97
gcggccaacgaggcagcggcgg

SEQ ID NO: 3774 - RNA, 22 nt, Mycobacterium bovis subsp bovis AF2122/97
gcgcuuggccggcagcgagacc

SEQ ID NO: 3775 - RNA, 22 nt, Mycobacterium bovis subsp bovis AF2122/97
gcguggucggaugcaggccagc

SEQ ID NO: 3776 - RNA, 22 nt, Mycobacterium bovis subsp bovis AF2122/97
gcucaugucgccguagaccggg

SEQ ID NO: 3777 - RNA, 22 nt, Mycobacterium bovis subsp bovis AF2122/97
gcugccccgcgagcuggugcug

SEQ ID NO: 3778 - RNA, 22 nt, Mycobacterium bovis subsp bovis AF2122/97
gcucagccgugugcggauacuu

SEQ ID NO: 3779 - RNA, 22 nt, Mycobacterium bovis subsp bovis AF2122/97
gcugaaccugauccucaagggc

SEQ ID NO: 3780 - RNA, 22 nt, Mycobacterium bovis subsp bovis AF2122/97
gcuggccuuacugcccgacguc

SEQ ID NO: 3781 - RNA, 22 nt, Mycobacterium bovis subsp bovis AF2122/97
gcugggccuuacgcaccugccg

SEQ ID NO: 3782 - RNA, 22 nt, Mycobacterium bovis subsp bovis AF2122/97
gcuggccagggcguuuccgcuc

SEQ ID NO: 3783 - RNA, 22 nt, Mycobacterium bovis subsp bovis AF2122/97
gcuggccaguucgcccugaccu

SEQ ID NO: 3784 - RNA, 22 nt, Mycobacterium bovis subsp bovis AF2122/97
gcugcgucgggccucggaaugg

SEQ ID NO: 3785 - RNA, 22 nt, Mycobacterium bovis subsp bovis AF2122/97
ggacgaggugcgggcgcugcag

SEQ ID NO: 3786 - RNA, 22 nt, Mycobacterium bovis subsp bovis AF2122/97
ggaaguucuaucugccgccaaa

SEQ ID NO: 3787 - RNA, 22 nt, Mycobacterium bovis subsp bovis AF2122/97
gcuuuuaugacugcucggcggg

SEQ ID NO: 3788 - RNA, 22 nt, Mycobacterium bovis subsp bovis AF2122/97
gcuggugguaucgcuggccaag

SEQ ID NO: 3789 - RNA, 22 nt, Mycobacterium bovis subsp bovis AF2122/97
gcuuaugugacgacccccagcg

SEQ ID NO: 3790 - RNA, 22 nt, Mycobacterium bovis subsp bovis AF2122/97
ggauauugcccuggcgguggcu

SEQ ID NO: 3791 - RNA, 22 nt, Mycobacterium bovis subsp bovis AF2122/97
ggcaccaagucaccggcaucca

SEQ ID NO: 3792 - RNA, 22 nt, Mycobacterium bovis subsp bovis AF2122/97
ggcagagccagcgcacggaaau

SEQ ID NO: 3793 - RNA, 22 nt, Mycobacterium bovis subsp bovis AF2122/97
ggcaacaccuuucccccuucga

SEQ ID NO: 3794 - RNA, 22 nt, Mycobacterium bovis subsp bovis AF2122/97
ggccacgccgcccuugccggac

SEQ ID NO: 3795 - RNA, 22 nt, Mycobacterium bovis subsp bovis AF2122/97
ggccacucguccggcgauggcg

SEQ ID NO: 3796 - RNA, 23 nt, Mycobacterium bovis subsp bovis AF2122/97
ggccaaggagcacgaccucaacu

SEQ ID NO: 3797 - RNA, 22 nt, Mycobacterium bovis subsp bovis AF2122/97
ggcaggaucgggaugcguccag

SEQ ID NO: 3798 - RNA, 22 nt, Mycobacterium bovis subsp bovis AF2122/97
ggcagcgcccgggucaccagcc

SEQ ID NO: 3799 - RNA, 22 nt, Mycobacterium bovis subsp bovis AF2122/97
ggcagcagcgagaagugcaggu

SEQ ID NO: 3800 - RNA, 22 nt, Mycobacterium bovis subsp bovis AF2122/97
ggccgcauccccgucguagcgg

SEQ ID NO: 3801 - RNA, 22 nt, Mycobacterium bovis subsp bovis AF2122/97
ggccaggguggccuggaugagu

SEQ ID NO: 3802 - RNA, 22 nt, Mycobacterium bovis subsp bovis AF2122/97
ggccagggccgacggcacaucc

SEQ ID NO: 3803 - RNA, 22 nt, Mycobacterium bovis subsp bovis AF2122/97
ggcccggcucgccacgaggagg

SEQ ID NO: 3804 - RNA, 22 nt, Mycobacterium bovis subsp bovis AF2122/97
ggcccggcugccggcuacggcg

SEQ ID NO: 3805 - RNA, 22 nt, Mycobacterium bovis subsp bovis AF2122/97
ggcccggcugcgcgucguguca

SEQ ID NO: 3806 - RNA, 22 nt, Mycobacterium bovis subsp bovis AF2122/97
uaagcugcgccagccacgccgu

SEQ ID NO: 3807 - RNA, 22 nt, Mycobacterium bovis subsp bovis AF2122/97
uagguaaauaaauccguguuug

SEQ ID NO: 3808 - RNA, 22 nt, Mycobacterium bovis subsp bovis AF2122/97
uauguucaauaaaucauuaugu

SEQ ID NO: 3809 - RNA, 22 nt, Mycobacterium bovis subsp bovis AF2122/97
uaucuggcccaaggggcgcuuc

SEQ ID NO: 3810 - RNA, 22 nt, Mycobacterium bovis subsp bovis AF2122/97
ucaccaccggcacccaaggcga

SEQ ID NO: 3811 - RNA, 22 nt, Mycobacterium bovis subsp bovis AF2122/97
uauucaucgaguacagcugaau

SEQ ID NO: 3812 - RNA, 22 nt, Mycobacterium bovis subsp bovis AF2122/97
ucaccgccgcgguuggugcgca

SEQ ID NO: 3813 - RNA, 22 nt, Mycobacterium bovis subsp bovis AF2122/97
ucaccugcccggcaccuggagc

SEQ ID NO: 3814 - RNA, 22 nt, Mycobacterium bovis subsp bovis AF2122/97
ucacccccgagguggccacgcg

SEQ ID NO: 3815 - RNA, 22 nt, Mycobacterium bovis subsp bovis AF2122/97
ucagccgcaagcaccgucagcg

SEQ ID NO: 3816 - RNA, 19 nt, Mycobacterium bovis subsp bovis AF2122/97
ucagcuguacucgaugaau

SEQ ID NO: 3817 - RNA, 22 nt, Mycobacterium bovis subsp bovis AF2122/97
ucagcugucaugguuggugauu

SEQ ID NO: 3818 - RNA, 22 nt, Mycobacterium bovis subsp bovis AF2122/97
ucagcuguguccgcacaaccgg

SEQ ID NO: 3819 - RNA, 22 nt, Mycobacterium bovis subsp bovis AF2122/97
ucagcgucgaugaccaugucga

SEQ ID NO: 3820 - RNA, 18 nt, Mycobacterium bovis subsp bovis AF2122/97
ucacugcugcggucuggg

SEQ ID NO: 3821 - RNA, 22 nt, Mycobacterium bovis subsp bovis AF2122/97
uccagcacugucuuggcuucgg

SEQ ID NO: 3822 - RNA, 22 nt, Mycobacterium bovis subsp bovis AF2122/97
uccagcacuucuggggggaucc

SEQ ID NO: 3823 - RNA, 22 nt, Mycobacterium bovis subsp bovis AF2122/97
uccagcagcaacgccaagucgc

SEQ ID NO: 3824 - RNA, 22 nt, Mycobacterium bovis subsp bovis AF2122/97
uccagcagcacgucggugcgau

SEQ ID NO: 3825 - RNA, 22 nt, Mycobacterium bovis subsp bovis AF2122/97
ucacgccggggcuggagucacc

SEQ ID NO: 3826 - RNA, 22 nt, Mycobacterium bovis subsp bovis AF2122/97
ucaggcugggcgaaccugggca

SEQ ID NO: 3827 - RNA, 22 nt, Mycobacterium bovis subsp bovis AF2122/97
ucccgggcaucggcauccccgg

SEQ ID NO: 3828 - RNA, 23 nt, Mycobacterium bovis subsp bovis AF2122/97
ucccagaggcgagucaccuguuc

SEQ ID NO: 3829 - RNA, 23 nt, Mycobacterium bovis subsp bovis AF2122/97
ucccaggugccauacgagcugaa

SEQ ID NO: 3830 - RNA, 22 nt, Mycobacterium bovis subsp bovis AF2122/97
ucgagcucccggugagacgaga

SEQ ID NO: 3831 - RNA, 22 nt, Mycobacterium bovis subsp bovis AF2122/97
ucgaggacggugucgagccccg

SEQ ID NO: 3832 - RNA, 22 nt, Mycobacterium bovis subsp bovis AF2122/97
uccuuuccgucgaugcggaagc

SEQ ID NO: 3833 - RNA, 22 nt, Mycobacterium bovis subsp bovis AF2122/97
ucgaaacccagccaccucuugg

SEQ ID NO: 3834 - RNA, 22 nt, Mycobacterium bovis subsp bovis AF2122/97
uccugcgcgugguacucgucgg

SEQ ID NO: 3835 - RNA, 22 nt, Mycobacterium bovis subsp bovis AF2122/97
uccugcaggcgaucgcccuggc

SEQ ID NO: 3836 - RNA, 22 nt, Mycobacterium bovis subsp bovis AF2122/97
ucggccucccaugcggcgaucu

SEQ ID NO: 3837 - RNA, 22 nt, Mycobacterium bovis subsp bovis AF2122/97
ucgcgccaguguccgccgccga

SEQ ID NO: 3838 - RNA, 22 nt, Mycobacterium bovis subsp bovis AF2122/97
ucgcgccaucggcuacaccagc

SEQ ID NO: 3839 - RNA, 22 nt, Mycobacterium bovis subsp bovis AF2122/97
ucgauguuccgcagcuucgucg

SEQ ID NO: 3840 - RNA, 19 nt, Mycobacterium bovis subsp bovis AF2122/97
ucguccugcugugggugac

SEQ ID NO: 3841 - RNA, 22 nt, Mycobacterium bovis subsp bovis AF2122/97
ucggggacuucugcgucugcuc

SEQ ID NO: 3842 - RNA, 22 nt, Mycobacterium bovis subsp bovis AF2122/97
ucggugacggacugcacagcga

SEQ ID NO: 3843 - RNA, 22 nt, Mycobacterium bovis subsp bovis AF2122/97
ucgguggccagcgaggcgccgg

SEQ ID NO: 3844 - RNA, 22 nt, Mycobacterium bovis subsp bovis AF2122/97
ucgguggcgccgacaugccggu

SEQ ID NO: 3845 - RNA, 22 nt, Mycobacterium bovis subsp bovis AF2122/97
guccaagcagcgacuagucaag

SEQ ID NO: 3846 - RNA, 22 nt, Mycobacterium bovis subsp bovis AF2122/97
guccaagcaggcgaucggccgg

SEQ ID NO: 3847 - RNA, 22 nt, Mycobacterium bovis subsp bovis AF2122/97
guccagcagcccggucuggugu

SEQ ID NO: 3848 - RNA, 22 nt, Mycobacterium bovis subsp bovis AF2122/97
guccucaagccggcguuccagc

SEQ ID NO: 3849 - RNA, 22 nt, Mycobacterium bovis subsp bovis AF2122/97
gucgaggugaccagcggugagg

SEQ ID NO: 3850 - RNA, 22 nt, Mycobacterium bovis subsp bovis AF2122/97
gucgcuggugggaucgcagcgc

SEQ ID NO: 3851 - RNA, 22 nt, Mycobacterium bovis subsp bovis AF2122/97
gucgguggccgcugccaugucg

SEQ ID NO: 3852 - RNA, 22 nt, Mycobacterium bovis subsp bovis AF2122/97
gucugagagccccggaaagcgc

SEQ ID NO: 3853 - RNA, 22 nt, Mycobacterium bovis subsp bovis AF2122/97
gucuggaugaaagccuuguuga

SEQ ID NO: 3854 - RNA, 22 nt, Mycobacterium bovis subsp bovis AF2122/97
gugaaauugaaaacgccguugc

SEQ ID NO: 3855 - RNA, 22 nt, Mycobacterium bovis subsp bovis AF2122/97
gugcugggcaucaaccaggauc

SEQ ID NO: 3856 - RNA, 22 nt, Mycobacterium bovis subsp bovis AF2122/97
gugguggccaacuuccugcucg

SEQ ID NO: 3857 - RNA, 22 nt, Mycobacterium bovis subsp bovis AF2122/97
guggccaaggccaggucggccg

SEQ ID NO: 3858 - RNA, 22 nt, Mycobacterium bovis subsp bovis AF2122/97
gugcuuucagcuugucucgacg

SEQ ID NO: 3859 - RNA, 22 nt, Mycobacterium bovis subsp bovis AF2122/97
gugcugguggucagugacgccg

SEQ ID NO: 3860 - RNA, 22 nt, Mycobacterium bovis subsp bovis AF2122/97
gugguggucuccagcgcgcucg

SEQ ID NO: 3861 - RNA, 22 nt, Mycobacterium bovis subsp bovis AF2122/97
gugguggccguggccgcgucgu

SEQ ID NO: 3862 - RNA, 22 nt, Mycobacterium bovis subsp bovis AF2122/97
gugguggcgcaauucgaccagg

SEQ ID NO: 3863 - RNA, 22 nt, Mycobacterium bovis subsp bovis AF2122/97
guggugggaaccgcuccagggc

SEQ ID NO: 3864 - RNA, 22 nt, Mycobacterium bovis subsp bovis AF2122/97
guggugguguaggucucgaugc

SEQ ID NO: 3865 - RNA, 22 nt, Mycobacterium bovis subsp bovis AF2122/97
guucauucccgaggugcugagc

SEQ ID NO: 3866 - RNA, 21 nt, Mycobacterium bovis subsp bovis AF2122/97
guugguggacagcgcuucccg

SEQ ID NO: 3867 - RNA, 22 nt, Mycobacterium bovis subsp bovis AF2122/97
guuuggcgcgcccacagcccgg

SEQ ID NO: 3868 - RNA, 22 nt, Mycobacterium bovis subsp bovis AF2122/97
guuugguugccuaccgcguggg

SEQ ID NO: 3869 - RNA, 22 nt, Mycobacterium bovis subsp bovis AF2122/97
guugucuugcucgcuuuggcug

SEQ ID NO: 3870 - RNA, 22 nt, Mycobacterium bovis subsp bovis AF2122/97
guugugaacggaaccgccggga

SEQ ID NO: 3871 - RNA, 22 nt, Mycobacterium bovis subsp bovis AF2122/97
guugugaagacgccauucgcag

SEQ ID NO: 3872 - RNA, 22 nt, Mycobacterium bovis subsp bovis AF2122/97
guuguucaacgccgucaauguu

SEQ ID NO: 3873 - RNA, 22 nt, Mycobacterium bovis subsp bovis AF2122/97
guuucgggcgauuuugcguccu

SEQ ID NO: 3874 - RNA, 22 nt, Mycobacterium bovis subsp bovis AF2122/97
guugaccagcacgacugcaucg

SEQ ID NO: 3875 - RNA, 22 nt, Mycobacterium bovis subsp bovis AF2122/97
guugaucagcuuguugagcugc

SEQ ID NO: 3876 - RNA, 21 nt, Mycobacterium bovis subsp bovis AF2122/97
guuaggaucaucugcgccgcu

SEQ ID NO: 3877 - RNA, 22 nt, Mycobacterium bovis subsp bovis AF2122/97
guuuucagcguguaggaggugu

SEQ ID NO: 3878 - RNA, 22 nt, Mycobacterium bovis subsp bovis AF2122/97
guuuugggccucggcgagccga

SEQ ID NO: 3879 - RNA, 22 nt, Mycobacterium bovis subsp bovis AF2122/97
uaaaagaacuuugcauccgugc

SEQ ID NO: 3880 - RNA, 22 nt, Mycobacterium bovis subsp bovis AF2122/97
ggcgagcagacacagagucgca

SEQ ID NO: 3881 - RNA, 22 nt, Mycobacterium bovis subsp bovis AF2122/97
ggcguggucaccggcguggucg

SEQ ID NO: 3882 - RNA, 22 nt, Mycobacterium bovis subsp bovis AF2122/97
ggcgugguuggcgauggcacgu

SEQ ID NO: 3883 - RNA, 22 nt, Mycobacterium bovis subsp bovis AF2122/97
ggcuggcuugccgacauucagc

SEQ ID NO: 3884 - RNA, 22 nt, Mycobacterium bovis subsp bovis AF2122/97
ggcugcgcuggcccgccgguuu

SEQ ID NO: 3885 - RNA, 22 nt, Mycobacterium bovis subsp bovis AF2122/97
gggguuggugauguagccgaua

SEQ ID NO: 3886 - RNA, 22 nt, Mycobacterium bovis subsp bovis AF2122/97
gggcuggaccgcgaggagcugc

SEQ ID NO: 3887 - RNA, 22 nt, Mycobacterium bovis subsp bovis AF2122/97
gggcucggccaguugcuccugg

SEQ ID NO: 3888 - RNA, 22 nt, Mycobacterium bovis subsp bovis AF2122/97
gggguggugaaguacacgcccg

SEQ ID NO: 3889 - RNA, 22 nt, Mycobacterium bovis subsp bovis AF2122/97
gggcugcccaaucagcgcugcg

SEQ ID NO: 3890 - RNA, 22 nt, Mycobacterium bovis subsp bovis AF2122/97
gggcuacaccucgacgaggccg

SEQ ID NO: 3891 - RNA, 22 nt, Mycobacterium bovis subsp bovis AF2122/97
gggcgggucagggccugcacga

SEQ ID NO: 3892 - RNA, 19 nt, Mycobacterium bovis subsp bovis AF2122/97
gggaucuuggggcugcccc

SEQ ID NO: 3893 - RNA, 22 nt, Mycobacterium bovis subsp bovis AF2122/97
gggcagcaggaugcgccugcga

SEQ ID NO: 3894 - RNA, 22 nt, Mycobacterium bovis subsp bovis AF2122/97
gggcacaggccgauggcgcuga

SEQ ID NO: 3895 - RNA, 22 nt, Mycobacterium bovis subsp bovis AF2122/97
ggugcuuuugcgucugcucggc

SEQ ID NO: 3896 - RNA, 22 nt, Mycobacterium bovis subsp bovis AF2122/97
ggugguggcccgugaccguacc

SEQ ID NO: 3897 - RNA, 22 nt, Mycobacterium bovis subsp bovis AF2122/97
gguggcgcacaucgccgugcac

SEQ ID NO: 3898 - RNA, 22 nt, Mycobacterium bovis subsp bovis AF2122/97
gguggcguggucgccgaugucc

SEQ ID NO: 3899 - RNA, 22 nt, Mycobacterium bovis subsp bovis AF2122/97
ggugguuucguggccggcgagc

SEQ ID NO: 3900 - RNA, 22 nt, Mycobacterium bovis subsp bovis AF2122/97
ggugguggugccgucgucgcgc

SEQ ID NO: 3901 - RNA, 22 nt, Mycobacterium bovis subsp bovis AF2122/97
ggucgcgcccgcagccgguggu

SEQ ID NO: 3902 - RNA, 22 nt, Mycobacterium bovis subsp bovis AF2122/97
ggucgugguggugcucaacucg

SEQ ID NO: 3903 - RNA, 20 nt, Mycobacterium bovis subsp bovis AF2122/97
ggucacccugggugagccgg

SEQ ID NO: 3904 - RNA, 22 nt, Mycobacterium bovis subsp bovis AF2122/97
ggucagcacgcaugugcggugg

SEQ ID NO: 3905 - RNA, 22 nt, Mycobacterium bovis subsp bovis AF2122/97
ggguggugaaguuggcggccgg

SEQ ID NO: 3906 - RNA, 22 nt, Mycobacterium bovis subsp bovis AF2122/97
gggugguggucgccaacgccga

SEQ ID NO: 3907 - RNA, 22 nt, Mycobacterium bovis subsp bovis AF2122/97
gggucacgaucgccgccggcgc

SEQ ID NO: 3908 - RNA, 22 nt, Mycobacterium bovis subsp bovis AF2122/97
guaggucagggcguauuugucg

SEQ ID NO: 3909 - RNA, 22 nt, Mycobacterium bovis subsp bovis AF2122/97
gucauugcgucauuuccuucga

SEQ ID NO: 3910 - RNA, 22 nt, Mycobacterium bovis subsp bovis AF2122/97
gucaccuugcaccuggccgccg

SEQ ID NO: 3911 - RNA, 22 nt, Mycobacterium bovis subsp bovis AF2122/97
gguguaggucguugccgaccuc

SEQ ID NO: 3912 - RNA, 22 nt, Mycobacterium bovis subsp bovis AF2122/97
aacuccgguaguuucaacaccg

SEQ ID NO: 3913 - RNA, 22 nt, Mycobacterium bovis subsp bovis AF2122/97
aacaggccuugcgagacagcac

SEQ ID NO: 3914 - RNA, 22 nt, Mycobacterium bovis subsp bovis AF2122/97
aagccuuguggugcgcccauuu

SEQ ID NO: 3915 - RNA, 22 nt, Mycobacterium bovis subsp bovis AF2122/97
aaacugcaaccacgcaccgaug

SEQ ID NO: 3916 - RNA, 22 nt, Mycobacterium bovis subsp bovis AF2122/97
aaggugaacucacggcgagguu

SEQ ID NO: 3917 - RNA, 22 nt, Mycobacterium bovis subsp bovis AF2122/97
aagugcaacacgaacguuggau

SEQ ID NO: 3918 - RNA, 22 nt, Mycobacterium bovis subsp bovis AF2122/97
aaguccagcagaucgaucucgc

SEQ ID NO: 3919 - RNA, 22 nt, Mycobacterium bovis subsp bovis AF2122/97
aaggcuggagcgcacagcgcgg

SEQ ID NO: 3920 - RNA, 22 nt, Mycobacterium bovis subsp bovis AF2122/97
aaggcagggaggaauucgacac

SEQ ID NO: 3921 - RNA, 22 nt, Mycobacterium bovis subsp bovis AF2122/97
aauccggccugugucgggucgu

SEQ ID NO: 3922 - RNA, 22 nt, Mycobacterium bovis subsp bovis AF2122/97
aauggggugucaccuaccugca

SEQ ID NO: 3923 - RNA, 22 nt, Mycobacterium bovis subsp bovis AF2122/97
aauuuuacccacuugugcaucc

SEQ ID NO: 3924 - RNA, 22 nt, Mycobacterium bovis subsp bovis AF2122/97
acaagcccggcgcggugcuggu

SEQ ID NO: 3925 - RNA, 22 nt, Mycobacterium bovis subsp bovis AF2122/97
acaccaagcgcccgcagcuugc

SEQ ID NO: 3926 - RNA, 22 nt, Mycobacterium bovis subsp bovis AF2122/97
acaccaaggccgucagcuuggc

SEQ ID NO: 3927 - RNA, 22 nt, Mycobacterium bovis subsp bovis AF2122/97
acuggccagcccgcacaaccac

SEQ ID NO: 3928 - RNA, 22 nt, Mycobacterium bovis subsp bovis AF2122/97
acugucccgagcgcaccaggaa

SEQ ID NO: 3929 - RNA, 22 nt, Mycobacterium bovis subsp bovis AF2122/97
acugcuuuccugucugggcggc

SEQ ID NO: 3930 - RNA, 22 nt, Mycobacterium bovis subsp bovis AF2122/97
acuccucagccggcggcccugg

SEQ ID NO: 3931 - RNA, 23 nt, Mycobacterium bovis subsp bovis AF2122/97
agauggagcucucgcuguaucgc

SEQ ID NO: 3932 - RNA, 23 nt, Mycobacterium bovis subsp bovis AF2122/97
agcaaugcgcacggcauccagcg

SEQ ID NO: 3933 - RNA, 22 nt, Mycobacterium bovis subsp bovis AF2122/97
acuacgucggugauuugguugc

SEQ ID NO: 3934 - RNA, 22 nt, Mycobacterium bovis subsp bovis AF2122/97
acguucugcacgcucgggccgg

SEQ ID NO: 3935 - RNA, 22 nt, Mycobacterium bovis subsp bovis AF2122/97
acgccccaacaacguuucgguu

SEQ ID NO: 3936 - RNA, 19 nt, Mycobacterium bovis subsp bovis AF2122/97
acccaggccgucacuucga

SEQ ID NO: 3937 - RNA, 22 nt, Mycobacterium bovis subsp bovis AF2122/97
accggccuggugcucaauagcc

SEQ ID NO: 3938 - RNA, 22 nt, Mycobacterium bovis subsp bovis AF2122/97
acccagaggcuguugccgacgc

SEQ ID NO: 3939 - RNA, 19 nt, Mycobacterium bovis subsp bovis AF2122/97
acaggcccucgugaucacc

SEQ ID NO: 3940 - RNA, 22 nt, Mycobacterium bovis subsp bovis AF2122/97
accaaguagcgcgacucccguu

SEQ ID NO: 3941 - RNA, 22 nt, Mycobacterium bovis subsp bovis AF2122/97
acagccagcugcccgguccgcc

SEQ ID NO: 3942 - RNA, 22 nt, Mycobacterium bovis subsp bovis AF2122/97
acacccaggggcugccgcagcg

SEQ ID NO: 3943 - RNA, 22 nt, Mycobacterium bovis subsp bovis AF2122/97
acagcugcugguuugagucugc

SEQ ID NO: 3944 - RNA, 22 nt, Mycobacterium bovis subsp bovis AF2122/97
agcagggccgcagcggcucggu

SEQ ID NO: 3945 - RNA, 22 nt, Mycobacterium bovis subsp bovis AF2122/97
agccaagccguaguccucgacg

SEQ ID NO: 3946 - RNA, 22 nt, Mycobacterium bovis subsp bovis AF2122/97
agccccagucgcuuugucucga

SEQ ID NO: 3947 - RNA, 22 nt, Mycobacterium bovis subsp bovis AF2122/97
agccgggcaucuggaaguggcu

SEQ ID NO: 3948 - RNA, 22 nt, Mycobacterium bovis subsp bovis AF2122/97
agcccggcggugcucgaggaag

SEQ ID NO: 3949 - RNA, 22 nt, Mycobacterium bovis subsp bovis AF2122/97
agcucccggaugagccggcucg

SEQ ID NO: 3950 - RNA, 22 nt, Mycobacterium bovis subsp bovis AF2122/97
agccuccagcucgcgaagccaa

SEQ ID NO: 3951 - RNA, 22 nt, Mycobacterium bovis subsp bovis AF2122/97
agcuuggaggcgaucgcgcggg

SEQ ID NO: 3952 - RNA, 22 nt, Mycobacterium bovis subsp bovis AF2122/97
aguccugggccaacugccggua

SEQ ID NO: 3953 - RNA, 22 nt, Mycobacterium bovis subsp bovis AF2122/97
agguugccgcacuagacugcug

SEQ ID NO: 3954 - RNA, 22 nt, Mycobacterium bovis subsp bovis AF2122/97
aguuucucagcgagcaggugcu

SEQ ID NO: 3955 - RNA, 22 nt, Mycobacterium bovis subsp bovis AF2122/97
aggucaccgagaugacgucacc

SEQ ID NO: 3956 - RNA, 22 nt, Mycobacterium bovis subsp bovis AF2122/97
aggucugucggaccuggccgcg

SEQ ID NO: 3957 - RNA, 22 nt, Mycobacterium bovis subsp bovis AF2122/97
agguagacgugucccgcauggg

SEQ ID NO: 3958 - RNA, 22 nt, Mycobacterium bovis subsp bovis AF2122/97
agguggcgacggcguugaccga

SEQ ID NO: 3959 - RNA, 22 nt, Mycobacterium bovis subsp bovis AF2122/97
agggcugccacagucgccuggg

SEQ ID NO: 3960 - RNA, 22 nt, Mycobacterium bovis subsp bovis AF2122/97
aggugcgccguggcaucgccuc

SEQ ID NO: 3961 - RNA, 22 nt, Mycobacterium bovis subsp bovis AF2122/97
agucaccuacaacgggguggag

SEQ ID NO: 3962 - RNA, 22 nt, Mycobacterium bovis subsp bovis AF2122/97
agucagagucucgggcauguac

SEQ ID NO: 3963 - RNA, 22 nt, Mycobacterium bovis subsp bovis AF2122/97
auccaggaauugucagacguua

SEQ ID NO: 3964 - RNA, 22 nt, Mycobacterium bovis subsp bovis AF2122/97
aucaccaccgagaugccgaacc

SEQ ID NO: 3965 - RNA, 22 nt, Mycobacterium bovis subsp bovis AF2122/97
aucacgccucucgguggugggg

SEQ ID NO: 3966 - RNA, 22 nt, Mycobacterium bovis subsp bovis AF2122/97
aucaccuuccucggcaugagau

SEQ ID NO: 3967 - RNA, 22 nt, Mycobacterium bovis subsp bovis AF2122/97
auccaggcgaccggccggggua

SEQ ID NO: 3968 - RNA, 22 nt, Mycobacterium bovis subsp bovis AF2122/97
aucgcagccacggaguucgauu

SEQ ID NO: 3969 - RNA, 22 nt, Mycobacterium bovis subsp bovis AF2122/97
aucuaaaccgacgcgcacgaga

SEQ ID NO: 3970 - RNA, 22 nt, Mycobacterium bovis subsp bovis AF2122/97
aucugcagguuccuggguugac

SEQ ID NO: 3971 - RNA, 22 nt, Mycobacterium bovis subsp bovis AF2122/97
auaccagcaauugcucgacgaa

SEQ ID NO: 3972 - RNA, 22 nt, Mycobacterium bovis subsp bovis AF2122/97
augguguacgccgcagcgcggg

SEQ ID NO: 3973 - RNA, 23 nt, Mycobacterium bovis subsp bovis AF2122/97
auggccucccggccgaugcgggc

SEQ ID NO: 3974 - RNA, 22 nt, Mycobacterium bovis subsp bovis AF2122/97
auggccaaccucccgacuggua

SEQ ID NO: 3975 - RNA, 22 nt, Mycobacterium bovis subsp bovis AF2122/97
augaccuggcgggucgugguug

SEQ ID NO: 3976 - RNA, 22 nt, Mycobacterium bovis subsp bovis AF2122/97
augaaaccgguggccaugccgc

SEQ ID NO: 3977 - RNA, 22 nt, Mycobacterium bovis subsp bovis AF2122/97
augaggcgauuuugcgucugcu

SEQ ID NO: 3978 - RNA, 22 nt, Mycobacterium bovis subsp bovis AF2122/97
cggcugcagugcgacgacgaga

SEQ ID NO: 3979 - RNA, 22 nt, Mycobacterium bovis subsp bovis AF2122/97
cggcucccgugccggugccgau

SEQ ID NO: 3980 - RNA, 22 nt, Mycobacterium bovis subsp bovis AF2122/97
cggguuugguguccgcacugcu

SEQ ID NO: 3981 - RNA, 22 nt, Mycobacterium bovis subsp bovis AF2122/97
cggggcugccggugagugcgcg

SEQ ID NO: 3982 - RNA, 22 nt, Mycobacterium bovis subsp bovis AF2122/97
cgggucuauggguggaugcucg

SEQ ID NO: 3983 - RNA, 22 nt, Mycobacterium bovis subsp bovis AF2122/97
cgggcugcagcgguaguacuuu

SEQ ID NO: 3984 - RNA, 22 nt, Mycobacterium bovis subsp bovis AF2122/97
cggggaucggcacccuggccgc

SEQ ID NO: 3985 - RNA, 22 nt, Mycobacterium bovis subsp bovis AF2122/97
cggcucaggcuuaugcagccgu

SEQ ID NO: 3986 - RNA, 22 nt, Mycobacterium bovis subsp bovis AF2122/97
cgcucagggcgucaccgccccg

SEQ ID NO: 3987 - RNA, 22 nt, Mycobacterium bovis subsp bovis AF2122/97
cggcagcacgagcucgucgugg

SEQ ID NO: 3988 - RNA, 22 nt, Mycobacterium bovis subsp bovis AF2122/97
cgcccggccgcuggucgcguac

SEQ ID NO: 3989 - RNA, 22 nt, Mycobacterium bovis subsp bovis AF2122/97
cgccucccgggcugggcugguu

SEQ ID NO: 3990 - RNA, 17 nt, Mycobacterium bovis subsp bovis AF2122/97
cgccuggcgcugacccc

SEQ ID NO: 3991 - RNA, 22 nt, Mycobacterium bovis subsp bovis AF2122/97
cgccugggccagugccgacuuc

SEQ ID NO: 3992 - RNA, 22 nt, Mycobacterium bovis subsp bovis AF2122/97
cgccuuggacgacgguuccgau

SEQ ID NO: 3993 - RNA, 22 nt, Mycobacterium bovis subsp bovis AF2122/97
cgcucgagauugcagcgggccc

SEQ ID NO: 3994 - RNA, 22 nt, Mycobacterium bovis subsp bovis AF2122/97
cgcugggcagucucgaggaccu

SEQ ID NO: 3995 - RNA, 22 nt, Mycobacterium bovis subsp bovis AF2122/97
cgugauccacagccacccggug

SEQ ID NO: 3996 - RNA, 22 nt, Mycobacterium bovis subsp bovis AF2122/97
cggucaccuucgcaucggugau

SEQ ID NO: 3997 - RNA, 22 nt, Mycobacterium bovis subsp bovis AF2122/97
cggucaccaucucgcagacaua

SEQ ID NO: 3998 - RNA, 22 nt, Mycobacterium bovis subsp bovis AF2122/97
cgugggccugagcagcgacgac

SEQ ID NO: 3999 - RNA, 22 nt, Mycobacterium bovis subsp bovis AF2122/97
cguggaaugcaugaucgucgcc

SEQ ID NO: 4000 - RNA, 22 nt, Mycobacterium bovis subsp bovis AF2122/97
cguucagcacggccgacagcga

SEQ ID NO: 4001 - RNA, 22 nt, Mycobacterium bovis subsp bovis AF2122/97
cuaccagccggcgcagcagcgc

SEQ ID NO: 4002 - RNA, 22 nt, Mycobacterium bovis subsp bovis AF2122/97
ccgcccaggcucccgcucgacg

SEQ ID NO: 4003 - RNA, 21 nt, Mycobacterium bovis subsp bovis AF2122/97
cccugggccgccucgcucacc

SEQ ID NO: 4004 - RNA, 22 nt, Mycobacterium bovis subsp bovis AF2122/97
ccguugacgaaccggaccaauc

SEQ ID NO: 4005 - RNA, 22 nt, Mycobacterium bovis subsp bovis AF2122/97
ccugggcgacuuggcguugcug

SEQ ID NO: 4006 - RNA, 22 nt, Mycobacterium bovis subsp bovis AF2122/97
ccuggcgcgcagcacggccugc

SEQ ID NO: 4007 - RNA, 22 nt, Mycobacterium bovis subsp bovis AF2122/97
ccugggaucgaggggucuucau

SEQ ID NO: 4008 - RNA, 22 nt, Mycobacterium bovis subsp bovis AF2122/97
ccugggauggucaacaccguga

SEQ ID NO: 4009 - RNA, 22 nt, Mycobacterium bovis subsp bovis AF2122/97
ccugggauugugggcgggcguc

SEQ ID NO: 4010 - RNA, 22 nt, Mycobacterium bovis subsp bovis AF2122/97
ccugucucggcaagccuggucg

SEQ ID NO: 4011 - RNA, 22 nt, Mycobacterium bovis subsp bovis AF2122/97
ccgcccggggcauggccaagcu

SEQ ID NO: 4012 - RNA, 21 nt, Mycobacterium bovis subsp bovis AF2122/97
cgccccagaugcacgcucggc

SEQ ID NO: 4013 - RNA, 22 nt, Mycobacterium bovis subsp bovis AF2122/97
cgcccgccaaggacuuccgcgc

SEQ ID NO: 4014 - RNA, 22 nt, Mycobacterium bovis subsp bovis AF2122/97
cgcaggaugaggcuugccaccg

SEQ ID NO: 4015 - RNA, 22 nt, Mycobacterium bovis subsp bovis AF2122/97
cgccacucuggucuugcaccug

SEQ ID NO: 4016 - RNA, 22 nt, Mycobacterium bovis subsp bovis AF2122/97
cgccagcaccaccugguugggc

SEQ ID NO: 4017 - RNA, 22 nt, Mycobacterium bovis subsp bovis AF2122/97
cgcagcaucggcgauugucggc

SEQ ID NO: 4018 - RNA, 22 nt, Mycobacterium bovis subsp bovis AF2122/97
cgccaagccgcaaggcucggcg

SEQ ID NO: 4019 - RNA, 22 nt, Mycobacterium bovis subsp bovis AF2122/97
cgagccuggccacugggaagga

SEQ ID NO: 4020 - RNA, 21 nt, Mycobacterium bovis subsp bovis AF2122/97
cgagcucgcggcccagaguuc

SEQ ID NO: 4021 - RNA, 22 nt, Mycobacterium bovis subsp bovis AF2122/97
cgaccugccgcagcguugcuau

SEQ ID NO: 4022 - RNA, 22 nt, Mycobacterium bovis subsp bovis AF2122/97
cccagccaggguaaggccuuug

SEQ ID NO: 4023 - RNA, 22 nt, Mycobacterium bovis subsp bovis AF2122/97
cccagcgccagcgugaucggca

SEQ ID NO: 4024 - RNA, 22 nt, Mycobacterium bovis subsp bovis AF2122/97
ccaugccgaugacgcuguuggc

SEQ ID NO: 4025 - RNA, 22 nt, Mycobacterium bovis subsp bovis AF2122/97
cccagcaccgaccagugccggc

SEQ ID NO: 4026 - RNA, 22 nt, Mycobacterium bovis subsp bovis AF2122/97
cccgcgccgggauagucaccgc

SEQ ID NO: 4027 - RNA, 22 nt, Mycobacterium bovis subsp bovis AF2122/97
cccuggugguccgaucguucau

SEQ ID NO: 4028 - RNA, 22 nt, Mycobacterium bovis subsp bovis AF2122/97
cccagcaccugccaggacgggc

SEQ ID NO: 4029 - RNA, 22 nt, Mycobacterium bovis subsp bovis AF2122/97
ccccuaccgucgauguggcggg

SEQ ID NO: 4030 - RNA, 22 nt, Mycobacterium bovis subsp bovis AF2122/97
ccagcuugucgccacgaaccuu

SEQ ID NO: 4031 - RNA, 22 nt, Mycobacterium bovis subsp bovis AF2122/97
ccagccugcgcaagacggugac

SEQ ID NO: 4032 - RNA, 22 nt, Mycobacterium bovis subsp bovis AF2122/97
ccagccgccagcaucucggauc

SEQ ID NO: 4033 - RNA, 22 nt, Mycobacterium bovis subsp bovis AF2122/97
ccagcagugcgggcgaucguga

SEQ ID NO: 4034 - RNA, 22 nt, Mycobacterium bovis subsp bovis AF2122/97
ccagcagcgcguacagcaucga

SEQ ID NO: 4035 - RNA, 22 nt, Mycobacterium bovis subsp bovis AF2122/97
ccaggugcauugugcaccacau

SEQ ID NO: 4036 - RNA, 22 nt, Mycobacterium bovis subsp bovis AF2122/97
ccaggugccgucggguuguucg

SEQ ID NO: 4037 - RNA, 22 nt, Mycobacterium bovis subsp bovis AF2122/97
ccaugagcacccggauggccug

SEQ ID NO: 4038 - RNA, 22 nt, Mycobacterium bovis subsp bovis AF2122/97
ccagcucaucgccguagcugag

SEQ ID NO: 4039 - RNA, 22 nt, Mycobacterium bovis subsp bovis AF2122/97
ccaggccaccgcgcggccaccg

SEQ ID NO: 4040 - RNA, 23 nt, Mycobacterium bovis subsp bovis AF2122/97
cauccugcuggugcggaccggca

SEQ ID NO: 4041 - RNA, 22 nt, Mycobacterium bovis subsp bovis AF2122/97
caugacuuccagcaacgccgac

SEQ ID NO: 4042 - RNA, 22 nt, Mycobacterium bovis subsp bovis AF2122/97
caugcaucggaagaaccggcau

SEQ ID NO: 4043 - RNA, 22 nt, Mycobacterium bovis subsp bovis AF2122/97
cauugcaccggugcgcucggcg

SEQ ID NO: 4044 - RNA, 22 nt, Mycobacterium bovis subsp bovis AF2122/97
cauggaaacgcaggugguguca

SEQ ID NO: 4045 - RNA, 22 nt, Mycobacterium bovis subsp bovis AF2122/97
cauccagcaguacgaggacggg

SEQ ID NO: 4046 - RNA, 22 nt, Mycobacterium bovis subsp bovis AF2122/97
cauccaggcgaugguggcaacc

SEQ ID NO: 4047 - RNA, 22 nt, Mycobacterium bovis subsp bovis AF2122/97
caucuguuggcgcucucggccu

SEQ ID NO: 4048 - RNA, 22 nt, Mycobacterium bovis subsp bovis AF2122/97
caguucggucucuauccgccgc

SEQ ID NO: 4049 - RNA, 22 nt, Mycobacterium bovis subsp bovis AF2122/97
ccacccgcgccagccggacggc

SEQ ID NO: 4050 - RNA, 22 nt, Mycobacterium bovis subsp bovis AF2122/97
ccaccgccacggccagcaccgc

SEQ ID NO: 4051 - RNA, 23 nt, Mycobacterium bovis subsp bovis AF2122/97
ccagauccagccguacgacgggc

SEQ ID NO: 4052 - RNA, 22 nt, Mycobacterium bovis subsp bovis AF2122/97
ccaagcucuggauggccugccg

SEQ ID NO: 4053 - RNA, 22 nt, Mycobacterium bovis subsp bovis AF2122/97
ccaaugggauguugccgagcau

SEQ ID NO: 4054 - RNA, 22 nt, Mycobacterium bovis subsp bovis AF2122/97
ccaccagcuggacgccgucgcg

SEQ ID NO: 4055 - RNA, 22 nt, Mycobacterium bovis subsp bovis AF2122/97
ccaccaugcgcgccuacgcgaa

SEQ ID NO: 4056 - RNA, 22 nt, Mycobacterium bovis subsp bovis AF2122/97
cacgccggcgugcaucggugac

SEQ ID NO: 4057 - RNA, 22 nt, Mycobacterium bovis subsp bovis AF2122/97
cacgccagcgucccggguugcu

SEQ ID NO: 4058 - RNA, 22 nt, Mycobacterium bovis subsp bovis AF2122/97
caccugccgaucgcacagguug

SEQ ID NO: 4059 - RNA, 22 nt, Mycobacterium bovis subsp bovis AF2122/97
cacgagcguaaccccagugcga

SEQ ID NO: 4060 - RNA, 20 nt, Mycobacterium bovis subsp bovis AF2122/97
cacuccuggcuggauucggc

SEQ ID NO: 4061 - RNA, 22 nt, Mycobacterium bovis subsp bovis AF2122/97
caccagggugcugccggugauu

SEQ ID NO: 4062 - RNA, 22 nt, Mycobacterium bovis subsp bovis AF2122/97
cacugacuagugaagaaccuuu

SEQ ID NO: 4063 - RNA, 22 nt, Mycobacterium bovis subsp bovis AF2122/97
cagccagggucagcacgcggau

SEQ ID NO: 4064 - RNA, 22 nt, Mycobacterium bovis subsp bovis AF2122/97
cagccggcgcauggucaaagcg

SEQ ID NO: 4065 - RNA, 22 nt, Mycobacterium bovis subsp bovis AF2122/97
cagcucccaacgguggccccgg

SEQ ID NO: 4066 - RNA, 22 nt, Mycobacterium bovis subsp bovis AF2122/97
cagcguugucucggcgaacacc

SEQ ID NO: 4067 - RNA, 22 nt, Mycobacterium bovis subsp bovis AF2122/97
caggauauccaggcggcagcag

SEQ ID NO: 4068 - RNA, 22 nt, Mycobacterium bovis subsp bovis AF2122/97
caggcgaaucaccccgccgcgc

SEQ ID NO: 4069 - RNA, 22 nt, Mycobacterium bovis subsp bovis AF2122/97
caggggcucgauccggccgggc

SEQ ID NO: 4070 - RNA, 22 nt, Mycobacterium bovis subsp bovis AF2122/97
caggaugacgccgcagcgcucg

SEQ ID NO: 4071 - RNA, 22 nt, Mycobacterium bovis subsp bovis AF2122/97
augguguagaucuuggucgggu

SEQ ID NO: 4072 - RNA, 22 nt, Mycobacterium bovis subsp bovis AF2122/97
auucucuucauggugguguuga

SEQ ID NO: 4073 - RNA, 22 nt, Mycobacterium bovis subsp bovis AF2122/97
auuccguugcgccuauuugaaa

SEQ ID NO: 4074 - RNA, 22 nt, Mycobacterium bovis subsp bovis AF2122/97
caaguaguaggcgagaucaccg

SEQ ID NO: 4075 - RNA, 22 nt, Mycobacterium bovis subsp bovis AF2122/97
cacaccgcgaugacuccggcga

SEQ ID NO: 4076 - RNA, 22 nt, Mycobacterium bovis subsp bovis AF2122/97
caauguuucgacgggcaccaaa

SEQ ID NO: 4077 - RNA, 22 nt, Mycobacterium bovis subsp bovis AF2122/97
caagaccaggacggcgccgucg

SEQ ID NO: 4078 - RNA, 22 nt, Mycobacterium bovis subsp bovis AF2122/97
auuggccaggcugacagaggca

SEQ ID NO: 4079 - RNA, 22 nt, Mycobacterium bovis subsp bovis AF2122/97
caaauauuucguggcgaugcgc

SEQ ID NO: 4080 - RNA, 21 nt, Mycobacterium bovis subsp bovis AF2122/97
auuugcaacgcaacggcgugc

SEQ ID NO: 4081 - RNA, 22 nt, Mycobacterium bovis subsp bovis AF2122/97
uuucauucguugcgcgcagacc

SEQ ID NO: 4082 - RNA, 22 nt, Mycobacterium bovis subsp bovis AF2122/97
uuugauauccgcaaccugcggu

SEQ ID NO: 4083 - RNA, 22 nt, Mycobacterium bovis subsp bovis AF2122/97
uuucauucagacgagaggcgug

SEQ ID NO: 4084 - RNA, 22 nt, Mycobacterium bovis subsp bovis AF2122/97
uuucagguccagcuuccgucga

SEQ ID NO: 4085 - RNA, 22 nt, Mycobacterium bovis subsp bovis AF2122/97
uuagccuuaugccugucacacc

SEQ ID NO: 4086 - RNA, 22 nt, Mycobacterium bovis subsp bovis AF2122/97
uucaccuuccuugacgccauau

SEQ ID NO: 4087 - RNA, 22 nt, Mycobacterium bovis subsp bovis AF2122/97
uucagcagggugauguccagcc

SEQ ID NO: 4088 - RNA, 22 nt, Mycobacterium bovis subsp bovis AF2122/97
uucaggcuacgguagcggugcg

SEQ ID NO: 4089 - RNA, 22 nt, Mycobacterium bovis subsp bovis AF2122/97
uucaucaguuggucgagguuga

SEQ ID NO: 4090 - RNA, 22 nt, Mycobacterium bovis subsp bovis AF2122/97
uggucaggcggccgucgucggc

SEQ ID NO: 4091 - RNA, 22 nt, Mycobacterium bovis subsp bovis AF2122/97
uggucggcgaguucgccgugca

SEQ ID NO: 4092 - RNA, 22 nt, Mycobacterium bovis subsp bovis AF2122/97
uggguggcuucggcgcgcugaa

SEQ ID NO: 4093 - RNA, 22 nt, Mycobacterium bovis subsp bovis AF2122/97
uggggcuggcucugcuugccgc

SEQ ID NO: 4094 - RNA, 22 nt, Mycobacterium bovis subsp bovis AF2122/97
uggucacguacggccgccgcgg

SEQ ID NO: 4095 - RNA, 22 nt, Mycobacterium bovis subsp bovis AF2122/97
ugguuggugccgaacugcaucu

SEQ ID NO: 4096 - RNA, 22 nt, Mycobacterium bovis subsp bovis AF2122/97
ugguuucccgugaggugaucgc

SEQ ID NO: 4097 - RNA, 23 nt, Mycobacterium bovis subsp bovis AF2122/97
ugguggucaccccgacgacgcuc

SEQ ID NO: 4098 - RNA, 22 nt, Mycobacterium bovis subsp bovis AF2122/97
ugguuucccuacccgggcagca

SEQ ID NO: 4099 - RNA, 22 nt, Mycobacterium bovis subsp bovis AF2122/97
ugguggcgugcagcgccaucuc

SEQ ID NO: 4100 - RNA, 22 nt, Mycobacterium bovis subsp bovis AF2122/97
ugguggcugugucgaccgggaa

SEQ ID NO: 4101 - RNA, 22 nt, Mycobacterium bovis subsp bovis AF2122/97
uggucaccgucgccgcaaucga

SEQ ID NO: 4102 - RNA, 18 nt, Mycobacterium bovis subsp bovis AF2122/97
uggugcaccuuguuuggg

SEQ ID NO: 4103 - RNA, 22 nt, Mycobacterium bovis subsp bovis AF2122/97
uguggaauacgcugcuggucuu

SEQ ID NO: 4104 - RNA, 22 nt, Mycobacterium bovis subsp bovis AF2122/97
ugucgcgcaagcucuccggcac

SEQ ID NO: 4105 - RNA, 22 nt, Mycobacterium bovis subsp bovis AF2122/97
ugucccgcacucgauccgcaag

SEQ ID NO: 4106 - RNA, 22 nt, Mycobacterium bovis subsp bovis AF2122/97
uugauccagggugcgugguugg

SEQ ID NO: 4107 - RNA, 22 nt, Mycobacterium bovis subsp bovis AF2122/97
uugaugaugcggauccggauuc

SEQ ID NO: 4108 - RNA, 22 nt, Mycobacterium bovis subsp bovis AF2122/97
uugaggaucagguucagcuggc

SEQ ID NO: 4109 - RNA, 22 nt, Mycobacterium bovis subsp bovis AF2122/97
uucguggcgaccaugcgccggu

SEQ ID NO: 4110 - RNA, 22 nt, Mycobacterium bovis subsp bovis AF2122/97
uucuagccgccccgggcgcagc

SEQ ID NO: 4111 - RNA, 22 nt, Mycobacterium bovis subsp bovis AF2122/97
uuccagccacagcccggcggcg

SEQ ID NO: 4112 - RNA, 22 nt, Mycobacterium bovis subsp bovis AF2122/97
uuggccaacccgguguuggcau

SEQ ID NO: 4113 - RNA, 22 nt, Mycobacterium bovis subsp bovis AF2122/97
uuggccaaccugcugcacgaga

SEQ ID NO: 4114 - RNA, 22 nt, Mycobacterium bovis subsp bovis AF2122/97
uuggcaguccagccgggugccg

SEQ ID NO: 4115 - RNA, 22 nt, Mycobacterium bovis subsp bovis AF2122/97
uuggccgcggcccaugcuggcg

SEQ ID NO: 4116 - RNA, 22 nt, Mycobacterium bovis subsp bovis AF2122/97
uugcgcaggggcaugucagcgu

SEQ ID NO: 4117 - RNA, 22 nt, Mycobacterium bovis subsp bovis AF2122/97
uuggcagcgugaaguguucggg

SEQ ID NO: 4118 - RNA, 22 nt, Mycobacterium bovis subsp bovis AF2122/97
uugcccaagcccggcggaccgg

SEQ ID NO: 4119 - RNA, 22 nt, Mycobacterium bovis subsp bovis AF2122/97
uuguggcugaucccggccaggc

SEQ ID NO: 4120 - RNA, 22 nt, Mycobacterium bovis subsp bovis AF2122/97
uugucaccgcuuccauggcguu

SEQ ID NO: 4121 - RNA, 22 nt, Mycobacterium bovis subsp bovis AF2122/97
uugucgccgucucgguccagcu

SEQ ID NO: 4122 - RNA, 22 nt, Mycobacterium bovis subsp bovis AF2122/97
uugucgccgugcaccaccugga

SEQ ID NO: 4123 - RNA, 22 nt, Mycobacterium bovis subsp bovis AF2122/97
uuggucaccgcggcgcgggccg

SEQ ID NO: 4124 - RNA, 22 nt, Mycobacterium bovis subsp bovis AF2122/97
uuggucaccuccgagcccacgg

SEQ ID NO: 4125 - RNA, 22 nt, Mycobacterium bovis subsp bovis AF2122/97
uugggauuguugauuccgccga

SEQ ID NO: 4126 - RNA, 22 nt, Mycobacterium bovis subsp bovis AF2122/97
uugggcagacgcuggucaacga

SEQ ID NO: 4127 - RNA, 22 nt, Mycobacterium bovis subsp bovis AF2122/97
ucuuucccuccagaucggugcg

SEQ ID NO: 4128 - RNA, 22 nt, Mycobacterium bovis subsp bovis AF2122/97
ucugugcgcgguuugugcacag

SEQ ID NO: 4129 - RNA, 22 nt, Mycobacterium bovis subsp bovis AF2122/97
ucuggccgggcggcauggagau

SEQ ID NO: 4130 - RNA, 20 nt, Mycobacterium bovis subsp bovis AF2122/97
ucuggccaaggugucgagca

SEQ ID NO: 4131 - RNA, 22 nt, Mycobacterium bovis subsp bovis AF2122/97
ucguggcccucccggcggccac

SEQ ID NO: 4132 - RNA, 22 nt, Mycobacterium bovis subsp bovis AF2122/97
ugaaggucuugugcccguugag

SEQ ID NO: 4133 - RNA, 22 nt, Mycobacterium bovis subsp bovis AF2122/97
ugaccugacgcggcuccggcgc

SEQ ID NO: 4134 - RNA, 22 nt, Mycobacterium bovis subsp bovis AF2122/97
ugacccaggcgccggucggugu

SEQ ID NO: 4135 - RNA, 22 nt, Mycobacterium bovis subsp bovis AF2122/97
ugagacccccgucgaagucuag

SEQ ID NO: 4136 - RNA, 22 nt, Mycobacterium bovis subsp bovis AF2122/97
ugagguuucaucgaucggccug

SEQ ID NO: 4137 - RNA, 22 nt, Mycobacterium bovis subsp bovis AF2122/97
ugaucucacccgaaguuguguc

SEQ ID NO: 4138 - RNA, 19 nt, Mycobacterium bovis subsp bovis AF2122/97
ugcacuccaccgcuggcgc

SEQ ID NO: 4139 - RNA, 22 nt, Mycobacterium bovis subsp bovis AF2122/97
ugcacuccgacccgccgacguu

SEQ ID NO: 4140 - RNA, 22 nt, Mycobacterium bovis subsp bovis AF2122/97
ugcacgccucaaagccgaugag

SEQ ID NO: 4141 - RNA, 18 nt, Mycobacterium bovis subsp bovis AF2122/97
ugcgcgccgccagcuauc

SEQ ID NO: 4142 - RNA, 22 nt, Mycobacterium bovis subsp bovis AF2122/97
ugcgcgccuugauccggcuguc

SEQ ID NO: 4143 - RNA, 22 nt, Mycobacterium bovis subsp bovis AF2122/97
ugcuccacugcugccaagucgg

SEQ ID NO: 4144 - RNA, 22 nt, Mycobacterium bovis subsp bovis AF2122/97
uggaaaaacggcggccccgacc

SEQ ID NO: 4145 - RNA, 22 nt, Mycobacterium bovis subsp bovis AF2122/97
ugcccaacucggccagaauguu

SEQ ID NO: 4146 - RNA, 22 nt, Mycobacterium bovis subsp bovis AF2122/97
ugcgccagcgccucccgcagga

SEQ ID NO: 4147 - RNA, 22 nt, Mycobacterium bovis subsp bovis AF2122/97
ugcgccaccgccagaggauaac

SEQ ID NO: 4148 - RNA, 22 nt, Mycobacterium bovis subsp bovis AF2122/97
ugcaggucgagguggucgguuu

SEQ ID NO: 4149 - RNA, 19 nt, Mycobacterium bovis subsp bovis AF2122/97
ugcaugagucguggaaugg

SEQ ID NO: 4150 - RNA, 22 nt, Mycobacterium bovis subsp bovis AF2122/97
ugccgccaccaggcagccggug

SEQ ID NO: 4151 - RNA, 22 nt, Mycobacterium bovis subsp bovis AF2122/97
uggccaagcggaccgucggcau

SEQ ID NO: 4152 - RNA, 22 nt, Mycobacterium bovis subsp bovis AF2122/97
uggccagaucuccccgcgggcc

SEQ ID NO: 4153 - RNA, 22 nt, Mycobacterium bovis subsp bovis AF2122/97
uggcagcaaucggguauccgau

SEQ ID NO: 4154 - RNA, 21 nt, Mycobacterium bovis subsp bovis AF2122/97
uggcgagccgggccacgcccg

SEQ ID NO: 4155 - RNA, 22 nt, Mycobacterium bovis subsp bovis AF2122/97
uggcccacugcaaccggaccuc

SEQ ID NO: 4156 - RNA, 22 nt, Mycobacterium bovis subsp bovis AF2122/97
uggcgagcagacgcaaaagccc

SEQ ID NO: 4157 - RNA, 22 nt, Mycobacterium bovis subsp bovis AF2122/97
uggcgcugugcugcucgacgug

SEQ ID NO: 4158 - RNA, 22 nt, Mycobacterium bovis subsp bovis AF2122/97
uggcucagcgggucaacgaggc

SEQ ID NO: 4159 - RNA, 23 nt, Mycobacterium bovis subsp bovis AF2122/97
ugggcucaggauguggcugcgau

SEQ ID NO: 4160 - RNA, 22 nt, Mycobacterium bovis subsp bovis AF2122/97
ugggcugaacaggacggccgcc

SEQ ID NO: 4161 - RNA, 22 nt, Mycobacterium bovis subsp bovis AF2122/97
ugggcugcugcgccgcaucggc

SEQ ID NO: 4162 - RNA, 22 nt, Mycobacterium bovis subsp bovis AF2122/97
ugggcaugaucuguggaucagg

SEQ ID NO: 4163 - RNA, 22 nt, Mycobacterium bovis subsp bovis AF2122/97
ugggccaacacgugcgcggucg

SEQ ID NO: 4164 - RNA, 22 nt, Mycobacterium bovis subsp bovis AF2122/97
ugggacagcuggaaguuaucgg

SEQ ID NO: 4165 - RNA, 22 nt, Mycobacterium bovis subsp bovis AF2122/97
uggcugggcgaccgcggugucg

SEQ ID NO: 4166 - RNA, 22 nt, Mycobacterium bovis subsp bovis AF2122/97
uggcuggucggaccgucagcga

SEQ ID NO: 4167 - RNA, 22 nt, Mycobacterium leprae
uggcuuuuggcugaaacugacc

SEQ ID NO: 4168 - RNA, 22 nt, Mycobacterium leprae
ugggaaaaugggcuucgucuuc

SEQ ID NO: 4169 - RNA, 22 nt, Mycobacterium leprae
uggaggagaggucgcauguugg

SEQ ID NO: 4170 - RNA, 22 nt, Mycobacterium leprae
ugcugaugucgaagacaaugua

SEQ ID NO: 4171 - RNA, 23 nt, Mycobacterium leprae
ugcugcugaugaucgcauccagc

SEQ ID NO: 4172 - RNA, 22 nt, Mycobacterium leprae
ugauggcgguauguaauguugg

SEQ ID NO: 4173 - RNA, 22 nt, Mycobacterium leprae
ugaugaaguauugguaccaggc

SEQ ID NO: 4174 - RNA, 22 nt, Mycobacterium leprae
ugaugauuggcauggcagugaa

SEQ ID NO: 4175 - RNA, 22 nt, Mycobacterium leprae
ugauaucuauacgcgaccaggu

SEQ ID NO: 4176 - RNA, 21 nt, Mycobacterium leprae
ugaccuagauaugaccugagc

SEQ ID NO: 4177 - RNA, 22 nt, Mycobacterium leprae
ugagaaggugcgccagcgcagc

SEQ ID NO: 4178 - RNA, 23 nt, Mycobacterium leprae
ugaagccacgugaucgcacaucc

SEQ ID NO: 4179 - RNA, 23 nt, Mycobacterium leprae
ugaauagcggcagcuugggcuca

SEQ ID NO: 4180 - RNA, 22 nt, Mycobacterium leprae
ugaauuugaucuugucauuguu

SEQ ID NO: 4181 - RNA, 22 nt, Mycobacterium leprae
ugaacugacuacgcucagagcg

SEQ ID NO: 4182 - RNA, 22 nt, Mycobacterium leprae
ucuuccugcaugggcugauccg

SEQ ID NO: 4183 - RNA, 22 nt, Mycobacterium leprae
ucuuuugacuugucauguucau

SEQ ID NO: 4184 - RNA, 22 nt, Mycobacterium leprae
ucuuguuugcgggauugucgug

SEQ ID NO: 4185 - RNA, 22 nt, Mycobacterium leprae
uucgauuucggggaauucgaaa

SEQ ID NO: 4186 - RNA, 22 nt, Mycobacterium leprae
uucugagugauccgcacgaugg

SEQ ID NO: 4187 - RNA, 22 nt, Mycobacterium leprae
uugaggaucagguucagcuggc

SEQ ID NO: 4188 - RNA, 22 nt, Mycobacterium leprae
uucuugacuugcuugcgcguau

SEQ ID NO: 4189 - RNA, 22 nt, Mycobacterium leprae
ugucaaggaugccaucgagugu

SEQ ID NO: 4190 - RNA, 21 nt, Mycobacterium leprae
ugucuugacuguuggacagga

SEQ ID NO: 4191 - RNA, 20 nt, Mycobacterium leprae
ugguguagcgcacacccugu

SEQ ID NO: 4192 - RNA, 22 nt, Mycobacterium leprae
ugggcuaugugguucauucugg

SEQ ID NO: 4193 - RNA, 20 nt, Mycobacterium leprae
uucaucuugcaagucccggu

SEQ ID NO: 4194 - RNA, 22 nt, Mycobacterium leprae
uucagacuaguaauuagaguua

SEQ ID NO: 4195 - RNA, 22 nt, Mycobacterium leprae
uuacugugccgcaacuguauuc

SEQ ID NO: 4196 - RNA, 22 nt, Mycobacterium leprae
uuaaaaccaucguggggcucga

SEQ ID NO: 4197 - RNA, 22 nt, Mycobacterium leprae
uuuggcuugacgugcuuuagcu

SEQ ID NO: 4198 - RNA, 22 nt, Mycobacterium leprae
caacaucucggggugcaacuug

SEQ ID NO: 4199 - RNA, 22 nt, Mycobacterium leprae
auguucagaucggcaucgguua

SEQ ID NO: 4200 - RNA, 22 nt, Mycobacterium leprae
augugguuggcagcgcuggaaa

SEQ ID NO: 4201 - RNA, 22 nt, Mycobacterium leprae
augugugaauuuaacauguuga

SEQ ID NO: 4202 - RNA, 22 nt, Mycobacterium leprae
caggagcacgguaacucggugc

SEQ ID NO: 4203 - RNA, 18 nt, Mycobacterium leprae
caggggcuucgaugcggu

SEQ ID NO: 4204 - RNA, 22 nt, Mycobacterium leprae
cagccaggcagcugcuaggcgg

SEQ ID NO: 4205 - RNA, 22 nt, Mycobacterium leprae
cagcaacagcgcagaauuuucu

SEQ ID NO: 4206 - RNA, 22 nt, Mycobacterium leprae
ccacaucuggcagaagagcugu

SEQ ID NO: 4207 - RNA, 22 nt, Mycobacterium leprae
ccaagcugcuccggucggugcu

SEQ ID NO: 4208 - RNA, 22 nt, Mycobacterium leprae
cagucaacuagcuuggcuucuc

SEQ ID NO: 4209 - RNA, 22 nt, Mycobacterium leprae
caugggauucgacguaguucac

SEQ ID NO: 4210 - RNA, 19 nt, Mycobacterium leprae
caugaugacguaccuaguc

SEQ ID NO: 4211 - RNA, 22 nt, Mycobacterium leprae
ccaucaccggcaguuuagaacu

SEQ ID NO: 4212 - RNA, 22 nt, Mycobacterium leprae
cccugcucaguagucggacccg

SEQ ID NO: 4213 - RNA, 22 nt, Mycobacterium leprae
cccugcucaucaugucggugga

SEQ ID NO: 4214 - RNA, 22 nt, Mycobacterium leprae
cgaaggaaugcaggcuucaguc

SEQ ID NO: 4215 - RNA, 22 nt, Mycobacterium leprae
cgaccugcaggucguuaucgcg

SEQ ID NO: 4216 - RNA, 21 nt, Mycobacterium leprae
cgauggggguugaucuuugag

SEQ ID NO: 4217 - RNA, 22 nt, Mycobacterium leprae
cgcaaauggcguucauaauggg

SEQ ID NO: 4218 - RNA, 22 nt, Mycobacterium leprae
cgccagugcgcuggcuaggcug

SEQ ID NO: 4219 - RNA, 22 nt, Mycobacterium leprae
cuaggcaguuuucgggguaucg

SEQ ID NO: 4220 - RNA, 22 nt, Mycobacterium leprae
cugaacaguucgucuuagccgc

SEQ ID NO: 4221 - RNA, 22 nt, Mycobacterium leprae
cucgaugucauccggauagugg

SEQ ID NO: 4222 - RNA, 22 nt, Mycobacterium leprae
cgcugauggugucgggcggcag

SEQ ID NO: 4223 - RNA, 22 nt, Mycobacterium leprae
augccauugcuggaccuaaucc

SEQ ID NO: 4224 - RNA, 22 nt, Mycobacterium leprae
augcugaugcccacgcgucgac

SEQ ID NO: 4225 - RNA, 22 nt, Mycobacterium leprae
augcuguguuucaaccguauug

SEQ ID NO: 4226 - RNA, 22 nt, Mycobacterium leprae
augguaugugguguugagacau

SEQ ID NO: 4227 - RNA, 22 nt, Mycobacterium leprae
auggggguguucggugucaacc

SEQ ID NO: 4228 - RNA, 22 nt, Mycobacterium leprae
augucacuucccgugccgauuu

SEQ ID NO: 4229 - RNA, 22 nt, Mycobacterium leprae
auguauuggugcaaguguccug

SEQ ID NO: 4230 - RNA, 22 nt, Mycobacterium leprae
auauugucggcgaguuugaucc

SEQ ID NO: 4231 - RNA, 22 nt, Mycobacterium leprae
aucggcagcggugggggaucca

SEQ ID NO: 4232 - RNA, 22 nt, Mycobacterium leprae
agucagugacucgagcgauaca

SEQ ID NO: 4233 - RNA, 20 nt, Mycobacterium leprae
aguauuuugccgcaggccau

SEQ ID NO: 4234 - RNA, 22 nt, Mycobacterium leprae
agugauuccuugccuggacguc

SEQ ID NO: 4235 - RNA, 22 nt, Mycobacterium leprae
agcugauagacggcggcagugg

SEQ ID NO: 4236 - RNA, 22 nt, Mycobacterium leprae
agcugaugagcacgcgggcggg

SEQ ID NO: 4237 - RNA, 22 nt, Mycobacterium leprae
agccauccuggugagcuuucuu

SEQ ID NO: 4238 - RNA, 17 nt, Mycobacterium leprae
agcagggcagcgaucga

SEQ ID NO: 4239 - RNA, 18 nt, Mycobacterium leprae
accugcucgaagcugaag

SEQ ID NO: 4240 - RNA, 22 nt, Mycobacterium leprae
agcagaucauguucgaacuugc

SEQ ID NO: 4241 - RNA, 22 nt, Mycobacterium leprae
acugaguuuaugcaguguuccg

SEQ ID NO: 4242 - RNA, 22 nt, Mycobacterium leprae
acaagcuguguccgucggcaga

SEQ ID NO: 4243 - RNA, 22 nt, Mycobacterium leprae
aaugugaacgugcaagaagcga

SEQ ID NO: 4244 - RNA, 22 nt, Mycobacterium leprae
aaugcuaugauaauuuggcuga

SEQ ID NO: 4245 - RNA, 22 nt, Mycobacterium leprae
aaauauuuugggcaagcaacag

SEQ ID NO: 4246 - RNA, 22 nt, Mycobacterium leprae
aaauguucgaaguaguucgcgg

SEQ ID NO: 4247 - RNA, 22 nt, Mycobacterium leprae
aacuuuugguugucgucuggcg

SEQ ID NO: 4248 - RNA, 22 nt, Mycobacterium leprae
guaaagcacacagcgucgcccc

SEQ ID NO: 4249 - RNA, 22 nt, Mycobacterium leprae
ggguugcauuucaucugucgcg

SEQ ID NO: 4250 - RNA, 22 nt, Mycobacterium leprae
gguaaugauugcguaacaacca

SEQ ID NO: 4251 - RNA, 22 nt, Mycobacterium leprae
ggguugauccgcgcgauggaga

SEQ ID NO: 4252 - RNA, 22 nt, Mycobacterium leprae
ggugauagugcugcuguuggca

SEQ ID NO: 4253 - RNA, 22 nt, Mycobacterium leprae
gggagcucaaguucuuuggcua

SEQ ID NO: 4254 - RNA, 22 nt, Mycobacterium leprae
gggguugcuggauugcccuggu

SEQ ID NO: 4255 - RNA, 22 nt, Mycobacterium leprae
guuugguuuuucaggcuauucu

SEQ ID NO: 4256 - RNA, 22 nt, Mycobacterium leprae
guuuuauuuaacuagacaucca

SEQ ID NO: 4257 - RNA, 22 nt, Mycobacterium leprae
gugcguugccguuauguuacgg

SEQ ID NO: 4258 - RNA, 22 nt, Mycobacterium leprae
gucuacauguugaugaugccag

SEQ ID NO: 4259 - RNA, 22 nt, Mycobacterium leprae
gucuuugcuaacgguuuggucu

SEQ ID NO: 4260 - RNA, 22 nt, Mycobacterium leprae
gucuuguccggccaagcuagga

SEQ ID NO: 4261 - RNA, 20 nt, Mycobacterium leprae
ucuauuaagauuaacguggc

SEQ ID NO: 4262 - RNA, 22 nt, Mycobacterium leprae
uccugcucggcguggugcucgg

SEQ ID NO: 4263 - RNA, 22 nt, Mycobacterium leprae
ucccggcugcgagcauuugcaa

SEQ ID NO: 4264 - RNA, 22 nt, Mycobacterium leprae
uauuagcuugcacgguaacaac

SEQ ID NO: 4265 - RNA, 22 nt, Mycobacterium leprae
uaucucauugggcgacgacugc

SEQ ID NO: 4266 - RNA, 23 nt, Mycobacterium leprae
uagcugaugccaggcuccgggac

SEQ ID NO: 4267 - RNA, 22 nt, Mycobacterium leprae
uagcaugccgguaggguuugug

SEQ ID NO: 4268 - RNA, 19 nt, Mycobacterium leprae
gcuugaggguuguccggug

SEQ ID NO: 4269 - RNA, 22 nt, Mycobacterium leprae
ggaauuugcaacguagugcagg

SEQ ID NO: 4270 - RNA, 22 nt, Mycobacterium leprae
ggaagaauggcuaccacgucga

SEQ ID NO: 4271 - RNA, 22 nt, Mycobacterium leprae
gcugcugcuagggcacccguug

SEQ ID NO: 4272 - RNA, 22 nt, Mycobacterium leprae
gcugguagcgaugucgagccug

SEQ ID NO: 4273 - RNA, 22 nt, Mycobacterium leprae
cugguuuugguccuggggcagg

SEQ ID NO: 4274 - RNA, 22 nt, Mycobacterium leprae
cuuaauccgacgacccugccau

SEQ ID NO: 4275 - RNA, 22 nt, Mycobacterium leprae
cugcugcugacacgccguuccg

SEQ ID NO: 4276 - RNA, 22 nt, Mycobacterium leprae
cugcugcugccaggcaugcggu

SEQ ID NO: 4277 - RNA, 22 nt, Mycobacterium leprae
cuggcacccagggccugcuguc

SEQ ID NO: 4278 - RNA, 22 nt, Mycobacterium leprae
gacaaauuccugggacagguac

SEQ ID NO: 4279 - RNA, 19 nt, Mycobacterium leprae
gaaaagugugauuuauuga

SEQ ID NO: 4280 - RNA, 22 nt, Mycobacterium leprae
gaaaaugacgaugucgccgggc

SEQ ID NO: 4281 - RNA, 22 nt, Mycobacterium leprae
cuuuugaagcugcuggcugagg

SEQ ID NO: 4282 - RNA, 22 nt, Mycobacterium leprae
cuuuggcuucggguagauugga

SEQ ID NO: 4283 - RNA, 22 nt, Mycobacterium leprae
gaggaugaagucgacgagcuac

SEQ ID NO: 4284 - RNA, 19 nt, Mycobacterium leprae
gcagugaucugggccaguu

SEQ ID NO: 4285 - RNA, 22 nt, Mycobacterium leprae
gcaguuucggauucgccgggac

SEQ ID NO: 4286 - RNA, 22 nt, Mycobacterium leprae
gcccacaacgcaacugagccga

SEQ ID NO: 4287 - RNA, 22 nt, Mycobacterium leprae
gcagauugcccacuuuggcacg

SEQ ID NO: 4288 - RNA, 22 nt, Mycobacterium tuberculosis CDC1551
gcaccgccggccugucccacga

SEQ ID NO: 4289 - RNA, 22 nt, Mycobacterium tuberculosis CDC1551
gcaccccagagcacugauacgc

SEQ ID NO: 4290 - RNA, 21 nt, Mycobacterium tuberculosis CDC1551
gcacacuggaagccagcacgc

SEQ ID NO: 4291 - RNA, 22 nt, Mycobacterium tuberculosis CDC1551
gcagcagguucaccacguaugc

SEQ ID NO: 4292 - RNA, 19 nt, Mycobacterium tuberculosis CDC1551
gccauagcggagugccggg

SEQ ID NO: 4293 - RNA, 21 nt, Mycobacterium tuberculosis CDC1551
gccauauaccagaucgcuggg

SEQ ID NO: 4294 - RNA, 22 nt, Mycobacterium tuberculosis CDC1551
gccaggcuggugucggcggugg

SEQ ID NO: 4295 - RNA, 22 nt, Mycobacterium tuberculosis CDC1551
gccagcagcucggcgauaucgg

SEQ ID NO: 4296 - RNA, 23 nt, Mycobacterium tuberculosis CDC1551
gccagcucggcagcggcggcucc

SEQ ID NO: 4297 - RNA, 22 nt, Mycobacterium tuberculosis CDC1551
gccagcacaggcgcgauugcgu

SEQ ID NO: 4298 - RNA, 22 nt, Mycobacterium tuberculosis CDC1551
gccacgccucgacgcacggccu

SEQ ID NO: 4299 - RNA, 21 nt, Mycobacterium tuberculosis CDC1551
gccagcagcgucuuggcauuc

SEQ ID NO: 4300 - RNA, 22 nt, Mycobacterium tuberculosis CDC1551
gaggccagcucggccagcugga

SEQ ID NO: 4301 - RNA, 22 nt, Mycobacterium tuberculosis CDC1551
gagaacugaccgugguuacgca

SEQ ID NO: 4302 - RNA, 20 nt, Mycobacterium tuberculosis CDC1551
gaugaugaucguguaugcga

SEQ ID NO: 4303 - RNA, 22 nt, Mycobacterium tuberculosis CDC1551
gaugagcgagcgacagcgugcg

SEQ ID NO: 4304 - RNA, 22 nt, Mycobacterium tuberculosis CDC1551
gagguguccgacgaaccugguu

SEQ ID NO: 4305 - RNA, 22 nt, Mycobacterium tuberculosis CDC1551
gagguuuggcggggcgugaccu

SEQ ID NO: 4306 - RNA, 22 nt, Mycobacterium tuberculosis CDC1551
gaguaccugcaggugccgucgc

SEQ ID NO: 4307 - RNA, 22 nt, Mycobacterium tuberculosis CDC1551
gaguagccggaguggcccuugc

SEQ ID NO: 4308 - RNA, 20 nt, Mycobacterium tuberculosis CDC1551
gcaaacucguucuggguuag

SEQ ID NO: 4309 - RNA, 22 nt, Mycobacterium tuberculosis CDC1551
gacuccagccguucacguucga

SEQ ID NO: 4310 - RNA, 22 nt, Mycobacterium tuberculosis CDC1551
gacgaggucuggggucagcuga

SEQ ID NO: 4311 - RNA, 22 nt, Mycobacterium tuberculosis CDC1551
gaccagcucggccuucucgaga

SEQ ID NO: 4312 - RNA, 22 nt, Mycobacterium tuberculosis CDC1551
cucuugggucaaccaggugacu

SEQ ID NO: 4313 - RNA, 21 nt, Mycobacterium tuberculosis CDC1551
cugcugauggcggcgauaucg

SEQ ID NO: 4314 - RNA, 22 nt, Mycobacterium tuberculosis CDC1551
cugguguuccagcugcuguggu

SEQ ID NO: 4315 - RNA, 22 nt, Mycobacterium tuberculosis CDC1551
cugguccagcucguacaccacg

SEQ ID NO: 4316 - RNA, 22 nt, Mycobacterium tuberculosis CDC1551
gcuggcuuucgcgcugggccuu

SEQ ID NO: 4317 - RNA, 22 nt, Mycobacterium tuberculosis CDC1551
gcugagacaugacgugccucac

SEQ ID NO: 4318 - RNA, 22 nt, Mycobacterium tuberculosis CDC1551
gcugcaaacccuagaguacuua

SEQ ID NO: 4319 - RNA, 22 nt, Mycobacterium tuberculosis CDC1551
ggaaagugacggucugaugcga

SEQ ID NO: 4320 - RNA, 22 nt, Mycobacterium tuberculosis CDC1551
gcuggguuaccugguggcggcc

SEQ ID NO: 4321 - RNA, 22 nt, Mycobacterium tuberculosis CDC1551
ggcccggcaccggucaucguca

SEQ ID NO: 4322 - RNA, 22 nt, Mycobacterium tuberculosis CDC1551
ggccgggucucgcuuggcggcg

SEQ ID NO: 4323 - RNA, 22 nt, Mycobacterium tuberculosis CDC1551
ggccagggccgacggcacaucc

SEQ ID NO: 4324 - RNA, 22 nt, Mycobacterium tuberculosis CDC1551
ggccaugucgguccuuccagca

SEQ ID NO: 4325 - RNA, 22 nt, Mycobacterium tuberculosis CDC1551
ggccgaaacaccgcgcgaaggg

SEQ ID NO: 4326 - RNA, 22 nt, Mycobacterium tuberculosis CDC1551
ggccgcgcucgacuagccgggu

SEQ ID NO: 4327 - RNA, 22 nt, Mycobacterium tuberculosis CDC1551
ggccaaggugcgucgcgccccg

SEQ ID NO: 4328 - RNA, 22 nt, Mycobacterium tuberculosis CDC1551
ggcagagcgcggccucggcguc

SEQ ID NO: 4329 - RNA, 22 nt, Mycobacterium tuberculosis CDC1551
ggcaccaagucaccggcaucca

SEQ ID NO: 4330 - RNA, 22 nt, Mycobacterium tuberculosis CDC1551
ggagcuccuucaucuccgcugc

SEQ ID NO: 4331 - RNA, 22 nt, Mycobacterium tuberculosis CDC1551
gcucgcgcagguccacccgagc

SEQ ID NO: 4332 - RNA, 22 nt, Mycobacterium tuberculosis CDC1551
gcguggucggaugcaggccagc

SEQ ID NO: 4333 - RNA, 22 nt, Mycobacterium tuberculosis CDC1551
gcgcuuuucguguucgucugcu

SEQ ID NO: 4334 - RNA, 22 nt, Mycobacterium tuberculosis CDC1551
gcggccaacgaggcagcggcgg

SEQ ID NO: 4335 - RNA, 22 nt, Mycobacterium tuberculosis CDC1551
gcggccaaccggcccgccuacu

SEQ ID NO: 4336 - RNA, 22 nt, Mycobacterium tuberculosis CDC1551
gcgauagcuuaucgaggauuuc

SEQ ID NO: 4337 - RNA, 22 nt, Mycobacterium tuberculosis CDC1551
gccuugucgagaucgucgccgu

SEQ ID NO: 4338 - RNA, 22 nt, Mycobacterium tuberculosis CDC1551
gccuugaccgccuugauggcgg

SEQ ID NO: 4339 - RNA, 22 nt, Mycobacterium tuberculosis CDC1551
gccuugccauaugcggccgacg

SEQ ID NO: 4340 - RNA, 22 nt, Mycobacterium tuberculosis CDC1551
gccguugaggcggcuggcuggu

SEQ ID NO: 4341 - RNA, 22 nt, Mycobacterium tuberculosis CDC1551
gccguugaucgucucggcuagu

SEQ ID NO: 4342 - RNA, 21 nt, Mycobacterium tuberculosis CDC1551
gcgagcucgucauggucuuuc

SEQ ID NO: 4343 - RNA, 22 nt, Mycobacterium tuberculosis CDC1551
gccgaagccgaccggcccagcg

SEQ ID NO: 4344 - RNA, 22 nt, Mycobacterium tuberculosis CDC1551
gccgcaccgacuaccaccgacu

SEQ ID NO: 4345 - RNA, 22 nt, Mycobacterium tuberculosis CDC1551
gcccgcacguggccgccgguga

SEQ ID NO: 4346 - RNA, 22 nt, Mycobacterium tuberculosis CDC1551
gccgccaccgcuaccacccgug

SEQ ID NO: 4347 - RNA, 22 nt, Mycobacterium tuberculosis CDC1551
uagugauucgcaucucugcacc

SEQ ID NO: 4348 - RNA, 22 nt, Mycobacterium tuberculosis CDC1551
uaagugaaagccugacgugguc

SEQ ID NO: 4349 - RNA, 22 nt, Mycobacterium tuberculosis CDC1551
uaagugaaugccgugccguccg

SEQ ID NO: 4350 - RNA, 22 nt, Mycobacterium tuberculosis CDC1551
ucccgcagggcacgccuagacg

SEQ ID NO: 4351 - RNA, 22 nt, Mycobacterium tuberculosis CDC1551
uccugcaggcgaucgcccuggc

SEQ ID NO: 4352 - RNA, 22 nt, Mycobacterium tuberculosis CDC1551
uccgggccggcuuugccgccgu

SEQ ID NO: 4353 - RNA, 22 nt, Mycobacterium tuberculosis CDC1551
ucgaagcccuugauguccuuca

SEQ ID NO: 4354 - RNA, 22 nt, Mycobacterium tuberculosis CDC1551
ucgaggccgggguugcgcugca

SEQ ID NO: 4355 - RNA, 18 nt, Mycobacterium tuberculosis CDC1551
uccugggccauggcccgg

SEQ ID NO: 4356 - RNA, 22 nt, Mycobacterium tuberculosis CDC1551
uccugggcgaccgcgacgaagu

SEQ ID NO: 4357 - RNA, 22 nt, Mycobacterium tuberculosis CDC1551
ucggugacggacugcacagcga

SEQ ID NO: 4358 - RNA, 22 nt, Mycobacterium tuberculosis CDC1551
ucggcucaucgcugcuugcauu

SEQ ID NO: 4359 - RNA, 22 nt, Mycobacterium tuberculosis CDC1551
ucgccagcaccaccugguuggg

SEQ ID NO: 4360 - RNA, 23 nt, Mycobacterium tuberculosis CDC1551
ucgcugucccgaggucacgcuuu

SEQ ID NO: 4361 - RNA, 22 nt, Mycobacterium tuberculosis CDC1551
ucggagaccucgccggaccucg

SEQ ID NO: 4362 - RNA, 18 nt, Mycobacterium tuberculosis CDC1551
ucaggugaucccgccgac

SEQ ID NO: 4363 - RNA, 19 nt, Mycobacterium tuberculosis CDC1551
ucauggccgaugcggucgc

SEQ ID NO: 4364 - RNA, 22 nt, Mycobacterium tuberculosis CDC1551
ucacugugacgccgggcugggu

SEQ ID NO: 4365 - RNA, 22 nt, Mycobacterium tuberculosis CDC1551
ucagcgucgaugaccaugucga

SEQ ID NO: 4366 - RNA, 22 nt, Mycobacterium tuberculosis CDC1551
ucagcuguguccgcacaaccgg

SEQ ID NO: 4367 - RNA, 22 nt, Mycobacterium tuberculosis CDC1551
ucagccgccgggcuugccugcg

SEQ ID NO: 4368 - RNA, 22 nt, Mycobacterium tuberculosis CDC1551
ucagccucaacucggcgugccg

SEQ ID NO: 4369 - RNA, 22 nt, Mycobacterium tuberculosis CDC1551
ucaccgccacggucaccggacu

SEQ ID NO: 4370 - RNA, 19 nt, Mycobacterium tuberculosis CDC1551
ucaccgccgaugccaccgc

SEQ ID NO: 4371 - RNA, 22 nt, Mycobacterium tuberculosis CDC1551
ucaccugcccggcaccuggagc

SEQ ID NO: 4372 - RNA, 22 nt, Mycobacterium tuberculosis CDC1551
ucaccgccgcgguuggugcgca

SEQ ID NO: 4373 - RNA, 22 nt, Mycobacterium tuberculosis CDC1551
gucuggccgacgccaucagcga

SEQ ID NO: 4374 - RNA, 22 nt, Mycobacterium tuberculosis CDC1551
gugaccugcgcggcagggucau

SEQ ID NO: 4375 - RNA, 22 nt, Mycobacterium tuberculosis CDC1551
gucgaggugaccagcggugagg

SEQ ID NO: 4376 - RNA, 22 nt, Mycobacterium tuberculosis CDC1551
guccaggccgucgaacugcagg

SEQ ID NO: 4377 - RNA, 22 nt, Mycobacterium tuberculosis CDC1551
gugaagcccgguggguguggcc

SEQ ID NO: 4378 - RNA, 22 nt, Mycobacterium tuberculosis CDC1551
guuugguugccuaccgcguggg

SEQ ID NO: 4379 - RNA, 22 nt, Mycobacterium tuberculosis CDC1551
guuuggcgcgcccacagcccgg

SEQ ID NO: 4380 - RNA, 22 nt, Mycobacterium tuberculosis CDC1551
guuucgggcgauuuugcgucug

SEQ ID NO: 4381 - RNA, 19 nt, Mycobacterium tuberculosis CDC1551
guuggcagcggucgcggag

SEQ ID NO: 4382 - RNA, 22 nt, Mycobacterium tuberculosis CDC1551
guuacaggucaccacguagcgg

SEQ ID NO: 4383 - RNA, 22 nt, Mycobacterium tuberculosis CDC1551
uaaccgcuacaaaugaaguugg

SEQ ID NO: 4384 - RNA, 22 nt, Mycobacterium tuberculosis CDC1551
guggugggaaccgcuccagggc

SEQ ID NO: 4385 - RNA, 22 nt, Mycobacterium tuberculosis CDC1551
gugguggugagcaccaacggug

SEQ ID NO: 4386 - RNA, 22 nt, Mycobacterium tuberculosis CDC1551
gugguggugaguuugagaucgg

SEQ ID NO: 4387 - RNA, 22 nt, Mycobacterium tuberculosis CDC1551
guggcagccagcgccuccggga

SEQ ID NO: 4388 - RNA, 21 nt, Mycobacterium tuberculosis CDC1551
gggcugguuccaacgacagug

SEQ ID NO: 4389 - RNA, 22 nt, Mycobacterium tuberculosis CDC1551
ggggagacgauugccgccccgc

SEQ ID NO: 4390 - RNA, 22 nt, Mycobacterium tuberculosis CDC1551
gggcucaggauguggcugcgau

SEQ ID NO: 4391 - RNA, 22 nt, Mycobacterium tuberculosis CDC1551
gggcugcccaaucagcgcugcg

SEQ ID NO: 4392 - RNA, 22 nt, Mycobacterium tuberculosis CDC1551
gggaguacgcgggccaggugcg

SEQ ID NO: 4393 - RNA, 22 nt, Mycobacterium tuberculosis CDC1551
ggcucacgauguagucgauccg

SEQ ID NO: 4394 - RNA, 22 nt, Mycobacterium tuberculosis CDC1551
ggcugcgcaccugcgccgacga

SEQ ID NO: 4395 - RNA, 22 nt, Mycobacterium tuberculosis CDC1551
ggcuggcucggcgacuggacua

SEQ ID NO: 4396 - RNA, 22 nt, Mycobacterium tuberculosis CDC1551
ggcucaggucgauacccgaggg

SEQ ID NO: 4397 - RNA, 20 nt, Mycobacterium tuberculosis CDC1551
ggcucgagggcuggccggug

SEQ ID NO: 4398 - RNA, 22 nt, Mycobacterium tuberculosis CDC1551
ggcguggccguuucaccgcguu

SEQ ID NO: 4399 - RNA, 22 nt, Mycobacterium tuberculosis CDC1551
ggcgagcuugcggugcaguaug

SEQ ID NO: 4400 - RNA, 22 nt, Mycobacterium tuberculosis CDC1551
ggugcugcacgccuucgccagc

SEQ ID NO: 4401 - RNA, 22 nt, Mycobacterium tuberculosis CDC1551
ggugcuuuugcgucugcucggc

SEQ ID NO: 4402 - RNA, 22 nt, Mycobacterium tuberculosis CDC1551
ggugguggugccgucgucgcgc

SEQ ID NO: 4403 - RNA, 22 nt, Mycobacterium tuberculosis CDC1551
gguggugccgguacgccaaugc

SEQ ID NO: 4404 - RNA, 22 nt, Mycobacterium tuberculosis CDC1551
ggugguggccaccgcagugggu

SEQ ID NO: 4405 - RNA, 22 nt, Mycobacterium tuberculosis CDC1551
ggguaucaggcagccggcgcug

SEQ ID NO: 4406 - RNA, 22 nt, Mycobacterium tuberculosis CDC1551
gggugguggucgccaacgccga

SEQ ID NO: 4407 - RNA, 22 nt, Mycobacterium tuberculosis CDC1551
gggugguguugauugcggcggu

SEQ ID NO: 4408 - RNA, 22 nt, Mycobacterium tuberculosis CDC1551
ggucagcacgcaugugcggugg

SEQ ID NO: 4409 - RNA, 22 nt, Mycobacterium tuberculosis CDC1551
ggucagcaugaauaccgggucg

SEQ ID NO: 4410 - RNA, 22 nt, Mycobacterium tuberculosis CDC1551
ggucuccuugccuauccagcug

SEQ ID NO: 4411 - RNA, 22 nt, Mycobacterium tuberculosis CDC1551
gguugcgcuuggugaacucguc

SEQ ID NO: 4412 - RNA, 22 nt, Mycobacterium tuberculosis CDC1551
guagugcacaccgacaacagcg

SEQ ID NO: 4413 - RNA, 22 nt, Mycobacterium tuberculosis CDC1551
aacugcaucgccaccacuuccu

SEQ ID NO: 4414 - RNA, 22 nt, Mycobacterium tuberculosis CDC1551
aacagguggcggccggaccgcu

SEQ ID NO: 4415 - RNA, 22 nt, Mycobacterium tuberculosis CDC1551
aacacuaugcagcauuugggau

SEQ ID NO: 4416 - RNA, 22 nt, Mycobacterium tuberculosis CDC1551
aaguaguaaugugcgagcugag

SEQ ID NO: 4417 - RNA, 22 nt, Mycobacterium tuberculosis CDC1551
acugagcagcggcguuuucagg

SEQ ID NO: 4418 - RNA, 22 nt, Mycobacterium tuberculosis CDC1551
acugucccgagcgcaccaggaa

SEQ ID NO: 4419 - RNA, 22 nt, Mycobacterium tuberculosis CDC1551
acuggccagcgcgcgccacaug

SEQ ID NO: 4420 - RNA, 22 nt, Mycobacterium tuberculosis CDC1551
agcaagagcagcggccccuggg

SEQ ID NO: 4421 - RNA, 22 nt, Mycobacterium tuberculosis CDC1551
agagauaucguagugaucgggc

SEQ ID NO: 4422 - RNA, 22 nt, Mycobacterium tuberculosis CDC1551
agaucucuggugcgcagauccc

SEQ ID NO: 4423 - RNA, 22 nt, Mycobacterium tuberculosis CDC1551
accggccuggugcucaauagcc

SEQ ID NO: 4424 - RNA, 22 nt, Mycobacterium tuberculosis CDC1551
accucgcugaugauccaugaca

SEQ ID NO: 4425 - RNA, 22 nt, Mycobacterium tuberculosis CDC1551
accucgcugcgggaugggucgc

SEQ ID NO: 4426 - RNA, 22 nt, Mycobacterium tuberculosis CDC1551
acccagcaggcugguggugccg

SEQ ID NO: 4427 - RNA, 22 nt, Mycobacterium tuberculosis CDC1551
accgcgccgccaaugcagcguc

SEQ ID NO: 4428 - RNA, 22 nt, Mycobacterium tuberculosis CDC1551
acgaggucgcgaugaugacggu

SEQ ID NO: 4429 - RNA, 22 nt, Mycobacterium tuberculosis CDC1551
acgagcguaacggcacugcgaa

SEQ ID NO: 4430 - RNA, 22 nt, Mycobacterium tuberculosis CDC1551
acagcaugucgucggcagguuc

SEQ ID NO: 4431 - RNA, 22 nt, Mycobacterium tuberculosis CDC1551
accaauucaccaaggacgaggu

SEQ ID NO: 4432 - RNA, 22 nt, Mycobacterium tuberculosis CDC1551
agcacugcuuucugagcucgag

SEQ ID NO: 4433 - RNA, 22 nt, Mycobacterium tuberculosis CDC1551
agcccaccggugcuguaggcga

SEQ ID NO: 4434 - RNA, 22 nt, Mycobacterium tuberculosis CDC1551
agccagcccgaugcugagcaau

SEQ ID NO: 4435 - RNA, 22 nt, Mycobacterium tuberculosis CDC1551
agccaggccgucgcgaccaugc

SEQ ID NO: 4436 - RNA, 22 nt, Mycobacterium tuberculosis CDC1551
agcuguccgacaaaguauccga

SEQ ID NO: 4437 - RNA, 22 nt, Mycobacterium tuberculosis CDC1551
agcuggucgacacuggccgaaa

SEQ ID NO: 4438 - RNA, 22 nt, Mycobacterium tuberculosis CDC1551
agcugggcgccgacgcuuugca

SEQ ID NO: 4439 - RNA, 22 nt, Mycobacterium tuberculosis CDC1551
aggaaucaccgugagcagccca

SEQ ID NO: 4440 - RNA, 22 nt, Mycobacterium tuberculosis CDC1551
aguuucucagcgagcaggugcu

SEQ ID NO: 4441 - RNA, 22 nt, Mycobacterium tuberculosis CDC1551
aguggucaugaauggcgaaugg

SEQ ID NO: 4442 - RNA, 22 nt, Mycobacterium tuberculosis CDC1551
aggaucacacuggccugcucaa

SEQ ID NO: 4443 - RNA, 22 nt, Mycobacterium tuberculosis CDC1551
aucgcuugccgaugccgucggu

SEQ ID NO: 4444 - RNA, 22 nt, Mycobacterium tuberculosis CDC1551
aucuggccguccggcgucccga

SEQ ID NO: 4445 - RNA, 22 nt, Mycobacterium tuberculosis CDC1551
auccaugagcagcucgccgccg

SEQ ID NO: 4446 - RNA, 22 nt, Mycobacterium tuberculosis CDC1551
aucacgccucucgguggugggg

SEQ ID NO: 4447 - RNA, 22 nt, Mycobacterium tuberculosis CDC1551
aucauucuggggaugaacgguc

SEQ ID NO: 4448 - RNA, 22 nt, Mycobacterium tuberculosis CDC1551
aucaggcugcgcacccgcucgg

SEQ ID NO: 4449 - RNA, 22 nt, Mycobacterium tuberculosis CDC1551
aucaucaggcgcgacauaucga

SEQ ID NO: 4450 - RNA, 22 nt, Mycobacterium tuberculosis CDC1551
augguguacgccgcagcgcggg

SEQ ID NO: 4451 - RNA, 19 nt, Mycobacterium tuberculosis CDC1551
augguggccgggaucgugc

SEQ ID NO: 4452 - RNA, 22 nt, Mycobacterium tuberculosis CDC1551
augguuuuggccagcuuugucg

SEQ ID NO: 4453 - RNA, 22 nt, Mycobacterium tuberculosis CDC1551
augguggccacggcgugggcgu

SEQ ID NO: 4454 - RNA, 23 nt, Mycobacterium tuberculosis CDC1551
augacgggauucugcuucgcaaa

SEQ ID NO: 4455 - RNA, 22 nt, Mycobacterium tuberculosis CDC1551
augcaguuggcggucgacugcg

SEQ ID NO: 4456 - RNA, 22 nt, Mycobacterium tuberculosis CDC1551
cgcugcaccgcggccuggcccu

SEQ ID NO: 4457 - RNA, 22 nt, Mycobacterium tuberculosis CDC1551
cgccugggccagugccgacuuc

SEQ ID NO: 4458 - RNA, 22 nt, Mycobacterium tuberculosis CDC1551
cgcugggcgaugaagcgcuggg

SEQ ID NO: 4459 - RNA, 22 nt, Mycobacterium tuberculosis CDC1551
cgcucgagauugcagcgggccc

SEQ ID NO: 4460 - RNA, 22 nt, Mycobacterium tuberculosis CDC1551
cggccaagggugcggacgccga

SEQ ID NO: 4461 - RNA, 22 nt, Mycobacterium tuberculosis CDC1551
cggcugcagugcgacgacgaga

SEQ ID NO: 4462 - RNA, 18 nt, Mycobacterium tuberculosis CDC1551
cuccuuggacuacggcug

SEQ ID NO: 4463 - RNA, 22 nt, Mycobacterium tuberculosis CDC1551
cugaauucgucggguaucuggu

SEQ ID NO: 4464 - RNA, 22 nt, Mycobacterium tuberculosis CDC1551
cucccgccgugugucgcgggcu

SEQ ID NO: 4465 - RNA, 22 nt, Mycobacterium tuberculosis CDC1551
cguggaauuucuucgccauggg

SEQ ID NO: 4466 - RNA, 22 nt, Mycobacterium tuberculosis CDC1551
cguggcaaaugugaucccgugc

SEQ ID NO: 4467 - RNA, 22 nt, Mycobacterium tuberculosis CDC1551
cgguggugaccgccgcgacguc

SEQ ID NO: 4468 - RNA, 22 nt, Mycobacterium tuberculosis CDC1551
cgggacagcuuggucuuucgcg

SEQ ID NO: 4469 - RNA, 22 nt, Mycobacterium tuberculosis CDC1551
cggucaccaucaccggcaccag

SEQ ID NO: 4470 - RNA, 22 nt, Mycobacterium tuberculosis CDC1551
cgugauccacagccacccggug

SEQ ID NO: 4471 - RNA, 22 nt, Mycobacterium tuberculosis CDC1551
cgguuucucggccgaacuuggc

SEQ ID NO: 4472 - RNA, 22 nt, Mycobacterium tuberculosis CDC1551
cguaagccucgucagcuauccg

SEQ ID NO: 4473 - RNA, 22 nt, Mycobacterium tuberculosis CDC1551
cgucaccugcacggugguugcc

SEQ ID NO: 4474 - RNA, 22 nt, Mycobacterium tuberculosis CDC1551
cgucccugaggcuacgccccag

SEQ ID NO: 4475 - RNA, 18 nt, Mycobacterium tuberculosis CDC1551
cgccacucgcagugggac

SEQ ID NO: 4476 - RNA, 22 nt, Mycobacterium tuberculosis CDC1551
cgccaaaccgaacggcgagcug

SEQ ID NO: 4477 - RNA, 22 nt, Mycobacterium tuberculosis CDC1551
cgcagagcuuuucacgacgcug

SEQ ID NO: 4478 - RNA, 22 nt, Mycobacterium tuberculosis CDC1551
cgaaacugcggaccgcgcaacc

SEQ ID NO: 4479 - RNA, 22 nt, Mycobacterium tuberculosis CDC1551
cgaccugcgacagccguuaacg

SEQ ID NO: 4480 - RNA, 22 nt, Mycobacterium tuberculosis CDC1551
ccgcccggggcauggccaagcu

SEQ ID NO: 4481 - RNA, 22 nt, Mycobacterium tuberculosis CDC1551
ccugugccaagcgcugaccgcu

SEQ ID NO: 4482 - RNA, 23 nt, Mycobacterium tuberculosis CDC1551
ccuugggcagaugccagcugaag

SEQ ID NO: 4483 - RNA, 22 nt, Mycobacterium tuberculosis CDC1551
ccuggcgcgcagcacggccugc

SEQ ID NO: 4484 - RNA, 22 nt, Mycobacterium tuberculosis CDC1551
ccgcccggcugcgcgagcuggg

SEQ ID NO: 4485 - RNA, 22 nt, Mycobacterium tuberculosis CDC1551
ccguugacccagaccggcucgu

SEQ ID NO: 4486 - RNA, 22 nt, Mycobacterium tuberculosis CDC1551
cccagcaccgaccagugccggc

SEQ ID NO: 4487 - RNA, 22 nt, Mycobacterium tuberculosis CDC1551
ccaugccgaugacgcuguuggc

SEQ ID NO: 4488 - RNA, 22 nt, Mycobacterium tuberculosis CDC1551
cccacugccgccgguuggccac

SEQ ID NO: 4489 - RNA, 22 nt, Mycobacterium tuberculosis CDC1551
ccaugagggcgauaugcacgau

SEQ ID NO: 4490 - RNA, 22 nt, Mycobacterium tuberculosis CDC1551
ccaugggccggguucuugacca

SEQ ID NO: 4491 - RNA, 22 nt, Mycobacterium tuberculosis CDC1551
ccagcggguuugucacguagcc

SEQ ID NO: 4492 - RNA, 22 nt, Mycobacterium tuberculosis CDC1551
ccagcucaucgccguagcugag

SEQ ID NO: 4493 - RNA, 22 nt, Mycobacterium tuberculosis CDC1551
ccaggcguagaagguucuccgg

SEQ ID NO: 4494 - RNA, 22 nt, Mycobacterium tuberculosis CDC1551
caugcaucggaagaaccggcau

SEQ ID NO: 4495 - RNA, 22 nt, Mycobacterium tuberculosis CDC1551
caugagcgccgaacagcgcuga

SEQ ID NO: 4496 - RNA, 22 nt, Mycobacterium tuberculosis CDC1551
caugacgguacguuugccucgu

SEQ ID NO: 4497 - RNA, 22 nt, Mycobacterium tuberculosis CDC1551
caucacaucgaggucaccacgc

SEQ ID NO: 4498 - RNA, 22 nt, Mycobacterium tuberculosis CDC1551
cauggucacuggcugugacuga

SEQ ID NO: 4499 - RNA, 23 nt, Mycobacterium tuberculosis CDC1551
cauguugaccgcgcccaggaugg

SEQ ID NO: 4500 - RNA, 22 nt, Mycobacterium tuberculosis CDC1551
caucuguuggcgcucucggccu

SEQ ID NO: 4501 - RNA, 22 nt, Mycobacterium tuberculosis CDC1551
ccaaugggauguugccgagcau

SEQ ID NO: 4502 - RNA, 22 nt, Mycobacterium tuberculosis CDC1551
ccagcacucggucgaugaucuu

SEQ ID NO: 4503 - RNA, 22 nt, Mycobacterium tuberculosis CDC1551
ccaccgccacggccagcaccgc

SEQ ID NO: 4504 - RNA, 22 nt, Mycobacterium tuberculosis CDC1551
cauuggcaccggaaaucgccgg

SEQ ID NO: 4505 - RNA, 20 nt, Mycobacterium tuberculosis CDC1551
cacugacuagugaagaaccu

SEQ ID NO: 4506 - RNA, 22 nt, Mycobacterium tuberculosis CDC1551
cacgccugcgcgacauggacgc

SEQ ID NO: 4507 - RNA, 22 nt, Mycobacterium tuberculosis CDC1551
cagggcgccaagcucaccugau

SEQ ID NO: 4508 - RNA, 22 nt, Mycobacterium tuberculosis CDC1551
caggaugacgccgcagcgcucg

SEQ ID NO: 4509 - RNA, 22 nt, Mycobacterium tuberculosis CDC1551
cagcgccaauacaucacggcag

SEQ ID NO: 4510 - RNA, 22 nt, Mycobacterium tuberculosis CDC1551
cagccgccaaaccgcugaggaa

SEQ ID NO: 4511 - RNA, 22 nt, Mycobacterium tuberculosis CDC1551
caagaccagguacguggaccau

SEQ ID NO: 4512 - RNA, 22 nt, Mycobacterium tuberculosis CDC1551
auuggcuguggugaagagcaau

SEQ ID NO: 4513 - RNA, 22 nt, Mycobacterium tuberculosis CDC1551
uuuggccaugccgcgggcgacc

SEQ ID NO: 4514 - RNA, 22 nt, Mycobacterium tuberculosis CDC1551
uuugggugugagaacgguuggu

SEQ ID NO: 4515 - RNA, 22 nt, Mycobacterium tuberculosis CDC1551
uuucauucagacgagaggcgug

SEQ ID NO: 4516 - RNA, 20 nt, Mycobacterium tuberculosis CDC1551
uuucugagcggcucaugacg

SEQ ID NO: 4517 - RNA, 22 nt, Mycobacterium tuberculosis CDC1551
ugugguuucccuacccgggcag

SEQ ID NO: 4518 - RNA, 22 nt, Mycobacterium tuberculosis CDC1551
uucaggcuacgguagcggugcg

SEQ ID NO: 4519 - RNA, 22 nt, Mycobacterium tuberculosis CDC1551
uucaucaaggacgcgugcaccc

SEQ ID NO: 4520 - RNA, 22 nt, Mycobacterium tuberculosis CDC1551
uggggcaugagcguguccaggc

SEQ ID NO: 4521 - RNA, 20 nt, Mycobacterium tuberculosis CDC1551
uggucaccggguucgacacc

SEQ ID NO: 4522 - RNA, 22 nt, Mycobacterium tuberculosis CDC1551
uggucggcgaguucgccgugca

SEQ ID NO: 4523 - RNA, 22 nt, Mycobacterium tuberculosis CDC1551
uggucggcggucauacccgcgg

SEQ ID NO: 4524 - RNA, 23 nt, Mycobacterium tuberculosis CDC1551
ugguggucgacaugucggccagc

SEQ ID NO: 4525 - RNA, 22 nt, Mycobacterium tuberculosis CDC1551
ugguuucccgugaggugaucgc

SEQ ID NO: 4526 - RNA, 22 nt, Mycobacterium tuberculosis CDC1551
ugguuaggcgggacggggagug

SEQ ID NO: 4527 - RNA, 23 nt, Mycobacterium tuberculosis CDC1551
ugguggacgcagagucaacggau

SEQ ID NO: 4528 - RNA, 22 nt, Mycobacterium tuberculosis CDC1551
ugguggccggugccgacaccuc

SEQ ID NO: 4529 - RNA, 22 nt, Mycobacterium tuberculosis CDC1551
ugguggcuguuguugcgccggc

SEQ ID NO: 4530 - RNA, 22 nt, Mycobacterium tuberculosis CDC1551
ugguggcuagcaaggucuuccc

SEQ ID NO: 4531 - RNA, 22 nt, Mycobacterium tuberculosis CDC1551
ugucgcgcaagcucuccggcac

SEQ ID NO: 4532 - RNA, 22 nt, Mycobacterium tuberculosis CDC1551
ugugauggagugaucggcagcc

SEQ ID NO: 4533 - RNA, 18 nt, Mycobacterium tuberculosis CDC1551
ugugaccacagggcuggc

SEQ ID NO: 4534 - RNA, 22 nt, Mycobacterium tuberculosis CDC1551
ugucauucgggucgguuacguc

SEQ ID NO: 4535 - RNA, 22 nt, Mycobacterium tuberculosis CDC1551
uucuucagcauggcgaugacgg

SEQ ID NO: 4536 - RNA, 22 nt, Mycobacterium tuberculosis CDC1551
uugaugaugcggauccggauuc

SEQ ID NO: 4537 - RNA, 22 nt, Mycobacterium tuberculosis CDC1551
uugagggugugggccacgucgg

SEQ ID NO: 4538 - RNA, 22 nt, Mycobacterium tuberculosis CDC1551
uugauauuaccgauggaauguc

SEQ ID NO: 4539 - RNA, 22 nt, Mycobacterium tuberculosis CDC1551
uugaccuugcgcccggccagca

SEQ ID NO: 4540 - RNA, 22 nt, Mycobacterium tuberculosis CDC1551
uugacgucagcgccgcccgguc

SEQ ID NO: 4541 - RNA, 21 nt, Mycobacterium tuberculosis CDC1551
uuccggcccggguccagcgac

SEQ ID NO: 4542 - RNA, 22 nt, Mycobacterium tuberculosis CDC1551
uugggccaccaguccugguuuc

SEQ ID NO: 4543 - RNA, 22 nt, Mycobacterium tuberculosis CDC1551
uugggccaccucggcggccagc

SEQ ID NO: 4544 - RNA, 22 nt, Mycobacterium tuberculosis CDC1551
uugguguccgccgacgccaagu

SEQ ID NO: 4545 - RNA, 22 nt, Mycobacterium tuberculosis CDC1551
uugucaccgcuuccauggcguu

SEQ ID NO: 4546 - RNA, 22 nt, Mycobacterium tuberculosis CDC1551
uugccauucaccguuggugacc

SEQ ID NO: 4547 - RNA, 22 nt, Mycobacterium tuberculosis CDC1551
uuggcagcgugaaguguucggg

SEQ ID NO: 4548 - RNA, 22 nt, Mycobacterium tuberculosis CDC1551
uugcgcaggggcaugucagcgu

SEQ ID NO: 4549 - RNA, 22 nt, Mycobacterium tuberculosis CDC1551
uugcgcagcgaucgcaugacug

SEQ ID NO: 4550 - RNA, 22 nt, Mycobacterium tuberculosis CDC1551
uuggccgcugcgacaagccggc

SEQ ID NO: 4551 - RNA, 22 nt, Mycobacterium tuberculosis CDC1551
uuggcaggcggucaagccacaa

SEQ ID NO: 4552 - RNA, 22 nt, Mycobacterium tuberculosis CDC1551
ucuuucccuccagaucggugcg

SEQ ID NO: 4553 - RNA, 18 nt, Mycobacterium tuberculosis CDC1551
ucgugggcgcgccgccaa

SEQ ID NO: 4554 - RNA, 22 nt, Mycobacterium tuberculosis CDC1551
ucucggccgucgcgagcuccuc

SEQ ID NO: 4555 - RNA, 21 nt, Mycobacterium tuberculosis CDC1551
ugacccacugggccgagucgg

SEQ ID NO: 4556 - RNA, 22 nt, Mycobacterium tuberculosis CDC1551
ugacauauaucaaagagauguu

SEQ ID NO: 4557 - RNA, 22 nt, Mycobacterium tuberculosis CDC1551
ugcacuccgacccgccgacguu

SEQ ID NO: 4558 - RNA, 18 nt, Mycobacterium tuberculosis CDC1551
ugcgccacaacggcggga

SEQ ID NO: 4559 - RNA, 22 nt, Mycobacterium tuberculosis CDC1551
ugcgcgccuugauccggcuguc

SEQ ID NO: 4560 - RNA, 22 nt, Mycobacterium tuberculosis CDC1551
ugcuccacugcugccaagucgg

SEQ ID NO: 4561 - RNA, 22 nt, Mycobacterium tuberculosis CDC1551
uggaaaaacggcggccccgacc

SEQ ID NO: 4562 - RNA, 22 nt, Mycobacterium tuberculosis CDC1551
ugcugcgccuccugcggaccgu

SEQ ID NO: 4563 - RNA, 22 nt, Mycobacterium tuberculosis CDC1551
ugcgccagcgccucccgcagga

SEQ ID NO: 4564 - RNA, 22 nt, Mycobacterium tuberculosis CDC1551
ugcccggcaugggcagccugcu

SEQ ID NO: 4565 - RNA, 22 nt, Mycobacterium tuberculosis CDC1551
ugcccggcgaacaggaauugcu

SEQ ID NO: 4566 - RNA, 23 nt, Mycobacterium tuberculosis CDC1551
uggaauggaucucggcgauaaug

SEQ ID NO: 4567 - RNA, 22 nt, Mycobacterium tuberculosis CDC1551
uggacaccauuccguugggaug

SEQ ID NO: 4568 - RNA, 22 nt, Mycobacterium tuberculosis CDC1551
uggccagcacgguguucaaguu

SEQ ID NO: 4569 - RNA, 22 nt, Mycobacterium tuberculosis CDC1551
uggcugcggccgaucaccgaug

SEQ ID NO: 4570 - RNA, 22 nt, Mycobacterium tuberculosis CDC1551
uggcugcggugccacgaacgau

SEQ ID NO: 4571 - RNA, 22 nt, Mycobacterium tuberculosis CDC1551
uggcgcugucgaucaccgacuu

SEQ ID NO: 4572 - RNA, 22 nt, Mycobacterium tuberculosis CDC1551
ugggcagcggucaaggggccca

SEQ ID NO: 4573 - RNA, 22 nt, Mycobacterium tuberculosis CDC1551
ugggcugcugcgccgcaucggc

SEQ ID NO: 4574 - RNA, 20 nt, Mycobacterium tuberculosis CDC1551
ugggcuaauggcaaccacgg

SEQ ID NO: 4575 - RNA, 22 nt, Mycobacterium tuberculosis CDC1551
ugggcggucaucgcgccgaucg

SEQ ID NO: 4576 - RNA, 22 nt, Mycobacterium tuberculosis CDC1551
uggcucagcgggucaacgaggc

SEQ ID NO: 4577 - RNA, 22 nt, Mycobacterium tuberculosis CDC1551
uggcucagauugccggugccgc

SEQ ID NO: 4578 - RNA, 17 nt, Mycobacterium tuberculosis CDC1551
uggcguggcugcaugag

SEQ ID NO: 4579 - RNA, 22 nt, Mycobacterium tuberculosis CDC1551
uggcgcgcggaucgacgacagg

SEQ ID NO: 4580 - RNA, 22 nt, Mycobacterium tuberculosis CDC1551
uggcgagcagacgcaaaagccc

SEQ ID NO: 4581 - RNA, 22 nt, Pseudomonas aeruginosa PA01
uggcgagcagggcaccgccgac

SEQ ID NO: 4582 - RNA, 22 nt, Pseudomonas aeruginosa PA01
uggccgggaucuccaggcugac

SEQ ID NO: 4583 - RNA, 22 nt, Pseudomonas aeruginosa PA01
uggccgggcagaugcuggucuc

SEQ ID NO: 4584 - RNA, 22 nt, Pseudomonas aeruginosa PA01
uggcgagcuugaacagguggcg

SEQ ID NO: 4585 - RNA, 22 nt, Pseudomonas aeruginosa PA01
uggcgaggaucucgcggaucuu

SEQ ID NO: 4586 - RNA, 22 nt, Pseudomonas aeruginosa PA01
uggcgaccuucaagcgucggcu

SEQ ID NO: 4587 - RNA, 22 nt, Pseudomonas aeruginosa PA01
uggcgcgccugcugccggucga

SEQ ID NO: 4588 - RNA, 22 nt, Pseudomonas aeruginosa PA01
uggcgcgccuggaccgucggcg

SEQ ID NO: 4589 - RNA, 22 nt, Pseudomonas aeruginosa PA01
uggcgcgccuggcugauggcac

SEQ ID NO: 4590 - RNA, 22 nt, Pseudomonas aeruginosa PA01
uggcgcgcucgaaguaacugaa

SEQ ID NO: 4591 - RNA, 18 nt, Pseudomonas aeruginosa PA01
uggcgcgcugcuggugga

SEQ ID NO: 4592 - RNA, 22 nt, Pseudomonas aeruginosa PA01
uggcgcgggcguugagcucggc

SEQ ID NO: 4593 - RNA, 22 nt, Pseudomonas aeruginosa PA01
uggcggagcgccaggcggcguu

SEQ ID NO: 4594 - RNA, 20 nt, Pseudomonas aeruginosa PA01
uggcggcugaucuucggcug

SEQ ID NO: 4595 - RNA, 22 nt, Pseudomonas aeruginosa PA01
ugggcggcaagccugcgcgaca

SEQ ID NO: 4596 - RNA, 22 nt, Pseudomonas aeruginosa PA01
ugggcgggcacugucaggguca

SEQ ID NO: 4597 - RNA, 18 nt, Pseudomonas aeruginosa PA01
ugggcgagcggucgucga

SEQ ID NO: 4598 - RNA, 22 nt, Pseudomonas aeruginosa PA01
uggcagcucagggugcucauga

SEQ ID NO: 4599 - RNA, 23 nt, Pseudomonas aeruginosa PA01
uggaagauccgcugcgcuuccuu

SEQ ID NO: 4600 - RNA, 22 nt, Pseudomonas aeruginosa PA01
uggagcgcggcaacuggcgcgg

SEQ ID NO: 4601 - RNA, 22 nt, Pseudomonas aeruginosa PA01
uggagugcagaaaggcuucgac

SEQ ID NO: 4602 - RNA, 22 nt, Pseudomonas aeruginosa PA01
ugcccggcgacccgcgcggagg

SEQ ID NO: 4603 - RNA, 22 nt, Pseudomonas aeruginosa PA01
ugcccggcgaccucgcggcugc

SEQ ID NO: 4604 - RNA, 22 nt, Pseudomonas aeruginosa PA01
ugcccggcucgcgguucagccu

SEQ ID NO: 4605 - RNA, 22 nt, Pseudomonas aeruginosa PA01
ugccgaggaacagccaggcgug

SEQ ID NO: 4606 - RNA, 22 nt, Pseudomonas aeruginosa PA01
ugccgggaguagcgguucaccc

SEQ ID NO: 4607 - RNA, 22 nt, Pseudomonas aeruginosa PA01
ugccguccuaccuggagagcga

SEQ ID NO: 4608 - RNA, 22 nt, Pseudomonas aeruginosa PA01
ugcgcagcugcgagcugaucug

SEQ ID NO: 4609 - RNA, 22 nt, Pseudomonas aeruginosa PA01
ugcgcgcguagccgguauuccu

SEQ ID NO: 4610 - RNA, 22 nt, Pseudomonas aeruginosa PA01
ugcgcggccgguagccgaaggu

SEQ ID NO: 4611 - RNA, 22 nt, Pseudomonas aeruginosa PA01
ugcgcggcguuuccucgccgaa

SEQ ID NO: 4612 - RNA, 22 nt, Pseudomonas aeruginosa PA01
ugcgcugggcguggucggcgac

SEQ ID NO: 4613 - RNA, 22 nt, Pseudomonas aeruginosa PA01
ugcgcugguggucgagcagcac

SEQ ID NO: 4614 - RNA, 21 nt, Pseudomonas aeruginosa PA01
ugcggacgauaugcgugcccc

SEQ ID NO: 4615 - RNA, 22 nt, Pseudomonas aeruginosa PA01
ugcggauggucaucgaccuggc

SEQ ID NO: 4616 - RNA, 22 nt, Pseudomonas aeruginosa PA01
ugcggcccggcucggugagggu

SEQ ID NO: 4617 - RNA, 20 nt, Pseudomonas aeruginosa PA01
ugcggcggguaagcaggguc

SEQ ID NO: 4618 - RNA, 22 nt, Pseudomonas aeruginosa PA01
ugcggcucuucagcccggagag

SEQ ID NO: 4619 - RNA, 22 nt, Pseudomonas aeruginosa PA01
ugccgccgccgaggcuucgcug

SEQ ID NO: 4620 - RNA, 22 nt, Pseudomonas aeruginosa PA01
ugccgccguccgccgagcuggu

SEQ ID NO: 4621 - RNA, 22 nt, Pseudomonas aeruginosa PA01
ugccggagcgcgccgagggcag

SEQ ID NO: 4622 - RNA, 22 nt, Pseudomonas aeruginosa PA01
ugccggagucuucgccugguug

SEQ ID NO: 4623 - RNA, 22 nt, Pseudomonas aeruginosa PA01
ugccggccacaugcucgggggu

SEQ ID NO: 4624 - RNA, 22 nt, Pseudomonas aeruginosa PA01
ugccggccauggccuccacguc

SEQ ID NO: 4625 - RNA, 19 nt, Pseudomonas aeruginosa PA01
ugccggccgagcuguucga

SEQ ID NO: 4626 - RNA, 21 nt, Pseudomonas aeruginosa PA01
ugccggccgccaggugcagga

SEQ ID NO: 4627 - RNA, 22 nt, Pseudomonas aeruginosa PA01
ugccggccugacugucugccgg

SEQ ID NO: 4628 - RNA, 22 nt, Pseudomonas aeruginosa PA01
ugccggccugcucuggcgccug

SEQ ID NO: 4629 - RNA, 22 nt, Pseudomonas aeruginosa PA01
ugccggcgaggucggccaugac

SEQ ID NO: 4630 - RNA, 19 nt, Pseudomonas aeruginosa PA01
ugccggcgagucgaacaug

SEQ ID NO: 4631 - RNA, 22 nt, Pseudomonas aeruginosa PA01
ugccggcgcaguucgggcgcaa

SEQ ID NO: 4632 - RNA, 22 nt, Pseudomonas aeruginosa PA01
ugccggcgcccuggugaucugc

SEQ ID NO: 4633 - RNA, 22 nt, Pseudomonas aeruginosa PA01
ugccggcgccggagaggccgcu

SEQ ID NO: 4634 - RNA, 22 nt, Pseudomonas aeruginosa PA01
ugccggcgcggcgguugaggcc

SEQ ID NO: 4635 - RNA, 22 nt, Pseudomonas aeruginosa PA01
ugccggcggcagcggugccgug

SEQ ID NO: 4636 - RNA, 22 nt, Pseudomonas aeruginosa PA01
ugccggcggggcgcagcccuag

SEQ ID NO: 4637 - RNA, 22 nt, Pseudomonas aeruginosa PA01
ugcuucuuggcgcgcuugccgc

SEQ ID NO: 4638 - RNA, 19 nt, Pseudomonas aeruginosa PA01
ugcuugcagccaacugagc

SEQ ID NO: 4639 - RNA, 22 nt, Pseudomonas aeruginosa PA01
uggaaaucgccacgguggacua

SEQ ID NO: 4640 - RNA, 23 nt, Pseudomonas aeruginosa PA01
uggaagcgcgguucgccgcuggc

SEQ ID NO: 4641 - RNA, 22 nt, Pseudomonas aeruginosa PA01
uggaagcgcuggacgccuucuu

SEQ ID NO: 4642 - RNA, 22 nt, Pseudomonas aeruginosa PA01
ugcuccgggaaauccggcaggu

SEQ ID NO: 4643 - RNA, 18 nt, Pseudomonas aeruginosa PA01
ugcuccgggccuauucgc

SEQ ID NO: 4644 - RNA, 22 nt, Pseudomonas aeruginosa PA01
ugcgccccugguucucgaugaa

SEQ ID NO: 4645 - RNA, 22 nt, Pseudomonas aeruginosa PA01
ugcgccggcccuggcuagacug

SEQ ID NO: 4646 - RNA, 22 nt, Pseudomonas aeruginosa PA01
ugcgccgggguuuccggcgugc

SEQ ID NO: 4647 - RNA, 22 nt, Pseudomonas aeruginosa PA01
ugcgcgaacuggugcugggcuc

SEQ ID NO: 4648 - RNA, 22 nt, Pseudomonas aeruginosa PA01
ugcgcgaggugcugccgcagug

SEQ ID NO: 4649 - RNA, 22 nt, Pseudomonas aeruginosa PA01
ugcgguggaaccauggcggacg

SEQ ID NO: 4650 - RNA, 22 nt, Pseudomonas aeruginosa PA01
ugcgguggccccaccagagcug

SEQ ID NO: 4651 - RNA, 22 nt, Pseudomonas aeruginosa PA01
ugcgguggcgauaccggugaug

SEQ ID NO: 4652 - RNA, 22 nt, Pseudomonas aeruginosa PA01
ugcugaagagcgucgagaucca

SEQ ID NO: 4653 - RNA, 23 nt, Pseudomonas aeruginosa PA01
ugcuggaagaagcggcgaugauc

SEQ ID NO: 4654 - RNA, 22 nt, Pseudomonas aeruginosa PA01
ugcuggaagaugcgcugguugg

SEQ ID NO: 4655 - RNA, 22 nt, Pseudomonas aeruginosa PA01
ugcuggagaaggacggcgagcg

SEQ ID NO: 4656 - RNA, 22 nt, Pseudomonas aeruginosa PA01
ugcuggagaaugucgcggcugc

SEQ ID NO: 4657 - RNA, 22 nt, Pseudomonas aeruginosa PA01
ugcagcggaucgagcaggccga

SEQ ID NO: 4658 - RNA, 22 nt, Pseudomonas aeruginosa PA01
ugaugcggguuccgguagggga

SEQ ID NO: 4659 - RNA, 22 nt, Pseudomonas aeruginosa PA01
ugaggaagcgcacgcaggcguc

SEQ ID NO: 4660 - RNA, 19 nt, Pseudomonas aeruginosa PA01
ugauauaggcgguacgggc

SEQ ID NO: 4661 - RNA, 19 nt, Pseudomonas aeruginosa PA01
ugagcagccccaggacgau

SEQ ID NO: 4662 - RNA, 22 nt, Pseudomonas aeruginosa PA01
ugagcgccaggaccugcuccgg

SEQ ID NO: 4663 - RNA, 22 nt, Pseudomonas aeruginosa PA01
ugagcgccugcucgcggcugau

SEQ ID NO: 4664 - RNA, 22 nt, Pseudomonas aeruginosa PA01
ugagcgccugcugcgcaccacc

SEQ ID NO: 4665 - RNA, 22 nt, Pseudomonas aeruginosa PA01
ugagcguggccagccgcgccuc

SEQ ID NO: 4666 - RNA, 22 nt, Pseudomonas aeruginosa PA01
ugagcugcggacgcucgaagac

SEQ ID NO: 4667 - RNA, 22 nt, Pseudomonas aeruginosa PA01
ugaaguacugcagcaucuucuc

SEQ ID NO: 4668 - RNA, 22 nt, Pseudomonas aeruginosa PA01
ugaagauggccgagccggcgac

SEQ ID NO: 4669 - RNA, 22 nt, Pseudomonas aeruginosa PA01
ucucgucgcugcuggcaccgac

SEQ ID NO: 4670 - RNA, 22 nt, Pseudomonas aeruginosa PA01
ucucgucguccaugcucgcgcc

SEQ ID NO: 4671 - RNA, 20 nt, Pseudomonas aeruginosa PA01
ucuccggcgaagagcugcgc

SEQ ID NO: 4672 - RNA, 22 nt, Pseudomonas aeruginosa PA01
ucuccggcggccagcgccagcg

SEQ ID NO: 4673 - RNA, 22 nt, Pseudomonas aeruginosa PA01
ucuccgucgagcggauccaggc

SEQ ID NO: 4674 - RNA, 23 nt, Pseudomonas aeruginosa PA01
ucugcaggaagccuggcagcagc

SEQ ID NO: 4675 - RNA, 22 nt, Pseudomonas aeruginosa PA01
ucuggcucgccaccggccgggu

SEQ ID NO: 4676 - RNA, 23 nt, Pseudomonas aeruginosa PA01
ucuugcccuucuucucgacgguc

SEQ ID NO: 4677 - RNA, 22 nt, Pseudomonas aeruginosa PA01
uugcccgguugcagcggcacca

SEQ ID NO: 4678 - RNA, 22 nt, Pseudomonas aeruginosa PA01
uugcaugaacggcgugccguuc

SEQ ID NO: 4679 - RNA, 22 nt, Pseudomonas aeruginosa PA01
uuccgggcaaaaauucagccga

SEQ ID NO: 4680 - RNA, 22 nt, Pseudomonas aeruginosa PA01
uuccaggcagggccguccuccg

SEQ ID NO: 4681 - RNA, 22 nt, Pseudomonas aeruginosa PA01
uuccaguuggcggcguugcagc

SEQ ID NO: 4682 - RNA, 22 nt, Pseudomonas aeruginosa PA01
uucgccggcggcccgccugucc

SEQ ID NO: 4683 - RNA, 22 nt, Pseudomonas aeruginosa PA01
uucgcggcgaauuuccccggca

SEQ ID NO: 4684 - RNA, 22 nt, Pseudomonas aeruginosa PA01
uuccucggcgccagcgccggca

SEQ ID NO: 4685 - RNA, 22 nt, Pseudomonas aeruginosa PA01
uuccccggcgggcggcgcgacc

SEQ ID NO: 4686 - RNA, 22 nt, Pseudomonas aeruginosa PA01
uucccgccggaggugcgcgccc

SEQ ID NO: 4687 - RNA, 22 nt, Pseudomonas aeruginosa PA01
uucccgcuggcagauggcccug

SEQ ID NO: 4688 - RNA, 22 nt, Pseudomonas aeruginosa PA01
uucccggcaccggucuggcggu

SEQ ID NO: 4689 - RNA, 22 nt, Pseudomonas aeruginosa PA01
uucccgucgaugcggagcggau

SEQ ID NO: 4690 - RNA, 22 nt, Pseudomonas aeruginosa PA01
uuccacggucagcaccgccggc

SEQ ID NO: 4691 - RNA, 22 nt, Pseudomonas aeruginosa PA01
uugagaauggucuccuuggccu

SEQ ID NO: 4692 - RNA, 21 nt, Pseudomonas aeruginosa PA01
uucuucagccugcgcgccgug

SEQ ID NO: 4693 - RNA, 22 nt, Pseudomonas aeruginosa PA01
uucuucagcuugaucacgucga

SEQ ID NO: 4694 - RNA, 22 nt, Pseudomonas aeruginosa PA01
ugucggccuccugggaugccgc

SEQ ID NO: 4695 - RNA, 23 nt, Pseudomonas aeruginosa PA01
ugucuccagcgucuucgggcugu

SEQ ID NO: 4696 - RNA, 17 nt, Pseudomonas aeruginosa PA01
ugucccggcggcggggu

SEQ ID NO: 4697 - RNA, 19 nt, Pseudomonas aeruginosa PA01
uggucgaggggcuggaggc

SEQ ID NO: 4698 - RNA, 22 nt, Pseudomonas aeruginosa PA01
ugguccucggugccggcgacau

SEQ ID NO: 4699 - RNA, 22 nt, Pseudomonas aeruginosa PA01
ugguccugaccuacuucgucau

SEQ ID NO: 4700 - RNA, 22 nt, Pseudomonas aeruginosa PA01
ugguccuggcggagcugcccaa

SEQ ID NO: 4701 - RNA, 23 nt, Pseudomonas aeruginosa PA01
ugguccuggugaucgguuucgcc

SEQ ID NO: 4702 - RNA, 22 nt, Pseudomonas aeruginosa PA01
ugguccuguucgcccugacccu

SEQ ID NO: 4703 - RNA, 22 nt, Pseudomonas aeruginosa PA01
uguucaacgagcugcucgccga

SEQ ID NO: 4704 - RNA, 19 nt, Pseudomonas aeruginosa PA01
uuagaaauaggcauuaguc

SEQ ID NO: 4705 - RNA, 22 nt, Pseudomonas aeruginosa PA01
uuucgcggacgaacuggcggau

SEQ ID NO: 4706 - RNA, 22 nt, Pseudomonas aeruginosa PA01
uuuccucgaugucgccgcccuu

SEQ ID NO: 4707 - RNA, 22 nt, Pseudomonas aeruginosa PA01
uuucuucaaccagggcgagguc

SEQ ID NO: 4708 - RNA, 22 nt, Pseudomonas aeruginosa PA01
uuucuucagcagcccgaggcug

SEQ ID NO: 4709 - RNA, 22 nt, Pseudomonas aeruginosa PA01
uuuuucaagcggcuagaucagc

SEQ ID NO: 4710 - RNA, 22 nt, Pseudomonas aeruginosa PA01
caagcgccugcgcgccuuccug

SEQ ID NO: 4711 - RNA, 22 nt, Pseudomonas aeruginosa PA01
cagccgcgccaggccaggcgcu

SEQ ID NO: 4712 - RNA, 22 nt, Pseudomonas aeruginosa PA01
cagccggcgcaauggggaggac

SEQ ID NO: 4713 - RNA, 22 nt, Pseudomonas aeruginosa PA01
cagccugaaggacuggccggcg

SEQ ID NO: 4714 - RNA, 22 nt, Pseudomonas aeruginosa PA01
cagcgaccuggcgacgcgccug

SEQ ID NO: 4715 - RNA, 22 nt, Pseudomonas aeruginosa PA01
cagcgagcgggaguugcucgcc

SEQ ID NO: 4716 - RNA, 22 nt, Pseudomonas aeruginosa PA01
cagcgcagccaggacgaagagc

SEQ ID NO: 4717 - RNA, 22 nt, Pseudomonas aeruginosa PA01
cagcgccaccccgaggaucgcc

SEQ ID NO: 4718 - RNA, 22 nt, Pseudomonas aeruginosa PA01
cagcgccagcggaauccccgag

SEQ ID NO: 4719 - RNA, 22 nt, Pseudomonas aeruginosa PA01
cagcgccagcggccggcuccug

SEQ ID NO: 4720 - RNA, 22 nt, Pseudomonas aeruginosa PA01
cagcgccgccugggccgcgaca

SEQ ID NO: 4721 - RNA, 22 nt, Pseudomonas aeruginosa PA01
cagcgcgccgauacccaugccg

SEQ ID NO: 4722 - RNA, 22 nt, Pseudomonas aeruginosa PA01
cagcgcgcgagugagcaugggc

SEQ ID NO: 4723 - RNA, 22 nt, Pseudomonas aeruginosa PA01
cagcgcgguacucgacggcagc

SEQ ID NO: 4724 - RNA, 22 nt, Pseudomonas aeruginosa PA01
cagcgcguucuuggccugccag

SEQ ID NO: 4725 - RNA, 22 nt, Pseudomonas aeruginosa PA01
cagcgcuggugcgccgaggacu

SEQ ID NO: 4726 - RNA, 22 nt, Pseudomonas aeruginosa PA01
cagcggagagacuuuuucauua

SEQ ID NO: 4727 - RNA, 22 nt, Pseudomonas aeruginosa PA01
cagcggcaacuggcggaggcgg

SEQ ID NO: 4728 - RNA, 22 nt, Pseudomonas aeruginosa PA01
cagcuccagcagcccggcgccg

SEQ ID NO: 4729 - RNA, 22 nt, Pseudomonas aeruginosa PA01
cagcggugggccccacggcugc

SEQ ID NO: 4730 - RNA, 22 nt, Pseudomonas aeruginosa PA01
cagcgugccgucuucgaggcug

SEQ ID NO: 4731 - RNA, 22 nt, Pseudomonas aeruginosa PA01
cagcccgcugaagaugccgcgc

SEQ ID NO: 4732 - RNA, 22 nt, Pseudomonas aeruginosa PA01
cagcucggcaggcuuuccggca

SEQ ID NO: 4733 - RNA, 22 nt, Pseudomonas aeruginosa PA01
cagcucggggaaaugccggccc

SEQ ID NO: 4734 - RNA, 22 nt, Pseudomonas aeruginosa PA01
cagcuggaaggcgcgcuugccg

SEQ ID NO: 4735 - RNA, 22 nt, Pseudomonas aeruginosa PA01
cagcuggagcagaugaaagccu

SEQ ID NO: 4736 - RNA, 22 nt, Pseudomonas aeruginosa PA01
caggaugcccagcagggucggc

SEQ ID NO: 4737 - RNA, 22 nt, Pseudomonas aeruginosa PA01
caggaugcgcuccagcucgccg

SEQ ID NO: 4738 - RNA, 22 nt, Pseudomonas aeruginosa PA01
caggccaagcgccuggcgcagc

SEQ ID NO: 4739 - RNA, 22 nt, Pseudomonas aeruginosa PA01
caggcccagcugggucgcgguc

SEQ ID NO: 4740 - RNA, 22 nt, Pseudomonas aeruginosa PA01
caggccgaacucgcccugggcg

SEQ ID NO: 4741 - RNA, 22 nt, Pseudomonas aeruginosa PA01
caggccgaccaggaacgcggug

SEQ ID NO: 4742 - RNA, 22 nt, Pseudomonas aeruginosa PA01
caggccgaccgccucgcgcacu

SEQ ID NO: 4743 - RNA, 22 nt, Pseudomonas aeruginosa PA01
caggccgagaccgguguugccg

SEQ ID NO: 4744 - RNA, 22 nt, Pseudomonas aeruginosa PA01
caggccgagcgcgcccuggccg

SEQ ID NO: 4745 - RNA, 22 nt, Pseudomonas aeruginosa PA01
caggccgccggcgaccugccag

SEQ ID NO: 4746 - RNA, 22 nt, Pseudomonas aeruginosa PA01
caggccgcucagggucaacgga

SEQ ID NO: 4747 - RNA, 22 nt, Pseudomonas aeruginosa PA01
caggccggcgaggcguggccga

SEQ ID NO: 4748 - RNA, 23 nt, Pseudomonas aeruginosa PA01
caggccguugcuggcagcguggg

SEQ ID NO: 4749 - RNA, 22 nt, Pseudomonas aeruginosa PA01
caggccuguagcgccgaggcgg

SEQ ID NO: 4750 - RNA, 22 nt, Pseudomonas aeruginosa PA01
cagggccgccuuggccucgcgc

SEQ ID NO: 4751 - RNA, 22 nt, Pseudomonas aeruginosa PA01
cagggccggcauuuccccgagc

SEQ ID NO: 4752 - RNA, 22 nt, Pseudomonas aeruginosa PA01
cagggcgcuauucgcccuacgg

SEQ ID NO: 4753 - RNA, 22 nt, Pseudomonas aeruginosa PA01
caggggcaggcugucgcggaag

SEQ ID NO: 4754 - RNA, 22 nt, Pseudomonas aeruginosa PA01
caggcgcggaugcggcccagcg

SEQ ID NO: 4755 - RNA, 21 nt, Pseudomonas aeruginosa PA01
caggcgcgggcccauccaguu

SEQ ID NO: 4756 - RNA, 22 nt, Pseudomonas aeruginosa PA01
caggcgcguggcccagcaggag

SEQ ID NO: 4757 - RNA, 22 nt, Pseudomonas aeruginosa PA01
cagcuggaugcucgcgcucagc

SEQ ID NO: 4758 - RNA, 22 nt, Pseudomonas aeruginosa PA01
caggcuggcguugcccuugccg

SEQ ID NO: 4759 - RNA, 22 nt, Pseudomonas aeruginosa PA01
cacgcgcuuccggcacuuccac

SEQ ID NO: 4760 - RNA, 22 nt, Pseudomonas aeruginosa PA01
cacuggagcagcgccuggaucg

SEQ ID NO: 4761 - RNA, 22 nt, Pseudomonas aeruginosa PA01
caccagcaggcgcgaggcgauc

SEQ ID NO: 4762 - RNA, 22 nt, Pseudomonas aeruginosa PA01
caccagcuggcggugauggccg

SEQ ID NO: 4763 - RNA, 22 nt, Pseudomonas aeruginosa PA01
caccgucgccuggcccagcggc

SEQ ID NO: 4764 - RNA, 18 nt, Pseudomonas aeruginosa PA01
cagaccagcgccagcggc

SEQ ID NO: 4765 - RNA, 22 nt, Pseudomonas aeruginosa PA01
cagagccggucgaccgccuggc

SEQ ID NO: 4766 - RNA, 22 nt, Pseudomonas aeruginosa PA01
cagagcggccuguucggcgggc

SEQ ID NO: 4767 - RNA, 22 nt, Pseudomonas aeruginosa PA01
cagccagauggucggccucacg

SEQ ID NO: 4768 - RNA, 22 nt, Pseudomonas aeruginosa PA01
cagccagcccggcggucuccgc

SEQ ID NO: 4769 - RNA, 22 nt, Pseudomonas aeruginosa PA01
cagcagccgaucgucgcgcucg

SEQ ID NO: 4770 - RNA, 22 nt, Pseudomonas aeruginosa PA01
cagcagccuggccggcaguuuu

SEQ ID NO: 4771 - RNA, 22 nt, Pseudomonas aeruginosa PA01
cagcagcgccucggcgccgaac

SEQ ID NO: 4772 - RNA, 19 nt, Pseudomonas aeruginosa PA01
cagcagcgggccgcaccug

SEQ ID NO: 4773 - RNA, 22 nt, Pseudomonas aeruginosa PA01
cagcagcucgccgagacggccg

SEQ ID NO: 4774 - RNA, 22 nt, Pseudomonas aeruginosa PA01
ccaccggcaccggcgccgaggu

SEQ ID NO: 4775 - RNA, 22 nt, Pseudomonas aeruginosa PA01
ccaccuccuccccggugagcag

SEQ ID NO: 4776 - RNA, 22 nt, Pseudomonas aeruginosa PA01
ccacgaaggccaucugcauggu

SEQ ID NO: 4777 - RNA, 22 nt, Pseudomonas aeruginosa PA01
ccacgagccggagcuggccuuc

SEQ ID NO: 4778 - RNA, 22 nt, Pseudomonas aeruginosa PA01
ccagaacugcuuggagaucucg

SEQ ID NO: 4779 - RNA, 22 nt, Pseudomonas aeruginosa PA01
ccagcagcgaugcgcccagcag

SEQ ID NO: 4780 - RNA, 22 nt, Pseudomonas aeruginosa PA01
cauccggcggacagcccgcccc

SEQ ID NO: 4781 - RNA, 22 nt, Pseudomonas aeruginosa PA01
cagucucagugucugcggugcu

SEQ ID NO: 4782 - RNA, 22 nt, Pseudomonas aeruginosa PA01
caugcuugccgguuuguugcag

SEQ ID NO: 4783 - RNA, 22 nt, Pseudomonas aeruginosa PA01
ccaggcuccgcgcggugccgag

SEQ ID NO: 4784 - RNA, 22 nt, Pseudomonas aeruginosa PA01
ccaggcucgcggaugcgcgcag

SEQ ID NO: 4785 - RNA, 22 nt, Pseudomonas aeruginosa PA01
ccagggcacgcugggcgucggc

SEQ ID NO: 4786 - RNA, 22 nt, Pseudomonas aeruginosa PA01
ccagggcaucgagacuuccggc

SEQ ID NO: 4787 - RNA, 22 nt, Pseudomonas aeruginosa PA01
ccagggccggcagcagccagag

SEQ ID NO: 4788 - RNA, 22 nt, Pseudomonas aeruginosa PA01
ccagggccucgagacucugccg

SEQ ID NO: 4789 - RNA, 22 nt, Pseudomonas aeruginosa PA01
ccaggccgccagccguucggcc

SEQ ID NO: 4790 - RNA, 22 nt, Pseudomonas aeruginosa PA01
ccaggccgccgacguagcgauc

SEQ ID NO: 4791 - RNA, 22 nt, Pseudomonas aeruginosa PA01
ccaggccgcgcucuugccccac

SEQ ID NO: 4792 - RNA, 22 nt, Pseudomonas aeruginosa PA01
ccaggccggggcgaugaucgug

SEQ ID NO: 4793 - RNA, 22 nt, Pseudomonas aeruginosa PA01
ccaggccguccucgcggacgaa

SEQ ID NO: 4794 - RNA, 22 nt, Pseudomonas aeruginosa PA01
ccaggccgucgacggcgcucug

SEQ ID NO: 4795 - RNA, 22 nt, Pseudomonas aeruginosa PA01
ccaggcgcagguugagcaggaa

SEQ ID NO: 4796 - RNA, 22 nt, Pseudomonas aeruginosa PA01
ccagcaggaaccgcgcgcgguu

SEQ ID NO: 4797 - RNA, 22 nt, Pseudomonas aeruginosa PA01
ccagcagggucuucagcaguuc

SEQ ID NO: 4798 - RNA, 22 nt, Pseudomonas aeruginosa PA01
ccagccagccuucgccgaggcu

SEQ ID NO: 4799 - RNA, 22 nt, Pseudomonas aeruginosa PA01
ccagccggcgaggcuccagcgg

SEQ ID NO: 4800 - RNA, 22 nt, Pseudomonas aeruginosa PA01
ccagcgccagcaggcguugcag

SEQ ID NO: 4801 - RNA, 22 nt, Pseudomonas aeruginosa PA01
ccagcgccagucgcugcucgcc

SEQ ID NO: 4802 - RNA, 22 nt, Pseudomonas aeruginosa PA01
ccagcgccgacgggcucgacau

SEQ ID NO: 4803 - RNA, 22 nt, Pseudomonas aeruginosa PA01
ccagcgccuggaccuccaggcc

SEQ ID NO: 4804 - RNA, 22 nt, Pseudomonas aeruginosa PA01
ccagcgccuggccaucgugcgc

SEQ ID NO: 4805 - RNA, 22 nt, Pseudomonas aeruginosa PA01
ccagcgcggcggccaccaggcg

SEQ ID NO: 4806 - RNA, 20 nt, Pseudomonas aeruginosa PA01
ccagcgcguggucgcgcagc

SEQ ID NO: 4807 - RNA, 22 nt, Pseudomonas aeruginosa PA01
ccagcggccgcaaccagggcga

SEQ ID NO: 4808 - RNA, 21 nt, Pseudomonas aeruginosa PA01
ccaggcagugaccacaagggc

SEQ ID NO: 4809 - RNA, 22 nt, Pseudomonas aeruginosa PA01
ccaggccaacgaagccaacgaa

SEQ ID NO: 4810 - RNA, 22 nt, Pseudomonas aeruginosa PA01
ccagccugaccagccuggccac

SEQ ID NO: 4811 - RNA, 22 nt, Pseudomonas aeruginosa PA01
ccagccugcacggcggccagga

SEQ ID NO: 4812 - RNA, 22 nt, Pseudomonas aeruginosa PA01
cccacgaggcggccgaggcggc

SEQ ID NO: 4813 - RNA, 21 nt, Pseudomonas aeruginosa PA01
cccacggcuaccugaucgacc

SEQ ID NO: 4814 - RNA, 22 nt, Pseudomonas aeruginosa PA01
cccagcaguugcugcuggcggc

SEQ ID NO: 4815 - RNA, 22 nt, Pseudomonas aeruginosa PA01
cccagcucgacaucccggcgcu

SEQ ID NO: 4816 - RNA, 22 nt, Pseudomonas aeruginosa PA01
cccagggcgccuucgacgaccc

SEQ ID NO: 4817 - RNA, 22 nt, Pseudomonas aeruginosa PA01
ccccagggccgcggagcgcagg

SEQ ID NO: 4818 - RNA, 22 nt, Pseudomonas aeruginosa PA01
cccgagcugcucgaacuccacg

SEQ ID NO: 4819 - RNA, 19 nt, Pseudomonas aeruginosa PA01
cccgccgcgccggccugga

SEQ ID NO: 4820 - RNA, 22 nt, Pseudomonas aeruginosa PA01
cccgccgcugguggucgacguc

SEQ ID NO: 4821 - RNA, 22 nt, Pseudomonas aeruginosa PA01
cccgccugggugcccuggcuga

SEQ ID NO: 4822 - RNA, 22 nt, Pseudomonas aeruginosa PA01
cccgcgacuggaauccgcgaac

SEQ ID NO: 4823 - RNA, 22 nt, Pseudomonas aeruginosa PA01
cccgcgccacgaggaacgcgug

SEQ ID NO: 4824 - RNA, 22 nt, Pseudomonas aeruginosa PA01
cccuggaagaccugccggagaa

SEQ ID NO: 4825 - RNA, 22 nt, Pseudomonas aeruginosa PA01
ccccggcugcggcagcggcgga

SEQ ID NO: 4826 - RNA, 22 nt, Pseudomonas aeruginosa PA01
cccgcggcuggcugcgcuaccg

SEQ ID NO: 4827 - RNA, 22 nt, Pseudomonas aeruginosa PA01
cccgcuccguuggggccgagga

SEQ ID NO: 4828 - RNA, 22 nt, Pseudomonas aeruginosa PA01
cccggagcuggucaaccaggac

SEQ ID NO: 4829 - RNA, 21 nt, Pseudomonas aeruginosa PA01
cccggccgagagcgggcagga

SEQ ID NO: 4830 - RNA, 22 nt, Pseudomonas aeruginosa PA01
cccggccgccaccgucgagcag

SEQ ID NO: 4831 - RNA, 22 nt, Pseudomonas aeruginosa PA01
cccggccggcgaugcaguggag

SEQ ID NO: 4832 - RNA, 22 nt, Pseudomonas aeruginosa PA01
cccggccugccuggacgcgcug

SEQ ID NO: 4833 - RNA, 22 nt, Pseudomonas aeruginosa PA01
cccggcgcagaugcgcgucgau

SEQ ID NO: 4834 - RNA, 22 nt, Pseudomonas aeruginosa PA01
cccggcgggcaccuguguggcc

SEQ ID NO: 4835 - RNA, 22 nt, Pseudomonas aeruginosa PA01
cccggcguugaucccgcgggcg

SEQ ID NO: 4836 - RNA, 22 nt, Pseudomonas aeruginosa PA01
cccggcucguuggucacggcga

SEQ ID NO: 4837 - RNA, 22 nt, Pseudomonas aeruginosa PA01
cccggcucugcucggcgugggc

SEQ ID NO: 4838 - RNA, 22 nt, Pseudomonas aeruginosa PA01
cccggcuguucguugaucggcu

SEQ ID NO: 4839 - RNA, 22 nt, Pseudomonas aeruginosa PA01
cccggggacaugucguccagcc

SEQ ID NO: 4840 - RNA, 22 nt, Pseudomonas aeruginosa PA01
ccucgccgcgagcguggcacuc

SEQ ID NO: 4841 - RNA, 22 nt, Pseudomonas aeruginosa PA01
ccguccugccucguccgcgcag

SEQ ID NO: 4842 - RNA, 19 nt, Pseudomonas aeruginosa PA01
ccgucgccggcguuggucg

SEQ ID NO: 4843 - RNA, 22 nt, Pseudomonas aeruginosa PA01
ccgugcggaagacgccuuccaa

SEQ ID NO: 4844 - RNA, 22 nt, Pseudomonas aeruginosa PA01
ccgccccgccuccugggaccag

SEQ ID NO: 4845 - RNA, 22 nt, Pseudomonas aeruginosa PA01
ccgccccgcucugcgccaacgg

SEQ ID NO: 4846 - RNA, 22 nt, Pseudomonas aeruginosa PA01
ccgccccggcugcucagcgugc

SEQ ID NO: 4847 - RNA, 22 nt, Pseudomonas aeruginosa PA01
ccgggcgcccggacgugcagcg

SEQ ID NO: 4848 - RNA, 22 nt, Pseudomonas aeruginosa PA01
ccgggcgcuggucugcgcggug

SEQ ID NO: 4849 - RNA, 22 nt, Pseudomonas aeruginosa PA01
ccggucuccgccgggcgguggc

SEQ ID NO: 4850 - RNA, 22 nt, Pseudomonas aeruginosa PA01
ccgguucuccagcaccaggcgg

SEQ ID NO: 4851 - RNA, 22 nt, Pseudomonas aeruginosa PA01
ccgcuccgacaggggcaaggcg

SEQ ID NO: 4852 - RNA, 22 nt, Pseudomonas aeruginosa PA01
ccgcuggacggggccucguuga

SEQ ID NO: 4853 - RNA, 22 nt, Pseudomonas aeruginosa PA01
ccggaagcccugagccgcucug

SEQ ID NO: 4854 - RNA, 22 nt, Pseudomonas aeruginosa PA01
ccggagccggcuugccguggac

SEQ ID NO: 4855 - RNA, 22 nt, Pseudomonas aeruginosa PA01
ccggagccgguucgcaccuauc

SEQ ID NO: 4856 - RNA, 22 nt, Pseudomonas aeruginosa PA01
ccggagccguccgguaccacgu

SEQ ID NO: 4857 - RNA, 18 nt, Pseudomonas aeruginosa PA01
ccggagccugugucggcc

SEQ ID NO: 4858 - RNA, 22 nt, Pseudomonas aeruginosa PA01
ccggagcgcccgggccuucguc

SEQ ID NO: 4859 - RNA, 22 nt, Pseudomonas aeruginosa PA01
ccggagcggcgagcagggcgag

SEQ ID NO: 4860 - RNA, 22 nt, Pseudomonas aeruginosa PA01
ccggagcgggaggucagaccuu

SEQ ID NO: 4861 - RNA, 22 nt, Pseudomonas aeruginosa PA01
ccuggggcgccugcugcuacag

SEQ ID NO: 4862 - RNA, 22 nt, Pseudomonas aeruginosa PA01
ccugggcaagcucggcaagggc

SEQ ID NO: 4863 - RNA, 22 nt, Pseudomonas aeruginosa PA01
ccuuggucaucgggguggaucg

SEQ ID NO: 4864 - RNA, 22 nt, Pseudomonas aeruginosa PA01
ccguuggcggcgucggugguga

SEQ ID NO: 4865 - RNA, 22 nt, Pseudomonas aeruginosa PA01
ccucuccggcgacgaggccaag

SEQ ID NO: 4866 - RNA, 22 nt, Pseudomonas aeruginosa PA01
ccucuucuggcuggaggcgcgc

SEQ ID NO: 4867 - RNA, 22 nt, Pseudomonas aeruginosa PA01
ccugagcgucagcgacgacggu

SEQ ID NO: 4868 - RNA, 22 nt, Pseudomonas aeruginosa PA01
ccugccggcggcgcuggucgaa

SEQ ID NO: 4869 - RNA, 22 nt, Pseudomonas aeruginosa PA01
ccugcgaccagagcugggccag

SEQ ID NO: 4870 - RNA, 23 nt, Pseudomonas aeruginosa PA01
ccugcgacuaccugcaacgccuc

SEQ ID NO: 4871 - RNA, 22 nt, Pseudomonas aeruginosa PA01
ccugcgccugucggccggcgcc

SEQ ID NO: 4872 - RNA, 23 nt, Pseudomonas aeruginosa PA01
ccugcuccgcgauugccugggcg

SEQ ID NO: 4873 - RNA, 22 nt, Pseudomonas aeruginosa PA01
ccuggccggccacgaccugcuc

SEQ ID NO: 4874 - RNA, 22 nt, Pseudomonas aeruginosa PA01
ccuggaagugcuguuccuggac

SEQ ID NO: 4875 - RNA, 22 nt, Pseudomonas aeruginosa PA01
ccgcccuggccuauccgcugcu

SEQ ID NO: 4876 - RNA, 22 nt, Pseudomonas aeruginosa PA01
ccgcccugguccugcugccguu

SEQ ID NO: 4877 - RNA, 22 nt, Pseudomonas aeruginosa PA01
ccgccgccgaccaugaacaucg

SEQ ID NO: 4878 - RNA, 22 nt, Pseudomonas aeruginosa PA01
ccgccggcaucggccugcacac

SEQ ID NO: 4879 - RNA, 22 nt, Pseudomonas aeruginosa PA01
ccgccggguacguugcagcaac

SEQ ID NO: 4880 - RNA, 22 nt, Pseudomonas aeruginosa PA01
ccgccgggugguguccucagcg

SEQ ID NO: 4881 - RNA, 22 nt, Pseudomonas aeruginosa PA01
ccgccucgacgaagccgcgcag

SEQ ID NO: 4882 - RNA, 22 nt, Pseudomonas aeruginosa PA01
ccgccuggguagcuacguggcg

SEQ ID NO: 4883 - RNA, 22 nt, Pseudomonas aeruginosa PA01
ccgcgcagaucccccggcuggc

SEQ ID NO: 4884 - RNA, 21 nt, Pseudomonas aeruginosa PA01
ccgcgccuggaccgcgccggg

SEQ ID NO: 4885 - RNA, 22 nt, Pseudomonas aeruginosa PA01
ccgcggagcccggucgggcgcu

SEQ ID NO: 4886 - RNA, 22 nt, Pseudomonas aeruginosa PA01
ccgcggcauggugguggucuac

SEQ ID NO: 4887 - RNA, 23 nt, Pseudomonas aeruginosa PA01
ccgcggccugcaauucuuccagc

SEQ ID NO: 4888 - RNA, 22 nt, Pseudomonas aeruginosa PA01
ccgcggcuauggcgucgaggcg

SEQ ID NO: 4889 - RNA, 22 nt, Pseudomonas aeruginosa PA01
ccgagggcaagccgcgcuacac

SEQ ID NO: 4890 - RNA, 22 nt, Pseudomonas aeruginosa PA01
ccgagggcaucgacugccaggg

SEQ ID NO: 4891 - RNA, 22 nt, Pseudomonas aeruginosa PA01
ccgcacagccguaucggccugc

SEQ ID NO: 4892 - RNA, 22 nt, Pseudomonas aeruginosa PA01
ccgcagaggucccucggcgcuu

SEQ ID NO: 4893 - RNA, 22 nt, Pseudomonas aeruginosa PA01
ccgcagccacagcggccgggca

SEQ ID NO: 4894 - RNA, 22 nt, Pseudomonas aeruginosa PA01
ccgcagccuggcgaucgaagcg

SEQ ID NO: 4895 - RNA, 22 nt, Pseudomonas aeruginosa PA01
ccgccacccugagcgcgcugau

SEQ ID NO: 4896 - RNA, 22 nt, Pseudomonas aeruginosa PA01
ccgagcaggaagccuugcagcg

SEQ ID NO: 4897 - RNA, 21 nt, Pseudomonas aeruginosa PA01
ccgagcaguuucucgaggcgc

SEQ ID NO: 4898 - RNA, 19 nt, Pseudomonas aeruginosa PA01
ccgagccgccgacgugguu

SEQ ID NO: 4899 - RNA, 21 nt, Pseudomonas aeruginosa PA01
ccgagcgcaaggggcgcgagc

SEQ ID NO: 4900 - RNA, 22 nt, Pseudomonas aeruginosa PA01
ccgagcgcgcccucgaacugau

SEQ ID NO: 4901 - RNA, 22 nt, Pseudomonas aeruginosa PA01
ccgagcgcuucgcccaugucgg

SEQ ID NO: 4902 - RNA, 22 nt, Pseudomonas aeruginosa PA01
ccggcagccacugcgccugcug

SEQ ID NO: 4903 - RNA, 19 nt, Pseudomonas aeruginosa PA01
ccggcaucuuauggggcgu

SEQ ID NO: 4904 - RNA, 22 nt, Pseudomonas aeruginosa PA01
ccggcccgccgggugcggccug

SEQ ID NO: 4905 - RNA, 20 nt, Pseudomonas aeruginosa PA01
ccggccgaagugcucgcggu

SEQ ID NO: 4906 - RNA, 22 nt, Pseudomonas aeruginosa PA01
ccggccgaggcgccggaccagg

SEQ ID NO: 4907 - RNA, 22 nt, Pseudomonas aeruginosa PA01
ccggccggguuuccuggguaug

SEQ ID NO: 4908 - RNA, 22 nt, Pseudomonas aeruginosa PA01
ccggccugcggcgcuuccacga

SEQ ID NO: 4909 - RNA, 22 nt, Pseudomonas aeruginosa PA01
ccggccuggcgccggcuucggc

SEQ ID NO: 4910 - RNA, 22 nt, Pseudomonas aeruginosa PA01
ccggccugucuucugccggaca

SEQ ID NO: 4911 - RNA, 22 nt, Pseudomonas aeruginosa PA01
ccggccuuggccagcggcgcac

SEQ ID NO: 4912 - RNA, 22 nt, Pseudomonas aeruginosa PA01
ccggccuuggcguccggcuugc

SEQ ID NO: 4913 - RNA, 23 nt, Pseudomonas aeruginosa PA01
ccggcgacacccucuacgugguc

SEQ ID NO: 4914 - RNA, 22 nt, Pseudomonas aeruginosa PA01
ccggcgacgugcugcgccuucu

SEQ ID NO: 4915 - RNA, 22 nt, Pseudomonas aeruginosa PA01
ccggcgauuuccucgccggcgu

SEQ ID NO: 4916 - RNA, 22 nt, Pseudomonas aeruginosa PA01
ccggcgccgugaccccgguggc

SEQ ID NO: 4917 - RNA, 22 nt, Pseudomonas aeruginosa PA01
ccggcgcgaagaugucguguuc

SEQ ID NO: 4918 - RNA, 22 nt, Pseudomonas aeruginosa PA01
ccggcgcgccagaacucgaccg

SEQ ID NO: 4919 - RNA, 22 nt, Pseudomonas aeruginosa PA01
ccggcgcgcuccugcagacccg

SEQ ID NO: 4920 - RNA, 22 nt, Pseudomonas aeruginosa PA01
ccggcgcugcugaucgcuucgu

SEQ ID NO: 4921 - RNA, 22 nt, Pseudomonas aeruginosa PA01
ccggcggcaucaggcccugcac

SEQ ID NO: 4922 - RNA, 22 nt, Pseudomonas aeruginosa PA01
ccggcggccaguuggcgggcca

SEQ ID NO: 4923 - RNA, 23 nt, Pseudomonas aeruginosa PA01
ccggcggcgaccuggcgguucug

SEQ ID NO: 4924 - RNA, 22 nt, Pseudomonas aeruginosa PA01
ccggcggguggaagucuggguc

SEQ ID NO: 4925 - RNA, 22 nt, Pseudomonas aeruginosa PA01
ccggcgucaauggccucgaggc

SEQ ID NO: 4926 - RNA, 20 nt, Pseudomonas aeruginosa PA01
ccggcgucgaaguucggcag

SEQ ID NO: 4927 - RNA, 22 nt, Pseudomonas aeruginosa PA01
ccggcuaccagguuccggcgcg

SEQ ID NO: 4928 - RNA, 22 nt, Pseudomonas aeruginosa PA01
ccggcuccaccgaacuggaccg

SEQ ID NO: 4929 - RNA, 22 nt, Pseudomonas aeruginosa PA01
ccggcuccgccgguugcggcau

SEQ ID NO: 4930 - RNA, 22 nt, Pseudomonas aeruginosa PA01
ccggcucggcgacgccgaggua

SEQ ID NO: 4931 - RNA, 23 nt, Pseudomonas aeruginosa PA01
ccggcucgucucagucgagcuug

SEQ ID NO: 4932 - RNA, 22 nt, Pseudomonas aeruginosa PA01
ccggcugguagccggccggcag

SEQ ID NO: 4933 - RNA, 22 nt, Pseudomonas aeruginosa PA01
ccggcuuccucgaacugcucgg

SEQ ID NO: 4934 - RNA, 22 nt, Pseudomonas aeruginosa PA01
ccggcuucggcgucuucucgcu

SEQ ID NO: 4935 - RNA, 22 nt, Pseudomonas aeruginosa PA01
ccgggcaguucggccucggcug

SEQ ID NO: 4936 - RNA, 17 nt, Pseudomonas aeruginosa PA01
cgacgcaggucgccauc

SEQ ID NO: 4937 - RNA, 22 nt, Pseudomonas aeruginosa PA01
cgacgccccggugcucuucccg

SEQ ID NO: 4938 - RNA, 18 nt, Pseudomonas aeruginosa PA01
cgaccaggcguggcugua

SEQ ID NO: 4939 - RNA, 22 nt, Pseudomonas aeruginosa PA01
cgaccagggcgcggccggcgaa

SEQ ID NO: 4940 - RNA, 22 nt, Pseudomonas aeruginosa PA01
cgaccaggucguccugcgccga

SEQ ID NO: 4941 - RNA, 22 nt, Pseudomonas aeruginosa PA01
cgacccgccaggcgcugggcga

SEQ ID NO: 4942 - RNA, 22 nt, Pseudomonas aeruginosa PA01
cgacccggugauacacggcgaa

SEQ ID NO: 4943 - RNA, 22 nt, Pseudomonas aeruginosa PA01
cgaacagcagcagcggagcgac

SEQ ID NO: 4944 - RNA, 22 nt, Pseudomonas aeruginosa PA01
cgaaccagcgcaacggcgcguc

SEQ ID NO: 4945 - RNA, 22 nt, Pseudomonas aeruginosa PA01
cgaagcgccugggcugccgcca

SEQ ID NO: 4946 - RNA, 22 nt, Pseudomonas aeruginosa PA01
cgaagcgcugguucagggaggc

SEQ ID NO: 4947 - RNA, 22 nt, Pseudomonas aeruginosa PA01
cgagcuggcgcuccuggccgcu

SEQ ID NO: 4948 - RNA, 22 nt, Pseudomonas aeruginosa PA01
cgaggaacaugccgaugaucau

SEQ ID NO: 4949 - RNA, 22 nt, Pseudomonas aeruginosa PA01
cgaggaaguugaggauggcguu

SEQ ID NO: 4950 - RNA, 22 nt, Pseudomonas aeruginosa PA01
cgaggaggacgcucgcggucgc

SEQ ID NO: 4951 - RNA, 22 nt, Pseudomonas aeruginosa PA01
cgaggccggcguggcgaaguag

SEQ ID NO: 4952 - RNA, 22 nt, Pseudomonas aeruginosa PA01
cgaggccgggccgaagcaggug

SEQ ID NO: 4953 - RNA, 22 nt, Pseudomonas aeruginosa PA01
cgagcgcaggaacagggucagg

SEQ ID NO: 4954 - RNA, 22 nt, Pseudomonas aeruginosa PA01
cgagcgcgagcagcgccuggaa

SEQ ID NO: 4955 - RNA, 22 nt, Pseudomonas aeruginosa PA01
cgagcgcuuccugaggcgcgua

SEQ ID NO: 4956 - RNA, 22 nt, Pseudomonas aeruginosa PA01
cgagcggccagggccugcaccg

SEQ ID NO: 4957 - RNA, 22 nt, Pseudomonas aeruginosa PA01
cgagcagcaggcgcacaggaug

SEQ ID NO: 4958 - RNA, 22 nt, Pseudomonas aeruginosa PA01
cgagcagcucagugccuuccac

SEQ ID NO: 4959 - RNA, 23 nt, Pseudomonas aeruginosa PA01
cgagcagcucgccgagcugucgc

SEQ ID NO: 4960 - RNA, 22 nt, Pseudomonas aeruginosa PA01
cgagcagguguugcaggcgggu

SEQ ID NO: 4961 - RNA, 18 nt, Pseudomonas aeruginosa PA01
cgcagcagacgcaguugc

SEQ ID NO: 4962 - RNA, 22 nt, Pseudomonas aeruginosa PA01
cgcagcaggcgguacucggcgc

SEQ ID NO: 4963 - RNA, 22 nt, Pseudomonas aeruginosa PA01
cgcagcgccaggcgcugggcuu

SEQ ID NO: 4964 - RNA, 21 nt, Pseudomonas aeruginosa PA01
cgcagcugucgaggucggcga

SEQ ID NO: 4965 - RNA, 22 nt, Pseudomonas aeruginosa PA01
cgccaccacccgccgcugcauc

SEQ ID NO: 4966 - RNA, 21 nt, Pseudomonas aeruginosa PA01
cgccaccaguuguucgugacc

SEQ ID NO: 4967 - RNA, 22 nt, Pseudomonas aeruginosa PA01
cgccaccaugaucaagccuucc

SEQ ID NO: 4968 - RNA, 21 nt, Pseudomonas aeruginosa PA01
cgcaagcggcaucgccaucag

SEQ ID NO: 4969 - RNA, 22 nt, Pseudomonas aeruginosa PA01
cgaugcgggcgccacucucgau

SEQ ID NO: 4970 - RNA, 21 nt, Pseudomonas aeruginosa PA01
cgaugcgguccucgucccagc

SEQ ID NO: 4971 - RNA, 22 nt, Pseudomonas aeruginosa PA01
cgcacagcuccgcgacugggaa

SEQ ID NO: 4972 - RNA, 22 nt, Pseudomonas aeruginosa PA01
cgcacagggccggauccuugcu

SEQ ID NO: 4973 - RNA, 22 nt, Pseudomonas aeruginosa PA01
cgcaccagggucgggccgcgcu

SEQ ID NO: 4974 - RNA, 22 nt, Pseudomonas aeruginosa PA01
cgagggccugauggcgacgcug

SEQ ID NO: 4975 - RNA, 22 nt, Pseudomonas aeruginosa PA01
cgagggccuggcgccggagguc

SEQ ID NO: 4976 - RNA, 22 nt, Pseudomonas aeruginosa PA01
cgaucagguugaggcggcccgg

SEQ ID NO: 4977 - RNA, 22 nt, Pseudomonas aeruginosa PA01
cgauccgggcuggcugcaggug

SEQ ID NO: 4978 - RNA, 21 nt, Pseudomonas aeruginosa PA01
cgaucgcccaggcggcgggca

SEQ ID NO: 4979 - RNA, 22 nt, Pseudomonas aeruginosa PA01
cgaucgccuggcacgccacccg

SEQ ID NO: 4980 - RNA, 21 nt, Pseudomonas aeruginosa PA01
cgaucggcaggcugucgucgu

SEQ ID NO: 4981 - RNA, 22 nt, Pseudomonas aeruginosa PA01
cgccaccgauacgcagccgguu

SEQ ID NO: 4982 - RNA, 22 nt, Pseudomonas aeruginosa PA01
cgccaccuggcuggugccgcgc

SEQ ID NO: 4983 - RNA, 22 nt, Pseudomonas aeruginosa PA01
cgccagccgcgcucguagaacg

SEQ ID NO: 4984 - RNA, 17 nt, Pseudomonas aeruginosa PA01
cgccagcgccgacagcc

SEQ ID NO: 4985 - RNA, 22 nt, Pseudomonas aeruginosa PA01
cgccagagcccgguggcgaucc

SEQ ID NO: 4986 - RNA, 22 nt, Pseudomonas aeruginosa PA01
cgcccagcucggugccgauggc

SEQ ID NO: 4987 - RNA, 22 nt, Pseudomonas aeruginosa PA01
cgccccacuggcgccgcucgaa

SEQ ID NO: 4988 - RNA, 22 nt, Pseudomonas aeruginosa PA01
cgcccggcaugggcacucgcau

SEQ ID NO: 4989 - RNA, 22 nt, Pseudomonas aeruginosa PA01
cgccccagcucuucgcgcaggu

SEQ ID NO: 4990 - RNA, 22 nt, Pseudomonas aeruginosa PA01
cgccccagguccuggccgccga

SEQ ID NO: 4991 - RNA, 22 nt, Pseudomonas aeruginosa PA01
cgcccuggcggggccgcgacuu

SEQ ID NO: 4992 - RNA, 22 nt, Pseudomonas aeruginosa PA01
cgcccuggucgccgucaucgcg

SEQ ID NO: 4993 - RNA, 22 nt, Pseudomonas aeruginosa PA01
cgccgaccagcaggccgacgac

SEQ ID NO: 4994 - RNA, 22 nt, Pseudomonas aeruginosa PA01
cgccgacccgcaugcccagcga

SEQ ID NO: 4995 - RNA, 22 nt, Pseudomonas aeruginosa PA01
cgccgaccgccuccaggcaacg

SEQ ID NO: 4996 - RNA, 22 nt, Pseudomonas aeruginosa PA01
cgccgaccuuccauggcgcgcu

SEQ ID NO: 4997 - RNA, 22 nt, Pseudomonas aeruginosa PA01
cgccgagcugaagcuguaggau

SEQ ID NO: 4998 - RNA, 20 nt, Pseudomonas aeruginosa PA01
cgccgcagccgcuggacggc

SEQ ID NO: 4999 - RNA, 22 nt, Pseudomonas aeruginosa PA01
cgccgcccucuugcggcgaacc

SEQ ID NO: 5000 - RNA, 19 nt, Pseudomonas aeruginosa PA01
cgccgccgaauccuucgcc

SEQ ID NO: 5001 - RNA, 22 nt, Pseudomonas aeruginosa PA01
cgccgccgauacgcagccgguu

SEQ ID NO: 5002 - RNA, 22 nt, Pseudomonas aeruginosa PA01
cgccgccgccaucgagcagaac

SEQ ID NO: 5003 - RNA, 17 nt, Pseudomonas aeruginosa PA01
cgccgccggcgcagaag

SEQ ID NO: 5004 - RNA, 17 nt, Pseudomonas aeruginosa PA01
cgccgccggggcggaag

SEQ ID NO: 5005 - RNA, 22 nt, Pseudomonas aeruginosa PA01
cgccggccaucagcgcuaccgc

SEQ ID NO: 5006 - RNA, 22 nt, Pseudomonas aeruginosa PA01
cgccggccgccgaggucgccaa

SEQ ID NO: 5007 - RNA, 22 nt, Pseudomonas aeruginosa PA01
cgccggccggcuggguauucgc

SEQ ID NO: 5008 - RNA, 22 nt, Pseudomonas aeruginosa PA01
cgccggccgucguccucgaagu

SEQ ID NO: 5009 - RNA, 22 nt, Pseudomonas aeruginosa PA01
cgccggcgccgaggcaggcacc

SEQ ID NO: 5010 - RNA, 19 nt, Pseudomonas aeruginosa PA01
cgccggcgccgggcugauc

SEQ ID NO: 5011 - RNA, 22 nt, Pseudomonas aeruginosa PA01
cgccggcgcucaagggucgcua

SEQ ID NO: 5012 - RNA, 22 nt, Pseudomonas aeruginosa PA01
cgccggcgcuguuguccaggcu

SEQ ID NO: 5013 - RNA, 17 nt, Pseudomonas aeruginosa PA01
cgccggcggcgugcagg

SEQ ID NO: 5014 - RNA, 22 nt, Pseudomonas aeruginosa PA01
cgccggcuuccaccugcucgac

SEQ ID NO: 5015 - RNA, 22 nt, Pseudomonas aeruginosa PA01
cgcgcgcuggucgguccgggau

SEQ ID NO: 5016 - RNA, 22 nt, Pseudomonas aeruginosa PA01
cgcgcgguugcuggcggugcuc

SEQ ID NO: 5017 - RNA, 23 nt, Pseudomonas aeruginosa PA01
cgcgcuccagcaggucggccaug

SEQ ID NO: 5018 - RNA, 22 nt, Pseudomonas aeruginosa PA01
cgcgcucgcgguaagguaugcc

SEQ ID NO: 5019 - RNA, 22 nt, Pseudomonas aeruginosa PA01
cgcgcucggaacccgguuuggc

SEQ ID NO: 5020 - RNA, 22 nt, Pseudomonas aeruginosa PA01
cgcgcuggaacgacgucuaccu

SEQ ID NO: 5021 - RNA, 22 nt, Pseudomonas aeruginosa PA01
cgcggacagcugcgacgagcgg

SEQ ID NO: 5022 - RNA, 22 nt, Pseudomonas aeruginosa PA01
cgcggagcaggccgaccagcgg

SEQ ID NO: 5023 - RNA, 22 nt, Pseudomonas aeruginosa PA01
cgcggagccacucccuggcgcc

SEQ ID NO: 5024 - RNA, 22 nt, Pseudomonas aeruginosa PA01
cgcggaugagcccgcgaucgau

SEQ ID NO: 5025 - RNA, 17 nt, Pseudomonas aeruginosa PA01
cgcggcagccaggcggc

SEQ ID NO: 5026 - RNA, 22 nt, Pseudomonas aeruginosa PA01
cgcggcaggaggacggcagcgu

SEQ ID NO: 5027 - RNA, 22 nt, Pseudomonas aeruginosa PA01
cgcggcccucaccggcuucggc

SEQ ID NO: 5028 - RNA, 22 nt, Pseudomonas aeruginosa PA01
cgcggccgauggccgggcuggu

SEQ ID NO: 5029 - RNA, 19 nt, Pseudomonas aeruginosa PA01
cgcggccgggauccucggc

SEQ ID NO: 5030 - RNA, 22 nt, Pseudomonas aeruginosa PA01
cgcggccgugcccuucgagcug

SEQ ID NO: 5031 - RNA, 22 nt, Pseudomonas aeruginosa PA01
cgcggcgagggccagcaggugc

SEQ ID NO: 5032 - RNA, 23 nt, Pseudomonas aeruginosa PA01
cgcggcgaucgaggccgaggccc

SEQ ID NO: 5033 - RNA, 22 nt, Pseudomonas aeruginosa PA01
cgcggcgcucggcaucgaccau

SEQ ID NO: 5034 - RNA, 22 nt, Pseudomonas aeruginosa PA01
cgcggcucggauugccggcgga

SEQ ID NO: 5035 - RNA, 22 nt, Pseudomonas aeruginosa PA01
cgcgggcgucguccucggucau

SEQ ID NO: 5036 - RNA, 22 nt, Pseudomonas aeruginosa PA01
cgcggggcggagagccagccgg

SEQ ID NO: 5037 - RNA, 22 nt, Pseudomonas aeruginosa PA01
cgcggucgccgggguccagcug

SEQ ID NO: 5038 - RNA, 22 nt, Pseudomonas aeruginosa PA01
cgcggugcagcugcucgguggc

SEQ ID NO: 5039 - RNA, 22 nt, Pseudomonas aeruginosa PA01
cgcguacaucggugucggcgcg

SEQ ID NO: 5040 - RNA, 22 nt, Pseudomonas aeruginosa PA01
cgcgucagcgccaggaguuguc

SEQ ID NO: 5041 - RNA, 22 nt, Pseudomonas aeruginosa PA01
cgcgucggccggcaggcucucg

SEQ ID NO: 5042 - RNA, 22 nt, Pseudomonas aeruginosa PA01
cgcgaacauggacuggaaccgg

SEQ ID NO: 5043 - RNA, 22 nt, Pseudomonas aeruginosa PA01
cgcgagccacauccaguugcau

SEQ ID NO: 5044 - RNA, 22 nt, Pseudomonas aeruginosa PA01
cgcgagcgcggcugcuccaucc

SEQ ID NO: 5045 - RNA, 22 nt, Pseudomonas aeruginosa PA01
cgcgaggaaaccucgcuggccg

SEQ ID NO: 5046 - RNA, 22 nt, Pseudomonas aeruginosa PA01
cgcgcacguugauccgccggau

SEQ ID NO: 5047 - RNA, 22 nt, Pseudomonas aeruginosa PA01
cgcgcagcgccaaggauggccu

SEQ ID NO: 5048 - RNA, 22 nt, Pseudomonas aeruginosa PA01
cgcgcaggcgguacaggcggcu

SEQ ID NO: 5049 - RNA, 22 nt, Pseudomonas aeruginosa PA01
cgcgcagggcccgcucgcuggg

SEQ ID NO: 5050 - RNA, 22 nt, Pseudomonas aeruginosa PA01
cgcgcaguuuacccggagaacc

SEQ ID NO: 5051 - RNA, 22 nt, Pseudomonas aeruginosa PA01
cgcgccacccguugcgagagag

SEQ ID NO: 5052 - RNA, 22 nt, Pseudomonas aeruginosa PA01
cgcgccagcagguggcggaugg

SEQ ID NO: 5053 - RNA, 19 nt, Pseudomonas aeruginosa PA01
cgcgccagcgccgccuggg

SEQ ID NO: 5054 - RNA, 22 nt, Pseudomonas aeruginosa PA01
cgcgccggcaggaaaaagcccc

SEQ ID NO: 5055 - RNA, 22 nt, Pseudomonas aeruginosa PA01
cgcgccggugucagcgggccag

SEQ ID NO: 5056 - RNA, 22 nt, Pseudomonas aeruginosa PA01
cgcgcgccgggccuguucaggg

SEQ ID NO: 5057 - RNA, 23 nt, Pseudomonas aeruginosa PA01
cguccggacgacgacccggcguu

SEQ ID NO: 5058 - RNA, 22 nt, Pseudomonas aeruginosa PA01
cguccggcaucagggcguaguc

SEQ ID NO: 5059 - RNA, 22 nt, Pseudomonas aeruginosa PA01
cgucgagcagaccaaccgggcg

SEQ ID NO: 5060 - RNA, 22 nt, Pseudomonas aeruginosa PA01
cgucgagccgggcgagggacuc

SEQ ID NO: 5061 - RNA, 22 nt, Pseudomonas aeruginosa PA01
cgucgagcgccgcuucgucagg

SEQ ID NO: 5062 - RNA, 22 nt, Pseudomonas aeruginosa PA01
cgucggccaggaggugguacgc

SEQ ID NO: 5063 - RNA, 22 nt, Pseudomonas aeruginosa PA01
cgucggccaggcgcaugccgcc

SEQ ID NO: 5064 - RNA, 22 nt, Pseudomonas aeruginosa PA01
cgucggccucgcguugccagcg

SEQ ID NO: 5065 - RNA, 22 nt, Pseudomonas aeruginosa PA01
cgucggccuguggaucgccgcc

SEQ ID NO: 5066 - RNA, 22 nt, Pseudomonas aeruginosa PA01
cgucgugcagcaucgcggccau

SEQ ID NO: 5067 - RNA, 22 nt, Pseudomonas aeruginosa PA01
cguacggcacagcgccuugucc

SEQ ID NO: 5068 - RNA, 22 nt, Pseudomonas aeruginosa PA01
cguagcgcauuuccugggccuu

SEQ ID NO: 5069 - RNA, 22 nt, Pseudomonas aeruginosa PA01
cgugcagcgggugccggaaacc

SEQ ID NO: 5070 - RNA, 20 nt, Pseudomonas aeruginosa PA01
cgugccgggcgguccgcgac

SEQ ID NO: 5071 - RNA, 22 nt, Pseudomonas aeruginosa PA01
cgguccggcggaagcaggucgg

SEQ ID NO: 5072 - RNA, 22 nt, Pseudomonas aeruginosa PA01
cggucgcgcagggcagccggca

SEQ ID NO: 5073 - RNA, 20 nt, Pseudomonas aeruginosa PA01
cggucggcgaggcgccuggc

SEQ ID NO: 5074 - RNA, 22 nt, Pseudomonas aeruginosa PA01
cggucggcuggcuggcgcugcc

SEQ ID NO: 5075 - RNA, 22 nt, Pseudomonas aeruginosa PA01
cggucucuggugaucagcggcu

SEQ ID NO: 5076 - RNA, 22 nt, Pseudomonas aeruginosa PA01
cggugcaggcguuccgcgagcg

SEQ ID NO: 5077 - RNA, 22 nt, Pseudomonas aeruginosa PA01
cggugcgcaugaaggcgaggaa

SEQ ID NO: 5078 - RNA, 22 nt, Pseudomonas aeruginosa PA01
cggugcgccugccguuccugau

SEQ ID NO: 5079 - RNA, 23 nt, Pseudomonas aeruginosa PA01
cggugggcgccggccauggccuc

SEQ ID NO: 5080 - RNA, 20 nt, Pseudomonas aeruginosa PA01
cggugggcugcaucuuuucc

SEQ ID NO: 5081 - RNA, 22 nt, Pseudomonas aeruginosa PA01
cggugggcuggaagguccggcu

SEQ ID NO: 5082 - RNA, 22 nt, Pseudomonas aeruginosa PA01
cguggcagaaggccgaggcgcg

SEQ ID NO: 5083 - RNA, 22 nt, Pseudomonas aeruginosa PA01
cguggcccuggugacccugguc

SEQ ID NO: 5084 - RNA, 22 nt, Pseudomonas aeruginosa PA01
cguggcgagcaggcggucggcg

SEQ ID NO: 5085 - RNA, 22 nt, Pseudomonas aeruginosa PA01
cguggcgaugcccgcauccagc

SEQ ID NO: 5086 - RNA, 22 nt, Pseudomonas aeruginosa PA01
cguggcgaugucggcguggccg

SEQ ID NO: 5087 - RNA, 22 nt, Pseudomonas aeruginosa PA01
cucccggcgaaggcgcgaucgu

SEQ ID NO: 5088 - RNA, 20 nt, Pseudomonas aeruginosa PA01
cucaggccuggagccgagcg

SEQ ID NO: 5089 - RNA, 22 nt, Pseudomonas aeruginosa PA01
cucaggcuggcagcgacgcucc

SEQ ID NO: 5090 - RNA, 22 nt, Pseudomonas aeruginosa PA01
cuccggccaaccgccacggauc

SEQ ID NO: 5091 - RNA, 22 nt, Pseudomonas aeruginosa PA01
cuccggccuucugaaggcucuu

SEQ ID NO: 5092 - RNA, 22 nt, Pseudomonas aeruginosa PA01
cuccggcgugaucagggucucg

SEQ ID NO: 5093 - RNA, 22 nt, Pseudomonas aeruginosa PA01
cuccggcuucggcgagcagagc

SEQ ID NO: 5094 - RNA, 20 nt, Pseudomonas aeruginosa PA01
cuccccgggccauuuccugc

SEQ ID NO: 5095 - RNA, 22 nt, Pseudomonas aeruginosa PA01
cugaacuucgacgguaugauug

SEQ ID NO: 5096 - RNA, 23 nt, Pseudomonas aeruginosa PA01
cucugcuucggcuucuggcccgg

SEQ ID NO: 5097 - RNA, 22 nt, Pseudomonas aeruginosa PA01
cucuucuucguugaucggcgag

SEQ ID NO: 5098 - RNA, 22 nt, Pseudomonas aeruginosa PA01
cuccuucuaucuuggucuacac

SEQ ID NO: 5099 - RNA, 19 nt, Pseudomonas aeruginosa PA01
cucggcccgcuguggcucg

SEQ ID NO: 5100 - RNA, 22 nt, Pseudomonas aeruginosa PA01
cucggcccuggugauccucgcc

SEQ ID NO: 5101 - RNA, 22 nt, Pseudomonas aeruginosa PA01
cucggucagguagccgccuucc

SEQ ID NO: 5102 - RNA, 20 nt, Pseudomonas aeruginosa PA01
cucuacaucgccuucggcgc

SEQ ID NO: 5103 - RNA, 22 nt, Pseudomonas aeruginosa PA01
cucgccggccggacugauggug

SEQ ID NO: 5104 - RNA, 22 nt, Pseudomonas aeruginosa PA01
cucgccggcgccaugcagcagc

SEQ ID NO: 5105 - RNA, 22 nt, Pseudomonas aeruginosa PA01
cucgccggucaccgacgagcgc

SEQ ID NO: 5106 - RNA, 22 nt, Pseudomonas aeruginosa PA01
cuccguggugguggucuugccc

SEQ ID NO: 5107 - RNA, 22 nt, Pseudomonas aeruginosa PA01
cuccugcggcaugggugcguuc

SEQ ID NO: 5108 - RNA, 22 nt, Pseudomonas aeruginosa PA01
cggcugcugcgggucggccuug

SEQ ID NO: 5109 - RNA, 22 nt, Pseudomonas aeruginosa PA01
cggcuggaucucgcacuggcag

SEQ ID NO: 5110 - RNA, 22 nt, Pseudomonas aeruginosa PA01
cggcuguucgucgccggcggug

SEQ ID NO: 5111 - RNA, 22 nt, Pseudomonas aeruginosa PA01
cggcuguuguuucccaaggcgg

SEQ ID NO: 5112 - RNA, 22 nt, Pseudomonas aeruginosa PA01
cggcuucgcgcagggccgccag

SEQ ID NO: 5113 - RNA, 22 nt, Pseudomonas aeruginosa PA01
cggcucgucuuccgggcccugc

SEQ ID NO: 5114 - RNA, 22 nt, Pseudomonas aeruginosa PA01
cggcucguucaucgccaucugc

SEQ ID NO: 5115 - RNA, 22 nt, Pseudomonas aeruginosa PA01
cggcucuggcuaagcucgaccu

SEQ ID NO: 5116 - RNA, 22 nt, Pseudomonas aeruginosa PA01
cgggagcaacgcuaugcccggc

SEQ ID NO: 5117 - RNA, 22 nt, Pseudomonas aeruginosa PA01
cgggagcggaccgccugcucgg

SEQ ID NO: 5118 - RNA, 22 nt, Pseudomonas aeruginosa PA01
cgggauggucgcucggcggcaa

SEQ ID NO: 5119 - RNA, 22 nt, Pseudomonas aeruginosa PA01
cgggcagcaccucgccagccgg

SEQ ID NO: 5120 - RNA, 22 nt, Pseudomonas aeruginosa PA01
cgggcagcgcauccgacagcgc

SEQ ID NO: 5121 - RNA, 22 nt, Pseudomonas aeruginosa PA01
cggcuccauggccagggcgcgg

SEQ ID NO: 5122 - RNA, 22 nt, Pseudomonas aeruginosa PA01
cggcucccggcuggccgcugaa

SEQ ID NO: 5123 - RNA, 22 nt, Pseudomonas aeruginosa PA01
cgggccaggcacuacgugcucu

SEQ ID NO: 5124 - RNA, 22 nt, Pseudomonas aeruginosa PA01
cgggccaguuggaccaggaucg

SEQ ID NO: 5125 - RNA, 22 nt, Pseudomonas aeruginosa PA01
cgggcgaggguaccgggagcua

SEQ ID NO: 5126 - RNA, 22 nt, Pseudomonas aeruginosa PA01
cgggcgccgggugcucccgguc

SEQ ID NO: 5127 - RNA, 22 nt, Pseudomonas aeruginosa PA01
cgggcgccguggaucagccgcg

SEQ ID NO: 5128 - RNA, 22 nt, Pseudomonas aeruginosa PA01
cggggcaagcuguccggaccgc

SEQ ID NO: 5129 - RNA, 22 nt, Pseudomonas aeruginosa PA01
cggggccacgugccagcaggag

SEQ ID NO: 5130 - RNA, 22 nt, Pseudomonas aeruginosa PA01
cggggagccucgucgacgaggc

SEQ ID NO: 5131 - RNA, 22 nt, Pseudomonas aeruginosa PA01
cggguggucuucgagcguccgc

SEQ ID NO: 5132 - RNA, 22 nt, Pseudomonas aeruginosa PA01
cgguagcgguccgugcccagcc

SEQ ID NO: 5133 - RNA, 22 nt, Pseudomonas aeruginosa PA01
cggcgaacgggaaggugccgac

SEQ ID NO: 5134 - RNA, 22 nt, Pseudomonas aeruginosa PA01
cggcgaccacguugggguucuc

SEQ ID NO: 5135 - RNA, 23 nt, Pseudomonas aeruginosa PA01
cggcgaccagcgccgccaggcag

SEQ ID NO: 5136 - RNA, 22 nt, Pseudomonas aeruginosa PA01
cggcgaccugcgcgugcaguuc

SEQ ID NO: 5137 - RNA, 22 nt, Pseudomonas aeruginosa PA01
cggcgacgaucaucuucggcuu

SEQ ID NO: 5138 - RNA, 22 nt, Pseudomonas aeruginosa PA01
cggcgagcaacgccaggugcag

SEQ ID NO: 5139 - RNA, 22 nt, Pseudomonas aeruginosa PA01
cggcgagccguccuugcgcaga

SEQ ID NO: 5140 - RNA, 22 nt, Pseudomonas aeruginosa PA01
cggcgagcugcuccgcguggcu

SEQ ID NO: 5141 - RNA, 22 nt, Pseudomonas aeruginosa PA01
cggcgaggaucugcguggucgc

SEQ ID NO: 5142 - RNA, 22 nt, Pseudomonas aeruginosa PA01
cggcgaucugcucggcgagggc

SEQ ID NO: 5143 - RNA, 22 nt, Pseudomonas aeruginosa PA01
cggcgcaggaaagggaucugcg

SEQ ID NO: 5144 - RNA, 22 nt, Pseudomonas aeruginosa PA01
cggcgcaggaugggcguggacg

SEQ ID NO: 5145 - RNA, 22 nt, Pseudomonas aeruginosa PA01
cggcgcaggguauggcgguuca

SEQ ID NO: 5146 - RNA, 22 nt, Pseudomonas aeruginosa PA01
cggcgccaacgaggcggcgaug

SEQ ID NO: 5147 - RNA, 22 nt, Pseudomonas aeruginosa PA01
cggcgccgacaucgcgcagguc

SEQ ID NO: 5148 - RNA, 22 nt, Pseudomonas aeruginosa PA01
cggcgcgccagaccaccugguc

SEQ ID NO: 5149 - RNA, 22 nt, Pseudomonas aeruginosa PA01
cggcgcgccgaaggcgauaugg

SEQ ID NO: 5150 - RNA, 20 nt, Pseudomonas aeruginosa PA01
cggcgcgcuggcuaccggcc

SEQ ID NO: 5151 - RNA, 22 nt, Pseudomonas aeruginosa PA01
cggcgcgcuggugaucggcugg

SEQ ID NO: 5152 - RNA, 23 nt, Pseudomonas aeruginosa PA01
cggcgcuuccugcaccuggcgcc

SEQ ID NO: 5153 - RNA, 22 nt, Pseudomonas aeruginosa PA01
cggcggcacaggcggccugcac

SEQ ID NO: 5154 - RNA, 22 nt, Pseudomonas aeruginosa PA01
cggcggcagguuuucucgacgc

SEQ ID NO: 5155 - RNA, 22 nt, Pseudomonas aeruginosa PA01
cggcggccuugccgcucugcuc

SEQ ID NO: 5156 - RNA, 22 nt, Pseudomonas aeruginosa PA01
cggcgggcauagccgagcagcg

SEQ ID NO: 5157 - RNA, 22 nt, Pseudomonas aeruginosa PA01
cggcgggcugcuggugagccag

SEQ ID NO: 5158 - RNA, 22 nt, Pseudomonas aeruginosa PA01
cggcguacgcuggaggcgaugc

SEQ ID NO: 5159 - RNA, 22 nt, Pseudomonas aeruginosa PA01
cggcguccuggaucagcgccug

SEQ ID NO: 5160 - RNA, 22 nt, Pseudomonas aeruginosa PA01
cggcguccuggucccggugcuc

SEQ ID NO: 5161 - RNA, 22 nt, Pseudomonas aeruginosa PA01
cggcuacccuggaguccgggcc

SEQ ID NO: 5162 - RNA, 22 nt, Pseudomonas aeruginosa PA01
cggcuacgccuacgugcccggc

SEQ ID NO: 5163 - RNA, 22 nt, Pseudomonas aeruginosa PA01
cggccagccaggcccgcaccag

SEQ ID NO: 5164 - RNA, 22 nt, Pseudomonas aeruginosa PA01
cggccaggccccggucgauggc

SEQ ID NO: 5165 - RNA, 22 nt, Pseudomonas aeruginosa PA01
cggccagggcaaugucgaagcc

SEQ ID NO: 5166 - RNA, 22 nt, Pseudomonas aeruginosa PA01
cggcauccuggcgguucugggu

SEQ ID NO: 5167 - RNA, 22 nt, Pseudomonas aeruginosa PA01
cggcauccagcagggucuggua

SEQ ID NO: 5168 - RNA, 22 nt, Pseudomonas aeruginosa PA01
cggcccgccguaggccugcgcu

SEQ ID NO: 5169 - RNA, 22 nt, Pseudomonas aeruginosa PA01
cggcccggcauggaccccggcg

SEQ ID NO: 5170 - RNA, 21 nt, Pseudomonas aeruginosa PA01
cggccgagcgcugguaccgcg

SEQ ID NO: 5171 - RNA, 22 nt, Pseudomonas aeruginosa PA01
cggccgaggaaauagcccuggc

SEQ ID NO: 5172 - RNA, 22 nt, Pseudomonas aeruginosa PA01
cggccgcgccuuuggcauggcc

SEQ ID NO: 5173 - RNA, 22 nt, Pseudomonas aeruginosa PA01
cggccggacgcucgccgggcag

SEQ ID NO: 5174 - RNA, 20 nt, Pseudomonas aeruginosa PA01
cggccggcaggugaucgaac

SEQ ID NO: 5175 - RNA, 21 nt, Pseudomonas aeruginosa PA01
cggccgggagcgccuggaugc

SEQ ID NO: 5176 - RNA, 22 nt, Pseudomonas aeruginosa PA01
cggccuggccauggcgguggac

SEQ ID NO: 5177 - RNA, 22 nt, Pseudomonas aeruginosa PA01
cggccuggcugaacgacagcgu

SEQ ID NO: 5178 - RNA, 22 nt, Pseudomonas aeruginosa PA01
cggcagcagcgccggcgaggag

SEQ ID NO: 5179 - RNA, 22 nt, Pseudomonas aeruginosa PA01
cggcagcgccucgccacgcucc

SEQ ID NO: 5180 - RNA, 22 nt, Pseudomonas aeruginosa PA01
cggcagcggcgggccguugacc

SEQ ID NO: 5181 - RNA, 22 nt, Pseudomonas aeruginosa PA01
cggaggcguggguuucgcauuc

SEQ ID NO: 5182 - RNA, 22 nt, Pseudomonas aeruginosa PA01
cggaucuucuccaucgccgcuu

SEQ ID NO: 5183 - RNA, 22 nt, Pseudomonas aeruginosa PA01
cggcacagaggccgggcccuga

SEQ ID NO: 5184 - RNA, 22 nt, Pseudomonas aeruginosa PA01
cggcaccgcugaagccggcgac

SEQ ID NO: 5185 - RNA, 22 nt, Pseudomonas aeruginosa PA01
cggagcgcccuugagcuugggu

SEQ ID NO: 5186 - RNA, 22 nt, Pseudomonas aeruginosa PA01
cggagcgugccggcgagggucg

SEQ ID NO: 5187 - RNA, 22 nt, Pseudomonas aeruginosa PA01
cggagcugaacgccgagcgcuu

SEQ ID NO: 5188 - RNA, 22 nt, Pseudomonas aeruginosa PA01
cggaggaagccaccggacucga

SEQ ID NO: 5189 - RNA, 22 nt, Pseudomonas aeruginosa PA01
cggaacagcgagccgacgccgg

SEQ ID NO: 5190 - RNA, 20 nt, Pseudomonas aeruginosa PA01
cggaagugguggucgccggg

SEQ ID NO: 5191 - RNA, 22 nt, Pseudomonas aeruginosa PA01
cggacgccagcgugcccggcua

SEQ ID NO: 5192 - RNA, 22 nt, Pseudomonas aeruginosa PA01
cggacgcccgguguaggugcug

SEQ ID NO: 5193 - RNA, 22 nt, Pseudomonas aeruginosa PA01
cggacgcggauuggccgccucg

SEQ ID NO: 5194 - RNA, 22 nt, Pseudomonas aeruginosa PA01
cgcugccgacccggaggauuuc

SEQ ID NO: 5195 - RNA, 22 nt, Pseudomonas aeruginosa PA01
cgcugcgcgguguccucggcga

SEQ ID NO: 5196 - RNA, 22 nt, Pseudomonas aeruginosa PA01
cgcuggagacccuggauuucgc

SEQ ID NO: 5197 - RNA, 22 nt, Pseudomonas aeruginosa PA01
cgcuggagagugccucccaggg

SEQ ID NO: 5198 - RNA, 22 nt, Pseudomonas aeruginosa PA01
cgcuggaguuggccaacgccag

SEQ ID NO: 5199 - RNA, 22 nt, Pseudomonas aeruginosa PA01
cgcuggcgcaccagcuugccga

SEQ ID NO: 5200 - RNA, 22 nt, Pseudomonas aeruginosa PA01
cgcuggcgccgguggcggugga

SEQ ID NO: 5201 - RNA, 22 nt, Pseudomonas aeruginosa PA01
cgccugggcgaacucgccccgc

SEQ ID NO: 5202 - RNA, 22 nt, Pseudomonas aeruginosa PA01
cgccugggcgcgguguaccagc

SEQ ID NO: 5203 - RNA, 18 nt, Pseudomonas aeruginosa PA01
cgccucgccgcugcgguc

SEQ ID NO: 5204 - RNA, 22 nt, Pseudomonas aeruginosa PA01
cgcugcagaccgagcccggcca

SEQ ID NO: 5205 - RNA, 22 nt, Pseudomonas aeruginosa PA01
cgcugcagccacucggccaggu

SEQ ID NO: 5206 - RNA, 22 nt, Pseudomonas aeruginosa PA01
cgcugcagccgcagauggccuu

SEQ ID NO: 5207 - RNA, 22 nt, Pseudomonas aeruginosa PA01
cgcugcaggaucaguucguggu

SEQ ID NO: 5208 - RNA, 22 nt, Pseudomonas aeruginosa PA01
cgcugcagguauucggugccug

SEQ ID NO: 5209 - RNA, 22 nt, Pseudomonas aeruginosa PA01
cgcuccgggucgaucugcuggc

SEQ ID NO: 5210 - RNA, 19 nt, Pseudomonas aeruginosa PA01
cgcuccucugcccgguggc

SEQ ID NO: 5211 - RNA, 22 nt, Pseudomonas aeruginosa PA01
auggcgcguuguccucgccgcc

SEQ ID NO: 5212 - RNA, 22 nt, Pseudomonas aeruginosa PA01
augccgaaggcgaucgaggcga

SEQ ID NO: 5213 - RNA, 22 nt, Pseudomonas aeruginosa PA01
augccgaggaaaccgccgcacc

SEQ ID NO: 5214 - RNA, 22 nt, Pseudomonas aeruginosa PA01
augccggccaccggagccggcg

SEQ ID NO: 5215 - RNA, 22 nt, Pseudomonas aeruginosa PA01
augccggcgaugggcgacuucg

SEQ ID NO: 5216 - RNA, 22 nt, Pseudomonas aeruginosa PA01
augccggcgccaacggugccgu

SEQ ID NO: 5217 - RNA, 22 nt, Pseudomonas aeruginosa PA01
augccgucucagccagcgcagg

SEQ ID NO: 5218 - RNA, 22 nt, Pseudomonas aeruginosa PA01
augcgcccugcccgucugcugg

SEQ ID NO: 5219 - RNA, 19 nt, Pseudomonas aeruginosa PA01
augcggaugccguggcggc

SEQ ID NO: 5220 - RNA, 22 nt, Pseudomonas aeruginosa PA01
augcggcagguggcgaagaccg

SEQ ID NO: 5221 - RNA, 20 nt, Pseudomonas aeruginosa PA01
augcugaauucgccgccggc

SEQ ID NO: 5222 - RNA, 22 nt, Pseudomonas aeruginosa PA01
aucaggccgcaggcguggcccu

SEQ ID NO: 5223 - RNA, 22 nt, Pseudomonas aeruginosa PA01
aucacaccggaauacaucggcg

SEQ ID NO: 5224 - RNA, 22 nt, Pseudomonas aeruginosa PA01
aucagcccggcgaucccgccug

SEQ ID NO: 5225 - RNA, 22 nt, Pseudomonas aeruginosa PA01
aucagcgggaucagcaugccgc

SEQ ID NO: 5226 - RNA, 22 nt, Pseudomonas aeruginosa PA01
auccccggauugcucaggcggu

SEQ ID NO: 5227 - RNA, 22 nt, Pseudomonas aeruginosa PA01
aucccggccucgaugccgcgug

SEQ ID NO: 5228 - RNA, 22 nt, Pseudomonas aeruginosa PA01
auccgucgcgccgcuaccaucc

SEQ ID NO: 5229 - RNA, 22 nt, Pseudomonas aeruginosa PA01
aucgagcgggcgccucggcgug

SEQ ID NO: 5230 - RNA, 22 nt, Pseudomonas aeruginosa PA01
aucuggagcaacaggucgcggg

SEQ ID NO: 5231 - RNA, 22 nt, Pseudomonas aeruginosa PA01
aucggcccucugcggcaggcgg

SEQ ID NO: 5232 - RNA, 22 nt, Pseudomonas aeruginosa PA01
auaggagaaguccgaggcgauu

SEQ ID NO: 5233 - RNA, 22 nt, Pseudomonas aeruginosa PA01
aggauccgccagggugucgcgc

SEQ ID NO: 5234 - RNA, 22 nt, Pseudomonas aeruginosa PA01
aggcagcgaauccccagugaug

SEQ ID NO: 5235 - RNA, 22 nt, Pseudomonas aeruginosa PA01
aggaugaguuccagcgccuuca

SEQ ID NO: 5236 - RNA, 22 nt, Pseudomonas aeruginosa PA01
aggcagugggcgaggaugucgg

SEQ ID NO: 5237 - RNA, 22 nt, Pseudomonas aeruginosa PA01
aggcuuccuucaacuugucgcc

SEQ ID NO: 5238 - RNA, 22 nt, Pseudomonas aeruginosa PA01
agggcgaggccguucgccucgu

SEQ ID NO: 5239 - RNA, 22 nt, Pseudomonas aeruginosa PA01
agggcgaggucagcguggacgc

SEQ ID NO: 5240 - RNA, 22 nt, Pseudomonas aeruginosa PA01
agggcgcggucgccgucgaaca

SEQ ID NO: 5241 - RNA, 22 nt, Pseudomonas aeruginosa PA01
agggcgcguaacugguggucga

SEQ ID NO: 5242 - RNA, 22 nt, Pseudomonas aeruginosa PA01
agggcgggaacugcgcgcgcag

SEQ ID NO: 5243 - RNA, 22 nt, Pseudomonas aeruginosa PA01
agguggagcguugcggcgccgg

SEQ ID NO: 5244 - RNA, 22 nt, Pseudomonas aeruginosa PA01
agguugauguacaucauggcgu

SEQ ID NO: 5245 - RNA, 23 nt, Pseudomonas aeruginosa PA01
agucgcgcgcccuggucggcccg

SEQ ID NO: 5246 - RNA, 22 nt, Pseudomonas aeruginosa PA01
agucgcugaugaaguucaccgc

SEQ ID NO: 5247 - RNA, 22 nt, Pseudomonas aeruginosa PA01
aggagcgcgcggugaucgcccu

SEQ ID NO: 5248 - RNA, 22 nt, Pseudomonas aeruginosa PA01
aggaggaagcgcgccagcaguu

SEQ ID NO: 5249 - RNA, 22 nt, Pseudomonas aeruginosa PA01
aggaggcgucggcgucgcccgc

SEQ ID NO: 5250 - RNA, 22 nt, Pseudomonas aeruginosa PA01
agccgugcuguccggagcggau

SEQ ID NO: 5251 - RNA, 22 nt, Pseudomonas aeruginosa PA01
aggaacaguucgacgcccaggu

SEQ ID NO: 5252 - RNA, 22 nt, Pseudomonas aeruginosa PA01
aggccagcggacgcgacgccuu

SEQ ID NO: 5253 - RNA, 22 nt, Pseudomonas aeruginosa PA01
aggccagcgggucgcgccacag

SEQ ID NO: 5254 - RNA, 22 nt, Pseudomonas aeruginosa PA01
aggccgaagcgcugcgccagca

SEQ ID NO: 5255 - RNA, 22 nt, Pseudomonas aeruginosa PA01
aggccgaccugcagcgccgccg

SEQ ID NO: 5256 - RNA, 22 nt, Pseudomonas aeruginosa PA01
aggccgagcgcgaagccuuguc

SEQ ID NO: 5257 - RNA, 22 nt, Pseudomonas aeruginosa PA01
aggccgaguugcgccaggacga

SEQ ID NO: 5258 - RNA, 22 nt, Pseudomonas aeruginosa PA01
aggccgcacgccuggucgggcu

SEQ ID NO: 5259 - RNA, 22 nt, Pseudomonas aeruginosa PA01
aggccgcgcuuuccggcuccag

SEQ ID NO: 5260 - RNA, 22 nt, Pseudomonas aeruginosa PA01
aggccggcgccgaggccagugc

SEQ ID NO: 5261 - RNA, 22 nt, Pseudomonas aeruginosa PA01
aggccggcuaccucgaaggcgg

SEQ ID NO: 5262 - RNA, 22 nt, Pseudomonas aeruginosa PA01
aggccggcuuucagcgcggcca

SEQ ID NO: 5263 - RNA, 22 nt, Pseudomonas aeruginosa PA01
aggccggggugaccaagccggu

SEQ ID NO: 5264 - RNA, 22 nt, Pseudomonas aeruginosa PA01
aggccggguagcgccucgcugg

SEQ ID NO: 5265 - RNA, 22 nt, Pseudomonas aeruginosa PA01
aggccggguugauggccaggau

SEQ ID NO: 5266 - RNA, 22 nt, Pseudomonas aeruginosa PA01
aggcgcaggcgcaacuggcaga

SEQ ID NO: 5267 - RNA, 22 nt, Pseudomonas aeruginosa PA01
aggcgccgcuugaugguuucgg

SEQ ID NO: 5268 - RNA, 22 nt, Pseudomonas aeruginosa PA01
aggcgccgcuugauguucugca

SEQ ID NO: 5269 - RNA, 22 nt, Pseudomonas aeruginosa PA01
aggcgccguugcgcgaggcuuu

SEQ ID NO: 5270 - RNA, 22 nt, Pseudomonas aeruginosa PA01
aggcgcgccaggucggacaggu

SEQ ID NO: 5271 - RNA, 22 nt, Pseudomonas aeruginosa PA01
aggcggcgcaggccgagaccga

SEQ ID NO: 5272 - RNA, 22 nt, Pseudomonas aeruginosa PA01
aggcuacgaccgauuucagccg

SEQ ID NO: 5273 - RNA, 22 nt, Pseudomonas aeruginosa PA01
aggcucaggcaggccgccggca

SEQ ID NO: 5274 - RNA, 19 nt, Pseudomonas aeruginosa PA01
agcuggcgcagcagggugc

SEQ ID NO: 5275 - RNA, 22 nt, Pseudomonas aeruginosa PA01
agcuccggcuugaucaggucgg

SEQ ID NO: 5276 - RNA, 19 nt, Pseudomonas aeruginosa PA01
agcucgcgguugccggcau

SEQ ID NO: 5277 - RNA, 18 nt, Pseudomonas aeruginosa PA01
agcugcgacggcuggugg

SEQ ID NO: 5278 - RNA, 22 nt, Pseudomonas aeruginosa PA01
agcugcgcgaaggcgauacgcu

SEQ ID NO: 5279 - RNA, 22 nt, Pseudomonas aeruginosa PA01
agcugcgcgacgaggucggcca

SEQ ID NO: 5280 - RNA, 22 nt, Pseudomonas aeruginosa PA01
agcuggaagaucaccuguucga

SEQ ID NO: 5281 - RNA, 22 nt, Pseudomonas aeruginosa PA01
agcuggaaggccagcucgcggc

SEQ ID NO: 5282 - RNA, 22 nt, Pseudomonas aeruginosa PA01
agcuggagcgugaguucgccgc

SEQ ID NO: 5283 - RNA, 23 nt, Pseudomonas aeruginosa PA01
agcuggauggccgccugcuguuc

SEQ ID NO: 5284 - RNA, 22 nt, Pseudomonas aeruginosa PA01
agccguccagcuugagguaggc

SEQ ID NO: 5285 - RNA, 22 nt, Pseudomonas aeruginosa PA01
agccggaguugaccccgccguu

SEQ ID NO: 5286 - RNA, 22 nt, Pseudomonas aeruginosa PA01
agccggcgccaugcgucauggc

SEQ ID NO: 5287 - RNA, 22 nt, Pseudomonas aeruginosa PA01
agccggcggccucggcggccuc

SEQ ID NO: 5288 - RNA, 20 nt, Pseudomonas aeruginosa PA01
agcgacccuugagcgccggc

SEQ ID NO: 5289 - RNA, 22 nt, Pseudomonas aeruginosa PA01
agcgaccgguguagcgccggcu

SEQ ID NO: 5290 - RNA, 22 nt, Pseudomonas aeruginosa PA01
agcgaggcgucuggcacggcga

SEQ ID NO: 5291 - RNA, 22 nt, Pseudomonas aeruginosa PA01
agcgcagcaaugccaccgugca

SEQ ID NO: 5292 - RNA, 22 nt, Pseudomonas aeruginosa PA01
agcgcagcaggcaggccuggua

SEQ ID NO: 5293 - RNA, 22 nt, Pseudomonas aeruginosa PA01
agcgcagcgagcgcaaucuccu

SEQ ID NO: 5294 - RNA, 22 nt, Pseudomonas aeruginosa PA01
agcgccacgguggcgccgguga

SEQ ID NO: 5295 - RNA, 22 nt, Pseudomonas aeruginosa PA01
agcgcccgcgcaacugggaaag

SEQ ID NO: 5296 - RNA, 22 nt, Pseudomonas aeruginosa PA01
agcgccgcguccagcuccaggc

SEQ ID NO: 5297 - RNA, 22 nt, Pseudomonas aeruginosa PA01
agcgccucgcgcucggcaugac

SEQ ID NO: 5298 - RNA, 22 nt, Pseudomonas aeruginosa PA01
agcgcgaggccagccagcaacu

SEQ ID NO: 5299 - RNA, 22 nt, Pseudomonas aeruginosa PA01
agcgcgcacgcacacccagcuc

SEQ ID NO: 5300 - RNA, 22 nt, Pseudomonas aeruginosa PA01
agcgcgccaucaggcgguucga

SEQ ID NO: 5301 - RNA, 22 nt, Pseudomonas aeruginosa PA01
agcgcgcccuggagcacaaggu

SEQ ID NO: 5302 - RNA, 22 nt, Pseudomonas aeruginosa PA01
agcgcgcgcugaaugccgugga

SEQ ID NO: 5303 - RNA, 22 nt, Pseudomonas aeruginosa PA01
agcgcgcggaagcugucgucca

SEQ ID NO: 5304 - RNA, 22 nt, Pseudomonas aeruginosa PA01
agcgcgcggacuaccggguggc

SEQ ID NO: 5305 - RNA, 22 nt, Pseudomonas aeruginosa PA01
agcgcggcaagauguucggcuu

SEQ ID NO: 5306 - RNA, 22 nt, Pseudomonas aeruginosa PA01
agcgcggccggcucgacgaggu

SEQ ID NO: 5307 - RNA, 21 nt, Pseudomonas aeruginosa PA01
agcgcggcgccgaauaucggg

SEQ ID NO: 5308 - RNA, 22 nt, Pseudomonas aeruginosa PA01
agcgcggcggguauugcgacau

SEQ ID NO: 5309 - RNA, 22 nt, Pseudomonas aeruginosa PA01
agcgcgugguucagcagcacau

SEQ ID NO: 5310 - RNA, 22 nt, Pseudomonas aeruginosa PA01
agcggcagcaacgccagucccu

SEQ ID NO: 5311 - RNA, 22 nt, Pseudomonas aeruginosa PA01
agcggccggaugagccagggca

SEQ ID NO: 5312 - RNA, 22 nt, Pseudomonas aeruginosa PA01
agcggcgccagcaggugaugga

SEQ ID NO: 5313 - RNA, 22 nt, Pseudomonas aeruginosa PA01
agcggcgccuucaagcgucuca

SEQ ID NO: 5314 - RNA, 22 nt, Pseudomonas aeruginosa PA01
agcggcgcgacaccgagcagug

SEQ ID NO: 5315 - RNA, 22 nt, Pseudomonas aeruginosa PA01
agcggcgcggugguuggcgugc

SEQ ID NO: 5316 - RNA, 22 nt, Pseudomonas aeruginosa PA01
agcggcggccccggcaacagcg

SEQ ID NO: 5317 - RNA, 22 nt, Pseudomonas aeruginosa PA01
agcggcgggugcugcuggaccu

SEQ ID NO: 5318 - RNA, 22 nt, Pseudomonas aeruginosa PA01
agcggcggugccugaacuggag

SEQ ID NO: 5319 - RNA, 22 nt, Pseudomonas aeruginosa PA01
agcggcgugcgcagcucguggg

SEQ ID NO: 5320 - RNA, 22 nt, Pseudomonas aeruginosa PA01
agcgggagaucgccaguugaug

SEQ ID NO: 5321 - RNA, 22 nt, Pseudomonas aeruginosa PA01
agcgggcguuugcggcgaccug

SEQ ID NO: 5322 - RNA, 22 nt, Pseudomonas aeruginosa PA01
agcguggccuucuccucggaca

SEQ ID NO: 5323 - RNA, 22 nt, Pseudomonas aeruginosa PA01
agcguggcuggcggucaccggg

SEQ ID NO: 5324 - RNA, 22 nt, Pseudomonas aeruginosa PA01
agccagcccugggcgucgcuca

SEQ ID NO: 5325 - RNA, 22 nt, Pseudomonas aeruginosa PA01
agcaggucagcggcaugccgcu

SEQ ID NO: 5326 - RNA, 22 nt, Pseudomonas aeruginosa PA01
agcagguccuucgagcgacccg

SEQ ID NO: 5327 - RNA, 22 nt, Pseudomonas aeruginosa PA01
agcaggucguggccggccaggg

SEQ ID NO: 5328 - RNA, 22 nt, Pseudomonas aeruginosa PA01
agcagcgccugaaggaagucga

SEQ ID NO: 5329 - RNA, 22 nt, Pseudomonas aeruginosa PA01
agcagcggguggccaugggccg

SEQ ID NO: 5330 - RNA, 22 nt, Pseudomonas aeruginosa PA01
agcagcaggccgcccagggucg

SEQ ID NO: 5331 - RNA, 22 nt, Pseudomonas aeruginosa PA01
agcaggccggcgauggcgucgc

SEQ ID NO: 5332 - RNA, 22 nt, Pseudomonas aeruginosa PA01
agcaggcgaucgagcaugccgc

SEQ ID NO: 5333 - RNA, 22 nt, Pseudomonas aeruginosa PA01
agcaggcggcgguccagcucgc

SEQ ID NO: 5334 - RNA, 22 nt, Pseudomonas aeruginosa PA01
accacgagaccgaccagcaggc

SEQ ID NO: 5335 - RNA, 22 nt, Pseudomonas aeruginosa PA01
accacgagcgcgagcugucgac

SEQ ID NO: 5336 - RNA, 22 nt, Pseudomonas aeruginosa PA01
accagcgcgaacaggccgggau

SEQ ID NO: 5337 - RNA, 22 nt, Pseudomonas aeruginosa PA01
accaggccgccgccuuccucgu

SEQ ID NO: 5338 - RNA, 22 nt, Pseudomonas aeruginosa PA01
accaguccgccagggccgccgg

SEQ ID NO: 5339 - RNA, 23 nt, Pseudomonas aeruginosa PA01
accagcaggacagcuucgacuuc

SEQ ID NO: 5340 - RNA, 22 nt, Pseudomonas aeruginosa PA01
acagccuggaaggcgcggaaga

SEQ ID NO: 5341 - RNA, 22 nt, Pseudomonas aeruginosa PA01
acagcgcguggagguucuccag

SEQ ID NO: 5342 - RNA, 22 nt, Pseudomonas aeruginosa PA01
acgccggccuggagggcgcucg

SEQ ID NO: 5343 - RNA, 22 nt, Pseudomonas aeruginosa PA01
acgcgcgcaaccgacggcaggg

SEQ ID NO: 5344 - RNA, 22 nt, Pseudomonas aeruginosa PA01
acgcagcgcaugcucguagccg

SEQ ID NO: 5345 - RNA, 22 nt, Pseudomonas aeruginosa PA01
acgaugcgcuccgaguagccgc

SEQ ID NO: 5346 - RNA, 22 nt, Pseudomonas aeruginosa PA01
acgucggcggcaugcugcgcuc

SEQ ID NO: 5347 - RNA, 23 nt, Pseudomonas aeruginosa PA01
acgucggcugggagcguucgcgc

SEQ ID NO: 5348 - RNA, 22 nt, Pseudomonas aeruginosa PA01
acggaagcgauccgugccuggu

SEQ ID NO: 5349 - RNA, 22 nt, Pseudomonas aeruginosa PA01
acggaagcggaagaaccaggcc

SEQ ID NO: 5350 - RNA, 22 nt, Pseudomonas aeruginosa PA01
acggcagccugcggcugcuggu

SEQ ID NO: 5351 - RNA, 22 nt, Pseudomonas aeruginosa PA01
acggcucccaagcucagcgacg

SEQ ID NO: 5352 - RNA, 22 nt, Pseudomonas aeruginosa PA01
accggcagaccaucggcggcua

SEQ ID NO: 5353 - RNA, 22 nt, Pseudomonas aeruginosa PA01
acccggaccgaggucaaguaag

SEQ ID NO: 5354 - RNA, 22 nt, Pseudomonas aeruginosa PA01
accccgggcacccugacggcuu

SEQ ID NO: 5355 - RNA, 22 nt, Pseudomonas aeruginosa PA01
accgucggccuggccgcugcgc

SEQ ID NO: 5356 - RNA, 22 nt, Pseudomonas aeruginosa PA01
accuggagcuggaggccuugcc

SEQ ID NO: 5357 - RNA, 22 nt, Pseudomonas aeruginosa PA01
accugagcgucggcggcgcggu

SEQ ID NO: 5358 - RNA, 22 nt, Pseudomonas aeruginosa PA01
acccuggaauugcagggcuacc

SEQ ID NO: 5359 - RNA, 22 nt, Pseudomonas aeruginosa PA01
agaucuggaacgacuuccuguu

SEQ ID NO: 5360 - RNA, 22 nt, Pseudomonas aeruginosa PA01
agaggccgcgcucgccgagcau

SEQ ID NO: 5361 - RNA, 22 nt, Pseudomonas aeruginosa PA01
agcaccccgccgaccagcauca

SEQ ID NO: 5362 - RNA, 22 nt, Pseudomonas aeruginosa PA01
agcaccagguaggacagcgccu

SEQ ID NO: 5363 - RNA, 22 nt, Pseudomonas aeruginosa PA01
agcacgcgcucguagccgaugu

SEQ ID NO: 5364 - RNA, 22 nt, Pseudomonas aeruginosa PA01
agagcgaggccaggcgccugga

SEQ ID NO: 5365 - RNA, 22 nt, Pseudomonas aeruginosa PA01
agagcgccgccagcgucacagu

SEQ ID NO: 5366 - RNA, 19 nt, Pseudomonas aeruginosa PA01
agagcgcggugaucgagcc

SEQ ID NO: 5367 - RNA, 22 nt, Pseudomonas aeruginosa PA01
agagcggccugcgcuucggcga

SEQ ID NO: 5368 - RNA, 22 nt, Pseudomonas aeruginosa PA01
agagcggcuugcuggucggcgc

SEQ ID NO: 5369 - RNA, 22 nt, Pseudomonas aeruginosa PA01
agaccaggccggacagguacca

SEQ ID NO: 5370 - RNA, 22 nt, Pseudomonas aeruginosa PA01
agacccagcuccggggucucug

SEQ ID NO: 5371 - RNA, 22 nt, Pseudomonas aeruginosa PA01
acugggaucggccagcuugcgg

SEQ ID NO: 5372 - RNA, 22 nt, Pseudomonas aeruginosa PA01
acuccggccgccgcacgccagg

SEQ ID NO: 5373 - RNA, 22 nt, Pseudomonas aeruginosa PA01
aaguggcguucggcgaacgcgg

SEQ ID NO: 5374 - RNA, 20 nt, Pseudomonas aeruginosa PA01
aaggcauggguuuuucgucg

SEQ ID NO: 5375 - RNA, 22 nt, Pseudomonas aeruginosa PA01
aaggaugcgccagcggcaacca

SEQ ID NO: 5376 - RNA, 22 nt, Pseudomonas aeruginosa PA01
aauagcggcuuuucgaugcgca

SEQ ID NO: 5377 - RNA, 22 nt, Pseudomonas aeruginosa PA01
acaacugcguggacggcgugga

SEQ ID NO: 5378 - RNA, 22 nt, Pseudomonas aeruginosa PA01
aacuggaggacauccagguccu

SEQ ID NO: 5379 - RNA, 22 nt, Pseudomonas aeruginosa PA01
aacugagucucggcaaucauag

SEQ ID NO: 5380 - RNA, 22 nt, Pseudomonas aeruginosa PA01
aacgcgagguggugcggcucgg

SEQ ID NO: 5381 - RNA, 22 nt, Pseudomonas aeruginosa PA01
aacggcagcgccuccggcagcu

SEQ ID NO: 5382 - RNA, 22 nt, Pseudomonas aeruginosa PA01
aagcgaucggcgcggcugaucg

SEQ ID NO: 5383 - RNA, 22 nt, Pseudomonas aeruginosa PA01
aagagugcgccguuggggugaa

SEQ ID NO: 5384 - RNA, 22 nt, Pseudomonas aeruginosa PA01
aaacugcaugagcggcucgacc

SEQ ID NO: 5385 - RNA, 22 nt, Pseudomonas aeruginosa PA01
guacucgcgggcaagcuuggcg

SEQ ID NO: 5386 - RNA, 22 nt, Pseudomonas aeruginosa PA01
guagcccuggccgagguccggg

SEQ ID NO: 5387 - RNA, 21 nt, Pseudomonas aeruginosa PA01
guagccguggaccuggcagcc

SEQ ID NO: 5388 - RNA, 22 nt, Pseudomonas aeruginosa PA01
gguugcgguugugguugagcag

SEQ ID NO: 5389 - RNA, 22 nt, Pseudomonas aeruginosa PA01
guacaucgucgucgcccugguc

SEQ ID NO: 5390 - RNA, 22 nt, Pseudomonas aeruginosa PA01
gucaggccgaagaucgcgccgc

SEQ ID NO: 5391 - RNA, 22 nt, Pseudomonas aeruginosa PA01
ggucggccaguuguccuucgag

SEQ ID NO: 5392 - RNA, 22 nt, Pseudomonas aeruginosa PA01
ggucgggaugcgcaggcggccg

SEQ ID NO: 5393 - RNA, 22 nt, Pseudomonas aeruginosa PA01
gguccugcaacugaaacgggug

SEQ ID NO: 5394 - RNA, 22 nt, Pseudomonas aeruginosa PA01
gggucagcagcagguguuccuu

SEQ ID NO: 5395 - RNA, 22 nt, Pseudomonas aeruginosa PA01
gggucuguucgaccaacugcgg

SEQ ID NO: 5396 - RNA, 22 nt, Pseudomonas aeruginosa PA01
ggugggauugcccugcaaggcu

SEQ ID NO: 5397 - RNA, 22 nt, Pseudomonas aeruginosa PA01
ggugggcgaugcgcgaggucag

SEQ ID NO: 5398 - RNA, 22 nt, Pseudomonas aeruginosa PA01
gguguaccggugaaggaacugu

SEQ ID NO: 5399 - RNA, 19 nt, Pseudomonas aeruginosa PA01
gguuccgucggccuugccg

SEQ ID NO: 5400 - RNA, 22 nt, Pseudomonas aeruginosa PA01
gguggcaggaugcgcagacugg

SEQ ID NO: 5401 - RNA, 22 nt, Pseudomonas aeruginosa PA01
ggugccagauccaguaggcggc

SEQ ID NO: 5402 - RNA, 22 nt, Pseudomonas aeruginosa PA01
ggugccagggcuacagcgagcc

SEQ ID NO: 5403 - RNA, 22 nt, Pseudomonas aeruginosa PA01
ggugccggcgccggcccuggcg

SEQ ID NO: 5404 - RNA, 22 nt, Pseudomonas aeruginosa PA01
ggugcgcaccgcccugcgcgag

SEQ ID NO: 5405 - RNA, 22 nt, Pseudomonas aeruginosa PA01
ggugcgcaccgucgagggcgag

SEQ ID NO: 5406 - RNA, 22 nt, Pseudomonas aeruginosa PA01
ggugcgcgcccuucugcgagua

SEQ ID NO: 5407 - RNA, 22 nt, Pseudomonas aeruginosa PA01
ggugcggaagaaggcgcgcgua

SEQ ID NO: 5408 - RNA, 22 nt, Pseudomonas aeruginosa PA01
ggcgagcuuggcggcgauggcg

SEQ ID NO: 5409 - RNA, 22 nt, Pseudomonas aeruginosa PA01
ggcgaggaacacgcagccgagc

SEQ ID NO: 5410 - RNA, 22 nt, Pseudomonas aeruginosa PA01
ggcgaggaagucgcagugcucg

SEQ ID NO: 5411 - RNA, 22 nt, Pseudomonas aeruginosa PA01
ggcgaggaggaucgccgcgauc

SEQ ID NO: 5412 - RNA, 22 nt, Pseudomonas aeruginosa PA01
ggcgaggaggguuuccgcgugc

SEQ ID NO: 5413 - RNA, 22 nt, Pseudomonas aeruginosa PA01
ggcgaggccaauggcugaggcg

SEQ ID NO: 5414 - RNA, 22 nt, Pseudomonas aeruginosa PA01
ggcgagguagcgcagcacgccg

SEQ ID NO: 5415 - RNA, 22 nt, Pseudomonas aeruginosa PA01
ggcgagguugaccgacagcggg

SEQ ID NO: 5416 - RNA, 22 nt, Pseudomonas aeruginosa PA01
ggcgaugaagaucgucggcgua

SEQ ID NO: 5417 - RNA, 22 nt, Pseudomonas aeruginosa PA01
ggcgccaccgcagagugccgaa

SEQ ID NO: 5418 - RNA, 22 nt, Pseudomonas aeruginosa PA01
ggcgcgggucgagcguggccag

SEQ ID NO: 5419 - RNA, 22 nt, Pseudomonas aeruginosa PA01
ggcgcugcuggccgugcagguc

SEQ ID NO: 5420 - RNA, 22 nt, Pseudomonas aeruginosa PA01
ggcgcugcuguuccaguacgcg

SEQ ID NO: 5421 - RNA, 22 nt, Pseudomonas aeruginosa PA01
ggcgcuggcgcaaccggccaac

SEQ ID NO: 5422 - RNA, 22 nt, Pseudomonas aeruginosa PA01
ggcgcuggcgcaacgcaccgaa

SEQ ID NO: 5423 - RNA, 22 nt, Pseudomonas aeruginosa PA01
ggcgcugggcuugaccccggcg

SEQ ID NO: 5424 - RNA, 22 nt, Pseudomonas aeruginosa PA01
ggcgcugguggucgauccgggc

SEQ ID NO: 5425 - RNA, 22 nt, Pseudomonas aeruginosa PA01
ggcggcaguuccggcggauggu

SEQ ID NO: 5426 - RNA, 23 nt, Pseudomonas aeruginosa PA01
ggcggccgcccuccucaugugcc

SEQ ID NO: 5427 - RNA, 18 nt, Pseudomonas aeruginosa PA01
ggcggccggcugaacgcc

SEQ ID NO: 5428 - RNA, 22 nt, Pseudomonas aeruginosa PA01
ggcggccguucauguaccagau

SEQ ID NO: 5429 - RNA, 19 nt, Pseudomonas aeruginosa PA01
ggcgagcagcagggcgcgg

SEQ ID NO: 5430 - RNA, 22 nt, Pseudomonas aeruginosa PA01
ggcgagcagcggcaggcugucg

SEQ ID NO: 5431 - RNA, 22 nt, Pseudomonas aeruginosa PA01
ggcgagcgguucgcgggaaagg

SEQ ID NO: 5432 - RNA, 22 nt, Pseudomonas aeruginosa PA01
ggcgagcugccgcugccggucu

SEQ ID NO: 5433 - RNA, 22 nt, Pseudomonas aeruginosa PA01
ggcggcgccguucggcaggcug

SEQ ID NO: 5434 - RNA, 18 nt, Pseudomonas aeruginosa PA01
ggcggcgcgagccaggcg

SEQ ID NO: 5435 - RNA, 22 nt, Pseudomonas aeruginosa PA01
ggcggcgcuccucgaaggggaa

SEQ ID NO: 5436 - RNA, 22 nt, Pseudomonas aeruginosa PA01
ggcggcgcugcaggucggccug

SEQ ID NO: 5437 - RNA, 21 nt, Pseudomonas aeruginosa PA01
ggcggcugguagcucaaggga

SEQ ID NO: 5438 - RNA, 22 nt, Pseudomonas aeruginosa PA01
ggcgggcguuuccgcgcugacg

SEQ ID NO: 5439 - RNA, 22 nt, Pseudomonas aeruginosa PA01
ggcgggugacgccguugucgau

SEQ ID NO: 5440 - RNA, 22 nt, Pseudomonas aeruginosa PA01
ggcgggugcucggagcgcuugc

SEQ ID NO: 5441 - RNA, 22 nt, Pseudomonas aeruginosa PA01
ggcgggugcugcuggaggaccu

SEQ ID NO: 5442 - RNA, 22 nt, Pseudomonas aeruginosa PA01
ggcgucuuccucguccucggcg

SEQ ID NO: 5443 - RNA, 22 nt, Pseudomonas aeruginosa PA01
ggcucgcgagcgccagggcaac

SEQ ID NO: 5444 - RNA, 22 nt, Pseudomonas aeruginosa PA01
ggcucgcgcgcuggccacccug

SEQ ID NO: 5445 - RNA, 22 nt, Pseudomonas aeruginosa PA01
ggcucgcgcgggcugaccccgc

SEQ ID NO: 5446 - RNA, 22 nt, Pseudomonas aeruginosa PA01
ggcucgcggcagucucggcuag

SEQ ID NO: 5447 - RNA, 22 nt, Pseudomonas aeruginosa PA01
ggcucgcucaugucgucgccuu

SEQ ID NO: 5448 - RNA, 22 nt, Pseudomonas aeruginosa PA01
ggcucgcugccagcgccagggg

SEQ ID NO: 5449 - RNA, 22 nt, Pseudomonas aeruginosa PA01
ggcuccgccgccucagcggggc

SEQ ID NO: 5450 - RNA, 22 nt, Pseudomonas aeruginosa PA01
ggcuccgcgaacgcuuccccca

SEQ ID NO: 5451 - RNA, 22 nt, Pseudomonas aeruginosa PA01
ggcuccugguugccgggagcgg

SEQ ID NO: 5452 - RNA, 22 nt, Pseudomonas aeruginosa PA01
ggcugccgaccugccccggacg

SEQ ID NO: 5453 - RNA, 22 nt, Pseudomonas aeruginosa PA01
ggcugccgccgauggccuugga

SEQ ID NO: 5454 - RNA, 19 nt, Pseudomonas aeruginosa PA01
ggcugccgguaacgggguc

SEQ ID NO: 5455 - RNA, 22 nt, Pseudomonas aeruginosa PA01
ggcucuacggcccguuccugcg

SEQ ID NO: 5456 - RNA, 22 nt, Pseudomonas aeruginosa PA01
ggcucuucagcgucuggaugua

SEQ ID NO: 5457 - RNA, 22 nt, Pseudomonas aeruginosa PA01
ggcugagcgcccgcggcgugac

SEQ ID NO: 5458 - RNA, 22 nt, Pseudomonas aeruginosa PA01
ggcuuccggcggccucccgcgg

SEQ ID NO: 5459 - RNA, 22 nt, Pseudomonas aeruginosa PA01
ggcuucggcuccccagccggac

SEQ ID NO: 5460 - RNA, 22 nt, Pseudomonas aeruginosa PA01
ggcuucgucgagggaggcgguc

SEQ ID NO: 5461 - RNA, 22 nt, Pseudomonas aeruginosa PA01
ggcuggaggcgccggguugccu

SEQ ID NO: 5462 - RNA, 22 nt, Pseudomonas aeruginosa PA01
ggcugcgucgugacgcccgcgg

SEQ ID NO: 5463 - RNA, 22 nt, Pseudomonas aeruginosa PA01
ggcugcgugccuggcggcaccc

SEQ ID NO: 5464 - RNA, 22 nt, Pseudomonas aeruginosa PA01
ggcugcuggagcgccugggcca

SEQ ID NO: 5465 - RNA, 22 nt, Pseudomonas aeruginosa PA01
ggcugcugggccuggccguucu

SEQ ID NO: 5466 - RNA, 22 nt, Pseudomonas aeruginosa PA01
ggcugcuguccgguggccuugu

SEQ ID NO: 5467 - RNA, 22 nt, Pseudomonas aeruginosa PA01
gggcagcggcguggagugguag

SEQ ID NO: 5468 - RNA, 22 nt, Pseudomonas aeruginosa PA01
gggcagcucgaggucuucgucg

SEQ ID NO: 5469 - RNA, 22 nt, Pseudomonas aeruginosa PA01
gggcagcuucagcaagcgcucg

SEQ ID NO: 5470 - RNA, 22 nt, Pseudomonas aeruginosa PA01
gggcaggcucauggcagcucgg

SEQ ID NO: 5471 - RNA, 22 nt, Pseudomonas aeruginosa PA01
gggcgaccugaacugggccggc

SEQ ID NO: 5472 - RNA, 22 nt, Pseudomonas aeruginosa PA01
gggcgacggcgaucagcgucua

SEQ ID NO: 5473 - RNA, 22 nt, Pseudomonas aeruginosa PA01
gggcgagccacucgccgaggaa

SEQ ID NO: 5474 - RNA, 22 nt, Pseudomonas aeruginosa PA01
gggcgagcccugcugggcgaag

SEQ ID NO: 5475 - RNA, 22 nt, Pseudomonas aeruginosa PA01
gggcgaggaagccgccggcguc

SEQ ID NO: 5476 - RNA, 22 nt, Pseudomonas aeruginosa PA01
gggcgaggucgacaacggcguc

SEQ ID NO: 5477 - RNA, 22 nt, Pseudomonas aeruginosa PA01
gggcgcggucgaggaucagcuc

SEQ ID NO: 5478 - RNA, 21 nt, Pseudomonas aeruginosa PA01
gggcgcgucccgccuggcggc

SEQ ID NO: 5479 - RNA, 20 nt, Pseudomonas aeruginosa PA01
gggcgcuggcauaggcgccc

SEQ ID NO: 5480 - RNA, 22 nt, Pseudomonas aeruginosa PA01
ggcuuucucguuaccgccggcu

SEQ ID NO: 5481 - RNA, 22 nt, Pseudomonas aeruginosa PA01
gggaagcgcgccugcugcuuga

SEQ ID NO: 5482 - RNA, 21 nt, Pseudomonas aeruginosa PA01
gggaagcucgaggcgucgggu

SEQ ID NO: 5483 - RNA, 22 nt, Pseudomonas aeruginosa PA01
gggcuccgacuaucacucgaug

SEQ ID NO: 5484 - RNA, 23 nt, Pseudomonas aeruginosa PA01
gggcaugcugguccccggcaccc

SEQ ID NO: 5485 - RNA, 22 nt, Pseudomonas aeruginosa PA01
gggcggcuugcaggaaggcuuc

SEQ ID NO: 5486 - RNA, 22 nt, Pseudomonas aeruginosa PA01
gggccccuuccacggaccgcug

SEQ ID NO: 5487 - RNA, 22 nt, Pseudomonas aeruginosa PA01
gggccgcccggcgggaucuugc

SEQ ID NO: 5488 - RNA, 22 nt, Pseudomonas aeruginosa PA01
gggccgggcgacgaacuggacg

SEQ ID NO: 5489 - RNA, 22 nt, Pseudomonas aeruginosa PA01
gggccgggcuucagcaucgacg

SEQ ID NO: 5490 - RNA, 22 nt, Pseudomonas aeruginosa PA01
ggggcgccggaccugcaggagc

SEQ ID NO: 5491 - RNA, 22 nt, Pseudomonas aeruginosa PA01
ggggcgcgccuccaggcgacgg

SEQ ID NO: 5492 - RNA, 22 nt, Pseudomonas aeruginosa PA01
ggggcggcuuguugcgcccgcg

SEQ ID NO: 5493 - RNA, 22 nt, Pseudomonas aeruginosa PA01
ggggcucgccgaucaccccggu

SEQ ID NO: 5494 - RNA, 22 nt, Pseudomonas aeruginosa PA01
gggggcaggucacuugccccgc

SEQ ID NO: 5495 - RNA, 22 nt, Pseudomonas aeruginosa PA01
ggggucaggucgcugagcaggg

SEQ ID NO: 5496 - RNA, 22 nt, Pseudomonas aeruginosa PA01
guggcgcggggcgagcugguuc

SEQ ID NO: 5497 - RNA, 22 nt, Pseudomonas aeruginosa PA01
guggccggcgcgauggcgucca

SEQ ID NO: 5498 - RNA, 22 nt, Pseudomonas aeruginosa PA01
guggcgagaaucaggucgaucc

SEQ ID NO: 5499 - RNA, 22 nt, Pseudomonas aeruginosa PA01
gugggcgcgaccucggcugcgg

SEQ ID NO: 5500 - RNA, 22 nt, Pseudomonas aeruginosa PA01
gugggcggucaacgccagcacc

SEQ ID NO: 5501 - RNA, 22 nt, Pseudomonas aeruginosa PA01
guugaugucguagcucaccagc

SEQ ID NO: 5502 - RNA, 22 nt, Pseudomonas aeruginosa PA01
guugcggaucgucguagccgag

SEQ ID NO: 5503 - RNA, 22 nt, Pseudomonas aeruginosa PA01
gugaggcgccggacagcgcccg

SEQ ID NO: 5504 - RNA, 18 nt, Pseudomonas aeruginosa PA01
gugcgcaggccaggcggg

SEQ ID NO: 5505 - RNA, 22 nt, Pseudomonas aeruginosa PA01
gugcgcaggccgagcgguccga

SEQ ID NO: 5506 - RNA, 22 nt, Pseudomonas aeruginosa PA01
gugcgcccagcgcgcggucaug

SEQ ID NO: 5507 - RNA, 22 nt, Pseudomonas aeruginosa PA01
guggaaguggucgaggccccgg

SEQ ID NO: 5508 - RNA, 22 nt, Pseudomonas aeruginosa PA01
gugccggccaaggacccgcgcg

SEQ ID NO: 5509 - RNA, 22 nt, Pseudomonas aeruginosa PA01
gugccggcgcggcguaccguuc

SEQ ID NO: 5510 - RNA, 22 nt, Pseudomonas aeruginosa PA01
gugccggcgggugcugcgcgag

SEQ ID NO: 5511 - RNA, 22 nt, Pseudomonas aeruginosa PA01
gugccugccucggcgccggcgg

SEQ ID NO: 5512 - RNA, 22 nt, Pseudomonas aeruginosa PA01
guccaugaucgcgaacugcggc

SEQ ID NO: 5513 - RNA, 22 nt, Pseudomonas aeruginosa PA01
guccggccaggcgggcuugccg

SEQ ID NO: 5514 - RNA, 22 nt, Pseudomonas aeruginosa PA01
guccggcgaccagcggcgcgug

SEQ ID NO: 5515 - RNA, 22 nt, Pseudomonas aeruginosa PA01
guccggcgcgaggcccggcguu

SEQ ID NO: 5516 - RNA, 22 nt, Pseudomonas aeruginosa PA01
guccggcuuguacugguggugg

SEQ ID NO: 5517 - RNA, 22 nt, Pseudomonas aeruginosa PA01
guccgggagcgauggcguugac

SEQ ID NO: 5518 - RNA, 22 nt, Pseudomonas aeruginosa PA01
guccgggaucaccccgucgcug

SEQ ID NO: 5519 - RNA, 22 nt, Pseudomonas aeruginosa PA01
guccagcgcagcaccagcucgc

SEQ ID NO: 5520 - RNA, 22 nt, Pseudomonas aeruginosa PA01
guccagcgccaggccgaacucu

SEQ ID NO: 5521 - RNA, 22 nt, Pseudomonas aeruginosa PA01
guccagcgcgugcgccugccac

SEQ ID NO: 5522 - RNA, 22 nt, Pseudomonas aeruginosa PA01
gucgcgccaugacccuggaggc

SEQ ID NO: 5523 - RNA, 22 nt, Pseudomonas aeruginosa PA01
gucgacccagggccgggcgcgc

SEQ ID NO: 5524 - RNA, 22 nt, Pseudomonas aeruginosa PA01
gucgacccguccgggcagcucg

SEQ ID NO: 5525 - RNA, 22 nt, Pseudomonas aeruginosa PA01
gucgacuacgcgcugauggagc

SEQ ID NO: 5526 - RNA, 22 nt, Pseudomonas aeruginosa PA01
guccugcgcgcugcgcaggguc

SEQ ID NO: 5527 - RNA, 22 nt, Pseudomonas aeruginosa PA01
gucggccaggugcgcgguggcc

SEQ ID NO: 5528 - RNA, 22 nt, Pseudomonas aeruginosa PA01
gucggcccauuccggguggucu

SEQ ID NO: 5529 - RNA, 22 nt, Pseudomonas aeruginosa PA01
gucggccugaccuggggcgaga

SEQ ID NO: 5530 - RNA, 19 nt, Pseudomonas aeruginosa PA01
gucggccuggaaggccuga

SEQ ID NO: 5531 - RNA, 22 nt, Pseudomonas aeruginosa PA01
gucggcgaaguccugcacgaac

SEQ ID NO: 5532 - RNA, 22 nt, Pseudomonas aeruginosa PA01
gucggcgaguuccgcggagauc

SEQ ID NO: 5533 - RNA, 22 nt, Pseudomonas aeruginosa PA01
gucggcgauggccagcagcgcg

SEQ ID NO: 5534 - RNA, 22 nt, Pseudomonas aeruginosa PA01
gucggcgccgaaguugaugcgg

SEQ ID NO: 5535 - RNA, 22 nt, Pseudomonas aeruginosa PA01
gugagcgccgaggagcagacca

SEQ ID NO: 5536 - RNA, 22 nt, Pseudomonas aeruginosa PA01
gucucuuccaucaccgagcgca

SEQ ID NO: 5537 - RNA, 22 nt, Pseudomonas aeruginosa PA01
gucuuuccagguaugcgggcug

SEQ ID NO: 5538 - RNA, 22 nt, Pseudomonas aeruginosa PA01
gucuuucccggauggauggaga

SEQ ID NO: 5539 - RNA, 22 nt, Pseudomonas aeruginosa PA01
ucaccggccugggcggcgagug

SEQ ID NO: 5540 - RNA, 22 nt, Pseudomonas aeruginosa PA01
ucaccggcggcuggaacgggcu

SEQ ID NO: 5541 - RNA, 22 nt, Pseudomonas aeruginosa PA01
ucaccggcuacgaccugggcau

SEQ ID NO: 5542 - RNA, 22 nt, Pseudomonas aeruginosa PA01
ucagccuguucucgcggcgccc

SEQ ID NO: 5543 - RNA, 22 nt, Pseudomonas aeruginosa PA01
ucagcgcccacuucggcugcuc

SEQ ID NO: 5544 - RNA, 22 nt, Pseudomonas aeruginosa PA01
ucagcgccggaucgugcaguug

SEQ ID NO: 5545 - RNA, 22 nt, Pseudomonas aeruginosa PA01
ucagcgccggcuggcagcggau

SEQ ID NO: 5546 - RNA, 22 nt, Pseudomonas aeruginosa PA01
uccaugacguacuugucgccca

SEQ ID NO: 5547 - RNA, 20 nt, Pseudomonas aeruginosa PA01
ucaggccgucgaugccgggc

SEQ ID NO: 5548 - RNA, 22 nt, Pseudomonas aeruginosa PA01
ucaggcucggugguuccgcuga

SEQ ID NO: 5549 - RNA, 22 nt, Pseudomonas aeruginosa PA01
ucaggcccauuucguugcggac

SEQ ID NO: 5550 - RNA, 22 nt, Pseudomonas aeruginosa PA01
ucaggccggcgcccagggaguc

SEQ ID NO: 5551 - RNA, 22 nt, Pseudomonas aeruginosa PA01
ucaggccggcugccgccacucg

SEQ ID NO: 5552 - RNA, 19 nt, Pseudomonas aeruginosa PA01
ucgcugcaacacgucaagc

SEQ ID NO: 5553 - RNA, 22 nt, Pseudomonas aeruginosa PA01
ucggccuccuucagcuuggcca

SEQ ID NO: 5554 - RNA, 22 nt, Pseudomonas aeruginosa PA01
ucggccggcagcucguaggcau

SEQ ID NO: 5555 - RNA, 22 nt, Pseudomonas aeruginosa PA01
ucggcgccgcccacgccuggca

SEQ ID NO: 5556 - RNA, 22 nt, Pseudomonas aeruginosa PA01
ucggcgccuugcuggcgggcca

SEQ ID NO: 5557 - RNA, 18 nt, Pseudomonas aeruginosa PA01
ucggcgcgcacucggugg

SEQ ID NO: 5558 - RNA, 22 nt, Pseudomonas aeruginosa PA01
ucggcgcgcugacccgcugggu

SEQ ID NO: 5559 - RNA, 22 nt, Pseudomonas aeruginosa PA01
ucggcgcgcugcuguucgucga

SEQ ID NO: 5560 - RNA, 23 nt, Pseudomonas aeruginosa PA01
ucggcgcgggacuugagggucgc

SEQ ID NO: 5561 - RNA, 22 nt, Pseudomonas aeruginosa PA01
ucgcccugggcgcggcggaagc

SEQ ID NO: 5562 - RNA, 22 nt, Pseudomonas aeruginosa PA01
ucgccgccagcaggcggccgag

SEQ ID NO: 5563 - RNA, 22 nt, Pseudomonas aeruginosa PA01
ucgccgccgcuacguccuacuu

SEQ ID NO: 5564 - RNA, 19 nt, Pseudomonas aeruginosa PA01
ucgccgccuucgccgcacc

SEQ ID NO: 5565 - RNA, 22 nt, Pseudomonas aeruginosa PA01
ucgccggcaaagucgagggcuu

SEQ ID NO: 5566 - RNA, 22 nt, Pseudomonas aeruginosa PA01
ucgccggcaucugggaggccua

SEQ ID NO: 5567 - RNA, 22 nt, Pseudomonas aeruginosa PA01
ucgccggccugcugaccuuccu

SEQ ID NO: 5568 - RNA, 22 nt, Pseudomonas aeruginosa PA01
ucgccggcgcccuggcgccugg

SEQ ID NO: 5569 - RNA, 22 nt, Pseudomonas aeruginosa PA01
ucgccgggaaucggcgugcagc

SEQ ID NO: 5570 - RNA, 22 nt, Pseudomonas aeruginosa PA01
ucgccgggcgccgcugggagug

SEQ ID NO: 5571 - RNA, 22 nt, Pseudomonas aeruginosa PA01
ucgccgggcuucaggcucaggg

SEQ ID NO: 5572 - RNA, 22 nt, Pseudomonas aeruginosa PA01
ucgccggguuggucagccaggc

SEQ ID NO: 5573 - RNA, 22 nt, Pseudomonas aeruginosa PA01
ucgcgcagcaacaggggccggu

SEQ ID NO: 5574 - RNA, 22 nt, Pseudomonas aeruginosa PA01
ucgcgcaggucggcgcggguga

SEQ ID NO: 5575 - RNA, 22 nt, Pseudomonas aeruginosa PA01
ucgcgccgaagcgccgggaaug

SEQ ID NO: 5576 - RNA, 21 nt, Pseudomonas aeruginosa PA01
ucgcggaacuggcgggcgucc

SEQ ID NO: 5577 - RNA, 22 nt, Pseudomonas aeruginosa PA01
ucgcggagcagggcgcggcuga

SEQ ID NO: 5578 - RNA, 22 nt, Pseudomonas aeruginosa PA01
ucgcggcuucgccgugguggcc

SEQ ID NO: 5579 - RNA, 22 nt, Pseudomonas aeruginosa PA01
ucggucgguugcgccggguagu

SEQ ID NO: 5580 - RNA, 22 nt, Pseudomonas aeruginosa PA01
ucggucucgaccagcaacuggc

SEQ ID NO: 5581 - RNA, 22 nt, Pseudomonas aeruginosa PA01
ucggucucguaggcguagaagc

SEQ ID NO: 5582 - RNA, 22 nt, Pseudomonas aeruginosa PA01
ucgucggcccgcugcaacugcc

SEQ ID NO: 5583 - RNA, 22 nt, Pseudomonas aeruginosa PA01
ucgucggccucguucucgauga

SEQ ID NO: 5584 - RNA, 22 nt, Pseudomonas aeruginosa PA01
ucgucggccuucaacgccgccg

SEQ ID NO: 5585 - RNA, 22 nt, Pseudomonas aeruginosa PA01
ucgucggcgaaaugccggucgc

SEQ ID NO: 5586 - RNA, 22 nt, Pseudomonas aeruginosa PA01
ucgucggcgaacuccgagcgca

SEQ ID NO: 5587 - RNA, 22 nt, Pseudomonas aeruginosa PA01
ucgucggcgccaacgaccuggu

SEQ ID NO: 5588 - RNA, 20 nt, Pseudomonas aeruginosa PA01
ucgucggcgcccuggugauc

SEQ ID NO: 5589 - RNA, 22 nt, Pseudomonas aeruginosa PA01
uccuugagguugaucguccagu

SEQ ID NO: 5590 - RNA, 22 nt, Pseudomonas aeruginosa PA01
ucgagcgcuugcgcugaugcag

SEQ ID NO: 5591 - RNA, 22 nt, Pseudomonas aeruginosa PA01
ucgacccggcuuuccgccucgg

SEQ ID NO: 5592 - RNA, 22 nt, Pseudomonas aeruginosa PA01
uccgggucgcggucggccugga

SEQ ID NO: 5593 - RNA, 22 nt, Pseudomonas aeruginosa PA01
uccgucgacggcccgcuggcgg

SEQ ID NO: 5594 - RNA, 22 nt, Pseudomonas aeruginosa PA01
uccucggcgaucacccggcgcu

SEQ ID NO: 5595 - RNA, 22 nt, Pseudomonas aeruginosa PA01
uccugcagaccgccaucgccga

SEQ ID NO: 5596 - RNA, 22 nt, Pseudomonas aeruginosa PA01
uccugcucgaucacggccuggu

SEQ ID NO: 5597 - RNA, 22 nt, Pseudomonas aeruginosa PA01
uccugcggcgggccgucaugca

SEQ ID NO: 5598 - RNA, 22 nt, Pseudomonas aeruginosa PA01
ucccgcgcucggugggccaggu

SEQ ID NO: 5599 - RNA, 22 nt, Pseudomonas aeruginosa PA01
ucccggacgaugucggcacuga

SEQ ID NO: 5600 - RNA, 22 nt, Pseudomonas aeruginosa PA01
ucccggcgcgguccaggcgcgg

SEQ ID NO: 5601 - RNA, 22 nt, Pseudomonas aeruginosa PA01
uccccggucgaugcggaagcuc

SEQ ID NO: 5602 - RNA, 22 nt, Pseudomonas aeruginosa PA01
uccaggcuggcggcgucgaucc

SEQ ID NO: 5603 - RNA, 22 nt, Pseudomonas aeruginosa PA01
uccagguagcgcucgaggaagg

SEQ ID NO: 5604 - RNA, 22 nt, Pseudomonas aeruginosa PA01
ucccaggcggucagucgcgagc

SEQ ID NO: 5605 - RNA, 22 nt, Pseudomonas aeruginosa PA01
uccggcgggcagccgcugugga

SEQ ID NO: 5606 - RNA, 22 nt, Pseudomonas aeruginosa PA01
uccggcucgacgccggcgaggu

SEQ ID NO: 5607 - RNA, 22 nt, Pseudomonas aeruginosa PA01
ucccugggcagccccuugaguu

SEQ ID NO: 5608 - RNA, 22 nt, Pseudomonas aeruginosa PA01
uccgaggacgggcagagguggu

SEQ ID NO: 5609 - RNA, 22 nt, Pseudomonas aeruginosa PA01
uccgaucggccugcgccacgau

SEQ ID NO: 5610 - RNA, 22 nt, Pseudomonas aeruginosa PA01
uccgccgcguuccacuccagcg

SEQ ID NO: 5611 - RNA, 22 nt, Pseudomonas aeruginosa PA01
uccgccggcgacagcaguucgg

SEQ ID NO: 5612 - RNA, 22 nt, Pseudomonas aeruginosa PA01
uccgccgggugcacagcgaggg

SEQ ID NO: 5613 - RNA, 22 nt, Pseudomonas aeruginosa PA01
uacccggccugccuugccgucg

SEQ ID NO: 5614 - RNA, 22 nt, Pseudomonas aeruginosa PA01
uacaacuucggccaggaccuga

SEQ ID NO: 5615 - RNA, 22 nt, Pseudomonas aeruginosa PA01
uacugaccacgucuuccaggcu

SEQ ID NO: 5616 - RNA, 22 nt, Pseudomonas aeruginosa PA01
uagcccugguucgugcccugca

SEQ ID NO: 5617 - RNA, 22 nt, Pseudomonas aeruginosa PA01
uagcgcgcauucggaucgcccg

SEQ ID NO: 5618 - RNA, 22 nt, Pseudomonas aeruginosa PA01
uagcgggagaacucgcggccgc

SEQ ID NO: 5619 - RNA, 22 nt, Pseudomonas aeruginosa PA01
uagcuccagccgaagccuucga

SEQ ID NO: 5620 - RNA, 22 nt, Pseudomonas aeruginosa PA01
uauugacacugaacgagccgga

SEQ ID NO: 5621 - RNA, 19 nt, Pseudomonas aeruginosa PA01
uauuuccagcgcuacaucc

SEQ ID NO: 5622 - RNA, 21 nt, Pseudomonas aeruginosa PA01
gccgcacgcugcccuccaggc

SEQ ID NO: 5623 - RNA, 20 nt, Pseudomonas aeruginosa PA01
gccgaccggcggcccaggcg

SEQ ID NO: 5624 - RNA, 22 nt, Pseudomonas aeruginosa PA01
gccgagcgagaacguuccgccg

SEQ ID NO: 5625 - RNA, 21 nt, Pseudomonas aeruginosa PA01
gccgagcgauucggcgggagg

SEQ ID NO: 5626 - RNA, 22 nt, Pseudomonas aeruginosa PA01
gccgaggaauuuccccgcgaac

SEQ ID NO: 5627 - RNA, 22 nt, Pseudomonas aeruginosa PA01
gccgaggagaccuggcggguac

SEQ ID NO: 5628 - RNA, 22 nt, Pseudomonas aeruginosa PA01
gccgaggaguuccggcucugag

SEQ ID NO: 5629 - RNA, 22 nt, Pseudomonas aeruginosa PA01
gccgcacacgcccagcagcgau

SEQ ID NO: 5630 - RNA, 22 nt, Pseudomonas aeruginosa PA01
gcccaggcccuggcgcgggcuc

SEQ ID NO: 5631 - RNA, 22 nt, Pseudomonas aeruginosa PA01
gcccagggacagcccgggcgua

SEQ ID NO: 5632 - RNA, 22 nt, Pseudomonas aeruginosa PA01
gcccauggcgaaagcgccgccg

SEQ ID NO: 5633 - RNA, 22 nt, Pseudomonas aeruginosa PA01
gccccgcgcagguugaucacgc

SEQ ID NO: 5634 - RNA, 22 nt, Pseudomonas aeruginosa PA01
gccccgcgggaggacggcugcu

SEQ ID NO: 5635 - RNA, 22 nt, Pseudomonas aeruginosa PA01
gccccucgcggaucucggcgau

SEQ ID NO: 5636 - RNA, 20 nt, Pseudomonas aeruginosa PA01
gcccggccgcuguggcugcg

SEQ ID NO: 5637 - RNA, 22 nt, Pseudomonas aeruginosa PA01
gcccggcgaagucucgcggccg

SEQ ID NO: 5638 - RNA, 22 nt, Pseudomonas aeruginosa PA01
gcccggcggcacgcugggccug

SEQ ID NO: 5639 - RNA, 18 nt, Pseudomonas aeruginosa PA01
gcccggcguaguccagca

SEQ ID NO: 5640 - RNA, 22 nt, Pseudomonas aeruginosa PA01
gcccggcucgaagagcgugcgc

SEQ ID NO: 5641 - RNA, 22 nt, Pseudomonas aeruginosa PA01
gcccggcuggcgcucggccugg

SEQ ID NO: 5642 - RNA, 22 nt, Pseudomonas aeruginosa PA01
gcccggcuguccaggcggccgg

SEQ ID NO: 5643 - RNA, 22 nt, Pseudomonas aeruginosa PA01
gcccggcuucccggcggaaagu

SEQ ID NO: 5644 - RNA, 22 nt, Pseudomonas aeruginosa PA01
gcccgucguagccggcggcgug

SEQ ID NO: 5645 - RNA, 22 nt, Pseudomonas aeruginosa PA01
gcccucgccgacgaccugcgcc

SEQ ID NO: 5646 - RNA, 22 nt, Pseudomonas aeruginosa PA01
gcccuggagguuguccggcaag

SEQ ID NO: 5647 - RNA, 22 nt, Pseudomonas aeruginosa PA01
gcccuggugcagcgcaaggccg

SEQ ID NO: 5648 - RNA, 22 nt, Pseudomonas aeruginosa PA01
gccgccccggcuuccucauccg

SEQ ID NO: 5649 - RNA, 22 nt, Pseudomonas aeruginosa PA01
gccgccgaccugggcugcggca

SEQ ID NO: 5650 - RNA, 22 nt, Pseudomonas aeruginosa PA01
gccgccgaggcugaugcgcugc

SEQ ID NO: 5651 - RNA, 17 nt, Pseudomonas aeruginosa PA01
gccgccgaggucggcga

SEQ ID NO: 5652 - RNA, 22 nt, Pseudomonas aeruginosa PA01
gccgccgagucccuggagcgug

SEQ ID NO: 5653 - RNA, 22 nt, Pseudomonas aeruginosa PA01
gccgccgccagaucgaucaucg

SEQ ID NO: 5654 - RNA, 22 nt, Pseudomonas aeruginosa PA01
gccgccggauugaugaugauga

SEQ ID NO: 5655 - RNA, 22 nt, Pseudomonas aeruginosa PA01
gccgccuggaagccgccggcuu

SEQ ID NO: 5656 - RNA, 22 nt, Pseudomonas aeruginosa PA01
gccgcgccccucggcuuccuug

SEQ ID NO: 5657 - RNA, 22 nt, Pseudomonas aeruginosa PA01
gccgcuggaacuggggucgcug

SEQ ID NO: 5658 - RNA, 22 nt, Pseudomonas aeruginosa PA01
gccggacguaccagccggcggc

SEQ ID NO: 5659 - RNA, 22 nt, Pseudomonas aeruginosa PA01
gccggagacgauggcgacguuc

SEQ ID NO: 5660 - RNA, 22 nt, Pseudomonas aeruginosa PA01
gccggagaucaccgagccgucc

SEQ ID NO: 5661 - RNA, 22 nt, Pseudomonas aeruginosa PA01
gccggagcugccggccgaccug

SEQ ID NO: 5662 - RNA, 22 nt, Pseudomonas aeruginosa PA01
gccggcagcacaccgggcaguc

SEQ ID NO: 5663 - RNA, 22 nt, Pseudomonas aeruginosa PA01
gccggcagccucaagcaggugg

SEQ ID NO: 5664 - RNA, 22 nt, Pseudomonas aeruginosa PA01
gccggcagguuggcgcgcaggu

SEQ ID NO: 5665 - RNA, 22 nt, Pseudomonas aeruginosa PA01
gccggccaguucaccggcgcgc

SEQ ID NO: 5666 - RNA, 22 nt, Pseudomonas aeruginosa PA01
gccggccccgcaauucggucug

SEQ ID NO: 5667 - RNA, 22 nt, Pseudomonas aeruginosa PA01
gccggccccggcgccauguuga

SEQ ID NO: 5668 - RNA, 22 nt, Pseudomonas aeruginosa PA01
gccggcccugucgggcaggccg

SEQ ID NO: 5669 - RNA, 22 nt, Pseudomonas aeruginosa PA01
gccggccgacgccuggauggcc

SEQ ID NO: 5670 - RNA, 22 nt, Pseudomonas aeruginosa PA01
gccggccgagaaggucgcguag

SEQ ID NO: 5671 - RNA, 22 nt, Pseudomonas aeruginosa PA01
gccggccgcccucgucgaguuc

SEQ ID NO: 5672 - RNA, 22 nt, Pseudomonas aeruginosa PA01
gccggccguagggaaucgaacg

SEQ ID NO: 5673 - RNA, 22 nt, Pseudomonas aeruginosa PA01
gccggccguugcaauggcugua

SEQ ID NO: 5674 - RNA, 22 nt, Pseudomonas aeruginosa PA01
gccggccuggagcgccugggcg

SEQ ID NO: 5675 - RNA, 22 nt, Pseudomonas aeruginosa PA01
gccggcgacggcucgcuccuga

SEQ ID NO: 5676 - RNA, 22 nt, Pseudomonas aeruginosa PA01
gccggcgagcaguuggcgaugu

SEQ ID NO: 5677 - RNA, 22 nt, Pseudomonas aeruginosa PA01
gccggcgaggaaaucgccggag

SEQ ID NO: 5678 - RNA, 22 nt, Pseudomonas aeruginosa PA01
gccggcgaugguguagcggucc

SEQ ID NO: 5679 - RNA, 21 nt, Pseudomonas aeruginosa PA01
gccggcgccgcagagcuggcc

SEQ ID NO: 5680 - RNA, 22 nt, Pseudomonas aeruginosa PA01
gccggcgcggacuuccuggauc

SEQ ID NO: 5681 - RNA, 22 nt, Pseudomonas aeruginosa PA01
gccggcucaucagcacccgcug

SEQ ID NO: 5682 - RNA, 22 nt, Pseudomonas aeruginosa PA01
gccgggaggaagucauugcccg

SEQ ID NO: 5683 - RNA, 22 nt, Pseudomonas aeruginosa PA01
gccgggagugaagaaggcgaug

SEQ ID NO: 5684 - RNA, 22 nt, Pseudomonas aeruginosa PA01
gccgggauggaggagcaucucg

SEQ ID NO: 5685 - RNA, 22 nt, Pseudomonas aeruginosa PA01
gccgggauuuccugcaacugcg

SEQ ID NO: 5686 - RNA, 22 nt, Pseudomonas aeruginosa PA01
gccgggcgauagccggggagau

SEQ ID NO: 5687 - RNA, 22 nt, Pseudomonas aeruginosa PA01
gccggggccgcuucggcuuccg

SEQ ID NO: 5688 - RNA, 22 nt, Pseudomonas aeruginosa PA01
gccggggccggcgaucuugcug

SEQ ID NO: 5689 - RNA, 22 nt, Pseudomonas aeruginosa PA01
gccggggcgcucgaccuggagg

SEQ ID NO: 5690 - RNA, 21 nt, Pseudomonas aeruginosa PA01
gccggggcguucuucuucgcu

SEQ ID NO: 5691 - RNA, 22 nt, Pseudomonas aeruginosa PA01
gccgggggugaggccgguccac

SEQ ID NO: 5692 - RNA, 22 nt, Pseudomonas aeruginosa PA01
gccggugacccuggcgaucggc

SEQ ID NO: 5693 - RNA, 22 nt, Pseudomonas aeruginosa PA01
gccggugagcuucgacgugucg

SEQ ID NO: 5694 - RNA, 22 nt, Pseudomonas aeruginosa PA01
gccgucgauccucgccgcguuc

SEQ ID NO: 5695 - RNA, 22 nt, Pseudomonas aeruginosa PA01
gccgucggccauuaccagguga

SEQ ID NO: 5696 - RNA, 22 nt, Pseudomonas aeruginosa PA01
gccgucggcgaccacgauggcc

SEQ ID NO: 5697 - RNA, 22 nt, Pseudomonas aeruginosa PA01
gccguggaagcucgccacgccg

SEQ ID NO: 5698 - RNA, 22 nt, Pseudomonas aeruginosa PA01
gcgaggaacuggccggcggcgc

SEQ ID NO: 5699 - RNA, 22 nt, Pseudomonas aeruginosa PA01
gcgaggaaggcggccaggucag

SEQ ID NO: 5700 - RNA, 22 nt, Pseudomonas aeruginosa PA01
gcgaggaauucgccuugcugcg

SEQ ID NO: 5701 - RNA, 22 nt, Pseudomonas aeruginosa PA01
gcgaggagccgcuggacugguc

SEQ ID NO: 5702 - RNA, 21 nt, Pseudomonas aeruginosa PA01
gcgaggccaccagcccgguga

SEQ ID NO: 5703 - RNA, 22 nt, Pseudomonas aeruginosa PA01
gcgaggccaucgagcaggccgc

SEQ ID NO: 5704 - RNA, 22 nt, Pseudomonas aeruginosa PA01
gcgagggcuucgccgaggcguu

SEQ ID NO: 5705 - RNA, 22 nt, Pseudomonas aeruginosa PA01
gcgacgcccagggccgcuggcu

SEQ ID NO: 5706 - RNA, 22 nt, Pseudomonas aeruginosa PA01
gcgacgccgaggcgacgcaggg

SEQ ID NO: 5707 - RNA, 22 nt, Pseudomonas aeruginosa PA01
gcgacggagucaacgacguacc

SEQ ID NO: 5708 - RNA, 22 nt, Pseudomonas aeruginosa PA01
gcgacggcaggcgcuccagcaa

SEQ ID NO: 5709 - RNA, 22 nt, Pseudomonas aeruginosa PA01
gcgagagggcgcggcgaaugau

SEQ ID NO: 5710 - RNA, 17 nt, Pseudomonas aeruginosa PA01
gcgagcagcuugccgcc

SEQ ID NO: 5711 - RNA, 23 nt, Pseudomonas aeruginosa PA01
gcgagcagcuugccgccacgguu

SEQ ID NO: 5712 - RNA, 22 nt, Pseudomonas aeruginosa PA01
gcgagccgaugcaacgggcgac

SEQ ID NO: 5713 - RNA, 22 nt, Pseudomonas aeruginosa PA01
gcgagccgcuggagaaggcggu

SEQ ID NO: 5714 - RNA, 22 nt, Pseudomonas aeruginosa PA01
gcgcagccgggacucuggcugg

SEQ ID NO: 5715 - RNA, 22 nt, Pseudomonas aeruginosa PA01
gcgcagcgaauccaggggcgcc

SEQ ID NO: 5716 - RNA, 22 nt, Pseudomonas aeruginosa PA01
gcgcagcgaccugccgcaacug

SEQ ID NO: 5717 - RNA, 22 nt, Pseudomonas aeruginosa PA01
gcgcagcgcccuggaaggcucg

SEQ ID NO: 5718 - RNA, 23 nt, Pseudomonas aeruginosa PA01
gcgcaggcccaugaacagcaugc

SEQ ID NO: 5719 - RNA, 22 nt, Pseudomonas aeruginosa PA01
gcgcaggccugccggaugaucg

SEQ ID NO: 5720 - RNA, 22 nt, Pseudomonas aeruginosa PA01
gcgcaucgaccugcguggccug

SEQ ID NO: 5721 - RNA, 22 nt, Pseudomonas aeruginosa PA01
gcgccaccucgcuguaugccuc

SEQ ID NO: 5722 - RNA, 22 nt, Pseudomonas aeruginosa PA01
gcgccacgguuaucgcccaguu

SEQ ID NO: 5723 - RNA, 22 nt, Pseudomonas aeruginosa PA01
gcgaacagcagaugcucgccau

SEQ ID NO: 5724 - RNA, 22 nt, Pseudomonas aeruginosa PA01
gcgaagcggccgucggccuuga

SEQ ID NO: 5725 - RNA, 22 nt, Pseudomonas aeruginosa PA01
gcgaccagccuucgcgcuugcc

SEQ ID NO: 5726 - RNA, 22 nt, Pseudomonas aeruginosa PA01
gcgaccaguucggcugggccgg

SEQ ID NO: 5727 - RNA, 22 nt, Pseudomonas aeruginosa PA01
gcgaccgccgcuggcuggcguu

SEQ ID NO: 5728 - RNA, 22 nt, Pseudomonas aeruginosa PA01
gcgaccgguggucgggcgcugc

SEQ ID NO: 5729 - RNA, 22 nt, Pseudomonas aeruginosa PA01
gcgaugcgcgccuccagcgucu

SEQ ID NO: 5730 - RNA, 22 nt, Pseudomonas aeruginosa PA01
gcgaugcggugaccucccugcg

SEQ ID NO: 5731 - RNA, 22 nt, Pseudomonas aeruginosa PA01
gcgcaagcucgacgagaacggc

SEQ ID NO: 5732 - RNA, 22 nt, Pseudomonas aeruginosa PA01
gccuccccggacaccguggcaa

SEQ ID NO: 5733 - RNA, 22 nt, Pseudomonas aeruginosa PA01
gccuggagaauaucgucggcga

SEQ ID NO: 5734 - RNA, 22 nt, Pseudomonas aeruginosa PA01
gccuggagaucgagcagucccc

SEQ ID NO: 5735 - RNA, 22 nt, Pseudomonas aeruginosa PA01
gccuggagggucacgcugucgu

SEQ ID NO: 5736 - RNA, 22 nt, Pseudomonas aeruginosa PA01
gccuggagguccaggcgcuggc

SEQ ID NO: 5737 - RNA, 22 nt, Pseudomonas aeruginosa PA01
gccugcgauuuccugcgcguuc

SEQ ID NO: 5738 - RNA, 22 nt, Pseudomonas aeruginosa PA01
gccugcgcaacuggccgcgcug

SEQ ID NO: 5739 - RNA, 22 nt, Pseudomonas aeruginosa PA01
gccuuggucgccgcgaucaccc

SEQ ID NO: 5740 - RNA, 22 nt, Pseudomonas aeruginosa PA01
gccuuggugcacgaggcgcagg

SEQ ID NO: 5741 - RNA, 22 nt, Pseudomonas aeruginosa PA01
gccugucccgcgaacuggagaa

SEQ ID NO: 5742 - RNA, 22 nt, Pseudomonas aeruginosa PA01
gccugggcgaugcccgcgucga

SEQ ID NO: 5743 - RNA, 22 nt, Pseudomonas aeruginosa PA01
gccugggguagggagggcgaca

SEQ ID NO: 5744 - RNA, 22 nt, Pseudomonas aeruginosa PA01
gccugagcgagacucaggacac

SEQ ID NO: 5745 - RNA, 22 nt, Pseudomonas aeruginosa PA01
gccugcagaaggucggcggcga

SEQ ID NO: 5746 - RNA, 22 nt, Pseudomonas aeruginosa PA01
gccuucuucauguccggaguuu

SEQ ID NO: 5747 - RNA, 22 nt, Pseudomonas aeruginosa PA01
gcgccgcggaaagcagccuggc

SEQ ID NO: 5748 - RNA, 22 nt, Pseudomonas aeruginosa PA01
gcgccagcgaacaacugggcga

SEQ ID NO: 5749 - RNA, 22 nt, Pseudomonas aeruginosa PA01
gcgccagcgcaccgccaugggc

SEQ ID NO: 5750 - RNA, 22 nt, Pseudomonas aeruginosa PA01
gcgcccacuccaaccaccugca

SEQ ID NO: 5751 - RNA, 22 nt, Pseudomonas aeruginosa PA01
gcgccccggugccgccguggaa

SEQ ID NO: 5752 - RNA, 22 nt, Pseudomonas aeruginosa PA01
gcgccccucuugcccaucgagg

SEQ ID NO: 5753 - RNA, 22 nt, Pseudomonas aeruginosa PA01
gcgccccuggaagagccgccgg

SEQ ID NO: 5754 - RNA, 22 nt, Pseudomonas aeruginosa PA01
gcgccccugguccagcggcagc

SEQ ID NO: 5755 - RNA, 22 nt, Pseudomonas aeruginosa PA01
gcgcccgcgacuacccgcugga

SEQ ID NO: 5756 - RNA, 22 nt, Pseudomonas aeruginosa PA01
gcgcccggccgagcgccaucug

SEQ ID NO: 5757 - RNA, 22 nt, Pseudomonas aeruginosa PA01
gcgcccggugugccggcuggcg

SEQ ID NO: 5758 - RNA, 22 nt, Pseudomonas aeruginosa PA01
gcgccgagcaauucggcgagca

SEQ ID NO: 5759 - RNA, 22 nt, Pseudomonas aeruginosa PA01
gcgccgaggcaggcguggaccu

SEQ ID NO: 5760 - RNA, 22 nt, Pseudomonas aeruginosa PA01
gcgccgccgccgggguguccag

SEQ ID NO: 5761 - RNA, 22 nt, Pseudomonas aeruginosa PA01
gcgccggcaggcccugggccuc

SEQ ID NO: 5762 - RNA, 18 nt, Pseudomonas aeruginosa PA01
gcgccgggcugcccuggg

SEQ ID NO: 5763 - RNA, 22 nt, Pseudomonas aeruginosa PA01
gcgccggggaugaucggcgagc

SEQ ID NO: 5764 - RNA, 22 nt, Pseudomonas aeruginosa PA01
gcgccggguuucaucgucgcca

SEQ ID NO: 5765 - RNA, 20 nt, Pseudomonas aeruginosa PA01
gcgccuggugcagcggaucc

SEQ ID NO: 5766 - RNA, 22 nt, Pseudomonas aeruginosa PA01
gcgcgaaggacggccgcggguu

SEQ ID NO: 5767 - RNA, 22 nt, Pseudomonas aeruginosa PA01
gcgcgacagugguagcggcgac

SEQ ID NO: 5768 - RNA, 22 nt, Pseudomonas aeruginosa PA01
gcgcgacgcggggauggacgug

SEQ ID NO: 5769 - RNA, 22 nt, Pseudomonas aeruginosa PA01
gcgcgacgcuguugcuggcggg

SEQ ID NO: 5770 - RNA, 22 nt, Pseudomonas aeruginosa PA01
gcgcgagcgccugggucggcag

SEQ ID NO: 5771 - RNA, 22 nt, Pseudomonas aeruginosa PA01
gcgcgaggaacuggccggcgag

SEQ ID NO: 5772 - RNA, 22 nt, Pseudomonas aeruginosa PA01
gcgcgaggugcuggcgccgagg

SEQ ID NO: 5773 - RNA, 22 nt, Pseudomonas aeruginosa PA01
gcgcgcaccuggaccgcaacaa

SEQ ID NO: 5774 - RNA, 22 nt, Pseudomonas aeruginosa PA01
gcgcgcaccuggcgccguuccu

SEQ ID NO: 5775 - RNA, 17 nt, Pseudomonas aeruginosa PA01
gcgcgcacgacaggcgc

SEQ ID NO: 5776 - RNA, 22 nt, Pseudomonas aeruginosa PA01
gcgcgcagcaguggcuggcguu

SEQ ID NO: 5777 - RNA, 22 nt, Pseudomonas aeruginosa PA01
gcgcgcagcgagacgguggugc

SEQ ID NO: 5778 - RNA, 22 nt, Pseudomonas aeruginosa PA01
gcgcgcaggagcccggcaccgg

SEQ ID NO: 5779 - RNA, 20 nt, Pseudomonas aeruginosa PA01
gcgcgcaggccaccuucgac

SEQ ID NO: 5780 - RNA, 23 nt, Pseudomonas aeruginosa PA01
gcgcgcaggccaucggcaucguc

SEQ ID NO: 5781 - RNA, 22 nt, Pseudomonas aeruginosa PA01
gcgcgccagcaggcugccgggu

SEQ ID NO: 5782 - RNA, 22 nt, Pseudomonas aeruginosa PA01
gcgcgccgaaucccugggucgg

SEQ ID NO: 5783 - RNA, 22 nt, Pseudomonas aeruginosa PA01
gcgcgccgaccagucgcgagga

SEQ ID NO: 5784 - RNA, 22 nt, Pseudomonas aeruginosa PA01
gcgcgccggcaucaagagagua

SEQ ID NO: 5785 - RNA, 22 nt, Pseudomonas aeruginosa PA01
gcgcgccucuuccagcagccag

SEQ ID NO: 5786 - RNA, 22 nt, Pseudomonas aeruginosa PA01
gcgcgccuucaagagcgucggc

SEQ ID NO: 5787 - RNA, 22 nt, Pseudomonas aeruginosa PA01
gcgcgcgagaaagcggucggug

SEQ ID NO: 5788 - RNA, 22 nt, Pseudomonas aeruginosa PA01
gcgcgcggcuagaggaagaguc

SEQ ID NO: 5789 - RNA, 22 nt, Pseudomonas aeruginosa PA01
gcgcgcgguucucgauggagcc

SEQ ID NO: 5790 - RNA, 22 nt, Pseudomonas aeruginosa PA01
gcgcgcucggggugggcuuguu

SEQ ID NO: 5791 - RNA, 22 nt, Pseudomonas aeruginosa PA01
gcgcgcucuggggcaaggucug

SEQ ID NO: 5792 - RNA, 22 nt, Pseudomonas aeruginosa PA01
gcgcgcuggugcgacaagggcu

SEQ ID NO: 5793 - RNA, 16 nt, Pseudomonas aeruginosa PA01
gcgcggacgccgcgaa

SEQ ID NO: 5794 - RNA, 22 nt, Pseudomonas aeruginosa PA01
gcgcggcaccugccgggcagcc

SEQ ID NO: 5795 - RNA, 22 nt, Pseudomonas aeruginosa PA01
gcgcggccgaaggccagguucu

SEQ ID NO: 5796 - RNA, 22 nt, Pseudomonas aeruginosa PA01
gcgcggcgaacuucacccaugc

SEQ ID NO: 5797 - RNA, 22 nt, Pseudomonas aeruginosa PA01
gcgcggcgccucguccucgacc

SEQ ID NO: 5798 - RNA, 22 nt, Pseudomonas aeruginosa PA01
gcgcggcggaacagguggcgca

SEQ ID NO: 5799 - RNA, 22 nt, Pseudomonas aeruginosa PA01
gcgcggcgugucguacuccucc

SEQ ID NO: 5800 - RNA, 23 nt, Pseudomonas aeruginosa PA01
gcgcgggagcugguggugcccug

SEQ ID NO: 5801 - RNA, 21 nt, Pseudomonas aeruginosa PA01
gcgcgggcgagggcguagguc

SEQ ID NO: 5802 - RNA, 19 nt, Pseudomonas aeruginosa PA01
gcgcggggugcggaugcug

SEQ ID NO: 5803 - RNA, 22 nt, Pseudomonas aeruginosa PA01
gcgcgguggucuucaggccggc

SEQ ID NO: 5804 - RNA, 21 nt, Pseudomonas aeruginosa PA01
gcgcggugucgccaucgcgac

SEQ ID NO: 5805 - RNA, 22 nt, Pseudomonas aeruginosa PA01
gcgcguccauggcggcgucgag

SEQ ID NO: 5806 - RNA, 22 nt, Pseudomonas aeruginosa PA01
gcgcgucgacguagcugcaggc

SEQ ID NO: 5807 - RNA, 22 nt, Pseudomonas aeruginosa PA01
gcgcgucgcccugggugacgcg

SEQ ID NO: 5808 - RNA, 22 nt, Pseudomonas aeruginosa PA01
gcgcgugcauuggcuggccggc

SEQ ID NO: 5809 - RNA, 22 nt, Pseudomonas aeruginosa PA01
gcgcguggccgaacuggccgcc

SEQ ID NO: 5810 - RNA, 22 nt, Pseudomonas aeruginosa PA01
gcgcuccagcacuucguccagc

SEQ ID NO: 5811 - RNA, 22 nt, Pseudomonas aeruginosa PA01
gcgcuggagguguuccgccgcg

SEQ ID NO: 5812 - RNA, 16 nt, Pseudomonas aeruginosa PA01
gcgcuggauacggcgg

SEQ ID NO: 5813 - RNA, 22 nt, Pseudomonas aeruginosa PA01
gcgcuggcgcaacggcucguca

SEQ ID NO: 5814 - RNA, 22 nt, Pseudomonas aeruginosa PA01
gcgcuggcguucgacgagcugg

SEQ ID NO: 5815 - RNA, 22 nt, Pseudomonas aeruginosa PA01
gcgcuggcugcgaucggcuggc

SEQ ID NO: 5816 - RNA, 22 nt, Pseudomonas aeruginosa PA01
gcgcuucuacaagcgacgccgg

SEQ ID NO: 5817 - RNA, 22 nt, Pseudomonas aeruginosa PA01
gcggucaccccgcccugcuccu

SEQ ID NO: 5818 - RNA, 22 nt, Pseudomonas aeruginosa PA01
gcggucaccggccagccggucu

SEQ ID NO: 5819 - RNA, 22 nt, Pseudomonas aeruginosa PA01
gcgguggccuacgaggccgaau

SEQ ID NO: 5820 - RNA, 22 nt, Pseudomonas aeruginosa PA01
gcgguggcgauccagcccggcg

SEQ ID NO: 5821 - RNA, 22 nt, Pseudomonas aeruginosa PA01
gcggaagaacucgaugacgccc

SEQ ID NO: 5822 - RNA, 22 nt, Pseudomonas aeruginosa PA01
gcggaagcgcugcgggucgucc

SEQ ID NO: 5823 - RNA, 22 nt, Pseudomonas aeruginosa PA01
gcggaauggcugucgccccaac

SEQ ID NO: 5824 - RNA, 22 nt, Pseudomonas aeruginosa PA01
gcggacgccuggcccguccugg

SEQ ID NO: 5825 - RNA, 22 nt, Pseudomonas aeruginosa PA01
gcggacgcucuucggugaagcg

SEQ ID NO: 5826 - RNA, 22 nt, Pseudomonas aeruginosa PA01
gcggagcgcuggucgcuguucc

SEQ ID NO: 5827 - RNA, 22 nt, Pseudomonas aeruginosa PA01
gcggauagcgcuggggcgcuau

SEQ ID NO: 5828 - RNA, 22 nt, Pseudomonas aeruginosa PA01
gcggcagcccgggcaacggcag

SEQ ID NO: 5829 - RNA, 22 nt, Pseudomonas aeruginosa PA01
gcggcagcgagcgccaggagga

SEQ ID NO: 5830 - RNA, 18 nt, Pseudomonas aeruginosa PA01
gcggccgguucgggaagu

SEQ ID NO: 5831 - RNA, 18 nt, Pseudomonas aeruginosa PA01
gcggcgccgggccagcag

SEQ ID NO: 5832 - RNA, 22 nt, Pseudomonas aeruginosa PA01
gcggcgcgggucuggcugagca

SEQ ID NO: 5833 - RNA, 22 nt, Pseudomonas aeruginosa PA01
gcggcgcguccaggcgaucgag

SEQ ID NO: 5834 - RNA, 18 nt, Pseudomonas aeruginosa PA01
gcggcgcguuggcgaucg

SEQ ID NO: 5835 - RNA, 22 nt, Pseudomonas aeruginosa PA01
gcggcggccucugguauggcaa

SEQ ID NO: 5836 - RNA, 22 nt, Pseudomonas aeruginosa PA01
gcggcggccugccccuggcgag

SEQ ID NO: 5837 - RNA, 22 nt, Pseudomonas aeruginosa PA01
gcggcggcgaacugggcgaagc

SEQ ID NO: 5838 - RNA, 22 nt, Pseudomonas aeruginosa PA01
gcggcggcgucucgugggccug

SEQ ID NO: 5839 - RNA, 22 nt, Pseudomonas aeruginosa PA01
gcggcggguaagcgcaagcggu

SEQ ID NO: 5840 - RNA, 22 nt, Pseudomonas aeruginosa PA01
gcggcgugacccuguccggcga

SEQ ID NO: 5841 - RNA, 22 nt, Pseudomonas aeruginosa PA01
gcggcgugccagaggcagaguu

SEQ ID NO: 5842 - RNA, 22 nt, Pseudomonas aeruginosa PA01
gcggcucgcugaaagccgagcc

SEQ ID NO: 5843 - RNA, 22 nt, Pseudomonas aeruginosa PA01
gcggcugcgccuggaacggcuc

SEQ ID NO: 5844 - RNA, 22 nt, Pseudomonas aeruginosa PA01
gcggcugguugaucucgugggc

SEQ ID NO: 5845 - RNA, 22 nt, Pseudomonas aeruginosa PA01
gcgggagccgcaggcgccccau

SEQ ID NO: 5846 - RNA, 22 nt, Pseudomonas aeruginosa PA01
gcgggaggaucgaauugcaggc

SEQ ID NO: 5847 - RNA, 22 nt, Pseudomonas aeruginosa PA01
gcgggaggcccuggauaccaug

SEQ ID NO: 5848 - RNA, 22 nt, Pseudomonas aeruginosa PA01
gcgggcagggccuugucagccc

SEQ ID NO: 5849 - RNA, 22 nt, Pseudomonas aeruginosa PA01
gcgggccggcgaacaaugcgug

SEQ ID NO: 5850 - RNA, 22 nt, Pseudomonas aeruginosa PA01
gcgggcgcccugccgaggcugg

SEQ ID NO: 5851 - RNA, 22 nt, Pseudomonas aeruginosa PA01
gcgggcgcgggucgucguugcc

SEQ ID NO: 5852 - RNA, 22 nt, Pseudomonas aeruginosa PA01
gcgggcgggugcuggaacugac

SEQ ID NO: 5853 - RNA, 22 nt, Pseudomonas aeruginosa PA01
gcggggcaucgcuggcccagcg

SEQ ID NO: 5854 - RNA, 22 nt, Pseudomonas aeruginosa PA01
gcguccggaaaaggucucggcc

SEQ ID NO: 5855 - RNA, 22 nt, Pseudomonas aeruginosa PA01
gcguccgggguuuccugcuggc

SEQ ID NO: 5856 - RNA, 22 nt, Pseudomonas aeruginosa PA01
gcgucgcggacuaccugcaggg

SEQ ID NO: 5857 - RNA, 22 nt, Pseudomonas aeruginosa PA01
gcgucggccgcagaugaacucg

SEQ ID NO: 5858 - RNA, 22 nt, Pseudomonas aeruginosa PA01
gcgucggcugcaucgcacgacc

SEQ ID NO: 5859 - RNA, 19 nt, Pseudomonas aeruginosa PA01
gcgucggcuuccuugacga

SEQ ID NO: 5860 - RNA, 21 nt, Pseudomonas aeruginosa PA01
gcgugcagcucgcccucagcc

SEQ ID NO: 5861 - RNA, 22 nt, Pseudomonas aeruginosa PA01
gcgugccggacuggguggugag

SEQ ID NO: 5862 - RNA, 22 nt, Pseudomonas aeruginosa PA01
gcgugccgucggucagcgguac

SEQ ID NO: 5863 - RNA, 22 nt, Pseudomonas aeruginosa PA01
gcgugccgucuuccagggugcc

SEQ ID NO: 5864 - RNA, 22 nt, Pseudomonas aeruginosa PA01
gcucgcgguacggagccggccc

SEQ ID NO: 5865 - RNA, 22 nt, Pseudomonas aeruginosa PA01
gcucgcucaucaucacgaaauc

SEQ ID NO: 5866 - RNA, 17 nt, Pseudomonas aeruginosa PA01
gcucgcucggcggcagc

SEQ ID NO: 5867 - RNA, 22 nt, Pseudomonas aeruginosa PA01
gcucgcugggguccagccagag

SEQ ID NO: 5868 - RNA, 22 nt, Pseudomonas aeruginosa PA01
gcucggcguggcguugccgggc

SEQ ID NO: 5869 - RNA, 22 nt, Pseudomonas aeruginosa PA01
gcucgggcaguugcgccgcugu

SEQ ID NO: 5870 - RNA, 22 nt, Pseudomonas aeruginosa PA01
gcucgguccuguugcuggccca

SEQ ID NO: 5871 - RNA, 18 nt, Pseudomonas aeruginosa PA01
gcucggucugugccgggu

SEQ ID NO: 5872 - RNA, 22 nt, Pseudomonas aeruginosa PA01
gcucgucggugaccggcgagac

SEQ ID NO: 5873 - RNA, 22 nt, Pseudomonas aeruginosa PA01
gcuccauuuauccaggggcaga

SEQ ID NO: 5874 - RNA, 22 nt, Pseudomonas aeruginosa PA01
gcucccguccacgcggcaacgg

SEQ ID NO: 5875 - RNA, 22 nt, Pseudomonas aeruginosa PA01
gcuccgccuucuugucguugug

SEQ ID NO: 5876 - RNA, 22 nt, Pseudomonas aeruginosa PA01
gcuccgcucuuggcgccgccca

SEQ ID NO: 5877 - RNA, 22 nt, Pseudomonas aeruginosa PA01
gcuccggcaggugaucguaguc

SEQ ID NO: 5878 - RNA, 21 nt, Pseudomonas aeruginosa PA01
gcuccggcugaucgucggcau

SEQ ID NO: 5879 - RNA, 22 nt, Pseudomonas aeruginosa PA01
gcuccucuggaaccguucgaac

SEQ ID NO: 5880 - RNA, 22 nt, Pseudomonas aeruginosa PA01
gcuccugcgcgagcgccuggag

SEQ ID NO: 5881 - RNA, 22 nt, Pseudomonas aeruginosa PA01
gcucgccgacgucgccagcgac

SEQ ID NO: 5882 - RNA, 22 nt, Pseudomonas aeruginosa PA01
gcucgccuggcugcgcagcgag

SEQ ID NO: 5883 - RNA, 22 nt, Pseudomonas aeruginosa PA01
gcucgcgauugccguccagcca

SEQ ID NO: 5884 - RNA, 22 nt, Pseudomonas aeruginosa PA01
ggagguccgucaugccgcucga

SEQ ID NO: 5885 - RNA, 22 nt, Pseudomonas aeruginosa PA01
ggagucgcccucgaccaggaac

SEQ ID NO: 5886 - RNA, 22 nt, Pseudomonas aeruginosa PA01
ggaggaaggcggugcggaccuu

SEQ ID NO: 5887 - RNA, 22 nt, Pseudomonas aeruginosa PA01
ggaggcgccgcgcuggaagcug

SEQ ID NO: 5888 - RNA, 22 nt, Pseudomonas aeruginosa PA01
ggagggcgaguuccugguggau

SEQ ID NO: 5889 - RNA, 22 nt, Pseudomonas aeruginosa PA01
ggagggcgccagcgaggugccg

SEQ ID NO: 5890 - RNA, 22 nt, Pseudomonas aeruginosa PA01
ggaucggaaaagugcuggcgag

SEQ ID NO: 5891 - RNA, 22 nt, Pseudomonas aeruginosa PA01
ggcaccagcaggcgcgaggcga

SEQ ID NO: 5892 - RNA, 20 nt, Pseudomonas aeruginosa PA01
ggcagaugcgauccagcucc

SEQ ID NO: 5893 - RNA, 21 nt, Pseudomonas aeruginosa PA01
ggaugccggcauguucggcgg

SEQ ID NO: 5894 - RNA, 22 nt, Pseudomonas aeruginosa PA01
ggaugcgcaggucggcgugcuc

SEQ ID NO: 5895 - RNA, 23 nt, Pseudomonas aeruginosa PA01
ggaugcugucgacccgcucgcgc

SEQ ID NO: 5896 - RNA, 23 nt, Pseudomonas aeruginosa PA01
ggccacacaggugcccgccggga

SEQ ID NO: 5897 - RNA, 22 nt, Pseudomonas aeruginosa PA01
ggccagcaggaugcgcccggcg

SEQ ID NO: 5898 - RNA, 22 nt, Pseudomonas aeruginosa PA01
ggcagcuucgaccgcccguucg

SEQ ID NO: 5899 - RNA, 22 nt, Pseudomonas aeruginosa PA01
ggcaggaagcuuuccggcaguu

SEQ ID NO: 5900 - RNA, 22 nt, Pseudomonas aeruginosa PA01
ggcagcagguguggaaggccuc

SEQ ID NO: 5901 - RNA, 22 nt, Pseudomonas aeruginosa PA01
ggcagccgcgaggucgccgggc

SEQ ID NO: 5902 - RNA, 22 nt, Pseudomonas aeruginosa PA01
ggccgcgcuggcggaggaggaa

SEQ ID NO: 5903 - RNA, 22 nt, Pseudomonas aeruginosa PA01
ggccgcucugcugcagggccug

SEQ ID NO: 5904 - RNA, 22 nt, Pseudomonas aeruginosa PA01
ggccggcaccgaugucaccgcg

SEQ ID NO: 5905 - RNA, 22 nt, Pseudomonas aeruginosa PA01
ggccggcgaaccuggcaacugg

SEQ ID NO: 5906 - RNA, 22 nt, Pseudomonas aeruginosa PA01
ggccggcgaacucgcggucggu

SEQ ID NO: 5907 - RNA, 22 nt, Pseudomonas aeruginosa PA01
ggccggcgacgguggccgaggu

SEQ ID NO: 5908 - RNA, 22 nt, Pseudomonas aeruginosa PA01
ggccggcgccuguccgaccugc

SEQ ID NO: 5909 - RNA, 22 nt, Pseudomonas aeruginosa PA01
ggccggcgguguccuuggcgaa

SEQ ID NO: 5910 - RNA, 22 nt, Pseudomonas aeruginosa PA01
ggccgggaagucuucgucggcc

SEQ ID NO: 5911 - RNA, 22 nt, Pseudomonas aeruginosa PA01
ggccgggacgaagccggggaaa

SEQ ID NO: 5912 - RNA, 23 nt, Pseudomonas aeruginosa PA01
ggccgggaucgagcaacuggcgc

SEQ ID NO: 5913 - RNA, 22 nt, Pseudomonas aeruginosa PA01
ggccgggucgauacgcaggcug

SEQ ID NO: 5914 - RNA, 22 nt, Pseudomonas aeruginosa PA01
ggccgccgagccaggccucgcg

SEQ ID NO: 5915 - RNA, 22 nt, Pseudomonas aeruginosa PA01
ggccgccgaugcugaccucggc

SEQ ID NO: 5916 - RNA, 22 nt, Pseudomonas aeruginosa PA01
ggccgccgccgacuugucggug

SEQ ID NO: 5917 - RNA, 22 nt, Pseudomonas aeruginosa PA01
ggccgccgcguggcgucggagu

SEQ ID NO: 5918 - RNA, 23 nt, Pseudomonas aeruginosa PA01
ggccgccggcgauacgcuccugg

SEQ ID NO: 5919 - RNA, 22 nt, Pseudomonas aeruginosa PA01
ggccgccguagccgcugaucag

SEQ ID NO: 5920 - RNA, 22 nt, Pseudomonas aeruginosa PA01
ggccgcgaagugacguaggcca

SEQ ID NO: 5921 - RNA, 22 nt, Pseudomonas aeruginosa PA01
ggccgcgccgggagagcggaca

SEQ ID NO: 5922 - RNA, 22 nt, Pseudomonas aeruginosa PA01
ggccgagcacgucggcuucgag

SEQ ID NO: 5923 - RNA, 19 nt, Pseudomonas aeruginosa PA01
ggccgaggccgagaguuuc

SEQ ID NO: 5924 - RNA, 22 nt, Pseudomonas aeruginosa PA01
ggccgcaggccuggagugccug

SEQ ID NO: 5925 - RNA, 16 nt, Pseudomonas aeruginosa PA01
ggccgcagggccaggc

SEQ ID NO: 5926 - RNA, 22 nt, Pseudomonas aeruginosa PA01
ggcccgggugauccuccagcau

SEQ ID NO: 5927 - RNA, 22 nt, Pseudomonas aeruginosa PA01
ggcccgucgccgcgccugaggc

SEQ ID NO: 5928 - RNA, 22 nt, Pseudomonas aeruginosa PA01
ggcccuggaucucgcccugcca

SEQ ID NO: 5929 - RNA, 22 nt, Pseudomonas aeruginosa PA01
ggcccuggcgaugcgcuggcug

SEQ ID NO: 5930 - RNA, 22 nt, Pseudomonas aeruginosa PA01
ggccccucggcggccuggcugc

SEQ ID NO: 5931 - RNA, 22 nt, Pseudomonas aeruginosa PA01
ggccagcucgcgcagggcaugg

SEQ ID NO: 5932 - RNA, 22 nt, Pseudomonas aeruginosa PA01
ggccagggcgaccgcgagcggg

SEQ ID NO: 5933 - RNA, 22 nt, Pseudomonas aeruginosa PA01
ggccuggagcgcggccaggccu

SEQ ID NO: 5934 - RNA, 22 nt, Pseudomonas aeruginosa PA01
ggccugggccuggaagacguag

SEQ ID NO: 5935 - RNA, 22 nt, Pseudomonas aeruginosa PA01
ggccugggcggccaggacuaca

SEQ ID NO: 5936 - RNA, 20 nt, Pseudomonas aeruginosa PA01
ggccuggggcgacgaugcgc

SEQ ID NO: 5937 - RNA, 22 nt, Pseudomonas aeruginosa PA01
ggccggguugccgcugacgccg

SEQ ID NO: 5938 - RNA, 22 nt, Pseudomonas aeruginosa PA01
ggccgugggccggcgaagccug

SEQ ID NO: 5939 - RNA, 17 nt, Pseudomonas aeruginosa PA01
ggcgaccaggucggcgu

SEQ ID NO: 5940 - RNA, 22 nt, Pseudomonas aeruginosa PA01
ggcgacccggacuucgccggcg

SEQ ID NO: 5941 - RNA, 22 nt, Pseudomonas aeruginosa PA01
ggcgacgccggcggcacccagu

SEQ ID NO: 5942 - RNA, 22 nt, Pseudomonas aeruginosa PA01
ggcgccacggugcuggagcacg

SEQ ID NO: 5943 - RNA, 22 nt, Pseudomonas aeruginosa PA01
ggcgccagggaguggcuccgcg

SEQ ID NO: 5944 - RNA, 22 nt, Pseudomonas aeruginosa PA01
ggcgcccagcgucgccaggcuc

SEQ ID NO: 5945 - RNA, 22 nt, Pseudomonas aeruginosa PA01
ggcgcccggcgaacagcuugcg

SEQ ID NO: 5946 - RNA, 22 nt, Pseudomonas aeruginosa PA01
ggcgccggcagguccaggcgcu

SEQ ID NO: 5947 - RNA, 22 nt, Pseudomonas aeruginosa PA01
ggcgcgaguugcugcgcgucua

SEQ ID NO: 5948 - RNA, 22 nt, Pseudomonas aeruginosa PA01
ggcgcgcaccgcgugggacagg

SEQ ID NO: 5949 - RNA, 22 nt, Pseudomonas aeruginosa PA01
ggcgcgcaggcgcagaacaccu

SEQ ID NO: 5950 - RNA, 22 nt, Pseudomonas aeruginosa PA01
ggcgcgcaggcugaagaaggcg

SEQ ID NO: 5951 - RNA, 22 nt, Pseudomonas aeruginosa PA01
ggcgcgcaucgcggaccugcuc

SEQ ID NO: 5952 - RNA, 22 nt, Pseudomonas aeruginosa PA01
ggcgcgccagcaggcuccagcc

SEQ ID NO: 5953 - RNA, 19 nt, Pseudomonas aeruginosa PA01
ggcgcgccaggucuggcug

SEQ ID NO: 5954 - RNA, 22 nt, Pseudomonas aeruginosa PA01
ggcgcgccaguucggccacgag

SEQ ID NO: 5955 - RNA, 22 nt, Pseudomonas aeruginosa PA01
ggcgcggcucguggaucagcgc

SEQ ID NO: 5956 - RNA, 22 nt, Pseudomonas aeruginosa PA01
gcuguucuucaagcacgccgaa

SEQ ID NO: 5957 - RNA, 22 nt, Pseudomonas aeruginosa PA01
gcugguggugcagcccaggcaa

SEQ ID NO: 5958 - RNA, 21 nt, Pseudomonas aeruginosa PA01
ggaaaucagcucggugagguu

SEQ ID NO: 5959 - RNA, 22 nt, Pseudomonas aeruginosa PA01
gcuuccggcgaagcuccagcga

SEQ ID NO: 5960 - RNA, 23 nt, Pseudomonas aeruginosa PA01
gcuucggccuggucgguuuccgc

SEQ ID NO: 5961 - RNA, 19 nt, Pseudomonas aeruginosa PA01
gcuucgucacccuggaggc

SEQ ID NO: 5962 - RNA, 22 nt, Pseudomonas aeruginosa PA01
gcuucguccgcgugguggcgcg

SEQ ID NO: 5963 - RNA, 22 nt, Pseudomonas aeruginosa PA01
gcuucuucgagcagggcaaggg

SEQ ID NO: 5964 - RNA, 22 nt, Pseudomonas aeruginosa PA01
gcuucuucgccacccuggugca

SEQ ID NO: 5965 - RNA, 22 nt, Pseudomonas aeruginosa PA01
ggaagcggaacagcgcgccaug

SEQ ID NO: 5966 - RNA, 20 nt, Pseudomonas aeruginosa PA01
ggaagugaacacgcggacgg

SEQ ID NO: 5967 - RNA, 22 nt, Pseudomonas aeruginosa PA01
ggaagugaaggucggcgaccug

SEQ ID NO: 5968 - RNA, 22 nt, Pseudomonas aeruginosa PA01
gcuuucccccgccgcgcucuuc

SEQ ID NO: 5969 - RNA, 22 nt, Pseudomonas aeruginosa PA01
ggaaccauggucgagagccucg

SEQ ID NO: 5970 - RNA, 22 nt, Pseudomonas aeruginosa PA01
ggacgccgaggaccaggcgcgc

SEQ ID NO: 5971 - RNA, 22 nt, Pseudomonas aeruginosa PA01
ggacgcgcagugccggcaccgc

SEQ ID NO: 5972 - RNA, 22 nt, Pseudomonas aeruginosa PA01
ggagccguccucgccggccugg

SEQ ID NO: 5973 - RNA, 22 nt, Pseudomonas aeruginosa PA01
ggagccguugcagugguagcac

SEQ ID NO: 5974 - RNA, 22 nt, Pseudomonas aeruginosa PA01
ggagcgccugugggaucguccc

SEQ ID NO: 5975 - RNA, 22 nt, Pseudomonas aeruginosa PA01
ggagcgcgugaccggcuacggu

SEQ ID NO: 5976 - RNA, 22 nt, Pseudomonas aeruginosa PA01
ggagcgggccuuagcccaggug

SEQ ID NO: 5977 - RNA, 22 nt, Pseudomonas aeruginosa PA01
ggaccgcgcgaggagacgccgg

SEQ ID NO: 5978 - RNA, 22 nt, Pseudomonas aeruginosa PA01
ggagcacgcgguggcggcugug

SEQ ID NO: 5979 - RNA, 22 nt, Pseudomonas aeruginosa PA01
ggagcagccggagaucgcugcg

SEQ ID NO: 5980 - RNA, 22 nt, Pseudomonas aeruginosa PA01
gcugcagucggcaacuggcucu

SEQ ID NO: 5981 - RNA, 22 nt, Pseudomonas aeruginosa PA01
gcugcggccgcgguacaggcug

SEQ ID NO: 5982 - RNA, 22 nt, Pseudomonas aeruginosa PA01
gcugcggcuauugcggcucagc

SEQ ID NO: 5983 - RNA, 22 nt, Pseudomonas aeruginosa PA01
gcugccggcgaucgucgaggcg

SEQ ID NO: 5984 - RNA, 23 nt, Pseudomonas aeruginosa PA01
gcugccggcggcgucguugucgu

SEQ ID NO: 5985 - RNA, 22 nt, Pseudomonas aeruginosa PA01
gcugcgcaaguaccuggcgcgu

SEQ ID NO: 5986 - RNA, 21 nt, Pseudomonas aeruginosa PA01
gcugcgcaucuccgcggccgg

SEQ ID NO: 5987 - RNA, 22 nt, Pseudomonas aeruginosa PA01
gcugcgcgagcguggcugggac

SEQ ID NO: 5988 - RNA, 22 nt, Pseudomonas aeruginosa PA01
gcugcgcgccgaccagcggguc

SEQ ID NO: 5989 - RNA, 22 nt, Pseudomonas aeruginosa PA01
gcugcgcggcauuuucagggcg

SEQ ID NO: 5990 - RNA, 22 nt, Pseudomonas aeruginosa PA01
gcugcgcggccugggcgucguc

SEQ ID NO: 5991 - RNA, 22 nt, Pseudomonas aeruginosa PA01
gcugcggcaacgacaucgccca

SEQ ID NO: 5992 - RNA, 22 nt, Pseudomonas aeruginosa PA01
gcugaggcguuccgccggcccg

SEQ ID NO: 5993 - RNA, 22 nt, Pseudomonas aeruginosa PA01
gcugaagggcuccgcgcugucc

SEQ ID NO: 5994 - RNA, 22 nt, Pseudomonas aeruginosa PA01
gcucaggcccaggccgagcgcg

SEQ ID NO: 5995 - RNA, 22 nt, Pseudomonas aeruginosa PA01
gcucaggcgaugccugcuugcu

SEQ ID NO: 5996 - RNA, 22 nt, Pseudomonas aeruginosa PA01
gcguggugcugaugaucggcgg

SEQ ID NO: 5997 - RNA, 22 nt, Pseudomonas aeruginosa PA01
gcucuugcggaucgccuucggc

SEQ ID NO: 5998 - RNA, 22 nt, Pseudomonas aeruginosa PA01
gcuggaggcgcgcaucgcucga

SEQ ID NO: 5999 - RNA, 22 nt, Pseudomonas aeruginosa PA01
gcuggcgcugaccgucugccug

SEQ ID NO: 6000 - RNA, 22 nt, Pseudomonas aeruginosa PA01
gcuggcggagaagugcggguug

SEQ ID NO: 6001 - RNA, 22 nt, Pseudomonas aeruginosa PA01
gcuggcgggcauccgcgugcgg

SEQ ID NO: 6002 - RNA, 22 nt, Pseudomonas aeruginosa PA01
gcugguaguggucgagcaucau

SEQ ID NO: 6003 - RNA, 22 nt, Pseudomonas aeruginosa PA01
gcugggggaagcguucgcggag

SEQ ID NO: 6004 - RNA, 22 nt, Pseudomonas aeruginosa PA01
gcugcuggccaguucggagcgc

SEQ ID NO: 6005 - RNA, 22 nt, Pseudomonas aeruginosa PA01
gcugcuggcgguauucggccac

SEQ ID NO: 6006 - RNA, 22 nt, Pseudomonas aeruginosa PA01
gcugcuggugccgcgcgcccau

SEQ ID NO: 6007 - RNA, 22 nt, Pseudomonas aeruginosa PA01
gcuggaaacccucggcgugguc

SEQ ID NO: 6008 - RNA, 22 nt, Pseudomonas aeruginosa PA01
gcuggaagcccaggcgugcgua

SEQ ID NO: 6009 - RNA, 22 nt, Pseudomonas aeruginosa PA01
gcuggccgaguuccgccgacag

SEQ ID NO: 6010 - RNA, 22 nt, Pseudomonas aeruginosa PA01
gcuggccgauuucgccgagcgc

SEQ ID NO: 6011 - RNA, 22 nt, Pseudomonas aeruginosa PA01
gcuggccgcugccggacagcca

SEQ ID NO: 6012 - RNA, 22 nt, Pseudomonas aeruginosa PA01
gcuggccggcuccgcgcugguc

SEQ ID NO: 6013 - RNA, 22 nt, Pseudomonas aeruginosa PA01
gcuggccgggucgcggcgccac

SEQ ID NO: 6014 - RNA, 22 nt, Pseudomonas aeruginosa PA01
cugggcggcugugccgcggugg

SEQ ID NO: 6015 - RNA, 22 nt, Pseudomonas aeruginosa PA01
cugggcgaucagcggccgcagg

SEQ ID NO: 6016 - RNA, 22 nt, Pseudomonas aeruginosa PA01
cuuguguuuuuacugucgaaau

SEQ ID NO: 6017 - RNA, 22 nt, Pseudomonas aeruginosa PA01
cuucggccuuggcguccuguag

SEQ ID NO: 6018 - RNA, 22 nt, Pseudomonas aeruginosa PA01
cuuccauggugacgccggucug

SEQ ID NO: 6019 - RNA, 22 nt, Pseudomonas aeruginosa PA01
cuggacgcccaugcggacgccc

SEQ ID NO: 6020 - RNA, 22 nt, Pseudomonas aeruginosa PA01
cuggaagcgcuggugccgccau

SEQ ID NO: 6021 - RNA, 22 nt, Pseudomonas aeruginosa PA01
cuggaaggcgagcaucuucaug

SEQ ID NO: 6022 - RNA, 22 nt, Pseudomonas aeruginosa PA01
cuggaagucggcguggugcaug

SEQ ID NO: 6023 - RNA, 22 nt, Pseudomonas aeruginosa PA01
cuggauuuuuugccggaaagcc

SEQ ID NO: 6024 - RNA, 22 nt, Pseudomonas aeruginosa PA01
cuggcggccguagccgagguug

SEQ ID NO: 6025 - RNA, 18 nt, Pseudomonas aeruginosa PA01
cuggccggaggcgaucga

SEQ ID NO: 6026 - RNA, 22 nt, Pseudomonas aeruginosa PA01
cugcuucaaggagcacuagacu

SEQ ID NO: 6027 - RNA, 22 nt, Pseudomonas aeruginosa PA01
cugcuuucgaagcgcucgcgcc

SEQ ID NO: 6028 - RNA, 22 nt, Pseudomonas aeruginosa PA01
cugcgaggcgauccauccgggc

SEQ ID NO: 6029 - RNA, 22 nt, Pseudomonas aeruginosa PA01
cugcgcgccaauggcgauccga

SEQ ID NO: 6030 - RNA, 22 nt, Pseudomonas aeruginosa PA01
cugcggcggaugggccggcuga

SEQ ID NO: 6031 - RNA, 22 nt, Pseudomonas aeruginosa PA01
cugcccgggagcggugcgcucg

SEQ ID NO: 6032 - RNA, 22 nt, Pseudomonas aeruginosa PA01
cugccggcaacucggcgauccc

SEQ ID NO: 6033 - RNA, 22 nt, Pseudomonas aeruginosa PA01
cugccggcaccggccuugacca

SEQ ID NO: 6034 - RNA, 22 nt, Pseudomonas aeruginosa PA01
cugccggccaggcggguguuca

SEQ ID NO: 6035 - RNA, 22 nt, Pseudomonas aeruginosa PA01
cugccggcccugguggcggcgg

SEQ ID NO: 6036 - RNA, 22 nt, Pseudomonas aeruginosa PA01
cugccggcgcaguccugcaugg

SEQ ID NO: 6037 - RNA, 22 nt, Pseudomonas aeruginosa PA01
cugccggcggauggcggguugc

SEQ ID NO: 6038 - RNA, 22 nt, Pseudomonas aeruginosa PA01
cugcaucacccgcucguggucc

SEQ ID NO: 6039 - RNA, 22 nt, Pseudomonas aeruginosa PA01
cugccccggcgcggcugagcau

SEQ ID NO: 6040 - RNA, 22 nt, Pseudomonas aeruginosa PA01
cugcaggccgaucucgcggauc

SEQ ID NO: 6041 - RNA, 22 nt, Pseudomonas aeruginosa PA01
gaccaggccgggcaacugcgcg

SEQ ID NO: 6042 - RNA, 22 nt, Pseudomonas aeruginosa PA01
gaccaggccggugaguccgccc

SEQ ID NO: 6043 - RNA, 22 nt, Pseudomonas aeruginosa PA01
gaccaggcguacguauagcagg

SEQ ID NO: 6044 - RNA, 22 nt, Pseudomonas aeruginosa PA01
gaccagccugcacgagggcauu

SEQ ID NO: 6045 - RNA, 22 nt, Pseudomonas aeruginosa PA01
gacgagcugauggucagccgca

SEQ ID NO: 6046 - RNA, 22 nt, Pseudomonas aeruginosa PA01
gacgaggacgaggaugucgagg

SEQ ID NO: 6047 - RNA, 22 nt, Pseudomonas aeruginosa PA01
gacccgccgacgccguucagca

SEQ ID NO: 6048 - RNA, 22 nt, Pseudomonas aeruginosa PA01
gacccgccgcgaugcgcuggua

SEQ ID NO: 6049 - RNA, 22 nt, Pseudomonas aeruginosa PA01
gacccggacaucauccuggucg

SEQ ID NO: 6050 - RNA, 23 nt, Pseudomonas aeruginosa PA01
gacccggcggccuuccgcaucgc

SEQ ID NO: 6051 - RNA, 22 nt, Pseudomonas aeruginosa PA01
gaccgcccagaugaggggaaga

SEQ ID NO: 6052 - RNA, 22 nt, Pseudomonas aeruginosa PA01
gacagcgccuggcgcgcggauu

SEQ ID NO: 6053 - RNA, 22 nt, Pseudomonas aeruginosa PA01
gacagcggacgauaggcgagca

SEQ ID NO: 6054 - RNA, 23 nt, Pseudomonas aeruginosa PA01
gacagcuggaucgcgcccagcgc

SEQ ID NO: 6055 - RNA, 22 nt, Pseudomonas aeruginosa PA01
gacgcaggcaugcgggcgcugc

SEQ ID NO: 6056 - RNA, 22 nt, Pseudomonas aeruginosa PA01
gacgcgcgccuggcgcaguggg

SEQ ID NO: 6057 - RNA, 22 nt, Pseudomonas aeruginosa PA01
gacugcgggaucgccagccgca

SEQ ID NO: 6058 - RNA, 22 nt, Pseudomonas aeruginosa PA01
gagagcgccaugccacugccca

SEQ ID NO: 6059 - RNA, 22 nt, Pseudomonas aeruginosa PA01
gaagugggcugggccguugguc

SEQ ID NO: 6060 - RNA, 22 nt, Pseudomonas aeruginosa PA01
gaagagcgccaacgucgagggc

SEQ ID NO: 6061 - RNA, 22 nt, Pseudomonas aeruginosa PA01
gaagaugcccuucaucuucaag

SEQ ID NO: 6062 - RNA, 22 nt, Pseudomonas aeruginosa PA01
gaagaugcugcccuccaccgcg

SEQ ID NO: 6063 - RNA, 22 nt, Pseudomonas aeruginosa PA01
gaagcgagugucgccgccgacg

SEQ ID NO: 6064 - RNA, 22 nt, Pseudomonas aeruginosa PA01
gauggcggauguugccgacgcu

SEQ ID NO: 6065 - RNA, 22 nt, Pseudomonas aeruginosa PA01
gauggcggccagggccaguggc

SEQ ID NO: 6066 - RNA, 22 nt, Pseudomonas aeruginosa PA01
gaugguccgggugcggucguug

SEQ ID NO: 6067 - RNA, 22 nt, Pseudomonas aeruginosa PA01
gaugcggaugcgcuugucgcgg

SEQ ID NO: 6068 - RNA, 22 nt, Pseudomonas aeruginosa PA01
gaugcguacgccgggcgagaug

SEQ ID NO: 6069 - RNA, 22 nt, Pseudomonas aeruginosa PA01
gaugcugaugaccgccgccggc

SEQ ID NO: 6070 - RNA, 22 nt, Pseudomonas aeruginosa PA01
gaugcuggcgaaguagccgcug

SEQ ID NO: 6071 - RNA, 22 nt, Pseudomonas aeruginosa PA01
gaugcuggucgcgcggagucac

SEQ ID NO: 6072 - RNA, 22 nt, Pseudomonas aeruginosa PA01
gauggagcaggugcgcgauggc

SEQ ID NO: 6073 - RNA, 22 nt, Pseudomonas aeruginosa PA01
gaggugacacuucuccagcauu

SEQ ID NO: 6074 - RNA, 22 nt, Pseudomonas aeruginosa PA01
gaugccgacgaucagccggagc

SEQ ID NO: 6075 - RNA, 22 nt, Pseudomonas aeruginosa PA01
gaugccggcggcuuccagcaag

SEQ ID NO: 6076 - RNA, 20 nt, Pseudomonas aeruginosa PA01
gagccggccgcggucgucgc

SEQ ID NO: 6077 - RNA, 22 nt, Pseudomonas aeruginosa PA01
gagccgggagcuggugcguggc

SEQ ID NO: 6078 - RNA, 22 nt, Pseudomonas aeruginosa PA01
gagcgagccgguuguucgaggc

SEQ ID NO: 6079 - RNA, 22 nt, Pseudomonas aeruginosa PA01
gagcgccaggugauccucggca

SEQ ID NO: 6080 - RNA, 22 nt, Pseudomonas aeruginosa PA01
gagcgccaugcgccaggcggcc

SEQ ID NO: 6081 - RNA, 22 nt, Pseudomonas aeruginosa PA01
gagcgccgagcaggaaugcgau

SEQ ID NO: 6082 - RNA, 22 nt, Pseudomonas aeruginosa PA01
gagcgccugcaggcgccgcugg

SEQ ID NO: 6083 - RNA, 22 nt, Pseudomonas aeruginosa PA01
gagcgcgaaggccuggugguga

SEQ ID NO: 6084 - RNA, 22 nt, Pseudomonas aeruginosa PA01
gagcgcgagguggagcgggucg

SEQ ID NO: 6085 - RNA, 22 nt, Pseudomonas aeruginosa PA01
gagcgcgccaccgccagcuuca

SEQ ID NO: 6086 - RNA, 22 nt, Pseudomonas aeruginosa PA01
gagcgcugcaagccggcgaguc

SEQ ID NO: 6087 - RNA, 22 nt, Pseudomonas aeruginosa PA01
gagcggcccucgauccgcuggu

SEQ ID NO: 6088 - RNA, 22 nt, Pseudomonas aeruginosa PA01
gagcggccggacuucggcgaga

SEQ ID NO: 6089 - RNA, 22 nt, Pseudomonas aeruginosa PA01
gagcggcgcaucgcgguggaga

SEQ ID NO: 6090 - RNA, 22 nt, Pseudomonas aeruginosa PA01
gagcaggccgcucuccucgccg

SEQ ID NO: 6091 - RNA, 22 nt, Pseudomonas aeruginosa PA01
gagcaggccguugccggacagu

SEQ ID NO: 6092 - RNA, 22 nt, Pseudomonas aeruginosa PA01
gagcagguagucgccgcgcccg

SEQ ID NO: 6093 - RNA, 22 nt, Pseudomonas aeruginosa PA01
gagcacuacacgaagcggcgcc

SEQ ID NO: 6094 - RNA, 22 nt, Pseudomonas aeruginosa PA01
gaggccccgggccggcggaacg

SEQ ID NO: 6095 - RNA, 22 nt, Pseudomonas aeruginosa PA01
gaggcgccacucggcagccugc

SEQ ID NO: 6096 - RNA, 22 nt, Pseudomonas aeruginosa PA01
gaggcgccggaaugggucgccg

SEQ ID NO: 6097 - RNA, 22 nt, Pseudomonas aeruginosa PA01
gaggcgcgcgggcugcucaacc

SEQ ID NO: 6098 - RNA, 22 nt, Pseudomonas aeruginosa PA01
gaggcgcggaucgaguucauca

SEQ ID NO: 6099 - RNA, 22 nt, Pseudomonas aeruginosa PA01
gaggaaguggccagcgcgcugg

SEQ ID NO: 6100 - RNA, 22 nt, Pseudomonas aeruginosa PA01
gaggaugcgcugcggcuucucg

SEQ ID NO: 6101 - RNA, 22 nt, Pseudomonas aeruginosa PA01
gaggcaguucaccuggcgguug

SEQ ID NO: 6102 - RNA, 22 nt, Pseudomonas aeruginosa PA01
gagggccgggugaucagcgucg

SEQ ID NO: 6103 - RNA, 22 nt, Pseudomonas aeruginosa PA01
gaggguaagugucgcuaaaggu

SEQ ID NO: 6104 - RNA, 22 nt, Pseudomonas aeruginosa PA01
gaggaacgucaggacacgcagg

SEQ ID NO: 6105 - RNA, 22 nt, Pseudomonas aeruginosa PA01
gagcucccaggcgucgccuggc

SEQ ID NO: 6106 - RNA, 22 nt, Pseudomonas aeruginosa PA01
gagcucgcucuggaugcgcguc

SEQ ID NO: 6107 - RNA, 22 nt, Pseudomonas aeruginosa PA01
gagcauccggcacaggcgcagg

SEQ ID NO: 6108 - RNA, 22 nt, Pseudomonas aeruginosa PA01
gagcauggcgcgcgagcugggg

SEQ ID NO: 6109 - RNA, 21 nt, Pseudomonas aeruginosa PA01
gagcagcucgggcggcgcgac

SEQ ID NO: 6110 - RNA, 22 nt, Pseudomonas aeruginosa PA01
gagcagcuggaucgggcgccgc

SEQ ID NO: 6111 - RNA, 22 nt, Pseudomonas aeruginosa PA01
gagcuggagaaccucggccugc

SEQ ID NO: 6112 - RNA, 22 nt, Pseudomonas aeruginosa PA01
gagcuggaguugcggauuggca

SEQ ID NO: 6113 - RNA, 22 nt, Pseudomonas aeruginosa PA01
gagcuggaugccgcgcagugcc

SEQ ID NO: 6114 - RNA, 22 nt, Pseudomonas aeruginosa PA01
gagcugcgcgaagcgcuggacg

SEQ ID NO: 6115 - RNA, 22 nt, Pseudomonas aeruginosa PA01
gagcuggaagcugcgcuggucg

SEQ ID NO: 6116 - RNA, 22 nt, Pseudomonas aeruginosa PA01
gagcuggaagugcucgcggugc

SEQ ID NO: 6117 - RNA, 18 nt, Pseudomonas aeruginosa PA01
gccagcagcgguucggcc

SEQ ID NO: 6118 - RNA, 22 nt, Pseudomonas aeruginosa PA01
gccacuccucguuccaggcuga

SEQ ID NO: 6119 - RNA, 22 nt, Pseudomonas aeruginosa PA01
gcaucgcgaccuuccgcgugga

SEQ ID NO: 6120 - RNA, 22 nt, Pseudomonas aeruginosa PA01
gccaggccaccgcgcucaacca

SEQ ID NO: 6121 - RNA, 22 nt, Pseudomonas aeruginosa PA01
gccaggccuaugccgcguacca

SEQ ID NO: 6122 - RNA, 22 nt, Pseudomonas aeruginosa PA01
gccagccugcucgcuggcgagc

SEQ ID NO: 6123 - RNA, 22 nt, Pseudomonas aeruginosa PA01
gccagcgccgccugaaccaggc

SEQ ID NO: 6124 - RNA, 22 nt, Pseudomonas aeruginosa PA01
gccagcgcguccgggucauggg

SEQ ID NO: 6125 - RNA, 22 nt, Pseudomonas aeruginosa PA01
gccagcagcucggcgccggcca

SEQ ID NO: 6126 - RNA, 22 nt, Pseudomonas aeruginosa PA01
gccagcaguucgcgggcacggg

SEQ ID NO: 6127 - RNA, 22 nt, Pseudomonas aeruginosa PA01
gccagccagaucggcgccggcc

SEQ ID NO: 6128 - RNA, 22 nt, Pseudomonas aeruginosa PA01
gccagccgaccgacucgccgcu

SEQ ID NO: 6129 - RNA, 17 nt, Pseudomonas aeruginosa PA01
gccagccgaucugcggc

SEQ ID NO: 6130 - RNA, 22 nt, Pseudomonas aeruginosa PA01
gccaggggcugcgccgcucagg

SEQ ID NO: 6131 - RNA, 22 nt, Pseudomonas aeruginosa PA01
gccaggccugcuacccgcuggc

SEQ ID NO: 6132 - RNA, 22 nt, Pseudomonas aeruginosa PA01
gccaggccugcucguguuccgg

SEQ ID NO: 6133 - RNA, 21 nt, Pseudomonas aeruginosa PA01
gccauccguucucgcggcgcu

SEQ ID NO: 6134 - RNA, 22 nt, Pseudomonas aeruginosa PA01
gcccacggcgcugccacagaag

SEQ ID NO: 6135 - RNA, 22 nt, Pseudomonas aeruginosa PA01
gcagcaggcgucggcgggccuc

SEQ ID NO: 6136 - RNA, 22 nt, Pseudomonas aeruginosa PA01
gcagcagggcgaggaucgcccg

SEQ ID NO: 6137 - RNA, 22 nt, Pseudomonas aeruginosa PA01
gcagcucgaccaggccgggcag

SEQ ID NO: 6138 - RNA, 22 nt, Pseudomonas aeruginosa PA01
gcagcuggaaguugucaacgaa

SEQ ID NO: 6139 - RNA, 22 nt, Pseudomonas aeruginosa PA01
gcagcuggcgccgaucuccgcg

SEQ ID NO: 6140 - RNA, 22 nt, Pseudomonas aeruginosa PA01
gcaggaagccggcgagcgcuug

SEQ ID NO: 6141 - RNA, 22 nt, Pseudomonas aeruginosa PA01
gcagcccguuccagccgccggu

SEQ ID NO: 6142 - RNA, 22 nt, Pseudomonas aeruginosa PA01
gcagcgaguagccgauccccgg

SEQ ID NO: 6143 - RNA, 22 nt, Pseudomonas aeruginosa PA01
gcagcgccacccgcggaucgaa

SEQ ID NO: 6144 - RNA, 22 nt, Pseudomonas aeruginosa PA01
gcagcgccaguugcuggacacc

SEQ ID NO: 6145 - RNA, 22 nt, Pseudomonas aeruginosa PA01
gcagcgcugcgcgagcagggug

SEQ ID NO: 6146 - RNA, 19 nt, Pseudomonas aeruginosa PA01
gcagcgucggcgugcccgg

SEQ ID NO: 6147 - RNA, 19 nt, Pseudomonas aeruginosa PA01
gcaguucagcgacaacccg

SEQ ID NO: 6148 - RNA, 22 nt, Pseudomonas aeruginosa PA01
gcagucuucagcaugccgcguc

SEQ ID NO: 6149 - RNA, 22 nt, Pseudomonas aeruginosa PA01
gcagggcgugcgcccggcgaau

SEQ ID NO: 6150 - RNA, 22 nt, Pseudomonas aeruginosa PA01
gcaggccgaacaucaucaccgg

SEQ ID NO: 6151 - RNA, 22 nt, Pseudomonas aeruginosa PA01
gcaggccgaccaguucgcugau

SEQ ID NO: 6152 - RNA, 22 nt, Pseudomonas aeruginosa PA01
gcaggccgcccuggucgagcag

SEQ ID NO: 6153 - RNA, 22 nt, Pseudomonas aeruginosa PA01
gcaggccggcgagguuggcggu

SEQ ID NO: 6154 - RNA, 22 nt, Pseudomonas aeruginosa PA01
gcaggcgauccuggagcggcgc

SEQ ID NO: 6155 - RNA, 22 nt, Pseudomonas aeruginosa PA01
gcaggcgcaguuggacgcccgc

SEQ ID NO: 6156 - RNA, 22 nt, Pseudomonas aeruginosa PA01
gcaggcgcgccaggugcagcga

SEQ ID NO: 6157 - RNA, 22 nt, Pseudomonas aeruginosa PA01
gcaggcgcgccgggcccugcuc

SEQ ID NO: 6158 - RNA, 22 nt, Pseudomonas aeruginosa PA01
gcaggcugagcacgccggcggc

SEQ ID NO: 6159 - RNA, 22 nt, Pseudomonas aeruginosa PA01
gcaggcuggcgucuuccagggc

SEQ ID NO: 6160 - RNA, 22 nt, Pseudomonas aeruginosa PA01
gcacccucccgcugcucgaacu

SEQ ID NO: 6161 - RNA, 19 nt, Pseudomonas aeruginosa PA01
gaugggcgaggcggaagcc

SEQ ID NO: 6162 - RNA, 22 nt, Pseudomonas aeruginosa PA01
gcagcagcuugccguccggguu

SEQ ID NO: 6163 - RNA, 20 nt, Pseudomonas aeruginosa PA01
gcagcaaggccaggccgaug

SEQ ID NO: 6164 - RNA, 22 nt, Pseudomonas aeruginosa PA01
gcacuggaauggccggccgcgc

SEQ ID NO: 6165 - RNA, 22 nt, Pseudomonas aeruginosa PA01
gcagaugguugucggccugggc

SEQ ID NO: 6166 - RNA, 22 nt, Staphylococcus aureus subsp. aureus Mu50
gcaacaauuguaaaguuugaaa

SEQ ID NO: 6167 - RNA, 22 nt, Staphylococcus aureus subsp. aureus Mu50
gcaaauguuacaccuguuucuu

SEQ ID NO: 6168 - RNA, 22 nt, Staphylococcus aureus subsp. aureus Mu50
gagauuuucgaagcacguaacc

SEQ ID NO: 6169 - RNA, 22 nt, Staphylococcus aureus subsp. aureus Mu50
gagauauugguaaagcuuuugc

SEQ ID NO: 6170 - RNA, 21 nt, Staphylococcus aureus subsp. aureus Mu50
gaugggaauuucgacagugca

SEQ ID NO: 6171 - RNA, 22 nt, Staphylococcus aureus subsp. aureus Mu50
cuuuuucacauaucauaggucu

SEQ ID NO: 6172 - RNA, 22 nt, Staphylococcus aureus subsp. aureus Mu50
gaaaaaaucgauuggcguggcu

SEQ ID NO: 6173 - RNA, 22 nt, Staphylococcus aureus subsp. aureus Mu50
gaaaagaaagcauaugcaacuu

SEQ ID NO: 6174 - RNA, 22 nt, Staphylococcus aureus subsp. aureus Mu50
gaaaagcuccaaucaaaguuga

SEQ ID NO: 6175 - RNA, 22 nt, Staphylococcus aureus subsp. aureus Mu50
gacguauuuuuuaucacauuga

SEQ ID NO: 6176 - RNA, 22 nt, Staphylococcus aureus subsp. aureus Mu50
gacauauuuuaauagugaauau

SEQ ID NO: 6177 - RNA, 22 nt, Staphylococcus aureus subsp. aureus Mu50
cuucaguagcaggcgguugcau

SEQ ID NO: 6178 - RNA, 22 nt, Staphylococcus aureus subsp. aureus Mu50
cuuuccaaguuaaagauuuacc

SEQ ID NO: 6179 - RNA, 22 nt, Staphylococcus aureus subsp. aureus Mu50
cuguaucacauuagaagcuuuu

SEQ ID NO: 6180 - RNA, 22 nt, Staphylococcus aureus subsp. aureus Mu50
gcugaaaugguaauaucuuuau

SEQ ID NO: 6181 - RNA, 22 nt, Staphylococcus aureus subsp. aureus Mu50
gcuuuauugaugaugucuuuau

SEQ ID NO: 6182 - RNA, 22 nt, Staphylococcus aureus subsp. aureus Mu50
gcuucaaugcuuuuagccauuu

SEQ ID NO: 6183 - RNA, 22 nt, Staphylococcus aureus subsp. aureus Mu50
ggaugccgacaguauuccgauu

SEQ ID NO: 6184 - RNA, 20 nt, Staphylococcus aureus subsp. aureus Mu50
uauuucaauugcuguugcug

SEQ ID NO: 6185 - RNA, 22 nt, Staphylococcus aureus subsp. aureus Mu50
ucaaauuacgugcuaaagcuug

SEQ ID NO: 6186 - RNA, 22 nt, Staphylococcus aureus subsp. aureus Mu50
uaucuccagaguauacaguauc

SEQ ID NO: 6187 - RNA, 22 nt, Staphylococcus aureus subsp. aureus Mu50
uaucaaacauugaaugcacgcg

SEQ ID NO: 6188 - RNA, 22 nt, Staphylococcus aureus subsp. aureus Mu50
uauaaauagagaagagcaguaa

SEQ ID NO: 6189 - RNA, 22 nt, Staphylococcus aureus subsp. aureus Mu50
uauaugagacggggucauuucu

SEQ ID NO: 6190 - RNA, 22 nt, Staphylococcus aureus subsp. aureus Mu50
uagaaacagcaguaagaugauu

SEQ ID NO: 6191 - RNA, 22 nt, Staphylococcus aureus subsp. aureus Mu50
uagugguauugaaucugcugua

SEQ ID NO: 6192 - RNA, 22 nt, Staphylococcus aureus subsp. aureus Mu50
uaauugcacuaccaaugauuau

SEQ ID NO: 6193 - RNA, 22 nt, Staphylococcus aureus subsp. aureus Mu50
uaaugauuuugguacgauacug

SEQ ID NO: 6194 - RNA, 22 nt, Staphylococcus aureus subsp. aureus Mu50
uacauuuugugacuaauagcgu

SEQ ID NO: 6195 - RNA, 22 nt, Staphylococcus aureus subsp. aureus Mu50
uaauauucgcacucauuauucc

SEQ ID NO: 6196 - RNA, 22 nt, Staphylococcus aureus subsp. aureus Mu50
uaaguggauuguaauuauauua

SEQ ID NO: 6197 - RNA, 22 nt, Staphylococcus aureus subsp. aureus Mu50
ucggucuaauuuuauagaaggu

SEQ ID NO: 6198 - RNA, 22 nt, Staphylococcus aureus subsp. aureus Mu50
ucgcugcaucguauaguuguug

SEQ ID NO: 6199 - RNA, 22 nt, Staphylococcus aureus subsp. aureus Mu50
ucauuaaugucuacguaugaau

SEQ ID NO: 6200 - RNA, 22 nt, Staphylococcus aureus subsp. aureus Mu50
ucauaauagauucuauuuuuaa

SEQ ID NO: 6201 - RNA, 22 nt, Staphylococcus aureus subsp. aureus Mu50
ucacuagagcuaugaaacuugg

SEQ ID NO: 6202 - RNA, 22 nt, Staphylococcus aureus subsp. aureus Mu50
ucaaaaaugaagacauaguuaa

SEQ ID NO: 6203 - RNA, 22 nt, Staphylococcus aureus subsp. aureus Mu50
gugaaaaugaacguauugaugc

SEQ ID NO: 6204 - RNA, 22 nt, Staphylococcus aureus subsp. aureus Mu50
gugcuacacguucaucaccauu

SEQ ID NO: 6205 - RNA, 22 nt, Staphylococcus aureus subsp. aureus Mu50
gugaguugaaguagcuugucau

SEQ ID NO: 6206 - RNA, 22 nt, Staphylococcus aureus subsp. aureus Mu50
guugauguugcuaacuucuuaa

SEQ ID NO: 6207 - RNA, 22 nt, Staphylococcus aureus subsp. aureus Mu50
uaaaagcuucuaacaugauacg

SEQ ID NO: 6208 - RNA, 22 nt, Staphylococcus aureus subsp. aureus Mu50
uaaaauuauggauacacugauu

SEQ ID NO: 6209 - RNA, 20 nt, Staphylococcus aureus subsp. aureus Mu50
uaaagacuacuuacagcgua

SEQ ID NO: 6210 - RNA, 22 nt, Staphylococcus aureus subsp. aureus Mu50
gugugggauugcauuguucacu

SEQ ID NO: 6211 - RNA, 22 nt, Staphylococcus aureus subsp. aureus Mu50
guaguugacugaacgaaaaugc

SEQ ID NO: 6212 - RNA, 22 nt, Staphylococcus aureus subsp. aureus Mu50
guaaaaccuguugauacaacug

SEQ ID NO: 6213 - RNA, 22 nt, Staphylococcus aureus subsp. aureus Mu50
aaacugcuaauguagucaugag

SEQ ID NO: 6214 - RNA, 22 nt, Staphylococcus aureus subsp. aureus Mu50
aaagcucucuucauaaucaugu

SEQ ID NO: 6215 - RNA, 22 nt, Staphylococcus aureus subsp. aureus Mu50
aaauacuuuccauguauggugu

SEQ ID NO: 6216 - RNA, 22 nt, Staphylococcus aureus subsp. aureus Mu50
aaaaugaugauaaacuaguaua

SEQ ID NO: 6217 - RNA, 22 nt, Staphylococcus aureus subsp. aureus Mu50
aaaaauguccuccuguucauca

SEQ ID NO: 6218 - RNA, 22 nt, Staphylococcus aureus subsp. aureus Mu50
aagcgauuuuacuugaagauac

SEQ ID NO: 6219 - RNA, 22 nt, Staphylococcus aureus subsp. aureus Mu50
aacaauuaaugaucuuacagaa

SEQ ID NO: 6220 - RNA, 22 nt, Staphylococcus aureus subsp. aureus Mu50
aacauuuucaauaauugauucg

SEQ ID NO: 6221 - RNA, 22 nt, Staphylococcus aureus subsp. aureus Mu50
aauuuuaguagggacaacauug

SEQ ID NO: 6222 - RNA, 22 nt, Staphylococcus aureus subsp. aureus Mu50
aauuuuuguacguucaauauca

SEQ ID NO: 6223 - RNA, 22 nt, Staphylococcus aureus subsp. aureus Mu50
aauuuaaauuuagauccuguag

SEQ ID NO: 6224 - RNA, 22 nt, Staphylococcus aureus subsp. aureus Mu50
aauuccaaaagccagaagguac

SEQ ID NO: 6225 - RNA, 22 nt, Staphylococcus aureus subsp. aureus Mu50
aauucuacaucaauccuacagg

SEQ ID NO: 6226 - RNA, 22 nt, Staphylococcus aureus subsp. aureus Mu50
aauugaggcggaauuagcgcgu

SEQ ID NO: 6227 - RNA, 22 nt, Staphylococcus aureus subsp. aureus Mu50
aauuacuuuagccauugcuacc

SEQ ID NO: 6228 - RNA, 22 nt, Staphylococcus aureus subsp. aureus Mu50
aauuucagcacgacgauuaaau

SEQ ID NO: 6229 - RNA, 22 nt, Staphylococcus aureus subsp. aureus Mu50
aaugaaaugaagauugcacuca

SEQ ID NO: 6230 - RNA, 22 nt, Staphylococcus aureus subsp. aureus Mu50
aaucaaauuauauugagccguu

SEQ ID NO: 6231 - RNA, 22 nt, Staphylococcus aureus subsp. aureus Mu50
aauacacuaaucgcacguacuc

SEQ ID NO: 6232 - RNA, 22 nt, Staphylococcus aureus subsp. aureus Mu50
aauuaacuuuguuaauagaguu

SEQ ID NO: 6233 - RNA, 22 nt, Staphylococcus aureus subsp. aureus Mu50
aaugagagcccccuuuaccaca

SEQ ID NO: 6234 - RNA, 22 nt, Staphylococcus aureus subsp. aureus Mu50
aaugauaagcgacaguuaauaa

SEQ ID NO: 6235 - RNA, 22 nt, Staphylococcus aureus subsp. aureus Mu50
aaugggagugggacagaaauga

SEQ ID NO: 6236 - RNA, 22 nt, Staphylococcus aureus subsp. aureus Mu50
aaugggguaaucaugaugugcu

SEQ ID NO: 6237 - RNA, 22 nt, Staphylococcus aureus subsp. aureus Mu50
aauaguuguaccgacagcgccu

SEQ ID NO: 6238 - RNA, 22 nt, Staphylococcus aureus subsp. aureus Mu50
aauagagaacagcaguaagacg

SEQ ID NO: 6239 - RNA, 22 nt, Staphylococcus aureus subsp. aureus Mu50
aauaaaguuauucauguagauu

SEQ ID NO: 6240 - RNA, 21 nt, Staphylococcus aureus subsp. aureus Mu50
aauaacaguuacaaaugcuga

SEQ ID NO: 6241 - RNA, 22 nt, Staphylococcus aureus subsp. aureus Mu50
aauaaucuauauuaucuuucgu

SEQ ID NO: 6242 - RNA, 22 nt, Staphylococcus aureus subsp. aureus Mu50
aagcuuuuuucaauucuaguca

SEQ ID NO: 6243 - RNA, 22 nt, Staphylococcus aureus subsp. aureus Mu50
acuccgucaaauugcacagcga

SEQ ID NO: 6244 - RNA, 22 nt, Staphylococcus aureus subsp. aureus Mu50
acuauuuguuaauaaauccauu

SEQ ID NO: 6245 - RNA, 19 nt, Staphylococcus aureus subsp. aureus Mu50
acuuugaagggagcauuuc

SEQ ID NO: 6246 - RNA, 22 nt, Staphylococcus aureus subsp. aureus Mu50
agaagacuuauuuacugcguuu

SEQ ID NO: 6247 - RNA, 22 nt, Staphylococcus aureus subsp. aureus Mu50
agaaagugcgguuauuuauaca

SEQ ID NO: 6248 - RNA, 22 nt, Staphylococcus aureus subsp. aureus Mu50
agaaaacagcaguaaaaucauu

SEQ ID NO: 6249 - RNA, 22 nt, Staphylococcus aureus subsp. aureus Mu50
acuuuugagaugcacauuauca

SEQ ID NO: 6250 - RNA, 23 nt, Staphylococcus aureus subsp. aureus Mu50
agacauuuaaugauaaauacuga

SEQ ID NO: 6251 - RNA, 22 nt, Staphylococcus aureus subsp. aureus Mu50
agagauaaaauaaagagguacu

SEQ ID NO: 6252 - RNA, 22 nt, Staphylococcus aureus subsp. aureus Mu50
agagacaaguuuagauugccau

SEQ ID NO: 6253 - RNA, 22 nt, Staphylococcus aureus subsp. aureus Mu50
agauauccauuaugauguagau

SEQ ID NO: 6254 - RNA, 22 nt, Staphylococcus aureus subsp. aureus Mu50
agauauuguugauauggcauuu

SEQ ID NO: 6255 - RNA, 22 nt, Staphylococcus aureus subsp. aureus Mu50
acuagguaaucgucugagugaa

SEQ ID NO: 6256 - RNA, 22 nt, Staphylococcus aureus subsp. aureus Mu50
acguuucagcguuccauucagc

SEQ ID NO: 6257 - RNA, 22 nt, Staphylococcus aureus subsp. aureus Mu50
acagcuggugagauagguguca

SEQ ID NO: 6258 - RNA, 22 nt, Staphylococcus aureus subsp. aureus Mu50
acaguuuagugcgcaaauuaau

SEQ ID NO: 6259 - RNA, 22 nt, Staphylococcus aureus subsp. aureus Mu50
acagaaauaugauguaauuguu

SEQ ID NO: 6260 - RNA, 22 nt, Staphylococcus aureus subsp. aureus Mu50
acagaaauguagcuaacauuuu

SEQ ID NO: 6261 - RNA, 22 nt, Staphylococcus aureus subsp. aureus Mu50
acaucuaacaguaaacauuuag

SEQ ID NO: 6262 - RNA, 22 nt, Staphylococcus aureus subsp. aureus Mu50
acauugggcauaaucacagcua

SEQ ID NO: 6263 - RNA, 22 nt, Staphylococcus aureus subsp. aureus Mu50
acauuuauuugggcuguaacga

SEQ ID NO: 6264 - RNA, 22 nt, Staphylococcus aureus subsp. aureus Mu50
agcaugauacucaauaaaauug

SEQ ID NO: 6265 - RNA, 22 nt, Staphylococcus aureus subsp. aureus Mu50
agccuguauacguuugaguggu

SEQ ID NO: 6266 - RNA, 22 nt, Staphylococcus aureus subsp. aureus Mu50
aguuauaacgaaguuauuaugc

SEQ ID NO: 6267 - RNA, 22 nt, Staphylococcus aureus subsp. aureus Mu50
aguuugaaugauaacucauugc

SEQ ID NO: 6268 - RNA, 22 nt, Staphylococcus aureus subsp. aureus Mu50
auaaacauguuguuucugaaac

SEQ ID NO: 6269 - RNA, 22 nt, Staphylococcus aureus subsp. aureus Mu50
agguuuaacauuauuacaaauc

SEQ ID NO: 6270 - RNA, 18 nt, Staphylococcus aureus subsp. aureus Mu50
aguggcaauguauuagca

SEQ ID NO: 6271 - RNA, 22 nt, Staphylococcus aureus subsp. aureus Mu50
auaaugaugcacaucgcguacu

SEQ ID NO: 6272 - RNA, 22 nt, Staphylococcus aureus subsp. aureus Mu50
auaaaguauauggaaauuuuac

SEQ ID NO: 6273 - RNA, 22 nt, Staphylococcus aureus subsp. aureus Mu50
auacauuagugucgauucguuu

SEQ ID NO: 6274 - RNA, 22 nt, Staphylococcus aureus subsp. aureus Mu50
auauaaguuuuggugacugaau

SEQ ID NO: 6275 - RNA, 22 nt, Staphylococcus aureus subsp. aureus Mu50
auauagauuaaaccgcacuucu

SEQ ID NO: 6276 - RNA, 22 nt, Staphylococcus aureus subsp. aureus Mu50
auagugaguuuguuacauauug

SEQ ID NO: 6277 - RNA, 22 nt, Staphylococcus aureus subsp. aureus Mu50
auaugaaacuacucauuugaag

SEQ ID NO: 6278 - RNA, 22 nt, Staphylococcus aureus subsp. aureus Mu50
auauuuaauguuaaggauguug

SEQ ID NO: 6279 - RNA, 22 nt, Staphylococcus aureus subsp. aureus Mu50
auauuugcuaaaaauacuuuga

SEQ ID NO: 6280 - RNA, 22 nt, Staphylococcus aureus subsp. aureus Mu50
aucuagaaucgcaugauaauuu

SEQ ID NO: 6281 - RNA, 22 nt, Staphylococcus aureus subsp. aureus Mu50
aucaugacuuaugugugaguga

SEQ ID NO: 6282 - RNA, 22 nt, Staphylococcus aureus subsp. aureus Mu50
augauggaagguaaauggcaaa

SEQ ID NO: 6283 - RNA, 22 nt, Staphylococcus aureus subsp. aureus Mu50
auguaaaaaagcugauuucuau

SEQ ID NO: 6284 - RNA, 21 nt, Staphylococcus aureus subsp. aureus Mu50
augcaucuuucugugcuuggu

SEQ ID NO: 6285 - RNA, 22 nt, Staphylococcus aureus subsp. aureus Mu50
augcacauuuauuaguuuuaga

SEQ ID NO: 6286 - RNA, 22 nt, Staphylococcus aureus subsp. aureus Mu50
augacguuguugaauuaucuuc

SEQ ID NO: 6287 - RNA, 22 nt, Staphylococcus aureus subsp. aureus Mu50
cucgcggccuuuuuuauuguaa

SEQ ID NO: 6288 - RNA, 22 nt, Staphylococcus aureus subsp. aureus Mu50
cuauaaauacaagugcauaugg

SEQ ID NO: 6289 - RNA, 22 nt, Staphylococcus aureus subsp. aureus Mu50
cuaauaauugugaauaugcaag

SEQ ID NO: 6290 - RNA, 22 nt, Staphylococcus aureus subsp. aureus Mu50
cauauaaagcgugcgugcuuuu

SEQ ID NO: 6291 - RNA, 20 nt, Staphylococcus aureus subsp. aureus Mu50
caucaguuuuuuuauacgag

SEQ ID NO: 6292 - RNA, 20 nt, Staphylococcus aureus subsp. aureus Mu50
ccagaugguuaugguuuuuu

SEQ ID NO: 6293 - RNA, 22 nt, Staphylococcus aureus subsp. aureus Mu50
cagaugcugcagaugaauuaga

SEQ ID NO: 6294 - RNA, 20 nt, Staphylococcus aureus subsp. aureus Mu50
cacggcucgaacaagucuuu

SEQ ID NO: 6295 - RNA, 22 nt, Staphylococcus aureus subsp. aureus Mu50
cagcuaaauuacuaccuucagu

SEQ ID NO: 6296 - RNA, 22 nt, Staphylococcus aureus subsp. aureus Mu50
caacuuuagguaaugucauguu

SEQ ID NO: 6297 - RNA, 22 nt, Staphylococcus aureus subsp. aureus Mu50
caaaugcugucgucuacuuuua

SEQ ID NO: 6298 - RNA, 22 nt, Staphylococcus aureus subsp. aureus Mu50
auuuugaugagcgugcaauacu

SEQ ID NO: 6299 - RNA, 22 nt, Staphylococcus aureus subsp. aureus Mu50
caaaagcauugaauaaaacugu

SEQ ID NO: 6300 - RNA, 18 nt, Staphylococcus aureus subsp. aureus Mu50
auuucugucccacuccca

SEQ ID NO: 6301 - RNA, 19 nt, Staphylococcus aureus subsp. aureus Mu50
auuucugucccacucccac

SEQ ID NO: 6302 - RNA, 22 nt, Staphylococcus aureus subsp. aureus Mu50
auuucugucccacucccauugg

SEQ ID NO: 6303 - RNA, 22 nt, Staphylococcus aureus subsp. aureus Mu50
auuugaaaggagccgauaaugg

SEQ ID NO: 6304 - RNA, 22 nt, Staphylococcus aureus subsp. aureus Mu50
auuuuauauaaaaagaagaucc

SEQ ID NO: 6305 - RNA, 22 nt, Staphylococcus aureus subsp. aureus Mu50
auguucaucuacaguauuaugu

SEQ ID NO: 6306 - RNA, 22 nt, Staphylococcus aureus subsp. aureus Mu50
auuaaaugauucuuuauuggua

SEQ ID NO: 6307 - RNA, 21 nt, Staphylococcus aureus subsp. aureus Mu50
auuauuggcgucguuucgagu

SEQ ID NO: 6308 - RNA, 22 nt, Staphylococcus aureus subsp. aureus Mu50
auuauuuaccacuuaaacaagc

SEQ ID NO: 6309 - RNA, 22 nt, Staphylococcus aureus subsp. aureus Mu50
uuuuagaaauugucaaugauga

SEQ ID NO: 6310 - RNA, 22 nt, Staphylococcus aureus subsp. aureus Mu50
uuuuaugauaaagaaggauaua

SEQ ID NO: 6311 - RNA, 22 nt, Staphylococcus aureus subsp. aureus Mu50
uuuuauugaucgacacgguaag

SEQ ID NO: 6312 - RNA, 22 nt, Staphylococcus aureus subsp. aureus Mu50
uuuuccaacuucucaguaaauu

SEQ ID NO: 6313 - RNA, 19 nt, Staphylococcus aureus subsp. aureus Mu50
uuugaacuuguauuuguag

SEQ ID NO: 6314 - RNA, 22 nt, Staphylococcus aureus subsp. aureus Mu50
uuugauucagucaguaaagaag

SEQ ID NO: 6315 - RNA, 22 nt, Staphylococcus aureus subsp. aureus Mu50
uuucaucagauugguacgaagc

SEQ ID NO: 6316 - RNA, 22 nt, Staphylococcus aureus subsp. aureus Mu50
uuucacauaguuaacaauugcu

SEQ ID NO: 6317 - RNA, 22 nt, Staphylococcus aureus subsp. aureus Mu50
uuucacauuuggauauuuacga

SEQ ID NO: 6318 - RNA, 22 nt, Staphylococcus aureus subsp. aureus Mu50
uuuauuugaagcgguauauggu

SEQ ID NO: 6319 - RNA, 22 nt, Staphylococcus aureus subsp. aureus Mu50
uuuaccaauaaugaugaacauu

SEQ ID NO: 6320 - RNA, 22 nt, Staphylococcus aureus subsp. aureus Mu50
uuaaaagucacaauacacauga

SEQ ID NO: 6321 - RNA, 22 nt, Staphylococcus aureus subsp. aureus Mu50
uuaaugaagcuguaaacuuauu

SEQ ID NO: 6322 - RNA, 22 nt, Staphylococcus aureus subsp. aureus Mu50
uuaaugauguaaugaaauuagu

SEQ ID NO: 6323 - RNA, 22 nt, Staphylococcus aureus subsp. aureus Mu50
uuaaaaaagcagugaaucauuu

SEQ ID NO: 6324 - RNA, 17 nt, Staphylococcus aureus subsp. aureus Mu50
uucauaucauuacuuug

SEQ ID NO: 6325 - RNA, 20 nt, Staphylococcus aureus subsp. aureus Mu50
uuauugauaguacucagcaa

SEQ ID NO: 6326 - RNA, 22 nt, Staphylococcus aureus subsp. aureus Mu50
uuauaugaaacaagaacuugga

SEQ ID NO: 6327 - RNA, 23 nt, Staphylococcus aureus subsp. aureus Mu50
ugugccauuugaaaauguuauga

SEQ ID NO: 6328 - RNA, 22 nt, Staphylococcus aureus subsp. aureus Mu50
uugauaaggggaguguaguauu

SEQ ID NO: 6329 - RNA, 22 nt, Staphylococcus aureus subsp. aureus Mu50
uugauacagcugguacauuagu

SEQ ID NO: 6330 - RNA, 22 nt, Staphylococcus aureus subsp. aureus Mu50
uugacauuacgacagcacuugu

SEQ ID NO: 6331 - RNA, 23 nt, Staphylococcus aureus subsp. aureus Mu50
uuccaauuccaaaugcaauagca

SEQ ID NO: 6332 - RNA, 22 nt, Staphylococcus aureus subsp. aureus Mu50
uugaauggaguauaucagcuug

SEQ ID NO: 6333 - RNA, 22 nt, Staphylococcus aureus subsp. aureus Mu50
uugcagcacgugauucuggugc

SEQ ID NO: 6334 - RNA, 22 nt, Staphylococcus aureus subsp. aureus Mu50
uuggaggcuaguauguugaaca

SEQ ID NO: 6335 - RNA, 22 nt, Staphylococcus aureus subsp. aureus Mu50
uugggcaucgcuuaaaugguuu

SEQ ID NO: 6336 - RNA, 22 nt, Staphylococcus aureus subsp. aureus Mu50
uugugaaauauucggcgguacu

SEQ ID NO: 6337 - RNA, 22 nt, Staphylococcus aureus subsp. aureus Mu50
uuuaauugcugugcuuggugga

SEQ ID NO: 6338 - RNA, 20 nt, Staphylococcus aureus subsp. aureus Mu50
ucuucaagcuguuucaucuc

SEQ ID NO: 6339 - RNA, 22 nt, Staphylococcus aureus subsp. aureus Mu50
ucuuuuaaucgaccuugagaaa

SEQ ID NO: 6340 - RNA, 22 nt, Staphylococcus aureus subsp. aureus Mu50
ugaacaaccgggcagaaugaaa

SEQ ID NO: 6341 - RNA, 22 nt, Staphylococcus aureus subsp. aureus Mu50
ugaaauauaaaauuguuugagg

SEQ ID NO: 6342 - RNA, 22 nt, Staphylococcus aureus subsp. aureus Mu50
ugaaauacuaacauugacuucu

SEQ ID NO: 6343 - RNA, 22 nt, Staphylococcus aureus subsp. aureus Mu50
ugaaaguguugacgguaugauu

SEQ ID NO: 6344 - RNA, 22 nt, Staphylococcus aureus subsp. aureus Mu50
ugaaagcauuuaucgaacauug

SEQ ID NO: 6345 - RNA, 22 nt, Staphylococcus aureus subsp. aureus Mu50
ugcagaagugaaauuccuguga

SEQ ID NO: 6346 - RNA, 23 nt, Staphylococcus aureus subsp. aureus Mu50
ugcaaauguugagcgcauauuug

SEQ ID NO: 6347 - RNA, 22 nt, Staphylococcus aureus subsp. aureus Mu50
ugauugguggguuuuucuucaa

SEQ ID NO: 6348 - RNA, 22 nt, Staphylococcus aureus subsp. aureus Mu50
ugcuacaaacgcuugugcauua

SEQ ID NO: 6349 - RNA, 22 nt, Staphylococcus aureus subsp. aureus Mu50
ugcauguggcaucucuuguguu

SEQ ID NO: 6350 - RNA, 22 nt, Staphylococcus aureus subsp. aureus Mu50
ugcaucauuuaaagcugcuuca

SEQ ID NO: 6351 - RNA, 23 nt, Staphylococcus aureus subsp. aureus Mu50
uggcuccguuucauuacguaaua

SEQ ID NO: 6352 - RNA, 22 nt, Streptococcus pneumoniae TIGR4
uggagccuuaacagcuguuuuu

SEQ ID NO: 6353 - RNA, 20 nt, Streptococcus pneumoniae TIGR4
uggauugcucucaacugcac

SEQ ID NO: 6354 - RNA, 22 nt, Streptococcus pneumoniae TIGR4
uggaaguauuugccagagaugg

SEQ ID NO: 6355 - RNA, 22 nt, Streptococcus pneumoniae TIGR4
uggaagaagcagauguuaucgu

SEQ ID NO: 6356 - RNA, 22 nt, Streptococcus pneumoniae TIGR4
ugagcugggaagccugucaagg

SEQ ID NO: 6357 - RNA, 22 nt, Streptococcus pneumoniae TIGR4
ugacggaagaagagcgacaggu

SEQ ID NO: 6358 - RNA, 22 nt, Streptococcus pneumoniae TIGR4
uuuaaaaagaauacuggugucg

SEQ ID NO: 6359 - RNA, 22 nt, Streptococcus pneumoniae TIGR4
uuuaaaaagccuauuguaucaa

SEQ ID NO: 6360 - RNA, 22 nt, Streptococcus pneumoniae TIGR4
uugggaugucuuacagccgguu

SEQ ID NO: 6361 - RNA, 22 nt, Streptococcus pneumoniae TIGR4
uugagguuguagauagaacuga

SEQ ID NO: 6362 - RNA, 22 nt, Streptococcus pneumoniae TIGR4
uguggcgacaaacugaugcgaa

SEQ ID NO: 6363 - RNA, 22 nt, Streptococcus pneumoniae TIGR4
uguuauaggcgaaauaggcugc

SEQ ID NO: 6364 - RNA, 22 nt, Streptococcus pneumoniae TIGR4
uuuauugaguauaagaggucuu

SEQ ID NO: 6365 - RNA, 22 nt, Streptococcus pneumoniae TIGR4
caacagcuguguuguuuggaga

SEQ ID NO: 6366 - RNA, 22 nt, Streptococcus pneumoniae TIGR4
cagcuggauagagcauucgccu

SEQ ID NO: 6367 - RNA, 20 nt, Streptococcus pneumoniae TIGR4
cagaagcgaccauggcucac

SEQ ID NO: 6368 - RNA, 22 nt, Streptococcus pneumoniae TIGR4
cauuuuacuugaaagugauuug

SEQ ID NO: 6369 - RNA, 22 nt, Streptococcus pneumoniae TIGR4
ccacacuugcuucagcuggagc

SEQ ID NO: 6370 - RNA, 22 nt, Streptococcus pneumoniae TIGR4
caggugaggacuuggcuuauag

SEQ ID NO: 6371 - RNA, 20 nt, Streptococcus pneumoniae TIGR4
caugcggaaauuauggcuau

SEQ ID NO: 6372 - RNA, 22 nt, Streptococcus pneumoniae TIGR4
cccuacucagcguaagauuucu

SEQ ID NO: 6373 - RNA, 22 nt, Streptococcus pneumoniae TIGR4
cgcugaggcugacgcacuggua

SEQ ID NO: 6374 - RNA, 22 nt, Streptococcus pneumoniae TIGR4
augauauugcacguuuaucagg

SEQ ID NO: 6375 - RNA, 22 nt, Streptococcus pneumoniae TIGR4
agggcagcuucaccugucaaaa

SEQ ID NO: 6376 - RNA, 20 nt, Streptococcus pneumoniae TIGR4
aggggcagaaugauauuucc

SEQ ID NO: 6377 - RNA, 22 nt, Streptococcus pneumoniae TIGR4
aggucacuugauagcuauauuu

SEQ ID NO: 6378 - RNA, 22 nt, Streptococcus pneumoniae TIGR4
agcuagaacaguaucgagaacu

SEQ ID NO: 6379 - RNA, 22 nt, Streptococcus pneumoniae TIGR4
agcugcagaguugaugcuuuua

SEQ ID NO: 6380 - RNA, 22 nt, Streptococcus pneumoniae TIGR4
agccguccauugaaaucauuga

SEQ ID NO: 6381 - RNA, 22 nt, Streptococcus pneumoniae TIGR4
acaauaacccacaaugaggcug

SEQ ID NO: 6382 - RNA, 22 nt, Streptococcus pneumoniae TIGR4
acagcugguuugaggccuugaa

SEQ ID NO: 6383 - RNA, 22 nt, Streptococcus pneumoniae TIGR4
acuaggaagcucguuuaagguu

SEQ ID NO: 6384 - RNA, 22 nt, Streptococcus pneumoniae TIGR4
accccccaccuuucuuaggauc

SEQ ID NO: 6385 - RNA, 22 nt, Streptococcus pneumoniae TIGR4
agaagccuuuaaucuccuuuau

SEQ ID NO: 6386 - RNA, 22 nt, Streptococcus pneumoniae TIGR4
agaaucauuuggcuuuaaaggu

SEQ ID NO: 6387 - RNA, 22 nt, Streptococcus pneumoniae TIGR4
acuauauuucucaggauaagcc

SEQ ID NO: 6388 - RNA, 22 nt, Streptococcus pneumoniae TIGR4
aacuagaaaagguuuuccuuau

SEQ ID NO: 6389 - RNA, 22 nt, Streptococcus pneumoniae TIGR4
aagcgaugcagcuccccccugu

SEQ ID NO: 6390 - RNA, 22 nt, Streptococcus pneumoniae TIGR4
aagauuacuaccaaguagaaac

SEQ ID NO: 6391 - RNA, 22 nt, Streptococcus pneumoniae TIGR4
aaaaaaacuccguagucucuag

SEQ ID NO: 6392 - RNA, 22 nt, Streptococcus pneumoniae TIGR4
aaagauguucaguauagauuag

SEQ ID NO: 6393 - RNA, 20 nt, Streptococcus pneumoniae TIGR4
aacaacaauugacugcuauu

SEQ ID NO: 6394 - RNA, 22 nt, Streptococcus pneumoniae TIGR4
gucauagaagucuuuuuaauua

SEQ ID NO: 6395 - RNA, 22 nt, Streptococcus pneumoniae TIGR4
ggguagcuauacaggcuugcga

SEQ ID NO: 6396 - RNA, 23 nt, Streptococcus pneumoniae TIGR4
gggagcgcacuucgucauacuca

SEQ ID NO: 6397 - RNA, 22 nt, Streptococcus pneumoniae TIGR4
gggaugaguaucuauucuauau

SEQ ID NO: 6398 - RNA, 22 nt, Streptococcus pneumoniae TIGR4
gggaugguggauccggauaagg

SEQ ID NO: 6399 - RNA, 22 nt, Streptococcus pneumoniae TIGR4
gggcaggcuuuggaggagcugu

SEQ ID NO: 6400 - RNA, 21 nt, Streptococcus pneumoniae TIGR4
ggcugcuuugacacggcauuu

SEQ ID NO: 6401 - RNA, 22 nt, Streptococcus pneumoniae TIGR4
ggcucuaccaacuuuuucugag

SEQ ID NO: 6402 - RNA, 22 nt, Streptococcus pneumoniae TIGR4
ggcuaggcaacugugguacuug

SEQ ID NO: 6403 - RNA, 22 nt, Streptococcus pneumoniae TIGR4
ucauugaggacaaucugaagca

SEQ ID NO: 6404 - RNA, 22 nt, Streptococcus pneumoniae TIGR4
ucauauaaucguaccaauccau

SEQ ID NO: 6405 - RNA, 22 nt, Streptococcus pneumoniae TIGR4
ucagucacauauauaauccaag

SEQ ID NO: 6406 - RNA, 22 nt, Streptococcus pneumoniae TIGR4
uccugcaguugcuugcggugca

SEQ ID NO: 6407 - RNA, 16 nt, Streptococcus pneumoniae TIGR4
uaaguucagcaagcuu

SEQ ID NO: 6408 - RNA, 22 nt, Streptococcus pneumoniae TIGR4
uacagacuuaaaagaaacagcu

SEQ ID NO: 6409 - RNA, 22 nt, Streptococcus pneumoniae TIGR4
uauaaguuuugcuacuguugau

SEQ ID NO: 6410 - RNA, 22 nt, Streptococcus pneumoniae TIGR4
gcggcccagggcggagucguaa

SEQ ID NO: 6411 - RNA, 22 nt, Streptococcus pneumoniae TIGR4
cuuuacaucgguuuagguuuuc

SEQ ID NO: 6412 - RNA, 22 nt, Streptococcus pneumoniae TIGR4
gaacucuauuuucagacuugag

SEQ ID NO: 6413 - RNA, 22 nt, Streptococcus pneumoniae TIGR4
gauagaguucuuuuggucggcc

SEQ ID NO: 6414 - RNA, 22 nt, Streptococcus pneumoniae TIGR4
gcaguuggcaugcuugcuccua

SEQ ID NO: 6415 - RNA, 22 nt, Streptococcus pyogenes M1 GAS
gcaacaaacaguagucgguuag

SEQ ID NO: 6416 - RNA, 22 nt, Streptococcus pyogenes M1 GAS
gagcugggcuagcugguucuga

SEQ ID NO: 6417 - RNA, 22 nt, Streptococcus pyogenes M1 GAS
gcuaucuuuuggaaagccugcc

SEQ ID NO: 6418 - RNA, 22 nt, Streptococcus pyogenes M1 GAS
gccugugugauuuugcaagcua

SEQ ID NO: 6419 - RNA, 22 nt, Streptococcus pyogenes M1 GAS
gcugaauuagguggcugggagg

SEQ ID NO: 6420 - RNA, 22 nt, Streptococcus pyogenes M1 GAS
ucucagaagcuauggagcgugu

SEQ ID NO: 6421 - RNA, 22 nt, Streptococcus pyogenes M1 GAS
aaaaugguccagcagauuuggu

SEQ ID NO: 6422 - RNA, 22 nt, Streptococcus pyogenes M1 GAS
aagugucaacuaaaacagcuua

SEQ ID NO: 6423 - RNA, 22 nt, Streptococcus pyogenes M1 GAS
agcuggguaggcuggcgucaga

SEQ ID NO: 6424 - RNA, 22 nt, Streptococcus pyogenes M1 GAS
cucaggcaucuuacauuuugcc

SEQ ID NO: 6425 - RNA, 22 nt, Streptococcus pyogenes M1 GAS
ccuagucugucauuauggguuu

SEQ ID NO: 6426 - RNA, 22 nt, Streptococcus pyogenes M1 GAS
uuugauugguaugaucuagcau

SEQ ID NO: 6427 - RNA, 22 nt, Streptococcus pyogenes M1 GAS
uugggaagggauuugcuagccu

SEQ ID NO: 6428 - RNA, 22 nt, Streptococcus pyogenes M1 GAS
uuggagugauugcacugcuguu

SEQ ID NO: 6429 - RNA, 21 nt, Streptococcus pyogenes M1 GAS
uugauugaugaugcaaguaca

SEQ ID NO: 6430 - RNA, 22 nt, Streptococcus pyogenes M1 GAS
ugagagagcuuguugagcugga

SEQ ID NO: 6431 - RNA, 21 nt, Streptococcus pyogenes M1 GAS
ugagacagaucuggcuugacu

SEQ ID NO: 6432 - RNA, 22 nt, Streptococcus pyogenes M1 GAS
ucugggaaagguuuucagggcu

SEQ ID NO: 6433 - RNA, 21 nt, Streptococcus pyogenes M1 GAS
uggcagaaaccuucucggcuc

SEQ ID NO: 6434 - RNA, 22 nt, Treponema pallidum subsp. pallidum str. Nichols
ugcuggugagaguuuucaagcg

SEQ ID NO: 6435 - RNA, 22 nt, Treponema pallidum subsp. pallidum str. Nichols
uugauucgguuuuguacguucc

SEQ ID NO: 6436 - RNA, 22 nt, Treponema pallidum subsp. pallidum str. Nichols
uugagggucguuugacgcaacu

SEQ ID NO: 6437 - RNA, 22 nt, Treponema pallidum subsp. pallidum str. Nichols
cccccauggagacugcaccuga

SEQ ID NO: 6438 - RNA, 22 nt, Treponema pallidum subsp. pallidum str. Nichols
cauaaucagcgcuaaaggaaau

SEQ ID NO: 6439 - RNA, 22 nt, Treponema pallidum subsp. pallidum str. Nichols
auuuuaaugcagcgucuugcgc

SEQ ID NO: 6440 - RNA, 22 nt, Treponema pallidum subsp. pallidum str. Nichols
auuccauuuuuggaucguaggc

SEQ ID NO: 6441 - RNA, 22 nt, Treponema pallidum subsp. pallidum str. Nichols
aguguauucaaccauuugcuuu

SEQ ID NO: 6442 - RNA, 22 nt, Treponema pallidum subsp. pallidum str. Nichols
auguauguuuuaguucugugga

SEQ ID NO: 6443 - RNA, 22 nt, Treponema pallidum subsp. pallidum str. Nichols
aucaaugucgcggcagagaacu

SEQ ID NO: 6444 - RNA, 22 nt, Treponema pallidum subsp. pallidum str. Nichols
aacaagcaaucguuacucuuuu

SEQ ID NO: 6445 - RNA, 22 nt, Treponema pallidum subsp. pallidum str. Nichols
aagaacuaggagucugugucgc

SEQ ID NO: 6446 - RNA, 22 nt, Treponema pallidum subsp. pallidum str. Nichols
agaaaugaaaggacgcaucauu

SEQ ID NO: 6447 - RNA, 22 nt, Treponema pallidum subsp. pallidum str. Nichols
acgaagacgccucacggaagcu

SEQ ID NO: 6448 - RNA, 20 nt, Treponema pallidum subsp. pallidum str. Nichols
uccugcuccaacugacggug

SEQ ID NO: 6449 - RNA, 22 nt, Treponema pallidum subsp. pallidum str. Nichols
guggcaguuuggauuugaacca

SEQ ID NO: 6450 - RNA, 22 nt, Treponema pallidum subsp. pallidum str. Nichols
gugaugcacgugauuuugugcu

SEQ ID NO: 6451 - RNA, 18 nt, Treponema pallidum subsp. pallidum str. Nichols
guccuuuccggugaacuc

SEQ ID NO: 6452 - RNA, 22 nt, Treponema pallidum subsp. pallidum str. Nichols
gcuguauccgaaauaccauuuu

SEQ ID NO: 6453 - RNA, 22 nt, Treponema pallidum subsp. pallidum str. Nichols
gccugaaagcugcacauacccg

SEQ ID NO: 6454 - RNA, 22 nt, Treponema pallidum subsp. pallidum str. Nichols
gcucuggaaaagauucgcuuca

SEQ ID NO: 6455 - RNA, 22 nt, Treponema pallidum subsp. pallidum str. Nichols
gaggaugaagcguaagguucau

SEQ ID NO: 6456 - RNA, 22 nt, Treponema pallidum subsp. pallidum str. Nichols
cugugguuccaucggacccuuc

SEQ ID NO: 6457 - RNA, 22 nt, Bordetella pertussis
aagcaggggguugccgacgggg

SEQ ID NO: 6458 - RNA, 22 nt, Bordetella pertussis
aagggcagcgugcuggccauca

SEQ ID NO: 6459 - RNA, 22 nt, Bordetella pertussis
acagcaggaugucggcggccau

SEQ ID NO: 6460 - RNA, 19 nt, Bordetella pertussis
acaucucgugcaccagccc

SEQ ID NO: 6461 - RNA, 22 nt, Bordetella pertussis
aagaacaagggcgucaacaggg

SEQ ID NO: 6462 - RNA, 22 nt, Bordetella pertussis
aagccgugaaggcaaucgcgcc

SEQ ID NO: 6463 - RNA, 22 nt, Bordetella pertussis
aaggcagcgccucgaucaccuc

SEQ ID NO: 6464 - RNA, 22 nt, Bordetella pertussis
accgugggcagcuggucguagu

SEQ ID NO: 6465 - RNA, 22 nt, Bordetella pertussis
acgaucuggccgccgagcuggc

SEQ ID NO: 6466 - RNA, 22 nt, Bordetella pertussis
acgaccaggaagaggcgcuguc

SEQ ID NO: 6467 - RNA, 22 nt, Bordetella pertussis
acuguaaaccuuuuagaagugc

SEQ ID NO: 6468 - RNA, 22 nt, Bordetella pertussis
acuuucaugcccggccaguuau

SEQ ID NO: 6469 - RNA, 22 nt, Bordetella pertussis
agggccugcguuucgcuggcau

SEQ ID NO: 6470 - RNA, 19 nt, Bordetella pertussis
agggccuggggcccgagca

SEQ ID NO: 6471 - RNA, 22 nt, Bordetella pertussis
aggugcaggccgcccucggcgc

SEQ ID NO: 6472 - RNA, 22 nt, Bordetella pertussis
agguugaucgcccaugugccau

SEQ ID NO: 6473 - RNA, 22 nt, Bordetella pertussis
agccagcaguugcagcggcugg

SEQ ID NO: 6474 - RNA, 22 nt, Bordetella pertussis
aggaugaggucggcgcgcucga

SEQ ID NO: 6475 - RNA, 22 nt, Bordetella pertussis
auggggccgagcgcccagucgc

SEQ ID NO: 6476 - RNA, 22 nt, Bordetella pertussis
augugcagcgccaccaggcugg

SEQ ID NO: 6477 - RNA, 22 nt, Bordetella pertussis
caccagauacugcgccuggccc

SEQ ID NO: 6478 - RNA, 22 nt, Bordetella pertussis
cagcagggccagcaccgagcca

SEQ ID NO: 6479 - RNA, 22 nt, Bordetella pertussis
cagggcagcgcgcaggaccuga

SEQ ID NO: 6480 - RNA, 22 nt, Bordetella pertussis
caggugaaccuggacuggcugg

SEQ ID NO: 6481 - RNA, 22 nt, Bordetella pertussis
ccagcaggugcggcgucagguu

SEQ ID NO: 6482 - RNA, 22 nt, Bordetella pertussis
ccaguuggucaccucguagccc

SEQ ID NO: 6483 - RNA, 22 nt, Bordetella pertussis
ccgccgugagccacagaaugcc

SEQ ID NO: 6484 - RNA, 20 nt, Bordetella pertussis
ccgugggcacgcugaccuug

SEQ ID NO: 6485 - RNA, 22 nt, Bordetella pertussis
ccgugggcagcgucgugcuggg

SEQ ID NO: 6486 - RNA, 21 nt, Bordetella pertussis
ccgugggcgaguaccuugugc

SEQ ID NO: 6487 - RNA, 22 nt, Bordetella pertussis
ccugaaugauggcgguuccgug

SEQ ID NO: 6488 - RNA, 22 nt, Bordetella pertussis
ccugauggaccacuggcagccg

SEQ ID NO: 6489 - RNA, 22 nt, Bordetella pertussis
cgaagggcgcguuggugaugua

SEQ ID NO: 6490 - RNA, 22 nt, Bordetella pertussis
cgaccagaucaugcgcuugggu

SEQ ID NO: 6491 - RNA, 21 nt, Bordetella pertussis
cgaagaauacgcugacgucgu

SEQ ID NO: 6492 - RNA, 22 nt, Bordetella pertussis
cgacggcaccgacagcaaggag

SEQ ID NO: 6493 - RNA, 22 nt, Bordetella pertussis
cgcagcaagcggcugagcugaa

SEQ ID NO: 6494 - RNA, 22 nt, Bordetella pertussis
cgcagcucgugcgagacguugg

SEQ ID NO: 6495 - RNA, 22 nt, Bordetella pertussis
cgcuccaguagaacgccucgag

SEQ ID NO: 6496 - RNA, 22 nt, Bordetella pertussis
cggcaucagcgccugcaggcgc

SEQ ID NO: 6497 - RNA, 22 nt, Bordetella pertussis
cgggacggcccugcaggaacuc

SEQ ID NO: 6498 - RNA, 22 nt, Bordetella pertussis
cgggccuggcccgccauccgcg

SEQ ID NO: 6499 - RNA, 22 nt, Bordetella pertussis
cguggaugauggccucggcgcg

SEQ ID NO: 6500 - RNA, 22 nt, Bordetella pertussis
cgugugggccguggccgguacg

SEQ ID NO: 6501 - RNA, 22 nt, Bordetella pertussis
gacggcacggcacaggucgacg

SEQ ID NO: 6502 - RNA, 22 nt, Bordetella pertussis
gagaaauaugcugcuaugaagc

SEQ ID NO: 6503 - RNA, 17 nt, Bordetella pertussis
gcaggugcgccugaagg

SEQ ID NO: 6504 - RNA, 22 nt, Bordetella pertussis
gcgccagccugcgcaaccugcu

SEQ ID NO: 6505 - RNA, 22 nt, Bordetella pertussis
gcgugggcacgcaaucgcuuuc

SEQ ID NO: 6506 - RNA, 22 nt, Bordetella pertussis
gcuagcuccugucgugggucgc

SEQ ID NO: 6507 - RNA, 22 nt, Bordetella pertussis
gcucugggcggagucgauaugc

SEQ ID NO: 6508 - RNA, 22 nt, Bordetella pertussis
gcugcugguggucgacggucag

SEQ ID NO: 6509 - RNA, 22 nt, Bordetella pertussis
ggauggaguucagcagcucgca

SEQ ID NO: 6510 - RNA, 22 nt, Bordetella pertussis
ggcagccucgccgagaccguca

SEQ ID NO: 6511 - RNA, 23 nt, Bordetella pertussis
ggcagcaggaacaccgccggcgg

SEQ ID NO: 6512 - RNA, 22 nt, Bordetella pertussis
ggcauccugcacaguccggacg

SEQ ID NO: 6513 - RNA, 22 nt, Bordetella pertussis
gggcaaggucgccguggcagcg

SEQ ID NO: 6514 - RNA, 22 nt, Bordetella pertussis
gggccugaccgugcugggcgcu

SEQ ID NO: 6515 - RNA, 22 nt, Bordetella pertussis
gugcagcgcuugcagccggcgu

SEQ ID NO: 6516 - RNA, 22 nt, Bordetella pertussis
gugcaggccaugaacgaccgcu

SEQ ID NO: 6517 - RNA, 22 nt, Bordetella pertussis
gugccuguccccgcauggggga

SEQ ID NO: 6518 - RNA, 22 nt, Bordetella pertussis
ugaaaauuccuugagcgcccgg

SEQ ID NO: 6519 - RNA, 22 nt, Bordetella pertussis
ugcaggaacacgagauccggcc

SEQ ID NO: 6520 - RNA, 22 nt, Bordetella pertussis
uggcagcagaucgacuacggcu

SEQ ID NO: 6521 - RNA, 23 nt, Bordetella pertussis
uggcauccgacgccgugcucgcg

SEQ ID NO: 6522 - RNA, 22 nt, Bordetella pertussis
ugggcagcgaauucuggcacgg

SEQ ID NO: 6523 - RNA, 22 nt, Bordetella pertussis
uugcagcacgugccguaucgag

SEQ ID NO: 6524 - RNA, 23 nt, Bordetella pertussis
agugggcagggugcaugcgcgcc

SEQ ID NO: 6525 - RNA, 22 nt, Bordetella pertussis
aguuccagcccuucgauggugu

SEQ ID NO: 6526 - RNA, 22 nt, Bordetella pertussis
auagacuuuggcgcuugauucc

SEQ ID NO: 6527 - RNA, 22 nt, Bordetella pertussis
aucaacuuccagaucaugggca

SEQ ID NO: 6528 - RNA, 22 nt, Bordetella pertussis
auccagcccggcggccuggcgc

SEQ ID NO: 6529 - RNA, 22 nt, Bordetella pertussis
auccagccguucgguucgcaag

SEQ ID NO: 6530 - RNA, 22 nt, Bordetella pertussis
auguagcucgccagcagcguca

SEQ ID NO: 6531 - RNA, 22 nt, Bordetella pertussis
cagcaggguggguuugauguug

SEQ ID NO: 6532 - RNA, 22 nt, Bordetella pertussis
caggaacucguggcugacgccu

SEQ ID NO: 6533 - RNA, 22 nt, Bordetella pertussis
ccagcaggcgcuugcgcgucag

SEQ ID NO: 6534 - RNA, 22 nt, Bordetella pertussis
ccagcagguccagcgccugcug

SEQ ID NO: 6535 - RNA, 22 nt, Bordetella pertussis
ccagcaggugcgugucggcaaa

SEQ ID NO: 6536 - RNA, 22 nt, Bordetella pertussis
ccagggacgggagggugccgaa

SEQ ID NO: 6537 - RNA, 22 nt, Bordetella pertussis
ccggcacaggaagcgccagcaa

SEQ ID NO: 6538 - RNA, 22 nt, Bordetella pertussis
ccuguauggcgcugauggccgg

SEQ ID NO: 6539 - RNA, 22 nt, Bordetella pertussis
cgagggcaggccguggcagguu

SEQ ID NO: 6540 - RNA, 20 nt, Bordetella pertussis
cgaucugcugccaugccggu

SEQ ID NO: 6541 - RNA, 22 nt, Bordetella pertussis
cgccgugguggcggccgacaua

SEQ ID NO: 6542 - RNA, 22 nt, Bordetella pertussis
cggcagcaggaacagcgacacg

SEQ ID NO: 6543 - RNA, 22 nt, Bordetella pertussis
cggcagcaucgucagcggcgug

SEQ ID NO: 6544 - RNA, 22 nt, Bordetella pertussis
cggcauccccguggucagcgac

SEQ ID NO: 6545 - RNA, 22 nt, Bordetella pertussis
cggccuguccagcgagaacgug

SEQ ID NO: 6546 - RNA, 22 nt, Bordetella pertussis
cggccuguccaucaugugcuuc

SEQ ID NO: 6547 - RNA, 16 nt, Bordetella pertussis
cgggccuguucgccag

SEQ ID NO: 6548 - RNA, 22 nt, Bordetella pertussis
cuacaacaugaagcugccgcca

SEQ ID NO: 6549 - RNA, 22 nt, Bordetella pertussis
cuggaugacgcgaugcguggaa

SEQ ID NO: 6550 - RNA, 22 nt, Bordetella pertussis
gaacagauuguccgggccgggg

SEQ ID NO: 6551 - RNA, 22 nt, Bordetella pertussis
gaacucuuccgcaaagcggucg

SEQ ID NO: 6552 - RNA, 22 nt, Bordetella pertussis
gacagcacgcgccgcaagggca

SEQ ID NO: 6553 - RNA, 22 nt, Bordetella pertussis
gcagcaggcacccggccagcgu

SEQ ID NO: 6554 - RNA, 22 nt, Bordetella pertussis
gccagccgcugggggguaccca

SEQ ID NO: 6555 - RNA, 22 nt, Bordetella pertussis
gccagccggcccacgaaggcga

SEQ ID NO: 6556 - RNA, 22 nt, Bordetella pertussis
gccagccggugccggccgacca

SEQ ID NO: 6557 - RNA, 22 nt, Bordetella pertussis
gccgugugcuugaugaauggag

SEQ ID NO: 6558 - RNA, 22 nt, Bordetella pertussis
gcgugggcauuuugcugcgccc

SEQ ID NO: 6559 - RNA, 22 nt, Bordetella pertussis
gcgugggccgggcccggcacug

SEQ ID NO: 6560 - RNA, 23 nt, Bordetella pertussis
gcucuggguggccgaggucuggc

SEQ ID NO: 6561 - RNA, 22 nt, Bordetella pertussis
gcuguagcugaagccgucggcc

SEQ ID NO: 6562 - RNA, 22 nt, Bordetella pertussis
ggcagcacgccgaagccgucga

SEQ ID NO: 6563 - RNA, 22 nt, Bordetella pertussis
ggcagcaggauguugcggcgaa

SEQ ID NO: 6564 - RNA, 22 nt, Bordetella pertussis
ggcagcucggccucgggcgcca

SEQ ID NO: 6565 - RNA, 22 nt, Bordetella pertussis
ggccgugggcgccgacgugcgu

SEQ ID NO: 6566 - RNA, 22 nt, Bordetella pertussis
gggcgaagucaccgucagcauc

SEQ ID NO: 6567 - RNA, 22 nt, Bordetella pertussis
guccagccauucgagcagggcc

SEQ ID NO: 6568 - RNA, 22 nt, Bordetella pertussis
gugcgagccgcucaggcccgcg

SEQ ID NO: 6569 - RNA, 22 nt, Bordetella pertussis
uauuacgugcggcugcuggccg

SEQ ID NO: 6570 - RNA, 22 nt, Bordetella pertussis
ucagauggucgagcacauuguc

SEQ ID NO: 6571 - RNA, 22 nt, Bordetella pertussis
ugaaugccagcgcgaccucgca

SEQ ID NO: 6572 - RNA, 22 nt, Bordetella pertussis
ugcacagggucgcccuggcgcc

SEQ ID NO: 6573 - RNA, 22 nt, Bordetella pertussis
ugcagcagcgcggcaucgaccg

SEQ ID NO: 6574 - RNA, 19 nt, Bordetella pertussis
ugcagcaggaucugcuggu

SEQ ID NO: 6575 - RNA, 23 nt, Bordetella pertussis
uggacaaggcgcgcgagguggug

SEQ ID NO: 6576 - RNA, 22 nt, Bordetella pertussis
uggaccagcucgcgggcgcgau

SEQ ID NO: 6577 - RNA, 22 nt, Bordetella pertussis
ugggccugaacgguggcggcca

SEQ ID NO: 6578 - RNA, 22 nt, Bordetella pertussis
ugggccugcugggcaaccuggu

SEQ ID NO: 6579 - RNA, 22 nt, Bordetella pertussis
ugggccuggauggcgccgcauu

SEQ ID NO: 6580 - RNA, 22 nt, Bordetella pertussis
uggugcagcucgucguugucgg

SEQ ID NO: 6581 - RNA, 22 nt, Bordetella pertussis
uggugcaggagcgccugcuguu

SEQ ID NO: 6582 - RNA, 22 nt, Bordetella pertussis
uguggauguucucccugguggu

SEQ ID NO: 6583 - RNA, 22 nt, Bordetella pertussis
uguuccauugccuucugaaccg

SEQ ID NO: 6584 - RNA, 22 nt, Bordetella pertussis
uuggggccguggccggcgcugu

SEQ ID NO: 6585 - RNA, 18 nt, Homo sapiens
uggacagugauuauccau

SEQ ID NO: 6586 - RNA, 23 nt, Homo sapiens
agagugcaauggugccaucucgg

SEQ ID NO: 6587 - RNA, 22 nt, Homo sapiens
aaauugcauugagcugcuuauu

SEQ ID NO: 6588 - RNA, 22 nt, Homo sapiens
uauuucaguugugcagguaguu

SEQ ID NO: 6589 - RNA, 22 nt, Homo sapiens
aauaucacaggguguacacuca

SEQ ID NO: 6590 - RNA, 18 nt, Homo sapiens
gacaguguggcaauuccu

SEQ ID NO: 6591 - RNA, 22 nt, Homo sapiens
aaggaacuggaauauuuugaac

SEQ ID NO: 6592 - RNA, 22 nt, Homo sapiens
uuucauagaucaugcuuuugga

SEQ ID NO: 6593 - RNA, 23 nt, Homo sapiens
uuuguguccccacccaaaucuca

SEQ ID NO: 6594 - RNA, 22 nt, Homo sapiens
uugauauucugagaagcugaag

SEQ ID NO: 6595 - RNA, 22 nt, Homo sapiens
auuaucacaguuuugcauaugg

SEQ ID NO: 6596 - RNA, 22 nt, Homo sapiens
aaauugcaguuaggaugauggu

SEQ ID NO: 6597 - RNA, 22 nt, Homo sapiens
ucagaaccuccuagcaguguuc

SEQ ID NO: 6598 - RNA, 22 nt, Homo sapiens
acagaaccauucacuccccugg

SEQ ID NO: 6599 - RNA, 22 nt, Homo sapiens
uggguaggaccagaaaugcacu

SEQ ID NO: 6600 - RNA, 22 nt, Homo sapiens
aaguggaauguuuguggcacaa

SEQ ID NO: 6601 - RNA, 20 nt, Homo sapiens
ucaaauucuuggccuccagc

SEQ ID NO: 6602 - RNA, 22 nt, Homo sapiens
ucaugucuuguuguauuuauuu

SEQ ID NO: 6603 - RNA, 22 nt, Homo sapiens
ggaagaauauuaggggauuucg

SEQ ID NO: 6604 - RNA, 22 nt, Homo sapiens
aucagagugaugguuuaaguau

SEQ ID NO: 6605 - RNA, 22 nt, Homo sapiens
uuuaguucauuaaggaaucucc

SEQ ID NO: 6606 - RNA, 22 nt, Homo sapiens
uugagaucaugcuacugcacuc

SEQ ID NO: 6607 - RNA, 22 nt, Homo sapiens
ugaacugagacuagacuuguuc

SEQ ID NO: 6608 - RNA, 22 nt, Homo sapiens
gagauauuuagaaauguguucu

SEQ ID NO: 6609 - RNA, 22 nt, Homo sapiens
ccacauuaccuugcuugcucca

SEQ ID NO: 6610 - RNA, 17 nt, Homo sapiens
auaugaauuuuggagau

SEQ ID NO: 6611 - RNA, 22 nt, Homo sapiens
uauuacauccauaggcucugcu

SEQ ID NO: 6612 - RNA, 22 nt, Homo sapiens
acccuuaagcacuaguucagcu

SEQ ID NO: 6613 - RNA, 22 nt, Homo sapiens
gugggaagcuggaacucccucc

SEQ ID NO: 6614 - RNA, 21 nt, Homo sapiens
uuugaucauuaaaagugaauc

SEQ ID NO: 6615 - RNA, 22 nt, Homo sapiens
aauuggcagugcucuugccaca

SEQ ID NO: 6616 - RNA, 18 nt, Homo sapiens
gacaguguggcgauuccu

SEQ ID NO: 6617 - RNA, 22 nt, Homo sapiens
auggacagacacuggccuucug

SEQ ID NO: 6618 - RNA, 22 nt, Homo sapiens
uuuaguccucugaaaaucuaua

SEQ ID NO: 6619 - RNA, 22 nt, Homo sapiens
augugacuugugaaaaguucag

SEQ ID NO: 6620 - RNA, 22 nt, Homo sapiens
uagcaagaugaauuugugcaaa

SEQ ID NO: 6621 - RNA, 22 nt, Homo sapiens
augaguauguucuguauuuuca

SEQ ID NO: 6622 - RNA, 22 nt, Homo sapiens
gcaguguggguagagggcaaga

SEQ ID NO: 6623 - RNA, 22 nt, Homo sapiens
ggugcagcacaccaacauggca

SEQ ID NO: 6624 - RNA, 22 nt, Homo sapiens
uugacaaugcacugugcuaagu

SEQ ID NO: 6625 - RNA, 22 nt, Homo sapiens
ugagauauugggaguaauguca

SEQ ID NO: 6626 - RNA, 20 nt, Homo sapiens
uugacaguggguuguuaaag

SEQ ID NO: 6627 - RNA, 22 nt, Homo sapiens
uuggaaagagguguuuaugacu

SEQ ID NO: 6628 - RNA, 18 nt, Homo sapiens
gacaguguggugauuccu

SEQ ID NO: 6629 - RNA, 21 nt, Homo sapiens
aaucacugucuguuuccccuu

SEQ ID NO: 6630 - RNA, 23 nt, Homo sapiens
ucagugaaggaacaacuaaauag

SEQ ID NO: 6631 - RNA, 22 nt, Homo sapiens
gagaaccauuuggagaaaaagu

SEQ ID NO: 6632 - RNA, 22 nt, Homo sapiens
uggaaaguaguucuaaucuaag

SEQ ID NO: 6633 - RNA, 22 nt, Homo sapiens
uggaaauuaacagggauugucc

SEQ ID NO: 6634 - RNA, 22 nt, Homo sapiens
auuuggguuuuacaucaggcua

SEQ ID NO: 6635 - RNA, 22 nt, Homo sapiens
uggaaaguacugagguccaccu

SEQ ID NO: 6636 - RNA, 22 nt, Homo sapiens
ucauaggucugagaagaaaaua

SEQ ID NO: 6637 - RNA, 22 nt, Homo sapiens
auaaggaguaucauauuaaaac

SEQ ID NO: 6638 - RNA, 18 nt, Homo sapiens
uagaauauaggucauucu

SEQ ID NO: 6639 - RNA, 22 nt, Homo sapiens
aguggauguuguggccugggag

SEQ ID NO: 6640 - RNA, 22 nt, Homo sapiens
ugagcagaaagcugcaaggucg

SEQ ID NO: 6641 - RNA, 22 nt, Homo sapiens
uagaauggaagguugagaagaa

SEQ ID NO: 6642 - RNA, 22 nt, Homo sapiens
uuacuugagauggggugucacu

SEQ ID NO: 6643 - RNA, 22 nt, Homo sapiens
acugcacuuauccuccaauguu

SEQ ID NO: 6644 - RNA, 22 nt, Homo sapiens
guaaauaccaguuucuggaaca

SEQ ID NO: 6645 - RNA, 22 nt, Homo sapiens
aauugcaccaucuagaucaaga

SEQ ID NO: 6646 - RNA, 22 nt, Homo sapiens
uauugaauuugagcugucucuu

SEQ ID NO: 6647 - RNA, 22 nt, Homo sapiens
uggauaguuuacugaagagugg

SEQ ID NO: 6648 - RNA, 22 nt, Homo sapiens
ggccuguaggguauugguaggg

SEQ ID NO: 6649 - RNA, 22 nt, Homo sapiens
auugaaucuaaaaugagucucu

SEQ ID NO: 6650 - RNA, 22 nt, Homo sapiens
ugugucuuuuaucacacaaugu

SEQ ID NO: 6651 - RNA, 20 nt, Homo sapiens
uuugcagaaucuaagaagag

SEQ ID NO: 6652 - RNA, 18 nt, Homo sapiens
guauuccagccugaguga

SEQ ID NO: 6653 - RNA, 18 nt, Homo sapiens
auucuacaggccuuuuga

SEQ ID NO: 6654 - RNA, 22 nt, Homo sapiens
uggaaaguacuugaguuuguau

SEQ ID NO: 6655 - RNA, 22 nt, Homo sapiens
auauuacagagaggaccuggga

SEQ ID NO: 6656 - RNA, 20 nt, Homo sapiens
cagucaugaagaacugugag

SEQ ID NO: 6657 - RNA, 21 nt, Homo sapiens
auggaaagacugccucuucaa

SEQ ID NO: 6658 - RNA, 22 nt, Homo sapiens
ugagaguauaaauugaugcagc

SEQ ID NO: 6659 - RNA, 22 nt, Homo sapiens
uaaugugaauagugcuguaaug

SEQ ID NO: 6660 - RNA, 22 nt, Homo sapiens
agcaagauuguucccauuuucu

SEQ ID NO: 6661 - RNA, 22 nt, Homo sapiens
aggcagcuguuauauacugagu

SEQ ID NO: 6662 - RNA, 22 nt, Homo sapiens
uaucacaguugcauauuuaagg

SEQ ID NO: 6663 - RNA, 20 nt, Homo sapiens
uggaaaguaagucaugauau

SEQ ID NO: 6664 - RNA, 22 nt, Homo sapiens
gacagugugauacuuagucuca

SEQ ID NO: 6665 - RNA, 22 nt, Homo sapiens
uggaaaguccaagccaaccggg

SEQ ID NO: 6666 - RNA, 22 nt, Homo sapiens
uuugacuuuuagaauaugaguu

SEQ ID NO: 6667 - RNA, 22 nt, Homo sapiens
uuucauagccuuugucgucuga

SEQ ID NO: 6668 - RNA, 22 nt, Homo sapiens
gacaguguggcgauuccucaag

SEQ ID NO: 6669 - RNA, 22 nt, Homo sapiens
gauagguucuaagcagguguug

SEQ ID NO: 6670 - RNA, 22 nt, Homo sapiens
auuacccuuagacuccagagug

SEQ ID NO: 6671 - RNA, 20 nt, Homo sapiens
uggaccagagagguggggac

SEQ ID NO: 6672 - RNA, 22 nt, Homo sapiens
ugaaaugaucaguuugguuacu

SEQ ID NO: 6673 - RNA, 22 nt, Homo sapiens
auacaucugccauguuggugug

SEQ ID NO: 6674 - RNA, 22 nt, Homo sapiens
cugaaucauugcauuaucaagg

SEQ ID NO: 6675 - RNA, 22 nt, Homo sapiens
auaaauucauuuaagcuccuua

SEQ ID NO: 6676 - RNA, 22 nt, Homo sapiens
uugagagaaaaggccaugccuu

SEQ ID NO: 6677 - RNA, 22 nt, Homo sapiens
ucagaaccucugauuuauacuu

SEQ ID NO: 6678 - RNA, 18 nt, Homo sapiens
gugagaaugacuguucug

SEQ ID NO: 6679 - RNA, 22 nt, Homo sapiens
aaauugcacaaguggugauuug

SEQ ID NO: 6680 - RNA, 22 nt, Homo sapiens
ugacggaggcauuggaagcuug

SEQ ID NO: 6681 - RNA, 22 nt, Homo sapiens
ugagagacagacauuaucuuau

SEQ ID NO: 6682 - RNA, 16 nt, Homo sapiens
uguccaaauaaauaca

SEQ ID NO: 6683 - RNA, 22 nt, Homo sapiens
ugagaugagagaaugcuugccu

SEQ ID NO: 6684 - RNA, 22 nt, Homo sapiens
ugauguguuuuguaguucaacu

SEQ ID NO: 6685 - RNA, 22 nt, Homo sapiens
ggaagaauaaugggccuuagag

SEQ ID NO: 6686 - RNA, 22 nt, Homo sapiens
ucaaauuccaagucuagguagg

SEQ ID NO: 6687 - RNA, 22 nt, Homo sapiens
auagguuuucacuguagauucu

SEQ ID NO: 6688 - RNA, 22 nt, Homo sapiens
uaaguaguauaagguuuuuuga

SEQ ID NO: 6689 - RNA, 22 nt, Homo sapiens
uguggaaauaaaagaaagguua

SEQ ID NO: 6690 - RNA, 18 nt, Homo sapiens
uggauaguuguuggcaga

SEQ ID NO: 6691 - RNA, 22 nt, Homo sapiens
gauauguaguaguugaaaaaga

SEQ ID NO: 6692 - RNA, 20 nt, Homo sapiens
uucagugcagguaacaaucc

SEQ ID NO: 6693 - RNA, 20 nt, Homo sapiens
uggaaauuaaccuuucaggu

SEQ ID NO: 6694 - RNA, 16 nt, Homo sapiens
uacauuuguuacaugg

SEQ ID NO: 6695 - RNA, 22 nt, Homo sapiens
ggcagcucaggccccgcgcuga

SEQ ID NO: 6696 - RNA, 22 nt, Homo sapiens
gccuguagaagaguagaugacc

SEQ ID NO: 6697 - RNA, 18 nt, Homo sapiens
acaguguguaaggguucu

SEQ ID NO: 6698 - RNA, 22 nt, Homo sapiens
ccuguagcauccaagaagcugc

SEQ ID NO: 6699 - RNA, 22 nt, Homo sapiens
gccaagaagugucuaagcagga

SEQ ID NO: 6700 - RNA, 22 nt, Homo sapiens
gugaaagauuaaaccagugugu

SEQ ID NO: 6701 - RNA, 22 nt, Homo sapiens
cugaaagagcauuugaaugggu

SEQ ID NO: 6702 - RNA, 22 nt, Homo sapiens
aucauauccuagauauaacuuc

SEQ ID NO: 6703 - RNA, 22 nt, Homo sapiens
acuuuuugauggggagaacauu

SEQ ID NO: 6704 - RNA, 22 nt, Homo sapiens
aaaguggacuaagugaauauga

SEQ ID NO: 6705 - RNA, 22 nt, Homo sapiens
aaagucuagaggaucaugugug

SEQ ID NO: 6706 - RNA, 22 nt, Homo sapiens
cuguagcuuuuauaugcuuagc

SEQ ID NO: 6707 - RNA, 22 nt, Homo sapiens
acagccauuccagccaaauacu

SEQ ID NO: 6708 - RNA, 22 nt, Homo sapiens
cuagacacugacguuccuccga

SEQ ID NO: 6709 - RNA, 22 nt, Homo sapiens
uuauucauuaacagggaccaaa

SEQ ID NO: 6710 - RNA, 23 nt, Homo sapiens
uuugagugugauaaacacuguca

SEQ ID NO: 6711 - RNA, 22 nt, Homo sapiens
ugucauagaugauuuuuuucgg

SEQ ID NO: 6712 - RNA, 22 nt, Homo sapiens
gugagaacugugucuuauaaac

SEQ ID NO: 6713 - RNA, 22 nt, Homo sapiens
uagauuauuggcugauuugauc

SEQ ID NO: 6714 - RNA, 22 nt, Homo sapiens
ugacauggagguggaggaagau

SEQ ID NO: 6715 - RNA, 22 nt, Homo sapiens
uuauucauuaauugcuaagguu

SEQ ID NO: 6716 - RNA, 22 nt, Homo sapiens
uucaguaaauguucuuacuaua

SEQ ID NO: 6717 - RNA, 18 nt, Homo sapiens
gacagugugaagauuccu

SEQ ID NO: 6718 - RNA, 22 nt, Homo sapiens
ggacagugaaugccacuccucc

SEQ ID NO: 6719 - RNA, 22 nt, Homo sapiens
uauuacuugucugugucucaau

SEQ ID NO: 6720 - RNA, 22 nt, Homo sapiens
ugugaugaagaguccaagaaca

SEQ ID NO: 6721 - RNA, 22 nt, Homo sapiens
auggacagaaaaaaauagaugu

SEQ ID NO: 6722 - RNA, 20 nt, Homo sapiens
ugacuuguccgagguccccc

SEQ ID NO: 6723 - RNA, 22 nt, Homo sapiens
aauuacauggcaauugggaaau

SEQ ID NO: 6724 - RNA, 22 nt, Homo sapiens
uaagcuauagugaauaaauugc

SEQ ID NO: 6725 - RNA, 22 nt, Homo sapiens
ugaaagacugaaagcuuuucuu

SEQ ID NO: 6726 - RNA, 22 nt, Homo sapiens
uauuuguccccuccaaaaguca

SEQ ID NO: 6727 - RNA, 22 nt, Homo sapiens
auuccaguuugugagaagcugu

SEQ ID NO: 6728 - RNA, 22 nt, Homo sapiens
agcuuuuugggcagcuauugac

SEQ ID NO: 6729 - RNA, 19 nt, Homo sapiens
uuuugcucuuuauaccuau

SEQ ID NO: 6730 - RNA, 22 nt, Homo sapiens
ugucuugagagaggacaugacu

SEQ ID NO: 6731 - RNA, 22 nt, Homo sapiens
auuccagguggcgccauucaca

SEQ ID NO: 6732 - RNA, 21 nt, Homo sapiens
gaaauacugccuuaggagcug

SEQ ID NO: 6733 - RNA, 18 nt, Homo sapiens
acauucagcuugaagaua

SEQ ID NO: 6734 - RNA, 22 nt, Homo sapiens
aggaauguuaguacuucuuagu

SEQ ID NO: 6735 - RNA, 22 nt, Homo sapiens
acaguguguguguucaccuaga

SEQ ID NO: 6736 - RNA, 19 nt, Homo sapiens
ugcagcaauguaaaagaca

SEQ ID NO: 6737 - RNA, 22 nt, Homo sapiens
uuucauagccuucuaaugaguu

SEQ ID NO: 6738 - RNA, 22 nt, Homo sapiens
uuugagaaugcuaccagagaag

SEQ ID NO: 6739 - RNA, 22 nt, Homo sapiens
caggugcauuggcugacaccug

SEQ ID NO: 6740 - RNA, 22 nt, Homo sapiens
ugagcagagaagugcccugcgc

SEQ ID NO: 6741 - RNA, 19 nt, Homo sapiens
ugccaagaaagucagcuua

SEQ ID NO: 6742 - RNA, 22 nt, Homo sapiens
uuucauaguuugcauagggcau

SEQ ID NO: 6743 - RNA, 22 nt, Homo sapiens
uaaggaacucugauaucuggaa

SEQ ID NO: 6744 - RNA, 22 nt, Homo sapiens
agaaccaaucccacauggauac

SEQ ID NO: 6745 - RNA, 22 nt, Homo sapiens
uauuucaguugcguuucccgag

SEQ ID NO: 6746 - RNA, 22 nt, Homo sapiens
auugcauaaacacauuucuuau

SEQ ID NO: 6747 - RNA, 22 nt, Homo sapiens
agagguuuaauugauucacagu

SEQ ID NO: 6748 - RNA, 22 nt, Homo sapiens
uaaguucauucaugaaacuuag

SEQ ID NO: 6749 - RNA, 22 nt, Homo sapiens
guguaaaacaauuagaggauuu

SEQ ID NO: 6750 - RNA, 22 nt, Homo sapiens
ugaauauguuucuaaaagugca

SEQ ID NO: 6751 - RNA, 23 nt, Homo sapiens
uaugucuauucuaaugccagcac

SEQ ID NO: 6752 - RNA, 22 nt, Homo sapiens
ucagggacuuacaaaccagaag

SEQ ID NO: 6753 - RNA, 22 nt, Homo sapiens
gaucacauuguuucauacauau

SEQ ID NO: 6754 - RNA, 22 nt, Homo sapiens
ucauaggucacuguaaccucgu

SEQ ID NO: 6755 - RNA, 22 nt, Homo sapiens
ugauuugucugcaggaauagug

SEQ ID NO: 6756 - RNA, 22 nt, Homo sapiens
cacaguguucauagccaucagg

SEQ ID NO: 6757 - RNA, 22 nt, Homo sapiens
uuggaaaguuguuguaguuauu

SEQ ID NO: 6758 - RNA, 22 nt, Homo sapiens
ucauaucauuagaucuacugua

SEQ ID NO: 6759 - RNA, 22 nt, Homo sapiens
cauagguugggcguuugauuuu

SEQ ID NO: 6760 - RNA, 22 nt, Homo sapiens
aaauucaucaaaugguuuguau

SEQ ID NO: 6761 - RNA, 22 nt, Homo sapiens
auucauagugcuaagguguauc

SEQ ID NO: 6762 - RNA, 22 nt, Homo sapiens
ugaugugucaucugagagagug

SEQ ID NO: 6763 - RNA, 22 nt, Homo sapiens
uuccaugagaugcaucaaagcu

SEQ ID NO: 6764 - RNA, 22 nt, Homo sapiens
uaaguagugugcauguauguau

SEQ ID NO: 6765 - RNA, 22 nt, Homo sapiens
auccugaagcuuuacugaauuc

SEQ ID NO: 6766 - RNA, 22 nt, Homo sapiens
uaucauugccucaaucuguauu

SEQ ID NO: 6767 - RNA, 22 nt, Homo sapiens
ggccuguaaacuagagacccug

SEQ ID NO: 6768 - RNA, 22 nt, Chlamydia trachomatis
uagaagaagacccuucguuugu

SEQ ID NO: 6769 - RNA, 22 nt, Chlamydia trachomatis
guauauuuauauugcccuucuu

SEQ ID NO: 6770 - RNA, 22 nt, Chlamydia trachomatis
gauucucugguauuaacugguu

SEQ ID NO: 6771 - RNA, 22 nt, Chlamydia trachomatis
uugauuaucccgaagauauaac

SEQ ID NO: 6772 - RNA, 22 nt, Chlamydia trachomatis
uggaaguaucgaggaucucugg

SEQ ID NO: 6773 - RNA, 22 nt, Homo sapiens
auagaauguauuaguaaauuug

SEQ ID NO: 6774 - RNA, 22 nt, Homo sapiens
augagaugcaagauuagauggg

SEQ ID NO: 6775 - RNA, 22 nt, Homo sapiens
augagaugaggaauggcccucc

SEQ ID NO: 6776 - RNA, 22 nt, Homo sapiens
uuugcuugaggucuagcuaccc

SEQ ID NO: 6777 - RNA, 22 nt, Homo sapiens
cuuuggagaaaaguucuugggc

SEQ ID NO: 6778 - RNA, 22 nt, Homo sapiens
uuugcagagucuuucgcugggc

SEQ ID NO: 6779 - RNA, 17 nt, Homo sapiens
uuaugagacuucuuagc

SEQ ID NO: 6780 - RNA, 22 nt, Homo sapiens
uaucaagaugacaaacuuugcu

SEQ ID NO: 6781 - RNA, 22 nt, Homo sapiens
ugagaucugucuuuauaguauu

SEQ ID NO: 6782 - RNA, 22 nt, Homo sapiens
augaagaucucugccuuguguc

SEQ ID NO: 6783 - RNA, 22 nt, Homo sapiens
augagaauguaaguuaaugaaa

SEQ ID NO: 6784 - RNA, 22 nt, Homo sapiens
uugaauagaaguguugaaagug

SEQ ID NO: 6785 - RNA, 22 nt, Homo sapiens
ugaguagaacuccuggagaugu

SEQ ID NO: 6786 - RNA, 22 nt, Homo sapiens
gcuuguguuuacuguaguuacu

SEQ ID NO: 6787 - RNA, 22 nt, Homo sapiens
uguaugaguuguuuauaaauuu

SEQ ID NO: 6788 - RNA, 18 nt, Homo sapiens
gcuguugucagagcacau

SEQ ID NO: 6789 - RNA, 22 nt, Homo sapiens
ugaguauguuuagaaguaaagg

SEQ ID NO: 6790 - RNA, 22 nt, Homo sapiens
cuuuaugagguuggauggaucu

SEQ ID NO: 6791 - RNA, 22 nt, Homo sapiens
augaagauguugccuuuuuaau

SEQ ID NO: 6792 - RNA, 22 nt, Homo sapiens
augaguaguugcuaaauauuga

SEQ ID NO: 6793 - RNA, 22 nt, Homo sapiens
augagauauuuuauaagaucau

SEQ ID NO: 6794 - RNA, 22 nt, Homo sapiens
augaggugaguaaauaaaugaa

SEQ ID NO: 6795 - RNA, 22 nt, Homo sapiens
augcuguuuuguagcucccucu

SEQ ID NO: 6796 - RNA, 22 nt, Homo sapiens
ugagacugguuaauugauaaag

SEQ ID NO: 6797 - RNA, 22 nt, Homo sapiens
uggauaguaaagucagauuccc

SEQ ID NO: 6798 - RNA, 22 nt, Homo sapiens
uguaugagagugaaagcauuuc

SEQ ID NO: 6799 - RNA, 22 nt, Homo sapiens
ugagaugauagauauguuaauu

SEQ ID NO: 6800 - RNA, 20 nt, Homo sapiens
uggaguuugaguucuuggag

SEQ ID NO: 6801 - RNA, 22 nt, Homo sapiens
acacaaugguaaguguuugugu

SEQ ID NO: 6802 - RNA, 22 nt, Homo sapiens
gaagauucaaccaaaccagaac

SEQ ID NO: 6803 - RNA, 22 nt, Homo sapiens
uaguaguuuuguguauaauaau

SEQ ID NO: 6804 - RNA, 22 nt, Homo sapiens
augagauauguuaaaaguuaaa

SEQ ID NO: 6805 - RNA, 22 nt, Homo sapiens
uguaugagagacauggcugcuu

SEQ ID NO: 6806 - RNA, 22 nt, Homo sapiens
aguagguguugguagagguuuc

SEQ ID NO: 6807 - RNA, 22 nt, Homo sapiens
aagcuggauuuaguguggagca

SEQ ID NO: 6808 - RNA, 22 nt, Homo sapiens
ucuugcuuguuguucccuucau

SEQ ID NO: 6809 - RNA, 22 nt, Homo sapiens
ugaguagagaauucagcuaagg

SEQ ID NO: 6810 - RNA, 20 nt, Homo sapiens
augguaguagcaccuuuaca

SEQ ID NO: 6811 - RNA, 22 nt, Homo sapiens
uauugcuugaggaaaugguaau

SEQ ID NO: 6812 - RNA, 22 nt, Homo sapiens
agcuuguuuuauagaaagucaa

SEQ ID NO: 6813 - RNA, 22 nt, Homo sapiens
uuccuugugacuaguagugacc

SEQ ID NO: 6814 - RNA, 22 nt, Homo sapiens
ugaauaguuugacagaacucuu

SEQ ID NO: 6815 - RNA, 22 nt, Homo sapiens
augagauacuacaaaugaguuu

SEQ ID NO: 6816 - RNA, 22 nt, Homo sapiens
augagaacauaucaagugauug

SEQ ID NO: 6817 - RNA, 18 nt, Homo sapiens
uggauaguuguuggcaga

SEQ ID NO: 6818 - RNA, 22 nt, Homo sapiens
augagaacugucaaugagagcu

SEQ ID NO: 6819 - RNA, 22 nt, Homo sapiens
aggaagacugaaauugcuguuc

SEQ ID NO: 6820 - RNA, 22 nt, Homo sapiens
augagaugaauaccgacgaugu

SEQ ID NO: 6821 - RNA, 22 nt, Homo sapiens
ugaaaugccuuuaaugaauuua

SEQ ID NO: 6822 - RNA, 22 nt, Homo sapiens
ugagaugcuuguaaauucauuu

SEQ ID NO: 6823 - RNA, 22 nt, Homo sapiens
uggauguacagucaguauuugu

SEQ ID NO: 6824 - RNA, 22 nt, Homo sapiens
gaaagauuuuaacugggagacu

SEQ ID NO: 6825 - RNA, 22 nt, Chlamydophila pneumoniae AR39
uagaaguauuaagccaagauuu

SEQ ID NO: 6826 - RNA, 22 nt, Chlamydophila pneumoniae AR39
aucuauaaaacaucaguugcuu

SEQ ID NO: 6827 - RNA, 22 nt, Chlamydophila pneumoniae AR39
auauauuuagccucuccugauu

SEQ ID NO: 6828 - RNA, 22 nt, Chlamydophila pneumoniae AR39
cuuuauauacccucgcucuuaa

SEQ ID NO: 6829 - RNA, 21 nt, Chlamydophila pneumoniae AR39
auaguaaguucaugcuuguua

SEQ ID NO: 6830 - RNA, 22 nt, Chlamydophila pneumoniae AR39
agcuuuuggauauccuuccuua

SEQ ID NO: 6831 - RNA, 22 nt, Chlamydophila pneumoniae AR39
aagaagaagaauccguggauga

SEQ ID NO: 6832 - RNA, 22 nt, Homo sapiens
augagaacauaucaagugauug

SEQ ID NO: 6833 - RNA, 22 nt, Homo sapiens
aggaagacugaaauugcuguuc

SEQ ID NO: 6834 - RNA, 22 nt, Homo sapiens
augagaugaggaauggcccucc

SEQ ID NO: 6835 - RNA, 22 nt, Homo sapiens
ugaaaugccuuuaaugaauuua

SEQ ID NO: 6836 - RNA, 22 nt, Homo sapiens
ugagaugauagauauguuaauu

SEQ ID NO: 6837 - RNA, 22 nt, Homo sapiens
uuugcuugaggucuagcuaccc

SEQ ID NO: 6838 - RNA, 22 nt, Homo sapiens
uggauaguaaagucagauuccc

SEQ ID NO: 6839 - RNA, 22 nt, Homo sapiens
uggauguacagucaguauuugu

SEQ ID NO: 6840 - RNA, 22 nt, Homo sapiens
acacaaugguaaguguuugugu

SEQ ID NO: 6841 - RNA, 22 nt, Homo sapiens
aagcuggauuuaguguggagca

SEQ ID NO: 6842 - RNA, 22 nt, Homo sapiens
augagaugaauaccgacgaugu

SEQ ID NO: 6843 - RNA, 22 nt, Homo sapiens
uguaugagagacauggcugcuu

SEQ ID NO: 6844 - RNA, 22 nt, Homo sapiens
augaggugaguaaauaaaugaa

SEQ ID NO: 6845 - RNA, 22 nt, Homo sapiens
uuugcagagucuuucgcugggc

SEQ ID NO: 6846 - RNA, 22 nt, Homo sapiens
cuuuaugagguuggauggaucu

SEQ ID NO: 6847 - RNA, 22 nt, Homo sapiens
ugaguagagaauucagcuaagg

SEQ ID NO: 6848 - RNA, 22 nt, Homo sapiens
augagauauguuaaaaguuaaa

SEQ ID NO: 6849 - RNA, 22 nt, Homo sapiens
uaucaagaugacaaacuuugcu

SEQ ID NO: 6850 - RNA, 20 nt, Homo sapiens
augguaguagcaccuuuaca

SEQ ID NO: 6851 - RNA, 22 nt, Homo sapiens
ugagaucugucuuuauaguauu

SEQ ID NO: 6852 - RNA, 22 nt, Homo sapiens
uguaugagagugaaagcauuuc

SEQ ID NO: 6853 - RNA, 22 nt, Homo sapiens
uuccuugugacuaguagugacc

SEQ ID NO: 6854 - RNA, 22 nt, Homo sapiens
gaagauucaaccaaaccagaac

SEQ ID NO: 6855 - RNA, 22 nt, Homo sapiens
augagauacuacaaaugaguuu

SEQ ID NO: 6856 - RNA, 22 nt, Homo sapiens
augaagauguugccuuuuuaau

SEQ ID NO: 6857 - RNA, 22 nt, Homo sapiens
aguagguguugguagagguuuc

SEQ ID NO: 6858 - RNA, 22 nt, Homo sapiens
uaguaguuuuguguauaauaau

SEQ ID NO: 6859 - RNA, 22 nt, Homo sapiens
augagaacugucaaugagagcu

SEQ ID NO: 6860 - RNA, 22 nt, Homo sapiens
gaaagauuuuaacugggagacu

SEQ ID NO: 6861 - RNA, 22 nt, Homo sapiens
augaagaucucugccuuguguc

SEQ ID NO: 6862 - RNA, 22 nt, Homo sapiens
augcuguuuuguagcucccucu

SEQ ID NO: 6863 - RNA, 22 nt, Homo sapiens
agcuuguuuuauagaaagucaa

SEQ ID NO: 6864 - RNA, 22 nt, Homo sapiens
uauugcuugaggaaaugguaau

SEQ ID NO: 6865 - RNA, 22 nt, Homo sapiens
ugagaugcuuguaaauucauuu

SEQ ID NO: 6866 - RNA, 22 nt, Homo sapiens
auagaauguauuaguaaauuug

SEQ ID NO: 6867 - RNA, 22 nt, Homo sapiens
augaguaguugcuaaauauuga

SEQ ID NO: 6868 - RNA, 20 nt, Homo sapiens
uggaguuugaguucuuggag

SEQ ID NO: 6869 - RNA, 22 nt, Homo sapiens
uguaugaguuguuuauaaauuu

SEQ ID NO: 6870 - RNA, 18 nt, Homo sapiens
uggauaguuguuggcaga

SEQ ID NO: 6871 - RNA, 22 nt, Homo sapiens
uugaauagaaguguugaaagug

SEQ ID NO: 6872 - RNA, 22 nt, Homo sapiens
ugaguagaacuccuggagaugu

SEQ ID NO: 6873 - RNA, 22 nt, Homo sapiens
gcuuguguuuacuguaguuacu

SEQ ID NO: 6874 - RNA, 22 nt, Homo sapiens
augagaugcaagauuagauggg

SEQ ID NO: 6875 - RNA, 22 nt, Homo sapiens
ugaauaguuugacagaacucuu

SEQ ID NO: 6876 - RNA, 22 nt, Homo sapiens
ucuugcuuguuguucccuucau

SEQ ID NO: 6877 - RNA, 18 nt, Homo sapiens
gcuguugucagagcacau

SEQ ID NO: 6878 - RNA, 22 nt, Homo sapiens
cuuuggagaaaaguucuugggc

SEQ ID NO: 6879 - RNA, 17 nt, Homo sapiens
uuaugagacuucuuagc

SEQ ID NO: 6880 - RNA, 22 nt, Homo sapiens
ugagacugguuaauugauaaag

SEQ ID NO: 6881 - RNA, 22 nt, Homo sapiens
ugaguauguuuagaaguaaagg

SEQ ID NO: 6882 - RNA, 22 nt, Homo sapiens
augagauauuuuauaagaucau

SEQ ID NO: 6883 - RNA, 22 nt, Homo sapiens
augagaauguaaguuaaugaaa

SEQ ID NO: 6884 - RNA, 22 nt, Chlamydophila pneumoniae CWL029
uguaugaguuucucuucaucca

SEQ ID NO: 6885 - RNA, 22 nt, Chlamydophila pneumoniae CWL029
ucuuuaauuuucugaaagauua

SEQ ID NO: 6886 - RNA, 22 nt, Homo sapiens
ugaauaguuugacagaacucuu

SEQ ID NO: 6887 - RNA, 22 nt, Homo sapiens
ucuugcuuguuguucccuucau

SEQ ID NO: 6888 - RNA, 22 nt, Homo sapiens
uguaugagagugaaagcauuuc

SEQ ID NO: 6889 - RNA, 22 nt, Homo sapiens
augaggugaguaaauaaaugaa

SEQ ID NO: 6890 - RNA, 22 nt, Homo sapiens
uggauguacagucaguauuugu

SEQ ID NO: 6891 - RNA, 22 nt, Homo sapiens
augagaauguaaguuaaugaaa

SEQ ID NO: 6892 - RNA, 22 nt, Homo sapiens
ugagaugauagauauguuaauu

SEQ ID NO: 6893 - RNA, 22 nt, Homo sapiens
ugaguagaacuccuggagaugu

SEQ ID NO: 6894 - RNA, 22 nt, Homo sapiens
ugagacugguuaauugauaaag

SEQ ID NO: 6895 - RNA, 22 nt, Homo sapiens
cuuuggagaaaaguucuugggc

SEQ ID NO: 6896 - RNA, 22 nt, Homo sapiens
augcuguuuuguagcucccucu

SEQ ID NO: 6897 - RNA, 22 nt, Homo sapiens
augagaacugucaaugagagcu

SEQ ID NO: 6898 - RNA, 17 nt, Homo sapiens
uuaugagacuucuuagc

SEQ ID NO: 6899 - RNA, 20 nt, Homo sapiens
uggaguuugaguucuuggag

SEQ ID NO: 6900 - RNA, 22 nt, Homo sapiens
uguaugagagacauggcugcuu

SEQ ID NO: 6901 - RNA, 22 nt, Homo sapiens
auagaauguauuaguaaauuug

SEQ ID NO: 6902 - RNA, 18 nt, Homo sapiens
gcuguugucagagcacau

SEQ ID NO: 6903 - RNA, 22 nt, Homo sapiens
uguaugaguuguuuauaaauuu

SEQ ID NO: 6904 - RNA, 22 nt, Homo sapiens
aagcuggauuuaguguggagca

SEQ ID NO: 6905 - RNA, 18 nt, Homo sapiens
uggauaguuguuggcaga

SEQ ID NO: 6906 - RNA, 22 nt, Homo sapiens
uauugcuugaggaaaugguaau

SEQ ID NO: 6907 - RNA, 22 nt, Homo sapiens
ugaaaugccuuuaaugaauuua

SEQ ID NO: 6908 - RNA, 22 nt, Homo sapiens
augaagaucucugccuuguguc

SEQ ID NO: 6909 - RNA, 22 nt, Homo sapiens
cuuuaugagguuggauggaucu

SEQ ID NO: 6910 - RNA, 22 nt, Homo sapiens
ugagaucugucuuuauaguauu

SEQ ID NO: 6911 - RNA, 22 nt, Homo sapiens
augaguaguugcuaaauauuga

SEQ ID NO: 6912 - RNA, 22 nt, Homo sapiens
agcuuguuuuauagaaagucaa

SEQ ID NO: 6913 - RNA, 22 nt, Homo sapiens
uuugcuugaggucuagcuaccc

SEQ ID NO: 6914 - RNA, 22 nt, Homo sapiens
uaguaguuuuguguauaauaau

SEQ ID NO: 6915 - RNA, 22 nt, Homo sapiens
ugagaugcuuguaaauucauuu

SEQ ID NO: 6916 - RNA, 22 nt, Homo sapiens
augagaugcaagauuagauggg

SEQ ID NO: 6917 - RNA, 22 nt, Homo sapiens
augaagauguugccuuuuuaau

SEQ ID NO: 6918 - RNA, 22 nt, Homo sapiens
uaucaagaugacaaacuuugcu

SEQ ID NO: 6919 - RNA, 22 nt, Homo sapiens
gaagauucaaccaaaccagaac

SEQ ID NO: 6920 - RNA, 22 nt, Homo sapiens
aggaagacugaaauugcuguuc

SEQ ID NO: 6921 - RNA, 22 nt, Homo sapiens
augagauauuuuauaagaucau

SEQ ID NO: 6922 - RNA, 22 nt, Homo sapiens
gcuuguguuuacuguaguuacu

SEQ ID NO: 6923 - RNA, 22 nt, Homo sapiens
augagaugaggaauggcccucc

SEQ ID NO: 6924 - RNA, 22 nt, Homo sapiens
aguagguguugguagagguuuc

SEQ ID NO: 6925 - RNA, 22 nt, Homo sapiens
augagauauguuaaaaguuaaa

SEQ ID NO: 6926 - RNA, 22 nt, Homo sapiens
augagauacuacaaaugaguuu

SEQ ID NO: 6927 - RNA, 22 nt, Homo sapiens
gaaagauuuuaacugggagacu

SEQ ID NO: 6928 - RNA, 22 nt, Homo sapiens
ugaguagagaauucagcuaagg

SEQ ID NO: 6929 - RNA, 22 nt, Homo sapiens
ugaguauguuuagaaguaaagg

SEQ ID NO: 6930 - RNA, 22 nt, Homo sapiens
uugaauagaaguguugaaagug

SEQ ID NO: 6931 - RNA, 22 nt, Homo sapiens
augagaugaauaccgacgaugu

SEQ ID NO: 6932 - RNA, 20 nt, Homo sapiens
augguaguagcaccuuuaca

SEQ ID NO: 6933 - RNA, 22 nt, Homo sapiens
acacaaugguaaguguuugugu

SEQ ID NO: 6934 - RNA, 22 nt, Homo sapiens
uggauaguaaagucagauuccc

SEQ ID NO: 6935 - RNA, 22 nt, Homo sapiens
uuugcagagucuuucgcugggc

SEQ ID NO: 6936 - RNA, 22 nt, Homo sapiens
augagaacauaucaagugauug

SEQ ID NO: 6937 - RNA, 22 nt, Homo sapiens
uuccuugugacuaguagugacc

SEQ ID NO: 6938 - RNA, 22 nt, Chlamydophila pneumoniae J138
uuuguuauuacuaguugucuga

SEQ ID NO: 6939 - RNA, 22 nt, Chlamydophila pneumoniae J138
gcagaacuuagagcuucaauau

SEQ ID NO: 6940 - RNA, 20 nt, Homo sapiens
uggaguuugaguucuuggag

SEQ ID NO: 6941 - RNA, 22 nt, Homo sapiens
ugaguagagaauucagcuaagg

SEQ ID NO: 6942 - RNA, 22 nt, Homo sapiens
uuccuugugacuaguagugacc

SEQ ID NO: 6943 - RNA, 22 nt, Homo sapiens
uuugcagagucuuucgcugggc

SEQ ID NO: 6944 - RNA, 22 nt, Homo sapiens
ucuugcuuguuguucccuucau

SEQ ID NO: 6945 - RNA, 22 nt, Homo sapiens
ugagaucugucuuuauaguauu

SEQ ID NO: 6946 - RNA, 22 nt, Homo sapiens
augagauauguuaaaaguuaaa

SEQ ID NO: 6947 - RNA, 22 nt, Homo sapiens
aguagguguugguagagguuuc

SEQ ID NO: 6948 - RNA, 22 nt, Homo sapiens
gcuuguguuuacuguaguuacu

SEQ ID NO: 6949 - RNA, 22 nt, Homo sapiens
ugaauaguuugacagaacucuu

SEQ ID NO: 6950 - RNA, 22 nt, Homo sapiens
uggauaguaaagucagauuccc

SEQ ID NO: 6951 - RNA, 22 nt, Homo sapiens
augagaugaggaauggcccucc

SEQ ID NO: 6952 - RNA, 22 nt, Homo sapiens
gaagauucaaccaaaccagaac

SEQ ID NO: 6953 - RNA, 22 nt, Homo sapiens
acacaaugguaaguguuugugu

SEQ ID NO: 6954 - RNA, 22 nt, Homo sapiens
augagaugcaagauuagauggg

SEQ ID NO: 6955 - RNA, 22 nt, Homo sapiens
augagaugaauaccgacgaugu

SEQ ID NO: 6956 - RNA, 22 nt, Homo sapiens
uggauguacagucaguauuugu

SEQ ID NO: 6957 - RNA, 22 nt, Homo sapiens
augagaacauaucaagugauug

SEQ ID NO: 6958 - RNA, 22 nt, Homo sapiens
uguaugagagacauggcugcuu

SEQ ID NO: 6959 - RNA, 22 nt, Homo sapiens
ugagacugguuaauugauaaag

SEQ ID NO: 6960 - RNA, 22 nt, Homo sapiens
augagauauuuuauaagaucau

SEQ ID NO: 6961 - RNA, 17 nt, Homo sapiens
uuaugagacuucuuagc

SEQ ID NO: 6962 - RNA, 22 nt, Homo sapiens
cuuuggagaaaaguucuugggc

SEQ ID NO: 6963 - RNA, 22 nt, Homo sapiens
ugaguagaacuccuggagaugu

SEQ ID NO: 6964 - RNA, 22 nt, Homo sapiens
uugaauagaaguguugaaagug

SEQ ID NO: 6965 - RNA, 22 nt, Homo sapiens
ugaguauguuuagaaguaaagg

SEQ ID NO: 6966 - RNA, 22 nt, Homo sapiens
uaguaguuuuguguauaauaau

SEQ ID NO: 6967 - RNA, 22 nt, Homo sapiens
augagaauguaaguuaaugaaa

SEQ ID NO: 6968 - RNA, 22 nt, Homo sapiens
cuuuaugagguuggauggaucu

SEQ ID NO: 6969 - RNA, 22 nt, Homo sapiens
uguaugaguuguuuauaaauuu

SEQ ID NO: 6970 - RNA, 18 nt, Homo sapiens
gcuguugucagagcacau

SEQ ID NO: 6971 - RNA, 22 nt, Homo sapiens
uaucaagaugacaaacuuugcu

SEQ ID NO: 6972 - RNA, 22 nt, Homo sapiens
ugagaugauagauauguuaauu

SEQ ID NO: 6973 - RNA, 18 nt, Homo sapiens
uggauaguuguuggcaga

SEQ ID NO: 6974 - RNA, 22 nt, Homo sapiens
auagaauguauuaguaaauuug

SEQ ID NO: 6975 - RNA, 22 nt, Homo sapiens
uguaugagagugaaagcauuuc

SEQ ID NO: 6976 - RNA, 22 nt, Homo sapiens
uuugcuugaggucuagcuaccc

SEQ ID NO: 6977 - RNA, 22 nt, Homo sapiens
augaggugaguaaauaaaugaa

SEQ ID NO: 6978 - RNA, 22 nt, Homo sapiens
agcuuguuuuauagaaagucaa

SEQ ID NO: 6979 - RNA, 22 nt, Homo sapiens
augagauacuacaaaugaguuu

SEQ ID NO: 6980 - RNA, 22 nt, Homo sapiens
aggaagacugaaauugcuguuc

SEQ ID NO: 6981 - RNA, 22 nt, Homo sapiens
ugaaaugccuuuaaugaauuua

SEQ ID NO: 6982 - RNA, 22 nt, Homo sapiens
uauugcuugaggaaaugguaau

SEQ ID NO: 6983 - RNA, 22 nt, Homo sapiens
augaagaucucugccuuguguc

SEQ ID NO: 6984 - RNA, 20 nt, Homo sapiens
augguaguagcaccuuuaca

SEQ ID NO: 6985 - RNA, 22 nt, Homo sapiens
augcuguuuuguagcucccucu

SEQ ID NO: 6986 - RNA, 22 nt, Homo sapiens
augaguaguugcuaaauauuga

SEQ ID NO: 6987 - RNA, 22 nt, Homo sapiens
ugagaugcuuguaaauucauuu

SEQ ID NO: 6988 - RNA, 22 nt, Homo sapiens
aagcuggauuuaguguggagca

SEQ ID NO: 6989 - RNA, 22 nt, Homo sapiens
augagaacugucaaugagagcu

SEQ ID NO: 6990 - RNA, 22 nt, Homo sapiens
gaaagauuuuaacugggagacu

SEQ ID NO: 6991 - RNA, 22 nt, Homo sapiens
augaagauguugccuuuuuaau

SEQ ID NO: 6992 - RNA, 17 nt, Homo sapiens
uuaugagacuucuuagc

SEQ ID NO: 6993 - RNA, 22 nt, Homo sapiens
uugaauagaaguguugaaagug

SEQ ID NO: 6994 - RNA, 22 nt, Homo sapiens
augagaugaggaauggcccucc

SEQ ID NO: 6995 - RNA, 22 nt, Homo sapiens
ugagacugguuaauugauaaag

SEQ ID NO: 6996 - RNA, 22 nt, Homo sapiens
cuuuggagaaaaguucuugggc

SEQ ID NO: 6997 - RNA, 22 nt, Homo sapiens
ugaguauguuuagaaguaaagg

SEQ ID NO: 6998 - RNA, 18 nt, Homo sapiens
gcuguugucagagcacau

SEQ ID NO: 6999 - RNA, 22 nt, Homo sapiens
augagaacauaucaagugauug

SEQ ID NO: 7000 - RNA, 22 nt, Homo sapiens
uggauaguaaagucagauuccc

SEQ ID NO: 7001 - RNA, 22 nt, Homo sapiens
ugaaaugccuuuaaugaauuua

SEQ ID NO: 7002 - RNA, 22 nt, Homo sapiens
augaggugaguaaauaaaugaa

SEQ ID NO: 7003 - RNA, 22 nt, Homo sapiens
uuugcuugaggucuagcuaccc

SEQ ID NO: 7004 - RNA, 22 nt, Homo sapiens
uggauguacagucaguauuugu

SEQ ID NO: 7005 - RNA, 22 nt, Homo sapiens
uguaugagagugaaagcauuuc

SEQ ID NO: 7006 - RNA, 22 nt, Homo sapiens
cuuuaugagguuggauggaucu

SEQ ID NO: 7007 - RNA, 22 nt, Homo sapiens
augagauauuuuauaagaucau

SEQ ID NO: 7008 - RNA, 22 nt, Homo sapiens
uaucaagaugacaaacuuugcu

SEQ ID NO: 7009 - RNA, 22 nt, Homo sapiens
ugagaugauagauauguuaauu

SEQ ID NO: 7010 - RNA, 22 nt, Homo sapiens
augagaauguaaguuaaugaaa

SEQ ID NO: 7011 - RNA, 22 nt, Homo sapiens
aggaagacugaaauugcuguuc

SEQ ID NO: 7012 - RNA, 20 nt, Homo sapiens
augguaguagcaccuuuaca

SEQ ID NO: 7013 - RNA, 22 nt, Homo sapiens
agcuuguuuuauagaaagucaa

SEQ ID NO: 7014 - RNA, 22 nt, Homo sapiens
augagauauguuaaaaguuaaa

SEQ ID NO: 7015 - RNA, 22 nt, Homo sapiens
aagcuggauuuaguguggagca

SEQ ID NO: 7016 - RNA, 22 nt, Homo sapiens
ugaguagagaauucagcuaagg

SEQ ID NO: 7017 - RNA, 22 nt, Homo sapiens
gaaagauuuuaacugggagacu

SEQ ID NO: 7018 - RNA, 22 nt, Homo sapiens
augagaacugucaaugagagcu

SEQ ID NO: 7019 - RNA, 22 nt, Homo sapiens
uaguaguuuuguguauaauaau

SEQ ID NO: 7020 - RNA, 22 nt, Homo sapiens
augagauacuacaaaugaguuu

SEQ ID NO: 7021 - RNA, 22 nt, Homo sapiens
ugagaucugucuuuauaguauu

SEQ ID NO: 7022 - RNA, 22 nt, Homo sapiens
uuugcagagucuuucgcugggc

SEQ ID NO: 7023 - RNA, 22 nt, Homo sapiens
uauugcuugaggaaaugguaau

SEQ ID NO: 7024 - RNA, 22 nt, Homo sapiens
aguagguguugguagagguuuc

SEQ ID NO: 7025 - RNA, 22 nt, Homo sapiens
uguaugaguuguuuauaaauuu

SEQ ID NO: 7026 - RNA, 22 nt, Homo sapiens
augcuguuuuguagcucccucu

SEQ ID NO: 7027 - RNA, 22 nt, Homo sapiens
uuccuugugacuaguagugacc

SEQ ID NO: 7028 - RNA, 22 nt, Homo sapiens
acacaaugguaaguguuugugu

SEQ ID NO: 7029 - RNA, 22 nt, Homo sapiens
auagaauguauuaguaaauuug

SEQ ID NO: 7030 - RNA, 22 nt, Homo sapiens
augagaugaauaccgacgaugu

SEQ ID NO: 7031 - RNA, 18 nt, Homo sapiens
uggauaguuguuggcaga

SEQ ID NO: 7032 - RNA, 22 nt, Homo sapiens
uguaugagagacauggcugcuu

SEQ ID NO: 7033 - RNA, 22 nt, Homo sapiens
augaguaguugcuaaauauuga

SEQ ID NO: 7034 - RNA, 22 nt, Homo sapiens
ugaauaguuugacagaacucuu

SEQ ID NO: 7035 - RNA, 20 nt, Homo sapiens
uggaguuugaguucuuggag

SEQ ID NO: 7036 - RNA, 22 nt, Homo sapiens
augagaugcaagauuagauggg

SEQ ID NO: 7037 - RNA, 22 nt, Homo sapiens
augaagaucucugccuuguguc

SEQ ID NO: 7038 - RNA, 22 nt, Homo sapiens
ucuugcuuguuguucccuucau

SEQ ID NO: 7039 - RNA, 22 nt, Homo sapiens
gcuuguguuuacuguaguuacu

SEQ ID NO: 7040 - RNA, 22 nt, Homo sapiens
gaagauucaaccaaaccagaac

SEQ ID NO: 7041 - RNA, 22 nt, Homo sapiens
augaagauguugccuuuuuaau

SEQ ID NO: 7042 - RNA, 22 nt, Homo sapiens
ugagaugcuuguaaauucauuu

SEQ ID NO: 7043 - RNA, 22 nt, Homo sapiens
ugaguagaacuccuggagaugu

SEQ ID NO: 7044 - RNA, 22 nt, Escherichia coli CFT073
uugguaucguugggcugguguu

SEQ ID NO: 7045 - RNA, 22 nt, Escherichia coli CFT073
uuguuguucauguaugcauguu

SEQ ID NO: 7046 - RNA, 22 nt, Escherichia coli CFT073
uuguaaauuuccucuuugcuaa

SEQ ID NO: 7047 - RNA, 22 nt, Escherichia coli CFT073
uuuaaguuaaucgaccauacug

SEQ ID NO: 7048 - RNA, 21 nt, Escherichia coli CFT073
uugaccugguugcagcacagc

SEQ ID NO: 7049 - RNA, 20 nt, Escherichia coli CFT073
uugaugaauuugcuguaaga

SEQ ID NO: 7050 - RNA, 22 nt, Escherichia coli CFT073
uuucaaaaugauaacuucgcaa

SEQ ID NO: 7051 - RNA, 22 nt, Escherichia coli CFT073
uuucaauacuuaucgauuccuu

SEQ ID NO: 7052 - RNA, 22 nt, Escherichia coli CFT073
uuuguaacguugcaggaugucg

SEQ ID NO: 7053 - RNA, 22 nt, Escherichia coli CFT073
uuuuauacucuaagaaaucagg

SEQ ID NO: 7054 - RNA, 22 nt, Escherichia coli CFT073
uuuugguguugcagccguggca

SEQ ID NO: 7055 - RNA, 21 nt, Escherichia coli CFT073
uuaaaaaccggaggcaacaug

SEQ ID NO: 7056 - RNA, 22 nt, Escherichia coli CFT073
uuaccauaaugauuuucaugug

SEQ ID NO: 7057 - RNA, 22 nt, Escherichia coli CFT073
uuaaauaucacccuguuugcca

SEQ ID NO: 7058 - RNA, 22 nt, Escherichia coli CFT073
uuaagcuuugcacuccauuuau

SEQ ID NO: 7059 - RNA, 22 nt, Escherichia coli CFT073
uucaaaauggugcggaauuuua

SEQ ID NO: 7060 - RNA, 22 nt, Escherichia coli CFT073
uuccggguccaggagcaucauu

SEQ ID NO: 7061 - RNA, 22 nt, Escherichia coli CFT073
uucucucugccugccgaggcca

SEQ ID NO: 7062 - RNA, 20 nt, Escherichia coli CFT073
uucuggauuuugccaucaau

SEQ ID NO: 7063 - RNA, 22 nt, Escherichia coli CFT073
uucuucaaucugacgcaucagg

SEQ ID NO: 7064 - RNA, 22 nt, Escherichia coli CFT073
ugugguguaagcacaguaguag

SEQ ID NO: 7065 - RNA, 22 nt, Escherichia coli CFT073
uguaauuaaaaccuggcucaua

SEQ ID NO: 7066 - RNA, 22 nt, Escherichia coli CFT073
uggggauguuaagcuggaguug

SEQ ID NO: 7067 - RNA, 22 nt, Escherichia coli CFT073
uggauagccaggcaggguugua

SEQ ID NO: 7068 - RNA, 20 nt, Escherichia coli CFT073
uggcaugguaagcgaagcgc

SEQ ID NO: 7069 - RNA, 20 nt, Escherichia coli CFT073
uggccuguggcuguaugcgc

SEQ ID NO: 7070 - RNA, 22 nt, Escherichia coli CFT073
ugcugggauuaaccuucuuuuc

SEQ ID NO: 7071 - RNA, 22 nt, Escherichia coli CFT073
ugcuggggaaaacauggucgau

SEQ ID NO: 7072 - RNA, 22 nt, Escherichia coli CFT073
ugcagcaugucaucugcauuuu

SEQ ID NO: 7073 - RNA, 18 nt, Escherichia coli CFT073
ugcauaauccuucugagc

SEQ ID NO: 7074 - RNA, 22 nt, Escherichia coli CFT073
ugccaucacgucgauuaucgcc

SEQ ID NO: 7075 - RNA, 22 nt, Escherichia coli CFT073
ugauuaucgcuggucugcugcc

SEQ ID NO: 7076 - RNA, 22 nt, Escherichia coli CFT073
ugcaacuggaguuaauuucguu

SEQ ID NO: 7077 - RNA, 22 nt, Escherichia coli CFT073
ugaggcugcgcagcagucgcca

SEQ ID NO: 7078 - RNA, 23 nt, Escherichia coli CFT073
ugaaauccuuaugaaacaaagua

SEQ ID NO: 7079 - RNA, 22 nt, Escherichia coli CFT073
ugaagagcguucaagcgccguu

SEQ ID NO: 7080 - RNA, 22 nt, Escherichia coli CFT073
ugaagcagguauggcccaucac

SEQ ID NO: 7081 - RNA, 22 nt, Escherichia coli CFT073
ugaauaaaccaucaugauuuuu

SEQ ID NO: 7082 - RNA, 22 nt, Escherichia coli CFT073
ugaaaaacggcugcggaauuag

SEQ ID NO: 7083 - RNA, 22 nt, Escherichia coli CFT073
ugaaaaguaaaguguuagauga

SEQ ID NO: 7084 - RNA, 22 nt, Escherichia coli CFT073
ugaaagagcuggggaugcauuc

SEQ ID NO: 7085 - RNA, 18 nt, Escherichia coli CFT073
ucugaaagcugacaaugc

SEQ ID NO: 7086 - RNA, 22 nt, Escherichia coli CFT073
ucuccugcggccacagcaguaa

SEQ ID NO: 7087 - RNA, 22 nt, Escherichia coli CFT073
ucuggcggcacucucugucccu

SEQ ID NO: 7088 - RNA, 22 nt, Escherichia coli CFT073
ucuggcggcgguagaccgagag

SEQ ID NO: 7089 - RNA, 22 nt, Escherichia coli CFT073
ucuuauuucaucgguucaugug

SEQ ID NO: 7090 - RNA, 22 nt, Escherichia coli CFT073
gcacgggcgacauuuggcaggc

SEQ ID NO: 7091 - RNA, 22 nt, Escherichia coli CFT073
gcagggcauugauugggcgcac

SEQ ID NO: 7092 - RNA, 22 nt, Escherichia coli CFT073
gccaagucgagcaacguuuuac

SEQ ID NO: 7093 - RNA, 21 nt, Escherichia coli CFT073
gcauggcuguuaucaucuucc

SEQ ID NO: 7094 - RNA, 22 nt, Escherichia coli CFT073
gcauguacaugcagcugauaau

SEQ ID NO: 7095 - RNA, 22 nt, Escherichia coli CFT073
gccagccauaacccgauggauu

SEQ ID NO: 7096 - RNA, 22 nt, Escherichia coli CFT073
gacuucauggagucgaguugca

SEQ ID NO: 7097 - RNA, 23 nt, Escherichia coli CFT073
gaacugaauaccaaugaggagac

SEQ ID NO: 7098 - RNA, 22 nt, Escherichia coli CFT073
gaaguggcagcgcagcagguuu

SEQ ID NO: 7099 - RNA, 22 nt, Escherichia coli CFT073
gaagugggcucgccaggaagga

SEQ ID NO: 7100 - RNA, 22 nt, Escherichia coli CFT073
gacacauuucuucccggcuccg

SEQ ID NO: 7101 - RNA, 22 nt, Escherichia coli CFT073
gacauugaggaacacuuccaga

SEQ ID NO: 7102 - RNA, 19 nt, Escherichia coli CFT073
gacauugauggucccacug

SEQ ID NO: 7103 - RNA, 22 nt, Escherichia coli CFT073
gacccagugcuaacaaauguuc

SEQ ID NO: 7104 - RNA, 22 nt, Escherichia coli CFT073
gauauuuauacaucccaauaaa

SEQ ID NO: 7105 - RNA, 22 nt, Escherichia coli CFT073
gauguacagcgcguuacuccug

SEQ ID NO: 7106 - RNA, 22 nt, Escherichia coli CFT073
gcaaaaauggcccggaagagau

SEQ ID NO: 7107 - RNA, 22 nt, Escherichia coli CFT073
gcgcaggcaggguaaucgggga

SEQ ID NO: 7108 - RNA, 22 nt, Escherichia coli CFT073
gccaugucggaucgaugcgcuc

SEQ ID NO: 7109 - RNA, 22 nt, Escherichia coli CFT073
gugcuggucaggaugccggacc

SEQ ID NO: 7110 - RNA, 22 nt, Escherichia coli CFT073
guggcaggaucugucuccucau

SEQ ID NO: 7111 - RNA, 22 nt, Escherichia coli CFT073
uaaacacugcacuguguauuca

SEQ ID NO: 7112 - RNA, 22 nt, Escherichia coli CFT073
uaaagugaucuucuaagcccgc

SEQ ID NO: 7113 - RNA, 22 nt, Escherichia coli CFT073
gugauuauggaugaaccgacuu

SEQ ID NO: 7114 - RNA, 22 nt, Escherichia coli CFT073
gugaaagccugcgcgcuggcga

SEQ ID NO: 7115 - RNA, 22 nt, Escherichia coli CFT073
gugaaagguuuuggucucgaug

SEQ ID NO: 7116 - RNA, 19 nt, Escherichia coli CFT073
gucugguggugcgcggauc

SEQ ID NO: 7117 - RNA, 22 nt, Escherichia coli CFT073
gguaaaggaguucgagaaaaau

SEQ ID NO: 7118 - RNA, 22 nt, Escherichia coli CFT073
ggucagauugucuauaugaacu

SEQ ID NO: 7119 - RNA, 22 nt, Escherichia coli CFT073
ggugagaaugugguggccauca

SEQ ID NO: 7120 - RNA, 23 nt, Escherichia coli CFT073
ggucuuccagcucaaucacuucc

SEQ ID NO: 7121 - RNA, 22 nt, Escherichia coli CFT073
guaaauaguccggaagaugcgc

SEQ ID NO: 7122 - RNA, 22 nt, Escherichia coli CFT073
guauuuccguacgucauaaccc

SEQ ID NO: 7123 - RNA, 22 nt, Escherichia coli CFT073
gggaaucaauaucggauugauu

SEQ ID NO: 7124 - RNA, 22 nt, Escherichia coli CFT073
gggacguagaagcugacgacgu

SEQ ID NO: 7125 - RNA, 22 nt, Escherichia coli CFT073
ggcucagccacugacgccaggc

SEQ ID NO: 7126 - RNA, 22 nt, Escherichia coli CFT073
ggcuggagcuggcgguaaucuc

SEQ ID NO: 7127 - RNA, 22 nt, Escherichia coli CFT073
ggcauccucaauauucaccagc

SEQ ID NO: 7128 - RNA, 19 nt, Escherichia coli CFT073
ggcagcugucaggugugcg

SEQ ID NO: 7129 - RNA, 23 nt, Escherichia coli CFT073
ggcagaagccgguugcagugccg

SEQ ID NO: 7130 - RNA, 22 nt, Escherichia coli CFT073
gcuggcgagaucuuccggugua

SEQ ID NO: 7131 - RNA, 22 nt, Escherichia coli CFT073
gcugguauuuucaaucgguacg

SEQ ID NO: 7132 - RNA, 22 nt, Escherichia coli CFT073
gcugguuaucggaagagaugaa

SEQ ID NO: 7133 - RNA, 22 nt, Escherichia coli CFT073
ggaauagaaagcaggcagcuaa

SEQ ID NO: 7134 - RNA, 22 nt, Escherichia coli CFT073
uuuuacuggcgaugaaguacac

SEQ ID NO: 7135 - RNA, 22 nt, Escherichia coli CFT073
uuuuauauuagccaggaacuuu

SEQ ID NO: 7136 - RNA, 22 nt, Escherichia coli CFT073
uuuggcuucagcguuuugcagg

SEQ ID NO: 7137 - RNA, 20 nt, Escherichia coli CFT073
uuuugaccaacagugcuggc

SEQ ID NO: 7138 - RNA, 20 nt, Escherichia coli CFT073
agugaaauccaacaguagcc

SEQ ID NO: 7139 - RNA, 22 nt, Escherichia coli CFT073
aguaaaagugcgcaguuauggc

SEQ ID NO: 7140 - RNA, 21 nt, Escherichia coli CFT073
uuuauagagcgaggccaguga

SEQ ID NO: 7141 - RNA, 22 nt, Escherichia coli CFT073
uuuaugaugugugaaaaguuag

SEQ ID NO: 7142 - RNA, 22 nt, Escherichia coli CFT073
uuuaugcucauuuguaggucgg

SEQ ID NO: 7143 - RNA, 22 nt, Escherichia coli CFT073
uuucacggucggccaguauuug

SEQ ID NO: 7144 - RNA, 22 nt, Escherichia coli CFT073
uuugcaggccugauaagcguag

SEQ ID NO: 7145 - RNA, 22 nt, Escherichia coli CFT073
ugguuuggcgcugacgucauua

SEQ ID NO: 7146 - RNA, 22 nt, Escherichia coli CFT073
uguagcagcugccagcgaagcg

SEQ ID NO: 7147 - RNA, 22 nt, Escherichia coli CFT073
uguggcauauguucgcgcaugg

SEQ ID NO: 7148 - RNA, 22 nt, Escherichia coli CFT073
uuaaauuguuuaaugguauuga

SEQ ID NO: 7149 - RNA, 22 nt, Escherichia coli CFT073
uuauuucugccgcguugcaaac

SEQ ID NO: 7150 - RNA, 22 nt, Escherichia coli CFT073
uucaaaaccggcuuuuugcaau

SEQ ID NO: 7151 - RNA, 22 nt, Escherichia coli CFT073
uucagaauuuggcgaucugaaa

SEQ ID NO: 7152 - RNA, 22 nt, Escherichia coli CFT073
uuauauguauuccagagguuua

SEQ ID NO: 7153 - RNA, 22 nt, Escherichia coli CFT073
uucccugugacaaugauacagu

SEQ ID NO: 7154 - RNA, 22 nt, Escherichia coli CFT073
uuccuguucgcgcugcucuuca

SEQ ID NO: 7155 - RNA, 22 nt, Escherichia coli CFT073
uuccuguuuauaaaaggagagg

SEQ ID NO: 7156 - RNA, 22 nt, Escherichia coli CFT073
uucuucauuuuguaaggcgaac

SEQ ID NO: 7157 - RNA, 22 nt, Escherichia coli CFT073
uucuucugguuauuaugccugc

SEQ ID NO: 7158 - RNA, 20 nt, Escherichia coli CFT073
aucaaaaggcagauaacguc

SEQ ID NO: 7159 - RNA, 22 nt, Escherichia coli CFT073
auagcaccgagaacaguaccgc

SEQ ID NO: 7160 - RNA, 22 nt, Escherichia coli CFT073
auagcagcgugcuugucccugu

SEQ ID NO: 7161 - RNA, 22 nt, Escherichia coli CFT073
aguuccuuauaauauucaauga

SEQ ID NO: 7162 - RNA, 21 nt, Escherichia coli CFT073
aucauucaccuguuguaacuc

SEQ ID NO: 7163 - RNA, 22 nt, Escherichia coli CFT073
auccuucccgaaaaauauguau

SEQ ID NO: 7164 - RNA, 22 nt, Escherichia coli CFT073
augaaaacucugcggcauggcg

SEQ ID NO: 7165 - RNA, 22 nt, Escherichia coli CFT073
augacaaucgacggcuuuagau

SEQ ID NO: 7166 - RNA, 22 nt, Escherichia coli CFT073
auggcaauugccgguucgcugg

SEQ ID NO: 7167 - RNA, 22 nt, Escherichia coli CFT073
auggcgauauagucuuucacgc

SEQ ID NO: 7168 - RNA, 22 nt, Escherichia coli CFT073
cagccaguuaacgcuggcgcag

SEQ ID NO: 7169 - RNA, 22 nt, Escherichia coli CFT073
cagcagcaguaugcagacgcug

SEQ ID NO: 7170 - RNA, 22 nt, Escherichia coli CFT073
auguuuuaagcucugugagcga

SEQ ID NO: 7171 - RNA, 22 nt, Escherichia coli CFT073
auuaauuugcuggaaauauuua

SEQ ID NO: 7172 - RNA, 22 nt, Escherichia coli CFT073
auuaucaacggcgaagugcccg

SEQ ID NO: 7173 - RNA, 22 nt, Escherichia coli CFT073
auuguaucccugauuauucaga

SEQ ID NO: 7174 - RNA, 17 nt, Escherichia coli CFT073
auuucugcucauccagc

SEQ ID NO: 7175 - RNA, 22 nt, Escherichia coli CFT073
cacacagggcugaugauguucc

SEQ ID NO: 7176 - RNA, 22 nt, Escherichia coli CFT073
cacacgauccgcucgguuccga

SEQ ID NO: 7177 - RNA, 22 nt, Escherichia coli CFT073
caccaaaaugacgcacuuugcc

SEQ ID NO: 7178 - RNA, 22 nt, Escherichia coli CFT073
ugaauacacagugcaguguuua

SEQ ID NO: 7179 - RNA, 22 nt, Escherichia coli CFT073
ugaauauggcguggagucgcug

SEQ ID NO: 7180 - RNA, 22 nt, Escherichia coli CFT073
ugaaugacagcgccgggcaugc

SEQ ID NO: 7181 - RNA, 22 nt, Escherichia coli CFT073
ugcaucacaaaccugaaaagaa

SEQ ID NO: 7182 - RNA, 22 nt, Escherichia coli CFT073
ugaggcugccgggaaaguuuug

SEQ ID NO: 7183 - RNA, 22 nt, Escherichia coli CFT073
ugaucacaguauuaucaaugac

SEQ ID NO: 7184 - RNA, 22 nt, Escherichia coli CFT073
ugaugccuggcagccacuucaa

SEQ ID NO: 7185 - RNA, 22 nt, Escherichia coli CFT073
ugcuaucuggugagagugucgg

SEQ ID NO: 7186 - RNA, 22 nt, Escherichia coli CFT073
ugcugaaacagaaacaguaugc

SEQ ID NO: 7187 - RNA, 22 nt, Escherichia coli CFT073
uggaauaucucggcagcuucug

SEQ ID NO: 7188 - RNA, 21 nt, Escherichia coli CFT073
uggaggacgagguauugacca

SEQ ID NO: 7189 - RNA, 20 nt, Escherichia coli CFT073
ugcugcagcaagguaaaggc

SEQ ID NO: 7190 - RNA, 22 nt, Escherichia coli CFT073
ugcuggagucugccggacugga

SEQ ID NO: 7191 - RNA, 22 nt, Escherichia coli CFT073
uggcaggccauuggguugagaa

SEQ ID NO: 7192 - RNA, 22 nt, Escherichia coli CFT073
uggcgauaagucucuuccuggu

SEQ ID NO: 7193 - RNA, 22 nt, Escherichia coli CFT073
uggccuuggaacgauguauccu

SEQ ID NO: 7194 - RNA, 22 nt, Escherichia coli CFT073
uggucugucauacuuuguuacc

SEQ ID NO: 7195 - RNA, 17 nt, Escherichia coli CFT073
uggugaacuggaaagcc

SEQ ID NO: 7196 - RNA, 23 nt, Escherichia coli CFT073
ugguggcagagauugccgaucgg

SEQ ID NO: 7197 - RNA, 22 nt, Escherichia coli CFT073
uagcaugugauucaauguaagc

SEQ ID NO: 7198 - RNA, 22 nt, Escherichia coli CFT073
uagcggacgucgacuacuggaa

SEQ ID NO: 7199 - RNA, 22 nt, Escherichia coli CFT073
uaaaucaugcuguaauaaaugg

SEQ ID NO: 7200 - RNA, 22 nt, Escherichia coli CFT073
uaaaucugcgcuuuguugauau

SEQ ID NO: 7201 - RNA, 18 nt, Escherichia coli CFT073
uaagugaagggaguguga

SEQ ID NO: 7202 - RNA, 22 nt, Escherichia coli CFT073
uacaaucuuagugcuaaauggc

SEQ ID NO: 7203 - RNA, 22 nt, Escherichia coli CFT073
uacagaaaaaguuuggcaucuu

SEQ ID NO: 7204 - RNA, 22 nt, Escherichia coli CFT073
uaugcaaaacugcggcgcauua

SEQ ID NO: 7205 - RNA, 22 nt, Escherichia coli CFT073
uaugcauaaaaagcagcggcug

SEQ ID NO: 7206 - RNA, 22 nt, Escherichia coli CFT073
uauggcaaucaucgacaaacgu

SEQ ID NO: 7207 - RNA, 22 nt, Escherichia coli CFT073
uauguacaauaauaagcgaaau

SEQ ID NO: 7208 - RNA, 22 nt, Escherichia coli CFT073
uauuaaauaugaaaaguuauga

SEQ ID NO: 7209 - RNA, 22 nt, Escherichia coli CFT073
uauuauguguuggguauacguc

SEQ ID NO: 7210 - RNA, 22 nt, Escherichia coli CFT073
uauucccauaaacucagaucua

SEQ ID NO: 7211 - RNA, 22 nt, Escherichia coli CFT073
uaucaauuuaucgaccugcagc

SEQ ID NO: 7212 - RNA, 22 nt, Escherichia coli CFT073
uaucugggaagugccuggcggu

SEQ ID NO: 7213 - RNA, 19 nt, Escherichia coli CFT073
uauuucuccggauuuuuga

SEQ ID NO: 7214 - RNA, 21 nt, Escherichia coli CFT073
ucaaugauggugccucgcugu

SEQ ID NO: 7215 - RNA, 22 nt, Escherichia coli CFT073
ucaccagucccugaaugucucc

SEQ ID NO: 7216 - RNA, 22 nt, Escherichia coli CFT073
ucaggaugccgaaguggaugau

SEQ ID NO: 7217 - RNA, 19 nt, Escherichia coli CFT073
ugaaaggcgcuggaugacg

SEQ ID NO: 7218 - RNA, 22 nt, Escherichia coli CFT073
ugaaaggguuagcaguauauga

SEQ ID NO: 7219 - RNA, 22 nt, Escherichia coli CFT073
ucuucuuuagccgcuucaauau

SEQ ID NO: 7220 - RNA, 22 nt, Escherichia coli CFT073
ucugguggcgaugucccugugg

SEQ ID NO: 7221 - RNA, 22 nt, Escherichia coli CFT073
ucugacauaagggcacugcuga

SEQ ID NO: 7222 - RNA, 16 nt, Escherichia coli CFT073
uccugggaggcagagc

SEQ ID NO: 7223 - RNA, 21 nt, Escherichia coli CFT073
ucggcaauuccacgcuccagc

SEQ ID NO: 7224 - RNA, 22 nt, Escherichia coli CFT073
gaaaccuggauggugcauauuu

SEQ ID NO: 7225 - RNA, 19 nt, Escherichia coli CFT073
cuguuuauucuguuugccc

SEQ ID NO: 7226 - RNA, 23 nt, Escherichia coli CFT073
cuucagaguuccggcugcgucag

SEQ ID NO: 7227 - RNA, 22 nt, Escherichia coli CFT073
cuucucuucaaucgggauuauc

SEQ ID NO: 7228 - RNA, 22 nt, Escherichia coli CFT073
gaaguaaggggacaucauguca

SEQ ID NO: 7229 - RNA, 22 nt, Escherichia coli CFT073
cugggauacugguugcucauug

SEQ ID NO: 7230 - RNA, 22 nt, Escherichia coli CFT073
cugagaggcucuuugcuaagug

SEQ ID NO: 7231 - RNA, 22 nt, Escherichia coli CFT073
cggaggacagccgugcauggug

SEQ ID NO: 7232 - RNA, 22 nt, Escherichia coli CFT073
gauauuuuacgcgcaauaacug

SEQ ID NO: 7233 - RNA, 22 nt, Escherichia coli CFT073
gaucauuuucgcuauuuugccu

SEQ ID NO: 7234 - RNA, 22 nt, Escherichia coli CFT073
gaugauuauguuguugauaucc

SEQ ID NO: 7235 - RNA, 23 nt, Escherichia coli CFT073
gaugcgcagauggcauacagcgg

SEQ ID NO: 7236 - RNA, 22 nt, Escherichia coli CFT073
gacuuuauuaaacugcuggagg

SEQ ID NO: 7237 - RNA, 21 nt, Escherichia coli CFT073
gagauucagcaucucuuucug

SEQ ID NO: 7238 - RNA, 22 nt, Escherichia coli CFT073
gaggaagaaucccgguguauuc

SEQ ID NO: 7239 - RNA, 22 nt, Escherichia coli CFT073
gccaguuugcuggacucugcca

SEQ ID NO: 7240 - RNA, 22 nt, Escherichia coli CFT073
gcccuuuuuuacuuaguagaga

SEQ ID NO: 7241 - RNA, 22 nt, Escherichia coli CFT073
gcagcagcgccuguucaagcgc

SEQ ID NO: 7242 - RNA, 22 nt, Escherichia coli CFT073
gcagaauuuuguccgauagugg

SEQ ID NO: 7243 - RNA, 21 nt, Escherichia coli CFT073
gcaggcagcgaccggaguagg

SEQ ID NO: 7244 - RNA, 22 nt, Escherichia coli CFT073
gcauggcaugcagggaacgccg

SEQ ID NO: 7245 - RNA, 22 nt, Escherichia coli CFT073
cggcccagcuuuucccucucuc

SEQ ID NO: 7246 - RNA, 22 nt, Escherichia coli CFT073
cgagcuggaaaccuuccugcug

SEQ ID NO: 7247 - RNA, 21 nt, Escherichia coli CFT073
ccucgcuggucguuauccugc

SEQ ID NO: 7248 - RNA, 22 nt, Escherichia coli CFT073
ccugggaagauguaagccgcca

SEQ ID NO: 7249 - RNA, 22 nt, Escherichia coli CFT073
ccguaaaacgcaaucaaaauga

SEQ ID NO: 7250 - RNA, 22 nt, Escherichia coli CFT073
cccaguccaacaccagcgggcg

SEQ ID NO: 7251 - RNA, 22 nt, Escherichia coli CFT073
ccccccuauaguauauugcaug

SEQ ID NO: 7252 - RNA, 22 nt, Escherichia coli CFT073
ccaguuucuccugcaaugacaa

SEQ ID NO: 7253 - RNA, 22 nt, Escherichia coli CFT073
ccagaauucagguugcauccgu

SEQ ID NO: 7254 - RNA, 22 nt, Escherichia coli CFT073
caugaaaacaguguuauguugu

SEQ ID NO: 7255 - RNA, 22 nt, Escherichia coli CFT073
cauguguaguaucgcaaacaua

SEQ ID NO: 7256 - RNA, 22 nt, Escherichia coli CFT073
cauugaaaauaaauauccuccg

SEQ ID NO: 7257 - RNA, 22 nt, Escherichia coli CFT073
cagggcgcgaaugacagcagug

SEQ ID NO: 7258 - RNA, 20 nt, Escherichia coli CFT073
caguuugcuucugcauccac

SEQ ID NO: 7259 - RNA, 22 nt, Escherichia coli CFT073
caucccccgugguccgccagua

SEQ ID NO: 7260 - RNA, 22 nt, Escherichia coli CFT073
caucgugucuucauagcccugc

SEQ ID NO: 7261 - RNA, 22 nt, Escherichia coli CFT073
guauuauuucugcggcagguuu

SEQ ID NO: 7262 - RNA, 22 nt, Escherichia coli CFT073
gucaguuuuucacgagagauac

SEQ ID NO: 7263 - RNA, 22 nt, Escherichia coli CFT073
ggcuggcaguucaccauugccc

SEQ ID NO: 7264 - RNA, 22 nt, Escherichia coli CFT073
guugauauuguggucaagcgcg

SEQ ID NO: 7265 - RNA, 22 nt, Escherichia coli CFT073
uagggcugguggaggcgggacu

SEQ ID NO: 7266 - RNA, 22 nt, Escherichia coli CFT073
uaguaucacuuuaucagccaag

SEQ ID NO: 7267 - RNA, 23 nt, Escherichia coli CFT073
uauccacaccggacgugagaguc

SEQ ID NO: 7268 - RNA, 22 nt, Escherichia coli CFT073
uaucuugugcuuguggcugauc

SEQ ID NO: 7269 - RNA, 22 nt, Escherichia coli CFT073
guuuuguuagcguuaaaaacac

SEQ ID NO: 7270 - RNA, 22 nt, Escherichia coli CFT073
uaaaguuccgcguauugcguuc

SEQ ID NO: 7271 - RNA, 22 nt, Escherichia coli CFT073
uaaguaaagggaguuugauaug

SEQ ID NO: 7272 - RNA, 22 nt, Escherichia coli CFT073
ucagccacugaccgcugagcaa

SEQ ID NO: 7273 - RNA, 22 nt, Escherichia coli CFT073
uauuucugccccgcaggucugg

SEQ ID NO: 7274 - RNA, 22 nt, Escherichia coli CFT073
ucaggucacgcucuggaacagc

SEQ ID NO: 7275 - RNA, 22 nt, Escherichia coli CFT073
ucaguugggcugcgaaguuuuc

SEQ ID NO: 7276 - RNA, 22 nt, Escherichia coli CFT073
ucaugaaaucgacauguacgca

SEQ ID NO: 7277 - RNA, 23 nt, Escherichia coli CFT073
ucauuuucauugguuaacucggc

SEQ ID NO: 7278 - RNA, 22 nt, Escherichia coli CFT073
uccaggcaaacgccaguaaaaa

SEQ ID NO: 7279 - RNA, 22 nt, Escherichia coli CFT073
ucccacaaugccaauacacuug

SEQ ID NO: 7280 - RNA, 22 nt, Escherichia coli CFT073
uccggccuacaaaaucgugcaa

SEQ ID NO: 7281 - RNA, 22 nt, Escherichia coli CFT073
uccuccuuucagagugcuccgc

SEQ ID NO: 7282 - RNA, 19 nt, Escherichia coli CFT073
uccuguuccagcagucggc

SEQ ID NO: 7283 - RNA, 22 nt, Escherichia coli CFT073
ucggccucucuugcggucuggu

SEQ ID NO: 7284 - RNA, 22 nt, Escherichia coli CFT073
ggagaugcugcgugaagccgug

SEQ ID NO: 7285 - RNA, 22 nt, Escherichia coli CFT073
gcugguuaagcguauuagccaa

SEQ ID NO: 7286 - RNA, 22 nt, Escherichia coli CFT073
gcuuaaaagcgacgcaaucaca

SEQ ID NO: 7287 - RNA, 22 nt, Escherichia coli CFT073
gcugccauccuccgguaccacg

SEQ ID NO: 7288 - RNA, 22 nt, Escherichia coli CFT073
gcugauggcgcagguagcgccu

SEQ ID NO: 7289 - RNA, 22 nt, Escherichia coli CFT073
gcguaaggcgugggaugugcuc

SEQ ID NO: 7290 - RNA, 22 nt, Escherichia coli CFT073
aagagaugucauuacugaugcu

SEQ ID NO: 7291 - RNA, 18 nt, Escherichia coli CFT073
aacauuuuuaaagcccgg

SEQ ID NO: 7292 - RNA, 22 nt, Escherichia coli CFT073
aacgcugcgguuuugugcuggu

SEQ ID NO: 7293 - RNA, 22 nt, Escherichia coli CFT073
aaguuacaucaacaaacucagg

SEQ ID NO: 7294 - RNA, 22 nt, Escherichia coli CFT073
aauaacagacagugccaguuca

SEQ ID NO: 7295 - RNA, 22 nt, Escherichia coli CFT073
aauagcauucgcuuuuggacga

SEQ ID NO: 7296 - RNA, 22 nt, Escherichia coli CFT073
aauuaagaaagccgugcaggca

SEQ ID NO: 7297 - RNA, 22 nt, Escherichia coli CFT073
aauauuugugguuuaccuucug

SEQ ID NO: 7298 - RNA, 22 nt, Escherichia coli CFT073
aauuucaaucgcgucgcccagc

SEQ ID NO: 7299 - RNA, 22 nt, Escherichia coli CFT073
acagggcuugcuaaugcugaug

SEQ ID NO: 7300 - RNA, 22 nt, Escherichia coli CFT073
aaaaugcauuauacgguucugg

SEQ ID NO: 7301 - RNA, 20 nt, Escherichia coli CFT073
aaaaugucaaugacacugua

SEQ ID NO: 7302 - RNA, 21 nt, Escherichia coli CFT073
aaauuuaacuacugaugauug

SEQ ID NO: 7303 - RNA, 22 nt, Escherichia coli CFT073
acagagauguuuaauccuggcg

SEQ ID NO: 7304 - RNA, 19 nt, Escherichia coli CFT073
acaauagccaugugcaaua

SEQ ID NO: 7305 - RNA, 22 nt, Escherichia coli CFT073
acagggcuguagcaugcgucga

SEQ ID NO: 7306 - RNA, 22 nt, Escherichia coli CFT073
aaaaaguggcggagaucccgga

SEQ ID NO: 7307 - RNA, 22 nt, Escherichia coli CFT073
aaaaaucuccuugacaauuuau

SEQ ID NO: 7308 - RNA, 20 nt, Escherichia coli CFT073
aaaacgugauuuuuacuggc

SEQ ID NO: 7309 - RNA, 22 nt, Escherichia coli CFT073
aaaacugucugaaguggauuuu

SEQ ID NO: 7310 - RNA, 22 nt, Escherichia coli CFT073
aaaagugauauuacggucucgu

SEQ ID NO: 7311 - RNA, 18 nt, Escherichia coli CFT073
aagggcagggcaaguacc

SEQ ID NO: 7312 - RNA, 20 nt, Escherichia coli CFT073
aagcugcaucagggcgauau

SEQ ID NO: 7313 - RNA, 22 nt, Escherichia coli CFT073
aaguuugccguggcaguggcga

SEQ ID NO: 7314 - RNA, 22 nt, Escherichia coli CFT073
aaucaugagcaucgaaacguuc

SEQ ID NO: 7315 - RNA, 19 nt, Escherichia coli CFT073
aaucuggguuaagcguguc

SEQ ID NO: 7316 - RNA, 22 nt, Escherichia coli CFT073
aauguacaaucaaaccaguuga

SEQ ID NO: 7317 - RNA, 20 nt, Escherichia coli CFT073
aaugugcaggaugcguucgg

SEQ ID NO: 7318 - RNA, 22 nt, Escherichia coli CFT073
aauguugucggucgccauauaa

SEQ ID NO: 7319 - RNA, 22 nt, Escherichia coli CFT073
aauuuuauccaguaacgccugg

SEQ ID NO: 7320 - RNA, 22 nt, Escherichia coli CFT073
aagcaguuccuuuuggcucugu

SEQ ID NO: 7321 - RNA, 22 nt, Escherichia coli CFT073
aagaauuagcugacccagcguu

SEQ ID NO: 7322 - RNA, 22 nt, Escherichia coli CFT073
aaacugaggcugaugccagcgu

SEQ ID NO: 7323 - RNA, 22 nt, Escherichia coli CFT073
aaagaaauggcgcaaauuaguu

SEQ ID NO: 7324 - RNA, 22 nt, Escherichia coli CFT073
aaauaugcgacuggaaagagug

SEQ ID NO: 7325 - RNA, 22 nt, Escherichia coli CFT073
aacagcauggggaaugaucaga

SEQ ID NO: 7326 - RNA, 22 nt, Escherichia coli CFT073
aaaaguggaaacagguuauccc

SEQ ID NO: 7327 - RNA, 22 nt, Escherichia coli CFT073
aaaauaccgaagacagguguuc

SEQ ID NO: 7328 - RNA, 22 nt, Escherichia coli CFT073
aaaauuuuggucgcagcgccau

SEQ ID NO: 7329 - RNA, 22 nt, Escherichia coli CFT073
aggaagaugccucucaguugcg

SEQ ID NO: 7330 - RNA, 22 nt, Escherichia coli CFT073
aggcucaguacgcagcugaaga

SEQ ID NO: 7331 - RNA, 22 nt, Escherichia coli CFT073
aggcacauaacagcuaaguauu

SEQ ID NO: 7332 - RNA, 19 nt, Escherichia coli CFT073
aggugauugaaaccgaucu

SEQ ID NO: 7333 - RNA, 22 nt, Escherichia coli CFT073
agguggcaaaauuugggacaaa

SEQ ID NO: 7334 - RNA, 22 nt, Escherichia coli CFT073
agcagcaacgcuggcuggagca

SEQ ID NO: 7335 - RNA, 22 nt, Escherichia coli CFT073
aggaaauugugucagcgaauug

SEQ ID NO: 7336 - RNA, 22 nt, Escherichia coli CFT073
agaaauaccaucaaaaucguga

SEQ ID NO: 7337 - RNA, 15 nt, Escherichia coli CFT073
agaagcagccaguuu

SEQ ID NO: 7338 - RNA, 22 nt, Escherichia coli CFT073
acugucaucaaucaucuugaca

SEQ ID NO: 7339 - RNA, 22 nt, Escherichia coli CFT073
acugcgaaucgggaauuaucuu

SEQ ID NO: 7340 - RNA, 22 nt, Escherichia coli CFT073
agacaacaguuggaugcucauu

SEQ ID NO: 7341 - RNA, 23 nt, Escherichia coli CFT073
agcaaacagcacgacugcucacc

SEQ ID NO: 7342 - RNA, 22 nt, Escherichia coli CFT073
agauccuucacuuaauuucauu

SEQ ID NO: 7343 - RNA, 22 nt, Escherichia coli CFT073
acccagguggagacguucucca

SEQ ID NO: 7344 - RNA, 22 nt, Escherichia coli CFT073
acuaauuagccaucgauaaaaa

SEQ ID NO: 7345 - RNA, 22 nt, Escherichia coli CFT073
acuacuucauuaugagcaaacu

SEQ ID NO: 7346 - RNA, 22 nt, Escherichia coli CFT073
acuuaacagcccguuaacuuug

SEQ ID NO: 7347 - RNA, 22 nt, Escherichia coli CFT073
agaaauauuugcccggcgcguu

SEQ ID NO: 7348 - RNA, 22 nt, Escherichia coli CFT073
agagcaugaucgcgugggccga

SEQ ID NO: 7349 - RNA, 22 nt, Escherichia coli CFT073
agaucucuucgccaaagugcag

SEQ ID NO: 7350 - RNA, 22 nt, Escherichia coli CFT073
agcaggccaucacgaccuugcu

SEQ ID NO: 7351 - RNA, 22 nt, Escherichia coli CFT073
agcagacaaacagcgucgaggu

SEQ ID NO: 7352 - RNA, 22 nt, Escherichia coli CFT073
aucaaacaggugcuggaguggu

SEQ ID NO: 7353 - RNA, 22 nt, Escherichia coli CFT073
aucauaaugguacacuuuauag

SEQ ID NO: 7354 - RNA, 22 nt, Escherichia coli CFT073
auccuuaaccaugccgauaacg

SEQ ID NO: 7355 - RNA, 22 nt, Escherichia coli CFT073
aucuugaagugccaugggcgca

SEQ ID NO: 7356 - RNA, 22 nt, Escherichia coli CFT073
augaauauuuagacuaaagagu

SEQ ID NO: 7357 - RNA, 20 nt, Escherichia coli CFT073
augaaucagagaaaaaguga

SEQ ID NO: 7358 - RNA, 22 nt, Escherichia coli CFT073
aucuucucugcuuuuggcuggg

SEQ ID NO: 7359 - RNA, 22 nt, Escherichia coli CFT073
augauaaaacucacuaaacugu

SEQ ID NO: 7360 - RNA, 22 nt, Escherichia coli CFT073
agggcugcuugcuguucuccau

SEQ ID NO: 7361 - RNA, 22 nt, Escherichia coli CFT073
aggucaaucaucuguucacuau

SEQ ID NO: 7362 - RNA, 22 nt, Escherichia coli CFT073
aguaacugcuugguaucuuucg

SEQ ID NO: 7363 - RNA, 22 nt, Escherichia coli CFT073
aguaucaauagugauaucgcca

SEQ ID NO: 7364 - RNA, 22 nt, Escherichia coli CFT073
aguuccuuauaguauucaauga

SEQ ID NO: 7365 - RNA, 22 nt, Escherichia coli CFT073
aguuuacaacgcauuguuaaag

SEQ ID NO: 7366 - RNA, 22 nt, Escherichia coli CFT073
auacagaaagcuuauaaugcga

SEQ ID NO: 7367 - RNA, 22 nt, Escherichia coli CFT073
auaucguugcuaauaauucuaa

SEQ ID NO: 7368 - RNA, 22 nt, Escherichia coli CFT073
auauugaaggggcgagcaaaca

SEQ ID NO: 7369 - RNA, 22 nt, Escherichia coli CFT073
caauucugaacuacagccguag

SEQ ID NO: 7370 - RNA, 22 nt, Escherichia coli CFT073
caaaacugaugcagaaugcaga

SEQ ID NO: 7371 - RNA, 22 nt, Escherichia coli CFT073
caaauuuuaccucguugguauc

SEQ ID NO: 7372 - RNA, 22 nt, Escherichia coli CFT073
cagaaacguuguuaacccggca

SEQ ID NO: 7373 - RNA, 22 nt, Escherichia coli CFT073
cagagcuggcccgacagauggc

SEQ ID NO: 7374 - RNA, 22 nt, Escherichia coli CFT073
auguguucugggaucugcagga

SEQ ID NO: 7375 - RNA, 22 nt, Escherichia coli CFT073
auugagcauaacuuuaaugcgc

SEQ ID NO: 7376 - RNA, 22 nt, Escherichia coli CFT073
auggcgaucaggugcuggcuca

SEQ ID NO: 7377 - RNA, 22 nt, Escherichia coli CFT073
auggaaggaucuggauucugga

SEQ ID NO: 7378 - RNA, 22 nt, Escherichia coli CFT073
auggaagggauugaagagccgc

SEQ ID NO: 7379 - RNA, 20 nt, Escherichia coli CFT073
cauuggcugguuguuggggc

SEQ ID NO: 7380 - RNA, 21 nt, Escherichia coli CFT073
caguaaaacgcaccauacugu

SEQ ID NO: 7381 - RNA, 22 nt, Escherichia coli CFT073
caguaacacuuccgcacugacc

SEQ ID NO: 7382 - RNA, 22 nt, Escherichia coli CFT073
caugaugggcaugaaugucaua

SEQ ID NO: 7383 - RNA, 22 nt, Escherichia coli CFT073
cguuuuauccggccuacaauga

SEQ ID NO: 7384 - RNA, 22 nt, Escherichia coli CFT073
cugccagcuacuuugugucagu

SEQ ID NO: 7385 - RNA, 22 nt, Escherichia coli CFT073
cugagaagugaugcugucagca

SEQ ID NO: 7386 - RNA, 22 nt, Escherichia coli CFT073
cugcaacuggcugauggcagca

SEQ ID NO: 7387 - RNA, 22 nt, Escherichia coli CFT073
cuggagaguaauacccagucug

SEQ ID NO: 7388 - RNA, 22 nt, Escherichia coli CFT073
cugggaggccaguggcaagaaa

SEQ ID NO: 7389 - RNA, 22 nt, Escherichia coli CFT073
cugggauguauggauauguugu

SEQ ID NO: 7390 - RNA, 22 nt, Escherichia coli CFT073
cuggugaaaaugcucggccucg

SEQ ID NO: 7391 - RNA, 22 nt, Escherichia coli CFT073
gaaacgcucgaaaaacuggcag

SEQ ID NO: 7392 - RNA, 22 nt, Escherichia coli CFT073
gaaacuuugucgcguggaccca

SEQ ID NO: 7393 - RNA, 22 nt, Escherichia coli CFT073
gaaagugacggauuuaacgcgg

SEQ ID NO: 7394 - RNA, 18 nt, Escherichia coli CFT073
gaaauugaugccucuggc

SEQ ID NO: 7395 - RNA, 22 nt, Escherichia coli CFT073
cggagagcgaguccagccugau

SEQ ID NO: 7396 - RNA, 22 nt, Escherichia coli CFT073
cgcacaggauuauuacggugug

SEQ ID NO: 7397 - RNA, 22 nt, Homo sapiens
uuggcaaauagguuuuauugca

SEQ ID NO: 7398 - RNA, 22 nt, Homo sapiens
uugauauguuguuggauucacu

SEQ ID NO: 7399 - RNA, 22 nt, Homo sapiens
agagguauuggaaggaguguca

SEQ ID NO: 7400 - RNA, 20 nt, Homo sapiens
cagcaaccugcucucuuccu

SEQ ID NO: 7401 - RNA, 22 nt, Homo sapiens
uggugagaaaugagaugcuuuu

SEQ ID NO: 7402 - RNA, 22 nt, Homo sapiens
aaaccaccauuacuuuugcacc

SEQ ID NO: 7403 - RNA, 22 nt, Homo sapiens
uguauguagugaccagggccag

SEQ ID NO: 7404 - RNA, 22 nt, Homo sapiens
uuuccuguagggggcaaggccu

SEQ ID NO: 7405 - RNA, 20 nt, Homo sapiens
cuuuggcaaugagaacaggg

SEQ ID NO: 7406 - RNA, 22 nt, Homo sapiens
accugagauuacaggugcuggc

SEQ ID NO: 7407 - RNA, 22 nt, Homo sapiens
ugcauguucuuacucauacaug

SEQ ID NO: 7408 - RNA, 22 nt, Homo sapiens
ugcugcaaacaugagaggaagu

SEQ ID NO: 7409 - RNA, 22 nt, Homo sapiens
gugcacaacgugcagguuaguu

SEQ ID NO: 7410 - RNA, 22 nt, Homo sapiens
uuucauggaauauagucauuuu

SEQ ID NO: 7411 - RNA, 22 nt, Homo sapiens
ucacaguucagcauggcugagg

SEQ ID NO: 7412 - RNA, 22 nt, Homo sapiens
uugacauugcuguaguguccag

SEQ ID NO: 7413 - RNA, 22 nt, Homo sapiens
gugacauuuuuacugaugagag

SEQ ID NO: 7414 - RNA, 22 nt, Homo sapiens
uuaaauacagcaugguguuucu

SEQ ID NO: 7415 - RNA, 22 nt, Homo sapiens
cacagugaaugucaucauugcc

SEQ ID NO: 7416 - RNA, 22 nt, Homo sapiens
aaaguucuugcugaaggauuau

SEQ ID NO: 7417 - RNA, 22 nt, Homo sapiens
uauugcagaaugugaguuggca

SEQ ID NO: 7418 - RNA, 22 nt, Homo sapiens
uacugguuuuauauauuucucc

SEQ ID NO: 7419 - RNA, 22 nt, Homo sapiens
auagcagaauuuggucaagucu

SEQ ID NO: 7420 - RNA, 22 nt, Homo sapiens
auugcucaaaucaguacuugag

SEQ ID NO: 7421 - RNA, 20 nt, Homo sapiens
gauuagagagaggcugugca

SEQ ID NO: 7422 - RNA, 22 nt, Homo sapiens
auagcauaucccacaugucaga

SEQ ID NO: 7423 - RNA, 22 nt, Homo sapiens
gcuuuguugauggugagucugu

SEQ ID NO: 7424 - RNA, 22 nt, Homo sapiens
uagugaauguuggcuauuaaua

SEQ ID NO: 7425 - RNA, 22 nt, Homo sapiens
gucauugguucuguuuauguga

SEQ ID NO: 7426 - RNA, 22 nt, Homo sapiens
acaagugaauacaggauucucu

SEQ ID NO: 7427 - RNA, 22 nt, Homo sapiens
uuggccauaugacuugcuuugg

SEQ ID NO: 7428 - RNA, 17 nt, Homo sapiens
cuucaaauaauuucccc

SEQ ID NO: 7429 - RNA, 22 nt, Homo sapiens
auggagguguggggagugaguu

SEQ ID NO: 7430 - RNA, 22 nt, Homo sapiens
uuuaucuguuuaaaacuguuca

SEQ ID NO: 7431 - RNA, 22 nt, Homo sapiens
gugaaguuuuugugaggccuaa

SEQ ID NO: 7432 - RNA, 22 nt, Homo sapiens
uuuaaagcacggaguuuguggc

SEQ ID NO: 7433 - RNA, 22 nt, Homo sapiens
ugagguugguauuacugucucu

SEQ ID NO: 7434 - RNA, 22 nt, Homo sapiens
uaugaaagcuacuucucacaau

SEQ ID NO: 7435 - RNA, 21 nt, Homo sapiens
gugucacagacaugacagaug

SEQ ID NO: 7436 - RNA, 22 nt, Homo sapiens
ugaucucagcucacugguugaa

SEQ ID NO: 7437 - RNA, 22 nt, Homo sapiens
aucaaaugcuggcagagugccu

SEQ ID NO: 7438 - RNA, 22 nt, Homo sapiens
guaucacacuuauugaccugca

SEQ ID NO: 7439 - RNA, 22 nt, Homo sapiens
aauagcauugaaucuaccaauu

SEQ ID NO: 7440 - RNA, 22 nt, Homo sapiens
auaaauaguaguugugguggcc

SEQ ID NO: 7441 - RNA, 22 nt, Homo sapiens
gugacugggaguggugaagaua

SEQ ID NO: 7442 - RNA, 22 nt, Homo sapiens
uugcacaauggaauuuaucuuu

SEQ ID NO: 7443 - RNA, 22 nt, Homo sapiens
agugcauugcaucucugcuuca

SEQ ID NO: 7444 - RNA, 22 nt, Homo sapiens
aaauaguagcugaaugagggaa

SEQ ID NO: 7445 - RNA, 22 nt, Homo sapiens
uuuaacauuggaugagaucguc

SEQ ID NO: 7446 - RNA, 22 nt, Homo sapiens
uuggcaauugcuaugauuugaa

SEQ ID NO: 7447 - RNA, 22 nt, Homo sapiens
uugugcaugaugcauacauggu

SEQ ID NO: 7448 - RNA, 22 nt, Homo sapiens
ucauggcacugaugagaguuuc

SEQ ID NO: 7449 - RNA, 22 nt, Homo sapiens
aguaaaucacuaauggcuuccg

SEQ ID NO: 7450 - RNA, 18 nt, Homo sapiens
uggcaauaugguucuacc

SEQ ID NO: 7451 - RNA, 22 nt, Homo sapiens
ugaauagacacuaaagacugua

SEQ ID NO: 7452 - RNA, 22 nt, Homo sapiens
uuaaaugcauagaauguguagu

SEQ ID NO: 7453 - RNA, 22 nt, Homo sapiens
guagagguagacuuccuugucu

SEQ ID NO: 7454 - RNA, 21 nt, Homo sapiens
aaucacaguuguucugccuuc

SEQ ID NO: 7455 - RNA, 21 nt, Homo sapiens
uauagcagcacgauuuauagu

SEQ ID NO: 7456 - RNA, 22 nt, Homo sapiens
guaugcacauauguguauguau

SEQ ID NO: 7457 - RNA, 18 nt, Homo sapiens
ugacaucauuuagaaagg

SEQ ID NO: 7458 - RNA, 22 nt, Homo sapiens
auaaagcaagucucuggccuca

SEQ ID NO: 7459 - RNA, 22 nt, Homo sapiens
ccccauguucucucugcagcuc

SEQ ID NO: 7460 - RNA, 22 nt, Homo sapiens
uacauugucauauucucucucu

SEQ ID NO: 7461 - RNA, 22 nt, Homo sapiens
gucucacagcuagcugcuuuau

SEQ ID NO: 7462 - RNA, 22 nt, Homo sapiens
ucauguguugcacugaggaccu

SEQ ID NO: 7463 - RNA, 22 nt, Homo sapiens
gaaucacagauuaugaguaucu

SEQ ID NO: 7464 - RNA, 19 nt, Homo sapiens
agcaguguggagauuucuc

SEQ ID NO: 7465 - RNA, 22 nt, Homo sapiens
acauaaagaagcaggacauugu

SEQ ID NO: 7466 - RNA, 22 nt, Homo sapiens
ugacauagcuauuaagugaugc

SEQ ID NO: 7467 - RNA, 22 nt, Homo sapiens
ugugaagauguuucuuaauuga

SEQ ID NO: 7468 - RNA, 20 nt, Homo sapiens
aagugcaucguugugucugc

SEQ ID NO: 7469 - RNA, 22 nt, Homo sapiens
aggagguaggaauugugcuagg

SEQ ID NO: 7470 - RNA, 22 nt, Homo sapiens
aagcuggauuuaguguggagca

SEQ ID NO: 7471 - RNA, 22 nt, Homo sapiens
aggaauguuaguacuucuuagu

SEQ ID NO: 7472 - RNA, 22 nt, Homo sapiens
gauggaguugucgccugggcug

SEQ ID NO: 7473 - RNA, 22 nt, Homo sapiens
uggaagguaaguuuugagcauu

SEQ ID NO: 7474 - RNA, 23 nt, Homo sapiens
ugccuagaugcugcccugggaca

SEQ ID NO: 7475 - RNA, 22 nt, Homo sapiens
guacaguuuucaguguucacug

SEQ ID NO: 7476 - RNA, 22 nt, Homo sapiens
uagcaccugugcacaccaggca

SEQ ID NO: 7477 - RNA, 20 nt, Homo sapiens
acaaaugcauucugugacau

SEQ ID NO: 7478 - RNA, 22 nt, Homo sapiens
uucacagugugaucuaugggca

SEQ ID NO: 7479 - RNA, 22 nt, Homo sapiens
augaaagguugucuuaagccau

SEQ ID NO: 7480 - RNA, 22 nt, Homo sapiens
agcugguauuuugucgaggacu

SEQ ID NO: 7481 - RNA, 22 nt, Homo sapiens
ucccaguuuuucugaauaguca

SEQ ID NO: 7482 - RNA, 22 nt, Homo sapiens
augugcagauguuacaaauugu

SEQ ID NO: 7483 - RNA, 22 nt, Homo sapiens
auuaacaucuagaguuuuggug

SEQ ID NO: 7484 - RNA, 22 nt, Homo sapiens
gagauacacccagugcagaggc

SEQ ID NO: 7485 - RNA, 22 nt, Homo sapiens
ccucauggagaacaucugcuag

SEQ ID NO: 7486 - RNA, 22 nt, Homo sapiens
cauugcaguuuuugguguaucu

SEQ ID NO: 7487 - RNA, 22 nt, Homo sapiens
ucaaagugacaaaguugcagca

SEQ ID NO: 7488 - RNA, 22 nt, Homo sapiens
auuaaguugugccugaaaacuu

SEQ ID NO: 7489 - RNA, 22 nt, Homo sapiens
cuacacaugcaggcucccugcc

SEQ ID NO: 7490 - RNA, 22 nt, Homo sapiens
gugauauguuaggaucuaaguc

SEQ ID NO: 7491 - RNA, 22 nt, Homo sapiens
uggcauauaauauagaagacua

SEQ ID NO: 7492 - RNA, 22 nt, Homo sapiens
ugaggucauguucugucagguu

SEQ ID NO: 7493 - RNA, 21 nt, Homo sapiens
cugguccccuuuauguaugug

SEQ ID NO: 7494 - RNA, 22 nt, Homo sapiens
cacacugucuucaauggguggu

SEQ ID NO: 7495 - RNA, 18 nt, Homo sapiens
uggcaagugccauacggu

SEQ ID NO: 7496 - RNA, 22 nt, Homo sapiens
cacacuguuuuccauggggguu

SEQ ID NO: 7497 - RNA, 22 nt, Homo sapiens
ucacauuguuauguaaauguuu

SEQ ID NO: 7498 - RNA, 22 nt, Homo sapiens
ggaagguaauugucagcucaua

SEQ ID NO: 7499 - RNA, 18 nt, Homo sapiens
aaaaagugcucaggccua

SEQ ID NO: 7500 - RNA, 22 nt, Homo sapiens
guacaguauaguaauaggauuu

SEQ ID NO: 7501 - RNA, 22 nt, Homo sapiens
cucaguggauuagauaaugcac

SEQ ID NO: 7502 - RNA, 22 nt, Homo sapiens
gaaagguaggaacagggugcag

SEQ ID NO: 7503 - RNA, 22 nt, Homo sapiens
uuggaagagaagggagauaaac

SEQ ID NO: 7504 - RNA, 22 nt, Homo sapiens
uuacaguauugcaaggacuagg

SEQ ID NO: 7505 - RNA, 22 nt, Homo sapiens
auacuagucaagaauguaugag

SEQ ID NO: 7506 - RNA, 22 nt, Homo sapiens
aauaaagucugaagugugcuua

SEQ ID NO: 7507 - RNA, 21 nt, Homo sapiens
uggucccauaagauuauaaug

SEQ ID NO: 7508 - RNA, 22 nt, Homo sapiens
gugaaagacauauaugguuuga

SEQ ID NO: 7509 - RNA, 22 nt, Homo sapiens
auagcagaagaagggacaauuc

SEQ ID NO: 7510 - RNA, 22 nt, Homo sapiens
agcccauguggcugaggcuucu

SEQ ID NO: 7511 - RNA, 22 nt, Homo sapiens
uuccaugagaugcaucaaagcu

SEQ ID NO: 7512 - RNA, 22 nt, Homo sapiens
gagguauggauaucuggagagg

SEQ ID NO: 7513 - RNA, 22 nt, Homo sapiens
aagugaaugugcuggaauagcu

SEQ ID NO: 7514 - RNA, 22 nt, Homo sapiens
acaaagcgcuucucuuuagagu

SEQ ID NO: 7515 - RNA, 22 nt, Homo sapiens
aaugugcacuauuagggugaua

SEQ ID NO: 7516 - RNA, 22 nt, Homo sapiens
cagagguauugcaaaagccuag

SEQ ID NO: 7517 - RNA, 22 nt, Homo sapiens
cuagcagacacuuccagagagu

SEQ ID NO: 7518 - RNA, 22 nt, Homo sapiens
auagcagugugaggacagacua

SEQ ID NO: 7519 - RNA, 20 nt, Homo sapiens
uuaaaucuagugcagacuca

SEQ ID NO: 7520 - RNA, 22 nt, Homo sapiens
uuaaugaacuuuauuuuguaga

SEQ ID NO: 7521 - RNA, 22 nt, Homo sapiens
aagcuggagugcaguggugcga

SEQ ID NO: 7522 - RNA, 22 nt, Homo sapiens
cugugcauggauuuuaagauug

SEQ ID NO: 7523 - RNA, 22 nt, Homo sapiens
auguggcacuugacuuucucgc

SEQ ID NO: 7524 - RNA, 22 nt, Homo sapiens
gauagcagccauucuuuuuauu

SEQ ID NO: 7525 - RNA, 22 nt, Homo sapiens
ugugaaaucagauagccuuuuu

SEQ ID NO: 7526 - RNA, 22 nt, Homo sapiens
gcaaaugcuaugccauuuuaua

SEQ ID NO: 7527 - RNA, 17 nt, Homo sapiens
ucuaauaauaugcauuu

SEQ ID NO: 7528 - RNA, 22 nt, Homo sapiens
agagagguggguggagccccca

SEQ ID NO: 7529 - RNA, 22 nt, Homo sapiens
uaucacaaacuuagcaguuuaa

SEQ ID NO: 7530 - RNA, 22 nt, Homo sapiens
ucacauuguacaaacagguaag

SEQ ID NO: 7531 - RNA, 22 nt, Homo sapiens
ugaaacauacacucugaugggg

SEQ ID NO: 7532 - RNA, 22 nt, Homo sapiens
guaaaucucuguuuucauggac

SEQ ID NO: 7533 - RNA, 22 nt, Homo sapiens
ucauuggaugucugaaaugauu

SEQ ID NO: 7534 - RNA, 22 nt, Homo sapiens
auuguacuccagccuuggggac

SEQ ID NO: 7535 - RNA, 22 nt, Homo sapiens
uuggcaauauuuacugaaguug

SEQ ID NO: 7536 - RNA, 16 nt, Homo sapiens
gugagagaugacaaac

SEQ ID NO: 7537 - RNA, 20 nt, Homo sapiens
uauugcacuccagucugggc

SEQ ID NO: 7538 - RNA, 22 nt, Homo sapiens
aucaggaaccuuuuuggugugu

SEQ ID NO: 7539 - RNA, 22 nt, Homo sapiens
uucaggcaccauugucauugau

SEQ ID NO: 7540 - RNA, 22 nt, Homo sapiens
cucauuggcuacugaggcuugu

SEQ ID NO: 7541 - RNA, 22 nt, Homo sapiens
gucauugcuuaaggguucaugc

SEQ ID NO: 7542 - RNA, 22 nt, Homo sapiens
auugcacuccagccuuggggau

SEQ ID NO: 7543 - RNA, 22 nt, Homo sapiens
ucaaaugcuguauuguaguaau

SEQ ID NO: 7544 - RNA, 22 nt, Homo sapiens
aggcagcuguuauauacugagu

SEQ ID NO: 7545 - RNA, 22 nt, Homo sapiens
ugucccaguuggguauugaauu

SEQ ID NO: 7546 - RNA, 22 nt, Homo sapiens
cugaaagguauacgcuuguuau

SEQ ID NO: 7547 - RNA, 22 nt, Homo sapiens
uggcaauguggaaugguccagg

SEQ ID NO: 7548 - RNA, 22 nt, Homo sapiens
uggcaauaaaaugcaguuacuu

SEQ ID NO: 7549 - RNA, 22 nt, Homo sapiens
auuaaucaggcaaugcuugcua

SEQ ID NO: 7550 - RNA, 22 nt, Homo sapiens
augugcacaugcuuacauguga

SEQ ID NO: 7551 - RNA, 22 nt, Homo sapiens
ggacuguacuccuggccagugu

SEQ ID NO: 7552 - RNA, 22 nt, Homo sapiens
aagauauguuaguuauaaacuc

SEQ ID NO: 7553 - RNA, 22 nt, Homo sapiens
augacauugaugcucuggcugg

SEQ ID NO: 7554 - RNA, 22 nt, Homo sapiens
gaugccuuuuuguccucaguua

SEQ ID NO: 7555 - RNA, 22 nt, Homo sapiens
ugauauguaacuacuccuuaua

SEQ ID NO: 7556 - RNA, 22 nt, Homo sapiens
ugucauguaaagaguaaauggu

SEQ ID NO: 7557 - RNA, 22 nt, Homo sapiens
uaacuagaaaggagacaguugc

SEQ ID NO: 7558 - RNA, 22 nt, Homo sapiens
augacauuccacagccguagag

SEQ ID NO: 7559 - RNA, 19 nt, Homo sapiens
augacauuuggggguggac

SEQ ID NO: 7560 - RNA, 20 nt, Homo sapiens
ucacaagccaagaucacguc

SEQ ID NO: 7561 - RNA, 22 nt, Homo sapiens
uaagugaauguuggcuacugaa

SEQ ID NO: 7562 - RNA, 22 nt, Homo sapiens
ucugugcauuacacuuuucuca

SEQ ID NO: 7563 - RNA, 22 nt, Homo sapiens
cacaguguuccagcuauuugaa

SEQ ID NO: 7564 - RNA, 22 nt, Homo sapiens
aauaaagcugaauccuuccuga

SEQ ID NO: 7565 - RNA, 22 nt, Homo sapiens
agugguuuuaaguagagcauac

SEQ ID NO: 7566 - RNA, 22 nt, Homo sapiens
ucucacagaguugaacuuucuu

SEQ ID NO: 7567 - RNA, 22 nt, Homo sapiens
ggcuuggaggaaugugagggcu

SEQ ID NO: 7568 - RNA, 22 nt, Homo sapiens
auaacagcugcaaggcaaaagc

SEQ ID NO: 7569 - RNA, 22 nt, Homo sapiens
uaaugcacauuuauuuuaccuu

SEQ ID NO: 7570 - RNA, 18 nt, Homo sapiens
uuucaggguggacaugag

SEQ ID NO: 7571 - RNA, 22 nt, Homo sapiens
agccaguauuuccacagagugg

SEQ ID NO: 7572 - RNA, 22 nt, Homo sapiens
uggauugaaagcuuuaauauug

SEQ ID NO: 7573 - RNA, 19 nt, Homo sapiens
uagggcacgaggcagaguc

SEQ ID NO: 7574 - RNA, 22 nt, Homo sapiens
ugaugcuaccuaaagcaaccau

SEQ ID NO: 7575 - RNA, 22 nt, Homo sapiens
augagauauuuuauaagaucau

SEQ ID NO: 7576 - RNA, 22 nt, Homo sapiens
uugaccuaugggaguuugacua

SEQ ID NO: 7577 - RNA, 22 nt, Homo sapiens
cuagcagaacaauacaauucgg

SEQ ID NO: 7578 - RNA, 22 nt, Homo sapiens
ugagaacuuauggugauuuuuu

SEQ ID NO: 7579 - RNA, 22 nt, Homo sapiens
ugguaccuuuuaaugacuaauu

SEQ ID NO: 7580 - RNA, 22 nt, Homo sapiens
aucacauuuauaguggcacgca

SEQ ID NO: 7581 - RNA, 22 nt, Homo sapiens
uagcaacauucagcucagguac

SEQ ID NO: 7582 - RNA, 19 nt, Homo sapiens
ucuaaaucucuugauagac

SEQ ID NO: 7583 - RNA, 22 nt, Homo sapiens
cacacugucuuucagaaugguu

SEQ ID NO: 7584 - RNA, 22 nt, Homo sapiens
auaugacugccagggcccaguc

SEQ ID NO: 7585 - RNA, 23 nt, Homo sapiens
uuucuugggcaugcuaugucagu

SEQ ID NO: 7586 - RNA, 22 nt, Homo sapiens
ucucacagaguugaauguuucu

SEQ ID NO: 7587 - RNA, 22 nt, Homo sapiens
uggcuugauggcacaagguuuc

SEQ ID NO: 7588 - RNA, 20 nt, Homo sapiens
guaacagcacuuucccaaag

SEQ ID NO: 7589 - RNA, 22 nt, Homo sapiens
uaccaaguauuuucacaugaac

SEQ ID NO: 7590 - RNA, 22 nt, Homo sapiens
ccucacaaccuuuauugaagag

SEQ ID NO: 7591 - RNA, 19 nt, Homo sapiens
ucacacuguggcuucuuua

SEQ ID NO: 7592 - RNA, 22 nt, Homo sapiens
uucaucuggcaauucagagauu

SEQ ID NO: 7593 - RNA, 19 nt, Homo sapiens
gauauguugagcacccuuu

SEQ ID NO: 7594 - RNA, 22 nt, Homo sapiens
uuuacagucuuuugugugaguc

SEQ ID NO: 7595 - RNA, 22 nt, Homo sapiens
aauggcaagagccacagaggcg

SEQ ID NO: 7596 - RNA, 22 nt, Homo sapiens
ggaaagcuagguguggguguac

SEQ ID NO: 7597 - RNA, 21 nt, Homo sapiens
aagcaugguguaucuuuccau

SEQ ID NO: 7598 - RNA, 22 nt, Homo sapiens
cuuaaagcgaauauugguggua

SEQ ID NO: 7599 - RNA, 22 nt, Homo sapiens
accugguuuuaacauuguauua

SEQ ID NO: 7600 - RNA, 22 nt, Homo sapiens
aucaaaguuucccagaaguugu

SEQ ID NO: 7601 - RNA, 22 nt, Homo sapiens
gugcauaugcaugugcaugcac

SEQ ID NO: 7602 - RNA, 22 nt, Homo sapiens
auggcaaugcgauggugacuga

SEQ ID NO: 7603 - RNA, 22 nt, Homo sapiens
uagcaccaaacauauacucagu

SEQ ID NO: 7604 - RNA, 22 nt, Homo sapiens
uugaacuagaaccugcaaauuu

SEQ ID NO: 7605 - RNA, 22 nt, Homo sapiens
uaaugcacuuuccuccaaggcu

SEQ ID NO: 7606 - RNA, 22 nt, Homo sapiens
uuacuguauagaaucaucuuga

SEQ ID NO: 7607 - RNA, 22 nt, Homo sapiens
auuguacuacaccauaguacug

SEQ ID NO: 7608 - RNA, 22 nt, Homo sapiens
augugcaaauuuccaaacucuu

SEQ ID NO: 7609 - RNA, 22 nt, Homo sapiens
ggaaggucaaagggaaagcaga

SEQ ID NO: 7610 - RNA, 22 nt, Homo sapiens
ucucaguggcuuccucacuuuu

SEQ ID NO: 7611 - RNA, 22 nt, Homo sapiens
aucaaagugaauuaaugagaau

SEQ ID NO: 7612 - RNA, 22 nt, Homo sapiens
uaaagcgaggucuccuacaaga

SEQ ID NO: 7613 - RNA, 22 nt, Homo sapiens
auacaguaucuucuggcaagca

SEQ ID NO: 7614 - RNA, 22 nt, Homo sapiens
ucagaccauuucauuacagacu

SEQ ID NO: 7615 - RNA, 22 nt, Homo sapiens
uucaguagucaaaagauaaggg

SEQ ID NO: 7616 - RNA, 22 nt, Homo sapiens
ugcauauguugagaugcauauu

SEQ ID NO: 7617 - RNA, 20 nt, Homo sapiens
uugcagagcccaacccugga

SEQ ID NO: 7618 - RNA, 22 nt, Homo sapiens
gucuuuguuuggucuguaucag

SEQ ID NO: 7619 - RNA, 22 nt, Homo sapiens
auggcaauguaagucagaaaaa

SEQ ID NO: 7620 - RNA, 22 nt, Homo sapiens
uuuaaagcuccaagcaugucug

SEQ ID NO: 7621 - RNA, 22 nt, Homo sapiens
gagagcuaggccacuggggcuu

SEQ ID NO: 7622 - RNA, 22 nt, Homo sapiens
ugaaaguuauauugugaaauuc

SEQ ID NO: 7623 - RNA, 22 nt, Homo sapiens
agagguuuugcccucgagauaa

SEQ ID NO: 7624 - RNA, 22 nt, Homo sapiens
ggugagguaggaaaaguuagga

SEQ ID NO: 7625 - RNA, 22 nt, Homo sapiens
cuauucacaggcaauauguaca

SEQ ID NO: 7626 - RNA, 22 nt, Homo sapiens
uuuggcuuaagauugacugcaa

SEQ ID NO: 7627 - RNA, 22 nt, Homo sapiens
uggagagugauaaguaaaugga

SEQ ID NO: 7628 - RNA, 22 nt, Homo sapiens
agcauggucacuuugggcccca

SEQ ID NO: 7629 - RNA, 21 nt, Homo sapiens
uuucugggggagcauggcagg

SEQ ID NO: 7630 - RNA, 22 nt, Homo sapiens
gaaucacaguuauuagagcagc

SEQ ID NO: 7631 - RNA, 22 nt, Homo sapiens
caaaagugguucuuauccuuuu

SEQ ID NO: 7632 - RNA, 22 nt, Homo sapiens
ucucacaccccucucauauacc

SEQ ID NO: 7633 - RNA, 22 nt, Homo sapiens
ugauacugugcauuagaggcua

SEQ ID NO: 7634 - RNA, 22 nt, Homo sapiens
augagggagggguggugccgca

SEQ ID NO: 7635 - RNA, 22 nt, Homo sapiens
uugacagaccuuggucauaucc

SEQ ID NO: 7636 - RNA, 22 nt, Homo sapiens
auggagagaauuauucucucag

SEQ ID NO: 7637 - RNA, 22 nt, Homo sapiens
ucagggacgcuugacacaagcc

SEQ ID NO: 7638 - RNA, 22 nt, Homo sapiens
uuaaggaaggagucuuaaaugg

SEQ ID NO: 7639 - RNA, 20 nt, Homo sapiens
ucacuggagcucauuugauu

SEQ ID NO: 7640 - RNA, 22 nt, Homo sapiens
acuauacugaagcaaauuaaca

SEQ ID NO: 7641 - RNA, 22 nt, Homo sapiens
uugcacaauccugugagugagu

SEQ ID NO: 7642 - RNA, 22 nt, Homo sapiens
aaaugcucucuacacguuucug

SEQ ID NO: 7643 - RNA, 22 nt, Homo sapiens
uucacagucacccuucuccaug

SEQ ID NO: 7644 - RNA, 22 nt, Homo sapiens
cugagaagaaacagguaaggac

SEQ ID NO: 7645 - RNA, 22 nt, Homo sapiens
aggucccauguccucccugacc

SEQ ID NO: 7646 - RNA, 22 nt, Homo sapiens
augacauugaaaagcaagugga

SEQ ID NO: 7647 - RNA, 22 nt, Homo sapiens
ucacacuguuuugauuauuaua

SEQ ID NO: 7648 - RNA, 22 nt, Homo sapiens
uuugauguugauacuaccuuca

SEQ ID NO: 7649 - RNA, 22 nt, Homo sapiens
caaaggcuucugaaacugcaga

SEQ ID NO: 7650 - RNA, 22 nt, Homo sapiens
uauagcaguguaagaaucgagu

SEQ ID NO: 7651 - RNA, 21 nt, Homo sapiens
gagguaccucauguaagugga

SEQ ID NO: 7652 - RNA, 22 nt, Homo sapiens
ggcagacuguggaguucuuucu

SEQ ID NO: 7653 - RNA, 22 nt, Homo sapiens
uuuuuuaguuagcugggcauga

SEQ ID NO: 7654 - RNA, 22 nt, Homo sapiens
auacaguaaugucuuaggcugu

SEQ ID NO: 7655 - RNA, 22 nt, Homo sapiens
aagugaaugaugugaaguguaa

SEQ ID NO: 7656 - RNA, 20 nt, Homo sapiens
aaacucugucuucuuuauca

SEQ ID NO: 7657 - RNA, 21 nt, Homo sapiens
gauaucuuuauucccaagagc

SEQ ID NO: 7658 - RNA, 22 nt, Homo sapiens
aaguaaauauccgguaguccca

SEQ ID NO: 7659 - RNA, 22 nt, Homo sapiens
auggaaggagaggaaugaauga

SEQ ID NO: 7660 - RNA, 22 nt, Homo sapiens
ugaaggacauaaggcagaguga

SEQ ID NO: 7661 - RNA, 22 nt, Homo sapiens
uuggaauguacucuagccuaug

SEQ ID NO: 7662 - RNA, 22 nt, Homo sapiens
auggauguucuagggaugugau

SEQ ID NO: 7663 - RNA, 22 nt, Homo sapiens
uuuccuguaggaaggaaauaga

SEQ ID NO: 7664 - RNA, 22 nt, Homo sapiens
cauugcaguggaguggggaaga

SEQ ID NO: 7665 - RNA, 22 nt, Homo sapiens
agcugguauuuugucaaggaua

SEQ ID NO: 7666 - RNA, 22 nt, Homo sapiens
caacacuguuuauuggauagcc

SEQ ID NO: 7667 - RNA, 22 nt, Homo sapiens
aaugguguuuccguuaagcuga

SEQ ID NO: 7668 - RNA, 22 nt, Homo sapiens
auaaaugcaaugguauuuuuga

SEQ ID NO: 7669 - RNA, 19 nt, Homo sapiens
acauggauuuugugcaaac

SEQ ID NO: 7670 - RNA, 21 nt, Homo sapiens
ugauaugguuuggauaugugu

SEQ ID NO: 7671 - RNA, 22 nt, Homo sapiens
ugacucaguuguuagucuucau

SEQ ID NO: 7672 - RNA, 20 nt, Homo sapiens
gcauaugucuuuauagcaga

SEQ ID NO: 7673 - RNA, 22 nt, Homo sapiens
auagcacaguguguguacacca

SEQ ID NO: 7674 - RNA, 21 nt, Homo sapiens
agagaacugaaacaugugacu

SEQ ID NO: 7675 - RNA, 22 nt, Homo sapiens
aagcacccuuugucuggacaug

SEQ ID NO: 7676 - RNA, 22 nt, Homo sapiens
auuacauagucaaggugucuca

SEQ ID NO: 7677 - RNA, 22 nt, Homo sapiens
uggcagaugagccgcgcuccaa

SEQ ID NO: 7678 - RNA, 22 nt, Homo sapiens
ucacugugagaguuuauccugu

SEQ ID NO: 7679 - RNA, 22 nt, Homo sapiens
uucuuagucauguaauagucca

SEQ ID NO: 7680 - RNA, 22 nt, Homo sapiens
uaguucauuuuucuugcuuaga

SEQ ID NO: 7681 - RNA, 22 nt, Homo sapiens
uggcuagaugagauguacugca

SEQ ID NO: 7682 - RNA, 22 nt, Homo sapiens
uccaugugaaaucuaugaggac

SEQ ID NO: 7683 - RNA, 22 nt, Homo sapiens
auggcaauaauagcuaccauuu

SEQ ID NO: 7684 - RNA, 22 nt, Homo sapiens
ugaggcacucccuagcggggug

SEQ ID NO: 7685 - RNA, 22 nt, Homo sapiens
gcaagacaugucuaagguuuaa

SEQ ID NO: 7686 - RNA, 22 nt, Homo sapiens
acugacaugaucaggcauguuc

SEQ ID NO: 7687 - RNA, 22 nt, Homo sapiens
gugcacaaucgugcauuccuug

SEQ ID NO: 7688 - RNA, 22 nt, Homo sapiens
cucauggagauagagaauagaa

SEQ ID NO: 7689 - RNA, 22 nt, Homo sapiens
aggaauuuaauguaugauaaua

SEQ ID NO: 7690 - RNA, 18 nt, Homo sapiens
augugcaauuuuguauuu

SEQ ID NO: 7691 - RNA, 22 nt, Homo sapiens
aaagugauguccaggcuuucag

SEQ ID NO: 7692 - RNA, 22 nt, Homo sapiens
uugacauaguuucugaaauaga

SEQ ID NO: 7693 - RNA, 22 nt, Homo sapiens
accagucucagguaugucuuua

SEQ ID NO: 7694 - RNA, 20 nt, Homo sapiens
augucaggaagggagucagg

SEQ ID NO: 7695 - RNA, 22 nt, Homo sapiens
uacaaguggguuugugcaggag

SEQ ID NO: 7696 - RNA, 22 nt, Homo sapiens
auagcagaccaccucucccacu

SEQ ID NO: 7697 - RNA, 22 nt, Homo sapiens
auucuauaguccuaggauuggg

SEQ ID NO: 7698 - RNA, 22 nt, Homo sapiens
ugagauggguaauuaaauggug

SEQ ID NO: 7699 - RNA, 22 nt, Homo sapiens
aucucaguuaauuccaucuuuc

SEQ ID NO: 7700 - RNA, 22 nt, Homo sapiens
uuaaggcuuuaaguaaacacag

SEQ ID NO: 7701 - RNA, 22 nt, Homo sapiens
uuggagagagaggacucccggc

SEQ ID NO: 7702 - RNA, 22 nt, Homo sapiens
aagccagugugacaggaaacuu

SEQ ID NO: 7703 - RNA, 22 nt, Homo sapiens
uacaguagaaugucuuucaaaa

SEQ ID NO: 7704 - RNA, 22 nt, Homo sapiens
gacaccugguguggaacuggag

SEQ ID NO: 7705 - RNA, 22 nt, Homo sapiens
caugguguuaggcacugggaau

SEQ ID NO: 7706 - RNA, 22 nt, Homo sapiens
uaaagccauugucaaguuugua

SEQ ID NO: 7707 - RNA, 22 nt, Homo sapiens
aaucugucuuuuguuauugagg

SEQ ID NO: 7708 - RNA, 22 nt, Homo sapiens
ggaguguguaggagaaagguaa

SEQ ID NO: 7709 - RNA, 22 nt, Homo sapiens
agagguuuuggggcugagagcu

SEQ ID NO: 7710 - RNA, 22 nt, Homo sapiens
uaagugaauuucacuacugagu

SEQ ID NO: 7711 - RNA, 18 nt, Homo sapiens
uauuccucuuccucuauc

SEQ ID NO: 7712 - RNA, 19 nt, Homo sapiens
agagacucauuguagcauu

SEQ ID NO: 7713 - RNA, 22 nt, Homo sapiens
uuggagugugagagcagccugg

SEQ ID NO: 7714 - RNA, 22 nt, Homo sapiens
uagcaagaugaauuugugcaaa

SEQ ID NO: 7715 - RNA, 21 nt, Homo sapiens
uagcaaauugcuauuaaggca

SEQ ID NO: 7716 - RNA, 22 nt, Homo sapiens
uuuagguuacauauaauccaaa

SEQ ID NO: 7717 - RNA, 22 nt, Homo sapiens
uuaaaugcuagaauuuucuuug

SEQ ID NO: 7718 - RNA, 22 nt, Homo sapiens
uauugcagugagauccaucugg

SEQ ID NO: 7719 - RNA, 22 nt, Homo sapiens
uuaacagcacuacguggggauc

SEQ ID NO: 7720 - RNA, 22 nt, Homo sapiens
aguggaguguaaagcgucuuuu

SEQ ID NO: 7721 - RNA, 22 nt, Homo sapiens
ugaauacugugcaaaggauuug

SEQ ID NO: 7722 - RNA, 22 nt, Homo sapiens
augucaaggugaagaaagauca

SEQ ID NO: 7723 - RNA, 23 nt, Homo sapiens
auagagcuaggaugcagacagau

SEQ ID NO: 7724 - RNA, 22 nt, Homo sapiens
uuaagugcucaguuacucaguu

SEQ ID NO: 7725 - RNA, 19 nt, Homo sapiens
caauacuucuuggcauaca

SEQ ID NO: 7726 - RNA, 22 nt, Homo sapiens
ucacaaguguauagacaugucc

SEQ ID NO: 7727 - RNA, 22 nt, Homo sapiens
uugugaaaucuaggcagagguu

SEQ ID NO: 7728 - RNA, 22 nt, Homo sapiens
uggucccaugaacuuuagguca

SEQ ID NO: 7729 - RNA, 22 nt, Homo sapiens
acauaugaguacaugugccaug

SEQ ID NO: 7730 - RNA, 22 nt, Homo sapiens
aucauauccuagauauaacuuc

SEQ ID NO: 7731 - RNA, 17 nt, Homo sapiens
uuuuggauuagaaaucc

SEQ ID NO: 7732 - RNA, 22 nt, Homo sapiens
uugacuucagagcugauucaag

SEQ ID NO: 7733 - RNA, 22 nt, Homo sapiens
uuguauaggcucaguaagaauc

SEQ ID NO: 7734 - RNA, 22 nt, Homo sapiens
uuagaucaacauggaacucuau

SEQ ID NO: 7735 - RNA, 22 nt, Homo sapiens
uuuccaagaugcuuacuuucuc

SEQ ID NO: 7736 - RNA, 22 nt, Homo sapiens
agagugcuauagauuagauuuc

SEQ ID NO: 7737 - RNA, 22 nt, Homo sapiens
ucaacauugcugucaggcaucu

SEQ ID NO: 7738 - RNA, 22 nt, Homo sapiens
ugagaggugaauggcaggcuca

SEQ ID NO: 7739 - RNA, 22 nt, Homo sapiens
cagggaauguuauuuaauagca

SEQ ID NO: 7740 - RNA, 22 nt, Homo sapiens
agggcuuguuuaacuaucauua

SEQ ID NO: 7741 - RNA, 22 nt, Homo sapiens
uuacaucaucacauuaguuugc

SEQ ID NO: 7742 - RNA, 22 nt, Homo sapiens
gugaggaaggaaaccugcuagc

SEQ ID NO: 7743 - RNA, 22 nt, Homo sapiens
augauacuggcuucauagaaug

SEQ ID NO: 7744 - RNA, 22 nt, Homo sapiens
cccuguguuguucaaggaucug

SEQ ID NO: 7745 - RNA, 22 nt, Homo sapiens
aucugggguuggcaaaguuugg

SEQ ID NO: 7746 - RNA, 22 nt, Homo sapiens
augaccuuguccucagugucau

SEQ ID NO: 7747 - RNA, 22 nt, Homo sapiens
uguucuugaguugggaguacaa

SEQ ID NO: 7748 - RNA, 22 nt, Homo sapiens
ugauaggucuguuuugaaaagg

SEQ ID NO: 7749 - RNA, 22 nt, Homo sapiens
uuacaguagaugaggguauaau

SEQ ID NO: 7750 - RNA, 22 nt, Homo sapiens
uuccauguaguugagcaguuuu

SEQ ID NO: 7751 - RNA, 22 nt, Homo sapiens
guaaacuuccccucaugaauga

SEQ ID NO: 7752 - RNA, 22 nt, Homo sapiens
gugcuaggugcuaggaagauag

SEQ ID NO: 7753 - RNA, 22 nt, Homo sapiens
gagaacauacggcauuugguuu

SEQ ID NO: 7754 - RNA, 22 nt, Homo sapiens
augagcuaguguaggguacuga

SEQ ID NO: 7755 - RNA, 22 nt, Homo sapiens
auaauagcugaucauuuagaag

SEQ ID NO: 7756 - RNA, 22 nt, Homo sapiens
guaugucuugucuauggcugcu

SEQ ID NO: 7757 - RNA, 22 nt, Homo sapiens
augaagacaucgucugggauua

SEQ ID NO: 7758 - RNA, 22 nt, Homo sapiens
agugaaaucugaagaaggucau

SEQ ID NO: 7759 - RNA, 22 nt, Homo sapiens
uuugauguugagacuauaaagc

SEQ ID NO: 7760 - RNA, 22 nt, Homo sapiens
gugcacaacgugcaaguuuguu

SEQ ID NO: 7761 - RNA, 22 nt, Homo sapiens
gugacauuauuucagcuacaug

SEQ ID NO: 7762 - RNA, 23 nt, Homo sapiens
ucacaguggcugcuuaauuguga

SEQ ID NO: 7763 - RNA, 22 nt, Homo sapiens
cuuuaguugucuccucaagggu

SEQ ID NO: 7764 - RNA, 22 nt, Homo sapiens
ugagucuguucucacauugcua

SEQ ID NO: 7765 - RNA, 22 nt, Homo sapiens
cuucaaaguuggcuaggagaca

SEQ ID NO: 7766 - RNA, 22 nt, Homo sapiens
gagguaaguggauuaugagguc

SEQ ID NO: 7767 - RNA, 22 nt, Homo sapiens
uaugccuuuuggcucaagaaac

SEQ ID NO: 7768 - RNA, 22 nt, Homo sapiens
uauagcagccugaacaaaguaa

SEQ ID NO: 7769 - RNA, 22 nt, Homo sapiens
uaugcuuauugucucauccacu

SEQ ID NO: 7770 - RNA, 22 nt, Homo sapiens
acauauaaggagacuagggcau

SEQ ID NO: 7771 - RNA, 22 nt, Homo sapiens
cuguaugugagaaauaauaagu

SEQ ID NO: 7772 - RNA, 22 nt, Homo sapiens
uugagagaaaaaauuuauuggu

SEQ ID NO: 7773 - RNA, 22 nt, Homo sapiens
augugcaaagcacuguucagca

SEQ ID NO: 7774 - RNA, 22 nt, Homo sapiens
gagauguuuuguuaucaaagga

SEQ ID NO: 7775 - RNA, 22 nt, Homo sapiens
auagcagugugaaaacagacua

SEQ ID NO: 7776 - RNA, 22 nt, Homo sapiens
uggcaguuuacaaaugccauga

SEQ ID NO: 7777 - RNA, 19 nt, Homo sapiens
caguaucauugcacauagu

SEQ ID NO: 7778 - RNA, 22 nt, Homo sapiens
uuaaaguguuugcagacaggug

SEQ ID NO: 7779 - RNA, 22 nt, Homo sapiens
ugagaucaaggugggcccuggg

SEQ ID NO: 7780 - RNA, 22 nt, Homo sapiens
gaaugcuaagcaugugggaauu

SEQ ID NO: 7781 - RNA, 22 nt, Homo sapiens
cuacaguagagaggauguagaa

SEQ ID NO: 7782 - RNA, 23 nt, Homo sapiens
acacaguaaacuaaaagcuagcu

SEQ ID NO: 7783 - RNA, 22 nt, Homo sapiens
ugaaagcuacaggaaaguauuu

SEQ ID NO: 7784 - RNA, 22 nt, Homo sapiens
gaagcgaggugauuagcagaca

SEQ ID NO: 7785 - RNA, 22 nt, Homo sapiens
auggaggacaaugucaccuuca

SEQ ID NO: 7786 - RNA, 22 nt, Homo sapiens
uaugcacacguguccaugugca

SEQ ID NO: 7787 - RNA, 22 nt, Homo sapiens
aguaucacaggcaaaacagaau

SEQ ID NO: 7788 - RNA, 22 nt, Homo sapiens
ugugaacauuuuguauauauua

SEQ ID NO: 7789 - RNA, 22 nt, Homo sapiens
augagggaagcucacgugucca

SEQ ID NO: 7790 - RNA, 22 nt, Homo sapiens
ugauggcacagugaguuccagg

SEQ ID NO: 7791 - RNA, 19 nt, Homo sapiens
aagugaaugcuuuguucac

SEQ ID NO: 7792 - RNA, 22 nt, Homo sapiens
auggcaauaugaugcacuguuu

SEQ ID NO: 7793 - RNA, 20 nt, Homo sapiens
uuauagcuacaucuugacug

SEQ ID NO: 7794 - RNA, 22 nt, Homo sapiens
ucagaguagagcgacuucuccu

SEQ ID NO: 7795 - RNA, 22 nt, Homo sapiens
guacaagugcaguuucguuaca

SEQ ID NO: 7796 - RNA, 22 nt, Homo sapiens
ugauauggcuuggcuaugucac

SEQ ID NO: 7797 - RNA, 22 nt, Homo sapiens
cagcaucauucaucugggguaa

SEQ ID NO: 7798 - RNA, 21 nt, Homo sapiens
gaaauacugccuuaggagcug

SEQ ID NO: 7799 - RNA, 22 nt, Homo sapiens
aucucaguucaggcuggccaca

SEQ ID NO: 7800 - RNA, 22 nt, Homo sapiens
uaaucacagagguuuggccuca

SEQ ID NO: 7801 - RNA, 22 nt, Homo sapiens
gugaaguuuuuugcugagaguc

SEQ ID NO: 7802 - RNA, 22 nt, Homo sapiens
uuuggcuuugagaagcagugga

SEQ ID NO: 7803 - RNA, 22 nt, Homo sapiens
uaaagugaggauggcaguaggu

SEQ ID NO: 7804 - RNA, 22 nt, Homo sapiens
cuagcugcacuuccugcuacug

SEQ ID NO: 7805 - RNA, 21 nt, Homo sapiens
uggcuauuucuguggcauaca

SEQ ID NO: 7806 - RNA, 22 nt, Homo sapiens
agucaaaugcuuauguauaaag

SEQ ID NO: 7807 - RNA, 22 nt, Homo sapiens
cugaggacaucagggaagcauc

SEQ ID NO: 7808 - RNA, 22 nt, Homo sapiens
agcaggucuuaacuugugaggu

SEQ ID NO: 7809 - RNA, 22 nt, Homo sapiens
ugaaagacugaaagcuuuucuu

SEQ ID NO: 7810 - RNA, 22 nt, Homo sapiens
agaauguauauucuguaguugu

SEQ ID NO: 7811 - RNA, 19 nt, Homo sapiens
caugugcacuacuggcuuc

SEQ ID NO: 7812 - RNA, 22 nt, Homo sapiens
ugaagugaagacucacagaagg

SEQ ID NO: 7813 - RNA, 22 nt, Homo sapiens
ccauuucacucuuccugaagga

SEQ ID NO: 7814 - RNA, 22 nt, Homo sapiens
ugaaauacuuaauuucuccaug

SEQ ID NO: 7815 - RNA, 22 nt, Homo sapiens
gaggagucagacugugcaaggu

SEQ ID NO: 7816 - RNA, 22 nt, Homo sapiens
aaggaguagaggaauagcaaug

SEQ ID NO: 7817 - RNA, 22 nt, Homo sapiens
uacugagagaggaauauugaaa

SEQ ID NO: 7818 - RNA, 23 nt, Homo sapiens
accuucauucauucagcugaagu

SEQ ID NO: 7819 - RNA, 22 nt, Homo sapiens
cagagaacauucagagcuguag

SEQ ID NO: 7820 - RNA, 18 nt, Homo sapiens
gauaacaguggacuaugc

SEQ ID NO: 7821 - RNA, 22 nt, Homo sapiens
auaugcauacccucaccaacua

SEQ ID NO: 7822 - RNA, 22 nt, Homo sapiens
uguugcacuccauccugggcga

SEQ ID NO: 7823 - RNA, 22 nt, Homo sapiens
auggcaaugcgaugaugacuga

SEQ ID NO: 7824 - RNA, 22 nt, Homo sapiens
guacaguaguaaaagugaauga

SEQ ID NO: 7825 - RNA, 22 nt, Homo sapiens
aaaugcacgcuacccagcuaga

SEQ ID NO: 7826 - RNA, 22 nt, Homo sapiens
cuaacacagggcaagucaggcu

SEQ ID NO: 7827 - RNA, 22 nt, Homo sapiens
ugugaagauggacuaauauagu

SEQ ID NO: 7828 - RNA, 22 nt, Homo sapiens
uauagcagugaguauugacuaa

SEQ ID NO: 7829 - RNA, 22 nt, Homo sapiens
auggcacugccuggcuucaugg

SEQ ID NO: 7830 - RNA, 20 nt, Homo sapiens
aacaguguguaaguuuccuu

SEQ ID NO: 7831 - RNA, 22 nt, Homo sapiens
uucuaaacaucuuacaaugcau

SEQ ID NO: 7832 - RNA, 22 nt, Homo sapiens
ucagugcuuuuuguugucauca

SEQ ID NO: 7833 - RNA, 22 nt, Homo sapiens
gugaggucguagucauaggcaa

SEQ ID NO: 7834 - RNA, 22 nt, Homo sapiens
cuucucagugcucaucuuauuu

SEQ ID NO: 7835 - RNA, 21 nt, Homo sapiens
uaagcuaaacauucaguuaac

SEQ ID NO: 7836 - RNA, 22 nt, Homo sapiens
ucccugaguaucuaauguguuu

SEQ ID NO: 7837 - RNA, 22 nt, Homo sapiens
acagugcuucugauaugaugcc

SEQ ID NO: 7838 - RNA, 22 nt, Homo sapiens
ucacaugaagauuuuaguauac

SEQ ID NO: 7839 - RNA, 22 nt, Homo sapiens
guccaaauccaugggauguaca

SEQ ID NO: 7840 - RNA, 22 nt, Homo sapiens
aaugcacauaaaauccuccagg

SEQ ID NO: 7841 - RNA, 22 nt, Homo sapiens
gugaaagacagcauuaauggcu

SEQ ID NO: 7842 - RNA, 22 nt, Homo sapiens
acaguguguguguucaccuaga

SEQ ID NO: 7843 - RNA, 22 nt, Homo sapiens
gugaucuguccuucauagccug

SEQ ID NO: 7844 - RNA, 22 nt, Homo sapiens
gugauuauuaugcacugcaugc

SEQ ID NO: 7845 - RNA, 22 nt, Homo sapiens
cucauggaauacuucacagcca

SEQ ID NO: 7846 - RNA, 22 nt, Homo sapiens
ucacagugcaggaucaguuaau

SEQ ID NO: 7847 - RNA, 22 nt, Homo sapiens
uuagcaauagccugcaucugca

SEQ ID NO: 7848 - RNA, 22 nt, Homo sapiens
gcagaauugguuucuucuaagg

SEQ ID NO: 7849 - RNA, 22 nt, Homo sapiens
agaaccaaucccacauggauac

SEQ ID NO: 7850 - RNA, 22 nt, Homo sapiens
uuugacuuuuagaauaugaguu

SEQ ID NO: 7851 - RNA, 22 nt, Homo sapiens
ccaucacaggccucagugggaa

SEQ ID NO: 7852 - RNA, 21 nt, Homo sapiens
ugaaccccugcucucaagaaa

SEQ ID NO: 7853 - RNA, 22 nt, Homo sapiens
cuaaagugcuuaaaaucucauu

SEQ ID NO: 7854 - RNA, 22 nt, Homo sapiens
aacagaauccucuuuuccuggg

SEQ ID NO: 7855 - RNA, 20 nt, Homo sapiens
uucagcaaaggaaugggagu

SEQ ID NO: 7856 - RNA, 22 nt, Homo sapiens
ugcauacacaagcauacaugua

SEQ ID NO: 7857 - RNA, 22 nt, Homo sapiens
uggacugagauuucagcugcca

SEQ ID NO: 7858 - RNA, 22 nt, Homo sapiens
cugacauuguugaucacagcca

SEQ ID NO: 7859 - RNA, 22 nt, Homo sapiens
auugaacuuuugucacugacau

SEQ ID NO: 7860 - RNA, 22 nt, Homo sapiens
ugcugcaaucucggcacuuugg

SEQ ID NO: 7861 - RNA, 22 nt, Homo sapiens
ucacaugugcguuuuggcaugu

SEQ ID NO: 7862 - RNA, 22 nt, Homo sapiens
uugcaacuuagaaaaaucauuu

SEQ ID NO: 7863 - RNA, 22 nt, Homo sapiens
ugauagaucugggcaaaguaaa

SEQ ID NO: 7864 - RNA, 22 nt, Homo sapiens
uugaaagacagaggggcaaguu

SEQ ID NO: 7865 - RNA, 22 nt, Homo sapiens
gcuggcuuucuccugaucucag

SEQ ID NO: 7866 - RNA, 22 nt, Homo sapiens
cucaaagucaagggaaagcagg

SEQ ID NO: 7867 - RNA, 22 nt, Homo sapiens
uagaacauuccaggugauguug

SEQ ID NO: 7868 - RNA, 23 nt, Homo sapiens
uugcauagacauccucauagauu

SEQ ID NO: 7869 - RNA, 22 nt, Homo sapiens
gaguaacagcauaaauuuguga

SEQ ID NO: 7870 - RNA, 22 nt, Homo sapiens
agcuggcuguagcugcaagucu

SEQ ID NO: 7871 - RNA, 22 nt, Homo sapiens
ugaaugcuucaugucugggcug

SEQ ID NO: 7872 - RNA, 18 nt, Homo sapiens
auauugccuucagacuag

SEQ ID NO: 7873 - RNA, 22 nt, Homo sapiens
uaacauagucauauacuugcuu

SEQ ID NO: 7874 - RNA, 22 nt, Homo sapiens
uggaguguaaauuaguucagcc

SEQ ID NO: 7875 - RNA, 20 nt, Homo sapiens
ucacugugaacuucuugagg

SEQ ID NO: 7876 - RNA, 22 nt, Homo sapiens
auagcaggagaauggucauggg

SEQ ID NO: 7877 - RNA, 22 nt, Homo sapiens
augaaaguguguggaaacuuga

SEQ ID NO: 7878 - RNA, 22 nt, Homo sapiens
cauggauuuuuuugaauggcag

SEQ ID NO: 7879 - RNA, 22 nt, Homo sapiens
uuggcaauucagauucuuuuau

SEQ ID NO: 7880 - RNA, 22 nt, Homo sapiens
uaguaaacauaguucuuuugcu

SEQ ID NO: 7881 - RNA, 22 nt, Homo sapiens
guagcagaauaucagauaauuu

SEQ ID NO: 7882 - RNA, 22 nt, Homo sapiens
ucaaaguaaagccucaggaugg

SEQ ID NO: 7883 - RNA, 22 nt, Homo sapiens
uucaaaguaaaaauguguucac

SEQ ID NO: 7884 - RNA, 22 nt, Homo sapiens
aagagguaauaacaaagcuucu

SEQ ID NO: 7885 - RNA, 22 nt, Homo sapiens
ucuuugauuuuguuacuaagac

SEQ ID NO: 7886 - RNA, 22 nt, Homo sapiens
uuugccuuugugauauggucua

SEQ ID NO: 7887 - RNA, 22 nt, Homo sapiens
uucagagugaggcucucggaac

SEQ ID NO: 7888 - RNA, 22 nt, Homo sapiens
gaugagguagaagacucagcaa

SEQ ID NO: 7889 - RNA, 22 nt, Homo sapiens
augaugucauuuuaauuucuaa

SEQ ID NO: 7890 - RNA, 22 nt, Homo sapiens
cuguagcuuuuauaugcuuagc

SEQ ID NO: 7891 - RNA, 22 nt, Homo sapiens
ugguguuugagaagcugauguc

SEQ ID NO: 7892 - RNA, 22 nt, Homo sapiens
gugagaagaaaaauauggcugu

SEQ ID NO: 7893 - RNA, 22 nt, Homo sapiens
augugcaaauucauguucuuua

SEQ ID NO: 7894 - RNA, 22 nt, Homo sapiens
ugaaacacaccuccucuccauc

SEQ ID NO: 7895 - RNA, 22 nt, Homo sapiens
ucugguggugaugagagacagu

SEQ ID NO: 7896 - RNA, 22 nt, Homo sapiens
uaccacccuuuuuccagaagcc

SEQ ID NO: 7897 - RNA, 22 nt, Homo sapiens
uguaaaucugguuaauuggaua

SEQ ID NO: 7898 - RNA, 17 nt, Homo sapiens
ucaaaugcucccaguga

SEQ ID NO: 7899 - RNA, 22 nt, Homo sapiens
uuuaaggcaugccuguacaugc

SEQ ID NO: 7900 - RNA, 21 nt, Homo sapiens
ucacaaugaacagcagcagaa

SEQ ID NO: 7901 - RNA, 22 nt, Homo sapiens
gaauucugucgcuuacuagaug

SEQ ID NO: 7902 - RNA, 22 nt, Homo sapiens
auacacauuccugggccucacc

SEQ ID NO: 7903 - RNA, 22 nt, Homo sapiens
cauugcagauccuucaaaugac

SEQ ID NO: 7904 - RNA, 17 nt, Homo sapiens
ugugauugaagucaucc

SEQ ID NO: 7905 - RNA, 22 nt, Homo sapiens
cagcacauuacaaguacuuggu

SEQ ID NO: 7906 - RNA, 22 nt, Homo sapiens
cuaaagauagugacaugauuug

SEQ ID NO: 7907 - RNA, 22 nt, Homo sapiens
uccaguuguuauuuuuauaaag

SEQ ID NO: 7908 - RNA, 22 nt, Homo sapiens
aucagaguggguuuuaaaagug

SEQ ID NO: 7909 - RNA, 22 nt, Homo sapiens
cacacugucuucauuacuguag

SEQ ID NO: 7910 - RNA, 19 nt, Homo sapiens
ucuuugcuuuucuaagagg

SEQ ID NO: 7911 - RNA, 22 nt, Homo sapiens
uguugcacucuagccugggcaa

SEQ ID NO: 7912 - RNA, 22 nt, Homo sapiens
uauugaacgugggauauugaag

SEQ ID NO: 7913 - RNA, 22 nt, Homo sapiens
auguugcaguuuaauuauccua

SEQ ID NO: 7914 - RNA, 22 nt, Homo sapiens
uuggcaaucaauucugacgucu

SEQ ID NO: 7915 - RNA, 22 nt, Homo sapiens
uauugcagauacccaggaaguu

SEQ ID NO: 7916 - RNA, 22 nt, Homo sapiens
uugugaaaaaccucucguggaa

SEQ ID NO: 7917 - RNA, 22 nt, Homo sapiens
uucaaaguuggaggacaaacug

SEQ ID NO: 7918 - RNA, 22 nt, Homo sapiens
gcuggugacuuuaaguugaagc

SEQ ID NO: 7919 - RNA, 22 nt, Homo sapiens
ucaggguacuuguggccaaagu

SEQ ID NO: 7920 - RNA, 22 nt, Homo sapiens
ugacagcugaagauguugaacc

SEQ ID NO: 7921 - RNA, 22 nt, Homo sapiens
uuacaguucugguggagaggua

SEQ ID NO: 7922 - RNA, 22 nt, Homo sapiens
ugaaagacugaagaauaggcau

SEQ ID NO: 7923 - RNA, 22 nt, Homo sapiens
auagcagugugagaaugaacua

SEQ ID NO: 7924 - RNA, 22 nt, Homo sapiens
ucagggacuuacaaaccagaag

SEQ ID NO: 7925 - RNA, 22 nt, Homo sapiens
gagauggugugcuguuggaagu

SEQ ID NO: 7926 - RNA, 22 nt, Homo sapiens
ugaggagugaacuauuucugau

SEQ ID NO: 7927 - RNA, 22 nt, Homo sapiens
gugaaagauuaaaccagugugu

SEQ ID NO: 7928 - RNA, 21 nt, Homo sapiens
cucaaaguacugauauuacag

SEQ ID NO: 7929 - RNA, 23 nt, Homo sapiens
ggaaacauccagucuuucaccau

SEQ ID NO: 7930 - RNA, 20 nt, Homo sapiens
aauaacagccccagggaggu

SEQ ID NO: 7931 - RNA, 22 nt, Homo sapiens
uuagaacaguguuugccucgcu

SEQ ID NO: 7932 - RNA, 22 nt, Homo sapiens
ugaauaguuugacagaacucuu

SEQ ID NO: 7933 - RNA, 21 nt, Homo sapiens
aaaugcacauuacugcuggug

SEQ ID NO: 7934 - RNA, 22 nt, Homo sapiens
gauaacagauaaugucaguuau

SEQ ID NO: 7935 - RNA, 22 nt, Homo sapiens
auacaguauggagggcccagcu

SEQ ID NO: 7936 - RNA, 21 nt, Homo sapiens
acccucuaguuuucaacaggc

SEQ ID NO: 7937 - RNA, 22 nt, Homo sapiens
cuaaaacuuucugagugcagca

SEQ ID NO: 7938 - RNA, 22 nt, Homo sapiens
uaagugaauauggacaguuagc

SEQ ID NO: 7939 - RNA, 22 nt, Homo sapiens
uaagugaaggaaguguguuuac

SEQ ID NO: 7940 - RNA, 22 nt, Homo sapiens
augaaacuggcuaauuuuugua

SEQ ID NO: 7941 - RNA, 22 nt, Homo sapiens
aagcuggagugcaguggugcaa

SEQ ID NO: 7942 - RNA, 18 nt, Homo sapiens
cuuaacauugggaugaua

SEQ ID NO: 7943 - RNA, 21 nt, Homo sapiens
agagucaucucuaucuguacc

SEQ ID NO: 7944 - RNA, 22 nt, Homo sapiens
uguugcacuccagccuagguga

SEQ ID NO: 7945 - RNA, 22 nt, Homo sapiens
ucaggcacuaguaagaaaaagg

SEQ ID NO: 7946 - RNA, 22 nt, Homo sapiens
aaaaguucuuugagccuugaca

SEQ ID NO: 7947 - RNA, 22 nt, Homo sapiens
agcuauauugaggaugccauuc

SEQ ID NO: 7948 - RNA, 22 nt, Homo sapiens
ugaagacauuuuugggugugua

SEQ ID NO: 7949 - RNA, 19 nt, Homo sapiens
cucauggagaaggagaaua

SEQ ID NO: 7950 - RNA, 22 nt, Homo sapiens
uggauugagaagcuguggcuca

SEQ ID NO: 7951 - RNA, 22 nt, Homo sapiens
uaacauucacaugcugcaaaaa

SEQ ID NO: 7952 - RNA, 22 nt, Homo sapiens
guguauguuucucccugucccu

SEQ ID NO: 7953 - RNA, 23 nt, Homo sapiens
uggcauuuuaguuagcuucagug

SEQ ID NO: 7954 - RNA, 22 nt, Homo sapiens
gugcacaacaugcagguuuguu

SEQ ID NO: 7955 - RNA, 22 nt, Homo sapiens
auagcagugugaaaacagacug

SEQ ID NO: 7956 - RNA, 22 nt, Homo sapiens
uuucuauguugaccagucuaga

SEQ ID NO: 7957 - RNA, 22 nt, Homo sapiens
ugacaacugauuaacuccuuua

SEQ ID NO: 7958 - RNA, 22 nt, Homo sapiens
uaugugcacaugcccuggugac

SEQ ID NO: 7959 - RNA, 22 nt, Homo sapiens
uguugcacuccagccugggcaa

SEQ ID NO: 7960 - RNA, 23 nt, Homo sapiens
auugaacacuuucauaugugagg

SEQ ID NO: 7961 - RNA, 22 nt, Homo sapiens
aacacuguuuccagucaugauc

SEQ ID NO: 7962 - RNA, 22 nt, Homo sapiens
gaugcagcuaggauuugugaca

SEQ ID NO: 7963 - RNA, 22 nt, Homo sapiens
caaaugacaucauuucauucaa

SEQ ID NO: 7964 - RNA, 22 nt, Homo sapiens
ugugcaaucagcuucauuacau

SEQ ID NO: 7965 - RNA, 19 nt, Homo sapiens
ggucacagggguuacaagg

SEQ ID NO: 7966 - RNA, 22 nt, Homo sapiens
uaauacuguaauggugguuccg

SEQ ID NO: 7967 - RNA, 22 nt, Homo sapiens
ugauaacauuucuucugguaca

SEQ ID NO: 7968 - RNA, 22 nt, Homo sapiens
cuggcugagugguaaguagagg

SEQ ID NO: 7969 - RNA, 22 nt, Homo sapiens
uuucaguguggcaggcauagcu

SEQ ID NO: 7970 - RNA, 22 nt, Homo sapiens
agcugcaaagggagagaugauu

SEQ ID NO: 7971 - RNA, 22 nt, Homo sapiens
uagagcucaucuucuuuaaacu

SEQ ID NO: 7972 - RNA, 22 nt, Homo sapiens
agcaccauuagcguugggccgg

SEQ ID NO: 7973 - RNA, 22 nt, Homo sapiens
augaaaacaugauuugccuguu

SEQ ID NO: 7974 - RNA, 22 nt, Homo sapiens
uauugccuugccuacuuuucca

SEQ ID NO: 7975 - RNA, 20 nt, Homo sapiens
acacuggcuuugagauuuag

SEQ ID NO: 7976 - RNA, 22 nt, Homo sapiens
auaaaguucugcuggcauauau

SEQ ID NO: 7977 - RNA, 22 nt, Homo sapiens
gauaaaguauuggguacuaugc

SEQ ID NO: 7978 - RNA, 22 nt, Homo sapiens
cuggcaauaggcagugucccaa

SEQ ID NO: 7979 - RNA, 22 nt, Homo sapiens
agcaauaugacauugcuacauc

SEQ ID NO: 7980 - RNA, 22 nt, Homo sapiens
uugcgcuuuuccuauguugccc

SEQ ID NO: 7981 - RNA, 22 nt, Homo sapiens
uaugcuuauaaacauuugucag

SEQ ID NO: 7982 - RNA, 22 nt, Homo sapiens
uuaaaugcacauacuugagaaa

SEQ ID NO: 7983 - RNA, 22 nt, Homo sapiens
uaaugcuaucugggccaggggu

SEQ ID NO: 7984 - RNA, 22 nt, Homo sapiens
auugaacaugccauauguacca

SEQ ID NO: 7985 - RNA, 22 nt, Homo sapiens
ugagcagagggagaaguaaauu

SEQ ID NO: 7986 - RNA, 22 nt, Homo sapiens
gagaacauuuaagccacucagg

SEQ ID NO: 7987 - RNA, 20 nt, Homo sapiens
aagugaguguuaaacugaac

SEQ ID NO: 7988 - RNA, 22 nt, Homo sapiens
uucaggcaccauggucauugau

SEQ ID NO: 7989 - RNA, 19 nt, Homo sapiens
uggcuagagcagauauccu

SEQ ID NO: 7990 - RNA, 22 nt, Homo sapiens
gaggugauaucucauugugguu

SEQ ID NO: 7991 - RNA, 22 nt, Homo sapiens
gcauggagaaggggacugauuc

SEQ ID NO: 7992 - RNA, 22 nt, Homo sapiens
augaaaucuuuggcagaucuua

SEQ ID NO: 7993 - RNA, 22 nt, Homo sapiens
uuacaguaugaguaagaguucu

SEQ ID NO: 7994 - RNA, 22 nt, Homo sapiens
ugacuagagcaauuggaaacaa

SEQ ID NO: 7995 - RNA, 22 nt, Homo sapiens
guauaguaguacaaaaguuuuu

SEQ ID NO: 7996 - RNA, 22 nt, Homo sapiens
uaugcacacucucccaggaggg

SEQ ID NO: 7997 - RNA, 19 nt, Homo sapiens
uggagucaucaugcugcua

SEQ ID NO: 7998 - RNA, 22 nt, Homo sapiens
agcaccaauaacaguuucuagc

SEQ ID NO: 7999 - RNA, 22 nt, Homo sapiens
cauugcaguaagagugggcucu

SEQ ID NO: 8000 - RNA, 22 nt, Homo sapiens
aaaugcacaaagauuuugcacu

SEQ ID NO: 8001 - RNA, 22 nt, Homo sapiens
augagcuaauauggguaaguug

SEQ ID NO: 8002 - RNA, 22 nt, Homo sapiens
augaauacugcugcaaugaaca

SEQ ID NO: 8003 - RNA, 22 nt, Homo sapiens
ugagguuggguaauuuaugaag

SEQ ID NO: 8004 - RNA, 22 nt, Homo sapiens
aaagguaguacuucuagaaggg

SEQ ID NO: 8005 - RNA, 21 nt, Homo sapiens
cuaucucaguguuuacauuug

SEQ ID NO: 8006 - RNA, 22 nt, Homo sapiens
gugacagucaaagacaugacuu

SEQ ID NO: 8007 - RNA, 22 nt, Homo sapiens
ccauggcaauggucagucuauu

SEQ ID NO: 8008 - RNA, 22 nt, Homo sapiens
gugcacaacaugcaguuuuguu

SEQ ID NO: 8009 - RNA, 22 nt, Homo sapiens
uuaaagcuggcguuacaguuug

SEQ ID NO: 8010 - RNA, 22 nt, Homo sapiens
auggaguguggaacugggaauc

SEQ ID NO: 8011 - RNA, 22 nt, Homo sapiens
acauaguagacacugaaaauau

SEQ ID NO: 8012 - RNA, 22 nt, Homo sapiens
acauggcacugcgggcuucuug

SEQ ID NO: 8013 - RNA, 22 nt, Homo sapiens
agaaacauucucuugccuccuu

SEQ ID NO: 8014 - RNA, 22 nt, Homo sapiens
cauuugcacugagacucagcuu

SEQ ID NO: 8015 - RNA, 22 nt, Homo sapiens
auauucacagguaucagagauu

SEQ ID NO: 8016 - RNA, 22 nt, Homo sapiens
gaaagacuuucugcuguggaua

SEQ ID NO: 8017 - RNA, 21 nt, Homo sapiens
uauagcagcacgauuuauaau

SEQ ID NO: 8018 - RNA, 22 nt, Homo sapiens
ugagaagcauaccagugucugu

SEQ ID NO: 8019 - RNA, 22 nt, Homo sapiens
gcaaaugcuacaccauuuugua

SEQ ID NO: 8020 - RNA, 22 nt, Homo sapiens
auagcagcuugucagggcagac

SEQ ID NO: 8021 - RNA, 22 nt, Homo sapiens
uaaauugcauaaguacaaauga

SEQ ID NO: 8022 - RNA, 22 nt, Homo sapiens
uugauauguuguuagauucagu

SEQ ID NO: 8023 - RNA, 22 nt, Homo sapiens
uuggagagaaaggcaguuccug

SEQ ID NO: 8024 - RNA, 22 nt, Homo sapiens
uaaaugcuuaauugaaugugga

SEQ ID NO: 8025 - RNA, 22 nt, Homo sapiens
uauagcuaugggauguauuugc

SEQ ID NO: 8026 - RNA, 22 nt, Homo sapiens
auagaaucaucugugcacuagu

SEQ ID NO: 8027 - RNA, 22 nt, Homo sapiens
aggaagguaaacuaacuugccu

SEQ ID NO: 8028 - RNA, 22 nt, Homo sapiens
cucacggcccugcgcacuggca

SEQ ID NO: 8029 - RNA, 22 nt, Homo sapiens
uagcaguaucccaccaucuggu

SEQ ID NO: 8030 - RNA, 22 nt, Homo sapiens
agagugaagcuuuuuauauucu

SEQ ID NO: 8031 - RNA, 22 nt, Homo sapiens
uucaaaguaaagggauggagac

SEQ ID NO: 8032 - RNA, 22 nt, Homo sapiens
uuggacuucucaaggcaauaaa

SEQ ID NO: 8033 - RNA, 22 nt, Homo sapiens
gaaucauuguuucuaaguuugu

SEQ ID NO: 8034 - RNA, 22 nt, Homo sapiens
gugcacaaaucuuaaauguaca

SEQ ID NO: 8035 - RNA, 22 nt, Homo sapiens
uaugcacacacguguuuaugug

SEQ ID NO: 8036 - RNA, 22 nt, Homo sapiens
cuggcaauaaauuuuuguguug

SEQ ID NO: 8037 - RNA, 22 nt, Homo sapiens
gugcacaacguguagguuuguu

SEQ ID NO: 8038 - RNA, 22 nt, Homo sapiens
cucacugucaacauguauuugg

SEQ ID NO: 8039 - RNA, 22 nt, Homo sapiens
aaugacuaagaugguacauuuu

SEQ ID NO: 8040 - RNA, 22 nt, Homo sapiens
gugauuauccacgucuuuguga

SEQ ID NO: 8041 - RNA, 22 nt, Homo sapiens
uccaugugaaaaggucgugaua

SEQ ID NO: 8042 - RNA, 22 nt, Homo sapiens
agcugcaauguuuaguauaaua

SEQ ID NO: 8043 - RNA, 22 nt, Homo sapiens
uugguccccuucaaccagcugu

SEQ ID NO: 8044 - RNA, 22 nt, Homo sapiens
aagaccuaugcaggaagaaaug

SEQ ID NO: 8045 - RNA, 21 nt, Homo sapiens
uggucccauaagauuacaaug

SEQ ID NO: 8046 - RNA, 22 nt, Homo sapiens
aaucacaggucuuggcugcaug

SEQ ID NO: 8047 - RNA, 17 nt, Homo sapiens
gugagguggguaguauc

SEQ ID NO: 8048 - RNA, 22 nt, Homo sapiens
gugguguuugagcugccaggga

SEQ ID NO: 8049 - RNA, 22 nt, Homo sapiens
uggcgagaugcucgugugcaga

SEQ ID NO: 8050 - RNA, 22 nt, Homo sapiens
uuuaaagcuaaaauauguuuau

SEQ ID NO: 8051 - RNA, 22 nt, Homo sapiens
ugagaacuaaaaugugguauau

SEQ ID NO: 8052 - RNA, 22 nt, Homo sapiens
uuaacagcacaugcugucccuu

SEQ ID NO: 8053 - RNA, 22 nt, Homo sapiens
auagcauagucagcuucgcuga

SEQ ID NO: 8054 - RNA, 22 nt, Homo sapiens
uaucauggggacugcagccuag

SEQ ID NO: 8055 - RNA, 19 nt, Homo sapiens
uggcaaugucagcagagau

SEQ ID NO: 8056 - RNA, 22 nt, Homo sapiens
accaguuuuuuauacaucuucu

SEQ ID NO: 8057 - RNA, 22 nt, Homo sapiens
gccaagaagugucuaagcagga

SEQ ID NO: 8058 - RNA, 23 nt, Homo sapiens
ucugcggguguggacccuagugc

SEQ ID NO: 8059 - RNA, 20 nt, Homo sapiens
gacauagagacucucaaaaa

SEQ ID NO: 8060 - RNA, 22 nt, Homo sapiens
uucaauacuguugauccuuaug

SEQ ID NO: 8061 - RNA, 22 nt, Homo sapiens
uagcaccuuagcauuucuagug

SEQ ID NO: 8062 - RNA, 22 nt, Homo sapiens
guaacacaugcugcucucuggu

SEQ ID NO: 8063 - RNA, 22 nt, Homo sapiens
uaucacagguggacugcacacc

SEQ ID NO: 8064 - RNA, 22 nt, Homo sapiens
aaauugcaguuaggaugauggu

SEQ ID NO: 8065 - RNA, 22 nt, Homo sapiens
uuaaaaguauaggccuggcaua

SEQ ID NO: 8066 - RNA, 22 nt, Homo sapiens
ugcauuguuuagaaacacuggg

SEQ ID NO: 8067 - RNA, 22 nt, Homo sapiens
agcaccaauaaucagaguucuu

SEQ ID NO: 8068 - RNA, 22 nt, Homo sapiens
guacaguacugaaugaauguau

SEQ ID NO: 8069 - RNA, 22 nt, Homo sapiens
uguugcacuccagccuggguga

SEQ ID NO: 8070 - RNA, 22 nt, Homo sapiens
ucaacagugggcacuguaaaug

SEQ ID NO: 8071 - RNA, 22 nt, Homo sapiens
gggaggucauuguucaaugcug

SEQ ID NO: 8072 - RNA, 22 nt, Homo sapiens
ccacaguggauuaaaguuacug

SEQ ID NO: 8073 - RNA, 22 nt, Homo sapiens
uuaucauagugcaguuuucuga

SEQ ID NO: 8074 - RNA, 22 nt, Homo sapiens
gagaacauuaauaguuaauuuu

SEQ ID NO: 8075 - RNA, 22 nt, Homo sapiens
gaucugugugauuggaugcauu

SEQ ID NO: 8076 - RNA, 22 nt, Homo sapiens
aaagugaauguaucccguaagu

SEQ ID NO: 8077 - RNA, 22 nt, Homo sapiens
gucagucugucccugccuggcg

SEQ ID NO: 8078 - RNA, 22 nt, Homo sapiens
auaugcacgugcauacacacuu

SEQ ID NO: 8079 - RNA, 22 nt, Homo sapiens
cuacaguaugaaaccuuuacuc

SEQ ID NO: 8080 - RNA, 22 nt, Homo sapiens
gacagugagaugucaugugaaa

SEQ ID NO: 8081 - RNA, 22 nt, Homo sapiens
guagcagaacauguuccuugua

SEQ ID NO: 8082 - RNA, 22 nt, Homo sapiens
agagguaagcaguggcaagugc

SEQ ID NO: 8083 - RNA, 22 nt, Homo sapiens
auaacagcauuauugcauacgu

SEQ ID NO: 8084 - RNA, 22 nt, Homo sapiens
uuuaaugcaucccaaaauguag

SEQ ID NO: 8085 - RNA, 20 nt, Homo sapiens
ccccaguuuuucuauuagcu

SEQ ID NO: 8086 - RNA, 20 nt, Homo sapiens
cuucacagaaguggaaucau

SEQ ID NO: 8087 - RNA, 22 nt, Homo sapiens
caauggcaaugaaauagugaga

SEQ ID NO: 8088 - RNA, 22 nt, Homo sapiens
uagcagcaccccacucuacugg

SEQ ID NO: 8089 - RNA, 22 nt, Homo sapiens
uacaauagugacaaaucagcau

SEQ ID NO: 8090 - RNA, 22 nt, Homo sapiens
caaaggcuuccacugcauccuu

SEQ ID NO: 8091 - RNA, 22 nt, Homo sapiens
auuaaguuaggauuuugagaua

SEQ ID NO: 8092 - RNA, 19 nt, Homo sapiens
cugugcauuucuguggaag

SEQ ID NO: 8093 - RNA, 22 nt, Homo sapiens
cuaaggaaggacugaaaggaca

SEQ ID NO: 8094 - RNA, 22 nt, Homo sapiens
auuacaugucuauccaugaaca

SEQ ID NO: 8095 - RNA, 17 nt, Homo sapiens
auaugaauuuuggagau

SEQ ID NO: 8096 - RNA, 22 nt, Homo sapiens
uaacaguguauuccuuuggaca

SEQ ID NO: 8097 - RNA, 22 nt, Homo sapiens
aaaugcacagaaaggaugugga

SEQ ID NO: 8098 - RNA, 22 nt, Homo sapiens
ugagaggugauaaagcaagggu

SEQ ID NO: 8099 - RNA, 22 nt, Homo sapiens
uugaaagucuaggcuuacagua

SEQ ID NO: 8100 - RNA, 22 nt, Homo sapiens
ugagaucaacugagucagagca

SEQ ID NO: 8101 - RNA, 22 nt, Homo sapiens
aaggaguagaauagaugcaccu

SEQ ID NO: 8102 - RNA, 22 nt, Homo sapiens
gaaugcuaccagcaucuagugg

SEQ ID NO: 8103 - RNA, 22 nt, Homo sapiens
acccauguaggugggauuacag

SEQ ID NO: 8104 - RNA, 22 nt, Homo sapiens
uaauagcaguguuacuaggacu

SEQ ID NO: 8105 - RNA, 22 nt, Homo sapiens
uuggagugugcucauaacugcu

SEQ ID NO: 8106 - RNA, 22 nt, Homo sapiens
uaaugcacucgaaucauggaau

SEQ ID NO: 8107 - RNA, 22 nt, Homo sapiens
auagacacugaaaucccugcca

SEQ ID NO: 8108 - RNA, 22 nt, Homo sapiens
cugaaaguuauucaggggcaag

SEQ ID NO: 8109 - RNA, 22 nt, Homo sapiens
aacauuaaaccacccgauucac

SEQ ID NO: 8110 - RNA, 21 nt, Homo sapiens
auagggcuuguugauaguuaa

SEQ ID NO: 8111 - RNA, 22 nt, Homo sapiens
guuauguaucuugauugggugg

SEQ ID NO: 8112 - RNA, 22 nt, Homo sapiens
ggagcucaucuagcauagaggu

SEQ ID NO: 8113 - RNA, 19 nt, Homo sapiens
uacuggcucgggaauuuuc

SEQ ID NO: 8114 - RNA, 21 nt, Homo sapiens
uuuggcuucucugcugcagcc

SEQ ID NO: 8115 - RNA, 22 nt, Homo sapiens
cuaggcuguagagaaguucagu

SEQ ID NO: 8116 - RNA, 21 nt, Homo sapiens
uagagagcaauaccuccagag

SEQ ID NO: 8117 - RNA, 22 nt, Homo sapiens
augagauacuacaaaugaguuu

SEQ ID NO: 8118 - RNA, 22 nt, Homo sapiens
ucccauguagcuaggauuacag

SEQ ID NO: 8119 - RNA, 22 nt, Homo sapiens
caaauacuuucauguugucuug

SEQ ID NO: 8120 - RNA, 22 nt, Homo sapiens
uucaagucaaggaaagaggucu

SEQ ID NO: 8121 - RNA, 22 nt, Homo sapiens
agaggucuuaucaaacaugcuu

SEQ ID NO: 8122 - RNA, 22 nt, Homo sapiens
uuggagagugauauucagaugc

SEQ ID NO: 8123 - RNA, 22 nt, Homo sapiens
ugaaagcuacagucuccuagga

SEQ ID NO: 8124 - RNA, 22 nt, Homo sapiens
aggugguuuugaugagcaggua

SEQ ID NO: 8125 - RNA, 23 nt, Homo sapiens
uggaggacaagcauggauaguga

SEQ ID NO: 8126 - RNA, 22 nt, Homo sapiens
uacacagucaaaaauuuccagg

SEQ ID NO: 8127 - RNA, 22 nt, Homo sapiens
uacucaauugcagucaccuggc

SEQ ID NO: 8128 - RNA, 22 nt, Homo sapiens
uaugcacaugcaugcuugaaua

SEQ ID NO: 8129 - RNA, 22 nt, Homo sapiens
uuaaagugaucauaaggauagu

SEQ ID NO: 8130 - RNA, 22 nt, Homo sapiens
ggaaagauguaauauuaucuaa

SEQ ID NO: 8131 - RNA, 22 nt, Homo sapiens
uuaaaugcucacauaaagguag

SEQ ID NO: 8132 - RNA, 22 nt, Homo sapiens
cuagcuuuugauguaaagugag

SEQ ID NO: 8133 - RNA, 22 nt, Homo sapiens
aagucaguuugggagaagcuau

SEQ ID NO: 8134 - RNA, 22 nt, Homo sapiens
gaggcuagauggggaugugucc

SEQ ID NO: 8135 - RNA, 22 nt, Homo sapiens
augugaaugugaucggauaguc

SEQ ID NO: 8136 - RNA, 22 nt, Homo sapiens
gaauuguacugcaaucagggga

SEQ ID NO: 8137 - RNA, 22 nt, Homo sapiens
aaaugcuucuauguggcauguu

SEQ ID NO: 8138 - RNA, 22 nt, Homo sapiens
ucaaaugcucuuugcagagagg

SEQ ID NO: 8139 - RNA, 19 nt, Homo sapiens
augagucugcaagaaccag

SEQ ID NO: 8140 - RNA, 22 nt, Homo sapiens
agagauuauccuggcuucucug

SEQ ID NO: 8141 - RNA, 22 nt, Homo sapiens
ucucaguguuaucuaucugccu

SEQ ID NO: 8142 - RNA, 22 nt, Homo sapiens
uuaaggaaagcauuuaauucag

SEQ ID NO: 8143 - RNA, 22 nt, Homo sapiens
auagcaaugcaagaauggcuua

SEQ ID NO: 8144 - RNA, 22 nt, Homo sapiens
gcaccacugcacucucagcuug

SEQ ID NO: 8145 - RNA, 22 nt, Homo sapiens
aaucugggguuguuuggggagu

SEQ ID NO: 8146 - RNA, 22 nt, Homo sapiens
aaggaauucaaauuuucucugg

SEQ ID NO: 8147 - RNA, 22 nt, Homo sapiens
cagugcauaggaucuaaaauuu

SEQ ID NO: 8148 - RNA, 23 nt, Homo sapiens
uaucucaaugcacagagaggaaa

SEQ ID NO: 8149 - RNA, 22 nt, Homo sapiens
guucacagugguugccuuccag

SEQ ID NO: 8150 - RNA, 17 nt, Homo sapiens
ucccauguuucuucuac

SEQ ID NO: 8151 - RNA, 22 nt, Homo sapiens
uagcaucagauuccauauucua

SEQ ID NO: 8152 - RNA, 22 nt, Homo sapiens
gauaucuuuuguauggugagcu

SEQ ID NO: 8153 - RNA, 22 nt, Homo sapiens
uuuaaagcaugacgagaagaag

SEQ ID NO: 8154 - RNA, 22 nt, Homo sapiens
aaugcacauauauuuccuuauu

SEQ ID NO: 8155 - RNA, 22 nt, Homo sapiens
aauuacauggcaauugggaaau

SEQ ID NO: 8156 - RNA, 22 nt, Homo sapiens
ugucuuguagacaauguauagu

SEQ ID NO: 8157 - RNA, 22 nt, Homo sapiens
uugaaagcuaucucaaaucgcu

SEQ ID NO: 8158 - RNA, 22 nt, Homo sapiens
uagcugagacuacaguaggugc

SEQ ID NO: 8159 - RNA, 21 nt, Homo sapiens
uggcaacauggauggauucug

SEQ ID NO: 8160 - RNA, 22 nt, Homo sapiens
uaugcacaugugccugggugug

SEQ ID NO: 8161 - RNA, 22 nt, Homo sapiens
gugcacaaugugcagguuuguu

SEQ ID NO: 8162 - RNA, 22 nt, Homo sapiens
gugcacaacgugcaggcuuguu

SEQ ID NO: 8163 - RNA, 22 nt, Homo sapiens
caacagucagcccauccacaga

SEQ ID NO: 8164 - RNA, 22 nt, Homo sapiens
uggcagauaggauacaggacua

SEQ ID NO: 8165 - RNA, 22 nt, Homo sapiens
ugagcacauuuacaucaguucc

SEQ ID NO: 8166 - RNA, 22 nt, Homo sapiens
ggagucugauuuuuauguugcu

SEQ ID NO: 8167 - RNA, 22 nt, Homo sapiens
agaaugucaguauuggcuaaaa

SEQ ID NO: 8168 - RNA, 22 nt, Homo sapiens
ugaaggacauucuaugguagau

SEQ ID NO: 8169 - RNA, 22 nt, Homo sapiens
augccuagagucaguggaggug

SEQ ID NO: 8170 - RNA, 23 nt, Homo sapiens
cccaguuaauccuuaaucuccac

SEQ ID NO: 8171 - RNA, 22 nt, Homo sapiens
cuugaucaaugugguacuugau

SEQ ID NO: 8172 - RNA, 22 nt, Homo sapiens
aucauggaguauuugcaagucu

SEQ ID NO: 8173 - RNA, 22 nt, Homo sapiens
gugcacaacgugcagguuuguu

SEQ ID NO: 8174 - RNA, 22 nt, Homo sapiens
agugcauuuguucugugucagg

SEQ ID NO: 8175 - RNA, 22 nt, Homo sapiens
ugaaguaauguuuuauucuauu

SEQ ID NO: 8176 - RNA, 22 nt, Homo sapiens
ugugcaugacagcauacaaacg

SEQ ID NO: 8177 - RNA, 22 nt, Homo sapiens
ugaagcuaacuugauugugaug

SEQ ID NO: 8178 - RNA, 22 nt, Homo sapiens
uagagcacauuaucauuuccaa

SEQ ID NO: 8179 - RNA, 18 nt, Homo sapiens
uagaauauaggucauucu

SEQ ID NO: 8180 - RNA, 22 nt, Homo sapiens
auggucccauucauucacguau

SEQ ID NO: 8181 - RNA, 22 nt, Homo sapiens
acaucuguacaguggguguggu

SEQ ID NO: 8182 - RNA, 22 nt, Homo sapiens
cuagcagacaugggcugaacca

SEQ ID NO: 8183 - RNA, 22 nt, Homo sapiens
caaaagugauugcgguuuuugc

SEQ ID NO: 8184 - RNA, 22 nt, Homo sapiens
cacccuaucagauguccagaga

SEQ ID NO: 8185 - RNA, 22 nt, Homo sapiens
uaacuaaagagaagucaauguc

SEQ ID NO: 8186 - RNA, 22 nt, Homo sapiens
ggaaagacaccuuacuauguua

SEQ ID NO: 8187 - RNA, 22 nt, Homo sapiens
uauauguuuucauaaggcuaga

SEQ ID NO: 8188 - RNA, 22 nt, Homo sapiens
augaaagguauguuuucuguga

SEQ ID NO: 8189 - RNA, 22 nt, Homo sapiens
ggcaaugaggcggaccagcagg

SEQ ID NO: 8190 - RNA, 22 nt, Homo sapiens
ucaaaugcacguagagaaaaua

SEQ ID NO: 8191 - RNA, 22 nt, Homo sapiens
gagaaugcaugaaagacuuaca

SEQ ID NO: 8192 - RNA, 22 nt, Homo sapiens
uauaacaaugcaagaauggccu

SEQ ID NO: 8193 - RNA, 22 nt, Homo sapiens
gauggaguaauguaaucuugag

SEQ ID NO: 8194 - RNA, 22 nt, Homo sapiens
uauggcaaugcauaggaaggaa

SEQ ID NO: 8195 - RNA, 20 nt, Homo sapiens
uauaacaguuuggacccagu

SEQ ID NO: 8196 - RNA, 18 nt, Homo sapiens
gucucacaugguggaagc

SEQ ID NO: 8197 - RNA, 22 nt, Homo sapiens
uggaguguagaagccagccucc

SEQ ID NO: 8198 - RNA, 19 nt, Homo sapiens
auacacguguauacauaca

SEQ ID NO: 8199 - RNA, 22 nt, Homo sapiens
aucuuuaguggcuguuuucaga

SEQ ID NO: 8200 - RNA, 22 nt, Homo sapiens
guuugccuuuuagauaggaaug

SEQ ID NO: 8201 - RNA, 22 nt, Homo sapiens
uuucugggggugcugauggaaa

SEQ ID NO: 8202 - RNA, 22 nt, Homo sapiens
uagaauguaaauuccaagggca

SEQ ID NO: 8203 - RNA, 22 nt, Homo sapiens
augauggagguagauuguccau

SEQ ID NO: 8204 - RNA, 22 nt, Homo sapiens
uaaagcuaucacauuggugauu

SEQ ID NO: 8205 - RNA, 22 nt, Homo sapiens
ucagauacuggugacaugaaug

SEQ ID NO: 8206 - RNA, 22 nt, Homo sapiens
aaaugcaccacucuggugcagg

SEQ ID NO: 8207 - RNA, 22 nt, Homo sapiens
uggagaacauucauuugcaaga

SEQ ID NO: 8208 - RNA, 22 nt, Homo sapiens
gacacugucuucugcucuuaaa

SEQ ID NO: 8209 - RNA, 22 nt, Homo sapiens
ucuuuggauggaaauuggaguc

SEQ ID NO: 8210 - RNA, 22 nt, Homo sapiens
uuggacuggaacuauaccauug

SEQ ID NO: 8211 - RNA, 22 nt, Homo sapiens
caagugaauaguugcucucaga

SEQ ID NO: 8212 - RNA, 22 nt, Homo sapiens
uuggagagucacuaguuagugc

SEQ ID NO: 8213 - RNA, 22 nt, Homo sapiens
aaaguggugugaguauguaucu

SEQ ID NO: 8214 - RNA, 22 nt, Homo sapiens
uugaaggaggugcucacucucg

SEQ ID NO: 8215 - RNA, 22 nt, Homo sapiens
ugcugcaaacaggcaucugugg

SEQ ID NO: 8216 - RNA, 22 nt, Homo sapiens
ugaaauguuaaacaaguggcuc

SEQ ID NO: 8217 - RNA, 21 nt, Homo sapiens
cuaaggaaagcuaugaacccu

SEQ ID NO: 8218 - RNA, 22 nt, Homo sapiens
aauggcaaauguuuucuguuga

SEQ ID NO: 8219 - RNA, 22 nt, Homo sapiens
uguggaguguaugugacagaga

SEQ ID NO: 8220 - RNA, 22 nt, Homo sapiens
ccauugaacaugaaggaaugug

SEQ ID NO: 8221 - RNA, 22 nt, Homo sapiens
gaaugaauguuuauccuuagau

SEQ ID NO: 8222 - RNA, 18 nt, Homo sapiens
ucacugugugucuugggu

SEQ ID NO: 8223 - RNA, 21 nt, Haemophilus influenzae Rd
uuuccagugcuuuauauuaag

SEQ ID NO: 8224 - RNA, 21 nt, Haemophilus influenzae Rd
uucuuucguuuguccaggcaa

SEQ ID NO: 8225 - RNA, 22 nt, Haemophilus influenzae Rd
uugacaauggguuuugaugaug

SEQ ID NO: 8226 - RNA, 22 nt, Haemophilus influenzae Rd
uuaaugcacgaccacgguuugu

SEQ ID NO: 8227 - RNA, 18 nt, Haemophilus influenzae Rd
uuagaacuuuaucaugcu

SEQ ID NO: 8228 - RNA, 22 nt, Haemophilus influenzae Rd
uuauaaauaucaguauagcaac

SEQ ID NO: 8229 - RNA, 22 nt, Haemophilus influenzae Rd
uuaauaaagguggugcgaccgu

SEQ ID NO: 8230 - RNA, 22 nt, Haemophilus influenzae Rd
ucuuccuuaaaacaacagcuuu

SEQ ID NO: 8231 - RNA, 22 nt, Haemophilus influenzae Rd
cggaagcguuagcagcagcaaa

SEQ ID NO: 8232 - RNA, 22 nt, Haemophilus influenzae Rd
caucuuguuuuuaugccugaaa

SEQ ID NO: 8233 - RNA, 22 nt, Haemophilus influenzae Rd
ccccuuccgcccuucgggcacc

SEQ ID NO: 8234 - RNA, 22 nt, Haemophilus influenzae Rd
auuacuuauaugaucauagccu

SEQ ID NO: 8235 - RNA, 22 nt, Haemophilus influenzae Rd
auuuaaaauggcaucggcuugu

SEQ ID NO: 8236 - RNA, 22 nt, Haemophilus influenzae Rd
auguauuccguucaagaacaaa

SEQ ID NO: 8237 - RNA, 22 nt, Haemophilus influenzae Rd
auguggaaaaugugagcaagcu

SEQ ID NO: 8238 - RNA, 22 nt, Haemophilus influenzae Rd
cacuagaacaguuuuagaaugc

SEQ ID NO: 8239 - RNA, 19 nt, Haemophilus influenzae Rd
auuuucuaccaacauugca

SEQ ID NO: 8240 - RNA, 23 nt, Haemophilus influenzae Rd
auauuguggcucaauuggcuugg

SEQ ID NO: 8241 - RNA, 22 nt, Haemophilus influenzae Rd
auacaauauuggcuaugaugca

SEQ ID NO: 8242 - RNA, 22 nt, Haemophilus influenzae Rd
auaggauggguuucugcccacc

SEQ ID NO: 8243 - RNA, 20 nt, Haemophilus influenzae Rd
agauuguuguggcaaauuuc

SEQ ID NO: 8244 - RNA, 22 nt, Haemophilus influenzae Rd
agcaacuuuuacuuuaaugagu

SEQ ID NO: 8245 - RNA, 18 nt, Haemophilus influenzae Rd
acuuuuaacacuuaguca

SEQ ID NO: 8246 - RNA, 22 nt, Haemophilus influenzae Rd
accauuuacuaauaagcgauug

SEQ ID NO: 8247 - RNA, 22 nt, Haemophilus influenzae Rd
acgagcgugguaucaacguuug

SEQ ID NO: 8248 - RNA, 22 nt, Haemophilus influenzae Rd
agcagcugauuguauuggaaga

SEQ ID NO: 8249 - RNA, 22 nt, Haemophilus influenzae Rd
aaaaaaagaggcgugauuauag

SEQ ID NO: 8250 - RNA, 22 nt, Haemophilus influenzae Rd
aacaaugccacugccauaacga

SEQ ID NO: 8251 - RNA, 22 nt, Haemophilus influenzae Rd
aacuaggauuagcaagcauauu

SEQ ID NO: 8252 - RNA, 22 nt, Haemophilus influenzae Rd
aauuaaaacaucagguuuauua

SEQ ID NO: 8253 - RNA, 22 nt, Haemophilus influenzae Rd
aauaaauugaagcaauugguug

SEQ ID NO: 8254 - RNA, 22 nt, Haemophilus influenzae Rd
aaauauugugacaaaugauauu

SEQ ID NO: 8255 - RNA, 22 nt, Haemophilus influenzae Rd
aaacaucacaucagaaagauca

SEQ ID NO: 8256 - RNA, 22 nt, Haemophilus influenzae Rd
aauuuauccucugauguagggc

SEQ ID NO: 8257 - RNA, 22 nt, Haemophilus influenzae Rd
aauaacaugguacgagaugcgu

SEQ ID NO: 8258 - RNA, 22 nt, Haemophilus influenzae Rd
ucgcuagaaugaggcguuuaau

SEQ ID NO: 8259 - RNA, 22 nt, Haemophilus influenzae Rd
ucccaauuuagcugccgugauu

SEQ ID NO: 8260 - RNA, 22 nt, Haemophilus influenzae Rd
uauuuuaacggugaugacaauc

SEQ ID NO: 8261 - RNA, 22 nt, Haemophilus influenzae Rd
uaaugauuuacaaagcauacau

SEQ ID NO: 8262 - RNA, 22 nt, Haemophilus influenzae Rd
uaauuauuggcaucguuuuagg

SEQ ID NO: 8263 - RNA, 22 nt, Haemophilus influenzae Rd
guugggaacccuggauguggug

SEQ ID NO: 8264 - RNA, 22 nt, Haemophilus influenzae Rd
guauuucaucacgucuuacuuu

SEQ ID NO: 8265 - RNA, 22 nt, Haemophilus influenzae Rd
ccccuucaaauauaacgacguu

SEQ ID NO: 8266 - RNA, 22 nt, Haemophilus influenzae Rd
gcauaacagaacccaguuaaac

SEQ ID NO: 8267 - RNA, 22 nt, Haemophilus influenzae Rd
gaaaaugugcggugcaaaacau

SEQ ID NO: 8268 - RNA, 22 nt, Haemophilus influenzae Rd
ucaucuuuuacgaagugcaucg

SEQ ID NO: 8269 - RNA, 22 nt, Haemophilus influenzae Rd
uaugaacucgcgaacgaagaga

SEQ ID NO: 8270 - RNA, 22 nt, Haemophilus influenzae Rd
uauuguuaaagugaaaaauggu

SEQ ID NO: 8271 - RNA, 22 nt, Haemophilus influenzae Rd
uaauauaacggacguagaugac

SEQ ID NO: 8272 - RNA, 22 nt, Haemophilus influenzae Rd
uacaaaauuaccgcacuuuagg

SEQ ID NO: 8273 - RNA, 22 nt, Haemophilus influenzae Rd
ugcgguaaaaaauucgaggguu

SEQ ID NO: 8274 - RNA, 19 nt, Haemophilus influenzae Rd
ugccggcguggcgauugca

SEQ ID NO: 8275 - RNA, 22 nt, Haemophilus influenzae Rd
caaaugaucggcuucuuuuucu

SEQ ID NO: 8276 - RNA, 22 nt, Haemophilus influenzae Rd
auuaaugaauuacgauuucacc

SEQ ID NO: 8277 - RNA, 22 nt, Haemophilus influenzae Rd
auguuggaucgggcgcaauaag

SEQ ID NO: 8278 - RNA, 22 nt, Haemophilus influenzae Rd
aucaacuugcuaaagauuuagu

SEQ ID NO: 8279 - RNA, 22 nt, Haemophilus influenzae Rd
auauuucacaaugucagaagau

SEQ ID NO: 8280 - RNA, 22 nt, Haemophilus influenzae Rd
auauucuuauugcaacuuaugc

SEQ ID NO: 8281 - RNA, 22 nt, Haemophilus influenzae Rd
uugcggaaaacagucguuuauu

SEQ ID NO: 8282 - RNA, 22 nt, Haemophilus influenzae Rd
uaaauauuacguaacugaaaug

SEQ ID NO: 8283 - RNA, 22 nt, Haemophilus influenzae Rd
gugggaugcucguuuaacugca

SEQ ID NO: 8284 - RNA, 21 nt, Haemophilus influenzae Rd
gcaaaugugauuugccccuac

SEQ ID NO: 8285 - RNA, 22 nt, Homo sapiens
cuggaggccugaacauaaaugg

SEQ ID NO: 8286 - RNA, 22 nt, Homo sapiens
uuaaaugcuagaauuuucuuug

SEQ ID NO: 8287 - RNA, 20 nt, Homo sapiens
uauucacucuccagucuugc

SEQ ID NO: 8288 - RNA, 22 nt, Homo sapiens
gagcuagguuuugaauccagac

SEQ ID NO: 8289 - RNA, 22 nt, Homo sapiens
uggaaguauagauaauugaaag

SEQ ID NO: 8290 - RNA, 22 nt, Homo sapiens
ucacuagaucaagggagagaaa

SEQ ID NO: 8291 - RNA, 22 nt, Homo sapiens
auaagugagugauucaguguua

SEQ ID NO: 8292 - RNA, 22 nt, Homo sapiens
uagccucacaaagugcuuaaga

SEQ ID NO: 8293 - RNA, 22 nt, Homo sapiens
uucagggacuuuagacaagaga

SEQ ID NO: 8294 - RNA, 22 nt, Homo sapiens
cugggaugugacuguugccccc

SEQ ID NO: 8295 - RNA, 23 nt, Homo sapiens
ucaugaggccauucaaauccauu

SEQ ID NO: 8296 - RNA, 22 nt, Homo sapiens
ugacuaggaggcuggaggauga

SEQ ID NO: 8297 - RNA, 17 nt, Homo sapiens
guuuggguacuggguaa

SEQ ID NO: 8298 - RNA, 22 nt, Homo sapiens
agcgccacugcacuccagccug

SEQ ID NO: 8299 - RNA, 22 nt, Homo sapiens
aagcuggauuucgcauccuguu

SEQ ID NO: 8300 - RNA, 22 nt, Homo sapiens
augacuagaggagggauggcca

SEQ ID NO: 8301 - RNA, 23 nt, Homo sapiens
ugugcacauuuacauauauacac

SEQ ID NO: 8302 - RNA, 22 nt, Homo sapiens
uaugcacacacguguuuaugug

SEQ ID NO: 8303 - RNA, 22 nt, Homo sapiens
acugaucaauguuaaggcuuau

SEQ ID NO: 8304 - RNA, 22 nt, Homo sapiens
agugacaugggaucaaaucuga

SEQ ID NO: 8305 - RNA, 22 nt, Homo sapiens
ugugguuuuaguaaaacuaugu

SEQ ID NO: 8306 - RNA, 22 nt, Homo sapiens
ugaauagacacuaaagacugua

SEQ ID NO: 8307 - RNA, 22 nt, Homo sapiens
gaacuguuucuggugaaagagu

SEQ ID NO: 8308 - RNA, 22 nt, Homo sapiens
ugacuauaggauaacaugcauu

SEQ ID NO: 8309 - RNA, 19 nt, Homo sapiens
uuucaauguaaggauggag

SEQ ID NO: 8310 - RNA, 22 nt, Homo sapiens
ucacugaggucugagcuuuaug

SEQ ID NO: 8311 - RNA, 22 nt, Homo sapiens
uuagaacuagaggaguuugagu

SEQ ID NO: 8312 - RNA, 22 nt, Homo sapiens
ggacuagggacauggggagcug

SEQ ID NO: 8313 - RNA, 22 nt, Homo sapiens
uuaauguaucuaucacaucaca

SEQ ID NO: 8314 - RNA, 22 nt, Homo sapiens
aauacugaaaguauuuucaaau

SEQ ID NO: 8315 - RNA, 20 nt, Homo sapiens
uggaacuuaauugauggaca

SEQ ID NO: 8316 - RNA, 22 nt, Homo sapiens
augcacauggcuaacuuuuuuc

SEQ ID NO: 8317 - RNA, 23 nt, Homo sapiens
uggaaguauggaggaggcagaau

SEQ ID NO: 8318 - RNA, 22 nt, Homo sapiens
ugacuaggggcccuggcuucuu

SEQ ID NO: 8319 - RNA, 22 nt, Homo sapiens
gacuaggagagcagcugcccau

SEQ ID NO: 8320 - RNA, 22 nt, Homo sapiens
guggaagugucuggggccaggg

SEQ ID NO: 8321 - RNA, 22 nt, Homo sapiens
uuuaaugcgucucugaguuuug

SEQ ID NO: 8322 - RNA, 22 nt, Homo sapiens
uggaaguaaucaugagguagca

SEQ ID NO: 8323 - RNA, 22 nt, Homo sapiens
aagcuggauuuaguguggagca

SEQ ID NO: 8324 - RNA, 22 nt, Homo sapiens
uugugguuuuuaaaacuaggug

SEQ ID NO: 8325 - RNA, 22 nt, Homo sapiens
augacuauugcacuuuccuggu

SEQ ID NO: 8326 - RNA, 22 nt, Homo sapiens
cuuuaugagguuggauggaucu

SEQ ID NO: 8327 - RNA, 22 nt, Homo sapiens
uggagacugaucccucuuuccu

SEQ ID NO: 8328 - RNA, 22 nt, Homo sapiens
cuagaacuagaacugcuggggu

SEQ ID NO: 8329 - RNA, 22 nt, Homo sapiens
uagcuggaguuuuuguuauagg

SEQ ID NO: 8330 - RNA, 22 nt, Homo sapiens
gagguauagaacaccuuucaag

SEQ ID NO: 8331 - RNA, 22 nt, Homo sapiens
guuaagaaguguaacuuaaguu

SEQ ID NO: 8332 - RNA, 22 nt, Homo sapiens
ucacaggguguuauuagaauua

SEQ ID NO: 8333 - RNA, 22 nt, Homo sapiens
augaggcaggaaaggcguaucu

SEQ ID NO: 8334 - RNA, 22 nt, Homo sapiens
ugacuagggacauucuuccacg

SEQ ID NO: 8335 - RNA, 22 nt, Homo sapiens
gugcacaaucgugcauuccuug

SEQ ID NO: 8336 - RNA, 18 nt, Homo sapiens
ucacuagacacugaaucu

SEQ ID NO: 8337 - RNA, 22 nt, Homo sapiens
gacuaggagauauguuuucuuc

SEQ ID NO: 8338 - RNA, 22 nt, Homo sapiens
aucagaaucucuagugggacca

SEQ ID NO: 8339 - RNA, 22 nt, Homo sapiens
cuuuggcauuagccuguauaga

SEQ ID NO: 8340 - RNA, 22 nt, Homo sapiens
uuggauuuuaacaaacuaggug

SEQ ID NO: 8341 - RNA, 22 nt, Homo sapiens
gaagcauugauccacaggcgug

SEQ ID NO: 8342 - RNA, 22 nt, Homo sapiens
uugggacuggaaggaguaaggg

SEQ ID NO: 8343 - RNA, 22 nt, Homo sapiens
ggcagcucaggccccgcgcuga

SEQ ID NO: 8344 - RNA, 22 nt, Homo sapiens
auacuguuuuacaucauugccu

SEQ ID NO: 8345 - RNA, 22 nt, Homo sapiens
guggcgagaucauagcucauug

SEQ ID NO: 8346 - RNA, 22 nt, Homo sapiens
gaaugauacuguuaacgaaaga

SEQ ID NO: 8347 - RNA, 22 nt, Homo sapiens
uggaaguaaccaugaauggaau

SEQ ID NO: 8348 - RNA, 22 nt, Homo sapiens
uaugcacaugcaugcuugaaua

SEQ ID NO: 8349 - RNA, 22 nt, Homo sapiens
gaagcgaggugauuagcagaca

SEQ ID NO: 8350 - RNA, 22 nt, Homo sapiens
uauggauuuuuuugacaagagc

SEQ ID NO: 8351 - RNA, 22 nt, Homo sapiens
aaaugcacaaagauuuugcacu

SEQ ID NO: 8352 - RNA, 22 nt, Homo sapiens
gugcacaacaugcaguuuuguu

SEQ ID NO: 8353 - RNA, 22 nt, Homo sapiens
auggaggccuacagaauuuugg

SEQ ID NO: 8354 - RNA, 23 nt, Homo sapiens
ggauggaaaguuuugagggccac

SEQ ID NO: 8355 - RNA, 22 nt, Homo sapiens
uggagugauaugguuauauggg

SEQ ID NO: 8356 - RNA, 22 nt, Homo sapiens
acuauacuguaacuguauucag

SEQ ID NO: 8357 - RNA, 22 nt, Homo sapiens
augagucacuuauuauuggggu

SEQ ID NO: 8358 - RNA, 22 nt, Homo sapiens
cacuuugguucaccugaguuuc

SEQ ID NO: 8359 - RNA, 20 nt, Homo sapiens
aucagagacuaggauugcca

SEQ ID NO: 8360 - RNA, 22 nt, Homo sapiens
uuuccagguggccaacauuuua

SEQ ID NO: 8361 - RNA, 22 nt, Homo sapiens
auugcacaucugcacuacagcc

SEQ ID NO: 8362 - RNA, 22 nt, Homo sapiens
uuuggcuuuuguaauaacugcc

SEQ ID NO: 8363 - RNA, 22 nt, Homo sapiens
agagaacugauuggaugugggc

SEQ ID NO: 8364 - RNA, 22 nt, Homo sapiens
acccuggauucguggccuugaa

SEQ ID NO: 8365 - RNA, 22 nt, Homo sapiens
uuccacaaugguugaacuagcu

SEQ ID NO: 8366 - RNA, 22 nt, Homo sapiens
gugcacaaaucuuaaauguaca

SEQ ID NO: 8367 - RNA, 22 nt, Homo sapiens
uuccacaaugguugaacuaguu

SEQ ID NO: 8368 - RNA, 22 nt, Homo sapiens
aauacugagaugugagguacua

SEQ ID NO: 8369 - RNA, 17 nt, Homo sapiens
ugauaagugugagguga

SEQ ID NO: 8370 - RNA, 22 nt, Homo sapiens
uggaagugaacaaccaaggcag

SEQ ID NO: 8371 - RNA, 19 nt, Homo sapiens
ggcaauacuuucuuguugg

SEQ ID NO: 8372 - RNA, 22 nt, Homo sapiens
gugauagaucugggauucagaa

SEQ ID NO: 8373 - RNA, 22 nt, Homo sapiens
gcuaggagaucugcugcucucu

SEQ ID NO: 8374 - RNA, 22 nt, Homo sapiens
cuguaauguaaugagacuacau

SEQ ID NO: 8375 - RNA, 18 nt, Homo sapiens
ucccucagaauuauagaa

SEQ ID NO: 8376 - RNA, 22 nt, Homo sapiens
uguaaugaucaaaucagaguaa

SEQ ID NO: 8377 - RNA, 22 nt, Homo sapiens
uucacacugggccuacucugug

SEQ ID NO: 8378 - RNA, 22 nt, Homo sapiens
aaugcacauauauuuccuuauu

SEQ ID NO: 8379 - RNA, 22 nt, Homo sapiens
aucugcacaucuguguuuuugu

SEQ ID NO: 8380 - RNA, 22 nt, Homo sapiens
auaugcacuauacacacguaua

SEQ ID NO: 8381 - RNA, 22 nt, Homo sapiens
uggaaguagauagauuguguca

SEQ ID NO: 8382 - RNA, 22 nt, Homo sapiens
uacauacuucacagacuuuaaa

SEQ ID NO: 8383 - RNA, 21 nt, Homo sapiens
augugcacuaugucauuuaau

SEQ ID NO: 8384 - RNA, 19 nt, Homo sapiens
acagcugguuuugguuucu

SEQ ID NO: 8385 - RNA, 22 nt, Homo sapiens
accucagcccggggaaguugag

SEQ ID NO: 8386 - RNA, 22 nt, Homo sapiens
aucauacuguuuugauuacugu

SEQ ID NO: 8387 - RNA, 22 nt, Homo sapiens
uugguccucccaugcucaagag

SEQ ID NO: 8388 - RNA, 22 nt, Homo sapiens
uagcuggaauuacuugcaccug

SEQ ID NO: 8389 - RNA, 22 nt, Homo sapiens
ugagguuauuuguucaagaagu

SEQ ID NO: 8390 - RNA, 22 nt, Homo sapiens
aucagaaucucuagaggacugu

SEQ ID NO: 8391 - RNA, 22 nt, Homo sapiens
ucgcugcgaccuccaccucccg

SEQ ID NO: 8392 - RNA, 22 nt, Homo sapiens
augcagaucacauuuuucuguc

SEQ ID NO: 8393 - RNA, 22 nt, Homo sapiens
guccuggagaagcguggaccgg

SEQ ID NO: 8394 - RNA, 22 nt, Homo sapiens
uuggucucaucaagagcagcuu

SEQ ID NO: 8395 - RNA, 22 nt, Homo sapiens
auaugcauacauguaugcagga

SEQ ID NO: 8396 - RNA, 22 nt, Homo sapiens
gcgugguguuagaaugagaagu

SEQ ID NO: 8397 - RNA, 19 nt, Homo sapiens
ugcauugucugggaaaugg

SEQ ID NO: 8398 - RNA, 22 nt, Homo sapiens
aucacuagaucauagguaaaca

SEQ ID NO: 8399 - RNA, 22 nt, Homo sapiens
aagcuggagugcaguggugcaa

SEQ ID NO: 8400 - RNA, 22 nt, Homo sapiens
cuuuggccauagcuaaaugauu

SEQ ID NO: 8401 - RNA, 22 nt, Homo sapiens
ugauauauugaaugaugaaaca

SEQ ID NO: 8402 - RNA, 22 nt, Homo sapiens
gaggaguagggcacaaagccuu

SEQ ID NO: 8403 - RNA, 20 nt, Homo sapiens
cugcacauccacucuacuuc

SEQ ID NO: 8404 - RNA, 22 nt, Homo sapiens
ugaggauaguguugaaggcagg

SEQ ID NO: 8405 - RNA, 22 nt, Homo sapiens
ggacuaggagcuaggaagaucu

SEQ ID NO: 8406 - RNA, 22 nt, Homo sapiens
gggaagugugcagaguucucuu

SEQ ID NO: 8407 - RNA, 22 nt, Homo sapiens
ugacuaggaaauuagaacuuuu

SEQ ID NO: 8408 - RNA, 22 nt, Homo sapiens
uggcucuuucuagacuuaauua

SEQ ID NO: 8409 - RNA, 19 nt, Homo sapiens
uccccgggucuagugcagc

SEQ ID NO: 8410 - RNA, 22 nt, Homo sapiens
gcuaggagauccacugcucucu

SEQ ID NO: 8411 - RNA, 22 nt, Homo sapiens
ggccggguggccauggcugccc

SEQ ID NO: 8412 - RNA, 22 nt, Homo sapiens
ucacucagaccuggugauaugc

SEQ ID NO: 8413 - RNA, 22 nt, Homo sapiens
acacuuucuggagcugcacaua

SEQ ID NO: 8414 - RNA, 17 nt, Homo sapiens
ucuaauaauaugcauuu

SEQ ID NO: 8415 - RNA, 17 nt, Homo sapiens
uuuaaugcuaggacucu

SEQ ID NO: 8416 - RNA, 22 nt, Homo sapiens
uugacaaggagccauugcaucu

SEQ ID NO: 8417 - RNA, 22 nt, Homo sapiens
augacauugaaaagcaagugga

SEQ ID NO: 8418 - RNA, 22 nt, Homo sapiens
auaaagccaugagcuugagaug

SEQ ID NO: 8419 - RNA, 22 nt, Homo sapiens
cucacuaggaaguaaaguuugu

SEQ ID NO: 8420 - RNA, 22 nt, Homo sapiens
cacugcaguaaauugcgucggu

SEQ ID NO: 8421 - RNA, 22 nt, Homo sapiens
uuccacaaugguugaacuaauu

SEQ ID NO: 8422 - RNA, 22 nt, Homo sapiens
gagcuggacuucuuaccuuuuc

SEQ ID NO: 8423 - RNA, 23 nt, Homo sapiens
uccccgggagcaccagcuuguug

SEQ ID NO: 8424 - RNA, 22 nt, Homo sapiens
gacuagaaauuauuuagugagc

SEQ ID NO: 8425 - RNA, 22 nt, Homo sapiens
cagccgggugagguggcuuguu

SEQ ID NO: 8426 - RNA, 20 nt, Homo sapiens
uggcucuuugcugcuaaagu

SEQ ID NO: 8427 - RNA, 22 nt, Homo sapiens
uggcuccguuguacaggcugga

SEQ ID NO: 8428 - RNA, 22 nt, Homo sapiens
aggaaguaauaaguuugguucu

SEQ ID NO: 8429 - RNA, 22 nt, Homo sapiens
gccccgggugaugcagccguca

SEQ ID NO: 8430 - RNA, 22 nt, Homo sapiens
uaaguauuaugugcugcauuuu

SEQ ID NO: 8431 - RNA, 20 nt, Homo sapiens
uggaaguaagaauauaggug

SEQ ID NO: 8432 - RNA, 22 nt, Homo sapiens
augcacuuggcaggaugauucc

SEQ ID NO: 8433 - RNA, 22 nt, Homo sapiens
aagcuggagugcaguggugcga

SEQ ID NO: 8434 - RNA, 22 nt, Homo sapiens
uuugguguauaaaaaugcuagu

SEQ ID NO: 8435 - RNA, 22 nt, Homo sapiens
auugauaguuuaauaggaauug

SEQ ID NO: 8436 - RNA, 22 nt, Homo sapiens
ggcagcuguguccuucguaagg

SEQ ID NO: 8437 - RNA, 22 nt, Homo sapiens
acuagguaguaaucugcagaga

SEQ ID NO: 8438 - RNA, 22 nt, Homo sapiens
aggcagcuguuauauacugagu

SEQ ID NO: 8439 - RNA, 22 nt, Homo sapiens
uuccacaauggcugaacuaguu

SEQ ID NO: 8440 - RNA, 21 nt, Homo sapiens
ugacuagggauaugugccacu

SEQ ID NO: 8441 - RNA, 23 nt, Homo sapiens
aggaaguaacuaucuuuucuguc

SEQ ID NO: 8442 - RNA, 22 nt, Homo sapiens
aaauugcacaaguggugauuug

SEQ ID NO: 8443 - RNA, 22 nt, Homo sapiens
uugauagaucagggauuugauu

SEQ ID NO: 8444 - RNA, 23 nt, Homo sapiens
ucgguccccuuggcugcccucgg

SEQ ID NO: 8445 - RNA, 22 nt, Homo sapiens
cauggcccugggcugggcgaac

SEQ ID NO: 8446 - RNA, 22 nt, Homo sapiens
augugcacaugcuuacauguga

SEQ ID NO: 8447 - RNA, 22 nt, Homo sapiens
uggaagugucugugcccagcuc

SEQ ID NO: 8448 - RNA, 22 nt, Homo sapiens
uugauagacaucugaguuguug

SEQ ID NO: 8449 - RNA, 22 nt, Homo sapiens
cucacuaguaaggcuguuuagu

SEQ ID NO: 8450 - RNA, 21 nt, Homo sapiens
ugcagccauucagcccuaugc

SEQ ID NO: 8451 - RNA, 22 nt, Homo sapiens
auacaguugccauuucuugugc

SEQ ID NO: 8452 - RNA, 22 nt, Homo sapiens
ccuucuuuuguaaggcugaaua

SEQ ID NO: 8453 - RNA, 22 nt, Homo sapiens
caaugcauuauucucccacuuc

SEQ ID NO: 8454 - RNA, 23 nt, Homo sapiens
ucacuagaguccuggaguuugag

SEQ ID NO: 8455 - RNA, 22 nt, Homo sapiens
uacuagaaccuuauucagagug

SEQ ID NO: 8456 - RNA, 20 nt, Homo sapiens
agacuagggagcagaaagcc

SEQ ID NO: 8457 - RNA, 22 nt, Homo sapiens
gcgguagcauagacugcaggac

SEQ ID NO: 8458 - RNA, 22 nt, Homo sapiens
ugggcggagacgugcagccgcc

SEQ ID NO: 8459 - RNA, 22 nt, Homo sapiens
ucagaacugauacuagaacuuu

SEQ ID NO: 8460 - RNA, 22 nt, Homo sapiens
ucacacgugaacucaucacaga

SEQ ID NO: 8461 - RNA, 22 nt, Homo sapiens
gugaacagaaccugggaucgaa

SEQ ID NO: 8462 - RNA, 22 nt, Homo sapiens
ugacuagggcucuaaacagcuc

SEQ ID NO: 8463 - RNA, 22 nt, Homo sapiens
aaacugaucugaaggccaggcu

SEQ ID NO: 8464 - RNA, 22 nt, Homo sapiens
uggcagcugcuucaugggaugc

SEQ ID NO: 8465 - RNA, 22 nt, Homo sapiens
uccccgagcccaggcugugacu

SEQ ID NO: 8466 - RNA, 22 nt, Homo sapiens
ugugguuuuuuucuccaauagg

SEQ ID NO: 8467 - RNA, 22 nt, Homo sapiens
uugauagacacauauccaugug

SEQ ID NO: 8468 - RNA, 22 nt, Homo sapiens
uugaaguagaaagacgaaauuu

SEQ ID NO: 8469 - RNA, 22 nt, Homo sapiens
uugugaaaucuaggcagagguu

SEQ ID NO: 8470 - RNA, 22 nt, Homo sapiens
aagugcuuuacacaugcaugau

SEQ ID NO: 8471 - RNA, 22 nt, Homo sapiens
aagaguuaguaaaauuuccucu

SEQ ID NO: 8472 - RNA, 22 nt, Homo sapiens
uugugaaugaugucgcaauaaa

SEQ ID NO: 8473 - RNA, 22 nt, Homo sapiens
gaugaggcuagagacaugugua

SEQ ID NO: 8474 - RNA, 22 nt, Homo sapiens
uguauguuguaagacuuagacc

SEQ ID NO: 8475 - RNA, 18 nt, Homo sapiens
uagaauauaggucauucu

SEQ ID NO: 8476 - RNA, 22 nt, Homo sapiens
caucagagugagauauaagauc

SEQ ID NO: 8477 - RNA, 22 nt, Homo sapiens
uuaugcagcaaagugcuugaaa

SEQ ID NO: 8478 - RNA, 19 nt, Homo sapiens
gacuccagaguugugugcu

SEQ ID NO: 8479 - RNA, 22 nt, Homo sapiens
ucacugaggucugagcuuuaug

SEQ ID NO: 8480 - RNA, 18 nt, Homo sapiens
ccauucaacagauuuguc

SEQ ID NO: 8481 - RNA, 22 nt, Homo sapiens
accucagcccggggaaguugag

SEQ ID NO: 8482 - RNA, 22 nt, Homo sapiens
agcauuaguugugaagccuuua

SEQ ID NO: 8483 - RNA, 22 nt, Homo sapiens
cauugcacuccagccugcacga

SEQ ID NO: 8484 - RNA, 22 nt, Homo sapiens
ugagauuaaucuuuaaguaaga

SEQ ID NO: 8485 - RNA, 22 nt, Homo sapiens
uuagucaaguguacugugaaug

SEQ ID NO: 8486 - RNA, 22 nt, Homo sapiens
ucacugagaaugauguuucuga

SEQ ID NO: 8487 - RNA, 19 nt, Homo sapiens
cauggcuuauaauuuuaau

SEQ ID NO: 8488 - RNA, 22 nt, Homo sapiens
aaaagucuguagugaaagguga

SEQ ID NO: 8489 - RNA, 22 nt, Homo sapiens
uuauugcacuccagccugggua

SEQ ID NO: 8490 - RNA, 22 nt, Homo sapiens
uuuugcaccauccuaauaguau

SEQ ID NO: 8491 - RNA, 22 nt, Homo sapiens
caauacuguguugaauaagagu

SEQ ID NO: 8492 - RNA, 22 nt, Homo sapiens
guacaugcaugcaugggugugc

SEQ ID NO: 8493 - RNA, 19 nt, Homo sapiens
cuaaguccccuugauuaga

SEQ ID NO: 8494 - RNA, 22 nt, Homo sapiens
gugcaaaucucugaguaucuuu

SEQ ID NO: 8495 - RNA, 22 nt, Homo sapiens
cuguaauguaaugagacuacau

SEQ ID NO: 8496 - RNA, 22 nt, Homo sapiens
aguauugcuaauaagagauuug

SEQ ID NO: 8497 - RNA, 22 nt, Homo sapiens
gguggugguauuucagaaaaug

SEQ ID NO: 8498 - RNA, 22 nt, Homo sapiens
ucaucagaguuuacaagcucag

SEQ ID NO: 8499 - RNA, 22 nt, Homo sapiens
uaucacagaggguauccuagag

SEQ ID NO: 8500 - RNA, 22 nt, Homo sapiens
auuacauagucaaggugucuca

SEQ ID NO: 8501 - RNA, 22 nt, Homo sapiens
ugcgccauugcauuccagccug

SEQ ID NO: 8502 - RNA, 22 nt, Homo sapiens
uacauacuucacagacuuuaaa

SEQ ID NO: 8503 - RNA, 22 nt, Homo sapiens
uggcaaaucagaggcauggaca

SEQ ID NO: 8504 - RNA, 22 nt, Homo sapiens
aagucaaggagagaagcuucag

SEQ ID NO: 8505 - RNA, 22 nt, Homo sapiens
uuaccuuuuuaagacagguuag

SEQ ID NO: 8506 - RNA, 22 nt, Homo sapiens
augagguaguagaaagucaggu

SEQ ID NO: 8507 - RNA, 22 nt, Homo sapiens
guggaaaacauaugcuuguuga

SEQ ID NO: 8508 - RNA, 22 nt, Homo sapiens
aaagugcugagucuaggcgggg

SEQ ID NO: 8509 - RNA, 22 nt, Homo sapiens
uugccuaggcuggagugcagug

SEQ ID NO: 8510 - RNA, 22 nt, Homo sapiens
cauugcacuccagccugaguga

SEQ ID NO: 8511 - RNA, 22 nt, Homo sapiens
aaagugcugggaucacacugaa

SEQ ID NO: 8512 - RNA, 20 nt, Homo sapiens
ugacaagugagaauuauggg

SEQ ID NO: 8513 - RNA, 22 nt, Homo sapiens
ugaaagcuacaggaaaguauuu

SEQ ID NO: 8514 - RNA, 22 nt, Homo sapiens
cuucaugucuucaauggggggg

SEQ ID NO: 8515 - RNA, 22 nt, Homo sapiens
aagggagcugcauaaucuugug

SEQ ID NO: 8516 - RNA, 22 nt, Homo sapiens
cccugagaugugaauuucagag

SEQ ID NO: 8517 - RNA, 22 nt, Homo sapiens
augcacauggcuaacuuuuuuc

SEQ ID NO: 8518 - RNA, 20 nt, Homo sapiens
cuuggcuuucuugguguuaa

SEQ ID NO: 8519 - RNA, 22 nt, Homo sapiens
aucaccuggaggugaucacuug

SEQ ID NO: 8520 - RNA, 22 nt, Homo sapiens
uaaaagucaucacaacuggagu

SEQ ID NO: 8521 - RNA, 22 nt, Homo sapiens
uugucaacaugaaacuguguuu

SEQ ID NO: 8522 - RNA, 22 nt, Homo sapiens
ucacugcgaccucugccucccg

SEQ ID NO: 8523 - RNA, 22 nt, Homo sapiens
guugcucaggccggagugcagu

SEQ ID NO: 8524 - RNA, 18 nt, Homo sapiens
ucacggggagcagcagcc

SEQ ID NO: 8525 - RNA, 22 nt, Homo sapiens
cccagagacagaaugauaaacu

SEQ ID NO: 8526 - RNA, 22 nt, Homo sapiens
ugagauuaucuugaucuugaaa

SEQ ID NO: 8527 - RNA, 22 nt, Homo sapiens
auugcacaaagagggaaacuga

SEQ ID NO: 8528 - RNA, 22 nt, Homo sapiens
cauugcacuccagccuggccaa

SEQ ID NO: 8529 - RNA, 22 nt, Homo sapiens
agaauguaaacagaauagagga

SEQ ID NO: 8530 - RNA, 22 nt, Homo sapiens
acugcacuccagccucggcaau

SEQ ID NO: 8531 - RNA, 22 nt, Homo sapiens
uauggcaaugcauaggaaggaa

SEQ ID NO: 8532 - RNA, 22 nt, Homo sapiens
uaggaaguuucuugauuacuua

SEQ ID NO: 8533 - RNA, 22 nt, Homo sapiens
uugcaucagcaggcauaauugg

SEQ ID NO: 8534 - RNA, 22 nt, Homo sapiens
uggagucuugaugauuuucaaa

SEQ ID NO: 8535 - RNA, 21 nt, Homo sapiens
ugcauauuggaacuuucucuc

SEQ ID NO: 8536 - RNA, 22 nt, Homo sapiens
guguauauccuauuaguucugu

SEQ ID NO: 8537 - RNA, 22 nt, Homo sapiens
uaauucacauaaagcacuuaga

SEQ ID NO: 8538 - RNA, 22 nt, Homo sapiens
gucagugugauaucugcagggg

SEQ ID NO: 8539 - RNA, 17 nt, Homo sapiens
uucucaguucugaucuc

SEQ ID NO: 8540 - RNA, 20 nt, Homo sapiens
uucaucaggauauuggucua

SEQ ID NO: 8541 - RNA, 22 nt, Homo sapiens
gaggugaaggucucaauaaaua

SEQ ID NO: 8542 - RNA, 19 nt, Homo sapiens
uuucaauguaaggauggag

SEQ ID NO: 8543 - RNA, 23 nt, Homo sapiens
uggguucauucuugaagucagug

SEQ ID NO: 8544 - RNA, 22 nt, Homo sapiens
uucauaguuuauacugauauuu

SEQ ID NO: 8545 - RNA, 22 nt, Homo sapiens
uggucaccuucuugcucugucu

SEQ ID NO: 8546 - RNA, 22 nt, Homo sapiens
cagcagguuuuuaucaguuaag

SEQ ID NO: 8547 - RNA, 22 nt, Homo sapiens
guaaauaccaguuucuggaaca

SEQ ID NO: 8548 - RNA, 20 nt, Homo sapiens
auucaaguaugccuugagaa

SEQ ID NO: 8549 - RNA, 22 nt, Homo sapiens
ugaugguuuuaaaaagaggagu

SEQ ID NO: 8550 - RNA, 22 nt, Homo sapiens
ugagacggagucuugcucuguc

SEQ ID NO: 8551 - RNA, 22 nt, Homo sapiens
guucaagugauucuacugccuc

SEQ ID NO: 8552 - RNA, 22 nt, Homo sapiens
ucaucagugcuugcaaauuauu

SEQ ID NO: 8553 - RNA, 22 nt, Homo sapiens
uguagcagccauaaacacagug

SEQ ID NO: 8554 - RNA, 22 nt, Homo sapiens
ggagaauguaauugguauuuug

SEQ ID NO: 8555 - RNA, 22 nt, Homo sapiens
cacugcacuccagucccgucuc

SEQ ID NO: 8556 - RNA, 19 nt, Homo sapiens
uggcacauguauacauaug

SEQ ID NO: 8557 - RNA, 22 nt, Homo sapiens
guauggguuuuguuucuucugg

SEQ ID NO: 8558 - RNA, 22 nt, Homo sapiens
uuggaagauuacuuaguuuucu

SEQ ID NO: 8559 - RNA, 22 nt, Homo sapiens
ucucuguuugucuguuacuggu

SEQ ID NO: 8560 - RNA, 19 nt, Homo sapiens
ugacacuguuggugggagg

SEQ ID NO: 8561 - RNA, 22 nt, Homo sapiens
caaagucuucucauuaugucuu

SEQ ID NO: 8562 - RNA, 22 nt, Homo sapiens
ugagacgaagucuugcucuguu

SEQ ID NO: 8563 - RNA, 22 nt, Homo sapiens
auggaagaaaguuggguucuug

SEQ ID NO: 8564 - RNA, 22 nt, Homo sapiens
aauggcaaauguuuucuguuga

SEQ ID NO: 8565 - RNA, 21 nt, Homo sapiens
uaucagagacauugagaggca

SEQ ID NO: 8566 - RNA, 22 nt, Homo sapiens
gaugugaaaucauaguuucuag

SEQ ID NO: 8567 - RNA, 22 nt, Homo sapiens
ugugccacuccagcucuagcuu

SEQ ID NO: 8568 - RNA, 22 nt, Homo sapiens
ucaagcaauucugcugccucag

SEQ ID NO: 8569 - RNA, 22 nt, Homo sapiens
ucuggagugugaaguggauaug

SEQ ID NO: 8570 - RNA, 22 nt, Homo sapiens
uugagcaauccuccugccaugu

SEQ ID NO: 8571 - RNA, 19 nt, Homo sapiens
uguugcacauaucaauaug

SEQ ID NO: 8572 - RNA, 22 nt, Homo sapiens
caacauccaccuccuggguuca

SEQ ID NO: 8573 - RNA, 22 nt, Homo sapiens
cuugcacuccacuguucuccug

SEQ ID NO: 8574 - RNA, 22 nt, Homo sapiens
gucaucaggacgggucaucugc

SEQ ID NO: 8575 - RNA, 22 nt, Homo sapiens
gcacauauguaaauagcugccu

SEQ ID NO: 8576 - RNA, 22 nt, Homo sapiens
acugagacugagaauguuucuu

SEQ ID NO: 8577 - RNA, 22 nt, Homo sapiens
acccaguagccagauguagcug

SEQ ID NO: 8578 - RNA, 22 nt, Homo sapiens
ugagauggagucuugucgccua

SEQ ID NO: 8579 - RNA, 23 nt, Homo sapiens
ggcaagaucucagcucacugcaa

SEQ ID NO: 8580 - RNA, 22 nt, Homo sapiens
auucccuuagcugccucagccu

SEQ ID NO: 8581 - RNA, 22 nt, Homo sapiens
uaagugcuguguuguuaccuaa

SEQ ID NO: 8582 - RNA, 22 nt, Homo sapiens
gcuggguucagagugggcugcg

SEQ ID NO: 8583 - RNA, 21 nt, Homo sapiens
uaacagcuccacuccauucuc

SEQ ID NO: 8584 - RNA, 22 nt, Homo sapiens
uucaucaguuauauuggccuga

SEQ ID NO: 8585 - RNA, 22 nt, Homo sapiens
auggcuauuccauaggcagagc

SEQ ID NO: 8586 - RNA, 22 nt, Homo sapiens
uucauguaauuccauaagguaa

SEQ ID NO: 8587 - RNA, 22 nt, Homo sapiens
uugauaguuuuaaaauuaaucu

SEQ ID NO: 8588 - RNA, 22 nt, Homo sapiens
auugcagcuugcagggugugua

SEQ ID NO: 8589 - RNA, 22 nt, Homo sapiens
gaaagauuuccugagcuagaaa

SEQ ID NO: 8590 - RNA, 22 nt, Homo sapiens
uuaacagucacuuagcucauuu

SEQ ID NO: 8591 - RNA, 22 nt, Homo sapiens
auugcaugucauguuuagugua

SEQ ID NO: 8592 - RNA, 20 nt, Homo sapiens
uucuauggugaugaguccug

SEQ ID NO: 8593 - RNA, 22 nt, Homo sapiens
uauugcacuuuuccauaggagu

SEQ ID NO: 8594 - RNA, 22 nt, Homo sapiens
uaucacaggucaggaaucuugc

SEQ ID NO: 8595 - RNA, 22 nt, Homo sapiens
uuggaagacauucugucugcua

SEQ ID NO: 8596 - RNA, 22 nt, Homo sapiens
ugaaguaauguuuuauucuauu

SEQ ID NO: 8597 - RNA, 22 nt, Homo sapiens
uugagccaaggauugucuuucc

SEQ ID NO: 8598 - RNA, 22 nt, Homo sapiens
uucauagucacauucgaugucu

SEQ ID NO: 8599 - RNA, 22 nt, Homo sapiens
uuagggaguaaucuaaaaaugg

SEQ ID NO: 8600 - RNA, 22 nt, Homo sapiens
aagggaauguuguggcugguuu

SEQ ID NO: 8601 - RNA, 22 nt, Homo sapiens
auaaaugccuguuguuuuaagc

SEQ ID NO: 8602 - RNA, 22 nt, Homo sapiens
cauugcaacuucugccucccag

SEQ ID NO: 8603 - RNA, 18 nt, Homo sapiens
guaaauguaucuauugcc

SEQ ID NO: 8604 - RNA, 22 nt, Homo sapiens
ugugaauguaagaaaauccaac

SEQ ID NO: 8605 - RNA, 22 nt, Homo sapiens
agucacagccuuuuacuuuaga

SEQ ID NO: 8606 - RNA, 22 nt, Homo sapiens
caggugcauuggcugacaccug

SEQ ID NO: 8607 - RNA, 21 nt, Homo sapiens
uggaauuaauggagagguguu

SEQ ID NO: 8608 - RNA, 22 nt, Homo sapiens
uugauauguuguuagauucagu

SEQ ID NO: 8609 - RNA, 22 nt, Homo sapiens
uaucacuguuguuuguuuaagg

SEQ ID NO: 8610 - RNA, 22 nt, Homo sapiens
auuacaugucuauccaugaaca

SEQ ID NO: 8611 - RNA, 22 nt, Homo sapiens
ucagcagugugaaaacaaacua

SEQ ID NO: 8612 - RNA, 22 nt, Homo sapiens
auugucccucuuaaucccagca

SEQ ID NO: 8613 - RNA, 22 nt, Homo sapiens
gccuagagaaguaaauauuauc

SEQ ID NO: 8614 - RNA, 22 nt, Homo sapiens
ugaaaucauguaguuauugcaa

SEQ ID NO: 8615 - RNA, 22 nt, Homo sapiens
uacaaagugggaaacgaagguu

SEQ ID NO: 8616 - RNA, 22 nt, Homo sapiens
gcagcaucaaaucacacaagau

SEQ ID NO: 8617 - RNA, 22 nt, Homo sapiens
uucaucaguugagcugguugcu

SEQ ID NO: 8618 - RNA, 22 nt, Homo sapiens
uucucuguggauugggugagag

SEQ ID NO: 8619 - RNA, 23 nt, Homo sapiens
augacacuccugugcgcacccug

SEQ ID NO: 8620 - RNA, 22 nt, Homo sapiens
ucacaguucagcauggcugagg

SEQ ID NO: 8621 - RNA, 22 nt, Homo sapiens
uuggaagagaagggagauaaac

SEQ ID NO: 8622 - RNA, 22 nt, Homo sapiens
uugaaggaggugcucacucucg

SEQ ID NO: 8623 - RNA, 22 nt, Homo sapiens
uugaugauguuucugccuugcc

SEQ ID NO: 8624 - RNA, 22 nt, Homo sapiens
aaagugcuuacuaaguugccaa

SEQ ID NO: 8625 - RNA, 22 nt, Homo sapiens
auagcagugugagaaugaacua

SEQ ID NO: 8626 - RNA, 22 nt, Homo sapiens
auuuggguuuuacaucaggcua

SEQ ID NO: 8627 - RNA, 22 nt, Homo sapiens
ucacuguguauguauaugcagg

SEQ ID NO: 8628 - RNA, 22 nt, Homo sapiens
cuucaaaguuggcuaggagaca

SEQ ID NO: 8629 - RNA, 18 nt, Homo sapiens
ggaaaacuuuucuaagua

SEQ ID NO: 8630 - RNA, 22 nt, Homo sapiens
acagucacaauuuguaccuuuu

SEQ ID NO: 8631 - RNA, 22 nt, Homo sapiens
gaagugcuuuuggacuaacagu

SEQ ID NO: 8632 - RNA, 22 nt, Homo sapiens
ugagauaauuuacuuguugagg

SEQ ID NO: 8633 - RNA, 23 nt, Homo sapiens
aagagguaugacuaugaagugga

SEQ ID NO: 8634 - RNA, 22 nt, Homo sapiens
uaugucuauuauguagcaggaa

SEQ ID NO: 8635 - RNA, 18 nt, Homo sapiens
cuggaugucgaguguguu

SEQ ID NO: 8636 - RNA, 22 nt, Homo sapiens
auaugcauacauguaugcagga

SEQ ID NO: 8637 - RNA, 22 nt, Homo sapiens
uuggcagcauuccagccaagca

SEQ ID NO: 8638 - RNA, 22 nt, Homo sapiens
acugcacuccagccuccugggu

SEQ ID NO: 8639 - RNA, 22 nt, Homo sapiens
uccaguuuuguuaacauauggu

SEQ ID NO: 8640 - RNA, 22 nt, Homo sapiens
uugcacauuuuuucuggcagaa

SEQ ID NO: 8641 - RNA, 22 nt, Homo sapiens
uugaauagaaguguugaaagug

SEQ ID NO: 8642 - RNA, 22 nt, Homo sapiens
aguccauuugaugaugauucca

SEQ ID NO: 8643 - RNA, 22 nt, Homo sapiens
cauugcacacauuuaccuaugu

SEQ ID NO: 8644 - RNA, 22 nt, Homo sapiens
uuauucauuaacagggaccaaa

SEQ ID NO: 8645 - RNA, 22 nt, Homo sapiens
auaaagacacuuggcaugauuu

SEQ ID NO: 8646 - RNA, 22 nt, Homo sapiens
uuacagauggauggcagcuggc

SEQ ID NO: 8647 - RNA, 22 nt, Homo sapiens
cacccuugcagggacagcuuug

SEQ ID NO: 8648 - RNA, 22 nt, Homo sapiens
auacuguacugaaguacccauu

SEQ ID NO: 8649 - RNA, 22 nt, Homo sapiens
cagagguaagcaagucagcauu

SEQ ID NO: 8650 - RNA, 22 nt, Homo sapiens
uagcaguaagaaacugacauug

SEQ ID NO: 8651 - RNA, 22 nt, Homo sapiens
augugaaugugaucggauaguc

SEQ ID NO: 8652 - RNA, 22 nt, Homo sapiens
gauggcacuuaagagcaagagc

SEQ ID NO: 8653 - RNA, 22 nt, Homo sapiens
uuaugucuuugagcaaugcugu

SEQ ID NO: 8654 - RNA, 22 nt, Homo sapiens
gcagaauugguuucuucuaagg

SEQ ID NO: 8655 - RNA, 22 nt, Homo sapiens
uguaacacacacuguuuacucc

SEQ ID NO: 8656 - RNA, 22 nt, Homo sapiens
gagacggagucucgcucugucg

SEQ ID NO: 8657 - RNA, 22 nt, Homo sapiens
gagacggagucuugcucuguug

SEQ ID NO: 8658 - RNA, 22 nt, Homo sapiens
gagcacugauuuauuuuugucu

SEQ ID NO: 8659 - RNA, 22 nt, Homo sapiens
uaucagcagagucauacuucaa

SEQ ID NO: 8660 - RNA, 22 nt, Homo sapiens
auaagugagugauucaguguua

SEQ ID NO: 8661 - RNA, 22 nt, Homo sapiens
aguggaauuaagaaacugaauu

SEQ ID NO: 8662 - RNA, 22 nt, Homo sapiens
aucaaaguaucucaauauggua

SEQ ID NO: 8663 - RNA, 22 nt, Homo sapiens
aagugcaaauucccaggcucug

SEQ ID NO: 8664 - RNA, 22 nt, Homo sapiens
cucccagagccaguuauaggcu

SEQ ID NO: 8665 - RNA, 22 nt, Homo sapiens
ugagaugcuccucuugcaaagc

SEQ ID NO: 8666 - RNA, 22 nt, Homo sapiens
gugggcucguucguguuagaca

SEQ ID NO: 8667 - RNA, 22 nt, Homo sapiens
aagagguagcagucacaaaaga

SEQ ID NO: 8668 - RNA, 22 nt, Homo sapiens
caagugcuacagagaaaucuuu

SEQ ID NO: 8669 - RNA, 22 nt, Homo sapiens
cccuguguuuagcugaagguuu

SEQ ID NO: 8670 - RNA, 22 nt, Homo sapiens
cauugcacucuaucccgguggg

SEQ ID NO: 8671 - RNA, 22 nt, Homo sapiens
aaguacuguuuaaauugcagaa

SEQ ID NO: 8672 - RNA, 22 nt, Homo sapiens
gcuggaauuaacauagaugugc

SEQ ID NO: 8673 - RNA, 22 nt, Homo sapiens
uugugaauggugccacaauaaa

SEQ ID NO: 8674 - RNA, 22 nt, Homo sapiens
ucccauguagcuaggauuacag

SEQ ID NO: 8675 - RNA, 22 nt, Homo sapiens
cuccauuuggaacagauguccu

SEQ ID NO: 8676 - RNA, 22 nt, Homo sapiens
ugaguucuuuguagauucugug

SEQ ID NO: 8677 - RNA, 22 nt, Homo sapiens
ucaugucuuguuguauuuauuu

SEQ ID NO: 8678 - RNA, 22 nt, Homo sapiens
uugcacauugauuuuguaucuu

SEQ ID NO: 8679 - RNA, 22 nt, Homo sapiens
auaucugcauugccauuuaugu

SEQ ID NO: 8680 - RNA, 22 nt, Homo sapiens
aaagugcuuccuuuuugagggu

SEQ ID NO: 8681 - RNA, 22 nt, Homo sapiens
acugcacuccggccuggcaaca

SEQ ID NO: 8682 - RNA, 22 nt, Homo sapiens
uucauggaauauugaccauuuu

SEQ ID NO: 8683 - RNA, 22 nt, Homo sapiens
aaagugauguccaggcuuucag

SEQ ID NO: 8684 - RNA, 22 nt, Homo sapiens
auggaagacuccucuuugggua

SEQ ID NO: 8685 - RNA, 21 nt, Homo sapiens
ucaguuacugagagagaagug

SEQ ID NO: 8686 - RNA, 22 nt, Homo sapiens
ugugcauaugucuuuauaguag

SEQ ID NO: 8687 - RNA, 22 nt, Homo sapiens
guaaucucagcuacuugggagc

SEQ ID NO: 8688 - RNA, 22 nt, Homo sapiens
agccauacaacguaugcaugua

SEQ ID NO: 8689 - RNA, 22 nt, Homo sapiens
caugucuuuuaaacauucaacu

SEQ ID NO: 8690 - RNA, 22 nt, Homo sapiens
cuggccagagacauucauuaaa

SEQ ID NO: 8691 - RNA, 22 nt, Homo sapiens
aaucacauugaaucugcuaccu

SEQ ID NO: 8692 - RNA, 22 nt, Homo sapiens
aaguagcuggaugcaguggcac

SEQ ID NO: 8693 - RNA, 22 nt, Homo sapiens
uugcacauguugaaccagcaaa

SEQ ID NO: 8694 - RNA, 22 nt, Homo sapiens
ugagauaggaucuugcucuguu

SEQ ID NO: 8695 - RNA, 22 nt, Homo sapiens
ucggcucagugcaagcucugcc

SEQ ID NO: 8696 - RNA, 22 nt, Homo sapiens
aaaugccucccauucuacugac

SEQ ID NO: 8697 - RNA, 20 nt, Homo sapiens
uaagugcuugaugaaugaac

SEQ ID NO: 8698 - RNA, 22 nt, Homo sapiens
gucuggcacagggaaaguacaa

SEQ ID NO: 8699 - RNA, 22 nt, Homo sapiens
uugaggaaugugauuucaaaua

SEQ ID NO: 8700 - RNA, 22 nt, Homo sapiens
uugugcauaucagagguuugcu

SEQ ID NO: 8701 - RNA, 22 nt, Homo sapiens
uucugaguggcuuucaacacug

SEQ ID NO: 8702 - RNA, 18 nt, Homo sapiens
uguugguguucacucacu

SEQ ID NO: 8703 - RNA, 22 nt, Homo sapiens
aauuacauggcaauugggaaau

SEQ ID NO: 8704 - RNA, 22 nt, Homo sapiens
gugucuccugccuucaugcagc

SEQ ID NO: 8705 - RNA, 22 nt, Homo sapiens
uagacacugcauauuuuuuuaa

SEQ ID NO: 8706 - RNA, 22 nt, Homo sapiens
uuuguauguuggagauuggaga

SEQ ID NO: 8707 - RNA, 22 nt, Homo sapiens
cagugcuuuaucaaguccucca

SEQ ID NO: 8708 - RNA, 22 nt, Homo sapiens
auuuggguaaugagugcaaggg

SEQ ID NO: 8709 - RNA, 18 nt, Homo sapiens
uuugguccuuuauaaaca

SEQ ID NO: 8710 - RNA, 22 nt, Homo sapiens
uugagauuuuccucaaauauuu

SEQ ID NO: 8711 - RNA, 22 nt, Homo sapiens
uuaaaagcuaucuccaagguca

SEQ ID NO: 8712 - RNA, 22 nt, Homo sapiens
guaaucucagcuucuugggagg

SEQ ID NO: 8713 - RNA, 22 nt, Homo sapiens
uuggaagacaaugcugauucuc

SEQ ID NO: 8714 - RNA, 22 nt, Homo sapiens
cuccuguagccccaucaucuuu

SEQ ID NO: 8715 - RNA, 22 nt, Homo sapiens
gacauguaaggcucucucuguu

SEQ ID NO: 8716 - RNA, 22 nt, Homo sapiens
ccugagaucauacuguuaguaa

SEQ ID NO: 8717 - RNA, 22 nt, Homo sapiens
aacugguauuucccaugaauuu

SEQ ID NO: 8718 - RNA, 22 nt, Homo sapiens
aaguggaauguuuguggcacaa

SEQ ID NO: 8719 - RNA, 22 nt, Homo sapiens
uucaacagugauggccuuugua

SEQ ID NO: 8720 - RNA, 22 nt, Homo sapiens
auagcagaacagugucucacug

SEQ ID NO: 8721 - RNA, 20 nt, Homo sapiens
gugagguagaggguuaccug

SEQ ID NO: 8722 - RNA, 22 nt, Homo sapiens
aguaacaggauccaaagaaugu

SEQ ID NO: 8723 - RNA, 22 nt, Homo sapiens
ucauagucuaagguucuuuugc

SEQ ID NO: 8724 - RNA, 22 nt, Homo sapiens
uuacaugucuugguaagguuag

SEQ ID NO: 8725 - RNA, 22 nt, Homo sapiens
cuagcagacaugggcugaacca

SEQ ID NO: 8726 - RNA, 22 nt, Homo sapiens
cuugcacucagaagauucaguu

SEQ ID NO: 8727 - RNA, 23 nt, Homo sapiens
ucaguacuccacuuucaauagug

SEQ ID NO: 8728 - RNA, 23 nt, Homo sapiens
ucucauuccuugaaaauaaugac

SEQ ID NO: 8729 - RNA, 22 nt, Homo sapiens
aagugcuuccuuucagaggguu

SEQ ID NO: 8730 - RNA, 22 nt, Homo sapiens
uguauuuguuguuaaauggaga

SEQ ID NO: 8731 - RNA, 22 nt, Homo sapiens
gacacugucuucugcucuuaaa

SEQ ID NO: 8732 - RNA, 22 nt, Homo sapiens
agagugcaaagguuggggcugg

SEQ ID NO: 8733 - RNA, 22 nt, Homo sapiens
gcagagaaacaggucuaaggag

SEQ ID NO: 8734 - RNA, 22 nt, Homo sapiens
uuugugaaugucauaagcucca

SEQ ID NO: 8735 - RNA, 22 nt, Homo sapiens
uugccuaggcuggauugcagug

SEQ ID NO: 8736 - RNA, 22 nt, Homo sapiens
ugugaauggugcugcaaugaac

SEQ ID NO: 8737 - RNA, 22 nt, Homo sapiens
agcagagcaguggauuuuguga

SEQ ID NO: 8738 - RNA, 22 nt, Homo sapiens
uauugcacuccucaugcauuug

SEQ ID NO: 8739 - RNA, 22 nt, Homo sapiens
augauagucuugagaagcauuu

SEQ ID NO: 8740 - RNA, 22 nt, Homo sapiens
augagauucuuagagaagucug

SEQ ID NO: 8741 - RNA, 22 nt, Homo sapiens
cugcaguaaccacuguaggugu

SEQ ID NO: 8742 - RNA, 18 nt, Homo sapiens
cuugucaaaucuuuccuc

SEQ ID NO: 8743 - RNA, 18 nt, Homo sapiens
cuuaacauugggaugaua

SEQ ID NO: 8744 - RNA, 22 nt, Homo sapiens
uguagucauuccuuuuugcuuu

SEQ ID NO: 8745 - RNA, 22 nt, Homo sapiens
auaugcauguacccacacaggc

SEQ ID NO: 8746 - RNA, 22 nt, Homo sapiens
ucagacacugagcaaacgacua

SEQ ID NO: 8747 - RNA, 22 nt, Homo sapiens
aagagguagaagcuugccuucu

SEQ ID NO: 8748 - RNA, 22 nt, Homo sapiens
uaaagcuuggauuuaggcuaau

SEQ ID NO: 8749 - RNA, 22 nt, Homo sapiens
gugcacaucuguguuccagcua

SEQ ID NO: 8750 - RNA, 22 nt, Homo sapiens
gaaaacugcuucucuggguuuc

SEQ ID NO: 8751 - RNA, 22 nt, Homo sapiens
ucacaugggugcaauauaauca

SEQ ID NO: 8752 - RNA, 22 nt, Homo sapiens
aaucacuuugcuacaaggcagu

SEQ ID NO: 8753 - RNA, 22 nt, Homo sapiens
gugucucagcccagaccuauuu

SEQ ID NO: 8754 - RNA, 22 nt, Homo sapiens
gagauauuuagaaauguguucu

SEQ ID NO: 8755 - RNA, 22 nt, Homo sapiens
uaguauguuuauagcauugagu

SEQ ID NO: 8756 - RNA, 21 nt, Homo sapiens
ugaaaugcaugugcacauuaa

SEQ ID NO: 8757 - RNA, 22 nt, Homo sapiens
uucaaaguguugguuuugggcu

SEQ ID NO: 8758 - RNA, 22 nt, Homo sapiens
acuccauuucauuuuagcucuu

SEQ ID NO: 8759 - RNA, 22 nt, Homo sapiens
ucagaguagcugucugaggugc

SEQ ID NO: 8760 - RNA, 22 nt, Homo sapiens
aucuuguguugaauggugcaga

SEQ ID NO: 8761 - RNA, 18 nt, Homo sapiens
ugugacauugagcauguc

SEQ ID NO: 8762 - RNA, 22 nt, Homo sapiens
cugaaagagcauuugaaugggu

SEQ ID NO: 8763 - RNA, 22 nt, Homo sapiens
uucuggccccucccaaucucau

SEQ ID NO: 8764 - RNA, 22 nt, Homo sapiens
acugagaucuuuaaauaaauaa

SEQ ID NO: 8765 - RNA, 22 nt, Homo sapiens
auaugucuguuuagucuguaau

SEQ ID NO: 8766 - RNA, 22 nt, Homo sapiens
aauugcauugaauuuguagcuu

SEQ ID NO: 8767 - RNA, 22 nt, Homo sapiens
guaaucucagcuacucgggaga

SEQ ID NO: 8768 - RNA, 22 nt, Homo sapiens
uuuugcacuguuuuaucugaca

SEQ ID NO: 8769 - RNA, 22 nt, Homo sapiens
gagaacugagauaagugauauu

SEQ ID NO: 8770 - RNA, 22 nt, Homo sapiens
auguggaaagcagcaugauaug

SEQ ID NO: 8771 - RNA, 17 nt, Homo sapiens
augugaauguucaaaua

SEQ ID NO: 8772 - RNA, 22 nt, Homo sapiens
uuucagagucaucugcccaagu

SEQ ID NO: 8773 - RNA, 22 nt, Homo sapiens
uuauuagagauauuugguuagg

SEQ ID NO: 8774 - RNA, 22 nt, Homo sapiens
ucagcagugugaaaauggacua

SEQ ID NO: 8775 - RNA, 22 nt, Homo sapiens
guguaaaacaauuagaggauuu

SEQ ID NO: 8776 - RNA, 22 nt, Homo sapiens
ugacagagaagcauugaguuca

SEQ ID NO: 8777 - RNA, 23 nt, Homo sapiens
uggcaagaauucuuaccgugugg

SEQ ID NO: 8778 - RNA, 22 nt, Homo sapiens
cuaugucuuucauauuuugggg

SEQ ID NO: 8779 - RNA, 22 nt, Homo sapiens
uugugaauggugccgcaauaaa

SEQ ID NO: 8780 - RNA, 22 nt, Homo sapiens
cauugcacuccagcccuggcaa

SEQ ID NO: 8781 - RNA, 22 nt, Homo sapiens
uugugaauggugcugcaguaaa

SEQ ID NO: 8782 - RNA, 22 nt, Homo sapiens
ugcagagaaacauuuuguauuu

SEQ ID NO: 8783 - RNA, 22 nt, Homo sapiens
auggaagaaacgauuuucugga

SEQ ID NO: 8784 - RNA, 22 nt, Homo sapiens
ccaggguuccacgccuggcugu

SEQ ID NO: 8785 - RNA, 22 nt, Homo sapiens
ugaagugaagacucacagaagg

SEQ ID NO: 8786 - RNA, 22 nt, Homo sapiens
ucuacagccaguucaggaagaa

SEQ ID NO: 8787 - RNA, 20 nt, Homo sapiens
cauugcacuccagcuugggc

SEQ ID NO: 8788 - RNA, 22 nt, Homo sapiens
ugugaagaaagucauugguagc

SEQ ID NO: 8789 - RNA, 21 nt, Homo sapiens
aagcacauugaguguguguga

SEQ ID NO: 8790 - RNA, 22 nt, Homo sapiens
aggcaugauuguauuuugcucu

SEQ ID NO: 8791 - RNA, 22 nt, Homo sapiens
ugucaguuucuugagauggaac

SEQ ID NO: 8792 - RNA, 22 nt, Homo sapiens
uaugcagacauuguuccaacca

SEQ ID NO: 8793 - RNA, 22 nt, Homo sapiens
uuugcuauagugaauagugcug

SEQ ID NO: 8794 - RNA, 22 nt, Homo sapiens
uuuuggcuagaaauauaccucc

SEQ ID NO: 8795 - RNA, 22 nt, Homo sapiens
uucauaguaacaguaacuaugg

SEQ ID NO: 8796 - RNA, 22 nt, Homo sapiens
ucacugaaaccacugccuccug

SEQ ID NO: 8797 - RNA, 18 nt, Homo sapiens
ucacaaccacagugcugu

SEQ ID NO: 8798 - RNA, 22 nt, Homo sapiens
uaacaggcaaggucacaccuug

SEQ ID NO: 8799 - RNA, 22 nt, Homo sapiens
caagugcuugaugaaugaucaa

SEQ ID NO: 8800 - RNA, 22 nt, Homo sapiens
uugaagugaagaacaauaucac

SEQ ID NO: 8801 - RNA, 21 nt, Homo sapiens
ucacugagcaucaugguuuca

SEQ ID NO: 8802 - RNA, 20 nt, Homo sapiens
auugcagcaugauuuauaau

SEQ ID NO: 8803 - RNA, 22 nt, Homo sapiens
uggaauuaauuaaaauauacug

SEQ ID NO: 8804 - RNA, 22 nt, Homo sapiens
gaacccuggaggcggagguugc

SEQ ID NO: 8805 - RNA, 22 nt, Homo sapiens
ugagacauauuauacugcuuuu

SEQ ID NO: 8806 - RNA, 22 nt, Homo sapiens
uacagccacauaauguaugauu

SEQ ID NO: 8807 - RNA, 22 nt, Homo sapiens
ugagaaugcagaaucucgugca

SEQ ID NO: 8808 - RNA, 22 nt, Homo sapiens
ugucauguuucuacugaccaaa

SEQ ID NO: 8809 - RNA, 22 nt, Homo sapiens
uuacuguagugucauaucguau

SEQ ID NO: 8810 - RNA, 20 nt, Homo sapiens
ucacugugaacuucuugagg

SEQ ID NO: 8811 - RNA, 20 nt, Homo sapiens
uuccuuaggcauuggaagaa

SEQ ID NO: 8812 - RNA, 21 nt, Homo sapiens
guucaagugauccuccugucu

SEQ ID NO: 8813 - RNA, 22 nt, Homo sapiens
acauucagcuguuguuucaaug

SEQ ID NO: 8814 - RNA, 18 nt, Homo sapiens
uugaauaguguccaaucu

SEQ ID NO: 8815 - RNA, 22 nt, Homo sapiens
ucugagaucaugucugugcugu

SEQ ID NO: 8816 - RNA, 22 nt, Homo sapiens
uugucauuuucagaguguuacg

SEQ ID NO: 8817 - RNA, 23 nt, Homo sapiens
ugagauuacccagaaagaguaua

SEQ ID NO: 8818 - RNA, 22 nt, Homo sapiens
acuuuuugaugaggucguuugu

SEQ ID NO: 8819 - RNA, 22 nt, Homo sapiens
uggaagccuagauucuuuucuu

SEQ ID NO: 8820 - RNA, 22 nt, Homo sapiens
uagcaguauugaaagaugaggg

SEQ ID NO: 8821 - RNA, 22 nt, Homo sapiens
cccugaagauacagaguuuggg

SEQ ID NO: 8822 - RNA, 22 nt, Homo sapiens
uauuacauccauaggcucugcu

SEQ ID NO: 8823 - RNA, 22 nt, Homo sapiens
ugugaacaaaauuuguugcaua

SEQ ID NO: 8824 - RNA, 22 nt, Homo sapiens
guaauaacuguggaaaaagguu

SEQ ID NO: 8825 - RNA, 19 nt, Homo sapiens
uaugcuauuuauuagaagu

SEQ ID NO: 8826 - RNA, 22 nt, Homo sapiens
cauugcacuccagccuuggcaa

SEQ ID NO: 8827 - RNA, 23 nt, Homo sapiens
ugagaugucugauugcgaggguc

SEQ ID NO: 8828 - RNA, 22 nt, Homo sapiens
uaucacagcauugucuauaaua

SEQ ID NO: 8829 - RNA, 22 nt, Homo sapiens
auuccuuaggcccuuugguuag

SEQ ID NO: 8830 - RNA, 22 nt, Homo sapiens
cauugcacuccagccugaggga

SEQ ID NO: 8831 - RNA, 18 nt, Homo sapiens
ugacuguccagguggacc

SEQ ID NO: 8832 - RNA, 22 nt, Homo sapiens
uccaguuuggaggcuugaugug

SEQ ID NO: 8833 - RNA, 22 nt, Homo sapiens
uugaggaaugucauuuguguuu

SEQ ID NO: 8834 - RNA, 22 nt, Homo sapiens
auccacaugcaguuggaaacag

SEQ ID NO: 8835 - RNA, 22 nt, Homo sapiens
ucaggcaccuuccucuuaucug

SEQ ID NO: 8836 - RNA, 22 nt, Homo sapiens
augacauugaugcucuggcugg

SEQ ID NO: 8837 - RNA, 22 nt, Homo sapiens
acccgcccagguguggccggga

SEQ ID NO: 8838 - RNA, 22 nt, Homo sapiens
gucaggcaccgauacaguuuuu

SEQ ID NO: 8839 - RNA, 22 nt, Homo sapiens
uucacagagagaacucaaacca

SEQ ID NO: 8840 - RNA, 22 nt, Homo sapiens
cuuucucagugagacccgagau

SEQ ID NO: 8841 - RNA, 22 nt, Homo sapiens
uucuauggucacagaugcuuga

SEQ ID NO: 8842 - RNA, 22 nt, Homo sapiens
ccauggcaauggucagucuauu

SEQ ID NO: 8843 - RNA, 22 nt, Homo sapiens
uaucaugucuguguguaccuag

SEQ ID NO: 8844 - RNA, 22 nt, Homo sapiens
aacaccauucucuguaacaaga

SEQ ID NO: 8845 - RNA, 21 nt, Homo sapiens
aggauaguagauuaaauauuu

SEQ ID NO: 8846 - RNA, 22 nt, Homo sapiens
uuucaagugcugucuuagcugu

SEQ ID NO: 8847 - RNA, 22 nt, Homo sapiens
ucaacaggucaauugcauagaa

SEQ ID NO: 8848 - RNA, 22 nt, Homo sapiens
uugcacauugcaccuuuuguau

SEQ ID NO: 8849 - RNA, 22 nt, Homo sapiens
ucaguguuuggaaucucaauuu

SEQ ID NO: 8850 - RNA, 22 nt, Homo sapiens
agcgccacugcacuccagccug

SEQ ID NO: 8851 - RNA, 22 nt, Homo sapiens
aauggcaagagccacagaggcg

SEQ ID NO: 8852 - RNA, 22 nt, Homo sapiens
ugcauauucgaguuauuuuggg

SEQ ID NO: 8853 - RNA, 22 nt, Homo sapiens
guacaguaguaaaagugaauga

SEQ ID NO: 8854 - RNA, 22 nt, Homo sapiens
ucauggcacugaugagaguuuc

SEQ ID NO: 8855 - RNA, 22 nt, Homo sapiens
uugugaauggaguagcaggauc

SEQ ID NO: 8856 - RNA, 17 nt, Homo sapiens
aaggugcuucgaccucc

SEQ ID NO: 8857 - RNA, 22 nt, Homo sapiens
ugagaaugaugauuuccaguuu

SEQ ID NO: 8858 - RNA, 19 nt, Homo sapiens
cuauugcacauagcugaag

SEQ ID NO: 8859 - RNA, 22 nt, Homo sapiens
uucaagcuauggugaucuuuuc

SEQ ID NO: 8860 - RNA, 22 nt, Homo sapiens
ugacaugaugagcaauaauggc

SEQ ID NO: 8861 - RNA, 22 nt, Homo sapiens
gggaucaacuuauacuaaaauu

SEQ ID NO: 8862 - RNA, 22 nt, Homo sapiens
uuuuuggaggagguuagaucau

SEQ ID NO: 8863 - RNA, 22 nt, Homo sapiens
uaucaacaggguggccagugua

SEQ ID NO: 8864 - RNA, 22 nt, Homo sapiens
uuuccagguggccaacauuuua

SEQ ID NO: 8865 - RNA, 22 nt, Homo sapiens
aucuggguccguucugcuucuc

SEQ ID NO: 8866 - RNA, 22 nt, Homo sapiens
ggcaagaucuuggcucacugaa

SEQ ID NO: 8867 - RNA, 22 nt, Homo sapiens
agugcaauaaggauguagaacu

SEQ ID NO: 8868 - RNA, 22 nt, Homo sapiens
aaaugcuuucuuggaccauuug

SEQ ID NO: 8869 - RNA, 22 nt, Homo sapiens
uuaauuguccaaguucaucucu

SEQ ID NO: 8870 - RNA, 22 nt, Homo sapiens
aagcuacauuuuauuuauguca

SEQ ID NO: 8871 - RNA, 22 nt, Homo sapiens
uuaagucacacuagacaacuga

SEQ ID NO: 8872 - RNA, 22 nt, Homo sapiens
augacauguauuuccaggauuu

SEQ ID NO: 8873 - RNA, 22 nt, Homo sapiens
aagagguaggaaauggucauuu

SEQ ID NO: 8874 - RNA, 23 nt, Homo sapiens
uauugcacuaugguaacccuuuu

SEQ ID NO: 8875 - RNA, 22 nt, Homo sapiens
uugcacauugauuuuguauccu

SEQ ID NO: 8876 - RNA, 22 nt, Homo sapiens
acugcacuccaccuugggcaac

SEQ ID NO: 8877 - RNA, 22 nt, Homo sapiens
ugguauguaugauuaacaugga

SEQ ID NO: 8878 - RNA, 22 nt, Homo sapiens
ucauugcaaucucugccucccg

SEQ ID NO: 8879 - RNA, 22 nt, Homo sapiens
uuacaguugugagccaccaugc

SEQ ID NO: 8880 - RNA, 22 nt, Homo sapiens
acuggacuuaaugaugaauugu

SEQ ID NO: 8881 - RNA, 22 nt, Homo sapiens
cauugcacuccagccugcugac

SEQ ID NO: 8882 - RNA, 22 nt, Homo sapiens
acccugucauccacauggugcu

SEQ ID NO: 8883 - RNA, 22 nt, Homo sapiens
uucuauguuugaaaaugccaaa

SEQ ID NO: 8884 - RNA, 22 nt, Homo sapiens
uuggucucaucaagagcagcuu

SEQ ID NO: 8885 - RNA, 19 nt, Homo sapiens
uauguaguuuucucaauau

SEQ ID NO: 8886 - RNA, 22 nt, Homo sapiens
gugagguacgugucaagaacca

SEQ ID NO: 8887 - RNA, 22 nt, Homo sapiens
cucauugcaaucucugccuccc

SEQ ID NO: 8888 - RNA, 22 nt, Homo sapiens
aaucacaguguucuugugaggg

SEQ ID NO: 8889 - RNA, 22 nt, Homo sapiens
caugcauuggucuauuauguga

SEQ ID NO: 8890 - RNA, 22 nt, Homo sapiens
ggcacaaugucagcucacugca

SEQ ID NO: 8891 - RNA, 22 nt, Homo sapiens
acauggcacugcgggcuucuug

SEQ ID NO: 8892 - RNA, 22 nt, Homo sapiens
cuggaagaaaaucacgccaucu

SEQ ID NO: 8893 - RNA, 18 nt, Homo sapiens
uuuggcuguucaugacuc

SEQ ID NO: 8894 - RNA, 22 nt, Homo sapiens
ucauacaguaguccucacuugu

SEQ ID NO: 8895 - RNA, 22 nt, Homo sapiens
auuaagugcuugcagaagucca

SEQ ID NO: 8896 - RNA, 22 nt, Homo sapiens
uagcagcauaaauggacuaaga

SEQ ID NO: 8897 - RNA, 22 nt, Homo sapiens
cauugcacuccagccucggcaa

SEQ ID NO: 8898 - RNA, 22 nt, Homo sapiens
uauugcacuccagccuuggcaa

SEQ ID NO: 8899 - RNA, 22 nt, Homo sapiens
uuaugucuuuuguguucagcua

SEQ ID NO: 8900 - RNA, 22 nt, Homo sapiens
uagaucauauacuugccaugac

SEQ ID NO: 8901 - RNA, 22 nt, Homo sapiens
augaaauugcuaucgcaguacu

SEQ ID NO: 8902 - RNA, 22 nt, Homo sapiens
uugugaaugaugucgcaguaaa

SEQ ID NO: 8903 - RNA, 22 nt, Homo sapiens
cauugcacuccacuccugaaca

SEQ ID NO: 8904 - RNA, 22 nt, Homo sapiens
aauacagcacacagaugggucu

SEQ ID NO: 8905 - RNA, 22 nt, Homo sapiens
acuggcuuauuucacuuagcau

SEQ ID NO: 8906 - RNA, 22 nt, Homo sapiens
guaaaguaaagcacaucaaggu

SEQ ID NO: 8907 - RNA, 22 nt, Homo sapiens
uuucuauguugaccagucuaga

SEQ ID NO: 8908 - RNA, 22 nt, Homo sapiens
guuuuuggggucacuauuaccg

SEQ ID NO: 8909 - RNA, 22 nt, Homo sapiens
cauugcacuccauccuuggcaa

SEQ ID NO: 8910 - RNA, 22 nt, Homo sapiens
auugcagcccacccugggugau

SEQ ID NO: 8911 - RNA, 22 nt, Homo sapiens
ucaguaaaugcuguucucuuuu

SEQ ID NO: 8912 - RNA, 22 nt, Homo sapiens
uuauuagguuagugcaaaaguu

SEQ ID NO: 8913 - RNA, 22 nt, Homo sapiens
cucacaugcucaccugguguuc

SEQ ID NO: 8914 - RNA, 22 nt, Homo sapiens
ucacuguugaugggcaugcagg

SEQ ID NO: 8915 - RNA, 22 nt, Homo sapiens
aagggaauguuguagcugguuu

SEQ ID NO: 8916 - RNA, 22 nt, Homo sapiens
ucaagcaauucuccugccucag

SEQ ID NO: 8917 - RNA, 20 nt, Homo sapiens
guggaagauaaguagccuga

SEQ ID NO: 8918 - RNA, 22 nt, Homo sapiens
agaacacugaguucagggucag

SEQ ID NO: 8919 - RNA, 19 nt, Homo sapiens
cauugcacuccacccuggg

SEQ ID NO: 8920 - RNA, 22 nt, Homo sapiens
gugaaagauuaaaccagugugu

SEQ ID NO: 8921 - RNA, 22 nt, Homo sapiens
uuugggaaugaguuuaucauuu

SEQ ID NO: 8922 - RNA, 22 nt, Homo sapiens
cccaguuuugcuucucaugagg

SEQ ID NO: 8923 - RNA, 22 nt, Homo sapiens
uaucacuuugauaguuuaaaug

SEQ ID NO: 8924 - RNA, 22 nt, Homo sapiens
uggcaagagauaugugucuaua

SEQ ID NO: 8925 - RNA, 22 nt, Homo sapiens
gcagcacauggcagaacauauu

SEQ ID NO: 8926 - RNA, 22 nt, Homo sapiens
ucugagaugagacuuugaauuu

SEQ ID NO: 8927 - RNA, 22 nt, Homo sapiens
augauaaguuauuagaagaaga

SEQ ID NO: 8928 - RNA, 22 nt, Homo sapiens
cuugcacuugaaauuccaguuu

SEQ ID NO: 8929 - RNA, 22 nt, Homo sapiens
ugugccacugcacuucagccug

SEQ ID NO: 8930 - RNA, 22 nt, Homo sapiens
acccagaguuccuugucuuuca

SEQ ID NO: 8931 - RNA, 22 nt, Homo sapiens
gucacuguggagaagaaagugg

SEQ ID NO: 8932 - RNA, 22 nt, Homo sapiens
uuggaaaaauccaccuugaucu

SEQ ID NO: 8933 - RNA, 22 nt, Homo sapiens
aauuaguugucgugagaguggu

SEQ ID NO: 8934 - RNA, 22 nt, Homo sapiens
ccuguguuaugguuucuaaugu

SEQ ID NO: 8935 - RNA, 22 nt, Homo sapiens
uaagugcuugacuuugauguuu

SEQ ID NO: 8936 - RNA, 22 nt, Homo sapiens
auagcagugugaggacagacua

SEQ ID NO: 8937 - RNA, 22 nt, Homo sapiens
uuacuguauagaaucaucuuga

SEQ ID NO: 8938 - RNA, 22 nt, Homo sapiens
cuggaauguuccuaaagauuca

SEQ ID NO: 8939 - RNA, 22 nt, Homo sapiens
uaugcuuauaaacauuugucag

SEQ ID NO: 8940 - RNA, 22 nt, Homo sapiens
ucuugcacaaauuauuuuaacu

SEQ ID NO: 8941 - RNA, 22 nt, Homo sapiens
ugaaucauuucuugucuucagu

SEQ ID NO: 8942 - RNA, 22 nt, Homo sapiens
acugaguguugauuuagauuaa

SEQ ID NO: 8943 - RNA, 22 nt, Homo sapiens
auagcagugugaaaacagacua

SEQ ID NO: 8944 - RNA, 20 nt, Homo sapiens
aguauucacuuuuuucaugg

SEQ ID NO: 8945 - RNA, 21 nt, Homo sapiens
ucaucagucaaagacaauggu

SEQ ID NO: 8946 - RNA, 22 nt, Homo sapiens
cccugagaugcuguuaaucugu

SEQ ID NO: 8947 - RNA, 22 nt, Homo sapiens
uucucaguuccuacuuugguga

SEQ ID NO: 8948 - RNA, 22 nt, Homo sapiens
uugugcaugaugcauacauggu

SEQ ID NO: 8949 - RNA, 22 nt, Homo sapiens
ucacacugaauuugaagcaaug

SEQ ID NO: 8950 - RNA, 22 nt, Homo sapiens
uagcaguaucccaccaucuggu

SEQ ID NO: 8951 - RNA, 22 nt, Homo sapiens
gagaacauuuaagccacucagg

SEQ ID NO: 8952 - RNA, 21 nt, Homo sapiens
aauacucuagguuaagagagc

SEQ ID NO: 8953 - RNA, 22 nt, Homo sapiens
aaaguggugggauuccaggcau

SEQ ID NO: 8954 - RNA, 22 nt, Homo sapiens
uguguaauaccuuugacuauau

SEQ ID NO: 8955 - RNA, 22 nt, Homo sapiens
uuggcaacauagugagaccccc

SEQ ID NO: 8956 - RNA, 22 nt, Homo sapiens
cagugcuuguuauuguucuauu

SEQ ID NO: 8957 - RNA, 22 nt, Homo sapiens
ucacuaaagaaaauggcaugga

SEQ ID NO: 8958 - RNA, 22 nt, Homo sapiens
augagauaaaccaucucuuaag

SEQ ID NO: 8959 - RNA, 22 nt, Homo sapiens
aagugcuucuuuccucgagaag

SEQ ID NO: 8960 - RNA, 22 nt, Homo sapiens
caaagucuauucuacccuuacc

SEQ ID NO: 8961 - RNA, 22 nt, Homo sapiens
ggcagcaugggugccuuuguga

SEQ ID NO: 8962 - RNA, 22 nt, Homo sapiens
ugugaagauggacuaauauagu

SEQ ID NO: 8963 - RNA, 22 nt, Homo sapiens
cagagaaugucuuuuuuaacca

SEQ ID NO: 8964 - RNA, 22 nt, Homo sapiens
gagaacauuaauaguuaauuuu

SEQ ID NO: 8965 - RNA, 22 nt, Homo sapiens
acaagcacaaauuuaauccugu

SEQ ID NO: 8966 - RNA, 17 nt, Homo sapiens
uuuuggauuagaaaucc

SEQ ID NO: 8967 - RNA, 22 nt, Homo sapiens
aaagugcugggauuaggccagg

SEQ ID NO: 8968 - RNA, 22 nt, Homo sapiens
agcucuuguuaguauuagcagu

SEQ ID NO: 8969 - RNA, 22 nt, Homo sapiens
gagagugcuuggcaucugcuga

SEQ ID NO: 8970 - RNA, 22 nt, Homo sapiens
uaaaugcucuuuaaaagugcuu

SEQ ID NO: 8971 - RNA, 18 nt, Homo sapiens
uccaguuuucccagcauc

SEQ ID NO: 8972 - RNA, 20 nt, Homo sapiens
auguaauguaugauauguac

SEQ ID NO: 8973 - RNA, 22 nt, Homo sapiens
uaugugcaaauuaauugcuaga

SEQ ID NO: 8974 - RNA, 22 nt, Homo sapiens
ucucuggauaucuacuuauguu

SEQ ID NO: 8975 - RNA, 22 nt, Homo sapiens
augcagugugcaacagauuaag

SEQ ID NO: 8976 - RNA, 22 nt, Homo sapiens
cuggaguaugaaccauguauca

SEQ ID NO: 8977 - RNA, 18 nt, Homo sapiens
ucacagguaaaguugaca

SEQ ID NO: 8978 - RNA, 22 nt, Homo sapiens
cccagaguucuuaaauacugag

SEQ ID NO: 8979 - RNA, 22 nt, Homo sapiens
uacaaagcuuucugcaaaucau

SEQ ID NO: 8980 - RNA, 22 nt, Homo sapiens
ugacucaguuucucagguagua

SEQ ID NO: 8981 - RNA, 18 nt, Homo sapiens
ucagucacugccuggcuu

SEQ ID NO: 8982 - RNA, 22 nt, Homo sapiens
cuggcaagaggauaaaguccua

SEQ ID NO: 8983 - RNA, 22 nt, Homo sapiens
aacagucaauugcugaugaccu

SEQ ID NO: 8984 - RNA, 22 nt, Homo sapiens
caagagaccugagugucauucu

SEQ ID NO: 8985 - RNA, 21 nt, Homo sapiens
gaccacagcagggaaugucag

SEQ ID NO: 8986 - RNA, 22 nt, Homo sapiens
uaaagugaggauggcaguaggu

SEQ ID NO: 8987 - RNA, 22 nt, Homo sapiens
augugcaacugcuggaacaguc

SEQ ID NO: 8988 - RNA, 19 nt, Homo sapiens
ugacaugaaacccaagauc

SEQ ID NO: 8989 - RNA, 22 nt, Homo sapiens
ugagaucacuaagagguaaugg

SEQ ID NO: 8990 - RNA, 22 nt, Homo sapiens
uggcaagaccccaucucuacaa

SEQ ID NO: 8991 - RNA, 22 nt, Homo sapiens
uaacauagucauauacuugcuu

SEQ ID NO: 8992 - RNA, 22 nt, Homo sapiens
ucaugugaggauaacaauagug

SEQ ID NO: 8993 - RNA, 22 nt, Homo sapiens
uccugagacucacaggcucccc

SEQ ID NO: 8994 - RNA, 23 nt, Homo sapiens
ggaguguaaugacucgaucucgg

SEQ ID NO: 8995 - RNA, 22 nt, Homo sapiens
uuguaaagaucauaugcuguuc

SEQ ID NO: 8996 - RNA, 22 nt, Homo sapiens
ucuggcuuauuucacuuagcau

SEQ ID NO: 8997 - RNA, 22 nt, Homo sapiens
uauacagcaaguuacugugcug

SEQ ID NO: 8998 - RNA, 22 nt, Homo sapiens
uuguaacaugcuuucacuucag

SEQ ID NO: 8999 - RNA, 23 nt, Homo sapiens
aucacuguuaacaauuucuuccu

SEQ ID NO: 9000 - RNA, 22 nt, Homo sapiens
aaggugcuguaagcauccaugu

SEQ ID NO: 9001 - RNA, 21 nt, Homo sapiens
cauaaugcuacuuauuuuaug

SEQ ID NO: 9002 - RNA, 18 nt, Homo sapiens
ugcauacuaucugauuuu

SEQ ID NO: 9003 - RNA, 22 nt, Homo sapiens
aaagugcuaggauuaccugggg

SEQ ID NO: 9004 - RNA, 22 nt, Homo sapiens
uuuaucuguuuaaaacuguuca

SEQ ID NO: 9005 - RNA, 22 nt, Homo sapiens
uugugaaaaaccucucguggaa

SEQ ID NO: 9006 - RNA, 22 nt, Homo sapiens
ugucaguuuuaacuagggaaua

SEQ ID NO: 9007 - RNA, 22 nt, Homo sapiens
uucacuguagccucagccucuu

SEQ ID NO: 9008 - RNA, 22 nt, Homo sapiens
auaucacucccaauaucgcagg

SEQ ID NO: 9009 - RNA, 22 nt, Homo sapiens
ucuccauuguccagaugaggaa

SEQ ID NO: 9010 - RNA, 22 nt, Homo sapiens
ugagaaugacugggcaugcugc

SEQ ID NO: 9011 - RNA, 22 nt, Homo sapiens
gugcacaugguagguauugagu

SEQ ID NO: 9012 - RNA, 22 nt, Homo sapiens
ucucaaccucccaaguagcugg

SEQ ID NO: 9013 - RNA, 22 nt, Homo sapiens
augugaacaucauagaaugcac

SEQ ID NO: 9014 - RNA, 22 nt, Homo sapiens
aguggaaucuguuauacuaacu

SEQ ID NO: 9015 - RNA, 22 nt, Homo sapiens
gugcacauauggugcauaagug

SEQ ID NO: 9016 - RNA, 22 nt, Homo sapiens
uuuuuggauaaugguacaugua

SEQ ID NO: 9017 - RNA, 22 nt, Homo sapiens
uucacuguuaagcaguuaaacu

SEQ ID NO: 9018 - RNA, 22 nt, Homo sapiens
gagguaucauuauguugcccag

SEQ ID NO: 9019 - RNA, 22 nt, Homo sapiens
aagugcuuaggauagugugugg

SEQ ID NO: 9020 - RNA, 22 nt, Homo sapiens
uuggcaaguccccaccucucuc

SEQ ID NO: 9021 - RNA, 20 nt, Homo sapiens
ucaaggcacgaauaaaaguu

SEQ ID NO: 9022 - RNA, 22 nt, Homo sapiens
guaaucucagcuacuugggagu

SEQ ID NO: 9023 - RNA, 21 nt, Homo sapiens
ugagaugugaccagggcauca

SEQ ID NO: 9024 - RNA, 22 nt, Homo sapiens
gugcaaauuccagcucaacucc

SEQ ID NO: 9025 - RNA, 22 nt, Homo sapiens
uugaaccauucuuuugauagag

SEQ ID NO: 9026 - RNA, 22 nt, Homo sapiens
caucacaugcuuauuuuccuca

SEQ ID NO: 9027 - RNA, 22 nt, Homo sapiens
uaucaagaugacaaacuuugcu

SEQ ID NO: 9028 - RNA, 22 nt, Homo sapiens
gcaccaugguagaauaauggua

SEQ ID NO: 9029 - RNA, 22 nt, Homo sapiens
gaguuagguugucaaugucuua

SEQ ID NO: 9030 - RNA, 22 nt, Homo sapiens
uggagugcaauggcaccaucuu

SEQ ID NO: 9031 - RNA, 22 nt, Homo sapiens
auugcuauuauuugaccauugu

SEQ ID NO: 9032 - RNA, 22 nt, Homo sapiens
augagacauuaaaguguguuug

SEQ ID NO: 9033 - RNA, 22 nt, Homo sapiens
aauugcacuggaaguaacugag

SEQ ID NO: 9034 - RNA, 22 nt, Homo sapiens
uugugaauggugccucaguaaa

SEQ ID NO: 9035 - RNA, 22 nt, Homo sapiens
auucagaggggcagcugucuug

SEQ ID NO: 9036 - RNA, 22 nt, Homo sapiens
agacacuguugaaaaggcccca

SEQ ID NO: 9037 - RNA, 20 nt, Homo sapiens
cauugcacuccagccugcug

SEQ ID NO: 9038 - RNA, 22 nt, Homo sapiens
uuguguacuacaguaugccaca

SEQ ID NO: 9039 - RNA, 22 nt, Homo sapiens
ugagaugugaucaccugaaggg

SEQ ID NO: 9040 - RNA, 19 nt, Homo sapiens
auaaaugccuacaagggug

SEQ ID NO: 9041 - RNA, 20 nt, Homo sapiens
aucacuggagaaggaaaccu

SEQ ID NO: 9042 - RNA, 22 nt, Homo sapiens
ugagauuauauuucuuaacaga

SEQ ID NO: 9043 - RNA, 22 nt, Homo sapiens
ucaucaggcucauucaagcuga

SEQ ID NO: 9044 - RNA, 20 nt, Homo sapiens
uccaguuuuggagacauucu

SEQ ID NO: 9045 - RNA, 22 nt, Homo sapiens
aagugcuuacagggaacaugau

SEQ ID NO: 9046 - RNA, 23 nt, Homo sapiens
auaagccuuuucuuucugcccca

SEQ ID NO: 9047 - RNA, 23 nt, Homo sapiens
aauugcacauuccuugcuggcag

SEQ ID NO: 9048 - RNA, 22 nt, Homo sapiens
uuguacuuuuaguagagacggg

SEQ ID NO: 9049 - RNA, 22 nt, Homo sapiens
aaagugcugggauuuuaggcau

SEQ ID NO: 9050 - RNA, 22 nt, Homo sapiens
uggaauguagcguugacacgag

SEQ ID NO: 9051 - RNA, 22 nt, Homo sapiens
uugucacccuacauaacaggga

SEQ ID NO: 9052 - RNA, 22 nt, Homo sapiens
gaaucacugugguaucccaugc

SEQ ID NO: 9053 - RNA, 22 nt, Homo sapiens
ucauggcauuguuaaggguuuu

SEQ ID NO: 9054 - RNA, 16 nt, Homo sapiens
uuauugcauucuucuc

SEQ ID NO: 9055 - RNA, 22 nt, Homo sapiens
gagagguaguuuuuuggucguc

SEQ ID NO: 9056 - RNA, 22 nt, Homo sapiens
auacacgguaggcacauauuua

SEQ ID NO: 9057 - RNA, 22 nt, Homo sapiens
ucucaaguggucgcaguuagau

SEQ ID NO: 9058 - RNA, 22 nt, Homo sapiens
uauacugucuuuguaugccuag

SEQ ID NO: 9059 - RNA, 22 nt, Homo sapiens
uugaaagaaaggagacugaguu

SEQ ID NO: 9060 - RNA, 22 nt, Homo sapiens
auagcagugugaaaauggacua

SEQ ID NO: 9061 - RNA, 22 nt, Homo sapiens
uagagguauuaacaguagaaga

SEQ ID NO: 9062 - RNA, 22 nt, Homo sapiens
uugagcccuggagguggaggcu

SEQ ID NO: 9063 - RNA, 22 nt, Homo sapiens
acugcacuccagccuuggcggc

SEQ ID NO: 9064 - RNA, 20 nt, Homo sapiens
uggugguuuuaugugguuua

SEQ ID NO: 9065 - RNA, 22 nt, Homo sapiens
uuggccauaugacuugcuuugg

SEQ ID NO: 9066 - RNA, 22 nt, Homo sapiens
uugagguaauaaacagccauuc

SEQ ID NO: 9067 - RNA, 22 nt, Homo sapiens
acaguaaugggccccuuuuccu

SEQ ID NO: 9068 - RNA, 22 nt, Homo sapiens
uaucagagcugucagccuaccu

SEQ ID NO: 9069 - RNA, 22 nt, Homo sapiens
auuaucacaguuuugcauaugg

SEQ ID NO: 9070 - RNA, 22 nt, Homo sapiens
aagagguaauaacaaagcuucu

SEQ ID NO: 9071 - RNA, 22 nt, Homo sapiens
agaguacaggcaaguuagucau

SEQ ID NO: 9072 - RNA, 22 nt, Homo sapiens
auuuguccugccuuuuccuccu

SEQ ID NO: 9073 - RNA, 22 nt, Homo sapiens
ugacauuacagucacuugcugu

SEQ ID NO: 9074 - RNA, 23 nt, Homo sapiens
gagaccagcuucagaaagcacga

SEQ ID NO: 9075 - RNA, 22 nt, Homo sapiens
ugucauucaggaaauucuaagu

SEQ ID NO: 9076 - RNA, 22 nt, Homo sapiens
gucuggcuuaucucacuuacca

SEQ ID NO: 9077 - RNA, 22 nt, Homo sapiens
gugccuuuucugagcaaugagc

SEQ ID NO: 9078 - RNA, 21 nt, Homo sapiens
caugucacugcacucuagccu

SEQ ID NO: 9079 - RNA, 23 nt, Homo sapiens
uucaccguguuggccaggcuggu

SEQ ID NO: 9080 - RNA, 22 nt, Homo sapiens
cagccgggugagguggcuuguu

SEQ ID NO: 9081 - RNA, 22 nt, Homo sapiens
aaagugcugggauuggcugggc

SEQ ID NO: 9082 - RNA, 22 nt, Homo sapiens
ggccggguggccauggcugccc

SEQ ID NO: 9083 - RNA, 22 nt, Homo sapiens
uuaggcuuuauugaaaacaaua

SEQ ID NO: 9084 - RNA, 22 nt, Homo sapiens
acugcacucuagccuuggcaac

SEQ ID NO: 9085 - RNA, 22 nt, Homo sapiens
auugcacacagaaucaggguaa

SEQ ID NO: 9086 - RNA, 22 nt, Homo sapiens
cugaaagagcauguaacacagu

SEQ ID NO: 9087 - RNA, 22 nt, Homo sapiens
caagugcucuaggauccugagu

SEQ ID NO: 9088 - RNA, 20 nt, Homo sapiens
uggucaccuucaggagguuc

SEQ ID NO: 9089 - RNA, 22 nt, Homo sapiens
uaagcagugcaagaauggaaua

SEQ ID NO: 9090 - RNA, 22 nt, Homo sapiens
auagcagugugaaaauugacug

SEQ ID NO: 9091 - RNA, 22 nt, Homo sapiens
gagauauucugguuuacuaaau

SEQ ID NO: 9092 - RNA, 22 nt, Homo sapiens
uggaaguauagauaauugaaag

SEQ ID NO: 9093 - RNA, 22 nt, Homo sapiens
uaaagcuuagauccaugguggc

SEQ ID NO: 9094 - RNA, 22 nt, Homo sapiens
guagugcaguuugagaaucagu

SEQ ID NO: 9095 - RNA, 22 nt, Homo sapiens
ucacuagggagaaacugaggcu

SEQ ID NO: 9096 - RNA, 22 nt, Homo sapiens
uauaagacgagcaaaaagcuug

SEQ ID NO: 9097 - RNA, 22 nt, Homo sapiens
aagugcucuugaaacugccuua

SEQ ID NO: 9098 - RNA, 22 nt, Homo sapiens
cacugcgacguccgccucccgg

SEQ ID NO: 9099 - RNA, 22 nt, Homo sapiens
gucacuggcugucuuguaugau

SEQ ID NO: 9100 - RNA, 22 nt, Homo sapiens
aguggcaaugugauguccugaa

SEQ ID NO: 9101 - RNA, 22 nt, Homo sapiens
uugagauaggagcuguuguucu

SEQ ID NO: 9102 - RNA, 22 nt, Homo sapiens
cauugcacucugcauuccaguc

SEQ ID NO: 9103 - RNA, 22 nt, Homo sapiens
ucugccuuuucaugugggaugg

SEQ ID NO: 9104 - RNA, 21 nt, Homo sapiens
ugugaacauguuggguggcau

SEQ ID NO: 9105 - RNA, 22 nt, Homo sapiens
uaugaaagcuacuucucacaau

SEQ ID NO: 9106 - RNA, 22 nt, Homo sapiens
aaagugcuguagacugggcgca

SEQ ID NO: 9107 - RNA, 22 nt, Homo sapiens
uuucugagaccaaaacuuguaa

SEQ ID NO: 9108 - RNA, 17 nt, Homo sapiens
ugcaauuuaagcuagau

SEQ ID NO: 9109 - RNA, 22 nt, Homo sapiens
cugauacugagaccuuggguua

SEQ ID NO: 9110 - RNA, 22 nt, Homo sapiens
uacagucacauuccugaccaua

SEQ ID NO: 9111 - RNA, 22 nt, Homo sapiens
aagugacauugugcccauuuga

SEQ ID NO: 9112 - RNA, 22 nt, Homo sapiens
gugaaagacauauaugguuuga

SEQ ID NO: 9113 - RNA, 22 nt, Homo sapiens
cucacugucaacauguauuugg

SEQ ID NO: 9114 - RNA, 22 nt, Homo sapiens
uaugacauaguccuuaacccuc

SEQ ID NO: 9115 - RNA, 22 nt, Homo sapiens
gugccacugcacuccggccugg

SEQ ID NO: 9116 - RNA, 22 nt, Homo sapiens
agucaagaaucucagcaucuuu

SEQ ID NO: 9117 - RNA, 22 nt, Homo sapiens
aaguaaauauccgguaguccca

SEQ ID NO: 9118 - RNA, 22 nt, Homo sapiens
cauugcacucuagucuggguga

SEQ ID NO: 9119 - RNA, 22 nt, Homo sapiens
gagauauuauuucccuuucaca

SEQ ID NO: 9120 - RNA, 22 nt, Homo sapiens
uuauacucgucugaaugauucu

SEQ ID NO: 9121 - RNA, 22 nt, Homo sapiens
aaagugcugagacagacuggga

SEQ ID NO: 9122 - RNA, 22 nt, Homo sapiens
ugaacagcacguuuauucagaa

SEQ ID NO: 9123 - RNA, 22 nt, Homo sapiens
uguaauuuaaaugauccuugga

SEQ ID NO: 9124 - RNA, 22 nt, Homo sapiens
uuauuagguuaaccuauagcua

SEQ ID NO: 9125 - RNA, 22 nt, Homo sapiens
ccugagacuugagggggcuucu

SEQ ID NO: 9126 - RNA, 22 nt, Homo sapiens
ucaucuggcgaaugugaagagu

SEQ ID NO: 9127 - RNA, 20 nt, Homo sapiens
ucucauggagggaaagagca

SEQ ID NO: 9128 - RNA, 22 nt, Homo sapiens
ggcagcauugccuuugcaguga

SEQ ID NO: 9129 - RNA, 22 nt, Homo sapiens
ugcaaaugcugcuauuucucuu

SEQ ID NO: 9130 - RNA, 21 nt, Homo sapiens
agcagcuuugguugaagcaga

SEQ ID NO: 9131 - RNA, 22 nt, Homo sapiens
agcagagcauauucauucgggg

SEQ ID NO: 9132 - RNA, 22 nt, Homo sapiens
uuaaguuaggcuucagcagucu

SEQ ID NO: 9133 - RNA, 23 nt, Homo sapiens
cuuuguccccacccaaaucucau

SEQ ID NO: 9134 - RNA, 22 nt, Homo sapiens
acugcacuccaguuugggcagc

SEQ ID NO: 9135 - RNA, 22 nt, Homo sapiens
gagacugagucuugcucugucg

SEQ ID NO: 9136 - RNA, 22 nt, Homo sapiens
guucaaguuuucucuugugggu

SEQ ID NO: 9137 - RNA, 22 nt, Homo sapiens
ugaugucuugcaggcacgagau

SEQ ID NO: 9138 - RNA, 22 nt, Homo sapiens
gcugagaucucuugccugaacu

SEQ ID NO: 9139 - RNA, 22 nt, Homo sapiens
guaugucuuuauagcagugugg

SEQ ID NO: 9140 - RNA, 22 nt, Homo sapiens
acugcacuccagccuuggccac

SEQ ID NO: 9141 - RNA, 22 nt, Homo sapiens
uaagugaauuugacagguaaug

SEQ ID NO: 9142 - RNA, 22 nt, Homo sapiens
uaugucuggaguuacugagcug

SEQ ID NO: 9143 - RNA, 22 nt, Homo sapiens
auucacuuuuauagacaggucu

SEQ ID NO: 9144 - RNA, 22 nt, Homo sapiens
gugcacauuguuuaugucuguu

SEQ ID NO: 9145 - RNA, 22 nt, Homo sapiens
auacaguugccauuucuugugc

SEQ ID NO: 9146 - RNA, 22 nt, Homo sapiens
cagagguauugcaaaagccuag

SEQ ID NO: 9147 - RNA, 22 nt, Homo sapiens
accugagauuacaggugcuggc

SEQ ID NO: 9148 - RNA, 22 nt, Homo sapiens
auugucacccgggcaguaagca

SEQ ID NO: 9149 - RNA, 22 nt, Homo sapiens
ucugacacagugauuaguaaau

SEQ ID NO: 9150 - RNA, 22 nt, Homo sapiens
ugaaacauacacucugaugggg

SEQ ID NO: 9151 - RNA, 22 nt, Homo sapiens
augacugucagggcagucauug

SEQ ID NO: 9152 - RNA, 22 nt, Homo sapiens
uacagucauaaugccuagugac

SEQ ID NO: 9153 - RNA, 22 nt, Homo sapiens
caugucuuuuauucugugugau

SEQ ID NO: 9154 - RNA, 22 nt, Homo sapiens
aauaauggcaccaaagcacaag

SEQ ID NO: 9155 - RNA, 22 nt, Homo sapiens
ugaaaguuauauugugaaauuc

SEQ ID NO: 9156 - RNA, 22 nt, Homo sapiens
cauugcacuccagcuugggcga

SEQ ID NO: 9157 - RNA, 22 nt, Homo sapiens
ucuaauguaaccugcaaauauu

SEQ ID NO: 9158 - RNA, 22 nt, Homo sapiens
cucucaagaugcugggauuaca

SEQ ID NO: 9159 - RNA, 22 nt, Homo sapiens
ugagaucacgccacugcacucc

SEQ ID NO: 9160 - RNA, 22 nt, Homo sapiens
ccaguguucuggaaggcugagu

SEQ ID NO: 9161 - RNA, 22 nt, Homo sapiens
uagcaguaaagaaugugauguu

SEQ ID NO: 9162 - RNA, 19 nt, Homo sapiens
ggucacagggguuacaagg

SEQ ID NO: 9163 - RNA, 22 nt, Homo sapiens
uaagugaauauggacaguuagc

SEQ ID NO: 9164 - RNA, 18 nt, Homo sapiens
auugcacaccagccuggg

SEQ ID NO: 9165 - RNA, 22 nt, Homo sapiens
uuccaguuauuauaccucuuaa

SEQ ID NO: 9166 - RNA, 22 nt, Homo sapiens
augucuggcagaagacuucuca

SEQ ID NO: 9167 - RNA, 22 nt, Homo sapiens
uuuguccccgcccagaucucau

SEQ ID NO: 9168 - RNA, 22 nt, Homo sapiens
uaacauuguugauuauacuaag

SEQ ID NO: 9169 - RNA, 22 nt, Homo sapiens
ucagugucugugauggagaggu

SEQ ID NO: 9170 - RNA, 19 nt, Homo sapiens
ugcaaauucuaaaaacuga

SEQ ID NO: 9171 - RNA, 20 nt, Homo sapiens
uauugcacuccagucugggc

SEQ ID NO: 9172 - RNA, 22 nt, Homo sapiens
acuucauucucuggaucagaau

SEQ ID NO: 9173 - RNA, 19 nt, Homo sapiens
uccaccgcgugcaccucua

SEQ ID NO: 9174 - RNA, 20 nt, Homo sapiens
auaugcagacacauacauac

SEQ ID NO: 9175 - RNA, 22 nt, Homo sapiens
ugugucuccugaaaauucacau

SEQ ID NO: 9176 - RNA, 22 nt, Homo sapiens
agacacugaaauguauugaaga

SEQ ID NO: 9177 - RNA, 17 nt, Homo sapiens
ucuaauaauaugcauuu

SEQ ID NO: 9178 - RNA, 22 nt, Homo sapiens
ggaucacuugagaccaggaguu

SEQ ID NO: 9179 - RNA, 22 nt, Homo sapiens
agaucauaugcaguaaugaacu

SEQ ID NO: 9180 - RNA, 22 nt, Homo sapiens
uugcauagaccgaugucuugga

SEQ ID NO: 9181 - RNA, 22 nt, Homo sapiens
uauuccacaauaugauuuuuaa

SEQ ID NO: 9182 - RNA, 22 nt, Homo sapiens
gagacggagucucgcucuguca

SEQ ID NO: 9183 - RNA, 19 nt, Homo sapiens
uggaaugaaauguuagggg

SEQ ID NO: 9184 - RNA, 22 nt, Homo sapiens
cauugcacucuagccucggcaa

SEQ ID NO: 9185 - RNA, 22 nt, Homo sapiens
ugagaugugaagaucacaugaa

SEQ ID NO: 9186 - RNA, 22 nt, Homo sapiens
cccugagaaaacuuuguccuua

SEQ ID NO: 9187 - RNA, 22 nt, Homo sapiens
guggaaugauaucucauugugg

SEQ ID NO: 9188 - RNA, 22 nt, Homo sapiens
agcuggauguauguuaagugaa

SEQ ID NO: 9189 - RNA, 23 nt, Homo sapiens
uaagucacacagauuaauuuauu

SEQ ID NO: 9190 - RNA, 22 nt, Homo sapiens
uauugcacaugaggagacauug

SEQ ID NO: 9191 - RNA, 22 nt, Homo sapiens
auguagugugauuuucacuaga

SEQ ID NO: 9192 - RNA, 22 nt, Homo sapiens
ggaaauguuuagcauccacuuu

SEQ ID NO: 9193 - RNA, 22 nt, Homo sapiens
cucaaguacaugggauuacagg

SEQ ID NO: 9194 - RNA, 22 nt, Homo sapiens
agucacagugaccuugucugac

SEQ ID NO: 9195 - RNA, 22 nt, Homo sapiens
ugagauagggucucacucuguc

SEQ ID NO: 9196 - RNA, 22 nt, Homo sapiens
uccugagaauagaguugcaugu

SEQ ID NO: 9197 - RNA, 22 nt, Homo sapiens
cauugcacuccagccuagccaa

SEQ ID NO: 9198 - RNA, 22 nt, Homo sapiens
guacaguauaguaauaggauuu

SEQ ID NO: 9199 - RNA, 18 nt, Homo sapiens
aaaaagugcucaggccua

SEQ ID NO: 9200 - RNA, 22 nt, Homo sapiens
acaccuguggucccaguaacuu

SEQ ID NO: 9201 - RNA, 22 nt, Homo sapiens
agaauguauauucuguaguugu

SEQ ID NO: 9202 - RNA, 23 nt, Homo sapiens
aggcauuguacaguaauggaaaa

SEQ ID NO: 9203 - RNA, 22 nt, Homo sapiens
caauggcacgaucucgucucac

SEQ ID NO: 9204 - RNA, 22 nt, Homo sapiens
uccugagagcagacccucuaua

SEQ ID NO: 9205 - RNA, 22 nt, Homo sapiens
ucauucauuugcucacuccaca

SEQ ID NO: 9206 - RNA, 22 nt, Homo sapiens
uugcaaugugaugugauuugga

SEQ ID NO: 9207 - RNA, 18 nt, Homo sapiens
uaagugcuuuaaacacau

SEQ ID NO: 9208 - RNA, 22 nt, Homo sapiens
aagugcuucagaagacaauauu

SEQ ID NO: 9209 - RNA, 22 nt, Homo sapiens
auaugcuuauuagcaagaaaua

SEQ ID NO: 9210 - RNA, 20 nt, Homo sapiens
uauucacucuccagucuugc

SEQ ID NO: 9211 - RNA, 22 nt, Homo sapiens
cugguuuguaaaguuccugaga

SEQ ID NO: 9212 - RNA, 22 nt, Homo sapiens
uuacugcucuuuugucaugagu

SEQ ID NO: 9213 - RNA, 22 nt, Homo sapiens
cauugcacuccagcccagguga

SEQ ID NO: 9214 - RNA, 22 nt, Homo sapiens
uagucacacacucaacuuuuca

SEQ ID NO: 9215 - RNA, 22 nt, Homo sapiens
cauugcacuccagucugggcaa

SEQ ID NO: 9216 - RNA, 22 nt, Homo sapiens
agcuggucuacguguguaugag

SEQ ID NO: 9217 - RNA, 22 nt, Homo sapiens
cauugcacugcagcccgggcaa

SEQ ID NO: 9218 - RNA, 22 nt, Homo sapiens
uugucccauggggucuuccuuu

SEQ ID NO: 9219 - RNA, 22 nt, Homo sapiens
uacaugcaugggcaugugugca

SEQ ID NO: 9220 - RNA, 22 nt, Homo sapiens
auagcagugugaaaacagacug

SEQ ID NO: 9221 - RNA, 22 nt, Homo sapiens
uuuauggagagauauuuauggu

SEQ ID NO: 9222 - RNA, 22 nt, Homo sapiens
uacucuuuagcuccuuaaggaa

SEQ ID NO: 9223 - RNA, 22 nt, Homo sapiens
augguuuauuuguaagcagagu

SEQ ID NO: 9224 - RNA, 22 nt, Homo sapiens
uagagguauguauaguauucuu

SEQ ID NO: 9225 - RNA, 22 nt, Homo sapiens
uuaaucaggccguuuccuaaga

SEQ ID NO: 9226 - RNA, 19 nt, Homo sapiens
ccauggcaaugaucugaug

SEQ ID NO: 9227 - RNA, 22 nt, Homo sapiens
uauugauuaauugugauuaggc

SEQ ID NO: 9228 - RNA, 22 nt, Homo sapiens
agccuguguugaauuauagaaa

SEQ ID NO: 9229 - RNA, 19 nt, Homo sapiens
acugcacuccuccuugggu

SEQ ID NO: 9230 - RNA, 22 nt, Homo sapiens
uaagugaauguuggcuacugaa

SEQ ID NO: 9231 - RNA, 22 nt, Homo sapiens
ggucacauuggacuaucaaguu

SEQ ID NO: 9232 - RNA, 22 nt, Homo sapiens
uugugaucauugucaaauagug

SEQ ID NO: 9233 - RNA, 22 nt, Homo sapiens
ucuugggugaguuugugaauaa

SEQ ID NO: 9234 - RNA, 21 nt, Homo sapiens
gacauggcgauacuccgucuc

SEQ ID NO: 9235 - RNA, 17 nt, Homo sapiens
uuucagaguggaagugu

SEQ ID NO: 9236 - RNA, 22 nt, Homo sapiens
uaucacagugcuggaguauucc

SEQ ID NO: 9237 - RNA, 22 nt, Homo sapiens
aauaaagucugaagugugcuua

SEQ ID NO: 9238 - RNA, 16 nt, Homo sapiens
uguauugcuaaaaaga

SEQ ID NO: 9239 - RNA, 22 nt, Homo sapiens
aaagugcugggauuggccgggc

SEQ ID NO: 9240 - RNA, 22 nt, Homo sapiens
gccugagaggauaugauccccu

SEQ ID NO: 9241 - RNA, 22 nt, Homo sapiens
cuucaaguguggccaccugacc

SEQ ID NO: 9242 - RNA, 21 nt, Homo sapiens
agcuaaauuggaaauuucugu

SEQ ID NO: 9243 - RNA, 22 nt, Homo sapiens
ucagaguagaaacacuuccaua

SEQ ID NO: 9244 - RNA, 21 nt, Homo sapiens
caauggcacaaucucugcuca

SEQ ID NO: 9245 - RNA, 22 nt, Homo sapiens
cacaaaguagauuagucuucca

SEQ ID NO: 9246 - RNA, 22 nt, Homo sapiens
uuguaaucaacacaucauuggg

SEQ ID NO: 9247 - RNA, 22 nt, Homo sapiens
aagacuguaauccaucuugagu

SEQ ID NO: 9248 - RNA, 22 nt, Homo sapiens
uugugaaugaugccgcaauaaa

SEQ ID NO: 9249 - RNA, 22 nt, Homo sapiens
uugugaauggugccgcaguaaa

SEQ ID NO: 9250 - RNA, 20 nt, Homo sapiens
guccauuugcugccauugcu

SEQ ID NO: 9251 - RNA, 22 nt, Homo sapiens
cacagaauucauuggauuaccu

SEQ ID NO: 9252 - RNA, 22 nt, Homo sapiens
aguacaauguugaguagaagug

SEQ ID NO: 9253 - RNA, 22 nt, Homo sapiens
uaugucuuuugcuugcaaauag

SEQ ID NO: 9254 - RNA, 22 nt, Homo sapiens
ugcaaauguuaggugucauuau

SEQ ID NO: 9255 - RNA, 22 nt, Homo sapiens
auguauacaugcaggucacagg

SEQ ID NO: 9256 - RNA, 22 nt, Homo sapiens
ucaggcaugcagcaaugcagug

SEQ ID NO: 9257 - RNA, 16 nt, Homo sapiens
cauugcacucuagccu

SEQ ID NO: 9258 - RNA, 22 nt, Homo sapiens
agauggguuuucacauguuggc

SEQ ID NO: 9259 - RNA, 22 nt, Homo sapiens
ucugugaaugaacacuugaaaa

SEQ ID NO: 9260 - RNA, 21 nt, Homo sapiens
gagguaccucauguaagugga

SEQ ID NO: 9261 - RNA, 21 nt, Homo sapiens
uuggggaauggagagguuuuc

SEQ ID NO: 9262 - RNA, 22 nt, Homo sapiens
auaacucuguuuuuuucaugca

SEQ ID NO: 9263 - RNA, 19 nt, Homo sapiens
uacauaguauuuaguggca

SEQ ID NO: 9264 - RNA, 22 nt, Homo sapiens
aaagugcugagauuguaggcau

SEQ ID NO: 9265 - RNA, 22 nt, Homo sapiens
ugaggaacuagcuacccuaaua

SEQ ID NO: 9266 - RNA, 22 nt, Homo sapiens
auauuggccuaaaauucucuuu

SEQ ID NO: 9267 - RNA, 22 nt, Homo sapiens
uagcaguauaugagagcuauug

SEQ ID NO: 9268 - RNA, 22 nt, Homo sapiens
auuaagugcuugccagugcugg

SEQ ID NO: 9269 - RNA, 22 nt, Homo sapiens
aacacuaucugccuuacaggga

SEQ ID NO: 9270 - RNA, 22 nt, Homo sapiens
uggauaguaauaaacauauagg

SEQ ID NO: 9271 - RNA, 23 nt, Homo sapiens
aggaauggaaaaccaaguaucau

SEQ ID NO: 9272 - RNA, 18 nt, Homo sapiens
agagcacugaguuuuaga

SEQ ID NO: 9273 - RNA, 22 nt, Homo sapiens
uuugaauggaaguuuugugaaa

SEQ ID NO: 9274 - RNA, 22 nt, Homo sapiens
uuggcagcacgcaguccagagg

SEQ ID NO: 9275 - RNA, 22 nt, Homo sapiens
aggugaaugcucacauucuaau

SEQ ID NO: 9276 - RNA, 20 nt, Homo sapiens
uccugagauucccaguucuc

SEQ ID NO: 9277 - RNA, 22 nt, Homo sapiens
ucuucaugcuugaaauaauagc

SEQ ID NO: 9278 - RNA, 22 nt, Homo sapiens
uuaucauagugcaguuuucuga

SEQ ID NO: 9279 - RNA, 22 nt, Homo sapiens
ucuagccuaugaagcuugucca

SEQ ID NO: 9280 - RNA, 22 nt, Homo sapiens
ucauucauucauccagcuugag

SEQ ID NO: 9281 - RNA, 22 nt, Homo sapiens
ugugauaguuggcuaaagcagu

SEQ ID NO: 9282 - RNA, 22 nt, Homo sapiens
cagucacagugacaggaugugg

SEQ ID NO: 9283 - RNA, 23 nt, Homo sapiens
ggaguguauuggcacgaucucag

SEQ ID NO: 9284 - RNA, 22 nt, Homo sapiens
gugccacugcaccuggccuaag

SEQ ID NO: 9285 - RNA, 22 nt, Homo sapiens
aucaaaguuucccagaaguugu

SEQ ID NO: 9286 - RNA, 22 nt, Homo sapiens
aacagugcuguuauaaauguac

SEQ ID NO: 9287 - RNA, 22 nt, Homo sapiens
uucauguaauauuucacagcuu

SEQ ID NO: 9288 - RNA, 22 nt, Homo sapiens
acugcacuucagccuuggcuac

SEQ ID NO: 9289 - RNA, 22 nt, Homo sapiens
ugcuaugucagccaggcugguc

SEQ ID NO: 9290 - RNA, 22 nt, Homo sapiens
ugaaauuauucuuaccaaggug

SEQ ID NO: 9291 - RNA, 22 nt, Homo sapiens
ugagauguggcuagagagguug

SEQ ID NO: 9292 - RNA, 22 nt, Homo sapiens
guaaucucaccuacuugggagg

SEQ ID NO: 9293 - RNA, 22 nt, Homo sapiens
aagagguagucugucccuuagc

SEQ ID NO: 9294 - RNA, 22 nt, Homo sapiens
guggacaugaauuuuggaggca

SEQ ID NO: 9295 - RNA, 22 nt, Homo sapiens
aauacugugauaucgagcgauu

SEQ ID NO: 9296 - RNA, 22 nt, Homo sapiens
ucagacacugcccuccaccugu

SEQ ID NO: 9297 - RNA, 23 nt, Homo sapiens
uucaucagggauauuggccugaa

SEQ ID NO: 9298 - RNA, 22 nt, Homo sapiens
uagcaguaccccaguauccugg

SEQ ID NO: 9299 - RNA, 22 nt, Homo sapiens
uuucauggaggauuugcuucuu

SEQ ID NO: 9300 - RNA, 22 nt, Homo sapiens
uauugcucaugcauuuaauuuc

SEQ ID NO: 9301 - RNA, 22 nt, Homo sapiens
gucaugucugcacauaguaaaa

SEQ ID NO: 9302 - RNA, 22 nt, Homo sapiens
cuuugguguauuuucagagacc

SEQ ID NO: 9303 - RNA, 22 nt, Homo sapiens
aauugcaccaucuagaucaaga

SEQ ID NO: 9304 - RNA, 22 nt, Homo sapiens
ucugucuugugguuugagugcc

SEQ ID NO: 9305 - RNA, 22 nt, Homo sapiens
ucacugugguuuugaugugcau

SEQ ID NO: 9306 - RNA, 22 nt, Homo sapiens
uggcaaaugaaagaaagccagu

SEQ ID NO: 9307 - RNA, 22 nt, Homo sapiens
guugcucaggcuggagugcagu

SEQ ID NO: 9308 - RNA, 22 nt, Homo sapiens
ucaagcaauucuccucucagcc

SEQ ID NO: 9309 - RNA, 22 nt, Homo sapiens
auugcacaccagucugggcaaa

SEQ ID NO: 9310 - RNA, 22 nt, Homo sapiens
guauggaagucaguuuguuggc

SEQ ID NO: 9311 - RNA, 22 nt, Homo sapiens
ucucagugaauguggaaaaagc

SEQ ID NO: 9312 - RNA, 22 nt, Homo sapiens
augucaaagaggaaaacuggau

SEQ ID NO: 9313 - RNA, 22 nt, Homo sapiens
uucacaguacucccuggaauua

SEQ ID NO: 9314 - RNA, 18 nt, Homo sapiens
ccuuaguuauagagaguc

SEQ ID NO: 9315 - RNA, 22 nt, Homo sapiens
auguaauguuaaauugcuaauu

SEQ ID NO: 9316 - RNA, 22 nt, Homo sapiens
agcaguguggccuuagacccgg

SEQ ID NO: 9317 - RNA, 22 nt, Homo sapiens
ggcacuguggcucaagccugua

SEQ ID NO: 9318 - RNA, 22 nt, Homo sapiens
agaugguauuauagguuucugu

SEQ ID NO: 9319 - RNA, 22 nt, Homo sapiens
augaguaugagaauacauuaag

SEQ ID NO: 9320 - RNA, 22 nt, Homo sapiens
auacaagugccauguuggugug

SEQ ID NO: 9321 - RNA, 22 nt, Homo sapiens
caaaggauucauuuccaggagu

SEQ ID NO: 9322 - RNA, 22 nt, Homo sapiens
cauugcacuccagccugaccaa

SEQ ID NO: 9323 - RNA, 22 nt, Homo sapiens
gagacugagucuugcucuguca

SEQ ID NO: 9324 - RNA, 22 nt, Homo sapiens
aaagugaauguaucccguaagu

SEQ ID NO: 9325 - RNA, 23 nt, Homo sapiens
ucgcagcauucaauaccaggcag

SEQ ID NO: 9326 - RNA, 22 nt, Homo sapiens
gugacugcauccauccaggcuu

SEQ ID NO: 9327 - RNA, 22 nt, Homo sapiens
ugacaugauuguauauuuagaa

SEQ ID NO: 9328 - RNA, 22 nt, Homo sapiens
uugaaauguuuagaaguuugga

SEQ ID NO: 9329 - RNA, 22 nt, Homo sapiens
uugaaagcuaucucaaaucgcu

SEQ ID NO: 9330 - RNA, 22 nt, Homo sapiens
aagugcuuuuuagauaugguuu

SEQ ID NO: 9331 - RNA, 22 nt, Homo sapiens
gagcaucaguggccucaucuca

SEQ ID NO: 9332 - RNA, 22 nt, Homo sapiens
uuuuaguggaauauuuacaguu

SEQ ID NO: 9333 - RNA, 18 nt, Homo sapiens
acugcacuccaccuuggg

SEQ ID NO: 9334 - RNA, 21 nt, Homo sapiens
uuacaauggcuccuugaaggu

SEQ ID NO: 9335 - RNA, 22 nt, Homo sapiens
aggaucauugacuauuauaagg

SEQ ID NO: 9336 - RNA, 22 nt, Homo sapiens
cugacuuuagaacccaaaaagu

SEQ ID NO: 9337 - RNA, 22 nt, Homo sapiens
ugugccacugcacucccgccug

SEQ ID NO: 9338 - RNA, 20 nt, Homo sapiens
guucauguaauuaguucagg

SEQ ID NO: 9339 - RNA, 22 nt, Homo sapiens
uuaaauacagcaugguguuucu

SEQ ID NO: 9340 - RNA, 22 nt, Homo sapiens
cuuuuggcuuagaauugucuug

SEQ ID NO: 9341 - RNA, 22 nt, Homo sapiens
gagauacuugguuucuguuucu

SEQ ID NO: 9342 - RNA, 22 nt, Homo sapiens
uuggccagugucuuuuuuuccu

SEQ ID NO: 9343 - RNA, 22 nt, Homo sapiens
uugaaagucuaggcuuacagua

SEQ ID NO: 9344 - RNA, 22 nt, Homo sapiens
uuugucccucucaccaacgggg

SEQ ID NO: 9345 - RNA, 19 nt, Homo sapiens
ucgcgccauucuccugccu

SEQ ID NO: 9346 - RNA, 22 nt, Homo sapiens
uuuaaagcaugacgagaagaag

SEQ ID NO: 9347 - RNA, 22 nt, Homo sapiens
caaaagugguucuuauccuuuu

SEQ ID NO: 9348 - RNA, 22 nt, Homo sapiens
ugcgccauugcacuccagccug

SEQ ID NO: 9349 - RNA, 20 nt, Homo sapiens
ggaauagucuacacucugac

SEQ ID NO: 9350 - RNA, 22 nt, Homo sapiens
uuggcuuggagaguugaaaugu

SEQ ID NO: 9351 - RNA, 22 nt, Homo sapiens
ucagaguagagcgacuucuccu

SEQ ID NO: 9352 - RNA, 22 nt, Homo sapiens
ggagaugauuaugaaucacuua

SEQ ID NO: 9353 - RNA, 22 nt, Homo sapiens
uggaguguguugcagaugaagg

SEQ ID NO: 9354 - RNA, 22 nt, Homo sapiens
ugaugacauugucacagucuga

SEQ ID NO: 9355 - RNA, 22 nt, Homo sapiens
cuguaugugagaaauaauaagu

SEQ ID NO: 9356 - RNA, 22 nt, Homo sapiens
uagcaguagacagacuuuggcu

SEQ ID NO: 9357 - RNA, 22 nt, Homo sapiens
uaaucacagagguuuggccuca

SEQ ID NO: 9358 - RNA, 22 nt, Homo sapiens
uuguaaacaucuguacauugcu

SEQ ID NO: 9359 - RNA, 22 nt, Homo sapiens
uugaaagacagaggggcaaguu

SEQ ID NO: 9360 - RNA, 22 nt, Homo sapiens
cuggauauguugcaacauuucc

SEQ ID NO: 9361 - RNA, 22 nt, Homo sapiens
gugucccagugugcauacaggu

SEQ ID NO: 9362 - RNA, 22 nt, Homo sapiens
uuauucauuaauugcuaagguu

SEQ ID NO: 9363 - RNA, 22 nt, Homo sapiens
cauugcacuccagcucugggcg

SEQ ID NO: 9364 - RNA, 22 nt, Homo sapiens
uuauuagguugguggaaaagua

SEQ ID NO: 9365 - RNA, 22 nt, Homo sapiens
uggcaccauccaggugucucua

SEQ ID NO: 9366 - RNA, 22 nt, Homo sapiens
augggaaaaucagaaggccugg

SEQ ID NO: 9367 - RNA, 22 nt, Homo sapiens
auaagauaguggaagugggauu

SEQ ID NO: 9368 - RNA, 22 nt, Homo sapiens
uaugucuucuuuagagaaaugu

SEQ ID NO: 9369 - RNA, 22 nt, Homo sapiens
uugacuucagagcugauucaag

SEQ ID NO: 9370 - RNA, 22 nt, Homo sapiens
uugucuccuagacgaccaggcg

SEQ ID NO: 9371 - RNA, 22 nt, Homo sapiens
cugucucagccucuccaguagc

SEQ ID NO: 9372 - RNA, 22 nt, Homo sapiens
uucaguccauuuccuuggucac

SEQ ID NO: 9373 - RNA, 22 nt, Homo sapiens
acacuggaguuaaaggugauuu

SEQ ID NO: 9374 - RNA, 22 nt, Homo sapiens
ucgcgccauucuccugccucag

SEQ ID NO: 9375 - RNA, 17 nt, Homo sapiens
auaugucugcuggggga

SEQ ID NO: 9376 - RNA, 22 nt, Homo sapiens
auagcagugugaaaauguacua

SEQ ID NO: 9377 - RNA, 22 nt, Homo sapiens
agcaguacauaaaaagcauccu

SEQ ID NO: 9378 - RNA, 22 nt, Homo sapiens
guggaagaccagacuuuccaac

SEQ ID NO: 9379 - RNA, 20 nt, Homo sapiens
uaagugcauaggauauuucu

SEQ ID NO: 9380 - RNA, 22 nt, Homo sapiens
auacaagcaguccaacuccaua

SEQ ID NO: 9381 - RNA, 22 nt, Homo sapiens
accaugcaguccaauaugcaca

SEQ ID NO: 9382 - RNA, 22 nt, Homo sapiens
uugcacauggcaggugcucaau

SEQ ID NO: 9383 - RNA, 22 nt, Homo sapiens
uacgccuguaauaucagcauuu

SEQ ID NO: 9384 - RNA, 22 nt, Homo sapiens
aucucuugccagucagaauggu

SEQ ID NO: 9385 - RNA, 22 nt, Homo sapiens
auggaagaauugucggggaugu

SEQ ID NO: 9386 - RNA, 22 nt, Homo sapiens
uugagacggaguuuugcucuug

SEQ ID NO: 9387 - RNA, 22 nt, Homo sapiens
aaucacacuugauguugagcaa

SEQ ID NO: 9388 - RNA, 22 nt, Homo sapiens
uagcaguauacguacugggucc

SEQ ID NO: 9389 - RNA, 22 nt, Homo sapiens
ggagcugugauuugaguccaga

SEQ ID NO: 9390 - RNA, 22 nt, Homo sapiens
ucacuuugacggccaacuucua

SEQ ID NO: 9391 - RNA, 22 nt, Homo sapiens
uaagguccuuaaauguguaacc

SEQ ID NO: 9392 - RNA, 22 nt, Homo sapiens
caagugcuuucuuggggauuua

SEQ ID NO: 9393 - RNA, 22 nt, Homo sapiens
uuguaaaguucucucccgaaaa

SEQ ID NO: 9394 - RNA, 22 nt, Homo sapiens
guaaucucagcuacucaggagg

SEQ ID NO: 9395 - RNA, 20 nt, Homo sapiens
aagugcuuccuuuuagaggg

SEQ ID NO: 9396 - RNA, 22 nt, Homo sapiens
agguagcauagcgggaauauca

SEQ ID NO: 9397 - RNA, 22 nt, Homo sapiens
uucuggaaaucagcagagggug

SEQ ID NO: 9398 - RNA, 22 nt, Homo sapiens
uuccaugugggcuugucaagua

SEQ ID NO: 9399 - RNA, 22 nt, Homo sapiens
uuccaguguguucauccucaga

SEQ ID NO: 9400 - RNA, 22 nt, Homo sapiens
cugccacugacaccucaaggac

SEQ ID NO: 9401 - RNA, 22 nt, Homo sapiens
aaauugcuuuugaagacuuagu

SEQ ID NO: 9402 - RNA, 22 nt, Homo sapiens
caagugaauaguugcucucaga

SEQ ID NO: 9403 - RNA, 22 nt, Homo sapiens
ggcuuggaggaaugugagggcu

SEQ ID NO: 9404 - RNA, 22 nt, Homo sapiens
uagagguagagugacuucccca

SEQ ID NO: 9405 - RNA, 22 nt, Homo sapiens
ucuuuggucuacuuucauaugu

SEQ ID NO: 9406 - RNA, 22 nt, Homo sapiens
uggcaaaaaucacaaguaccuu

SEQ ID NO: 9407 - RNA, 22 nt, Homo sapiens
ucauugcauguuaauuaaacag

SEQ ID NO: 9408 - RNA, 22 nt, Homo sapiens
guucaagugauagcugggauua

SEQ ID NO: 9409 - RNA, 22 nt, Homo sapiens
uaacagcucuacagcugcucuu

SEQ ID NO: 9410 - RNA, 19 nt, Homo sapiens
auacacguguauacauaca

SEQ ID NO: 9411 - RNA, 22 nt, Homo sapiens
uucuccugguggacccuaaacg

SEQ ID NO: 9412 - RNA, 22 nt, Homo sapiens
guaugucuugucuauggcugcu

SEQ ID NO: 9413 - RNA, 22 nt, Homo sapiens
uaggcagccagcuguggauuga

SEQ ID NO: 9414 - RNA, 19 nt, Homo sapiens
ucauagucuaagaugagaa

SEQ ID NO: 9415 - RNA, 22 nt, Homo sapiens
uucauggaacaaguggguucaa

SEQ ID NO: 9416 - RNA, 22 nt, Homo sapiens
ugugccacugcacuccugccug

SEQ ID NO: 9417 - RNA, 18 nt, Homo sapiens
acauucagcuugaagaua

SEQ ID NO: 9418 - RNA, 21 nt, Homo sapiens
ccauggcaaugguaaacugac

SEQ ID NO: 9419 - RNA, 22 nt, Homo sapiens
accaguuuuuuauacaucuucu

SEQ ID NO: 9420 - RNA, 22 nt, Homo sapiens
augaccaaugggcagagcuaga

SEQ ID NO: 9421 - RNA, 22 nt, Homo sapiens
gugaaaagaugagcaccauaca

SEQ ID NO: 9422 - RNA, 22 nt, Homo sapiens
acauguaauugauuuuguguua

SEQ ID NO: 9423 - RNA, 22 nt, Homo sapiens
aaagugcuucucuuuggugggu

SEQ ID NO: 9424 - RNA, 22 nt, Homo sapiens
uuccuggagaguuuucccaaag

SEQ ID NO: 9425 - RNA, 22 nt, Homo sapiens
gugucaugagggggacaggaag

SEQ ID NO: 9426 - RNA, 22 nt, Homo sapiens
uauuccuuuugcauuuccacau

SEQ ID NO: 9427 - RNA, 22 nt, Homo sapiens
auugcaaagcguagacucuaaa

SEQ ID NO: 9428 - RNA, 22 nt, Homo sapiens
aucacuguuuugaugcucggac

SEQ ID NO: 9429 - RNA, 22 nt, Homo sapiens
uggaaugugaauaacuuccuuc

SEQ ID NO: 9430 - RNA, 22 nt, Homo sapiens
aagugcuuuguacagggguuga

SEQ ID NO: 9431 - RNA, 22 nt, Homo sapiens
ugagacacuucccagaucccuu

SEQ ID NO: 9432 - RNA, 22 nt, Homo sapiens
gcugcacuuuaaggcauccccu

SEQ ID NO: 9433 - RNA, 22 nt, Homo sapiens
auuauugcucccaauuuuucac

SEQ ID NO: 9434 - RNA, 22 nt, Homo sapiens
gauuuuccaguggcccugauca

SEQ ID NO: 9435 - RNA, 22 nt, Homo sapiens
agcagguguccacaauguuugc

SEQ ID NO: 9436 - RNA, 22 nt, Homo sapiens
gcaggcaugacauuucacucuu

SEQ ID NO: 9437 - RNA, 21 nt, Homo sapiens
auuguauguaaaccaaaugag

SEQ ID NO: 9438 - RNA, 22 nt, Homo sapiens
uggacauguacauauguguaug

SEQ ID NO: 9439 - RNA, 22 nt, Homo sapiens
cauugcacuccagccuugguga

SEQ ID NO: 9440 - RNA, 22 nt, Homo sapiens
uauuaguuuucuguggauuaca

SEQ ID NO: 9441 - RNA, 22 nt, Homo sapiens
auacuguuuuacaucauugccu

SEQ ID NO: 9442 - RNA, 22 nt, Homo sapiens
gugagauaucuagacuagggaa

SEQ ID NO: 9443 - RNA, 20 nt, Homo sapiens
uuccagcacauuagggaagc

SEQ ID NO: 9444 - RNA, 22 nt, Homo sapiens
ugcaugaugcugagauuuggga

SEQ ID NO: 9445 - RNA, 23 nt, Homo sapiens
aaauuugccuauuauuccuaugg

SEQ ID NO: 9446 - RNA, 22 nt, Homo sapiens
uagcagguguuccacaaauauu

SEQ ID NO: 9447 - RNA, 22 nt, Homo sapiens
auggcuuuuuaaaucauguugu

SEQ ID NO: 9448 - RNA, 22 nt, Homo sapiens
uucaugucuuggcuguuagagu

SEQ ID NO: 9449 - RNA, 20 nt, Homo sapiens
auuguccuugauuacacaga

SEQ ID NO: 9450 - RNA, 22 nt, Homo sapiens
cugugcuugagagaugacacag

SEQ ID NO: 9451 - RNA, 22 nt, Homo sapiens
agagugaagcuuuuuauauucu

SEQ ID NO: 9452 - RNA, 22 nt, Homo sapiens
ugugccacugcacucuggccug

SEQ ID NO: 9453 - RNA, 22 nt, Homo sapiens
uaagugaauuucacuacugagu

SEQ ID NO: 9454 - RNA, 22 nt, Homo sapiens
uaaguagaggaaucauuuugug

SEQ ID NO: 9455 - RNA, 22 nt, Homo sapiens
cuggugauugguuucauucagu

SEQ ID NO: 9456 - RNA, 22 nt, Homo sapiens
uaagucacuccagguuaaagug

SEQ ID NO: 9457 - RNA, 20 nt, Homo sapiens
uaucacaguucaggaacucu

SEQ ID NO: 9458 - RNA, 22 nt, Homo sapiens
aagagaugaagguccugacugu

SEQ ID NO: 9459 - RNA, 22 nt, Homo sapiens
augaaaagcauaaacgcugaag

SEQ ID NO: 9460 - RNA, 20 nt, Homo sapiens
uaagugcuuuauauugauua

SEQ ID NO: 9461 - RNA, 22 nt, Homo sapiens
ucucauggagucaggagcagaa

SEQ ID NO: 9462 - RNA, 22 nt, Homo sapiens
ucagacacuguggccuuuggac

SEQ ID NO: 9463 - RNA, 22 nt, Homo sapiens
ugucacaguuuguacuuuauag

SEQ ID NO: 9464 - RNA, 22 nt, Homo sapiens
ugagaugcauauucuggcuccu

SEQ ID NO: 9465 - RNA, 22 nt, Homo sapiens
uagagguagguguaugaacuag

SEQ ID NO: 9466 - RNA, 22 nt, Homo sapiens
cucagcuacuugggaagcugag

SEQ ID NO: 9467 - RNA, 22 nt, Homo sapiens
ucuuuuggguauggagccauca

SEQ ID NO: 9468 - RNA, 22 nt, Homo sapiens
aauaaagcagcuuuuugggacu

SEQ ID NO: 9469 - RNA, 22 nt, Homo sapiens
uaauccuagcacuuuggaagac

SEQ ID NO: 9470 - RNA, 22 nt, Homo sapiens
ugggagacuacauuuuuaacaa

SEQ ID NO: 9471 - RNA, 22 nt, Homo sapiens
uaggugaaugcuggaagaaaug

SEQ ID NO: 9472 - RNA, 22 nt, Homo sapiens
guggaaaauuauugcuguuuuu

SEQ ID NO: 9473 - RNA, 22 nt, Homo sapiens
acugcacuccagccuuggcaac

SEQ ID NO: 9474 - RNA, 22 nt, Homo sapiens
ugugaacauuuuguauauauua

SEQ ID NO: 9475 - RNA, 22 nt, Homo sapiens
uugcacauggcuggggaggccu

SEQ ID NO: 9476 - RNA, 22 nt, Homo sapiens
uagagguauaccaaaaaggcau

SEQ ID NO: 9477 - RNA, 22 nt, Homo sapiens
uaaacugucuugcaguuacaug

SEQ ID NO: 9478 - RNA, 22 nt, Homo sapiens
ugucacagagauuuugguaugu

SEQ ID NO: 9479 - RNA, 22 nt, Homo sapiens
cauugcacuuagacaacuuuug

SEQ ID NO: 9480 - RNA, 22 nt, Homo sapiens
uuugucccuuugcaguggcaca

SEQ ID NO: 9481 - RNA, 22 nt, Homo sapiens
guuggcaaguggcugagcuggg

SEQ ID NO: 9482 - RNA, 22 nt, Homo sapiens
cuaugagucugcagaucuauua

SEQ ID NO: 9483 - RNA, 22 nt, Homo sapiens
cucauugcaaucuccaccuccc

SEQ ID NO: 9484 - RNA, 22 nt, Homo sapiens
ccugagacgaauggagugaaca

SEQ ID NO: 9485 - RNA, 22 nt, Homo sapiens
cagcuaaauuguuaaauccaag

SEQ ID NO: 9486 - RNA, 22 nt, Homo sapiens
uugcaaagaccucuucacuucc

SEQ ID NO: 9487 - RNA, 22 nt, Homo sapiens
uugccuaggcuggaguucagug

SEQ ID NO: 9488 - RNA, 18 nt, Homo sapiens
ucuggcuucuuuguucca

SEQ ID NO: 9489 - RNA, 22 nt, Homo sapiens
auuacacuuucuauucaaugag

SEQ ID NO: 9490 - RNA, 22 nt, Homo sapiens
cacauugcaggaaaguucauua

SEQ ID NO: 9491 - RNA, 22 nt, Homo sapiens
uugcauaagugcauucugugau

SEQ ID NO: 9492 - RNA, 22 nt, Homo sapiens
ugagaugugugcauucaacuca

SEQ ID NO: 9493 - RNA, 18 nt, Homo sapiens
auauugcauuggauggau

SEQ ID NO: 9494 - RNA, 22 nt, Homo sapiens
guguccucgaguacacaucagg

SEQ ID NO: 9495 - RNA, 23 nt, Homo sapiens
ugagauuauaaucuuuuacuucu

SEQ ID NO: 9496 - RNA, 22 nt, Homo sapiens
acaagacuucuuguauucuagu

SEQ ID NO: 9497 - RNA, 22 nt, Homo sapiens
uaagugaaggaaguguguuuac

SEQ ID NO: 9498 - RNA, 20 nt, Homo sapiens
uaagugcuugagacuucuga

SEQ ID NO: 9499 - RNA, 22 nt, Homo sapiens
cucaguuuugccuuguuuaagg

SEQ ID NO: 9500 - RNA, 22 nt, Homo sapiens
uauugcacgccagccugagcaa

SEQ ID NO: 9501 - RNA, 22 nt, Homo sapiens
ccuucuuuuguaaggcugaaua

SEQ ID NO: 9502 - RNA, 22 nt, Homo sapiens
uccugagacugaggagcuuugg

SEQ ID NO: 9503 - RNA, 22 nt, Homo sapiens
accuggcacuuagcaaaucuga

SEQ ID NO: 9504 - RNA, 22 nt, Homo sapiens
gauggcacuaagccauguagga

SEQ ID NO: 9505 - RNA, 22 nt, Homo sapiens
caggugcuuacuuaauagccau

SEQ ID NO: 9506 - RNA, 22 nt, Homo sapiens
auucaaagugcauguucccacu

SEQ ID NO: 9507 - RNA, 22 nt, Homo sapiens
auggcacagaguagaugcucaa

SEQ ID NO: 9508 - RNA, 22 nt, Homo sapiens
cauugcacuccagccugccugg

SEQ ID NO: 9509 - RNA, 20 nt, Homo sapiens
cuggaugucgaggcagaggu

SEQ ID NO: 9510 - RNA, 22 nt, Homo sapiens
ugaaauuguuugcaaggauagg

SEQ ID NO: 9511 - RNA, 22 nt, Homo sapiens
guaaucucagcuacucgggagg

SEQ ID NO: 9512 - RNA, 22 nt, Homo sapiens
aaaugcauaucaagauugcccu

SEQ ID NO: 9513 - RNA, 22 nt, Homo sapiens
ucagguccuuacugugcucccu

SEQ ID NO: 9514 - RNA, 22 nt, Homo sapiens
auaugucuuaguuaccuugggc

SEQ ID NO: 9515 - RNA, 22 nt, Homo sapiens
cauugcacuccaccuuggguaa

SEQ ID NO: 9516 - RNA, 22 nt, Homo sapiens
gcagucacagggagauggugac

SEQ ID NO: 9517 - RNA, 22 nt, Homo sapiens
uuggcagcuguggaaucugggc

SEQ ID NO: 9518 - RNA, 22 nt, Homo sapiens
uucauagucuaugcaaguaaga

SEQ ID NO: 9519 - RNA, 22 nt, Homo sapiens
guggaaaaguaguugcgguuuu

SEQ ID NO: 9520 - RNA, 22 nt, Homo sapiens
uaucacaggucaggaaccuugu

SEQ ID NO: 9521 - RNA, 22 nt, Homo sapiens
agucacagguucuugggauuag

SEQ ID NO: 9522 - RNA, 20 nt, Homo sapiens
guucacaggcuuccuuucag

SEQ ID NO: 9523 - RNA, 22 nt, Homo sapiens
gugugcucaucacaugcaauag

SEQ ID NO: 9524 - RNA, 22 nt, Homo sapiens
caaaagugauugcgguuuuugc

SEQ ID NO: 9525 - RNA, 17 nt, Homo sapiens
gugagguauccucaaaa

SEQ ID NO: 9526 - RNA, 22 nt, Homo sapiens
uugaauagaagguuuuuuguuc

SEQ ID NO: 9527 - RNA, 22 nt, Homo sapiens
aggacacugauguaugcugugg

SEQ ID NO: 9528 - RNA, 22 nt, Homo sapiens
cauugcacuccaucccgggaaa

SEQ ID NO: 9529 - RNA, 22 nt, Homo sapiens
cauacagcuaguaaguguaaga

SEQ ID NO: 9530 - RNA, 21 nt, Homo sapiens
uccugagagaggaguaacucu

SEQ ID NO: 9531 - RNA, 19 nt, Homo sapiens
uacccagaagcagcauugu

SEQ ID NO: 9532 - RNA, 22 nt, Homo sapiens
cugagauggagucucgcauugu

SEQ ID NO: 9533 - RNA, 22 nt, Homo sapiens
augauguaggccauggguuucu

SEQ ID NO: 9534 - RNA, 22 nt, Homo sapiens
ggguucaaaucuuggcucuuac

SEQ ID NO: 9535 - RNA, 22 nt, Homo sapiens
acugcacuccacccuuggcagc

SEQ ID NO: 9536 - RNA, 22 nt, Homo sapiens
auaugucuauuauuagggcagg

SEQ ID NO: 9537 - RNA, 22 nt, Homo sapiens
uauuguacauguuauagauuuu

SEQ ID NO: 9538 - RNA, 20 nt, Homo sapiens
ugugauuauuuaguugcaug

SEQ ID NO: 9539 - RNA, 22 nt, Homo sapiens
uuagugaaugcaccacuucuga

SEQ ID NO: 9540 - RNA, 22 nt, Homo sapiens
aaauugcauugagcugcuuauu

SEQ ID NO: 9541 - RNA, 22 nt, Homo sapiens
auuccauuuguuaucacacccg

SEQ ID NO: 9542 - RNA, 20 nt, Homo sapiens
augaagugaaguuagggaac

SEQ ID NO: 9543 - RNA, 22 nt, Homo sapiens
uaguuauggaguaauuuuaagc

SEQ ID NO: 9544 - RNA, 22 nt, Homo sapiens
uagacacuagauaugugacuga

SEQ ID NO: 9545 - RNA, 22 nt, Homo sapiens
ugaauguaagaugucugcuggu

SEQ ID NO: 9546 - RNA, 22 nt, Homo sapiens
agaacuguccauucagcaugaa

SEQ ID NO: 9547 - RNA, 22 nt, Homo sapiens
guggaagaaaucagguuauuug

SEQ ID NO: 9548 - RNA, 22 nt, Homo sapiens
ugcauccauucuagacucaucu

SEQ ID NO: 9549 - RNA, 22 nt, Homo sapiens
gcauggccuuuaaaugucacag

SEQ ID NO: 9550 - RNA, 21 nt, Homo sapiens
uaucacaguagaauaggaucu

SEQ ID NO: 9551 - RNA, 22 nt, Homo sapiens
ucaggcuuuucccagagugaug

SEQ ID NO: 9552 - RNA, 22 nt, Homo sapiens
guggaauggaaugauuguguau

SEQ ID NO: 9553 - RNA, 22 nt, Homo sapiens
aauacuggcacugaagaccaug

SEQ ID NO: 9554 - RNA, 21 nt, Homo sapiens
ugugaccucugucucugaguc

SEQ ID NO: 9555 - RNA, 22 nt, Homo sapiens
aagcaggugucugugucuguaa

SEQ ID NO: 9556 - RNA, 22 nt, Homo sapiens
gcaguggugugugccagccuag

SEQ ID NO: 9557 - RNA, 22 nt, Homo sapiens
ucuggcuugugaacugucuucu

SEQ ID NO: 9558 - RNA, 22 nt, Homo sapiens
ugagaucaugccacugcacuuc

SEQ ID NO: 9559 - RNA, 22 nt, Homo sapiens
uugaaagaugaacuggauugga

SEQ ID NO: 9560 - RNA, 22 nt, Homo sapiens
cccugagagcagggucuuucuc

SEQ ID NO: 9561 - RNA, 22 nt, Homo sapiens
cucaaguaauccucccgccuug

SEQ ID NO: 9562 - RNA, 22 nt, Homo sapiens
uggaaugucagcuacaagaggg

SEQ ID NO: 9563 - RNA, 22 nt, Homo sapiens
uuugguaguuuguugggaccca

SEQ ID NO: 9564 - RNA, 21 nt, Homo sapiens
uaaagcuuagcuauaguggcu

SEQ ID NO: 9565 - RNA, 22 nt, Homo sapiens
ugaguuagguaauaauaaauau

SEQ ID NO: 9566 - RNA, 18 nt, Homo sapiens
uaaauugcuucaccugag

SEQ ID NO: 9567 - RNA, 22 nt, Homo sapiens
aacacggcccgcagagcaagcu

SEQ ID NO: 9568 - RNA, 22 nt, Homo sapiens
ugccuaguagaaggugaacaug

SEQ ID NO: 9569 - RNA, 22 nt, Homo sapiens
ugugaacacagaggcuauggca

SEQ ID NO: 9570 - RNA, 22 nt, Homo sapiens
aacagugcauuccuguccauau

SEQ ID NO: 9571 - RNA, 22 nt, Homo sapiens
ugucaugaacucacauucuggg

SEQ ID NO: 9572 - RNA, 22 nt, Homo sapiens
aucccagaaacucggguuucuc

SEQ ID NO: 9573 - RNA, 22 nt, Homo sapiens
auccaucagacggcaggcguug

SEQ ID NO: 9574 - RNA, 22 nt, Homo sapiens
uagagguaggucuucgagucuc

SEQ ID NO: 9575 - RNA, 18 nt, Homo sapiens
uucuuguguugauauuuu

SEQ ID NO: 9576 - RNA, 22 nt, Homo sapiens
ugauugcacaccugcacucaag

SEQ ID NO: 9577 - RNA, 22 nt, Homo sapiens
aucacuguaaguuuacacuuug

SEQ ID NO: 9578 - RNA, 22 nt, Homo sapiens
aaagucuguuacagcuauuucu

SEQ ID NO: 9579 - RNA, 22 nt, Homo sapiens
uuaaucuguucucuguauucua

SEQ ID NO: 9580 - RNA, 22 nt, Homo sapiens
uucuaaguaauuuugcaugccu

SEQ ID NO: 9581 - RNA, 22 nt, Homo sapiens
ucacugugugucucuguaucug

SEQ ID NO: 9582 - RNA, 21 nt, Homo sapiens
uacaaugcacaggagagccuc

SEQ ID NO: 9583 - RNA, 22 nt, Homo sapiens
cuuuuggcuuaagauugucuug

SEQ ID NO: 9584 - RNA, 22 nt, Homo sapiens
aguagcaauggcucugagcuau

SEQ ID NO: 9585 - RNA, 22 nt, Homo sapiens
uaaguaaaugaaagguugauuu

SEQ ID NO: 9586 - RNA, 22 nt, Homo sapiens
aucacugugauuucuacugugc

SEQ ID NO: 9587 - RNA, 22 nt, Homo sapiens
ugugcucaucucagucaacugu

SEQ ID NO: 9588 - RNA, 22 nt, Homo sapiens
gugaggcacugcugcuuuccag

SEQ ID NO: 9589 - RNA, 22 nt, Homo sapiens
uggaauguaacuugaaacuuuu

SEQ ID NO: 9590 - RNA, 22 nt, Homo sapiens
accugagacuaggcauuuuaua

SEQ ID NO: 9591 - RNA, 20 nt, Homo sapiens
cuugccuagcccuuugccuc

SEQ ID NO: 9592 - RNA, 22 nt, Homo sapiens
uaugucaugggguuuuugagau

SEQ ID NO: 9593 - RNA, 22 nt, Homo sapiens
uagaaagcaugaccuucagaua

SEQ ID NO: 9594 - RNA, 22 nt, Homo sapiens
aagggaauguuguggcugguug

SEQ ID NO: 9595 - RNA, 22 nt, Homo sapiens
uagcaguauggagcgaggccca

SEQ ID NO: 9596 - RNA, 22 nt, Homo sapiens
uguacuucaagauuaugguuua

SEQ ID NO: 9597 - RNA, 22 nt, Homo sapiens
gucacugucuacuguaauagcc

SEQ ID NO: 9598 - RNA, 18 nt, Homo sapiens
uugcaaauucuucccugu

SEQ ID NO: 9599 - RNA, 22 nt, Homo sapiens
guaaucucagcuacuugggagg

SEQ ID NO: 9600 - RNA, 22 nt, Homo sapiens
auagugcagugaugaaccuagg

SEQ ID NO: 9601 - RNA, 22 nt, Homo sapiens
gaaucacaguuauuagagcagc

SEQ ID NO: 9602 - RNA, 22 nt, Homo sapiens
uggaaugguaucuuguuggggu

SEQ ID NO: 9603 - RNA, 17 nt, Homo sapiens
cccuaguagcugggacu

SEQ ID NO: 9604 - RNA, 22 nt, Homo sapiens
uugagacggagucuugcucuuu

SEQ ID NO: 9605 - RNA, 22 nt, Homo sapiens
gucacuguuuccuauuauauuu

SEQ ID NO: 9606 - RNA, 22 nt, Homo sapiens
agaaacauucucuugccuccuu

SEQ ID NO: 9607 - RNA, 20 nt, Homo sapiens
aagacacuguccccacugga

SEQ ID NO: 9608 - RNA, 22 nt, Homo sapiens
auuggcagaaaucuuuauagua

SEQ ID NO: 9609 - RNA, 18 nt, Homo sapiens
uuucaagucuuaggugac

SEQ ID NO: 9610 - RNA, 22 nt, Homo sapiens
aagggaaugugguagcugguuu

SEQ ID NO: 9611 - RNA, 22 nt, Homo sapiens
ugagauuguaucugcaaugugu

SEQ ID NO: 9612 - RNA, 22 nt, Homo sapiens
guaugauacuguaacagugggu

SEQ ID NO: 9613 - RNA, 22 nt, Homo sapiens
auugcacaucugcacuacagcc

SEQ ID NO: 9614 - RNA, 22 nt, Homo sapiens
aaaggcuucggaucagaaggua

SEQ ID NO: 9615 - RNA, 17 nt, Homo sapiens
aaucagauuucugagga

SEQ ID NO: 9616 - RNA, 19 nt, Homo sapiens
uuuugcucuuuauaccuau

SEQ ID NO: 9617 - RNA, 21 nt, Homo sapiens
ugcuauguuguccaggcuggc

SEQ ID NO: 9618 - RNA, 21 nt, Homo sapiens
auugcacaauauacccaugua

SEQ ID NO: 9619 - RNA, 22 nt, Homo sapiens
uucauaguucuuuuagucauua

SEQ ID NO: 9620 - RNA, 22 nt, Homo sapiens
gucacauugaugcccauggugg

SEQ ID NO: 9621 - RNA, 22 nt, Homo sapiens
auccuuuagacuguccaguuga

SEQ ID NO: 9622 - RNA, 22 nt, Homo sapiens
ggaucauaugauagcucaauuu

SEQ ID NO: 9623 - RNA, 22 nt, Homo sapiens
auuguaauuuuagagaaagugg

SEQ ID NO: 9624 - RNA, 22 nt, Homo sapiens
uucacagucacccuucuccaug

SEQ ID NO: 9625 - RNA, 22 nt, Homo sapiens
caugacacuggcauguuucuuu

SEQ ID NO: 9626 - RNA, 22 nt, Homo sapiens
aucaugucuucccagugauucu

SEQ ID NO: 9627 - RNA, 22 nt, Homo sapiens
uugugaauggugccgcgauaaa

SEQ ID NO: 9628 - RNA, 22 nt, Homo sapiens
cauugcacuccagccuaggcaa

SEQ ID NO: 9629 - RNA, 22 nt, Homo sapiens
uugccuaggcuggagugcagua

SEQ ID NO: 9630 - RNA, 22 nt, Homo sapiens
uacuguacugcaguucugcaaa

SEQ ID NO: 9631 - RNA, 21 nt, Homo sapiens
uaaaacuguaacuuuguccug

SEQ ID NO: 9632 - RNA, 22 nt, Homo sapiens
gugagauacuagagauauagug

SEQ ID NO: 9633 - RNA, 22 nt, Homo sapiens
auacuguauaggauuguagccu

SEQ ID NO: 9634 - RNA, 22 nt, Homo sapiens
auaaaugcuuagaucuguauau

SEQ ID NO: 9635 - RNA, 22 nt, Homo sapiens
agaaccaaucccacauggauac

SEQ ID NO: 9636 - RNA, 22 nt, Homo sapiens
auggccgggugcgguggcucac

SEQ ID NO: 9637 - RNA, 22 nt, Homo sapiens
aauugcacuacugcacucccac

SEQ ID NO: 9638 - RNA, 22 nt, Homo sapiens
gugaaagacagcauuaauggcu

SEQ ID NO: 9639 - RNA, 22 nt, Homo sapiens
uuuuaguggacaaagguauuua

SEQ ID NO: 9640 - RNA, 22 nt, Homo sapiens
uuuuccagugggacucccauua

SEQ ID NO: 9641 - RNA, 22 nt, Homo sapiens
cauugcacugcuucuugggugu

SEQ ID NO: 9642 - RNA, 22 nt, Homo sapiens
acugcacuucagccuugggaaa

SEQ ID NO: 9643 - RNA, 22 nt, Homo sapiens
uuucugaggccucaccagaagc

SEQ ID NO: 9644 - RNA, 22 nt, Homo sapiens
gugcaaugagaaggggcucugg

SEQ ID NO: 9645 - RNA, 22 nt, Homo sapiens
gaauuguacugcaaucagggga

SEQ ID NO: 9646 - RNA, 22 nt, Homo sapiens
acagaacugggcuugcuuuugg

SEQ ID NO: 9647 - RNA, 22 nt, Homo sapiens
uaggucaguuuuggcuuggcuu

SEQ ID NO: 9648 - RNA, 22 nt, Homo sapiens
ccuuggcaauggcuggggcuga

SEQ ID NO: 9649 - RNA, 22 nt, Homo sapiens
guggaagauaguguguuaaugu

SEQ ID NO: 9650 - RNA, 19 nt, Homo sapiens
ugccauguagcacaugguc

SEQ ID NO: 9651 - RNA, 22 nt, Homo sapiens
uucaagaauuaaaguggcuuuu

SEQ ID NO: 9652 - RNA, 22 nt, Homo sapiens
uccuucaguccaguggguuuug

SEQ ID NO: 9653 - RNA, 22 nt, Homo sapiens
cauugcacuccagccuggcaac

SEQ ID NO: 9654 - RNA, 22 nt, Homo sapiens
agagugcuauagauuagauuuc

SEQ ID NO: 9655 - RNA, 22 nt, Homo sapiens
ggaaucugaaccaugggaaugg

SEQ ID NO: 9656 - RNA, 22 nt, Homo sapiens
aauugcacuaagcauaguccag

SEQ ID NO: 9657 - RNA, 22 nt, Homo sapiens
aucgcgccauuguacuccagcc

SEQ ID NO: 9658 - RNA, 22 nt, Homo sapiens
uucuggccuccauuuuucuccu

SEQ ID NO: 9659 - RNA, 22 nt, Homo sapiens
acaccaugucuguuucugguuu

SEQ ID NO: 9660 - RNA, 22 nt, Homo sapiens
ugccuaguggaaggagagcaaa

SEQ ID NO: 9661 - RNA, 22 nt, Homo sapiens
uuuuggcucugucuguaucuuu

SEQ ID NO: 9662 - RNA, 22 nt, Homo sapiens
uugaguuugaguauucuaaagc

SEQ ID NO: 9663 - RNA, 22 nt, Homo sapiens
acauaguagacacugaaaauau

SEQ ID NO: 9664 - RNA, 22 nt, Homo sapiens
gugugauuguuaauuuuaggug

SEQ ID NO: 9665 - RNA, 22 nt, Homo sapiens
uucaguauugcaccuggagucc

SEQ ID NO: 9666 - RNA, 22 nt, Homo sapiens
agugccaaaucgagggcucuga

SEQ ID NO: 9667 - RNA, 22 nt, Homo sapiens
aaagugcugagaguucuaacuu

SEQ ID NO: 9668 - RNA, 22 nt, Homo sapiens
ugagacacugaauccggccuga

SEQ ID NO: 9669 - RNA, 22 nt, Homo sapiens
acccugugaauauuuaaacuuc

SEQ ID NO: 9670 - RNA, 22 nt, Homo sapiens
aauaaagcauggcuacuccaua

SEQ ID NO: 9671 - RNA, 22 nt, Homo sapiens
uggcaagauuguuccgguuugg

SEQ ID NO: 9672 - RNA, 22 nt, Homo sapiens
ucaaagugagcuccuucucacu

SEQ ID NO: 9673 - RNA, 22 nt, Homo sapiens
cugauugucaucaauauuauua

SEQ ID NO: 9674 - RNA, 22 nt, Homo sapiens
uucucaauggcaacuuguugcu

SEQ ID NO: 9675 - RNA, 22 nt, Homo sapiens
uagcagaauauaccucuuacuu

SEQ ID NO: 9676 - RNA, 22 nt, Homo sapiens
uugaaagcuaucagagauucca

SEQ ID NO: 9677 - RNA, 22 nt, Homo sapiens
uuccaguugugagcuauccggg

SEQ ID NO: 9678 - RNA, 22 nt, Homo sapiens
cuuucugaggagaauagagaac

SEQ ID NO: 9679 - RNA, 22 nt, Homo sapiens
uuggagugugcucauaacugcu

SEQ ID NO: 9680 - RNA, 22 nt, Homo sapiens
gagaaugaugauuuccaauuuc

SEQ ID NO: 9681 - RNA, 22 nt, Homo sapiens
ugucacccuuuauccauuuccu

SEQ ID NO: 9682 - RNA, 22 nt, Homo sapiens
uauggcacuaguacuggaaagc

SEQ ID NO: 9683 - RNA, 22 nt, Homo sapiens
uggucuucuggccuccagaacc

SEQ ID NO: 9684 - RNA, 22 nt, Homo sapiens
uugaaagucauuucuucuaagu

SEQ ID NO: 9685 - RNA, 16 nt, Homo sapiens
aucacuugcuucuuuu

SEQ ID NO: 9686 - RNA, 22 nt, Homo sapiens
cauugcacuccaucuugggcaa

SEQ ID NO: 9687 - RNA, 22 nt, Homo sapiens
cauugcacuccagcuugggcaa

SEQ ID NO: 9688 - RNA, 22 nt, Homo sapiens
cacuuugguucaccugaguuuc

SEQ ID NO: 9689 - RNA, 23 nt, Homo sapiens
ggaaacauccagucuuucaccau

SEQ ID NO: 9690 - RNA, 22 nt, Homo sapiens
uugaaagacaucaccuacugcu

SEQ ID NO: 9691 - RNA, 22 nt, Homo sapiens
auauguauuuuaacguguaagg

SEQ ID NO: 9692 - RNA, 22 nt, Homo sapiens
aucccuugacguggagucucug

SEQ ID NO: 9693 - RNA, 22 nt, Homo sapiens
gcaaagaaugcagauuugccuc

SEQ ID NO: 9694 - RNA, 22 nt, Homo sapiens
uggucaccugaauuaugcaugu

SEQ ID NO: 9695 - RNA, 22 nt, Homo sapiens
uacaagcacaggcagcaggcug

SEQ ID NO: 9696 - RNA, 22 nt, Homo sapiens
aaaugcagucuuuguucugggc

SEQ ID NO: 9697 - RNA, 22 nt, Homo sapiens
guucuggagauaaagccaaggu

SEQ ID NO: 9698 - RNA, 22 nt, Homo sapiens
cauugcacugcauucugggcaa

SEQ ID NO: 9699 - RNA, 22 nt, Mycobacterium avium subsp. paratuberculosis
uuucugaguucgcgggucaccg

SEQ ID NO: 9700 - RNA, 22 nt, Mycobacterium avium subsp. paratuberculosis
uuucauucgcccguuggguugg

SEQ ID NO: 9701 - RNA, 22 nt, Mycobacterium avium subsp. paratuberculosis
uugaggaucagguucagcuggc

SEQ ID NO: 9702 - RNA, 22 nt, Mycobacterium avium subsp. paratuberculosis
uugagguugaacuugccggugc

SEQ ID NO: 9703 - RNA, 22 nt, Mycobacterium avium subsp. paratuberculosis
uugcuggcaccgcugcgcuggg

SEQ ID NO: 9704 - RNA, 22 nt, Mycobacterium avium subsp. paratuberculosis
uuguggccggugucucaugucg

SEQ ID NO: 9705 - RNA, 22 nt, Mycobacterium avium subsp. paratuberculosis
uuguuuuuggccggauggccgu

SEQ ID NO: 9706 - RNA, 21 nt, Mycobacterium avium subsp. paratuberculosis
uugguguugcggcugcggucc

SEQ ID NO: 9707 - RNA, 22 nt, Mycobacterium avium subsp. paratuberculosis
uucaagguugaagcccuaaccu

SEQ ID NO: 9708 - RNA, 22 nt, Mycobacterium avium subsp. paratuberculosis
ugggccgacggcggcauccggc

SEQ ID NO: 9709 - RNA, 22 nt, Mycobacterium avium subsp. paratuberculosis
ugggcuggcgcgccgccgaggu

SEQ ID NO: 9710 - RNA, 18 nt, Mycobacterium avium subsp. paratuberculosis
ugggcuggcgguccugcg

SEQ ID NO: 9711 - RNA, 22 nt, Mycobacterium avium subsp. paratuberculosis
ugguggugcccggcgucggcgc

SEQ ID NO: 9712 - RNA, 22 nt, Mycobacterium avium subsp. paratuberculosis
uggugguggucaucgcgauccu

SEQ ID NO: 9713 - RNA, 22 nt, Mycobacterium avium subsp. paratuberculosis
ugguuggucaccaucaccgacg

SEQ ID NO: 9714 - RNA, 22 nt, Mycobacterium avium subsp. paratuberculosis
uguccgcagaucgagcagccgu

SEQ ID NO: 9715 - RNA, 22 nt, Mycobacterium avium subsp. paratuberculosis
ugugggaugaggugcaggugca

SEQ ID NO: 9716 - RNA, 22 nt, Mycobacterium avium subsp. paratuberculosis
ugugguaccggcccguugcugc

SEQ ID NO: 9717 - RNA, 23 nt, Mycobacterium avium subsp. paratuberculosis
ugugcuuccgggugucgucggac

SEQ ID NO: 9718 - RNA, 22 nt, Mycobacterium avium subsp. paratuberculosis
ucuugcagggccuggagcuugg

SEQ ID NO: 9719 - RNA, 19 nt, Mycobacterium avium subsp. paratuberculosis
ucugcaggguggcccaguu

SEQ ID NO: 9720 - RNA, 22 nt, Mycobacterium avium subsp. paratuberculosis
ucugccaacauaagagccgacg

SEQ ID NO: 9721 - RNA, 22 nt, Mycobacterium avium subsp. paratuberculosis
ucuggccaccaccaaacgccug

SEQ ID NO: 9722 - RNA, 23 nt, Mycobacterium avium subsp. paratuberculosis
ucuggccucggagccgccgagcc

SEQ ID NO: 9723 - RNA, 22 nt, Mycobacterium avium subsp. paratuberculosis
ugaccugcgaccaggaccgguc

SEQ ID NO: 9724 - RNA, 22 nt, Mycobacterium avium subsp. paratuberculosis
ugagaggugacgcaauugacgc

SEQ ID NO: 9725 - RNA, 22 nt, Mycobacterium avium subsp. paratuberculosis
ugccccuacuugucccgcucgg

SEQ ID NO: 9726 - RNA, 22 nt, Mycobacterium avium subsp. paratuberculosis
ugcaggauccgccaggcgacuu

SEQ ID NO: 9727 - RNA, 22 nt, Mycobacterium avium subsp. paratuberculosis
ugcaggccgucgcggguguugu

SEQ ID NO: 9728 - RNA, 22 nt, Mycobacterium avium subsp. paratuberculosis
ugcccggcugggaagccggcau

SEQ ID NO: 9729 - RNA, 23 nt, Mycobacterium avium subsp. paratuberculosis
ugcuggcccccguguucuccucc

SEQ ID NO: 9730 - RNA, 22 nt, Mycobacterium avium subsp. paratuberculosis
ugcuggccgacauggcgagaau

SEQ ID NO: 9731 - RNA, 22 nt, Mycobacterium avium subsp. paratuberculosis
ugcugggaucgcuccccgacau

SEQ ID NO: 9732 - RNA, 22 nt, Mycobacterium avium subsp. paratuberculosis
ugcuuggacuccucggggaugu

SEQ ID NO: 9733 - RNA, 22 nt, Mycobacterium avium subsp. paratuberculosis
uggacgcgggccugucccacgu

SEQ ID NO: 9734 - RNA, 22 nt, Mycobacterium avium subsp. paratuberculosis
ugcccggcggugcgccuaccgg

SEQ ID NO: 9735 - RNA, 22 nt, Mycobacterium avium subsp. paratuberculosis
ugcgccaccaagauaucgggcg

SEQ ID NO: 9736 - RNA, 22 nt, Mycobacterium avium subsp. paratuberculosis
ugcgccaccgguggaacggucg

SEQ ID NO: 9737 - RNA, 22 nt, Mycobacterium avium subsp. paratuberculosis
ugcgcgcggaccugcuccacca

SEQ ID NO: 9738 - RNA, 22 nt, Mycobacterium avium subsp. paratuberculosis
ugcugcgcacuuugccgcuccu

SEQ ID NO: 9739 - RNA, 22 nt, Mycobacterium avium subsp. paratuberculosis
uggccagccggccguguagcuc

SEQ ID NO: 9740 - RNA, 23 nt, Mycobacterium avium subsp. paratuberculosis
uggcaggccggccugaugguggc

SEQ ID NO: 9741 - RNA, 22 nt, Mycobacterium avium subsp. paratuberculosis
ugggcgcacuuucgccggacgc

SEQ ID NO: 9742 - RNA, 22 nt, Mycobacterium avium subsp. paratuberculosis
ugggcgcgugcguugcagccgg

SEQ ID NO: 9743 - RNA, 22 nt, Mycobacterium avium subsp. paratuberculosis
ugggcucaccaggacgucgcgc

SEQ ID NO: 9744 - RNA, 22 nt, Mycobacterium avium subsp. paratuberculosis
ugggcucagccugcuggucgaa

SEQ ID NO: 9745 - RNA, 22 nt, Mycobacterium avium subsp. paratuberculosis
uggcguggcccugcugcacgcg

SEQ ID NO: 9746 - RNA, 22 nt, Mycobacterium avium subsp. paratuberculosis
uggcuggccgucaucaccggcg

SEQ ID NO: 9747 - RNA, 22 nt, Mycobacterium avium subsp. paratuberculosis
gcaacaaccccacguucggcgu

SEQ ID NO: 9748 - RNA, 22 nt, Mycobacterium avium subsp. paratuberculosis
gcaacugcucagccacuccuug

SEQ ID NO: 9749 - RNA, 22 nt, Mycobacterium avium subsp. paratuberculosis
gaugccuucgacaaggcgaaga

SEQ ID NO: 9750 - RNA, 22 nt, Mycobacterium avium subsp. paratuberculosis
gagggccugggcuacuacugcg

SEQ ID NO: 9751 - RNA, 20 nt, Mycobacterium avium subsp. paratuberculosis
gaccaugcagcaggaccgcu

SEQ ID NO: 9752 - RNA, 20 nt, Mycobacterium avium subsp. paratuberculosis
gacguucuccacgcugcggc

SEQ ID NO: 9753 - RNA, 22 nt, Mycobacterium avium subsp. paratuberculosis
gaagugcaccugguugcugauc

SEQ ID NO: 9754 - RNA, 22 nt, Mycobacterium avium subsp. paratuberculosis
gaagugcugcgcgaugauaagc

SEQ ID NO: 9755 - RNA, 22 nt, Mycobacterium avium subsp. paratuberculosis
gaccugcagccggaugugcuga

SEQ ID NO: 9756 - RNA, 22 nt, Mycobacterium avium subsp. paratuberculosis
gagaaccaguccucgggcguca

SEQ ID NO: 9757 - RNA, 22 nt, Mycobacterium avium subsp. paratuberculosis
gagauacacccgggcauccgac

SEQ ID NO: 9758 - RNA, 22 nt, Mycobacterium avium subsp. paratuberculosis
gagcaggaaggccaccagcgca

SEQ ID NO: 9759 - RNA, 22 nt, Mycobacterium avium subsp. paratuberculosis
gccagccagccguugccggauc

SEQ ID NO: 9760 - RNA, 22 nt, Mycobacterium avium subsp. paratuberculosis
gccagcagccgcgaggugucac

SEQ ID NO: 9761 - RNA, 23 nt, Mycobacterium avium subsp. paratuberculosis
gccagcucgacggggugcucggc

SEQ ID NO: 9762 - RNA, 22 nt, Mycobacterium avium subsp. paratuberculosis
gccaggcugggcgagcugcuag

SEQ ID NO: 9763 - RNA, 22 nt, Mycobacterium avium subsp. paratuberculosis
gcccacaaguccgaggugcugg

SEQ ID NO: 9764 - RNA, 22 nt, Mycobacterium avium subsp. paratuberculosis
gcccgccucugagcgacaauca

SEQ ID NO: 9765 - RNA, 22 nt, Mycobacterium avium subsp. paratuberculosis
gccacccugcugggcaugcugg

SEQ ID NO: 9766 - RNA, 22 nt, Mycobacterium avium subsp. paratuberculosis
gccaccucggcacccuggugau

SEQ ID NO: 9767 - RNA, 22 nt, Mycobacterium avium subsp. paratuberculosis
gcagcgugaugagcgaugccgc

SEQ ID NO: 9768 - RNA, 22 nt, Mycobacterium avium subsp. paratuberculosis
gcagcaugucccagucguggua

SEQ ID NO: 9769 - RNA, 22 nt, Mycobacterium avium subsp. paratuberculosis
gauggugccgcggaacuucucg

SEQ ID NO: 9770 - RNA, 22 nt, Mycobacterium avium subsp. paratuberculosis
gcacgcccgcgagcaccgccau

SEQ ID NO: 9771 - RNA, 22 nt, Mycobacterium avium subsp. paratuberculosis
gccauuuucccgagucccggca

SEQ ID NO: 9772 - RNA, 21 nt, Mycobacterium avium subsp. paratuberculosis
gccguggcguuacgagcgagc

SEQ ID NO: 9773 - RNA, 22 nt, Mycobacterium avium subsp. paratuberculosis
gccuccagcgccaucaccagcu

SEQ ID NO: 9774 - RNA, 22 nt, Mycobacterium avium subsp. paratuberculosis
gccugcagauaguccagcgugu

SEQ ID NO: 9775 - RNA, 22 nt, Mycobacterium avium subsp. paratuberculosis
gcgaugaggaucugucucaucg

SEQ ID NO: 9776 - RNA, 21 nt, Mycobacterium avium subsp. paratuberculosis
gccugggcaccaggucgacga

SEQ ID NO: 9777 - RNA, 22 nt, Mycobacterium avium subsp. paratuberculosis
gcgaccuggauggcguggcugc

SEQ ID NO: 9778 - RNA, 21 nt, Mycobacterium avium subsp. paratuberculosis
gcugccagggcacgcugcggg

SEQ ID NO: 9779 - RNA, 22 nt, Mycobacterium avium subsp. paratuberculosis
gugggccaacgugagcuccagu

SEQ ID NO: 9780 - RNA, 22 nt, Mycobacterium avium subsp. paratuberculosis
gugggcugucggugaccuggcu

SEQ ID NO: 9781 - RNA, 22 nt, Mycobacterium avium subsp. paratuberculosis
gugauggcggcgaccaccaucg

SEQ ID NO: 9782 - RNA, 22 nt, Mycobacterium avium subsp. paratuberculosis
guggcagccagcauucggccgc

SEQ ID NO: 9783 - RNA, 23 nt, Mycobacterium avium subsp. paratuberculosis
guuuggguacguuaugggcuugc

SEQ ID NO: 9784 - RNA, 22 nt, Mycobacterium avium subsp. paratuberculosis
gugguggucaaucacgcucggc

SEQ ID NO: 9785 - RNA, 22 nt, Mycobacterium avium subsp. paratuberculosis
gugguggugucggccgacguug

SEQ ID NO: 9786 - RNA, 22 nt, Mycobacterium avium subsp. paratuberculosis
guuccagcucggcgagcgugcg

SEQ ID NO: 9787 - RNA, 22 nt, Mycobacterium avium subsp. paratuberculosis
gucggcuccuugcuggacggcc

SEQ ID NO: 9788 - RNA, 22 nt, Mycobacterium avium subsp. paratuberculosis
guccagccgucgaauugugccc

SEQ ID NO: 9789 - RNA, 22 nt, Mycobacterium avium subsp. paratuberculosis
gugaagccgccgcggcccagcu

SEQ ID NO: 9790 - RNA, 22 nt, Mycobacterium avium subsp. paratuberculosis
gugaccagggugcccagcugga

SEQ ID NO: 9791 - RNA, 20 nt, Mycobacterium avium subsp. paratuberculosis
gugcacaucgacccggcgga

SEQ ID NO: 9792 - RNA, 22 nt, Mycobacterium avium subsp. paratuberculosis
gugccccagcagcucggugagc

SEQ ID NO: 9793 - RNA, 22 nt, Mycobacterium avium subsp. paratuberculosis
gucacgccagcgugacgcucgg

SEQ ID NO: 9794 - RNA, 22 nt, Mycobacterium avium subsp. paratuberculosis
gucacgcuagcgugacgcucgc

SEQ ID NO: 9795 - RNA, 22 nt, Mycobacterium avium subsp. paratuberculosis
guacaugccgccgcaggcgccc

SEQ ID NO: 9796 - RNA, 22 nt, Mycobacterium avium subsp. paratuberculosis
ggugguggcccggaucgacugg

SEQ ID NO: 9797 - RNA, 22 nt, Mycobacterium avium subsp. paratuberculosis
ggugguggucgacgaggcgcag

SEQ ID NO: 9798 - RNA, 23 nt, Mycobacterium avium subsp. paratuberculosis
gguucuucuuacggucgcuguca

SEQ ID NO: 9799 - RNA, 22 nt, Mycobacterium avium subsp. paratuberculosis
gguugguggcggcgaucaggau

SEQ ID NO: 9800 - RNA, 22 nt, Mycobacterium avium subsp. paratuberculosis
ggugacgccgcaucugcuggug

SEQ ID NO: 9801 - RNA, 22 nt, Mycobacterium avium subsp. paratuberculosis
ggugcugcggcuccacgaaguc

SEQ ID NO: 9802 - RNA, 22 nt, Mycobacterium avium subsp. paratuberculosis
ggucacccgcaacggcgagcag

SEQ ID NO: 9803 - RNA, 22 nt, Mycobacterium avium subsp. paratuberculosis
ggucaccuccaucgcgacgucg

SEQ ID NO: 9804 - RNA, 22 nt, Mycobacterium avium subsp. paratuberculosis
ggucaccuucuccgagcgggcc

SEQ ID NO: 9805 - RNA, 22 nt, Mycobacterium avium subsp. paratuberculosis
ggguugaugccgaccgucucgu

SEQ ID NO: 9806 - RNA, 21 nt, Mycobacterium avium subsp. paratuberculosis
gggguuggcacaugaucaccg

SEQ ID NO: 9807 - RNA, 22 nt, Mycobacterium avium subsp. paratuberculosis
ggguaucaccucgggcgaggcc

SEQ ID NO: 9808 - RNA, 22 nt, Mycobacterium avium subsp. paratuberculosis
gggugcuuucgcgucugcucgc

SEQ ID NO: 9809 - RNA, 22 nt, Mycobacterium avium subsp. paratuberculosis
gggccagaaccaccaggugcgc

SEQ ID NO: 9810 - RNA, 22 nt, Mycobacterium avium subsp. paratuberculosis
gggcggcacggugacggccagg

SEQ ID NO: 9811 - RNA, 22 nt, Mycobacterium avium subsp. paratuberculosis
gggcgggucgaucugcagcggg

SEQ ID NO: 9812 - RNA, 21 nt, Mycobacterium avium subsp. paratuberculosis
gggcucagccgaagccggcgc

SEQ ID NO: 9813 - RNA, 22 nt, Mycobacterium avium subsp. paratuberculosis
gggcugguucucggucggcgac

SEQ ID NO: 9814 - RNA, 22 nt, Mycobacterium avium subsp. paratuberculosis
gggcuuggcgcagcgccgcaua

SEQ ID NO: 9815 - RNA, 22 nt, Mycobacterium avium subsp. paratuberculosis
gggguucaucuccgcggcgucg

SEQ ID NO: 9816 - RNA, 22 nt, Mycobacterium avium subsp. paratuberculosis
gggguugacgaucgcugcggcg

SEQ ID NO: 9817 - RNA, 22 nt, Mycobacterium avium subsp. paratuberculosis
ggagccggccgagguugcgcug

SEQ ID NO: 9818 - RNA, 22 nt, Mycobacterium avium subsp. paratuberculosis
gcuucuucgcgcaugcgcugcc

SEQ ID NO: 9819 - RNA, 22 nt, Mycobacterium avium subsp. paratuberculosis
gcuggcgccacugcagcccggu

SEQ ID NO: 9820 - RNA, 22 nt, Mycobacterium avium subsp. paratuberculosis
gcugggcacgccggagcugcgg

SEQ ID NO: 9821 - RNA, 22 nt, Mycobacterium avium subsp. paratuberculosis
gcugggccgcugguugcccgag

SEQ ID NO: 9822 - RNA, 22 nt, Mycobacterium avium subsp. paratuberculosis
gcuggccaacugcggagacgcc

SEQ ID NO: 9823 - RNA, 22 nt, Mycobacterium avium subsp. paratuberculosis
gcuggccaccggcaccgcggcg

SEQ ID NO: 9824 - RNA, 22 nt, Mycobacterium avium subsp. paratuberculosis
gcuggccacgcucggcccgcug

SEQ ID NO: 9825 - RNA, 22 nt, Mycobacterium avium subsp. paratuberculosis
ggcagcacccgcagcaggucgu

SEQ ID NO: 9826 - RNA, 22 nt, Mycobacterium avium subsp. paratuberculosis
ggcagcacgugcagcgcggucu

SEQ ID NO: 9827 - RNA, 22 nt, Mycobacterium avium subsp. paratuberculosis
ggcagcagcgagaagugcaggu

SEQ ID NO: 9828 - RNA, 22 nt, Mycobacterium avium subsp. paratuberculosis
ggcagccuguaucaccacuucu

SEQ ID NO: 9829 - RNA, 22 nt, Mycobacterium avium subsp. paratuberculosis
ggcagcgaugcggccggucuca

SEQ ID NO: 9830 - RNA, 22 nt, Mycobacterium avium subsp. paratuberculosis
ggaguuucuggccggcaagaag

SEQ ID NO: 9831 - RNA, 22 nt, Mycobacterium avium subsp. paratuberculosis
ggagggucgcuaucugcgcggc

SEQ ID NO: 9832 - RNA, 22 nt, Mycobacterium avium subsp. paratuberculosis
ggccagcacgguguugacggug

SEQ ID NO: 9833 - RNA, 22 nt, Mycobacterium avium subsp. paratuberculosis
ggccagccgggcgacggucugc

SEQ ID NO: 9834 - RNA, 22 nt, Mycobacterium avium subsp. paratuberculosis
ggcccggcuucuggcacggcgc

SEQ ID NO: 9835 - RNA, 22 nt, Mycobacterium avium subsp. paratuberculosis
ggcuggucaaacagcuugcgcc

SEQ ID NO: 9836 - RNA, 22 nt, Mycobacterium avium subsp. paratuberculosis
ggcugauuuugcgggccgcccg

SEQ ID NO: 9837 - RNA, 22 nt, Mycobacterium avium subsp. paratuberculosis
ggcuugaggucgucgcggucac

SEQ ID NO: 9838 - RNA, 22 nt, Mycobacterium avium subsp. paratuberculosis
gggcaccaccgaguagcugccg

SEQ ID NO: 9839 - RNA, 22 nt, Mycobacterium avium subsp. paratuberculosis
ggcgccacgcggaaucgccagc

SEQ ID NO: 9840 - RNA, 22 nt, Mycobacterium avium subsp. paratuberculosis
ggcggcgccggcgaucacggug

SEQ ID NO: 9841 - RNA, 22 nt, Mycobacterium avium subsp. paratuberculosis
uugcgcugcugccauaccugcu

SEQ ID NO: 9842 - RNA, 22 nt, Mycobacterium avium subsp. paratuberculosis
uuggucacccugaccucaccga

SEQ ID NO: 9843 - RNA, 22 nt, Mycobacterium avium subsp. paratuberculosis
uuggucucgcucagcucggugg

SEQ ID NO: 9844 - RNA, 22 nt, Mycobacterium avium subsp. paratuberculosis
uuggugguggucgucgacgagc

SEQ ID NO: 9845 - RNA, 22 nt, Mycobacterium avium subsp. paratuberculosis
uuguaugaccucgguugaugcu

SEQ ID NO: 9846 - RNA, 21 nt, Mycobacterium avium subsp. paratuberculosis
uugucaccgccguccggcgac

SEQ ID NO: 9847 - RNA, 22 nt, Mycobacterium avium subsp. paratuberculosis
uugucaccggccuggcccuggu

SEQ ID NO: 9848 - RNA, 22 nt, Mycobacterium avium subsp. paratuberculosis
uuuggcugagcacgucgacccg

SEQ ID NO: 9849 - RNA, 22 nt, Mycobacterium avium subsp. paratuberculosis
agucccugcugcagcgggguca

SEQ ID NO: 9850 - RNA, 22 nt, Mycobacterium avium subsp. paratuberculosis
uucggggagcgcgacaccguuu

SEQ ID NO: 9851 - RNA, 22 nt, Mycobacterium avium subsp. paratuberculosis
uucugguccuucauccggugcg

SEQ ID NO: 9852 - RNA, 22 nt, Mycobacterium avium subsp. paratuberculosis
uucagggucucgccgaucaccc

SEQ ID NO: 9853 - RNA, 22 nt, Mycobacterium avium subsp. paratuberculosis
uuacuuaucgguaagucaguua

SEQ ID NO: 9854 - RNA, 22 nt, Mycobacterium avium subsp. paratuberculosis
uguccugcgacccgucgcgcgg

SEQ ID NO: 9855 - RNA, 22 nt, Mycobacterium avium subsp. paratuberculosis
ugucgccaccggcuccgcaucg

SEQ ID NO: 9856 - RNA, 22 nt, Mycobacterium avium subsp. paratuberculosis
ugugaccuccggugggcugauc

SEQ ID NO: 9857 - RNA, 22 nt, Mycobacterium avium subsp. paratuberculosis
uggugguccgagugaccauggu

SEQ ID NO: 9858 - RNA, 22 nt, Mycobacterium avium subsp. paratuberculosis
ugguggagcagguccgcgcgca

SEQ ID NO: 9859 - RNA, 22 nt, Mycobacterium avium subsp. paratuberculosis
ugguggucgcgcugacgcucgc

SEQ ID NO: 9860 - RNA, 22 nt, Mycobacterium avium subsp. paratuberculosis
ugguggucuugcgcgccagccg

SEQ ID NO: 9861 - RNA, 22 nt, Mycobacterium avium subsp. paratuberculosis
aucaccugcaugagcugguggc

SEQ ID NO: 9862 - RNA, 22 nt, Mycobacterium avium subsp. paratuberculosis
aucaccuuggucagcagcgcgg

SEQ ID NO: 9863 - RNA, 23 nt, Mycobacterium avium subsp. paratuberculosis
auccaggcgcugcgcgagcaccg

SEQ ID NO: 9864 - RNA, 22 nt, Mycobacterium avium subsp. paratuberculosis
auggcgaucggcgggcacggcc

SEQ ID NO: 9865 - RNA, 22 nt, Mycobacterium avium subsp. paratuberculosis
augcuuggggguucucagcggu

SEQ ID NO: 9866 - RNA, 22 nt, Mycobacterium avium subsp. paratuberculosis
auggcagcggauccucgacauc

SEQ ID NO: 9867 - RNA, 22 nt, Mycobacterium avium subsp. paratuberculosis
auggucaggaugucgaccucga

SEQ ID NO: 9868 - RNA, 22 nt, Mycobacterium avium subsp. paratuberculosis
augguggccagcacccccggca

SEQ ID NO: 9869 - RNA, 22 nt, Mycobacterium avium subsp. paratuberculosis
auguuggccagccacgcguccg

SEQ ID NO: 9870 - RNA, 22 nt, Mycobacterium avium subsp. paratuberculosis
auugcucagcagcuuguucagg

SEQ ID NO: 9871 - RNA, 22 nt, Mycobacterium avium subsp. paratuberculosis
auuggcacgucguagaauuggg

SEQ ID NO: 9872 - RNA, 22 nt, Mycobacterium avium subsp. paratuberculosis
caagcugcgcgccggaccgugg

SEQ ID NO: 9873 - RNA, 22 nt, Mycobacterium avium subsp. paratuberculosis
cacgaugcuggagaucaccagg

SEQ ID NO: 9874 - RNA, 22 nt, Mycobacterium avium subsp. paratuberculosis
caauuucuacgugaugcgcaac

SEQ ID NO: 9875 - RNA, 22 nt, Mycobacterium avium subsp. paratuberculosis
cagcacaccgcgguguucaacg

SEQ ID NO: 9876 - RNA, 22 nt, Mycobacterium avium subsp. paratuberculosis
caggaugaagccgacuucgacc

SEQ ID NO: 9877 - RNA, 22 nt, Mycobacterium avium subsp. paratuberculosis
cagcauccgacgcgccggagcc

SEQ ID NO: 9878 - RNA, 22 nt, Mycobacterium avium subsp. paratuberculosis
cagcaugucgaucgaccagguc

SEQ ID NO: 9879 - RNA, 22 nt, Mycobacterium avium subsp. paratuberculosis
ugcgcagcccugggaagcggcc

SEQ ID NO: 9880 - RNA, 22 nt, Mycobacterium avium subsp. paratuberculosis
ugcccaccacgccgucgggcca

SEQ ID NO: 9881 - RNA, 22 nt, Mycobacterium avium subsp. paratuberculosis
ugcccggcuucaucgacucgac

SEQ ID NO: 9882 - RNA, 23 nt, Mycobacterium avium subsp. paratuberculosis
ugcacgucugccucgccgacccc

SEQ ID NO: 9883 - RNA, 22 nt, Mycobacterium avium subsp. paratuberculosis
ugcacugccgugaagagugcuc

SEQ ID NO: 9884 - RNA, 22 nt, Mycobacterium avium subsp. paratuberculosis
ugaccugcgcggcccggccacu

SEQ ID NO: 9885 - RNA, 22 nt, Mycobacterium avium subsp. paratuberculosis
ugacgccaguucuccgcgccga

SEQ ID NO: 9886 - RNA, 22 nt, Mycobacterium avium subsp. paratuberculosis
ugguggcgcuggucgcggugcu

SEQ ID NO: 9887 - RNA, 18 nt, Mycobacterium avium subsp. paratuberculosis
uggguccaaguauccuga

SEQ ID NO: 9888 - RNA, 22 nt, Mycobacterium avium subsp. paratuberculosis
uggucagccgccaggcgucggc

SEQ ID NO: 9889 - RNA, 22 nt, Mycobacterium avium subsp. paratuberculosis
ugggccaacggaauguagucgg

SEQ ID NO: 9890 - RNA, 22 nt, Mycobacterium avium subsp. paratuberculosis
ugggcggugguccucaaugcgc

SEQ ID NO: 9891 - RNA, 22 nt, Mycobacterium avium subsp. paratuberculosis
uggcugaccagaaagucgacca

SEQ ID NO: 9892 - RNA, 22 nt, Mycobacterium avium subsp. paratuberculosis
uggcgcaauuggcggacaugcu

SEQ ID NO: 9893 - RNA, 22 nt, Mycobacterium avium subsp. paratuberculosis
uggccagcuugguggugucggu

SEQ ID NO: 9894 - RNA, 22 nt, Mycobacterium avium subsp. paratuberculosis
ugcugggcggugccgcagccga

SEQ ID NO: 9895 - RNA, 22 nt, Mycobacterium avium subsp. paratuberculosis
ugcugggcucgcugcggaucgg

SEQ ID NO: 9896 - RNA, 22 nt, Mycobacterium avium subsp. paratuberculosis
ugcuggucgagcggaugcaguc

SEQ ID NO: 9897 - RNA, 22 nt, Mycobacterium avium subsp. paratuberculosis
uggcaccaagaaguggggggug

SEQ ID NO: 9898 - RNA, 22 nt, Mycobacterium avium subsp. paratuberculosis
uggaaaagauggguccgguccg

SEQ ID NO: 9899 - RNA, 22 nt, Mycobacterium avium subsp. paratuberculosis
guggcgucgaugcgaaucccgg

SEQ ID NO: 9900 - RNA, 22 nt, Mycobacterium avium subsp. paratuberculosis
ucccaaggcuguucgugggcgu

SEQ ID NO: 9901 - RNA, 22 nt, Mycobacterium avium subsp. paratuberculosis
ucauuuggugcucaccgugcag

SEQ ID NO: 9902 - RNA, 22 nt, Mycobacterium avium subsp. paratuberculosis
uccagcagcugggcgcgcauuc

SEQ ID NO: 9903 - RNA, 22 nt, Mycobacterium avium subsp. paratuberculosis
uccagccaggcgcggcggcuca

SEQ ID NO: 9904 - RNA, 22 nt, Mycobacterium avium subsp. paratuberculosis
uccagcuggucgacgccgccag

SEQ ID NO: 9905 - RNA, 22 nt, Mycobacterium avium subsp. paratuberculosis
ucagcaggucgaugcgguugcg

SEQ ID NO: 9906 - RNA, 22 nt, Mycobacterium avium subsp. paratuberculosis
uccuggugaucuccagcaucgu

SEQ ID NO: 9907 - RNA, 22 nt, Mycobacterium avium subsp. paratuberculosis
ucgccugcggcaaugagcccua

SEQ ID NO: 9908 - RNA, 22 nt, Mycobacterium avium subsp. paratuberculosis
uccugcgccgccacgacagcaa

SEQ ID NO: 9909 - RNA, 22 nt, Mycobacterium avium subsp. paratuberculosis
ucgauguuguggucaacuucca

SEQ ID NO: 9910 - RNA, 17 nt, Mycobacterium avium subsp. paratuberculosis
ucugcagcugcgccugc

SEQ ID NO: 9911 - RNA, 22 nt, Mycobacterium avium subsp. paratuberculosis
ucucggccggccgcgccguguc

SEQ ID NO: 9912 - RNA, 22 nt, Mycobacterium avium subsp. paratuberculosis
ucucauuccugagacuuucuug

SEQ ID NO: 9913 - RNA, 22 nt, Mycobacterium avium subsp. paratuberculosis
ucgcuggacugccacagguucg

SEQ ID NO: 9914 - RNA, 22 nt, Mycobacterium avium subsp. paratuberculosis
ucgguggcugcagcucggccug

SEQ ID NO: 9915 - RNA, 22 nt, Mycobacterium avium subsp. paratuberculosis
ucugucucaggugcaggacgac

SEQ ID NO: 9916 - RNA, 22 nt, Mycobacterium avium subsp. paratuberculosis
ucugggcccgucacggugccgg

SEQ ID NO: 9917 - RNA, 22 nt, Mycobacterium avium subsp. paratuberculosis
ucugcauucgaaaguacuauuu

SEQ ID NO: 9918 - RNA, 22 nt, Mycobacterium avium subsp. paratuberculosis
ucuuggugcacgaucagcucgc

SEQ ID NO: 9919 - RNA, 22 nt, Mycobacterium avium subsp. paratuberculosis
cuucuugcgauugcggcuggcg

SEQ ID NO: 9920 - RNA, 22 nt, Mycobacterium avium subsp. paratuberculosis
cuugacgugcucggcgcucagc

SEQ ID NO: 9921 - RNA, 22 nt, Mycobacterium avium subsp. paratuberculosis
gaaagugcaaccagcgacgugu

SEQ ID NO: 9922 - RNA, 22 nt, Mycobacterium avium subsp. paratuberculosis
cuuugaaauaggcgugcaggcg

SEQ ID NO: 9923 - RNA, 22 nt, Mycobacterium avium subsp. paratuberculosis
cugcagacccgcgccgucuggc

SEQ ID NO: 9924 - RNA, 20 nt, Mycobacterium avium subsp. paratuberculosis
cugccccggcgggauggcga

SEQ ID NO: 9925 - RNA, 22 nt, Mycobacterium avium subsp. paratuberculosis
cugggccaucgaccgcggcgcg

SEQ ID NO: 9926 - RNA, 22 nt, Mycobacterium avium subsp. paratuberculosis
cuggcugacgucagcgacuucg

SEQ ID NO: 9927 - RNA, 22 nt, Mycobacterium avium subsp. paratuberculosis
cuggugaaucggcccauagcgg

SEQ ID NO: 9928 - RNA, 22 nt, Mycobacterium avium subsp. paratuberculosis
cuggcgcaguuuucggccgaag

SEQ ID NO: 9929 - RNA, 22 nt, Mycobacterium avium subsp. paratuberculosis
cuggccagcuugcgggccgacu

SEQ ID NO: 9930 - RNA, 22 nt, Mycobacterium avium subsp. paratuberculosis
cuggcccacuacgccgggcugg

SEQ ID NO: 9931 - RNA, 22 nt, Mycobacterium avium subsp. paratuberculosis
cuggccgaggccggccacaccg

SEQ ID NO: 9932 - RNA, 22 nt, Mycobacterium avium subsp. paratuberculosis
cggguucaccgcggugauccug

SEQ ID NO: 9933 - RNA, 22 nt, Mycobacterium avium subsp. paratuberculosis
cggucaccccguagcgggccag

SEQ ID NO: 9934 - RNA, 22 nt, Mycobacterium avium subsp. paratuberculosis
cggucaccgccgcgccggacgg

SEQ ID NO: 9935 - RNA, 22 nt, Mycobacterium avium subsp. paratuberculosis
cggucaccgguguggagauguu

SEQ ID NO: 9936 - RNA, 23 nt, Mycobacterium avium subsp. paratuberculosis
cggucagggugaugaugccguuc

SEQ ID NO: 9937 - RNA, 22 nt, Mycobacterium avium subsp. paratuberculosis
cguggagggcugcacggcgccg

SEQ ID NO: 9938 - RNA, 22 nt, Mycobacterium avium subsp. paratuberculosis
cgugccccgcgacaagccaggc

SEQ ID NO: 9939 - RNA, 22 nt, Mycobacterium avium subsp. paratuberculosis
cucccuggcugccgcuggagcg

SEQ ID NO: 9940 - RNA, 20 nt, Mycobacterium avium subsp. paratuberculosis
cuaccugguggagcaggccc

SEQ ID NO: 9941 - RNA, 22 nt, Mycobacterium avium subsp. paratuberculosis
cucacuccucguucaccugugu

SEQ ID NO: 9942 - RNA, 22 nt, Mycobacterium avium subsp. paratuberculosis
cuccuggaagccggccgcgacg

SEQ ID NO: 9943 - RNA, 22 nt, Mycobacterium avium subsp. paratuberculosis
cucggccaagggcccgcacgcc

SEQ ID NO: 9944 - RNA, 22 nt, Mycobacterium avium subsp. paratuberculosis
cucggccaggcucgcggcgaug

SEQ ID NO: 9945 - RNA, 19 nt, Mycobacterium avium subsp. paratuberculosis
cucuagccuacgcagcccg

SEQ ID NO: 9946 - RNA, 22 nt, Mycobacterium avium subsp. paratuberculosis
cucugcugcgcugccuggucga

SEQ ID NO: 9947 - RNA, 22 nt, Mycobacterium avium subsp. paratuberculosis
gcauggcccugcccgucgucag

SEQ ID NO: 9948 - RNA, 22 nt, Mycobacterium avium subsp. paratuberculosis
gccaccaccgucugcucggcgg

SEQ ID NO: 9949 - RNA, 22 nt, Mycobacterium avium subsp. paratuberculosis
gccagcacccgcaacagcuguu

SEQ ID NO: 9950 - RNA, 22 nt, Mycobacterium avium subsp. paratuberculosis
gccagcaccgcgcugugcgugg

SEQ ID NO: 9951 - RNA, 22 nt, Mycobacterium avium subsp. paratuberculosis
gcagcauguccugccggcgggu

SEQ ID NO: 9952 - RNA, 22 nt, Mycobacterium avium subsp. paratuberculosis
gcagcaggacgagcucaccucg

SEQ ID NO: 9953 - RNA, 22 nt, Mycobacterium avium subsp. paratuberculosis
gccgaacugcugggccugggca

SEQ ID NO: 9954 - RNA, 22 nt, Mycobacterium avium subsp. paratuberculosis
gccagguuguuguuggugcggc

SEQ ID NO: 9955 - RNA, 22 nt, Mycobacterium avium subsp. paratuberculosis
gccccgacucgacgcuggcggu

SEQ ID NO: 9956 - RNA, 22 nt, Mycobacterium avium subsp. paratuberculosis
gcccgccaugcccgggaucugg

SEQ ID NO: 9957 - RNA, 20 nt, Mycobacterium avium subsp. paratuberculosis
gccaugagugcacguugggc

SEQ ID NO: 9958 - RNA, 22 nt, Mycobacterium avium subsp. paratuberculosis
gccaggccuccugcacggcguc

SEQ ID NO: 9959 - RNA, 22 nt, Mycobacterium avium subsp. paratuberculosis
gagcucacccggcucgccgugc

SEQ ID NO: 9960 - RNA, 22 nt, Mycobacterium avium subsp. paratuberculosis
gagacccacccaggucugccgg

SEQ ID NO: 9961 - RNA, 22 nt, Mycobacterium avium subsp. paratuberculosis
gagacgagcgccuguaugaccg

SEQ ID NO: 9962 - RNA, 22 nt, Mycobacterium avium subsp. paratuberculosis
gaccagguggccgcccgcaccc

SEQ ID NO: 9963 - RNA, 22 nt, Mycobacterium avium subsp. paratuberculosis
gaccagguuggucaccggcacc

SEQ ID NO: 9964 - RNA, 22 nt, Mycobacterium avium subsp. paratuberculosis
gaccccagucggacaggucgcg

SEQ ID NO: 9965 - RNA, 22 nt, Mycobacterium avium subsp. paratuberculosis
gaccugcucgacgggugggugg

SEQ ID NO: 9966 - RNA, 22 nt, Mycobacterium avium subsp. paratuberculosis
gaggguggcguacagggugccg

SEQ ID NO: 9967 - RNA, 22 nt, Mycobacterium avium subsp. paratuberculosis
gauggcgacggauucgcggguc

SEQ ID NO: 9968 - RNA, 22 nt, Mycobacterium avium subsp. paratuberculosis
gaugggucugcgccucgaucag

SEQ ID NO: 9969 - RNA, 22 nt, Mycobacterium avium subsp. paratuberculosis
gauggugucgcgcuggcuggac

SEQ ID NO: 9970 - RNA, 20 nt, Mycobacterium avium subsp. paratuberculosis
gcaaggggcgaucgcggcaa

SEQ ID NO: 9971 - RNA, 22 nt, Mycobacterium avium subsp. paratuberculosis
cccgcgcccggguucgaggcca

SEQ ID NO: 9972 - RNA, 22 nt, Mycobacterium avium subsp. paratuberculosis
ccaugguggcguccaggaugcg

SEQ ID NO: 9973 - RNA, 22 nt, Mycobacterium avium subsp. paratuberculosis
cccaggcuggccaggaugccca

SEQ ID NO: 9974 - RNA, 22 nt, Mycobacterium avium subsp. paratuberculosis
ccagccguggcaggacaacgag

SEQ ID NO: 9975 - RNA, 22 nt, Mycobacterium avium subsp. paratuberculosis
ccagccguugucgaacagcagc

SEQ ID NO: 9976 - RNA, 22 nt, Mycobacterium avium subsp. paratuberculosis
ccagccgcggucgggcagccag

SEQ ID NO: 9977 - RNA, 22 nt, Mycobacterium avium subsp. paratuberculosis
ccagcugggcgccaccugcaac

SEQ ID NO: 9978 - RNA, 22 nt, Mycobacterium avium subsp. paratuberculosis
caucucgggcgcgauguaggcg

SEQ ID NO: 9979 - RNA, 22 nt, Mycobacterium avium subsp. paratuberculosis
caucugcacgcaggccugcacg

SEQ ID NO: 9980 - RNA, 22 nt, Mycobacterium avium subsp. paratuberculosis
cauccugggcgccaccgcgcac

SEQ ID NO: 9981 - RNA, 22 nt, Mycobacterium avium subsp. paratuberculosis
cauccaccuggagggcccgugg

SEQ ID NO: 9982 - RNA, 18 nt, Mycobacterium avium subsp. paratuberculosis
cagggucuuucuggugcc

SEQ ID NO: 9983 - RNA, 22 nt, Mycobacterium avium subsp. paratuberculosis
caggucuuccagaaggcggucg

SEQ ID NO: 9984 - RNA, 22 nt, Mycobacterium avium subsp. paratuberculosis
caguuccucgucgcagucggcg

SEQ ID NO: 9985 - RNA, 22 nt, Mycobacterium avium subsp. paratuberculosis
caguucggcuuugagcucgucg

SEQ ID NO: 9986 - RNA, 22 nt, Mycobacterium avium subsp. paratuberculosis
cagcuuggccaggucucccucg

SEQ ID NO: 9987 - RNA, 22 nt, Mycobacterium avium subsp. paratuberculosis
cagcucgcccgcggccuggccg

SEQ ID NO: 9988 - RNA, 22 nt, Mycobacterium avium subsp. paratuberculosis
cagcugcaggguggccagcgac

SEQ ID NO: 9989 - RNA, 22 nt, Mycobacterium avium subsp. paratuberculosis
caugaguacaagugaguaccga

SEQ ID NO: 9990 - RNA, 22 nt, Mycobacterium avium subsp. paratuberculosis
ccaaccgcaucggcagcgccac

SEQ ID NO: 9991 - RNA, 22 nt, Mycobacterium avium subsp. paratuberculosis
ccacacccgcugcgagaucagc

SEQ ID NO: 9992 - RNA, 22 nt, Mycobacterium avium subsp. paratuberculosis
ccaccaccugcggcagcucgaa

SEQ ID NO: 9993 - RNA, 22 nt, Mycobacterium avium subsp. paratuberculosis
ccagagccuuuccagcaggccc

SEQ ID NO: 9994 - RNA, 22 nt, Mycobacterium avium subsp. paratuberculosis
ccacccgcaucccgugccaggc

SEQ ID NO: 9995 - RNA, 22 nt, Mycobacterium avium subsp. paratuberculosis
ccagcagcgagaugacccggug

SEQ ID NO: 9996 - RNA, 22 nt, Mycobacterium avium subsp. paratuberculosis
ccagcccgaacuaucggcugug

SEQ ID NO: 9997 - RNA, 22 nt, Mycobacterium avium subsp. paratuberculosis
ccagcccuaugagcagcccggc

SEQ ID NO: 9998 - RNA, 22 nt, Mycobacterium avium subsp. paratuberculosis
ccagccgcagcccguccuccau

SEQ ID NO: 9999 - RNA, 23 nt, Mycobacterium avium subsp. paratuberculosis
ccgguuugcggugcagcacuguc

SEQ ID NO: 10000 - RNA, 22 nt, Mycobacterium avium subsp. paratuberculosis
ccgagcucgcgcugcugaccgc

SEQ ID NO: 10001 - RNA, 22 nt, Mycobacterium avium subsp. paratuberculosis
ccgccacuucccgcagguuguc

SEQ ID NO: 10002 - RNA, 22 nt, Mycobacterium avium subsp. paratuberculosis
ccguggccuugccgccggauga

SEQ ID NO: 10003 - RNA, 22 nt, Mycobacterium avium subsp. paratuberculosis
ccugccagucccgcucgauggg

SEQ ID NO: 10004 - RNA, 22 nt, Mycobacterium avium subsp. paratuberculosis
ccuugagcaccgguccggcguu

SEQ ID NO: 10005 - RNA, 22 nt, Mycobacterium avium subsp. paratuberculosis
cgaccugcggccgucggaugcg

SEQ ID NO: 10006 - RNA, 22 nt, Mycobacterium avium subsp. paratuberculosis
cgcacccuguccggcgggcagc

SEQ ID NO: 10007 - RNA, 22 nt, Mycobacterium avium subsp. paratuberculosis
cgcagcauuucuucgaucgcgg

SEQ ID NO: 10008 - RNA, 22 nt, Mycobacterium avium subsp. paratuberculosis
cgcauccagccgcuggcgcccg

SEQ ID NO: 10009 - RNA, 22 nt, Mycobacterium avium subsp. paratuberculosis
cgccacccccgagcaggcggcg

SEQ ID NO: 10010 - RNA, 22 nt, Mycobacterium avium subsp. paratuberculosis
cgccccaccgauugcucgaaau

SEQ ID NO: 10011 - RNA, 22 nt, Mycobacterium avium subsp. paratuberculosis
cggagaccauguucgccgagca

SEQ ID NO: 10012 - RNA, 22 nt, Mycobacterium avium subsp. paratuberculosis
cgcccggccaccgacgugaugg

SEQ ID NO: 10013 - RNA, 22 nt, Mycobacterium avium subsp. paratuberculosis
cgccuugagacaggacacgucg

SEQ ID NO: 10014 - RNA, 21 nt, Mycobacterium avium subsp. paratuberculosis
cgcugcccggcgcgauguugg

SEQ ID NO: 10015 - RNA, 22 nt, Mycobacterium avium subsp. paratuberculosis
cgagcugcucgacaucgacgag

SEQ ID NO: 10016 - RNA, 22 nt, Mycobacterium avium subsp. paratuberculosis
cgcccggcgccgcgacugguga

SEQ ID NO: 10017 - RNA, 22 nt, Mycobacterium avium subsp. paratuberculosis
cgccuugggcucccaguggucg

SEQ ID NO: 10018 - RNA, 22 nt, Mycobacterium avium subsp. paratuberculosis
cgcgcgccguagacguccagca

SEQ ID NO: 10019 - RNA, 22 nt, Mycobacterium avium subsp. paratuberculosis
gucaccaucaguugccacgacg

SEQ ID NO: 10020 - RNA, 22 nt, Mycobacterium avium subsp. paratuberculosis
gucaucagcuggcugucggcca

SEQ ID NO: 10021 - RNA, 21 nt, Mycobacterium avium subsp. paratuberculosis
ggugcuuuugugucugcucgc

SEQ ID NO: 10022 - RNA, 22 nt, Mycobacterium avium subsp. paratuberculosis
gguucaaggugaugcccgacga

SEQ ID NO: 10023 - RNA, 22 nt, Mycobacterium avium subsp. paratuberculosis
ggguggcucaacaccccggacg

SEQ ID NO: 10024 - RNA, 22 nt, Mycobacterium avium subsp. paratuberculosis
ggguggucagcgcgaucuucag

SEQ ID NO: 10025 - RNA, 22 nt, Mycobacterium avium subsp. paratuberculosis
ggguuugguccucgaucacgcg

SEQ ID NO: 10026 - RNA, 22 nt, Mycobacterium avium subsp. paratuberculosis
ggucacccgguugggggucacc

SEQ ID NO: 10027 - RNA, 22 nt, Mycobacterium avium subsp. paratuberculosis
gggucaccggauggucgaugac

SEQ ID NO: 10028 - RNA, 22 nt, Mycobacterium avium subsp. paratuberculosis
ggcugugcucgggcggcagguc

SEQ ID NO: 10029 - RNA, 22 nt, Mycobacterium avium subsp. paratuberculosis
ggcuugacaucuauuccggacu

SEQ ID NO: 10030 - RNA, 22 nt, Mycobacterium avium subsp. paratuberculosis
gggcgcuggcgcuggacagcga

SEQ ID NO: 10031 - RNA, 22 nt, Mycobacterium avium subsp. paratuberculosis
gggcugaccggcgauggccauc

SEQ ID NO: 10032 - RNA, 22 nt, Mycobacterium avium subsp. paratuberculosis
gggcugcacgacggccuugacu

SEQ ID NO: 10033 - RNA, 22 nt, Mycobacterium avium subsp. paratuberculosis
guugggggcgcugggauuugcc

SEQ ID NO: 10034 - RNA, 22 nt, Mycobacterium avium subsp. paratuberculosis
guugguggaucgucgcgaaguc

SEQ ID NO: 10035 - RNA, 22 nt, Mycobacterium avium subsp. paratuberculosis
guugaugugcaccaucucugcg

SEQ ID NO: 10036 - RNA, 22 nt, Mycobacterium avium subsp. paratuberculosis
guugcagcgccgucugcagcug

SEQ ID NO: 10037 - RNA, 19 nt, Mycobacterium avium subsp. paratuberculosis
guggccaagacggccagca

SEQ ID NO: 10038 - RNA, 22 nt, Mycobacterium avium subsp. paratuberculosis
guggccacgaucgccgcggugg

SEQ ID NO: 10039 - RNA, 22 nt, Mycobacterium avium subsp. paratuberculosis
guggccagccgggcgaccgucu

SEQ ID NO: 10040 - RNA, 22 nt, Mycobacterium avium subsp. paratuberculosis
guggcuggccgaguucgcgcug

SEQ ID NO: 10041 - RNA, 22 nt, Mycobacterium avium subsp. paratuberculosis
guggcugggucuggucgccaac

SEQ ID NO: 10042 - RNA, 20 nt, Mycobacterium avium subsp. paratuberculosis
guggucaccggcgauggugc

SEQ ID NO: 10043 - RNA, 22 nt, Mycobacterium avium subsp. paratuberculosis
gugguggccgcggugaccaaug

SEQ ID NO: 10044 - RNA, 22 nt, Mycobacterium avium subsp. paratuberculosis
gugguggcggcgcuggcgcaca

SEQ ID NO: 10045 - RNA, 22 nt, Mycobacterium avium subsp. paratuberculosis
gugguguccaccccgccggcgg

SEQ ID NO: 10046 - RNA, 22 nt, Mycobacterium avium subsp. paratuberculosis
gugugaaaacgcccgcgacuac

SEQ ID NO: 10047 - RNA, 22 nt, Mycobacterium avium subsp. paratuberculosis
gugcaccugcuggaucacggcg

SEQ ID NO: 10048 - RNA, 22 nt, Mycobacterium avium subsp. paratuberculosis
gugcucacgcugcugcuggccg

SEQ ID NO: 10049 - RNA, 22 nt, Mycobacterium avium subsp. paratuberculosis
gugcuuuugcgucugcucgcca

SEQ ID NO: 10050 - RNA, 22 nt, Mycobacterium avium subsp. paratuberculosis
ucaauuccgguggugugcugaa

SEQ ID NO: 10051 - RNA, 22 nt, Mycobacterium avium subsp. paratuberculosis
ucaccaugcacccagaucucgc

SEQ ID NO: 10052 - RNA, 22 nt, Mycobacterium avium subsp. paratuberculosis
ucaccgccggcguggaccggcu

SEQ ID NO: 10053 - RNA, 22 nt, Mycobacterium avium subsp. paratuberculosis
ucagguugguggcucccaguau

SEQ ID NO: 10054 - RNA, 22 nt, Mycobacterium avium subsp. paratuberculosis
ucaggccgguggcgguguugcu

SEQ ID NO: 10055 - RNA, 22 nt, Mycobacterium avium subsp. paratuberculosis
ucagccucggccuggacagucg

SEQ ID NO: 10056 - RNA, 22 nt, Mycobacterium avium subsp. paratuberculosis
ucagcgucgucgcgccggcuuu

SEQ ID NO: 10057 - RNA, 22 nt, Mycobacterium avium subsp. paratuberculosis
uccgcgccucgacgcccggaua

SEQ ID NO: 10058 - RNA, 22 nt, Mycobacterium avium subsp. paratuberculosis
uccugggcaucgccaagucggu

SEQ ID NO: 10059 - RNA, 22 nt, Mycobacterium avium subsp. paratuberculosis
ucaggcuggaagugcucggcuu

SEQ ID NO: 10060 - RNA, 22 nt, Mycobacterium avium subsp. paratuberculosis
uccauucucggccgggugcaca

SEQ ID NO: 10061 - RNA, 22 nt, Mycobacterium avium subsp. paratuberculosis
uccacccgcagagaucccaagg

SEQ ID NO: 10062 - RNA, 22 nt, Mycobacterium avium subsp. paratuberculosis
uccaccgcccaggucgaugcgc

SEQ ID NO: 10063 - RNA, 22 nt, Mycobacterium avium subsp. paratuberculosis
ucgcugggcgcccaggcgcguu

SEQ ID NO: 10064 - RNA, 22 nt, Mycobacterium avium subsp. paratuberculosis
ucgcugggcggcagcucggcau

SEQ ID NO: 10065 - RNA, 22 nt, Mycobacterium avium subsp. paratuberculosis
uccuggggccgggcccgagcau

SEQ ID NO: 10066 - RNA, 22 nt, Mycobacterium avium subsp. paratuberculosis
uccuggugcguccaagcggagu

SEQ ID NO: 10067 - RNA, 22 nt, Mycobacterium avium subsp. paratuberculosis
ucgagcagccgaccagcgucac

SEQ ID NO: 10068 - RNA, 22 nt, Mycobacterium avium subsp. paratuberculosis
ucggcagcagcuggcucagcga

SEQ ID NO: 10069 - RNA, 22 nt, Mycobacterium avium subsp. paratuberculosis
ucggcucaccgacgacgaggug

SEQ ID NO: 10070 - RNA, 22 nt, Mycobacterium avium subsp. paratuberculosis
gcugaaccugauccucaagggc

SEQ ID NO: 10071 - RNA, 22 nt, Mycobacterium avium subsp. paratuberculosis
gcguggugaucguguuccccgg

SEQ ID NO: 10072 - RNA, 22 nt, Mycobacterium avium subsp. paratuberculosis
gccucgacgugcgugucgccgc

SEQ ID NO: 10073 - RNA, 22 nt, Mycobacterium avium subsp. paratuberculosis
gccguggugguuagcggcauga

SEQ ID NO: 10074 - RNA, 22 nt, Mycobacterium avium subsp. paratuberculosis
gccugccaccggucucgaacuc

SEQ ID NO: 10075 - RNA, 22 nt, Mycobacterium avium subsp. paratuberculosis
gccugcugacggggucgcugga

SEQ ID NO: 10076 - RNA, 22 nt, Mycobacterium avium subsp. paratuberculosis
gccuggaccuggacuggcgccc

SEQ ID NO: 10077 - RNA, 22 nt, Mycobacterium avium subsp. paratuberculosis
gcgccgcugcaggcugcacucg

SEQ ID NO: 10078 - RNA, 22 nt, Mycobacterium avium subsp. paratuberculosis
gcugcaucgcgaaccggucgcc

SEQ ID NO: 10079 - RNA, 22 nt, Mycobacterium avium subsp. paratuberculosis
gcugccagucggccgccuuggu

SEQ ID NO: 10080 - RNA, 22 nt, Mycobacterium avium subsp. paratuberculosis
gcugcggcccgaggucgagggu

SEQ ID NO: 10081 - RNA, 18 nt, Mycobacterium avium subsp. paratuberculosis
gcugcggcugcagcagga

SEQ ID NO: 10082 - RNA, 19 nt, Mycobacterium avium subsp. paratuberculosis
gcugggccuggucgcgucc

SEQ ID NO: 10083 - RNA, 23 nt, Mycobacterium avium subsp. paratuberculosis
ggaaagugugaucccgaugaugg

SEQ ID NO: 10084 - RNA, 22 nt, Mycobacterium avium subsp. paratuberculosis
gcugguagacgacgacgccgag

SEQ ID NO: 10085 - RNA, 22 nt, Mycobacterium avium subsp. paratuberculosis
ggaccugcgacugcaccccacc

SEQ ID NO: 10086 - RNA, 22 nt, Mycobacterium avium subsp. paratuberculosis
ggaccugcuggaccggcugcac

SEQ ID NO: 10087 - RNA, 22 nt, Mycobacterium avium subsp. paratuberculosis
ggcagcaugcucuccucguggu

SEQ ID NO: 10088 - RNA, 22 nt, Mycobacterium avium subsp. paratuberculosis
ggccagcagggugggguuacgg

SEQ ID NO: 10089 - RNA, 22 nt, Mycobacterium avium subsp. paratuberculosis
ggccagcucggcgaucgcccgu

SEQ ID NO: 10090 - RNA, 22 nt, Mycobacterium avium subsp. paratuberculosis
ggccucccacagcgggcggugc

SEQ ID NO: 10091 - RNA, 22 nt, Mycobacterium avium subsp. paratuberculosis
ggccugcagaaugcgcguuuug

SEQ ID NO: 10092 - RNA, 22 nt, Mycobacterium avium subsp. paratuberculosis
ggccuggucaucgagcuggcgg

SEQ ID NO: 10093 - RNA, 22 nt, Mycobacterium avium subsp. paratuberculosis
ggccuggucggcguucagcguc

SEQ ID NO: 10094 - RNA, 22 nt, Mycobacterium avium subsp. paratuberculosis
ggcgagcagacgcaaaagcccc

SEQ ID NO: 10095 - RNA, 22 nt, Mycobacterium avium subsp. paratuberculosis
ggccgcgcucaaacaccugggc

SEQ ID NO: 10096 - RNA, 22 nt, Mycobacterium avium subsp. paratuberculosis
ggcgccacgcccgggcaccugg

SEQ ID NO: 10097 - RNA, 22 nt, Mycobacterium avium subsp. paratuberculosis
ggcgcgggcgucccgguggugc

SEQ ID NO: 10098 - RNA, 22 nt, Mycobacterium avium subsp. paratuberculosis
ggcgcgggcguuggccacccag

SEQ ID NO: 10099 - RNA, 22 nt, Mycobacterium avium subsp. paratuberculosis
ggcuggauaacacaggacgacg

SEQ ID NO: 10100 - RNA, 22 nt, Mycobacterium avium subsp. paratuberculosis
aacgugaagcuaguuucacguu

SEQ ID NO: 10101 - RNA, 22 nt, Mycobacterium avium subsp. paratuberculosis
aacaggccgcggcguugcaacu

SEQ ID NO: 10102 - RNA, 22 nt, Mycobacterium avium subsp. paratuberculosis
aagcaguacgcgaugucggauc

SEQ ID NO: 10103 - RNA, 22 nt, Mycobacterium avium subsp. paratuberculosis
aagaaggcccagucgcggcugc

SEQ ID NO: 10104 - RNA, 22 nt, Mycobacterium avium subsp. paratuberculosis
aacugcuggcccggcacagugu

SEQ ID NO: 10105 - RNA, 22 nt, Mycobacterium avium subsp. paratuberculosis
accauggccgcccggguggugu

SEQ ID NO: 10106 - RNA, 22 nt, Mycobacterium avium subsp. paratuberculosis
acagccgcagcacgggcuggcg

SEQ ID NO: 10107 - RNA, 22 nt, Mycobacterium avium subsp. paratuberculosis
acagcugcgaccacgucagggu

SEQ ID NO: 10108 - RNA, 22 nt, Mycobacterium avium subsp. paratuberculosis
acagaugucaauagugugaguu

SEQ ID NO: 10109 - RNA, 22 nt, Mycobacterium avium subsp. paratuberculosis
aauccacaucgccgacggcgug

SEQ ID NO: 10110 - RNA, 22 nt, Mycobacterium avium subsp. paratuberculosis
aaguaucuagaugaauucagug

SEQ ID NO: 10111 - RNA, 22 nt, Mycobacterium avium subsp. paratuberculosis
aaugccucaucgaggcgcugca

SEQ ID NO: 10112 - RNA, 22 nt, Mycobacterium avium subsp. paratuberculosis
aagacaacgcgugucauuggcg

SEQ ID NO: 10113 - RNA, 22 nt, Mycobacterium avium subsp. paratuberculosis
aaaguuugcgguuucagcauuc

SEQ ID NO: 10114 - RNA, 22 nt, Mycobacterium avium subsp. paratuberculosis
aaaccagcacugagugcccacc

SEQ ID NO: 10115 - RNA, 21 nt, Mycobacterium avium subsp. paratuberculosis
agcaugaagccggugcucagc

SEQ ID NO: 10116 - RNA, 22 nt, Mycobacterium avium subsp. paratuberculosis
agcagagccuugcgcugacgau

SEQ ID NO: 10117 - RNA, 22 nt, Mycobacterium avium subsp. paratuberculosis
aggcuugcgcuggcaacucaac

SEQ ID NO: 10118 - RNA, 22 nt, Mycobacterium avium subsp. paratuberculosis
agcccggcgaucugcuggcugc

SEQ ID NO: 10119 - RNA, 22 nt, Mycobacterium avium subsp. paratuberculosis
agcucagcgaccacacgguguc

SEQ ID NO: 10120 - RNA, 22 nt, Mycobacterium avium subsp. paratuberculosis
aggggcugcacgucggccaccc

SEQ ID NO: 10121 - RNA, 22 nt, Mycobacterium avium subsp. paratuberculosis
agggucuaguugaacgagucgc

SEQ ID NO: 10122 - RNA, 22 nt, Mycobacterium avium subsp. paratuberculosis
aggucacccugggcgaguuggu

SEQ ID NO: 10123 - RNA, 22 nt, Mycobacterium avium subsp. paratuberculosis
agcccggccgcagccuggagcg

SEQ ID NO: 10124 - RNA, 22 nt, Mycobacterium avium subsp. paratuberculosis
agccgggcgugcucguuggcgu

SEQ ID NO: 10125 - RNA, 22 nt, Mycobacterium avium subsp. paratuberculosis
acgagcuguggguuuccaggua

SEQ ID NO: 10126 - RNA, 22 nt, Mycobacterium avium subsp. paratuberculosis
accugggccagaugcucgacuu

SEQ ID NO: 10127 - RNA, 22 nt, Mycobacterium avium subsp. paratuberculosis
accuugacggcgugcccgacgu

SEQ ID NO: 10128 - RNA, 22 nt, Mycobacterium avium subsp. paratuberculosis
accuugacguccucaucguggg

SEQ ID NO: 10129 - RNA, 22 nt, Mycobacterium avium subsp. paratuberculosis
acguccuggauguggcccgcgc

SEQ ID NO: 10130 - RNA, 22 nt, Mycobacterium avium subsp. paratuberculosis
acccggcugccggaccaccuca

SEQ ID NO: 10131 - RNA, 22 nt, Mycobacterium avium subsp. paratuberculosis
acccggcugggcgccuacgcgc

SEQ ID NO: 10132 - RNA, 22 nt, Mycobacterium avium subsp. paratuberculosis
acccggcuggucgaggaccugc

SEQ ID NO: 10133 - RNA, 22 nt, Mycobacterium avium subsp. paratuberculosis
accggcaucaccacggcgaugg

SEQ ID NO: 10134 - RNA, 22 nt, Mycobacterium avium subsp. paratuberculosis
accucccagcccucggugaacu

SEQ ID NO: 10135 - RNA, 22 nt, Mycobacterium avium subsp. paratuberculosis
agcaccgccgucaccugcccga

SEQ ID NO: 10136 - RNA, 21 nt, Mycobacterium avium subsp. paratuberculosis
agcaacaauggcgcucggccg

SEQ ID NO: 10137 - RNA, 22 nt, Mycobacterium avium subsp. paratuberculosis
agagcuccagcgagaacgggcc

SEQ ID NO: 10138 - RNA, 22 nt, Mycobacterium avium subsp. paratuberculosis
agaggaacaucgcgauggcccu

SEQ ID NO: 10139 - RNA, 22 nt, Mycobacterium avium subsp. paratuberculosis
agagucucaugggcaucaucgg

SEQ ID NO: 10140 - RNA, 19 nt, Mycobacterium avium subsp. paratuberculosis
acugcgacgaucaaccggc

SEQ ID NO: 10141 - RNA, 22 nt, Mycobacterium avium subsp. paratuberculosis
acugggccgcccuguaccggaa

SEQ ID NO: 10142 - RNA, 22 nt, Mycobacterium avium subsp. paratuberculosis
acugccacaacgacucccgcgu

SEQ ID NO: 10143 - RNA, 22 nt, Mycobacterium avium subsp. paratuberculosis
acguugggcagaaacgcuuuuc

SEQ ID NO: 10144 - RNA, 22 nt, Mycobacterium avium subsp. paratuberculosis
acucgcccggcgcccugcugcg

SEQ ID NO: 10145 - RNA, 22 nt, Mycobacterium avium subsp. paratuberculosis
acgcacccgccgaucgaggacc

SEQ ID NO: 10146 - RNA, 20 nt, Mycobacterium avium subsp. paratuberculosis
acgucccaauccugcuggug

SEQ ID NO: 10147 - RNA, 22 nt, Mycobacterium avium subsp. paratuberculosis
acgccgugguacuccggcgcga

SEQ ID NO: 10148 - RNA, 22 nt, Mycobacterium avium subsp. paratuberculosis
acgcugggcuacgaggugcgcu

SEQ ID NO: 10149 - RNA, 22 nt, Mycobacterium avium subsp. paratuberculosis
accuccagcacccgggucagcg

SEQ ID NO: 10150 - RNA, 22 nt, Mycobacterium avium subsp. paratuberculosis
accugggcgcgccggucgagcc

SEQ ID NO: 10151 - RNA, 22 nt, Mycobacterium avium subsp. paratuberculosis
agcaccgccagcacccacgaca

SEQ ID NO: 10152 - RNA, 22 nt, Mycobacterium avium subsp. paratuberculosis
agauccagccgagcagcaccau

SEQ ID NO: 10153 - RNA, 22 nt, Mycobacterium avium subsp. paratuberculosis
agacccagcagcaccgacgcga

SEQ ID NO: 10154 - RNA, 22 nt, Mycobacterium avium subsp. paratuberculosis
agaccgagcuguuggccggcgc

SEQ ID NO: 10155 - RNA, 22 nt, Mycobacterium avium subsp. paratuberculosis
agcagcaugccgucgcggcgaa

SEQ ID NO: 10156 - RNA, 22 nt, Mycobacterium avium subsp. paratuberculosis
agcagguggugcgcugcagcga

SEQ ID NO: 10157 - RNA, 22 nt, Mycobacterium avium subsp. paratuberculosis
accacgaggaccagcgucgcga

SEQ ID NO: 10158 - RNA, 22 nt, Mycobacterium avium subsp. paratuberculosis
accagcagcgcgucacgcugag

SEQ ID NO: 10159 - RNA, 22 nt, Mycobacterium avium subsp. paratuberculosis
accagcagcugcccgggcggua

SEQ ID NO: 10160 - RNA, 18 nt, Mycobacterium avium subsp. paratuberculosis
accacccaggagaucguc

SEQ ID NO: 10161 - RNA, 22 nt, Mycobacterium avium subsp. paratuberculosis
accagcaguaugggcgccgguu

SEQ ID NO: 10162 - RNA, 22 nt, Mycobacterium avium subsp. paratuberculosis
aucaggucggugcggugcuugg

SEQ ID NO: 10163 - RNA, 22 nt, Mycobacterium avium subsp. paratuberculosis
aucagcagcgaccgcacgugcg

SEQ ID NO: 10164 - RNA, 22 nt, Mycobacterium avium subsp. paratuberculosis
auccagcagcggccggucccgc

SEQ ID NO: 10165 - RNA, 22 nt, Mycobacterium avium subsp. paratuberculosis
auccaggccgccgagaucgagc

SEQ ID NO: 10166 - RNA, 22 nt, Mycobacterium avium subsp. paratuberculosis
auccaggcgguguucggcuuca

SEQ ID NO: 10167 - RNA, 22 nt, Mycobacterium avium subsp. paratuberculosis
auccaggcguugaucgacggcc

SEQ ID NO: 10168 - RNA, 22 nt, Mycobacterium avium subsp. paratuberculosis
aucuucuucuccgcggugcuga

SEQ ID NO: 10169 - RNA, 22 nt, Mycobacterium avium subsp. paratuberculosis
augauggugguaagcauuucgg

SEQ ID NO: 10170 - RNA, 18 nt, Mycobacterium avium subsp. paratuberculosis
auccugcacugcgacggc

SEQ ID NO: 10171 - RNA, 22 nt, Mycobacterium avium subsp. paratuberculosis
aguccuugaccaggaacuucag

SEQ ID NO: 10172 - RNA, 22 nt, Mycobacterium avium subsp. paratuberculosis
aggucaccgaagagguugccgc

SEQ ID NO: 10173 - RNA, 22 nt, Mycobacterium avium subsp. paratuberculosis
aggugcugcgcggacucuugcu

SEQ ID NO: 10174 - RNA, 22 nt, Mycobacterium avium subsp. paratuberculosis
agcuggucucggaucuggugcg

SEQ ID NO: 10175 - RNA, 20 nt, Mycobacterium avium subsp. paratuberculosis
caagggaguauucgggguuc

SEQ ID NO: 10176 - RNA, 22 nt, Mycobacterium avium subsp. paratuberculosis
caccagcaggauugggacgucg

SEQ ID NO: 10177 - RNA, 22 nt, Mycobacterium avium subsp. paratuberculosis
cacaccugggaagagcgcuggg

SEQ ID NO: 10178 - RNA, 22 nt, Mycobacterium avium subsp. paratuberculosis
cacaggugaucaucgaugcggc

SEQ ID NO: 10179 - RNA, 22 nt, Mycobacterium avium subsp. paratuberculosis
cacgcacugaccgggcugcagg

SEQ ID NO: 10180 - RNA, 23 nt, Mycobacterium avium subsp. paratuberculosis
cacgccagcgugacgcucggugc

SEQ ID NO: 10181 - RNA, 22 nt, Mycobacterium avium subsp. paratuberculosis
cacggcccgcucggacacccgc

SEQ ID NO: 10182 - RNA, 22 nt, Mycobacterium avium subsp. paratuberculosis
auggacaaccacuucgugccga

SEQ ID NO: 10183 - RNA, 22 nt, Mycobacterium avium subsp. paratuberculosis
auggcagcagcaucgugguggc

SEQ ID NO: 10184 - RNA, 22 nt, Mycobacterium avium subsp. paratuberculosis
augccucacucucgcaacgguc

SEQ ID NO: 10185 - RNA, 18 nt, Mycobacterium avium subsp. paratuberculosis
cccaugaguuuugccgcc

SEQ ID NO: 10186 - RNA, 22 nt, Mycobacterium avium subsp. paratuberculosis
ccccagccgagcgugcaccggc

SEQ ID NO: 10187 - RNA, 22 nt, Mycobacterium avium subsp. paratuberculosis
ccgccuccccguuggggugauu

SEQ ID NO: 10188 - RNA, 22 nt, Mycobacterium avium subsp. paratuberculosis
cccugggccugacauacgugcg

SEQ ID NO: 10189 - RNA, 22 nt, Mycobacterium avium subsp. paratuberculosis
ccgacgaguucggccuguucga

SEQ ID NO: 10190 - RNA, 17 nt, Mycobacterium avium subsp. paratuberculosis
ccgagcaccaccagcac

SEQ ID NO: 10191 - RNA, 22 nt, Mycobacterium avium subsp. paratuberculosis
ccgagcaccggauccaguccgc

SEQ ID NO: 10192 - RNA, 22 nt, Mycobacterium avium subsp. paratuberculosis
ccaacaacucgacguucggcgg

SEQ ID NO: 10193 - RNA, 22 nt, Mycobacterium avium subsp. paratuberculosis
ccagcaggucgcgguuggccag

SEQ ID NO: 10194 - RNA, 22 nt, Mycobacterium avium subsp. paratuberculosis
ccagcugguccagcacgucggg

SEQ ID NO: 10195 - RNA, 22 nt, Mycobacterium avium subsp. paratuberculosis
ccauaaguaguccuaauugccc

SEQ ID NO: 10196 - RNA, 22 nt, Mycobacterium avium subsp. paratuberculosis
ccagguugcgguggucccggug

SEQ ID NO: 10197 - RNA, 22 nt, Mycobacterium avium subsp. paratuberculosis
ccaguucgacggcgucgacgcc

SEQ ID NO: 10198 - RNA, 22 nt, Mycobacterium avium subsp. paratuberculosis
cccagcagcugcaggccgacag

SEQ ID NO: 10199 - RNA, 22 nt, Mycobacterium avium subsp. paratuberculosis
cccagcagcuggaggggcucgc

SEQ ID NO: 10200 - RNA, 22 nt, Mycobacterium avium subsp. paratuberculosis
cccagcagcuggauccgcaggc

SEQ ID NO: 10201 - RNA, 22 nt, Mycobacterium avium subsp. paratuberculosis
cagguucgugccuucggacagg

SEQ ID NO: 10202 - RNA, 22 nt, Mycobacterium avium subsp. paratuberculosis
caguauggauuggccggcgcgc

SEQ ID NO: 10203 - RNA, 22 nt, Mycobacterium avium subsp. paratuberculosis
cacuuccauuucccuugcccgc

SEQ ID NO: 10204 - RNA, 22 nt, Mycobacterium avium subsp. paratuberculosis
cagggugccgccuccaggucgc

SEQ ID NO: 10205 - RNA, 22 nt, Mycobacterium avium subsp. paratuberculosis
caggcugcccggcugcugccca

SEQ ID NO: 10206 - RNA, 22 nt, Mycobacterium avium subsp. paratuberculosis
caggcuggcaucgucggcgccg

SEQ ID NO: 10207 - RNA, 22 nt, Mycobacterium avium subsp. paratuberculosis
caugaggugacguucgaauccg

SEQ ID NO: 10208 - RNA, 22 nt, Mycobacterium avium subsp. paratuberculosis
ccacagagacucacgcgauggc

SEQ ID NO: 10209 - RNA, 22 nt, Mycobacterium avium subsp. paratuberculosis
cagcaggucauguucuagcggc

SEQ ID NO: 10210 - RNA, 22 nt, Mycobacterium avium subsp. paratuberculosis
cagcccggccagcucgucgggg

SEQ ID NO: 10211 - RNA, 22 nt, Mycobacterium avium subsp. paratuberculosis
cagcaaggcgcaugucggagcg

SEQ ID NO: 10212 - RNA, 22 nt, Mycobacterium avium subsp. paratuberculosis
cagcacgcggcguccaucaucg

SEQ ID NO: 10213 - RNA, 22 nt, Mycobacterium avium subsp. paratuberculosis
cagcgcgccgcggguggaguug

SEQ ID NO: 10214 - RNA, 22 nt, Mycobacterium avium subsp. paratuberculosis
cagcgggugcucggccugccgc

SEQ ID NO: 10215 - RNA, 22 nt, Mycobacterium avium subsp. paratuberculosis
cagcuugucgccgacgugcgcg

SEQ ID NO: 10216 - RNA, 22 nt, Mycobacterium avium subsp. paratuberculosis
caggauguggcugaccugcagg

SEQ ID NO: 10217 - RNA, 22 nt, Mycobacterium avium subsp. paratuberculosis
cggugguggccggcagccaguc

SEQ ID NO: 10218 - RNA, 22 nt, Mycobacterium avium subsp. paratuberculosis
cggugguggcgccgcugcuguc

SEQ ID NO: 10219 - RNA, 22 nt, Mycobacterium avium subsp. paratuberculosis
cggcugcaacgacugaccggcg

SEQ ID NO: 10220 - RNA, 22 nt, Mycobacterium avium subsp. paratuberculosis
cgggccaaccggcuggcccggc

SEQ ID NO: 10221 - RNA, 22 nt, Mycobacterium avium subsp. paratuberculosis
cggucaggccacugcucggccc

SEQ ID NO: 10222 - RNA, 22 nt, Mycobacterium avium subsp. paratuberculosis
cugugucuguccgcggcaucgc

SEQ ID NO: 10223 - RNA, 22 nt, Mycobacterium avium subsp. paratuberculosis
cuugaaccgguucaucgcgcug

SEQ ID NO: 10224 - RNA, 22 nt, Mycobacterium avium subsp. paratuberculosis
cuggugaucagcgccggcaucc

SEQ ID NO: 10225 - RNA, 22 nt, Mycobacterium avium subsp. paratuberculosis
cuggacugggacaagggcaaga

SEQ ID NO: 10226 - RNA, 22 nt, Mycobacterium avium subsp. paratuberculosis
cuggucacgcuguucgucaucu

SEQ ID NO: 10227 - RNA, 22 nt, Mycobacterium avium subsp. paratuberculosis
cugggcgcgcugccacagcgug

SEQ ID NO: 10228 - RNA, 22 nt, Mycobacterium avium subsp. paratuberculosis
cugggcgcggugguggccgcca

SEQ ID NO: 10229 - RNA, 22 nt, Mycobacterium avium subsp. paratuberculosis
cuggccauggcguucggccggu

SEQ ID NO: 10230 - RNA, 22 nt, Mycobacterium avium subsp. paratuberculosis
cuggccgacgcgcuggugcgac

SEQ ID NO: 10231 - RNA, 22 nt, Mycobacterium avium subsp. paratuberculosis
cugcgagccgguauugugaucg

SEQ ID NO: 10232 - RNA, 22 nt, Mycobacterium avium subsp. paratuberculosis
cugaccccggcgcgccagucgg

SEQ ID NO: 10233 - RNA, 22 nt, Mycobacterium avium subsp. paratuberculosis
cugcccaaggacaccgcggcgc

SEQ ID NO: 10234 - RNA, 22 nt, Mycobacterium avium subsp. paratuberculosis
cugcccgaccaggaccugccgu

SEQ ID NO: 10235 - RNA, 22 nt, Mycobacterium avium subsp. paratuberculosis
cucgcugguggccgcggugcug

SEQ ID NO: 10236 - RNA, 22 nt, Mycobacterium avium subsp. paratuberculosis
cgugguggcgcagaccaagacc

SEQ ID NO: 10237 - RNA, 22 nt, Mycobacterium avium subsp. paratuberculosis
cguggugguagccggcggucag

SEQ ID NO: 10238 - RNA, 22 nt, Mycobacterium avium subsp. paratuberculosis
cucacgccgucggugcugggcc

SEQ ID NO: 10239 - RNA, 22 nt, Mycobacterium avium subsp. paratuberculosis
cucccggggcgagcugcacggc

SEQ ID NO: 10240 - RNA, 22 nt, Mycobacterium avium subsp. paratuberculosis
cuccgggcugaucgcccgcacc

SEQ ID NO: 10241 - RNA, 19 nt, Mycobacterium avium subsp. paratuberculosis
cgcaagggccuagucggga

SEQ ID NO: 10242 - RNA, 21 nt, Mycobacterium avium subsp. paratuberculosis
cgcagcagucggucgauguuc

SEQ ID NO: 10243 - RNA, 22 nt, Mycobacterium avium subsp. paratuberculosis
cgcagcauugcguccgccuaac

SEQ ID NO: 10244 - RNA, 22 nt, Mycobacterium avium subsp. paratuberculosis
cgcccggcgcgaccuuccuguc

SEQ ID NO: 10245 - RNA, 22 nt, Mycobacterium avium subsp. paratuberculosis
cgacuugagcgcggccaggaug

SEQ ID NO: 10246 - RNA, 22 nt, Mycobacterium avium subsp. paratuberculosis
cgagcucaagauccaugccgcc

SEQ ID NO: 10247 - RNA, 22 nt, Mycobacterium avium subsp. paratuberculosis
ccuugugaccgcgcuguacguc

SEQ ID NO: 10248 - RNA, 20 nt, Mycobacterium avium subsp. paratuberculosis
ccugggccaaaaaucgcacc

SEQ ID NO: 10249 - RNA, 22 nt, Mycobacterium avium subsp. paratuberculosis
ccuggccgacaccaaccccgaa

SEQ ID NO: 10250 - RNA, 22 nt, Mycobacterium avium subsp. paratuberculosis
ccuccuggccgcccagggcgug

SEQ ID NO: 10251 - RNA, 22 nt, Mycobacterium avium subsp. paratuberculosis
ccgggccagcuccacgcacugg

SEQ ID NO: 10252 - RNA, 22 nt, Mycobacterium avium subsp. paratuberculosis
ccgcucccaccgccgggcugau

SEQ ID NO: 10253 - RNA, 20 nt, Homo sapiens
uaucacaguucaggaacucu

SEQ ID NO: 10254 - RNA, 22 nt, Homo sapiens
gcuggaauuaacauagaugugc

SEQ ID NO: 10255 - RNA, 22 nt, Homo sapiens
uugcauaagugcauucugugau

SEQ ID NO: 10256 - RNA, 22 nt, Homo sapiens
gagaacugagauaagugauauu

SEQ ID NO: 10257 - RNA, 22 nt, Homo sapiens
acagucacaauuuguaccuuuu

SEQ ID NO: 10258 - RNA, 22 nt, Homo sapiens
auaaagacacuuggcaugauuu

SEQ ID NO: 10259 - RNA, 22 nt, Homo sapiens
cucauugcaaucuccaccuccc

SEQ ID NO: 10260 - RNA, 20 nt, Homo sapiens
uaagugcuuuauauugauua

SEQ ID NO: 10261 - RNA, 22 nt, Homo sapiens
auguggaaagcagcaugauaug

SEQ ID NO: 10262 - RNA, 22 nt, Homo sapiens
ugagauaauuuacuuguugagg

SEQ ID NO: 10263 - RNA, 22 nt, Homo sapiens
cauugcacucuaucccgguggg

SEQ ID NO: 10264 - RNA, 22 nt, Homo sapiens
ggcagcaugggugccuuuguga

SEQ ID NO: 10265 - RNA, 22 nt, Homo sapiens
aaguacuguuuaaauugcagaa

SEQ ID NO: 10266 - RNA, 22 nt, Homo sapiens
uagcaguaagaaacugacauug

SEQ ID NO: 10267 - RNA, 22 nt, Homo sapiens
aagagguagcagucacaaaaga

SEQ ID NO: 10268 - RNA, 22 nt, Homo sapiens
ugagaugcauauucuggcuccu

SEQ ID NO: 10269 - RNA, 22 nt, Homo sapiens
ucacacugaauuugaagcaaug

SEQ ID NO: 10270 - RNA, 22 nt, Homo sapiens
uguauuuguuguuaaauggaga

SEQ ID NO: 10271 - RNA, 22 nt, Homo sapiens
aagugcaaauucccaggcucug

SEQ ID NO: 10272 - RNA, 18 nt, Homo sapiens
ucuggcuucuuuguucca

SEQ ID NO: 10273 - RNA, 22 nt, Homo sapiens
uuugggaaugaguuuaucauuu

SEQ ID NO: 10274 - RNA, 22 nt, Homo sapiens
aaaguggugggauuccaggcau

SEQ ID NO: 10275 - RNA, 22 nt, Homo sapiens
uugugaauggugcugcaguaaa

SEQ ID NO: 10276 - RNA, 22 nt, Homo sapiens
cccuguguuuagcugaagguuu

SEQ ID NO: 10277 - RNA, 22 nt, Homo sapiens
guaaucucagcuucuugggagg

SEQ ID NO: 10278 - RNA, 22 nt, Homo sapiens
augugcaacugcuggaacaguc

SEQ ID NO: 10279 - RNA, 22 nt, Homo sapiens
uggcaaaugaaagaaagccagu

SEQ ID NO: 10280 - RNA, 22 nt, Homo sapiens
augaaaagcauaaacgcugaag

SEQ ID NO: 10281 - RNA, 22 nt, Homo sapiens
auuuggguuuuacaucaggcua

SEQ ID NO: 10282 - RNA, 22 nt, Homo sapiens
uuugucccuuugcaguggcaca

SEQ ID NO: 10283 - RNA, 22 nt, Homo sapiens
aagggagcugcauaaucuugug

SEQ ID NO: 10284 - RNA, 22 nt, Homo sapiens
aaagugcugggauuaggccagg

SEQ ID NO: 10285 - RNA, 22 nt, Homo sapiens
auuacacuuucuauucaaugag

SEQ ID NO: 10286 - RNA, 22 nt, Homo sapiens
ugacucaguuucucagguagua

SEQ ID NO: 10287 - RNA, 23 nt, Homo sapiens
ucaguacuccacuuucaauagug

SEQ ID NO: 10288 - RNA, 22 nt, Homo sapiens
cuggcaagaggauaaaguccua

SEQ ID NO: 10289 - RNA, 23 nt, Homo sapiens
aagagguaugacuaugaagugga

SEQ ID NO: 10290 - RNA, 18 nt, Homo sapiens
cuugucaaaucuuuccuc

SEQ ID NO: 10291 - RNA, 20 nt, Homo sapiens
auguaauguaugauauguac

SEQ ID NO: 10292 - RNA, 18 nt, Homo sapiens
uccaguuuucccagcauc

SEQ ID NO: 10293 - RNA, 22 nt, Homo sapiens
agagugcaaagguuggggcugg

SEQ ID NO: 10294 - RNA, 22 nt, Homo sapiens
cuagcagacaugggcugaacca

SEQ ID NO: 10295 - RNA, 22 nt, Homo sapiens
cugcaguaaccacuguaggugu

SEQ ID NO: 10296 - RNA, 22 nt, Homo sapiens
aacagucaauugcugaugaccu

SEQ ID NO: 10297 - RNA, 22 nt, Homo sapiens
uaaagcuuggauuuaggcuaau

SEQ ID NO: 10298 - RNA, 22 nt, Homo sapiens
cuggaagaaaaucacgccaucu

SEQ ID NO: 10299 - RNA, 22 nt, Homo sapiens
acugagacugagaauguuucuu

SEQ ID NO: 10300 - RNA, 22 nt, Homo sapiens
aagugcuuccuuucagaggguu

SEQ ID NO: 10301 - RNA, 22 nt, Homo sapiens
gcagcaucaaaucacacaagau

SEQ ID NO: 10302 - RNA, 21 nt, Homo sapiens
ugugaccucugucucugaguc

SEQ ID NO: 10303 - RNA, 22 nt, Homo sapiens
uuggcagcuguggaaucugggc

SEQ ID NO: 10304 - RNA, 22 nt, Homo sapiens
ugugucuccugaaaauucacau

SEQ ID NO: 10305 - RNA, 19 nt, Homo sapiens
ugcaaauucuaaaaacuga

SEQ ID NO: 10306 - RNA, 22 nt, Homo sapiens
ugagauggagucuugucgccua

SEQ ID NO: 10307 - RNA, 21 nt, Homo sapiens
ugugaacauguuggguggcau

SEQ ID NO: 10308 - RNA, 22 nt, Homo sapiens
agucaagaaucucagcaucuuu

SEQ ID NO: 10309 - RNA, 23 nt, Homo sapiens
uauugcacuaugguaacccuuuu

SEQ ID NO: 10310 - RNA, 22 nt, Homo sapiens
cucacugucaacauguauuugg

SEQ ID NO: 10311 - RNA, 22 nt, Homo sapiens
cauugcacuccagccugcugac

SEQ ID NO: 10312 - RNA, 22 nt, Homo sapiens
cacccuugcagggacagcuuug

SEQ ID NO: 10313 - RNA, 22 nt, Homo sapiens
uauuaguuuucuguggauuaca

SEQ ID NO: 10314 - RNA, 22 nt, Homo sapiens
gauggcacuaagccauguagga

SEQ ID NO: 10315 - RNA, 17 nt, Homo sapiens
uuuuggauuagaaaucc

SEQ ID NO: 10316 - RNA, 22 nt, Homo sapiens
uguagucauuccuuuuugcuuu

SEQ ID NO: 10317 - RNA, 22 nt, Homo sapiens
uucaugucuuggcuguuagagu

SEQ ID NO: 10318 - RNA, 22 nt, Homo sapiens
aauggcaaauguuuucuguuga

SEQ ID NO: 10319 - RNA, 22 nt, Homo sapiens
gugaaagacauauaugguuuga

SEQ ID NO: 10320 - RNA, 22 nt, Homo sapiens
aagcuacauuuuauuuauguca

SEQ ID NO: 10321 - RNA, 22 nt, Homo sapiens
aucuuguguugaauggugcaga

SEQ ID NO: 10322 - RNA, 22 nt, Homo sapiens
caucacaugcuuauuuuccuca

SEQ ID NO: 10323 - RNA, 22 nt, Homo sapiens
acugaguguugauuuagauuaa

SEQ ID NO: 10324 - RNA, 22 nt, Homo sapiens
ucagacacugagcaaacgacua

SEQ ID NO: 10325 - RNA, 18 nt, Homo sapiens
ggaaaacuuuucuaagua

SEQ ID NO: 10326 - RNA, 22 nt, Homo sapiens
uaugugcaaauuaauugcuaga

SEQ ID NO: 10327 - RNA, 22 nt, Homo sapiens
ugugaauggugcugcaaugaac

SEQ ID NO: 10328 - RNA, 22 nt, Homo sapiens
uaguauguuuauagcauugagu

SEQ ID NO: 10329 - RNA, 22 nt, Homo sapiens
auaugucuguuuagucuguaau

SEQ ID NO: 10330 - RNA, 21 nt, Homo sapiens
uaucagagacauugagaggca

SEQ ID NO: 10331 - RNA, 22 nt, Homo sapiens
uuuugcacuguuuuaucugaca

SEQ ID NO: 10332 - RNA, 22 nt, Homo sapiens
guaaucucagcuacuugggagc

SEQ ID NO: 10333 - RNA, 22 nt, Homo sapiens
ucuugcacaaauuauuuuaacu

SEQ ID NO: 10334 - RNA, 22 nt, Homo sapiens
uugcacauuuuuucuggcagaa

SEQ ID NO: 10335 - RNA, 22 nt, Homo sapiens
uagcaguaucccaccaucuggu

SEQ ID NO: 10336 - RNA, 22 nt, Homo sapiens
uaugucuauuauguagcaggaa

SEQ ID NO: 10337 - RNA, 22 nt, Homo sapiens
acugcacuccagccuccugggu

SEQ ID NO: 10338 - RNA, 22 nt, Homo sapiens
uugugcaugaugcauacauggu

SEQ ID NO: 10339 - RNA, 22 nt, Homo sapiens
ucucuggauaucuacuuauguu

SEQ ID NO: 10340 - RNA, 22 nt, Homo sapiens
gugcacaucuguguuccagcua

SEQ ID NO: 10341 - RNA, 22 nt, Homo sapiens
augacugucagggcagucauug

SEQ ID NO: 10342 - RNA, 17 nt, Homo sapiens
ugcaauuuaagcuagau

SEQ ID NO: 10343 - RNA, 22 nt, Homo sapiens
agcuggauguauguuaagugaa

SEQ ID NO: 10344 - RNA, 22 nt, Homo sapiens
uaugaaagcuacuucucacaau

SEQ ID NO: 10345 - RNA, 22 nt, Homo sapiens
acuucauucucuggaucagaau

SEQ ID NO: 10346 - RNA, 22 nt, Homo sapiens
gugucaugagggggacaggaag

SEQ ID NO: 10347 - RNA, 22 nt, Homo sapiens
accugagauuacaggugcuggc

SEQ ID NO: 10348 - RNA, 22 nt, Homo sapiens
ucaguaaaugcuguucucuuuu

SEQ ID NO: 10349 - RNA, 22 nt, Homo sapiens
guucaagugauagcugggauua

SEQ ID NO: 10350 - RNA, 22 nt, Homo sapiens
auugucccucuuaaucccagca

SEQ ID NO: 10351 - RNA, 22 nt, Homo sapiens
uuucugagaccaaaacuuguaa

SEQ ID NO: 10352 - RNA, 22 nt, Homo sapiens
gacacugucuucugcucuuaaa

SEQ ID NO: 10353 - RNA, 22 nt, Homo sapiens
agcagguguccacaauguuugc

SEQ ID NO: 10354 - RNA, 22 nt, Homo sapiens
aaucacaguguucuugugaggg

SEQ ID NO: 10355 - RNA, 22 nt, Homo sapiens
agcauuaguugugaagccuuua

SEQ ID NO: 10356 - RNA, 22 nt, Homo sapiens
ugaaaucauguaguuauugcaa

SEQ ID NO: 10357 - RNA, 18 nt, Homo sapiens
cuuaacauugggaugaua

SEQ ID NO: 10358 - RNA, 22 nt, Homo sapiens
accucagcccggggaaguugag

SEQ ID NO: 10359 - RNA, 22 nt, Homo sapiens
uauugcacaugaggagacauug

SEQ ID NO: 10360 - RNA, 22 nt, Homo sapiens
uaucacaggucaggaaccuugu

SEQ ID NO: 10361 - RNA, 22 nt, Homo sapiens
auugcaugucauguuuagugua

SEQ ID NO: 10362 - RNA, 19 nt, Homo sapiens
uauguaguuuucucaauau

SEQ ID NO: 10363 - RNA, 17 nt, Homo sapiens
gugagguauccucaaaa

SEQ ID NO: 10364 - RNA, 22 nt, Homo sapiens
uagcaguaaagaaugugauguu

SEQ ID NO: 10365 - RNA, 22 nt, Homo sapiens
cauugcacuccaucccgggaaa

SEQ ID NO: 10366 - RNA, 22 nt, Homo sapiens
uuaacagucacuuagcucauuu

SEQ ID NO: 10367 - RNA, 22 nt, Homo sapiens
auggcacagaguagaugcucaa

SEQ ID NO: 10368 - RNA, 22 nt, Homo sapiens
gaacccuggaggcggagguugc

SEQ ID NO: 10369 - RNA, 22 nt, Homo sapiens
ugugaacauuuuguauauauua

SEQ ID NO: 10370 - RNA, 22 nt, Homo sapiens
gagacugagucuugcucugucg

SEQ ID NO: 10371 - RNA, 22 nt, Homo sapiens
ucacaguucagcauggcugagg

SEQ ID NO: 10372 - RNA, 22 nt, Homo sapiens
acauucagcuguuguuucaaug

SEQ ID NO: 10373 - RNA, 22 nt, Homo sapiens
uauuguacauguuauagauuuu

SEQ ID NO: 10374 - RNA, 22 nt, Homo sapiens
ucagguccuuacugugcucccu

SEQ ID NO: 10375 - RNA, 22 nt, Homo sapiens
cuggaauguuccuaaagauuca

SEQ ID NO: 10376 - RNA, 22 nt, Homo sapiens
auuccauuuguuaucacacccg

SEQ ID NO: 10377 - RNA, 22 nt, Homo sapiens
uaagugaauuugacagguaaug

SEQ ID NO: 10378 - RNA, 22 nt, Homo sapiens
gcauggccuuuaaaugucacag

SEQ ID NO: 10379 - RNA, 22 nt, Homo sapiens
uugcauagaccgaugucuugga

SEQ ID NO: 10380 - RNA, 22 nt, Homo sapiens
aaauugcauugagcugcuuauu

SEQ ID NO: 10381 - RNA, 22 nt, Homo sapiens
gccuagagaaguaaauauuauc

SEQ ID NO: 10382 - RNA, 22 nt, Homo sapiens
uucauguaauuccauaagguaa

SEQ ID NO: 10383 - RNA, 22 nt, Homo sapiens
uaguuauggaguaauuuuaagc

SEQ ID NO: 10384 - RNA, 22 nt, Homo sapiens
uacagucauaaugccuagugac

SEQ ID NO: 10385 - RNA, 22 nt, Homo sapiens
gaagugcuuuuggacuaacagu

SEQ ID NO: 10386 - RNA, 22 nt, Homo sapiens
gagacggagucucgcucuguca

SEQ ID NO: 10387 - RNA, 22 nt, Homo sapiens
uaggugaaugcuggaagaaaug

SEQ ID NO: 10388 - RNA, 22 nt, Homo sapiens
uugaaggaggugcucacucucg

SEQ ID NO: 10389 - RNA, 22 nt, Homo sapiens
uaagugaauguuggcuacugaa

SEQ ID NO: 10390 - RNA, 22 nt, Homo sapiens
uugcacauggcuggggaggccu

SEQ ID NO: 10391 - RNA, 22 nt, Homo sapiens
uuuuaguggaauauuuacaguu

SEQ ID NO: 10392 - RNA, 22 nt, Homo sapiens
uggcaagauuguuccgguuugg

SEQ ID NO: 10393 - RNA, 22 nt, Homo sapiens
uuauucauuaauugcuaagguu

SEQ ID NO: 10394 - RNA, 22 nt, Homo sapiens
cauugcacuccagcucugggcg

SEQ ID NO: 10395 - RNA, 21 nt, Homo sapiens
uacaaugcacaggagagccuc

SEQ ID NO: 10396 - RNA, 22 nt, Homo sapiens
uucuaaguaauuuugcaugccu

SEQ ID NO: 10397 - RNA, 22 nt, Homo sapiens
ugagaucaugccacugcacuuc

SEQ ID NO: 10398 - RNA, 22 nt, Homo sapiens
uuugucccucucaccaacgggg

SEQ ID NO: 10399 - RNA, 22 nt, Homo sapiens
cugauacugagaccuuggguua

SEQ ID NO: 10400 - RNA, 22 nt, Homo sapiens
ucuggcuugugaacugucuucu

SEQ ID NO: 10401 - RNA, 22 nt, Homo sapiens
auuaucacaguuuugcauaugg

SEQ ID NO: 10402 - RNA, 22 nt, Homo sapiens
uggcaagaccccaucucuacaa

SEQ ID NO: 10403 - RNA, 22 nt, Homo sapiens
gguggugguauuucagaaaaug

SEQ ID NO: 10404 - RNA, 22 nt, Homo sapiens
uugugcauaucagagguuugcu

SEQ ID NO: 10405 - RNA, 22 nt, Homo sapiens
uuggaagacaaugcugauucuc

SEQ ID NO: 10406 - RNA, 22 nt, Homo sapiens
uaaguaaaugaaagguugauuu

SEQ ID NO: 10407 - RNA, 22 nt, Homo sapiens
uagagguauuaacaguagaaga

SEQ ID NO: 10408 - RNA, 22 nt, Homo sapiens
ucuggcuuauuucacuuagcau

SEQ ID NO: 10409 - RNA, 22 nt, Homo sapiens
cuuuuggcuuaagauugucuug

SEQ ID NO: 10410 - RNA, 17 nt, Homo sapiens
cccuaguagcugggacu

SEQ ID NO: 10411 - RNA, 22 nt, Homo sapiens
uagacacugcauauuuuuuuaa

SEQ ID NO: 10412 - RNA, 22 nt, Homo sapiens
uggaaguauagauaauugaaag

SEQ ID NO: 10413 - RNA, 22 nt, Homo sapiens
ugagauuauauuucuuaacaga

SEQ ID NO: 10414 - RNA, 22 nt, Homo sapiens
gugcaaaucucugaguaucuuu

SEQ ID NO: 10415 - RNA, 22 nt, Homo sapiens
gugucccagugugcauacaggu

SEQ ID NO: 10416 - RNA, 22 nt, Homo sapiens
uagucacacacucaacuuuuca

SEQ ID NO: 10417 - RNA, 22 nt, Homo sapiens
ugcagagaaacauuuuguauuu

SEQ ID NO: 10418 - RNA, 22 nt, Homo sapiens
cugauugucaucaauauuauua

SEQ ID NO: 10419 - RNA, 22 nt, Homo sapiens
ucccauguagcuaggauuacag

SEQ ID NO: 10420 - RNA, 22 nt, Homo sapiens
ccuuggcaauggcuggggcuga

SEQ ID NO: 10421 - RNA, 22 nt, Homo sapiens
uugaaagaugaacuggauugga

SEQ ID NO: 10422 - RNA, 22 nt, Homo sapiens
uucacaguacucccuggaauua

SEQ ID NO: 10423 - RNA, 22 nt, Homo sapiens
uuuccagguggccaacauuuua

SEQ ID NO: 10424 - RNA, 22 nt, Homo sapiens
aauuaguugucgugagaguggu

SEQ ID NO: 10425 - RNA, 22 nt, Homo sapiens
agccuguguugaauuauagaaa

SEQ ID NO: 10426 - RNA, 22 nt, Homo sapiens
gugaaagacagcauuaauggcu

SEQ ID NO: 10427 - RNA, 22 nt, Homo sapiens
ucggcucagugcaagcucugcc

SEQ ID NO: 10428 - RNA, 22 nt, Homo sapiens
aagggaauguuguggcugguug

SEQ ID NO: 10429 - RNA, 22 nt, Homo sapiens
aucacugugauuucuacugugc

SEQ ID NO: 10430 - RNA, 22 nt, Homo sapiens
cacauugcaggaaaguucauua

SEQ ID NO: 10431 - RNA, 22 nt, Homo sapiens
gaguuagguugucaaugucuua

SEQ ID NO: 10432 - RNA, 22 nt, Homo sapiens
uggaaugucagcuacaagaggg

SEQ ID NO: 10433 - RNA, 22 nt, Homo sapiens
ucauggcacugaugagaguuuc

SEQ ID NO: 10434 - RNA, 17 nt, Homo sapiens
auaugucugcuggggga

SEQ ID NO: 10435 - RNA, 22 nt, Homo sapiens
uacaagcacaggcagcaggcug

SEQ ID NO: 10436 - RNA, 22 nt, Homo sapiens
aauacuggcacugaagaccaug

SEQ ID NO: 10437 - RNA, 22 nt, Homo sapiens
uacaugcaugggcaugugugca

SEQ ID NO: 10438 - RNA, 22 nt, Homo sapiens
uuggagugugcucauaacugcu

SEQ ID NO: 10439 - RNA, 22 nt, Homo sapiens
uugugaaugaugccgcaauaaa

SEQ ID NO: 10440 - RNA, 22 nt, Homo sapiens
uugugaauggugccgcaguaaa

SEQ ID NO: 10441 - RNA, 22 nt, Homo sapiens
cuucaaguguggccaccugacc

SEQ ID NO: 10442 - RNA, 22 nt, Homo sapiens
ugagacacugaauccggccuga

SEQ ID NO: 10443 - RNA, 21 nt, Homo sapiens
agcuaaauuggaaauuucugu

SEQ ID NO: 10444 - RNA, 22 nt, Homo sapiens
uugaaagcuaucagagauucca

SEQ ID NO: 10445 - RNA, 16 nt, Homo sapiens
cauugcacucuagccu

SEQ ID NO: 10446 - RNA, 22 nt, Homo sapiens
uugaaagacaucaccuacugcu

SEQ ID NO: 10447 - RNA, 22 nt, Homo sapiens
agauggguuuucacauguuggc

SEQ ID NO: 10448 - RNA, 22 nt, Homo sapiens
uuaaucuguucucuguauucua

SEQ ID NO: 10449 - RNA, 22 nt, Homo sapiens
gagcaucaguggccucaucuca

SEQ ID NO: 10450 - RNA, 19 nt, Homo sapiens
uacauaguauuuaguggca

SEQ ID NO: 10451 - RNA, 23 nt, Homo sapiens
aggcauuguacaguaauggaaaa

SEQ ID NO: 10452 - RNA, 19 nt, Homo sapiens
ccauggcaaugaucugaug

SEQ ID NO: 10453 - RNA, 22 nt, Homo sapiens
ugcuaugucagccaggcugguc

SEQ ID NO: 10454 - RNA, 22 nt, Homo sapiens
uagagguagguguaugaacuag

SEQ ID NO: 10455 - RNA, 22 nt, Homo sapiens
uuuauggagagauauuuauggu

SEQ ID NO: 10456 - RNA, 22 nt, Homo sapiens
gcugagaucucuugccugaacu

SEQ ID NO: 10457 - RNA, 20 nt, Homo sapiens
ugugauuauuuaguugcaug

SEQ ID NO: 10458 - RNA, 22 nt, Homo sapiens
uugaaagucauuucuucuaagu

SEQ ID NO: 10459 - RNA, 22 nt, Homo sapiens
agugccaaaucgagggcucuga

SEQ ID NO: 10460 - RNA, 22 nt, Homo sapiens
uugugaucauugucaaauagug

SEQ ID NO: 10461 - RNA, 22 nt, Homo sapiens
aucaugucuucccagugauucu

SEQ ID NO: 10462 - RNA, 18 nt, Homo sapiens
aaaaagugcucaggccua

SEQ ID NO: 10463 - RNA, 22 nt, Homo sapiens
auccuuuagacuguccaguuga

SEQ ID NO: 10464 - RNA, 22 nt, Homo sapiens
auagcagugugaaaacagacug

SEQ ID NO: 10465 - RNA, 22 nt, Homo sapiens
aaagugcuaggauuaccugggg

SEQ ID NO: 10466 - RNA, 22 nt, Homo sapiens
uagcaguaccccaguauccugg

SEQ ID NO: 10467 - RNA, 22 nt, Homo sapiens
ugugaacacagaggcuauggca

SEQ ID NO: 10468 - RNA, 22 nt, Homo sapiens
gcaccaugguagaauaauggua

SEQ ID NO: 10469 - RNA, 22 nt, Homo sapiens
cccugagagcagggucuuucuc

SEQ ID NO: 10470 - RNA, 22 nt, Homo sapiens
aacacggcccgcagagcaagcu

SEQ ID NO: 10471 - RNA, 22 nt, Homo sapiens
aguggaaucuguuauacuaacu

SEQ ID NO: 10472 - RNA, 22 nt, Homo sapiens
uuaggcuuuauugaaaacaaua

SEQ ID NO: 10473 - RNA, 22 nt, Homo sapiens
uucaacagugauggccuuugua

SEQ ID NO: 10474 - RNA, 22 nt, Homo sapiens
uaaagugaggauggcaguaggu

SEQ ID NO: 10475 - RNA, 22 nt, Homo sapiens
ucuccauuguccagaugaggaa

SEQ ID NO: 10476 - RNA, 22 nt, Homo sapiens
ugagaugugugcauucaacuca

SEQ ID NO: 10477 - RNA, 22 nt, Homo sapiens
cauugcacugcagcccgggcaa

SEQ ID NO: 10478 - RNA, 22 nt, Homo sapiens
ugagauaggaucuugcucuguu

SEQ ID NO: 10479 - RNA, 22 nt, Homo sapiens
gagauauucugguuuacuaaau

SEQ ID NO: 10480 - RNA, 22 nt, Homo sapiens
aaggugcuguaagcauccaugu

SEQ ID NO: 10481 - RNA, 22 nt, Homo sapiens
aacagugcauuccuguccauau

SEQ ID NO: 10482 - RNA, 22 nt, Homo sapiens
uggucaccugaauuaugcaugu

SEQ ID NO: 10483 - RNA, 22 nt, Homo sapiens
ugcgccauugcacuccagccug

SEQ ID NO: 10484 - RNA, 22 nt, Homo sapiens
cauugcacuccagccuagccaa

SEQ ID NO: 10485 - RNA, 22 nt, Homo sapiens
aagugcuucagaagacaauauu

SEQ ID NO: 10486 - RNA, 20 nt, Homo sapiens
aucacuggagaaggaaaccu

SEQ ID NO: 10487 - RNA, 22 nt, Homo sapiens
aauaaagucugaagugugcuua

SEQ ID NO: 10488 - RNA, 16 nt, Homo sapiens
aucacuugcuucuuuu

SEQ ID NO: 10489 - RNA, 22 nt, Homo sapiens
cuuucugaggagaauagagaac

SEQ ID NO: 10490 - RNA, 22 nt, Homo sapiens
uaucacagugcuggaguauucc

SEQ ID NO: 10491 - RNA, 22 nt, Homo sapiens
gugccacugcacuccggccugg

SEQ ID NO: 10492 - RNA, 22 nt, Homo sapiens
cauugcacugcauucugggcaa

SEQ ID NO: 10493 - RNA, 22 nt, Homo sapiens
ggcacuguggcucaagccugua

SEQ ID NO: 10494 - RNA, 22 nt, Homo sapiens
aauugcauugaauuuguagcuu

SEQ ID NO: 10495 - RNA, 22 nt, Homo sapiens
ucaagcaauucuccucucagcc

SEQ ID NO: 10496 - RNA, 22 nt, Homo sapiens
uguacuucaagauuaugguuua

SEQ ID NO: 10497 - RNA, 22 nt, Homo sapiens
augauagucuugagaagcauuu

SEQ ID NO: 10498 - RNA, 22 nt, Homo sapiens
guaaucucagcuacucgggaga

SEQ ID NO: 10499 - RNA, 22 nt, Homo sapiens
uagcaguauugaaagaugaggg

SEQ ID NO: 10500 - RNA, 22 nt, Homo sapiens
acugcacuccaguuugggcagc

SEQ ID NO: 10501 - RNA, 22 nt, Homo sapiens
auucagaggggcagcugucuug

SEQ ID NO: 10502 - RNA, 22 nt, Homo sapiens
ucucagugaauguggaaaaagc

SEQ ID NO: 10503 - RNA, 22 nt, Homo sapiens
ucaugucuuguuguauuuauuu

SEQ ID NO: 10504 - RNA, 22 nt, Homo sapiens
aagagguagaagcuugccuucu

SEQ ID NO: 10505 - RNA, 22 nt, Homo sapiens
guaauaacuguggaaaaagguu

SEQ ID NO: 10506 - RNA, 22 nt, Homo sapiens
uggaaugguaucuuguuggggu

SEQ ID NO: 10507 - RNA, 22 nt, Homo sapiens
augagauaaaccaucucuuaag

SEQ ID NO: 10508 - RNA, 22 nt, Homo sapiens
guugcucaggcuggagugcagu

SEQ ID NO: 10509 - RNA, 22 nt, Homo sapiens
acaagcacaaauuuaauccugu

SEQ ID NO: 10510 - RNA, 22 nt, Homo sapiens
ucugucuugugguuugagugcc

SEQ ID NO: 10511 - RNA, 22 nt, Homo sapiens
gugucucagcccagaccuauuu

SEQ ID NO: 10512 - RNA, 22 nt, Homo sapiens
ucacaugggugcaauauaauca

SEQ ID NO: 10513 - RNA, 22 nt, Homo sapiens
gagauauuuagaaauguguucu

SEQ ID NO: 10514 - RNA, 22 nt, Homo sapiens
uucaaaguguugguuuugggcu

SEQ ID NO: 10515 - RNA, 22 nt, Homo sapiens
ccugagacuugagggggcuucu

SEQ ID NO: 10516 - RNA, 22 nt, Homo sapiens
uucuccugguggacccuaaacg

SEQ ID NO: 10517 - RNA, 22 nt, Homo sapiens
uugcaucagcaggcauaauugg

SEQ ID NO: 10518 - RNA, 22 nt, Homo sapiens
uacauacuucacagacuuuaaa

SEQ ID NO: 10519 - RNA, 22 nt, Homo sapiens
ucacuaaagaaaauggcaugga

SEQ ID NO: 10520 - RNA, 22 nt, Homo sapiens
uugagauaggagcuguuguucu

SEQ ID NO: 10521 - RNA, 22 nt, Homo sapiens
auugcacaaagagggaaacuga

SEQ ID NO: 10522 - RNA, 22 nt, Homo sapiens
ucacuagggagaaacugaggcu

SEQ ID NO: 10523 - RNA, 22 nt, Homo sapiens
auaagauaguggaagugggauu

SEQ ID NO: 10524 - RNA, 22 nt, Homo sapiens
uuaaguuaggcuucagcagucu

SEQ ID NO: 10525 - RNA, 22 nt, Homo sapiens
gucagugugauaucugcagggg

SEQ ID NO: 10526 - RNA, 22 nt, Homo sapiens
guucaagugauucuacugccuc

SEQ ID NO: 10527 - RNA, 22 nt, Homo sapiens
uaucaugucuguguguaccuag

SEQ ID NO: 10528 - RNA, 22 nt, Homo sapiens
uguaauuuaaaugauccuugga

SEQ ID NO: 10529 - RNA, 22 nt, Homo sapiens
aaagugaauguaucccguaagu

SEQ ID NO: 10530 - RNA, 22 nt, Homo sapiens
uaacagcucuacagcugcucuu

SEQ ID NO: 10531 - RNA, 22 nt, Homo sapiens
gauuuuccaguggcccugauca

SEQ ID NO: 10532 - RNA, 22 nt, Homo sapiens
agacacuguugaaaaggcccca

SEQ ID NO: 10533 - RNA, 22 nt, Homo sapiens
uucaagcuauggugaucuuuuc

SEQ ID NO: 10534 - RNA, 20 nt, Homo sapiens
uauugcacuccagucugggc

SEQ ID NO: 10535 - RNA, 17 nt, Homo sapiens
ucuaauaauaugcauuu

SEQ ID NO: 10536 - RNA, 22 nt, Homo sapiens
ucugccuuuucaugugggaugg

SEQ ID NO: 10537 - RNA, 19 nt, Homo sapiens
cauugcacuccacccuggg

SEQ ID NO: 10538 - RNA, 21 nt, Homo sapiens
ucacugagcaucaugguuuca

SEQ ID NO: 10539 - RNA, 22 nt, Homo sapiens
aucaccuggaggugaucacuug

SEQ ID NO: 10540 - RNA, 22 nt, Homo sapiens
aagucaaggagagaagcuucag

SEQ ID NO: 10541 - RNA, 22 nt, Homo sapiens
uaugucuucuuuagagaaaugu

SEQ ID NO: 10542 - RNA, 22 nt, Homo sapiens
aacaccauucucuguaacaaga

SEQ ID NO: 10543 - RNA, 22 nt, Homo sapiens
uugucuccuagacgaccaggcg

SEQ ID NO: 10544 - RNA, 22 nt, Homo sapiens
ugugaacaaaauuuguugcaua

SEQ ID NO: 10545 - RNA, 22 nt, Homo sapiens
uuaaauacagcaugguguuucu

SEQ ID NO: 10546 - RNA, 22 nt, Homo sapiens
auagcagugugaaaauguacua

SEQ ID NO: 10547 - RNA, 22 nt, Homo sapiens
uauuacauccauaggcucugcu

SEQ ID NO: 10548 - RNA, 18 nt, Homo sapiens
acugcacuccaccuuggg

SEQ ID NO: 10549 - RNA, 18 nt, Homo sapiens
ugcauacuaucugauuuu

SEQ ID NO: 10550 - RNA, 22 nt, Homo sapiens
gugaaaagaugagcaccauaca

SEQ ID NO: 10551 - RNA, 22 nt, Homo sapiens
uucauggaacaaguggguucaa

SEQ ID NO: 10552 - RNA, 22 nt, Homo sapiens
uagagguauguauaguauucuu

SEQ ID NO: 10553 - RNA, 22 nt, Homo sapiens
uuauacucgucugaaugauucu

SEQ ID NO: 10554 - RNA, 22 nt, Homo sapiens
acauguaauugauuuuguguua

SEQ ID NO: 10555 - RNA, 22 nt, Homo sapiens
aacacuaucugccuuacaggga

SEQ ID NO: 10556 - RNA, 22 nt, Homo sapiens
ggcacaaugucagcucacugca

SEQ ID NO: 10557 - RNA, 22 nt, Homo sapiens
guacaugcaugcaugggugugc

SEQ ID NO: 10558 - RNA, 22 nt, Homo sapiens
aucacuguuuugaugcucggac

SEQ ID NO: 10559 - RNA, 22 nt, Homo sapiens
guacaguaguaaaagugaauga

SEQ ID NO: 10560 - RNA, 23 nt, Homo sapiens
uggguucauucuugaagucagug

SEQ ID NO: 10561 - RNA, 22 nt, Homo sapiens
augauaaguuauuagaagaaga

SEQ ID NO: 10562 - RNA, 18 nt, Homo sapiens
uagaauauaggucauucu

SEQ ID NO: 10563 - RNA, 20 nt, Homo sapiens
guucauguaauuaguucagg

SEQ ID NO: 10564 - RNA, 22 nt, Homo sapiens
ugaaagcuacaggaaaguauuu

SEQ ID NO: 10565 - RNA, 22 nt, Homo sapiens
uugcacauugcaccuuuuguau

SEQ ID NO: 10566 - RNA, 22 nt, Homo sapiens
gacauguaaggcucucucuguu

SEQ ID NO: 10567 - RNA, 22 nt, Homo sapiens
uacgccuguaauaucagcauuu

SEQ ID NO: 10568 - RNA, 18 nt, Homo sapiens
uaaauugcuucaccugag

SEQ ID NO: 10569 - RNA, 20 nt, Homo sapiens
aagugcuuccuuuuagaggg

SEQ ID NO: 10570 - RNA, 22 nt, Homo sapiens
ugagauuaaucuuuaaguaaga

SEQ ID NO: 10571 - RNA, 22 nt, Homo sapiens
ugucauucaggaaauucuaagu

SEQ ID NO: 10572 - RNA, 21 nt, Homo sapiens
guucaagugauccuccugucu

SEQ ID NO: 10573 - RNA, 22 nt, Homo sapiens
gaugaggcuagagacaugugua

SEQ ID NO: 10574 - RNA, 22 nt, Homo sapiens
cagucacagugacaggaugugg

SEQ ID NO: 10575 - RNA, 18 nt, Homo sapiens
uugaauaguguccaaucu

SEQ ID NO: 10576 - RNA, 22 nt, Homo sapiens
caauacuguguugaauaagagu

SEQ ID NO: 10577 - RNA, 22 nt, Homo sapiens
uuccaguguguucauccucaga

SEQ ID NO: 10578 - RNA, 22 nt, Homo sapiens
ucacugaaaccacugccuccug

SEQ ID NO: 10579 - RNA, 23 nt, Homo sapiens
gagaccagcuucagaaagcacga

SEQ ID NO: 10580 - RNA, 22 nt, Homo sapiens
cuaugucuuucauauuuugggg

SEQ ID NO: 10581 - RNA, 22 nt, Homo sapiens
uuugcuauagugaauagugcug

SEQ ID NO: 10582 - RNA, 20 nt, Homo sapiens
uggugguuuuaugugguuua

SEQ ID NO: 10583 - RNA, 22 nt, Homo sapiens
ugugaagaaagucauugguagc

SEQ ID NO: 10584 - RNA, 22 nt, Homo sapiens
aggcaugauuguauuuugcucu

SEQ ID NO: 10585 - RNA, 22 nt, Homo sapiens
accuggcacuuagcaaaucuga

SEQ ID NO: 10586 - RNA, 22 nt, Homo sapiens
uguagcagccauaaacacagug

SEQ ID NO: 10587 - RNA, 22 nt, Homo sapiens
uucacagagagaacucaaacca

SEQ ID NO: 10588 - RNA, 22 nt, Homo sapiens
uaugcagacauuguuccaacca

SEQ ID NO: 10589 - RNA, 22 nt, Homo sapiens
uugacuucagagcugauucaag

SEQ ID NO: 10590 - RNA, 22 nt, Homo sapiens
gugagguacgugucaagaacca

SEQ ID NO: 10591 - RNA, 22 nt, Homo sapiens
acugcacuccacccuuggcagc

SEQ ID NO: 10592 - RNA, 23 nt, Homo sapiens
augacacuccugugcgcacccug

SEQ ID NO: 10593 - RNA, 22 nt, Homo sapiens
uaugucuggaguuacugagcug

SEQ ID NO: 10594 - RNA, 22 nt, Homo sapiens
auucacuuuuauagacaggucu

SEQ ID NO: 10595 - RNA, 22 nt, Homo sapiens
uuagggaguaaucuaaaaaugg

SEQ ID NO: 10596 - RNA, 22 nt, Homo sapiens
aaagugcugggauuuuaggcau

SEQ ID NO: 10597 - RNA, 22 nt, Homo sapiens
ugucaguuucuugagauggaac

SEQ ID NO: 10598 - RNA, 22 nt, Homo sapiens
uccaguuuuguuaacauauggu

SEQ ID NO: 10599 - RNA, 22 nt, Homo sapiens
uuggcagcauuccagccaagca

SEQ ID NO: 10600 - RNA, 22 nt, Homo sapiens
guaugucuuuauagcagugugg

SEQ ID NO: 10601 - RNA, 22 nt, Homo sapiens
auaaaugccuguuguuuuaagc

SEQ ID NO: 10602 - RNA, 22 nt, Homo sapiens
uuggucucaucaagagcagcuu

SEQ ID NO: 10603 - RNA, 22 nt, Homo sapiens
gugggcucguucguguuagaca

SEQ ID NO: 10604 - RNA, 22 nt, Homo sapiens
auaugcauacauguaugcagga

SEQ ID NO: 10605 - RNA, 19 nt, Homo sapiens
acugcacuccuccuugggu

SEQ ID NO: 10606 - RNA, 22 nt, Homo sapiens
ugaaaguuauauugugaaauuc

SEQ ID NO: 10607 - RNA, 22 nt, Homo sapiens
uagagguauaccaaaaaggcau

SEQ ID NO: 10608 - RNA, 22 nt, Homo sapiens
agaacuguccauucagcaugaa

SEQ ID NO: 10609 - RNA, 22 nt, Homo sapiens
aguggaauuaagaaacugaauu

SEQ ID NO: 10610 - RNA, 22 nt, Homo sapiens
uugucauuuucagaguguuacg

SEQ ID NO: 10611 - RNA, 22 nt, Homo sapiens
ggguucaaaucuuggcucuuac

SEQ ID NO: 10612 - RNA, 22 nt, Homo sapiens
uauugcacgccagccugagcaa

SEQ ID NO: 10613 - RNA, 22 nt, Homo sapiens
acugcacuccagccuuggcaac

SEQ ID NO: 10614 - RNA, 22 nt, Homo sapiens
agucacagguucuugggauuag

SEQ ID NO: 10615 - RNA, 23 nt, Homo sapiens
uucaccguguuggccaggcuggu

SEQ ID NO: 10616 - RNA, 22 nt, Homo sapiens
aaaugcauaucaagauugcccu

SEQ ID NO: 10617 - RNA, 22 nt, Homo sapiens
ugaugucuugcaggcacgagau

SEQ ID NO: 10618 - RNA, 20 nt, Homo sapiens
cuggaugucgaggcagaggu

SEQ ID NO: 10619 - RNA, 22 nt, Homo sapiens
ucacugugugucucuguaucug

SEQ ID NO: 10620 - RNA, 22 nt, Homo sapiens
uugcacauugauuuuguauccu

SEQ ID NO: 10621 - RNA, 22 nt, Homo sapiens
uuagugaaugcaccacuucuga

SEQ ID NO: 10622 - RNA, 22 nt, Homo sapiens
uuuuggcucugucuguaucuuu

SEQ ID NO: 10623 - RNA, 22 nt, Homo sapiens
aauaauggcaccaaagcacaag

SEQ ID NO: 10624 - RNA, 22 nt, Homo sapiens
caggugcauuggcugacaccug

SEQ ID NO: 10625 - RNA, 22 nt, Homo sapiens
ggagcugugauuugaguccaga

SEQ ID NO: 10626 - RNA, 22 nt, Homo sapiens
ugaaguaauguuuuauucuauu

SEQ ID NO: 10627 - RNA, 22 nt, Homo sapiens
ucagcagugugaaaacaaacua

SEQ ID NO: 10628 - RNA, 22 nt, Homo sapiens
cccugagaaaacuuuguccuua

SEQ ID NO: 10629 - RNA, 22 nt, Homo sapiens
uucuauguuugaaaaugccaaa

SEQ ID NO: 10630 - RNA, 20 nt, Homo sapiens
auugcagcaugauuuauaau

SEQ ID NO: 10631 - RNA, 22 nt, Homo sapiens
uccugagacugaggagcuuugg

SEQ ID NO: 10632 - RNA, 22 nt, Homo sapiens
guaugucuugucuauggcugcu

SEQ ID NO: 10633 - RNA, 22 nt, Homo sapiens
gugaaagauuaaaccagugugu

SEQ ID NO: 10634 - RNA, 22 nt, Homo sapiens
cucagcuacuugggaagcugag

SEQ ID NO: 10635 - RNA, 20 nt, Homo sapiens
auuguccuugauuacacaga

SEQ ID NO: 10636 - RNA, 22 nt, Homo sapiens
ggaaauguuuagcauccacuuu

SEQ ID NO: 10637 - RNA, 22 nt, Homo sapiens
uaucacuguuguuuguuuaagg

SEQ ID NO: 10638 - RNA, 22 nt, Homo sapiens
ucacuguugaugggcaugcagg

SEQ ID NO: 10639 - RNA, 21 nt, Homo sapiens
uaacagcuccacuccauucuc

SEQ ID NO: 10640 - RNA, 22 nt, Homo sapiens
uuauuagguuagugcaaaaguu

SEQ ID NO: 10641 - RNA, 22 nt, Homo sapiens
auguagugugauuuucacuaga

SEQ ID NO: 10642 - RNA, 22 nt, Homo sapiens
caacauccaccuccuggguuca

SEQ ID NO: 10643 - RNA, 22 nt, Homo sapiens
cucauugcaaucucugccuccc

SEQ ID NO: 10644 - RNA, 18 nt, Homo sapiens
uuuggcuguucaugacuc

SEQ ID NO: 10645 - RNA, 22 nt, Homo sapiens
caugucuuuuauucugugugau

SEQ ID NO: 10646 - RNA, 22 nt, Homo sapiens
caagagaccugagugucauucu

SEQ ID NO: 10647 - RNA, 22 nt, Homo sapiens
uagacacuagauaugugacuga

SEQ ID NO: 10648 - RNA, 22 nt, Homo sapiens
augaaauugcuaucgcaguacu

SEQ ID NO: 10649 - RNA, 22 nt, Homo sapiens
gugugcucaucacaugcaauag

SEQ ID NO: 10650 - RNA, 18 nt, Homo sapiens
ucagucacugccuggcuu

SEQ ID NO: 10651 - RNA, 22 nt, Homo sapiens
ccaguguucuggaaggcugagu

SEQ ID NO: 10652 - RNA, 21 nt, Homo sapiens
ucaucagucaaagacaauggu

SEQ ID NO: 10653 - RNA, 22 nt, Homo sapiens
uugugaaugaugucgcaguaaa

SEQ ID NO: 10654 - RNA, 22 nt, Homo sapiens
acccgcccagguguggccggga

SEQ ID NO: 10655 - RNA, 23 nt, Homo sapiens
aaauuugccuauuauuccuaugg

SEQ ID NO: 10656 - RNA, 22 nt, Homo sapiens
uaagugcuguguuguuaccuaa

SEQ ID NO: 10657 - RNA, 22 nt, Homo sapiens
gaugugaaaucauaguuucuag

SEQ ID NO: 10658 - RNA, 20 nt, Homo sapiens
guucacaggcuuccuuucag

SEQ ID NO: 10659 - RNA, 22 nt, Homo sapiens
uucucaguuccuacuuugguga

SEQ ID NO: 10660 - RNA, 19 nt, Homo sapiens
uggaaugaaauguuagggg

SEQ ID NO: 10661 - RNA, 22 nt, Homo sapiens
aagugacauugugcccauuuga

SEQ ID NO: 10662 - RNA, 22 nt, Homo sapiens
auacaguugccauuucuugugc

SEQ ID NO: 10663 - RNA, 20 nt, Homo sapiens
auaugcagacacauacauac

SEQ ID NO: 10664 - RNA, 22 nt, Homo sapiens
ucagugucugugauggagaggu

SEQ ID NO: 10665 - RNA, 22 nt, Homo sapiens
cucacaugcucaccugguguuc

SEQ ID NO: 10666 - RNA, 22 nt, Homo sapiens
auggaagaaaguuggguucuug

SEQ ID NO: 10667 - RNA, 22 nt, Homo sapiens
uggacauguacauauguguaug

SEQ ID NO: 10668 - RNA, 22 nt, Homo sapiens
cuaugagucugcagaucuauua

SEQ ID NO: 10669 - RNA, 22 nt, Homo sapiens
uaagucacuccagguuaaagug

SEQ ID NO: 10670 - RNA, 22 nt, Homo sapiens
aaagugauguccaggcuuucag

SEQ ID NO: 10671 - RNA, 22 nt, Homo sapiens
gcagaauugguuucuucuaagg

SEQ ID NO: 10672 - RNA, 22 nt, Homo sapiens
uaaaugcucuuuaaaagugcuu

SEQ ID NO: 10673 - RNA, 22 nt, Homo sapiens
gucaggcaccgauacaguuuuu

SEQ ID NO: 10674 - RNA, 23 nt, Homo sapiens
ucucauuccuugaaaauaaugac

SEQ ID NO: 10675 - RNA, 22 nt, Homo sapiens
ugugccacugcacucuggccug

SEQ ID NO: 10676 - RNA, 22 nt, Homo sapiens
ucaggcaccuuccucuuaucug

SEQ ID NO: 10677 - RNA, 17 nt, Homo sapiens
augugaauguucaaaua

SEQ ID NO: 10678 - RNA, 22 nt, Homo sapiens
augacauugaugcucuggcugg

SEQ ID NO: 10679 - RNA, 22 nt, Homo sapiens
uguaacacacacuguuuacucc

SEQ ID NO: 10680 - RNA, 22 nt, Homo sapiens
ucagcagugugaaaauggacua

SEQ ID NO: 10681 - RNA, 22 nt, Homo sapiens
auagcagugugaaaacagacua

SEQ ID NO: 10682 - RNA, 22 nt, Homo sapiens
guaaucucagcuacuugggagu

SEQ ID NO: 10683 - RNA, 22 nt, Homo sapiens
augcagugugcaacagauuaag

SEQ ID NO: 10684 - RNA, 22 nt, Homo sapiens
uuguaaagaucauaugcuguuc

SEQ ID NO: 10685 - RNA, 22 nt, Homo sapiens
ccuucuuuuguaaggcugaaua

SEQ ID NO: 10686 - RNA, 23 nt, Homo sapiens
aucacuguuaacaauuucuuccu

SEQ ID NO: 10687 - RNA, 22 nt, Homo sapiens
auucccuuagcugccucagccu

SEQ ID NO: 10688 - RNA, 22 nt, Homo sapiens
cuggaguaugaaccauguauca

SEQ ID NO: 10689 - RNA, 22 nt, Homo sapiens
cauugcacuuagacaacuuuug

SEQ ID NO: 10690 - RNA, 22 nt, Homo sapiens
cccagaguucuuaaauacugag

SEQ ID NO: 10691 - RNA, 18 nt, Homo sapiens
cuggaugucgaguguguu

SEQ ID NO: 10692 - RNA, 22 nt, Homo sapiens
uugccuaggcuggauugcagug

SEQ ID NO: 10693 - RNA, 22 nt, Homo sapiens
aguccauuugaugaugauucca

SEQ ID NO: 10694 - RNA, 22 nt, Homo sapiens
cuucaaaguuggcuaggagaca

SEQ ID NO: 10695 - RNA, 22 nt, Homo sapiens
uaacauuguugauuauacuaag

SEQ ID NO: 10696 - RNA, 22 nt, Homo sapiens
ugaaucauuucuugucuucagu

SEQ ID NO: 10697 - RNA, 22 nt, Homo sapiens
uaagugaaggaaguguguuuac

SEQ ID NO: 10698 - RNA, 20 nt, Homo sapiens
aguauucacuuuuuucaugg

SEQ ID NO: 10699 - RNA, 22 nt, Homo sapiens
augagauucuuagagaagucug

SEQ ID NO: 10700 - RNA, 22 nt, Homo sapiens
uauugcacuccucaugcauuug

SEQ ID NO: 10701 - RNA, 22 nt, Homo sapiens
aaagugcuuccuuuuugagggu

SEQ ID NO: 10702 - RNA, 21 nt, Homo sapiens
aauacucuagguuaagagagc

SEQ ID NO: 10703 - RNA, 22 nt, Homo sapiens
uuauuagagauauuugguuagg

SEQ ID NO: 10704 - RNA, 22 nt, Homo sapiens
gugcaaauuccagcucaacucc

SEQ ID NO: 10705 - RNA, 22 nt, Homo sapiens
acaagacuucuuguauucuagu

SEQ ID NO: 10706 - RNA, 22 nt, Homo sapiens
aaaugccucccauucuacugac

SEQ ID NO: 10707 - RNA, 22 nt, Homo sapiens
agcagagcaguggauuuuguga

SEQ ID NO: 10708 - RNA, 22 nt, Homo sapiens
uugaauagaaguguugaaagug

SEQ ID NO: 10709 - RNA, 22 nt, Homo sapiens
cccugagaugcuguuaaucugu

SEQ ID NO: 10710 - RNA, 22 nt, Homo sapiens
uaauccuagcacuuuggaagac

SEQ ID NO: 10711 - RNA, 21 nt, Homo sapiens
gaccacagcagggaaugucag

SEQ ID NO: 10712 - RNA, 22 nt, Homo sapiens
cucaguuuugccuuguuuaagg

SEQ ID NO: 10713 - RNA, 22 nt, Homo sapiens
uaaguagaggaaucauuuugug

SEQ ID NO: 10714 - RNA, 22 nt, Homo sapiens
augugaaugugaucggauaguc

SEQ ID NO: 10715 - RNA, 22 nt, Homo sapiens
caagugcuacagagaaaucuuu

SEQ ID NO: 10716 - RNA, 22 nt, Homo sapiens
cagagguaagcaagucagcauu

SEQ ID NO: 10717 - RNA, 22 nt, Homo sapiens
ccugagacgaauggagugaaca

SEQ ID NO: 10718 - RNA, 22 nt, Homo sapiens
uuacagauggauggcagcuggc

SEQ ID NO: 10719 - RNA, 22 nt, Homo sapiens
ugucacaguuuguacuuuauag

SEQ ID NO: 10720 - RNA, 22 nt, Homo sapiens
uugcaaagaccucuucacuucc

SEQ ID NO: 10721 - RNA, 22 nt, Homo sapiens
agagugaagcuuuuuauauucu

SEQ ID NO: 10722 - RNA, 22 nt, Homo sapiens
auacuguacugaaguacccauu

SEQ ID NO: 10723 - RNA, 22 nt, Homo sapiens
aaagugcuguagacugggcgca

SEQ ID NO: 10724 - RNA, 22 nt, Homo sapiens
gauggcacuuaagagcaagagc

SEQ ID NO: 10725 - RNA, 22 nt, Homo sapiens
aagagaugaagguccugacugu

SEQ ID NO: 10726 - RNA, 22 nt, Homo sapiens
ucagacacuguggccuuuggac

SEQ ID NO: 10727 - RNA, 22 nt, Homo sapiens
uuauucauuaacagggaccaaa

SEQ ID NO: 10728 - RNA, 22 nt, Homo sapiens
cuggugauugguuucauucagu

SEQ ID NO: 10729 - RNA, 22 nt, Homo sapiens
ucucauggagucaggagcagaa

SEQ ID NO: 10730 - RNA, 22 nt, Homo sapiens
ugugccacugcacucccgccug

SEQ ID NO: 10731 - RNA, 22 nt, Homo sapiens
ugagaucacuaagagguaaugg

SEQ ID NO: 10732 - RNA, 22 nt, Homo sapiens
uucacuguuaagcaguuaaacu

SEQ ID NO: 10733 - RNA, 18 nt, Homo sapiens
auauugcauuggauggau

SEQ ID NO: 10734 - RNA, 22 nt, Homo sapiens
ucucaaccucccaaguagcugg

SEQ ID NO: 10735 - RNA, 22 nt, Homo sapiens
cuugcacucagaagauucaguu

SEQ ID NO: 10736 - RNA, 22 nt, Homo sapiens
cauugcacacauuuaccuaugu

SEQ ID NO: 10737 - RNA, 22 nt, Homo sapiens
uacaaagcuuucugcaaaucau

SEQ ID NO: 10738 - RNA, 22 nt, Homo sapiens
uuguacuuuuaguagagacggg

SEQ ID NO: 10739 - RNA, 22 nt, Homo sapiens
acugagaucuuuaaauaaauaa

SEQ ID NO: 10740 - RNA, 20 nt, Homo sapiens
uaagugcuugagacuucuga

SEQ ID NO: 10741 - RNA, 22 nt, Homo sapiens
gagaacauuuaagccacucagg

SEQ ID NO: 10742 - RNA, 22 nt, Homo sapiens
auagcagugugagaaugaacua

SEQ ID NO: 10743 - RNA, 22 nt, Homo sapiens
ugugaauguaagaaaauccaac

SEQ ID NO: 10744 - RNA, 22 nt, Homo sapiens
guguccucgaguacacaucagg

SEQ ID NO: 10745 - RNA, 23 nt, Homo sapiens
ugagauuauaaucuuuuacuucu

SEQ ID NO: 10746 - RNA, 22 nt, Homo sapiens
uugccuaggcuggaguucagug

SEQ ID NO: 10747 - RNA, 22 nt, Homo sapiens
gagacggagucucgcucugucg

SEQ ID NO: 10748 - RNA, 22 nt, Homo sapiens
gagacggagucuugcucuguug

SEQ ID NO: 10749 - RNA, 22 nt, Homo sapiens
gagcacugauuuauuuuugucu

SEQ ID NO: 10750 - RNA, 22 nt, Homo sapiens
uucacuguagccucagccucuu

SEQ ID NO: 10751 - RNA, 22 nt, Homo sapiens
uugaugauguuucugccuugcc

SEQ ID NO: 10752 - RNA, 18 nt, Homo sapiens
ucacagguaaaguugaca

SEQ ID NO: 10753 - RNA, 22 nt, Homo sapiens
cagcuaaauuguuaaauccaag

SEQ ID NO: 10754 - RNA, 22 nt, Homo sapiens
gcagagaaacaggucuaaggag

SEQ ID NO: 10755 - RNA, 22 nt, Homo sapiens
guuggcaaguggcugagcuggg

SEQ ID NO: 10756 - RNA, 22 nt, Homo sapiens
acugcacuucagccuugggaaa

SEQ ID NO: 10757 - RNA, 22 nt, Homo sapiens
guaaucucaccuacuugggagg

SEQ ID NO: 10758 - RNA, 22 nt, Homo sapiens
gagguaucauuauguugcccag

SEQ ID NO: 10759 - RNA, 22 nt, Homo sapiens
aaagugcugggauuggccgggc

SEQ ID NO: 10760 - RNA, 22 nt, Homo sapiens
auacaagugccauguuggugug

SEQ ID NO: 10761 - RNA, 22 nt, Homo sapiens
uaugucuuuugcuugcaaauag

SEQ ID NO: 10762 - RNA, 18 nt, Homo sapiens
ucacggggagcagcagcc

SEQ ID NO: 10763 - RNA, 18 nt, Homo sapiens
uugcaaauucuucccugu

SEQ ID NO: 10764 - RNA, 21 nt, Homo sapiens
ugagaugugaccagggcauca

SEQ ID NO: 10765 - RNA, 22 nt, Homo sapiens
cauugcacuccagcccagguga

SEQ ID NO: 10766 - RNA, 21 nt, Homo sapiens
uaaagcuuagcuauaguggcu

SEQ ID NO: 10767 - RNA, 20 nt, Homo sapiens
ucaaggcacgaauaaaaguu

SEQ ID NO: 10768 - RNA, 23 nt, Homo sapiens
ggaguguaaugacucgaucucgg

SEQ ID NO: 10769 - RNA, 22 nt, Homo sapiens
augucaaagaggaaaacuggau

SEQ ID NO: 10770 - RNA, 22 nt, Homo sapiens
gaauuguacugcaaucagggga

SEQ ID NO: 10771 - RNA, 21 nt, Homo sapiens
ugcauauuggaacuuucucuc

SEQ ID NO: 10772 - RNA, 19 nt, Homo sapiens
cuaaguccccuugauuaga

SEQ ID NO: 10773 - RNA, 22 nt, Homo sapiens
uccugagacucacaggcucccc

SEQ ID NO: 10774 - RNA, 22 nt, Homo sapiens
aauugcacuggaaguaacugag

SEQ ID NO: 10775 - RNA, 22 nt, Homo sapiens
aagugcuuacagggaacaugau

SEQ ID NO: 10776 - RNA, 22 nt, Homo sapiens
ucaugugaggauaacaauagug

SEQ ID NO: 10777 - RNA, 22 nt, Homo sapiens
uuucauggaggauuugcuucuu

SEQ ID NO: 10778 - RNA, 22 nt, Homo sapiens
aaagugcugggauuggcugggc

SEQ ID NO: 10779 - RNA, 19 nt, Homo sapiens
ugacaugaaacccaagauc

SEQ ID NO: 10780 - RNA, 22 nt, Homo sapiens
gugcacauauggugcauaagug

SEQ ID NO: 10781 - RNA, 22 nt, Homo sapiens
agcucuuguuaguauuagcagu

SEQ ID NO: 10782 - RNA, 22 nt, Homo sapiens
ucucaaguggucgcaguuagau

SEQ ID NO: 10783 - RNA, 22 nt, Homo sapiens
gugaggcacugcugcuuuccag

SEQ ID NO: 10784 - RNA, 22 nt, Homo sapiens
uuguaacaugcuuucacuucag

SEQ ID NO: 10785 - RNA, 22 nt, Homo sapiens
uuuuaguggacaaagguauuua

SEQ ID NO: 10786 - RNA, 22 nt, Homo sapiens
uaacauagucauauacuugcuu

SEQ ID NO: 10787 - RNA, 22 nt, Homo sapiens
gcaguggugugugccagccuag

SEQ ID NO: 10788 - RNA, 22 nt, Homo sapiens
auggaagaauugucggggaugu

SEQ ID NO: 10789 - RNA, 22 nt, Homo sapiens
acaccaugucuguuucugguuu

SEQ ID NO: 10790 - RNA, 23 nt, Homo sapiens
auaagccuuuucuuucugcccca

SEQ ID NO: 10791 - RNA, 22 nt, Homo sapiens
cugguuuguaaaguuccugaga

SEQ ID NO: 10792 - RNA, 22 nt, Homo sapiens
uaagguccuuaaauguguaacc

SEQ ID NO: 10793 - RNA, 21 nt, Homo sapiens
cauaaugcuacuuauuuuaug

SEQ ID NO: 10794 - RNA, 22 nt, Homo sapiens
gagaaugaugauuuccaauuuc

SEQ ID NO: 10795 - RNA, 22 nt, Homo sapiens
uaaucacagagguuuggccuca

SEQ ID NO: 10796 - RNA, 22 nt, Homo sapiens
uuuaucuguuuaaaacuguuca

SEQ ID NO: 10797 - RNA, 23 nt, Homo sapiens
aauugcacauuccuugcuggcag

SEQ ID NO: 10798 - RNA, 22 nt, Homo sapiens
uuuaaagcaugacgagaagaag

SEQ ID NO: 10799 - RNA, 22 nt, Homo sapiens
aaagucuguuacagcuauuucu

SEQ ID NO: 10800 - RNA, 22 nt, Homo sapiens
auccaucagacggcaggcguug

SEQ ID NO: 10801 - RNA, 22 nt, Homo sapiens
aagugcuuuuuagauaugguuu

SEQ ID NO: 10802 - RNA, 22 nt, Homo sapiens
ugccuaguagaaggugaacaug

SEQ ID NO: 10803 - RNA, 22 nt, Homo sapiens
aagagguaauaacaaagcuucu

SEQ ID NO: 10804 - RNA, 22 nt, Homo sapiens
auagcagugugaaaauugacug

SEQ ID NO: 10805 - RNA, 22 nt, Homo sapiens
cccagagacagaaugauaaacu

SEQ ID NO: 10806 - RNA, 20 nt, Homo sapiens
uggucaccuucaggagguuc

SEQ ID NO: 10807 - RNA, 22 nt, Homo sapiens
uugugaaugaugucgcaauaaa

SEQ ID NO: 10808 - RNA, 21 nt, Homo sapiens
auuguauguaaaccaaaugag

SEQ ID NO: 10809 - RNA, 20 nt, Homo sapiens
cauugcacuccagccugcug

SEQ ID NO: 10810 - RNA, 22 nt, Homo sapiens
ucaucuggcgaaugugaagagu

SEQ ID NO: 10811 - RNA, 22 nt, Homo sapiens
auuuguccugccuuuuccuccu

SEQ ID NO: 10812 - RNA, 22 nt, Homo sapiens
augcacauggcuaacuuuuuuc

SEQ ID NO: 10813 - RNA, 22 nt, Homo sapiens
aaucacacuugauguugagcaa

SEQ ID NO: 10814 - RNA, 22 nt, Homo sapiens
ugcauccauucuagacucaucu

SEQ ID NO: 10815 - RNA, 22 nt, Homo sapiens
ucacugaggucugagcuuuaug

SEQ ID NO: 10816 - RNA, 22 nt, Homo sapiens
gucuggcuuaucucacuuacca

SEQ ID NO: 10817 - RNA, 19 nt, Homo sapiens
ucauagucuaagaugagaa

SEQ ID NO: 10818 - RNA, 22 nt, Homo sapiens
uugaaagucuaggcuuacagua

SEQ ID NO: 10819 - RNA, 22 nt, Homo sapiens
agcagagcauauucauucgggg

SEQ ID NO: 10820 - RNA, 19 nt, Homo sapiens
uggcacauguauacauaug

SEQ ID NO: 10821 - RNA, 22 nt, Homo sapiens
ugaacagcacguuuauucagaa

SEQ ID NO: 10822 - RNA, 23 nt, Homo sapiens
ggcaagaucucagcucacugcaa

SEQ ID NO: 10823 - RNA, 17 nt, Homo sapiens
uucucaguucugaucuc

SEQ ID NO: 10824 - RNA, 22 nt, Homo sapiens
uugcacauggcaggugcucaau

SEQ ID NO: 10825 - RNA, 22 nt, Homo sapiens
accaguuuuuuauacaucuucu

SEQ ID NO: 10826 - RNA, 22 nt, Homo sapiens
uaucagagcugucagccuaccu

SEQ ID NO: 10827 - RNA, 22 nt, Homo sapiens
uugaaccauucuuuugauagag

SEQ ID NO: 10828 - RNA, 20 nt, Homo sapiens
cuugccuagcccuuugccuc

SEQ ID NO: 10829 - RNA, 22 nt, Homo sapiens
cauugcacugcuucuugggugu

SEQ ID NO: 10830 - RNA, 22 nt, Homo sapiens
augaccaaugggcagagcuaga

SEQ ID NO: 10831 - RNA, 22 nt, Homo sapiens
gagaacauuaauaguuaauuuu

SEQ ID NO: 10832 - RNA, 22 nt, Homo sapiens
auacuguauaggauuguagccu

SEQ ID NO: 10833 - RNA, 22 nt, Homo sapiens
uagcagguguuccacaaauauu

SEQ ID NO: 10834 - RNA, 22 nt, Homo sapiens
aauugcacuacugcacucccac

SEQ ID NO: 10835 - RNA, 22 nt, Homo sapiens
uguguaauaccuuugacuauau

SEQ ID NO: 10836 - RNA, 22 nt, Homo sapiens
uuuuuggauaaugguacaugua

SEQ ID NO: 10837 - RNA, 22 nt, Homo sapiens
caaagucuauucuacccuuacc

SEQ ID NO: 10838 - RNA, 22 nt, Homo sapiens
cauugcacuccagccugaguga

SEQ ID NO: 10839 - RNA, 22 nt, Homo sapiens
auugcacaccagucugggcaaa

SEQ ID NO: 10840 - RNA, 22 nt, Homo sapiens
uggagugcaauggcaccaucuu

SEQ ID NO: 10841 - RNA, 22 nt, Homo sapiens
ggagaauguaauugguauuuug

SEQ ID NO: 10842 - RNA, 22 nt, Homo sapiens
gagagguaguuuuuuggucguc

SEQ ID NO: 10843 - RNA, 22 nt, Homo sapiens
cagagaaugucuuuuuuaacca

SEQ ID NO: 10844 - RNA, 22 nt, Homo sapiens
gugagauaucuagacuagggaa

SEQ ID NO: 10845 - RNA, 22 nt, Homo sapiens
auaaaugcuuagaucuguauau

SEQ ID NO: 10846 - RNA, 22 nt, Homo sapiens
aagugcuucuuuccucgagaag

SEQ ID NO: 10847 - RNA, 22 nt, Homo sapiens
cagugcuuguuauuguucuauu

SEQ ID NO: 10848 - RNA, 22 nt, Homo sapiens
uuauuagguuaaccuauagcua

SEQ ID NO: 10849 - RNA, 22 nt, Homo sapiens
uccuucaguccaguggguuuug

SEQ ID NO: 10850 - RNA, 22 nt, Homo sapiens
uggcaccauccaggugucucua

SEQ ID NO: 10851 - RNA, 22 nt, Homo sapiens
aaagugcugagacagacuggga

SEQ ID NO: 10852 - RNA, 22 nt, Homo sapiens
acugcacucuagccuuggcaac

SEQ ID NO: 10853 - RNA, 22 nt, Homo sapiens
aaagugcugagucuaggcgggg

SEQ ID NO: 10854 - RNA, 22 nt, Homo sapiens
guguauauccuauuaguucugu

SEQ ID NO: 10855 - RNA, 22 nt, Homo sapiens
gcacauauguaaauagcugccu

SEQ ID NO: 10856 - RNA, 22 nt, Homo sapiens
uauugcacuuuuccauaggagu

SEQ ID NO: 10857 - RNA, 22 nt, Homo sapiens
uaucaagaugacaaacuuugcu

SEQ ID NO: 10858 - RNA, 22 nt, Homo sapiens
ucuggagugugaaguggauaug

SEQ ID NO: 10859 - RNA, 22 nt, Homo sapiens
aagugcucuugaaacugccuua

SEQ ID NO: 10860 - RNA, 22 nt, Homo sapiens
caagugcucuaggauccugagu

SEQ ID NO: 10861 - RNA, 22 nt, Homo sapiens
cugaaagagcauguaacacagu

SEQ ID NO: 10862 - RNA, 22 nt, Homo sapiens
uuuugcaccauccuaauaguau

SEQ ID NO: 10863 - RNA, 22 nt, Homo sapiens
cuucaugucuucaauggggggg

SEQ ID NO: 10864 - RNA, 22 nt, Homo sapiens
auugcacacagaaucaggguaa

SEQ ID NO: 10865 - RNA, 22 nt, Homo sapiens
ggcagcauugccuuugcaguga

SEQ ID NO: 10866 - RNA, 22 nt, Homo sapiens
ucacugcgaccucugccucccg

SEQ ID NO: 10867 - RNA, 21 nt, Homo sapiens
caugucacugcacucuagccu

SEQ ID NO: 10868 - RNA, 22 nt, Homo sapiens
cauugcacuccagccuggccaa

SEQ ID NO: 10869 - RNA, 22 nt, Homo sapiens
aaaagucuguagugaaagguga

SEQ ID NO: 10870 - RNA, 22 nt, Homo sapiens
uuccuggagaguuuucccaaag

SEQ ID NO: 10871 - RNA, 22 nt, Homo sapiens
uugugaaaaaccucucguggaa

SEQ ID NO: 10872 - RNA, 22 nt, Homo sapiens
uucuggaaaucagcagagggug

SEQ ID NO: 10873 - RNA, 22 nt, Homo sapiens
cauugcacuccagccugccugg

SEQ ID NO: 10874 - RNA, 22 nt, Homo sapiens
ugacauuacagucacuugcugu

SEQ ID NO: 10875 - RNA, 22 nt, Homo sapiens
ugaggaacuagcuacccuaaua

SEQ ID NO: 10876 - RNA, 22 nt, Homo sapiens
ugaugacauugucacagucuga

SEQ ID NO: 10877 - RNA, 22 nt, Homo sapiens
gagagugcuuggcaucugcuga

SEQ ID NO: 10878 - RNA, 22 nt, Homo sapiens
acaguaaugggccccuuuuccu

SEQ ID NO: 10879 - RNA, 22 nt, Homo sapiens
gugccuuuucugagcaaugagc

SEQ ID NO: 10880 - RNA, 22 nt, Homo sapiens
ucuuuggucuacuuucauaugu

SEQ ID NO: 10881 - RNA, 16 nt, Homo sapiens
uuauugcauucuucuc

SEQ ID NO: 10882 - RNA, 22 nt, Homo sapiens
uucucuguggauugggugagag

SEQ ID NO: 10883 - RNA, 22 nt, Homo sapiens
augggaaaaucagaaggccugg

SEQ ID NO: 10884 - RNA, 22 nt, Homo sapiens
uaaagcuuagauccaugguggc

SEQ ID NO: 10885 - RNA, 22 nt, Homo sapiens
aaagugcugggaucacacugaa

SEQ ID NO: 10886 - RNA, 20 nt, Homo sapiens
uucaucaggauauuggucua

SEQ ID NO: 10887 - RNA, 22 nt, Homo sapiens
ugcgccauugcauuccagccug

SEQ ID NO: 10888 - RNA, 22 nt, Homo sapiens
uauacugucuuuguaugccuag

SEQ ID NO: 10889 - RNA, 19 nt, Homo sapiens
uuucaauguaaggauggag

SEQ ID NO: 10890 - RNA, 22 nt, Homo sapiens
auaugucuauuauuagggcagg

SEQ ID NO: 10891 - RNA, 22 nt, Homo sapiens
aagaguuaguaaaauuuccucu

SEQ ID NO: 10892 - RNA, 23 nt, Homo sapiens
cuuuguccccacccaaaucucau

SEQ ID NO: 10893 - RNA, 20 nt, Homo sapiens
guccauuugcugccauugcu

SEQ ID NO: 10894 - RNA, 22 nt, Homo sapiens
uuccaguuauuauaccucuuaa

SEQ ID NO: 10895 - RNA, 22 nt, Homo sapiens
acugcacuccagccuuggcggc

SEQ ID NO: 10896 - RNA, 22 nt, Homo sapiens
uuauuagguugguggaaaagua

SEQ ID NO: 10897 - RNA, 22 nt, Homo sapiens
ucauggcauuguuaaggguuuu

SEQ ID NO: 10898 - RNA, 20 nt, Homo sapiens
ugacaagugagaauuauggg

SEQ ID NO: 10899 - RNA, 22 nt, Homo sapiens
uugaaagaaaggagacugaguu

SEQ ID NO: 10900 - RNA, 22 nt, Homo sapiens
ggagaugauuaugaaucacuua

SEQ ID NO: 10901 - RNA, 20 nt, Homo sapiens
uuccagcacauuagggaagc

SEQ ID NO: 10902 - RNA, 22 nt, Homo sapiens
uaucacagaggguauccuagag

SEQ ID NO: 10903 - RNA, 22 nt, Homo sapiens
uuuguccccgcccagaucucau

SEQ ID NO: 10904 - RNA, 22 nt, Homo sapiens
uacagucacauuccugaccaua

SEQ ID NO: 10905 - RNA, 22 nt, Homo sapiens
ggaucacuugagaccaggaguu

SEQ ID NO: 10906 - RNA, 22 nt, Homo sapiens
ucuuuuggguauggagccauca

SEQ ID NO: 10907 - RNA, 22 nt, Homo sapiens
cauugcacuccagcuugggcga

SEQ ID NO: 10908 - RNA, 23 nt, Homo sapiens
uaagucacacagauuaauuuauu

SEQ ID NO: 10909 - RNA, 22 nt, Homo sapiens
uaagugaauauggacaguuagc

SEQ ID NO: 10910 - RNA, 22 nt, Homo sapiens
augauguaggccauggguuucu

SEQ ID NO: 10911 - RNA, 22 nt, Homo sapiens
acugcacuccagccuuggccac

SEQ ID NO: 10912 - RNA, 22 nt, Homo sapiens
ugucacccuuuauccauuuccu

SEQ ID NO: 10913 - RNA, 22 nt, Homo sapiens
uauuccacaauaugauuuuuaa

SEQ ID NO: 10914 - RNA, 22 nt, Homo sapiens
gccugagaggauaugauccccu

SEQ ID NO: 10915 - RNA, 22 nt, Homo sapiens
guucaaguuuucucuugugggu

SEQ ID NO: 10916 - RNA, 21 nt, Homo sapiens
uuggggaauggagagguuuuc

SEQ ID NO: 10917 - RNA, 22 nt, Homo sapiens
auucaaagugcauguucccacu

SEQ ID NO: 10918 - RNA, 23 nt, Homo sapiens
aggaauggaaaaccaaguaucau

SEQ ID NO: 10919 - RNA, 22 nt, Homo sapiens
caugacacuggcauguuucuuu

SEQ ID NO: 10920 - RNA, 22 nt, Homo sapiens
ucugacacagugauuaguaaau

SEQ ID NO: 10921 - RNA, 22 nt, Homo sapiens
uugauauguuguuagauucagu

SEQ ID NO: 10922 - RNA, 22 nt, Homo sapiens
cauugcacuccaccuuggguaa

SEQ ID NO: 10923 - RNA, 22 nt, Homo sapiens
ugagaugugaagaucacaugaa

SEQ ID NO: 10924 - RNA, 18 nt, Homo sapiens
auugcacaccagccuggg

SEQ ID NO: 10925 - RNA, 22 nt, Homo sapiens
cauacagcuaguaaguguaaga

SEQ ID NO: 10926 - RNA, 22 nt, Homo sapiens
ucuaauguaaccugcaaauauu

SEQ ID NO: 10927 - RNA, 22 nt, Homo sapiens
agaaacauucucuugccuccuu

SEQ ID NO: 10928 - RNA, 22 nt, Homo sapiens
cuugcacuccacuguucuccug

SEQ ID NO: 10929 - RNA, 22 nt, Homo sapiens
aagugcuuuguacagggguuga

SEQ ID NO: 10930 - RNA, 22 nt, Homo sapiens
uucauagucuaugcaaguaaga

SEQ ID NO: 10931 - RNA, 22 nt, Homo sapiens
aaagugcuucucuuuggugggu

SEQ ID NO: 10932 - RNA, 22 nt, Homo sapiens
caggugcuuacuuaauagccau

SEQ ID NO: 10933 - RNA, 22 nt, Homo sapiens
ugggagacuacauuuuuaacaa

SEQ ID NO: 10934 - RNA, 21 nt, Homo sapiens
auugcacaauauacccaugua

SEQ ID NO: 10935 - RNA, 22 nt, Homo sapiens
uauugauuaauugugauuaggc

SEQ ID NO: 10936 - RNA, 22 nt, Homo sapiens
auugucacccgggcaguaagca

SEQ ID NO: 10937 - RNA, 22 nt, Homo sapiens
gugcacauuguuuaugucuguu

SEQ ID NO: 10938 - RNA, 22 nt, Homo sapiens
auaagugagugauucaguguua

SEQ ID NO: 10939 - RNA, 22 nt, Homo sapiens
uaugacauaguccuuaacccuc

SEQ ID NO: 10940 - RNA, 22 nt, Homo sapiens
cagagguauugcaaaagccuag

SEQ ID NO: 10941 - RNA, 22 nt, Homo sapiens
agacacugaaauguauugaaga

SEQ ID NO: 10942 - RNA, 22 nt, Homo sapiens
aaauugcuuuugaagacuuagu

SEQ ID NO: 10943 - RNA, 22 nt, Homo sapiens
cugagauggagucucgcauugu

SEQ ID NO: 10944 - RNA, 22 nt, Homo sapiens
auggcuauuccauaggcagagc

SEQ ID NO: 10945 - RNA, 22 nt, Homo sapiens
uugcaaugugaugugauuugga

SEQ ID NO: 10946 - RNA, 22 nt, Homo sapiens
uggucuucuggccuccagaacc

SEQ ID NO: 10947 - RNA, 22 nt, Homo sapiens
aauaaagcagcuuuuugggacu

SEQ ID NO: 10948 - RNA, 19 nt, Homo sapiens
uccaccgcgugcaccucua

SEQ ID NO: 10949 - RNA, 22 nt, Homo sapiens
uugagcccuggagguggaggcu

SEQ ID NO: 10950 - RNA, 18 nt, Homo sapiens
guaaauguaucuauugcc

SEQ ID NO: 10951 - RNA, 22 nt, Homo sapiens
guggaaaaguaguugcgguuuu

SEQ ID NO: 10952 - RNA, 22 nt, Homo sapiens
uuaaucaggccguuuccuaaga

SEQ ID NO: 10953 - RNA, 22 nt, Homo sapiens
caagugaauaguugcucucaga

SEQ ID NO: 10954 - RNA, 22 nt, Homo sapiens
guggaauggaaugauuguguau

SEQ ID NO: 10955 - RNA, 22 nt, Homo sapiens
gagauauuauuucccuuucaca

SEQ ID NO: 10956 - RNA, 22 nt, Homo sapiens
gcagucacagggagauggugac

SEQ ID NO: 10957 - RNA, 22 nt, Homo sapiens
guggaaugauaucucauugugg

SEQ ID NO: 10958 - RNA, 22 nt, Homo sapiens
cccugagaugugaauuucagag

SEQ ID NO: 10959 - RNA, 22 nt, Homo sapiens
auuacaugucuauccaugaaca

SEQ ID NO: 10960 - RNA, 22 nt, Homo sapiens
ugaaacauacacucugaugggg

SEQ ID NO: 10961 - RNA, 22 nt, Homo sapiens
caaaagugauugcgguuuuugc

SEQ ID NO: 10962 - RNA, 22 nt, Homo sapiens
uggucaccuucuugcucugucu

SEQ ID NO: 10963 - RNA, 22 nt, Homo sapiens
ugaauguaagaugucugcuggu

SEQ ID NO: 10964 - RNA, 20 nt, Homo sapiens
augaagugaaguuagggaac

SEQ ID NO: 10965 - RNA, 22 nt, Homo sapiens
acauaguagacacugaaaauau

SEQ ID NO: 10966 - RNA, 22 nt, Homo sapiens
uugaauagaagguuuuuuguuc

SEQ ID NO: 10967 - RNA, 22 nt, Homo sapiens
cucucaagaugcugggauuaca

SEQ ID NO: 10968 - RNA, 22 nt, Homo sapiens
cacagaauucauuggauuaccu

SEQ ID NO: 10969 - RNA, 17 nt, Homo sapiens
uuucagaguggaagugu

SEQ ID NO: 10970 - RNA, 22 nt, Homo sapiens
gcaaagaaugcagauuugccuc

SEQ ID NO: 10971 - RNA, 21 nt, Homo sapiens
uaucacaguagaauaggaucu

SEQ ID NO: 10972 - RNA, 22 nt, Homo sapiens
ggaaucugaaccaugggaaugg

SEQ ID NO: 10973 - RNA, 22 nt, Homo sapiens
ucuagccuaugaagcuugucca

SEQ ID NO: 10974 - RNA, 22 nt, Homo sapiens
agaucauaugcaguaaugaacu

SEQ ID NO: 10975 - RNA, 22 nt, Homo sapiens
cauugcacuccagccuggcaac

SEQ ID NO: 10976 - RNA, 22 nt, Homo sapiens
uuaucauagugcaguuuucuga

SEQ ID NO: 10977 - RNA, 19 nt, Homo sapiens
uuuugcucuuuauaccuau

SEQ ID NO: 10978 - RNA, 22 nt, Homo sapiens
aggugaaugcucacauucuaau

SEQ ID NO: 10979 - RNA, 22 nt, Homo sapiens
uggauaguaauaaacauauagg

SEQ ID NO: 10980 - RNA, 22 nt, Homo sapiens
uucaagaauuaaaguggcuuuu

SEQ ID NO: 10981 - RNA, 22 nt, Homo sapiens
auuguaauuuuagagaaagugg

SEQ ID NO: 10982 - RNA, 22 nt, Homo sapiens
gucacauugaugcccauggugg

SEQ ID NO: 10983 - RNA, 22 nt, Homo sapiens
uugaguuugaguauucuaaagc

SEQ ID NO: 10984 - RNA, 22 nt, Homo sapiens
ugccuaguggaaggagagcaaa

SEQ ID NO: 10985 - RNA, 22 nt, Homo sapiens
auuaagugcuugccagugcugg

SEQ ID NO: 10986 - RNA, 22 nt, Homo sapiens
uacuguacugcaguucugcaaa

SEQ ID NO: 10987 - RNA, 22 nt, Homo sapiens
aagugcuuaggauagugugugg

SEQ ID NO: 10988 - RNA, 22 nt, Homo sapiens
acccugugaauauuuaaacuuc

SEQ ID NO: 10989 - RNA, 22 nt, Homo sapiens
cucaaguacaugggauuacagg

SEQ ID NO: 10990 - RNA, 22 nt, Homo sapiens
ugagauguggcuagagagguug

SEQ ID NO: 10991 - RNA, 22 nt, Homo sapiens
aucaaaguuucccagaaguugu

SEQ ID NO: 10992 - RNA, 22 nt, Homo sapiens
uccugagaauagaguugcaugu

SEQ ID NO: 10993 - RNA, 22 nt, Homo sapiens
aauaaagcauggcuacuccaua

SEQ ID NO: 10994 - RNA, 22 nt, Homo sapiens
gugugauuguuaauuuuaggug

SEQ ID NO: 10995 - RNA, 22 nt, Homo sapiens
ucauucauucauccagcuugag

SEQ ID NO: 10996 - RNA, 22 nt, Homo sapiens
aaagugcugagauuguaggcau

SEQ ID NO: 10997 - RNA, 22 nt, Homo sapiens
ugcaugaugcugagauuuggga

SEQ ID NO: 10998 - RNA, 21 nt, Homo sapiens
caauggcacaaucucugcuca

SEQ ID NO: 10999 - RNA, 22 nt, Homo sapiens
uucucaauggcaacuuguugcu

SEQ ID NO: 11000 - RNA, 20 nt, Homo sapiens
uauucacucuccagucuugc

SEQ ID NO: 11001 - RNA, 22 nt, Homo sapiens
ucucuguuugucuguuacuggu

SEQ ID NO: 11002 - RNA, 22 nt, Homo sapiens
auuauugcucccaauuuuucac

SEQ ID NO: 11003 - RNA, 22 nt, Homo sapiens
cugugcuugagagaugacacag

SEQ ID NO: 11004 - RNA, 22 nt, Homo sapiens
auggcuuuuuaaaucauguugu

SEQ ID NO: 11005 - RNA, 22 nt, Homo sapiens
gugccacugcaccuggccuaag

SEQ ID NO: 11006 - RNA, 22 nt, Homo sapiens
uucauguaauauuucacagcuu

SEQ ID NO: 11007 - RNA, 22 nt, Homo sapiens
auaacucuguuuuuuucaugca

SEQ ID NO: 11008 - RNA, 22 nt, Homo sapiens
acagaacugggcuugcuuuugg

SEQ ID NO: 11009 - RNA, 22 nt, Homo sapiens
uugccuaggcuggagugcagua

SEQ ID NO: 11010 - RNA, 22 nt, Homo sapiens
cauugcacuccagucugggcaa

SEQ ID NO: 11011 - RNA, 22 nt, Homo sapiens
aagggaaugugguagcugguuu

SEQ ID NO: 11012 - RNA, 22 nt, Homo sapiens
ugagauuguaucugcaaugugu

SEQ ID NO: 11013 - RNA, 22 nt, Homo sapiens
aauugcacuaagcauaguccag

SEQ ID NO: 11014 - RNA, 22 nt, Homo sapiens
ugaguucuuuguagauucugug

SEQ ID NO: 11015 - RNA, 22 nt, Homo sapiens
aguaacaggauccaaagaaugu

SEQ ID NO: 11016 - RNA, 22 nt, Homo sapiens
ccugagaucauacuguuaguaa

SEQ ID NO: 11017 - RNA, 22 nt, Homo sapiens
aagagguagucugucccuuagc

SEQ ID NO: 11018 - RNA, 22 nt, Homo sapiens
uugcacauugauuuuguaucuu

SEQ ID NO: 11019 - RNA, 22 nt, Homo sapiens
cagugcuuuaucaaguccucca

SEQ ID NO: 11020 - RNA, 22 nt, Homo sapiens
ugaagugaagacucacagaagg

SEQ ID NO: 11021 - RNA, 22 nt, Homo sapiens
uucaguccauuuccuuggucac

SEQ ID NO: 11022 - RNA, 23 nt, Homo sapiens
uggcaagaauucuuaccgugugg

SEQ ID NO: 11023 - RNA, 20 nt, Homo sapiens
gugagguagaggguuaccug

SEQ ID NO: 11024 - RNA, 22 nt, Homo sapiens
uggcaaaaaucacaaguaccuu

SEQ ID NO: 11025 - RNA, 22 nt, Homo sapiens
aacugguauuucccaugaauuu

SEQ ID NO: 11026 - RNA, 19 nt, Homo sapiens
gacuccagaguugugugcu

SEQ ID NO: 11027 - RNA, 22 nt, Homo sapiens
ccaggguuccacgccuggcugu

SEQ ID NO: 11028 - RNA, 22 nt, Homo sapiens
ugucaugaacucacauucuggg

SEQ ID NO: 11029 - RNA, 22 nt, Homo sapiens
uuaaaagcuaucuccaagguca

SEQ ID NO: 11030 - RNA, 22 nt, Homo sapiens
ugugcucaucucagucaacugu

SEQ ID NO: 11031 - RNA, 22 nt, Homo sapiens
uugugaaaucuaggcagagguu

SEQ ID NO: 11032 - RNA, 22 nt, Homo sapiens
uuguaaacaucuguacauugcu

SEQ ID NO: 11033 - RNA, 22 nt, Homo sapiens
aucccagaaacucggguuucuc

SEQ ID NO: 11034 - RNA, 22 nt, Homo sapiens
uugaaauguuuagaaguuugga

SEQ ID NO: 11035 - RNA, 21 nt, Homo sapiens
uuacaauggcuccuugaaggu

SEQ ID NO: 11036 - RNA, 22 nt, Homo sapiens
augagguaguagaaagucaggu

SEQ ID NO: 11037 - RNA, 22 nt, Homo sapiens
aaguggaauguuuguggcacaa

SEQ ID NO: 11038 - RNA, 22 nt, Homo sapiens
uuuuggcuagaaauauaccucc

SEQ ID NO: 11039 - RNA, 18 nt, Homo sapiens
uguugguguucacucacu

SEQ ID NO: 11040 - RNA, 22 nt, Homo sapiens
uagcaguauggagcgaggccca

SEQ ID NO: 11041 - RNA, 22 nt, Homo sapiens
auaugcauguacccacacaggc

SEQ ID NO: 11042 - RNA, 22 nt, Homo sapiens
gugcaaugagaaggggcucugg

SEQ ID NO: 11043 - RNA, 22 nt, Homo sapiens
ggcaagaucuuggcucacugaa

SEQ ID NO: 11044 - RNA, 22 nt, Homo sapiens
ucagacacugcccuccaccugu

SEQ ID NO: 11045 - RNA, 22 nt, Homo sapiens
uugcacauguugaaccagcaaa

SEQ ID NO: 11046 - RNA, 20 nt, Homo sapiens
aagacacuguccccacugga

SEQ ID NO: 11047 - RNA, 22 nt, Homo sapiens
auugcaaagcguagacucuaaa

SEQ ID NO: 11048 - RNA, 22 nt, Homo sapiens
ugugcauaugucuuuauaguag

SEQ ID NO: 11049 - RNA, 22 nt, Homo sapiens
caugucuuuuaaacauucaacu

SEQ ID NO: 11050 - RNA, 22 nt, Homo sapiens
uuaugucuuugagcaaugcugu

SEQ ID NO: 11051 - RNA, 22 nt, Homo sapiens
uucugaguggcuuucaacacug

SEQ ID NO: 11052 - RNA, 22 nt, Homo sapiens
aaucacauugaaucugcuaccu

SEQ ID NO: 11053 - RNA, 22 nt, Homo sapiens
uggagucuugaugauuuucaaa

SEQ ID NO: 11054 - RNA, 22 nt, Homo sapiens
gaaaacugcuucucuggguuuc

SEQ ID NO: 11055 - RNA, 22 nt, Homo sapiens
uucuggccccucccaaucucau

SEQ ID NO: 11056 - RNA, 22 nt, Homo sapiens
auggccgggugcgguggcucac

SEQ ID NO: 11057 - RNA, 22 nt, Homo sapiens
uuucagagucaucugcccaagu

SEQ ID NO: 11058 - RNA, 20 nt, Homo sapiens
uaagugcuugaugaaugaac

SEQ ID NO: 11059 - RNA, 22 nt, Homo sapiens
aguauugcuaauaagagauuug

SEQ ID NO: 11060 - RNA, 22 nt, Homo sapiens
aaguagcuggaugcaguggcac

SEQ ID NO: 11061 - RNA, 16 nt, Homo sapiens
uguauugcuaaaaaga

SEQ ID NO: 11062 - RNA, 22 nt, Homo sapiens
uugaaagacagaggggcaaguu

SEQ ID NO: 11063 - RNA, 22 nt, Homo sapiens
uugaggaaugugauuucaaaua

SEQ ID NO: 11064 - RNA, 22 nt, Homo sapiens
cuccuguagccccaucaucuuu

SEQ ID NO: 11065 - RNA, 22 nt, Homo sapiens
augaguaugagaauacauuaag

SEQ ID NO: 11066 - RNA, 22 nt, Homo sapiens
cuuuuggcuuagaauugucuug

SEQ ID NO: 11067 - RNA, 22 nt, Homo sapiens
uugagauuuuccucaaauauuu

SEQ ID NO: 11068 - RNA, 22 nt, Homo sapiens
cuggauauguugcaacauuucc

SEQ ID NO: 11069 - RNA, 18 nt, Homo sapiens
uuugguccuuuauaaaca

SEQ ID NO: 11070 - RNA, 22 nt, Homo sapiens
cucaaguaauccucccgccuug

SEQ ID NO: 11071 - RNA, 22 nt, Homo sapiens
aguagcaauggcucugagcuau

SEQ ID NO: 11072 - RNA, 18 nt, Homo sapiens
ccuuaguuauagagaguc

SEQ ID NO: 11073 - RNA, 22 nt, Homo sapiens
uaugucaugggguuuuugagau

SEQ ID NO: 11074 - RNA, 22 nt, Homo sapiens
gagauacuugguuucuguuucu

SEQ ID NO: 11075 - RNA, 22 nt, Homo sapiens
guauggaagucaguuuguuggc

SEQ ID NO: 11076 - RNA, 22 nt, Homo sapiens
uuugaauggaaguuuugugaaa

SEQ ID NO: 11077 - RNA, 22 nt, Homo sapiens
cuccauuuggaacagauguccu

SEQ ID NO: 11078 - RNA, 22 nt, Homo sapiens
gagacugagucuugcucuguca

SEQ ID NO: 11079 - RNA, 22 nt, Homo sapiens
auaucugcauugccauuuaugu

SEQ ID NO: 11080 - RNA, 22 nt, Homo sapiens
ucuucaugcuugaaauaauagc

SEQ ID NO: 11081 - RNA, 22 nt, Homo sapiens
agccauacaacguaugcaugua

SEQ ID NO: 11082 - RNA, 22 nt, Homo sapiens
agcaguguggccuuagacccgg

SEQ ID NO: 11083 - RNA, 22 nt, Homo sapiens
auggaagacuccucuuugggua

SEQ ID NO: 11084 - RNA, 22 nt, Homo sapiens
ucacuguguauguauaugcagg

SEQ ID NO: 11085 - RNA, 22 nt, Homo sapiens
ugugauaguuggcuaaagcagu

SEQ ID NO: 11086 - RNA, 22 nt, Homo sapiens
uuggaagagaagggagauaaac

SEQ ID NO: 11087 - RNA, 18 nt, Homo sapiens
ugugacauugagcauguc

SEQ ID NO: 11088 - RNA, 23 nt, Homo sapiens
ugagauuacccagaaagaguaua

SEQ ID NO: 11089 - RNA, 22 nt, Homo sapiens
uuaugcagcaaagugcuugaaa

SEQ ID NO: 11090 - RNA, 22 nt, Homo sapiens
ucugagaucaugucugugcugu

SEQ ID NO: 11091 - RNA, 20 nt, Homo sapiens
uaagugcauaggauauuucu

SEQ ID NO: 11092 - RNA, 22 nt, Homo sapiens
caaaagugguucuuauccuuuu

SEQ ID NO: 11093 - RNA, 19 nt, Homo sapiens
cauggcuuauaauuuuaau

SEQ ID NO: 11094 - RNA, 22 nt, Homo sapiens
ugacaugaugagcaauaauggc

SEQ ID NO: 11095 - RNA, 22 nt, Homo sapiens
aaaugcuuucuuggaccauuug

SEQ ID NO: 11096 - RNA, 18 nt, Homo sapiens
ccauucaacagauuuguc

SEQ ID NO: 11097 - RNA, 21 nt, Homo sapiens
aggauaguagauuaaauauuu

SEQ ID NO: 11098 - RNA, 22 nt, Homo sapiens
ugaugguuuuaaaaagaggagu

SEQ ID NO: 11099 - RNA, 19 nt, Homo sapiens
cuauugcacauagcugaag

SEQ ID NO: 11100 - RNA, 22 nt, Homo sapiens
auuuggguaaugagugcaaggg

SEQ ID NO: 11101 - RNA, 22 nt, Homo sapiens
cauugcacuccagccugaggga

SEQ ID NO: 11102 - RNA, 22 nt, Homo sapiens
ucacugagaaugauguuucuga

SEQ ID NO: 11103 - RNA, 22 nt, Homo sapiens
guaaucucagcuacucgggagg

SEQ ID NO: 11104 - RNA, 22 nt, Homo sapiens
uugugaauggaguagcaggauc

SEQ ID NO: 11105 - RNA, 22 nt, Homo sapiens
cuuucucagugagacccgagau

SEQ ID NO: 11106 - RNA, 22 nt, Homo sapiens
uaacaggcaaggucacaccuug

SEQ ID NO: 11107 - RNA, 22 nt, Homo sapiens
uagcaguauacguacugggucc

SEQ ID NO: 11108 - RNA, 22 nt, Homo sapiens
acugcacuccagccucggcaau

SEQ ID NO: 11109 - RNA, 22 nt, Homo sapiens
uuggccagugucuuuuuuuccu

SEQ ID NO: 11110 - RNA, 22 nt, Homo sapiens
uaggaaguuucuugauuacuua

SEQ ID NO: 11111 - RNA, 22 nt, Homo sapiens
ucaucagugcuugcaaauuauu

SEQ ID NO: 11112 - RNA, 22 nt, Homo sapiens
cacugcacuccagucccgucuc

SEQ ID NO: 11113 - RNA, 22 nt, Homo sapiens
auacaagcaguccaacuccaua

SEQ ID NO: 11114 - RNA, 22 nt, Homo sapiens
uuuuuggaggagguuagaucau

SEQ ID NO: 11115 - RNA, 18 nt, Homo sapiens
ucacaaccacagugcugu

SEQ ID NO: 11116 - RNA, 22 nt, Homo sapiens
ugagacggagucuugcucuguc

SEQ ID NO: 11117 - RNA, 22 nt, Homo sapiens
uagagguagagugacuucccca

SEQ ID NO: 11118 - RNA, 22 nt, Homo sapiens
uugagacggaguuuugcucuug

SEQ ID NO: 11119 - RNA, 22 nt, Homo sapiens
uuuguauguuggagauuggaga

SEQ ID NO: 11120 - RNA, 22 nt, Homo sapiens
gucuggcacagggaaaguacaa

SEQ ID NO: 11121 - RNA, 17 nt, Homo sapiens
aaggugcuucgaccucc

SEQ ID NO: 11122 - RNA, 22 nt, Homo sapiens
aauggcaagagccacagaggcg

SEQ ID NO: 11123 - RNA, 22 nt, Homo sapiens
auuacauagucaaggugucuca

SEQ ID NO: 11124 - RNA, 22 nt, Homo sapiens
gggaucaacuuauacuaaaauu

SEQ ID NO: 11125 - RNA, 22 nt, Homo sapiens
ucaagcaauucugcugccucag

SEQ ID NO: 11126 - RNA, 22 nt, Homo sapiens
cugucucagccucuccaguagc

SEQ ID NO: 11127 - RNA, 22 nt, Homo sapiens
uaagugaauuucacuacugagu

SEQ ID NO: 11128 - RNA, 21 nt, Homo sapiens
uggaauuaauggagagguguu

SEQ ID NO: 11129 - RNA, 23 nt, Homo sapiens
ggaguguauuggcacgaucucag

SEQ ID NO: 11130 - RNA, 22 nt, Homo sapiens
ugugccacuccagcucuagcuu

SEQ ID NO: 11131 - RNA, 22 nt, Homo sapiens
agaaccaaucccacauggauac

SEQ ID NO: 11132 - RNA, 21 nt, Homo sapiens
ugaaaugcaugugcacauuaa

SEQ ID NO: 11133 - RNA, 22 nt, Homo sapiens
uggcaaaucagaggcauggaca

SEQ ID NO: 11134 - RNA, 22 nt, Homo sapiens
gaggugaaggucucaauaaaua

SEQ ID NO: 11135 - RNA, 22 nt, Homo sapiens
agcgccacugcacuccagccug

SEQ ID NO: 11136 - RNA, 23 nt, Homo sapiens
ugagaugucugauugcgaggguc

SEQ ID NO: 11137 - RNA, 22 nt, Homo sapiens
aacagugcuguuauaaauguac

SEQ ID NO: 11138 - RNA, 22 nt, Homo sapiens
auaugucuuaguuaccuugggc

SEQ ID NO: 11139 - RNA, 22 nt, Homo sapiens
agaauguaaacagaauagagga

SEQ ID NO: 11140 - RNA, 22 nt, Homo sapiens
ugcauauucgaguuauuuuggg

SEQ ID NO: 11141 - RNA, 22 nt, Homo sapiens
uggaagccuagauucuuuucuu

SEQ ID NO: 11142 - RNA, 22 nt, Homo sapiens
ugaaauuguuugcaaggauagg

SEQ ID NO: 11143 - RNA, 22 nt, Homo sapiens
guauggguuuuguuucuucugg

SEQ ID NO: 11144 - RNA, 22 nt, Homo sapiens
uucuauggucacagaugcuuga

SEQ ID NO: 11145 - RNA, 19 nt, Homo sapiens
uaugcuauuuauuagaagu

SEQ ID NO: 11146 - RNA, 22 nt, Homo sapiens
agcaguacauaaaaagcauccu

SEQ ID NO: 11147 - RNA, 22 nt, Homo sapiens
uacaaagugggaaacgaagguu

SEQ ID NO: 11148 - RNA, 22 nt, Homo sapiens
aucuggguccguucugcuucuc

SEQ ID NO: 11149 - RNA, 22 nt, Homo sapiens
caucagagugagauauaagauc

SEQ ID NO: 11150 - RNA, 22 nt, Homo sapiens
guggaaaauuauugcuguuuuu

SEQ ID NO: 11151 - RNA, 22 nt, Homo sapiens
caagugcuugaugaaugaucaa

SEQ ID NO: 11152 - RNA, 22 nt, Homo sapiens
uuauugcacuccagccugggua

SEQ ID NO: 11153 - RNA, 22 nt, Homo sapiens
uggaauuaauuaaaauauacug

SEQ ID NO: 11154 - RNA, 22 nt, Homo sapiens
cauugcacuccagcccuggcaa

SEQ ID NO: 11155 - RNA, 22 nt, Homo sapiens
uuugguaguuuguugggaccca

SEQ ID NO: 11156 - RNA, 22 nt, Homo sapiens
cugccacugacaccucaaggac

SEQ ID NO: 11157 - RNA, 22 nt, Homo sapiens
aagugcuuuacacaugcaugau

SEQ ID NO: 11158 - RNA, 22 nt, Homo sapiens
ucacuuugacggccaacuucua

SEQ ID NO: 11159 - RNA, 22 nt, Homo sapiens
guugcucaggccggagugcagu

SEQ ID NO: 11160 - RNA, 22 nt, Homo sapiens
ugagacauauuauacugcuuuu

SEQ ID NO: 11161 - RNA, 22 nt, Homo sapiens
ugagaaugcagaaucucgugca

SEQ ID NO: 11162 - RNA, 22 nt, Homo sapiens
ucaguguuuggaaucucaauuu

SEQ ID NO: 11163 - RNA, 22 nt, Homo sapiens
uugccuaggcuggagugcagug

SEQ ID NO: 11164 - RNA, 22 nt, Homo sapiens
uaucacuuugauaguuuaaaug

SEQ ID NO: 11165 - RNA, 22 nt, Homo sapiens
acacuggaguuaaaggugauuu

SEQ ID NO: 11166 - RNA, 21 nt, Homo sapiens
aagcacauugaguguguguga

SEQ ID NO: 11167 - RNA, 22 nt, Homo sapiens
uucaucaguugagcugguugcu

SEQ ID NO: 11168 - RNA, 22 nt, Homo sapiens
cuugcacuugaaauuccaguuu

SEQ ID NO: 11169 - RNA, 22 nt, Homo sapiens
ucgcgccauucuccugccucag

SEQ ID NO: 11170 - RNA, 20 nt, Homo sapiens
cauugcacuccagcuugggc

SEQ ID NO: 11171 - RNA, 22 nt, Homo sapiens
guguaaaacaauuagaggauuu

SEQ ID NO: 11172 - RNA, 22 nt, Homo sapiens
ugagaugcuccucuugcaaagc

SEQ ID NO: 11173 - RNA, 22 nt, Homo sapiens
cauugcaacuucugccucccag

SEQ ID NO: 11174 - RNA, 22 nt, Homo sapiens
guaaucucagcuacucaggagg

SEQ ID NO: 11175 - RNA, 22 nt, Homo sapiens
uugagccaaggauugucuuucc

SEQ ID NO: 11176 - RNA, 22 nt, Homo sapiens
uuacuguauagaaucaucuuga

SEQ ID NO: 11177 - RNA, 22 nt, Homo sapiens
uaaacugucuugcaguuacaug

SEQ ID NO: 11178 - RNA, 22 nt, Homo sapiens
agucacagccuuuuacuuuaga

SEQ ID NO: 11179 - RNA, 22 nt, Homo sapiens
uacagccacauaauguaugauu

SEQ ID NO: 11180 - RNA, 22 nt, Homo sapiens
cucccagagccaguuauaggcu

SEQ ID NO: 11181 - RNA, 22 nt, Homo sapiens
uuuuccagugggacucccauua

SEQ ID NO: 11182 - RNA, 22 nt, Homo sapiens
aaaggcuucggaucagaaggua

SEQ ID NO: 11183 - RNA, 22 nt, Homo sapiens
ucagaguagaaacacuuccaua

SEQ ID NO: 11184 - RNA, 22 nt, Homo sapiens
guaugauacuguaacagugggu

SEQ ID NO: 11185 - RNA, 21 nt, Homo sapiens
gagguaccucauguaagugga

SEQ ID NO: 11186 - RNA, 22 nt, Homo sapiens
uuccaguugugagcuauccggg

SEQ ID NO: 11187 - RNA, 22 nt, Homo sapiens
auugcacaucugcacuacagcc

SEQ ID NO: 11188 - RNA, 22 nt, Homo sapiens
aauacagcacacagaugggucu

SEQ ID NO: 11189 - RNA, 22 nt, Homo sapiens
ucugugaaugaacacuugaaaa

SEQ ID NO: 11190 - RNA, 19 nt, Homo sapiens
uguugcacauaucaauaug

SEQ ID NO: 11191 - RNA, 22 nt, Homo sapiens
cuuugguguauuuucagagacc

SEQ ID NO: 11192 - RNA, 22 nt, Homo sapiens
auauguauuuuaacguguaagg

SEQ ID NO: 11193 - RNA, 22 nt, Homo sapiens
agcuggucuacguguguaugag

SEQ ID NO: 11194 - RNA, 22 nt, Homo sapiens
cauugcacuccaucuugggcaa

SEQ ID NO: 11195 - RNA, 22 nt, Homo sapiens
ugcaaauguuaggugucauuau

SEQ ID NO: 11196 - RNA, 22 nt, Homo sapiens
uugagcaauccuccugccaugu

SEQ ID NO: 11197 - RNA, 22 nt, Homo sapiens
uugaggaaugucauuuguguuu

SEQ ID NO: 11198 - RNA, 18 nt, Homo sapiens
ugacuguccagguggacc

SEQ ID NO: 11199 - RNA, 22 nt, Homo sapiens
cauugcacucuagucuggguga

SEQ ID NO: 11200 - RNA, 19 nt, Homo sapiens
ugacacuguuggugggagg

SEQ ID NO: 11201 - RNA, 22 nt, Homo sapiens
acuggcuuauuucacuuagcau

SEQ ID NO: 11202 - RNA, 22 nt, Homo sapiens
aucccuugacguggagucucug

SEQ ID NO: 11203 - RNA, 22 nt, Homo sapiens
acugcacuucagccuuggcuac

SEQ ID NO: 11204 - RNA, 22 nt, Homo sapiens
auacuguuuuacaucauugccu

SEQ ID NO: 11205 - RNA, 22 nt, Homo sapiens
auccacaugcaguuggaaacag

SEQ ID NO: 11206 - RNA, 22 nt, Homo sapiens
uuucuauguugaccagucuaga

SEQ ID NO: 11207 - RNA, 22 nt, Homo sapiens
guuuuuggggucacuauuaccg

SEQ ID NO: 11208 - RNA, 22 nt, Homo sapiens
uccaguuuggaggcuugaugug

SEQ ID NO: 11209 - RNA, 22 nt, Homo sapiens
cauugcacuccauccuuggcaa

SEQ ID NO: 11210 - RNA, 22 nt, Homo sapiens
auugcagcccacccugggugau

SEQ ID NO: 11211 - RNA, 22 nt, Homo sapiens
aauugcaccaucuagaucaaga

SEQ ID NO: 11212 - RNA, 22 nt, Homo sapiens
uagcagcauaaauggacuaaga

SEQ ID NO: 11213 - RNA, 22 nt, Homo sapiens
cauugcacuccacuccugaaca

SEQ ID NO: 11214 - RNA, 22 nt, Homo sapiens
ugguauguaugauuaacaugga

SEQ ID NO: 11215 - RNA, 22 nt, Homo sapiens
caaagucuucucauuaugucuu

SEQ ID NO: 11216 - RNA, 22 nt, Homo sapiens
gugagauacuagagauauagug

SEQ ID NO: 11217 - RNA, 21 nt, Homo sapiens
uaaaacuguaacuuuguccug

SEQ ID NO: 11218 - RNA, 22 nt, Homo sapiens
ugaaauuauucuuaccaaggug

SEQ ID NO: 11219 - RNA, 22 nt, Homo sapiens
uuacugcucuuuugucaugagu

SEQ ID NO: 11220 - RNA, 18 nt, Homo sapiens
uuucaagucuuaggugac

SEQ ID NO: 11221 - RNA, 22 nt, Homo sapiens
uacucuuuagcuccuuaaggaa

SEQ ID NO: 11222 - RNA, 22 nt, Homo sapiens
gcaggcaugacauuucacucuu

SEQ ID NO: 11223 - RNA, 22 nt, Homo sapiens
acaccuguggucccaguaacuu

SEQ ID NO: 11224 - RNA, 22 nt, Homo sapiens
uuggcagcacgcaguccagagg

SEQ ID NO: 11225 - RNA, 22 nt, Homo sapiens
aauacugugauaucgagcgauu

SEQ ID NO: 11226 - RNA, 22 nt, Homo sapiens
uugugaauggugccgcgauaaa

SEQ ID NO: 11227 - RNA, 22 nt, Homo sapiens
guaaucucagcuacuugggagg

SEQ ID NO: 11228 - RNA, 20 nt, Homo sapiens
uucuauggugaugaguccug

SEQ ID NO: 11229 - RNA, 22 nt, Homo sapiens
aucgcgccauuguacuccagcc

SEQ ID NO: 11230 - RNA, 22 nt, Homo sapiens
uucuggccuccauuuuucuccu

SEQ ID NO: 11231 - RNA, 22 nt, Homo sapiens
auuggcagaaaucuuuauagua

SEQ ID NO: 11232 - RNA, 22 nt, Homo sapiens
uagaaagcaugaccuucagaua

SEQ ID NO: 11233 - RNA, 22 nt, Homo sapiens
auguauacaugcaggucacagg

SEQ ID NO: 11234 - RNA, 22 nt, Homo sapiens
gaaagauuuccugagcuagaaa

SEQ ID NO: 11235 - RNA, 22 nt, Homo sapiens
ugagauagggucucacucuguc

SEQ ID NO: 11236 - RNA, 22 nt, Homo sapiens
uugagacggagucuugcucuuu

SEQ ID NO: 11237 - RNA, 22 nt, Homo sapiens
uugauaguuuuaaaauuaaucu

SEQ ID NO: 11238 - RNA, 22 nt, Homo sapiens
aaagugcugagaguucuaacuu

SEQ ID NO: 11239 - RNA, 22 nt, Homo sapiens
uuggaaaaauccaccuugaucu

SEQ ID NO: 11240 - RNA, 22 nt, Homo sapiens
aucaaaguaucucaauauggua

SEQ ID NO: 11241 - RNA, 22 nt, Homo sapiens
ccuguguuaugguuucuaaugu

SEQ ID NO: 11242 - RNA, 22 nt, Homo sapiens
acuuuuugaugaggucguuugu

SEQ ID NO: 11243 - RNA, 22 nt, Homo sapiens
auagcagugugaggacagacua

SEQ ID NO: 11244 - RNA, 22 nt, Homo sapiens
auugcagcuugcagggugugua

SEQ ID NO: 11245 - RNA, 22 nt, Homo sapiens
agaauguauauucuguaguugu

SEQ ID NO: 11246 - RNA, 22 nt, Homo sapiens
caugcauuggucuauuauguga

SEQ ID NO: 11247 - RNA, 22 nt, Homo sapiens
acccaguagccagauguagcug

SEQ ID NO: 11248 - RNA, 22 nt, Homo sapiens
uaucagcagagucauacuucaa

SEQ ID NO: 11249 - RNA, 22 nt, Homo sapiens
acauggcacugcgggcuucuug

SEQ ID NO: 11250 - RNA, 22 nt, Homo sapiens
ugucacagagauuuugguaugu

SEQ ID NO: 11251 - RNA, 22 nt, Homo sapiens
gucacuguggagaagaaagugg

SEQ ID NO: 11252 - RNA, 18 nt, Homo sapiens
agagcacugaguuuuaga

SEQ ID NO: 11253 - RNA, 22 nt, Homo sapiens
acugcacuccaccuugggcaac

SEQ ID NO: 11254 - RNA, 22 nt, Homo sapiens
aggacacugauguaugcugugg

SEQ ID NO: 11255 - RNA, 22 nt, Homo sapiens
uuggaagauuacuuaguuuucu

SEQ ID NO: 11256 - RNA, 22 nt, Homo sapiens
uagaucauauacuugccaugac

SEQ ID NO: 11257 - RNA, 22 nt, Homo sapiens
ccauggcaauggucagucuauu

SEQ ID NO: 11258 - RNA, 22 nt, Homo sapiens
ucaggcuuuucccagagugaug

SEQ ID NO: 11259 - RNA, 22 nt, Homo sapiens
uggaaugugaauaacuuccuuc

SEQ ID NO: 11260 - RNA, 22 nt, Homo sapiens
ucauacaguaguccucacuugu

SEQ ID NO: 11261 - RNA, 22 nt, Homo sapiens
cauugcacuccagccucggcaa

SEQ ID NO: 11262 - RNA, 22 nt, Homo sapiens
uauugcacuccagccuuggcaa

SEQ ID NO: 11263 - RNA, 22 nt, Homo sapiens
uuggaagacauucugucugcua

SEQ ID NO: 11264 - RNA, 22 nt, Homo sapiens
aagagguaggaaauggucauuu

SEQ ID NO: 11265 - RNA, 22 nt, Homo sapiens
uucaucaguuauauuggccuga

SEQ ID NO: 11266 - RNA, 22 nt, Homo sapiens
auuaagugcuugcagaagucca

SEQ ID NO: 11267 - RNA, 22 nt, Homo sapiens
uuaugucuuuuguguucagcua

SEQ ID NO: 11268 - RNA, 22 nt, Homo sapiens
gucaucaggacgggucaucugc

SEQ ID NO: 11269 - RNA, 20 nt, Homo sapiens
guggaagauaaguagccuga

SEQ ID NO: 11270 - RNA, 22 nt, Homo sapiens
cauugcacuccagccuuggcaa

SEQ ID NO: 11271 - RNA, 22 nt, Homo sapiens
uugucaacaugaaacuguguuu

SEQ ID NO: 11272 - RNA, 22 nt, Homo sapiens
augguuuauuuguaagcagagu

SEQ ID NO: 11273 - RNA, 22 nt, Homo sapiens
gcuggguucagagugggcugcg

SEQ ID NO: 11274 - RNA, 22 nt, Homo sapiens
augacauguauuuccaggauuu

SEQ ID NO: 11275 - RNA, 22 nt, Homo sapiens
guaaauaccaguuucuggaaca

SEQ ID NO: 11276 - RNA, 22 nt, Homo sapiens
acccagaguuccuugucuuuca

SEQ ID NO: 11277 - RNA, 22 nt, Homo sapiens
ugagacgaagucuugcucuguu

SEQ ID NO: 11278 - RNA, 22 nt, Homo sapiens
uaucacaggucaggaaucuugc

SEQ ID NO: 11279 - RNA, 22 nt, Homo sapiens
ugagacacuucccagaucccuu

SEQ ID NO: 11280 - RNA, 20 nt, Homo sapiens
auucaaguaugccuugagaa

SEQ ID NO: 11281 - RNA, 22 nt, Homo sapiens
aagggaauguuguagcugguuu

SEQ ID NO: 11282 - RNA, 22 nt, Homo sapiens
uggcaagagauaugugucuaua

SEQ ID NO: 11283 - RNA, 19 nt, Homo sapiens
uacccagaagcagcauugu

SEQ ID NO: 11284 - RNA, 22 nt, Homo sapiens
ucauugcaaucucugccucccg

SEQ ID NO: 11285 - RNA, 22 nt, Homo sapiens
uuaagucacacuagacaacuga

SEQ ID NO: 11286 - RNA, 22 nt, Homo sapiens
aaaugcagucuuuguucugggc

SEQ ID NO: 11287 - RNA, 22 nt, Homo sapiens
aguacaauguugaguagaagug

SEQ ID NO: 11288 - RNA, 22 nt, Homo sapiens
ucuugggugaguuugugaauaa

SEQ ID NO: 11289 - RNA, 22 nt, Homo sapiens
augugaacaucauagaaugcac

SEQ ID NO: 11290 - RNA, 22 nt, Homo sapiens
uugugaauggugccgcaauaaa

SEQ ID NO: 11291 - RNA, 22 nt, Homo sapiens
gugcacaugguagguauugagu

SEQ ID NO: 11292 - RNA, 22 nt, Homo sapiens
ucauagucuaagguucuuuugc

SEQ ID NO: 11293 - RNA, 22 nt, Homo sapiens
uauugcucaugcauuuaauuuc

SEQ ID NO: 11294 - RNA, 22 nt, Homo sapiens
ugagaaugacugggcaugcugc

SEQ ID NO: 11295 - RNA, 22 nt, Homo sapiens
cugaaagagcauuugaaugggu

SEQ ID NO: 11296 - RNA, 20 nt, Homo sapiens
uuccuuaggcauuggaagaa

SEQ ID NO: 11297 - RNA, 22 nt, Homo sapiens
ucaucagaguuuacaagcucag

SEQ ID NO: 11298 - RNA, 22 nt, Homo sapiens
uagcaguagacagacuuuggcu

SEQ ID NO: 11299 - RNA, 22 nt, Homo sapiens
guaaaguaaagcacaucaaggu

SEQ ID NO: 11300 - RNA, 22 nt, Homo sapiens
cauugcacuccagccuugguga

SEQ ID NO: 11301 - RNA, 21 nt, Homo sapiens
ugcuauguuguccaggcuggc

SEQ ID NO: 11302 - RNA, 22 nt, Homo sapiens
uucauaguucuuuuagucauua

SEQ ID NO: 11303 - RNA, 22 nt, Homo sapiens
ggucacauuggacuaucaaguu

SEQ ID NO: 11304 - RNA, 22 nt, Homo sapiens
cccaguuuugcuucucaugagg

SEQ ID NO: 11305 - RNA, 22 nt, Homo sapiens
cacuuugguucaccugaguuuc

SEQ ID NO: 11306 - RNA, 22 nt, Homo sapiens
guucuggagauaaagccaaggu

SEQ ID NO: 11307 - RNA, 22 nt, Homo sapiens
cauugcacuccagcuugggcaa

SEQ ID NO: 11308 - RNA, 23 nt, Homo sapiens
ggaaacauccagucuuucaccau

SEQ ID NO: 11309 - RNA, 22 nt, Homo sapiens
uuguaaucaacacaucauuggg

SEQ ID NO: 11310 - RNA, 20 nt, Homo sapiens
ggaauagucuacacucugac

SEQ ID NO: 11311 - RNA, 20 nt, Homo sapiens
uccugagauucccaguucuc

SEQ ID NO: 11312 - RNA, 22 nt, Homo sapiens
auaugcuuauuagcaagaaaua

SEQ ID NO: 11313 - RNA, 22 nt, Homo sapiens
uaggcagccagcuguggauuga

SEQ ID NO: 11314 - RNA, 22 nt, Homo sapiens
cacaaaguagauuagucuucca

SEQ ID NO: 11315 - RNA, 22 nt, Homo sapiens
cauugcacuccagccuaggcaa

SEQ ID NO: 11316 - RNA, 22 nt, Homo sapiens
caauggcacgaucucgucucac

SEQ ID NO: 11317 - RNA, 22 nt, Homo sapiens
agucacagugaccuugucugac

SEQ ID NO: 11318 - RNA, 22 nt, Homo sapiens
agagugcuauagauuagauuuc

SEQ ID NO: 11319 - RNA, 21 nt, Homo sapiens
gacauggcgauacuccgucuc

SEQ ID NO: 11320 - RNA, 19 nt, Homo sapiens
ugccauguagcacaugguc

SEQ ID NO: 11321 - RNA, 17 nt, Homo sapiens
aaucagauuucugagga

SEQ ID NO: 11322 - RNA, 22 nt, Homo sapiens
auauuggccuaaaauucucuuu

SEQ ID NO: 11323 - RNA, 22 nt, Homo sapiens
uagcagaauauaccucuuacuu

SEQ ID NO: 11324 - RNA, 18 nt, Homo sapiens
uucuuguguugauauuuu

SEQ ID NO: 11325 - RNA, 22 nt, Homo sapiens
ugauugcacaccugcacucaag

SEQ ID NO: 11326 - RNA, 18 nt, Homo sapiens
uaagugcuuuaaacacau

SEQ ID NO: 11327 - RNA, 22 nt, Homo sapiens
guacaguauaguaauaggauuu

SEQ ID NO: 11328 - RNA, 22 nt, Homo sapiens
ucaggcaugcagcaaugcagug

SEQ ID NO: 11329 - RNA, 22 nt, Homo sapiens
ucaaagugagcuccuucucacu

SEQ ID NO: 11330 - RNA, 22 nt, Homo sapiens
ucugagaugagacuuugaauuu

SEQ ID NO: 11331 - RNA, 22 nt, Homo sapiens
uaagugcuugacuuugauguuu

SEQ ID NO: 11332 - RNA, 22 nt, Homo sapiens
uccugagagcagacccucuaua

SEQ ID NO: 11333 - RNA, 22 nt, Homo sapiens
gaaucacaguuauuagagcagc

SEQ ID NO: 11334 - RNA, 22 nt, Homo sapiens
gugacugcauccauccaggcuu

SEQ ID NO: 11335 - RNA, 22 nt, Homo sapiens
ggaucauaugauagcucaauuu

SEQ ID NO: 11336 - RNA, 22 nt, Homo sapiens
ucauucauuugcucacuccaca

SEQ ID NO: 11337 - RNA, 22 nt, Homo sapiens
uauggcacuaguacuggaaagc

SEQ ID NO: 11338 - RNA, 22 nt, Homo sapiens
uugucccauggggucuuccuuu

SEQ ID NO: 11339 - RNA, 22 nt, Homo sapiens
uuacaugucuugguaagguuag

SEQ ID NO: 11340 - RNA, 20 nt, Homo sapiens
uccaguuuuggagacauucu

SEQ ID NO: 11341 - RNA, 22 nt, Homo sapiens
uuugugaaugucauaagcucca

SEQ ID NO: 11342 - RNA, 22 nt, Homo sapiens
uucauaguaacaguaacuaugg

SEQ ID NO: 11343 - RNA, 19 nt, Homo sapiens
ucgcgccauucuccugccu

SEQ ID NO: 11344 - RNA, 22 nt, Homo sapiens
augagacauuaaaguguguuug

SEQ ID NO: 11345 - RNA, 22 nt, Homo sapiens
auguaauguuaaauugcuaauu

SEQ ID NO: 11346 - RNA, 22 nt, Homo sapiens
ugacaugauuguauauuuagaa

SEQ ID NO: 11347 - RNA, 22 nt, Homo sapiens
aagacuguaauccaucuugagu

SEQ ID NO: 11348 - RNA, 22 nt, Homo sapiens
gaaucacugugguaucccaugc

SEQ ID NO: 11349 - RNA, 22 nt, Homo sapiens
ugacagagaagcauugaguuca

SEQ ID NO: 11350 - RNA, 22 nt, Homo sapiens
ucagaguagcugucugaggugc

SEQ ID NO: 11351 - RNA, 22 nt, Homo sapiens
auagcagaacagugucucacug

SEQ ID NO: 11352 - RNA, 22 nt, Homo sapiens
aggaucauugacuauuauaagg

SEQ ID NO: 11353 - RNA, 22 nt, Homo sapiens
uagagguaggucuucgagucuc

SEQ ID NO: 11354 - RNA, 22 nt, Homo sapiens
aucacuguaaguuuacacuuug

SEQ ID NO: 11355 - RNA, 22 nt, Homo sapiens
auggaagaaacgauuuucugga

SEQ ID NO: 11356 - RNA, 22 nt, Homo sapiens
guggacaugaauuuuggaggca

SEQ ID NO: 11357 - RNA, 22 nt, Homo sapiens
auaucacucccaauaucgcagg

SEQ ID NO: 11358 - RNA, 22 nt, Homo sapiens
uaggucaguuuuggcuuggcuu

SEQ ID NO: 11359 - RNA, 22 nt, Homo sapiens
aaagugcuuacuaaguugccaa

SEQ ID NO: 11360 - RNA, 22 nt, Homo sapiens
uggaauguaacuugaaacuuuu

SEQ ID NO: 11361 - RNA, 22 nt, Homo sapiens
accugagacuaggcauuuuaua

SEQ ID NO: 11362 - RNA, 22 nt, Homo sapiens
ucaucaggcucauucaagcuga

SEQ ID NO: 11363 - RNA, 22 nt, Homo sapiens
gucaugucugcacauaguaaaa

SEQ ID NO: 11364 - RNA, 22 nt, Homo sapiens
gugucuccugccuucaugcagc

SEQ ID NO: 11365 - RNA, 22 nt, Homo sapiens
gucacuguuuccuauuauauuu

SEQ ID NO: 11366 - RNA, 22 nt, Homo sapiens
gucacugucuacuguaauagcc

SEQ ID NO: 11367 - RNA, 22 nt, Homo sapiens
caaaggauucauuuccaggagu

SEQ ID NO: 11368 - RNA, 22 nt, Homo sapiens
ugaguuagguaauaauaaauau

SEQ ID NO: 11369 - RNA, 21 nt, Homo sapiens
ucaguuacugagagagaagug

SEQ ID NO: 11370 - RNA, 22 nt, Homo sapiens
uagcaguauaugagagcuauug

SEQ ID NO: 11371 - RNA, 22 nt, Homo sapiens
uuucugaggccucaccagaagc

SEQ ID NO: 11372 - RNA, 22 nt, Homo sapiens
aaguaaauauccgguaguccca

SEQ ID NO: 11373 - RNA, 22 nt, Homo sapiens
uugaaagcuaucucaaaucgcu

SEQ ID NO: 11374 - RNA, 22 nt, Homo sapiens
auagugcagugaugaaccuagg

SEQ ID NO: 11375 - RNA, 19 nt, Homo sapiens
auaaaugccuacaagggug

SEQ ID NO: 11376 - RNA, 22 nt, Homo sapiens
ugagaugugaucaccugaaggg

SEQ ID NO: 11377 - RNA, 22 nt, Homo sapiens
cauugcacuccagccugaccaa

SEQ ID NO: 11378 - RNA, 23 nt, Homo sapiens
uucaucagggauauuggccugaa

SEQ ID NO: 11379 - RNA, 22 nt, Homo sapiens
auacacgguaggcacauauuua

SEQ ID NO: 11380 - RNA, 22 nt, Homo sapiens
uauacagcaaguuacugugcug

SEQ ID NO: 11381 - RNA, 22 nt, Homo sapiens
uuguguacuacaguaugccaca

SEQ ID NO: 11382 - RNA, 22 nt, Homo sapiens
uuucaagugcugucuuagcugu

SEQ ID NO: 11383 - RNA, 22 nt, Homo sapiens
ugucaguuuuaacuagggaaua

SEQ ID NO: 11384 - RNA, 22 nt, Homo sapiens
guggaagauaguguguuaaugu

SEQ ID NO: 11385 - RNA, 22 nt, Homo sapiens
cuggccagagacauucauuaaa

SEQ ID NO: 11386 - RNA, 22 nt, Homo sapiens
uuggcaaguccccaccucucuc

SEQ ID NO: 11387 - RNA, 22 nt, Homo sapiens
agaugguauuauagguuucugu

SEQ ID NO: 11388 - RNA, 22 nt, Homo sapiens
uugugaauggugccacaauaaa

SEQ ID NO: 11389 - RNA, 22 nt, Homo sapiens
uucacagucacccuucuccaug

SEQ ID NO: 11390 - RNA, 22 nt, Homo sapiens
aucucuugccagucagaauggu

SEQ ID NO: 11391 - RNA, 22 nt, Homo sapiens
cuguaauguaaugagacuacau

SEQ ID NO: 11392 - RNA, 22 nt, Homo sapiens
ucacugugguuuugaugugcau

SEQ ID NO: 11393 - RNA, 22 nt, Homo sapiens
uugugaauggugccucaguaaa

SEQ ID NO: 11394 - RNA, 22 nt, Homo sapiens
uucauggaauauugaccauuuu

SEQ ID NO: 11395 - RNA, 22 nt, Homo sapiens
aaucacuuugcuacaaggcagu

SEQ ID NO: 11396 - RNA, 22 nt, Homo sapiens
ugugaagauggacuaauauagu

SEQ ID NO: 11397 - RNA, 22 nt, Homo sapiens
acuccauuucauuuuagcucuu

SEQ ID NO: 11398 - RNA, 22 nt, Homo sapiens
auugcuauuauuugaccauugu

SEQ ID NO: 11399 - RNA, 22 nt, Homo sapiens
uuggcaacauagugagaccccc

SEQ ID NO: 11400 - RNA, 22 nt, Homo sapiens
ucaacaggucaauugcauagaa

SEQ ID NO: 11401 - RNA, 22 nt, Homo sapiens
uucaguauugcaccuggagucc

SEQ ID NO: 11402 - RNA, 22 nt, Homo sapiens
ggccggguggccauggcugccc

SEQ ID NO: 11403 - RNA, 22 nt, Homo sapiens
uaucacagcauugucuauaaua

SEQ ID NO: 11404 - RNA, 22 nt, Homo sapiens
cagcagguuuuuaucaguuaag

SEQ ID NO: 11405 - RNA, 22 nt, Homo sapiens
ugagaaugaugauuuccaguuu

SEQ ID NO: 11406 - RNA, 19 nt, Homo sapiens
auacacguguauacauaca

SEQ ID NO: 11407 - RNA, 20 nt, Homo sapiens
ucacugugaacuucuugagg

SEQ ID NO: 11408 - RNA, 18 nt, Homo sapiens
acauucagcuugaagaua

SEQ ID NO: 11409 - RNA, 22 nt, Homo sapiens
uaagcagugcaagaauggaaua

SEQ ID NO: 11410 - RNA, 23 nt, Homo sapiens
ucgcagcauucaauaccaggcag

SEQ ID NO: 11411 - RNA, 22 nt, Homo sapiens
uuagucaaguguacugugaaug

SEQ ID NO: 11412 - RNA, 22 nt, Homo sapiens
uauuccuuuugcauuuccacau

SEQ ID NO: 11413 - RNA, 22 nt, Homo sapiens
ugugccacugcacuccugccug

SEQ ID NO: 11414 - RNA, 22 nt, Homo sapiens
accaugcaguccaauaugcaca

SEQ ID NO: 11415 - RNA, 22 nt, Homo sapiens
acuggacuuaaugaugaauugu

SEQ ID NO: 11416 - RNA, 22 nt, Homo sapiens
auuccuuaggcccuuugguuag

SEQ ID NO: 11417 - RNA, 22 nt, Homo sapiens
uaauucacauaaagcacuuaga

SEQ ID NO: 11418 - RNA, 22 nt, Homo sapiens
uuacaguugugagccaccaugc

SEQ ID NO: 11419 - RNA, 22 nt, Homo sapiens
uuccaugugggcuugucaagua

SEQ ID NO: 11420 - RNA, 22 nt, Homo sapiens
aauuacauggcaauugggaaau

SEQ ID NO: 11421 - RNA, 22 nt, Homo sapiens
ugagauuaucuugaucuugaaa

SEQ ID NO: 11422 - RNA, 22 nt, Homo sapiens
uaaaagucaucacaacuggagu

SEQ ID NO: 11423 - RNA, 22 nt, Homo sapiens
agaacacugaguucagggucag

SEQ ID NO: 11424 - RNA, 22 nt, Homo sapiens
uugaaguagaaagacgaaauuu

SEQ ID NO: 11425 - RNA, 20 nt, Homo sapiens
cuuggcuuucuugguguuaa

SEQ ID NO: 11426 - RNA, 22 nt, Homo sapiens
cacugcgacguccgccucccgg

SEQ ID NO: 11427 - RNA, 22 nt, Homo sapiens
uauaagacgagcaaaaagcuug

SEQ ID NO: 11428 - RNA, 21 nt, Homo sapiens
ccauggcaaugguaaacugac

SEQ ID NO: 11429 - RNA, 22 nt, Homo sapiens
ucaagcaauucuccugccucag

SEQ ID NO: 11430 - RNA, 22 nt, Homo sapiens
agguagcauagcgggaauauca

SEQ ID NO: 11431 - RNA, 22 nt, Homo sapiens
aguggcaaugugauguccugaa

SEQ ID NO: 11432 - RNA, 22 nt, Homo sapiens
acugcacuccggccuggcaaca

SEQ ID NO: 11433 - RNA, 22 nt, Homo sapiens
uggaguguguugcagaugaagg

SEQ ID NO: 11434 - RNA, 22 nt, Homo sapiens
auagcagugugaaaauggacua

SEQ ID NO: 11435 - RNA, 22 nt, Homo sapiens
guggaaaacauaugcuuguuga

SEQ ID NO: 11436 - RNA, 22 nt, Homo sapiens
ucuacagccaguucaggaagaa

SEQ ID NO: 11437 - RNA, 22 nt, Homo sapiens
ugucauguuucuacugaccaaa

SEQ ID NO: 11438 - RNA, 22 nt, Homo sapiens
uaugcuuauaaacauuugucag

SEQ ID NO: 11439 - RNA, 22 nt, Homo sapiens
uauggcaaugcauaggaaggaa

SEQ ID NO: 11440 - RNA, 22 nt, Homo sapiens
uuggcuuggagaguugaaaugu

SEQ ID NO: 11441 - RNA, 22 nt, Homo sapiens
guagugcaguuugagaaucagu

SEQ ID NO: 11442 - RNA, 21 nt, Homo sapiens
agcagcuuugguugaagcaga

SEQ ID NO: 11443 - RNA, 22 nt, Homo sapiens
cauugcacuccagccugcacga

SEQ ID NO: 11444 - RNA, 22 nt, Homo sapiens
uguauguuguaagacuuagacc

SEQ ID NO: 11445 - RNA, 22 nt, Homo sapiens
uugucacccuacauaacaggga

SEQ ID NO: 11446 - RNA, 22 nt, Homo sapiens
gucacuggcugucuuguaugau

SEQ ID NO: 11447 - RNA, 22 nt, Homo sapiens
ucagaguagagcgacuucuccu

SEQ ID NO: 11448 - RNA, 22 nt, Homo sapiens
cauugcacucugcauuccaguc

SEQ ID NO: 11449 - RNA, 22 nt, Homo sapiens
gcugcacuuuaaggcauccccu

SEQ ID NO: 11450 - RNA, 22 nt, Homo sapiens
uuaccuuuuuaagacagguuag

SEQ ID NO: 11451 - RNA, 22 nt, Homo sapiens
augucuggcagaagacuucuca

SEQ ID NO: 11452 - RNA, 22 nt, Homo sapiens
ugagaucacgccacugcacucc

SEQ ID NO: 11453 - RNA, 22 nt, Homo sapiens
aagggaauguuguggcugguuu

SEQ ID NO: 11454 - RNA, 22 nt, Homo sapiens
uucauagucacauucgaugucu

SEQ ID NO: 11455 - RNA, 22 nt, Homo sapiens
uugagguaauaaacagccauuc

SEQ ID NO: 11456 - RNA, 22 nt, Homo sapiens
cagccgggugagguggcuuguu

SEQ ID NO: 11457 - RNA, 22 nt, Homo sapiens
uggaauguagcguugacacgag

SEQ ID NO: 11458 - RNA, 22 nt, Homo sapiens
cuguaugugagaaauaauaagu

SEQ ID NO: 11459 - RNA, 22 nt, Homo sapiens
uuggccauaugacuugcuuugg

SEQ ID NO: 11460 - RNA, 22 nt, Homo sapiens
guggaagaaaucagguuauuug

SEQ ID NO: 11461 - RNA, 22 nt, Homo sapiens
gcagcacauggcagaacauauu

SEQ ID NO: 11462 - RNA, 22 nt, Homo sapiens
ugugccacugcacuucagccug

SEQ ID NO: 11463 - RNA, 21 nt, Homo sapiens
uccugagagaggaguaacucu

SEQ ID NO: 11464 - RNA, 22 nt, Homo sapiens
cugacuuuagaacccaaaaagu

SEQ ID NO: 11465 - RNA, 22 nt, Homo sapiens
caagugcuuucuuggggauuua

SEQ ID NO: 11466 - RNA, 22 nt, Homo sapiens
ugcaaaugcugcuauuucucuu

SEQ ID NO: 11467 - RNA, 19 nt, Homo sapiens
ggucacagggguuacaagg

SEQ ID NO: 11468 - RNA, 22 nt, Homo sapiens
cauugcacucuagccucggcaa

SEQ ID NO: 11469 - RNA, 22 nt, Homo sapiens
uaucaacaggguggccagugua

SEQ ID NO: 11470 - RNA, 20 nt, Homo sapiens
ucucauggagggaaagagca

SEQ ID NO: 11471 - RNA, 22 nt, Homo sapiens
uuacuguagugucauaucguau

SEQ ID NO: 11472 - RNA, 22 nt, Homo sapiens
guggaagaccagacuuuccaac

SEQ ID NO: 11473 - RNA, 22 nt, Homo sapiens
agaguacaggcaaguuagucau

SEQ ID NO: 11474 - RNA, 22 nt, Homo sapiens
uuguaaaguucucucccgaaaa

SEQ ID NO: 11475 - RNA, 22 nt, Homo sapiens
cccugaagauacagaguuuggg

SEQ ID NO: 11476 - RNA, 22 nt, Homo sapiens
ggcuuggaggaaugugagggcu

SEQ ID NO: 11477 - RNA, 22 nt, Homo sapiens
acccugucauccacauggugcu

SEQ ID NO: 11478 - RNA, 22 nt, Homo sapiens
agugcaauaaggauguagaacu

SEQ ID NO: 11479 - RNA, 22 nt, Homo sapiens
uuaauuguccaaguucaucucu

SEQ ID NO: 11480 - RNA, 22 nt, Homo sapiens
uugaagugaagaacaauaucac

SEQ ID NO: 11481 - RNA, 22 nt, Homo sapiens
ucauugcauguuaauuaaacag

SEQ ID NO: 11482 - RNA, 22 nt, Homo sapiens
uucauaguuuauacugauauuu

SEQ ID NO: 11483 - RNA, 22 nt, Homo sapiens
aagcaggugucugugucuguaa

SEQ ID NO: 11484 - RNA, 22 nt, Mycobacterium bovis subsp bovis AF2122/97
uuucauucguugcgcgcagacc

SEQ ID NO: 11485 - RNA, 22 nt, Mycobacterium bovis subsp bovis AF2122/97
uuucauucagacgagaggcgug

SEQ ID NO: 11486 - RNA, 22 nt, Mycobacterium bovis subsp bovis AF2122/97
uuggucaccgcggcgcgggccg

SEQ ID NO: 11487 - RNA, 22 nt, Mycobacterium bovis subsp bovis AF2122/97
uuggccaaccugcugcacgaga

SEQ ID NO: 11488 - RNA, 22 nt, Mycobacterium bovis subsp bovis AF2122/97
uugggauuguugauuccgccga

SEQ ID NO: 11489 - RNA, 22 nt, Mycobacterium bovis subsp bovis AF2122/97
uugggcagacgcuggucaacga

SEQ ID NO: 11490 - RNA, 22 nt, Mycobacterium bovis subsp bovis AF2122/97
uuguggcugaucccggccaggc

SEQ ID NO: 11491 - RNA, 22 nt, Mycobacterium bovis subsp bovis AF2122/97
uugcgcaggggcaugucagcgu

SEQ ID NO: 11492 - RNA, 22 nt, Mycobacterium bovis subsp bovis AF2122/97
uguggaauacgcugcuggucuu

SEQ ID NO: 11493 - RNA, 18 nt, Mycobacterium bovis subsp bovis AF2122/97
uggugcaccuuguuuggg

SEQ ID NO: 11494 - RNA, 22 nt, Mycobacterium bovis subsp bovis AF2122/97
ugucccgcacucgauccgcaag

SEQ ID NO: 11495 - RNA, 22 nt, Mycobacterium bovis subsp bovis AF2122/97
ugggccaacacgugcgcggucg

SEQ ID NO: 11496 - RNA, 22 nt, Mycobacterium bovis subsp bovis AF2122/97
uggggcuggcucugcuugccgc

SEQ ID NO: 11497 - RNA, 22 nt, Mycobacterium bovis subsp bovis AF2122/97
uggguggcuucggcgcgcugaa

SEQ ID NO: 11498 - RNA, 22 nt, Mycobacterium bovis subsp bovis AF2122/97
uggucacguacggccgccgcgg

SEQ ID NO: 11499 - RNA, 22 nt, Mycobacterium bovis subsp bovis AF2122/97
uggucaggcggccgucgucggc

SEQ ID NO: 11500 - RNA, 22 nt, Mycobacterium bovis subsp bovis AF2122/97
uucaccuuccuugacgccauau

SEQ ID NO: 11501 - RNA, 22 nt, Mycobacterium bovis subsp bovis AF2122/97
uuagccuuaugccugucacacc

SEQ ID NO: 11502 - RNA, 22 nt, Mycobacterium bovis subsp bovis AF2122/97
uucaucaguuggucgagguuga

SEQ ID NO: 11503 - RNA, 22 nt, Mycobacterium bovis subsp bovis AF2122/97
uucguggcgaccaugcgccggu

SEQ ID NO: 11504 - RNA, 22 nt, Mycobacterium bovis subsp bovis AF2122/97
uucuagccgccccgggcgcagc

SEQ ID NO: 11505 - RNA, 22 nt, Mycobacterium bovis subsp bovis AF2122/97
ugggcugcugcgccgcaucggc

SEQ ID NO: 11506 - RNA, 22 nt, Mycobacterium bovis subsp bovis AF2122/97
uggcagcaaucggguauccgau

SEQ ID NO: 11507 - RNA, 22 nt, Mycobacterium bovis subsp bovis AF2122/97
uggccaagcggaccgucggcau

SEQ ID NO: 11508 - RNA, 22 nt, Mycobacterium bovis subsp bovis AF2122/97
uggcgagcagacgcaaaagccc

SEQ ID NO: 11509 - RNA, 21 nt, Mycobacterium bovis subsp bovis AF2122/97
uggcgagccgggccacgcccg

SEQ ID NO: 11510 - RNA, 22 nt, Mycobacterium bovis subsp bovis AF2122/97
ugcuccacugcugccaagucgg

SEQ ID NO: 11511 - RNA, 22 nt, Mycobacterium bovis subsp bovis AF2122/97
ugcgccagcgccucccgcagga

SEQ ID NO: 11512 - RNA, 18 nt, Mycobacterium bovis subsp bovis AF2122/97
ugcgcgccgccagcuauc

SEQ ID NO: 11513 - RNA, 22 nt, Mycobacterium bovis subsp bovis AF2122/97
ugcaggucgagguggucgguuu

SEQ ID NO: 11514 - RNA, 19 nt, Mycobacterium bovis subsp bovis AF2122/97
ugcaugagucguggaaugg

SEQ ID NO: 11515 - RNA, 22 nt, Mycobacterium bovis subsp bovis AF2122/97
ugagacccccgucgaagucuag

SEQ ID NO: 11516 - RNA, 22 nt, Mycobacterium bovis subsp bovis AF2122/97
ucugugcgcgguuugugcacag

SEQ ID NO: 11517 - RNA, 22 nt, Mycobacterium bovis subsp bovis AF2122/97
ucuuucccuccagaucggugcg

SEQ ID NO: 11518 - RNA, 22 nt, Mycobacterium bovis subsp bovis AF2122/97
ugacccaggcgccggucggugu

SEQ ID NO: 11519 - RNA, 22 nt, Mycobacterium bovis subsp bovis AF2122/97
ccugggcgacuuggcguugcug

SEQ ID NO: 11520 - RNA, 22 nt, Mycobacterium bovis subsp bovis AF2122/97
ccuggcgcgcagcacggccugc

SEQ ID NO: 11521 - RNA, 22 nt, Mycobacterium bovis subsp bovis AF2122/97
ccugggauggucaacaccguga

SEQ ID NO: 11522 - RNA, 22 nt, Mycobacterium bovis subsp bovis AF2122/97
ccugggauugugggcgggcguc

SEQ ID NO: 11523 - RNA, 21 nt, Mycobacterium bovis subsp bovis AF2122/97
cgagcucgcggcccagaguuc

SEQ ID NO: 11524 - RNA, 22 nt, Mycobacterium bovis subsp bovis AF2122/97
cgccacucuggucuugcaccug

SEQ ID NO: 11525 - RNA, 22 nt, Mycobacterium bovis subsp bovis AF2122/97
cgcagcaucggcgauugucggc

SEQ ID NO: 11526 - RNA, 22 nt, Mycobacterium bovis subsp bovis AF2122/97
cgcaggaugaggcuugccaccg

SEQ ID NO: 11527 - RNA, 22 nt, Mycobacterium bovis subsp bovis AF2122/97
cgagccuggccacugggaagga

SEQ ID NO: 11528 - RNA, 22 nt, Mycobacterium bovis subsp bovis AF2122/97
cuggcuugccuccugccgcgac

SEQ ID NO: 11529 - RNA, 22 nt, Mycobacterium bovis subsp bovis AF2122/97
cugguccagccgcagcgugcgc

SEQ ID NO: 11530 - RNA, 22 nt, Mycobacterium bovis subsp bovis AF2122/97
cuggguucgacccaguccaagc

SEQ ID NO: 11531 - RNA, 22 nt, Mycobacterium bovis subsp bovis AF2122/97
cugguggcgcgggaugccgacg

SEQ ID NO: 11532 - RNA, 22 nt, Mycobacterium bovis subsp bovis AF2122/97
cuugaccuugcaccauggcguc

SEQ ID NO: 11533 - RNA, 23 nt, Mycobacterium bovis subsp bovis AF2122/97
cuugacgugaucgcugagacccu

SEQ ID NO: 11534 - RNA, 22 nt, Mycobacterium bovis subsp bovis AF2122/97
cuugcugguaugccgggccacc

SEQ ID NO: 11535 - RNA, 22 nt, Mycobacterium bovis subsp bovis AF2122/97
cuuccuggaguugccggaccag

SEQ ID NO: 11536 - RNA, 22 nt, Mycobacterium bovis subsp bovis AF2122/97
gaacagcuugcccuggaugccg

SEQ ID NO: 11537 - RNA, 22 nt, Mycobacterium bovis subsp bovis AF2122/97
cggggcugccggugagugcgcg

SEQ ID NO: 11538 - RNA, 22 nt, Mycobacterium bovis subsp bovis AF2122/97
cgggucuauggguggaugcucg

SEQ ID NO: 11539 - RNA, 22 nt, Mycobacterium bovis subsp bovis AF2122/97
cggguuugguguccgcacugcu

SEQ ID NO: 11540 - RNA, 22 nt, Mycobacterium bovis subsp bovis AF2122/97
cgggcugcagcgguaguacuuu

SEQ ID NO: 11541 - RNA, 22 nt, Mycobacterium bovis subsp bovis AF2122/97
cggggaucggcacccuggccgc

SEQ ID NO: 11542 - RNA, 22 nt, Mycobacterium bovis subsp bovis AF2122/97
cgugauccacagccacccggug

SEQ ID NO: 11543 - RNA, 22 nt, Mycobacterium bovis subsp bovis AF2122/97
cggcucccgugccggugccgau

SEQ ID NO: 11544 - RNA, 22 nt, Mycobacterium bovis subsp bovis AF2122/97
cagccggcgcauggucaaagcg

SEQ ID NO: 11545 - RNA, 22 nt, Mycobacterium bovis subsp bovis AF2122/97
ccaccagcuggacgccgucgcg

SEQ ID NO: 11546 - RNA, 22 nt, Mycobacterium bovis subsp bovis AF2122/97
ccacccgcgccagccggacggc

SEQ ID NO: 11547 - RNA, 22 nt, Mycobacterium bovis subsp bovis AF2122/97
ccaccgccacggccagcaccgc

SEQ ID NO: 11548 - RNA, 22 nt, Mycobacterium bovis subsp bovis AF2122/97
cccagcaccgaccagugccggc

SEQ ID NO: 11549 - RNA, 22 nt, Mycobacterium bovis subsp bovis AF2122/97
cccagcaccugccaggacgggc

SEQ ID NO: 11550 - RNA, 22 nt, Mycobacterium bovis subsp bovis AF2122/97
ccaugccgaugacgcuguuggc

SEQ ID NO: 11551 - RNA, 22 nt, Mycobacterium bovis subsp bovis AF2122/97
ccaggccaccgcgcggccaccg

SEQ ID NO: 11552 - RNA, 22 nt, Mycobacterium bovis subsp bovis AF2122/97
ccagccugcgcaagacggugac

SEQ ID NO: 11553 - RNA, 23 nt, Mycobacterium bovis subsp bovis AF2122/97
cauccugcuggugcggaccggca

SEQ ID NO: 11554 - RNA, 22 nt, Mycobacterium bovis subsp bovis AF2122/97
ccaagcucuggauggccugccg

SEQ ID NO: 11555 - RNA, 23 nt, Mycobacterium bovis subsp bovis AF2122/97
ccagauccagccguacgacgggc

SEQ ID NO: 11556 - RNA, 22 nt, Mycobacterium bovis subsp bovis AF2122/97
cccuggugguccgaucguucau

SEQ ID NO: 11557 - RNA, 22 nt, Mycobacterium bovis subsp bovis AF2122/97
ccagcucaucgccguagcugag

SEQ ID NO: 11558 - RNA, 21 nt, Mycobacterium bovis subsp bovis AF2122/97
cccugggccgccucgcucacc

SEQ ID NO: 11559 - RNA, 22 nt, Mycobacterium bovis subsp bovis AF2122/97
ccgcccggggcauggccaagcu

SEQ ID NO: 11560 - RNA, 22 nt, Mycobacterium bovis subsp bovis AF2122/97
cccagccaggguaaggccuuug

SEQ ID NO: 11561 - RNA, 22 nt, Mycobacterium bovis subsp bovis AF2122/97
cccagcgccagcgugaucggca

SEQ ID NO: 11562 - RNA, 23 nt, Mycobacterium bovis subsp bovis AF2122/97
auggccucccggccgaugcgggc

SEQ ID NO: 11563 - RNA, 22 nt, Mycobacterium bovis subsp bovis AF2122/97
augguguacgccgcagcgcggg

SEQ ID NO: 11564 - RNA, 22 nt, Mycobacterium bovis subsp bovis AF2122/97
auuggccaggcugacagaggca

SEQ ID NO: 11565 - RNA, 22 nt, Mycobacterium bovis subsp bovis AF2122/97
cacgccggcgugcaucggugac

SEQ ID NO: 11566 - RNA, 22 nt, Mycobacterium bovis subsp bovis AF2122/97
auucucuucauggugguguuga

SEQ ID NO: 11567 - RNA, 22 nt, Mycobacterium bovis subsp bovis AF2122/97
caccugccgaucgcacagguug

SEQ ID NO: 11568 - RNA, 20 nt, Mycobacterium bovis subsp bovis AF2122/97
cacuccuggcuggauucggc

SEQ ID NO: 11569 - RNA, 22 nt, Mycobacterium bovis subsp bovis AF2122/97
caaguaguaggcgagaucaccg

SEQ ID NO: 11570 - RNA, 22 nt, Mycobacterium bovis subsp bovis AF2122/97
cacaccgcgaugacuccggcga

SEQ ID NO: 11571 - RNA, 22 nt, Mycobacterium bovis subsp bovis AF2122/97
caagaccaggacggcgccgucg

SEQ ID NO: 11572 - RNA, 22 nt, Mycobacterium bovis subsp bovis AF2122/97
agggcugccacagucgccuggg

SEQ ID NO: 11573 - RNA, 22 nt, Mycobacterium bovis subsp bovis AF2122/97
aggucaccgagaugacgucacc

SEQ ID NO: 11574 - RNA, 22 nt, Mycobacterium bovis subsp bovis AF2122/97
agucaccuacaacgggguggag

SEQ ID NO: 11575 - RNA, 22 nt, Mycobacterium bovis subsp bovis AF2122/97
agucagagucucgggcauguac

SEQ ID NO: 11576 - RNA, 22 nt, Mycobacterium bovis subsp bovis AF2122/97
aguccugggccaacugccggua

SEQ ID NO: 11577 - RNA, 22 nt, Mycobacterium bovis subsp bovis AF2122/97
agguggcgacggcguugaccga

SEQ ID NO: 11578 - RNA, 22 nt, Mycobacterium bovis subsp bovis AF2122/97
agguagacgugucccgcauggg

SEQ ID NO: 11579 - RNA, 22 nt, Mycobacterium bovis subsp bovis AF2122/97
agguugccgcacuagacugcug

SEQ ID NO: 11580 - RNA, 22 nt, Mycobacterium bovis subsp bovis AF2122/97
aguuucucagcgagcaggugcu

SEQ ID NO: 11581 - RNA, 22 nt, Mycobacterium bovis subsp bovis AF2122/97
auaccagcaauugcucgacgaa

SEQ ID NO: 11582 - RNA, 22 nt, Mycobacterium bovis subsp bovis AF2122/97
aucgcagccacggaguucgauu

SEQ ID NO: 11583 - RNA, 22 nt, Mycobacterium bovis subsp bovis AF2122/97
augaccuggcgggucgugguug

SEQ ID NO: 11584 - RNA, 22 nt, Mycobacterium bovis subsp bovis AF2122/97
auccaggcgaccggccggggua

SEQ ID NO: 11585 - RNA, 22 nt, Mycobacterium bovis subsp bovis AF2122/97
auccaggaauugucagacguua

SEQ ID NO: 11586 - RNA, 22 nt, Mycobacterium bovis subsp bovis AF2122/97
aucacgccucucgguggugggg

SEQ ID NO: 11587 - RNA, 22 nt, Mycobacterium bovis subsp bovis AF2122/97
agccaagccguaguccucgacg

SEQ ID NO: 11588 - RNA, 23 nt, Mycobacterium bovis subsp bovis AF2122/97
agauggagcucucgcuguaucgc

SEQ ID NO: 11589 - RNA, 22 nt, Mycobacterium bovis subsp bovis AF2122/97
acgccccaacaacguuucgguu

SEQ ID NO: 11590 - RNA, 22 nt, Mycobacterium bovis subsp bovis AF2122/97
acuccucagccggcggcccugg

SEQ ID NO: 11591 - RNA, 22 nt, Mycobacterium bovis subsp bovis AF2122/97
acguucugcacgcucgggccgg

SEQ ID NO: 11592 - RNA, 22 nt, Mycobacterium bovis subsp bovis AF2122/97
acugucccgagcgcaccaggaa

SEQ ID NO: 11593 - RNA, 22 nt, Mycobacterium bovis subsp bovis AF2122/97
acugcuuuccugucugggcggc

SEQ ID NO: 11594 - RNA, 22 nt, Mycobacterium bovis subsp bovis AF2122/97
acuggccagcccgcacaaccac

SEQ ID NO: 11595 - RNA, 23 nt, Mycobacterium bovis subsp bovis AF2122/97
agcaaugcgcacggcauccagcg

SEQ ID NO: 11596 - RNA, 22 nt, Mycobacterium bovis subsp bovis AF2122/97
acccagaggcuguugccgacgc

SEQ ID NO: 11597 - RNA, 22 nt, Mycobacterium bovis subsp bovis AF2122/97
acuacgucggugauuugguugc

SEQ ID NO: 11598 - RNA, 22 nt, Mycobacterium bovis subsp bovis AF2122/97
agccccagucgcuuugucucga

SEQ ID NO: 11599 - RNA, 22 nt, Mycobacterium bovis subsp bovis AF2122/97
agcucccggaugagccggcucg

SEQ ID NO: 11600 - RNA, 22 nt, Mycobacterium bovis subsp bovis AF2122/97
agccgggcaucuggaaguggcu

SEQ ID NO: 11601 - RNA, 22 nt, Mycobacterium bovis subsp bovis AF2122/97
agcccggcggugcucgaggaag

SEQ ID NO: 11602 - RNA, 22 nt, Mycobacterium bovis subsp bovis AF2122/97
aggugcgccguggcaucgccuc

SEQ ID NO: 11603 - RNA, 22 nt, Mycobacterium bovis subsp bovis AF2122/97
agcuuggaggcgaucgcgcggg

SEQ ID NO: 11604 - RNA, 22 nt, Mycobacterium bovis subsp bovis AF2122/97
aggucugucggaccuggccgcg

SEQ ID NO: 11605 - RNA, 22 nt, Mycobacterium bovis subsp bovis AF2122/97
agcagggccgcagcggcucggu

SEQ ID NO: 11606 - RNA, 22 nt, Mycobacterium bovis subsp bovis AF2122/97
agccuccagcucgcgaagccaa

SEQ ID NO: 11607 - RNA, 22 nt, Mycobacterium bovis subsp bovis AF2122/97
aacaggccuugcgagacagcac

SEQ ID NO: 11608 - RNA, 22 nt, Mycobacterium bovis subsp bovis AF2122/97
aaggcuggagcgcacagcgcgg

SEQ ID NO: 11609 - RNA, 22 nt, Mycobacterium bovis subsp bovis AF2122/97
aaguccagcagaucgaucucgc

SEQ ID NO: 11610 - RNA, 22 nt, Mycobacterium bovis subsp bovis AF2122/97
aagugcaacacgaacguuggau

SEQ ID NO: 11611 - RNA, 22 nt, Mycobacterium bovis subsp bovis AF2122/97
acaccaagcgcccgcagcuugc

SEQ ID NO: 11612 - RNA, 22 nt, Mycobacterium bovis subsp bovis AF2122/97
acaccaaggccgucagcuuggc

SEQ ID NO: 11613 - RNA, 22 nt, Mycobacterium bovis subsp bovis AF2122/97
acagcugcugguuugagucugc

SEQ ID NO: 11614 - RNA, 22 nt, Mycobacterium bovis subsp bovis AF2122/97
aaacugcaaccacgcaccgaug

SEQ ID NO: 11615 - RNA, 19 nt, Mycobacterium bovis subsp bovis AF2122/97
acccaggccgucacuucga

SEQ ID NO: 11616 - RNA, 19 nt, Mycobacterium bovis subsp bovis AF2122/97
acaggcccucgugaucacc

SEQ ID NO: 11617 - RNA, 22 nt, Mycobacterium bovis subsp bovis AF2122/97
accggccuggugcucaauagcc

SEQ ID NO: 11618 - RNA, 22 nt, Mycobacterium bovis subsp bovis AF2122/97
accaaguagcgcgacucccguu

SEQ ID NO: 11619 - RNA, 22 nt, Mycobacterium bovis subsp bovis AF2122/97
aauggggugucaccuaccugca

SEQ ID NO: 11620 - RNA, 22 nt, Mycobacterium bovis subsp bovis AF2122/97
aauccggccugugucgggucgu

SEQ ID NO: 11621 - RNA, 22 nt, Mycobacterium bovis subsp bovis AF2122/97
aauuuuacccacuugugcaucc

SEQ ID NO: 11622 - RNA, 22 nt, Mycobacterium bovis subsp bovis AF2122/97
acaagcccggcgcggugcuggu

SEQ ID NO: 11623 - RNA, 22 nt, Mycobacterium bovis subsp bovis AF2122/97
acacccaggggcugccgcagcg

SEQ ID NO: 11624 - RNA, 22 nt, Mycobacterium bovis subsp bovis AF2122/97
acagccagcugcccgguccgcc

SEQ ID NO: 11625 - RNA, 22 nt, Mycobacterium bovis subsp bovis AF2122/97
aacuccgguaguuucaacaccg

SEQ ID NO: 11626 - RNA, 22 nt, Mycobacterium bovis subsp bovis AF2122/97
aaggcagggaggaauucgacac

SEQ ID NO: 11627 - RNA, 22 nt, Mycobacterium bovis subsp bovis AF2122/97
aaggugaacucacggcgagguu

SEQ ID NO: 11628 - RNA, 22 nt, Mycobacterium bovis subsp bovis AF2122/97
aagccuuguggugcgcccauuu

SEQ ID NO: 11629 - RNA, 22 nt, Mycobacterium bovis subsp bovis AF2122/97
ggcugcgcuggcccgccgguuu

SEQ ID NO: 11630 - RNA, 22 nt, Mycobacterium bovis subsp bovis AF2122/97
ggccaggguggccuggaugagu

SEQ ID NO: 11631 - RNA, 22 nt, Mycobacterium bovis subsp bovis AF2122/97
ggcgagcagacacagagucgca

SEQ ID NO: 11632 - RNA, 22 nt, Mycobacterium bovis subsp bovis AF2122/97
ggccgcauccccgucguagcgg

SEQ ID NO: 11633 - RNA, 22 nt, Mycobacterium bovis subsp bovis AF2122/97
ggcaggaucgggaugcguccag

SEQ ID NO: 11634 - RNA, 22 nt, Mycobacterium bovis subsp bovis AF2122/97
ggccacgccgcccuugccggac

SEQ ID NO: 11635 - RNA, 22 nt, Mycobacterium bovis subsp bovis AF2122/97
ggcagcagcgagaagugcaggu

SEQ ID NO: 11636 - RNA, 22 nt, Mycobacterium bovis subsp bovis AF2122/97
ggacgaggugcgggcgcugcag

SEQ ID NO: 11637 - RNA, 22 nt, Mycobacterium bovis subsp bovis AF2122/97
ggaaguucuaucugccgccaaa

SEQ ID NO: 11638 - RNA, 22 nt, Mycobacterium bovis subsp bovis AF2122/97
ggcaccaagucaccggcaucca

SEQ ID NO: 11639 - RNA, 22 nt, Mycobacterium bovis subsp bovis AF2122/97
gcuggugguaucgcuggccaag

SEQ ID NO: 11640 - RNA, 22 nt, Mycobacterium bovis subsp bovis AF2122/97
gcugggccuuacgcaccugccg

SEQ ID NO: 11641 - RNA, 22 nt, Mycobacterium bovis subsp bovis AF2122/97
gcuggccaguucgcccugaccu

SEQ ID NO: 11642 - RNA, 22 nt, Mycobacterium bovis subsp bovis AF2122/97
gccuggacuccgcuuuuggcac

SEQ ID NO: 11643 - RNA, 22 nt, Mycobacterium bovis subsp bovis AF2122/97
gccuugaccgccuugauggcgg

SEQ ID NO: 11644 - RNA, 22 nt, Mycobacterium bovis subsp bovis AF2122/97
gccuugacgagcgggccggcaa

SEQ ID NO: 11645 - RNA, 22 nt, Mycobacterium bovis subsp bovis AF2122/97
gccuugucgagaucgucgccgu

SEQ ID NO: 11646 - RNA, 22 nt, Mycobacterium bovis subsp bovis AF2122/97
gccgccaccgcuaccacccgug

SEQ ID NO: 11647 - RNA, 22 nt, Mycobacterium bovis subsp bovis AF2122/97
gccgcccaauucuccggucgcg

SEQ ID NO: 11648 - RNA, 22 nt, Mycobacterium bovis subsp bovis AF2122/97
gcucagccgugugcggauacuu

SEQ ID NO: 11649 - RNA, 22 nt, Mycobacterium bovis subsp bovis AF2122/97
gcgaaacacgggaucgggcgag

SEQ ID NO: 11650 - RNA, 22 nt, Mycobacterium bovis subsp bovis AF2122/97
gcgauagccgaaccacccgccg

SEQ ID NO: 11651 - RNA, 22 nt, Mycobacterium bovis subsp bovis AF2122/97
gcgccacuggggucaccgacgg

SEQ ID NO: 11652 - RNA, 22 nt, Mycobacterium bovis subsp bovis AF2122/97
ucggggacuucugcgucugcuc

SEQ ID NO: 11653 - RNA, 22 nt, Mycobacterium bovis subsp bovis AF2122/97
ucggugacggacugcacagcga

SEQ ID NO: 11654 - RNA, 22 nt, Mycobacterium bovis subsp bovis AF2122/97
ucgguggcgccgacaugccggu

SEQ ID NO: 11655 - RNA, 22 nt, Mycobacterium bovis subsp bovis AF2122/97
ucggccucccaugcggcgaucu

SEQ ID NO: 11656 - RNA, 22 nt, Mycobacterium bovis subsp bovis AF2122/97
ucgauguuccgcagcuucgucg

SEQ ID NO: 11657 - RNA, 22 nt, Mycobacterium bovis subsp bovis AF2122/97
uccagcacugucuuggcuucgg

SEQ ID NO: 11658 - RNA, 22 nt, Mycobacterium bovis subsp bovis AF2122/97
uccugcgcgugguacucgucgg

SEQ ID NO: 11659 - RNA, 22 nt, Mycobacterium bovis subsp bovis AF2122/97
uccugcaggcgaucgcccuggc

SEQ ID NO: 11660 - RNA, 22 nt, Mycobacterium bovis subsp bovis AF2122/97
ucagcgucgaugaccaugucga

SEQ ID NO: 11661 - RNA, 22 nt, Mycobacterium bovis subsp bovis AF2122/97
ucaccugcccggcaccuggagc

SEQ ID NO: 11662 - RNA, 22 nt, Mycobacterium bovis subsp bovis AF2122/97
ucacgccggggcuggagucacc

SEQ ID NO: 11663 - RNA, 18 nt, Mycobacterium bovis subsp bovis AF2122/97
ucacugcugcggucuggg

SEQ ID NO: 11664 - RNA, 22 nt, Mycobacterium bovis subsp bovis AF2122/97
ucagccgcaagcaccgucagcg

SEQ ID NO: 11665 - RNA, 22 nt, Mycobacterium bovis subsp bovis AF2122/97
ucacccccgagguggccacgcg

SEQ ID NO: 11666 - RNA, 22 nt, Mycobacterium bovis subsp bovis AF2122/97
ucaccgccgcgguuggugcgca

SEQ ID NO: 11667 - RNA, 22 nt, Mycobacterium bovis subsp bovis AF2122/97
uaagcugcgccagccacgccgu

SEQ ID NO: 11668 - RNA, 22 nt, Mycobacterium bovis subsp bovis AF2122/97
uaaaagaacuuugcauccgugc

SEQ ID NO: 11669 - RNA, 22 nt, Mycobacterium bovis subsp bovis AF2122/97
uauguucaauaaaucauuaugu

SEQ ID NO: 11670 - RNA, 22 nt, Mycobacterium bovis subsp bovis AF2122/97
uauucaucgaguacagcugaau

SEQ ID NO: 11671 - RNA, 22 nt, Mycobacterium bovis subsp bovis AF2122/97
gugcugguggucagugacgccg

SEQ ID NO: 11672 - RNA, 22 nt, Mycobacterium bovis subsp bovis AF2122/97
gucgguggccgcugccaugucg

SEQ ID NO: 11673 - RNA, 22 nt, Mycobacterium bovis subsp bovis AF2122/97
guccucaagccggcguuccagc

SEQ ID NO: 11674 - RNA, 22 nt, Mycobacterium bovis subsp bovis AF2122/97
gucgaggugaccagcggugagg

SEQ ID NO: 11675 - RNA, 22 nt, Mycobacterium bovis subsp bovis AF2122/97
gucugagagccccggaaagcgc

SEQ ID NO: 11676 - RNA, 22 nt, Mycobacterium bovis subsp bovis AF2122/97
gucuggaugaaagccuuguuga

SEQ ID NO: 11677 - RNA, 22 nt, Mycobacterium bovis subsp bovis AF2122/97
guggugguguaggucucgaugc

SEQ ID NO: 11678 - RNA, 22 nt, Mycobacterium bovis subsp bovis AF2122/97
guggugggaaccgcuccagggc

SEQ ID NO: 11679 - RNA, 22 nt, Mycobacterium bovis subsp bovis AF2122/97
gugguggccguggccgcgucgu

SEQ ID NO: 11680 - RNA, 22 nt, Mycobacterium bovis subsp bovis AF2122/97
gugguggcgcaauucgaccagg

SEQ ID NO: 11681 - RNA, 22 nt, Mycobacterium bovis subsp bovis AF2122/97
guugucuugcucgcuuuggcug

SEQ ID NO: 11682 - RNA, 22 nt, Mycobacterium bovis subsp bovis AF2122/97
guugugaacggaaccgccggga

SEQ ID NO: 11683 - RNA, 22 nt, Mycobacterium bovis subsp bovis AF2122/97
guuguucaacgccgucaauguu

SEQ ID NO: 11684 - RNA, 22 nt, Mycobacterium bovis subsp bovis AF2122/97
guuugguugccuaccgcguggg

SEQ ID NO: 11685 - RNA, 22 nt, Mycobacterium bovis subsp bovis AF2122/97
gggcugcccaaucagcgcugcg

SEQ ID NO: 11686 - RNA, 22 nt, Mycobacterium bovis subsp bovis AF2122/97
gggcuggaccgcgaggagcugc

SEQ ID NO: 11687 - RNA, 22 nt, Mycobacterium bovis subsp bovis AF2122/97
ggcuggcuugccgacauucagc

SEQ ID NO: 11688 - RNA, 22 nt, Mycobacterium bovis subsp bovis AF2122/97
gggcucggccaguugcuccugg

SEQ ID NO: 11689 - RNA, 22 nt, Mycobacterium bovis subsp bovis AF2122/97
gggguggugaaguacacgcccg

SEQ ID NO: 11690 - RNA, 22 nt, Mycobacterium bovis subsp bovis AF2122/97
gggcacaggccgauggcgcuga

SEQ ID NO: 11691 - RNA, 22 nt, Mycobacterium bovis subsp bovis AF2122/97
gggcagcaggaugcgccugcga

SEQ ID NO: 11692 - RNA, 22 nt, Mycobacterium bovis subsp bovis AF2122/97
gggucacgaucgccgccggcgc

SEQ ID NO: 11693 - RNA, 22 nt, Mycobacterium bovis subsp bovis AF2122/97
ggucgcgcccgcagccgguggu

SEQ ID NO: 11694 - RNA, 20 nt, Mycobacterium bovis subsp bovis AF2122/97
ggucacccugggugagccgg

SEQ ID NO: 11695 - RNA, 22 nt, Mycobacterium bovis subsp bovis AF2122/97
ggugguggcccgugaccguacc

SEQ ID NO: 11696 - RNA, 22 nt, Mycobacterium bovis subsp bovis AF2122/97
ggugguggugccgucgucgcgc

SEQ ID NO: 11697 - RNA, 22 nt, Mycobacterium bovis subsp bovis AF2122/97
ggugguuucguggccggcgagc

SEQ ID NO: 11698 - RNA, 22 nt, Mycobacterium bovis subsp bovis AF2122/97
ggugcuuuugcgucugcucggc

SEQ ID NO: 11699 - RNA, 22 nt, Mycobacterium bovis subsp bovis AF2122/97
gguguaggucguugccgaccuc

SEQ ID NO: 11700 - RNA, 22 nt, Mycobacterium bovis subsp bovis AF2122/97
guccaagcagcgacuagucaag

SEQ ID NO: 11701 - RNA, 22 nt, Mycobacterium bovis subsp bovis AF2122/97
guccagcagcccggucuggugu

SEQ ID NO: 11702 - RNA, 22 nt, Mycobacterium bovis subsp bovis AF2122/97
gucaccuugcaccuggccgccg

SEQ ID NO: 11703 - RNA, 22 nt, Mycobacterium bovis subsp bovis AF2122/97
cgcccgccaaggacuuccgcgc

SEQ ID NO: 11704 - RNA, 21 nt, Mycobacterium bovis subsp bovis AF2122/97
cgccccagaugcacgcucggc

SEQ ID NO: 11705 - RNA, 22 nt, Mycobacterium bovis subsp bovis AF2122/97
cgccucccgggcugggcugguu

SEQ ID NO: 11706 - RNA, 17 nt, Mycobacterium bovis subsp bovis AF2122/97
cgccuggcgcugacccc

SEQ ID NO: 11707 - RNA, 22 nt, Mycobacterium bovis subsp bovis AF2122/97
cgccugggccagugccgacuuc

SEQ ID NO: 11708 - RNA, 22 nt, Mycobacterium bovis subsp bovis AF2122/97
cgcugggcagucucgaggaccu

SEQ ID NO: 11709 - RNA, 22 nt, Mycobacterium bovis subsp bovis AF2122/97
cgccuuggacgacgguuccgau

SEQ ID NO: 11710 - RNA, 22 nt, Mycobacterium bovis subsp bovis AF2122/97
cgcccggccgcuggucgcguac

SEQ ID NO: 11711 - RNA, 22 nt, Mycobacterium bovis subsp bovis AF2122/97
cgcucagggcgucaccgccccg

SEQ ID NO: 11712 - RNA, 22 nt, Mycobacterium bovis subsp bovis AF2122/97
cgcucgagauugcagcgggccc

SEQ ID NO: 11713 - RNA, 22 nt, Mycobacterium bovis subsp bovis AF2122/97
cgccagcaccaccugguugggc

SEQ ID NO: 11714 - RNA, 22 nt, Mycobacterium bovis subsp bovis AF2122/97
cgccaagccgcaaggcucggcg

SEQ ID NO: 11715 - RNA, 22 nt, Mycobacterium bovis subsp bovis AF2122/97
cgaccugccgcagcguugcuau

SEQ ID NO: 11716 - RNA, 22 nt, Mycobacterium bovis subsp bovis AF2122/97
ccugucucggcaagccuggucg

SEQ ID NO: 11717 - RNA, 22 nt, Mycobacterium bovis subsp bovis AF2122/97
ccugggaucgaggggucuucau

SEQ ID NO: 11718 - RNA, 22 nt, Mycobacterium bovis subsp bovis AF2122/97
ccguugacgaaccggaccaauc

SEQ ID NO: 11719 - RNA, 22 nt, Mycobacterium bovis subsp bovis AF2122/97
ccgcccaggcucccgcucgacg

SEQ ID NO: 11720 - RNA, 22 nt, Mycobacterium bovis subsp bovis AF2122/97
ccccuaccgucgauguggcggg

SEQ ID NO: 11721 - RNA, 22 nt, Mycobacterium bovis subsp bovis AF2122/97
ccagccgccagcaucucggauc

SEQ ID NO: 11722 - RNA, 22 nt, Mycobacterium bovis subsp bovis AF2122/97
ccagcagugcgggcgaucguga

SEQ ID NO: 11723 - RNA, 22 nt, Mycobacterium bovis subsp bovis AF2122/97
ccagcagcgcguacagcaucga

SEQ ID NO: 11724 - RNA, 22 nt, Mycobacterium bovis subsp bovis AF2122/97
ccaccaugcgcgccuacgcgaa

SEQ ID NO: 11725 - RNA, 22 nt, Mycobacterium bovis subsp bovis AF2122/97
cauggaaacgcaggugguguca

SEQ ID NO: 11726 - RNA, 22 nt, Mycobacterium bovis subsp bovis AF2122/97
ccaaugggauguugccgagcau

SEQ ID NO: 11727 - RNA, 22 nt, Mycobacterium bovis subsp bovis AF2122/97
caugcaucggaagaaccggcau

SEQ ID NO: 11728 - RNA, 22 nt, Mycobacterium bovis subsp bovis AF2122/97
cauugcaccggugcgcucggcg

SEQ ID NO: 11729 - RNA, 22 nt, Mycobacterium bovis subsp bovis AF2122/97
caugacuuccagcaacgccgac

SEQ ID NO: 11730 - RNA, 22 nt, Mycobacterium bovis subsp bovis AF2122/97
caggcgaaucaccccgccgcgc

SEQ ID NO: 11731 - RNA, 22 nt, Mycobacterium bovis subsp bovis AF2122/97
caggauauccaggcggcagcag

SEQ ID NO: 11732 - RNA, 22 nt, Mycobacterium bovis subsp bovis AF2122/97
caggggcucgauccggccgggc

SEQ ID NO: 11733 - RNA, 22 nt, Mycobacterium bovis subsp bovis AF2122/97
caguucggucucuauccgccgc

SEQ ID NO: 11734 - RNA, 22 nt, Mycobacterium bovis subsp bovis AF2122/97
cauccagcaguacgaggacggg

SEQ ID NO: 11735 - RNA, 22 nt, Mycobacterium bovis subsp bovis AF2122/97
cauccaggcgaugguggcaacc

SEQ ID NO: 11736 - RNA, 22 nt, Mycobacterium bovis subsp bovis AF2122/97
caucuguuggcgcucucggccu

SEQ ID NO: 11737 - RNA, 22 nt, Mycobacterium bovis subsp bovis AF2122/97
ccagcuugucgccacgaaccuu

SEQ ID NO: 11738 - RNA, 22 nt, Mycobacterium bovis subsp bovis AF2122/97
ccaugagcacccggauggccug

SEQ ID NO: 11739 - RNA, 22 nt, Mycobacterium bovis subsp bovis AF2122/97
ccaggugcauugugcaccacau

SEQ ID NO: 11740 - RNA, 22 nt, Mycobacterium bovis subsp bovis AF2122/97
ccaggugccgucggguuguucg

SEQ ID NO: 11741 - RNA, 22 nt, Mycobacterium bovis subsp bovis AF2122/97
cccgcgccgggauagucaccgc

SEQ ID NO: 11742 - RNA, 22 nt, Mycobacterium bovis subsp bovis AF2122/97
gcaccccagagcacugauacgc

SEQ ID NO: 11743 - RNA, 22 nt, Mycobacterium bovis subsp bovis AF2122/97
gcacggguucguugcugugcau

SEQ ID NO: 11744 - RNA, 22 nt, Mycobacterium bovis subsp bovis AF2122/97
gauggcgaugcgcaccccgucg

SEQ ID NO: 11745 - RNA, 22 nt, Mycobacterium bovis subsp bovis AF2122/97
gagaugagccgaaauuacccug

SEQ ID NO: 11746 - RNA, 22 nt, Mycobacterium bovis subsp bovis AF2122/97
gagggacuuaugcgucugcuag

SEQ ID NO: 11747 - RNA, 22 nt, Mycobacterium bovis subsp bovis AF2122/97
gagacccaucagagccgagucg

SEQ ID NO: 11748 - RNA, 22 nt, Mycobacterium bovis subsp bovis AF2122/97
gacugcccaggcugcgcguggc

SEQ ID NO: 11749 - RNA, 22 nt, Mycobacterium bovis subsp bovis AF2122/97
gccgcaccgacuaccaccgacu

SEQ ID NO: 11750 - RNA, 22 nt, Mycobacterium bovis subsp bovis AF2122/97
gcagagccgaucguccuguugc

SEQ ID NO: 11751 - RNA, 22 nt, Mycobacterium bovis subsp bovis AF2122/97
gcagaugagugcagaggaucuc

SEQ ID NO: 11752 - RNA, 22 nt, Mycobacterium bovis subsp bovis AF2122/97
gcagcgugucaccgucgaggac

SEQ ID NO: 11753 - RNA, 21 nt, Mycobacterium bovis subsp bovis AF2122/97
gccagcacgguguucaaguug

SEQ ID NO: 11754 - RNA, 22 nt, Mycobacterium bovis subsp bovis AF2122/97
gccagaacugccggccccaggg

SEQ ID NO: 11755 - RNA, 22 nt, Mycobacterium bovis subsp bovis AF2122/97
gccagcagcucggcgauaucgg

SEQ ID NO: 11756 - RNA, 22 nt, Mycobacterium bovis subsp bovis AF2122/97
gccaccacucaggccgcgguca

SEQ ID NO: 11757 - RNA, 22 nt, Mycobacterium bovis subsp bovis AF2122/97
gccaagacgcgucggggccacc

SEQ ID NO: 11758 - RNA, 22 nt, Mycobacterium bovis subsp bovis AF2122/97
gcauccagggggccgacgcauu

SEQ ID NO: 11759 - RNA, 22 nt, Mycobacterium bovis subsp bovis AF2122/97
cguggaaugcaugaucgucgcc

SEQ ID NO: 11760 - RNA, 22 nt, Mycobacterium bovis subsp bovis AF2122/97
cgugggccugagcagcgacgac

SEQ ID NO: 11761 - RNA, 22 nt, Mycobacterium bovis subsp bovis AF2122/97
cguucagcacggccgacagcga

SEQ ID NO: 11762 - RNA, 22 nt, Mycobacterium bovis subsp bovis AF2122/97
cuaccagccggcgcagcagcgc

SEQ ID NO: 11763 - RNA, 22 nt, Mycobacterium bovis subsp bovis AF2122/97
cggucaccuucgcaucggugau

SEQ ID NO: 11764 - RNA, 22 nt, Mycobacterium bovis subsp bovis AF2122/97
cggcagcacgagcucgucgugg

SEQ ID NO: 11765 - RNA, 22 nt, Mycobacterium bovis subsp bovis AF2122/97
cggcucaggcuuaugcagccgu

SEQ ID NO: 11766 - RNA, 22 nt, Mycobacterium bovis subsp bovis AF2122/97
cggcugcagugcgacgacgaga

SEQ ID NO: 11767 - RNA, 17 nt, Mycobacterium bovis subsp bovis AF2122/97
cuggucacgaucauggc

SEQ ID NO: 11768 - RNA, 22 nt, Mycobacterium bovis subsp bovis AF2122/97
cugccacuggugucacgucaug

SEQ ID NO: 11769 - RNA, 22 nt, Mycobacterium bovis subsp bovis AF2122/97
cggucaccaucucgcagacaua

SEQ ID NO: 11770 - RNA, 22 nt, Mycobacterium bovis subsp bovis AF2122/97
cuugggcguuugcguucgccgc

SEQ ID NO: 11771 - RNA, 22 nt, Mycobacterium bovis subsp bovis AF2122/97
cuguggaguucggcgguguccu

SEQ ID NO: 11772 - RNA, 22 nt, Mycobacterium bovis subsp bovis AF2122/97
gaagcugcugggccaguucgug

SEQ ID NO: 11773 - RNA, 22 nt, Mycobacterium bovis subsp bovis AF2122/97
gaagccagugugaccgccugga

SEQ ID NO: 11774 - RNA, 22 nt, Mycobacterium bovis subsp bovis AF2122/97
gacagcuuucagcgaaucaccg

SEQ ID NO: 11775 - RNA, 20 nt, Mycobacterium bovis subsp bovis AF2122/97
ucuggccaaggugucgagca

SEQ ID NO: 11776 - RNA, 22 nt, Mycobacterium bovis subsp bovis AF2122/97
ucuggccgggcggcauggagau

SEQ ID NO: 11777 - RNA, 22 nt, Mycobacterium bovis subsp bovis AF2122/97
ucgguggccagcgaggcgccgg

SEQ ID NO: 11778 - RNA, 19 nt, Mycobacterium bovis subsp bovis AF2122/97
ucguccugcugugggugac

SEQ ID NO: 11779 - RNA, 22 nt, Mycobacterium bovis subsp bovis AF2122/97
ucguggcccucccggcggccac

SEQ ID NO: 11780 - RNA, 22 nt, Mycobacterium bovis subsp bovis AF2122/97
ucccgggcaucggcauccccgg

SEQ ID NO: 11781 - RNA, 22 nt, Mycobacterium bovis subsp bovis AF2122/97
ucgagcucccggugagacgaga

SEQ ID NO: 11782 - RNA, 22 nt, Mycobacterium bovis subsp bovis AF2122/97
ucgaggacggugucgagccccg

SEQ ID NO: 11783 - RNA, 22 nt, Mycobacterium bovis subsp bovis AF2122/97
uccuuuccgucgaugcggaagc

SEQ ID NO: 11784 - RNA, 22 nt, Mycobacterium bovis subsp bovis AF2122/97
ucgaaacccagccaccucuugg

SEQ ID NO: 11785 - RNA, 22 nt, Mycobacterium bovis subsp bovis AF2122/97
ucgcgccaguguccgccgccga

SEQ ID NO: 11786 - RNA, 22 nt, Mycobacterium bovis subsp bovis AF2122/97
ucgcgccaucggcuacaccagc

SEQ ID NO: 11787 - RNA, 19 nt, Mycobacterium bovis subsp bovis AF2122/97
ucagcuguacucgaugaau

SEQ ID NO: 11788 - RNA, 22 nt, Mycobacterium bovis subsp bovis AF2122/97
ucagcugucaugguuggugauu

SEQ ID NO: 11789 - RNA, 22 nt, Mycobacterium bovis subsp bovis AF2122/97
ucagcuguguccgcacaaccgg

SEQ ID NO: 11790 - RNA, 22 nt, Mycobacterium bovis subsp bovis AF2122/97
ucaggcugggcgaaccugggca

SEQ ID NO: 11791 - RNA, 22 nt, Mycobacterium bovis subsp bovis AF2122/97
ucaccaccggcacccaaggcga

SEQ ID NO: 11792 - RNA, 22 nt, Mycobacterium bovis subsp bovis AF2122/97
uaucuggcccaaggggcgcuuc

SEQ ID NO: 11793 - RNA, 22 nt, Mycobacterium bovis subsp bovis AF2122/97
uccagcacuucuggggggaucc

SEQ ID NO: 11794 - RNA, 22 nt, Mycobacterium bovis subsp bovis AF2122/97
uccagcagcaacgccaagucgc

SEQ ID NO: 11795 - RNA, 22 nt, Mycobacterium bovis subsp bovis AF2122/97
uccagcagcacgucggugcgau

SEQ ID NO: 11796 - RNA, 23 nt, Mycobacterium bovis subsp bovis AF2122/97
ucccagaggcgagucaccuguuc

SEQ ID NO: 11797 - RNA, 23 nt, Mycobacterium bovis subsp bovis AF2122/97
ucccaggugccauacgagcugaa

SEQ ID NO: 11798 - RNA, 22 nt, Mycobacterium bovis subsp bovis AF2122/97
uagguaaauaaauccguguuug

SEQ ID NO: 11799 - RNA, 22 nt, Mycobacterium bovis subsp bovis AF2122/97
uggaaaaacggcggccccgacc

SEQ ID NO: 11800 - RNA, 22 nt, Mycobacterium bovis subsp bovis AF2122/97
uggcccacugcaaccggaccuc

SEQ ID NO: 11801 - RNA, 22 nt, Mycobacterium bovis subsp bovis AF2122/97
uggccagaucuccccgcgggcc

SEQ ID NO: 11802 - RNA, 22 nt, Mycobacterium bovis subsp bovis AF2122/97
uggcgcugugcugcucgacgug

SEQ ID NO: 11803 - RNA, 22 nt, Mycobacterium bovis subsp bovis AF2122/97
uggcugggcgaccgcggugucg

SEQ ID NO: 11804 - RNA, 22 nt, Mycobacterium bovis subsp bovis AF2122/97
uggcuggucggaccgucagcga

SEQ ID NO: 11805 - RNA, 22 nt, Mycobacterium bovis subsp bovis AF2122/97
uggcucagcgggucaacgaggc

SEQ ID NO: 11806 - RNA, 22 nt, Mycobacterium bovis subsp bovis AF2122/97
ugggacagcuggaaguuaucgg

SEQ ID NO: 11807 - RNA, 22 nt, Mycobacterium bovis subsp bovis AF2122/97
ugggcaugaucuguggaucagg

SEQ ID NO: 11808 - RNA, 22 nt, Mycobacterium bovis subsp bovis AF2122/97
uggucaccgucgccgcaaucga

SEQ ID NO: 11809 - RNA, 23 nt, Mycobacterium bovis subsp bovis AF2122/97
ugggcucaggauguggcugcgau

SEQ ID NO: 11810 - RNA, 22 nt, Mycobacterium bovis subsp bovis AF2122/97
ugggcugaacaggacggccgcc

SEQ ID NO: 11811 - RNA, 22 nt, Mycobacterium bovis subsp bovis AF2122/97
ugguggcgugcagcgccaucuc

SEQ ID NO: 11812 - RNA, 22 nt, Mycobacterium bovis subsp bovis AF2122/97
uggucggcgaguucgccgugca

SEQ ID NO: 11813 - RNA, 22 nt, Mycobacterium bovis subsp bovis AF2122/97
ugaccugacgcggcuccggcgc

SEQ ID NO: 11814 - RNA, 22 nt, Mycobacterium bovis subsp bovis AF2122/97
ugaaggucuugugcccguugag

SEQ ID NO: 11815 - RNA, 19 nt, Mycobacterium bovis subsp bovis AF2122/97
ugcacuccaccgcuggcgc

SEQ ID NO: 11816 - RNA, 22 nt, Mycobacterium bovis subsp bovis AF2122/97
ugcacuccgacccgccgacguu

SEQ ID NO: 11817 - RNA, 22 nt, Mycobacterium bovis subsp bovis AF2122/97
ugcacgccucaaagccgaugag

SEQ ID NO: 11818 - RNA, 22 nt, Mycobacterium bovis subsp bovis AF2122/97
ugcccaacucggccagaauguu

SEQ ID NO: 11819 - RNA, 22 nt, Mycobacterium bovis subsp bovis AF2122/97
ugaucucacccgaaguuguguc

SEQ ID NO: 11820 - RNA, 22 nt, Mycobacterium bovis subsp bovis AF2122/97
ugagguuucaucgaucggccug

SEQ ID NO: 11821 - RNA, 22 nt, Mycobacterium bovis subsp bovis AF2122/97
ugccgccaccaggcagccggug

SEQ ID NO: 11822 - RNA, 22 nt, Mycobacterium bovis subsp bovis AF2122/97
ugcgccaccgccagaggauaac

SEQ ID NO: 11823 - RNA, 22 nt, Mycobacterium bovis subsp bovis AF2122/97
ugcgcgccuugauccggcuguc

SEQ ID NO: 11824 - RNA, 22 nt, Mycobacterium bovis subsp bovis AF2122/97
cacugacuagugaagaaccuuu

SEQ ID NO: 11825 - RNA, 22 nt, Mycobacterium bovis subsp bovis AF2122/97
caggaugacgccgcagcgcucg

SEQ ID NO: 11826 - RNA, 22 nt, Mycobacterium bovis subsp bovis AF2122/97
cagcguugucucggcgaacacc

SEQ ID NO: 11827 - RNA, 22 nt, Mycobacterium bovis subsp bovis AF2122/97
cagccagggucagcacgcggau

SEQ ID NO: 11828 - RNA, 22 nt, Mycobacterium bovis subsp bovis AF2122/97
cagcucccaacgguggccccgg

SEQ ID NO: 11829 - RNA, 22 nt, Mycobacterium bovis subsp bovis AF2122/97
caccagggugcugccggugauu

SEQ ID NO: 11830 - RNA, 22 nt, Mycobacterium bovis subsp bovis AF2122/97
cacgagcguaaccccagugcga

SEQ ID NO: 11831 - RNA, 22 nt, Mycobacterium bovis subsp bovis AF2122/97
cacgccagcgucccggguugcu

SEQ ID NO: 11832 - RNA, 22 nt, Mycobacterium bovis subsp bovis AF2122/97
caauguuucgacgggcaccaaa

SEQ ID NO: 11833 - RNA, 22 nt, Mycobacterium bovis subsp bovis AF2122/97
caaauauuucguggcgaugcgc

SEQ ID NO: 11834 - RNA, 21 nt, Mycobacterium bovis subsp bovis AF2122/97
auuugcaacgcaacggcgugc

SEQ ID NO: 11835 - RNA, 22 nt, Mycobacterium bovis subsp bovis AF2122/97
auuccguugcgccuauuugaaa

SEQ ID NO: 11836 - RNA, 22 nt, Mycobacterium bovis subsp bovis AF2122/97
augguguagaucuuggucgggu

SEQ ID NO: 11837 - RNA, 22 nt, Mycobacterium bovis subsp bovis AF2122/97
auggccaaccucccgacuggua

SEQ ID NO: 11838 - RNA, 22 nt, Mycobacterium bovis subsp bovis AF2122/97
augaggcgauuuugcgucugcu

SEQ ID NO: 11839 - RNA, 22 nt, Mycobacterium bovis subsp bovis AF2122/97
augaaaccgguggccaugccgc

SEQ ID NO: 11840 - RNA, 22 nt, Mycobacterium bovis subsp bovis AF2122/97
aucugcagguuccuggguugac

SEQ ID NO: 11841 - RNA, 22 nt, Mycobacterium bovis subsp bovis AF2122/97
aucuaaaccgacgcgcacgaga

SEQ ID NO: 11842 - RNA, 22 nt, Mycobacterium bovis subsp bovis AF2122/97
aucaccuuccucggcaugagau

SEQ ID NO: 11843 - RNA, 22 nt, Mycobacterium bovis subsp bovis AF2122/97
aucaccaccgagaugccgaacc

SEQ ID NO: 11844 - RNA, 23 nt, Mycobacterium bovis subsp bovis AF2122/97
ugguggucaccccgacgacgcuc

SEQ ID NO: 11845 - RNA, 22 nt, Mycobacterium bovis subsp bovis AF2122/97
ugguggcugugucgaccgggaa

SEQ ID NO: 11846 - RNA, 22 nt, Mycobacterium bovis subsp bovis AF2122/97
ugguuggugccgaacugcaucu

SEQ ID NO: 11847 - RNA, 22 nt, Mycobacterium bovis subsp bovis AF2122/97
ugguuucccgugaggugaucgc

SEQ ID NO: 11848 - RNA, 22 nt, Mycobacterium bovis subsp bovis AF2122/97
ugguuucccuacccgggcagca

SEQ ID NO: 11849 - RNA, 22 nt, Mycobacterium bovis subsp bovis AF2122/97
ugucgcgcaagcucuccggcac

SEQ ID NO: 11850 - RNA, 22 nt, Mycobacterium bovis subsp bovis AF2122/97
uuccagccacagcccggcggcg

SEQ ID NO: 11851 - RNA, 22 nt, Mycobacterium bovis subsp bovis AF2122/97
uucagcagggugauguccagcc

SEQ ID NO: 11852 - RNA, 22 nt, Mycobacterium bovis subsp bovis AF2122/97
uucaggcuacgguagcggugcg

SEQ ID NO: 11853 - RNA, 22 nt, Mycobacterium bovis subsp bovis AF2122/97
uugaggaucagguucagcuggc

SEQ ID NO: 11854 - RNA, 22 nt, Mycobacterium bovis subsp bovis AF2122/97
uugauccagggugcgugguugg

SEQ ID NO: 11855 - RNA, 22 nt, Mycobacterium bovis subsp bovis AF2122/97
uugaugaugcggauccggauuc

SEQ ID NO: 11856 - RNA, 22 nt, Mycobacterium bovis subsp bovis AF2122/97
uuugauauccgcaaccugcggu

SEQ ID NO: 11857 - RNA, 22 nt, Mycobacterium bovis subsp bovis AF2122/97
uuucagguccagcuuccgucga

SEQ ID NO: 11858 - RNA, 22 nt, Mycobacterium bovis subsp bovis AF2122/97
uugucgccgucucgguccagcu

SEQ ID NO: 11859 - RNA, 22 nt, Mycobacterium bovis subsp bovis AF2122/97
uugucgccgugcaccaccugga

SEQ ID NO: 11860 - RNA, 22 nt, Mycobacterium bovis subsp bovis AF2122/97
uugucaccgcuuccauggcguu

SEQ ID NO: 11861 - RNA, 22 nt, Mycobacterium bovis subsp bovis AF2122/97
uuggucaccuccgagcccacgg

SEQ ID NO: 11862 - RNA, 22 nt, Mycobacterium bovis subsp bovis AF2122/97
uuggcagcgugaaguguucggg

SEQ ID NO: 11863 - RNA, 22 nt, Mycobacterium bovis subsp bovis AF2122/97
uuggcaguccagccgggugccg

SEQ ID NO: 11864 - RNA, 22 nt, Mycobacterium bovis subsp bovis AF2122/97
uuggccaacccgguguuggcau

SEQ ID NO: 11865 - RNA, 22 nt, Mycobacterium bovis subsp bovis AF2122/97
uuggccgcggcccaugcuggcg

SEQ ID NO: 11866 - RNA, 22 nt, Mycobacterium bovis subsp bovis AF2122/97
uugcccaagcccggcggaccgg

SEQ ID NO: 11867 - RNA, 19 nt, Mycobacterium bovis subsp bovis AF2122/97
gggaucuuggggcugcccc

SEQ ID NO: 11868 - RNA, 22 nt, Mycobacterium bovis subsp bovis AF2122/97
ggcccggcucgccacgaggagg

SEQ ID NO: 11869 - RNA, 22 nt, Mycobacterium bovis subsp bovis AF2122/97
ggcccggcugccggcuacggcg

SEQ ID NO: 11870 - RNA, 22 nt, Mycobacterium bovis subsp bovis AF2122/97
ggcccggcugcgcgucguguca

SEQ ID NO: 11871 - RNA, 22 nt, Mycobacterium bovis subsp bovis AF2122/97
ggcguggucaccggcguggucg

SEQ ID NO: 11872 - RNA, 22 nt, Mycobacterium bovis subsp bovis AF2122/97
ggcgugguuggcgauggcacgu

SEQ ID NO: 11873 - RNA, 22 nt, Mycobacterium bovis subsp bovis AF2122/97
ggccagggccgacggcacaucc

SEQ ID NO: 11874 - RNA, 22 nt, Mycobacterium bovis subsp bovis AF2122/97
ggccacucguccggcgauggcg

SEQ ID NO: 11875 - RNA, 23 nt, Mycobacterium bovis subsp bovis AF2122/97
ggccaaggagcacgaccucaacu

SEQ ID NO: 11876 - RNA, 22 nt, Mycobacterium bovis subsp bovis AF2122/97
ggauauugcccuggcgguggcu

SEQ ID NO: 11877 - RNA, 22 nt, Mycobacterium bovis subsp bovis AF2122/97
ggcaacaccuuucccccuucga

SEQ ID NO: 11878 - RNA, 22 nt, Mycobacterium bovis subsp bovis AF2122/97
ggcagcgcccgggucaccagcc

SEQ ID NO: 11879 - RNA, 22 nt, Mycobacterium bovis subsp bovis AF2122/97
ggcagagccagcgcacggaaau

SEQ ID NO: 11880 - RNA, 22 nt, Mycobacterium bovis subsp bovis AF2122/97
gcuggccagggcguuuccgcuc

SEQ ID NO: 11881 - RNA, 22 nt, Mycobacterium bovis subsp bovis AF2122/97
gcugcgucgggccucggaaugg

SEQ ID NO: 11882 - RNA, 22 nt, Mycobacterium bovis subsp bovis AF2122/97
gcuggccuuacugcccgacguc

SEQ ID NO: 11883 - RNA, 22 nt, Mycobacterium bovis subsp bovis AF2122/97
gcuuuuaugacugcucggcggg

SEQ ID NO: 11884 - RNA, 22 nt, Mycobacterium bovis subsp bovis AF2122/97
gcuuaugugacgacccccagcg

SEQ ID NO: 11885 - RNA, 22 nt, Mycobacterium bovis subsp bovis AF2122/97
gggcuacaccucgacgaggccg

SEQ ID NO: 11886 - RNA, 22 nt, Mycobacterium bovis subsp bovis AF2122/97
gggcgggucagggccugcacga

SEQ ID NO: 11887 - RNA, 22 nt, Mycobacterium bovis subsp bovis AF2122/97
ggguggugaaguuggcggccgg

SEQ ID NO: 11888 - RNA, 22 nt, Mycobacterium bovis subsp bovis AF2122/97
gggugguggucgccaacgccga

SEQ ID NO: 11889 - RNA, 22 nt, Mycobacterium bovis subsp bovis AF2122/97
gggguuggugauguagccgaua

SEQ ID NO: 11890 - RNA, 22 nt, Mycobacterium bovis subsp bovis AF2122/97
ggucagcacgcaugugcggugg

SEQ ID NO: 11891 - RNA, 22 nt, Mycobacterium bovis subsp bovis AF2122/97
ggucgugguggugcucaacucg

SEQ ID NO: 11892 - RNA, 22 nt, Mycobacterium bovis subsp bovis AF2122/97
gguggcgcacaucgccgugcac

SEQ ID NO: 11893 - RNA, 22 nt, Mycobacterium bovis subsp bovis AF2122/97
gguggcguggucgccgaugucc

SEQ ID NO: 11894 - RNA, 22 nt, Mycobacterium bovis subsp bovis AF2122/97
guaggucagggcguauuugucg

SEQ ID NO: 11895 - RNA, 22 nt, Mycobacterium bovis subsp bovis AF2122/97
gugaaauugaaaacgccguugc

SEQ ID NO: 11896 - RNA, 22 nt, Mycobacterium bovis subsp bovis AF2122/97
gucauugcgucauuuccuucga

SEQ ID NO: 11897 - RNA, 22 nt, Mycobacterium bovis subsp bovis AF2122/97
guccaagcaggcgaucggccgg

SEQ ID NO: 11898 - RNA, 22 nt, Mycobacterium bovis subsp bovis AF2122/97
gucgcuggugggaucgcagcgc

SEQ ID NO: 11899 - RNA, 22 nt, Mycobacterium bovis subsp bovis AF2122/97
guugaccagcacgacugcaucg

SEQ ID NO: 11900 - RNA, 22 nt, Mycobacterium bovis subsp bovis AF2122/97
guugaucagcuuguugagcugc

SEQ ID NO: 11901 - RNA, 21 nt, Mycobacterium bovis subsp bovis AF2122/97
guugguggacagcgcuucccg

SEQ ID NO: 11902 - RNA, 22 nt, Mycobacterium bovis subsp bovis AF2122/97
guugugaagacgccauucgcag

SEQ ID NO: 11903 - RNA, 22 nt, Mycobacterium bovis subsp bovis AF2122/97
guuucgggcgauuuugcguccu

SEQ ID NO: 11904 - RNA, 21 nt, Mycobacterium bovis subsp bovis AF2122/97
guuaggaucaucugcgccgcu

SEQ ID NO: 11905 - RNA, 22 nt, Mycobacterium bovis subsp bovis AF2122/97
guucauucccgaggugcugagc

SEQ ID NO: 11906 - RNA, 22 nt, Mycobacterium bovis subsp bovis AF2122/97
gugguggucuccagcgcgcucg

SEQ ID NO: 11907 - RNA, 22 nt, Mycobacterium bovis subsp bovis AF2122/97
guuuggcgcgcccacagcccgg

SEQ ID NO: 11908 - RNA, 22 nt, Mycobacterium bovis subsp bovis AF2122/97
guuuucagcguguaggaggugu

SEQ ID NO: 11909 - RNA, 22 nt, Mycobacterium bovis subsp bovis AF2122/97
guuuugggccucggcgagccga

SEQ ID NO: 11910 - RNA, 22 nt, Mycobacterium bovis subsp bovis AF2122/97
gugcuuucagcuugucucgacg

SEQ ID NO: 11911 - RNA, 22 nt, Mycobacterium bovis subsp bovis AF2122/97
gugcugggcaucaaccaggauc

SEQ ID NO: 11912 - RNA, 22 nt, Mycobacterium bovis subsp bovis AF2122/97
gugguggccaacuuccugcucg

SEQ ID NO: 11913 - RNA, 22 nt, Mycobacterium bovis subsp bovis AF2122/97
guggccaaggccaggucggccg

SEQ ID NO: 11914 - RNA, 22 nt, Mycobacterium bovis subsp bovis AF2122/97
gcugccccgcgagcuggugcug

SEQ ID NO: 11915 - RNA, 22 nt, Mycobacterium bovis subsp bovis AF2122/97
gcugaaccugauccucaagggc

SEQ ID NO: 11916 - RNA, 22 nt, Mycobacterium bovis subsp bovis AF2122/97
gcguggucggaugcaggccagc

SEQ ID NO: 11917 - RNA, 22 nt, Mycobacterium bovis subsp bovis AF2122/97
gcggcaugcgcgaucugcagag

SEQ ID NO: 11918 - RNA, 22 nt, Mycobacterium bovis subsp bovis AF2122/97
gcggccaacgaggcagcggcgg

SEQ ID NO: 11919 - RNA, 22 nt, Mycobacterium bovis subsp bovis AF2122/97
gcucaugucgccguagaccggg

SEQ ID NO: 11920 - RNA, 22 nt, Mycobacterium bovis subsp bovis AF2122/97
gcgcgcccgacgggcggugauc

SEQ ID NO: 11921 - RNA, 22 nt, Mycobacterium bovis subsp bovis AF2122/97
gcgccagugcugcgcgugcaca

SEQ ID NO: 11922 - RNA, 22 nt, Mycobacterium bovis subsp bovis AF2122/97
gcgcuuggccggcagcgagacc

SEQ ID NO: 11923 - RNA, 22 nt, Mycobacterium bovis subsp bovis AF2122/97
gccuggugcaccggucgccggg

SEQ ID NO: 11924 - RNA, 22 nt, Mycobacterium bovis subsp bovis AF2122/97
gccugguguccgagcggcccuu

SEQ ID NO: 11925 - RNA, 22 nt, Mycobacterium bovis subsp bovis AF2122/97
gccuugaauucgccccggccug

SEQ ID NO: 11926 - RNA, 22 nt, Mycobacterium bovis subsp bovis AF2122/97
gcgcacgcccuugcgcugcaau

SEQ ID NO: 11927 - RNA, 22 nt, Mycobacterium bovis subsp bovis AF2122/97
gcgcagcagcgacaggguggcg

SEQ ID NO: 11928 - RNA, 21 nt, Mycobacterium bovis subsp bovis AF2122/97
gcgcagcaucucagccagugc

SEQ ID NO: 11929 - RNA, 22 nt, Mycobacterium bovis subsp bovis AF2122/97
gcgccgccggggaucccgaccu

SEQ ID NO: 11930 - RNA, 22 nt, Mycobacterium bovis subsp bovis AF2122/97
gccagguugacguugguuucgg

SEQ ID NO: 11931 - RNA, 22 nt, Mycobacterium bovis subsp bovis AF2122/97
gccucagcguugcggcggguac

SEQ ID NO: 11932 - RNA, 22 nt, Mycobacterium bovis subsp bovis AF2122/97
gccgaagccgaccggcccagcg

SEQ ID NO: 11933 - RNA, 22 nt, Mycobacterium bovis subsp bovis AF2122/97
gcacggccaaaggcaucgccga

SEQ ID NO: 11934 - RNA, 22 nt, Mycobacterium bovis subsp bovis AF2122/97
gcacggccuccggaccgagcaa

SEQ ID NO: 11935 - RNA, 22 nt, Mycobacterium bovis subsp bovis AF2122/97
gcagacacggcggugacgcgag

SEQ ID NO: 11936 - RNA, 22 nt, Mycobacterium bovis subsp bovis AF2122/97
gcagcgugaucaccgaaccugg

SEQ ID NO: 11937 - RNA, 22 nt, Mycobacterium bovis subsp bovis AF2122/97
gcccagagugcgcaggcucucg

SEQ ID NO: 11938 - RNA, 22 nt, Mycobacterium bovis subsp bovis AF2122/97
gccaggcuagguacuggguugc

SEQ ID NO: 11939 - RNA, 22 nt, Mycobacterium bovis subsp bovis AF2122/97
gccagcaccaucugcgaucccg

SEQ ID NO: 11940 - RNA, 22 nt, Mycobacterium bovis subsp bovis AF2122/97
gccagcacgucacgcaggccga

SEQ ID NO: 11941 - RNA, 21 nt, Mycobacterium bovis subsp bovis AF2122/97
gccaacucaggcggacgaauc

SEQ ID NO: 11942 - RNA, 22 nt, Mycobacterium bovis subsp bovis AF2122/97
gccacucggggccgcugcggcc

SEQ ID NO: 11943 - RNA, 22 nt, Mycobacterium bovis subsp bovis AF2122/97
gcauggcagcaggcccgucccg

SEQ ID NO: 11944 - RNA, 21 nt, Mycobacterium bovis subsp bovis AF2122/97
gccagcauggucgaggaugca

SEQ ID NO: 11945 - RNA, 22 nt, Mycobacterium bovis subsp bovis AF2122/97
gaauacaucggugucggcggcc

SEQ ID NO: 11946 - RNA, 22 nt, Mycobacterium bovis subsp bovis AF2122/97
gaaucauugcccggcuccuggc

SEQ ID NO: 11947 - RNA, 22 nt, Mycobacterium bovis subsp bovis AF2122/97
gacaaaguuccacccgccgucc

SEQ ID NO: 11948 - RNA, 22 nt, Mycobacterium bovis subsp bovis AF2122/97
gaggggcagcucggcuccgcgu

SEQ ID NO: 11949 - RNA, 22 nt, Mycobacterium bovis subsp bovis AF2122/97
gaucucugcgggguaguucggc

SEQ ID NO: 11950 - RNA, 22 nt, Mycobacterium bovis subsp bovis AF2122/97
gaugacagcgaggugcacucgg

SEQ ID NO: 11951 - RNA, 22 nt, Mycobacterium bovis subsp bovis AF2122/97
gagcaugggcguggacguuguc

SEQ ID NO: 11952 - RNA, 23 nt, Mycobacterium bovis subsp bovis AF2122/97
gauguuaacgcgagucagacaug

SEQ ID NO: 11953 - RNA, 22 nt, Mycobacterium bovis subsp bovis AF2122/97
gaguaccugcaggugccgucgc

SEQ ID NO: 11954 - RNA, 22 nt, Homo sapiens
ugaacagcacguuuauucagaa

SEQ ID NO: 11955 - RNA, 22 nt, Homo sapiens
cuuugauuauaaaaggguguuu

SEQ ID NO: 11956 - RNA, 22 nt, Homo sapiens
ugcagugucaauaauaauuagu

SEQ ID NO: 11957 - RNA, 22 nt, Homo sapiens
ugacuaggaaauuagaacuuuu

SEQ ID NO: 11958 - RNA, 22 nt, Homo sapiens
uaucaacaggguggccagugua

SEQ ID NO: 11959 - RNA, 22 nt, Homo sapiens
uaauccuagcacuuuggaagac

SEQ ID NO: 11960 - RNA, 22 nt, Homo sapiens
augguauggaaggucuggagga

SEQ ID NO: 11961 - RNA, 22 nt, Homo sapiens
cuuuuggcuuagaauugucuug

SEQ ID NO: 11962 - RNA, 22 nt, Homo sapiens
aagagaugaagguccugacugu

SEQ ID NO: 11963 - RNA, 22 nt, Homo sapiens
ugagaugugaucaccugaaggg

SEQ ID NO: 11964 - RNA, 22 nt, Homo sapiens
cugauugucaucaauauuauua

SEQ ID NO: 11965 - RNA, 22 nt, Homo sapiens
aaaggcuucggaucagaaggua

SEQ ID NO: 11966 - RNA, 22 nt, Homo sapiens
guacaguaguaaaagugaauga

SEQ ID NO: 11967 - RNA, 22 nt, Homo sapiens
uaucccaauguaauaucacaaa

SEQ ID NO: 11968 - RNA, 22 nt, Homo sapiens
aucccuuucugauacuuucccu

SEQ ID NO: 11969 - RNA, 22 nt, Homo sapiens
caugcauuggucuauuauguga

SEQ ID NO: 11970 - RNA, 22 nt, Homo sapiens
aggaucauugacuauuauaagg

SEQ ID NO: 11971 - RNA, 22 nt, Homo sapiens
uugagaugauggauaugcuaau

SEQ ID NO: 11972 - RNA, 22 nt, Homo sapiens
uucccuuucugccuugaaucuu

SEQ ID NO: 11973 - RNA, 22 nt, Homo sapiens
gcagagaaacaggucuaaggag

SEQ ID NO: 11974 - RNA, 22 nt, Homo sapiens
uaagugaaggaaguguguuuac

SEQ ID NO: 11975 - RNA, 22 nt, Homo sapiens
gugucaugagggggacaggaag

SEQ ID NO: 11976 - RNA, 22 nt, Homo sapiens
guggaaaacauaugcuuguuga

SEQ ID NO: 11977 - RNA, 22 nt, Homo sapiens
ucucauggagucaggagcagaa

SEQ ID NO: 11978 - RNA, 22 nt, Homo sapiens
ugcuuguguucagguaaccuuu

SEQ ID NO: 11979 - RNA, 22 nt, Homo sapiens
uauacugucuuuguaugccuag

SEQ ID NO: 11980 - RNA, 22 nt, Homo sapiens
uguaacacacacuguuuacucc

SEQ ID NO: 11981 - RNA, 22 nt, Homo sapiens
uuggaaaaauccaccuugaucu

SEQ ID NO: 11982 - RNA, 22 nt, Homo sapiens
auggcuuuuuaaaucauguugu

SEQ ID NO: 11983 - RNA, 22 nt, Homo sapiens
agaucauaugcaguaaugaacu

SEQ ID NO: 11984 - RNA, 22 nt, Homo sapiens
aauacuggcacugaagaccaug

SEQ ID NO: 11985 - RNA, 17 nt, Homo sapiens
augugaauguucaaaua

SEQ ID NO: 11986 - RNA, 22 nt, Homo sapiens
cuuguggugcuuuuacgugggc

SEQ ID NO: 11987 - RNA, 22 nt, Homo sapiens
auaugcauacauguaugcagga

SEQ ID NO: 11988 - RNA, 22 nt, Homo sapiens
auucaaagugcauguucccacu

SEQ ID NO: 11989 - RNA, 22 nt, Homo sapiens
gugaaagacagcauuaauggcu

SEQ ID NO: 11990 - RNA, 19 nt, Homo sapiens
gaucuguugaucaaugugu

SEQ ID NO: 11991 - RNA, 22 nt, Homo sapiens
uggauaguaauaaacauauagg

SEQ ID NO: 11992 - RNA, 22 nt, Homo sapiens
uguauguuguaagacuuagacc

SEQ ID NO: 11993 - RNA, 22 nt, Homo sapiens
uucauagucuaugcaaguaaga

SEQ ID NO: 11994 - RNA, 22 nt, Homo sapiens
augagauauguuaaaaguuaaa

SEQ ID NO: 11995 - RNA, 22 nt, Homo sapiens
agugcauuugcaucucaauaua

SEQ ID NO: 11996 - RNA, 22 nt, Homo sapiens
caaaagugauugcgguuuuugc

SEQ ID NO: 11997 - RNA, 18 nt, Homo sapiens
ccauucaacagauuuguc

SEQ ID NO: 11998 - RNA, 19 nt, Homo sapiens
uuugcauagugagaauaua

SEQ ID NO: 11999 - RNA, 18 nt, Homo sapiens
ucacagguaaaguugaca

SEQ ID NO: 12000 - RNA, 22 nt, Homo sapiens
auggaauguaaguuauguuugc

SEQ ID NO: 12001 - RNA, 22 nt, Homo sapiens
uuucccuuuagcuuagugauuu

SEQ ID NO: 12002 - RNA, 22 nt, Homo sapiens
uaaguaaaugaaagguugauuu

SEQ ID NO: 12003 - RNA, 22 nt, Homo sapiens
uugugaaugaugucgcaguaaa

SEQ ID NO: 12004 - RNA, 22 nt, Homo sapiens
cagugcuuguuauuguucuauu

SEQ ID NO: 12005 - RNA, 20 nt, Homo sapiens
gucugucuccgaguagaauu

SEQ ID NO: 12006 - RNA, 22 nt, Homo sapiens
uuugaauggaaguuuugugaaa

SEQ ID NO: 12007 - RNA, 22 nt, Homo sapiens
uuuuggcucugucuguaucuuu

SEQ ID NO: 12008 - RNA, 22 nt, Homo sapiens
uugagauguaagauguuaauau

SEQ ID NO: 12009 - RNA, 22 nt, Homo sapiens
uaaagugaggauggcaguaggu

SEQ ID NO: 12010 - RNA, 22 nt, Homo sapiens
aagggaauguuguggcugguuu

SEQ ID NO: 12011 - RNA, 22 nt, Homo sapiens
acauaguagacacugaaaauau

SEQ ID NO: 12012 - RNA, 22 nt, Homo sapiens
ugugaauguaagaaaauccaac

SEQ ID NO: 12013 - RNA, 22 nt, Homo sapiens
aauaauggcaccaaagcacaag

SEQ ID NO: 12014 - RNA, 22 nt, Homo sapiens
uucauguaauauuucacagcuu

SEQ ID NO: 12015 - RNA, 22 nt, Homo sapiens
uuuguauguuggagauuggaga

SEQ ID NO: 12016 - RNA, 21 nt, Homo sapiens
ugcuuuggucauacuucuucc

SEQ ID NO: 12017 - RNA, 22 nt, Homo sapiens
aaaugcuuucuuggaccauuug

SEQ ID NO: 12018 - RNA, 22 nt, Homo sapiens
ugauuuguuucaggaguuuucu

SEQ ID NO: 12019 - RNA, 22 nt, Homo sapiens
auagcacaugugcaaauggcug

SEQ ID NO: 12020 - RNA, 22 nt, Homo sapiens
ucagcagugugaaaacaaacua

SEQ ID NO: 12021 - RNA, 22 nt, Homo sapiens
acuuuuugaugaggucguuugu

SEQ ID NO: 12022 - RNA, 22 nt, Homo sapiens
augcagugugcaacagauuaag

SEQ ID NO: 12023 - RNA, 22 nt, Homo sapiens
uggaagucuucauuauguauag

SEQ ID NO: 12024 - RNA, 22 nt, Homo sapiens
gcuguguugugcccagcaucau

SEQ ID NO: 12025 - RNA, 22 nt, Homo sapiens
aagugacauugugcccauuuga

SEQ ID NO: 12026 - RNA, 22 nt, Homo sapiens
auacacgguaggcacauauuua

SEQ ID NO: 12027 - RNA, 22 nt, Homo sapiens
caagugaauaguugcucucaga

SEQ ID NO: 12028 - RNA, 22 nt, Homo sapiens
ucagucuuuuuuuggcaagcau

SEQ ID NO: 12029 - RNA, 22 nt, Homo sapiens
augugaacaucauagaaugcac

SEQ ID NO: 12030 - RNA, 22 nt, Homo sapiens
gugacaguggagacuuacuuca

SEQ ID NO: 12031 - RNA, 22 nt, Homo sapiens
guaaauaccaguuucuggaaca

SEQ ID NO: 12032 - RNA, 22 nt, Homo sapiens
aguguuuuuaacaagaaagggu

SEQ ID NO: 12033 - RNA, 22 nt, Homo sapiens
auuccuuaggcccuuugguuag

SEQ ID NO: 12034 - RNA, 22 nt, Homo sapiens
ugagaugaagugauguaaaaca

SEQ ID NO: 12035 - RNA, 22 nt, Homo sapiens
cuucuugagacuuaggcuuugg

SEQ ID NO: 12036 - RNA, 22 nt, Homo sapiens
ugaaaguuauauugugaaauuc

SEQ ID NO: 12037 - RNA, 22 nt, Homo sapiens
aaaucccuugcucucucagacc

SEQ ID NO: 12038 - RNA, 22 nt, Homo sapiens
augaagucguuacuaccaauug

SEQ ID NO: 12039 - RNA, 20 nt, Homo sapiens
uggcaccugacagauagcca

SEQ ID NO: 12040 - RNA, 22 nt, Homo sapiens
ugguauguaugauuaacaugga

SEQ ID NO: 12041 - RNA, 22 nt, Homo sapiens
uauuccauuugugaaaggaagu

SEQ ID NO: 12042 - RNA, 22 nt, Homo sapiens
ugaaagcuacaggaaaguauuu

SEQ ID NO: 12043 - RNA, 22 nt, Homo sapiens
gugacagucaaagacaugacuu

SEQ ID NO: 12044 - RNA, 22 nt, Homo sapiens
uauacagcaaguuacugugcug

SEQ ID NO: 12045 - RNA, 17 nt, Homo sapiens
ugcaauuuaagcuagau

SEQ ID NO: 12046 - RNA, 18 nt, Homo sapiens
ucuggcuucuuuguucca

SEQ ID NO: 12047 - RNA, 22 nt, Homo sapiens
uugucauuuucagaguguuacg

SEQ ID NO: 12048 - RNA, 22 nt, Homo sapiens
agguagcauagcgggaauauca

SEQ ID NO: 12049 - RNA, 22 nt, Homo sapiens
uuggcagugcccgaugcugggg

SEQ ID NO: 12050 - RNA, 22 nt, Homo sapiens
aaguauguaucaagucauacuu

SEQ ID NO: 12051 - RNA, 22 nt, Homo sapiens
gugccuuuucugagcaaugagc

SEQ ID NO: 12052 - RNA, 22 nt, Homo sapiens
ugagaugugaagaucacaugaa

SEQ ID NO: 12053 - RNA, 22 nt, Homo sapiens
accaugcaguccaauaugcaca

SEQ ID NO: 12054 - RNA, 22 nt, Homo sapiens
aauuacauggcaauugggaaau

SEQ ID NO: 12055 - RNA, 22 nt, Homo sapiens
uuggcuuggagaguugaaaugu

SEQ ID NO: 12056 - RNA, 22 nt, Homo sapiens
uagcagcauaaauggacuaaga

SEQ ID NO: 12057 - RNA, 22 nt, Homo sapiens
agcugugucuucuuaaagauuu

SEQ ID NO: 12058 - RNA, 22 nt, Homo sapiens
uuucuauguugaccagucuaga

SEQ ID NO: 12059 - RNA, 22 nt, Homo sapiens
agaauguauauucuguaguugu

SEQ ID NO: 12060 - RNA, 22 nt, Homo sapiens
uaagugaauauggacaguuagc

SEQ ID NO: 12061 - RNA, 22 nt, Homo sapiens
uuacaugucuugguaagguuag

SEQ ID NO: 12062 - RNA, 22 nt, Homo sapiens
uggaaguagauagauuguguca

SEQ ID NO: 12063 - RNA, 22 nt, Homo sapiens
augaggauagguuucuauuagg

SEQ ID NO: 12064 - RNA, 17 nt, Homo sapiens
ugacagaaacuuguugu

SEQ ID NO: 12065 - RNA, 22 nt, Homo sapiens
uaugcuuauaaacauuugucag

SEQ ID NO: 12066 - RNA, 22 nt, Homo sapiens
auacaguugccauuucuugugc

SEQ ID NO: 12067 - RNA, 22 nt, Homo sapiens
uagaaugucagcuucuugaggg

SEQ ID NO: 12068 - RNA, 22 nt, Homo sapiens
uuuccagguggccaacauuuua

SEQ ID NO: 12069 - RNA, 22 nt, Homo sapiens
gcagcacauggcagaacauauu

SEQ ID NO: 12070 - RNA, 22 nt, Homo sapiens
uaggcagccagcuguggauuga

SEQ ID NO: 12071 - RNA, 22 nt, Homo sapiens
ugcaguuuaggaacugguaaca

SEQ ID NO: 12072 - RNA, 22 nt, Homo sapiens
ucagaguagcugucugaggugc

SEQ ID NO: 12073 - RNA, 20 nt, Homo sapiens
ucaucaguuggugcucgcug

SEQ ID NO: 12074 - RNA, 22 nt, Homo sapiens
acuccauuucauuuuagcucuu

SEQ ID NO: 12075 - RNA, 22 nt, Homo sapiens
agaugauguuuacugagcauca

SEQ ID NO: 12076 - RNA, 22 nt, Homo sapiens
gagcacugauuuauuuuugucu

SEQ ID NO: 12077 - RNA, 22 nt, Homo sapiens
cacagaauucauuggauuaccu

SEQ ID NO: 12078 - RNA, 22 nt, Homo sapiens
uggaaguauagauaauugaaag

SEQ ID NO: 12079 - RNA, 22 nt, Homo sapiens
cucaguuuugccuuguuuaagg

SEQ ID NO: 12080 - RNA, 18 nt, Homo sapiens
aaacugcuuccuuggccu

SEQ ID NO: 12081 - RNA, 22 nt, Homo sapiens
ugguccuuuccauuggagacac

SEQ ID NO: 12082 - RNA, 22 nt, Homo sapiens
cuuuuggcuuaagauugucuug

SEQ ID NO: 12083 - RNA, 22 nt, Homo sapiens
uaaauggauauugccaucuccu

SEQ ID NO: 12084 - RNA, 22 nt, Homo sapiens
acaaaguauggaauguuggugu

SEQ ID NO: 12085 - RNA, 22 nt, Homo sapiens
ugcaaaugcugcuauuucucuu

SEQ ID NO: 12086 - RNA, 22 nt, Homo sapiens
uaaaagucaucacaacuggagu

SEQ ID NO: 12087 - RNA, 22 nt, Homo sapiens
ugagauuauauuucuuaacaga

SEQ ID NO: 12088 - RNA, 20 nt, Homo sapiens
cuuggcuuucuugguguuaa

SEQ ID NO: 12089 - RNA, 22 nt, Homo sapiens
gugguuuuuaaaguaccugugg

SEQ ID NO: 12090 - RNA, 22 nt, Homo sapiens
augucaaagaggaaaacuggau

SEQ ID NO: 12091 - RNA, 22 nt, Homo sapiens
guuggaauguauugcuacuucu

SEQ ID NO: 12092 - RNA, 22 nt, Homo sapiens
auuacacuuucuauucaaugag

SEQ ID NO: 12093 - RNA, 22 nt, Homo sapiens
ugacagguuggaauuaugggag

SEQ ID NO: 12094 - RNA, 22 nt, Homo sapiens
uuaucauagugcaguuuucuga

SEQ ID NO: 12095 - RNA, 22 nt, Homo sapiens
auguagugugauuuucacuaga

SEQ ID NO: 12096 - RNA, 22 nt, Homo sapiens
ucagugcuuuuuguugucauca

SEQ ID NO: 12097 - RNA, 22 nt, Homo sapiens
uauagcuaugggauguauuugc

SEQ ID NO: 12098 - RNA, 18 nt, Homo sapiens
ugcauacuaucugauuuu

SEQ ID NO: 12099 - RNA, 22 nt, Homo sapiens
uugugaauggugccgcgauaaa

SEQ ID NO: 12100 - RNA, 22 nt, Homo sapiens
uguaauuuaaaugauccuugga

SEQ ID NO: 12101 - RNA, 22 nt, Homo sapiens
ucauaguagucacuuaauaaau

SEQ ID NO: 12102 - RNA, 20 nt, Homo sapiens
uggaguuugaguucuuggag

SEQ ID NO: 12103 - RNA, 22 nt, Homo sapiens
augagaugcaagauuagauggg

SEQ ID NO: 12104 - RNA, 22 nt, Homo sapiens
ugugguuuuucacauuuagaga

SEQ ID NO: 12105 - RNA, 22 nt, Homo sapiens
gagcaucaguggccucaucuca

SEQ ID NO: 12106 - RNA, 22 nt, Homo sapiens
uagcaguaucccaccaucuggu

SEQ ID NO: 12107 - RNA, 22 nt, Homo sapiens
auggaauguauagucauguagg

SEQ ID NO: 12108 - RNA, 22 nt, Homo sapiens
agugacaugggaucaaaucuga

SEQ ID NO: 12109 - RNA, 22 nt, Homo sapiens
aagucaaggagagaagcuucag

SEQ ID NO: 12110 - RNA, 22 nt, Homo sapiens
auuacaugucuauccaugaaca

SEQ ID NO: 12111 - RNA, 22 nt, Homo sapiens
gagaacugagauaagugauauu

SEQ ID NO: 12112 - RNA, 22 nt, Homo sapiens
augucuggcagaagacuucuca

SEQ ID NO: 12113 - RNA, 22 nt, Homo sapiens
aaucccuuuguccagucucuuu

SEQ ID NO: 12114 - RNA, 22 nt, Homo sapiens
gaaucaauugaucuaugugucu

SEQ ID NO: 12115 - RNA, 22 nt, Homo sapiens
uugaguuugaguauucuaaagc

SEQ ID NO: 12116 - RNA, 22 nt, Homo sapiens
ucacugugugucucuguaucug

SEQ ID NO: 12117 - RNA, 22 nt, Homo sapiens
uugacauaaucauuucacagug

SEQ ID NO: 12118 - RNA, 22 nt, Homo sapiens
aaacugcuuuccaugguggcug

SEQ ID NO: 12119 - RNA, 22 nt, Homo sapiens
uaagucacuccagguuaaagug

SEQ ID NO: 12120 - RNA, 22 nt, Homo sapiens
uugugcauaucagagguuugcu

SEQ ID NO: 12121 - RNA, 22 nt, Homo sapiens
uuggaaauguguuugcauucag

SEQ ID NO: 12122 - RNA, 22 nt, Homo sapiens
auugcuauuauuugaccauugu

SEQ ID NO: 12123 - RNA, 23 nt, Homo sapiens
uugcauagacauccucauagauu

SEQ ID NO: 12124 - RNA, 22 nt, Homo sapiens
augaaauugcuaucgcaguacu

SEQ ID NO: 12125 - RNA, 20 nt, Homo sapiens
auaugcagacacauacauac

SEQ ID NO: 12126 - RNA, 22 nt, Homo sapiens
ucaaaugguccacgugaacauu

SEQ ID NO: 12127 - RNA, 22 nt, Homo sapiens
ugagaugaguugcgcucugucg

SEQ ID NO: 12128 - RNA, 22 nt, Homo sapiens
uucuaaguaauuuugcaugccu

SEQ ID NO: 12129 - RNA, 22 nt, Homo sapiens
uaucucauccuccuugauccca

SEQ ID NO: 12130 - RNA, 22 nt, Homo sapiens
uuaauuguccaaguucaucucu

SEQ ID NO: 12131 - RNA, 22 nt, Homo sapiens
aagacuguaauccaucuugagu

SEQ ID NO: 12132 - RNA, 22 nt, Homo sapiens
uggaauguaacuugaaacuuuu

SEQ ID NO: 12133 - RNA, 19 nt, Homo sapiens
uuuguauguuuccaguaau

SEQ ID NO: 12134 - RNA, 22 nt, Homo sapiens
ugagaaugacugggcaugcugc

SEQ ID NO: 12135 - RNA, 22 nt, Homo sapiens
uagcaccucuuuggccuuucgu

SEQ ID NO: 12136 - RNA, 22 nt, Homo sapiens
auguguucaucacagcacaauu

SEQ ID NO: 12137 - RNA, 22 nt, Homo sapiens
aaguacuguuuaaauugcagaa

SEQ ID NO: 12138 - RNA, 22 nt, Homo sapiens
cuguaauguaaugagacuacau

SEQ ID NO: 12139 - RNA, 22 nt, Homo sapiens
uugaaagacaucaccuacugcu

SEQ ID NO: 12140 - RNA, 22 nt, Homo sapiens
uuguaaaguucucucccgaaaa

SEQ ID NO: 12141 - RNA, 22 nt, Homo sapiens
uucucaauggcaacuuguugcu

SEQ ID NO: 12142 - RNA, 22 nt, Homo sapiens
ugucaguuucuugagauggaac

SEQ ID NO: 12143 - RNA, 22 nt, Homo sapiens
auucagaggggcagcugucuug

SEQ ID NO: 12144 - RNA, 22 nt, Homo sapiens
augaguauguucuguauuuuca

SEQ ID NO: 12145 - RNA, 22 nt, Homo sapiens
uuuuaguggaauauuuacaguu

SEQ ID NO: 12146 - RNA, 22 nt, Homo sapiens
uuucccauuguucugcucugug

SEQ ID NO: 12147 - RNA, 18 nt, Homo sapiens
uccaguuuucccagcauc

SEQ ID NO: 12148 - RNA, 22 nt, Homo sapiens
uugugcaugaugcauacauggu

SEQ ID NO: 12149 - RNA, 22 nt, Homo sapiens
uaaauggauaaaugaauaccua

SEQ ID NO: 12150 - RNA, 22 nt, Homo sapiens
cugugcaaagcgcucucggggu

SEQ ID NO: 12151 - RNA, 16 nt, Homo sapiens
gugcuguguuguuagg

SEQ ID NO: 12152 - RNA, 22 nt, Homo sapiens
ugaauguaagaugucugcuggu

SEQ ID NO: 12153 - RNA, 21 nt, Homo sapiens
aauacucuagguuaagagagc

SEQ ID NO: 12154 - RNA, 22 nt, Homo sapiens
ugagaacaugcacuugagguug

SEQ ID NO: 12155 - RNA, 19 nt, Homo sapiens
cuaaguccccuugauuaga

SEQ ID NO: 12156 - RNA, 22 nt, Homo sapiens
caacaguaaagcauuuuuaagu

SEQ ID NO: 12157 - RNA, 22 nt, Homo sapiens
uugaaagucuaggcuuacagua

SEQ ID NO: 12158 - RNA, 18 nt, Homo sapiens
guaaauguaucuauugcc

SEQ ID NO: 12159 - RNA, 22 nt, Homo sapiens
uucccugagcaucuguugagcc

SEQ ID NO: 12160 - RNA, 22 nt, Homo sapiens
gagcugaucuuuucugauucca

SEQ ID NO: 12161 - RNA, 22 nt, Homo sapiens
gagaaugaugauuuccaauuuc

SEQ ID NO: 12162 - RNA, 22 nt, Homo sapiens
ugucauguuucuacugaccaaa

SEQ ID NO: 12163 - RNA, 22 nt, Homo sapiens
agaugcauugguggcauauuca

SEQ ID NO: 12164 - RNA, 22 nt, Homo sapiens
gugguuuuuuucugccuuauag

SEQ ID NO: 12165 - RNA, 22 nt, Homo sapiens
ucagcagugugaaaauggacua

SEQ ID NO: 12166 - RNA, 22 nt, Homo sapiens
gagaacauuuaagccacucagg

SEQ ID NO: 12167 - RNA, 22 nt, Homo sapiens
auacuguauaggauuguagccu

SEQ ID NO: 12168 - RNA, 22 nt, Homo sapiens
uggagugagaacuucaaugaug

SEQ ID NO: 12169 - RNA, 22 nt, Homo sapiens
uugugaauggugccucaguaaa

SEQ ID NO: 12170 - RNA, 22 nt, Homo sapiens
uaaguauuaugugcugcauuuu

SEQ ID NO: 12171 - RNA, 22 nt, Homo sapiens
uaucaguauggauucauggauu

SEQ ID NO: 12172 - RNA, 22 nt, Homo sapiens
cugauacugagaccuuggguua

SEQ ID NO: 12173 - RNA, 23 nt, Homo sapiens
ugagauuauaaucuuuuacuucu

SEQ ID NO: 12174 - RNA, 22 nt, Homo sapiens
uaaaugcucuuuaaaagugcuu

SEQ ID NO: 12175 - RNA, 20 nt, Homo sapiens
cuggaugucgaggcagaggu

SEQ ID NO: 12176 - RNA, 22 nt, Homo sapiens
uuucccugaaggcucugaaguc

SEQ ID NO: 12177 - RNA, 22 nt, Homo sapiens
ggagaugauuaugaaucacuua

SEQ ID NO: 12178 - RNA, 22 nt, Homo sapiens
cagagaaugucuuuuuuaacca

SEQ ID NO: 12179 - RNA, 22 nt, Homo sapiens
gagaacauuaauaguuaauuuu

SEQ ID NO: 12180 - RNA, 22 nt, Homo sapiens
uggauggagaggcuugugaugc

SEQ ID NO: 12181 - RNA, 22 nt, Homo sapiens
uagcaguauugaaagaugaggg

SEQ ID NO: 12182 - RNA, 22 nt, Homo sapiens
agguaagaugugacuugguguu

SEQ ID NO: 12183 - RNA, 20 nt, Homo sapiens
ugaugcaaaucuuuaaaagu

SEQ ID NO: 12184 - RNA, 22 nt, Homo sapiens
uuucugagaccaaaacuuguaa

SEQ ID NO: 12185 - RNA, 22 nt, Homo sapiens
augagauacuacaaaugaguuu

SEQ ID NO: 12186 - RNA, 22 nt, Homo sapiens
agcuuguggugaauacugcuag

SEQ ID NO: 12187 - RNA, 22 nt, Homo sapiens
ugaugucuugcaggcacgagau

SEQ ID NO: 12188 - RNA, 22 nt, Homo sapiens
uaucacagugcuggaguauucc

SEQ ID NO: 12189 - RNA, 22 nt, Homo sapiens
caugacacuggcauguuucuuu

SEQ ID NO: 12190 - RNA, 22 nt, Homo sapiens
auagcagugugaaaauugacug

SEQ ID NO: 12191 - RNA, 22 nt, Homo sapiens
cuuucugaggagaauagagaac

SEQ ID NO: 12192 - RNA, 22 nt, Homo sapiens
uugugaaugaugucgcaauaaa

SEQ ID NO: 12193 - RNA, 22 nt, Homo sapiens
aauaaagucugaagugugcuua

SEQ ID NO: 12194 - RNA, 22 nt, Homo sapiens
ucagugucugugauggagaggu

SEQ ID NO: 12195 - RNA, 22 nt, Homo sapiens
agcugauggucuuguaugaugu

SEQ ID NO: 12196 - RNA, 22 nt, Homo sapiens
aagcaggugucugugucuguaa

SEQ ID NO: 12197 - RNA, 22 nt, Homo sapiens
auagcagugugaaaauggacua

SEQ ID NO: 12198 - RNA, 20 nt, Homo sapiens
uggucaccuucaggagguuc

SEQ ID NO: 12199 - RNA, 22 nt, Homo sapiens
auacaagugccauguuggugug

SEQ ID NO: 12200 - RNA, 22 nt, Homo sapiens
uugcaaagaccucuucacuucc

SEQ ID NO: 12201 - RNA, 22 nt, Homo sapiens
uaagcagugcaagaauggaaua

SEQ ID NO: 12202 - RNA, 22 nt, Homo sapiens
uugugaauggugccacaauaaa

SEQ ID NO: 12203 - RNA, 22 nt, Homo sapiens
ugagaugagucucgcucuguca

SEQ ID NO: 12204 - RNA, 18 nt, Homo sapiens
cugccagugugcucuccg

SEQ ID NO: 12205 - RNA, 18 nt, Homo sapiens
uccauuuguaugggaugg

SEQ ID NO: 12206 - RNA, 16 nt, Homo sapiens
aucacuugcuucuuuu

SEQ ID NO: 12207 - RNA, 22 nt, Homo sapiens
uagcaguaaagaaugugauguu

SEQ ID NO: 12208 - RNA, 22 nt, Homo sapiens
aaagugaauguaucccguaagu

SEQ ID NO: 12209 - RNA, 22 nt, Homo sapiens
uuauacucgucugaaugauucu

SEQ ID NO: 12210 - RNA, 22 nt, Homo sapiens
agugauuuuaacuuccagcaau

SEQ ID NO: 12211 - RNA, 22 nt, Homo sapiens
uucaguaaauguucuuacuaua

SEQ ID NO: 12212 - RNA, 22 nt, Homo sapiens
uguagcagccauaaacacagug

SEQ ID NO: 12213 - RNA, 22 nt, Homo sapiens
auccuuuagacuguccaguuga

SEQ ID NO: 12214 - RNA, 22 nt, Homo sapiens
uugcauaagugcauucugugau

SEQ ID NO: 12215 - RNA, 22 nt, Homo sapiens
augggaaaaucagaaggccugg

SEQ ID NO: 12216 - RNA, 22 nt, Homo sapiens
acuggauguuagggauuuuauu

SEQ ID NO: 12217 - RNA, 22 nt, Homo sapiens
uugauauguuguuagauucagu

SEQ ID NO: 12218 - RNA, 22 nt, Homo sapiens
ucuugccacuucauccccuuuc

SEQ ID NO: 12219 - RNA, 22 nt, Homo sapiens
agucaagaaucucagcaucuuu

SEQ ID NO: 12220 - RNA, 22 nt, Homo sapiens
ugagauguggcuagagagguug

SEQ ID NO: 12221 - RNA, 18 nt, Homo sapiens
augaagucaucacuuuua

SEQ ID NO: 12222 - RNA, 18 nt, Homo sapiens
acauucagcuugaagaua

SEQ ID NO: 12223 - RNA, 22 nt, Homo sapiens
auaacucuguuuuuuucaugca

SEQ ID NO: 12224 - RNA, 22 nt, Homo sapiens
uggaauguagcguugacacgag

SEQ ID NO: 12225 - RNA, 22 nt, Homo sapiens
gauguguuuuaggaucucagca

SEQ ID NO: 12226 - RNA, 22 nt, Homo sapiens
ugcuaugucagccaggcugguc

SEQ ID NO: 12227 - RNA, 22 nt, Homo sapiens
acauguaauugauuuuguguua

SEQ ID NO: 12228 - RNA, 22 nt, Homo sapiens
uggcagugggagauauuuuauu

SEQ ID NO: 12229 - RNA, 19 nt, Homo sapiens
uuuugcucuuuauaccuau

SEQ ID NO: 12230 - RNA, 22 nt, Homo sapiens
aagggaaugugguagcugguuu

SEQ ID NO: 12231 - RNA, 22 nt, Homo sapiens
agaacuguccauucagcaugaa

SEQ ID NO: 12232 - RNA, 23 nt, Homo sapiens
uaagucacacagauuaauuuauu

SEQ ID NO: 12233 - RNA, 22 nt, Homo sapiens
uccuucaguccaguggguuuug

SEQ ID NO: 12234 - RNA, 22 nt, Homo sapiens
ugaaagguauagguucuggagg

SEQ ID NO: 12235 - RNA, 22 nt, Homo sapiens
acaguaaugggccccuuuuccu

SEQ ID NO: 12236 - RNA, 22 nt, Homo sapiens
ucuuuggucuacuuucauaugu

SEQ ID NO: 12237 - RNA, 22 nt, Homo sapiens
uggaauaucaugagaguuuguu

SEQ ID NO: 12238 - RNA, 22 nt, Homo sapiens
auggcuauuccauaggcagagc

SEQ ID NO: 12239 - RNA, 21 nt, Homo sapiens
auauggaacuggugacguguu

SEQ ID NO: 12240 - RNA, 22 nt, Homo sapiens
uucuggaaaucagcagagggug

SEQ ID NO: 12241 - RNA, 18 nt, Homo sapiens
aaaaagugcucaggccua

SEQ ID NO: 12242 - RNA, 22 nt, Homo sapiens
aaaagucuguagugaaagguga

SEQ ID NO: 12243 - RNA, 22 nt, Homo sapiens
ugcaugaugcugagauuuggga

SEQ ID NO: 12244 - RNA, 22 nt, Homo sapiens
auaaguauuuggacuuuacugu

SEQ ID NO: 12245 - RNA, 22 nt, Homo sapiens
caaagucuauucuacccuuacc

SEQ ID NO: 12246 - RNA, 22 nt, Homo sapiens
ugaacagucaucucucuuguau

SEQ ID NO: 12247 - RNA, 22 nt, Homo sapiens
ugccuaguagaaggugaacaug

SEQ ID NO: 12248 - RNA, 19 nt, Homo sapiens
ccugcuguucuuuugcacc

SEQ ID NO: 12249 - RNA, 22 nt, Homo sapiens
uuagugaaugcaccacuucuga

SEQ ID NO: 12250 - RNA, 22 nt, Homo sapiens
uugaguuuaucuaaagaccugg

SEQ ID NO: 12251 - RNA, 22 nt, Homo sapiens
ucaucuggcgaaugugaagagu

SEQ ID NO: 12252 - RNA, 22 nt, Homo sapiens
gaauuguacugcaaucagggga

SEQ ID NO: 12253 - RNA, 22 nt, Homo sapiens
ggaaucugaaccaugggaaugg

SEQ ID NO: 12254 - RNA, 22 nt, Homo sapiens
aucagugcauguuuguugagcu

SEQ ID NO: 12255 - RNA, 22 nt, Homo sapiens
uugaauagaagguuuuuuguuc

SEQ ID NO: 12256 - RNA, 20 nt, Homo sapiens
gcugugcuuaauacacuuuc

SEQ ID NO: 12257 - RNA, 22 nt, Homo sapiens
augaaaacaugauuugccuguu

SEQ ID NO: 12258 - RNA, 22 nt, Homo sapiens
acaucccuuucccacccuucac

SEQ ID NO: 12259 - RNA, 22 nt, Homo sapiens
ugguguuugagaagcugauguc

SEQ ID NO: 12260 - RNA, 17 nt, Homo sapiens
uucucaguucugaucuc

SEQ ID NO: 12261 - RNA, 21 nt, Homo sapiens
ugagaugugaccagggcauca

SEQ ID NO: 12262 - RNA, 22 nt, Homo sapiens
uaucacaggucaggaaccuugu

SEQ ID NO: 12263 - RNA, 22 nt, Homo sapiens
ugcuguguugcuggcuuaaaga

SEQ ID NO: 12264 - RNA, 23 nt, Homo sapiens
agcaccuuuccuccacuaucugc

SEQ ID NO: 12265 - RNA, 22 nt, Homo sapiens
gauguguugggaagauuucaag

SEQ ID NO: 12266 - RNA, 22 nt, Homo sapiens
uuuaaagcaugacgagaagaag

SEQ ID NO: 12267 - RNA, 22 nt, Homo sapiens
caauacuguguugaauaagagu

SEQ ID NO: 12268 - RNA, 22 nt, Homo sapiens
uucucaguuccuacuuugguga

SEQ ID NO: 12269 - RNA, 22 nt, Homo sapiens
uaagguccuuaaauguguaacc

SEQ ID NO: 12270 - RNA, 22 nt, Homo sapiens
gcaaugcugucugugcacagau

SEQ ID NO: 12271 - RNA, 22 nt, Homo sapiens
uuuuaguggacaaagguauuua

SEQ ID NO: 12272 - RNA, 22 nt, Homo sapiens
uagaauggaaggcauguuugcc

SEQ ID NO: 12273 - RNA, 22 nt, Homo sapiens
cugagauggagucucgcauugu

SEQ ID NO: 12274 - RNA, 22 nt, Homo sapiens
uacaugcaugggcaugugugca

SEQ ID NO: 12275 - RNA, 22 nt, Homo sapiens
gcaaagaaugcagauuugccuc

SEQ ID NO: 12276 - RNA, 21 nt, Homo sapiens
auuguauguaaaccaaaugag

SEQ ID NO: 12277 - RNA, 20 nt, Homo sapiens
cuccuucauuccuuuggacc

SEQ ID NO: 12278 - RNA, 22 nt, Homo sapiens
uugugaaugaugccgcaauaaa

SEQ ID NO: 12279 - RNA, 22 nt, Homo sapiens
uugugaauggugccgcaguaaa

SEQ ID NO: 12280 - RNA, 22 nt, Homo sapiens
uaaagcuuagauccaugguggc

SEQ ID NO: 12281 - RNA, 22 nt, Homo sapiens
ggagaauguaauugguauuuug

SEQ ID NO: 12282 - RNA, 22 nt, Homo sapiens
uugaaagaaaggagacugaguu

SEQ ID NO: 12283 - RNA, 22 nt, Homo sapiens
guguauauccuauuaguucugu

SEQ ID NO: 12284 - RNA, 22 nt, Homo sapiens
ugauggcaauggcauucauuuu

SEQ ID NO: 12285 - RNA, 21 nt, Homo sapiens
uaaagcuuagcuauaguggcu

SEQ ID NO: 12286 - RNA, 22 nt, Homo sapiens
augugcaacugcuggaacaguc

SEQ ID NO: 12287 - RNA, 22 nt, Homo sapiens
cugaaagagcauguaacacagu

SEQ ID NO: 12288 - RNA, 21 nt, Homo sapiens
ugacagaaaauugaguuugcu

SEQ ID NO: 12289 - RNA, 22 nt, Homo sapiens
augaaaagcauaaacgcugaag

SEQ ID NO: 12290 - RNA, 22 nt, Homo sapiens
uuguaaagaucauaugcuguuc

SEQ ID NO: 12291 - RNA, 22 nt, Homo sapiens
aaagucuguuacagcuauuucu

SEQ ID NO: 12292 - RNA, 20 nt, Homo sapiens
uggaaaguaagucaugauau

SEQ ID NO: 12293 - RNA, 22 nt, Homo sapiens
uacaaagcuuucugcaaaucau

SEQ ID NO: 12294 - RNA, 22 nt, Homo sapiens
agugguuuuggaauggaauuca

SEQ ID NO: 12295 - RNA, 22 nt, Homo sapiens
augcagagaaaucuaaaauaug

SEQ ID NO: 12296 - RNA, 22 nt, Homo sapiens
auagcagugugaaaacagacug

SEQ ID NO: 12297 - RNA, 17 nt, Homo sapiens
uuucagaguggaagugu

SEQ ID NO: 12298 - RNA, 22 nt, Homo sapiens
uuaagaugcauuuugaaguuaa

SEQ ID NO: 12299 - RNA, 22 nt, Homo sapiens
uagcaguauacguacugggucc

SEQ ID NO: 12300 - RNA, 22 nt, Homo sapiens
gcugugauucuguguagauagu

SEQ ID NO: 12301 - RNA, 22 nt, Homo sapiens
cuuguuguggaggggagugcag

SEQ ID NO: 12302 - RNA, 20 nt, Homo sapiens
guccauuugcugccauugcu

SEQ ID NO: 12303 - RNA, 22 nt, Homo sapiens
acagaacugggcuugcuuuugg

SEQ ID NO: 12304 - RNA, 21 nt, Homo sapiens
ugugaccucugucucugaguc

SEQ ID NO: 12305 - RNA, 22 nt, Homo sapiens
uuaagucacacuagacaacuga

SEQ ID NO: 12306 - RNA, 22 nt, Homo sapiens
guggaaaaguaguugcgguuuu

SEQ ID NO: 12307 - RNA, 22 nt, Homo sapiens
aagggagcugcauaaucuugug

SEQ ID NO: 12308 - RNA, 22 nt, Homo sapiens
uauggauuuucagauucuuauc

SEQ ID NO: 12309 - RNA, 22 nt, Homo sapiens
ugacuagugcccuuugcugccu

SEQ ID NO: 12310 - RNA, 22 nt, Homo sapiens
uugugaaaaaccucucguggaa

SEQ ID NO: 12311 - RNA, 22 nt, Homo sapiens
uucaacagugauggccuuugua

SEQ ID NO: 12312 - RNA, 22 nt, Homo sapiens
ugagaugagaaucaguucuaau

SEQ ID NO: 12313 - RNA, 22 nt, Homo sapiens
uucaagucaacaagcacuugag

SEQ ID NO: 12314 - RNA, 22 nt, Homo sapiens
uuaaaagcuaucuccaagguca

SEQ ID NO: 12315 - RNA, 22 nt, Homo sapiens
uguacuucaagauuaugguuua

SEQ ID NO: 12316 - RNA, 22 nt, Homo sapiens
cuagcagacaugggcugaacca

SEQ ID NO: 12317 - RNA, 22 nt, Homo sapiens
aaucacaguguucuugugaggg

SEQ ID NO: 12318 - RNA, 22 nt, Homo sapiens
uggaaguaaccaugaauggaau

SEQ ID NO: 12319 - RNA, 22 nt, Homo sapiens
ugucaguuuuaacuagggaaua

SEQ ID NO: 12320 - RNA, 20 nt, Homo sapiens
auguaauguaugauauguac

SEQ ID NO: 12321 - RNA, 22 nt, Homo sapiens
ugaugacacugauuucuucaau

SEQ ID NO: 12322 - RNA, 22 nt, Homo sapiens
gagaucauguacuagaacaccu

SEQ ID NO: 12323 - RNA, 22 nt, Homo sapiens
auuccauuuguuaucacacccg

SEQ ID NO: 12324 - RNA, 22 nt, Homo sapiens
uuacugcucuuuugucaugagu

SEQ ID NO: 12325 - RNA, 22 nt, Homo sapiens
ugcagagaaacauuuuguauuu

SEQ ID NO: 12326 - RNA, 22 nt, Homo sapiens
augaccaaugggcagagcuaga

SEQ ID NO: 12327 - RNA, 22 nt, Homo sapiens
auaucccagugaugauugauag

SEQ ID NO: 12328 - RNA, 22 nt, Homo sapiens
aucaugucuucccagugauucu

SEQ ID NO: 12329 - RNA, 22 nt, Homo sapiens
ugaaauuauucuuaccaaggug

SEQ ID NO: 12330 - RNA, 22 nt, Homo sapiens
augcacuguauaggaucuugcg

SEQ ID NO: 12331 - RNA, 22 nt, Homo sapiens
gauguguuuccaggauuuguuu

SEQ ID NO: 12332 - RNA, 22 nt, Homo sapiens
gaucuguuuuccuauuguuugu

SEQ ID NO: 12333 - RNA, 22 nt, Homo sapiens
uggucuucuggccuccagaacc

SEQ ID NO: 12334 - RNA, 21 nt, Homo sapiens
uacaaugcacaggagagccuc

SEQ ID NO: 12335 - RNA, 22 nt, Homo sapiens
uggacuguaauagagaacagaa

SEQ ID NO: 12336 - RNA, 22 nt, Homo sapiens
ugagaugugugcauucaacuca

SEQ ID NO: 12337 - RNA, 22 nt, Homo sapiens
aagaucaucauagagggcauga

SEQ ID NO: 12338 - RNA, 22 nt, Homo sapiens
uauuaguuuucuguggauuaca

SEQ ID NO: 12339 - RNA, 22 nt, Homo sapiens
gagacugagucuugcucugucg

SEQ ID NO: 12340 - RNA, 22 nt, Homo sapiens
uaaagcuuggauuuaggcuaau

SEQ ID NO: 12341 - RNA, 18 nt, Homo sapiens
cuugucaaaucuuuccuc

SEQ ID NO: 12342 - RNA, 22 nt, Homo sapiens
gacauguaaggcucucucuguu

SEQ ID NO: 12343 - RNA, 22 nt, Homo sapiens
uugagauuuuccucaaauauuu

SEQ ID NO: 12344 - RNA, 18 nt, Homo sapiens
cuggaugucgaguguguu

SEQ ID NO: 12345 - RNA, 22 nt, Homo sapiens
uaagugaauuugacagguaaug

SEQ ID NO: 12346 - RNA, 22 nt, Homo sapiens
ucucaaguggucgcaguuagau

SEQ ID NO: 12347 - RNA, 22 nt, Homo sapiens
auucacuuuuauagacaggucu

SEQ ID NO: 12348 - RNA, 22 nt, Homo sapiens
agaaacauucucuugccuccuu

SEQ ID NO: 12349 - RNA, 22 nt, Homo sapiens
uugauauguaguuggacuugau

SEQ ID NO: 12350 - RNA, 22 nt, Homo sapiens
gugugauuauuucaauugaugc

SEQ ID NO: 12351 - RNA, 22 nt, Homo sapiens
uucaagucuuggcuuugccacc

SEQ ID NO: 12352 - RNA, 22 nt, Homo sapiens
ugagauggagucuugucgccua

SEQ ID NO: 12353 - RNA, 22 nt, Homo sapiens
uggaauuaauuaaaauauacug

SEQ ID NO: 12354 - RNA, 22 nt, Homo sapiens
caagagaccugagugucauucu

SEQ ID NO: 12355 - RNA, 22 nt, Homo sapiens
aacugcuguuuggguacuggug

SEQ ID NO: 12356 - RNA, 22 nt, Homo sapiens
aagugcaaauucccaggcucug

SEQ ID NO: 12357 - RNA, 22 nt, Homo sapiens
uaucacaggucaggaaucuugc

SEQ ID NO: 12358 - RNA, 22 nt, Homo sapiens
ucaguaaaugcuguucucuuuu

SEQ ID NO: 12359 - RNA, 22 nt, Homo sapiens
uagcacaucuucuuggccugca

SEQ ID NO: 12360 - RNA, 22 nt, Homo sapiens
ugaaacauacacucugaugggg

SEQ ID NO: 12361 - RNA, 22 nt, Homo sapiens
cauacagcuaguaaguguaaga

SEQ ID NO: 12362 - RNA, 22 nt, Homo sapiens
gugaaaagaugagcaccauaca

SEQ ID NO: 12363 - RNA, 22 nt, Homo sapiens
auagcagugugaggacagacua

SEQ ID NO: 12364 - RNA, 22 nt, Homo sapiens
ugugguuuuuuucuccaauagg

SEQ ID NO: 12365 - RNA, 22 nt, Homo sapiens
augauguaggccauggguuucu

SEQ ID NO: 12366 - RNA, 22 nt, Homo sapiens
uugaaagucauuucuucuaagu

SEQ ID NO: 12367 - RNA, 22 nt, Homo sapiens
augugaaugugaucggauaguc

SEQ ID NO: 12368 - RNA, 22 nt, Homo sapiens
ugagaacagauggcuuuauuau

SEQ ID NO: 12369 - RNA, 22 nt, Homo sapiens
uaucaagaugacaaacuuugcu

SEQ ID NO: 12370 - RNA, 22 nt, Homo sapiens
auagcagugugaaaauguacua

SEQ ID NO: 12371 - RNA, 22 nt, Homo sapiens
guacaugcaugcaugggugugc

SEQ ID NO: 12372 - RNA, 22 nt, Homo sapiens
auugcaugucauguuuagugua

SEQ ID NO: 12373 - RNA, 22 nt, Homo sapiens
uccauugucuagauguaacaca

SEQ ID NO: 12374 - RNA, 21 nt, Homo sapiens
ucaguuacugagagagaagug

SEQ ID NO: 12375 - RNA, 22 nt, Homo sapiens
auguaauguuaaauugcuaauu

SEQ ID NO: 12376 - RNA, 22 nt, Homo sapiens
aagaugauguucuuuuucuuag

SEQ ID NO: 12377 - RNA, 22 nt, Homo sapiens
uggagagucauuuauaguauuu

SEQ ID NO: 12378 - RNA, 22 nt, Homo sapiens
aagggaauguuguggcugguug

SEQ ID NO: 12379 - RNA, 22 nt, Homo sapiens
aucuugcauuugcuaaaaugca

SEQ ID NO: 12380 - RNA, 22 nt, Homo sapiens
uuaauguaauugauugauugac

SEQ ID NO: 12381 - RNA, 22 nt, Homo sapiens
ugagauuaaucuuuaaguaaga

SEQ ID NO: 12382 - RNA, 22 nt, Homo sapiens
auggaaugccauuuauaaugga

SEQ ID NO: 12383 - RNA, 22 nt, Homo sapiens
uagcaguauaugagagcuauug

SEQ ID NO: 12384 - RNA, 22 nt, Homo sapiens
gugaaagacauauaugguuuga

SEQ ID NO: 12385 - RNA, 19 nt, Homo sapiens
auacacguguauacauaca

SEQ ID NO: 12386 - RNA, 22 nt, Homo sapiens
ugacauuacagucacuugcugu

SEQ ID NO: 12387 - RNA, 22 nt, Homo sapiens
guacaguauaguaauaggauuu

SEQ ID NO: 12388 - RNA, 22 nt, Homo sapiens
agcuggauguauguuaagugaa

SEQ ID NO: 12389 - RNA, 19 nt, Homo sapiens
ugugaacaucacagagugu

SEQ ID NO: 12390 - RNA, 22 nt, Homo sapiens
ugcaaauguuaggugucauuau

SEQ ID NO: 12391 - RNA, 22 nt, Homo sapiens
uagcagaauauaccucuuacuu

SEQ ID NO: 12392 - RNA, 22 nt, Homo sapiens
cuguuugaggguuugcuuucag

SEQ ID NO: 12393 - RNA, 22 nt, Homo sapiens
uauuacauccauaggcucugcu

SEQ ID NO: 12394 - RNA, 22 nt, Homo sapiens
gucacuguuuccuauuauauuu

SEQ ID NO: 12395 - RNA, 22 nt, Homo sapiens
uugggauaaucacaaaguaaaa

SEQ ID NO: 12396 - RNA, 22 nt, Homo sapiens
ugagauuaucuugaucuugaaa

SEQ ID NO: 12397 - RNA, 22 nt, Homo sapiens
aguguuuuuacaagcacucugg

SEQ ID NO: 12398 - RNA, 22 nt, Homo sapiens
uuucugaggccucaccagaagc

SEQ ID NO: 12399 - RNA, 23 nt, Homo sapiens
ggaaugaaaccugguuaugauau

SEQ ID NO: 12400 - RNA, 22 nt, Homo sapiens
uuagaauggaaaugcgagguua

SEQ ID NO: 12401 - RNA, 22 nt, Homo sapiens
cuuaacagugguauugaugacc

SEQ ID NO: 12402 - RNA, 22 nt, Homo sapiens
agcugcauuuacuuuugcacaa

SEQ ID NO: 12403 - RNA, 22 nt, Homo sapiens
uaagugaauguuggcuacugaa

SEQ ID NO: 12404 - RNA, 22 nt, Homo sapiens
gagacugagucuugcuuuguca

SEQ ID NO: 12405 - RNA, 22 nt, Homo sapiens
ucaugucuuguuguauuuauuu

SEQ ID NO: 12406 - RNA, 22 nt, Homo sapiens
uucauaguaacaguaacuaugg

SEQ ID NO: 12407 - RNA, 22 nt, Homo sapiens
uuaggcuuuauugaaaacaaua

SEQ ID NO: 12408 - RNA, 22 nt, Homo sapiens
auagcacaguguguguacacca

SEQ ID NO: 12409 - RNA, 22 nt, Homo sapiens
uugugaauggugccgcaauaaa

SEQ ID NO: 12410 - RNA, 22 nt, Homo sapiens
uggaaaucuaaguuuggauuga

SEQ ID NO: 12411 - RNA, 22 nt, Homo sapiens
ggaucauaugauagcucaauuu

SEQ ID NO: 12412 - RNA, 20 nt, Homo sapiens
ucucauggagggaaagagca

SEQ ID NO: 12413 - RNA, 22 nt, Homo sapiens
ugagaugauagauauguuaauu

SEQ ID NO: 12414 - RNA, 22 nt, Homo sapiens
augauaaguuauuagaagaaga

SEQ ID NO: 12415 - RNA, 22 nt, Homo sapiens
uucauaguucuuuuagucauua

SEQ ID NO: 12416 - RNA, 22 nt, Homo sapiens
aauacugugauaucgagcgauu

SEQ ID NO: 12417 - RNA, 22 nt, Homo sapiens
uuugugaaugucauaagcucca

SEQ ID NO: 12418 - RNA, 22 nt, Homo sapiens
guauuuguugcagcagcacuau

SEQ ID NO: 12419 - RNA, 22 nt, Homo sapiens
guggcaguuuuaaauaugaaaa

SEQ ID NO: 12420 - RNA, 22 nt, Homo sapiens
ugagaugaagcuagaagaaugg

SEQ ID NO: 12421 - RNA, 22 nt, Homo sapiens
cagugcauaggaucuaaaauuu

SEQ ID NO: 12422 - RNA, 22 nt, Homo sapiens
cagccgggugagguggcuuguu

SEQ ID NO: 12423 - RNA, 22 nt, Homo sapiens
uggaaugucagcuacaagaggg

SEQ ID NO: 12424 - RNA, 22 nt, Homo sapiens
cuccauuuaucugaaauuuuau

SEQ ID NO: 12425 - RNA, 22 nt, Homo sapiens
ucucagugaauguggaaaaagc

SEQ ID NO: 12426 - RNA, 18 nt, Homo sapiens
uugaauaguguccaaucu

SEQ ID NO: 12427 - RNA, 22 nt, Homo sapiens
guauuugauuauagcaugcuua

SEQ ID NO: 12428 - RNA, 22 nt, Homo sapiens
aacacggcccgcagagcaagcu

SEQ ID NO: 12429 - RNA, 22 nt, Homo sapiens
ugcuuugguagaaaucuuuggu

SEQ ID NO: 12430 - RNA, 22 nt, Homo sapiens
ucaacaggucaauugcauagaa

SEQ ID NO: 12431 - RNA, 22 nt, Homo sapiens
uugaaagaugaacuggauugga

SEQ ID NO: 12432 - RNA, 22 nt, Homo sapiens
uuaaguuaggcuucagcagucu

SEQ ID NO: 12433 - RNA, 22 nt, Homo sapiens
aauacagcacacagaugggucu

SEQ ID NO: 12434 - RNA, 22 nt, Homo sapiens
acaagcacaaauuuaauccugu

SEQ ID NO: 12435 - RNA, 20 nt, Homo sapiens
uccaguuuuggagacauucu

SEQ ID NO: 12436 - RNA, 19 nt, Homo sapiens
ugcaaauucuaaaaacuga

SEQ ID NO: 12437 - RNA, 22 nt, Homo sapiens
gaauggaacugacuauagcuga

SEQ ID NO: 12438 - RNA, 22 nt, Homo sapiens
ggcucguguuuucuguccaguu

SEQ ID NO: 12439 - RNA, 22 nt, Homo sapiens
acagugcuguuguguuuucacg

SEQ ID NO: 12440 - RNA, 22 nt, Homo sapiens
ucaguagcauugcuuauacagu

SEQ ID NO: 12441 - RNA, 22 nt, Homo sapiens
guaauaacuguggaaaaagguu

SEQ ID NO: 12442 - RNA, 22 nt, Homo sapiens
gauaaagauagcaauagggaca

SEQ ID NO: 12443 - RNA, 22 nt, Homo sapiens
ugaguuagguaauaauaaauau

SEQ ID NO: 12444 - RNA, 22 nt, Homo sapiens
guauggaagucaguuuguuggc

SEQ ID NO: 12445 - RNA, 23 nt, Homo sapiens
aaauuugccuauuauuccuaugg

SEQ ID NO: 12446 - RNA, 22 nt, Homo sapiens
aagggaauguuguagcugguuu

SEQ ID NO: 12447 - RNA, 22 nt, Homo sapiens
aacugguauuucccaugaauuu

SEQ ID NO: 12448 - RNA, 22 nt, Homo sapiens
cugaaagagcauuugaaugggu

SEQ ID NO: 12449 - RNA, 22 nt, Homo sapiens
guucuggagauaaagccaaggu

SEQ ID NO: 12450 - RNA, 22 nt, Homo sapiens
uguauuuguuguuaaauggaga

SEQ ID NO: 12451 - RNA, 22 nt, Homo sapiens
uuugcuauagugaauagugcug

SEQ ID NO: 12452 - RNA, 22 nt, Homo sapiens
ugaaaucauguaguuauugcaa

SEQ ID NO: 12453 - RNA, 23 nt, Homo sapiens
ugacagucucccgauggcuaggc

SEQ ID NO: 12454 - RNA, 22 nt, Homo sapiens
gagacugagucucacucuguca

SEQ ID NO: 12455 - RNA, 22 nt, Homo sapiens
uacaagcacaggcagcaggcug

SEQ ID NO: 12456 - RNA, 22 nt, Homo sapiens
cugacagucucauugauuugcu

SEQ ID NO: 12457 - RNA, 22 nt, Homo sapiens
uccaguuuuguuaacauauggu

SEQ ID NO: 12458 - RNA, 18 nt, Homo sapiens
cuuugcagcuuccagagg

SEQ ID NO: 12459 - RNA, 22 nt, Homo sapiens
augagauucuuagagaagucug

SEQ ID NO: 12460 - RNA, 22 nt, Homo sapiens
ugugguuuuaguaaaacuaugu

SEQ ID NO: 12461 - RNA, 22 nt, Homo sapiens
uacucuuuagcuccuuaaggaa

SEQ ID NO: 12462 - RNA, 22 nt, Homo sapiens
uugugaauggugcugcaguaaa

SEQ ID NO: 12463 - RNA, 22 nt, Homo sapiens
aguagcaauggcucugagcuau

SEQ ID NO: 12464 - RNA, 22 nt, Homo sapiens
uucaaaguguugguuuugggcu

SEQ ID NO: 12465 - RNA, 22 nt, Homo sapiens
uugagauguauguauauaaugu

SEQ ID NO: 12466 - RNA, 22 nt, Homo sapiens
auguauacaugcaggucacagg

SEQ ID NO: 12467 - RNA, 22 nt, Homo sapiens
ugagaaugaugauuuccaguuu

SEQ ID NO: 12468 - RNA, 22 nt, Homo sapiens
aaaugcagucuuuguucugggc

SEQ ID NO: 12469 - RNA, 22 nt, Homo sapiens
acugaguguugauuuagauuaa

SEQ ID NO: 12470 - RNA, 22 nt, Homo sapiens
uucugaguggcuuucaacacug

SEQ ID NO: 12471 - RNA, 22 nt, Homo sapiens
cuggauauguugcaacauuucc

SEQ ID NO: 12472 - RNA, 22 nt, Homo sapiens
agugcauugcaucucugcuuca

SEQ ID NO: 12473 - RNA, 23 nt, Homo sapiens
gagaucauucuggaauuagagug

SEQ ID NO: 12474 - RNA, 22 nt, Homo sapiens
aagcuacauuuuauuuauguca

SEQ ID NO: 12475 - RNA, 20 nt, Homo sapiens
ggaauagucuacacucugac

SEQ ID NO: 12476 - RNA, 22 nt, Homo sapiens
gugguuuucaacuccaccugca

SEQ ID NO: 12477 - RNA, 22 nt, Homo sapiens
guggaaaauuauugcuguuuuu

SEQ ID NO: 12478 - RNA, 22 nt, Homo sapiens
uuaaauacagcaugguguuucu

SEQ ID NO: 12479 - RNA, 22 nt, Homo sapiens
auuccauuuguguggaauggcu

SEQ ID NO: 12480 - RNA, 17 nt, Homo sapiens
aaucagauuucugagga

SEQ ID NO: 12481 - RNA, 22 nt, Homo sapiens
aguguuuuuaucaugaaagggu

SEQ ID NO: 12482 - RNA, 22 nt, Homo sapiens
cuggcagucugccucuucacug

SEQ ID NO: 12483 - RNA, 22 nt, Homo sapiens
guuuuuggggucacuauuaccg

SEQ ID NO: 12484 - RNA, 21 nt, Homo sapiens
aacagugcuuaguagauguuc

SEQ ID NO: 12485 - RNA, 20 nt, Homo sapiens
uaucacaguucaggaacucu

SEQ ID NO: 12486 - RNA, 22 nt, Homo sapiens
auaugcuuauuagcaagaaaua

SEQ ID NO: 12487 - RNA, 22 nt, Homo sapiens
caaagucuucucauuaugucuu

SEQ ID NO: 12488 - RNA, 22 nt, Homo sapiens
acauucagcuguuguuucaaug

SEQ ID NO: 12489 - RNA, 22 nt, Homo sapiens
ucagaguagagcgacuucuccu

SEQ ID NO: 12490 - RNA, 23 nt, Homo sapiens
ggaaacauccagucuuucaccau

SEQ ID NO: 12491 - RNA, 22 nt, Homo sapiens
cuggaauguuccuaaagauuca

SEQ ID NO: 12492 - RNA, 22 nt, Homo sapiens
cuuuggcaaugucauuuucaau

SEQ ID NO: 12493 - RNA, 22 nt, Homo sapiens
ugcuguuguuugaugaaguaau

SEQ ID NO: 12494 - RNA, 22 nt, Homo sapiens
ugagaugaacuugauuguuuua

SEQ ID NO: 12495 - RNA, 22 nt, Homo sapiens
uugcuuuguuacugcaguuucc

SEQ ID NO: 12496 - RNA, 22 nt, Homo sapiens
uucaagcuauggugaucuuuuc

SEQ ID NO: 12497 - RNA, 22 nt, Homo sapiens
ucagaguagaaacacuuccaua

SEQ ID NO: 12498 - RNA, 22 nt, Homo sapiens
cuucaaaguuggcuaggagaca

SEQ ID NO: 12499 - RNA, 23 nt, Homo sapiens
ugagauuacccagaaagaguaua

SEQ ID NO: 12500 - RNA, 22 nt, Homo sapiens
gugaaagauuaaaccagugugu

SEQ ID NO: 12501 - RNA, 22 nt, Homo sapiens
cuguaugugagaaauaauaagu

SEQ ID NO: 12502 - RNA, 22 nt, Homo sapiens
uccaguuuggaggcuugaugug

SEQ ID NO: 12503 - RNA, 22 nt, Homo sapiens
uagcaguaccccaguauccugg

SEQ ID NO: 12504 - RNA, 22 nt, Homo sapiens
aagaugauguuguguuuucacu

SEQ ID NO: 12505 - RNA, 22 nt, Homo sapiens
uauuagugccuaagucuuaggg

SEQ ID NO: 12506 - RNA, 22 nt, Homo sapiens
guaaaguaaagcacaucaaggu

SEQ ID NO: 12507 - RNA, 22 nt, Homo sapiens
ugugauaguuggcuaaagcagu

SEQ ID NO: 12508 - RNA, 19 nt, Homo sapiens
cauggcuuauaauuuuaau

SEQ ID NO: 12509 - RNA, 22 nt, Homo sapiens
guguucaaagcugauugagauu

SEQ ID NO: 12510 - RNA, 22 nt, Homo sapiens
aguauguagugcaaucagucag

SEQ ID NO: 12511 - RNA, 22 nt, Homo sapiens
agcuguuguuuuaagauacuaa

SEQ ID NO: 12512 - RNA, 22 nt, Homo sapiens
ucugagaugagacuuugaauuu

SEQ ID NO: 12513 - RNA, 22 nt, Homo sapiens
gaugugaaaucauaguuucuag

SEQ ID NO: 12514 - RNA, 20 nt, Homo sapiens
uggagugaagguucuggacc

SEQ ID NO: 12515 - RNA, 22 nt, Homo sapiens
acagugcuuggcacacaguaau

SEQ ID NO: 12516 - RNA, 22 nt, Homo sapiens
cugacuuuagaacccaaaaagu

SEQ ID NO: 12517 - RNA, 22 nt, Homo sapiens
aucuucucuugaagggugggga

SEQ ID NO: 12518 - RNA, 22 nt, Homo sapiens
auagcagugugaaaacagacua

SEQ ID NO: 12519 - RNA, 22 nt, Homo sapiens
uauuugauugacuuuagcagga

SEQ ID NO: 12520 - RNA, 21 nt, Homo sapiens
uucucagaggcaggggauaaa

SEQ ID NO: 12521 - RNA, 22 nt, Homo sapiens
uugaauagaaguguugaaagug

SEQ ID NO: 12522 - RNA, 22 nt, Homo sapiens
uuugggaaugaguuuaucauuu

SEQ ID NO: 12523 - RNA, 22 nt, Homo sapiens
uuucacagcaauugccuauugu

SEQ ID NO: 12524 - RNA, 22 nt, Homo sapiens
guguucaaauucugacagagag

SEQ ID NO: 12525 - RNA, 22 nt, Homo sapiens
aauugcauugaauuuguagcuu

SEQ ID NO: 12526 - RNA, 19 nt, Homo sapiens
uuugaauauaaugcagcua

SEQ ID NO: 12527 - RNA, 22 nt, Homo sapiens
guggaagucuuugguauuggua

SEQ ID NO: 12528 - RNA, 22 nt, Homo sapiens
uagcaguagacagacuuuggcu

SEQ ID NO: 12529 - RNA, 22 nt, Homo sapiens
auaucugcauugccauuuaugu

SEQ ID NO: 12530 - RNA, 22 nt, Homo sapiens
uuacuguauagaaucaucuuga

SEQ ID NO: 12531 - RNA, 22 nt, Homo sapiens
uaucacuuugauaguuuaaaug

SEQ ID NO: 12532 - RNA, 22 nt, Homo sapiens
uaauauguuuugaaaucaggaa

SEQ ID NO: 12533 - RNA, 22 nt, Homo sapiens
guaugauacuguaacagugggu

SEQ ID NO: 12534 - RNA, 22 nt, Homo sapiens
uugcugagucuuucuagguugc

SEQ ID NO: 12535 - RNA, 22 nt, Homo sapiens
gucauguuuaacuucuugagga

SEQ ID NO: 12536 - RNA, 22 nt, Homo sapiens
agguauguauguaugggagaaa

SEQ ID NO: 12537 - RNA, 22 nt, Homo sapiens
gauuccauugcgaauuuucaga

SEQ ID NO: 12538 - RNA, 19 nt, Homo sapiens
uauguaguuuucucaauau

SEQ ID NO: 12539 - RNA, 22 nt, Homo sapiens
ucugugaaugaacacuugaaaa

SEQ ID NO: 12540 - RNA, 21 nt, Homo sapiens
uaaaacuguaacuuuguccug

SEQ ID NO: 12541 - RNA, 22 nt, Homo sapiens
uuacuguagugucauaucguau

SEQ ID NO: 12542 - RNA, 22 nt, Homo sapiens
uuuuccagugggacucccauua

SEQ ID NO: 12543 - RNA, 19 nt, Homo sapiens
uaugcuauuuauuagaagu

SEQ ID NO: 12544 - RNA, 22 nt, Homo sapiens
gagacugaguuuugcucuuguu

SEQ ID NO: 12545 - RNA, 22 nt, Homo sapiens
uugagauggaguuucaauauug

SEQ ID NO: 12546 - RNA, 22 nt, Homo sapiens
cagugcaugacuguauauuauc

SEQ ID NO: 12547 - RNA, 22 nt, Homo sapiens
ugaaagguuuaauucugugaga

SEQ ID NO: 12548 - RNA, 22 nt, Homo sapiens
uggcaaaaaucacaaguaccuu

SEQ ID NO: 12549 - RNA, 22 nt, Homo sapiens
ugugaacagaauuagucaccua

SEQ ID NO: 12550 - RNA, 22 nt, Homo sapiens
uuaugcagcaaagugcuugaaa

SEQ ID NO: 12551 - RNA, 22 nt, Homo sapiens
gucuggcacagggaaaguacaa

SEQ ID NO: 12552 - RNA, 22 nt, Homo sapiens
uauggauuugccuauucuguau

SEQ ID NO: 12553 - RNA, 22 nt, Homo sapiens
ugagaaugcagaaucucgugca

SEQ ID NO: 12554 - RNA, 22 nt, Homo sapiens
augacugaguagcauuccauua

SEQ ID NO: 12555 - RNA, 22 nt, Homo sapiens
ucucuggauaucuacuuauguu

SEQ ID NO: 12556 - RNA, 22 nt, Homo sapiens
aucucaguuaauuccaucuuuc

SEQ ID NO: 12557 - RNA, 22 nt, Homo sapiens
agcaguacauaaaaagcauccu

SEQ ID NO: 12558 - RNA, 22 nt, Homo sapiens
gaaaacugcuucucuggguuuc

SEQ ID NO: 12559 - RNA, 21 nt, Homo sapiens
aagcacauugaguguguguga

SEQ ID NO: 12560 - RNA, 22 nt, Homo sapiens
agacaguguguguauauauggu

SEQ ID NO: 12561 - RNA, 22 nt, Homo sapiens
auggaguguaauauugagagcu

SEQ ID NO: 12562 - RNA, 22 nt, Homo sapiens
uuggcaguaucuacuacagcua

SEQ ID NO: 12563 - RNA, 22 nt, Homo sapiens
gaaauggaucagagcaagcuuu

SEQ ID NO: 12564 - RNA, 20 nt, Homo sapiens
gcaaauggaucccacaagcc

SEQ ID NO: 12565 - RNA, 22 nt, Homo sapiens
cuguucaaauuguuugugaagu

SEQ ID NO: 12566 - RNA, 22 nt, Homo sapiens
auacuguacugaaguacccauu

SEQ ID NO: 12567 - RNA, 22 nt, Homo sapiens
acagugcuuucaauguucagua

SEQ ID NO: 12568 - RNA, 22 nt, Homo sapiens
ugaugguuuuaaaaagaggagu

SEQ ID NO: 12569 - RNA, 23 nt, Homo sapiens
ugagaugucugauugcgaggguc

SEQ ID NO: 12570 - RNA, 22 nt, Homo sapiens
guguaaaacaauuagaggauuu

SEQ ID NO: 12571 - RNA, 21 nt, Homo sapiens
uuacaauggcuccuugaaggu

SEQ ID NO: 12572 - RNA, 22 nt, Homo sapiens
auaugcauguacccacacaggc

SEQ ID NO: 12573 - RNA, 22 nt, Homo sapiens
uaaacugucuugcaguuacaug

SEQ ID NO: 12574 - RNA, 22 nt, Homo sapiens
uaguuauggaguaauuuuaagc

SEQ ID NO: 12575 - RNA, 22 nt, Homo sapiens
uuagggaguaaucuaaaaaugg

SEQ ID NO: 12576 - RNA, 22 nt, Homo sapiens
guguucaaacccaggucugucu

SEQ ID NO: 12577 - RNA, 22 nt, Homo sapiens
auacaagcaguccaacuccaua

SEQ ID NO: 12578 - RNA, 16 nt, Homo sapiens
uuucccuuugguguuu

SEQ ID NO: 12579 - RNA, 22 nt, Homo sapiens
uugugaauggaguagcaggauc

SEQ ID NO: 12580 - RNA, 22 nt, Homo sapiens
uacagccacauaauguaugauu

SEQ ID NO: 12581 - RNA, 22 nt, Homo sapiens
uuggucucaucaagagcagcuu

SEQ ID NO: 12582 - RNA, 22 nt, Homo sapiens
gcugcuguuucucuuucagcau

SEQ ID NO: 12583 - RNA, 22 nt, Homo sapiens
gagacugagucuugcucuguca

SEQ ID NO: 12584 - RNA, 22 nt, Homo sapiens
uggaaugugaauaacuuccuuc

SEQ ID NO: 12585 - RNA, 22 nt, Homo sapiens
uucuauguuugaaaaugccaaa

SEQ ID NO: 12586 - RNA, 22 nt, Homo sapiens
uagcaguauggagcgaggccca

SEQ ID NO: 12587 - RNA, 22 nt, Homo sapiens
auagcagugugagaaugaacua

SEQ ID NO: 12588 - RNA, 22 nt, Homo sapiens
uguagucauuccuuuuugcuuu

SEQ ID NO: 12589 - RNA, 22 nt, Homo sapiens
ucuucaugcuugaaauaauagc

SEQ ID NO: 12590 - RNA, 22 nt, Homo sapiens
uaagugaauuucacuacugagu

SEQ ID NO: 12591 - RNA, 22 nt, Homo sapiens
auggauugucuccuugugccau

SEQ ID NO: 12592 - RNA, 21 nt, Homo sapiens
ugaaaugcaugugcacauuaa

SEQ ID NO: 12593 - RNA, 22 nt, Homo sapiens
uuccaguugugagcuauccggg

SEQ ID NO: 12594 - RNA, 22 nt, Homo sapiens
ucuuuggaggcgaucuguuuga

SEQ ID NO: 12595 - RNA, 18 nt, Homo sapiens
ggaaaacuuuucuaagua

SEQ ID NO: 12596 - RNA, 22 nt, Homo sapiens
gcagaauugguuucuucuaagg

SEQ ID NO: 12597 - RNA, 22 nt, Homo sapiens
ucucugagaaaaguuucuccca

SEQ ID NO: 12598 - RNA, 22 nt, Homo sapiens
auuacauagucaaggugucuca

SEQ ID NO: 12599 - RNA, 22 nt, Homo sapiens
cugugcuugauuauaugagugu

SEQ ID NO: 12600 - RNA, 22 nt, Homo sapiens
cugucucagccucuccaguagc

SEQ ID NO: 12601 - RNA, 22 nt, Homo sapiens
uuuuggcuagaaauauaccucc

SEQ ID NO: 12602 - RNA, 22 nt, Homo sapiens
aguucaaaucgagccuggccau

SEQ ID NO: 12603 - RNA, 19 nt, Homo sapiens
uuuguccugcccuuucuca

SEQ ID NO: 12604 - RNA, 22 nt, Homo sapiens
auggauguucuagggaugugau

SEQ ID NO: 12605 - RNA, 22 nt, Homo sapiens
aaguggaauguuuguggcacaa

SEQ ID NO: 12606 - RNA, 22 nt, Homo sapiens
uugaaagacagaggggcaaguu

SEQ ID NO: 12607 - RNA, 22 nt, Homo sapiens
agcuugugauuuagagugagag

SEQ ID NO: 12608 - RNA, 22 nt, Homo sapiens
cugggaugugacuguugccccc

SEQ ID NO: 12609 - RNA, 22 nt, Homo sapiens
auggaacuggagaugguuauau

SEQ ID NO: 12610 - RNA, 22 nt, Homo sapiens
ugucaugaacucacauucuggg

SEQ ID NO: 12611 - RNA, 22 nt, Homo sapiens
cauaaagauggaggaggccagg

SEQ ID NO: 12612 - RNA, 22 nt, Homo sapiens
uagcaguaagaaacugacauug

SEQ ID NO: 12613 - RNA, 23 nt, Homo sapiens
ucaguacuccacuuucaauagug

SEQ ID NO: 12614 - RNA, 22 nt, Homo sapiens
uugugaaaucuaggcagagguu

SEQ ID NO: 12615 - RNA, 22 nt, Homo sapiens
uaguauguuuauagcauugagu

SEQ ID NO: 12616 - RNA, 22 nt, Homo sapiens
ugugaauggugcugcaaugaac

SEQ ID NO: 12617 - RNA, 22 nt, Homo sapiens
gagauugucaugauuacauugu

SEQ ID NO: 12618 - RNA, 22 nt, Homo sapiens
aguccauuugaugaugauucca

SEQ ID NO: 12619 - RNA, 22 nt, Homo sapiens
caugcacugaguccaccucugg

SEQ ID NO: 12620 - RNA, 22 nt, Homo sapiens
agaauguaaacagaauagagga

SEQ ID NO: 12621 - RNA, 22 nt, Homo sapiens
uuucagagucaucugcccaagu

SEQ ID NO: 12622 - RNA, 22 nt, Homo sapiens
ggcaguuuguuugugaggucca

SEQ ID NO: 12623 - RNA, 22 nt, Homo sapiens
auguggaaagcagcaugauaug

SEQ ID NO: 12624 - RNA, 22 nt, Homo sapiens
gcugauguugaccuugaucacc

SEQ ID NO: 12625 - RNA, 22 nt, Homo sapiens
cagagaucaugcaacugcucgc

SEQ ID NO: 12626 - RNA, 22 nt, Homo sapiens
ugugcauaugucuuuauaguag

SEQ ID NO: 12627 - RNA, 22 nt, Homo sapiens
caaaagugguucuuauccuuuu

SEQ ID NO: 12628 - RNA, 22 nt, Homo sapiens
cuccauuuggaacagauguccu

SEQ ID NO: 12629 - RNA, 22 nt, Homo sapiens
gugacugcauccauccaggcuu

SEQ ID NO: 12630 - RNA, 22 nt, Homo sapiens
ugagauaaggaaauugaggcuc

SEQ ID NO: 12631 - RNA, 21 nt, Mycobacterium leprae
ugaccuagauaugaccugagc

SEQ ID NO: 12632 - RNA, 22 nt, Mycobacterium leprae
ugaauuugaucuugucauuguu

SEQ ID NO: 12633 - RNA, 22 nt, Mycobacterium leprae
ucuuccugcaugggcugauccg

SEQ ID NO: 12634 - RNA, 20 nt, Mycobacterium leprae
ucuauuaagauuaacguggc

SEQ ID NO: 12635 - RNA, 22 nt, Mycobacterium leprae
ugagaaggugcgccagcgcagc

SEQ ID NO: 12636 - RNA, 22 nt, Mycobacterium leprae
ugaugaaguauugguaccaggc

SEQ ID NO: 12637 - RNA, 22 nt, Mycobacterium leprae
uggaggagaggucgcauguugg

SEQ ID NO: 12638 - RNA, 22 nt, Mycobacterium leprae
ugggaaaaugggcuucgucuuc

SEQ ID NO: 12639 - RNA, 22 nt, Mycobacterium leprae
uucugagugauccgcacgaugg

SEQ ID NO: 12640 - RNA, 22 nt, Mycobacterium leprae
uucgauuucggggaauucgaaa

SEQ ID NO: 12641 - RNA, 22 nt, Mycobacterium leprae
uuacugugccgcaacuguauuc

SEQ ID NO: 12642 - RNA, 22 nt, Mycobacterium leprae
uuaaaaccaucguggggcucga

SEQ ID NO: 12643 - RNA, 22 nt, Mycobacterium leprae
uugaggaucagguucagcuggc

SEQ ID NO: 12644 - RNA, 22 nt, Mycobacterium leprae
uucuugacuugcuugcgcguau

SEQ ID NO: 12645 - RNA, 22 nt, Mycobacterium leprae
gacaaauuccugggacagguac

SEQ ID NO: 12646 - RNA, 19 nt, Mycobacterium leprae
gaaaagugugauuuauuga

SEQ ID NO: 12647 - RNA, 22 nt, Mycobacterium leprae
gcagauugcccacuuuggcacg

SEQ ID NO: 12648 - RNA, 22 nt, Mycobacterium leprae
gcaguuucggauucgccgggac

SEQ ID NO: 12649 - RNA, 22 nt, Mycobacterium leprae
gcccacaacgcaacugagccga

SEQ ID NO: 12650 - RNA, 22 nt, Mycobacterium leprae
gucuacauguugaugaugccag

SEQ ID NO: 12651 - RNA, 22 nt, Mycobacterium leprae
gucuuguccggccaagcuagga

SEQ ID NO: 12652 - RNA, 22 nt, Mycobacterium leprae
gucuuugcuaacgguuuggucu

SEQ ID NO: 12653 - RNA, 22 nt, Mycobacterium leprae
ggguugauccgcgcgauggaga

SEQ ID NO: 12654 - RNA, 22 nt, Mycobacterium leprae
ggguugcauuucaucugucgcg

SEQ ID NO: 12655 - RNA, 22 nt, Mycobacterium leprae
gguaaugauugcguaacaacca

SEQ ID NO: 12656 - RNA, 22 nt, Mycobacterium leprae
gggguugcuggauugcccuggu

SEQ ID NO: 12657 - RNA, 22 nt, Mycobacterium leprae
ggaagaauggcuaccacgucga

SEQ ID NO: 12658 - RNA, 22 nt, Mycobacterium leprae
gcugguagcgaugucgagccug

SEQ ID NO: 12659 - RNA, 20 nt, Mycobacterium leprae
aguauuuugccgcaggccau

SEQ ID NO: 12660 - RNA, 22 nt, Mycobacterium leprae
agucagugacucgagcgauaca

SEQ ID NO: 12661 - RNA, 22 nt, Mycobacterium leprae
agugauuccuugccuggacguc

SEQ ID NO: 12662 - RNA, 22 nt, Mycobacterium leprae
uuuggcuugacgugcuuuagcu

SEQ ID NO: 12663 - RNA, 22 nt, Mycobacterium leprae
uucagacuaguaauuagaguua

SEQ ID NO: 12664 - RNA, 20 nt, Mycobacterium leprae
uucaucuugcaagucccggu

SEQ ID NO: 12665 - RNA, 21 nt, Mycobacterium leprae
ugucuugacuguuggacagga

SEQ ID NO: 12666 - RNA, 22 nt, Mycobacterium leprae
ugucaaggaugccaucgagugu

SEQ ID NO: 12667 - RNA, 20 nt, Mycobacterium leprae
ugguguagcgcacacccugu

SEQ ID NO: 12668 - RNA, 22 nt, Mycobacterium leprae
auauugucggcgaguuugaucc

SEQ ID NO: 12669 - RNA, 22 nt, Mycobacterium leprae
aucggcagcggugggggaucca

SEQ ID NO: 12670 - RNA, 22 nt, Mycobacterium leprae
augguaugugguguugagacau

SEQ ID NO: 12671 - RNA, 22 nt, Mycobacterium leprae
cagccaggcagcugcuaggcgg

SEQ ID NO: 12672 - RNA, 22 nt, Mycobacterium leprae
ugauaucuauacgcgaccaggu

SEQ ID NO: 12673 - RNA, 22 nt, Mycobacterium leprae
ugaugauuggcauggcagugaa

SEQ ID NO: 12674 - RNA, 22 nt, Mycobacterium leprae
ugauggcgguauguaauguugg

SEQ ID NO: 12675 - RNA, 23 nt, Mycobacterium leprae
ugaauagcggcagcuugggcuca

SEQ ID NO: 12676 - RNA, 22 nt, Mycobacterium leprae
ugaacugacuacgcucagagcg

SEQ ID NO: 12677 - RNA, 23 nt, Mycobacterium leprae
ugaagccacgugaucgcacaucc

SEQ ID NO: 12678 - RNA, 22 nt, Mycobacterium leprae
ucuuuugacuugucauguucau

SEQ ID NO: 12679 - RNA, 22 nt, Mycobacterium leprae
ugggcuaugugguucauucugg

SEQ ID NO: 12680 - RNA, 22 nt, Mycobacterium leprae
uggcuuuuggcugaaacugacc

SEQ ID NO: 12681 - RNA, 22 nt, Mycobacterium leprae
ugcugaugucgaagacaaugua

SEQ ID NO: 12682 - RNA, 23 nt, Mycobacterium leprae
ugcugcugaugaucgcauccagc

SEQ ID NO: 12683 - RNA, 22 nt, Mycobacterium leprae
uccugcucggcguggugcucgg

SEQ ID NO: 12684 - RNA, 22 nt, Mycobacterium leprae
ucuuguuugcgggauugucgug

SEQ ID NO: 12685 - RNA, 22 nt, Mycobacterium leprae
cugguuuugguccuggggcagg

SEQ ID NO: 12686 - RNA, 22 nt, Mycobacterium leprae
gaaaaugacgaugucgccgggc

SEQ ID NO: 12687 - RNA, 22 nt, Mycobacterium leprae
cucgaugucauccggauagugg

SEQ ID NO: 12688 - RNA, 22 nt, Mycobacterium leprae
cugcugcugccaggcaugcggu

SEQ ID NO: 12689 - RNA, 22 nt, Mycobacterium leprae
cuggcacccagggccugcuguc

SEQ ID NO: 12690 - RNA, 19 nt, Mycobacterium leprae
gcagugaucugggccaguu

SEQ ID NO: 12691 - RNA, 22 nt, Mycobacterium leprae
gaggaugaagucgacgagcuac

SEQ ID NO: 12692 - RNA, 22 nt, Mycobacterium leprae
cccugcucaucaugucggugga

SEQ ID NO: 12693 - RNA, 22 nt, Mycobacterium leprae
ccaucaccggcaguuuagaacu

SEQ ID NO: 12694 - RNA, 22 nt, Mycobacterium leprae
cagucaacuagcuuggcuucuc

SEQ ID NO: 12695 - RNA, 18 nt, Mycobacterium leprae
caggggcuucgaugcggu

SEQ ID NO: 12696 - RNA, 22 nt, Mycobacterium leprae
ccaagcugcuccggucggugcu

SEQ ID NO: 12697 - RNA, 22 nt, Mycobacterium leprae
ccacaucuggcagaagagcugu

SEQ ID NO: 12698 - RNA, 22 nt, Mycobacterium leprae
cgaccugcaggucguuaucgcg

SEQ ID NO: 12699 - RNA, 22 nt, Mycobacterium leprae
cgaaggaaugcaggcuucaguc

SEQ ID NO: 12700 - RNA, 22 nt, Mycobacterium leprae
cgccagugcgcuggcuaggcug

SEQ ID NO: 12701 - RNA, 22 nt, Mycobacterium leprae
cgcugauggugucgggcggcag

SEQ ID NO: 12702 - RNA, 22 nt, Mycobacterium leprae
guaaagcacacagcgucgcccc

SEQ ID NO: 12703 - RNA, 22 nt, Mycobacterium leprae
ggugauagugcugcuguuggca

SEQ ID NO: 12704 - RNA, 22 nt, Mycobacterium leprae
gggagcucaaguucuuuggcua

SEQ ID NO: 12705 - RNA, 22 nt, Mycobacterium leprae
guuugguuuuucaggcuauucu

SEQ ID NO: 12706 - RNA, 22 nt, Mycobacterium leprae
guuuuauuuaacuagacaucca

SEQ ID NO: 12707 - RNA, 22 nt, Mycobacterium leprae
gugcguugccguuauguuacgg

SEQ ID NO: 12708 - RNA, 22 nt, Mycobacterium leprae
uauuagcuugcacgguaacaac

SEQ ID NO: 12709 - RNA, 22 nt, Mycobacterium leprae
uaucucauugggcgacgacugc

SEQ ID NO: 12710 - RNA, 22 nt, Mycobacterium leprae
uagcaugccgguaggguuugug

SEQ ID NO: 12711 - RNA, 23 nt, Mycobacterium leprae
uagcugaugccaggcuccgggac

SEQ ID NO: 12712 - RNA, 22 nt, Mycobacterium leprae
ucccggcugcgagcauuugcaa

SEQ ID NO: 12713 - RNA, 22 nt, Mycobacterium leprae
gcugcugcuagggcacccguug

SEQ ID NO: 12714 - RNA, 22 nt, Mycobacterium leprae
ggaauuugcaacguagugcagg

SEQ ID NO: 12715 - RNA, 19 nt, Mycobacterium leprae
gcuugaggguuguccggug

SEQ ID NO: 12716 - RNA, 22 nt, Mycobacterium leprae
aacuuuugguugucgucuggcg

SEQ ID NO: 12717 - RNA, 22 nt, Mycobacterium leprae
acaagcuguguccgucggcaga

SEQ ID NO: 12718 - RNA, 22 nt, Mycobacterium leprae
aaugcuaugauaauuuggcuga

SEQ ID NO: 12719 - RNA, 22 nt, Mycobacterium leprae
aaauauuuugggcaagcaacag

SEQ ID NO: 12720 - RNA, 22 nt, Mycobacterium leprae
aaugugaacgugcaagaagcga

SEQ ID NO: 12721 - RNA, 22 nt, Mycobacterium leprae
aaauguucgaaguaguucgcgg

SEQ ID NO: 12722 - RNA, 22 nt, Mycobacterium leprae
agcagaucauguucgaacuugc

SEQ ID NO: 12723 - RNA, 22 nt, Mycobacterium leprae
agcugaugagcacgcgggcggg

SEQ ID NO: 12724 - RNA, 17 nt, Mycobacterium leprae
agcagggcagcgaucga

SEQ ID NO: 12725 - RNA, 22 nt, Mycobacterium leprae
agcugauagacggcggcagugg

SEQ ID NO: 12726 - RNA, 22 nt, Mycobacterium leprae
agccauccuggugagcuuucuu

SEQ ID NO: 12727 - RNA, 18 nt, Mycobacterium leprae
accugcucgaagcugaag

SEQ ID NO: 12728 - RNA, 22 nt, Mycobacterium leprae
acugaguuuaugcaguguuccg

SEQ ID NO: 12729 - RNA, 22 nt, Mycobacterium leprae
augccauugcuggaccuaaucc

SEQ ID NO: 12730 - RNA, 22 nt, Mycobacterium leprae
caacaucucggggugcaacuug

SEQ ID NO: 12731 - RNA, 22 nt, Mycobacterium leprae
cagcaacagcgcagaauuuucu

SEQ ID NO: 12732 - RNA, 22 nt, Mycobacterium leprae
augugguuggcagcgcuggaaa

SEQ ID NO: 12733 - RNA, 22 nt, Mycobacterium leprae
augugugaauuuaacauguuga

SEQ ID NO: 12734 - RNA, 22 nt, Mycobacterium leprae
auguauuggugcaaguguccug

SEQ ID NO: 12735 - RNA, 22 nt, Mycobacterium leprae
augucacuucccgugccgauuu

SEQ ID NO: 12736 - RNA, 22 nt, Mycobacterium leprae
auguucagaucggcaucgguua

SEQ ID NO: 12737 - RNA, 22 nt, Mycobacterium leprae
auggggguguucggugucaacc

SEQ ID NO: 12738 - RNA, 22 nt, Mycobacterium leprae
augcugaugcccacgcgucgac

SEQ ID NO: 12739 - RNA, 22 nt, Mycobacterium leprae
augcuguguuucaaccguauug

SEQ ID NO: 12740 - RNA, 22 nt, Mycobacterium leprae
cccugcucaguagucggacccg

SEQ ID NO: 12741 - RNA, 19 nt, Mycobacterium leprae
caugaugacguaccuaguc

SEQ ID NO: 12742 - RNA, 22 nt, Mycobacterium leprae
caugggauucgacguaguucac

SEQ ID NO: 12743 - RNA, 22 nt, Mycobacterium leprae
caggagcacgguaacucggugc

SEQ ID NO: 12744 - RNA, 22 nt, Mycobacterium leprae
cuuuggcuucggguagauugga

SEQ ID NO: 12745 - RNA, 22 nt, Mycobacterium leprae
cuuuugaagcugcuggcugagg

SEQ ID NO: 12746 - RNA, 22 nt, Mycobacterium leprae
cuuaauccgacgacccugccau

SEQ ID NO: 12747 - RNA, 22 nt, Mycobacterium leprae
cuaggcaguuuucgggguaucg

SEQ ID NO: 12748 - RNA, 22 nt, Mycobacterium leprae
cugaacaguucgucuuagccgc

SEQ ID NO: 12749 - RNA, 22 nt, Mycobacterium leprae
cugcugcugacacgccguuccg

SEQ ID NO: 12750 - RNA, 21 nt, Mycobacterium leprae
cgauggggguugaucuuugag

SEQ ID NO: 12751 - RNA, 22 nt, Mycobacterium leprae
cgcaaauggcguucauaauggg

SEQ ID NO: 12752 - RNA, 22 nt, Homo sapiens
uuucuauguugaccagucuaga

SEQ ID NO: 12753 - RNA, 22 nt, Homo sapiens
ucagaguagaaacacuuccaua

SEQ ID NO: 12754 - RNA, 22 nt, Homo sapiens
aaagugcugggauuggccgggc

SEQ ID NO: 12755 - RNA, 22 nt, Homo sapiens
uuaagucacacuagacaacuga

SEQ ID NO: 12756 - RNA, 22 nt, Homo sapiens
uggaaugguaucuuguuggggu

SEQ ID NO: 12757 - RNA, 22 nt, Homo sapiens
aauaaagucugaagugugcuua

SEQ ID NO: 12758 - RNA, 20 nt, Homo sapiens
guggaagauaaguagccuga

SEQ ID NO: 12759 - RNA, 22 nt, Homo sapiens
ucugacacagugauuaguaaau

SEQ ID NO: 12760 - RNA, 22 nt, Homo sapiens
aaagugcuucucuuuggugggu

SEQ ID NO: 12761 - RNA, 22 nt, Homo sapiens
auuaagugcuugcagaagucca

SEQ ID NO: 12762 - RNA, 22 nt, Homo sapiens
uugagauaggagcuguuguucu

SEQ ID NO: 12763 - RNA, 22 nt, Homo sapiens
augguuuauuuguaagcagagu

SEQ ID NO: 12764 - RNA, 22 nt, Homo sapiens
ugugaauggugcugcaaugaac

SEQ ID NO: 12765 - RNA, 18 nt, Homo sapiens
aaaaagugcucaggccua

SEQ ID NO: 12766 - RNA, 22 nt, Homo sapiens
agaaccaaucccacauggauac

SEQ ID NO: 12767 - RNA, 22 nt, Homo sapiens
auuuggguuuuacaucaggcua

SEQ ID NO: 12768 - RNA, 21 nt, Homo sapiens
uaaagcuuagcuauaguggcu

SEQ ID NO: 12769 - RNA, 22 nt, Homo sapiens
aucacugugauuucuacugugc

SEQ ID NO: 12770 - RNA, 22 nt, Homo sapiens
cccaguuuugcuucucaugagg

SEQ ID NO: 12771 - RNA, 22 nt, Homo sapiens
auggccgggugcgguggcucac

SEQ ID NO: 12772 - RNA, 22 nt, Homo sapiens
aauugcacuacugcacucccac

SEQ ID NO: 12773 - RNA, 22 nt, Homo sapiens
aaagucuguuacagcuauuucu

SEQ ID NO: 12774 - RNA, 22 nt, Homo sapiens
gugagauaucuagacuagggaa

SEQ ID NO: 12775 - RNA, 22 nt, Homo sapiens
gcauggccuuuaaaugucacag

SEQ ID NO: 12776 - RNA, 21 nt, Homo sapiens
uacaaugcacaggagagccuc

SEQ ID NO: 12777 - RNA, 22 nt, Homo sapiens
cugcaguaaccacuguaggugu

SEQ ID NO: 12778 - RNA, 22 nt, Homo sapiens
uugaaagacagaggggcaaguu

SEQ ID NO: 12779 - RNA, 22 nt, Homo sapiens
uauugauuaauugugauuaggc

SEQ ID NO: 12780 - RNA, 22 nt, Homo sapiens
augaccaaugggcagagcuaga

SEQ ID NO: 12781 - RNA, 22 nt, Homo sapiens
aauaaagcagcuuuuugggacu

SEQ ID NO: 12782 - RNA, 19 nt, Homo sapiens
uccaccgcgugcaccucua

SEQ ID NO: 12783 - RNA, 22 nt, Homo sapiens
aacagugcuguuauaaauguac

SEQ ID NO: 12784 - RNA, 17 nt, Homo sapiens
cccuaguagcugggacu

SEQ ID NO: 12785 - RNA, 22 nt, Homo sapiens
auaaaugcuuagaucuguauau

SEQ ID NO: 12786 - RNA, 21 nt, Homo sapiens
auugcacaauauacccaugua

SEQ ID NO: 12787 - RNA, 22 nt, Homo sapiens
uaagugcuugacuuugauguuu

SEQ ID NO: 12788 - RNA, 22 nt, Homo sapiens
uaagugaauuucacuacugagu

SEQ ID NO: 12789 - RNA, 22 nt, Homo sapiens
aaagugcugagacagacuggga

SEQ ID NO: 12790 - RNA, 22 nt, Homo sapiens
uuuuaguggacaaagguauuua

SEQ ID NO: 12791 - RNA, 20 nt, Homo sapiens
guccauuugcugccauugcu

SEQ ID NO: 12792 - RNA, 22 nt, Homo sapiens
auagcagugugaggacagacua

SEQ ID NO: 12793 - RNA, 22 nt, Homo sapiens
aacacuaucugccuuacaggga

SEQ ID NO: 12794 - RNA, 22 nt, Homo sapiens
cauugcacucuaucccgguggg

SEQ ID NO: 12795 - RNA, 22 nt, Homo sapiens
cauugcacugcagcccgggcaa

SEQ ID NO: 12796 - RNA, 22 nt, Homo sapiens
uuaaaagcuaucuccaagguca

SEQ ID NO: 12797 - RNA, 22 nt, Homo sapiens
auuauugcucccaauuuuucac

SEQ ID NO: 12798 - RNA, 19 nt, Homo sapiens
cauugcacuccacccuggg

SEQ ID NO: 12799 - RNA, 22 nt, Homo sapiens
augaguaugagaauacauuaag

SEQ ID NO: 12800 - RNA, 22 nt, Homo sapiens
uagcagcauaaauggacuaaga

SEQ ID NO: 12801 - RNA, 22 nt, Homo sapiens
ugagauaauuuacuuguugagg

SEQ ID NO: 12802 - RNA, 22 nt, Homo sapiens
uugaaggaggugcucacucucg

SEQ ID NO: 12803 - RNA, 22 nt, Homo sapiens
ucuggcuugugaacugucuucu

SEQ ID NO: 12804 - RNA, 22 nt, Homo sapiens
gagauacuugguuucuguuucu

SEQ ID NO: 12805 - RNA, 22 nt, Homo sapiens
cauacagcuaguaaguguaaga

SEQ ID NO: 12806 - RNA, 22 nt, Homo sapiens
uucuggccuccauuuuucuccu

SEQ ID NO: 12807 - RNA, 19 nt, Homo sapiens
uacccagaagcagcauugu

SEQ ID NO: 12808 - RNA, 22 nt, Homo sapiens
acagaacugggcuugcuuuugg

SEQ ID NO: 12809 - RNA, 22 nt, Homo sapiens
uugaaagaugaacuggauugga

SEQ ID NO: 12810 - RNA, 22 nt, Homo sapiens
guaaucucagcuacuugggagg

SEQ ID NO: 12811 - RNA, 22 nt, Homo sapiens
uaugugcaaauuaauugcuaga

SEQ ID NO: 12812 - RNA, 22 nt, Homo sapiens
aacagugcauuccuguccauau

SEQ ID NO: 12813 - RNA, 22 nt, Homo sapiens
aagugcuucuuuccucgagaag

SEQ ID NO: 12814 - RNA, 22 nt, Homo sapiens
aagugcaaauucccaggcucug

SEQ ID NO: 12815 - RNA, 22 nt, Homo sapiens
uucauaguucuuuuagucauua

SEQ ID NO: 12816 - RNA, 22 nt, Homo sapiens
acccugugaauauuuaaacuuc

SEQ ID NO: 12817 - RNA, 22 nt, Homo sapiens
gacacugucuucugcucuuaaa

SEQ ID NO: 12818 - RNA, 22 nt, Homo sapiens
caagugaauaguugcucucaga

SEQ ID NO: 12819 - RNA, 22 nt, Homo sapiens
uuacuguauagaaucaucuuga

SEQ ID NO: 12820 - RNA, 19 nt, Homo sapiens
ugacaugaaacccaagauc

SEQ ID NO: 12821 - RNA, 22 nt, Homo sapiens
uucauggaacaaguggguucaa

SEQ ID NO: 12822 - RNA, 22 nt, Homo sapiens
uggucuucuggccuccagaacc

SEQ ID NO: 12823 - RNA, 22 nt, Homo sapiens
ugacauuacagucacuugcugu

SEQ ID NO: 12824 - RNA, 22 nt, Homo sapiens
ucaaagugagcuccuucucacu

SEQ ID NO: 12825 - RNA, 22 nt, Homo sapiens
uaagugaauguuggcuacugaa

SEQ ID NO: 12826 - RNA, 22 nt, Homo sapiens
aucaugucuucccagugauucu

SEQ ID NO: 12827 - RNA, 22 nt, Homo sapiens
uaucacaggucaggaaucuugc

SEQ ID NO: 12828 - RNA, 22 nt, Homo sapiens
gcaaagaaugcagauuugccuc

SEQ ID NO: 12829 - RNA, 22 nt, Homo sapiens
ugagacacugaauccggccuga

SEQ ID NO: 12830 - RNA, 22 nt, Homo sapiens
uugagcaauccuccugccaugu

SEQ ID NO: 12831 - RNA, 22 nt, Homo sapiens
ucggcucagugcaagcucugcc

SEQ ID NO: 12832 - RNA, 22 nt, Homo sapiens
guaaaguaaagcacaucaaggu

SEQ ID NO: 12833 - RNA, 22 nt, Homo sapiens
uugacuucagagcugauucaag

SEQ ID NO: 12834 - RNA, 22 nt, Homo sapiens
uaugucuucuuuagagaaaugu

SEQ ID NO: 12835 - RNA, 22 nt, Homo sapiens
augggaaaaucagaaggccugg

SEQ ID NO: 12836 - RNA, 22 nt, Homo sapiens
uagcagaauauaccucuuacuu

SEQ ID NO: 12837 - RNA, 21 nt, Homo sapiens
gacauggcgauacuccgucuc

SEQ ID NO: 12838 - RNA, 22 nt, Homo sapiens
cuagcagacaugggcugaacca

SEQ ID NO: 12839 - RNA, 22 nt, Homo sapiens
uagcaguauggagcgaggccca

SEQ ID NO: 12840 - RNA, 22 nt, Homo sapiens
uugaaagucauuucuucuaagu

SEQ ID NO: 12841 - RNA, 22 nt, Homo sapiens
cuggaguaugaaccauguauca

SEQ ID NO: 12842 - RNA, 22 nt, Homo sapiens
uggcaagagauaugugucuaua

SEQ ID NO: 12843 - RNA, 22 nt, Homo sapiens
uuaaucuguucucuguauucua

SEQ ID NO: 12844 - RNA, 22 nt, Homo sapiens
ugcauccauucuagacucaucu

SEQ ID NO: 12845 - RNA, 20 nt, Homo sapiens
ugugauuauuuaguugcaug

SEQ ID NO: 12846 - RNA, 20 nt, Homo sapiens
uaagugcuuuauauugauua

SEQ ID NO: 12847 - RNA, 18 nt, Homo sapiens
uaaauugcuucaccugag

SEQ ID NO: 12848 - RNA, 22 nt, Homo sapiens
uggaaugugaauaacuuccuuc

SEQ ID NO: 12849 - RNA, 17 nt, Homo sapiens
ucuaauaauaugcauuu

SEQ ID NO: 12850 - RNA, 22 nt, Homo sapiens
uaaagcuuggauuuaggcuaau

SEQ ID NO: 12851 - RNA, 22 nt, Homo sapiens
gugugauuguuaauuuuaggug

SEQ ID NO: 12852 - RNA, 18 nt, Homo sapiens
cuugucaaaucuuuccuc

SEQ ID NO: 12853 - RNA, 22 nt, Homo sapiens
uggaaugucagcuacaagaggg

SEQ ID NO: 12854 - RNA, 20 nt, Homo sapiens
auguaauguaugauauguac

SEQ ID NO: 12855 - RNA, 22 nt, Homo sapiens
uugucuccuagacgaccaggcg

SEQ ID NO: 12856 - RNA, 22 nt, Homo sapiens
cacauugcaggaaaguucauua

SEQ ID NO: 12857 - RNA, 20 nt, Homo sapiens
cuugccuagcccuuugccuc

SEQ ID NO: 12858 - RNA, 18 nt, Homo sapiens
cuuaacauugggaugaua

SEQ ID NO: 12859 - RNA, 17 nt, Homo sapiens
uuuuggauuagaaaucc

SEQ ID NO: 12860 - RNA, 22 nt, Homo sapiens
uaaucacagagguuuggccuca

SEQ ID NO: 12861 - RNA, 22 nt, Homo sapiens
gugucccagugugcauacaggu

SEQ ID NO: 12862 - RNA, 22 nt, Homo sapiens
acugcacuccaccuugggcaac

SEQ ID NO: 12863 - RNA, 18 nt, Homo sapiens
ggaaaacuuuucuaagua

SEQ ID NO: 12864 - RNA, 22 nt, Homo sapiens
cauugcacuccagcucugggcg

SEQ ID NO: 12865 - RNA, 22 nt, Homo sapiens
ccuguguuaugguuucuaaugu

SEQ ID NO: 12866 - RNA, 22 nt, Homo sapiens
uagaaagcaugaccuucagaua

SEQ ID NO: 12867 - RNA, 22 nt, Homo sapiens
ugaaacauacacucugaugggg

SEQ ID NO: 12868 - RNA, 22 nt, Homo sapiens
auugcaugucauguuuagugua

SEQ ID NO: 12869 - RNA, 22 nt, Homo sapiens
cauugcacuccagccugaguga

SEQ ID NO: 12870 - RNA, 23 nt, Homo sapiens
ugagaugucugauugcgaggguc

SEQ ID NO: 12871 - RNA, 22 nt, Homo sapiens
guggaauggaaugauuguguau

SEQ ID NO: 12872 - RNA, 20 nt, Homo sapiens
aucacuggagaaggaaaccu

SEQ ID NO: 12873 - RNA, 22 nt, Homo sapiens
guaaucucagcuacucaggagg

SEQ ID NO: 12874 - RNA, 22 nt, Homo sapiens
gacauguaaggcucucucuguu

SEQ ID NO: 12875 - RNA, 22 nt, Homo sapiens
aauacugugauaucgagcgauu

SEQ ID NO: 12876 - RNA, 22 nt, Homo sapiens
ucacuaaagaaaauggcaugga

SEQ ID NO: 12877 - RNA, 22 nt, Homo sapiens
uaguuauggaguaauuuuaagc

SEQ ID NO: 12878 - RNA, 22 nt, Homo sapiens
aaguggaauguuuguggcacaa

SEQ ID NO: 12879 - RNA, 18 nt, Homo sapiens
agagcacugaguuuuaga

SEQ ID NO: 12880 - RNA, 22 nt, Homo sapiens
auaagauaguggaagugggauu

SEQ ID NO: 12881 - RNA, 22 nt, Homo sapiens
uuccaguuauuauaccucuuaa

SEQ ID NO: 12882 - RNA, 22 nt, Homo sapiens
aauggcaagagccacagaggcg

SEQ ID NO: 12883 - RNA, 22 nt, Homo sapiens
guaugauacuguaacagugggu

SEQ ID NO: 12884 - RNA, 22 nt, Homo sapiens
guucaaguuuucucuugugggu

SEQ ID NO: 12885 - RNA, 22 nt, Homo sapiens
uuccaguugugagcuauccggg

SEQ ID NO: 12886 - RNA, 22 nt, Homo sapiens
uuagucaaguguacugugaaug

SEQ ID NO: 12887 - RNA, 20 nt, Homo sapiens
uccugagauucccaguucuc

SEQ ID NO: 12888 - RNA, 22 nt, Homo sapiens
uuuaucuguuuaaaacuguuca

SEQ ID NO: 12889 - RNA, 22 nt, Homo sapiens
agaaacauucucuugccuccuu

SEQ ID NO: 12890 - RNA, 22 nt, Homo sapiens
uugugcauaucagagguuugcu

SEQ ID NO: 12891 - RNA, 22 nt, Homo sapiens
uggucaccuucuugcucugucu

SEQ ID NO: 12892 - RNA, 21 nt, Homo sapiens
aggauaguagauuaaauauuu

SEQ ID NO: 12893 - RNA, 22 nt, Homo sapiens
cauugcacuccagccuuggcaa

SEQ ID NO: 12894 - RNA, 22 nt, Homo sapiens
auagcagugugaaaauguacua

SEQ ID NO: 12895 - RNA, 22 nt, Homo sapiens
ucucaaguggucgcaguuagau

SEQ ID NO: 12896 - RNA, 22 nt, Homo sapiens
uuccaguguguucauccucaga

SEQ ID NO: 12897 - RNA, 22 nt, Homo sapiens
gugaaaagaugagcaccauaca

SEQ ID NO: 12898 - RNA, 22 nt, Homo sapiens
gcuggguucagagugggcugcg

SEQ ID NO: 12899 - RNA, 22 nt, Homo sapiens
gugucaugagggggacaggaag

SEQ ID NO: 12900 - RNA, 22 nt, Homo sapiens
auaugcuuauuagcaagaaaua

SEQ ID NO: 12901 - RNA, 23 nt, Homo sapiens
cuuuguccccacccaaaucucau

SEQ ID NO: 12902 - RNA, 22 nt, Homo sapiens
ugaagugaagacucacagaagg

SEQ ID NO: 12903 - RNA, 22 nt, Homo sapiens
uucaacagugauggccuuugua

SEQ ID NO: 12904 - RNA, 22 nt, Homo sapiens
uugccuaggcuggagugcagua

SEQ ID NO: 12905 - RNA, 22 nt, Homo sapiens
uaacagcucuacagcugcucuu

SEQ ID NO: 12906 - RNA, 22 nt, Homo sapiens
aagggaaugugguagcugguuu

SEQ ID NO: 12907 - RNA, 22 nt, Homo sapiens
ucccauguagcuaggauuacag

SEQ ID NO: 12908 - RNA, 22 nt, Homo sapiens
ugacaugaugagcaauaauggc

SEQ ID NO: 12909 - RNA, 22 nt, Homo sapiens
guucaagugauagcugggauua

SEQ ID NO: 12910 - RNA, 22 nt, Homo sapiens
uucaguccauuuccuuggucac

SEQ ID NO: 12911 - RNA, 22 nt, Homo sapiens
auugcagcuugcagggugugua

SEQ ID NO: 12912 - RNA, 22 nt, Homo sapiens
ugaaauuauucuuaccaaggug

SEQ ID NO: 12913 - RNA, 23 nt, Homo sapiens
uggcaagaauucuuaccgugugg

SEQ ID NO: 12914 - RNA, 22 nt, Homo sapiens
auuguaauuuuagagaaagugg

SEQ ID NO: 12915 - RNA, 22 nt, Homo sapiens
gauuuuccaguggcccugauca

SEQ ID NO: 12916 - RNA, 22 nt, Homo sapiens
ggaucauaugauagcucaauuu

SEQ ID NO: 12917 - RNA, 22 nt, Homo sapiens
guggaaaaguaguugcgguuuu

SEQ ID NO: 12918 - RNA, 22 nt, Homo sapiens
gugagguacgugucaagaacca

SEQ ID NO: 12919 - RNA, 22 nt, Homo sapiens
uugcauagaccgaugucuugga

SEQ ID NO: 12920 - RNA, 22 nt, Homo sapiens
uuggaagacaaugcugauucuc

SEQ ID NO: 12921 - RNA, 18 nt, Homo sapiens
uuucaagucuuaggugac

SEQ ID NO: 12922 - RNA, 22 nt, Homo sapiens
auucacuuuuauagacaggucu

SEQ ID NO: 12923 - RNA, 22 nt, Homo sapiens
augauaaguuauuagaagaaga

SEQ ID NO: 12924 - RNA, 18 nt, Homo sapiens
uagaauauaggucauucu

SEQ ID NO: 12925 - RNA, 22 nt, Homo sapiens
ugagauaggaucuugcucuguu

SEQ ID NO: 12926 - RNA, 22 nt, Homo sapiens
ucauggcacugaugagaguuuc

SEQ ID NO: 12927 - RNA, 22 nt, Homo sapiens
acccugucauccacauggugcu

SEQ ID NO: 12928 - RNA, 22 nt, Homo sapiens
uagacacugcauauuuuuuuaa

SEQ ID NO: 12929 - RNA, 22 nt, Homo sapiens
uuuugcacuguuuuaucugaca

SEQ ID NO: 12930 - RNA, 22 nt, Homo sapiens
guaauaacuguggaaaaagguu

SEQ ID NO: 12931 - RNA, 22 nt, Homo sapiens
aauugcauugaauuuguagcuu

SEQ ID NO: 12932 - RNA, 22 nt, Homo sapiens
uguauuuguuguuaaauggaga

SEQ ID NO: 12933 - RNA, 22 nt, Homo sapiens
auuaucacaguuuugcauaugg

SEQ ID NO: 12934 - RNA, 22 nt, Homo sapiens
uaucacuuugauaguuuaaaug

SEQ ID NO: 12935 - RNA, 22 nt, Homo sapiens
gucacauugaugcccauggugg

SEQ ID NO: 12936 - RNA, 22 nt, Homo sapiens
uugugcaugaugcauacauggu

SEQ ID NO: 12937 - RNA, 22 nt, Homo sapiens
aaguaaauauccgguaguccca

SEQ ID NO: 12938 - RNA, 22 nt, Homo sapiens
aacacggcccgcagagcaagcu

SEQ ID NO: 12939 - RNA, 22 nt, Homo sapiens
ugugucuccugaaaauucacau

SEQ ID NO: 12940 - RNA, 22 nt, Homo sapiens
aauacagcacacagaugggucu

SEQ ID NO: 12941 - RNA, 22 nt, Homo sapiens
ugugaacacagaggcuauggca

SEQ ID NO: 12942 - RNA, 22 nt, Homo sapiens
ugacagagaagcauugaguuca

SEQ ID NO: 12943 - RNA, 22 nt, Homo sapiens
gcaccaugguagaauaauggua

SEQ ID NO: 12944 - RNA, 22 nt, Homo sapiens
ggcacaaugucagcucacugca

SEQ ID NO: 12945 - RNA, 22 nt, Homo sapiens
guuuuuggggucacuauuaccg

SEQ ID NO: 12946 - RNA, 22 nt, Homo sapiens
gucacuggcugucuuguaugau

SEQ ID NO: 12947 - RNA, 22 nt, Homo sapiens
uuaggcuuuauugaaaacaaua

SEQ ID NO: 12948 - RNA, 22 nt, Homo sapiens
ucaugucuuguuguauuuauuu

SEQ ID NO: 12949 - RNA, 22 nt, Homo sapiens
uagagguauuaacaguagaaga

SEQ ID NO: 12950 - RNA, 22 nt, Homo sapiens
cugauacugagaccuuggguua

SEQ ID NO: 12951 - RNA, 22 nt, Homo sapiens
cucucaagaugcugggauuaca

SEQ ID NO: 12952 - RNA, 22 nt, Homo sapiens
aguggaaucuguuauacuaacu

SEQ ID NO: 12953 - RNA, 22 nt, Homo sapiens
agcuggauguauguuaagugaa

SEQ ID NO: 12954 - RNA, 22 nt, Homo sapiens
uugugaauggugccgcgauaaa

SEQ ID NO: 12955 - RNA, 22 nt, Homo sapiens
ggcagcaugggugccuuuguga

SEQ ID NO: 12956 - RNA, 19 nt, Homo sapiens
ugcaaauucuaaaaacuga

SEQ ID NO: 12957 - RNA, 22 nt, Homo sapiens
ugcagagaaacauuuuguauuu

SEQ ID NO: 12958 - RNA, 22 nt, Homo sapiens
augagauucuuagagaagucug

SEQ ID NO: 12959 - RNA, 22 nt, Homo sapiens
aaaugcauaucaagauugcccu

SEQ ID NO: 12960 - RNA, 22 nt, Homo sapiens
uuagggaguaaucuaaaaaugg

SEQ ID NO: 12961 - RNA, 22 nt, Homo sapiens
uagagguauguauaguauucuu

SEQ ID NO: 12962 - RNA, 22 nt, Homo sapiens
uguagucauuccuuuuugcuuu

SEQ ID NO: 12963 - RNA, 22 nt, Homo sapiens
uuaacagucacuuagcucauuu

SEQ ID NO: 12964 - RNA, 22 nt, Homo sapiens
uacucuuuagcuccuuaaggaa

SEQ ID NO: 12965 - RNA, 22 nt, Homo sapiens
acccgcccagguguggccggga

SEQ ID NO: 12966 - RNA, 22 nt, Homo sapiens
gugaaagauuaaaccagugugu

SEQ ID NO: 12967 - RNA, 22 nt, Homo sapiens
acuggacuuaaugaugaauugu

SEQ ID NO: 12968 - RNA, 22 nt, Homo sapiens
aaagugcuguagacugggcgca

SEQ ID NO: 12969 - RNA, 22 nt, Homo sapiens
gucuggcacagggaaaguacaa

SEQ ID NO: 12970 - RNA, 22 nt, Homo sapiens
uugcacauuuuuucuggcagaa

SEQ ID NO: 12971 - RNA, 22 nt, Homo sapiens
acaccuguggucccaguaacuu

SEQ ID NO: 12972 - RNA, 22 nt, Homo sapiens
uaucaugucuguguguaccuag

SEQ ID NO: 12973 - RNA, 22 nt, Homo sapiens
gucaggcaccgauacaguuuuu

SEQ ID NO: 12974 - RNA, 21 nt, Homo sapiens
gagguaccucauguaagugga

SEQ ID NO: 12975 - RNA, 22 nt, Homo sapiens
uacaagcacaggcagcaggcug

SEQ ID NO: 12976 - RNA, 22 nt, Homo sapiens
gucacugucuacuguaauagcc

SEQ ID NO: 12977 - RNA, 20 nt, Homo sapiens
uggugguuuuaugugguuua

SEQ ID NO: 12978 - RNA, 22 nt, Homo sapiens
agccuguguugaauuauagaaa

SEQ ID NO: 12979 - RNA, 22 nt, Homo sapiens
ucugagaugagacuuugaauuu

SEQ ID NO: 12980 - RNA, 22 nt, Homo sapiens
acugcacuccaguuugggcagc

SEQ ID NO: 12981 - RNA, 22 nt, Homo sapiens
aagggaauguuguggcugguug

SEQ ID NO: 12982 - RNA, 22 nt, Homo sapiens
uguacuucaagauuaugguuua

SEQ ID NO: 12983 - RNA, 22 nt, Homo sapiens
gcuggaauuaacauagaugugc

SEQ ID NO: 12984 - RNA, 22 nt, Homo sapiens
gagauauuuagaaauguguucu

SEQ ID NO: 12985 - RNA, 22 nt, Homo sapiens
auagugcagugaugaaccuagg

SEQ ID NO: 12986 - RNA, 22 nt, Homo sapiens
uagcaguauaugagagcuauug

SEQ ID NO: 12987 - RNA, 22 nt, Homo sapiens
aacaccauucucuguaacaaga

SEQ ID NO: 12988 - RNA, 19 nt, Homo sapiens
ugccauguagcacaugguc

SEQ ID NO: 12989 - RNA, 22 nt, Homo sapiens
cacccuugcagggacagcuuug

SEQ ID NO: 12990 - RNA, 22 nt, Homo sapiens
auugcuauuauuugaccauugu

SEQ ID NO: 12991 - RNA, 22 nt, Homo sapiens
gagacggagucuugcucuguug

SEQ ID NO: 12992 - RNA, 22 nt, Homo sapiens
gagacggagucucgcucugucg

SEQ ID NO: 12993 - RNA, 21 nt, Homo sapiens
uuacaauggcuccuugaaggu

SEQ ID NO: 12994 - RNA, 20 nt, Homo sapiens
uaagugcuugaugaaugaac

SEQ ID NO: 12995 - RNA, 22 nt, Homo sapiens
agaacacugaguucagggucag

SEQ ID NO: 12996 - RNA, 22 nt, Homo sapiens
aaguacuguuuaaauugcagaa

SEQ ID NO: 12997 - RNA, 22 nt, Homo sapiens
auaugucuuaguuaccuugggc

SEQ ID NO: 12998 - RNA, 22 nt, Homo sapiens
ucacuguugaugggcaugcagg

SEQ ID NO: 12999 - RNA, 22 nt, Homo sapiens
gaaucacaguuauuagagcagc

SEQ ID NO: 13000 - RNA, 23 nt, Homo sapiens
aaauuugccuauuauuccuaugg

SEQ ID NO: 13001 - RNA, 19 nt, Homo sapiens
ccauggcaaugaucugaug

SEQ ID NO: 13002 - RNA, 16 nt, Homo sapiens
uguauugcuaaaaaga

SEQ ID NO: 13003 - RNA, 22 nt, Homo sapiens
uaucacagcauugucuauaaua

SEQ ID NO: 13004 - RNA, 22 nt, Homo sapiens
agaguacaggcaaguuagucau

SEQ ID NO: 13005 - RNA, 22 nt, Homo sapiens
cauugcacugcauucugggcaa

SEQ ID NO: 13006 - RNA, 22 nt, Homo sapiens
ugucaguuucuugagauggaac

SEQ ID NO: 13007 - RNA, 22 nt, Homo sapiens
ugugaagaaagucauugguagc

SEQ ID NO: 13008 - RNA, 22 nt, Homo sapiens
ucaguaaaugcuguucucuuuu

SEQ ID NO: 13009 - RNA, 21 nt, Homo sapiens
agcagcuuugguugaagcaga

SEQ ID NO: 13010 - RNA, 22 nt, Homo sapiens
acugaguguugauuuagauuaa

SEQ ID NO: 13011 - RNA, 22 nt, Homo sapiens
uuauucauuaauugcuaagguu

SEQ ID NO: 13012 - RNA, 22 nt, Homo sapiens
uggcaagauuguuccgguuugg

SEQ ID NO: 13013 - RNA, 22 nt, Homo sapiens
auauguauuuuaacguguaagg

SEQ ID NO: 13014 - RNA, 22 nt, Homo sapiens
uaaagugaggauggcaguaggu

SEQ ID NO: 13015 - RNA, 22 nt, Homo sapiens
cuaugucuuucauauuuugggg

SEQ ID NO: 13016 - RNA, 22 nt, Homo sapiens
augacauguauuuccaggauuu

SEQ ID NO: 13017 - RNA, 22 nt, Homo sapiens
auaaagacacuuggcaugauuu

SEQ ID NO: 13018 - RNA, 22 nt, Homo sapiens
cugauugucaucaauauuauua

SEQ ID NO: 13019 - RNA, 22 nt, Homo sapiens
aaaugcagucuuuguucugggc

SEQ ID NO: 13020 - RNA, 22 nt, Homo sapiens
cagucacagugacaggaugugg

SEQ ID NO: 13021 - RNA, 22 nt, Homo sapiens
uuauuagguuagugcaaaaguu

SEQ ID NO: 13022 - RNA, 22 nt, Homo sapiens
auaugucuguuuagucuguaau

SEQ ID NO: 13023 - RNA, 22 nt, Homo sapiens
uagaucauauacuugccaugac

SEQ ID NO: 13024 - RNA, 22 nt, Homo sapiens
guagugcaguuugagaaucagu

SEQ ID NO: 13025 - RNA, 22 nt, Homo sapiens
cauugcacuccagccugcugac

SEQ ID NO: 13026 - RNA, 22 nt, Homo sapiens
ugagaugugugcauucaacuca

SEQ ID NO: 13027 - RNA, 22 nt, Homo sapiens
uugcacauugcaccuuuuguau

SEQ ID NO: 13028 - RNA, 22 nt, Homo sapiens
uuucugaggccucaccagaagc

SEQ ID NO: 13029 - RNA, 22 nt, Homo sapiens
uaugacauaguccuuaacccuc

SEQ ID NO: 13030 - RNA, 22 nt, Homo sapiens
guucuggagauaaagccaaggu

SEQ ID NO: 13031 - RNA, 22 nt, Homo sapiens
augagauaaaccaucucuuaag

SEQ ID NO: 13032 - RNA, 19 nt, Homo sapiens
cuauugcacauagcugaag

SEQ ID NO: 13033 - RNA, 22 nt, Homo sapiens
gcugagaucucuugccugaacu

SEQ ID NO: 13034 - RNA, 22 nt, Homo sapiens
uugugaauggugcugcaguaaa

SEQ ID NO: 13035 - RNA, 22 nt, Homo sapiens
guggaagauaguguguuaaugu

SEQ ID NO: 13036 - RNA, 22 nt, Homo sapiens
ucugccuuuucaugugggaugg

SEQ ID NO: 13037 - RNA, 22 nt, Homo sapiens
uucuauggucacagaugcuuga

SEQ ID NO: 13038 - RNA, 19 nt, Homo sapiens
uauguaguuuucucaauau

SEQ ID NO: 13039 - RNA, 21 nt, Homo sapiens
ugugaacauguuggguggcau

SEQ ID NO: 13040 - RNA, 18 nt, Homo sapiens
auugcacaccagccuggg

SEQ ID NO: 13041 - RNA, 22 nt, Homo sapiens
ucauggcauuguuaaggguuuu

SEQ ID NO: 13042 - RNA, 22 nt, Homo sapiens
uuacaguugugagccaccaugc

SEQ ID NO: 13043 - RNA, 22 nt, Homo sapiens
cauugcacuccagucugggcaa

SEQ ID NO: 13044 - RNA, 22 nt, Homo sapiens
ucuggcuuauuucacuuagcau

SEQ ID NO: 13045 - RNA, 22 nt, Homo sapiens
uuugggaaugaguuuaucauuu

SEQ ID NO: 13046 - RNA, 22 nt, Homo sapiens
gucacuguuuccuauuauauuu

SEQ ID NO: 13047 - RNA, 22 nt, Homo sapiens
auagcagugugaaaauugacug

SEQ ID NO: 13048 - RNA, 22 nt, Homo sapiens
aagagguaggaaauggucauuu

SEQ ID NO: 13049 - RNA, 22 nt, Homo sapiens
aagcaggugucugugucuguaa

SEQ ID NO: 13050 - RNA, 22 nt, Homo sapiens
uuugucccuuugcaguggcaca

SEQ ID NO: 13051 - RNA, 22 nt, Homo sapiens
caaaggauucauuuccaggagu

SEQ ID NO: 13052 - RNA, 21 nt, Homo sapiens
ucacugagcaucaugguuuca

SEQ ID NO: 13053 - RNA, 22 nt, Homo sapiens
aucuuguguugaauggugcaga

SEQ ID NO: 13054 - RNA, 22 nt, Homo sapiens
uaggucaguuuuggcuuggcuu

SEQ ID NO: 13055 - RNA, 22 nt, Homo sapiens
aaucacaguguucuugugaggg

SEQ ID NO: 13056 - RNA, 22 nt, Homo sapiens
aaggugcuguaagcauccaugu

SEQ ID NO: 13057 - RNA, 22 nt, Homo sapiens
ucaacaggucaauugcauagaa

SEQ ID NO: 13058 - RNA, 22 nt, Homo sapiens
cauugcacuccagccugaccaa

SEQ ID NO: 13059 - RNA, 18 nt, Homo sapiens
uugaauaguguccaaucu

SEQ ID NO: 13060 - RNA, 22 nt, Homo sapiens
gagacugagucuugcucugucg

SEQ ID NO: 13061 - RNA, 22 nt, Homo sapiens
uacagucauaaugccuagugac

SEQ ID NO: 13062 - RNA, 22 nt, Homo sapiens
uugagcccuggagguggaggcu

SEQ ID NO: 13063 - RNA, 22 nt, Homo sapiens
uagcaguaaagaaugugauguu

SEQ ID NO: 13064 - RNA, 22 nt, Homo sapiens
uucauaguaacaguaacuaugg

SEQ ID NO: 13065 - RNA, 22 nt, Homo sapiens
accugagauuacaggugcuggc

SEQ ID NO: 13066 - RNA, 22 nt, Homo sapiens
uaagugaauuugacagguaaug

SEQ ID NO: 13067 - RNA, 17 nt, Homo sapiens
aaggugcuucgaccucc

SEQ ID NO: 13068 - RNA, 22 nt, Homo sapiens
ucugugaaugaacacuugaaaa

SEQ ID NO: 13069 - RNA, 22 nt, Homo sapiens
auguaauguuaaauugcuaauu

SEQ ID NO: 13070 - RNA, 22 nt, Homo sapiens
uggcaagaccccaucucuacaa

SEQ ID NO: 13071 - RNA, 22 nt, Homo sapiens
ucauucauucauccagcuugag

SEQ ID NO: 13072 - RNA, 22 nt, Homo sapiens
uugaguuugaguauucuaaagc

SEQ ID NO: 13073 - RNA, 22 nt, Homo sapiens
ucuccauuguccagaugaggaa

SEQ ID NO: 13074 - RNA, 22 nt, Homo sapiens
guacaguaguaaaagugaauga

SEQ ID NO: 13075 - RNA, 23 nt, Homo sapiens
gagaccagcuucagaaagcacga

SEQ ID NO: 13076 - RNA, 22 nt, Homo sapiens
guaaucucagcuacucgggaga

SEQ ID NO: 13077 - RNA, 23 nt, Homo sapiens
uauugcacuaugguaacccuuuu

SEQ ID NO: 13078 - RNA, 22 nt, Homo sapiens
ucauugcaaucucugccucccg

SEQ ID NO: 13079 - RNA, 22 nt, Homo sapiens
aagagguagaagcuugccuucu

SEQ ID NO: 13080 - RNA, 22 nt, Homo sapiens
acaagcacaaauuuaauccugu

SEQ ID NO: 13081 - RNA, 22 nt, Homo sapiens
uuucugagaccaaaacuuguaa

SEQ ID NO: 13082 - RNA, 22 nt, Homo sapiens
aauuaguugucgugagaguggu

SEQ ID NO: 13083 - RNA, 22 nt, Homo sapiens
ccauggcaauggucagucuauu

SEQ ID NO: 13084 - RNA, 22 nt, Homo sapiens
agcagguguccacaauguuugc

SEQ ID NO: 13085 - RNA, 22 nt, Homo sapiens
gcagucacagggagauggugac

SEQ ID NO: 13086 - RNA, 22 nt, Homo sapiens
cauugcacuccagccucggcaa

SEQ ID NO: 13087 - RNA, 22 nt, Homo sapiens
uauugcacuccagccuuggcaa

SEQ ID NO: 13088 - RNA, 22 nt, Homo sapiens
cauugcacuccacuccugaaca

SEQ ID NO: 13089 - RNA, 22 nt, Homo sapiens
uucacagucacccuucuccaug

SEQ ID NO: 13090 - RNA, 22 nt, Homo sapiens
uaaaagucaucacaacuggagu

SEQ ID NO: 13091 - RNA, 21 nt, Homo sapiens
uuggggaauggagagguuuuc

SEQ ID NO: 13092 - RNA, 22 nt, Homo sapiens
uuaugucuuugagcaaugcugu

SEQ ID NO: 13093 - RNA, 22 nt, Homo sapiens
ugaaguaauguuuuauucuauu

SEQ ID NO: 13094 - RNA, 20 nt, Homo sapiens
cuuggcuuucuugguguuaa

SEQ ID NO: 13095 - RNA, 22 nt, Homo sapiens
aucacuguuuugaugcucggac

SEQ ID NO: 13096 - RNA, 22 nt, Homo sapiens
agacacugaaauguauugaaga

SEQ ID NO: 13097 - RNA, 22 nt, Homo sapiens
uugauaguuuuaaaauuaaucu

SEQ ID NO: 13098 - RNA, 22 nt, Homo sapiens
ugagauuaucuugaucuugaaa

SEQ ID NO: 13099 - RNA, 22 nt, Homo sapiens
guaugucuugucuauggcugcu

SEQ ID NO: 13100 - RNA, 22 nt, Homo sapiens
acuuuuugaugaggucguuugu

SEQ ID NO: 13101 - RNA, 22 nt, Homo sapiens
acccaguagccagauguagcug

SEQ ID NO: 13102 - RNA, 22 nt, Homo sapiens
uuacaugucuugguaagguuag

SEQ ID NO: 13103 - RNA, 22 nt, Homo sapiens
auggaagacuccucuuugggua

SEQ ID NO: 13104 - RNA, 22 nt, Homo sapiens
ucaggcaugcagcaaugcagug

SEQ ID NO: 13105 - RNA, 22 nt, Homo sapiens
uugugaauggaguagcaggauc

SEQ ID NO: 13106 - RNA, 22 nt, Homo sapiens
aagugcuuaggauagugugugg

SEQ ID NO: 13107 - RNA, 22 nt, Homo sapiens
ugagacgaagucuugcucuguu

SEQ ID NO: 13108 - RNA, 22 nt, Homo sapiens
uaauucacauaaagcacuuaga

SEQ ID NO: 13109 - RNA, 22 nt, Homo sapiens
aaagugcugagaguucuaacuu

SEQ ID NO: 13110 - RNA, 22 nt, Homo sapiens
ugaacagcacguuuauucagaa

SEQ ID NO: 13111 - RNA, 22 nt, Homo sapiens
uucauaguuuauacugauauuu

SEQ ID NO: 13112 - RNA, 22 nt, Homo sapiens
gugcacaugguagguauugagu

SEQ ID NO: 13113 - RNA, 22 nt, Homo sapiens
ucuacagccaguucaggaagaa

SEQ ID NO: 13114 - RNA, 22 nt, Homo sapiens
uugugaucauugucaaauagug

SEQ ID NO: 13115 - RNA, 22 nt, Homo sapiens
uuuuggcucugucuguaucuuu

SEQ ID NO: 13116 - RNA, 22 nt, Homo sapiens
ucaguguuuggaaucucaauuu

SEQ ID NO: 13117 - RNA, 22 nt, Homo sapiens
acauaguagacacugaaaauau

SEQ ID NO: 13118 - RNA, 22 nt, Homo sapiens
uggagugcaauggcaccaucuu

SEQ ID NO: 13119 - RNA, 22 nt, Homo sapiens
cauugcacuccagccuugguga

SEQ ID NO: 13120 - RNA, 22 nt, Homo sapiens
ugagauagggucucacucuguc

SEQ ID NO: 13121 - RNA, 22 nt, Homo sapiens
ucacuguguauguauaugcagg

SEQ ID NO: 13122 - RNA, 22 nt, Homo sapiens
ugcuaugucagccaggcugguc

SEQ ID NO: 13123 - RNA, 22 nt, Homo sapiens
ugagacacuucccagaucccuu

SEQ ID NO: 13124 - RNA, 22 nt, Homo sapiens
uugaggaaugugauuucaaaua

SEQ ID NO: 13125 - RNA, 22 nt, Homo sapiens
ucagcagugugaaaacaaacua

SEQ ID NO: 13126 - RNA, 20 nt, Homo sapiens
auugcagcaugauuuauaau

SEQ ID NO: 13127 - RNA, 21 nt, Homo sapiens
uccugagagaggaguaacucu

SEQ ID NO: 13128 - RNA, 22 nt, Homo sapiens
caugcauuggucuauuauguga

SEQ ID NO: 13129 - RNA, 22 nt, Homo sapiens
auaucacucccaauaucgcagg

SEQ ID NO: 13130 - RNA, 22 nt, Homo sapiens
uuaccuuuuuaagacagguuag

SEQ ID NO: 13131 - RNA, 22 nt, Homo sapiens
agaauguauauucuguaguugu

SEQ ID NO: 13132 - RNA, 22 nt, Homo sapiens
auggcuauuccauaggcagagc

SEQ ID NO: 13133 - RNA, 22 nt, Homo sapiens
auuggcagaaaucuuuauagua

SEQ ID NO: 13134 - RNA, 22 nt, Homo sapiens
uaggcagccagcuguggauuga

SEQ ID NO: 13135 - RNA, 22 nt, Homo sapiens
aagugcuucagaagacaauauu

SEQ ID NO: 13136 - RNA, 22 nt, Homo sapiens
uuuguauguuggagauuggaga

SEQ ID NO: 13137 - RNA, 22 nt, Homo sapiens
ugagaugugaucaccugaaggg

SEQ ID NO: 13138 - RNA, 18 nt, Homo sapiens
guaaauguaucuauugcc

SEQ ID NO: 13139 - RNA, 22 nt, Homo sapiens
auaacucuguuuuuuucaugca

SEQ ID NO: 13140 - RNA, 22 nt, Homo sapiens
guggaaaacauaugcuuguuga

SEQ ID NO: 13141 - RNA, 22 nt, Homo sapiens
uacaugcaugggcaugugugca

SEQ ID NO: 13142 - RNA, 22 nt, Homo sapiens
ucuuuuggguauggagccauca

SEQ ID NO: 13143 - RNA, 22 nt, Homo sapiens
uauggcaaugcauaggaaggaa

SEQ ID NO: 13144 - RNA, 22 nt, Homo sapiens
caggugcauuggcugacaccug

SEQ ID NO: 13145 - RNA, 22 nt, Homo sapiens
uugaaguagaaagacgaaauuu

SEQ ID NO: 13146 - RNA, 22 nt, Homo sapiens
aagugcuuuguacagggguuga

SEQ ID NO: 13147 - RNA, 19 nt, Homo sapiens
uacauaguauuuaguggca

SEQ ID NO: 13148 - RNA, 22 nt, Homo sapiens
ugagaugcuccucuugcaaagc

SEQ ID NO: 13149 - RNA, 22 nt, Homo sapiens
ucagaguagcugucugaggugc

SEQ ID NO: 13150 - RNA, 22 nt, Homo sapiens
auacuguuuuacaucauugccu

SEQ ID NO: 13151 - RNA, 22 nt, Homo sapiens
aagagguaauaacaaagcuucu

SEQ ID NO: 13152 - RNA, 22 nt, Homo sapiens
guacaguauaguaauaggauuu

SEQ ID NO: 13153 - RNA, 22 nt, Homo sapiens
cauugcacuccagccugcacga

SEQ ID NO: 13154 - RNA, 23 nt, Homo sapiens
uucaccguguuggccaggcuggu

SEQ ID NO: 13155 - RNA, 22 nt, Homo sapiens
uugagguaauaaacagccauuc

SEQ ID NO: 13156 - RNA, 23 nt, Homo sapiens
ucgcagcauucaauaccaggcag

SEQ ID NO: 13157 - RNA, 22 nt, Homo sapiens
ucagacacugcccuccaccugu

SEQ ID NO: 13158 - RNA, 20 nt, Homo sapiens
uucuauggugaugaguccug

SEQ ID NO: 13159 - RNA, 22 nt, Homo sapiens
cauugcaacuucugccucccag

SEQ ID NO: 13160 - RNA, 22 nt, Homo sapiens
uuguaaucaacacaucauuggg

SEQ ID NO: 13161 - RNA, 22 nt, Homo sapiens
auagcagugugaaaacagacug

SEQ ID NO: 13162 - RNA, 22 nt, Homo sapiens
uugaaagcuaucagagauucca

SEQ ID NO: 13163 - RNA, 22 nt, Homo sapiens
gagacugagucuugcucuguca

SEQ ID NO: 13164 - RNA, 22 nt, Homo sapiens
aauacuggcacugaagaccaug

SEQ ID NO: 13165 - RNA, 23 nt, Homo sapiens
uucaucagggauauuggccugaa

SEQ ID NO: 13166 - RNA, 22 nt, Homo sapiens
uuaugcagcaaagugcuugaaa

SEQ ID NO: 13167 - RNA, 22 nt, Homo sapiens
agaugguauuauagguuucugu

SEQ ID NO: 13168 - RNA, 22 nt, Homo sapiens
gucacuguggagaagaaagugg

SEQ ID NO: 13169 - RNA, 22 nt, Homo sapiens
ccugagacgaauggagugaaca

SEQ ID NO: 13170 - RNA, 22 nt, Homo sapiens
agugcaauaaggauguagaacu

SEQ ID NO: 13171 - RNA, 22 nt, Homo sapiens
aucccagaaacucggguuucuc

SEQ ID NO: 13172 - RNA, 22 nt, Homo sapiens
uuggaaaaauccaccuugaucu

SEQ ID NO: 13173 - RNA, 22 nt, Homo sapiens
ugauugcacaccugcacucaag

SEQ ID NO: 13174 - RNA, 20 nt, Homo sapiens
uucaucaggauauuggucua

SEQ ID NO: 13175 - RNA, 22 nt, Homo sapiens
aucuggguccguucugcuucuc

SEQ ID NO: 13176 - RNA, 22 nt, Homo sapiens
gaaagauuuccugagcuagaaa

SEQ ID NO: 13177 - RNA, 22 nt, Homo sapiens
augcagugugcaacagauuaag

SEQ ID NO: 13178 - RNA, 22 nt, Homo sapiens
uugaauagaagguuuuuuguuc

SEQ ID NO: 13179 - RNA, 22 nt, Homo sapiens
uucuaaguaauuuugcaugccu

SEQ ID NO: 13180 - RNA, 22 nt, Homo sapiens
gcagaauugguuucuucuaagg

SEQ ID NO: 13181 - RNA, 19 nt, Homo sapiens
cuaaguccccuugauuaga

SEQ ID NO: 13182 - RNA, 22 nt, Homo sapiens
uuaaucaggccguuuccuaaga

SEQ ID NO: 13183 - RNA, 22 nt, Homo sapiens
uauggcacuaguacuggaaagc

SEQ ID NO: 13184 - RNA, 22 nt, Homo sapiens
uucaucaguuauauuggccuga

SEQ ID NO: 13185 - RNA, 22 nt, Homo sapiens
ugaaucauuucuugucuucagu

SEQ ID NO: 13186 - RNA, 22 nt, Homo sapiens
uugucccauggggucuuccuuu

SEQ ID NO: 13187 - RNA, 18 nt, Homo sapiens
uucuuguguugauauuuu

SEQ ID NO: 13188 - RNA, 19 nt, Homo sapiens
ugacacuguuggugggagg

SEQ ID NO: 13189 - RNA, 22 nt, Homo sapiens
uugaaagcuaucucaaaucgcu

SEQ ID NO: 13190 - RNA, 22 nt, Homo sapiens
ggagaauguaauugguauuuug

SEQ ID NO: 13191 - RNA, 22 nt, Homo sapiens
ugguauguaugauuaacaugga

SEQ ID NO: 13192 - RNA, 22 nt, Homo sapiens
ucucauggagucaggagcagaa

SEQ ID NO: 13193 - RNA, 22 nt, Homo sapiens
aggaucauugacuauuauaagg

SEQ ID NO: 13194 - RNA, 22 nt, Homo sapiens
cacuuugguucaccugaguuuc

SEQ ID NO: 13195 - RNA, 23 nt, Homo sapiens
ggaaacauccagucuuucaccau

SEQ ID NO: 13196 - RNA, 22 nt, Homo sapiens
cuguaauguaaugagacuacau

SEQ ID NO: 13197 - RNA, 22 nt, Homo sapiens
ugugaauguaagaaaauccaac

SEQ ID NO: 13198 - RNA, 21 nt, Homo sapiens
uggaauuaauggagagguguu

SEQ ID NO: 13199 - RNA, 22 nt, Homo sapiens
uaaacugucuugcaguuacaug

SEQ ID NO: 13200 - RNA, 22 nt, Homo sapiens
aggacacugauguaugcugugg

SEQ ID NO: 13201 - RNA, 22 nt, Homo sapiens
ucauacaguaguccucacuugu

SEQ ID NO: 13202 - RNA, 22 nt, Homo sapiens
uggagucuugaugauuuucaaa

SEQ ID NO: 13203 - RNA, 18 nt, Homo sapiens
ccauucaacagauuuguc

SEQ ID NO: 13204 - RNA, 22 nt, Homo sapiens
aucccuugacguggagucucug

SEQ ID NO: 13205 - RNA, 18 nt, Homo sapiens
ugacuguccagguggacc

SEQ ID NO: 13206 - RNA, 22 nt, Homo sapiens
cuuugguguauuuucagagacc

SEQ ID NO: 13207 - RNA, 22 nt, Homo sapiens
uaaguagaggaaucauuuugug

SEQ ID NO: 13208 - RNA, 22 nt, Homo sapiens
uagagguaggucuucgagucuc

SEQ ID NO: 13209 - RNA, 22 nt, Homo sapiens
cagcagguuuuuaucaguuaag

SEQ ID NO: 13210 - RNA, 22 nt, Homo sapiens
aucacuguaaguuuacacuuug

SEQ ID NO: 13211 - RNA, 22 nt, Homo sapiens
guggacaugaauuuuggaggca

SEQ ID NO: 13212 - RNA, 22 nt, Homo sapiens
gugccacugcaccuggccuaag

SEQ ID NO: 13213 - RNA, 22 nt, Homo sapiens
aauaaagcauggcuacuccaua

SEQ ID NO: 13214 - RNA, 19 nt, Homo sapiens
uguugcacauaucaauaug

SEQ ID NO: 13215 - RNA, 22 nt, Homo sapiens
uucaagaauuaaaguggcuuuu

SEQ ID NO: 13216 - RNA, 22 nt, Homo sapiens
cccugagagcagggucuuucuc

SEQ ID NO: 13217 - RNA, 22 nt, Homo sapiens
aauugcaccaucuagaucaaga

SEQ ID NO: 13218 - RNA, 22 nt, Homo sapiens
auucccuuagcugccucagccu

SEQ ID NO: 13219 - RNA, 22 nt, Homo sapiens
aaagugcugagauuguaggcau

SEQ ID NO: 13220 - RNA, 21 nt, Homo sapiens
uaacagcuccacuccauucuc

SEQ ID NO: 13221 - RNA, 22 nt, Homo sapiens
ucuaauguaaccugcaaauauu

SEQ ID NO: 13222 - RNA, 21 nt, Homo sapiens
gaccacagcagggaaugucag

SEQ ID NO: 13223 - RNA, 22 nt, Homo sapiens
uauugcucaugcauuuaauuuc

SEQ ID NO: 13224 - RNA, 22 nt, Homo sapiens
aaaggcuucggaucagaaggua

SEQ ID NO: 13225 - RNA, 22 nt, Homo sapiens
cuccuguagccccaucaucuuu

SEQ ID NO: 13226 - RNA, 22 nt, Homo sapiens
uugaaauguuuagaaguuugga

SEQ ID NO: 13227 - RNA, 22 nt, Homo sapiens
ucacugagaaugauguuucuga

SEQ ID NO: 13228 - RNA, 22 nt, Homo sapiens
augagguaguagaaagucaggu

SEQ ID NO: 13229 - RNA, 22 nt, Homo sapiens
ugucacaguuuguacuuuauag

SEQ ID NO: 13230 - RNA, 22 nt, Homo sapiens
uuugcuauagugaauagugcug

SEQ ID NO: 13231 - RNA, 22 nt, Homo sapiens
uagcaguagacagacuuuggcu

SEQ ID NO: 13232 - RNA, 22 nt, Homo sapiens
agucacagguucuugggauuag

SEQ ID NO: 13233 - RNA, 22 nt, Homo sapiens
uugaauagaaguguugaaagug

SEQ ID NO: 13234 - RNA, 22 nt, Homo sapiens
uggcaaaucagaggcauggaca

SEQ ID NO: 13235 - RNA, 22 nt, Homo sapiens
ggucacauuggacuaucaaguu

SEQ ID NO: 13236 - RNA, 22 nt, Homo sapiens
ucaucagaguuuacaagcucag

SEQ ID NO: 13237 - RNA, 22 nt, Homo sapiens
uuacuguagugucauaucguau

SEQ ID NO: 13238 - RNA, 20 nt, Homo sapiens
gugagguagaggguuaccug

SEQ ID NO: 13239 - RNA, 21 nt, Homo sapiens
ugugaccucugucucugaguc

SEQ ID NO: 13240 - RNA, 22 nt, Homo sapiens
uuugaauggaaguuuugugaaa

SEQ ID NO: 13241 - RNA, 22 nt, Homo sapiens
cucaaguaauccucccgccuug

SEQ ID NO: 13242 - RNA, 22 nt, Homo sapiens
acugcacuccagccucggcaau

SEQ ID NO: 13243 - RNA, 22 nt, Homo sapiens
uauugcacgccagccugagcaa

SEQ ID NO: 13244 - RNA, 22 nt, Homo sapiens
uucaucaguugagcugguugcu

SEQ ID NO: 13245 - RNA, 22 nt, Homo sapiens
uugagccaaggauugucuuucc

SEQ ID NO: 13246 - RNA, 22 nt, Homo sapiens
uaggaaguuucuugauuacuua

SEQ ID NO: 13247 - RNA, 22 nt, Homo sapiens
ucaagcaauucugcugccucag

SEQ ID NO: 13248 - RNA, 22 nt, Homo sapiens
ugucaugaacucacauucuggg

SEQ ID NO: 13249 - RNA, 22 nt, Homo sapiens
cuuuuggcuuagaauugucuug

SEQ ID NO: 13250 - RNA, 20 nt, Homo sapiens
auucaaguaugccuugagaa

SEQ ID NO: 13251 - RNA, 22 nt, Homo sapiens
auugcacaucugcacuacagcc

SEQ ID NO: 13252 - RNA, 22 nt, Homo sapiens
aguaacaggauccaaagaaugu

SEQ ID NO: 13253 - RNA, 22 nt, Homo sapiens
uaugucaugggguuuuugagau

SEQ ID NO: 13254 - RNA, 22 nt, Homo sapiens
ucaucagugcuugcaaauuauu

SEQ ID NO: 13255 - RNA, 22 nt, Homo sapiens
ugugcucaucucagucaacugu

SEQ ID NO: 13256 - RNA, 22 nt, Homo sapiens
guauggaagucaguuuguuggc

SEQ ID NO: 13257 - RNA, 22 nt, Homo sapiens
uugugaaaucuaggcagagguu

SEQ ID NO: 13258 - RNA, 22 nt, Homo sapiens
ugaugguuuuaaaaagaggagu

SEQ ID NO: 13259 - RNA, 22 nt, Homo sapiens
uacaaagugggaaacgaagguu

SEQ ID NO: 13260 - RNA, 22 nt, Homo sapiens
ugagacggagucuugcucuguc

SEQ ID NO: 13261 - RNA, 22 nt, Homo sapiens
auugcaaagcguagacucuaaa

SEQ ID NO: 13262 - RNA, 22 nt, Homo sapiens
uaugucuauuauguagcaggaa

SEQ ID NO: 13263 - RNA, 20 nt, Homo sapiens
uaagugcauaggauauuucu

SEQ ID NO: 13264 - RNA, 22 nt, Homo sapiens
guugcucaggccggagugcagu

SEQ ID NO: 13265 - RNA, 22 nt, Homo sapiens
auacaagcaguccaacuccaua

SEQ ID NO: 13266 - RNA, 21 nt, Homo sapiens
ugaaaugcaugugcacauuaa

SEQ ID NO: 13267 - RNA, 22 nt, Homo sapiens
auaugcauguacccacacaggc

SEQ ID NO: 13268 - RNA, 22 nt, Homo sapiens
auaucugcauugccauuuaugu

SEQ ID NO: 13269 - RNA, 22 nt, Homo sapiens
cauugcacacauuuaccuaugu

SEQ ID NO: 13270 - RNA, 23 nt, Homo sapiens
ggaguguauuggcacgaucucag

SEQ ID NO: 13271 - RNA, 22 nt, Homo sapiens
uagcaguauacguacugggucc

SEQ ID NO: 13272 - RNA, 22 nt, Homo sapiens
aagugcuuuacacaugcaugau

SEQ ID NO: 13273 - RNA, 22 nt, Homo sapiens
ucuucaugcuugaaauaauagc

SEQ ID NO: 13274 - RNA, 18 nt, Homo sapiens
uaagugcuuuaaacacau

SEQ ID NO: 13275 - RNA, 20 nt, Homo sapiens
aagacacuguccccacugga

SEQ ID NO: 13276 - RNA, 22 nt, Homo sapiens
guaaauaccaguuucuggaaca

SEQ ID NO: 13277 - RNA, 22 nt, Homo sapiens
gauggcacuuaagagcaagagc

SEQ ID NO: 13278 - RNA, 22 nt, Homo sapiens
ugugccacuccagcucuagcuu

SEQ ID NO: 13279 - RNA, 22 nt, Homo sapiens
uucuggccccucccaaucucau

SEQ ID NO: 13280 - RNA, 22 nt, Homo sapiens
gcugcacuuuaaggcauccccu

SEQ ID NO: 13281 - RNA, 22 nt, Homo sapiens
uugaugauguuucugccuugcc

SEQ ID NO: 13282 - RNA, 22 nt, Homo sapiens
uagagguagagugacuucccca

SEQ ID NO: 13283 - RNA, 22 nt, Homo sapiens
cacugcacuccagucccgucuc

SEQ ID NO: 13284 - RNA, 22 nt, Homo sapiens
uugagauuuuccucaaauauuu

SEQ ID NO: 13285 - RNA, 22 nt, Homo sapiens
cugccacugacaccucaaggac

SEQ ID NO: 13286 - RNA, 22 nt, Homo sapiens
gugacugcauccauccaggcuu

SEQ ID NO: 13287 - RNA, 22 nt, Homo sapiens
uuacugcucuuuugucaugagu

SEQ ID NO: 13288 - RNA, 22 nt, Homo sapiens
uuugguaguuuguugggaccca

SEQ ID NO: 13289 - RNA, 22 nt, Homo sapiens
cauugcacuccagccuaggcaa

SEQ ID NO: 13290 - RNA, 22 nt, Homo sapiens
ugugaacauuuuguauauauua

SEQ ID NO: 13291 - RNA, 22 nt, Homo sapiens
aucaaaguaucucaauauggua

SEQ ID NO: 13292 - RNA, 22 nt, Homo sapiens
uugagacggagucuugcucuuu

SEQ ID NO: 13293 - RNA, 22 nt, Homo sapiens
aaaugcuuucuuggaccauuug

SEQ ID NO: 13294 - RNA, 19 nt, Homo sapiens
cauggcuuauaauuuuaau

SEQ ID NO: 13295 - RNA, 18 nt, Homo sapiens
ccuuaguuauagagaguc

SEQ ID NO: 13296 - RNA, 22 nt, Homo sapiens
uuguaaacaucuguacauugcu

SEQ ID NO: 13297 - RNA, 22 nt, Homo sapiens
aacugguauuucccaugaauuu

SEQ ID NO: 13298 - RNA, 22 nt, Homo sapiens
gaggugaaggucucaauaaaua

SEQ ID NO: 13299 - RNA, 22 nt, Homo sapiens
guaaucucagcuacucgggagg

SEQ ID NO: 13300 - RNA, 22 nt, Homo sapiens
cuggauauguugcaacauuucc

SEQ ID NO: 13301 - RNA, 23 nt, Homo sapiens
aagagguaugacuaugaagugga

SEQ ID NO: 13302 - RNA, 18 nt, Homo sapiens
uuugguccuuuauaaaca

SEQ ID NO: 13303 - RNA, 22 nt, Homo sapiens
aucgcgccauuguacuccagcc

SEQ ID NO: 13304 - RNA, 22 nt, Homo sapiens
cucccagagccaguuauaggcu

SEQ ID NO: 13305 - RNA, 22 nt, Homo sapiens
ugaaauuguuugcaaggauagg

SEQ ID NO: 13306 - RNA, 22 nt, Homo sapiens
uugagacggaguuuugcucuug

SEQ ID NO: 13307 - RNA, 22 nt, Homo sapiens
aguggaauuaagaaacugaauu

SEQ ID NO: 13308 - RNA, 22 nt, Homo sapiens
uaucacuguuguuuguuuaagg

SEQ ID NO: 13309 - RNA, 22 nt, Homo sapiens
uugcacauguugaaccagcaaa

SEQ ID NO: 13310 - RNA, 22 nt, Homo sapiens
uuauugcacuccagccugggua

SEQ ID NO: 13311 - RNA, 19 nt, Homo sapiens
gacuccagaguugugugcu

SEQ ID NO: 13312 - RNA, 22 nt, Homo sapiens
ccaggguuccacgccuggcugu

SEQ ID NO: 13313 - RNA, 22 nt, Homo sapiens
uugccuaggcuggagugcagug

SEQ ID NO: 13314 - RNA, 22 nt, Homo sapiens
gaaaacugcuucucuggguuuc

SEQ ID NO: 13315 - RNA, 22 nt, Homo sapiens
uagcaguaagaaacugacauug

SEQ ID NO: 13316 - RNA, 22 nt, Homo sapiens
agaauguaaacagaauagagga

SEQ ID NO: 13317 - RNA, 22 nt, Homo sapiens
cccuguguuuagcugaagguuu

SEQ ID NO: 13318 - RNA, 22 nt, Homo sapiens
ucucuggauaucuacuuauguu

SEQ ID NO: 13319 - RNA, 22 nt, Homo sapiens
gugcaaugagaaggggcucugg

SEQ ID NO: 13320 - RNA, 22 nt, Homo sapiens
acugcacuccagccuccugggu

SEQ ID NO: 13321 - RNA, 18 nt, Homo sapiens
uguugguguucacucacu

SEQ ID NO: 13322 - RNA, 22 nt, Homo sapiens
cuucaaaguuggcuaggagaca

SEQ ID NO: 13323 - RNA, 22 nt, Homo sapiens
cugucucagccucuccaguagc

SEQ ID NO: 13324 - RNA, 22 nt, Homo sapiens
ucacuuugacggccaacuucua

SEQ ID NO: 13325 - RNA, 22 nt, Homo sapiens
auagcagugugagaaugaacua

SEQ ID NO: 13326 - RNA, 22 nt, Homo sapiens
ucugagaucaugucugugcugu

SEQ ID NO: 13327 - RNA, 22 nt, Homo sapiens
cuccauuuggaacagauguccu

SEQ ID NO: 13328 - RNA, 22 nt, Homo sapiens
guauggguuuuguuucuucugg

SEQ ID NO: 13329 - RNA, 22 nt, Homo sapiens
caaaagugguucuuauccuuuu

SEQ ID NO: 13330 - RNA, 22 nt, Homo sapiens
uuucagagucaucugcccaagu

SEQ ID NO: 13331 - RNA, 22 nt, Homo sapiens
ucaggcuuuucccagagugaug

SEQ ID NO: 13332 - RNA, 22 nt, Homo sapiens
ugugcauaugucuuuauaguag

SEQ ID NO: 13333 - RNA, 22 nt, Homo sapiens
auguggaaagcagcaugauaug

SEQ ID NO: 13334 - RNA, 22 nt, Homo sapiens
agcaguguggccuuagacccgg

SEQ ID NO: 13335 - RNA, 18 nt, Homo sapiens
ugugacauugagcauguc

SEQ ID NO: 13336 - RNA, 22 nt, Homo sapiens
cauugcacuccagcccuggcaa

SEQ ID NO: 13337 - RNA, 22 nt, Homo sapiens
gucaucaggacgggucaucugc

SEQ ID NO: 13338 - RNA, 22 nt, Homo sapiens
ugagaaugcagaaucucgugca

SEQ ID NO: 13339 - RNA, 22 nt, Homo sapiens
auggaagaaaguuggguucuug

SEQ ID NO: 13340 - RNA, 21 nt, Homo sapiens
uaaaacuguaacuuuguccug

SEQ ID NO: 13341 - RNA, 22 nt, Homo sapiens
ugugccacugcacuccugccug

SEQ ID NO: 13342 - RNA, 22 nt, Homo sapiens
caucagagugagauauaagauc

SEQ ID NO: 13343 - RNA, 22 nt, Homo sapiens
gcaggcaugacauuucacucuu

SEQ ID NO: 13344 - RNA, 22 nt, Homo sapiens
agcaguacauaaaaagcauccu

SEQ ID NO: 13345 - RNA, 22 nt, Homo sapiens
ucgcgccauucuccugccucag

SEQ ID NO: 13346 - RNA, 22 nt, Homo sapiens
acacuggaguuaaaggugauuu

SEQ ID NO: 13347 - RNA, 22 nt, Homo sapiens
aguccauuugaugaugauucca

SEQ ID NO: 13348 - RNA, 22 nt, Homo sapiens
uaucagcagagucauacuucaa

SEQ ID NO: 13349 - RNA, 22 nt, Homo sapiens
ugaguucuuuguagauucugug

SEQ ID NO: 13350 - RNA, 22 nt, Homo sapiens
uugcacauugauuuuguaucuu

SEQ ID NO: 13351 - RNA, 22 nt, Homo sapiens
cagugcuuuaucaaguccucca

SEQ ID NO: 13352 - RNA, 22 nt, Homo sapiens
uuuuggcuagaaauauaccucc

SEQ ID NO: 13353 - RNA, 17 nt, Homo sapiens
augugaauguucaaaua

SEQ ID NO: 13354 - RNA, 22 nt, Homo sapiens
ugagauuaaucuuuaaguaaga

SEQ ID NO: 13355 - RNA, 22 nt, Homo sapiens
uggcaaaaaucacaaguaccuu

SEQ ID NO: 13356 - RNA, 22 nt, Homo sapiens
aaguagcuggaugcaguggcac

SEQ ID NO: 13357 - RNA, 22 nt, Homo sapiens
aagggagcugcauaaucuugug

SEQ ID NO: 13358 - RNA, 22 nt, Homo sapiens
aagagguagucugucccuuagc

SEQ ID NO: 13359 - RNA, 22 nt, Homo sapiens
ugagacauauuauacugcuuuu

SEQ ID NO: 13360 - RNA, 22 nt, Homo sapiens
ucagguccuuacugugcucccu

SEQ ID NO: 13361 - RNA, 22 nt, Homo sapiens
auggcacagaguagaugcucaa

SEQ ID NO: 13362 - RNA, 22 nt, Homo sapiens
cauugcacucuagucuggguga

SEQ ID NO: 13363 - RNA, 22 nt, Homo sapiens
uauuaguuuucuguggauuaca

SEQ ID NO: 13364 - RNA, 22 nt, Homo sapiens
auuacauagucaaggugucuca

SEQ ID NO: 13365 - RNA, 22 nt, Homo sapiens
gugagauacuagagauauagug

SEQ ID NO: 13366 - RNA, 22 nt, Homo sapiens
uuugugaaugucauaagcucca

SEQ ID NO: 13367 - RNA, 22 nt, Homo sapiens
cauugcacuccauccuuggcaa

SEQ ID NO: 13368 - RNA, 22 nt, Homo sapiens
cuugcacucagaagauucaguu

SEQ ID NO: 13369 - RNA, 22 nt, Homo sapiens
ucacacugaauuugaagcaaug

SEQ ID NO: 13370 - RNA, 22 nt, Homo sapiens
uuggcagcuguggaaucugggc

SEQ ID NO: 13371 - RNA, 22 nt, Homo sapiens
uggacauguacauauguguaug

SEQ ID NO: 13372 - RNA, 22 nt, Homo sapiens
uuacagauggauggcagcuggc

SEQ ID NO: 13373 - RNA, 22 nt, Homo sapiens
uuggaagacauucugucugcua

SEQ ID NO: 13374 - RNA, 22 nt, Homo sapiens
ugacaugauuguauauuuagaa

SEQ ID NO: 13375 - RNA, 22 nt, Homo sapiens
ugagaugcauauucuggcuccu

SEQ ID NO: 13376 - RNA, 22 nt, Homo sapiens
cuguaugugagaaauaauaagu

SEQ ID NO: 13377 - RNA, 23 nt, Homo sapiens
ugagauuacccagaaagaguaua

SEQ ID NO: 13378 - RNA, 22 nt, Homo sapiens
gugcacaucuguguuccagcua

SEQ ID NO: 13379 - RNA, 22 nt, Homo sapiens
aguauugcuaauaagagauuug

SEQ ID NO: 13380 - RNA, 22 nt, Homo sapiens
cugacuuuagaacccaaaaagu

SEQ ID NO: 13381 - RNA, 22 nt, Homo sapiens
agagugcuauagauuagauuuc

SEQ ID NO: 13382 - RNA, 22 nt, Homo sapiens
ugugauaguuggcuaaagcagu

SEQ ID NO: 13383 - RNA, 22 nt, Homo sapiens
acauggcacugcgggcuucuug

SEQ ID NO: 13384 - RNA, 22 nt, Homo sapiens
uacagccacauaauguaugauu

SEQ ID NO: 13385 - RNA, 22 nt, Homo sapiens
ggcaagaucuuggcucacugaa

SEQ ID NO: 13386 - RNA, 22 nt, Homo sapiens
ucagaguagagcgacuucuccu

SEQ ID NO: 13387 - RNA, 22 nt, Homo sapiens
acauucagcuguuguuucaaug

SEQ ID NO: 13388 - RNA, 22 nt, Homo sapiens
cauugcacuccagcuugggcaa

SEQ ID NO: 13389 - RNA, 22 nt, Homo sapiens
agucacagccuuuuacuuuaga

SEQ ID NO: 13390 - RNA, 22 nt, Homo sapiens
ugaaagcuacaggaaaguauuu

SEQ ID NO: 13391 - RNA, 22 nt, Homo sapiens
uaauccuagcacuuuggaagac

SEQ ID NO: 13392 - RNA, 22 nt, Homo sapiens
cagagguaagcaagucagcauu

SEQ ID NO: 13393 - RNA, 22 nt, Homo sapiens
cuggaauguuccuaaagauuca

SEQ ID NO: 13394 - RNA, 22 nt, Homo sapiens
ugucacagagauuuugguaugu

SEQ ID NO: 13395 - RNA, 20 nt, Homo sapiens
aguauucacuuuuuucaugg

SEQ ID NO: 13396 - RNA, 22 nt, Homo sapiens
auucagaggggcagcugucuug

SEQ ID NO: 13397 - RNA, 22 nt, Homo sapiens
gaugugaaaucauaguuucuag

SEQ ID NO: 13398 - RNA, 22 nt, Homo sapiens
acagucacaauuuguaccuuuu

SEQ ID NO: 13399 - RNA, 22 nt, Homo sapiens
gaugaggcuagagacaugugua

SEQ ID NO: 13400 - RNA, 22 nt, Homo sapiens
ugcauauucgaguuauuuuggg

SEQ ID NO: 13401 - RNA, 22 nt, Homo sapiens
cucacaugcucaccugguguuc

SEQ ID NO: 13402 - RNA, 22 nt, Homo sapiens
uccaguuuuguuaacauauggu

SEQ ID NO: 13403 - RNA, 22 nt, Homo sapiens
gaacccuggaggcggagguugc

SEQ ID NO: 13404 - RNA, 22 nt, Homo sapiens
aguagcaauggcucugagcuau

SEQ ID NO: 13405 - RNA, 19 nt, Homo sapiens
uaugcuauuuauuagaagu

SEQ ID NO: 13406 - RNA, 18 nt, Homo sapiens
acugcacuccaccuuggg

SEQ ID NO: 13407 - RNA, 22 nt, Homo sapiens
uugcacauugauuuuguauccu

SEQ ID NO: 13408 - RNA, 22 nt, Homo sapiens
uuaaauacagcaugguguuucu

SEQ ID NO: 13409 - RNA, 20 nt, Homo sapiens
ggaauagucuacacucugac

SEQ ID NO: 13410 - RNA, 22 nt, Homo sapiens
gguggugguauuucagaaaaug

SEQ ID NO: 13411 - RNA, 22 nt, Homo sapiens
guuggcaaguggcugagcuggg

SEQ ID NO: 13412 - RNA, 18 nt, Homo sapiens
ucacagguaaaguugaca

SEQ ID NO: 13413 - RNA, 22 nt, Homo sapiens
auaugcauacauguaugcagga

SEQ ID NO: 13414 - RNA, 22 nt, Homo sapiens
auacuguacugaaguacccauu

SEQ ID NO: 13415 - RNA, 22 nt, Homo sapiens
auagcagugugaaaacagacua

SEQ ID NO: 13416 - RNA, 22 nt, Homo sapiens
uuggcagcauuccagccaagca

SEQ ID NO: 13417 - RNA, 22 nt, Homo sapiens
ugugccacugcacuucagccug

SEQ ID NO: 13418 - RNA, 22 nt, Homo sapiens
uguaacacacacuguuuacucc

SEQ ID NO: 13419 - RNA, 22 nt, Homo sapiens
ugaaaucauguaguuauugcaa

SEQ ID NO: 13420 - RNA, 22 nt, Homo sapiens
uucuccugguggacccuaaacg

SEQ ID NO: 13421 - RNA, 22 nt, Homo sapiens
uggaauguaacuugaaacuuuu

SEQ ID NO: 13422 - RNA, 22 nt, Homo sapiens
uaguauguuuauagcauugagu

SEQ ID NO: 13423 - RNA, 22 nt, Homo sapiens
agagugcaaagguuggggcugg

SEQ ID NO: 13424 - RNA, 22 nt, Homo sapiens
uuuuuggaggagguuagaucau

SEQ ID NO: 13425 - RNA, 22 nt, Homo sapiens
guggaagaccagacuuuccaac

SEQ ID NO: 13426 - RNA, 22 nt, Homo sapiens
uuauuagagauauuugguuagg

SEQ ID NO: 13427 - RNA, 22 nt, Homo sapiens
aaauugcauugagcugcuuauu

SEQ ID NO: 13428 - RNA, 22 nt, Homo sapiens
agcagagcaguggauuuuguga

SEQ ID NO: 13429 - RNA, 22 nt, Homo sapiens
caagagaccugagugucauucu

SEQ ID NO: 13430 - RNA, 22 nt, Homo sapiens
cuugcacuugaaauuccaguuu

SEQ ID NO: 13431 - RNA, 22 nt, Homo sapiens
cuuucucagugagacccgagau

SEQ ID NO: 13432 - RNA, 23 nt, Homo sapiens
uggguucauucuugaagucagug

SEQ ID NO: 13433 - RNA, 22 nt, Homo sapiens
guucaagugauucuacugccuc

SEQ ID NO: 13434 - RNA, 22 nt, Homo sapiens
acugcacuccacccuuggcagc

SEQ ID NO: 13435 - RNA, 22 nt, Homo sapiens
caauggcacgaucucgucucac

SEQ ID NO: 13436 - RNA, 22 nt, Homo sapiens
augugaacaucauagaaugcac

SEQ ID NO: 13437 - RNA, 22 nt, Homo sapiens
uucaguauugcaccuggagucc

SEQ ID NO: 13438 - RNA, 22 nt, Homo sapiens
aaagugauguccaggcuuucag

SEQ ID NO: 13439 - RNA, 22 nt, Homo sapiens
ccugagaucauacuguuaguaa

SEQ ID NO: 13440 - RNA, 22 nt, Homo sapiens
uaacaggcaaggucacaccuug

SEQ ID NO: 13441 - RNA, 22 nt, Homo sapiens
uuccaugugggcuugucaagua

SEQ ID NO: 13442 - RNA, 22 nt, Homo sapiens
cucauugcaaucucugccuccc

SEQ ID NO: 13443 - RNA, 18 nt, Homo sapiens
uuuggcuguucaugacuc

SEQ ID NO: 13444 - RNA, 23 nt, Homo sapiens
ucaguacuccacuuucaauagug

SEQ ID NO: 13445 - RNA, 22 nt, Homo sapiens
uggaagccuagauucuuuucuu

SEQ ID NO: 13446 - RNA, 20 nt, Homo sapiens
uccaguuuuggagacauucu

SEQ ID NO: 13447 - RNA, 18 nt, Homo sapiens
ucacaaccacagugcugu

SEQ ID NO: 13448 - RNA, 17 nt, Homo sapiens
aaucagauuucugagga

SEQ ID NO: 13449 - RNA, 22 nt, Homo sapiens
agguagcauagcgggaauauca

SEQ ID NO: 13450 - RNA, 22 nt, Homo sapiens
cauugcacuccaucuugggcaa

SEQ ID NO: 13451 - RNA, 18 nt, Homo sapiens
ugcauacuaucugauuuu

SEQ ID NO: 13452 - RNA, 22 nt, Homo sapiens
uuuuccagugggacucccauua

SEQ ID NO: 13453 - RNA, 23 nt, Homo sapiens
aucacuguuaacaauuucuuccu

SEQ ID NO: 13454 - RNA, 22 nt, Homo sapiens
guggaaaauuauugcuguuuuu

SEQ ID NO: 13455 - RNA, 22 nt, Homo sapiens
auacacgguaggcacauauuua

SEQ ID NO: 13456 - RNA, 22 nt, Homo sapiens
guaaucucagcuacuugggagu

SEQ ID NO: 13457 - RNA, 22 nt, Homo sapiens
ggguucaaaucuuggcucuuac

SEQ ID NO: 13458 - RNA, 22 nt, Homo sapiens
ugagauuauauuucuuaacaga

SEQ ID NO: 13459 - RNA, 22 nt, Homo sapiens
cuaugagucugcagaucuauua

SEQ ID NO: 13460 - RNA, 22 nt, Homo sapiens
gugugcucaucacaugcaauag

SEQ ID NO: 13461 - RNA, 22 nt, Homo sapiens
ggcuuggaggaaugugagggcu

SEQ ID NO: 13462 - RNA, 22 nt, Homo sapiens
aagcuacauuuuauuuauguca

SEQ ID NO: 13463 - RNA, 22 nt, Homo sapiens
ugcaaauguuaggugucauuau

SEQ ID NO: 13464 - RNA, 22 nt, Homo sapiens
agccauacaacguaugcaugua

SEQ ID NO: 13465 - RNA, 22 nt, Homo sapiens
auuuggguaaugagugcaaggg

SEQ ID NO: 13466 - RNA, 22 nt, Homo sapiens
cuggaagaaaaucacgccaucu

SEQ ID NO: 13467 - RNA, 22 nt, Homo sapiens
uuggaagagaagggagauaaac

SEQ ID NO: 13468 - RNA, 22 nt, Homo sapiens
acugcacuucagccuuggcuac

SEQ ID NO: 13469 - RNA, 20 nt, Homo sapiens
uaucacaguucaggaacucu

SEQ ID NO: 13470 - RNA, 22 nt, Homo sapiens
ucauugcauguuaauuaaacag

SEQ ID NO: 13471 - RNA, 21 nt, Homo sapiens
aagcacauugaguguguguga

SEQ ID NO: 13472 - RNA, 22 nt, Homo sapiens
uggcaaaugaaagaaagccagu

SEQ ID NO: 13473 - RNA, 22 nt, Homo sapiens
caugucuuuuaaacauucaacu

SEQ ID NO: 13474 - RNA, 22 nt, Homo sapiens
uucugaguggcuuucaacacug

SEQ ID NO: 13475 - RNA, 22 nt, Homo sapiens
uuggcaacauagugagaccccc

SEQ ID NO: 13476 - RNA, 22 nt, Homo sapiens
uaugcagacauuguuccaacca

SEQ ID NO: 13477 - RNA, 22 nt, Homo sapiens
aaucacauugaaucugcuaccu

SEQ ID NO: 13478 - RNA, 22 nt, Homo sapiens
gcagcaucaaaucacacaagau

SEQ ID NO: 13479 - RNA, 22 nt, Homo sapiens
gaguuagguugucaaugucuua

SEQ ID NO: 13480 - RNA, 22 nt, Homo sapiens
gaauuguacugcaaucagggga

SEQ ID NO: 13481 - RNA, 17 nt, Homo sapiens
uuucagaguggaagugu

SEQ ID NO: 13482 - RNA, 22 nt, Homo sapiens
ugcgccauugcauuccagccug

SEQ ID NO: 13483 - RNA, 22 nt, Homo sapiens
aaagugcugggauuaggccagg

SEQ ID NO: 13484 - RNA, 22 nt, Homo sapiens
agcucuuguuaguauuagcagu

SEQ ID NO: 13485 - RNA, 22 nt, Homo sapiens
ugggagacuacauuuuuaacaa

SEQ ID NO: 13486 - RNA, 23 nt, Homo sapiens
ugagauuauaaucuuuuacuucu

SEQ ID NO: 13487 - RNA, 22 nt, Homo sapiens
guguccucgaguacacaucagg

SEQ ID NO: 13488 - RNA, 22 nt, Homo sapiens
aaagugcugggaucacacugaa

SEQ ID NO: 13489 - RNA, 22 nt, Homo sapiens
uaugucuuuugcuugcaaauag

SEQ ID NO: 13490 - RNA, 22 nt, Homo sapiens
auggaagaauugucggggaugu

SEQ ID NO: 13491 - RNA, 22 nt, Homo sapiens
uuuauggagagauauuuauggu

SEQ ID NO: 13492 - RNA, 22 nt, Homo sapiens
cugagauggagucucgcauugu

SEQ ID NO: 13493 - RNA, 19 nt, Homo sapiens
ucauagucuaagaugagaa

SEQ ID NO: 13494 - RNA, 22 nt, Homo sapiens
gccugagaggauaugauccccu

SEQ ID NO: 13495 - RNA, 18 nt, Homo sapiens
ucacggggagcagcagcc

SEQ ID NO: 13496 - RNA, 22 nt, Homo sapiens
gugcacauauggugcauaagug

SEQ ID NO: 13497 - RNA, 22 nt, Homo sapiens
uuagugaaugcaccacuucuga

SEQ ID NO: 13498 - RNA, 22 nt, Homo sapiens
uacaaagcuuucugcaaaucau

SEQ ID NO: 13499 - RNA, 22 nt, Homo sapiens
cuucaugucuucaauggggggg

SEQ ID NO: 13500 - RNA, 22 nt, Homo sapiens
uagagguagguguaugaacuag

SEQ ID NO: 13501 - RNA, 22 nt, Homo sapiens
aaaagucuguagugaaagguga

SEQ ID NO: 13502 - RNA, 22 nt, Homo sapiens
augaaaagcauaaacgcugaag

SEQ ID NO: 13503 - RNA, 22 nt, Homo sapiens
caaagucuauucuacccuuacc

SEQ ID NO: 13504 - RNA, 22 nt, Homo sapiens
ucacugaggucugagcuuuaug

SEQ ID NO: 13505 - RNA, 22 nt, Homo sapiens
ugaauguaagaugucugcuggu

SEQ ID NO: 13506 - RNA, 22 nt, Homo sapiens
ugcaugaugcugagauuuggga

SEQ ID NO: 13507 - RNA, 22 nt, Homo sapiens
cauugcacuccaucccgggaaa

SEQ ID NO: 13508 - RNA, 22 nt, Homo sapiens
ucacugcgaccucugccucccg

SEQ ID NO: 13509 - RNA, 22 nt, Homo sapiens
cauugcacuccagccuagccaa

SEQ ID NO: 13510 - RNA, 22 nt, Homo sapiens
uuccuggagaguuuucccaaag

SEQ ID NO: 13511 - RNA, 22 nt, Homo sapiens
uucauguaauauuucacagcuu

SEQ ID NO: 13512 - RNA, 22 nt, Homo sapiens
gagagugcuuggcaucugcuga

SEQ ID NO: 13513 - RNA, 22 nt, Homo sapiens
auccaucagacggcaggcguug

SEQ ID NO: 13514 - RNA, 22 nt, Homo sapiens
cccagagacagaaugauaaacu

SEQ ID NO: 13515 - RNA, 23 nt, Homo sapiens
aauugcacauuccuugcuggcag

SEQ ID NO: 13516 - RNA, 22 nt, Homo sapiens
uaagguccuuaaauguguaacc

SEQ ID NO: 13517 - RNA, 22 nt, Homo sapiens
uugcacauggcaggugcucaau

SEQ ID NO: 13518 - RNA, 21 nt, Homo sapiens
aauacucuagguuaagagagc

SEQ ID NO: 13519 - RNA, 22 nt, Homo sapiens
cauugcacuccagccugccugg

SEQ ID NO: 13520 - RNA, 22 nt, Homo sapiens
ggagaugauuaugaaucacuua

SEQ ID NO: 13521 - RNA, 22 nt, Homo sapiens
caggugcuuacuuaauagccau

SEQ ID NO: 13522 - RNA, 22 nt, Homo sapiens
cugguuuguaaaguuccugaga

SEQ ID NO: 13523 - RNA, 22 nt, Homo sapiens
uugcaaagaccucuucacuucc

SEQ ID NO: 13524 - RNA, 22 nt, Homo sapiens
aagagaugaagguccugacugu

SEQ ID NO: 13525 - RNA, 21 nt, Homo sapiens
auuguauguaaaccaaaugag

SEQ ID NO: 13526 - RNA, 22 nt, Homo sapiens
uugugaaugaugucgcaauaaa

SEQ ID NO: 13527 - RNA, 22 nt, Homo sapiens
ugaugacauugucacagucuga

SEQ ID NO: 13528 - RNA, 22 nt, Homo sapiens
cccugagaugcuguuaaucugu

SEQ ID NO: 13529 - RNA, 23 nt, Homo sapiens
aggcauuguacaguaauggaaaa

SEQ ID NO: 13530 - RNA, 22 nt, Homo sapiens
uucauagucuaugcaaguaaga

SEQ ID NO: 13531 - RNA, 16 nt, Homo sapiens
uuauugcauucuucuc

SEQ ID NO: 13532 - RNA, 22 nt, Homo sapiens
uaucacagaggguauccuagag

SEQ ID NO: 13533 - RNA, 22 nt, Homo sapiens
accaguuuuuuauacaucuucu

SEQ ID NO: 13534 - RNA, 22 nt, Homo sapiens
auuacaugucuauccaugaaca

SEQ ID NO: 13535 - RNA, 22 nt, Homo sapiens
acaccaugucuguuucugguuu

SEQ ID NO: 13536 - RNA, 22 nt, Homo sapiens
aaucacacuugauguugagcaa

SEQ ID NO: 13537 - RNA, 22 nt, Homo sapiens
uccugagacucacaggcucccc

SEQ ID NO: 13538 - RNA, 22 nt, Homo sapiens
ggaaucugaaccaugggaaugg

SEQ ID NO: 13539 - RNA, 18 nt, Homo sapiens
uccaguuuucccagcauc

SEQ ID NO: 13540 - RNA, 22 nt, Homo sapiens
uucauguaauuccauaagguaa

SEQ ID NO: 13541 - RNA, 22 nt, Homo sapiens
gugaggcacugcugcuuuccag

SEQ ID NO: 13542 - RNA, 22 nt, Homo sapiens
aauugcacuggaaguaacugag

SEQ ID NO: 13543 - RNA, 21 nt, Homo sapiens
ugagaugugaccagggcauca

SEQ ID NO: 13544 - RNA, 22 nt, Homo sapiens
uccugagaauagaguugcaugu

SEQ ID NO: 13545 - RNA, 22 nt, Homo sapiens
uacuguacugcaguucugcaaa

SEQ ID NO: 13546 - RNA, 22 nt, Homo sapiens
uagcaguaucccaccaucuggu

SEQ ID NO: 13547 - RNA, 22 nt, Homo sapiens
cauugcacuccaccuuggguaa

SEQ ID NO: 13548 - RNA, 22 nt, Homo sapiens
gcacauauguaaauagcugccu

SEQ ID NO: 13549 - RNA, 22 nt, Homo sapiens
ugagauggagucuugucgccua

SEQ ID NO: 13550 - RNA, 22 nt, Homo sapiens
cugugcuugagagaugacacag

SEQ ID NO: 13551 - RNA, 22 nt, Homo sapiens
gcaguggugugugccagccuag

SEQ ID NO: 13552 - RNA, 19 nt, Homo sapiens
uuucaauguaaggauggag

SEQ ID NO: 13553 - RNA, 19 nt, Homo sapiens
uggcacauguauacauaug

SEQ ID NO: 13554 - RNA, 20 nt, Homo sapiens
guucacaggcuuccuuucag

SEQ ID NO: 13555 - RNA, 22 nt, Homo sapiens
uggucaccugaauuaugcaugu

SEQ ID NO: 13556 - RNA, 20 nt, Homo sapiens
uauucacucuccagucuugc

SEQ ID NO: 13557 - RNA, 22 nt, Homo sapiens
acugagacugagaauguuucuu

SEQ ID NO: 13558 - RNA, 22 nt, Homo sapiens
uaaaugcucuuuaaaagugcuu

SEQ ID NO: 13559 - RNA, 22 nt, Homo sapiens
uaggugaaugcuggaagaaaug

SEQ ID NO: 13560 - RNA, 22 nt, Homo sapiens
ugugccacugcacucccgccug

SEQ ID NO: 13561 - RNA, 21 nt, Homo sapiens
uaucacaguagaauaggaucu

SEQ ID NO: 13562 - RNA, 22 nt, Homo sapiens
uugcacauggcuggggaggccu

SEQ ID NO: 13563 - RNA, 22 nt, Homo sapiens
ccuucuuuuguaaggcugaaua

SEQ ID NO: 13564 - RNA, 17 nt, Homo sapiens
uucucaguucugaucuc

SEQ ID NO: 13565 - RNA, 22 nt, Homo sapiens
uuaucauagugcaguuuucuga

SEQ ID NO: 13566 - RNA, 22 nt, Homo sapiens
uugauauguuguuagauucagu

SEQ ID NO: 13567 - RNA, 22 nt, Homo sapiens
gagcaucaguggccucaucuca

SEQ ID NO: 13568 - RNA, 22 nt, Homo sapiens
auaaaugccuguuguuuuaagc

SEQ ID NO: 13569 - RNA, 22 nt, Homo sapiens
guguauauccuauuaguucugu

SEQ ID NO: 13570 - RNA, 18 nt, Homo sapiens
acauucagcuugaagaua

SEQ ID NO: 13571 - RNA, 22 nt, Homo sapiens
aagugcuuacagggaacaugau

SEQ ID NO: 13572 - RNA, 20 nt, Homo sapiens
augaagugaaguuagggaac

SEQ ID NO: 13573 - RNA, 22 nt, Homo sapiens
uugaaagucuaggcuuacagua

SEQ ID NO: 13574 - RNA, 22 nt, Homo sapiens
gucagugugauaucugcagggg

SEQ ID NO: 13575 - RNA, 20 nt, Homo sapiens
ucaaggcacgaauaaaaguu

SEQ ID NO: 13576 - RNA, 22 nt, Homo sapiens
uagagguauaccaaaaaggcau

SEQ ID NO: 13577 - RNA, 22 nt, Homo sapiens
augucaaagaggaaaacuggau

SEQ ID NO: 13578 - RNA, 22 nt, Homo sapiens
uugaaccauucuuuugauagag

SEQ ID NO: 13579 - RNA, 22 nt, Homo sapiens
uaucacaggucaggaaccuugu

SEQ ID NO: 13580 - RNA, 22 nt, Homo sapiens
gucuggcuuaucucacuuacca

SEQ ID NO: 13581 - RNA, 22 nt, Homo sapiens
accucagcccggggaaguugag

SEQ ID NO: 13582 - RNA, 22 nt, Homo sapiens
ucaucuggcgaaugugaagagu

SEQ ID NO: 13583 - RNA, 22 nt, Homo sapiens
auuuguccugccuuuuccuccu

SEQ ID NO: 13584 - RNA, 22 nt, Homo sapiens
augcacauggcuaacuuuuuuc

SEQ ID NO: 13585 - RNA, 22 nt, Homo sapiens
aagaguuaguaaaauuuccucu

SEQ ID NO: 13586 - RNA, 22 nt, Homo sapiens
auggcuuuuuaaaucauguugu

SEQ ID NO: 13587 - RNA, 22 nt, Homo sapiens
aaagugcugggauuggcugggc

SEQ ID NO: 13588 - RNA, 22 nt, Homo sapiens
agugccaaaucgagggcucuga

SEQ ID NO: 13589 - RNA, 22 nt, Homo sapiens
auaugucuauuauuagggcagg

SEQ ID NO: 13590 - RNA, 22 nt, Homo sapiens
uucucuguggauugggugagag

SEQ ID NO: 13591 - RNA, 22 nt, Homo sapiens
uaaagcuuagauccaugguggc

SEQ ID NO: 13592 - RNA, 22 nt, Homo sapiens
uguagcagccauaaacacagug

SEQ ID NO: 13593 - RNA, 22 nt, Homo sapiens
cauugcacugcuucuugggugu

SEQ ID NO: 13594 - RNA, 22 nt, Homo sapiens
auacuguauaggauuguagccu

SEQ ID NO: 13595 - RNA, 22 nt, Homo sapiens
agagugaagcuuuuuauauucu

SEQ ID NO: 13596 - RNA, 22 nt, Homo sapiens
auugcacaaagagggaaacuga

SEQ ID NO: 13597 - RNA, 22 nt, Homo sapiens
caagugcucuaggauccugagu

SEQ ID NO: 13598 - RNA, 22 nt, Homo sapiens
caacauccaccuccuggguuca

SEQ ID NO: 13599 - RNA, 22 nt, Homo sapiens
uccuucaguccaguggguuuug

SEQ ID NO: 13600 - RNA, 22 nt, Homo sapiens
cugaaagagcauguaacacagu

SEQ ID NO: 13601 - RNA, 22 nt, Homo sapiens
uugugaaugaugccgcaauaaa

SEQ ID NO: 13602 - RNA, 22 nt, Homo sapiens
uugugaauggugccgcaguaaa

SEQ ID NO: 13603 - RNA, 18 nt, Homo sapiens
uugcaaauucuucccugu

SEQ ID NO: 13604 - RNA, 22 nt, Homo sapiens
uuguaaagaucauaugcuguuc

SEQ ID NO: 13605 - RNA, 22 nt, Homo sapiens
uaucagagcugucagccuaccu

SEQ ID NO: 13606 - RNA, 22 nt, Homo sapiens
uuguacuuuuaguagagacggg

SEQ ID NO: 13607 - RNA, 22 nt, Homo sapiens
caauacuguguugaauaagagu

SEQ ID NO: 13608 - RNA, 22 nt, Homo sapiens
aaagugcugagucuaggcgggg

SEQ ID NO: 13609 - RNA, 22 nt, Homo sapiens
aauugcacuaagcauaguccag

SEQ ID NO: 13610 - RNA, 20 nt, Homo sapiens
uuccagcacauuagggaagc

SEQ ID NO: 13611 - RNA, 22 nt, Homo sapiens
uaucaagaugacaaacuuugcu

SEQ ID NO: 13612 - RNA, 21 nt, Homo sapiens
ugcauauuggaacuuucucuc

SEQ ID NO: 13613 - RNA, 22 nt, Homo sapiens
auuccauuuguuaucacacccg

SEQ ID NO: 13614 - RNA, 22 nt, Homo sapiens
ucuggagugugaaguggauaug

SEQ ID NO: 13615 - RNA, 22 nt, Homo sapiens
uaagugcuguguuguuaccuaa

SEQ ID NO: 13616 - RNA, 22 nt, Homo sapiens
aucucuugccagucagaauggu

SEQ ID NO: 13617 - RNA, 22 nt, Homo sapiens
auaagugagugauucaguguua

SEQ ID NO: 13618 - RNA, 22 nt, Homo sapiens
uucucaguuccuacuuugguga

SEQ ID NO: 13619 - RNA, 22 nt, Homo sapiens
ggagcugugauuugaguccaga

SEQ ID NO: 13620 - RNA, 22 nt, Homo sapiens
augauguaggccauggguuucu

SEQ ID NO: 13621 - RNA, 22 nt, Homo sapiens
uagcagguguuccacaaauauu

SEQ ID NO: 13622 - RNA, 22 nt, Homo sapiens
uuuaaagcaugacgagaagaag

SEQ ID NO: 13623 - RNA, 22 nt, Homo sapiens
uagacacuagauaugugacuga

SEQ ID NO: 13624 - RNA, 22 nt, Homo sapiens
uucaugucuuggcuguuagagu

SEQ ID NO: 13625 - RNA, 22 nt, Homo sapiens
ucacaguucagcauggcugagg

SEQ ID NO: 13626 - RNA, 22 nt, Homo sapiens
uauuguacauguuauagauuuu

SEQ ID NO: 13627 - RNA, 22 nt, Homo sapiens
gugcaaauuccagcucaacucc

SEQ ID NO: 13628 - RNA, 22 nt, Homo sapiens
cagugcuuguuauuguucuauu

SEQ ID NO: 13629 - RNA, 22 nt, Homo sapiens
uucuggaaaucagcagagggug

SEQ ID NO: 13630 - RNA, 22 nt, Homo sapiens
uguauguuguaagacuuagacc

SEQ ID NO: 13631 - RNA, 22 nt, Homo sapiens
ugccuaguagaaggugaacaug

SEQ ID NO: 13632 - RNA, 17 nt, Homo sapiens
gugagguauccucaaaa

SEQ ID NO: 13633 - RNA, 22 nt, Homo sapiens
uucauagucacauucgaugucu

SEQ ID NO: 13634 - RNA, 18 nt, Homo sapiens
ucagucacugccuggcuu

SEQ ID NO: 13635 - RNA, 22 nt, Homo sapiens
auuacacuuucuauucaaugag

SEQ ID NO: 13636 - RNA, 18 nt, Homo sapiens
auauugcauuggauggau

SEQ ID NO: 13637 - RNA, 22 nt, Homo sapiens
agcauuaguugugaagccuuua

SEQ ID NO: 13638 - RNA, 22 nt, Homo sapiens
gucaugucugcacauaguaaaa

SEQ ID NO: 13639 - RNA, 21 nt, Homo sapiens
cauaaugcuacuuauuuuaug

SEQ ID NO: 13640 - RNA, 22 nt, Homo sapiens
uuauuagguugguggaaaagua

SEQ ID NO: 13641 - RNA, 22 nt, Homo sapiens
uauugcacuuuuccauaggagu

SEQ ID NO: 13642 - RNA, 20 nt, Homo sapiens
aagugcuuccuuuuagaggg

SEQ ID NO: 13643 - RNA, 22 nt, Homo sapiens
uuuuuggauaaugguacaugua

SEQ ID NO: 13644 - RNA, 22 nt, Homo sapiens
uaugaaagcuacuucucacaau

SEQ ID NO: 13645 - RNA, 22 nt, Homo sapiens
uggcaccauccaggugucucua

SEQ ID NO: 13646 - RNA, 22 nt, Homo sapiens
ucuuuggucuacuuucauaugu

SEQ ID NO: 13647 - RNA, 22 nt, Homo sapiens
cuugcacuccacuguucuccug

SEQ ID NO: 13648 - RNA, 22 nt, Homo sapiens
gagguaucauuauguugcccag

SEQ ID NO: 13649 - RNA, 22 nt, Homo sapiens
gauggcacuaagccauguagga

SEQ ID NO: 13650 - RNA, 22 nt, Homo sapiens
ggaaauguuuagcauccacuuu

SEQ ID NO: 13651 - RNA, 22 nt, Homo sapiens
aagugcuuccuuucagaggguu

SEQ ID NO: 13652 - RNA, 21 nt, Homo sapiens
caugucacugcacucuagccu

SEQ ID NO: 13653 - RNA, 22 nt, Homo sapiens
cucacugucaacauguauuugg

SEQ ID NO: 13654 - RNA, 22 nt, Homo sapiens
aaauugcuuuugaagacuuagu

SEQ ID NO: 13655 - RNA, 22 nt, Homo sapiens
acuucauucucuggaucagaau

SEQ ID NO: 13656 - RNA, 21 nt, Homo sapiens
ugcuauguuguccaggcuggc

SEQ ID NO: 13657 - RNA, 22 nt, Homo sapiens
uugugaauggugccacaauaaa

SEQ ID NO: 13658 - RNA, 22 nt, Homo sapiens
guaaucucagcuucuugggagg

SEQ ID NO: 13659 - RNA, 22 nt, Homo sapiens
auccuuuagacuguccaguuga

SEQ ID NO: 13660 - RNA, 22 nt, Homo sapiens
uugugaaaaaccucucguggaa

SEQ ID NO: 13661 - RNA, 22 nt, Homo sapiens
uugaaagaaaggagacugaguu

SEQ ID NO: 13662 - RNA, 22 nt, Homo sapiens
cauugcacucugcauuccaguc

SEQ ID NO: 13663 - RNA, 22 nt, Homo sapiens
ugagauuguaucugcaaugugu

SEQ ID NO: 13664 - RNA, 20 nt, Homo sapiens
auuguccuugauuacacaga

SEQ ID NO: 13665 - RNA, 20 nt, Homo sapiens
ugacaagugagaauuauggg

SEQ ID NO: 13666 - RNA, 22 nt, Homo sapiens
auagcagugugaaaauggacua

SEQ ID NO: 13667 - RNA, 22 nt, Homo sapiens
auguagugugauuuucacuaga

SEQ ID NO: 13668 - RNA, 22 nt, Homo sapiens
agucaagaaucucagcaucuuu

SEQ ID NO: 13669 - RNA, 22 nt, Homo sapiens
uugcauaagugcauucugugau

SEQ ID NO: 13670 - RNA, 22 nt, Homo sapiens
acugcacuucagccuugggaaa

SEQ ID NO: 13671 - RNA, 22 nt, Homo sapiens
aaaguggugggauuccaggcau

SEQ ID NO: 13672 - RNA, 22 nt, Homo sapiens
uggaauguagcguugacacgag

SEQ ID NO: 13673 - RNA, 22 nt, Homo sapiens
accuggcacuuagcaaaucuga

SEQ ID NO: 13674 - RNA, 22 nt, Homo sapiens
caagugcuuucuuggggauuua

SEQ ID NO: 13675 - RNA, 22 nt, Homo sapiens
auacaagugccauguuggugug

SEQ ID NO: 13676 - RNA, 22 nt, Homo sapiens
cagcuaaauuguuaaauccaag

SEQ ID NO: 13677 - RNA, 22 nt, Homo sapiens
augacugucagggcagucauug

SEQ ID NO: 13678 - RNA, 22 nt, Homo sapiens
aauuacauggcaauugggaaau

SEQ ID NO: 13679 - RNA, 20 nt, Homo sapiens
uauugcacuccagucugggc

SEQ ID NO: 13680 - RNA, 22 nt, Homo sapiens
cuuucugaggagaauagagaac

SEQ ID NO: 13681 - RNA, 23 nt, Homo sapiens
ggcaagaucucagcucacugcaa

SEQ ID NO: 13682 - RNA, 22 nt, Homo sapiens
guacaugcaugcaugggugugc

SEQ ID NO: 13683 - RNA, 22 nt, Homo sapiens
uaacauuguugauuauacuaag

SEQ ID NO: 13684 - RNA, 22 nt, Homo sapiens
ugucaguuuuaacuagggaaua

SEQ ID NO: 13685 - RNA, 22 nt, Homo sapiens
ucuagccuaugaagcuugucca

SEQ ID NO: 13686 - RNA, 22 nt, Homo sapiens
uucacuguagccucagccucuu

SEQ ID NO: 13687 - RNA, 22 nt, Homo sapiens
aggugaaugcucacauucuaau

SEQ ID NO: 13688 - RNA, 22 nt, Homo sapiens
uaucacagugcuggaguauucc

SEQ ID NO: 13689 - RNA, 19 nt, Homo sapiens
uuuugcucuuuauaccuau

SEQ ID NO: 13690 - RNA, 22 nt, Homo sapiens
ugaggaacuagcuacccuaaua

SEQ ID NO: 13691 - RNA, 22 nt, Homo sapiens
uugucacccuacauaacaggga

SEQ ID NO: 13692 - RNA, 22 nt, Homo sapiens
augugcaacugcuggaacaguc

SEQ ID NO: 13693 - RNA, 22 nt, Homo sapiens
uggaguguguugcagaugaagg

SEQ ID NO: 13694 - RNA, 22 nt, Homo sapiens
auugucccucuuaaucccagca

SEQ ID NO: 13695 - RNA, 22 nt, Homo sapiens
ugagaucacgccacugcacucc

SEQ ID NO: 13696 - RNA, 22 nt, Homo sapiens
caugacacuggcauguuucuuu

SEQ ID NO: 13697 - RNA, 22 nt, Homo sapiens
ugagauguggcuagagagguug

SEQ ID NO: 13698 - RNA, 22 nt, Homo sapiens
uuauacucgucugaaugauucu

SEQ ID NO: 13699 - RNA, 22 nt, Homo sapiens
ucaugugaggauaacaauagug

SEQ ID NO: 13700 - RNA, 19 nt, Homo sapiens
ggucacagggguuacaagg

SEQ ID NO: 13701 - RNA, 22 nt, Homo sapiens
ugccuaguggaaggagagcaaa

SEQ ID NO: 13702 - RNA, 22 nt, Homo sapiens
auuaagugcuugccagugcugg

SEQ ID NO: 13703 - RNA, 23 nt, Homo sapiens
ggaguguaaugacucgaucucgg

SEQ ID NO: 13704 - RNA, 23 nt, Homo sapiens
aggaauggaaaaccaaguaucau

SEQ ID NO: 13705 - RNA, 22 nt, Homo sapiens
caugucuuuuauucugugugau

SEQ ID NO: 13706 - RNA, 22 nt, Homo sapiens
gugggcucguucguguuagaca

SEQ ID NO: 13707 - RNA, 22 nt, Homo sapiens
cacaaaguagauuagucuucca

SEQ ID NO: 13708 - RNA, 22 nt, Homo sapiens
uuuugcaccauccuaauaguau

SEQ ID NO: 13709 - RNA, 22 nt, Homo sapiens
cauugcacuccagccuggcaac

SEQ ID NO: 13710 - RNA, 22 nt, Homo sapiens
uaacauagucauauacuugcuu

SEQ ID NO: 13711 - RNA, 22 nt, Homo sapiens
agaacuguccauucagcaugaa

SEQ ID NO: 13712 - RNA, 22 nt, Homo sapiens
ugacucaguuucucagguagua

SEQ ID NO: 13713 - RNA, 20 nt, Homo sapiens
uuccuuaggcauuggaagaa

SEQ ID NO: 13714 - RNA, 22 nt, Homo sapiens
aucaccuggaggugaucacuug

SEQ ID NO: 13715 - RNA, 22 nt, Homo sapiens
acaguaaugggccccuuuuccu

SEQ ID NO: 13716 - RNA, 22 nt, Homo sapiens
aagugcucuugaaacugccuua

SEQ ID NO: 13717 - RNA, 22 nt, Homo sapiens
ucagcagugugaaaauggacua

SEQ ID NO: 13718 - RNA, 22 nt, Homo sapiens
ugucauguuucuacugaccaaa

SEQ ID NO: 13719 - RNA, 22 nt, Homo sapiens
gagaaugaugauuuccaauuuc

SEQ ID NO: 13720 - RNA, 22 nt, Homo sapiens
aagucaaggagagaagcuucag

SEQ ID NO: 13721 - RNA, 22 nt, Homo sapiens
gaagugcuuuuggacuaacagu

SEQ ID NO: 13722 - RNA, 22 nt, Homo sapiens
ggcagcauugccuuugcaguga

SEQ ID NO: 13723 - RNA, 22 nt, Homo sapiens
caaaagugauugcgguuuuugc

SEQ ID NO: 13724 - RNA, 19 nt, Homo sapiens
ucgcgccauucuccugccu

SEQ ID NO: 13725 - RNA, 22 nt, Homo sapiens
gagacggagucucgcucuguca

SEQ ID NO: 13726 - RNA, 23 nt, Homo sapiens
uaagucacacagauuaauuuauu

SEQ ID NO: 13727 - RNA, 22 nt, Homo sapiens
ucagacacugagcaaacgacua

SEQ ID NO: 13728 - RNA, 18 nt, Homo sapiens
cuggaugucgaguguguu

SEQ ID NO: 13729 - RNA, 22 nt, Homo sapiens
uauugcacaugaggagacauug

SEQ ID NO: 13730 - RNA, 22 nt, Homo sapiens
cuggcaagaggauaaaguccua

SEQ ID NO: 13731 - RNA, 22 nt, Homo sapiens
cccugaagauacagaguuuggg

SEQ ID NO: 13732 - RNA, 22 nt, Homo sapiens
uauuccuuuugcauuuccacau

SEQ ID NO: 13733 - RNA, 22 nt, Homo sapiens
agcagagcauauucauucgggg

SEQ ID NO: 13734 - RNA, 22 nt, Homo sapiens
gccuagagaaguaaauauuauc

SEQ ID NO: 13735 - RNA, 22 nt, Homo sapiens
aagugcuuuuuagauaugguuu

SEQ ID NO: 13736 - RNA, 22 nt, Homo sapiens
uugcaucagcaggcauaauugg

SEQ ID NO: 13737 - RNA, 22 nt, Homo sapiens
uacauacuucacagacuuuaaa

SEQ ID NO: 13738 - RNA, 22 nt, Homo sapiens
uaagugaauauggacaguuagc

SEQ ID NO: 13739 - RNA, 22 nt, Homo sapiens
accugagacuaggcauuuuaua

SEQ ID NO: 13740 - RNA, 22 nt, Homo sapiens
cauugcacuccagcccagguga

SEQ ID NO: 13741 - RNA, 22 nt, Homo sapiens
uaagugaaggaaguguguuuac

SEQ ID NO: 13742 - RNA, 22 nt, Homo sapiens
auugcacaccagucugggcaaa

SEQ ID NO: 13743 - RNA, 22 nt, Homo sapiens
acauguaauugauuuuguguua

SEQ ID NO: 13744 - RNA, 22 nt, Homo sapiens
augugaaugugaucggauaguc

SEQ ID NO: 13745 - RNA, 22 nt, Homo sapiens
acugcacuccagccuuggccac

SEQ ID NO: 13746 - RNA, 22 nt, Homo sapiens
cuggugauugguuucauucagu

SEQ ID NO: 13747 - RNA, 22 nt, Homo sapiens
aagggaauguuguggcugguuu

SEQ ID NO: 13748 - RNA, 22 nt, Homo sapiens
uaugucuggaguuacugagcug

SEQ ID NO: 13749 - RNA, 22 nt, Homo sapiens
aacagucaauugcugaugaccu

SEQ ID NO: 13750 - RNA, 22 nt, Homo sapiens
uuggcuuggagaguugaaaugu

SEQ ID NO: 13751 - RNA, 20 nt, Homo sapiens
cauugcacuccagccugcug

SEQ ID NO: 13752 - RNA, 22 nt, Homo sapiens
ucuugcacaaauuauuuuaacu

SEQ ID NO: 13753 - RNA, 21 nt, Homo sapiens
ccauggcaaugguaaacugac

SEQ ID NO: 13754 - RNA, 22 nt, Homo sapiens
ucacugugguuuugaugugcau

SEQ ID NO: 13755 - RNA, 22 nt, Homo sapiens
ugaugucuugcaggcacgagau

SEQ ID NO: 13756 - RNA, 22 nt, Homo sapiens
acugcacuccagccuuggcggc

SEQ ID NO: 13757 - RNA, 20 nt, Homo sapiens
uaagugcuugagacuucuga

SEQ ID NO: 13758 - RNA, 22 nt, Homo sapiens
uuucauggaggauuugcuucuu

SEQ ID NO: 13759 - RNA, 22 nt, Homo sapiens
guaaucucaccuacuugggagg

SEQ ID NO: 13760 - RNA, 22 nt, Homo sapiens
aagagguagcagucacaaaaga

SEQ ID NO: 13761 - RNA, 22 nt, Homo sapiens
cauugcacuccagccuggccaa

SEQ ID NO: 13762 - RNA, 22 nt, Homo sapiens
ccuuggcaauggcuggggcuga

SEQ ID NO: 13763 - RNA, 22 nt, Homo sapiens
acugcacuccggccuggcaaca

SEQ ID NO: 13764 - RNA, 23 nt, Homo sapiens
augacacuccugugcgcacccug

SEQ ID NO: 13765 - RNA, 19 nt, Homo sapiens
auacacguguauacauaca

SEQ ID NO: 13766 - RNA, 22 nt, Homo sapiens
uucacuguuaagcaguuaaacu

SEQ ID NO: 13767 - RNA, 16 nt, Homo sapiens
cauugcacucuagccu

SEQ ID NO: 13768 - RNA, 22 nt, Homo sapiens
gagaacugagauaagugauauu

SEQ ID NO: 13769 - RNA, 22 nt, Homo sapiens
auacaguugccauuucuugugc

SEQ ID NO: 13770 - RNA, 22 nt, Homo sapiens
cucagcuacuugggaagcugag

SEQ ID NO: 13771 - RNA, 22 nt, Homo sapiens
cucauugcaaucuccaccuccc

SEQ ID NO: 13772 - RNA, 22 nt, Homo sapiens
uaugcuuauaaacauuugucag

SEQ ID NO: 13773 - RNA, 22 nt, Homo sapiens
cauugcacuuagacaacuuuug

SEQ ID NO: 13774 - RNA, 22 nt, Homo sapiens
gugcacauuguuuaugucuguu

SEQ ID NO: 13775 - RNA, 21 nt, Homo sapiens
guucaagugauccuccugucu

SEQ ID NO: 13776 - RNA, 22 nt, Homo sapiens
uuuccagguggccaacauuuua

SEQ ID NO: 13777 - RNA, 22 nt, Homo sapiens
gcagagaaacaggucuaaggag

SEQ ID NO: 13778 - RNA, 20 nt, Homo sapiens
cuggaugucgaggcagaggu

SEQ ID NO: 13779 - RNA, 22 nt, Homo sapiens
ugucacccuuuauccauuuccu

SEQ ID NO: 13780 - RNA, 21 nt, Homo sapiens
caauggcacaaucucugcuca

SEQ ID NO: 13781 - RNA, 22 nt, Homo sapiens
gugaaagacauauaugguuuga

SEQ ID NO: 13782 - RNA, 22 nt, Homo sapiens
agauggguuuucacauguuggc

SEQ ID NO: 13783 - RNA, 22 nt, Homo sapiens
aauggcaaauguuuucuguuga

SEQ ID NO: 13784 - RNA, 22 nt, Homo sapiens
cuucaaguguggccaccugacc

SEQ ID NO: 13785 - RNA, 22 nt, Homo sapiens
cccugagaaaacuuuguccuua

SEQ ID NO: 13786 - RNA, 22 nt, Homo sapiens
ugugccacugcacucuggccug

SEQ ID NO: 13787 - RNA, 22 nt, Homo sapiens
uaagucacuccagguuaaagug

SEQ ID NO: 13788 - RNA, 22 nt, Homo sapiens
uguguaauaccuuugacuauau

SEQ ID NO: 13789 - RNA, 22 nt, Homo sapiens
uugugaauggugccgcaauaaa

SEQ ID NO: 13790 - RNA, 23 nt, Homo sapiens
auaagccuuuucuuucugcccca

SEQ ID NO: 13791 - RNA, 22 nt, Homo sapiens
cagagaaugucuuuuuuaacca

SEQ ID NO: 13792 - RNA, 22 nt, Homo sapiens
gagaacauuaauaguuaauuuu

SEQ ID NO: 13793 - RNA, 22 nt, Homo sapiens
ucacaugggugcaauauaauca

SEQ ID NO: 13794 - RNA, 22 nt, Homo sapiens
uagucacacacucaacuuuuca

SEQ ID NO: 13795 - RNA, 22 nt, Homo sapiens
uuauuagguuaaccuauagcua

SEQ ID NO: 13796 - RNA, 22 nt, Homo sapiens
aucaaaguuucccagaaguugu

SEQ ID NO: 13797 - RNA, 22 nt, Homo sapiens
acugcacuccagccuuggcaac

SEQ ID NO: 13798 - RNA, 22 nt, Homo sapiens
ccaguguucuggaaggcugagu

SEQ ID NO: 13799 - RNA, 22 nt, Homo sapiens
augucuggcagaagacuucuca

SEQ ID NO: 13800 - RNA, 22 nt, Homo sapiens
uugcaaugugaugugauuugga

SEQ ID NO: 13801 - RNA, 22 nt, Homo sapiens
aaagugcuuccuuuuugagggu

SEQ ID NO: 13802 - RNA, 22 nt, Homo sapiens
ucacugugugucucuguaucug

SEQ ID NO: 13803 - RNA, 22 nt, Homo sapiens
guaaucucagcuacuugggagc

SEQ ID NO: 13804 - RNA, 22 nt, Homo sapiens
uucaaaguguugguuuugggcu

SEQ ID NO: 13805 - RNA, 22 nt, Homo sapiens
acuccauuucauuuuagcucuu

SEQ ID NO: 13806 - RNA, 16 nt, Homo sapiens
aucacuugcuucuuuu

SEQ ID NO: 13807 - RNA, 22 nt, Homo sapiens
ucuugggugaguuugugaauaa

SEQ ID NO: 13808 - RNA, 22 nt, Homo sapiens
caucacaugcuuauuuuccuca

SEQ ID NO: 13809 - RNA, 22 nt, Homo sapiens
guggaagaaaucagguuauuug

SEQ ID NO: 13810 - RNA, 22 nt, Homo sapiens
cugaaagagcauuugaaugggu

SEQ ID NO: 13811 - RNA, 21 nt, Homo sapiens
uaucagagacauugagaggca

SEQ ID NO: 13812 - RNA, 22 nt, Homo sapiens
aaagugcuuacuaaguugccaa

SEQ ID NO: 13813 - RNA, 22 nt, Homo sapiens
ugaaaguuauauugugaaauuc

SEQ ID NO: 13814 - RNA, 22 nt, Homo sapiens
uuggagugugcucauaacugcu

SEQ ID NO: 13815 - RNA, 22 nt, Homo sapiens
uuguaacaugcuuucacuucag

SEQ ID NO: 13816 - RNA, 22 nt, Homo sapiens
gagagguaguuuuuuggucguc

SEQ ID NO: 13817 - RNA, 22 nt, Homo sapiens
uguaauuuaaaugauccuugga

SEQ ID NO: 13818 - RNA, 22 nt, Homo sapiens
ucucaaccucccaaguagcugg

SEQ ID NO: 13819 - RNA, 22 nt, Homo sapiens
ugagaucacuaagagguaaugg

SEQ ID NO: 13820 - RNA, 22 nt, Homo sapiens
uuucaagugcugucuuagcugu

SEQ ID NO: 13821 - RNA, 22 nt, Homo sapiens
uauugcacuccucaugcauuug

SEQ ID NO: 13822 - RNA, 22 nt, Homo sapiens
uaucaacaggguggccagugua

SEQ ID NO: 13823 - RNA, 22 nt, Homo sapiens
augagacauuaaaguguguuug

SEQ ID NO: 13824 - RNA, 22 nt, Homo sapiens
auuccuuaggcccuuugguuag

SEQ ID NO: 13825 - RNA, 22 nt, Homo sapiens
cucaguuuugccuuguuuaagg

SEQ ID NO: 13826 - RNA, 22 nt, Homo sapiens
ugugaacaaaauuuguugcaua

SEQ ID NO: 13827 - RNA, 22 nt, Homo sapiens
uccugagacugaggagcuuugg

SEQ ID NO: 13828 - RNA, 22 nt, Homo sapiens
uaaguaaaugaaagguugauuu

SEQ ID NO: 13829 - RNA, 22 nt, Homo sapiens
uuaaguuaggcuucagcagucu

SEQ ID NO: 13830 - RNA, 18 nt, Homo sapiens
ucuggcuucuuuguucca

SEQ ID NO: 13831 - RNA, 22 nt, Homo sapiens
uggauaguaauaaacauauagg

SEQ ID NO: 13832 - RNA, 22 nt, Homo sapiens
uauuacauccauaggcucugcu

SEQ ID NO: 13833 - RNA, 22 nt, Homo sapiens
cucaaguacaugggauuacagg

SEQ ID NO: 13834 - RNA, 22 nt, Homo sapiens
uauacagcaaguuacugugcug

SEQ ID NO: 13835 - RNA, 22 nt, Homo sapiens
cauugcacuccagcuugggcga

SEQ ID NO: 13836 - RNA, 22 nt, Homo sapiens
uggaaguauagauaauugaaag

SEQ ID NO: 13837 - RNA, 22 nt, Homo sapiens
uauuccacaauaugauuuuuaa

SEQ ID NO: 13838 - RNA, 22 nt, Homo sapiens
ugagaucaugccacugcacuuc

SEQ ID NO: 13839 - RNA, 22 nt, Homo sapiens
gcagcacauggcagaacauauu

SEQ ID NO: 13840 - RNA, 22 nt, Homo sapiens
uuggccauaugacuugcuuugg

SEQ ID NO: 13841 - RNA, 22 nt, Homo sapiens
auauuggccuaaaauucucuuu

SEQ ID NO: 13842 - RNA, 21 nt, Homo sapiens
ucaguuacugagagagaagug

SEQ ID NO: 13843 - RNA, 22 nt, Homo sapiens
ggaucacuugagaccaggaguu

SEQ ID NO: 13844 - RNA, 22 nt, Homo sapiens
acugagaucuuuaaauaaauaa

SEQ ID NO: 13845 - RNA, 22 nt, Homo sapiens
acccagaguuccuugucuuuca

SEQ ID NO: 13846 - RNA, 22 nt, Homo sapiens
cuggccagagacauucauuaaa

SEQ ID NO: 13847 - RNA, 22 nt, Homo sapiens
uugaaagacaucaccuacugcu

SEQ ID NO: 13848 - RNA, 22 nt, Homo sapiens
augauagucuugagaagcauuu

SEQ ID NO: 13849 - RNA, 22 nt, Homo sapiens
uccugagagcagacccucuaua

SEQ ID NO: 13850 - RNA, 22 nt, Homo sapiens
ucacuagggagaaacugaggcu

SEQ ID NO: 13851 - RNA, 22 nt, Homo sapiens
uucacagagagaacucaaacca

SEQ ID NO: 13852 - RNA, 22 nt, Homo sapiens
aggcaugauuguauuuugcucu

SEQ ID NO: 13853 - RNA, 22 nt, Homo sapiens
gaaucacugugguaucccaugc

SEQ ID NO: 13854 - RNA, 22 nt, Homo sapiens
ccugagacuugagggggcuucu

SEQ ID NO: 13855 - RNA, 22 nt, Homo sapiens
caagugcuacagagaaaucuuu

SEQ ID NO: 13856 - RNA, 22 nt, Homo sapiens
agcuggucuacguguguaugag

SEQ ID NO: 13857 - RNA, 22 nt, Homo sapiens
ucagacacuguggccuuuggac

SEQ ID NO: 13858 - RNA, 22 nt, Homo sapiens
auucaaagugcauguucccacu

SEQ ID NO: 13859 - RNA, 23 nt, Homo sapiens
ucucauuccuugaaaauaaugac

SEQ ID NO: 13860 - RNA, 22 nt, Homo sapiens
auugcagcccacccugggugau

SEQ ID NO: 13861 - RNA, 22 nt, Homo sapiens
ugagaaugaugauuuccaguuu

SEQ ID NO: 13862 - RNA, 22 nt, Homo sapiens
ucauagucuaagguucuuuugc

SEQ ID NO: 13863 - RNA, 22 nt, Homo sapiens
aaagugcuaggauuaccugggg

SEQ ID NO: 13864 - RNA, 22 nt, Homo sapiens
auagcagaacagugucucacug

SEQ ID NO: 13865 - RNA, 22 nt, Homo sapiens
auguauacaugcaggucacagg

SEQ ID NO: 13866 - RNA, 22 nt, Homo sapiens
cuuuuggcuuaagauugucuug

SEQ ID NO: 13867 - RNA, 22 nt, Homo sapiens
uuguguacuacaguaugccaca

SEQ ID NO: 13868 - RNA, 22 nt, Homo sapiens
augacauugaugcucuggcugg

SEQ ID NO: 13869 - RNA, 22 nt, Homo sapiens
gugccacugcacuccggccugg

SEQ ID NO: 13870 - RNA, 22 nt, Homo sapiens
ugcgccauugcacuccagccug

SEQ ID NO: 13871 - RNA, 20 nt, Homo sapiens
ucacugugaacuucuugagg

SEQ ID NO: 13872 - RNA, 22 nt, Homo sapiens
uucucaauggcaacuuguugcu

SEQ ID NO: 13873 - RNA, 22 nt, Homo sapiens
uuaauuguccaaguucaucucu

SEQ ID NO: 13874 - RNA, 22 nt, Homo sapiens
uccaguuuggaggcuugaugug

SEQ ID NO: 13875 - RNA, 22 nt, Homo sapiens
ugucauucaggaaauucuaagu

SEQ ID NO: 13876 - RNA, 22 nt, Homo sapiens
uuuguccccgcccagaucucau

SEQ ID NO: 13877 - RNA, 22 nt, Homo sapiens
uugccuaggcuggaguucagug

SEQ ID NO: 13878 - RNA, 22 nt, Homo sapiens
aaagugcugggauuuuaggcau

SEQ ID NO: 13879 - RNA, 22 nt, Homo sapiens
gagauauucugguuuacuaaau

SEQ ID NO: 13880 - RNA, 22 nt, Homo sapiens
gagaacauuuaagccacucagg

SEQ ID NO: 13881 - RNA, 22 nt, Homo sapiens
cagccgggugagguggcuuguu

SEQ ID NO: 13882 - RNA, 22 nt, Homo sapiens
uuggcaaguccccaccucucuc

SEQ ID NO: 13883 - RNA, 22 nt, Homo sapiens
gugaaagacagcauuaauggcu

SEQ ID NO: 13884 - RNA, 22 nt, Homo sapiens
aguggcaaugugauguccugaa

SEQ ID NO: 13885 - RNA, 22 nt, Homo sapiens
aguacaauguugaguagaagug

SEQ ID NO: 13886 - RNA, 22 nt, Homo sapiens
agaucauaugcaguaaugaacu

SEQ ID NO: 13887 - RNA, 22 nt, Homo sapiens
ugaguuagguaauaauaaauau

SEQ ID NO: 13888 - RNA, 20 nt, Homo sapiens
guucauguaauuaguucagg

SEQ ID NO: 13889 - RNA, 22 nt, Homo sapiens
gugucucagcccagaccuauuu

SEQ ID NO: 13890 - RNA, 22 nt, Homo sapiens
ucaggcaccuuccucuuaucug

SEQ ID NO: 13891 - RNA, 22 nt, Homo sapiens
cauugcacucuagccucggcaa

SEQ ID NO: 13892 - RNA, 22 nt, Homo sapiens
cacagaauucauuggauuaccu

SEQ ID NO: 13893 - RNA, 22 nt, Homo sapiens
gagcacugauuuauuuuugucu

SEQ ID NO: 13894 - RNA, 22 nt, Homo sapiens
uauaagacgagcaaaaagcuug

SEQ ID NO: 13895 - RNA, 22 nt, Homo sapiens
cacugcgacguccgccucccgg

SEQ ID NO: 13896 - RNA, 22 nt, Homo sapiens
guggaaugauaucucauugugg

SEQ ID NO: 13897 - RNA, 17 nt, Homo sapiens
auaugucugcuggggga

SEQ ID NO: 13898 - RNA, 22 nt, Homo sapiens
augaaauugcuaucgcaguacu

SEQ ID NO: 13899 - RNA, 20 nt, Homo sapiens
auaugcagacacauacauac

SEQ ID NO: 13900 - RNA, 22 nt, Homo sapiens
ggccggguggccauggcugccc

SEQ ID NO: 13901 - RNA, 22 nt, Homo sapiens
aagacuguaauccaucuugagu

SEQ ID NO: 13902 - RNA, 22 nt, Homo sapiens
gggaucaacuuauacuaaaauu

SEQ ID NO: 13903 - RNA, 22 nt, Homo sapiens
uucacaguacucccuggaauua

SEQ ID NO: 13904 - RNA, 22 nt, Homo sapiens
agcgccacugcacuccagccug

SEQ ID NO: 13905 - RNA, 22 nt, Homo sapiens
ugagaugugaagaucacaugaa

SEQ ID NO: 13906 - RNA, 22 nt, Homo sapiens
acugcacucuagccuuggcaac

SEQ ID NO: 13907 - RNA, 22 nt, Homo sapiens
acaagacuucuuguauucuagu

SEQ ID NO: 13908 - RNA, 22 nt, Homo sapiens
auggaagaaacgauuuucugga

SEQ ID NO: 13909 - RNA, 22 nt, Homo sapiens
accaugcaguccaauaugcaca

SEQ ID NO: 13910 - RNA, 22 nt, Homo sapiens
agacacuguugaaaaggcccca

SEQ ID NO: 13911 - RNA, 22 nt, Homo sapiens
aaagugaauguaucccguaagu

SEQ ID NO: 13912 - RNA, 19 nt, Homo sapiens
acugcacuccuccuugggu

SEQ ID NO: 13913 - RNA, 22 nt, Homo sapiens
ucaagcaauucuccugccucag

SEQ ID NO: 13914 - RNA, 22 nt, Homo sapiens
uucaagcuauggugaucuuuuc

SEQ ID NO: 13915 - RNA, 22 nt, Homo sapiens
cagagguauugcaaaagccuag

SEQ ID NO: 13916 - RNA, 22 nt, Homo sapiens
ugcaaaugcugcuauuucucuu

SEQ ID NO: 13917 - RNA, 22 nt, Homo sapiens
guugcucaggcuggagugcagu

SEQ ID NO: 13918 - RNA, 22 nt, Homo sapiens
uuauucauuaacagggaccaaa

SEQ ID NO: 13919 - RNA, 22 nt, Homo sapiens
cauugcacuccagccugaggga

SEQ ID NO: 13920 - RNA, 22 nt, Homo sapiens
uuguaaaguucucucccgaaaa

SEQ ID NO: 13921 - RNA, 22 nt, Homo sapiens
uuugucccucucaccaacgggg

SEQ ID NO: 13922 - RNA, 21 nt, Homo sapiens
agcuaaauuggaaauuucugu

SEQ ID NO: 13923 - RNA, 22 nt, Homo sapiens
ucauucauuugcucacuccaca

SEQ ID NO: 13924 - RNA, 22 nt, Homo sapiens
aaaugccucccauucuacugac

SEQ ID NO: 13925 - RNA, 22 nt, Homo sapiens
auccacaugcaguuggaaacag

SEQ ID NO: 13926 - RNA, 22 nt, Homo sapiens
uugugaaugaugucgcaguaaa

SEQ ID NO: 13927 - RNA, 22 nt, Homo sapiens
auugucacccgggcaguaagca

SEQ ID NO: 13928 - RNA, 22 nt, Homo sapiens
ucugucuugugguuugagugcc

SEQ ID NO: 13929 - RNA, 22 nt, Homo sapiens
gugucuccugccuucaugcagc

SEQ ID NO: 13930 - RNA, 17 nt, Homo sapiens
ugcaauuuaagcuagau

SEQ ID NO: 13931 - RNA, 22 nt, Homo sapiens
ucucuguuugucuguuacuggu

SEQ ID NO: 13932 - RNA, 19 nt, Homo sapiens
uggaaugaaauguuagggg

SEQ ID NO: 13933 - RNA, 22 nt, Homo sapiens
uacgccuguaauaucagcauuu

SEQ ID NO: 13934 - RNA, 22 nt, Homo sapiens
ucagugucugugauggagaggu

SEQ ID NO: 13935 - RNA, 22 nt, Homo sapiens
uacagucacauuccugaccaua

SEQ ID NO: 13936 - RNA, 22 nt, Homo sapiens
ggcacuguggcucaagccugua

SEQ ID NO: 13937 - RNA, 22 nt, Homo sapiens
ucacugaaaccacugccuccug

SEQ ID NO: 13938 - RNA, 22 nt, Homo sapiens
uaagcagugcaagaauggaaua

SEQ ID NO: 13939 - RNA, 22 nt, Homo sapiens
gugcaaaucucugaguaucuuu

SEQ ID NO: 13940 - RNA, 22 nt, Homo sapiens
aaucacuuugcuacaaggcagu

SEQ ID NO: 13941 - RNA, 20 nt, Homo sapiens
uggucaccuucaggagguuc

SEQ ID NO: 13942 - RNA, 22 nt, Homo sapiens
uagcaguauugaaagaugaggg

SEQ ID NO: 13943 - RNA, 22 nt, Homo sapiens
auugcacacagaaucaggguaa

SEQ ID NO: 13944 - RNA, 21 nt, Homo sapiens
ucaucagucaaagacaauggu

SEQ ID NO: 13945 - RNA, 22 nt, Homo sapiens
cccugagaugugaauuucagag

SEQ ID NO: 13946 - RNA, 22 nt, Homo sapiens
gagauauuauuucccuuucaca

SEQ ID NO: 13947 - RNA, 22 nt, Homo sapiens
uugaagugaagaacaauaucac

SEQ ID NO: 13948 - RNA, 22 nt, Homo sapiens
ucaagcaauucuccucucagcc

SEQ ID NO: 13949 - RNA, 22 nt, Homo sapiens
uugugaauggugccucaguaaa

SEQ ID NO: 13950 - RNA, 22 nt, Homo sapiens
acuggcuuauuucacuuagcau

SEQ ID NO: 13951 - RNA, 22 nt, Homo sapiens
uuaugucuuuuguguucagcua

SEQ ID NO: 13952 - RNA, 22 nt, Homo sapiens
uugucaacaugaaacuguguuu

SEQ ID NO: 13953 - RNA, 22 nt, Homo sapiens
caaagucuucucauuaugucuu

SEQ ID NO: 13954 - RNA, 22 nt, Homo sapiens
aagggaauguuguagcugguuu

SEQ ID NO: 13955 - RNA, 22 nt, Homo sapiens
uuggaagauuacuuaguuuucu

SEQ ID NO: 13956 - RNA, 22 nt, Homo sapiens
guguaaaacaauuagaggauuu

SEQ ID NO: 13957 - RNA, 22 nt, Homo sapiens
uauacugucuuuguaugccuag

SEQ ID NO: 13958 - RNA, 22 nt, Homo sapiens
uggaauuaauuaaaauauacug

SEQ ID NO: 13959 - RNA, 22 nt, Homo sapiens
uucauggaauauugaccauuuu

SEQ ID NO: 13960 - RNA, 22 nt, Homo sapiens
gugccuuuucugagcaaugagc

SEQ ID NO: 13961 - RNA, 22 nt, Homo sapiens
uagcaguaccccaguauccugg

SEQ ID NO: 13962 - RNA, 22 nt, Homo sapiens
uuggccagugucuuuuuuuccu

SEQ ID NO: 13963 - RNA, 22 nt, Homo sapiens
uugucauuuucagaguguuacg

SEQ ID NO: 13964 - RNA, 20 nt, Homo sapiens
cauugcacuccagcuugggc

SEQ ID NO: 13965 - RNA, 22 nt, Homo sapiens
uugccuaggcuggauugcagug

SEQ ID NO: 13966 - RNA, 19 nt, Homo sapiens
auaaaugccuacaagggug

SEQ ID NO: 13967 - RNA, 22 nt, Homo sapiens
uuuuaguggaauauuuacaguu

SEQ ID NO: 13968 - RNA, 22 nt, Homo sapiens
guaugucuuuauagcagugugg

SEQ ID NO: 13969 - RNA, 22 nt, Homo sapiens
ucucagugaauguggaaaaagc

SEQ ID NO: 13970 - RNA, 22 nt, Homo sapiens
ucaucaggcucauucaagcuga

SEQ ID NO: 13971 - RNA, 22 nt, Homo sapiens
uuggucucaucaagagcagcuu

SEQ ID NO: 13972 - RNA, 22 nt, Homo sapiens
aagugacauugugcccauuuga

SEQ ID NO: 13973 - RNA, 20 nt, Homo sapiens
ucucauggagggaaagagca

SEQ ID NO: 13974 - RNA, 22 nt, Homo sapiens
caagugcuugaugaaugaucaa

SEQ ID NO: 13975 - RNA, 22 nt, Homo sapiens
cccagaguucuuaaauacugag

SEQ ID NO: 13976 - RNA, 22 nt, Homo sapiens
ugagaaugacugggcaugcugc

SEQ ID NO: 13977 - RNA, 22 nt, Homo sapiens
uugaggaaugucauuuguguuu

SEQ ID NO: 13978 - RNA, 22 nt, Homo sapiens
agucacagugaccuugucugac

SEQ ID NO: 13979 - RNA, 22 nt, Homo sapiens
ugugaagauggacuaauauagu

SEQ ID NO: 13980 - RNA, 22 nt, Homo sapiens
aauaauggcaccaaagcacaag

SEQ ID NO: 13981 - RNA, 22 nt, Homo sapiens
uucuauguuugaaaaugccaaa

SEQ ID NO: 13982 - RNA, 22 nt, Homo sapiens
uuggcagcacgcaguccagagg

SEQ ID NO: 13983 - RNA, 20 nt, Mycobacterium tuberculosis CDC1551
uuucugagcggcucaugacg

SEQ ID NO: 13984 - RNA, 22 nt, Mycobacterium tuberculosis CDC1551
uuuggccaugccgcgggcgacc

SEQ ID NO: 13985 - RNA, 22 nt, Mycobacterium tuberculosis CDC1551
uuugggugugagaacgguuggu

SEQ ID NO: 13986 - RNA, 22 nt, Mycobacterium tuberculosis CDC1551
uugagggugugggccacgucgg

SEQ ID NO: 13987 - RNA, 22 nt, Mycobacterium tuberculosis CDC1551
uugcgcaggggcaugucagcgu

SEQ ID NO: 13988 - RNA, 22 nt, Mycobacterium tuberculosis CDC1551
uugauauuaccgauggaauguc

SEQ ID NO: 13989 - RNA, 22 nt, Mycobacterium tuberculosis CDC1551
uugaugaugcggauccggauuc

SEQ ID NO: 13990 - RNA, 22 nt, Mycobacterium tuberculosis CDC1551
uugggccaccucggcggccagc

SEQ ID NO: 13991 - RNA, 22 nt, Mycobacterium tuberculosis CDC1551
uuggcaggcggucaagccacaa

SEQ ID NO: 13992 - RNA, 22 nt, Mycobacterium tuberculosis CDC1551
uucaggcuacgguagcggugcg

SEQ ID NO: 13993 - RNA, 22 nt, Mycobacterium tuberculosis CDC1551
uucaucaaggacgcgugcaccc

SEQ ID NO: 13994 - RNA, 21 nt, Mycobacterium tuberculosis CDC1551
uuccggcccggguccagcgac

SEQ ID NO: 13995 - RNA, 22 nt, Mycobacterium tuberculosis CDC1551
uucuucagcauggcgaugacgg

SEQ ID NO: 13996 - RNA, 22 nt, Mycobacterium tuberculosis CDC1551
ugguggccggugccgacaccuc

SEQ ID NO: 13997 - RNA, 20 nt, Mycobacterium tuberculosis CDC1551
ugggcuaauggcaaccacgg

SEQ ID NO: 13998 - RNA, 22 nt, Mycobacterium tuberculosis CDC1551
uggucggcgaguucgccgugca

SEQ ID NO: 13999 - RNA, 20 nt, Mycobacterium tuberculosis CDC1551
uggucaccggguucgacacc

SEQ ID NO: 14000 - RNA, 22 nt, Mycobacterium tuberculosis CDC1551
uggggcaugagcguguccaggc

SEQ ID NO: 14001 - RNA, 22 nt, Mycobacterium tuberculosis CDC1551
ugucgcgcaagcucuccggcac

SEQ ID NO: 14002 - RNA, 22 nt, Mycobacterium tuberculosis CDC1551
ugucauucgggucgguuacguc

SEQ ID NO: 14003 - RNA, 18 nt, Mycobacterium tuberculosis CDC1551
ugugaccacagggcuggc

SEQ ID NO: 14004 - RNA, 22 nt, Mycobacterium tuberculosis CDC1551
ugugauggagugaucggcagcc

SEQ ID NO: 14005 - RNA, 22 nt, Mycobacterium tuberculosis CDC1551
uggcgcugucgaucaccgacuu

SEQ ID NO: 14006 - RNA, 22 nt, Mycobacterium tuberculosis CDC1551
uggcucagauugccggugccgc

SEQ ID NO: 14007 - RNA, 22 nt, Mycobacterium tuberculosis CDC1551
uggcucagcgggucaacgaggc

SEQ ID NO: 14008 - RNA, 22 nt, Mycobacterium tuberculosis CDC1551
ugggcugcugcgccgcaucggc

SEQ ID NO: 14009 - RNA, 22 nt, Mycobacterium tuberculosis CDC1551
uggccagcacgguguucaaguu

SEQ ID NO: 14010 - RNA, 22 nt, Mycobacterium tuberculosis CDC1551
uggcgcgcggaucgacgacagg

SEQ ID NO: 14011 - RNA, 18 nt, Mycobacterium tuberculosis CDC1551
ugcgccacaacggcggga

SEQ ID NO: 14012 - RNA, 22 nt, Mycobacterium tuberculosis CDC1551
ugcgccagcgccucccgcagga

SEQ ID NO: 14013 - RNA, 22 nt, Mycobacterium tuberculosis CDC1551
ugcugcgccuccugcggaccgu

SEQ ID NO: 14014 - RNA, 23 nt, Mycobacterium tuberculosis CDC1551
uggaauggaucucggcgauaaug

SEQ ID NO: 14015 - RNA, 22 nt, Mycobacterium tuberculosis CDC1551
uggacaccauuccguugggaug

SEQ ID NO: 14016 - RNA, 22 nt, Mycobacterium tuberculosis CDC1551
ugcacuccgacccgccgacguu

SEQ ID NO: 14017 - RNA, 18 nt, Mycobacterium tuberculosis CDC1551
ucgugggcgcgccgccaa

SEQ ID NO: 14018 - RNA, 21 nt, Mycobacterium tuberculosis CDC1551
ugacccacugggccgagucgg

SEQ ID NO: 14019 - RNA, 22 nt, Mycobacterium tuberculosis CDC1551
cgccaaaccgaacggcgagcug

SEQ ID NO: 14020 - RNA, 18 nt, Mycobacterium tuberculosis CDC1551
cgccacucgcagugggac

SEQ ID NO: 14021 - RNA, 22 nt, Mycobacterium tuberculosis CDC1551
cgcugcaccgcggccuggcccu

SEQ ID NO: 14022 - RNA, 22 nt, Mycobacterium tuberculosis CDC1551
ccgcccggcugcgcgagcuggg

SEQ ID NO: 14023 - RNA, 22 nt, Mycobacterium tuberculosis CDC1551
cgaccugcgacagccguuaacg

SEQ ID NO: 14024 - RNA, 22 nt, Mycobacterium tuberculosis CDC1551
ccuggcgcgcagcacggccugc

SEQ ID NO: 14025 - RNA, 22 nt, Mycobacterium tuberculosis CDC1551
ccugugccaagcgcugaccgcu

SEQ ID NO: 14026 - RNA, 22 nt, Mycobacterium tuberculosis CDC1551
cgaaacugcggaccgcgcaacc

SEQ ID NO: 14027 - RNA, 22 nt, Mycobacterium tuberculosis CDC1551
ccguugacccagaccggcucgu

SEQ ID NO: 14028 - RNA, 21 nt, Mycobacterium tuberculosis CDC1551
cugcugauggcggcgauaucg

SEQ ID NO: 14029 - RNA, 22 nt, Mycobacterium tuberculosis CDC1551
cucuugggucaaccaggugacu

SEQ ID NO: 14030 - RNA, 22 nt, Mycobacterium tuberculosis CDC1551
cucccgccgugugucgcgggcu

SEQ ID NO: 14031 - RNA, 18 nt, Mycobacterium tuberculosis CDC1551
cuccuuggacuacggcug

SEQ ID NO: 14032 - RNA, 22 nt, Mycobacterium tuberculosis CDC1551
cggccaagggugcggacgccga

SEQ ID NO: 14033 - RNA, 22 nt, Mycobacterium tuberculosis CDC1551
cgguggugaccgccgcgacguc

SEQ ID NO: 14034 - RNA, 22 nt, Mycobacterium tuberculosis CDC1551
cguggaauuucuucgccauggg

SEQ ID NO: 14035 - RNA, 22 nt, Mycobacterium tuberculosis CDC1551
cguggcaaaugugaucccgugc

SEQ ID NO: 14036 - RNA, 22 nt, Mycobacterium tuberculosis CDC1551
cguaagccucgucagcuauccg

SEQ ID NO: 14037 - RNA, 22 nt, Mycobacterium tuberculosis CDC1551
cgucaccugcacggugguugcc

SEQ ID NO: 14038 - RNA, 22 nt, Mycobacterium tuberculosis CDC1551
cagcgccaauacaucacggcag

SEQ ID NO: 14039 - RNA, 22 nt, Mycobacterium tuberculosis CDC1551
cagccgccaaaccgcugaggaa

SEQ ID NO: 14040 - RNA, 22 nt, Mycobacterium tuberculosis CDC1551
cauggucacuggcugugacuga

SEQ ID NO: 14041 - RNA, 23 nt, Mycobacterium tuberculosis CDC1551
cauguugaccgcgcccaggaugg

SEQ ID NO: 14042 - RNA, 22 nt, Mycobacterium tuberculosis CDC1551
cauuggcaccggaaaucgccgg

SEQ ID NO: 14043 - RNA, 22 nt, Mycobacterium tuberculosis CDC1551
caugacgguacguuugccucgu

SEQ ID NO: 14044 - RNA, 22 nt, Mycobacterium tuberculosis CDC1551
caugagcgccgaacagcgcuga

SEQ ID NO: 14045 - RNA, 22 nt, Mycobacterium tuberculosis CDC1551
ccgcccggggcauggccaagcu

SEQ ID NO: 14046 - RNA, 22 nt, Mycobacterium tuberculosis CDC1551
ccaaugggauguugccgagcau

SEQ ID NO: 14047 - RNA, 22 nt, Mycobacterium tuberculosis CDC1551
ccaugccgaugacgcuguuggc

SEQ ID NO: 14048 - RNA, 22 nt, Mycobacterium tuberculosis CDC1551
ccaugggccggguucuugacca

SEQ ID NO: 14049 - RNA, 22 nt, Mycobacterium tuberculosis CDC1551
augguguacgccgcagcgcggg

SEQ ID NO: 14050 - RNA, 23 nt, Mycobacterium tuberculosis CDC1551
augacgggauucugcuucgcaaa

SEQ ID NO: 14051 - RNA, 22 nt, Mycobacterium tuberculosis CDC1551
aucuggccguccggcgucccga

SEQ ID NO: 14052 - RNA, 22 nt, Mycobacterium tuberculosis CDC1551
aucacgccucucgguggugggg

SEQ ID NO: 14053 - RNA, 22 nt, Mycobacterium tuberculosis CDC1551
aguggucaugaauggcgaaugg

SEQ ID NO: 14054 - RNA, 22 nt, Mycobacterium tuberculosis CDC1551
agagauaucguagugaucgggc

SEQ ID NO: 14055 - RNA, 22 nt, Mycobacterium tuberculosis CDC1551
agcacugcuuucugagcucgag

SEQ ID NO: 14056 - RNA, 22 nt, Mycobacterium tuberculosis CDC1551
agcaagagcagcggccccuggg

SEQ ID NO: 14057 - RNA, 22 nt, Mycobacterium tuberculosis CDC1551
accaauucaccaaggacgaggu

SEQ ID NO: 14058 - RNA, 22 nt, Mycobacterium tuberculosis CDC1551
acugucccgagcgcaccaggaa

SEQ ID NO: 14059 - RNA, 22 nt, Mycobacterium tuberculosis CDC1551
acuggccagcgcgcgccacaug

SEQ ID NO: 14060 - RNA, 22 nt, Mycobacterium tuberculosis CDC1551
acugagcagcggcguuuucagg

SEQ ID NO: 14061 - RNA, 22 nt, Mycobacterium tuberculosis CDC1551
acgagcguaacggcacugcgaa

SEQ ID NO: 14062 - RNA, 22 nt, Mycobacterium tuberculosis CDC1551
acgaggucgcgaugaugacggu

SEQ ID NO: 14063 - RNA, 22 nt, Mycobacterium tuberculosis CDC1551
accucgcugaugauccaugaca

SEQ ID NO: 14064 - RNA, 22 nt, Mycobacterium tuberculosis CDC1551
accucgcugcgggaugggucgc

SEQ ID NO: 14065 - RNA, 22 nt, Mycobacterium tuberculosis CDC1551
accggccuggugcucaauagcc

SEQ ID NO: 14066 - RNA, 22 nt, Mycobacterium tuberculosis CDC1551
agaucucuggugcgcagauccc

SEQ ID NO: 14067 - RNA, 22 nt, Mycobacterium tuberculosis CDC1551
agccagcccgaugcugagcaau

SEQ ID NO: 14068 - RNA, 22 nt, Mycobacterium tuberculosis CDC1551
agccaggccgucgcgaccaugc

SEQ ID NO: 14069 - RNA, 22 nt, Mycobacterium tuberculosis CDC1551
agcuggucgacacuggccgaaa

SEQ ID NO: 14070 - RNA, 22 nt, Mycobacterium tuberculosis CDC1551
agcuguccgacaaaguauccga

SEQ ID NO: 14071 - RNA, 22 nt, Mycobacterium tuberculosis CDC1551
aggaaucaccgugagcagccca

SEQ ID NO: 14072 - RNA, 22 nt, Mycobacterium tuberculosis CDC1551
aggaucacacuggccugcucaa

SEQ ID NO: 14073 - RNA, 22 nt, Mycobacterium tuberculosis CDC1551
agcugggcgccgacgcuuugca

SEQ ID NO: 14074 - RNA, 22 nt, Mycobacterium tuberculosis CDC1551
agcccaccggugcuguaggcga

SEQ ID NO: 14075 - RNA, 22 nt, Mycobacterium tuberculosis CDC1551
aacugcaucgccaccacuuccu

SEQ ID NO: 14076 - RNA, 22 nt, Mycobacterium tuberculosis CDC1551
aaguaguaaugugcgagcugag

SEQ ID NO: 14077 - RNA, 22 nt, Mycobacterium tuberculosis CDC1551
aacacuaugcagcauuugggau

SEQ ID NO: 14078 - RNA, 22 nt, Mycobacterium tuberculosis CDC1551
acagcaugucgucggcagguuc

SEQ ID NO: 14079 - RNA, 22 nt, Mycobacterium tuberculosis CDC1551
accgcgccgccaaugcagcguc

SEQ ID NO: 14080 - RNA, 22 nt, Mycobacterium tuberculosis CDC1551
acccagcaggcugguggugccg

SEQ ID NO: 14081 - RNA, 22 nt, Mycobacterium tuberculosis CDC1551
aacagguggcggccggaccgcu

SEQ ID NO: 14082 - RNA, 22 nt, Mycobacterium tuberculosis CDC1551
ggccaugucgguccuuccagca

SEQ ID NO: 14083 - RNA, 22 nt, Mycobacterium tuberculosis CDC1551
ggcccggcaccggucaucguca

SEQ ID NO: 14084 - RNA, 22 nt, Mycobacterium tuberculosis CDC1551
ggccgcgcucgacuagccgggu

SEQ ID NO: 14085 - RNA, 22 nt, Mycobacterium tuberculosis CDC1551
ggcgagcuugcggugcaguaug

SEQ ID NO: 14086 - RNA, 22 nt, Mycobacterium tuberculosis CDC1551
ggcucaggucgauacccgaggg

SEQ ID NO: 14087 - RNA, 20 nt, Mycobacterium tuberculosis CDC1551
ggcucgagggcuggccggug

SEQ ID NO: 14088 - RNA, 22 nt, Mycobacterium tuberculosis CDC1551
ggcaccaagucaccggcaucca

SEQ ID NO: 14089 - RNA, 22 nt, Mycobacterium tuberculosis CDC1551
ggcagagcgcggccucggcguc

SEQ ID NO: 14090 - RNA, 22 nt, Mycobacterium tuberculosis CDC1551
gcuggcuuucgcgcugggccuu

SEQ ID NO: 14091 - RNA, 22 nt, Mycobacterium tuberculosis CDC1551
gcuggguuaccugguggcggcc

SEQ ID NO: 14092 - RNA, 22 nt, Mycobacterium tuberculosis CDC1551
gcggccaaccggcccgccuacu

SEQ ID NO: 14093 - RNA, 21 nt, Mycobacterium tuberculosis CDC1551
gcgagcucgucauggucuuuc

SEQ ID NO: 14094 - RNA, 22 nt, Mycobacterium tuberculosis CDC1551
gcucgcgcagguccacccgagc

SEQ ID NO: 14095 - RNA, 22 nt, Mycobacterium tuberculosis CDC1551
gccgccaccgcuaccacccgug

SEQ ID NO: 14096 - RNA, 22 nt, Mycobacterium tuberculosis CDC1551
gccguugaucgucucggcuagu

SEQ ID NO: 14097 - RNA, 22 nt, Mycobacterium tuberculosis CDC1551
gccuugucgagaucgucgccgu

SEQ ID NO: 14098 - RNA, 19 nt, Mycobacterium tuberculosis CDC1551
ucauggccgaugcggucgc

SEQ ID NO: 14099 - RNA, 22 nt, Mycobacterium tuberculosis CDC1551
uccugcaggcgaucgcccuggc

SEQ ID NO: 14100 - RNA, 18 nt, Mycobacterium tuberculosis CDC1551
uccugggccauggcccgg

SEQ ID NO: 14101 - RNA, 22 nt, Mycobacterium tuberculosis CDC1551
uccugggcgaccgcgacgaagu

SEQ ID NO: 14102 - RNA, 22 nt, Mycobacterium tuberculosis CDC1551
uccgggccggcuuugccgccgu

SEQ ID NO: 14103 - RNA, 23 nt, Mycobacterium tuberculosis CDC1551
ucgcugucccgaggucacgcuuu

SEQ ID NO: 14104 - RNA, 22 nt, Mycobacterium tuberculosis CDC1551
ucgaggccgggguugcgcugca

SEQ ID NO: 14105 - RNA, 22 nt, Mycobacterium tuberculosis CDC1551
ucggugacggacugcacagcga

SEQ ID NO: 14106 - RNA, 18 nt, Mycobacterium tuberculosis CDC1551
ucaggugaucccgccgac

SEQ ID NO: 14107 - RNA, 22 nt, Mycobacterium tuberculosis CDC1551
ucagcuguguccgcacaaccgg

SEQ ID NO: 14108 - RNA, 22 nt, Mycobacterium tuberculosis CDC1551
ucaccgccgcgguuggugcgca

SEQ ID NO: 14109 - RNA, 22 nt, Mycobacterium tuberculosis CDC1551
ucaccgccacggucaccggacu

SEQ ID NO: 14110 - RNA, 19 nt, Mycobacterium tuberculosis CDC1551
ucaccgccgaugccaccgc

SEQ ID NO: 14111 - RNA, 22 nt, Mycobacterium tuberculosis CDC1551
ucagccgccgggcuugccugcg

SEQ ID NO: 14112 - RNA, 22 nt, Mycobacterium tuberculosis CDC1551
ucagccucaacucggcgugccg

SEQ ID NO: 14113 - RNA, 22 nt, Mycobacterium tuberculosis CDC1551
uaagugaaugccgugccguccg

SEQ ID NO: 14114 - RNA, 22 nt, Mycobacterium tuberculosis CDC1551
uaaccgcuacaaaugaaguugg

SEQ ID NO: 14115 - RNA, 22 nt, Mycobacterium tuberculosis CDC1551
guggcagccagcgccuccggga

SEQ ID NO: 14116 - RNA, 22 nt, Mycobacterium tuberculosis CDC1551
gucgaggugaccagcggugagg

SEQ ID NO: 14117 - RNA, 22 nt, Mycobacterium tuberculosis CDC1551
guuacaggucaccacguagcgg

SEQ ID NO: 14118 - RNA, 19 nt, Mycobacterium tuberculosis CDC1551
guuggcagcggucgcggag

SEQ ID NO: 14119 - RNA, 22 nt, Mycobacterium tuberculosis CDC1551
guggugggaaccgcuccagggc

SEQ ID NO: 14120 - RNA, 22 nt, Mycobacterium tuberculosis CDC1551
gugguggugaguuugagaucgg

SEQ ID NO: 14121 - RNA, 22 nt, Mycobacterium tuberculosis CDC1551
guagugcacaccgacaacagcg

SEQ ID NO: 14122 - RNA, 22 nt, Mycobacterium tuberculosis CDC1551
gggaguacgcgggccaggugcg

SEQ ID NO: 14123 - RNA, 22 nt, Mycobacterium tuberculosis CDC1551
gggcugcccaaucagcgcugcg

SEQ ID NO: 14124 - RNA, 22 nt, Mycobacterium tuberculosis CDC1551
ggcuggcucggcgacuggacua

SEQ ID NO: 14125 - RNA, 22 nt, Mycobacterium tuberculosis CDC1551
ggucagcaugaauaccgggucg

SEQ ID NO: 14126 - RNA, 22 nt, Mycobacterium tuberculosis CDC1551
ggucuccuugccuauccagcug

SEQ ID NO: 14127 - RNA, 22 nt, Mycobacterium tuberculosis CDC1551
cgcucgagauugcagcgggccc

SEQ ID NO: 14128 - RNA, 22 nt, Mycobacterium tuberculosis CDC1551
cgcugggcgaugaagcgcuggg

SEQ ID NO: 14129 - RNA, 22 nt, Mycobacterium tuberculosis CDC1551
cgccugggccagugccgacuuc

SEQ ID NO: 14130 - RNA, 22 nt, Mycobacterium tuberculosis CDC1551
cgcagagcuuuucacgacgcug

SEQ ID NO: 14131 - RNA, 23 nt, Mycobacterium tuberculosis CDC1551
ccuugggcagaugccagcugaag

SEQ ID NO: 14132 - RNA, 22 nt, Mycobacterium tuberculosis CDC1551
caugcaucggaagaaccggcau

SEQ ID NO: 14133 - RNA, 22 nt, Mycobacterium tuberculosis CDC1551
ccagcacucggucgaugaucuu

SEQ ID NO: 14134 - RNA, 22 nt, Mycobacterium tuberculosis CDC1551
ccaccgccacggccagcaccgc

SEQ ID NO: 14135 - RNA, 22 nt, Mycobacterium tuberculosis CDC1551
cagggcgccaagcucaccugau

SEQ ID NO: 14136 - RNA, 22 nt, Mycobacterium tuberculosis CDC1551
caucacaucgaggucaccacgc

SEQ ID NO: 14137 - RNA, 22 nt, Mycobacterium tuberculosis CDC1551
caucuguuggcgcucucggccu

SEQ ID NO: 14138 - RNA, 22 nt, Mycobacterium tuberculosis CDC1551
ccaggcguagaagguucuccgg

SEQ ID NO: 14139 - RNA, 22 nt, Mycobacterium tuberculosis CDC1551
ccaugagggcgauaugcacgau

SEQ ID NO: 14140 - RNA, 22 nt, Mycobacterium tuberculosis CDC1551
cccacugccgccgguuggccac

SEQ ID NO: 14141 - RNA, 22 nt, Mycobacterium tuberculosis CDC1551
cccagcaccgaccagugccggc

SEQ ID NO: 14142 - RNA, 22 nt, Mycobacterium tuberculosis CDC1551
ccagcggguuugucacguagcc

SEQ ID NO: 14143 - RNA, 22 nt, Mycobacterium tuberculosis CDC1551
ccagcucaucgccguagcugag

SEQ ID NO: 14144 - RNA, 22 nt, Mycobacterium tuberculosis CDC1551
gaggccagcucggccagcugga

SEQ ID NO: 14145 - RNA, 22 nt, Mycobacterium tuberculosis CDC1551
gagguuuggcggggcgugaccu

SEQ ID NO: 14146 - RNA, 22 nt, Mycobacterium tuberculosis CDC1551
gaguaccugcaggugccgucgc

SEQ ID NO: 14147 - RNA, 20 nt, Mycobacterium tuberculosis CDC1551
gaugaugaucguguaugcga

SEQ ID NO: 14148 - RNA, 20 nt, Mycobacterium tuberculosis CDC1551
gcaaacucguucuggguuag

SEQ ID NO: 14149 - RNA, 22 nt, Mycobacterium tuberculosis CDC1551
gacuccagccguucacguucga

SEQ ID NO: 14150 - RNA, 22 nt, Mycobacterium tuberculosis CDC1551
gagaacugaccgugguuacgca

SEQ ID NO: 14151 - RNA, 22 nt, Mycobacterium tuberculosis CDC1551
gacgaggucuggggucagcuga

SEQ ID NO: 14152 - RNA, 22 nt, Mycobacterium tuberculosis CDC1551
gccagcagcucggcgauaucgg

SEQ ID NO: 14153 - RNA, 21 nt, Mycobacterium tuberculosis CDC1551
gccagcagcgucuuggcauuc

SEQ ID NO: 14154 - RNA, 22 nt, Mycobacterium tuberculosis CDC1551
gcccgcacguggccgccgguga

SEQ ID NO: 14155 - RNA, 23 nt, Mycobacterium tuberculosis CDC1551
gccagcucggcagcggcggcucc

SEQ ID NO: 14156 - RNA, 19 nt, Mycobacterium tuberculosis CDC1551
gccauagcggagugccggg

SEQ ID NO: 14157 - RNA, 21 nt, Mycobacterium tuberculosis CDC1551
gccauauaccagaucgcuggg

SEQ ID NO: 14158 - RNA, 22 nt, Mycobacterium tuberculosis CDC1551
cugguccagcucguacaccacg

SEQ ID NO: 14159 - RNA, 22 nt, Mycobacterium tuberculosis CDC1551
cugguguuccagcugcuguggu

SEQ ID NO: 14160 - RNA, 22 nt, Mycobacterium tuberculosis CDC1551
cugaauucgucggguaucuggu

SEQ ID NO: 14161 - RNA, 22 nt, Mycobacterium tuberculosis CDC1551
gaccagcucggccuucucgaga

SEQ ID NO: 14162 - RNA, 22 nt, Mycobacterium tuberculosis CDC1551
cggcugcagugcgacgacgaga

SEQ ID NO: 14163 - RNA, 22 nt, Mycobacterium tuberculosis CDC1551
cgggacagcuuggucuuucgcg

SEQ ID NO: 14164 - RNA, 22 nt, Mycobacterium tuberculosis CDC1551
cggucaccaucaccggcaccag

SEQ ID NO: 14165 - RNA, 22 nt, Mycobacterium tuberculosis CDC1551
cgugauccacagccacccggug

SEQ ID NO: 14166 - RNA, 22 nt, Mycobacterium tuberculosis CDC1551
cgguuucucggccgaacuuggc

SEQ ID NO: 14167 - RNA, 22 nt, Mycobacterium tuberculosis CDC1551
cgucccugaggcuacgccccag

SEQ ID NO: 14168 - RNA, 22 nt, Mycobacterium tuberculosis CDC1551
ucucggccgucgcgagcuccuc

SEQ ID NO: 14169 - RNA, 22 nt, Mycobacterium tuberculosis CDC1551
ucggagaccucgccggaccucg

SEQ ID NO: 14170 - RNA, 22 nt, Mycobacterium tuberculosis CDC1551
ucggcucaucgcugcuugcauu

SEQ ID NO: 14171 - RNA, 22 nt, Mycobacterium tuberculosis CDC1551
ucagcgucgaugaccaugucga

SEQ ID NO: 14172 - RNA, 22 nt, Mycobacterium tuberculosis CDC1551
ucgccagcaccaccugguuggg

SEQ ID NO: 14173 - RNA, 22 nt, Mycobacterium tuberculosis CDC1551
ucgaagcccuugauguccuuca

SEQ ID NO: 14174 - RNA, 22 nt, Mycobacterium tuberculosis CDC1551
uagugauucgcaucucugcacc

SEQ ID NO: 14175 - RNA, 22 nt, Mycobacterium tuberculosis CDC1551
uaagugaaagccugacgugguc

SEQ ID NO: 14176 - RNA, 22 nt, Mycobacterium tuberculosis CDC1551
ucccgcagggcacgccuagacg

SEQ ID NO: 14177 - RNA, 22 nt, Mycobacterium tuberculosis CDC1551
ucacugugacgccgggcugggu

SEQ ID NO: 14178 - RNA, 22 nt, Mycobacterium tuberculosis CDC1551
ucaccugcccggcaccuggagc

SEQ ID NO: 14179 - RNA, 22 nt, Mycobacterium tuberculosis CDC1551
uggaaaaacggcggccccgacc

SEQ ID NO: 14180 - RNA, 22 nt, Mycobacterium tuberculosis CDC1551
uggcugcggccgaucaccgaug

SEQ ID NO: 14181 - RNA, 22 nt, Mycobacterium tuberculosis CDC1551
uggcugcggugccacgaacgau

SEQ ID NO: 14182 - RNA, 22 nt, Mycobacterium tuberculosis CDC1551
uggcgagcagacgcaaaagccc

SEQ ID NO: 14183 - RNA, 17 nt, Mycobacterium tuberculosis CDC1551
uggcguggcugcaugag

SEQ ID NO: 14184 - RNA, 22 nt, Mycobacterium tuberculosis CDC1551
ugggcggucaucgcgccgaucg

SEQ ID NO: 14185 - RNA, 22 nt, Mycobacterium tuberculosis CDC1551
ugggcagcggucaaggggccca

SEQ ID NO: 14186 - RNA, 22 nt, Mycobacterium tuberculosis CDC1551
uggucggcggucauacccgcgg

SEQ ID NO: 14187 - RNA, 23 nt, Mycobacterium tuberculosis CDC1551
ugguggacgcagagucaacggau

SEQ ID NO: 14188 - RNA, 22 nt, Mycobacterium tuberculosis CDC1551
ugguggcuagcaaggucuuccc

SEQ ID NO: 14189 - RNA, 22 nt, Mycobacterium tuberculosis CDC1551
ugacauauaucaaagagauguu

SEQ ID NO: 14190 - RNA, 22 nt, Mycobacterium tuberculosis CDC1551
ucuuucccuccagaucggugcg

SEQ ID NO: 14191 - RNA, 22 nt, Mycobacterium tuberculosis CDC1551
ugcgcgccuugauccggcuguc

SEQ ID NO: 14192 - RNA, 22 nt, Mycobacterium tuberculosis CDC1551
ugcuccacugcugccaagucgg

SEQ ID NO: 14193 - RNA, 22 nt, Mycobacterium tuberculosis CDC1551
ugcccggcaugggcagccugcu

SEQ ID NO: 14194 - RNA, 22 nt, Mycobacterium tuberculosis CDC1551
ugcccggcgaacaggaauugcu

SEQ ID NO: 14195 - RNA, 22 nt, Mycobacterium tuberculosis CDC1551
caggaugacgccgcagcgcucg

SEQ ID NO: 14196 - RNA, 22 nt, Mycobacterium tuberculosis CDC1551
auuggcuguggugaagagcaau

SEQ ID NO: 14197 - RNA, 22 nt, Mycobacterium tuberculosis CDC1551
caagaccagguacguggaccau

SEQ ID NO: 14198 - RNA, 22 nt, Mycobacterium tuberculosis CDC1551
cacgccugcgcgacauggacgc

SEQ ID NO: 14199 - RNA, 20 nt, Mycobacterium tuberculosis CDC1551
cacugacuagugaagaaccu

SEQ ID NO: 14200 - RNA, 22 nt, Mycobacterium tuberculosis CDC1551
augcaguuggcggucgacugcg

SEQ ID NO: 14201 - RNA, 22 nt, Mycobacterium tuberculosis CDC1551
augguuuuggccagcuuugucg

SEQ ID NO: 14202 - RNA, 19 nt, Mycobacterium tuberculosis CDC1551
augguggccgggaucgugc

SEQ ID NO: 14203 - RNA, 22 nt, Mycobacterium tuberculosis CDC1551
augguggccacggcgugggcgu

SEQ ID NO: 14204 - RNA, 22 nt, Mycobacterium tuberculosis CDC1551
aucgcuugccgaugccgucggu

SEQ ID NO: 14205 - RNA, 22 nt, Mycobacterium tuberculosis CDC1551
uugggccaccaguccugguuuc

SEQ ID NO: 14206 - RNA, 22 nt, Mycobacterium tuberculosis CDC1551
aguuucucagcgagcaggugcu

SEQ ID NO: 14207 - RNA, 22 nt, Mycobacterium tuberculosis CDC1551
auccaugagcagcucgccgccg

SEQ ID NO: 14208 - RNA, 22 nt, Mycobacterium tuberculosis CDC1551
aucauucuggggaugaacgguc

SEQ ID NO: 14209 - RNA, 22 nt, Mycobacterium tuberculosis CDC1551
aucaggcugcgcacccgcucgg

SEQ ID NO: 14210 - RNA, 22 nt, Mycobacterium tuberculosis CDC1551
aucaucaggcgcgacauaucga

SEQ ID NO: 14211 - RNA, 22 nt, Mycobacterium tuberculosis CDC1551
ugguuaggcgggacggggagug

SEQ ID NO: 14212 - RNA, 22 nt, Mycobacterium tuberculosis CDC1551
ugguggcuguuguugcgccggc

SEQ ID NO: 14213 - RNA, 22 nt, Mycobacterium tuberculosis CDC1551
ugguuucccgugaggugaucgc

SEQ ID NO: 14214 - RNA, 23 nt, Mycobacterium tuberculosis CDC1551
ugguggucgacaugucggccagc

SEQ ID NO: 14215 - RNA, 22 nt, Mycobacterium tuberculosis CDC1551
ugugguuucccuacccgggcag

SEQ ID NO: 14216 - RNA, 22 nt, Mycobacterium tuberculosis CDC1551
uugaccuugcgcccggccagca

SEQ ID NO: 14217 - RNA, 22 nt, Mycobacterium tuberculosis CDC1551
uugacgucagcgccgcccgguc

SEQ ID NO: 14218 - RNA, 22 nt, Mycobacterium tuberculosis CDC1551
uuucauucagacgagaggcgug

SEQ ID NO: 14219 - RNA, 22 nt, Mycobacterium tuberculosis CDC1551
uugccauucaccguuggugacc

SEQ ID NO: 14220 - RNA, 22 nt, Mycobacterium tuberculosis CDC1551
uuggccgcugcgacaagccggc

SEQ ID NO: 14221 - RNA, 22 nt, Mycobacterium tuberculosis CDC1551
uugcgcagcgaucgcaugacug

SEQ ID NO: 14222 - RNA, 22 nt, Mycobacterium tuberculosis CDC1551
uuggcagcgugaaguguucggg

SEQ ID NO: 14223 - RNA, 22 nt, Mycobacterium tuberculosis CDC1551
uugguguccgccgacgccaagu

SEQ ID NO: 14224 - RNA, 22 nt, Mycobacterium tuberculosis CDC1551
uugucaccgcuuccauggcguu

SEQ ID NO: 14225 - RNA, 22 nt, Mycobacterium tuberculosis CDC1551
gcgauagcuuaucgaggauuuc

SEQ ID NO: 14226 - RNA, 22 nt, Mycobacterium tuberculosis CDC1551
ggaaagugacggucugaugcga

SEQ ID NO: 14227 - RNA, 22 nt, Mycobacterium tuberculosis CDC1551
ggagcuccuucaucuccgcugc

SEQ ID NO: 14228 - RNA, 22 nt, Mycobacterium tuberculosis CDC1551
ggccaaggugcgucgcgccccg

SEQ ID NO: 14229 - RNA, 22 nt, Mycobacterium tuberculosis CDC1551
ggccagggccgacggcacaucc

SEQ ID NO: 14230 - RNA, 22 nt, Mycobacterium tuberculosis CDC1551
ggcucacgauguagucgauccg

SEQ ID NO: 14231 - RNA, 22 nt, Mycobacterium tuberculosis CDC1551
ggcugcgcaccugcgccgacga

SEQ ID NO: 14232 - RNA, 22 nt, Mycobacterium tuberculosis CDC1551
ggccgaaacaccgcgcgaaggg

SEQ ID NO: 14233 - RNA, 22 nt, Mycobacterium tuberculosis CDC1551
ggccgggucucgcuuggcggcg

SEQ ID NO: 14234 - RNA, 22 nt, Mycobacterium tuberculosis CDC1551
ggcguggccguuucaccgcguu

SEQ ID NO: 14235 - RNA, 21 nt, Mycobacterium tuberculosis CDC1551
gggcugguuccaacgacagug

SEQ ID NO: 14236 - RNA, 22 nt, Mycobacterium tuberculosis CDC1551
ggggagacgauugccgccccgc

SEQ ID NO: 14237 - RNA, 22 nt, Mycobacterium tuberculosis CDC1551
gggcucaggauguggcugcgau

SEQ ID NO: 14238 - RNA, 22 nt, Mycobacterium tuberculosis CDC1551
ggucagcacgcaugugcggugg

SEQ ID NO: 14239 - RNA, 22 nt, Mycobacterium tuberculosis CDC1551
ggguaucaggcagccggcgcug

SEQ ID NO: 14240 - RNA, 22 nt, Mycobacterium tuberculosis CDC1551
gggugguggucgccaacgccga

SEQ ID NO: 14241 - RNA, 22 nt, Mycobacterium tuberculosis CDC1551
gggugguguugauugcggcggu

SEQ ID NO: 14242 - RNA, 22 nt, Mycobacterium tuberculosis CDC1551
gguggugccgguacgccaaugc

SEQ ID NO: 14243 - RNA, 22 nt, Mycobacterium tuberculosis CDC1551
ggugguggccaccgcagugggu

SEQ ID NO: 14244 - RNA, 22 nt, Mycobacterium tuberculosis CDC1551
ggugcuuuugcgucugcucggc

SEQ ID NO: 14245 - RNA, 22 nt, Mycobacterium tuberculosis CDC1551
gguugcgcuuggugaacucguc

SEQ ID NO: 14246 - RNA, 22 nt, Mycobacterium tuberculosis CDC1551
ggugguggugccgucgucgcgc

SEQ ID NO: 14247 - RNA, 22 nt, Mycobacterium tuberculosis CDC1551
ggugcugcacgccuucgccagc

SEQ ID NO: 14248 - RNA, 22 nt, Mycobacterium tuberculosis CDC1551
gugaagcccgguggguguggcc

SEQ ID NO: 14249 - RNA, 22 nt, Mycobacterium tuberculosis CDC1551
gugaccugcgcggcagggucau

SEQ ID NO: 14250 - RNA, 22 nt, Mycobacterium tuberculosis CDC1551
gucuggccgacgccaucagcga

SEQ ID NO: 14251 - RNA, 22 nt, Mycobacterium tuberculosis CDC1551
guccaggccgucgaacugcagg

SEQ ID NO: 14252 - RNA, 22 nt, Mycobacterium tuberculosis CDC1551
guuuggcgcgcccacagcccgg

SEQ ID NO: 14253 - RNA, 22 nt, Mycobacterium tuberculosis CDC1551
guuugguugccuaccgcguggg

SEQ ID NO: 14254 - RNA, 22 nt, Mycobacterium tuberculosis CDC1551
gugguggugagcaccaacggug

SEQ ID NO: 14255 - RNA, 22 nt, Mycobacterium tuberculosis CDC1551
guuucgggcgauuuugcgucug

SEQ ID NO: 14256 - RNA, 22 nt, Mycobacterium tuberculosis CDC1551
gccguugaggcggcuggcuggu

SEQ ID NO: 14257 - RNA, 22 nt, Mycobacterium tuberculosis CDC1551
gccgaagccgaccggcccagcg

SEQ ID NO: 14258 - RNA, 22 nt, Mycobacterium tuberculosis CDC1551
gccgcaccgacuaccaccgacu

SEQ ID NO: 14259 - RNA, 22 nt, Mycobacterium tuberculosis CDC1551
gccuugaccgccuugauggcgg

SEQ ID NO: 14260 - RNA, 22 nt, Mycobacterium tuberculosis CDC1551
gccuugccauaugcggccgacg

SEQ ID NO: 14261 - RNA, 22 nt, Mycobacterium tuberculosis CDC1551
gcgcuuuucguguucgucugcu

SEQ ID NO: 14262 - RNA, 22 nt, Mycobacterium tuberculosis CDC1551
gcggccaacgaggcagcggcgg

SEQ ID NO: 14263 - RNA, 22 nt, Mycobacterium tuberculosis CDC1551
gcguggucggaugcaggccagc

SEQ ID NO: 14264 - RNA, 22 nt, Mycobacterium tuberculosis CDC1551
gcugagacaugacgugccucac

SEQ ID NO: 14265 - RNA, 22 nt, Mycobacterium tuberculosis CDC1551
gcugcaaacccuagaguacuua

SEQ ID NO: 14266 - RNA, 22 nt, Mycobacterium tuberculosis CDC1551
gccacgccucgacgcacggccu

SEQ ID NO: 14267 - RNA, 22 nt, Mycobacterium tuberculosis CDC1551
gcaccgccggccugucccacga

SEQ ID NO: 14268 - RNA, 22 nt, Mycobacterium tuberculosis CDC1551
gcagcagguucaccacguaugc

SEQ ID NO: 14269 - RNA, 22 nt, Mycobacterium tuberculosis CDC1551
gccagcacaggcgcgauugcgu

SEQ ID NO: 14270 - RNA, 22 nt, Mycobacterium tuberculosis CDC1551
gccaggcuggugucggcggugg

SEQ ID NO: 14271 - RNA, 22 nt, Mycobacterium tuberculosis CDC1551
gaguagccggaguggcccuugc

SEQ ID NO: 14272 - RNA, 21 nt, Mycobacterium tuberculosis CDC1551
gcacacuggaagccagcacgc

SEQ ID NO: 14273 - RNA, 22 nt, Mycobacterium tuberculosis CDC1551
gcaccccagagcacugauacgc

SEQ ID NO: 14274 - RNA, 22 nt, Mycobacterium tuberculosis CDC1551
gaugagcgagcgacagcgugcg

SEQ ID NO: 14275 - RNA, 22 nt, Mycobacterium tuberculosis CDC1551
gagguguccgacgaaccugguu

SEQ ID NO: 14276 - RNA, 20 nt, Homo sapiens
uggcucuuugcugcuaaagu

SEQ ID NO: 14277 - RNA, 22 nt, Homo sapiens
aaaugcacaaagauuuugcacu

SEQ ID NO: 14278 - RNA, 23 nt, Homo sapiens
uccccgggagcaccagcuuguug

SEQ ID NO: 14279 - RNA, 22 nt, Homo sapiens
gugcacaacaugcaguuuuguu

SEQ ID NO: 14280 - RNA, 22 nt, Homo sapiens
auaagugagugauucaguguua

SEQ ID NO: 14281 - RNA, 22 nt, Homo sapiens
gugcacaaaucuuaaauguaca

SEQ ID NO: 14282 - RNA, 23 nt, Homo sapiens
uggaaguauggaggaggcagaau

SEQ ID NO: 14283 - RNA, 22 nt, Homo sapiens
uggcagcugcuucaugggaugc

SEQ ID NO: 14284 - RNA, 22 nt, Homo sapiens
ugugguuuuaguaaaacuaugu

SEQ ID NO: 14285 - RNA, 22 nt, Homo sapiens
ugaggauaguguugaaggcagg

SEQ ID NO: 14286 - RNA, 20 nt, Homo sapiens
uauucacucuccagucuugc

SEQ ID NO: 14287 - RNA, 22 nt, Homo sapiens
uugauagacacauauccaugug

SEQ ID NO: 14288 - RNA, 22 nt, Homo sapiens
gagcuggacuucuuaccuuuuc

SEQ ID NO: 14289 - RNA, 22 nt, Homo sapiens
guuaagaaguguaacuuaaguu

SEQ ID NO: 14290 - RNA, 22 nt, Homo sapiens
aggaaguaauaaguuugguucu

SEQ ID NO: 14291 - RNA, 22 nt, Homo sapiens
ggacuagggacauggggagcug

SEQ ID NO: 14292 - RNA, 22 nt, Homo sapiens
ggcagcucaggccccgcgcuga

SEQ ID NO: 14293 - RNA, 22 nt, Homo sapiens
uucagggacuuuagacaagaga

SEQ ID NO: 14294 - RNA, 22 nt, Homo sapiens
uggaagugaacaaccaaggcag

SEQ ID NO: 14295 - RNA, 22 nt, Homo sapiens
uguaaugaucaaaucagaguaa

SEQ ID NO: 14296 - RNA, 22 nt, Homo sapiens
gacuagaaauuauuuagugagc

SEQ ID NO: 14297 - RNA, 22 nt, Homo sapiens
gcuaggagaucugcugcucucu

SEQ ID NO: 14298 - RNA, 22 nt, Homo sapiens
augacuagaggagggauggcca

SEQ ID NO: 14299 - RNA, 20 nt, Homo sapiens
agacuagggagcagaaagcc

SEQ ID NO: 14300 - RNA, 22 nt, Homo sapiens
uacuagaaccuuauucagagug

SEQ ID NO: 14301 - RNA, 22 nt, Homo sapiens
ugacuagggcucuaaacagcuc

SEQ ID NO: 14302 - RNA, 23 nt, Homo sapiens
ggauggaaaguuuugagggccac

SEQ ID NO: 14303 - RNA, 22 nt, Homo sapiens
gagguauagaacaccuuucaag

SEQ ID NO: 14304 - RNA, 22 nt, Homo sapiens
augugcacaugcuuacauguga

SEQ ID NO: 14305 - RNA, 22 nt, Homo sapiens
ugacuagggacauucuuccacg

SEQ ID NO: 14306 - RNA, 22 nt, Homo sapiens
agcgccacugcacuccagccug

SEQ ID NO: 14307 - RNA, 22 nt, Homo sapiens
cuuuggcauuagccuguauaga

SEQ ID NO: 14308 - RNA, 22 nt, Homo sapiens
gcgguagcauagacugcaggac

SEQ ID NO: 14309 - RNA, 18 nt, Homo sapiens
ucacuagacacugaaucu

SEQ ID NO: 14310 - RNA, 22 nt, Homo sapiens
guccuggagaagcguggaccgg

SEQ ID NO: 14311 - RNA, 22 nt, Homo sapiens
uagccucacaaagugcuuaaga

SEQ ID NO: 14312 - RNA, 22 nt, Homo sapiens
ugggcggagacgugcagccgcc

SEQ ID NO: 14313 - RNA, 22 nt, Homo sapiens
aaauugcacaaguggugauuug

SEQ ID NO: 14314 - RNA, 22 nt, Homo sapiens
uaugcacacacguguuuaugug

SEQ ID NO: 14315 - RNA, 22 nt, Homo sapiens
cuuuaugagguuggauggaucu

SEQ ID NO: 14316 - RNA, 22 nt, Homo sapiens
ugaauagacacuaaagacugua

SEQ ID NO: 14317 - RNA, 22 nt, Homo sapiens
uuuaaugcgucucugaguuuug

SEQ ID NO: 14318 - RNA, 22 nt, Homo sapiens
augaggcaggaaaggcguaucu

SEQ ID NO: 14319 - RNA, 22 nt, Homo sapiens
ugacuaggaggcuggaggauga

SEQ ID NO: 14320 - RNA, 22 nt, Homo sapiens
gaacuguuucuggugaaagagu

SEQ ID NO: 14321 - RNA, 23 nt, Homo sapiens
aggaaguaacuaucuuuucuguc

SEQ ID NO: 14322 - RNA, 22 nt, Homo sapiens
aucagaaucucuagaggacugu

SEQ ID NO: 14323 - RNA, 22 nt, Homo sapiens
aagcuggagugcaguggugcga

SEQ ID NO: 14324 - RNA, 22 nt, Homo sapiens
augcacuuggcaggaugauucc

SEQ ID NO: 14325 - RNA, 22 nt, Homo sapiens
ucgcugcgaccuccaccucccg

SEQ ID NO: 14326 - RNA, 22 nt, Homo sapiens
augacuauugcacuuuccuggu

SEQ ID NO: 14327 - RNA, 22 nt, Homo sapiens
augcacauggcuaacuuuuuuc

SEQ ID NO: 14328 - RNA, 22 nt, Homo sapiens
ugacuaggggcccuggcuucuu

SEQ ID NO: 14329 - RNA, 22 nt, Homo sapiens
aauacugaaaguauuuucaaau

SEQ ID NO: 14330 - RNA, 22 nt, Homo sapiens
acuauacuguaacuguauucag

SEQ ID NO: 14331 - RNA, 21 nt, Homo sapiens
ugacuagggauaugugccacu

SEQ ID NO: 14332 - RNA, 22 nt, Homo sapiens
ccuucuuuuguaaggcugaaua

SEQ ID NO: 14333 - RNA, 22 nt, Homo sapiens
uuuccagguggccaacauuuua

SEQ ID NO: 14334 - RNA, 22 nt, Homo sapiens
augcagaucacauuuuucuguc

SEQ ID NO: 14335 - RNA, 22 nt, Homo sapiens
gaagcauugauccacaggcgug

SEQ ID NO: 14336 - RNA, 22 nt, Homo sapiens
cuuuggccauagcuaaaugauu

SEQ ID NO: 14337 - RNA, 22 nt, Homo sapiens
auaugcauacauguaugcagga

SEQ ID NO: 14338 - RNA, 19 nt, Homo sapiens
uuucaauguaaggauggag

SEQ ID NO: 14339 - RNA, 22 nt, Homo sapiens
aauacugagaugugagguacua

SEQ ID NO: 14340 - RNA, 22 nt, Homo sapiens
uggagacugaucccucuuuccu

SEQ ID NO: 14341 - RNA, 22 nt, Homo sapiens
auaugcacuauacacacguaua

SEQ ID NO: 14342 - RNA, 22 nt, Homo sapiens
ugagguuauuuguucaagaagu

SEQ ID NO: 14343 - RNA, 22 nt, Homo sapiens
aucagaaucucuagugggacca

SEQ ID NO: 14344 - RNA, 22 nt, Homo sapiens
aagcuggauuuaguguggagca

SEQ ID NO: 14345 - RNA, 22 nt, Homo sapiens
cuagaacuagaacugcuggggu

SEQ ID NO: 14346 - RNA, 19 nt, Homo sapiens
ugcauugucugggaaaugg

SEQ ID NO: 14347 - RNA, 22 nt, Homo sapiens
gacuaggagagcagcugcccau

SEQ ID NO: 14348 - RNA, 22 nt, Homo sapiens
guggaagugucuggggccaggg

SEQ ID NO: 14349 - RNA, 22 nt, Homo sapiens
uagcuggaauuacuugcaccug

SEQ ID NO: 14350 - RNA, 22 nt, Homo sapiens
ugacuauaggauaacaugcauu

SEQ ID NO: 14351 - RNA, 22 nt, Homo sapiens
uuggucucaucaagagcagcuu

SEQ ID NO: 14352 - RNA, 22 nt, Homo sapiens
accucagcccggggaaguugag

SEQ ID NO: 14353 - RNA, 22 nt, Homo sapiens
acccuggauucguggccuugaa

SEQ ID NO: 14354 - RNA, 22 nt, Homo sapiens
uggaaguagauagauuguguca

SEQ ID NO: 14355 - RNA, 22 nt, Homo sapiens
aaacugaucugaaggccaggcu

SEQ ID NO: 14356 - RNA, 22 nt, Homo sapiens
aucauacuguuuugauuacugu

SEQ ID NO: 14357 - RNA, 22 nt, Homo sapiens
gcgugguguuagaaugagaagu

SEQ ID NO: 14358 - RNA, 22 nt, Homo sapiens
cuguaauguaaugagacuacau

SEQ ID NO: 14359 - RNA, 22 nt, Homo sapiens
aagcuggauuucgcauccuguu

SEQ ID NO: 14360 - RNA, 19 nt, Homo sapiens
ggcaauacuuucuuguugg

SEQ ID NO: 14361 - RNA, 22 nt, Homo sapiens
uuccacaaugguugaacuagcu

SEQ ID NO: 14362 - RNA, 21 nt, Homo sapiens
augugcacuaugucauuuaau

SEQ ID NO: 14363 - RNA, 22 nt, Homo sapiens
uggaaguaaccaugaauggaau

SEQ ID NO: 14364 - RNA, 22 nt, Homo sapiens
cacuuugguucaccugaguuuc

SEQ ID NO: 14365 - RNA, 17 nt, Homo sapiens
ugauaagugugagguga

SEQ ID NO: 14366 - RNA, 22 nt, Homo sapiens
uacauacuucacagacuuuaaa

SEQ ID NO: 14367 - RNA, 22 nt, Homo sapiens
aucugcacaucuguguuuuugu

SEQ ID NO: 14368 - RNA, 19 nt, Homo sapiens
acagcugguuuugguuucu

SEQ ID NO: 14369 - RNA, 22 nt, Homo sapiens
guggcgagaucauagcucauug

SEQ ID NO: 14370 - RNA, 22 nt, Homo sapiens
uucacacugggccuacucugug

SEQ ID NO: 14371 - RNA, 18 nt, Homo sapiens
ucccucagaauuauagaa

SEQ ID NO: 14372 - RNA, 22 nt, Homo sapiens
aaugcacauauauuuccuuauu

SEQ ID NO: 14373 - RNA, 22 nt, Homo sapiens
uauggauuuuuuugacaagagc

SEQ ID NO: 14374 - RNA, 20 nt, Homo sapiens
aucagagacuaggauugcca

SEQ ID NO: 14375 - RNA, 17 nt, Homo sapiens
guuuggguacuggguaa

SEQ ID NO: 14376 - RNA, 22 nt, Homo sapiens
uuuggcuuuuguaauaacugcc

SEQ ID NO: 14377 - RNA, 22 nt, Homo sapiens
auugcacaucugcacuacagcc

SEQ ID NO: 14378 - RNA, 22 nt, Homo sapiens
gaaugauacuguuaacgaaaga

SEQ ID NO: 14379 - RNA, 22 nt, Homo sapiens
agagaacugauuggaugugggc

SEQ ID NO: 14380 - RNA, 22 nt, Homo sapiens
uuccacaaugguugaacuaguu

SEQ ID NO: 14381 - RNA, 22 nt, Homo sapiens
agugacaugggaucaaaucuga

SEQ ID NO: 14382 - RNA, 22 nt, Homo sapiens
auugauaguuuaauaggaauug

SEQ ID NO: 14383 - RNA, 22 nt, Homo sapiens
gaggaguagggcacaaagccuu

SEQ ID NO: 14384 - RNA, 22 nt, Homo sapiens
gugcacaaucgugcauuccuug

SEQ ID NO: 14385 - RNA, 22 nt, Homo sapiens
uggaaguaaucaugagguagca

SEQ ID NO: 14386 - RNA, 22 nt, Homo sapiens
uuaauguaucuaucacaucaca

SEQ ID NO: 14387 - RNA, 22 nt, Homo sapiens
ucacucagaccuggugauaugc

SEQ ID NO: 14388 - RNA, 22 nt, Homo sapiens
uaugcacaugcaugcuugaaua

SEQ ID NO: 14389 - RNA, 22 nt, Homo sapiens
gugauagaucugggauucagaa

SEQ ID NO: 14390 - RNA, 22 nt, Homo sapiens
ucacugaggucugagcuuuaug

SEQ ID NO: 14391 - RNA, 22 nt, Homo sapiens
acacuuucuggagcugcacaua

SEQ ID NO: 14392 - RNA, 22 nt, Homo sapiens
gacuaggagauauguuuucuuc

SEQ ID NO: 14393 - RNA, 20 nt, Homo sapiens
uggaacuuaauugauggaca

SEQ ID NO: 14394 - RNA, 22 nt, Homo sapiens
aucacuagaucauagguaaaca

SEQ ID NO: 14395 - RNA, 22 nt, Homo sapiens
uugguccucccaugcucaagag

SEQ ID NO: 14396 - RNA, 22 nt, Homo sapiens
uggaagugucugugcccagcuc

SEQ ID NO: 14397 - RNA, 22 nt, Homo sapiens
gagcuagguuuugaauccagac

SEQ ID NO: 14398 - RNA, 22 nt, Homo sapiens
auaaagccaugagcuugagaug

SEQ ID NO: 14399 - RNA, 22 nt, Homo sapiens
uagcuggaguuuuuguuauagg

SEQ ID NO: 14400 - RNA, 23 nt, Homo sapiens
ucacuagaguccuggaguuugag

SEQ ID NO: 14401 - RNA, 22 nt, Homo sapiens
auacaguugccauuucuugugc

SEQ ID NO: 14402 - RNA, 22 nt, Homo sapiens
uuagaacuagaggaguuugagu

SEQ ID NO: 14403 - RNA, 22 nt, Homo sapiens
gugaacagaaccugggaucgaa

SEQ ID NO: 14404 - RNA, 22 nt, Homo sapiens
aagcuggagugcaguggugcaa

SEQ ID NO: 14405 - RNA, 22 nt, Homo sapiens
uaaguauuaugugcugcauuuu

SEQ ID NO: 14406 - RNA, 22 nt, Homo sapiens
ucacuagaucaagggagagaaa

SEQ ID NO: 14407 - RNA, 22 nt, Homo sapiens
uccccgagcccaggcugugacu

SEQ ID NO: 14408 - RNA, 22 nt, Homo sapiens
cugggaugugacuguugccccc

SEQ ID NO: 14409 - RNA, 22 nt, Homo sapiens
auggaggccuacagaauuuugg

SEQ ID NO: 14410 - RNA, 22 nt, Homo sapiens
ucacacgugaacucaucacaga

SEQ ID NO: 14411 - RNA, 22 nt, Homo sapiens
cucacuaguaaggcuguuuagu

SEQ ID NO: 14412 - RNA, 22 nt, Homo sapiens
ucacaggguguuauuagaauua

SEQ ID NO: 14413 - RNA, 22 nt, Homo sapiens
uugugguuuuuaaaacuaggug

SEQ ID NO: 14414 - RNA, 22 nt, Homo sapiens
ugugguuuuuuucuccaauagg

SEQ ID NO: 14415 - RNA, 22 nt, Homo sapiens
gcuaggagauccacugcucucu

SEQ ID NO: 14416 - RNA, 22 nt, Homo sapiens
cauggcccugggcugggcgaac

SEQ ID NO: 14417 - RNA, 22 nt, Homo sapiens
acuagguaguaaucugcagaga

SEQ ID NO: 14418 - RNA, 22 nt, Homo sapiens
ggccggguggccauggcugccc

SEQ ID NO: 14419 - RNA, 23 nt, Homo sapiens
ucgguccccuuggcugcccucgg

SEQ ID NO: 14420 - RNA, 22 nt, Homo sapiens
uugauagaucagggauuugauu

SEQ ID NO: 14421 - RNA, 22 nt, Homo sapiens
uugauagacaucugaguuguug

SEQ ID NO: 14422 - RNA, 22 nt, Homo sapiens
acugaucaauguuaaggcuuau

SEQ ID NO: 14423 - RNA, 22 nt, Homo sapiens
aggcagcuguuauauacugagu

SEQ ID NO: 14424 - RNA, 22 nt, Homo sapiens
uuggauuuuaacaaacuaggug

SEQ ID NO: 14425 - RNA, 23 nt, Homo sapiens
ugugcacauuuacauauauacac

SEQ ID NO: 14426 - RNA, 19 nt, Homo sapiens
uccccgggucuagugcagc

SEQ ID NO: 14427 - RNA, 21 nt, Homo sapiens
ugcagccauucagcccuaugc

SEQ ID NO: 14428 - RNA, 22 nt, Homo sapiens
uugacaaggagccauugcaucu

SEQ ID NO: 14429 - RNA, 22 nt, Homo sapiens
cagccgggugagguggcuuguu

SEQ ID NO: 14430 - RNA, 17 nt, Homo sapiens
ucuaauaauaugcauuu

SEQ ID NO: 14431 - RNA, 20 nt, Homo sapiens
uggaaguaagaauauaggug

SEQ ID NO: 14432 - RNA, 22 nt, Homo sapiens
ucagaacugauacuagaacuuu

SEQ ID NO: 14433 - RNA, 22 nt, Homo sapiens
caaugcauuauucucccacuuc

SEQ ID NO: 14434 - RNA, 20 nt, Homo sapiens
cugcacauccacucuacuuc

SEQ ID NO: 14435 - RNA, 22 nt, Homo sapiens
ggacuaggagcuaggaagaucu

SEQ ID NO: 14436 - RNA, 17 nt, Homo sapiens
uuuaaugcuaggacucu

SEQ ID NO: 14437 - RNA, 22 nt, Homo sapiens
ugauauauugaaugaugaaaca

SEQ ID NO: 14438 - RNA, 22 nt, Homo sapiens
ggcagcuguguccuucguaagg

SEQ ID NO: 14439 - RNA, 22 nt, Homo sapiens
uugggacuggaaggaguaaggg

SEQ ID NO: 14440 - RNA, 22 nt, Homo sapiens
uggcucuuucuagacuuaauua

SEQ ID NO: 14441 - RNA, 22 nt, Homo sapiens
cacugcaguaaauugcgucggu

SEQ ID NO: 14442 - RNA, 22 nt, Homo sapiens
cuggaggccugaacauaaaugg

SEQ ID NO: 14443 - RNA, 22 nt, Homo sapiens
auacuguuuuacaucauugccu

SEQ ID NO: 14444 - RNA, 22 nt, Homo sapiens
uggaaguauagauaauugaaag

SEQ ID NO: 14445 - RNA, 22 nt, Homo sapiens
gaagcgaggugauuagcagaca

SEQ ID NO: 14446 - RNA, 22 nt, Homo sapiens
uggcuccguuguacaggcugga

SEQ ID NO: 14447 - RNA, 22 nt, Homo sapiens
gggaagugugcagaguucucuu

SEQ ID NO: 14448 - RNA, 22 nt, Homo sapiens
augagucacuuauuauuggggu

SEQ ID NO: 14449 - RNA, 22 nt, Homo sapiens
augacauugaaaagcaagugga

SEQ ID NO: 14450 - RNA, 22 nt, Homo sapiens
cucacuaggaaguaaaguuugu

SEQ ID NO: 14451 - RNA, 22 nt, Homo sapiens
uuccacaauggcugaacuaguu

SEQ ID NO: 14452 - RNA, 22 nt, Homo sapiens
ugacuaggaaauuagaacuuuu

SEQ ID NO: 14453 - RNA, 23 nt, Homo sapiens
ucaugaggccauucaaauccauu

SEQ ID NO: 14454 - RNA, 22 nt, Homo sapiens
gccccgggugaugcagccguca

SEQ ID NO: 14455 - RNA, 22 nt, Homo sapiens
uuaaaugcuagaauuuucuuug

SEQ ID NO: 14456 - RNA, 22 nt, Homo sapiens
uuccacaaugguugaacuaauu

SEQ ID NO: 14457 - RNA, 22 nt, Homo sapiens
uggagugauaugguuauauggg

SEQ ID NO: 14458 - RNA, 22 nt, Homo sapiens
uuugguguauaaaaaugcuagu

SEQ ID NO: 14459 - RNA, 22 nt, Pseudomonas aeruginosa PA01
ugaagauggccgagccggcgac

SEQ ID NO: 14460 - RNA, 22 nt, Pseudomonas aeruginosa PA01
ucggucucgaccagcaacuggc

SEQ ID NO: 14461 - RNA, 22 nt, Pseudomonas aeruginosa PA01
ucuccggcggccagcgccagcg

SEQ ID NO: 14462 - RNA, 22 nt, Pseudomonas aeruginosa PA01
ucucgucguccaugcucgcgcc

SEQ ID NO: 14463 - RNA, 22 nt, Pseudomonas aeruginosa PA01
ugaggaagcgcacgcaggcguc

SEQ ID NO: 14464 - RNA, 19 nt, Pseudomonas aeruginosa PA01
ugauauaggcgguacgggc

SEQ ID NO: 14465 - RNA, 19 nt, Pseudomonas aeruginosa PA01
ugagcagccccaggacgau

SEQ ID NO: 14466 - RNA, 22 nt, Pseudomonas aeruginosa PA01
ugagcgccaggaccugcuccgg

SEQ ID NO: 14467 - RNA, 22 nt, Pseudomonas aeruginosa PA01
ugagcguggccagccgcgccuc

SEQ ID NO: 14468 - RNA, 22 nt, Pseudomonas aeruginosa PA01
ugagcugcggacgcucgaagac

SEQ ID NO: 14469 - RNA, 22 nt, Pseudomonas aeruginosa PA01
ugcccggcgaccucgcggcugc

SEQ ID NO: 14470 - RNA, 22 nt, Pseudomonas aeruginosa PA01
ugccgaggaacagccaggcgug

SEQ ID NO: 14471 - RNA, 19 nt, Pseudomonas aeruginosa PA01
ugccggccgagcuguucga

SEQ ID NO: 14472 - RNA, 22 nt, Pseudomonas aeruginosa PA01
ugccggccugacugucugccgg

SEQ ID NO: 14473 - RNA, 22 nt, Pseudomonas aeruginosa PA01
ugccggccugcucuggcgccug

SEQ ID NO: 14474 - RNA, 22 nt, Pseudomonas aeruginosa PA01
ugccggcgcaguucgggcgcaa

SEQ ID NO: 14475 - RNA, 22 nt, Pseudomonas aeruginosa PA01
ugccggcgcccuggugaucugc

SEQ ID NO: 14476 - RNA, 22 nt, Pseudomonas aeruginosa PA01
ugccggcgcggcgguugaggcc

SEQ ID NO: 14477 - RNA, 22 nt, Pseudomonas aeruginosa PA01
ugccguccuaccuggagagcga

SEQ ID NO: 14478 - RNA, 22 nt, Pseudomonas aeruginosa PA01
uggaagcgcuggacgccuucuu

SEQ ID NO: 14479 - RNA, 22 nt, Pseudomonas aeruginosa PA01
uggaaaucgccacgguggacua

SEQ ID NO: 14480 - RNA, 22 nt, Pseudomonas aeruginosa PA01
ugcuucuuggcgcgcuugccgc

SEQ ID NO: 14481 - RNA, 19 nt, Pseudomonas aeruginosa PA01
ugcuugcagccaacugagc

SEQ ID NO: 14482 - RNA, 22 nt, Pseudomonas aeruginosa PA01
ugcuggaagaugcgcugguugg

SEQ ID NO: 14483 - RNA, 22 nt, Pseudomonas aeruginosa PA01
ugcuccgggaaauccggcaggu

SEQ ID NO: 14484 - RNA, 22 nt, Pseudomonas aeruginosa PA01
ugcgcggcguuuccucgccgaa

SEQ ID NO: 14485 - RNA, 22 nt, Pseudomonas aeruginosa PA01
ugcgcugggcguggucggcgac

SEQ ID NO: 14486 - RNA, 20 nt, Pseudomonas aeruginosa PA01
ugcggcggguaagcaggguc

SEQ ID NO: 14487 - RNA, 22 nt, Pseudomonas aeruginosa PA01
ugcgguggaaccauggcggacg

SEQ ID NO: 14488 - RNA, 22 nt, Pseudomonas aeruginosa PA01
ugcgguggcgauaccggugaug

SEQ ID NO: 14489 - RNA, 22 nt, Pseudomonas aeruginosa PA01
ugcgccggcccuggcuagacug

SEQ ID NO: 14490 - RNA, 22 nt, Pseudomonas aeruginosa PA01
ugcgccgggguuuccggcgugc

SEQ ID NO: 14491 - RNA, 22 nt, Pseudomonas aeruginosa PA01
ugcgcgaacuggugcugggcuc

SEQ ID NO: 14492 - RNA, 22 nt, Pseudomonas aeruginosa PA01
ugcccggcucgcgguucagccu

SEQ ID NO: 14493 - RNA, 18 nt, Pseudomonas aeruginosa PA01
uggcgcgcugcuggugga

SEQ ID NO: 14494 - RNA, 22 nt, Pseudomonas aeruginosa PA01
uggcgagcagggcaccgccgac

SEQ ID NO: 14495 - RNA, 22 nt, Pseudomonas aeruginosa PA01
uggcgagcuugaacagguggcg

SEQ ID NO: 14496 - RNA, 22 nt, Pseudomonas aeruginosa PA01
uggcgaggaucucgcggaucuu

SEQ ID NO: 14497 - RNA, 22 nt, Pseudomonas aeruginosa PA01
uggcgcgccugcugccggucga

SEQ ID NO: 14498 - RNA, 22 nt, Pseudomonas aeruginosa PA01
uggcgcgccuggaccgucggcg

SEQ ID NO: 14499 - RNA, 22 nt, Pseudomonas aeruginosa PA01
uggcgcgccuggcugauggcac

SEQ ID NO: 14500 - RNA, 22 nt, Pseudomonas aeruginosa PA01
uggccgggcagaugcuggucuc

SEQ ID NO: 14501 - RNA, 22 nt, Pseudomonas aeruginosa PA01
ugggcggcaagccugcgcgaca

SEQ ID NO: 14502 - RNA, 20 nt, Pseudomonas aeruginosa PA01
uggcggcugaucuucggcug

SEQ ID NO: 14503 - RNA, 22 nt, Pseudomonas aeruginosa PA01
uguucaacgagcugcucgccga

SEQ ID NO: 14504 - RNA, 23 nt, Pseudomonas aeruginosa PA01
ugucuccagcgucuucgggcugu

SEQ ID NO: 14505 - RNA, 22 nt, Pseudomonas aeruginosa PA01
ugguccugaccuacuucgucau

SEQ ID NO: 14506 - RNA, 23 nt, Pseudomonas aeruginosa PA01
ugguccuggugaucgguuucgcc

SEQ ID NO: 14507 - RNA, 19 nt, Pseudomonas aeruginosa PA01
uggucgaggggcuggaggc

SEQ ID NO: 14508 - RNA, 21 nt, Pseudomonas aeruginosa PA01
uucuucagccugcgcgccgug

SEQ ID NO: 14509 - RNA, 22 nt, Pseudomonas aeruginosa PA01
uucgcggcgaauuuccccggca

SEQ ID NO: 14510 - RNA, 22 nt, Pseudomonas aeruginosa PA01
uuccacggucagcaccgccggc

SEQ ID NO: 14511 - RNA, 22 nt, Pseudomonas aeruginosa PA01
uuccaggcagggccguccuccg

SEQ ID NO: 14512 - RNA, 22 nt, Pseudomonas aeruginosa PA01
uucccgcuggcagauggcccug

SEQ ID NO: 14513 - RNA, 22 nt, Pseudomonas aeruginosa PA01
uucccggcaccggucuggcggu

SEQ ID NO: 14514 - RNA, 22 nt, Pseudomonas aeruginosa PA01
uucccgucgaugcggagcggau

SEQ ID NO: 14515 - RNA, 19 nt, Pseudomonas aeruginosa PA01
uuagaaauaggcauuaguc

SEQ ID NO: 14516 - RNA, 22 nt, Pseudomonas aeruginosa PA01
uugcaugaacggcgugccguuc

SEQ ID NO: 14517 - RNA, 22 nt, Pseudomonas aeruginosa PA01
uugagaauggucuccuuggccu

SEQ ID NO: 14518 - RNA, 22 nt, Pseudomonas aeruginosa PA01
uuuuucaagcggcuagaucagc

SEQ ID NO: 14519 - RNA, 22 nt, Pseudomonas aeruginosa PA01
uuucuucagcagcccgaggcug

SEQ ID NO: 14520 - RNA, 22 nt, Pseudomonas aeruginosa PA01
uuuccucgaugucgccgcccuu

SEQ ID NO: 14521 - RNA, 22 nt, Pseudomonas aeruginosa PA01
gagcagcuggaucgggcgccgc

SEQ ID NO: 14522 - RNA, 22 nt, Pseudomonas aeruginosa PA01
gaggguaagugucgcuaaaggu

SEQ ID NO: 14523 - RNA, 22 nt, Pseudomonas aeruginosa PA01
gaugccgacgaucagccggagc

SEQ ID NO: 14524 - RNA, 22 nt, Pseudomonas aeruginosa PA01
gaugccggcggcuuccagcaag

SEQ ID NO: 14525 - RNA, 22 nt, Pseudomonas aeruginosa PA01
gagccgggagcuggugcguggc

SEQ ID NO: 14526 - RNA, 22 nt, Pseudomonas aeruginosa PA01
gagcgagccgguuguucgaggc

SEQ ID NO: 14527 - RNA, 22 nt, Pseudomonas aeruginosa PA01
gagcgccgagcaggaaugcgau

SEQ ID NO: 14528 - RNA, 22 nt, Pseudomonas aeruginosa PA01
gagcgcgaaggccuggugguga

SEQ ID NO: 14529 - RNA, 22 nt, Pseudomonas aeruginosa PA01
gagcggcccucgauccgcuggu

SEQ ID NO: 14530 - RNA, 22 nt, Pseudomonas aeruginosa PA01
gagcggccggacuucggcgaga

SEQ ID NO: 14531 - RNA, 22 nt, Pseudomonas aeruginosa PA01
gagcggcgcaucgcgguggaga

SEQ ID NO: 14532 - RNA, 22 nt, Pseudomonas aeruginosa PA01
gagcucccaggcgucgccuggc

SEQ ID NO: 14533 - RNA, 22 nt, Pseudomonas aeruginosa PA01
gagcucgcucuggaugcgcguc

SEQ ID NO: 14534 - RNA, 22 nt, Pseudomonas aeruginosa PA01
gagcugcgcgaagcgcuggacg

SEQ ID NO: 14535 - RNA, 22 nt, Pseudomonas aeruginosa PA01
gagcuggaguugcggauuggca

SEQ ID NO: 14536 - RNA, 22 nt, Pseudomonas aeruginosa PA01
gaggaacgucaggacacgcagg

SEQ ID NO: 14537 - RNA, 22 nt, Pseudomonas aeruginosa PA01
gaggcgccggaaugggucgccg

SEQ ID NO: 14538 - RNA, 22 nt, Pseudomonas aeruginosa PA01
gaggcgcgcgggcugcucaacc

SEQ ID NO: 14539 - RNA, 22 nt, Pseudomonas aeruginosa PA01
gcacccucccgcugcucgaacu

SEQ ID NO: 14540 - RNA, 22 nt, Pseudomonas aeruginosa PA01
gaugcggaugcgcuugucgcgg

SEQ ID NO: 14541 - RNA, 22 nt, Pseudomonas aeruginosa PA01
gaugcguacgccgggcgagaug

SEQ ID NO: 14542 - RNA, 22 nt, Pseudomonas aeruginosa PA01
gaugcugaugaccgccgccggc

SEQ ID NO: 14543 - RNA, 22 nt, Pseudomonas aeruginosa PA01
gaugguccgggugcggucguug

SEQ ID NO: 14544 - RNA, 22 nt, Pseudomonas aeruginosa PA01
gaagagcgccaacgucgagggc

SEQ ID NO: 14545 - RNA, 22 nt, Pseudomonas aeruginosa PA01
gaagaugcccuucaucuucaag

SEQ ID NO: 14546 - RNA, 22 nt, Pseudomonas aeruginosa PA01
gacccgccgacgccguucagca

SEQ ID NO: 14547 - RNA, 22 nt, Pseudomonas aeruginosa PA01
gacccggacaucauccuggucg

SEQ ID NO: 14548 - RNA, 23 nt, Pseudomonas aeruginosa PA01
gacccggcggccuuccgcaucgc

SEQ ID NO: 14549 - RNA, 22 nt, Pseudomonas aeruginosa PA01
gaccgcccagaugaggggaaga

SEQ ID NO: 14550 - RNA, 22 nt, Pseudomonas aeruginosa PA01
gaccagccugcacgagggcauu

SEQ ID NO: 14551 - RNA, 22 nt, Pseudomonas aeruginosa PA01
gaccaggcguacguauagcagg

SEQ ID NO: 14552 - RNA, 22 nt, Pseudomonas aeruginosa PA01
gagcagguagucgccgcgcccg

SEQ ID NO: 14553 - RNA, 22 nt, Pseudomonas aeruginosa PA01
gagcauccggcacaggcgcagg

SEQ ID NO: 14554 - RNA, 22 nt, Pseudomonas aeruginosa PA01
gagcauggcgcgcgagcugggg

SEQ ID NO: 14555 - RNA, 22 nt, Pseudomonas aeruginosa PA01
gacgcgcgccuggcgcaguggg

SEQ ID NO: 14556 - RNA, 22 nt, Pseudomonas aeruginosa PA01
gacugcgggaucgccagccgca

SEQ ID NO: 14557 - RNA, 22 nt, Pseudomonas aeruginosa PA01
gcccauggcgaaagcgccgccg

SEQ ID NO: 14558 - RNA, 22 nt, Pseudomonas aeruginosa PA01
gccccgcgcagguugaucacgc

SEQ ID NO: 14559 - RNA, 22 nt, Pseudomonas aeruginosa PA01
gcccggcggcacgcugggccug

SEQ ID NO: 14560 - RNA, 18 nt, Pseudomonas aeruginosa PA01
gcccggcguaguccagca

SEQ ID NO: 14561 - RNA, 22 nt, Pseudomonas aeruginosa PA01
gcccggcucgaagagcgugcgc

SEQ ID NO: 14562 - RNA, 22 nt, Pseudomonas aeruginosa PA01
gcccggcuggcgcucggccugg

SEQ ID NO: 14563 - RNA, 22 nt, Pseudomonas aeruginosa PA01
gcccggcuguccaggcggccgg

SEQ ID NO: 14564 - RNA, 22 nt, Pseudomonas aeruginosa PA01
gcccucgccgacgaccugcgcc

SEQ ID NO: 14565 - RNA, 22 nt, Pseudomonas aeruginosa PA01
gcccuggagguuguccggcaag

SEQ ID NO: 14566 - RNA, 22 nt, Pseudomonas aeruginosa PA01
gcccuggugcagcgcaaggccg

SEQ ID NO: 14567 - RNA, 22 nt, Pseudomonas aeruginosa PA01
gccagcagcucggcgccggcca

SEQ ID NO: 14568 - RNA, 22 nt, Pseudomonas aeruginosa PA01
gccagcaguucgcgggcacggg

SEQ ID NO: 14569 - RNA, 22 nt, Pseudomonas aeruginosa PA01
gccagccagaucggcgccggcc

SEQ ID NO: 14570 - RNA, 22 nt, Pseudomonas aeruginosa PA01
gccagccgaccgacucgccgcu

SEQ ID NO: 14571 - RNA, 17 nt, Pseudomonas aeruginosa PA01
gccagccgaucugcggc

SEQ ID NO: 14572 - RNA, 22 nt, Pseudomonas aeruginosa PA01
gccagcgccgccugaaccaggc

SEQ ID NO: 14573 - RNA, 22 nt, Pseudomonas aeruginosa PA01
gcacuggaauggccggccgcgc

SEQ ID NO: 14574 - RNA, 22 nt, Pseudomonas aeruginosa PA01
gcagcccguuccagccgccggu

SEQ ID NO: 14575 - RNA, 22 nt, Pseudomonas aeruginosa PA01
gcagcgaguagccgauccccgg

SEQ ID NO: 14576 - RNA, 22 nt, Pseudomonas aeruginosa PA01
gcagcgccacccgcggaucgaa

SEQ ID NO: 14577 - RNA, 22 nt, Pseudomonas aeruginosa PA01
gcagcgcugcgcgagcagggug

SEQ ID NO: 14578 - RNA, 20 nt, Pseudomonas aeruginosa PA01
gcagcaaggccaggccgaug

SEQ ID NO: 14579 - RNA, 22 nt, Pseudomonas aeruginosa PA01
gcagcagcuugccguccggguu

SEQ ID NO: 14580 - RNA, 22 nt, Pseudomonas aeruginosa PA01
gcagcaggcgucggcgggccuc

SEQ ID NO: 14581 - RNA, 22 nt, Pseudomonas aeruginosa PA01
gcagggcgugcgcccggcgaau

SEQ ID NO: 14582 - RNA, 22 nt, Pseudomonas aeruginosa PA01
gcagcuggcgccgaucuccgcg

SEQ ID NO: 14583 - RNA, 22 nt, Pseudomonas aeruginosa PA01
gcaggaagccggcgagcgcuug

SEQ ID NO: 14584 - RNA, 22 nt, Pseudomonas aeruginosa PA01
gcaggccgaacaucaucaccgg

SEQ ID NO: 14585 - RNA, 22 nt, Pseudomonas aeruginosa PA01
gcaggccgaccaguucgcugau

SEQ ID NO: 14586 - RNA, 22 nt, Pseudomonas aeruginosa PA01
gcaggccgcccuggucgagcag

SEQ ID NO: 14587 - RNA, 22 nt, Pseudomonas aeruginosa PA01
gcaggcgcaguuggacgcccgc

SEQ ID NO: 14588 - RNA, 22 nt, Pseudomonas aeruginosa PA01
gcaggcugagcacgccggcggc

SEQ ID NO: 14589 - RNA, 22 nt, Pseudomonas aeruginosa PA01
gcaggcuggcgucuuccagggc

SEQ ID NO: 14590 - RNA, 22 nt, Pseudomonas aeruginosa PA01
gcugcagucggcaacuggcucu

SEQ ID NO: 14591 - RNA, 22 nt, Pseudomonas aeruginosa PA01
gcugaggcguuccgccggcccg

SEQ ID NO: 14592 - RNA, 22 nt, Pseudomonas aeruginosa PA01
gcucuugcggaucgccuucggc

SEQ ID NO: 14593 - RNA, 22 nt, Pseudomonas aeruginosa PA01
gcugccggcgaucgucgaggcg

SEQ ID NO: 14594 - RNA, 23 nt, Pseudomonas aeruginosa PA01
gcugccggcggcgucguugucgu

SEQ ID NO: 14595 - RNA, 22 nt, Pseudomonas aeruginosa PA01
gcugcgcaaguaccuggcgcgu

SEQ ID NO: 14596 - RNA, 21 nt, Pseudomonas aeruginosa PA01
gcugcgcaucuccgcggccgg

SEQ ID NO: 14597 - RNA, 22 nt, Pseudomonas aeruginosa PA01
gcugcgcgagcguggcugggac

SEQ ID NO: 14598 - RNA, 22 nt, Pseudomonas aeruginosa PA01
gcugcggccgcgguacaggcug

SEQ ID NO: 14599 - RNA, 22 nt, Pseudomonas aeruginosa PA01
gcuccgccuucuugucguugug

SEQ ID NO: 14600 - RNA, 22 nt, Pseudomonas aeruginosa PA01
gcuccgcucuuggcgccgccca

SEQ ID NO: 14601 - RNA, 22 nt, Pseudomonas aeruginosa PA01
gcuccggcaggugaucguaguc

SEQ ID NO: 14602 - RNA, 22 nt, Pseudomonas aeruginosa PA01
gcucgccuggcugcgcagcgag

SEQ ID NO: 14603 - RNA, 22 nt, Pseudomonas aeruginosa PA01
gcucgcgauugccguccagcca

SEQ ID NO: 14604 - RNA, 22 nt, Pseudomonas aeruginosa PA01
gcucgcgguacggagccggccc

SEQ ID NO: 14605 - RNA, 22 nt, Pseudomonas aeruginosa PA01
gcucgcugggguccagccagag

SEQ ID NO: 14606 - RNA, 22 nt, Pseudomonas aeruginosa PA01
gcucggcguggcguugccgggc

SEQ ID NO: 14607 - RNA, 22 nt, Pseudomonas aeruginosa PA01
gcggaagaacucgaugacgccc

SEQ ID NO: 14608 - RNA, 22 nt, Pseudomonas aeruginosa PA01
gcggaagcgcugcgggucgucc

SEQ ID NO: 14609 - RNA, 22 nt, Pseudomonas aeruginosa PA01
gcggacgccuggcccguccugg

SEQ ID NO: 14610 - RNA, 22 nt, Pseudomonas aeruginosa PA01
gcggagcgcuggucgcuguucc

SEQ ID NO: 14611 - RNA, 22 nt, Pseudomonas aeruginosa PA01
gcggcagcccgggcaacggcag

SEQ ID NO: 14612 - RNA, 22 nt, Pseudomonas aeruginosa PA01
gcgcccacuccaaccaccugca

SEQ ID NO: 14613 - RNA, 22 nt, Pseudomonas aeruginosa PA01
gcgccccggugccgccguggaa

SEQ ID NO: 14614 - RNA, 22 nt, Pseudomonas aeruginosa PA01
gcgccccuggaagagccgccgg

SEQ ID NO: 14615 - RNA, 22 nt, Pseudomonas aeruginosa PA01
gcgcccggugugccggcuggcg

SEQ ID NO: 14616 - RNA, 22 nt, Pseudomonas aeruginosa PA01
gcgccgagcaauucggcgagca

SEQ ID NO: 14617 - RNA, 22 nt, Pseudomonas aeruginosa PA01
gcgccgaggcaggcguggaccu

SEQ ID NO: 14618 - RNA, 22 nt, Pseudomonas aeruginosa PA01
gcgcggcgaacuucacccaugc

SEQ ID NO: 14619 - RNA, 22 nt, Pseudomonas aeruginosa PA01
gcgcggcgugucguacuccucc

SEQ ID NO: 14620 - RNA, 21 nt, Pseudomonas aeruginosa PA01
gcgcgggcgagggcguagguc

SEQ ID NO: 14621 - RNA, 19 nt, Pseudomonas aeruginosa PA01
gcgcggggugcggaugcug

SEQ ID NO: 14622 - RNA, 22 nt, Pseudomonas aeruginosa PA01
gcgcgucgcccugggugacgcg

SEQ ID NO: 14623 - RNA, 22 nt, Pseudomonas aeruginosa PA01
gcgcgugcauuggcuggccggc

SEQ ID NO: 14624 - RNA, 22 nt, Pseudomonas aeruginosa PA01
gcgcguggccgaacuggccgcc

SEQ ID NO: 14625 - RNA, 22 nt, Pseudomonas aeruginosa PA01
gcgcuggagguguuccgccgcg

SEQ ID NO: 14626 - RNA, 16 nt, Pseudomonas aeruginosa PA01
gcgcuggauacggcgg

SEQ ID NO: 14627 - RNA, 22 nt, Pseudomonas aeruginosa PA01
gcgcuggcugcgaucggcuggc

SEQ ID NO: 14628 - RNA, 18 nt, Pseudomonas aeruginosa PA01
gcggcgccgggccagcag

SEQ ID NO: 14629 - RNA, 22 nt, Pseudomonas aeruginosa PA01
gcggcgcgggucuggcugagca

SEQ ID NO: 14630 - RNA, 22 nt, Pseudomonas aeruginosa PA01
gcggcgcguccaggcgaucgag

SEQ ID NO: 14631 - RNA, 18 nt, Pseudomonas aeruginosa PA01
gcggcgcguuggcgaucg

SEQ ID NO: 14632 - RNA, 22 nt, Pseudomonas aeruginosa PA01
gcggcggcgaacugggcgaagc

SEQ ID NO: 14633 - RNA, 22 nt, Pseudomonas aeruginosa PA01
gcggcggcgucucgugggccug

SEQ ID NO: 14634 - RNA, 22 nt, Pseudomonas aeruginosa PA01
gcggcucgcugaaagccgagcc

SEQ ID NO: 14635 - RNA, 22 nt, Pseudomonas aeruginosa PA01
gcgggagccgcaggcgccccau

SEQ ID NO: 14636 - RNA, 22 nt, Pseudomonas aeruginosa PA01
gcgggaggaucgaauugcaggc

SEQ ID NO: 14637 - RNA, 22 nt, Pseudomonas aeruginosa PA01
gcgggccggcgaacaaugcgug

SEQ ID NO: 14638 - RNA, 22 nt, Pseudomonas aeruginosa PA01
gcgggcgcccugccgaggcugg

SEQ ID NO: 14639 - RNA, 22 nt, Pseudomonas aeruginosa PA01
gcgggcgcgggucgucguugcc

SEQ ID NO: 14640 - RNA, 22 nt, Pseudomonas aeruginosa PA01
gcgggcgggugcuggaacugac

SEQ ID NO: 14641 - RNA, 22 nt, Pseudomonas aeruginosa PA01
gcgguggcgauccagcccggcg

SEQ ID NO: 14642 - RNA, 22 nt, Pseudomonas aeruginosa PA01
gcguccgggguuuccugcuggc

SEQ ID NO: 14643 - RNA, 22 nt, Pseudomonas aeruginosa PA01
gcgucgcggacuaccugcaggg

SEQ ID NO: 14644 - RNA, 22 nt, Pseudomonas aeruginosa PA01
gcgucggccgcagaugaacucg

SEQ ID NO: 14645 - RNA, 19 nt, Pseudomonas aeruginosa PA01
gcgucggcuuccuugacga

SEQ ID NO: 14646 - RNA, 22 nt, Pseudomonas aeruginosa PA01
gccuuggucgccgcgaucaccc

SEQ ID NO: 14647 - RNA, 22 nt, Pseudomonas aeruginosa PA01
gcgaccagccuucgcgcuugcc

SEQ ID NO: 14648 - RNA, 22 nt, Pseudomonas aeruginosa PA01
gcgaccgguggucgggcgcugc

SEQ ID NO: 14649 - RNA, 22 nt, Pseudomonas aeruginosa PA01
gccuucuucauguccggaguuu

SEQ ID NO: 14650 - RNA, 22 nt, Pseudomonas aeruginosa PA01
gccugggcgaugcccgcgucga

SEQ ID NO: 14651 - RNA, 22 nt, Pseudomonas aeruginosa PA01
gccugggguagggagggcgaca

SEQ ID NO: 14652 - RNA, 22 nt, Pseudomonas aeruginosa PA01
gcgacgccgaggcgacgcaggg

SEQ ID NO: 14653 - RNA, 22 nt, Pseudomonas aeruginosa PA01
gcgacggagucaacgacguacc

SEQ ID NO: 14654 - RNA, 17 nt, Pseudomonas aeruginosa PA01
gcgagcagcuugccgcc

SEQ ID NO: 14655 - RNA, 23 nt, Pseudomonas aeruginosa PA01
gcgagcagcuugccgccacgguu

SEQ ID NO: 14656 - RNA, 22 nt, Pseudomonas aeruginosa PA01
gcgagccgaugcaacgggcgac

SEQ ID NO: 14657 - RNA, 22 nt, Pseudomonas aeruginosa PA01
gcgagccgcuggagaaggcggu

SEQ ID NO: 14658 - RNA, 22 nt, Pseudomonas aeruginosa PA01
gcgaggaauucgccuugcugcg

SEQ ID NO: 14659 - RNA, 22 nt, Pseudomonas aeruginosa PA01
gcgaggagccgcuggacugguc

SEQ ID NO: 14660 - RNA, 21 nt, Pseudomonas aeruginosa PA01
gcgaggccaccagcccgguga

SEQ ID NO: 14661 - RNA, 22 nt, Pseudomonas aeruginosa PA01
gcgaggccaucgagcaggccgc

SEQ ID NO: 14662 - RNA, 22 nt, Pseudomonas aeruginosa PA01
gcgcgacagugguagcggcgac

SEQ ID NO: 14663 - RNA, 22 nt, Pseudomonas aeruginosa PA01
gcgcgacgcggggauggacgug

SEQ ID NO: 14664 - RNA, 22 nt, Pseudomonas aeruginosa PA01
gcgcgacgcuguugcuggcggg

SEQ ID NO: 14665 - RNA, 22 nt, Pseudomonas aeruginosa PA01
gcgcgagcgccugggucggcag

SEQ ID NO: 14666 - RNA, 22 nt, Pseudomonas aeruginosa PA01
gcgcgaggaacuggccggcgag

SEQ ID NO: 14667 - RNA, 22 nt, Pseudomonas aeruginosa PA01
gcgcgaggugcuggcgccgagg

SEQ ID NO: 14668 - RNA, 17 nt, Pseudomonas aeruginosa PA01
gcgcgcacgacaggcgc

SEQ ID NO: 14669 - RNA, 22 nt, Pseudomonas aeruginosa PA01
gcgcgcagcgagacgguggugc

SEQ ID NO: 14670 - RNA, 20 nt, Pseudomonas aeruginosa PA01
gcgcgcaggccaccuucgac

SEQ ID NO: 14671 - RNA, 22 nt, Pseudomonas aeruginosa PA01
gcgcaagcucgacgagaacggc

SEQ ID NO: 14672 - RNA, 23 nt, Pseudomonas aeruginosa PA01
gcgcaggcccaugaacagcaugc

SEQ ID NO: 14673 - RNA, 22 nt, Pseudomonas aeruginosa PA01
gcgccacgguuaucgcccaguu

SEQ ID NO: 14674 - RNA, 22 nt, Pseudomonas aeruginosa PA01
gcgccagcgcaccgccaugggc

SEQ ID NO: 14675 - RNA, 22 nt, Pseudomonas aeruginosa PA01
gccgccgaccugggcugcggca

SEQ ID NO: 14676 - RNA, 22 nt, Pseudomonas aeruginosa PA01
gccgccgaggcugaugcgcugc

SEQ ID NO: 14677 - RNA, 17 nt, Pseudomonas aeruginosa PA01
gccgccgaggucggcga

SEQ ID NO: 14678 - RNA, 22 nt, Pseudomonas aeruginosa PA01
gccgccgagucccuggagcgug

SEQ ID NO: 14679 - RNA, 22 nt, Pseudomonas aeruginosa PA01
gccgccgccagaucgaucaucg

SEQ ID NO: 14680 - RNA, 22 nt, Pseudomonas aeruginosa PA01
gccgccuggaagccgccggcuu

SEQ ID NO: 14681 - RNA, 22 nt, Pseudomonas aeruginosa PA01
gccgcuggaacuggggucgcug

SEQ ID NO: 14682 - RNA, 22 nt, Pseudomonas aeruginosa PA01
gccggagaucaccgagccgucc

SEQ ID NO: 14683 - RNA, 22 nt, Pseudomonas aeruginosa PA01
gccggcagcacaccgggcaguc

SEQ ID NO: 14684 - RNA, 22 nt, Pseudomonas aeruginosa PA01
gccggcagguuggcgcgcaggu

SEQ ID NO: 14685 - RNA, 22 nt, Pseudomonas aeruginosa PA01
gccggcccugucgggcaggccg

SEQ ID NO: 14686 - RNA, 22 nt, Pseudomonas aeruginosa PA01
gccggccgagaaggucgcguag

SEQ ID NO: 14687 - RNA, 22 nt, Pseudomonas aeruginosa PA01
gccggccguugcaauggcugua

SEQ ID NO: 14688 - RNA, 22 nt, Pseudomonas aeruginosa PA01
gccggcgacggcucgcuccuga

SEQ ID NO: 14689 - RNA, 22 nt, Pseudomonas aeruginosa PA01
gccggcgagcaguuggcgaugu

SEQ ID NO: 14690 - RNA, 22 nt, Pseudomonas aeruginosa PA01
gccggcgaggaaaucgccggag

SEQ ID NO: 14691 - RNA, 22 nt, Pseudomonas aeruginosa PA01
gccggcucaucagcacccgcug

SEQ ID NO: 14692 - RNA, 22 nt, Pseudomonas aeruginosa PA01
gccgggagugaagaaggcgaug

SEQ ID NO: 14693 - RNA, 22 nt, Pseudomonas aeruginosa PA01
gccgggauggaggagcaucucg

SEQ ID NO: 14694 - RNA, 22 nt, Pseudomonas aeruginosa PA01
gccggugacccuggcgaucggc

SEQ ID NO: 14695 - RNA, 22 nt, Pseudomonas aeruginosa PA01
gccgucgauccucgccgcguuc

SEQ ID NO: 14696 - RNA, 22 nt, Pseudomonas aeruginosa PA01
gccgucggccauuaccagguga

SEQ ID NO: 14697 - RNA, 22 nt, Pseudomonas aeruginosa PA01
gccgucggcgaccacgauggcc

SEQ ID NO: 14698 - RNA, 22 nt, Pseudomonas aeruginosa PA01
gccguggaagcucgccacgccg

SEQ ID NO: 14699 - RNA, 20 nt, Pseudomonas aeruginosa PA01
gccgaccggcggcccaggcg

SEQ ID NO: 14700 - RNA, 22 nt, Pseudomonas aeruginosa PA01
gccgaggaauuuccccgcgaac

SEQ ID NO: 14701 - RNA, 22 nt, Pseudomonas aeruginosa PA01
gccgaggagaccuggcggguac

SEQ ID NO: 14702 - RNA, 22 nt, Pseudomonas aeruginosa PA01
gccgaggaguuccggcucugag

SEQ ID NO: 14703 - RNA, 22 nt, Pseudomonas aeruginosa PA01
gccugcagaaggucggcggcga

SEQ ID NO: 14704 - RNA, 22 nt, Pseudomonas aeruginosa PA01
gccugcgauuuccugcgcguuc

SEQ ID NO: 14705 - RNA, 22 nt, Pseudomonas aeruginosa PA01
gccugcgcaacuggccgcgcug

SEQ ID NO: 14706 - RNA, 22 nt, Pseudomonas aeruginosa PA01
gccuggagaauaucgucggcga

SEQ ID NO: 14707 - RNA, 22 nt, Pseudomonas aeruginosa PA01
gccuggagaucgagcagucccc

SEQ ID NO: 14708 - RNA, 22 nt, Pseudomonas aeruginosa PA01
gccuggagggucacgcugucgu

SEQ ID NO: 14709 - RNA, 22 nt, Pseudomonas aeruginosa PA01
gccuggagguccaggcgcuggc

SEQ ID NO: 14710 - RNA, 22 nt, Pseudomonas aeruginosa PA01
guggcgagaaucaggucgaucc

SEQ ID NO: 14711 - RNA, 22 nt, Pseudomonas aeruginosa PA01
gugggcgcgaccucggcugcgg

SEQ ID NO: 14712 - RNA, 22 nt, Pseudomonas aeruginosa PA01
gugggcggucaacgccagcacc

SEQ ID NO: 14713 - RNA, 22 nt, Pseudomonas aeruginosa PA01
guggaaguggucgaggccccgg

SEQ ID NO: 14714 - RNA, 22 nt, Pseudomonas aeruginosa PA01
guccaugaucgcgaacugcggc

SEQ ID NO: 14715 - RNA, 22 nt, Pseudomonas aeruginosa PA01
guccggccaggcgggcuugccg

SEQ ID NO: 14716 - RNA, 22 nt, Pseudomonas aeruginosa PA01
guccggcgaccagcggcgcgug

SEQ ID NO: 14717 - RNA, 22 nt, Pseudomonas aeruginosa PA01
guccugcgcgcugcgcaggguc

SEQ ID NO: 14718 - RNA, 22 nt, Pseudomonas aeruginosa PA01
guccagcgcagcaccagcucgc

SEQ ID NO: 14719 - RNA, 22 nt, Pseudomonas aeruginosa PA01
gucuuucccggauggauggaga

SEQ ID NO: 14720 - RNA, 22 nt, Pseudomonas aeruginosa PA01
gucggccugaccuggggcgaga

SEQ ID NO: 14721 - RNA, 22 nt, Pseudomonas aeruginosa PA01
gucggcgaaguccugcacgaac

SEQ ID NO: 14722 - RNA, 22 nt, Pseudomonas aeruginosa PA01
gucggcgaguuccgcggagauc

SEQ ID NO: 14723 - RNA, 22 nt, Pseudomonas aeruginosa PA01
gucggcgauggccagcagcgcg

SEQ ID NO: 14724 - RNA, 22 nt, Pseudomonas aeruginosa PA01
gucggcgccgaaguugaugcgg

SEQ ID NO: 14725 - RNA, 22 nt, Pseudomonas aeruginosa PA01
gugagcgccgaggagcagacca

SEQ ID NO: 14726 - RNA, 22 nt, Pseudomonas aeruginosa PA01
gugaggcgccggacagcgcccg

SEQ ID NO: 14727 - RNA, 22 nt, Pseudomonas aeruginosa PA01
gugccggcgggugcugcgcgag

SEQ ID NO: 14728 - RNA, 19 nt, Pseudomonas aeruginosa PA01
gguuccgucggccuugccg

SEQ ID NO: 14729 - RNA, 22 nt, Pseudomonas aeruginosa PA01
gguugcgguugugguugagcag

SEQ ID NO: 14730 - RNA, 22 nt, Pseudomonas aeruginosa PA01
gucaggccgaagaucgcgccgc

SEQ ID NO: 14731 - RNA, 22 nt, Pseudomonas aeruginosa PA01
ggugggcgaugcgcgaggucag

SEQ ID NO: 14732 - RNA, 22 nt, Pseudomonas aeruginosa PA01
ggugccagggcuacagcgagcc

SEQ ID NO: 14733 - RNA, 22 nt, Pseudomonas aeruginosa PA01
ggugcgcaccgucgagggcgag

SEQ ID NO: 14734 - RNA, 22 nt, Pseudomonas aeruginosa PA01
ggugcggaagaaggcgcgcgua

SEQ ID NO: 14735 - RNA, 22 nt, Pseudomonas aeruginosa PA01
gggucuguucgaccaacugcgg

SEQ ID NO: 14736 - RNA, 22 nt, Pseudomonas aeruginosa PA01
gguccugcaacugaaacgggug

SEQ ID NO: 14737 - RNA, 22 nt, Pseudomonas aeruginosa PA01
ggucggccaguuguccuucgag

SEQ ID NO: 14738 - RNA, 22 nt, Pseudomonas aeruginosa PA01
ggucgggaugcgcaggcggccg

SEQ ID NO: 14739 - RNA, 22 nt, Pseudomonas aeruginosa PA01
gggcuccgacuaucacucgaug

SEQ ID NO: 14740 - RNA, 22 nt, Pseudomonas aeruginosa PA01
gggccgggcgacgaacuggacg

SEQ ID NO: 14741 - RNA, 22 nt, Pseudomonas aeruginosa PA01
ggggcgccggaccugcaggagc

SEQ ID NO: 14742 - RNA, 22 nt, Pseudomonas aeruginosa PA01
ggggcgcgccuccaggcgacgg

SEQ ID NO: 14743 - RNA, 22 nt, Pseudomonas aeruginosa PA01
ggggcucgccgaucaccccggu

SEQ ID NO: 14744 - RNA, 22 nt, Pseudomonas aeruginosa PA01
ggccuggagcgcggccaggccu

SEQ ID NO: 14745 - RNA, 22 nt, Pseudomonas aeruginosa PA01
ggcgacgccggcggcacccagu

SEQ ID NO: 14746 - RNA, 19 nt, Pseudomonas aeruginosa PA01
ggcgagcagcagggcgcgg

SEQ ID NO: 14747 - RNA, 22 nt, Pseudomonas aeruginosa PA01
ggcgagcagcggcaggcugucg

SEQ ID NO: 14748 - RNA, 22 nt, Pseudomonas aeruginosa PA01
ggcgaggaagucgcagugcucg

SEQ ID NO: 14749 - RNA, 22 nt, Pseudomonas aeruginosa PA01
ggcgaggaggguuuccgcgugc

SEQ ID NO: 14750 - RNA, 22 nt, Pseudomonas aeruginosa PA01
ggcgaggccaauggcugaggcg

SEQ ID NO: 14751 - RNA, 22 nt, Pseudomonas aeruginosa PA01
ggcgagguagcgcagcacgccg

SEQ ID NO: 14752 - RNA, 22 nt, Pseudomonas aeruginosa PA01
ggccgccgagccaggccucgcg

SEQ ID NO: 14753 - RNA, 22 nt, Pseudomonas aeruginosa PA01
ggccgccgccgacuugucggug

SEQ ID NO: 14754 - RNA, 22 nt, Pseudomonas aeruginosa PA01
ggccgccgcguggcgucggagu

SEQ ID NO: 14755 - RNA, 22 nt, Pseudomonas aeruginosa PA01
ggccgcgccgggagagcggaca

SEQ ID NO: 14756 - RNA, 22 nt, Pseudomonas aeruginosa PA01
ggccggcaccgaugucaccgcg

SEQ ID NO: 14757 - RNA, 22 nt, Pseudomonas aeruginosa PA01
ggccggcgaacucgcggucggu

SEQ ID NO: 14758 - RNA, 22 nt, Pseudomonas aeruginosa PA01
ggccgggacgaagccggggaaa

SEQ ID NO: 14759 - RNA, 23 nt, Pseudomonas aeruginosa PA01
ggccgggaucgagcaacuggcgc

SEQ ID NO: 14760 - RNA, 18 nt, Pseudomonas aeruginosa PA01
ggcggcgcgagccaggcg

SEQ ID NO: 14761 - RNA, 22 nt, Pseudomonas aeruginosa PA01
ggcggcgcuccucgaaggggaa

SEQ ID NO: 14762 - RNA, 21 nt, Pseudomonas aeruginosa PA01
ggcggcugguagcucaaggga

SEQ ID NO: 14763 - RNA, 22 nt, Pseudomonas aeruginosa PA01
ggcgggcguuuccgcgcugacg

SEQ ID NO: 14764 - RNA, 22 nt, Pseudomonas aeruginosa PA01
ggcgggugacgccguugucgau

SEQ ID NO: 14765 - RNA, 22 nt, Pseudomonas aeruginosa PA01
ggcgggugcucggagcgcuugc

SEQ ID NO: 14766 - RNA, 22 nt, Pseudomonas aeruginosa PA01
ggcgggugcugcuggaggaccu

SEQ ID NO: 14767 - RNA, 22 nt, Pseudomonas aeruginosa PA01
ggcgucuuccucguccucggcg

SEQ ID NO: 14768 - RNA, 22 nt, Pseudomonas aeruginosa PA01
ggcgcccagcgucgccaggcuc

SEQ ID NO: 14769 - RNA, 22 nt, Pseudomonas aeruginosa PA01
ggcgcccggcgaacagcuugcg

SEQ ID NO: 14770 - RNA, 22 nt, Pseudomonas aeruginosa PA01
ggcgcgaguugcugcgcgucua

SEQ ID NO: 14771 - RNA, 22 nt, Pseudomonas aeruginosa PA01
ggcgcgcaccgcgugggacagg

SEQ ID NO: 14772 - RNA, 22 nt, Pseudomonas aeruginosa PA01
ggcgcgcaggcgcagaacaccu

SEQ ID NO: 14773 - RNA, 19 nt, Pseudomonas aeruginosa PA01
ggcgcgccaggucuggcug

SEQ ID NO: 14774 - RNA, 22 nt, Pseudomonas aeruginosa PA01
ggcgcggcucguggaucagcgc

SEQ ID NO: 14775 - RNA, 22 nt, Pseudomonas aeruginosa PA01
ggcgcugcuggccgugcagguc

SEQ ID NO: 14776 - RNA, 22 nt, Pseudomonas aeruginosa PA01
ggcgcugcuguuccaguacgcg

SEQ ID NO: 14777 - RNA, 22 nt, Pseudomonas aeruginosa PA01
ggcgcuggcgcaaccggccaac

SEQ ID NO: 14778 - RNA, 22 nt, Pseudomonas aeruginosa PA01
ggcgcuggcgcaacgcaccgaa

SEQ ID NO: 14779 - RNA, 22 nt, Pseudomonas aeruginosa PA01
ggcgcugggcuugaccccggcg

SEQ ID NO: 14780 - RNA, 22 nt, Pseudomonas aeruginosa PA01
ggcggccguucauguaccagau

SEQ ID NO: 14781 - RNA, 22 nt, Pseudomonas aeruginosa PA01
ggcugcgucgugacgcccgcgg

SEQ ID NO: 14782 - RNA, 22 nt, Pseudomonas aeruginosa PA01
ggcugcuggagcgccugggcca

SEQ ID NO: 14783 - RNA, 22 nt, Pseudomonas aeruginosa PA01
ggcugcugggccuggccguucu

SEQ ID NO: 14784 - RNA, 22 nt, Pseudomonas aeruginosa PA01
ggcugcuguccgguggccuugu

SEQ ID NO: 14785 - RNA, 22 nt, Pseudomonas aeruginosa PA01
ggcugccgccgauggccuugga

SEQ ID NO: 14786 - RNA, 22 nt, Pseudomonas aeruginosa PA01
ggcuucggcuccccagccggac

SEQ ID NO: 14787 - RNA, 22 nt, Pseudomonas aeruginosa PA01
ggcuccgccgccucagcggggc

SEQ ID NO: 14788 - RNA, 22 nt, Pseudomonas aeruginosa PA01
ggcuccgcgaacgcuuccccca

SEQ ID NO: 14789 - RNA, 22 nt, Pseudomonas aeruginosa PA01
ggcuccugguugccgggagcgg

SEQ ID NO: 14790 - RNA, 22 nt, Pseudomonas aeruginosa PA01
ggcucgcgagcgccagggcaac

SEQ ID NO: 14791 - RNA, 22 nt, Pseudomonas aeruginosa PA01
ggcucgcgcgcuggccacccug

SEQ ID NO: 14792 - RNA, 22 nt, Pseudomonas aeruginosa PA01
ggcucgcucaugucgucgccuu

SEQ ID NO: 14793 - RNA, 22 nt, Pseudomonas aeruginosa PA01
ggcuuucucguuaccgccggcu

SEQ ID NO: 14794 - RNA, 22 nt, Pseudomonas aeruginosa PA01
gggaagcgcgccugcugcuuga

SEQ ID NO: 14795 - RNA, 21 nt, Pseudomonas aeruginosa PA01
gggaagcucgaggcgucgggu

SEQ ID NO: 14796 - RNA, 22 nt, Pseudomonas aeruginosa PA01
gggcagcucgaggucuucgucg

SEQ ID NO: 14797 - RNA, 22 nt, Pseudomonas aeruginosa PA01
gggcagcuucagcaagcgcucg

SEQ ID NO: 14798 - RNA, 22 nt, Pseudomonas aeruginosa PA01
gggcgacggcgaucagcgucua

SEQ ID NO: 14799 - RNA, 22 nt, Pseudomonas aeruginosa PA01
gggcgagccacucgccgaggaa

SEQ ID NO: 14800 - RNA, 22 nt, Pseudomonas aeruginosa PA01
gggcgaggucgacaacggcguc

SEQ ID NO: 14801 - RNA, 21 nt, Pseudomonas aeruginosa PA01
gggcgcgucccgccuggcggc

SEQ ID NO: 14802 - RNA, 20 nt, Pseudomonas aeruginosa PA01
gggcgcuggcauaggcgccc

SEQ ID NO: 14803 - RNA, 22 nt, Pseudomonas aeruginosa PA01
ggccccucggcggccuggcugc

SEQ ID NO: 14804 - RNA, 22 nt, Pseudomonas aeruginosa PA01
ggcccgggugauccuccagcau

SEQ ID NO: 14805 - RNA, 22 nt, Pseudomonas aeruginosa PA01
ggcccgucgccgcgccugaggc

SEQ ID NO: 14806 - RNA, 22 nt, Pseudomonas aeruginosa PA01
ggcccuggaucucgcccugcca

SEQ ID NO: 14807 - RNA, 22 nt, Pseudomonas aeruginosa PA01
ggcaggaagcuuuccggcaguu

SEQ ID NO: 14808 - RNA, 22 nt, Pseudomonas aeruginosa PA01
ggcagcagguguggaaggccuc

SEQ ID NO: 14809 - RNA, 22 nt, Pseudomonas aeruginosa PA01
ggagggcgaguuccugguggau

SEQ ID NO: 14810 - RNA, 22 nt, Pseudomonas aeruginosa PA01
ggagggcgccagcgaggugccg

SEQ ID NO: 14811 - RNA, 22 nt, Pseudomonas aeruginosa PA01
ggagguccgucaugccgcucga

SEQ ID NO: 14812 - RNA, 22 nt, Pseudomonas aeruginosa PA01
ggagucgcccucgaccaggaac

SEQ ID NO: 14813 - RNA, 22 nt, Pseudomonas aeruginosa PA01
ggaaccauggucgagagccucg

SEQ ID NO: 14814 - RNA, 22 nt, Pseudomonas aeruginosa PA01
gcuuccggcgaagcuccagcga

SEQ ID NO: 14815 - RNA, 23 nt, Pseudomonas aeruginosa PA01
gcuucggccuggucgguuuccgc

SEQ ID NO: 14816 - RNA, 22 nt, Pseudomonas aeruginosa PA01
gcuucguccgcgugguggcgcg

SEQ ID NO: 14817 - RNA, 22 nt, Pseudomonas aeruginosa PA01
gcuuucccccgccgcgcucuuc

SEQ ID NO: 14818 - RNA, 22 nt, Pseudomonas aeruginosa PA01
ggaccgcgcgaggagacgccgg

SEQ ID NO: 14819 - RNA, 22 nt, Pseudomonas aeruginosa PA01
ggacgccgaggaccaggcgcgc

SEQ ID NO: 14820 - RNA, 22 nt, Pseudomonas aeruginosa PA01
ggagccguccucgccggccugg

SEQ ID NO: 14821 - RNA, 22 nt, Pseudomonas aeruginosa PA01
ggagccguugcagugguagcac

SEQ ID NO: 14822 - RNA, 22 nt, Pseudomonas aeruginosa PA01
ggagcgccugugggaucguccc

SEQ ID NO: 14823 - RNA, 22 nt, Pseudomonas aeruginosa PA01
ggagcgcgugaccggcuacggu

SEQ ID NO: 14824 - RNA, 22 nt, Pseudomonas aeruginosa PA01
ggagcgggccuuagcccaggug

SEQ ID NO: 14825 - RNA, 22 nt, Pseudomonas aeruginosa PA01
gcuggaaacccucggcgugguc

SEQ ID NO: 14826 - RNA, 22 nt, Pseudomonas aeruginosa PA01
gcuggaggcgcgcaucgcucga

SEQ ID NO: 14827 - RNA, 22 nt, Pseudomonas aeruginosa PA01
gcugguaguggucgagcaucau

SEQ ID NO: 14828 - RNA, 22 nt, Pseudomonas aeruginosa PA01
gcugcuggccaguucggagcgc

SEQ ID NO: 14829 - RNA, 22 nt, Pseudomonas aeruginosa PA01
gcugcuggcgguauucggccac

SEQ ID NO: 14830 - RNA, 22 nt, Pseudomonas aeruginosa PA01
gcugcuggugccgcgcgcccau

SEQ ID NO: 14831 - RNA, 22 nt, Pseudomonas aeruginosa PA01
gcuggccgaguuccgccgacag

SEQ ID NO: 14832 - RNA, 22 nt, Pseudomonas aeruginosa PA01
gcuggccgggucgcggcgccac

SEQ ID NO: 14833 - RNA, 22 nt, Pseudomonas aeruginosa PA01
uugcccgguugcagcggcacca

SEQ ID NO: 14834 - RNA, 22 nt, Pseudomonas aeruginosa PA01
uuucgcggacgaacuggcggau

SEQ ID NO: 14835 - RNA, 22 nt, Pseudomonas aeruginosa PA01
uuucuucaaccagggcgagguc

SEQ ID NO: 14836 - RNA, 23 nt, Pseudomonas aeruginosa PA01
agucgcgcgcccuggucggcccg

SEQ ID NO: 14837 - RNA, 22 nt, Pseudomonas aeruginosa PA01
uucuucagcuugaucacgucga

SEQ ID NO: 14838 - RNA, 22 nt, Pseudomonas aeruginosa PA01
uucgccggcggcccgccugucc

SEQ ID NO: 14839 - RNA, 22 nt, Pseudomonas aeruginosa PA01
uuccgggcaaaaauucagccga

SEQ ID NO: 14840 - RNA, 22 nt, Pseudomonas aeruginosa PA01
uuccucggcgccagcgccggca

SEQ ID NO: 14841 - RNA, 22 nt, Pseudomonas aeruginosa PA01
uuccaguuggcggcguugcagc

SEQ ID NO: 14842 - RNA, 22 nt, Pseudomonas aeruginosa PA01
uuccccggcgggcggcgcgacc

SEQ ID NO: 14843 - RNA, 22 nt, Pseudomonas aeruginosa PA01
uucccgccggaggugcgcgccc

SEQ ID NO: 14844 - RNA, 22 nt, Pseudomonas aeruginosa PA01
ugucggccuccugggaugccgc

SEQ ID NO: 14845 - RNA, 17 nt, Pseudomonas aeruginosa PA01
ugucccggcggcggggu

SEQ ID NO: 14846 - RNA, 22 nt, Pseudomonas aeruginosa PA01
aucccggccucgaugccgcgug

SEQ ID NO: 14847 - RNA, 22 nt, Pseudomonas aeruginosa PA01
aucacaccggaauacaucggcg

SEQ ID NO: 14848 - RNA, 22 nt, Pseudomonas aeruginosa PA01
aucagcgggaucagcaugccgc

SEQ ID NO: 14849 - RNA, 22 nt, Pseudomonas aeruginosa PA01
aucaggccgcaggcguggcccu

SEQ ID NO: 14850 - RNA, 22 nt, Pseudomonas aeruginosa PA01
auaggagaaguccgaggcgauu

SEQ ID NO: 14851 - RNA, 22 nt, Pseudomonas aeruginosa PA01
aucgagcgggcgccucggcgug

SEQ ID NO: 14852 - RNA, 22 nt, Pseudomonas aeruginosa PA01
aucuggagcaacaggucgcggg

SEQ ID NO: 14853 - RNA, 22 nt, Pseudomonas aeruginosa PA01
augccgaggaaaccgccgcacc

SEQ ID NO: 14854 - RNA, 22 nt, Pseudomonas aeruginosa PA01
augccggcgaugggcgacuucg

SEQ ID NO: 14855 - RNA, 22 nt, Pseudomonas aeruginosa PA01
augccggcgccaacggugccgu

SEQ ID NO: 14856 - RNA, 22 nt, Pseudomonas aeruginosa PA01
augccgucucagccagcgcagg

SEQ ID NO: 14857 - RNA, 19 nt, Pseudomonas aeruginosa PA01
augcggaugccguggcggc

SEQ ID NO: 14858 - RNA, 22 nt, Pseudomonas aeruginosa PA01
auggcgcguuguccucgccgcc

SEQ ID NO: 14859 - RNA, 22 nt, Pseudomonas aeruginosa PA01
cacgcgcuuccggcacuuccac

SEQ ID NO: 14860 - RNA, 22 nt, Pseudomonas aeruginosa PA01
caccagcaggcgcgaggcgauc

SEQ ID NO: 14861 - RNA, 22 nt, Pseudomonas aeruginosa PA01
caggaugcccagcagggucggc

SEQ ID NO: 14862 - RNA, 22 nt, Pseudomonas aeruginosa PA01
caggccaagcgccuggcgcagc

SEQ ID NO: 14863 - RNA, 22 nt, Pseudomonas aeruginosa PA01
caggccgaccaggaacgcggug

SEQ ID NO: 14864 - RNA, 22 nt, Pseudomonas aeruginosa PA01
caggccgaccgccucgcgcacu

SEQ ID NO: 14865 - RNA, 22 nt, Pseudomonas aeruginosa PA01
caggccgagaccgguguugccg

SEQ ID NO: 14866 - RNA, 22 nt, Pseudomonas aeruginosa PA01
caggccgcucagggucaacgga

SEQ ID NO: 14867 - RNA, 22 nt, Pseudomonas aeruginosa PA01
caggccggcgaggcguggccga

SEQ ID NO: 14868 - RNA, 19 nt, Pseudomonas aeruginosa PA01
cagcagcgggccgcaccug

SEQ ID NO: 14869 - RNA, 22 nt, Pseudomonas aeruginosa PA01
cagcagcucgccgagacggccg

SEQ ID NO: 14870 - RNA, 22 nt, Pseudomonas aeruginosa PA01
cagcuccagcagcccggcgccg

SEQ ID NO: 14871 - RNA, 22 nt, Pseudomonas aeruginosa PA01
cacuggagcagcgccuggaucg

SEQ ID NO: 14872 - RNA, 22 nt, Pseudomonas aeruginosa PA01
cagagccggucgaccgccuggc

SEQ ID NO: 14873 - RNA, 22 nt, Pseudomonas aeruginosa PA01
cagccagauggucggccucacg

SEQ ID NO: 14874 - RNA, 22 nt, Pseudomonas aeruginosa PA01
cagcccgcugaagaugccgcgc

SEQ ID NO: 14875 - RNA, 22 nt, Pseudomonas aeruginosa PA01
cagccggcgcaauggggaggac

SEQ ID NO: 14876 - RNA, 22 nt, Pseudomonas aeruginosa PA01
cagccugaaggacuggccggcg

SEQ ID NO: 14877 - RNA, 22 nt, Pseudomonas aeruginosa PA01
cagcgagcgggaguugcucgcc

SEQ ID NO: 14878 - RNA, 22 nt, Pseudomonas aeruginosa PA01
cagcgcagccaggacgaagagc

SEQ ID NO: 14879 - RNA, 22 nt, Pseudomonas aeruginosa PA01
cagcgccaccccgaggaucgcc

SEQ ID NO: 14880 - RNA, 22 nt, Pseudomonas aeruginosa PA01
cagcgccgccugggccgcgaca

SEQ ID NO: 14881 - RNA, 22 nt, Pseudomonas aeruginosa PA01
cagcgcgguacucgacggcagc

SEQ ID NO: 14882 - RNA, 22 nt, Pseudomonas aeruginosa PA01
cagcggcaacuggcggaggcgg

SEQ ID NO: 14883 - RNA, 22 nt, Pseudomonas aeruginosa PA01
cagcggugggccccacggcugc

SEQ ID NO: 14884 - RNA, 22 nt, Pseudomonas aeruginosa PA01
ugcccggcgacccgcgcggagg

SEQ ID NO: 14885 - RNA, 22 nt, Pseudomonas aeruginosa PA01
ugcgcagcugcgagcugaucug

SEQ ID NO: 14886 - RNA, 22 nt, Pseudomonas aeruginosa PA01
ugccgggaguagcgguucaccc

SEQ ID NO: 14887 - RNA, 22 nt, Pseudomonas aeruginosa PA01
ugccgccgccgaggcuucgcug

SEQ ID NO: 14888 - RNA, 22 nt, Pseudomonas aeruginosa PA01
ugccgccguccgccgagcuggu

SEQ ID NO: 14889 - RNA, 22 nt, Pseudomonas aeruginosa PA01
ugccggagcgcgccgagggcag

SEQ ID NO: 14890 - RNA, 22 nt, Pseudomonas aeruginosa PA01
ugccggagucuucgccugguug

SEQ ID NO: 14891 - RNA, 22 nt, Pseudomonas aeruginosa PA01
ugccggccacaugcucgggggu

SEQ ID NO: 14892 - RNA, 22 nt, Pseudomonas aeruginosa PA01
ugccggccauggccuccacguc

SEQ ID NO: 14893 - RNA, 21 nt, Pseudomonas aeruginosa PA01
ugccggccgccaggugcagga

SEQ ID NO: 14894 - RNA, 22 nt, Pseudomonas aeruginosa PA01
ugccggcgaggucggccaugac

SEQ ID NO: 14895 - RNA, 19 nt, Pseudomonas aeruginosa PA01
ugccggcgagucgaacaug

SEQ ID NO: 14896 - RNA, 22 nt, Pseudomonas aeruginosa PA01
ugccggcgccggagaggccgcu

SEQ ID NO: 14897 - RNA, 22 nt, Pseudomonas aeruginosa PA01
ugccggcggcagcggugccgug

SEQ ID NO: 14898 - RNA, 22 nt, Pseudomonas aeruginosa PA01
ugccggcggggcgcagcccuag

SEQ ID NO: 14899 - RNA, 18 nt, Pseudomonas aeruginosa PA01
ugcuccgggccuauucgc

SEQ ID NO: 14900 - RNA, 22 nt, Pseudomonas aeruginosa PA01
ugcugaagagcgucgagaucca

SEQ ID NO: 14901 - RNA, 22 nt, Pseudomonas aeruginosa PA01
ugcgccccugguucucgaugaa

SEQ ID NO: 14902 - RNA, 22 nt, Pseudomonas aeruginosa PA01
ugcgcgaggugcugccgcagug

SEQ ID NO: 14903 - RNA, 22 nt, Pseudomonas aeruginosa PA01
ugcgguggccccaccagagcug

SEQ ID NO: 14904 - RNA, 22 nt, Pseudomonas aeruginosa PA01
ugcgcgcguagccgguauuccu

SEQ ID NO: 14905 - RNA, 22 nt, Pseudomonas aeruginosa PA01
ugcgcggccgguagccgaaggu

SEQ ID NO: 14906 - RNA, 22 nt, Pseudomonas aeruginosa PA01
ugcgcugguggucgagcagcac

SEQ ID NO: 14907 - RNA, 21 nt, Pseudomonas aeruginosa PA01
ugcggacgauaugcgugcccc

SEQ ID NO: 14908 - RNA, 22 nt, Pseudomonas aeruginosa PA01
ugcggauggucaucgaccuggc

SEQ ID NO: 14909 - RNA, 22 nt, Pseudomonas aeruginosa PA01
ugcggcccggcucggugagggu

SEQ ID NO: 14910 - RNA, 22 nt, Pseudomonas aeruginosa PA01
ugcggcucuucagcccggagag

SEQ ID NO: 14911 - RNA, 22 nt, Pseudomonas aeruginosa PA01
ugaaguacugcagcaucuucuc

SEQ ID NO: 14912 - RNA, 22 nt, Pseudomonas aeruginosa PA01
ugagcgccugcucgcggcugau

SEQ ID NO: 14913 - RNA, 22 nt, Pseudomonas aeruginosa PA01
ugagcgccugcugcgcaccacc

SEQ ID NO: 14914 - RNA, 22 nt, Pseudomonas aeruginosa PA01
ugaugcggguuccgguagggga

SEQ ID NO: 14915 - RNA, 22 nt, Pseudomonas aeruginosa PA01
ugcagcggaucgagcaggccga

SEQ ID NO: 14916 - RNA, 22 nt, Pseudomonas aeruginosa PA01
ugguccucggugccggcgacau

SEQ ID NO: 14917 - RNA, 22 nt, Pseudomonas aeruginosa PA01
ugguccuggcggagcugcccaa

SEQ ID NO: 14918 - RNA, 22 nt, Pseudomonas aeruginosa PA01
ugguccuguucgcccugacccu

SEQ ID NO: 14919 - RNA, 18 nt, Pseudomonas aeruginosa PA01
ugggcgagcggucgucga

SEQ ID NO: 14920 - RNA, 22 nt, Pseudomonas aeruginosa PA01
ugggcgggcacugucaggguca

SEQ ID NO: 14921 - RNA, 23 nt, Pseudomonas aeruginosa PA01
ugcuggaagaagcggcgaugauc

SEQ ID NO: 14922 - RNA, 22 nt, Pseudomonas aeruginosa PA01
ugcuggagaaggacggcgagcg

SEQ ID NO: 14923 - RNA, 22 nt, Pseudomonas aeruginosa PA01
ugcuggagaaugucgcggcugc

SEQ ID NO: 14924 - RNA, 23 nt, Pseudomonas aeruginosa PA01
uggaagauccgcugcgcuuccuu

SEQ ID NO: 14925 - RNA, 23 nt, Pseudomonas aeruginosa PA01
uggaagcgcgguucgccgcuggc

SEQ ID NO: 14926 - RNA, 22 nt, Pseudomonas aeruginosa PA01
uggagcgcggcaacuggcgcgg

SEQ ID NO: 14927 - RNA, 22 nt, Pseudomonas aeruginosa PA01
uggagugcagaaaggcuucgac

SEQ ID NO: 14928 - RNA, 22 nt, Pseudomonas aeruginosa PA01
uggcagcucagggugcucauga

SEQ ID NO: 14929 - RNA, 22 nt, Pseudomonas aeruginosa PA01
uggccgggaucuccaggcugac

SEQ ID NO: 14930 - RNA, 22 nt, Pseudomonas aeruginosa PA01
uggcggagcgccaggcggcguu

SEQ ID NO: 14931 - RNA, 22 nt, Pseudomonas aeruginosa PA01
uggcgaccuucaagcgucggcu

SEQ ID NO: 14932 - RNA, 22 nt, Pseudomonas aeruginosa PA01
uggcgcgcucgaaguaacugaa

SEQ ID NO: 14933 - RNA, 22 nt, Pseudomonas aeruginosa PA01
uggcgcgggcguugagcucggc

SEQ ID NO: 14934 - RNA, 22 nt, Pseudomonas aeruginosa PA01
ucaccggccugggcggcgagug

SEQ ID NO: 14935 - RNA, 22 nt, Pseudomonas aeruginosa PA01
ucaccggcuacgaccugggcau

SEQ ID NO: 14936 - RNA, 22 nt, Pseudomonas aeruginosa PA01
ucaggccggcgcccagggaguc

SEQ ID NO: 14937 - RNA, 22 nt, Pseudomonas aeruginosa PA01
ucagcgccggaucgugcaguug

SEQ ID NO: 14938 - RNA, 22 nt, Pseudomonas aeruginosa PA01
ucccggacgaugucggcacuga

SEQ ID NO: 14939 - RNA, 22 nt, Pseudomonas aeruginosa PA01
ucccggcgcgguccaggcgcgg

SEQ ID NO: 14940 - RNA, 22 nt, Pseudomonas aeruginosa PA01
uccccggucgaugcggaagcuc

SEQ ID NO: 14941 - RNA, 22 nt, Pseudomonas aeruginosa PA01
ucccaggcggucagucgcgagc

SEQ ID NO: 14942 - RNA, 22 nt, Pseudomonas aeruginosa PA01
uccagguagcgcucgaggaagg

SEQ ID NO: 14943 - RNA, 22 nt, Pseudomonas aeruginosa PA01
uacaacuucggccaggaccuga

SEQ ID NO: 14944 - RNA, 22 nt, Pseudomonas aeruginosa PA01
uagcuccagccgaagccuucga

SEQ ID NO: 14945 - RNA, 22 nt, Pseudomonas aeruginosa PA01
uagcccugguucgugcccugca

SEQ ID NO: 14946 - RNA, 22 nt, Pseudomonas aeruginosa PA01
uagcgcgcauucggaucgcccg

SEQ ID NO: 14947 - RNA, 19 nt, Pseudomonas aeruginosa PA01
uauuuccagcgcuacaucc

SEQ ID NO: 14948 - RNA, 22 nt, Pseudomonas aeruginosa PA01
ucgacccggcuuuccgccucgg

SEQ ID NO: 14949 - RNA, 22 nt, Pseudomonas aeruginosa PA01
ucgagcgcuugcgcugaugcag

SEQ ID NO: 14950 - RNA, 22 nt, Pseudomonas aeruginosa PA01
ucgcgcaggucggcgcggguga

SEQ ID NO: 14951 - RNA, 22 nt, Pseudomonas aeruginosa PA01
ucgcgccgaagcgccgggaaug

SEQ ID NO: 14952 - RNA, 22 nt, Pseudomonas aeruginosa PA01
ucgcggcuucgccgugguggcc

SEQ ID NO: 14953 - RNA, 19 nt, Pseudomonas aeruginosa PA01
ucgcugcaacacgucaagc

SEQ ID NO: 14954 - RNA, 22 nt, Pseudomonas aeruginosa PA01
ucggccggcagcucguaggcau

SEQ ID NO: 14955 - RNA, 22 nt, Pseudomonas aeruginosa PA01
ucggccuccuucagcuuggcca

SEQ ID NO: 14956 - RNA, 18 nt, Pseudomonas aeruginosa PA01
ucggcgcgcacucggugg

SEQ ID NO: 14957 - RNA, 23 nt, Pseudomonas aeruginosa PA01
ucggcgcgggacuugagggucgc

SEQ ID NO: 14958 - RNA, 22 nt, Pseudomonas aeruginosa PA01
ucgcccugggcgcggcggaagc

SEQ ID NO: 14959 - RNA, 22 nt, Pseudomonas aeruginosa PA01
ucgccgccgcuacguccuacuu

SEQ ID NO: 14960 - RNA, 19 nt, Pseudomonas aeruginosa PA01
ucgccgccuucgccgcacc

SEQ ID NO: 14961 - RNA, 22 nt, Pseudomonas aeruginosa PA01
ucgccggcaaagucgagggcuu

SEQ ID NO: 14962 - RNA, 22 nt, Pseudomonas aeruginosa PA01
ucgccggcaucugggaggccua

SEQ ID NO: 14963 - RNA, 22 nt, Pseudomonas aeruginosa PA01
ucgccgggaaucggcgugcagc

SEQ ID NO: 14964 - RNA, 22 nt, Pseudomonas aeruginosa PA01
ucgccgggcgccgcugggagug

SEQ ID NO: 14965 - RNA, 22 nt, Pseudomonas aeruginosa PA01
uccugcggcgggccgucaugca

SEQ ID NO: 14966 - RNA, 22 nt, Pseudomonas aeruginosa PA01
uccugcucgaucacggccuggu

SEQ ID NO: 14967 - RNA, 22 nt, Pseudomonas aeruginosa PA01
uccgaucggccugcgccacgau

SEQ ID NO: 14968 - RNA, 22 nt, Pseudomonas aeruginosa PA01
uccgccgcguuccacuccagcg

SEQ ID NO: 14969 - RNA, 22 nt, Pseudomonas aeruginosa PA01
uccgccggcgacagcaguucgg

SEQ ID NO: 14970 - RNA, 22 nt, Pseudomonas aeruginosa PA01
uccggcgggcagccgcugugga

SEQ ID NO: 14971 - RNA, 22 nt, Pseudomonas aeruginosa PA01
ucggucgguugcgccggguagu

SEQ ID NO: 14972 - RNA, 22 nt, Pseudomonas aeruginosa PA01
ucggucucguaggcguagaagc

SEQ ID NO: 14973 - RNA, 22 nt, Pseudomonas aeruginosa PA01
ucgucggcccgcugcaacugcc

SEQ ID NO: 14974 - RNA, 22 nt, Pseudomonas aeruginosa PA01
ucgucggcgaaaugccggucgc

SEQ ID NO: 14975 - RNA, 22 nt, Pseudomonas aeruginosa PA01
ucgucggcgccaacgaccuggu

SEQ ID NO: 14976 - RNA, 22 nt, Pseudomonas aeruginosa PA01
ucucgucgcugcuggcaccgac

SEQ ID NO: 14977 - RNA, 23 nt, Pseudomonas aeruginosa PA01
ucugcaggaagccuggcagcagc

SEQ ID NO: 14978 - RNA, 20 nt, Pseudomonas aeruginosa PA01
ucuccggcgaagagcugcgc

SEQ ID NO: 14979 - RNA, 22 nt, Pseudomonas aeruginosa PA01
ucuccgucgagcggauccaggc

SEQ ID NO: 14980 - RNA, 23 nt, Pseudomonas aeruginosa PA01
ucuugcccuucuucucgacgguc

SEQ ID NO: 14981 - RNA, 22 nt, Pseudomonas aeruginosa PA01
ucuggcucgccaccggccgggu

SEQ ID NO: 14982 - RNA, 23 nt, Pseudomonas aeruginosa PA01
cguccggacgacgacccggcguu

SEQ ID NO: 14983 - RNA, 22 nt, Pseudomonas aeruginosa PA01
cgucgagcagaccaaccgggcg

SEQ ID NO: 14984 - RNA, 22 nt, Pseudomonas aeruginosa PA01
cgucgagccgggcgagggacuc

SEQ ID NO: 14985 - RNA, 22 nt, Pseudomonas aeruginosa PA01
cgucgagcgccgcuucgucagg

SEQ ID NO: 14986 - RNA, 22 nt, Pseudomonas aeruginosa PA01
cgucggccuguggaucgccgcc

SEQ ID NO: 14987 - RNA, 22 nt, Pseudomonas aeruginosa PA01
cgugcagcgggugccggaaacc

SEQ ID NO: 14988 - RNA, 20 nt, Pseudomonas aeruginosa PA01
cucaggccuggagccgagcg

SEQ ID NO: 14989 - RNA, 22 nt, Pseudomonas aeruginosa PA01
cucaggcuggcagcgacgcucc

SEQ ID NO: 14990 - RNA, 20 nt, Pseudomonas aeruginosa PA01
cuccccgggccauuuccugc

SEQ ID NO: 14991 - RNA, 22 nt, Pseudomonas aeruginosa PA01
cucccggcgaaggcgcgaucgu

SEQ ID NO: 14992 - RNA, 23 nt, Pseudomonas aeruginosa PA01
cucugcuucggcuucuggcccgg

SEQ ID NO: 14993 - RNA, 22 nt, Pseudomonas aeruginosa PA01
cucuucuucguugaucggcgag

SEQ ID NO: 14994 - RNA, 19 nt, Pseudomonas aeruginosa PA01
cucggcccgcuguggcucg

SEQ ID NO: 14995 - RNA, 22 nt, Pseudomonas aeruginosa PA01
cucggcccuggugauccucgcc

SEQ ID NO: 14996 - RNA, 22 nt, Pseudomonas aeruginosa PA01
cucggucagguagccgccuucc

SEQ ID NO: 14997 - RNA, 20 nt, Pseudomonas aeruginosa PA01
cucuacaucgccuucggcgc

SEQ ID NO: 14998 - RNA, 22 nt, Pseudomonas aeruginosa PA01
cuccuucuaucuuggucuacac

SEQ ID NO: 14999 - RNA, 22 nt, Pseudomonas aeruginosa PA01
cuccggccaaccgccacggauc

SEQ ID NO: 15000 - RNA, 22 nt, Pseudomonas aeruginosa PA01
cuccggcgugaucagggucucg

SEQ ID NO: 15001 - RNA, 22 nt, Pseudomonas aeruginosa PA01
cuccggcuucggcgagcagagc

SEQ ID NO: 15002 - RNA, 22 nt, Pseudomonas aeruginosa PA01
cuccugcggcaugggugcguuc

SEQ ID NO: 15003 - RNA, 22 nt, Pseudomonas aeruginosa PA01
cgggcgaggguaccgggagcua

SEQ ID NO: 15004 - RNA, 22 nt, Pseudomonas aeruginosa PA01
cgggcgccgggugcucccgguc

SEQ ID NO: 15005 - RNA, 22 nt, Pseudomonas aeruginosa PA01
cgggcgccguggaucagccgcg

SEQ ID NO: 15006 - RNA, 22 nt, Pseudomonas aeruginosa PA01
cggggagccucgucgacgaggc

SEQ ID NO: 15007 - RNA, 22 nt, Pseudomonas aeruginosa PA01
cggggcaagcuguccggaccgc

SEQ ID NO: 15008 - RNA, 22 nt, Pseudomonas aeruginosa PA01
cggguggucuucgagcguccgc

SEQ ID NO: 15009 - RNA, 22 nt, Pseudomonas aeruginosa PA01
cggucgcgcagggcagccggca

SEQ ID NO: 15010 - RNA, 22 nt, Pseudomonas aeruginosa PA01
cggucggcuggcuggcgcugcc

SEQ ID NO: 15011 - RNA, 22 nt, Pseudomonas aeruginosa PA01
cggucucuggugaucagcggcu

SEQ ID NO: 15012 - RNA, 22 nt, Pseudomonas aeruginosa PA01
cggugcaggcguuccgcgagcg

SEQ ID NO: 15013 - RNA, 22 nt, Pseudomonas aeruginosa PA01
cggugcgccugccguuccugau

SEQ ID NO: 15014 - RNA, 23 nt, Pseudomonas aeruginosa PA01
cggugggcgccggccauggccuc

SEQ ID NO: 15015 - RNA, 22 nt, Pseudomonas aeruginosa PA01
cggcugcugcgggucggccuug

SEQ ID NO: 15016 - RNA, 22 nt, Pseudomonas aeruginosa PA01
cggcuggaucucgcacuggcag

SEQ ID NO: 15017 - RNA, 22 nt, Pseudomonas aeruginosa PA01
cggcuguucgucgccggcggug

SEQ ID NO: 15018 - RNA, 22 nt, Pseudomonas aeruginosa PA01
cggcucccggcuggccgcugaa

SEQ ID NO: 15019 - RNA, 22 nt, Pseudomonas aeruginosa PA01
cggcucuggcuaagcucgaccu

SEQ ID NO: 15020 - RNA, 22 nt, Pseudomonas aeruginosa PA01
cggaggcguggguuucgcauuc

SEQ ID NO: 15021 - RNA, 22 nt, Pseudomonas aeruginosa PA01
cggaucuucuccaucgccgcuu

SEQ ID NO: 15022 - RNA, 22 nt, Pseudomonas aeruginosa PA01
cggcgaccacguugggguucuc

SEQ ID NO: 15023 - RNA, 22 nt, Pseudomonas aeruginosa PA01
cggcgacgaucaucuucggcuu

SEQ ID NO: 15024 - RNA, 22 nt, Pseudomonas aeruginosa PA01
cggcgagcaacgccaggugcag

SEQ ID NO: 15025 - RNA, 22 nt, Pseudomonas aeruginosa PA01
cggcgaggaucugcguggucgc

SEQ ID NO: 15026 - RNA, 22 nt, Pseudomonas aeruginosa PA01
cggcgcaggguauggcgguuca

SEQ ID NO: 15027 - RNA, 22 nt, Pseudomonas aeruginosa PA01
cggcgccaacgaggcggcgaug

SEQ ID NO: 15028 - RNA, 22 nt, Pseudomonas aeruginosa PA01
cggcgcgcuggugaucggcugg

SEQ ID NO: 15029 - RNA, 23 nt, Pseudomonas aeruginosa PA01
cggcgcuuccugcaccuggcgcc

SEQ ID NO: 15030 - RNA, 22 nt, Pseudomonas aeruginosa PA01
cggcgggcauagccgagcagcg

SEQ ID NO: 15031 - RNA, 22 nt, Pseudomonas aeruginosa PA01
cggcguacgcuggaggcgaugc

SEQ ID NO: 15032 - RNA, 22 nt, Pseudomonas aeruginosa PA01
gaccaggccgggcaacugcgcg

SEQ ID NO: 15033 - RNA, 22 nt, Pseudomonas aeruginosa PA01
gaccaggccggugaguccgccc

SEQ ID NO: 15034 - RNA, 22 nt, Pseudomonas aeruginosa PA01
gacagcgccuggcgcgcggauu

SEQ ID NO: 15035 - RNA, 22 nt, Pseudomonas aeruginosa PA01
gacagcggacgauaggcgagca

SEQ ID NO: 15036 - RNA, 23 nt, Pseudomonas aeruginosa PA01
gacagcuggaucgcgcccagcgc

SEQ ID NO: 15037 - RNA, 22 nt, Pseudomonas aeruginosa PA01
gaagcgagugucgccgccgacg

SEQ ID NO: 15038 - RNA, 22 nt, Pseudomonas aeruginosa PA01
gaagaugcugcccuccaccgcg

SEQ ID NO: 15039 - RNA, 22 nt, Pseudomonas aeruginosa PA01
gaagugggcugggccguugguc

SEQ ID NO: 15040 - RNA, 22 nt, Pseudomonas aeruginosa PA01
cugccccggcgcggcugagcau

SEQ ID NO: 15041 - RNA, 22 nt, Pseudomonas aeruginosa PA01
cugcaggccgaucucgcggauc

SEQ ID NO: 15042 - RNA, 22 nt, Pseudomonas aeruginosa PA01
cugcuuucgaagcgcucgcgcc

SEQ ID NO: 15043 - RNA, 22 nt, Pseudomonas aeruginosa PA01
cuggaaggcgagcaucuucaug

SEQ ID NO: 15044 - RNA, 22 nt, Pseudomonas aeruginosa PA01
cuggaagucggcguggugcaug

SEQ ID NO: 15045 - RNA, 22 nt, Pseudomonas aeruginosa PA01
cuggacgcccaugcggacgccc

SEQ ID NO: 15046 - RNA, 22 nt, Pseudomonas aeruginosa PA01
cugcccgggagcggugcgcucg

SEQ ID NO: 15047 - RNA, 22 nt, Pseudomonas aeruginosa PA01
cugccggccaggcggguguuca

SEQ ID NO: 15048 - RNA, 22 nt, Pseudomonas aeruginosa PA01
cugccggcgcaguccugcaugg

SEQ ID NO: 15049 - RNA, 22 nt, Pseudomonas aeruginosa PA01
cugccggcggauggcggguugc

SEQ ID NO: 15050 - RNA, 22 nt, Pseudomonas aeruginosa PA01
cugcgaggcgauccauccgggc

SEQ ID NO: 15051 - RNA, 22 nt, Pseudomonas aeruginosa PA01
cugcggcggaugggccggcuga

SEQ ID NO: 15052 - RNA, 22 nt, Pseudomonas aeruginosa PA01
cugggcgaucagcggccgcagg

SEQ ID NO: 15053 - RNA, 18 nt, Pseudomonas aeruginosa PA01
cuggccggaggcgaucga

SEQ ID NO: 15054 - RNA, 22 nt, Pseudomonas aeruginosa PA01
cuggcggccguagccgagguug

SEQ ID NO: 15055 - RNA, 22 nt, Pseudomonas aeruginosa PA01
cuggauuuuuugccggaaagcc

SEQ ID NO: 15056 - RNA, 21 nt, Pseudomonas aeruginosa PA01
gccauccguucucgcggcgcu

SEQ ID NO: 15057 - RNA, 22 nt, Pseudomonas aeruginosa PA01
gcccacggcgcugccacagaag

SEQ ID NO: 15058 - RNA, 22 nt, Pseudomonas aeruginosa PA01
gcccaggcccuggcgcgggcuc

SEQ ID NO: 15059 - RNA, 22 nt, Pseudomonas aeruginosa PA01
gcccagggacagcccgggcgua

SEQ ID NO: 15060 - RNA, 22 nt, Pseudomonas aeruginosa PA01
gccaggccugcuacccgcuggc

SEQ ID NO: 15061 - RNA, 22 nt, Pseudomonas aeruginosa PA01
gccaggccugcucguguuccgg

SEQ ID NO: 15062 - RNA, 22 nt, Pseudomonas aeruginosa PA01
gccaggggcugcgccgcucagg

SEQ ID NO: 15063 - RNA, 22 nt, Pseudomonas aeruginosa PA01
gccagccugcucgcuggcgagc

SEQ ID NO: 15064 - RNA, 22 nt, Pseudomonas aeruginosa PA01
gccagcgcguccgggucauggg

SEQ ID NO: 15065 - RNA, 22 nt, Pseudomonas aeruginosa PA01
gccaggccaccgcgcucaacca

SEQ ID NO: 15066 - RNA, 22 nt, Pseudomonas aeruginosa PA01
gccaggccuaugccgcguacca

SEQ ID NO: 15067 - RNA, 22 nt, Pseudomonas aeruginosa PA01
gccccgcgggaggacggcugcu

SEQ ID NO: 15068 - RNA, 22 nt, Pseudomonas aeruginosa PA01
gccccucgcggaucucggcgau

SEQ ID NO: 15069 - RNA, 20 nt, Pseudomonas aeruginosa PA01
gcccggccgcuguggcugcg

SEQ ID NO: 15070 - RNA, 22 nt, Pseudomonas aeruginosa PA01
gcccggcgaagucucgcggccg

SEQ ID NO: 15071 - RNA, 22 nt, Pseudomonas aeruginosa PA01
gcccggcuucccggcggaaagu

SEQ ID NO: 15072 - RNA, 22 nt, Pseudomonas aeruginosa PA01
gcccgucguagccggcggcgug

SEQ ID NO: 15073 - RNA, 21 nt, Pseudomonas aeruginosa PA01
gccgcacgcugcccuccaggc

SEQ ID NO: 15074 - RNA, 22 nt, Pseudomonas aeruginosa PA01
gccgagcgagaacguuccgccg

SEQ ID NO: 15075 - RNA, 21 nt, Pseudomonas aeruginosa PA01
gccgagcgauucggcgggagg

SEQ ID NO: 15076 - RNA, 22 nt, Pseudomonas aeruginosa PA01
gccgcacacgcccagcagcgau

SEQ ID NO: 15077 - RNA, 18 nt, Pseudomonas aeruginosa PA01
gccagcagcgguucggcc

SEQ ID NO: 15078 - RNA, 19 nt, Pseudomonas aeruginosa PA01
gcaguucagcgacaacccg

SEQ ID NO: 15079 - RNA, 22 nt, Pseudomonas aeruginosa PA01
gcaucgcgaccuuccgcgugga

SEQ ID NO: 15080 - RNA, 22 nt, Pseudomonas aeruginosa PA01
gccacuccucguuccaggcuga

SEQ ID NO: 15081 - RNA, 22 nt, Pseudomonas aeruginosa PA01
gcagcucgaccaggccgggcag

SEQ ID NO: 15082 - RNA, 22 nt, Pseudomonas aeruginosa PA01
gcagcuggaaguugucaacgaa

SEQ ID NO: 15083 - RNA, 22 nt, Pseudomonas aeruginosa PA01
gcagcgccaguugcuggacacc

SEQ ID NO: 15084 - RNA, 19 nt, Pseudomonas aeruginosa PA01
gcagcgucggcgugcccgg

SEQ ID NO: 15085 - RNA, 22 nt, Pseudomonas aeruginosa PA01
gcaggccggcgagguuggcggu

SEQ ID NO: 15086 - RNA, 22 nt, Pseudomonas aeruginosa PA01
gcaggcgauccuggagcggcgc

SEQ ID NO: 15087 - RNA, 22 nt, Pseudomonas aeruginosa PA01
gcaggcgcgccaggugcagcga

SEQ ID NO: 15088 - RNA, 22 nt, Pseudomonas aeruginosa PA01
gcaggcgcgccgggcccugcuc

SEQ ID NO: 15089 - RNA, 22 nt, Pseudomonas aeruginosa PA01
gcagucuucagcaugccgcguc

SEQ ID NO: 15090 - RNA, 22 nt, Pseudomonas aeruginosa PA01
gcagaugguugucggccugggc

SEQ ID NO: 15091 - RNA, 22 nt, Pseudomonas aeruginosa PA01
gcagcagggcgaggaucgcccg

SEQ ID NO: 15092 - RNA, 22 nt, Pseudomonas aeruginosa PA01
gacgcaggcaugcgggcgcugc

SEQ ID NO: 15093 - RNA, 22 nt, Pseudomonas aeruginosa PA01
gacgagcugauggucagccgca

SEQ ID NO: 15094 - RNA, 22 nt, Pseudomonas aeruginosa PA01
gacgaggacgaggaugucgagg

SEQ ID NO: 15095 - RNA, 22 nt, Pseudomonas aeruginosa PA01
gacccgccgcgaugcgcuggua

SEQ ID NO: 15096 - RNA, 22 nt, Pseudomonas aeruginosa PA01
gagagcgccaugccacugccca

SEQ ID NO: 15097 - RNA, 22 nt, Pseudomonas aeruginosa PA01
gagcuggaagcugcgcuggucg

SEQ ID NO: 15098 - RNA, 22 nt, Pseudomonas aeruginosa PA01
gagcuggaagugcucgcggugc

SEQ ID NO: 15099 - RNA, 22 nt, Pseudomonas aeruginosa PA01
gagcuggagaaccucggccugc

SEQ ID NO: 15100 - RNA, 22 nt, Pseudomonas aeruginosa PA01
gagcuggaugccgcgcagugcc

SEQ ID NO: 15101 - RNA, 22 nt, Pseudomonas aeruginosa PA01
gaggaaguggccagcgcgcugg

SEQ ID NO: 15102 - RNA, 22 nt, Pseudomonas aeruginosa PA01
gagcacuacacgaagcggcgcc

SEQ ID NO: 15103 - RNA, 21 nt, Pseudomonas aeruginosa PA01
gagcagcucgggcggcgcgac

SEQ ID NO: 15104 - RNA, 22 nt, Pseudomonas aeruginosa PA01
gagcaggccgcucuccucgccg

SEQ ID NO: 15105 - RNA, 22 nt, Pseudomonas aeruginosa PA01
gagcaggccguugccggacagu

SEQ ID NO: 15106 - RNA, 20 nt, Pseudomonas aeruginosa PA01
gagccggccgcggucgucgc

SEQ ID NO: 15107 - RNA, 22 nt, Pseudomonas aeruginosa PA01
gagcgccaggugauccucggca

SEQ ID NO: 15108 - RNA, 22 nt, Pseudomonas aeruginosa PA01
gagcgccaugcgccaggcggcc

SEQ ID NO: 15109 - RNA, 22 nt, Pseudomonas aeruginosa PA01
gagcgccugcaggcgccgcugg

SEQ ID NO: 15110 - RNA, 22 nt, Pseudomonas aeruginosa PA01
gagcgcgagguggagcgggucg

SEQ ID NO: 15111 - RNA, 22 nt, Pseudomonas aeruginosa PA01
gagcgcgccaccgccagcuuca

SEQ ID NO: 15112 - RNA, 22 nt, Pseudomonas aeruginosa PA01
gagcgcugcaagccggcgaguc

SEQ ID NO: 15113 - RNA, 19 nt, Pseudomonas aeruginosa PA01
gaugggcgaggcggaagcc

SEQ ID NO: 15114 - RNA, 22 nt, Pseudomonas aeruginosa PA01
gauggcggauguugccgacgcu

SEQ ID NO: 15115 - RNA, 22 nt, Pseudomonas aeruginosa PA01
gauggcggccagggccaguggc

SEQ ID NO: 15116 - RNA, 22 nt, Pseudomonas aeruginosa PA01
gaggugacacuucuccagcauu

SEQ ID NO: 15117 - RNA, 22 nt, Pseudomonas aeruginosa PA01
gaugcuggcgaaguagccgcug

SEQ ID NO: 15118 - RNA, 22 nt, Pseudomonas aeruginosa PA01
gaugcuggucgcgcggagucac

SEQ ID NO: 15119 - RNA, 22 nt, Pseudomonas aeruginosa PA01
gauggagcaggugcgcgauggc

SEQ ID NO: 15120 - RNA, 22 nt, Pseudomonas aeruginosa PA01
gaggccccgggccggcggaacg

SEQ ID NO: 15121 - RNA, 22 nt, Pseudomonas aeruginosa PA01
gaggcgccacucggcagccugc

SEQ ID NO: 15122 - RNA, 22 nt, Pseudomonas aeruginosa PA01
gaggcgcggaucgaguucauca

SEQ ID NO: 15123 - RNA, 22 nt, Pseudomonas aeruginosa PA01
gaggaugcgcugcggcuucucg

SEQ ID NO: 15124 - RNA, 22 nt, Pseudomonas aeruginosa PA01
gaggcaguucaccuggcgguug

SEQ ID NO: 15125 - RNA, 22 nt, Pseudomonas aeruginosa PA01
gagggccgggugaucagcgucg

SEQ ID NO: 15126 - RNA, 22 nt, Pseudomonas aeruginosa PA01
ccagccggcgaggcuccagcgg

SEQ ID NO: 15127 - RNA, 22 nt, Pseudomonas aeruginosa PA01
ccaggccgccagccguucggcc

SEQ ID NO: 15128 - RNA, 22 nt, Pseudomonas aeruginosa PA01
ccaggccgccgacguagcgauc

SEQ ID NO: 15129 - RNA, 22 nt, Pseudomonas aeruginosa PA01
ccaggccgucgacggcgcucug

SEQ ID NO: 15130 - RNA, 22 nt, Pseudomonas aeruginosa PA01
ccagccugcacggcggccagga

SEQ ID NO: 15131 - RNA, 22 nt, Pseudomonas aeruginosa PA01
ccagcgccagcaggcguugcag

SEQ ID NO: 15132 - RNA, 22 nt, Pseudomonas aeruginosa PA01
ccagcgccagucgcugcucgcc

SEQ ID NO: 15133 - RNA, 22 nt, Pseudomonas aeruginosa PA01
ccagcgccgacgggcucgacau

SEQ ID NO: 15134 - RNA, 22 nt, Pseudomonas aeruginosa PA01
ccagcgccuggaccuccaggcc

SEQ ID NO: 15135 - RNA, 22 nt, Pseudomonas aeruginosa PA01
ccagcgcggcggccaccaggcg

SEQ ID NO: 15136 - RNA, 22 nt, Pseudomonas aeruginosa PA01
ccagcggccgcaaccagggcga

SEQ ID NO: 15137 - RNA, 22 nt, Pseudomonas aeruginosa PA01
cccagcucgacaucccggcgcu

SEQ ID NO: 15138 - RNA, 22 nt, Pseudomonas aeruginosa PA01
cccagggcgccuucgacgaccc

SEQ ID NO: 15139 - RNA, 22 nt, Pseudomonas aeruginosa PA01
cccacgaggcggccgaggcggc

SEQ ID NO: 15140 - RNA, 21 nt, Pseudomonas aeruginosa PA01
cccacggcuaccugaucgacc

SEQ ID NO: 15141 - RNA, 22 nt, Pseudomonas aeruginosa PA01
ccaggcuccgcgcggugccgag

SEQ ID NO: 15142 - RNA, 22 nt, Pseudomonas aeruginosa PA01
ccaggcucgcggaugcgcgcag

SEQ ID NO: 15143 - RNA, 22 nt, Pseudomonas aeruginosa PA01
ccagggcaucgagacuuccggc

SEQ ID NO: 15144 - RNA, 22 nt, Pseudomonas aeruginosa PA01
ccagggccggcagcagccagag

SEQ ID NO: 15145 - RNA, 21 nt, Pseudomonas aeruginosa PA01
ccgagcaguuucucgaggcgc

SEQ ID NO: 15146 - RNA, 19 nt, Pseudomonas aeruginosa PA01
ccgagccgccgacgugguu

SEQ ID NO: 15147 - RNA, 21 nt, Pseudomonas aeruginosa PA01
ccgagcgcaaggggcgcgagc

SEQ ID NO: 15148 - RNA, 22 nt, Pseudomonas aeruginosa PA01
ccgagcgcgcccucgaacugau

SEQ ID NO: 15149 - RNA, 22 nt, Pseudomonas aeruginosa PA01
ccgagcgcuucgcccaugucgg

SEQ ID NO: 15150 - RNA, 22 nt, Pseudomonas aeruginosa PA01
cccgccugggugcccuggcuga

SEQ ID NO: 15151 - RNA, 22 nt, Pseudomonas aeruginosa PA01
cccgcgacuggaauccgcgaac

SEQ ID NO: 15152 - RNA, 22 nt, Pseudomonas aeruginosa PA01
cccgcgccacgaggaacgcgug

SEQ ID NO: 15153 - RNA, 21 nt, Pseudomonas aeruginosa PA01
cccggccgagagcgggcagga

SEQ ID NO: 15154 - RNA, 22 nt, Pseudomonas aeruginosa PA01
cccggccgccaccgucgagcag

SEQ ID NO: 15155 - RNA, 22 nt, Pseudomonas aeruginosa PA01
cccggccugccuggacgcgcug

SEQ ID NO: 15156 - RNA, 22 nt, Pseudomonas aeruginosa PA01
cccggcgcagaugcgcgucgau

SEQ ID NO: 15157 - RNA, 22 nt, Pseudomonas aeruginosa PA01
cccggcguugaucccgcgggcg

SEQ ID NO: 15158 - RNA, 22 nt, Pseudomonas aeruginosa PA01
cccggcucugcucggcgugggc

SEQ ID NO: 15159 - RNA, 20 nt, Pseudomonas aeruginosa PA01
ccggccgaagugcucgcggu

SEQ ID NO: 15160 - RNA, 22 nt, Pseudomonas aeruginosa PA01
ccggccgaggcgccggaccagg

SEQ ID NO: 15161 - RNA, 22 nt, Pseudomonas aeruginosa PA01
ccggccggguuuccuggguaug

SEQ ID NO: 15162 - RNA, 22 nt, Pseudomonas aeruginosa PA01
ccggccugcggcgcuuccacga

SEQ ID NO: 15163 - RNA, 22 nt, Pseudomonas aeruginosa PA01
ccggccuggcgccggcuucggc

SEQ ID NO: 15164 - RNA, 22 nt, Pseudomonas aeruginosa PA01
ccggccuuggccagcggcgcac

SEQ ID NO: 15165 - RNA, 23 nt, Pseudomonas aeruginosa PA01
ccggcgacacccucuacgugguc

SEQ ID NO: 15166 - RNA, 22 nt, Pseudomonas aeruginosa PA01
ccggcgacgugcugcgccuucu

SEQ ID NO: 15167 - RNA, 22 nt, Pseudomonas aeruginosa PA01
ccggcgauuuccucgccggcgu

SEQ ID NO: 15168 - RNA, 22 nt, Pseudomonas aeruginosa PA01
ccggcgcgccagaacucgaccg

SEQ ID NO: 15169 - RNA, 23 nt, Pseudomonas aeruginosa PA01
ccggcggcgaccuggcgguucug

SEQ ID NO: 15170 - RNA, 22 nt, Pseudomonas aeruginosa PA01
ccggcgucaauggccucgaggc

SEQ ID NO: 15171 - RNA, 20 nt, Pseudomonas aeruginosa PA01
ccggcgucgaaguucggcag

SEQ ID NO: 15172 - RNA, 22 nt, Pseudomonas aeruginosa PA01
ccggcuaccagguuccggcgcg

SEQ ID NO: 15173 - RNA, 22 nt, Pseudomonas aeruginosa PA01
ccggcuccgccgguugcggcau

SEQ ID NO: 15174 - RNA, 22 nt, Pseudomonas aeruginosa PA01
ccggcucggcgacgccgaggua

SEQ ID NO: 15175 - RNA, 22 nt, Pseudomonas aeruginosa PA01
ccggcuucggcgucuucucgcu

SEQ ID NO: 15176 - RNA, 22 nt, Pseudomonas aeruginosa PA01
ccgggcaguucggccucggcug

SEQ ID NO: 15177 - RNA, 22 nt, Pseudomonas aeruginosa PA01
ccgggcgcccggacgugcagcg

SEQ ID NO: 15178 - RNA, 22 nt, Pseudomonas aeruginosa PA01
caggggcaggcugucgcggaag

SEQ ID NO: 15179 - RNA, 22 nt, Pseudomonas aeruginosa PA01
caggcgcggaugcggcccagcg

SEQ ID NO: 15180 - RNA, 22 nt, Pseudomonas aeruginosa PA01
caggcuggcguugcccuugccg

SEQ ID NO: 15181 - RNA, 22 nt, Pseudomonas aeruginosa PA01
cagggccgccuuggccucgcgc

SEQ ID NO: 15182 - RNA, 22 nt, Pseudomonas aeruginosa PA01
cagggccggcauuuccccgagc

SEQ ID NO: 15183 - RNA, 22 nt, Pseudomonas aeruginosa PA01
cagcuggagcagaugaaagccu

SEQ ID NO: 15184 - RNA, 22 nt, Pseudomonas aeruginosa PA01
cagcucggcaggcuuuccggca

SEQ ID NO: 15185 - RNA, 22 nt, Pseudomonas aeruginosa PA01
ccagaacugcuuggagaucucg

SEQ ID NO: 15186 - RNA, 22 nt, Pseudomonas aeruginosa PA01
ccagcagcgaugcgcccagcag

SEQ ID NO: 15187 - RNA, 22 nt, Pseudomonas aeruginosa PA01
ccagcagggucuucagcaguuc

SEQ ID NO: 15188 - RNA, 22 nt, Pseudomonas aeruginosa PA01
caugcuugccgguuuguugcag

SEQ ID NO: 15189 - RNA, 22 nt, Pseudomonas aeruginosa PA01
cgaagcgccugggcugccgcca

SEQ ID NO: 15190 - RNA, 22 nt, Pseudomonas aeruginosa PA01
ccucuucuggcuggaggcgcgc

SEQ ID NO: 15191 - RNA, 22 nt, Pseudomonas aeruginosa PA01
ccguuggcggcgucggugguga

SEQ ID NO: 15192 - RNA, 22 nt, Pseudomonas aeruginosa PA01
ccugccggcggcgcuggucgaa

SEQ ID NO: 15193 - RNA, 23 nt, Pseudomonas aeruginosa PA01
ccugcgacuaccugcaacgccuc

SEQ ID NO: 15194 - RNA, 22 nt, Pseudomonas aeruginosa PA01
ccugcgccugucggccggcgcc

SEQ ID NO: 15195 - RNA, 22 nt, Pseudomonas aeruginosa PA01
ccuggaagugcuguuccuggac

SEQ ID NO: 15196 - RNA, 22 nt, Pseudomonas aeruginosa PA01
ccccggcugcggcagcggcgga

SEQ ID NO: 15197 - RNA, 22 nt, Pseudomonas aeruginosa PA01
ccgagggcaucgacugccaggg

SEQ ID NO: 15198 - RNA, 22 nt, Pseudomonas aeruginosa PA01
ccgcagaggucccucggcgcuu

SEQ ID NO: 15199 - RNA, 22 nt, Pseudomonas aeruginosa PA01
ccgcagccacagcggccgggca

SEQ ID NO: 15200 - RNA, 22 nt, Pseudomonas aeruginosa PA01
ccgcagccuggcgaucgaagcg

SEQ ID NO: 15201 - RNA, 22 nt, Pseudomonas aeruginosa PA01
ccgccacccugagcgcgcugau

SEQ ID NO: 15202 - RNA, 22 nt, Pseudomonas aeruginosa PA01
ccgccccgccuccugggaccag

SEQ ID NO: 15203 - RNA, 22 nt, Pseudomonas aeruginosa PA01
ccgccccgcucugcgccaacgg

SEQ ID NO: 15204 - RNA, 22 nt, Pseudomonas aeruginosa PA01
ccgccccggcugcucagcgugc

SEQ ID NO: 15205 - RNA, 22 nt, Pseudomonas aeruginosa PA01
ccgcccugguccugcugccguu

SEQ ID NO: 15206 - RNA, 22 nt, Pseudomonas aeruginosa PA01
ccgccucgacgaagccgcgcag

SEQ ID NO: 15207 - RNA, 22 nt, Pseudomonas aeruginosa PA01
ccgcgcagaucccccggcuggc

SEQ ID NO: 15208 - RNA, 21 nt, Pseudomonas aeruginosa PA01
ccgcgccuggaccgcgccggg

SEQ ID NO: 15209 - RNA, 22 nt, Pseudomonas aeruginosa PA01
ccgcggagcccggucgggcgcu

SEQ ID NO: 15210 - RNA, 23 nt, Pseudomonas aeruginosa PA01
ccgcggccugcaauucuuccagc

SEQ ID NO: 15211 - RNA, 22 nt, Pseudomonas aeruginosa PA01
ccggagccggcuugccguggac

SEQ ID NO: 15212 - RNA, 18 nt, Pseudomonas aeruginosa PA01
ccggagccugugucggcc

SEQ ID NO: 15213 - RNA, 22 nt, Pseudomonas aeruginosa PA01
ccggagcgggaggucagaccuu

SEQ ID NO: 15214 - RNA, 18 nt, Pseudomonas aeruginosa PA01
cgcagcagacgcaguugc

SEQ ID NO: 15215 - RNA, 22 nt, Pseudomonas aeruginosa PA01
cgcagcgccaggcgcugggcuu

SEQ ID NO: 15216 - RNA, 22 nt, Pseudomonas aeruginosa PA01
cgccaccacccgccgcugcauc

SEQ ID NO: 15217 - RNA, 21 nt, Pseudomonas aeruginosa PA01
cgccaccaguuguucgugacc

SEQ ID NO: 15218 - RNA, 22 nt, Pseudomonas aeruginosa PA01
cgccaccaugaucaagccuucc

SEQ ID NO: 15219 - RNA, 22 nt, Pseudomonas aeruginosa PA01
cgcccagcucggugccgauggc

SEQ ID NO: 15220 - RNA, 22 nt, Pseudomonas aeruginosa PA01
cgccccacuggcgccgcucgaa

SEQ ID NO: 15221 - RNA, 22 nt, Pseudomonas aeruginosa PA01
cgccagccgcgcucguagaacg

SEQ ID NO: 15222 - RNA, 22 nt, Pseudomonas aeruginosa PA01
cgccaccuggcuggugccgcgc

SEQ ID NO: 15223 - RNA, 22 nt, Pseudomonas aeruginosa PA01
cgacccggugauacacggcgaa

SEQ ID NO: 15224 - RNA, 17 nt, Pseudomonas aeruginosa PA01
cgacgcaggucgccauc

SEQ ID NO: 15225 - RNA, 22 nt, Pseudomonas aeruginosa PA01
cgacgccccggugcucuucccg

SEQ ID NO: 15226 - RNA, 22 nt, Pseudomonas aeruginosa PA01
cgagcagcaggcgcacaggaug

SEQ ID NO: 15227 - RNA, 22 nt, Pseudomonas aeruginosa PA01
cgagcgcaggaacagggucagg

SEQ ID NO: 15228 - RNA, 22 nt, Pseudomonas aeruginosa PA01
cgagcgcgagcagcgccuggaa

SEQ ID NO: 15229 - RNA, 22 nt, Pseudomonas aeruginosa PA01
cgaggccggcguggcgaaguag

SEQ ID NO: 15230 - RNA, 22 nt, Pseudomonas aeruginosa PA01
cgaggccgggccgaagcaggug

SEQ ID NO: 15231 - RNA, 22 nt, Pseudomonas aeruginosa PA01
cgaugcgggcgccacucucgau

SEQ ID NO: 15232 - RNA, 21 nt, Pseudomonas aeruginosa PA01
cgcaagcggcaucgccaucag

SEQ ID NO: 15233 - RNA, 22 nt, Pseudomonas aeruginosa PA01
cgagggccugauggcgacgcug

SEQ ID NO: 15234 - RNA, 22 nt, Pseudomonas aeruginosa PA01
cgagggccuggcgccggagguc

SEQ ID NO: 15235 - RNA, 22 nt, Pseudomonas aeruginosa PA01
cgaucagguugaggcggcccgg

SEQ ID NO: 15236 - RNA, 22 nt, Pseudomonas aeruginosa PA01
cgauccgggcuggcugcaggug

SEQ ID NO: 15237 - RNA, 22 nt, Pseudomonas aeruginosa PA01
cgccugggcgaacucgccccgc

SEQ ID NO: 15238 - RNA, 22 nt, Pseudomonas aeruginosa PA01
cgccugggcgcgguguaccagc

SEQ ID NO: 15239 - RNA, 22 nt, Pseudomonas aeruginosa PA01
cgccccagcucuucgcgcaggu

SEQ ID NO: 15240 - RNA, 22 nt, Pseudomonas aeruginosa PA01
cgcccuggcggggccgcgacuu

SEQ ID NO: 15241 - RNA, 22 nt, Pseudomonas aeruginosa PA01
cgccgaccgccuccaggcaacg

SEQ ID NO: 15242 - RNA, 22 nt, Pseudomonas aeruginosa PA01
cgccgagcugaagcuguaggau

SEQ ID NO: 15243 - RNA, 20 nt, Pseudomonas aeruginosa PA01
cgccgcagccgcuggacggc

SEQ ID NO: 15244 - RNA, 22 nt, Pseudomonas aeruginosa PA01
cgccgccgccaucgagcagaac

SEQ ID NO: 15245 - RNA, 17 nt, Pseudomonas aeruginosa PA01
cgccgccggcgcagaag

SEQ ID NO: 15246 - RNA, 17 nt, Pseudomonas aeruginosa PA01
cgccgccggggcggaag

SEQ ID NO: 15247 - RNA, 22 nt, Pseudomonas aeruginosa PA01
cgccggccaucagcgcuaccgc

SEQ ID NO: 15248 - RNA, 22 nt, Pseudomonas aeruginosa PA01
cgccggccgccgaggucgccaa

SEQ ID NO: 15249 - RNA, 22 nt, Pseudomonas aeruginosa PA01
cgccggccggcuggguauucgc

SEQ ID NO: 15250 - RNA, 22 nt, Pseudomonas aeruginosa PA01
cgccggcgccgaggcaggcacc

SEQ ID NO: 15251 - RNA, 22 nt, Pseudomonas aeruginosa PA01
cgccggcgcuguuguccaggcu

SEQ ID NO: 15252 - RNA, 23 nt, Pseudomonas aeruginosa PA01
cgcgcuccagcaggucggccaug

SEQ ID NO: 15253 - RNA, 22 nt, Pseudomonas aeruginosa PA01
cgcgcucgcgguaagguaugcc

SEQ ID NO: 15254 - RNA, 22 nt, Pseudomonas aeruginosa PA01
cgcgcucggaacccgguuuggc

SEQ ID NO: 15255 - RNA, 22 nt, Pseudomonas aeruginosa PA01
cgcggaugagcccgcgaucgau

SEQ ID NO: 15256 - RNA, 17 nt, Pseudomonas aeruginosa PA01
cgcggcagccaggcggc

SEQ ID NO: 15257 - RNA, 22 nt, Pseudomonas aeruginosa PA01
cgcggccgugcccuucgagcug

SEQ ID NO: 15258 - RNA, 23 nt, Pseudomonas aeruginosa PA01
cgcggcgaucgaggccgaggccc

SEQ ID NO: 15259 - RNA, 22 nt, Pseudomonas aeruginosa PA01
cgcgggcgucguccucggucau

SEQ ID NO: 15260 - RNA, 22 nt, Pseudomonas aeruginosa PA01
cgcggggcggagagccagccgg

SEQ ID NO: 15261 - RNA, 22 nt, Pseudomonas aeruginosa PA01
cgcgucggccggcaggcucucg

SEQ ID NO: 15262 - RNA, 22 nt, Pseudomonas aeruginosa PA01
cgcgagccacauccaguugcau

SEQ ID NO: 15263 - RNA, 22 nt, Pseudomonas aeruginosa PA01
cgcgagcgcggcugcuccaucc

SEQ ID NO: 15264 - RNA, 22 nt, Pseudomonas aeruginosa PA01
cgcgaggaaaccucgcuggccg

SEQ ID NO: 15265 - RNA, 22 nt, Pseudomonas aeruginosa PA01
cgcgcacguugauccgccggau

SEQ ID NO: 15266 - RNA, 22 nt, Pseudomonas aeruginosa PA01
cgcgcaggcgguacaggcggcu

SEQ ID NO: 15267 - RNA, 22 nt, Pseudomonas aeruginosa PA01
cgcgccacccguugcgagagag

SEQ ID NO: 15268 - RNA, 22 nt, Pseudomonas aeruginosa PA01
cgcgccagcagguggcggaugg

SEQ ID NO: 15269 - RNA, 19 nt, Pseudomonas aeruginosa PA01
cgcgccagcgccgccuggg

SEQ ID NO: 15270 - RNA, 22 nt, Pseudomonas aeruginosa PA01
cggaacagcgagccgacgccgg

SEQ ID NO: 15271 - RNA, 22 nt, Pseudomonas aeruginosa PA01
cggacgccagcgugcccggcua

SEQ ID NO: 15272 - RNA, 22 nt, Pseudomonas aeruginosa PA01
cgcugccgacccggaggauuuc

SEQ ID NO: 15273 - RNA, 22 nt, Pseudomonas aeruginosa PA01
cgcuggagagugccucccaggg

SEQ ID NO: 15274 - RNA, 22 nt, Pseudomonas aeruginosa PA01
cgcuggcgcaccagcuugccga

SEQ ID NO: 15275 - RNA, 22 nt, Pseudomonas aeruginosa PA01
cgcuccgggucgaucugcuggc

SEQ ID NO: 15276 - RNA, 19 nt, Pseudomonas aeruginosa PA01
cgcuccucugcccgguggc

SEQ ID NO: 15277 - RNA, 22 nt, Pseudomonas aeruginosa PA01
cgcugcagguauucggugccug

SEQ ID NO: 15278 - RNA, 22 nt, Pseudomonas aeruginosa PA01
cggagcgugccggcgagggucg

SEQ ID NO: 15279 - RNA, 22 nt, Pseudomonas aeruginosa PA01
cggagcugaacgccgagcgcuu

SEQ ID NO: 15280 - RNA, 22 nt, Pseudomonas aeruginosa PA01
cggcagcgccucgccacgcucc

SEQ ID NO: 15281 - RNA, 22 nt, Pseudomonas aeruginosa PA01
cggcagcggcgggccguugacc

SEQ ID NO: 15282 - RNA, 22 nt, Pseudomonas aeruginosa PA01
cggcccgccguaggccugcgcu

SEQ ID NO: 15283 - RNA, 22 nt, Pseudomonas aeruginosa PA01
cggcccggcauggaccccggcg

SEQ ID NO: 15284 - RNA, 22 nt, Pseudomonas aeruginosa PA01
cggccgcgccuuuggcauggcc

SEQ ID NO: 15285 - RNA, 22 nt, Pseudomonas aeruginosa PA01
cggccggacgcucgccgggcag

SEQ ID NO: 15286 - RNA, 20 nt, Pseudomonas aeruginosa PA01
cggccggcaggugaucgaac

SEQ ID NO: 15287 - RNA, 22 nt, Pseudomonas aeruginosa PA01
cggccagccaggcccgcaccag

SEQ ID NO: 15288 - RNA, 22 nt, Pseudomonas aeruginosa PA01
cggccaggccccggucgauggc

SEQ ID NO: 15289 - RNA, 22 nt, Pseudomonas aeruginosa PA01
cggccagggcaaugucgaagcc

SEQ ID NO: 15290 - RNA, 22 nt, Pseudomonas aeruginosa PA01
gggucagcagcagguguuccuu

SEQ ID NO: 15291 - RNA, 22 nt, Pseudomonas aeruginosa PA01
ggugccagauccaguaggcggc

SEQ ID NO: 15292 - RNA, 22 nt, Pseudomonas aeruginosa PA01
ggugccggcgccggcccuggcg

SEQ ID NO: 15293 - RNA, 22 nt, Pseudomonas aeruginosa PA01
ggugcgcaccgcccugcgcgag

SEQ ID NO: 15294 - RNA, 22 nt, Pseudomonas aeruginosa PA01
ggugcgcgcccuucugcgagua

SEQ ID NO: 15295 - RNA, 22 nt, Pseudomonas aeruginosa PA01
gguguaccggugaaggaacugu

SEQ ID NO: 15296 - RNA, 22 nt, Pseudomonas aeruginosa PA01
guacaucgucgucgcccugguc

SEQ ID NO: 15297 - RNA, 22 nt, Pseudomonas aeruginosa PA01
guacucgcgggcaagcuuggcg

SEQ ID NO: 15298 - RNA, 22 nt, Pseudomonas aeruginosa PA01
guagcccuggccgagguccggg

SEQ ID NO: 15299 - RNA, 21 nt, Pseudomonas aeruginosa PA01
guagccguggaccuggcagcc

SEQ ID NO: 15300 - RNA, 22 nt, Pseudomonas aeruginosa PA01
gguggcaggaugcgcagacugg

SEQ ID NO: 15301 - RNA, 22 nt, Pseudomonas aeruginosa PA01
ggugggauugcccugcaaggcu

SEQ ID NO: 15302 - RNA, 22 nt, Pseudomonas aeruginosa PA01
ggcuuccggcggccucccgcgg

SEQ ID NO: 15303 - RNA, 22 nt, Pseudomonas aeruginosa PA01
ggcuucgucgagggaggcgguc

SEQ ID NO: 15304 - RNA, 22 nt, Pseudomonas aeruginosa PA01
gggcagcggcguggagugguag

SEQ ID NO: 15305 - RNA, 22 nt, Pseudomonas aeruginosa PA01
gggcaggcucauggcagcucgg

SEQ ID NO: 15306 - RNA, 22 nt, Pseudomonas aeruginosa PA01
gggcgaccugaacugggccggc

SEQ ID NO: 15307 - RNA, 22 nt, Pseudomonas aeruginosa PA01
gggcgagcccugcugggcgaag

SEQ ID NO: 15308 - RNA, 22 nt, Pseudomonas aeruginosa PA01
gggcgaggaagccgccggcguc

SEQ ID NO: 15309 - RNA, 22 nt, Pseudomonas aeruginosa PA01
gggcgcggucgaggaucagcuc

SEQ ID NO: 15310 - RNA, 23 nt, Pseudomonas aeruginosa PA01
gggcaugcugguccccggcaccc

SEQ ID NO: 15311 - RNA, 22 nt, Pseudomonas aeruginosa PA01
gggccccuuccacggaccgcug

SEQ ID NO: 15312 - RNA, 22 nt, Pseudomonas aeruginosa PA01
gggccgcccggcgggaucuugc

SEQ ID NO: 15313 - RNA, 22 nt, Pseudomonas aeruginosa PA01
gggccgggcuucagcaucgacg

SEQ ID NO: 15314 - RNA, 22 nt, Pseudomonas aeruginosa PA01
gggcggcuugcaggaaggcuuc

SEQ ID NO: 15315 - RNA, 22 nt, Pseudomonas aeruginosa PA01
ggggcggcuuguugcgcccgcg

SEQ ID NO: 15316 - RNA, 22 nt, Pseudomonas aeruginosa PA01
gggggcaggucacuugccccgc

SEQ ID NO: 15317 - RNA, 22 nt, Pseudomonas aeruginosa PA01
ggggucaggucgcugagcaggg

SEQ ID NO: 15318 - RNA, 22 nt, Pseudomonas aeruginosa PA01
guggccggcgcgauggcgucca

SEQ ID NO: 15319 - RNA, 22 nt, Pseudomonas aeruginosa PA01
guggcgcggggcgagcugguuc

SEQ ID NO: 15320 - RNA, 22 nt, Pseudomonas aeruginosa PA01
guugcggaucgucguagccgag

SEQ ID NO: 15321 - RNA, 22 nt, Pseudomonas aeruginosa PA01
guugaugucguagcucaccagc

SEQ ID NO: 15322 - RNA, 22 nt, Pseudomonas aeruginosa PA01
gucgcgccaugacccuggaggc

SEQ ID NO: 15323 - RNA, 22 nt, Pseudomonas aeruginosa PA01
gucggccaggugcgcgguggcc

SEQ ID NO: 15324 - RNA, 22 nt, Pseudomonas aeruginosa PA01
gucggcccauuccggguggucu

SEQ ID NO: 15325 - RNA, 19 nt, Pseudomonas aeruginosa PA01
gucggccuggaaggccuga

SEQ ID NO: 15326 - RNA, 22 nt, Pseudomonas aeruginosa PA01
gucuuuccagguaugcgggcug

SEQ ID NO: 15327 - RNA, 22 nt, Pseudomonas aeruginosa PA01
gucgacccagggccgggcgcgc

SEQ ID NO: 15328 - RNA, 22 nt, Pseudomonas aeruginosa PA01
gucgacccguccgggcagcucg

SEQ ID NO: 15329 - RNA, 22 nt, Pseudomonas aeruginosa PA01
gucgacuacgcgcugauggagc

SEQ ID NO: 15330 - RNA, 22 nt, Pseudomonas aeruginosa PA01
guccagcgccaggccgaacucu

SEQ ID NO: 15331 - RNA, 22 nt, Pseudomonas aeruginosa PA01
guccagcgcgugcgccugccac

SEQ ID NO: 15332 - RNA, 22 nt, Pseudomonas aeruginosa PA01
guccggcgcgaggcccggcguu

SEQ ID NO: 15333 - RNA, 22 nt, Pseudomonas aeruginosa PA01
guccggcuuguacugguggugg

SEQ ID NO: 15334 - RNA, 22 nt, Pseudomonas aeruginosa PA01
guccgggagcgauggcguugac

SEQ ID NO: 15335 - RNA, 22 nt, Pseudomonas aeruginosa PA01
guccgggaucaccccgucgcug

SEQ ID NO: 15336 - RNA, 22 nt, Pseudomonas aeruginosa PA01
gucucuuccaucaccgagcgca

SEQ ID NO: 15337 - RNA, 22 nt, Pseudomonas aeruginosa PA01
gugccggccaaggacccgcgcg

SEQ ID NO: 15338 - RNA, 22 nt, Pseudomonas aeruginosa PA01
gugccggcgcggcguaccguuc

SEQ ID NO: 15339 - RNA, 22 nt, Pseudomonas aeruginosa PA01
gugccugccucggcgccggcgg

SEQ ID NO: 15340 - RNA, 18 nt, Pseudomonas aeruginosa PA01
gugcgcaggccaggcggg

SEQ ID NO: 15341 - RNA, 22 nt, Pseudomonas aeruginosa PA01
gugcgcaggccgagcgguccga

SEQ ID NO: 15342 - RNA, 22 nt, Pseudomonas aeruginosa PA01
gugcgcccagcgcgcggucaug

SEQ ID NO: 15343 - RNA, 22 nt, Pseudomonas aeruginosa PA01
uacccggccugccuugccgucg

SEQ ID NO: 15344 - RNA, 22 nt, Pseudomonas aeruginosa PA01
uacugaccacgucuuccaggcu

SEQ ID NO: 15345 - RNA, 22 nt, Pseudomonas aeruginosa PA01
uagcgggagaacucgcggccgc

SEQ ID NO: 15346 - RNA, 22 nt, Pseudomonas aeruginosa PA01
uauugacacugaacgagccgga

SEQ ID NO: 15347 - RNA, 22 nt, Pseudomonas aeruginosa PA01
ucaccggcggcuggaacgggcu

SEQ ID NO: 15348 - RNA, 22 nt, Pseudomonas aeruginosa PA01
ucaggcccauuucguugcggac

SEQ ID NO: 15349 - RNA, 22 nt, Pseudomonas aeruginosa PA01
ucaggccggcugccgccacucg

SEQ ID NO: 15350 - RNA, 22 nt, Pseudomonas aeruginosa PA01
ucagccuguucucgcggcgccc

SEQ ID NO: 15351 - RNA, 22 nt, Pseudomonas aeruginosa PA01
ucagcgcccacuucggcugcuc

SEQ ID NO: 15352 - RNA, 22 nt, Pseudomonas aeruginosa PA01
ucagcgccggcuggcagcggau

SEQ ID NO: 15353 - RNA, 20 nt, Pseudomonas aeruginosa PA01
ucaggccgucgaugccgggc

SEQ ID NO: 15354 - RNA, 22 nt, Pseudomonas aeruginosa PA01
ucaggcucggugguuccgcuga

SEQ ID NO: 15355 - RNA, 22 nt, Pseudomonas aeruginosa PA01
ucgucggccucguucucgauga

SEQ ID NO: 15356 - RNA, 22 nt, Pseudomonas aeruginosa PA01
ucgucggccuucaacgccgccg

SEQ ID NO: 15357 - RNA, 22 nt, Pseudomonas aeruginosa PA01
ucgucggcgaacuccgagcgca

SEQ ID NO: 15358 - RNA, 20 nt, Pseudomonas aeruginosa PA01
ucgucggcgcccuggugauc

SEQ ID NO: 15359 - RNA, 22 nt, Pseudomonas aeruginosa PA01
ucggcgccgcccacgccuggca

SEQ ID NO: 15360 - RNA, 22 nt, Pseudomonas aeruginosa PA01
ucggcgccuugcuggcgggcca

SEQ ID NO: 15361 - RNA, 22 nt, Pseudomonas aeruginosa PA01
ucggcgcgcugacccgcugggu

SEQ ID NO: 15362 - RNA, 22 nt, Pseudomonas aeruginosa PA01
ucggcgcgcugcuguucgucga

SEQ ID NO: 15363 - RNA, 22 nt, Pseudomonas aeruginosa PA01
uccuugagguugaucguccagu

SEQ ID NO: 15364 - RNA, 22 nt, Pseudomonas aeruginosa PA01
ucgccgccagcaggcggccgag

SEQ ID NO: 15365 - RNA, 22 nt, Pseudomonas aeruginosa PA01
ucgccggccugcugaccuuccu

SEQ ID NO: 15366 - RNA, 22 nt, Pseudomonas aeruginosa PA01
ucgccggcgcccuggcgccugg

SEQ ID NO: 15367 - RNA, 22 nt, Pseudomonas aeruginosa PA01
ucgccgggcuucaggcucaggg

SEQ ID NO: 15368 - RNA, 22 nt, Pseudomonas aeruginosa PA01
ucgccggguuggucagccaggc

SEQ ID NO: 15369 - RNA, 22 nt, Pseudomonas aeruginosa PA01
ucgcgcagcaacaggggccggu

SEQ ID NO: 15370 - RNA, 21 nt, Pseudomonas aeruginosa PA01
ucgcggaacuggcgggcgucc

SEQ ID NO: 15371 - RNA, 22 nt, Pseudomonas aeruginosa PA01
ucgcggagcagggcgcggcuga

SEQ ID NO: 15372 - RNA, 22 nt, Pseudomonas aeruginosa PA01
uccgggucgcggucggccugga

SEQ ID NO: 15373 - RNA, 22 nt, Pseudomonas aeruginosa PA01
uccgucgacggcccgcuggcgg

SEQ ID NO: 15374 - RNA, 22 nt, Pseudomonas aeruginosa PA01
uccggcucgacgccggcgaggu

SEQ ID NO: 15375 - RNA, 22 nt, Pseudomonas aeruginosa PA01
ucccgcgcucggugggccaggu

SEQ ID NO: 15376 - RNA, 22 nt, Pseudomonas aeruginosa PA01
uccucggcgaucacccggcgcu

SEQ ID NO: 15377 - RNA, 22 nt, Pseudomonas aeruginosa PA01
uccugcagaccgccaucgccga

SEQ ID NO: 15378 - RNA, 22 nt, Pseudomonas aeruginosa PA01
ucccugggcagccccuugaguu

SEQ ID NO: 15379 - RNA, 22 nt, Pseudomonas aeruginosa PA01
uccgaggacgggcagagguggu

SEQ ID NO: 15380 - RNA, 22 nt, Pseudomonas aeruginosa PA01
uccgccgggugcacagcgaggg

SEQ ID NO: 15381 - RNA, 22 nt, Pseudomonas aeruginosa PA01
uccaggcuggcggcgucgaucc

SEQ ID NO: 15382 - RNA, 22 nt, Pseudomonas aeruginosa PA01
uccaugacguacuugucgccca

SEQ ID NO: 15383 - RNA, 22 nt, Pseudomonas aeruginosa PA01
gccuuggugcacgaggcgcagg

SEQ ID NO: 15384 - RNA, 22 nt, Pseudomonas aeruginosa PA01
gccugucccgcgaacuggagaa

SEQ ID NO: 15385 - RNA, 22 nt, Pseudomonas aeruginosa PA01
gccuccccggacaccguggcaa

SEQ ID NO: 15386 - RNA, 22 nt, Pseudomonas aeruginosa PA01
gccugagcgagacucaggacac

SEQ ID NO: 15387 - RNA, 22 nt, Pseudomonas aeruginosa PA01
gccgccccggcuuccucauccg

SEQ ID NO: 15388 - RNA, 22 nt, Pseudomonas aeruginosa PA01
gccgccggauugaugaugauga

SEQ ID NO: 15389 - RNA, 22 nt, Pseudomonas aeruginosa PA01
gccgcgccccucggcuuccuug

SEQ ID NO: 15390 - RNA, 22 nt, Pseudomonas aeruginosa PA01
gccggacguaccagccggcggc

SEQ ID NO: 15391 - RNA, 22 nt, Pseudomonas aeruginosa PA01
gccggagacgauggcgacguuc

SEQ ID NO: 15392 - RNA, 22 nt, Pseudomonas aeruginosa PA01
gccggagcugccggccgaccug

SEQ ID NO: 15393 - RNA, 22 nt, Pseudomonas aeruginosa PA01
gccggcagccucaagcaggugg

SEQ ID NO: 15394 - RNA, 22 nt, Pseudomonas aeruginosa PA01
gccggccaguucaccggcgcgc

SEQ ID NO: 15395 - RNA, 22 nt, Pseudomonas aeruginosa PA01
gccggccccgcaauucggucug

SEQ ID NO: 15396 - RNA, 22 nt, Pseudomonas aeruginosa PA01
gccggccccggcgccauguuga

SEQ ID NO: 15397 - RNA, 22 nt, Pseudomonas aeruginosa PA01
gccggccgacgccuggauggcc

SEQ ID NO: 15398 - RNA, 22 nt, Pseudomonas aeruginosa PA01
gccggccgcccucgucgaguuc

SEQ ID NO: 15399 - RNA, 22 nt, Pseudomonas aeruginosa PA01
gccggccguagggaaucgaacg

SEQ ID NO: 15400 - RNA, 22 nt, Pseudomonas aeruginosa PA01
gccggccuggagcgccugggcg

SEQ ID NO: 15401 - RNA, 22 nt, Pseudomonas aeruginosa PA01
gccggcgaugguguagcggucc

SEQ ID NO: 15402 - RNA, 21 nt, Pseudomonas aeruginosa PA01
gccggcgccgcagagcuggcc

SEQ ID NO: 15403 - RNA, 22 nt, Pseudomonas aeruginosa PA01
gccggcgcggacuuccuggauc

SEQ ID NO: 15404 - RNA, 22 nt, Pseudomonas aeruginosa PA01
gccgggaggaagucauugcccg

SEQ ID NO: 15405 - RNA, 22 nt, Pseudomonas aeruginosa PA01
gccgggauuuccugcaacugcg

SEQ ID NO: 15406 - RNA, 22 nt, Pseudomonas aeruginosa PA01
gccgggcgauagccggggagau

SEQ ID NO: 15407 - RNA, 22 nt, Pseudomonas aeruginosa PA01
gccggggccgcuucggcuuccg

SEQ ID NO: 15408 - RNA, 22 nt, Pseudomonas aeruginosa PA01
gccggggccggcgaucuugcug

SEQ ID NO: 15409 - RNA, 22 nt, Pseudomonas aeruginosa PA01
gccggggcgcucgaccuggagg

SEQ ID NO: 15410 - RNA, 21 nt, Pseudomonas aeruginosa PA01
gccggggcguucuucuucgcu

SEQ ID NO: 15411 - RNA, 22 nt, Pseudomonas aeruginosa PA01
gccgggggugaggccgguccac

SEQ ID NO: 15412 - RNA, 22 nt, Pseudomonas aeruginosa PA01
gccggugagcuucgacgugucg

SEQ ID NO: 15413 - RNA, 22 nt, Pseudomonas aeruginosa PA01
gcgccggcaggcccugggccuc

SEQ ID NO: 15414 - RNA, 18 nt, Pseudomonas aeruginosa PA01
gcgccgggcugcccuggg

SEQ ID NO: 15415 - RNA, 22 nt, Pseudomonas aeruginosa PA01
gcgccggggaugaucggcgagc

SEQ ID NO: 15416 - RNA, 22 nt, Pseudomonas aeruginosa PA01
gcgccggguuucaucgucgcca

SEQ ID NO: 15417 - RNA, 20 nt, Pseudomonas aeruginosa PA01
gcgccuggugcagcggaucc

SEQ ID NO: 15418 - RNA, 22 nt, Pseudomonas aeruginosa PA01
gcgcgaaggacggccgcggguu

SEQ ID NO: 15419 - RNA, 22 nt, Pseudomonas aeruginosa PA01
gcgcgcaccuggaccgcaacaa

SEQ ID NO: 15420 - RNA, 22 nt, Pseudomonas aeruginosa PA01
gcgcgcaccuggcgccguuccu

SEQ ID NO: 15421 - RNA, 22 nt, Pseudomonas aeruginosa PA01
gcgcgcagcaguggcuggcguu

SEQ ID NO: 15422 - RNA, 22 nt, Pseudomonas aeruginosa PA01
gcgcgcaggagcccggcaccgg

SEQ ID NO: 15423 - RNA, 23 nt, Pseudomonas aeruginosa PA01
gcgcgcaggccaucggcaucguc

SEQ ID NO: 15424 - RNA, 22 nt, Pseudomonas aeruginosa PA01
gcgcgccagcaggcugccgggu

SEQ ID NO: 15425 - RNA, 22 nt, Pseudomonas aeruginosa PA01
gcgcgccgaaucccugggucgg

SEQ ID NO: 15426 - RNA, 22 nt, Pseudomonas aeruginosa PA01
gcgcgccgaccagucgcgagga

SEQ ID NO: 15427 - RNA, 22 nt, Pseudomonas aeruginosa PA01
gcgcgccggcaucaagagagua

SEQ ID NO: 15428 - RNA, 22 nt, Pseudomonas aeruginosa PA01
gcgcgccucuuccagcagccag

SEQ ID NO: 15429 - RNA, 22 nt, Pseudomonas aeruginosa PA01
gcgcgccuucaagagcgucggc

SEQ ID NO: 15430 - RNA, 22 nt, Pseudomonas aeruginosa PA01
gcgcgcgagaaagcggucggug

SEQ ID NO: 15431 - RNA, 22 nt, Pseudomonas aeruginosa PA01
gcgcgcggcuagaggaagaguc

SEQ ID NO: 15432 - RNA, 22 nt, Pseudomonas aeruginosa PA01
gcgcgcgguucucgauggagcc

SEQ ID NO: 15433 - RNA, 22 nt, Pseudomonas aeruginosa PA01
gcgcgcucggggugggcuuguu

SEQ ID NO: 15434 - RNA, 22 nt, Pseudomonas aeruginosa PA01
gcgcgcucuggggcaaggucug

SEQ ID NO: 15435 - RNA, 22 nt, Pseudomonas aeruginosa PA01
gcgcgcuggugcgacaagggcu

SEQ ID NO: 15436 - RNA, 16 nt, Pseudomonas aeruginosa PA01
gcgcggacgccgcgaa

SEQ ID NO: 15437 - RNA, 22 nt, Pseudomonas aeruginosa PA01
gcgcggcaccugccgggcagcc

SEQ ID NO: 15438 - RNA, 22 nt, Pseudomonas aeruginosa PA01
gcgcggccgaaggccagguucu

SEQ ID NO: 15439 - RNA, 22 nt, Pseudomonas aeruginosa PA01
gcgcggcgccucguccucgacc

SEQ ID NO: 15440 - RNA, 22 nt, Pseudomonas aeruginosa PA01
gcgcggcggaacagguggcgca

SEQ ID NO: 15441 - RNA, 23 nt, Pseudomonas aeruginosa PA01
gcgcgggagcugguggugcccug

SEQ ID NO: 15442 - RNA, 22 nt, Pseudomonas aeruginosa PA01
gcgcgguggucuucaggccggc

SEQ ID NO: 15443 - RNA, 21 nt, Pseudomonas aeruginosa PA01
gcgcggugucgccaucgcgac

SEQ ID NO: 15444 - RNA, 22 nt, Pseudomonas aeruginosa PA01
gcgcguccauggcggcgucgag

SEQ ID NO: 15445 - RNA, 22 nt, Pseudomonas aeruginosa PA01
gcgcgucgacguagcugcaggc

SEQ ID NO: 15446 - RNA, 22 nt, Pseudomonas aeruginosa PA01
gcgcuccagcacuucguccagc

SEQ ID NO: 15447 - RNA, 22 nt, Pseudomonas aeruginosa PA01
gcgcuggcgcaacggcucguca

SEQ ID NO: 15448 - RNA, 22 nt, Pseudomonas aeruginosa PA01
gcgcuggcguucgacgagcugg

SEQ ID NO: 15449 - RNA, 22 nt, Pseudomonas aeruginosa PA01
gcgcuucuacaagcgacgccgg

SEQ ID NO: 15450 - RNA, 22 nt, Pseudomonas aeruginosa PA01
gcggaauggcugucgccccaac

SEQ ID NO: 15451 - RNA, 22 nt, Pseudomonas aeruginosa PA01
gcggacgcucuucggugaagcg

SEQ ID NO: 15452 - RNA, 22 nt, Pseudomonas aeruginosa PA01
gcggauagcgcuggggcgcuau

SEQ ID NO: 15453 - RNA, 22 nt, Pseudomonas aeruginosa PA01
gcggcagcgagcgccaggagga

SEQ ID NO: 15454 - RNA, 22 nt, Pseudomonas aeruginosa PA01
gcucgcucaucaucacgaaauc

SEQ ID NO: 15455 - RNA, 17 nt, Pseudomonas aeruginosa PA01
gcucgcucggcggcagc

SEQ ID NO: 15456 - RNA, 22 nt, Pseudomonas aeruginosa PA01
gcucgggcaguugcgccgcugu

SEQ ID NO: 15457 - RNA, 22 nt, Pseudomonas aeruginosa PA01
gcucgguccuguugcuggccca

SEQ ID NO: 15458 - RNA, 18 nt, Pseudomonas aeruginosa PA01
gcucggucugugccgggu

SEQ ID NO: 15459 - RNA, 22 nt, Pseudomonas aeruginosa PA01
gcucgucggugaccggcgagac

SEQ ID NO: 15460 - RNA, 22 nt, Pseudomonas aeruginosa PA01
gcguggugcugaugaucggcgg

SEQ ID NO: 15461 - RNA, 22 nt, Pseudomonas aeruginosa PA01
gcugaagggcuccgcgcugucc

SEQ ID NO: 15462 - RNA, 22 nt, Pseudomonas aeruginosa PA01
gcgaggaacuggccggcggcgc

SEQ ID NO: 15463 - RNA, 22 nt, Pseudomonas aeruginosa PA01
gcgaggaaggcggccaggucag

SEQ ID NO: 15464 - RNA, 22 nt, Pseudomonas aeruginosa PA01
gcgagggcuucgccgaggcguu

SEQ ID NO: 15465 - RNA, 22 nt, Pseudomonas aeruginosa PA01
gcguccggaaaaggucucggcc

SEQ ID NO: 15466 - RNA, 22 nt, Pseudomonas aeruginosa PA01
gcgucggcugcaucgcacgacc

SEQ ID NO: 15467 - RNA, 21 nt, Pseudomonas aeruginosa PA01
gcgugcagcucgcccucagcc

SEQ ID NO: 15468 - RNA, 22 nt, Pseudomonas aeruginosa PA01
gcgugccggacuggguggugag

SEQ ID NO: 15469 - RNA, 22 nt, Pseudomonas aeruginosa PA01
gcgugccgucggucagcgguac

SEQ ID NO: 15470 - RNA, 22 nt, Pseudomonas aeruginosa PA01
gcgugccgucuuccagggugcc

SEQ ID NO: 15471 - RNA, 22 nt, Pseudomonas aeruginosa PA01
gcucaggcccaggccgagcgcg

SEQ ID NO: 15472 - RNA, 22 nt, Pseudomonas aeruginosa PA01
gcucaggcgaugccugcuugcu

SEQ ID NO: 15473 - RNA, 22 nt, Pseudomonas aeruginosa PA01
gcuccauuuauccaggggcaga

SEQ ID NO: 15474 - RNA, 22 nt, Pseudomonas aeruginosa PA01
gcucccguccacgcggcaacgg

SEQ ID NO: 15475 - RNA, 21 nt, Pseudomonas aeruginosa PA01
gcuccggcugaucgucggcau

SEQ ID NO: 15476 - RNA, 22 nt, Pseudomonas aeruginosa PA01
gcuccucuggaaccguucgaac

SEQ ID NO: 15477 - RNA, 22 nt, Pseudomonas aeruginosa PA01
gcuccugcgcgagcgccuggag

SEQ ID NO: 15478 - RNA, 22 nt, Pseudomonas aeruginosa PA01
gcucgccgacgucgccagcgac

SEQ ID NO: 15479 - RNA, 18 nt, Pseudomonas aeruginosa PA01
gcggccgguucgggaagu

SEQ ID NO: 15480 - RNA, 22 nt, Pseudomonas aeruginosa PA01
gcggcggccucugguauggcaa

SEQ ID NO: 15481 - RNA, 22 nt, Pseudomonas aeruginosa PA01
gcggcggccugccccuggcgag

SEQ ID NO: 15482 - RNA, 22 nt, Pseudomonas aeruginosa PA01
gcggcggguaagcgcaagcggu

SEQ ID NO: 15483 - RNA, 22 nt, Pseudomonas aeruginosa PA01
gcggcgugacccuguccggcga

SEQ ID NO: 15484 - RNA, 22 nt, Pseudomonas aeruginosa PA01
gcggcgugccagaggcagaguu

SEQ ID NO: 15485 - RNA, 22 nt, Pseudomonas aeruginosa PA01
gcggcugcgccuggaacggcuc

SEQ ID NO: 15486 - RNA, 22 nt, Pseudomonas aeruginosa PA01
gcggcugguugaucucgugggc

SEQ ID NO: 15487 - RNA, 22 nt, Pseudomonas aeruginosa PA01
gcgggaggcccuggauaccaug

SEQ ID NO: 15488 - RNA, 22 nt, Pseudomonas aeruginosa PA01
gcgggcagggccuugucagccc

SEQ ID NO: 15489 - RNA, 22 nt, Pseudomonas aeruginosa PA01
gcggggcaucgcuggcccagcg

SEQ ID NO: 15490 - RNA, 22 nt, Pseudomonas aeruginosa PA01
gcggucaccccgcccugcuccu

SEQ ID NO: 15491 - RNA, 22 nt, Pseudomonas aeruginosa PA01
gcggucaccggccagccggucu

SEQ ID NO: 15492 - RNA, 22 nt, Pseudomonas aeruginosa PA01
gcgguggccuacgaggccgaau

SEQ ID NO: 15493 - RNA, 22 nt, Pseudomonas aeruginosa PA01
gcgccagcgaacaacugggcga

SEQ ID NO: 15494 - RNA, 22 nt, Pseudomonas aeruginosa PA01
gcgccccucuugcccaucgagg

SEQ ID NO: 15495 - RNA, 22 nt, Pseudomonas aeruginosa PA01
gcgccccugguccagcggcagc

SEQ ID NO: 15496 - RNA, 22 nt, Pseudomonas aeruginosa PA01
gcgcccgcgacuacccgcugga

SEQ ID NO: 15497 - RNA, 22 nt, Pseudomonas aeruginosa PA01
gcgcccggccgagcgccaucug

SEQ ID NO: 15498 - RNA, 22 nt, Pseudomonas aeruginosa PA01
gcgccgccgccgggguguccag

SEQ ID NO: 15499 - RNA, 22 nt, Pseudomonas aeruginosa PA01
gcgccgcggaaagcagccuggc

SEQ ID NO: 15500 - RNA, 22 nt, Pseudomonas aeruginosa PA01
gcgaugcgcgccuccagcgucu

SEQ ID NO: 15501 - RNA, 22 nt, Pseudomonas aeruginosa PA01
gcgaugcggugaccucccugcg

SEQ ID NO: 15502 - RNA, 22 nt, Pseudomonas aeruginosa PA01
gcgcagccgggacucuggcugg

SEQ ID NO: 15503 - RNA, 22 nt, Pseudomonas aeruginosa PA01
gcgcagcgaauccaggggcgcc

SEQ ID NO: 15504 - RNA, 22 nt, Pseudomonas aeruginosa PA01
gcgcagcgaccugccgcaacug

SEQ ID NO: 15505 - RNA, 22 nt, Pseudomonas aeruginosa PA01
gcgcagcgcccuggaaggcucg

SEQ ID NO: 15506 - RNA, 22 nt, Pseudomonas aeruginosa PA01
gcgcaggccugccggaugaucg

SEQ ID NO: 15507 - RNA, 22 nt, Pseudomonas aeruginosa PA01
gcgcaucgaccugcguggccug

SEQ ID NO: 15508 - RNA, 22 nt, Pseudomonas aeruginosa PA01
gcgccaccucgcuguaugccuc

SEQ ID NO: 15509 - RNA, 22 nt, Pseudomonas aeruginosa PA01
gcgaacagcagaugcucgccau

SEQ ID NO: 15510 - RNA, 22 nt, Pseudomonas aeruginosa PA01
gcgaagcggccgucggccuuga

SEQ ID NO: 15511 - RNA, 22 nt, Pseudomonas aeruginosa PA01
gcgaccaguucggcugggccgg

SEQ ID NO: 15512 - RNA, 22 nt, Pseudomonas aeruginosa PA01
gcgaccgccgcuggcuggcguu

SEQ ID NO: 15513 - RNA, 22 nt, Pseudomonas aeruginosa PA01
gcgacgcccagggccgcuggcu

SEQ ID NO: 15514 - RNA, 22 nt, Pseudomonas aeruginosa PA01
gcgacggcaggcgcuccagcaa

SEQ ID NO: 15515 - RNA, 22 nt, Pseudomonas aeruginosa PA01
gcgagagggcgcggcgaaugau

SEQ ID NO: 15516 - RNA, 22 nt, Pseudomonas aeruginosa PA01
gcugguggugcagcccaggcaa

SEQ ID NO: 15517 - RNA, 22 nt, Pseudomonas aeruginosa PA01
gcuguucuucaagcacgccgaa

SEQ ID NO: 15518 - RNA, 21 nt, Pseudomonas aeruginosa PA01
ggaaaucagcucggugagguu

SEQ ID NO: 15519 - RNA, 22 nt, Pseudomonas aeruginosa PA01
ggaagcggaacagcgcgccaug

SEQ ID NO: 15520 - RNA, 20 nt, Pseudomonas aeruginosa PA01
ggaagugaacacgcggacgg

SEQ ID NO: 15521 - RNA, 22 nt, Pseudomonas aeruginosa PA01
ggaagugaaggucggcgaccug

SEQ ID NO: 15522 - RNA, 19 nt, Pseudomonas aeruginosa PA01
gcuucgucacccuggaggc

SEQ ID NO: 15523 - RNA, 22 nt, Pseudomonas aeruginosa PA01
gcuucuucgagcagggcaaggg

SEQ ID NO: 15524 - RNA, 22 nt, Pseudomonas aeruginosa PA01
gcuucuucgccacccuggugca

SEQ ID NO: 15525 - RNA, 22 nt, Pseudomonas aeruginosa PA01
gcuggaagcccaggcgugcgua

SEQ ID NO: 15526 - RNA, 22 nt, Pseudomonas aeruginosa PA01
gcugggggaagcguucgcggag

SEQ ID NO: 15527 - RNA, 22 nt, Pseudomonas aeruginosa PA01
gcuggccgauuucgccgagcgc

SEQ ID NO: 15528 - RNA, 22 nt, Pseudomonas aeruginosa PA01
gcuggccgcugccggacagcca

SEQ ID NO: 15529 - RNA, 22 nt, Pseudomonas aeruginosa PA01
gcuggccggcuccgcgcugguc

SEQ ID NO: 15530 - RNA, 22 nt, Pseudomonas aeruginosa PA01
gcuggcgcugaccgucugccug

SEQ ID NO: 15531 - RNA, 22 nt, Pseudomonas aeruginosa PA01
gcuggcggagaagugcggguug

SEQ ID NO: 15532 - RNA, 22 nt, Pseudomonas aeruginosa PA01
gcuggcgggcauccgcgugcgg

SEQ ID NO: 15533 - RNA, 22 nt, Pseudomonas aeruginosa PA01
gcugcggcuauugcggcucagc

SEQ ID NO: 15534 - RNA, 22 nt, Pseudomonas aeruginosa PA01
gcugcgcgccgaccagcggguc

SEQ ID NO: 15535 - RNA, 22 nt, Pseudomonas aeruginosa PA01
gcugcgcggcauuuucagggcg

SEQ ID NO: 15536 - RNA, 22 nt, Pseudomonas aeruginosa PA01
gcugcgcggccugggcgucguc

SEQ ID NO: 15537 - RNA, 22 nt, Pseudomonas aeruginosa PA01
gcugcggcaacgacaucgccca

SEQ ID NO: 15538 - RNA, 20 nt, Pseudomonas aeruginosa PA01
ggcagaugcgauccagcucc

SEQ ID NO: 15539 - RNA, 22 nt, Pseudomonas aeruginosa PA01
ggcagccgcgaggucgccgggc

SEQ ID NO: 15540 - RNA, 22 nt, Pseudomonas aeruginosa PA01
ggcagcuucgaccgcccguucg

SEQ ID NO: 15541 - RNA, 22 nt, Pseudomonas aeruginosa PA01
ggccagcaggaugcgcccggcg

SEQ ID NO: 15542 - RNA, 23 nt, Pseudomonas aeruginosa PA01
ggccacacaggugcccgccggga

SEQ ID NO: 15543 - RNA, 22 nt, Pseudomonas aeruginosa PA01
ggccagggcgaccgcgagcggg

SEQ ID NO: 15544 - RNA, 22 nt, Pseudomonas aeruginosa PA01
ggccagcucgcgcagggcaugg

SEQ ID NO: 15545 - RNA, 22 nt, Pseudomonas aeruginosa PA01
ggcaccagcaggcgcgaggcga

SEQ ID NO: 15546 - RNA, 22 nt, Pseudomonas aeruginosa PA01
ggacgcgcagugccggcaccgc

SEQ ID NO: 15547 - RNA, 22 nt, Pseudomonas aeruginosa PA01
ggagcacgcgguggcggcugug

SEQ ID NO: 15548 - RNA, 22 nt, Pseudomonas aeruginosa PA01
ggagcagccggagaucgcugcg

SEQ ID NO: 15549 - RNA, 22 nt, Pseudomonas aeruginosa PA01
ggaggaaggcggugcggaccuu

SEQ ID NO: 15550 - RNA, 22 nt, Pseudomonas aeruginosa PA01
ggaggcgccgcgcuggaagcug

SEQ ID NO: 15551 - RNA, 22 nt, Pseudomonas aeruginosa PA01
ggaucggaaaagugcuggcgag

SEQ ID NO: 15552 - RNA, 21 nt, Pseudomonas aeruginosa PA01
ggaugccggcauguucggcgg

SEQ ID NO: 15553 - RNA, 22 nt, Pseudomonas aeruginosa PA01
ggaugcgcaggucggcgugcuc

SEQ ID NO: 15554 - RNA, 23 nt, Pseudomonas aeruginosa PA01
ggaugcugucgacccgcucgcgc

SEQ ID NO: 15555 - RNA, 22 nt, Pseudomonas aeruginosa PA01
ggcucgcgcgggcugaccccgc

SEQ ID NO: 15556 - RNA, 22 nt, Pseudomonas aeruginosa PA01
ggcucgcggcagucucggcuag

SEQ ID NO: 15557 - RNA, 22 nt, Pseudomonas aeruginosa PA01
ggcucgcugccagcgccagggg

SEQ ID NO: 15558 - RNA, 22 nt, Pseudomonas aeruginosa PA01
ggcgagcuuggcggcgauggcg

SEQ ID NO: 15559 - RNA, 22 nt, Pseudomonas aeruginosa PA01
ggcgaggaacacgcagccgagc

SEQ ID NO: 15560 - RNA, 22 nt, Pseudomonas aeruginosa PA01
ggcgaggaggaucgccgcgauc

SEQ ID NO: 15561 - RNA, 22 nt, Pseudomonas aeruginosa PA01
ggcgagguugaccgacagcggg

SEQ ID NO: 15562 - RNA, 22 nt, Pseudomonas aeruginosa PA01
ggcgaugaagaucgucggcgua

SEQ ID NO: 15563 - RNA, 22 nt, Pseudomonas aeruginosa PA01
ggcgccaccgcagagugccgaa

SEQ ID NO: 15564 - RNA, 22 nt, Pseudomonas aeruginosa PA01
ggcugcgugccuggcggcaccc

SEQ ID NO: 15565 - RNA, 22 nt, Pseudomonas aeruginosa PA01
ggcuggaggcgccggguugccu

SEQ ID NO: 15566 - RNA, 22 nt, Pseudomonas aeruginosa PA01
ggcucuacggcccguuccugcg

SEQ ID NO: 15567 - RNA, 22 nt, Pseudomonas aeruginosa PA01
ggcucuucagcgucuggaugua

SEQ ID NO: 15568 - RNA, 22 nt, Pseudomonas aeruginosa PA01
ggcugagcgcccgcggcgugac

SEQ ID NO: 15569 - RNA, 22 nt, Pseudomonas aeruginosa PA01
ggcugccgaccugccccggacg

SEQ ID NO: 15570 - RNA, 19 nt, Pseudomonas aeruginosa PA01
ggcugccgguaacgggguc

SEQ ID NO: 15571 - RNA, 22 nt, Pseudomonas aeruginosa PA01
ggcgcgggucgagcguggccag

SEQ ID NO: 15572 - RNA, 22 nt, Pseudomonas aeruginosa PA01
ggcgcugguggucgauccgggc

SEQ ID NO: 15573 - RNA, 22 nt, Pseudomonas aeruginosa PA01
ggcggcaguuccggcggauggu

SEQ ID NO: 15574 - RNA, 23 nt, Pseudomonas aeruginosa PA01
ggcggccgcccuccucaugugcc

SEQ ID NO: 15575 - RNA, 18 nt, Pseudomonas aeruginosa PA01
ggcggccggcugaacgcc

SEQ ID NO: 15576 - RNA, 22 nt, Pseudomonas aeruginosa PA01
ggcggcgccguucggcaggcug

SEQ ID NO: 15577 - RNA, 22 nt, Pseudomonas aeruginosa PA01
ggcggcgcugcaggucggccug

SEQ ID NO: 15578 - RNA, 22 nt, Pseudomonas aeruginosa PA01
ggcgccacggugcuggagcacg

SEQ ID NO: 15579 - RNA, 22 nt, Pseudomonas aeruginosa PA01
ggcgccagggaguggcuccgcg

SEQ ID NO: 15580 - RNA, 22 nt, Pseudomonas aeruginosa PA01
ggcgccggcagguccaggcgcu

SEQ ID NO: 15581 - RNA, 22 nt, Pseudomonas aeruginosa PA01
ggcgcgcaggcugaagaaggcg

SEQ ID NO: 15582 - RNA, 22 nt, Pseudomonas aeruginosa PA01
ggcgcgcaucgcggaccugcuc

SEQ ID NO: 15583 - RNA, 22 nt, Pseudomonas aeruginosa PA01
ggcgcgccagcaggcuccagcc

SEQ ID NO: 15584 - RNA, 22 nt, Pseudomonas aeruginosa PA01
ggcgcgccaguucggccacgag

SEQ ID NO: 15585 - RNA, 22 nt, Pseudomonas aeruginosa PA01
ggccgcgcuggcggaggaggaa

SEQ ID NO: 15586 - RNA, 22 nt, Pseudomonas aeruginosa PA01
ggccgcucugcugcagggccug

SEQ ID NO: 15587 - RNA, 22 nt, Pseudomonas aeruginosa PA01
ggccggcgaaccuggcaacugg

SEQ ID NO: 15588 - RNA, 22 nt, Pseudomonas aeruginosa PA01
ggccggcgacgguggccgaggu

SEQ ID NO: 15589 - RNA, 22 nt, Pseudomonas aeruginosa PA01
ggccggcgccuguccgaccugc

SEQ ID NO: 15590 - RNA, 22 nt, Pseudomonas aeruginosa PA01
ggccggcgguguccuuggcgaa

SEQ ID NO: 15591 - RNA, 22 nt, Pseudomonas aeruginosa PA01
ggccgggaagucuucgucggcc

SEQ ID NO: 15592 - RNA, 22 nt, Pseudomonas aeruginosa PA01
ggccgggucgauacgcaggcug

SEQ ID NO: 15593 - RNA, 22 nt, Pseudomonas aeruginosa PA01
ggccggguugccgcugacgccg

SEQ ID NO: 15594 - RNA, 22 nt, Pseudomonas aeruginosa PA01
ggccgugggccggcgaagccug

SEQ ID NO: 15595 - RNA, 22 nt, Pseudomonas aeruginosa PA01
ggcccuggcgaugcgcuggcug

SEQ ID NO: 15596 - RNA, 22 nt, Pseudomonas aeruginosa PA01
ggccgagcacgucggcuucgag

SEQ ID NO: 15597 - RNA, 19 nt, Pseudomonas aeruginosa PA01
ggccgaggccgagaguuuc

SEQ ID NO: 15598 - RNA, 22 nt, Pseudomonas aeruginosa PA01
ggccgcaggccuggagugccug

SEQ ID NO: 15599 - RNA, 16 nt, Pseudomonas aeruginosa PA01
ggccgcagggccaggc

SEQ ID NO: 15600 - RNA, 22 nt, Pseudomonas aeruginosa PA01
ggcgagcgguucgcgggaaagg

SEQ ID NO: 15601 - RNA, 22 nt, Pseudomonas aeruginosa PA01
ggcgagcugccgcugccggucu

SEQ ID NO: 15602 - RNA, 17 nt, Pseudomonas aeruginosa PA01
ggcgaccaggucggcgu

SEQ ID NO: 15603 - RNA, 22 nt, Pseudomonas aeruginosa PA01
ggcgacccggacuucgccggcg

SEQ ID NO: 15604 - RNA, 22 nt, Pseudomonas aeruginosa PA01
ggccgccgaugcugaccucggc

SEQ ID NO: 15605 - RNA, 23 nt, Pseudomonas aeruginosa PA01
ggccgccggcgauacgcuccugg

SEQ ID NO: 15606 - RNA, 22 nt, Pseudomonas aeruginosa PA01
ggccgccguagccgcugaucag

SEQ ID NO: 15607 - RNA, 22 nt, Pseudomonas aeruginosa PA01
ggccgcgaagugacguaggcca

SEQ ID NO: 15608 - RNA, 22 nt, Pseudomonas aeruginosa PA01
ggccugggccuggaagacguag

SEQ ID NO: 15609 - RNA, 22 nt, Pseudomonas aeruginosa PA01
ggccugggcggccaggacuaca

SEQ ID NO: 15610 - RNA, 20 nt, Pseudomonas aeruginosa PA01
ggccuggggcgacgaugcgc

SEQ ID NO: 15611 - RNA, 22 nt, Pseudomonas aeruginosa PA01
aacgcgagguggugcggcucgg

SEQ ID NO: 15612 - RNA, 22 nt, Pseudomonas aeruginosa PA01
aacugagucucggcaaucauag

SEQ ID NO: 15613 - RNA, 22 nt, Pseudomonas aeruginosa PA01
aacuggaggacauccagguccu

SEQ ID NO: 15614 - RNA, 22 nt, Pseudomonas aeruginosa PA01
aauagcggcuuuucgaugcgca

SEQ ID NO: 15615 - RNA, 22 nt, Pseudomonas aeruginosa PA01
acccuggaauugcagggcuacc

SEQ ID NO: 15616 - RNA, 22 nt, Pseudomonas aeruginosa PA01
accgucggccuggccgcugcgc

SEQ ID NO: 15617 - RNA, 22 nt, Pseudomonas aeruginosa PA01
accacgagaccgaccagcaggc

SEQ ID NO: 15618 - RNA, 22 nt, Pseudomonas aeruginosa PA01
accagcgcgaacaggccgggau

SEQ ID NO: 15619 - RNA, 22 nt, Pseudomonas aeruginosa PA01
accaguccgccagggccgccgg

SEQ ID NO: 15620 - RNA, 22 nt, Pseudomonas aeruginosa PA01
acagccuggaaggcgcggaaga

SEQ ID NO: 15621 - RNA, 22 nt, Pseudomonas aeruginosa PA01
acagcgcguggagguucuccag

SEQ ID NO: 15622 - RNA, 22 nt, Pseudomonas aeruginosa PA01
aaggaugcgccagcggcaacca

SEQ ID NO: 15623 - RNA, 20 nt, Pseudomonas aeruginosa PA01
aaggcauggguuuuucgucg

SEQ ID NO: 15624 - RNA, 22 nt, Pseudomonas aeruginosa PA01
aaguggcguucggcgaacgcgg

SEQ ID NO: 15625 - RNA, 22 nt, Pseudomonas aeruginosa PA01
acaacugcguggacggcgugga

SEQ ID NO: 15626 - RNA, 22 nt, Pseudomonas aeruginosa PA01
aacggcagcgccuccggcagcu

SEQ ID NO: 15627 - RNA, 22 nt, Pseudomonas aeruginosa PA01
aagagugcgccguuggggugaa

SEQ ID NO: 15628 - RNA, 22 nt, Pseudomonas aeruginosa PA01
aagcgaucggcgcggcugaucg

SEQ ID NO: 15629 - RNA, 22 nt, Pseudomonas aeruginosa PA01
aaacugcaugagcggcucgacc

SEQ ID NO: 15630 - RNA, 22 nt, Pseudomonas aeruginosa PA01
agccggcggccucggcggccuc

SEQ ID NO: 15631 - RNA, 22 nt, Pseudomonas aeruginosa PA01
agcuccggcuugaucaggucgg

SEQ ID NO: 15632 - RNA, 19 nt, Pseudomonas aeruginosa PA01
agcucgcgguugccggcau

SEQ ID NO: 15633 - RNA, 18 nt, Pseudomonas aeruginosa PA01
agcugcgacggcuggugg

SEQ ID NO: 15634 - RNA, 22 nt, Pseudomonas aeruginosa PA01
agcugcgcgacgaggucggcca

SEQ ID NO: 15635 - RNA, 22 nt, Pseudomonas aeruginosa PA01
agcuggagcgugaguucgccgc

SEQ ID NO: 15636 - RNA, 23 nt, Pseudomonas aeruginosa PA01
agcuggauggccgccugcuguuc

SEQ ID NO: 15637 - RNA, 19 nt, Pseudomonas aeruginosa PA01
agcuggcgcagcagggugc

SEQ ID NO: 15638 - RNA, 22 nt, Pseudomonas aeruginosa PA01
aggaggaagcgcgccagcaguu

SEQ ID NO: 15639 - RNA, 22 nt, Pseudomonas aeruginosa PA01
aggauccgccagggugucgcgc

SEQ ID NO: 15640 - RNA, 22 nt, Pseudomonas aeruginosa PA01
aggaugaguuccagcgccuuca

SEQ ID NO: 15641 - RNA, 22 nt, Pseudomonas aeruginosa PA01
agggcgaggucagcguggacgc

SEQ ID NO: 15642 - RNA, 22 nt, Pseudomonas aeruginosa PA01
agggcgcguaacugguggucga

SEQ ID NO: 15643 - RNA, 22 nt, Pseudomonas aeruginosa PA01
aggcagcgaauccccagugaug

SEQ ID NO: 15644 - RNA, 22 nt, Pseudomonas aeruginosa PA01
aggcagugggcgaggaugucgg

SEQ ID NO: 15645 - RNA, 22 nt, Pseudomonas aeruginosa PA01
aggccagcggacgcgacgccuu

SEQ ID NO: 15646 - RNA, 22 nt, Pseudomonas aeruginosa PA01
aggccagcgggucgcgccacag

SEQ ID NO: 15647 - RNA, 22 nt, Pseudomonas aeruginosa PA01
aggccgaccugcagcgccgccg

SEQ ID NO: 15648 - RNA, 22 nt, Pseudomonas aeruginosa PA01
aggccggcuaccucgaaggcgg

SEQ ID NO: 15649 - RNA, 22 nt, Pseudomonas aeruginosa PA01
aggccggggugaccaagccggu

SEQ ID NO: 15650 - RNA, 22 nt, Pseudomonas aeruginosa PA01
aggcgccguugcgcgaggcuuu

SEQ ID NO: 15651 - RNA, 22 nt, Pseudomonas aeruginosa PA01
agcaggucagcggcaugccgcu

SEQ ID NO: 15652 - RNA, 22 nt, Pseudomonas aeruginosa PA01
agcaggcggcgguccagcucgc

SEQ ID NO: 15653 - RNA, 22 nt, Pseudomonas aeruginosa PA01
agcagcaggccgcccagggucg

SEQ ID NO: 15654 - RNA, 22 nt, Pseudomonas aeruginosa PA01
agcagcgccugaaggaagucga

SEQ ID NO: 15655 - RNA, 22 nt, Pseudomonas aeruginosa PA01
agcgaccgguguagcgccggcu

SEQ ID NO: 15656 - RNA, 22 nt, Pseudomonas aeruginosa PA01
agcgcagcgagcgcaaucuccu

SEQ ID NO: 15657 - RNA, 22 nt, Pseudomonas aeruginosa PA01
agcgcccgcgcaacugggaaag

SEQ ID NO: 15658 - RNA, 22 nt, Pseudomonas aeruginosa PA01
agcgccgcguccagcuccaggc

SEQ ID NO: 15659 - RNA, 22 nt, Pseudomonas aeruginosa PA01
agcgcgccaucaggcgguucga

SEQ ID NO: 15660 - RNA, 22 nt, Pseudomonas aeruginosa PA01
agcgcgcgcugaaugccgugga

SEQ ID NO: 15661 - RNA, 22 nt, Pseudomonas aeruginosa PA01
agcgcgcggaagcugucgucca

SEQ ID NO: 15662 - RNA, 22 nt, Pseudomonas aeruginosa PA01
agcgcggcaagauguucggcuu

SEQ ID NO: 15663 - RNA, 21 nt, Pseudomonas aeruginosa PA01
agcgcggcgccgaauaucggg

SEQ ID NO: 15664 - RNA, 22 nt, Pseudomonas aeruginosa PA01
agcggcgcgacaccgagcagug

SEQ ID NO: 15665 - RNA, 22 nt, Pseudomonas aeruginosa PA01
agcggcggccccggcaacagcg

SEQ ID NO: 15666 - RNA, 22 nt, Pseudomonas aeruginosa PA01
agcggcgggugcugcuggaccu

SEQ ID NO: 15667 - RNA, 22 nt, Pseudomonas aeruginosa PA01
agcggcgugcgcagcucguggg

SEQ ID NO: 15668 - RNA, 22 nt, Pseudomonas aeruginosa PA01
agcguggccuucuccucggaca

SEQ ID NO: 15669 - RNA, 22 nt, Pseudomonas aeruginosa PA01
aggccgaagcgcugcgccagca

SEQ ID NO: 15670 - RNA, 22 nt, Pseudomonas aeruginosa PA01
aggccgagcgcgaagccuuguc

SEQ ID NO: 15671 - RNA, 22 nt, Pseudomonas aeruginosa PA01
aggccgaguugcgccaggacga

SEQ ID NO: 15672 - RNA, 22 nt, Pseudomonas aeruginosa PA01
aggccgcacgccuggucgggcu

SEQ ID NO: 15673 - RNA, 22 nt, Pseudomonas aeruginosa PA01
aggccgcgcuuuccggcuccag

SEQ ID NO: 15674 - RNA, 22 nt, Pseudomonas aeruginosa PA01
aggccggcgccgaggccagugc

SEQ ID NO: 15675 - RNA, 22 nt, Pseudomonas aeruginosa PA01
aggccggcuuucagcgcggcca

SEQ ID NO: 15676 - RNA, 22 nt, Pseudomonas aeruginosa PA01
aggccggguagcgccucgcugg

SEQ ID NO: 15677 - RNA, 22 nt, Pseudomonas aeruginosa PA01
aggccggguugauggccaggau

SEQ ID NO: 15678 - RNA, 22 nt, Pseudomonas aeruginosa PA01
aggcgcaggcgcaacuggcaga

SEQ ID NO: 15679 - RNA, 22 nt, Pseudomonas aeruginosa PA01
aggcgccgcuugaugguuucgg

SEQ ID NO: 15680 - RNA, 22 nt, Pseudomonas aeruginosa PA01
aggcgccgcuugauguucugca

SEQ ID NO: 15681 - RNA, 22 nt, Pseudomonas aeruginosa PA01
aggcgcgccaggucggacaggu

SEQ ID NO: 15682 - RNA, 22 nt, Pseudomonas aeruginosa PA01
aggcggcgcaggccgagaccga

SEQ ID NO: 15683 - RNA, 22 nt, Pseudomonas aeruginosa PA01
aggcuacgaccgauuucagccg

SEQ ID NO: 15684 - RNA, 22 nt, Pseudomonas aeruginosa PA01
aggcucaggcaggccgccggca

SEQ ID NO: 15685 - RNA, 22 nt, Pseudomonas aeruginosa PA01
aggcuuccuucaacuugucgcc

SEQ ID NO: 15686 - RNA, 22 nt, Pseudomonas aeruginosa PA01
aggagcgcgcggugaucgcccu

SEQ ID NO: 15687 - RNA, 22 nt, Pseudomonas aeruginosa PA01
aggaggcgucggcgucgcccgc

SEQ ID NO: 15688 - RNA, 22 nt, Pseudomonas aeruginosa PA01
aggaacaguucgacgcccaggu

SEQ ID NO: 15689 - RNA, 22 nt, Pseudomonas aeruginosa PA01
agggcgaggccguucgccucgu

SEQ ID NO: 15690 - RNA, 22 nt, Pseudomonas aeruginosa PA01
agggcgcggucgccgucgaaca

SEQ ID NO: 15691 - RNA, 22 nt, Pseudomonas aeruginosa PA01
agggcgggaacugcgcgcgcag

SEQ ID NO: 15692 - RNA, 22 nt, Pseudomonas aeruginosa PA01
agagcgccgccagcgucacagu

SEQ ID NO: 15693 - RNA, 22 nt, Pseudomonas aeruginosa PA01
agccagcccugggcgucgcuca

SEQ ID NO: 15694 - RNA, 22 nt, Pseudomonas aeruginosa PA01
agccggaguugaccccgccguu

SEQ ID NO: 15695 - RNA, 22 nt, Pseudomonas aeruginosa PA01
agccggcgccaugcgucauggc

SEQ ID NO: 15696 - RNA, 22 nt, Pseudomonas aeruginosa PA01
agccguccagcuugagguaggc

SEQ ID NO: 15697 - RNA, 22 nt, Pseudomonas aeruginosa PA01
agccgugcuguccggagcggau

SEQ ID NO: 15698 - RNA, 22 nt, Pseudomonas aeruginosa PA01
agcugcgcgaaggcgauacgcu

SEQ ID NO: 15699 - RNA, 22 nt, Pseudomonas aeruginosa PA01
agcuggaagaucaccuguucga

SEQ ID NO: 15700 - RNA, 22 nt, Pseudomonas aeruginosa PA01
agcuggaaggccagcucgcggc

SEQ ID NO: 15701 - RNA, 20 nt, Pseudomonas aeruginosa PA01
agcgacccuugagcgccggc

SEQ ID NO: 15702 - RNA, 22 nt, Pseudomonas aeruginosa PA01
agcgaggcgucuggcacggcga

SEQ ID NO: 15703 - RNA, 22 nt, Pseudomonas aeruginosa PA01
agcgcagcaaugccaccgugca

SEQ ID NO: 15704 - RNA, 22 nt, Pseudomonas aeruginosa PA01
agcgcagcaggcaggccuggua

SEQ ID NO: 15705 - RNA, 22 nt, Pseudomonas aeruginosa PA01
agcgccacgguggcgccgguga

SEQ ID NO: 15706 - RNA, 22 nt, Pseudomonas aeruginosa PA01
agcgccucgcgcucggcaugac

SEQ ID NO: 15707 - RNA, 22 nt, Pseudomonas aeruginosa PA01
agcgcgaggccagccagcaacu

SEQ ID NO: 15708 - RNA, 22 nt, Pseudomonas aeruginosa PA01
agcgcgcacgcacacccagcuc

SEQ ID NO: 15709 - RNA, 22 nt, Pseudomonas aeruginosa PA01
agcgcgcccuggagcacaaggu

SEQ ID NO: 15710 - RNA, 22 nt, Pseudomonas aeruginosa PA01
agcgcgcggacuaccggguggc

SEQ ID NO: 15711 - RNA, 22 nt, Pseudomonas aeruginosa PA01
agcgcggccggcucgacgaggu

SEQ ID NO: 15712 - RNA, 22 nt, Pseudomonas aeruginosa PA01
agcgcggcggguauugcgacau

SEQ ID NO: 15713 - RNA, 22 nt, Pseudomonas aeruginosa PA01
agcgcgugguucagcagcacau

SEQ ID NO: 15714 - RNA, 22 nt, Pseudomonas aeruginosa PA01
agcggcagcaacgccagucccu

SEQ ID NO: 15715 - RNA, 22 nt, Pseudomonas aeruginosa PA01
agcggccggaugagccagggca

SEQ ID NO: 15716 - RNA, 22 nt, Pseudomonas aeruginosa PA01
agcggcgccagcaggugaugga

SEQ ID NO: 15717 - RNA, 22 nt, Pseudomonas aeruginosa PA01
agcggcgccuucaagcgucuca

SEQ ID NO: 15718 - RNA, 22 nt, Pseudomonas aeruginosa PA01
agcggcgcggugguuggcgugc

SEQ ID NO: 15719 - RNA, 22 nt, Pseudomonas aeruginosa PA01
agcggcggugccugaacuggag

SEQ ID NO: 15720 - RNA, 22 nt, Pseudomonas aeruginosa PA01
agcgggagaucgccaguugaug

SEQ ID NO: 15721 - RNA, 22 nt, Pseudomonas aeruginosa PA01
agcgggcguuugcggcgaccug

SEQ ID NO: 15722 - RNA, 22 nt, Pseudomonas aeruginosa PA01
agcguggcuggcggucaccggg

SEQ ID NO: 15723 - RNA, 22 nt, Pseudomonas aeruginosa PA01
agaucuggaacgacuuccuguu

SEQ ID NO: 15724 - RNA, 22 nt, Pseudomonas aeruginosa PA01
agcacgcgcucguagccgaugu

SEQ ID NO: 15725 - RNA, 22 nt, Pseudomonas aeruginosa PA01
agcaccagguaggacagcgccu

SEQ ID NO: 15726 - RNA, 22 nt, Pseudomonas aeruginosa PA01
agcaccccgccgaccagcauca

SEQ ID NO: 15727 - RNA, 22 nt, Pseudomonas aeruginosa PA01
agaggccgcgcucgccgagcau

SEQ ID NO: 15728 - RNA, 22 nt, Pseudomonas aeruginosa PA01
agaccaggccggacagguacca

SEQ ID NO: 15729 - RNA, 22 nt, Pseudomonas aeruginosa PA01
agacccagcuccggggucucug

SEQ ID NO: 15730 - RNA, 22 nt, Pseudomonas aeruginosa PA01
acugggaucggccagcuugcgg

SEQ ID NO: 15731 - RNA, 22 nt, Pseudomonas aeruginosa PA01
accccgggcacccugacggcuu

SEQ ID NO: 15732 - RNA, 22 nt, Pseudomonas aeruginosa PA01
acccggaccgaggucaaguaag

SEQ ID NO: 15733 - RNA, 22 nt, Pseudomonas aeruginosa PA01
accggcagaccaucggcggcua

SEQ ID NO: 15734 - RNA, 22 nt, Pseudomonas aeruginosa PA01
acuccggccgccgcacgccagg

SEQ ID NO: 15735 - RNA, 22 nt, Pseudomonas aeruginosa PA01
acgucggcggcaugcugcgcuc

SEQ ID NO: 15736 - RNA, 22 nt, Pseudomonas aeruginosa PA01
acgaugcgcuccgaguagccgc

SEQ ID NO: 15737 - RNA, 22 nt, Pseudomonas aeruginosa PA01
acgcagcgcaugcucguagccg

SEQ ID NO: 15738 - RNA, 22 nt, Pseudomonas aeruginosa PA01
acgccggccuggagggcgcucg

SEQ ID NO: 15739 - RNA, 22 nt, Pseudomonas aeruginosa PA01
acgcgcgcaaccgacggcaggg

SEQ ID NO: 15740 - RNA, 22 nt, Pseudomonas aeruginosa PA01
acggaagcgauccgugccuggu

SEQ ID NO: 15741 - RNA, 22 nt, Pseudomonas aeruginosa PA01
acggcucccaagcucagcgacg

SEQ ID NO: 15742 - RNA, 22 nt, Pseudomonas aeruginosa PA01
accugagcgucggcggcgcggu

SEQ ID NO: 15743 - RNA, 22 nt, Pseudomonas aeruginosa PA01
accuggagcuggaggccuugcc

SEQ ID NO: 15744 - RNA, 23 nt, Pseudomonas aeruginosa PA01
acgucggcugggagcguucgcgc

SEQ ID NO: 15745 - RNA, 22 nt, Pseudomonas aeruginosa PA01
acggaagcggaagaaccaggcc

SEQ ID NO: 15746 - RNA, 22 nt, Pseudomonas aeruginosa PA01
acggcagccugcggcugcuggu

SEQ ID NO: 15747 - RNA, 22 nt, Pseudomonas aeruginosa PA01
agcagcggguggccaugggccg

SEQ ID NO: 15748 - RNA, 22 nt, Pseudomonas aeruginosa PA01
agcaggccggcgauggcgucgc

SEQ ID NO: 15749 - RNA, 22 nt, Pseudomonas aeruginosa PA01
agcaggcgaucgagcaugccgc

SEQ ID NO: 15750 - RNA, 22 nt, Pseudomonas aeruginosa PA01
agcagguccuucgagcgacccg

SEQ ID NO: 15751 - RNA, 22 nt, Pseudomonas aeruginosa PA01
agcaggucguggccggccaggg

SEQ ID NO: 15752 - RNA, 22 nt, Pseudomonas aeruginosa PA01
accaggccgccgccuuccucgu

SEQ ID NO: 15753 - RNA, 22 nt, Pseudomonas aeruginosa PA01
accacgagcgcgagcugucgac

SEQ ID NO: 15754 - RNA, 23 nt, Pseudomonas aeruginosa PA01
accagcaggacagcuucgacuuc

SEQ ID NO: 15755 - RNA, 22 nt, Pseudomonas aeruginosa PA01
agagcgaggccaggcgccugga

SEQ ID NO: 15756 - RNA, 19 nt, Pseudomonas aeruginosa PA01
agagcgcggugaucgagcc

SEQ ID NO: 15757 - RNA, 22 nt, Pseudomonas aeruginosa PA01
agagcggccugcgcuucggcga

SEQ ID NO: 15758 - RNA, 22 nt, Pseudomonas aeruginosa PA01
agagcggcuugcuggucggcgc

SEQ ID NO: 15759 - RNA, 22 nt, Pseudomonas aeruginosa PA01
agucgcugaugaaguucaccgc

SEQ ID NO: 15760 - RNA, 22 nt, Pseudomonas aeruginosa PA01
agguugauguacaucauggcgu

SEQ ID NO: 15761 - RNA, 22 nt, Pseudomonas aeruginosa PA01
agguggagcguugcggcgccgg

SEQ ID NO: 15762 - RNA, 22 nt, Pseudomonas aeruginosa PA01
aucagcccggcgaucccgccug

SEQ ID NO: 15763 - RNA, 22 nt, Pseudomonas aeruginosa PA01
auccccggauugcucaggcggu

SEQ ID NO: 15764 - RNA, 22 nt, Pseudomonas aeruginosa PA01
auccgucgcgccgcuaccaucc

SEQ ID NO: 15765 - RNA, 22 nt, Pseudomonas aeruginosa PA01
aucggcccucugcggcaggcgg

SEQ ID NO: 15766 - RNA, 22 nt, Pseudomonas aeruginosa PA01
augccgaaggcgaucgaggcga

SEQ ID NO: 15767 - RNA, 22 nt, Pseudomonas aeruginosa PA01
augccggccaccggagccggcg

SEQ ID NO: 15768 - RNA, 22 nt, Pseudomonas aeruginosa PA01
augcgcccugcccgucugcugg

SEQ ID NO: 15769 - RNA, 22 nt, Pseudomonas aeruginosa PA01
augcggcagguggcgaagaccg

SEQ ID NO: 15770 - RNA, 20 nt, Pseudomonas aeruginosa PA01
augcugaauucgccgccggc

SEQ ID NO: 15771 - RNA, 18 nt, Pseudomonas aeruginosa PA01
cagaccagcgccagcggc

SEQ ID NO: 15772 - RNA, 22 nt, Pseudomonas aeruginosa PA01
cagagcggccuguucggcgggc

SEQ ID NO: 15773 - RNA, 22 nt, Pseudomonas aeruginosa PA01
caagcgccugcgcgccuuccug

SEQ ID NO: 15774 - RNA, 22 nt, Pseudomonas aeruginosa PA01
caccagcuggcggugauggccg

SEQ ID NO: 15775 - RNA, 22 nt, Pseudomonas aeruginosa PA01
caccgucgccuggcccagcggc

SEQ ID NO: 15776 - RNA, 22 nt, Pseudomonas aeruginosa PA01
ccaggccgcgcucuugccccac

SEQ ID NO: 15777 - RNA, 22 nt, Pseudomonas aeruginosa PA01
ccaggccggggcgaugaucgug

SEQ ID NO: 15778 - RNA, 22 nt, Pseudomonas aeruginosa PA01
ccaggccguccucgcggacgaa

SEQ ID NO: 15779 - RNA, 22 nt, Pseudomonas aeruginosa PA01
ccaggcgcagguugagcaggaa

SEQ ID NO: 15780 - RNA, 22 nt, Pseudomonas aeruginosa PA01
ccagggcacgcugggcgucggc

SEQ ID NO: 15781 - RNA, 22 nt, Pseudomonas aeruginosa PA01
ccagggccucgagacucugccg

SEQ ID NO: 15782 - RNA, 22 nt, Pseudomonas aeruginosa PA01
cccagcaguugcugcuggcggc

SEQ ID NO: 15783 - RNA, 22 nt, Pseudomonas aeruginosa PA01
ccagcaggaaccgcgcgcgguu

SEQ ID NO: 15784 - RNA, 22 nt, Pseudomonas aeruginosa PA01
ccagccagccuucgccgaggcu

SEQ ID NO: 15785 - RNA, 22 nt, Pseudomonas aeruginosa PA01
ccagccugaccagccuggccac

SEQ ID NO: 15786 - RNA, 22 nt, Pseudomonas aeruginosa PA01
ccagcgccuggccaucgugcgc

SEQ ID NO: 15787 - RNA, 20 nt, Pseudomonas aeruginosa PA01
ccagcgcguggucgcgcagc

SEQ ID NO: 15788 - RNA, 21 nt, Pseudomonas aeruginosa PA01
ccaggcagugaccacaagggc

SEQ ID NO: 15789 - RNA, 22 nt, Pseudomonas aeruginosa PA01
ccaggccaacgaagccaacgaa

SEQ ID NO: 15790 - RNA, 22 nt, Pseudomonas aeruginosa PA01
ccgcccuggccuauccgcugcu

SEQ ID NO: 15791 - RNA, 22 nt, Pseudomonas aeruginosa PA01
ccgccgccgaccaugaacaucg

SEQ ID NO: 15792 - RNA, 22 nt, Pseudomonas aeruginosa PA01
ccgccggcaucggccugcacac

SEQ ID NO: 15793 - RNA, 22 nt, Pseudomonas aeruginosa PA01
ccgccggguacguugcagcaac

SEQ ID NO: 15794 - RNA, 22 nt, Pseudomonas aeruginosa PA01
ccgccgggugguguccucagcg

SEQ ID NO: 15795 - RNA, 22 nt, Pseudomonas aeruginosa PA01
ccgccuggguagcuacguggcg

SEQ ID NO: 15796 - RNA, 22 nt, Pseudomonas aeruginosa PA01
ccgcggcauggugguggucuac

SEQ ID NO: 15797 - RNA, 22 nt, Pseudomonas aeruginosa PA01
ccgcggcuauggcgucgaggcg

SEQ ID NO: 15798 - RNA, 22 nt, Pseudomonas aeruginosa PA01
ccgagcaggaagccuugcagcg

SEQ ID NO: 15799 - RNA, 22 nt, Pseudomonas aeruginosa PA01
ccgagggcaagccgcgcuacac

SEQ ID NO: 15800 - RNA, 22 nt, Pseudomonas aeruginosa PA01
ccgcacagccguaucggccugc

SEQ ID NO: 15801 - RNA, 22 nt, Pseudomonas aeruginosa PA01
cccuggaagaccugccggagaa

SEQ ID NO: 15802 - RNA, 22 nt, Pseudomonas aeruginosa PA01
ccccagggccgcggagcgcagg

SEQ ID NO: 15803 - RNA, 22 nt, Pseudomonas aeruginosa PA01
cccgagcugcucgaacuccacg

SEQ ID NO: 15804 - RNA, 19 nt, Pseudomonas aeruginosa PA01
cccgccgcgccggccugga

SEQ ID NO: 15805 - RNA, 22 nt, Pseudomonas aeruginosa PA01
cccgccgcugguggucgacguc

SEQ ID NO: 15806 - RNA, 22 nt, Pseudomonas aeruginosa PA01
cccgcggcuggcugcgcuaccg

SEQ ID NO: 15807 - RNA, 22 nt, Pseudomonas aeruginosa PA01
cccgcuccguuggggccgagga

SEQ ID NO: 15808 - RNA, 22 nt, Pseudomonas aeruginosa PA01
cccggagcuggucaaccaggac

SEQ ID NO: 15809 - RNA, 22 nt, Pseudomonas aeruginosa PA01
cccggccggcgaugcaguggag

SEQ ID NO: 15810 - RNA, 22 nt, Pseudomonas aeruginosa PA01
cccggcgggcaccuguguggcc

SEQ ID NO: 15811 - RNA, 22 nt, Pseudomonas aeruginosa PA01
cccggcucguuggucacggcga

SEQ ID NO: 15812 - RNA, 22 nt, Pseudomonas aeruginosa PA01
cccggcuguucguugaucggcu

SEQ ID NO: 15813 - RNA, 22 nt, Pseudomonas aeruginosa PA01
cccggggacaugucguccagcc

SEQ ID NO: 15814 - RNA, 22 nt, Pseudomonas aeruginosa PA01
cauccggcggacagcccgcccc

SEQ ID NO: 15815 - RNA, 22 nt, Pseudomonas aeruginosa PA01
cagucucagugucugcggugcu

SEQ ID NO: 15816 - RNA, 22 nt, Pseudomonas aeruginosa PA01
cagggcgcuauucgcccuacgg

SEQ ID NO: 15817 - RNA, 22 nt, Pseudomonas aeruginosa PA01
ccaccggcaccggcgccgaggu

SEQ ID NO: 15818 - RNA, 22 nt, Pseudomonas aeruginosa PA01
ccaccuccuccccggugagcag

SEQ ID NO: 15819 - RNA, 22 nt, Pseudomonas aeruginosa PA01
ccacgaaggccaucugcauggu

SEQ ID NO: 15820 - RNA, 22 nt, Pseudomonas aeruginosa PA01
ccacgagccggagcuggccuuc

SEQ ID NO: 15821 - RNA, 22 nt, Pseudomonas aeruginosa PA01
cagccgcgccaggccaggcgcu

SEQ ID NO: 15822 - RNA, 22 nt, Pseudomonas aeruginosa PA01
cagccagcccggcggucuccgc

SEQ ID NO: 15823 - RNA, 22 nt, Pseudomonas aeruginosa PA01
cagcagccgaucgucgcgcucg

SEQ ID NO: 15824 - RNA, 22 nt, Pseudomonas aeruginosa PA01
cagcagccuggccggcaguuuu

SEQ ID NO: 15825 - RNA, 22 nt, Pseudomonas aeruginosa PA01
cagcagcgccucggcgccgaac

SEQ ID NO: 15826 - RNA, 22 nt, Pseudomonas aeruginosa PA01
cagcgccagcggaauccccgag

SEQ ID NO: 15827 - RNA, 22 nt, Pseudomonas aeruginosa PA01
cagcgccagcggccggcuccug

SEQ ID NO: 15828 - RNA, 22 nt, Pseudomonas aeruginosa PA01
cagcgcgccgauacccaugccg

SEQ ID NO: 15829 - RNA, 22 nt, Pseudomonas aeruginosa PA01
cagcgcgcgagugagcaugggc

SEQ ID NO: 15830 - RNA, 22 nt, Pseudomonas aeruginosa PA01
cagcgcguucuuggccugccag

SEQ ID NO: 15831 - RNA, 22 nt, Pseudomonas aeruginosa PA01
cagcgcuggugcgccgaggacu

SEQ ID NO: 15832 - RNA, 22 nt, Pseudomonas aeruginosa PA01
cagcggagagacuuuuucauua

SEQ ID NO: 15833 - RNA, 22 nt, Pseudomonas aeruginosa PA01
caggaugcgcuccagcucgccg

SEQ ID NO: 15834 - RNA, 22 nt, Pseudomonas aeruginosa PA01
cagcucggggaaaugccggccc

SEQ ID NO: 15835 - RNA, 22 nt, Pseudomonas aeruginosa PA01
cagcuggaaggcgcgcuugccg

SEQ ID NO: 15836 - RNA, 22 nt, Pseudomonas aeruginosa PA01
cagcuggaugcucgcgcucagc

SEQ ID NO: 15837 - RNA, 22 nt, Pseudomonas aeruginosa PA01
cagcgaccuggcgacgcgccug

SEQ ID NO: 15838 - RNA, 22 nt, Pseudomonas aeruginosa PA01
cagcgugccgucuucgaggcug

SEQ ID NO: 15839 - RNA, 22 nt, Pseudomonas aeruginosa PA01
caggcccagcugggucgcgguc

SEQ ID NO: 15840 - RNA, 22 nt, Pseudomonas aeruginosa PA01
caggccgaacucgcccugggcg

SEQ ID NO: 15841 - RNA, 22 nt, Pseudomonas aeruginosa PA01
caggccgagcgcgcccuggccg

SEQ ID NO: 15842 - RNA, 22 nt, Pseudomonas aeruginosa PA01
caggccgccggcgaccugccag

SEQ ID NO: 15843 - RNA, 23 nt, Pseudomonas aeruginosa PA01
caggccguugcuggcagcguggg

SEQ ID NO: 15844 - RNA, 22 nt, Pseudomonas aeruginosa PA01
caggccuguagcgccgaggcgg

SEQ ID NO: 15845 - RNA, 21 nt, Pseudomonas aeruginosa PA01
caggcgcgggcccauccaguu

SEQ ID NO: 15846 - RNA, 22 nt, Pseudomonas aeruginosa PA01
caggcgcguggcccagcaggag

SEQ ID NO: 15847 - RNA, 22 nt, Pseudomonas aeruginosa PA01
cguccggcaucagggcguaguc

SEQ ID NO: 15848 - RNA, 22 nt, Pseudomonas aeruginosa PA01
cgucggccaggaggugguacgc

SEQ ID NO: 15849 - RNA, 22 nt, Pseudomonas aeruginosa PA01
cgucggccaggcgcaugccgcc

SEQ ID NO: 15850 - RNA, 22 nt, Pseudomonas aeruginosa PA01
cgucggccucgcguugccagcg

SEQ ID NO: 15851 - RNA, 22 nt, Pseudomonas aeruginosa PA01
cgucgugcagcaucgcggccau

SEQ ID NO: 15852 - RNA, 22 nt, Pseudomonas aeruginosa PA01
cguacggcacagcgccuugucc

SEQ ID NO: 15853 - RNA, 22 nt, Pseudomonas aeruginosa PA01
cguagcgcauuuccugggccuu

SEQ ID NO: 15854 - RNA, 22 nt, Pseudomonas aeruginosa PA01
cguggcagaaggccgaggcgcg

SEQ ID NO: 15855 - RNA, 22 nt, Pseudomonas aeruginosa PA01
cguggcccuggugacccugguc

SEQ ID NO: 15856 - RNA, 22 nt, Pseudomonas aeruginosa PA01
cguggcgagcaggcggucggcg

SEQ ID NO: 15857 - RNA, 22 nt, Pseudomonas aeruginosa PA01
cguggcgaugcccgcauccagc

SEQ ID NO: 15858 - RNA, 22 nt, Pseudomonas aeruginosa PA01
cguggcgaugucggcguggccg

SEQ ID NO: 15859 - RNA, 20 nt, Pseudomonas aeruginosa PA01
cgugccgggcgguccgcgac

SEQ ID NO: 15860 - RNA, 22 nt, Pseudomonas aeruginosa PA01
cggggccacgugccagcaggag

SEQ ID NO: 15861 - RNA, 22 nt, Pseudomonas aeruginosa PA01
cgggccaggcacuacgugcucu

SEQ ID NO: 15862 - RNA, 22 nt, Pseudomonas aeruginosa PA01
cgggccaguuggaccaggaucg

SEQ ID NO: 15863 - RNA, 22 nt, Pseudomonas aeruginosa PA01
cggcuguuguuucccaaggcgg

SEQ ID NO: 15864 - RNA, 22 nt, Pseudomonas aeruginosa PA01
cggcuucgcgcagggccgccag

SEQ ID NO: 15865 - RNA, 22 nt, Pseudomonas aeruginosa PA01
cgguagcgguccgugcccagcc

SEQ ID NO: 15866 - RNA, 22 nt, Pseudomonas aeruginosa PA01
cgguccggcggaagcaggucgg

SEQ ID NO: 15867 - RNA, 20 nt, Pseudomonas aeruginosa PA01
cggucggcgaggcgccuggc

SEQ ID NO: 15868 - RNA, 22 nt, Pseudomonas aeruginosa PA01
cggugcgcaugaaggcgaggaa

SEQ ID NO: 15869 - RNA, 20 nt, Pseudomonas aeruginosa PA01
cggugggcugcaucuuuucc

SEQ ID NO: 15870 - RNA, 22 nt, Pseudomonas aeruginosa PA01
cggugggcuggaagguccggcu

SEQ ID NO: 15871 - RNA, 21 nt, Pseudomonas aeruginosa PA01
cggccgagcgcugguaccgcg

SEQ ID NO: 15872 - RNA, 22 nt, Pseudomonas aeruginosa PA01
cggccgaggaaauagcccuggc

SEQ ID NO: 15873 - RNA, 21 nt, Pseudomonas aeruginosa PA01
cggccgggagcgccuggaugc

SEQ ID NO: 15874 - RNA, 22 nt, Pseudomonas aeruginosa PA01
cggccuggccauggcgguggac

SEQ ID NO: 15875 - RNA, 22 nt, Pseudomonas aeruginosa PA01
cggccuggcugaacgacagcgu

SEQ ID NO: 15876 - RNA, 22 nt, Pseudomonas aeruginosa PA01
cggcgaacgggaaggugccgac

SEQ ID NO: 15877 - RNA, 23 nt, Pseudomonas aeruginosa PA01
cggcgaccagcgccgccaggcag

SEQ ID NO: 15878 - RNA, 22 nt, Pseudomonas aeruginosa PA01
cggcgaccugcgcgugcaguuc

SEQ ID NO: 15879 - RNA, 22 nt, Pseudomonas aeruginosa PA01
cggcgagccguccuugcgcaga

SEQ ID NO: 15880 - RNA, 22 nt, Pseudomonas aeruginosa PA01
cggcgagcugcuccgcguggcu

SEQ ID NO: 15881 - RNA, 22 nt, Pseudomonas aeruginosa PA01
cggcgaucugcucggcgagggc

SEQ ID NO: 15882 - RNA, 22 nt, Pseudomonas aeruginosa PA01
cggcgcaggaaagggaucugcg

SEQ ID NO: 15883 - RNA, 22 nt, Pseudomonas aeruginosa PA01
cggcgcaggaugggcguggacg

SEQ ID NO: 15884 - RNA, 22 nt, Pseudomonas aeruginosa PA01
cggcgccgacaucgcgcagguc

SEQ ID NO: 15885 - RNA, 22 nt, Pseudomonas aeruginosa PA01
cggcgcgccagaccaccugguc

SEQ ID NO: 15886 - RNA, 22 nt, Pseudomonas aeruginosa PA01
cggcgcgccgaaggcgauaugg

SEQ ID NO: 15887 - RNA, 20 nt, Pseudomonas aeruginosa PA01
cggcgcgcuggcuaccggcc

SEQ ID NO: 15888 - RNA, 22 nt, Pseudomonas aeruginosa PA01
cggcggcacaggcggccugcac

SEQ ID NO: 15889 - RNA, 22 nt, Pseudomonas aeruginosa PA01
cggcggcagguuuucucgacgc

SEQ ID NO: 15890 - RNA, 22 nt, Pseudomonas aeruginosa PA01
cggcggccuugccgcucugcuc

SEQ ID NO: 15891 - RNA, 22 nt, Pseudomonas aeruginosa PA01
cggcgggcugcuggugagccag

SEQ ID NO: 15892 - RNA, 22 nt, Pseudomonas aeruginosa PA01
cggcguccuggaucagcgccug

SEQ ID NO: 15893 - RNA, 22 nt, Pseudomonas aeruginosa PA01
cggcguccuggucccggugcuc

SEQ ID NO: 15894 - RNA, 22 nt, Pseudomonas aeruginosa PA01
cggcuacccuggaguccgggcc

SEQ ID NO: 15895 - RNA, 22 nt, Pseudomonas aeruginosa PA01
cggcuacgccuacgugcccggc

SEQ ID NO: 15896 - RNA, 22 nt, Pseudomonas aeruginosa PA01
cggcuccauggccagggcgcgg

SEQ ID NO: 15897 - RNA, 22 nt, Pseudomonas aeruginosa PA01
cggcucgucuuccgggcccugc

SEQ ID NO: 15898 - RNA, 22 nt, Pseudomonas aeruginosa PA01
cggcucguucaucgccaucugc

SEQ ID NO: 15899 - RNA, 22 nt, Pseudomonas aeruginosa PA01
cggcauccagcagggucuggua

SEQ ID NO: 15900 - RNA, 22 nt, Pseudomonas aeruginosa PA01
cggcauccuggcgguucugggu

SEQ ID NO: 15901 - RNA, 22 nt, Pseudomonas aeruginosa PA01
cgggagcaacgcuaugcccggc

SEQ ID NO: 15902 - RNA, 22 nt, Pseudomonas aeruginosa PA01
cgggagcggaccgccugcucgg

SEQ ID NO: 15903 - RNA, 22 nt, Pseudomonas aeruginosa PA01
cgggauggucgcucggcggcaa

SEQ ID NO: 15904 - RNA, 22 nt, Pseudomonas aeruginosa PA01
cgggcagcaccucgccagccgg

SEQ ID NO: 15905 - RNA, 22 nt, Pseudomonas aeruginosa PA01
cgggcagcgcauccgacagcgc

SEQ ID NO: 15906 - RNA, 20 nt, Pseudomonas aeruginosa PA01
cggaagugguggucgccggg

SEQ ID NO: 15907 - RNA, 22 nt, Pseudomonas aeruginosa PA01
cggacgcccgguguaggugcug

SEQ ID NO: 15908 - RNA, 22 nt, Pseudomonas aeruginosa PA01
cggacgcggauuggccgccucg

SEQ ID NO: 15909 - RNA, 22 nt, Pseudomonas aeruginosa PA01
cggagcgcccuugagcuugggu

SEQ ID NO: 15910 - RNA, 22 nt, Pseudomonas aeruginosa PA01
cggaggaagccaccggacucga

SEQ ID NO: 15911 - RNA, 22 nt, Pseudomonas aeruginosa PA01
cggcacagaggccgggcccuga

SEQ ID NO: 15912 - RNA, 22 nt, Pseudomonas aeruginosa PA01
cggcaccgcugaagccggcgac

SEQ ID NO: 15913 - RNA, 22 nt, Pseudomonas aeruginosa PA01
cggcagcagcgccggcgaggag

SEQ ID NO: 15914 - RNA, 22 nt, Pseudomonas aeruginosa PA01
cucgccggccggacugauggug

SEQ ID NO: 15915 - RNA, 22 nt, Pseudomonas aeruginosa PA01
cucgccggcgccaugcagcagc

SEQ ID NO: 15916 - RNA, 22 nt, Pseudomonas aeruginosa PA01
cucgccggucaccgacgagcgc

SEQ ID NO: 15917 - RNA, 22 nt, Pseudomonas aeruginosa PA01
cuccguggugguggucuugccc

SEQ ID NO: 15918 - RNA, 22 nt, Pseudomonas aeruginosa PA01
cuccggccuucugaaggcucuu

SEQ ID NO: 15919 - RNA, 22 nt, Pseudomonas aeruginosa PA01
cugaacuucgacgguaugauug

SEQ ID NO: 15920 - RNA, 22 nt, Pseudomonas aeruginosa PA01
cugccggcaacucggcgauccc

SEQ ID NO: 15921 - RNA, 22 nt, Pseudomonas aeruginosa PA01
cugccggcaccggccuugacca

SEQ ID NO: 15922 - RNA, 22 nt, Pseudomonas aeruginosa PA01
cugccggcccugguggcggcgg

SEQ ID NO: 15923 - RNA, 22 nt, Pseudomonas aeruginosa PA01
cugcuucaaggagcacuagacu

SEQ ID NO: 15924 - RNA, 22 nt, Pseudomonas aeruginosa PA01
cuggaagcgcuggugccgccau

SEQ ID NO: 15925 - RNA, 22 nt, Pseudomonas aeruginosa PA01
cugcgcgccaauggcgauccga

SEQ ID NO: 15926 - RNA, 22 nt, Pseudomonas aeruginosa PA01
cugcaucacccgcucguggucc

SEQ ID NO: 15927 - RNA, 22 nt, Pseudomonas aeruginosa PA01
cuuccauggugacgccggucug

SEQ ID NO: 15928 - RNA, 22 nt, Pseudomonas aeruginosa PA01
cuucggccuuggcguccuguag

SEQ ID NO: 15929 - RNA, 22 nt, Pseudomonas aeruginosa PA01
cuuguguuuuuacugucgaaau

SEQ ID NO: 15930 - RNA, 22 nt, Pseudomonas aeruginosa PA01
cugggcggcugugccgcggugg

SEQ ID NO: 15931 - RNA, 22 nt, Pseudomonas aeruginosa PA01
ccgggcgcuggucugcgcggug

SEQ ID NO: 15932 - RNA, 22 nt, Pseudomonas aeruginosa PA01
ccggucuccgccgggcgguggc

SEQ ID NO: 15933 - RNA, 22 nt, Pseudomonas aeruginosa PA01
ccgguucuccagcaccaggcgg

SEQ ID NO: 15934 - RNA, 22 nt, Pseudomonas aeruginosa PA01
ccguccugccucguccgcgcag

SEQ ID NO: 15935 - RNA, 19 nt, Pseudomonas aeruginosa PA01
ccgucgccggcguuggucg

SEQ ID NO: 15936 - RNA, 22 nt, Pseudomonas aeruginosa PA01
ccgugcggaagacgccuuccaa

SEQ ID NO: 15937 - RNA, 22 nt, Pseudomonas aeruginosa PA01
ccucgccgcgagcguggcacuc

SEQ ID NO: 15938 - RNA, 22 nt, Pseudomonas aeruginosa PA01
ccucuccggcgacgaggccaag

SEQ ID NO: 15939 - RNA, 22 nt, Pseudomonas aeruginosa PA01
ccugagcgucagcgacgacggu

SEQ ID NO: 15940 - RNA, 22 nt, Pseudomonas aeruginosa PA01
ccuggccggccacgaccugcuc

SEQ ID NO: 15941 - RNA, 22 nt, Pseudomonas aeruginosa PA01
ccugcgaccagagcugggccag

SEQ ID NO: 15942 - RNA, 23 nt, Pseudomonas aeruginosa PA01
ccugcuccgcgauugccugggcg

SEQ ID NO: 15943 - RNA, 22 nt, Pseudomonas aeruginosa PA01
ccgcuccgacaggggcaaggcg

SEQ ID NO: 15944 - RNA, 22 nt, Pseudomonas aeruginosa PA01
ccgcuggacggggccucguuga

SEQ ID NO: 15945 - RNA, 22 nt, Pseudomonas aeruginosa PA01
ccggaagcccugagccgcucug

SEQ ID NO: 15946 - RNA, 22 nt, Pseudomonas aeruginosa PA01
ccggagccgguucgcaccuauc

SEQ ID NO: 15947 - RNA, 22 nt, Pseudomonas aeruginosa PA01
ccggagccguccgguaccacgu

SEQ ID NO: 15948 - RNA, 22 nt, Pseudomonas aeruginosa PA01
ccggagcgcccgggccuucguc

SEQ ID NO: 15949 - RNA, 22 nt, Pseudomonas aeruginosa PA01
ccggagcggcgagcagggcgag

SEQ ID NO: 15950 - RNA, 22 nt, Pseudomonas aeruginosa PA01
ccggcagccacugcgccugcug

SEQ ID NO: 15951 - RNA, 19 nt, Pseudomonas aeruginosa PA01
ccggcaucuuauggggcgu

SEQ ID NO: 15952 - RNA, 22 nt, Pseudomonas aeruginosa PA01
ccggcccgccgggugcggccug

SEQ ID NO: 15953 - RNA, 22 nt, Pseudomonas aeruginosa PA01
ccggccugucuucugccggaca

SEQ ID NO: 15954 - RNA, 22 nt, Pseudomonas aeruginosa PA01
ccggccuuggcguccggcuugc

SEQ ID NO: 15955 - RNA, 22 nt, Pseudomonas aeruginosa PA01
ccggcgccgugaccccgguggc

SEQ ID NO: 15956 - RNA, 22 nt, Pseudomonas aeruginosa PA01
ccggcgcgaagaugucguguuc

SEQ ID NO: 15957 - RNA, 22 nt, Pseudomonas aeruginosa PA01
ccggcgcgcuccugcagacccg

SEQ ID NO: 15958 - RNA, 22 nt, Pseudomonas aeruginosa PA01
ccggcgcugcugaucgcuucgu

SEQ ID NO: 15959 - RNA, 22 nt, Pseudomonas aeruginosa PA01
ccggcggcaucaggcccugcac

SEQ ID NO: 15960 - RNA, 22 nt, Pseudomonas aeruginosa PA01
ccggcggccaguuggcgggcca

SEQ ID NO: 15961 - RNA, 22 nt, Pseudomonas aeruginosa PA01
ccggcggguggaagucuggguc

SEQ ID NO: 15962 - RNA, 22 nt, Pseudomonas aeruginosa PA01
ccggcuccaccgaacuggaccg

SEQ ID NO: 15963 - RNA, 23 nt, Pseudomonas aeruginosa PA01
ccggcucgucucagucgagcuug

SEQ ID NO: 15964 - RNA, 22 nt, Pseudomonas aeruginosa PA01
ccggcugguagccggccggcag

SEQ ID NO: 15965 - RNA, 22 nt, Pseudomonas aeruginosa PA01
ccggcuuccucgaacugcucgg

SEQ ID NO: 15966 - RNA, 22 nt, Pseudomonas aeruginosa PA01
cgaacagcagcagcggagcgac

SEQ ID NO: 15967 - RNA, 22 nt, Pseudomonas aeruginosa PA01
cgaaccagcgcaacggcgcguc

SEQ ID NO: 15968 - RNA, 18 nt, Pseudomonas aeruginosa PA01
cgaccaggcguggcugua

SEQ ID NO: 15969 - RNA, 22 nt, Pseudomonas aeruginosa PA01
cgaccagggcgcggccggcgaa

SEQ ID NO: 15970 - RNA, 22 nt, Pseudomonas aeruginosa PA01
cgaccaggucguccugcgccga

SEQ ID NO: 15971 - RNA, 22 nt, Pseudomonas aeruginosa PA01
cgacccgccaggcgcugggcga

SEQ ID NO: 15972 - RNA, 22 nt, Pseudomonas aeruginosa PA01
ccuuggucaucgggguggaucg

SEQ ID NO: 15973 - RNA, 22 nt, Pseudomonas aeruginosa PA01
ccuggggcgccugcugcuacag

SEQ ID NO: 15974 - RNA, 22 nt, Pseudomonas aeruginosa PA01
ccugggcaagcucggcaagggc

SEQ ID NO: 15975 - RNA, 22 nt, Pseudomonas aeruginosa PA01
cgaagcgcugguucagggaggc

SEQ ID NO: 15976 - RNA, 22 nt, Pseudomonas aeruginosa PA01
cgagcagcucagugccuuccac

SEQ ID NO: 15977 - RNA, 23 nt, Pseudomonas aeruginosa PA01
cgagcagcucgccgagcugucgc

SEQ ID NO: 15978 - RNA, 22 nt, Pseudomonas aeruginosa PA01
cgagcagguguugcaggcgggu

SEQ ID NO: 15979 - RNA, 22 nt, Pseudomonas aeruginosa PA01
cgagcuggcgcuccuggccgcu

SEQ ID NO: 15980 - RNA, 22 nt, Pseudomonas aeruginosa PA01
cgaggaacaugccgaugaucau

SEQ ID NO: 15981 - RNA, 22 nt, Pseudomonas aeruginosa PA01
cgaggaaguugaggauggcguu

SEQ ID NO: 15982 - RNA, 22 nt, Pseudomonas aeruginosa PA01
cgaggaggacgcucgcggucgc

SEQ ID NO: 15983 - RNA, 21 nt, Pseudomonas aeruginosa PA01
cgaucgcccaggcggcgggca

SEQ ID NO: 15984 - RNA, 22 nt, Pseudomonas aeruginosa PA01
cgaucgccuggcacgccacccg

SEQ ID NO: 15985 - RNA, 21 nt, Pseudomonas aeruginosa PA01
cgaucggcaggcugucgucgu

SEQ ID NO: 15986 - RNA, 21 nt, Pseudomonas aeruginosa PA01
cgaugcgguccucgucccagc

SEQ ID NO: 15987 - RNA, 22 nt, Pseudomonas aeruginosa PA01
cgcugcagaccgagcccggcca

SEQ ID NO: 15988 - RNA, 22 nt, Pseudomonas aeruginosa PA01
cgcugcagccacucggccaggu

SEQ ID NO: 15989 - RNA, 22 nt, Pseudomonas aeruginosa PA01
cgcugcagccgcagauggccuu

SEQ ID NO: 15990 - RNA, 22 nt, Pseudomonas aeruginosa PA01
cgcugcaggaucaguucguggu

SEQ ID NO: 15991 - RNA, 22 nt, Pseudomonas aeruginosa PA01
cgcugcgcgguguccucggcga

SEQ ID NO: 15992 - RNA, 22 nt, Pseudomonas aeruginosa PA01
cgcuggagacccuggauuucgc

SEQ ID NO: 15993 - RNA, 22 nt, Pseudomonas aeruginosa PA01
cgcuggaguuggccaacgccag

SEQ ID NO: 15994 - RNA, 22 nt, Pseudomonas aeruginosa PA01
cgcuggcgccgguggcggugga

SEQ ID NO: 15995 - RNA, 22 nt, Pseudomonas aeruginosa PA01
cgccagagcccgguggcgaucc

SEQ ID NO: 15996 - RNA, 17 nt, Pseudomonas aeruginosa PA01
cgccagcgccgacagcc

SEQ ID NO: 15997 - RNA, 22 nt, Pseudomonas aeruginosa PA01
cgccccagguccuggccgccga

SEQ ID NO: 15998 - RNA, 22 nt, Pseudomonas aeruginosa PA01
cgcccggcaugggcacucgcau

SEQ ID NO: 15999 - RNA, 22 nt, Pseudomonas aeruginosa PA01
cgccaccgauacgcagccgguu

SEQ ID NO: 16000 - RNA, 21 nt, Pseudomonas aeruginosa PA01
cgcagcugucgaggucggcga

SEQ ID NO: 16001 - RNA, 22 nt, Pseudomonas aeruginosa PA01
cgcagcaggcgguacucggcgc

SEQ ID NO: 16002 - RNA, 22 nt, Pseudomonas aeruginosa PA01
cgagcgcuuccugaggcgcgua

SEQ ID NO: 16003 - RNA, 22 nt, Pseudomonas aeruginosa PA01
cgagcggccagggccugcaccg

SEQ ID NO: 16004 - RNA, 22 nt, Pseudomonas aeruginosa PA01
cgcacagcuccgcgacugggaa

SEQ ID NO: 16005 - RNA, 22 nt, Pseudomonas aeruginosa PA01
cgcacagggccggauccuugcu

SEQ ID NO: 16006 - RNA, 22 nt, Pseudomonas aeruginosa PA01
cgcaccagggucgggccgcgcu

SEQ ID NO: 16007 - RNA, 22 nt, Pseudomonas aeruginosa PA01
cgcccuggucgccgucaucgcg

SEQ ID NO: 16008 - RNA, 22 nt, Pseudomonas aeruginosa PA01
cgccgaccagcaggccgacgac

SEQ ID NO: 16009 - RNA, 22 nt, Pseudomonas aeruginosa PA01
cgccgacccgcaugcccagcga

SEQ ID NO: 16010 - RNA, 22 nt, Pseudomonas aeruginosa PA01
cgccgaccuuccauggcgcgcu

SEQ ID NO: 16011 - RNA, 22 nt, Pseudomonas aeruginosa PA01
cgccgcccucuugcggcgaacc

SEQ ID NO: 16012 - RNA, 19 nt, Pseudomonas aeruginosa PA01
cgccgccgaauccuucgcc

SEQ ID NO: 16013 - RNA, 22 nt, Pseudomonas aeruginosa PA01
cgccgccgauacgcagccgguu

SEQ ID NO: 16014 - RNA, 22 nt, Pseudomonas aeruginosa PA01
cgccggccgucguccucgaagu

SEQ ID NO: 16015 - RNA, 19 nt, Pseudomonas aeruginosa PA01
cgccggcgccgggcugauc

SEQ ID NO: 16016 - RNA, 22 nt, Pseudomonas aeruginosa PA01
cgccggcgcucaagggucgcua

SEQ ID NO: 16017 - RNA, 17 nt, Pseudomonas aeruginosa PA01
cgccggcggcgugcagg

SEQ ID NO: 16018 - RNA, 22 nt, Pseudomonas aeruginosa PA01
cgccggcuuccaccugcucgac

SEQ ID NO: 16019 - RNA, 18 nt, Pseudomonas aeruginosa PA01
cgccucgccgcugcgguc

SEQ ID NO: 16020 - RNA, 22 nt, Pseudomonas aeruginosa PA01
cgcgaacauggacuggaaccgg

SEQ ID NO: 16021 - RNA, 22 nt, Pseudomonas aeruginosa PA01
cgcgcagcgccaaggauggccu

SEQ ID NO: 16022 - RNA, 22 nt, Pseudomonas aeruginosa PA01
cgcgcagggcccgcucgcuggg

SEQ ID NO: 16023 - RNA, 22 nt, Pseudomonas aeruginosa PA01
cgcgcaguuuacccggagaacc

SEQ ID NO: 16024 - RNA, 22 nt, Pseudomonas aeruginosa PA01
cgcgccggcaggaaaaagcccc

SEQ ID NO: 16025 - RNA, 22 nt, Pseudomonas aeruginosa PA01
cgcgccggugucagcgggccag

SEQ ID NO: 16026 - RNA, 22 nt, Pseudomonas aeruginosa PA01
cgcgcgccgggccuguucaggg

SEQ ID NO: 16027 - RNA, 22 nt, Pseudomonas aeruginosa PA01
cgcgcgcuggucgguccgggau

SEQ ID NO: 16028 - RNA, 22 nt, Pseudomonas aeruginosa PA01
cgcgcgguugcuggcggugcuc

SEQ ID NO: 16029 - RNA, 22 nt, Pseudomonas aeruginosa PA01
cgcgcuggaacgacgucuaccu

SEQ ID NO: 16030 - RNA, 22 nt, Pseudomonas aeruginosa PA01
cgcggacagcugcgacgagcgg

SEQ ID NO: 16031 - RNA, 22 nt, Pseudomonas aeruginosa PA01
cgcggagcaggccgaccagcgg

SEQ ID NO: 16032 - RNA, 22 nt, Pseudomonas aeruginosa PA01
cgcggagccacucccuggcgcc

SEQ ID NO: 16033 - RNA, 22 nt, Pseudomonas aeruginosa PA01
cgcggcaggaggacggcagcgu

SEQ ID NO: 16034 - RNA, 22 nt, Pseudomonas aeruginosa PA01
cgcggcccucaccggcuucggc

SEQ ID NO: 16035 - RNA, 22 nt, Pseudomonas aeruginosa PA01
cgcggccgauggccgggcuggu

SEQ ID NO: 16036 - RNA, 19 nt, Pseudomonas aeruginosa PA01
cgcggccgggauccucggc

SEQ ID NO: 16037 - RNA, 22 nt, Pseudomonas aeruginosa PA01
cgcggcgagggccagcaggugc

SEQ ID NO: 16038 - RNA, 22 nt, Pseudomonas aeruginosa PA01
cgcggcgcucggcaucgaccau

SEQ ID NO: 16039 - RNA, 22 nt, Pseudomonas aeruginosa PA01
cgcggcucggauugccggcgga

SEQ ID NO: 16040 - RNA, 22 nt, Pseudomonas aeruginosa PA01
cgcggucgccgggguccagcug

SEQ ID NO: 16041 - RNA, 22 nt, Pseudomonas aeruginosa PA01
cgcggugcagcugcucgguggc

SEQ ID NO: 16042 - RNA, 22 nt, Pseudomonas aeruginosa PA01
cgcguacaucggugucggcgcg

SEQ ID NO: 16043 - RNA, 22 nt, Pseudomonas aeruginosa PA01
cgcgucagcgccaggaguuguc

SEQ ID NO: 16044 - RNA, 22 nt, Homo sapiens
ugacuagggacauucuuccacg

SEQ ID NO: 16045 - RNA, 22 nt, Homo sapiens
cuguaauguaaugagacuacau

SEQ ID NO: 16046 - RNA, 22 nt, Homo sapiens
aggaauguuaguacuucuuagu

SEQ ID NO: 16047 - RNA, 22 nt, Homo sapiens
caaugcauuauucucccacuuc

SEQ ID NO: 16048 - RNA, 19 nt, Homo sapiens
uuucaauguaaggauggag

SEQ ID NO: 16049 - RNA, 23 nt, Homo sapiens
ugugcacauuuacauauauacac

SEQ ID NO: 16050 - RNA, 22 nt, Homo sapiens
aagcuggauuucgcauccuguu

SEQ ID NO: 16051 - RNA, 22 nt, Homo sapiens
acugaucaauguuaaggcuuau

SEQ ID NO: 16052 - RNA, 22 nt, Homo sapiens
gugaacagaaccugggaucgaa

SEQ ID NO: 16053 - RNA, 22 nt, Homo sapiens
cugggaugugacuguugccccc

SEQ ID NO: 16054 - RNA, 22 nt, Homo sapiens
uaaugugaauagugcuguaaug

SEQ ID NO: 16055 - RNA, 22 nt, Homo sapiens
uuccacaaugguugaacuaauu

SEQ ID NO: 16056 - RNA, 22 nt, Homo sapiens
cugaaucauugcauuaucaagg

SEQ ID NO: 16057 - RNA, 22 nt, Homo sapiens
gacuagaaauuauuuagugagc

SEQ ID NO: 16058 - RNA, 22 nt, Homo sapiens
ugagaguauaaauugaugcagc

SEQ ID NO: 16059 - RNA, 22 nt, Homo sapiens
uaaggaacucugauaucuggaa

SEQ ID NO: 16060 - RNA, 22 nt, Homo sapiens
guaaauaccaguuucuggaaca

SEQ ID NO: 16061 - RNA, 22 nt, Homo sapiens
gacagugugauacuuagucuca

SEQ ID NO: 16062 - RNA, 22 nt, Homo sapiens
ggccuguaaacuagagacccug

SEQ ID NO: 16063 - RNA, 22 nt, Homo sapiens
cagccgggugagguggcuuguu

SEQ ID NO: 16064 - RNA, 22 nt, Homo sapiens
ucacacgugaacucaucacaga

SEQ ID NO: 16065 - RNA, 22 nt, Homo sapiens
ucagaacugauacuagaacuuu

SEQ ID NO: 16066 - RNA, 22 nt, Homo sapiens
aauacugagaugugagguacua

SEQ ID NO: 16067 - RNA, 22 nt, Homo sapiens
aucagaaucucuagugggacca

SEQ ID NO: 16068 - RNA, 23 nt, Homo sapiens
ucaugaggccauucaaauccauu

SEQ ID NO: 16069 - RNA, 21 nt, Homo sapiens
ugcagccauucagcccuaugc

SEQ ID NO: 16070 - RNA, 22 nt, Homo sapiens
uuaaaugcuagaauuuucuuug

SEQ ID NO: 16071 - RNA, 22 nt, Homo sapiens
aucauacuguuuugauuacugu

SEQ ID NO: 16072 - RNA, 22 nt, Homo sapiens
cacugcaguaaauugcgucggu

SEQ ID NO: 16073 - RNA, 18 nt, Homo sapiens
gugagaaugacuguucug

SEQ ID NO: 16074 - RNA, 18 nt, Homo sapiens
ucacuagacacugaaucu

SEQ ID NO: 16075 - RNA, 22 nt, Homo sapiens
uuuggcuuuuguaauaacugcc

SEQ ID NO: 16076 - RNA, 22 nt, Homo sapiens
uaugcacacacguguuuaugug

SEQ ID NO: 16077 - RNA, 23 nt, Homo sapiens
ucgguccccuuggcugcccucgg

SEQ ID NO: 16078 - RNA, 22 nt, Homo sapiens
auaugcacuauacacacguaua

SEQ ID NO: 16079 - RNA, 23 nt, Homo sapiens
uuuguguccccacccaaaucuca

SEQ ID NO: 16080 - RNA, 22 nt, Homo sapiens
uaaguagugugcauguauguau

SEQ ID NO: 16081 - RNA, 22 nt, Homo sapiens
guccuggagaagcguggaccgg

SEQ ID NO: 16082 - RNA, 22 nt, Homo sapiens
uagccucacaaagugcuuaaga

SEQ ID NO: 16083 - RNA, 20 nt, Homo sapiens
aucagagacuaggauugcca

SEQ ID NO: 16084 - RNA, 22 nt, Homo sapiens
augacuagaggagggauggcca

SEQ ID NO: 16085 - RNA, 22 nt, Homo sapiens
aucauauccuagauauaacuuc

SEQ ID NO: 16086 - RNA, 22 nt, Homo sapiens
aaaguggacuaagugaauauga

SEQ ID NO: 16087 - RNA, 22 nt, Homo sapiens
auuccaguuugugagaagcugu

SEQ ID NO: 16088 - RNA, 22 nt, Homo sapiens
uagcuggaguuuuuguuauagg

SEQ ID NO: 16089 - RNA, 22 nt, Homo sapiens
auaaagccaugagcuugagaug

SEQ ID NO: 16090 - RNA, 22 nt, Homo sapiens
gagcuggacuucuuaccuuuuc

SEQ ID NO: 16091 - RNA, 22 nt, Homo sapiens
uggaagugucugugcccagcuc

SEQ ID NO: 16092 - RNA, 22 nt, Homo sapiens
augugcacaugcuuacauguga

SEQ ID NO: 16093 - RNA, 22 nt, Homo sapiens
agugacaugggaucaaaucuga

SEQ ID NO: 16094 - RNA, 22 nt, Homo sapiens
uuggucucaucaagagcagcuu

SEQ ID NO: 16095 - RNA, 22 nt, Homo sapiens
aggaaguaauaaguuugguucu

SEQ ID NO: 16096 - RNA, 22 nt, Homo sapiens
aaauugcacaaguggugauuug

SEQ ID NO: 16097 - RNA, 23 nt, Homo sapiens
agagugcaauggugccaucucgg

SEQ ID NO: 16098 - RNA, 20 nt, Homo sapiens
uggaaguaagaauauaggug

SEQ ID NO: 16099 - RNA, 22 nt, Homo sapiens
auaugcauacauguaugcagga

SEQ ID NO: 16100 - RNA, 17 nt, Homo sapiens
ucuaauaauaugcauuu

SEQ ID NO: 16101 - RNA, 22 nt, Homo sapiens
acuagguaguaaucugcagaga

SEQ ID NO: 16102 - RNA, 22 nt, Homo sapiens
gagcuagguuuugaauccagac

SEQ ID NO: 16103 - RNA, 22 nt, Homo sapiens
gcuaggagauccacugcucucu

SEQ ID NO: 16104 - RNA, 22 nt, Homo sapiens
uggaaaguccaagccaaccggg

SEQ ID NO: 16105 - RNA, 22 nt, Homo sapiens
ccuucuuuuguaaggcugaaua

SEQ ID NO: 16106 - RNA, 22 nt, Homo sapiens
auccugaagcuuuacugaauuc

SEQ ID NO: 16107 - RNA, 22 nt, Homo sapiens
uuccaugagaugcaucaaagcu

SEQ ID NO: 16108 - RNA, 22 nt, Homo sapiens
uugacaaggagccauugcaucu

SEQ ID NO: 16109 - RNA, 21 nt, Homo sapiens
ugacuagggauaugugccacu

SEQ ID NO: 16110 - RNA, 22 nt, Homo sapiens
ucacuagaucaagggagagaaa

SEQ ID NO: 16111 - RNA, 22 nt, Homo sapiens
ucacucagaccuggugauaugc

SEQ ID NO: 16112 - RNA, 22 nt, Homo sapiens
aagcuggagugcaguggugcga

SEQ ID NO: 16113 - RNA, 22 nt, Homo sapiens
ugacggaggcauuggaagcuug

SEQ ID NO: 16114 - RNA, 22 nt, Homo sapiens
guggaagugucuggggccaggg

SEQ ID NO: 16115 - RNA, 22 nt, Homo sapiens
auggaggccuacagaauuuugg

SEQ ID NO: 16116 - RNA, 19 nt, Homo sapiens
ugcauugucugggaaaugg

SEQ ID NO: 16117 - RNA, 22 nt, Homo sapiens
augacuauugcacuuuccuggu

SEQ ID NO: 16118 - RNA, 22 nt, Homo sapiens
uggcucuuucuagacuuaauua

SEQ ID NO: 16119 - RNA, 22 nt, Homo sapiens
ugaggauaguguugaaggcagg

SEQ ID NO: 16120 - RNA, 22 nt, Homo sapiens
aauacugaaaguauuuucaaau

SEQ ID NO: 16121 - RNA, 18 nt, Homo sapiens
gacagugugaagauuccu

SEQ ID NO: 16122 - RNA, 22 nt, Homo sapiens
uggagacugaucccucuuuccu

SEQ ID NO: 16123 - RNA, 22 nt, Homo sapiens
ccacauuaccuugcuugcucca

SEQ ID NO: 16124 - RNA, 22 nt, Homo sapiens
acuuuuugauggggagaacauu

SEQ ID NO: 16125 - RNA, 23 nt, Homo sapiens
aggaaguaacuaucuuuucuguc

SEQ ID NO: 16126 - RNA, 21 nt, Homo sapiens
augugcacuaugucauuuaau

SEQ ID NO: 16127 - RNA, 22 nt, Homo sapiens
ucauaucauuagaucuacugua

SEQ ID NO: 16128 - RNA, 22 nt, Homo sapiens
augugacuugugaaaaguucag

SEQ ID NO: 16129 - RNA, 22 nt, Homo sapiens
aggcagcuguuauauacugagu

SEQ ID NO: 16130 - RNA, 22 nt, Homo sapiens
gacaguguggcgauuccucaag

SEQ ID NO: 16131 - RNA, 19 nt, Homo sapiens
ugcagcaauguaaaagaca

SEQ ID NO: 16132 - RNA, 22 nt, Homo sapiens
ggacuaggagcuaggaagaucu

SEQ ID NO: 16133 - RNA, 22 nt, Homo sapiens
cacaguguucauagccaucagg

SEQ ID NO: 16134 - RNA, 22 nt, Homo sapiens
guuaagaaguguaacuuaaguu

SEQ ID NO: 16135 - RNA, 19 nt, Homo sapiens
uccccgggucuagugcagc

SEQ ID NO: 16136 - RNA, 20 nt, Homo sapiens
cagucaugaagaacugugag

SEQ ID NO: 16137 - RNA, 19 nt, Homo sapiens
acagcugguuuugguuucu

SEQ ID NO: 16138 - RNA, 22 nt, Homo sapiens
acuauacuguaacuguauucag

SEQ ID NO: 16139 - RNA, 22 nt, Homo sapiens
ucagggacuuacaaaccagaag

SEQ ID NO: 16140 - RNA, 22 nt, Homo sapiens
ugauauauugaaugaugaaaca

SEQ ID NO: 16141 - RNA, 18 nt, Homo sapiens
gacaguguggugauuccu

SEQ ID NO: 16142 - RNA, 22 nt, Homo sapiens
uggaaaguacuugaguuuguau

SEQ ID NO: 16143 - RNA, 22 nt, Homo sapiens
uuugguguauaaaaaugcuagu

SEQ ID NO: 16144 - RNA, 22 nt, Homo sapiens
ugaaaugaucaguuugguuacu

SEQ ID NO: 16145 - RNA, 22 nt, Homo sapiens
augagucacuuauuauuggggu

SEQ ID NO: 16146 - RNA, 22 nt, Homo sapiens
auuacccuuagacuccagagug

SEQ ID NO: 16147 - RNA, 22 nt, Homo sapiens
ugugguuuuuuucuccaauagg

SEQ ID NO: 16148 - RNA, 22 nt, Homo sapiens
gccuguagaagaguagaugacc

SEQ ID NO: 16149 - RNA, 22 nt, Homo sapiens
uauugaauuugagcugucucuu

SEQ ID NO: 16150 - RNA, 22 nt, Homo sapiens
acacuuucuggagcugcacaua

SEQ ID NO: 16151 - RNA, 22 nt, Homo sapiens
uggcuccguuguacaggcugga

SEQ ID NO: 16152 - RNA, 22 nt, Homo sapiens
ugggcggagacgugcagccgcc

SEQ ID NO: 16153 - RNA, 22 nt, Homo sapiens
ggccggguggccauggcugccc

SEQ ID NO: 16154 - RNA, 22 nt, Homo sapiens
uaaguaguauaagguuuuuuga

SEQ ID NO: 16155 - RNA, 22 nt, Homo sapiens
agcuuuuugggcagcuauugac

SEQ ID NO: 16156 - RNA, 22 nt, Homo sapiens
auuccagguggcgccauucaca

SEQ ID NO: 16157 - RNA, 22 nt, Homo sapiens
gggaagugugcagaguucucuu

SEQ ID NO: 16158 - RNA, 22 nt, Homo sapiens
ucaaauuccaagucuagguagg

SEQ ID NO: 16159 - RNA, 22 nt, Homo sapiens
ugagcagagaagugcccugcgc

SEQ ID NO: 16160 - RNA, 22 nt, Homo sapiens
auggacagaaaaaaauagaugu

SEQ ID NO: 16161 - RNA, 22 nt, Homo sapiens
uuggaaagagguguuuaugacu

SEQ ID NO: 16162 - RNA, 22 nt, Homo sapiens
uuuccagguggccaacauuuua

SEQ ID NO: 16163 - RNA, 22 nt, Homo sapiens
gaucacauuguuucauacauau

SEQ ID NO: 16164 - RNA, 22 nt, Homo sapiens
acaguguguguguucaccuaga

SEQ ID NO: 16165 - RNA, 21 nt, Homo sapiens
auggaaagacugccucuucaa

SEQ ID NO: 16166 - RNA, 22 nt, Homo sapiens
ugacauggagguggaggaagau

SEQ ID NO: 16167 - RNA, 22 nt, Homo sapiens
ugagguuauuuguucaagaagu

SEQ ID NO: 16168 - RNA, 22 nt, Homo sapiens
gaagcauugauccacaggcgug

SEQ ID NO: 16169 - RNA, 22 nt, Homo sapiens
ugugguuuuaguaaaacuaugu

SEQ ID NO: 16170 - RNA, 22 nt, Homo sapiens
ugagcagaaagcugcaaggucg

SEQ ID NO: 16171 - RNA, 22 nt, Homo sapiens
cuggaggccugaacauaaaugg

SEQ ID NO: 16172 - RNA, 22 nt, Homo sapiens
agagaacugauuggaugugggc

SEQ ID NO: 16173 - RNA, 22 nt, Homo sapiens
ugaaagacugaaagcuuuucuu

SEQ ID NO: 16174 - RNA, 22 nt, Homo sapiens
gaagcgaggugauuagcagaca

SEQ ID NO: 16175 - RNA, 22 nt, Homo sapiens
uugggacuggaaggaguaaggg

SEQ ID NO: 16176 - RNA, 22 nt, Homo sapiens
uggaaaguacugagguccaccu

SEQ ID NO: 16177 - RNA, 22 nt, Homo sapiens
ggcagcucaggccccgcgcuga

SEQ ID NO: 16178 - RNA, 22 nt, Homo sapiens
auacuguuuuacaucauugccu

SEQ ID NO: 16179 - RNA, 22 nt, Homo sapiens
cucacuaggaaguaaaguuugu

SEQ ID NO: 16180 - RNA, 22 nt, Homo sapiens
ggacuagggacauggggagcug

SEQ ID NO: 16181 - RNA, 22 nt, Homo sapiens
uuccacaauggcugaacuaguu

SEQ ID NO: 16182 - RNA, 22 nt, Homo sapiens
gugggaagcuggaacucccucc

SEQ ID NO: 16183 - RNA, 22 nt, Homo sapiens
auaaggaguaucauauuaaaac

SEQ ID NO: 16184 - RNA, 22 nt, Homo sapiens
gaaugauacuguuaacgaaaga

SEQ ID NO: 16185 - RNA, 22 nt, Homo sapiens
caggugcauuggcugacaccug

SEQ ID NO: 16186 - RNA, 22 nt, Homo sapiens
aguggauguuguggccugggag

SEQ ID NO: 16187 - RNA, 22 nt, Homo sapiens
uggcagcugcuucaugggaugc

SEQ ID NO: 16188 - RNA, 21 nt, Homo sapiens
aaucacugucuguuuccccuu

SEQ ID NO: 16189 - RNA, 22 nt, Homo sapiens
auugcacaucugcacuacagcc

SEQ ID NO: 16190 - RNA, 23 nt, Homo sapiens
ucagugaaggaacaacuaaauag

SEQ ID NO: 16191 - RNA, 22 nt, Homo sapiens
uggagugauaugguuauauggg

SEQ ID NO: 16192 - RNA, 22 nt, Homo sapiens
ugacuaggaaauuagaacuuuu

SEQ ID NO: 16193 - RNA, 22 nt, Homo sapiens
uugauagacaucugaguuguug

SEQ ID NO: 16194 - RNA, 22 nt, Homo sapiens
uugagaucaugcuacugcacuc

SEQ ID NO: 16195 - RNA, 21 nt, Homo sapiens
gaaauacugccuuaggagcug

SEQ ID NO: 16196 - RNA, 22 nt, Homo sapiens
aaguggaauguuuguggcacaa

SEQ ID NO: 16197 - RNA, 22 nt, Homo sapiens
uugauagacacauauccaugug

SEQ ID NO: 16198 - RNA, 23 nt, Homo sapiens
uccccgggagcaccagcuuguug

SEQ ID NO: 16199 - RNA, 22 nt, Homo sapiens
aucagagugaugguuuaaguau

SEQ ID NO: 16200 - RNA, 22 nt, Homo sapiens
augaguauguucuguauuuuca

SEQ ID NO: 16201 - RNA, 18 nt, Homo sapiens
uggacagugauuauccau

SEQ ID NO: 16202 - RNA, 22 nt, Homo sapiens
ggcagcuguguccuucguaagg

SEQ ID NO: 16203 - RNA, 22 nt, Homo sapiens
uaaguucauucaugaaacuuag

SEQ ID NO: 16204 - RNA, 20 nt, Homo sapiens
agacuagggagcagaaagcc

SEQ ID NO: 16205 - RNA, 22 nt, Homo sapiens
acccuuaagcacuaguucagcu

SEQ ID NO: 16206 - RNA, 18 nt, Homo sapiens
acaguguguaaggguucu

SEQ ID NO: 16207 - RNA, 22 nt, Homo sapiens
auugauaguuuaauaggaauug

SEQ ID NO: 16208 - RNA, 20 nt, Homo sapiens
cugcacauccacucuacuuc

SEQ ID NO: 16209 - RNA, 22 nt, Homo sapiens
guguaaaacaauuagaggauuu

SEQ ID NO: 16210 - RNA, 22 nt, Homo sapiens
ggaagaauauuaggggauuucg

SEQ ID NO: 16211 - RNA, 22 nt, Homo sapiens
aaggaacuggaauauuuugaac

SEQ ID NO: 16212 - RNA, 22 nt, Homo sapiens
gugcacaaucgugcauuccuug

SEQ ID NO: 16213 - RNA, 22 nt, Homo sapiens
gaggaguagggcacaaagccuu

SEQ ID NO: 16214 - RNA, 22 nt, Homo sapiens
uggaaguauagauaauugaaag

SEQ ID NO: 16215 - RNA, 22 nt, Homo sapiens
cuguagcuuuuauaugcuuagc

SEQ ID NO: 16216 - RNA, 20 nt, Homo sapiens
uggaaauuaaccuuucaggu

SEQ ID NO: 16217 - RNA, 22 nt, Homo sapiens
augacauugaaaagcaagugga

SEQ ID NO: 16218 - RNA, 17 nt, Homo sapiens
uuuaaugcuaggacucu

SEQ ID NO: 16219 - RNA, 22 nt, Homo sapiens
uuggaaaguuguuguaguuauu

SEQ ID NO: 16220 - RNA, 22 nt, Homo sapiens
uguggaaauaaaagaaagguua

SEQ ID NO: 16221 - RNA, 22 nt, Homo sapiens
gccccgggugaugcagccguca

SEQ ID NO: 16222 - RNA, 22 nt, Homo sapiens
uaagcuauagugaauaaauugc

SEQ ID NO: 16223 - RNA, 22 nt, Homo sapiens
uagaauggaagguugagaagaa

SEQ ID NO: 16224 - RNA, 17 nt, Homo sapiens
guuuggguacuggguaa

SEQ ID NO: 16225 - RNA, 22 nt, Homo sapiens
uuacuugagauggggugucacu

SEQ ID NO: 16226 - RNA, 18 nt, Homo sapiens
guauuccagccugaguga

SEQ ID NO: 16227 - RNA, 22 nt, Homo sapiens
ucgcugcgaccuccaccucccg

SEQ ID NO: 16228 - RNA, 22 nt, Homo sapiens
accucagcccggggaaguugag

SEQ ID NO: 16229 - RNA, 17 nt, Homo sapiens
auaugaauuuuggagau

SEQ ID NO: 16230 - RNA, 22 nt, Homo sapiens
uauuucaguugugcagguaguu

SEQ ID NO: 16231 - RNA, 22 nt, Homo sapiens
auaagugagugauucaguguua

SEQ ID NO: 16232 - RNA, 22 nt, Homo sapiens
aaacugaucugaaggccaggcu

SEQ ID NO: 16233 - RNA, 22 nt, Homo sapiens
uggaaaguaguucuaaucuaag

SEQ ID NO: 16234 - RNA, 22 nt, Homo sapiens
augcagaucacauuuuucuguc

SEQ ID NO: 16235 - RNA, 20 nt, Homo sapiens
ugacuuguccgagguccccc

SEQ ID NO: 16236 - RNA, 22 nt, Homo sapiens
uagcuggaauuacuugcaccug

SEQ ID NO: 16237 - RNA, 18 nt, Homo sapiens
uagaauauaggucauucu

SEQ ID NO: 16238 - RNA, 22 nt, Homo sapiens
ggacagugaaugccacuccucc

SEQ ID NO: 16239 - RNA, 22 nt, Homo sapiens
uggaaauuaacagggauugucc

SEQ ID NO: 16240 - RNA, 22 nt, Homo sapiens
uggaaguaaccaugaauggaau

SEQ ID NO: 16241 - RNA, 22 nt, Homo sapiens
gcaguguggguagagggcaaga

SEQ ID NO: 16242 - RNA, 22 nt, Homo sapiens
aagcuggauuuaguguggagca

SEQ ID NO: 16243 - RNA, 22 nt, Homo sapiens
cuagaacuagaacugcuggggu

SEQ ID NO: 16244 - RNA, 22 nt, Homo sapiens
auuuggguuuuacaucaggcua

SEQ ID NO: 16245 - RNA, 20 nt, Homo sapiens
uggaaaguaagucaugauau

SEQ ID NO: 16246 - RNA, 22 nt, Homo sapiens
uauuucaguugcguuucccgag

SEQ ID NO: 16247 - RNA, 18 nt, Homo sapiens
auucuacaggccuuuuga

SEQ ID NO: 16248 - RNA, 19 nt, Homo sapiens
uuuugcucuuuauaccuau

SEQ ID NO: 16249 - RNA, 20 nt, Homo sapiens
uauucacucuccagucuugc

SEQ ID NO: 16250 - RNA, 22 nt, Homo sapiens
aaugcacauauauuuccuuauu

SEQ ID NO: 16251 - RNA, 22 nt, Homo sapiens
aucagaaucucuagaggacugu

SEQ ID NO: 16252 - RNA, 22 nt, Homo sapiens
cuuuggccauagcuaaaugauu

SEQ ID NO: 16253 - RNA, 22 nt, Homo sapiens
uaugcacaugcaugcuugaaua

SEQ ID NO: 16254 - RNA, 22 nt, Homo sapiens
ggccuguaggguauugguaggg

SEQ ID NO: 16255 - RNA, 22 nt, Homo sapiens
augcacauggcuaacuuuuuuc

SEQ ID NO: 16256 - RNA, 22 nt, Homo sapiens
acugcacuuauccuccaauguu

SEQ ID NO: 16257 - RNA, 22 nt, Homo sapiens
uauggauuuuuuugacaagagc

SEQ ID NO: 16258 - RNA, 20 nt, Homo sapiens
uggaacuuaauugauggaca

SEQ ID NO: 16259 - RNA, 22 nt, Homo sapiens
uucagggacuuuagacaagaga

SEQ ID NO: 16260 - RNA, 22 nt, Homo sapiens
aucacuagaucauagguaaaca

SEQ ID NO: 16261 - RNA, 23 nt, Homo sapiens
uuugagugugauaaacacuguca

SEQ ID NO: 16262 - RNA, 22 nt, Homo sapiens
auugaaucuaaaaugagucucu

SEQ ID NO: 16263 - RNA, 22 nt, Homo sapiens
ugacuagggcucuaaacagcuc

SEQ ID NO: 16264 - RNA, 22 nt, Homo sapiens
ugacuauaggauaacaugcauu

SEQ ID NO: 16265 - RNA, 22 nt, Homo sapiens
guggcgagaucauagcucauug

SEQ ID NO: 16266 - RNA, 18 nt, Homo sapiens
ucccucagaauuauagaa

SEQ ID NO: 16267 - RNA, 22 nt, Homo sapiens
uguaaugaucaaaucagaguaa

SEQ ID NO: 16268 - RNA, 22 nt, Homo sapiens
uuccacaaugguugaacuagcu

SEQ ID NO: 16269 - RNA, 22 nt, Homo sapiens
uugagagaaaaggccaugccuu

SEQ ID NO: 16270 - RNA, 22 nt, Homo sapiens
uuccacaaugguugaacuaguu

SEQ ID NO: 16271 - RNA, 20 nt, Homo sapiens
uucagugcagguaacaaucc

SEQ ID NO: 16272 - RNA, 22 nt, Homo sapiens
uacuagaaccuuauucagagug

SEQ ID NO: 16273 - RNA, 22 nt, Homo sapiens
uucaguaaauguucuuacuaua

SEQ ID NO: 16274 - RNA, 22 nt, Homo sapiens
ugagauauugggaguaauguca

SEQ ID NO: 16275 - RNA, 17 nt, Homo sapiens
ugauaagugugagguga

SEQ ID NO: 16276 - RNA, 22 nt, Homo sapiens
ugaauagacacuaaagacugua

SEQ ID NO: 16277 - RNA, 22 nt, Homo sapiens
gaacuguuucuggugaaagagu

SEQ ID NO: 16278 - RNA, 22 nt, Homo sapiens
cuuuaugagguuggauggaucu

SEQ ID NO: 16279 - RNA, 22 nt, Homo sapiens
uuagaacuagaggaguuugagu

SEQ ID NO: 16280 - RNA, 22 nt, Homo sapiens
uggaagugaacaaccaaggcag

SEQ ID NO: 16281 - RNA, 22 nt, Homo sapiens
gcuaggagaucugcugcucucu

SEQ ID NO: 16282 - RNA, 22 nt, Homo sapiens
gcgguagcauagacugcaggac

SEQ ID NO: 16283 - RNA, 22 nt, Homo sapiens
gugagaacugugucuuauaaac

SEQ ID NO: 16284 - RNA, 22 nt, Homo sapiens
ucacaggguguuauuagaauua

SEQ ID NO: 16285 - RNA, 22 nt, Homo sapiens
auggacagacacuggccuucug

SEQ ID NO: 16286 - RNA, 22 nt, Homo sapiens
uauuuguccccuccaaaaguca

SEQ ID NO: 16287 - RNA, 22 nt, Homo sapiens
acagccauuccagccaaauacu

SEQ ID NO: 16288 - RNA, 22 nt, Homo sapiens
uggguaggaccagaaaugcacu

SEQ ID NO: 16289 - RNA, 23 nt, Homo sapiens
uggaaguauggaggaggcagaau

SEQ ID NO: 16290 - RNA, 22 nt, Homo sapiens
uuuaguucauuaaggaaucucc

SEQ ID NO: 16291 - RNA, 22 nt, Homo sapiens
aucugcacaucuguguuuuugu

SEQ ID NO: 16292 - RNA, 23 nt, Homo sapiens
ucacuagaguccuggaguuugag

SEQ ID NO: 16293 - RNA, 22 nt, Homo sapiens
gacuaggagauauguuuucuuc

SEQ ID NO: 16294 - RNA, 22 nt, Homo sapiens
uggaaguaaucaugagguagca

SEQ ID NO: 16295 - RNA, 22 nt, Homo sapiens
ugacuaggggcccuggcuucuu

SEQ ID NO: 16296 - RNA, 22 nt, Homo sapiens
gagauauuuagaaauguguucu

SEQ ID NO: 16297 - RNA, 22 nt, Homo sapiens
aaagucuagaggaucaugugug

SEQ ID NO: 16298 - RNA, 22 nt, Homo sapiens
cugaaagagcauuugaaugggu

SEQ ID NO: 16299 - RNA, 22 nt, Homo sapiens
uggaaguagauagauuguguca

SEQ ID NO: 16300 - RNA, 22 nt, Homo sapiens
auaaauucauuuaagcuccuua

SEQ ID NO: 16301 - RNA, 22 nt, Homo sapiens
augcacuuggcaggaugauucc

SEQ ID NO: 16302 - RNA, 22 nt, Homo sapiens
gcgugguguuagaaugagaagu

SEQ ID NO: 16303 - RNA, 22 nt, Homo sapiens
ggugcagcacaccaacauggca

SEQ ID NO: 16304 - RNA, 21 nt, Homo sapiens
uuugaucauuaaaagugaauc

SEQ ID NO: 16305 - RNA, 22 nt, Homo sapiens
uuuaguccucugaaaaucuaua

SEQ ID NO: 16306 - RNA, 22 nt, Homo sapiens
gugcacaaaucuuaaauguaca

SEQ ID NO: 16307 - RNA, 22 nt, Homo sapiens
uuaauguaucuaucacaucaca

SEQ ID NO: 16308 - RNA, 22 nt, Homo sapiens
gugauagaucugggauucagaa

SEQ ID NO: 16309 - RNA, 22 nt, Homo sapiens
gagguauagaacaccuuucaag

SEQ ID NO: 16310 - RNA, 20 nt, Homo sapiens
ucaaauucuuggccuccagc

SEQ ID NO: 16311 - RNA, 18 nt, Homo sapiens
gacaguguggcaauuccu

SEQ ID NO: 16312 - RNA, 22 nt, Homo sapiens
uuuaaugcgucucugaguuuug

SEQ ID NO: 16313 - RNA, 18 nt, Homo sapiens
acauucagcuugaagaua

SEQ ID NO: 16314 - RNA, 19 nt, Homo sapiens
ggcaauacuuucuuguugg

SEQ ID NO: 16315 - RNA, 22 nt, Homo sapiens
uucacacugggccuacucugug

SEQ ID NO: 16316 - RNA, 22 nt, Homo sapiens
augaggcaggaaaggcguaucu

SEQ ID NO: 16317 - RNA, 22 nt, Homo sapiens
ucacugaggucugagcuuuaug

SEQ ID NO: 16318 - RNA, 22 nt, Homo sapiens
uacauacuucacagacuuuaaa

SEQ ID NO: 16319 - RNA, 22 nt, Homo sapiens
ggaagaauaaugggccuuagag

SEQ ID NO: 16320 - RNA, 22 nt, Homo sapiens
ugagaugagagaaugcuugccu

SEQ ID NO: 16321 - RNA, 22 nt, Homo sapiens
uaaguauuaugugcugcauuuu

SEQ ID NO: 16322 - RNA, 22 nt, Homo sapiens
uugguccucccaugcucaagag

SEQ ID NO: 16323 - RNA, 22 nt, Homo sapiens
uugauagaucagggauuugauu

SEQ ID NO: 16324 - RNA, 22 nt, Homo sapiens
cuuuggcauuagccuguauaga

SEQ ID NO: 16325 - RNA, 22 nt, Homo sapiens
uuggauuuuaacaaacuaggug

SEQ ID NO: 16326 - RNA, 22 nt, Homo sapiens
aagcuggagugcaguggugcaa

SEQ ID NO: 16327 - RNA, 18 nt, Homo sapiens
uggauaguuguuggcaga

SEQ ID NO: 16328 - RNA, 22 nt, Homo sapiens
gugaaagauuaaaccagugugu

SEQ ID NO: 16329 - RNA, 22 nt, Homo sapiens
auacaguugccauuucuugugc

SEQ ID NO: 16330 - RNA, 20 nt, Homo sapiens
uggaccagagagguggggac

SEQ ID NO: 16331 - RNA, 22 nt, Homo sapiens
gacuaggagagcagcugcccau

SEQ ID NO: 16332 - RNA, 22 nt, Homo sapiens
gugcacaacaugcaguuuuguu

SEQ ID NO: 16333 - RNA, 20 nt, Homo sapiens
uggcucuuugcugcuaaagu

SEQ ID NO: 16334 - RNA, 22 nt, Homo sapiens
aaaugcacaaagauuuugcacu

SEQ ID NO: 16335 - RNA, 22 nt, Homo sapiens
ugagagacagacauuaucuuau

SEQ ID NO: 16336 - RNA, 22 nt, Homo sapiens
ugaacugagacuagacuuguuc

SEQ ID NO: 16337 - RNA, 22 nt, Homo sapiens
agcgccacugcacuccagccug

SEQ ID NO: 16338 - RNA, 22 nt, Homo sapiens
uggauaguuuacugaagagugg

SEQ ID NO: 16339 - RNA, 22 nt, Homo sapiens
uccccgagcccaggcugugacu

SEQ ID NO: 16340 - RNA, 22 nt, Homo sapiens
ugugucuuuuaucacacaaugu

SEQ ID NO: 16341 - RNA, 22 nt, Homo sapiens
uugugguuuuuaaaacuaggug

SEQ ID NO: 16342 - RNA, 22 nt, Homo sapiens
cauggcccugggcugggcgaac

SEQ ID NO: 16343 - RNA, 16 nt, Homo sapiens
uacauuuguuacaugg

SEQ ID NO: 16344 - RNA, 18 nt, Homo sapiens
gacaguguggcgauuccu

SEQ ID NO: 16345 - RNA, 22 nt, Homo sapiens
acccuggauucguggccuugaa

SEQ ID NO: 16346 - RNA, 22 nt, Homo sapiens
uaucacaguugcauauuuaagg

SEQ ID NO: 16347 - RNA, 22 nt, Homo sapiens
ccuguagcauccaagaagcugc

SEQ ID NO: 16348 - RNA, 22 nt, Homo sapiens
ugacuaggaggcuggaggauga

SEQ ID NO: 16349 - RNA, 23 nt, Homo sapiens
ggauggaaaguuuugagggccac

SEQ ID NO: 16350 - RNA, 22 nt, Homo sapiens
cacuuugguucaccugaguuuc

SEQ ID NO: 16351 - RNA, 16 nt, Homo sapiens
uguccaaauaaauaca

SEQ ID NO: 16352 - RNA, 22 nt, Homo sapiens
cucacuaguaaggcuguuuagu

SEQ ID NO: 16353 - RNA, 22 nt, Homo sapiens
uuugacuuuuagaauaugaguu

SEQ ID NO: 16354 - RNA, 22 nt, Staphylococcus aureus subsp. aureus Mu50
uuuuccaacuucucaguaaauu

SEQ ID NO: 16355 - RNA, 22 nt, Staphylococcus aureus subsp. aureus Mu50
uuuuagaaauugucaaugauga

SEQ ID NO: 16356 - RNA, 22 nt, Staphylococcus aureus subsp. aureus Mu50
uugacauuacgacagcacuugu

SEQ ID NO: 16357 - RNA, 22 nt, Staphylococcus aureus subsp. aureus Mu50
uuggaggcuaguauguugaaca

SEQ ID NO: 16358 - RNA, 22 nt, Staphylococcus aureus subsp. aureus Mu50
uuuaccaauaaugaugaacauu

SEQ ID NO: 16359 - RNA, 22 nt, Staphylococcus aureus subsp. aureus Mu50
uuuauuugaagcgguauauggu

SEQ ID NO: 16360 - RNA, 22 nt, Staphylococcus aureus subsp. aureus Mu50
uuaaugaagcuguaaacuuauu

SEQ ID NO: 16361 - RNA, 22 nt, Staphylococcus aureus subsp. aureus Mu50
uuaaugauguaaugaaauuagu

SEQ ID NO: 16362 - RNA, 22 nt, Staphylococcus aureus subsp. aureus Mu50
uuauaugaaacaagaacuugga

SEQ ID NO: 16363 - RNA, 23 nt, Staphylococcus aureus subsp. aureus Mu50
uggcuccguuucauuacguaaua

SEQ ID NO: 16364 - RNA, 22 nt, Staphylococcus aureus subsp. aureus Mu50
ugcuacaaacgcuugugcauua

SEQ ID NO: 16365 - RNA, 22 nt, Staphylococcus aureus subsp. aureus Mu50
ugcauguggcaucucuuguguu

SEQ ID NO: 16366 - RNA, 22 nt, Staphylococcus aureus subsp. aureus Mu50
ugcagaagugaaauuccuguga

SEQ ID NO: 16367 - RNA, 20 nt, Staphylococcus aureus subsp. aureus Mu50
ucuucaagcuguuucaucuc

SEQ ID NO: 16368 - RNA, 22 nt, Staphylococcus aureus subsp. aureus Mu50
ucuuuuaaucgaccuugagaaa

SEQ ID NO: 16369 - RNA, 22 nt, Staphylococcus aureus subsp. aureus Mu50
ugaaagcauuuaucgaacauug

SEQ ID NO: 16370 - RNA, 22 nt, Staphylococcus aureus subsp. aureus Mu50
ugaaaguguugacgguaugauu

SEQ ID NO: 16371 - RNA, 22 nt, Staphylococcus aureus subsp. aureus Mu50
cuguaucacauuagaagcuuuu

SEQ ID NO: 16372 - RNA, 22 nt, Staphylococcus aureus subsp. aureus Mu50
cuuuuucacauaucauaggucu

SEQ ID NO: 16373 - RNA, 22 nt, Staphylococcus aureus subsp. aureus Mu50
gaaaagaaagcauaugcaacuu

SEQ ID NO: 16374 - RNA, 22 nt, Staphylococcus aureus subsp. aureus Mu50
gaaaagcuccaaucaaaguuga

SEQ ID NO: 16375 - RNA, 22 nt, Staphylococcus aureus subsp. aureus Mu50
cuauaaauacaagugcauaugg

SEQ ID NO: 16376 - RNA, 22 nt, Staphylococcus aureus subsp. aureus Mu50
cuaauaauugugaauaugcaag

SEQ ID NO: 16377 - RNA, 22 nt, Staphylococcus aureus subsp. aureus Mu50
cagcuaaauuacuaccuucagu

SEQ ID NO: 16378 - RNA, 22 nt, Staphylococcus aureus subsp. aureus Mu50
caacuuuagguaaugucauguu

SEQ ID NO: 16379 - RNA, 22 nt, Staphylococcus aureus subsp. aureus Mu50
auuuugaugagcgugcaauacu

SEQ ID NO: 16380 - RNA, 22 nt, Staphylococcus aureus subsp. aureus Mu50
caaaagcauugaauaaaacugu

SEQ ID NO: 16381 - RNA, 20 nt, Staphylococcus aureus subsp. aureus Mu50
cacggcucgaacaagucuuu

SEQ ID NO: 16382 - RNA, 22 nt, Staphylococcus aureus subsp. aureus Mu50
augauggaagguaaauggcaaa

SEQ ID NO: 16383 - RNA, 21 nt, Staphylococcus aureus subsp. aureus Mu50
auuauuggcgucguuucgagu

SEQ ID NO: 16384 - RNA, 18 nt, Staphylococcus aureus subsp. aureus Mu50
auuucugucccacuccca

SEQ ID NO: 16385 - RNA, 19 nt, Staphylococcus aureus subsp. aureus Mu50
auuucugucccacucccac

SEQ ID NO: 16386 - RNA, 22 nt, Staphylococcus aureus subsp. aureus Mu50
auuucugucccacucccauugg

SEQ ID NO: 16387 - RNA, 22 nt, Staphylococcus aureus subsp. aureus Mu50
augcacauuuauuaguuuuaga

SEQ ID NO: 16388 - RNA, 22 nt, Staphylococcus aureus subsp. aureus Mu50
auauagauuaaaccgcacuucu

SEQ ID NO: 16389 - RNA, 18 nt, Staphylococcus aureus subsp. aureus Mu50
aguggcaauguauuagca

SEQ ID NO: 16390 - RNA, 22 nt, Staphylococcus aureus subsp. aureus Mu50
aguuugaaugauaacucauugc

SEQ ID NO: 16391 - RNA, 22 nt, Staphylococcus aureus subsp. aureus Mu50
auaaaguauauggaaauuuuac

SEQ ID NO: 16392 - RNA, 22 nt, Staphylococcus aureus subsp. aureus Mu50
auaaugaugcacaucgcguacu

SEQ ID NO: 16393 - RNA, 22 nt, Staphylococcus aureus subsp. aureus Mu50
auacauuagugucgauucguuu

SEQ ID NO: 16394 - RNA, 22 nt, Staphylococcus aureus subsp. aureus Mu50
auauuuaauguuaaggauguug

SEQ ID NO: 16395 - RNA, 22 nt, Staphylococcus aureus subsp. aureus Mu50
agauauccauuaugauguagau

SEQ ID NO: 16396 - RNA, 22 nt, Staphylococcus aureus subsp. aureus Mu50
agaagacuuauuuacugcguuu

SEQ ID NO: 16397 - RNA, 22 nt, Staphylococcus aureus subsp. aureus Mu50
agagacaaguuuagauugccau

SEQ ID NO: 16398 - RNA, 22 nt, Staphylococcus aureus subsp. aureus Mu50
acuagguaaucgucugagugaa

SEQ ID NO: 16399 - RNA, 22 nt, Staphylococcus aureus subsp. aureus Mu50
acuuuugagaugcacauuauca

SEQ ID NO: 16400 - RNA, 22 nt, Staphylococcus aureus subsp. aureus Mu50
acguuucagcguuccauucagc

SEQ ID NO: 16401 - RNA, 22 nt, Staphylococcus aureus subsp. aureus Mu50
acuccgucaaauugcacagcga

SEQ ID NO: 16402 - RNA, 22 nt, Staphylococcus aureus subsp. aureus Mu50
acuauuuguuaauaaauccauu

SEQ ID NO: 16403 - RNA, 19 nt, Staphylococcus aureus subsp. aureus Mu50
acuuugaagggagcauuuc

SEQ ID NO: 16404 - RNA, 22 nt, Staphylococcus aureus subsp. aureus Mu50
agaaaacagcaguaaaaucauu

SEQ ID NO: 16405 - RNA, 22 nt, Staphylococcus aureus subsp. aureus Mu50
agaaagugcgguuauuuauaca

SEQ ID NO: 16406 - RNA, 22 nt, Staphylococcus aureus subsp. aureus Mu50
agagauaaaauaaagagguacu

SEQ ID NO: 16407 - RNA, 23 nt, Staphylococcus aureus subsp. aureus Mu50
agacauuuaaugauaaauacuga

SEQ ID NO: 16408 - RNA, 22 nt, Staphylococcus aureus subsp. aureus Mu50
agauauuguugauauggcauuu

SEQ ID NO: 16409 - RNA, 22 nt, Staphylococcus aureus subsp. aureus Mu50
agccuguauacguuugaguggu

SEQ ID NO: 16410 - RNA, 22 nt, Staphylococcus aureus subsp. aureus Mu50
agcaugauacucaauaaaauug

SEQ ID NO: 16411 - RNA, 22 nt, Staphylococcus aureus subsp. aureus Mu50
aaacugcuaauguagucaugag

SEQ ID NO: 16412 - RNA, 22 nt, Staphylococcus aureus subsp. aureus Mu50
aacauuuucaauaauugauucg

SEQ ID NO: 16413 - RNA, 22 nt, Staphylococcus aureus subsp. aureus Mu50
aaaaauguccuccuguucauca

SEQ ID NO: 16414 - RNA, 22 nt, Staphylococcus aureus subsp. aureus Mu50
aauuuuuguacguucaauauca

SEQ ID NO: 16415 - RNA, 22 nt, Staphylococcus aureus subsp. aureus Mu50
aauuaacuuuguuaauagaguu

SEQ ID NO: 16416 - RNA, 22 nt, Staphylococcus aureus subsp. aureus Mu50
aauucuacaucaauccuacagg

SEQ ID NO: 16417 - RNA, 22 nt, Staphylococcus aureus subsp. aureus Mu50
aauugaggcggaauuagcgcgu

SEQ ID NO: 16418 - RNA, 22 nt, Staphylococcus aureus subsp. aureus Mu50
aauuuuaguagggacaacauug

SEQ ID NO: 16419 - RNA, 22 nt, Staphylococcus aureus subsp. aureus Mu50
aaugggagugggacagaaauga

SEQ ID NO: 16420 - RNA, 22 nt, Staphylococcus aureus subsp. aureus Mu50
aaugggguaaucaugaugugcu

SEQ ID NO: 16421 - RNA, 22 nt, Staphylococcus aureus subsp. aureus Mu50
aaugaaaugaagauugcacuca

SEQ ID NO: 16422 - RNA, 22 nt, Staphylococcus aureus subsp. aureus Mu50
aaugagagcccccuuuaccaca

SEQ ID NO: 16423 - RNA, 22 nt, Staphylococcus aureus subsp. aureus Mu50
aaugauaagcgacaguuaauaa

SEQ ID NO: 16424 - RNA, 22 nt, Staphylococcus aureus subsp. aureus Mu50
aauaaaguuauucauguagauu

SEQ ID NO: 16425 - RNA, 22 nt, Staphylococcus aureus subsp. aureus Mu50
aauacacuaaucgcacguacuc

SEQ ID NO: 16426 - RNA, 22 nt, Staphylococcus aureus subsp. aureus Mu50
aauagagaacagcaguaagacg

SEQ ID NO: 16427 - RNA, 22 nt, Staphylococcus aureus subsp. aureus Mu50
aauaguuguaccgacagcgccu

SEQ ID NO: 16428 - RNA, 22 nt, Staphylococcus aureus subsp. aureus Mu50
aaucaaauuauauugagccguu

SEQ ID NO: 16429 - RNA, 22 nt, Staphylococcus aureus subsp. aureus Mu50
acagaaauguagcuaacauuuu

SEQ ID NO: 16430 - RNA, 22 nt, Staphylococcus aureus subsp. aureus Mu50
acaguuuagugcgcaaauuaau

SEQ ID NO: 16431 - RNA, 22 nt, Staphylococcus aureus subsp. aureus Mu50
aaaaugaugauaaacuaguaua

SEQ ID NO: 16432 - RNA, 22 nt, Staphylococcus aureus subsp. aureus Mu50
aacaauuaaugaucuuacagaa

SEQ ID NO: 16433 - RNA, 22 nt, Staphylococcus aureus subsp. aureus Mu50
aaagcucucuucauaaucaugu

SEQ ID NO: 16434 - RNA, 22 nt, Staphylococcus aureus subsp. aureus Mu50
aaauacuuuccauguauggugu

SEQ ID NO: 16435 - RNA, 22 nt, Staphylococcus aureus subsp. aureus Mu50
acagcuggugagauagguguca

SEQ ID NO: 16436 - RNA, 22 nt, Staphylococcus aureus subsp. aureus Mu50
acagaaauaugauguaauuguu

SEQ ID NO: 16437 - RNA, 22 nt, Staphylococcus aureus subsp. aureus Mu50
aauuucagcacgacgauuaaau

SEQ ID NO: 16438 - RNA, 22 nt, Staphylococcus aureus subsp. aureus Mu50
acaucuaacaguaaacauuuag

SEQ ID NO: 16439 - RNA, 22 nt, Staphylococcus aureus subsp. aureus Mu50
acauugggcauaaucacagcua

SEQ ID NO: 16440 - RNA, 22 nt, Staphylococcus aureus subsp. aureus Mu50
acauuuauuugggcuguaacga

SEQ ID NO: 16441 - RNA, 22 nt, Staphylococcus aureus subsp. aureus Mu50
aauaaucuauauuaucuuucgu

SEQ ID NO: 16442 - RNA, 22 nt, Staphylococcus aureus subsp. aureus Mu50
aauuacuuuagccauugcuacc

SEQ ID NO: 16443 - RNA, 22 nt, Staphylococcus aureus subsp. aureus Mu50
aauuccaaaagccagaagguac

SEQ ID NO: 16444 - RNA, 22 nt, Staphylococcus aureus subsp. aureus Mu50
aauuuaaauuuagauccuguag

SEQ ID NO: 16445 - RNA, 22 nt, Staphylococcus aureus subsp. aureus Mu50
aagcgauuuuacuugaagauac

SEQ ID NO: 16446 - RNA, 22 nt, Staphylococcus aureus subsp. aureus Mu50
aagcuuuuuucaauucuaguca

SEQ ID NO: 16447 - RNA, 21 nt, Staphylococcus aureus subsp. aureus Mu50
aauaacaguuacaaaugcuga

SEQ ID NO: 16448 - RNA, 22 nt, Staphylococcus aureus subsp. aureus Mu50
gcuucaaugcuuuuagccauuu

SEQ ID NO: 16449 - RNA, 22 nt, Staphylococcus aureus subsp. aureus Mu50
gcugaaaugguaauaucuuuau

SEQ ID NO: 16450 - RNA, 22 nt, Staphylococcus aureus subsp. aureus Mu50
ucauuaaugucuacguaugaau

SEQ ID NO: 16451 - RNA, 22 nt, Staphylococcus aureus subsp. aureus Mu50
ucggucuaauuuuauagaaggu

SEQ ID NO: 16452 - RNA, 22 nt, Staphylococcus aureus subsp. aureus Mu50
ucaaauuacgugcuaaagcuug

SEQ ID NO: 16453 - RNA, 20 nt, Staphylococcus aureus subsp. aureus Mu50
uauuucaauugcuguugcug

SEQ ID NO: 16454 - RNA, 22 nt, Staphylococcus aureus subsp. aureus Mu50
uauaugagacggggucauuucu

SEQ ID NO: 16455 - RNA, 22 nt, Staphylococcus aureus subsp. aureus Mu50
uaucaaacauugaaugcacgcg

SEQ ID NO: 16456 - RNA, 22 nt, Staphylococcus aureus subsp. aureus Mu50
uagugguauugaaucugcugua

SEQ ID NO: 16457 - RNA, 22 nt, Staphylococcus aureus subsp. aureus Mu50
uaauugcacuaccaaugauuau

SEQ ID NO: 16458 - RNA, 22 nt, Staphylococcus aureus subsp. aureus Mu50
uacauuuugugacuaauagcgu

SEQ ID NO: 16459 - RNA, 22 nt, Staphylococcus aureus subsp. aureus Mu50
uaauauucgcacucauuauucc

SEQ ID NO: 16460 - RNA, 22 nt, Staphylococcus aureus subsp. aureus Mu50
uaaugauuuugguacgauacug

SEQ ID NO: 16461 - RNA, 22 nt, Staphylococcus aureus subsp. aureus Mu50
uaaaagcuucuaacaugauacg

SEQ ID NO: 16462 - RNA, 22 nt, Staphylococcus aureus subsp. aureus Mu50
uaaaauuauggauacacugauu

SEQ ID NO: 16463 - RNA, 20 nt, Staphylococcus aureus subsp. aureus Mu50
uaaagacuacuuacagcgua

SEQ ID NO: 16464 - RNA, 22 nt, Staphylococcus aureus subsp. aureus Mu50
gugcuacacguucaucaccauu

SEQ ID NO: 16465 - RNA, 22 nt, Staphylococcus aureus subsp. aureus Mu50
gugaaaaugaacguauugaugc

SEQ ID NO: 16466 - RNA, 22 nt, Staphylococcus aureus subsp. aureus Mu50
gugaguugaaguagcuugucau

SEQ ID NO: 16467 - RNA, 22 nt, Staphylococcus aureus subsp. aureus Mu50
guugauguugcuaacuucuuaa

SEQ ID NO: 16468 - RNA, 22 nt, Staphylococcus aureus subsp. aureus Mu50
gugugggauugcauuguucacu

SEQ ID NO: 16469 - RNA, 20 nt, Staphylococcus aureus subsp. aureus Mu50
ccagaugguuaugguuuuuu

SEQ ID NO: 16470 - RNA, 20 nt, Staphylococcus aureus subsp. aureus Mu50
caucaguuuuuuuauacgag

SEQ ID NO: 16471 - RNA, 22 nt, Staphylococcus aureus subsp. aureus Mu50
cauauaaagcgugcgugcuuuu

SEQ ID NO: 16472 - RNA, 21 nt, Staphylococcus aureus subsp. aureus Mu50
gaugggaauuucgacagugca

SEQ ID NO: 16473 - RNA, 22 nt, Staphylococcus aureus subsp. aureus Mu50
gcaaauguuacaccuguuucuu

SEQ ID NO: 16474 - RNA, 22 nt, Staphylococcus aureus subsp. aureus Mu50
gagauuuucgaagcacguaacc

SEQ ID NO: 16475 - RNA, 22 nt, Staphylococcus aureus subsp. aureus Mu50
gacguauuuuuuaucacauuga

SEQ ID NO: 16476 - RNA, 22 nt, Staphylococcus aureus subsp. aureus Mu50
cucgcggccuuuuuuauuguaa

SEQ ID NO: 16477 - RNA, 22 nt, Staphylococcus aureus subsp. aureus Mu50
gacauauuuuaauagugaauau

SEQ ID NO: 16478 - RNA, 22 nt, Staphylococcus aureus subsp. aureus Mu50
gaaaaaaucgauuggcguggcu

SEQ ID NO: 16479 - RNA, 22 nt, Staphylococcus aureus subsp. aureus Mu50
cuucaguagcaggcgguugcau

SEQ ID NO: 16480 - RNA, 22 nt, Staphylococcus aureus subsp. aureus Mu50
ugaaauacuaacauugacuucu

SEQ ID NO: 16481 - RNA, 22 nt, Staphylococcus aureus subsp. aureus Mu50
ugaaauauaaaauuguuugagg

SEQ ID NO: 16482 - RNA, 22 nt, Staphylococcus aureus subsp. aureus Mu50
ugaacaaccgggcagaaugaaa

SEQ ID NO: 16483 - RNA, 22 nt, Staphylococcus aureus subsp. aureus Mu50
ucgcugcaucguauaguuguug

SEQ ID NO: 16484 - RNA, 22 nt, Staphylococcus aureus subsp. aureus Mu50
uauaaauagagaagagcaguaa

SEQ ID NO: 16485 - RNA, 22 nt, Staphylococcus aureus subsp. aureus Mu50
uaucuccagaguauacaguauc

SEQ ID NO: 16486 - RNA, 22 nt, Staphylococcus aureus subsp. aureus Mu50
ucaaaaaugaagacauaguuaa

SEQ ID NO: 16487 - RNA, 22 nt, Staphylococcus aureus subsp. aureus Mu50
uagaaacagcaguaagaugauu

SEQ ID NO: 16488 - RNA, 22 nt, Staphylococcus aureus subsp. aureus Mu50
uaaguggauuguaauuauauua

SEQ ID NO: 16489 - RNA, 22 nt, Staphylococcus aureus subsp. aureus Mu50
ucauaauagauucuauuuuuaa

SEQ ID NO: 16490 - RNA, 22 nt, Staphylococcus aureus subsp. aureus Mu50
ucacuagagcuaugaaacuugg

SEQ ID NO: 16491 - RNA, 22 nt, Staphylococcus aureus subsp. aureus Mu50
ugcaucauuuaaagcugcuuca

SEQ ID NO: 16492 - RNA, 22 nt, Staphylococcus aureus subsp. aureus Mu50
ugauugguggguuuuucuucaa

SEQ ID NO: 16493 - RNA, 23 nt, Staphylococcus aureus subsp. aureus Mu50
ugcaaauguugagcgcauauuug

SEQ ID NO: 16494 - RNA, 22 nt, Staphylococcus aureus subsp. aureus Mu50
cagaugcugcagaugaauuaga

SEQ ID NO: 16495 - RNA, 22 nt, Staphylococcus aureus subsp. aureus Mu50
auuugaaaggagccgauaaugg

SEQ ID NO: 16496 - RNA, 22 nt, Staphylococcus aureus subsp. aureus Mu50
auuuuauauaaaaagaagaucc

SEQ ID NO: 16497 - RNA, 22 nt, Staphylococcus aureus subsp. aureus Mu50
caaaugcugucgucuacuuuua

SEQ ID NO: 16498 - RNA, 22 nt, Staphylococcus aureus subsp. aureus Mu50
auuauuuaccacuuaaacaagc

SEQ ID NO: 16499 - RNA, 22 nt, Staphylococcus aureus subsp. aureus Mu50
auuaaaugauucuuuauuggua

SEQ ID NO: 16500 - RNA, 21 nt, Staphylococcus aureus subsp. aureus Mu50
augcaucuuucugugcuuggu

SEQ ID NO: 16501 - RNA, 22 nt, Staphylococcus aureus subsp. aureus Mu50
auguaaaaaagcugauuucuau

SEQ ID NO: 16502 - RNA, 22 nt, Staphylococcus aureus subsp. aureus Mu50
auguucaucuacaguauuaugu

SEQ ID NO: 16503 - RNA, 22 nt, Staphylococcus aureus subsp. aureus Mu50
augacguuguugaauuaucuuc

SEQ ID NO: 16504 - RNA, 22 nt, Staphylococcus aureus subsp. aureus Mu50
aucuagaaucgcaugauaauuu

SEQ ID NO: 16505 - RNA, 22 nt, Staphylococcus aureus subsp. aureus Mu50
auagugaguuuguuacauauug

SEQ ID NO: 16506 - RNA, 22 nt, Staphylococcus aureus subsp. aureus Mu50
auauaaguuuuggugacugaau

SEQ ID NO: 16507 - RNA, 22 nt, Staphylococcus aureus subsp. aureus Mu50
auaaacauguuguuucugaaac

SEQ ID NO: 16508 - RNA, 22 nt, Staphylococcus aureus subsp. aureus Mu50
auauuugcuaaaaauacuuuga

SEQ ID NO: 16509 - RNA, 22 nt, Staphylococcus aureus subsp. aureus Mu50
auaugaaacuacucauuugaag

SEQ ID NO: 16510 - RNA, 22 nt, Staphylococcus aureus subsp. aureus Mu50
aucaugacuuaugugugaguga

SEQ ID NO: 16511 - RNA, 23 nt, Staphylococcus aureus subsp. aureus Mu50
ugugccauuugaaaauguuauga

SEQ ID NO: 16512 - RNA, 22 nt, Staphylococcus aureus subsp. aureus Mu50
uuaaaaaagcagugaaucauuu

SEQ ID NO: 16513 - RNA, 22 nt, Staphylococcus aureus subsp. aureus Mu50
uuaaaagucacaauacacauga

SEQ ID NO: 16514 - RNA, 23 nt, Staphylococcus aureus subsp. aureus Mu50
uuccaauuccaaaugcaauagca

SEQ ID NO: 16515 - RNA, 17 nt, Staphylococcus aureus subsp. aureus Mu50
uucauaucauuacuuug

SEQ ID NO: 16516 - RNA, 20 nt, Staphylococcus aureus subsp. aureus Mu50
uuauugauaguacucagcaa

SEQ ID NO: 16517 - RNA, 22 nt, Staphylococcus aureus subsp. aureus Mu50
uugaauggaguauaucagcuug

SEQ ID NO: 16518 - RNA, 22 nt, Staphylococcus aureus subsp. aureus Mu50
uugauaaggggaguguaguauu

SEQ ID NO: 16519 - RNA, 22 nt, Staphylococcus aureus subsp. aureus Mu50
uugauacagcugguacauuagu

SEQ ID NO: 16520 - RNA, 22 nt, Staphylococcus aureus subsp. aureus Mu50
aguuauaacgaaguuauuaugc

SEQ ID NO: 16521 - RNA, 22 nt, Staphylococcus aureus subsp. aureus Mu50
agguuuaacauuauuacaaauc

SEQ ID NO: 16522 - RNA, 22 nt, Staphylococcus aureus subsp. aureus Mu50
uuuuaugauaaagaaggauaua

SEQ ID NO: 16523 - RNA, 22 nt, Staphylococcus aureus subsp. aureus Mu50
uuuuauugaucgacacgguaag

SEQ ID NO: 16524 - RNA, 19 nt, Staphylococcus aureus subsp. aureus Mu50
uuugaacuuguauuuguag

SEQ ID NO: 16525 - RNA, 22 nt, Staphylococcus aureus subsp. aureus Mu50
uuugauucagucaguaaagaag

SEQ ID NO: 16526 - RNA, 22 nt, Staphylococcus aureus subsp. aureus Mu50
uuucaucagauugguacgaagc

SEQ ID NO: 16527 - RNA, 22 nt, Staphylococcus aureus subsp. aureus Mu50
uuucacauaguuaacaauugcu

SEQ ID NO: 16528 - RNA, 22 nt, Staphylococcus aureus subsp. aureus Mu50
uuucacauuuggauauuuacga

SEQ ID NO: 16529 - RNA, 22 nt, Staphylococcus aureus subsp. aureus Mu50
uugcagcacgugauucuggugc

SEQ ID NO: 16530 - RNA, 22 nt, Staphylococcus aureus subsp. aureus Mu50
uugugaaauauucggcgguacu

SEQ ID NO: 16531 - RNA, 22 nt, Staphylococcus aureus subsp. aureus Mu50
uuuaauugcugugcuuggugga

SEQ ID NO: 16532 - RNA, 22 nt, Staphylococcus aureus subsp. aureus Mu50
uugggcaucgcuuaaaugguuu

SEQ ID NO: 16533 - RNA, 22 nt, Staphylococcus aureus subsp. aureus Mu50
gcuuuauugaugaugucuuuau

SEQ ID NO: 16534 - RNA, 22 nt, Staphylococcus aureus subsp. aureus Mu50
ggaugccgacaguauuccgauu

SEQ ID NO: 16535 - RNA, 22 nt, Staphylococcus aureus subsp. aureus Mu50
guaguugacugaacgaaaaugc

SEQ ID NO: 16536 - RNA, 22 nt, Staphylococcus aureus subsp. aureus Mu50
guaaaaccuguugauacaacug

SEQ ID NO: 16537 - RNA, 22 nt, Staphylococcus aureus subsp. aureus Mu50
gagauauugguaaagcuuuugc

SEQ ID NO: 16538 - RNA, 22 nt, Staphylococcus aureus subsp. aureus Mu50
cuuuccaaguuaaagauuuacc

SEQ ID NO: 16539 - RNA, 22 nt, Staphylococcus aureus subsp. aureus Mu50
gcaacaauuguaaaguuugaaa

SEQ ID NO: 16540 - RNA, 22 nt, Homo sapiens
ugacuaggaggcuggaggauga

SEQ ID NO: 16541 - RNA, 22 nt, Homo sapiens
gugcacaaaucuuaaauguaca

SEQ ID NO: 16542 - RNA, 22 nt, Homo sapiens
uggcagcugcuucaugggaugc

SEQ ID NO: 16543 - RNA, 20 nt, Homo sapiens
uauucacucuccagucuugc

SEQ ID NO: 16544 - RNA, 22 nt, Homo sapiens
uugauagacacauauccaugug

SEQ ID NO: 16545 - RNA, 22 nt, Homo sapiens
aaaugcucucuacacguuucug

SEQ ID NO: 16546 - RNA, 22 nt, Homo sapiens
auggaguguggaacugggaauc

SEQ ID NO: 16547 - RNA, 22 nt, Homo sapiens
ggcagcucaggccccgcgcuga

SEQ ID NO: 16548 - RNA, 22 nt, Homo sapiens
gggaggucauuguucaaugcug

SEQ ID NO: 16549 - RNA, 22 nt, Homo sapiens
gugcacaacaugcaguuuuguu

SEQ ID NO: 16550 - RNA, 22 nt, Homo sapiens
caaaggcuucugaaacugcaga

SEQ ID NO: 16551 - RNA, 22 nt, Homo sapiens
uggaagugaacaaccaaggcag

SEQ ID NO: 16552 - RNA, 22 nt, Homo sapiens
aaaugcacaaagauuuugcacu

SEQ ID NO: 16553 - RNA, 22 nt, Homo sapiens
ugugguuuuaguaaaacuaugu

SEQ ID NO: 16554 - RNA, 22 nt, Homo sapiens
uaaguauuaugugcugcauuuu

SEQ ID NO: 16555 - RNA, 22 nt, Homo sapiens
accugguuuuaacauuguauua

SEQ ID NO: 16556 - RNA, 22 nt, Homo sapiens
guggcgagaucauagcucauug

SEQ ID NO: 16557 - RNA, 22 nt, Homo sapiens
ugacuagggcucuaaacagcuc

SEQ ID NO: 16558 - RNA, 22 nt, Homo sapiens
uacucaauugcagucaccuggc

SEQ ID NO: 16559 - RNA, 22 nt, Homo sapiens
cuggcugagugguaaguagagg

SEQ ID NO: 16560 - RNA, 22 nt, Homo sapiens
aaugcacauauauuuccuuauu

SEQ ID NO: 16561 - RNA, 22 nt, Homo sapiens
cucacggcccugcgcacuggca

SEQ ID NO: 16562 - RNA, 22 nt, Homo sapiens
uccccgagcccaggcugugacu

SEQ ID NO: 16563 - RNA, 22 nt, Homo sapiens
ugagguuggguaauuuaugaag

SEQ ID NO: 16564 - RNA, 22 nt, Homo sapiens
uggagugauaugguuauauggg

SEQ ID NO: 16565 - RNA, 22 nt, Homo sapiens
auaagugagugauucaguguua

SEQ ID NO: 16566 - RNA, 21 nt, Homo sapiens
uggucccauaagauuacaaug

SEQ ID NO: 16567 - RNA, 22 nt, Homo sapiens
ugggcggagacgugcagccgcc

SEQ ID NO: 16568 - RNA, 23 nt, Homo sapiens
ggauggaaaguuuugagggccac

SEQ ID NO: 16569 - RNA, 22 nt, Homo sapiens
ggcagacuguggaguucuuucu

SEQ ID NO: 16570 - RNA, 22 nt, Homo sapiens
uagcagcaccccacucuacugg

SEQ ID NO: 16571 - RNA, 22 nt, Homo sapiens
aucugggguuggcaaaguuugg

SEQ ID NO: 16572 - RNA, 22 nt, Homo sapiens
cugagaagaaacagguaaggac

SEQ ID NO: 16573 - RNA, 22 nt, Homo sapiens
gucagucugucccugccuggcg

SEQ ID NO: 16574 - RNA, 22 nt, Homo sapiens
gagcuggacuucuuaccuuuuc

SEQ ID NO: 16575 - RNA, 22 nt, Homo sapiens
uuuuuuaguuagcugggcauga

SEQ ID NO: 16576 - RNA, 22 nt, Homo sapiens
uugauauguuguuagauucagu

SEQ ID NO: 16577 - RNA, 22 nt, Homo sapiens
uagccucacaaagugcuuaaga

SEQ ID NO: 16578 - RNA, 22 nt, Homo sapiens
uaugcacacacguguuuaugug

SEQ ID NO: 16579 - RNA, 20 nt, Homo sapiens
uggcucuuugcugcuaaagu

SEQ ID NO: 16580 - RNA, 23 nt, Homo sapiens
ucacuagaguccuggaguuugag

SEQ ID NO: 16581 - RNA, 22 nt, Homo sapiens
uggaaguauagauaauugaaag

SEQ ID NO: 16582 - RNA, 22 nt, Homo sapiens
ugagaggugaauggcaggcuca

SEQ ID NO: 16583 - RNA, 22 nt, Homo sapiens
aucugcacaucuguguuuuugu

SEQ ID NO: 16584 - RNA, 22 nt, Homo sapiens
ggacuaggagcuaggaagaucu

SEQ ID NO: 16585 - RNA, 21 nt, Homo sapiens
uuucugggggagcauggcagg

SEQ ID NO: 16586 - RNA, 22 nt, Homo sapiens
uccaugugaaaaggucgugaua

SEQ ID NO: 16587 - RNA, 22 nt, Homo sapiens
uuucugggggugcugauggaaa

SEQ ID NO: 16588 - RNA, 19 nt, Homo sapiens
acagcugguuuugguuucu

SEQ ID NO: 16589 - RNA, 22 nt, Homo sapiens
uggauugagaagcuguggcuca

SEQ ID NO: 16590 - RNA, 22 nt, Homo sapiens
aggaaguaauaaguuugguucu

SEQ ID NO: 16591 - RNA, 20 nt, Homo sapiens
uggaaguaagaauauaggug

SEQ ID NO: 16592 - RNA, 22 nt, Homo sapiens
aaauugcacaaguggugauuug

SEQ ID NO: 16593 - RNA, 22 nt, Homo sapiens
uccaugugaaaucuaugaggac

SEQ ID NO: 16594 - RNA, 22 nt, Homo sapiens
acacuuucuggagcugcacaua

SEQ ID NO: 16595 - RNA, 22 nt, Homo sapiens
cuuuggcauuagccuguauaga

SEQ ID NO: 16596 - RNA, 22 nt, Homo sapiens
augugcacaugcuuacauguga

SEQ ID NO: 16597 - RNA, 22 nt, Homo sapiens
guccuggagaagcguggaccgg

SEQ ID NO: 16598 - RNA, 22 nt, Homo sapiens
gggaagugugcagaguucucuu

SEQ ID NO: 16599 - RNA, 22 nt, Homo sapiens
aguggaguguaaagcgucuuuu

SEQ ID NO: 16600 - RNA, 22 nt, Homo sapiens
cccuguguuguucaaggaucug

SEQ ID NO: 16601 - RNA, 22 nt, Homo sapiens
ugaaugcuucaugucugggcug

SEQ ID NO: 16602 - RNA, 22 nt, Homo sapiens
uucaggcaccauugucauugau

SEQ ID NO: 16603 - RNA, 22 nt, Homo sapiens
augagucacuuauuauuggggu

SEQ ID NO: 16604 - RNA, 23 nt, Homo sapiens
uccccgggagcaccagcuuguug

SEQ ID NO: 16605 - RNA, 22 nt, Homo sapiens
uucacacugggccuacucugug

SEQ ID NO: 16606 - RNA, 22 nt, Homo sapiens
uggcucuuucuagacuuaauua

SEQ ID NO: 16607 - RNA, 22 nt, Homo sapiens
aauacugagaugugagguacua

SEQ ID NO: 16608 - RNA, 22 nt, Homo sapiens
gacuaggagagcagcugcccau

SEQ ID NO: 16609 - RNA, 22 nt, Homo sapiens
gugaucuguccuucauagccug

SEQ ID NO: 16610 - RNA, 22 nt, Homo sapiens
agugaaaucugaagaaggucau

SEQ ID NO: 16611 - RNA, 22 nt, Homo sapiens
uuuccagguggccaacauuuua

SEQ ID NO: 16612 - RNA, 22 nt, Homo sapiens
ugauauauugaaugaugaaaca

SEQ ID NO: 16613 - RNA, 22 nt, Homo sapiens
aggaagguaaacuaacuugccu

SEQ ID NO: 16614 - RNA, 19 nt, Homo sapiens
uccccgggucuagugcagc

SEQ ID NO: 16615 - RNA, 21 nt, Homo sapiens
ugcagccauucagcccuaugc

SEQ ID NO: 16616 - RNA, 23 nt, Homo sapiens
ugccuagaugcugcccugggaca

SEQ ID NO: 16617 - RNA, 22 nt, Homo sapiens
gauggaguugucgccugggcug

SEQ ID NO: 16618 - RNA, 22 nt, Homo sapiens
ugaucucagcucacugguugaa

SEQ ID NO: 16619 - RNA, 22 nt, Homo sapiens
uggaguguaaauuaguucagcc

SEQ ID NO: 16620 - RNA, 22 nt, Homo sapiens
uguaaugaucaaaucagaguaa

SEQ ID NO: 16621 - RNA, 22 nt, Homo sapiens
aagcacccuuugucuggacaug

SEQ ID NO: 16622 - RNA, 22 nt, Homo sapiens
cuagcugcacuuccugcuacug

SEQ ID NO: 16623 - RNA, 22 nt, Homo sapiens
ucccauguagcuaggauuacag

SEQ ID NO: 16624 - RNA, 22 nt, Homo sapiens
uuccacaaugguugaacuagcu

SEQ ID NO: 16625 - RNA, 22 nt, Homo sapiens
cacuuugguucaccugaguuuc

SEQ ID NO: 16626 - RNA, 22 nt, Homo sapiens
ugguaccuuuuaaugacuaauu

SEQ ID NO: 16627 - RNA, 22 nt, Homo sapiens
ggccggguggccauggcugccc

SEQ ID NO: 16628 - RNA, 17 nt, Homo sapiens
ugauaagugugagguga

SEQ ID NO: 16629 - RNA, 22 nt, Homo sapiens
gcuaggagaucugcugcucucu

SEQ ID NO: 16630 - RNA, 22 nt, Homo sapiens
gcuggugacuuuaaguugaagc

SEQ ID NO: 16631 - RNA, 22 nt, Homo sapiens
ugaggauaguguugaaggcagg

SEQ ID NO: 16632 - RNA, 22 nt, Homo sapiens
uuacaguucugguggagaggua

SEQ ID NO: 16633 - RNA, 22 nt, Homo sapiens
cucacuaggaaguaaaguuugu

SEQ ID NO: 16634 - RNA, 22 nt, Homo sapiens
guggaagugucuggggccaggg

SEQ ID NO: 16635 - RNA, 22 nt, Homo sapiens
uugauagacaucugaguuguug

SEQ ID NO: 16636 - RNA, 22 nt, Homo sapiens
uuucaguguggcaggcauagcu

SEQ ID NO: 16637 - RNA, 22 nt, Homo sapiens
gaagcauugauccacaggcgug

SEQ ID NO: 16638 - RNA, 19 nt, Homo sapiens
ugcauugucugggaaaugg

SEQ ID NO: 16639 - RNA, 22 nt, Homo sapiens
ugagguugguauuacugucucu

SEQ ID NO: 16640 - RNA, 22 nt, Homo sapiens
ugacuaggaaauuagaacuuuu

SEQ ID NO: 16641 - RNA, 22 nt, Homo sapiens
uugauauguuguuggauucacu

SEQ ID NO: 16642 - RNA, 22 nt, Homo sapiens
uuugguguauaaaaaugcuagu

SEQ ID NO: 16643 - RNA, 21 nt, Homo sapiens
ugaaccccugcucucaagaaa

SEQ ID NO: 16644 - RNA, 22 nt, Homo sapiens
ggcagcuguguccuucguaagg

SEQ ID NO: 16645 - RNA, 22 nt, Homo sapiens
uuccacaaugguugaacuaauu

SEQ ID NO: 16646 - RNA, 17 nt, Homo sapiens
uuuuggauuagaaaucc

SEQ ID NO: 16647 - RNA, 22 nt, Homo sapiens
auaugcauacauguaugcagga

SEQ ID NO: 16648 - RNA, 22 nt, Homo sapiens
uuggaauguacucuagccuaug

SEQ ID NO: 16649 - RNA, 22 nt, Homo sapiens
uugugguuuuuaaaacuaggug

SEQ ID NO: 16650 - RNA, 20 nt, Homo sapiens
agacuagggagcagaaagcc

SEQ ID NO: 16651 - RNA, 22 nt, Homo sapiens
auaugcacuauacacacguaua

SEQ ID NO: 16652 - RNA, 22 nt, Homo sapiens
cagcaucauucaucugggguaa

SEQ ID NO: 16653 - RNA, 22 nt, Homo sapiens
uuccacaauggcugaacuaguu

SEQ ID NO: 16654 - RNA, 22 nt, Homo sapiens
uggcuccguuguacaggcugga

SEQ ID NO: 16655 - RNA, 22 nt, Homo sapiens
uuggucucaucaagagcagcuu

SEQ ID NO: 16656 - RNA, 22 nt, Homo sapiens
ugagucuguucucacauugcua

SEQ ID NO: 16657 - RNA, 22 nt, Homo sapiens
agcaccaauaacaguuucuagc

SEQ ID NO: 16658 - RNA, 22 nt, Homo sapiens
cugggaugugacuguugccccc

SEQ ID NO: 16659 - RNA, 22 nt, Homo sapiens
ucacaaguguauagacaugucc

SEQ ID NO: 16660 - RNA, 22 nt, Homo sapiens
gaagcgaggugauuagcagaca

SEQ ID NO: 16661 - RNA, 22 nt, Homo sapiens
auacuguuuuacaucauugccu

SEQ ID NO: 16662 - RNA, 18 nt, Homo sapiens
ucacuagacacugaaucu

SEQ ID NO: 16663 - RNA, 22 nt, Homo sapiens
uugggacuggaaggaguaaggg

SEQ ID NO: 16664 - RNA, 22 nt, Homo sapiens
ggaagguaauugucagcucaua

SEQ ID NO: 16665 - RNA, 22 nt, Homo sapiens
ucagaacugauacuagaacuuu

SEQ ID NO: 16666 - RNA, 22 nt, Homo sapiens
caugguguuaggcacugggaau

SEQ ID NO: 16667 - RNA, 22 nt, Homo sapiens
agcgccacugcacuccagccug

SEQ ID NO: 16668 - RNA, 22 nt, Homo sapiens
uagcuggaguuuuuguuauagg

SEQ ID NO: 16669 - RNA, 22 nt, Homo sapiens
uuggaagagaagggagauaaac

SEQ ID NO: 16670 - RNA, 22 nt, Homo sapiens
gugcacaaucgugcauuccuug

SEQ ID NO: 16671 - RNA, 22 nt, Homo sapiens
ggacuagggacauggggagcug

SEQ ID NO: 16672 - RNA, 22 nt, Homo sapiens
gcuggcuuucuccugaucucag

SEQ ID NO: 16673 - RNA, 22 nt, Homo sapiens
ugaauacugugcaaaggauuug

SEQ ID NO: 16674 - RNA, 22 nt, Homo sapiens
uggucccaugaacuuuagguca

SEQ ID NO: 16675 - RNA, 22 nt, Homo sapiens
caaugcauuauucucccacuuc

SEQ ID NO: 16676 - RNA, 22 nt, Homo sapiens
gucauugcuuaaggguucaugc

SEQ ID NO: 16677 - RNA, 22 nt, Homo sapiens
uggaagugucugugcccagcuc

SEQ ID NO: 16678 - RNA, 22 nt, Homo sapiens
auugauaguuuaauaggaauug

SEQ ID NO: 16679 - RNA, 22 nt, Homo sapiens
ucucacagaguugaacuuucuu

SEQ ID NO: 16680 - RNA, 22 nt, Homo sapiens
uuggcaaauagguuuuauugca

SEQ ID NO: 16681 - RNA, 22 nt, Homo sapiens
guuaagaaguguaacuuaaguu

SEQ ID NO: 16682 - RNA, 22 nt, Homo sapiens
aauacugaaaguauuuucaaau

SEQ ID NO: 16683 - RNA, 18 nt, Homo sapiens
gucucacaugguggaagc

SEQ ID NO: 16684 - RNA, 20 nt, Homo sapiens
uggaacuuaauugauggaca

SEQ ID NO: 16685 - RNA, 22 nt, Homo sapiens
auaugacugccagggcccaguc

SEQ ID NO: 16686 - RNA, 22 nt, Homo sapiens
uuccacaaugguugaacuaguu

SEQ ID NO: 16687 - RNA, 22 nt, Homo sapiens
aucacuagaucauagguaaaca

SEQ ID NO: 16688 - RNA, 22 nt, Homo sapiens
agugacaugggaucaaaucuga

SEQ ID NO: 16689 - RNA, 22 nt, Homo sapiens
aggucccauguccucccugacc

SEQ ID NO: 16690 - RNA, 22 nt, Homo sapiens
auagcagcuugucagggcagac

SEQ ID NO: 16691 - RNA, 22 nt, Homo sapiens
uggcuugauggcacaagguuuc

SEQ ID NO: 16692 - RNA, 17 nt, Homo sapiens
guuuggguacuggguaa

SEQ ID NO: 16693 - RNA, 22 nt, Homo sapiens
agcugguauuuugucaaggaua

SEQ ID NO: 16694 - RNA, 22 nt, Homo sapiens
auggauguucuagggaugugau

SEQ ID NO: 16695 - RNA, 22 nt, Homo sapiens
auugcacaucugcacuacagcc

SEQ ID NO: 16696 - RNA, 22 nt, Homo sapiens
uagcaccuuagcauuucuagug

SEQ ID NO: 16697 - RNA, 22 nt, Homo sapiens
ugaggcacucccuagcggggug

SEQ ID NO: 16698 - RNA, 22 nt, Homo sapiens
uuuggcuuuuguaauaacugcc

SEQ ID NO: 16699 - RNA, 22 nt, Homo sapiens
gaggaguagggcacaaagccuu

SEQ ID NO: 16700 - RNA, 22 nt, Homo sapiens
gagauguuuuguuaucaaagga

SEQ ID NO: 16701 - RNA, 22 nt, Homo sapiens
ucacuagaucaagggagagaaa

SEQ ID NO: 16702 - RNA, 22 nt, Homo sapiens
auggaggccuacagaauuuugg

SEQ ID NO: 16703 - RNA, 22 nt, Homo sapiens
uguucuugaguugggaguacaa

SEQ ID NO: 16704 - RNA, 22 nt, Homo sapiens
ugauacugugcauuagaggcua

SEQ ID NO: 16705 - RNA, 22 nt, Homo sapiens
gacuaggagauauguuuucuuc

SEQ ID NO: 16706 - RNA, 22 nt, Homo sapiens
agagaacugauuggaugugggc

SEQ ID NO: 16707 - RNA, 22 nt, Homo sapiens
augacauugaaaagcaagugga

SEQ ID NO: 16708 - RNA, 22 nt, Homo sapiens
agggcuuguuuaacuaucauua

SEQ ID NO: 16709 - RNA, 19 nt, Homo sapiens
uggagucaucaugcugcua

SEQ ID NO: 16710 - RNA, 18 nt, Homo sapiens
uuucaggguggacaugag

SEQ ID NO: 16711 - RNA, 22 nt, Homo sapiens
uacauacuucacagacuuuaaa

SEQ ID NO: 16712 - RNA, 22 nt, Homo sapiens
ucacaggguguuauuagaauua

SEQ ID NO: 16713 - RNA, 22 nt, Homo sapiens
aaaaguucuuugagccuugaca

SEQ ID NO: 16714 - RNA, 22 nt, Homo sapiens
ucucacagaguugaauguuucu

SEQ ID NO: 16715 - RNA, 22 nt, Homo sapiens
gccccgggugaugcagccguca

SEQ ID NO: 16716 - RNA, 22 nt, Homo sapiens
uauggauuuuuuugacaagagc

SEQ ID NO: 16717 - RNA, 22 nt, Homo sapiens
uggaaguaaccaugaauggaau

SEQ ID NO: 16718 - RNA, 22 nt, Homo sapiens
uugguccccuucaaccagcugu

SEQ ID NO: 16719 - RNA, 22 nt, Homo sapiens
gaaugauacuguuaacgaaaga

SEQ ID NO: 16720 - RNA, 22 nt, Homo sapiens
uggauugaaagcuuuaauauug

SEQ ID NO: 16721 - RNA, 21 nt, Homo sapiens
cugguccccuuuauguaugug

SEQ ID NO: 16722 - RNA, 22 nt, Homo sapiens
augacuagaggagggauggcca

SEQ ID NO: 16723 - RNA, 22 nt, Homo sapiens
cuggaggccugaacauaaaugg

SEQ ID NO: 16724 - RNA, 22 nt, Homo sapiens
uugguccucccaugcucaagag

SEQ ID NO: 16725 - RNA, 22 nt, Homo sapiens
cuguaauguaaugagacuacau

SEQ ID NO: 16726 - RNA, 22 nt, Homo sapiens
uuggagugugagagcagccugg

SEQ ID NO: 16727 - RNA, 17 nt, Homo sapiens
uuuaaugcuaggacucu

SEQ ID NO: 16728 - RNA, 22 nt, Homo sapiens
gugguguuugagcugccaggga

SEQ ID NO: 16729 - RNA, 22 nt, Homo sapiens
aagcuggagugcaguggugcaa

SEQ ID NO: 16730 - RNA, 22 nt, Homo sapiens
uugauagaucagggauuugauu

SEQ ID NO: 16731 - RNA, 20 nt, Homo sapiens
aucagagacuaggauugcca

SEQ ID NO: 16732 - RNA, 22 nt, Homo sapiens
uggaaguagauagauuguguca

SEQ ID NO: 16733 - RNA, 22 nt, Homo sapiens
auaaagccaugagcuugagaug

SEQ ID NO: 16734 - RNA, 22 nt, Homo sapiens
uucaggcaccauggucauugau

SEQ ID NO: 16735 - RNA, 19 nt, Homo sapiens
augagucugcaagaaccag

SEQ ID NO: 16736 - RNA, 19 nt, Homo sapiens
ggcaauacuuucuuguugg

SEQ ID NO: 16737 - RNA, 22 nt, Homo sapiens
uuaaaugcuagaauuuucuuug

SEQ ID NO: 16738 - RNA, 20 nt, Homo sapiens
cugcacauccacucuacuuc

SEQ ID NO: 16739 - RNA, 22 nt, Homo sapiens
auacaguugccauuucuugugc

SEQ ID NO: 16740 - RNA, 17 nt, Homo sapiens
ucuaauaauaugcauuu

SEQ ID NO: 16741 - RNA, 22 nt, Homo sapiens
uagcaccugugcacaccaggca

SEQ ID NO: 16742 - RNA, 22 nt, Homo sapiens
agaaugucaguauuggcuaaaa

SEQ ID NO: 16743 - RNA, 23 nt, Homo sapiens
ucaugaggccauucaaauccauu

SEQ ID NO: 16744 - RNA, 22 nt, Homo sapiens
gcgugguguuagaaugagaagu

SEQ ID NO: 16745 - RNA, 23 nt, Homo sapiens
ucugcggguguggacccuagugc

SEQ ID NO: 16746 - RNA, 22 nt, Homo sapiens
ccacaguggauuaaaguuacug

SEQ ID NO: 16747 - RNA, 22 nt, Homo sapiens
uuggacuucucaaggcaauaaa

SEQ ID NO: 16748 - RNA, 22 nt, Homo sapiens
gagcuagguuuugaauccagac

SEQ ID NO: 16749 - RNA, 22 nt, Homo sapiens
cacugcaguaaauugcgucggu

SEQ ID NO: 16750 - RNA, 17 nt, Homo sapiens
ugugauugaagucaucc

SEQ ID NO: 16751 - RNA, 22 nt, Homo sapiens
agcaccaauaaucagaguucuu

SEQ ID NO: 16752 - RNA, 22 nt, Homo sapiens
acccuggauucguggccuugaa

SEQ ID NO: 16753 - RNA, 22 nt, Homo sapiens
uagcaacauucagcucagguac

SEQ ID NO: 16754 - RNA, 22 nt, Homo sapiens
gugauagaucugggauucagaa

SEQ ID NO: 16755 - RNA, 22 nt, Homo sapiens
acccauguaggugggauuacag

SEQ ID NO: 16756 - RNA, 22 nt, Homo sapiens
acuagguaguaaucugcagaga

SEQ ID NO: 16757 - RNA, 22 nt, Homo sapiens
ucaggguacuuguggccaaagu

SEQ ID NO: 16758 - RNA, 22 nt, Homo sapiens
ucacucagaccuggugauaugc

SEQ ID NO: 16759 - RNA, 22 nt, Homo sapiens
ccccauguucucucugcagcuc

SEQ ID NO: 16760 - RNA, 21 nt, Homo sapiens
augugcacuaugucauuuaau

SEQ ID NO: 16761 - RNA, 22 nt, Homo sapiens
cuaggcuguagagaaguucagu

SEQ ID NO: 16762 - RNA, 22 nt, Homo sapiens
gacuagaaauuauuuagugagc

SEQ ID NO: 16763 - RNA, 22 nt, Homo sapiens
uggagacugaucccucuuuccu

SEQ ID NO: 16764 - RNA, 22 nt, Homo sapiens
cuagaacuagaacugcuggggu

SEQ ID NO: 16765 - RNA, 22 nt, Homo sapiens
augcacauggcuaacuuuuuuc

SEQ ID NO: 16766 - RNA, 22 nt, Homo sapiens
ugugguuuuuuucuccaauagg

SEQ ID NO: 16767 - RNA, 22 nt, Homo sapiens
ccucauggagaacaucugcuag

SEQ ID NO: 16768 - RNA, 22 nt, Homo sapiens
cauggcccugggcugggcgaac

SEQ ID NO: 16769 - RNA, 22 nt, Homo sapiens
ucauguguugcacugaggaccu

SEQ ID NO: 16770 - RNA, 22 nt, Homo sapiens
ucgcugcgaccuccaccucccg

SEQ ID NO: 16771 - RNA, 22 nt, Homo sapiens
agcuggcuguagcugcaagucu

SEQ ID NO: 16772 - RNA, 22 nt, Homo sapiens
uagcuggaauuacuugcaccug

SEQ ID NO: 16773 - RNA, 22 nt, Homo sapiens
ugacuaggggcccuggcuucuu

SEQ ID NO: 16774 - RNA, 22 nt, Homo sapiens
ugacucaguuguuagucuucau

SEQ ID NO: 16775 - RNA, 22 nt, Homo sapiens
auagcacaguguguguacacca

SEQ ID NO: 16776 - RNA, 22 nt, Homo sapiens
gugagaagaaaaauauggcugu

SEQ ID NO: 16777 - RNA, 22 nt, Homo sapiens
uaccacccuuuuuccagaagcc

SEQ ID NO: 16778 - RNA, 22 nt, Homo sapiens
gcuaggagauccacugcucucu

SEQ ID NO: 16779 - RNA, 22 nt, Homo sapiens
uugacaaggagccauugcaucu

SEQ ID NO: 16780 - RNA, 22 nt, Homo sapiens
cuugaucaaugugguacuugau

SEQ ID NO: 16781 - RNA, 22 nt, Homo sapiens
aagcuggauuucgcauccuguu

SEQ ID NO: 16782 - RNA, 22 nt, Homo sapiens
ugauauggcuuggcuaugucac

SEQ ID NO: 16783 - RNA, 22 nt, Homo sapiens
cacccuaucagauguccagaga

SEQ ID NO: 16784 - RNA, 20 nt, Homo sapiens
gauuagagagaggcugugca

SEQ ID NO: 16785 - RNA, 23 nt, Homo sapiens
ucgguccccuuggcugcccucgg

SEQ ID NO: 16786 - RNA, 22 nt, Homo sapiens
augugaaugugaucggauaguc

SEQ ID NO: 16787 - RNA, 22 nt, Homo sapiens
ucuuuggauggaaauuggaguc

SEQ ID NO: 16788 - RNA, 22 nt, Homo sapiens
uuggauuuuaacaaacuaggug

SEQ ID NO: 16789 - RNA, 22 nt, Homo sapiens
gaggcuagauggggaugugucc

SEQ ID NO: 16790 - RNA, 22 nt, Homo sapiens
auggucccauucauucacguau

SEQ ID NO: 16791 - RNA, 22 nt, Homo sapiens
uagugaauguuggcuauuaaua

SEQ ID NO: 16792 - RNA, 22 nt, Homo sapiens
gauggaguaauguaaucuugag

SEQ ID NO: 16793 - RNA, 22 nt, Homo sapiens
augcagaucacauuuuucuguc

SEQ ID NO: 16794 - RNA, 22 nt, Homo sapiens
uguggaguguaugugacagaga

SEQ ID NO: 16795 - RNA, 22 nt, Homo sapiens
guacaagugcaguuucguuaca

SEQ ID NO: 16796 - RNA, 22 nt, Homo sapiens
ucacacgugaacucaucacaga

SEQ ID NO: 16797 - RNA, 22 nt, Homo sapiens
aucagaaucucuagaggacugu

SEQ ID NO: 16798 - RNA, 23 nt, Homo sapiens
aggaaguaacuaucuuuucuguc

SEQ ID NO: 16799 - RNA, 22 nt, Homo sapiens
augacuauugcacuuuccuggu

SEQ ID NO: 16800 - RNA, 22 nt, Homo sapiens
uagcaucagauuccauauucua

SEQ ID NO: 16801 - RNA, 22 nt, Homo sapiens
aggcagcuguuauauacugagu

SEQ ID NO: 16802 - RNA, 22 nt, Homo sapiens
cagccgggugagguggcuuguu

SEQ ID NO: 16803 - RNA, 18 nt, Homo sapiens
ucccucagaauuauagaa

SEQ ID NO: 16804 - RNA, 22 nt, Homo sapiens
uagcaccaaacauauacucagu

SEQ ID NO: 16805 - RNA, 22 nt, Homo sapiens
agcugguauuuugucgaggacu

SEQ ID NO: 16806 - RNA, 22 nt, Homo sapiens
cauggauuuuuuugaauggcag

SEQ ID NO: 16807 - RNA, 22 nt, Homo sapiens
aagcuggagugcaguggugcga

SEQ ID NO: 16808 - RNA, 22 nt, Homo sapiens
cucacuaguaaggcuguuuagu

SEQ ID NO: 16809 - RNA, 22 nt, Homo sapiens
ccuucuuuuguaaggcugaaua

SEQ ID NO: 16810 - RNA, 22 nt, Homo sapiens
guccaaauccaugggauguaca

SEQ ID NO: 16811 - RNA, 22 nt, Homo sapiens
aagcuggauuuaguguggagca

SEQ ID NO: 16812 - RNA, 22 nt, Homo sapiens
gaugcagcuaggauuugugaca

SEQ ID NO: 16813 - RNA, 22 nt, Homo sapiens
accucagcccggggaaguugag

SEQ ID NO: 16814 - RNA, 22 nt, Homo sapiens
gugaacagaaccugggaucgaa

SEQ ID NO: 16815 - RNA, 23 nt, Homo sapiens
ugugcacauuuacauauauacac

SEQ ID NO: 16816 - RNA, 21 nt, Homo sapiens
gugucacagacaugacagaug

SEQ ID NO: 16817 - RNA, 22 nt, Homo sapiens
gcgguagcauagacugcaggac

SEQ ID NO: 16818 - RNA, 22 nt, Homo sapiens
acugaucaauguuaaggcuuau

SEQ ID NO: 16819 - RNA, 22 nt, Homo sapiens
ugagguuauuuguucaagaagu

SEQ ID NO: 16820 - RNA, 22 nt, Homo sapiens
aaacugaucugaaggccaggcu

SEQ ID NO: 16821 - RNA, 21 nt, Homo sapiens
uggucccauaagauuauaaug

SEQ ID NO: 16822 - RNA, 22 nt, Homo sapiens
cagcacauuacaaguacuuggu

SEQ ID NO: 16823 - RNA, 22 nt, Homo sapiens
uuagaacuagaggaguuugagu

SEQ ID NO: 16824 - RNA, 22 nt, Homo sapiens
uuggacuggaacuauaccauug

SEQ ID NO: 16825 - RNA, 22 nt, Homo sapiens
gagguauagaacaccuuucaag

SEQ ID NO: 16826 - RNA, 22 nt, Homo sapiens
uggaguguagaagccagccucc

SEQ ID NO: 16827 - RNA, 22 nt, Homo sapiens
augcacuuggcaggaugauucc

SEQ ID NO: 16828 - RNA, 22 nt, Homo sapiens
uggugagaaaugagaugcuuuu

SEQ ID NO: 16829 - RNA, 22 nt, Homo sapiens
agcccauguggcugaggcuucu

SEQ ID NO: 16830 - RNA, 22 nt, Homo sapiens
uagcugagacuacaguaggugc

SEQ ID NO: 16831 - RNA, 22 nt, Homo sapiens
acuauacuguaacuguauucag

SEQ ID NO: 16832 - RNA, 22 nt, Homo sapiens
ugacuagggacauucuuccacg

SEQ ID NO: 16833 - RNA, 21 nt, Homo sapiens
ugacuagggauaugugccacu

SEQ ID NO: 16834 - RNA, 22 nt, Homo sapiens
guaucacacuuauugaccugca

SEQ ID NO: 16835 - RNA, 22 nt, Homo sapiens
augaggcaggaaaggcguaucu

SEQ ID NO: 16836 - RNA, 22 nt, Homo sapiens
cuuuggccauagcuaaaugauu

SEQ ID NO: 16837 - RNA, 22 nt, Homo sapiens
aaucugggguuguuuggggagu

SEQ ID NO: 16838 - RNA, 22 nt, Homo sapiens
agcaccauuagcguugggccgg

SEQ ID NO: 16839 - RNA, 22 nt, Homo sapiens
ugucccaguuggguauugaauu

SEQ ID NO: 16840 - RNA, 22 nt, Homo sapiens
uaugcacaugcaugcuugaaua

SEQ ID NO: 16841 - RNA, 22 nt, Homo sapiens
gaugccuuuuuguccucaguua

SEQ ID NO: 16842 - RNA, 17 nt, Homo sapiens
ucccauguuucuucuac

SEQ ID NO: 16843 - RNA, 22 nt, Homo sapiens
uggacugagauuucagcugcca

SEQ ID NO: 16844 - RNA, 22 nt, Homo sapiens
uuuaucuguuuaaaacuguuca

SEQ ID NO: 16845 - RNA, 22 nt, Homo sapiens
ucuuugauuuuguuacuaagac

SEQ ID NO: 16846 - RNA, 22 nt, Homo sapiens
uacuagaaccuuauucagagug

SEQ ID NO: 16847 - RNA, 22 nt, Homo sapiens
caaaggcuuccacugcauccuu

SEQ ID NO: 16848 - RNA, 22 nt, Homo sapiens
uucagggacuuuagacaagaga

SEQ ID NO: 16849 - RNA, 22 nt, Homo sapiens
uuuaaugcgucucugaguuuug

SEQ ID NO: 16850 - RNA, 22 nt, Homo sapiens
cuuuaugagguuggauggaucu

SEQ ID NO: 16851 - RNA, 22 nt, Homo sapiens
ugaauagacacuaaagacugua

SEQ ID NO: 16852 - RNA, 22 nt, Homo sapiens
uggaaguaaucaugagguagca

SEQ ID NO: 16853 - RNA, 22 nt, Homo sapiens
gaacuguuucuggugaaagagu

SEQ ID NO: 16854 - RNA, 22 nt, Homo sapiens
aucagaaucucuagugggacca

SEQ ID NO: 16855 - RNA, 22 nt, Homo sapiens
ucacugaggucugagcuuuaug

SEQ ID NO: 16856 - RNA, 22 nt, Homo sapiens
ugguguuugagaagcugauguc

SEQ ID NO: 16857 - RNA, 22 nt, Homo sapiens
ugacuauaggauaacaugcauu

SEQ ID NO: 16858 - RNA, 22 nt, Homo sapiens
aucauacuguuuugauuacugu

SEQ ID NO: 16859 - RNA, 22 nt, Homo sapiens
uuaauguaucuaucacaucaca

SEQ ID NO: 16860 - RNA, 23 nt, Homo sapiens
uggaaguauggaggaggcagaau

SEQ ID NO: 16861 - RNA, 22 nt, Homo sapiens
gucauugguucuguuuauguga

SEQ ID NO: 16862 - RNA, 22 nt, Homo sapiens
uuggagugugcucauaacugcu

SEQ ID NO: 16863 - RNA, 22 nt, Homo sapiens
aagaccuaugcaggaagaaaug

SEQ ID NO: 16864 - RNA, 19 nt, Homo sapiens
uuucaauguaaggauggag

SEQ ID NO: 16865 - RNA, 22 nt, Streptococcus pneumoniae TIGR4
ugagcugggaagccugucaagg

SEQ ID NO: 16866 - RNA, 22 nt, Streptococcus pneumoniae TIGR4
ugacggaagaagagcgacaggu

SEQ ID NO: 16867 - RNA, 22 nt, Streptococcus pneumoniae TIGR4
uggaagaagcagauguuaucgu

SEQ ID NO: 16868 - RNA, 22 nt, Streptococcus pneumoniae TIGR4
uggaaguauuugccagagaugg

SEQ ID NO: 16869 - RNA, 22 nt, Streptococcus pneumoniae TIGR4
uggagccuuaacagcuguuuuu

SEQ ID NO: 16870 - RNA, 22 nt, Streptococcus pneumoniae TIGR4
uuuaaaaagaauacuggugucg

SEQ ID NO: 16871 - RNA, 22 nt, Streptococcus pneumoniae TIGR4
uuuaaaaagccuauuguaucaa

SEQ ID NO: 16872 - RNA, 22 nt, Streptococcus pneumoniae TIGR4
gcggcccagggcggagucguaa

SEQ ID NO: 16873 - RNA, 22 nt, Streptococcus pneumoniae TIGR4
gggaugaguaucuauucuauau

SEQ ID NO: 16874 - RNA, 22 nt, Streptococcus pneumoniae TIGR4
gggaugguggauccggauaagg

SEQ ID NO: 16875 - RNA, 23 nt, Streptococcus pneumoniae TIGR4
gggagcgcacuucgucauacuca

SEQ ID NO: 16876 - RNA, 22 nt, Streptococcus pneumoniae TIGR4
uugggaugucuuacagccgguu

SEQ ID NO: 16877 - RNA, 22 nt, Streptococcus pneumoniae TIGR4
uuuauugaguauaagaggucuu

SEQ ID NO: 16878 - RNA, 22 nt, Streptococcus pneumoniae TIGR4
uugagguuguagauagaacuga

SEQ ID NO: 16879 - RNA, 22 nt, Streptococcus pneumoniae TIGR4
uguuauaggcgaaauaggcugc

SEQ ID NO: 16880 - RNA, 22 nt, Streptococcus pneumoniae TIGR4
uguggcgacaaacugaugcgaa

SEQ ID NO: 16881 - RNA, 22 nt, Streptococcus pneumoniae TIGR4
caacagcuguguuguuuggaga

SEQ ID NO: 16882 - RNA, 20 nt, Streptococcus pneumoniae TIGR4
uggauugcucucaacugcac

SEQ ID NO: 16883 - RNA, 22 nt, Streptococcus pneumoniae TIGR4
ucauugaggacaaucugaagca

SEQ ID NO: 16884 - RNA, 22 nt, Streptococcus pneumoniae TIGR4
uacagacuuaaaagaaacagcu

SEQ ID NO: 16885 - RNA, 22 nt, Streptococcus pneumoniae TIGR4
gaacucuauuuucagacuugag

SEQ ID NO: 16886 - RNA, 22 nt, Streptococcus pneumoniae TIGR4
gauagaguucuuuuggucggcc

SEQ ID NO: 16887 - RNA, 22 nt, Streptococcus pneumoniae TIGR4
gcaguuggcaugcuugcuccua

SEQ ID NO: 16888 - RNA, 22 nt, Streptococcus pneumoniae TIGR4
cagcuggauagagcauucgccu

SEQ ID NO: 16889 - RNA, 22 nt, Streptococcus pneumoniae TIGR4
ggguagcuauacaggcuugcga

SEQ ID NO: 16890 - RNA, 22 nt, Streptococcus pneumoniae TIGR4
gggcaggcuuuggaggagcugu

SEQ ID NO: 16891 - RNA, 22 nt, Streptococcus pneumoniae TIGR4
gucauagaagucuuuuuaauua

SEQ ID NO: 16892 - RNA, 16 nt, Streptococcus pneumoniae TIGR4
uaaguucagcaagcuu

SEQ ID NO: 16893 - RNA, 22 nt, Streptococcus pneumoniae TIGR4
uauaaguuuugcuacuguugau

SEQ ID NO: 16894 - RNA, 22 nt, Streptococcus pneumoniae TIGR4
ucagucacauauauaauccaag

SEQ ID NO: 16895 - RNA, 22 nt, Streptococcus pneumoniae TIGR4
ucauauaaucguaccaauccau

SEQ ID NO: 16896 - RNA, 22 nt, Streptococcus pneumoniae TIGR4
uccugcaguugcuugcggugca

SEQ ID NO: 16897 - RNA, 22 nt, Streptococcus pneumoniae TIGR4
ggcuaggcaacugugguacuug

SEQ ID NO: 16898 - RNA, 21 nt, Streptococcus pneumoniae TIGR4
ggcugcuuugacacggcauuu

SEQ ID NO: 16899 - RNA, 22 nt, Streptococcus pneumoniae TIGR4
ggcucuaccaacuuuuucugag

SEQ ID NO: 16900 - RNA, 22 nt, Streptococcus pneumoniae TIGR4
aagcgaugcagcuccccccugu

SEQ ID NO: 16901 - RNA, 22 nt, Streptococcus pneumoniae TIGR4
aagauuacuaccaaguagaaac

SEQ ID NO: 16902 - RNA, 22 nt, Streptococcus pneumoniae TIGR4
aacuagaaaagguuuuccuuau

SEQ ID NO: 16903 - RNA, 22 nt, Streptococcus pneumoniae TIGR4
acagcugguuugaggccuugaa

SEQ ID NO: 16904 - RNA, 22 nt, Streptococcus pneumoniae TIGR4
acaauaacccacaaugaggcug

SEQ ID NO: 16905 - RNA, 20 nt, Streptococcus pneumoniae TIGR4
aacaacaauugacugcuauu

SEQ ID NO: 16906 - RNA, 22 nt, Streptococcus pneumoniae TIGR4
aaagauguucaguauagauuag

SEQ ID NO: 16907 - RNA, 22 nt, Streptococcus pneumoniae TIGR4
aaaaaaacuccguagucucuag

SEQ ID NO: 16908 - RNA, 22 nt, Streptococcus pneumoniae TIGR4
agcuagaacaguaucgagaacu

SEQ ID NO: 16909 - RNA, 22 nt, Streptococcus pneumoniae TIGR4
agccguccauugaaaucauuga

SEQ ID NO: 16910 - RNA, 22 nt, Streptococcus pneumoniae TIGR4
aggucacuugauagcuauauuu

SEQ ID NO: 16911 - RNA, 22 nt, Streptococcus pneumoniae TIGR4
agcugcagaguugaugcuuuua

SEQ ID NO: 16912 - RNA, 22 nt, Streptococcus pneumoniae TIGR4
agggcagcuucaccugucaaaa

SEQ ID NO: 16913 - RNA, 22 nt, Streptococcus pneumoniae TIGR4
agaagccuuuaaucuccuuuau

SEQ ID NO: 16914 - RNA, 22 nt, Streptococcus pneumoniae TIGR4
agaaucauuuggcuuuaaaggu

SEQ ID NO: 16915 - RNA, 22 nt, Streptococcus pneumoniae TIGR4
acuauauuucucaggauaagcc

SEQ ID NO: 16916 - RNA, 22 nt, Streptococcus pneumoniae TIGR4
accccccaccuuucuuaggauc

SEQ ID NO: 16917 - RNA, 22 nt, Streptococcus pneumoniae TIGR4
acuaggaagcucguuuaagguu

SEQ ID NO: 16918 - RNA, 20 nt, Streptococcus pneumoniae TIGR4
aggggcagaaugauauuucc

SEQ ID NO: 16919 - RNA, 22 nt, Streptococcus pneumoniae TIGR4
augauauugcacguuuaucagg

SEQ ID NO: 16920 - RNA, 20 nt, Streptococcus pneumoniae TIGR4
cagaagcgaccauggcucac

SEQ ID NO: 16921 - RNA, 20 nt, Streptococcus pneumoniae TIGR4
caugcggaaauuauggcuau

SEQ ID NO: 16922 - RNA, 22 nt, Streptococcus pneumoniae TIGR4
caggugaggacuuggcuuauag

SEQ ID NO: 16923 - RNA, 22 nt, Streptococcus pneumoniae TIGR4
cccuacucagcguaagauuucu

SEQ ID NO: 16924 - RNA, 22 nt, Streptococcus pneumoniae TIGR4
cauuuuacuugaaagugauuug

SEQ ID NO: 16925 - RNA, 22 nt, Streptococcus pneumoniae TIGR4
ccacacuugcuucagcuggagc

SEQ ID NO: 16926 - RNA, 22 nt, Streptococcus pneumoniae TIGR4
cuuuacaucgguuuagguuuuc

SEQ ID NO: 16927 - RNA, 22 nt, Streptococcus pneumoniae TIGR4
cgcugaggcugacgcacuggua

SEQ ID NO: 16928 - RNA, 22 nt, Homo sapiens
uggucccaugaacuuuagguca

SEQ ID NO: 16929 - RNA, 22 nt, Homo sapiens
accugguuuuaacauuguauua

SEQ ID NO: 16930 - RNA, 22 nt, Homo sapiens
aguggaguguaaagcgucuuuu

SEQ ID NO: 16931 - RNA, 22 nt, Homo sapiens
uccaugugaaaucuaugaggac

SEQ ID NO: 16932 - RNA, 22 nt, Homo sapiens
caaaggcuuccacugcauccuu

SEQ ID NO: 16933 - RNA, 22 nt, Homo sapiens
uugauauguuguuagauucagu

SEQ ID NO: 16934 - RNA, 22 nt, Homo sapiens
aaucugggguuguuuggggagu

SEQ ID NO: 16935 - RNA, 22 nt, Homo sapiens
cugagaagaaacagguaaggac

SEQ ID NO: 16936 - RNA, 22 nt, Homo sapiens
uucaggcaccauugucauugau

SEQ ID NO: 16937 - RNA, 22 nt, Homo sapiens
uuuuuuaguuagcugggcauga

SEQ ID NO: 16938 - RNA, 22 nt, Homo sapiens
augugaaugugaucggauaguc

SEQ ID NO: 16939 - RNA, 22 nt, Homo sapiens
auggaguguggaacugggaauc

SEQ ID NO: 16940 - RNA, 22 nt, Homo sapiens
uugguccccuucaaccagcugu

SEQ ID NO: 16941 - RNA, 22 nt, Homo sapiens
cacccuaucagauguccagaga

SEQ ID NO: 16942 - RNA, 22 nt, Homo sapiens
cucacggcccugcgcacuggca

SEQ ID NO: 16943 - RNA, 22 nt, Homo sapiens
uuucugggggugcugauggaaa

SEQ ID NO: 16944 - RNA, 22 nt, Homo sapiens
gucagucugucccugccuggcg

SEQ ID NO: 16945 - RNA, 21 nt, Homo sapiens
uuucugggggagcauggcagg

SEQ ID NO: 16946 - RNA, 22 nt, Homo sapiens
uuggaagagaagggagauaaac

SEQ ID NO: 16947 - RNA, 22 nt, Homo sapiens
ucauguguugcacugaggaccu

SEQ ID NO: 16948 - RNA, 22 nt, Homo sapiens
uuggaauguacucuagccuaug

SEQ ID NO: 16949 - RNA, 22 nt, Homo sapiens
ugaggcacucccuagcggggug

SEQ ID NO: 16950 - RNA, 22 nt, Homo sapiens
ugaauacugugcaaaggauuug

SEQ ID NO: 16951 - RNA, 22 nt, Homo sapiens
gaugccuuuuuguccucaguua

SEQ ID NO: 16952 - RNA, 22 nt, Homo sapiens
gcuggugacuuuaaguugaagc

SEQ ID NO: 16953 - RNA, 22 nt, Homo sapiens
ggaagguaauugucagcucaua

SEQ ID NO: 16954 - RNA, 22 nt, Homo sapiens
ugaucucagcucacugguugaa

SEQ ID NO: 16955 - RNA, 17 nt, Homo sapiens
ucccauguuucuucuac

SEQ ID NO: 16956 - RNA, 22 nt, Homo sapiens
gucauugguucuguuuauguga

SEQ ID NO: 16957 - RNA, 22 nt, Homo sapiens
uuggcaaauagguuuuauugca

SEQ ID NO: 16958 - RNA, 22 nt, Homo sapiens
ucucacagaguugaacuuucuu

SEQ ID NO: 16959 - RNA, 22 nt, Homo sapiens
caaaggcuucugaaacugcaga

SEQ ID NO: 16960 - RNA, 22 nt, Homo sapiens
guaucacacuuauugaccugca

SEQ ID NO: 16961 - RNA, 22 nt, Homo sapiens
gggaggucauuguucaaugcug

SEQ ID NO: 16962 - RNA, 22 nt, Homo sapiens
uagcagcaccccacucuacugg

SEQ ID NO: 16963 - RNA, 23 nt, Homo sapiens
ugccuagaugcugcccugggaca

SEQ ID NO: 16964 - RNA, 21 nt, Homo sapiens
cugguccccuuuauguaugug

SEQ ID NO: 16965 - RNA, 22 nt, Homo sapiens
aucugggguuggcaaaguuugg

SEQ ID NO: 16966 - RNA, 22 nt, Homo sapiens
uggauugagaagcuguggcuca

SEQ ID NO: 16967 - RNA, 22 nt, Homo sapiens
ccucauggagaacaucugcuag

SEQ ID NO: 16968 - RNA, 22 nt, Homo sapiens
aaaaguucuuugagccuugaca

SEQ ID NO: 16969 - RNA, 18 nt, Homo sapiens
gucucacaugguggaagc

SEQ ID NO: 16970 - RNA, 22 nt, Homo sapiens
cuugaucaaugugguacuugau

SEQ ID NO: 16971 - RNA, 22 nt, Homo sapiens
uuggacuucucaaggcaauaaa

SEQ ID NO: 16972 - RNA, 22 nt, Homo sapiens
ugagguuggguaauuuaugaag

SEQ ID NO: 16973 - RNA, 22 nt, Homo sapiens
uggcuugauggcacaagguuuc

SEQ ID NO: 16974 - RNA, 22 nt, Homo sapiens
gagauguuuuguuaucaaagga

SEQ ID NO: 16975 - RNA, 21 nt, Homo sapiens
uggucccauaagauuacaaug

SEQ ID NO: 16976 - RNA, 22 nt, Homo sapiens
auggucccauucauucacguau

SEQ ID NO: 16977 - RNA, 22 nt, Homo sapiens
uggaguguagaagccagccucc

SEQ ID NO: 16978 - RNA, 22 nt, Homo sapiens
gaggcuagauggggaugugucc

SEQ ID NO: 16979 - RNA, 22 nt, Homo sapiens
ugauacugugcauuagaggcua

SEQ ID NO: 16980 - RNA, 22 nt, Homo sapiens
ucucacagaguugaauguuucu

SEQ ID NO: 16981 - RNA, 22 nt, Homo sapiens
uucaggcaccauggucauugau

SEQ ID NO: 16982 - RNA, 19 nt, Homo sapiens
uggagucaucaugcugcua

SEQ ID NO: 16983 - RNA, 22 nt, Homo sapiens
acccauguaggugggauuacag

SEQ ID NO: 16984 - RNA, 22 nt, Homo sapiens
uagcaacauucagcucagguac

SEQ ID NO: 16985 - RNA, 22 nt, Homo sapiens
aaaugcucucuacacguuucug

SEQ ID NO: 16986 - RNA, 22 nt, Homo sapiens
ugguaccuuuuaaugacuaauu

SEQ ID NO: 16987 - RNA, 22 nt, Homo sapiens
gugguguuugagcugccaggga

SEQ ID NO: 16988 - RNA, 22 nt, Homo sapiens
agaaugucaguauuggcuaaaa

SEQ ID NO: 16989 - RNA, 22 nt, Homo sapiens
uuacaguucugguggagaggua

SEQ ID NO: 16990 - RNA, 22 nt, Homo sapiens
agcaccaauaaucagaguucuu

SEQ ID NO: 16991 - RNA, 22 nt, Homo sapiens
gauggaguugucgccugggcug

SEQ ID NO: 16992 - RNA, 22 nt, Homo sapiens
ugacucaguuguuagucuucau

SEQ ID NO: 16993 - RNA, 22 nt, Homo sapiens
auagcacaguguguguacacca

SEQ ID NO: 16994 - RNA, 22 nt, Homo sapiens
ugagaggugaauggcaggcuca

SEQ ID NO: 16995 - RNA, 22 nt, Homo sapiens
cccuguguuguucaaggaucug

SEQ ID NO: 16996 - RNA, 22 nt, Homo sapiens
aagcacccuuugucuggacaug

SEQ ID NO: 16997 - RNA, 22 nt, Homo sapiens
ggcagacuguggaguucuuucu

SEQ ID NO: 16998 - RNA, 22 nt, Homo sapiens
uagcaccaaacauauacucagu

SEQ ID NO: 16999 - RNA, 22 nt, Homo sapiens
uguucuugaguugggaguacaa

SEQ ID NO: 17000 - RNA, 22 nt, Homo sapiens
aggcagcuguuauauacugagu

SEQ ID NO: 17001 - RNA, 17 nt, Homo sapiens
uuuuggauuagaaaucc

SEQ ID NO: 17002 - RNA, 22 nt, Homo sapiens
agcugguauuuugucgaggacu

SEQ ID NO: 17003 - RNA, 22 nt, Homo sapiens
ugucccaguuggguauugaauu

SEQ ID NO: 17004 - RNA, 21 nt, Homo sapiens
uggucccauaagauuauaaug

SEQ ID NO: 17005 - RNA, 22 nt, Homo sapiens
uuggagugugagagcagccugg

SEQ ID NO: 17006 - RNA, 18 nt, Homo sapiens
uuucaggguggacaugag

SEQ ID NO: 17007 - RNA, 22 nt, Homo sapiens
ugagucuguucucacauugcua

SEQ ID NO: 17008 - RNA, 22 nt, Homo sapiens
cagcacauuacaaguacuuggu

SEQ ID NO: 17009 - RNA, 22 nt, Homo sapiens
cagcaucauucaucugggguaa

SEQ ID NO: 17010 - RNA, 22 nt, Homo sapiens
ucacaaguguauagacaugucc

SEQ ID NO: 17011 - RNA, 22 nt, Homo sapiens
ccccauguucucucugcagcuc

SEQ ID NO: 17012 - RNA, 22 nt, Homo sapiens
ugaaugcuucaugucugggcug

SEQ ID NO: 17013 - RNA, 22 nt, Homo sapiens
gaugcagcuaggauuugugaca

SEQ ID NO: 17014 - RNA, 22 nt, Homo sapiens
agcccauguggcugaggcuucu

SEQ ID NO: 17015 - RNA, 22 nt, Homo sapiens
gugagaagaaaaauauggcugu

SEQ ID NO: 17016 - RNA, 22 nt, Homo sapiens
uaccacccuuuuuccagaagcc

SEQ ID NO: 17017 - RNA, 17 nt, Homo sapiens
ugugauugaagucaucc

SEQ ID NO: 17018 - RNA, 22 nt, Homo sapiens
cuagcugcacuuccugcuacug

SEQ ID NO: 17019 - RNA, 23 nt, Homo sapiens
ucugcggguguggacccuagugc

SEQ ID NO: 17020 - RNA, 22 nt, Homo sapiens
ccacaguggauuaaaguuacug

SEQ ID NO: 17021 - RNA, 22 nt, Homo sapiens
uugauauguuguuggauucacu

SEQ ID NO: 17022 - RNA, 22 nt, Homo sapiens
ucccauguagcuaggauuacag

SEQ ID NO: 17023 - RNA, 22 nt, Homo sapiens
gugaucuguccuucauagccug

SEQ ID NO: 17024 - RNA, 22 nt, Homo sapiens
uagcaccuuagcauuucuagug

SEQ ID NO: 17025 - RNA, 19 nt, Homo sapiens
augagucugcaagaaccag

SEQ ID NO: 17026 - RNA, 22 nt, Homo sapiens
guccaaauccaugggauguaca

SEQ ID NO: 17027 - RNA, 22 nt, Homo sapiens
cuaggcuguagagaaguucagu

SEQ ID NO: 17028 - RNA, 22 nt, Homo sapiens
aggaagguaaacuaacuugccu

SEQ ID NO: 17029 - RNA, 22 nt, Homo sapiens
ugagguugguauuacugucucu

SEQ ID NO: 17030 - RNA, 22 nt, Homo sapiens
uggaguguaaauuaguucagcc

SEQ ID NO: 17031 - RNA, 22 nt, Homo sapiens
ucaggguacuuguggccaaagu

SEQ ID NO: 17032 - RNA, 22 nt, Homo sapiens
uacucaauugcagucaccuggc

SEQ ID NO: 17033 - RNA, 21 nt, Homo sapiens
gugucacagacaugacagaug

SEQ ID NO: 17034 - RNA, 22 nt, Homo sapiens
cauggauuuuuuugaauggcag

SEQ ID NO: 17035 - RNA, 22 nt, Homo sapiens
uagugaauguuggcuauuaaua

SEQ ID NO: 17036 - RNA, 22 nt, Homo sapiens
uggugagaaaugagaugcuuuu

SEQ ID NO: 17037 - RNA, 22 nt, Homo sapiens
ucuuuggauggaaauuggaguc

SEQ ID NO: 17038 - RNA, 22 nt, Homo sapiens
uguggaguguaugugacagaga

SEQ ID NO: 17039 - RNA, 20 nt, Homo sapiens
gauuagagagaggcugugca

SEQ ID NO: 17040 - RNA, 22 nt, Homo sapiens
guacaagugcaguuucguuaca

SEQ ID NO: 17041 - RNA, 22 nt, Homo sapiens
uggauugaaagcuuuaauauug

SEQ ID NO: 17042 - RNA, 22 nt, Homo sapiens
uagcaucagauuccauauucua

SEQ ID NO: 17043 - RNA, 22 nt, Homo sapiens
gauggaguaauguaaucuugag

SEQ ID NO: 17044 - RNA, 22 nt, Homo sapiens
uagcaccugugcacaccaggca

SEQ ID NO: 17045 - RNA, 22 nt, Homo sapiens
uuggacuggaacuauaccauug

SEQ ID NO: 17046 - RNA, 22 nt, Homo sapiens
ugauauggcuuggcuaugucac

SEQ ID NO: 17047 - RNA, 22 nt, Homo sapiens
uccaugugaaaaggucgugaua

SEQ ID NO: 17048 - RNA, 22 nt, Homo sapiens
gucauugcuuaaggguucaugc

SEQ ID NO: 17049 - RNA, 22 nt, Homo sapiens
uuggagugugcucauaacugcu

SEQ ID NO: 17050 - RNA, 22 nt, Homo sapiens
gcuggcuuucuccugaucucag

SEQ ID NO: 17051 - RNA, 22 nt, Homo sapiens
caugguguuaggcacugggaau

SEQ ID NO: 17052 - RNA, 22 nt, Homo sapiens
agcugguauuuugucaaggaua

SEQ ID NO: 17053 - RNA, 22 nt, Homo sapiens
ugguguuugagaagcugauguc

SEQ ID NO: 17054 - RNA, 22 nt, Homo sapiens
auggauguucuagggaugugau

SEQ ID NO: 17055 - RNA, 22 nt, Homo sapiens
auaugacugccagggcccaguc

SEQ ID NO: 17056 - RNA, 22 nt, Homo sapiens
agcuggcuguagcugcaagucu

SEQ ID NO: 17057 - RNA, 22 nt, Homo sapiens
aggucccauguccucccugacc

SEQ ID NO: 17058 - RNA, 22 nt, Homo sapiens
aagaccuaugcaggaagaaaug

SEQ ID NO: 17059 - RNA, 22 nt, Homo sapiens
cuggcugagugguaaguagagg

SEQ ID NO: 17060 - RNA, 22 nt, Homo sapiens
uuucaguguggcaggcauagcu

SEQ ID NO: 17061 - RNA, 22 nt, Homo sapiens
uagcugagacuacaguaggugc

SEQ ID NO: 17062 - RNA, 22 nt, Homo sapiens
agugaaaucugaagaaggucau

SEQ ID NO: 17063 - RNA, 22 nt, Homo sapiens
auagcagcuugucagggcagac

SEQ ID NO: 17064 - RNA, 22 nt, Homo sapiens
agcaccauuagcguugggccgg

SEQ ID NO: 17065 - RNA, 22 nt, Homo sapiens
agcaccaauaacaguuucuagc

SEQ ID NO: 17066 - RNA, 21 nt, Homo sapiens
ugaaccccugcucucaagaaa

SEQ ID NO: 17067 - RNA, 22 nt, Homo sapiens
ucuuugauuuuguuacuaagac

SEQ ID NO: 17068 - RNA, 22 nt, Homo sapiens
uuuaucuguuuaaaacuguuca

SEQ ID NO: 17069 - RNA, 22 nt, Homo sapiens
agggcuuguuuaacuaucauua

SEQ ID NO: 17070 - RNA, 22 nt, Homo sapiens
uggacugagauuucagcugcca

SEQ ID NO: 17071 - RNA, 22 nt, Streptococcus pyogenes M1 GAS
ugagagagcuuguugagcugga

SEQ ID NO: 17072 - RNA, 22 nt, Streptococcus pyogenes M1 GAS
ucugggaaagguuuucagggcu

SEQ ID NO: 17073 - RNA, 22 nt, Streptococcus pyogenes M1 GAS
ccuagucugucauuauggguuu

SEQ ID NO: 17074 - RNA, 22 nt, Streptococcus pyogenes M1 GAS
agcuggguaggcuggcgucaga

SEQ ID NO: 17075 - RNA, 22 nt, Streptococcus pyogenes M1 GAS
aaaaugguccagcagauuuggu

SEQ ID NO: 17076 - RNA, 22 nt, Streptococcus pyogenes M1 GAS
aagugucaacuaaaacagcuua

SEQ ID NO: 17077 - RNA, 22 nt, Streptococcus pyogenes M1 GAS
gccugugugauuuugcaagcua

SEQ ID NO: 17078 - RNA, 22 nt, Streptococcus pyogenes M1 GAS
gcaacaaacaguagucgguuag

SEQ ID NO: 17079 - RNA, 22 nt, Streptococcus pyogenes M1 GAS
gagcugggcuagcugguucuga

SEQ ID NO: 17080 - RNA, 22 nt, Streptococcus pyogenes M1 GAS
cucaggcaucuuacauuuugcc

SEQ ID NO: 17081 - RNA, 22 nt, Streptococcus pyogenes M1 GAS
ucucagaagcuauggagcgugu

SEQ ID NO: 17082 - RNA, 21 nt, Streptococcus pyogenes M1 GAS
uggcagaaaccuucucggcuc

SEQ ID NO: 17083 - RNA, 21 nt, Streptococcus pyogenes M1 GAS
ugagacagaucuggcuugacu

SEQ ID NO: 17084 - RNA, 22 nt, Streptococcus pyogenes M1 GAS
uuugauugguaugaucuagcau

SEQ ID NO: 17085 - RNA, 21 nt, Streptococcus pyogenes M1 GAS
uugauugaugaugcaaguaca

SEQ ID NO: 17086 - RNA, 22 nt, Streptococcus pyogenes M1 GAS
uuggagugauugcacugcuguu

SEQ ID NO: 17087 - RNA, 22 nt, Streptococcus pyogenes M1 GAS
uugggaagggauuugcuagccu

SEQ ID NO: 17088 - RNA, 22 nt, Streptococcus pyogenes M1 GAS
gcuaucuuuuggaaagccugcc

SEQ ID NO: 17089 - RNA, 22 nt, Streptococcus pyogenes M1 GAS
gcugaauuagguggcugggagg

SEQ ID NO: 17090 - RNA, 22 nt, Homo sapiens
uaucaguauggauucauggauu

SEQ ID NO: 17091 - RNA, 22 nt, Homo sapiens
gugguuuuuuucugccuuauag

SEQ ID NO: 17092 - RNA, 22 nt, Homo sapiens
uauggauuugccuauucuguau

SEQ ID NO: 17093 - RNA, 22 nt, Homo sapiens
auggaauguauagucauguagg

SEQ ID NO: 17094 - RNA, 22 nt, Homo sapiens
uuggaaauguguuugcauucag

SEQ ID NO: 17095 - RNA, 22 nt, Homo sapiens
gugguuuuuaaaguaccugugg

SEQ ID NO: 17096 - RNA, 22 nt, Homo sapiens
ccagucuuggugucuguagcac

SEQ ID NO: 17097 - RNA, 22 nt, Homo sapiens
agugacaugggaucaaaucuga

SEQ ID NO: 17098 - RNA, 22 nt, Homo sapiens
uuucccauuguucugcucugug

SEQ ID NO: 17099 - RNA, 22 nt, Homo sapiens
ugcagugucaauaauaauuagu

SEQ ID NO: 17100 - RNA, 19 nt, Homo sapiens
uuugaauauaaugcagcua

SEQ ID NO: 17101 - RNA, 22 nt, Homo sapiens
gagacugagucucacucuguca

SEQ ID NO: 17102 - RNA, 22 nt, Homo sapiens
cuuuggcaaugucauuuucaau

SEQ ID NO: 17103 - RNA, 22 nt, Homo sapiens
gaaucaauugaucuaugugucu

SEQ ID NO: 17104 - RNA, 22 nt, Homo sapiens
uauagcuaugggauguauuugc

SEQ ID NO: 17105 - RNA, 22 nt, Homo sapiens
aucuucucuugaagggugggga

SEQ ID NO: 17106 - RNA, 22 nt, Homo sapiens
ucucugagaaaaguuucuccca

SEQ ID NO: 17107 - RNA, 22 nt, Homo sapiens
ugcuguuguuugaugaaguaau

SEQ ID NO: 17108 - RNA, 22 nt, Homo sapiens
uugguucucuuagccaucuuaa

SEQ ID NO: 17109 - RNA, 22 nt, Homo sapiens
agugauuuuaacuuccagcaau

SEQ ID NO: 17110 - RNA, 22 nt, Homo sapiens
aaaucccuugcucucucagacc

SEQ ID NO: 17111 - RNA, 22 nt, Homo sapiens
ugugccacugcacuccugccug

SEQ ID NO: 17112 - RNA, 22 nt, Homo sapiens
aaacugcuuuccaugguggcug

SEQ ID NO: 17113 - RNA, 22 nt, Homo sapiens
gauguguuuuaggaucucagca

SEQ ID NO: 17114 - RNA, 18 nt, Homo sapiens
acauucagcuugaagaua

SEQ ID NO: 17115 - RNA, 22 nt, Homo sapiens
ucacaguccuguuuaggagagg

SEQ ID NO: 17116 - RNA, 16 nt, Homo sapiens
uuucccuuugguguuu

SEQ ID NO: 17117 - RNA, 22 nt, Homo sapiens
gucauguuuaacuucuugagga

SEQ ID NO: 17118 - RNA, 22 nt, Homo sapiens
ugauggcaauggcauucauuuu

SEQ ID NO: 17119 - RNA, 22 nt, Homo sapiens
uuucuacagggcuugccaggua

SEQ ID NO: 17120 - RNA, 21 nt, Homo sapiens
aauacucuagguuaagagagc

SEQ ID NO: 17121 - RNA, 22 nt, Homo sapiens
auguagugugauuuucacuaga

SEQ ID NO: 17122 - RNA, 22 nt, Homo sapiens
gugguuuucaacuccaccugca

SEQ ID NO: 17123 - RNA, 22 nt, Homo sapiens
cuggcagucugccucuucacug

SEQ ID NO: 17124 - RNA, 22 nt, Homo sapiens
ugaaacacacauugcccuuuau

SEQ ID NO: 17125 - RNA, 22 nt, Homo sapiens
cuccauuuaucugaaauuuuau

SEQ ID NO: 17126 - RNA, 22 nt, Homo sapiens
augaguauguucuguauuuuca

SEQ ID NO: 17127 - RNA, 22 nt, Homo sapiens
caggaaugugaggguucccugc

SEQ ID NO: 17128 - RNA, 22 nt, Homo sapiens
agaugcauugguggcauauuca

SEQ ID NO: 17129 - RNA, 22 nt, Homo sapiens
uggagugagaacuucaaugaug

SEQ ID NO: 17130 - RNA, 22 nt, Homo sapiens
agugcaauggugccaucauagc

SEQ ID NO: 17131 - RNA, 22 nt, Homo sapiens
uucuacaggcuguucaagaagc

SEQ ID NO: 17132 - RNA, 18 nt, Homo sapiens
augaagucaucacuuuua

SEQ ID NO: 17133 - RNA, 22 nt, Homo sapiens
agaacuguccauucagcaugaa

SEQ ID NO: 17134 - RNA, 22 nt, Homo sapiens
uucaagcuauggugaucuuuuc

SEQ ID NO: 17135 - RNA, 22 nt, Homo sapiens
cuggaauguuccuaaagauuca

SEQ ID NO: 17136 - RNA, 22 nt, Homo sapiens
agcuguuguuuuaagauacuaa

SEQ ID NO: 17137 - RNA, 22 nt, Homo sapiens
ugagaacugguagcacuuguga

SEQ ID NO: 17138 - RNA, 22 nt, Homo sapiens
auccugaagcuuuacugaauuc

SEQ ID NO: 17139 - RNA, 22 nt, Homo sapiens
ugcuaugucagccaggcugguc

SEQ ID NO: 17140 - RNA, 22 nt, Homo sapiens
cuacagcacugagcugugugca

SEQ ID NO: 17141 - RNA, 22 nt, Homo sapiens
augagauacuacaaaugaguuu

SEQ ID NO: 17142 - RNA, 22 nt, Homo sapiens
uaccacugccgagaaaacagau

SEQ ID NO: 17143 - RNA, 22 nt, Homo sapiens
agcuugugauuuagagugagag

SEQ ID NO: 17144 - RNA, 22 nt, Homo sapiens
uuucacagcaauugccuauugu

SEQ ID NO: 17145 - RNA, 22 nt, Homo sapiens
ugaaagguuuaauucugugaga

SEQ ID NO: 17146 - RNA, 22 nt, Homo sapiens
aucucaguuaauuccaucuuuc

SEQ ID NO: 17147 - RNA, 18 nt, Homo sapiens
uccauuuguaugggaugg

SEQ ID NO: 17148 - RNA, 22 nt, Homo sapiens
uauuagugccuaagucuuaggg

SEQ ID NO: 17149 - RNA, 22 nt, Homo sapiens
guguucaaacccaggucugucu

SEQ ID NO: 17150 - RNA, 22 nt, Homo sapiens
gcaaugcugucugugcacagau

SEQ ID NO: 17151 - RNA, 21 nt, Homo sapiens
uuacaauggcuccuugaaggu

SEQ ID NO: 17152 - RNA, 20 nt, Homo sapiens
gcaaauggaucccacaagcc

SEQ ID NO: 17153 - RNA, 22 nt, Homo sapiens
gaauaaacuagagaggacugag

SEQ ID NO: 17154 - RNA, 22 nt, Homo sapiens
cugugcuugauuauaugagugu

SEQ ID NO: 17155 - RNA, 22 nt, Homo sapiens
uggaauaucaugagaguuuguu

SEQ ID NO: 17156 - RNA, 19 nt, Homo sapiens
ugcagcaauguaaaagaca

SEQ ID NO: 17157 - RNA, 22 nt, Homo sapiens
uacaagcaggaaaugguauaug

SEQ ID NO: 17158 - RNA, 22 nt, Homo sapiens
auggauguucuagggaugugau

SEQ ID NO: 17159 - RNA, 22 nt, Homo sapiens
uugaguuuaucuaaagaccugg

SEQ ID NO: 17160 - RNA, 22 nt, Homo sapiens
gcugauguugaccuugaucacc

SEQ ID NO: 17161 - RNA, 21 nt, Homo sapiens
auauggaacuggugacguguu

SEQ ID NO: 17162 - RNA, 22 nt, Homo sapiens
augguauggaaggucuggagga

SEQ ID NO: 17163 - RNA, 22 nt, Homo sapiens
cagugcuuguuauuguucuauu

SEQ ID NO: 17164 - RNA, 22 nt, Homo sapiens
uuucuacagugaacgauuucua

SEQ ID NO: 17165 - RNA, 22 nt, Homo sapiens
aacugcuguuuggguacuggug

SEQ ID NO: 17166 - RNA, 22 nt, Homo sapiens
aaucccuuuguccagucucuuu

SEQ ID NO: 17167 - RNA, 21 nt, Homo sapiens
auagcacuucacuugguuaga

SEQ ID NO: 17168 - RNA, 22 nt, Homo sapiens
auagcacaugugcaaauggcug

SEQ ID NO: 17169 - RNA, 22 nt, Homo sapiens
uuaagaugcauuuugaaguuaa

SEQ ID NO: 17170 - RNA, 22 nt, Homo sapiens
auggaauguaaguuauguuugc

SEQ ID NO: 17171 - RNA, 22 nt, Homo sapiens
augcagagaaaucuaaaauaug

SEQ ID NO: 17172 - RNA, 22 nt, Homo sapiens
uggacuguaauagagaacagaa

SEQ ID NO: 17173 - RNA, 22 nt, Homo sapiens
ugugguuuuuuucuccaauagg

SEQ ID NO: 17174 - RNA, 22 nt, Homo sapiens
gcugugauucuguguagauagu

SEQ ID NO: 17175 - RNA, 22 nt, Homo sapiens
uuucccuuuagcuuagugauuu

SEQ ID NO: 17176 - RNA, 22 nt, Homo sapiens
uaccagcauuucucuuuaagua

SEQ ID NO: 17177 - RNA, 22 nt, Homo sapiens
ucuuuggaggcgaucuguuuga

SEQ ID NO: 17178 - RNA, 22 nt, Homo sapiens
agacaguguguguauauauggu

SEQ ID NO: 17179 - RNA, 22 nt, Homo sapiens
agugguuuuggaauggaauuca

SEQ ID NO: 17180 - RNA, 22 nt, Homo sapiens
acagugcuuucaauguucagua

SEQ ID NO: 17181 - RNA, 22 nt, Homo sapiens
guauggaagucaguuuguuggc

SEQ ID NO: 17182 - RNA, 18 nt, Homo sapiens
cuuugcagcuuccagagg

SEQ ID NO: 17183 - RNA, 22 nt, Homo sapiens
cagugcaugacuguauauuauc

SEQ ID NO: 17184 - RNA, 22 nt, Homo sapiens
cuguucaaauuguuugugaagu

SEQ ID NO: 17185 - RNA, 22 nt, Homo sapiens
augaaaacaugauuugccuguu

SEQ ID NO: 17186 - RNA, 22 nt, Homo sapiens
ugcuguguugcuggcuuaaaga

SEQ ID NO: 17187 - RNA, 22 nt, Homo sapiens
ugagauaaggaaauugaggcuc

SEQ ID NO: 17188 - RNA, 22 nt, Homo sapiens
ggcaguuuguuugugaggucca

SEQ ID NO: 17189 - RNA, 22 nt, Homo sapiens
ugguguuugagaagcugauguc

SEQ ID NO: 17190 - RNA, 22 nt, Homo sapiens
cagagaucaugcaacugcucgc

SEQ ID NO: 17191 - RNA, 22 nt, Homo sapiens
cuuuacaguuggacucacgagg

SEQ ID NO: 17192 - RNA, 22 nt, Homo sapiens
caugcacugaguccaccucugg

SEQ ID NO: 17193 - RNA, 22 nt, Homo sapiens
gagacugagucuugcucugucg

SEQ ID NO: 17194 - RNA, 22 nt, Homo sapiens
cuuuguaugucaugacaacugu

SEQ ID NO: 17195 - RNA, 22 nt, Homo sapiens
auaucccagugaugauugauag

SEQ ID NO: 17196 - RNA, 17 nt, Homo sapiens
ugacagaaacuuguugu

SEQ ID NO: 17197 - RNA, 22 nt, Homo sapiens
uugagauguaagauguuaauau

SEQ ID NO: 17198 - RNA, 22 nt, Homo sapiens
agaauguauauucuguaguugu

SEQ ID NO: 17199 - RNA, 22 nt, Homo sapiens
guaacacucuaaagggaugcac

SEQ ID NO: 17200 - RNA, 22 nt, Homo sapiens
cuuugauuauaaaaggguguuu

SEQ ID NO: 17201 - RNA, 22 nt, Homo sapiens
uuuggucacugccgccgccagc

SEQ ID NO: 17202 - RNA, 22 nt, Homo sapiens
uauuccauuugugaaaggaagu

SEQ ID NO: 17203 - RNA, 22 nt, Homo sapiens
gcugcuguuucucuuucagcau

SEQ ID NO: 17204 - RNA, 22 nt, Homo sapiens
uucccuuucugccuugaaucuu

SEQ ID NO: 17205 - RNA, 22 nt, Homo sapiens
uuugaauggaaguuuugugaaa

SEQ ID NO: 17206 - RNA, 22 nt, Homo sapiens
uguagcuuuugagauuuauauu

SEQ ID NO: 17207 - RNA, 19 nt, Homo sapiens
uuuguauguuuccaguaau

SEQ ID NO: 17208 - RNA, 22 nt, Homo sapiens
augaagucguuacuaccaauug

SEQ ID NO: 17209 - RNA, 22 nt, Homo sapiens
agugcauuugcaucucaauaua

SEQ ID NO: 17210 - RNA, 22 nt, Homo sapiens
gugugauuauuucaauugaugc

SEQ ID NO: 17211 - RNA, 22 nt, Homo sapiens
ugcucaguuuaaaacuuuugag

SEQ ID NO: 17212 - RNA, 22 nt, Homo sapiens
ugcuuguguucagguaaccuuu

SEQ ID NO: 17213 - RNA, 22 nt, Homo sapiens
acacuguagcugagggcaugcg

SEQ ID NO: 17214 - RNA, 22 nt, Homo sapiens
aacacuguuuccagucaugauc

SEQ ID NO: 17215 - RNA, 21 nt, Homo sapiens
ugcuuuggucauacuucuucc

SEQ ID NO: 17216 - RNA, 19 nt, Homo sapiens
ccugcuguucuuuugcacc

SEQ ID NO: 17217 - RNA, 22 nt, Homo sapiens
augacugaguagcauuccauua

SEQ ID NO: 17218 - RNA, 22 nt, Homo sapiens
uugauauguaguuggacuugau

SEQ ID NO: 17219 - RNA, 22 nt, Homo sapiens
uaucagcagagucauacuucaa

SEQ ID NO: 17220 - RNA, 22 nt, Homo sapiens
aguguuuuuacaagcacucugg

SEQ ID NO: 17221 - RNA, 23 nt, Homo sapiens
ggaaugaaaccugguuaugauau

SEQ ID NO: 17222 - RNA, 22 nt, Homo sapiens
uggauaguaauaaacauauagg

SEQ ID NO: 17223 - RNA, 20 nt, Homo sapiens
guccauuugcugccauugcu

SEQ ID NO: 17224 - RNA, 18 nt, Homo sapiens
ccauucaacagauuuguc

SEQ ID NO: 17225 - RNA, 22 nt, Homo sapiens
aucuugcauuugcuaaaaugca

SEQ ID NO: 17226 - RNA, 22 nt, Homo sapiens
uuaacacugccauugauacugu

SEQ ID NO: 17227 - RNA, 22 nt, Homo sapiens
aaguauguaucaagucauacuu

SEQ ID NO: 17228 - RNA, 22 nt, Homo sapiens
ugagaugaagcuagaagaaugg

SEQ ID NO: 17229 - RNA, 22 nt, Homo sapiens
uucaauaugucauuggcaggca

SEQ ID NO: 17230 - RNA, 22 nt, Homo sapiens
uagcacaucuucuuggccugca

SEQ ID NO: 17231 - RNA, 22 nt, Homo sapiens
ugaugacacugauuucuucaau

SEQ ID NO: 17232 - RNA, 22 nt, Homo sapiens
agguauguauguaugggagaaa

SEQ ID NO: 17233 - RNA, 22 nt, Homo sapiens
gaauggaacugacuauagcuga

SEQ ID NO: 17234 - RNA, 22 nt, Homo sapiens
gagagcauuaagccaucaucau

SEQ ID NO: 17235 - RNA, 22 nt, Homo sapiens
uggucaguugaguccuugccaa

SEQ ID NO: 17236 - RNA, 22 nt, Homo sapiens
cuuaacagugguauugaugacc

SEQ ID NO: 17237 - RNA, 19 nt, Homo sapiens
ugugaacaucacagagugu

SEQ ID NO: 17238 - RNA, 19 nt, Homo sapiens
gaucuguugaucaaugugu

SEQ ID NO: 17239 - RNA, 22 nt, Homo sapiens
uugcuuuguuacugcaguuucc

SEQ ID NO: 17240 - RNA, 22 nt, Homo sapiens
uaaauggauaaaugaauaccua

SEQ ID NO: 17241 - RNA, 22 nt, Homo sapiens
uccauugucuagauguaacaca

SEQ ID NO: 17242 - RNA, 22 nt, Homo sapiens
gagacugagucuugcuuuguca

SEQ ID NO: 17243 - RNA, 22 nt, Homo sapiens
ugacuaggaaauuagaacuuuu

SEQ ID NO: 17244 - RNA, 23 nt, Homo sapiens
gagaucauucuggaauuagagug

SEQ ID NO: 17245 - RNA, 22 nt, Homo sapiens
uggaaguauagauaauugaaag

SEQ ID NO: 17246 - RNA, 22 nt, Homo sapiens
guacacauacauauaugugugu

SEQ ID NO: 17247 - RNA, 22 nt, Homo sapiens
uuggucaggcuaaucucgaacg

SEQ ID NO: 17248 - RNA, 22 nt, Homo sapiens
uggaaaucuaaguuuggauuga

SEQ ID NO: 17249 - RNA, 22 nt, Homo sapiens
cugugcaaagcgcucucggggu

SEQ ID NO: 17250 - RNA, 19 nt, Homo sapiens
uggaacugauucaguucug

SEQ ID NO: 17251 - RNA, 22 nt, Homo sapiens
uaauauguuuugaaaucaggaa

SEQ ID NO: 17252 - RNA, 22 nt, Homo sapiens
auagcacaguguguguacacca

SEQ ID NO: 17253 - RNA, 22 nt, Homo sapiens
uagaaugucagcuucuugaggg

SEQ ID NO: 17254 - RNA, 22 nt, Homo sapiens
aaccuguaaccauaugaucagu

SEQ ID NO: 17255 - RNA, 22 nt, Homo sapiens
aagaugauguucuuuuucuuag

SEQ ID NO: 17256 - RNA, 22 nt, Homo sapiens
aucuacagccagucugguuugu

SEQ ID NO: 17257 - RNA, 22 nt, Homo sapiens
guacaguuuucaguguucacug

SEQ ID NO: 17258 - RNA, 22 nt, Homo sapiens
augagaugcaagauuagauggg

SEQ ID NO: 17259 - RNA, 22 nt, Homo sapiens
ugguccuuuccauuggagacac

SEQ ID NO: 17260 - RNA, 22 nt, Homo sapiens
acaaaguauggaauguuggugu

SEQ ID NO: 17261 - RNA, 22 nt, Homo sapiens
uuauacuacuauaaagagguag

SEQ ID NO: 17262 - RNA, 22 nt, Homo sapiens
uauuugauugacuuuagcagga

SEQ ID NO: 17263 - RNA, 20 nt, Homo sapiens
auguaauguaugauauguac

SEQ ID NO: 17264 - RNA, 22 nt, Homo sapiens
gagaucauguacuagaacaccu

SEQ ID NO: 17265 - RNA, 22 nt, Homo sapiens
uaucccaauguaauaucacaaa

SEQ ID NO: 17266 - RNA, 22 nt, Homo sapiens
uaucucauccuccuugauccca

SEQ ID NO: 17267 - RNA, 22 nt, Homo sapiens
cuucuugagacuuaggcuuugg

SEQ ID NO: 17268 - RNA, 22 nt, Homo sapiens
ugagaugaguugcgcucugucg

SEQ ID NO: 17269 - RNA, 22 nt, Homo sapiens
guauuuguugcagcagcacuau

SEQ ID NO: 17270 - RNA, 22 nt, Homo sapiens
gauguguuuccaggauuuguuu

SEQ ID NO: 17271 - RNA, 22 nt, Homo sapiens
augaggauagguuucuauuagg

SEQ ID NO: 17272 - RNA, 18 nt, Homo sapiens
aaacugcuuccuuggccu

SEQ ID NO: 17273 - RNA, 20 nt, Homo sapiens
uggagugaagguucuggacc

SEQ ID NO: 17274 - RNA, 22 nt, Homo sapiens
cuguuugaggguuugcuuucag

SEQ ID NO: 17275 - RNA, 22 nt, Homo sapiens
aguguuuuuaacaagaaagggu

SEQ ID NO: 17276 - RNA, 22 nt, Homo sapiens
uucauacaguggcugcacucca

SEQ ID NO: 17277 - RNA, 22 nt, Homo sapiens
uaucucuguggguagugcugaa

SEQ ID NO: 17278 - RNA, 23 nt, Homo sapiens
uugcauagacauccucauagauu

SEQ ID NO: 17279 - RNA, 22 nt, Homo sapiens
uaaauggauauugccaucuccu

SEQ ID NO: 17280 - RNA, 22 nt, Homo sapiens
uugaguuugaguauucuaaagc

SEQ ID NO: 17281 - RNA, 22 nt, Homo sapiens
guggcaguuuuaaauaugaaaa

SEQ ID NO: 17282 - RNA, 22 nt, Homo sapiens
auuccauuuguguggaauggcu

SEQ ID NO: 17283 - RNA, 22 nt, Homo sapiens
agugcauugcaucucugcuuca

SEQ ID NO: 17284 - RNA, 22 nt, Homo sapiens
ugcaguuuaggaacugguaaca

SEQ ID NO: 17285 - RNA, 22 nt, Homo sapiens
acaguguagugacugccaacuu

SEQ ID NO: 17286 - RNA, 22 nt, Homo sapiens
aucagugcauguuuguugagcu

SEQ ID NO: 17287 - RNA, 22 nt, Homo sapiens
ugagaugaacuugauuguuuua

SEQ ID NO: 17288 - RNA, 22 nt, Homo sapiens
uagacaacugaaacacugugca

SEQ ID NO: 17289 - RNA, 22 nt, Homo sapiens
gauuccauugcgaauuuucaga

SEQ ID NO: 17290 - RNA, 22 nt, Homo sapiens
uauacagcaaguuacugugcug

SEQ ID NO: 17291 - RNA, 22 nt, Homo sapiens
cugagacacucuuaucugcaua

SEQ ID NO: 17292 - RNA, 22 nt, Homo sapiens
caacaguaaagcauuuuuaagu

SEQ ID NO: 17293 - RNA, 22 nt, Homo sapiens
guguucaaagcugauugagauu

SEQ ID NO: 17294 - RNA, 20 nt, Homo sapiens
ugaugcaaaucuuuaaaagu

SEQ ID NO: 17295 - RNA, 22 nt, Homo sapiens
agcugugucuucuuaaagauuu

SEQ ID NO: 17296 - RNA, 22 nt, Homo sapiens
gagcugaucuuuucugauucca

SEQ ID NO: 17297 - RNA, 21 nt, Homo sapiens
aacagugcuuaguagauguuc

SEQ ID NO: 17298 - RNA, 18 nt, Homo sapiens
cugccagugugcucuccg

SEQ ID NO: 17299 - RNA, 22 nt, Homo sapiens
gagacugaguuuugcucuuguu

SEQ ID NO: 17300 - RNA, 22 nt, Homo sapiens
uugugaauggugccacaauaaa

SEQ ID NO: 17301 - RNA, 22 nt, Homo sapiens
acagugcuuggcacacaguaau

SEQ ID NO: 17302 - RNA, 22 nt, Homo sapiens
uagaauggaaggcauguuugcc

SEQ ID NO: 17303 - RNA, 22 nt, Homo sapiens
auggaacuggagaugguuauau

SEQ ID NO: 17304 - RNA, 22 nt, Homo sapiens
ugagaugagucucgcucuguca

SEQ ID NO: 17305 - RNA, 22 nt, Homo sapiens
guuggaauguauugcuacuucu

SEQ ID NO: 17306 - RNA, 22 nt, Homo sapiens
uaagacacuuaaaauguuacau

SEQ ID NO: 17307 - RNA, 22 nt, Homo sapiens
gagcaucaguggccucaucuca

SEQ ID NO: 17308 - RNA, 22 nt, Homo sapiens
uuucccugaaggcucugaaguc

SEQ ID NO: 17309 - RNA, 22 nt, Homo sapiens
aguauguagugcaaucagucag

SEQ ID NO: 17310 - RNA, 22 nt, Homo sapiens
guggaaugaaaacucucucaca

SEQ ID NO: 17311 - RNA, 22 nt, Homo sapiens
uggagagucauuuauaguauuu

SEQ ID NO: 17312 - RNA, 22 nt, Homo sapiens
ugagaugagaaucaguucuaau

SEQ ID NO: 17313 - RNA, 22 nt, Homo sapiens
acuguauagauggaguugauuu

SEQ ID NO: 17314 - RNA, 16 nt, Homo sapiens
gugcuguguuguuagg

SEQ ID NO: 17315 - RNA, 22 nt, Homo sapiens
cuucaaaguuggcuaggagaca

SEQ ID NO: 17316 - RNA, 22 nt, Homo sapiens
uugacauaaucauuucacagug

SEQ ID NO: 17317 - RNA, 22 nt, Homo sapiens
acauucagcuguuguuucaaug

SEQ ID NO: 17318 - RNA, 22 nt, Homo sapiens
uggauggagaggcuugugaugc

SEQ ID NO: 17319 - RNA, 22 nt, Homo sapiens
aguguuuuuaucaugaaagggu

SEQ ID NO: 17320 - RNA, 21 nt, Homo sapiens
uucucagaggcaggggauaaa

SEQ ID NO: 17321 - RNA, 22 nt, Homo sapiens
uuucugagaccaaaacuuguaa

SEQ ID NO: 17322 - RNA, 22 nt, Homo sapiens
gggaauguagcaaaucugcaau

SEQ ID NO: 17323 - RNA, 22 nt, Homo sapiens
aaguuaauguuuaagacuccua

SEQ ID NO: 17324 - RNA, 22 nt, Homo sapiens
cuauaacagugugguuuggaga

SEQ ID NO: 17325 - RNA, 22 nt, Homo sapiens
uugagauguauguauauaaugu

SEQ ID NO: 17326 - RNA, 22 nt, Homo sapiens
uugagauuuuccucaaauauuu

SEQ ID NO: 17327 - RNA, 22 nt, Homo sapiens
ugaacagucaucucucuuguau

SEQ ID NO: 17328 - RNA, 23 nt, Homo sapiens
agcaccuuuccuccacuaucugc

SEQ ID NO: 17329 - RNA, 20 nt, Homo sapiens
uggaaaguaagucaugauau

SEQ ID NO: 17330 - RNA, 22 nt, Homo sapiens
uuaaguaaucagagaagagaac

SEQ ID NO: 17331 - RNA, 22 nt, Homo sapiens
guggaauggaaugauuguguau

SEQ ID NO: 17332 - RNA, 22 nt, Homo sapiens
gaaauggaucagagcaagcuuu

SEQ ID NO: 17333 - RNA, 21 nt, Homo sapiens
ugaacacuggacugagugucc

SEQ ID NO: 17334 - RNA, 22 nt, Homo sapiens
agcuuguggugaauacugcuag

SEQ ID NO: 17335 - RNA, 22 nt, Homo sapiens
ugugguuuuaguaaaacuaugu

SEQ ID NO: 17336 - RNA, 21 nt, Homo sapiens
uaaaacuguaacuuuguccug

SEQ ID NO: 17337 - RNA, 22 nt, Homo sapiens
ucuugccacuucauccccuuuc

SEQ ID NO: 17338 - RNA, 22 nt, Homo sapiens
acuggauguuagggauuuuauu

SEQ ID NO: 17339 - RNA, 22 nt, Homo sapiens
auaaguauuuggacuuuacugu

SEQ ID NO: 17340 - RNA, 22 nt, Homo sapiens
uaaguauuaugugcugcauuuu

SEQ ID NO: 17341 - RNA, 22 nt, Homo sapiens
cugaaagagcauguaacacagu

SEQ ID NO: 17342 - RNA, 22 nt, Homo sapiens
uugugaaugaugucgcaauaaa

SEQ ID NO: 17343 - RNA, 22 nt, Homo sapiens
auacaagcaguccaacuccaua

SEQ ID NO: 17344 - RNA, 22 nt, Homo sapiens
gagacugagucuugcucuguca

SEQ ID NO: 17345 - RNA, 22 nt, Homo sapiens
guguucaaauucugacagagag

SEQ ID NO: 17346 - RNA, 22 nt, Homo sapiens
uugagauggaguuucaauauug

SEQ ID NO: 17347 - RNA, 19 nt, Homo sapiens
uuuguccugcccuuucuca

SEQ ID NO: 17348 - RNA, 22 nt, Homo sapiens
gaaaacugcuucucuggguuuc

SEQ ID NO: 17349 - RNA, 20 nt, Homo sapiens
gucugucuccgaguagaauu

SEQ ID NO: 17350 - RNA, 22 nt, Homo sapiens
auggaguguaauauugagagcu

SEQ ID NO: 17351 - RNA, 22 nt, Homo sapiens
gaucuguuuuccuauuguuugu

SEQ ID NO: 17352 - RNA, 20 nt, Homo sapiens
gcugugcuuaauacacuuuc

SEQ ID NO: 17353 - RNA, 22 nt, Homo sapiens
uugagaugauggauaugcuaau

SEQ ID NO: 17354 - RNA, 20 nt, Homo sapiens
uucuacagucacaggaagau

SEQ ID NO: 17355 - RNA, 22 nt, Homo sapiens
auggauugucuccuugugccau

SEQ ID NO: 17356 - RNA, 22 nt, Homo sapiens
uaaguucauucaugaaacuuag

SEQ ID NO: 17357 - RNA, 22 nt, Homo sapiens
aauaaagucugaagugugcuua

SEQ ID NO: 17358 - RNA, 22 nt, Homo sapiens
aguucaaaucgagccuggccau

SEQ ID NO: 17359 - RNA, 22 nt, Homo sapiens
ugugaacagaauuagucaccua

SEQ ID NO: 17360 - RNA, 22 nt, Homo sapiens
agguaagaugugacuugguguu

SEQ ID NO: 17361 - RNA, 22 nt, Homo sapiens
cauaaagauggaggaggccagg

SEQ ID NO: 17362 - RNA, 22 nt, Homo sapiens
cuuguuguggaggggagugcag

SEQ ID NO: 17363 - RNA, 22 nt, Homo sapiens
uucaagucaacaagcacuugag

SEQ ID NO: 17364 - RNA, 22 nt, Homo sapiens
uggcagugggagauauuuuauu

SEQ ID NO: 17365 - RNA, 21 nt, Homo sapiens
ugacagaaaauugaguuugcu

SEQ ID NO: 17366 - RNA, 22 nt, Homo sapiens
gagauugucaugauuacauugu

SEQ ID NO: 17367 - RNA, 22 nt, Homo sapiens
acaucccuuucccacccuucac

SEQ ID NO: 17368 - RNA, 22 nt, Homo sapiens
uugugaaugaugccgcaauaaa

SEQ ID NO: 17369 - RNA, 22 nt, Homo sapiens
aucccuuucugauacuuucccu

SEQ ID NO: 17370 - RNA, 22 nt, Homo sapiens
auguaacugggacacaagccuc

SEQ ID NO: 17371 - RNA, 22 nt, Homo sapiens
uggaaguaaccaugaauggaau

SEQ ID NO: 17372 - RNA, 22 nt, Homo sapiens
ucaaaugguccacgugaacauu

SEQ ID NO: 17373 - RNA, 22 nt, Homo sapiens
acaauguauauuuuacuguagg

SEQ ID NO: 17374 - RNA, 22 nt, Homo sapiens
cuuguggugcuuuuacgugggc

SEQ ID NO: 17375 - RNA, 22 nt, Homo sapiens
ugccuaguagaaggugaacaug

SEQ ID NO: 17376 - RNA, 22 nt, Homo sapiens
uuacagcagugccccacuccca

SEQ ID NO: 17377 - RNA, 22 nt, Homo sapiens
cauacaagcuacaaucacaaag

SEQ ID NO: 17378 - RNA, 22 nt, Homo sapiens
cugggaugugacuguugccccc

SEQ ID NO: 17379 - RNA, 22 nt, Homo sapiens
cagugcauaggaucuaaaauuu

SEQ ID NO: 17380 - RNA, 22 nt, Homo sapiens
aagaucaucauagagggcauga

SEQ ID NO: 17381 - RNA, 21 nt, Homo sapiens
auuccacuuuuccuucaggga

SEQ ID NO: 17382 - RNA, 22 nt, Homo sapiens
ugagaacagauggcuuuauuau

SEQ ID NO: 17383 - RNA, 22 nt, Homo sapiens
uaagugcaugauuacaugcaua

SEQ ID NO: 17384 - RNA, 22 nt, Homo sapiens
aguaaauuucugugcuuucaua

SEQ ID NO: 17385 - RNA, 22 nt, Homo sapiens
ugaaagguauagguucuggagg

SEQ ID NO: 17386 - RNA, 22 nt, Homo sapiens
ucagugccucaguuuuuaaaga

SEQ ID NO: 17387 - RNA, 22 nt, Homo sapiens
ugacuagugcccuuugcugccu

SEQ ID NO: 17388 - RNA, 22 nt, Homo sapiens
cugacagucucauugauuugcu

SEQ ID NO: 17389 - RNA, 22 nt, Homo sapiens
uuggcaguaucuacuacagcua

SEQ ID NO: 17390 - RNA, 22 nt, Homo sapiens
guggaaugcaguguugauucaa

SEQ ID NO: 17391 - RNA, 21 nt, Homo sapiens
uggucaguuuucucacuagga

SEQ ID NO: 17392 - RNA, 18 nt, Homo sapiens
auucuacaggccuuuuga

SEQ ID NO: 17393 - RNA, 22 nt, Homo sapiens
auggaaugccauuuauaaugga

SEQ ID NO: 17394 - RNA, 22 nt, Homo sapiens
cuacagcagcccaguccccgaa

SEQ ID NO: 17395 - RNA, 22 nt, Homo sapiens
uucaagucuuggcuuugccacc

SEQ ID NO: 17396 - RNA, 22 nt, Homo sapiens
ugcuuugguagaaaucuuuggu

SEQ ID NO: 17397 - RNA, 22 nt, Homo sapiens
uacuguacugcaguucugcaaa

SEQ ID NO: 17398 - RNA, 20 nt, Homo sapiens
cuccuucauuccuuuggacc

SEQ ID NO: 17399 - RNA, 22 nt, Homo sapiens
augcacuguauaggaucuugcg

SEQ ID NO: 17400 - RNA, 22 nt, Homo sapiens
uggaagucuucauuauguauag

SEQ ID NO: 17401 - RNA, 22 nt, Homo sapiens
ugauuuguuucaggaguuuucu

SEQ ID NO: 17402 - RNA, 22 nt, Homo sapiens
uugcugagucuuucuagguugc

SEQ ID NO: 17403 - RNA, 22 nt, Homo sapiens
uucuacagugacugcagccaua

SEQ ID NO: 17404 - RNA, 22 nt, Homo sapiens
gugacagucaaagacaugacuu

SEQ ID NO: 17405 - RNA, 22 nt, Homo sapiens
agaugauguuuacugagcauca

SEQ ID NO: 17406 - RNA, 22 nt, Homo sapiens
acagugcuguuguguuuucacg

SEQ ID NO: 17407 - RNA, 22 nt, Homo sapiens
ucaguagcauugcuuauacagu

SEQ ID NO: 17408 - RNA, 22 nt, Homo sapiens
guauuugauuauagcaugcuua

SEQ ID NO: 17409 - RNA, 22 nt, Homo sapiens
ugagaugaagugauguaaaaca

SEQ ID NO: 17410 - RNA, 19 nt, Homo sapiens
uuugcauagugagaauaua

SEQ ID NO: 17411 - RNA, 23 nt, Homo sapiens
ugacagucucccgauggcuaggc

SEQ ID NO: 17412 - RNA, 22 nt, Homo sapiens
auguaauguuaaauugcuaauu

SEQ ID NO: 17413 - RNA, 22 nt, Homo sapiens
ggcucguguuuucuguccaguu

SEQ ID NO: 17414 - RNA, 22 nt, Homo sapiens
ucauacaguaguccucacuugu

SEQ ID NO: 17415 - RNA, 22 nt, Homo sapiens
uuggucaucucccuccuuuuag

SEQ ID NO: 17416 - RNA, 22 nt, Homo sapiens
ucuacagccaguucaggaagaa

SEQ ID NO: 17417 - RNA, 22 nt, Homo sapiens
guggaagucuuugguauuggua

SEQ ID NO: 17418 - RNA, 22 nt, Homo sapiens
ugagaacaugcacuugagguug

SEQ ID NO: 17419 - RNA, 22 nt, Homo sapiens
gcuguguugugcccagcaucau

SEQ ID NO: 17420 - RNA, 22 nt, Homo sapiens
augagauauguuaaaaguuaaa

SEQ ID NO: 17421 - RNA, 22 nt, Homo sapiens
ugugguuuuucacauuuagaga

SEQ ID NO: 17422 - RNA, 22 nt, Homo sapiens
uauggauuuucagauucuuauc

SEQ ID NO: 17423 - RNA, 22 nt, Homo sapiens
gauguguugggaagauuucaag

SEQ ID NO: 17424 - RNA, 22 nt, Homo sapiens
uugggauaaucacaaaguaaaa

SEQ ID NO: 17425 - RNA, 22 nt, Homo sapiens
ugacagguuggaauuaugggag

SEQ ID NO: 17426 - RNA, 22 nt, Homo sapiens
uucaguaaauguucuuacuaua

SEQ ID NO: 17427 - RNA, 22 nt, Homo sapiens
agcugauggucuuguaugaugu

SEQ ID NO: 17428 - RNA, 22 nt, Homo sapiens
gugacaguggagacuuacuuca

SEQ ID NO: 17429 - RNA, 22 nt, Homo sapiens
uuauagcuaacaucugugaaaa

SEQ ID NO: 17430 - RNA, 22 nt, Homo sapiens
uggaaguagauagauuguguca

SEQ ID NO: 17431 - RNA, 22 nt, Homo sapiens
ugagaugauagauauguuaauu

SEQ ID NO: 17432 - RNA, 20 nt, Homo sapiens
uggaguuugaguucuuggag

SEQ ID NO: 17433 - RNA, 20 nt, Homo sapiens
ucaucaguuggugcucgcug

SEQ ID NO: 17434 - RNA, 22 nt, Homo sapiens
uuugugaaugucauaagcucca

SEQ ID NO: 17435 - RNA, 20 nt, Homo sapiens
uggcaccugacagauagcca

SEQ ID NO: 17436 - RNA, 22 nt, Homo sapiens
aagaugauguuguguuuucacu

SEQ ID NO: 17437 - RNA, 22 nt, Homo sapiens
agcugcauuuacuuuugcacaa

SEQ ID NO: 17438 - RNA, 22 nt, Homo sapiens
uagcaccucuuuggccuuucgu

SEQ ID NO: 17439 - RNA, 22 nt, Homo sapiens
auguguucaucacagcacaauu

SEQ ID NO: 17440 - RNA, 22 nt, Homo sapiens
uuagaauggaaaugcgagguua

SEQ ID NO: 17441 - RNA, 22 nt, Homo sapiens
uugugaauggugccgcaauaaa

SEQ ID NO: 17442 - RNA, 22 nt, Homo sapiens
uucccugagcaucuguugagcc

SEQ ID NO: 17443 - RNA, 22 nt, Homo sapiens
aagacuguaauccaucuugagu

SEQ ID NO: 17444 - RNA, 22 nt, Homo sapiens
ucauaguagucacuuaauaaau

SEQ ID NO: 17445 - RNA, 22 nt, Homo sapiens
ucagugcuuuuuguugucauca

SEQ ID NO: 17446 - RNA, 22 nt, Homo sapiens
uuggcagugcccgaugcugggg

SEQ ID NO: 17447 - RNA, 22 nt, Homo sapiens
ucagucuuuuuuuggcaagcau

SEQ ID NO: 17448 - RNA, 22 nt, Homo sapiens
uuaauacugcuuaacuuuagga

SEQ ID NO: 17449 - RNA, 22 nt, Homo sapiens
gauaaagauagcaauagggaca

SEQ ID NO: 17450 - RNA, 22 nt, Homo sapiens
uuaauguaauugauugauugac

SEQ ID NO: 17451 - RNA, 22 nt, Treponema pallidum subsp. pallidum str. Nichols
uugagggucguuugacgcaacu

SEQ ID NO: 17452 - RNA, 22 nt, Treponema pallidum subsp. pallidum str. Nichols
ugcuggugagaguuuucaagcg

SEQ ID NO: 17453 - RNA, 22 nt, Treponema pallidum subsp. pallidum str. Nichols
gugaugcacgugauuuugugcu

SEQ ID NO: 17454 - RNA, 18 nt, Treponema pallidum subsp. pallidum str. Nichols
guccuuuccggugaacuc

SEQ ID NO: 17455 - RNA, 22 nt, Treponema pallidum subsp. pallidum str. Nichols
guggcaguuuggauuugaacca

SEQ ID NO: 17456 - RNA, 22 nt, Treponema pallidum subsp. pallidum str. Nichols
uugauucgguuuuguacguucc

SEQ ID NO: 17457 - RNA, 22 nt, Treponema pallidum subsp. pallidum str. Nichols
aucaaugucgcggcagagaacu

SEQ ID NO: 17458 - RNA, 22 nt, Treponema pallidum subsp. pallidum str. Nichols
cugugguuccaucggacccuuc

SEQ ID NO: 17459 - RNA, 22 nt, Treponema pallidum subsp. pallidum str. Nichols
gaggaugaagcguaagguucau

SEQ ID NO: 17460 - RNA, 22 nt, Treponema pallidum subsp. pallidum str. Nichols
gccugaaagcugcacauacccg

SEQ ID NO: 17461 - RNA, 22 nt, Treponema pallidum subsp. pallidum str. Nichols
gcucuggaaaagauucgcuuca

SEQ ID NO: 17462 - RNA, 22 nt, Treponema pallidum subsp. pallidum str. Nichols
gcuguauccgaaauaccauuuu

SEQ ID NO: 17463 - RNA, 20 nt, Treponema pallidum subsp. pallidum str. Nichols
uccugcuccaacugacggug

SEQ ID NO: 17464 - RNA, 22 nt, Treponema pallidum subsp. pallidum str. Nichols
aacaagcaaucguuacucuuuu

SEQ ID NO: 17465 - RNA, 22 nt, Treponema pallidum subsp. pallidum str. Nichols
aagaacuaggagucugugucgc

SEQ ID NO: 17466 - RNA, 22 nt, Treponema pallidum subsp. pallidum str. Nichols
agaaaugaaaggacgcaucauu

SEQ ID NO: 17467 - RNA, 22 nt, Treponema pallidum subsp. pallidum str. Nichols
acgaagacgccucacggaagcu

SEQ ID NO: 17468 - RNA, 22 nt, Treponema pallidum subsp. pallidum str. Nichols
cccccauggagacugcaccuga

SEQ ID NO: 17469 - RNA, 22 nt, Treponema pallidum subsp. pallidum str. Nichols
cauaaucagcgcuaaaggaaau

SEQ ID NO: 17470 - RNA, 22 nt, Treponema pallidum subsp. pallidum str. Nichols
auuuuaaugcagcgucuugcgc

SEQ ID NO: 17471 - RNA, 22 nt, Treponema pallidum subsp. pallidum str. Nichols
auuccauuuuuggaucguaggc

SEQ ID NO: 17472 - RNA, 22 nt, Treponema pallidum subsp. pallidum str. Nichols
auguauguuuuaguucugugga

SEQ ID NO: 17473 - RNA, 22 nt, Treponema pallidum subsp. pallidum str. Nichols
aguguauucaaccauuugcuuu

SEQ ID NO: 17474 - RNA, 13 nt, Homo sapiens
aacugauguaagu

SEQ ID NO: 17475 - RNA, 20 nt, Homo sapiens
aagcacagugaucaaguuau

SEQ ID NO: 17476 - RNA, 14 nt, Homo sapiens
aagucccugcugcc

SEQ ID NO: 17477 - RNA, 14 nt, Homo sapiens
acauggcuggagcu

SEQ ID NO: 17478 - RNA, 15 nt, Homo sapiens
acggcuggagcugcc

SEQ ID NO: 17479 - RNA, 16 nt, Homo sapiens
acugaauuaugaaacu

SEQ ID NO: 17480 - RNA, 15 nt, Homo sapiens
acuguccauucuucc

SEQ ID NO: 17481 - RNA, 21 nt, Homo sapiens
agccgguccuugcugcaccug

SEQ ID NO: 17482 - RNA, 14 nt, Homo sapiens
aggaugcccacggc

SEQ ID NO: 17483 - RNA, 15 nt, Homo sapiens
agucccugcugcccu

SEQ ID NO: 17484 - RNA, 15 nt, Homo sapiens
aucuauauuuuacau

SEQ ID NO: 17485 - RNA, 17 nt, Homo sapiens
augcuguucaugaaaga

SEQ ID NO: 17486 - RNA, 18 nt, Homo sapiens
augcuguucaugaaagau

SEQ ID NO: 17487 - RNA, 20 nt, Homo sapiens
auuuaguauuuuguuucagu

SEQ ID NO: 17488 - RNA, 15 nt, Homo sapiens
caagucagucauuca

SEQ ID NO: 17489 - RNA, 17 nt, Homo sapiens
cacagugaucaaguuau

SEQ ID NO: 17490 - RNA, 13 nt, Homo sapiens
caccugugccguc

SEQ ID NO: 17491 - RNA, 13 nt, Homo sapiens
cacggcuggagcu

SEQ ID NO: 17492 - RNA, 14 nt, Homo sapiens
cacggcuggagcug

SEQ ID NO: 17493 - RNA, 16 nt, Homo sapiens
cagagcuacaggcccc

SEQ ID NO: 17494 - RNA, 17 nt, Homo sapiens
cagagcuacaggcccca

SEQ ID NO: 17495 - RNA, 15 nt, Homo sapiens
cagcugagcagaugu

SEQ ID NO: 17496 - RNA, 13 nt, Homo sapiens
caggaugcccacg

SEQ ID NO: 17497 - RNA, 21 nt, Homo sapiens
caggaugcccacggcuggagc

SEQ ID NO: 17498 - RNA, 16 nt, Homo sapiens
caggccccaucugguc

SEQ ID NO: 17499 - RNA, 17 nt, Homo sapiens
caggccccaucuggucc

SEQ ID NO: 17500 - RNA, 23 nt, Homo sapiens
cauggcuggagcuagaauuugau

SEQ ID NO: 17501 - RNA, 14 nt, Homo sapiens
cauucaggaugccc

SEQ ID NO: 17502 - RNA, 21 nt, Homo sapiens
cauucaggaugcccacggcug

SEQ ID NO: 17503 - RNA, 17 nt, Homo sapiens
ccaauaaagaguuccuu

SEQ ID NO: 17504 - RNA, 12 nt, Homo sapiens
ccacggcuggag

SEQ ID NO: 17505 - RNA, 21 nt, Homo sapiens
ccacuuuccaauaaagaguuc

SEQ ID NO: 17506 - RNA, 22 nt, Homo sapiens
ccacuuuccaauaaagaguucc

SEQ ID NO: 17507 - RNA, 18 nt, Homo sapiens
ccauuguugucugcaacu

SEQ ID NO: 17508 - RNA, 14 nt, Homo sapiens
cccacggcuggagc

SEQ ID NO: 17509 - RNA, 17 nt, Homo sapiens
ccccagagcuacaggcc

SEQ ID NO: 17510 - RNA, 23 nt, Homo sapiens
ccgguccuugcugcaccugugcc

SEQ ID NO: 17511 - RNA, 18 nt, Homo sapiens
ccuaagucccugcugccc

SEQ ID NO: 17512 - RNA, 18 nt, Homo sapiens
ccuaugaauaaauuuucu

SEQ ID NO: 17513 - RNA, 22 nt, Homo sapiens
ccucccauucaggaugcccacg

SEQ ID NO: 17514 - RNA, 20 nt, Homo sapiens
ccucucucauccacuuucca

SEQ ID NO: 17515 - RNA, 11 nt, Homo sapiens
ccuucugcucc

SEQ ID NO: 17516 - RNA, 21 nt, Homo sapiens
ccuugcugcaccugugccguc

SEQ ID NO: 17517 - RNA, 22 nt, Homo sapiens
ccuugcugcaccugugccgucc

SEQ ID NO: 17518 - RNA, 17 nt, Homo sapiens
cguccccagagcuacag

SEQ ID NO: 17519 - RNA, 14 nt, Homo sapiens
cgguccuugcugca

SEQ ID NO: 17520 - RNA, 21 nt, Homo sapiens
cuaugaauaaauuuucuucuu

SEQ ID NO: 17521 - RNA, 21 nt, Homo sapiens
cucugauacagaaaaguugaa

SEQ ID NO: 17522 - RNA, 22 nt, Homo sapiens
cucugauacagaaaaguugaau

SEQ ID NO: 17523 - RNA, 17 nt, Homo sapiens
cugcccuuccccuuccc

SEQ ID NO: 17524 - RNA, 14 nt, Homo sapiens
cugcugcccuuccc

SEQ ID NO: 17525 - RNA, 21 nt, Homo sapiens
cugguccuaagucccugcugc

SEQ ID NO: 17526 - RNA, 16 nt, Homo sapiens
aauuaagagagucuau

SEQ ID NO: 17527 - RNA, 23 nt, Homo sapiens
gaacucaaauacgugggcauuca

SEQ ID NO: 17528 - RNA, 14 nt, Homo sapiens
gagcagauguaaua

SEQ ID NO: 17529 - RNA, 14 nt, Homo sapiens
gagcuacaggcccc

SEQ ID NO: 17530 - RNA, 15 nt, Homo sapiens
gagcuacaggcccca

SEQ ID NO: 17531 - RNA, 13 nt, Homo sapiens
gcccacggcugga

SEQ ID NO: 17532 - RNA, 19 nt, Homo sapiens
gcccacggcuggagcugcc

SEQ ID NO: 17533 - RNA, 16 nt, Homo sapiens
gccccaucugguccua

SEQ ID NO: 17534 - RNA, 15 nt, Homo sapiens
gccgguccuugcugc

SEQ ID NO: 17535 - RNA, 16 nt, Homo sapiens
gccgguccuugcugca

SEQ ID NO: 17536 - RNA, 14 nt, Homo sapiens
gccguccccagagc

SEQ ID NO: 17537 - RNA, 14 nt, Homo sapiens
gcugcaccugugcc

SEQ ID NO: 17538 - RNA, 16 nt, Homo sapiens
gcugcaccugugccgu

SEQ ID NO: 17539 - RNA, 10 nt, Homo sapiens
ggagcugccu

SEQ ID NO: 17540 - RNA, 11 nt, Homo sapiens
ggagcugccuc

SEQ ID NO: 17541 - RNA, 12 nt, Homo sapiens
ggagcugccucu

SEQ ID NO: 17542 - RNA, 12 nt, Homo sapiens
ggaugcccacgg

SEQ ID NO: 17543 - RNA, 13 nt, Homo sapiens
ggaugcccacggc

SEQ ID NO: 17544 - RNA, 20 nt, Homo sapiens
ggguagcauuuguguugaag

SEQ ID NO: 17545 - RNA, 15 nt, Homo sapiens
gguccuaagucccug

SEQ ID NO: 17546 - RNA, 17 nt, Homo sapiens
gguccuugcugcaccug

SEQ ID NO: 17547 - RNA, 14 nt, Homo sapiens
guccccagagcuac

SEQ ID NO: 17548 - RNA, 19 nt, Homo sapiens
guccuaagucccugcugcc

SEQ ID NO: 17549 - RNA, 11 nt, Homo sapiens
gucccugcugc

SEQ ID NO: 17550 - RNA, 14 nt, Homo sapiens
gucccugcugcccu

SEQ ID NO: 17551 - RNA, 22 nt, Homo sapiens
uccaauaaagaguuccuucugc

SEQ ID NO: 17552 - RNA, 16 nt, Homo sapiens
uccccuucccacacug

SEQ ID NO: 17553 - RNA, 16 nt, Homo sapiens
ucccauucaggaugcc

SEQ ID NO: 17554 - RNA, 15 nt, Homo sapiens
ugcccacggcuggag

SEQ ID NO: 17555 - RNA, 15 nt, Homo sapiens
ugccguccccagagc

SEQ ID NO: 17556 - RNA, 14 nt, Homo sapiens
ugcugcccuucccc

SEQ ID NO: 17557 - RNA, 19 nt, Homo sapiens
uucaggaugcccacggcug

SEQ ID NO: 17558 - RNA, 20 nt, Homo sapiens
uuccugaacaggauauucuc

SEQ ID NO: 17559 - RNA, 13 nt, Homo sapiens
agcauccuggaau

SEQ ID NO: 17560 - RNA, 17 nt, Homo sapiens
agccgguccuugcugca

SEQ ID NO: 17561 - RNA, 20 nt, Homo sapiens
agccgguccuugcugcaccu

SEQ ID NO: 17562 - RNA, 12 nt, Homo sapiens
agcuacaggccc

SEQ ID NO: 17563 - RNA, 14 nt, Homo sapiens
agcuacaggcccca

SEQ ID NO: 17564 - RNA, 15 nt, Homo sapiens
agcuacaggccccau

SEQ ID NO: 17565 - RNA, 20 nt, Homo sapiens
agcugccucucucauccacu

SEQ ID NO: 17566 - RNA, 13 nt, Homo sapiens
aggaugcccacgg

SEQ ID NO: 17567 - RNA, 16 nt, Homo sapiens
aggugucuugcuggcu

SEQ ID NO: 17568 - RNA, 17 nt, Homo sapiens
aggugucuugcuggcuu

SEQ ID NO: 17569 - RNA, 11 nt, Homo sapiens
agucccugcug

SEQ ID NO: 17570 - RNA, 12 nt, Homo sapiens
agucccugcugc

SEQ ID NO: 17571 - RNA, 16 nt, Homo sapiens
agucccugcugcccuu

SEQ ID NO: 17572 - RNA, 15 nt, Homo sapiens
aguugaauuuuacau

SEQ ID NO: 17573 - RNA, 15 nt, Homo sapiens
auccucuguguggcu

SEQ ID NO: 17574 - RNA, 18 nt, Homo sapiens
auucaaauguauuacagu

SEQ ID NO: 17575 - RNA, 14 nt, Homo sapiens
auucaaaugucuau

SEQ ID NO: 17576 - RNA, 12 nt, Homo sapiens
auucaggaugcc

SEQ ID NO: 17577 - RNA, 16 nt, Homo sapiens
auucaggaugcccacg

SEQ ID NO: 17578 - RNA, 17 nt, Homo sapiens
auucaggaugcccacgg

SEQ ID NO: 17579 - RNA, 14 nt, Homo sapiens
caccugugccgucc

SEQ ID NO: 17580 - RNA, 21 nt, Homo sapiens
caccugugccguccccagagc

SEQ ID NO: 17581 - RNA, 14 nt, Homo sapiens
cagcugagcagaug

SEQ ID NO: 17582 - RNA, 14 nt, Homo sapiens
caggaugcccacgg

SEQ ID NO: 17583 - RNA, 14 nt, Homo sapiens
caggccccaucugg

SEQ ID NO: 17584 - RNA, 18 nt, Homo sapiens
caggccccaucugguccu

SEQ ID NO: 17585 - RNA, 15 nt, Homo sapiens
cauucaggaugccca

SEQ ID NO: 17586 - RNA, 22 nt, Homo sapiens
cauucaggaugcccacggcugg

SEQ ID NO: 17587 - RNA, 13 nt, Homo sapiens
ccagagcuacagg

SEQ ID NO: 17588 - RNA, 14 nt, Homo sapiens
ccagagcuacaggc

SEQ ID NO: 17589 - RNA, 17 nt, Homo sapiens
ccagagcuacaggcccc

SEQ ID NO: 17590 - RNA, 20 nt, Homo sapiens
ccauucaggaugcccacggc

SEQ ID NO: 17591 - RNA, 21 nt, Homo sapiens
ccauucaggaugcccacggcu

SEQ ID NO: 17592 - RNA, 22 nt, Homo sapiens
ccauucaggaugcccacggcug

SEQ ID NO: 17593 - RNA, 13 nt, Homo sapiens
cccacacugucca

SEQ ID NO: 17594 - RNA, 13 nt, Homo sapiens
cccacggcuggag

SEQ ID NO: 17595 - RNA, 18 nt, Homo sapiens
ccccagagcuacaggccc

SEQ ID NO: 17596 - RNA, 19 nt, Homo sapiens
ccccagagcuacaggcccc

SEQ ID NO: 17597 - RNA, 20 nt, Homo sapiens
ccccagagcuacaggcccca

SEQ ID NO: 17598 - RNA, 19 nt, Homo sapiens
cccauucaggaugcccacg

SEQ ID NO: 17599 - RNA, 18 nt, Homo sapiens
cccuucccacacugucca

SEQ ID NO: 17600 - RNA, 15 nt, Homo sapiens
ccgguccuugcugca

SEQ ID NO: 17601 - RNA, 14 nt, Homo sapiens
ccuaagucccugcu

SEQ ID NO: 17602 - RNA, 15 nt, Homo sapiens
ccuaagucccugcug

SEQ ID NO: 17603 - RNA, 16 nt, Homo sapiens
ccuaagucccugcugc

SEQ ID NO: 17604 - RNA, 19 nt, Homo sapiens
ccuaagucccugcugcccu

SEQ ID NO: 17605 - RNA, 19 nt, Homo sapiens
ccucccauucaggaugccc

SEQ ID NO: 17606 - RNA, 14 nt, Homo sapiens
ccucucucauccac

SEQ ID NO: 17607 - RNA, 15 nt, Homo sapiens
cgguccuugcugcac

SEQ ID NO: 17608 - RNA, 21 nt, Homo sapiens
cguccccagagcuacaggccc

SEQ ID NO: 17609 - RNA, 14 nt, Homo sapiens
cuaagucccugcug

SEQ ID NO: 17610 - RNA, 18 nt, Homo sapiens
cuaugaauaaauuuucuu

SEQ ID NO: 17611 - RNA, 14 nt, Homo sapiens
cuauuuacggaacu

SEQ ID NO: 17612 - RNA, 11 nt, Homo sapiens
cucccauucag

SEQ ID NO: 17613 - RNA, 12 nt, Homo sapiens
cucccauucagg

SEQ ID NO: 17614 - RNA, 15 nt, Homo sapiens
cugcugcccuucccc

SEQ ID NO: 17615 - RNA, 20 nt, Homo sapiens
cugguccuaagucccugcug

SEQ ID NO: 17616 - RNA, 22 nt, Homo sapiens
cugguccuaagucccugcugcc

SEQ ID NO: 17617 - RNA, 24 nt, Homo sapiens
gaacucaaauacgugggcauucaa

SEQ ID NO: 17618 - RNA, 18 nt, Homo sapiens
gagcugccucucucaucc

SEQ ID NO: 17619 - RNA, 19 nt, Homo sapiens
gagcugccucucucaucca

SEQ ID NO: 17620 - RNA, 12 nt, Homo sapiens
gaugcccacggc

SEQ ID NO: 17621 - RNA, 13 nt, Homo sapiens
gaugcccacggcu

SEQ ID NO: 17622 - RNA, 16 nt, Homo sapiens
gaugcccacggcugga

SEQ ID NO: 17623 - RNA, 17 nt, Homo sapiens
gcaccugugccgucccc

SEQ ID NO: 17624 - RNA, 23 nt, Homo sapiens
gcagauguaauagaaauaaaccu

SEQ ID NO: 17625 - RNA, 18 nt, Homo sapiens
gcccacggcuggagcugc

SEQ ID NO: 17626 - RNA, 15 nt, Homo sapiens
gccccaucugguccu

SEQ ID NO: 17627 - RNA, 17 nt, Homo sapiens
gccgguccuugcugcac

SEQ ID NO: 17628 - RNA, 19 nt, Homo sapiens
gccgguccuugcugcaccu

SEQ ID NO: 17629 - RNA, 20 nt, Homo sapiens
gccguccccagagcuacagg

SEQ ID NO: 17630 - RNA, 12 nt, Homo sapiens
gcuacaggcccc

SEQ ID NO: 17631 - RNA, 14 nt, Homo sapiens
gcuacaggccccau

SEQ ID NO: 17632 - RNA, 18 nt, Homo sapiens
gcuacaggccccaucugg

SEQ ID NO: 17633 - RNA, 14 nt, Homo sapiens
gcuacuuauuguag

SEQ ID NO: 17634 - RNA, 22 nt, Homo sapiens
gcuagaauuugauaugugaaca

SEQ ID NO: 17635 - RNA, 13 nt, Homo sapiens
gcugcaccugugc

SEQ ID NO: 17636 - RNA, 15 nt, Homo sapiens
gcugcaccugugccg

SEQ ID NO: 17637 - RNA, 13 nt, Homo sapiens
gcugagcagaugu

SEQ ID NO: 17638 - RNA, 22 nt, Homo sapiens
ggagcugccucucucauccacu

SEQ ID NO: 17639 - RNA, 14 nt, Homo sapiens
gggagcuuuuguag

SEQ ID NO: 17640 - RNA, 16 nt, Homo sapiens
gguccuaagucccugc

SEQ ID NO: 17641 - RNA, 19 nt, Homo sapiens
gguccuaagucccugcugc

SEQ ID NO: 17642 - RNA, 22 nt, Homo sapiens
gguccuaagucccugcugcccu

SEQ ID NO: 17643 - RNA, 23 nt, Homo sapiens
gguccuaagucccugcugcccuu

SEQ ID NO: 17644 - RNA, 20 nt, Homo sapiens
guccuaagucccugcugccc

SEQ ID NO: 17645 - RNA, 12 nt, Homo sapiens
gucccugcugcc

SEQ ID NO: 17646 - RNA, 13 nt, Homo sapiens
gucccugcugccc

SEQ ID NO: 17647 - RNA, 23 nt, Homo sapiens
guccauucuuccucccauucagg

SEQ ID NO: 17648 - RNA, 19 nt, Homo sapiens
guuuggacaaaauggaaua

SEQ ID NO: 17649 - RNA, 17 nt, Homo sapiens
uaaauagcuuuuuucuc

SEQ ID NO: 17650 - RNA, 15 nt, Homo sapiens
ucaacucauauuuuc

SEQ ID NO: 17651 - RNA, 12 nt, Homo sapiens
ucaggaugccca

SEQ ID NO: 17652 - RNA, 15 nt, Homo sapiens
ucaggaugcccacgg

SEQ ID NO: 17653 - RNA, 16 nt, Homo sapiens
ucaggaugcccacggc

SEQ ID NO: 17654 - RNA, 15 nt, Homo sapiens
ucccauucaggaugc

SEQ ID NO: 17655 - RNA, 17 nt, Homo sapiens
ucccauucaggaugccc

SEQ ID NO: 17656 - RNA, 22 nt, Homo sapiens
ucccauucaggaugcccacggc

SEQ ID NO: 17657 - RNA, 23 nt, Homo sapiens
ucccauucaggaugcccacggcu

SEQ ID NO: 17658 - RNA, 15 nt, Homo sapiens
uccccuucccacacu

SEQ ID NO: 17659 - RNA, 16 nt, Homo sapiens
ucccugcugcccuucc

SEQ ID NO: 17660 - RNA, 16 nt, Homo sapiens
uccuaagucccugcug

SEQ ID NO: 17661 - RNA, 17 nt, Homo sapiens
uccuaagucccugcugc

SEQ ID NO: 17662 - RNA, 18 nt, Homo sapiens
uucaggaugcccacggcu

SEQ ID NO: 17663 - RNA, 13 nt, Homo sapiens
uugcugcaccugu

SEQ ID NO: 17664 - RNA, 17 nt, Homo sapiens
uugcugcaccugugccg

SEQ ID NO: 17665 - RNA, 16 nt, Homo sapiens
aauacucuuauaucua

SEQ ID NO: 17666 - RNA, 12 nt, Homo sapiens
ggaaacaaguca

SEQ ID NO: 17667 - RNA, 17 nt, Homo sapiens
uauuuuuuucugaaauu

SEQ ID NO: 17668 - RNA, 19 nt, Homo sapiens
uaaauaucuagaaaugaua

SEQ ID NO: 17669 - RNA, 14 nt, Homo sapiens
cuucccacacuguc

SEQ ID NO: 17670 - RNA, 17 nt, Homo sapiens
aaguaaacggucucuca

SEQ ID NO: 17671 - RNA, 15 nt, Homo sapiens
acugucaauuuggca

SEQ ID NO: 17672 - RNA, 19 nt, Homo sapiens
uuagcaaaucuacugucaa

SEQ ID NO: 17673 - RNA, 17 nt, Homo sapiens
cugcaacucugaagggu

SEQ ID NO: 17674 - RNA, 15 nt, Homo sapiens
cucauccacuuucca

SEQ ID NO: 17675 - RNA, 17 nt, Homo sapiens
augaagauacugaaaua

SEQ ID NO: 17676 - RNA, 15 nt, Homo sapiens
cggcuggagcugccu

SEQ ID NO: 17677 - RNA, 19 nt, Homo sapiens
uggcuugccucuugcaauu

SEQ ID NO: 17678 - RNA, 20 nt, Homo sapiens
uuaauuugguuuucacauug

SEQ ID NO: 17679 - RNA, 15 nt, Homo sapiens
ugagcagauguaaua

SEQ ID NO: 17680 - RNA, 17 nt, Homo sapiens
gaacaggauauucucac

SEQ ID NO: 17681 - RNA, 17 nt, Homo sapiens
ucuugcaauucaauaca

SEQ ID NO: 17682 - RNA, 14 nt, Homo sapiens
gugcacuaaugugu

SEQ ID NO: 17683 - RNA, 22 nt, Homo sapiens
agugcuuugagauugugaaauu

SEQ ID NO: 17684 - RNA, 22 nt, Homo sapiens
gaucaaguuauuuuuaauuugg

SEQ ID NO: 17685 - RNA, 15 nt, Homo sapiens
auuugauaugugaac

SEQ ID NO: 17686 - RNA, 17 nt, Homo sapiens
ugcccuuccccuuccca

SEQ ID NO: 17687 - RNA, 17 nt, Homo sapiens
uuguuucagugcacuaa

SEQ ID NO: 17688 - RNA, 23 nt, Homo sapiens
gcugagcagauguaauagaaaua

SEQ ID NO: 17689 - RNA, 22 nt, Homo sapiens
uggacaaaauggaauacucuua

SEQ ID NO: 17690 - RNA, 14 nt, Homo sapiens
agguuuggacaaaa

SEQ ID NO: 17691 - RNA, 12 nt, Homo sapiens
cugaaauuuccu

SEQ ID NO: 17692 - RNA, 19 nt, Homo sapiens
auuuucaugcuguucauga

SEQ ID NO: 17693 - RNA, 18 nt, Homo sapiens
caaaucuacugucaauuu

SEQ ID NO: 17694 - RNA, 22 nt, Homo sapiens
uggcuugccucuugcaauucaa

SEQ ID NO: 17695 - RNA, 15 nt, Homo sapiens
auccuggaauaucuc

SEQ ID NO: 17696 - RNA, 17 nt, Homo sapiens
guccccagagcuacagg

SEQ ID NO: 17697 - RNA, 22 nt, Homo sapiens
uuaagagagucuauuuacggaa

SEQ ID NO: 17698 - RNA, 21 nt, Homo sapiens
ugaagcacagugaucaaguua

SEQ ID NO: 17699 - RNA, 16 nt, Homo sapiens
caagucagucauucag

SEQ ID NO: 17700 - RNA, 17 nt, Homo sapiens
uccccagagcuacaggc

SEQ ID NO: 17701 - RNA, 16 nt, Homo sapiens
uguagcauccuggaau

SEQ ID NO: 17702 - RNA, 19 nt, Homo sapiens
acaaaauggaauacucuua

SEQ ID NO: 17703 - RNA, 21 nt, Homo sapiens
ggcuggagcugccucucucau

SEQ ID NO: 17704 - RNA, 23 nt, Homo sapiens
ugcuggcuugccucuugcaauuc

SEQ ID NO: 17705 - RNA, 15 nt, Homo sapiens
uccccagagcuacag

SEQ ID NO: 17706 - RNA, 20 nt, Homo sapiens
acaaaauggaauacucuuau

SEQ ID NO: 17707 - RNA, 22 nt, Homo sapiens
uaaaccgaacugauguaaguaa

SEQ ID NO: 17708 - RNA, 21 nt, Homo sapiens
cuucccacacuguccauucuu

SEQ ID NO: 17709 - RNA, 14 nt, Homo sapiens
uggaauacucuuau

SEQ ID NO: 17710 - RNA, 16 nt, Homo sapiens
gaaauaaaccuaugaa

SEQ ID NO: 17711 - RNA, 14 nt, Homo sapiens
ucauccacuuucca

SEQ ID NO: 17712 - RNA, 17 nt, Homo sapiens
cauccuggaauaucucc

SEQ ID NO: 17713 - RNA, 18 nt, Homo sapiens
uuccccuucccacacugu

SEQ ID NO: 17714 - RNA, 15 nt, Homo sapiens
uaaaccuaugaauaa

SEQ ID NO: 17715 - RNA, 17 nt, Homo sapiens
gaaauaaaccuaugaau

SEQ ID NO: 17716 - RNA, 14 nt, Homo sapiens
uagguuuggacaaa

SEQ ID NO: 17717 - RNA, 16 nt, Homo sapiens
acaagucagucauuca

SEQ ID NO: 17718 - RNA, 16 nt, Homo sapiens
uagaagucacauuccu

SEQ ID NO: 17719 - RNA, 15 nt, Homo sapiens
ucauccacuuuccaa

SEQ ID NO: 17720 - RNA, 13 nt, Homo sapiens
agcuagaauuuga

SEQ ID NO: 17721 - RNA, 21 nt, Homo sapiens
aaaagcuacuuauuguagcau

SEQ ID NO: 17722 - RNA, 11 nt, Homo sapiens
auucaaaugua

SEQ ID NO: 17723 - RNA, 14 nt, Homo sapiens
uuuuacauggcugg

SEQ ID NO: 17724 - RNA, 13 nt, Homo sapiens
ucucauccacuuu

SEQ ID NO: 17725 - RNA, 16 nt, Homo sapiens
cugagcagauguaaua

SEQ ID NO: 17726 - RNA, 14 nt, Homo sapiens
cucucucauccacu

SEQ ID NO: 17727 - RNA, 18 nt, Homo sapiens
ccaauaaagaguuccuuc

SEQ ID NO: 17728 - RNA, 11 nt, Homo sapiens
ccuaugaauaa

SEQ ID NO: 17729 - RNA, 18 nt, Homo sapiens
auaucuagaaaugauaau

SEQ ID NO: 17730 - RNA, 23 nt, Homo sapiens
uagguuuggacaaaauggaauac

SEQ ID NO: 17731 - RNA, 19 nt, Homo sapiens
gaaacaagucagucauuca

SEQ ID NO: 17732 - RNA, 17 nt, Homo sapiens
uguguaagacaaaaagc

SEQ ID NO: 17733 - RNA, 16 nt, Homo sapiens
uuucuaggacugaauu

SEQ ID NO: 17734 - RNA, 22 nt, Homo sapiens
uggaaacaagucagucauucag

SEQ ID NO: 17735 - RNA, 15 nt, Homo sapiens
gaaauaaaccuauga

SEQ ID NO: 17736 - RNA, 12 nt, Homo sapiens
auccuggaauau

SEQ ID NO: 17737 - RNA, 16 nt, Homo sapiens
aauuucuaggacugaa

SEQ ID NO: 17738 - RNA, 13 nt, Homo sapiens
ugaagauacugaa

SEQ ID NO: 17739 - RNA, 17 nt, Homo sapiens
uucaaugccccugaauu

SEQ ID NO: 17740 - RNA, 21 nt, Homo sapiens
ccucucucauccacuuuccaa

SEQ ID NO: 17741 - RNA, 21 nt, Homo sapiens
acauggcuggagcuagaauuu

SEQ ID NO: 17742 - RNA, 14 nt, Homo sapiens
cucugaaggguaau

SEQ ID NO: 17743 - RNA, 14 nt, Homo sapiens
aaaauggaauacuc

SEQ ID NO: 17744 - RNA, 12 nt, Homo sapiens
aauaaaccuaug

SEQ ID NO: 17745 - RNA, 12 nt, Homo sapiens
gauaugauucaa

SEQ ID NO: 17746 - RNA, 20 nt, Homo sapiens
cuuauuguagcauccuggaa

SEQ ID NO: 17747 - RNA, 13 nt, Homo sapiens
ugauaauuugcua

SEQ ID NO: 17748 - RNA, 17 nt, Homo sapiens
ccucuaaauucuuucau

SEQ ID NO: 17749 - RNA, 21 nt, Homo sapiens
ucuugcaauucaauacagauc

SEQ ID NO: 17750 - RNA, 24 nt, Homo sapiens
acauuccugaacaggauauucuca

SEQ ID NO: 17751 - RNA, 21 nt, Homo sapiens
gagccgguccuugcugcaccu

SEQ ID NO: 17752 - RNA, 15 nt, Homo sapiens
auuucuaggacugaa

SEQ ID NO: 17753 - RNA, 17 nt, Homo sapiens
guucaugaaagauucaa

SEQ ID NO: 17754 - RNA, 13 nt, Homo sapiens
cacagugaucaag

SEQ ID NO: 17755 - RNA, 23 nt, Homo sapiens
gcccuuccccuucccacacuguc

SEQ ID NO: 17756 - RNA, 20 nt, Homo sapiens
ucuauaaaccgaacugaugu

SEQ ID NO: 17757 - RNA, 11 nt, Homo sapiens
uccuugcugca

SEQ ID NO: 17758 - RNA, 23 nt, Homo sapiens
uuaaauagcuuuuuucucugaua

SEQ ID NO: 17759 - RNA, 18 nt, Homo sapiens
uuucaugcuguucaugaa

SEQ ID NO: 17760 - RNA, 17 nt, Homo sapiens
gguccuugcugcaccug

SEQ ID NO: 17761 - RNA, 17 nt, Homo sapiens
agucauucagauaugau

SEQ ID NO: 17762 - RNA, 17 nt, Homo sapiens
ucaauuuggcagugaua

SEQ ID NO: 17763 - RNA, 13 nt, Homo sapiens
aacggucucucac

SEQ ID NO: 17764 - RNA, 16 nt, Homo sapiens
ugaacaggauauucuc

SEQ ID NO: 17765 - RNA, 15 nt, Homo sapiens
uugccucuugcaauu

SEQ ID NO: 17766 - RNA, 14 nt, Homo sapiens
agcugccucucuca

SEQ ID NO: 17767 - RNA, 14 nt, Homo sapiens
ccccaucugguccu

SEQ ID NO: 17768 - RNA, 19 nt, Homo sapiens
uauuuaauagguuuggaca

SEQ ID NO: 17769 - RNA, 16 nt, Homo sapiens
ucauaauaaauaucua

SEQ ID NO: 17770 - RNA, 19 nt, Homo sapiens
uagaagucacauuccugaa

SEQ ID NO: 17771 - RNA, 15 nt, Homo sapiens
acgugggcauucaaa

SEQ ID NO: 17772 - RNA, 13 nt, Homo sapiens
aaaaagcuacuua

SEQ ID NO: 17773 - RNA, 16 nt, Homo sapiens
cccagagcuacaggcc

SEQ ID NO: 17774 - RNA, 23 nt, Homo sapiens
agauucaaugccccugaauuuaa

SEQ ID NO: 17775 - RNA, 17 nt, Homo sapiens
uugcuuuucaacacaca

SEQ ID NO: 17776 - RNA, 12 nt, Homo sapiens
ucccacacuguc

SEQ ID NO: 17777 - RNA, 14 nt, Homo sapiens
cuuccucccauuca

SEQ ID NO: 17778 - RNA, 17 nt, Homo sapiens
gcccuuccccuucccac

SEQ ID NO: 17779 - RNA, 16 nt, Homo sapiens
auuucuaggacugaau

SEQ ID NO: 17780 - RNA, 17 nt, Homo sapiens
ccuucccacacugucca

SEQ ID NO: 17781 - RNA, 19 nt, Homo sapiens
uaaccucuaaauucuuuca

SEQ ID NO: 17782 - RNA, 19 nt, Homo sapiens
ucugguccuaagucccugc

SEQ ID NO: 17783 - RNA, 21 nt, Homo sapiens
uguaaguaaacggucucucac

SEQ ID NO: 17784 - RNA, 16 nt, Homo sapiens
ggcuggagcugccucu

SEQ ID NO: 17785 - RNA, 22 nt, Homo sapiens
agagucuauuuacggaacucaa

SEQ ID NO: 17786 - RNA, 15 nt, Homo sapiens
caagucagucauuca

SEQ ID NO: 17787 - RNA, 23 nt, Homo sapiens
agagucuauuuacggaacucaaa

SEQ ID NO: 17788 - RNA, 19 nt, Homo sapiens
acuaauguguaagacaaaa

SEQ ID NO: 17789 - RNA, 13 nt, Homo sapiens
cauccacuuucca

SEQ ID NO: 17790 - RNA, 16 nt, Homo sapiens
gaguuccuucugcucc

SEQ ID NO: 17791 - RNA, 20 nt, Homo sapiens
uagcaaaucuacugucaauu

SEQ ID NO: 17792 - RNA, 22 nt, Homo sapiens
acuuauuguagcauccuggaau

SEQ ID NO: 17793 - RNA, 20 nt, Homo sapiens
uacagaaaaguugaauuuua

SEQ ID NO: 17794 - RNA, 21 nt, Homo sapiens
gucuauuuacggaacucaaau

SEQ ID NO: 17795 - RNA, 17 nt, Homo sapiens
gaaaaggugucuugcug

SEQ ID NO: 17796 - RNA, 16 nt, Homo sapiens
cuucuugguucugaaa

SEQ ID NO: 17797 - RNA, 18 nt, Homo sapiens
cuauuuacggaacucaaa

SEQ ID NO: 17798 - RNA, 21 nt, Homo sapiens
uuagugcuuugagauugugaa

SEQ ID NO: 17799 - RNA, 22 nt, Homo sapiens
uuuguagaagucacauuccuga

SEQ ID NO: 17800 - RNA, 17 nt, Homo sapiens
uuuaauuugguuuucac

SEQ ID NO: 17801 - RNA, 13 nt, Homo sapiens
gaaagauucaaug

SEQ ID NO: 17802 - RNA, 19 nt, Homo sapiens
acagcuccaagaauuucua

SEQ ID NO: 17803 - RNA, 19 nt, Homo sapiens
cucugaaggguaauuauau

SEQ ID NO: 17804 - RNA, 13 nt, Homo sapiens
ugcugcaccugug

SEQ ID NO: 17805 - RNA, 23 nt, Homo sapiens
cucaaauacgugggcauucaaau

SEQ ID NO: 17806 - RNA, 17 nt, Homo sapiens
aaacgucuuaaauauuc

SEQ ID NO: 17807 - RNA, 15 nt, Homo sapiens
agauacugaaauaaa

SEQ ID NO: 17808 - RNA, 13 nt, Homo sapiens
cccacacugucca

SEQ ID NO: 17809 - RNA, 12 nt, Homo sapiens
ccuugcugcacc

SEQ ID NO: 17810 - RNA, 14 nt, Homo sapiens
uucaauacagauca

SEQ ID NO: 17811 - RNA, 13 nt, Homo sapiens
ugcccuuccccuu

SEQ ID NO: 17812 - RNA, 13 nt, Homo sapiens
aagacaaaaagcu

SEQ ID NO: 17813 - RNA, 15 nt, Homo sapiens
auuuggcagugauau

SEQ ID NO: 17814 - RNA, 23 nt, Homo sapiens
cuaaauucuuucauuuuaggggu

SEQ ID NO: 17815 - RNA, 13 nt, Homo sapiens
uaaaccuaugaau

SEQ ID NO: 17816 - RNA, 21 nt, Homo sapiens
gagcuuuuguagaagucacau

SEQ ID NO: 17817 - RNA, 14 nt, Homo sapiens
augauucaaauguc

SEQ ID NO: 17818 - RNA, 13 nt, Homo sapiens
cugcaacucugaa

SEQ ID NO: 17819 - RNA, 15 nt, Homo sapiens
aaaugauaauuugcu

SEQ ID NO: 17820 - RNA, 9 nt, Homo sapiens
acacugucc

SEQ ID NO: 17821 - RNA, 17 nt, Homo sapiens
uuguagaagucacauuc

SEQ ID NO: 17822 - RNA, 15 nt, Homo sapiens
ucaaugccccugaau

SEQ ID NO: 17823 - RNA, 23 nt, Homo sapiens
agcauccuggaauaucuccguca

SEQ ID NO: 17824 - RNA, 18 nt, Homo sapiens
gcuggcuugccucuugca

SEQ ID NO: 17825 - RNA, 21 nt, Homo sapiens
cagaucaguuuagcaaaucua

SEQ ID NO: 17826 - RNA, 19 nt, Homo sapiens
uguuugaagcacagugauc

SEQ ID NO: 17827 - RNA, 20 nt, Homo sapiens
gucauucagauaugauucaa

SEQ ID NO: 17828 - RNA, 13 nt, Homo sapiens
auguguaagacaa

SEQ ID NO: 17829 - RNA, 18 nt, Homo sapiens
ggaaacaagucagucauu

SEQ ID NO: 17830 - RNA, 22 nt, Homo sapiens
cacuacagcugagcagauguaa

SEQ ID NO: 17831 - RNA, 12 nt, Homo sapiens
cucuugcaauuc

SEQ ID NO: 17832 - RNA, 17 nt, Homo sapiens
aacaagucagucauuca

SEQ ID NO: 17833 - RNA, 14 nt, Homo sapiens
cuuuucaacacaca

SEQ ID NO: 17834 - RNA, 15 nt, Homo sapiens
ggaagguauuuaaua

SEQ ID NO: 17835 - RNA, 23 nt, Homo sapiens
auaaauuuucuucuugguucuga

SEQ ID NO: 17836 - RNA, 20 nt, Homo sapiens
gggagcuuuuguagaaguca

SEQ ID NO: 17837 - RNA, 16 nt, Homo sapiens
uuguguuugaagcaca

SEQ ID NO: 17838 - RNA, 14 nt, Homo sapiens
uauuuucaugcugu

SEQ ID NO: 17839 - RNA, 20 nt, Homo sapiens
agguuuggacaaaauggaau

SEQ ID NO: 17840 - RNA, 15 nt, Homo sapiens
uuggaagguauuuaa

SEQ ID NO: 17841 - RNA, 17 nt, Homo sapiens
caauucaauacagauca

SEQ ID NO: 17842 - RNA, 15 nt, Homo sapiens
auguguaagacaaaa

SEQ ID NO: 17843 - RNA, 16 nt, Homo sapiens
cuagaauuugauaugu

SEQ ID NO: 17844 - RNA, 22 nt, Homo sapiens
uguaagacaaaaagcuacuuau

SEQ ID NO: 17845 - RNA, 15 nt, Homo sapiens
aaaauggaauacucu

SEQ ID NO: 17846 - RNA, 18 nt, Homo sapiens
cauuggaaacaagucagu

SEQ ID NO: 17847 - RNA, 16 nt, Homo sapiens
uccauucuuccuccca

SEQ ID NO: 17848 - RNA, 17 nt, Homo sapiens
agucagucauucagaua

SEQ ID NO: 17849 - RNA, 21 nt, Homo sapiens
ugaauaaauuuucuucuuggu

SEQ ID NO: 17850 - RNA, 18 nt, Homo sapiens
auaaauaucuagaaauga

SEQ ID NO: 17851 - RNA, 16 nt, Homo sapiens
ggagcuagaauuugau

SEQ ID NO: 17852 - RNA, 15 nt, Homo sapiens
acaaaaagcuacuua

SEQ ID NO: 17853 - RNA, 17 nt, Homo sapiens
uuucagugcacuaaugu

SEQ ID NO: 17854 - RNA, 19 nt, Homo sapiens
gcuggagcugccucucuca

SEQ ID NO: 17855 - RNA, 23 nt, Homo sapiens
cugccucucucauccacuuucca

SEQ ID NO: 17856 - RNA, 21 nt, Homo sapiens
ucccacacuguccauucuucc

SEQ ID NO: 17857 - RNA, 22 nt, Homo sapiens
gaagagguuuuaaagcuuccau

SEQ ID NO: 17858 - RNA, 14 nt, Homo sapiens
uucaaauguauuac

SEQ ID NO: 17859 - RNA, 12 nt, Homo sapiens
uucccacacugu

SEQ ID NO: 17860 - RNA, 14 nt, Homo sapiens
agauaugauucaaa

SEQ ID NO: 17861 - RNA, 13 nt, Homo sapiens
uucccacacuguc

SEQ ID NO: 17862 - RNA, 15 nt, Homo sapiens
cuccaagaauuucua

SEQ ID NO: 17863 - RNA, 17 nt, Homo sapiens
cuaauguguaagacaaa

SEQ ID NO: 17864 - RNA, 23 nt, Homo sapiens
ucauguuuuugcuuuucaacaca

SEQ ID NO: 17865 - RNA, 20 nt, Homo sapiens
uguaauagaaauaaaccuau

SEQ ID NO: 17866 - RNA, 21 nt, Homo sapiens
uagcaaaucuacugucaauuu

SEQ ID NO: 17867 - RNA, 14 nt, Homo sapiens
ucuugguucugaaa

SEQ ID NO: 17868 - RNA, 21 nt, Homo sapiens
gggaaugaagauacugaaaua

SEQ ID NO: 17869 - RNA, 22 nt, Homo sapiens
uuaaauagcuuuuuucucugau

SEQ ID NO: 17870 - RNA, 13 nt, Homo sapiens
aauuauauaguua

SEQ ID NO: 17871 - RNA, 19 nt, Homo sapiens
cuuuucaacacacaaagca

SEQ ID NO: 17872 - RNA, 13 nt, Homo sapiens
aggacugaauuau

SEQ ID NO: 17873 - RNA, 14 nt, Homo sapiens
cuguccauucuucc

SEQ ID NO: 17874 - RNA, 22 nt, Homo sapiens
uuuggcagugauauucaucaua

SEQ ID NO: 17875 - RNA, 19 nt, Homo sapiens
aauaucuccgucaacucau

SEQ ID NO: 17876 - RNA, 18 nt, Homo sapiens
agcuagaauuugauaugu

SEQ ID NO: 17877 - RNA, 14 nt, Homo sapiens
gcuccaagaauuuc

SEQ ID NO: 17878 - RNA, 19 nt, Homo sapiens
aauuucuaggacugaauua

SEQ ID NO: 17879 - RNA, 17 nt, Homo sapiens
cagucauucagauauga

SEQ ID NO: 17880 - RNA, 15 nt, Homo sapiens
uucuucuugguucug

SEQ ID NO: 17881 - RNA, 20 nt, Homo sapiens
aauuuucuucuugguucuga

SEQ ID NO: 17882 - RNA, 19 nt, Homo sapiens
guccccagagcuacaggcc

SEQ ID NO: 17883 - RNA, 16 nt, Homo sapiens
ccuuccccuucccaca

SEQ ID NO: 17884 - RNA, 15 nt, Homo sapiens
uucccacacugucca

SEQ ID NO: 17885 - RNA, 18 nt, Homo sapiens
auauuuuuuucugaaauu

SEQ ID NO: 17886 - RNA, 15 nt, Homo sapiens
aaaaggugucuugcu

SEQ ID NO: 17887 - RNA, 14 nt, Homo sapiens
ccucuugcaauuca

SEQ ID NO: 17888 - RNA, 15 nt, Homo sapiens
ugccucuugcaauuc

SEQ ID NO: 17889 - RNA, 17 nt, Homo sapiens
aauagaaauaaaccuau

SEQ ID NO: 17890 - RNA, 23 nt, Homo sapiens
gagagucuauuuacggaacucaa

SEQ ID NO: 17891 - RNA, 20 nt, Homo sapiens
caauuuggcagugauauuca

SEQ ID NO: 17892 - RNA, 14 nt, Homo sapiens
cugauguaaguaaa

SEQ ID NO: 17893 - RNA, 20 nt, Homo sapiens
uuucucugauacagaaaagu

SEQ ID NO: 17894 - RNA, 18 nt, Homo sapiens
accucuaaauucuuucau

SEQ ID NO: 17895 - RNA, 15 nt, Homo sapiens
aucuauauuuuacau

SEQ ID NO: 17896 - RNA, 17 nt, Homo sapiens
uucagauaugauucaaa

SEQ ID NO: 17897 - RNA, 19 nt, Homo sapiens
ccugaauuuaaauagcuuu

SEQ ID NO: 17898 - RNA, 23 nt, Homo sapiens
aaugccccugaauuuaaauagcu

SEQ ID NO: 17899 - RNA, 15 nt, Homo sapiens
cauauuuucaugcug

SEQ ID NO: 17900 - RNA, 15 nt, Homo sapiens
aauuuaaauagcuuu

SEQ ID NO: 17901 - RNA, 14 nt, Homo sapiens
agcuuuuguagaag

SEQ ID NO: 17902 - RNA, 16 nt, Homo sapiens
aaucuacugucaauuu

SEQ ID NO: 17903 - RNA, 15 nt, Homo sapiens
aguuccuucugcucc

SEQ ID NO: 17904 - RNA, 16 nt, Homo sapiens
uggagcuagaauuuga

SEQ ID NO: 17905 - RNA, 19 nt, Homo sapiens
guaaguaaacggucucuca

SEQ ID NO: 17906 - RNA, 23 nt, Homo sapiens
auuuaaauagcuuuuuucucuga

SEQ ID NO: 17907 - RNA, 14 nt, Homo sapiens
ucccacacugucca

SEQ ID NO: 17908 - RNA, 17 nt, Homo sapiens
cauaaauuuaguauuuu

SEQ ID NO: 17909 - RNA, 17 nt, Homo sapiens
uuuugcuuuucaacaca

SEQ ID NO: 17910 - RNA, 11 nt, Homo sapiens
acacuguccau

SEQ ID NO: 17911 - RNA, 22 nt, Homo sapiens
uguaauagaaauaaaccuauga

SEQ ID NO: 17912 - RNA, 18 nt, Homo sapiens
ugccucucucauccacuu

SEQ ID NO: 17913 - RNA, 13 nt, Homo sapiens
ggcuggagcugcc

SEQ ID NO: 17914 - RNA, 21 nt, Homo sapiens
aaguugaauuuuacauggcug

SEQ ID NO: 17915 - RNA, 16 nt, Homo sapiens
aauguguaagacaaaa

SEQ ID NO: 17916 - RNA, 22 nt, Homo sapiens
uaauagaaauaaaccuaugaau

SEQ ID NO: 17917 - RNA, 18 nt, Homo sapiens
ggaggaaaaggugucuug

SEQ ID NO: 17918 - RNA, 15 nt, Homo sapiens
guaaacggucucuca

SEQ ID NO: 17919 - RNA, 18 nt, Homo sapiens
uccaauaaagaguuccuu

SEQ ID NO: 17920 - RNA, 21 nt, Homo sapiens
auaaauuuucuucuugguucu

SEQ ID NO: 17921 - RNA, 18 nt, Homo sapiens
uuaagagagucuauuuac

SEQ ID NO: 17922 - RNA, 22 nt, Homo sapiens
auauuuuuuucugaaauuuccu

SEQ ID NO: 17923 - RNA, 19 nt, Homo sapiens
ucaucauaauaaauaucua

SEQ ID NO: 17924 - RNA, 23 nt, Homo sapiens
cucuugcaauucaauacagauca

SEQ ID NO: 17925 - RNA, 22 nt, Homo sapiens
acugucaauuuggcagugauau

SEQ ID NO: 17926 - RNA, 14 nt, Homo sapiens
cuucuugguucuga

SEQ ID NO: 17927 - RNA, 12 nt, Homo sapiens
aaaccuaugaau

SEQ ID NO: 17928 - RNA, 23 nt, Homo sapiens
aagauucaaugccccugaauuua

SEQ ID NO: 17929 - RNA, 22 nt, Homo sapiens
guaauuauauaguuacccaaau

SEQ ID NO: 17930 - RNA, 17 nt, Homo sapiens
ugaacaggauauucuca

SEQ ID NO: 17931 - RNA, 21 nt, Homo sapiens
auucuuccucccauucaggau

SEQ ID NO: 17932 - RNA, 18 nt, Homo sapiens
ucuaggacugaauuauga

SEQ ID NO: 17933 - RNA, 20 nt, Homo sapiens
cagcugagcagauguaauag

SEQ ID NO: 17934 - RNA, 18 nt, Homo sapiens
guucaugaaagauucaau

SEQ ID NO: 17935 - RNA, 18 nt, Homo sapiens
uucaucauaauaaauauc

SEQ ID NO: 17936 - RNA, 18 nt, Homo sapiens
aauagaaauaaaccuaug

SEQ ID NO: 17937 - RNA, 13 nt, Homo sapiens
cggaacucaaaua

SEQ ID NO: 17938 - RNA, 15 nt, Homo sapiens
aguugaauuuuacau

SEQ ID NO: 17939 - RNA, 14 nt, Homo sapiens
gaagcacagugauc

SEQ ID NO: 17940 - RNA, 20 nt, Homo sapiens
auaaaccuaugaauaaauuu

SEQ ID NO: 17941 - RNA, 18 nt, Homo sapiens
agaaauaaaccuaugaau

SEQ ID NO: 17942 - RNA, 16 nt, Homo sapiens
uugagauugugaaauu

SEQ ID NO: 17943 - RNA, 22 nt, Homo sapiens
ugccucucucauccacuuucca

SEQ ID NO: 17944 - RNA, 15 nt, Homo sapiens
cccuucccacacugu

SEQ ID NO: 17945 - RNA, 22 nt, Homo sapiens
uaaauauaaagcaagauaauaa

SEQ ID NO: 17946 - RNA, 14 nt, Homo sapiens
cuauuuaagagaac

SEQ ID NO: 17947 - RNA, 11 nt, Homo sapiens
aguuaagaauc

SEQ ID NO: 17948 - RNA, 14 nt, Homo sapiens
auaguucuacucca

SEQ ID NO: 17949 - RNA, 16 nt, Homo sapiens
accuuacuucuucuca

SEQ ID NO: 17950 - RNA, 21 nt, Homo sapiens
acaggaauuuucauuguucua

SEQ ID NO: 17951 - RNA, 13 nt, Homo sapiens
uguucuauaacaa

SEQ ID NO: 17952 - RNA, 23 nt, Homo sapiens
uaaauauaaagcaagauaauaaa

SEQ ID NO: 17953 - RNA, 21 nt, Homo sapiens
cgauuauuauuuuagagcauc

SEQ ID NO: 17954 - RNA, 22 nt, Homo sapiens
aguucuacuccauuaaauauaa

SEQ ID NO: 17955 - RNA, 15 nt, Homo sapiens
accuuacuucuucuc

SEQ ID NO: 17956 - RNA, 12 nt, Homo sapiens
aagcaaauauaa

SEQ ID NO: 17957 - RNA, 21 nt, Homo sapiens
aagaucugcaacuacuaucca

SEQ ID NO: 17958 - RNA, 21 nt, Homo sapiens
aaucuuuauaguucuacucca

SEQ ID NO: 17959 - RNA, 17 nt, Homo sapiens
uauuuuagagcaucuca

SEQ ID NO: 17960 - RNA, 19 nt, Homo sapiens
auuauuuuagagcaucuca

SEQ ID NO: 17961 - RNA, 18 nt, Homo sapiens
uauuuuagagcaucucau

SEQ ID NO: 17962 - RNA, 22 nt, Homo sapiens
uuuauaauguagcagcucauaa

SEQ ID NO: 17963 - RNA, 20 nt, Homo sapiens
cugcaacuacuauccaacuu

SEQ ID NO: 17964 - RNA, 18 nt, Homo sapiens
ccaagaagauaaucucca

SEQ ID NO: 17965 - RNA, 13 nt, Homo sapiens
uucauuguucuau

SEQ ID NO: 17966 - RNA, 22 nt, Homo sapiens
uguguuccuaacaggaauuuuc

SEQ ID NO: 17967 - RNA, 15 nt, Homo sapiens
ggcuuucccaacagc

SEQ ID NO: 17968 - RNA, 18 nt, Homo sapiens
acagcaacuuguguuccu

SEQ ID NO: 17969 - RNA, 16 nt, Homo sapiens
uaacaggaauuuucau

SEQ ID NO: 17970 - RNA, 21 nt, Homo sapiens
ccaagaagauaaucuccaaag

SEQ ID NO: 17971 - RNA, 22 nt, Homo sapiens
agcuccaccuuacuucuucuca

SEQ ID NO: 17972 - RNA, 15 nt, Homo sapiens
aagagaacaagcaaa

SEQ ID NO: 17973 - RNA, 18 nt, Homo sapiens
uaauguagcagcucauaa

SEQ ID NO: 17974 - RNA, 11 nt, Homo sapiens
agaucugcaac

SEQ ID NO: 17975 - RNA, 20 nt, Homo sapiens
ccaagaagauaaucuccaaa

SEQ ID NO: 17976 - RNA, 14 nt, Homo sapiens
guagcagcucauaa

SEQ ID NO: 17977 - RNA, 20 nt, Homo sapiens
agaucugcaacuacuaucca

SEQ ID NO: 17978 - RNA, 19 nt, Homo sapiens
uaacaacaacaacaaaagc

SEQ ID NO: 17979 - RNA, 18 nt, Homo sapiens
uuauaauguagcagcuca

SEQ ID NO: 17980 - RNA, 20 nt, Homo sapiens
acuucuucucauacuauuua

SEQ ID NO: 17981 - RNA, 18 nt, Homo sapiens
aagaucugcaacuacuau

SEQ ID NO: 17982 - RNA, 15 nt, Homo sapiens
gcuuucccaacagcu

SEQ ID NO: 17983 - RNA, 18 nt, Homo sapiens
uuauuuuagagcaucuca

SEQ ID NO: 17984 - RNA, 17 nt, Homo sapiens
aauguagcagcucauaa

SEQ ID NO: 17985 - RNA, 22 nt, Homo sapiens
accuuacuucuucucauacuau

SEQ ID NO: 17986 - RNA, 14 nt, Homo sapiens
agcagcucauaaau

SEQ ID NO: 17987 - RNA, 21 nt, Homo sapiens
auuuuagagcaucucauuuau

SEQ ID NO: 17988 - RNA, 14 nt, Homo sapiens
auguagcagcucau

SEQ ID NO: 17989 - RNA, 20 nt, Homo sapiens
caaaguuaagaaucuuuaua

SEQ ID NO: 17990 - RNA, 22 nt, Homo sapiens
cauuuauaauguagcagcucau

SEQ ID NO: 17991 - RNA, 17 nt, Homo sapiens
aacagcuccaccuuacu

SEQ ID NO: 17992 - RNA, 13 nt, Homo sapiens
uacuucuucucau

SEQ ID NO: 17993 - RNA, 21 nt, Homo sapiens
uuauuauuuuagagcaucuca

SEQ ID NO: 17994 - RNA, 21 nt, Homo sapiens
uauuauuuuagagcaucucau

SEQ ID NO: 17995 - RNA, 21 nt, Homo sapiens
cuaacaggaauuuucauuguu

SEQ ID NO: 17996 - RNA, 18 nt, Homo sapiens
ucaaaguuaagaaucuuu

SEQ ID NO: 17997 - RNA, 20 nt, Homo sapiens
ucaaaguuaagaaucuuuau

SEQ ID NO: 17998 - RNA, 16 nt, Homo sapiens
aagaucugcaacuacu

SEQ ID NO: 17999 - RNA, 17 nt, Homo sapiens
auuuuagagcaucucau

SEQ ID NO: 18000 - RNA, 17 nt, Homo sapiens
cuucucauacuauuuaa

SEQ ID NO: 18001 - RNA, 14 nt, Homo sapiens
aauauaaagcaaga

SEQ ID NO: 18002 - RNA, 18 nt, Homo sapiens
uuacuucuucucauacua

SEQ ID NO: 18003 - RNA, 13 nt, Homo sapiens
auuucugcuuuca

SEQ ID NO: 18004 - RNA, 20 nt, Homo sapiens
uaaagaucugcaacuacuau

SEQ ID NO: 18005 - RNA, 22 nt, Homo sapiens
uacuauuuaagagaacaagcaa

SEQ ID NO: 18006 - RNA, 17 nt, Homo sapiens
auuuaagagaacaagca

SEQ ID NO: 18007 - RNA, 13 nt, Homo sapiens
uuacuucuucuca

SEQ ID NO: 18008 - RNA, 22 nt, Homo sapiens
guucuauaacaacaacaacaaa

SEQ ID NO: 18009 - RNA, 14 nt, Homo sapiens
acaggaauuuucau

SEQ ID NO: 18010 - RNA, 16 nt, Homo sapiens
guucuauaacaacaac

SEQ ID NO: 18011 - RNA, 19 nt, Homo sapiens
aagcaaauauaaacagcaa

SEQ ID NO: 18012 - RNA, 19 nt, Homo sapiens
augggcuuucccaacagcu

SEQ ID NO: 18013 - RNA, 12 nt, Homo sapiens
uccuaacaggaa

SEQ ID NO: 18014 - RNA, 19 nt, Homo sapiens
caaaguuaagaaucuuuau

SEQ ID NO: 18015 - RNA, 20 nt, Homo sapiens
uacuauuuaagagaacaagc

SEQ ID NO: 18016 - RNA, 22 nt, Homo sapiens
acuauuuaagagaacaagcaaa

SEQ ID NO: 18017 - RNA, 15 nt, Homo sapiens
uauuaaagaucugca

SEQ ID NO: 18018 - RNA, 18 nt, Homo sapiens
caccuuacuucuucucau

SEQ ID NO: 18019 - RNA, 19 nt, Homo sapiens
uccuaacaggaauuuucau

SEQ ID NO: 18020 - RNA, 21 nt, Homo sapiens
cuccaccuuacuucuucucau

SEQ ID NO: 18021 - RNA, 16 nt, Homo sapiens
auaauguagcagcuca

SEQ ID NO: 18022 - RNA, 12 nt, Homo sapiens
ucauuguucuau

SEQ ID NO: 18023 - RNA, 22 nt, Homo sapiens
uauuaaagaucugcaacuacua

SEQ ID NO: 18024 - RNA, 12 nt, Homo sapiens
agagcaucucau

SEQ ID NO: 18025 - RNA, 12 nt, Homo sapiens
uaguucuacucc

SEQ ID NO: 18026 - RNA, 20 nt, Homo sapiens
auuauuuuagagcaucucau

SEQ ID NO: 18027 - RNA, 16 nt, Homo sapiens
uauaguucuacuccau

SEQ ID NO: 18028 - RNA, 19 nt, Homo sapiens
gaucugcaacuacuaucca

SEQ ID NO: 18029 - RNA, 18 nt, Homo sapiens
auaaacagcaacuugugu

SEQ ID NO: 18030 - RNA, 15 nt, Homo sapiens
acuucuucucauacu

SEQ ID NO: 18031 - RNA, 21 nt, Homo sapiens
uccauuaaauauaaagcaaga

SEQ ID NO: 18032 - RNA, 18 nt, Homo sapiens
uuccuaacaggaauuuuc

SEQ ID NO: 18033 - RNA, 20 nt, Homo sapiens
uucaaaguuaagaaucuuua

SEQ ID NO: 18034 - RNA, 23 nt, Homo sapiens
agcuccaccuuacuucuucucau

SEQ ID NO: 18035 - RNA, 16 nt, Homo sapiens
ccaacagcuccaccuu

SEQ ID NO: 18036 - RNA, 19 nt, Homo sapiens
aucuuuauaguucuacucc

SEQ ID NO: 18037 - RNA, 16 nt, Homo sapiens
uccauuaaauauaaag

SEQ ID NO: 18038 - RNA, 15 nt, Homo sapiens
uacuucuucucauac

SEQ ID NO: 18039 - RNA, 17 nt, Homo sapiens
accuuacuucuucucau

SEQ ID NO: 18040 - RNA, 22 nt, Homo sapiens
aaucuuuauaguucuacuccau

SEQ ID NO: 18041 - RNA, 17 nt, Homo sapiens
cugcaacuacuauccaa

SEQ ID NO: 18042 - RNA, 21 nt, Homo sapiens
caccuuacuucuucucauacu

SEQ ID NO: 18043 - RNA, 15 nt, Homo sapiens
ugcaacuacuaucca

SEQ ID NO: 18044 - RNA, 21 nt, Homo sapiens
uaagagaacaagcaaauauaa

SEQ ID NO: 18045 - RNA, 17 nt, Homo sapiens
uccaccuuacuucuucu

SEQ ID NO: 18046 - RNA, 16 nt, Homo sapiens
gcaucucauuuauaau

SEQ ID NO: 18047 - RNA, 14 nt, Homo sapiens
uccauuaaauauaa

SEQ ID NO: 18048 - RNA, 15 nt, Homo sapiens
uccaccuuacuucuu

SEQ ID NO: 18049 - RNA, 18 nt, Homo sapiens
uccaccuuacuucuucuc

SEQ ID NO: 18050 - RNA, 12 nt, Homo sapiens
acaacaaaagcg

SEQ ID NO: 18051 - RNA, 13 nt, Homo sapiens
gaaucuuuauagu

SEQ ID NO: 18052 - RNA, 14 nt, Homo sapiens
gaaucuuuauaguu

SEQ ID NO: 18053 - RNA, 18 nt, Homo sapiens
gaaaaugguauuaaagau

SEQ ID NO: 18054 - RNA, 17 nt, Homo sapiens
acagcuccaccuuacuu

SEQ ID NO: 18055 - RNA, 12 nt, Homo sapiens
accuuacuucuu

SEQ ID NO: 18056 - RNA, 16 nt, Homo sapiens
acuauccaacuuauau

SEQ ID NO: 18057 - RNA, 15 nt, Homo sapiens
aucuuuauaguucua

SEQ ID NO: 18058 - RNA, 22 nt, Homo sapiens
aagagaacaagcaaauauaaac

SEQ ID NO: 18059 - RNA, 13 nt, Homo sapiens
aaugguauuaaag

SEQ ID NO: 18060 - RNA, 22 nt, Homo sapiens
acgaugggcuuucccaacagcu

SEQ ID NO: 18061 - RNA, 17 nt, Homo sapiens
acuucuucucauacuau

SEQ ID NO: 18062 - RNA, 19 nt, Homo sapiens
aaagaucugcaacuacuau

SEQ ID NO: 18063 - RNA, 10 nt, Homo sapiens
aaauauaaag

SEQ ID NO: 18064 - RNA, 21 nt, Homo sapiens
auccaacuuauauuucugcuu

SEQ ID NO: 18065 - RNA, 13 nt, Homo sapiens
auuucugcuuuca

SEQ ID NO: 18066 - RNA, 20 nt, Homo sapiens
ccaagaagauaaucuccaaa

SEQ ID NO: 18067 - RNA, 15 nt, Homo sapiens
uacuucuucucauac

SEQ ID NO: 18068 - RNA, 19 nt, Homo sapiens
caaaguuaagaaucuuuau

SEQ ID NO: 18069 - RNA, 19 nt, Homo sapiens
uaacaacaacaacaaaagc

SEQ ID NO: 18070 - RNA, 16 nt, Homo sapiens
guucuauaacaacaac

SEQ ID NO: 18071 - RNA, 19 nt, Homo sapiens
aagcaaauauaaacagcaa

SEQ ID NO: 18072 - RNA, 15 nt, Homo sapiens
uauuaaagaucugca

SEQ ID NO: 18073 - RNA, 21 nt, Homo sapiens
aaucuuuauaguucuacucca

SEQ ID NO: 18074 - RNA, 16 nt, Homo sapiens
uaacaggaauuuucau

SEQ ID NO: 18075 - RNA, 19 nt, Homo sapiens
auuauuuuagagcaucuca

SEQ ID NO: 18076 - RNA, 14 nt, Homo sapiens
auguagcagcucau

SEQ ID NO: 18077 - RNA, 14 nt, Homo sapiens
guagcagcucauaa

SEQ ID NO: 18078 - RNA, 18 nt, Homo sapiens
caccuuacuucuucucau

SEQ ID NO: 18079 - RNA, 15 nt, Homo sapiens
acuucuucucauacu

SEQ ID NO: 18080 - RNA, 13 nt, Homo sapiens
uucauuguucuau

SEQ ID NO: 18081 - RNA, 19 nt, Homo sapiens
aucuuuauaguucuacucc

SEQ ID NO: 18082 - RNA, 22 nt, Homo sapiens
agcuccaccuuacuucuucuca

SEQ ID NO: 18083 - RNA, 18 nt, Homo sapiens
uuacuucuucucauacua

SEQ ID NO: 18084 - RNA, 22 nt, Homo sapiens
aaucuuuauaguucuacuccau

SEQ ID NO: 18085 - RNA, 11 nt, Homo sapiens
agaucugcaac

SEQ ID NO: 18086 - RNA, 18 nt, Homo sapiens
uuauaauguagcagcuca

SEQ ID NO: 18087 - RNA, 18 nt, Homo sapiens
acagcaacuuguguuccu

SEQ ID NO: 18088 - RNA, 21 nt, Homo sapiens
ccaagaagauaaucuccaaag

SEQ ID NO: 18089 - RNA, 20 nt, Homo sapiens
caaaguuaagaaucuuuaua

SEQ ID NO: 18090 - RNA, 15 nt, Homo sapiens
aagagaacaagcaaa

SEQ ID NO: 18091 - RNA, 21 nt, Homo sapiens
caccuuacuucuucucauacu

SEQ ID NO: 18092 - RNA, 18 nt, Homo sapiens
uuccuaacaggaauuuuc

SEQ ID NO: 18093 - RNA, 18 nt, Homo sapiens
ccaagaagauaaucucca

SEQ ID NO: 18094 - RNA, 14 nt, Homo sapiens
aauauaaagcaaga

SEQ ID NO: 18095 - RNA, 18 nt, Homo sapiens
uauuuuagagcaucucau

SEQ ID NO: 18096 - RNA, 20 nt, Homo sapiens
uacuauuuaagagaacaagc

SEQ ID NO: 18097 - RNA, 12 nt, Homo sapiens
ucauuguucuau

SEQ ID NO: 18098 - RNA, 22 nt, Homo sapiens
uuuauaauguagcagcucauaa

SEQ ID NO: 18099 - RNA, 20 nt, Homo sapiens
cugcaacuacuauccaacuu

SEQ ID NO: 18100 - RNA, 23 nt, Homo sapiens
agcuccaccuuacuucuucucau

SEQ ID NO: 18101 - RNA, 17 nt, Homo sapiens
auuuaagagaacaagca

SEQ ID NO: 18102 - RNA, 19 nt, Homo sapiens
gaucugcaacuacuaucca

SEQ ID NO: 18103 - RNA, 20 nt, Homo sapiens
ucaaaguuaagaaucuuuau

SEQ ID NO: 18104 - RNA, 17 nt, Homo sapiens
uauuuuagagcaucuca

SEQ ID NO: 18105 - RNA, 18 nt, Homo sapiens
ucaaaguuaagaaucuuu

SEQ ID NO: 18106 - RNA, 12 nt, Homo sapiens
uaguucuacucc

SEQ ID NO: 18107 - RNA, 16 nt, Homo sapiens
uauaguucuacuccau

SEQ ID NO: 18108 - RNA, 22 nt, Homo sapiens
uacuauuuaagagaacaagcaa

SEQ ID NO: 18109 - RNA, 18 nt, Homo sapiens
uaauguagcagcucauaa

SEQ ID NO: 18110 - RNA, 16 nt, Homo sapiens
ccaacagcuccaccuu

SEQ ID NO: 18111 - RNA, 12 nt, Homo sapiens
uccuaacaggaa

SEQ ID NO: 18112 - RNA, 18 nt, Homo sapiens
uuauuuuagagcaucuca

SEQ ID NO: 18113 - RNA, 19 nt, Homo sapiens
uccuaacaggaauuuucau

SEQ ID NO: 18114 - RNA, 20 nt, Homo sapiens
agaucugcaacuacuaucca

SEQ ID NO: 18115 - RNA, 19 nt, Homo sapiens
augggcuuucccaacagcu

SEQ ID NO: 18116 - RNA, 22 nt, Homo sapiens
guucuauaacaacaacaacaaa

SEQ ID NO: 18117 - RNA, 17 nt, Homo sapiens
cuucucauacuauuuaa

SEQ ID NO: 18118 - RNA, 16 nt, Homo sapiens
auaauguagcagcuca

SEQ ID NO: 18119 - RNA, 22 nt, Homo sapiens
acuauuuaagagaacaagcaaa

SEQ ID NO: 18120 - RNA, 13 nt, Homo sapiens
uuacuucuucuca

SEQ ID NO: 18121 - RNA, 21 nt, Homo sapiens
cuccaccuuacuucuucucau

SEQ ID NO: 18122 - RNA, 16 nt, Homo sapiens
uccauuaaauauaaag

SEQ ID NO: 18123 - RNA, 20 nt, Homo sapiens
acuucuucucauacuauuua

SEQ ID NO: 18124 - RNA, 22 nt, Homo sapiens
uauuaaagaucugcaacuacua

SEQ ID NO: 18125 - RNA, 13 nt, Homo sapiens
uacuucuucucau

SEQ ID NO: 18126 - RNA, 21 nt, Homo sapiens
auuuuagagcaucucauuuau

SEQ ID NO: 18127 - RNA, 14 nt, Homo sapiens
acaggaauuuucau

SEQ ID NO: 18128 - RNA, 20 nt, Homo sapiens
uucaaaguuaagaaucuuua

SEQ ID NO: 18129 - RNA, 22 nt, Homo sapiens
cauuuauaauguagcagcucau

SEQ ID NO: 18130 - RNA, 17 nt, Homo sapiens
aacagcuccaccuuacu

SEQ ID NO: 18131 - RNA, 12 nt, Homo sapiens
agagcaucucau

SEQ ID NO: 18132 - RNA, 20 nt, Homo sapiens
auuauuuuagagcaucucau

SEQ ID NO: 18133 - RNA, 18 nt, Homo sapiens
auaaacagcaacuugugu

SEQ ID NO: 18134 - RNA, 21 nt, Homo sapiens
uccauuaaauauaaagcaaga

SEQ ID NO: 18135 - RNA, 15 nt, Homo sapiens
ugcaacuacuaucca

SEQ ID NO: 18136 - RNA, 21 nt, Homo sapiens
cuaacaggaauuuucauuguu

SEQ ID NO: 18137 - RNA, 22 nt, Homo sapiens
uguguuccuaacaggaauuuuc

SEQ ID NO: 18138 - RNA, 15 nt, Homo sapiens
ggcuuucccaacagc

SEQ ID NO: 18139 - RNA, 17 nt, Homo sapiens
accuuacuucuucucau

SEQ ID NO: 18140 - RNA, 21 nt, Homo sapiens
uauuauuuuagagcaucucau

SEQ ID NO: 18141 - RNA, 18 nt, Homo sapiens
aagaucugcaacuacuau

SEQ ID NO: 18142 - RNA, 17 nt, Homo sapiens
cugcaacuacuauccaa

SEQ ID NO: 18143 - RNA, 16 nt, Homo sapiens
aagaucugcaacuacu

SEQ ID NO: 18144 - RNA, 17 nt, Homo sapiens
auuuuagagcaucucau

SEQ ID NO: 18145 - RNA, 15 nt, Homo sapiens
gcuuucccaacagcu

SEQ ID NO: 18146 - RNA, 20 nt, Homo sapiens
uaaagaucugcaacuacuau

SEQ ID NO: 18147 - RNA, 21 nt, Homo sapiens
uuauuauuuuagagcaucuca

SEQ ID NO: 18148 - RNA, 14 nt, Homo sapiens
agcagcucauaaau

SEQ ID NO: 18149 - RNA, 22 nt, Homo sapiens
accuuacuucuucucauacuau

SEQ ID NO: 18150 - RNA, 17 nt, Homo sapiens
aauguagcagcucauaa

SEQ ID NO: 18151 - RNA, 20 nt, Homo sapiens
ucuucucauacuauuuaaga

SEQ ID NO: 18152 - RNA, 21 nt, Homo sapiens
auaguucuacuccauuaaaua

SEQ ID NO: 18153 - RNA, 13 nt, Homo sapiens
augguauuaaaga

SEQ ID NO: 18154 - RNA, 17 nt, Homo sapiens
auguagcagcucauaaa

SEQ ID NO: 18155 - RNA, 16 nt, Homo sapiens
uacuucuucucauacu

SEQ ID NO: 18156 - RNA, 17 nt, Homo sapiens
uacuucuucucauacua

SEQ ID NO: 18157 - RNA, 16 nt, Homo sapiens
auguagcagcucauaa

SEQ ID NO: 18158 - RNA, 16 nt, Homo sapiens
uauaguucuacuccau

SEQ ID NO: 18159 - RNA, 12 nt, Homo sapiens
ucauuguucuau

SEQ ID NO: 18160 - RNA, 21 nt, Homo sapiens
aaucuuuauaguucuacucca

SEQ ID NO: 18161 - RNA, 19 nt, Homo sapiens
caaaguuaagaaucuuuau

SEQ ID NO: 18162 - RNA, 22 nt, Homo sapiens
uguguuccuaacaggaauuuuc

SEQ ID NO: 18163 - RNA, 20 nt, Homo sapiens
ucaaaguuaagaaucuuuau

SEQ ID NO: 18164 - RNA, 15 nt, Homo sapiens
uacuucuucucauac

SEQ ID NO: 18165 - RNA, 12 nt, Homo sapiens
uaguucuacucc

SEQ ID NO: 18166 - RNA, 16 nt, Homo sapiens
aagaucugcaacuacu

SEQ ID NO: 18167 - RNA, 20 nt, Homo sapiens
caaaguuaagaaucuuuaua

SEQ ID NO: 18168 - RNA, 11 nt, Homo sapiens
agaucugcaac

SEQ ID NO: 18169 - RNA, 18 nt, Homo sapiens
caccuuacuucuucucau

SEQ ID NO: 18170 - RNA, 18 nt, Homo sapiens
uauuuuagagcaucucau

SEQ ID NO: 18171 - RNA, 22 nt, Homo sapiens
agcuccaccuuacuucuucuca

SEQ ID NO: 18172 - RNA, 17 nt, Homo sapiens
aacagcuccaccuuacu

SEQ ID NO: 18173 - RNA, 21 nt, Homo sapiens
caccuuacuucuucucauacu

SEQ ID NO: 18174 - RNA, 16 nt, Homo sapiens
uaacaggaauuuucau

SEQ ID NO: 18175 - RNA, 17 nt, Homo sapiens
uauuuuagagcaucuca

SEQ ID NO: 18176 - RNA, 18 nt, Homo sapiens
acagcaacuuguguuccu

SEQ ID NO: 18177 - RNA, 14 nt, Homo sapiens
agcagcucauaaau

SEQ ID NO: 18178 - RNA, 21 nt, Homo sapiens
cuaacaggaauuuucauuguu

SEQ ID NO: 18179 - RNA, 20 nt, Homo sapiens
agaucugcaacuacuaucca

SEQ ID NO: 18180 - RNA, 18 nt, Homo sapiens
uuacuucuucucauacua

SEQ ID NO: 18181 - RNA, 14 nt, Homo sapiens
auguagcagcucau

SEQ ID NO: 18182 - RNA, 21 nt, Homo sapiens
uauuauuuuagagcaucucau

SEQ ID NO: 18183 - RNA, 20 nt, Homo sapiens
uucaaaguuaagaaucuuua

SEQ ID NO: 18184 - RNA, 15 nt, Homo sapiens
acuucuucucauacu

SEQ ID NO: 18185 - RNA, 22 nt, Homo sapiens
acuauuuaagagaacaagcaaa

SEQ ID NO: 18186 - RNA, 15 nt, Homo sapiens
uauuaaagaucugca

SEQ ID NO: 18187 - RNA, 12 nt, Homo sapiens
agagcaucucau

SEQ ID NO: 18188 - RNA, 15 nt, Homo sapiens
ugcaacuacuaucca

SEQ ID NO: 18189 - RNA, 17 nt, Homo sapiens
cugcaacuacuauccaa

SEQ ID NO: 18190 - RNA, 20 nt, Homo sapiens
uaaagaucugcaacuacuau

SEQ ID NO: 18191 - RNA, 18 nt, Homo sapiens
aagaucugcaacuacuau

SEQ ID NO: 18192 - RNA, 19 nt, Homo sapiens
auuauuuuagagcaucuca

SEQ ID NO: 18193 - RNA, 19 nt, Homo sapiens
augggcuuucccaacagcu

SEQ ID NO: 18194 - RNA, 22 nt, Homo sapiens
uacuauuuaagagaacaagcaa

SEQ ID NO: 18195 - RNA, 18 nt, Homo sapiens
uaauguagcagcucauaa

SEQ ID NO: 18196 - RNA, 16 nt, Homo sapiens
uccauuaaauauaaag

SEQ ID NO: 18197 - RNA, 17 nt, Homo sapiens
auuuuagagcaucucau

SEQ ID NO: 18198 - RNA, 13 nt, Homo sapiens
uacuucuucucau

SEQ ID NO: 18199 - RNA, 21 nt, Homo sapiens
cuccaccuuacuucuucucau

SEQ ID NO: 18200 - RNA, 16 nt, Homo sapiens
auaauguagcagcuca

SEQ ID NO: 18201 - RNA, 19 nt, Homo sapiens
gaucugcaacuacuaucca

SEQ ID NO: 18202 - RNA, 19 nt, Homo sapiens
uccuaacaggaauuuucau

SEQ ID NO: 18203 - RNA, 22 nt, Homo sapiens
accuuacuucuucucauacuau

SEQ ID NO: 18204 - RNA, 17 nt, Homo sapiens
accuuacuucuucucau

SEQ ID NO: 18205 - RNA, 14 nt, Homo sapiens
aauauaaagcaaga

SEQ ID NO: 18206 - RNA, 20 nt, Homo sapiens
acuucuucucauacuauuua

SEQ ID NO: 18207 - RNA, 14 nt, Homo sapiens
acaggaauuuucau

SEQ ID NO: 18208 - RNA, 22 nt, Homo sapiens
cauuuauaauguagcagcucau

SEQ ID NO: 18209 - RNA, 12 nt, Homo sapiens
uccuaacaggaa

SEQ ID NO: 18210 - RNA, 17 nt, Homo sapiens
auuuaagagaacaagca

SEQ ID NO: 18211 - RNA, 20 nt, Homo sapiens
auuauuuuagagcaucucau

SEQ ID NO: 18212 - RNA, 22 nt, Homo sapiens
uauuaaagaucugcaacuacua

SEQ ID NO: 18213 - RNA, 17 nt, Homo sapiens
aauguagcagcucauaa

SEQ ID NO: 18214 - RNA, 21 nt, Homo sapiens
ccaagaagauaaucuccaaag

SEQ ID NO: 18215 - RNA, 13 nt, Homo sapiens
uuacuucuucuca

SEQ ID NO: 18216 - RNA, 21 nt, Homo sapiens
auuuuagagcaucucauuuau

SEQ ID NO: 18217 - RNA, 21 nt, Homo sapiens
uccauuaaauauaaagcaaga

SEQ ID NO: 18218 - RNA, 15 nt, Homo sapiens
aagagaacaagcaaa

SEQ ID NO: 18219 - RNA, 18 nt, Homo sapiens
uuauaauguagcagcuca

SEQ ID NO: 18220 - RNA, 23 nt, Homo sapiens
agcuccaccuuacuucuucucau

SEQ ID NO: 18221 - RNA, 13 nt, Homo sapiens
uucauuguucuau

SEQ ID NO: 18222 - RNA, 19 nt, Homo sapiens
aagcaaauauaaacagcaa

SEQ ID NO: 18223 - RNA, 17 nt, Homo sapiens
cuucucauacuauuuaa

SEQ ID NO: 18224 - RNA, 18 nt, Homo sapiens
ccaagaagauaaucucca

SEQ ID NO: 18225 - RNA, 20 nt, Homo sapiens
cugcaacuacuauccaacuu

SEQ ID NO: 18226 - RNA, 14 nt, Homo sapiens
guagcagcucauaa

SEQ ID NO: 18227 - RNA, 16 nt, Homo sapiens
ccaacagcuccaccuu

SEQ ID NO: 18228 - RNA, 18 nt, Homo sapiens
uuauuuuagagcaucuca

SEQ ID NO: 18229 - RNA, 22 nt, Homo sapiens
guucuauaacaacaacaacaaa

SEQ ID NO: 18230 - RNA, 20 nt, Homo sapiens
ccaagaagauaaucuccaaa

SEQ ID NO: 18231 - RNA, 19 nt, Homo sapiens
aucuuuauaguucuacucc

SEQ ID NO: 18232 - RNA, 22 nt, Homo sapiens
aaucuuuauaguucuacuccau

SEQ ID NO: 18233 - RNA, 18 nt, Homo sapiens
ucaaaguuaagaaucuuu

SEQ ID NO: 18234 - RNA, 22 nt, Homo sapiens
uuuauaauguagcagcucauaa

SEQ ID NO: 18235 - RNA, 13 nt, Homo sapiens
auuucugcuuuca

SEQ ID NO: 18236 - RNA, 19 nt, Homo sapiens
uaacaacaacaacaaaagc

SEQ ID NO: 18237 - RNA, 21 nt, Homo sapiens
uuauuauuuuagagcaucuca

SEQ ID NO: 18238 - RNA, 15 nt, Homo sapiens
ggcuuucccaacagc

SEQ ID NO: 18239 - RNA, 15 nt, Homo sapiens
gcuuucccaacagcu

SEQ ID NO: 18240 - RNA, 20 nt, Homo sapiens
uacuauuuaagagaacaagc

SEQ ID NO: 18241 - RNA, 18 nt, Homo sapiens
uuccuaacaggaauuuuc

SEQ ID NO: 18242 - RNA, 18 nt, Homo sapiens
auaaacagcaacuugugu

SEQ ID NO: 18243 - RNA, 16 nt, Homo sapiens
guucuauaacaacaac

SEQ ID NO: 18244 - RNA, 22 nt, Homo sapiens
uuaagaaucuuuauaguucuac

SEQ ID NO: 18245 - RNA, 13 nt, Homo sapiens
guucuauaacaac

SEQ ID NO: 18246 - RNA, 14 nt, Homo sapiens
guucuauaacaaca

SEQ ID NO: 18247 - RNA, 12 nt, Homo sapiens
guucuauaacaa

SEQ ID NO: 18248 - RNA, 13 nt, Homo sapiens
auuaaagaucugc

SEQ ID NO: 18249 - RNA, 19 nt, Homo sapiens
auccaacuuauauuucugc

SEQ ID NO: 18250 - RNA, 15 nt, Homo sapiens
aacaacaacaacaaa

SEQ ID NO: 18251 - RNA, 14 nt, Homo sapiens
agcaagauaauaaa

SEQ ID NO: 18252 - RNA, 19 nt, Homo sapiens
gaucugcaacuacuaucca

SEQ ID NO: 18253 - RNA, 15 nt, Homo sapiens
gcuuucccaacagcu

SEQ ID NO: 18254 - RNA, 14 nt, Homo sapiens
agcagcucauaaau

SEQ ID NO: 18255 - RNA, 16 nt, Homo sapiens
uauaguucuacuccau

SEQ ID NO: 18256 - RNA, 15 nt, Homo sapiens
ugcaacuacuaucca

SEQ ID NO: 18257 - RNA, 18 nt, Homo sapiens
ccaagaagauaaucucca

SEQ ID NO: 18258 - RNA, 18 nt, Homo sapiens
uauuuuagagcaucucau

SEQ ID NO: 18259 - RNA, 17 nt, Homo sapiens
uauuuuagagcaucuca

SEQ ID NO: 18260 - RNA, 18 nt, Homo sapiens
auaaacagcaacuugugu

SEQ ID NO: 18261 - RNA, 13 nt, Homo sapiens
uucauuguucuau

SEQ ID NO: 18262 - RNA, 21 nt, Homo sapiens
ccaagaagauaaucuccaaag

SEQ ID NO: 18263 - RNA, 22 nt, Homo sapiens
agcuccaccuuacuucuucuca

SEQ ID NO: 18264 - RNA, 22 nt, Homo sapiens
acuauuuaagagaacaagcaaa

SEQ ID NO: 18265 - RNA, 18 nt, Homo sapiens
acagcaacuuguguuccu

SEQ ID NO: 18266 - RNA, 18 nt, Homo sapiens
caccuuacuucuucucau

SEQ ID NO: 18267 - RNA, 20 nt, Homo sapiens
caaaguuaagaaucuuuaua

SEQ ID NO: 18268 - RNA, 21 nt, Homo sapiens
caccuuacuucuucucauacu

SEQ ID NO: 18269 - RNA, 14 nt, Homo sapiens
acaggaauuuucau

SEQ ID NO: 18270 - RNA, 17 nt, Homo sapiens
aacagcuccaccuuacu

SEQ ID NO: 18271 - RNA, 20 nt, Homo sapiens
uucaaaguuaagaaucuuua

SEQ ID NO: 18272 - RNA, 17 nt, Homo sapiens
cugcaacuacuauccaa

SEQ ID NO: 18273 - RNA, 16 nt, Homo sapiens
guucuauaacaacaac

SEQ ID NO: 18274 - RNA, 19 nt, Homo sapiens
uaacaacaacaacaaaagc

SEQ ID NO: 18275 - RNA, 18 nt, Homo sapiens
uuauuuuagagcaucuca

SEQ ID NO: 18276 - RNA, 19 nt, Homo sapiens
auuauuuuagagcaucuca

SEQ ID NO: 18277 - RNA, 20 nt, Homo sapiens
uaaagaucugcaacuacuau

SEQ ID NO: 18278 - RNA, 14 nt, Homo sapiens
auguagcagcucau

SEQ ID NO: 18279 - RNA, 16 nt, Homo sapiens
ccaacagcuccaccuu

SEQ ID NO: 18280 - RNA, 16 nt, Homo sapiens
uaacaggaauuuucau

SEQ ID NO: 18281 - RNA, 20 nt, Homo sapiens
ccaagaagauaaucuccaaa

SEQ ID NO: 18282 - RNA, 20 nt, Homo sapiens
agaucugcaacuacuaucca

SEQ ID NO: 18283 - RNA, 15 nt, Homo sapiens
uacuucuucucauac

SEQ ID NO: 18284 - RNA, 21 nt, Homo sapiens
uauuauuuuagagcaucucau

SEQ ID NO: 18285 - RNA, 15 nt, Homo sapiens
ggcuuucccaacagc

SEQ ID NO: 18286 - RNA, 21 nt, Homo sapiens
cuaacaggaauuuucauuguu

SEQ ID NO: 18287 - RNA, 21 nt, Homo sapiens
uuauuauuuuagagcaucuca

SEQ ID NO: 18288 - RNA, 16 nt, Homo sapiens
aagaucugcaacuacu

SEQ ID NO: 18289 - RNA, 22 nt, Homo sapiens
uguguuccuaacaggaauuuuc

SEQ ID NO: 18290 - RNA, 17 nt, Homo sapiens
auuuuagagcaucucau

SEQ ID NO: 18291 - RNA, 22 nt, Homo sapiens
accuuacuucuucucauacuau

SEQ ID NO: 18292 - RNA, 22 nt, Homo sapiens
cauuuauaauguagcagcucau

SEQ ID NO: 18293 - RNA, 20 nt, Homo sapiens
auuauuuuagagcaucucau

SEQ ID NO: 18294 - RNA, 17 nt, Homo sapiens
accuuacuucuucucau

SEQ ID NO: 18295 - RNA, 17 nt, Homo sapiens
aauguagcagcucauaa

SEQ ID NO: 18296 - RNA, 18 nt, Homo sapiens
aagaucugcaacuacuau

SEQ ID NO: 18297 - RNA, 14 nt, Homo sapiens
aauauaaagcaaga

SEQ ID NO: 18298 - RNA, 21 nt, Homo sapiens
uccauuaaauauaaagcaaga

SEQ ID NO: 18299 - RNA, 12 nt, Homo sapiens
agagcaucucau

SEQ ID NO: 18300 - RNA, 22 nt, Homo sapiens
uauuaaagaucugcaacuacua

SEQ ID NO: 18301 - RNA, 20 nt, Homo sapiens
uacuauuuaagagaacaagc

SEQ ID NO: 18302 - RNA, 13 nt, Homo sapiens
uuacuucuucuca

SEQ ID NO: 18303 - RNA, 19 nt, Homo sapiens
aucuuuauaguucuacucc

SEQ ID NO: 18304 - RNA, 18 nt, Homo sapiens
uuacuucuucucauacua

SEQ ID NO: 18305 - RNA, 20 nt, Homo sapiens
acuucuucucauacuauuua

SEQ ID NO: 18306 - RNA, 18 nt, Homo sapiens
uuauaauguagcagcuca

SEQ ID NO: 18307 - RNA, 16 nt, Homo sapiens
uccauuaaauauaaag

SEQ ID NO: 18308 - RNA, 15 nt, Homo sapiens
acuucuucucauacu

SEQ ID NO: 18309 - RNA, 11 nt, Homo sapiens
agaucugcaac

SEQ ID NO: 18310 - RNA, 22 nt, Homo sapiens
aaucuuuauaguucuacuccau

SEQ ID NO: 18311 - RNA, 18 nt, Homo sapiens
uuccuaacaggaauuuuc

SEQ ID NO: 18312 - RNA, 22 nt, Homo sapiens
guucuauaacaacaacaacaaa

SEQ ID NO: 18313 - RNA, 12 nt, Homo sapiens
uccuaacaggaa

SEQ ID NO: 18314 - RNA, 19 nt, Homo sapiens
aagcaaauauaaacagcaa

SEQ ID NO: 18315 - RNA, 13 nt, Homo sapiens
uacuucuucucau

SEQ ID NO: 18316 - RNA, 21 nt, Homo sapiens
cuccaccuuacuucuucucau

SEQ ID NO: 18317 - RNA, 21 nt, Homo sapiens
auuuuagagcaucucauuuau

SEQ ID NO: 18318 - RNA, 18 nt, Homo sapiens
uaauguagcagcucauaa

SEQ ID NO: 18319 - RNA, 15 nt, Homo sapiens
aagagaacaagcaaa

SEQ ID NO: 18320 - RNA, 19 nt, Homo sapiens
uccuaacaggaauuuucau

SEQ ID NO: 18321 - RNA, 13 nt, Homo sapiens
auuucugcuuuca

SEQ ID NO: 18322 - RNA, 19 nt, Homo sapiens
augggcuuucccaacagcu

SEQ ID NO: 18323 - RNA, 16 nt, Homo sapiens
auaauguagcagcuca

SEQ ID NO: 18324 - RNA, 21 nt, Homo sapiens
aaucuuuauaguucuacucca

SEQ ID NO: 18325 - RNA, 15 nt, Homo sapiens
uauuaaagaucugca

SEQ ID NO: 18326 - RNA, 14 nt, Homo sapiens
guagcagcucauaa

SEQ ID NO: 18327 - RNA, 17 nt, Homo sapiens
cuucucauacuauuuaa

SEQ ID NO: 18328 - RNA, 19 nt, Homo sapiens
caaaguuaagaaucuuuau

SEQ ID NO: 18329 - RNA, 12 nt, Homo sapiens
uaguucuacucc

SEQ ID NO: 18330 - RNA, 23 nt, Homo sapiens
agcuccaccuuacuucuucucau

SEQ ID NO: 18331 - RNA, 22 nt, Homo sapiens
uuuauaauguagcagcucauaa

SEQ ID NO: 18332 - RNA, 22 nt, Homo sapiens
uacuauuuaagagaacaagcaa

SEQ ID NO: 18333 - RNA, 20 nt, Homo sapiens
cugcaacuacuauccaacuu

SEQ ID NO: 18334 - RNA, 17 nt, Homo sapiens
auuuaagagaacaagca

SEQ ID NO: 18335 - RNA, 20 nt, Homo sapiens
ucaaaguuaagaaucuuuau

SEQ ID NO: 18336 - RNA, 12 nt, Homo sapiens
ucauuguucuau

SEQ ID NO: 18337 - RNA, 18 nt, Homo sapiens
ucaaaguuaagaaucuuu

SEQ ID NO: 18338 - RNA, 14 nt, Homo sapiens
auguagcagcucau

SEQ ID NO: 18339 - RNA, 21 nt, Homo sapiens
cuaacaggaauuuucauuguu

SEQ ID NO: 18340 - RNA, 22 nt, Homo sapiens
uguguuccuaacaggaauuuuc

SEQ ID NO: 18341 - RNA, 21 nt, Homo sapiens
uauuauuuuagagcaucucau

SEQ ID NO: 18342 - RNA, 22 nt, Homo sapiens
accuuacuucuucucauacuau

SEQ ID NO: 18343 - RNA, 21 nt, Homo sapiens
uuauuauuuuagagcaucuca

SEQ ID NO: 18344 - RNA, 18 nt, Homo sapiens
auaaacagcaacuugugu

SEQ ID NO: 18345 - RNA, 20 nt, Homo sapiens
auuauuuuagagcaucucau

SEQ ID NO: 18346 - RNA, 16 nt, Homo sapiens
aagaucugcaacuacu

SEQ ID NO: 18347 - RNA, 17 nt, Homo sapiens
auuuuagagcaucucau

SEQ ID NO: 18348 - RNA, 15 nt, Homo sapiens
ugcaacuacuaucca

SEQ ID NO: 18349 - RNA, 15 nt, Homo sapiens
ggcuuucccaacagc

SEQ ID NO: 18350 - RNA, 18 nt, Homo sapiens
aagaucugcaacuacuau

SEQ ID NO: 18351 - RNA, 18 nt, Homo sapiens
uuccuaacaggaauuuuc

SEQ ID NO: 18352 - RNA, 20 nt, Homo sapiens
agaucugcaacuacuaucca

SEQ ID NO: 18353 - RNA, 21 nt, Homo sapiens
uccauuaaauauaaagcaaga

SEQ ID NO: 18354 - RNA, 16 nt, Homo sapiens
uaacaggaauuuucau

SEQ ID NO: 18355 - RNA, 15 nt, Homo sapiens
gcuuucccaacagcu

SEQ ID NO: 18356 - RNA, 22 nt, Homo sapiens
agcuccaccuuacuucuucuca

SEQ ID NO: 18357 - RNA, 19 nt, Homo sapiens
uaacaacaacaacaaaagc

SEQ ID NO: 18358 - RNA, 22 nt, Homo sapiens
uauuaaagaucugcaacuacua

SEQ ID NO: 18359 - RNA, 14 nt, Homo sapiens
agcagcucauaaau

SEQ ID NO: 18360 - RNA, 17 nt, Homo sapiens
aauguagcagcucauaa

SEQ ID NO: 18361 - RNA, 15 nt, Homo sapiens
acuucuucucauacu

SEQ ID NO: 18362 - RNA, 18 nt, Homo sapiens
caccuuacuucuucucau

SEQ ID NO: 18363 - RNA, 11 nt, Homo sapiens
agaucugcaac

SEQ ID NO: 18364 - RNA, 16 nt, Homo sapiens
guucuauaacaacaac

SEQ ID NO: 18365 - RNA, 13 nt, Homo sapiens
uacuucuucucau

SEQ ID NO: 18366 - RNA, 13 nt, Homo sapiens
uucauuguucuau

SEQ ID NO: 18367 - RNA, 16 nt, Homo sapiens
uccauuaaauauaaag

SEQ ID NO: 18368 - RNA, 21 nt, Homo sapiens
cuccaccuuacuucuucucau

SEQ ID NO: 18369 - RNA, 18 nt, Homo sapiens
uuacuucuucucauacua

SEQ ID NO: 18370 - RNA, 19 nt, Homo sapiens
caaaguuaagaaucuuuau

SEQ ID NO: 18371 - RNA, 21 nt, Homo sapiens
aaucuuuauaguucuacucca

SEQ ID NO: 18372 - RNA, 23 nt, Homo sapiens
agcuccaccuuacuucuucucau

SEQ ID NO: 18373 - RNA, 15 nt, Homo sapiens
uacuucuucucauac

SEQ ID NO: 18374 - RNA, 21 nt, Homo sapiens
auuuuagagcaucucauuuau

SEQ ID NO: 18375 - RNA, 20 nt, Homo sapiens
uacuauuuaagagaacaagc

SEQ ID NO: 18376 - RNA, 19 nt, Homo sapiens
aucuuuauaguucuacucc

SEQ ID NO: 18377 - RNA, 20 nt, Homo sapiens
ccaagaagauaaucuccaaa

SEQ ID NO: 18378 - RNA, 20 nt, Homo sapiens
uaaagaucugcaacuacuau

SEQ ID NO: 18379 - RNA, 12 nt, Homo sapiens
agagcaucucau

SEQ ID NO: 18380 - RNA, 18 nt, Homo sapiens
uuauaauguagcagcuca

SEQ ID NO: 18381 - RNA, 13 nt, Homo sapiens
auuucugcuuuca

SEQ ID NO: 18382 - RNA, 22 nt, Homo sapiens
aaucuuuauaguucuacuccau

SEQ ID NO: 18383 - RNA, 19 nt, Homo sapiens
auuauuuuagagcaucuca

SEQ ID NO: 18384 - RNA, 15 nt, Homo sapiens
aagagaacaagcaaa

SEQ ID NO: 18385 - RNA, 17 nt, Homo sapiens
auuuaagagaacaagca

SEQ ID NO: 18386 - RNA, 22 nt, Homo sapiens
uuuauaauguagcagcucauaa

SEQ ID NO: 18387 - RNA, 18 nt, Homo sapiens
ucaaaguuaagaaucuuu

SEQ ID NO: 18388 - RNA, 15 nt, Homo sapiens
uauuaaagaucugca

SEQ ID NO: 18389 - RNA, 20 nt, Homo sapiens
ucaaaguuaagaaucuuuau

SEQ ID NO: 18390 - RNA, 20 nt, Homo sapiens
cugcaacuacuauccaacuu

SEQ ID NO: 18391 - RNA, 14 nt, Homo sapiens
guagcagcucauaa

SEQ ID NO: 18392 - RNA, 18 nt, Homo sapiens
uauuuuagagcaucucau

SEQ ID NO: 18393 - RNA, 12 nt, Homo sapiens
ucauuguucuau

SEQ ID NO: 18394 - RNA, 18 nt, Homo sapiens
uaauguagcagcucauaa

SEQ ID NO: 18395 - RNA, 22 nt, Homo sapiens
uacuauuuaagagaacaagcaa

SEQ ID NO: 18396 - RNA, 17 nt, Homo sapiens
uauuuuagagcaucuca

SEQ ID NO: 18397 - RNA, 12 nt, Homo sapiens
uccuaacaggaa

SEQ ID NO: 18398 - RNA, 22 nt, Homo sapiens
cauuuauaauguagcagcucau

SEQ ID NO: 18399 - RNA, 13 nt, Homo sapiens
uuacuucuucuca

SEQ ID NO: 18400 - RNA, 16 nt, Homo sapiens
uauaguucuacuccau

SEQ ID NO: 18401 - RNA, 19 nt, Homo sapiens
aagcaaauauaaacagcaa

SEQ ID NO: 18402 - RNA, 21 nt, Homo sapiens
caccuuacuucuucucauacu

SEQ ID NO: 18403 - RNA, 14 nt, Homo sapiens
aauauaaagcaaga

SEQ ID NO: 18404 - RNA, 16 nt, Homo sapiens
ccaacagcuccaccuu

SEQ ID NO: 18405 - RNA, 22 nt, Homo sapiens
acuauuuaagagaacaagcaaa

SEQ ID NO: 18406 - RNA, 20 nt, Homo sapiens
acuucuucucauacuauuua

SEQ ID NO: 18407 - RNA, 18 nt, Homo sapiens
uuauuuuagagcaucuca

SEQ ID NO: 18408 - RNA, 21 nt, Homo sapiens
ccaagaagauaaucuccaaag

SEQ ID NO: 18409 - RNA, 18 nt, Homo sapiens
acagcaacuuguguuccu

SEQ ID NO: 18410 - RNA, 17 nt, Homo sapiens
aacagcuccaccuuacu

SEQ ID NO: 18411 - RNA, 14 nt, Homo sapiens
acaggaauuuucau

SEQ ID NO: 18412 - RNA, 17 nt, Homo sapiens
accuuacuucuucucau

SEQ ID NO: 18413 - RNA, 20 nt, Homo sapiens
caaaguuaagaaucuuuaua

SEQ ID NO: 18414 - RNA, 19 nt, Homo sapiens
uccuaacaggaauuuucau

SEQ ID NO: 18415 - RNA, 17 nt, Homo sapiens
cuucucauacuauuuaa

SEQ ID NO: 18416 - RNA, 18 nt, Homo sapiens
ccaagaagauaaucucca

SEQ ID NO: 18417 - RNA, 17 nt, Homo sapiens
cugcaacuacuauccaa

SEQ ID NO: 18418 - RNA, 12 nt, Homo sapiens
uaguucuacucc

SEQ ID NO: 18419 - RNA, 19 nt, Homo sapiens
gaucugcaacuacuaucca

SEQ ID NO: 18420 - RNA, 16 nt, Homo sapiens
auaauguagcagcuca

SEQ ID NO: 18421 - RNA, 22 nt, Homo sapiens
guucuauaacaacaacaacaaa

SEQ ID NO: 18422 - RNA, 19 nt, Homo sapiens
augggcuuucccaacagcu

SEQ ID NO: 18423 - RNA, 20 nt, Homo sapiens
uucaaaguuaagaaucuuua

SEQ ID NO: 18424 - RNA, 18 nt, Homo sapiens
uuuucacaaagaacagga

SEQ ID NO: 18425 - RNA, 23 nt, Homo sapiens
uuuucucaauguuuagcagauuu

SEQ ID NO: 18426 - RNA, 14 nt, Homo sapiens
uuuuaaggcauauu

SEQ ID NO: 18427 - RNA, 16 nt, Homo sapiens
uuuuauaaacuuuacc

SEQ ID NO: 18428 - RNA, 13 nt, Homo sapiens
uuaaguaucugac

SEQ ID NO: 18429 - RNA, 14 nt, Homo sapiens
uuaaguaucugaca

SEQ ID NO: 18430 - RNA, 11 nt, Homo sapiens
uuaauaucauc

SEQ ID NO: 18431 - RNA, 13 nt, Homo sapiens
uuaauccucucaa

SEQ ID NO: 18432 - RNA, 17 nt, Homo sapiens
uuaauuauuucacuuua

SEQ ID NO: 18433 - RNA, 16 nt, Homo sapiens
uuacaggaacagaaga

SEQ ID NO: 18434 - RNA, 22 nt, Homo sapiens
uguuuccuagcacacacuuuug

SEQ ID NO: 18435 - RNA, 15 nt, Homo sapiens
uguuuuaaggaugcu

SEQ ID NO: 18436 - RNA, 20 nt, Homo sapiens
uguuaaguaucagcuacaau

SEQ ID NO: 18437 - RNA, 17 nt, Homo sapiens
uguuacuaaguuuuuau

SEQ ID NO: 18438 - RNA, 16 nt, Homo sapiens
uguucuugguuuguaa

SEQ ID NO: 18439 - RNA, 20 nt, Homo sapiens
uguugcuaucaauccaagaa

SEQ ID NO: 18440 - RNA, 12 nt, Homo sapiens
uuccaagaaaua

SEQ ID NO: 18441 - RNA, 13 nt, Homo sapiens
uuccaagaaauau

SEQ ID NO: 18442 - RNA, 13 nt, Homo sapiens
uuauuucacuuua

SEQ ID NO: 18443 - RNA, 20 nt, Homo sapiens
uucacuuuuauaagaaauag

SEQ ID NO: 18444 - RNA, 22 nt, Homo sapiens
uucccagucuucagcagagaag

SEQ ID NO: 18445 - RNA, 22 nt, Homo sapiens
uuaacugagaaggcuguggauu

SEQ ID NO: 18446 - RNA, 18 nt, Homo sapiens
uuacccucauguucuuaa

SEQ ID NO: 18447 - RNA, 14 nt, Homo sapiens
uuacuaaacaugua

SEQ ID NO: 18448 - RNA, 13 nt, Homo sapiens
uuacuguacauga

SEQ ID NO: 18449 - RNA, 22 nt, Homo sapiens
uuaguucaauccugauucauau

SEQ ID NO: 18450 - RNA, 19 nt, Homo sapiens
uuaguucaaucuggauuca

SEQ ID NO: 18451 - RNA, 18 nt, Homo sapiens
uuauaaaucgcuuuugau

SEQ ID NO: 18452 - RNA, 20 nt, Homo sapiens
uuauaagaaauaggaaauau

SEQ ID NO: 18453 - RNA, 20 nt, Homo sapiens
uugccgcuuaagcuuucagc

SEQ ID NO: 18454 - RNA, 17 nt, Homo sapiens
uugaagauuuaauuacu

SEQ ID NO: 18455 - RNA, 19 nt, Homo sapiens
uugaagcuuuaagaacuaa

SEQ ID NO: 18456 - RNA, 18 nt, Homo sapiens
uuccucacuuugaagagu

SEQ ID NO: 18457 - RNA, 16 nt, Homo sapiens
uuccuccgcugggccu

SEQ ID NO: 18458 - RNA, 21 nt, Homo sapiens
uucuuagggaaggauacaaaa

SEQ ID NO: 18459 - RNA, 19 nt, Homo sapiens
uuuaaauuaaauaaaauuu

SEQ ID NO: 18460 - RNA, 20 nt, Homo sapiens
uuuaaauuaaauaaaauuuu

SEQ ID NO: 18461 - RNA, 18 nt, Homo sapiens
uuuauugaaaugauuuca

SEQ ID NO: 18462 - RNA, 18 nt, Homo sapiens
uuucacaaagaacaggaa

SEQ ID NO: 18463 - RNA, 18 nt, Homo sapiens
uuugagaaauuaaguauc

SEQ ID NO: 18464 - RNA, 13 nt, Homo sapiens
uuugauguuuuaa

SEQ ID NO: 18465 - RNA, 18 nt, Homo sapiens
uuugguugcuuuaauauc

SEQ ID NO: 18466 - RNA, 14 nt, Homo sapiens
ugcuauuugcuguu

SEQ ID NO: 18467 - RNA, 22 nt, Homo sapiens
ugcuuuaauaucaucaguauug

SEQ ID NO: 18468 - RNA, 18 nt, Homo sapiens
uggaagccucuauugcca

SEQ ID NO: 18469 - RNA, 14 nt, Homo sapiens
uggauucauauuua

SEQ ID NO: 18470 - RNA, 16 nt, Homo sapiens
uggauuuaacagaaau

SEQ ID NO: 18471 - RNA, 15 nt, Homo sapiens
uggccccugccaccu

SEQ ID NO: 18472 - RNA, 22 nt, Homo sapiens
uggccuagcauacguacacauu

SEQ ID NO: 18473 - RNA, 17 nt, Homo sapiens
ugggccuggauggcugc

SEQ ID NO: 18474 - RNA, 16 nt, Homo sapiens
uggugguuucagaaau

SEQ ID NO: 18475 - RNA, 13 nt, Homo sapiens
ugguuuguaaauu

SEQ ID NO: 18476 - RNA, 18 nt, Homo sapiens
ugguuuguaaauuaacuu

SEQ ID NO: 18477 - RNA, 16 nt, Homo sapiens
ucuucugacacuaaaa

SEQ ID NO: 18478 - RNA, 21 nt, Homo sapiens
ucuugauugugggauacuauu

SEQ ID NO: 18479 - RNA, 21 nt, Homo sapiens
ucuuguaaggcauacugccuu

SEQ ID NO: 18480 - RNA, 18 nt, Homo sapiens
ucuuaaauaauaaagauc

SEQ ID NO: 18481 - RNA, 15 nt, Homo sapiens
ucuuaguaugugcau

SEQ ID NO: 18482 - RNA, 21 nt, Homo sapiens
ucuuaguaugugcauuuaauu

SEQ ID NO: 18483 - RNA, 24 nt, Homo sapiens
ucugcagcaauaaagcagcguuuc

SEQ ID NO: 18484 - RNA, 17 nt, Homo sapiens
ucgcuuuugauaaucaa

SEQ ID NO: 18485 - RNA, 18 nt, Homo sapiens
ucgcuuuugauaaucaac

SEQ ID NO: 18486 - RNA, 17 nt, Homo sapiens
ucuaguuugauuaaauu

SEQ ID NO: 18487 - RNA, 18 nt, Homo sapiens
ucuaguuugauuaaauuc

SEQ ID NO: 18488 - RNA, 19 nt, Homo sapiens
ucuaguuugauuaaauucu

SEQ ID NO: 18489 - RNA, 22 nt, Homo sapiens
ucuccaaaauaaaacuuuuuaa

SEQ ID NO: 18490 - RNA, 13 nt, Homo sapiens
ucuccaugauccc

SEQ ID NO: 18491 - RNA, 22 nt, Homo sapiens
ucuccaugaucccaccucccau

SEQ ID NO: 18492 - RNA, 20 nt, Homo sapiens
ucuccauggcccugccaugc

SEQ ID NO: 18493 - RNA, 15 nt, Homo sapiens
ucuauguuaauauuu

SEQ ID NO: 18494 - RNA, 21 nt, Homo sapiens
ucucaguugcagcccugcugc

SEQ ID NO: 18495 - RNA, 12 nt, Homo sapiens
ucuccuuggaua

SEQ ID NO: 18496 - RNA, 17 nt, Homo sapiens
uccguuaaaauaccagc

SEQ ID NO: 18497 - RNA, 21 nt, Homo sapiens
uccgcuauccaccaaaagggc

SEQ ID NO: 18498 - RNA, 14 nt, Homo sapiens
ucccuggccuuuca

SEQ ID NO: 18499 - RNA, 15 nt, Homo sapiens
uccuauuauauucau

SEQ ID NO: 18500 - RNA, 21 nt, Homo sapiens
uccugaaggaggcccugcccu

SEQ ID NO: 18501 - RNA, 15 nt, Homo sapiens
uccugcaaugaaguc

SEQ ID NO: 18502 - RNA, 19 nt, Homo sapiens
ugaaccguuugugauugcc

SEQ ID NO: 18503 - RNA, 20 nt, Homo sapiens
ugaaccguuugugauugcca

SEQ ID NO: 18504 - RNA, 21 nt, Homo sapiens
ugaacuuuuuguuuuguuucu

SEQ ID NO: 18505 - RNA, 14 nt, Homo sapiens
ugaagcuuuaagaa

SEQ ID NO: 18506 - RNA, 16 nt, Homo sapiens
ugaagauuuaauuacu

SEQ ID NO: 18507 - RNA, 14 nt, Homo sapiens
ugaaguaauaugca

SEQ ID NO: 18508 - RNA, 23 nt, Homo sapiens
ugaagugaaacugcuuguuuccu

SEQ ID NO: 18509 - RNA, 16 nt, Homo sapiens
ugacauaucacauguc

SEQ ID NO: 18510 - RNA, 23 nt, Homo sapiens
ugaccuccuccuucauggcaggc

SEQ ID NO: 18511 - RNA, 17 nt, Homo sapiens
ugacuuacuguacauga

SEQ ID NO: 18512 - RNA, 15 nt, Homo sapiens
ugagccuuuguugcu

SEQ ID NO: 18513 - RNA, 17 nt, Homo sapiens
ugagcggaccuucccag

SEQ ID NO: 18514 - RNA, 23 nt, Homo sapiens
ugauaaagaugagugagcaugcc

SEQ ID NO: 18515 - RNA, 11 nt, Homo sapiens
ugaugcugagc

SEQ ID NO: 18516 - RNA, 12 nt, Homo sapiens
ugaugcugagcc

SEQ ID NO: 18517 - RNA, 13 nt, Homo sapiens
ugauguuuuaagg

SEQ ID NO: 18518 - RNA, 22 nt, Homo sapiens
ugauucauauuuaauuugaaga

SEQ ID NO: 18519 - RNA, 23 nt, Homo sapiens
ugauucauauuuaauuugaagau

SEQ ID NO: 18520 - RNA, 24 nt, Homo sapiens
ugauucauauuuaauuugaagaua

SEQ ID NO: 18521 - RNA, 19 nt, Homo sapiens
ugauuuggggauauuuuuu

SEQ ID NO: 18522 - RNA, 17 nt, Homo sapiens
ugauuuuauaugcuauu

SEQ ID NO: 18523 - RNA, 14 nt, Homo sapiens
ugauuuuuguaauu

SEQ ID NO: 18524 - RNA, 15 nt, Homo sapiens
ugcacaucuguuuug

SEQ ID NO: 18525 - RNA, 18 nt, Homo sapiens
ugcacaucuguuuuguaa

SEQ ID NO: 18526 - RNA, 11 nt, Homo sapiens
ugcagcccugc

SEQ ID NO: 18527 - RNA, 15 nt, Homo sapiens
ugcagcccugcugcu

SEQ ID NO: 18528 - RNA, 13 nt, Homo sapiens
ugccaccuccugc

SEQ ID NO: 18529 - RNA, 14 nt, Homo sapiens
ugcccuuacaggaa

SEQ ID NO: 18530 - RNA, 12 nt, Homo sapiens
ugccugcccuga

SEQ ID NO: 18531 - RNA, 12 nt, Homo sapiens
ugcuacacacug

SEQ ID NO: 18532 - RNA, 15 nt, Homo sapiens
ugcugccugccugga

SEQ ID NO: 18533 - RNA, 13 nt, Homo sapiens
ugcugcugccugc

SEQ ID NO: 18534 - RNA, 14 nt, Homo sapiens
uccaauuaaggauu

SEQ ID NO: 18535 - RNA, 15 nt, Homo sapiens
uccaauuaaggauuu

SEQ ID NO: 18536 - RNA, 17 nt, Homo sapiens
uccagguuccugagccc

SEQ ID NO: 18537 - RNA, 18 nt, Homo sapiens
uccagguuccugagcccu

SEQ ID NO: 18538 - RNA, 15 nt, Homo sapiens
ucccauucacagaua

SEQ ID NO: 18539 - RNA, 13 nt, Homo sapiens
ucauauuuaauuu

SEQ ID NO: 18540 - RNA, 13 nt, Homo sapiens
ucauguugaaacu

SEQ ID NO: 18541 - RNA, 18 nt, Homo sapiens
ucauuaguuuugaagauu

SEQ ID NO: 18542 - RNA, 17 nt, Homo sapiens
ucauuauguuaauauuu

SEQ ID NO: 18543 - RNA, 15 nt, Homo sapiens
ucauucugccugccc

SEQ ID NO: 18544 - RNA, 14 nt, Homo sapiens
ucauucuuuuugaa

SEQ ID NO: 18545 - RNA, 16 nt, Homo sapiens
ucauucuuuuugaaau

SEQ ID NO: 18546 - RNA, 15 nt, Homo sapiens
ucauuuuuuuuaaga

SEQ ID NO: 18547 - RNA, 13 nt, Homo sapiens
uauuuuuuucuuu

SEQ ID NO: 18548 - RNA, 14 nt, Homo sapiens
ucaaccaccuuuca

SEQ ID NO: 18549 - RNA, 15 nt, Homo sapiens
ucaaccaccuuucag

SEQ ID NO: 18550 - RNA, 13 nt, Homo sapiens
uauuuauuuguuu

SEQ ID NO: 18551 - RNA, 16 nt, Homo sapiens
uauuuuagguguaaaa

SEQ ID NO: 18552 - RNA, 18 nt, Homo sapiens
uauaugugaugaucuacc

SEQ ID NO: 18553 - RNA, 18 nt, Homo sapiens
uaugcacacauuuuuuaa

SEQ ID NO: 18554 - RNA, 17 nt, Homo sapiens
uauuaaguauuuuauua

SEQ ID NO: 18555 - RNA, 18 nt, Homo sapiens
uauguuagagaauuuccu

SEQ ID NO: 18556 - RNA, 19 nt, Homo sapiens
uauguuagagaauuuccuu

SEQ ID NO: 18557 - RNA, 22 nt, Homo sapiens
uauugauuuccguuaaaauacc

SEQ ID NO: 18558 - RNA, 15 nt, Homo sapiens
ucaaguucaccagac

SEQ ID NO: 18559 - RNA, 19 nt, Homo sapiens
ucaauguuuagcagauuua

SEQ ID NO: 18560 - RNA, 20 nt, Homo sapiens
ucaauguuuagcagauuuaa

SEQ ID NO: 18561 - RNA, 20 nt, Homo sapiens
ucaauuuuaaggcauauuua

SEQ ID NO: 18562 - RNA, 19 nt, Homo sapiens
ucacugguggcuguuccug

SEQ ID NO: 18563 - RNA, 15 nt, Homo sapiens
ucagaucucuaacuu

SEQ ID NO: 18564 - RNA, 23 nt, Homo sapiens
ucagcucucaguugcagcccugc

SEQ ID NO: 18565 - RNA, 17 nt, Homo sapiens
uaacagaaauguacagc

SEQ ID NO: 18566 - RNA, 14 nt, Homo sapiens
uaaccagcagaaau

SEQ ID NO: 18567 - RNA, 15 nt, Homo sapiens
uaagaaaaaggaugc

SEQ ID NO: 18568 - RNA, 17 nt, Homo sapiens
uaagcauauacuagaua

SEQ ID NO: 18569 - RNA, 11 nt, Homo sapiens
uaaggaaacug

SEQ ID NO: 18570 - RNA, 12 nt, Homo sapiens
uaaggaaacugg

SEQ ID NO: 18571 - RNA, 13 nt, Homo sapiens
uaaggaaacuggg

SEQ ID NO: 18572 - RNA, 19 nt, Homo sapiens
uaauaugcacacauuuuuu

SEQ ID NO: 18573 - RNA, 18 nt, Homo sapiens
uaauuuuagacauucuuu

SEQ ID NO: 18574 - RNA, 15 nt, Homo sapiens
uaaauaauaaagauc

SEQ ID NO: 18575 - RNA, 19 nt, Homo sapiens
uaaauagcuaagauauaau

SEQ ID NO: 18576 - RNA, 20 nt, Homo sapiens
uaaaguguauuuuuuuacua

SEQ ID NO: 18577 - RNA, 16 nt, Homo sapiens
guuugugauugccauu

SEQ ID NO: 18578 - RNA, 10 nt, Homo sapiens
uaaaauuuuu

SEQ ID NO: 18579 - RNA, 17 nt, Homo sapiens
uaaacauguauguaaau

SEQ ID NO: 18580 - RNA, 17 nt, Homo sapiens
uaaagaugaaugucagu

SEQ ID NO: 18581 - RNA, 14 nt, Homo sapiens
uaaaggaagguucu

SEQ ID NO: 18582 - RNA, 19 nt, Homo sapiens
guugucaaugggaaaaaac

SEQ ID NO: 18583 - RNA, 19 nt, Homo sapiens
guuuauauagaaauguauu

SEQ ID NO: 18584 - RNA, 17 nt, Homo sapiens
guuucauaagaauucug

SEQ ID NO: 18585 - RNA, 18 nt, Homo sapiens
guuucauaagaauucugu

SEQ ID NO: 18586 - RNA, 23 nt, Homo sapiens
guuuccuagcacacacuuuuggu

SEQ ID NO: 18587 - RNA, 17 nt, Homo sapiens
uaccuuuuuuauacaua

SEQ ID NO: 18588 - RNA, 18 nt, Homo sapiens
uacauguauuuguuugca

SEQ ID NO: 18589 - RNA, 11 nt, Homo sapiens
uacuaaguuuu

SEQ ID NO: 18590 - RNA, 13 nt, Homo sapiens
uacuauuuaauua

SEQ ID NO: 18591 - RNA, 14 nt, Homo sapiens
uagaauguuuucaa

SEQ ID NO: 18592 - RNA, 19 nt, Homo sapiens
uagacaauuuauuauggca

SEQ ID NO: 18593 - RNA, 15 nt, Homo sapiens
uagagaauuuccuua

SEQ ID NO: 18594 - RNA, 15 nt, Homo sapiens
uagauagaugaagaa

SEQ ID NO: 18595 - RNA, 22 nt, Homo sapiens
uagcauaguaccucugcuauuu

SEQ ID NO: 18596 - RNA, 14 nt, Homo sapiens
uagcucucugaccu

SEQ ID NO: 18597 - RNA, 11 nt, Homo sapiens
uaggaacuuaa

SEQ ID NO: 18598 - RNA, 12 nt, Homo sapiens
uaggaacuuaaa

SEQ ID NO: 18599 - RNA, 19 nt, Homo sapiens
uaguaugaggcauuuguuu

SEQ ID NO: 18600 - RNA, 21 nt, Homo sapiens
uauaaauuuaucauuuaguua

SEQ ID NO: 18601 - RNA, 15 nt, Homo sapiens
guucaaagauauuuu

SEQ ID NO: 18602 - RNA, 13 nt, Homo sapiens
guugauggaaaua

SEQ ID NO: 18603 - RNA, 20 nt, Homo sapiens
guugcagcccugcugcugcc

SEQ ID NO: 18604 - RNA, 12 nt, Homo sapiens
guuauuuauaau

SEQ ID NO: 18605 - RNA, 15 nt, Homo sapiens
guuauuuauaaucac

SEQ ID NO: 18606 - RNA, 19 nt, Homo sapiens
guuauuuauaaucacuuuu

SEQ ID NO: 18607 - RNA, 19 nt, Homo sapiens
guuauuuauugaaaugauu

SEQ ID NO: 18608 - RNA, 22 nt, Homo sapiens
guuauuuuaucugcuaugcuau

SEQ ID NO: 18609 - RNA, 23 nt, Homo sapiens
guuauuuuaucugcuaugcuauu

SEQ ID NO: 18610 - RNA, 13 nt, Homo sapiens
gugugaggaaaac

SEQ ID NO: 18611 - RNA, 13 nt, Homo sapiens
guguuugagcauc

SEQ ID NO: 18612 - RNA, 15 nt, Homo sapiens
guuaucuucacuuuu

SEQ ID NO: 18613 - RNA, 12 nt, Homo sapiens
gugauuuuugua

SEQ ID NO: 18614 - RNA, 20 nt, Homo sapiens
gugcauuuggugguuucaga

SEQ ID NO: 18615 - RNA, 15 nt, Homo sapiens
gugggaccugggcca

SEQ ID NO: 18616 - RNA, 24 nt, Homo sapiens
gucccuagcccuuacguccuucca

SEQ ID NO: 18617 - RNA, 15 nt, Homo sapiens
guccgcuauccacca

SEQ ID NO: 18618 - RNA, 18 nt, Homo sapiens
gucucugaagugaaacug

SEQ ID NO: 18619 - RNA, 18 nt, Homo sapiens
gugagaccaaauugagcu

SEQ ID NO: 18620 - RNA, 16 nt, Homo sapiens
gugagcaucacaguuu

SEQ ID NO: 18621 - RNA, 17 nt, Homo sapiens
guauuuuuuuacuaaua

SEQ ID NO: 18622 - RNA, 22 nt, Homo sapiens
gucauuauguuaauauuucuga

SEQ ID NO: 18623 - RNA, 15 nt, Homo sapiens
guagaauauauuucc

SEQ ID NO: 18624 - RNA, 16 nt, Homo sapiens
guagaauauauuuccu

SEQ ID NO: 18625 - RNA, 13 nt, Homo sapiens
guaguuagcuuuc

SEQ ID NO: 18626 - RNA, 12 nt, Homo sapiens
guauggcaaacu

SEQ ID NO: 18627 - RNA, 19 nt, Homo sapiens
guauucucuccuguaccuc

SEQ ID NO: 18628 - RNA, 20 nt, Homo sapiens
gguagcuaaauauauauuuu

SEQ ID NO: 18629 - RNA, 17 nt, Homo sapiens
ggucacuuuacuguccc

SEQ ID NO: 18630 - RNA, 22 nt, Homo sapiens
gguggcuguuccugaaggaggc

SEQ ID NO: 18631 - RNA, 14 nt, Homo sapiens
guaaaggcaaacuu

SEQ ID NO: 18632 - RNA, 22 nt, Homo sapiens
guaacaacaauuauuugaagau

SEQ ID NO: 18633 - RNA, 13 nt, Homo sapiens
guaccauaauucu

SEQ ID NO: 18634 - RNA, 16 nt, Homo sapiens
ggaguaccauaauucu

SEQ ID NO: 18635 - RNA, 17 nt, Homo sapiens
ggaguaccauaauucug

SEQ ID NO: 18636 - RNA, 18 nt, Homo sapiens
ggaguaccauaauucugg

SEQ ID NO: 18637 - RNA, 15 nt, Homo sapiens
ggaugcuuguacaua

SEQ ID NO: 18638 - RNA, 12 nt, Homo sapiens
gcuuuugauaau

SEQ ID NO: 18639 - RNA, 11 nt, Homo sapiens
ggaaauauuuu

SEQ ID NO: 18640 - RNA, 16 nt, Homo sapiens
ggaauauauaaccagu

SEQ ID NO: 18641 - RNA, 18 nt, Homo sapiens
ggaccaggcacccccaga

SEQ ID NO: 18642 - RNA, 18 nt, Homo sapiens
ggaccugggccauaguca

SEQ ID NO: 18643 - RNA, 15 nt, Homo sapiens
ggauuccucacuuug

SEQ ID NO: 18644 - RNA, 16 nt, Homo sapiens
ggauuuaacagaaaug

SEQ ID NO: 18645 - RNA, 19 nt, Homo sapiens
ggcaaacugccaucauuua

SEQ ID NO: 18646 - RNA, 16 nt, Homo sapiens
ggcccugccaugcucu

SEQ ID NO: 18647 - RNA, 19 nt, Homo sapiens
ggcccugccaugcucucca

SEQ ID NO: 18648 - RNA, 20 nt, Homo sapiens
ggcaguggugguuuucuguu

SEQ ID NO: 18649 - RNA, 19 nt, Homo sapiens
ggcauauuuaacaaaauuu

SEQ ID NO: 18650 - RNA, 20 nt, Homo sapiens
ggcauauuuaacaaaauuug

SEQ ID NO: 18651 - RNA, 16 nt, Homo sapiens
gcuuauugguggcugu

SEQ ID NO: 18652 - RNA, 13 nt, Homo sapiens
gcugcauuuaaaa

SEQ ID NO: 18653 - RNA, 20 nt, Homo sapiens
gcuaggggggucagccagcc

SEQ ID NO: 18654 - RNA, 12 nt, Homo sapiens
gcuaguuuauau

SEQ ID NO: 18655 - RNA, 17 nt, Homo sapiens
gcucuccaaaccacuuu

SEQ ID NO: 18656 - RNA, 15 nt, Homo sapiens
gcuaccucuccagcc

SEQ ID NO: 18657 - RNA, 13 nt, Homo sapiens
gcuaccuuuguau

SEQ ID NO: 18658 - RNA, 11 nt, Homo sapiens
gcuaugcauuu

SEQ ID NO: 18659 - RNA, 12 nt, Homo sapiens
gcuaugcauuug

SEQ ID NO: 18660 - RNA, 15 nt, Homo sapiens
gcuaugcuauugaag

SEQ ID NO: 18661 - RNA, 19 nt, Homo sapiens
gcaugaaguaauaugcaca

SEQ ID NO: 18662 - RNA, 14 nt, Homo sapiens
gcaucacaguuuug

SEQ ID NO: 18663 - RNA, 16 nt, Homo sapiens
gcauuaucuagauacu

SEQ ID NO: 18664 - RNA, 20 nt, Homo sapiens
gcauuaucuagauacuguau

SEQ ID NO: 18665 - RNA, 15 nt, Homo sapiens
gcauuuguuugaacu

SEQ ID NO: 18666 - RNA, 13 nt, Homo sapiens
gccaccuccugcc

SEQ ID NO: 18667 - RNA, 15 nt, Homo sapiens
gccaccuccugccuc

SEQ ID NO: 18668 - RNA, 20 nt, Homo sapiens
gccacugugauagaggcuga

SEQ ID NO: 18669 - RNA, 20 nt, Homo sapiens
gcagcccugcugcugccugc

SEQ ID NO: 18670 - RNA, 13 nt, Homo sapiens
gcagugaggcgga

SEQ ID NO: 18671 - RNA, 19 nt, Homo sapiens
gcauaguaccucugcuauu

SEQ ID NO: 18672 - RNA, 22 nt, Homo sapiens
gcauaguaccucugcuauuugc

SEQ ID NO: 18673 - RNA, 12 nt, Homo sapiens
gcccugccaugc

SEQ ID NO: 18674 - RNA, 16 nt, Homo sapiens
gcccugcugcugccug

SEQ ID NO: 18675 - RNA, 18 nt, Homo sapiens
gcccuuacguccuuccac

SEQ ID NO: 18676 - RNA, 15 nt, Homo sapiens
gccgcuuaagcuuuc

SEQ ID NO: 18677 - RNA, 11 nt, Homo sapiens
gccucagcucu

SEQ ID NO: 18678 - RNA, 14 nt, Homo sapiens
gccucagcucucag

SEQ ID NO: 18679 - RNA, 23 nt, Homo sapiens
gccucuauugccaugagaguucu

SEQ ID NO: 18680 - RNA, 14 nt, Homo sapiens
gcgccuaauguguu

SEQ ID NO: 18681 - RNA, 20 nt, Homo sapiens
gcgcuaccucuccagccuca

SEQ ID NO: 18682 - RNA, 15 nt, Homo sapiens
gcggaccuucccagc

SEQ ID NO: 18683 - RNA, 17 nt, Homo sapiens
gcggaccuucccagcua

SEQ ID NO: 18684 - RNA, 14 nt, Homo sapiens
gcggaccuucccag

SEQ ID NO: 18685 - RNA, 17 nt, Homo sapiens
gcuaagauauaauuuaa

SEQ ID NO: 18686 - RNA, 15 nt, Homo sapiens
gcagcaauaaagcag

SEQ ID NO: 18687 - RNA, 22 nt, Homo sapiens
gcacacucucccauuauauuua

SEQ ID NO: 18688 - RNA, 14 nt, Homo sapiens
gcacgauuucuguu

SEQ ID NO: 18689 - RNA, 15 nt, Homo sapiens
gcacgauuucuguuu

SEQ ID NO: 18690 - RNA, 15 nt, Homo sapiens
gcacauauccuuagc

SEQ ID NO: 18691 - RNA, 17 nt, Homo sapiens
gcacaucuguuuuguaa

SEQ ID NO: 18692 - RNA, 17 nt, Homo sapiens
gaugcuuguacauaaug

SEQ ID NO: 18693 - RNA, 20 nt, Homo sapiens
gauggcaggaggcauccaaa

SEQ ID NO: 18694 - RNA, 11 nt, Homo sapiens
gaugaacuuuu

SEQ ID NO: 18695 - RNA, 23 nt, Homo sapiens
gauguuuucacaaagaacaggaa

SEQ ID NO: 18696 - RNA, 12 nt, Homo sapiens
gauuaaacuuaa

SEQ ID NO: 18697 - RNA, 18 nt, Homo sapiens
gauuaacucuaccugcac

SEQ ID NO: 18698 - RNA, 13 nt, Homo sapiens
gauucaauuuuaa

SEQ ID NO: 18699 - RNA, 13 nt, Homo sapiens
gauuccucacuuu

SEQ ID NO: 18700 - RNA, 14 nt, Homo sapiens
gauuccucacuuug

SEQ ID NO: 18701 - RNA, 12 nt, Homo sapiens
gauugugggaua

SEQ ID NO: 18702 - RNA, 20 nt, Homo sapiens
gauugugggauacuauuuaa

SEQ ID NO: 18703 - RNA, 19 nt, Homo sapiens
gauuuuauaugcuauuuau

SEQ ID NO: 18704 - RNA, 17 nt, Homo sapiens
gagcgcuaccucuccag

SEQ ID NO: 18705 - RNA, 13 nt, Homo sapiens
gaggaaagagaga

SEQ ID NO: 18706 - RNA, 14 nt, Homo sapiens
gaggaaagagagac

SEQ ID NO: 18707 - RNA, 14 nt, Homo sapiens
gaggagccugcaac

SEQ ID NO: 18708 - RNA, 19 nt, Homo sapiens
gaggaauccaagaaaaugg

SEQ ID NO: 18709 - RNA, 20 nt, Homo sapiens
gagccaggaaucacuggcug

SEQ ID NO: 18710 - RNA, 15 nt, Homo sapiens
gagggcuaauaucuu

SEQ ID NO: 18711 - RNA, 17 nt, Homo sapiens
gaggggcuucugggcag

SEQ ID NO: 18712 - RNA, 13 nt, Homo sapiens
gaggucucugaac

SEQ ID NO: 18713 - RNA, 12 nt, Homo sapiens
gauaaugcuaau

SEQ ID NO: 18714 - RNA, 16 nt, Homo sapiens
gaucaaugugacggca

SEQ ID NO: 18715 - RNA, 21 nt, Homo sapiens
gaucaaugugacggcagggaa

SEQ ID NO: 18716 - RNA, 11 nt, Homo sapiens
gaaauauuccu

SEQ ID NO: 18717 - RNA, 21 nt, Homo sapiens
gaaccguuugugauugccauu

SEQ ID NO: 18718 - RNA, 12 nt, Homo sapiens
gaaggauacaaa

SEQ ID NO: 18719 - RNA, 14 nt, Homo sapiens
gaauauauaaccag

SEQ ID NO: 18720 - RNA, 14 nt, Homo sapiens
gaaugaccuggccg

SEQ ID NO: 18721 - RNA, 15 nt, Homo sapiens
gacauacuaaccagc

SEQ ID NO: 18722 - RNA, 20 nt, Homo sapiens
gacauacuaaccagcagaaa

SEQ ID NO: 18723 - RNA, 17 nt, Homo sapiens
gacaugggccccagaua

SEQ ID NO: 18724 - RNA, 20 nt, Homo sapiens
gacaugggccccagauacca

SEQ ID NO: 18725 - RNA, 17 nt, Homo sapiens
gaccaggcacccccaga

SEQ ID NO: 18726 - RNA, 18 nt, Homo sapiens
gaccucugcagcaauaaa

SEQ ID NO: 18727 - RNA, 21 nt, Homo sapiens
gacugcuaguuuauauagaaa

SEQ ID NO: 18728 - RNA, 15 nt, Homo sapiens
gacuuacuguacaug

SEQ ID NO: 18729 - RNA, 15 nt, Homo sapiens
gacuucauuaauaau

SEQ ID NO: 18730 - RNA, 17 nt, Homo sapiens
gacuuggccccugccac

SEQ ID NO: 18731 - RNA, 19 nt, Homo sapiens
gacuuggccccugccaccu

SEQ ID NO: 18732 - RNA, 17 nt, Homo sapiens
gacuuguacucugaaag

SEQ ID NO: 18733 - RNA, 21 nt, Homo sapiens
gagaaggcuguggauuuaaug

SEQ ID NO: 18734 - RNA, 16 nt, Homo sapiens
gagaauaaaaaaugua

SEQ ID NO: 18735 - RNA, 14 nt, Homo sapiens
auguuucuugggga

SEQ ID NO: 18736 - RNA, 21 nt, Homo sapiens
augugaaacuggauuaaacuu

SEQ ID NO: 18737 - RNA, 15 nt, Homo sapiens
augugacggcaggga

SEQ ID NO: 18738 - RNA, 23 nt, Homo sapiens
auguguaaaauaagguuaugauu

SEQ ID NO: 18739 - RNA, 14 nt, Homo sapiens
auguuaauauuucu

SEQ ID NO: 18740 - RNA, 18 nt, Homo sapiens
auguuagagaauuuccuu

SEQ ID NO: 18741 - RNA, 22 nt, Homo sapiens
auggcccugccaugcucuccaa

SEQ ID NO: 18742 - RNA, 11 nt, Homo sapiens
auguaacaaca

SEQ ID NO: 18743 - RNA, 12 nt, Homo sapiens
auguaacaacaa

SEQ ID NO: 18744 - RNA, 21 nt, Homo sapiens
auggucggaaaacaugcuaca

SEQ ID NO: 18745 - RNA, 13 nt, Homo sapiens
augcacacauuuu

SEQ ID NO: 18746 - RNA, 22 nt, Homo sapiens
augcacagaguuguuacauuuu

SEQ ID NO: 18747 - RNA, 21 nt, Homo sapiens
augcaugaaguaauaugcaca

SEQ ID NO: 18748 - RNA, 13 nt, Homo sapiens
augcuauuuauua

SEQ ID NO: 18749 - RNA, 15 nt, Homo sapiens
augcucuccaaacca

SEQ ID NO: 18750 - RNA, 16 nt, Homo sapiens
augcugagcccggaaa

SEQ ID NO: 18751 - RNA, 12 nt, Homo sapiens
augcuuguacau

SEQ ID NO: 18752 - RNA, 14 nt, Homo sapiens
auucauauuuaauu

SEQ ID NO: 18753 - RNA, 14 nt, Homo sapiens
auucuauguuaaua

SEQ ID NO: 18754 - RNA, 18 nt, Homo sapiens
auucugccugcccugaaa

SEQ ID NO: 18755 - RNA, 12 nt, Homo sapiens
auuaaauaaaau

SEQ ID NO: 18756 - RNA, 13 nt, Homo sapiens
auuaaauaaaauu

SEQ ID NO: 18757 - RNA, 15 nt, Homo sapiens
auuaaggauuuuaug

SEQ ID NO: 18758 - RNA, 16 nt, Homo sapiens
auuauuugaagauuua

SEQ ID NO: 18759 - RNA, 19 nt, Homo sapiens
auuauuugaagauuuaauu

SEQ ID NO: 18760 - RNA, 20 nt, Homo sapiens
auuauuugaagauuuaauua

SEQ ID NO: 18761 - RNA, 14 nt, Homo sapiens
auugagaaggagcu

SEQ ID NO: 18762 - RNA, 18 nt, Homo sapiens
auuggcuagagguucaaa

SEQ ID NO: 18763 - RNA, 14 nt, Homo sapiens
auuuaguuauaaaa

SEQ ID NO: 18764 - RNA, 12 nt, Homo sapiens
auuuauaaucac

SEQ ID NO: 18765 - RNA, 19 nt, Homo sapiens
auuuauugaaaugauuuca

SEQ ID NO: 18766 - RNA, 14 nt, Homo sapiens
auuuauuuauucau

SEQ ID NO: 18767 - RNA, 21 nt, Homo sapiens
auuuccaagaaauauuccuua

SEQ ID NO: 18768 - RNA, 20 nt, Homo sapiens
auuuccguuaaaauaccagc

SEQ ID NO: 18769 - RNA, 23 nt, Homo sapiens
auuucuaaaucuccaaaauaaaa

SEQ ID NO: 18770 - RNA, 13 nt, Homo sapiens
auuugaagauuua

SEQ ID NO: 18771 - RNA, 13 nt, Homo sapiens
auuugaauauaaa

SEQ ID NO: 18772 - RNA, 14 nt, Homo sapiens
auuugaauauaaau

SEQ ID NO: 18773 - RNA, 21 nt, Homo sapiens
auuugaauauaaauuuaucau

SEQ ID NO: 18774 - RNA, 22 nt, Homo sapiens
auuugaauauaaauuuaucauu

SEQ ID NO: 18775 - RNA, 19 nt, Homo sapiens
auuugcuguuauuuuaucu

SEQ ID NO: 18776 - RNA, 14 nt, Homo sapiens
auuuaagauaugua

SEQ ID NO: 18777 - RNA, 15 nt, Homo sapiens
auuuaagauauguaa

SEQ ID NO: 18778 - RNA, 22 nt, Homo sapiens
auuucuuuugccguuauuaaaa

SEQ ID NO: 18779 - RNA, 13 nt, Homo sapiens
auuuguuugcaua

SEQ ID NO: 18780 - RNA, 20 nt, Homo sapiens
auuuuaaggcauauuuaaca

SEQ ID NO: 18781 - RNA, 23 nt, Homo sapiens
auuuuaauguuucuuggggaaua

SEQ ID NO: 18782 - RNA, 18 nt, Homo sapiens
caccuuaucuauguagaa

SEQ ID NO: 18783 - RNA, 19 nt, Homo sapiens
caccccggacuccuccgca

SEQ ID NO: 18784 - RNA, 21 nt, Homo sapiens
caccucagcugccuccccagc

SEQ ID NO: 18785 - RNA, 22 nt, Homo sapiens
caccucagcugccuccccagcu

SEQ ID NO: 18786 - RNA, 12 nt, Homo sapiens
caccucccauuc

SEQ ID NO: 18787 - RNA, 19 nt, Homo sapiens
caauguuuagcagauuuaa

SEQ ID NO: 18788 - RNA, 20 nt, Homo sapiens
caauuuuaaggcauauuuaa

SEQ ID NO: 18789 - RNA, 13 nt, Homo sapiens
cacacuuuugguu

SEQ ID NO: 18790 - RNA, 11 nt, Homo sapiens
cacacacuuuu

SEQ ID NO: 18791 - RNA, 18 nt, Homo sapiens
cacaguguguggucaaca

SEQ ID NO: 18792 - RNA, 21 nt, Homo sapiens
cacauuuuauuuuauuaugca

SEQ ID NO: 18793 - RNA, 13 nt, Homo sapiens
auuuuaggucaaa

SEQ ID NO: 18794 - RNA, 14 nt, Homo sapiens
auuuuaggucaaac

SEQ ID NO: 18795 - RNA, 13 nt, Homo sapiens
auuuuaugcuuua

SEQ ID NO: 18796 - RNA, 12 nt, Homo sapiens
auuuuucucaau

SEQ ID NO: 18797 - RNA, 12 nt, Homo sapiens
auuuuuguaauu

SEQ ID NO: 18798 - RNA, 22 nt, Homo sapiens
auuuuuguaauuuuuuuaucgu

SEQ ID NO: 18799 - RNA, 23 nt, Homo sapiens
auuuuuuuacuaauagacaauuu

SEQ ID NO: 18800 - RNA, 21 nt, Homo sapiens
auuuuuuuuuucaauaaaacu

SEQ ID NO: 18801 - RNA, 23 nt, Homo sapiens
caaacuuaacaaugacuuguacu

SEQ ID NO: 18802 - RNA, 17 nt, Homo sapiens
caaauugagcuaggggg

SEQ ID NO: 18803 - RNA, 22 nt, Homo sapiens
caacaauuauuugaagauuuaa

SEQ ID NO: 18804 - RNA, 14 nt, Homo sapiens
caaggucauuuuuu

SEQ ID NO: 18805 - RNA, 16 nt, Homo sapiens
auagacaauuuauuau

SEQ ID NO: 18806 - RNA, 21 nt, Homo sapiens
auauccuuagcccaucuuuca

SEQ ID NO: 18807 - RNA, 13 nt, Homo sapiens
auacuacaguuug

SEQ ID NO: 18808 - RNA, 23 nt, Homo sapiens
auacuauuuaauuauuucacuuu

SEQ ID NO: 18809 - RNA, 24 nt, Homo sapiens
auacuauuuaauuauuucacuuua

SEQ ID NO: 18810 - RNA, 15 nt, Homo sapiens
auacguacacauuuu

SEQ ID NO: 18811 - RNA, 17 nt, Homo sapiens
auaaaauuuuuauguaa

SEQ ID NO: 18812 - RNA, 19 nt, Homo sapiens
auaaacaagaccacguuuc

SEQ ID NO: 18813 - RNA, 16 nt, Homo sapiens
auaacuguuauuuaua

SEQ ID NO: 18814 - RNA, 22 nt, Homo sapiens
auaaugcgugcauaccacuuuu

SEQ ID NO: 18815 - RNA, 12 nt, Homo sapiens
auacauaaacaa

SEQ ID NO: 18816 - RNA, 13 nt, Homo sapiens
auacauaaacaag

SEQ ID NO: 18817 - RNA, 12 nt, Homo sapiens
agugcugcauuu

SEQ ID NO: 18818 - RNA, 16 nt, Homo sapiens
agugcugcauuuaaaa

SEQ ID NO: 18819 - RNA, 12 nt, Homo sapiens
agucuguuuuau

SEQ ID NO: 18820 - RNA, 12 nt, Homo sapiens
agugaaacugcu

SEQ ID NO: 18821 - RNA, 16 nt, Homo sapiens
aguucaaguucaccag

SEQ ID NO: 18822 - RNA, 13 nt, Homo sapiens
aguuuauauagaa

SEQ ID NO: 18823 - RNA, 22 nt, Homo sapiens
aguuuauauagaaauguauucu

SEQ ID NO: 18824 - RNA, 12 nt, Homo sapiens
aguguuuagcau

SEQ ID NO: 18825 - RNA, 15 nt, Homo sapiens
auaaaauauuuaaaa

SEQ ID NO: 18826 - RNA, 13 nt, Homo sapiens
aucucauuuaauc

SEQ ID NO: 18827 - RNA, 14 nt, Homo sapiens
aucuucacuuuuau

SEQ ID NO: 18828 - RNA, 17 nt, Homo sapiens
auccuccuccugcuucc

SEQ ID NO: 18829 - RNA, 16 nt, Homo sapiens
auccucucaaccaccu

SEQ ID NO: 18830 - RNA, 20 nt, Homo sapiens
aucgcuuuugauaaucaacu

SEQ ID NO: 18831 - RNA, 16 nt, Homo sapiens
auaugcuauuuauuaa

SEQ ID NO: 18832 - RNA, 16 nt, Homo sapiens
auauguaacaacaauu

SEQ ID NO: 18833 - RNA, 18 nt, Homo sapiens
auauucauucuuuuugaa

SEQ ID NO: 18834 - RNA, 14 nt, Homo sapiens
auauuuaauuugaa

SEQ ID NO: 18835 - RNA, 21 nt, Homo sapiens
auauuuauugauguuuucaca

SEQ ID NO: 18836 - RNA, 15 nt, Homo sapiens
aucaauccaagaacu

SEQ ID NO: 18837 - RNA, 15 nt, Homo sapiens
aucacccagaagaaa

SEQ ID NO: 18838 - RNA, 13 nt, Homo sapiens
agguuaugauuga

SEQ ID NO: 18839 - RNA, 19 nt, Homo sapiens
aguaauaugcacacauuuu

SEQ ID NO: 18840 - RNA, 16 nt, Homo sapiens
aguacguugugcauuu

SEQ ID NO: 18841 - RNA, 17 nt, Homo sapiens
aguacguugugcauuug

SEQ ID NO: 18842 - RNA, 20 nt, Homo sapiens
aguaucagcuacaauuguaa

SEQ ID NO: 18843 - RNA, 19 nt, Homo sapiens
aguaucccuacuguaauuu

SEQ ID NO: 18844 - RNA, 18 nt, Homo sapiens
aguaucugacaucucugc

SEQ ID NO: 18845 - RNA, 13 nt, Homo sapiens
aguaugugcauuu

SEQ ID NO: 18846 - RNA, 14 nt, Homo sapiens
aguaugugcauuua

SEQ ID NO: 18847 - RNA, 15 nt, Homo sapiens
aguaugugcauuuaa

SEQ ID NO: 18848 - RNA, 17 nt, Homo sapiens
aggggcuuaauuauuga

SEQ ID NO: 18849 - RNA, 20 nt, Homo sapiens
agguagaauguuuucaaaug

SEQ ID NO: 18850 - RNA, 10 nt, Homo sapiens
aggucauuuu

SEQ ID NO: 18851 - RNA, 10 nt, Homo sapiens
aggaugcaca

SEQ ID NO: 18852 - RNA, 16 nt, Homo sapiens
aggaugcacagaguug

SEQ ID NO: 18853 - RNA, 10 nt, Homo sapiens
aggaacagaa

SEQ ID NO: 18854 - RNA, 12 nt, Homo sapiens
aggagccugcaa

SEQ ID NO: 18855 - RNA, 13 nt, Homo sapiens
aggagccugcaac

SEQ ID NO: 18856 - RNA, 13 nt, Homo sapiens
aggcaucgccauu

SEQ ID NO: 18857 - RNA, 16 nt, Homo sapiens
aggcccuagcauuucu

SEQ ID NO: 18858 - RNA, 20 nt, Homo sapiens
aggcacccccagaaugaccu

SEQ ID NO: 18859 - RNA, 19 nt, Homo sapiens
aggcauauuuaacaaaauu

SEQ ID NO: 18860 - RNA, 23 nt, Homo sapiens
agcuagaaaacaggcaaauuccu

SEQ ID NO: 18861 - RNA, 19 nt, Homo sapiens
agcucucaguugcagcccu

SEQ ID NO: 18862 - RNA, 22 nt, Homo sapiens
agcucucugaccuccuccuuca

SEQ ID NO: 18863 - RNA, 17 nt, Homo sapiens
acgugauuuuuaaauua

SEQ ID NO: 18864 - RNA, 22 nt, Homo sapiens
acucagaauucucuaguuugau

SEQ ID NO: 18865 - RNA, 16 nt, Homo sapiens
acucuugauuguggga

SEQ ID NO: 18866 - RNA, 13 nt, Homo sapiens
acugcuuaacuuc

SEQ ID NO: 18867 - RNA, 13 nt, Homo sapiens
acuggcuguuaau

SEQ ID NO: 18868 - RNA, 18 nt, Homo sapiens
accuuuuuuauacauaaa

SEQ ID NO: 18869 - RNA, 21 nt, Homo sapiens
uuggauucaauuuuaaggcau

SEQ ID NO: 18870 - RNA, 18 nt, Homo sapiens
uuguaacuguaaagauga

SEQ ID NO: 18871 - RNA, 16 nt, Homo sapiens
uuguagcguacaucaa

SEQ ID NO: 18872 - RNA, 9 nt, Homo sapiens
uuuaauauc

SEQ ID NO: 18873 - RNA, 13 nt, Homo sapiens
uuuagcagauuua

SEQ ID NO: 18874 - RNA, 13 nt, Homo sapiens
uuuauguaauuau

SEQ ID NO: 18875 - RNA, 19 nt, Homo sapiens
uuucacaaagaacaggaaa

SEQ ID NO: 18876 - RNA, 14 nt, Homo sapiens
uuugccguuauuaa

SEQ ID NO: 18877 - RNA, 19 nt, Homo sapiens
uuuuaagaaaaaggaugca

SEQ ID NO: 18878 - RNA, 15 nt, Homo sapiens
uuuuaaggcauauuu

SEQ ID NO: 18879 - RNA, 23 nt, Homo sapiens
uuuuaaggcauauuuaacaaaau

SEQ ID NO: 18880 - RNA, 14 nt, Homo sapiens
uuuuaagugcugca

SEQ ID NO: 18881 - RNA, 22 nt, Homo sapiens
uuuuaucgucacugcuuaacuu

SEQ ID NO: 18882 - RNA, 19 nt, Homo sapiens
uuuucacaaagaacaggaa

SEQ ID NO: 18883 - RNA, 20 nt, Homo sapiens
uuuucacaaagaacaggaaa

SEQ ID NO: 18884 - RNA, 18 nt, Homo sapiens
accguuugugauugccau

SEQ ID NO: 18885 - RNA, 12 nt, Homo sapiens
accucugcuauu

SEQ ID NO: 18886 - RNA, 15 nt, Homo sapiens
accucuccagccuca

SEQ ID NO: 18887 - RNA, 22 nt, Homo sapiens
accucuccagccucagcucuca

SEQ ID NO: 18888 - RNA, 20 nt, Homo sapiens
accugggccauagucauucu

SEQ ID NO: 18889 - RNA, 15 nt, Homo sapiens
agccucuauugccau

SEQ ID NO: 18890 - RNA, 15 nt, Homo sapiens
agcacgauuucuguu

SEQ ID NO: 18891 - RNA, 14 nt, Homo sapiens
agaugaaugucagu

SEQ ID NO: 18892 - RNA, 13 nt, Homo sapiens
agauuuaagauau

SEQ ID NO: 18893 - RNA, 17 nt, Homo sapiens
agcaaggagauuuacaa

SEQ ID NO: 18894 - RNA, 20 nt, Homo sapiens
agcagcguuucuaugacaca

SEQ ID NO: 18895 - RNA, 20 nt, Homo sapiens
acuguuauuuauaaucacuu

SEQ ID NO: 18896 - RNA, 13 nt, Homo sapiens
acuuacuguacau

SEQ ID NO: 18897 - RNA, 14 nt, Homo sapiens
acuuacuguacaug

SEQ ID NO: 18898 - RNA, 16 nt, Homo sapiens
acuucauuaauaauaa

SEQ ID NO: 18899 - RNA, 17 nt, Homo sapiens
acuucauuaauaauaaa

SEQ ID NO: 18900 - RNA, 20 nt, Homo sapiens
acuuuaccuuuuuuauacau

SEQ ID NO: 18901 - RNA, 15 nt, Homo sapiens
acuuugauuuuauau

SEQ ID NO: 18902 - RNA, 17 nt, Homo sapiens
agaacaggaaaauaaaa

SEQ ID NO: 18903 - RNA, 11 nt, Homo sapiens
agaaguuuucu

SEQ ID NO: 18904 - RNA, 20 nt, Homo sapiens
agacaauuuauuauggcaca

SEQ ID NO: 18905 - RNA, 20 nt, Homo sapiens
agacauacuaaccagcagaa

SEQ ID NO: 18906 - RNA, 16 nt, Homo sapiens
agaguuguuacauuuu

SEQ ID NO: 18907 - RNA, 22 nt, Homo sapiens
agauauuuugcuuugugauuuu

SEQ ID NO: 18908 - RNA, 13 nt, Homo sapiens
agaucauugugaa

SEQ ID NO: 18909 - RNA, 16 nt, Homo sapiens
acagaguuguuacauu

SEQ ID NO: 18910 - RNA, 16 nt, Homo sapiens
acagcacuuacaauuu

SEQ ID NO: 18911 - RNA, 19 nt, Homo sapiens
acacuguuaucuucacuuu

SEQ ID NO: 18912 - RNA, 13 nt, Homo sapiens
acacuguuucaaa

SEQ ID NO: 18913 - RNA, 21 nt, Homo sapiens
acaguuuugguugcuuuaaua

SEQ ID NO: 18914 - RNA, 18 nt, Homo sapiens
acauaaggaaacuggguu

SEQ ID NO: 18915 - RNA, 19 nt, Homo sapiens
acauaaggaaacuggguuc

SEQ ID NO: 18916 - RNA, 17 nt, Homo sapiens
acauaucacaugucagc

SEQ ID NO: 18917 - RNA, 21 nt, Homo sapiens
acauauugauuuccguuaaaa

SEQ ID NO: 18918 - RNA, 14 nt, Homo sapiens
acauuucucauguu

SEQ ID NO: 18919 - RNA, 17 nt, Homo sapiens
acauuucucauguugaa

SEQ ID NO: 18920 - RNA, 21 nt, Homo sapiens
acauuuuucuuagggaaggau

SEQ ID NO: 18921 - RNA, 12 nt, Homo sapiens
accacagacaua

SEQ ID NO: 18922 - RNA, 18 nt, Homo sapiens
accacuuuuugcagcuuu

SEQ ID NO: 18923 - RNA, 14 nt, Homo sapiens
accaggcaccccca

SEQ ID NO: 18924 - RNA, 13 nt, Homo sapiens
accauaauucugg

SEQ ID NO: 18925 - RNA, 23 nt, Homo sapiens
accccagggcuugugugcacaua

SEQ ID NO: 18926 - RNA, 19 nt, Homo sapiens
uucacuuuuauaagaaaua

SEQ ID NO: 18927 - RNA, 17 nt, Homo sapiens
uucauaagaauucuguu

SEQ ID NO: 18928 - RNA, 17 nt, Homo sapiens
uuccaagaaauauuccu

SEQ ID NO: 18929 - RNA, 19 nt, Homo sapiens
uuccuuauucagaauuucu

SEQ ID NO: 18930 - RNA, 14 nt, Homo sapiens
uucuauguuaauau

SEQ ID NO: 18931 - RNA, 22 nt, Homo sapiens
uucucuagucauuuguuaauau

SEQ ID NO: 18932 - RNA, 15 nt, Homo sapiens
uucuugcaaaguauc

SEQ ID NO: 18933 - RNA, 17 nt, Homo sapiens
uugaccucugcagcaau

SEQ ID NO: 18934 - RNA, 20 nt, Homo sapiens
uugagaaggagcucccagga

SEQ ID NO: 18935 - RNA, 22 nt, Homo sapiens
uguuuucauagagaauauaaaa

SEQ ID NO: 18936 - RNA, 11 nt, Homo sapiens
uuaauguggaa

SEQ ID NO: 18937 - RNA, 12 nt, Homo sapiens
uuaauguggaaa

SEQ ID NO: 18938 - RNA, 23 nt, Homo sapiens
uuagagcagagagguuucgauau

SEQ ID NO: 18939 - RNA, 16 nt, Homo sapiens
uuagcagauuuaagau

SEQ ID NO: 18940 - RNA, 13 nt, Homo sapiens
uuauaugcuauuu

SEQ ID NO: 18941 - RNA, 10 nt, Homo sapiens
uuaucauuua

SEQ ID NO: 18942 - RNA, 17 nt, Homo sapiens
uuauccuuguuaaguau

SEQ ID NO: 18943 - RNA, 15 nt, Homo sapiens
uuauguguaaaauaa

SEQ ID NO: 18944 - RNA, 14 nt, Homo sapiens
uucaaacuuuacua

SEQ ID NO: 18945 - RNA, 22 nt, Homo sapiens
uucacaaagaacaggaaaauaa

SEQ ID NO: 18946 - RNA, 13 nt, Homo sapiens
uguuuauuuguuu

SEQ ID NO: 18947 - RNA, 13 nt, Homo sapiens
uguuucauaagaa

SEQ ID NO: 18948 - RNA, 14 nt, Homo sapiens
uguuuuaaggaugc

SEQ ID NO: 18949 - RNA, 12 nt, Homo sapiens
ugugauacaaug

SEQ ID NO: 18950 - RNA, 12 nt, Homo sapiens
ugugaugaucua

SEQ ID NO: 18951 - RNA, 23 nt, Homo sapiens
ugugcacaucuguuuuguaacug

SEQ ID NO: 18952 - RNA, 16 nt, Homo sapiens
ugugcauuuaauuaga

SEQ ID NO: 18953 - RNA, 14 nt, Homo sapiens
uguuaaucuuucaa

SEQ ID NO: 18954 - RNA, 15 nt, Homo sapiens
uguuaaucuuucaaa

SEQ ID NO: 18955 - RNA, 14 nt, Homo sapiens
uguuacauuuuuaa

SEQ ID NO: 18956 - RNA, 16 nt, Homo sapiens
uguuacauuuuuaagu

SEQ ID NO: 18957 - RNA, 16 nt, Homo sapiens
uguuacuaaguuuuua

SEQ ID NO: 18958 - RNA, 19 nt, Homo sapiens
uguuacuaaguuuuuaugg

SEQ ID NO: 18959 - RNA, 16 nt, Homo sapiens
uguuauuuauugaaau

SEQ ID NO: 18960 - RNA, 17 nt, Homo sapiens
uguuauuuauugaaaug

SEQ ID NO: 18961 - RNA, 16 nt, Homo sapiens
ugggguugggggggag

SEQ ID NO: 18962 - RNA, 17 nt, Homo sapiens
ugggguugggggggagg

SEQ ID NO: 18963 - RNA, 13 nt, Homo sapiens
uggggugggggug

SEQ ID NO: 18964 - RNA, 12 nt, Homo sapiens
uggugugaacua

SEQ ID NO: 18965 - RNA, 22 nt, Homo sapiens
uguaacuguaaagaugaauguc

SEQ ID NO: 18966 - RNA, 18 nt, Homo sapiens
uguaauuugugauacaau

SEQ ID NO: 18967 - RNA, 12 nt, Homo sapiens
uguaaaauaagg

SEQ ID NO: 18968 - RNA, 14 nt, Homo sapiens
uguaugugcacauc

SEQ ID NO: 18969 - RNA, 9 nt, Homo sapiens
uguauucuu

SEQ ID NO: 18970 - RNA, 20 nt, Homo sapiens
uguagcguacaucaaugaua

SEQ ID NO: 18971 - RNA, 14 nt, Homo sapiens
ugcugccugccugg

SEQ ID NO: 18972 - RNA, 14 nt, Homo sapiens
ugcugcugccugcc

SEQ ID NO: 18973 - RNA, 12 nt, Homo sapiens
ugcuuguacaua

SEQ ID NO: 18974 - RNA, 13 nt, Homo sapiens
ugcuuguacauaa

SEQ ID NO: 18975 - RNA, 14 nt, Homo sapiens
uggcacaucagcac

SEQ ID NO: 18976 - RNA, 20 nt, Homo sapiens
uggccagugagaucaaugug

SEQ ID NO: 18977 - RNA, 11 nt, Homo sapiens
uggccuuucau

SEQ ID NO: 18978 - RNA, 12 nt, Homo sapiens
uggccuuucaua

SEQ ID NO: 18979 - RNA, 18 nt, Homo sapiens
ugggcagacucuggucaa

SEQ ID NO: 18980 - RNA, 19 nt, Homo sapiens
cuauuuaauuauuucacuu

SEQ ID NO: 18981 - RNA, 21 nt, Homo sapiens
cuauguagaauauauuuccuu

SEQ ID NO: 18982 - RNA, 14 nt, Homo sapiens
cuauuuauuuauuu

SEQ ID NO: 18983 - RNA, 18 nt, Homo sapiens
cuauuuauuuauuuauuu

SEQ ID NO: 18984 - RNA, 22 nt, Homo sapiens
cuauuuauuuauuuauuuauuu

SEQ ID NO: 18985 - RNA, 12 nt, Homo sapiens
cucaccugugag

SEQ ID NO: 18986 - RNA, 16 nt, Homo sapiens
cucaguugcagcccug

SEQ ID NO: 18987 - RNA, 21 nt, Homo sapiens
cucaguugcagcccugcugcu

SEQ ID NO: 18988 - RNA, 18 nt, Homo sapiens
cuauuauauucauucuuu

SEQ ID NO: 18989 - RNA, 18 nt, Homo sapiens
cuaauuuuauuauaguaa

SEQ ID NO: 18990 - RNA, 20 nt, Homo sapiens
cuacaaaauauagcuuucau

SEQ ID NO: 18991 - RNA, 17 nt, Homo sapiens
cuagcauacguacacau

SEQ ID NO: 18992 - RNA, 15 nt, Homo sapiens
cuaggugcugcagcc

SEQ ID NO: 18993 - RNA, 23 nt, Homo sapiens
cuauccaccaaaagggcucccug

SEQ ID NO: 18994 - RNA, 16 nt, Homo sapiens
cuaaacauguauguaa

SEQ ID NO: 18995 - RNA, 20 nt, Homo sapiens
cgauuucuguuuagauaaua

SEQ ID NO: 18996 - RNA, 15 nt, Homo sapiens
cgcuuuugauaauca

SEQ ID NO: 18997 - RNA, 16 nt, Homo sapiens
cgcuuuugauaaucaa

SEQ ID NO: 18998 - RNA, 23 nt, Homo sapiens
cggauugagaaggagcucccagg

SEQ ID NO: 18999 - RNA, 21 nt, Homo sapiens
cugggaccaggcacccccaga

SEQ ID NO: 19000 - RNA, 21 nt, Homo sapiens
cugggcaagggaccugcuucu

SEQ ID NO: 19001 - RNA, 17 nt, Homo sapiens
cuggcguuguggggaug

SEQ ID NO: 19002 - RNA, 17 nt, Homo sapiens
cuguaauuugugauaca

SEQ ID NO: 19003 - RNA, 18 nt, Homo sapiens
cuguacaugaaaacacau

SEQ ID NO: 19004 - RNA, 17 nt, Homo sapiens
cuguuuuaugacuucau

SEQ ID NO: 19005 - RNA, 12 nt, Homo sapiens
cuuaaauaauaa

SEQ ID NO: 19006 - RNA, 22 nt, Homo sapiens
cuuaauuauugauguuuucaua

SEQ ID NO: 19007 - RNA, 12 nt, Homo sapiens
cuuacucuugau

SEQ ID NO: 19008 - RNA, 13 nt, Homo sapiens
cuucuauuuauuu

SEQ ID NO: 19009 - RNA, 14 nt, Homo sapiens
cuuggccccugcca

SEQ ID NO: 19010 - RNA, 22 nt, Homo sapiens
cuuuaccuuuuuuauacauaaa

SEQ ID NO: 19011 - RNA, 20 nt, Homo sapiens
cuuucaagggaccucuccau

SEQ ID NO: 19012 - RNA, 23 nt, Homo sapiens
cuuucucuaguucaaguucacca

SEQ ID NO: 19013 - RNA, 17 nt, Homo sapiens
cuuugaccucugcagca

SEQ ID NO: 19014 - RNA, 18 nt, Homo sapiens
cuuugaccucugcagcaa

SEQ ID NO: 19015 - RNA, 15 nt, Homo sapiens
cuuuuaaacuuugau

SEQ ID NO: 19016 - RNA, 18 nt, Homo sapiens
gaaaacacauuuuucuua

SEQ ID NO: 19017 - RNA, 15 nt, Homo sapiens
gaaaaguuucccagu

SEQ ID NO: 19018 - RNA, 16 nt, Homo sapiens
gaaaauaaaauauuua

SEQ ID NO: 19019 - RNA, 18 nt, Homo sapiens
gaaaauaaaauauuuaaa

SEQ ID NO: 19020 - RNA, 19 nt, Homo sapiens
cuuuuuuagaguugauacu

SEQ ID NO: 19021 - RNA, 16 nt, Homo sapiens
gaaagcugaguguuuc

SEQ ID NO: 19022 - RNA, 18 nt, Homo sapiens
cugcuauuugcuguuauu

SEQ ID NO: 19023 - RNA, 19 nt, Homo sapiens
cugcuauuugcuguuauuu

SEQ ID NO: 19024 - RNA, 11 nt, Homo sapiens
cuggacuuggc

SEQ ID NO: 19025 - RNA, 12 nt, Homo sapiens
cuggacuuggcc

SEQ ID NO: 19026 - RNA, 20 nt, Homo sapiens
cugccuggacuuggccccug

SEQ ID NO: 19027 - RNA, 12 nt, Homo sapiens
cugaauuucuuu

SEQ ID NO: 19028 - RNA, 15 nt, Homo sapiens
cugacacuaaaacac

SEQ ID NO: 19029 - RNA, 15 nt, Homo sapiens
cugcaaucuucucag

SEQ ID NO: 19030 - RNA, 15 nt, Homo sapiens
cugccaugcucucca

SEQ ID NO: 19031 - RNA, 22 nt, Homo sapiens
cucccuauuuuuuuucuguuau

SEQ ID NO: 19032 - RNA, 23 nt, Homo sapiens
cucccuauuuuuuuucuguuaua

SEQ ID NO: 19033 - RNA, 10 nt, Homo sapiens
cuccugccuc

SEQ ID NO: 19034 - RNA, 13 nt, Homo sapiens
cuccacauccugu

SEQ ID NO: 19035 - RNA, 13 nt, Homo sapiens
cuccauggcccug

SEQ ID NO: 19036 - RNA, 16 nt, Homo sapiens
cuccuuguguuacuaa

SEQ ID NO: 19037 - RNA, 23 nt, Homo sapiens
cucuccaugaucccaccucccau

SEQ ID NO: 19038 - RNA, 22 nt, Homo sapiens
cugaaccauggucggaaaacau

SEQ ID NO: 19039 - RNA, 22 nt, Homo sapiens
cugaaccguuugugauugccau

SEQ ID NO: 19040 - RNA, 13 nt, Homo sapiens
ccugcuuccuccg

SEQ ID NO: 19041 - RNA, 13 nt, Homo sapiens
ccuggauggcugc

SEQ ID NO: 19042 - RNA, 14 nt, Homo sapiens
ccuggauggcugcc

SEQ ID NO: 19043 - RNA, 16 nt, Homo sapiens
ccugccaccuccugcc

SEQ ID NO: 19044 - RNA, 16 nt, Homo sapiens
ccugccaugcucucca

SEQ ID NO: 19045 - RNA, 20 nt, Homo sapiens
ccuucauggcaggcaucgcc

SEQ ID NO: 19046 - RNA, 15 nt, Homo sapiens
ccuuuuuuauacaua

SEQ ID NO: 19047 - RNA, 21 nt, Homo sapiens
ccuacauguauuuguuugcau

SEQ ID NO: 19048 - RNA, 11 nt, Homo sapiens
ccuauaauuuu

SEQ ID NO: 19049 - RNA, 23 nt, Homo sapiens
cccuuacaggaacagaagaggaa

SEQ ID NO: 19050 - RNA, 16 nt, Homo sapiens
ccgcuauccaccaaaa

SEQ ID NO: 19051 - RNA, 14 nt, Homo sapiens
ccccaaguuaguuc

SEQ ID NO: 19052 - RNA, 15 nt, Homo sapiens
cccgugugccugagc

SEQ ID NO: 19053 - RNA, 15 nt, Homo sapiens
cccugagggucuggg

SEQ ID NO: 19054 - RNA, 11 nt, Homo sapiens
cccagauacca

SEQ ID NO: 19055 - RNA, 12 nt, Homo sapiens
cccagauaccau

SEQ ID NO: 19056 - RNA, 15 nt, Homo sapiens
ccacuuggacauggg

SEQ ID NO: 19057 - RNA, 16 nt, Homo sapiens
ccacuuggacaugggc

SEQ ID NO: 19058 - RNA, 13 nt, Homo sapiens
cauucugccugcc

SEQ ID NO: 19059 - RNA, 14 nt, Homo sapiens
cauucugccugccc

SEQ ID NO: 19060 - RNA, 18 nt, Homo sapiens
cauucuuuuugaaauguc

SEQ ID NO: 19061 - RNA, 17 nt, Homo sapiens
cauuucucauguugaaa

SEQ ID NO: 19062 - RNA, 17 nt, Homo sapiens
cauuugaaaauuuugau

SEQ ID NO: 19063 - RNA, 19 nt, Homo sapiens
caugucagccacugugaua

SEQ ID NO: 19064 - RNA, 14 nt, Homo sapiens
cauuaguuuugaag

SEQ ID NO: 19065 - RNA, 15 nt, Homo sapiens
cauuaguuuugaaga

SEQ ID NO: 19066 - RNA, 18 nt, Homo sapiens
cauuuguuaauauuucuu

SEQ ID NO: 19067 - RNA, 19 nt, Homo sapiens
cauuuguuaauauuucuuc

SEQ ID NO: 19068 - RNA, 21 nt, Homo sapiens
cauuuuauuuuauuaugcaug

SEQ ID NO: 19069 - RNA, 15 nt, Homo sapiens
ccaagaaauauuccu

SEQ ID NO: 19070 - RNA, 11 nt, Homo sapiens
ccaagcaaaug

SEQ ID NO: 19071 - RNA, 19 nt, Homo sapiens
caguuguuauuuauugaaa

SEQ ID NO: 19072 - RNA, 19 nt, Homo sapiens
cauaaacaagaccacguuu

SEQ ID NO: 19073 - RNA, 18 nt, Homo sapiens
cauaaccccggaagccaa

SEQ ID NO: 19074 - RNA, 12 nt, Homo sapiens
cauaccacuuuu

SEQ ID NO: 19075 - RNA, 21 nt, Homo sapiens
cauauuaccacagacauacua

SEQ ID NO: 19076 - RNA, 14 nt, Homo sapiens
cauauuuaacaaaa

SEQ ID NO: 19077 - RNA, 20 nt, Homo sapiens
cauauccuuagcccaucuuu

SEQ ID NO: 19078 - RNA, 14 nt, Homo sapiens
caucagcacgauuu

SEQ ID NO: 19079 - RNA, 18 nt, Homo sapiens
caucagcacgauuucugu

SEQ ID NO: 19080 - RNA, 24 nt, Homo sapiens
caucagcacgauuucuguuuagau

SEQ ID NO: 19081 - RNA, 17 nt, Homo sapiens
cauccaaaggcuccuga

SEQ ID NO: 19082 - RNA, 18 nt, Homo sapiens
caucgcuuaggagaaguc

SEQ ID NO: 19083 - RNA, 18 nt, Homo sapiens
caugaucccaccucccau

SEQ ID NO: 19084 - RNA, 18 nt, Homo sapiens
caugaugcugagcccgga

SEQ ID NO: 19085 - RNA, 16 nt, Homo sapiens
caugcaaggucauuuu

SEQ ID NO: 19086 - RNA, 14 nt, Homo sapiens
caggcacccccaga

SEQ ID NO: 19087 - RNA, 11 nt, Homo sapiens
caggaaaauaa

SEQ ID NO: 19088 - RNA, 22 nt, Homo sapiens
cagguaccuucucaccugugag

SEQ ID NO: 19089 - RNA, 20 nt, Homo sapiens
caguaguuagcuuucuuccu

SEQ ID NO: 19090 - RNA, 20 nt, Homo sapiens
cagcugccuccccagcucua

SEQ ID NO: 19091 - RNA, 19 nt, Homo sapiens
cagcguuucuaugacacau

SEQ ID NO: 19092 - RNA, 14 nt, Homo sapiens
cagcuacaauugua

SEQ ID NO: 19093 - RNA, 16 nt, Homo sapiens
cagccucagcucucag

SEQ ID NO: 19094 - RNA, 22 nt, Homo sapiens
cagccucagcucucaguugcag

SEQ ID NO: 19095 - RNA, 15 nt, Homo sapiens
caccugugagaccaa

SEQ ID NO: 19096 - RNA, 23 nt, Homo sapiens
cacuccaauuaaggauuuuaugc

SEQ ID NO: 19097 - RNA, 14 nt, Homo sapiens
cacugcauguuugu

SEQ ID NO: 19098 - RNA, 23 nt, Homo sapiens
cacuuggacaugggccccagaua

SEQ ID NO: 19099 - RNA, 10 nt, Homo sapiens
cagaauuucu

SEQ ID NO: 19100 - RNA, 19 nt, Homo sapiens
cagacauacuaaccagcag

SEQ ID NO: 19101 - RNA, 23 nt, Homo sapiens
cagauaacuguuauuuauaauca

SEQ ID NO: 19102 - RNA, 18 nt, Homo sapiens
cagcaauaaagcagcguu

SEQ ID NO: 19103 - RNA, 19 nt, Homo sapiens
cagcaauaaagcagcguuu

SEQ ID NO: 19104 - RNA, 13 nt, Homo sapiens
cagcagagaaguu

SEQ ID NO: 19105 - RNA, 16 nt, Homo sapiens
guucccgugugccuga

SEQ ID NO: 19106 - RNA, 14 nt, Homo sapiens
guugauggaaauac

SEQ ID NO: 19107 - RNA, 16 nt, Homo sapiens
guugcagcccugcugc

SEQ ID NO: 19108 - RNA, 18 nt, Homo sapiens
guugcagcccugcugcug

SEQ ID NO: 19109 - RNA, 19 nt, Homo sapiens
guugcagcccugcugcugc

SEQ ID NO: 19110 - RNA, 23 nt, Homo sapiens
guugcagcccugcugcugccugc

SEQ ID NO: 19111 - RNA, 14 nt, Homo sapiens
guuaaaauaccagc

SEQ ID NO: 19112 - RNA, 23 nt, Homo sapiens
guuaauauuucuucgugaugaca

SEQ ID NO: 19113 - RNA, 19 nt, Homo sapiens
guuaaucuuucaaaguguc

SEQ ID NO: 19114 - RNA, 16 nt, Homo sapiens
guuaucuucacuuuua

SEQ ID NO: 19115 - RNA, 17 nt, Homo sapiens
guuaucuucacuuuuau

SEQ ID NO: 19116 - RNA, 20 nt, Homo sapiens
gugugauuuggggauauuuu

SEQ ID NO: 19117 - RNA, 13 nt, Homo sapiens
guuauuaaaaauc

SEQ ID NO: 19118 - RNA, 15 nt, Homo sapiens
guuauuaaaaaucuc

SEQ ID NO: 19119 - RNA, 20 nt, Homo sapiens
guuauuuauaaucacuuuuu

SEQ ID NO: 19120 - RNA, 21 nt, Homo sapiens
guuauuuauaaucacuuuuuu

SEQ ID NO: 19121 - RNA, 19 nt, Homo sapiens
guuuauuuguuuuuccagu

SEQ ID NO: 19122 - RNA, 22 nt, Homo sapiens
guuucauaagaauucuguugau

SEQ ID NO: 19123 - RNA, 16 nt, Homo sapiens
guuucuaugacacaug

SEQ ID NO: 19124 - RNA, 22 nt, Homo sapiens
guuugcauaggugaucucauuu

SEQ ID NO: 19125 - RNA, 17 nt, Homo sapiens
uaaaaccugacagacca

SEQ ID NO: 19126 - RNA, 13 nt, Homo sapiens
uaaaagauacagu

SEQ ID NO: 19127 - RNA, 8 nt, Homo sapiens
uaaaauuu

SEQ ID NO: 19128 - RNA, 9 nt, Homo sapiens
uaaaauuuu

SEQ ID NO: 19129 - RNA, 21 nt, Homo sapiens
uaaaauuuuuauguaauuaua

SEQ ID NO: 19130 - RNA, 19 nt, Homo sapiens
gucucugaagugaaacugc

SEQ ID NO: 19131 - RNA, 17 nt, Homo sapiens
gugacuauuauauuucc

SEQ ID NO: 19132 - RNA, 14 nt, Homo sapiens
gugagaucaaugug

SEQ ID NO: 19133 - RNA, 20 nt, Homo sapiens
gugaugacauaucacauguc

SEQ ID NO: 19134 - RNA, 21 nt, Homo sapiens
gugggauacuauuuaauuauu

SEQ ID NO: 19135 - RNA, 15 nt, Homo sapiens
gugguuucagaaaug

SEQ ID NO: 19136 - RNA, 14 nt, Homo sapiens
uagauagaugaaga

SEQ ID NO: 19137 - RNA, 14 nt, Homo sapiens
uagcuuucuuccug

SEQ ID NO: 19138 - RNA, 19 nt, Homo sapiens
uacaucaaugauaaugcua

SEQ ID NO: 19139 - RNA, 22 nt, Homo sapiens
uaccacagacauacuaaccagc

SEQ ID NO: 19140 - RNA, 20 nt, Homo sapiens
uacuaauagacaauuuauua

SEQ ID NO: 19141 - RNA, 21 nt, Homo sapiens
uaaaguguauuuuuuuacuaa

SEQ ID NO: 19142 - RNA, 13 nt, Homo sapiens
uaaauaaaauuuu

SEQ ID NO: 19143 - RNA, 22 nt, Homo sapiens
uaaccagcagaaaugccuuacc

SEQ ID NO: 19144 - RNA, 16 nt, Homo sapiens
uaagaaaaaggaugca

SEQ ID NO: 19145 - RNA, 17 nt, Homo sapiens
uaagaaaaaggaugcac

SEQ ID NO: 19146 - RNA, 12 nt, Homo sapiens
uaacaaaauuug

SEQ ID NO: 19147 - RNA, 13 nt, Homo sapiens
uaauaauaaauuc

SEQ ID NO: 19148 - RNA, 22 nt, Homo sapiens
uaauauuucuucgugaugacau

SEQ ID NO: 19149 - RNA, 18 nt, Homo sapiens
uaauguggaaaugauguu

SEQ ID NO: 19150 - RNA, 12 nt, Homo sapiens
uaauuaugcagu

SEQ ID NO: 19151 - RNA, 14 nt, Homo sapiens
uacaauuguaaacu

SEQ ID NO: 19152 - RNA, 19 nt, Homo sapiens
uacacauuuuauuuuauua

SEQ ID NO: 19153 - RNA, 21 nt, Homo sapiens
uacauaaugcgugcauaccac

SEQ ID NO: 19154 - RNA, 19 nt, Homo sapiens
uacauguauuuguuugcau

SEQ ID NO: 19155 - RNA, 23 nt, Homo sapiens
uaguaaugugacuuggauucaau

SEQ ID NO: 19156 - RNA, 19 nt, Homo sapiens
uaguuuuacaguguuucug

SEQ ID NO: 19157 - RNA, 19 nt, Homo sapiens
uauacuauauuuuucucaa

SEQ ID NO: 19158 - RNA, 14 nt, Homo sapiens
uauagcuuucauaa

SEQ ID NO: 19159 - RNA, 15 nt, Homo sapiens
uauaguaaugugacu

SEQ ID NO: 19160 - RNA, 12 nt, Homo sapiens
uauauuuccuua

SEQ ID NO: 19161 - RNA, 16 nt, Homo sapiens
uaucugcuaugcuauu

SEQ ID NO: 19162 - RNA, 14 nt, Homo sapiens
uaugcuauuuauua

SEQ ID NO: 19163 - RNA, 12 nt, Homo sapiens
uauguaauuaua

SEQ ID NO: 19164 - RNA, 18 nt, Homo sapiens
uaugugcauuuaauuaga

SEQ ID NO: 19165 - RNA, 15 nt, Homo sapiens
uauucauuaguuuug

SEQ ID NO: 19166 - RNA, 16 nt, Homo sapiens
uauucucuccuguacc

SEQ ID NO: 19167 - RNA, 17 nt, Homo sapiens
uauugaagcauuuuaua

SEQ ID NO: 19168 - RNA, 21 nt, Homo sapiens
uauugauuuccguuaaaauac

SEQ ID NO: 19169 - RNA, 15 nt, Homo sapiens
uauuuauuuauucau

SEQ ID NO: 19170 - RNA, 13 nt, Homo sapiens
uauuuauuuauuu

SEQ ID NO: 19171 - RNA, 18 nt, Homo sapiens
uauuuuuuucuuuucuuu

SEQ ID NO: 19172 - RNA, 15 nt, Homo sapiens
ucaaagauagggagg

SEQ ID NO: 19173 - RNA, 16 nt, Homo sapiens
ucaaagauagggaggg

SEQ ID NO: 19174 - RNA, 12 nt, Homo sapiens
ucaagccugccu

SEQ ID NO: 19175 - RNA, 11 nt, Homo sapiens
ucaauaaaacu

SEQ ID NO: 19176 - RNA, 12 nt, Homo sapiens
ucaauaaaacuu

SEQ ID NO: 19177 - RNA, 17 nt, Homo sapiens
ucauuaauaauaaauuc

SEQ ID NO: 19178 - RNA, 13 nt, Homo sapiens
ucauuaguuuuga

SEQ ID NO: 19179 - RNA, 14 nt, Homo sapiens
ucauuaguuuugaa

SEQ ID NO: 19180 - RNA, 17 nt, Homo sapiens
ucauucuuuuugaaaug

SEQ ID NO: 19181 - RNA, 18 nt, Homo sapiens
ucauucuuuuugaaaugu

SEQ ID NO: 19182 - RNA, 22 nt, Homo sapiens
ucacuuuacuguccccaucauc

SEQ ID NO: 19183 - RNA, 15 nt, Homo sapiens
ucacuuuuauaagaa

SEQ ID NO: 19184 - RNA, 13 nt, Homo sapiens
ucagccagcccuc

SEQ ID NO: 19185 - RNA, 15 nt, Homo sapiens
ucagcuacaauugua

SEQ ID NO: 19186 - RNA, 21 nt, Homo sapiens
ucagcucagcuaaugaagugu

SEQ ID NO: 19187 - RNA, 24 nt, Homo sapiens
ucagcucucaguugcagcccugcu

SEQ ID NO: 19188 - RNA, 16 nt, Homo sapiens
ucauauuuaauuugaa

SEQ ID NO: 19189 - RNA, 14 nt, Homo sapiens
ucauguugaaacuu

SEQ ID NO: 19190 - RNA, 18 nt, Homo sapiens
uccguuaaaauaccagcc

SEQ ID NO: 19191 - RNA, 16 nt, Homo sapiens
uccuauuauauucauu

SEQ ID NO: 19192 - RNA, 17 nt, Homo sapiens
uccuauuauauucauuc

SEQ ID NO: 19193 - RNA, 22 nt, Homo sapiens
uccuccgcugggccuggauggc

SEQ ID NO: 19194 - RNA, 22 nt, Homo sapiens
uccugaaggaggcccugcccuu

SEQ ID NO: 19195 - RNA, 15 nt, Homo sapiens
uccuucauggcaggc

SEQ ID NO: 19196 - RNA, 22 nt, Homo sapiens
ugcccugaaagucccagaucaa

SEQ ID NO: 19197 - RNA, 16 nt, Homo sapiens
ugccuccccagcucua

SEQ ID NO: 19198 - RNA, 14 nt, Homo sapiens
ugcuaugcuauuga

SEQ ID NO: 19199 - RNA, 19 nt, Homo sapiens
ugcuauugggguugggggg

SEQ ID NO: 19200 - RNA, 20 nt, Homo sapiens
ugcuauugggguuggggggg

SEQ ID NO: 19201 - RNA, 14 nt, Homo sapiens
ugagccuugaacuu

SEQ ID NO: 19202 - RNA, 15 nt, Homo sapiens
ugauagaggcuggcg

SEQ ID NO: 19203 - RNA, 16 nt, Homo sapiens
ugauagaggcuggcgg

SEQ ID NO: 19204 - RNA, 13 nt, Homo sapiens
ugauucauauuua

SEQ ID NO: 19205 - RNA, 15 nt, Homo sapiens
ugauuuccguuaaaa

SEQ ID NO: 19206 - RNA, 20 nt, Homo sapiens
ugauuuggggauauuuuuuu

SEQ ID NO: 19207 - RNA, 15 nt, Homo sapiens
ugauuuuuguaauuu

SEQ ID NO: 19208 - RNA, 18 nt, Homo sapiens
ugauuuuuguaauuuuuu

SEQ ID NO: 19209 - RNA, 19 nt, Homo sapiens
ugauuuuuguaauuuuuuu

SEQ ID NO: 19210 - RNA, 13 nt, Homo sapiens
ugaugcugagccc

SEQ ID NO: 19211 - RNA, 17 nt, Homo sapiens
ugaugcugagcccggaa

SEQ ID NO: 19212 - RNA, 22 nt, Homo sapiens
ugcaaucuucucagaaggcaaa

SEQ ID NO: 19213 - RNA, 17 nt, Homo sapiens
ugcacaucuguuuugua

SEQ ID NO: 19214 - RNA, 23 nt, Homo sapiens
ugagcaucacaguuuugguugcu

SEQ ID NO: 19215 - RNA, 20 nt, Homo sapiens
ugagcaugccccugaaccau

SEQ ID NO: 19216 - RNA, 23 nt, Homo sapiens
ugcaugaaguaauaugcacacau

SEQ ID NO: 19217 - RNA, 12 nt, Homo sapiens
ucuaaaaguuua

SEQ ID NO: 19218 - RNA, 13 nt, Homo sapiens
ucuauuagcccuu

SEQ ID NO: 19219 - RNA, 19 nt, Homo sapiens
ucucaccucccaacguccc

SEQ ID NO: 19220 - RNA, 18 nt, Homo sapiens
ucucugaagugaaacugc

SEQ ID NO: 19221 - RNA, 22 nt, Homo sapiens
ucuuaguaugugcauuuaauua

SEQ ID NO: 19222 - RNA, 18 nt, Homo sapiens
ucuuuccaaaguacacug

SEQ ID NO: 19223 - RNA, 21 nt, Homo sapiens
ugaaccguuugugauugccau

SEQ ID NO: 19224 - RNA, 16 nt, Homo sapiens
ugaacuaaacuuucac

SEQ ID NO: 19225 - RNA, 18 nt, Homo sapiens
ugaagcauuuuauaaauc

SEQ ID NO: 19226 - RNA, 17 nt, Homo sapiens
ugaccuccuccuucaug

SEQ ID NO: 19227 - RNA, 22 nt, Homo sapiens
ugaccuccuccuucauggcagg

SEQ ID NO: 19228 - RNA, 16 nt, Homo sapiens
ugacuuacuguacaug

SEQ ID NO: 19229 - RNA, 15 nt, Homo sapiens
ugagaucauugugaa

SEQ ID NO: 19230 - RNA, 19 nt, Homo sapiens
gucccuagcccuuacgucc

SEQ ID NO: 19231 - RNA, 20 nt, Homo sapiens
gucccuagcccuuacguccu

SEQ ID NO: 19232 - RNA, 14 nt, Homo sapiens
gucauuuuuuuuaa

SEQ ID NO: 19233 - RNA, 18 nt, Homo sapiens
gucacuuuacugucccca

SEQ ID NO: 19234 - RNA, 16 nt, Homo sapiens
guacucugaaaguuuu

SEQ ID NO: 19235 - RNA, 21 nt, Homo sapiens
guagaauguuuucaaauguuc

SEQ ID NO: 19236 - RNA, 22 nt, Homo sapiens
guaggugacuauuauauuucca

SEQ ID NO: 19237 - RNA, 13 nt, Homo sapiens
guauggcaaacug

SEQ ID NO: 19238 - RNA, 16 nt, Homo sapiens
ggugguuucagaaaug

SEQ ID NO: 19239 - RNA, 13 nt, Homo sapiens
guaaaggcaaacu

SEQ ID NO: 19240 - RNA, 21 nt, Homo sapiens
guaacuguaaagaugaauguc

SEQ ID NO: 19241 - RNA, 13 nt, Homo sapiens
guacaucaaugau

SEQ ID NO: 19242 - RNA, 23 nt, Homo sapiens
guacauuuuuuuuuucaauaaaa

SEQ ID NO: 19243 - RNA, 22 nt, Homo sapiens
ggcacccccagaaugaccuggc

SEQ ID NO: 19244 - RNA, 15 nt, Homo sapiens
ggcaggcaucgccau

SEQ ID NO: 19245 - RNA, 16 nt, Homo sapiens
ggcaggcaucgccauu

SEQ ID NO: 19246 - RNA, 13 nt, Homo sapiens
ggcccugccaugc

SEQ ID NO: 19247 - RNA, 21 nt, Homo sapiens
ggcauacugccuuguuuaaug

SEQ ID NO: 19248 - RNA, 21 nt, Homo sapiens
ggccagugagaucaaugugac

SEQ ID NO: 19249 - RNA, 11 nt, Homo sapiens
ggcuaugcauu

SEQ ID NO: 19250 - RNA, 11 nt, Homo sapiens
gggaccugggc

SEQ ID NO: 19251 - RNA, 16 nt, Homo sapiens
ggauuccucacuuuga

SEQ ID NO: 19252 - RNA, 22 nt, Homo sapiens
ggauuuaacagaaauguacagc

SEQ ID NO: 19253 - RNA, 23 nt, Homo sapiens
ggagccugcaacaugccagccac

SEQ ID NO: 19254 - RNA, 16 nt, Homo sapiens
ggacaugggccccaga

SEQ ID NO: 19255 - RNA, 12 nt, Homo sapiens
gcugcugccugc

SEQ ID NO: 19256 - RNA, 23 nt, Homo sapiens
gcugggccuggauggcugccuca

SEQ ID NO: 19257 - RNA, 18 nt, Homo sapiens
gcuguuaaucuuucaaag

SEQ ID NO: 19258 - RNA, 20 nt, Homo sapiens
gcuucuauuagcccuucucc

SEQ ID NO: 19259 - RNA, 22 nt, Homo sapiens
gcuuucauaacaucgaaaaguu

SEQ ID NO: 19260 - RNA, 15 nt, Homo sapiens
gcuuuugugcauuau

SEQ ID NO: 19261 - RNA, 15 nt, Homo sapiens
ggaaacguauucaaa

SEQ ID NO: 19262 - RNA, 19 nt, Homo sapiens
ggaaacuccacauccugug

SEQ ID NO: 19263 - RNA, 14 nt, Homo sapiens
gcuuuaauaucauc

SEQ ID NO: 19264 - RNA, 19 nt, Homo sapiens
ggaaauauuuuaauguuuc

SEQ ID NO: 19265 - RNA, 20 nt, Homo sapiens
ggaaauauuuuaauguuucu

SEQ ID NO: 19266 - RNA, 14 nt, Homo sapiens
ggaacagaagagga

SEQ ID NO: 19267 - RNA, 23 nt, Homo sapiens
ggaacaugagccuuuguugcuau

SEQ ID NO: 19268 - RNA, 18 nt, Homo sapiens
ggaagccucuauugccau

SEQ ID NO: 19269 - RNA, 17 nt, Homo sapiens
gcugccuccccagcucu

SEQ ID NO: 19270 - RNA, 12 nt, Homo sapiens
gcugcauuuaaa

SEQ ID NO: 19271 - RNA, 20 nt, Homo sapiens
gcucucaguugcagcccugc

SEQ ID NO: 19272 - RNA, 21 nt, Homo sapiens
gcucucaguugcagcccugcu

SEQ ID NO: 19273 - RNA, 18 nt, Homo sapiens
gcucuccaaaccacuuuu

SEQ ID NO: 19274 - RNA, 19 nt, Homo sapiens
gcucuccaaaccacuuuuu

SEQ ID NO: 19275 - RNA, 22 nt, Homo sapiens
gcucucugaccuccuccuucau

SEQ ID NO: 19276 - RNA, 23 nt, Homo sapiens
gcugaaccguuugugauugccau

SEQ ID NO: 19277 - RNA, 24 nt, Homo sapiens
gcugaaccguuugugauugccauu

SEQ ID NO: 19278 - RNA, 19 nt, Homo sapiens
gcuagaaaacaggcaaauu

SEQ ID NO: 19279 - RNA, 14 nt, Homo sapiens
gcuaugcuauugaa

SEQ ID NO: 19280 - RNA, 22 nt, Homo sapiens
gcgcuaccucuccagccucagc

SEQ ID NO: 19281 - RNA, 18 nt, Homo sapiens
gcggaccuucccagcuag

SEQ ID NO: 19282 - RNA, 14 nt, Homo sapiens
gcuaccucuccagc

SEQ ID NO: 19283 - RNA, 17 nt, Homo sapiens
gcuaaauauauauuuua

SEQ ID NO: 19284 - RNA, 15 nt, Homo sapiens
cuuucauauuuuagc

SEQ ID NO: 19285 - RNA, 14 nt, Homo sapiens
cuuuucuuuucuuu

SEQ ID NO: 19286 - RNA, 20 nt, Homo sapiens
cuuuugauaaucaacugggc

SEQ ID NO: 19287 - RNA, 19 nt, Homo sapiens
cuuggacaugggccccaga

SEQ ID NO: 19288 - RNA, 15 nt, Homo sapiens
cuuggauucaauuuu

SEQ ID NO: 19289 - RNA, 13 nt, Homo sapiens
cuuguacucuaca

SEQ ID NO: 19290 - RNA, 20 nt, Homo sapiens
cuuguuaaguaucagcuaca

SEQ ID NO: 19291 - RNA, 17 nt, Homo sapiens
gaaaauaaaauauuuaa

SEQ ID NO: 19292 - RNA, 18 nt, Homo sapiens
gaaauaggaaauauuuua

SEQ ID NO: 19293 - RNA, 19 nt, Homo sapiens
gaaauaggaaauauuuuaa

SEQ ID NO: 19294 - RNA, 22 nt, Homo sapiens
gaaauauuccuuaagauauuaa

SEQ ID NO: 19295 - RNA, 14 nt, Homo sapiens
gaaauauuuuaaug

SEQ ID NO: 19296 - RNA, 14 nt, Homo sapiens
gaaauuaaguaucu

SEQ ID NO: 19297 - RNA, 13 nt, Homo sapiens
gaacagaagagga

SEQ ID NO: 19298 - RNA, 18 nt, Homo sapiens
aauauauuuccuuauuca

SEQ ID NO: 19299 - RNA, 16 nt, Homo sapiens
aauaucuuaucuuccu

SEQ ID NO: 19300 - RNA, 20 nt, Homo sapiens
aauauguuagagaauuuccu

SEQ ID NO: 19301 - RNA, 22 nt, Homo sapiens
aauaucccuuggacauuuuaug

SEQ ID NO: 19302 - RNA, 21 nt, Homo sapiens
aauccucucaaccaccuuuca

SEQ ID NO: 19303 - RNA, 12 nt, Homo sapiens
aaucucaaauuu

SEQ ID NO: 19304 - RNA, 13 nt, Homo sapiens
aaucuccaaaaua

SEQ ID NO: 19305 - RNA, 12 nt, Homo sapiens
aaugauuucaca

SEQ ID NO: 19306 - RNA, 20 nt, Homo sapiens
aaugguuaaaagagguuuuu

SEQ ID NO: 19307 - RNA, 22 nt, Homo sapiens
aaugguuaaaagagguuuuucu

SEQ ID NO: 19308 - RNA, 22 nt, Homo sapiens
cuguccccaucaucacccagca

SEQ ID NO: 19309 - RNA, 17 nt, Homo sapiens
cuguguuagagcagaga

SEQ ID NO: 19310 - RNA, 12 nt, Homo sapiens
cuguucuuucug

SEQ ID NO: 19311 - RNA, 24 nt, Homo sapiens
cuuaauuauugauguuuucauaga

SEQ ID NO: 19312 - RNA, 21 nt, Homo sapiens
cuuacucuugauugugggaua

SEQ ID NO: 19313 - RNA, 18 nt, Homo sapiens
cuuagggaaggauacaaa

SEQ ID NO: 19314 - RNA, 19 nt, Homo sapiens
cuucuccauggcccugcca

SEQ ID NO: 19315 - RNA, 17 nt, Homo sapiens
cuucugggcagacucug

SEQ ID NO: 19316 - RNA, 15 nt, Homo sapiens
cuugagccuugaacu

SEQ ID NO: 19317 - RNA, 17 nt, Homo sapiens
cugcuauuugcuguuau

SEQ ID NO: 19318 - RNA, 23 nt, Homo sapiens
cugccucaccucucaccucccaa

SEQ ID NO: 19319 - RNA, 23 nt, Homo sapiens
cugccucagguguccgcuaucca

SEQ ID NO: 19320 - RNA, 21 nt, Homo sapiens
cugccuggacuuggccccugc

SEQ ID NO: 19321 - RNA, 21 nt, Homo sapiens
cugccuuguuuaauguuaauu

SEQ ID NO: 19322 - RNA, 21 nt, Homo sapiens
cugcugccugccuggacuugg

SEQ ID NO: 19323 - RNA, 10 nt, Homo sapiens
cugcugcugc

SEQ ID NO: 19324 - RNA, 19 nt, Homo sapiens
cuggaagccucuauugcca

SEQ ID NO: 19325 - RNA, 20 nt, Homo sapiens
cuggaagccucuauugccau

SEQ ID NO: 19326 - RNA, 19 nt, Homo sapiens
cugcccugaaagucccaga

SEQ ID NO: 19327 - RNA, 18 nt, Homo sapiens
cugagcggaccuucccag

SEQ ID NO: 19328 - RNA, 15 nt, Homo sapiens
cugccaucauuuacu

SEQ ID NO: 19329 - RNA, 17 nt, Homo sapiens
cugaccuccuccuucau

SEQ ID NO: 19330 - RNA, 11 nt, Homo sapiens
cugaauuucuu

SEQ ID NO: 19331 - RNA, 13 nt, Homo sapiens
cugaauuucuuuu

SEQ ID NO: 19332 - RNA, 20 nt, Homo sapiens
cugauaaagaugagugagca

SEQ ID NO: 19333 - RNA, 20 nt, Homo sapiens
cuauguagaauauauuuccu

SEQ ID NO: 19334 - RNA, 18 nt, Homo sapiens
cuauuuaauuauuucacu

SEQ ID NO: 19335 - RNA, 18 nt, Homo sapiens
cuauuuauuaaguauuuu

SEQ ID NO: 19336 - RNA, 16 nt, Homo sapiens
cucagcugccucccca

SEQ ID NO: 19337 - RNA, 14 nt, Homo sapiens
cucagguguccgcu

SEQ ID NO: 19338 - RNA, 18 nt, Homo sapiens
cuagauacuguaucauga

SEQ ID NO: 19339 - RNA, 12 nt, Homo sapiens
cucacuuugaag

SEQ ID NO: 19340 - RNA, 22 nt, Homo sapiens
cuccaaaccacuuuuugcagcu

SEQ ID NO: 19341 - RNA, 17 nt, Homo sapiens
cuccaugaucccaccuc

SEQ ID NO: 19342 - RNA, 14 nt, Homo sapiens
cuccauggcccugc

SEQ ID NO: 19343 - RNA, 17 nt, Homo sapiens
cucccaacuauaaaacu

SEQ ID NO: 19344 - RNA, 15 nt, Homo sapiens
cucccauucacagau

SEQ ID NO: 19345 - RNA, 24 nt, Homo sapiens
cucccuauuuuuuuucuguuauau

SEQ ID NO: 19346 - RNA, 12 nt, Homo sapiens
cguacacauuuu

SEQ ID NO: 19347 - RNA, 11 nt, Homo sapiens
cguccuuccac

SEQ ID NO: 19348 - RNA, 12 nt, Homo sapiens
cguccuuccacu

SEQ ID NO: 19349 - RNA, 14 nt, Homo sapiens
cguccuuccacuuc

SEQ ID NO: 19350 - RNA, 20 nt, Homo sapiens
cguccuuccacuuccaagau

SEQ ID NO: 19351 - RNA, 16 nt, Homo sapiens
cuaaaguguauuuuuu

SEQ ID NO: 19352 - RNA, 17 nt, Homo sapiens
cuaaaguguauuuuuuu

SEQ ID NO: 19353 - RNA, 20 nt, Homo sapiens
cggacuccuccgcauccucc

SEQ ID NO: 19354 - RNA, 17 nt, Homo sapiens
cgcuuuugauaaucaac

SEQ ID NO: 19355 - RNA, 13 nt, Homo sapiens
gaauguuuucaaa

SEQ ID NO: 19356 - RNA, 13 nt, Homo sapiens
gaagcaucguguc

SEQ ID NO: 19357 - RNA, 23 nt, Homo sapiens
gaagauucuauguuaauauuuua

SEQ ID NO: 19358 - RNA, 13 nt, Homo sapiens
gaagugaaacugc

SEQ ID NO: 19359 - RNA, 13 nt, Homo sapiens
gacacagcugcag

SEQ ID NO: 19360 - RNA, 19 nt, Homo sapiens
gacacagcugcagaggcca

SEQ ID NO: 19361 - RNA, 16 nt, Homo sapiens
gacacaugcaagguca

SEQ ID NO: 19362 - RNA, 16 nt, Homo sapiens
gacacaugggugcuau

SEQ ID NO: 19363 - RNA, 17 nt, Homo sapiens
gacacaugggugcuauu

SEQ ID NO: 19364 - RNA, 15 nt, Homo sapiens
gacaugggccccaga

SEQ ID NO: 19365 - RNA, 14 nt, Homo sapiens
gaccacguuucuaa

SEQ ID NO: 19366 - RNA, 18 nt, Homo sapiens
gaccaggcacccccagaa

SEQ ID NO: 19367 - RNA, 19 nt, Homo sapiens
aauuuuaaggcauauuuaa

SEQ ID NO: 19368 - RNA, 18 nt, Homo sapiens
aauuuaaacgugauuuuu

SEQ ID NO: 19369 - RNA, 10 nt, Homo sapiens
aauuuccuua

SEQ ID NO: 19370 - RNA, 13 nt, Homo sapiens
aauuuccuuacuc

SEQ ID NO: 19371 - RNA, 21 nt, Homo sapiens
aauuauauauacuauauuuuu

SEQ ID NO: 19372 - RNA, 19 nt, Homo sapiens
aauuauugauguuuucaua

SEQ ID NO: 19373 - RNA, 14 nt, Homo sapiens
aauuauuucacuuu

SEQ ID NO: 19374 - RNA, 12 nt, Homo sapiens
aauguauucuuu

SEQ ID NO: 19375 - RNA, 21 nt, Homo sapiens
aauguauucuuuuaguuuuua

SEQ ID NO: 19376 - RNA, 23 nt, Homo sapiens
aaugugacuuggauucaauuuua

SEQ ID NO: 19377 - RNA, 14 nt, Homo sapiens
aauguguuugagca

SEQ ID NO: 19378 - RNA, 18 nt, Homo sapiens
aauguuuagcagauuuaa

SEQ ID NO: 19379 - RNA, 14 nt, Homo sapiens
gaacuaaaauguuc

SEQ ID NO: 19380 - RNA, 20 nt, Homo sapiens
gaagacaaugacuuacugua

SEQ ID NO: 19381 - RNA, 13 nt, Homo sapiens
acaccaggauuua

SEQ ID NO: 19382 - RNA, 13 nt, Homo sapiens
acaccucagcugc

SEQ ID NO: 19383 - RNA, 14 nt, Homo sapiens
gaacagaagaggaa

SEQ ID NO: 19384 - RNA, 15 nt, Homo sapiens
gaggaaagagagaca

SEQ ID NO: 19385 - RNA, 15 nt, Homo sapiens
gaggggaaggcaaca

SEQ ID NO: 19386 - RNA, 12 nt, Homo sapiens
gagguaccagcc

SEQ ID NO: 19387 - RNA, 12 nt, Homo sapiens
gauacuauuuaa

SEQ ID NO: 19388 - RNA, 20 nt, Homo sapiens
gauauguaacaacaauuauu

SEQ ID NO: 19389 - RNA, 22 nt, Homo sapiens
gauguuuucacaaagaacagga

SEQ ID NO: 19390 - RNA, 17 nt, Homo sapiens
gauguuuucauagagaa

SEQ ID NO: 19391 - RNA, 13 nt, Homo sapiens
gauuaaacuuaau

SEQ ID NO: 19392 - RNA, 20 nt, Homo sapiens
gauuaacucuaccugcacac

SEQ ID NO: 19393 - RNA, 13 nt, Homo sapiens
gagacacaugggu

SEQ ID NO: 19394 - RNA, 14 nt, Homo sapiens
gaccuccuccuuca

SEQ ID NO: 19395 - RNA, 16 nt, Homo sapiens
gaccucugcagcaaua

SEQ ID NO: 19396 - RNA, 21 nt, Homo sapiens
gaccugcuucuauuagcccuu

SEQ ID NO: 19397 - RNA, 18 nt, Homo sapiens
gacucuggucaagaagca

SEQ ID NO: 19398 - RNA, 18 nt, Homo sapiens
gacuuggccccugccacc

SEQ ID NO: 19399 - RNA, 16 nt, Homo sapiens
gacuuguacucugaaa

SEQ ID NO: 19400 - RNA, 15 nt, Homo sapiens
gagaauaaaaaaugu

SEQ ID NO: 19401 - RNA, 13 nt, Homo sapiens
gccucagcucuca

SEQ ID NO: 19402 - RNA, 17 nt, Homo sapiens
gccucaaucaguauuca

SEQ ID NO: 19403 - RNA, 23 nt, Homo sapiens
gccucaaucaguauucauauuua

SEQ ID NO: 19404 - RNA, 15 nt, Homo sapiens
gccucuauugccaug

SEQ ID NO: 19405 - RNA, 16 nt, Homo sapiens
gccucuauugccauga

SEQ ID NO: 19406 - RNA, 15 nt, Homo sapiens
gccugcaacaugcca

SEQ ID NO: 19407 - RNA, 13 nt, Homo sapiens
gcccuagcauuuc

SEQ ID NO: 19408 - RNA, 14 nt, Homo sapiens
gcccugcugcugcc

SEQ ID NO: 19409 - RNA, 16 nt, Homo sapiens
gcccuggccuagcaua

SEQ ID NO: 19410 - RNA, 19 nt, Homo sapiens
gcccuuacguccuuccacu

SEQ ID NO: 19411 - RNA, 22 nt, Homo sapiens
gccccugccaccuccugccuca

SEQ ID NO: 19412 - RNA, 15 nt, Homo sapiens
gauuuaacagaaaug

SEQ ID NO: 19413 - RNA, 23 nt, Homo sapiens
gcacacucucccauuauauuuau

SEQ ID NO: 19414 - RNA, 19 nt, Homo sapiens
gcacgcauggaaaaguuuc

SEQ ID NO: 19415 - RNA, 20 nt, Homo sapiens
gcacgcauggaaaaguuucc

SEQ ID NO: 19416 - RNA, 14 nt, Homo sapiens
gcacuuacaauuuu

SEQ ID NO: 19417 - RNA, 21 nt, Homo sapiens
gcagagagguuucgauauuua

SEQ ID NO: 19418 - RNA, 22 nt, Homo sapiens
gcagagagguuucgauauuuau

SEQ ID NO: 19419 - RNA, 19 nt, Homo sapiens
gcagauuuaagauauguaa

SEQ ID NO: 19420 - RNA, 19 nt, Homo sapiens
gcaguggugguuuucuguu

SEQ ID NO: 19421 - RNA, 15 nt, Homo sapiens
gcaucacaguuuugg

SEQ ID NO: 19422 - RNA, 16 nt, Homo sapiens
gcaucgcuuaggagaa

SEQ ID NO: 19423 - RNA, 21 nt, Homo sapiens
gccauagucauucugccugcc

SEQ ID NO: 19424 - RNA, 12 nt, Homo sapiens
gccaucauuuac

SEQ ID NO: 19425 - RNA, 16 nt, Homo sapiens
agcaaggagauuuaca

SEQ ID NO: 19426 - RNA, 17 nt, Homo sapiens
agaucaccaucaauuuu

SEQ ID NO: 19427 - RNA, 12 nt, Homo sapiens
agauauaauuua

SEQ ID NO: 19428 - RNA, 21 nt, Homo sapiens
agaauucuguugauggaaaua

SEQ ID NO: 19429 - RNA, 17 nt, Homo sapiens
agacaagaaggaaagau

SEQ ID NO: 19430 - RNA, 17 nt, Homo sapiens
agacacaugggugcuau

SEQ ID NO: 19431 - RNA, 23 nt, Homo sapiens
agaaugaccuggccgcagugagg

SEQ ID NO: 19432 - RNA, 14 nt, Homo sapiens
aggauggcaggagg

SEQ ID NO: 19433 - RNA, 14 nt, Homo sapiens
aggagccugcaaca

SEQ ID NO: 19434 - RNA, 16 nt, Homo sapiens
aggagcucccaggagg

SEQ ID NO: 19435 - RNA, 14 nt, Homo sapiens
aggaggcccugccc

SEQ ID NO: 19436 - RNA, 16 nt, Homo sapiens
aggaacagaagaggaa

SEQ ID NO: 19437 - RNA, 12 nt, Homo sapiens
aggcaucgccau

SEQ ID NO: 19438 - RNA, 20 nt, Homo sapiens
aggcccugcccuuacaggaa

SEQ ID NO: 19439 - RNA, 18 nt, Homo sapiens
aggcuccugagacacaug

SEQ ID NO: 19440 - RNA, 22 nt, Homo sapiens
agccugccucaaucaguauuca

SEQ ID NO: 19441 - RNA, 16 nt, Homo sapiens
agcggaccuucccagc

SEQ ID NO: 19442 - RNA, 17 nt, Homo sapiens
agcggaccuucccagcu

SEQ ID NO: 19443 - RNA, 18 nt, Homo sapiens
agcggaccuucccagcua

SEQ ID NO: 19444 - RNA, 15 nt, Homo sapiens
agcuaagauauaauu

SEQ ID NO: 19445 - RNA, 13 nt, Homo sapiens
agcucacuggugg

SEQ ID NO: 19446 - RNA, 13 nt, Homo sapiens
agcucuaucccaa

SEQ ID NO: 19447 - RNA, 20 nt, Homo sapiens
agcugccuccccagcucuau

SEQ ID NO: 19448 - RNA, 22 nt, Homo sapiens
agcugccuccccagcucuaucc

SEQ ID NO: 19449 - RNA, 23 nt, Homo sapiens
agcugccuccccagcucuauccc

SEQ ID NO: 19450 - RNA, 19 nt, Homo sapiens
acuguuauuuauaaucacu

SEQ ID NO: 19451 - RNA, 14 nt, Homo sapiens
agaaauaggaaaua

SEQ ID NO: 19452 - RNA, 16 nt, Homo sapiens
agaacaggaaaauaaa

SEQ ID NO: 19453 - RNA, 15 nt, Homo sapiens
agaagaggaaagaga

SEQ ID NO: 19454 - RNA, 17 nt, Homo sapiens
agaagaggaaagagaga

SEQ ID NO: 19455 - RNA, 19 nt, Homo sapiens
acugaguacguugugcauu

SEQ ID NO: 19456 - RNA, 14 nt, Homo sapiens
acucuaccugcaca

SEQ ID NO: 19457 - RNA, 20 nt, Homo sapiens
accuuucagauaacuguuau

SEQ ID NO: 19458 - RNA, 21 nt, Homo sapiens
accuuucagauaacuguuauu

SEQ ID NO: 19459 - RNA, 22 nt, Homo sapiens
accuuucagauaacuguuauuu

SEQ ID NO: 19460 - RNA, 19 nt, Homo sapiens
acgucccuagcccuuacgu

SEQ ID NO: 19461 - RNA, 20 nt, Homo sapiens
acgucccuagcccuuacguc

SEQ ID NO: 19462 - RNA, 16 nt, Homo sapiens
acgugauuuuuaaauu

SEQ ID NO: 19463 - RNA, 12 nt, Homo sapiens
acuaaacuuuca

SEQ ID NO: 19464 - RNA, 11 nt, Homo sapiens
acuauaaaacu

SEQ ID NO: 19465 - RNA, 21 nt, Homo sapiens
accugcuucuauuagcccuuc

SEQ ID NO: 19466 - RNA, 15 nt, Homo sapiens
accuggaauauauaa

SEQ ID NO: 19467 - RNA, 22 nt, Homo sapiens
accccagggcuugugugcacau

SEQ ID NO: 19468 - RNA, 24 nt, Homo sapiens
accccagggcuugugugcacauau

SEQ ID NO: 19469 - RNA, 13 nt, Homo sapiens
accuccugccuca

SEQ ID NO: 19470 - RNA, 24 nt, Homo sapiens
aaugugacuuggauucaauuuuaa

SEQ ID NO: 19471 - RNA, 13 nt, Homo sapiens
aaugaaguguuua

SEQ ID NO: 19472 - RNA, 20 nt, Homo sapiens
aauuauugauguuuucauag

SEQ ID NO: 19473 - RNA, 15 nt, Homo sapiens
aauuauuucacuuua

SEQ ID NO: 19474 - RNA, 11 nt, Homo sapiens
aagucuguuuu

SEQ ID NO: 19475 - RNA, 13 nt, Homo sapiens
aauacacuguuau

SEQ ID NO: 19476 - RNA, 14 nt, Homo sapiens
aauaucuuaucuuc

SEQ ID NO: 19477 - RNA, 22 nt, Homo sapiens
aauauuuuagguguaaaauaau

SEQ ID NO: 19478 - RNA, 14 nt, Homo sapiens
aauacacuguuauc

SEQ ID NO: 19479 - RNA, 15 nt, Homo sapiens
aauacacuguuaucu

SEQ ID NO: 19480 - RNA, 20 nt, Homo sapiens
aauacuguuugagguuuuua

SEQ ID NO: 19481 - RNA, 21 nt, Homo sapiens
aauacuguuugagguuuuuaa

SEQ ID NO: 19482 - RNA, 21 nt, Homo sapiens
aauagcuaagauauaauuuaa

SEQ ID NO: 19483 - RNA, 15 nt, Homo sapiens
aauauaaauuuauca

SEQ ID NO: 19484 - RNA, 12 nt, Homo sapiens
aauauauuuccu

SEQ ID NO: 19485 - RNA, 13 nt, Homo sapiens
aaguauuuuauua

SEQ ID NO: 19486 - RNA, 16 nt, Homo sapiens
aauaaaaaauguaagu

SEQ ID NO: 19487 - RNA, 17 nt, Homo sapiens
acaguuacucagaauuc

SEQ ID NO: 19488 - RNA, 14 nt, Homo sapiens
acaugggccccaga

SEQ ID NO: 19489 - RNA, 17 nt, Homo sapiens
acauuuuaugucuuucu

SEQ ID NO: 19490 - RNA, 16 nt, Homo sapiens
accacuuuuugcagcu

SEQ ID NO: 19491 - RNA, 17 nt, Homo sapiens
accacuuuuugcagcuu

SEQ ID NO: 19492 - RNA, 14 nt, Homo sapiens
accagacucuauaa

SEQ ID NO: 19493 - RNA, 15 nt, Homo sapiens
accagacucuauaaa

SEQ ID NO: 19494 - RNA, 13 nt, Homo sapiens
accagcagaaaug

SEQ ID NO: 19495 - RNA, 22 nt, Homo sapiens
acaaaggggcuuaauuauugau

SEQ ID NO: 19496 - RNA, 22 nt, Homo sapiens
acaacaauuauuugaagauuua

SEQ ID NO: 19497 - RNA, 18 nt, Homo sapiens
acaccaggauuuaaguuu

SEQ ID NO: 19498 - RNA, 14 nt, Homo sapiens
acaccucagcugcc

SEQ ID NO: 19499 - RNA, 16 nt, Homo sapiens
acacuaaaacaccuca

SEQ ID NO: 19500 - RNA, 20 nt, Homo sapiens
acacuccaauuaaggauuuu

SEQ ID NO: 19501 - RNA, 17 nt, Homo sapiens
acacuguccuauuauau

SEQ ID NO: 19502 - RNA, 20 nt, Homo sapiens
acacuguuaucuucacuuuu

SEQ ID NO: 19503 - RNA, 19 nt, Homo sapiens
aacuguuuagaugaauguc

SEQ ID NO: 19504 - RNA, 19 nt, Homo sapiens
aaguaucccuacuguaauu

SEQ ID NO: 19505 - RNA, 17 nt, Homo sapiens
aacuccacauccugugg

SEQ ID NO: 19506 - RNA, 18 nt, Homo sapiens
aacuccacauccuguggg

SEQ ID NO: 19507 - RNA, 17 nt, Homo sapiens
aacuggauuaaacuuaa

SEQ ID NO: 19508 - RNA, 15 nt, Homo sapiens
aagcugaguguuuca

SEQ ID NO: 19509 - RNA, 15 nt, Homo sapiens
aaggagcucccagga

SEQ ID NO: 19510 - RNA, 22 nt, Homo sapiens
aaggcaggggaauguaugugca

SEQ ID NO: 19511 - RNA, 19 nt, Homo sapiens
aagguuaugauugaaucua

SEQ ID NO: 19512 - RNA, 20 nt, Homo sapiens
aagguuaugauugaaucuac

SEQ ID NO: 19513 - RNA, 17 nt, Homo sapiens
aagaugagugagcaugc

SEQ ID NO: 19514 - RNA, 18 nt, Homo sapiens
aagagagacacagcugca

SEQ ID NO: 19515 - RNA, 13 nt, Homo sapiens
aaggaaagauuuu

SEQ ID NO: 19516 - RNA, 14 nt, Homo sapiens
aaggaaagauuuug

SEQ ID NO: 19517 - RNA, 15 nt, Homo sapiens
aaggaaagauuuugu

SEQ ID NO: 19518 - RNA, 20 nt, Homo sapiens
aaggcauauuuaacaaaauu

SEQ ID NO: 19519 - RNA, 20 nt, Homo sapiens
aacugccaucauuuacuuuu

SEQ ID NO: 19520 - RNA, 15 nt, Homo sapiens
aacuuauuuguacau

SEQ ID NO: 19521 - RNA, 16 nt, Homo sapiens
aacuuauuuguacauu

SEQ ID NO: 19522 - RNA, 17 nt, Homo sapiens
aacuuauuuguacauuu

SEQ ID NO: 19523 - RNA, 16 nt, Homo sapiens
aacuuucacaccccag

SEQ ID NO: 19524 - RNA, 18 nt, Homo sapiens
aacuuuuccaaugacauu

SEQ ID NO: 19525 - RNA, 20 nt, Homo sapiens
aaccucugugagcaucacag

SEQ ID NO: 19526 - RNA, 14 nt, Homo sapiens
aacccagggaagac

SEQ ID NO: 19527 - RNA, 15 nt, Homo sapiens
aacccagggaagaca

SEQ ID NO: 19528 - RNA, 15 nt, Homo sapiens
aaccucucccaacua

SEQ ID NO: 19529 - RNA, 18 nt, Homo sapiens
aaccucucccaacuauaa

SEQ ID NO: 19530 - RNA, 19 nt, Homo sapiens
aacaugccagccacuguga

SEQ ID NO: 19531 - RNA, 22 nt, Homo sapiens
aaccaccuuucagauaacuguu

SEQ ID NO: 19532 - RNA, 16 nt, Homo sapiens
aaaugggggugcauuu

SEQ ID NO: 19533 - RNA, 17 nt, Homo sapiens
aaaugggggugcauuug

SEQ ID NO: 19534 - RNA, 21 nt, Homo sapiens
aaauguauucuuuuaguuuuu

SEQ ID NO: 19535 - RNA, 15 nt, Homo sapiens
aaagcugaguguuuc

SEQ ID NO: 19536 - RNA, 17 nt, Homo sapiens
aaaggaagguucuggug

SEQ ID NO: 19537 - RNA, 11 nt, Homo sapiens
aaagucccaga

SEQ ID NO: 19538 - RNA, 12 nt, Homo sapiens
aaaguguauuuu

SEQ ID NO: 19539 - RNA, 17 nt, Homo sapiens
aaaauguucuaaauauc

SEQ ID NO: 19540 - RNA, 12 nt, Homo sapiens
aaacacauuuuu

SEQ ID NO: 19541 - RNA, 15 nt, Homo sapiens
aaacaccaggauuua

SEQ ID NO: 19542 - RNA, 23 nt, Homo sapiens
aaacaugcuacacacugcauguu

SEQ ID NO: 19543 - RNA, 24 nt, Homo sapiens
aaacaugcuacacacugcauguuu

SEQ ID NO: 19544 - RNA, 22 nt, Homo sapiens
aaacuuugauuuuauaugcuau

SEQ ID NO: 19545 - RNA, 24 nt, Homo sapiens
aaacuuugauuuuauaugcuauuu

SEQ ID NO: 19546 - RNA, 11 nt, Homo sapiens
aaagaacagga

SEQ ID NO: 19547 - RNA, 12 nt, Homo sapiens
aaagaacaggaa

SEQ ID NO: 19548 - RNA, 15 nt, Homo sapiens
aaagauacaguuacu

SEQ ID NO: 19549 - RNA, 16 nt, Homo sapiens
aaauauaggaacuuaa

SEQ ID NO: 19550 - RNA, 22 nt, Homo sapiens
aaauguucuccagucauuaugu

SEQ ID NO: 19551 - RNA, 23 nt, Homo sapiens
aaauguucuccagucauuauguu

SEQ ID NO: 19552 - RNA, 13 nt, Homo sapiens
aaaugauguuuca

SEQ ID NO: 19553 - RNA, 21 nt, Homo sapiens
aaaugguuaaaagagguuuuu

SEQ ID NO: 19554 - RNA, 11 nt, Homo sapiens
aaauguauucu

SEQ ID NO: 19555 - RNA, 17 nt, Homo sapiens
aaauguauucuuuuagu

SEQ ID NO: 19556 - RNA, 21 nt, Homo sapiens
aaaguuuuggaaacguauuca

SEQ ID NO: 19557 - RNA, 13 nt, Homo sapiens
aaagaacaggaaa

SEQ ID NO: 19558 - RNA, 18 nt, Homo sapiens
aaauuaaauaaaauuuuu

SEQ ID NO: 19559 - RNA, 11 nt, Homo sapiens
aaauuaacuuu

SEQ ID NO: 19560 - RNA, 15 nt, Homo sapiens
aaauagcuaagauau

SEQ ID NO: 19561 - RNA, 13 nt, Homo sapiens
aacauuucucaug

SEQ ID NO: 19562 - RNA, 14 nt, Homo sapiens
aaccagcagaaaug

SEQ ID NO: 19563 - RNA, 22 nt, Homo sapiens
aacagaccgggguucccgugug

SEQ ID NO: 19564 - RNA, 17 nt, Homo sapiens
aacccagggaagacaag

SEQ ID NO: 19565 - RNA, 13 nt, Homo sapiens
aaagaugaauguc

SEQ ID NO: 19566 - RNA, 16 nt, Homo sapiens
aaagcugaguguuuca

SEQ ID NO: 19567 - RNA, 24 nt, Homo sapiens
aaacguauucaaacaauuugaaua

SEQ ID NO: 19568 - RNA, 12 nt, Homo sapiens
aaacgugauuuu

SEQ ID NO: 19569 - RNA, 15 nt, Homo sapiens
aaacgugauuuuuaa

SEQ ID NO: 19570 - RNA, 23 nt, Homo sapiens
aaacgugauuuuuaaauuaaaua

SEQ ID NO: 19571 - RNA, 16 nt, Homo sapiens
aaacuuugauuuuaua

SEQ ID NO: 19572 - RNA, 23 nt, Homo sapiens
aaacuuugauuuuauaugcuauu

SEQ ID NO: 19573 - RNA, 15 nt, Homo sapiens
aaacuuuuccaauga

SEQ ID NO: 19574 - RNA, 19 nt, Homo sapiens
aaaacaccaggauuuaagu

SEQ ID NO: 19575 - RNA, 11 nt, Homo sapiens
aaacacauuuu

SEQ ID NO: 19576 - RNA, 14 nt, Homo sapiens
aaacagaccggggu

SEQ ID NO: 19577 - RNA, 12 nt, Homo sapiens
aucauuuacuuu

SEQ ID NO: 19578 - RNA, 13 nt, Homo sapiens
aucacccagaaga

SEQ ID NO: 19579 - RNA, 14 nt, Homo sapiens
aucacccagaagaa

SEQ ID NO: 19580 - RNA, 17 nt, Homo sapiens
aucaauccaagaacuua

SEQ ID NO: 19581 - RNA, 15 nt, Homo sapiens
auaugcuauuuauua

SEQ ID NO: 19582 - RNA, 15 nt, Homo sapiens
auauguaacaacaau

SEQ ID NO: 19583 - RNA, 21 nt, Homo sapiens
auauuuaacaaaauuugaaua

SEQ ID NO: 19584 - RNA, 16 nt, Homo sapiens
auauuuccaagaaaua

SEQ ID NO: 19585 - RNA, 11 nt, Homo sapiens
auauuuccuua

SEQ ID NO: 19586 - RNA, 23 nt, Homo sapiens
auauuuccuuauucagaauuucu

SEQ ID NO: 19587 - RNA, 13 nt, Homo sapiens
aucgcuuuugaua

SEQ ID NO: 19588 - RNA, 18 nt, Homo sapiens
aucuagauacuguaucau

SEQ ID NO: 19589 - RNA, 16 nt, Homo sapiens
aucucauuuaauccuc

SEQ ID NO: 19590 - RNA, 22 nt, Homo sapiens
aucuucacuuuuauaagaaaua

SEQ ID NO: 19591 - RNA, 22 nt, Homo sapiens
aucuucucagaaggcaaaugac

SEQ ID NO: 19592 - RNA, 18 nt, Homo sapiens
auguagaauauauuuccu

SEQ ID NO: 19593 - RNA, 16 nt, Homo sapiens
auggcuuuugugcauu

SEQ ID NO: 19594 - RNA, 20 nt, Homo sapiens
augugacuuggauucaauuu

SEQ ID NO: 19595 - RNA, 17 nt, Homo sapiens
auguuagagaauuuccu

SEQ ID NO: 19596 - RNA, 13 nt, Homo sapiens
augcuuguacaua

SEQ ID NO: 19597 - RNA, 13 nt, Homo sapiens
auggcaggcaucg

SEQ ID NO: 19598 - RNA, 13 nt, Homo sapiens
auggcccugccau

SEQ ID NO: 19599 - RNA, 20 nt, Homo sapiens
augaaaacacauuuuucuua

SEQ ID NO: 19600 - RNA, 22 nt, Homo sapiens
augauuucacagugugugguca

SEQ ID NO: 19601 - RNA, 14 nt, Homo sapiens
augcacacauuuuu

SEQ ID NO: 19602 - RNA, 21 nt, Homo sapiens
augcacagaguuguuacauuu

SEQ ID NO: 19603 - RNA, 23 nt, Homo sapiens
augcacagaguuguuacauuuuu

SEQ ID NO: 19604 - RNA, 23 nt, Homo sapiens
augcaugaaguaauaugcacaca

SEQ ID NO: 19605 - RNA, 17 nt, Homo sapiens
augccaaguuguuugag

SEQ ID NO: 19606 - RNA, 15 nt, Homo sapiens
augacuucauuaaua

SEQ ID NO: 19607 - RNA, 13 nt, Homo sapiens
augagaucauugu

SEQ ID NO: 19608 - RNA, 23 nt, Homo sapiens
augcugagcccggaaacuccaca

SEQ ID NO: 19609 - RNA, 15 nt, Homo sapiens
agugugaggaaaacc

SEQ ID NO: 19610 - RNA, 23 nt, Homo sapiens
aguguguggucaacauuucucau

SEQ ID NO: 19611 - RNA, 11 nt, Homo sapiens
aguuauaaaaa

SEQ ID NO: 19612 - RNA, 15 nt, Homo sapiens
aguucaauccugauu

SEQ ID NO: 19613 - RNA, 21 nt, Homo sapiens
aguucaauccugauucauauu

SEQ ID NO: 19614 - RNA, 21 nt, Homo sapiens
aguucaaucuggauucauauu

SEQ ID NO: 19615 - RNA, 18 nt, Homo sapiens
aguugcagcccugcugcu

SEQ ID NO: 19616 - RNA, 14 nt, Homo sapiens
aguuuauauagaaa

SEQ ID NO: 19617 - RNA, 17 nt, Homo sapiens
aguuuuacaguguuucu

SEQ ID NO: 19618 - RNA, 12 nt, Homo sapiens
auaaaauauuua

SEQ ID NO: 19619 - RNA, 14 nt, Homo sapiens
auaaaauauuuaaa

SEQ ID NO: 19620 - RNA, 18 nt, Homo sapiens
auaaacaagaccacguuu

SEQ ID NO: 19621 - RNA, 23 nt, Homo sapiens
auaaaucgcuuuugauaaucaac

SEQ ID NO: 19622 - RNA, 20 nt, Homo sapiens
auaaauucccuggccuuuca

SEQ ID NO: 19623 - RNA, 13 nt, Homo sapiens
auaagaauucugu

SEQ ID NO: 19624 - RNA, 21 nt, Homo sapiens
auaaugcgugcauaccacuuu

SEQ ID NO: 19625 - RNA, 19 nt, Homo sapiens
auaauuaaggguaugauua

SEQ ID NO: 19626 - RNA, 20 nt, Homo sapiens
auaauuaaggguaugauuaa

SEQ ID NO: 19627 - RNA, 12 nt, Homo sapiens
auacuacaguuu

SEQ ID NO: 19628 - RNA, 14 nt, Homo sapiens
auacuacaguuugu

SEQ ID NO: 19629 - RNA, 13 nt, Homo sapiens
auacuauuuaauu

SEQ ID NO: 19630 - RNA, 14 nt, Homo sapiens
auacuauuuaauua

SEQ ID NO: 19631 - RNA, 12 nt, Homo sapiens
auacuguuugag

SEQ ID NO: 19632 - RNA, 18 nt, Homo sapiens
auacuguuugagguuuuu

SEQ ID NO: 19633 - RNA, 17 nt, Homo sapiens
auacauaaacaagacca

SEQ ID NO: 19634 - RNA, 20 nt, Homo sapiens
auagccagguaccuucucac

SEQ ID NO: 19635 - RNA, 21 nt, Homo sapiens
auagccagguaccuucucacc

SEQ ID NO: 19636 - RNA, 21 nt, Homo sapiens
auagcuaagauauaauuuaaa

SEQ ID NO: 19637 - RNA, 17 nt, Homo sapiens
auauaugugaugaucua

SEQ ID NO: 19638 - RNA, 16 nt, Homo sapiens
auauauuuccuuauuc

SEQ ID NO: 19639 - RNA, 17 nt, Homo sapiens
auauauuuccuuauuca

SEQ ID NO: 19640 - RNA, 16 nt, Homo sapiens
auaucuuaucuuccua

SEQ ID NO: 19641 - RNA, 13 nt, Homo sapiens
agucuguuuuaug

SEQ ID NO: 19642 - RNA, 13 nt, Homo sapiens
agugaaacugcuu

SEQ ID NO: 19643 - RNA, 15 nt, Homo sapiens
agguuucgauauuua

SEQ ID NO: 19644 - RNA, 21 nt, Homo sapiens
agguuuuucuuaaauaauaaa

SEQ ID NO: 19645 - RNA, 18 nt, Homo sapiens
aguaucccuacuguaauu

SEQ ID NO: 19646 - RNA, 13 nt, Homo sapiens
agugcugcauuua

SEQ ID NO: 19647 - RNA, 17 nt, Homo sapiens
aggcuguggauuuaaug

SEQ ID NO: 19648 - RNA, 16 nt, Homo sapiens
aggggggucagccagc

SEQ ID NO: 19649 - RNA, 17 nt, Homo sapiens
agggugcacacaggaug

SEQ ID NO: 19650 - RNA, 15 nt, Homo sapiens
cagcugcagaggcca

SEQ ID NO: 19651 - RNA, 15 nt, Homo sapiens
cagccucagcucuca

SEQ ID NO: 19652 - RNA, 17 nt, Homo sapiens
cagaguuguuacauuuu

SEQ ID NO: 19653 - RNA, 15 nt, Homo sapiens
cagaucucuaacuuc

SEQ ID NO: 19654 - RNA, 17 nt, Homo sapiens
cagcaauaaagcagcgu

SEQ ID NO: 19655 - RNA, 22 nt, Homo sapiens
cagcaauaaagcagcguuucua

SEQ ID NO: 19656 - RNA, 14 nt, Homo sapiens
cagcacgauuucug

SEQ ID NO: 19657 - RNA, 12 nt, Homo sapiens
cagcagagaagu

SEQ ID NO: 19658 - RNA, 22 nt, Homo sapiens
cagccacugugauagaggcuga

SEQ ID NO: 19659 - RNA, 17 nt, Homo sapiens
cacuggcuguuaaucuu

SEQ ID NO: 19660 - RNA, 16 nt, Homo sapiens
cacuguuaucuucacu

SEQ ID NO: 19661 - RNA, 14 nt, Homo sapiens
cacuuccaagaucu

SEQ ID NO: 19662 - RNA, 22 nt, Homo sapiens
cacuuggacaugggccccagau

SEQ ID NO: 19663 - RNA, 14 nt, Homo sapiens
cacuacauucuguu

SEQ ID NO: 19664 - RNA, 21 nt, Homo sapiens
caccuggaauauauaaccagu

SEQ ID NO: 19665 - RNA, 12 nt, Homo sapiens
cacccccagaau

SEQ ID NO: 19666 - RNA, 12 nt, Homo sapiens
cacauccugugg

SEQ ID NO: 19667 - RNA, 13 nt, Homo sapiens
cacauccuguggg

SEQ ID NO: 19668 - RNA, 16 nt, Homo sapiens
cacagauaccucucuu

SEQ ID NO: 19669 - RNA, 13 nt, Homo sapiens
cacaguuuugguu

SEQ ID NO: 19670 - RNA, 14 nt, Homo sapiens
cacaguuuugguug

SEQ ID NO: 19671 - RNA, 17 nt, Homo sapiens
cacauaaggaaacuggg

SEQ ID NO: 19672 - RNA, 19 nt, Homo sapiens
caauccugauucauauuua

SEQ ID NO: 19673 - RNA, 20 nt, Homo sapiens
caauccugauucauauuuaa

SEQ ID NO: 19674 - RNA, 19 nt, Homo sapiens
caauuuuaaggcauauuua

SEQ ID NO: 19675 - RNA, 12 nt, Homo sapiens
cacacacuuuug

SEQ ID NO: 19676 - RNA, 22 nt, Homo sapiens
caauaaagcagcguuucuauga

SEQ ID NO: 19677 - RNA, 13 nt, Homo sapiens
caagggaccugcu

SEQ ID NO: 19678 - RNA, 15 nt, Homo sapiens
caaggucauuuuuuu

SEQ ID NO: 19679 - RNA, 23 nt, Homo sapiens
caagaaaauggccagugagauca

SEQ ID NO: 19680 - RNA, 14 nt, Homo sapiens
caagaaauauuccu

SEQ ID NO: 19681 - RNA, 17 nt, Homo sapiens
auuuuaaggcauauuua

SEQ ID NO: 19682 - RNA, 20 nt, Homo sapiens
auuuuagacauucuuuaucu

SEQ ID NO: 19683 - RNA, 21 nt, Homo sapiens
auuuuagacauucuuuaucuu

SEQ ID NO: 19684 - RNA, 15 nt, Homo sapiens
auuuuauuuuauuau

SEQ ID NO: 19685 - RNA, 17 nt, Homo sapiens
auuuuucucaauguuua

SEQ ID NO: 19686 - RNA, 12 nt, Homo sapiens
auuuuuuuucug

SEQ ID NO: 19687 - RNA, 21 nt, Homo sapiens
auuuuuuuucuguuauauaaa

SEQ ID NO: 19688 - RNA, 17 nt, Homo sapiens
auuuugauguuuuaagg

SEQ ID NO: 19689 - RNA, 19 nt, Homo sapiens
caaacugccaucauuuacu

SEQ ID NO: 19690 - RNA, 21 nt, Homo sapiens
caaacugccaucauuuacuuu

SEQ ID NO: 19691 - RNA, 17 nt, Homo sapiens
caacaugccagccacug

SEQ ID NO: 19692 - RNA, 14 nt, Homo sapiens
caaccaccuuucag

SEQ ID NO: 19693 - RNA, 18 nt, Homo sapiens
caaauugagcuagggggg

SEQ ID NO: 19694 - RNA, 17 nt, Homo sapiens
auuuauccuuguuaagu

SEQ ID NO: 19695 - RNA, 18 nt, Homo sapiens
auuuauugaaaugauuuc

SEQ ID NO: 19696 - RNA, 13 nt, Homo sapiens
auuucacuuuaga

SEQ ID NO: 19697 - RNA, 24 nt, Homo sapiens
auuuguuugcauaggugaucucau

SEQ ID NO: 19698 - RNA, 22 nt, Homo sapiens
auugauguuuucacaaagaaca

SEQ ID NO: 19699 - RNA, 14 nt, Homo sapiens
auugauguuuucau

SEQ ID NO: 19700 - RNA, 16 nt, Homo sapiens
auguuuagcagauuua

SEQ ID NO: 19701 - RNA, 19 nt, Homo sapiens
auguuuagcagauuuaaga

SEQ ID NO: 19702 - RNA, 10 nt, Homo sapiens
auguuuucaa

SEQ ID NO: 19703 - RNA, 10 nt, Homo sapiens
auguuuucau

SEQ ID NO: 19704 - RNA, 14 nt, Homo sapiens
auuaaauaaaauuu

SEQ ID NO: 19705 - RNA, 15 nt, Homo sapiens
auuaaggguaugauu

SEQ ID NO: 19706 - RNA, 10 nt, Homo sapiens
auuauauuua

SEQ ID NO: 19707 - RNA, 16 nt, Homo sapiens
auucauuaguuuugaa

SEQ ID NO: 19708 - RNA, 14 nt, Homo sapiens
auucuguuaaucau

SEQ ID NO: 19709 - RNA, 18 nt, Homo sapiens
ccugauucauauuuaauu

SEQ ID NO: 19710 - RNA, 20 nt, Homo sapiens
ccugcccuuacaggaacaga

SEQ ID NO: 19711 - RNA, 21 nt, Homo sapiens
ccugcccuuacaggaacagaa

SEQ ID NO: 19712 - RNA, 16 nt, Homo sapiens
cccgugugccugagcg

SEQ ID NO: 19713 - RNA, 17 nt, Homo sapiens
cccugaaagucccagau

SEQ ID NO: 19714 - RNA, 18 nt, Homo sapiens
cccugaaagucccagauc

SEQ ID NO: 19715 - RNA, 19 nt, Homo sapiens
cccugaaagucccagauca

SEQ ID NO: 19716 - RNA, 12 nt, Homo sapiens
cccuuacaggaa

SEQ ID NO: 19717 - RNA, 17 nt, Homo sapiens
cccuuacaggaacagaa

SEQ ID NO: 19718 - RNA, 15 nt, Homo sapiens
ccgcuauccaccaaa

SEQ ID NO: 19719 - RNA, 12 nt, Homo sapiens
cccugccaccuc

SEQ ID NO: 19720 - RNA, 19 nt, Homo sapiens
ccggaagccaaaccucugu

SEQ ID NO: 19721 - RNA, 18 nt, Homo sapiens
ccaggauuuaaguuucac

SEQ ID NO: 19722 - RNA, 16 nt, Homo sapiens
ccaggcacccccagaa

SEQ ID NO: 19723 - RNA, 16 nt, Homo sapiens
ccagguaccuucucac

SEQ ID NO: 19724 - RNA, 14 nt, Homo sapiens
ccagaaugaccugg

SEQ ID NO: 19725 - RNA, 16 nt, Homo sapiens
ccagaucaagccugcc

SEQ ID NO: 19726 - RNA, 11 nt, Homo sapiens
ccacguuucua

SEQ ID NO: 19727 - RNA, 13 nt, Homo sapiens
cauucuuuuugaa

SEQ ID NO: 19728 - RNA, 14 nt, Homo sapiens
cauucuuuuugaaa

SEQ ID NO: 19729 - RNA, 17 nt, Homo sapiens
cauuuguuaauauuucu

SEQ ID NO: 19730 - RNA, 12 nt, Homo sapiens
cauuuguuugaa

SEQ ID NO: 19731 - RNA, 22 nt, Homo sapiens
cauuuuauaaaucgcuuuugau

SEQ ID NO: 19732 - RNA, 14 nt, Homo sapiens
cauuuuaugucuuu

SEQ ID NO: 19733 - RNA, 22 nt, Homo sapiens
cauuuuauuuuauuaugcauga

SEQ ID NO: 19734 - RNA, 18 nt, Homo sapiens
ccaagcaaauggccaaug

SEQ ID NO: 19735 - RNA, 17 nt, Homo sapiens
cauggcaggcaucgcca

SEQ ID NO: 19736 - RNA, 14 nt, Homo sapiens
cauguucuuaauuc

SEQ ID NO: 19737 - RNA, 13 nt, Homo sapiens
cauuaguuuugaa

SEQ ID NO: 19738 - RNA, 13 nt, Homo sapiens
caucgccauucuu

SEQ ID NO: 19739 - RNA, 23 nt, Homo sapiens
caucuuucaagggaccucuccau

SEQ ID NO: 19740 - RNA, 21 nt, Homo sapiens
caugcucuccaaaccacuuuu

SEQ ID NO: 19741 - RNA, 22 nt, Homo sapiens
caugcucuccaaaccacuuuuu

SEQ ID NO: 19742 - RNA, 22 nt, Homo sapiens
caguuguuauuuauugaaauga

SEQ ID NO: 19743 - RNA, 20 nt, Homo sapiens
cauaaacaagaccacguuuc

SEQ ID NO: 19744 - RNA, 21 nt, Homo sapiens
cauaaacaagaccacguuucu

SEQ ID NO: 19745 - RNA, 19 nt, Homo sapiens
cauaaccccggaagccaaa

SEQ ID NO: 19746 - RNA, 23 nt, Homo sapiens
cauacacaccccggacuccuccg

SEQ ID NO: 19747 - RNA, 16 nt, Homo sapiens
cauacguacacauuuu

SEQ ID NO: 19748 - RNA, 13 nt, Homo sapiens
cauacuaaccagc

SEQ ID NO: 19749 - RNA, 20 nt, Homo sapiens
caucaauuuuaguugucaau

SEQ ID NO: 19750 - RNA, 19 nt, Homo sapiens
caucagcacgauuucuguu

SEQ ID NO: 19751 - RNA, 16 nt, Homo sapiens
caugaaaacacauuuu

SEQ ID NO: 19752 - RNA, 10 nt, Homo sapiens
caggaaaaua

SEQ ID NO: 19753 - RNA, 15 nt, Homo sapiens
cagcucucaguugca

SEQ ID NO: 19754 - RNA, 23 nt, Homo sapiens
cagcucucaguugcagcccugcu

SEQ ID NO: 19755 - RNA, 13 nt, Homo sapiens
cagguguccgcua

SEQ ID NO: 19756 - RNA, 18 nt, Homo sapiens
caguaguuagcuuucuuc

SEQ ID NO: 19757 - RNA, 19 nt, Homo sapiens
gauacuauuuaauuauuuc

SEQ ID NO: 19758 - RNA, 21 nt, Homo sapiens
agauauuuugcuuugugauuu

SEQ ID NO: 19759 - RNA, 14 nt, Homo sapiens
gcuuagaacaaagg

SEQ ID NO: 19760 - RNA, 16 nt, Homo sapiens
gcccugccaugcucuc

SEQ ID NO: 19761 - RNA, 21 nt, Homo sapiens
cacuggcuguuaaucuuucaa

SEQ ID NO: 19762 - RNA, 17 nt, Homo sapiens
aaaaauaaagcacuuau

SEQ ID NO: 19763 - RNA, 13 nt, Homo sapiens
caggcaucgccau

SEQ ID NO: 19764 - RNA, 17 nt, Homo sapiens
caaaauauagcuuucau

SEQ ID NO: 19765 - RNA, 18 nt, Homo sapiens
caacaugccagccacugu

SEQ ID NO: 19766 - RNA, 20 nt, Homo sapiens
ucacuggcuguuaaucuuuc

SEQ ID NO: 19767 - RNA, 16 nt, Homo sapiens
aagccucuauugccau

SEQ ID NO: 19768 - RNA, 14 nt, Homo sapiens
agcacacacuuuug

SEQ ID NO: 19769 - RNA, 13 nt, Homo sapiens
auccuccuccugc

SEQ ID NO: 19770 - RNA, 20 nt, Homo sapiens
aaacuccacauccuguggga

SEQ ID NO: 19771 - RNA, 21 nt, Homo sapiens
cacaguuuugguugcuuuaau

SEQ ID NO: 19772 - RNA, 19 nt, Homo sapiens
cauucacagauaccucucu

SEQ ID NO: 19773 - RNA, 17 nt, Homo sapiens
agacauacuaaccagca

SEQ ID NO: 19774 - RNA, 21 nt, Homo sapiens
uugcaaaguaucccuacugua

SEQ ID NO: 19775 - RNA, 21 nt, Homo sapiens
uggccagugagaucaauguga

SEQ ID NO: 19776 - RNA, 13 nt, Homo sapiens
ugcuuugugauuu

SEQ ID NO: 19777 - RNA, 17 nt, Homo sapiens
uuauuauggcacaucag

SEQ ID NO: 19778 - RNA, 19 nt, Homo sapiens
gguugcuuuaauaucauca

SEQ ID NO: 19779 - RNA, 14 nt, Homo sapiens
uuccucacuuugaa

SEQ ID NO: 19780 - RNA, 23 nt, Homo sapiens
guaauuuuuuuaucgucacugcu

SEQ ID NO: 19781 - RNA, 18 nt, Homo sapiens
ggaagccucuauugccau

SEQ ID NO: 19782 - RNA, 19 nt, Homo sapiens
uaaaacuaggugcugcagc

SEQ ID NO: 19783 - RNA, 18 nt, Homo sapiens
uuccaguaguuagcuuuc

SEQ ID NO: 19784 - RNA, 12 nt, Homo sapiens
uuuaaacuuuga

SEQ ID NO: 19785 - RNA, 22 nt, Homo sapiens
ucaaacccaaguuaguucaauc

SEQ ID NO: 19786 - RNA, 18 nt, Homo sapiens
uggaagccucuauugcca

SEQ ID NO: 19787 - RNA, 15 nt, Homo sapiens
guuuuuaagccuuaa

SEQ ID NO: 19788 - RNA, 17 nt, Homo sapiens
cuaggggggucagccag

SEQ ID NO: 19789 - RNA, 16 nt, Homo sapiens
caagccugccucaauc

SEQ ID NO: 19790 - RNA, 17 nt, Homo sapiens
auuuauaaucacuuuuu

SEQ ID NO: 19791 - RNA, 22 nt, Homo sapiens
auauuuccaagaaauauuccuu

SEQ ID NO: 19792 - RNA, 13 nt, Homo sapiens
aaauguacagcaa

SEQ ID NO: 19793 - RNA, 16 nt, Homo sapiens
ugaacuaaacuuucac

SEQ ID NO: 19794 - RNA, 19 nt, Homo sapiens
caucuuucaagggaccucu

SEQ ID NO: 19795 - RNA, 18 nt, Homo sapiens
ccuggauuccucacuuug

SEQ ID NO: 19796 - RNA, 21 nt, Homo sapiens
aauaggaaauauuuuaauguu

SEQ ID NO: 19797 - RNA, 19 nt, Homo sapiens
uaagaaaaaggaugcacag

SEQ ID NO: 19798 - RNA, 15 nt, Homo sapiens
cagccccugggacca

SEQ ID NO: 19799 - RNA, 12 nt, Homo sapiens
ugauugccauuu

SEQ ID NO: 19800 - RNA, 20 nt, Homo sapiens
auguaacaacaauuauuuga

SEQ ID NO: 19801 - RNA, 19 nt, Homo sapiens
uguuagagaauuuccuuac

SEQ ID NO: 19802 - RNA, 22 nt, Homo sapiens
uuuagcauaguaccucugcuau

SEQ ID NO: 19803 - RNA, 18 nt, Homo sapiens
uuuaucugcuaugcuauu

SEQ ID NO: 19804 - RNA, 14 nt, Homo sapiens
ugcacacucuccca

SEQ ID NO: 19805 - RNA, 20 nt, Homo sapiens
ccugagcccuacugugucuc

SEQ ID NO: 19806 - RNA, 21 nt, Homo sapiens
ggaagccaaaccucugugagc

SEQ ID NO: 19807 - RNA, 22 nt, Homo sapiens
ucccaggaggggcuucugggca

SEQ ID NO: 19808 - RNA, 16 nt, Homo sapiens
cauuuaauccucucaa

SEQ ID NO: 19809 - RNA, 16 nt, Homo sapiens
ggcuccugagacacau

SEQ ID NO: 19810 - RNA, 22 nt, Homo sapiens
cucuggaagccucuauugccau

SEQ ID NO: 19811 - RNA, 19 nt, Homo sapiens
auauaaaaauaaagcacuu

SEQ ID NO: 19812 - RNA, 14 nt, Homo sapiens
cucucuuguagcuc

SEQ ID NO: 19813 - RNA, 14 nt, Homo sapiens
ugcauuuaauuaga

SEQ ID NO: 19814 - RNA, 23 nt, Homo sapiens
ggaauauguuagagaauuuccuu

SEQ ID NO: 19815 - RNA, 19 nt, Homo sapiens
aaggauuuuaugcuuuaaa

SEQ ID NO: 19816 - RNA, 21 nt, Homo sapiens
cuugauugugggauacuauuu

SEQ ID NO: 19817 - RNA, 15 nt, Homo sapiens
ucaccucucaccucc

SEQ ID NO: 19818 - RNA, 20 nt, Homo sapiens
gcaacaugccagccacugug

SEQ ID NO: 19819 - RNA, 19 nt, Homo sapiens
uaguucaauccugauucau

SEQ ID NO: 19820 - RNA, 17 nt, Homo sapiens
acauaaugcgugcauac

SEQ ID NO: 19821 - RNA, 22 nt, Homo sapiens
guuugcagauauucucuaguca

SEQ ID NO: 19822 - RNA, 19 nt, Homo sapiens
ugugaacuaaacuuucaca

SEQ ID NO: 19823 - RNA, 13 nt, Homo sapiens
gcaggcaucgcca

SEQ ID NO: 19824 - RNA, 23 nt, Homo sapiens
aaauacacuguuaucuucacuuu

SEQ ID NO: 19825 - RNA, 20 nt, Homo sapiens
guaauuugugauacaaugcu

SEQ ID NO: 19826 - RNA, 12 nt, Homo sapiens
uguagcucucug

SEQ ID NO: 19827 - RNA, 15 nt, Homo sapiens
uuagaugaaugucag

SEQ ID NO: 19828 - RNA, 16 nt, Homo sapiens
cccuagcccuuacguc

SEQ ID NO: 19829 - RNA, 18 nt, Homo sapiens
cagcucucaguugcagcc

SEQ ID NO: 19830 - RNA, 22 nt, Homo sapiens
uuucaagggaccucuccaugau

SEQ ID NO: 19831 - RNA, 18 nt, Homo sapiens
cuacuguaauuugugaua

SEQ ID NO: 19832 - RNA, 20 nt, Homo sapiens
acaggauggcaggaggcauc

SEQ ID NO: 19833 - RNA, 17 nt, Homo sapiens
auaauaaagaucaugua

SEQ ID NO: 19834 - RNA, 21 nt, Homo sapiens
ugcaaucuucucagaaggcaa

SEQ ID NO: 19835 - RNA, 17 nt, Homo sapiens
aaagcugaguguuucac

SEQ ID NO: 19836 - RNA, 17 nt, Homo sapiens
gcauacugccuuguuua

SEQ ID NO: 19837 - RNA, 18 nt, Homo sapiens
uagcagauuuaagauaug

SEQ ID NO: 19838 - RNA, 20 nt, Homo sapiens
acuccacuuggacaugggcc

SEQ ID NO: 19839 - RNA, 15 nt, Homo sapiens
uguaacuguaaagau

SEQ ID NO: 19840 - RNA, 16 nt, Homo sapiens
caggauuuaaguuuca

SEQ ID NO: 19841 - RNA, 18 nt, Homo sapiens
caugucagccacugugau

SEQ ID NO: 19842 - RNA, 14 nt, Homo sapiens
ggcccugccaugcu

SEQ ID NO: 19843 - RNA, 17 nt, Homo sapiens
aagcaugugagacuggu

SEQ ID NO: 19844 - RNA, 21 nt, Homo sapiens
cuauguuaauauuuuaugugu

SEQ ID NO: 19845 - RNA, 19 nt, Homo sapiens
cugcagccccugggaccag

SEQ ID NO: 19846 - RNA, 22 nt, Homo sapiens
caggauggcaggaggcauccaa

SEQ ID NO: 19847 - RNA, 18 nt, Homo sapiens
gacucuggucaagaagca

SEQ ID NO: 19848 - RNA, 16 nt, Homo sapiens
cgcuaccucuccagcc

SEQ ID NO: 19849 - RNA, 18 nt, Homo sapiens
cccauucacagauaccuc

SEQ ID NO: 19850 - RNA, 17 nt, Homo sapiens
aggaugcuuguacauaa

SEQ ID NO: 19851 - RNA, 18 nt, Homo sapiens
ucugcuauuugcuguuau

SEQ ID NO: 19852 - RNA, 19 nt, Homo sapiens
caauguuuagcagauuuaa

SEQ ID NO: 19853 - RNA, 15 nt, Homo sapiens
auauuuuauguguaa

SEQ ID NO: 19854 - RNA, 13 nt, Homo sapiens
cuagauacuguau

SEQ ID NO: 19855 - RNA, 19 nt, Homo sapiens
uuuuuaagugcugcauuua

SEQ ID NO: 19856 - RNA, 21 nt, Homo sapiens
agcauacguacacauuuuauu

SEQ ID NO: 19857 - RNA, 14 nt, Homo sapiens
cagauaccaugaug

SEQ ID NO: 19858 - RNA, 14 nt, Homo sapiens
uggaaacguauuca

SEQ ID NO: 19859 - RNA, 20 nt, Homo sapiens
accuucccagcuagaauuca

SEQ ID NO: 19860 - RNA, 21 nt, Homo sapiens
cuuguagcucucugaccuccu

SEQ ID NO: 19861 - RNA, 15 nt, Homo sapiens
guagcguacaucaau

SEQ ID NO: 19862 - RNA, 15 nt, Homo sapiens
aagucccagaucaag

SEQ ID NO: 19863 - RNA, 15 nt, Homo sapiens
uagagaauuuccuua

SEQ ID NO: 19864 - RNA, 17 nt, Homo sapiens
guaauuugugauacaau

SEQ ID NO: 19865 - RNA, 21 nt, Homo sapiens
uggaagccucuauugccauga

SEQ ID NO: 19866 - RNA, 16 nt, Homo sapiens
agaucucuaacuucac

SEQ ID NO: 19867 - RNA, 21 nt, Homo sapiens
cuucugacacuaaaacaccuc

SEQ ID NO: 19868 - RNA, 19 nt, Homo sapiens
ccaaugagaucauugugaa

SEQ ID NO: 19869 - RNA, 18 nt, Homo sapiens
ccuuagcccaucuuucaa

SEQ ID NO: 19870 - RNA, 11 nt, Homo sapiens
ucuauguuaau

SEQ ID NO: 19871 - RNA, 20 nt, Homo sapiens
gccucagggugcacacagga

SEQ ID NO: 19872 - RNA, 20 nt, Homo sapiens
caugaugcugagcccggaaa

SEQ ID NO: 19873 - RNA, 19 nt, Homo sapiens
cuuucaagggaccucucca

SEQ ID NO: 19874 - RNA, 23 nt, Homo sapiens
uuucuuguaaggcauacugccuu

SEQ ID NO: 19875 - RNA, 16 nt, Homo sapiens
cuggcuaugcauuuga

SEQ ID NO: 19876 - RNA, 12 nt, Homo sapiens
uugugcauuugg

SEQ ID NO: 19877 - RNA, 14 nt, Homo sapiens
aacauguauguaaa

SEQ ID NO: 19878 - RNA, 22 nt, Homo sapiens
gauacuguaucaugacaaagac

SEQ ID NO: 19879 - RNA, 19 nt, Homo sapiens
uccaaaguacacuguuuca

SEQ ID NO: 19880 - RNA, 12 nt, Homo sapiens
auauauuuuaga

SEQ ID NO: 19881 - RNA, 18 nt, Homo sapiens
gagacacaugggugcuau

SEQ ID NO: 19882 - RNA, 21 nt, Homo sapiens
uuacuaaacauguauguaaau

SEQ ID NO: 19883 - RNA, 17 nt, Homo sapiens
uguugcuaucaauccaa

SEQ ID NO: 19884 - RNA, 21 nt, Homo sapiens
cuaaaguguauuuuuuuacua

SEQ ID NO: 19885 - RNA, 20 nt, Homo sapiens
agcauaguaccucugcuauu

SEQ ID NO: 19886 - RNA, 20 nt, Homo sapiens
ugugauugacgggacuguug

SEQ ID NO: 19887 - RNA, 12 nt, Homo sapiens
uuauuucacuuu

SEQ ID NO: 19888 - RNA, 12 nt, Homo sapiens
uaaauagcuaag

SEQ ID NO: 19889 - RNA, 16 nt, Homo sapiens
ucuagauacuguauca

SEQ ID NO: 19890 - RNA, 17 nt, Homo sapiens
ugaguacguugugcauu

SEQ ID NO: 19891 - RNA, 22 nt, Homo sapiens
agccuuggauacuccauggggu

SEQ ID NO: 19892 - RNA, 17 nt, Homo sapiens
accucuugagccuugaa

SEQ ID NO: 19893 - RNA, 24 nt, Homo sapiens
uuguaacuguaaagaugaauguca

SEQ ID NO: 19894 - RNA, 20 nt, Homo sapiens
uuuugaagauucuauguuaa

SEQ ID NO: 19895 - RNA, 14 nt, Homo sapiens
augugaugaucuac

SEQ ID NO: 19896 - RNA, 20 nt, Homo sapiens
acacugcauguuugugauug

SEQ ID NO: 19897 - RNA, 18 nt, Homo sapiens
uuucuaugacacaugcaa

SEQ ID NO: 19898 - RNA, 17 nt, Homo sapiens
ucagcugccuccccagc

SEQ ID NO: 19899 - RNA, 22 nt, Homo sapiens
uaugaggcauuuguuugaacug

SEQ ID NO: 19900 - RNA, 18 nt, Homo sapiens
uccauggcccugccaugc

SEQ ID NO: 19901 - RNA, 13 nt, Homo sapiens
aaucuaaauggaa

SEQ ID NO: 19902 - RNA, 15 nt, Homo sapiens
cagcuacaauuguaa

SEQ ID NO: 19903 - RNA, 14 nt, Homo sapiens
cuagauagucaaua

SEQ ID NO: 19904 - RNA, 23 nt, Homo sapiens
agguaccuucucaccugugagac

SEQ ID NO: 19905 - RNA, 22 nt, Homo sapiens
cuuucaagggaccucuccauga

SEQ ID NO: 19906 - RNA, 20 nt, Homo sapiens
aagauauguaacaacaauua

SEQ ID NO: 19907 - RNA, 18 nt, Homo sapiens
ucuccauggcccugccau

SEQ ID NO: 19908 - RNA, 19 nt, Homo sapiens
gcauuuggugguuucagaa

SEQ ID NO: 19909 - RNA, 21 nt, Homo sapiens
aagacugaguacguugugcau

SEQ ID NO: 19910 - RNA, 22 nt, Homo sapiens
aacuguuauuuauaaucacuuu

SEQ ID NO: 19911 - RNA, 12 nt, Homo sapiens
uaugugcacauc

SEQ ID NO: 19912 - RNA, 15 nt, Homo sapiens
uauuuauaaucacuu

SEQ ID NO: 19913 - RNA, 22 nt, Homo sapiens
cugaggagccugcaacaugcca

SEQ ID NO: 19914 - RNA, 22 nt, Homo sapiens
guugauggaaauacacuguuau

SEQ ID NO: 19915 - RNA, 15 nt, Homo sapiens
gcuugugugcacaua

SEQ ID NO: 19916 - RNA, 22 nt, Homo sapiens
cuccugagacacaugggugcua

SEQ ID NO: 19917 - RNA, 14 nt, Homo sapiens
aguaguuagcuuuc

SEQ ID NO: 19918 - RNA, 22 nt, Homo sapiens
cagcugccuccccagcucuauc

SEQ ID NO: 19919 - RNA, 19 nt, Homo sapiens
cuaggggggucagccagcc

SEQ ID NO: 19920 - RNA, 16 nt, Homo sapiens
ggaacaugagccuuug

SEQ ID NO: 19921 - RNA, 14 nt, Homo sapiens
ucucaguugcagcc

SEQ ID NO: 19922 - RNA, 18 nt, Homo sapiens
ccuuauucagaauuucua

SEQ ID NO: 19923 - RNA, 18 nt, Homo sapiens
uguacucugaaaguuuug

SEQ ID NO: 19924 - RNA, 16 nt, Homo sapiens
gggaccucuccaugau

SEQ ID NO: 19925 - RNA, 14 nt, Homo sapiens
cuccuccuucaugg

SEQ ID NO: 19926 - RNA, 23 nt, Homo sapiens
aauaucccuuggacauuuuaugu

SEQ ID NO: 19927 - RNA, 20 nt, Homo sapiens
cuucccagcuagaauucacu

SEQ ID NO: 19928 - RNA, 18 nt, Homo sapiens
ccagugagaucaauguga

SEQ ID NO: 19929 - RNA, 16 nt, Homo sapiens
gaauauauuuccuuau

SEQ ID NO: 19930 - RNA, 21 nt, Homo sapiens
gucaaacccaaguuaguucaa

SEQ ID NO: 19931 - RNA, 21 nt, Homo sapiens
uuuaagaaaaaggaugcacag

SEQ ID NO: 19932 - RNA, 17 nt, Homo sapiens
uacuuuuaaacuuugau

SEQ ID NO: 19933 - RNA, 16 nt, Homo sapiens
cuguuaucuucacuuu

SEQ ID NO: 19934 - RNA, 20 nt, Homo sapiens
uucccagcuagaauucacuc

SEQ ID NO: 19935 - RNA, 19 nt, Homo sapiens
ugggccccagauaccauga

SEQ ID NO: 19936 - RNA, 20 nt, Homo sapiens
ccagggcuugugugcacaua

SEQ ID NO: 19937 - RNA, 16 nt, Homo sapiens
aaacaccaggauuuaa

SEQ ID NO: 19938 - RNA, 13 nt, Homo sapiens
ucuccagccucag

SEQ ID NO: 19939 - RNA, 16 nt, Homo sapiens
augauuucacagugug

SEQ ID NO: 19940 - RNA, 13 nt, Homo sapiens
acaaaauauagcu

SEQ ID NO: 19941 - RNA, 14 nt, Homo sapiens
uguuagagcagaga

SEQ ID NO: 19942 - RNA, 13 nt, Homo sapiens
agagaauuuccuu

SEQ ID NO: 19943 - RNA, 17 nt, Homo sapiens
cauucuccuuguguuac

SEQ ID NO: 19944 - RNA, 23 nt, Homo sapiens
cugcaaucuucucagaaggcaaa

SEQ ID NO: 19945 - RNA, 16 nt, Homo sapiens
caauuugaauauaaau

SEQ ID NO: 19946 - RNA, 15 nt, Homo sapiens
ccuggccgcagugag

SEQ ID NO: 19947 - RNA, 13 nt, Homo sapiens
gcccuagcauuuc

SEQ ID NO: 19948 - RNA, 19 nt, Homo sapiens
augguaguuuuacaguguu

SEQ ID NO: 19949 - RNA, 23 nt, Homo sapiens
uuagagaauuuccuuacucuuga

SEQ ID NO: 19950 - RNA, 14 nt, Homo sapiens
cuauuauauucauu

SEQ ID NO: 19951 - RNA, 18 nt, Homo sapiens
cuuuuuccagguuccuga

SEQ ID NO: 19952 - RNA, 14 nt, Homo sapiens
aggggcaguggugg

SEQ ID NO: 19953 - RNA, 18 nt, Homo sapiens
uauggcuuuugugcauua

SEQ ID NO: 19954 - RNA, 14 nt, Homo sapiens
augcuauuuauuaa

SEQ ID NO: 19955 - RNA, 13 nt, Homo sapiens
cuauuauauucau

SEQ ID NO: 19956 - RNA, 13 nt, Homo sapiens
auuucacagugug

SEQ ID NO: 19957 - RNA, 13 nt, Homo sapiens
aaggaagguucug

SEQ ID NO: 19958 - RNA, 13 nt, Homo sapiens
caucucugcaauc

SEQ ID NO: 19959 - RNA, 16 nt, Homo sapiens
cucaaccaccuuucag

SEQ ID NO: 19960 - RNA, 13 nt, Homo sapiens
ugcuaucaaucca

SEQ ID NO: 19961 - RNA, 19 nt, Homo sapiens
acacugcauguuugugauu

SEQ ID NO: 19962 - RNA, 18 nt, Homo sapiens
agaagaaaauaguggugu

SEQ ID NO: 19963 - RNA, 12 nt, Homo sapiens
acuuuaccuuuu

SEQ ID NO: 19964 - RNA, 13 nt, Homo sapiens
cuauugccaugag

SEQ ID NO: 19965 - RNA, 16 nt, Homo sapiens
uaaagaugaaugucag

SEQ ID NO: 19966 - RNA, 17 nt, Homo sapiens
agcuagaauucacucca

SEQ ID NO: 19967 - RNA, 18 nt, Homo sapiens
uaucccaaccucucccaa

SEQ ID NO: 19968 - RNA, 15 nt, Homo sapiens
uaauuuuauuauagu

SEQ ID NO: 19969 - RNA, 14 nt, Homo sapiens
uuccugacugcuag

SEQ ID NO: 19970 - RNA, 22 nt, Homo sapiens
ucaucaguauugaagcauuuua

SEQ ID NO: 19971 - RNA, 17 nt, Homo sapiens
acaaugacuuacuguac

SEQ ID NO: 19972 - RNA, 20 nt, Homo sapiens
aucgucacugcuuaacuuca

SEQ ID NO: 19973 - RNA, 21 nt, Homo sapiens
guacacuguuucaaacuuuac

SEQ ID NO: 19974 - RNA, 16 nt, Homo sapiens
cuagaauucacuccac

SEQ ID NO: 19975 - RNA, 22 nt, Homo sapiens
caacaauuauuugaagauuuaa

SEQ ID NO: 19976 - RNA, 18 nt, Homo sapiens
gcauaguaccucugcuau

SEQ ID NO: 19977 - RNA, 23 nt, Homo sapiens
uucucuaguucaaguucaccaga

SEQ ID NO: 19978 - RNA, 17 nt, Homo sapiens
ucagaaauguguuauca

SEQ ID NO: 19979 - RNA, 20 nt, Homo sapiens
ucacaguuuugguugcuuua

SEQ ID NO: 19980 - RNA, 12 nt, Homo sapiens
uuaagccuuaaa

SEQ ID NO: 19981 - RNA, 22 nt, Homo sapiens
augcaguguuucccucuguguu

SEQ ID NO: 19982 - RNA, 14 nt, Homo sapiens
caaugauaaugcua

SEQ ID NO: 19983 - RNA, 17 nt, Homo sapiens
cuaaacauguauguaaa

SEQ ID NO: 19984 - RNA, 15 nt, Homo sapiens
uuauuuuaucugcua

SEQ ID NO: 19985 - RNA, 23 nt, Homo sapiens
cugcaacaugccagccacuguga

SEQ ID NO: 19986 - RNA, 15 nt, Homo sapiens
uaauuauuucacuuu

SEQ ID NO: 19987 - RNA, 12 nt, Homo sapiens
gcggaccuuccc

SEQ ID NO: 19988 - RNA, 21 nt, Homo sapiens
ccagugagaucaaugugacgg

SEQ ID NO: 19989 - RNA, 23 nt, Homo sapiens
auucauucuuuuugaaaugucaa

SEQ ID NO: 19990 - RNA, 19 nt, Homo sapiens
cuguuauuuuaucugcuau

SEQ ID NO: 19991 - RNA, 15 nt, Homo sapiens
aaaacaggcaaauuc

SEQ ID NO: 19992 - RNA, 13 nt, Homo sapiens
gccauucuugcug

SEQ ID NO: 19993 - RNA, 20 nt, Homo sapiens
gacaggaggggaaggcaaca

SEQ ID NO: 19994 - RNA, 17 nt, Homo sapiens
ugccuuguuuaauguua

SEQ ID NO: 19995 - RNA, 19 nt, Homo sapiens
cugaggagccugcaacaug

SEQ ID NO: 19996 - RNA, 19 nt, Homo sapiens
cugaguacguugugcauuu

SEQ ID NO: 19997 - RNA, 23 nt, Homo sapiens
cacguuucuaaaggcuaccuuug

SEQ ID NO: 19998 - RNA, 12 nt, Homo sapiens
caugagccuuug

SEQ ID NO: 19999 - RNA, 15 nt, Homo sapiens
ucucaccugugagac

SEQ ID NO: 20000 - RNA, 14 nt, Homo sapiens
gcuaucaauccaag

SEQ ID NO: 20001 - RNA, 10 nt, Homo sapiens
acccccagaa

SEQ ID NO: 20002 - RNA, 20 nt, Homo sapiens
cuaucaaguauuauaccuuu

SEQ ID NO: 20003 - RNA, 21 nt, Homo sapiens
uauguaaauagcuaagauaua

SEQ ID NO: 20004 - RNA, 17 nt, Homo sapiens
agguuccugagcccuac

SEQ ID NO: 20005 - RNA, 17 nt, Homo sapiens
ugaaguaauaugcacac

SEQ ID NO: 20006 - RNA, 23 nt, Homo sapiens
uggaccauaaccccggaagccaa

SEQ ID NO: 20007 - RNA, 22 nt, Homo sapiens
gucaaccccaaguuaguucaau

SEQ ID NO: 20008 - RNA, 20 nt, Homo sapiens
uacaggaacagaagaggaaa

SEQ ID NO: 20009 - RNA, 21 nt, Homo sapiens
ugguaguuuuacaguguuucu

SEQ ID NO: 20010 - RNA, 21 nt, Homo sapiens
uuuagcauaguaccucugcua

SEQ ID NO: 20011 - RNA, 14 nt, Homo sapiens
gaaaugauuucaca

SEQ ID NO: 20012 - RNA, 11 nt, Homo sapiens
uuuacaguguu

SEQ ID NO: 20013 - RNA, 16 nt, Homo sapiens
uacguugugcauuugg

SEQ ID NO: 20014 - RNA, 22 nt, Homo sapiens
uaguuacuaaacauguauguaa

SEQ ID NO: 20015 - RNA, 21 nt, Homo sapiens
uagaauauauuuccuuauuca

SEQ ID NO: 20016 - RNA, 21 nt, Homo sapiens
acuucuuaguaugugcauuua

SEQ ID NO: 20017 - RNA, 19 nt, Homo sapiens
ugaagguagaauguuuuca

SEQ ID NO: 20018 - RNA, 19 nt, Homo sapiens
caauaaagcagcguuucua

SEQ ID NO: 20019 - RNA, 23 nt, Homo sapiens
cucuccaugaucccaccucccau

SEQ ID NO: 20020 - RNA, 13 nt, Homo sapiens
ucuggugugaacu

SEQ ID NO: 20021 - RNA, 18 nt, Homo sapiens
cuccacuuggacaugggc

SEQ ID NO: 20022 - RNA, 14 nt, Homo sapiens
accucuccagccuc

SEQ ID NO: 20023 - RNA, 11 nt, Homo sapiens
uaccuucucac

SEQ ID NO: 20024 - RNA, 18 nt, Homo sapiens
ucaaauguucuccaguca

SEQ ID NO: 20025 - RNA, 21 nt, Homo sapiens
gaaccacucuaucaaguauua

SEQ ID NO: 20026 - RNA, 13 nt, Homo sapiens
ucugcuaugcuau

SEQ ID NO: 20027 - RNA, 17 nt, Homo sapiens
uccaguaguuagcuuuc

SEQ ID NO: 20028 - RNA, 17 nt, Homo sapiens
uucacuccacuuggaca

SEQ ID NO: 20029 - RNA, 15 nt, Homo sapiens
auuuaauccucucaa

SEQ ID NO: 20030 - RNA, 14 nt, Homo sapiens
aauguaugugcaca

SEQ ID NO: 20031 - RNA, 12 nt, Homo sapiens
uaaaacaccuca

SEQ ID NO: 20032 - RNA, 16 nt, Homo sapiens
auggcuuuugugcauu

SEQ ID NO: 20033 - RNA, 23 nt, Homo sapiens
acccaaguuaguucaauccugau

SEQ ID NO: 20034 - RNA, 17 nt, Homo sapiens
gaauucacuccacuugg

SEQ ID NO: 20035 - RNA, 22 nt, Homo sapiens
cuauuuaauuauuucacuuuag

SEQ ID NO: 20036 - RNA, 23 nt, Homo sapiens
guuaguucaauccugauucauau

SEQ ID NO: 20037 - RNA, 21 nt, Homo sapiens
uccaagaucuuuuuccagguu

SEQ ID NO: 20038 - RNA, 17 nt, Homo sapiens
guauggcaaacugccau

SEQ ID NO: 20039 - RNA, 18 nt, Homo sapiens
aauuauuugaagauuuaa

SEQ ID NO: 20040 - RNA, 17 nt, Homo sapiens
ccaggcacccccagaau

SEQ ID NO: 20041 - RNA, 15 nt, Homo sapiens
uucaauccugauuca

SEQ ID NO: 20042 - RNA, 20 nt, Homo sapiens
agaaaauaguggugugauuu

SEQ ID NO: 20043 - RNA, 16 nt, Homo sapiens
auguuuagcagauuua

SEQ ID NO: 20044 - RNA, 19 nt, Homo sapiens
auuuaacagaaauguacag

SEQ ID NO: 20045 - RNA, 20 nt, Homo sapiens
uaugcaugaaguaauaugca

SEQ ID NO: 20046 - RNA, 21 nt, Homo sapiens
aaugacuuacuguacaugaaa

SEQ ID NO: 20047 - RNA, 18 nt, Homo sapiens
cacuguuaucuucacuuu

SEQ ID NO: 20048 - RNA, 17 nt, Homo sapiens
aaugauuucacagugug

SEQ ID NO: 20049 - RNA, 23 nt, Homo sapiens
ucccagcuagaauucacuccacu

SEQ ID NO: 20050 - RNA, 21 nt, Homo sapiens
agggcuugugugcacauaucc

SEQ ID NO: 20051 - RNA, 17 nt, Homo sapiens
ucuggcuaugcauuuga

SEQ ID NO: 20052 - RNA, 13 nt, Homo sapiens
agucuucuauuua

SEQ ID NO: 20053 - RNA, 21 nt, Homo sapiens
uccgcauccuccuccugcuuc

SEQ ID NO: 20054 - RNA, 18 nt, Homo sapiens
accuuuuuuauacauaaa

SEQ ID NO: 20055 - RNA, 13 nt, Homo sapiens
cccaucaucaccc

SEQ ID NO: 20056 - RNA, 17 nt, Homo sapiens
uuuguagcguacaucaa

SEQ ID NO: 20057 - RNA, 19 nt, Homo sapiens
acugaguacguugugcauu

SEQ ID NO: 20058 - RNA, 22 nt, Homo sapiens
cugcuaugcuauugaaguuuug

SEQ ID NO: 20059 - RNA, 23 nt, Homo sapiens
ucuccaaaccacuuuuugcagcu

SEQ ID NO: 20060 - RNA, 22 nt, Homo sapiens
aagaucuuuuuccagguuccug

SEQ ID NO: 20061 - RNA, 17 nt, Homo sapiens
uauaauuuaaacgugau

SEQ ID NO: 20062 - RNA, 17 nt, Homo sapiens
acauaucacaugucagc

SEQ ID NO: 20063 - RNA, 14 nt, Homo sapiens
uuugagcucuggaa

SEQ ID NO: 20064 - RNA, 22 nt, Homo sapiens
gucaaacccaaguuaguucaau

SEQ ID NO: 20065 - RNA, 14 nt, Homo sapiens
cguugugcauuugg

SEQ ID NO: 20066 - RNA, 20 nt, Homo sapiens
ccauaaccccggaagccaaa

SEQ ID NO: 20067 - RNA, 17 nt, Homo sapiens
ucaauccaagaacuuau

SEQ ID NO: 20068 - RNA, 23 nt, Homo sapiens
ggucacuuuacuguccccaucau

SEQ ID NO: 20069 - RNA, 23 nt, Homo sapiens
aauauagcuuucauaacaucgaa

SEQ ID NO: 20070 - RNA, 18 nt, Homo sapiens
uaauaucaucaguauuga

SEQ ID NO: 20071 - RNA, 15 nt, Homo sapiens
cuagcccuuacgucc

SEQ ID NO: 20072 - RNA, 14 nt, Homo sapiens
gcccugccaugcuc

SEQ ID NO: 20073 - RNA, 16 nt, Homo sapiens
gauuccucacuuugaa

SEQ ID NO: 20074 - RNA, 14 nt, Homo sapiens
auccugugggaccu

SEQ ID NO: 20075 - RNA, 18 nt, Homo sapiens
cuuaguaugugcauuuaa

SEQ ID NO: 20076 - RNA, 19 nt, Homo sapiens
uaagaacuaaaauguucua

SEQ ID NO: 20077 - RNA, 17 nt, Homo sapiens
gaccugggccauaguca

SEQ ID NO: 20078 - RNA, 22 nt, Homo sapiens
accuuuguauucucuccuguac

SEQ ID NO: 20079 - RNA, 19 nt, Homo sapiens
cuaaauaucccuuggacau

SEQ ID NO: 20080 - RNA, 14 nt, Homo sapiens
auauucucuaguca

SEQ ID NO: 20081 - RNA, 16 nt, Homo sapiens
uuaagcuuucagcuca

SEQ ID NO: 20082 - RNA, 20 nt, Homo sapiens
ccugagacacaugggugcua

SEQ ID NO: 20083 - RNA, 14 nt, Homo sapiens
guaugaggcauuug

SEQ ID NO: 20084 - RNA, 13 nt, Homo sapiens
ugacuuacuguac

SEQ ID NO: 20085 - RNA, 23 nt, Homo sapiens
aaguuuuuauggcuuuugugcau

SEQ ID NO: 20086 - RNA, 18 nt, Homo sapiens
ggaaucacuggcuguuaa

SEQ ID NO: 20087 - RNA, 16 nt, Homo sapiens
aacuuuuccaaugaca

SEQ ID NO: 20088 - RNA, 18 nt, Homo sapiens
cugacacuaaaacaccuc

SEQ ID NO: 20089 - RNA, 21 nt, Homo sapiens
gaacaugagccuuuguugcua

SEQ ID NO: 20090 - RNA, 18 nt, Homo sapiens
guuagagaauuuccuuac

SEQ ID NO: 20091 - RNA, 17 nt, Homo sapiens
augagccuuuguugcua

SEQ ID NO: 20092 - RNA, 20 nt, Homo sapiens
caaucuucucagaaggcaaa

SEQ ID NO: 20093 - RNA, 18 nt, Homo sapiens
agcuagaauucacuccac

SEQ ID NO: 20094 - RNA, 12 nt, Homo sapiens
uuucaaacuuua

SEQ ID NO: 20095 - RNA, 20 nt, Homo sapiens
cauuaauaauaaauucccug

SEQ ID NO: 20096 - RNA, 15 nt, Homo sapiens
ugcgccuaauguguu

SEQ ID NO: 20097 - RNA, 20 nt, Homo sapiens
uaaaacaccucagcugccuc

SEQ ID NO: 20098 - RNA, 13 nt, Homo sapiens
uacguugugcauu

SEQ ID NO: 20099 - RNA, 21 nt, Homo sapiens
gaccauaaccccggaagccaa

SEQ ID NO: 20100 - RNA, 20 nt, Homo sapiens
ucaauguuuagcagauuuaa

SEQ ID NO: 20101 - RNA, 17 nt, Homo sapiens
cugaguacguugugcau

SEQ ID NO: 20102 - RNA, 16 nt, Homo sapiens
uaacaaugacuuguac

SEQ ID NO: 20103 - RNA, 21 nt, Homo sapiens
aauccaagaacuuauuuguac

SEQ ID NO: 20104 - RNA, 15 nt, Homo sapiens
aaauuuuuauguaau

SEQ ID NO: 20105 - RNA, 13 nt, Homo sapiens
gugauacaaugcu

SEQ ID NO: 20106 - RNA, 13 nt, Homo sapiens
uagaagauucuau

SEQ ID NO: 20107 - RNA, 17 nt, Homo sapiens
ugaaagucccagaucaa

SEQ ID NO: 20108 - RNA, 21 nt, Homo sapiens
guaaaugggggugcauuugag

SEQ ID NO: 20109 - RNA, 17 nt, Homo sapiens
cacaugcaaggucauuu

SEQ ID NO: 20110 - RNA, 16 nt, Homo sapiens
gcuaccucuccagccu

SEQ ID NO: 20111 - RNA, 17 nt, Homo sapiens
uauauaugugaugaucu

SEQ ID NO: 20112 - RNA, 15 nt, Homo sapiens
ggcuugugugcacau

SEQ ID NO: 20113 - RNA, 19 nt, Homo sapiens
ugauuuuauaugcuauuua

SEQ ID NO: 20114 - RNA, 16 nt, Homo sapiens
ugacaucucugcaauc

SEQ ID NO: 20115 - RNA, 18 nt, Homo sapiens
augacauaucacauguca

SEQ ID NO: 20116 - RNA, 20 nt, Homo sapiens
cuuuuauaaacuuuaccuuu

SEQ ID NO: 20117 - RNA, 15 nt, Homo sapiens
uucgugaugacauau

SEQ ID NO: 20118 - RNA, 21 nt, Homo sapiens
aucuuucaaagugucuugaau

SEQ ID NO: 20119 - RNA, 12 nt, Homo sapiens
ucaaauguucuc

SEQ ID NO: 20120 - RNA, 19 nt, Homo sapiens
aaaaaacaccaggauuuaa

SEQ ID NO: 20121 - RNA, 16 nt, Homo sapiens
aaaaaggaugcacaga

SEQ ID NO: 20122 - RNA, 21 nt, Homo sapiens
cuccgcauccuccuccugcuu

SEQ ID NO: 20123 - RNA, 21 nt, Homo sapiens
gcuuaauuauugauguuuuca

SEQ ID NO: 20124 - RNA, 15 nt, Homo sapiens
uguuaucuucacuuu

SEQ ID NO: 20125 - RNA, 16 nt, Homo sapiens
agcauacguacacauu

SEQ ID NO: 20126 - RNA, 20 nt, Homo sapiens
uccucgaggcccuagcauuu

SEQ ID NO: 20127 - RNA, 13 nt, Homo sapiens
ugcagauauucuc

SEQ ID NO: 20128 - RNA, 14 nt, Homo sapiens
ugaagacaaugacu

SEQ ID NO: 20129 - RNA, 23 nt, Homo sapiens
acuuugaccucugcagcaauaaa

SEQ ID NO: 20130 - RNA, 13 nt, Homo sapiens
uuuauaugcuauu

SEQ ID NO: 20131 - RNA, 16 nt, Homo sapiens
uuuugguugcuuuaau

SEQ ID NO: 20132 - RNA, 20 nt, Homo sapiens
cucucaguugcagcccugcu

SEQ ID NO: 20133 - RNA, 19 nt, Homo sapiens
ccagccuuggauacuccau

SEQ ID NO: 20134 - RNA, 23 nt, Homo sapiens
caaagacugaguacguugugcau

SEQ ID NO: 20135 - RNA, 21 nt, Homo sapiens
ggccagugagaucaaugugac

SEQ ID NO: 20136 - RNA, 15 nt, Homo sapiens
ugccauuugagcucu

SEQ ID NO: 20137 - RNA, 16 nt, Homo sapiens
cugggccauagucauu

SEQ ID NO: 20138 - RNA, 14 nt, Homo sapiens
uacguugugcauuu

SEQ ID NO: 20139 - RNA, 14 nt, Homo sapiens
aaaccuauguuugc

SEQ ID NO: 20140 - RNA, 17 nt, Homo sapiens
aauuuucccucuucacu

SEQ ID NO: 20141 - RNA, 15 nt, Homo sapiens
gaccuccuccuucau

SEQ ID NO: 20142 - RNA, 15 nt, Homo sapiens
gauaccaugaugcug

SEQ ID NO: 20143 - RNA, 12 nt, Homo sapiens
auguuuucacaa

SEQ ID NO: 20144 - RNA, 15 nt, Homo sapiens
aucuagauacuguau

SEQ ID NO: 20145 - RNA, 18 nt, Homo sapiens
aauucccuggccuuucau

SEQ ID NO: 20146 - RNA, 18 nt, Homo sapiens
uguuauuuuaucugcuau

SEQ ID NO: 20147 - RNA, 14 nt, Homo sapiens
aguaauaugcacac

SEQ ID NO: 20148 - RNA, 22 nt, Homo sapiens
uaugcaugaaguaauaugcaca

SEQ ID NO: 20149 - RNA, 13 nt, Homo sapiens
ccgugugccugag

SEQ ID NO: 20150 - RNA, 15 nt, Homo sapiens
auuuaagauauguaa

SEQ ID NO: 20151 - RNA, 21 nt, Homo sapiens
uuuccagguuccugagcccua

SEQ ID NO: 20152 - RNA, 16 nt, Homo sapiens
auguauguaaauagcu

SEQ ID NO: 20153 - RNA, 20 nt, Homo sapiens
ugagccuuuguugcuaucaa

SEQ ID NO: 20154 - RNA, 16 nt, Homo sapiens
agccuuggauacucca

SEQ ID NO: 20155 - RNA, 15 nt, Homo sapiens
uaaagaucauguaaa

SEQ ID NO: 20156 - RNA, 22 nt, Homo sapiens
aucuuucaagggaccucuccau

SEQ ID NO: 20157 - RNA, 16 nt, Homo sapiens
ugauuuuauaugcuau

SEQ ID NO: 20158 - RNA, 17 nt, Homo sapiens
gaagacaaugacuuacu

SEQ ID NO: 20159 - RNA, 20 nt, Homo sapiens
accaucaauuuuaguuguca

SEQ ID NO: 20160 - RNA, 23 nt, Homo sapiens
aagcauuuuauaaaucgcuuuug

SEQ ID NO: 20161 - RNA, 15 nt, Homo sapiens
aauauauaaccagug

SEQ ID NO: 20162 - RNA, 18 nt, Homo sapiens
cugcagccccugggacca

SEQ ID NO: 20163 - RNA, 21 nt, Homo sapiens
cuucgugaugacauaucacau

SEQ ID NO: 20164 - RNA, 19 nt, Homo sapiens
uuuuauggcuuuugugcau

SEQ ID NO: 20165 - RNA, 17 nt, Homo sapiens
ugcagccccugggacca

SEQ ID NO: 20166 - RNA, 21 nt, Homo sapiens
cuauuuaauuauuucacuuua

SEQ ID NO: 20167 - RNA, 15 nt, Homo sapiens
cuuacuguacaugaa

SEQ ID NO: 20168 - RNA, 20 nt, Homo sapiens
ucaaagauauuuugcuuugu

SEQ ID NO: 20169 - RNA, 14 nt, Homo sapiens
cucucugaccuccu

SEQ ID NO: 20170 - RNA, 17 nt, Homo sapiens
uguccgcuauccaccaa

SEQ ID NO: 20171 - RNA, 19 nt, Homo sapiens
uaauucuuagcucauucuc

SEQ ID NO: 20172 - RNA, 14 nt, Homo sapiens
gcagacucugguca

SEQ ID NO: 20173 - RNA, 15 nt, Homo sapiens
aggauuuaaguuuca

SEQ ID NO: 20174 - RNA, 16 nt, Homo sapiens
agguaccuucucaccu

SEQ ID NO: 20175 - RNA, 20 nt, Homo sapiens
acaauuauuugaagauuuaa

SEQ ID NO: 20176 - RNA, 16 nt, Homo sapiens
cugagacacaugggug

SEQ ID NO: 20177 - RNA, 21 nt, Homo sapiens
caacuauaaaacuaggugcug

SEQ ID NO: 20178 - RNA, 13 nt, Homo sapiens
gaaauaggaaaua

SEQ ID NO: 20179 - RNA, 19 nt, Homo sapiens
cguuucuaugacacaugca

SEQ ID NO: 20180 - RNA, 17 nt, Homo sapiens
uucaagggaccucucca

SEQ ID NO: 20181 - RNA, 21 nt, Homo sapiens
aaggaaacuggguuccugcaa

SEQ ID NO: 20182 - RNA, 19 nt, Homo sapiens
ucucugaccuccuccuuca

SEQ ID NO: 20183 - RNA, 18 nt, Homo sapiens
ucagaaggcaaaugacuu

SEQ ID NO: 20184 - RNA, 14 nt, Homo sapiens
ucaucacccagcac

SEQ ID NO: 20185 - RNA, 17 nt, Homo sapiens
gcggauccaagcaaaug

SEQ ID NO: 20186 - RNA, 22 nt, Homo sapiens
ccaugaucccaccucccauuca

SEQ ID NO: 20187 - RNA, 19 nt, Homo sapiens
cugcuaguuuauauagaaa

SEQ ID NO: 20188 - RNA, 23 nt, Homo sapiens
ucuuucaagggaccucuccauga

SEQ ID NO: 20189 - RNA, 13 nt, Homo sapiens
uauuucacuuuag

SEQ ID NO: 20190 - RNA, 21 nt, Homo sapiens
uguaaacuaguuacuaaacau

SEQ ID NO: 20191 - RNA, 20 nt, Homo sapiens
gauauuuauugauguuuuca

SEQ ID NO: 20192 - RNA, 18 nt, Homo sapiens
uacuguaauuugugauac

SEQ ID NO: 20193 - RNA, 23 nt, Homo sapiens
guaacuguaaagaugaaugucag

SEQ ID NO: 20194 - RNA, 20 nt, Homo sapiens
aaucuuucaaagugucuuga

SEQ ID NO: 20195 - RNA, 19 nt, Homo sapiens
acaaugacuuguacucuga

SEQ ID NO: 20196 - RNA, 21 nt, Homo sapiens
cuuaauuauugauguuuucau

SEQ ID NO: 20197 - RNA, 19 nt, Homo sapiens
caauuauuugaagauuuaa

SEQ ID NO: 20198 - RNA, 20 nt, Homo sapiens
auguuagagaauuuccuuac

SEQ ID NO: 20199 - RNA, 21 nt, Homo sapiens
cuuguacauaaugcgugcaua

SEQ ID NO: 20200 - RNA, 23 nt, Homo sapiens
cuuaaaggaagguucugguguga

SEQ ID NO: 20201 - RNA, 17 nt, Homo sapiens
caauaaaacuuuuccaa

SEQ ID NO: 20202 - RNA, 14 nt, Homo sapiens
gugcacauauccuu

SEQ ID NO: 20203 - RNA, 20 nt, Homo sapiens
aauauaaauuuaucauuuag

SEQ ID NO: 20204 - RNA, 21 nt, Homo sapiens
uagcucucugaccuccuccuu

SEQ ID NO: 20205 - RNA, 16 nt, Homo sapiens
aacucuaccugcacac

SEQ ID NO: 20206 - RNA, 13 nt, Homo sapiens
cuccuuguguuac

SEQ ID NO: 20207 - RNA, 21 nt, Homo sapiens
gaaacuccacauccuguggga

SEQ ID NO: 20208 - RNA, 21 nt, Homo sapiens
uggauucaauuuuaaggcaua

SEQ ID NO: 20209 - RNA, 18 nt, Homo sapiens
aaaugauuucacagugug

SEQ ID NO: 20210 - RNA, 17 nt, Homo sapiens
guacguugugcauuugg

SEQ ID NO: 20211 - RNA, 12 nt, Homo sapiens
augggccccaga

SEQ ID NO: 20212 - RNA, 23 nt, Homo sapiens
auccugauucauauuuaauuuga

SEQ ID NO: 20213 - RNA, 21 nt, Homo sapiens
uuucuuccuuuuuuaguucuu

SEQ ID NO: 20214 - RNA, 20 nt, Homo sapiens
ugaaccguuugugauugcca

SEQ ID NO: 20215 - RNA, 18 nt, Homo sapiens
acggucacuuuacugucc

SEQ ID NO: 20216 - RNA, 17 nt, Homo sapiens
ugucagccacugugaua

SEQ ID NO: 20217 - RNA, 14 nt, Homo sapiens
ggaaauacacuguu

SEQ ID NO: 20218 - RNA, 16 nt, Homo sapiens
uagagaauuuccuuac

SEQ ID NO: 20219 - RNA, 21 nt, Homo sapiens
uguauguaaauagcuaagaua

SEQ ID NO: 20220 - RNA, 17 nt, Homo sapiens
caaaccucugugagcau

SEQ ID NO: 20221 - RNA, 22 nt, Homo sapiens
auauccuuagcccaucuuucaa

SEQ ID NO: 20222 - RNA, 20 nt, Homo sapiens
accucucuuguagcucucug

SEQ ID NO: 20223 - RNA, 23 nt, Homo sapiens
auacuauuuaauuauuucacuuu

SEQ ID NO: 20224 - RNA, 12 nt, Homo sapiens
acuguacaugaa

SEQ ID NO: 20225 - RNA, 17 nt, Homo sapiens
uuuuuccagguuccuga

SEQ ID NO: 20226 - RNA, 13 nt, Homo sapiens
gauucuauguuaa

SEQ ID NO: 20227 - RNA, 15 nt, Homo sapiens
uuaauauuucugagg

SEQ ID NO: 20228 - RNA, 20 nt, Homo sapiens
aaugguaguuuuacaguguu

SEQ ID NO: 20229 - RNA, 18 nt, Homo sapiens
cagggaaauguaugugug

SEQ ID NO: 20230 - RNA, 16 nt, Homo sapiens
caauccugauucauau

SEQ ID NO: 20231 - RNA, 20 nt, Homo sapiens
uauugauguuuucacaaaga

SEQ ID NO: 20232 - RNA, 18 nt, Homo sapiens
uaaccagcagaaaugccu

SEQ ID NO: 20233 - RNA, 19 nt, Homo sapiens
uuaaggauuuuaugcuuua

SEQ ID NO: 20234 - RNA, 14 nt, Homo sapiens
agcccucuucugac

SEQ ID NO: 20235 - RNA, 16 nt, Homo sapiens
uagaggcugaggaauc

SEQ ID NO: 20236 - RNA, 16 nt, Homo sapiens
cggcagggaaauguau

SEQ ID NO: 20237 - RNA, 15 nt, Homo sapiens
uacaaaagcauguga

SEQ ID NO: 20238 - RNA, 22 nt, Homo sapiens
uccuucauggcaggcaucgcca

SEQ ID NO: 20239 - RNA, 22 nt, Homo sapiens
ucuugaaauauaggaacuuaaa

SEQ ID NO: 20240 - RNA, 20 nt, Homo sapiens
uaacaaaauuugaauagccc

SEQ ID NO: 20241 - RNA, 14 nt, Homo sapiens
gcagauuuaagaua

SEQ ID NO: 20242 - RNA, 23 nt, Homo sapiens
guuuagcauaguaccucugcuau

SEQ ID NO: 20243 - RNA, 15 nt, Homo sapiens
cugaaccguuuguga

SEQ ID NO: 20244 - RNA, 15 nt, Homo sapiens
ccacuuuuugcagcu

SEQ ID NO: 20245 - RNA, 22 nt, Homo sapiens
gccaguaaaugggggugcauuu

SEQ ID NO: 20246 - RNA, 15 nt, Homo sapiens
gauuucuguuuagau

SEQ ID NO: 20247 - RNA, 21 nt, Homo sapiens
acuuggacaugggccccagau

SEQ ID NO: 20248 - RNA, 21 nt, Homo sapiens
auugccaugagaguucuguca

SEQ ID NO: 20249 - RNA, 16 nt, Homo sapiens
uuuaaaugcaccugga

SEQ ID NO: 20250 - RNA, 16 nt, Homo sapiens
uuugaagauagaaggu

SEQ ID NO: 20251 - RNA, 14 nt, Homo sapiens
auuauauucauucu

SEQ ID NO: 20252 - RNA, 17 nt, Homo sapiens
agagaauaaaaaaugua

SEQ ID NO: 20253 - RNA, 14 nt, Homo sapiens
uaguggugugauuu

SEQ ID NO: 20254 - RNA, 14 nt, Homo sapiens
uaucaucaguauug

SEQ ID NO: 20255 - RNA, 19 nt, Homo sapiens
cuauuuuuuuucuguuaua

SEQ ID NO: 20256 - RNA, 19 nt, Homo sapiens
aaccguuugugauugccau

SEQ ID NO: 20257 - RNA, 16 nt, Homo sapiens
cguuugugauugccau

SEQ ID NO: 20258 - RNA, 21 nt, Homo sapiens
auaaugcgugcauaccacuuu

SEQ ID NO: 20259 - RNA, 13 nt, Homo sapiens
ucuucacuugguu

SEQ ID NO: 20260 - RNA, 22 nt, Homo sapiens
uaaaaauauauagcgacauccu

SEQ ID NO: 20261 - RNA, 21 nt, Homo sapiens
cggucacuuuacuguccccau

SEQ ID NO: 20262 - RNA, 23 nt, Homo sapiens
aucacaguuuugguugcuuuaau

SEQ ID NO: 20263 - RNA, 18 nt, Homo sapiens
agccagguaccuucucac

SEQ ID NO: 20264 - RNA, 23 nt, Homo sapiens
aaggaagguucuggugugaacua

SEQ ID NO: 20265 - RNA, 15 nt, Homo sapiens
acuuuacugucccca

SEQ ID NO: 20266 - RNA, 18 nt, Homo sapiens
caucaguauugaagcauu

SEQ ID NO: 20267 - RNA, 15 nt, Homo sapiens
ugagaucauugugaa

SEQ ID NO: 20268 - RNA, 16 nt, Homo sapiens
ugagguaccagccuug

SEQ ID NO: 20269 - RNA, 14 nt, Homo sapiens
gcuaugcauuugaa

SEQ ID NO: 20270 - RNA, 12 nt, Homo sapiens
accuccugccuc

SEQ ID NO: 20271 - RNA, 14 nt, Homo sapiens
ccagccacugugau

SEQ ID NO: 20272 - RNA, 15 nt, Homo sapiens
agcuuucucuaguuc

SEQ ID NO: 20273 - RNA, 13 nt, Homo sapiens
agaugaaugucag

SEQ ID NO: 20274 - RNA, 20 nt, Homo sapiens
aucauuuacuuuuaaacuuu

SEQ ID NO: 20275 - RNA, 22 nt, Homo sapiens
cacaccccagacgaugucuuca

SEQ ID NO: 20276 - RNA, 17 nt, Homo sapiens
gaaagcugaguguuuca

SEQ ID NO: 20277 - RNA, 17 nt, Homo sapiens
cuagaaaacaggcaaau

SEQ ID NO: 20278 - RNA, 16 nt, Homo sapiens
gaaggcaaaugacuuu

SEQ ID NO: 20279 - RNA, 16 nt, Homo sapiens
cauauuaccacagaca

SEQ ID NO: 20280 - RNA, 13 nt, Homo sapiens
auauauacuauau

SEQ ID NO: 20281 - RNA, 16 nt, Homo sapiens
accuucucaccuguga

SEQ ID NO: 20282 - RNA, 16 nt, Homo sapiens
ugcuaguuuauauaga

SEQ ID NO: 20283 - RNA, 19 nt, Homo sapiens
cagccuuggauacuccaug

SEQ ID NO: 20284 - RNA, 23 nt, Homo sapiens
agauaacuguuauuuauaaucac

SEQ ID NO: 20285 - RNA, 15 nt, Homo sapiens
cccuuggacauuuua

SEQ ID NO: 20286 - RNA, 12 nt, Homo sapiens
aauuauuugaag

SEQ ID NO: 20287 - RNA, 12 nt, Homo sapiens
gucaacauuucu

SEQ ID NO: 20288 - RNA, 20 nt, Homo sapiens
cuccauggggugggggugga

SEQ ID NO: 20289 - RNA, 20 nt, Homo sapiens
guaccuucucaccugugaga

SEQ ID NO: 20290 - RNA, 18 nt, Homo sapiens
aaggaaacuggguuccug

SEQ ID NO: 20291 - RNA, 20 nt, Homo sapiens
cugagcccggaaacuccaca

SEQ ID NO: 20292 - RNA, 14 nt, Homo sapiens
ugcugccugccugg

SEQ ID NO: 20293 - RNA, 15 nt, Homo sapiens
uuauaaaucgcuuuu

SEQ ID NO: 20294 - RNA, 20 nt, Homo sapiens
cuggaagccucuauugccau

SEQ ID NO: 20295 - RNA, 22 nt, Homo sapiens
agaguucugucacggucacuuu

SEQ ID NO: 20296 - RNA, 17 nt, Homo sapiens
uugauuuuauaugcuau

SEQ ID NO: 20297 - RNA, 14 nt, Homo sapiens
ucauuauguuaaua

SEQ ID NO: 20298 - RNA, 11 nt, Homo sapiens
uuugagcucug

SEQ ID NO: 20299 - RNA, 20 nt, Homo sapiens
caagaucuuuuuccagguuc

SEQ ID NO: 20300 - RNA, 20 nt, Homo sapiens
aucuccaaaauaaaacuuuu

SEQ ID NO: 20301 - RNA, 14 nt, Homo sapiens
uaugaggcauuugu

SEQ ID NO: 20302 - RNA, 23 nt, Homo sapiens
acauuuuuaagugcugcauuuaa

SEQ ID NO: 20303 - RNA, 19 nt, Homo sapiens
uuaauaucaucaguauuga

SEQ ID NO: 20304 - RNA, 16 nt, Homo sapiens
ucacugcuuaacuuca

SEQ ID NO: 20305 - RNA, 18 nt, Homo sapiens
ucuaaaggcuaccuuugu

SEQ ID NO: 20306 - RNA, 15 nt, Homo sapiens
cucccaacgucccua

SEQ ID NO: 20307 - RNA, 16 nt, Homo sapiens
auugaaaugauuucac

SEQ ID NO: 20308 - RNA, 18 nt, Homo sapiens
gcaugaaguaauaugcac

SEQ ID NO: 20309 - RNA, 19 nt, Homo sapiens
cacaguuuugguugcuuua

SEQ ID NO: 20310 - RNA, 18 nt, Homo sapiens
aauacaccacuacauucu

SEQ ID NO: 20311 - RNA, 14 nt, Homo sapiens
accugcuucuauua

SEQ ID NO: 20312 - RNA, 15 nt, Homo sapiens
ucccauucacagaua

SEQ ID NO: 20313 - RNA, 22 nt, Homo sapiens
cucuuguagcucucugaccucc

SEQ ID NO: 20314 - RNA, 18 nt, Homo sapiens
aaaggaugcacagaguug

SEQ ID NO: 20315 - RNA, 14 nt, Homo sapiens
cugugauagaggcu

SEQ ID NO: 20316 - RNA, 12 nt, Homo sapiens
uacguugugcau

SEQ ID NO: 20317 - RNA, 21 nt, Homo sapiens
acacauuuuuuaaaugcaccu

SEQ ID NO: 20318 - RNA, 14 nt, Homo sapiens
auaaagcagcguuu

SEQ ID NO: 20319 - RNA, 19 nt, Homo sapiens
agccucuauugccaugaga

SEQ ID NO: 20320 - RNA, 17 nt, Homo sapiens
gccuuggauacuccaug

SEQ ID NO: 20321 - RNA, 15 nt, Homo sapiens
cacuuuagaaagcug

SEQ ID NO: 20322 - RNA, 22 nt, Homo sapiens
cuuguagcucucugaccuccuc

SEQ ID NO: 20323 - RNA, 17 nt, Homo sapiens
aagugaagacaaugacu

SEQ ID NO: 20324 - RNA, 18 nt, Homo sapiens
aacuggguuccugcaaug

SEQ ID NO: 20325 - RNA, 21 nt, Homo sapiens
uggccaaugagaucauuguga

SEQ ID NO: 20326 - RNA, 16 nt, Homo sapiens
uucaaucuggauucau

SEQ ID NO: 20327 - RNA, 16 nt, Homo sapiens
gauuuuaugcuuuaaa

SEQ ID NO: 20328 - RNA, 19 nt, Homo sapiens
uggccagugagaucaaugu

SEQ ID NO: 20329 - RNA, 17 nt, Homo sapiens
cagugagaucaauguga

SEQ ID NO: 20330 - RNA, 21 nt, Homo sapiens
aggaggggaaggcaacauaca

SEQ ID NO: 20331 - RNA, 17 nt, Homo sapiens
auaguaccucugcuauu

SEQ ID NO: 20332 - RNA, 20 nt, Homo sapiens
augcuuuaaacauugguucu

SEQ ID NO: 20333 - RNA, 11 nt, Homo sapiens
cuuuugugcau

SEQ ID NO: 20334 - RNA, 16 nt, Homo sapiens
ucuacaaaauauagcu

SEQ ID NO: 20335 - RNA, 22 nt, Homo sapiens
ccaucuuucaagggaccucucc

SEQ ID NO: 20336 - RNA, 22 nt, Homo sapiens
aagacugaguacguugugcauu

SEQ ID NO: 20337 - RNA, 11 nt, Homo sapiens
uaguuagcuuu

SEQ ID NO: 20338 - RNA, 18 nt, Homo sapiens
cuuugauuuuauaugcua

SEQ ID NO: 20339 - RNA, 23 nt, Homo sapiens
guuuuuauggcuuuugugcauua

SEQ ID NO: 20340 - RNA, 19 nt, Homo sapiens
agacaaugacuuacuguac

SEQ ID NO: 20341 - RNA, 13 nt, Homo sapiens
acguugugcauuu

SEQ ID NO: 20342 - RNA, 15 nt, Homo sapiens
ggaaaugauguuuca

SEQ ID NO: 20343 - RNA, 14 nt, Homo sapiens
uaauaucaucagua

SEQ ID NO: 20344 - RNA, 15 nt, Homo sapiens
ugacauaucacaugu

SEQ ID NO: 20345 - RNA, 21 nt, Homo sapiens
uugugcauuaucuagauacug

SEQ ID NO: 20346 - RNA, 17 nt, Homo sapiens
auagaagguuugcagau

SEQ ID NO: 20347 - RNA, 13 nt, Homo sapiens
uuaucuucacuuu

SEQ ID NO: 20348 - RNA, 20 nt, Homo sapiens
guaaaugggggugcauuuga

SEQ ID NO: 20349 - RNA, 22 nt, Homo sapiens
uugggggggaggugagguacca

SEQ ID NO: 20350 - RNA, 19 nt, Homo sapiens
aacaugccagccacuguga

SEQ ID NO: 20351 - RNA, 14 nt, Homo sapiens
aguacguugugcau

SEQ ID NO: 20352 - RNA, 18 nt, Homo sapiens
ugaagucucugaagugaa

SEQ ID NO: 20353 - RNA, 14 nt, Homo sapiens
agcuaagauauaau

SEQ ID NO: 20354 - RNA, 17 nt, Homo sapiens
uaguaugaggcauuugu

SEQ ID NO: 20355 - RNA, 21 nt, Homo sapiens
agaauguuuucaaauguucuc

SEQ ID NO: 20356 - RNA, 16 nt, Homo sapiens
uggauuccucacuuug

SEQ ID NO: 20357 - RNA, 19 nt, Homo sapiens
uagaugaagaagcuagaaa

SEQ ID NO: 20358 - RNA, 22 nt, Homo sapiens
agucucugaagugaaacugcuu

SEQ ID NO: 20359 - RNA, 21 nt, Homo sapiens
ugaaccguuugugauugccau

SEQ ID NO: 20360 - RNA, 18 nt, Homo sapiens
aaugauuucacagugugu

SEQ ID NO: 20361 - RNA, 10 nt, Homo sapiens
ggacaugggc

SEQ ID NO: 20362 - RNA, 14 nt, Homo sapiens
acacuaaaacaccu

SEQ ID NO: 20363 - RNA, 20 nt, Homo sapiens
uugagaaauuaaguaucuga

SEQ ID NO: 20364 - RNA, 18 nt, Homo sapiens
auugacuauagugugagc

SEQ ID NO: 20365 - RNA, 20 nt, Homo sapiens
uuuucacaaagaacaggaaa

SEQ ID NO: 20366 - RNA, 20 nt, Homo sapiens
cauucuuuuugaaaugucaa

SEQ ID NO: 20367 - RNA, 12 nt, Homo sapiens
accaccuuucag

SEQ ID NO: 20368 - RNA, 12 nt, Homo sapiens
cuuaagcuuuca

SEQ ID NO: 20369 - RNA, 14 nt, Homo sapiens
ucuucauaccuaca

SEQ ID NO: 20370 - RNA, 15 nt, Homo sapiens
gccagugagaucaau

SEQ ID NO: 20371 - RNA, 20 nt, Homo sapiens
uuaaggauuuuaugcuuuaa

SEQ ID NO: 20372 - RNA, 13 nt, Homo sapiens
agaauauauuucc

SEQ ID NO: 20373 - RNA, 19 nt, Homo sapiens
uggaagccucuauugccau

SEQ ID NO: 20374 - RNA, 21 nt, Homo sapiens
ugagcuaggggggucagccag

SEQ ID NO: 20375 - RNA, 11 nt, Homo sapiens
uuuuugcagcu

SEQ ID NO: 20376 - RNA, 22 nt, Homo sapiens
aguuuuuauggcuuuugugcau

SEQ ID NO: 20377 - RNA, 22 nt, Homo sapiens
acugaguacguugugcauuugg

SEQ ID NO: 20378 - RNA, 19 nt, Homo sapiens
ccuggauuccucacuuuga

SEQ ID NO: 20379 - RNA, 15 nt, Homo sapiens
gaguaccauaauucu

SEQ ID NO: 20380 - RNA, 16 nt, Homo sapiens
uaacagaaauguacag

SEQ ID NO: 20381 - RNA, 19 nt, Homo sapiens
cccagggcuugugugcaca

SEQ ID NO: 20382 - RNA, 21 nt, Homo sapiens
ucaauaaaacuuuuccaauga

SEQ ID NO: 20383 - RNA, 15 nt, Homo sapiens
cccagcuagaauuca

SEQ ID NO: 20384 - RNA, 14 nt, Homo sapiens
augacuuacuguac

SEQ ID NO: 20385 - RNA, 15 nt, Homo sapiens
ggauacuauuuaauu

SEQ ID NO: 20386 - RNA, 23 nt, Homo sapiens
aauccaagaaaauggccagugag

SEQ ID NO: 20387 - RNA, 15 nt, Homo sapiens
uugugggauacuauu

SEQ ID NO: 20388 - RNA, 18 nt, Homo sapiens
auuaucuagauacuguau

SEQ ID NO: 20389 - RNA, 23 nt, Homo sapiens
gaagaaaauaguggugugauuug

SEQ ID NO: 20390 - RNA, 13 nt, Homo sapiens
ugagguaccagcc

SEQ ID NO: 20391 - RNA, 20 nt, Homo sapiens
acaccaggauuuaaguuuca

SEQ ID NO: 20392 - RNA, 12 nt, Homo sapiens
auaacuguuauu

SEQ ID NO: 20393 - RNA, 17 nt, Homo sapiens
uugcuaucaauccaaga

SEQ ID NO: 20394 - RNA, 12 nt, Homo sapiens
uccugcaaugaa

SEQ ID NO: 20395 - RNA, 17 nt, Homo sapiens
caaugagaucauuguga

SEQ ID NO: 20396 - RNA, 17 nt, Homo sapiens
auaaaauuuuuauguaa

SEQ ID NO: 20397 - RNA, 14 nt, Homo sapiens
gaaauauuccuuaa

SEQ ID NO: 20398 - RNA, 16 nt, Homo sapiens
cacugcuuaacuucac

SEQ ID NO: 20399 - RNA, 16 nt, Homo sapiens
acauuuuaugucuuuc

SEQ ID NO: 20400 - RNA, 20 nt, Homo sapiens
aauucucuaguuugauuaaa

SEQ ID NO: 20401 - RNA, 19 nt, Homo sapiens
agguucuggugugaacuaa

SEQ ID NO: 20402 - RNA, 13 nt, Homo sapiens
gcauuuguuugaa

SEQ ID NO: 20403 - RNA, 17 nt, Homo sapiens
auuuuaaggcauauuua

SEQ ID NO: 20404 - RNA, 18 nt, Homo sapiens
aucgcuuuugauaaucaa

SEQ ID NO: 20405 - RNA, 14 nt, Homo sapiens
guuugugauugcca

SEQ ID NO: 20406 - RNA, 19 nt, Homo sapiens
aacuauaaaacuaggugcu

SEQ ID NO: 20407 - RNA, 16 nt, Homo sapiens
aauuauugauguuuuc

SEQ ID NO: 20408 - RNA, 17 nt, Homo sapiens
cagauaccaugaugcug

SEQ ID NO: 20409 - RNA, 12 nt, Homo sapiens
gaccugcuucua

SEQ ID NO: 20410 - RNA, 12 nt, Homo sapiens
agacaaugacuu

SEQ ID NO: 20411 - RNA, 15 nt, Homo sapiens
uuuucccucuucacu

SEQ ID NO: 20412 - RNA, 16 nt, Homo sapiens
augucagccacuguga

SEQ ID NO: 20413 - RNA, 18 nt, Homo sapiens
aguacguugugcauuugg

SEQ ID NO: 20414 - RNA, 15 nt, Homo sapiens
guuugugauugccau

SEQ ID NO: 20415 - RNA, 17 nt, Homo sapiens
agaaaaaggaugcacag

SEQ ID NO: 20416 - RNA, 13 nt, Homo sapiens
auaaucacuuuuu

SEQ ID NO: 20417 - RNA, 16 nt, Homo sapiens
uuagcccaucuuucaa

SEQ ID NO: 20418 - RNA, 19 nt, Homo sapiens
ugaaaugauuucacagugu

SEQ ID NO: 20419 - RNA, 21 nt, Homo sapiens
cugugagaccaaauugagcua

SEQ ID NO: 20420 - RNA, 12 nt, Homo sapiens
cuaccucuccag

SEQ ID NO: 20421 - RNA, 16 nt, Homo sapiens
aauuauauauacuaua

SEQ ID NO: 20422 - RNA, 19 nt, Homo sapiens
guucuuuccaaaguacacu

SEQ ID NO: 20423 - RNA, 21 nt, Homo sapiens
aacaaugacuuguacucugaa

SEQ ID NO: 20424 - RNA, 21 nt, Homo sapiens
ucaaacccaaguuaguucaau

SEQ ID NO: 20425 - RNA, 12 nt, Homo sapiens
uagauacuguau

SEQ ID NO: 20426 - RNA, 15 nt, Homo sapiens
cagcacuuacaauuu

SEQ ID NO: 20427 - RNA, 20 nt, Homo sapiens
ccaaugagaucauugugaag

SEQ ID NO: 20428 - RNA, 19 nt, Homo sapiens
auauauuuccuuauucaga

SEQ ID NO: 20429 - RNA, 23 nt, Homo sapiens
uggauugugccuaauguguuuga

SEQ ID NO: 20430 - RNA, 18 nt, Homo sapiens
acaugccagccacuguga

SEQ ID NO: 20431 - RNA, 14 nt, Homo sapiens
cuggguuccugcaa

SEQ ID NO: 20432 - RNA, 17 nt, Homo sapiens
gaaugucaguuguuauu

SEQ ID NO: 20433 - RNA, 17 nt, Homo sapiens
aguaauaugcacacauu

SEQ ID NO: 20434 - RNA, 16 nt, Homo sapiens
guccuauuauauucau

SEQ ID NO: 20435 - RNA, 17 nt, Homo sapiens
ugggccauagucauucu

SEQ ID NO: 20436 - RNA, 22 nt, Homo sapiens
cuauuuauuuauuuauucauua

SEQ ID NO: 20437 - RNA, 14 nt, Homo sapiens
uaucuucacuuuua

SEQ ID NO: 20438 - RNA, 19 nt, Homo sapiens
gucacuuuacuguccccau

SEQ ID NO: 20439 - RNA, 12 nt, Homo sapiens
cugcacacuguc

SEQ ID NO: 20440 - RNA, 20 nt, Homo sapiens
ugugaaggcaggggaaugua

SEQ ID NO: 20441 - RNA, 15 nt, Homo sapiens
cauaaugcgugcaua

SEQ ID NO: 20442 - RNA, 19 nt, Homo sapiens
cacuguuaucuucacuuuu

SEQ ID NO: 20443 - RNA, 19 nt, Homo sapiens
agcccuuacguccuuccac

SEQ ID NO: 20444 - RNA, 20 nt, Homo sapiens
uuucauaagaauucuguuga

SEQ ID NO: 20445 - RNA, 13 nt, Homo sapiens
acuccacuuggac

SEQ ID NO: 20446 - RNA, 20 nt, Homo sapiens
aguucuaugagggcuaauau

SEQ ID NO: 20447 - RNA, 19 nt, Homo sapiens
gcuccugagacacaugggu

SEQ ID NO: 20448 - RNA, 21 nt, Homo sapiens
guuuucacaaagaacaggaaa

SEQ ID NO: 20449 - RNA, 13 nt, Homo sapiens
auauaaauuuauc

SEQ ID NO: 20450 - RNA, 22 nt, Homo sapiens
cccaacuauaaaacuaggugcu

SEQ ID NO: 20451 - RNA, 13 nt, Homo sapiens
ccauuugagcucu

SEQ ID NO: 20452 - RNA, 15 nt, Homo sapiens
uuaguucuucaaaga

SEQ ID NO: 20453 - RNA, 16 nt, Homo sapiens
uuauugauguuuucau

SEQ ID NO: 20454 - RNA, 16 nt, Homo sapiens
aguaaaggcaaacuua

SEQ ID NO: 20455 - RNA, 15 nt, Homo sapiens
guacguugugcauuu

SEQ ID NO: 20456 - RNA, 20 nt, Homo sapiens
gcccugaaagucccagauca

SEQ ID NO: 20457 - RNA, 19 nt, Homo sapiens
guacaucaaugauaaugcu

SEQ ID NO: 20458 - RNA, 21 nt, Homo sapiens
ucuugaauuguaggugacuau

SEQ ID NO: 20459 - RNA, 15 nt, Homo sapiens
cucuuguagcucucu

SEQ ID NO: 20460 - RNA, 18 nt, Homo sapiens
ccaugagaguucugucac

SEQ ID NO: 20461 - RNA, 22 nt, Homo sapiens
uuugcagcuuucucuaguucaa

SEQ ID NO: 20462 - RNA, 18 nt, Homo sapiens
uaugcuauugaaguuuug

SEQ ID NO: 20463 - RNA, 12 nt, Homo sapiens
uuuacaacuggg

SEQ ID NO: 20464 - RNA, 16 nt, Homo sapiens
aguaugaggcauuugu

SEQ ID NO: 20465 - RNA, 23 nt, Homo sapiens
uucccagcuagaauucacuccac

SEQ ID NO: 20466 - RNA, 24 nt, Homo sapiens
uccaauuaaggauuuuaugcuuua

SEQ ID NO: 20467 - RNA, 22 nt, Homo sapiens
cugugucucaggugugcccuga

SEQ ID NO: 20468 - RNA, 13 nt, Homo sapiens
cucagaaggcaaa

SEQ ID NO: 20469 - RNA, 19 nt, Homo sapiens
aaacuuucacaccccagac

SEQ ID NO: 20470 - RNA, 14 nt, Homo sapiens
uaacagaaauguac

SEQ ID NO: 20471 - RNA, 20 nt, Homo sapiens
uuaauuacuucuuaguaugu

SEQ ID NO: 20472 - RNA, 18 nt, Homo sapiens
gacaugggccccagauac

SEQ ID NO: 20473 - RNA, 17 nt, Homo sapiens
auuuauugaaaugauuu

SEQ ID NO: 20474 - RNA, 16 nt, Homo sapiens
auucacagauaccucu

SEQ ID NO: 20475 - RNA, 20 nt, Homo sapiens
uuaucugcuaugcuauugaa

SEQ ID NO: 20476 - RNA, 18 nt, Homo sapiens
caagaaaauggccaguga

SEQ ID NO: 20477 - RNA, 19 nt, Homo sapiens
aaaugauuucacagugugu

SEQ ID NO: 20478 - RNA, 16 nt, Homo sapiens
caauuauuugaagauu

SEQ ID NO: 20479 - RNA, 20 nt, Homo sapiens
uccucucaaccaccuuucag

SEQ ID NO: 20480 - RNA, 16 nt, Homo sapiens
uuuccagguuccugag

SEQ ID NO: 20481 - RNA, 16 nt, Homo sapiens
uuucuucgugaugaca

SEQ ID NO: 20482 - RNA, 15 nt, Homo sapiens
auggcuuuugugcau

SEQ ID NO: 20483 - RNA, 15 nt, Homo sapiens
aggaaagauuuuguu

SEQ ID NO: 20484 - RNA, 15 nt, Homo sapiens
uggauggcugccuca

SEQ ID NO: 20485 - RNA, 13 nt, Homo sapiens
acuaggugcugca

SEQ ID NO: 20486 - RNA, 23 nt, Homo sapiens
uuaaauaaaauuuuuauguaauu

SEQ ID NO: 20487 - RNA, 15 nt, Homo sapiens
gucacuuuacugucc

SEQ ID NO: 20488 - RNA, 16 nt, Homo sapiens
cuccaauuaaggauuu

SEQ ID NO: 20489 - RNA, 20 nt, Homo sapiens
cuagcccuuacguccuucca

SEQ ID NO: 20490 - RNA, 16 nt, Homo sapiens
uagccagguaccuucu

SEQ ID NO: 20491 - RNA, 22 nt, Homo sapiens
ucauuuacuuuuaaacuuugau

SEQ ID NO: 20492 - RNA, 20 nt, Homo sapiens
acauuuuuuuuuucaauaaa

SEQ ID NO: 20493 - RNA, 18 nt, Homo sapiens
uucuuuuugaaaugucaa

SEQ ID NO: 20494 - RNA, 21 nt, Homo sapiens
auuugagcucuggaagccucu

SEQ ID NO: 20495 - RNA, 22 nt, Homo sapiens
auuaaggauuuuaugcuuuaaa

SEQ ID NO: 20496 - RNA, 18 nt, Homo sapiens
uccuuagcccaucuuuca

SEQ ID NO: 20497 - RNA, 22 nt, Homo sapiens
caauuaaggauuuuaugcuuua

SEQ ID NO: 20498 - RNA, 21 nt, Homo sapiens
cugaaaccccagggcuugugu

SEQ ID NO: 20499 - RNA, 23 nt, Homo sapiens
cuugcaaaguaucccuacuguaa

SEQ ID NO: 20500 - RNA, 13 nt, Homo sapiens
ucauuuguuaaua

SEQ ID NO: 20501 - RNA, 16 nt, Homo sapiens
uggaaauacacuguua

SEQ ID NO: 20502 - RNA, 17 nt, Homo sapiens
acggcagggaaauguau

SEQ ID NO: 20503 - RNA, 16 nt, Homo sapiens
auuuaucauuuaguua

SEQ ID NO: 20504 - RNA, 14 nt, Homo sapiens
agaugaaugucagu

SEQ ID NO: 20505 - RNA, 20 nt, Homo sapiens
acaguuuugguugcuuuaau

SEQ ID NO: 20506 - RNA, 19 nt, Homo sapiens
augucagccacugugauag

SEQ ID NO: 20507 - RNA, 14 nt, Homo sapiens
aagaaauauuccuu

SEQ ID NO: 20508 - RNA, 22 nt, Homo sapiens
agaaauuaaguaucugacaucu

SEQ ID NO: 20509 - RNA, 22 nt, Homo sapiens
ugaagauagaagguuugcagau

SEQ ID NO: 20510 - RNA, 18 nt, Homo sapiens
ugccaccuccugccucag

SEQ ID NO: 20511 - RNA, 19 nt, Homo sapiens
caacaugccagccacugug

SEQ ID NO: 20512 - RNA, 22 nt, Homo sapiens
cuuuguugcuaucaauccaaga

SEQ ID NO: 20513 - RNA, 18 nt, Homo sapiens
cccuuggacauuuuaugu

SEQ ID NO: 20514 - RNA, 17 nt, Homo sapiens
auguaauuauauauacu

SEQ ID NO: 20515 - RNA, 21 nt, Homo sapiens
uuuuaagaaaaaggaugcaca

SEQ ID NO: 20516 - RNA, 19 nt, Homo sapiens
uucugucacggucacuuua

SEQ ID NO: 20517 - RNA, 22 nt, Homo sapiens
ggaaaaaacaccaggauuuaag

SEQ ID NO: 20518 - RNA, 14 nt, Homo sapiens
auuuuaucugcuau

SEQ ID NO: 20519 - RNA, 17 nt, Homo sapiens
acgcauggaaaaguuuc

SEQ ID NO: 20520 - RNA, 21 nt, Homo sapiens
ugccucaccucucaccuccca

SEQ ID NO: 20521 - RNA, 21 nt, Homo sapiens
agaucaagccugccucaauca

SEQ ID NO: 20522 - RNA, 13 nt, Homo sapiens
aauucacuccacu

SEQ ID NO: 20523 - RNA, 22 nt, Homo sapiens
caccauauuaccacagacauac

SEQ ID NO: 20524 - RNA, 18 nt, Homo sapiens
cgagcgcuaccucuccag

SEQ ID NO: 20525 - RNA, 19 nt, Homo sapiens
ggaagguucuggugugaac

SEQ ID NO: 20526 - RNA, 16 nt, Homo sapiens
ugcuuguacauaaugc

SEQ ID NO: 20527 - RNA, 12 nt, Homo sapiens
cucuauugccau

SEQ ID NO: 20528 - RNA, 21 nt, Homo sapiens
aagucuguuuuaugacuucau

SEQ ID NO: 20529 - RNA, 21 nt, Homo sapiens
gaaggcuguggauuuaaugug

SEQ ID NO: 20530 - RNA, 22 nt, Homo sapiens
ucugccugcccugaaaguccca

SEQ ID NO: 20531 - RNA, 14 nt, Homo sapiens
gaacaugagccuuu

SEQ ID NO: 20532 - RNA, 13 nt, Homo sapiens
uugaacuuugacc

SEQ ID NO: 20533 - RNA, 14 nt, Homo sapiens
uagaguugauacua

SEQ ID NO: 20534 - RNA, 23 nt, Homo sapiens
cuuucaagggaccucuccaugau

SEQ ID NO: 20535 - RNA, 13 nt, Homo sapiens
uauuuuaggucaa

SEQ ID NO: 20536 - RNA, 23 nt, Homo sapiens
ggaacaugagccuuuguugcuau

SEQ ID NO: 20537 - RNA, 15 nt, Homo sapiens
gcauguuugugauug

SEQ ID NO: 20538 - RNA, 23 nt, Homo sapiens
agcccucuucugacacuaaaaca

SEQ ID NO: 20539 - RNA, 15 nt, Homo sapiens
uuuuaaaugcaccug

SEQ ID NO: 20540 - RNA, 17 nt, Homo sapiens
cagaucaagccugccuc

SEQ ID NO: 20541 - RNA, 14 nt, Homo sapiens
cacagaguuguuac

SEQ ID NO: 20542 - RNA, 17 nt, Homo sapiens
cauaguaccucugcuau

SEQ ID NO: 20543 - RNA, 15 nt, Homo sapiens
uucaagggaccucuc

SEQ ID NO: 20544 - RNA, 22 nt, Homo sapiens
uccugauucauauuuaauuuga

SEQ ID NO: 20545 - RNA, 18 nt, Homo sapiens
uuaggaguaccauaauuc

SEQ ID NO: 20546 - RNA, 13 nt, Homo sapiens
acuuuuauaagaa

SEQ ID NO: 20547 - RNA, 15 nt, Homo sapiens
guaugaggcauuugu

SEQ ID NO: 20548 - RNA, 17 nt, Homo sapiens
caccuccugccucaggu

SEQ ID NO: 20549 - RNA, 12 nt, Homo sapiens
uguuugugauug

SEQ ID NO: 20550 - RNA, 20 nt, Homo sapiens
agcucuaucccaaccucucc

SEQ ID NO: 20551 - RNA, 17 nt, Homo sapiens
acauaaggaaacugggu

SEQ ID NO: 20552 - RNA, 21 nt, Homo sapiens
gcccugaaagucccagaucaa

SEQ ID NO: 20553 - RNA, 13 nt, Homo sapiens
uaguuagcuuucu

SEQ ID NO: 20554 - RNA, 21 nt, Homo sapiens
guucuccagucauuauguuaa

SEQ ID NO: 20555 - RNA, 16 nt, Homo sapiens
ugcagccccugggacc

SEQ ID NO: 20556 - RNA, 12 nt, Homo sapiens
cuaugcauuuga

SEQ ID NO: 20557 - RNA, 23 nt, Homo sapiens
auucagaauuucuaaaaguuuaa

SEQ ID NO: 20558 - RNA, 17 nt, Homo sapiens
aggauuuuaugcuuuaa

SEQ ID NO: 20559 - RNA, 15 nt, Homo sapiens
uaucuucacuuuuau

SEQ ID NO: 20560 - RNA, 21 nt, Homo sapiens
cagcccucuucugacacuaaa

SEQ ID NO: 20561 - RNA, 13 nt, Homo sapiens
aagaaauauuccu

SEQ ID NO: 20562 - RNA, 19 nt, Homo sapiens
cuguuuagaugaaugucag

SEQ ID NO: 20563 - RNA, 21 nt, Homo sapiens
gcaaacugccaucauuuacuu

SEQ ID NO: 20564 - RNA, 16 nt, Homo sapiens
uucuaaaggcuaccuu

SEQ ID NO: 20565 - RNA, 20 nt, Homo sapiens
cccagaucaagccugccuca

SEQ ID NO: 20566 - RNA, 17 nt, Homo sapiens
agccagguaccuucuca

SEQ ID NO: 20567 - RNA, 13 nt, Homo sapiens
uuauaugcuauuu

SEQ ID NO: 20568 - RNA, 15 nt, Homo sapiens
uggcuuuugugcauu

SEQ ID NO: 20569 - RNA, 14 nt, Homo sapiens
aauggccagugaga

SEQ ID NO: 20570 - RNA, 22 nt, Homo sapiens
gcugaguguuucacaccuuauc

SEQ ID NO: 20571 - RNA, 17 nt, Homo sapiens
agcuuucucuaguucaa

SEQ ID NO: 20572 - RNA, 19 nt, Homo sapiens
ggaaauguaugugugucua

SEQ ID NO: 20573 - RNA, 22 nt, Homo sapiens
cuuauugguggcuguuccugaa

SEQ ID NO: 20574 - RNA, 21 nt, Homo sapiens
aaacauugguucuuguauuaa

SEQ ID NO: 20575 - RNA, 21 nt, Homo sapiens
uccuggauuccucacuuugaa

SEQ ID NO: 20576 - RNA, 17 nt, Homo sapiens
cagccucagcucucagu

SEQ ID NO: 20577 - RNA, 15 nt, Homo sapiens
aacuaaaauguucua

SEQ ID NO: 20578 - RNA, 19 nt, Homo sapiens
uuguuugcauaggugaucu

SEQ ID NO: 20579 - RNA, 19 nt, Homo sapiens
gauauucucuagucauuug

SEQ ID NO: 20580 - RNA, 22 nt, Homo sapiens
uaccucugcuauuugcuguuau

SEQ ID NO: 20581 - RNA, 22 nt, Homo sapiens
aauuaaggguaugauuaacucu

SEQ ID NO: 20582 - RNA, 19 nt, Homo sapiens
guaaauagcuaagauauaa

SEQ ID NO: 20583 - RNA, 13 nt, Homo sapiens
uagcuaagauaua

SEQ ID NO: 20584 - RNA, 17 nt, Homo sapiens
cucuaucccaaccucuc

SEQ ID NO: 20585 - RNA, 19 nt, Homo sapiens
uagaaagcugaguguuuca

SEQ ID NO: 20586 - RNA, 16 nt, Homo sapiens
agaaauuaaguaucug

SEQ ID NO: 20587 - RNA, 16 nt, Homo sapiens
uaucuagauacuguau

SEQ ID NO: 20588 - RNA, 14 nt, Homo sapiens
uuauauucauucuu

SEQ ID NO: 20589 - RNA, 17 nt, Homo sapiens
accacuuuuugcagcuu

SEQ ID NO: 20590 - RNA, 19 nt, Homo sapiens
auauuuugcuuugugauuu

SEQ ID NO: 20591 - RNA, 19 nt, Homo sapiens
uguguggucaacauuucuc

SEQ ID NO: 20592 - RNA, 23 nt, Homo sapiens
accucccauucacagauaccucu

SEQ ID NO: 20593 - RNA, 22 nt, Homo sapiens
cauagagaauauaaaaauaaag

SEQ ID NO: 20594 - RNA, 13 nt, Homo sapiens
aaccaccuuucag

SEQ ID NO: 20595 - RNA, 12 nt, Homo sapiens
uugaaaugucaa

SEQ ID NO: 20596 - RNA, 19 nt, Homo sapiens
aucugacaucucugcaauc

SEQ ID NO: 20597 - RNA, 13 nt, Homo sapiens
augaggcauuugu

SEQ ID NO: 20598 - RNA, 20 nt, Homo sapiens
uugugauacaaugcugugcc

SEQ ID NO: 20599 - RNA, 14 nt, Homo sapiens
gccuuguuuaaugu

SEQ ID NO: 20600 - RNA, 14 nt, Homo sapiens
acagaguuguuaca

SEQ ID NO: 20601 - RNA, 22 nt, Homo sapiens
ugggcaagggaccugcuucuau

SEQ ID NO: 20602 - RNA, 17 nt, Homo sapiens
gaagccucuauugccau

SEQ ID NO: 20603 - RNA, 14 nt, Homo sapiens
ucagccacugugau

SEQ ID NO: 20604 - RNA, 16 nt, Homo sapiens
agggaagggggaacau

SEQ ID NO: 20605 - RNA, 20 nt, Homo sapiens
uuaaauaaugugaaacugga

SEQ ID NO: 20606 - RNA, 14 nt, Homo sapiens
cagaccgggguucc

SEQ ID NO: 20607 - RNA, 13 nt, Homo sapiens
uugaagauucuau

SEQ ID NO: 20608 - RNA, 19 nt, Homo sapiens
cauuaucuagauacuguau

SEQ ID NO: 20609 - RNA, 19 nt, Homo sapiens
ccauuauauuuauuguuua

SEQ ID NO: 20610 - RNA, 19 nt, Homo sapiens
ucuuucaagggaccucucc

SEQ ID NO: 20611 - RNA, 23 nt, Homo sapiens
ugugaaacuggauuaaacuuaau

SEQ ID NO: 20612 - RNA, 15 nt, Homo sapiens
ugccaugagaguucu

SEQ ID NO: 20613 - RNA, 17 nt, Homo sapiens
cuguccuauuauauuca

SEQ ID NO: 20614 - RNA, 14 nt, Homo sapiens
aauuuuaguuguca

SEQ ID NO: 20615 - RNA, 17 nt, Homo sapiens
agcucucaguugcagcc

SEQ ID NO: 20616 - RNA, 18 nt, Homo sapiens
auugaaguuuuggcaauu

SEQ ID NO: 20617 - RNA, 15 nt, Homo sapiens
cccuggccuagcaua

SEQ ID NO: 20618 - RNA, 15 nt, Homo sapiens
augcuuguacauaau

SEQ ID NO: 20619 - RNA, 20 nt, Homo sapiens
aaccguuugugauugccauu

SEQ ID NO: 20620 - RNA, 17 nt, Homo sapiens
uugagcuagggggguca

SEQ ID NO: 20621 - RNA, 15 nt, Homo sapiens
gagagagcuuggaau

SEQ ID NO: 20622 - RNA, 17 nt, Homo sapiens
aggggaaggcaacauac

SEQ ID NO: 20623 - RNA, 18 nt, Homo sapiens
guaaaugggggugcauuu

SEQ ID NO: 20624 - RNA, 14 nt, Homo sapiens
guauuauaccuuuu

SEQ ID NO: 20625 - RNA, 23 nt, Homo sapiens
uccucucaaccaccuuucagaua

SEQ ID NO: 20626 - RNA, 17 nt, Homo sapiens
uucauaccuacauguau

SEQ ID NO: 20627 - RNA, 22 nt, Homo sapiens
aaagucccagaucaagccugcc

SEQ ID NO: 20628 - RNA, 16 nt, Homo sapiens
uaguaccucugcuauu

SEQ ID NO: 20629 - RNA, 14 nt, Homo sapiens
ucuuaauucuuagc

SEQ ID NO: 20630 - RNA, 15 nt, Homo sapiens
gaagauucuauguua

SEQ ID NO: 20631 - RNA, 19 nt, Homo sapiens
agaaaacaggcaaauuccu

SEQ ID NO: 20632 - RNA, 16 nt, Homo sapiens
accaggcacccccaga

SEQ ID NO: 20633 - RNA, 22 nt, Homo sapiens
gccaggaaucacuggcuguuaa

SEQ ID NO: 20634 - RNA, 16 nt, Homo sapiens
ucauauuuauagccag

SEQ ID NO: 20635 - RNA, 20 nt, Homo sapiens
cuggauugcgccuaaugugu

SEQ ID NO: 20636 - RNA, 15 nt, Homo sapiens
ucuaugacacaugca

SEQ ID NO: 20637 - RNA, 21 nt, Homo sapiens
ccaugaugcugagcccggaaa

SEQ ID NO: 20638 - RNA, 14 nt, Homo sapiens
cuaaaauguucuaa

SEQ ID NO: 20639 - RNA, 14 nt, Homo sapiens
uaaaacuaggugcu

SEQ ID NO: 20640 - RNA, 16 nt, Homo sapiens
caugaucccaccuccc

SEQ ID NO: 20641 - RNA, 15 nt, Homo sapiens
uccugagacacaugg

SEQ ID NO: 20642 - RNA, 18 nt, Homo sapiens
uacaaaauauagcuuuca

SEQ ID NO: 20643 - RNA, 13 nt, Homo sapiens
auuuaagauaugu

SEQ ID NO: 20644 - RNA, 14 nt, Homo sapiens
ugagcggaccuucc

SEQ ID NO: 20645 - RNA, 13 nt, Homo sapiens
uaaucaacugggc

SEQ ID NO: 20646 - RNA, 11 nt, Homo sapiens
augauguuuca

SEQ ID NO: 20647 - RNA, 21 nt, Homo sapiens
aggauggcaggaggcauccaa

SEQ ID NO: 20648 - RNA, 13 nt, Homo sapiens
acuuuuugcagcu

SEQ ID NO: 20649 - RNA, 23 nt, Homo sapiens
guaacuguuuagaugaaugucag

SEQ ID NO: 20650 - RNA, 14 nt, Homo sapiens
cucuggaagccucu

SEQ ID NO: 20651 - RNA, 18 nt, Homo sapiens
ccacauccugugggaccu

SEQ ID NO: 20652 - RNA, 19 nt, Homo sapiens
gcccugcccuuacaggaac

SEQ ID NO: 20653 - RNA, 21 nt, Homo sapiens
ucuggaagccucuauugccau

SEQ ID NO: 20654 - RNA, 23 nt, Homo sapiens
guaccucugcuauuugcuguuau

SEQ ID NO: 20655 - RNA, 17 nt, Homo sapiens
agccucuauugccauga

SEQ ID NO: 20656 - RNA, 18 nt, Homo sapiens
aagaacuaaaauguucua

SEQ ID NO: 20657 - RNA, 20 nt, Homo sapiens
cugccucagguguccgcuau

SEQ ID NO: 20658 - RNA, 12 nt, Homo sapiens
cuuagaacaaag

SEQ ID NO: 20659 - RNA, 18 nt, Homo sapiens
uucagcagagaaguuuuc

SEQ ID NO: 20660 - RNA, 14 nt, Homo sapiens
aucuacuugcacac

SEQ ID NO: 20661 - RNA, 21 nt, Homo sapiens
ugcaguguuucccucuguguu

SEQ ID NO: 20662 - RNA, 15 nt, Homo sapiens
cugccugcccugaaa

SEQ ID NO: 20663 - RNA, 18 nt, Homo sapiens
uaguuacuaaacauguau

SEQ ID NO: 20664 - RNA, 21 nt, Homo sapiens
uacaaaauauagcuuucauaa

SEQ ID NO: 20665 - RNA, 19 nt, Homo sapiens
cauaguaccucugcuauuu

SEQ ID NO: 20666 - RNA, 13 nt, Homo sapiens
agaucaagccugc

SEQ ID NO: 20667 - RNA, 19 nt, Homo sapiens
ccaagaaaauggccaguga

SEQ ID NO: 20668 - RNA, 21 nt, Homo sapiens
cccugccaugcucuccaaacc

SEQ ID NO: 20669 - RNA, 13 nt, Homo sapiens
gauuaaacuuaau

SEQ ID NO: 20670 - RNA, 13 nt, Homo sapiens
cuggaagccucua

SEQ ID NO: 20671 - RNA, 14 nt, Homo sapiens
uucauaacaucgaa

SEQ ID NO: 20672 - RNA, 16 nt, Homo sapiens
cagaucaagccugccu

SEQ ID NO: 20673 - RNA, 16 nt, Homo sapiens
cugaccuccuccuuca

SEQ ID NO: 20674 - RNA, 23 nt, Homo sapiens
aucauuuacuuuuaaacuuugau

SEQ ID NO: 20675 - RNA, 22 nt, Homo sapiens
aggaaacuggguuccugcaaug

SEQ ID NO: 20676 - RNA, 14 nt, Homo sapiens
accugugagaccaa

SEQ ID NO: 20677 - RNA, 21 nt, Homo sapiens
cuauuuauuuauuuauucauu

SEQ ID NO: 20678 - RNA, 19 nt, Homo sapiens
gccaugagaguucugucac

SEQ ID NO: 20679 - RNA, 15 nt, Homo sapiens
auauccuuagcccau

SEQ ID NO: 20680 - RNA, 19 nt, Homo sapiens
aggaaggaggaagcuuauu

SEQ ID NO: 20681 - RNA, 17 nt, Homo sapiens
agucuguuuuaugacuu

SEQ ID NO: 20682 - RNA, 18 nt, Homo sapiens
aucacaguuuugguugcu

SEQ ID NO: 20683 - RNA, 15 nt, Homo sapiens
agauaauacaccacu

SEQ ID NO: 20684 - RNA, 15 nt, Homo sapiens
caaugauaaugcuaa

SEQ ID NO: 20685 - RNA, 17 nt, Homo sapiens
ucaauguuuagcagauu

SEQ ID NO: 20686 - RNA, 23 nt, Homo sapiens
uggcguuguggggaugaacuuuu

SEQ ID NO: 20687 - RNA, 21 nt, Homo sapiens
guuuuacaguguuucuggcuu

SEQ ID NO: 20688 - RNA, 13 nt, Homo sapiens
uccugugggaccu

SEQ ID NO: 20689 - RNA, 19 nt, Homo sapiens
cuagaaaacaggcaaauuc

SEQ ID NO: 20690 - RNA, 19 nt, Homo sapiens
ccucagggugcacacagga

SEQ ID NO: 20691 - RNA, 14 nt, Homo sapiens
gagccuuuguugcu

SEQ ID NO: 20692 - RNA, 19 nt, Homo sapiens
gaaacuccacauccugugg

SEQ ID NO: 20693 - RNA, 15 nt, Homo sapiens
cguuugugauugcca

SEQ ID NO: 20694 - RNA, 15 nt, Homo sapiens
agauaccucucuugu

SEQ ID NO: 20695 - RNA, 14 nt, Homo sapiens
auaaucaacugggc

SEQ ID NO: 20696 - RNA, 15 nt, Homo sapiens
agcucucaguugcag

SEQ ID NO: 20697 - RNA, 23 nt, Homo sapiens
aaggaaacuggguuccugcaaug

SEQ ID NO: 20698 - RNA, 20 nt, Homo sapiens
auacuauuuaauuauuucac

SEQ ID NO: 20699 - RNA, 18 nt, Homo sapiens
uuauggcuuuugugcauu

SEQ ID NO: 20700 - RNA, 22 nt, Homo sapiens
accucuccaugaucccaccucc

SEQ ID NO: 20701 - RNA, 14 nt, Homo sapiens
acaggcaaauuccu

SEQ ID NO: 20702 - RNA, 23 nt, Homo sapiens
auaggaaauauuuuaauguuucu

SEQ ID NO: 20703 - RNA, 15 nt, Homo sapiens
gaccuucccagcuag

SEQ ID NO: 20704 - RNA, 22 nt, Homo sapiens
uauugaaaugauuucacagugu

SEQ ID NO: 20705 - RNA, 22 nt, Homo sapiens
uuguuugagaaauuaaguaucu

SEQ ID NO: 20706 - RNA, 16 nt, Homo sapiens
aauuauuucacuuuag

SEQ ID NO: 20707 - RNA, 16 nt, Homo sapiens
ucucaaccaccuuuca

SEQ ID NO: 20708 - RNA, 17 nt, Homo sapiens
cucaccucucaccuccc

SEQ ID NO: 20709 - RNA, 19 nt, Homo sapiens
auucuuuuugaaaugucaa

SEQ ID NO: 20710 - RNA, 15 nt, Homo sapiens
ggauucaauuuuaag

SEQ ID NO: 20711 - RNA, 22 nt, Homo sapiens
ucccuauuuuuuuucuguuaua

SEQ ID NO: 20712 - RNA, 13 nt, Homo sapiens
gaaaacaggcaaa

SEQ ID NO: 20713 - RNA, 20 nt, Homo sapiens
ccaguaaaugggggugcauu

SEQ ID NO: 20714 - RNA, 17 nt, Homo sapiens
gcaaauggccaaugaga

SEQ ID NO: 20715 - RNA, 15 nt, Homo sapiens
aagggaccucuccau

SEQ ID NO: 20716 - RNA, 15 nt, Homo sapiens
uuuagaugaauguca

SEQ ID NO: 20717 - RNA, 17 nt, Homo sapiens
cagccuuggauacucca

SEQ ID NO: 20718 - RNA, 13 nt, Homo sapiens
aaagauacaguua

SEQ ID NO: 20719 - RNA, 19 nt, Homo sapiens
ucuggaagccucuauugcc

SEQ ID NO: 20720 - RNA, 16 nt, Homo sapiens
gcaaauggccaaugag

SEQ ID NO: 20721 - RNA, 19 nt, Homo sapiens
augccagccacugugauag

SEQ ID NO: 20722 - RNA, 20 nt, Homo sapiens
uugaaauauaggaacuuaaa

SEQ ID NO: 20723 - RNA, 20 nt, Homo sapiens
cuucagaucucuaacuucac

SEQ ID NO: 20724 - RNA, 14 nt, Homo sapiens
ccuccugcuuccuc

SEQ ID NO: 20725 - RNA, 18 nt, Homo sapiens
ccagggcuugugugcaca

SEQ ID NO: 20726 - RNA, 14 nt, Homo sapiens
uacuauauauguga

SEQ ID NO: 20727 - RNA, 14 nt, Homo sapiens
acuaaaauguucua

SEQ ID NO: 20728 - RNA, 19 nt, Homo sapiens
caccuuaucuauguagaau

SEQ ID NO: 20729 - RNA, 15 nt, Homo sapiens
cucuccaugauccca

SEQ ID NO: 20730 - RNA, 17 nt, Homo sapiens
uacauaaugcgugcaua

SEQ ID NO: 20731 - RNA, 21 nt, Homo sapiens
uuaggaguaccauaauucugg

SEQ ID NO: 20732 - RNA, 20 nt, Homo sapiens
acuuugauuuuauaugcuau

SEQ ID NO: 20733 - RNA, 19 nt, Homo sapiens
ucccauucacagauaccuc

SEQ ID NO: 20734 - RNA, 22 nt, Homo sapiens
ugacaaggggcaguggugguuu

SEQ ID NO: 20735 - RNA, 21 nt, Homo sapiens
gucucugaagugaaacugcuu

SEQ ID NO: 20736 - RNA, 22 nt, Homo sapiens
uuuguuaguaugaggcauuugu

SEQ ID NO: 20737 - RNA, 16 nt, Homo sapiens
ccucugcuauuugcug

SEQ ID NO: 20738 - RNA, 19 nt, Homo sapiens
auaaaacuuuuccaaugac

SEQ ID NO: 20739 - RNA, 22 nt, Homo sapiens
ccaugagaguucugucacgguc

SEQ ID NO: 20740 - RNA, 16 nt, Homo sapiens
aaacaccucagcugcc

SEQ ID NO: 20741 - RNA, 19 nt, Homo sapiens
acaugagccuuuguugcua

SEQ ID NO: 20742 - RNA, 19 nt, Homo sapiens
gauugugggauacuauuua

SEQ ID NO: 20743 - RNA, 18 nt, Homo sapiens
cugccuccccagcucuau

SEQ ID NO: 20744 - RNA, 19 nt, Homo sapiens
gcauacugccuuguuuaau

SEQ ID NO: 20745 - RNA, 13 nt, Homo sapiens
gagacacaugggu

SEQ ID NO: 20746 - RNA, 22 nt, Homo sapiens
cacuaaaacaccucagcugccu

SEQ ID NO: 20747 - RNA, 20 nt, Homo sapiens
gcuguuauuuuaucugcuau

SEQ ID NO: 20748 - RNA, 14 nt, Homo sapiens
aucugcuaugcuau

SEQ ID NO: 20749 - RNA, 17 nt, Homo sapiens
uugaaaugauuucacag

SEQ ID NO: 20750 - RNA, 20 nt, Homo sapiens
uacacuguuaucuucacuuu

SEQ ID NO: 20751 - RNA, 16 nt, Homo sapiens
ccucaccucucaccuc

SEQ ID NO: 20752 - RNA, 17 nt, Homo sapiens
aaguaucccuacuguaa

SEQ ID NO: 20753 - RNA, 20 nt, Homo sapiens
cuuucagcucagcuaaugaa

SEQ ID NO: 20754 - RNA, 17 nt, Homo sapiens
cagauauucucuaguca

SEQ ID NO: 20755 - RNA, 17 nt, Homo sapiens
uccaaaguacacuguuu

SEQ ID NO: 20756 - RNA, 23 nt, Homo sapiens
uuauauuuccaagaaauauuccu

SEQ ID NO: 20757 - RNA, 16 nt, Homo sapiens
uuauuuauuuauucau

SEQ ID NO: 20758 - RNA, 21 nt, Homo sapiens
auacauaaacaagaccacguu

SEQ ID NO: 20759 - RNA, 14 nt, Homo sapiens
aagcaaauggccaa

SEQ ID NO: 20760 - RNA, 23 nt, Homo sapiens
uaccaugaugcugagcccggaaa

SEQ ID NO: 20761 - RNA, 15 nt, Homo sapiens
caaguuaguucaauc

SEQ ID NO: 20762 - RNA, 15 nt, Homo sapiens
agacacaugggugcu

SEQ ID NO: 20763 - RNA, 20 nt, Homo sapiens
accccggaagccaaaccucu

SEQ ID NO: 20764 - RNA, 17 nt, Homo sapiens
ucagcagagaaguuuuc

SEQ ID NO: 20765 - RNA, 21 nt, Homo sapiens
caucaaugauaaugcuaauuu

SEQ ID NO: 20766 - RNA, 15 nt, Homo sapiens
aucaucacccagcac

SEQ ID NO: 20767 - RNA, 23 nt, Homo sapiens
cuggaagccucuauugccaugag

SEQ ID NO: 20768 - RNA, 15 nt, Homo sapiens
ucauaagaauucugu

SEQ ID NO: 20769 - RNA, 13 nt, Homo sapiens
uccucacuuugaa

SEQ ID NO: 20770 - RNA, 15 nt, Homo sapiens
ucuaucccaaccucu

SEQ ID NO: 20771 - RNA, 18 nt, Homo sapiens
cuguuaucuucacuuuua

SEQ ID NO: 20772 - RNA, 15 nt, Homo sapiens
aguaugugcauuuaa

SEQ ID NO: 20773 - RNA, 20 nt, Homo sapiens
uauggcuuuugugcauuauc

SEQ ID NO: 20774 - RNA, 17 nt, Homo sapiens
uaauuauuucacuuuag

SEQ ID NO: 20775 - RNA, 14 nt, Homo sapiens
uuuuaaacuuugau

SEQ ID NO: 20776 - RNA, 14 nt, Homo sapiens
cuguucuuucuggc

SEQ ID NO: 20777 - RNA, 22 nt, Homo sapiens
auguuugccgcuuaagcuuuca

SEQ ID NO: 20778 - RNA, 19 nt, Homo sapiens
acucuggucaagaagcauc

SEQ ID NO: 20779 - RNA, 21 nt, Homo sapiens
uuccugcaaugaagucucuga

SEQ ID NO: 20780 - RNA, 21 nt, Homo sapiens
agcagauuuaagauauguaac

SEQ ID NO: 20781 - RNA, 18 nt, Homo sapiens
guagcucucugaccuccu

SEQ ID NO: 20782 - RNA, 17 nt, Homo sapiens
acuaaacauguauguaa

SEQ ID NO: 20783 - RNA, 15 nt, Homo sapiens
ugagaucaaugugac

SEQ ID NO: 20784 - RNA, 17 nt, Homo sapiens
augcuaauuuuauuaua

SEQ ID NO: 20785 - RNA, 13 nt, Homo sapiens
guuuaauguuaau

SEQ ID NO: 20786 - RNA, 20 nt, Homo sapiens
acacauuuuuuaaaugcacc

SEQ ID NO: 20787 - RNA, 16 nt, Homo sapiens
aggcaggggaauguau

SEQ ID NO: 20788 - RNA, 23 nt, Homo sapiens
cucugaccuccuccuucauggca

SEQ ID NO: 20789 - RNA, 21 nt, Homo sapiens
cugcacacuguccuauuauau

SEQ ID NO: 20790 - RNA, 13 nt, Homo sapiens
caagggaccucuc

SEQ ID NO: 20791 - RNA, 15 nt, Homo sapiens
uucaaauguucucca

SEQ ID NO: 20792 - RNA, 11 nt, Homo sapiens
gggaccucucc

SEQ ID NO: 20793 - RNA, 20 nt, Homo sapiens
uauguuagagaauuuccuua

SEQ ID NO: 20794 - RNA, 16 nt, Homo sapiens
acaccucagcugccuc

SEQ ID NO: 20795 - RNA, 22 nt, Homo sapiens
aauaaauucccuggccuuucau

SEQ ID NO: 20796 - RNA, 14 nt, Homo sapiens
auuugaagauuuaa

SEQ ID NO: 20797 - RNA, 16 nt, Homo sapiens
augggggugcauuuga

SEQ ID NO: 20798 - RNA, 16 nt, Homo sapiens
cauccugugggaccug

SEQ ID NO: 20799 - RNA, 22 nt, Homo sapiens
ugcugaaccguuugugauugcc

SEQ ID NO: 20800 - RNA, 23 nt, Homo sapiens
cucccauucacagauaccucucu

SEQ ID NO: 20801 - RNA, 16 nt, Homo sapiens
ucucuuguagcucucu

SEQ ID NO: 20802 - RNA, 19 nt, Homo sapiens
cuagcccuuacguccuucc

SEQ ID NO: 20803 - RNA, 11 nt, Homo sapiens
caaauguucuc

SEQ ID NO: 20804 - RNA, 15 nt, Homo sapiens
uaugugcacaucugu

SEQ ID NO: 20805 - RNA, 22 nt, Homo sapiens
acggucacuuuacuguccccau

SEQ ID NO: 20806 - RNA, 16 nt, Homo sapiens
ugagccuuuguugcua

SEQ ID NO: 20807 - RNA, 22 nt, Homo sapiens
caacauacacaccccggacucc

SEQ ID NO: 20808 - RNA, 20 nt, Homo sapiens
aaacuuuuccaaugacauuu

SEQ ID NO: 20809 - RNA, 10 nt, Homo sapiens
cauccaaagg

SEQ ID NO: 20810 - RNA, 22 nt, Homo sapiens
auuuaauuacuucuuaguaugu

SEQ ID NO: 20811 - RNA, 16 nt, Homo sapiens
uuaacaaaauuugaau

SEQ ID NO: 20812 - RNA, 20 nt, Homo sapiens
agacugaguacguugugcau

SEQ ID NO: 20813 - RNA, 17 nt, Homo sapiens
gcuccugagacacaugg

SEQ ID NO: 20814 - RNA, 19 nt, Homo sapiens
gaaaauaguggugugauuu

SEQ ID NO: 20815 - RNA, 23 nt, Homo sapiens
ugcauaccacuuuuguucuuggu

SEQ ID NO: 20816 - RNA, 17 nt, Homo sapiens
cucuaccugcacacugu

SEQ ID NO: 20817 - RNA, 22 nt, Homo sapiens
uaaacauugguucuuguauuaa

SEQ ID NO: 20818 - RNA, 19 nt, Homo sapiens
cauucuccuuguguuacua

SEQ ID NO: 20819 - RNA, 23 nt, Homo sapiens
cauucacagauaccucucuugua

SEQ ID NO: 20820 - RNA, 14 nt, Homo sapiens
ccuacugugucuca

SEQ ID NO: 20821 - RNA, 13 nt, Homo sapiens
auucuuuuaguuu

SEQ ID NO: 20822 - RNA, 19 nt, Homo sapiens
ucuuuuuccagguuccuga

SEQ ID NO: 20823 - RNA, 20 nt, Homo sapiens
aaucuaaauggaaccacucu

SEQ ID NO: 20824 - RNA, 17 nt, Homo sapiens
ugcaugaaguaauaugc

SEQ ID NO: 20825 - RNA, 17 nt, Homo sapiens
ccccaaguuaguucaau

SEQ ID NO: 20826 - RNA, 20 nt, Homo sapiens
gagcggaccuucccagcuag

SEQ ID NO: 20827 - RNA, 21 nt, Homo sapiens
auguagaauauauuuccuuau

SEQ ID NO: 20828 - RNA, 21 nt, Homo sapiens
gcaguguuucccucuguguua

SEQ ID NO: 20829 - RNA, 19 nt, Homo sapiens
aaacuggguuccugcaaug

SEQ ID NO: 20830 - RNA, 22 nt, Homo sapiens
ucucaauguuuagcagauuuaa

SEQ ID NO: 20831 - RNA, 13 nt, Homo sapiens
cuacaauuguaaa

SEQ ID NO: 20832 - RNA, 17 nt, Homo sapiens
acugccaucauuuacuu

SEQ ID NO: 20833 - RNA, 17 nt, Homo sapiens
ccuagcacacacuuuug

SEQ ID NO: 20834 - RNA, 21 nt, Homo sapiens
cucuggaagccucuauugcca

SEQ ID NO: 20835 - RNA, 15 nt, Homo sapiens
ucaggugugcccuga

SEQ ID NO: 20836 - RNA, 15 nt, Homo sapiens
agccucuauugccau

SEQ ID NO: 20837 - RNA, 17 nt, Homo sapiens
ucccaccucccauucac

SEQ ID NO: 20838 - RNA, 14 nt, Homo sapiens
cagaaauguguuau

SEQ ID NO: 20839 - RNA, 16 nt, Homo sapiens
agccucuauugccaug

SEQ ID NO: 20840 - RNA, 14 nt, Homo sapiens
uuugugauugccau

SEQ ID NO: 20841 - RNA, 15 nt, Homo sapiens
uagacauucuuuauc

SEQ ID NO: 20842 - RNA, 15 nt, Homo sapiens
ggaccucuccaugau

SEQ ID NO: 20843 - RNA, 19 nt, Homo sapiens
cagaaaugccuuacccuca

SEQ ID NO: 20844 - RNA, 15 nt, Homo sapiens
ugcccuuacaggaac

SEQ ID NO: 20845 - RNA, 20 nt, Homo sapiens
uggauuaaacuuaaucuaaa

SEQ ID NO: 20846 - RNA, 18 nt, Homo sapiens
cugggcaagggaccugcu

SEQ ID NO: 20847 - RNA, 13 nt, Homo sapiens
acagauaccucuc

SEQ ID NO: 20848 - RNA, 14 nt, Homo sapiens
uaccugcacacugu

SEQ ID NO: 20849 - RNA, 13 nt, Homo sapiens
ugcaaggucauuu

SEQ ID NO: 20850 - RNA, 14 nt, Homo sapiens
uaaggaaacugggu

SEQ ID NO: 20851 - RNA, 14 nt, Homo sapiens
augacaaagacuga

SEQ ID NO: 20852 - RNA, 15 nt, Homo sapiens
gauuuuaugcuuuaa

SEQ ID NO: 20853 - RNA, 13 nt, Homo sapiens
cugaacacuccaa

SEQ ID NO: 20854 - RNA, 16 nt, Homo sapiens
caaugaagucucugaa

SEQ ID NO: 20855 - RNA, 23 nt, Homo sapiens
cuccuucauggcaggcaucgcca

SEQ ID NO: 20856 - RNA, 20 nt, Homo sapiens
uacaguuacucagaauucuc

SEQ ID NO: 20857 - RNA, 19 nt, Homo sapiens
ucuuaguaugugcauuuaa

SEQ ID NO: 20858 - RNA, 14 nt, Homo sapiens
ugcuaucaauccaa

SEQ ID NO: 20859 - RNA, 21 nt, Homo sapiens
caugaucccaccucccauuca

SEQ ID NO: 20860 - RNA, 15 nt, Homo sapiens
gcccggaaacuccac

SEQ ID NO: 20861 - RNA, 12 nt, Homo sapiens
aaggaaacuggg

SEQ ID NO: 20862 - RNA, 16 nt, Homo sapiens
aaaauggccagugaga

SEQ ID NO: 20863 - RNA, 22 nt, Homo sapiens
ugacugcuaguuuauauagaaa

SEQ ID NO: 20864 - RNA, 12 nt, Homo sapiens
gguaugauuaac

SEQ ID NO: 20865 - RNA, 18 nt, Homo sapiens
agaauauaaaaauaaagc

SEQ ID NO: 20866 - RNA, 19 nt, Homo sapiens
aaauaaaauuuuuauguaa

SEQ ID NO: 20867 - RNA, 16 nt, Homo sapiens
uucacagauaccucuc

SEQ ID NO: 20868 - RNA, 13 nt, Homo sapiens
uggccagugagau

SEQ ID NO: 20869 - RNA, 13 nt, Homo sapiens
acuuugaccucug

SEQ ID NO: 20870 - RNA, 16 nt, Homo sapiens
ggcaagggaccugcuu

SEQ ID NO: 20871 - RNA, 23 nt, Homo sapiens
cucccuauuuuuuuucuguuaua

SEQ ID NO: 20872 - RNA, 13 nt, Homo sapiens
uuugguugcuuua

SEQ ID NO: 20873 - RNA, 18 nt, Homo sapiens
uguuaucuucacuuuuau

SEQ ID NO: 20874 - RNA, 21 nt, Homo sapiens
uuuucaauaaaacuuuuccaa

SEQ ID NO: 20875 - RNA, 11 nt, Homo sapiens
cggaagccaaa

SEQ ID NO: 20876 - RNA, 12 nt, Homo sapiens
cuccgcauccuc

SEQ ID NO: 20877 - RNA, 14 nt, Homo sapiens
aguaccucugcuau

SEQ ID NO: 20878 - RNA, 15 nt, Homo sapiens
uuguagcucucugac

SEQ ID NO: 20879 - RNA, 16 nt, Homo sapiens
cuuccuauaauuuuag

SEQ ID NO: 20880 - RNA, 23 nt, Homo sapiens
aaucacuggcuguuaaucuuuca

SEQ ID NO: 20881 - RNA, 21 nt, Homo sapiens
ucucaaccaccuuucagauaa

SEQ ID NO: 20882 - RNA, 19 nt, Homo sapiens
gaauuguaggugacuauua

SEQ ID NO: 20883 - RNA, 19 nt, Homo sapiens
uaaguuucacagcacuuac

SEQ ID NO: 20884 - RNA, 16 nt, Homo sapiens
uaguaugugcauuuaa

SEQ ID NO: 20885 - RNA, 18 nt, Homo sapiens
uuucuggaggucucugaa

SEQ ID NO: 20886 - RNA, 20 nt, Homo sapiens
ucuccagucauuauguuaau

SEQ ID NO: 20887 - RNA, 22 nt, Homo sapiens
aaacauguauguaaauagcuaa

SEQ ID NO: 20888 - RNA, 18 nt, Homo sapiens
accuucucaccugugaga

SEQ ID NO: 20889 - RNA, 15 nt, Homo sapiens
cuuuaagaacuaaaa

SEQ ID NO: 20890 - RNA, 13 nt, Homo sapiens
accuucccagcua

SEQ ID NO: 20891 - RNA, 20 nt, Homo sapiens
cuuguagcucucugaccucc

SEQ ID NO: 20892 - RNA, 13 nt, Homo sapiens
agaauguuuucaa

SEQ ID NO: 20893 - RNA, 20 nt, Homo sapiens
gaaaaguuucccagucuuca

SEQ ID NO: 20894 - RNA, 11 nt, Homo sapiens
uaucugcuaug

SEQ ID NO: 20895 - RNA, 14 nt, Homo sapiens
aauauauauuuuag

SEQ ID NO: 20896 - RNA, 20 nt, Homo sapiens
ccccagauaccaugaugcug

SEQ ID NO: 20897 - RNA, 22 nt, Homo sapiens
cacaugucagccacugugauag

SEQ ID NO: 20898 - RNA, 16 nt, Homo sapiens
uuauagccagguaccu

SEQ ID NO: 20899 - RNA, 14 nt, Homo sapiens
uggcuuuugugcau

SEQ ID NO: 20900 - RNA, 21 nt, Homo sapiens
gcaaucuucucagaaggcaaa

SEQ ID NO: 20901 - RNA, 16 nt, Homo sapiens
auaauuuuagacauuc

SEQ ID NO: 20902 - RNA, 13 nt, Homo sapiens
gccucuauugcca

SEQ ID NO: 20903 - RNA, 15 nt, Homo sapiens
gauauuaacugagaa

SEQ ID NO: 20904 - RNA, 12 nt, Homo sapiens
ccggaagccaaa

SEQ ID NO: 20905 - RNA, 17 nt, Homo sapiens
gacacaugcaaggucau

SEQ ID NO: 20906 - RNA, 18 nt, Homo sapiens
acacauuuuucuuaggga

SEQ ID NO: 20907 - RNA, 17 nt, Homo sapiens
ggaauguaugugcacau

SEQ ID NO: 20908 - RNA, 11 nt, Homo sapiens
augcucuccaa

SEQ ID NO: 20909 - RNA, 21 nt, Homo sapiens
uugccaugagaguucugucac

SEQ ID NO: 20910 - RNA, 15 nt, Homo sapiens
ugauuaaauucuugc

SEQ ID NO: 20911 - RNA, 20 nt, Homo sapiens
cugccaucauuuacuuuuaa

SEQ ID NO: 20912 - RNA, 15 nt, Homo sapiens
aaagucccagaucaa

SEQ ID NO: 20913 - RNA, 22 nt, Homo sapiens
ugacuauuauauuuccaagaaa

SEQ ID NO: 20914 - RNA, 21 nt, Homo sapiens
auuaacuuuuauaaacuuuac

SEQ ID NO: 20915 - RNA, 13 nt, Homo sapiens
aacuaaaauguuc

SEQ ID NO: 20916 - RNA, 17 nt, Homo sapiens
uccuuccacuuccaaga

SEQ ID NO: 20917 - RNA, 14 nt, Homo sapiens
auuuaaguuucaca

SEQ ID NO: 20918 - RNA, 14 nt, Homo sapiens
agucuucuauuuau

SEQ ID NO: 20919 - RNA, 14 nt, Homo sapiens
aggccaccuggauu

SEQ ID NO: 20920 - RNA, 16 nt, Homo sapiens
uccuuauucagaauuu

SEQ ID NO: 20921 - RNA, 19 nt, Homo sapiens
acuccacuuggacaugggc

SEQ ID NO: 20922 - RNA, 13 nt, Homo sapiens
aaugcaccuggaa

SEQ ID NO: 20923 - RNA, 13 nt, Homo sapiens
aagugaaacugcu

SEQ ID NO: 20924 - RNA, 18 nt, Homo sapiens
uuugaagguagaauguuu

SEQ ID NO: 20925 - RNA, 15 nt, Homo sapiens
agcccggaaacucca

SEQ ID NO: 20926 - RNA, 17 nt, Homo sapiens
auaucacaugucagcca

SEQ ID NO: 20927 - RNA, 15 nt, Homo sapiens
augcaaggucauuuu

SEQ ID NO: 20928 - RNA, 15 nt, Homo sapiens
uggcaggcaucgcca

SEQ ID NO: 20929 - RNA, 17 nt, Homo sapiens
aguucaccagacucuau

SEQ ID NO: 20930 - RNA, 16 nt, Homo sapiens
guaaauagcuaagaua

SEQ ID NO: 20931 - RNA, 19 nt, Homo sapiens
uguuuccuagcacacacuu

SEQ ID NO: 20932 - RNA, 14 nt, Homo sapiens
gucauuauguuaau

SEQ ID NO: 20933 - RNA, 21 nt, Homo sapiens
uucuuaaauaauaaagaucau

SEQ ID NO: 20934 - RNA, 24 nt, Homo sapiens
ggugaucucauuuaauccucucaa

SEQ ID NO: 20935 - RNA, 14 nt, Homo sapiens
caagccugccucaa

SEQ ID NO: 20936 - RNA, 19 nt, Homo sapiens
ucagcucucaguugcagcc

SEQ ID NO: 20937 - RNA, 20 nt, Homo sapiens
gaauguuuucaaauguucuc

SEQ ID NO: 20938 - RNA, 17 nt, Homo sapiens
caaaggcuccugagaca

SEQ ID NO: 20939 - RNA, 14 nt, Homo sapiens
auggcaaacugcca

SEQ ID NO: 20940 - RNA, 19 nt, Homo sapiens
ccagcacggggcuaagcau

SEQ ID NO: 20941 - RNA, 21 nt, Homo sapiens
cucacuuugaagagugugagg

SEQ ID NO: 20942 - RNA, 20 nt, Homo sapiens
accccagacgaugucuucau

SEQ ID NO: 20943 - RNA, 17 nt, Homo sapiens
acaggcaaauuccugac

SEQ ID NO: 20944 - RNA, 15 nt, Homo sapiens
uugauguuuucacaa

SEQ ID NO: 20945 - RNA, 23 nt, Homo sapiens
auacugccuuguuuaauguuaau

SEQ ID NO: 20946 - RNA, 21 nt, Homo sapiens
uaugcuauuuauuaaguauuu

SEQ ID NO: 20947 - RNA, 23 nt, Homo sapiens
ugcaacaugccagccacugugau

SEQ ID NO: 20948 - RNA, 18 nt, Homo sapiens
uugugugcacauauccuu

SEQ ID NO: 20949 - RNA, 21 nt, Homo sapiens
uauguagaauauauuuccuua

SEQ ID NO: 20950 - RNA, 21 nt, Homo sapiens
ugaaagucccagaucaagccu

SEQ ID NO: 20951 - RNA, 22 nt, Homo sapiens
ugcauaggugaucucauuuaau

SEQ ID NO: 20952 - RNA, 19 nt, Homo sapiens
uuaaggaugcuuguacaua

SEQ ID NO: 20953 - RNA, 21 nt, Homo sapiens
gaaccguuugugauugccauu

SEQ ID NO: 20954 - RNA, 20 nt, Homo sapiens
aggcauacugccuuguuuaa

SEQ ID NO: 20955 - RNA, 14 nt, Homo sapiens
gagggcuaauaucu

SEQ ID NO: 20956 - RNA, 16 nt, Homo sapiens
ugaguacguugugcau

SEQ ID NO: 20957 - RNA, 17 nt, Homo sapiens
gaaucacuggcuguuaa

SEQ ID NO: 20958 - RNA, 14 nt, Homo sapiens
aaagcaugugagac

SEQ ID NO: 20959 - RNA, 18 nt, Homo sapiens
uuuagaagauucuauguu

SEQ ID NO: 20960 - RNA, 20 nt, Homo sapiens
auuaacuuuuauaaacuuua

SEQ ID NO: 20961 - RNA, 14 nt, Homo sapiens
accucuccaugauc

SEQ ID NO: 20962 - RNA, 19 nt, Homo sapiens
cuuguaaggcauacugccu

SEQ ID NO: 20963 - RNA, 16 nt, Homo sapiens
uuugaagagugugagg

SEQ ID NO: 20964 - RNA, 22 nt, Homo sapiens
ucagccagcccucuucugacac

SEQ ID NO: 20965 - RNA, 20 nt, Homo sapiens
gcaaucuucucagaaggcaa

SEQ ID NO: 20966 - RNA, 19 nt, Homo sapiens
cuacaauuguaaacuaguu

SEQ ID NO: 20967 - RNA, 22 nt, Homo sapiens
uaccagccuuggauacuccaug

SEQ ID NO: 20968 - RNA, 22 nt, Homo sapiens
aaauacuguuugagguuuuuaa

SEQ ID NO: 20969 - RNA, 20 nt, Homo sapiens
gugagaccaaauugagcuag

SEQ ID NO: 20970 - RNA, 18 nt, Homo sapiens
aaucacuggcuguuaauc

SEQ ID NO: 20971 - RNA, 14 nt, Homo sapiens
cauggcccugccau

SEQ ID NO: 20972 - RNA, 20 nt, Homo sapiens
aucuuucaagggaccucucc

SEQ ID NO: 20973 - RNA, 18 nt, Homo sapiens
gauugagaaggagcuccc

SEQ ID NO: 20974 - RNA, 19 nt, Homo sapiens
agcuagaaaacaggcaaau

SEQ ID NO: 20975 - RNA, 23 nt, Homo sapiens
gaccuucccagcuagaauucacu

SEQ ID NO: 20976 - RNA, 20 nt, Homo sapiens
agucuucagcagagaaguuu

SEQ ID NO: 20977 - RNA, 14 nt, Homo sapiens
ucuaugacacaugc

SEQ ID NO: 20978 - RNA, 21 nt, Homo sapiens
ggccccagauaccaugaugcu

SEQ ID NO: 20979 - RNA, 17 nt, Homo sapiens
ggagauuuacaacuggg

SEQ ID NO: 20980 - RNA, 16 nt, Homo sapiens
gaagccucuauugcca

SEQ ID NO: 20981 - RNA, 15 nt, Homo sapiens
guuuagcagauuuaa

SEQ ID NO: 20982 - RNA, 14 nt, Homo sapiens
cugccugcccugaa

SEQ ID NO: 20983 - RNA, 16 nt, Homo sapiens
uaucuauguagaauau

SEQ ID NO: 20984 - RNA, 16 nt, Homo sapiens
aacuauaaaacuaggu

SEQ ID NO: 20985 - RNA, 17 nt, Homo sapiens
uacuguccccaucauca

SEQ ID NO: 20986 - RNA, 19 nt, Homo sapiens
uucauucuuuuugaaaugu

SEQ ID NO: 20987 - RNA, 11 nt, Homo sapiens
acuuacuguac

SEQ ID NO: 20988 - RNA, 15 nt, Homo sapiens
agaauauauuuccuu

SEQ ID NO: 20989 - RNA, 21 nt, Homo sapiens
uuccuauaauuuuagacauuc

SEQ ID NO: 20990 - RNA, 16 nt, Homo sapiens
ucuggaggucucugaa

SEQ ID NO: 20991 - RNA, 20 nt, Homo sapiens
acuguuuagaugaaugucag

SEQ ID NO: 20992 - RNA, 21 nt, Homo sapiens
guucaaucuggauucauauuu

SEQ ID NO: 20993 - RNA, 18 nt, Homo sapiens
cagcuagaauucacucca

SEQ ID NO: 20994 - RNA, 21 nt, Homo sapiens
uagcauaguaccucugcuauu

SEQ ID NO: 20995 - RNA, 23 nt, Homo sapiens
ucaguuguuauuuauugaaauga

SEQ ID NO: 20996 - RNA, 19 nt, Homo sapiens
gcuauuuauuaaguauuuu

SEQ ID NO: 20997 - RNA, 19 nt, Homo sapiens
auaccucucuuguagcucu

SEQ ID NO: 20998 - RNA, 23 nt, Homo sapiens
uauuuccaagaaauauuccuuaa

SEQ ID NO: 20999 - RNA, 15 nt, Homo sapiens
aaauaccagccagua

SEQ ID NO: 21000 - RNA, 17 nt, Homo sapiens
caggauuuaaguuucac

SEQ ID NO: 21001 - RNA, 16 nt, Homo sapiens
aguaucccuacuguaa

SEQ ID NO: 21002 - RNA, 19 nt, Homo sapiens
uuggauacuccauggggug

SEQ ID NO: 21003 - RNA, 23 nt, Homo sapiens
gugaagacaaugacuuacuguac

SEQ ID NO: 21004 - RNA, 14 nt, Homo sapiens
aauacacuguuauc

SEQ ID NO: 21005 - RNA, 13 nt, Homo sapiens
gccucaccucuca

SEQ ID NO: 21006 - RNA, 13 nt, Homo sapiens
gaucauugugaag

SEQ ID NO: 21007 - RNA, 16 nt, Homo sapiens
gaggagccugcaacau

SEQ ID NO: 21008 - RNA, 12 nt, Homo sapiens
uggccuuucaua

SEQ ID NO: 21009 - RNA, 15 nt, Homo sapiens
aauguaugugcacau

SEQ ID NO: 21010 - RNA, 20 nt, Homo sapiens
cugccuuguuuaauguuaau

SEQ ID NO: 21011 - RNA, 14 nt, Homo sapiens
gcuuuugugcauua

SEQ ID NO: 21012 - RNA, 14 nt, Homo sapiens
agcagaaaugccuu

SEQ ID NO: 21013 - RNA, 19 nt, Homo sapiens
ugcagaggccaccuggauu

SEQ ID NO: 21014 - RNA, 16 nt, Homo sapiens
cuggguuccugcaaug

SEQ ID NO: 21015 - RNA, 14 nt, Homo sapiens
gcucucugaccucc

SEQ ID NO: 21016 - RNA, 14 nt, Homo sapiens
ucacagauaccucu

SEQ ID NO: 21017 - RNA, 19 nt, Homo sapiens
uaaugaaguguuuagcaua

SEQ ID NO: 21018 - RNA, 23 nt, Homo sapiens
gcccaucuuucaagggaccucuc

SEQ ID NO: 21019 - RNA, 15 nt, Homo sapiens
gaauguaugugcaca

SEQ ID NO: 21020 - RNA, 15 nt, Homo sapiens
cagacucuggucaag

SEQ ID NO: 21021 - RNA, 17 nt, Homo sapiens
ucaaucuggauucauau

SEQ ID NO: 21022 - RNA, 18 nt, Homo sapiens
cuaaacuuucacacccca

SEQ ID NO: 21023 - RNA, 17 nt, Homo sapiens
cuugugugcacauaucc

SEQ ID NO: 21024 - RNA, 16 nt, Homo sapiens
uuaugacuucauuaau

SEQ ID NO: 21025 - RNA, 12 nt, Homo sapiens
uguaucaugaca

SEQ ID NO: 21026 - RNA, 16 nt, Homo sapiens
acuuuuaaacuuugau

SEQ ID NO: 21027 - RNA, 13 nt, Homo sapiens
cuuuugugcauua

SEQ ID NO: 21028 - RNA, 16 nt, Homo sapiens
uggcuuuugugcauua

SEQ ID NO: 21029 - RNA, 13 nt, Homo sapiens
caaucuucucaga

SEQ ID NO: 21030 - RNA, 18 nt, Homo sapiens
aauuuccuuacucuugau

SEQ ID NO: 21031 - RNA, 16 nt, Homo sapiens
ucuaugacacaugcaa

SEQ ID NO: 21032 - RNA, 18 nt, Homo sapiens
cugcuauuugcuguuauu

SEQ ID NO: 21033 - RNA, 13 nt, Homo sapiens
aucccuacuguaa

SEQ ID NO: 21034 - RNA, 18 nt, Homo sapiens
aauguuuagcagauuuaa

SEQ ID NO: 21035 - RNA, 15 nt, Homo sapiens
uuccucacuuugaag

SEQ ID NO: 21036 - RNA, 20 nt, Homo sapiens
auggcaggaggcauccaaag

SEQ ID NO: 21037 - RNA, 15 nt, Homo sapiens
ucccaggaggggcuu

SEQ ID NO: 21038 - RNA, 14 nt, Homo sapiens
auuuauuuauucau

SEQ ID NO: 21039 - RNA, 22 nt, Homo sapiens
acguuucuaaaggcuaccuuug

SEQ ID NO: 21040 - RNA, 16 nt, Homo sapiens
cucuggaagccucuau

SEQ ID NO: 21041 - RNA, 17 nt, Homo sapiens
gacacuaaaacaccuca

SEQ ID NO: 21042 - RNA, 16 nt, Homo sapiens
guuuugguugcuuuaa

SEQ ID NO: 21043 - RNA, 14 nt, Homo sapiens
uccuuacucuugau

SEQ ID NO: 21044 - RNA, 14 nt, Homo sapiens
acauucuguuaauc

SEQ ID NO: 21045 - RNA, 16 nt, Homo sapiens
ucaaucaguauucaua

SEQ ID NO: 21046 - RNA, 17 nt, Homo sapiens
gcuucugggcagacucu

SEQ ID NO: 21047 - RNA, 20 nt, Homo sapiens
gagaauuuccuuacucuuga

SEQ ID NO: 21048 - RNA, 12 nt, Homo sapiens
caugcucuccaa

SEQ ID NO: 21049 - RNA, 17 nt, Homo sapiens
acauauccuuagcccau

SEQ ID NO: 21050 - RNA, 14 nt, Homo sapiens
auucucuccuguac

SEQ ID NO: 21051 - RNA, 23 nt, Homo sapiens
gagcaucacaguuuugguugcuu

SEQ ID NO: 21052 - RNA, 17 nt, Homo sapiens
agcccggaaacuccaca

SEQ ID NO: 21053 - RNA, 19 nt, Homo sapiens
caugaaguaauaugcacac

SEQ ID NO: 21054 - RNA, 21 nt, Homo sapiens
uuuuagaagauucuauguuaa

SEQ ID NO: 21055 - RNA, 15 nt, Homo sapiens
aaugauuucacagug

SEQ ID NO: 21056 - RNA, 17 nt, Homo sapiens
aagccucuauugccaug

SEQ ID NO: 21057 - RNA, 18 nt, Homo sapiens
aaaugggggugcauuuga

SEQ ID NO: 21058 - RNA, 23 nt, Homo sapiens
ugcacacauuuuuuaaaugcacc

SEQ ID NO: 21059 - RNA, 17 nt, Homo sapiens
ucuuaauucuuagcuca

SEQ ID NO: 21060 - RNA, 23 nt, Homo sapiens
uuuccacauaaggaaacuggguu

SEQ ID NO: 21061 - RNA, 23 nt, Homo sapiens
aauguuaauuaugcaguguuucc

SEQ ID NO: 21062 - RNA, 22 nt, Homo sapiens
guuuuuauggcuuuugugcauu

SEQ ID NO: 21063 - RNA, 20 nt, Homo sapiens
uagaaaacaggcaaauuccu

SEQ ID NO: 21064 - RNA, 18 nt, Homo sapiens
guauucaaacaauuugaa

SEQ ID NO: 21065 - RNA, 16 nt, Homo sapiens
aggagcucccaggagg

SEQ ID NO: 21066 - RNA, 18 nt, Homo sapiens
ucugcuaugcuauugaag

SEQ ID NO: 21067 - RNA, 19 nt, Homo sapiens
acaggaggggaaggcaaca

SEQ ID NO: 21068 - RNA, 18 nt, Homo sapiens
guuaaguaucagcuacaa

SEQ ID NO: 21069 - RNA, 14 nt, Homo sapiens
caccugugagacca

SEQ ID NO: 21070 - RNA, 15 nt, Homo sapiens
auuuuauuaugcaug

SEQ ID NO: 21071 - RNA, 15 nt, Homo sapiens
cuagaauucacucca

SEQ ID NO: 21072 - RNA, 20 nt, Homo sapiens
cugagcccuacugugucuca

SEQ ID NO: 21073 - RNA, 13 nt, Homo sapiens
ugagacacauggg

SEQ ID NO: 21074 - RNA, 20 nt, Homo sapiens
gaaccguuugugauugccau

SEQ ID NO: 21075 - RNA, 15 nt, Homo sapiens
cauuuuuuaaaugca

SEQ ID NO: 21076 - RNA, 17 nt, Homo sapiens
uaaaugggggugcauuu

SEQ ID NO: 21077 - RNA, 15 nt, Homo sapiens
cuauuauauucauuc

SEQ ID NO: 21078 - RNA, 21 nt, Homo sapiens
uagaauucacuccacuuggac

SEQ ID NO: 21079 - RNA, 22 nt, Homo sapiens
uauguuaauauuuuauguguaa

SEQ ID NO: 21080 - RNA, 14 nt, Homo sapiens
uaucccuacuguaa

SEQ ID NO: 21081 - RNA, 20 nt, Homo sapiens
acacuaaaacaccucagcug

SEQ ID NO: 21082 - RNA, 23 nt, Homo sapiens
ugugcauuaucuagauacuguau

SEQ ID NO: 21083 - RNA, 13 nt, Homo sapiens
uaagaaugaaaua

SEQ ID NO: 21084 - RNA, 21 nt, Homo sapiens
uuguuaguaugaggcauuugu

SEQ ID NO: 21085 - RNA, 16 nt, Homo sapiens
ugacuuguacucugaa

SEQ ID NO: 21086 - RNA, 17 nt, Homo sapiens
cugucacggucacuuua

SEQ ID NO: 21087 - RNA, 17 nt, Homo sapiens
cuccagccucagcucuc

SEQ ID NO: 21088 - RNA, 21 nt, Homo sapiens
ucacaguuuugguugcuuuaa

SEQ ID NO: 21089 - RNA, 12 nt, Homo sapiens
acuccacauccu

SEQ ID NO: 21090 - RNA, 22 nt, Homo sapiens
guagcucucugaccuccuccuu

SEQ ID NO: 21091 - RNA, 13 nt, Homo sapiens
gucauuuguuaau

SEQ ID NO: 21092 - RNA, 17 nt, Homo sapiens
gccucaaucaguauuca

SEQ ID NO: 21093 - RNA, 16 nt, Homo sapiens
uucacagcacuuacaa

SEQ ID NO: 21094 - RNA, 15 nt, Homo sapiens
auuccucacuuugaa

SEQ ID NO: 21095 - RNA, 24 nt, Homo sapiens
cacugcuuaacuucacauauugau

SEQ ID NO: 21096 - RNA, 16 nt, Homo sapiens
gcuagaauucacucca

SEQ ID NO: 21097 - RNA, 22 nt, Homo sapiens
uugaauuguaggugacuauuau

SEQ ID NO: 21098 - RNA, 14 nt, Homo sapiens
ucacuccacuugga

SEQ ID NO: 21099 - RNA, 12 nt, Homo sapiens
cacuuacaauuu

SEQ ID NO: 21100 - RNA, 13 nt, Homo sapiens
ggcuuuugugcau

SEQ ID NO: 21101 - RNA, 21 nt, Homo sapiens
uuguacauaaugcgugcauac

SEQ ID NO: 21102 - RNA, 17 nt, Homo sapiens
guuuagaugaaugucag

SEQ ID NO: 21103 - RNA, 16 nt, Homo sapiens
caugucagccacugug

SEQ ID NO: 21104 - RNA, 20 nt, Homo sapiens
aauaaaacuuuuccaaugac

SEQ ID NO: 21105 - RNA, 12 nt, Homo sapiens
accucuccauga

SEQ ID NO: 21106 - RNA, 17 nt, Homo sapiens
uaguuacuaaacaugua

SEQ ID NO: 21107 - RNA, 19 nt, Homo sapiens
cuuuuuccagguuccugag

SEQ ID NO: 21108 - RNA, 14 nt, Homo sapiens
aaaguaaaggcaaa

SEQ ID NO: 21109 - RNA, 20 nt, Homo sapiens
accucccaacgucccuagcc

SEQ ID NO: 21110 - RNA, 18 nt, Homo sapiens
caauuauuugaagauuua

SEQ ID NO: 21111 - RNA, 19 nt, Homo sapiens
gaaccguuugugauugcca

SEQ ID NO: 21112 - RNA, 20 nt, Homo sapiens
uagcauaguaccucugcuau

SEQ ID NO: 21113 - RNA, 17 nt, Homo sapiens
cguuugugauugccauu

SEQ ID NO: 21114 - RNA, 18 nt, Homo sapiens
cucgaggcccuagcauuu

SEQ ID NO: 21115 - RNA, 14 nt, Homo sapiens
caagcaaauggcca

SEQ ID NO: 21116 - RNA, 16 nt, Homo sapiens
cuuccacuuccaagau

SEQ ID NO: 21117 - RNA, 12 nt, Homo sapiens
cuacuugcacac

SEQ ID NO: 21118 - RNA, 17 nt, Homo sapiens
augcucuccaaaccacu

SEQ ID NO: 21119 - RNA, 17 nt, Homo sapiens
uauggcuuuugugcauu

SEQ ID NO: 21120 - RNA, 18 nt, Homo sapiens
agguuuuuaagccuuaaa

SEQ ID NO: 21121 - RNA, 22 nt, Homo sapiens
cugaaccguuugugauugccau

SEQ ID NO: 21122 - RNA, 21 nt, Homo sapiens
uuuugguugcuuuaauaucau

SEQ ID NO: 21123 - RNA, 22 nt, Homo sapiens
auuuccaagaaauauuccuuaa

SEQ ID NO: 21124 - RNA, 15 nt, Homo sapiens
auuuuaugcuuuaaa

SEQ ID NO: 21125 - RNA, 17 nt, Homo sapiens
aauguucuccagucauu

SEQ ID NO: 21126 - RNA, 21 nt, Homo sapiens
gaaaacaugcuacacacugca

SEQ ID NO: 21127 - RNA, 21 nt, Homo sapiens
accuuucagauaacuguuauu

SEQ ID NO: 21128 - RNA, 17 nt, Homo sapiens
gaagauucuauguuaau

SEQ ID NO: 21129 - RNA, 19 nt, Homo sapiens
gccuggauggcugccucac

SEQ ID NO: 21130 - RNA, 17 nt, Homo sapiens
uggcaggaggcauccaa

SEQ ID NO: 21131 - RNA, 23 nt, Homo sapiens
gaaacguauucaaacaauuugaa

SEQ ID NO: 21132 - RNA, 19 nt, Homo sapiens
uaaccaguguuguggauuu

SEQ ID NO: 21133 - RNA, 15 nt, Homo sapiens
ccugagacacauggg

SEQ ID NO: 21134 - RNA, 16 nt, Homo sapiens
ccaguguuguggauuu

SEQ ID NO: 21135 - RNA, 21 nt, Homo sapiens
ugaagcuuuaagaacuaaaau

SEQ ID NO: 21136 - RNA, 16 nt, Homo sapiens
caaugagaucauugug

SEQ ID NO: 21137 - RNA, 23 nt, Homo sapiens
aaugauuucacagugugugguca

SEQ ID NO: 21138 - RNA, 14 nt, Homo sapiens
agaaauguguuauc

SEQ ID NO: 21139 - RNA, 14 nt, Homo sapiens
cuguaucaugacaa

SEQ ID NO: 21140 - RNA, 16 nt, Homo sapiens
cauucacagauaccuc

SEQ ID NO: 21141 - RNA, 17 nt, Homo sapiens
auuuuuuuucuguuaua

SEQ ID NO: 21142 - RNA, 12 nt, Homo sapiens
ucuauguuaaua

SEQ ID NO: 21143 - RNA, 18 nt, Homo sapiens
acaugucagccacuguga

SEQ ID NO: 21144 - RNA, 18 nt, Homo sapiens
aggcacccccagaaugac

SEQ ID NO: 21145 - RNA, 17 nt, Homo sapiens
auggcaggcaucgccau

SEQ ID NO: 21146 - RNA, 16 nt, Homo sapiens
caaucaguauucauau

SEQ ID NO: 21147 - RNA, 19 nt, Homo sapiens
uaguucaaucuggauucau

SEQ ID NO: 21148 - RNA, 18 nt, Homo sapiens
cuuacucuugauuguggg

SEQ ID NO: 21149 - RNA, 17 nt, Homo sapiens
cugaccuccuccuucau

SEQ ID NO: 21150 - RNA, 13 nt, Homo sapiens
uuuuaguugucaa

SEQ ID NO: 21151 - RNA, 17 nt, Homo sapiens
ccugaaagucccagauc

SEQ ID NO: 21152 - RNA, 19 nt, Homo sapiens
auucucuccuguaccucuu

SEQ ID NO: 21153 - RNA, 15 nt, Homo sapiens
cuguucuuuccaaag

SEQ ID NO: 21154 - RNA, 21 nt, Homo sapiens
ugugucucaggugugcccuga

SEQ ID NO: 21155 - RNA, 18 nt, Homo sapiens
cugagcccggaaacucca

SEQ ID NO: 21156 - RNA, 17 nt, Homo sapiens
ucgccauucuugcugaa

SEQ ID NO: 21157 - RNA, 15 nt, Homo sapiens
ucacuggcuguuaau

SEQ ID NO: 21158 - RNA, 22 nt, Homo sapiens
ucaccaucaauuuuaguuguca

SEQ ID NO: 21159 - RNA, 18 nt, Homo sapiens
cagugaggcggauugaga

SEQ ID NO: 21160 - RNA, 18 nt, Homo sapiens
aaagcugaguguuucaca

SEQ ID NO: 21161 - RNA, 13 nt, Homo sapiens
uuauucagaauuu

SEQ ID NO: 21162 - RNA, 16 nt, Homo sapiens
aacgucccuagcccuu

SEQ ID NO: 21163 - RNA, 20 nt, Homo sapiens
acuggcuguuaaucuuucaa

SEQ ID NO: 21164 - RNA, 16 nt, Homo sapiens
auuauauauacuauau

SEQ ID NO: 21165 - RNA, 17 nt, Homo sapiens
ccuggauggcugccuca

SEQ ID NO: 21166 - RNA, 16 nt, Homo sapiens
acuguccccaucauca

SEQ ID NO: 21167 - RNA, 16 nt, Homo sapiens
aaugagaucauuguga

SEQ ID NO: 21168 - RNA, 14 nt, Homo sapiens
uuuugaaaugucaa

SEQ ID NO: 21169 - RNA, 14 nt, Homo sapiens
uacuaauagacaau

SEQ ID NO: 21170 - RNA, 15 nt, Homo sapiens
uaucagcuacaauug

SEQ ID NO: 21171 - RNA, 11 nt, Homo sapiens
caucucugcaa

SEQ ID NO: 21172 - RNA, 13 nt, Homo sapiens
accucucaccucc

SEQ ID NO: 21173 - RNA, 11 nt, Homo sapiens
uggugugauuu

SEQ ID NO: 21174 - RNA, 16 nt, Homo sapiens
uaaguaucagcuacaa

SEQ ID NO: 21175 - RNA, 13 nt, Homo sapiens
gcuaugcauuuga

SEQ ID NO: 21176 - RNA, 16 nt, Homo sapiens
uauuuuaucugcuaug

SEQ ID NO: 21177 - RNA, 12 nt, Homo sapiens
uucaaacuuuac

SEQ ID NO: 21178 - RNA, 12 nt, Homo sapiens
cgugugccugag

SEQ ID NO: 21179 - RNA, 16 nt, Homo sapiens
caugcuacacacugca

SEQ ID NO: 21180 - RNA, 23 nt, Homo sapiens
ccugaaagucccagaucaagccu

SEQ ID NO: 21181 - RNA, 20 nt, Homo sapiens
aagauagaagguuugcagau

SEQ ID NO: 21182 - RNA, 18 nt, Homo sapiens
ggugagguaccagccuug

SEQ ID NO: 21183 - RNA, 20 nt, Homo sapiens
uaaauucccuggccuuucau

SEQ ID NO: 21184 - RNA, 23 nt, Homo sapiens
aagccugccucaaucaguauuca

SEQ ID NO: 21185 - RNA, 13 nt, Homo sapiens
ccggaaacuccac

SEQ ID NO: 21186 - RNA, 20 nt, Homo sapiens
uugauaaucaacugggcuga

SEQ ID NO: 21187 - RNA, 21 nt, Homo sapiens
cuuacguccuuccacuuccaa

SEQ ID NO: 21188 - RNA, 13 nt, Homo sapiens
agccacugugaua

SEQ ID NO: 21189 - RNA, 19 nt, Homo sapiens
uccuuccacuuccaagauc

SEQ ID NO: 21190 - RNA, 13 nt, Homo sapiens
ucccuuggacauu

SEQ ID NO: 21191 - RNA, 15 nt, Homo sapiens
ugcauuuggugguuu

SEQ ID NO: 21192 - RNA, 14 nt, Homo sapiens
acaucucugcaauc

SEQ ID NO: 21193 - RNA, 20 nt, Homo sapiens
uuacguccuuccacuuccaa

SEQ ID NO: 21194 - RNA, 16 nt, Homo sapiens
acacuguuaucuucac

SEQ ID NO: 21195 - RNA, 17 nt, Homo sapiens
aauucacuccacuugga

SEQ ID NO: 21196 - RNA, 21 nt, Homo sapiens
cccagcuagaauucacuccac

SEQ ID NO: 21197 - RNA, 19 nt, Homo sapiens
uguagaauauauuuccuua

SEQ ID NO: 21198 - RNA, 22 nt, Homo sapiens
aaggcuccugagacacaugggu

SEQ ID NO: 21199 - RNA, 15 nt, Homo sapiens
auuuuaucugcuaug

SEQ ID NO: 21200 - RNA, 13 nt, Homo sapiens
aaucuggauucau

SEQ ID NO: 21201 - RNA, 17 nt, Homo sapiens
gagcgcuaccucuccag

SEQ ID NO: 21202 - RNA, 13 nt, Homo sapiens
caucacaguuuug

SEQ ID NO: 21203 - RNA, 21 nt, Homo sapiens
auuuauugaaaugauuucaca

SEQ ID NO: 21204 - RNA, 13 nt, Homo sapiens
ugcuaugcuauug

SEQ ID NO: 21205 - RNA, 18 nt, Homo sapiens
acacuguuaucuucacuu

SEQ ID NO: 21206 - RNA, 21 nt, Homo sapiens
agggaccucuccaugauccca

SEQ ID NO: 21207 - RNA, 15 nt, Homo sapiens
gaagucuucuauuua

SEQ ID NO: 21208 - RNA, 23 nt, Homo sapiens
cagggaaauguaugugugucuau

SEQ ID NO: 21209 - RNA, 18 nt, Homo sapiens
uggauuccucacuuugaa

SEQ ID NO: 21210 - RNA, 13 nt, Homo sapiens
ucuuggggaauau

SEQ ID NO: 21211 - RNA, 17 nt, Homo sapiens
gccugagcggaccuucc

SEQ ID NO: 21212 - RNA, 20 nt, Homo sapiens
guuauuuauaaucacuuuuu

SEQ ID NO: 21213 - RNA, 11 nt, Homo sapiens
cugacugcuag

SEQ ID NO: 21214 - RNA, 15 nt, Homo sapiens
uagcccuuacguccu

SEQ ID NO: 21215 - RNA, 19 nt, Homo sapiens
uccacauccugugggaccu

SEQ ID NO: 21216 - RNA, 14 nt, Homo sapiens
uuccaaugacauuu

SEQ ID NO: 21217 - RNA, 20 nt, Homo sapiens
uauuuauugauguuuucaca

SEQ ID NO: 21218 - RNA, 20 nt, Homo sapiens
ggcccugccaugcucuccaa

SEQ ID NO: 21219 - RNA, 15 nt, Homo sapiens
gauguuucauaagaa

SEQ ID NO: 21220 - RNA, 19 nt, Homo sapiens
ucuccaugaucccaccucc

SEQ ID NO: 21221 - RNA, 18 nt, Homo sapiens
ugcaugaaguaauaugca

SEQ ID NO: 21222 - RNA, 15 nt, Homo sapiens
agcaucacaguuuug

SEQ ID NO: 21223 - RNA, 21 nt, Homo sapiens
aucgucacugcuuaacuucac

SEQ ID NO: 21224 - RNA, 13 nt, Homo sapiens
uuuaugcuuuaaa

SEQ ID NO: 21225 - RNA, 16 nt, Homo sapiens
ugccagccacugugau

SEQ ID NO: 21226 - RNA, 16 nt, Homo sapiens
uuaguaugugcauuua

SEQ ID NO: 21227 - RNA, 23 nt, Homo sapiens
cauauuuaacaaaauuugaauag

SEQ ID NO: 21228 - RNA, 18 nt, Homo sapiens
accguuugugauugccau

SEQ ID NO: 21229 - RNA, 23 nt, Homo sapiens
uugagcuaggggggucagccagc

SEQ ID NO: 21230 - RNA, 22 nt, Homo sapiens
aauccaagaaaauggccaguga

SEQ ID NO: 21231 - RNA, 21 nt, Homo sapiens
gcaacaugccagccacuguga

SEQ ID NO: 21232 - RNA, 16 nt, Homo sapiens
ggaaggcaacauacac

SEQ ID NO: 21233 - RNA, 14 nt, Homo sapiens
ucugccugcccuga

SEQ ID NO: 21234 - RNA, 22 nt, Homo sapiens
caugaucccaccucccauucac

SEQ ID NO: 21235 - RNA, 19 nt, Homo sapiens
aagaaaauggccagugaga

SEQ ID NO: 21236 - RNA, 20 nt, Homo sapiens
ugauugugggauacuauuua

SEQ ID NO: 21237 - RNA, 20 nt, Homo sapiens
agggcuugugugcacauauc

SEQ ID NO: 21238 - RNA, 17 nt, Homo sapiens
aucugacaucucugcaa

SEQ ID NO: 21239 - RNA, 18 nt, Homo sapiens
aaaccacuuuuugcagcu

SEQ ID NO: 21240 - RNA, 13 nt, Homo sapiens
cuuacguccuucc

SEQ ID NO: 21241 - RNA, 14 nt, Homo sapiens
aacuaaacuuucac

SEQ ID NO: 21242 - RNA, 20 nt, Homo sapiens
aaggcuaccuuuguauucuc

SEQ ID NO: 21243 - RNA, 18 nt, Homo sapiens
aauccugauucauauuua

SEQ ID NO: 21244 - RNA, 19 nt, Homo sapiens
aguuuuggaaacguauuca

SEQ ID NO: 21245 - RNA, 19 nt, Homo sapiens
aagccucuauugccaugag

SEQ ID NO: 21246 - RNA, 13 nt, Homo sapiens
ucagccacuguga

SEQ ID NO: 21247 - RNA, 21 nt, Homo sapiens
cucaauguuuagcagauuuaa

SEQ ID NO: 21248 - RNA, 17 nt, Homo sapiens
cugggcugaacacucca

SEQ ID NO: 21249 - RNA, 16 nt, Homo sapiens
caaugacuuacuguac

SEQ ID NO: 21250 - RNA, 23 nt, Homo sapiens
agcuaggggggucagccagcccu

SEQ ID NO: 21251 - RNA, 22 nt, Homo sapiens
auggccagugagaucaauguga

SEQ ID NO: 21252 - RNA, 19 nt, Homo sapiens
cugagacacaugggugcua

SEQ ID NO: 21253 - RNA, 15 nt, Homo sapiens
cugagacacaugggu

SEQ ID NO: 21254 - RNA, 13 nt, Homo sapiens
agcagaaaugccu

SEQ ID NO: 21255 - RNA, 14 nt, Homo sapiens
gccagguaccuucu

SEQ ID NO: 21256 - RNA, 17 nt, Homo sapiens
auuuaauuugaagauag

SEQ ID NO: 21257 - RNA, 16 nt, Homo sapiens
uucucaccugugagac

SEQ ID NO: 21258 - RNA, 22 nt, Homo sapiens
uauuuauugaaaugauuucaca

SEQ ID NO: 21259 - RNA, 18 nt, Homo sapiens
aacugccaucauuuacuu

SEQ ID NO: 21260 - RNA, 21 nt, Homo sapiens
ugauggaaauacacuguuauc

SEQ ID NO: 21261 - RNA, 19 nt, Homo sapiens
gaagccucuauugccauga

SEQ ID NO: 21262 - RNA, 19 nt, Homo sapiens
acaguuuugguugcuuuaa

SEQ ID NO: 21263 - RNA, 22 nt, Homo sapiens
cagcguuucuaugacacaugca

SEQ ID NO: 21264 - RNA, 17 nt, Homo sapiens
uucagauaacuguuauu

SEQ ID NO: 21265 - RNA, 21 nt, Homo sapiens
uaaugguaguuuuacaguguu

SEQ ID NO: 21266 - RNA, 13 nt, Homo sapiens
uggccaaugagau

SEQ ID NO: 21267 - RNA, 15 nt, Homo sapiens
agccccugggaccag

SEQ ID NO: 21268 - RNA, 20 nt, Homo sapiens
uuuagcagauuuaagauaug

SEQ ID NO: 21269 - RNA, 13 nt, Homo sapiens
accuccuccuuca

SEQ ID NO: 21270 - RNA, 14 nt, Homo sapiens
ucacuggcuguuaa

SEQ ID NO: 21271 - RNA, 18 nt, Homo sapiens
auggcaggaggcauccaa

SEQ ID NO: 21272 - RNA, 16 nt, Homo sapiens
ugcuauuugcuguuau

SEQ ID NO: 21273 - RNA, 16 nt, Homo sapiens
ccucucccaacuauaa

SEQ ID NO: 21274 - RNA, 20 nt, Homo sapiens
auucauauuuauagccaggu

SEQ ID NO: 21275 - RNA, 17 nt, Homo sapiens
ucuaugagggcuaauau

SEQ ID NO: 21276 - RNA, 19 nt, Homo sapiens
cucugcuauuugcuguuau

SEQ ID NO: 21277 - RNA, 20 nt, Homo sapiens
uuugcagauauucucuaguc

SEQ ID NO: 21278 - RNA, 16 nt, Homo sapiens
cugugucucaggugug

SEQ ID NO: 21279 - RNA, 20 nt, Homo sapiens
ucacagauaccucucuugua

SEQ ID NO: 21280 - RNA, 14 nt, Homo sapiens
ggagccugcaacau

SEQ ID NO: 21281 - RNA, 13 nt, Homo sapiens
ucacuuuacuguc

SEQ ID NO: 21282 - RNA, 21 nt, Homo sapiens
aacaccaggauuuaaguuuca

SEQ ID NO: 21283 - RNA, 13 nt, Homo sapiens
uauauuuccuuau

SEQ ID NO: 21284 - RNA, 12 nt, Homo sapiens
caucuuucaagg

SEQ ID NO: 21285 - RNA, 19 nt, Homo sapiens
uaagucuguuuuaugacuu

SEQ ID NO: 21286 - RNA, 15 nt, Homo sapiens
ccaugagaguucugu

SEQ ID NO: 21287 - RNA, 13 nt, Homo sapiens
cccagauaccaug

SEQ ID NO: 21288 - RNA, 15 nt, Homo sapiens
auuuuagcuacuaua

SEQ ID NO: 21289 - RNA, 16 nt, Homo sapiens
aaacuaguuacuaaac

SEQ ID NO: 21290 - RNA, 23 nt, Homo sapiens
cuccugagacacaugggugcuau

SEQ ID NO: 21291 - RNA, 12 nt, Homo sapiens
augauuucacag

SEQ ID NO: 21292 - RNA, 15 nt, Homo sapiens
uccuggauuccucac

SEQ ID NO: 21293 - RNA, 11 nt, Homo sapiens
uaugcauuuga

SEQ ID NO: 21294 - RNA, 20 nt, Homo sapiens
gcaaaguaucccuacuguaa

SEQ ID NO: 21295 - RNA, 20 nt, Homo sapiens
ccaggcacccccagaaugac

SEQ ID NO: 21296 - RNA, 20 nt, Homo sapiens
uucagcucagcuaaugaagu

SEQ ID NO: 21297 - RNA, 16 nt, Homo sapiens
aagauucuauguuaau

SEQ ID NO: 21298 - RNA, 22 nt, Homo sapiens
cacacucucccauuauauuuau

SEQ ID NO: 21299 - RNA, 17 nt, Homo sapiens
aucucauuuaauccucu

SEQ ID NO: 21300 - RNA, 14 nt, Homo sapiens
uagaugaaugucag

SEQ ID NO: 21301 - RNA, 16 nt, Homo sapiens
auaguaccucugcuau

SEQ ID NO: 21302 - RNA, 21 nt, Homo sapiens
cauacacaccccggacuccuc

SEQ ID NO: 21303 - RNA, 14 nt, Homo sapiens
agccucagcucuca

SEQ ID NO: 21304 - RNA, 15 nt, Homo sapiens
gauauucucuaguca

SEQ ID NO: 21305 - RNA, 21 nt, Homo sapiens
cucagcuaaugaaguguuuag

SEQ ID NO: 21306 - RNA, 13 nt, Homo sapiens
aaggagauuuaca

SEQ ID NO: 21307 - RNA, 12 nt, Homo sapiens
agauaccucucu

SEQ ID NO: 21308 - RNA, 22 nt, Homo sapiens
aacuuuuauaaacuuuaccuuu

SEQ ID NO: 21309 - RNA, 14 nt, Homo sapiens
aucuucacuuuuau

SEQ ID NO: 21310 - RNA, 23 nt, Homo sapiens
uuuagcauaguaccucugcuauu

SEQ ID NO: 21311 - RNA, 20 nt, Homo sapiens
acuguccuauuauauucauu

SEQ ID NO: 21312 - RNA, 15 nt, Homo sapiens
uucuuguaaggcaua

SEQ ID NO: 21313 - RNA, 14 nt, Homo sapiens
ccucucaaccaccu

SEQ ID NO: 21314 - RNA, 20 nt, Homo sapiens
cuuacguccuuccacuucca

SEQ ID NO: 21315 - RNA, 14 nt, Homo sapiens
ccucuauugccaug

SEQ ID NO: 21316 - RNA, 22 nt, Homo sapiens
auuucugaggagccugcaacau

SEQ ID NO: 21317 - RNA, 20 nt, Homo sapiens
aacaugccagccacugugau

SEQ ID NO: 21318 - RNA, 17 nt, Homo sapiens
ccagucauuauguuaau

SEQ ID NO: 21319 - RNA, 23 nt, Homo sapiens
ggcccuggccuagcauacguaca

SEQ ID NO: 21320 - RNA, 16 nt, Homo sapiens
uuauaguaaugugacu

SEQ ID NO: 21321 - RNA, 17 nt, Homo sapiens
cacaccccagacgaugu

SEQ ID NO: 21322 - RNA, 16 nt, Homo sapiens
acauguauguaaauag

SEQ ID NO: 21323 - RNA, 16 nt, Homo sapiens
caagaccacguuucua

SEQ ID NO: 21324 - RNA, 15 nt, Homo sapiens
acaguguuucuggcu

SEQ ID NO: 21325 - RNA, 17 nt, Homo sapiens
uauacauaaacaagacc

SEQ ID NO: 21326 - RNA, 17 nt, Homo sapiens
auguuuagcagauuuaa

SEQ ID NO: 21327 - RNA, 15 nt, Homo sapiens
aauaucuuaucuucc

SEQ ID NO: 21328 - RNA, 13 nt, Homo sapiens
cugccucaccucu

SEQ ID NO: 21329 - RNA, 19 nt, Homo sapiens
cuacaaaauauagcuuuca

SEQ ID NO: 21330 - RNA, 20 nt, Homo sapiens
uguaauuugugauacaaugc

SEQ ID NO: 21331 - RNA, 23 nt, Homo sapiens
acucuauaaauaaaaccugacag

SEQ ID NO: 21332 - RNA, 20 nt, Homo sapiens
cacuugguucuuguacucua

SEQ ID NO: 21333 - RNA, 22 nt, Homo sapiens
auaaaucgcuuuugauaaucaa

SEQ ID NO: 21334 - RNA, 14 nt, Homo sapiens
ucccaacuauaaaa

SEQ ID NO: 21335 - RNA, 19 nt, Homo sapiens
uuguauucucuccuguacc

SEQ ID NO: 21336 - RNA, 12 nt, Homo sapiens
gaauuuccuuac

SEQ ID NO: 21337 - RNA, 13 nt, Homo sapiens
cuugaauuguagg

SEQ ID NO: 21338 - RNA, 22 nt, Homo sapiens
gaagcauuuuauaaaucgcuuu

SEQ ID NO: 21339 - RNA, 16 nt, Homo sapiens
cagugagaucaaugug

SEQ ID NO: 21340 - RNA, 22 nt, Homo sapiens
gacugaguacguugugcauuug

SEQ ID NO: 21341 - RNA, 19 nt, Homo sapiens
agguaccagccuuggauac

SEQ ID NO: 21342 - RNA, 17 nt, Homo sapiens
caaguuguuugagaaau

SEQ ID NO: 21343 - RNA, 22 nt, Homo sapiens
ggaaucacuggcuguuaaucuu

SEQ ID NO: 21344 - RNA, 18 nt, Homo sapiens
cauaucacaugucagcca

SEQ ID NO: 21345 - RNA, 21 nt, Homo sapiens
caucuuucaagggaccucucc

SEQ ID NO: 21346 - RNA, 17 nt, Homo sapiens
aauuauauauacuauau

SEQ ID NO: 21347 - RNA, 22 nt, Homo sapiens
acucuacaaaauauagcuuuca

SEQ ID NO: 21348 - RNA, 19 nt, Homo sapiens
cuuucagauaacuguuauu

SEQ ID NO: 21349 - RNA, 18 nt, Homo sapiens
ugagacacaugggugcua

SEQ ID NO: 21350 - RNA, 15 nt, Homo sapiens
auaguggugugauuu

SEQ ID NO: 21351 - RNA, 19 nt, Homo sapiens
aaauucccuggccuuucau

SEQ ID NO: 21352 - RNA, 21 nt, Homo sapiens
cccagggcuugugugcacaua

SEQ ID NO: 21353 - RNA, 13 nt, Homo sapiens
cccgugugccuga

SEQ ID NO: 21354 - RNA, 18 nt, Homo sapiens
auuucuaaaucuccaaaa

SEQ ID NO: 21355 - RNA, 15 nt, Homo sapiens
gaaagucccagauca

SEQ ID NO: 21356 - RNA, 14 nt, Homo sapiens
uaaugugacuugga

SEQ ID NO: 21357 - RNA, 20 nt, Homo sapiens
ggaaauauuuuaauguuucu

SEQ ID NO: 21358 - RNA, 22 nt, Homo sapiens
gaccauaaccccggaagccaaa

SEQ ID NO: 21359 - RNA, 23 nt, Homo sapiens
ugggauacuauuuaauuauuuca

SEQ ID NO: 21360 - RNA, 14 nt, Homo sapiens
cgcuuaagcuuuca

SEQ ID NO: 21361 - RNA, 18 nt, Homo sapiens
gacauuuuaugucuuucu

SEQ ID NO: 21362 - RNA, 12 nt, Homo sapiens
ucuauugccaug

SEQ ID NO: 21363 - RNA, 19 nt, Homo sapiens
uaagauauuaacugagaag

SEQ ID NO: 21364 - RNA, 14 nt, Homo sapiens
aaacauguauguaa

SEQ ID NO: 21365 - RNA, 15 nt, Homo sapiens
ccaucauuuacuuuu

SEQ ID NO: 21366 - RNA, 19 nt, Homo sapiens
ccugagcggaccuucccag

SEQ ID NO: 21367 - RNA, 19 nt, Homo sapiens
uaaaugggggugcauuuga

SEQ ID NO: 21368 - RNA, 16 nt, Homo sapiens
acuguaauuugugaua

SEQ ID NO: 21369 - RNA, 13 nt, Homo sapiens
gcuaugcuauuga

SEQ ID NO: 21370 - RNA, 16 nt, Homo sapiens
uaucaauccaagaacu

SEQ ID NO: 21371 - RNA, 16 nt, Homo sapiens
aaaauaccagccagua

SEQ ID NO: 21372 - RNA, 16 nt, Homo sapiens
agaaaauggccaguga

SEQ ID NO: 21373 - RNA, 17 nt, Homo sapiens
cuuagcccaucuuucaa

SEQ ID NO: 21374 - RNA, 18 nt, Homo sapiens
uuuaaaguaaaggcaaac

SEQ ID NO: 21375 - RNA, 17 nt, Homo sapiens
guuauuuuaucugcuau

SEQ ID NO: 21376 - RNA, 18 nt, Homo sapiens
acuguuauuuauaaucac

SEQ ID NO: 21377 - RNA, 21 nt, Homo sapiens
ucauucuuuuugaaaugucaa

SEQ ID NO: 21378 - RNA, 16 nt, Homo sapiens
cauuucucauguugaa

SEQ ID NO: 21379 - RNA, 22 nt, Homo sapiens
cuucucagaaggcaaaugacuu

SEQ ID NO: 21380 - RNA, 16 nt, Homo sapiens
ugucagccacugugau

SEQ ID NO: 21381 - RNA, 17 nt, Homo sapiens
ugcccuaaaguguauuu

SEQ ID NO: 21382 - RNA, 15 nt, Homo sapiens
augauuucacagugu

SEQ ID NO: 21383 - RNA, 16 nt, Homo sapiens
aagaacuuauuuguac

SEQ ID NO: 21384 - RNA, 18 nt, Homo sapiens
cuauaaaacuaggugcug

SEQ ID NO: 21385 - RNA, 18 nt, Homo sapiens
uaacucuaccugcacacu

SEQ ID NO: 21386 - RNA, 16 nt, Homo sapiens
ucugaccuccuccuuc

SEQ ID NO: 21387 - RNA, 21 nt, Homo sapiens
cugugucucaggugugcccug

SEQ ID NO: 21388 - RNA, 19 nt, Homo sapiens
ucucuagucauuuguuaau

SEQ ID NO: 21389 - RNA, 14 nt, Homo sapiens
uauguaaauagcua

SEQ ID NO: 21390 - RNA, 16 nt, Homo sapiens
uguaaauagcuaagau

SEQ ID NO: 21391 - RNA, 22 nt, Homo sapiens
ccuccuccuucauggcaggcau

SEQ ID NO: 21392 - RNA, 21 nt, Homo sapiens
gagcuaggggggucagccagc

SEQ ID NO: 21393 - RNA, 12 nt, Homo sapiens
ccucaccucuca

SEQ ID NO: 21394 - RNA, 14 nt, Homo sapiens
ugccugcccugaaa

SEQ ID NO: 21395 - RNA, 15 nt, Homo sapiens
gucggaaaacaugcu

SEQ ID NO: 21396 - RNA, 13 nt, Homo sapiens
auagacaauuuau

SEQ ID NO: 21397 - RNA, 18 nt, Homo sapiens
ugaguacguugugcauuu

SEQ ID NO: 21398 - RNA, 21 nt, Homo sapiens
auacuauuuaauuauuucacu

SEQ ID NO: 21399 - RNA, 16 nt, Homo sapiens
gggcaagggaccugcu

SEQ ID NO: 21400 - RNA, 23 nt, Homo sapiens
gaaauacacuguuaucuucacuu

SEQ ID NO: 21401 - RNA, 20 nt, Homo sapiens
cuuuacuguccccaucauca

SEQ ID NO: 21402 - RNA, 17 nt, Homo sapiens
ucagaucucuaacuuca

SEQ ID NO: 21403 - RNA, 21 nt, Homo sapiens
ccugagcggaccuucccagcu

SEQ ID NO: 21404 - RNA, 19 nt, Homo sapiens
uccaaaggcuccugagaca

SEQ ID NO: 21405 - RNA, 19 nt, Homo sapiens
gagcuaggggggucagcca

SEQ ID NO: 21406 - RNA, 16 nt, Homo sapiens
acaugucagccacugu

SEQ ID NO: 21407 - RNA, 22 nt, Homo sapiens
agcucuaucccaaccucuccca

SEQ ID NO: 21408 - RNA, 21 nt, Homo sapiens
aauguucuccagucauuaugu

SEQ ID NO: 21409 - RNA, 19 nt, Homo sapiens
uggacaugggccccagaua

SEQ ID NO: 21410 - RNA, 12 nt, Homo sapiens
uuaucugcuaug

SEQ ID NO: 21411 - RNA, 23 nt, Homo sapiens
aguacacuguuucaaacuuuacu

SEQ ID NO: 21412 - RNA, 19 nt, Homo sapiens
cauaaccccggaagccaaa

SEQ ID NO: 21413 - RNA, 16 nt, Homo sapiens
cauguauuuguuugca

SEQ ID NO: 21414 - RNA, 15 nt, Homo sapiens
aaggcuccugagaca

SEQ ID NO: 21415 - RNA, 16 nt, Homo sapiens
caguaguuagcuuucu

SEQ ID NO: 21416 - RNA, 22 nt, Homo sapiens
agccuuuguugcuaucaaucca

SEQ ID NO: 21417 - RNA, 15 nt, Homo sapiens
ugauuucacagugug

SEQ ID NO: 21418 - RNA, 23 nt, Homo sapiens
aucaccaucaauuuuaguuguca

SEQ ID NO: 21419 - RNA, 21 nt, Homo sapiens
ugcuguuauuuuaucugcuau

SEQ ID NO: 21420 - RNA, 18 nt, Homo sapiens
ugccaucauuuacuuuua

SEQ ID NO: 21421 - RNA, 14 nt, Homo sapiens
gaaaguuuuggaaa

SEQ ID NO: 21422 - RNA, 16 nt, Homo sapiens
cacacuguccuauuau

SEQ ID NO: 21423 - RNA, 12 nt, Homo sapiens
ugugauugccau

SEQ ID NO: 21424 - RNA, 15 nt, Homo sapiens
aaugggggugcauuu

SEQ ID NO: 21425 - RNA, 18 nt, Homo sapiens
agcucuaucccaaccucu

SEQ ID NO: 21426 - RNA, 21 nt, Homo sapiens
ccaguaaaugggggugcauuu

SEQ ID NO: 21427 - RNA, 11 nt, Homo sapiens
uuccugcaaug

SEQ ID NO: 21428 - RNA, 16 nt, Homo sapiens
uucuuguacucuacaa

SEQ ID NO: 21429 - RNA, 16 nt, Homo sapiens
aaauggccaaugagau

SEQ ID NO: 21430 - RNA, 15 nt, Homo sapiens
cauaagaauucuguu

SEQ ID NO: 21431 - RNA, 15 nt, Homo sapiens
gaugaaugucaguug

SEQ ID NO: 21432 - RNA, 15 nt, Homo sapiens
cuuuuaaacuuugau

SEQ ID NO: 21433 - RNA, 19 nt, Homo sapiens
uuucuggcuaugcauuuga

SEQ ID NO: 21434 - RNA, 18 nt, Homo sapiens
caucuuucaagggaccuc

SEQ ID NO: 21435 - RNA, 22 nt, Homo sapiens
cauuugagcucuggaagccucu

SEQ ID NO: 21436 - RNA, 11 nt, Homo sapiens
uuuuuuaaaaa

SEQ ID NO: 21437 - RNA, 13 nt, Homo sapiens
uguguaaguagau

SEQ ID NO: 21438 - RNA, 13 nt, Homo sapiens
uggcaauagucaa

SEQ ID NO: 21439 - RNA, 16 nt, Homo sapiens
ugcuucuguuuuauaa

SEQ ID NO: 21440 - RNA, 13 nt, Homo sapiens
ugcuguauuuuaa

SEQ ID NO: 21441 - RNA, 20 nt, Homo sapiens
uuuguauaaaauaauuuuua

SEQ ID NO: 21442 - RNA, 19 nt, Homo sapiens
uuugcuaagcauuccaacu

SEQ ID NO: 21443 - RNA, 23 nt, Homo sapiens
uuugcuaagcauuccaacuaucu

SEQ ID NO: 21444 - RNA, 19 nt, Homo sapiens
uuucucuaggaaauauuua

SEQ ID NO: 21445 - RNA, 23 nt, Homo sapiens
uuucaaacauauauaacaaugcu

SEQ ID NO: 21446 - RNA, 21 nt, Homo sapiens
uuggagaagaacugaaaucau

SEQ ID NO: 21447 - RNA, 13 nt, Homo sapiens
uucuaugaaauau

SEQ ID NO: 21448 - RNA, 14 nt, Homo sapiens
uuauauuugaaaua

SEQ ID NO: 21449 - RNA, 18 nt, Homo sapiens
uuacauuuguauaaaaua

SEQ ID NO: 21450 - RNA, 16 nt, Homo sapiens
uguuuuaggaauacau

SEQ ID NO: 21451 - RNA, 13 nt, Homo sapiens
uauaauuuuguga

SEQ ID NO: 21452 - RNA, 17 nt, Homo sapiens
uagucucuaucauuaaa

SEQ ID NO: 21453 - RNA, 22 nt, Homo sapiens
uagugaaacucguuaauuugua

SEQ ID NO: 21454 - RNA, 13 nt, Homo sapiens
uaucacuugucaa

SEQ ID NO: 21455 - RNA, 13 nt, Homo sapiens
uaguaauuggaaa

SEQ ID NO: 21456 - RNA, 13 nt, Homo sapiens
uaggaaauauuua

SEQ ID NO: 21457 - RNA, 17 nt, Homo sapiens
uagauguauagguugau

SEQ ID NO: 21458 - RNA, 14 nt, Homo sapiens
uaaaguucuaguga

SEQ ID NO: 21459 - RNA, 14 nt, Homo sapiens
uaaaagaaugauua

SEQ ID NO: 21460 - RNA, 15 nt, Homo sapiens
uaaugauaacuggaa

SEQ ID NO: 21461 - RNA, 16 nt, Homo sapiens
uaaggggaauugagga

SEQ ID NO: 21462 - RNA, 11 nt, Homo sapiens
uaagaaaauau

SEQ ID NO: 21463 - RNA, 16 nt, Homo sapiens
ucagaaaacaaggaug

SEQ ID NO: 21464 - RNA, 17 nt, Homo sapiens
uaugccccauucaacau

SEQ ID NO: 21465 - RNA, 13 nt, Homo sapiens
ucauuaaaguucu

SEQ ID NO: 21466 - RNA, 15 nt, Homo sapiens
ugccccggggagggg

SEQ ID NO: 21467 - RNA, 14 nt, Homo sapiens
ugcacaucaaaaua

SEQ ID NO: 21468 - RNA, 16 nt, Homo sapiens
ugcauuauauuuauua

SEQ ID NO: 21469 - RNA, 17 nt, Homo sapiens
ugcauuuaauuuauuga

SEQ ID NO: 21470 - RNA, 13 nt, Homo sapiens
ugcaaauugucac

SEQ ID NO: 21471 - RNA, 14 nt, Homo sapiens
ugcaaauugucaca

SEQ ID NO: 21472 - RNA, 18 nt, Homo sapiens
ugaucagcuuauugucua

SEQ ID NO: 21473 - RNA, 11 nt, Homo sapiens
ucgcuuccgca

SEQ ID NO: 21474 - RNA, 12 nt, Homo sapiens
ucgcuuccgcau

SEQ ID NO: 21475 - RNA, 19 nt, Homo sapiens
ucgcuuccgcauccuaguc

SEQ ID NO: 21476 - RNA, 12 nt, Homo sapiens
ucucaauauuuc

SEQ ID NO: 21477 - RNA, 13 nt, Homo sapiens
ucucaauauuuca

SEQ ID NO: 21478 - RNA, 18 nt, Homo sapiens
ucuaucauuaaaguucua

SEQ ID NO: 21479 - RNA, 19 nt, Homo sapiens
ucuaugaaauauuauguua

SEQ ID NO: 21480 - RNA, 14 nt, Homo sapiens
ucuaccaaaaaucu

SEQ ID NO: 21481 - RNA, 16 nt, Homo sapiens
ucucuaggaaauauuu

SEQ ID NO: 21482 - RNA, 13 nt, Homo sapiens
ucugaagaagaug

SEQ ID NO: 21483 - RNA, 15 nt, Homo sapiens
gaaguaaauguuguu

SEQ ID NO: 21484 - RNA, 20 nt, Homo sapiens
gaaauauuuauuuuaauaau

SEQ ID NO: 21485 - RNA, 14 nt, Homo sapiens
gaacugaaaucaua

SEQ ID NO: 21486 - RNA, 21 nt, Homo sapiens
gaucaguaugaaaaugucauu

SEQ ID NO: 21487 - RNA, 13 nt, Homo sapiens
gcgcucgcuuccg

SEQ ID NO: 21488 - RNA, 21 nt, Homo sapiens
gcauccuagucucuaucauua

SEQ ID NO: 21489 - RNA, 17 nt, Homo sapiens
gggcauggguuuuauua

SEQ ID NO: 21490 - RNA, 18 nt, Homo sapiens
gggcauggguuuuauuau

SEQ ID NO: 21491 - RNA, 23 nt, Homo sapiens
gggcgcucgcuuccgcauccuag

SEQ ID NO: 21492 - RNA, 17 nt, Homo sapiens
gugcauauuuuauuaua

SEQ ID NO: 21493 - RNA, 16 nt, Homo sapiens
guuaugauuaaguaau

SEQ ID NO: 21494 - RNA, 14 nt, Homo sapiens
gugugggcaauguu

SEQ ID NO: 21495 - RNA, 11 nt, Homo sapiens
guuauuuuuaa

SEQ ID NO: 21496 - RNA, 19 nt, Homo sapiens
guugacaugggacauuugc

SEQ ID NO: 21497 - RNA, 12 nt, Homo sapiens
gcauauuuuauu

SEQ ID NO: 21498 - RNA, 14 nt, Homo sapiens
gcauuuaauuuauu

SEQ ID NO: 21499 - RNA, 16 nt, Homo sapiens
gcaguucugaagaaga

SEQ ID NO: 21500 - RNA, 16 nt, Homo sapiens
gccaugugcuaguaau

SEQ ID NO: 21501 - RNA, 20 nt, Homo sapiens
gccucagaaaacaaggauga

SEQ ID NO: 21502 - RNA, 18 nt, Homo sapiens
gacggagccgggaaagaa

SEQ ID NO: 21503 - RNA, 22 nt, Homo sapiens
acaagacugcacaucaaaauau

SEQ ID NO: 21504 - RNA, 13 nt, Homo sapiens
aauuggagcucgu

SEQ ID NO: 21505 - RNA, 14 nt, Homo sapiens
gaauaucaguuauu

SEQ ID NO: 21506 - RNA, 16 nt, Homo sapiens
gaagcaccaaucauga

SEQ ID NO: 21507 - RNA, 14 nt, Homo sapiens
cuaagcauuccaac

SEQ ID NO: 21508 - RNA, 14 nt, Homo sapiens
cgcucgcuuccgca

SEQ ID NO: 21509 - RNA, 20 nt, Homo sapiens
cuagucucuaucauuaaagu

SEQ ID NO: 21510 - RNA, 22 nt, Homo sapiens
cugauaugggucuugauaaaug

SEQ ID NO: 21511 - RNA, 21 nt, Homo sapiens
cucuaggaaauauuuauuuua

SEQ ID NO: 21512 - RNA, 17 nt, Homo sapiens
cuucuuucaugaagggg

SEQ ID NO: 21513 - RNA, 17 nt, Homo sapiens
cuucagcgguuuauaua

SEQ ID NO: 21514 - RNA, 12 nt, Homo sapiens
cuguaagaaaau

SEQ ID NO: 21515 - RNA, 16 nt, Homo sapiens
gaaauauuuauuuuaa

SEQ ID NO: 21516 - RNA, 19 nt, Homo sapiens
guaugaaaaugucauuguu

SEQ ID NO: 21517 - RNA, 21 nt, Homo sapiens
guagaggguguguaaguagau

SEQ ID NO: 21518 - RNA, 19 nt, Homo sapiens
guauuucuaugaaauauua

SEQ ID NO: 21519 - RNA, 20 nt, Homo sapiens
guauuuuaaaagaaugauua

SEQ ID NO: 21520 - RNA, 19 nt, Homo sapiens
gggcauggguuuuauuaua

SEQ ID NO: 21521 - RNA, 24 nt, Homo sapiens
gggcgcucgcuuccgcauccuagu

SEQ ID NO: 21522 - RNA, 13 nt, Homo sapiens
ugaagaaguugau

SEQ ID NO: 21523 - RNA, 15 nt, Homo sapiens
ugaauuacauuugua

SEQ ID NO: 21524 - RNA, 22 nt, Homo sapiens
ucucuccucuccccaugauguu

SEQ ID NO: 21525 - RNA, 23 nt, Homo sapiens
ucucuccucuccccaugauguuu

SEQ ID NO: 21526 - RNA, 12 nt, Homo sapiens
ucuaaaugucaa

SEQ ID NO: 21527 - RNA, 12 nt, Homo sapiens
ugcaaauuguca

SEQ ID NO: 21528 - RNA, 21 nt, Homo sapiens
ugccucagaaaacaaggauga

SEQ ID NO: 21529 - RNA, 13 nt, Homo sapiens
ugcauuauauuua

SEQ ID NO: 21530 - RNA, 13 nt, Homo sapiens
ucgcgcgccuccg

SEQ ID NO: 21531 - RNA, 18 nt, Homo sapiens
ucgcuuccgcauccuagu

SEQ ID NO: 21532 - RNA, 20 nt, Homo sapiens
ucgcuuccgcauccuagucu

SEQ ID NO: 21533 - RNA, 13 nt, Homo sapiens
ucauggaauugga

SEQ ID NO: 21534 - RNA, 21 nt, Homo sapiens
ucauuaaauggaaguaaaugu

SEQ ID NO: 21535 - RNA, 22 nt, Homo sapiens
ucauuaaauggaaguaaauguu

SEQ ID NO: 21536 - RNA, 18 nt, Homo sapiens
ucaaucagccuaguugau

SEQ ID NO: 21537 - RNA, 14 nt, Homo sapiens
ucaaacauauauaa

SEQ ID NO: 21538 - RNA, 17 nt, Homo sapiens
ucacaggggacaggaug

SEQ ID NO: 21539 - RNA, 15 nt, Homo sapiens
uauuuuuuuuuuuaa

SEQ ID NO: 21540 - RNA, 16 nt, Homo sapiens
uauguuaaaacuggga

SEQ ID NO: 21541 - RNA, 12 nt, Homo sapiens
uaugaaauauua

SEQ ID NO: 21542 - RNA, 22 nt, Homo sapiens
uaguguuggagaagaacugaaa

SEQ ID NO: 21543 - RNA, 13 nt, Homo sapiens
uauaaaauaauuu

SEQ ID NO: 21544 - RNA, 12 nt, Homo sapiens
uauaauuuugug

SEQ ID NO: 21545 - RNA, 23 nt, Homo sapiens
uauaauuuugugaagcaaaauuu

SEQ ID NO: 21546 - RNA, 23 nt, Homo sapiens
uagucacuaguuguaauuuuuuu

SEQ ID NO: 21547 - RNA, 15 nt, Homo sapiens
uaauguuucaaacau

SEQ ID NO: 21548 - RNA, 16 nt, Homo sapiens
uaaugauaacuggaaa

SEQ ID NO: 21549 - RNA, 13 nt, Homo sapiens
uacgcgcgcuccg

SEQ ID NO: 21550 - RNA, 15 nt, Homo sapiens
gugcauauuuuauua

SEQ ID NO: 21551 - RNA, 16 nt, Homo sapiens
gugcauauuuuauuau

SEQ ID NO: 21552 - RNA, 14 nt, Homo sapiens
uaaaauaauuuuua

SEQ ID NO: 21553 - RNA, 20 nt, Homo sapiens
guuuugcaagccagauuuuc

SEQ ID NO: 21554 - RNA, 13 nt, Homo sapiens
cagcuuauugucu

SEQ ID NO: 21555 - RNA, 17 nt, Homo sapiens
caggaaccacaagacug

SEQ ID NO: 21556 - RNA, 14 nt, Homo sapiens
cauuuguauaaaau

SEQ ID NO: 21557 - RNA, 15 nt, Homo sapiens
cauuuguauaaaaua

SEQ ID NO: 21558 - RNA, 22 nt, Homo sapiens
ccacagcuguaugauucccagc

SEQ ID NO: 21559 - RNA, 14 nt, Homo sapiens
cauuauauuuauua

SEQ ID NO: 21560 - RNA, 13 nt, Homo sapiens
cauuaaaguucua

SEQ ID NO: 21561 - RNA, 11 nt, Homo sapiens
ccuaauuuguu

SEQ ID NO: 21562 - RNA, 15 nt, Homo sapiens
ccuagggugauauua

SEQ ID NO: 21563 - RNA, 12 nt, Homo sapiens
ccuuuucccaac

SEQ ID NO: 21564 - RNA, 22 nt, Homo sapiens
ccucagaaaacaaggaugaauu

SEQ ID NO: 21565 - RNA, 12 nt, Homo sapiens
ccuccagcugcc

SEQ ID NO: 21566 - RNA, 13 nt, Homo sapiens
cucuaggaaauau

SEQ ID NO: 21567 - RNA, 17 nt, Homo sapiens
cucuaggaaauauuuau

SEQ ID NO: 21568 - RNA, 21 nt, Homo sapiens
cugauaugggucuugauaaau

SEQ ID NO: 21569 - RNA, 16 nt, Homo sapiens
cuucuuucaugaaggg

SEQ ID NO: 21570 - RNA, 18 nt, Homo sapiens
cuucagcgguuuauauaa

SEQ ID NO: 21571 - RNA, 15 nt, Homo sapiens
cgcucgcuuccgcau

SEQ ID NO: 21572 - RNA, 12 nt, Homo sapiens
cgcucaucccac

SEQ ID NO: 21573 - RNA, 13 nt, Homo sapiens
cgcucaucccacc

SEQ ID NO: 21574 - RNA, 14 nt, Homo sapiens
uguauuuuaaaaga

SEQ ID NO: 21575 - RNA, 20 nt, Homo sapiens
ugucaauaaaauccauacau

SEQ ID NO: 21576 - RNA, 20 nt, Homo sapiens
uucaaauccuugaagauuua

SEQ ID NO: 21577 - RNA, 15 nt, Homo sapiens
uuauauuugaaauau

SEQ ID NO: 21578 - RNA, 16 nt, Homo sapiens
uuauauuugaaauauu

SEQ ID NO: 21579 - RNA, 24 nt, Homo sapiens
uuagcuggaaaaguauguuagugc

SEQ ID NO: 21580 - RNA, 18 nt, Homo sapiens
uuaccacuuguguuuugc

SEQ ID NO: 21581 - RNA, 14 nt, Homo sapiens
uucuaugaaauauu

SEQ ID NO: 21582 - RNA, 21 nt, Homo sapiens
uuccaagcaaguauuagaaua

SEQ ID NO: 21583 - RNA, 16 nt, Homo sapiens
accagucugacuguuu

SEQ ID NO: 21584 - RNA, 21 nt, Homo sapiens
uugaugaagaaguugauaugc

SEQ ID NO: 21585 - RNA, 12 nt, Homo sapiens
agauccuggaaa

SEQ ID NO: 21586 - RNA, 15 nt, Homo sapiens
agauaaucacaauac

SEQ ID NO: 21587 - RNA, 15 nt, Homo sapiens
agaaaauaucacuug

SEQ ID NO: 21588 - RNA, 15 nt, Homo sapiens
agaagaacugaaauc

SEQ ID NO: 21589 - RNA, 20 nt, Homo sapiens
agccagauuuuccugaaaac

SEQ ID NO: 21590 - RNA, 12 nt, Homo sapiens
uuuuuuaaaaaa

SEQ ID NO: 21591 - RNA, 21 nt, Homo sapiens
uuugcuaagcauuccaacuau

SEQ ID NO: 21592 - RNA, 16 nt, Homo sapiens
uuucuaugaaauauua

SEQ ID NO: 21593 - RNA, 19 nt, Homo sapiens
uuuauauuugaaauauuga

SEQ ID NO: 21594 - RNA, 12 nt, Homo sapiens
uuuagcuggaaa

SEQ ID NO: 21595 - RNA, 21 nt, Homo sapiens
acguauugcauuuaauuuauu

SEQ ID NO: 21596 - RNA, 14 nt, Homo sapiens
acugcauuauauuu

SEQ ID NO: 21597 - RNA, 15 nt, Homo sapiens
acugcauuauauuua

SEQ ID NO: 21598 - RNA, 13 nt, Homo sapiens
acucuuaagaaga

SEQ ID NO: 21599 - RNA, 20 nt, Homo sapiens
aucaggguuaguauugucca

SEQ ID NO: 21600 - RNA, 18 nt, Homo sapiens
auauuuuuuuuuuuaaaa

SEQ ID NO: 21601 - RNA, 22 nt, Homo sapiens
auauuuauuacuguaagaaaau

SEQ ID NO: 21602 - RNA, 11 nt, Homo sapiens
aucucaauauu

SEQ ID NO: 21603 - RNA, 12 nt, Homo sapiens
aucucaauauuu

SEQ ID NO: 21604 - RNA, 21 nt, Homo sapiens
auaugcuucuguuuuauaauu

SEQ ID NO: 21605 - RNA, 19 nt, Homo sapiens
auaaaauaauuuuuauauu

SEQ ID NO: 21606 - RNA, 22 nt, Homo sapiens
auaagcuuguauuccuuuuucu

SEQ ID NO: 21607 - RNA, 14 nt, Homo sapiens
auauauauuuuuuu

SEQ ID NO: 21608 - RNA, 13 nt, Homo sapiens
auauauuuuuuuu

SEQ ID NO: 21609 - RNA, 14 nt, Homo sapiens
caacuauauuguuu

SEQ ID NO: 21610 - RNA, 13 nt, Homo sapiens
auuacauuuguau

SEQ ID NO: 21611 - RNA, 22 nt, Homo sapiens
augcuguauuuuaaaagaauga

SEQ ID NO: 21612 - RNA, 19 nt, Homo sapiens
augcaguucugaagaagau

SEQ ID NO: 21613 - RNA, 14 nt, Homo sapiens
auggugguauguuu

SEQ ID NO: 21614 - RNA, 23 nt, Homo sapiens
cauacuucuuaggguuaugauua

SEQ ID NO: 21615 - RNA, 14 nt, Homo sapiens
cauauauaacaaug

SEQ ID NO: 21616 - RNA, 12 nt, Homo sapiens
cauuauauuuau

SEQ ID NO: 21617 - RNA, 14 nt, Homo sapiens
cauuaaaguucuag

SEQ ID NO: 21618 - RNA, 18 nt, Homo sapiens
caugugcuaguaauugga

SEQ ID NO: 21619 - RNA, 19 nt, Homo sapiens
caugugcuaguaauuggaa

SEQ ID NO: 21620 - RNA, 17 nt, Homo sapiens
auuaugaauuacauuug

SEQ ID NO: 21621 - RNA, 15 nt, Homo sapiens
auuaaaguucuagug

SEQ ID NO: 21622 - RNA, 16 nt, Homo sapiens
auuuuaaaagaaugau

SEQ ID NO: 21623 - RNA, 17 nt, Homo sapiens
auuuaccacuuguguuu

SEQ ID NO: 21624 - RNA, 12 nt, Homo sapiens
auuuauuuuaau

SEQ ID NO: 21625 - RNA, 13 nt, Homo sapiens
auuuauuuuaaua

SEQ ID NO: 21626 - RNA, 13 nt, Homo sapiens
caacuauauuguu

SEQ ID NO: 21627 - RNA, 12 nt, Homo sapiens
auuuuuauauuu

SEQ ID NO: 21628 - RNA, 15 nt, Homo sapiens
auuuuaauaauguuu

SEQ ID NO: 21629 - RNA, 20 nt, Homo sapiens
cacgcucugggucgccggca

SEQ ID NO: 21630 - RNA, 15 nt, Homo sapiens
cacugccuucucaac

SEQ ID NO: 21631 - RNA, 18 nt, Homo sapiens
aguauuucuaugaaauau

SEQ ID NO: 21632 - RNA, 14 nt, Homo sapiens
auauauuuuuuuuu

SEQ ID NO: 21633 - RNA, 15 nt, Homo sapiens
auauauuuuuuuuuu

SEQ ID NO: 21634 - RNA, 16 nt, Homo sapiens
auauauuuuuuuuuuu

SEQ ID NO: 21635 - RNA, 22 nt, Homo sapiens
auaauuuuuauauuugaaauau

SEQ ID NO: 21636 - RNA, 18 nt, Homo sapiens
auaaaauccauacauuug

SEQ ID NO: 21637 - RNA, 14 nt, Homo sapiens
aguuauuuuuaaac

SEQ ID NO: 21638 - RNA, 15 nt, Homo sapiens
aguuauuuuuaaacu

SEQ ID NO: 21639 - RNA, 15 nt, Homo sapiens
augaauuacauuugu

SEQ ID NO: 21640 - RNA, 15 nt, Homo sapiens
augaaguccaagcau

SEQ ID NO: 21641 - RNA, 17 nt, Homo sapiens
augaauuaaguuuuuuu

SEQ ID NO: 21642 - RNA, 18 nt, Homo sapiens
augaauuaaguuuuuuuu

SEQ ID NO: 21643 - RNA, 19 nt, Homo sapiens
augaauuaaguuuuuuuuu

SEQ ID NO: 21644 - RNA, 13 nt, Homo sapiens
augggacauuugc

SEQ ID NO: 21645 - RNA, 13 nt, Homo sapiens
aucuuguaaaggu

SEQ ID NO: 21646 - RNA, 14 nt, Homo sapiens
auccauacauuugu

SEQ ID NO: 21647 - RNA, 15 nt, Homo sapiens
auauugacuuuuuau

SEQ ID NO: 21648 - RNA, 21 nt, Homo sapiens
auauuucagauaaucacaaua

SEQ ID NO: 21649 - RNA, 15 nt, Homo sapiens
aaaaagaaacauuug

SEQ ID NO: 21650 - RNA, 16 nt, Homo sapiens
aaacguauugcauuua

SEQ ID NO: 21651 - RNA, 16 nt, Homo sapiens
aaagaaacauuuggua

SEQ ID NO: 21652 - RNA, 18 nt, Homo sapiens
aaauaauuuuuauauuug

SEQ ID NO: 21653 - RNA, 21 nt, Homo sapiens
aaaguaugugcauauuuuauu

SEQ ID NO: 21654 - RNA, 17 nt, Homo sapiens
aaagugugacucauuaa

SEQ ID NO: 21655 - RNA, 22 nt, Homo sapiens
aaauguugacaugggacauuug

SEQ ID NO: 21656 - RNA, 17 nt, Homo sapiens
aaacguauugcauuuaa

SEQ ID NO: 21657 - RNA, 15 nt, Homo sapiens
aacuauauuguuugc

SEQ ID NO: 21658 - RNA, 15 nt, Homo sapiens
aacuccagaaaguga

SEQ ID NO: 21659 - RNA, 20 nt, Homo sapiens
aagacugcacaucaaaauau

SEQ ID NO: 21660 - RNA, 17 nt, Homo sapiens
accaaaaaucucaauau

SEQ ID NO: 21661 - RNA, 21 nt, Homo sapiens
aauaugccccauucaacaucu

SEQ ID NO: 21662 - RNA, 19 nt, Homo sapiens
aauuuuuucucuaggaaau

SEQ ID NO: 21663 - RNA, 16 nt, Homo sapiens
acuaguuguaauuuuu

SEQ ID NO: 21664 - RNA, 17 nt, Homo sapiens
acuaguuguaauuuuuu

SEQ ID NO: 21665 - RNA, 20 nt, Homo sapiens
acguauugcauuuaauuuau

SEQ ID NO: 21666 - RNA, 14 nt, Homo sapiens
acucauuaaaugga

SEQ ID NO: 21667 - RNA, 14 nt, Homo sapiens
agaaacacaacuau

SEQ ID NO: 21668 - RNA, 12 nt, Homo sapiens
agaaacauuugg

SEQ ID NO: 21669 - RNA, 18 nt, Homo sapiens
agaaugauuaugaauuac

SEQ ID NO: 21670 - RNA, 17 nt, Homo sapiens
agcagucaggaaagaga

SEQ ID NO: 21671 - RNA, 19 nt, Homo sapiens
accauuuuugaaaccaaac

SEQ ID NO: 21672 - RNA, 20 nt, Homo sapiens
cggggaggggcgcucgcuuc

SEQ ID NO: 21673 - RNA, 17 nt, Homo sapiens
uccagcugccccgggga

SEQ ID NO: 21674 - RNA, 22 nt, Homo sapiens
gagaccaaggcccccgggccga

SEQ ID NO: 21675 - RNA, 14 nt, Homo sapiens
uaaaguaugugcau

SEQ ID NO: 21676 - RNA, 18 nt, Homo sapiens
aguaugaaaaugucauug

SEQ ID NO: 21677 - RNA, 14 nt, Homo sapiens
aaaguucuagugac

SEQ ID NO: 21678 - RNA, 19 nt, Homo sapiens
agccgggaaagaagagccg

SEQ ID NO: 21679 - RNA, 23 nt, Homo sapiens
cuaguuguaauuuuuuuguggga

SEQ ID NO: 21680 - RNA, 23 nt, Homo sapiens
aacccaaagugugacucauuaaa

SEQ ID NO: 21681 - RNA, 16 nt, Homo sapiens
aaagcuuugugcagau

SEQ ID NO: 21682 - RNA, 13 nt, Homo sapiens
ggggaggggcgcu

SEQ ID NO: 21683 - RNA, 21 nt, Homo sapiens
cuggcugcgcucggccugcuc

SEQ ID NO: 21684 - RNA, 23 nt, Homo sapiens
agcgcgcgcgcccucuggcugcu

SEQ ID NO: 21685 - RNA, 14 nt, Homo sapiens
gugugacucauuaa

SEQ ID NO: 21686 - RNA, 15 nt, Homo sapiens
cuccgcuacuuccag

SEQ ID NO: 21687 - RNA, 22 nt, Homo sapiens
ugaacugcagcgaguacuuccc

SEQ ID NO: 21688 - RNA, 22 nt, Homo sapiens
ucauuguucuugugaacccaaa

SEQ ID NO: 21689 - RNA, 21 nt, Homo sapiens
aaccagagccugaguguugcc

SEQ ID NO: 21690 - RNA, 12 nt, Homo sapiens
accucauuauca

SEQ ID NO: 21691 - RNA, 23 nt, Homo sapiens
uaaaaaaaaaacguauugcauuu

SEQ ID NO: 21692 - RNA, 17 nt, Homo sapiens
ucauuaaaguucuagug

SEQ ID NO: 21693 - RNA, 18 nt, Homo sapiens
ugaucaguaugaaaaugu

SEQ ID NO: 21694 - RNA, 23 nt, Homo sapiens
uugcauuuaauuuauugaggcuu

SEQ ID NO: 21695 - RNA, 19 nt, Homo sapiens
cgcucaucccacccgccca

SEQ ID NO: 21696 - RNA, 19 nt, Homo sapiens
ucuuacaaugcauucugag

SEQ ID NO: 21697 - RNA, 16 nt, Homo sapiens
cgugugggcaauguuc

SEQ ID NO: 21698 - RNA, 15 nt, Homo sapiens
cagcugccccgggga

SEQ ID NO: 21699 - RNA, 16 nt, Homo sapiens
caugaauaucaguuau

SEQ ID NO: 21700 - RNA, 22 nt, Homo sapiens
ucuuguaaagguccuggcaaag

SEQ ID NO: 21701 - RNA, 17 nt, Homo sapiens
caggaccaucccggccg

SEQ ID NO: 21702 - RNA, 12 nt, Homo sapiens
caucuucuuuca

SEQ ID NO: 21703 - RNA, 18 nt, Homo sapiens
agagccggagccuccagc

SEQ ID NO: 21704 - RNA, 17 nt, Homo sapiens
uauagucacuaguugua

SEQ ID NO: 21705 - RNA, 15 nt, Homo sapiens
uaaaguaugugcaua

SEQ ID NO: 21706 - RNA, 16 nt, Homo sapiens
ccgcauccuagucucu

SEQ ID NO: 21707 - RNA, 11 nt, Homo sapiens
acaaugcauuc

SEQ ID NO: 21708 - RNA, 13 nt, Homo sapiens
aucaguccaaagg

SEQ ID NO: 21709 - RNA, 15 nt, Homo sapiens
gcucgcccacuuccu

SEQ ID NO: 21710 - RNA, 16 nt, Homo sapiens
gccuccgcuacuucca

SEQ ID NO: 21711 - RNA, 22 nt, Homo sapiens
cauccuagucucuaucauuaaa

SEQ ID NO: 21712 - RNA, 23 nt, Homo sapiens
gggcgcucgcuuccgcauccuag

SEQ ID NO: 21713 - RNA, 16 nt, Homo sapiens
auucgauccccuguca

SEQ ID NO: 21714 - RNA, 17 nt, Homo sapiens
cacacugagcugagggg

SEQ ID NO: 21715 - RNA, 22 nt, Homo sapiens
aauacauaaaguaugugcauau

SEQ ID NO: 21716 - RNA, 20 nt, Homo sapiens
uacauaaaguaugugcauau

SEQ ID NO: 21717 - RNA, 15 nt, Homo sapiens
caggcggguccgggu

SEQ ID NO: 21718 - RNA, 16 nt, Homo sapiens
cucaggcuggcaccgc

SEQ ID NO: 21719 - RNA, 19 nt, Homo sapiens
uuucccuucuuacaaugca

SEQ ID NO: 21720 - RNA, 17 nt, Homo sapiens
gaauacauaaaguaugu

SEQ ID NO: 21721 - RNA, 15 nt, Homo sapiens
cuugugaacccaaag

SEQ ID NO: 21722 - RNA, 18 nt, Homo sapiens
gcccacuuccucccggcc

SEQ ID NO: 21723 - RNA, 21 nt, Homo sapiens
agagccugaguguugccuaau

SEQ ID NO: 21724 - RNA, 14 nt, Homo sapiens
cuccgcuacuucca

SEQ ID NO: 21725 - RNA, 14 nt, Homo sapiens
aaaaacguauugca

SEQ ID NO: 21726 - RNA, 16 nt, Homo sapiens
ucuaucauuaaaguuc

SEQ ID NO: 21727 - RNA, 19 nt, Homo sapiens
ggcuuuaaaacuuauccuc

SEQ ID NO: 21728 - RNA, 15 nt, Homo sapiens
gccccaauucgaucc

SEQ ID NO: 21729 - RNA, 17 nt, Homo sapiens
cggagccuccagcugcc

SEQ ID NO: 21730 - RNA, 12 nt, Homo sapiens
augcauucugag

SEQ ID NO: 21731 - RNA, 22 nt, Homo sapiens
cuaauuuguuuucccuucuuac

SEQ ID NO: 21732 - RNA, 14 nt, Homo sapiens
uggcgcuggcugcg

SEQ ID NO: 21733 - RNA, 13 nt, Homo sapiens
agccuccagcugc

SEQ ID NO: 21734 - RNA, 16 nt, Homo sapiens
aucuucuuucaugaag

SEQ ID NO: 21735 - RNA, 22 nt, Homo sapiens
auuuuuuugugggaaauccaca

SEQ ID NO: 21736 - RNA, 15 nt, Homo sapiens
agugugacucauuaa

SEQ ID NO: 21737 - RNA, 13 nt, Homo sapiens
uuccucgccacgc

SEQ ID NO: 21738 - RNA, 18 nt, Homo sapiens
ugugaacccaaaguguga

SEQ ID NO: 21739 - RNA, 18 nt, Homo sapiens
uagucucuaucauuaaag

SEQ ID NO: 21740 - RNA, 16 nt, Homo sapiens
gggugaacugcagcga

SEQ ID NO: 21741 - RNA, 20 nt, Homo sapiens
ggccugcucgcccacuuccu

SEQ ID NO: 21742 - RNA, 22 nt, Homo sapiens
auccuagucucuaucauuaaag

SEQ ID NO: 21743 - RNA, 19 nt, Homo sapiens
aacccaaagugugacucau

SEQ ID NO: 21744 - RNA, 19 nt, Homo sapiens
uggcaaagaugaucaguau

SEQ ID NO: 21745 - RNA, 17 nt, Homo sapiens
cuuccgcauccuagucu

SEQ ID NO: 21746 - RNA, 13 nt, Homo sapiens
uccgcauccuagu

SEQ ID NO: 21747 - RNA, 23 nt, Homo sapiens
auucugagguaaccucauuauca

SEQ ID NO: 21748 - RNA, 14 nt, Homo sapiens
aaaacguauugcau

SEQ ID NO: 21749 - RNA, 17 nt, Homo sapiens
guaaagcuuugugcaga

SEQ ID NO: 21750 - RNA, 14 nt, Homo sapiens
cgauccccugucac

SEQ ID NO: 21751 - RNA, 18 nt, Homo sapiens
uauccuccaugaauauca

SEQ ID NO: 21752 - RNA, 21 nt, Homo sapiens
gcucgcuuccgcauccuaguc

SEQ ID NO: 21753 - RNA, 19 nt, Homo sapiens
cccuucuuacaaugcauuc

SEQ ID NO: 21754 - RNA, 18 nt, Homo sapiens
gcuuccgcauccuagucu

SEQ ID NO: 21755 - RNA, 15 nt, Homo sapiens
cagcgaguacuuccc

SEQ ID NO: 21756 - RNA, 21 nt, Homo sapiens
ugugcggccuggucuaccugu

SEQ ID NO: 21757 - RNA, 13 nt, Homo sapiens
gagccuccagcug

SEQ ID NO: 21758 - RNA, 22 nt, Homo sapiens
uccuccaugaauaucaguuauu

SEQ ID NO: 21759 - RNA, 19 nt, Homo sapiens
augucauuguucuugugaa

SEQ ID NO: 21760 - RNA, 17 nt, Homo sapiens
gcaaagaugaucaguau

SEQ ID NO: 21761 - RNA, 12 nt, Homo sapiens
ucucuaucauua

SEQ ID NO: 21762 - RNA, 23 nt, Homo sapiens
agaagagccggagccuccagcug

SEQ ID NO: 21763 - RNA, 15 nt, Homo sapiens
auaaaguaugugcau

SEQ ID NO: 21764 - RNA, 13 nt, Homo sapiens
uggaaucuuguaa

SEQ ID NO: 21765 - RNA, 19 nt, Homo sapiens
uacauaaaguaugugcaua

SEQ ID NO: 21766 - RNA, 23 nt, Homo sapiens
aaaaugucauuguucuugugaac

SEQ ID NO: 21767 - RNA, 19 nt, Homo sapiens
caaagaugaucaguaugaa

SEQ ID NO: 21768 - RNA, 11 nt, Homo sapiens
agccggagccu

SEQ ID NO: 21769 - RNA, 20 nt, Homo sapiens
cuguaaagcuuugugcagau

SEQ ID NO: 21770 - RNA, 22 nt, Homo sapiens
agucucuaucauuaaaguucua

SEQ ID NO: 21771 - RNA, 23 nt, Homo sapiens
uaauuuuuuugugggaaauccac

SEQ ID NO: 21772 - RNA, 11 nt, Homo sapiens
caaagugugac

SEQ ID NO: 21773 - RNA, 18 nt, Homo sapiens
cugcagcgaguacuuccc

SEQ ID NO: 21774 - RNA, 20 nt, Homo sapiens
cauuguucuugugaacccaa

SEQ ID NO: 21775 - RNA, 17 nt, Homo sapiens
aaacguauugcauuuaa

SEQ ID NO: 21776 - RNA, 13 nt, Homo sapiens
uccgcuacuucca

SEQ ID NO: 21777 - RNA, 15 nt, Homo sapiens
ugaauaucaguuauu

SEQ ID NO: 21778 - RNA, 12 nt, Homo sapiens
uuaucaguccaa

SEQ ID NO: 21779 - RNA, 15 nt, Homo sapiens
cggccugcucgccca

SEQ ID NO: 21780 - RNA, 12 nt, Homo sapiens
ccgcuacuucca

SEQ ID NO: 21781 - RNA, 20 nt, Homo sapiens
aauacauaaaguaugugcau

SEQ ID NO: 21782 - RNA, 13 nt, Homo sapiens
aguaugugcauau

SEQ ID NO: 21783 - RNA, 17 nt, Homo sapiens
uaaagguccuggcaaag

SEQ ID NO: 21784 - RNA, 23 nt, Homo sapiens
agguccuggcaaagaugaucagu

SEQ ID NO: 21785 - RNA, 16 nt, Homo sapiens
uuccgcauccuagucu

SEQ ID NO: 21786 - RNA, 19 nt, Homo sapiens
aaauguuguuuuaggaaua

SEQ ID NO: 21787 - RNA, 13 nt, Homo sapiens
uaucaguccaaag

SEQ ID NO: 21788 - RNA, 17 nt, Homo sapiens
uuugaaaccaaaccaga

SEQ ID NO: 21789 - RNA, 17 nt, Homo sapiens
cgccuccgcuacuucca

SEQ ID NO: 21790 - RNA, 18 nt, Homo sapiens
ucuaucauuaaaguucua

SEQ ID NO: 21791 - RNA, 24 nt, Homo sapiens
aauacauaaaguaugugcauauuu

SEQ ID NO: 21792 - RNA, 17 nt, Homo sapiens
aucaguccaaagggcau

SEQ ID NO: 21793 - RNA, 15 nt, Homo sapiens
cggagccuccagcug

SEQ ID NO: 21794 - RNA, 23 nt, Homo sapiens
ugcauucugagguaaccucauua

SEQ ID NO: 21795 - RNA, 22 nt, Homo sapiens
ugaggcuuuaaaacuuauccuc

SEQ ID NO: 21796 - RNA, 15 nt, Homo sapiens
gcgcgcucaucccac

SEQ ID NO: 21797 - RNA, 21 nt, Homo sapiens
cauuguucuugugaacccaaa

SEQ ID NO: 21798 - RNA, 15 nt, Homo sapiens
aaaaacguauugcau

SEQ ID NO: 21799 - RNA, 18 nt, Homo sapiens
aagagccggagccuccag

SEQ ID NO: 21800 - RNA, 20 nt, Homo sapiens
agccggagccuccagcugcc

SEQ ID NO: 21801 - RNA, 11 nt, Homo sapiens
cgcuacuucca

SEQ ID NO: 21802 - RNA, 21 nt, Homo sapiens
gcuccucggacggcuccggac

SEQ ID NO: 21803 - RNA, 22 nt, Homo sapiens
gcucgcuuccgcauccuagucu

SEQ ID NO: 21804 - RNA, 21 nt, Homo sapiens
ucgauccccugucacgugugg

SEQ ID NO: 21805 - RNA, 16 nt, Homo sapiens
ccggagccuccagcug

SEQ ID NO: 21806 - RNA, 20 nt, Homo sapiens
ccgcagggugaacugcagcg

SEQ ID NO: 21807 - RNA, 13 nt, Homo sapiens
uuuauuauauaua

SEQ ID NO: 21808 - RNA, 16 nt, Homo sapiens
uaaaguaugugcauau

SEQ ID NO: 21809 - RNA, 23 nt, Homo sapiens
uccccugucacgugugggcaaug

SEQ ID NO: 21810 - RNA, 18 nt, Homo sapiens
accauuuuugaaaccaaa

SEQ ID NO: 21811 - RNA, 14 nt, Homo sapiens
aaguaugugcauau

SEQ ID NO: 21812 - RNA, 12 nt, Homo sapiens
aaagaagagccg

SEQ ID NO: 21813 - RNA, 22 nt, Homo sapiens
uaaaaaaaaaacguauugcauu

SEQ ID NO: 21814 - RNA, 16 nt, Homo sapiens
auuaaaguucuaguga

SEQ ID NO: 21815 - RNA, 23 nt, Homo sapiens
uacuucccgcuguuccucgccac

SEQ ID NO: 21816 - RNA, 11 nt, Homo sapiens
aacccaaagug

SEQ ID NO: 21817 - RNA, 16 nt, Homo sapiens
caaugcauucugaggu

SEQ ID NO: 21818 - RNA, 22 nt, Homo sapiens
aaaugucauuguucuugugaac

SEQ ID NO: 21819 - RNA, 11 nt, Homo sapiens
gcauccuaguc

SEQ ID NO: 21820 - RNA, 16 nt, Homo sapiens
auccacacugagcuga

SEQ ID NO: 21821 - RNA, 19 nt, Homo sapiens
cccucuccucucuuccucc

SEQ ID NO: 21822 - RNA, 19 nt, Homo sapiens
cggcgggagggcgcggggc

SEQ ID NO: 21823 - RNA, 15 nt, Homo sapiens
cucgcccacuuccuc

SEQ ID NO: 21824 - RNA, 21 nt, Homo sapiens
aagagccggagccuccagcug

SEQ ID NO: 21825 - RNA, 17 nt, Homo sapiens
ucauuguucuugugaac

SEQ ID NO: 21826 - RNA, 16 nt, Homo sapiens
ccauuuuugaaaccaa

SEQ ID NO: 21827 - RNA, 20 nt, Homo sapiens
ugcgcucggccugcucgccc

SEQ ID NO: 21828 - RNA, 19 nt, Homo sapiens
cauauuuuauuauagucac

SEQ ID NO: 21829 - RNA, 19 nt, Homo sapiens
aggaauacauaaaguaugu

SEQ ID NO: 21830 - RNA, 13 nt, Homo sapiens
gaccaucccggcc

SEQ ID NO: 21831 - RNA, 14 nt, Homo sapiens
ggagccuccagcug

SEQ ID NO: 21832 - RNA, 13 nt, Homo sapiens
gccccaauucgau

SEQ ID NO: 21833 - RNA, 17 nt, Homo sapiens
cccaaagugugacucau

SEQ ID NO: 21834 - RNA, 18 nt, Homo sapiens
cugucacgugugggcaau

SEQ ID NO: 21835 - RNA, 21 nt, Homo sapiens
uccaaagggcauggguuuuau

SEQ ID NO: 21836 - RNA, 15 nt, Homo sapiens
gacgcugcugccgug

SEQ ID NO: 21837 - RNA, 16 nt, Homo sapiens
ucuuccucccuggaau

SEQ ID NO: 21838 - RNA, 15 nt, Homo sapiens
cuuauccuccaugaa

SEQ ID NO: 21839 - RNA, 16 nt, Homo sapiens
uucugagguaaccuca

SEQ ID NO: 21840 - RNA, 20 nt, Homo sapiens
ugcauauuuuauuauaguca

SEQ ID NO: 21841 - RNA, 12 nt, Homo sapiens
gcauccuagucu

SEQ ID NO: 21842 - RNA, 20 nt, Homo sapiens
ggcggguccgggucgcagga

SEQ ID NO: 21843 - RNA, 13 nt, Homo sapiens
gccgacggagccg

SEQ ID NO: 21844 - RNA, 17 nt, Homo sapiens
caguaugaaaaugucau

SEQ ID NO: 21845 - RNA, 22 nt, Homo sapiens
aauguuguuuuaggaauacaua

SEQ ID NO: 21846 - RNA, 14 nt, Homo sapiens
augaucaguaugaa

SEQ ID NO: 21847 - RNA, 15 nt, Homo sapiens
agccgggaaagaaga

SEQ ID NO: 21848 - RNA, 20 nt, Homo sapiens
aacugcagcgaguacuuccc

SEQ ID NO: 21849 - RNA, 13 nt, Homo sapiens
cauuaucagucca

SEQ ID NO: 21850 - RNA, 18 nt, Homo sapiens
auucuuuacccccuggga

SEQ ID NO: 21851 - RNA, 22 nt, Homo sapiens
cucuaucauuaaaguucuagug

SEQ ID NO: 21852 - RNA, 12 nt, Homo sapiens
aaaaaaacguau

SEQ ID NO: 21853 - RNA, 19 nt, Homo sapiens
cuuuaaaacuuauccucca

SEQ ID NO: 21854 - RNA, 17 nt, Homo sapiens
uaaagcuuugugcagau

SEQ ID NO: 21855 - RNA, 13 nt, Homo sapiens
uuguucuugugaa

SEQ ID NO: 21856 - RNA, 17 nt, Homo sapiens
agagccggagccuccag

SEQ ID NO: 21857 - RNA, 19 nt, Homo sapiens
cagcgaguacuucccgcug

SEQ ID NO: 21858 - RNA, 16 nt, Homo sapiens
uuaaaguucuagugac

SEQ ID NO: 21859 - RNA, 20 nt, Homo sapiens
uuacccccugggagccccaa

SEQ ID NO: 21860 - RNA, 15 nt, Homo sapiens
ucauuaaaguucuag

SEQ ID NO: 21861 - RNA, 17 nt, Homo sapiens
auccuagucucuaucau

SEQ ID NO: 21862 - RNA, 15 nt, Homo sapiens
ccuccgcuacuucca

SEQ ID NO: 21863 - RNA, 16 nt, Homo sapiens
guaaagcuuugugcag

SEQ ID NO: 21864 - RNA, 17 nt, Homo sapiens
uuugugggaaauccaca

SEQ ID NO: 21865 - RNA, 16 nt, Homo sapiens
agucucuaucauuaaa

SEQ ID NO: 21866 - RNA, 17 nt, Homo sapiens
aaccagagccugagugu

SEQ ID NO: 21867 - RNA, 15 nt, Homo sapiens
uaaaguucuagugac

SEQ ID NO: 21868 - RNA, 16 nt, Homo sapiens
cuucuuacaaugcauu

SEQ ID NO: 21869 - RNA, 17 nt, Homo sapiens
cauccuagucucuauca

SEQ ID NO: 21870 - RNA, 13 nt, Homo sapiens
aaaguucuaguga

SEQ ID NO: 21871 - RNA, 14 nt, Homo sapiens
ucuuccucccugga

SEQ ID NO: 21872 - RNA, 22 nt, Homo sapiens
gagggcgcggggcggggagcga

SEQ ID NO: 21873 - RNA, 20 nt, Homo sapiens
aaacuuauccuccaugaaua

SEQ ID NO: 21874 - RNA, 20 nt, Homo sapiens
uguuguuuuaggaauacaua

SEQ ID NO: 21875 - RNA, 24 nt, Homo sapiens
ggcuuuaaaacuuauccuccauga

SEQ ID NO: 21876 - RNA, 19 nt, Homo sapiens
gccugcucgcccacuuccu

SEQ ID NO: 21877 - RNA, 17 nt, Homo sapiens
ugcagcgaguacuuccc

SEQ ID NO: 21878 - RNA, 22 nt, Homo sapiens
gcugccgugggccugagaccaa

SEQ ID NO: 21879 - RNA, 21 nt, Homo sapiens
cgccuccgcuacuuccagggc

SEQ ID NO: 21880 - RNA, 14 nt, Homo sapiens
aaagcuuugugcag

SEQ ID NO: 21881 - RNA, 14 nt, Homo sapiens
auuuuugaaaccaa

SEQ ID NO: 21882 - RNA, 19 nt, Homo sapiens
uacaaugcauucugaggua

SEQ ID NO: 21883 - RNA, 20 nt, Homo sapiens
uuaauuuauugaggcuuuaa

SEQ ID NO: 21884 - RNA, 14 nt, Homo sapiens
cacugagcugaggg

SEQ ID NO: 21885 - RNA, 20 nt, Homo sapiens
aaaaaacguauugcauuuaa

SEQ ID NO: 21886 - RNA, 19 nt, Homo sapiens
auauuuuauuauagucacu

SEQ ID NO: 21887 - RNA, 16 nt, Homo sapiens
ccuucuuacaaugcau

SEQ ID NO: 21888 - RNA, 18 nt, Homo sapiens
cuaucauuaaaguucuag

SEQ ID NO: 21889 - RNA, 15 nt, Homo sapiens
cuuccagggcuacgc

SEQ ID NO: 21890 - RNA, 15 nt, Homo sapiens
aaccucauuaucagu

SEQ ID NO: 21891 - RNA, 17 nt, Homo sapiens
ccauuuuugaaaccaaa

SEQ ID NO: 21892 - RNA, 15 nt, Homo sapiens
ugugggaaauccaca

SEQ ID NO: 21893 - RNA, 20 nt, Homo sapiens
cucgcuuccgcauccuaguc

SEQ ID NO: 21894 - RNA, 14 nt, Homo sapiens
agccccaauucgau

SEQ ID NO: 21895 - RNA, 15 nt, Homo sapiens
uaugaaaaugucauu

SEQ ID NO: 21896 - RNA, 13 nt, Homo sapiens
augaaaaugucau

SEQ ID NO: 21897 - RNA, 19 nt, Homo sapiens
ccuccaugaauaucaguua

SEQ ID NO: 21898 - RNA, 12 nt, Homo sapiens
uguucuugugaa

SEQ ID NO: 21899 - RNA, 14 nt, Homo sapiens
aaagguccuggcaa

SEQ ID NO: 21900 - RNA, 15 nt, Homo sapiens
cuuuaaaacuuaucc

SEQ ID NO: 21901 - RNA, 15 nt, Homo sapiens
uacauaaaguaugug

SEQ ID NO: 21902 - RNA, 18 nt, Homo sapiens
agucacuaguuguaauuu

SEQ ID NO: 21903 - RNA, 13 nt, Homo sapiens
uagucucuaucau

SEQ ID NO: 21904 - RNA, 20 nt, Homo sapiens
gcgcgccuccgcuacuucca

SEQ ID NO: 21905 - RNA, 21 nt, Homo sapiens
uguuguuuuaggaauacauaa

SEQ ID NO: 21906 - RNA, 21 nt, Homo sapiens
acuguaaagcuuugugcagau

SEQ ID NO: 21907 - RNA, 16 nt, Homo sapiens
ugugaacccaaagugu

SEQ ID NO: 21908 - RNA, 17 nt, Homo sapiens
cgugggccugagaccaa

SEQ ID NO: 21909 - RNA, 17 nt, Homo sapiens
ugcauuuaauuuauuga

SEQ ID NO: 21910 - RNA, 16 nt, Homo sapiens
ugcauauuuuauuaua

SEQ ID NO: 21911 - RNA, 21 nt, Homo sapiens
ccuggcaaagaugaucaguau

SEQ ID NO: 21912 - RNA, 23 nt, Homo sapiens
gugaacugcagcgaguacuuccc

SEQ ID NO: 21913 - RNA, 19 nt, Homo sapiens
auugaggcuuuaaaacuua

SEQ ID NO: 21914 - RNA, 19 nt, Homo sapiens
gcuuuaaaacuuauccucc

SEQ ID NO: 21915 - RNA, 21 nt, Homo sapiens
auucugagguaaccucauuau

SEQ ID NO: 21916 - RNA, 11 nt, Homo sapiens
cgcaggaccau

SEQ ID NO: 21917 - RNA, 14 nt, Homo sapiens
cucaucccacccgc

SEQ ID NO: 21918 - RNA, 17 nt, Homo sapiens
ucaguccaaagggcaug

SEQ ID NO: 21919 - RNA, 16 nt, Homo sapiens
uaaagcuuugugcaga

SEQ ID NO: 21920 - RNA, 20 nt, Homo sapiens
uuacaaugcauucugaggua

SEQ ID NO: 21921 - RNA, 16 nt, Homo sapiens
gcauccuagucucuau

SEQ ID NO: 21922 - RNA, 22 nt, Homo sapiens
ucuaucauuaaaguucuaguga

SEQ ID NO: 21923 - RNA, 22 nt, Homo sapiens
uaguuguaauuuuuuuguggga

SEQ ID NO: 21924 - RNA, 16 nt, Homo sapiens
cauaaaguaugugcau

SEQ ID NO: 21925 - RNA, 16 nt, Homo sapiens
cauuuuugaaaccaaa

SEQ ID NO: 21926 - RNA, 19 nt, Homo sapiens
gcauccuagucucuaucau

SEQ ID NO: 21927 - RNA, 23 nt, Homo sapiens
uccuggcaaagaugaucaguaug

SEQ ID NO: 21928 - RNA, 13 nt, Homo sapiens
cgcgcuccgcgca

SEQ ID NO: 21929 - RNA, 19 nt, Homo sapiens
cuuugugcagauucuuuac

SEQ ID NO: 21930 - RNA, 17 nt, Homo sapiens
cauaaaguaugugcaua

SEQ ID NO: 21931 - RNA, 12 nt, Homo sapiens
ugagguaaccuc

SEQ ID NO: 21932 - RNA, 16 nt, Homo sapiens
aguaugaaaaugucau

SEQ ID NO: 21933 - RNA, 20 nt, Homo sapiens
caguuauuuuuaaacuguaa

SEQ ID NO: 21934 - RNA, 18 nt, Homo sapiens
gaagagccggagccucca

SEQ ID NO: 21935 - RNA, 20 nt, Homo sapiens
ugcauucugagguaaccuca

SEQ ID NO: 21936 - RNA, 15 nt, Homo sapiens
gaauacauaaaguau

SEQ ID NO: 21937 - RNA, 17 nt, Homo sapiens
ucauuaucaguccaaag

SEQ ID NO: 21938 - RNA, 14 nt, Homo sapiens
uaaaguucuaguga

SEQ ID NO: 21939 - RNA, 14 nt, Homo sapiens
cuagucucuaucau

SEQ ID NO: 21940 - RNA, 23 nt, Homo sapiens
uucgcgcgccuccgcuacuucca

SEQ ID NO: 21941 - RNA, 15 nt, Homo sapiens
uccgcauccuagucu

SEQ ID NO: 21942 - RNA, 14 nt, Homo sapiens
agcugccccgggga

SEQ ID NO: 21943 - RNA, 17 nt, Homo sapiens
gguccgggucgcaggac

SEQ ID NO: 21944 - RNA, 21 nt, Homo sapiens
ggcaauguucccccucuccuc

SEQ ID NO: 21945 - RNA, 16 nt, Homo sapiens
ggcugcugguggcgcu

SEQ ID NO: 21946 - RNA, 15 nt, Homo sapiens
uaaagcuuugugcag

SEQ ID NO: 21947 - RNA, 15 nt, Homo sapiens
agccuccagcugccc

SEQ ID NO: 21948 - RNA, 20 nt, Homo sapiens
uuacaggcgugagccaccaa

SEQ ID NO: 21949 - RNA, 17 nt, Homo sapiens
uguugguacuagauacu

SEQ ID NO: 21950 - RNA, 18 nt, Homo sapiens
uguugguacuagauacug

SEQ ID NO: 21951 - RNA, 24 nt, Homo sapiens
uguugccaaggcuggagugcagug

SEQ ID NO: 21952 - RNA, 19 nt, Homo sapiens
uguuuccauagggugacac

SEQ ID NO: 21953 - RNA, 15 nt, Homo sapiens
uuaacacagugucug

SEQ ID NO: 21954 - RNA, 21 nt, Homo sapiens
uuagacccucaugcugccaau

SEQ ID NO: 21955 - RNA, 12 nt, Homo sapiens
uuccccaaccac

SEQ ID NO: 21956 - RNA, 15 nt, Homo sapiens
uugaaauagugucug

SEQ ID NO: 21957 - RNA, 16 nt, Homo sapiens
uugagcaccugcaggc

SEQ ID NO: 21958 - RNA, 21 nt, Homo sapiens
uugcuccuggcuggggccugu

SEQ ID NO: 21959 - RNA, 21 nt, Homo sapiens
uuggcccaggaguuuggccag

SEQ ID NO: 21960 - RNA, 22 nt, Homo sapiens
uuggcccaggaguuuggccaga

SEQ ID NO: 21961 - RNA, 22 nt, Homo sapiens
uugggaggcugaggcgggugga

SEQ ID NO: 21962 - RNA, 12 nt, Homo sapiens
ugcuuggcccag

SEQ ID NO: 21963 - RNA, 21 nt, Homo sapiens
uggaaaaaaaggaagaaauuc

SEQ ID NO: 21964 - RNA, 15 nt, Homo sapiens
uggaaaggcagcucu

SEQ ID NO: 21965 - RNA, 15 nt, Homo sapiens
ugcuggccaggcugg

SEQ ID NO: 21966 - RNA, 18 nt, Homo sapiens
ugcuggccaggcuggucu

SEQ ID NO: 21967 - RNA, 20 nt, Homo sapiens
ugcugggaauuacaggcgug

SEQ ID NO: 21968 - RNA, 15 nt, Homo sapiens
uggagacaccaccac

SEQ ID NO: 21969 - RNA, 16 nt, Homo sapiens
uggagacaccaccacc

SEQ ID NO: 21970 - RNA, 17 nt, Homo sapiens
uggagacaccaccaccc

SEQ ID NO: 21971 - RNA, 19 nt, Homo sapiens
uggauaugacacaucucug

SEQ ID NO: 21972 - RNA, 14 nt, Homo sapiens
uggcacuugggaca

SEQ ID NO: 21973 - RNA, 15 nt, Homo sapiens
uggccagaagucaag

SEQ ID NO: 21974 - RNA, 15 nt, Homo sapiens
uggccaggcuggucu

SEQ ID NO: 21975 - RNA, 22 nt, Homo sapiens
uggccaggcuggucucgaacug

SEQ ID NO: 21976 - RNA, 15 nt, Homo sapiens
uggcgcgcgccacca

SEQ ID NO: 21977 - RNA, 22 nt, Homo sapiens
uggcauguaugacgugacuggc

SEQ ID NO: 21978 - RNA, 21 nt, Homo sapiens
uggcccaggaguuuggccaga

SEQ ID NO: 21979 - RNA, 16 nt, Homo sapiens
uggcgcgcgccaccac

SEQ ID NO: 21980 - RNA, 18 nt, Homo sapiens
uggcgcgcgccaccacgc

SEQ ID NO: 21981 - RNA, 19 nt, Homo sapiens
uggcgcgcgccaccacgcc

SEQ ID NO: 21982 - RNA, 16 nt, Homo sapiens
uggucaacauggugaa

SEQ ID NO: 21983 - RNA, 13 nt, Homo sapiens
ugucucaguccau

SEQ ID NO: 21984 - RNA, 14 nt, Homo sapiens
ugucucaguccaug

SEQ ID NO: 21985 - RNA, 11 nt, Homo sapiens
uggguggggca

SEQ ID NO: 21986 - RNA, 14 nt, Homo sapiens
uggguggggugagg

SEQ ID NO: 21987 - RNA, 23 nt, Homo sapiens
uggucucagugucaaugcagccc

SEQ ID NO: 21988 - RNA, 18 nt, Homo sapiens
uggucuggagggaagccu

SEQ ID NO: 21989 - RNA, 15 nt, Homo sapiens
ugggcugagcaguca

SEQ ID NO: 21990 - RNA, 10 nt, Homo sapiens
ugggcagguc

SEQ ID NO: 21991 - RNA, 23 nt, Homo sapiens
uggggcagugcuuggcccaggag

SEQ ID NO: 21992 - RNA, 13 nt, Homo sapiens
uggcugggagugg

SEQ ID NO: 21993 - RNA, 18 nt, Homo sapiens
ugggagaaucacuugaac

SEQ ID NO: 21994 - RNA, 12 nt, Homo sapiens
ucuacacuccag

SEQ ID NO: 21995 - RNA, 15 nt, Homo sapiens
ucucuaacucagaaa

SEQ ID NO: 21996 - RNA, 14 nt, Homo sapiens
ucuggguucaagcg

SEQ ID NO: 21997 - RNA, 17 nt, Homo sapiens
ucuguugccaaggcugg

SEQ ID NO: 21998 - RNA, 19 nt, Homo sapiens
ucuuggugccucaguuucc

SEQ ID NO: 21999 - RNA, 17 nt, Homo sapiens
ucuaggccgggcgcggu

SEQ ID NO: 22000 - RNA, 15 nt, Homo sapiens
ucucgaacugcugga

SEQ ID NO: 22001 - RNA, 16 nt, Homo sapiens
uccugccccugagccc

SEQ ID NO: 22002 - RNA, 15 nt, Homo sapiens
uccugagaccagcca

SEQ ID NO: 22003 - RNA, 18 nt, Homo sapiens
ucccucuguugccaaggc

SEQ ID NO: 22004 - RNA, 13 nt, Homo sapiens
ucccugccuggau

SEQ ID NO: 22005 - RNA, 23 nt, Homo sapiens
ucccuggaagagaucaagccauc

SEQ ID NO: 22006 - RNA, 20 nt, Homo sapiens
uccuaauaaaaaggugacca

SEQ ID NO: 22007 - RNA, 15 nt, Homo sapiens
ugaucucagaaauug

SEQ ID NO: 22008 - RNA, 22 nt, Homo sapiens
ugauucccagccagcacagccu

SEQ ID NO: 22009 - RNA, 19 nt, Homo sapiens
ugcaagcuuuucaaaauug

SEQ ID NO: 22010 - RNA, 15 nt, Homo sapiens
ugccaaggcuggagu

SEQ ID NO: 22011 - RNA, 17 nt, Homo sapiens
ugccaugcuggccaggc

SEQ ID NO: 22012 - RNA, 16 nt, Homo sapiens
ugcccauccugccccu

SEQ ID NO: 22013 - RNA, 15 nt, Homo sapiens
ugccuguaaucacag

SEQ ID NO: 22014 - RNA, 15 nt, Homo sapiens
ugcuggauucaagug

SEQ ID NO: 22015 - RNA, 22 nt, Homo sapiens
ugcuggauucaagugauccgcc

SEQ ID NO: 22016 - RNA, 12 nt, Homo sapiens
ugcuaucgccau

SEQ ID NO: 22017 - RNA, 23 nt, Homo sapiens
ugcccugcuuuugcuaggucaca

SEQ ID NO: 22018 - RNA, 18 nt, Homo sapiens
ugccuaagugcagccccg

SEQ ID NO: 22019 - RNA, 15 nt, Homo sapiens
ugauaccucaacccc

SEQ ID NO: 22020 - RNA, 17 nt, Homo sapiens
ugaggcauuugcagcug

SEQ ID NO: 22021 - RNA, 18 nt, Homo sapiens
ugaggcauuugcagcugu

SEQ ID NO: 22022 - RNA, 13 nt, Homo sapiens
ugagaccagccaa

SEQ ID NO: 22023 - RNA, 14 nt, Homo sapiens
ugagaccagccaac

SEQ ID NO: 22024 - RNA, 14 nt, Homo sapiens
ugacuggccugcug

SEQ ID NO: 22025 - RNA, 21 nt, Homo sapiens
ugacuggccugcuggaugugg

SEQ ID NO: 22026 - RNA, 20 nt, Homo sapiens
ugacgugacuggccugcugg

SEQ ID NO: 22027 - RNA, 18 nt, Homo sapiens
ugacuauuauagaaugga

SEQ ID NO: 22028 - RNA, 19 nt, Homo sapiens
ugacuauuauagaauggaa

SEQ ID NO: 22029 - RNA, 16 nt, Homo sapiens
ugagagacagcagguc

SEQ ID NO: 22030 - RNA, 17 nt, Homo sapiens
ugagagacagcaggucu

SEQ ID NO: 22031 - RNA, 18 nt, Homo sapiens
ugagagacagcaggucuc

SEQ ID NO: 22032 - RNA, 14 nt, Homo sapiens
ugagcaccugcagg

SEQ ID NO: 22033 - RNA, 13 nt, Homo sapiens
ugaccacugcaga

SEQ ID NO: 22034 - RNA, 14 nt, Homo sapiens
ugacaagcucacag

SEQ ID NO: 22035 - RNA, 22 nt, Homo sapiens
ugacagcccaaggguggguggg

SEQ ID NO: 22036 - RNA, 23 nt, Homo sapiens
ugacagcccaagggugggugggg

SEQ ID NO: 22037 - RNA, 18 nt, Homo sapiens
ucuuuccacagaagcucc

SEQ ID NO: 22038 - RNA, 15 nt, Homo sapiens
ucauguacauccaug

SEQ ID NO: 22039 - RNA, 22 nt, Homo sapiens
ucaggcuagauguauguacuuc

SEQ ID NO: 22040 - RNA, 16 nt, Homo sapiens
ucaguccaugaagaug

SEQ ID NO: 22041 - RNA, 16 nt, Homo sapiens
ucccaaaacugauacc

SEQ ID NO: 22042 - RNA, 17 nt, Homo sapiens
uccccaaaaagaauggg

SEQ ID NO: 22043 - RNA, 18 nt, Homo sapiens
uccccaaaaagaauggga

SEQ ID NO: 22044 - RNA, 19 nt, Homo sapiens
ucccagcacuuugggaggc

SEQ ID NO: 22045 - RNA, 20 nt, Homo sapiens
ucccagcacuuugggaggcu

SEQ ID NO: 22046 - RNA, 19 nt, Homo sapiens
ucccagcuacuugggaggc

SEQ ID NO: 22047 - RNA, 20 nt, Homo sapiens
ucccagcuacuugggaggcu

SEQ ID NO: 22048 - RNA, 21 nt, Homo sapiens
ucccaggaaaauuaaggcuuc

SEQ ID NO: 22049 - RNA, 13 nt, Homo sapiens
uccacuacugcua

SEQ ID NO: 22050 - RNA, 11 nt, Homo sapiens
uauuacaucuu

SEQ ID NO: 22051 - RNA, 19 nt, Homo sapiens
uauucagccccgggagugg

SEQ ID NO: 22052 - RNA, 18 nt, Homo sapiens
uauugucuagugaaacuc

SEQ ID NO: 22053 - RNA, 19 nt, Homo sapiens
uauugucuagugaaacucg

SEQ ID NO: 22054 - RNA, 13 nt, Homo sapiens
ucagccccgggag

SEQ ID NO: 22055 - RNA, 21 nt, Homo sapiens
ucacagcuacuugggaggcug

SEQ ID NO: 22056 - RNA, 16 nt, Homo sapiens
ucacagguugaccaau

SEQ ID NO: 22057 - RNA, 11 nt, Homo sapiens
ucaaugcagcc

SEQ ID NO: 22058 - RNA, 12 nt, Homo sapiens
ucaaugcagccc

SEQ ID NO: 22059 - RNA, 12 nt, Homo sapiens
uaagugcagccc

SEQ ID NO: 22060 - RNA, 18 nt, Homo sapiens
uacaaaaauuagccgggc

SEQ ID NO: 22061 - RNA, 19 nt, Homo sapiens
uacaaaaauuagccgggca

SEQ ID NO: 22062 - RNA, 20 nt, Homo sapiens
uacaaaaauuagccgggcau

SEQ ID NO: 22063 - RNA, 21 nt, Homo sapiens
uaagagauggguuugacaagg

SEQ ID NO: 22064 - RNA, 21 nt, Homo sapiens
uaagcaaagacuaugaggaau

SEQ ID NO: 22065 - RNA, 11 nt, Homo sapiens
uaauuacuaug

SEQ ID NO: 22066 - RNA, 21 nt, Homo sapiens
uaaaauauuuuuaugugcaau

SEQ ID NO: 22067 - RNA, 20 nt, Homo sapiens
guuugccaugcuggccaggc

SEQ ID NO: 22068 - RNA, 13 nt, Homo sapiens
guuugcuaagcau

SEQ ID NO: 22069 - RNA, 15 nt, Homo sapiens
guucuaggccgggcg

SEQ ID NO: 22070 - RNA, 15 nt, Homo sapiens
guuggaggcugcaaa

SEQ ID NO: 22071 - RNA, 12 nt, Homo sapiens
uagaugcaguuc

SEQ ID NO: 22072 - RNA, 10 nt, Homo sapiens
uagccgggca

SEQ ID NO: 22073 - RNA, 13 nt, Homo sapiens
uacuucaauacuu

SEQ ID NO: 22074 - RNA, 14 nt, Homo sapiens
uagacccucaugcu

SEQ ID NO: 22075 - RNA, 18 nt, Homo sapiens
uacuccagccugggugac

SEQ ID NO: 22076 - RNA, 23 nt, Homo sapiens
uacaggcgugagccaccaaaccc

SEQ ID NO: 22077 - RNA, 16 nt, Homo sapiens
uacaguucucccaagg

SEQ ID NO: 22078 - RNA, 11 nt, Homo sapiens
uacauacugcu

SEQ ID NO: 22079 - RNA, 11 nt, Homo sapiens
uacccucuggg

SEQ ID NO: 22080 - RNA, 16 nt, Homo sapiens
guuggaaaaugugcaa

SEQ ID NO: 22081 - RNA, 13 nt, Homo sapiens
guugccaaggcug

SEQ ID NO: 22082 - RNA, 17 nt, Homo sapiens
guuccuaaccagccugg

SEQ ID NO: 22083 - RNA, 18 nt, Homo sapiens
guuccuaaccagccuggu

SEQ ID NO: 22084 - RNA, 19 nt, Homo sapiens
guuccuaaccagccugguc

SEQ ID NO: 22085 - RNA, 17 nt, Homo sapiens
gugauucccuccugcua

SEQ ID NO: 22086 - RNA, 18 nt, Homo sapiens
gugauucccuccugcuac

SEQ ID NO: 22087 - RNA, 15 nt, Homo sapiens
gugcuuggcccagga

SEQ ID NO: 22088 - RNA, 16 nt, Homo sapiens
gugcuuggcccaggag

SEQ ID NO: 22089 - RNA, 23 nt, Homo sapiens
gugcuuuaauggcaugucagaca

SEQ ID NO: 22090 - RNA, 18 nt, Homo sapiens
guggagggggcgcgugca

SEQ ID NO: 22091 - RNA, 18 nt, Homo sapiens
guggcauguaugacguga

SEQ ID NO: 22092 - RNA, 23 nt, Homo sapiens
gugcugggaauuacaggcgugag

SEQ ID NO: 22093 - RNA, 12 nt, Homo sapiens
guggccagcuug

SEQ ID NO: 22094 - RNA, 17 nt, Homo sapiens
gugucaaugcagccccc

SEQ ID NO: 22095 - RNA, 15 nt, Homo sapiens
gugucaguggaugcu

SEQ ID NO: 22096 - RNA, 21 nt, Homo sapiens
guggggcagugcuuggcccag

SEQ ID NO: 22097 - RNA, 13 nt, Homo sapiens
guggguggggcag

SEQ ID NO: 22098 - RNA, 10 nt, Homo sapiens
gugggcucug

SEQ ID NO: 22099 - RNA, 16 nt, Homo sapiens
guggggcagugcuugg

SEQ ID NO: 22100 - RNA, 18 nt, Homo sapiens
guggggcagugcuuggcc

SEQ ID NO: 22101 - RNA, 16 nt, Homo sapiens
guagauaaacucagaa

SEQ ID NO: 22102 - RNA, 17 nt, Homo sapiens
guagauaaacucagaaa

SEQ ID NO: 22103 - RNA, 16 nt, Homo sapiens
guagauaugaggcauu

SEQ ID NO: 22104 - RNA, 20 nt, Homo sapiens
guaauuggaaaggcagcucu

SEQ ID NO: 22105 - RNA, 22 nt, Homo sapiens
guacauccauggugugcuggcu

SEQ ID NO: 22106 - RNA, 21 nt, Homo sapiens
guacauuuccaaauucacaag

SEQ ID NO: 22107 - RNA, 15 nt, Homo sapiens
guacuccagccuggg

SEQ ID NO: 22108 - RNA, 16 nt, Homo sapiens
guacuccagccugggu

SEQ ID NO: 22109 - RNA, 18 nt, Homo sapiens
guauucccuuuugcugcc

SEQ ID NO: 22110 - RNA, 16 nt, Homo sapiens
gucagaagaccugguc

SEQ ID NO: 22111 - RNA, 18 nt, Homo sapiens
gucaaggcuuagacccuc

SEQ ID NO: 22112 - RNA, 19 nt, Homo sapiens
gucaaggcuuagacccuca

SEQ ID NO: 22113 - RNA, 13 nt, Homo sapiens
gugagccaccaaa

SEQ ID NO: 22114 - RNA, 22 nt, Homo sapiens
gugauccgcccaucuccgucuc

SEQ ID NO: 22115 - RNA, 16 nt, Homo sapiens
gugagacagcucugca

SEQ ID NO: 22116 - RNA, 17 nt, Homo sapiens
gugagacagcucugcau

SEQ ID NO: 22117 - RNA, 19 nt, Homo sapiens
gugauuacccucugggucu

SEQ ID NO: 22118 - RNA, 14 nt, Homo sapiens
gugacccugaugaa

SEQ ID NO: 22119 - RNA, 17 nt, Homo sapiens
gugaccugacagcccaa

SEQ ID NO: 22120 - RNA, 17 nt, Homo sapiens
gucucgaacugcuggau

SEQ ID NO: 22121 - RNA, 21 nt, Homo sapiens
gucucccucuguugccaaggc

SEQ ID NO: 22122 - RNA, 15 nt, Homo sapiens
gucucgaacugcugg

SEQ ID NO: 22123 - RNA, 16 nt, Homo sapiens
gucucgaacugcugga

SEQ ID NO: 22124 - RNA, 13 nt, Homo sapiens
gggccuggcuggg

SEQ ID NO: 22125 - RNA, 18 nt, Homo sapiens
gggcagugcuuggcccag

SEQ ID NO: 22126 - RNA, 16 nt, Homo sapiens
gggauuguaaaauggu

SEQ ID NO: 22127 - RNA, 23 nt, Homo sapiens
ggcuuagacccucaugcugccaa

SEQ ID NO: 22128 - RNA, 11 nt, Homo sapiens
gggaguggcgc

SEQ ID NO: 22129 - RNA, 12 nt, Homo sapiens
gggaguggcgcg

SEQ ID NO: 22130 - RNA, 10 nt, Homo sapiens
ggccugcugg

SEQ ID NO: 22131 - RNA, 14 nt, Homo sapiens
ggccugcuggaugu

SEQ ID NO: 22132 - RNA, 14 nt, Homo sapiens
ggcgugagccacca

SEQ ID NO: 22133 - RNA, 15 nt, Homo sapiens
ggcgugagccaccaa

SEQ ID NO: 22134 - RNA, 15 nt, Homo sapiens
ggcugaggcgggugg

SEQ ID NO: 22135 - RNA, 16 nt, Homo sapiens
ggcuauuuaaagacaa

SEQ ID NO: 22136 - RNA, 22 nt, Homo sapiens
ggcuauuuaaagacaaagacaa

SEQ ID NO: 22137 - RNA, 10 nt, Homo sapiens
ggcuagaacc

SEQ ID NO: 22138 - RNA, 18 nt, Homo sapiens
guaaaauggugugaccac

SEQ ID NO: 22139 - RNA, 20 nt, Homo sapiens
gguuucacaagugaaaaaca

SEQ ID NO: 22140 - RNA, 21 nt, Homo sapiens
gguuucacaagugaaaaacau

SEQ ID NO: 22141 - RNA, 15 nt, Homo sapiens
gguuugccaugcugg

SEQ ID NO: 22142 - RNA, 17 nt, Homo sapiens
gguggggcagugcuugg

SEQ ID NO: 22143 - RNA, 13 nt, Homo sapiens
gguggguggggca

SEQ ID NO: 22144 - RNA, 15 nt, Homo sapiens
gguucuaggccgggc

SEQ ID NO: 22145 - RNA, 16 nt, Homo sapiens
gguucuaggccgggcg

SEQ ID NO: 22146 - RNA, 17 nt, Homo sapiens
ggucucgaacugcugga

SEQ ID NO: 22147 - RNA, 18 nt, Homo sapiens
ggucucgaacugcuggau

SEQ ID NO: 22148 - RNA, 19 nt, Homo sapiens
ggucucgaacugcuggauu

SEQ ID NO: 22149 - RNA, 14 nt, Homo sapiens
ggucaacaugguga

SEQ ID NO: 22150 - RNA, 16 nt, Homo sapiens
ggggccaugaaucacc

SEQ ID NO: 22151 - RNA, 12 nt, Homo sapiens
ggggcgcgugca

SEQ ID NO: 22152 - RNA, 13 nt, Homo sapiens
gggcugaugcagu

SEQ ID NO: 22153 - RNA, 15 nt, Homo sapiens
gggcgcgugcaggca

SEQ ID NO: 22154 - RNA, 20 nt, Homo sapiens
ggggcuuuagggaccugcug

SEQ ID NO: 22155 - RNA, 16 nt, Homo sapiens
gggguggguggggcag

SEQ ID NO: 22156 - RNA, 17 nt, Homo sapiens
gggguggguggggcagu

SEQ ID NO: 22157 - RNA, 14 nt, Homo sapiens
ggguggggcagugc

SEQ ID NO: 22158 - RNA, 15 nt, Homo sapiens
ggguggggcagugcu

SEQ ID NO: 22159 - RNA, 13 nt, Homo sapiens
gcuauguuguugc

SEQ ID NO: 22160 - RNA, 13 nt, Homo sapiens
gcucccuggaaga

SEQ ID NO: 22161 - RNA, 16 nt, Homo sapiens
gcucugcauacucauu

SEQ ID NO: 22162 - RNA, 21 nt, Homo sapiens
gcucauggaauuggagcucgu

SEQ ID NO: 22163 - RNA, 22 nt, Homo sapiens
gcucauggaauuggagcucgug

SEQ ID NO: 22164 - RNA, 12 nt, Homo sapiens
gcuaucgccauc

SEQ ID NO: 22165 - RNA, 15 nt, Homo sapiens
gcucauggaauugga

SEQ ID NO: 22166 - RNA, 18 nt, Homo sapiens
gcuuccauuccaagccug

SEQ ID NO: 22167 - RNA, 14 nt, Homo sapiens
gcuugaacccagga

SEQ ID NO: 22168 - RNA, 19 nt, Homo sapiens
gcuugaggacuugggcggg

SEQ ID NO: 22169 - RNA, 13 nt, Homo sapiens
gcuuggcccagga

SEQ ID NO: 22170 - RNA, 14 nt, Homo sapiens
gcuuggcccaggag

SEQ ID NO: 22171 - RNA, 15 nt, Homo sapiens
gcuuggcccaggagu

SEQ ID NO: 22172 - RNA, 20 nt, Homo sapiens
gcuuguauuuuacuuuucca

SEQ ID NO: 22173 - RNA, 23 nt, Homo sapiens
gcuggauguggagggggcgcgug

SEQ ID NO: 22174 - RNA, 13 nt, Homo sapiens
gcuuagacccuca

SEQ ID NO: 22175 - RNA, 21 nt, Homo sapiens
gcuuagacccucaugcugcca

SEQ ID NO: 22176 - RNA, 22 nt, Homo sapiens
gcuuagacccucaugcugccaa

SEQ ID NO: 22177 - RNA, 15 nt, Homo sapiens
gcugaggcgggugga

SEQ ID NO: 22178 - RNA, 13 nt, Homo sapiens
gcuggagugcagu

SEQ ID NO: 22179 - RNA, 22 nt, Homo sapiens
gcuggauucaagugauccgccc

SEQ ID NO: 22180 - RNA, 17 nt, Homo sapiens
gcuggccaggcuggucu

SEQ ID NO: 22181 - RNA, 16 nt, Homo sapiens
ggccagaagucaaggc

SEQ ID NO: 22182 - RNA, 19 nt, Homo sapiens
ggcccaggaguuuggccag

SEQ ID NO: 22183 - RNA, 20 nt, Homo sapiens
ggcccaggaguuuggccaga

SEQ ID NO: 22184 - RNA, 12 nt, Homo sapiens
ggcgcgcaccug

SEQ ID NO: 22185 - RNA, 18 nt, Homo sapiens
ggcgcgcgccaccacgcc

SEQ ID NO: 22186 - RNA, 20 nt, Homo sapiens
ggcgcgugcaggcagcagga

SEQ ID NO: 22187 - RNA, 13 nt, Homo sapiens
ggcacuugggaca

SEQ ID NO: 22188 - RNA, 19 nt, Homo sapiens
ggcacuugggacaaaaaca

SEQ ID NO: 22189 - RNA, 21 nt, Homo sapiens
ggcacuugggacaaaaacaaa

SEQ ID NO: 22190 - RNA, 13 nt, Homo sapiens
ggcagaagcaacc

SEQ ID NO: 22191 - RNA, 14 nt, Homo sapiens
ggcagaagcaaccc

SEQ ID NO: 22192 - RNA, 20 nt, Homo sapiens
ggcaggucacacaaccuguc

SEQ ID NO: 22193 - RNA, 20 nt, Homo sapiens
ggcagugcuuggcccaggag

SEQ ID NO: 22194 - RNA, 16 nt, Homo sapiens
ggacaguuccugagac

SEQ ID NO: 22195 - RNA, 17 nt, Homo sapiens
ggacauuugcucaugga

SEQ ID NO: 22196 - RNA, 16 nt, Homo sapiens
ggacaaaaacaaacaa

SEQ ID NO: 22197 - RNA, 17 nt, Homo sapiens
ggaaugaaguacucaua

SEQ ID NO: 22198 - RNA, 21 nt, Homo sapiens
ggaauuacaggcgugagccac

SEQ ID NO: 22199 - RNA, 12 nt, Homo sapiens
ggaauugaccca

SEQ ID NO: 22200 - RNA, 15 nt, Homo sapiens
ggaauuggagcucgu

SEQ ID NO: 22201 - RNA, 16 nt, Homo sapiens
ggaauuggagcucgug

SEQ ID NO: 22202 - RNA, 20 nt, Homo sapiens
ggauucaagugauccgccca

SEQ ID NO: 22203 - RNA, 15 nt, Homo sapiens
ggaucucacaagcac

SEQ ID NO: 22204 - RNA, 12 nt, Homo sapiens
ggagcucgugga

SEQ ID NO: 22205 - RNA, 12 nt, Homo sapiens
ggagcucguggg

SEQ ID NO: 22206 - RNA, 15 nt, Homo sapiens
ggaguuuggccagaa

SEQ ID NO: 22207 - RNA, 19 nt, Homo sapiens
ggauagcugacccagcccc

SEQ ID NO: 22208 - RNA, 13 nt, Homo sapiens
ggacuugaaccca

SEQ ID NO: 22209 - RNA, 12 nt, Homo sapiens
ggagacaccacc

SEQ ID NO: 22210 - RNA, 14 nt, Homo sapiens
ggagacaccaccac

SEQ ID NO: 22211 - RNA, 16 nt, Homo sapiens
gcauuguaacuuauga

SEQ ID NO: 22212 - RNA, 15 nt, Homo sapiens
gcauuuauaaaugga

SEQ ID NO: 22213 - RNA, 14 nt, Homo sapiens
gccagaagucaagg

SEQ ID NO: 22214 - RNA, 16 nt, Homo sapiens
gcauuuucacuuuugg

SEQ ID NO: 22215 - RNA, 22 nt, Homo sapiens
gccaacugggguggguggggca

SEQ ID NO: 22216 - RNA, 23 nt, Homo sapiens
gccaacugggguggguggggcag

SEQ ID NO: 22217 - RNA, 15 nt, Homo sapiens
gccaaggcuggagug

SEQ ID NO: 22218 - RNA, 13 nt, Homo sapiens
gccaccacgccca

SEQ ID NO: 22219 - RNA, 16 nt, Homo sapiens
gccaccacgcccagcu

SEQ ID NO: 22220 - RNA, 16 nt, Homo sapiens
gcagugcuuggcccag

SEQ ID NO: 22221 - RNA, 17 nt, Homo sapiens
gcagugcuuggcccagg

SEQ ID NO: 22222 - RNA, 19 nt, Homo sapiens
gcagugcuuggcccaggag

SEQ ID NO: 22223 - RNA, 14 nt, Homo sapiens
gcagugcuuggccc

SEQ ID NO: 22224 - RNA, 17 nt, Homo sapiens
gcaggucacacaaccug

SEQ ID NO: 22225 - RNA, 19 nt, Homo sapiens
gcaggucacacaaccuguc

SEQ ID NO: 22226 - RNA, 22 nt, Homo sapiens
gcagcucuaaaugucaaucagc

SEQ ID NO: 22227 - RNA, 19 nt, Homo sapiens
gcagagguugcagugagcc

SEQ ID NO: 22228 - RNA, 21 nt, Homo sapiens
gcagagguugcagugagccga

SEQ ID NO: 22229 - RNA, 14 nt, Homo sapiens
gcccugcuuuugcu

SEQ ID NO: 22230 - RNA, 11 nt, Homo sapiens
gccccugagcc

SEQ ID NO: 22231 - RNA, 12 nt, Homo sapiens
gccccugagccc

SEQ ID NO: 22232 - RNA, 19 nt, Homo sapiens
gccccuguacuccagccug

SEQ ID NO: 22233 - RNA, 18 nt, Homo sapiens
gcccaggaguuuggccag

SEQ ID NO: 22234 - RNA, 19 nt, Homo sapiens
gcccaggaguuuggccaga

SEQ ID NO: 22235 - RNA, 12 nt, Homo sapiens
gcccauccugcc

SEQ ID NO: 22236 - RNA, 14 nt, Homo sapiens
gccaggcuggucuc

SEQ ID NO: 22237 - RNA, 16 nt, Homo sapiens
gccaugcuggccaggc

SEQ ID NO: 22238 - RNA, 16 nt, Homo sapiens
gcgcgugcaggcagca

SEQ ID NO: 22239 - RNA, 18 nt, Homo sapiens
gcgugaccugacagccca

SEQ ID NO: 22240 - RNA, 13 nt, Homo sapiens
gcgcgcgccacca

SEQ ID NO: 22241 - RNA, 22 nt, Homo sapiens
gcgggacacaggcuccaaacug

SEQ ID NO: 22242 - RNA, 16 nt, Homo sapiens
gcgcgcgccaccacgc

SEQ ID NO: 22243 - RNA, 23 nt, Homo sapiens
gcgcgcaccuguaaucccagcua

SEQ ID NO: 22244 - RNA, 12 nt, Homo sapiens
gcgcgccaccac

SEQ ID NO: 22245 - RNA, 13 nt, Homo sapiens
gcgcgccaccacg

SEQ ID NO: 22246 - RNA, 16 nt, Homo sapiens
gcgcgccaccacgccc

SEQ ID NO: 22247 - RNA, 23 nt, Homo sapiens
gccugcuggauguggagggggcg

SEQ ID NO: 22248 - RNA, 14 nt, Homo sapiens
gccucaccccuugc

SEQ ID NO: 22249 - RNA, 13 nt, Homo sapiens
gccugggugacag

SEQ ID NO: 22250 - RNA, 14 nt, Homo sapiens
gccugggugacaga

SEQ ID NO: 22251 - RNA, 13 nt, Homo sapiens
gcgacagugagac

SEQ ID NO: 22252 - RNA, 13 nt, Homo sapiens
gcgccaccacgcc

SEQ ID NO: 22253 - RNA, 15 nt, Homo sapiens
gccgggcaugguggc

SEQ ID NO: 22254 - RNA, 13 nt, Homo sapiens
gauaggccauggg

SEQ ID NO: 22255 - RNA, 15 nt, Homo sapiens
gauaugccuuuuccc

SEQ ID NO: 22256 - RNA, 16 nt, Homo sapiens
gauaugccuuuuccca

SEQ ID NO: 22257 - RNA, 18 nt, Homo sapiens
gagccccuugggcagguc

SEQ ID NO: 22258 - RNA, 20 nt, Homo sapiens
gagccccuugggcaggucac

SEQ ID NO: 22259 - RNA, 19 nt, Homo sapiens
gagcaccugcaggcgugac

SEQ ID NO: 22260 - RNA, 17 nt, Homo sapiens
gaggacuugggcgggac

SEQ ID NO: 22261 - RNA, 16 nt, Homo sapiens
gaggcauuugcagcug

SEQ ID NO: 22262 - RNA, 13 nt, Homo sapiens
gaggccuccucuc

SEQ ID NO: 22263 - RNA, 19 nt, Homo sapiens
gagcuguuuucccugaccu

SEQ ID NO: 22264 - RNA, 15 nt, Homo sapiens
gauucccagccagca

SEQ ID NO: 22265 - RNA, 18 nt, Homo sapiens
gauucccagccagcacag

SEQ ID NO: 22266 - RNA, 11 nt, Homo sapiens
gaugaagaagu

SEQ ID NO: 22267 - RNA, 18 nt, Homo sapiens
gauguagaggagaaacug

SEQ ID NO: 22268 - RNA, 19 nt, Homo sapiens
gaugggagaaucacuugaa

SEQ ID NO: 22269 - RNA, 11 nt, Homo sapiens
gcaccugcagg

SEQ ID NO: 22270 - RNA, 14 nt, Homo sapiens
gcaccugcaggcgu

SEQ ID NO: 22271 - RNA, 19 nt, Homo sapiens
gaugcaguuguugcccaca

SEQ ID NO: 22272 - RNA, 17 nt, Homo sapiens
gcaaccuccaccuucug

SEQ ID NO: 22273 - RNA, 19 nt, Homo sapiens
gcaaccuccaccuucuggg

SEQ ID NO: 22274 - RNA, 14 nt, Homo sapiens
gcacuccagccuga

SEQ ID NO: 22275 - RNA, 21 nt, Homo sapiens
gcacuuauuuauuguuguugg

SEQ ID NO: 22276 - RNA, 11 nt, Homo sapiens
gaacugcugga

SEQ ID NO: 22277 - RNA, 12 nt, Homo sapiens
gaagucaaggcu

SEQ ID NO: 22278 - RNA, 20 nt, Homo sapiens
gaagucaaggcuuagacccu

SEQ ID NO: 22279 - RNA, 23 nt, Homo sapiens
gaagucaaggcuuagacccucau

SEQ ID NO: 22280 - RNA, 18 nt, Homo sapiens
gaaguuaagcaacaucua

SEQ ID NO: 22281 - RNA, 19 nt, Homo sapiens
gaagaguggguuucacaag

SEQ ID NO: 22282 - RNA, 22 nt, Homo sapiens
gaagcuuccauuccaagccuga

SEQ ID NO: 22283 - RNA, 14 nt, Homo sapiens
gacagugagacucu

SEQ ID NO: 22284 - RNA, 23 nt, Homo sapiens
gacauguuuacaaaccucaagcc

SEQ ID NO: 22285 - RNA, 20 nt, Homo sapiens
gacaccaccacccuugccau

SEQ ID NO: 22286 - RNA, 13 nt, Homo sapiens
gacaccgaguggc

SEQ ID NO: 22287 - RNA, 11 nt, Homo sapiens
gaauugaccca

SEQ ID NO: 22288 - RNA, 16 nt, Homo sapiens
gaauuggagcucgugg

SEQ ID NO: 22289 - RNA, 14 nt, Homo sapiens
gagacaccaccacc

SEQ ID NO: 22290 - RNA, 15 nt, Homo sapiens
gagacaccaccaccc

SEQ ID NO: 22291 - RNA, 13 nt, Homo sapiens
gagacagcagguc

SEQ ID NO: 22292 - RNA, 19 nt, Homo sapiens
gagacagggaaagggucuc

SEQ ID NO: 22293 - RNA, 12 nt, Homo sapiens
gagaccagccaa

SEQ ID NO: 22294 - RNA, 16 nt, Homo sapiens
gagaccagccaaccug

SEQ ID NO: 22295 - RNA, 19 nt, Homo sapiens
gagacgggguuugccaugc

SEQ ID NO: 22296 - RNA, 21 nt, Homo sapiens
gagacgggguuugccaugcug

SEQ ID NO: 22297 - RNA, 23 nt, Homo sapiens
gagacgggguuugccaugcuggc

SEQ ID NO: 22298 - RNA, 17 nt, Homo sapiens
gacuguacccaaaugga

SEQ ID NO: 22299 - RNA, 16 nt, Homo sapiens
gagaaaauaaaagcac

SEQ ID NO: 22300 - RNA, 13 nt, Homo sapiens
gacuggccugcug

SEQ ID NO: 22301 - RNA, 16 nt, Homo sapiens
gacgugacuggccugc

SEQ ID NO: 22302 - RNA, 19 nt, Homo sapiens
gacgugacuggccugcugg

SEQ ID NO: 22303 - RNA, 12 nt, Homo sapiens
gacuaaaaaaca

SEQ ID NO: 22304 - RNA, 13 nt, Homo sapiens
gacuaaaaaacaa

SEQ ID NO: 22305 - RNA, 10 nt, Homo sapiens
gaccugcugu

SEQ ID NO: 22306 - RNA, 11 nt, Homo sapiens
gaccugcuguu

SEQ ID NO: 22307 - RNA, 20 nt, Homo sapiens
gacgggguuugccaugcugg

SEQ ID NO: 22308 - RNA, 13 nt, Homo sapiens
gacgaaccuugaa

SEQ ID NO: 22309 - RNA, 14 nt, Homo sapiens
gacgaaccuugaaa

SEQ ID NO: 22310 - RNA, 22 nt, Homo sapiens
gacauguuuacaaaccucaagc

SEQ ID NO: 22311 - RNA, 18 nt, Homo sapiens
auggagacaccaccaccc

SEQ ID NO: 22312 - RNA, 17 nt, Homo sapiens
auguucuuuggggagcc

SEQ ID NO: 22313 - RNA, 15 nt, Homo sapiens
auguguuuuucacau

SEQ ID NO: 22314 - RNA, 17 nt, Homo sapiens
auguuaaaacugggaca

SEQ ID NO: 22315 - RNA, 14 nt, Homo sapiens
augccccagggacc

SEQ ID NO: 22316 - RNA, 19 nt, Homo sapiens
augacgugacuggccugcu

SEQ ID NO: 22317 - RNA, 20 nt, Homo sapiens
augacgugacuggccugcug

SEQ ID NO: 22318 - RNA, 22 nt, Homo sapiens
augacgugacuggccugcugga

SEQ ID NO: 22319 - RNA, 13 nt, Homo sapiens
augagagacacac

SEQ ID NO: 22320 - RNA, 14 nt, Homo sapiens
augauuucauucaa

SEQ ID NO: 22321 - RNA, 16 nt, Homo sapiens
auggagacaccaccac

SEQ ID NO: 22322 - RNA, 17 nt, Homo sapiens
auggagacaccaccacc

SEQ ID NO: 22323 - RNA, 11 nt, Homo sapiens
auuagccgggc

SEQ ID NO: 22324 - RNA, 17 nt, Homo sapiens
auucacaagacccaaaa

SEQ ID NO: 22325 - RNA, 19 nt, Homo sapiens
auuugguucuaggccgggc

SEQ ID NO: 22326 - RNA, 20 nt, Homo sapiens
auuugguucuaggccgggcg

SEQ ID NO: 22327 - RNA, 17 nt, Homo sapiens
auugguugggcugagca

SEQ ID NO: 22328 - RNA, 17 nt, Homo sapiens
caacugggguggguggg

SEQ ID NO: 22329 - RNA, 22 nt, Homo sapiens
caacugggguggguggggcagu

SEQ ID NO: 22330 - RNA, 21 nt, Homo sapiens
caaucagccuaguugaucagc

SEQ ID NO: 22331 - RNA, 22 nt, Homo sapiens
caaauugucacaggacagcccu

SEQ ID NO: 22332 - RNA, 21 nt, Homo sapiens
caaagacaaauucuguuucuu

SEQ ID NO: 22333 - RNA, 15 nt, Homo sapiens
auuuuuaugugcaau

SEQ ID NO: 22334 - RNA, 14 nt, Homo sapiens
caaacccggccuga

SEQ ID NO: 22335 - RNA, 15 nt, Homo sapiens
caaacccggccugau

SEQ ID NO: 22336 - RNA, 13 nt, Homo sapiens
caaacgaaaaaca

SEQ ID NO: 22337 - RNA, 16 nt, Homo sapiens
caaaaauuagccgggc

SEQ ID NO: 22338 - RNA, 17 nt, Homo sapiens
caaaaauuagccgggca

SEQ ID NO: 22339 - RNA, 15 nt, Homo sapiens
cacagugucuggcac

SEQ ID NO: 22340 - RNA, 11 nt, Homo sapiens
caccaccaccc

SEQ ID NO: 22341 - RNA, 13 nt, Homo sapiens
caccaccacccuu

SEQ ID NO: 22342 - RNA, 15 nt, Homo sapiens
cacaugauccugcaa

SEQ ID NO: 22343 - RNA, 20 nt, Homo sapiens
cacagccucuuagaugcagu

SEQ ID NO: 22344 - RNA, 14 nt, Homo sapiens
caauuccucuggga

SEQ ID NO: 22345 - RNA, 19 nt, Homo sapiens
caauucuauuacgugcaau

SEQ ID NO: 22346 - RNA, 15 nt, Homo sapiens
caaucaucaaccccc

SEQ ID NO: 22347 - RNA, 18 nt, Homo sapiens
caaucaucaacccccaac

SEQ ID NO: 22348 - RNA, 17 nt, Homo sapiens
caccucauggaauugga

SEQ ID NO: 22349 - RNA, 14 nt, Homo sapiens
caccacgcccagcu

SEQ ID NO: 22350 - RNA, 23 nt, Homo sapiens
caccagggccuggcugggagugg

SEQ ID NO: 22351 - RNA, 14 nt, Homo sapiens
caccuucuggguuc

SEQ ID NO: 22352 - RNA, 19 nt, Homo sapiens
cacgccuguaaucccagca

SEQ ID NO: 22353 - RNA, 15 nt, Homo sapiens
cacuaaaaaggcaug

SEQ ID NO: 22354 - RNA, 18 nt, Homo sapiens
cacuaaaaaggcauguaa

SEQ ID NO: 22355 - RNA, 23 nt, Homo sapiens
auauccuaauaaaaaggugacca

SEQ ID NO: 22356 - RNA, 22 nt, Homo sapiens
auaaccaugcccaagaaugaga

SEQ ID NO: 22357 - RNA, 15 nt, Homo sapiens
auacaaucaucaacc

SEQ ID NO: 22358 - RNA, 17 nt, Homo sapiens
auacaaucaucaacccc

SEQ ID NO: 22359 - RNA, 22 nt, Homo sapiens
aguuuggccagaagucaaggcu

SEQ ID NO: 22360 - RNA, 19 nt, Homo sapiens
aguuccuaaccagccuggu

SEQ ID NO: 22361 - RNA, 18 nt, Homo sapiens
aguuccugagaccagcca

SEQ ID NO: 22362 - RNA, 15 nt, Homo sapiens
aguucugaagaagau

SEQ ID NO: 22363 - RNA, 16 nt, Homo sapiens
aguugauaugccuuuu

SEQ ID NO: 22364 - RNA, 16 nt, Homo sapiens
aguugcagugagcuga

SEQ ID NO: 22365 - RNA, 22 nt, Homo sapiens
agugcugggaauuacaggcgug

SEQ ID NO: 22366 - RNA, 14 nt, Homo sapiens
agugcuuggcccag

SEQ ID NO: 22367 - RNA, 15 nt, Homo sapiens
agugcaguggcgcaa

SEQ ID NO: 22368 - RNA, 18 nt, Homo sapiens
aguggcgcgcgccaccac

SEQ ID NO: 22369 - RNA, 20 nt, Homo sapiens
aguggcgcgcgccaccacgc

SEQ ID NO: 22370 - RNA, 14 nt, Homo sapiens
aguggguuucacaa

SEQ ID NO: 22371 - RNA, 19 nt, Homo sapiens
auccuaauaaaaaggugac

SEQ ID NO: 22372 - RNA, 18 nt, Homo sapiens
aucucacaagcacuuucc

SEQ ID NO: 22373 - RNA, 16 nt, Homo sapiens
aucucauuuccaagca

SEQ ID NO: 22374 - RNA, 17 nt, Homo sapiens
aucucauuuccaagcaa

SEQ ID NO: 22375 - RNA, 21 nt, Homo sapiens
aucuguaaaauggagacacca

SEQ ID NO: 22376 - RNA, 17 nt, Homo sapiens
augaaguacucauacau

SEQ ID NO: 22377 - RNA, 14 nt, Homo sapiens
augaaguccaagca

SEQ ID NO: 22378 - RNA, 19 nt, Homo sapiens
auauuauuuugaauccaga

SEQ ID NO: 22379 - RNA, 17 nt, Homo sapiens
auccaguuacugccggu

SEQ ID NO: 22380 - RNA, 21 nt, Homo sapiens
aucccagcuacuugggaggcu

SEQ ID NO: 22381 - RNA, 13 nt, Homo sapiens
aucacuugaaccc

SEQ ID NO: 22382 - RNA, 14 nt, Homo sapiens
aucacuugaacccg

SEQ ID NO: 22383 - RNA, 12 nt, Homo sapiens
agcuguggccag

SEQ ID NO: 22384 - RNA, 13 nt, Homo sapiens
agcuguggccagc

SEQ ID NO: 22385 - RNA, 16 nt, Homo sapiens
agcgacagugagacuc

SEQ ID NO: 22386 - RNA, 13 nt, Homo sapiens
agcgcagccaugu

SEQ ID NO: 22387 - RNA, 13 nt, Homo sapiens
aggcuccaaacug

SEQ ID NO: 22388 - RNA, 14 nt, Homo sapiens
aggcugaggcgggu

SEQ ID NO: 22389 - RNA, 17 nt, Homo sapiens
aggccugucccugcaga

SEQ ID NO: 22390 - RNA, 13 nt, Homo sapiens
aggaauugaccca

SEQ ID NO: 22391 - RNA, 23 nt, Homo sapiens
aggaguuccuaaccagccugguc

SEQ ID NO: 22392 - RNA, 15 nt, Homo sapiens
aggaguuuggccaga

SEQ ID NO: 22393 - RNA, 10 nt, Homo sapiens
aggugaccau

SEQ ID NO: 22394 - RNA, 18 nt, Homo sapiens
aggguacacugccuucuc

SEQ ID NO: 22395 - RNA, 13 nt, Homo sapiens
agggaccugcugu

SEQ ID NO: 22396 - RNA, 14 nt, Homo sapiens
agggaccugcuguu

SEQ ID NO: 22397 - RNA, 10 nt, Homo sapiens
agggcuugag

SEQ ID NO: 22398 - RNA, 12 nt, Homo sapiens
aguacagacuuu

SEQ ID NO: 22399 - RNA, 21 nt, Homo sapiens
acgugacuggccugcuggaug

SEQ ID NO: 22400 - RNA, 14 nt, Homo sapiens
acuccagccugggu

SEQ ID NO: 22401 - RNA, 23 nt, Homo sapiens
acucuauguucuaagaagugaaa

SEQ ID NO: 22402 - RNA, 20 nt, Homo sapiens
acucaucaaucaaauaagua

SEQ ID NO: 22403 - RNA, 18 nt, Homo sapiens
acucauugcaaccuccac

SEQ ID NO: 22404 - RNA, 15 nt, Homo sapiens
acuaucucauuucca

SEQ ID NO: 22405 - RNA, 17 nt, Homo sapiens
acuauuauagaauggaa

SEQ ID NO: 22406 - RNA, 13 nt, Homo sapiens
acugacaacuuga

SEQ ID NO: 22407 - RNA, 13 nt, Homo sapiens
acuggccugcugg

SEQ ID NO: 22408 - RNA, 14 nt, Homo sapiens
acuggccugcugga

SEQ ID NO: 22409 - RNA, 14 nt, Homo sapiens
acggggugaaaccc

SEQ ID NO: 22410 - RNA, 18 nt, Homo sapiens
acgugacuggccugcugg

SEQ ID NO: 22411 - RNA, 12 nt, Homo sapiens
accuguccccga

SEQ ID NO: 22412 - RNA, 13 nt, Homo sapiens
accuguccccgaa

SEQ ID NO: 22413 - RNA, 23 nt, Homo sapiens
uuggcccaggaguuuggccagaa

SEQ ID NO: 22414 - RNA, 19 nt, Homo sapiens
uugggaggcugaggcgggu

SEQ ID NO: 22415 - RNA, 14 nt, Homo sapiens
acccucaugcugcc

SEQ ID NO: 22416 - RNA, 22 nt, Homo sapiens
uugcuccuggcuggggccuguu

SEQ ID NO: 22417 - RNA, 10 nt, Homo sapiens
accugcaggc

SEQ ID NO: 22418 - RNA, 24 nt, Homo sapiens
accugcuguuuccuagcgcagcca

SEQ ID NO: 22419 - RNA, 12 nt, Homo sapiens
accugagcccca

SEQ ID NO: 22420 - RNA, 17 nt, Homo sapiens
accugacagcccaaggg

SEQ ID NO: 22421 - RNA, 23 nt, Homo sapiens
agcaccugcaggcgugaccugac

SEQ ID NO: 22422 - RNA, 16 nt, Homo sapiens
agccagacaucaacag

SEQ ID NO: 22423 - RNA, 18 nt, Homo sapiens
agcccacuggcucccugg

SEQ ID NO: 22424 - RNA, 16 nt, Homo sapiens
agcacuuugggaggcu

SEQ ID NO: 22425 - RNA, 20 nt, Homo sapiens
agcagaacagugauuaccag

SEQ ID NO: 22426 - RNA, 21 nt, Homo sapiens
agcagcuuauucacaagaccc

SEQ ID NO: 22427 - RNA, 19 nt, Homo sapiens
agcaggauagagugggaca

SEQ ID NO: 22428 - RNA, 21 nt, Homo sapiens
agauuucuuuccauugugggc

SEQ ID NO: 22429 - RNA, 21 nt, Homo sapiens
agcaaguauuagaauaccaca

SEQ ID NO: 22430 - RNA, 13 nt, Homo sapiens
agcaccugcaggc

SEQ ID NO: 22431 - RNA, 20 nt, Homo sapiens
agccugaaagaggaaugaag

SEQ ID NO: 22432 - RNA, 11 nt, Homo sapiens
agccugaccac

SEQ ID NO: 22433 - RNA, 17 nt, Homo sapiens
agccccgggaguggcgc

SEQ ID NO: 22434 - RNA, 19 nt, Homo sapiens
agccccgggaguggcgcgc

SEQ ID NO: 22435 - RNA, 17 nt, Homo sapiens
agccccuugggcagguc

SEQ ID NO: 22436 - RNA, 23 nt, Homo sapiens
agccagccuugcuccuggcuggg

SEQ ID NO: 22437 - RNA, 13 nt, Homo sapiens
agccaggcggcug

SEQ ID NO: 22438 - RNA, 15 nt, Homo sapiens
agccggagccccuug

SEQ ID NO: 22439 - RNA, 14 nt, Homo sapiens
acuugggaggcuga

SEQ ID NO: 22440 - RNA, 19 nt, Homo sapiens
acugggguggguggggcag

SEQ ID NO: 22441 - RNA, 23 nt, Homo sapiens
acuggcucccuggaagagaucaa

SEQ ID NO: 22442 - RNA, 22 nt, Homo sapiens
acuguacccaaauggaaaguaa

SEQ ID NO: 22443 - RNA, 13 nt, Homo sapiens
agauaugaggcau

SEQ ID NO: 22444 - RNA, 15 nt, Homo sapiens
agauaugaggcauuu

SEQ ID NO: 22445 - RNA, 16 nt, Homo sapiens
agagacagaaagcaga

SEQ ID NO: 22446 - RNA, 22 nt, Homo sapiens
agacgggguuugccaugcuggc

SEQ ID NO: 22447 - RNA, 19 nt, Homo sapiens
agaggguguguaaguagau

SEQ ID NO: 22448 - RNA, 21 nt, Homo sapiens
agacaugagagacagcagguc

SEQ ID NO: 22449 - RNA, 20 nt, Homo sapiens
agaccagccaaccugggggc

SEQ ID NO: 22450 - RNA, 17 nt, Homo sapiens
agaaguuaagcaacauc

SEQ ID NO: 22451 - RNA, 19 nt, Homo sapiens
agacgggguuugccaugcu

SEQ ID NO: 22452 - RNA, 11 nt, Homo sapiens
agacaccacca

SEQ ID NO: 22453 - RNA, 12 nt, Homo sapiens
agacaccaccac

SEQ ID NO: 22454 - RNA, 13 nt, Homo sapiens
agacaccaccacc

SEQ ID NO: 22455 - RNA, 14 nt, Homo sapiens
agacaccaccaccc

SEQ ID NO: 22456 - RNA, 16 nt, Homo sapiens
acacugaagaagcacc

SEQ ID NO: 22457 - RNA, 18 nt, Homo sapiens
acagcccaagggugggug

SEQ ID NO: 22458 - RNA, 23 nt, Homo sapiens
acaggaaguagaggaggccacgu

SEQ ID NO: 22459 - RNA, 13 nt, Homo sapiens
acagaagcuccag

SEQ ID NO: 22460 - RNA, 17 nt, Homo sapiens
acagcuacuugggaggc

SEQ ID NO: 22461 - RNA, 14 nt, Homo sapiens
acagugucuggcac

SEQ ID NO: 22462 - RNA, 17 nt, Homo sapiens
acaggacagcccuucuu

SEQ ID NO: 22463 - RNA, 21 nt, Homo sapiens
acaggacagcccuucuuucca

SEQ ID NO: 22464 - RNA, 13 nt, Homo sapiens
acaggggagaacc

SEQ ID NO: 22465 - RNA, 16 nt, Homo sapiens
acaguauggcagcuuu

SEQ ID NO: 22466 - RNA, 17 nt, Homo sapiens
acccacaagaaaugaaa

SEQ ID NO: 22467 - RNA, 19 nt, Homo sapiens
acccauauuuguacaccaa

SEQ ID NO: 22468 - RNA, 11 nt, Homo sapiens
accagggagcc

SEQ ID NO: 22469 - RNA, 12 nt, Homo sapiens
accagggagccc

SEQ ID NO: 22470 - RNA, 17 nt, Homo sapiens
accacccuugccaugga

SEQ ID NO: 22471 - RNA, 20 nt, Homo sapiens
uuagacccucaugcugccaa

SEQ ID NO: 22472 - RNA, 15 nt, Homo sapiens
uuccugagaccagcc

SEQ ID NO: 22473 - RNA, 21 nt, Homo sapiens
uuccugagaccagccaaccug

SEQ ID NO: 22474 - RNA, 12 nt, Homo sapiens
ugucaaugcagc

SEQ ID NO: 22475 - RNA, 14 nt, Homo sapiens
ugucaaugcagccc

SEQ ID NO: 22476 - RNA, 21 nt, Homo sapiens
ugguuauuuagggaacugcuu

SEQ ID NO: 22477 - RNA, 20 nt, Homo sapiens
uggucucgaacugcuggauu

SEQ ID NO: 22478 - RNA, 12 nt, Homo sapiens
uggguggggcag

SEQ ID NO: 22479 - RNA, 20 nt, Homo sapiens
uggggcagugcuuggcccag

SEQ ID NO: 22480 - RNA, 17 nt, Homo sapiens
ugugauuacccucuggg

SEQ ID NO: 22481 - RNA, 17 nt, Homo sapiens
uguuuccauagggugac

SEQ ID NO: 22482 - RNA, 18 nt, Homo sapiens
uguuuccauagggugaca

SEQ ID NO: 22483 - RNA, 16 nt, Homo sapiens
uguguuuugcaagcca

SEQ ID NO: 22484 - RNA, 11 nt, Homo sapiens
ugggcagguca

SEQ ID NO: 22485 - RNA, 12 nt, Homo sapiens
ugggcaggucac

SEQ ID NO: 22486 - RNA, 17 nt, Homo sapiens
ugggacaguuccugaga

SEQ ID NO: 22487 - RNA, 24 nt, Homo sapiens
ugggacaguuccugagaccagcca

SEQ ID NO: 22488 - RNA, 19 nt, Homo sapiens
ugggagaaucacuugaacc

SEQ ID NO: 22489 - RNA, 20 nt, Homo sapiens
ugggagaaucacuugaaccc

SEQ ID NO: 22490 - RNA, 20 nt, Homo sapiens
uggcccaggaguuuggccag

SEQ ID NO: 22491 - RNA, 11 nt, Homo sapiens
uggccugcugg

SEQ ID NO: 22492 - RNA, 12 nt, Homo sapiens
uggccugcugga

SEQ ID NO: 22493 - RNA, 17 nt, Homo sapiens
uggagugcaguggcgca

SEQ ID NO: 22494 - RNA, 17 nt, Homo sapiens
uggcgcgcgccaccacg

SEQ ID NO: 22495 - RNA, 17 nt, Homo sapiens
uggaauuggagcucgug

SEQ ID NO: 22496 - RNA, 11 nt, Homo sapiens
uggagacacca

SEQ ID NO: 22497 - RNA, 12 nt, Homo sapiens
uggagacaccac

SEQ ID NO: 22498 - RNA, 14 nt, Homo sapiens
uggagacaccacca

SEQ ID NO: 22499 - RNA, 16 nt, Homo sapiens
uggagugcaguggcgc

SEQ ID NO: 22500 - RNA, 12 nt, Homo sapiens
ugcuggagcucu

SEQ ID NO: 22501 - RNA, 23 nt, Homo sapiens
ugcuggauguggagggggcgcgu

SEQ ID NO: 22502 - RNA, 12 nt, Homo sapiens
ugcuggccaggc

SEQ ID NO: 22503 - RNA, 13 nt, Homo sapiens
ugcuuggcccagg

SEQ ID NO: 22504 - RNA, 14 nt, Homo sapiens
ugcuuggcccagga

SEQ ID NO: 22505 - RNA, 18 nt, Homo sapiens
cgcgccaccacgcccagc

SEQ ID NO: 22506 - RNA, 11 nt, Homo sapiens
cgcgugcaggc

SEQ ID NO: 22507 - RNA, 12 nt, Homo sapiens
cgcgugcaggca

SEQ ID NO: 22508 - RNA, 14 nt, Homo sapiens
cgcgugcaggcagc

SEQ ID NO: 22509 - RNA, 20 nt, Homo sapiens
cgagaaccuaaguuucaguu

SEQ ID NO: 22510 - RNA, 21 nt, Homo sapiens
cgaagucuuccauagagacuu

SEQ ID NO: 22511 - RNA, 22 nt, Homo sapiens
cgacagugagacucugucucag

SEQ ID NO: 22512 - RNA, 23 nt, Homo sapiens
cgacaguuuuccuucucaucugu

SEQ ID NO: 22513 - RNA, 21 nt, Homo sapiens
cgcccagcuaauuuguguauu

SEQ ID NO: 22514 - RNA, 14 nt, Homo sapiens
cgcgccaccacgcc

SEQ ID NO: 22515 - RNA, 18 nt, Homo sapiens
cgcgcgccaccacgccca

SEQ ID NO: 22516 - RNA, 13 nt, Homo sapiens
cgugagccaccaa

SEQ ID NO: 22517 - RNA, 17 nt, Homo sapiens
cgugcaggcagcaggau

SEQ ID NO: 22518 - RNA, 16 nt, Homo sapiens
cgugggacagucaccu

SEQ ID NO: 22519 - RNA, 19 nt, Homo sapiens
cgucucccaaagugcuggg

SEQ ID NO: 22520 - RNA, 19 nt, Homo sapiens
cgugacuggccugcuggau

SEQ ID NO: 22521 - RNA, 18 nt, Homo sapiens
cgucucccaaagugcugg

SEQ ID NO: 22522 - RNA, 13 nt, Homo sapiens
cgcgcgccaccac

SEQ ID NO: 22523 - RNA, 22 nt, Homo sapiens
cgggacacaggcuccaaacugg

SEQ ID NO: 22524 - RNA, 20 nt, Homo sapiens
cgggaggcagagguugcagu

SEQ ID NO: 22525 - RNA, 15 nt, Homo sapiens
cgggaguggcgcgcg

SEQ ID NO: 22526 - RNA, 19 nt, Homo sapiens
cgggaguggcgcgcgccac

SEQ ID NO: 22527 - RNA, 20 nt, Homo sapiens
cgggaguggcgcgcgccacc

SEQ ID NO: 22528 - RNA, 13 nt, Homo sapiens
cgggcaugguggc

SEQ ID NO: 22529 - RNA, 18 nt, Homo sapiens
cuaggccgggcgcggugg

SEQ ID NO: 22530 - RNA, 20 nt, Homo sapiens
cuacuugggaggcugagaug

SEQ ID NO: 22531 - RNA, 12 nt, Homo sapiens
cuaggccgggcg

SEQ ID NO: 22532 - RNA, 17 nt, Homo sapiens
cuacacuccagugagac

SEQ ID NO: 22533 - RNA, 24 nt, Homo sapiens
cuacucuguuccuucacauccugu

SEQ ID NO: 22534 - RNA, 19 nt, Homo sapiens
cucagugucaaugcagccc

SEQ ID NO: 22535 - RNA, 18 nt, Homo sapiens
cucauugcaaccuccacc

SEQ ID NO: 22536 - RNA, 15 nt, Homo sapiens
cucauuuccaagcaa

SEQ ID NO: 22537 - RNA, 17 nt, Homo sapiens
cuccaaaaucggaucug

SEQ ID NO: 22538 - RNA, 15 nt, Homo sapiens
cuccaaacuggagcu

SEQ ID NO: 22539 - RNA, 15 nt, Homo sapiens
cucagaaacaucagu

SEQ ID NO: 22540 - RNA, 15 nt, Homo sapiens
cucacaagcacuuuc

SEQ ID NO: 22541 - RNA, 16 nt, Homo sapiens
cucacaagcacuuucc

SEQ ID NO: 22542 - RNA, 18 nt, Homo sapiens
cuauuacgugcaauacuu

SEQ ID NO: 22543 - RNA, 16 nt, Homo sapiens
cuugcuccuggcuggg

SEQ ID NO: 22544 - RNA, 23 nt, Homo sapiens
cuucccuuuuacauacugcuguc

SEQ ID NO: 22545 - RNA, 21 nt, Homo sapiens
cuuggcccaggaguuuggcca

SEQ ID NO: 22546 - RNA, 14 nt, Homo sapiens
gaaagaggaaugaa

SEQ ID NO: 22547 - RNA, 13 nt, Homo sapiens
gaaaaugugcaau

SEQ ID NO: 22548 - RNA, 22 nt, Homo sapiens
cuuuuuagagaaauuugccaau

SEQ ID NO: 22549 - RNA, 22 nt, Homo sapiens
cuuucacauuggcuauuuaaag

SEQ ID NO: 22550 - RNA, 15 nt, Homo sapiens
cuuuagggaccugcu

SEQ ID NO: 22551 - RNA, 21 nt, Homo sapiens
cuguccccgaaacuaccagcc

SEQ ID NO: 22552 - RNA, 15 nt, Homo sapiens
cuggucucgaacugc

SEQ ID NO: 22553 - RNA, 20 nt, Homo sapiens
cuggucucgaacugcuggau

SEQ ID NO: 22554 - RNA, 22 nt, Homo sapiens
cuggacuuuccagagaccagua

SEQ ID NO: 22555 - RNA, 18 nt, Homo sapiens
cuggagugcaguggcgca

SEQ ID NO: 22556 - RNA, 19 nt, Homo sapiens
cuggagugcaguggcgcaa

SEQ ID NO: 22557 - RNA, 20 nt, Homo sapiens
cuggauguggagggggcgcg

SEQ ID NO: 22558 - RNA, 22 nt, Homo sapiens
cuggauguggagggggcgcgug

SEQ ID NO: 22559 - RNA, 22 nt, Homo sapiens
cuggauucaagugauccgccca

SEQ ID NO: 22560 - RNA, 18 nt, Homo sapiens
cugggguggguggggcag

SEQ ID NO: 22561 - RNA, 11 nt, Homo sapiens
cugcaaccugu

SEQ ID NO: 22562 - RNA, 22 nt, Homo sapiens
cugcaggcgugaccugacagcc

SEQ ID NO: 22563 - RNA, 18 nt, Homo sapiens
cugacagcccaagggugg

SEQ ID NO: 22564 - RNA, 13 nt, Homo sapiens
cugaagaagcacc

SEQ ID NO: 22565 - RNA, 14 nt, Homo sapiens
cugaagaagcacca

SEQ ID NO: 22566 - RNA, 21 nt, Homo sapiens
cugaagaguggguuucacaag

SEQ ID NO: 22567 - RNA, 18 nt, Homo sapiens
cugagaccagccaaccug

SEQ ID NO: 22568 - RNA, 19 nt, Homo sapiens
cugagaccagccaaccugg

SEQ ID NO: 22569 - RNA, 23 nt, Homo sapiens
cugagaccagccaaccugggggc

SEQ ID NO: 22570 - RNA, 13 nt, Homo sapiens
cugagaccagcca

SEQ ID NO: 22571 - RNA, 23 nt, Homo sapiens
cugauauauguguuuuucacauu

SEQ ID NO: 22572 - RNA, 22 nt, Homo sapiens
cuggaaaccacauggcuucacc

SEQ ID NO: 22573 - RNA, 20 nt, Homo sapiens
cugcuguuuccuagcgcagc

SEQ ID NO: 22574 - RNA, 21 nt, Homo sapiens
cugcuggauguggagggggcg

SEQ ID NO: 22575 - RNA, 23 nt, Homo sapiens
cucuggcgacaguuuuccuucuc

SEQ ID NO: 22576 - RNA, 13 nt, Homo sapiens
cucugggucucag

SEQ ID NO: 22577 - RNA, 13 nt, Homo sapiens
cucgaacugcugg

SEQ ID NO: 22578 - RNA, 14 nt, Homo sapiens
cucgaacugcugga

SEQ ID NO: 22579 - RNA, 15 nt, Homo sapiens
cucgaacugcuggau

SEQ ID NO: 22580 - RNA, 16 nt, Homo sapiens
cucccaaagugcuggg

SEQ ID NO: 22581 - RNA, 15 nt, Homo sapiens
cuccagugagacagc

SEQ ID NO: 22582 - RNA, 12 nt, Homo sapiens
cuccaccuucug

SEQ ID NO: 22583 - RNA, 14 nt, Homo sapiens
cuccaccuucuggg

SEQ ID NO: 22584 - RNA, 16 nt, Homo sapiens
cuccagccugagcgac

SEQ ID NO: 22585 - RNA, 11 nt, Homo sapiens
cuccagccugg

SEQ ID NO: 22586 - RNA, 15 nt, Homo sapiens
cuccugcuacucugu

SEQ ID NO: 22587 - RNA, 20 nt, Homo sapiens
cuccugccuaagugcagccc

SEQ ID NO: 22588 - RNA, 21 nt, Homo sapiens
cuccugccuaagugcagcccc

SEQ ID NO: 22589 - RNA, 21 nt, Homo sapiens
ccucauggaauuggagcucgu

SEQ ID NO: 22590 - RNA, 12 nt, Homo sapiens
ccucaugcugcc

SEQ ID NO: 22591 - RNA, 17 nt, Homo sapiens
ccucuguugccaaggcu

SEQ ID NO: 22592 - RNA, 21 nt, Homo sapiens
ccugacagcccaagggugggu

SEQ ID NO: 22593 - RNA, 14 nt, Homo sapiens
ccugagaccagcca

SEQ ID NO: 22594 - RNA, 17 nt, Homo sapiens
ccugagaccagccaacc

SEQ ID NO: 22595 - RNA, 8 nt, Homo sapiens
ccugagcc

SEQ ID NO: 22596 - RNA, 9 nt, Homo sapiens
ccugagccc

SEQ ID NO: 22597 - RNA, 10 nt, Homo sapiens
ccugagcccc

SEQ ID NO: 22598 - RNA, 14 nt, Homo sapiens
ccucaccccuugcc

SEQ ID NO: 22599 - RNA, 15 nt, Homo sapiens
ccugcaggcgugacc

SEQ ID NO: 22600 - RNA, 15 nt, Homo sapiens
ccuucuggguucaag

SEQ ID NO: 22601 - RNA, 19 nt, Homo sapiens
ccugugaaauaguucaaag

SEQ ID NO: 22602 - RNA, 11 nt, Homo sapiens
ccugccuggau

SEQ ID NO: 22603 - RNA, 21 nt, Homo sapiens
ccugcuguuuccuagcgcagc

SEQ ID NO: 22604 - RNA, 22 nt, Homo sapiens
ccugcuguuuccuagcgcagcc

SEQ ID NO: 22605 - RNA, 16 nt, Homo sapiens
ccuggucaacauggug

SEQ ID NO: 22606 - RNA, 15 nt, Homo sapiens
ccuauauccugugac

SEQ ID NO: 22607 - RNA, 18 nt, Homo sapiens
ccuaauaaaaaggugacc

SEQ ID NO: 22608 - RNA, 19 nt, Homo sapiens
ccuaauaaaaaggugacca

SEQ ID NO: 22609 - RNA, 14 nt, Homo sapiens
ccuaagugcagccc

SEQ ID NO: 22610 - RNA, 14 nt, Homo sapiens
ccuaaccagccugg

SEQ ID NO: 22611 - RNA, 19 nt, Homo sapiens
ccgucucccaaagugcugg

SEQ ID NO: 22612 - RNA, 22 nt, Homo sapiens
ccgggaguggcgcgcgccacca

SEQ ID NO: 22613 - RNA, 18 nt, Homo sapiens
ccgggcgcgguggcucac

SEQ ID NO: 22614 - RNA, 16 nt, Homo sapiens
ccgggcguggugguga

SEQ ID NO: 22615 - RNA, 19 nt, Homo sapiens
ccgggcaugguggcgcgca

SEQ ID NO: 22616 - RNA, 11 nt, Homo sapiens
ccagagaccag

SEQ ID NO: 22617 - RNA, 16 nt, Homo sapiens
ccacuuauaggaauug

SEQ ID NO: 22618 - RNA, 16 nt, Homo sapiens
ccagcccuacaccauu

SEQ ID NO: 22619 - RNA, 21 nt, Homo sapiens
ccaggaguuuggccagaaguc

SEQ ID NO: 22620 - RNA, 15 nt, Homo sapiens
cccagcacuuuggga

SEQ ID NO: 22621 - RNA, 20 nt, Homo sapiens
cccagcacuuugggaggcug

SEQ ID NO: 22622 - RNA, 15 nt, Homo sapiens
cccagccccuugaga

SEQ ID NO: 22623 - RNA, 20 nt, Homo sapiens
cccagcuacuugggaggcug

SEQ ID NO: 22624 - RNA, 22 nt, Homo sapiens
cccagcuacuugggaggcugag

SEQ ID NO: 22625 - RNA, 13 nt, Homo sapiens
cccaagaaugaga

SEQ ID NO: 22626 - RNA, 16 nt, Homo sapiens
cccaaggguggguggg

SEQ ID NO: 22627 - RNA, 17 nt, Homo sapiens
cccaagggugggugggg

SEQ ID NO: 22628 - RNA, 21 nt, Homo sapiens
cccaaggguggguggggugag

SEQ ID NO: 22629 - RNA, 18 nt, Homo sapiens
ccauuccaagccugacca

SEQ ID NO: 22630 - RNA, 20 nt, Homo sapiens
ccaugauguuuagaaacaca

SEQ ID NO: 22631 - RNA, 17 nt, Homo sapiens
ccaugcuggccaggcug

SEQ ID NO: 22632 - RNA, 15 nt, Homo sapiens
ccauggagguuaagc

SEQ ID NO: 22633 - RNA, 12 nt, Homo sapiens
cccucugggucu

SEQ ID NO: 22634 - RNA, 12 nt, Homo sapiens
cccucaugcugc

SEQ ID NO: 22635 - RNA, 13 nt, Homo sapiens
cccucaugcugcc

SEQ ID NO: 22636 - RNA, 15 nt, Homo sapiens
cccucaugcugccaa

SEQ ID NO: 22637 - RNA, 14 nt, Homo sapiens
ccccgggaguggcg

SEQ ID NO: 22638 - RNA, 16 nt, Homo sapiens
cccgaaacuaccagcc

SEQ ID NO: 22639 - RNA, 14 nt, Homo sapiens
cccgggaguggcgc

SEQ ID NO: 22640 - RNA, 15 nt, Homo sapiens
cccgggaguggcgcg

SEQ ID NO: 22641 - RNA, 23 nt, Homo sapiens
cccgggaguggcgcgcgccacca

SEQ ID NO: 22642 - RNA, 10 nt, Homo sapiens
cauguuucuu

SEQ ID NO: 22643 - RNA, 19 nt, Homo sapiens
cauguaugacgugacuggc

SEQ ID NO: 22644 - RNA, 18 nt, Homo sapiens
cauggaauuggagcucgu

SEQ ID NO: 22645 - RNA, 14 nt, Homo sapiens
cauuugcucaugga

SEQ ID NO: 22646 - RNA, 15 nt, Homo sapiens
ccaccaaacccggcc

SEQ ID NO: 22647 - RNA, 19 nt, Homo sapiens
ccacaccagggccuggcug

SEQ ID NO: 22648 - RNA, 17 nt, Homo sapiens
ccaccaaacccggccug

SEQ ID NO: 22649 - RNA, 13 nt, Homo sapiens
ccaaagugcuggg

SEQ ID NO: 22650 - RNA, 14 nt, Homo sapiens
ccaaggcuggagug

SEQ ID NO: 22651 - RNA, 13 nt, Homo sapiens
caugcuggccagg

SEQ ID NO: 22652 - RNA, 17 nt, Homo sapiens
caugcuggccaggcugg

SEQ ID NO: 22653 - RNA, 21 nt, Homo sapiens
caugcuggccaggcuggucuc

SEQ ID NO: 22654 - RNA, 14 nt, Homo sapiens
caugggcacugugg

SEQ ID NO: 22655 - RNA, 21 nt, Homo sapiens
caugauguuuagaaacacaac

SEQ ID NO: 22656 - RNA, 19 nt, Homo sapiens
cauccugccccugagccca

SEQ ID NO: 22657 - RNA, 19 nt, Homo sapiens
caugagagacagcaggucu

SEQ ID NO: 22658 - RNA, 18 nt, Homo sapiens
caucuuggucacauacaa

SEQ ID NO: 22659 - RNA, 18 nt, Homo sapiens
cauccauggugugcuggc

SEQ ID NO: 22660 - RNA, 18 nt, Homo sapiens
cauagcaucucaggagau

SEQ ID NO: 22661 - RNA, 12 nt, Homo sapiens
cauagggugaca

SEQ ID NO: 22662 - RNA, 14 nt, Homo sapiens
cauagggugacaca

SEQ ID NO: 22663 - RNA, 13 nt, Homo sapiens
cagugucuggcac

SEQ ID NO: 22664 - RNA, 19 nt, Homo sapiens
caguuccugagaccagcca

SEQ ID NO: 22665 - RNA, 15 nt, Homo sapiens
caguucugaagaaga

SEQ ID NO: 22666 - RNA, 16 nt, Homo sapiens
caggaguuuggccaga

SEQ ID NO: 22667 - RNA, 12 nt, Homo sapiens
caggcagcagga

SEQ ID NO: 22668 - RNA, 17 nt, Homo sapiens
caggcgugagccaccaa

SEQ ID NO: 22669 - RNA, 22 nt, Homo sapiens
caggcgugagccaccaaacccg

SEQ ID NO: 22670 - RNA, 23 nt, Homo sapiens
caggcgugagccaccaaacccgg

SEQ ID NO: 22671 - RNA, 22 nt, Homo sapiens
caggcgugaccugacagcccaa

SEQ ID NO: 22672 - RNA, 15 nt, Homo sapiens
caggcgugagccacc

SEQ ID NO: 22673 - RNA, 15 nt, Homo sapiens
cagucaccucaugga

SEQ ID NO: 22674 - RNA, 17 nt, Homo sapiens
caggaguuuggccagaa

SEQ ID NO: 22675 - RNA, 20 nt, Homo sapiens
cagugagacucugucucagu

SEQ ID NO: 22676 - RNA, 18 nt, Homo sapiens
cagugcuuggcccaggag

SEQ ID NO: 22677 - RNA, 15 nt, Homo sapiens
caggcuccaaacugg

SEQ ID NO: 22678 - RNA, 18 nt, Homo sapiens
caggcuccaaacuggagc

SEQ ID NO: 22679 - RNA, 23 nt, Homo sapiens
caggcuggucucgaacugcugga

SEQ ID NO: 22680 - RNA, 24 nt, Homo sapiens
caggcuggucucgaacugcuggau

SEQ ID NO: 22681 - RNA, 15 nt, Homo sapiens
cagggccuggcuggg

SEQ ID NO: 22682 - RNA, 20 nt, Homo sapiens
cagggccuggcugggagugg

SEQ ID NO: 22683 - RNA, 15 nt, Homo sapiens
cagccugggugacag

SEQ ID NO: 22684 - RNA, 16 nt, Homo sapiens
cagccugggugacaga

SEQ ID NO: 22685 - RNA, 22 nt, Homo sapiens
cagccuggucaacauggugaaa

SEQ ID NO: 22686 - RNA, 18 nt, Homo sapiens
cagccaggcggcuggaau

SEQ ID NO: 22687 - RNA, 21 nt, Homo sapiens
cagccaggcggcuggaauuga

SEQ ID NO: 22688 - RNA, 22 nt, Homo sapiens
cagccaggcggcuggaauugaa

SEQ ID NO: 22689 - RNA, 15 nt, Homo sapiens
cagcccaaggguggg

SEQ ID NO: 22690 - RNA, 15 nt, Homo sapiens
cagccccgggagugg

SEQ ID NO: 22691 - RNA, 12 nt, Homo sapiens
cagagguugcag

SEQ ID NO: 22692 - RNA, 23 nt, Homo sapiens
cagagacgggguuugccaugcug

SEQ ID NO: 22693 - RNA, 13 nt, Homo sapiens
cagaagucaaggc

SEQ ID NO: 22694 - RNA, 23 nt, Homo sapiens
cagaagucaaggcuuagacccuc

SEQ ID NO: 22695 - RNA, 21 nt, Homo sapiens
cacuuuaacacagugucuggc

SEQ ID NO: 22696 - RNA, 19 nt, Homo sapiens
cagaaauuuaauucauguu

SEQ ID NO: 22697 - RNA, 14 nt, Homo sapiens
cacuuaaaaauggu

SEQ ID NO: 22698 - RNA, 20 nt, Homo sapiens
guuuggccagaagucaaggc

SEQ ID NO: 22699 - RNA, 21 nt, Homo sapiens
guuuggccagaagucaaggcu

SEQ ID NO: 22700 - RNA, 16 nt, Homo sapiens
guuuccauagggugac

SEQ ID NO: 22701 - RNA, 17 nt, Homo sapiens
guuuccauagggugaca

SEQ ID NO: 22702 - RNA, 18 nt, Homo sapiens
guuuccauagggugacac

SEQ ID NO: 22703 - RNA, 15 nt, Homo sapiens
guugacaacugugac

SEQ ID NO: 22704 - RNA, 22 nt, Homo sapiens
guugagcuguuuucccugaccu

SEQ ID NO: 22705 - RNA, 16 nt, Homo sapiens
guugccaaggcuggag

SEQ ID NO: 22706 - RNA, 12 nt, Homo sapiens
uaaaagcacuua

SEQ ID NO: 22707 - RNA, 17 nt, Homo sapiens
guuauaaucuuucacag

SEQ ID NO: 22708 - RNA, 14 nt, Homo sapiens
guugccaaggcugg

SEQ ID NO: 22709 - RNA, 16 nt, Homo sapiens
guuccuaaccagccug

SEQ ID NO: 22710 - RNA, 13 nt, Homo sapiens
gugccucaccccu

SEQ ID NO: 22711 - RNA, 20 nt, Homo sapiens
gugcugggaauuacaggcgu

SEQ ID NO: 22712 - RNA, 24 nt, Homo sapiens
gugcugggaauuacaggcgugagc

SEQ ID NO: 22713 - RNA, 12 nt, Homo sapiens
gugcuuggccca

SEQ ID NO: 22714 - RNA, 21 nt, Homo sapiens
guggagggggcgcgugcaggc

SEQ ID NO: 22715 - RNA, 13 nt, Homo sapiens
guggcgcgcgcca

SEQ ID NO: 22716 - RNA, 16 nt, Homo sapiens
guggcgcgcgccacca

SEQ ID NO: 22717 - RNA, 16 nt, Homo sapiens
gugucaaugcagcccc

SEQ ID NO: 22718 - RNA, 16 nt, Homo sapiens
gugucaguggaugcug

SEQ ID NO: 22719 - RNA, 18 nt, Homo sapiens
gugacuggccugcuggau

SEQ ID NO: 22720 - RNA, 11 nt, Homo sapiens
gugggcucugg

SEQ ID NO: 22721 - RNA, 13 nt, Homo sapiens
guggggcagugcu

SEQ ID NO: 22722 - RNA, 20 nt, Homo sapiens
guggggcagugcuuggccca

SEQ ID NO: 22723 - RNA, 23 nt, Homo sapiens
guggggcagugcuuggcccagga

SEQ ID NO: 22724 - RNA, 14 nt, Homo sapiens
guggguagacacac

SEQ ID NO: 22725 - RNA, 13 nt, Homo sapiens
guaugauucccag

SEQ ID NO: 22726 - RNA, 18 nt, Homo sapiens
gucucgaacugcuggauu

SEQ ID NO: 22727 - RNA, 23 nt, Homo sapiens
gugaacaaauuuacagagacaga

SEQ ID NO: 22728 - RNA, 24 nt, Homo sapiens
gugaacaaauuuacagagacagaa

SEQ ID NO: 22729 - RNA, 15 nt, Homo sapiens
gucugacuguuucca

SEQ ID NO: 22730 - RNA, 18 nt, Homo sapiens
gucucccaaagugcuggg

SEQ ID NO: 22731 - RNA, 19 nt, Homo sapiens
uacuccagccugggugaca

SEQ ID NO: 22732 - RNA, 15 nt, Homo sapiens
uacaucuuucacauu

SEQ ID NO: 22733 - RNA, 22 nt, Homo sapiens
uaccagggacugaggggagggg

SEQ ID NO: 22734 - RNA, 13 nt, Homo sapiens
uagcuuuacuguu

SEQ ID NO: 22735 - RNA, 14 nt, Homo sapiens
uagcuuuacuguuu

SEQ ID NO: 22736 - RNA, 13 nt, Homo sapiens
uagacccucaugc

SEQ ID NO: 22737 - RNA, 17 nt, Homo sapiens
uagacccucaugcugcc

SEQ ID NO: 22738 - RNA, 11 nt, Homo sapiens
uaagugcagcc

SEQ ID NO: 22739 - RNA, 13 nt, Homo sapiens
uaagugcagcccc

SEQ ID NO: 22740 - RNA, 12 nt, Homo sapiens
uacauucugcuu

SEQ ID NO: 22741 - RNA, 12 nt, Homo sapiens
uacauacugcug

SEQ ID NO: 22742 - RNA, 13 nt, Homo sapiens
uacauacugcugu

SEQ ID NO: 22743 - RNA, 9 nt, Homo sapiens
uaugugcaa

SEQ ID NO: 22744 - RNA, 23 nt, Homo sapiens
ucaaggcuuagacccucaugcug

SEQ ID NO: 22745 - RNA, 12 nt, Homo sapiens
uauuacaucuuu

SEQ ID NO: 22746 - RNA, 13 nt, Homo sapiens
ucacaagcacuuu

SEQ ID NO: 22747 - RNA, 14 nt, Homo sapiens
ucacaagcacuuuc

SEQ ID NO: 22748 - RNA, 13 nt, Homo sapiens
ucaaugcagcccc

SEQ ID NO: 22749 - RNA, 17 nt, Homo sapiens
ucccaaaacugauaccc

SEQ ID NO: 22750 - RNA, 13 nt, Homo sapiens
ucccaaagugcug

SEQ ID NO: 22751 - RNA, 11 nt, Homo sapiens
ucauuucaaaa

SEQ ID NO: 22752 - RNA, 12 nt, Homo sapiens
uccacuacugcu

SEQ ID NO: 22753 - RNA, 18 nt, Homo sapiens
ucaguccucuuucaaagg

SEQ ID NO: 22754 - RNA, 13 nt, Homo sapiens
ucagaagaaauuc

SEQ ID NO: 22755 - RNA, 16 nt, Homo sapiens
uccugagaccagccaa

SEQ ID NO: 22756 - RNA, 18 nt, Homo sapiens
uccugagaccagccaacc

SEQ ID NO: 22757 - RNA, 14 nt, Homo sapiens
ucgaacugcuggau

SEQ ID NO: 22758 - RNA, 12 nt, Homo sapiens
ugccaugcuggc

SEQ ID NO: 22759 - RNA, 16 nt, Homo sapiens
ugccccugcacuccag

SEQ ID NO: 22760 - RNA, 13 nt, Homo sapiens
ugcccaagaauga

SEQ ID NO: 22761 - RNA, 15 nt, Homo sapiens
ugcccaagaaugaga

SEQ ID NO: 22762 - RNA, 22 nt, Homo sapiens
ugcccaagaaugagaagaauga

SEQ ID NO: 22763 - RNA, 16 nt, Homo sapiens
ugccuaagugcagccc

SEQ ID NO: 22764 - RNA, 19 nt, Homo sapiens
ugccuaagugcagccccgu

SEQ ID NO: 22765 - RNA, 11 nt, Homo sapiens
ugccuggaucu

SEQ ID NO: 22766 - RNA, 17 nt, Homo sapiens
ugcaaccuccaccuucu

SEQ ID NO: 22767 - RNA, 13 nt, Homo sapiens
ugcagugagccga

SEQ ID NO: 22768 - RNA, 14 nt, Homo sapiens
ucucuaacucagaa

SEQ ID NO: 22769 - RNA, 15 nt, Homo sapiens
ucucuuuauucagcc

SEQ ID NO: 22770 - RNA, 19 nt, Homo sapiens
ucucuuuuuagagaaauuu

SEQ ID NO: 22771 - RNA, 20 nt, Homo sapiens
ucucuuuuuagagaaauuug

SEQ ID NO: 22772 - RNA, 19 nt, Homo sapiens
ugaaaaaguucugcagaua

SEQ ID NO: 22773 - RNA, 17 nt, Homo sapiens
ugacagcccaagggugg

SEQ ID NO: 22774 - RNA, 18 nt, Homo sapiens
ugacagcccaaggguggg

SEQ ID NO: 22775 - RNA, 16 nt, Homo sapiens
ugaacccgggaggcag

SEQ ID NO: 22776 - RNA, 12 nt, Homo sapiens
ugagcaccugca

SEQ ID NO: 22777 - RNA, 17 nt, Homo sapiens
ugacuggccugcuggau

SEQ ID NO: 22778 - RNA, 15 nt, Homo sapiens
ugaccacugcagaag

SEQ ID NO: 22779 - RNA, 17 nt, Homo sapiens
gggcagugcuuggccca

SEQ ID NO: 22780 - RNA, 19 nt, Homo sapiens
gggcagugcuuggcccagg

SEQ ID NO: 22781 - RNA, 20 nt, Homo sapiens
gggcuuuagggaccugcugu

SEQ ID NO: 22782 - RNA, 21 nt, Homo sapiens
gggcuuuagggaccugcuguu

SEQ ID NO: 22783 - RNA, 14 nt, Homo sapiens
gggaccugcuguuu

SEQ ID NO: 22784 - RNA, 18 nt, Homo sapiens
gggaguggcgcgcgccac

SEQ ID NO: 22785 - RNA, 17 nt, Homo sapiens
gggccuggcugggagug

SEQ ID NO: 22786 - RNA, 19 nt, Homo sapiens
gguauuuuaaucaccaagg

SEQ ID NO: 22787 - RNA, 15 nt, Homo sapiens
ggucaacauggugaa

SEQ ID NO: 22788 - RNA, 16 nt, Homo sapiens
ggucucgaacugcugg

SEQ ID NO: 22789 - RNA, 19 nt, Homo sapiens
gggguggguggggcagugc

SEQ ID NO: 22790 - RNA, 19 nt, Homo sapiens
gggguuugccaugcuggcc

SEQ ID NO: 22791 - RNA, 13 nt, Homo sapiens
gggugagggcuug

SEQ ID NO: 22792 - RNA, 13 nt, Homo sapiens
ggguggggcagug

SEQ ID NO: 22793 - RNA, 16 nt, Homo sapiens
ggguuugccaugcugg

SEQ ID NO: 22794 - RNA, 15 nt, Homo sapiens
guauuuucagcagag

SEQ ID NO: 22795 - RNA, 23 nt, Homo sapiens
gucaggaguuccuaaccagccug

SEQ ID NO: 22796 - RNA, 16 nt, Homo sapiens
guccacugguucuucu

SEQ ID NO: 22797 - RNA, 15 nt, Homo sapiens
guagauaugaggcau

SEQ ID NO: 22798 - RNA, 16 nt, Homo sapiens
guauccuucagccuga

SEQ ID NO: 22799 - RNA, 17 nt, Homo sapiens
guauccuucagccugaa

SEQ ID NO: 22800 - RNA, 13 nt, Homo sapiens
guacuccagccug

SEQ ID NO: 22801 - RNA, 22 nt, Homo sapiens
guaccuaacgaaguauccuuca

SEQ ID NO: 22802 - RNA, 21 nt, Homo sapiens
guacauccauggugugcuggc

SEQ ID NO: 22803 - RNA, 22 nt, Homo sapiens
guacauuuccaaauucacaagu

SEQ ID NO: 22804 - RNA, 17 nt, Homo sapiens
gguucuaggccgggcgc

SEQ ID NO: 22805 - RNA, 14 nt, Homo sapiens
ggugagggcuugag

SEQ ID NO: 22806 - RNA, 13 nt, Homo sapiens
gggaguggcgcgc

SEQ ID NO: 22807 - RNA, 16 nt, Homo sapiens
gggaguggcgcgcgcc

SEQ ID NO: 22808 - RNA, 17 nt, Homo sapiens
gggaguggcgcgcgcca

SEQ ID NO: 22809 - RNA, 21 nt, Homo sapiens
ggcuggucucgaacugcugga

SEQ ID NO: 22810 - RNA, 20 nt, Homo sapiens
gggacacaggcuccaaacug

SEQ ID NO: 22811 - RNA, 17 nt, Homo sapiens
ggcuccaaacuggagcu

SEQ ID NO: 22812 - RNA, 23 nt, Homo sapiens
ggcucugggauagcugacccagc

SEQ ID NO: 22813 - RNA, 13 nt, Homo sapiens
ggcugagcaguca

SEQ ID NO: 22814 - RNA, 12 nt, Homo sapiens
ggcuggagugca

SEQ ID NO: 22815 - RNA, 20 nt, Homo sapiens
ggcuuagacccucaugcugc

SEQ ID NO: 22816 - RNA, 21 nt, Homo sapiens
ggcuuagacccucaugcugcc

SEQ ID NO: 22817 - RNA, 22 nt, Homo sapiens
ggcucacgccuguaaucccagc

SEQ ID NO: 22818 - RNA, 11 nt, Homo sapiens
ggccugcugga

SEQ ID NO: 22819 - RNA, 15 nt, Homo sapiens
ggccugcuggaugug

SEQ ID NO: 22820 - RNA, 14 nt, Homo sapiens
ggcgcgcgccacca

SEQ ID NO: 22821 - RNA, 20 nt, Homo sapiens
ggcgcgcgccaccacgccca

SEQ ID NO: 22822 - RNA, 17 nt, Homo sapiens
ggcgcgcgccaccacgc

SEQ ID NO: 22823 - RNA, 15 nt, Homo sapiens
ggccgggcgcggugg

SEQ ID NO: 22824 - RNA, 22 nt, Homo sapiens
ggcauguaugacgugacuggcc

SEQ ID NO: 22825 - RNA, 15 nt, Homo sapiens
ggcagugcuuggccc

SEQ ID NO: 22826 - RNA, 18 nt, Homo sapiens
ggcagugcuuggcccagg

SEQ ID NO: 22827 - RNA, 19 nt, Homo sapiens
ggcagugcuuggcccagga

SEQ ID NO: 22828 - RNA, 14 nt, Homo sapiens
ggcgcgguggcuca

SEQ ID NO: 22829 - RNA, 21 nt, Homo sapiens
ggaguuccuaaccagccuggu

SEQ ID NO: 22830 - RNA, 22 nt, Homo sapiens
ggcagcaggauagagugggaca

SEQ ID NO: 22831 - RNA, 20 nt, Homo sapiens
ggcacuugggacaaaaacaa

SEQ ID NO: 22832 - RNA, 21 nt, Homo sapiens
ggcagagguugcagugagccg

SEQ ID NO: 22833 - RNA, 15 nt, Homo sapiens
ggcagcaggauagag

SEQ ID NO: 22834 - RNA, 14 nt, Homo sapiens
gcgugagccaccaa

SEQ ID NO: 22835 - RNA, 22 nt, Homo sapiens
gcgugagccaccaaacccggcc

SEQ ID NO: 22836 - RNA, 19 nt, Homo sapiens
gcgugcaggcagcaggaua

SEQ ID NO: 22837 - RNA, 14 nt, Homo sapiens
gcgcgcgccaccac

SEQ ID NO: 22838 - RNA, 13 nt, Homo sapiens
gcgcgugcaggca

SEQ ID NO: 22839 - RNA, 16 nt, Homo sapiens
gcgggacacaggcucc

SEQ ID NO: 22840 - RNA, 22 nt, Homo sapiens
gcgcgcaccuguaaucccagcu

SEQ ID NO: 22841 - RNA, 15 nt, Homo sapiens
gcgcgcgccaccacg

SEQ ID NO: 22842 - RNA, 20 nt, Homo sapiens
gcucauggaauuggagcucg

SEQ ID NO: 22843 - RNA, 14 nt, Homo sapiens
gcucauggaauugg

SEQ ID NO: 22844 - RNA, 14 nt, Homo sapiens
ggaauuggagcucg

SEQ ID NO: 22845 - RNA, 16 nt, Homo sapiens
gcuuuagggaccugcu

SEQ ID NO: 22846 - RNA, 22 nt, Homo sapiens
gcuugaaauagugucugaugaa

SEQ ID NO: 22847 - RNA, 12 nt, Homo sapiens
gcuuagacccuc

SEQ ID NO: 22848 - RNA, 15 nt, Homo sapiens
gcuuagacccucaug

SEQ ID NO: 22849 - RNA, 20 nt, Homo sapiens
gcuuagacccucaugcugcc

SEQ ID NO: 22850 - RNA, 18 nt, Homo sapiens
gcuggucucgaacugcug

SEQ ID NO: 22851 - RNA, 19 nt, Homo sapiens
gcuggucucgaacugcugg

SEQ ID NO: 22852 - RNA, 14 nt, Homo sapiens
gcugggaguggcau

SEQ ID NO: 22853 - RNA, 16 nt, Homo sapiens
gcugggaguggcaugu

SEQ ID NO: 22854 - RNA, 21 nt, Homo sapiens
gcuguauuuuaaaagaaugau

SEQ ID NO: 22855 - RNA, 14 nt, Homo sapiens
gcuggccaggcugg

SEQ ID NO: 22856 - RNA, 16 nt, Homo sapiens
ggacauuugcucaugg

SEQ ID NO: 22857 - RNA, 18 nt, Homo sapiens
ggaauuggagcucguggg

SEQ ID NO: 22858 - RNA, 17 nt, Homo sapiens
ggacagucaccucaugg

SEQ ID NO: 22859 - RNA, 18 nt, Homo sapiens
ggacagucaccucaugga

SEQ ID NO: 22860 - RNA, 10 nt, Homo sapiens
ggaccugcug

SEQ ID NO: 22861 - RNA, 11 nt, Homo sapiens
ggaccugcugu

SEQ ID NO: 22862 - RNA, 14 nt, Homo sapiens
ggacgaaccuugaa

SEQ ID NO: 22863 - RNA, 10 nt, Homo sapiens
ggagaagaac

SEQ ID NO: 22864 - RNA, 11 nt, Homo sapiens
ggagaagaacu

SEQ ID NO: 22865 - RNA, 11 nt, Homo sapiens
ggagacaccac

SEQ ID NO: 22866 - RNA, 13 nt, Homo sapiens
ggagacaccacca

SEQ ID NO: 22867 - RNA, 15 nt, Homo sapiens
ggagacaccaccacc

SEQ ID NO: 22868 - RNA, 16 nt, Homo sapiens
ggagacaccaccaccc

SEQ ID NO: 22869 - RNA, 14 nt, Homo sapiens
ggaguuuggccaga

SEQ ID NO: 22870 - RNA, 16 nt, Homo sapiens
ggaggcugaggcgggu

SEQ ID NO: 22871 - RNA, 17 nt, Homo sapiens
cuugcuccuggcugggg

SEQ ID NO: 22872 - RNA, 12 nt, Homo sapiens
cuuggucucagu

SEQ ID NO: 22873 - RNA, 12 nt, Homo sapiens
cuuggcccagga

SEQ ID NO: 22874 - RNA, 22 nt, Homo sapiens
cuuggcccaggaguuuggccag

SEQ ID NO: 22875 - RNA, 23 nt, Homo sapiens
cuuggcccaggaguuuggccaga

SEQ ID NO: 22876 - RNA, 19 nt, Homo sapiens
cuuuaaguguaacuggcag

SEQ ID NO: 22877 - RNA, 20 nt, Homo sapiens
cuuuaaguguaacuggcagu

SEQ ID NO: 22878 - RNA, 16 nt, Homo sapiens
cuuuagggaccugcug

SEQ ID NO: 22879 - RNA, 20 nt, Homo sapiens
cuguccccgaaacuaccagc

SEQ ID NO: 22880 - RNA, 19 nt, Homo sapiens
cuuacuaguuucccuugca

SEQ ID NO: 22881 - RNA, 16 nt, Homo sapiens
cuguugccaaggcugg

SEQ ID NO: 22882 - RNA, 21 nt, Homo sapiens
cuguugccaaggcuggagugc

SEQ ID NO: 22883 - RNA, 21 nt, Homo sapiens
cuguaaaauggagacaccacc

SEQ ID NO: 22884 - RNA, 14 nt, Homo sapiens
cuggucucgaacug

SEQ ID NO: 22885 - RNA, 18 nt, Homo sapiens
cuggucucgaacugcugg

SEQ ID NO: 22886 - RNA, 19 nt, Homo sapiens
cuggucucgaacugcugga

SEQ ID NO: 22887 - RNA, 16 nt, Homo sapiens
cuucaugcauuugcac

SEQ ID NO: 22888 - RNA, 14 nt, Homo sapiens
cuugaugaagaagu

SEQ ID NO: 22889 - RNA, 20 nt, Homo sapiens
cucgaacugcuggauucaag

SEQ ID NO: 22890 - RNA, 12 nt, Homo sapiens
cuccagccuggg

SEQ ID NO: 22891 - RNA, 10 nt, Homo sapiens
cugagcaguc

SEQ ID NO: 22892 - RNA, 14 nt, Homo sapiens
cugagaccagccaa

SEQ ID NO: 22893 - RNA, 15 nt, Homo sapiens
cugagaccagccaac

SEQ ID NO: 22894 - RNA, 20 nt, Homo sapiens
cugagaccagccaaccuggg

SEQ ID NO: 22895 - RNA, 12 nt, Homo sapiens
cugaggcgggug

SEQ ID NO: 22896 - RNA, 13 nt, Homo sapiens
cugaggcgggugg

SEQ ID NO: 22897 - RNA, 21 nt, Homo sapiens
cugcagacaugagagacagca

SEQ ID NO: 22898 - RNA, 21 nt, Homo sapiens
cuggaaaccacauggcuucac

SEQ ID NO: 22899 - RNA, 11 nt, Homo sapiens
cuggaaacuuc

SEQ ID NO: 22900 - RNA, 16 nt, Homo sapiens
cuggccaacgggguga

SEQ ID NO: 22901 - RNA, 20 nt, Homo sapiens
cugcuggauguggagggggc

SEQ ID NO: 22902 - RNA, 18 nt, Homo sapiens
cugccucuaaaaggccug

SEQ ID NO: 22903 - RNA, 18 nt, Homo sapiens
cugccuaagugcagcccc

SEQ ID NO: 22904 - RNA, 14 nt, Homo sapiens
cuggccugcuggau

SEQ ID NO: 22905 - RNA, 16 nt, Homo sapiens
cuggccugcuggaugu

SEQ ID NO: 22906 - RNA, 18 nt, Homo sapiens
cuggccaggcuggucucg

SEQ ID NO: 22907 - RNA, 12 nt, Homo sapiens
cuggccugcugg

SEQ ID NO: 22908 - RNA, 13 nt, Homo sapiens
cuggccugcugga

SEQ ID NO: 22909 - RNA, 13 nt, Homo sapiens
cuggccaggcugg

SEQ ID NO: 22910 - RNA, 20 nt, Homo sapiens
cugggaauuacaggcgugag

SEQ ID NO: 22911 - RNA, 20 nt, Homo sapiens
cuggggcucugggauagcug

SEQ ID NO: 22912 - RNA, 14 nt, Homo sapiens
cuaguuucccuugc

SEQ ID NO: 22913 - RNA, 19 nt, Homo sapiens
cuagggugauauuaaccag

SEQ ID NO: 22914 - RNA, 23 nt, Homo sapiens
cuaguaauuggaaaggcagcucu

SEQ ID NO: 22915 - RNA, 20 nt, Homo sapiens
cucagugucaaugcagcccc

SEQ ID NO: 22916 - RNA, 17 nt, Homo sapiens
cuauguggcuguaucuu

SEQ ID NO: 22917 - RNA, 14 nt, Homo sapiens
cuccaaacuggagc

SEQ ID NO: 22918 - RNA, 16 nt, Homo sapiens
cuccaccuucuggguu

SEQ ID NO: 22919 - RNA, 20 nt, Homo sapiens
cucaugggggugacaagcuu

SEQ ID NO: 22920 - RNA, 19 nt, Homo sapiens
cucauugcaaccuccaccu

SEQ ID NO: 22921 - RNA, 19 nt, Homo sapiens
cucauggaauuggagcucg

SEQ ID NO: 22922 - RNA, 20 nt, Homo sapiens
cucauggaauuggagcucgu

SEQ ID NO: 22923 - RNA, 22 nt, Homo sapiens
cgggaguggcgcgcgccaccac

SEQ ID NO: 22924 - RNA, 23 nt, Homo sapiens
cgggguuugccaugcuggccagg

SEQ ID NO: 22925 - RNA, 19 nt, Homo sapiens
cgggguuugccaugcuggc

SEQ ID NO: 22926 - RNA, 16 nt, Homo sapiens
cgugacuggccugcug

SEQ ID NO: 22927 - RNA, 17 nt, Homo sapiens
cgugacuggccugcugg

SEQ ID NO: 22928 - RNA, 16 nt, Homo sapiens
cgugaccugacagccc

SEQ ID NO: 22929 - RNA, 17 nt, Homo sapiens
cgugaccugacagccca

SEQ ID NO: 22930 - RNA, 14 nt, Homo sapiens
cgugagccaccaaa

SEQ ID NO: 22931 - RNA, 15 nt, Homo sapiens
cgugagccaccaaac

SEQ ID NO: 22932 - RNA, 16 nt, Homo sapiens
cgugagccaccaaacc

SEQ ID NO: 22933 - RNA, 17 nt, Homo sapiens
cgugagccaccaaaccc

SEQ ID NO: 22934 - RNA, 21 nt, Homo sapiens
cgugagccaccaaacccggcc

SEQ ID NO: 22935 - RNA, 12 nt, Homo sapiens
cgugagccacca

SEQ ID NO: 22936 - RNA, 15 nt, Homo sapiens
cgcgccaccacgccc

SEQ ID NO: 22937 - RNA, 11 nt, Homo sapiens
cgggcauggug

SEQ ID NO: 22938 - RNA, 17 nt, Homo sapiens
cgcgcgccaccacgccc

SEQ ID NO: 22939 - RNA, 20 nt, Homo sapiens
cgcgcgccaccacgcccagc

SEQ ID NO: 22940 - RNA, 12 nt, Homo sapiens
cgcgccaccacg

SEQ ID NO: 22941 - RNA, 20 nt, Homo sapiens
gaagaguggguuucacaagu

SEQ ID NO: 22942 - RNA, 21 nt, Homo sapiens
gaagaguggguuucacaagug

SEQ ID NO: 22943 - RNA, 16 nt, Homo sapiens
gaauugacccacaaga

SEQ ID NO: 22944 - RNA, 11 nt, Homo sapiens
gaaugaaugaa

SEQ ID NO: 22945 - RNA, 16 nt, Homo sapiens
gaaucacuugaacccg

SEQ ID NO: 22946 - RNA, 17 nt, Homo sapiens
gaaucacuugaacccgg

SEQ ID NO: 22947 - RNA, 17 nt, Homo sapiens
gaauuggagcucguggg

SEQ ID NO: 22948 - RNA, 16 nt, Homo sapiens
gacaacauuaaaacaa

SEQ ID NO: 22949 - RNA, 15 nt, Homo sapiens
gacccucaugcugcc

SEQ ID NO: 22950 - RNA, 16 nt, Homo sapiens
gacccucaugcugcca

SEQ ID NO: 22951 - RNA, 16 nt, Homo sapiens
gaccagccaaccuggg

SEQ ID NO: 22952 - RNA, 19 nt, Homo sapiens
gaccagccaaccugggggc

SEQ ID NO: 22953 - RNA, 11 nt, Homo sapiens
gacaccaccac

SEQ ID NO: 22954 - RNA, 13 nt, Homo sapiens
gacaccaccaccc

SEQ ID NO: 22955 - RNA, 12 nt, Homo sapiens
gacaccaccacc

SEQ ID NO: 22956 - RNA, 20 nt, Homo sapiens
gacaguuccugagaccagcc

SEQ ID NO: 22957 - RNA, 13 nt, Homo sapiens
aauuagccgggca

SEQ ID NO: 22958 - RNA, 15 nt, Homo sapiens
aauuuugugaagcaa

SEQ ID NO: 22959 - RNA, 15 nt, Homo sapiens
aaugaaugaaugaau

SEQ ID NO: 22960 - RNA, 12 nt, Homo sapiens
aauuagccgggc

SEQ ID NO: 22961 - RNA, 15 nt, Homo sapiens
acacacugaagaagc

SEQ ID NO: 22962 - RNA, 14 nt, Homo sapiens
acacagugucuggc

SEQ ID NO: 22963 - RNA, 19 nt, Homo sapiens
acaccagggccuggcuggg

SEQ ID NO: 22964 - RNA, 23 nt, Homo sapiens
acaccaauauucauagcagcuua

SEQ ID NO: 22965 - RNA, 23 nt, Homo sapiens
gaacccauauuuguacaccaaua

SEQ ID NO: 22966 - RNA, 13 nt, Homo sapiens
gacgugacuggcc

SEQ ID NO: 22967 - RNA, 12 nt, Homo sapiens
gacgaaccuuga

SEQ ID NO: 22968 - RNA, 17 nt, Homo sapiens
gagaaaauaaaagcacu

SEQ ID NO: 22969 - RNA, 16 nt, Homo sapiens
gacuguacccaaaugg

SEQ ID NO: 22970 - RNA, 14 nt, Homo sapiens
gacuugggcgggac

SEQ ID NO: 22971 - RNA, 14 nt, Homo sapiens
gacuggccugcugg

SEQ ID NO: 22972 - RNA, 15 nt, Homo sapiens
gacuggccugcugga

SEQ ID NO: 22973 - RNA, 20 nt, Homo sapiens
gacgugacuggccugcugga

SEQ ID NO: 22974 - RNA, 20 nt, Homo sapiens
gacccucaugcugccaauau

SEQ ID NO: 22975 - RNA, 14 nt, Homo sapiens
gacuaaaaaacaaa

SEQ ID NO: 22976 - RNA, 10 nt, Homo sapiens
gagacaccac

SEQ ID NO: 22977 - RNA, 11 nt, Homo sapiens
gagacaccacc

SEQ ID NO: 22978 - RNA, 12 nt, Homo sapiens
gagacaccacca

SEQ ID NO: 22979 - RNA, 13 nt, Homo sapiens
gagacaccaccac

SEQ ID NO: 22980 - RNA, 13 nt, Homo sapiens
gagaccagccaac

SEQ ID NO: 22981 - RNA, 12 nt, Homo sapiens
gagcaccugcag

SEQ ID NO: 22982 - RNA, 16 nt, Homo sapiens
gagcaccugcaggcgu

SEQ ID NO: 22983 - RNA, 20 nt, Homo sapiens
gagcaccugcaggcgugacc

SEQ ID NO: 22984 - RNA, 14 nt, Homo sapiens
gagacagcaggucu

SEQ ID NO: 22985 - RNA, 15 nt, Homo sapiens
gagacagcaggucuc

SEQ ID NO: 22986 - RNA, 14 nt, Homo sapiens
gauuacccucuggg

SEQ ID NO: 22987 - RNA, 18 nt, Homo sapiens
gauuacccucugggucuc

SEQ ID NO: 22988 - RNA, 19 nt, Homo sapiens
gauucaagugauccgccca

SEQ ID NO: 22989 - RNA, 12 nt, Homo sapiens
gaugaagaaguu

SEQ ID NO: 22990 - RNA, 19 nt, Homo sapiens
gauaagcuauguuguugca

SEQ ID NO: 22991 - RNA, 21 nt, Homo sapiens
gaguggcauguaugacgugac

SEQ ID NO: 22992 - RNA, 14 nt, Homo sapiens
gaguggcgcgcgcc

SEQ ID NO: 22993 - RNA, 18 nt, Homo sapiens
gaggacuugggcgggaca

SEQ ID NO: 22994 - RNA, 19 nt, Homo sapiens
gaggagaaacuggaacucu

SEQ ID NO: 22995 - RNA, 18 nt, Homo sapiens
gaggcagagguugcagug

SEQ ID NO: 22996 - RNA, 12 nt, Homo sapiens
gaggcugagaug

SEQ ID NO: 22997 - RNA, 20 nt, Homo sapiens
gagcugauaucaugccccug

SEQ ID NO: 22998 - RNA, 22 nt, Homo sapiens
gagccaccaaacccggccugau

SEQ ID NO: 22999 - RNA, 19 nt, Homo sapiens
gagccccuugggcagguca

SEQ ID NO: 23000 - RNA, 22 nt, Homo sapiens
gccugcuggauguggagggggc

SEQ ID NO: 23001 - RNA, 15 nt, Homo sapiens
gccucaccccuugcc

SEQ ID NO: 23002 - RNA, 15 nt, Homo sapiens
gccgggcgcgguggc

SEQ ID NO: 23003 - RNA, 12 nt, Homo sapiens
gccugggugaca

SEQ ID NO: 23004 - RNA, 18 nt, Homo sapiens
gccuggugcuuccaaaua

SEQ ID NO: 23005 - RNA, 16 nt, Homo sapiens
gccuguaaucccagca

SEQ ID NO: 23006 - RNA, 22 nt, Homo sapiens
gcccaacuguuauagguuguug

SEQ ID NO: 23007 - RNA, 23 nt, Homo sapiens
gcccaacuguuauagguuguugg

SEQ ID NO: 23008 - RNA, 22 nt, Homo sapiens
gcccacaccagggccuggcugg

SEQ ID NO: 23009 - RNA, 17 nt, Homo sapiens
gcccaggaguuuggcca

SEQ ID NO: 23010 - RNA, 22 nt, Homo sapiens
gcccauccugccccugagccca

SEQ ID NO: 23011 - RNA, 16 nt, Homo sapiens
gcccaucuccgucucc

SEQ ID NO: 23012 - RNA, 18 nt, Homo sapiens
gccccgugggguuccucc

SEQ ID NO: 23013 - RNA, 19 nt, Homo sapiens
gccccgggaguggcgcgcg

SEQ ID NO: 23014 - RNA, 20 nt, Homo sapiens
gccccuguacuccagccugg

SEQ ID NO: 23015 - RNA, 13 nt, Homo sapiens
gcccuucauguac

SEQ ID NO: 23016 - RNA, 19 nt, Homo sapiens
gccgagauugugccccugc

SEQ ID NO: 23017 - RNA, 23 nt, Homo sapiens
gccggagccccuugggcagguca

SEQ ID NO: 23018 - RNA, 18 nt, Homo sapiens
gcagugcuuggcccagga

SEQ ID NO: 23019 - RNA, 19 nt, Homo sapiens
gcaugguggcgcgcaccug

SEQ ID NO: 23020 - RNA, 21 nt, Homo sapiens
gcaugguggcgcgcaccugua

SEQ ID NO: 23021 - RNA, 15 nt, Homo sapiens
gcagugcuuggccca

SEQ ID NO: 23022 - RNA, 12 nt, Homo sapiens
gcaggcagcagg

SEQ ID NO: 23023 - RNA, 15 nt, Homo sapiens
gcaggcgugaccuga

SEQ ID NO: 23024 - RNA, 19 nt, Homo sapiens
gcagucagaagaccugguc

SEQ ID NO: 23025 - RNA, 12 nt, Homo sapiens
gcagugagccga

SEQ ID NO: 23026 - RNA, 13 nt, Homo sapiens
gcagugcuuggcc

SEQ ID NO: 23027 - RNA, 15 nt, Homo sapiens
gcauuguaacuuaug

SEQ ID NO: 23028 - RNA, 21 nt, Homo sapiens
gccaacugggguggguggggc

SEQ ID NO: 23029 - RNA, 13 nt, Homo sapiens
gccaaggcuggag

SEQ ID NO: 23030 - RNA, 16 nt, Homo sapiens
gccaccaaacccggcc

SEQ ID NO: 23031 - RNA, 15 nt, Homo sapiens
gccaccacgcccagc

SEQ ID NO: 23032 - RNA, 16 nt, Homo sapiens
gccaacuaggcagcca

SEQ ID NO: 23033 - RNA, 17 nt, Homo sapiens
gccaugcuggccaggcu

SEQ ID NO: 23034 - RNA, 21 nt, Homo sapiens
gccaugcuggccaggcugguc

SEQ ID NO: 23035 - RNA, 23 nt, Homo sapiens
gccaugcuggccaggcuggucuc

SEQ ID NO: 23036 - RNA, 15 nt, Homo sapiens
gccauggagguuaag

SEQ ID NO: 23037 - RNA, 20 nt, Homo sapiens
gccaugugauuacccucugg

SEQ ID NO: 23038 - RNA, 12 nt, Homo sapiens
gccaggcggcug

SEQ ID NO: 23039 - RNA, 23 nt, Homo sapiens
gcagcucuaaaugucaaucagcc

SEQ ID NO: 23040 - RNA, 19 nt, Homo sapiens
gcaggcgugaccugacagc

SEQ ID NO: 23041 - RNA, 20 nt, Homo sapiens
gcaggcgugaccugacagcc

SEQ ID NO: 23042 - RNA, 13 nt, Homo sapiens
gcagggacuugaa

SEQ ID NO: 23043 - RNA, 14 nt, Homo sapiens
gcagggacuugaac

SEQ ID NO: 23044 - RNA, 15 nt, Homo sapiens
gcagggacuugaacc

SEQ ID NO: 23045 - RNA, 16 nt, Homo sapiens
gcagggacuugaaccc

SEQ ID NO: 23046 - RNA, 17 nt, Homo sapiens
gcagggacuugaaccca

SEQ ID NO: 23047 - RNA, 20 nt, Homo sapiens
gcacuuauuuauuguuguug

SEQ ID NO: 23048 - RNA, 20 nt, Homo sapiens
gcacuuucccucuuggugcc

SEQ ID NO: 23049 - RNA, 21 nt, Homo sapiens
gcacuuucccucuuggugccu

SEQ ID NO: 23050 - RNA, 22 nt, Homo sapiens
gcacuuucccucuuggugccuc

SEQ ID NO: 23051 - RNA, 20 nt, Homo sapiens
gcagagacgggguuugccau

SEQ ID NO: 23052 - RNA, 22 nt, Homo sapiens
gcagccaugugauuacccucug

SEQ ID NO: 23053 - RNA, 17 nt, Homo sapiens
gcaccuguaaucccagc

SEQ ID NO: 23054 - RNA, 12 nt, Homo sapiens
gcaccugcaggc

SEQ ID NO: 23055 - RNA, 15 nt, Homo sapiens
gcaccugcaggcgug

SEQ ID NO: 23056 - RNA, 15 nt, Homo sapiens
gcaaccuccaccuuc

SEQ ID NO: 23057 - RNA, 18 nt, Homo sapiens
gcaaccuccaccuucugg

SEQ ID NO: 23058 - RNA, 22 nt, Homo sapiens
gcaaccuccaccuucuggguuc

SEQ ID NO: 23059 - RNA, 16 nt, Homo sapiens
gcaaccuuuggaugca

SEQ ID NO: 23060 - RNA, 16 nt, Homo sapiens
agccaccaaacccggc

SEQ ID NO: 23061 - RNA, 17 nt, Homo sapiens
agccagcacagccucuu

SEQ ID NO: 23062 - RNA, 14 nt, Homo sapiens
agccaggcggcugg

SEQ ID NO: 23063 - RNA, 19 nt, Homo sapiens
agccaucggagcugcuaga

SEQ ID NO: 23064 - RNA, 15 nt, Homo sapiens
agcacuuugggaggc

SEQ ID NO: 23065 - RNA, 17 nt, Homo sapiens
agcagggacuugaaccc

SEQ ID NO: 23066 - RNA, 18 nt, Homo sapiens
agcagggacuugaaccca

SEQ ID NO: 23067 - RNA, 17 nt, Homo sapiens
agcccacuggcucccug

SEQ ID NO: 23068 - RNA, 18 nt, Homo sapiens
agccccgggaguggcgcg

SEQ ID NO: 23069 - RNA, 19 nt, Homo sapiens
agccccuugggcaggucac

SEQ ID NO: 23070 - RNA, 23 nt, Homo sapiens
agacgggguuugccaugcuggcc

SEQ ID NO: 23071 - RNA, 22 nt, Homo sapiens
agagacgggguuugccaugcug

SEQ ID NO: 23072 - RNA, 12 nt, Homo sapiens
agacagcagguc

SEQ ID NO: 23073 - RNA, 14 nt, Homo sapiens
agacagcaggucuc

SEQ ID NO: 23074 - RNA, 15 nt, Homo sapiens
agacccucaugcugc

SEQ ID NO: 23075 - RNA, 16 nt, Homo sapiens
agacccucaugcugcc

SEQ ID NO: 23076 - RNA, 14 nt, Homo sapiens
agauaugaggcauu

SEQ ID NO: 23077 - RNA, 21 nt, Homo sapiens
agcaacccaaauguucaucaa

SEQ ID NO: 23078 - RNA, 18 nt, Homo sapiens
agcuguuuucccugaccu

SEQ ID NO: 23079 - RNA, 15 nt, Homo sapiens
agcuuauucacaaga

SEQ ID NO: 23080 - RNA, 20 nt, Homo sapiens
agcuaaguugcaccaacuuu

SEQ ID NO: 23081 - RNA, 21 nt, Homo sapiens
aggcuggagugcaguggcgca

SEQ ID NO: 23082 - RNA, 17 nt, Homo sapiens
aggcagaagcaacccaa

SEQ ID NO: 23083 - RNA, 21 nt, Homo sapiens
aggcagagguugcagugagcc

SEQ ID NO: 23084 - RNA, 16 nt, Homo sapiens
aggcauuugcagcugu

SEQ ID NO: 23085 - RNA, 19 nt, Homo sapiens
agccugaaagaggaaugaa

SEQ ID NO: 23086 - RNA, 22 nt, Homo sapiens
aggacuugggcgggacacaggc

SEQ ID NO: 23087 - RNA, 22 nt, Homo sapiens
aggaguuccuaaccagccuggu

SEQ ID NO: 23088 - RNA, 16 nt, Homo sapiens
aggaguuuggccagaa

SEQ ID NO: 23089 - RNA, 16 nt, Homo sapiens
agaagaugguaccacc

SEQ ID NO: 23090 - RNA, 17 nt, Homo sapiens
agaagaugguaccacca

SEQ ID NO: 23091 - RNA, 20 nt, Homo sapiens
acuugaaugugucaggugac

SEQ ID NO: 23092 - RNA, 12 nt, Homo sapiens
acuuuccagaga

SEQ ID NO: 23093 - RNA, 15 nt, Homo sapiens
acuuugggaggcuga

SEQ ID NO: 23094 - RNA, 21 nt, Homo sapiens
acucaucaaucaaauaaguau

SEQ ID NO: 23095 - RNA, 19 nt, Homo sapiens
acucauugcaaccuccacc

SEQ ID NO: 23096 - RNA, 21 nt, Homo sapiens
acuccugguuccuaggugagc

SEQ ID NO: 23097 - RNA, 20 nt, Homo sapiens
acucuacagccaggcggcug

SEQ ID NO: 23098 - RNA, 16 nt, Homo sapiens
acugcauacaaucuga

SEQ ID NO: 23099 - RNA, 16 nt, Homo sapiens
acuggccugcuggaug

SEQ ID NO: 23100 - RNA, 23 nt, Homo sapiens
acugggguggguggggcagugcu

SEQ ID NO: 23101 - RNA, 18 nt, Homo sapiens
acuagauacugaauguaa

SEQ ID NO: 23102 - RNA, 19 nt, Homo sapiens
acuagauacugaauguaaa

SEQ ID NO: 23103 - RNA, 19 nt, Homo sapiens
acgugacuggccugcugga

SEQ ID NO: 23104 - RNA, 20 nt, Homo sapiens
acgugacuggccugcuggau

SEQ ID NO: 23105 - RNA, 14 nt, Homo sapiens
acgugacuggccug

SEQ ID NO: 23106 - RNA, 23 nt, Homo sapiens
acgggguuugccaugcuggccag

SEQ ID NO: 23107 - RNA, 16 nt, Homo sapiens
accuccaccuucuggg

SEQ ID NO: 23108 - RNA, 11 nt, Homo sapiens
acccgggaggc

SEQ ID NO: 23109 - RNA, 12 nt, Homo sapiens
acccgggaggca

SEQ ID NO: 23110 - RNA, 14 nt, Homo sapiens
accuguccccgaaa

SEQ ID NO: 23111 - RNA, 20 nt, Homo sapiens
accaaggcugauuaaaccaa

SEQ ID NO: 23112 - RNA, 11 nt, Homo sapiens
accugagcccc

SEQ ID NO: 23113 - RNA, 11 nt, Homo sapiens
accugcaggcg

SEQ ID NO: 23114 - RNA, 23 nt, Homo sapiens
accugcuguuuccuagcgcagcc

SEQ ID NO: 23115 - RNA, 18 nt, Homo sapiens
acaaaaauuagccgggca

SEQ ID NO: 23116 - RNA, 16 nt, Homo sapiens
aauuuugugaagcaaa

SEQ ID NO: 23117 - RNA, 21 nt, Homo sapiens
aauugaauucccugccuggau

SEQ ID NO: 23118 - RNA, 14 nt, Homo sapiens
aaugaaugaaugaa

SEQ ID NO: 23119 - RNA, 18 nt, Homo sapiens
aauccagaaauaaugaaa

SEQ ID NO: 23120 - RNA, 10 nt, Homo sapiens
aaugugcaau

SEQ ID NO: 23121 - RNA, 19 nt, Homo sapiens
aauuagccgggcauggugg

SEQ ID NO: 23122 - RNA, 16 nt, Homo sapiens
aagugaaaaacaucca

SEQ ID NO: 23123 - RNA, 11 nt, Homo sapiens
aaguucugcag

SEQ ID NO: 23124 - RNA, 17 nt, Homo sapiens
aauaaaaaggugaccau

SEQ ID NO: 23125 - RNA, 16 nt, Homo sapiens
aauaaaaaggugacca

SEQ ID NO: 23126 - RNA, 15 nt, Homo sapiens
accagggccuggcug

SEQ ID NO: 23127 - RNA, 18 nt, Homo sapiens
acauccagauagguuacc

SEQ ID NO: 23128 - RNA, 11 nt, Homo sapiens
acaggcgugag

SEQ ID NO: 23129 - RNA, 19 nt, Homo sapiens
acagugauuaccagggacu

SEQ ID NO: 23130 - RNA, 14 nt, Homo sapiens
acacuuauaaguga

SEQ ID NO: 23131 - RNA, 15 nt, Homo sapiens
acacuuauaagugaa

SEQ ID NO: 23132 - RNA, 20 nt, Homo sapiens
acaaccuaaauuugguucua

SEQ ID NO: 23133 - RNA, 22 nt, Homo sapiens
acaagaaaugaaagcagggacu

SEQ ID NO: 23134 - RNA, 23 nt, Homo sapiens
acaagaaaugaaagcagggacuu

SEQ ID NO: 23135 - RNA, 19 nt, Homo sapiens
acaaaaauuagccgggcau

SEQ ID NO: 23136 - RNA, 12 nt, Homo sapiens
acaccaccaccc

SEQ ID NO: 23137 - RNA, 16 nt, Homo sapiens
acagcccaaggguggg

SEQ ID NO: 23138 - RNA, 18 nt, Homo sapiens
acagcuacuugggaggcu

SEQ ID NO: 23139 - RNA, 12 nt, Homo sapiens
acaggaaccaca

SEQ ID NO: 23140 - RNA, 19 nt, Homo sapiens
acaggaaguagaggaggcc

SEQ ID NO: 23141 - RNA, 22 nt, Homo sapiens
acaggaaguagaggaggccacg

SEQ ID NO: 23142 - RNA, 17 nt, Homo sapiens
aagacccaaaaggcaga

SEQ ID NO: 23143 - RNA, 22 nt, Homo sapiens
aacugggguggguggggcagug

SEQ ID NO: 23144 - RNA, 19 nt, Homo sapiens
aacugacucuuaagaagac

SEQ ID NO: 23145 - RNA, 11 nt, Homo sapiens
aaggugaccau

SEQ ID NO: 23146 - RNA, 17 nt, Homo sapiens
aaguauccuucagccug

SEQ ID NO: 23147 - RNA, 16 nt, Homo sapiens
aagugaaauaagccag

SEQ ID NO: 23148 - RNA, 15 nt, Homo sapiens
aaggcuggagugcag

SEQ ID NO: 23149 - RNA, 22 nt, Homo sapiens
aagcuuccauuccaagccugac

SEQ ID NO: 23150 - RNA, 13 nt, Homo sapiens
aagcaacccaaau

SEQ ID NO: 23151 - RNA, 22 nt, Homo sapiens
aagccagauuuuccugaaaacc

SEQ ID NO: 23152 - RNA, 20 nt, Homo sapiens
aagccaucggagcugcuaga

SEQ ID NO: 23153 - RNA, 20 nt, Homo sapiens
aacugacucuuaagaagacu

SEQ ID NO: 23154 - RNA, 15 nt, Homo sapiens
aacucagaaacauca

SEQ ID NO: 23155 - RNA, 11 nt, Homo sapiens
aaccugagccc

SEQ ID NO: 23156 - RNA, 15 nt, Homo sapiens
aaccugucccagcga

SEQ ID NO: 23157 - RNA, 13 nt, Homo sapiens
aacccggccugau

SEQ ID NO: 23158 - RNA, 18 nt, Homo sapiens
aaggccugucccugcaga

SEQ ID NO: 23159 - RNA, 22 nt, Homo sapiens
aaggcuuagacccucaugcugc

SEQ ID NO: 23160 - RNA, 23 nt, Homo sapiens
aaggcuuagacccucaugcugcc

SEQ ID NO: 23161 - RNA, 23 nt, Homo sapiens
aaacauccagauacacccaaagu

SEQ ID NO: 23162 - RNA, 12 nt, Homo sapiens
aaaagaaagaaa

SEQ ID NO: 23163 - RNA, 14 nt, Homo sapiens
aaaaguagaauaaa

SEQ ID NO: 23164 - RNA, 17 nt, Homo sapiens
aaagucagugcccaacu

SEQ ID NO: 23165 - RNA, 19 nt, Homo sapiens
aaagucagugcccaacugu

SEQ ID NO: 23166 - RNA, 22 nt, Homo sapiens
aacauuugguaaggggaauuga

SEQ ID NO: 23167 - RNA, 21 nt, Homo sapiens
aaauguucaucaaugaaugaa

SEQ ID NO: 23168 - RNA, 13 nt, Homo sapiens
aaacccggccuga

SEQ ID NO: 23169 - RNA, 12 nt, Homo sapiens
aaaaggaagaaa

SEQ ID NO: 23170 - RNA, 13 nt, Homo sapiens
aucaaugaaugaa

SEQ ID NO: 23171 - RNA, 14 nt, Homo sapiens
aucaaugaaugaau

SEQ ID NO: 23172 - RNA, 17 nt, Homo sapiens
aucaggcuggccaacgg

SEQ ID NO: 23173 - RNA, 20 nt, Homo sapiens
aucccagcuacuugggaggc

SEQ ID NO: 23174 - RNA, 20 nt, Homo sapiens
auccuaauaaaaaggugacc

SEQ ID NO: 23175 - RNA, 21 nt, Homo sapiens
auccuaauaaaaaggugacca

SEQ ID NO: 23176 - RNA, 22 nt, Homo sapiens
auccuaauaaaaaggugaccau

SEQ ID NO: 23177 - RNA, 17 nt, Homo sapiens
aucucacaagcacuuuc

SEQ ID NO: 23178 - RNA, 19 nt, Homo sapiens
aucucacaagcacuuuccc

SEQ ID NO: 23179 - RNA, 24 nt, Homo sapiens
aucucaggagauuucaugccuggu

SEQ ID NO: 23180 - RNA, 21 nt, Homo sapiens
auguggagggggcgcgugcag

SEQ ID NO: 23181 - RNA, 23 nt, Homo sapiens
auguggagggggcgcgugcaggc

SEQ ID NO: 23182 - RNA, 19 nt, Homo sapiens
augucauuugcuggagcuc

SEQ ID NO: 23183 - RNA, 14 nt, Homo sapiens
auggagacaccacc

SEQ ID NO: 23184 - RNA, 15 nt, Homo sapiens
auggagacaccacca

SEQ ID NO: 23185 - RNA, 12 nt, Homo sapiens
auggagacacca

SEQ ID NO: 23186 - RNA, 13 nt, Homo sapiens
auggagacaccac

SEQ ID NO: 23187 - RNA, 16 nt, Homo sapiens
augaaguacucauaca

SEQ ID NO: 23188 - RNA, 18 nt, Homo sapiens
aucuguaaaauggagaca

SEQ ID NO: 23189 - RNA, 15 nt, Homo sapiens
aucuuguuuuuccac

SEQ ID NO: 23190 - RNA, 11 nt, Homo sapiens
aucuuucacau

SEQ ID NO: 23191 - RNA, 14 nt, Homo sapiens
augacgugacuggc

SEQ ID NO: 23192 - RNA, 15 nt, Homo sapiens
augcuggccaggcug

SEQ ID NO: 23193 - RNA, 16 nt, Homo sapiens
auaaaaaggugaccau

SEQ ID NO: 23194 - RNA, 18 nt, Homo sapiens
auacaaaaauuagccggg

SEQ ID NO: 23195 - RNA, 20 nt, Homo sapiens
auacaaaaauuagccgggca

SEQ ID NO: 23196 - RNA, 16 nt, Homo sapiens
auacaaucaucaaccc

SEQ ID NO: 23197 - RNA, 14 nt, Homo sapiens
agucagaagaccug

SEQ ID NO: 23198 - RNA, 15 nt, Homo sapiens
agucagaagaccugg

SEQ ID NO: 23199 - RNA, 13 nt, Homo sapiens
agugcaguggcgc

SEQ ID NO: 23200 - RNA, 14 nt, Homo sapiens
agugcaguggcgca

SEQ ID NO: 23201 - RNA, 15 nt, Homo sapiens
agugcuuggcccagg

SEQ ID NO: 23202 - RNA, 19 nt, Homo sapiens
agugcuuggcccaggaguu

SEQ ID NO: 23203 - RNA, 19 nt, Homo sapiens
aguggcauguaugacguga

SEQ ID NO: 23204 - RNA, 19 nt, Homo sapiens
aguggcgcgcgccaccacg

SEQ ID NO: 23205 - RNA, 18 nt, Homo sapiens
agguauuuuaaucaccaa

SEQ ID NO: 23206 - RNA, 19 nt, Homo sapiens
agguauuuuaaucaccaag

SEQ ID NO: 23207 - RNA, 9 nt, Homo sapiens
aggugacca

SEQ ID NO: 23208 - RNA, 22 nt, Homo sapiens
agugacauguuuacaaaccuca

SEQ ID NO: 23209 - RNA, 23 nt, Homo sapiens
agugacauguuuacaaaccucaa

SEQ ID NO: 23210 - RNA, 17 nt, Homo sapiens
aggguggguggggugag

SEQ ID NO: 23211 - RNA, 17 nt, Homo sapiens
aggguacacugccuucu

SEQ ID NO: 23212 - RNA, 11 nt, Homo sapiens
agggaccugcu

SEQ ID NO: 23213 - RNA, 17 nt, Homo sapiens
aggcuggucucgaacug

SEQ ID NO: 23214 - RNA, 21 nt, Homo sapiens
aggcuuagacccucaugcugc

SEQ ID NO: 23215 - RNA, 15 nt, Homo sapiens
agggacuugaaccca

SEQ ID NO: 23216 - RNA, 22 nt, Homo sapiens
cacugguucuucuuggucucag

SEQ ID NO: 23217 - RNA, 21 nt, Homo sapiens
cacugaagaagcaccaaucau

SEQ ID NO: 23218 - RNA, 12 nt, Homo sapiens
cacugcauacaa

SEQ ID NO: 23219 - RNA, 23 nt, Homo sapiens
cagacaugagagacagcaggucu

SEQ ID NO: 23220 - RNA, 14 nt, Homo sapiens
cagaagucaaggcu

SEQ ID NO: 23221 - RNA, 14 nt, Homo sapiens
cagccaggcggcug

SEQ ID NO: 23222 - RNA, 15 nt, Homo sapiens
cagccaggcggcugg

SEQ ID NO: 23223 - RNA, 22 nt, Homo sapiens
cagcaggauagagugggacagu

SEQ ID NO: 23224 - RNA, 18 nt, Homo sapiens
cagccugaaagaggaaug

SEQ ID NO: 23225 - RNA, 13 nt, Homo sapiens
cagccugggugac

SEQ ID NO: 23226 - RNA, 14 nt, Homo sapiens
cagccugggugaca

SEQ ID NO: 23227 - RNA, 14 nt, Homo sapiens
caccugcaggcgug

SEQ ID NO: 23228 - RNA, 18 nt, Homo sapiens
cacccuugccauggaggu

SEQ ID NO: 23229 - RNA, 10 nt, Homo sapiens
caccaccacc

SEQ ID NO: 23230 - RNA, 19 nt, Homo sapiens
caccacccuugccauggag

SEQ ID NO: 23231 - RNA, 17 nt, Homo sapiens
caccagggccuggcugg

SEQ ID NO: 23232 - RNA, 16 nt, Homo sapiens
caccucauggaauugg

SEQ ID NO: 23233 - RNA, 14 nt, Homo sapiens
cacacugaagaagc

SEQ ID NO: 23234 - RNA, 17 nt, Homo sapiens
cacaaccacucauucaa

SEQ ID NO: 23235 - RNA, 21 nt, Homo sapiens
cacaacuauauuaucaugcaa

SEQ ID NO: 23236 - RNA, 16 nt, Homo sapiens
cacaagacugcacauc

SEQ ID NO: 23237 - RNA, 14 nt, Homo sapiens
cacaugauccugca

SEQ ID NO: 23238 - RNA, 13 nt, Homo sapiens
cacagugucuggc

SEQ ID NO: 23239 - RNA, 20 nt, Homo sapiens
cacaggcuccaaacuggagc

SEQ ID NO: 23240 - RNA, 16 nt, Homo sapiens
auuuuaaucaccaagg

SEQ ID NO: 23241 - RNA, 13 nt, Homo sapiens
auuuucaccuguu

SEQ ID NO: 23242 - RNA, 14 nt, Homo sapiens
caaacgaaaaacau

SEQ ID NO: 23243 - RNA, 14 nt, Homo sapiens
caaaugcuguauuc

SEQ ID NO: 23244 - RNA, 18 nt, Homo sapiens
caacuggggugggugggg

SEQ ID NO: 23245 - RNA, 15 nt, Homo sapiens
caagacccaaaaggc

SEQ ID NO: 23246 - RNA, 17 nt, Homo sapiens
caagacugcacaucaaa

SEQ ID NO: 23247 - RNA, 17 nt, Homo sapiens
caagccaucggagcugc

SEQ ID NO: 23248 - RNA, 15 nt, Homo sapiens
caagcucacagaccu

SEQ ID NO: 23249 - RNA, 21 nt, Homo sapiens
caaggcuggagugcaguggcg

SEQ ID NO: 23250 - RNA, 22 nt, Homo sapiens
caaggcuggagugcaguggcgc

SEQ ID NO: 23251 - RNA, 16 nt, Homo sapiens
caaggcuuagacccuc

SEQ ID NO: 23252 - RNA, 13 nt, Homo sapiens
caaucaucaaccc

SEQ ID NO: 23253 - RNA, 14 nt, Homo sapiens
caaucaucaacccc

SEQ ID NO: 23254 - RNA, 11 nt, Homo sapiens
auuugguucua

SEQ ID NO: 23255 - RNA, 14 nt, Homo sapiens
auucugcaagcuuu

SEQ ID NO: 23256 - RNA, 16 nt, Homo sapiens
auugagcaccugcagg

SEQ ID NO: 23257 - RNA, 20 nt, Homo sapiens
auugagcaccugcaggcgug

SEQ ID NO: 23258 - RNA, 17 nt, Homo sapiens
auugcuaucgccaucac

SEQ ID NO: 23259 - RNA, 18 nt, Homo sapiens
auuggagcucgugggaca

SEQ ID NO: 23260 - RNA, 16 nt, Homo sapiens
auguugacaugggaca

SEQ ID NO: 23261 - RNA, 16 nt, Homo sapiens
auuacuguaagaaaau

SEQ ID NO: 23262 - RNA, 12 nt, Homo sapiens
auuagccgggca

SEQ ID NO: 23263 - RNA, 21 nt, Homo sapiens
auucagccccgggaguggcgc

SEQ ID NO: 23264 - RNA, 22 nt, Homo sapiens
auucagccccgggaguggcgcg

SEQ ID NO: 23265 - RNA, 11 nt, Homo sapiens
cauguuuucuu

SEQ ID NO: 23266 - RNA, 15 nt, Homo sapiens
cauggaucugguagg

SEQ ID NO: 23267 - RNA, 20 nt, Homo sapiens
cauggaauuggagcucgugg

SEQ ID NO: 23268 - RNA, 15 nt, Homo sapiens
cauggugugcuggcu

SEQ ID NO: 23269 - RNA, 19 nt, Homo sapiens
caugcugccaauauccuaa

SEQ ID NO: 23270 - RNA, 22 nt, Homo sapiens
cauccugccccugagcccaugg

SEQ ID NO: 23271 - RNA, 16 nt, Homo sapiens
caugaaguccaagcau

SEQ ID NO: 23272 - RNA, 17 nt, Homo sapiens
caugaaguccaagcauu

SEQ ID NO: 23273 - RNA, 13 nt, Homo sapiens
cauagggugacac

SEQ ID NO: 23274 - RNA, 20 nt, Homo sapiens
caguuccugagaccagccaa

SEQ ID NO: 23275 - RNA, 21 nt, Homo sapiens
caguuccugagaccagccaac

SEQ ID NO: 23276 - RNA, 21 nt, Homo sapiens
caucaaggguacacugccuuc

SEQ ID NO: 23277 - RNA, 17 nt, Homo sapiens
cagggaaagggucuccc

SEQ ID NO: 23278 - RNA, 12 nt, Homo sapiens
cagugagccgag

SEQ ID NO: 23279 - RNA, 15 nt, Homo sapiens
cagugagccgagauu

SEQ ID NO: 23280 - RNA, 16 nt, Homo sapiens
cagugagccgagauug

SEQ ID NO: 23281 - RNA, 19 nt, Homo sapiens
cagugauuaccagggacug

SEQ ID NO: 23282 - RNA, 14 nt, Homo sapiens
cagugcuuggccca

SEQ ID NO: 23283 - RNA, 16 nt, Homo sapiens
cagugcuuggcccagg

SEQ ID NO: 23284 - RNA, 17 nt, Homo sapiens
cagugcuuggcccagga

SEQ ID NO: 23285 - RNA, 17 nt, Homo sapiens
cagugucaaugcagccc

SEQ ID NO: 23286 - RNA, 18 nt, Homo sapiens
caggcgugaccugacagc

SEQ ID NO: 23287 - RNA, 21 nt, Homo sapiens
caggcgugaccugacagccca

SEQ ID NO: 23288 - RNA, 16 nt, Homo sapiens
caggcgugagccacca

SEQ ID NO: 23289 - RNA, 13 nt, Homo sapiens
ccaagccugacca

SEQ ID NO: 23290 - RNA, 19 nt, Homo sapiens
cauuugcuggagcucugcc

SEQ ID NO: 23291 - RNA, 20 nt, Homo sapiens
ccaaauucacaaguuguguu

SEQ ID NO: 23292 - RNA, 15 nt, Homo sapiens
cauugcaaccuccac

SEQ ID NO: 23293 - RNA, 14 nt, Homo sapiens
ccacuacugcuacc

SEQ ID NO: 23294 - RNA, 10 nt, Homo sapiens
ccagagacca

SEQ ID NO: 23295 - RNA, 14 nt, Homo sapiens
ccagaagucaaggc

SEQ ID NO: 23296 - RNA, 21 nt, Homo sapiens
ccacaccagggccuggcuggg

SEQ ID NO: 23297 - RNA, 10 nt, Homo sapiens
ccacagcugu

SEQ ID NO: 23298 - RNA, 14 nt, Homo sapiens
ccacaggaaccaca

SEQ ID NO: 23299 - RNA, 14 nt, Homo sapiens
ccaccaaacccggc

SEQ ID NO: 23300 - RNA, 14 nt, Homo sapiens
ccaccacgcccagc

SEQ ID NO: 23301 - RNA, 19 nt, Homo sapiens
ccaggaguuuggccagaag

SEQ ID NO: 23302 - RNA, 16 nt, Homo sapiens
ccaggaaaaucugcac

SEQ ID NO: 23303 - RNA, 16 nt, Homo sapiens
ccaggaguuuggccag

SEQ ID NO: 23304 - RNA, 19 nt, Homo sapiens
ccagggccuggcugggagu

SEQ ID NO: 23305 - RNA, 22 nt, Homo sapiens
ccagggccuggcugggaguggc

SEQ ID NO: 23306 - RNA, 16 nt, Homo sapiens
ccaaguuuauauacaa

SEQ ID NO: 23307 - RNA, 17 nt, Homo sapiens
ccagcccuacaccauuc

SEQ ID NO: 23308 - RNA, 14 nt, Homo sapiens
cccaagaaugagaa

SEQ ID NO: 23309 - RNA, 22 nt, Homo sapiens
cccagcacuuugggaggcugag

SEQ ID NO: 23310 - RNA, 15 nt, Homo sapiens
cccagcuacuuggga

SEQ ID NO: 23311 - RNA, 15 nt, Homo sapiens
ccauagggugacaca

SEQ ID NO: 23312 - RNA, 13 nt, Homo sapiens
ccauagggugaca

SEQ ID NO: 23313 - RNA, 14 nt, Homo sapiens
ccauagggugacac

SEQ ID NO: 23314 - RNA, 18 nt, Homo sapiens
cccugccuggaucucaca

SEQ ID NO: 23315 - RNA, 18 nt, Homo sapiens
ccgggaguggcgcgcgcc

SEQ ID NO: 23316 - RNA, 21 nt, Homo sapiens
ccgggaguggcgcgcgccacc

SEQ ID NO: 23317 - RNA, 23 nt, Homo sapiens
ccgggaguggcgcgcgccaccac

SEQ ID NO: 23318 - RNA, 22 nt, Homo sapiens
ccggagccccuugggcagguca

SEQ ID NO: 23319 - RNA, 16 nt, Homo sapiens
ccgcccaucuccgucu

SEQ ID NO: 23320 - RNA, 11 nt, Homo sapiens
cccucuggguc

SEQ ID NO: 23321 - RNA, 20 nt, Homo sapiens
cccacaccagggccuggcug

SEQ ID NO: 23322 - RNA, 14 nt, Homo sapiens
cccucaugcugcca

SEQ ID NO: 23323 - RNA, 16 nt, Homo sapiens
cccucaugcugccaau

SEQ ID NO: 23324 - RNA, 20 nt, Homo sapiens
ccccgggaguggcgcgcgcc

SEQ ID NO: 23325 - RNA, 11 nt, Homo sapiens
cccggccugau

SEQ ID NO: 23326 - RNA, 13 nt, Homo sapiens
cccgggaggcaga

SEQ ID NO: 23327 - RNA, 12 nt, Homo sapiens
cccgggaguggc

SEQ ID NO: 23328 - RNA, 13 nt, Homo sapiens
cccgggaguggcg

SEQ ID NO: 23329 - RNA, 14 nt, Homo sapiens
cccaggaguuuggc

SEQ ID NO: 23330 - RNA, 17 nt, Homo sapiens
cccgaaacuaccagccc

SEQ ID NO: 23331 - RNA, 16 nt, Homo sapiens
ccugccccugagccca

SEQ ID NO: 23332 - RNA, 12 nt, Homo sapiens
ccugagaccagc

SEQ ID NO: 23333 - RNA, 13 nt, Homo sapiens
ccugagaccagcc

SEQ ID NO: 23334 - RNA, 11 nt, Homo sapiens
ccugagcccca

SEQ ID NO: 23335 - RNA, 21 nt, Homo sapiens
ccugcacuccagccugagcga

SEQ ID NO: 23336 - RNA, 14 nt, Homo sapiens
ccugcaggcgugac

SEQ ID NO: 23337 - RNA, 18 nt, Homo sapiens
ccucuguugccaaggcug

SEQ ID NO: 23338 - RNA, 12 nt, Homo sapiens
ccucuuucaaag

SEQ ID NO: 23339 - RNA, 13 nt, Homo sapiens
ccucuuucaaagg

SEQ ID NO: 23340 - RNA, 16 nt, Homo sapiens
ccuacaugagguacug

SEQ ID NO: 23341 - RNA, 13 nt, Homo sapiens
ccuagcgcagcca

SEQ ID NO: 23342 - RNA, 20 nt, Homo sapiens
ccucauggaauuggagcucg

SEQ ID NO: 23343 - RNA, 17 nt, Homo sapiens
ccuaauaaaaaggugac

SEQ ID NO: 23344 - RNA, 21 nt, Homo sapiens
cgauucucuuuauucagcccc

SEQ ID NO: 23345 - RNA, 19 nt, Homo sapiens
cgcaccuguaaucccagcu

SEQ ID NO: 23346 - RNA, 20 nt, Homo sapiens
cgcaccuguaaucccagcua

SEQ ID NO: 23347 - RNA, 15 nt, Homo sapiens
cgcagccaugugauu

SEQ ID NO: 23348 - RNA, 14 nt, Homo sapiens
cgccaccacgccca

SEQ ID NO: 23349 - RNA, 16 nt, Homo sapiens
ccuucuggguucaagc

SEQ ID NO: 23350 - RNA, 19 nt, Homo sapiens
ccuggucaacauggugaaa

SEQ ID NO: 23351 - RNA, 13 nt, Homo sapiens
agauaaacaguag

SEQ ID NO: 23352 - RNA, 19 nt, Homo sapiens
guugaaaaaguucugcaga

SEQ ID NO: 23353 - RNA, 14 nt, Homo sapiens
acugcauacaaucu

SEQ ID NO: 23354 - RNA, 15 nt, Homo sapiens
auuguaacuuaugaa

SEQ ID NO: 23355 - RNA, 14 nt, Homo sapiens
caccuguaauccca

SEQ ID NO: 23356 - RNA, 21 nt, Homo sapiens
aggaauauuugcaagacauag

SEQ ID NO: 23357 - RNA, 16 nt, Homo sapiens
caccaaacccggccug

SEQ ID NO: 23358 - RNA, 23 nt, Homo sapiens
caagccagccuugcuccuggcug

SEQ ID NO: 23359 - RNA, 20 nt, Homo sapiens
gcugucuauguggcuguauc

SEQ ID NO: 23360 - RNA, 10 nt, Homo sapiens
aaaauaugcc

SEQ ID NO: 23361 - RNA, 22 nt, Homo sapiens
uucucuucacagucacauucca

SEQ ID NO: 23362 - RNA, 21 nt, Homo sapiens
uaagguauauaaauuuuccca

SEQ ID NO: 23363 - RNA, 22 nt, Homo sapiens
ugcagcccccauuguggucaca

SEQ ID NO: 23364 - RNA, 15 nt, Homo sapiens
ugacugucucacuua

SEQ ID NO: 23365 - RNA, 16 nt, Homo sapiens
uccuucucaucuguga

SEQ ID NO: 23366 - RNA, 12 nt, Homo sapiens
aaguuuaugcau

SEQ ID NO: 23367 - RNA, 22 nt, Homo sapiens
caguaacggaacaguauccagu

SEQ ID NO: 23368 - RNA, 21 nt, Homo sapiens
ccaggagauggaaguugcagu

SEQ ID NO: 23369 - RNA, 18 nt, Homo sapiens
acaauuauaucaguccuc

SEQ ID NO: 23370 - RNA, 19 nt, Homo sapiens
agguauuuauugagcaccu

SEQ ID NO: 23371 - RNA, 17 nt, Homo sapiens
aaaguucugcagauaaa

SEQ ID NO: 23372 - RNA, 12 nt, Homo sapiens
auagcaagugaa

SEQ ID NO: 23373 - RNA, 12 nt, Homo sapiens
auagaauuaaca

SEQ ID NO: 23374 - RNA, 14 nt, Homo sapiens
uauuuuuaugugca

SEQ ID NO: 23375 - RNA, 14 nt, Homo sapiens
uuuaugauuccacc

SEQ ID NO: 23376 - RNA, 18 nt, Homo sapiens
auggcuaguaucaaaaga

SEQ ID NO: 23377 - RNA, 13 nt, Homo sapiens
acaucuuucacau

SEQ ID NO: 23378 - RNA, 16 nt, Homo sapiens
caccagggccuggcug

SEQ ID NO: 23379 - RNA, 15 nt, Homo sapiens
aagagaucaagccau

SEQ ID NO: 23380 - RNA, 14 nt, Homo sapiens
ucaguccucuuuca

SEQ ID NO: 23381 - RNA, 16 nt, Homo sapiens
uguguggcauuuucac

SEQ ID NO: 23382 - RNA, 21 nt, Homo sapiens
aucauuucaaaacucauuucc

SEQ ID NO: 23383 - RNA, 19 nt, Homo sapiens
aacaucaguuacucugaag

SEQ ID NO: 23384 - RNA, 18 nt, Homo sapiens
guauuuauugagcaccug

SEQ ID NO: 23385 - RNA, 17 nt, Homo sapiens
auagaauuaacacauga

SEQ ID NO: 23386 - RNA, 15 nt, Homo sapiens
agguuaagcacuuua

SEQ ID NO: 23387 - RNA, 14 nt, Homo sapiens
ccaaguuuauauac

SEQ ID NO: 23388 - RNA, 15 nt, Homo sapiens
agacucugucucagu

SEQ ID NO: 23389 - RNA, 17 nt, Homo sapiens
aauauuuuuaugugcaa

SEQ ID NO: 23390 - RNA, 12 nt, Homo sapiens
acuuugugaaaa

SEQ ID NO: 23391 - RNA, 15 nt, Homo sapiens
cugcaagcuuuucaa

SEQ ID NO: 23392 - RNA, 13 nt, Homo sapiens
aaguacagacuuu

SEQ ID NO: 23393 - RNA, 16 nt, Homo sapiens
cuaaccagccugguca

SEQ ID NO: 23394 - RNA, 21 nt, Homo sapiens
caguaauuuuaaguaauuuca

SEQ ID NO: 23395 - RNA, 13 nt, Homo sapiens
augacacaucucu

SEQ ID NO: 23396 - RNA, 17 nt, Homo sapiens
uucugcaagcuuuucaa

SEQ ID NO: 23397 - RNA, 13 nt, Homo sapiens
auuaucaugcaaa

SEQ ID NO: 23398 - RNA, 13 nt, Homo sapiens
gacagaaagcaga

SEQ ID NO: 23399 - RNA, 14 nt, Homo sapiens
ugaccugacagccc

SEQ ID NO: 23400 - RNA, 23 nt, Homo sapiens
acaccgaguggcccuucauguac

SEQ ID NO: 23401 - RNA, 16 nt, Homo sapiens
caggcuccaaacugga

SEQ ID NO: 23402 - RNA, 15 nt, Homo sapiens
ccucuguugccaagg

SEQ ID NO: 23403 - RNA, 21 nt, Homo sapiens
uuuuuaaacaaaaaaagcauu

SEQ ID NO: 23404 - RNA, 17 nt, Homo sapiens
acccaaauguucaucaa

SEQ ID NO: 23405 - RNA, 12 nt, Homo sapiens
gaagucuuccau

SEQ ID NO: 23406 - RNA, 21 nt, Homo sapiens
ccuuauuguaccucucuuaua

SEQ ID NO: 23407 - RNA, 12 nt, Homo sapiens
aaaaaaagccaa

SEQ ID NO: 23408 - RNA, 23 nt, Homo sapiens
ugaaaaaguauaaauaaaaugag

SEQ ID NO: 23409 - RNA, 23 nt, Homo sapiens
aaacauuuaaauuauacaaucau

SEQ ID NO: 23410 - RNA, 15 nt, Homo sapiens
acuugaugauacaau

SEQ ID NO: 23411 - RNA, 14 nt, Homo sapiens
auagcaucucagga

SEQ ID NO: 23412 - RNA, 17 nt, Homo sapiens
aaaguguaaguucacaa

SEQ ID NO: 23413 - RNA, 17 nt, Homo sapiens
aaaauuaucaauaucua

SEQ ID NO: 23414 - RNA, 17 nt, Homo sapiens
auuacaggcgugagcca

SEQ ID NO: 23415 - RNA, 17 nt, Homo sapiens
caaauguucaucaauga

SEQ ID NO: 23416 - RNA, 20 nt, Homo sapiens
gagcuguuuucccugaccuc

SEQ ID NO: 23417 - RNA, 14 nt, Homo sapiens
gagaaaagacauaa

SEQ ID NO: 23418 - RNA, 15 nt, Homo sapiens
augacacaucucuga

SEQ ID NO: 23419 - RNA, 14 nt, Homo sapiens
gaagaaauucugca

SEQ ID NO: 23420 - RNA, 12 nt, Homo sapiens
cacaagcacuuu

SEQ ID NO: 23421 - RNA, 13 nt, Homo sapiens
ugcauuugcacua

SEQ ID NO: 23422 - RNA, 19 nt, Homo sapiens
cacuaaaaaggcauguaau

SEQ ID NO: 23423 - RNA, 15 nt, Homo sapiens
uuuauugcugaauga

SEQ ID NO: 23424 - RNA, 15 nt, Homo sapiens
auaugacacaucucu

SEQ ID NO: 23425 - RNA, 12 nt, Homo sapiens
gcuuccuaacug

SEQ ID NO: 23426 - RNA, 20 nt, Homo sapiens
ucaaaacuucagacauagaa

SEQ ID NO: 23427 - RNA, 20 nt, Homo sapiens
cacuuauaggaauugaccca

SEQ ID NO: 23428 - RNA, 18 nt, Homo sapiens
cuauauuaucaugcaaau

SEQ ID NO: 23429 - RNA, 17 nt, Homo sapiens
gggcuuuagggaccugc

SEQ ID NO: 23430 - RNA, 15 nt, Homo sapiens
cuguacuuuuuccag

SEQ ID NO: 23431 - RNA, 16 nt, Homo sapiens
ucugcaagcuuuucaa

SEQ ID NO: 23432 - RNA, 21 nt, Homo sapiens
aucaauucuauuacgugcaau

SEQ ID NO: 23433 - RNA, 18 nt, Homo sapiens
cuuuaacacagugucugg

SEQ ID NO: 23434 - RNA, 18 nt, Homo sapiens
acaaggcuuuaucucagg

SEQ ID NO: 23435 - RNA, 17 nt, Homo sapiens
cacuuuaacacaguguc

SEQ ID NO: 23436 - RNA, 13 nt, Homo sapiens
ucuucacagucac

SEQ ID NO: 23437 - RNA, 18 nt, Homo sapiens
uaugacgugacuggccug

SEQ ID NO: 23438 - RNA, 13 nt, Homo sapiens
cagcuaaguugca

SEQ ID NO: 23439 - RNA, 18 nt, Homo sapiens
gauggaaguugcagugag

SEQ ID NO: 23440 - RNA, 22 nt, Homo sapiens
auacaauuauuuuuacaguucu

SEQ ID NO: 23441 - RNA, 15 nt, Homo sapiens
agcagggacuugaac

SEQ ID NO: 23442 - RNA, 15 nt, Homo sapiens
uuuaugcuaagugaa

SEQ ID NO: 23443 - RNA, 23 nt, Homo sapiens
agagcccuucaugcauuugcacu

SEQ ID NO: 23444 - RNA, 14 nt, Homo sapiens
aagccagacaucaa

SEQ ID NO: 23445 - RNA, 14 nt, Homo sapiens
ugccuguaaucaca

SEQ ID NO: 23446 - RNA, 21 nt, Homo sapiens
caaucugagccagugcuuuaa

SEQ ID NO: 23447 - RNA, 15 nt, Homo sapiens
guaaacaaaggaauu

SEQ ID NO: 23448 - RNA, 19 nt, Homo sapiens
auuuuuacaguucucccaa

SEQ ID NO: 23449 - RNA, 18 nt, Homo sapiens
agccaaguuuauauacaa

SEQ ID NO: 23450 - RNA, 15 nt, Homo sapiens
aucagcauuuuacua

SEQ ID NO: 23451 - RNA, 16 nt, Homo sapiens
ucuccgucucccaaag

SEQ ID NO: 23452 - RNA, 18 nt, Homo sapiens
agguacugagagugaaca

SEQ ID NO: 23453 - RNA, 14 nt, Homo sapiens
acccaaaaggcaga

SEQ ID NO: 23454 - RNA, 13 nt, Homo sapiens
ccuuaaacucagg

SEQ ID NO: 23455 - RNA, 18 nt, Homo sapiens
acuuaugaaccuuuacau

SEQ ID NO: 23456 - RNA, 20 nt, Homo sapiens
cuggagugcaguggcgcaau

SEQ ID NO: 23457 - RNA, 16 nt, Homo sapiens
aggcuuuaucucaggg

SEQ ID NO: 23458 - RNA, 16 nt, Homo sapiens
cuauuacgugcaauac

SEQ ID NO: 23459 - RNA, 24 nt, Homo sapiens
gccggagccccuugggcaggucac

SEQ ID NO: 23460 - RNA, 20 nt, Homo sapiens
guaaucccagcuacuuggga

SEQ ID NO: 23461 - RNA, 14 nt, Homo sapiens
uaugugauguggca

SEQ ID NO: 23462 - RNA, 19 nt, Homo sapiens
uuauuuagggaacugcuug

SEQ ID NO: 23463 - RNA, 18 nt, Homo sapiens
auuuaaaaaaaaaccuga

SEQ ID NO: 23464 - RNA, 21 nt, Homo sapiens
uguaaugaaaaugaauaucua

SEQ ID NO: 23465 - RNA, 16 nt, Homo sapiens
gaaucccuuaaacuca

SEQ ID NO: 23466 - RNA, 16 nt, Homo sapiens
gagauuucaugccugg

SEQ ID NO: 23467 - RNA, 17 nt, Homo sapiens
uaaaaaggcauguaauu

SEQ ID NO: 23468 - RNA, 23 nt, Homo sapiens
aaggaagaaauuccaggaaaauc

SEQ ID NO: 23469 - RNA, 21 nt, Homo sapiens
uuguguaaugaaaaugaauau

SEQ ID NO: 23470 - RNA, 21 nt, Homo sapiens
cuugagaaaccuuauuguacc

SEQ ID NO: 23471 - RNA, 21 nt, Homo sapiens
agggucucccucuguugccaa

SEQ ID NO: 23472 - RNA, 15 nt, Homo sapiens
aaccuuuacauccag

SEQ ID NO: 23473 - RNA, 17 nt, Homo sapiens
agaggagaaacuggaac

SEQ ID NO: 23474 - RNA, 20 nt, Homo sapiens
cagcauuuuacuacuuuaaa

SEQ ID NO: 23475 - RNA, 13 nt, Homo sapiens
uccuggacaguuu

SEQ ID NO: 23476 - RNA, 19 nt, Homo sapiens
cugccuugguauagcauau

SEQ ID NO: 23477 - RNA, 23 nt, Homo sapiens
ugagaugggagaaucacuugaac

SEQ ID NO: 23478 - RNA, 23 nt, Homo sapiens
auucccuuuugcugccucuaaaa

SEQ ID NO: 23479 - RNA, 13 nt, Homo sapiens
aucauguauuuau

SEQ ID NO: 23480 - RNA, 16 nt, Homo sapiens
uauucccuuuugcugc

SEQ ID NO: 23481 - RNA, 20 nt, Homo sapiens
cgucucuacuaaaaauacaa

SEQ ID NO: 23482 - RNA, 22 nt, Homo sapiens
cauuucaaaagguauuuauuga

SEQ ID NO: 23483 - RNA, 16 nt, Homo sapiens
uaaaguacagacuuuu

SEQ ID NO: 23484 - RNA, 22 nt, Homo sapiens
acaguauggcagcuuuccucaa

SEQ ID NO: 23485 - RNA, 15 nt, Homo sapiens
aagugauacuaucca

SEQ ID NO: 23486 - RNA, 18 nt, Homo sapiens
agcaagacucugucucaa

SEQ ID NO: 23487 - RNA, 13 nt, Homo sapiens
caugaaagcguaa

SEQ ID NO: 23488 - RNA, 12 nt, Homo sapiens
accagggacuga

SEQ ID NO: 23489 - RNA, 15 nt, Homo sapiens
gggucucaguguccu

SEQ ID NO: 23490 - RNA, 20 nt, Homo sapiens
cuuuccagagaccaguauuc

SEQ ID NO: 23491 - RNA, 17 nt, Homo sapiens
uguauuuuauuacaucu

SEQ ID NO: 23492 - RNA, 19 nt, Homo sapiens
accuacaugagguacugag

SEQ ID NO: 23493 - RNA, 16 nt, Homo sapiens
agaaucacuugaaccc

SEQ ID NO: 23494 - RNA, 9 nt, Homo sapiens
cgugcaaua

SEQ ID NO: 23495 - RNA, 19 nt, Homo sapiens
uggaaauaaaagauuguau

SEQ ID NO: 23496 - RNA, 16 nt, Homo sapiens
gaaaauaaaagcacuu

SEQ ID NO: 23497 - RNA, 15 nt, Homo sapiens
accuguaaucccagc

SEQ ID NO: 23498 - RNA, 15 nt, Homo sapiens
cuagauacugaaugu

SEQ ID NO: 23499 - RNA, 21 nt, Homo sapiens
cuaagaagugaaaaucuacac

SEQ ID NO: 23500 - RNA, 14 nt, Homo sapiens
agagaaauuugcca

SEQ ID NO: 23501 - RNA, 13 nt, Homo sapiens
cagcuuauucaca

SEQ ID NO: 23502 - RNA, 14 nt, Homo sapiens
gggucucagugucc

SEQ ID NO: 23503 - RNA, 11 nt, Homo sapiens
aaaagccaaaa

SEQ ID NO: 23504 - RNA, 13 nt, Homo sapiens
uaauuucaugaaa

SEQ ID NO: 23505 - RNA, 20 nt, Homo sapiens
gcuacucuguuccuucacau

SEQ ID NO: 23506 - RNA, 14 nt, Homo sapiens
uuuaaguaauuuca

SEQ ID NO: 23507 - RNA, 21 nt, Homo sapiens
ucugauuuuccuggacaguuu

SEQ ID NO: 23508 - RNA, 18 nt, Homo sapiens
ucaguccaugaagaugua

SEQ ID NO: 23509 - RNA, 15 nt, Homo sapiens
gacuuaaaaucuaau

SEQ ID NO: 23510 - RNA, 20 nt, Homo sapiens
aguuuucugcuuuaauuuca

SEQ ID NO: 23511 - RNA, 21 nt, Homo sapiens
auugaaaggcauucucugaag

SEQ ID NO: 23512 - RNA, 22 nt, Homo sapiens
gagaaaccuuauuguaccucuc

SEQ ID NO: 23513 - RNA, 13 nt, Homo sapiens
aaucugcacugug

SEQ ID NO: 23514 - RNA, 19 nt, Homo sapiens
gagaaaauaaaagcacuua

SEQ ID NO: 23515 - RNA, 13 nt, Homo sapiens
caaaucucuauua

SEQ ID NO: 23516 - RNA, 19 nt, Homo sapiens
gacauaagcaaagacuaug

SEQ ID NO: 23517 - RNA, 12 nt, Homo sapiens
ucuuggugccuc

SEQ ID NO: 23518 - RNA, 13 nt, Homo sapiens
ucuugaaagcugu

SEQ ID NO: 23519 - RNA, 18 nt, Homo sapiens
cagugucuggcacuuggg

SEQ ID NO: 23520 - RNA, 19 nt, Homo sapiens
ccugcaggcgugaccugac

SEQ ID NO: 23521 - RNA, 21 nt, Homo sapiens
agaaugauuuuacggagauau

SEQ ID NO: 23522 - RNA, 17 nt, Homo sapiens
aaacccggccugauuaa

SEQ ID NO: 23523 - RNA, 22 nt, Homo sapiens
aucuuguuuuuccacuacugcu

SEQ ID NO: 23524 - RNA, 11 nt, Homo sapiens
acagcucugca

SEQ ID NO: 23525 - RNA, 15 nt, Homo sapiens
ccuuuacauccagau

SEQ ID NO: 23526 - RNA, 13 nt, Homo sapiens
uacauuuccaaau

SEQ ID NO: 23527 - RNA, 23 nt, Homo sapiens
aaauucgcugcaaccuguugaua

SEQ ID NO: 23528 - RNA, 21 nt, Homo sapiens
ccugucccugcagacaugaga

SEQ ID NO: 23529 - RNA, 13 nt, Homo sapiens
gauaaacucagaa

SEQ ID NO: 23530 - RNA, 13 nt, Homo sapiens
aauuccucuggga

SEQ ID NO: 23531 - RNA, 16 nt, Homo sapiens
ccugugacugucucac

SEQ ID NO: 23532 - RNA, 21 nt, Homo sapiens
uuauaagugaagugauacuau

SEQ ID NO: 23533 - RNA, 18 nt, Homo sapiens
guuugaaaauaugccugc

SEQ ID NO: 23534 - RNA, 18 nt, Homo sapiens
gccauaauuacuauguca

SEQ ID NO: 23535 - RNA, 22 nt, Homo sapiens
aaauauuuuuaugugcaauaaa

SEQ ID NO: 23536 - RNA, 23 nt, Homo sapiens
auaauuccuauauccugugacug

SEQ ID NO: 23537 - RNA, 16 nt, Homo sapiens
aucucacaagcacuuu

SEQ ID NO: 23538 - RNA, 23 nt, Homo sapiens
uuaaaauauuuuuaugugcaaua

SEQ ID NO: 23539 - RNA, 17 nt, Homo sapiens
cauuuccaaauucacaa

SEQ ID NO: 23540 - RNA, 15 nt, Homo sapiens
cgugagccaccaaac

SEQ ID NO: 23541 - RNA, 16 nt, Homo sapiens
auacuguauuuuuacc

SEQ ID NO: 23542 - RNA, 19 nt, Homo sapiens
augauuccaccuacaugag

SEQ ID NO: 23543 - RNA, 23 nt, Homo sapiens
uaugcaaccuuuggaugcacuuu

SEQ ID NO: 23544 - RNA, 20 nt, Homo sapiens
gccauaauuacuaugucauu

SEQ ID NO: 23545 - RNA, 16 nt, Homo sapiens
cuuauaggaauugacc

SEQ ID NO: 23546 - RNA, 20 nt, Homo sapiens
uucugucuggacuuuccaga

SEQ ID NO: 23547 - RNA, 22 nt, Homo sapiens
gccuggaucucacaagcacuuu

SEQ ID NO: 23548 - RNA, 13 nt, Homo sapiens
aaugaauggcuaa

SEQ ID NO: 23549 - RNA, 22 nt, Homo sapiens
auguucacuuauugacuauuau

SEQ ID NO: 23550 - RNA, 12 nt, Homo sapiens
uuacgugcaaua

SEQ ID NO: 23551 - RNA, 16 nt, Homo sapiens
guaaaauggagacacc

SEQ ID NO: 23552 - RNA, 18 nt, Homo sapiens
cuuggucacauacaauua

SEQ ID NO: 23553 - RNA, 14 nt, Homo sapiens
cuuaaacacuaaaa

SEQ ID NO: 23554 - RNA, 20 nt, Homo sapiens
aguucugucuggacuuucca

SEQ ID NO: 23555 - RNA, 20 nt, Homo sapiens
augagaaucagaucauuuca

SEQ ID NO: 23556 - RNA, 13 nt, Homo sapiens
aauugacacuuaa

SEQ ID NO: 23557 - RNA, 21 nt, Homo sapiens
accagcccuacaccauuccuu

SEQ ID NO: 23558 - RNA, 18 nt, Homo sapiens
gguauauaaauuuuccca

SEQ ID NO: 23559 - RNA, 18 nt, Homo sapiens
auucccuuuugcugccuc

SEQ ID NO: 23560 - RNA, 20 nt, Homo sapiens
ggcgacaguuuuccuucuca

SEQ ID NO: 23561 - RNA, 13 nt, Homo sapiens
gcgugcaggcagc

SEQ ID NO: 23562 - RNA, 17 nt, Homo sapiens
ugaguggaugauguuuc

SEQ ID NO: 23563 - RNA, 20 nt, Homo sapiens
cagagcaagacucugucuca

SEQ ID NO: 23564 - RNA, 16 nt, Homo sapiens
aguuaagcaacaucua

SEQ ID NO: 23565 - RNA, 19 nt, Homo sapiens
acagugagacucugucuca

SEQ ID NO: 23566 - RNA, 14 nt, Homo sapiens
aaaaugagcaaaag

SEQ ID NO: 23567 - RNA, 22 nt, Homo sapiens
gagcaagacucugucucaaaaa

SEQ ID NO: 23568 - RNA, 15 nt, Homo sapiens
cacgcccagcuaauu

SEQ ID NO: 23569 - RNA, 22 nt, Homo sapiens
cuuagacccucaugcugccaau

SEQ ID NO: 23570 - RNA, 18 nt, Homo sapiens
agcaacccaaauguucau

SEQ ID NO: 23571 - RNA, 18 nt, Homo sapiens
uuguagccacuucacuuu

SEQ ID NO: 23572 - RNA, 19 nt, Homo sapiens
cagagacgggguuugccau

SEQ ID NO: 23573 - RNA, 21 nt, Homo sapiens
gacacaggcuccaaacuggag

SEQ ID NO: 23574 - RNA, 17 nt, Homo sapiens
cucuggcgacaguuuuc

SEQ ID NO: 23575 - RNA, 18 nt, Homo sapiens
uaaguugcaccaacuuug

SEQ ID NO: 23576 - RNA, 12 nt, Homo sapiens
ugacaacuguga

SEQ ID NO: 23577 - RNA, 15 nt, Homo sapiens
aaugguuccauucuc

SEQ ID NO: 23578 - RNA, 19 nt, Homo sapiens
auuuguuaaaauuaucaau

SEQ ID NO: 23579 - RNA, 12 nt, Homo sapiens
cucugauaccuc

SEQ ID NO: 23580 - RNA, 15 nt, Homo sapiens
aaccucauuccccaa

SEQ ID NO: 23581 - RNA, 19 nt, Homo sapiens
uaagugaaauaagccagac

SEQ ID NO: 23582 - RNA, 17 nt, Homo sapiens
ucacauuccaagccuca

SEQ ID NO: 23583 - RNA, 18 nt, Homo sapiens
cugccaauauccuaauaa

SEQ ID NO: 23584 - RNA, 16 nt, Homo sapiens
ugcuaucgccaucaca

SEQ ID NO: 23585 - RNA, 16 nt, Homo sapiens
agugucugaugaaugu

SEQ ID NO: 23586 - RNA, 19 nt, Homo sapiens
aaccuccaccuucuggguu

SEQ ID NO: 23587 - RNA, 22 nt, Homo sapiens
uaguguuggaaaaugugcaaua

SEQ ID NO: 23588 - RNA, 18 nt, Homo sapiens
acugaauguaaacaaagg

SEQ ID NO: 23589 - RNA, 19 nt, Homo sapiens
auccugcaauuccacuuau

SEQ ID NO: 23590 - RNA, 22 nt, Homo sapiens
agcacuuucccucuuggugccu

SEQ ID NO: 23591 - RNA, 14 nt, Homo sapiens
uugaaugugucagg

SEQ ID NO: 23592 - RNA, 20 nt, Homo sapiens
aaaacucauuuccuauguaa

SEQ ID NO: 23593 - RNA, 15 nt, Homo sapiens
agcaugggaagugac

SEQ ID NO: 23594 - RNA, 14 nt, Homo sapiens
cuguaaucacagcu

SEQ ID NO: 23595 - RNA, 17 nt, Homo sapiens
uggguuguguguuuauu

SEQ ID NO: 23596 - RNA, 15 nt, Homo sapiens
uauuacgugcaauac

SEQ ID NO: 23597 - RNA, 19 nt, Homo sapiens
uucaaaaucaaauuccaga

SEQ ID NO: 23598 - RNA, 14 nt, Homo sapiens
ccacccuugccaug

SEQ ID NO: 23599 - RNA, 18 nt, Homo sapiens
gcccaucuccgucuccca

SEQ ID NO: 23600 - RNA, 18 nt, Homo sapiens
gaauauuuauuaccucug

SEQ ID NO: 23601 - RNA, 22 nt, Homo sapiens
aauaguguuggaaaaugugcaa

SEQ ID NO: 23602 - RNA, 15 nt, Homo sapiens
uccuauguaacugca

SEQ ID NO: 23603 - RNA, 14 nt, Homo sapiens
uauauccugugacu

SEQ ID NO: 23604 - RNA, 18 nt, Homo sapiens
aagguauuuauugagcac

SEQ ID NO: 23605 - RNA, 14 nt, Homo sapiens
ugacuggccugcug

SEQ ID NO: 23606 - RNA, 16 nt, Homo sapiens
ucucuuauagaauauu

SEQ ID NO: 23607 - RNA, 17 nt, Homo sapiens
cuuguuagcaaaaugga

SEQ ID NO: 23608 - RNA, 17 nt, Homo sapiens
uaucuuguuuuuccacu

SEQ ID NO: 23609 - RNA, 15 nt, Homo sapiens
uacucauacauguua

SEQ ID NO: 23610 - RNA, 17 nt, Homo sapiens
cuucucuucacagucac

SEQ ID NO: 23611 - RNA, 13 nt, Homo sapiens
gaaaaacauuuca

SEQ ID NO: 23612 - RNA, 21 nt, Homo sapiens
uauuuauaauuccuauauccu

SEQ ID NO: 23613 - RNA, 18 nt, Homo sapiens
acaucaguuacucugaag

SEQ ID NO: 23614 - RNA, 21 nt, Homo sapiens
gagaugggagaaucacuugaa

SEQ ID NO: 23615 - RNA, 21 nt, Homo sapiens
auucuucuuugguggagauaa

SEQ ID NO: 23616 - RNA, 15 nt, Homo sapiens
auacuauccaguuac

SEQ ID NO: 23617 - RNA, 14 nt, Homo sapiens
gcagaagacaguau

SEQ ID NO: 23618 - RNA, 20 nt, Homo sapiens
gugaaauaaaaguagaauaa

SEQ ID NO: 23619 - RNA, 15 nt, Homo sapiens
uaaucccagcacuuu

SEQ ID NO: 23620 - RNA, 21 nt, Homo sapiens
gugauuacccucugggucuca

SEQ ID NO: 23621 - RNA, 20 nt, Homo sapiens
caacuauauuaucaugcaaa

SEQ ID NO: 23622 - RNA, 23 nt, Homo sapiens
auaauagguuugugacuuuccua

SEQ ID NO: 23623 - RNA, 14 nt, Homo sapiens
ccaauuuacuuugu

SEQ ID NO: 23624 - RNA, 14 nt, Homo sapiens
ugcagaagacagua

SEQ ID NO: 23625 - RNA, 20 nt, Homo sapiens
uuucacuuuuggcuuguaaa

SEQ ID NO: 23626 - RNA, 16 nt, Homo sapiens
aaagcagaacagugau

SEQ ID NO: 23627 - RNA, 13 nt, Homo sapiens
cuugaugauacaa

SEQ ID NO: 23628 - RNA, 13 nt, Homo sapiens
uccaaauucacaa

SEQ ID NO: 23629 - RNA, 12 nt, Homo sapiens
ccugugacuguc

SEQ ID NO: 23630 - RNA, 14 nt, Homo sapiens
uaaaaucuaauuca

SEQ ID NO: 23631 - RNA, 21 nt, Homo sapiens
cuucuuggucucagugucaau

SEQ ID NO: 23632 - RNA, 21 nt, Homo sapiens
agaguucugucuggacuuucc

SEQ ID NO: 23633 - RNA, 16 nt, Homo sapiens
aggagauuucaugccu

SEQ ID NO: 23634 - RNA, 22 nt, Homo sapiens
aaaauauuuuuaugugcaauaa

SEQ ID NO: 23635 - RNA, 21 nt, Homo sapiens
ccucaguuuccugaccuauga

SEQ ID NO: 23636 - RNA, 14 nt, Homo sapiens
uaaauguaucuuau

SEQ ID NO: 23637 - RNA, 23 nt, Homo sapiens
aauauuguugacaacugugacug

SEQ ID NO: 23638 - RNA, 18 nt, Homo sapiens
aguugauuuuacaauuga

SEQ ID NO: 23639 - RNA, 13 nt, Homo sapiens
augauccugcaau

SEQ ID NO: 23640 - RNA, 16 nt, Homo sapiens
acuggcaguuuuccau

SEQ ID NO: 23641 - RNA, 20 nt, Homo sapiens
auuuauuuuuuuacuuccuc

SEQ ID NO: 23642 - RNA, 12 nt, Homo sapiens
auugagcaccug

SEQ ID NO: 23643 - RNA, 18 nt, Homo sapiens
ucacuuuuuuucuuuucu

SEQ ID NO: 23644 - RNA, 15 nt, Homo sapiens
auuuaaagacaaaga

SEQ ID NO: 23645 - RNA, 15 nt, Homo sapiens
gagugcaguggcgca

SEQ ID NO: 23646 - RNA, 21 nt, Homo sapiens
uaaaauauuuuuaugugcaau

SEQ ID NO: 23647 - RNA, 15 nt, Homo sapiens
cuaugugauuacaag

SEQ ID NO: 23648 - RNA, 12 nt, Homo sapiens
cagaacagugau

SEQ ID NO: 23649 - RNA, 12 nt, Homo sapiens
acagaacuugaa

SEQ ID NO: 23650 - RNA, 23 nt, Homo sapiens
ucacuuuuuuucuuuucucugcc

SEQ ID NO: 23651 - RNA, 18 nt, Homo sapiens
uccaagccucauguccac

SEQ ID NO: 23652 - RNA, 15 nt, Homo sapiens
cucaguguccucauc

SEQ ID NO: 23653 - RNA, 17 nt, Homo sapiens
uuuaucuugucucuggg

SEQ ID NO: 23654 - RNA, 22 nt, Homo sapiens
aagucuuccauagagacuuugu

SEQ ID NO: 23655 - RNA, 17 nt, Homo sapiens
gagacgggguuugccau

SEQ ID NO: 23656 - RNA, 21 nt, Homo sapiens
gaggcauuugcagcugugcca

SEQ ID NO: 23657 - RNA, 18 nt, Homo sapiens
auuguugacaacugugac

SEQ ID NO: 23658 - RNA, 12 nt, Homo sapiens
aacugugacugu

SEQ ID NO: 23659 - RNA, 22 nt, Homo sapiens
auaauuccuauauccugugacu

SEQ ID NO: 23660 - RNA, 14 nt, Homo sapiens
caucuuggucacau

SEQ ID NO: 23661 - RNA, 12 nt, Homo sapiens
caucuuucacau

SEQ ID NO: 23662 - RNA, 21 nt, Homo sapiens
acaauuauuuuuacaguucuc

SEQ ID NO: 23663 - RNA, 11 nt, Homo sapiens
augcuggccag

SEQ ID NO: 23664 - RNA, 16 nt, Homo sapiens
cugucuggacuuucca

SEQ ID NO: 23665 - RNA, 20 nt, Homo sapiens
uuagacccucaugcugccaa

SEQ ID NO: 23666 - RNA, 15 nt, Homo sapiens
cacuugaugauacaa

SEQ ID NO: 23667 - RNA, 15 nt, Homo sapiens
aaugauuucauucaa

SEQ ID NO: 23668 - RNA, 21 nt, Homo sapiens
uugguacuagauacugaaugu

SEQ ID NO: 23669 - RNA, 17 nt, Homo sapiens
gguggcucacgccugua

SEQ ID NO: 23670 - RNA, 16 nt, Homo sapiens
uagaauuaacacauga

SEQ ID NO: 23671 - RNA, 20 nt, Homo sapiens
cgguuugaaaauaugccugc

SEQ ID NO: 23672 - RNA, 18 nt, Homo sapiens
cauaagcaaagacuauga

SEQ ID NO: 23673 - RNA, 21 nt, Homo sapiens
ugugacuuaaugccacuaaau

SEQ ID NO: 23674 - RNA, 15 nt, Homo sapiens
aacauagcaucucag

SEQ ID NO: 23675 - RNA, 23 nt, Homo sapiens
uagaguucugucuggacuuucca

SEQ ID NO: 23676 - RNA, 15 nt, Homo sapiens
ggaaaaugugcaaua

SEQ ID NO: 23677 - RNA, 16 nt, Homo sapiens
aauugacccacaagaa

SEQ ID NO: 23678 - RNA, 23 nt, Homo sapiens
ucacaggaaguagaggaggccac

SEQ ID NO: 23679 - RNA, 16 nt, Homo sapiens
ccuuauuguaccucuc

SEQ ID NO: 23680 - RNA, 23 nt, Homo sapiens
uuacuauuuauugcugaaugacu

SEQ ID NO: 23681 - RNA, 20 nt, Homo sapiens
aagauuguauagugcauguu

SEQ ID NO: 23682 - RNA, 14 nt, Homo sapiens
aucaguuacucuga

SEQ ID NO: 23683 - RNA, 17 nt, Homo sapiens
auuaccucugauaccuc

SEQ ID NO: 23684 - RNA, 24 nt, Homo sapiens
aaugauuuuacggagauaucccag

SEQ ID NO: 23685 - RNA, 12 nt, Homo sapiens
gugucaggugac

SEQ ID NO: 23686 - RNA, 15 nt, Homo sapiens
agaagacaacauuaa

SEQ ID NO: 23687 - RNA, 18 nt, Homo sapiens
uauuuaaagacaaagaca

SEQ ID NO: 23688 - RNA, 15 nt, Homo sapiens
cuugggcaggucaca

SEQ ID NO: 23689 - RNA, 13 nt, Homo sapiens
aggaauauuugca

SEQ ID NO: 23690 - RNA, 15 nt, Homo sapiens
uuggaaaaugugcaa

SEQ ID NO: 23691 - RNA, 13 nt, Homo sapiens
uuacaucuuucac

SEQ ID NO: 23692 - RNA, 20 nt, Homo sapiens
agagacgggguuugccaugc

SEQ ID NO: 23693 - RNA, 16 nt, Homo sapiens
gaaaggcauucucuga

SEQ ID NO: 23694 - RNA, 16 nt, Homo sapiens
aaugguuccauucucu

SEQ ID NO: 23695 - RNA, 16 nt, Homo sapiens
uggaaaaugugcaaua

SEQ ID NO: 23696 - RNA, 16 nt, Homo sapiens
cauuuccaaauucaca

SEQ ID NO: 23697 - RNA, 19 nt, Homo sapiens
uaaaaggccugucccugca

SEQ ID NO: 23698 - RNA, 20 nt, Homo sapiens
ugcuacaaauacucuuagga

SEQ ID NO: 23699 - RNA, 21 nt, Homo sapiens
uaacugcauugagaacugcau

SEQ ID NO: 23700 - RNA, 17 nt, Homo sapiens
ugaaaggcauucucuga

SEQ ID NO: 23701 - RNA, 17 nt, Homo sapiens
auaugccugcaaucuga

SEQ ID NO: 23702 - RNA, 16 nt, Homo sapiens
uaacugacaacuugaa

SEQ ID NO: 23703 - RNA, 23 nt, Homo sapiens
agaaauuccaggaaaaucugcac

SEQ ID NO: 23704 - RNA, 19 nt, Homo sapiens
cagccugggugacagagca

SEQ ID NO: 23705 - RNA, 22 nt, Homo sapiens
aucaauucuauuacgugcaaua

SEQ ID NO: 23706 - RNA, 19 nt, Homo sapiens
agagcaagacucugucuca

SEQ ID NO: 23707 - RNA, 16 nt, Homo sapiens
uacauucugcuuucau

SEQ ID NO: 23708 - RNA, 15 nt, Homo sapiens
aaacauguucacuua

SEQ ID NO: 23709 - RNA, 19 nt, Homo sapiens
aucuccgucucccaaagug

SEQ ID NO: 23710 - RNA, 20 nt, Homo sapiens
uuacugagcuucucugugaa

SEQ ID NO: 23711 - RNA, 16 nt, Homo sapiens
cagacaucaacagaua

SEQ ID NO: 23712 - RNA, 12 nt, Homo sapiens
ucccuuuuacau

SEQ ID NO: 23713 - RNA, 16 nt, Homo sapiens
ucucuaacucagaaac

SEQ ID NO: 23714 - RNA, 13 nt, Homo sapiens
auauauuuuuaga

SEQ ID NO: 23715 - RNA, 17 nt, Homo sapiens
accuuuggaugcacuuu

SEQ ID NO: 23716 - RNA, 20 nt, Homo sapiens
ccuggaucucacaagcacuu

SEQ ID NO: 23717 - RNA, 14 nt, Homo sapiens
cacccuugccaugg

SEQ ID NO: 23718 - RNA, 17 nt, Homo sapiens
uguagauaaacucagaa

SEQ ID NO: 23719 - RNA, 21 nt, Homo sapiens
aagggucucccucuguugcca

SEQ ID NO: 23720 - RNA, 22 nt, Homo sapiens
ggaaaaugugcaauaugugaug

SEQ ID NO: 23721 - RNA, 20 nt, Homo sapiens
guacuccagccugggugaca

SEQ ID NO: 23722 - RNA, 12 nt, Homo sapiens
aaauagugucug

SEQ ID NO: 23723 - RNA, 22 nt, Homo sapiens
ggcagcaggauagagugggaca

SEQ ID NO: 23724 - RNA, 11 nt, Homo sapiens
aggcauucucu

SEQ ID NO: 23725 - RNA, 19 nt, Homo sapiens
cuggaucucacaagcacuu

SEQ ID NO: 23726 - RNA, 23 nt, Homo sapiens
aguuuuccuucucaucugugauu

SEQ ID NO: 23727 - RNA, 21 nt, Homo sapiens
uucuucuuggucucaguguca

SEQ ID NO: 23728 - RNA, 15 nt, Homo sapiens
caucuguaaaaugga

SEQ ID NO: 23729 - RNA, 16 nt, Homo sapiens
uuaugcuaagugaaau

SEQ ID NO: 23730 - RNA, 15 nt, Homo sapiens
uggaaaaugugcaau

SEQ ID NO: 23731 - RNA, 21 nt, Homo sapiens
uauuuacugagcuucucugug

SEQ ID NO: 23732 - RNA, 21 nt, Homo sapiens
gaccacgcuuucuagcuguug

SEQ ID NO: 23733 - RNA, 11 nt, Homo sapiens
uuuaugugcaa

SEQ ID NO: 23734 - RNA, 22 nt, Homo sapiens
uguaaguuuaugcauacaguaa

SEQ ID NO: 23735 - RNA, 13 nt, Homo sapiens
agaaucacuugaa

SEQ ID NO: 23736 - RNA, 13 nt, Homo sapiens
ucaaauuccagaa

SEQ ID NO: 23737 - RNA, 16 nt, Homo sapiens
uggcacuugggacaaa

SEQ ID NO: 23738 - RNA, 16 nt, Homo sapiens
augaauaaaguguaag

SEQ ID NO: 23739 - RNA, 21 nt, Homo sapiens
gaacugcuggauucaagugau

SEQ ID NO: 23740 - RNA, 15 nt, Homo sapiens
gcaaugugacuuaau

SEQ ID NO: 23741 - RNA, 20 nt, Homo sapiens
gaaguugcagugagcugaua

SEQ ID NO: 23742 - RNA, 22 nt, Homo sapiens
gugugaccacugcagaagacag

SEQ ID NO: 23743 - RNA, 22 nt, Homo sapiens
agcaagaucccauggguugugu

SEQ ID NO: 23744 - RNA, 20 nt, Homo sapiens
agagcaagacucugucucaa

SEQ ID NO: 23745 - RNA, 24 nt, Homo sapiens
uuucaaaaucaaauuccagaauga

SEQ ID NO: 23746 - RNA, 16 nt, Homo sapiens
auuuuaaguaauuuca

SEQ ID NO: 23747 - RNA, 23 nt, Homo sapiens
gaggauguguggcauuuucacuu

SEQ ID NO: 23748 - RNA, 13 nt, Homo sapiens
acaacugugacug

SEQ ID NO: 23749 - RNA, 19 nt, Homo sapiens
gaagaaauuccaggaaaau

SEQ ID NO: 23750 - RNA, 18 nt, Homo sapiens
ugggucucaguguccuca

SEQ ID NO: 23751 - RNA, 13 nt, Homo sapiens
agauuaugaucuc

SEQ ID NO: 23752 - RNA, 15 nt, Homo sapiens
ucaucaaugaaugaa

SEQ ID NO: 23753 - RNA, 16 nt, Homo sapiens
uucaaaauuggacuua

SEQ ID NO: 23754 - RNA, 15 nt, Homo sapiens
ucuuggucacauaca

SEQ ID NO: 23755 - RNA, 15 nt, Homo sapiens
aggcauucucugaag

SEQ ID NO: 23756 - RNA, 12 nt, Homo sapiens
uggucucagugu

SEQ ID NO: 23757 - RNA, 13 nt, Homo sapiens
uuuauugccauga

SEQ ID NO: 23758 - RNA, 15 nt, Homo sapiens
cugguaacauagguu

SEQ ID NO: 23759 - RNA, 10 nt, Homo sapiens
caguaacuga

SEQ ID NO: 23760 - RNA, 16 nt, Homo sapiens
uuguaccgcaauguga

SEQ ID NO: 23761 - RNA, 14 nt, Homo sapiens
aaugaaguacucau

SEQ ID NO: 23762 - RNA, 17 nt, Homo sapiens
acuuaaaaucuaauuca

SEQ ID NO: 23763 - RNA, 14 nt, Homo sapiens
gcaggcgugaccug

SEQ ID NO: 23764 - RNA, 15 nt, Homo sapiens
ucaucaaucaaauaa

SEQ ID NO: 23765 - RNA, 13 nt, Homo sapiens
uuuauuaccucug

SEQ ID NO: 23766 - RNA, 15 nt, Homo sapiens
guugacaacugugac

SEQ ID NO: 23767 - RNA, 20 nt, Homo sapiens
cgcgcaccuguaaucccagc

SEQ ID NO: 23768 - RNA, 14 nt, Homo sapiens
gagaaguuaagcaa

SEQ ID NO: 23769 - RNA, 14 nt, Homo sapiens
uuaacacagugucu

SEQ ID NO: 23770 - RNA, 16 nt, Homo sapiens
acuaaaaauacaaaaa

SEQ ID NO: 23771 - RNA, 23 nt, Homo sapiens
augcuuguauuuuacuuuuccau

SEQ ID NO: 23772 - RNA, 15 nt, Homo sapiens
cuuaacucauugcaa

SEQ ID NO: 23773 - RNA, 12 nt, Homo sapiens
cugauaccucaa

SEQ ID NO: 23774 - RNA, 15 nt, Homo sapiens
uuaggcuauucacaa

SEQ ID NO: 23775 - RNA, 16 nt, Homo sapiens
uuuaaucaccaaggcu

SEQ ID NO: 23776 - RNA, 11 nt, Homo sapiens
cucaugcugcc

SEQ ID NO: 23777 - RNA, 21 nt, Homo sapiens
cuguaaucccagcuacuuggg

SEQ ID NO: 23778 - RNA, 20 nt, Homo sapiens
gcuaaguugcaccaacuuug

SEQ ID NO: 23779 - RNA, 20 nt, Homo sapiens
uaaauguaucuuauucacau

SEQ ID NO: 23780 - RNA, 13 nt, Homo sapiens
uccuucagccuga

SEQ ID NO: 23781 - RNA, 22 nt, Homo sapiens
cugcauacucauuaggauggcu

SEQ ID NO: 23782 - RNA, 12 nt, Homo sapiens
gaaaaugugcaa

SEQ ID NO: 23783 - RNA, 15 nt, Homo sapiens
uguuuuuaaacugga

SEQ ID NO: 23784 - RNA, 21 nt, Homo sapiens
gccuggaucucacaagcacuu

SEQ ID NO: 23785 - RNA, 23 nt, Homo sapiens
aucuuguuuuuccacuacugcua

SEQ ID NO: 23786 - RNA, 19 nt, Homo sapiens
cccuuugaugauuaauuca

SEQ ID NO: 23787 - RNA, 12 nt, Homo sapiens
acuagucuuaua

SEQ ID NO: 23788 - RNA, 19 nt, Homo sapiens
caaucuuaacucauugcaa

SEQ ID NO: 23789 - RNA, 18 nt, Homo sapiens
caagugaaaaacauccag

SEQ ID NO: 23790 - RNA, 19 nt, Homo sapiens
caggauagagugggacagu

SEQ ID NO: 23791 - RNA, 18 nt, Homo sapiens
gagccaccaaacccggcc

SEQ ID NO: 23792 - RNA, 17 nt, Homo sapiens
uaguuuaugauuccacc

SEQ ID NO: 23793 - RNA, 17 nt, Homo sapiens
gaaauagugucugauga

SEQ ID NO: 23794 - RNA, 14 nt, Homo sapiens
gguacauauuucuu

SEQ ID NO: 23795 - RNA, 14 nt, Homo sapiens
gauuucaugccugg

SEQ ID NO: 23796 - RNA, 15 nt, Homo sapiens
aagugcugggaauua

SEQ ID NO: 23797 - RNA, 20 nt, Homo sapiens
uugacuauuauagaauggaa

SEQ ID NO: 23798 - RNA, 20 nt, Homo sapiens
gaggcagagguugcagugag

SEQ ID NO: 23799 - RNA, 17 nt, Homo sapiens
uccuguacuuuuuccag

SEQ ID NO: 23800 - RNA, 15 nt, Homo sapiens
ugcagcugugccaua

SEQ ID NO: 23801 - RNA, 22 nt, Homo sapiens
augaaaacauagcaucucagga

SEQ ID NO: 23802 - RNA, 22 nt, Homo sapiens
gcuugaaauagugucugaugaa

SEQ ID NO: 23803 - RNA, 20 nt, Homo sapiens
gccauggagguuaagcacuu

SEQ ID NO: 23804 - RNA, 21 nt, Homo sapiens
ugaaauaagccagacaucaac

SEQ ID NO: 23805 - RNA, 22 nt, Homo sapiens
gaccuuuguagccacuucacuu

SEQ ID NO: 23806 - RNA, 17 nt, Homo sapiens
caaggcuggagugcagu

SEQ ID NO: 23807 - RNA, 21 nt, Homo sapiens
uaguguuggaaaaugugcaau

SEQ ID NO: 23808 - RNA, 13 nt, Homo sapiens
auguuaugcauaa

SEQ ID NO: 23809 - RNA, 14 nt, Homo sapiens
auuuauugagcacc

SEQ ID NO: 23810 - RNA, 20 nt, Homo sapiens
cucuaacucagaaacaucag

SEQ ID NO: 23811 - RNA, 12 nt, Homo sapiens
ccaacuaggcag

SEQ ID NO: 23812 - RNA, 17 nt, Homo sapiens
aauggaaaguaacucau

SEQ ID NO: 23813 - RNA, 19 nt, Homo sapiens
ugcuggccaggcuggucuc

SEQ ID NO: 23814 - RNA, 20 nt, Homo sapiens
aaccuccaccuucuggguuc

SEQ ID NO: 23815 - RNA, 14 nt, Homo sapiens
aaucccagcacuuu

SEQ ID NO: 23816 - RNA, 12 nt, Homo sapiens
uacaucuuucac

SEQ ID NO: 23817 - RNA, 17 nt, Homo sapiens
ccuuuuacauacugcug

SEQ ID NO: 23818 - RNA, 15 nt, Homo sapiens
ucccugcagacauga

SEQ ID NO: 23819 - RNA, 17 nt, Homo sapiens
caacuauauuaucaugc

SEQ ID NO: 23820 - RNA, 15 nt, Homo sapiens
cuucauguacaucca

SEQ ID NO: 23821 - RNA, 11 nt, Homo sapiens
aaugugcaaua

SEQ ID NO: 23822 - RNA, 15 nt, Homo sapiens
gguggcgcgcaccug

SEQ ID NO: 23823 - RNA, 14 nt, Homo sapiens
auggagugacuuag

SEQ ID NO: 23824 - RNA, 21 nt, Homo sapiens
gcuuauucacaagacccaaaa

SEQ ID NO: 23825 - RNA, 14 nt, Homo sapiens
gugaaauaagccag

SEQ ID NO: 23826 - RNA, 14 nt, Homo sapiens
auccugcaauucca

SEQ ID NO: 23827 - RNA, 20 nt, Homo sapiens
gugucuggcacuugggacaa

SEQ ID NO: 23828 - RNA, 20 nt, Homo sapiens
aagaccuggucgucgucuug

SEQ ID NO: 23829 - RNA, 14 nt, Homo sapiens
uaacugcauugaga

SEQ ID NO: 23830 - RNA, 14 nt, Homo sapiens
auauaauaugcaca

SEQ ID NO: 23831 - RNA, 20 nt, Homo sapiens
uccuagcgcagccaugugau

SEQ ID NO: 23832 - RNA, 23 nt, Homo sapiens
gaaauuugccaauuuacuuuguu

SEQ ID NO: 23833 - RNA, 20 nt, Homo sapiens
uugaaauagugucugaugaa

SEQ ID NO: 23834 - RNA, 12 nt, Homo sapiens
agcgacagugag

SEQ ID NO: 23835 - RNA, 20 nt, Homo sapiens
gcuguuuccauagggugaca

SEQ ID NO: 23836 - RNA, 17 nt, Homo sapiens
uauuugcaagacauaga

SEQ ID NO: 23837 - RNA, 16 nt, Homo sapiens
ucaugcaaaugcugua

SEQ ID NO: 23838 - RNA, 17 nt, Homo sapiens
aauugaaaggcauucuc

SEQ ID NO: 23839 - RNA, 20 nt, Homo sapiens
ccaaaguaucaggacgagaa

SEQ ID NO: 23840 - RNA, 21 nt, Homo sapiens
ugucucggagggauuccccua

SEQ ID NO: 23841 - RNA, 16 nt, Homo sapiens
ccacgcccagcuaauu

SEQ ID NO: 23842 - RNA, 16 nt, Homo sapiens
uucacaagacccaaaa

SEQ ID NO: 23843 - RNA, 11 nt, Homo sapiens
aggcauguaau

SEQ ID NO: 23844 - RNA, 15 nt, Homo sapiens
uccgaagucuuccau

SEQ ID NO: 23845 - RNA, 13 nt, Homo sapiens
ccucuguugccaa

SEQ ID NO: 23846 - RNA, 22 nt, Homo sapiens
uuacuauuuauugcugaaugac

SEQ ID NO: 23847 - RNA, 21 nt, Homo sapiens
agcaagugaauuuuucucuaa

SEQ ID NO: 23848 - RNA, 23 nt, Homo sapiens
auggaaguugcagugagcugaua

SEQ ID NO: 23849 - RNA, 13 nt, Homo sapiens
uaacacagugucu

SEQ ID NO: 23850 - RNA, 21 nt, Homo sapiens
ugaaaaucuacacuccaguga

SEQ ID NO: 23851 - RNA, 19 nt, Homo sapiens
uagcgcagccaugugauua

SEQ ID NO: 23852 - RNA, 14 nt, Homo sapiens
guaccucucuuaua

SEQ ID NO: 23853 - RNA, 15 nt, Homo sapiens
cuaaauuugguucua

SEQ ID NO: 23854 - RNA, 12 nt, Homo sapiens
ugacacaucucu

SEQ ID NO: 23855 - RNA, 13 nt, Homo sapiens
uuuaugcauacag

SEQ ID NO: 23856 - RNA, 11 nt, Homo sapiens
ucacauuugcg

SEQ ID NO: 23857 - RNA, 22 nt, Homo sapiens
gagacagaaagcagaacaguga

SEQ ID NO: 23858 - RNA, 21 nt, Homo sapiens
ggagcuugaaauagugucuga

SEQ ID NO: 23859 - RNA, 17 nt, Homo sapiens
aucaaauuccagaauga

SEQ ID NO: 23860 - RNA, 22 nt, Homo sapiens
caaauaaguauuuauaauagca

SEQ ID NO: 23861 - RNA, 18 nt, Homo sapiens
uucacuugaugauacaau

SEQ ID NO: 23862 - RNA, 23 nt, Homo sapiens
uaacucagaaacaucaguuacuc

SEQ ID NO: 23863 - RNA, 15 nt, Homo sapiens
agaauucuuacaugu

SEQ ID NO: 23864 - RNA, 22 nt, Homo sapiens
caggauagagugggacaguucc

SEQ ID NO: 23865 - RNA, 15 nt, Homo sapiens
agagaaaagacauaa

SEQ ID NO: 23866 - RNA, 23 nt, Homo sapiens
uccuagcgcagccaugugauuac

SEQ ID NO: 23867 - RNA, 20 nt, Homo sapiens
uaagcaaaaugugauaugua

SEQ ID NO: 23868 - RNA, 17 nt, Homo sapiens
ucugucuggacuuucca

SEQ ID NO: 23869 - RNA, 15 nt, Homo sapiens
agacaucaacagaua

SEQ ID NO: 23870 - RNA, 13 nt, Homo sapiens
cuuugaagucuga

SEQ ID NO: 23871 - RNA, 21 nt, Homo sapiens
gcagugagcugauaucaugcc

SEQ ID NO: 23872 - RNA, 11 nt, Homo sapiens
acaucuuucac

SEQ ID NO: 23873 - RNA, 16 nt, Homo sapiens
acagagaaaagacaua

SEQ ID NO: 23874 - RNA, 20 nt, Homo sapiens
gaaaccuuauuguaccucuc

SEQ ID NO: 23875 - RNA, 16 nt, Homo sapiens
ucccaaagugcuggga

SEQ ID NO: 23876 - RNA, 22 nt, Homo sapiens
agcauauguuuuuguaaguuua

SEQ ID NO: 23877 - RNA, 14 nt, Homo sapiens
ugaaugugucaggu

SEQ ID NO: 23878 - RNA, 17 nt, Homo sapiens
uugaaauuaaccauaga

SEQ ID NO: 23879 - RNA, 23 nt, Homo sapiens
auuucaaaacucauuuccuaugu

SEQ ID NO: 23880 - RNA, 13 nt, Homo sapiens
uagcaucucagga

SEQ ID NO: 23881 - RNA, 10 nt, Homo sapiens
uaugugcaau

SEQ ID NO: 23882 - RNA, 17 nt, Homo sapiens
gaauuuauucaauuccu

SEQ ID NO: 23883 - RNA, 20 nt, Homo sapiens
agugaaaaucuacacuccag

SEQ ID NO: 23884 - RNA, 14 nt, Homo sapiens
aaaccaaggcuaga

SEQ ID NO: 23885 - RNA, 20 nt, Homo sapiens
uucaccuuccagugucucgg

SEQ ID NO: 23886 - RNA, 15 nt, Homo sapiens
aaggcuuuaucucag

SEQ ID NO: 23887 - RNA, 15 nt, Homo sapiens
gaaaaugugcaauau

SEQ ID NO: 23888 - RNA, 15 nt, Homo sapiens
cauccagauagguua

SEQ ID NO: 23889 - RNA, 13 nt, Homo sapiens
aauaaaagcacuu

SEQ ID NO: 23890 - RNA, 21 nt, Homo sapiens
auagcagcuuauucacaagac

SEQ ID NO: 23891 - RNA, 23 nt, Homo sapiens
cagaagaaauucugcaagcuuuu

SEQ ID NO: 23892 - RNA, 22 nt, Homo sapiens
aaagggucucccucuguugcca

SEQ ID NO: 23893 - RNA, 16 nt, Homo sapiens
guauuuuacuuuucca

SEQ ID NO: 23894 - RNA, 15 nt, Homo sapiens
aaauaaaagcacuua

SEQ ID NO: 23895 - RNA, 15 nt, Homo sapiens
aggcuccaaacugga

SEQ ID NO: 23896 - RNA, 17 nt, Homo sapiens
ucauguacauccauggu

SEQ ID NO: 23897 - RNA, 19 nt, Homo sapiens
aauauaauaugcacacagu

SEQ ID NO: 23898 - RNA, 15 nt, Homo sapiens
ggaggcugaggcaag

SEQ ID NO: 23899 - RNA, 20 nt, Homo sapiens
uaguuucccuugcaugguuu

SEQ ID NO: 23900 - RNA, 22 nt, Homo sapiens
caaauucgcugcaaccuguuga

SEQ ID NO: 23901 - RNA, 15 nt, Homo sapiens
aaauauaauaugcac

SEQ ID NO: 23902 - RNA, 19 nt, Homo sapiens
cugcuggauucaagugauc

SEQ ID NO: 23903 - RNA, 17 nt, Homo sapiens
caagugaaaaacaucca

SEQ ID NO: 23904 - RNA, 14 nt, Homo sapiens
agcaaaaugugaua

SEQ ID NO: 23905 - RNA, 16 nt, Homo sapiens
uagauaaacucagaaa

SEQ ID NO: 23906 - RNA, 18 nt, Homo sapiens
gugagacagcucugcaua

SEQ ID NO: 23907 - RNA, 14 nt, Homo sapiens
uugaaauagugucu

SEQ ID NO: 23908 - RNA, 14 nt, Homo sapiens
aagacaaauucugu

SEQ ID NO: 23909 - RNA, 18 nt, Homo sapiens
acacuaaaaaggcaugua

SEQ ID NO: 23910 - RNA, 15 nt, Homo sapiens
uaugcuaagugaaau

SEQ ID NO: 23911 - RNA, 20 nt, Homo sapiens
gugaaauaagccagacauca

SEQ ID NO: 23912 - RNA, 17 nt, Homo sapiens
gugagacagcucugcau

SEQ ID NO: 23913 - RNA, 16 nt, Homo sapiens
aacagaagcuuccauu

SEQ ID NO: 23914 - RNA, 15 nt, Homo sapiens
gcgugagccaccaaa

SEQ ID NO: 23915 - RNA, 19 nt, Homo sapiens
uauaucaguccucuuucaa

SEQ ID NO: 23916 - RNA, 18 nt, Homo sapiens
acuaaauugacacuuaaa

SEQ ID NO: 23917 - RNA, 17 nt, Homo sapiens
ugggaauuuucuuccaa

SEQ ID NO: 23918 - RNA, 12 nt, Homo sapiens
uagcaucucagg

SEQ ID NO: 23919 - RNA, 20 nt, Homo sapiens
caaaacugauacccuuugaa

SEQ ID NO: 23920 - RNA, 22 nt, Homo sapiens
cuggagcuugaaauagugucug

SEQ ID NO: 23921 - RNA, 15 nt, Homo sapiens
uugcaagacauagaa

SEQ ID NO: 23922 - RNA, 21 nt, Homo sapiens
uaaacaguagugauaguugua

SEQ ID NO: 23923 - RNA, 19 nt, Homo sapiens
caaacgaaaaacauuucaa

SEQ ID NO: 23924 - RNA, 14 nt, Homo sapiens
ugcauacaguaauu

SEQ ID NO: 23925 - RNA, 16 nt, Homo sapiens
agggauuccccuaacc

SEQ ID NO: 23926 - RNA, 18 nt, Homo sapiens
uauuguugacaacuguga

SEQ ID NO: 23927 - RNA, 11 nt, Homo sapiens
augugcaauau

SEQ ID NO: 23928 - RNA, 16 nt, Homo sapiens
ccuucauguacaucca

SEQ ID NO: 23929 - RNA, 15 nt, Homo sapiens
cuauauccugugacu

SEQ ID NO: 23930 - RNA, 18 nt, Homo sapiens
acuuaaaaucuaauucaa

SEQ ID NO: 23931 - RNA, 21 nt, Homo sapiens
accuguugauagcaagugaau

SEQ ID NO: 23932 - RNA, 16 nt, Homo sapiens
gccuaucagcauuuua

SEQ ID NO: 23933 - RNA, 13 nt, Homo sapiens
ugacccacaagaa

SEQ ID NO: 23934 - RNA, 20 nt, Homo sapiens
caaaugagccggagccccuu

SEQ ID NO: 23935 - RNA, 11 nt, Homo sapiens
uuaaucaccaa

SEQ ID NO: 23936 - RNA, 14 nt, Homo sapiens
cuuauugacuauua

SEQ ID NO: 23937 - RNA, 20 nt, Homo sapiens
ucuggacuuuccagagacca

SEQ ID NO: 23938 - RNA, 15 nt, Homo sapiens
aagauuaugaucuca

SEQ ID NO: 23939 - RNA, 23 nt, Homo sapiens
auaguguuggaaaaugugcaaua

SEQ ID NO: 23940 - RNA, 14 nt, Homo sapiens
ccaaggcuggagug

SEQ ID NO: 23941 - RNA, 14 nt, Homo sapiens
uuaguguacaugaa

SEQ ID NO: 23942 - RNA, 17 nt, Homo sapiens
aaauauaauaugcacac

SEQ ID NO: 23943 - RNA, 18 nt, Homo sapiens
guaaguuuaugcauacag

SEQ ID NO: 23944 - RNA, 15 nt, Homo sapiens
ugugauuacaaggcu

SEQ ID NO: 23945 - RNA, 19 nt, Homo sapiens
agagacagcaggucucaug

SEQ ID NO: 23946 - RNA, 20 nt, Homo sapiens
aaacuuuaugcuaagugaaa

SEQ ID NO: 23947 - RNA, 18 nt, Homo sapiens
aaauauuuuuaugugcaa

SEQ ID NO: 23948 - RNA, 13 nt, Homo sapiens
cccuuuuacauac

SEQ ID NO: 23949 - RNA, 21 nt, Homo sapiens
uggcuaagcaaaaugugauau

SEQ ID NO: 23950 - RNA, 22 nt, Homo sapiens
uucugcagauaaacaguaguga

SEQ ID NO: 23951 - RNA, 17 nt, Homo sapiens
uggcgcgcgccaccacg

SEQ ID NO: 23952 - RNA, 23 nt, Homo sapiens
auuuuuccccaaaaagaauggga

SEQ ID NO: 23953 - RNA, 17 nt, Homo sapiens
ccucccuucucuucaca

SEQ ID NO: 23954 - RNA, 20 nt, Homo sapiens
cauuaaauauaauaugcaca

SEQ ID NO: 23955 - RNA, 12 nt, Homo sapiens
aaguacucauac

SEQ ID NO: 23956 - RNA, 16 nt, Homo sapiens
auacuauccaguuacu

SEQ ID NO: 23957 - RNA, 17 nt, Homo sapiens
gagguacugagagugaa

SEQ ID NO: 23958 - RNA, 21 nt, Homo sapiens
agaaaccuuauuguaccucuc

SEQ ID NO: 23959 - RNA, 13 nt, Homo sapiens
cgaagucuuccau

SEQ ID NO: 23960 - RNA, 13 nt, Homo sapiens
gcuuuaauuucau

SEQ ID NO: 23961 - RNA, 23 nt, Homo sapiens
auguuucgugaaguauacuguau

SEQ ID NO: 23962 - RNA, 21 nt, Homo sapiens
gaacucaaggaaaucuguguc

SEQ ID NO: 23963 - RNA, 20 nt, Homo sapiens
ggccuccucucucaguuuuu

SEQ ID NO: 23964 - RNA, 15 nt, Homo sapiens
uauguucuaagaagu

SEQ ID NO: 23965 - RNA, 17 nt, Homo sapiens
uaaaguacagacuuuuu

SEQ ID NO: 23966 - RNA, 19 nt, Homo sapiens
caaccugggggcuuuaggg

SEQ ID NO: 23967 - RNA, 15 nt, Homo sapiens
auucugcaagcuuuu

SEQ ID NO: 23968 - RNA, 22 nt, Homo sapiens
aagcuuccauuccaagccugac

SEQ ID NO: 23969 - RNA, 18 nt, Homo sapiens
auuagaggucuccaaaau

SEQ ID NO: 23970 - RNA, 14 nt, Homo sapiens
augaaugaauggcu

SEQ ID NO: 23971 - RNA, 15 nt, Homo sapiens
uugcaccaacuuuga

SEQ ID NO: 23972 - RNA, 16 nt, Homo sapiens
gagacucugucucagu

SEQ ID NO: 23973 - RNA, 16 nt, Homo sapiens
cgcaaugugacuuaau

SEQ ID NO: 23974 - RNA, 22 nt, Homo sapiens
cuuuaauuucaugaaaagauua

SEQ ID NO: 23975 - RNA, 20 nt, Homo sapiens
augaacacuuauaagugaag

SEQ ID NO: 23976 - RNA, 17 nt, Homo sapiens
aauucuuacauguuuuc

SEQ ID NO: 23977 - RNA, 15 nt, Homo sapiens
aagcagaacagugau

SEQ ID NO: 23978 - RNA, 13 nt, Homo sapiens
cauagagacuuug

SEQ ID NO: 23979 - RNA, 21 nt, Homo sapiens
aaaauuagccgggcauggugg

SEQ ID NO: 23980 - RNA, 17 nt, Homo sapiens
caaagcugaauacauuc

SEQ ID NO: 23981 - RNA, 20 nt, Homo sapiens
gauacaaugaacacuuauaa

SEQ ID NO: 23982 - RNA, 12 nt, Homo sapiens
uaaaagcacuua

SEQ ID NO: 23983 - RNA, 21 nt, Homo sapiens
agaauuuauucaauuccucug

SEQ ID NO: 23984 - RNA, 17 nt, Homo sapiens
aacuggaaauaaaagau

SEQ ID NO: 23985 - RNA, 13 nt, Homo sapiens
uggcacugcauac

SEQ ID NO: 23986 - RNA, 23 nt, Homo sapiens
ugaaauaagccagacaucaacag

SEQ ID NO: 23987 - RNA, 19 nt, Homo sapiens
gaagaguggguuucacaag

SEQ ID NO: 23988 - RNA, 16 nt, Homo sapiens
cauaauuacuauguca

SEQ ID NO: 23989 - RNA, 21 nt, Homo sapiens
ucuagcaaauguuaugcauaa

SEQ ID NO: 23990 - RNA, 23 nt, Homo sapiens
uguauuuuauuacaucuuucaca

SEQ ID NO: 23991 - RNA, 21 nt, Homo sapiens
ugugguccgaagucuuccaua

SEQ ID NO: 23992 - RNA, 16 nt, Homo sapiens
ugccccagggaccuuu

SEQ ID NO: 23993 - RNA, 20 nt, Homo sapiens
augguggcgcgcaccuguaa

SEQ ID NO: 23994 - RNA, 16 nt, Homo sapiens
cagagaaaagacauaa

SEQ ID NO: 23995 - RNA, 23 nt, Homo sapiens
agacaccaccacccuugccaugg

SEQ ID NO: 23996 - RNA, 18 nt, Homo sapiens
gacaaagacaaauucugu

SEQ ID NO: 23997 - RNA, 12 nt, Homo sapiens
auauuagcuuua

SEQ ID NO: 23998 - RNA, 19 nt, Homo sapiens
cuucuuggucucaguguca

SEQ ID NO: 23999 - RNA, 23 nt, Homo sapiens
cacuccagccugagcgacaguga

SEQ ID NO: 24000 - RNA, 22 nt, Homo sapiens
accagccuggucaacaugguga

SEQ ID NO: 24001 - RNA, 21 nt, Homo sapiens
cuuugcuuuaaguguaacugg

SEQ ID NO: 24002 - RNA, 14 nt, Homo sapiens
agaacuugaaugug

SEQ ID NO: 24003 - RNA, 19 nt, Homo sapiens
uggagcuugaaauaguguc

SEQ ID NO: 24004 - RNA, 19 nt, Homo sapiens
gcuguuuuuauauauguga

SEQ ID NO: 24005 - RNA, 22 nt, Homo sapiens
gaaagaaaaucaggcuggccaa

SEQ ID NO: 24006 - RNA, 13 nt, Homo sapiens
gggaguggcgcgc

SEQ ID NO: 24007 - RNA, 13 nt, Homo sapiens
uacauacugcugu

SEQ ID NO: 24008 - RNA, 22 nt, Homo sapiens
augaaaagauuaugaucucaga

SEQ ID NO: 24009 - RNA, 18 nt, Homo sapiens
ucuaacucagaaacauca

SEQ ID NO: 24010 - RNA, 16 nt, Homo sapiens
ucugcuuuaauuucau

SEQ ID NO: 24011 - RNA, 17 nt, Homo sapiens
uuauuuuuuuacuuccu

SEQ ID NO: 24012 - RNA, 13 nt, Homo sapiens
augauuucauuca

SEQ ID NO: 24013 - RNA, 18 nt, Homo sapiens
caaccuccaccuucuggg

SEQ ID NO: 24014 - RNA, 15 nt, Homo sapiens
agacgggguuugcca

SEQ ID NO: 24015 - RNA, 18 nt, Homo sapiens
aggcauguaauugcuugu

SEQ ID NO: 24016 - RNA, 21 nt, Homo sapiens
caauucuauuacgugcaauac

SEQ ID NO: 24017 - RNA, 23 nt, Homo sapiens
agccaaccugggggcuuuaggga

SEQ ID NO: 24018 - RNA, 22 nt, Homo sapiens
gaaguacucauacauguuacaa

SEQ ID NO: 24019 - RNA, 18 nt, Homo sapiens
aggugagcaggugaugcc

SEQ ID NO: 24020 - RNA, 16 nt, Homo sapiens
ugugucaguggaugcu

SEQ ID NO: 24021 - RNA, 13 nt, Homo sapiens
aucuauuuauuaa

SEQ ID NO: 24022 - RNA, 21 nt, Homo sapiens
auugcuuguuagcaaaaugga

SEQ ID NO: 24023 - RNA, 17 nt, Homo sapiens
uuacaaaccucaagcca

SEQ ID NO: 24024 - RNA, 19 nt, Homo sapiens
caagacucugucucaaaaa

SEQ ID NO: 24025 - RNA, 16 nt, Homo sapiens
guaccgcaaugugacu

SEQ ID NO: 24026 - RNA, 23 nt, Homo sapiens
uccucuuucaaagguagccauca

SEQ ID NO: 24027 - RNA, 15 nt, Homo sapiens
ucacagguugaccaa

SEQ ID NO: 24028 - RNA, 21 nt, Homo sapiens
gagccaccaaacccggccuga

SEQ ID NO: 24029 - RNA, 23 nt, Homo sapiens
aaacugauacccuuugaaaaagu

SEQ ID NO: 24030 - RNA, 12 nt, Homo sapiens
auuuucuuccaa

SEQ ID NO: 24031 - RNA, 23 nt, Homo sapiens
aauaaaagauuguauagugcaug

SEQ ID NO: 24032 - RNA, 15 nt, Homo sapiens
aaauggagugacuua

SEQ ID NO: 24033 - RNA, 19 nt, Homo sapiens
agaauauuuauuaccucug

SEQ ID NO: 24034 - RNA, 20 nt, Homo sapiens
uagaauauuuauuaccucug

SEQ ID NO: 24035 - RNA, 18 nt, Homo sapiens
augcuuguauuuuacuuu

SEQ ID NO: 24036 - RNA, 21 nt, Homo sapiens
agcccccauuguggucacagg

SEQ ID NO: 24037 - RNA, 21 nt, Homo sapiens
uuucaccuguuuuuaagcugu

SEQ ID NO: 24038 - RNA, 17 nt, Homo sapiens
gguccgaagucuuccau

SEQ ID NO: 24039 - RNA, 11 nt, Homo sapiens
cccuugccaug

SEQ ID NO: 24040 - RNA, 23 nt, Homo sapiens
aagucuuccauagagacuuugug

SEQ ID NO: 24041 - RNA, 19 nt, Homo sapiens
aaaacuuuaugcuaaguga

SEQ ID NO: 24042 - RNA, 20 nt, Homo sapiens
uccguggcacugcauacaau

SEQ ID NO: 24043 - RNA, 20 nt, Homo sapiens
ccucauuccccaaccacuuc

SEQ ID NO: 24044 - RNA, 23 nt, Homo sapiens
uauaagugaagugauacuaucca

SEQ ID NO: 24045 - RNA, 19 nt, Homo sapiens
gaaguacucauacauguua

SEQ ID NO: 24046 - RNA, 12 nt, Homo sapiens
caaacagaacua

SEQ ID NO: 24047 - RNA, 13 nt, Homo sapiens
agcaaaaugugau

SEQ ID NO: 24048 - RNA, 13 nt, Homo sapiens
uguuuuuaagcug

SEQ ID NO: 24049 - RNA, 24 nt, Homo sapiens
aucuuguuuuuccacuacugcuac

SEQ ID NO: 24050 - RNA, 22 nt, Homo sapiens
agagcccuucaugcauuugcac

SEQ ID NO: 24051 - RNA, 21 nt, Homo sapiens
aagcaaagacuaugaggaaua

SEQ ID NO: 24052 - RNA, 21 nt, Homo sapiens
cacauuccaagccucaugucc

SEQ ID NO: 24053 - RNA, 15 nt, Homo sapiens
uaaugaaaaugaaua

SEQ ID NO: 24054 - RNA, 18 nt, Homo sapiens
cuucucuucacagucaca

SEQ ID NO: 24055 - RNA, 19 nt, Homo sapiens
uguuggaaaaugugcaaua

SEQ ID NO: 24056 - RNA, 15 nt, Homo sapiens
gauuacccucugggu

SEQ ID NO: 24057 - RNA, 14 nt, Homo sapiens
ccuuauuguaccuc

SEQ ID NO: 24058 - RNA, 19 nt, Homo sapiens
cagugagccgagauugugc

SEQ ID NO: 24059 - RNA, 22 nt, Homo sapiens
ugcagauaaacaguagugauag

SEQ ID NO: 24060 - RNA, 22 nt, Homo sapiens
acacaugauccugcaauuccac

SEQ ID NO: 24061 - RNA, 14 nt, Homo sapiens
agaaucacuugaac

SEQ ID NO: 24062 - RNA, 19 nt, Homo sapiens
aauuauuuuuacaguucuc

SEQ ID NO: 24063 - RNA, 22 nt, Homo sapiens
uaauggaauauguaaauagaaa

SEQ ID NO: 24064 - RNA, 20 nt, Homo sapiens
gaaauuuaauucauguuucu

SEQ ID NO: 24065 - RNA, 17 nt, Homo sapiens
uaugauuccaccuacau

SEQ ID NO: 24066 - RNA, 14 nt, Homo sapiens
agccacuucacuuu

SEQ ID NO: 24067 - RNA, 13 nt, Homo sapiens
cuuaugaaccuuu

SEQ ID NO: 24068 - RNA, 16 nt, Homo sapiens
aagaaugacuaugcaa

SEQ ID NO: 24069 - RNA, 12 nt, Homo sapiens
cacuucacuuuu

SEQ ID NO: 24070 - RNA, 10 nt, Homo sapiens
augugcaaua

SEQ ID NO: 24071 - RNA, 19 nt, Homo sapiens
auacaauuauuuuuacagu

SEQ ID NO: 24072 - RNA, 16 nt, Homo sapiens
gcgcagccaugugauu

SEQ ID NO: 24073 - RNA, 15 nt, Homo sapiens
caaaaucaaauucca

SEQ ID NO: 24074 - RNA, 20 nt, Homo sapiens
ucugggcuuggggcuuccua

SEQ ID NO: 24075 - RNA, 14 nt, Homo sapiens
uaguguacaugaaa

SEQ ID NO: 24076 - RNA, 18 nt, Homo sapiens
aaccuuauuguaccucuc

SEQ ID NO: 24077 - RNA, 20 nt, Homo sapiens
uccagccugagcgacaguga

SEQ ID NO: 24078 - RNA, 14 nt, Homo sapiens
ucauacauguuaca

SEQ ID NO: 24079 - RNA, 16 nt, Homo sapiens
ccucucuuauagaaua

SEQ ID NO: 24080 - RNA, 20 nt, Homo sapiens
cucuacuaaaaauacaaaaa

SEQ ID NO: 24081 - RNA, 17 nt, Homo sapiens
aaucuucagaccuagaa

SEQ ID NO: 24082 - RNA, 16 nt, Homo sapiens
gacaacugugacugua

SEQ ID NO: 24083 - RNA, 19 nt, Homo sapiens
ucacaaccacucauucaaa

SEQ ID NO: 24084 - RNA, 22 nt, Homo sapiens
ugacaacugugacuguacccaa

SEQ ID NO: 24085 - RNA, 16 nt, Homo sapiens
cacagaggaucugcuu

SEQ ID NO: 24086 - RNA, 22 nt, Homo sapiens
guuaagcacuuuaacacagugu

SEQ ID NO: 24087 - RNA, 17 nt, Homo sapiens
agaaucagaucauuuca

SEQ ID NO: 24088 - RNA, 19 nt, Homo sapiens
acaaauuuacagagacaga

SEQ ID NO: 24089 - RNA, 22 nt, Homo sapiens
aauauuguugacaacugugacu

SEQ ID NO: 24090 - RNA, 19 nt, Homo sapiens
uucgugaaguauacuguau

SEQ ID NO: 24091 - RNA, 13 nt, Homo sapiens
uugaaaaaguaua

SEQ ID NO: 24092 - RNA, 23 nt, Homo sapiens
aaccaaauuuguauuuaagguau

SEQ ID NO: 24093 - RNA, 19 nt, Homo sapiens
ccuuuggaugcacuuuaua

SEQ ID NO: 24094 - RNA, 15 nt, Homo sapiens
agcccauggcacucu

SEQ ID NO: 24095 - RNA, 17 nt, Homo sapiens
augaaguacucauacau

SEQ ID NO: 24096 - RNA, 18 nt, Homo sapiens
uuauaauuccuauauccu

SEQ ID NO: 24097 - RNA, 13 nt, Homo sapiens
aacacagugucug

SEQ ID NO: 24098 - RNA, 11 nt, Homo sapiens
uaugugcaaua

SEQ ID NO: 24099 - RNA, 17 nt, Homo sapiens
aaauagugucugaugaa

SEQ ID NO: 24100 - RNA, 16 nt, Homo sapiens
aaguugcaccaacuuu

SEQ ID NO: 24101 - RNA, 22 nt, Homo sapiens
aauuccuauauccugugacugu

SEQ ID NO: 24102 - RNA, 16 nt, Homo sapiens
gcaaauguuaugcaua

SEQ ID NO: 24103 - RNA, 14 nt, Homo sapiens
uuccacuacugcua

SEQ ID NO: 24104 - RNA, 13 nt, Homo sapiens
acauagcaucuca

SEQ ID NO: 24105 - RNA, 14 nt, Homo sapiens
ugagaagaaugacu

SEQ ID NO: 24106 - RNA, 13 nt, Homo sapiens
uucugcaagcuuu

SEQ ID NO: 24107 - RNA, 20 nt, Homo sapiens
gccuguaaucccagcacuuu

SEQ ID NO: 24108 - RNA, 20 nt, Homo sapiens
gugcugggaauuacaggcgu

SEQ ID NO: 24109 - RNA, 16 nt, Homo sapiens
uacauuuccaaauuca

SEQ ID NO: 24110 - RNA, 16 nt, Homo sapiens
guagccacuucacuuu

SEQ ID NO: 24111 - RNA, 17 nt, Homo sapiens
uuuaaugggcacagggu

SEQ ID NO: 24112 - RNA, 19 nt, Homo sapiens
aauaauacaccagagauaa

SEQ ID NO: 24113 - RNA, 17 nt, Homo sapiens
gcauuguaacuuaugaa

SEQ ID NO: 24114 - RNA, 16 nt, Homo sapiens
uuccguggcacugcau

SEQ ID NO: 24115 - RNA, 17 nt, Homo sapiens
ugcuggauucaagugau

SEQ ID NO: 24116 - RNA, 19 nt, Homo sapiens
accuguuuuuaagcuguuu

SEQ ID NO: 24117 - RNA, 15 nt, Homo sapiens
cucuggcgacaguuu

SEQ ID NO: 24118 - RNA, 18 nt, Homo sapiens
ccaaggcuggagugcagu

SEQ ID NO: 24119 - RNA, 20 nt, Homo sapiens
gacauagaauuaacacauga

SEQ ID NO: 24120 - RNA, 22 nt, Homo sapiens
agcagagacgggguuugccaug

SEQ ID NO: 24121 - RNA, 22 nt, Homo sapiens
gauagagugggacaguuccuga

SEQ ID NO: 24122 - RNA, 14 nt, Homo sapiens
accaguauucccuu

SEQ ID NO: 24123 - RNA, 20 nt, Homo sapiens
agcccuucaugcauuugcac

SEQ ID NO: 24124 - RNA, 12 nt, Homo sapiens
caggaaaauuaa

SEQ ID NO: 24125 - RNA, 14 nt, Homo sapiens
aacauguucacuua

SEQ ID NO: 24126 - RNA, 15 nt, Homo sapiens
gagguuaagcacuuu

SEQ ID NO: 24127 - RNA, 20 nt, Homo sapiens
uaaauggacaaaugcuuaug

SEQ ID NO: 24128 - RNA, 20 nt, Homo sapiens
cucaguguccucaucuguaa

SEQ ID NO: 24129 - RNA, 21 nt, Homo sapiens
ugcaagacauagaauaguguu

SEQ ID NO: 24130 - RNA, 19 nt, Homo sapiens
guuuuccuucucaucugug

SEQ ID NO: 24131 - RNA, 16 nt, Homo sapiens
aucaaccaaauggagu

SEQ ID NO: 24132 - RNA, 21 nt, Homo sapiens
auauuugaauuuuaaaucuaa

SEQ ID NO: 24133 - RNA, 22 nt, Homo sapiens
gccaugugauuacccucugggu

SEQ ID NO: 24134 - RNA, 17 nt, Homo sapiens
ugacaacugugacugua

SEQ ID NO: 24135 - RNA, 22 nt, Homo sapiens
gucucaguguccucaucuguaa

SEQ ID NO: 24136 - RNA, 21 nt, Homo sapiens
auaccucaacccccauuucua

SEQ ID NO: 24137 - RNA, 18 nt, Homo sapiens
auuagccgggcauggugg

SEQ ID NO: 24138 - RNA, 15 nt, Homo sapiens
aaccaugcccaagaa

SEQ ID NO: 24139 - RNA, 19 nt, Homo sapiens
gcaacccaaauguucauca

SEQ ID NO: 24140 - RNA, 15 nt, Homo sapiens
uugacaacugugacu

SEQ ID NO: 24141 - RNA, 23 nt, Homo sapiens
aaagucagugcccaacuguuaua

SEQ ID NO: 24142 - RNA, 16 nt, Homo sapiens
uguaucuuauucacau

SEQ ID NO: 24143 - RNA, 16 nt, Homo sapiens
agcccauggcacucua

SEQ ID NO: 24144 - RNA, 13 nt, Homo sapiens
cucaucugugauu

SEQ ID NO: 24145 - RNA, 21 nt, Homo sapiens
guuuucccugaccucccucua

SEQ ID NO: 24146 - RNA, 18 nt, Homo sapiens
aauauuugcaagacauag

SEQ ID NO: 24147 - RNA, 20 nt, Homo sapiens
uugacacuuaaaaaugguuu

SEQ ID NO: 24148 - RNA, 19 nt, Homo sapiens
aucaugcaaaugcuguauu

SEQ ID NO: 24149 - RNA, 23 nt, Homo sapiens
ucucuuuuuagagaaauuugcca

SEQ ID NO: 24150 - RNA, 24 nt, Homo sapiens
ggacuugggcgggacacaggcucc

SEQ ID NO: 24151 - RNA, 17 nt, Homo sapiens
auccaaagcugaauaca

SEQ ID NO: 24152 - RNA, 22 nt, Homo sapiens
uacaauuauuuuuacaguucuc

SEQ ID NO: 24153 - RNA, 13 nt, Homo sapiens
auaaaagcacuua

SEQ ID NO: 24154 - RNA, 15 nt, Homo sapiens
uuuuaaguaauuuca

SEQ ID NO: 24155 - RNA, 17 nt, Homo sapiens
agugcccaacuguuaua

SEQ ID NO: 24156 - RNA, 23 nt, Homo sapiens
caaacaaacgaaaaacauuucaa

SEQ ID NO: 24157 - RNA, 18 nt, Homo sapiens
ugucuucauagcagauuu

SEQ ID NO: 24158 - RNA, 22 nt, Homo sapiens
agcuuuucaaaauuggacuuaa

SEQ ID NO: 24159 - RNA, 19 nt, Homo sapiens
aauagaaggauguacauuu

SEQ ID NO: 24160 - RNA, 19 nt, Homo sapiens
cauggcacucuauguucua

SEQ ID NO: 24161 - RNA, 19 nt, Homo sapiens
ugagagacagcaggucuca

SEQ ID NO: 24162 - RNA, 21 nt, Homo sapiens
cuuaguguacaugaaagcgua

SEQ ID NO: 24163 - RNA, 20 nt, Homo sapiens
uaaucccagcuacuugggag

SEQ ID NO: 24164 - RNA, 14 nt, Homo sapiens
ggccaacuaggcag

SEQ ID NO: 24165 - RNA, 16 nt, Homo sapiens
agaauucuuacauguu

SEQ ID NO: 24166 - RNA, 16 nt, Homo sapiens
uucagccugaaagagg

SEQ ID NO: 24167 - RNA, 23 nt, Homo sapiens
aucacuugaacccgggaggcaga

SEQ ID NO: 24168 - RNA, 19 nt, Homo sapiens
aaguugcaccaacuuugaa

SEQ ID NO: 24169 - RNA, 19 nt, Homo sapiens
gguaucaaccaaauggagu

SEQ ID NO: 24170 - RNA, 20 nt, Homo sapiens
ucucaggggccaacuaggca

SEQ ID NO: 24171 - RNA, 15 nt, Homo sapiens
uucuauuuauuuacu

SEQ ID NO: 24172 - RNA, 15 nt, Homo sapiens
agaauuaacacauga

SEQ ID NO: 24173 - RNA, 16 nt, Homo sapiens
uuccuauguaacugca

SEQ ID NO: 24174 - RNA, 13 nt, Homo sapiens
ccugcaauuccac

SEQ ID NO: 24175 - RNA, 11 nt, Homo sapiens
augugcaauaa

SEQ ID NO: 24176 - RNA, 21 nt, Homo sapiens
aauuuuucucuaacucagaaa

SEQ ID NO: 24177 - RNA, 12 nt, Homo sapiens
gccaauuuacuu

SEQ ID NO: 24178 - RNA, 15 nt, Homo sapiens
guggcauuuucacuu

SEQ ID NO: 24179 - RNA, 13 nt, Homo sapiens
uaagcaacaucua

SEQ ID NO: 24180 - RNA, 17 nt, Homo sapiens
aaggcuuuaucucaggg

SEQ ID NO: 24181 - RNA, 21 nt, Homo sapiens
auagugucugaugaauguuaa

SEQ ID NO: 24182 - RNA, 19 nt, Homo sapiens
aggcaaggcuaugugauua

SEQ ID NO: 24183 - RNA, 17 nt, Homo sapiens
auuguugacaacuguga

SEQ ID NO: 24184 - RNA, 23 nt, Homo sapiens
ugagaaaccuuauuguaccucuc

SEQ ID NO: 24185 - RNA, 20 nt, Homo sapiens
acgugacuggccugcuggau

SEQ ID NO: 24186 - RNA, 13 nt, Homo sapiens
ugcagacaugaga

SEQ ID NO: 24187 - RNA, 23 nt, Homo sapiens
gccagugcuuuaauggcauguca

SEQ ID NO: 24188 - RNA, 17 nt, Homo sapiens
auggagguuaagcacuu

SEQ ID NO: 24189 - RNA, 16 nt, Homo sapiens
uaagcaaagacuauga

SEQ ID NO: 24190 - RNA, 15 nt, Homo sapiens
auguuucgcugauau

SEQ ID NO: 24191 - RNA, 18 nt, Homo sapiens
uggaucucacaagcacuu

SEQ ID NO: 24192 - RNA, 21 nt, Homo sapiens
acgccuguaaucccagcacuu

SEQ ID NO: 24193 - RNA, 14 nt, Homo sapiens
aacuggcaguuuuc

SEQ ID NO: 24194 - RNA, 21 nt, Homo sapiens
uacauauuucuuugccuuuau

SEQ ID NO: 24195 - RNA, 17 nt, Homo sapiens
uuccucaaaacuucaga

SEQ ID NO: 24196 - RNA, 20 nt, Homo sapiens
cagugagcugauaucaugcc

SEQ ID NO: 24197 - RNA, 19 nt, Homo sapiens
ccaaguuuauauacaauua

SEQ ID NO: 24198 - RNA, 18 nt, Homo sapiens
uuuuaugaaacauuacag

SEQ ID NO: 24199 - RNA, 23 nt, Homo sapiens
acuccagccugagcgacagugag

SEQ ID NO: 24200 - RNA, 14 nt, Homo sapiens
uauguggcuguauc

SEQ ID NO: 24201 - RNA, 14 nt, Homo sapiens
ggcauucucugaag

SEQ ID NO: 24202 - RNA, 18 nt, Homo sapiens
ccugaugaaaacauagca

SEQ ID NO: 24203 - RNA, 12 nt, Homo sapiens
cauguacaucca

SEQ ID NO: 24204 - RNA, 12 nt, Homo sapiens
acucauugcaac

SEQ ID NO: 24205 - RNA, 15 nt, Homo sapiens
gaauuaacacaugau

SEQ ID NO: 24206 - RNA, 20 nt, Homo sapiens
gagauggaaguugcagugag

SEQ ID NO: 24207 - RNA, 17 nt, Homo sapiens
aacuggcaguuuuccau

SEQ ID NO: 24208 - RNA, 16 nt, Homo sapiens
uuguuuuuaaacugga

SEQ ID NO: 24209 - RNA, 14 nt, Homo sapiens
gauagagugggaca

SEQ ID NO: 24210 - RNA, 14 nt, Homo sapiens
guggcgacucuaua

SEQ ID NO: 24211 - RNA, 14 nt, Homo sapiens
uccacuacugcuac

SEQ ID NO: 24212 - RNA, 23 nt, Homo sapiens
ucacauuggcuauuuaaagacaa

SEQ ID NO: 24213 - RNA, 22 nt, Homo sapiens
cugaggcaagagaauugcuuga

SEQ ID NO: 24214 - RNA, 15 nt, Homo sapiens
aguguaaguucacaa

SEQ ID NO: 24215 - RNA, 19 nt, Homo sapiens
acaaggcuuuaucucaggg

SEQ ID NO: 24216 - RNA, 20 nt, Homo sapiens
aaggcuuagacccucaugcu

SEQ ID NO: 24217 - RNA, 17 nt, Homo sapiens
ugauuacaaggcuuuau

SEQ ID NO: 24218 - RNA, 15 nt, Homo sapiens
uagaauuaauggaau

SEQ ID NO: 24219 - RNA, 22 nt, Homo sapiens
uucugugggagaauucuuacau

SEQ ID NO: 24220 - RNA, 13 nt, Homo sapiens
aauuuucuuccaa

SEQ ID NO: 24221 - RNA, 20 nt, Homo sapiens
acuaauagaauuaauggaau

SEQ ID NO: 24222 - RNA, 15 nt, Homo sapiens
agugagcugauauca

SEQ ID NO: 24223 - RNA, 12 nt, Homo sapiens
gaaaauaugccu

SEQ ID NO: 24224 - RNA, 13 nt, Homo sapiens
ugugacuuuccua

SEQ ID NO: 24225 - RNA, 17 nt, Homo sapiens
uagugucugaugaaugu

SEQ ID NO: 24226 - RNA, 20 nt, Homo sapiens
cuuguugagauccccguguu

SEQ ID NO: 24227 - RNA, 14 nt, Homo sapiens
acuaaaaaggcaug

SEQ ID NO: 24228 - RNA, 18 nt, Homo sapiens
guaucaaccaaauggagu

SEQ ID NO: 24229 - RNA, 14 nt, Homo sapiens
uggucacauacaau

SEQ ID NO: 24230 - RNA, 15 nt, Homo sapiens
ccuuuuuguuauuag

SEQ ID NO: 24231 - RNA, 23 nt, Homo sapiens
gaauaguguuggaaaaugugcaa

SEQ ID NO: 24232 - RNA, 19 nt, Homo sapiens
gagcauuuauaaauggaca

SEQ ID NO: 24233 - RNA, 19 nt, Homo sapiens
aaguuuaugcauacaguaa

SEQ ID NO: 24234 - RNA, 15 nt, Homo sapiens
cuggggccuguugaa

SEQ ID NO: 24235 - RNA, 23 nt, Homo sapiens
aucaauucuauuacgugcaauac

SEQ ID NO: 24236 - RNA, 14 nt, Homo sapiens
uauagacucuagga

SEQ ID NO: 24237 - RNA, 14 nt, Homo sapiens
auuucacuugauga

SEQ ID NO: 24238 - RNA, 11 nt, Homo sapiens
aaaagcacuua

SEQ ID NO: 24239 - RNA, 16 nt, Homo sapiens
guaaucccagcacuuu

SEQ ID NO: 24240 - RNA, 20 nt, Homo sapiens
aauuuaucuugucucugggc

SEQ ID NO: 24241 - RNA, 13 nt, Homo sapiens
gacaacugugacu

SEQ ID NO: 24242 - RNA, 14 nt, Homo sapiens
cuguuccuucacau

SEQ ID NO: 24243 - RNA, 19 nt, Homo sapiens
accaccacccuugccaugg

SEQ ID NO: 24244 - RNA, 15 nt, Homo sapiens
caguauccaguacuc

SEQ ID NO: 24245 - RNA, 16 nt, Homo sapiens
aggugacccugaugaa

SEQ ID NO: 24246 - RNA, 15 nt, Homo sapiens
agcaucucaggagau

SEQ ID NO: 24247 - RNA, 16 nt, Homo sapiens
ugcaccaacuuugaag

SEQ ID NO: 24248 - RNA, 23 nt, Homo sapiens
uaucucaggggccaacuaggcag

SEQ ID NO: 24249 - RNA, 19 nt, Homo sapiens
guuauuuagggaacugcuu

SEQ ID NO: 24250 - RNA, 15 nt, Homo sapiens
gacccaaaaggcaga

SEQ ID NO: 24251 - RNA, 23 nt, Homo sapiens
ucagaaauuuaauucauguuucu

SEQ ID NO: 24252 - RNA, 15 nt, Homo sapiens
uuuaauggcauguca

SEQ ID NO: 24253 - RNA, 14 nt, Homo sapiens
cagucacauuccaa

SEQ ID NO: 24254 - RNA, 21 nt, Homo sapiens
agacccucaugcugccaauau

SEQ ID NO: 24255 - RNA, 23 nt, Homo sapiens
ugauccugcaauuccacuuauag

SEQ ID NO: 24256 - RNA, 14 nt, Homo sapiens
uucccaaaacugau

SEQ ID NO: 24257 - RNA, 12 nt, Homo sapiens
uacauacugcug

SEQ ID NO: 24258 - RNA, 14 nt, Homo sapiens
uaauuacuauguca

SEQ ID NO: 24259 - RNA, 19 nt, Homo sapiens
aaauaguuuaugauuccac

SEQ ID NO: 24260 - RNA, 11 nt, Homo sapiens
caagaaugaga

SEQ ID NO: 24261 - RNA, 20 nt, Homo sapiens
auaauaugcacacagugcuu

SEQ ID NO: 24262 - RNA, 23 nt, Homo sapiens
guaaaauugaaaggcauucucug

SEQ ID NO: 24263 - RNA, 22 nt, Homo sapiens
aauucgcugcaaccuguugaua

SEQ ID NO: 24264 - RNA, 15 nt, Homo sapiens
cuauuacgugcaaua

SEQ ID NO: 24265 - RNA, 22 nt, Homo sapiens
aaaggccugucccugcagacau

SEQ ID NO: 24266 - RNA, 13 nt, Homo sapiens
uggccugcuggau

SEQ ID NO: 24267 - RNA, 20 nt, Homo sapiens
ucuuuuuuuuaauaaaccau

SEQ ID NO: 24268 - RNA, 17 nt, Homo sapiens
aaagcauuguaacuuau

SEQ ID NO: 24269 - RNA, 18 nt, Homo sapiens
aagcaacccaaauguuca

SEQ ID NO: 24270 - RNA, 15 nt, Homo sapiens
auuuuuaugugcaau

SEQ ID NO: 24271 - RNA, 22 nt, Homo sapiens
ccuggacaguuuucugcuuuaa

SEQ ID NO: 24272 - RNA, 24 nt, Homo sapiens
augcaaccuuuggaugcacuuuau

SEQ ID NO: 24273 - RNA, 17 nt, Homo sapiens
ugaaaaucuacacucca

SEQ ID NO: 24274 - RNA, 13 nt, Homo sapiens
uuuaugugcaaua

SEQ ID NO: 24275 - RNA, 21 nt, Homo sapiens
uccuguacuuuuuccagacac

SEQ ID NO: 24276 - RNA, 13 nt, Homo sapiens
augauacaaugaa

SEQ ID NO: 24277 - RNA, 19 nt, Homo sapiens
gccauaauuacuaugucau

SEQ ID NO: 24278 - RNA, 16 nt, Homo sapiens
guggcauuuucacuuu

SEQ ID NO: 24279 - RNA, 21 nt, Homo sapiens
ccaaaagguauuuuaaucacc

SEQ ID NO: 24280 - RNA, 14 nt, Homo sapiens
ucuauguggcugua

SEQ ID NO: 24281 - RNA, 15 nt, Homo sapiens
gucucaguccaugaa

SEQ ID NO: 24282 - RNA, 18 nt, Homo sapiens
ugcauugagaacugcaua

SEQ ID NO: 24283 - RNA, 13 nt, Homo sapiens
agguuaagcacuu

SEQ ID NO: 24284 - RNA, 18 nt, Homo sapiens
acuugaugauacaaugaa

SEQ ID NO: 24285 - RNA, 23 nt, Homo sapiens
uccaagccugaccacgcuuucua

SEQ ID NO: 24286 - RNA, 18 nt, Homo sapiens
gaaaagauuaugaucuca

SEQ ID NO: 24287 - RNA, 21 nt, Homo sapiens
augaaaacauagcaucucagg

SEQ ID NO: 24288 - RNA, 16 nt, Homo sapiens
acuauccaguuacugc

SEQ ID NO: 24289 - RNA, 9 nt, Homo sapiens
ugugcaaua

SEQ ID NO: 24290 - RNA, 16 nt, Homo sapiens
cuaaaguaucuguauu

SEQ ID NO: 24291 - RNA, 21 nt, Homo sapiens
aaccucauuccccaaccacuu

SEQ ID NO: 24292 - RNA, 16 nt, Homo sapiens
aagcagaacagugauu

SEQ ID NO: 24293 - RNA, 15 nt, Homo sapiens
cuugggcgggacaca

SEQ ID NO: 24294 - RNA, 17 nt, Homo sapiens
uagaauauuuauuaccu

SEQ ID NO: 24295 - RNA, 16 nt, Homo sapiens
ugaaacauuacaguua

SEQ ID NO: 24296 - RNA, 14 nt, Homo sapiens
aguggcauguauga

SEQ ID NO: 24297 - RNA, 14 nt, Homo sapiens
uggaaaaugugcaa

SEQ ID NO: 24298 - RNA, 21 nt, Homo sapiens
cuggauguggagggggcgcgu

SEQ ID NO: 24299 - RNA, 16 nt, Homo sapiens
acuuuuguguaaugaa

SEQ ID NO: 24300 - RNA, 14 nt, Homo sapiens
acuaauuaggcaag

SEQ ID NO: 24301 - RNA, 12 nt, Homo sapiens
cucauucaaaag

SEQ ID NO: 24302 - RNA, 13 nt, Homo sapiens
aucaaaagaaaga

SEQ ID NO: 24303 - RNA, 13 nt, Homo sapiens
ggaugauguuucg

SEQ ID NO: 24304 - RNA, 17 nt, Homo sapiens
uacugcuaccacaacua

SEQ ID NO: 24305 - RNA, 21 nt, Homo sapiens
cuugaaauagugucugaugaa

SEQ ID NO: 24306 - RNA, 21 nt, Homo sapiens
cauuucuauuuauuuacugag

SEQ ID NO: 24307 - RNA, 22 nt, Homo sapiens
acccucugggucucaguguccu

SEQ ID NO: 24308 - RNA, 17 nt, Homo sapiens
aaagcagggacuugaac

SEQ ID NO: 24309 - RNA, 16 nt, Homo sapiens
gccuugguauagcaua

SEQ ID NO: 24310 - RNA, 14 nt, Homo sapiens
caguccucuuucaa

SEQ ID NO: 24311 - RNA, 17 nt, Homo sapiens
caaguuguguuugauau

SEQ ID NO: 24312 - RNA, 12 nt, Homo sapiens
uuauaaucuuuu

SEQ ID NO: 24313 - RNA, 23 nt, Homo sapiens
cuuguuuuuccacuacugcuacc

SEQ ID NO: 24314 - RNA, 20 nt, Homo sapiens
acagcuacuugggaggcuga

SEQ ID NO: 24315 - RNA, 11 nt, Homo sapiens
uuaugugcaau

SEQ ID NO: 24316 - RNA, 17 nt, Homo sapiens
uguggcauuuucacuuu

SEQ ID NO: 24317 - RNA, 15 nt, Homo sapiens
agugacauguuuaca

SEQ ID NO: 24318 - RNA, 14 nt, Homo sapiens
aguugauuuuacaa

SEQ ID NO: 24319 - RNA, 22 nt, Homo sapiens
agcuugaaauagugucugauga

SEQ ID NO: 24320 - RNA, 22 nt, Homo sapiens
cucugaagaguggguuucacaa

SEQ ID NO: 24321 - RNA, 22 nt, Homo sapiens
auaacuaggcguggacuuacua

SEQ ID NO: 24322 - RNA, 17 nt, Homo sapiens
augugauauguaccuaa

SEQ ID NO: 24323 - RNA, 13 nt, Homo sapiens
uccacuacugcua

SEQ ID NO: 24324 - RNA, 21 nt, Homo sapiens
gagauugugccccugcacucc

SEQ ID NO: 24325 - RNA, 16 nt, Homo sapiens
agaguggguuucacaa

SEQ ID NO: 24326 - RNA, 17 nt, Homo sapiens
uuugcagcugugccaua

SEQ ID NO: 24327 - RNA, 20 nt, Homo sapiens
aaauauuuuuaugugcaaua

SEQ ID NO: 24328 - RNA, 19 nt, Homo sapiens
gaagcaacccaaauguuca

SEQ ID NO: 24329 - RNA, 16 nt, Homo sapiens
ggcauuuucacuuuug

SEQ ID NO: 24330 - RNA, 18 nt, Homo sapiens
uguuacugccuaucagca

SEQ ID NO: 24331 - RNA, 20 nt, Homo sapiens
uuaaaaucuaauucaaacua

SEQ ID NO: 24332 - RNA, 17 nt, Homo sapiens
gagauggguuugacaag

SEQ ID NO: 24333 - RNA, 13 nt, Homo sapiens
ccaagccugacca

SEQ ID NO: 24334 - RNA, 19 nt, Homo sapiens
ggcuaagcaaaaugugaua

SEQ ID NO: 24335 - RNA, 19 nt, Homo sapiens
gucacagaggaucugcuug

SEQ ID NO: 24336 - RNA, 13 nt, Homo sapiens
cuuuaucucaggg

SEQ ID NO: 24337 - RNA, 16 nt, Homo sapiens
uauuacgugcaauacu

SEQ ID NO: 24338 - RNA, 17 nt, Homo sapiens
aucuacacuccagugag

SEQ ID NO: 24339 - RNA, 21 nt, Homo sapiens
guauauaaauuuucccaaaac

SEQ ID NO: 24340 - RNA, 14 nt, Homo sapiens
gcaccaacuuugaa

SEQ ID NO: 24341 - RNA, 19 nt, Homo sapiens
uugaugauuaauucaccuu

SEQ ID NO: 24342 - RNA, 22 nt, Homo sapiens
ugcuggcuuaaaauguaauuaa

SEQ ID NO: 24343 - RNA, 22 nt, Homo sapiens
ggaauauuugcaagacauagaa

SEQ ID NO: 24344 - RNA, 17 nt, Homo sapiens
uagagaaauuugccaau

SEQ ID NO: 24345 - RNA, 15 nt, Homo sapiens
ucacuuaauccuuug

SEQ ID NO: 24346 - RNA, 18 nt, Homo sapiens
caacagaagcuuccauuc

SEQ ID NO: 24347 - RNA, 22 nt, Homo sapiens
auuacaaggcuuuaucucaggg

SEQ ID NO: 24348 - RNA, 15 nt, Homo sapiens
uauuuuuaugugcaa

SEQ ID NO: 24349 - RNA, 20 nt, Homo sapiens
cugucuggacuuuccagaga

SEQ ID NO: 24350 - RNA, 14 nt, Homo sapiens
ucaugcauuugcac

SEQ ID NO: 24351 - RNA, 12 nt, Homo sapiens
ugcaagacauag

SEQ ID NO: 24352 - RNA, 22 nt, Homo sapiens
auguugaaaaaguucugcagau

SEQ ID NO: 24353 - RNA, 14 nt, Homo sapiens
agacagaaagcaga

SEQ ID NO: 24354 - RNA, 16 nt, Homo sapiens
uauugagcaccugcag

SEQ ID NO: 24355 - RNA, 15 nt, Homo sapiens
uuccauuccaagccu

SEQ ID NO: 24356 - RNA, 20 nt, Homo sapiens
aagcaacaucuagcaaaugu

SEQ ID NO: 24357 - RNA, 16 nt, Homo sapiens
accuaaauuugguucu

SEQ ID NO: 24358 - RNA, 19 nt, Homo sapiens
cugcaaucugagccagugc

SEQ ID NO: 24359 - RNA, 17 nt, Homo sapiens
gccagacaucaacagau

SEQ ID NO: 24360 - RNA, 18 nt, Homo sapiens
ugaaagcagggacuugaa

SEQ ID NO: 24361 - RNA, 19 nt, Homo sapiens
uacauuuccaaauucacaa

SEQ ID NO: 24362 - RNA, 17 nt, Homo sapiens
uaacuuaugaaccuuua

SEQ ID NO: 24363 - RNA, 15 nt, Homo sapiens
caaucuuaacucauu

SEQ ID NO: 24364 - RNA, 14 nt, Homo sapiens
aaacauagcaucuc

SEQ ID NO: 24365 - RNA, 14 nt, Homo sapiens
ccucuguugccaag

SEQ ID NO: 24366 - RNA, 22 nt, Homo sapiens
aagucagugcccaacuguuaua

SEQ ID NO: 24367 - RNA, 16 nt, Homo sapiens
uuaugcauaaagucag

SEQ ID NO: 24368 - RNA, 15 nt, Homo sapiens
uuuagggaccugcug

SEQ ID NO: 24369 - RNA, 18 nt, Homo sapiens
cugaaagaggaaugaagu

SEQ ID NO: 24370 - RNA, 17 nt, Homo sapiens
uuuauuauuuucaccug

SEQ ID NO: 24371 - RNA, 13 nt, Homo sapiens
cuaugugauuaca

SEQ ID NO: 24372 - RNA, 13 nt, Homo sapiens
auuauuuuuacag

SEQ ID NO: 24373 - RNA, 19 nt, Homo sapiens
aaucaccaaggcugauuaa

SEQ ID NO: 24374 - RNA, 17 nt, Homo sapiens
caagugauccgcccauc

SEQ ID NO: 24375 - RNA, 21 nt, Homo sapiens
aauuacaggcgugagccacca

SEQ ID NO: 24376 - RNA, 19 nt, Homo sapiens
gcuuguuagcaaaauggau

SEQ ID NO: 24377 - RNA, 23 nt, Homo sapiens
acuaauuaggcaaggcuauguga

SEQ ID NO: 24378 - RNA, 20 nt, Homo sapiens
acauagaauuaacacaugau

SEQ ID NO: 24379 - RNA, 12 nt, Homo sapiens
gauagcaaguga

SEQ ID NO: 24380 - RNA, 13 nt, Homo sapiens
acagaacuaugga

SEQ ID NO: 24381 - RNA, 12 nt, Homo sapiens
aaguauccuuca

SEQ ID NO: 24382 - RNA, 15 nt, Homo sapiens
augguuccauucucu

SEQ ID NO: 24383 - RNA, 18 nt, Homo sapiens
auuuuauuacaucuuuca

SEQ ID NO: 24384 - RNA, 17 nt, Homo sapiens
aaaucaaauuccagaau

SEQ ID NO: 24385 - RNA, 18 nt, Homo sapiens
cucugucucaguccauga

SEQ ID NO: 24386 - RNA, 20 nt, Homo sapiens
caaccaaauggagugacuua

SEQ ID NO: 24387 - RNA, 21 nt, Homo sapiens
gugguuauuuagggaacugcu

SEQ ID NO: 24388 - RNA, 13 nt, Homo sapiens
uccugugacuguc

SEQ ID NO: 24389 - RNA, 22 nt, Homo sapiens
gaccuggucgucgucuugacuu

SEQ ID NO: 24390 - RNA, 14 nt, Homo sapiens
auauccugugacug

SEQ ID NO: 24391 - RNA, 13 nt, Homo sapiens
cagggacuugaac

SEQ ID NO: 24392 - RNA, 13 nt, Homo sapiens
ggcgacaguuuuc

SEQ ID NO: 24393 - RNA, 21 nt, Homo sapiens
aauggcuaagcaaaaugugau

SEQ ID NO: 24394 - RNA, 13 nt, Homo sapiens
uauuuuaaucacc

SEQ ID NO: 24395 - RNA, 23 nt, Homo sapiens
ugaaaaucuacacuccagugaga

SEQ ID NO: 24396 - RNA, 20 nt, Homo sapiens
acauuguuugucugucuuca

SEQ ID NO: 24397 - RNA, 18 nt, Homo sapiens
auuuauugagcaccugca

SEQ ID NO: 24398 - RNA, 15 nt, Homo sapiens
uuuccacuacugcua

SEQ ID NO: 24399 - RNA, 22 nt, Homo sapiens
cuguacuccagccugggugaca

SEQ ID NO: 24400 - RNA, 15 nt, Homo sapiens
agugaaaaacaucca

SEQ ID NO: 24401 - RNA, 16 nt, Homo sapiens
cuuaaagaauuuucaa

SEQ ID NO: 24402 - RNA, 22 nt, Homo sapiens
agaaauuccaggaaaaucugca

SEQ ID NO: 24403 - RNA, 18 nt, Homo sapiens
ucaucuuggucacauaca

SEQ ID NO: 24404 - RNA, 16 nt, Homo sapiens
uuuuacauacugcugu

SEQ ID NO: 24405 - RNA, 19 nt, Homo sapiens
ccuggucaacauggugaaa

SEQ ID NO: 24406 - RNA, 22 nt, Homo sapiens
ccuggcugggaguggcauguau

SEQ ID NO: 24407 - RNA, 17 nt, Homo sapiens
aguuuauauacaauuau

SEQ ID NO: 24408 - RNA, 15 nt, Homo sapiens
acgaaaaacauuuca

SEQ ID NO: 24409 - RNA, 13 nt, Homo sapiens
ccugcagacauga

SEQ ID NO: 24410 - RNA, 19 nt, Homo sapiens
cauuugcuggagcucugcc

SEQ ID NO: 24411 - RNA, 19 nt, Homo sapiens
gaggcggguggaucacuug

SEQ ID NO: 24412 - RNA, 13 nt, Homo sapiens
agauguagaggag

SEQ ID NO: 24413 - RNA, 21 nt, Homo sapiens
ccacaacuauauuaucaugca

SEQ ID NO: 24414 - RNA, 16 nt, Homo sapiens
ggacacaggcuccaaa

SEQ ID NO: 24415 - RNA, 15 nt, Homo sapiens
gcuuaaaauguaauu

SEQ ID NO: 24416 - RNA, 21 nt, Homo sapiens
aauuuucaaaaucaaauucca

SEQ ID NO: 24417 - RNA, 20 nt, Homo sapiens
uuugaugauuaauucaccuu

SEQ ID NO: 24418 - RNA, 18 nt, Homo sapiens
cuggcuuaaaauguaauu

SEQ ID NO: 24419 - RNA, 21 nt, Homo sapiens
gacagaaagcagaacagugau

SEQ ID NO: 24420 - RNA, 17 nt, Homo sapiens
auucugcaagcuuuuca

SEQ ID NO: 24421 - RNA, 20 nt, Homo sapiens
aguguuggaaaaugugcaau

SEQ ID NO: 24422 - RNA, 22 nt, Homo sapiens
guuaccaguaacggaacaguau

SEQ ID NO: 24423 - RNA, 20 nt, Homo sapiens
accacugcagaagacaguau

SEQ ID NO: 24424 - RNA, 18 nt, Homo sapiens
auuacaggcgugagccac

SEQ ID NO: 24425 - RNA, 18 nt, Homo sapiens
uguuggaaaaugugcaau

SEQ ID NO: 24426 - RNA, 22 nt, Homo sapiens
cugccuaagugcagccccgugg

SEQ ID NO: 24427 - RNA, 14 nt, Homo sapiens
ugagaacugcauau

SEQ ID NO: 24428 - RNA, 20 nt, Homo sapiens
guucuucuuggucucagugu

SEQ ID NO: 24429 - RNA, 11 nt, Homo sapiens
uuuacuuuguu

SEQ ID NO: 24430 - RNA, 16 nt, Homo sapiens
ggagaaucacuugaac

SEQ ID NO: 24431 - RNA, 17 nt, Homo sapiens
aauauuuauuaccucug

SEQ ID NO: 24432 - RNA, 15 nt, Homo sapiens
cuuuuauugccauga

SEQ ID NO: 24433 - RNA, 17 nt, Homo sapiens
gcagaagcaacccaaau

SEQ ID NO: 24434 - RNA, 14 nt, Homo sapiens
ggcuggagugcagu

SEQ ID NO: 24435 - RNA, 12 nt, Homo sapiens
accacauggcuu

SEQ ID NO: 24436 - RNA, 17 nt, Homo sapiens
aaagcuaaaguaucugu

SEQ ID NO: 24437 - RNA, 12 nt, Homo sapiens
acaacugugacu

SEQ ID NO: 24438 - RNA, 19 nt, Homo sapiens
ggacuugggcgggacacag

SEQ ID NO: 24439 - RNA, 12 nt, Homo sapiens
aauucauguuuc

SEQ ID NO: 24440 - RNA, 15 nt, Homo sapiens
uugaacccaggagau

SEQ ID NO: 24441 - RNA, 20 nt, Homo sapiens
ccucaucuguaaaauggaga

SEQ ID NO: 24442 - RNA, 17 nt, Homo sapiens
guaaaguacagacuuuu

SEQ ID NO: 24443 - RNA, 15 nt, Homo sapiens
uuaaagaauuuucaa

SEQ ID NO: 24444 - RNA, 13 nt, Homo sapiens
cauacauguuaca

SEQ ID NO: 24445 - RNA, 16 nt, Homo sapiens
gugacuuaguguacau

SEQ ID NO: 24446 - RNA, 22 nt, Homo sapiens
ugagacagcucugcauacucau

SEQ ID NO: 24447 - RNA, 14 nt, Homo sapiens
cuaugugauuacaa

SEQ ID NO: 24448 - RNA, 16 nt, Homo sapiens
auaguguuggaaaaug

SEQ ID NO: 24449 - RNA, 17 nt, Homo sapiens
caguggcgcaaucuuaa

SEQ ID NO: 24450 - RNA, 23 nt, Homo sapiens
acaccauuccuucugcccugcuu

SEQ ID NO: 24451 - RNA, 13 nt, Homo sapiens
uagggaccugcug

SEQ ID NO: 24452 - RNA, 22 nt, Homo sapiens
aauagaaggauguacauuucca

SEQ ID NO: 24453 - RNA, 22 nt, Homo sapiens
uugggaggcugaggcaagagaa

SEQ ID NO: 24454 - RNA, 19 nt, Homo sapiens
auauuuuuaugugcaauaa

SEQ ID NO: 24455 - RNA, 11 nt, Homo sapiens
acuuuuuccag

SEQ ID NO: 24456 - RNA, 20 nt, Homo sapiens
agcuacuugggaggcugaga

SEQ ID NO: 24457 - RNA, 18 nt, Homo sapiens
cacaggcuccaaacugga

SEQ ID NO: 24458 - RNA, 21 nt, Homo sapiens
cucugcccauccugccccuga

SEQ ID NO: 24459 - RNA, 19 nt, Homo sapiens
uucucuggcgacaguuuuc

SEQ ID NO: 24460 - RNA, 23 nt, Homo sapiens
acagaagagugacauguuuacaa

SEQ ID NO: 24461 - RNA, 23 nt, Homo sapiens
uuaaguguaacuggcaguuuucc

SEQ ID NO: 24462 - RNA, 20 nt, Homo sapiens
gccuguugaagaugcuugua

SEQ ID NO: 24463 - RNA, 17 nt, Homo sapiens
auuguaacuuaugaacc

SEQ ID NO: 24464 - RNA, 15 nt, Homo sapiens
cuuaugaaacuaaga

SEQ ID NO: 24465 - RNA, 16 nt, Homo sapiens
ugauucccuccugcua

SEQ ID NO: 24466 - RNA, 15 nt, Homo sapiens
ccuaaccucauuccc

SEQ ID NO: 24467 - RNA, 22 nt, Homo sapiens
aagauguagaggagaaacugga

SEQ ID NO: 24468 - RNA, 12 nt, Homo sapiens
aaauuggacuua

SEQ ID NO: 24469 - RNA, 13 nt, Homo sapiens
cugauuaaaccaa

SEQ ID NO: 24470 - RNA, 14 nt, Homo sapiens
agcagggacuugaa

SEQ ID NO: 24471 - RNA, 13 nt, Homo sapiens
uaauuucagaaga

SEQ ID NO: 24472 - RNA, 20 nt, Homo sapiens
caccagagauaauaugagaa

SEQ ID NO: 24473 - RNA, 13 nt, Homo sapiens
aaucugagccagu

SEQ ID NO: 24474 - RNA, 15 nt, Homo sapiens
aaaaugugcaauaug

SEQ ID NO: 24475 - RNA, 18 nt, Homo sapiens
caguuccugagaccagcc

SEQ ID NO: 24476 - RNA, 14 nt, Homo sapiens
acuuuaacacagug

SEQ ID NO: 24477 - RNA, 19 nt, Homo sapiens
uuaucaugcaaaugcugua

SEQ ID NO: 24478 - RNA, 18 nt, Homo sapiens
ugggagaaucacuugaac

SEQ ID NO: 24479 - RNA, 12 nt, Homo sapiens
caaauuccagaa

SEQ ID NO: 24480 - RNA, 18 nt, Homo sapiens
auaaacaguagugauagu

SEQ ID NO: 24481 - RNA, 21 nt, Homo sapiens
cagaacuugaaugugucaggu

SEQ ID NO: 24482 - RNA, 15 nt, Homo sapiens
ugcagauaaacagua

SEQ ID NO: 24483 - RNA, 17 nt, Homo sapiens
accuuauuguaccucuc

SEQ ID NO: 24484 - RNA, 17 nt, Homo sapiens
uucaaaauuggacuuaa

SEQ ID NO: 24485 - RNA, 20 nt, Homo sapiens
agugaacaaauuuacagaga

SEQ ID NO: 24486 - RNA, 14 nt, Homo sapiens
gaaagggucucccu

SEQ ID NO: 24487 - RNA, 12 nt, Homo sapiens
caguaacugaca

SEQ ID NO: 24488 - RNA, 14 nt, Homo sapiens
auuacaucuuucac

SEQ ID NO: 24489 - RNA, 13 nt, Homo sapiens
guaaaauugaaag

SEQ ID NO: 24490 - RNA, 14 nt, Homo sapiens
cacaaaauugggaa

SEQ ID NO: 24491 - RNA, 14 nt, Homo sapiens
ggacuugggcggga

SEQ ID NO: 24492 - RNA, 20 nt, Homo sapiens
gaaaacauagcaucucagga

SEQ ID NO: 24493 - RNA, 13 nt, Homo sapiens
gaauuaauggaau

SEQ ID NO: 24494 - RNA, 19 nt, Homo sapiens
augguuccauucucucucc

SEQ ID NO: 24495 - RNA, 17 nt, Homo sapiens
aacauagcaucucagga

SEQ ID NO: 24496 - RNA, 18 nt, Homo sapiens
ugacuuaguguacaugaa

SEQ ID NO: 24497 - RNA, 16 nt, Homo sapiens
ucuauuacgugcaaua

SEQ ID NO: 24498 - RNA, 18 nt, Homo sapiens
auaaaguguaaguucaca

SEQ ID NO: 24499 - RNA, 16 nt, Homo sapiens
auucccuccugcuacu

SEQ ID NO: 24500 - RNA, 20 nt, Homo sapiens
aauauuuauuaccucugaua

SEQ ID NO: 24501 - RNA, 16 nt, Homo sapiens
aaauggaaaguaacuc

SEQ ID NO: 24502 - RNA, 18 nt, Homo sapiens
gcccuucauguacaucca

SEQ ID NO: 24503 - RNA, 20 nt, Homo sapiens
gccaaggcuggagugcagug

SEQ ID NO: 24504 - RNA, 21 nt, Homo sapiens
gcuacucuguuccuucacauc

SEQ ID NO: 24505 - RNA, 11 nt, Homo sapiens
ucucagugucc

SEQ ID NO: 24506 - RNA, 17 nt, Homo sapiens
aguacucauacauguua

SEQ ID NO: 24507 - RNA, 21 nt, Homo sapiens
agaggaaugaaguacucauac

SEQ ID NO: 24508 - RNA, 23 nt, Homo sapiens
aaaaggccugucccugcagacau

SEQ ID NO: 24509 - RNA, 14 nt, Homo sapiens
aauugacacuuaaa

SEQ ID NO: 24510 - RNA, 12 nt, Homo sapiens
aggcauguaauu

SEQ ID NO: 24511 - RNA, 20 nt, Homo sapiens
cgaguggcccuucauguaca

SEQ ID NO: 24512 - RNA, 13 nt, Homo sapiens
aagaaauucugca

SEQ ID NO: 24513 - RNA, 20 nt, Homo sapiens
aaaugggcuacuuuguccuu

SEQ ID NO: 24514 - RNA, 15 nt, Homo sapiens
acaucaacagauaaa

SEQ ID NO: 24515 - RNA, 19 nt, Homo sapiens
aaauugaaaggcauucucu

SEQ ID NO: 24516 - RNA, 20 nt, Homo sapiens
aggccgggcgcgguggcuca

SEQ ID NO: 24517 - RNA, 17 nt, Homo sapiens
cugaagggcaucaugca

SEQ ID NO: 24518 - RNA, 13 nt, Homo sapiens
ucaguuacucuga

SEQ ID NO: 24519 - RNA, 11 nt, Homo sapiens
acauacugcug

SEQ ID NO: 24520 - RNA, 14 nt, Homo sapiens
acaucuuucacauu

SEQ ID NO: 24521 - RNA, 23 nt, Homo sapiens
cuugccauggagguuaagcacuu

SEQ ID NO: 24522 - RNA, 15 nt, Homo sapiens
auuugcaagacauag

SEQ ID NO: 24523 - RNA, 17 nt, Homo sapiens
aaauaagccagacauca

SEQ ID NO: 24524 - RNA, 19 nt, Homo sapiens
ucccucuaauuuaucuugu

SEQ ID NO: 24525 - RNA, 17 nt, Homo sapiens
aaagacuaugaggaaua

SEQ ID NO: 24526 - RNA, 15 nt, Homo sapiens
cagaaauuguaucuu

SEQ ID NO: 24527 - RNA, 14 nt, Homo sapiens
aauauuguugacaa

SEQ ID NO: 24528 - RNA, 20 nt, Homo sapiens
uuugcugccucuaaaaggcc

SEQ ID NO: 24529 - RNA, 23 nt, Homo sapiens
uaaaauauuuuuaugugcaauaa

SEQ ID NO: 24530 - RNA, 14 nt, Homo sapiens
uuguaaaauggugu

SEQ ID NO: 24531 - RNA, 17 nt, Homo sapiens
gagggggcgcgugcagg

SEQ ID NO: 24532 - RNA, 20 nt, Homo sapiens
ugaggacuugggcgggacac

SEQ ID NO: 24533 - RNA, 17 nt, Homo sapiens
acacaggcuccaaacug

SEQ ID NO: 24534 - RNA, 21 nt, Homo sapiens
uuaucaugcaaaugcuguauu

SEQ ID NO: 24535 - RNA, 18 nt, Homo sapiens
uuacagagaaaagacaua

SEQ ID NO: 24536 - RNA, 13 nt, Homo sapiens
cacugcauacaau

SEQ ID NO: 24537 - RNA, 19 nt, Homo sapiens
gagaacugcauauguuucg

SEQ ID NO: 24538 - RNA, 17 nt, Homo sapiens
auuuauuuuuuuacuuc

SEQ ID NO: 24539 - RNA, 19 nt, Homo sapiens
guuuucugcuuuaauuuca

SEQ ID NO: 24540 - RNA, 10 nt, Homo sapiens
augacuaugc

SEQ ID NO: 24541 - RNA, 15 nt, Homo sapiens
uaucuuaguugguau

SEQ ID NO: 24542 - RNA, 20 nt, Homo sapiens
auauaauaugcacacagugc

SEQ ID NO: 24543 - RNA, 22 nt, Homo sapiens
ugugauauguaccuaacgaagu

SEQ ID NO: 24544 - RNA, 18 nt, Homo sapiens
gaguuaggcuauucacaa

SEQ ID NO: 24545 - RNA, 20 nt, Homo sapiens
gcuggucucgaacugcugga

SEQ ID NO: 24546 - RNA, 20 nt, Homo sapiens
gaaaaucuacacuccaguga

SEQ ID NO: 24547 - RNA, 18 nt, Homo sapiens
gaaagcagggacuugaac

SEQ ID NO: 24548 - RNA, 23 nt, Homo sapiens
gagaaaccagggagccccuuuga

SEQ ID NO: 24549 - RNA, 13 nt, Homo sapiens
uuuacuuccucag

SEQ ID NO: 24550 - RNA, 15 nt, Homo sapiens
guuuuuaagcuguuu

SEQ ID NO: 24551 - RNA, 19 nt, Homo sapiens
ucccagcgagggacaccga

SEQ ID NO: 24552 - RNA, 16 nt, Homo sapiens
uagagugggacaguuc

SEQ ID NO: 24553 - RNA, 14 nt, Homo sapiens
ccucaugcugccaa

SEQ ID NO: 24554 - RNA, 16 nt, Homo sapiens
cacagucacauuccaa

SEQ ID NO: 24555 - RNA, 23 nt, Homo sapiens
aaugugucaggugacccugauga

SEQ ID NO: 24556 - RNA, 16 nt, Homo sapiens
uucacuuauugacuau

SEQ ID NO: 24557 - RNA, 18 nt, Homo sapiens
agcaggauagagugggac

SEQ ID NO: 24558 - RNA, 16 nt, Homo sapiens
gcuuuaauuucaugaa

SEQ ID NO: 24559 - RNA, 21 nt, Homo sapiens
caucacagcugaacuuguuga

SEQ ID NO: 24560 - RNA, 23 nt, Homo sapiens
cuccuggcuggggccuguugaag

SEQ ID NO: 24561 - RNA, 16 nt, Homo sapiens
uaggaacgguaaauuu

SEQ ID NO: 24562 - RNA, 23 nt, Homo sapiens
uacauuguuugucugucuucaua

SEQ ID NO: 24563 - RNA, 18 nt, Homo sapiens
ccaaaaucggaucugggg

SEQ ID NO: 24564 - RNA, 15 nt, Homo sapiens
uaauucaaacuaaua

SEQ ID NO: 24565 - RNA, 16 nt, Homo sapiens
ccaaauuuguauuuaa

SEQ ID NO: 24566 - RNA, 23 nt, Homo sapiens
ugucuuacagagaaaagacauaa

SEQ ID NO: 24567 - RNA, 23 nt, Homo sapiens
uaguguuggaaaaugugcaauau

SEQ ID NO: 24568 - RNA, 16 nt, Homo sapiens
aacccggccugauuaa

SEQ ID NO: 24569 - RNA, 20 nt, Homo sapiens
cucaggggccaacuaggcag

SEQ ID NO: 24570 - RNA, 20 nt, Homo sapiens
agaaaccuuauuguaccucu

SEQ ID NO: 24571 - RNA, 19 nt, Homo sapiens
guaauuuuaaguaauuuca

SEQ ID NO: 24572 - RNA, 23 nt, Homo sapiens
gauuucaugccuggugcuuccaa

SEQ ID NO: 24573 - RNA, 14 nt, Homo sapiens
uauuacgugcaaua

SEQ ID NO: 24574 - RNA, 12 nt, Homo sapiens
cacuugaacccg

SEQ ID NO: 24575 - RNA, 21 nt, Homo sapiens
uguuuucugacuaauuaggca

SEQ ID NO: 24576 - RNA, 19 nt, Homo sapiens
aaugacuaaaaaacaaaga

SEQ ID NO: 24577 - RNA, 18 nt, Homo sapiens
augaaaagauuaugaucu

SEQ ID NO: 24578 - RNA, 13 nt, Homo sapiens
uuugcaagacaua

SEQ ID NO: 24579 - RNA, 21 nt, Homo sapiens
uuauagaauauuuauuaccuc

SEQ ID NO: 24580 - RNA, 23 nt, Homo sapiens
aauauguaaauagaaacguguau

SEQ ID NO: 24581 - RNA, 23 nt, Homo sapiens
uaaugaaaaugaauaucuauuaa

SEQ ID NO: 24582 - RNA, 16 nt, Homo sapiens
gaagucuuccauagag

SEQ ID NO: 24583 - RNA, 21 nt, Homo sapiens
uggacaguuuucugcuuuaau

SEQ ID NO: 24584 - RNA, 21 nt, Homo sapiens
caauagaaggauguacauuuc

SEQ ID NO: 24585 - RNA, 15 nt, Homo sapiens
uagaagcaucacagg

SEQ ID NO: 24586 - RNA, 18 nt, Homo sapiens
ugagacagcucugcauac

SEQ ID NO: 24587 - RNA, 17 nt, Homo sapiens
uguagccacuucacuuu

SEQ ID NO: 24588 - RNA, 17 nt, Homo sapiens
cuaaaucaauucuauua

SEQ ID NO: 24589 - RNA, 18 nt, Homo sapiens
auaucuaauauauaugaa

SEQ ID NO: 24590 - RNA, 13 nt, Homo sapiens
agaauggaacuca

SEQ ID NO: 24591 - RNA, 22 nt, Homo sapiens
cugcaagcuuuucaaaauugga

SEQ ID NO: 24592 - RNA, 16 nt, Homo sapiens
auacauucugcuuuca

SEQ ID NO: 24593 - RNA, 20 nt, Homo sapiens
uacaaggcuuuaucucaggg

SEQ ID NO: 24594 - RNA, 13 nt, Homo sapiens
cacuggcucccug

SEQ ID NO: 24595 - RNA, 14 nt, Homo sapiens
gaaauagugucuga

SEQ ID NO: 24596 - RNA, 16 nt, Homo sapiens
caaauguuaugcauaa

SEQ ID NO: 24597 - RNA, 20 nt, Homo sapiens
ggaauauuugcaagacauag

SEQ ID NO: 24598 - RNA, 19 nt, Homo sapiens
uuccuucucaucugugauu

SEQ ID NO: 24599 - RNA, 21 nt, Homo sapiens
auucgcugcaaccuguugaua

SEQ ID NO: 24600 - RNA, 23 nt, Homo sapiens
uauaaauuuucccaaaacugaua

SEQ ID NO: 24601 - RNA, 20 nt, Homo sapiens
ggcuggagugcaguggcgca

SEQ ID NO: 24602 - RNA, 16 nt, Homo sapiens
uuguuggauaaaucag

SEQ ID NO: 24603 - RNA, 18 nt, Homo sapiens
auuuuaaguaauuucaga

SEQ ID NO: 24604 - RNA, 20 nt, Homo sapiens
aggagauggaaguugcagug

SEQ ID NO: 24605 - RNA, 21 nt, Homo sapiens
guuucgugaaguauacuguau

SEQ ID NO: 24606 - RNA, 17 nt, Homo sapiens
aaugaaugaauggcuaa

SEQ ID NO: 24607 - RNA, 23 nt, Homo sapiens
agacauagaauuaacacaugauc

SEQ ID NO: 24608 - RNA, 15 nt, Homo sapiens
cagaaauuuaauuca

SEQ ID NO: 24609 - RNA, 17 nt, Homo sapiens
uaccucugauaccucaa

SEQ ID NO: 24610 - RNA, 13 nt, Homo sapiens
cugaauacauucu

SEQ ID NO: 24611 - RNA, 15 nt, Homo sapiens
auaguuguaccgcaa

SEQ ID NO: 24612 - RNA, 19 nt, Homo sapiens
ugucuggcacuugggacaa

SEQ ID NO: 24613 - RNA, 16 nt, Homo sapiens
uguacaccaauauuca

SEQ ID NO: 24614 - RNA, 14 nt, Homo sapiens
auuugcaagacaua

SEQ ID NO: 24615 - RNA, 14 nt, Homo sapiens
uuauuguaccucuc

SEQ ID NO: 24616 - RNA, 14 nt, Homo sapiens
aaauaaaagcacuu

SEQ ID NO: 24617 - RNA, 19 nt, Homo sapiens
accagagauaauaugagaa

SEQ ID NO: 24618 - RNA, 20 nt, Homo sapiens
aggcggguggaucacuugag

SEQ ID NO: 24619 - RNA, 17 nt, Homo sapiens
agauagguuaccaguaa

SEQ ID NO: 24620 - RNA, 18 nt, Homo sapiens
gcccccauuguggucaca

SEQ ID NO: 24621 - RNA, 20 nt, Homo sapiens
ccuccaccuucuggguucaa

SEQ ID NO: 24622 - RNA, 16 nt, Homo sapiens
auucucucuccuguac

SEQ ID NO: 24623 - RNA, 18 nt, Homo sapiens
agcaaauguuaugcauaa

SEQ ID NO: 24624 - RNA, 12 nt, Homo sapiens
cacagugucugg

SEQ ID NO: 24625 - RNA, 14 nt, Homo sapiens
agcuguuuccauag

SEQ ID NO: 24626 - RNA, 16 nt, Homo sapiens
uauuacaucuuucaca

SEQ ID NO: 24627 - RNA, 17 nt, Homo sapiens
auggcagcuuuccucaa

SEQ ID NO: 24628 - RNA, 20 nt, Homo sapiens
aucaugccccuguacuccag

SEQ ID NO: 24629 - RNA, 17 nt, Homo sapiens
aaacauagcaucucagg

SEQ ID NO: 24630 - RNA, 19 nt, Homo sapiens
ugacacuagcuaauaucaa

SEQ ID NO: 24631 - RNA, 17 nt, Homo sapiens
gaacugcauauguuucg

SEQ ID NO: 24632 - RNA, 15 nt, Homo sapiens
uaaacaguagugaua

SEQ ID NO: 24633 - RNA, 15 nt, Homo sapiens
cccauuucuauuuau

SEQ ID NO: 24634 - RNA, 13 nt, Homo sapiens
accaaauuuguau

SEQ ID NO: 24635 - RNA, 23 nt, Homo sapiens
aguguccucaucuguaaaaugga

SEQ ID NO: 24636 - RNA, 14 nt, Homo sapiens
aucuuacugaaggu

SEQ ID NO: 24637 - RNA, 21 nt, Homo sapiens
uaaaauggagacaccaccacc

SEQ ID NO: 24638 - RNA, 22 nt, Homo sapiens
uuuccuagcgcagccaugugau

SEQ ID NO: 24639 - RNA, 22 nt, Homo sapiens
ugagaugggagaaucacuugaa

SEQ ID NO: 24640 - RNA, 21 nt, Homo sapiens
aaacuaccagcccuacaccau

SEQ ID NO: 24641 - RNA, 14 nt, Homo sapiens
cuuauuguaccucu

SEQ ID NO: 24642 - RNA, 13 nt, Homo sapiens
uauuuauuuacug

SEQ ID NO: 24643 - RNA, 21 nt, Homo sapiens
agacaccaccacccuugccau

SEQ ID NO: 24644 - RNA, 14 nt, Homo sapiens
aaaaugaauaucua

SEQ ID NO: 24645 - RNA, 19 nt, Homo sapiens
gcauguaugacgugacugg

SEQ ID NO: 24646 - RNA, 23 nt, Homo sapiens
cuacucuguuccuucacauccug

SEQ ID NO: 24647 - RNA, 21 nt, Homo sapiens
uucaugaaaagauuaugaucu

SEQ ID NO: 24648 - RNA, 21 nt, Homo sapiens
ucaauuuaaaaaaaaaccuga

SEQ ID NO: 24649 - RNA, 14 nt, Homo sapiens
acagucacauucca

SEQ ID NO: 24650 - RNA, 16 nt, Homo sapiens
auaaacucagaaauuu

SEQ ID NO: 24651 - RNA, 18 nt, Homo sapiens
ugguccgaagucuuccau

SEQ ID NO: 24652 - RNA, 21 nt, Homo sapiens
gacaccaccacccuugccaug

SEQ ID NO: 24653 - RNA, 13 nt, Homo sapiens
augcauacaguaa

SEQ ID NO: 24654 - RNA, 15 nt, Homo sapiens
uaucaauaucuaaua

SEQ ID NO: 24655 - RNA, 16 nt, Homo sapiens
cacugugggcuuuuau

SEQ ID NO: 24656 - RNA, 21 nt, Homo sapiens
uccuagcgcagccaugugauu

SEQ ID NO: 24657 - RNA, 17 nt, Homo sapiens
uaaacaaaggaauuaug

SEQ ID NO: 24658 - RNA, 11 nt, Homo sapiens
uaaaagcacuu

SEQ ID NO: 24659 - RNA, 18 nt, Homo sapiens
uuguacaccaauauucau

SEQ ID NO: 24660 - RNA, 18 nt, Homo sapiens
uaaauaguuuaugauucc

SEQ ID NO: 24661 - RNA, 17 nt, Homo sapiens
gaaaauaaaagcacuua

SEQ ID NO: 24662 - RNA, 17 nt, Homo sapiens
uucuauuacgugcaaua

SEQ ID NO: 24663 - RNA, 15 nt, Homo sapiens
uuauuaccucugaua

SEQ ID NO: 24664 - RNA, 19 nt, Homo sapiens
acacuaaaaaggcauguaa

SEQ ID NO: 24665 - RNA, 15 nt, Homo sapiens
gccacuucacuuuuu

SEQ ID NO: 24666 - RNA, 15 nt, Homo sapiens
aucucacaagcacuu

SEQ ID NO: 24667 - RNA, 23 nt, Homo sapiens
cuaucagcauuuuacuacuuuaa

SEQ ID NO: 24668 - RNA, 20 nt, Homo sapiens
cugcagaagacaguauggca

SEQ ID NO: 24669 - RNA, 16 nt, Homo sapiens
cagcccaagggugggu

SEQ ID NO: 24670 - RNA, 16 nt, Homo sapiens
uuggaugcacuuuaua

SEQ ID NO: 24671 - RNA, 15 nt, Homo sapiens
agcagaacagugauu

SEQ ID NO: 24672 - RNA, 18 nt, Homo sapiens
caggauagagugggacag

SEQ ID NO: 24673 - RNA, 19 nt, Homo sapiens
cuguuuccauagggugaca

SEQ ID NO: 24674 - RNA, 19 nt, Homo sapiens
gaaaaaguucugcagauaa

SEQ ID NO: 24675 - RNA, 19 nt, Homo sapiens
uaguuguaccgcaauguga

SEQ ID NO: 24676 - RNA, 17 nt, Homo sapiens
uccaaauauuguugaca

SEQ ID NO: 24677 - RNA, 20 nt, Homo sapiens
cagagaaaauaaaagcacuu

SEQ ID NO: 24678 - RNA, 18 nt, Homo sapiens
uacucuguuccuucacau

SEQ ID NO: 24679 - RNA, 14 nt, Homo sapiens
cucacaagcacuuu

SEQ ID NO: 24680 - RNA, 21 nt, Homo sapiens
gaauauuuauuaccucugaua

SEQ ID NO: 24681 - RNA, 21 nt, Homo sapiens
uuuacauacugcugucuaugu

SEQ ID NO: 24682 - RNA, 20 nt, Homo sapiens
aagcagaacagugauuacca

SEQ ID NO: 24683 - RNA, 22 nt, Homo sapiens
gagacaccaccacccuugccau

SEQ ID NO: 24684 - RNA, 19 nt, Homo sapiens
uuccagagaccaguauucc

SEQ ID NO: 24685 - RNA, 14 nt, Homo sapiens
uaugcauacaguaa

SEQ ID NO: 24686 - RNA, 12 nt, Homo sapiens
uuucugcuuuaa

SEQ ID NO: 24687 - RNA, 12 nt, Homo sapiens
aauuuacuuugu

SEQ ID NO: 24688 - RNA, 12 nt, Homo sapiens
auuaauucaccu

SEQ ID NO: 24689 - RNA, 13 nt, Homo sapiens
cucaucaaucaaa

SEQ ID NO: 24690 - RNA, 12 nt, Homo sapiens
cggaacaguauc

SEQ ID NO: 24691 - RNA, 16 nt, Homo sapiens
auaauacuagucuuau

SEQ ID NO: 24692 - RNA, 18 nt, Homo sapiens
ugauuccaccuacaugag

SEQ ID NO: 24693 - RNA, 21 nt, Homo sapiens
uauucacaaccacucauucaa

SEQ ID NO: 24694 - RNA, 14 nt, Homo sapiens
uacaucuuucacau

SEQ ID NO: 24695 - RNA, 16 nt, Homo sapiens
caaauauuguugacaa

SEQ ID NO: 24696 - RNA, 17 nt, Homo sapiens
uacaauugaaaugacua

SEQ ID NO: 24697 - RNA, 19 nt, Homo sapiens
auuguugacaacugugacu

SEQ ID NO: 24698 - RNA, 12 nt, Homo sapiens
gcagaacaguga

SEQ ID NO: 24699 - RNA, 21 nt, Homo sapiens
uuaaacucagggagcauuuau

SEQ ID NO: 24700 - RNA, 15 nt, Homo sapiens
ucugcuuuaauuuca

SEQ ID NO: 24701 - RNA, 15 nt, Homo sapiens
auguguuuuucacau

SEQ ID NO: 24702 - RNA, 17 nt, Homo sapiens
ccuggacaguuuucugc

SEQ ID NO: 24703 - RNA, 18 nt, Homo sapiens
gagaagaaugacuaugca

SEQ ID NO: 24704 - RNA, 15 nt, Homo sapiens
uccuuaucacugaca

SEQ ID NO: 24705 - RNA, 19 nt, Homo sapiens
uaguguuggaaaaugugca

SEQ ID NO: 24706 - RNA, 12 nt, Homo sapiens
gggcgcgguggc

SEQ ID NO: 24707 - RNA, 15 nt, Homo sapiens
caaccacucauucaa

SEQ ID NO: 24708 - RNA, 17 nt, Homo sapiens
aguaacggaacaguauc

SEQ ID NO: 24709 - RNA, 18 nt, Homo sapiens
gagaaucagaucauuuca

SEQ ID NO: 24710 - RNA, 19 nt, Homo sapiens
ugcuuguuagcaaaaugga

SEQ ID NO: 24711 - RNA, 14 nt, Homo sapiens
aucaccaaggcuga

SEQ ID NO: 24712 - RNA, 20 nt, Homo sapiens
agacaccaccacccuugcca

SEQ ID NO: 24713 - RNA, 15 nt, Homo sapiens
gacaguuuucugcuu

SEQ ID NO: 24714 - RNA, 17 nt, Homo sapiens
cugggucucaguguccu

SEQ ID NO: 24715 - RNA, 14 nt, Homo sapiens
uguaauugcuuguu

SEQ ID NO: 24716 - RNA, 22 nt, Homo sapiens
cuuuuggcuuguaaaguacaga

SEQ ID NO: 24717 - RNA, 19 nt, Homo sapiens
gguauuuauugagcaccug

SEQ ID NO: 24718 - RNA, 14 nt, Homo sapiens
cgcagccaugugau

SEQ ID NO: 24719 - RNA, 17 nt, Homo sapiens
cuggcacuugggacaaa

SEQ ID NO: 24720 - RNA, 20 nt, Homo sapiens
cuggaucucacaagcacuuu

SEQ ID NO: 24721 - RNA, 17 nt, Homo sapiens
auucacaagacccaaaa

SEQ ID NO: 24722 - RNA, 14 nt, Homo sapiens
auuuauuaccucug

SEQ ID NO: 24723 - RNA, 14 nt, Homo sapiens
ggcacuugggacaa

SEQ ID NO: 24724 - RNA, 18 nt, Homo sapiens
uuuguuauuuuuccccaa

SEQ ID NO: 24725 - RNA, 16 nt, Homo sapiens
cacugcagaagacagu

SEQ ID NO: 24726 - RNA, 16 nt, Homo sapiens
acagugucuggcacuu

SEQ ID NO: 24727 - RNA, 15 nt, Homo sapiens
aauucugcaagcuuu

SEQ ID NO: 24728 - RNA, 16 nt, Homo sapiens
cuuuuacauacugcug

SEQ ID NO: 24729 - RNA, 20 nt, Homo sapiens
auuuuguguucaguacaauu

SEQ ID NO: 24730 - RNA, 18 nt, Homo sapiens
cucugggucucagugucc

SEQ ID NO: 24731 - RNA, 23 nt, Homo sapiens
gaauucuuacauguuuucuuugc

SEQ ID NO: 24732 - RNA, 17 nt, Homo sapiens
gccugcuggauguggag

SEQ ID NO: 24733 - RNA, 21 nt, Homo sapiens
aacacuaaaaaggcauguaau

SEQ ID NO: 24734 - RNA, 23 nt, Homo sapiens
cuguaaucccagcacuuugggag

SEQ ID NO: 24735 - RNA, 21 nt, Homo sapiens
gauaccucaacccccauuucu

SEQ ID NO: 24736 - RNA, 14 nt, Homo sapiens
agacagaacuugaa

SEQ ID NO: 24737 - RNA, 13 nt, Homo sapiens
ugcugggaauuac

SEQ ID NO: 24738 - RNA, 17 nt, Homo sapiens
uagagacuuugugaaaa

SEQ ID NO: 24739 - RNA, 18 nt, Homo sapiens
uguaaugaaaaugaauau

SEQ ID NO: 24740 - RNA, 15 nt, Homo sapiens
ucccagcuacuuggg

SEQ ID NO: 24741 - RNA, 15 nt, Homo sapiens
acaguuccugagacc

SEQ ID NO: 24742 - RNA, 16 nt, Homo sapiens
gaauuaacacaugauc

SEQ ID NO: 24743 - RNA, 11 nt, Homo sapiens
cuuuucucugc

SEQ ID NO: 24744 - RNA, 22 nt, Homo sapiens
agaccuggucgucgucuugacu

SEQ ID NO: 24745 - RNA, 20 nt, Homo sapiens
aggaaauauucuguaaucuu

SEQ ID NO: 24746 - RNA, 20 nt, Homo sapiens
gaacugcuggauucaaguga

SEQ ID NO: 24747 - RNA, 15 nt, Homo sapiens
gacuaauuaggcaag

SEQ ID NO: 24748 - RNA, 16 nt, Homo sapiens
gaggagaaacuggaac

SEQ ID NO: 24749 - RNA, 17 nt, Homo sapiens
gcacuuuaacacagugu

SEQ ID NO: 24750 - RNA, 21 nt, Homo sapiens
uuguguguuuauuucacuuga

SEQ ID NO: 24751 - RNA, 11 nt, Homo sapiens
ccugugacugu

SEQ ID NO: 24752 - RNA, 21 nt, Homo sapiens
ucuuaaacacuaaaaaggcau

SEQ ID NO: 24753 - RNA, 18 nt, Homo sapiens
cuaaaaaggcauguaauu

SEQ ID NO: 24754 - RNA, 18 nt, Homo sapiens
cagccaggcggcuggaau

SEQ ID NO: 24755 - RNA, 16 nt, Homo sapiens
auggcuaguaucaaaa

SEQ ID NO: 24756 - RNA, 15 nt, Homo sapiens
cuuugaagucugauu

SEQ ID NO: 24757 - RNA, 14 nt, Homo sapiens
cagaacuugaaugu

SEQ ID NO: 24758 - RNA, 16 nt, Homo sapiens
cugacuaauuaggcaa

SEQ ID NO: 24759 - RNA, 16 nt, Homo sapiens
uuauuuuuacaguucu

SEQ ID NO: 24760 - RNA, 18 nt, Homo sapiens
ccacugcagaagacagua

SEQ ID NO: 24761 - RNA, 22 nt, Homo sapiens
uucucugccuugguauagcaua

SEQ ID NO: 24762 - RNA, 18 nt, Homo sapiens
gaggcugaggcgggugga

SEQ ID NO: 24763 - RNA, 15 nt, Homo sapiens
uauuucacuugauga

SEQ ID NO: 24764 - RNA, 13 nt, Homo sapiens
guuuucugacuaa

SEQ ID NO: 24765 - RNA, 15 nt, Homo sapiens
ugaauaaaguguaag

SEQ ID NO: 24766 - RNA, 20 nt, Homo sapiens
aguaauuuuaaguaauuuca

SEQ ID NO: 24767 - RNA, 16 nt, Homo sapiens
uggcugggaguggcau

SEQ ID NO: 24768 - RNA, 17 nt, Homo sapiens
gaaucagaucauuucaa

SEQ ID NO: 24769 - RNA, 21 nt, Homo sapiens
aagcacuuuaacacagugucu

SEQ ID NO: 24770 - RNA, 21 nt, Homo sapiens
caagguucuucccuuuuacau

SEQ ID NO: 24771 - RNA, 15 nt, Homo sapiens
acagucacauuccaa

SEQ ID NO: 24772 - RNA, 15 nt, Homo sapiens
auaagcuguuuuuau

SEQ ID NO: 24773 - RNA, 16 nt, Homo sapiens
agaagaaugacuaugc

SEQ ID NO: 24774 - RNA, 23 nt, Homo sapiens
ucuucccuuuuacauacugcugu

SEQ ID NO: 24775 - RNA, 13 nt, Homo sapiens
gugcaauauguga

SEQ ID NO: 24776 - RNA, 17 nt, Homo sapiens
auuuccaaauucacaag

SEQ ID NO: 24777 - RNA, 19 nt, Homo sapiens
gacuaugaggaauauuugc

SEQ ID NO: 24778 - RNA, 12 nt, Homo sapiens
aaaugugcaaua

SEQ ID NO: 24779 - RNA, 18 nt, Homo sapiens
ucaggaguuccuaaccag

SEQ ID NO: 24780 - RNA, 16 nt, Homo sapiens
agauccccguguuacu

SEQ ID NO: 24781 - RNA, 21 nt, Homo sapiens
cccccauuguggucacaggaa

SEQ ID NO: 24782 - RNA, 19 nt, Homo sapiens
aauauuuuuaugugcaaua

SEQ ID NO: 24783 - RNA, 23 nt, Homo sapiens
agauuaagagauggguuugacaa

SEQ ID NO: 24784 - RNA, 17 nt, Homo sapiens
ugaggaauauuugcaag

SEQ ID NO: 24785 - RNA, 16 nt, Homo sapiens
aauguucaucaaugaa

SEQ ID NO: 24786 - RNA, 23 nt, Homo sapiens
cuauuauagaauggaacucaagg

SEQ ID NO: 24787 - RNA, 13 nt, Homo sapiens
ucaccaaggcuga

SEQ ID NO: 24788 - RNA, 14 nt, Homo sapiens
cucuucacagucac

SEQ ID NO: 24789 - RNA, 15 nt, Homo sapiens
ggcugggaguggcau

SEQ ID NO: 24790 - RNA, 14 nt, Homo sapiens
uccuuccuuaucac

SEQ ID NO: 24791 - RNA, 13 nt, Homo sapiens
caaccaaauggag

SEQ ID NO: 24792 - RNA, 19 nt, Homo sapiens
ugaaaagauuaugaucuca

SEQ ID NO: 24793 - RNA, 19 nt, Homo sapiens
gcaaccuuuggaugcacuu

SEQ ID NO: 24794 - RNA, 14 nt, Homo sapiens
gaauuuucuuccaa

SEQ ID NO: 24795 - RNA, 21 nt, Homo sapiens
guaaguuuaugcauacaguaa

SEQ ID NO: 24796 - RNA, 21 nt, Homo sapiens
caccaaacccggccugauuaa

SEQ ID NO: 24797 - RNA, 15 nt, Homo sapiens
uuccuauguaacugc

SEQ ID NO: 24798 - RNA, 19 nt, Homo sapiens
auguuucgcugauauaugu

SEQ ID NO: 24799 - RNA, 20 nt, Homo sapiens
ugccaaggcuggagugcagu

SEQ ID NO: 24800 - RNA, 17 nt, Homo sapiens
uauagaauggaacucaa

SEQ ID NO: 24801 - RNA, 16 nt, Homo sapiens
uuaugaaccuuuacau

SEQ ID NO: 24802 - RNA, 19 nt, Homo sapiens
cacuuugggaggcugaggc

SEQ ID NO: 24803 - RNA, 23 nt, Homo sapiens
acucauugcaaccuccaccuucu

SEQ ID NO: 24804 - RNA, 21 nt, Homo sapiens
ucccaaagugcugggaauuac

SEQ ID NO: 24805 - RNA, 22 nt, Homo sapiens
uauuuuuuaugaaacauuacag

SEQ ID NO: 24806 - RNA, 15 nt, Homo sapiens
cagcagagacggggu

SEQ ID NO: 24807 - RNA, 21 nt, Homo sapiens
auaaauaguuuaugauuccac

SEQ ID NO: 24808 - RNA, 19 nt, Homo sapiens
gcagagacgggguuugcca

SEQ ID NO: 24809 - RNA, 14 nt, Homo sapiens
ucucaucugugauu

SEQ ID NO: 24810 - RNA, 23 nt, Homo sapiens
aaggcuucucuuaaacacuaaaa

SEQ ID NO: 24811 - RNA, 19 nt, Homo sapiens
accaguaacggaacaguau

SEQ ID NO: 24812 - RNA, 15 nt, Homo sapiens
uuccuggacaguuuu

SEQ ID NO: 24813 - RNA, 20 nt, Homo sapiens
ucucuacuaaaaauacaaaa

SEQ ID NO: 24814 - RNA, 16 nt, Homo sapiens
auguguggcauuuuca

SEQ ID NO: 24815 - RNA, 15 nt, Homo sapiens
gcuaauuuguguauu

SEQ ID NO: 24816 - RNA, 19 nt, Homo sapiens
cuguaucuuguuuuuccac

SEQ ID NO: 24817 - RNA, 20 nt, Homo sapiens
ugcacuccagccugagcgac

SEQ ID NO: 24818 - RNA, 20 nt, Homo sapiens
caauucuauuacgugcaaua

SEQ ID NO: 24819 - RNA, 16 nt, Homo sapiens
acuccuaguaauuuaa

SEQ ID NO: 24820 - RNA, 18 nt, Homo sapiens
gcagcuuauucacaagac

SEQ ID NO: 24821 - RNA, 21 nt, Homo sapiens
aaaaaaauuuuauagugucuu

SEQ ID NO: 24822 - RNA, 21 nt, Homo sapiens
aguguuggaaaaugugcaaua

SEQ ID NO: 24823 - RNA, 13 nt, Homo sapiens
cauuugcacuauu

SEQ ID NO: 24824 - RNA, 22 nt, Homo sapiens
ugucuuacagagaaaagacaua

SEQ ID NO: 24825 - RNA, 16 nt, Homo sapiens
gaguggguuucacaag

SEQ ID NO: 24826 - RNA, 22 nt, Homo sapiens
ccgcaaugugacuuaaugccac

SEQ ID NO: 24827 - RNA, 16 nt, Homo sapiens
aucuaauauauaugaa

SEQ ID NO: 24828 - RNA, 23 nt, Homo sapiens
gugaauuuuucucuaacucagaa

SEQ ID NO: 24829 - RNA, 15 nt, Homo sapiens
aaucagaucauuuca

SEQ ID NO: 24830 - RNA, 15 nt, Homo sapiens
acuuuuggcuuguaa

SEQ ID NO: 24831 - RNA, 21 nt, Homo sapiens
cuuagacccucaugcugccaa

SEQ ID NO: 24832 - RNA, 14 nt, Homo sapiens
uucacuuauugacu

SEQ ID NO: 24833 - RNA, 19 nt, Homo sapiens
caacccaaauguucaucaa

SEQ ID NO: 24834 - RNA, 17 nt, Homo sapiens
aagugaaaaacauccag

SEQ ID NO: 24835 - RNA, 23 nt, Homo sapiens
agcuaaguugcaccaacuuugaa

SEQ ID NO: 24836 - RNA, 13 nt, Homo sapiens
aaaaugugcaaua

SEQ ID NO: 24837 - RNA, 20 nt, Homo sapiens
cugcauugagaacugcauau

SEQ ID NO: 24838 - RNA, 16 nt, Homo sapiens
uuuuuaugugcaauaa

SEQ ID NO: 24839 - RNA, 21 nt, Homo sapiens
aaauaacuaggcguggacuua

SEQ ID NO: 24840 - RNA, 20 nt, Homo sapiens
aaaaccaaauuuguauuuaa

SEQ ID NO: 24841 - RNA, 14 nt, Homo sapiens
gaaugagaagaaug

SEQ ID NO: 24842 - RNA, 16 nt, Homo sapiens
uggaacucaaggaaau

SEQ ID NO: 24843 - RNA, 20 nt, Homo sapiens
gcuaagugaaauaagccaga

SEQ ID NO: 24844 - RNA, 12 nt, Homo sapiens
ucaucaaugaau

SEQ ID NO: 24845 - RNA, 22 nt, Homo sapiens
agacagaaagcagaacagugau

SEQ ID NO: 24846 - RNA, 18 nt, Homo sapiens
cuucuggguucaagcgau

SEQ ID NO: 24847 - RNA, 20 nt, Homo sapiens
agguauauaaauuuucccaa

SEQ ID NO: 24848 - RNA, 15 nt, Homo sapiens
aacccaaauguucau

SEQ ID NO: 24849 - RNA, 21 nt, Homo sapiens
ggccuguugaagaugcuugua

SEQ ID NO: 24850 - RNA, 18 nt, Homo sapiens
ugaaaacauagcaucuca

SEQ ID NO: 24851 - RNA, 18 nt, Homo sapiens
uaagugaagugauacuau

SEQ ID NO: 24852 - RNA, 14 nt, Homo sapiens
gcagcuuauucaca

SEQ ID NO: 24853 - RNA, 19 nt, Homo sapiens
uccauugguuuaccuguga

SEQ ID NO: 24854 - RNA, 20 nt, Homo sapiens
uccugugacugucucacuua

SEQ ID NO: 24855 - RNA, 16 nt, Homo sapiens
ucccugcagacaugag

SEQ ID NO: 24856 - RNA, 17 nt, Homo sapiens
gaaagcagggacuugaa

SEQ ID NO: 24857 - RNA, 13 nt, Homo sapiens
auuuucacuuuug

SEQ ID NO: 24858 - RNA, 21 nt, Homo sapiens
auugaaucccuuaaacucagg

SEQ ID NO: 24859 - RNA, 23 nt, Homo sapiens
ugaacaaauuuacagagacagaa

SEQ ID NO: 24860 - RNA, 14 nt, Homo sapiens
uuccaaauucacaa

SEQ ID NO: 24861 - RNA, 16 nt, Homo sapiens
aauaauacaccagaga

SEQ ID NO: 24862 - RNA, 23 nt, Homo sapiens
aggcuggucucgaacugcuggau

SEQ ID NO: 24863 - RNA, 20 nt, Homo sapiens
ccagccugggugacagagca

SEQ ID NO: 24864 - RNA, 12 nt, Homo sapiens
aaagccaaaaac

SEQ ID NO: 24865 - RNA, 22 nt, Homo sapiens
augcaaccuuuggaugcacuuu

SEQ ID NO: 24866 - RNA, 21 nt, Homo sapiens
gaugccccagggaccuuugua

SEQ ID NO: 24867 - RNA, 11 nt, Homo sapiens
auuugagacag

SEQ ID NO: 24868 - RNA, 18 nt, Homo sapiens
cuguaaucccagcuacuu

SEQ ID NO: 24869 - RNA, 13 nt, Homo sapiens
uauaucaguccuc

SEQ ID NO: 24870 - RNA, 14 nt, Homo sapiens
uguggucacaggaa

SEQ ID NO: 24871 - RNA, 17 nt, Homo sapiens
aacuagaauuuauucaa

SEQ ID NO: 24872 - RNA, 12 nt, Homo sapiens
gggaguggcgcg

SEQ ID NO: 24873 - RNA, 14 nt, Homo sapiens
ggcuuuuauugcca

SEQ ID NO: 24874 - RNA, 17 nt, Homo sapiens
auagcagcuuauucaca

SEQ ID NO: 24875 - RNA, 17 nt, Homo sapiens
caguguccucaucugua

SEQ ID NO: 24876 - RNA, 14 nt, Homo sapiens
agcuucucugugaa

SEQ ID NO: 24877 - RNA, 13 nt, Homo sapiens
ugaaauagugucu

SEQ ID NO: 24878 - RNA, 21 nt, Homo sapiens
ugaggcggguggaucacuuga

SEQ ID NO: 24879 - RNA, 23 nt, Homo sapiens
gauuacaaggcuuuaucucaggg

SEQ ID NO: 24880 - RNA, 13 nt, Homo sapiens
gccccugcacucc

SEQ ID NO: 24881 - RNA, 20 nt, Homo sapiens
aaauugggaaaggaguagaa

SEQ ID NO: 24882 - RNA, 17 nt, Homo sapiens
ggaagaaauuccaggaa

SEQ ID NO: 24883 - RNA, 21 nt, Homo sapiens
gauaucaugccccuguacucc

SEQ ID NO: 24884 - RNA, 16 nt, Homo sapiens
augcauuugcacuauu

SEQ ID NO: 24885 - RNA, 13 nt, Homo sapiens
gaaauagugucug

SEQ ID NO: 24886 - RNA, 20 nt, Homo sapiens
uucugcccugcuuuugcuag

SEQ ID NO: 24887 - RNA, 20 nt, Homo sapiens
aaucugagccagugcuuuaa

SEQ ID NO: 24888 - RNA, 21 nt, Homo sapiens
uuuaacuagaauuuauucaau

SEQ ID NO: 24889 - RNA, 22 nt, Homo sapiens
ucgaacugcuggauucaaguga

SEQ ID NO: 24890 - RNA, 16 nt, Homo sapiens
acuggcucccuggaag

SEQ ID NO: 24891 - RNA, 19 nt, Homo sapiens
auuacaaggcuuuaucuca

SEQ ID NO: 24892 - RNA, 19 nt, Homo sapiens
uuccaggaaaaucugcacu

SEQ ID NO: 24893 - RNA, 19 nt, Homo sapiens
uguaaucacagcuacuugg

SEQ ID NO: 24894 - RNA, 13 nt, Homo sapiens
gacaaauucuguu

SEQ ID NO: 24895 - RNA, 13 nt, Homo sapiens
agaucaagccauc

SEQ ID NO: 24896 - RNA, 14 nt, Homo sapiens
aucuacacuccagu

SEQ ID NO: 24897 - RNA, 14 nt, Homo sapiens
augccugcaaucug

SEQ ID NO: 24898 - RNA, 12 nt, Homo sapiens
ccacuacugcua

SEQ ID NO: 24899 - RNA, 19 nt, Homo sapiens
acuugggcgggacacaggc

SEQ ID NO: 24900 - RNA, 18 nt, Homo sapiens
auucuauuacgugcaaua

SEQ ID NO: 24901 - RNA, 19 nt, Homo sapiens
caugugauuacccucuggg

SEQ ID NO: 24902 - RNA, 20 nt, Homo sapiens
auggagguuaagcacuuuaa

SEQ ID NO: 24903 - RNA, 15 nt, Homo sapiens
ucucacaagcacuuu

SEQ ID NO: 24904 - RNA, 19 nt, Homo sapiens
cuuuucaaaauuggacuua

SEQ ID NO: 24905 - RNA, 23 nt, Homo sapiens
agagacagaaagcagaacaguga

SEQ ID NO: 24906 - RNA, 20 nt, Homo sapiens
uagagugggacaguuccuga

SEQ ID NO: 24907 - RNA, 16 nt, Homo sapiens
aacaaaaaaagcauug

SEQ ID NO: 24908 - RNA, 20 nt, Homo sapiens
auuuucacuuuuggcuugua

SEQ ID NO: 24909 - RNA, 20 nt, Homo sapiens
ugcugggaauuacaggcgug

SEQ ID NO: 24910 - RNA, 16 nt, Homo sapiens
caguggcgcaaucuua

SEQ ID NO: 24911 - RNA, 14 nt, Homo sapiens
uguauagugcaugu

SEQ ID NO: 24912 - RNA, 15 nt, Homo sapiens
acagaggaucugcuu

SEQ ID NO: 24913 - RNA, 23 nt, Homo sapiens
caauuauaucaguccucuuucaa

SEQ ID NO: 24914 - RNA, 23 nt, Homo sapiens
cauugagaacugcauauguuucg

SEQ ID NO: 24915 - RNA, 16 nt, Homo sapiens
agcuguuuucccugac

SEQ ID NO: 24916 - RNA, 20 nt, Homo sapiens
ggccagaagucaaggcuuag

SEQ ID NO: 24917 - RNA, 14 nt, Homo sapiens
acccaaaguaucag

SEQ ID NO: 24918 - RNA, 15 nt, Homo sapiens
cuauguggcuguauc

SEQ ID NO: 24919 - RNA, 18 nt, Homo sapiens
cgaaugguuccauucucu

SEQ ID NO: 24920 - RNA, 18 nt, Homo sapiens
gcaggauagagugggaca

SEQ ID NO: 24921 - RNA, 15 nt, Homo sapiens
auuaaggcuucucuu

SEQ ID NO: 24922 - RNA, 17 nt, Homo sapiens
acagagaaaagacauaa

SEQ ID NO: 24923 - RNA, 13 nt, Homo sapiens
cacuccagccuga

SEQ ID NO: 24924 - RNA, 10 nt, Homo sapiens
auagugucuu

SEQ ID NO: 24925 - RNA, 17 nt, Homo sapiens
ccagugcuuuaauggca

SEQ ID NO: 24926 - RNA, 17 nt, Homo sapiens
auaagcaaagacuauga

SEQ ID NO: 24927 - RNA, 21 nt, Homo sapiens
uugccaaggcuggagugcagu

SEQ ID NO: 24928 - RNA, 16 nt, Homo sapiens
ggaguggcauguauga

SEQ ID NO: 24929 - RNA, 16 nt, Homo sapiens
gacuuuggcaaaugag

SEQ ID NO: 24930 - RNA, 21 nt, Homo sapiens
uaagcacuuuaacacaguguc

SEQ ID NO: 24931 - RNA, 23 nt, Homo sapiens
uuuaaaaaaaaaaaaaaagccaa

SEQ ID NO: 24932 - RNA, 21 nt, Homo sapiens
ucuuuuuagagaaauuugcca

SEQ ID NO: 24933 - RNA, 22 nt, Homo sapiens
gaauaguguuggaaaaugugca

SEQ ID NO: 24934 - RNA, 23 nt, Homo sapiens
uggacuuuccagagaccaguauu

SEQ ID NO: 24935 - RNA, 17 nt, Homo sapiens
agaaaauaaaagcacuu

SEQ ID NO: 24936 - RNA, 22 nt, Homo sapiens
uaucucaggggccaacuaggca

SEQ ID NO: 24937 - RNA, 15 nt, Homo sapiens
uggaacucaaggaaa

SEQ ID NO: 24938 - RNA, 13 nt, Homo sapiens
ucaugcauuugca

SEQ ID NO: 24939 - RNA, 16 nt, Homo sapiens
ugucucaguccaugaa

SEQ ID NO: 24940 - RNA, 13 nt, Homo sapiens
cauuuucacuuuu

SEQ ID NO: 24941 - RNA, 23 nt, Homo sapiens
caauaucuaauauauaugaauaa

SEQ ID NO: 24942 - RNA, 18 nt, Homo sapiens
uauauguguuuuucacau

SEQ ID NO: 24943 - RNA, 22 nt, Homo sapiens
aaacaucaguuacucugaaggg

SEQ ID NO: 24944 - RNA, 15 nt, Homo sapiens
uuaucuugucucugg

SEQ ID NO: 24945 - RNA, 18 nt, Homo sapiens
aagaaaggccagcaaauu

SEQ ID NO: 24946 - RNA, 17 nt, Homo sapiens
ucuuggucucaguguca

SEQ ID NO: 24947 - RNA, 20 nt, Homo sapiens
aaaagauuguauagugcaug

SEQ ID NO: 24948 - RNA, 22 nt, Homo sapiens
acuccugguuccuaggugagca

SEQ ID NO: 24949 - RNA, 20 nt, Homo sapiens
ggucaauuuuguuauguaua

SEQ ID NO: 24950 - RNA, 19 nt, Homo sapiens
agaaauuugccaauuuacu

SEQ ID NO: 24951 - RNA, 19 nt, Homo sapiens
cuucuggguucaagcgauu

SEQ ID NO: 24952 - RNA, 17 nt, Homo sapiens
ugccaugcuggccaggc

SEQ ID NO: 24953 - RNA, 22 nt, Homo sapiens
aagcagggacuugaacccauau

SEQ ID NO: 24954 - RNA, 18 nt, Homo sapiens
aauuaauggaauauguaa

SEQ ID NO: 24955 - RNA, 10 nt, Homo sapiens
acgugcaaua

SEQ ID NO: 24956 - RNA, 16 nt, Homo sapiens
auccagaaauaaugaa

SEQ ID NO: 24957 - RNA, 18 nt, Homo sapiens
uacaguuagagauuuuua

SEQ ID NO: 24958 - RNA, 16 nt, Homo sapiens
uccaagccucaugucc

SEQ ID NO: 24959 - RNA, 16 nt, Homo sapiens
uauggcuuaaugacac

SEQ ID NO: 24960 - RNA, 15 nt, Homo sapiens
ggcuuuaucucaggg

SEQ ID NO: 24961 - RNA, 9 nt, Homo sapiens
uaugugcaa

SEQ ID NO: 24962 - RNA, 14 nt, Homo sapiens
acaugauccugcaa

SEQ ID NO: 24963 - RNA, 16 nt, Homo sapiens
uaaaugauuucauuca

SEQ ID NO: 24964 - RNA, 16 nt, Homo sapiens
aacacuaaaaaggcau

SEQ ID NO: 24965 - RNA, 22 nt, Homo sapiens
cacgccuguaaucccagcacuu

SEQ ID NO: 24966 - RNA, 15 nt, Homo sapiens
acaaugaacacuuau

SEQ ID NO: 24967 - RNA, 21 nt, Homo sapiens
uauguaaauagaaacguguau

SEQ ID NO: 24968 - RNA, 15 nt, Homo sapiens
gcauuuucacuuuug

SEQ ID NO: 24969 - RNA, 13 nt, Homo sapiens
uggauucaaguga

SEQ ID NO: 24970 - RNA, 13 nt, Homo sapiens
uuaaaauguaauu

SEQ ID NO: 24971 - RNA, 17 nt, Homo sapiens
ggaucucacaagcacuu

SEQ ID NO: 24972 - RNA, 16 nt, Homo sapiens
guuggaaaaugugcaa

SEQ ID NO: 24973 - RNA, 19 nt, Homo sapiens
ugagugccuguaaucacag

SEQ ID NO: 24974 - RNA, 19 nt, Homo sapiens
ucuucccuuuuacauacug

SEQ ID NO: 24975 - RNA, 16 nt, Homo sapiens
gcaauaaaauguauuu

SEQ ID NO: 24976 - RNA, 15 nt, Homo sapiens
aucagcuaaguugca

SEQ ID NO: 24977 - RNA, 17 nt, Homo sapiens
aagugaaauaagccaga

SEQ ID NO: 24978 - RNA, 17 nt, Homo sapiens
gcucugggauagcugac

SEQ ID NO: 24979 - RNA, 20 nt, Homo sapiens
gacaccaccacccuugccau

SEQ ID NO: 24980 - RNA, 22 nt, Homo sapiens
auguacauccauggugugcugg

SEQ ID NO: 24981 - RNA, 19 nt, Homo sapiens
agugaacaaauuuacagag

SEQ ID NO: 24982 - RNA, 10 nt, Homo sapiens
caagacauag

SEQ ID NO: 24983 - RNA, 15 nt, Homo sapiens
gcaggcgugaccuga

SEQ ID NO: 24984 - RNA, 21 nt, Homo sapiens
cugcaaucugagccagugcuu

SEQ ID NO: 24985 - RNA, 14 nt, Homo sapiens
gaguuuggccagaa

SEQ ID NO: 24986 - RNA, 20 nt, Homo sapiens
acggagauaucccaggaaaa

SEQ ID NO: 24987 - RNA, 13 nt, Homo sapiens
uuuuccuucucau

SEQ ID NO: 24988 - RNA, 20 nt, Homo sapiens
gaggcaagagaauugcuuga

SEQ ID NO: 24989 - RNA, 22 nt, Homo sapiens
ucccauggguuguguguuuauu

SEQ ID NO: 24990 - RNA, 19 nt, Homo sapiens
gaaaaucugcacugugggc

SEQ ID NO: 24991 - RNA, 15 nt, Homo sapiens
aagcccaauauuaua

SEQ ID NO: 24992 - RNA, 21 nt, Homo sapiens
aauucuauuacgugcaauacu

SEQ ID NO: 24993 - RNA, 16 nt, Homo sapiens
auaauaugagaaucag

SEQ ID NO: 24994 - RNA, 13 nt, Homo sapiens
ccuguaaucacag

SEQ ID NO: 24995 - RNA, 13 nt, Homo sapiens
gcacucuauguuc

SEQ ID NO: 24996 - RNA, 22 nt, Homo sapiens
agaagugaaaaucuacacucca

SEQ ID NO: 24997 - RNA, 18 nt, Homo sapiens
aaacuuuaugcuaaguga

SEQ ID NO: 24998 - RNA, 16 nt, Homo sapiens
ggacuuacuauuuauu

SEQ ID NO: 24999 - RNA, 22 nt, Homo sapiens
cuauguucuaagaagugaaaau

SEQ ID NO: 25000 - RNA, 16 nt, Homo sapiens
cacuuauugacuauua

SEQ ID NO: 25001 - RNA, 19 nt, Homo sapiens
ucccuucucuucacaguca

SEQ ID NO: 25002 - RNA, 15 nt, Homo sapiens
guacuuuuuccagac

SEQ ID NO: 25003 - RNA, 12 nt, Homo sapiens
acauacaauuau

SEQ ID NO: 25004 - RNA, 12 nt, Homo sapiens
uuaugugcaaua

SEQ ID NO: 25005 - RNA, 23 nt, Homo sapiens
cuggcugggaguggcauguauga

SEQ ID NO: 25006 - RNA, 14 nt, Homo sapiens
cgggguuugccaug

SEQ ID NO: 25007 - RNA, 20 nt, Homo sapiens
aauauuuauuauuuucaccu

SEQ ID NO: 25008 - RNA, 20 nt, Homo sapiens
guguuggaaaaugugcaaua

SEQ ID NO: 25009 - RNA, 21 nt, Homo sapiens
acagcucugcauacucauuag

SEQ ID NO: 25010 - RNA, 13 nt, Homo sapiens
auuauagaaugga

SEQ ID NO: 25011 - RNA, 17 nt, Homo sapiens
agacagcaggucucaug

SEQ ID NO: 25012 - RNA, 14 nt, Homo sapiens
ggucucgaacugcu

SEQ ID NO: 25013 - RNA, 19 nt, Homo sapiens
agcuguggccagcuuguua

SEQ ID NO: 25014 - RNA, 17 nt, Homo sapiens
ccaaacagaacuaugga

SEQ ID NO: 25015 - RNA, 11 nt, Homo sapiens
uuacucugaag

SEQ ID NO: 25016 - RNA, 17 nt, Homo sapiens
uuguaccgcaaugugac

SEQ ID NO: 25017 - RNA, 23 nt, Homo sapiens
gugauucccuccugcuacucugu

SEQ ID NO: 25018 - RNA, 19 nt, Homo sapiens
gucagugcccaacuguuau

SEQ ID NO: 25019 - RNA, 16 nt, Homo sapiens
ugaaaaugaauaucua

SEQ ID NO: 25020 - RNA, 21 nt, Homo sapiens
uauagugucuugggaauuuuc

SEQ ID NO: 25021 - RNA, 16 nt, Homo sapiens
caaguuguguuugaua

SEQ ID NO: 25022 - RNA, 15 nt, Homo sapiens
uggcauuuucacuuu

SEQ ID NO: 25023 - RNA, 21 nt, Homo sapiens
gauagguuaccaguaacggaa

SEQ ID NO: 25024 - RNA, 19 nt, Homo sapiens
aauucuauuacgugcaaua

SEQ ID NO: 25025 - RNA, 23 nt, Homo sapiens
aaaucggaucuggggcucuggga

SEQ ID NO: 25026 - RNA, 20 nt, Homo sapiens
uccuuccuuaucacugacac

SEQ ID NO: 25027 - RNA, 14 nt, Homo sapiens
uuacagagacagaa

SEQ ID NO: 25028 - RNA, 13 nt, Homo sapiens
auuacgugcaaua

SEQ ID NO: 25029 - RNA, 20 nt, Homo sapiens
uagaauaauacuagucuuau

SEQ ID NO: 25030 - RNA, 14 nt, Homo sapiens
gcuggagugcagug

SEQ ID NO: 25031 - RNA, 20 nt, Homo sapiens
gaugggagaaucacuugaac

SEQ ID NO: 25032 - RNA, 12 nt, Homo sapiens
gauuucauucaa

SEQ ID NO: 25033 - RNA, 17 nt, Homo sapiens
ucuggacuuuccagaga

SEQ ID NO: 25034 - RNA, 22 nt, Homo sapiens
ugaaaaaaaauuuuauaguguc

SEQ ID NO: 25035 - RNA, 13 nt, Homo sapiens
acuagauacugaa

SEQ ID NO: 25036 - RNA, 12 nt, Homo sapiens
aaaagccaaaaa

SEQ ID NO: 25037 - RNA, 18 nt, Homo sapiens
gcuugaaauagugucuga

SEQ ID NO: 25038 - RNA, 12 nt, Homo sapiens
aacccugucucu

SEQ ID NO: 25039 - RNA, 15 nt, Homo sapiens
aguucugucuggacu

SEQ ID NO: 25040 - RNA, 17 nt, Homo sapiens
ccaugugauuacccucu

SEQ ID NO: 25041 - RNA, 18 nt, Homo sapiens
guuggaaaaugugcaaua

SEQ ID NO: 25042 - RNA, 10 nt, Homo sapiens
ggggcuuccu

SEQ ID NO: 25043 - RNA, 17 nt, Homo sapiens
cuuaaaaucuaauucaa

SEQ ID NO: 25044 - RNA, 21 nt, Homo sapiens
cuggcucccuggaagagauca

SEQ ID NO: 25045 - RNA, 17 nt, Homo sapiens
ugaugauuaauucaccu

SEQ ID NO: 25046 - RNA, 20 nt, Homo sapiens
cugaagggcaucaugcaucu

SEQ ID NO: 25047 - RNA, 15 nt, Homo sapiens
gacaacugugacugu

SEQ ID NO: 25048 - RNA, 14 nt, Homo sapiens
agauaauaugagaa

SEQ ID NO: 25049 - RNA, 18 nt, Homo sapiens
uggaauauguaaauagaa

SEQ ID NO: 25050 - RNA, 21 nt, Homo sapiens
uaauuuaucuugucucugggc

SEQ ID NO: 25051 - RNA, 19 nt, Homo sapiens
caaauucuguuucuugaga

SEQ ID NO: 25052 - RNA, 18 nt, Homo sapiens
aguuuaugcauacaguaa

SEQ ID NO: 25053 - RNA, 18 nt, Homo sapiens
uacagagaaaagacauaa

SEQ ID NO: 25054 - RNA, 19 nt, Homo sapiens
aagcuguuuccauagggug

SEQ ID NO: 25055 - RNA, 14 nt, Homo sapiens
aaucagaucauuuc

SEQ ID NO: 25056 - RNA, 19 nt, Homo sapiens
cugugucaguggaugcugc

SEQ ID NO: 25057 - RNA, 19 nt, Homo sapiens
gagccaccaaacccggccu

SEQ ID NO: 25058 - RNA, 17 nt, Homo sapiens
gaucucacaagcacuuu

SEQ ID NO: 25059 - RNA, 19 nt, Homo sapiens
acauaagcaaagacuauga

SEQ ID NO: 25060 - RNA, 19 nt, Homo sapiens
auucuauuacgugcaauac

SEQ ID NO: 25061 - RNA, 18 nt, Homo sapiens
ccuuuggaugcacuuuau

SEQ ID NO: 25062 - RNA, 17 nt, Homo sapiens
aggaaaaucugcacugu

SEQ ID NO: 25063 - RNA, 16 nt, Homo sapiens
aacggaacaguaucca

SEQ ID NO: 25064 - RNA, 17 nt, Homo sapiens
auauaaauuuucccaaa

SEQ ID NO: 25065 - RNA, 13 nt, Homo sapiens
aaauagugucuga

SEQ ID NO: 25066 - RNA, 12 nt, Homo sapiens
uugaauccagaa

SEQ ID NO: 25067 - RNA, 14 nt, Homo sapiens
caugaaaagauuau

SEQ ID NO: 25068 - RNA, 23 nt, Homo sapiens
auuggacuuaaaaucuaauucaa

SEQ ID NO: 25069 - RNA, 21 nt, Homo sapiens
ucacaagugaaaaacauccag

SEQ ID NO: 25070 - RNA, 23 nt, Homo sapiens
cuaagugaaauaagccagacauc

SEQ ID NO: 25071 - RNA, 14 nt, Homo sapiens
auuugagacaggga

SEQ ID NO: 25072 - RNA, 14 nt, Homo sapiens
aaaugagcaaaagu

SEQ ID NO: 25073 - RNA, 15 nt, Homo sapiens
uauccugugacuguc

SEQ ID NO: 25074 - RNA, 12 nt, Homo sapiens
auacagugucuu

SEQ ID NO: 25075 - RNA, 20 nt, Homo sapiens
acaugauccugcaauuccac

SEQ ID NO: 25076 - RNA, 15 nt, Homo sapiens
uauuuauugcugaau

SEQ ID NO: 25077 - RNA, 13 nt, Homo sapiens
augcacacagugc

SEQ ID NO: 25078 - RNA, 14 nt, Homo sapiens
caauauccuaauaa

SEQ ID NO: 25079 - RNA, 21 nt, Homo sapiens
cuguaaucccagcacuuuggg

SEQ ID NO: 25080 - RNA, 19 nt, Homo sapiens
uggaucucacaagcacuuu

SEQ ID NO: 25081 - RNA, 14 nt, Homo sapiens
caccacgcccagcu

SEQ ID NO: 25082 - RNA, 17 nt, Homo sapiens
agaaggauguacauuuc

SEQ ID NO: 25083 - RNA, 11 nt, Homo sapiens
aagucuuccau

SEQ ID NO: 25084 - RNA, 16 nt, Homo sapiens
uuuauuaccucugaua

SEQ ID NO: 25085 - RNA, 19 nt, Homo sapiens
augggagaaucacuugaac

SEQ ID NO: 25086 - RNA, 14 nt, Homo sapiens
gcugcucugugguc

SEQ ID NO: 25087 - RNA, 21 nt, Homo sapiens
agcacuuuaacacagugucug

SEQ ID NO: 25088 - RNA, 19 nt, Homo sapiens
ugaaagcagggacuugaac

SEQ ID NO: 25089 - RNA, 19 nt, Homo sapiens
guuuuuccacuacugcuac

SEQ ID NO: 25090 - RNA, 14 nt, Homo sapiens
uggagacaccacca

SEQ ID NO: 25091 - RNA, 13 nt, Homo sapiens
aaaacucauuucc

SEQ ID NO: 25092 - RNA, 17 nt, Homo sapiens
cuaaccagccuggucaa

SEQ ID NO: 25093 - RNA, 15 nt, Homo sapiens
aauagugucugauga

SEQ ID NO: 25094 - RNA, 19 nt, Homo sapiens
ugcuggcuuaaaauguaau

SEQ ID NO: 25095 - RNA, 18 nt, Homo sapiens
cagaaagcagaacaguga

SEQ ID NO: 25096 - RNA, 16 nt, Homo sapiens
uuccuuaucacugaca

SEQ ID NO: 25097 - RNA, 19 nt, Homo sapiens
augucagacagaacuugaa

SEQ ID NO: 25098 - RNA, 22 nt, Homo sapiens
aauuuucaaaaucaaauuccag

SEQ ID NO: 25099 - RNA, 23 nt, Homo sapiens
aaucugaggccuccucucucagu

SEQ ID NO: 25100 - RNA, 17 nt, Homo sapiens
uguguuuauuucacuug

SEQ ID NO: 25101 - RNA, 19 nt, Homo sapiens
aucaauagaaggauguaca

SEQ ID NO: 25102 - RNA, 22 nt, Homo sapiens
aagaguggguuucacaagugaa

SEQ ID NO: 25103 - RNA, 12 nt, Homo sapiens
gacuugaaccca

SEQ ID NO: 25104 - RNA, 16 nt, Homo sapiens
agauuucaugccuggu

SEQ ID NO: 25105 - RNA, 14 nt, Homo sapiens
aagccucaugucca

SEQ ID NO: 25106 - RNA, 16 nt, Homo sapiens
cacaaccacucauuca

SEQ ID NO: 25107 - RNA, 15 nt, Homo sapiens
cuuuccagagaccag

SEQ ID NO: 25108 - RNA, 18 nt, Homo sapiens
aauuuauucaauuccucu

SEQ ID NO: 25109 - RNA, 16 nt, Homo sapiens
cauuguggucacagga

SEQ ID NO: 25110 - RNA, 20 nt, Homo sapiens
acagagcaagacucugucuc

SEQ ID NO: 25111 - RNA, 17 nt, Homo sapiens
cuguaaucccagcacuu

SEQ ID NO: 25112 - RNA, 19 nt, Homo sapiens
cauuugcgaaugguuccau

SEQ ID NO: 25113 - RNA, 21 nt, Homo sapiens
agauguagauaaacucagaaa

SEQ ID NO: 25114 - RNA, 16 nt, Homo sapiens
uuugugacuuuccuaa

SEQ ID NO: 25115 - RNA, 15 nt, Homo sapiens
uaacuggcaguuuuc

SEQ ID NO: 25116 - RNA, 13 nt, Homo sapiens
aagcaacaucuag

SEQ ID NO: 25117 - RNA, 18 nt, Homo sapiens
uucaaacuaauagaauua

SEQ ID NO: 25118 - RNA, 20 nt, Homo sapiens
gacuauuauagaauggaacu

SEQ ID NO: 25119 - RNA, 19 nt, Homo sapiens
uuuguagccacuucacuuu

SEQ ID NO: 25120 - RNA, 13 nt, Homo sapiens
auagcaucucagg

SEQ ID NO: 25121 - RNA, 16 nt, Homo sapiens
uguaaaauggagacac

SEQ ID NO: 25122 - RNA, 21 nt, Homo sapiens
auuuuuuaugaaacauuacag

SEQ ID NO: 25123 - RNA, 19 nt, Homo sapiens
uaaauguaucuuauucaca

SEQ ID NO: 25124 - RNA, 20 nt, Homo sapiens
augugauuacccucuggguc

SEQ ID NO: 25125 - RNA, 11 nt, Homo sapiens
aaaggugacca

SEQ ID NO: 25126 - RNA, 16 nt, Homo sapiens
uaggaagagaaaccag

SEQ ID NO: 25127 - RNA, 18 nt, Homo sapiens
ccaagaaugagaagaaug

SEQ ID NO: 25128 - RNA, 17 nt, Homo sapiens
uauugcugaaugacuac

SEQ ID NO: 25129 - RNA, 20 nt, Homo sapiens
gauugugccccugcacucca

SEQ ID NO: 25130 - RNA, 20 nt, Homo sapiens
uaaugaaaaugaauaucuau

SEQ ID NO: 25131 - RNA, 19 nt, Homo sapiens
caucuuggucacauacaau

SEQ ID NO: 25132 - RNA, 15 nt, Homo sapiens
aucuuguuuuuccac

SEQ ID NO: 25133 - RNA, 20 nt, Homo sapiens
agcaaaauggauaugacaca

SEQ ID NO: 25134 - RNA, 10 nt, Homo sapiens
aggcugcaaa

SEQ ID NO: 25135 - RNA, 14 nt, Homo sapiens
uaggcuauucacaa

SEQ ID NO: 25136 - RNA, 21 nt, Homo sapiens
cagagaaaauaaaagcacuua

SEQ ID NO: 25137 - RNA, 20 nt, Homo sapiens
ucccuuuuacauacugcugu

SEQ ID NO: 25138 - RNA, 18 nt, Homo sapiens
uuuccacuacugcuacca

SEQ ID NO: 25139 - RNA, 17 nt, Homo sapiens
uguuggaaaaugugcaa

SEQ ID NO: 25140 - RNA, 16 nt, Homo sapiens
cuggcacuugggacaa

SEQ ID NO: 25141 - RNA, 22 nt, Homo sapiens
cacccuugccauggagguuaag

SEQ ID NO: 25142 - RNA, 19 nt, Homo sapiens
uguaaucccagcacuuugg

SEQ ID NO: 25143 - RNA, 13 nt, Homo sapiens
aacaaagaagaca

SEQ ID NO: 25144 - RNA, 16 nt, Homo sapiens
caucuguaaaauggag

SEQ ID NO: 25145 - RNA, 16 nt, Homo sapiens
auuuuuaugugcaaua

SEQ ID NO: 25146 - RNA, 12 nt, Homo sapiens
acugugacugua

SEQ ID NO: 25147 - RNA, 18 nt, Homo sapiens
uucccugaccucccucua

SEQ ID NO: 25148 - RNA, 20 nt, Homo sapiens
uuaugaaccuuuacauccag

SEQ ID NO: 25149 - RNA, 16 nt, Homo sapiens
aaacauccagauacac

SEQ ID NO: 25150 - RNA, 23 nt, Homo sapiens
auuucacuugaugauacaaugaa

SEQ ID NO: 25151 - RNA, 14 nt, Homo sapiens
gcuuccuaacugcu

SEQ ID NO: 25152 - RNA, 11 nt, Homo sapiens
augauguuucg

SEQ ID NO: 25153 - RNA, 14 nt, Homo sapiens
acugucucacuuaa

SEQ ID NO: 25154 - RNA, 19 nt, Homo sapiens
auccagauagguuaccagu

SEQ ID NO: 25155 - RNA, 20 nt, Homo sapiens
cccucugggucucagugucc

SEQ ID NO: 25156 - RNA, 19 nt, Homo sapiens
aggagaaacuggaacucuc

SEQ ID NO: 25157 - RNA, 14 nt, Homo sapiens
aacagaacuaugga

SEQ ID NO: 25158 - RNA, 16 nt, Homo sapiens
aacucagaaacaucag

SEQ ID NO: 25159 - RNA, 19 nt, Homo sapiens
ugaacaaauuuacagagac

SEQ ID NO: 25160 - RNA, 12 nt, Homo sapiens
ccaaacuggagc

SEQ ID NO: 25161 - RNA, 16 nt, Homo sapiens
cugauacccuuugaaa

SEQ ID NO: 25162 - RNA, 21 nt, Homo sapiens
ucaauucuauuacgugcaaua

SEQ ID NO: 25163 - RNA, 15 nt, Homo sapiens
cauaaagucagugcc

SEQ ID NO: 25164 - RNA, 19 nt, Homo sapiens
caccacccuugccauggag

SEQ ID NO: 25165 - RNA, 19 nt, Homo sapiens
ucaucuuggucacauacaa

SEQ ID NO: 25166 - RNA, 12 nt, Homo sapiens
cauuuucacuuu

SEQ ID NO: 25167 - RNA, 14 nt, Homo sapiens
aagucuuccauaga

SEQ ID NO: 25168 - RNA, 23 nt, Homo sapiens
uagaauauuuauuaccucugaua

SEQ ID NO: 25169 - RNA, 16 nt, Homo sapiens
gcugaggcaagagaau

SEQ ID NO: 25170 - RNA, 13 nt, Homo sapiens
accgcaaugugac

SEQ ID NO: 25171 - RNA, 19 nt, Homo sapiens
agaauugcuugaacccagg

SEQ ID NO: 25172 - RNA, 21 nt, Homo sapiens
aaaaaugguuuaaauggucaa

SEQ ID NO: 25173 - RNA, 13 nt, Homo sapiens
gcugagcagucag

SEQ ID NO: 25174 - RNA, 10 nt, Homo sapiens
uuugccaugc

SEQ ID NO: 25175 - RNA, 14 nt, Homo sapiens
uggaacucaaggaa

SEQ ID NO: 25176 - RNA, 19 nt, Homo sapiens
ugauacuuuuuucauuauu

SEQ ID NO: 25177 - RNA, 13 nt, Homo sapiens
auguaacugcauu

SEQ ID NO: 25178 - RNA, 15 nt, Homo sapiens
acauagcaucucagg

SEQ ID NO: 25179 - RNA, 13 nt, Homo sapiens
gaaauaagccaga

SEQ ID NO: 25180 - RNA, 17 nt, Homo sapiens
uuguaacuuaugaaccu

SEQ ID NO: 25181 - RNA, 11 nt, Homo sapiens
auuugcacuau

SEQ ID NO: 25182 - RNA, 21 nt, Homo sapiens
ccaacagaagcuuccauucca

SEQ ID NO: 25183 - RNA, 19 nt, Homo sapiens
auuuucaaaaucaaauucc

SEQ ID NO: 25184 - RNA, 15 nt, Homo sapiens
ucucugccuugguau

SEQ ID NO: 25185 - RNA, 12 nt, Homo sapiens
aaaaagccaaaa

SEQ ID NO: 25186 - RNA, 16 nt, Homo sapiens
agccacuucacuuuuu

SEQ ID NO: 25187 - RNA, 12 nt, Homo sapiens
cgacaguuuucc

SEQ ID NO: 25188 - RNA, 18 nt, Homo sapiens
cccuuuuacauacugcug

SEQ ID NO: 25189 - RNA, 16 nt, Homo sapiens
cuggagugcaguggcg

SEQ ID NO: 25190 - RNA, 21 nt, Homo sapiens
uuaaaaaaaaaccugagcccc

SEQ ID NO: 25191 - RNA, 22 nt, Homo sapiens
cauaaauuagaggucuccaaaa

SEQ ID NO: 25192 - RNA, 16 nt, Homo sapiens
gugccuguaaucacag

SEQ ID NO: 25193 - RNA, 18 nt, Homo sapiens
cuaauagaauuaauggaa

SEQ ID NO: 25194 - RNA, 13 nt, Homo sapiens
ggagaaacuggaa

SEQ ID NO: 25195 - RNA, 22 nt, Homo sapiens
ugauucccuccugcuacucugu

SEQ ID NO: 25196 - RNA, 11 nt, Homo sapiens
gcaacccaaau

SEQ ID NO: 25197 - RNA, 17 nt, Homo sapiens
auugaaaggcauucucu

SEQ ID NO: 25198 - RNA, 13 nt, Homo sapiens
ugagcgacaguga

SEQ ID NO: 25199 - RNA, 18 nt, Homo sapiens
gagcuugaaauagugucu

SEQ ID NO: 25200 - RNA, 18 nt, Homo sapiens
uacauuuccaaauucaca

SEQ ID NO: 25201 - RNA, 23 nt, Homo sapiens
aguuguaccgcaaugugacuuaa

SEQ ID NO: 25202 - RNA, 15 nt, Homo sapiens
aauucgcugcaaccu

SEQ ID NO: 25203 - RNA, 22 nt, Homo sapiens
aaugacacuagcuaauaucaau

SEQ ID NO: 25204 - RNA, 16 nt, Homo sapiens
ugagugccuguaauca

SEQ ID NO: 25205 - RNA, 14 nt, Homo sapiens
aguacagacuuuuu

SEQ ID NO: 25206 - RNA, 18 nt, Homo sapiens
aaaagcaguaacugacaa

SEQ ID NO: 25207 - RNA, 13 nt, Homo sapiens
ccuuuuacauacu

SEQ ID NO: 25208 - RNA, 21 nt, Homo sapiens
cagagacgggguuugccaugc

SEQ ID NO: 25209 - RNA, 22 nt, Homo sapiens
auaagugaagugauacuaucca

SEQ ID NO: 25210 - RNA, 14 nt, Homo sapiens
ccauuguggucaca

SEQ ID NO: 25211 - RNA, 17 nt, Homo sapiens
aucagcauuuuacuacu

SEQ ID NO: 25212 - RNA, 17 nt, Homo sapiens
uauuuuauaucaauuua

SEQ ID NO: 25213 - RNA, 16 nt, Homo sapiens
cacagcugaacuuguu

SEQ ID NO: 25214 - RNA, 12 nt, Homo sapiens
agcaucucagga

SEQ ID NO: 25215 - RNA, 15 nt, Homo sapiens
gacuggccugcugga

SEQ ID NO: 25216 - RNA, 16 nt, Homo sapiens
caaaauggauaugaca

SEQ ID NO: 25217 - RNA, 11 nt, Homo sapiens
aaaagacauaa

SEQ ID NO: 25218 - RNA, 15 nt, Homo sapiens
auauccugugacugu

SEQ ID NO: 25219 - RNA, 19 nt, Homo sapiens
gcuuuccguggcacugcau

SEQ ID NO: 25220 - RNA, 19 nt, Homo sapiens
ccagugagacagcucugca

SEQ ID NO: 25221 - RNA, 14 nt, Homo sapiens
gcagggacuugaac

SEQ ID NO: 25222 - RNA, 20 nt, Homo sapiens
ugagagcccuucaugcauuu

SEQ ID NO: 25223 - RNA, 15 nt, Homo sapiens
gaccugacagcccaa

SEQ ID NO: 25224 - RNA, 21 nt, Homo sapiens
uccugguuccuaggugagcag

SEQ ID NO: 25225 - RNA, 17 nt, Homo sapiens
gaaugagaagaaugacu

SEQ ID NO: 25226 - RNA, 17 nt, Homo sapiens
aggauagagugggacag

SEQ ID NO: 25227 - RNA, 20 nt, Homo sapiens
gagugacuuaguguacauga

SEQ ID NO: 25228 - RNA, 18 nt, Homo sapiens
agacgggguuugccaugc

SEQ ID NO: 25229 - RNA, 16 nt, Homo sapiens
guaacuggcaguuuuc

SEQ ID NO: 25230 - RNA, 15 nt, Homo sapiens
gauaucaugccccug

SEQ ID NO: 25231 - RNA, 17 nt, Homo sapiens
caucuuggucacauaca

SEQ ID NO: 25232 - RNA, 14 nt, Homo sapiens
gaaagaggaaugaa

SEQ ID NO: 25233 - RNA, 17 nt, Homo sapiens
auuugccaauuuacuuu

SEQ ID NO: 25234 - RNA, 17 nt, Homo sapiens
cccuucauguacaucca

SEQ ID NO: 25235 - RNA, 18 nt, Homo sapiens
ucugauuuuccuggacag

SEQ ID NO: 25236 - RNA, 15 nt, Homo sapiens
caaggcuuuaucuca

SEQ ID NO: 25237 - RNA, 19 nt, Homo sapiens
gcucccuggaagagaucaa

SEQ ID NO: 25238 - RNA, 20 nt, Homo sapiens
cacagcugaacuuguugaga

SEQ ID NO: 25239 - RNA, 20 nt, Homo sapiens
ucuugggaauuuucuuccaa

SEQ ID NO: 25240 - RNA, 18 nt, Homo sapiens
aagccaucggagcugcua

SEQ ID NO: 25241 - RNA, 19 nt, Homo sapiens
uuaaaauuaucaauaucua

SEQ ID NO: 25242 - RNA, 13 nt, Homo sapiens
agacucugucuca

SEQ ID NO: 25243 - RNA, 18 nt, Homo sapiens
ucucgaacugcuggauuc

SEQ ID NO: 25244 - RNA, 14 nt, Homo sapiens
aagaaauucugcaa

SEQ ID NO: 25245 - RNA, 15 nt, Homo sapiens
ucagggagcauuuau

SEQ ID NO: 25246 - RNA, 20 nt, Homo sapiens
uaucuaauauauaugaauaa

SEQ ID NO: 25247 - RNA, 20 nt, Homo sapiens
cuagcaaauguuaugcauaa

SEQ ID NO: 25248 - RNA, 18 nt, Homo sapiens
guguuuuucacauuugcg

SEQ ID NO: 25249 - RNA, 23 nt, Homo sapiens
agauuuuguuuuuaaacuggaaa

SEQ ID NO: 25250 - RNA, 23 nt, Homo sapiens
aaagcagggacuugaacccauau

SEQ ID NO: 25251 - RNA, 20 nt, Homo sapiens
gcccaucuccgucucccaaa

SEQ ID NO: 25252 - RNA, 18 nt, Homo sapiens
aaguuuaugcauacagua

SEQ ID NO: 25253 - RNA, 14 nt, Homo sapiens
uacaaggcuuuauc

SEQ ID NO: 25254 - RNA, 20 nt, Homo sapiens
caacuugaauaauacaccag

SEQ ID NO: 25255 - RNA, 14 nt, Homo sapiens
aucaaccaaaugga

SEQ ID NO: 25256 - RNA, 21 nt, Homo sapiens
ugaauaaaguguaaguucaca

SEQ ID NO: 25257 - RNA, 15 nt, Homo sapiens
uagccacuucacuuu

SEQ ID NO: 25258 - RNA, 19 nt, Homo sapiens
acaagacccaaaaggcaga

SEQ ID NO: 25259 - RNA, 14 nt, Homo sapiens
uaaaguacagacuu

SEQ ID NO: 25260 - RNA, 19 nt, Homo sapiens
auucacaagacccaaaagg

SEQ ID NO: 25261 - RNA, 14 nt, Homo sapiens
gaagcaacccaaau

SEQ ID NO: 25262 - RNA, 23 nt, Homo sapiens
aagauguagaggagaaacuggaa

SEQ ID NO: 25263 - RNA, 19 nt, Homo sapiens
aaguauccuucagccugaa

SEQ ID NO: 25264 - RNA, 19 nt, Homo sapiens
cugagcagucagaagaccu

SEQ ID NO: 25265 - RNA, 21 nt, Homo sapiens
uuauuaccucugauaccucaa

SEQ ID NO: 25266 - RNA, 22 nt, Homo sapiens
aagagaauauuagcuuuacugu

SEQ ID NO: 25267 - RNA, 19 nt, Homo sapiens
acagccaggcggcuggaau

SEQ ID NO: 25268 - RNA, 18 nt, Homo sapiens
guucuucuuggucucagu

SEQ ID NO: 25269 - RNA, 12 nt, Homo sapiens
uuaccucugaua

SEQ ID NO: 25270 - RNA, 23 nt, Homo sapiens
aagaaauucugcaagcuuuucaa

SEQ ID NO: 25271 - RNA, 20 nt, Homo sapiens
cagagguugcagugagccga

SEQ ID NO: 25272 - RNA, 19 nt, Homo sapiens
cuacuugggaggcugaggc

SEQ ID NO: 25273 - RNA, 14 nt, Homo sapiens
agugggacaguucc

SEQ ID NO: 25274 - RNA, 22 nt, Homo sapiens
cccccauuguggucacaggaag

SEQ ID NO: 25275 - RNA, 22 nt, Homo sapiens
ccucaucuguaaaauggagaca

SEQ ID NO: 25276 - RNA, 16 nt, Homo sapiens
acaucaguuacucuga

SEQ ID NO: 25277 - RNA, 15 nt, Homo sapiens
gcccuucaugcauuu

SEQ ID NO: 25278 - RNA, 23 nt, Homo sapiens
gcaaaugcuguauucuucuuugg

SEQ ID NO: 25279 - RNA, 16 nt, Homo sapiens
gaucucacaagcacuu

SEQ ID NO: 25280 - RNA, 22 nt, Homo sapiens
uuaauaaaccauuuuuacuugg

SEQ ID NO: 25281 - RNA, 14 nt, Homo sapiens
auaaauggacaaau

SEQ ID NO: 25282 - RNA, 19 nt, Homo sapiens
ugaacacuuauaagugaag

SEQ ID NO: 25283 - RNA, 11 nt, Homo sapiens
ccuugagaaac

SEQ ID NO: 25284 - RNA, 19 nt, Homo sapiens
cacuuuaacacagugucug

SEQ ID NO: 25285 - RNA, 18 nt, Homo sapiens
uguucacuuauugacuau

SEQ ID NO: 25286 - RNA, 15 nt, Homo sapiens
uuuccaaauucacaa

SEQ ID NO: 25287 - RNA, 21 nt, Homo sapiens
aacucaaggaaaucuguguca

SEQ ID NO: 25288 - RNA, 19 nt, Homo sapiens
accuuuggaugcacuuuau

SEQ ID NO: 25289 - RNA, 23 nt, Homo sapiens
gagcuugaaauagugucugauga

SEQ ID NO: 25290 - RNA, 17 nt, Homo sapiens
gacgggguuugccaugc

SEQ ID NO: 25291 - RNA, 16 nt, Homo sapiens
uccugagaccagccaa

SEQ ID NO: 25292 - RNA, 16 nt, Homo sapiens
agccagccuugcuccu

SEQ ID NO: 25293 - RNA, 15 nt, Homo sapiens
uguguucaguacaau

SEQ ID NO: 25294 - RNA, 20 nt, Homo sapiens
gcaaccuccaccuucugggu

SEQ ID NO: 25295 - RNA, 12 nt, Homo sapiens
cagccaaccugg

SEQ ID NO: 25296 - RNA, 19 nt, Homo sapiens
acuuuaacacagugucugg

SEQ ID NO: 25297 - RNA, 23 nt, Homo sapiens
guauuuuauuacaucuuucacau

SEQ ID NO: 25298 - RNA, 16 nt, Homo sapiens
gucucaguccaugaag

SEQ ID NO: 25299 - RNA, 13 nt, Homo sapiens
uagaauuuauuca

SEQ ID NO: 25300 - RNA, 12 nt, Homo sapiens
aucuacacucca

SEQ ID NO: 25301 - RNA, 18 nt, Homo sapiens
uucugucuggacuuucca

SEQ ID NO: 25302 - RNA, 15 nt, Homo sapiens
gaagcuuccauucca

SEQ ID NO: 25303 - RNA, 17 nt, Homo sapiens
cuguaaaauggagacac

SEQ ID NO: 25304 - RNA, 17 nt, Homo sapiens
acaaaccucaagccagc

SEQ ID NO: 25305 - RNA, 12 nt, Homo sapiens
ugcaauuccacu

SEQ ID NO: 25306 - RNA, 14 nt, Homo sapiens
ucucacaagcacuu

SEQ ID NO: 25307 - RNA, 14 nt, Homo sapiens
cuuggucucagugu

SEQ ID NO: 25308 - RNA, 16 nt, Homo sapiens
uuuauaaauggacaaa

SEQ ID NO: 25309 - RNA, 23 nt, Homo sapiens
aaucugagccagugcuuuaaugg

SEQ ID NO: 25310 - RNA, 19 nt, Homo sapiens
uugaaucccuuaaacucag

SEQ ID NO: 25311 - RNA, 17 nt, Homo sapiens
aaauucacaaguugugu

SEQ ID NO: 25312 - RNA, 22 nt, Homo sapiens
gaagaguggguuucacaaguga

SEQ ID NO: 25313 - RNA, 21 nt, Homo sapiens
guuauuuagggaacugcuuga

SEQ ID NO: 25314 - RNA, 12 nt, Homo sapiens
uuauuaccucug

SEQ ID NO: 25315 - RNA, 23 nt, Homo sapiens
gaugaaaacauagcaucucagga

SEQ ID NO: 25316 - RNA, 18 nt, Homo sapiens
ggacuugggcgggacaca

SEQ ID NO: 25317 - RNA, 17 nt, Homo sapiens
aauauuugcaagacaua

SEQ ID NO: 25318 - RNA, 15 nt, Homo sapiens
cuucuuggucucagu

SEQ ID NO: 25319 - RNA, 16 nt, Homo sapiens
cugccccugagcccau

SEQ ID NO: 25320 - RNA, 15 nt, Homo sapiens
gaggagaaacuggaa

SEQ ID NO: 25321 - RNA, 20 nt, Homo sapiens
aggcuggagugcaguggcgc

SEQ ID NO: 25322 - RNA, 23 nt, Homo sapiens
agaauuuucaaaaucaaauucca

SEQ ID NO: 25323 - RNA, 13 nt, Homo sapiens
aucaggacgagaa

SEQ ID NO: 25324 - RNA, 20 nt, Homo sapiens
aguuaggcuauucacaacca

SEQ ID NO: 25325 - RNA, 21 nt, Homo sapiens
uuguuuuaaaauuaaagcuaa

SEQ ID NO: 25326 - RNA, 18 nt, Homo sapiens
ccaaacuggagcuugaaa

SEQ ID NO: 25327 - RNA, 22 nt, Homo sapiens
acaguuuucugcuuuaauuuca

SEQ ID NO: 25328 - RNA, 18 nt, Homo sapiens
accaccacccuugccaug

SEQ ID NO: 25329 - RNA, 22 nt, Homo sapiens
uucuauuacgugcaauacuuca

SEQ ID NO: 25330 - RNA, 14 nt, Homo sapiens
gcaaaugcuguauu

SEQ ID NO: 25331 - RNA, 15 nt, Homo sapiens
acaggcgugagccac

SEQ ID NO: 25332 - RNA, 13 nt, Homo sapiens
gcgcagccaugug

SEQ ID NO: 25333 - RNA, 18 nt, Homo sapiens
auuuguuaaaauuaucaa

SEQ ID NO: 25334 - RNA, 14 nt, Homo sapiens
aauuaacacaugau

SEQ ID NO: 25335 - RNA, 22 nt, Homo sapiens
uccuagcgcagccaugugauua

SEQ ID NO: 25336 - RNA, 22 nt, Homo sapiens
ugaauaaaguguaaguucacaa

SEQ ID NO: 25337 - RNA, 13 nt, Homo sapiens
aauauuguugaca

SEQ ID NO: 25338 - RNA, 14 nt, Homo sapiens
uaugacacaucucu

SEQ ID NO: 25339 - RNA, 14 nt, Homo sapiens
ugagcgacagugag

SEQ ID NO: 25340 - RNA, 19 nt, Homo sapiens
uguagauaaacucagaaau

SEQ ID NO: 25341 - RNA, 14 nt, Homo sapiens
gacgaaccuugaaa

SEQ ID NO: 25342 - RNA, 14 nt, Homo sapiens
uccuauauccugug

SEQ ID NO: 25343 - RNA, 16 nt, Homo sapiens
uuaugaaacauuacag

SEQ ID NO: 25344 - RNA, 22 nt, Homo sapiens
uacucugaagggcaucaugcau

SEQ ID NO: 25345 - RNA, 15 nt, Homo sapiens
caggaaaaucugcac

SEQ ID NO: 25346 - RNA, 22 nt, Homo sapiens
augugucaggugacccugauga

SEQ ID NO: 25347 - RNA, 21 nt, Homo sapiens
acaaaaaaagcauuguaacuu

SEQ ID NO: 25348 - RNA, 22 nt, Homo sapiens
aggcagcaggauagagugggac

SEQ ID NO: 25349 - RNA, 18 nt, Homo sapiens
guuccuucacauccugug

SEQ ID NO: 25350 - RNA, 19 nt, Homo sapiens
uguguggcauuuucacuuu

SEQ ID NO: 25351 - RNA, 15 nt, Homo sapiens
guagccacuucacuu

SEQ ID NO: 25352 - RNA, 13 nt, Homo sapiens
uuuuucauuauug

SEQ ID NO: 25353 - RNA, 18 nt, Homo sapiens
augcaaccuuuggaugca

SEQ ID NO: 25354 - RNA, 14 nt, Homo sapiens
agcagaacagugau

SEQ ID NO: 25355 - RNA, 16 nt, Homo sapiens
uggaaaaaaaggaaga

SEQ ID NO: 25356 - RNA, 14 nt, Homo sapiens
aaaccucaagccag

SEQ ID NO: 25357 - RNA, 21 nt, Homo sapiens
ugaaaacauagcaucucagga

SEQ ID NO: 25358 - RNA, 16 nt, Homo sapiens
cuucaugcauuugcac

SEQ ID NO: 25359 - RNA, 23 nt, Homo sapiens
guagaaaaagcaguaacugacaa

SEQ ID NO: 25360 - RNA, 17 nt, Homo sapiens
caaaacuucagacauag

SEQ ID NO: 25361 - RNA, 19 nt, Homo sapiens
aaaauauuuuuaugugcaa

SEQ ID NO: 25362 - RNA, 13 nt, Homo sapiens
aauggcaugucag

SEQ ID NO: 25363 - RNA, 18 nt, Homo sapiens
cagaaauuuaauucaugu

SEQ ID NO: 25364 - RNA, 16 nt, Homo sapiens
aaagcagggacuugaa

SEQ ID NO: 25365 - RNA, 19 nt, Homo sapiens
gggucucccucuguugcca

SEQ ID NO: 25366 - RNA, 19 nt, Homo sapiens
caagcuuuucaaaauugga

SEQ ID NO: 25367 - RNA, 19 nt, Homo sapiens
gguuugccaugcuggccag

SEQ ID NO: 25368 - RNA, 13 nt, Homo sapiens
ugcuaagugaaau

SEQ ID NO: 25369 - RNA, 16 nt, Homo sapiens
aacauuucaaaaggua

SEQ ID NO: 25370 - RNA, 15 nt, Homo sapiens
caagccucaugucca

SEQ ID NO: 25371 - RNA, 22 nt, Homo sapiens
ugccuggaucucacaagcacuu

SEQ ID NO: 25372 - RNA, 12 nt, Homo sapiens
uauauccuguga

SEQ ID NO: 25373 - RNA, 13 nt, Homo sapiens
caacugugacugu

SEQ ID NO: 25374 - RNA, 16 nt, Homo sapiens
uucaugcauuugcacu

SEQ ID NO: 25375 - RNA, 18 nt, Homo sapiens
aaccacuucauucuugaa

SEQ ID NO: 25376 - RNA, 21 nt, Homo sapiens
cuuccaaacagaacuauggaa

SEQ ID NO: 25377 - RNA, 18 nt, Homo sapiens
aaaucuacacuccaguga

SEQ ID NO: 25378 - RNA, 22 nt, Homo sapiens
aucuuuuauacagugucuuaca

SEQ ID NO: 25379 - RNA, 15 nt, Homo sapiens
ggaauuuucuuccaa

SEQ ID NO: 25380 - RNA, 16 nt, Homo sapiens
gugaaguauacuguau

SEQ ID NO: 25381 - RNA, 16 nt, Homo sapiens
aauaaaaugagcaaaa

SEQ ID NO: 25382 - RNA, 10 nt, Homo sapiens
cauacugcug

SEQ ID NO: 25383 - RNA, 20 nt, Homo sapiens
auugugccccugcacuccag

SEQ ID NO: 25384 - RNA, 14 nt, Homo sapiens
ugaugaauguuaaa

SEQ ID NO: 25385 - RNA, 19 nt, Homo sapiens
aaagcagggacuugaaccc

SEQ ID NO: 25386 - RNA, 21 nt, Homo sapiens
cucuauagacucuaggacaua

SEQ ID NO: 25387 - RNA, 17 nt, Homo sapiens
aguuacugccgguuuga

SEQ ID NO: 25388 - RNA, 22 nt, Homo sapiens
auuuuguuuuuaaacuggaaau

SEQ ID NO: 25389 - RNA, 18 nt, Homo sapiens
uaaaauuaucaauaucua

SEQ ID NO: 25390 - RNA, 16 nt, Homo sapiens
cuuccucagcuguaga

SEQ ID NO: 25391 - RNA, 19 nt, Homo sapiens
aaucaaauuccagaaugau

SEQ ID NO: 25392 - RNA, 18 nt, Homo sapiens
auaucaguccucuuucaa

SEQ ID NO: 25393 - RNA, 18 nt, Homo sapiens
ugauccugcaauuccacu

SEQ ID NO: 25394 - RNA, 17 nt, Homo sapiens
auccugugacugucuca

SEQ ID NO: 25395 - RNA, 17 nt, Homo sapiens
aggcuagaaccaccugc

SEQ ID NO: 25396 - RNA, 21 nt, Homo sapiens
cuuguuuuuccacuacugcua

SEQ ID NO: 25397 - RNA, 18 nt, Homo sapiens
gagacgggguuugccaug

SEQ ID NO: 25398 - RNA, 14 nt, Homo sapiens
ccgaagucuuccau

SEQ ID NO: 25399 - RNA, 16 nt, Homo sapiens
gaggcugaggcaagag

SEQ ID NO: 25400 - RNA, 15 nt, Homo sapiens
uggauucaagugauc

SEQ ID NO: 25401 - RNA, 22 nt, Homo sapiens
uguuagcaaaauggauaugaca

SEQ ID NO: 25402 - RNA, 13 nt, Homo sapiens
caauuccucuggg

SEQ ID NO: 25403 - RNA, 23 nt, Homo sapiens
ccuuaaacucagggagcauuuau

SEQ ID NO: 25404 - RNA, 22 nt, Homo sapiens
uaaaauauuuuuaugugcaaua

SEQ ID NO: 25405 - RNA, 22 nt, Homo sapiens
aguauaaauaaaaugagcaaaa

SEQ ID NO: 25406 - RNA, 19 nt, Homo sapiens
uagagaaauuugccaauuu

SEQ ID NO: 25407 - RNA, 18 nt, Homo sapiens
gaauaaauaaauguaucu

SEQ ID NO: 25408 - RNA, 17 nt, Homo sapiens
augaggaauauuugcaa

SEQ ID NO: 25409 - RNA, 21 nt, Homo sapiens
gugaccugacagcccaagggu

SEQ ID NO: 25410 - RNA, 16 nt, Homo sapiens
gacugucucacuuaau

SEQ ID NO: 25411 - RNA, 22 nt, Homo sapiens
ugucuugggaauuuucuuccaa

SEQ ID NO: 25412 - RNA, 22 nt, Homo sapiens
uccugagaccagccaaccuggg

SEQ ID NO: 25413 - RNA, 20 nt, Homo sapiens
cuacuugggaggcugaggca

SEQ ID NO: 25414 - RNA, 18 nt, Homo sapiens
ugccuugguauagcauau

SEQ ID NO: 25415 - RNA, 19 nt, Homo sapiens
agcuugaaauagugucuga

SEQ ID NO: 25416 - RNA, 19 nt, Homo sapiens
auuacgugcaauacuucaa

SEQ ID NO: 25417 - RNA, 18 nt, Homo sapiens
aguagauaugaggcauuu

SEQ ID NO: 25418 - RNA, 18 nt, Homo sapiens
uuguaaaauggugugacc

SEQ ID NO: 25419 - RNA, 13 nt, Homo sapiens
gagcgacagugag

SEQ ID NO: 25420 - RNA, 15 nt, Homo sapiens
ggauagagugggaca

SEQ ID NO: 25421 - RNA, 15 nt, Homo sapiens
agcugaauacauucu

SEQ ID NO: 25422 - RNA, 20 nt, Homo sapiens
ggaggcagagguugcaguga

SEQ ID NO: 25423 - RNA, 16 nt, Homo sapiens
uggguucaagcgauuc

SEQ ID NO: 25424 - RNA, 18 nt, Homo sapiens
uuaugaaacauuacaguu

SEQ ID NO: 25425 - RNA, 18 nt, Homo sapiens
cauagcagcuuauucaca

SEQ ID NO: 25426 - RNA, 16 nt, Homo sapiens
ucucgaacugcuggau

SEQ ID NO: 25427 - RNA, 11 nt, Homo sapiens
ugcaagcuuuu

SEQ ID NO: 25428 - RNA, 19 nt, Homo sapiens
cacuaaauugacacuuaaa

SEQ ID NO: 25429 - RNA, 12 nt, Homo sapiens
aaaaaagccaaa

SEQ ID NO: 25430 - RNA, 14 nt, Homo sapiens
uggccagaagucaa

SEQ ID NO: 25431 - RNA, 16 nt, Homo sapiens
uccccaaccacuucau

SEQ ID NO: 25432 - RNA, 23 nt, Homo sapiens
aucggaucuggggcucugggaua

SEQ ID NO: 25433 - RNA, 19 nt, Homo sapiens
gccaaggcuggagugcagu

SEQ ID NO: 25434 - RNA, 15 nt, Homo sapiens
gcagauaaacaguag

SEQ ID NO: 25435 - RNA, 17 nt, Homo sapiens
caaacagaacuauggaa

SEQ ID NO: 25436 - RNA, 19 nt, Homo sapiens
augaauuuuuuucaucuuc

SEQ ID NO: 25437 - RNA, 13 nt, Homo sapiens
gugacuggccugc

SEQ ID NO: 25438 - RNA, 12 nt, Homo sapiens
gagcgacaguga

SEQ ID NO: 25439 - RNA, 20 nt, Homo sapiens
cauauguuuuuguaaguuua

SEQ ID NO: 25440 - RNA, 17 nt, Homo sapiens
ggcuuuagggaccugcu

SEQ ID NO: 25441 - RNA, 20 nt, Homo sapiens
gugauuacccucugggucuc

SEQ ID NO: 25442 - RNA, 13 nt, Homo sapiens
uaaguaauuucag

SEQ ID NO: 25443 - RNA, 16 nt, Homo sapiens
auucacaagacccaaa

SEQ ID NO: 25444 - RNA, 18 nt, Homo sapiens
caagugauccgcccaucu

SEQ ID NO: 25445 - RNA, 22 nt, Homo sapiens
gaaagcuguggccagcuuguua

SEQ ID NO: 25446 - RNA, 21 nt, Homo sapiens
uugaagaugcuuguauuuuac

SEQ ID NO: 25447 - RNA, 16 nt, Homo sapiens
aauagugucugaugaa

SEQ ID NO: 25448 - RNA, 14 nt, Homo sapiens
ugcauuugcacuau

SEQ ID NO: 25449 - RNA, 23 nt, Homo sapiens
aaggcuuagacccucaugcugcc

SEQ ID NO: 25450 - RNA, 14 nt, Homo sapiens
ucaccuuccagugu

SEQ ID NO: 25451 - RNA, 17 nt, Homo sapiens
auuuauuaccucugaua

SEQ ID NO: 25452 - RNA, 13 nt, Homo sapiens
acccuugccaugg

SEQ ID NO: 25453 - RNA, 21 nt, Homo sapiens
ucauuuccuauguaacugcau

SEQ ID NO: 25454 - RNA, 18 nt, Homo sapiens
guuuaaugggcacagggu

SEQ ID NO: 25455 - RNA, 21 nt, Homo sapiens
uaaauaaauguaucuuauuca

SEQ ID NO: 25456 - RNA, 13 nt, Homo sapiens
cuuaaaauguaau

SEQ ID NO: 25457 - RNA, 20 nt, Homo sapiens
gggaggcagagguugcagug

SEQ ID NO: 25458 - RNA, 16 nt, Homo sapiens
cagagaccaguauucc

SEQ ID NO: 25459 - RNA, 21 nt, Homo sapiens
gugcuuuccguggcacugcau

SEQ ID NO: 25460 - RNA, 21 nt, Homo sapiens
cucugugaacgauuuagaaag

SEQ ID NO: 25461 - RNA, 17 nt, Homo sapiens
aagcagaacagugauua

SEQ ID NO: 25462 - RNA, 14 nt, Homo sapiens
augaaaaugaauau

SEQ ID NO: 25463 - RNA, 19 nt, Homo sapiens
uaaacacuaaaaaggcaug

SEQ ID NO: 25464 - RNA, 23 nt, Homo sapiens
ucaucugugauucccuccugcua

SEQ ID NO: 25465 - RNA, 15 nt, Homo sapiens
ggagaaucacuugaa

SEQ ID NO: 25466 - RNA, 21 nt, Homo sapiens
gcgcaaucuuaacucauugca

SEQ ID NO: 25467 - RNA, 21 nt, Homo sapiens
gaaguauccuucagccugaaa

SEQ ID NO: 25468 - RNA, 22 nt, Homo sapiens
gaccaauaaccaugcccaagaa

SEQ ID NO: 25469 - RNA, 13 nt, Homo sapiens
aguacagacuuuu

SEQ ID NO: 25470 - RNA, 23 nt, Homo sapiens
cauacaauuauuuuuacaguucu

SEQ ID NO: 25471 - RNA, 22 nt, Homo sapiens
auucaccuuccagugucucgga

SEQ ID NO: 25472 - RNA, 17 nt, Homo sapiens
agagacgggguuugcca

SEQ ID NO: 25473 - RNA, 18 nt, Homo sapiens
ucugccuugguauagcau

SEQ ID NO: 25474 - RNA, 14 nt, Homo sapiens
cugcuuuaauuuca

SEQ ID NO: 25475 - RNA, 13 nt, Homo sapiens
aggucuccaaaau

SEQ ID NO: 25476 - RNA, 21 nt, Homo sapiens
ucaucuguaaaauggagacac

SEQ ID NO: 25477 - RNA, 15 nt, Homo sapiens
caggcuccaaacugg

SEQ ID NO: 25478 - RNA, 15 nt, Homo sapiens
aaucccagcuacuug

SEQ ID NO: 25479 - RNA, 18 nt, Homo sapiens
cuggcuggggccuguuga

SEQ ID NO: 25480 - RNA, 12 nt, Homo sapiens
uaacuagaauuu

SEQ ID NO: 25481 - RNA, 14 nt, Homo sapiens
aauaaaagcacuua

SEQ ID NO: 25482 - RNA, 16 nt, Homo sapiens
cacgccuguaauccca

SEQ ID NO: 25483 - RNA, 16 nt, Homo sapiens
auuuccaaauucacaa

SEQ ID NO: 25484 - RNA, 18 nt, Homo sapiens
aacucauugcaaccucca

SEQ ID NO: 25485 - RNA, 22 nt, Homo sapiens
cugaugaaaacauagcaucuca

SEQ ID NO: 25486 - RNA, 15 nt, Homo sapiens
guggaugauguuucg

SEQ ID NO: 25487 - RNA, 23 nt, Homo sapiens
uccugcuacucuguuccuucaca

SEQ ID NO: 25488 - RNA, 18 nt, Homo sapiens
cucaaaacuucagacaua

SEQ ID NO: 25489 - RNA, 14 nt, Homo sapiens
ggugacagagcaag

SEQ ID NO: 25490 - RNA, 21 nt, Homo sapiens
gcaugucagacagaacuugaa

SEQ ID NO: 25491 - RNA, 13 nt, Homo sapiens
uguugauagcaag

SEQ ID NO: 25492 - RNA, 13 nt, Homo sapiens
cccaaaaggcaga

SEQ ID NO: 25493 - RNA, 22 nt, Homo sapiens
aacccggccugauuaaaguuaa

SEQ ID NO: 25494 - RNA, 14 nt, Homo sapiens
accagccaaccugg

SEQ ID NO: 25495 - RNA, 16 nt, Homo sapiens
auuuuucucuaacuca

SEQ ID NO: 25496 - RNA, 14 nt, Homo sapiens
aaacaguagugaua

SEQ ID NO: 25497 - RNA, 15 nt, Homo sapiens
agccaccaaacccgg

SEQ ID NO: 25498 - RNA, 18 nt, Homo sapiens
uaauuuuaaguaauuuca

SEQ ID NO: 25499 - RNA, 20 nt, Homo sapiens
aacccaggagauggaaguug

SEQ ID NO: 25500 - RNA, 21 nt, Homo sapiens
auccuaauaaaaaggugacca

SEQ ID NO: 25501 - RNA, 14 nt, Homo sapiens
gaaaaugugcaaua

SEQ ID NO: 25502 - RNA, 18 nt, Homo sapiens
ggaguuaggcuauucaca

SEQ ID NO: 25503 - RNA, 19 nt, Homo sapiens
uauuuauugagcaccugca

SEQ ID NO: 25504 - RNA, 20 nt, Homo sapiens
agaaggauguacauuuccaa

SEQ ID NO: 25505 - RNA, 20 nt, Homo sapiens
uauuuguacaccaauauuca

SEQ ID NO: 25506 - RNA, 16 nt, Homo sapiens
uucucuaacucagaaa

SEQ ID NO: 25507 - RNA, 18 nt, Homo sapiens
cuguuccuucacauccug

SEQ ID NO: 25508 - RNA, 22 nt, Homo sapiens
uugcuccuggcuggggccuguu

SEQ ID NO: 25509 - RNA, 17 nt, Homo sapiens
cuggacuuuccagagac

SEQ ID NO: 25510 - RNA, 13 nt, Homo sapiens
ucacaagcacuuu

SEQ ID NO: 25511 - RNA, 15 nt, Homo sapiens
gcugggaguggcaug

SEQ ID NO: 25512 - RNA, 15 nt, Homo sapiens
ucagacagaacuuga

SEQ ID NO: 25513 - RNA, 19 nt, Homo sapiens
cugucuggacuuuccagag

SEQ ID NO: 25514 - RNA, 22 nt, Homo sapiens
cuauauccugugacugucucac

SEQ ID NO: 25515 - RNA, 19 nt, Homo sapiens
uguaaucccagcuacuugg

SEQ ID NO: 25516 - RNA, 18 nt, Homo sapiens
aacuugaaugugucaggu

SEQ ID NO: 25517 - RNA, 17 nt, Homo sapiens
gaauauguaaauagaaa

SEQ ID NO: 25518 - RNA, 20 nt, Homo sapiens
caagcuuuucaaaauuggac

SEQ ID NO: 25519 - RNA, 21 nt, Homo sapiens
cugugauucccuccugcuacu

SEQ ID NO: 25520 - RNA, 11 nt, Homo sapiens
uacgugcaaua

SEQ ID NO: 25521 - RNA, 19 nt, Homo sapiens
cuuccaaacagaacuaugg

SEQ ID NO: 25522 - RNA, 14 nt, Homo sapiens
ugauuuuacaauug

SEQ ID NO: 25523 - RNA, 13 nt, Homo sapiens
gauaauaugagaa

SEQ ID NO: 25524 - RNA, 22 nt, Homo sapiens
agacuaugaggaauauuugcaa

SEQ ID NO: 25525 - RNA, 16 nt, Homo sapiens
ucagaagaaauucugc

SEQ ID NO: 25526 - RNA, 14 nt, Homo sapiens
aacugcauugagaa

SEQ ID NO: 25527 - RNA, 21 nt, Homo sapiens
uuacuauuuauugcugaauga

SEQ ID NO: 25528 - RNA, 15 nt, Homo sapiens
gacaucaacagauaa

SEQ ID NO: 25529 - RNA, 18 nt, Homo sapiens
ccuggcugggaguggcau

SEQ ID NO: 25530 - RNA, 23 nt, Homo sapiens
aaauauuguugacaacugugacu

SEQ ID NO: 25531 - RNA, 20 nt, Homo sapiens
auauauguguuuuucacauu

SEQ ID NO: 25532 - RNA, 15 nt, Homo sapiens
gcacuugggacaaaa

SEQ ID NO: 25533 - RNA, 22 nt, Homo sapiens
uggcaaaucucuauuaggaaau

SEQ ID NO: 25534 - RNA, 20 nt, Homo sapiens
uaaguugcaccaacuuugaa

SEQ ID NO: 25535 - RNA, 19 nt, Homo sapiens
acauccagauagguuacca

SEQ ID NO: 25536 - RNA, 17 nt, Homo sapiens
uuggaaaaugugcaaua

SEQ ID NO: 25537 - RNA, 21 nt, Homo sapiens
cggaucuggggcucugggaua

SEQ ID NO: 25538 - RNA, 13 nt, Homo sapiens
gaaauuaaccaua

SEQ ID NO: 25539 - RNA, 12 nt, Homo sapiens
aaucuacacucc

SEQ ID NO: 25540 - RNA, 23 nt, Homo sapiens
gaagagaauauuagcuuuacugu

SEQ ID NO: 25541 - RNA, 13 nt, Homo sapiens
cuggagcucugcc

SEQ ID NO: 25542 - RNA, 20 nt, Homo sapiens
accaaacccggccugauuaa

SEQ ID NO: 25543 - RNA, 20 nt, Homo sapiens
uaaaauauuuuuaugugcaa

SEQ ID NO: 25544 - RNA, 15 nt, Homo sapiens
auugagaacugcaua

SEQ ID NO: 25545 - RNA, 13 nt, Homo sapiens
ucugauaccucaa

SEQ ID NO: 25546 - RNA, 14 nt, Homo sapiens
auacuccuaguaau

SEQ ID NO: 25547 - RNA, 19 nt, Homo sapiens
gcacuuuaacacagugucu

SEQ ID NO: 25548 - RNA, 22 nt, Homo sapiens
cccaaaacugauacccuuugaa

SEQ ID NO: 25549 - RNA, 23 nt, Homo sapiens
gguuaccaguaacggaacaguau

SEQ ID NO: 25550 - RNA, 20 nt, Homo sapiens
auugagcaccugcaggcgug

SEQ ID NO: 25551 - RNA, 23 nt, Homo sapiens
auaucaugccccuguacuccagc

SEQ ID NO: 25552 - RNA, 19 nt, Homo sapiens
gcuggagugcaguggcgca

SEQ ID NO: 25553 - RNA, 16 nt, Homo sapiens
acuuaguguacaugaa

SEQ ID NO: 25554 - RNA, 23 nt, Homo sapiens
guuuccuagcgcagccaugugau

SEQ ID NO: 25555 - RNA, 21 nt, Homo sapiens
gagacaccaccacccuugcca

SEQ ID NO: 25556 - RNA, 19 nt, Homo sapiens
ugacuaauuaggcaaggcu

SEQ ID NO: 25557 - RNA, 18 nt, Homo sapiens
cucauuccccaaccacuu

SEQ ID NO: 25558 - RNA, 15 nt, Homo sapiens
cccugcacuccagcc

SEQ ID NO: 25559 - RNA, 17 nt, Homo sapiens
aagugauacuauccagu

SEQ ID NO: 25560 - RNA, 20 nt, Homo sapiens
ccaacuuugaagucugauuu

SEQ ID NO: 25561 - RNA, 21 nt, Homo sapiens
ucugucuggacuuuccagaga

SEQ ID NO: 25562 - RNA, 17 nt, Homo sapiens
uuccguggcacugcaua

SEQ ID NO: 25563 - RNA, 17 nt, Homo sapiens
ugccccugcacuccagc

SEQ ID NO: 25564 - RNA, 20 nt, Homo sapiens
uuuuagucuaauugaauccc

SEQ ID NO: 25565 - RNA, 13 nt, Homo sapiens
cucuuggugccuc

SEQ ID NO: 25566 - RNA, 14 nt, Homo sapiens
auaaauuugguucu

SEQ ID NO: 25567 - RNA, 19 nt, Homo sapiens
aagguauuuuaaucaccaa

SEQ ID NO: 25568 - RNA, 17 nt, Homo sapiens
cagucacauuccaagcc

SEQ ID NO: 25569 - RNA, 19 nt, Homo sapiens
auuccuauauccugugacu

SEQ ID NO: 25570 - RNA, 20 nt, Homo sapiens
uaaaauuaucaauaucuaau

SEQ ID NO: 25571 - RNA, 14 nt, Homo sapiens
gucucccaaagugc

SEQ ID NO: 25572 - RNA, 17 nt, Homo sapiens
uuuaauggcaugucaga

SEQ ID NO: 25573 - RNA, 23 nt, Homo sapiens
guucuucccuuuuacauacugcu

SEQ ID NO: 25574 - RNA, 17 nt, Homo sapiens
uaaauuugguucuaggc

SEQ ID NO: 25575 - RNA, 20 nt, Homo sapiens
cugucccugcagacaugaga

SEQ ID NO: 25576 - RNA, 20 nt, Homo sapiens
augaaaagauuaugaucuca

SEQ ID NO: 25577 - RNA, 20 nt, Homo sapiens
acauuacaguuagagauuuu

SEQ ID NO: 25578 - RNA, 17 nt, Homo sapiens
auacuucaauacuucau

SEQ ID NO: 25579 - RNA, 14 nt, Homo sapiens
cuuaaaaucuaauu

SEQ ID NO: 25580 - RNA, 23 nt, Homo sapiens
uuuuuccuuccuuaucacugaca

SEQ ID NO: 25581 - RNA, 13 nt, Homo sapiens
ucauguacaucca

SEQ ID NO: 25582 - RNA, 15 nt, Homo sapiens
ugacccugaugaaaa

SEQ ID NO: 25583 - RNA, 20 nt, Homo sapiens
aaccaaauggagugacuuag

SEQ ID NO: 25584 - RNA, 17 nt, Homo sapiens
uuguaaguuuaugcaua

SEQ ID NO: 25585 - RNA, 22 nt, Homo sapiens
uuucaugaaaagauuaugaucu

SEQ ID NO: 25586 - RNA, 15 nt, Homo sapiens
caauuccucugggaa

SEQ ID NO: 25587 - RNA, 17 nt, Homo sapiens
auuuuuagacucaucaa

SEQ ID NO: 25588 - RNA, 13 nt, Homo sapiens
cuaauuaggcaag

SEQ ID NO: 25589 - RNA, 14 nt, Homo sapiens
agacucugucucag

SEQ ID NO: 25590 - RNA, 17 nt, Homo sapiens
gaaaccuuauuguaccu

SEQ ID NO: 25591 - RNA, 20 nt, Homo sapiens
aaagauuucuugaguuuugu

SEQ ID NO: 25592 - RNA, 20 nt, Homo sapiens
ccuggacaguuuucugcuuu

SEQ ID NO: 25593 - RNA, 21 nt, Homo sapiens
uucaaaaucaaauuccagaau

SEQ ID NO: 25594 - RNA, 16 nt, Homo sapiens
aagcaaaaugugauau

SEQ ID NO: 25595 - RNA, 16 nt, Homo sapiens
auaugacacaucucug

SEQ ID NO: 25596 - RNA, 22 nt, Homo sapiens
aacccaaauguucaucaaugaa

SEQ ID NO: 25597 - RNA, 15 nt, Homo sapiens
cuugguauagcauau

SEQ ID NO: 25598 - RNA, 22 nt, Homo sapiens
aaucugaggccuccucucucag

SEQ ID NO: 25599 - RNA, 23 nt, Homo sapiens
auauuuuuuaugaaacauuacag

SEQ ID NO: 25600 - RNA, 18 nt, Homo sapiens
guuuuuccacuacugcua

SEQ ID NO: 25601 - RNA, 15 nt, Homo sapiens
ccauagagacuuugu

SEQ ID NO: 25602 - RNA, 20 nt, Homo sapiens
uaagcacuuuaacacagugu

SEQ ID NO: 25603 - RNA, 11 nt, Homo sapiens
cuuuaucucag

SEQ ID NO: 25604 - RNA, 18 nt, Homo sapiens
auauuuuuaugugcaaua

SEQ ID NO: 25605 - RNA, 21 nt, Homo sapiens
aaugagaagaaugacuaugca

SEQ ID NO: 25606 - RNA, 20 nt, Homo sapiens
cugaauacauucugcuuuca

SEQ ID NO: 25607 - RNA, 21 nt, Homo sapiens
cagccuggucaacauggugaa

SEQ ID NO: 25608 - RNA, 13 nt, Homo sapiens
cucacaagcacuu

SEQ ID NO: 25609 - RNA, 12 nt, Homo sapiens
aaaaugugcaau

SEQ ID NO: 25610 - RNA, 15 nt, Homo sapiens
cugagcgacagugag

SEQ ID NO: 25611 - RNA, 19 nt, Homo sapiens
uacaaggcuuuaucucagg

SEQ ID NO: 25612 - RNA, 21 nt, Homo sapiens
auauuguugacaacugugacu

SEQ ID NO: 25613 - RNA, 14 nt, Homo sapiens
ggugugaccacugc

SEQ ID NO: 25614 - RNA, 23 nt, Homo sapiens
gaaagcuugcccuggugccucac

SEQ ID NO: 25615 - RNA, 17 nt, Homo sapiens
gaacgguaaauuucugu

SEQ ID NO: 25616 - RNA, 22 nt, Homo sapiens
agaguucugucuggacuuucca

SEQ ID NO: 25617 - RNA, 14 nt, Homo sapiens
ucacauccuguguu

SEQ ID NO: 25618 - RNA, 17 nt, Homo sapiens
uguaaguuuaugcauac

SEQ ID NO: 25619 - RNA, 18 nt, Homo sapiens
cugcuggauucaagugau

SEQ ID NO: 25620 - RNA, 17 nt, Homo sapiens
ccuggucaacaugguga

SEQ ID NO: 25621 - RNA, 21 nt, Homo sapiens
uguauauuuuauaucaauuua

SEQ ID NO: 25622 - RNA, 12 nt, Homo sapiens
ucuguaaucuuc

SEQ ID NO: 25623 - RNA, 23 nt, Homo sapiens
gagcaccugcaggcgugaccuga

SEQ ID NO: 25624 - RNA, 20 nt, Homo sapiens
gagaaaccuuauuguaccuc

SEQ ID NO: 25625 - RNA, 17 nt, Homo sapiens
uaacuagaauuuauuca

SEQ ID NO: 25626 - RNA, 18 nt, Homo sapiens
agauuguauagugcaugu

SEQ ID NO: 25627 - RNA, 14 nt, Homo sapiens
uguguuuuucacau

SEQ ID NO: 25628 - RNA, 18 nt, Homo sapiens
acaacuugaauaauacac

SEQ ID NO: 25629 - RNA, 20 nt, Homo sapiens
ccuggcuggggccuguugaa

SEQ ID NO: 25630 - RNA, 21 nt, Homo sapiens
auuacaaggcuuuaucucagg

SEQ ID NO: 25631 - RNA, 21 nt, Homo sapiens
aaagaaaaucaggcuggccaa

SEQ ID NO: 25632 - RNA, 14 nt, Homo sapiens
aacagaagcuucca

SEQ ID NO: 25633 - RNA, 16 nt, Homo sapiens
ccauagagacuuugug

SEQ ID NO: 25634 - RNA, 23 nt, Homo sapiens
ucacauuccaagccucaugucca

SEQ ID NO: 25635 - RNA, 17 nt, Homo sapiens
gaguucugucuggacuu

SEQ ID NO: 25636 - RNA, 16 nt, Homo sapiens
gcacuuuaaacauuua

SEQ ID NO: 25637 - RNA, 12 nt, Homo sapiens
agccccaaaagg

SEQ ID NO: 25638 - RNA, 19 nt, Homo sapiens
aauauauuuuuagacucau

SEQ ID NO: 25639 - RNA, 17 nt, Homo sapiens
agccccgggaguggcgc

SEQ ID NO: 25640 - RNA, 16 nt, Homo sapiens
uuauuacaucuuucac

SEQ ID NO: 25641 - RNA, 13 nt, Homo sapiens
uggcacuugggac

SEQ ID NO: 25642 - RNA, 16 nt, Homo sapiens
uggcugggaguggcau

SEQ ID NO: 25643 - RNA, 17 nt, Homo sapiens
uggcugggaguggcaug

SEQ ID NO: 25644 - RNA, 23 nt, Homo sapiens
uggcuaguaucaaaagaaagaaa

SEQ ID NO: 25645 - RNA, 21 nt, Homo sapiens
ugggauagcugacccagcccc

SEQ ID NO: 25646 - RNA, 15 nt, Homo sapiens
ugggguggguggggc

SEQ ID NO: 25647 - RNA, 16 nt, Homo sapiens
uggggcagugcuuggc

SEQ ID NO: 25648 - RNA, 18 nt, Homo sapiens
uggugcuuccaaauauug

SEQ ID NO: 25649 - RNA, 17 nt, Homo sapiens
uggguuucacaagugaa

SEQ ID NO: 25650 - RNA, 16 nt, Homo sapiens
uggguggggcagugcu

SEQ ID NO: 25651 - RNA, 21 nt, Homo sapiens
uggguggggcagugcuuggcc

SEQ ID NO: 25652 - RNA, 23 nt, Homo sapiens
uguguuugauauccaaagcugaa

SEQ ID NO: 25653 - RNA, 17 nt, Homo sapiens
uggcgcgcgccaccacg

SEQ ID NO: 25654 - RNA, 22 nt, Homo sapiens
uggcccaggaguuuggccagaa

SEQ ID NO: 25655 - RNA, 21 nt, Homo sapiens
uggcccaggaguuuggccaga

SEQ ID NO: 25656 - RNA, 17 nt, Homo sapiens
uggcccaggaguuuggc

SEQ ID NO: 25657 - RNA, 20 nt, Homo sapiens
uggcccaggaguuuggccag

SEQ ID NO: 25658 - RNA, 18 nt, Homo sapiens
uggccagaagucaaggcu

SEQ ID NO: 25659 - RNA, 19 nt, Homo sapiens
uggccagaagucaaggcuu

SEQ ID NO: 25660 - RNA, 20 nt, Homo sapiens
uggccagaagucaaggcuua

SEQ ID NO: 25661 - RNA, 21 nt, Homo sapiens
uggagcucugcccauccugcc

SEQ ID NO: 25662 - RNA, 17 nt, Homo sapiens
uggagugcaguggcgca

SEQ ID NO: 25663 - RNA, 18 nt, Homo sapiens
uggagugcaguggcgcaa

SEQ ID NO: 25664 - RNA, 21 nt, Homo sapiens
ugcugggaauuacaggcguga

SEQ ID NO: 25665 - RNA, 14 nt, Homo sapiens
uugggaggcugagg

SEQ ID NO: 25666 - RNA, 15 nt, Homo sapiens
uugggaggcugaggc

SEQ ID NO: 25667 - RNA, 18 nt, Homo sapiens
uuggcccaggaguuuggc

SEQ ID NO: 25668 - RNA, 20 nt, Homo sapiens
uugguucuaauagaacucag

SEQ ID NO: 25669 - RNA, 21 nt, Homo sapiens
uuuaaaaaaaaaccugagccc

SEQ ID NO: 25670 - RNA, 17 nt, Homo sapiens
uuugguucuaggccggg

SEQ ID NO: 25671 - RNA, 16 nt, Homo sapiens
uugcuggagcucugcc

SEQ ID NO: 25672 - RNA, 17 nt, Homo sapiens
uugcuggagcucugccc

SEQ ID NO: 25673 - RNA, 13 nt, Homo sapiens
uugccaugcuggc

SEQ ID NO: 25674 - RNA, 20 nt, Homo sapiens
uugccaugcuggccaggcug

SEQ ID NO: 25675 - RNA, 20 nt, Homo sapiens
uugacccacaagaaaugaaa

SEQ ID NO: 25676 - RNA, 12 nt, Homo sapiens
uugagcaccugc

SEQ ID NO: 25677 - RNA, 23 nt, Homo sapiens
uucugcagauaaacaguagugau

SEQ ID NO: 25678 - RNA, 14 nt, Homo sapiens
uucuagggaaauga

SEQ ID NO: 25679 - RNA, 15 nt, Homo sapiens
uucccugccuggauc

SEQ ID NO: 25680 - RNA, 13 nt, Homo sapiens
uuccuagcgcagc

SEQ ID NO: 25681 - RNA, 15 nt, Homo sapiens
uuagacccucaugcu

SEQ ID NO: 25682 - RNA, 16 nt, Homo sapiens
uucacaggggacagga

SEQ ID NO: 25683 - RNA, 10 nt, Homo sapiens
uuagccgggc

SEQ ID NO: 25684 - RNA, 12 nt, Homo sapiens
uuagccgggcau

SEQ ID NO: 25685 - RNA, 12 nt, Homo sapiens
uuagccgggcgu

SEQ ID NO: 25686 - RNA, 13 nt, Homo sapiens
uuagccgggcgug

SEQ ID NO: 25687 - RNA, 18 nt, Homo sapiens
uuagccgggcgugguggu

SEQ ID NO: 25688 - RNA, 21 nt, Homo sapiens
uuagccgggcgugguggugag

SEQ ID NO: 25689 - RNA, 15 nt, Homo sapiens
uuaccugggaaaggg

SEQ ID NO: 25690 - RNA, 14 nt, Homo sapiens
uguugccaaggcug

SEQ ID NO: 25691 - RNA, 23 nt, Homo sapiens
uguuuacaaaccucaagccagcc

SEQ ID NO: 25692 - RNA, 17 nt, Homo sapiens
uguugacaugggacauu

SEQ ID NO: 25693 - RNA, 19 nt, Homo sapiens
uagacccucaugcugccaa

SEQ ID NO: 25694 - RNA, 22 nt, Homo sapiens
uagccgggcaugguggcgcgca

SEQ ID NO: 25695 - RNA, 16 nt, Homo sapiens
uaguaauuggaaaggc

SEQ ID NO: 25696 - RNA, 17 nt, Homo sapiens
uaguaauuggaaaggca

SEQ ID NO: 25697 - RNA, 23 nt, Homo sapiens
uauccuaauaaaaaggugaccau

SEQ ID NO: 25698 - RNA, 19 nt, Homo sapiens
uaucuaauauauaugaaua

SEQ ID NO: 25699 - RNA, 16 nt, Homo sapiens
guuuccauagggugac

SEQ ID NO: 25700 - RNA, 17 nt, Homo sapiens
guuuccauagggugaca

SEQ ID NO: 25701 - RNA, 23 nt, Homo sapiens
guuugccaugcuggccaggcugg

SEQ ID NO: 25702 - RNA, 17 nt, Homo sapiens
guuuuccuucucaucug

SEQ ID NO: 25703 - RNA, 15 nt, Homo sapiens
uaaugaaaaugaaua

SEQ ID NO: 25704 - RNA, 19 nt, Homo sapiens
uacaaaaauuagccgggca

SEQ ID NO: 25705 - RNA, 18 nt, Homo sapiens
uacaaaaauuagccgggc

SEQ ID NO: 25706 - RNA, 14 nt, Homo sapiens
uaaguuacauaagg

SEQ ID NO: 25707 - RNA, 18 nt, Homo sapiens
uaauagaauuaauggaau

SEQ ID NO: 25708 - RNA, 22 nt, Homo sapiens
ucaauauuuauuauuuucaccu

SEQ ID NO: 25709 - RNA, 23 nt, Homo sapiens
ucaauauuuauuauuuucaccug

SEQ ID NO: 25710 - RNA, 22 nt, Homo sapiens
ucacaggaaguagaggaggcca

SEQ ID NO: 25711 - RNA, 15 nt, Homo sapiens
ucaauuccucuggga

SEQ ID NO: 25712 - RNA, 16 nt, Homo sapiens
ucaaugaaugaaugaa

SEQ ID NO: 25713 - RNA, 17 nt, Homo sapiens
ucaaugaaugaaugaau

SEQ ID NO: 25714 - RNA, 23 nt, Homo sapiens
ucagccccgggaguggcgcgcgc

SEQ ID NO: 25715 - RNA, 22 nt, Homo sapiens
ucaggagauuucaugccuggug

SEQ ID NO: 25716 - RNA, 13 nt, Homo sapiens
ucacuugaugaua

SEQ ID NO: 25717 - RNA, 10 nt, Homo sapiens
uauuugagac

SEQ ID NO: 25718 - RNA, 22 nt, Homo sapiens
ucaaaagguauuuauugagcac

SEQ ID NO: 25719 - RNA, 23 nt, Homo sapiens
uauucagccccgggaguggcgcg

SEQ ID NO: 25720 - RNA, 19 nt, Homo sapiens
uauguucuaagaagugaaa

SEQ ID NO: 25721 - RNA, 19 nt, Homo sapiens
uccagugagacagcucugc

SEQ ID NO: 25722 - RNA, 15 nt, Homo sapiens
ucaucaaugaaugaa

SEQ ID NO: 25723 - RNA, 16 nt, Homo sapiens
ucaucaaugaaugaau

SEQ ID NO: 25724 - RNA, 20 nt, Homo sapiens
ucaucaaugaaugaaugaau

SEQ ID NO: 25725 - RNA, 16 nt, Homo sapiens
ucaggugacccugaug

SEQ ID NO: 25726 - RNA, 19 nt, Homo sapiens
ucaggugacccugaugaaa

SEQ ID NO: 25727 - RNA, 18 nt, Homo sapiens
ucauucuugaaagcugug

SEQ ID NO: 25728 - RNA, 20 nt, Homo sapiens
ugaccaauaaccaugcccaa

SEQ ID NO: 25729 - RNA, 14 nt, Homo sapiens
ugaauucccugccu

SEQ ID NO: 25730 - RNA, 17 nt, Homo sapiens
ugagcagucaggaaaga

SEQ ID NO: 25731 - RNA, 22 nt, Homo sapiens
ugagccaccaaacccggccuga

SEQ ID NO: 25732 - RNA, 15 nt, Homo sapiens
ugagaccagccaacc

SEQ ID NO: 25733 - RNA, 14 nt, Homo sapiens
ugacgugacuggcc

SEQ ID NO: 25734 - RNA, 19 nt, Homo sapiens
ugagguacugagagugaac

SEQ ID NO: 25735 - RNA, 16 nt, Homo sapiens
ugccuaagugcagccc

SEQ ID NO: 25736 - RNA, 23 nt, Homo sapiens
ugcuggauucaagugauccgccc

SEQ ID NO: 25737 - RNA, 20 nt, Homo sapiens
ugcuccuggcuggggccugu

SEQ ID NO: 25738 - RNA, 16 nt, Homo sapiens
ugccaugcuggccagg

SEQ ID NO: 25739 - RNA, 13 nt, Homo sapiens
ugcagugagccga

SEQ ID NO: 25740 - RNA, 17 nt, Homo sapiens
ugccaaggcuggagugc

SEQ ID NO: 25741 - RNA, 12 nt, Homo sapiens
ugcagugagccg

SEQ ID NO: 25742 - RNA, 20 nt, Homo sapiens
uccuaauaaaaaggugacca

SEQ ID NO: 25743 - RNA, 21 nt, Homo sapiens
uccuaauaaaaaggugaccau

SEQ ID NO: 25744 - RNA, 18 nt, Homo sapiens
uccuaggugagcagguga

SEQ ID NO: 25745 - RNA, 13 nt, Homo sapiens
ucccucuuggugc

SEQ ID NO: 25746 - RNA, 14 nt, Homo sapiens
ucccucuuggugcc

SEQ ID NO: 25747 - RNA, 17 nt, Homo sapiens
uccucaucuguaaaaug

SEQ ID NO: 25748 - RNA, 14 nt, Homo sapiens
ucgaacugcuggau

SEQ ID NO: 25749 - RNA, 17 nt, Homo sapiens
ucgccaucacagcugaa

SEQ ID NO: 25750 - RNA, 18 nt, Homo sapiens
ucucccaaagugcuggga

SEQ ID NO: 25751 - RNA, 20 nt, Homo sapiens
ucuccccaugauguuuagaa

SEQ ID NO: 25752 - RNA, 20 nt, Homo sapiens
ucucccucuguugccaaggc

SEQ ID NO: 25753 - RNA, 14 nt, Homo sapiens
ucuaggccgggcgc

SEQ ID NO: 25754 - RNA, 21 nt, Homo sapiens
ucggaucuggggcucugggau

SEQ ID NO: 25755 - RNA, 23 nt, Homo sapiens
ucugcccauccugccccugagcc

SEQ ID NO: 25756 - RNA, 17 nt, Homo sapiens
ucugauaccucaacccc

SEQ ID NO: 25757 - RNA, 13 nt, Homo sapiens
ucuggaaaccaca

SEQ ID NO: 25758 - RNA, 22 nt, Homo sapiens
ucugggauagcugacccagccc

SEQ ID NO: 25759 - RNA, 21 nt, Homo sapiens
gaccacgcuuucuagcuguug

SEQ ID NO: 25760 - RNA, 19 nt, Homo sapiens
gaccagccaaccugggggc

SEQ ID NO: 25761 - RNA, 14 nt, Homo sapiens
gacccucaugcugc

SEQ ID NO: 25762 - RNA, 17 nt, Homo sapiens
gacccucaugcugccaa

SEQ ID NO: 25763 - RNA, 14 nt, Homo sapiens
gacuggccugcugg

SEQ ID NO: 25764 - RNA, 15 nt, Homo sapiens
gacuggccugcugga

SEQ ID NO: 25765 - RNA, 12 nt, Homo sapiens
gagaagaaugac

SEQ ID NO: 25766 - RNA, 21 nt, Homo sapiens
gacgguuuaaugggcacaggg

SEQ ID NO: 25767 - RNA, 18 nt, Homo sapiens
gagaccagccaaccuggg

SEQ ID NO: 25768 - RNA, 22 nt, Homo sapiens
gagaaucagaucauuucaaaac

SEQ ID NO: 25769 - RNA, 22 nt, Homo sapiens
gaauugaauucccugccuggau

SEQ ID NO: 25770 - RNA, 15 nt, Homo sapiens
gaauuggagcucgug

SEQ ID NO: 25771 - RNA, 13 nt, Homo sapiens
gacaagcucacag

SEQ ID NO: 25772 - RNA, 17 nt, Homo sapiens
gacaagcucacagaccu

SEQ ID NO: 25773 - RNA, 11 nt, Homo sapiens
gacaccaccac

SEQ ID NO: 25774 - RNA, 17 nt, Homo sapiens
gacaccaccacccuugc

SEQ ID NO: 25775 - RNA, 13 nt, Homo sapiens
gacagaaagcaga

SEQ ID NO: 25776 - RNA, 19 nt, Homo sapiens
gacagaaagcagaacagug

SEQ ID NO: 25777 - RNA, 20 nt, Homo sapiens
gacaguuccugagaccagcc

SEQ ID NO: 25778 - RNA, 19 nt, Homo sapiens
gaauaucuauuaauauaug

SEQ ID NO: 25779 - RNA, 11 nt, Homo sapiens
gaacugcugga

SEQ ID NO: 25780 - RNA, 14 nt, Homo sapiens
gaagaaauuccagg

SEQ ID NO: 25781 - RNA, 12 nt, Homo sapiens
gaaccaccugcc

SEQ ID NO: 25782 - RNA, 18 nt, Homo sapiens
gaacaaauuuacagagac

SEQ ID NO: 25783 - RNA, 22 nt, Homo sapiens
gcacuuuaacacagugucuggc

SEQ ID NO: 25784 - RNA, 18 nt, Homo sapiens
gcagcaggauagaguggg

SEQ ID NO: 25785 - RNA, 16 nt, Homo sapiens
gcaauaaaauguauuu

SEQ ID NO: 25786 - RNA, 17 nt, Homo sapiens
gaucuggggcucuggga

SEQ ID NO: 25787 - RNA, 12 nt, Homo sapiens
gcaaccuccacc

SEQ ID NO: 25788 - RNA, 16 nt, Homo sapiens
gcaccuguaaucccag

SEQ ID NO: 25789 - RNA, 17 nt, Homo sapiens
gcaccuguaaucccagc

SEQ ID NO: 25790 - RNA, 13 nt, Homo sapiens
gaugauguuucgu

SEQ ID NO: 25791 - RNA, 23 nt, Homo sapiens
gcaaagacuaugaggaauauuug

SEQ ID NO: 25792 - RNA, 15 nt, Homo sapiens
gauuuguaauauuuc

SEQ ID NO: 25793 - RNA, 19 nt, Homo sapiens
gagcuguuuucccugaccu

SEQ ID NO: 25794 - RNA, 18 nt, Homo sapiens
gaggaauauuugcaagac

SEQ ID NO: 25795 - RNA, 17 nt, Homo sapiens
gaggcugaggcgggugg

SEQ ID NO: 25796 - RNA, 14 nt, Homo sapiens
gagacagaaagcag

SEQ ID NO: 25797 - RNA, 12 nt, Homo sapiens
gauaggccaugg

SEQ ID NO: 25798 - RNA, 13 nt, Homo sapiens
gauccgcccaucu

SEQ ID NO: 25799 - RNA, 17 nt, Homo sapiens
gauccugcaauuccacu

SEQ ID NO: 25800 - RNA, 14 nt, Homo sapiens
gauccuggaaauca

SEQ ID NO: 25801 - RNA, 14 nt, Homo sapiens
gagugcaguggcgc

SEQ ID NO: 25802 - RNA, 14 nt, Homo sapiens
gagugccuguaauc

SEQ ID NO: 25803 - RNA, 16 nt, Homo sapiens
gaguucugucuggacu

SEQ ID NO: 25804 - RNA, 17 nt, Homo sapiens
gaguucugucuggacuu

SEQ ID NO: 25805 - RNA, 12 nt, Homo sapiens
gaguuuggccag

SEQ ID NO: 25806 - RNA, 18 nt, Homo sapiens
gagggcuugaggacuugg

SEQ ID NO: 25807 - RNA, 17 nt, Homo sapiens
gccgggcguggugguga

SEQ ID NO: 25808 - RNA, 12 nt, Homo sapiens
gccccgggagug

SEQ ID NO: 25809 - RNA, 18 nt, Homo sapiens
gccgagauugugccccug

SEQ ID NO: 25810 - RNA, 19 nt, Homo sapiens
gccgagauugugccccugc

SEQ ID NO: 25811 - RNA, 16 nt, Homo sapiens
gccuaagugcagcccc

SEQ ID NO: 25812 - RNA, 18 nt, Homo sapiens
gccugaaagaggaaugaa

SEQ ID NO: 25813 - RNA, 14 nt, Homo sapiens
gccugcaauauuug

SEQ ID NO: 25814 - RNA, 13 nt, Homo sapiens
gcgccaccacgcc

SEQ ID NO: 25815 - RNA, 14 nt, Homo sapiens
gcgccaccacgccc

SEQ ID NO: 25816 - RNA, 14 nt, Homo sapiens
gccugggugacaga

SEQ ID NO: 25817 - RNA, 19 nt, Homo sapiens
gccuguaaucccagcacuu

SEQ ID NO: 25818 - RNA, 18 nt, Homo sapiens
gccuuggggcugaugcag

SEQ ID NO: 25819 - RNA, 18 nt, Homo sapiens
gccuggcugggaguggca

SEQ ID NO: 25820 - RNA, 13 nt, Homo sapiens
gccuggcugggag

SEQ ID NO: 25821 - RNA, 12 nt, Homo sapiens
gccugcuggaug

SEQ ID NO: 25822 - RNA, 13 nt, Homo sapiens
gccugcuggaugu

SEQ ID NO: 25823 - RNA, 13 nt, Homo sapiens
gcgcgccaccacg

SEQ ID NO: 25824 - RNA, 14 nt, Homo sapiens
gcgcgccaccacgc

SEQ ID NO: 25825 - RNA, 12 nt, Homo sapiens
gcgcgccaccac

SEQ ID NO: 25826 - RNA, 22 nt, Homo sapiens
gcgaaugguuccauucucucuc

SEQ ID NO: 25827 - RNA, 12 nt, Homo sapiens
gcgccaccacgc

SEQ ID NO: 25828 - RNA, 13 nt, Homo sapiens
gcgcgcgccacca

SEQ ID NO: 25829 - RNA, 14 nt, Homo sapiens
gcgcgcgccaccac

SEQ ID NO: 25830 - RNA, 12 nt, Homo sapiens
gcgcgcgccacc

SEQ ID NO: 25831 - RNA, 12 nt, Homo sapiens
gcagugagccga

SEQ ID NO: 25832 - RNA, 17 nt, Homo sapiens
gcccaggaguuuggcca

SEQ ID NO: 25833 - RNA, 21 nt, Homo sapiens
gcccaagggugggugggguga

SEQ ID NO: 25834 - RNA, 16 nt, Homo sapiens
gcccauccugccccug

SEQ ID NO: 25835 - RNA, 20 nt, Homo sapiens
gcccauccugccccugagcc

SEQ ID NO: 25836 - RNA, 21 nt, Homo sapiens
gcccauccugccccugagccc

SEQ ID NO: 25837 - RNA, 19 nt, Homo sapiens
gcccaggaguuuggccaga

SEQ ID NO: 25838 - RNA, 22 nt, Homo sapiens
gcccaggaguuuggccagaagu

SEQ ID NO: 25839 - RNA, 18 nt, Homo sapiens
gcccaggaguuuggccag

SEQ ID NO: 25840 - RNA, 12 nt, Homo sapiens
gccccuugggca

SEQ ID NO: 25841 - RNA, 13 nt, Homo sapiens
gccccuugggcag

SEQ ID NO: 25842 - RNA, 17 nt, Homo sapiens
gccccugcacuccagcc

SEQ ID NO: 25843 - RNA, 23 nt, Homo sapiens
gccggagccccuugggcagguca

SEQ ID NO: 25844 - RNA, 22 nt, Homo sapiens
gcagccaaccuaagcaagaucc

SEQ ID NO: 25845 - RNA, 17 nt, Homo sapiens
gcagggacuugaaccca

SEQ ID NO: 25846 - RNA, 12 nt, Homo sapiens
gcaggcgugacc

SEQ ID NO: 25847 - RNA, 22 nt, Homo sapiens
gcaggcgugaccugacagccca

SEQ ID NO: 25848 - RNA, 23 nt, Homo sapiens
gcaggcgugaccugacagcccaa

SEQ ID NO: 25849 - RNA, 20 nt, Homo sapiens
gcaggucacacaaccugucc

SEQ ID NO: 25850 - RNA, 14 nt, Homo sapiens
gcagugcuuggccc

SEQ ID NO: 25851 - RNA, 12 nt, Homo sapiens
gcagugcuuggc

SEQ ID NO: 25852 - RNA, 13 nt, Homo sapiens
gcagugcuuggcc

SEQ ID NO: 25853 - RNA, 17 nt, Homo sapiens
gcaguuguugcccacag

SEQ ID NO: 25854 - RNA, 13 nt, Homo sapiens
gccagaagucaag

SEQ ID NO: 25855 - RNA, 20 nt, Homo sapiens
gcaugggccuagcccacugg

SEQ ID NO: 25856 - RNA, 12 nt, Homo sapiens
ggagacaccacc

SEQ ID NO: 25857 - RNA, 13 nt, Homo sapiens
ggacuugggcggg

SEQ ID NO: 25858 - RNA, 18 nt, Homo sapiens
ggagccaacagaagcuuc

SEQ ID NO: 25859 - RNA, 11 nt, Homo sapiens
ggagacaccac

SEQ ID NO: 25860 - RNA, 16 nt, Homo sapiens
ggaguggcgcgcgcca

SEQ ID NO: 25861 - RNA, 24 nt, Homo sapiens
ggacaguuccugagaccagccaac

SEQ ID NO: 25862 - RNA, 15 nt, Homo sapiens
ggacauuugcucaug

SEQ ID NO: 25863 - RNA, 21 nt, Homo sapiens
ggcagugcuuggcccaggagu

SEQ ID NO: 25864 - RNA, 18 nt, Homo sapiens
ggcagugcuuggcccagg

SEQ ID NO: 25865 - RNA, 13 nt, Homo sapiens
ggcagugcuuggc

SEQ ID NO: 25866 - RNA, 18 nt, Homo sapiens
ggcagcuuuccucaaaac

SEQ ID NO: 25867 - RNA, 14 nt, Homo sapiens
ggcacaggguuuau

SEQ ID NO: 25868 - RNA, 18 nt, Homo sapiens
ggcgcgcgccaccacgcc

SEQ ID NO: 25869 - RNA, 19 nt, Homo sapiens
ggcgcgcgccaccacgccc

SEQ ID NO: 25870 - RNA, 21 nt, Homo sapiens
ggcgcgcgccaccacgcccag

SEQ ID NO: 25871 - RNA, 20 nt, Homo sapiens
ggcgcgcaccuguaauccca

SEQ ID NO: 25872 - RNA, 21 nt, Homo sapiens
ggcgcgcaccuguaaucccag

SEQ ID NO: 25873 - RNA, 14 nt, Homo sapiens
ggcgcgcgccacca

SEQ ID NO: 25874 - RNA, 20 nt, Homo sapiens
ggcccaggaguuuggccaga

SEQ ID NO: 25875 - RNA, 22 nt, Homo sapiens
ggcccaggaguuuggccagaag

SEQ ID NO: 25876 - RNA, 19 nt, Homo sapiens
ggcaugguggcgcgcaccu

SEQ ID NO: 25877 - RNA, 21 nt, Homo sapiens
ggcauguaugacgugacuggc

SEQ ID NO: 25878 - RNA, 20 nt, Homo sapiens
gcuggucucgaacugcugga

SEQ ID NO: 25879 - RNA, 19 nt, Homo sapiens
gcuggauguggagggggcg

SEQ ID NO: 25880 - RNA, 13 nt, Homo sapiens
gcugaggcgggug

SEQ ID NO: 25881 - RNA, 21 nt, Homo sapiens
gcuuagacccucaugcugcca

SEQ ID NO: 25882 - RNA, 19 nt, Homo sapiens
gcuguaugauucccagcca

SEQ ID NO: 25883 - RNA, 14 nt, Homo sapiens
gcuguggccagcuu

SEQ ID NO: 25884 - RNA, 14 nt, Homo sapiens
gcuuccaaauauug

SEQ ID NO: 25885 - RNA, 18 nt, Homo sapiens
gcuugaaauagugucuga

SEQ ID NO: 25886 - RNA, 13 nt, Homo sapiens
gcuugaacccagg

SEQ ID NO: 25887 - RNA, 19 nt, Homo sapiens
gcuuggcccaggaguuugg

SEQ ID NO: 25888 - RNA, 22 nt, Homo sapiens
gcuugaggacuugggcgggaca

SEQ ID NO: 25889 - RNA, 17 nt, Homo sapiens
gcuucaccuguccccga

SEQ ID NO: 25890 - RNA, 20 nt, Homo sapiens
gcuaucgccaucacagcuga

SEQ ID NO: 25891 - RNA, 15 nt, Homo sapiens
gcuccaaacuggagc

SEQ ID NO: 25892 - RNA, 13 nt, Homo sapiens
gcucuggaaacca

SEQ ID NO: 25893 - RNA, 15 nt, Homo sapiens
gcugccaauauccua

SEQ ID NO: 25894 - RNA, 22 nt, Homo sapiens
gcugccucuaaaaggccugucc

SEQ ID NO: 25895 - RNA, 17 nt, Homo sapiens
ggucgucgucuugacuu

SEQ ID NO: 25896 - RNA, 23 nt, Homo sapiens
ggucgucgucuugacuuuggcaa

SEQ ID NO: 25897 - RNA, 16 nt, Homo sapiens
ggugaaacccugucuc

SEQ ID NO: 25898 - RNA, 22 nt, Homo sapiens
gguucuaggccgggcgcggugg

SEQ ID NO: 25899 - RNA, 15 nt, Homo sapiens
gguuugccaugcugg

SEQ ID NO: 25900 - RNA, 16 nt, Homo sapiens
gguuugccaugcuggc

SEQ ID NO: 25901 - RNA, 22 nt, Homo sapiens
ggcuauucacaaccacucauuc

SEQ ID NO: 25902 - RNA, 21 nt, Homo sapiens
ggcgugaccugacagcccaag

SEQ ID NO: 25903 - RNA, 15 nt, Homo sapiens
ggcgugagccaccaa

SEQ ID NO: 25904 - RNA, 14 nt, Homo sapiens
ggcgugagccacca

SEQ ID NO: 25905 - RNA, 22 nt, Homo sapiens
ggccagaagucaaggcuuagac

SEQ ID NO: 25906 - RNA, 17 nt, Homo sapiens
ggcgcgcgccaccacgc

SEQ ID NO: 25907 - RNA, 20 nt, Homo sapiens
ggcggcuggaauugaauucc

SEQ ID NO: 25908 - RNA, 23 nt, Homo sapiens
ggcgggacacaggcuccaaacug

SEQ ID NO: 25909 - RNA, 13 nt, Homo sapiens
gggaguggcgcgc

SEQ ID NO: 25910 - RNA, 14 nt, Homo sapiens
gggaguggcgcgcg

SEQ ID NO: 25911 - RNA, 17 nt, Homo sapiens
gggaguggcgcgcgcca

SEQ ID NO: 25912 - RNA, 12 nt, Homo sapiens
ggcuggucucga

SEQ ID NO: 25913 - RNA, 20 nt, Homo sapiens
ggcuggucucgaacugcugg

SEQ ID NO: 25914 - RNA, 22 nt, Homo sapiens
ggcuuagacccucaugcugcca

SEQ ID NO: 25915 - RNA, 21 nt, Homo sapiens
ggcuggagugcaguggcgcaa

SEQ ID NO: 25916 - RNA, 10 nt, Homo sapiens
gggaguggcg

SEQ ID NO: 25917 - RNA, 20 nt, Homo sapiens
gggcagugcuuggcccagga

SEQ ID NO: 25918 - RNA, 17 nt, Homo sapiens
gggccuggcugggagug

SEQ ID NO: 25919 - RNA, 12 nt, Homo sapiens
gggccuggcugg

SEQ ID NO: 25920 - RNA, 15 nt, Homo sapiens
gggcgggacacaggc

SEQ ID NO: 25921 - RNA, 22 nt, Homo sapiens
gggcgggacacaggcuccaaac

SEQ ID NO: 25922 - RNA, 16 nt, Homo sapiens
gucucgaacugcugga

SEQ ID NO: 25923 - RNA, 18 nt, Homo sapiens
gucucgaacugcuggauu

SEQ ID NO: 25924 - RNA, 12 nt, Homo sapiens
gugacuggccug

SEQ ID NO: 25925 - RNA, 19 nt, Homo sapiens
gugauuacccucugggucu

SEQ ID NO: 25926 - RNA, 15 nt, Homo sapiens
gucaaugcagccccc

SEQ ID NO: 25927 - RNA, 16 nt, Homo sapiens
gucaaugcagccccca

SEQ ID NO: 25928 - RNA, 13 nt, Homo sapiens
guauggcagcuuu

SEQ ID NO: 25929 - RNA, 14 nt, Homo sapiens
guauggcagcuuuc

SEQ ID NO: 25930 - RNA, 17 nt, Homo sapiens
guaucaaaagaaagaaa

SEQ ID NO: 25931 - RNA, 16 nt, Homo sapiens
guggcgcgcgccacca

SEQ ID NO: 25932 - RNA, 16 nt, Homo sapiens
guggguggggcagugc

SEQ ID NO: 25933 - RNA, 13 nt, Homo sapiens
gugcuuggcccag

SEQ ID NO: 25934 - RNA, 14 nt, Homo sapiens
gugcuuggcccagg

SEQ ID NO: 25935 - RNA, 16 nt, Homo sapiens
gugacaagcucacaga

SEQ ID NO: 25936 - RNA, 15 nt, Homo sapiens
guugccaaggcugga

SEQ ID NO: 25937 - RNA, 19 nt, Homo sapiens
guugccaaggcuggagugc

SEQ ID NO: 25938 - RNA, 14 nt, Homo sapiens
guuggaggcugcaa

SEQ ID NO: 25939 - RNA, 22 nt, Homo sapiens
guugaccaauaaccaugcccaa

SEQ ID NO: 25940 - RNA, 16 nt, Homo sapiens
guuccugagaccagcc

SEQ ID NO: 25941 - RNA, 23 nt, Homo sapiens
gcaaucuuaacucauugcaaccu

SEQ ID NO: 25942 - RNA, 22 nt, Homo sapiens
gauggaaguugcagugagcuga

SEQ ID NO: 25943 - RNA, 19 nt, Homo sapiens
gauguggagggggcgcgug

SEQ ID NO: 25944 - RNA, 21 nt, Homo sapiens
gauucucuuuauucagccccg

SEQ ID NO: 25945 - RNA, 18 nt, Homo sapiens
gauuguaaaaugguguga

SEQ ID NO: 25946 - RNA, 16 nt, Homo sapiens
gcaccugcaggcguga

SEQ ID NO: 25947 - RNA, 13 nt, Homo sapiens
gcaaccuccaccu

SEQ ID NO: 25948 - RNA, 13 nt, Homo sapiens
gcagauaaacagu

SEQ ID NO: 25949 - RNA, 17 nt, Homo sapiens
gcacuccagccugagcg

SEQ ID NO: 25950 - RNA, 14 nt, Homo sapiens
gcagcuuauucaca

SEQ ID NO: 25951 - RNA, 23 nt, Homo sapiens
gcagccaaccuaagcaagauccc

SEQ ID NO: 25952 - RNA, 18 nt, Homo sapiens
gcaggauagagugggaca

SEQ ID NO: 25953 - RNA, 15 nt, Homo sapiens
gccagaagucaaggc

SEQ ID NO: 25954 - RNA, 18 nt, Homo sapiens
gccagacaucaacagaua

SEQ ID NO: 25955 - RNA, 20 nt, Homo sapiens
gccaacuggggugggugggg

SEQ ID NO: 25956 - RNA, 15 nt, Homo sapiens
gccaccaaacccggc

SEQ ID NO: 25957 - RNA, 17 nt, Homo sapiens
gccaaggcuggagugca

SEQ ID NO: 25958 - RNA, 9 nt, Homo sapiens
gccaaaaac

SEQ ID NO: 25959 - RNA, 15 nt, Homo sapiens
gcaggcgugaccuga

SEQ ID NO: 25960 - RNA, 13 nt, Homo sapiens
gcaggcgugaccu

SEQ ID NO: 25961 - RNA, 15 nt, Homo sapiens
gcagugcuuggccca

SEQ ID NO: 25962 - RNA, 16 nt, Homo sapiens
gcagugcuuggcccag

SEQ ID NO: 25963 - RNA, 17 nt, Homo sapiens
gcagugcuuggcccagg

SEQ ID NO: 25964 - RNA, 15 nt, Homo sapiens
gcauguaugacguga

SEQ ID NO: 25965 - RNA, 22 nt, Homo sapiens
gcaugggaagugacgguuuaau

SEQ ID NO: 25966 - RNA, 18 nt, Homo sapiens
gcagugcuuggcccagga

SEQ ID NO: 25967 - RNA, 13 nt, Homo sapiens
gcauauguuucgc

SEQ ID NO: 25968 - RNA, 18 nt, Homo sapiens
gccccugcacuccagccu

SEQ ID NO: 25969 - RNA, 15 nt, Homo sapiens
gccgagauugugccc

SEQ ID NO: 25970 - RNA, 12 nt, Homo sapiens
gccugggugaca

SEQ ID NO: 25971 - RNA, 13 nt, Homo sapiens
gccugggugacag

SEQ ID NO: 25972 - RNA, 16 nt, Homo sapiens
gcgcgccaccacgccc

SEQ ID NO: 25973 - RNA, 14 nt, Homo sapiens
gccgggcgcggugg

SEQ ID NO: 25974 - RNA, 17 nt, Homo sapiens
gccuaagugcagccccg

SEQ ID NO: 25975 - RNA, 15 nt, Homo sapiens
gccggagccccuugg

SEQ ID NO: 25976 - RNA, 15 nt, Homo sapiens
gccucuuagaugcag

SEQ ID NO: 25977 - RNA, 19 nt, Homo sapiens
gccugaaagaggaaugaag

SEQ ID NO: 25978 - RNA, 11 nt, Homo sapiens
gccuggcuggg

SEQ ID NO: 25979 - RNA, 12 nt, Homo sapiens
gagccccaaaag

SEQ ID NO: 25980 - RNA, 16 nt, Homo sapiens
gaggaaugaaguacuc

SEQ ID NO: 25981 - RNA, 15 nt, Homo sapiens
gaggacuugggcggg

SEQ ID NO: 25982 - RNA, 16 nt, Homo sapiens
gaguggguuucacaag

SEQ ID NO: 25983 - RNA, 17 nt, Homo sapiens
gaguuccuaaccagccu

SEQ ID NO: 25984 - RNA, 18 nt, Homo sapiens
gaguuccuaaccagccug

SEQ ID NO: 25985 - RNA, 18 nt, Homo sapiens
gaguucugucuggacuuu

SEQ ID NO: 25986 - RNA, 10 nt, Homo sapiens
gagggcuuga

SEQ ID NO: 25987 - RNA, 13 nt, Homo sapiens
gagugcaguggcg

SEQ ID NO: 25988 - RNA, 15 nt, Homo sapiens
gaugaucauguauuu

SEQ ID NO: 25989 - RNA, 21 nt, Homo sapiens
gaucauuucaaaacucauuuc

SEQ ID NO: 25990 - RNA, 19 nt, Homo sapiens
gauccgcccaucuccgucu

SEQ ID NO: 25991 - RNA, 23 nt, Homo sapiens
gauuccaccuacaugagguacug

SEQ ID NO: 25992 - RNA, 14 nt, Homo sapiens
gagacaccaccacc

SEQ ID NO: 25993 - RNA, 15 nt, Homo sapiens
gagacaccaccaccc

SEQ ID NO: 25994 - RNA, 22 nt, Homo sapiens
gagaccagccaaccugggggcu

SEQ ID NO: 25995 - RNA, 20 nt, Homo sapiens
gagacgggguuugccaugcu

SEQ ID NO: 25996 - RNA, 23 nt, Homo sapiens
gagacgggguuugccaugcuggc

SEQ ID NO: 25997 - RNA, 13 nt, Homo sapiens
gagacaccaccac

SEQ ID NO: 25998 - RNA, 20 nt, Homo sapiens
gacgugacuggccugcugga

SEQ ID NO: 25999 - RNA, 13 nt, Homo sapiens
gacuugggcggga

SEQ ID NO: 26000 - RNA, 14 nt, Homo sapiens
gacgaaccuugaaa

SEQ ID NO: 26001 - RNA, 13 nt, Homo sapiens
gacgggguuugcc

SEQ ID NO: 26002 - RNA, 17 nt, Homo sapiens
gacgggguuugccaugc

SEQ ID NO: 26003 - RNA, 23 nt, Homo sapiens
gacgggguuugccaugcuggcca

SEQ ID NO: 26004 - RNA, 12 nt, Homo sapiens
acaacugugacu

SEQ ID NO: 26005 - RNA, 13 nt, Homo sapiens
gaacucucgagcg

SEQ ID NO: 26006 - RNA, 19 nt, Homo sapiens
gaacuuguugagauccccg

SEQ ID NO: 26007 - RNA, 12 nt, Homo sapiens
acaccaccaccc

SEQ ID NO: 26008 - RNA, 22 nt, Homo sapiens
acaccagagauaauaugagaau

SEQ ID NO: 26009 - RNA, 18 nt, Homo sapiens
gaacagugauuaccaggg

SEQ ID NO: 26010 - RNA, 14 nt, Homo sapiens
acacagugucuggc

SEQ ID NO: 26011 - RNA, 15 nt, Homo sapiens
acacaugauccugca

SEQ ID NO: 26012 - RNA, 23 nt, Homo sapiens
acaagguucuucccuuuuacaua

SEQ ID NO: 26013 - RNA, 13 nt, Homo sapiens
aauuacaggcgug

SEQ ID NO: 26014 - RNA, 20 nt, Homo sapiens
aauuccuauauccugugacu

SEQ ID NO: 26015 - RNA, 13 nt, Homo sapiens
aauuccucuggga

SEQ ID NO: 26016 - RNA, 14 nt, Homo sapiens
aauuccucugggaa

SEQ ID NO: 26017 - RNA, 17 nt, Homo sapiens
acaaaaauuagccgggc

SEQ ID NO: 26018 - RNA, 22 nt, Homo sapiens
gacaccaccacccuugccaugg

SEQ ID NO: 26019 - RNA, 20 nt, Homo sapiens
gacagcccuucuuuccacag

SEQ ID NO: 26020 - RNA, 23 nt, Homo sapiens
gacacaggcuccaaacuggagcu

SEQ ID NO: 26021 - RNA, 19 nt, Homo sapiens
gacauguuuacaaaccuca

SEQ ID NO: 26022 - RNA, 20 nt, Homo sapiens
gacauguuuacaaaccucaa

SEQ ID NO: 26023 - RNA, 16 nt, Homo sapiens
gacccucaugcugcca

SEQ ID NO: 26024 - RNA, 15 nt, Homo sapiens
gacccucaugcugcc

SEQ ID NO: 26025 - RNA, 18 nt, Homo sapiens
gacaagcucacagaccuu

SEQ ID NO: 26026 - RNA, 18 nt, Homo sapiens
gaauugcuugaacccagg

SEQ ID NO: 26027 - RNA, 21 nt, Homo sapiens
gaauuacaggcgugagccacc

SEQ ID NO: 26028 - RNA, 13 nt, Homo sapiens
gaagcaucacagg

SEQ ID NO: 26029 - RNA, 13 nt, Homo sapiens
cgcgccaccacgc

SEQ ID NO: 26030 - RNA, 21 nt, Homo sapiens
cgcgcaccuguaaucccagcu

SEQ ID NO: 26031 - RNA, 16 nt, Homo sapiens
ccuugcuccuggcugg

SEQ ID NO: 26032 - RNA, 19 nt, Homo sapiens
cgcgccaccacgcccagcu

SEQ ID NO: 26033 - RNA, 11 nt, Homo sapiens
cgggcauggug

SEQ ID NO: 26034 - RNA, 15 nt, Homo sapiens
cgcgccaccacgccc

SEQ ID NO: 26035 - RNA, 12 nt, Homo sapiens
cgcgcgccacca

SEQ ID NO: 26036 - RNA, 14 nt, Homo sapiens
cgcgugcaggcagc

SEQ ID NO: 26037 - RNA, 15 nt, Homo sapiens
cguugcuggggggga

SEQ ID NO: 26038 - RNA, 16 nt, Homo sapiens
cguggaacaguuaccu

SEQ ID NO: 26039 - RNA, 16 nt, Homo sapiens
cuaauaaaaaggugac

SEQ ID NO: 26040 - RNA, 18 nt, Homo sapiens
cuaccagcccuacaccau

SEQ ID NO: 26041 - RNA, 18 nt, Homo sapiens
cuacagccaggcggcugg

SEQ ID NO: 26042 - RNA, 19 nt, Homo sapiens
cuacagccaggcggcugga

SEQ ID NO: 26043 - RNA, 23 nt, Homo sapiens
cgucuugacuuuggcaaaugagc

SEQ ID NO: 26044 - RNA, 13 nt, Homo sapiens
cuagaguuuagcu

SEQ ID NO: 26045 - RNA, 17 nt, Homo sapiens
cgugaccugacagccca

SEQ ID NO: 26046 - RNA, 21 nt, Homo sapiens
cgugaccugacagcccaaggg

SEQ ID NO: 26047 - RNA, 15 nt, Homo sapiens
cgugacuggccugcu

SEQ ID NO: 26048 - RNA, 19 nt, Homo sapiens
cgugacuggccugcuggau

SEQ ID NO: 26049 - RNA, 18 nt, Homo sapiens
cgucucccaaagugcugg

SEQ ID NO: 26050 - RNA, 22 nt, Homo sapiens
cgggaguggcgcgcgccaccac

SEQ ID NO: 26051 - RNA, 12 nt, Homo sapiens
cgggacacaggc

SEQ ID NO: 26052 - RNA, 12 nt, Homo sapiens
cgggaguggcgc

SEQ ID NO: 26053 - RNA, 16 nt, Homo sapiens
cgggaguggcgcgcgc

SEQ ID NO: 26054 - RNA, 17 nt, Homo sapiens
cgggaguggcgcgcgcc

SEQ ID NO: 26055 - RNA, 18 nt, Homo sapiens
cgggaguggcgcgcgcca

SEQ ID NO: 26056 - RNA, 21 nt, Homo sapiens
cgggaguggcgcgcgccacca

SEQ ID NO: 26057 - RNA, 19 nt, Homo sapiens
cucauggaauuggagcucg

SEQ ID NO: 26058 - RNA, 16 nt, Homo sapiens
cuccaccuucuggguu

SEQ ID NO: 26059 - RNA, 18 nt, Homo sapiens
cuauguucuaagaaguga

SEQ ID NO: 26060 - RNA, 15 nt, Homo sapiens
cuauguuguugcacu

SEQ ID NO: 26061 - RNA, 16 nt, Homo sapiens
cuauguuguugcacuu

SEQ ID NO: 26062 - RNA, 21 nt, Homo sapiens
cucagugucaaugcagccccc

SEQ ID NO: 26063 - RNA, 14 nt, Homo sapiens
cuagcuaauaucaa

SEQ ID NO: 26064 - RNA, 15 nt, Homo sapiens
cuagcuaauaucaau

SEQ ID NO: 26065 - RNA, 11 nt, Homo sapiens
cuaggccgggc

SEQ ID NO: 26066 - RNA, 22 nt, Homo sapiens
cugggaauuacaggcgugagcc

SEQ ID NO: 26067 - RNA, 17 nt, Homo sapiens
cuggccaggcuggucuc

SEQ ID NO: 26068 - RNA, 16 nt, Homo sapiens
cuggcugggaguggca

SEQ ID NO: 26069 - RNA, 19 nt, Homo sapiens
cugggaauuacaggcguga

SEQ ID NO: 26070 - RNA, 18 nt, Homo sapiens
cugccuaagugcagcccc

SEQ ID NO: 26071 - RNA, 17 nt, Homo sapiens
cugcuguuuccuagcgc

SEQ ID NO: 26072 - RNA, 18 nt, Homo sapiens
cugcuguuuccuagcgca

SEQ ID NO: 26073 - RNA, 15 nt, Homo sapiens
cugcuuuaauuucau

SEQ ID NO: 26074 - RNA, 16 nt, Homo sapiens
cuggccaacgggguga

SEQ ID NO: 26075 - RNA, 18 nt, Homo sapiens
cuggagugcaguggcgca

SEQ ID NO: 26076 - RNA, 19 nt, Homo sapiens
cuggagugcaguggcgcaa

SEQ ID NO: 26077 - RNA, 17 nt, Homo sapiens
cugccuaagugcagccc

SEQ ID NO: 26078 - RNA, 15 nt, Homo sapiens
cugagagugaacaaa

SEQ ID NO: 26079 - RNA, 14 nt, Homo sapiens
cugagcgacaguga

SEQ ID NO: 26080 - RNA, 16 nt, Homo sapiens
cugacccagccccuug

SEQ ID NO: 26081 - RNA, 17 nt, Homo sapiens
cuccagccugggugaca

SEQ ID NO: 26082 - RNA, 12 nt, Homo sapiens
cucgaacugcug

SEQ ID NO: 26083 - RNA, 13 nt, Homo sapiens
cucgaacugcugg

SEQ ID NO: 26084 - RNA, 15 nt, Homo sapiens
cucgaacugcuggau

SEQ ID NO: 26085 - RNA, 13 nt, Homo sapiens
cucgugggacagu

SEQ ID NO: 26086 - RNA, 19 nt, Homo sapiens
cucucuuauagaauauuua

SEQ ID NO: 26087 - RNA, 21 nt, Homo sapiens
cucucuuuuuagagaaauuug

SEQ ID NO: 26088 - RNA, 12 nt, Homo sapiens
cucuggaaacca

SEQ ID NO: 26089 - RNA, 20 nt, Homo sapiens
cuugaugauacaaugaacac

SEQ ID NO: 26090 - RNA, 12 nt, Homo sapiens
cuugaacccagg

SEQ ID NO: 26091 - RNA, 15 nt, Homo sapiens
cuugaacccgggagg

SEQ ID NO: 26092 - RNA, 14 nt, Homo sapiens
cuugagaagagaau

SEQ ID NO: 26093 - RNA, 18 nt, Homo sapiens
cuuagacccucaugcugc

SEQ ID NO: 26094 - RNA, 23 nt, Homo sapiens
cuucccuuuuacauacugcuguc

SEQ ID NO: 26095 - RNA, 17 nt, Homo sapiens
cuggugccucaccccuu

SEQ ID NO: 26096 - RNA, 22 nt, Homo sapiens
cuguaaaauggagacaccacca

SEQ ID NO: 26097 - RNA, 23 nt, Homo sapiens
cuguaaaauggagacaccaccac

SEQ ID NO: 26098 - RNA, 24 nt, Homo sapiens
cuguaaaauggagacaccaccacc

SEQ ID NO: 26099 - RNA, 19 nt, Homo sapiens
cuguaaaauggagacacca

SEQ ID NO: 26100 - RNA, 17 nt, Homo sapiens
cuuucacaggggacagg

SEQ ID NO: 26101 - RNA, 20 nt, Homo sapiens
cuuugaugauuaauucaccu

SEQ ID NO: 26102 - RNA, 21 nt, Homo sapiens
cuuugaugauuaauucaccuu

SEQ ID NO: 26103 - RNA, 20 nt, Homo sapiens
gaaaagacauaagcaaagac

SEQ ID NO: 26104 - RNA, 22 nt, Homo sapiens
cuugggacaaaaacaaacaaac

SEQ ID NO: 26105 - RNA, 19 nt, Homo sapiens
cuuggcccaggaguuuggc

SEQ ID NO: 26106 - RNA, 13 nt, Homo sapiens
cuugucucugggc

SEQ ID NO: 26107 - RNA, 13 nt, Homo sapiens
gaaagaagcccaa

SEQ ID NO: 26108 - RNA, 20 nt, Homo sapiens
gaaaggagaaguuaagcaac

SEQ ID NO: 26109 - RNA, 22 nt, Homo sapiens
gaaagggucucccucuguugcc

SEQ ID NO: 26110 - RNA, 18 nt, Homo sapiens
aaucugaggccuccucuc

SEQ ID NO: 26111 - RNA, 14 nt, Homo sapiens
ggagacaccaccac

SEQ ID NO: 26112 - RNA, 20 nt, Homo sapiens
ggaguuaggcuauucacaac

SEQ ID NO: 26113 - RNA, 21 nt, Homo sapiens
ggaguuaggcuauucacaacc

SEQ ID NO: 26114 - RNA, 14 nt, Homo sapiens
ggaguuuggccaga

SEQ ID NO: 26115 - RNA, 19 nt, Homo sapiens
ggagcucugcccauccugc

SEQ ID NO: 26116 - RNA, 20 nt, Homo sapiens
ggagcucugcccauccugcc

SEQ ID NO: 26117 - RNA, 21 nt, Homo sapiens
ggagcucugcccauccugccc

SEQ ID NO: 26118 - RNA, 17 nt, Homo sapiens
ggagacaccaccacccu

SEQ ID NO: 26119 - RNA, 16 nt, Homo sapiens
ggagacaccaccaccc

SEQ ID NO: 26120 - RNA, 15 nt, Homo sapiens
ggagacaccaccacc

SEQ ID NO: 26121 - RNA, 13 nt, Homo sapiens
ggagacaccacca

SEQ ID NO: 26122 - RNA, 11 nt, Homo sapiens
ggaccugcugu

SEQ ID NO: 26123 - RNA, 17 nt, Homo sapiens
ggacagucaccucaugg

SEQ ID NO: 26124 - RNA, 22 nt, Homo sapiens
ggacagcccuucuuuccacaga

SEQ ID NO: 26125 - RNA, 16 nt, Homo sapiens
ggacauuugcucaugg

SEQ ID NO: 26126 - RNA, 18 nt, Homo sapiens
gcuggagcucugcccauc

SEQ ID NO: 26127 - RNA, 12 nt, Homo sapiens
gcuggagugcag

SEQ ID NO: 26128 - RNA, 17 nt, Homo sapiens
gcuggagugcaguggcg

SEQ ID NO: 26129 - RNA, 18 nt, Homo sapiens
gcugauaucaugccccug

SEQ ID NO: 26130 - RNA, 17 nt, Homo sapiens
gcuggccaacgggguga

SEQ ID NO: 26131 - RNA, 23 nt, Homo sapiens
gcugggaauuacaggcgugagcc

SEQ ID NO: 26132 - RNA, 24 nt, Homo sapiens
gcugggaauuacaggcgugagcca

SEQ ID NO: 26133 - RNA, 20 nt, Homo sapiens
gcuuagacccucaugcugcc

SEQ ID NO: 26134 - RNA, 22 nt, Homo sapiens
gcuuagacccucaugcugccaa

SEQ ID NO: 26135 - RNA, 14 nt, Homo sapiens
gcuuggcccaggag

SEQ ID NO: 26136 - RNA, 21 nt, Homo sapiens
gcuuuccucaaaacuucagac

SEQ ID NO: 26137 - RNA, 23 nt, Homo sapiens
gcuuucuagcuguugagcuguuu

SEQ ID NO: 26138 - RNA, 19 nt, Homo sapiens
gcuuuugcuaggucacaga

SEQ ID NO: 26139 - RNA, 17 nt, Homo sapiens
ggaauuggagcucgugg

SEQ ID NO: 26140 - RNA, 23 nt, Homo sapiens
gcuaucgccaucacagcugaacu

SEQ ID NO: 26141 - RNA, 16 nt, Homo sapiens
gcuauuuaaagacaaa

SEQ ID NO: 26142 - RNA, 21 nt, Homo sapiens
gcuaucgccaucacagcugaa

SEQ ID NO: 26143 - RNA, 21 nt, Homo sapiens
gcuacucuguuccuucacauc

SEQ ID NO: 26144 - RNA, 23 nt, Homo sapiens
gcucacgccuguaaucccagcac

SEQ ID NO: 26145 - RNA, 11 nt, Homo sapiens
gcgcgcgccac

SEQ ID NO: 26146 - RNA, 20 nt, Homo sapiens
gccuggucaacauggugaaa

SEQ ID NO: 26147 - RNA, 14 nt, Homo sapiens
gcgugagccaccaa

SEQ ID NO: 26148 - RNA, 22 nt, Homo sapiens
gcggcuggaauugaauucccug

SEQ ID NO: 26149 - RNA, 21 nt, Homo sapiens
ggaguuuggccagaagucaag

SEQ ID NO: 26150 - RNA, 13 nt, Homo sapiens
ggcgcgugcaggc

SEQ ID NO: 26151 - RNA, 19 nt, Homo sapiens
ggcagugcuuggcccagga

SEQ ID NO: 26152 - RNA, 20 nt, Homo sapiens
ggcagugcuuggcccaggag

SEQ ID NO: 26153 - RNA, 14 nt, Homo sapiens
ggccagaagucaag

SEQ ID NO: 26154 - RNA, 16 nt, Homo sapiens
ggccagaagucaaggc

SEQ ID NO: 26155 - RNA, 13 nt, Homo sapiens
ggccuccucucuc

SEQ ID NO: 26156 - RNA, 21 nt, Homo sapiens
ggcccaggaguuuggccagaa

SEQ ID NO: 26157 - RNA, 19 nt, Homo sapiens
ggcgugaccugacagccca

SEQ ID NO: 26158 - RNA, 15 nt, Homo sapiens
ggcgcgcgccaccac

SEQ ID NO: 26159 - RNA, 17 nt, Homo sapiens
ggcaggucacacaaccu

SEQ ID NO: 26160 - RNA, 14 nt, Homo sapiens
ggcagugcuuggcc

SEQ ID NO: 26161 - RNA, 12 nt, Homo sapiens
ggccuggcuggg

SEQ ID NO: 26162 - RNA, 13 nt, Homo sapiens
ggcuccaaacugg

SEQ ID NO: 26163 - RNA, 13 nt, Homo sapiens
ggcuauucacaac

SEQ ID NO: 26164 - RNA, 14 nt, Homo sapiens
ggcuauucacaacc

SEQ ID NO: 26165 - RNA, 20 nt, Homo sapiens
ggcucacgccuguaauccca

SEQ ID NO: 26166 - RNA, 21 nt, Homo sapiens
ggcucacgccuguaaucccag

SEQ ID NO: 26167 - RNA, 16 nt, Homo sapiens
ggcgugagccaccaaa

SEQ ID NO: 26168 - RNA, 17 nt, Homo sapiens
ggcgugagccaccaaac

SEQ ID NO: 26169 - RNA, 20 nt, Homo sapiens
ggcuggagugcaguggcgca

SEQ ID NO: 26170 - RNA, 15 nt, Homo sapiens
ggcugaggcgggugg

SEQ ID NO: 26171 - RNA, 13 nt, Homo sapiens
gguggguggggca

SEQ ID NO: 26172 - RNA, 15 nt, Homo sapiens
gguugcagugagccg

SEQ ID NO: 26173 - RNA, 15 nt, Homo sapiens
guaacugacaacuug

SEQ ID NO: 26174 - RNA, 22 nt, Homo sapiens
guaucuuguuuuuccacuacug

SEQ ID NO: 26175 - RNA, 16 nt, Homo sapiens
guaugacgugacuggc

SEQ ID NO: 26176 - RNA, 14 nt, Homo sapiens
gucaaugcagcccc

SEQ ID NO: 26177 - RNA, 23 nt, Homo sapiens
gucacacaaccugucccagcgag

SEQ ID NO: 26178 - RNA, 15 nt, Homo sapiens
gucacagaggaucug

SEQ ID NO: 26179 - RNA, 16 nt, Homo sapiens
gucacagaggaucugc

SEQ ID NO: 26180 - RNA, 12 nt, Homo sapiens
gucacauuccaa

SEQ ID NO: 26181 - RNA, 22 nt, Homo sapiens
gguauauaaauuuucccaaaac

SEQ ID NO: 26182 - RNA, 17 nt, Homo sapiens
ggggcuuuagggaccug

SEQ ID NO: 26183 - RNA, 14 nt, Homo sapiens
ggguggggcagugc

SEQ ID NO: 26184 - RNA, 13 nt, Homo sapiens
ggguggguggggc

SEQ ID NO: 26185 - RNA, 12 nt, Homo sapiens
ggguuucacaag

SEQ ID NO: 26186 - RNA, 16 nt, Homo sapiens
ggucucaguguccuca

SEQ ID NO: 26187 - RNA, 22 nt, Homo sapiens
ggugacccugaugaaaacauag

SEQ ID NO: 26188 - RNA, 22 nt, Homo sapiens
ggucaggaguuccuaaccagcc

SEQ ID NO: 26189 - RNA, 20 nt, Homo sapiens
gggccuggcugggaguggca

SEQ ID NO: 26190 - RNA, 21 nt, Homo sapiens
gggcgcgugcaggcagcagga

SEQ ID NO: 26191 - RNA, 13 nt, Homo sapiens
gggcagugcuugg

SEQ ID NO: 26192 - RNA, 16 nt, Homo sapiens
ggcuggucucgaacug

SEQ ID NO: 26193 - RNA, 17 nt, Homo sapiens
ugacuggccugcuggau

SEQ ID NO: 26194 - RNA, 19 nt, Homo sapiens
ugagcaccugcaggcguga

SEQ ID NO: 26195 - RNA, 19 nt, Homo sapiens
ugagcagucaggaaagaga

SEQ ID NO: 26196 - RNA, 19 nt, Homo sapiens
ugaccaauaaccaugccca

SEQ ID NO: 26197 - RNA, 15 nt, Homo sapiens
ugaauucccugccug

SEQ ID NO: 26198 - RNA, 22 nt, Homo sapiens
ucuguaaaauggagacaccacc

SEQ ID NO: 26199 - RNA, 12 nt, Homo sapiens
ucuggaaaccac

SEQ ID NO: 26200 - RNA, 21 nt, Homo sapiens
ucugggauagcugacccagcc

SEQ ID NO: 26201 - RNA, 17 nt, Homo sapiens
ucucccaaagugcuggg

SEQ ID NO: 26202 - RNA, 15 nt, Homo sapiens
ucucgaacugcugga

SEQ ID NO: 26203 - RNA, 18 nt, Homo sapiens
ucucgaacugcuggauuc

SEQ ID NO: 26204 - RNA, 12 nt, Homo sapiens
ucuaggccgggc

SEQ ID NO: 26205 - RNA, 13 nt, Homo sapiens
ucuaggccgggcg

SEQ ID NO: 26206 - RNA, 20 nt, Homo sapiens
ucggaucuggggcucuggga

SEQ ID NO: 26207 - RNA, 22 nt, Homo sapiens
ugcaugguuuagaaagcuugcc

SEQ ID NO: 26208 - RNA, 19 nt, Homo sapiens
ugaggacuugggcgggaca

SEQ ID NO: 26209 - RNA, 15 nt, Homo sapiens
ugagggcuugaggac

SEQ ID NO: 26210 - RNA, 22 nt, Homo sapiens
ugcucauggaauuggagcucgu

SEQ ID NO: 26211 - RNA, 21 nt, Homo sapiens
ugcuccuggcuggggccuguu

SEQ ID NO: 26212 - RNA, 17 nt, Homo sapiens
ucgagcguugcuggggg

SEQ ID NO: 26213 - RNA, 18 nt, Homo sapiens
ucgagcguugcugggggg

SEQ ID NO: 26214 - RNA, 16 nt, Homo sapiens
ucgccaucacagcuga

SEQ ID NO: 26215 - RNA, 22 nt, Homo sapiens
ucgcugauauauguguuuuuca

SEQ ID NO: 26216 - RNA, 24 nt, Homo sapiens
ucgcugauauauguguuuuucaca

SEQ ID NO: 26217 - RNA, 23 nt, Homo sapiens
ucuaauuuaucuugucucugggc

SEQ ID NO: 26218 - RNA, 24 nt, Homo sapiens
ucuaauuuaucuugucucugggcu

SEQ ID NO: 26219 - RNA, 14 nt, Homo sapiens
uccccgaaacuacc

SEQ ID NO: 26220 - RNA, 22 nt, Homo sapiens
ucccucuguugccaaggcugga

SEQ ID NO: 26221 - RNA, 13 nt, Homo sapiens
uccugagaccagc

SEQ ID NO: 26222 - RNA, 12 nt, Homo sapiens
uccuauauccug

SEQ ID NO: 26223 - RNA, 16 nt, Homo sapiens
uccucaucuguaaaau

SEQ ID NO: 26224 - RNA, 17 nt, Homo sapiens
ucagacauagaauuaac

SEQ ID NO: 26225 - RNA, 18 nt, Homo sapiens
ucagccccgggaguggcg

SEQ ID NO: 26226 - RNA, 19 nt, Homo sapiens
ucagccccgggaguggcgc

SEQ ID NO: 26227 - RNA, 21 nt, Homo sapiens
ucagccccgggaguggcgcgc

SEQ ID NO: 26228 - RNA, 21 nt, Homo sapiens
ucagccugaaagaggaaugaa

SEQ ID NO: 26229 - RNA, 22 nt, Homo sapiens
ucagccugaaagaggaaugaag

SEQ ID NO: 26230 - RNA, 14 nt, Homo sapiens
ucagcgguuuauau

SEQ ID NO: 26231 - RNA, 18 nt, Homo sapiens
ucagugucaaugcagccc

SEQ ID NO: 26232 - RNA, 15 nt, Homo sapiens
ucaguguccucaucu

SEQ ID NO: 26233 - RNA, 20 nt, Homo sapiens
ucaggugacccugaugaaaa

SEQ ID NO: 26234 - RNA, 12 nt, Homo sapiens
uccagccugggu

SEQ ID NO: 26235 - RNA, 16 nt, Homo sapiens
ucauugcaaccuccac

SEQ ID NO: 26236 - RNA, 20 nt, Homo sapiens
uccagugagacagcucugca

SEQ ID NO: 26237 - RNA, 16 nt, Homo sapiens
ucacaagacccaaaag

SEQ ID NO: 26238 - RNA, 10 nt, Homo sapiens
ucaauauuua

SEQ ID NO: 26239 - RNA, 24 nt, Homo sapiens
ucaauauuuauuauuuucaccugu

SEQ ID NO: 26240 - RNA, 21 nt, Homo sapiens
ucacauacaauuauuuuuaca

SEQ ID NO: 26241 - RNA, 17 nt, Homo sapiens
uauuaauauuuaacauu

SEQ ID NO: 26242 - RNA, 18 nt, Homo sapiens
uaucgccaucacagcuga

SEQ ID NO: 26243 - RNA, 19 nt, Homo sapiens
uaucgccaucacagcugaa

SEQ ID NO: 26244 - RNA, 22 nt, Homo sapiens
uauccuaauaaaaaggugacca

SEQ ID NO: 26245 - RNA, 12 nt, Homo sapiens
uacagccaggcg

SEQ ID NO: 26246 - RNA, 13 nt, Homo sapiens
uacagccaggcgg

SEQ ID NO: 26247 - RNA, 23 nt, Homo sapiens
uagaauuaacacaugauccugca

SEQ ID NO: 26248 - RNA, 16 nt, Homo sapiens
uaggaagagaaaccag

SEQ ID NO: 26249 - RNA, 18 nt, Homo sapiens
gucucccaaagugcuggg

SEQ ID NO: 26250 - RNA, 12 nt, Homo sapiens
gugagccaccaa

SEQ ID NO: 26251 - RNA, 20 nt, Homo sapiens
gugagccaccaaacccggcc

SEQ ID NO: 26252 - RNA, 13 nt, Homo sapiens
gugacuggccugc

SEQ ID NO: 26253 - RNA, 21 nt, Homo sapiens
gucucagugucaaugcagccc

SEQ ID NO: 26254 - RNA, 17 nt, Homo sapiens
gucucccaaagugcugg

SEQ ID NO: 26255 - RNA, 13 nt, Homo sapiens
guggagggggcgc

SEQ ID NO: 26256 - RNA, 15 nt, Homo sapiens
gugucuggcacuugg

SEQ ID NO: 26257 - RNA, 23 nt, Homo sapiens
gugggacaguuccugagaccagc

SEQ ID NO: 26258 - RNA, 13 nt, Homo sapiens
gugggugggguga

SEQ ID NO: 26259 - RNA, 18 nt, Homo sapiens
gugcuuggcccaggaguu

SEQ ID NO: 26260 - RNA, 17 nt, Homo sapiens
gugccucaccccuugcc

SEQ ID NO: 26261 - RNA, 12 nt, Homo sapiens
gugcaauaugug

SEQ ID NO: 26262 - RNA, 17 nt, Homo sapiens
guuccugagaccagcca

SEQ ID NO: 26263 - RNA, 22 nt, Homo sapiens
guuccugagaccagccaaccug

SEQ ID NO: 26264 - RNA, 23 nt, Homo sapiens
guuccugagaccagccaaccugg

SEQ ID NO: 26265 - RNA, 14 nt, Homo sapiens
guugccaaggcugg

SEQ ID NO: 26266 - RNA, 16 nt, Homo sapiens
guucuuuggggagcca

SEQ ID NO: 26267 - RNA, 12 nt, Homo sapiens
gugugcuggcuu

SEQ ID NO: 26268 - RNA, 20 nt, Homo sapiens
guuauuuagggaacugcuug

SEQ ID NO: 26269 - RNA, 15 nt, Homo sapiens
guuuaugauuccacc

SEQ ID NO: 26270 - RNA, 19 nt, Homo sapiens
uaaaaaaaaaccugagccc

SEQ ID NO: 26271 - RNA, 14 nt, Homo sapiens
guuuuuaagcuguu

SEQ ID NO: 26272 - RNA, 18 nt, Homo sapiens
guuuccauagggugacac

SEQ ID NO: 26273 - RNA, 13 nt, Homo sapiens
guuguuggaggcu

SEQ ID NO: 26274 - RNA, 11 nt, Homo sapiens
caccaauauuc

SEQ ID NO: 26275 - RNA, 24 nt, Homo sapiens
cacucuauguucuaagaagugaaa

SEQ ID NO: 26276 - RNA, 15 nt, Homo sapiens
cacuugaacccggga

SEQ ID NO: 26277 - RNA, 23 nt, Homo sapiens
cagagacgggguuugccaugcug

SEQ ID NO: 26278 - RNA, 16 nt, Homo sapiens
cagaucauuucaaaac

SEQ ID NO: 26279 - RNA, 15 nt, Homo sapiens
cagccagcacagccu

SEQ ID NO: 26280 - RNA, 13 nt, Homo sapiens
cagcacuuuggga

SEQ ID NO: 26281 - RNA, 17 nt, Homo sapiens
cagccaggcggcuggaa

SEQ ID NO: 26282 - RNA, 12 nt, Homo sapiens
cagcccuacacc

SEQ ID NO: 26283 - RNA, 22 nt, Homo sapiens
cagcuacuugggaggcugagau

SEQ ID NO: 26284 - RNA, 23 nt, Homo sapiens
caggcuggucucgaacugcugga

SEQ ID NO: 26285 - RNA, 11 nt, Homo sapiens
caggcuggcca

SEQ ID NO: 26286 - RNA, 22 nt, Homo sapiens
caggcuccaaacuggagcuuga

SEQ ID NO: 26287 - RNA, 20 nt, Homo sapiens
cagugcuuggcccaggaguu

SEQ ID NO: 26288 - RNA, 20 nt, Homo sapiens
caggugacccugaugaaaac

SEQ ID NO: 26289 - RNA, 14 nt, Homo sapiens
cagucagaagaccu

SEQ ID NO: 26290 - RNA, 15 nt, Homo sapiens
caggcgugagccacc

SEQ ID NO: 26291 - RNA, 16 nt, Homo sapiens
caggcgugagccacca

SEQ ID NO: 26292 - RNA, 23 nt, Homo sapiens
caggcgugagccaccaaacccgg

SEQ ID NO: 26293 - RNA, 15 nt, Homo sapiens
caggcuagauguaug

SEQ ID NO: 26294 - RNA, 19 nt, Homo sapiens
caggcgugagccaccaaac

SEQ ID NO: 26295 - RNA, 16 nt, Homo sapiens
caggaguuuggccaga

SEQ ID NO: 26296 - RNA, 22 nt, Homo sapiens
caggaguuccuaaccagccugg

SEQ ID NO: 26297 - RNA, 18 nt, Homo sapiens
cagugucaaugcagcccc

SEQ ID NO: 26298 - RNA, 23 nt, Homo sapiens
caguuccugagaccagccaaccu

SEQ ID NO: 26299 - RNA, 14 nt, Homo sapiens
caucaaugaaugaa

SEQ ID NO: 26300 - RNA, 12 nt, Homo sapiens
cauagcagcuua

SEQ ID NO: 26301 - RNA, 19 nt, Homo sapiens
caucaaugaaugaaugaau

SEQ ID NO: 26302 - RNA, 20 nt, Homo sapiens
caugauccugcaauuccacu

SEQ ID NO: 26303 - RNA, 22 nt, Homo sapiens
caugggccuagcccacuggcuc

SEQ ID NO: 26304 - RNA, 17 nt, Homo sapiens
caugcuggccaggcugg

SEQ ID NO: 26305 - RNA, 16 nt, Homo sapiens
caugcuggccaggcug

SEQ ID NO: 26306 - RNA, 15 nt, Homo sapiens
caugcugccaauauc

SEQ ID NO: 26307 - RNA, 19 nt, Homo sapiens
caugcugccaauauccuaa

SEQ ID NO: 26308 - RNA, 15 nt, Homo sapiens
ccaauuuacuuuguu

SEQ ID NO: 26309 - RNA, 19 nt, Homo sapiens
ccacaaaauugggaaagga

SEQ ID NO: 26310 - RNA, 19 nt, Homo sapiens
ccaccaaacccggccugau

SEQ ID NO: 26311 - RNA, 15 nt, Homo sapiens
ccaccacgcccagcu

SEQ ID NO: 26312 - RNA, 16 nt, Homo sapiens
ccaccuucuggguuca

SEQ ID NO: 26313 - RNA, 19 nt, Homo sapiens
cauuguaauugcuaucgcc

SEQ ID NO: 26314 - RNA, 18 nt, Homo sapiens
cauucuugaaagcugugg

SEQ ID NO: 26315 - RNA, 22 nt, Homo sapiens
cauggaucugguagggggaaaa

SEQ ID NO: 26316 - RNA, 17 nt, Homo sapiens
cauggugugcuggcuua

SEQ ID NO: 26317 - RNA, 20 nt, Homo sapiens
cauguaugacgugacuggcc

SEQ ID NO: 26318 - RNA, 19 nt, Homo sapiens
cccgggaguggcgcgcgcc

SEQ ID NO: 26319 - RNA, 14 nt, Homo sapiens
cccgggaguggcgc

SEQ ID NO: 26320 - RNA, 19 nt, Homo sapiens
ccccugcacuccagccuga

SEQ ID NO: 26321 - RNA, 20 nt, Homo sapiens
ccccugcacuccagccugag

SEQ ID NO: 26322 - RNA, 12 nt, Homo sapiens
cccucaugcugc

SEQ ID NO: 26323 - RNA, 12 nt, Homo sapiens
cccuacaccauu

SEQ ID NO: 26324 - RNA, 12 nt, Homo sapiens
cccucugggucu

SEQ ID NO: 26325 - RNA, 18 nt, Homo sapiens
cccucuguugccaaggcu

SEQ ID NO: 26326 - RNA, 19 nt, Homo sapiens
cccucuguugccaaggcug

SEQ ID NO: 26327 - RNA, 20 nt, Homo sapiens
cccucuguugccaaggcugg

SEQ ID NO: 26328 - RNA, 22 nt, Homo sapiens
cccucuguugccaaggcuggag

SEQ ID NO: 26329 - RNA, 12 nt, Homo sapiens
cccugccuggau

SEQ ID NO: 26330 - RNA, 15 nt, Homo sapiens
ccauggagguuaagc

SEQ ID NO: 26331 - RNA, 16 nt, Homo sapiens
ccauugugggcucugg

SEQ ID NO: 26332 - RNA, 18 nt, Homo sapiens
cccaggaguuuggccaga

SEQ ID NO: 26333 - RNA, 22 nt, Homo sapiens
cccauccugccccugagcccau

SEQ ID NO: 26334 - RNA, 23 nt, Homo sapiens
cccagcgagggacaccgaguggc

SEQ ID NO: 26335 - RNA, 24 nt, Homo sapiens
cccagcgagggacaccgaguggcc

SEQ ID NO: 26336 - RNA, 12 nt, Homo sapiens
ccagugagacag

SEQ ID NO: 26337 - RNA, 12 nt, Homo sapiens
ccaggcggcugg

SEQ ID NO: 26338 - RNA, 18 nt, Homo sapiens
ccagcuacuugggaggcu

SEQ ID NO: 26339 - RNA, 18 nt, Homo sapiens
ccagcacuuugggaggcu

SEQ ID NO: 26340 - RNA, 23 nt, Homo sapiens
ccagcacuuugggaggcugaggc

SEQ ID NO: 26341 - RNA, 14 nt, Homo sapiens
ccacuacugcuacc

SEQ ID NO: 26342 - RNA, 24 nt, Homo sapiens
cccucuguugccaaggcuggagug

SEQ ID NO: 26343 - RNA, 18 nt, Homo sapiens
cccuguacuccagccugg

SEQ ID NO: 26344 - RNA, 19 nt, Homo sapiens
cccuguacuccagccuggg

SEQ ID NO: 26345 - RNA, 18 nt, Homo sapiens
ccgggaguggcgcgcgcc

SEQ ID NO: 26346 - RNA, 22 nt, Homo sapiens
ccgggaguggcgcgcgccacca

SEQ ID NO: 26347 - RNA, 23 nt, Homo sapiens
ccgggaguggcgcgcgccaccac

SEQ ID NO: 26348 - RNA, 19 nt, Homo sapiens
ccgucucccaaagugcugg

SEQ ID NO: 26349 - RNA, 17 nt, Homo sapiens
ccuaauaaaaaggugac

SEQ ID NO: 26350 - RNA, 13 nt, Homo sapiens
ccgggcauggugg

SEQ ID NO: 26351 - RNA, 19 nt, Homo sapiens
ccuaauaaaaaggugacca

SEQ ID NO: 26352 - RNA, 14 nt, Homo sapiens
ccucaagccagccu

SEQ ID NO: 26353 - RNA, 16 nt, Homo sapiens
ccuggucaacauggug

SEQ ID NO: 26354 - RNA, 17 nt, Homo sapiens
ccuggucaacaugguga

SEQ ID NO: 26355 - RNA, 16 nt, Homo sapiens
ccugccccugagccca

SEQ ID NO: 26356 - RNA, 15 nt, Homo sapiens
ccuguacuccagccu

SEQ ID NO: 26357 - RNA, 15 nt, Homo sapiens
ccuugcuccuggcug

SEQ ID NO: 26358 - RNA, 13 nt, Homo sapiens
ccuuugggaaagg

SEQ ID NO: 26359 - RNA, 14 nt, Homo sapiens
ccuuugggaaagga

SEQ ID NO: 26360 - RNA, 10 nt, Homo sapiens
ccuuuuuccu

SEQ ID NO: 26361 - RNA, 15 nt, Homo sapiens
ccugcaggcgugacc

SEQ ID NO: 26362 - RNA, 14 nt, Homo sapiens
ccugcaggcgugac

SEQ ID NO: 26363 - RNA, 9 nt, Homo sapiens
ccugagccc

SEQ ID NO: 26364 - RNA, 14 nt, Homo sapiens
ccucaugcugccaa

SEQ ID NO: 26365 - RNA, 15 nt, Homo sapiens
ccucaugcugccaau

SEQ ID NO: 26366 - RNA, 16 nt, Homo sapiens
cuccagccugggugac

SEQ ID NO: 26367 - RNA, 15 nt, Homo sapiens
cuccagccugagcga

SEQ ID NO: 26368 - RNA, 14 nt, Homo sapiens
cucgaacugcugga

SEQ ID NO: 26369 - RNA, 13 nt, Homo sapiens
cucugucucaguc

SEQ ID NO: 26370 - RNA, 17 nt, Homo sapiens
cucuguuccuucacauc

SEQ ID NO: 26371 - RNA, 21 nt, Homo sapiens
cugaagaagaugguaccacca

SEQ ID NO: 26372 - RNA, 16 nt, Homo sapiens
cucuuuauucagcccc

SEQ ID NO: 26373 - RNA, 21 nt, Homo sapiens
cugcuguuuccuagcgcagcc

SEQ ID NO: 26374 - RNA, 17 nt, Homo sapiens
cuggacuuuccagagac

SEQ ID NO: 26375 - RNA, 23 nt, Homo sapiens
cugccgguuugaaaauaugccug

SEQ ID NO: 26376 - RNA, 16 nt, Homo sapiens
cugccaauauccuaau

SEQ ID NO: 26377 - RNA, 13 nt, Homo sapiens
cucguggaacagu

SEQ ID NO: 26378 - RNA, 15 nt, Homo sapiens
cugacccagccccuu

SEQ ID NO: 26379 - RNA, 14 nt, Homo sapiens
cugccccugagccc

SEQ ID NO: 26380 - RNA, 15 nt, Homo sapiens
cugccccugagccca

SEQ ID NO: 26381 - RNA, 14 nt, Homo sapiens
cugcagacaugaga

SEQ ID NO: 26382 - RNA, 19 nt, Homo sapiens
cugcacuccagccugagcg

SEQ ID NO: 26383 - RNA, 19 nt, Homo sapiens
cugggguggguggggcagu

SEQ ID NO: 26384 - RNA, 20 nt, Homo sapiens
cugggguggguggggcagug

SEQ ID NO: 26385 - RNA, 21 nt, Homo sapiens
cugggguggguggggcagugc

SEQ ID NO: 26386 - RNA, 14 nt, Homo sapiens
cuggggcucuggga

SEQ ID NO: 26387 - RNA, 15 nt, Homo sapiens
cuggcuggggccugu

SEQ ID NO: 26388 - RNA, 16 nt, Homo sapiens
cuggcuggggccuguu

SEQ ID NO: 26389 - RNA, 16 nt, Homo sapiens
cuggcacuugggacaa

SEQ ID NO: 26390 - RNA, 13 nt, Homo sapiens
cuggccugcugga

SEQ ID NO: 26391 - RNA, 15 nt, Homo sapiens
cuggccugcuggaug

SEQ ID NO: 26392 - RNA, 16 nt, Homo sapiens
cuggccugcuggaugu

SEQ ID NO: 26393 - RNA, 15 nt, Homo sapiens
cugguucuucuuggu

SEQ ID NO: 26394 - RNA, 21 nt, Homo sapiens
cuguaaucacagcuacuuggg

SEQ ID NO: 26395 - RNA, 20 nt, Homo sapiens
cuuagacccucaugcugcca

SEQ ID NO: 26396 - RNA, 21 nt, Homo sapiens
cuuagacccucaugcugccaa

SEQ ID NO: 26397 - RNA, 22 nt, Homo sapiens
cuuugggaggcugaggcgggug

SEQ ID NO: 26398 - RNA, 23 nt, Homo sapiens
cuuugggaggcugaggcgggugg

SEQ ID NO: 26399 - RNA, 21 nt, Homo sapiens
cuuugggaggcugaggcgggu

SEQ ID NO: 26400 - RNA, 15 nt, Homo sapiens
gaaaccagggagccc

SEQ ID NO: 26401 - RNA, 17 nt, Homo sapiens
gaaauaagccagacauc

SEQ ID NO: 26402 - RNA, 16 nt, Homo sapiens
gaaagggucucccucu

SEQ ID NO: 26403 - RNA, 21 nt, Homo sapiens
cuugaaauagugucugaugaa

SEQ ID NO: 26404 - RNA, 18 nt, Homo sapiens
cuguugccaaggcuggag

SEQ ID NO: 26405 - RNA, 17 nt, Homo sapiens
cuauguuguugcacuuu

SEQ ID NO: 26406 - RNA, 19 nt, Homo sapiens
cuaauaaaaaggugaccau

SEQ ID NO: 26407 - RNA, 19 nt, Homo sapiens
cuaccagcccuacaccauu

SEQ ID NO: 26408 - RNA, 12 nt, Homo sapiens
cuaggccgggcg

SEQ ID NO: 26409 - RNA, 13 nt, Homo sapiens
cuaggccgggcgc

SEQ ID NO: 26410 - RNA, 16 nt, Homo sapiens
cuagcuaauaucaaua

SEQ ID NO: 26411 - RNA, 15 nt, Homo sapiens
cgggacacaggcucc

SEQ ID NO: 26412 - RNA, 14 nt, Homo sapiens
cgggaguggcgcgc

SEQ ID NO: 26413 - RNA, 12 nt, Homo sapiens
cgggcauggugg

SEQ ID NO: 26414 - RNA, 18 nt, Homo sapiens
cgggguuugccaugcugg

SEQ ID NO: 26415 - RNA, 21 nt, Homo sapiens
cgggguuugccaugcuggcca

SEQ ID NO: 26416 - RNA, 12 nt, Homo sapiens
cgggcgcggugg

SEQ ID NO: 26417 - RNA, 15 nt, Homo sapiens
cgggcguggugguga

SEQ ID NO: 26418 - RNA, 21 nt, Homo sapiens
cgugacuggccugcuggaugu

SEQ ID NO: 26419 - RNA, 13 nt, Homo sapiens
cggguggaucacu

SEQ ID NO: 26420 - RNA, 16 nt, Homo sapiens
cgugacuggccugcug

SEQ ID NO: 26421 - RNA, 19 nt, Homo sapiens
cgucucccaaagugcuggg

SEQ ID NO: 26422 - RNA, 16 nt, Homo sapiens
cgugggacagucaccu

SEQ ID NO: 26423 - RNA, 14 nt, Homo sapiens
cgcgccaccacgcc

SEQ ID NO: 26424 - RNA, 16 nt, Homo sapiens
cgagcguugcuggggg

SEQ ID NO: 26425 - RNA, 17 nt, Homo sapiens
cgagcguugcugggggg

SEQ ID NO: 26426 - RNA, 16 nt, Homo sapiens
cgccuguaaucccagc

SEQ ID NO: 26427 - RNA, 20 nt, Homo sapiens
cgaaguauccuucagccuga

SEQ ID NO: 26428 - RNA, 17 nt, Homo sapiens
cgcaccuguaaucccag

SEQ ID NO: 26429 - RNA, 20 nt, Homo sapiens
ugcuguuuccuagcgcagcc

SEQ ID NO: 26430 - RNA, 23 nt, Homo sapiens
ugcugggaauuacaggcgugagc

SEQ ID NO: 26431 - RNA, 23 nt, Homo sapiens
ugcuggauguggagggggcgcgu

SEQ ID NO: 26432 - RNA, 16 nt, Homo sapiens
uggagugcaguggcgc

SEQ ID NO: 26433 - RNA, 16 nt, Homo sapiens
uggagacaccaccacc

SEQ ID NO: 26434 - RNA, 15 nt, Homo sapiens
uggagacaccaccac

SEQ ID NO: 26435 - RNA, 12 nt, Homo sapiens
uggagacaccac

SEQ ID NO: 26436 - RNA, 18 nt, Homo sapiens
uggcgcgcgccaccacgc

SEQ ID NO: 26437 - RNA, 23 nt, Homo sapiens
uggccagaagucaaggcuuagac

SEQ ID NO: 26438 - RNA, 13 nt, Homo sapiens
uggcaguuuucca

SEQ ID NO: 26439 - RNA, 19 nt, Homo sapiens
uggcccaggaguuuggcca

SEQ ID NO: 26440 - RNA, 17 nt, Homo sapiens
ugggauagcugacccag

SEQ ID NO: 26441 - RNA, 18 nt, Homo sapiens
uggggagccaacagaagc

SEQ ID NO: 26442 - RNA, 17 nt, Homo sapiens
uggggcagugcuuggcc

SEQ ID NO: 26443 - RNA, 19 nt, Homo sapiens
uggggcagugcuuggccca

SEQ ID NO: 26444 - RNA, 18 nt, Homo sapiens
uguuaaaacugggacagg

SEQ ID NO: 26445 - RNA, 23 nt, Homo sapiens
uguggcuguaucuuguuuuucca

SEQ ID NO: 26446 - RNA, 16 nt, Homo sapiens
uguugacaugggacau

SEQ ID NO: 26447 - RNA, 16 nt, Homo sapiens
uggcgcgcgccaccac

SEQ ID NO: 26448 - RNA, 14 nt, Homo sapiens
uggugccucaguuu

SEQ ID NO: 26449 - RNA, 13 nt, Homo sapiens
uguacuuuuucca

SEQ ID NO: 26450 - RNA, 11 nt, Homo sapiens
uugagcaccug

SEQ ID NO: 26451 - RNA, 14 nt, Homo sapiens
uuccugagaccagc

SEQ ID NO: 26452 - RNA, 22 nt, Homo sapiens
uguuuacaaaccucaagccagc

SEQ ID NO: 26453 - RNA, 11 nt, Homo sapiens
uuagccgggca

SEQ ID NO: 26454 - RNA, 11 nt, Homo sapiens
uuagccgggcg

SEQ ID NO: 26455 - RNA, 22 nt, Homo sapiens
uuagccgggcgugguggugagu

SEQ ID NO: 26456 - RNA, 12 nt, Homo sapiens
accacugcagaa

SEQ ID NO: 26457 - RNA, 20 nt, Homo sapiens
acaugagagacagcaggucu

SEQ ID NO: 26458 - RNA, 23 nt, Homo sapiens
acccaaaguaucaggacgagaau

SEQ ID NO: 26459 - RNA, 13 nt, Homo sapiens
acccggccugauu

SEQ ID NO: 26460 - RNA, 12 nt, Homo sapiens
acccgggaggca

SEQ ID NO: 26461 - RNA, 16 nt, Homo sapiens
acagggaaagggucuc

SEQ ID NO: 26462 - RNA, 20 nt, Homo sapiens
acagugucuggcacuuggga

SEQ ID NO: 26463 - RNA, 21 nt, Homo sapiens
uugccaugcuggccaggcugg

SEQ ID NO: 26464 - RNA, 14 nt, Homo sapiens
agacaccaccaccc

SEQ ID NO: 26465 - RNA, 13 nt, Homo sapiens
agacagcaggucu

SEQ ID NO: 26466 - RNA, 19 nt, Homo sapiens
agacagggaaagggucucc

SEQ ID NO: 26467 - RNA, 13 nt, Homo sapiens
agacaccaccacc

SEQ ID NO: 26468 - RNA, 21 nt, Homo sapiens
agacgggguuugccaugcugg

SEQ ID NO: 26469 - RNA, 22 nt, Homo sapiens
agaagucaaggcuuagacccuc

SEQ ID NO: 26470 - RNA, 17 nt, Homo sapiens
agacccucaugcugcca

SEQ ID NO: 26471 - RNA, 20 nt, Homo sapiens
agacccucaugcugccaaua

SEQ ID NO: 26472 - RNA, 12 nt, Homo sapiens
agagacuuugug

SEQ ID NO: 26473 - RNA, 23 nt, Homo sapiens
agauaugaggcauuugcagcugu

SEQ ID NO: 26474 - RNA, 21 nt, Homo sapiens
acugggguggguggggcagug

SEQ ID NO: 26475 - RNA, 14 nt, Homo sapiens
acuugggaggcuga

SEQ ID NO: 26476 - RNA, 15 nt, Homo sapiens
acuuugggaggcuga

SEQ ID NO: 26477 - RNA, 20 nt, Homo sapiens
acuuuaacacagugucuggc

SEQ ID NO: 26478 - RNA, 23 nt, Homo sapiens
agccaugugauuacccucugggu

SEQ ID NO: 26479 - RNA, 20 nt, Homo sapiens
agccuugcuccuggcugggg

SEQ ID NO: 26480 - RNA, 22 nt, Homo sapiens
agcaccugcaggcgugaccuga

SEQ ID NO: 26481 - RNA, 12 nt, Homo sapiens
accugagcccca

SEQ ID NO: 26482 - RNA, 14 nt, Homo sapiens
accuguaaucccag

SEQ ID NO: 26483 - RNA, 15 nt, Homo sapiens
accuguaaucccagc

SEQ ID NO: 26484 - RNA, 15 nt, Homo sapiens
uuugaauuuuaaauc

SEQ ID NO: 26485 - RNA, 21 nt, Homo sapiens
uuugccaugcuggccaggcug

SEQ ID NO: 26486 - RNA, 15 nt, Homo sapiens
uugcuggagcucugc

SEQ ID NO: 26487 - RNA, 14 nt, Homo sapiens
uugcuugaacccag

SEQ ID NO: 26488 - RNA, 15 nt, Homo sapiens
uugcuugaacccagg

SEQ ID NO: 26489 - RNA, 14 nt, Homo sapiens
acccucaugcugcc

SEQ ID NO: 26490 - RNA, 13 nt, Homo sapiens
acccucugggucu

SEQ ID NO: 26491 - RNA, 11 nt, Homo sapiens
uugggaaagga

SEQ ID NO: 26492 - RNA, 17 nt, Homo sapiens
uuggccagaagucaagg

SEQ ID NO: 26493 - RNA, 15 nt, Homo sapiens
accuguccccgaaac

SEQ ID NO: 26494 - RNA, 14 nt, Homo sapiens
accuucuggguuca

SEQ ID NO: 26495 - RNA, 18 nt, Homo sapiens
acgugacuggccugcugg

SEQ ID NO: 26496 - RNA, 20 nt, Homo sapiens
acgugacuggccugcuggau

SEQ ID NO: 26497 - RNA, 14 nt, Homo sapiens
acgugacuggccug

SEQ ID NO: 26498 - RNA, 23 nt, Homo sapiens
acgaaguauccuucagccugaaa

SEQ ID NO: 26499 - RNA, 16 nt, Homo sapiens
acgccuguaaucccag

SEQ ID NO: 26500 - RNA, 14 nt, Homo sapiens
acuggccugcugga

SEQ ID NO: 26501 - RNA, 17 nt, Homo sapiens
acugggguggguggggc

SEQ ID NO: 26502 - RNA, 17 nt, Homo sapiens
acugagcuucucuguga

SEQ ID NO: 26503 - RNA, 16 nt, Homo sapiens
acguguauauuuuuua

SEQ ID NO: 26504 - RNA, 21 nt, Homo sapiens
aggcuuagacccucaugcugc

SEQ ID NO: 26505 - RNA, 12 nt, Homo sapiens
aguaaugauaac

SEQ ID NO: 26506 - RNA, 21 nt, Homo sapiens
agguuguuggauaaaucagug

SEQ ID NO: 26507 - RNA, 18 nt, Homo sapiens
agucaaggcuuagacccu

SEQ ID NO: 26508 - RNA, 15 nt, Homo sapiens
aggcgugagccacca

SEQ ID NO: 26509 - RNA, 17 nt, Homo sapiens
agggccuggcugggagu

SEQ ID NO: 26510 - RNA, 22 nt, Homo sapiens
aggguccuuugggaaaggagaa

SEQ ID NO: 26511 - RNA, 18 nt, Homo sapiens
aggaucugcuuggucuug

SEQ ID NO: 26512 - RNA, 13 nt, Homo sapiens
aggcaagagaauu

SEQ ID NO: 26513 - RNA, 21 nt, Homo sapiens
aggcuggagugcaguggcgca

SEQ ID NO: 26514 - RNA, 22 nt, Homo sapiens
aggcuggagugcaguggcgcaa

SEQ ID NO: 26515 - RNA, 15 nt, Homo sapiens
aggcggguggaucac

SEQ ID NO: 26516 - RNA, 13 nt, Homo sapiens
agcuguugagcug

SEQ ID NO: 26517 - RNA, 19 nt, Homo sapiens
agcucugcccauccugccc

SEQ ID NO: 26518 - RNA, 23 nt, Homo sapiens
aucacagcuacuugggaggcuga

SEQ ID NO: 26519 - RNA, 15 nt, Homo sapiens
auccuucagccugaa

SEQ ID NO: 26520 - RNA, 16 nt, Homo sapiens
auccuucagccugaaa

SEQ ID NO: 26521 - RNA, 16 nt, Homo sapiens
agugucaaugcagccc

SEQ ID NO: 26522 - RNA, 22 nt, Homo sapiens
aguggcgcgcgccaccacgccc

SEQ ID NO: 26523 - RNA, 23 nt, Homo sapiens
aguguuggagaagaacugaaauc

SEQ ID NO: 26524 - RNA, 16 nt, Homo sapiens
aguggcgcgcgccacc

SEQ ID NO: 26525 - RNA, 16 nt, Homo sapiens
aguugcagugagcuga

SEQ ID NO: 26526 - RNA, 13 nt, Homo sapiens
auacaaucaucaa

SEQ ID NO: 26527 - RNA, 15 nt, Homo sapiens
auaccacaggaacca

SEQ ID NO: 26528 - RNA, 12 nt, Homo sapiens
auacaaucauca

SEQ ID NO: 26529 - RNA, 18 nt, Homo sapiens
auacuguauuuuuaccuu

SEQ ID NO: 26530 - RNA, 20 nt, Homo sapiens
caccuguuuuuaagcuguuu

SEQ ID NO: 26531 - RNA, 21 nt, Homo sapiens
caccuguuuuuaagcuguuuc

SEQ ID NO: 26532 - RNA, 14 nt, Homo sapiens
caccugcaggcgug

SEQ ID NO: 26533 - RNA, 15 nt, Homo sapiens
caccugcaggcguga

SEQ ID NO: 26534 - RNA, 17 nt, Homo sapiens
caccugcaggcgugacc

SEQ ID NO: 26535 - RNA, 21 nt, Homo sapiens
caccugcaggcgugaccugac

SEQ ID NO: 26536 - RNA, 20 nt, Homo sapiens
cacccaaaguaucaggacga

SEQ ID NO: 26537 - RNA, 16 nt, Homo sapiens
caccagggccuggcug

SEQ ID NO: 26538 - RNA, 23 nt, Homo sapiens
cacagcugaacuuguugagaucc

SEQ ID NO: 26539 - RNA, 19 nt, Homo sapiens
cacaagaaaugaaagcagg

SEQ ID NO: 26540 - RNA, 23 nt, Homo sapiens
cacaaguuguguuugauauccaa

SEQ ID NO: 26541 - RNA, 23 nt, Homo sapiens
cacauggcuucaccuguccccga

SEQ ID NO: 26542 - RNA, 24 nt, Homo sapiens
cacauggcuucaccuguccccgaa

SEQ ID NO: 26543 - RNA, 13 nt, Homo sapiens
caccacccuugcc

SEQ ID NO: 26544 - RNA, 14 nt, Homo sapiens
caccaaacccggcc

SEQ ID NO: 26545 - RNA, 16 nt, Homo sapiens
caccaaacccggccug

SEQ ID NO: 26546 - RNA, 15 nt, Homo sapiens
auuuuccugaaaacc

SEQ ID NO: 26547 - RNA, 12 nt, Homo sapiens
auuccuauaucc

SEQ ID NO: 26548 - RNA, 13 nt, Homo sapiens
caaagaagacaac

SEQ ID NO: 26549 - RNA, 19 nt, Homo sapiens
caagugauccgcccaucuc

SEQ ID NO: 26550 - RNA, 15 nt, Homo sapiens
caagugauccgccca

SEQ ID NO: 26551 - RNA, 12 nt, Homo sapiens
caagccugacca

SEQ ID NO: 26552 - RNA, 22 nt, Homo sapiens
caagcacuuucccucuuggugc

SEQ ID NO: 26553 - RNA, 17 nt, Homo sapiens
caaggcuuagacccuca

SEQ ID NO: 26554 - RNA, 16 nt, Homo sapiens
caagaaaugaaagcag

SEQ ID NO: 26555 - RNA, 20 nt, Homo sapiens
caacugggguggguggggca

SEQ ID NO: 26556 - RNA, 13 nt, Homo sapiens
caaccuaaauuug

SEQ ID NO: 26557 - RNA, 15 nt, Homo sapiens
caaccugggggcuuu

SEQ ID NO: 26558 - RNA, 13 nt, Homo sapiens
auugguuuaccug

SEQ ID NO: 26559 - RNA, 12 nt, Homo sapiens
auuguugacaac

SEQ ID NO: 26560 - RNA, 17 nt, Homo sapiens
auugagcaccugcaggc

SEQ ID NO: 26561 - RNA, 18 nt, Homo sapiens
auuauggcugguaacaua

SEQ ID NO: 26562 - RNA, 17 nt, Homo sapiens
auggagacaccaccacc

SEQ ID NO: 26563 - RNA, 15 nt, Homo sapiens
auggagacaccacca

SEQ ID NO: 26564 - RNA, 14 nt, Homo sapiens
augagccggagccc

SEQ ID NO: 26565 - RNA, 15 nt, Homo sapiens
augauaacuggaaac

SEQ ID NO: 26566 - RNA, 19 nt, Homo sapiens
augccuggugcuuccaaau

SEQ ID NO: 26567 - RNA, 14 nt, Homo sapiens
augacgugacuggc

SEQ ID NO: 26568 - RNA, 10 nt, Homo sapiens
augauuucau

SEQ ID NO: 26569 - RNA, 21 nt, Homo sapiens
augcaucuuacugaagguaaa

SEQ ID NO: 26570 - RNA, 18 nt, Homo sapiens
auggagacaccaccaccc

SEQ ID NO: 26571 - RNA, 18 nt, Homo sapiens
augguuuaaauggucaau

SEQ ID NO: 26572 - RNA, 16 nt, Homo sapiens
ccuggcugggaguggc

SEQ ID NO: 26573 - RNA, 17 nt, Homo sapiens
ccuggcugggaguggca

SEQ ID NO: 26574 - RNA, 16 nt, Homo sapiens
ccuguaaucccagcac

SEQ ID NO: 26575 - RNA, 17 nt, Homo sapiens
ccuguaaucccagcuac

SEQ ID NO: 26576 - RNA, 16 nt, Homo sapiens
ccuguacuccagccug

SEQ ID NO: 26577 - RNA, 16 nt, Homo sapiens
ccuucuggguucaagc

SEQ ID NO: 26578 - RNA, 21 nt, Homo sapiens
ccuguguuucuagggaaauga

SEQ ID NO: 26579 - RNA, 15 nt, Homo sapiens
ccugccccugagccc

SEQ ID NO: 26580 - RNA, 12 nt, Homo sapiens
cgaacugcugga

SEQ ID NO: 26581 - RNA, 13 nt, Homo sapiens
cgaacugcuggau

SEQ ID NO: 26582 - RNA, 21 nt, Homo sapiens
cgaaguauccuucagccugaa

SEQ ID NO: 26583 - RNA, 18 nt, Homo sapiens
cgcaccuguaaucccagc

SEQ ID NO: 26584 - RNA, 15 nt, Homo sapiens
cgccuguaaucccag

SEQ ID NO: 26585 - RNA, 18 nt, Homo sapiens
ccuaauaaaaaggugacc

SEQ ID NO: 26586 - RNA, 20 nt, Homo sapiens
ccuaauaaaaaggugaccau

SEQ ID NO: 26587 - RNA, 20 nt, Homo sapiens
ccgucucccaaagugcuggg

SEQ ID NO: 26588 - RNA, 19 nt, Homo sapiens
ccgggcgcgguggcucacg

SEQ ID NO: 26589 - RNA, 21 nt, Homo sapiens
ccucauggaauuggagcucgu

SEQ ID NO: 26590 - RNA, 22 nt, Homo sapiens
ccuaaccucauuccccaaccac

SEQ ID NO: 26591 - RNA, 11 nt, Homo sapiens
ccucaagccag

SEQ ID NO: 26592 - RNA, 15 nt, Homo sapiens
ccucaagccagccuu

SEQ ID NO: 26593 - RNA, 21 nt, Homo sapiens
ccuccugccuaagugcagccc

SEQ ID NO: 26594 - RNA, 23 nt, Homo sapiens
ccugcuggauguggagggggcgc

SEQ ID NO: 26595 - RNA, 16 nt, Homo sapiens
cccaggaguuuggcca

SEQ ID NO: 26596 - RNA, 19 nt, Homo sapiens
cccaggaguuuggccagaa

SEQ ID NO: 26597 - RNA, 13 nt, Homo sapiens
cccgggaguggcg

SEQ ID NO: 26598 - RNA, 22 nt, Homo sapiens
cccgggaguggcgcgcgccacc

SEQ ID NO: 26599 - RNA, 23 nt, Homo sapiens
cccgggaguggcgcgcgccacca

SEQ ID NO: 26600 - RNA, 12 nt, Homo sapiens
cccgggaguggc

SEQ ID NO: 26601 - RNA, 22 nt, Homo sapiens
ccccugcacuccagccugagcg

SEQ ID NO: 26602 - RNA, 11 nt, Homo sapiens
cccuacaccau

SEQ ID NO: 26603 - RNA, 13 nt, Homo sapiens
cccucaugcugcc

SEQ ID NO: 26604 - RNA, 18 nt, Homo sapiens
cccugcacuccagccuga

SEQ ID NO: 26605 - RNA, 23 nt, Homo sapiens
ccggagccccuugggcaggucac

SEQ ID NO: 26606 - RNA, 14 nt, Homo sapiens
ccauagggugacac

SEQ ID NO: 26607 - RNA, 13 nt, Homo sapiens
ccauagggugaca

SEQ ID NO: 26608 - RNA, 11 nt, Homo sapiens
ccaugcuggcc

SEQ ID NO: 26609 - RNA, 16 nt, Homo sapiens
ccaugcuggccaggcu

SEQ ID NO: 26610 - RNA, 15 nt, Homo sapiens
ccauagggugacaca

SEQ ID NO: 26611 - RNA, 20 nt, Homo sapiens
cccagccccuugagaaaccu

SEQ ID NO: 26612 - RNA, 19 nt, Homo sapiens
cccagccccuugagaaacc

SEQ ID NO: 26613 - RNA, 16 nt, Homo sapiens
cccacaagaaaugaaa

SEQ ID NO: 26614 - RNA, 12 nt, Homo sapiens
ccauuccaagcc

SEQ ID NO: 26615 - RNA, 13 nt, Homo sapiens
ccauuccaagccu

SEQ ID NO: 26616 - RNA, 15 nt, Homo sapiens
ccauuccaagccuga

SEQ ID NO: 26617 - RNA, 19 nt, Homo sapiens
ccagcuacuugggaggcug

SEQ ID NO: 26618 - RNA, 23 nt, Homo sapiens
ccagcuacuugggaggcugaggc

SEQ ID NO: 26619 - RNA, 19 nt, Homo sapiens
ccagcacuuugggaggcug

SEQ ID NO: 26620 - RNA, 11 nt, Homo sapiens
ccaggcggcug

SEQ ID NO: 26621 - RNA, 16 nt, Homo sapiens
ccaggaguuuggccag

SEQ ID NO: 26622 - RNA, 12 nt, Homo sapiens
ccaggcuggucu

SEQ ID NO: 26623 - RNA, 19 nt, Homo sapiens
ccagggacugaggggaggg

SEQ ID NO: 26624 - RNA, 20 nt, Homo sapiens
ccagggacugaggggagggg

SEQ ID NO: 26625 - RNA, 13 nt, Homo sapiens
ccagugagacagc

SEQ ID NO: 26626 - RNA, 21 nt, Homo sapiens
ccacaccagggccuggcuggg

SEQ ID NO: 26627 - RNA, 13 nt, Homo sapiens
ccaaauucacaag

SEQ ID NO: 26628 - RNA, 13 nt, Homo sapiens
ccacucauucaaa

SEQ ID NO: 26629 - RNA, 21 nt, Homo sapiens
ccacuuauaggaauugaccca

SEQ ID NO: 26630 - RNA, 20 nt, Homo sapiens
caugugauuacccucugggu

SEQ ID NO: 26631 - RNA, 18 nt, Homo sapiens
cauuguaauugcuaucgc

SEQ ID NO: 26632 - RNA, 15 nt, Homo sapiens
cauuuaaaauauuuu

SEQ ID NO: 26633 - RNA, 13 nt, Homo sapiens
ccaaagugcuggg

SEQ ID NO: 26634 - RNA, 14 nt, Homo sapiens
cauuuuuacuuggg

SEQ ID NO: 26635 - RNA, 15 nt, Homo sapiens
cauuuuuacuugggu

SEQ ID NO: 26636 - RNA, 18 nt, Homo sapiens
ccaaccuaagcaagaucc

SEQ ID NO: 26637 - RNA, 21 nt, Homo sapiens
ccaacugggguggguggggca

SEQ ID NO: 26638 - RNA, 23 nt, Homo sapiens
ccaacugggguggguggggcagu

SEQ ID NO: 26639 - RNA, 17 nt, Homo sapiens
caggcgugagccaccaa

SEQ ID NO: 26640 - RNA, 22 nt, Homo sapiens
caggcgugaccugacagcccaa

SEQ ID NO: 26641 - RNA, 21 nt, Homo sapiens
caggcuccaaacuggagcuug

SEQ ID NO: 26642 - RNA, 22 nt, Homo sapiens
caggcgugagccaccaaacccg

SEQ ID NO: 26643 - RNA, 16 nt, Homo sapiens
caggaguuccuaacca

SEQ ID NO: 26644 - RNA, 20 nt, Homo sapiens
caggaaguagaggaggccac

SEQ ID NO: 26645 - RNA, 14 nt, Homo sapiens
caggcagcaggaua

SEQ ID NO: 26646 - RNA, 15 nt, Homo sapiens
caggcagcaggauag

SEQ ID NO: 26647 - RNA, 17 nt, Homo sapiens
cagugucaaugcagccc

SEQ ID NO: 26648 - RNA, 22 nt, Homo sapiens
cagugucaaugcagcccccauu

SEQ ID NO: 26649 - RNA, 19 nt, Homo sapiens
cagugucuggcacuuggga

SEQ ID NO: 26650 - RNA, 22 nt, Homo sapiens
cagugucuggcacuugggacaa

SEQ ID NO: 26651 - RNA, 12 nt, Homo sapiens
cagugcuuggcc

SEQ ID NO: 26652 - RNA, 11 nt, Homo sapiens
caggucuacca

SEQ ID NO: 26653 - RNA, 16 nt, Homo sapiens
cagugauuaccaggga

SEQ ID NO: 26654 - RNA, 13 nt, Homo sapiens
cagggagccccuu

SEQ ID NO: 26655 - RNA, 14 nt, Homo sapiens
cagggccuggcugg

SEQ ID NO: 26656 - RNA, 18 nt, Homo sapiens
cagggccuggcugggagu

SEQ ID NO: 26657 - RNA, 15 nt, Homo sapiens
cagucacauuccaag

SEQ ID NO: 26658 - RNA, 15 nt, Homo sapiens
caucaaugaaugaau

SEQ ID NO: 26659 - RNA, 18 nt, Homo sapiens
caucaaugaaugaaugaa

SEQ ID NO: 26660 - RNA, 20 nt, Homo sapiens
cauagcagauuuuaauuuug

SEQ ID NO: 26661 - RNA, 17 nt, Homo sapiens
cauagaauuaacacaug

SEQ ID NO: 26662 - RNA, 16 nt, Homo sapiens
caugcugccaauaucc

SEQ ID NO: 26663 - RNA, 15 nt, Homo sapiens
caugcugucuacacu

SEQ ID NO: 26664 - RNA, 19 nt, Homo sapiens
caugagguacugagaguga

SEQ ID NO: 26665 - RNA, 23 nt, Homo sapiens
caugggccuagcccacuggcucc

SEQ ID NO: 26666 - RNA, 14 nt, Homo sapiens
auuccaagccugac

SEQ ID NO: 26667 - RNA, 14 nt, Homo sapiens
auucaaaaguugaa

SEQ ID NO: 26668 - RNA, 21 nt, Homo sapiens
auguuaugcauaaagucagug

SEQ ID NO: 26669 - RNA, 14 nt, Homo sapiens
auugugggcucugg

SEQ ID NO: 26670 - RNA, 13 nt, Homo sapiens
auugcugaaugac

SEQ ID NO: 26671 - RNA, 15 nt, Homo sapiens
auugcuaucgccauc

SEQ ID NO: 26672 - RNA, 14 nt, Homo sapiens
auugagcaccugca

SEQ ID NO: 26673 - RNA, 14 nt, Homo sapiens
auugcaaccuccac

SEQ ID NO: 26674 - RNA, 19 nt, Homo sapiens
caauauucauagcagcuua

SEQ ID NO: 26675 - RNA, 18 nt, Homo sapiens
caaggcuuagacccucau

SEQ ID NO: 26676 - RNA, 13 nt, Homo sapiens
caaggcuggagug

SEQ ID NO: 26677 - RNA, 15 nt, Homo sapiens
caaggcuggagugca

SEQ ID NO: 26678 - RNA, 19 nt, Homo sapiens
caagaaaugaaagcaggga

SEQ ID NO: 26679 - RNA, 13 nt, Homo sapiens
caagcauuuagau

SEQ ID NO: 26680 - RNA, 22 nt, Homo sapiens
caacugggguggguggggcagu

SEQ ID NO: 26681 - RNA, 12 nt, Homo sapiens
caaauucacaag

SEQ ID NO: 26682 - RNA, 14 nt, Homo sapiens
auuuuccugaaaac

SEQ ID NO: 26683 - RNA, 15 nt, Homo sapiens
caaaauugggaaagg

SEQ ID NO: 26684 - RNA, 16 nt, Homo sapiens
caaaauugggaaagga

SEQ ID NO: 26685 - RNA, 23 nt, Homo sapiens
caauuuaaaaaaaaaccugagcc

SEQ ID NO: 26686 - RNA, 14 nt, Homo sapiens
cacaggacagcccu

SEQ ID NO: 26687 - RNA, 24 nt, Homo sapiens
cacaaguuguguuugauauccaaa

SEQ ID NO: 26688 - RNA, 11 nt, Homo sapiens
caccugcaggc

SEQ ID NO: 26689 - RNA, 12 nt, Homo sapiens
caccugcaggcg

SEQ ID NO: 26690 - RNA, 21 nt, Homo sapiens
caccauuccuucugcccugcu

SEQ ID NO: 26691 - RNA, 22 nt, Homo sapiens
caccauuccuucugcccugcuu

SEQ ID NO: 26692 - RNA, 17 nt, Homo sapiens
caccagggccuggcugg

SEQ ID NO: 26693 - RNA, 19 nt, Homo sapiens
cacgccuguaaucccagca

SEQ ID NO: 26694 - RNA, 20 nt, Homo sapiens
cacggacgaaccuugaaaac

SEQ ID NO: 26695 - RNA, 13 nt, Homo sapiens
cagcuacuuggga

SEQ ID NO: 26696 - RNA, 17 nt, Homo sapiens
cagcuacuugggaggcu

SEQ ID NO: 26697 - RNA, 18 nt, Homo sapiens
cagcuacuugggaggcug

SEQ ID NO: 26698 - RNA, 11 nt, Homo sapiens
cagcccuacac

SEQ ID NO: 26699 - RNA, 14 nt, Homo sapiens
cagccaaccugggg

SEQ ID NO: 26700 - RNA, 16 nt, Homo sapiens
cagccaggcggcugga

SEQ ID NO: 26701 - RNA, 17 nt, Homo sapiens
cagauaaacaguaguga

SEQ ID NO: 26702 - RNA, 21 nt, Homo sapiens
cagauaaauaguuuaugauuc

SEQ ID NO: 26703 - RNA, 14 nt, Homo sapiens
cagaucauuucaaa

SEQ ID NO: 26704 - RNA, 20 nt, Homo sapiens
cacuuuaacacagugucugg

SEQ ID NO: 26705 - RNA, 21 nt, Homo sapiens
cacuuuaacacagugucuggc

SEQ ID NO: 26706 - RNA, 18 nt, Homo sapiens
cagaaagcagaacaguga

SEQ ID NO: 26707 - RNA, 13 nt, Homo sapiens
cagaagcaaccca

SEQ ID NO: 26708 - RNA, 20 nt, Homo sapiens
cagaagcaacccaaauguuc

SEQ ID NO: 26709 - RNA, 16 nt, Homo sapiens
cagagaaaauaaaagc

SEQ ID NO: 26710 - RNA, 18 nt, Homo sapiens
cagagaaaauaaaagcac

SEQ ID NO: 26711 - RNA, 15 nt, Homo sapiens
cagagguugcaguga

SEQ ID NO: 26712 - RNA, 19 nt, Homo sapiens
cagagaaaauaaaagcacu

SEQ ID NO: 26713 - RNA, 20 nt, Homo sapiens
cacuugggacaaaaacaaac

SEQ ID NO: 26714 - RNA, 22 nt, Homo sapiens
aggcuuagacccucaugcugcc

SEQ ID NO: 26715 - RNA, 23 nt, Homo sapiens
aggcuuagacccucaugcugcca

SEQ ID NO: 26716 - RNA, 14 nt, Homo sapiens
aggcggguggauca

SEQ ID NO: 26717 - RNA, 20 nt, Homo sapiens
aggcuuagacccucaugcug

SEQ ID NO: 26718 - RNA, 23 nt, Homo sapiens
aggcuggucucgaacugcuggau

SEQ ID NO: 26719 - RNA, 11 nt, Homo sapiens
agggaccugcu

SEQ ID NO: 26720 - RNA, 14 nt, Homo sapiens
agggcuugaggacu

SEQ ID NO: 26721 - RNA, 19 nt, Homo sapiens
agggcuugaggacuugggc

SEQ ID NO: 26722 - RNA, 14 nt, Homo sapiens
agggggcgcgugca

SEQ ID NO: 26723 - RNA, 16 nt, Homo sapiens
agugagacucugucuc

SEQ ID NO: 26724 - RNA, 21 nt, Homo sapiens
aguggcgcgcgccaccacgcc

SEQ ID NO: 26725 - RNA, 18 nt, Homo sapiens
aguggcgcgcgccaccac

SEQ ID NO: 26726 - RNA, 17 nt, Homo sapiens
agugcuuggcccaggag

SEQ ID NO: 26727 - RNA, 13 nt, Homo sapiens
agugcuuggccca

SEQ ID NO: 26728 - RNA, 16 nt, Homo sapiens
auagcugacccagccc

SEQ ID NO: 26729 - RNA, 13 nt, Homo sapiens
auagacucuagga

SEQ ID NO: 26730 - RNA, 12 nt, Homo sapiens
auagcaagugaa

SEQ ID NO: 26731 - RNA, 18 nt, Homo sapiens
auaguuuaugauuccacc

SEQ ID NO: 26732 - RNA, 9 nt, Homo sapiens
auaaauuug

SEQ ID NO: 26733 - RNA, 15 nt, Homo sapiens
aguugcagugagcug

SEQ ID NO: 26734 - RNA, 21 nt, Homo sapiens
aguguuggaaaaugugcaaua

SEQ ID NO: 26735 - RNA, 22 nt, Homo sapiens
augcagcccccauuguggucac

SEQ ID NO: 26736 - RNA, 20 nt, Homo sapiens
augcaucuuacugaagguaa

SEQ ID NO: 26737 - RNA, 14 nt, Homo sapiens
augaauguuaaauu

SEQ ID NO: 26738 - RNA, 13 nt, Homo sapiens
auggagacaccac

SEQ ID NO: 26739 - RNA, 22 nt, Homo sapiens
augcuuaugaaacuaagauuug

SEQ ID NO: 26740 - RNA, 16 nt, Homo sapiens
auggagacaccaccac

SEQ ID NO: 26741 - RNA, 10 nt, Homo sapiens
augugcaaua

SEQ ID NO: 26742 - RNA, 23 nt, Homo sapiens
auguggagggggcgcgugcaggc

SEQ ID NO: 26743 - RNA, 19 nt, Homo sapiens
aucuauuuauuaauauuua

SEQ ID NO: 26744 - RNA, 14 nt, Homo sapiens
auccuucagccuga

SEQ ID NO: 26745 - RNA, 15 nt, Homo sapiens
aucuugucucugggc

SEQ ID NO: 26746 - RNA, 22 nt, Homo sapiens
aucucuauuaggaaauauucug

SEQ ID NO: 26747 - RNA, 21 nt, Homo sapiens
auccuaauaaaaaggugacca

SEQ ID NO: 26748 - RNA, 20 nt, Homo sapiens
auccuaauaaaaaggugacc

SEQ ID NO: 26749 - RNA, 18 nt, Homo sapiens
auccuaauaaaaagguga

SEQ ID NO: 26750 - RNA, 19 nt, Homo sapiens
auccuaauaaaaaggugac

SEQ ID NO: 26751 - RNA, 9 nt, Homo sapiens
aucaauauc

SEQ ID NO: 26752 - RNA, 10 nt, Homo sapiens
aucaauaucu

SEQ ID NO: 26753 - RNA, 15 nt, Homo sapiens
aucaggcuggccaac

SEQ ID NO: 26754 - RNA, 12 nt, Homo sapiens
auaugugaaaua

SEQ ID NO: 26755 - RNA, 21 nt, Homo sapiens
auauuuuuuguuaaaugauuu

SEQ ID NO: 26756 - RNA, 22 nt, Homo sapiens
auauuuuuuguuaaaugauuuc

SEQ ID NO: 26757 - RNA, 14 nt, Homo sapiens
aaaguucugcagau

SEQ ID NO: 26758 - RNA, 13 nt, Homo sapiens
aaauaaugaaaua

SEQ ID NO: 26759 - RNA, 15 nt, Homo sapiens
aacaguauccaguac

SEQ ID NO: 26760 - RNA, 12 nt, Homo sapiens
aaccagccuggu

SEQ ID NO: 26761 - RNA, 13 nt, Homo sapiens
aaccagccugguc

SEQ ID NO: 26762 - RNA, 22 nt, Homo sapiens
aaauuugguucuaggccgggcg

SEQ ID NO: 26763 - RNA, 21 nt, Homo sapiens
aaccaaauggagugacuuagu

SEQ ID NO: 26764 - RNA, 15 nt, Homo sapiens
aaccagccuggucaa

SEQ ID NO: 26765 - RNA, 21 nt, Homo sapiens
aacacagugucuggcacuugg

SEQ ID NO: 26766 - RNA, 18 nt, Homo sapiens
aacacaugauccugcaau

SEQ ID NO: 26767 - RNA, 21 nt, Homo sapiens
aaauuugguucuaggccgggc

SEQ ID NO: 26768 - RNA, 23 nt, Homo sapiens
aaauuugguucuaggccgggcgc

SEQ ID NO: 26769 - RNA, 11 nt, Homo sapiens
aaagugcuggg

SEQ ID NO: 26770 - RNA, 12 nt, Homo sapiens
aaagugcuggga

SEQ ID NO: 26771 - RNA, 14 nt, Homo sapiens
aaaggccugucccu

SEQ ID NO: 26772 - RNA, 22 nt, Homo sapiens
aaagguauuuauugagcaccug

SEQ ID NO: 26773 - RNA, 23 nt, Homo sapiens
aaagguauuuauugagcaccugc

SEQ ID NO: 26774 - RNA, 17 nt, Homo sapiens
aaaguagauuaagagau

SEQ ID NO: 26775 - RNA, 16 nt, Homo sapiens
aaaauggugugaccac

SEQ ID NO: 26776 - RNA, 15 nt, Homo sapiens
aaagacaaagacaaa

SEQ ID NO: 26777 - RNA, 13 nt, Homo sapiens
aaaaaggugacca

SEQ ID NO: 26778 - RNA, 15 nt, Homo sapiens
aagagauggguuuga

SEQ ID NO: 26779 - RNA, 23 nt, Homo sapiens
aagaggauguguggcauuuucac

SEQ ID NO: 26780 - RNA, 11 nt, Homo sapiens
aaccuccaccu

SEQ ID NO: 26781 - RNA, 16 nt, Homo sapiens
aacccggccugauuaa

SEQ ID NO: 26782 - RNA, 18 nt, Homo sapiens
aaccucauuccccaacca

SEQ ID NO: 26783 - RNA, 22 nt, Homo sapiens
aaccuguugauagcaagugaau

SEQ ID NO: 26784 - RNA, 17 nt, Homo sapiens
aaccuuuacauccagau

SEQ ID NO: 26785 - RNA, 13 nt, Homo sapiens
aaccugagcccca

SEQ ID NO: 26786 - RNA, 13 nt, Homo sapiens
aacucauuuccua

SEQ ID NO: 26787 - RNA, 21 nt, Homo sapiens
aagcacuuucccucuuggugc

SEQ ID NO: 26788 - RNA, 17 nt, Homo sapiens
aagcaugggccuagccc

SEQ ID NO: 26789 - RNA, 21 nt, Homo sapiens
aagguauuuuaaucaccaagg

SEQ ID NO: 26790 - RNA, 12 nt, Homo sapiens
aaguaauuucag

SEQ ID NO: 26791 - RNA, 14 nt, Homo sapiens
aagaguggguuuca

SEQ ID NO: 26792 - RNA, 20 nt, Homo sapiens
acaccaccacccuugccaug

SEQ ID NO: 26793 - RNA, 14 nt, Homo sapiens
acacaugauccugc

SEQ ID NO: 26794 - RNA, 21 nt, Homo sapiens
acagacuuuuuuuuuuuuuua

SEQ ID NO: 26795 - RNA, 10 nt, Homo sapiens
acagagacag

SEQ ID NO: 26796 - RNA, 11 nt, Homo sapiens
acagagacaga

SEQ ID NO: 26797 - RNA, 13 nt, Homo sapiens
acagaggaucugc

SEQ ID NO: 26798 - RNA, 18 nt, Homo sapiens
acaagugaaaaacaucca

SEQ ID NO: 26799 - RNA, 13 nt, Homo sapiens
acaaccuguccca

SEQ ID NO: 26800 - RNA, 20 nt, Homo sapiens
acaggcuccaaacuggagcu

SEQ ID NO: 26801 - RNA, 16 nt, Homo sapiens
acaggcgugagccacc

SEQ ID NO: 26802 - RNA, 18 nt, Homo sapiens
acaggcgugagccaccaa

SEQ ID NO: 26803 - RNA, 11 nt, Homo sapiens
acaggcgugag

SEQ ID NO: 26804 - RNA, 10 nt, Homo sapiens
acaggcguga

SEQ ID NO: 26805 - RNA, 19 nt, Homo sapiens
acaguuccugagaccagcc

SEQ ID NO: 26806 - RNA, 20 nt, Homo sapiens
acaguuccugagaccagcca

SEQ ID NO: 26807 - RNA, 20 nt, Homo sapiens
aauacaaaaauuagccgggc

SEQ ID NO: 26808 - RNA, 23 nt, Homo sapiens
aagugcugggaauuacaggcgug

SEQ ID NO: 26809 - RNA, 20 nt, Homo sapiens
aauacucuuaggaagagaaa

SEQ ID NO: 26810 - RNA, 15 nt, Homo sapiens
aauagugucugauga

SEQ ID NO: 26811 - RNA, 16 nt, Homo sapiens
aauagugucugaugaa

SEQ ID NO: 26812 - RNA, 15 nt, Homo sapiens
aauggagacaccacc

SEQ ID NO: 26813 - RNA, 17 nt, Homo sapiens
aauggagacaccaccac

SEQ ID NO: 26814 - RNA, 19 nt, Homo sapiens
aauccuuuguuuucugacu

SEQ ID NO: 26815 - RNA, 18 nt, Homo sapiens
acaaaaauuagccgggca

SEQ ID NO: 26816 - RNA, 23 nt, Homo sapiens
accugcuguuuccuagcgcagcc

SEQ ID NO: 26817 - RNA, 22 nt, Homo sapiens
accugcuguuuccuagcgcagc

SEQ ID NO: 26818 - RNA, 11 nt, Homo sapiens
accugagcccc

SEQ ID NO: 26819 - RNA, 18 nt, Homo sapiens
accucugccucagaaaac

SEQ ID NO: 26820 - RNA, 13 nt, Homo sapiens
accuucuggguuc

SEQ ID NO: 26821 - RNA, 13 nt, Homo sapiens
acccgggaggcag

SEQ ID NO: 26822 - RNA, 14 nt, Homo sapiens
acccgggaggcaga

SEQ ID NO: 26823 - RNA, 22 nt, Homo sapiens
accuccugccuaagugcagccc

SEQ ID NO: 26824 - RNA, 14 nt, Homo sapiens
acccucugggucuc

SEQ ID NO: 26825 - RNA, 15 nt, Homo sapiens
acccucugggucuca

SEQ ID NO: 26826 - RNA, 17 nt, Homo sapiens
accuguaaucccagcua

SEQ ID NO: 26827 - RNA, 17 nt, Homo sapiens
acgccuguaaucccagc

SEQ ID NO: 26828 - RNA, 10 nt, Homo sapiens
acgugcaaua

SEQ ID NO: 26829 - RNA, 11 nt, Homo sapiens
acgugcaauac

SEQ ID NO: 26830 - RNA, 18 nt, Homo sapiens
acugggguggguggggca

SEQ ID NO: 26831 - RNA, 17 nt, Homo sapiens
acugccgguuugaaaau

SEQ ID NO: 26832 - RNA, 19 nt, Homo sapiens
acucauugcaaccuccacc

SEQ ID NO: 26833 - RNA, 19 nt, Homo sapiens
acucuuaggaagagaaacc

SEQ ID NO: 26834 - RNA, 14 nt, Homo sapiens
acucagaaacauca

SEQ ID NO: 26835 - RNA, 20 nt, Homo sapiens
acuuauaggaauugacccac

SEQ ID NO: 26836 - RNA, 23 nt, Homo sapiens
acuucauucuugaaagcuguggc

SEQ ID NO: 26837 - RNA, 15 nt, Homo sapiens
acuuuuuuucuuuuc

SEQ ID NO: 26838 - RNA, 12 nt, Homo sapiens
aggcaagagaau

SEQ ID NO: 26839 - RNA, 13 nt, Homo sapiens
aggaguuuggcca

SEQ ID NO: 26840 - RNA, 14 nt, Homo sapiens
agcuguugagcugu

SEQ ID NO: 26841 - RNA, 19 nt, Homo sapiens
aggcauuugcagcugugcc

SEQ ID NO: 26842 - RNA, 20 nt, Homo sapiens
aggcauuugcagcugugcca

SEQ ID NO: 26843 - RNA, 10 nt, Homo sapiens
aggccgggcg

SEQ ID NO: 26844 - RNA, 12 nt, Homo sapiens
agccccgggagu

SEQ ID NO: 26845 - RNA, 21 nt, Homo sapiens
agccgggcaugguggcgcgca

SEQ ID NO: 26846 - RNA, 18 nt, Homo sapiens
agccuugcuccuggcugg

SEQ ID NO: 26847 - RNA, 19 nt, Homo sapiens
agccuugcuccuggcuggg

SEQ ID NO: 26848 - RNA, 23 nt, Homo sapiens
agauagguuaccaguaacggaac

SEQ ID NO: 26849 - RNA, 22 nt, Homo sapiens
agacgggguuugccaugcuggc

SEQ ID NO: 26850 - RNA, 12 nt, Homo sapiens
agacaccaccac

SEQ ID NO: 26851 - RNA, 19 nt, Homo sapiens
agaaguuaagcaacaucua

SEQ ID NO: 26852 - RNA, 19 nt, Homo sapiens
agagacgggguuugccaug

SEQ ID NO: 26853 - RNA, 23 nt, Homo sapiens
agacgggguuugccaugcuggcc

SEQ ID NO: 26854 - RNA, 18 nt, Homo sapiens
agccccuugggcagguca

SEQ ID NO: 26855 - RNA, 16 nt, Homo sapiens
agccuaguugaucagc

SEQ ID NO: 26856 - RNA, 24 nt, Homo sapiens
agcaccugcaggcgugaccugaca

SEQ ID NO: 26857 - RNA, 24 nt, Homo sapiens
agccaugugauuacccucuggguc

SEQ ID NO: 26858 - RNA, 15 nt, Homo sapiens
ucacagguugaccaa

SEQ ID NO: 26859 - RNA, 21 nt, Homo sapiens
cuguaaucccagcacuuuggg

SEQ ID NO: 26860 - RNA, 21 nt, Homo sapiens
ugugguccgaagucuuccaua

SEQ ID NO: 26861 - RNA, 13 nt, Homo sapiens
uuuuccuucucau

SEQ ID NO: 26862 - RNA, 23 nt, Homo sapiens
gaagagaauauuagcuuuacugu

SEQ ID NO: 26863 - RNA, 23 nt, Homo sapiens
cuaagugaaauaagccagacauc

SEQ ID NO: 26864 - RNA, 17 nt, Homo sapiens
gguccgaagucuuccau

SEQ ID NO: 26865 - RNA, 14 nt, Homo sapiens
aaaugagcaaaagu

SEQ ID NO: 26866 - RNA, 14 nt, Homo sapiens
aguacagacuuuuu

SEQ ID NO: 26867 - RNA, 21 nt, Homo sapiens
ucacaagugaaaaacauccag

SEQ ID NO: 26868 - RNA, 17 nt, Homo sapiens
uguguuuauuucacuug

SEQ ID NO: 26869 - RNA, 15 nt, Homo sapiens
uugaacccaggagau

SEQ ID NO: 26870 - RNA, 14 nt, Homo sapiens
caauauccuaauaa

SEQ ID NO: 26871 - RNA, 18 nt, Homo sapiens
caaccuccaccuucuggg

SEQ ID NO: 26872 - RNA, 19 nt, Homo sapiens
auucuauuacgugcaauac

SEQ ID NO: 26873 - RNA, 16 nt, Homo sapiens
aacucagaaacaucag

SEQ ID NO: 26874 - RNA, 13 nt, Homo sapiens
augcacacagugc

SEQ ID NO: 26875 - RNA, 15 nt, Homo sapiens
uauuuauugcugaau

SEQ ID NO: 26876 - RNA, 19 nt, Homo sapiens
gagccaccaaacccggccu

SEQ ID NO: 26877 - RNA, 11 nt, Homo sapiens
cccuugccaug

SEQ ID NO: 26878 - RNA, 12 nt, Homo sapiens
aaguauccuuca

SEQ ID NO: 26879 - RNA, 21 nt, Homo sapiens
auugcuuguuagcaaaaugga

SEQ ID NO: 26880 - RNA, 19 nt, Homo sapiens
caagacucugucucaaaaa

SEQ ID NO: 26881 - RNA, 23 nt, Homo sapiens
agccaaccugggggcuuuaggga

SEQ ID NO: 26882 - RNA, 19 nt, Homo sapiens
agaauauuuauuaccucug

SEQ ID NO: 26883 - RNA, 19 nt, Homo sapiens
aaaacuuuaugcuaaguga

SEQ ID NO: 26884 - RNA, 18 nt, Homo sapiens
ccuuuggaugcacuuuau

SEQ ID NO: 26885 - RNA, 19 nt, Homo sapiens
cugugucaguggaugcugc

SEQ ID NO: 26886 - RNA, 23 nt, Homo sapiens
uuuuuccuuccuuaucacugaca

SEQ ID NO: 26887 - RNA, 16 nt, Homo sapiens
agauuucaugccuggu

SEQ ID NO: 26888 - RNA, 20 nt, Homo sapiens
acagagcaagacucugucuc

SEQ ID NO: 26889 - RNA, 10 nt, Homo sapiens
uuugccaugc

SEQ ID NO: 26890 - RNA, 15 nt, Homo sapiens
aauagugucugauga

SEQ ID NO: 26891 - RNA, 21 nt, Homo sapiens
uaauuuaucuugucucugggc

SEQ ID NO: 26892 - RNA, 23 nt, Homo sapiens
guucuucccuuuuacauacugcu

SEQ ID NO: 26893 - RNA, 13 nt, Homo sapiens
uacauacugcugu

SEQ ID NO: 26894 - RNA, 21 nt, Homo sapiens
agaauuuauucaauuccucug

SEQ ID NO: 26895 - RNA, 20 nt, Homo sapiens
uaagcacuuuaacacagugu

SEQ ID NO: 26896 - RNA, 15 nt, Homo sapiens
aaccaugcccaagaa

SEQ ID NO: 26897 - RNA, 12 nt, Homo sapiens
ccaaacuggagc

SEQ ID NO: 26898 - RNA, 20 nt, Homo sapiens
cacagcugaacuuguugaga

SEQ ID NO: 26899 - RNA, 23 nt, Homo sapiens
auuggacuuaaaaucuaauucaa

SEQ ID NO: 26900 - RNA, 21 nt, Homo sapiens
caauucuauuacgugcaauac

SEQ ID NO: 26901 - RNA, 16 nt, Homo sapiens
uacauuuccaaauuca

SEQ ID NO: 26902 - RNA, 16 nt, Homo sapiens
cugauacccuuugaaa

SEQ ID NO: 26903 - RNA, 22 nt, Homo sapiens
aagaguggguuucacaagugaa

SEQ ID NO: 26904 - RNA, 15 nt, Homo sapiens
ucccugcagacauga

SEQ ID NO: 26905 - RNA, 16 nt, Homo sapiens
uuuuacauacugcugu

SEQ ID NO: 26906 - RNA, 17 nt, Homo sapiens
gaaagcagggacuugaa

SEQ ID NO: 26907 - RNA, 12 nt, Homo sapiens
ccaacuaggcag

SEQ ID NO: 26908 - RNA, 23 nt, Homo sapiens
agcuaaguugcaccaacuuugaa

SEQ ID NO: 26909 - RNA, 20 nt, Homo sapiens
guucuucuuggucucagugu

SEQ ID NO: 26910 - RNA, 15 nt, Homo sapiens
acgaaaaacauuuca

SEQ ID NO: 26911 - RNA, 17 nt, Homo sapiens
aauggaaaguaacucau

SEQ ID NO: 26912 - RNA, 19 nt, Homo sapiens
ccuggucaacauggugaaa

SEQ ID NO: 26913 - RNA, 21 nt, Homo sapiens
cucugugaacgauuuagaaag

SEQ ID NO: 26914 - RNA, 11 nt, Homo sapiens
uaugugcaaua

SEQ ID NO: 26915 - RNA, 22 nt, Homo sapiens
aauucgcugcaaccuguugaua

SEQ ID NO: 26916 - RNA, 21 nt, Homo sapiens
gcuuauucacaagacccaaaa

SEQ ID NO: 26917 - RNA, 18 nt, Homo sapiens
ccuggcugggaguggcau

SEQ ID NO: 26918 - RNA, 21 nt, Homo sapiens
cugugauucccuccugcuacu

SEQ ID NO: 26919 - RNA, 14 nt, Homo sapiens
auauccugugacug

SEQ ID NO: 26920 - RNA, 23 nt, Homo sapiens
aaggcuuagacccucaugcugcc

SEQ ID NO: 26921 - RNA, 16 nt, Homo sapiens
aagcagaacagugauu

SEQ ID NO: 26922 - RNA, 21 nt, Homo sapiens
gauaucaugccccuguacucc

SEQ ID NO: 26923 - RNA, 12 nt, Homo sapiens
aauucauguuuc

SEQ ID NO: 26924 - RNA, 16 nt, Homo sapiens
gaaaggcauucucuga

SEQ ID NO: 26925 - RNA, 19 nt, Homo sapiens
gaaguacucauacauguua

SEQ ID NO: 26926 - RNA, 15 nt, Homo sapiens
acaggcgugagccac

SEQ ID NO: 26927 - RNA, 19 nt, Homo sapiens
gcuuguuagcaaaauggau

SEQ ID NO: 26928 - RNA, 19 nt, Homo sapiens
caugugauuacccucuggg

SEQ ID NO: 26929 - RNA, 13 nt, Homo sapiens
caacugugacugu

SEQ ID NO: 26930 - RNA, 14 nt, Homo sapiens
cugcuuuaauuuca

SEQ ID NO: 26931 - RNA, 15 nt, Homo sapiens
uuuagggaccugcug

SEQ ID NO: 26932 - RNA, 17 nt, Homo sapiens
auuuuuagacucaucaa

SEQ ID NO: 26933 - RNA, 16 nt, Homo sapiens
augaauaaaguguaag

SEQ ID NO: 26934 - RNA, 21 nt, Homo sapiens
uucaaaaucaaauuccagaau

SEQ ID NO: 26935 - RNA, 23 nt, Homo sapiens
caauaucuaauauauaugaauaa

SEQ ID NO: 26936 - RNA, 23 nt, Homo sapiens
cauugagaacugcauauguuucg

SEQ ID NO: 26937 - RNA, 23 nt, Homo sapiens
caauuauaucaguccucuuucaa

SEQ ID NO: 26938 - RNA, 19 nt, Homo sapiens
aaugacuaaaaaacaaaga

SEQ ID NO: 26939 - RNA, 19 nt, Homo sapiens
gccauaauuacuaugucau

SEQ ID NO: 26940 - RNA, 14 nt, Homo sapiens
uaauuacuauguca

SEQ ID NO: 26941 - RNA, 12 nt, Homo sapiens
gauagcaaguga

SEQ ID NO: 26942 - RNA, 22 nt, Homo sapiens
ucgaacugcuggauucaaguga

SEQ ID NO: 26943 - RNA, 18 nt, Homo sapiens
ggacuugggcgggacaca

SEQ ID NO: 26944 - RNA, 21 nt, Homo sapiens
ugaaauaagccagacaucaac

SEQ ID NO: 26945 - RNA, 15 nt, Homo sapiens
agaagacaacauuaa

SEQ ID NO: 26946 - RNA, 20 nt, Homo sapiens
uauuuguacaccaauauuca

SEQ ID NO: 26947 - RNA, 24 nt, Homo sapiens
augcaaccuuuggaugcacuuuau

SEQ ID NO: 26948 - RNA, 15 nt, Homo sapiens
agcaucucaggagau

SEQ ID NO: 26949 - RNA, 16 nt, Homo sapiens
acuggcucccuggaag

SEQ ID NO: 26950 - RNA, 20 nt, Homo sapiens
ggccagaagucaaggcuuag

SEQ ID NO: 26951 - RNA, 21 nt, Homo sapiens
uaguguuggaaaaugugcaau

SEQ ID NO: 26952 - RNA, 15 nt, Homo sapiens
uguuuuuaaacugga

SEQ ID NO: 26953 - RNA, 14 nt, Homo sapiens
aguggcauguauga

SEQ ID NO: 26954 - RNA, 20 nt, Homo sapiens
ucucaggggccaacuaggca

SEQ ID NO: 26955 - RNA, 18 nt, Homo sapiens
agauuguauagugcaugu

SEQ ID NO: 26956 - RNA, 16 nt, Homo sapiens
acuuuuguguaaugaa

SEQ ID NO: 26957 - RNA, 23 nt, Homo sapiens
gauuacaaggcuuuaucucaggg

SEQ ID NO: 26958 - RNA, 22 nt, Homo sapiens
aaaauauuuuuaugugcaauaa

SEQ ID NO: 26959 - RNA, 12 nt, Homo sapiens
agcaucucagga

SEQ ID NO: 26960 - RNA, 21 nt, Homo sapiens
cuuaguguacaugaaagcgua

SEQ ID NO: 26961 - RNA, 12 nt, Homo sapiens
aauuuacuuugu

SEQ ID NO: 26962 - RNA, 12 nt, Homo sapiens
ugcaauuccacu

SEQ ID NO: 26963 - RNA, 16 nt, Homo sapiens
auaauacuagucuuau

SEQ ID NO: 26964 - RNA, 23 nt, Homo sapiens
aaggaagaaauuccaggaaaauc

SEQ ID NO: 26965 - RNA, 16 nt, Homo sapiens
guaaaauggagacacc

SEQ ID NO: 26966 - RNA, 22 nt, Homo sapiens
uugcuccuggcuggggccuguu

SEQ ID NO: 26967 - RNA, 20 nt, Homo sapiens
gcuacucuguuccuucacau

SEQ ID NO: 26968 - RNA, 20 nt, Homo sapiens
acauagaauuaacacaugau

SEQ ID NO: 26969 - RNA, 19 nt, Homo sapiens
auccugcaauuccacuuau

SEQ ID NO: 26970 - RNA, 21 nt, Homo sapiens
ucugauuuuccuggacaguuu

SEQ ID NO: 26971 - RNA, 20 nt, Homo sapiens
gccuguaaucccagcacuuu

SEQ ID NO: 26972 - RNA, 17 nt, Homo sapiens
gcauuguaacuuaugaa

SEQ ID NO: 26973 - RNA, 16 nt, Homo sapiens
auuuccaaauucacaa

SEQ ID NO: 26974 - RNA, 22 nt, Homo sapiens
agcuuuucaaaauuggacuuaa

SEQ ID NO: 26975 - RNA, 20 nt, Homo sapiens
gggaggcagagguugcagug

SEQ ID NO: 26976 - RNA, 21 nt, Homo sapiens
cggaucuggggcucugggaua

SEQ ID NO: 26977 - RNA, 15 nt, Homo sapiens
gguggcgcgcaccug

SEQ ID NO: 26978 - RNA, 20 nt, Homo sapiens
aaauauuuuuaugugcaaua

SEQ ID NO: 26979 - RNA, 12 nt, Homo sapiens
aacugugacugu

SEQ ID NO: 26980 - RNA, 14 nt, Homo sapiens
agcagaacagugau

SEQ ID NO: 26981 - RNA, 18 nt, Homo sapiens
gagacgggguuugccaug

SEQ ID NO: 26982 - RNA, 20 nt, Homo sapiens
auggagguuaagcacuuuaa

SEQ ID NO: 26983 - RNA, 21 nt, Homo sapiens
ucuuuuuagagaaauuugcca

SEQ ID NO: 26984 - RNA, 16 nt, Homo sapiens
cuaaaguaucuguauu

SEQ ID NO: 26985 - RNA, 17 nt, Homo sapiens
agagacgggguuugcca

SEQ ID NO: 26986 - RNA, 22 nt, Homo sapiens
auaauuccuauauccugugacu

SEQ ID NO: 26987 - RNA, 20 nt, Homo sapiens
uugacuauuauagaauggaa

SEQ ID NO: 26988 - RNA, 13 nt, Homo sapiens
uguugauagcaag

SEQ ID NO: 26989 - RNA, 17 nt, Homo sapiens
uaaaaaggcauguaauu

SEQ ID NO: 26990 - RNA, 23 nt, Homo sapiens
gaauucuuacauguuuucuuugc

SEQ ID NO: 26991 - RNA, 13 nt, Homo sapiens
aucuauuuauuaa

SEQ ID NO: 26992 - RNA, 18 nt, Homo sapiens
aaccuuauuguaccucuc

SEQ ID NO: 26993 - RNA, 18 nt, Homo sapiens
agacgggguuugccaugc

SEQ ID NO: 26994 - RNA, 14 nt, Homo sapiens
gcaaaugcuguauu

SEQ ID NO: 26995 - RNA, 19 nt, Homo sapiens
cagagacgggguuugccau

SEQ ID NO: 26996 - RNA, 12 nt, Homo sapiens
cucugauaccuc

SEQ ID NO: 26997 - RNA, 19 nt, Homo sapiens
uacauuuccaaauucacaa

SEQ ID NO: 26998 - RNA, 13 nt, Homo sapiens
uucugcaagcuuu

SEQ ID NO: 26999 - RNA, 22 nt, Homo sapiens
aauuccuauauccugugacugu

SEQ ID NO: 27000 - RNA, 18 nt, Homo sapiens
cuaaaaaggcauguaauu

SEQ ID NO: 27001 - RNA, 14 nt, Homo sapiens
uaguguacaugaaa

SEQ ID NO: 27002 - RNA, 15 nt, Homo sapiens
gccacuucacuuuuu

SEQ ID NO: 27003 - RNA, 21 nt, Homo sapiens
gaauauuuauuaccucugaua

SEQ ID NO: 27004 - RNA, 23 nt, Homo sapiens
gaauaguguuggaaaaugugcaa

SEQ ID NO: 27005 - RNA, 19 nt, Homo sapiens
gcuuuccguggcacugcau

SEQ ID NO: 27006 - RNA, 16 nt, Homo sapiens
uuccguggcacugcau

SEQ ID NO: 27007 - RNA, 15 nt, Homo sapiens
cucuggcgacaguuu

SEQ ID NO: 27008 - RNA, 19 nt, Homo sapiens
cacuaaauugacacuuaaa

SEQ ID NO: 27009 - RNA, 11 nt, Homo sapiens
caagaaugaga

SEQ ID NO: 27010 - RNA, 18 nt, Homo sapiens
auuguugacaacugugac

SEQ ID NO: 27011 - RNA, 14 nt, Homo sapiens
uuguaaaauggugu

SEQ ID NO: 27012 - RNA, 22 nt, Homo sapiens
guuaagcacuuuaacacagugu

SEQ ID NO: 27013 - RNA, 15 nt, Homo sapiens
ggcugggaguggcau

SEQ ID NO: 27014 - RNA, 23 nt, Homo sapiens
ucacuuuuuuucuuuucucugcc

SEQ ID NO: 27015 - RNA, 13 nt, Homo sapiens
cuuaaaauguaau

SEQ ID NO: 27016 - RNA, 20 nt, Homo sapiens
cgguuugaaaauaugccugc

SEQ ID NO: 27017 - RNA, 22 nt, Homo sapiens
ccucaucuguaaaauggagaca

SEQ ID NO: 27018 - RNA, 15 nt, Homo sapiens
gagugcaguggcgca

SEQ ID NO: 27019 - RNA, 14 nt, Homo sapiens
agccacuucacuuu

SEQ ID NO: 27020 - RNA, 13 nt, Homo sapiens
ugcuaagugaaau

SEQ ID NO: 27021 - RNA, 18 nt, Homo sapiens
guaucaaccaaauggagu

SEQ ID NO: 27022 - RNA, 16 nt, Homo sapiens
uagaauuaacacauga

SEQ ID NO: 27023 - RNA, 18 nt, Homo sapiens
gaggcugaggcgggugga

SEQ ID NO: 27024 - RNA, 20 nt, Homo sapiens
ucucuacuaaaaauacaaaa

SEQ ID NO: 27025 - RNA, 16 nt, Homo sapiens
ccuuauuguaccucuc

SEQ ID NO: 27026 - RNA, 19 nt, Homo sapiens
uaaacacuaaaaaggcaug

SEQ ID NO: 27027 - RNA, 23 nt, Homo sapiens
ucaucugugauucccuccugcua

SEQ ID NO: 27028 - RNA, 14 nt, Homo sapiens
uucacuuauugacu

SEQ ID NO: 27029 - RNA, 19 nt, Homo sapiens
agagcaagacucugucuca

SEQ ID NO: 27030 - RNA, 17 nt, Homo sapiens
accuuuggaugcacuuu

SEQ ID NO: 27031 - RNA, 18 nt, Homo sapiens
cuguaaucccagcuacuu

SEQ ID NO: 27032 - RNA, 18 nt, Homo sapiens
uaagugaagugauacuau

SEQ ID NO: 27033 - RNA, 19 nt, Homo sapiens
gguuugccaugcuggccag

SEQ ID NO: 27034 - RNA, 20 nt, Homo sapiens
uaaaauuaucaauaucuaau

SEQ ID NO: 27035 - RNA, 13 nt, Homo sapiens
auuauuuuuacag

SEQ ID NO: 27036 - RNA, 9 nt, Homo sapiens
ugugcaaua

SEQ ID NO: 27037 - RNA, 12 nt, Homo sapiens
gagcgacaguga

SEQ ID NO: 27038 - RNA, 19 nt, Homo sapiens
caggauagagugggacagu

SEQ ID NO: 27039 - RNA, 23 nt, Homo sapiens
aaucugagccagugcuuuaaugg

SEQ ID NO: 27040 - RNA, 13 nt, Homo sapiens
aucaaaagaaaga

SEQ ID NO: 27041 - RNA, 20 nt, Homo sapiens
aaauugggaaaggaguagaa

SEQ ID NO: 27042 - RNA, 18 nt, Homo sapiens
cuggcuggggccuguuga

SEQ ID NO: 27043 - RNA, 21 nt, Homo sapiens
augaaaacauagcaucucagg

SEQ ID NO: 27044 - RNA, 18 nt, Homo sapiens
gagccaccaaacccggcc

SEQ ID NO: 27045 - RNA, 18 nt, Homo sapiens
ugcauugagaacugcaua

SEQ ID NO: 27046 - RNA, 19 nt, Homo sapiens
ucccucuaauuuaucuugu

SEQ ID NO: 27047 - RNA, 14 nt, Homo sapiens
gauagagugggaca

SEQ ID NO: 27048 - RNA, 20 nt, Homo sapiens
ugcuacaaauacucuuagga

SEQ ID NO: 27049 - RNA, 20 nt, Homo sapiens
aaaaccaaauuuguauuuaa

SEQ ID NO: 27050 - RNA, 13 nt, Homo sapiens
gugcaauauguga

SEQ ID NO: 27051 - RNA, 12 nt, Homo sapiens
gggaguggcgcg

SEQ ID NO: 27052 - RNA, 24 nt, Homo sapiens
aaugauuuuacggagauaucccag

SEQ ID NO: 27053 - RNA, 15 nt, Homo sapiens
acuuuuggcuuguaa

SEQ ID NO: 27054 - RNA, 13 nt, Homo sapiens
uuuauuaccucug

SEQ ID NO: 27055 - RNA, 15 nt, Homo sapiens
agugagcugauauca

SEQ ID NO: 27056 - RNA, 18 nt, Homo sapiens
uccaagccucauguccac

SEQ ID NO: 27057 - RNA, 17 nt, Homo sapiens
ugaaaggcauucucuga

SEQ ID NO: 27058 - RNA, 18 nt, Homo sapiens
ucaucuuggucacauaca

SEQ ID NO: 27059 - RNA, 18 nt, Homo sapiens
acaacuugaauaauacac

SEQ ID NO: 27060 - RNA, 21 nt, Homo sapiens
aguguuggaaaaugugcaaua

SEQ ID NO: 27061 - RNA, 14 nt, Homo sapiens
acuaaaaaggcaug

SEQ ID NO: 27062 - RNA, 15 nt, Homo sapiens
ggaggcugaggcaag

SEQ ID NO: 27063 - RNA, 21 nt, Homo sapiens
aauuacaggcgugagccacca

SEQ ID NO: 27064 - RNA, 20 nt, Homo sapiens
cucuaacucagaaacaucag

SEQ ID NO: 27065 - RNA, 17 nt, Homo sapiens
uuugcagcugugccaua

SEQ ID NO: 27066 - RNA, 20 nt, Homo sapiens
aacccaggagauggaaguug

SEQ ID NO: 27067 - RNA, 16 nt, Homo sapiens
ucccugcagacaugag

SEQ ID NO: 27068 - RNA, 16 nt, Homo sapiens
aauaaaaugagcaaaa

SEQ ID NO: 27069 - RNA, 13 nt, Homo sapiens
ugacccacaagaa

SEQ ID NO: 27070 - RNA, 14 nt, Homo sapiens
aucuacacuccagu

SEQ ID NO: 27071 - RNA, 14 nt, Homo sapiens
cagaacuugaaugu

SEQ ID NO: 27072 - RNA, 23 nt, Homo sapiens
guaaaauugaaaggcauucucug

SEQ ID NO: 27073 - RNA, 19 nt, Homo sapiens
gagcauuuauaaauggaca

SEQ ID NO: 27074 - RNA, 22 nt, Homo sapiens
gaccuggucgucgucuugacuu

SEQ ID NO: 27075 - RNA, 14 nt, Homo sapiens
uauagacucuagga

SEQ ID NO: 27076 - RNA, 16 nt, Homo sapiens
uggcugggaguggcau

SEQ ID NO: 27077 - RNA, 18 nt, Homo sapiens
cugaaagaggaaugaagu

SEQ ID NO: 27078 - RNA, 23 nt, Homo sapiens
uaucucaggggccaacuaggcag

SEQ ID NO: 27079 - RNA, 19 nt, Homo sapiens
gcagagacgggguuugcca

SEQ ID NO: 27080 - RNA, 16 nt, Homo sapiens
uacauucugcuuucau

SEQ ID NO: 27081 - RNA, 13 nt, Homo sapiens
agaucaagccauc

SEQ ID NO: 27082 - RNA, 19 nt, Homo sapiens
aaucaaauuccagaaugau

SEQ ID NO: 27083 - RNA, 14 nt, Homo sapiens
gaguuuggccagaa

SEQ ID NO: 27084 - RNA, 13 nt, Homo sapiens
cucuuggugccuc

SEQ ID NO: 27085 - RNA, 17 nt, Homo sapiens
uauagaauggaacucaa

SEQ ID NO: 27086 - RNA, 17 nt, Homo sapiens
gagacgggguuugccau

SEQ ID NO: 27087 - RNA, 19 nt, Homo sapiens
gaagcaacccaaauguuca

SEQ ID NO: 27088 - RNA, 21 nt, Homo sapiens
ucuuaaacacuaaaaaggcau

SEQ ID NO: 27089 - RNA, 23 nt, Homo sapiens
gugaauuuuucucuaacucagaa

SEQ ID NO: 27090 - RNA, 15 nt, Homo sapiens
gcuaauuuguguauu

SEQ ID NO: 27091 - RNA, 17 nt, Homo sapiens
uaccucugauaccucaa

SEQ ID NO: 27092 - RNA, 13 nt, Homo sapiens
gacaaauucuguu

SEQ ID NO: 27093 - RNA, 23 nt, Homo sapiens
aucggaucuggggcucugggaua

SEQ ID NO: 27094 - RNA, 16 nt, Homo sapiens
ucucgaacugcuggau

SEQ ID NO: 27095 - RNA, 16 nt, Homo sapiens
auguguggcauuuuca

SEQ ID NO: 27096 - RNA, 15 nt, Homo sapiens
gcaaugugacuuaau

SEQ ID NO: 27097 - RNA, 17 nt, Homo sapiens
auacuucaauacuucau

SEQ ID NO: 27098 - RNA, 16 nt, Homo sapiens
ccacgcccagcuaauu

SEQ ID NO: 27099 - RNA, 21 nt, Homo sapiens
cuggcucccuggaagagauca

SEQ ID NO: 27100 - RNA, 11 nt, Homo sapiens
augauguuucg

SEQ ID NO: 27101 - RNA, 22 nt, Homo sapiens
acuccugguuccuaggugagca

SEQ ID NO: 27102 - RNA, 14 nt, Homo sapiens
agcaaaaugugaua

SEQ ID NO: 27103 - RNA, 13 nt, Homo sapiens
ucauguacaucca

SEQ ID NO: 27104 - RNA, 12 nt, Homo sapiens
auuuucuuccaa

SEQ ID NO: 27105 - RNA, 17 nt, Homo sapiens
cagucacauuccaagcc

SEQ ID NO: 27106 - RNA, 17 nt, Homo sapiens
aaagacuaugaggaaua

SEQ ID NO: 27107 - RNA, 11 nt, Homo sapiens
cucaugcugcc

SEQ ID NO: 27108 - RNA, 15 nt, Homo sapiens
uccuuaucacugaca

SEQ ID NO: 27109 - RNA, 9 nt, Homo sapiens
uaugugcaa

SEQ ID NO: 27110 - RNA, 15 nt, Homo sapiens
cuuaacucauugcaa

SEQ ID NO: 27111 - RNA, 13 nt, Homo sapiens
uagggaccugcug

SEQ ID NO: 27112 - RNA, 13 nt, Homo sapiens
acccuugccaugg

SEQ ID NO: 27113 - RNA, 14 nt, Homo sapiens
agacucugucucag

SEQ ID NO: 27114 - RNA, 21 nt, Homo sapiens
uguauauuuuauaucaauuua

SEQ ID NO: 27115 - RNA, 20 nt, Homo sapiens
gccaaggcuggagugcagug

SEQ ID NO: 27116 - RNA, 20 nt, Homo sapiens
agguauauaaauuuucccaa

SEQ ID NO: 27117 - RNA, 19 nt, Homo sapiens
uagcgcagccaugugauua

SEQ ID NO: 27118 - RNA, 17 nt, Homo sapiens
ggaucucacaagcacuu

SEQ ID NO: 27119 - RNA, 22 nt, Homo sapiens
auguacauccauggugugcugg

SEQ ID NO: 27120 - RNA, 22 nt, Homo sapiens
ugcuggcuuaaaauguaauuaa

SEQ ID NO: 27121 - RNA, 19 nt, Homo sapiens
ugagugccuguaaucacag

SEQ ID NO: 27122 - RNA, 15 nt, Homo sapiens
gacaacugugacugu

SEQ ID NO: 27123 - RNA, 20 nt, Homo sapiens
gugaaauaagccagacauca

SEQ ID NO: 27124 - RNA, 21 nt, Homo sapiens
aauucuauuacgugcaauacu

SEQ ID NO: 27125 - RNA, 23 nt, Homo sapiens
aguuguaccgcaaugugacuuaa

SEQ ID NO: 27126 - RNA, 15 nt, Homo sapiens
aagcccaauauuaua

SEQ ID NO: 27127 - RNA, 14 nt, Homo sapiens
aaucagaucauuuc

SEQ ID NO: 27128 - RNA, 17 nt, Homo sapiens
guaaaguacagacuuuu

SEQ ID NO: 27129 - RNA, 15 nt, Homo sapiens
cugagcgacagugag

SEQ ID NO: 27130 - RNA, 14 nt, Homo sapiens
aagucuuccauaga

SEQ ID NO: 27131 - RNA, 20 nt, Homo sapiens
uaaaauauuuuuaugugcaa

SEQ ID NO: 27132 - RNA, 23 nt, Homo sapiens
uccugcuacucuguuccuucaca

SEQ ID NO: 27133 - RNA, 20 nt, Homo sapiens
gacauagaauuaacacauga

SEQ ID NO: 27134 - RNA, 19 nt, Homo sapiens
aauauauuuuuagacucau

SEQ ID NO: 27135 - RNA, 16 nt, Homo sapiens
accuaaauuugguucu

SEQ ID NO: 27136 - RNA, 20 nt, Homo sapiens
aagcaacaucuagcaaaugu

SEQ ID NO: 27137 - RNA, 22 nt, Homo sapiens
cugccuaagugcagccccgugg

SEQ ID NO: 27138 - RNA, 20 nt, Homo sapiens
accacugcagaagacaguau

SEQ ID NO: 27139 - RNA, 14 nt, Homo sapiens
ggugacagagcaag

SEQ ID NO: 27140 - RNA, 14 nt, Homo sapiens
gagaaguuaagcaa

SEQ ID NO: 27141 - RNA, 13 nt, Homo sapiens
ccuguaaucacag

SEQ ID NO: 27142 - RNA, 20 nt, Homo sapiens
uuuuagucuaauugaauccc

SEQ ID NO: 27143 - RNA, 21 nt, Homo sapiens
cugcaaucugagccagugcuu

SEQ ID NO: 27144 - RNA, 19 nt, Homo sapiens
gucagugcccaacuguuau

SEQ ID NO: 27145 - RNA, 18 nt, Homo sapiens
ugacuuaguguacaugaa

SEQ ID NO: 27146 - RNA, 14 nt, Homo sapiens
gaauuuucuuccaa

SEQ ID NO: 27147 - RNA, 16 nt, Homo sapiens
auccagaaauaaugaa

SEQ ID NO: 27148 - RNA, 20 nt, Homo sapiens
caaaacugauacccuuugaa

SEQ ID NO: 27149 - RNA, 19 nt, Homo sapiens
gcacuuuaacacagugucu

SEQ ID NO: 27150 - RNA, 17 nt, Homo sapiens
aucagcauuuuacuacu

SEQ ID NO: 27151 - RNA, 20 nt, Homo sapiens
caaaugagccggagccccuu

SEQ ID NO: 27152 - RNA, 13 nt, Homo sapiens
cuggagcucugcc

SEQ ID NO: 27153 - RNA, 17 nt, Homo sapiens
gccagacaucaacagau

SEQ ID NO: 27154 - RNA, 14 nt, Homo sapiens
ucacauccuguguu

SEQ ID NO: 27155 - RNA, 17 nt, Homo sapiens
aauugaaaggcauucuc

SEQ ID NO: 27156 - RNA, 13 nt, Homo sapiens
uauaucaguccuc

SEQ ID NO: 27157 - RNA, 19 nt, Homo sapiens
agcuguggccagcuuguua

SEQ ID NO: 27158 - RNA, 14 nt, Homo sapiens
ggucucgaacugcu

SEQ ID NO: 27159 - RNA, 10 nt, Homo sapiens
augacuaugc

SEQ ID NO: 27160 - RNA, 13 nt, Homo sapiens
cucacaagcacuu

SEQ ID NO: 27161 - RNA, 13 nt, Homo sapiens
cauacauguuaca

SEQ ID NO: 27162 - RNA, 19 nt, Homo sapiens
cuguaucuuguuuuuccac

SEQ ID NO: 27163 - RNA, 15 nt, Homo sapiens
ucaucaaugaaugaa

SEQ ID NO: 27164 - RNA, 19 nt, Homo sapiens
ucuucccuuuuacauacug

SEQ ID NO: 27165 - RNA, 16 nt, Homo sapiens
ccauagagacuuugug

SEQ ID NO: 27166 - RNA, 18 nt, Homo sapiens
uucacuugaugauacaau

SEQ ID NO: 27167 - RNA, 20 nt, Homo sapiens
acauuacaguuagagauuuu

SEQ ID NO: 27168 - RNA, 14 nt, Homo sapiens
aauugacacuuaaa

SEQ ID NO: 27169 - RNA, 18 nt, Homo sapiens
caguuccugagaccagcc

SEQ ID NO: 27170 - RNA, 20 nt, Homo sapiens
uagaauaauacuagucuuau

SEQ ID NO: 27171 - RNA, 21 nt, Homo sapiens
agaggaaugaaguacucauac

SEQ ID NO: 27172 - RNA, 15 nt, Homo sapiens
acaucaacagauaaa

SEQ ID NO: 27173 - RNA, 22 nt, Homo sapiens
caaauucgcugcaaccuguuga

SEQ ID NO: 27174 - RNA, 15 nt, Homo sapiens
aaaaugugcaauaug

SEQ ID NO: 27175 - RNA, 20 nt, Homo sapiens
gauugugccccugcacucca

SEQ ID NO: 27176 - RNA, 17 nt, Homo sapiens
ucuggacuuuccagaga

SEQ ID NO: 27177 - RNA, 14 nt, Homo sapiens
uguguuuuucacau

SEQ ID NO: 27178 - RNA, 18 nt, Homo sapiens
aguuuaugcauacaguaa

SEQ ID NO: 27179 - RNA, 21 nt, Homo sapiens
auuacaaggcuuuaucucagg

SEQ ID NO: 27180 - RNA, 18 nt, Homo sapiens
cucauuccccaaccacuu

SEQ ID NO: 27181 - RNA, 18 nt, Homo sapiens
aaacuuuaugcuaaguga

SEQ ID NO: 27182 - RNA, 19 nt, Homo sapiens
uucucuggcgacaguuuuc

SEQ ID NO: 27183 - RNA, 20 nt, Homo sapiens
aauauuuauuaccucugaua

SEQ ID NO: 27184 - RNA, 13 nt, Homo sapiens
uaauuucagaaga

SEQ ID NO: 27185 - RNA, 19 nt, Homo sapiens
ucaucuuggucacauacaa

SEQ ID NO: 27186 - RNA, 11 nt, Homo sapiens
aaaggugacca

SEQ ID NO: 27187 - RNA, 18 nt, Homo sapiens
uucaaacuaauagaauua

SEQ ID NO: 27188 - RNA, 20 nt, Homo sapiens
uaaugaaaaugaauaucuau

SEQ ID NO: 27189 - RNA, 20 nt, Homo sapiens
agcaaaauggauaugacaca

SEQ ID NO: 27190 - RNA, 17 nt, Homo sapiens
aauauuuauuaccucug

SEQ ID NO: 27191 - RNA, 23 nt, Homo sapiens
agacaccaccacccuugccaugg

SEQ ID NO: 27192 - RNA, 23 nt, Homo sapiens
gaaagcuugcccuggugccucac

SEQ ID NO: 27193 - RNA, 20 nt, Homo sapiens
gccuguugaagaugcuugua

SEQ ID NO: 27194 - RNA, 13 nt, Homo sapiens
cucaucaaucaaa

SEQ ID NO: 27195 - RNA, 16 nt, Homo sapiens
caucuguaaaauggag

SEQ ID NO: 27196 - RNA, 16 nt, Homo sapiens
aaacauccagauacac

SEQ ID NO: 27197 - RNA, 15 nt, Homo sapiens
agaauucuuacaugu

SEQ ID NO: 27198 - RNA, 15 nt, Homo sapiens
ccuaaccucauuccc

SEQ ID NO: 27199 - RNA, 15 nt, Homo sapiens
uaacuggcaguuuuc

SEQ ID NO: 27200 - RNA, 21 nt, Homo sapiens
aaugagaagaaugacuaugca

SEQ ID NO: 27201 - RNA, 16 nt, Homo sapiens
uauggcuuaaugacac

SEQ ID NO: 27202 - RNA, 17 nt, Homo sapiens
uaaauuugguucuaggc

SEQ ID NO: 27203 - RNA, 23 nt, Homo sapiens
cuugccauggagguuaagcacuu

SEQ ID NO: 27204 - RNA, 17 nt, Homo sapiens
aagugauacuauccagu

SEQ ID NO: 27205 - RNA, 12 nt, Homo sapiens
aaaaugugcaau

SEQ ID NO: 27206 - RNA, 13 nt, Homo sapiens
cacugcauacaau

SEQ ID NO: 27207 - RNA, 20 nt, Homo sapiens
ucuugggaauuuucuuccaa

SEQ ID NO: 27208 - RNA, 18 nt, Homo sapiens
ucugauuuuccuggacag

SEQ ID NO: 27209 - RNA, 22 nt, Homo sapiens
aggcagcaggauagagugggac

SEQ ID NO: 27210 - RNA, 19 nt, Homo sapiens
augucagacagaacuugaa

SEQ ID NO: 27211 - RNA, 19 nt, Homo sapiens
aagcuguuuccauagggug

SEQ ID NO: 27212 - RNA, 17 nt, Homo sapiens
uuacaaaccucaagcca

SEQ ID NO: 27213 - RNA, 21 nt, Homo sapiens
uuaaaaaaaaaccugagcccc

SEQ ID NO: 27214 - RNA, 20 nt, Homo sapiens
ccucauuccccaaccacuuc

SEQ ID NO: 27215 - RNA, 14 nt, Homo sapiens
caccacgcccagcu

SEQ ID NO: 27216 - RNA, 14 nt, Homo sapiens
cuuauugacuauua

SEQ ID NO: 27217 - RNA, 17 nt, Homo sapiens
cccuucauguacaucca

SEQ ID NO: 27218 - RNA, 16 nt, Homo sapiens
cgcaaugugacuuaau

SEQ ID NO: 27219 - RNA, 21 nt, Homo sapiens
auagugucugaugaauguuaa

SEQ ID NO: 27220 - RNA, 19 nt, Homo sapiens
aucaugcaaaugcuguauu

SEQ ID NO: 27221 - RNA, 14 nt, Homo sapiens
agaacuugaaugug

SEQ ID NO: 27222 - RNA, 19 nt, Homo sapiens
ugaaagcagggacuugaac

SEQ ID NO: 27223 - RNA, 13 nt, Homo sapiens
agacucugucuca

SEQ ID NO: 27224 - RNA, 14 nt, Homo sapiens
gacgaaccuugaaa

SEQ ID NO: 27225 - RNA, 16 nt, Homo sapiens
aucaaccaaauggagu

SEQ ID NO: 27226 - RNA, 13 nt, Homo sapiens
acauagcaucuca

SEQ ID NO: 27227 - RNA, 17 nt, Homo sapiens
auuugccaauuuacuuu

SEQ ID NO: 27228 - RNA, 20 nt, Homo sapiens
uaucuaauauauaugaauaa

SEQ ID NO: 27229 - RNA, 17 nt, Homo sapiens
gaauauguaaauagaaa

SEQ ID NO: 27230 - RNA, 20 nt, Homo sapiens
caagcuuuucaaaauuggac

SEQ ID NO: 27231 - RNA, 22 nt, Homo sapiens
ugacaacugugacuguacccaa

SEQ ID NO: 27232 - RNA, 15 nt, Homo sapiens
gauaucaugccccug

SEQ ID NO: 27233 - RNA, 19 nt, Homo sapiens
cuuccaaacagaacuaugg

SEQ ID NO: 27234 - RNA, 17 nt, Homo sapiens
aagugaaauaagccaga

SEQ ID NO: 27235 - RNA, 15 nt, Homo sapiens
gacaucaacagauaa

SEQ ID NO: 27236 - RNA, 15 nt, Homo sapiens
cauaaagucagugcc

SEQ ID NO: 27237 - RNA, 18 nt, Homo sapiens
cucaaaacuucagacaua

SEQ ID NO: 27238 - RNA, 23 nt, Homo sapiens
cuggcugggaguggcauguauga

SEQ ID NO: 27239 - RNA, 18 nt, Homo sapiens
aagaaaggccagcaaauu

SEQ ID NO: 27240 - RNA, 16 nt, Homo sapiens
ugugucaguggaugcu

SEQ ID NO: 27241 - RNA, 23 nt, Homo sapiens
aaccaaauuuguauuuaagguau

SEQ ID NO: 27242 - RNA, 15 nt, Homo sapiens
aaggcuuuaucucag

SEQ ID NO: 27243 - RNA, 13 nt, Homo sapiens
caaccaaauggag

SEQ ID NO: 27244 - RNA, 22 nt, Homo sapiens
uguaaguuuaugcauacaguaa

SEQ ID NO: 27245 - RNA, 14 nt, Homo sapiens
uccuuccuuaucac

SEQ ID NO: 27246 - RNA, 10 nt, Homo sapiens
caguaacuga

SEQ ID NO: 27247 - RNA, 20 nt, Homo sapiens
cucaguguccucaucuguaa

SEQ ID NO: 27248 - RNA, 13 nt, Homo sapiens
aaaacucauuucc

SEQ ID NO: 27249 - RNA, 18 nt, Homo sapiens
aaguuuaugcauacagua

SEQ ID NO: 27250 - RNA, 11 nt, Homo sapiens
aagucuuccau

SEQ ID NO: 27251 - RNA, 17 nt, Homo sapiens
aggaaaaucugcacugu

SEQ ID NO: 27252 - RNA, 22 nt, Homo sapiens
gccaugugauuacccucugggu

SEQ ID NO: 27253 - RNA, 18 nt, Homo sapiens
gacaaagacaaauucugu

SEQ ID NO: 27254 - RNA, 23 nt, Homo sapiens
uagaauauuuauuaccucugaua

SEQ ID NO: 27255 - RNA, 21 nt, Homo sapiens
agcccccauuguggucacagg

SEQ ID NO: 27256 - RNA, 15 nt, Homo sapiens
aauucgcugcaaccu

SEQ ID NO: 27257 - RNA, 19 nt, Homo sapiens
aucaauagaaggauguaca

SEQ ID NO: 27258 - RNA, 19 nt, Homo sapiens
cuucuuggucucaguguca

SEQ ID NO: 27259 - RNA, 18 nt, Homo sapiens
auuagaggucuccaaaau

SEQ ID NO: 27260 - RNA, 13 nt, Homo sapiens
aaauagugucuga

SEQ ID NO: 27261 - RNA, 20 nt, Homo sapiens
uagaauauuuauuaccucug

SEQ ID NO: 27262 - RNA, 21 nt, Homo sapiens
aacucaaggaaaucuguguca

SEQ ID NO: 27263 - RNA, 12 nt, Homo sapiens
caggaaaauuaa

SEQ ID NO: 27264 - RNA, 19 nt, Homo sapiens
ugauacuuuuuucauuauu

SEQ ID NO: 27265 - RNA, 14 nt, Homo sapiens
caugaaaagauuau

SEQ ID NO: 27266 - RNA, 15 nt, Homo sapiens
auucugcaagcuuuu

SEQ ID NO: 27267 - RNA, 13 nt, Homo sapiens
augauuucauuca

SEQ ID NO: 27268 - RNA, 13 nt, Homo sapiens
cgaagucuuccau

SEQ ID NO: 27269 - RNA, 19 nt, Homo sapiens
caccacccuugccauggag

SEQ ID NO: 27270 - RNA, 17 nt, Homo sapiens
ccucccuucucuucaca

SEQ ID NO: 27271 - RNA, 22 nt, Homo sapiens
agcagagacgggguuugccaug

SEQ ID NO: 27272 - RNA, 14 nt, Homo sapiens
gaagcaacccaaau

SEQ ID NO: 27273 - RNA, 16 nt, Homo sapiens
agccacuucacuuuuu

SEQ ID NO: 27274 - RNA, 17 nt, Homo sapiens
ugaugauuaauucaccu

SEQ ID NO: 27275 - RNA, 18 nt, Homo sapiens
aggugagcaggugaugcc

SEQ ID NO: 27276 - RNA, 14 nt, Homo sapiens
uuaguguacaugaa

SEQ ID NO: 27277 - RNA, 16 nt, Homo sapiens
auacuauccaguuacu

SEQ ID NO: 27278 - RNA, 22 nt, Homo sapiens
uucugcagauaaacaguaguga

SEQ ID NO: 27279 - RNA, 16 nt, Homo sapiens
gccuaucagcauuuua

SEQ ID NO: 27280 - RNA, 19 nt, Homo sapiens
gcucccuggaagagaucaa

SEQ ID NO: 27281 - RNA, 16 nt, Homo sapiens
cauaauuacuauguca

SEQ ID NO: 27282 - RNA, 19 nt, Homo sapiens
aauaauacaccagagauaa

SEQ ID NO: 27283 - RNA, 18 nt, Homo sapiens
ccaaggcuggagugcagu

SEQ ID NO: 27284 - RNA, 13 nt, Homo sapiens
accgcaaugugac

SEQ ID NO: 27285 - RNA, 12 nt, Homo sapiens
cauuuucacuuu

SEQ ID NO: 27286 - RNA, 14 nt, Homo sapiens
uuacagagacagaa

SEQ ID NO: 27287 - RNA, 11 nt, Homo sapiens
auuugcacuau

SEQ ID NO: 27288 - RNA, 12 nt, Homo sapiens
aaaaagccaaaa

SEQ ID NO: 27289 - RNA, 20 nt, Homo sapiens
agcccuucaugcauuugcac

SEQ ID NO: 27290 - RNA, 18 nt, Homo sapiens
cccuuuuacauacugcug

SEQ ID NO: 27291 - RNA, 18 nt, Homo sapiens
aaauauuuuuaugugcaa

SEQ ID NO: 27292 - RNA, 14 nt, Homo sapiens
ucucacaagcacuu

SEQ ID NO: 27293 - RNA, 17 nt, Homo sapiens
caaagcugaauacauuc

SEQ ID NO: 27294 - RNA, 13 nt, Homo sapiens
gcugagcagucag

SEQ ID NO: 27295 - RNA, 17 nt, Homo sapiens
aacuggaaauaaaagau

SEQ ID NO: 27296 - RNA, 16 nt, Homo sapiens
gcaaauguuaugcaua

SEQ ID NO: 27297 - RNA, 18 nt, Homo sapiens
aaaagcaguaacugacaa

SEQ ID NO: 27298 - RNA, 19 nt, Homo sapiens
uguagauaaacucagaaau

SEQ ID NO: 27299 - RNA, 13 nt, Homo sapiens
gagcgacagugag

SEQ ID NO: 27300 - RNA, 19 nt, Homo sapiens
auguuucgcugauauaugu

SEQ ID NO: 27301 - RNA, 17 nt, Homo sapiens
caaaacuucagacauag

SEQ ID NO: 27302 - RNA, 18 nt, Homo sapiens
cauagcagcuuauucaca

SEQ ID NO: 27303 - RNA, 16 nt, Homo sapiens
uggaaaaaaaggaaga

SEQ ID NO: 27304 - RNA, 18 nt, Homo sapiens
uggaauauguaaauagaa

SEQ ID NO: 27305 - RNA, 16 nt, Homo sapiens
aaagcagggacuugaa

SEQ ID NO: 27306 - RNA, 22 nt, Homo sapiens
auuuuguuuuuaaacuggaaau

SEQ ID NO: 27307 - RNA, 21 nt, Homo sapiens
uaaaauauuuuuaugugcaau

SEQ ID NO: 27308 - RNA, 15 nt, Homo sapiens
cuaugugauuacaag

SEQ ID NO: 27309 - RNA, 11 nt, Homo sapiens
ugcaagcuuuu

SEQ ID NO: 27310 - RNA, 15 nt, Homo sapiens
cacuugaugauacaa

SEQ ID NO: 27311 - RNA, 19 nt, Homo sapiens
gccaaggcuggagugcagu

SEQ ID NO: 27312 - RNA, 18 nt, Homo sapiens
agcaacccaaauguucau

SEQ ID NO: 27313 - RNA, 23 nt, Homo sapiens
guagaaaaagcaguaacugacaa

SEQ ID NO: 27314 - RNA, 20 nt, Homo sapiens
gcuaagugaaauaagccaga

SEQ ID NO: 27315 - RNA, 20 nt, Homo sapiens
ugccaaggcuggagugcagu

SEQ ID NO: 27316 - RNA, 16 nt, Homo sapiens
uggguucaagcgauuc

SEQ ID NO: 27317 - RNA, 23 nt, Homo sapiens
ugaacaaauuuacagagacagaa

SEQ ID NO: 27318 - RNA, 21 nt, Homo sapiens
cuuccaaacagaacuauggaa

SEQ ID NO: 27319 - RNA, 15 nt, Homo sapiens
uuccuauguaacugc

SEQ ID NO: 27320 - RNA, 21 nt, Homo sapiens
ucccaaagugcugggaauuac

SEQ ID NO: 27321 - RNA, 21 nt, Homo sapiens
guaaguuuaugcauacaguaa

SEQ ID NO: 27322 - RNA, 14 nt, Homo sapiens
ccaauuuacuuugu

SEQ ID NO: 27323 - RNA, 17 nt, Homo sapiens
auuaccucugauaccuc

SEQ ID NO: 27324 - RNA, 15 nt, Homo sapiens
ggauagagugggaca

SEQ ID NO: 27325 - RNA, 19 nt, Homo sapiens
caaauucuguuucuugaga

SEQ ID NO: 27326 - RNA, 14 nt, Homo sapiens
augccugcaaucug

SEQ ID NO: 27327 - RNA, 15 nt, Homo sapiens
gacuaauuaggcaag

SEQ ID NO: 27328 - RNA, 18 nt, Homo sapiens
uuaugaaacauuacaguu

SEQ ID NO: 27329 - RNA, 14 nt, Homo sapiens
uggccagaagucaa

SEQ ID NO: 27330 - RNA, 14 nt, Homo sapiens
aacagaagcuucca

SEQ ID NO: 27331 - RNA, 17 nt, Homo sapiens
uuccguggcacugcaua

SEQ ID NO: 27332 - RNA, 19 nt, Homo sapiens
aggagaaacuggaacucuc

SEQ ID NO: 27333 - RNA, 19 nt, Homo sapiens
auuccuauauccugugacu

SEQ ID NO: 27334 - RNA, 16 nt, Homo sapiens
uaggaagagaaaccag

SEQ ID NO: 27335 - RNA, 16 nt, Homo sapiens
gcacuuuaaacauuua

SEQ ID NO: 27336 - RNA, 14 nt, Homo sapiens
auaaauuugguucu

SEQ ID NO: 27337 - RNA, 21 nt, Homo sapiens
agcaagugaauuuuucucuaa

SEQ ID NO: 27338 - RNA, 21 nt, Homo sapiens
aaaauuagccgggcauggugg

SEQ ID NO: 27339 - RNA, 12 nt, Homo sapiens
aucuacacucca

SEQ ID NO: 27340 - RNA, 17 nt, Homo sapiens
aaaguucugcagauaaa

SEQ ID NO: 27341 - RNA, 20 nt, Homo sapiens
ccaacuuugaagucugauuu

SEQ ID NO: 27342 - RNA, 12 nt, Homo sapiens
aaucuacacucc

SEQ ID NO: 27343 - RNA, 16 nt, Homo sapiens
auuuuuaugugcaaua

SEQ ID NO: 27344 - RNA, 12 nt, Homo sapiens
ugacacaucucu

SEQ ID NO: 27345 - RNA, 15 nt, Homo sapiens
aaauauaauaugcac

SEQ ID NO: 27346 - RNA, 15 nt, Homo sapiens
gcacuugggacaaaa

SEQ ID NO: 27347 - RNA, 12 nt, Homo sapiens
caguaacugaca

SEQ ID NO: 27348 - RNA, 14 nt, Homo sapiens
gcaggcgugaccug

SEQ ID NO: 27349 - RNA, 17 nt, Homo sapiens
uaacuagaauuuauuca

SEQ ID NO: 27350 - RNA, 18 nt, Homo sapiens
aauuuauucaauuccucu

SEQ ID NO: 27351 - RNA, 13 nt, Homo sapiens
gaaauuaaccaua

SEQ ID NO: 27352 - RNA, 11 nt, Homo sapiens
ucacauuugcg

SEQ ID NO: 27353 - RNA, 14 nt, Homo sapiens
ugcauuugcacuau

SEQ ID NO: 27354 - RNA, 16 nt, Homo sapiens
agccagccuugcuccu

SEQ ID NO: 27355 - RNA, 21 nt, Homo sapiens
uaacugcauugagaacugcau

SEQ ID NO: 27356 - RNA, 16 nt, Homo sapiens
cauuguggucacagga

SEQ ID NO: 27357 - RNA, 14 nt, Homo sapiens
ucaccuuccagugu

SEQ ID NO: 27358 - RNA, 18 nt, Homo sapiens
augcaaccuuuggaugca

SEQ ID NO: 27359 - RNA, 14 nt, Homo sapiens
aauaaaagcacuua

SEQ ID NO: 27360 - RNA, 22 nt, Homo sapiens
ugccuggaucucacaagcacuu

SEQ ID NO: 27361 - RNA, 15 nt, Homo sapiens
uguguucaguacaau

SEQ ID NO: 27362 - RNA, 16 nt, Homo sapiens
uaacugacaacuugaa

SEQ ID NO: 27363 - RNA, 15 nt, Homo sapiens
gcagauaaacaguag

SEQ ID NO: 27364 - RNA, 16 nt, Homo sapiens
cacaaccacucauuca

SEQ ID NO: 27365 - RNA, 17 nt, Homo sapiens
caguguccucaucugua

SEQ ID NO: 27366 - RNA, 22 nt, Homo sapiens
augcaaccuuuggaugcacuuu

SEQ ID NO: 27367 - RNA, 13 nt, Homo sapiens
aauggcaugucag

SEQ ID NO: 27368 - RNA, 18 nt, Homo sapiens
gugagacagcucugcaua

SEQ ID NO: 27369 - RNA, 13 nt, Homo sapiens
cauuugcacuauu

SEQ ID NO: 27370 - RNA, 15 nt, Homo sapiens
guugacaacugugac

SEQ ID NO: 27371 - RNA, 23 nt, Homo sapiens
cauacaauuauuuuuacaguucu

SEQ ID NO: 27372 - RNA, 21 nt, Homo sapiens
caagguucuucccuuuuacau

SEQ ID NO: 27373 - RNA, 14 nt, Homo sapiens
uguggucacaggaa

SEQ ID NO: 27374 - RNA, 20 nt, Homo sapiens
ccagccugggugacagagca

SEQ ID NO: 27375 - RNA, 17 nt, Homo sapiens
uuuaucuugucucuggg

SEQ ID NO: 27376 - RNA, 18 nt, Homo sapiens
cagaaauuuaauucaugu

SEQ ID NO: 27377 - RNA, 17 nt, Homo sapiens
aaacccggccugauuaa

SEQ ID NO: 27378 - RNA, 14 nt, Homo sapiens
uccuauauccugug

SEQ ID NO: 27379 - RNA, 19 nt, Homo sapiens
uaaaaggccugucccugca

SEQ ID NO: 27380 - RNA, 13 nt, Homo sapiens
aacaaagaagaca

SEQ ID NO: 27381 - RNA, 21 nt, Homo sapiens
gaaguauccuucagccugaaa

SEQ ID NO: 27382 - RNA, 22 nt, Homo sapiens
agaguucugucuggacuuucca

SEQ ID NO: 27383 - RNA, 18 nt, Homo sapiens
auucuauuacgugcaaua

SEQ ID NO: 27384 - RNA, 21 nt, Homo sapiens
auugaaucccuuaaacucagg

SEQ ID NO: 27385 - RNA, 13 nt, Homo sapiens
aauuccucuggga

SEQ ID NO: 27386 - RNA, 16 nt, Homo sapiens
uggaacucaaggaaau

SEQ ID NO: 27387 - RNA, 11 nt, Homo sapiens
auuugagacag

SEQ ID NO: 27388 - RNA, 19 nt, Homo sapiens
aaaauauuuuuaugugcaa

SEQ ID NO: 27389 - RNA, 20 nt, Homo sapiens
uugaaauagugucugaugaa

SEQ ID NO: 27390 - RNA, 21 nt, Homo sapiens
auucuucuuugguggagauaa

SEQ ID NO: 27391 - RNA, 14 nt, Homo sapiens
gaaaaugugcaaua

SEQ ID NO: 27392 - RNA, 18 nt, Homo sapiens
uuuccacuacugcuacca

SEQ ID NO: 27393 - RNA, 10 nt, Homo sapiens
uaugugcaau

SEQ ID NO: 27394 - RNA, 19 nt, Homo sapiens
cuggaucucacaagcacuu

SEQ ID NO: 27395 - RNA, 20 nt, Homo sapiens
cugaauacauucugcuuuca

SEQ ID NO: 27396 - RNA, 23 nt, Homo sapiens
agagacagaaagcagaacaguga

SEQ ID NO: 27397 - RNA, 17 nt, Homo sapiens
caaacagaacuauggaa

SEQ ID NO: 27398 - RNA, 20 nt, Homo sapiens
uccugugacugucucacuua

SEQ ID NO: 27399 - RNA, 19 nt, Homo sapiens
gggucucccucuguugcca

SEQ ID NO: 27400 - RNA, 20 nt, Homo sapiens
augugauuacccucuggguc

SEQ ID NO: 27401 - RNA, 19 nt, Homo sapiens
auuacgugcaauacuucaa

SEQ ID NO: 27402 - RNA, 15 nt, Homo sapiens
uuccuggacaguuuu

SEQ ID NO: 27403 - RNA, 14 nt, Homo sapiens
ugaugaauguuaaa

SEQ ID NO: 27404 - RNA, 18 nt, Homo sapiens
gcagcuuauucacaagac

SEQ ID NO: 27405 - RNA, 18 nt, Homo sapiens
cauaagcaaagacuauga

SEQ ID NO: 27406 - RNA, 19 nt, Homo sapiens
caagcuuuucaaaauugga

SEQ ID NO: 27407 - RNA, 17 nt, Homo sapiens
aguuacugccgguuuga

SEQ ID NO: 27408 - RNA, 15 nt, Homo sapiens
uaaucccagcacuuu

SEQ ID NO: 27409 - RNA, 12 nt, Homo sapiens
acugugacugua

SEQ ID NO: 27410 - RNA, 18 nt, Homo sapiens
ucacuuuuuuucuuuucu

SEQ ID NO: 27411 - RNA, 16 nt, Homo sapiens
cuuccucagcuguaga

SEQ ID NO: 27412 - RNA, 19 nt, Homo sapiens
auccagauagguuaccagu

SEQ ID NO: 27413 - RNA, 19 nt, Homo sapiens
ugaacacuuauaagugaag

SEQ ID NO: 27414 - RNA, 16 nt, Homo sapiens
aggagauuucaugccu

SEQ ID NO: 27415 - RNA, 20 nt, Homo sapiens
cuacuugggaggcugaggca

SEQ ID NO: 27416 - RNA, 17 nt, Homo sapiens
aaauucacaaguugugu

SEQ ID NO: 27417 - RNA, 20 nt, Homo sapiens
gugucuggcacuugggacaa

SEQ ID NO: 27418 - RNA, 21 nt, Homo sapiens
auuuuuuaugaaacauuacag

SEQ ID NO: 27419 - RNA, 14 nt, Homo sapiens
gagaaaagacauaa

SEQ ID NO: 27420 - RNA, 20 nt, Homo sapiens
uaagcaaaaugugauaugua

SEQ ID NO: 27421 - RNA, 15 nt, Homo sapiens
uaugcuaagugaaau

SEQ ID NO: 27422 - RNA, 17 nt, Homo sapiens
gugagacagcucugcau

SEQ ID NO: 27423 - RNA, 20 nt, Homo sapiens
aagaccuggucgucgucuug

SEQ ID NO: 27424 - RNA, 17 nt, Homo sapiens
uauuugcaagacauaga

SEQ ID NO: 27425 - RNA, 16 nt, Homo sapiens
uuaugcuaagugaaau

SEQ ID NO: 27426 - RNA, 19 nt, Homo sapiens
ucccuucucuucacaguca

SEQ ID NO: 27427 - RNA, 14 nt, Homo sapiens
ggugugaccacugc

SEQ ID NO: 27428 - RNA, 14 nt, Homo sapiens
aaucccagcacuuu

SEQ ID NO: 27429 - RNA, 21 nt, Homo sapiens
auagcagcuuauucacaagac

SEQ ID NO: 27430 - RNA, 20 nt, Homo sapiens
gacaccaccacccuugccau

SEQ ID NO: 27431 - RNA, 23 nt, Homo sapiens
gguuaccaguaacggaacaguau

SEQ ID NO: 27432 - RNA, 16 nt, Homo sapiens
caaguuguguuugaua

SEQ ID NO: 27433 - RNA, 20 nt, Homo sapiens
guguuggaaaaugugcaaua

SEQ ID NO: 27434 - RNA, 22 nt, Homo sapiens
aacccaaauguucaucaaugaa

SEQ ID NO: 27435 - RNA, 11 nt, Homo sapiens
uuacucugaag

SEQ ID NO: 27436 - RNA, 12 nt, Homo sapiens
accagggacuga

SEQ ID NO: 27437 - RNA, 16 nt, Homo sapiens
cacuuauugacuauua

SEQ ID NO: 27438 - RNA, 21 nt, Homo sapiens
auccuaauaaaaaggugacca

SEQ ID NO: 27439 - RNA, 16 nt, Homo sapiens
gcaauaaaauguauuu

SEQ ID NO: 27440 - RNA, 15 nt, Homo sapiens
guggaugauguuucg

SEQ ID NO: 27441 - RNA, 20 nt, Homo sapiens
agagcaagacucugucucaa

SEQ ID NO: 27442 - RNA, 22 nt, Homo sapiens
uggcaaaucucuauuaggaaau

SEQ ID NO: 27443 - RNA, 19 nt, Homo sapiens
cuucuggguucaagcgauu

SEQ ID NO: 27444 - RNA, 18 nt, Homo sapiens
aacuugaaugugucaggu

SEQ ID NO: 27445 - RNA, 13 nt, Homo sapiens
auagcaucucagg

SEQ ID NO: 27446 - RNA, 17 nt, Homo sapiens
ccaaacagaacuaugga

SEQ ID NO: 27447 - RNA, 13 nt, Homo sapiens
aucauguauuuau

SEQ ID NO: 27448 - RNA, 16 nt, Homo sapiens
auaugacacaucucug

SEQ ID NO: 27449 - RNA, 13 nt, Homo sapiens
agauuaugaucuc

SEQ ID NO: 27450 - RNA, 22 nt, Homo sapiens
aucuuuuauacagugucuuaca

SEQ ID NO: 27451 - RNA, 12 nt, Homo sapiens
cugauaccucaa

SEQ ID NO: 27452 - RNA, 15 nt, Homo sapiens
aaauaaaagcacuua

SEQ ID NO: 27453 - RNA, 17 nt, Homo sapiens
agaaaauaaaagcacuu

SEQ ID NO: 27454 - RNA, 17 nt, Homo sapiens
uuuaauggcaugucaga

SEQ ID NO: 27455 - RNA, 11 nt, Homo sapiens
cuuuaucucag

SEQ ID NO: 27456 - RNA, 14 nt, Homo sapiens
aaugaaguacucau

SEQ ID NO: 27457 - RNA, 14 nt, Homo sapiens
auccugcaauucca

SEQ ID NO: 27458 - RNA, 22 nt, Homo sapiens
cuauauccugugacugucucac

SEQ ID NO: 27459 - RNA, 15 nt, Homo sapiens
ggaauuuucuuccaa

SEQ ID NO: 27460 - RNA, 12 nt, Homo sapiens
uagcaucucagg

SEQ ID NO: 27461 - RNA, 14 nt, Homo sapiens
auacuccuaguaau

SEQ ID NO: 27462 - RNA, 20 nt, Homo sapiens
aaagauuucuugaguuuugu

SEQ ID NO: 27463 - RNA, 18 nt, Homo sapiens
auaucaguccucuuucaa

SEQ ID NO: 27464 - RNA, 21 nt, Homo sapiens
cagagaaaauaaaagcacuua

SEQ ID NO: 27465 - RNA, 18 nt, Homo sapiens
aauuaauggaauauguaa

SEQ ID NO: 27466 - RNA, 21 nt, Homo sapiens
ucugucuggacuuuccagaga

SEQ ID NO: 27467 - RNA, 22 nt, Homo sapiens
cccaaaacugauacccuuugaa

SEQ ID NO: 27468 - RNA, 17 nt, Homo sapiens
ucauguacauccauggu

SEQ ID NO: 27469 - RNA, 16 nt, Homo sapiens
ugaaaaugaauaucua

SEQ ID NO: 27470 - RNA, 21 nt, Homo sapiens
ggccuguugaagaugcuugua

SEQ ID NO: 27471 - RNA, 16 nt, Homo sapiens
uucaugcauuugcacu

SEQ ID NO: 27472 - RNA, 14 nt, Homo sapiens
gcuuccuaacugcu

SEQ ID NO: 27473 - RNA, 21 nt, Homo sapiens
aucaauucuauuacgugcaau

SEQ ID NO: 27474 - RNA, 17 nt, Homo sapiens
ugauuacaaggcuuuau

SEQ ID NO: 27475 - RNA, 17 nt, Homo sapiens
ugccccugcacuccagc

SEQ ID NO: 27476 - RNA, 13 nt, Homo sapiens
auauauuuuuaga

SEQ ID NO: 27477 - RNA, 15 nt, Homo sapiens
caauuccucugggaa

SEQ ID NO: 27478 - RNA, 15 nt, Homo sapiens
cuauauccugugacu

SEQ ID NO: 27479 - RNA, 12 nt, Homo sapiens
auagaauuaaca

SEQ ID NO: 27480 - RNA, 14 nt, Homo sapiens
gucucccaaagugc

SEQ ID NO: 27481 - RNA, 12 nt, Homo sapiens
cacuugaacccg

SEQ ID NO: 27482 - RNA, 21 nt, Homo sapiens
gcagugagcugauaucaugcc

SEQ ID NO: 27483 - RNA, 21 nt, Homo sapiens
uugguacuagauacugaaugu

SEQ ID NO: 27484 - RNA, 17 nt, Homo sapiens
gaguucugucuggacuu

SEQ ID NO: 27485 - RNA, 19 nt, Homo sapiens
gcuggagugcaguggcgca

SEQ ID NO: 27486 - RNA, 16 nt, Homo sapiens
ucagaagaaauucugc

SEQ ID NO: 27487 - RNA, 12 nt, Homo sapiens
aaaagccaaaaa

SEQ ID NO: 27488 - RNA, 20 nt, Homo sapiens
uucaccuuccagugucucgg

SEQ ID NO: 27489 - RNA, 21 nt, Homo sapiens
agauguagauaaacucagaaa

SEQ ID NO: 27490 - RNA, 19 nt, Homo sapiens
cugcuggauucaagugauc

SEQ ID NO: 27491 - RNA, 23 nt, Homo sapiens
agauuuuguuuuuaaacuggaaa

SEQ ID NO: 27492 - RNA, 15 nt, Homo sapiens
guaaacaaaggaauu

SEQ ID NO: 27493 - RNA, 21 nt, Homo sapiens
aaacuaccagcccuacaccau

SEQ ID NO: 27494 - RNA, 13 nt, Homo sapiens
auuacgugcaaua

SEQ ID NO: 27495 - RNA, 20 nt, Homo sapiens
ccuggcuggggccuguugaa

SEQ ID NO: 27496 - RNA, 15 nt, Homo sapiens
ccauagagacuuugu

SEQ ID NO: 27497 - RNA, 19 nt, Homo sapiens
gcaaccuuuggaugcacuu

SEQ ID NO: 27498 - RNA, 20 nt, Homo sapiens
aaaagauuguauagugcaug

SEQ ID NO: 27499 - RNA, 22 nt, Homo sapiens
aaucugaggccuccucucucag

SEQ ID NO: 27500 - RNA, 22 nt, Homo sapiens
aacccggccugauuaaaguuaa

SEQ ID NO: 27501 - RNA, 16 nt, Homo sapiens
acuaaaaauacaaaaa

SEQ ID NO: 27502 - RNA, 21 nt, Homo sapiens
cagccuggucaacauggugaa

SEQ ID NO: 27503 - RNA, 14 nt, Homo sapiens
aucuuacugaaggu

SEQ ID NO: 27504 - RNA, 21 nt, Homo sapiens
uucaugaaaagauuaugaucu

SEQ ID NO: 27505 - RNA, 18 nt, Homo sapiens
gcuugaaauagugucuga

SEQ ID NO: 27506 - RNA, 15 nt, Homo sapiens
gaaaaugugcaauau

SEQ ID NO: 27507 - RNA, 19 nt, Homo sapiens
acuugggcgggacacaggc

SEQ ID NO: 27508 - RNA, 14 nt, Homo sapiens
gcuggagugcagug

SEQ ID NO: 27509 - RNA, 18 nt, Homo sapiens
uacagagaaaagacauaa

SEQ ID NO: 27510 - RNA, 18 nt, Homo sapiens
guuggaaaaugugcaaua

SEQ ID NO: 27511 - RNA, 17 nt, Homo sapiens
ggaagaaauuccaggaa

SEQ ID NO: 27512 - RNA, 17 nt, Homo sapiens
auggcagcuuuccucaa

SEQ ID NO: 27513 - RNA, 15 nt, Homo sapiens
aggcuccaaacugga

SEQ ID NO: 27514 - RNA, 16 nt, Homo sapiens
agggauuccccuaacc

SEQ ID NO: 27515 - RNA, 23 nt, Homo sapiens
auucccuuuugcugccucuaaaa

SEQ ID NO: 27516 - RNA, 18 nt, Homo sapiens
uaaauaguuuaugauucc

SEQ ID NO: 27517 - RNA, 18 nt, Homo sapiens
ugguccgaagucuuccau

SEQ ID NO: 27518 - RNA, 21 nt, Homo sapiens
uaagguauauaaauuuuccca

SEQ ID NO: 27519 - RNA, 15 nt, Homo sapiens
aggcauucucugaag

SEQ ID NO: 27520 - RNA, 16 nt, Homo sapiens
uuguuggauaaaucag

SEQ ID NO: 27521 - RNA, 22 nt, Homo sapiens
acaguauggcagcuuuccucaa

SEQ ID NO: 27522 - RNA, 23 nt, Homo sapiens
ugagaugggagaaucacuugaac

SEQ ID NO: 27523 - RNA, 14 nt, Homo sapiens
uuauuguaccucuc

SEQ ID NO: 27524 - RNA, 20 nt, Homo sapiens
ggaauauuugcaagacauag

SEQ ID NO: 27525 - RNA, 16 nt, Homo sapiens
agaaucacuugaaccc

SEQ ID NO: 27526 - RNA, 18 nt, Homo sapiens
guuuuuccacuacugcua

SEQ ID NO: 27527 - RNA, 11 nt, Homo sapiens
uacgugcaaua

SEQ ID NO: 27528 - RNA, 14 nt, Homo sapiens
auuugcaagacaua

SEQ ID NO: 27529 - RNA, 20 nt, Homo sapiens
cuuuccagagaccaguauuc

SEQ ID NO: 27530 - RNA, 23 nt, Homo sapiens
agacauagaauuaacacaugauc

SEQ ID NO: 27531 - RNA, 15 nt, Homo sapiens
caaccacucauucaa

SEQ ID NO: 27532 - RNA, 21 nt, Homo sapiens
caguaauuuuaaguaauuuca

SEQ ID NO: 27533 - RNA, 15 nt, Homo sapiens
accuguaaucccagc

SEQ ID NO: 27534 - RNA, 15 nt, Homo sapiens
augacacaucucuga

SEQ ID NO: 27535 - RNA, 23 nt, Homo sapiens
aaacauuuaaauuauacaaucau

SEQ ID NO: 27536 - RNA, 19 nt, Homo sapiens
cuguuuccauagggugaca

SEQ ID NO: 27537 - RNA, 14 nt, Homo sapiens
auagcaucucagga

SEQ ID NO: 27538 - RNA, 14 nt, Homo sapiens
aaaaugaauaucua

SEQ ID NO: 27539 - RNA, 21 nt, Homo sapiens
acagcucugcauacucauuag

SEQ ID NO: 27540 - RNA, 17 nt, Homo sapiens
uguagauaaacucagaa

SEQ ID NO: 27541 - RNA, 23 nt, Homo sapiens
auaucaugccccuguacuccagc

SEQ ID NO: 27542 - RNA, 21 nt, Homo sapiens
auauuguugacaacugugacu

SEQ ID NO: 27543 - RNA, 12 nt, Homo sapiens
aaauagugucug

SEQ ID NO: 27544 - RNA, 21 nt, Homo sapiens
gcaugucagacagaacuugaa

SEQ ID NO: 27545 - RNA, 21 nt, Homo sapiens
uauuuacugagcuucucugug

SEQ ID NO: 27546 - RNA, 16 nt, Homo sapiens
uuuaaucaccaaggcu

SEQ ID NO: 27547 - RNA, 15 nt, Homo sapiens
uuaggcuauucacaa

SEQ ID NO: 27548 - RNA, 15 nt, Homo sapiens
aucagcuaaguugca

SEQ ID NO: 27549 - RNA, 16 nt, Homo sapiens
gcuuuaauuucaugaa

SEQ ID NO: 27550 - RNA, 23 nt, Homo sapiens
ugucuuacagagaaaagacauaa

SEQ ID NO: 27551 - RNA, 23 nt, Homo sapiens
aguguccucaucuguaaaaugga

SEQ ID NO: 27552 - RNA, 20 nt, Homo sapiens
cgucucuacuaaaaauacaa

SEQ ID NO: 27553 - RNA, 21 nt, Homo sapiens
uuacuauuuauugcugaauga

SEQ ID NO: 27554 - RNA, 19 nt, Homo sapiens
uguguggcauuuucacuuu

SEQ ID NO: 27555 - RNA, 17 nt, Homo sapiens
aaggcuuuaucucaggg

SEQ ID NO: 27556 - RNA, 16 nt, Homo sapiens
agcuguuuucccugac

SEQ ID NO: 27557 - RNA, 17 nt, Homo sapiens
aaugaaugaauggcuaa

SEQ ID NO: 27558 - RNA, 20 nt, Homo sapiens
aggcggguggaucacuugag

SEQ ID NO: 27559 - RNA, 15 nt, Homo sapiens
uaaacaguagugaua

SEQ ID NO: 27560 - RNA, 20 nt, Homo sapiens
aagcagaacagugauuacca

SEQ ID NO: 27561 - RNA, 12 nt, Homo sapiens
cacagugucugg

SEQ ID NO: 27562 - RNA, 20 nt, Homo sapiens
gagaaaccuuauuguaccuc

SEQ ID NO: 27563 - RNA, 19 nt, Homo sapiens
accuacaugagguacugag

SEQ ID NO: 27564 - RNA, 23 nt, Homo sapiens
gagcaccugcaggcgugaccuga

SEQ ID NO: 27565 - RNA, 19 nt, Homo sapiens
uuccuucucaucugugauu

SEQ ID NO: 27566 - RNA, 14 nt, Homo sapiens
ccauuguggucaca

SEQ ID NO: 27567 - RNA, 21 nt, Homo sapiens
ugcaagacauagaauaguguu

SEQ ID NO: 27568 - RNA, 21 nt, Homo sapiens
ccuuauuguaccucucuuaua

SEQ ID NO: 27569 - RNA, 21 nt, Homo sapiens
gacaccaccacccuugccaug

SEQ ID NO: 27570 - RNA, 12 nt, Homo sapiens
agccccaaaagg

SEQ ID NO: 27571 - RNA, 13 nt, Homo sapiens
uccuggacaguuu

SEQ ID NO: 27572 - RNA, 17 nt, Homo sapiens
cacuuuaacacaguguc

SEQ ID NO: 27573 - RNA, 12 nt, Homo sapiens
cacaagcacuuu

SEQ ID NO: 27574 - RNA, 21 nt, Homo sapiens
uccuagcgcagccaugugauu

SEQ ID NO: 27575 - RNA, 22 nt, Homo sapiens
uuuccuagcgcagccaugugau

SEQ ID NO: 27576 - RNA, 18 nt, Homo sapiens
acaaggcuuuaucucagg

SEQ ID NO: 27577 - RNA, 17 nt, Homo sapiens
agauagguuaccaguaa

SEQ ID NO: 27578 - RNA, 15 nt, Homo sapiens
agcagggacuugaac

SEQ ID NO: 27579 - RNA, 23 nt, Homo sapiens
gauuucaugccuggugcuuccaa

SEQ ID NO: 27580 - RNA, 17 nt, Homo sapiens
ccuggucaacaugguga

SEQ ID NO: 27581 - RNA, 19 nt, Homo sapiens
guugaaaaaguucugcaga

SEQ ID NO: 27582 - RNA, 20 nt, Homo sapiens
cucaggggccaacuaggcag

SEQ ID NO: 27583 - RNA, 15 nt, Homo sapiens
cuugguauagcauau

SEQ ID NO: 27584 - RNA, 18 nt, Homo sapiens
cuauauuaucaugcaaau

SEQ ID NO: 27585 - RNA, 16 nt, Homo sapiens
uguguggcauuuucac

SEQ ID NO: 27586 - RNA, 21 nt, Homo sapiens
cccccauuguggucacaggaa

SEQ ID NO: 27587 - RNA, 14 nt, Homo sapiens
ccaaguuuauauac

SEQ ID NO: 27588 - RNA, 16 nt, Homo sapiens
uucacuuauugacuau

SEQ ID NO: 27589 - RNA, 17 nt, Homo sapiens
uuguaaguuuaugcaua

SEQ ID NO: 27590 - RNA, 12 nt, Homo sapiens
acuuugugaaaa

SEQ ID NO: 27591 - RNA, 16 nt, Homo sapiens
uagagugggacaguuc

SEQ ID NO: 27592 - RNA, 22 nt, Homo sapiens
auacaauuauuuuuacaguucu

SEQ ID NO: 27593 - RNA, 22 nt, Homo sapiens
uucucuucacagucacauucca

SEQ ID NO: 27594 - RNA, 17 nt, Homo sapiens
gaaucagaucauuucaa

SEQ ID NO: 27595 - RNA, 20 nt, Homo sapiens
cagcauuuuacuacuuuaaa

SEQ ID NO: 27596 - RNA, 19 nt, Homo sapiens
ugacacuagcuaauaucaa

SEQ ID NO: 27597 - RNA, 18 nt, Homo sapiens
gcccccauuguggucaca

SEQ ID NO: 27598 - RNA, 17 nt, Homo sapiens
aaacauagcaucucagg

SEQ ID NO: 27599 - RNA, 16 nt, Homo sapiens
auucucucuccuguac

SEQ ID NO: 27600 - RNA, 12 nt, Homo sapiens
aaguuuaugcau

SEQ ID NO: 27601 - RNA, 20 nt, Homo sapiens
aucaugccccuguacuccag

SEQ ID NO: 27602 - RNA, 20 nt, Homo sapiens
agugaacaaauuuacagaga

SEQ ID NO: 27603 - RNA, 21 nt, Homo sapiens
aggaauauuugcaagacauag

SEQ ID NO: 27604 - RNA, 20 nt, Homo sapiens
cacuuauaggaauugaccca

SEQ ID NO: 27605 - RNA, 21 nt, Homo sapiens
ggagcuugaaauagugucuga

SEQ ID NO: 27606 - RNA, 15 nt, Homo sapiens
ugcagauaaacagua

SEQ ID NO: 27607 - RNA, 22 nt, Homo sapiens
aucuuguuuuuccacuacugcu

SEQ ID NO: 27608 - RNA, 16 nt, Homo sapiens
cuuauaggaauugacc

SEQ ID NO: 27609 - RNA, 19 nt, Homo sapiens
gagaaaauaaaagcacuua

SEQ ID NO: 27610 - RNA, 23 nt, Homo sapiens
gccagugcuuuaauggcauguca

SEQ ID NO: 27611 - RNA, 18 nt, Homo sapiens
uuguagccacuucacuuu

SEQ ID NO: 27612 - RNA, 18 nt, Homo sapiens
ucaggaguuccuaaccag

SEQ ID NO: 27613 - RNA, 14 nt, Homo sapiens
gcaccaacuuugaa

SEQ ID NO: 27614 - RNA, 20 nt, Homo sapiens
gcaaccuccaccuucugggu

SEQ ID NO: 27615 - RNA, 15 nt, Homo sapiens
ugaauaaaguguaag

SEQ ID NO: 27616 - RNA, 16 nt, Homo sapiens
cuauuacgugcaauac

SEQ ID NO: 27617 - RNA, 14 nt, Homo sapiens
ucaguccucuuuca

SEQ ID NO: 27618 - RNA, 14 nt, Homo sapiens
agacagaacuugaa

SEQ ID NO: 27619 - RNA, 14 nt, Homo sapiens
agugggacaguucc

SEQ ID NO: 27620 - RNA, 22 nt, Homo sapiens
uucugugggagaauucuuacau

SEQ ID NO: 27621 - RNA, 14 nt, Homo sapiens
ggacuugggcggga

SEQ ID NO: 27622 - RNA, 19 nt, Homo sapiens
auuuuuacaguucucccaa

SEQ ID NO: 27623 - RNA, 20 nt, Homo sapiens
gcugucuauguggcuguauc

SEQ ID NO: 27624 - RNA, 24 nt, Homo sapiens
ggacuugggcgggacacaggcucc

SEQ ID NO: 27625 - RNA, 12 nt, Homo sapiens
uauauccuguga

SEQ ID NO: 27626 - RNA, 16 nt, Homo sapiens
guaaucccagcacuuu

SEQ ID NO: 27627 - RNA, 18 nt, Homo sapiens
guuccuucacauccugug

SEQ ID NO: 27628 - RNA, 19 nt, Homo sapiens
augauuccaccuacaugag

SEQ ID NO: 27629 - RNA, 17 nt, Homo sapiens
accuuauuguaccucuc

SEQ ID NO: 27630 - RNA, 18 nt, Homo sapiens
uguaaugaaaaugaauau

SEQ ID NO: 27631 - RNA, 18 nt, Homo sapiens
uacucuguuccuucacau

SEQ ID NO: 27632 - RNA, 13 nt, Homo sapiens
gacagaaagcaga

SEQ ID NO: 27633 - RNA, 18 nt, Homo sapiens
uuguaaaauggugugacc

SEQ ID NO: 27634 - RNA, 20 nt, Homo sapiens
aaggcuuagacccucaugcu

SEQ ID NO: 27635 - RNA, 19 nt, Homo sapiens
ugcuuguuagcaaaaugga

SEQ ID NO: 27636 - RNA, 19 nt, Homo sapiens
gacauaagcaaagacuaug

SEQ ID NO: 27637 - RNA, 11 nt, Homo sapiens
aaaagccaaaa

SEQ ID NO: 27638 - RNA, 16 nt, Homo sapiens
cagcccaagggugggu

SEQ ID NO: 27639 - RNA, 11 nt, Homo sapiens
aaaagcacuua

SEQ ID NO: 27640 - RNA, 19 nt, Homo sapiens
accaguaacggaacaguau

SEQ ID NO: 27641 - RNA, 21 nt, Homo sapiens
cuuugcuuuaaguguaacugg

SEQ ID NO: 27642 - RNA, 15 nt, Homo sapiens
uauguucuaagaagu

SEQ ID NO: 27643 - RNA, 15 nt, Homo sapiens
cagcagagacggggu

SEQ ID NO: 27644 - RNA, 16 nt, Homo sapiens
auacuguauuuuuacc

SEQ ID NO: 27645 - RNA, 18 nt, Homo sapiens
gcccaucuccgucuccca

SEQ ID NO: 27646 - RNA, 23 nt, Homo sapiens
ccuuaaacucagggagcauuuau

SEQ ID NO: 27647 - RNA, 22 nt, Homo sapiens
ugucuugggaauuuucuuccaa

SEQ ID NO: 27648 - RNA, 22 nt, Homo sapiens
agagcccuucaugcauuugcac

SEQ ID NO: 27649 - RNA, 21 nt, Homo sapiens
aaaaaaauuuuauagugucuu

SEQ ID NO: 27650 - RNA, 16 nt, Homo sapiens
acuccuaguaauuuaa

SEQ ID NO: 27651 - RNA, 20 nt, Homo sapiens
gaaauuuaauucauguuucu

SEQ ID NO: 27652 - RNA, 13 nt, Homo sapiens
ugugacuuuccua

SEQ ID NO: 27653 - RNA, 17 nt, Homo sapiens
cauuuccaaauucacaa

SEQ ID NO: 27654 - RNA, 16 nt, Homo sapiens
aggugacccugaugaa

SEQ ID NO: 27655 - RNA, 12 nt, Homo sapiens
cacuucacuuuu

SEQ ID NO: 27656 - RNA, 22 nt, Homo sapiens
acacaugauccugcaauuccac

SEQ ID NO: 27657 - RNA, 23 nt, Homo sapiens
aucaauucuauuacgugcaauac

SEQ ID NO: 27658 - RNA, 19 nt, Homo sapiens
aauagaaggauguacauuu

SEQ ID NO: 27659 - RNA, 23 nt, Homo sapiens
aaugugucaggugacccugauga

SEQ ID NO: 27660 - RNA, 17 nt, Homo sapiens
gcacuuuaacacagugu

SEQ ID NO: 27661 - RNA, 16 nt, Homo sapiens
acagagaaaagacaua

SEQ ID NO: 27662 - RNA, 21 nt, Homo sapiens
caauagaaggauguacauuuc

SEQ ID NO: 27663 - RNA, 21 nt, Homo sapiens
uguuuucugacuaauuaggca

SEQ ID NO: 27664 - RNA, 20 nt, Homo sapiens
aggagauggaaguugcagug

SEQ ID NO: 27665 - RNA, 16 nt, Homo sapiens
uguacaccaauauuca

SEQ ID NO: 27666 - RNA, 12 nt, Homo sapiens
auagcaagugaa

SEQ ID NO: 27667 - RNA, 15 nt, Homo sapiens
uuuaugcuaagugaa

SEQ ID NO: 27668 - RNA, 14 nt, Homo sapiens
ugccuguaaucaca

SEQ ID NO: 27669 - RNA, 14 nt, Homo sapiens
gcagaagacaguau

SEQ ID NO: 27670 - RNA, 13 nt, Homo sapiens
uuuacuuccucag

SEQ ID NO: 27671 - RNA, 14 nt, Homo sapiens
uauuuuuaugugca

SEQ ID NO: 27672 - RNA, 17 nt, Homo sapiens
aaaguguaaguucacaa

SEQ ID NO: 27673 - RNA, 24 nt, Homo sapiens
gccggagccccuugggcaggucac

SEQ ID NO: 27674 - RNA, 18 nt, Homo sapiens
cuuuaacacagugucugg

SEQ ID NO: 27675 - RNA, 18 nt, Homo sapiens
agguacugagagugaaca

SEQ ID NO: 27676 - RNA, 14 nt, Homo sapiens
aagccagacaucaa

SEQ ID NO: 27677 - RNA, 21 nt, Homo sapiens
uuauagaauauuuauuaccuc

SEQ ID NO: 27678 - RNA, 13 nt, Homo sapiens
uuugcaagacaua

SEQ ID NO: 27679 - RNA, 19 nt, Homo sapiens
aacaucaguuacucugaag

SEQ ID NO: 27680 - RNA, 18 nt, Homo sapiens
gaaagcagggacuugaac

SEQ ID NO: 27681 - RNA, 20 nt, Homo sapiens
caacuauauuaucaugcaaa

SEQ ID NO: 27682 - RNA, 12 nt, Homo sapiens
caaauuccagaa

SEQ ID NO: 27683 - RNA, 15 nt, Homo sapiens
aagugauacuaucca

SEQ ID NO: 27684 - RNA, 16 nt, Homo sapiens
ccaaauuuguauuuaa

SEQ ID NO: 27685 - RNA, 13 nt, Homo sapiens
guaaaauugaaag

SEQ ID NO: 27686 - RNA, 19 nt, Homo sapiens
augguuccauucucucucc

SEQ ID NO: 27687 - RNA, 18 nt, Homo sapiens
ccaaaaucggaucugggg

SEQ ID NO: 27688 - RNA, 20 nt, Homo sapiens
uuucacuuuuggcuuguaaa

SEQ ID NO: 27689 - RNA, 20 nt, Homo sapiens
ccuccaccuucuggguucaa

SEQ ID NO: 27690 - RNA, 13 nt, Homo sapiens
auuaucaugcaaa

SEQ ID NO: 27691 - RNA, 17 nt, Homo sapiens
acccaaauguucaucaa

SEQ ID NO: 27692 - RNA, 15 nt, Homo sapiens
agacucugucucagu

SEQ ID NO: 27693 - RNA, 21 nt, Homo sapiens
caaucugagccagugcuuuaa

SEQ ID NO: 27694 - RNA, 21 nt, Homo sapiens
aucauuucaaaacucauuucc

SEQ ID NO: 27695 - RNA, 21 nt, Homo sapiens
uggacaguuuucugcuuuaau

SEQ ID NO: 27696 - RNA, 18 nt, Homo sapiens
ugggagaaucacuugaac

SEQ ID NO: 27697 - RNA, 17 nt, Homo sapiens
uaguuuaugauuccacc

SEQ ID NO: 27698 - RNA, 16 nt, Homo sapiens
caggcuccaaacugga

SEQ ID NO: 27699 - RNA, 17 nt, Homo sapiens
uguauuuuauuacaucu

SEQ ID NO: 27700 - RNA, 19 nt, Homo sapiens
ucccagcgagggacaccga

SEQ ID NO: 27701 - RNA, 19 nt, Homo sapiens
aagguauuuuaaucaccaa

SEQ ID NO: 27702 - RNA, 16 nt, Homo sapiens
gaagucuuccauagag

SEQ ID NO: 27703 - RNA, 13 nt, Homo sapiens
aaguacagacuuu

SEQ ID NO: 27704 - RNA, 16 nt, Homo sapiens
cuaaccagccugguca

SEQ ID NO: 27705 - RNA, 20 nt, Homo sapiens
gaaaacauagcaucucagga

SEQ ID NO: 27706 - RNA, 20 nt, Homo sapiens
guaaucccagcuacuuggga

SEQ ID NO: 27707 - RNA, 18 nt, Homo sapiens
ugagacagcucugcauac

SEQ ID NO: 27708 - RNA, 20 nt, Homo sapiens
acgugacuggccugcuggau

SEQ ID NO: 27709 - RNA, 15 nt, Homo sapiens
uccuauguaacugca

SEQ ID NO: 27710 - RNA, 15 nt, Homo sapiens
ccuuuuuguuauuag

SEQ ID NO: 27711 - RNA, 15 nt, Homo sapiens
uagccacuucacuuu

SEQ ID NO: 27712 - RNA, 15 nt, Homo sapiens
ccuuuacauccagau

SEQ ID NO: 27713 - RNA, 14 nt, Homo sapiens
aucaaccaaaugga

SEQ ID NO: 27714 - RNA, 14 nt, Homo sapiens
ccgaagucuuccau

SEQ ID NO: 27715 - RNA, 19 nt, Homo sapiens
uagagaaauuugccaauuu

SEQ ID NO: 27716 - RNA, 15 nt, Homo sapiens
gcccuucaugcauuu

SEQ ID NO: 27717 - RNA, 15 nt, Homo sapiens
acaguuccugagacc

SEQ ID NO: 27718 - RNA, 14 nt, Homo sapiens
uauguggcuguauc

SEQ ID NO: 27719 - RNA, 13 nt, Homo sapiens
cuuuaucucaggg

SEQ ID NO: 27720 - RNA, 20 nt, Homo sapiens
cagagguugcagugagccga

SEQ ID NO: 27721 - RNA, 17 nt, Homo sapiens
auggagguuaagcacuu

SEQ ID NO: 27722 - RNA, 20 nt, Homo sapiens
gagauggaaguugcagugag

SEQ ID NO: 27723 - RNA, 14 nt, Homo sapiens
ggcauucucugaag

SEQ ID NO: 27724 - RNA, 12 nt, Homo sapiens
acucauugcaac

SEQ ID NO: 27725 - RNA, 20 nt, Homo sapiens
cagugagcugauaucaugcc

SEQ ID NO: 27726 - RNA, 20 nt, Homo sapiens
gccauaauuacuaugucauu

SEQ ID NO: 27727 - RNA, 14 nt, Homo sapiens
agcuguuuccauag

SEQ ID NO: 27728 - RNA, 13 nt, Homo sapiens
aucaggacgagaa

SEQ ID NO: 27729 - RNA, 23 nt, Homo sapiens
guauuuuauuacaucuuucacau

SEQ ID NO: 27730 - RNA, 13 nt, Homo sapiens
uacauuuccaaau

SEQ ID NO: 27731 - RNA, 22 nt, Homo sapiens
ugcagcccccauuguggucaca

SEQ ID NO: 27732 - RNA, 17 nt, Homo sapiens
aaaauuaucaauaucua

SEQ ID NO: 27733 - RNA, 20 nt, Homo sapiens
gagcuguuuucccugaccuc

SEQ ID NO: 27734 - RNA, 16 nt, Homo sapiens
ccugugacugucucac

SEQ ID NO: 27735 - RNA, 20 nt, Homo sapiens
caacuugaauaauacaccag

SEQ ID NO: 27736 - RNA, 14 nt, Homo sapiens
uaugacacaucucu

SEQ ID NO: 27737 - RNA, 16 nt, Homo sapiens
ucucuuauagaauauu

SEQ ID NO: 27738 - RNA, 14 nt, Homo sapiens
uugaaugugucagg

SEQ ID NO: 27739 - RNA, 12 nt, Homo sapiens
gccaauuuacuu

SEQ ID NO: 27740 - RNA, 21 nt, Homo sapiens
gcgcaaucuuaacucauugca

SEQ ID NO: 27741 - RNA, 13 nt, Homo sapiens
aacacagugucug

SEQ ID NO: 27742 - RNA, 17 nt, Homo sapiens
aagcagaacagugauua

SEQ ID NO: 27743 - RNA, 21 nt, Homo sapiens
uugaagaugcuuguauuuuac

SEQ ID NO: 27744 - RNA, 13 nt, Homo sapiens
aauauuguugaca

SEQ ID NO: 27745 - RNA, 19 nt, Homo sapiens
gaaaaaguucugcagauaa

SEQ ID NO: 27746 - RNA, 17 nt, Homo sapiens
uagaauauuuauuaccu

SEQ ID NO: 27747 - RNA, 19 nt, Homo sapiens
gacuaugaggaauauuugc

SEQ ID NO: 27748 - RNA, 20 nt, Homo sapiens
auugagcaccugcaggcgug

SEQ ID NO: 27749 - RNA, 19 nt, Homo sapiens
uuauuuagggaacugcuug

SEQ ID NO: 27750 - RNA, 12 nt, Homo sapiens
cauguacaucca

SEQ ID NO: 27751 - RNA, 21 nt, Homo sapiens
uuuacauacugcugucuaugu

SEQ ID NO: 27752 - RNA, 21 nt, Homo sapiens
uuguuuuaaaauuaaagcuaa

SEQ ID NO: 27753 - RNA, 14 nt, Homo sapiens
uaugcauacaguaa

SEQ ID NO: 27754 - RNA, 19 nt, Homo sapiens
uucgugaaguauacuguau

SEQ ID NO: 27755 - RNA, 23 nt, Homo sapiens
auaauuccuauauccugugacug

SEQ ID NO: 27756 - RNA, 16 nt, Homo sapiens
aagaaugacuaugcaa

SEQ ID NO: 27757 - RNA, 16 nt, Homo sapiens
agauccccguguuacu

SEQ ID NO: 27758 - RNA, 15 nt, Homo sapiens
caaaaucaaauucca

SEQ ID NO: 27759 - RNA, 15 nt, Homo sapiens
uuauuaccucugaua

SEQ ID NO: 27760 - RNA, 15 nt, Homo sapiens
cuagauacugaaugu

SEQ ID NO: 27761 - RNA, 20 nt, Homo sapiens
caauucuauuacgugcaaua

SEQ ID NO: 27762 - RNA, 23 nt, Homo sapiens
cuaucagcauuuuacuacuuuaa

SEQ ID NO: 27763 - RNA, 13 nt, Homo sapiens
uugaaaaaguaua

SEQ ID NO: 27764 - RNA, 17 nt, Homo sapiens
uauuuuauaucaauuua

SEQ ID NO: 27765 - RNA, 22 nt, Homo sapiens
ugaauaaaguguaaguucacaa

SEQ ID NO: 27766 - RNA, 16 nt, Homo sapiens
uuggaugcacuuuaua

SEQ ID NO: 27767 - RNA, 15 nt, Homo sapiens
aucagcauuuuacua

SEQ ID NO: 27768 - RNA, 23 nt, Homo sapiens
uccucuuucaaagguagccauca

SEQ ID NO: 27769 - RNA, 12 nt, Homo sapiens
ugcaagacauag

SEQ ID NO: 27770 - RNA, 15 nt, Homo sapiens
aaugguuccauucuc

SEQ ID NO: 27771 - RNA, 22 nt, Homo sapiens
uaucucaggggccaacuaggca

SEQ ID NO: 27772 - RNA, 12 nt, Homo sapiens
uuacgugcaaua

SEQ ID NO: 27773 - RNA, 12 nt, Homo sapiens
caaacagaacua

SEQ ID NO: 27774 - RNA, 12 nt, Homo sapiens
auuaauucaccu

SEQ ID NO: 27775 - RNA, 19 nt, Homo sapiens
cccuuugaugauuaauuca

SEQ ID NO: 27776 - RNA, 14 nt, Homo sapiens
gauuucaugccugg

SEQ ID NO: 27777 - RNA, 20 nt, Homo sapiens
gccauggagguuaagcacuu

SEQ ID NO: 27778 - RNA, 13 nt, Homo sapiens
cauuuucacuuuu

SEQ ID NO: 27779 - RNA, 16 nt, Homo sapiens
uauuacgugcaauacu

SEQ ID NO: 27780 - RNA, 19 nt, Homo sapiens
cugcaaucugagccagugc

SEQ ID NO: 27781 - RNA, 17 nt, Homo sapiens
uccaaauauuguugaca

SEQ ID NO: 27782 - RNA, 20 nt, Homo sapiens
cugcagaagacaguauggca

SEQ ID NO: 27783 - RNA, 17 nt, Homo sapiens
uucuauuacgugcaaua

SEQ ID NO: 27784 - RNA, 20 nt, Homo sapiens
cucuacuaaaaauacaaaaa

SEQ ID NO: 27785 - RNA, 22 nt, Homo sapiens
uucuauuacgugcaauacuuca

SEQ ID NO: 27786 - RNA, 17 nt, Homo sapiens
auagaauuaacacauga

SEQ ID NO: 27787 - RNA, 14 nt, Homo sapiens
cgcagccaugugau

SEQ ID NO: 27788 - RNA, 14 nt, Homo sapiens
uaaauguaucuuau

SEQ ID NO: 27789 - RNA, 16 nt, Homo sapiens
caaauauuguugacaa

SEQ ID NO: 27790 - RNA, 20 nt, Homo sapiens
gagugacuuaguguacauga

SEQ ID NO: 27791 - RNA, 17 nt, Homo sapiens
ccuggacaguuuucugc

SEQ ID NO: 27792 - RNA, 19 nt, Homo sapiens
cauggcacucuauguucua

SEQ ID NO: 27793 - RNA, 19 nt, Homo sapiens
uaguguuggaaaaugugca

SEQ ID NO: 27794 - RNA, 21 nt, Homo sapiens
uauucacaaccacucauucaa

SEQ ID NO: 27795 - RNA, 19 nt, Homo sapiens
aggcaaggcuaugugauua

SEQ ID NO: 27796 - RNA, 22 nt, Homo sapiens
uaguguuggaaaaugugcaaua

SEQ ID NO: 27797 - RNA, 18 nt, Homo sapiens
cuguuccuucacauccug

SEQ ID NO: 27798 - RNA, 15 nt, Homo sapiens
cuucuuggucucagu

SEQ ID NO: 27799 - RNA, 23 nt, Homo sapiens
aaagucagugcccaacuguuaua

SEQ ID NO: 27800 - RNA, 18 nt, Homo sapiens
cuuggucacauacaauua

SEQ ID NO: 27801 - RNA, 16 nt, Homo sapiens
auaaacucagaaauuu

SEQ ID NO: 27802 - RNA, 19 nt, Homo sapiens
uauuuauugagcaccugca

SEQ ID NO: 27803 - RNA, 15 nt, Homo sapiens
gacuuaaaaucuaau

SEQ ID NO: 27804 - RNA, 19 nt, Homo sapiens
gcaacccaaauguucauca

SEQ ID NO: 27805 - RNA, 16 nt, Homo sapiens
uguaucuuauucacau

SEQ ID NO: 27806 - RNA, 19 nt, Homo sapiens
auuguugacaacugugacu

SEQ ID NO: 27807 - RNA, 14 nt, Homo sapiens
augaaugaauggcu

SEQ ID NO: 27808 - RNA, 13 nt, Homo sapiens
auguaacugcauu

SEQ ID NO: 27809 - RNA, 21 nt, Homo sapiens
uauuuauaauuccuauauccu

SEQ ID NO: 27810 - RNA, 13 nt, Homo sapiens
uaagcaacaucua

SEQ ID NO: 27811 - RNA, 14 nt, Homo sapiens
uuuaaguaauuuca

SEQ ID NO: 27812 - RNA, 15 nt, Homo sapiens
uauuuuuaugugcaa

SEQ ID NO: 27813 - RNA, 22 nt, Homo sapiens
agcacuuucccucuuggugccu

SEQ ID NO: 27814 - RNA, 22 nt, Homo sapiens
agaccuggucgucgucuugacu

SEQ ID NO: 27815 - RNA, 21 nt, Homo sapiens
gacagaaagcagaacagugau

SEQ ID NO: 27816 - RNA, 18 nt, Homo sapiens
aggcauguaauugcuugu

SEQ ID NO: 27817 - RNA, 19 nt, Homo sapiens
ugcuggccaggcuggucuc

SEQ ID NO: 27818 - RNA, 22 nt, Homo sapiens
aaacaucaguuacucugaaggg

SEQ ID NO: 27819 - RNA, 16 nt, Homo sapiens
aacaaaaaaagcauug

SEQ ID NO: 27820 - RNA, 21 nt, Homo sapiens
gcuacucuguuccuucacauc

SEQ ID NO: 27821 - RNA, 14 nt, Homo sapiens
augaaaaugaauau

SEQ ID NO: 27822 - RNA, 18 nt, Homo sapiens
auuuuauuacaucuuuca

SEQ ID NO: 27823 - RNA, 19 nt, Homo sapiens
aaucaccaaggcugauuaa

SEQ ID NO: 27824 - RNA, 14 nt, Homo sapiens
cuguaaucacagcu

SEQ ID NO: 27825 - RNA, 19 nt, Homo sapiens
cauuugcuggagcucugcc

SEQ ID NO: 27826 - RNA, 16 nt, Homo sapiens
cacgccuguaauccca

SEQ ID NO: 27827 - RNA, 14 nt, Homo sapiens
uaacugcauugaga

SEQ ID NO: 27828 - RNA, 13 nt, Homo sapiens
acaacugugacug

SEQ ID NO: 27829 - RNA, 15 nt, Homo sapiens
uuggaaaaugugcaa

SEQ ID NO: 27830 - RNA, 22 nt, Homo sapiens
cugaugaaaacauagcaucuca

SEQ ID NO: 27831 - RNA, 13 nt, Homo sapiens
gccccugcacucc

SEQ ID NO: 27832 - RNA, 21 nt, Homo sapiens
cucuauagacucuaggacaua

SEQ ID NO: 27833 - RNA, 20 nt, Homo sapiens
auaauaugcacacagugcuu

SEQ ID NO: 27834 - RNA, 13 nt, Homo sapiens
ucacaagcacuuu

SEQ ID NO: 27835 - RNA, 18 nt, Homo sapiens
ugauccugcaauuccacu

SEQ ID NO: 27836 - RNA, 18 nt, Homo sapiens
aaaucuacacuccaguga

SEQ ID NO: 27837 - RNA, 14 nt, Homo sapiens
cuuggucucagugu

SEQ ID NO: 27838 - RNA, 17 nt, Homo sapiens
uaacuuaugaaccuuua

SEQ ID NO: 27839 - RNA, 16 nt, Homo sapiens
guggcauuuucacuuu

SEQ ID NO: 27840 - RNA, 23 nt, Homo sapiens
ucacauuccaagccucaugucca

SEQ ID NO: 27841 - RNA, 24 nt, Homo sapiens
uuucaaaaucaaauuccagaauga

SEQ ID NO: 27842 - RNA, 23 nt, Homo sapiens
ugauccugcaauuccacuuauag

SEQ ID NO: 27843 - RNA, 20 nt, Homo sapiens
uuagacccucaugcugccaa

SEQ ID NO: 27844 - RNA, 15 nt, Homo sapiens
gucucaguccaugaa

SEQ ID NO: 27845 - RNA, 22 nt, Homo sapiens
ugucuuacagagaaaagacaua

SEQ ID NO: 27846 - RNA, 14 nt, Homo sapiens
gguacauauuucuu

SEQ ID NO: 27847 - RNA, 22 nt, Homo sapiens
aagucagugcccaacuguuaua

SEQ ID NO: 27848 - RNA, 18 nt, Homo sapiens
auuuguuaaaauuaucaa

SEQ ID NO: 27849 - RNA, 23 nt, Homo sapiens
gaaauuugccaauuuacuuuguu

SEQ ID NO: 27850 - RNA, 22 nt, Homo sapiens
gcuugaaauagugucugaugaa

SEQ ID NO: 27851 - RNA, 13 nt, Homo sapiens
aggaauauuugca

SEQ ID NO: 27852 - RNA, 23 nt, Homo sapiens
uuuaaaaaaaaaaaaaaagccaa

SEQ ID NO: 27853 - RNA, 16 nt, Homo sapiens
uuaugaaccuuuacau

SEQ ID NO: 27854 - RNA, 16 nt, Homo sapiens
gacuuuggcaaaugag

SEQ ID NO: 27855 - RNA, 15 nt, Homo sapiens
agugaaaaacaucca

SEQ ID NO: 27856 - RNA, 21 nt, Homo sapiens
agggucucccucuguugccaa

SEQ ID NO: 27857 - RNA, 15 nt, Homo sapiens
uuuccacuacugcua

SEQ ID NO: 27858 - RNA, 17 nt, Homo sapiens
ccagugcuuuaauggca

SEQ ID NO: 27859 - RNA, 15 nt, Homo sapiens
uuaucuugucucugg

SEQ ID NO: 27860 - RNA, 15 nt, Homo sapiens
aaugauuucauucaa

SEQ ID NO: 27861 - RNA, 13 nt, Homo sapiens
uauuuuaaucacc

SEQ ID NO: 27862 - RNA, 15 nt, Homo sapiens
aaucagaucauuuca

SEQ ID NO: 27863 - RNA, 23 nt, Homo sapiens
auauuuuuuaugaaacauuacag

SEQ ID NO: 27864 - RNA, 12 nt, Homo sapiens
accacauggcuu

SEQ ID NO: 27865 - RNA, 18 nt, Homo sapiens
uauauguguuuuucacau

SEQ ID NO: 27866 - RNA, 17 nt, Homo sapiens
caacuauauuaucaugc

SEQ ID NO: 27867 - RNA, 22 nt, Homo sapiens
cuguacuccagccugggugaca

SEQ ID NO: 27868 - RNA, 19 nt, Homo sapiens
aucuccgucucccaaagug

SEQ ID NO: 27869 - RNA, 17 nt, Homo sapiens
auaagcaaagacuauga

SEQ ID NO: 27870 - RNA, 20 nt, Homo sapiens
auuuucacuuuuggcuugua

SEQ ID NO: 27871 - RNA, 21 nt, Homo sapiens
ucauuuccuauguaacugcau

SEQ ID NO: 27872 - RNA, 16 nt, Homo sapiens
ucucuaacucagaaac

SEQ ID NO: 27873 - RNA, 20 nt, Homo sapiens
ccuggacaguuuucugcuuu

SEQ ID NO: 27874 - RNA, 16 nt, Homo sapiens
uucucuaacucagaaa

SEQ ID NO: 27875 - RNA, 19 nt, Homo sapiens
uacaaggcuuuaucucagg

SEQ ID NO: 27876 - RNA, 15 nt, Homo sapiens
uugacaacugugacu

SEQ ID NO: 27877 - RNA, 12 nt, Homo sapiens
ucuuggugccuc

SEQ ID NO: 27878 - RNA, 16 nt, Homo sapiens
cauuuccaaauucaca

SEQ ID NO: 27879 - RNA, 12 nt, Homo sapiens
aaaaaagccaaa

SEQ ID NO: 27880 - RNA, 18 nt, Homo sapiens
uuacagagaaaagacaua

SEQ ID NO: 27881 - RNA, 18 nt, Homo sapiens
caacagaagcuuccauuc

SEQ ID NO: 27882 - RNA, 16 nt, Homo sapiens
aggcuuuaucucaggg

SEQ ID NO: 27883 - RNA, 14 nt, Homo sapiens
aaaccucaagccag

SEQ ID NO: 27884 - RNA, 11 nt, Homo sapiens
gcaacccaaau

SEQ ID NO: 27885 - RNA, 10 nt, Homo sapiens
auagugucuu

SEQ ID NO: 27886 - RNA, 18 nt, Homo sapiens
ugaaagcagggacuugaa

SEQ ID NO: 27887 - RNA, 13 nt, Homo sapiens
agaaucacuugaa

SEQ ID NO: 27888 - RNA, 13 nt, Homo sapiens
caauuccucuggg

SEQ ID NO: 27889 - RNA, 13 nt, Homo sapiens
gaaauagugucug

SEQ ID NO: 27890 - RNA, 21 nt, Homo sapiens
aaagaaaaucaggcuggccaa

SEQ ID NO: 27891 - RNA, 20 nt, Homo sapiens
auugugccccugcacuccag

SEQ ID NO: 27892 - RNA, 13 nt, Homo sapiens
cacuccagccuga

SEQ ID NO: 27893 - RNA, 14 nt, Homo sapiens
agcuucucugugaa

SEQ ID NO: 27894 - RNA, 18 nt, Homo sapiens
aacucauugcaaccucca

SEQ ID NO: 27895 - RNA, 18 nt, Homo sapiens
uggaucucacaagcacuu

SEQ ID NO: 27896 - RNA, 12 nt, Homo sapiens
uuaccucugaua

SEQ ID NO: 27897 - RNA, 13 nt, Homo sapiens
ugaaauagugucu

SEQ ID NO: 27898 - RNA, 12 nt, Homo sapiens
gaaaaugugcaa

SEQ ID NO: 27899 - RNA, 17 nt, Homo sapiens
caaauguucaucaauga

SEQ ID NO: 27900 - RNA, 17 nt, Homo sapiens
aggcuagaaccaccugc

SEQ ID NO: 27901 - RNA, 21 nt, Homo sapiens
guauauaaauuuucccaaaac

SEQ ID NO: 27902 - RNA, 17 nt, Homo sapiens
aagugaaaaacauccag

SEQ ID NO: 27903 - RNA, 17 nt, Homo sapiens
ugaaaaucuacacucca

SEQ ID NO: 27904 - RNA, 22 nt, Homo sapiens
aguauaaauaaaaugagcaaaa

SEQ ID NO: 27905 - RNA, 19 nt, Homo sapiens
cagccugggugacagagca

SEQ ID NO: 27906 - RNA, 15 nt, Homo sapiens
uauuucacuugauga

SEQ ID NO: 27907 - RNA, 21 nt, Homo sapiens
cuguaaucccagcuacuuggg

SEQ ID NO: 27908 - RNA, 16 nt, Homo sapiens
uauugagcaccugcag

SEQ ID NO: 27909 - RNA, 17 nt, Homo sapiens
aaagcuaaaguaucugu

SEQ ID NO: 27910 - RNA, 15 nt, Homo sapiens
caagccucaugucca

SEQ ID NO: 27911 - RNA, 22 nt, Homo sapiens
aucaauucuauuacgugcaaua

SEQ ID NO: 27912 - RNA, 13 nt, Homo sapiens
uuuuucauuauug

SEQ ID NO: 27913 - RNA, 17 nt, Homo sapiens
uguggcauuuucacuuu

SEQ ID NO: 27914 - RNA, 20 nt, Homo sapiens
uuaaaaucuaauucaaacua

SEQ ID NO: 27915 - RNA, 22 nt, Homo sapiens
aagauguagaggagaaacugga

SEQ ID NO: 27916 - RNA, 20 nt, Homo sapiens
aaccaaauggagugacuuag

SEQ ID NO: 27917 - RNA, 16 nt, Homo sapiens
cagacaucaacagaua

SEQ ID NO: 27918 - RNA, 13 nt, Homo sapiens
ucaaauuccagaa

SEQ ID NO: 27919 - RNA, 14 nt, Homo sapiens
uucccaaaacugau

SEQ ID NO: 27920 - RNA, 20 nt, Homo sapiens
auuuauuuuuuuacuuccuc

SEQ ID NO: 27921 - RNA, 18 nt, Homo sapiens
aaccacuucauucuugaa

SEQ ID NO: 27922 - RNA, 16 nt, Homo sapiens
aacauuucaaaaggua

SEQ ID NO: 27923 - RNA, 17 nt, Homo sapiens
gggcuuuagggaccugc

SEQ ID NO: 27924 - RNA, 15 nt, Homo sapiens
aaacauguucacuua

SEQ ID NO: 27925 - RNA, 15 nt, Homo sapiens
caguauccaguacuc

SEQ ID NO: 27926 - RNA, 18 nt, Homo sapiens
ugaaaacauagcaucuca

SEQ ID NO: 27927 - RNA, 21 nt, Homo sapiens
gagauugugccccugcacucc

SEQ ID NO: 27928 - RNA, 13 nt, Homo sapiens
cuaugugauuaca

SEQ ID NO: 27929 - RNA, 20 nt, Homo sapiens
gaaguugcagugagcugaua

SEQ ID NO: 27930 - RNA, 15 nt, Homo sapiens
gcugggaguggcaug

SEQ ID NO: 27931 - RNA, 20 nt, Homo sapiens
uuacugagcuucucugugaa

SEQ ID NO: 27932 - RNA, 15 nt, Homo sapiens
auuuuuaugugcaau

SEQ ID NO: 27933 - RNA, 10 nt, Homo sapiens
caagacauag

SEQ ID NO: 27934 - RNA, 15 nt, Homo sapiens
auuuaaagacaaaga

SEQ ID NO: 27935 - RNA, 23 nt, Homo sapiens
guuuccuagcgcagccaugugau

SEQ ID NO: 27936 - RNA, 20 nt, Homo sapiens
agaaggauguacauuuccaa

SEQ ID NO: 27937 - RNA, 12 nt, Homo sapiens
cagaacagugau

SEQ ID NO: 27938 - RNA, 20 nt, Homo sapiens
aauuuaucuugucucugggc

SEQ ID NO: 27939 - RNA, 17 nt, Homo sapiens
aacuagaauuuauucaa

SEQ ID NO: 27940 - RNA, 14 nt, Homo sapiens
cagucacauuccaa

SEQ ID NO: 27941 - RNA, 22 nt, Homo sapiens
ugagacagcucugcauacucau

SEQ ID NO: 27942 - RNA, 21 nt, Homo sapiens
ugaaaaucuacacuccaguga

SEQ ID NO: 27943 - RNA, 11 nt, Homo sapiens
uuuaugugcaa

SEQ ID NO: 27944 - RNA, 20 nt, Homo sapiens
aguucugucuggacuuucca

SEQ ID NO: 27945 - RNA, 15 nt, Homo sapiens
guagccacuucacuu

SEQ ID NO: 27946 - RNA, 12 nt, Homo sapiens
ucaucaaugaau

SEQ ID NO: 27947 - RNA, 12 nt, Homo sapiens
caucuuucacau

SEQ ID NO: 27948 - RNA, 21 nt, Homo sapiens
caccaaacccggccugauuaa

SEQ ID NO: 27949 - RNA, 16 nt, Homo sapiens
ggcauuuucacuuuug

SEQ ID NO: 27950 - RNA, 13 nt, Homo sapiens
uuuauugccauga

SEQ ID NO: 27951 - RNA, 16 nt, Homo sapiens
cagagaaaagacauaa

SEQ ID NO: 27952 - RNA, 17 nt, Homo sapiens
auuuauuuuuuuacuuc

SEQ ID NO: 27953 - RNA, 14 nt, Homo sapiens
guaccucucuuaua

SEQ ID NO: 27954 - RNA, 12 nt, Homo sapiens
ucuguaaucuuc

SEQ ID NO: 27955 - RNA, 15 nt, Homo sapiens
uuaaagaauuuucaa

SEQ ID NO: 27956 - RNA, 18 nt, Homo sapiens
ucuaacucagaaacauca

SEQ ID NO: 27957 - RNA, 17 nt, Homo sapiens
aucuacacuccagugag

SEQ ID NO: 27958 - RNA, 23 nt, Homo sapiens
aagucuuccauagagacuuugug

SEQ ID NO: 27959 - RNA, 20 nt, Homo sapiens
cugucccugcagacaugaga

SEQ ID NO: 27960 - RNA, 17 nt, Homo sapiens
auauaaauuuucccaaa

SEQ ID NO: 27961 - RNA, 18 nt, Homo sapiens
gaguuaggcuauucacaa

SEQ ID NO: 27962 - RNA, 19 nt, Homo sapiens
augaauuuuuuucaucuuc

SEQ ID NO: 27963 - RNA, 20 nt, Homo sapiens
acagcuacuugggaggcuga

SEQ ID NO: 27964 - RNA, 15 nt, Homo sapiens
agcugaauacauucu

SEQ ID NO: 27965 - RNA, 12 nt, Homo sapiens
acaacugugacu

SEQ ID NO: 27966 - RNA, 16 nt, Homo sapiens
gacugucucacuuaau

SEQ ID NO: 27967 - RNA, 14 nt, Homo sapiens
aucaguuacucuga

SEQ ID NO: 27968 - RNA, 16 nt, Homo sapiens
acuggcaguuuuccau

SEQ ID NO: 27969 - RNA, 21 nt, Homo sapiens
cauuucuauuuauuuacugag

SEQ ID NO: 27970 - RNA, 22 nt, Homo sapiens
acccucugggucucaguguccu

SEQ ID NO: 27971 - RNA, 15 nt, Homo sapiens
ggaaaaugugcaaua

SEQ ID NO: 27972 - RNA, 13 nt, Homo sapiens
gugacuggccugc

SEQ ID NO: 27973 - RNA, 12 nt, Homo sapiens
gauuucauucaa

SEQ ID NO: 27974 - RNA, 11 nt, Homo sapiens
augugcaauau

SEQ ID NO: 27975 - RNA, 15 nt, Homo sapiens
auugagaacugcaua

SEQ ID NO: 27976 - RNA, 19 nt, Homo sapiens
aaagcagggacuugaaccc

SEQ ID NO: 27977 - RNA, 18 nt, Homo sapiens
cuggcuuaaaauguaauu

SEQ ID NO: 27978 - RNA, 11 nt, Homo sapiens
acaucuuucac

SEQ ID NO: 27979 - RNA, 20 nt, Homo sapiens
uuaugaaccuuuacauccag

SEQ ID NO: 27980 - RNA, 17 nt, Homo sapiens
agccccgggaguggcgc

SEQ ID NO: 27981 - RNA, 18 nt, Homo sapiens
acuuaaaaucuaauucaa

SEQ ID NO: 27982 - RNA, 14 nt, Homo sapiens
agcagggacuugaa

SEQ ID NO: 27983 - RNA, 20 nt, Homo sapiens
aaacuuuaugcuaagugaaa

SEQ ID NO: 27984 - RNA, 22 nt, Homo sapiens
ugaaaaaaaauuuuauaguguc

SEQ ID NO: 27985 - RNA, 15 nt, Homo sapiens
cuuuuauugccauga

SEQ ID NO: 27986 - RNA, 15 nt, Homo sapiens
cauccagauagguua

SEQ ID NO: 27987 - RNA, 13 nt, Homo sapiens
aauaaaagcacuu

SEQ ID NO: 27988 - RNA, 13 nt, Homo sapiens
uggcacugcauac

SEQ ID NO: 27989 - RNA, 19 nt, Homo sapiens
ugacuaauuaggcaaggcu

SEQ ID NO: 27990 - RNA, 11 nt, Homo sapiens
uuuacuuuguu

SEQ ID NO: 27991 - RNA, 21 nt, Homo sapiens
cuuguuuuuccacuacugcua

SEQ ID NO: 27992 - RNA, 15 nt, Homo sapiens
guacuuuuuccagac

SEQ ID NO: 27993 - RNA, 23 nt, Homo sapiens
cagaagaaauucugcaagcuuuu

SEQ ID NO: 27994 - RNA, 19 nt, Homo sapiens
gaagaguggguuucacaag

SEQ ID NO: 27995 - RNA, 17 nt, Homo sapiens
gaauuuauucaauuccu

SEQ ID NO: 27996 - RNA, 11 nt, Homo sapiens
aggcauguaau

SEQ ID NO: 27997 - RNA, 14 nt, Homo sapiens
acugucucacuuaa

SEQ ID NO: 27998 - RNA, 20 nt, Homo sapiens
uuugcugccucuaaaaggcc

SEQ ID NO: 27999 - RNA, 16 nt, Homo sapiens
aagcaaaaugugauau

SEQ ID NO: 28000 - RNA, 14 nt, Homo sapiens
uaaaaucuaauuca

SEQ ID NO: 28001 - RNA, 18 nt, Homo sapiens
auauuuuuaugugcaaua

SEQ ID NO: 28002 - RNA, 15 nt, Homo sapiens
cccugcacuccagcc

SEQ ID NO: 28003 - RNA, 16 nt, Homo sapiens
acuuaguguacaugaa

SEQ ID NO: 28004 - RNA, 20 nt, Homo sapiens
cccucugggucucagugucc

SEQ ID NO: 28005 - RNA, 22 nt, Homo sapiens
cacccuugccauggagguuaag

SEQ ID NO: 28006 - RNA, 17 nt, Homo sapiens
auuguaacuuaugaacc

SEQ ID NO: 28007 - RNA, 16 nt, Homo sapiens
ucccaaagugcuggga

SEQ ID NO: 28008 - RNA, 21 nt, Homo sapiens
cucugcccauccugccccuga

SEQ ID NO: 28009 - RNA, 14 nt, Homo sapiens
uugaaauagugucu

SEQ ID NO: 28010 - RNA, 22 nt, Homo sapiens
aagcuuccauuccaagccugac

SEQ ID NO: 28011 - RNA, 19 nt, Homo sapiens
ugcuggcuuaaaauguaau

SEQ ID NO: 28012 - RNA, 20 nt, Homo sapiens
agcuacuugggaggcugaga

SEQ ID NO: 28013 - RNA, 20 nt, Homo sapiens
accaaacccggccugauuaa

SEQ ID NO: 28014 - RNA, 13 nt, Homo sapiens
gggaguggcgcgc

SEQ ID NO: 28015 - RNA, 19 nt, Homo sapiens
uguaaucccagcuacuugg

SEQ ID NO: 28016 - RNA, 23 nt, Homo sapiens
uccaagccugaccacgcuuucua

SEQ ID NO: 28017 - RNA, 22 nt, Homo sapiens
gaauaguguuggaaaaugugca

SEQ ID NO: 28018 - RNA, 14 nt, Homo sapiens
agauaauaugagaa

SEQ ID NO: 28019 - RNA, 10 nt, Homo sapiens
ggggcuuccu

SEQ ID NO: 28020 - RNA, 23 nt, Homo sapiens
uaacucagaaacaucaguuacuc

SEQ ID NO: 28021 - RNA, 19 nt, Homo sapiens
gagaacugcauauguuucg

SEQ ID NO: 28022 - RNA, 22 nt, Homo sapiens
cauaaauuagaggucuccaaaa

SEQ ID NO: 28023 - RNA, 22 nt, Homo sapiens
caaauaaguauuuauaauagca

SEQ ID NO: 28024 - RNA, 15 nt, Homo sapiens
cuaaauuugguucua

SEQ ID NO: 28025 - RNA, 20 nt, Homo sapiens
cugaagggcaucaugcaucu

SEQ ID NO: 28026 - RNA, 20 nt, Homo sapiens
ugaggacuugggcgggacac

SEQ ID NO: 28027 - RNA, 15 nt, Homo sapiens
auuugcaagacauag

SEQ ID NO: 28028 - RNA, 13 nt, Homo sapiens
gcuuuaauuucau

SEQ ID NO: 28029 - RNA, 14 nt, Homo sapiens
cuuaaaaucuaauu

SEQ ID NO: 28030 - RNA, 17 nt, Homo sapiens
uugaaauuaaccauaga

SEQ ID NO: 28031 - RNA, 18 nt, Homo sapiens
auuacaggcgugagccac

SEQ ID NO: 28032 - RNA, 20 nt, Homo sapiens
acauuguuugucugucuuca

SEQ ID NO: 28033 - RNA, 13 nt, Homo sapiens
uggauucaaguga

SEQ ID NO: 28034 - RNA, 20 nt, Homo sapiens
aaccuccaccuucuggguuc

SEQ ID NO: 28035 - RNA, 11 nt, Homo sapiens
aggcauucucu

SEQ ID NO: 28036 - RNA, 22 nt, Homo sapiens
uugggaggcugaggcaagagaa

SEQ ID NO: 28037 - RNA, 17 nt, Homo sapiens
gagggggcgcgugcagg

SEQ ID NO: 28038 - RNA, 13 nt, Homo sapiens
gauaauaugagaa

SEQ ID NO: 28039 - RNA, 22 nt, Homo sapiens
gucucaguguccucaucuguaa

SEQ ID NO: 28040 - RNA, 17 nt, Homo sapiens
uuggaaaaugugcaaua

SEQ ID NO: 28041 - RNA, 18 nt, Homo sapiens
uacaguuagagauuuuua

SEQ ID NO: 28042 - RNA, 13 nt, Homo sapiens
ucaugcauuugca

SEQ ID NO: 28043 - RNA, 14 nt, Homo sapiens
aacugcauugagaa

SEQ ID NO: 28044 - RNA, 23 nt, Homo sapiens
augcuuguauuuuacuuuuccau

SEQ ID NO: 28045 - RNA, 12 nt, Homo sapiens
acuagucuuaua

SEQ ID NO: 28046 - RNA, 22 nt, Homo sapiens
uuucaugaaaagauuaugaucu

SEQ ID NO: 28047 - RNA, 21 nt, Homo sapiens
uuaucaugcaaaugcuguauu

SEQ ID NO: 28048 - RNA, 13 nt, Homo sapiens
auguuaugcauaa

SEQ ID NO: 28049 - RNA, 18 nt, Homo sapiens
aauauuugcaagacauag

SEQ ID NO: 28050 - RNA, 19 nt, Homo sapiens
acauccagauagguuacca

SEQ ID NO: 28051 - RNA, 20 nt, Homo sapiens
guacuccagccugggugaca

SEQ ID NO: 28052 - RNA, 19 nt, Homo sapiens
cauuugcgaaugguuccau

SEQ ID NO: 28053 - RNA, 22 nt, Homo sapiens
agcauauguuuuuguaaguuua

SEQ ID NO: 28054 - RNA, 15 nt, Homo sapiens
ugacccugaugaaaa

SEQ ID NO: 28055 - RNA, 20 nt, Homo sapiens
uaaguugcaccaacuuugaa

SEQ ID NO: 28056 - RNA, 17 nt, Homo sapiens
uguaaguuuaugcauac

SEQ ID NO: 28057 - RNA, 18 nt, Homo sapiens
cugcuggauucaagugau

SEQ ID NO: 28058 - RNA, 23 nt, Homo sapiens
aaauauuguugacaacugugacu

SEQ ID NO: 28059 - RNA, 15 nt, Homo sapiens
gcuuaaaauguaauu

SEQ ID NO: 28060 - RNA, 19 nt, Homo sapiens
caaacgaaaaacauuucaa

SEQ ID NO: 28061 - RNA, 20 nt, Homo sapiens
gaaaccuuauuguaccucuc

SEQ ID NO: 28062 - RNA, 13 nt, Homo sapiens
aaucugagccagu

SEQ ID NO: 28063 - RNA, 23 nt, Homo sapiens
uagaguucugucuggacuuucca

SEQ ID NO: 28064 - RNA, 16 nt, Homo sapiens
uuauuacaucuuucac

SEQ ID NO: 28065 - RNA, 16 nt, Homo sapiens
ggagaaucacuugaac

SEQ ID NO: 28066 - RNA, 19 nt, Homo sapiens
uuuguagccacuucacuuu

SEQ ID NO: 28067 - RNA, 15 nt, Homo sapiens
aagugcugggaauua

SEQ ID NO: 28068 - RNA, 22 nt, Homo sapiens
aauagaaggauguacauuucca

SEQ ID NO: 28069 - RNA, 16 nt, Homo sapiens
cagagaccaguauucc

SEQ ID NO: 28070 - RNA, 22 nt, Homo sapiens
agacuaugaggaauauuugcaa

SEQ ID NO: 28071 - RNA, 18 nt, Homo sapiens
ugggucucaguguccuca

SEQ ID NO: 28072 - RNA, 21 nt, Homo sapiens
aagggucucccucuguugcca

SEQ ID NO: 28073 - RNA, 17 nt, Homo sapiens
aaucuucagaccuagaa

SEQ ID NO: 28074 - RNA, 23 nt, Homo sapiens
gugauucccuccugcuacucugu

SEQ ID NO: 28075 - RNA, 21 nt, Homo sapiens
gagacaccaccacccuugcca

SEQ ID NO: 28076 - RNA, 20 nt, Homo sapiens
ccuggaucucacaagcacuu

SEQ ID NO: 28077 - RNA, 21 nt, Homo sapiens
uauguaaauagaaacguguau

SEQ ID NO: 28078 - RNA, 21 nt, Homo sapiens
accuguugauagcaagugaau

SEQ ID NO: 28079 - RNA, 21 nt, Homo sapiens
uucuucuuggucucaguguca

SEQ ID NO: 28080 - RNA, 20 nt, Homo sapiens
auauauguguuuuucacauu

SEQ ID NO: 28081 - RNA, 21 nt, Homo sapiens
gugguuauuuagggaacugcu

SEQ ID NO: 28082 - RNA, 16 nt, Homo sapiens
ugccccagggaccuuu

SEQ ID NO: 28083 - RNA, 10 nt, Homo sapiens
acgugcaaua

SEQ ID NO: 28084 - RNA, 15 nt, Homo sapiens
caucuguaaaaugga

SEQ ID NO: 28085 - RNA, 16 nt, Homo sapiens
ccuucauguacaucca

SEQ ID NO: 28086 - RNA, 14 nt, Homo sapiens
ccucuguugccaag

SEQ ID NO: 28087 - RNA, 21 nt, Homo sapiens
cagagacgggguuugccaugc

SEQ ID NO: 28088 - RNA, 19 nt, Homo sapiens
gaggcggguggaucacuug

SEQ ID NO: 28089 - RNA, 16 nt, Homo sapiens
ugagugccuguaauca

SEQ ID NO: 28090 - RNA, 21 nt, Homo sapiens
gaccacgcuuucuagcuguug

SEQ ID NO: 28091 - RNA, 14 nt, Homo sapiens
aagaaauucugcaa

SEQ ID NO: 28092 - RNA, 22 nt, Homo sapiens
cuauguucuaagaagugaaaau

SEQ ID NO: 28093 - RNA, 19 nt, Homo sapiens
cugucuggacuuuccagag

SEQ ID NO: 28094 - RNA, 14 nt, Homo sapiens
uuuaugauuccacc

SEQ ID NO: 28095 - RNA, 17 nt, Homo sapiens
gaacgguaaauuucugu

SEQ ID NO: 28096 - RNA, 18 nt, Homo sapiens
auaaaguguaaguucaca

SEQ ID NO: 28097 - RNA, 23 nt, Homo sapiens
aguuuuccuucucaucugugauu

SEQ ID NO: 28098 - RNA, 13 nt, Homo sapiens
cccaaaaggcaga

SEQ ID NO: 28099 - RNA, 16 nt, Homo sapiens
uuguaccgcaauguga

SEQ ID NO: 28100 - RNA, 13 nt, Homo sapiens
gcgcagccaugug

SEQ ID NO: 28101 - RNA, 22 nt, Homo sapiens
uccuagcgcagccaugugauua

SEQ ID NO: 28102 - RNA, 20 nt, Homo sapiens
uaaauggacaaaugcuuaug

SEQ ID NO: 28103 - RNA, 20 nt, Homo sapiens
acaugauccugcaauuccac

SEQ ID NO: 28104 - RNA, 14 nt, Homo sapiens
uggaacucaaggaa

SEQ ID NO: 28105 - RNA, 14 nt, Homo sapiens
uacaaggcuuuauc

SEQ ID NO: 28106 - RNA, 17 nt, Homo sapiens
caagugauccgcccauc

SEQ ID NO: 28107 - RNA, 11 nt, Homo sapiens
uuaaucaccaa

SEQ ID NO: 28108 - RNA, 17 nt, Homo sapiens
uggcgcgcgccaccacg

SEQ ID NO: 28109 - RNA, 22 nt, Homo sapiens
aaugacacuagcuaauaucaau

SEQ ID NO: 28110 - RNA, 19 nt, Homo sapiens
auuuucaaaaucaaauucc

SEQ ID NO: 28111 - RNA, 14 nt, Homo sapiens
aacauguucacuua

SEQ ID NO: 28112 - RNA, 12 nt, Homo sapiens
aaguacucauac

SEQ ID NO: 28113 - RNA, 20 nt, Homo sapiens
ucuggacuuuccagagacca

SEQ ID NO: 28114 - RNA, 18 nt, Homo sapiens
auuagccgggcauggugg

SEQ ID NO: 28115 - RNA, 21 nt, Homo sapiens
ccaacagaagcuuccauucca

SEQ ID NO: 28116 - RNA, 17 nt, Homo sapiens
uuguaacuuaugaaccu

SEQ ID NO: 28117 - RNA, 21 nt, Homo sapiens
agcacuuuaacacagugucug

SEQ ID NO: 28118 - RNA, 18 nt, Homo sapiens
guguuuuucacauuugcg

SEQ ID NO: 28119 - RNA, 12 nt, Homo sapiens
gacuugaaccca

SEQ ID NO: 28120 - RNA, 18 nt, Homo sapiens
aagccaucggagcugcua

SEQ ID NO: 28121 - RNA, 15 nt, Homo sapiens
ucucugccuugguau

SEQ ID NO: 28122 - RNA, 13 nt, Homo sapiens
ggagaaacuggaa

SEQ ID NO: 28123 - RNA, 20 nt, Homo sapiens
uccuuccuuaucacugacac

SEQ ID NO: 28124 - RNA, 15 nt, Homo sapiens
aagauuaugaucuca

SEQ ID NO: 28125 - RNA, 23 nt, Homo sapiens
auguuucgugaaguauacuguau

SEQ ID NO: 28126 - RNA, 16 nt, Homo sapiens
gugccuguaaucacag

SEQ ID NO: 28127 - RNA, 18 nt, Homo sapiens
gagcuugaaauagugucu

SEQ ID NO: 28128 - RNA, 18 nt, Homo sapiens
guaaguuuaugcauacag

SEQ ID NO: 28129 - RNA, 14 nt, Homo sapiens
ccaaggcuggagug

SEQ ID NO: 28130 - RNA, 14 nt, Homo sapiens
aacagaacuaugga

SEQ ID NO: 28131 - RNA, 19 nt, Homo sapiens
uugaaucccuuaaacucag

SEQ ID NO: 28132 - RNA, 15 nt, Homo sapiens
caaggcuuuaucuca

SEQ ID NO: 28133 - RNA, 15 nt, Homo sapiens
guggcauuuucacuu

SEQ ID NO: 28134 - RNA, 14 nt, Homo sapiens
ugagaagaaugacu

SEQ ID NO: 28135 - RNA, 17 nt, Homo sapiens
auugaaaggcauucucu

SEQ ID NO: 28136 - RNA, 21 nt, Homo sapiens
agaaaccuuauuguaccucuc

SEQ ID NO: 28137 - RNA, 13 nt, Homo sapiens
cccuuuuacauac

SEQ ID NO: 28138 - RNA, 17 nt, Homo sapiens
gaaaccuuauuguaccu

SEQ ID NO: 28139 - RNA, 17 nt, Homo sapiens
acaaaccucaagccagc

SEQ ID NO: 28140 - RNA, 16 nt, Homo sapiens
guaacuggcaguuuuc

SEQ ID NO: 28141 - RNA, 13 nt, Homo sapiens
cuaauuaggcaag

SEQ ID NO: 28142 - RNA, 20 nt, Homo sapiens
augaaaagauuaugaucuca

SEQ ID NO: 28143 - RNA, 16 nt, Homo sapiens
ucaugcaaaugcugua

SEQ ID NO: 28144 - RNA, 21 nt, Homo sapiens
gaacucaaggaaaucuguguc

SEQ ID NO: 28145 - RNA, 13 nt, Homo sapiens
ugagcgacaguga

SEQ ID NO: 28146 - RNA, 20 nt, Homo sapiens
gauacaaugaacacuuauaa

SEQ ID NO: 28147 - RNA, 22 nt, Homo sapiens
ugauucccuccugcuacucugu

SEQ ID NO: 28148 - RNA, 17 nt, Homo sapiens
gagguacugagagugaa

SEQ ID NO: 28149 - RNA, 17 nt, Homo sapiens
ugacaacugugacugua

SEQ ID NO: 28150 - RNA, 23 nt, Homo sapiens
auuuuuccccaaaaagaauggga

SEQ ID NO: 28151 - RNA, 14 nt, Homo sapiens
uggagacaccacca

SEQ ID NO: 28152 - RNA, 20 nt, Homo sapiens
cauuaaauauaauaugcaca

SEQ ID NO: 28153 - RNA, 16 nt, Homo sapiens
agcccauggcacucua

SEQ ID NO: 28154 - RNA, 14 nt, Homo sapiens
accaguauucccuu

SEQ ID NO: 28155 - RNA, 15 nt, Homo sapiens
ucagggagcauuuau

SEQ ID NO: 28156 - RNA, 16 nt, Homo sapiens
uccccaaccacuucau

SEQ ID NO: 28157 - RNA, 19 nt, Homo sapiens
guuuuccuucucaucugug

SEQ ID NO: 28158 - RNA, 22 nt, Homo sapiens
gauagagugggacaguuccuga

SEQ ID NO: 28159 - RNA, 22 nt, Homo sapiens
auaagugaagugauacuaucca

SEQ ID NO: 28160 - RNA, 17 nt, Homo sapiens
uaaaguacagacuuuuu

SEQ ID NO: 28161 - RNA, 15 nt, Homo sapiens
acauagcaucucagg

SEQ ID NO: 28162 - RNA, 17 nt, Homo sapiens
auccaaagcugaauaca

SEQ ID NO: 28163 - RNA, 22 nt, Homo sapiens
gaaagaaaaucaggcuggccaa

SEQ ID NO: 28164 - RNA, 20 nt, Homo sapiens
ggaggcagagguugcaguga

SEQ ID NO: 28165 - RNA, 14 nt, Homo sapiens
ugauuuuacaauug

SEQ ID NO: 28166 - RNA, 14 nt, Homo sapiens
uuccacuacugcua

SEQ ID NO: 28167 - RNA, 23 nt, Homo sapiens
auaguguuggaaaaugugcaaua

SEQ ID NO: 28168 - RNA, 13 nt, Homo sapiens
ccuuuuacauacu

SEQ ID NO: 28169 - RNA, 21 nt, Homo sapiens
guuuucccugaccucccucua

SEQ ID NO: 28170 - RNA, 16 nt, Homo sapiens
cuggagugcaguggcg

SEQ ID NO: 28171 - RNA, 23 nt, Homo sapiens
uguauuuuauuacaucuuucaca

SEQ ID NO: 28172 - RNA, 23 nt, Homo sapiens
cacuccagccugagcgacaguga

SEQ ID NO: 28173 - RNA, 17 nt, Homo sapiens
uuuaaugggcacagggu

SEQ ID NO: 28174 - RNA, 19 nt, Homo sapiens
uuaaaauuaucaauaucua

SEQ ID NO: 28175 - RNA, 19 nt, Homo sapiens
acuuuaacacagugucugg

SEQ ID NO: 28176 - RNA, 17 nt, Homo sapiens
agaaggauguacauuuc

SEQ ID NO: 28177 - RNA, 18 nt, Homo sapiens
uacauuuccaaauucaca

SEQ ID NO: 28178 - RNA, 17 nt, Homo sapiens
ccaugugauuacccucu

SEQ ID NO: 28179 - RNA, 16 nt, Homo sapiens
ugaaacauuacaguua

SEQ ID NO: 28180 - RNA, 19 nt, Homo sapiens
acauaagcaaagacuauga

SEQ ID NO: 28181 - RNA, 19 nt, Homo sapiens
acaaauuuacagagacaga

SEQ ID NO: 28182 - RNA, 21 nt, Homo sapiens
auauuugaauuuuaaaucuaa

SEQ ID NO: 28183 - RNA, 17 nt, Homo sapiens
uuauuuuuuuacuuccu

SEQ ID NO: 28184 - RNA, 16 nt, Homo sapiens
gcugaggcaagagaau

SEQ ID NO: 28185 - RNA, 21 nt, Homo sapiens
auaccucaacccccauuucua

SEQ ID NO: 28186 - RNA, 13 nt, Homo sapiens
aagaaauucugca

SEQ ID NO: 28187 - RNA, 19 nt, Homo sapiens
gcuguuuuuauauauguga

SEQ ID NO: 28188 - RNA, 23 nt, Homo sapiens
aaucugaggccuccucucucagu

SEQ ID NO: 28189 - RNA, 15 nt, Homo sapiens
uuuuaaguaauuuca

SEQ ID NO: 28190 - RNA, 14 nt, Homo sapiens
cuguuccuucacau

SEQ ID NO: 28191 - RNA, 17 nt, Homo sapiens
cuaaccagccuggucaa

SEQ ID NO: 28192 - RNA, 17 nt, Homo sapiens
aauucuuacauguuuuc

SEQ ID NO: 28193 - RNA, 17 nt, Homo sapiens
aaauauaauaugcacac

SEQ ID NO: 28194 - RNA, 20 nt, Homo sapiens
uugacacuuaaaaaugguuu

SEQ ID NO: 28195 - RNA, 22 nt, Homo sapiens
aauuuucaaaaucaaauuccag

SEQ ID NO: 28196 - RNA, 18 nt, Homo sapiens
cagaaagcagaacaguga

SEQ ID NO: 28197 - RNA, 13 nt, Homo sapiens
gaaauaagccaga

SEQ ID NO: 28198 - RNA, 19 nt, Homo sapiens
caaccugggggcuuuaggg

SEQ ID NO: 28199 - RNA, 16 nt, Homo sapiens
uguaaaauggagacac

SEQ ID NO: 28200 - RNA, 18 nt, Homo sapiens
cuaauagaauuaauggaa

SEQ ID NO: 28201 - RNA, 15 nt, Homo sapiens
gagguuaagcacuuu

SEQ ID NO: 28202 - RNA, 22 nt, Homo sapiens
augaaaagauuaugaucucaga

SEQ ID NO: 28203 - RNA, 19 nt, Homo sapiens
augggagaaucacuugaac

SEQ ID NO: 28204 - RNA, 23 nt, Homo sapiens
aauaaaagauuguauagugcaug

SEQ ID NO: 28205 - RNA, 19 nt, Homo sapiens
auacaauuauuuuuacagu

SEQ ID NO: 28206 - RNA, 18 nt, Homo sapiens
ucucgaacugcuggauuc

SEQ ID NO: 28207 - RNA, 15 nt, Homo sapiens
aagcagaacagugau

SEQ ID NO: 28208 - RNA, 17 nt, Homo sapiens
acuuaaaaucuaauuca

SEQ ID NO: 28209 - RNA, 21 nt, Homo sapiens
aaaaaugguuuaaauggucaa

SEQ ID NO: 28210 - RNA, 19 nt, Homo sapiens
ugaacaaauuuacagagac

SEQ ID NO: 28211 - RNA, 12 nt, Homo sapiens
uaaaagcacuua

SEQ ID NO: 28212 - RNA, 13 nt, Homo sapiens
auaaaagcacuua

SEQ ID NO: 28213 - RNA, 14 nt, Homo sapiens
aagccucaugucca

SEQ ID NO: 28214 - RNA, 13 nt, Homo sapiens
cauagagacuuug

SEQ ID NO: 28215 - RNA, 20 nt, Homo sapiens
augguggcgcgcaccuguaa

SEQ ID NO: 28216 - RNA, 15 nt, Homo sapiens
cugguaacauagguu

SEQ ID NO: 28217 - RNA, 15 nt, Homo sapiens
agagaaaagacauaa

SEQ ID NO: 28218 - RNA, 22 nt, Homo sapiens
accagccuggucaacaugguga

SEQ ID NO: 28219 - RNA, 18 nt, Homo sapiens
ccaagaaugagaagaaug

SEQ ID NO: 28220 - RNA, 20 nt, Homo sapiens
ggccuccucucucaguuuuu

SEQ ID NO: 28221 - RNA, 14 nt, Homo sapiens
gaaagaggaaugaa

SEQ ID NO: 28222 - RNA, 12 nt, Homo sapiens
auauuagcuuua

SEQ ID NO: 28223 - RNA, 15 nt, Homo sapiens
uucuauuuauuuacu

SEQ ID NO: 28224 - RNA, 15 nt, Homo sapiens
cgugagccaccaaac

SEQ ID NO: 28225 - RNA, 15 nt, Homo sapiens
agcaugggaagugac

SEQ ID NO: 28226 - RNA, 22 nt, Homo sapiens
auguucacuuauugacuauuau

SEQ ID NO: 28227 - RNA, 13 nt, Homo sapiens
ccugcaauuccac

SEQ ID NO: 28228 - RNA, 23 nt, Homo sapiens
auaauagguuugugacuuuccua

SEQ ID NO: 28229 - RNA, 20 nt, Homo sapiens
ugcacuccagccugagcgac

SEQ ID NO: 28230 - RNA, 23 nt, Homo sapiens
uaugcaaccuuuggaugcacuuu

SEQ ID NO: 28231 - RNA, 18 nt, Homo sapiens
uuuuaugaaacauuacag

SEQ ID NO: 28232 - RNA, 19 nt, Homo sapiens
ugagagacagcaggucuca

SEQ ID NO: 28233 - RNA, 16 nt, Homo sapiens
aucucacaagcacuuu

SEQ ID NO: 28234 - RNA, 13 nt, Homo sapiens
aaucugcacugug

SEQ ID NO: 28235 - RNA, 19 nt, Homo sapiens
cagugagccgagauugugc

SEQ ID NO: 28236 - RNA, 17 nt, Homo sapiens
uguagccacuucacuuu

SEQ ID NO: 28237 - RNA, 14 nt, Homo sapiens
uggucacauacaau

SEQ ID NO: 28238 - RNA, 14 nt, Homo sapiens
gcagcuuauucaca

SEQ ID NO: 28239 - RNA, 17 nt, Homo sapiens
uagugucugaugaaugu

SEQ ID NO: 28240 - RNA, 22 nt, Homo sapiens
aauaguguuggaaaaugugcaa

SEQ ID NO: 28241 - RNA, 23 nt, Homo sapiens
uuacuauuuauugcugaaugacu

SEQ ID NO: 28242 - RNA, 17 nt, Homo sapiens
uuccucaaaacuucaga

SEQ ID NO: 28243 - RNA, 16 nt, Homo sapiens
aauugacccacaagaa

SEQ ID NO: 28244 - RNA, 14 nt, Homo sapiens
auuucacuugauga

SEQ ID NO: 28245 - RNA, 15 nt, Homo sapiens
acagucacauuccaa

SEQ ID NO: 28246 - RNA, 21 nt, Homo sapiens
acgccuguaaucccagcacuu

SEQ ID NO: 28247 - RNA, 14 nt, Homo sapiens
ggccaacuaggcag

SEQ ID NO: 28248 - RNA, 21 nt, Homo sapiens
ucuagcaaauguuaugcauaa

SEQ ID NO: 28249 - RNA, 16 nt, Homo sapiens
uuuauaaauggacaaa

SEQ ID NO: 28250 - RNA, 20 nt, Homo sapiens
gaacugcuggauucaaguga

SEQ ID NO: 28251 - RNA, 19 nt, Homo sapiens
ccaaguuuauauacaauua

SEQ ID NO: 28252 - RNA, 16 nt, Homo sapiens
uuccuauguaacugca

SEQ ID NO: 28253 - RNA, 23 nt, Homo sapiens
aaauucgcugcaaccuguugaua

SEQ ID NO: 28254 - RNA, 23 nt, Homo sapiens
acuccagccugagcgacagugag

SEQ ID NO: 28255 - RNA, 18 nt, Homo sapiens
guuugaaaauaugccugc

SEQ ID NO: 28256 - RNA, 20 nt, Homo sapiens
gaggcagagguugcagugag

SEQ ID NO: 28257 - RNA, 21 nt, Homo sapiens
uuuaacuagaauuuauucaau

SEQ ID NO: 28258 - RNA, 20 nt, Homo sapiens
gcuaaguugcaccaacuuug

SEQ ID NO: 28259 - RNA, 20 nt, Homo sapiens
uaaauguaucuuauucacau

SEQ ID NO: 28260 - RNA, 18 nt, Homo sapiens
ccugaugaaaacauagca

SEQ ID NO: 28261 - RNA, 13 nt, Homo sapiens
ucuucacagucac

SEQ ID NO: 28262 - RNA, 19 nt, Homo sapiens
aauauuuuuaugugcaaua

SEQ ID NO: 28263 - RNA, 17 nt, Homo sapiens
uagagacuuugugaaaa

SEQ ID NO: 28264 - RNA, 15 nt, Homo sapiens
ugugauuacaaggcu

SEQ ID NO: 28265 - RNA, 21 nt, Homo sapiens
ccugucccugcagacaugaga

SEQ ID NO: 28266 - RNA, 18 nt, Homo sapiens
acacuaaaaaggcaugua

SEQ ID NO: 28267 - RNA, 16 nt, Homo sapiens
aaguugcaccaacuuu

SEQ ID NO: 28268 - RNA, 18 nt, Homo sapiens
caggauagagugggacag

SEQ ID NO: 28269 - RNA, 13 nt, Homo sapiens
gaaaaacauuuca

SEQ ID NO: 28270 - RNA, 17 nt, Homo sapiens
augaaguacucauacau

SEQ ID NO: 28271 - RNA, 19 nt, Homo sapiens
uuccaggaaaaucugcacu

SEQ ID NO: 28272 - RNA, 18 nt, Homo sapiens
auucccuuuugcugccuc

SEQ ID NO: 28273 - RNA, 22 nt, Homo sapiens
aauauuguugacaacugugacu

SEQ ID NO: 28274 - RNA, 19 nt, Homo sapiens
accuguuuuuaagcuguuu

SEQ ID NO: 28275 - RNA, 13 nt, Homo sapiens
ugcagacaugaga

SEQ ID NO: 28276 - RNA, 22 nt, Homo sapiens
cugcauacucauuaggauggcu

SEQ ID NO: 28277 - RNA, 19 nt, Homo sapiens
acacuaaaaaggcauguaa

SEQ ID NO: 28278 - RNA, 13 nt, Homo sapiens
cuuugaagucuga

SEQ ID NO: 28279 - RNA, 21 nt, Homo sapiens
uggcuaagcaaaaugugauau

SEQ ID NO: 28280 - RNA, 23 nt, Homo sapiens
aucuuguuuuuccacuacugcua

SEQ ID NO: 28281 - RNA, 19 nt, Homo sapiens
ccuuuggaugcacuuuaua

SEQ ID NO: 28282 - RNA, 16 nt, Homo sapiens
uauuacaucuuucaca

SEQ ID NO: 28283 - RNA, 16 nt, Homo sapiens
uuguuuuuaaacugga

SEQ ID NO: 28284 - RNA, 21 nt, Homo sapiens
ugaggcggguggaucacuuga

SEQ ID NO: 28285 - RNA, 18 nt, Homo sapiens
uuauaauuccuauauccu

SEQ ID NO: 28286 - RNA, 19 nt, Homo sapiens
agagacagcaggucucaug

SEQ ID NO: 28287 - RNA, 22 nt, Homo sapiens
gaaguacucauacauguuacaa

SEQ ID NO: 28288 - RNA, 21 nt, Homo sapiens
gagccaccaaacccggccuga

SEQ ID NO: 28289 - RNA, 15 nt, Homo sapiens
agacgggguuugcca

SEQ ID NO: 28290 - RNA, 23 nt, Homo sapiens
ugaaauaagccagacaucaacag

SEQ ID NO: 28291 - RNA, 17 nt, Homo sapiens
gaucucacaagcacuuu

SEQ ID NO: 28292 - RNA, 20 nt, Homo sapiens
agugaaaaucuacacuccag

SEQ ID NO: 28293 - RNA, 23 nt, Homo sapiens
auuucaaaacucauuuccuaugu

SEQ ID NO: 28294 - RNA, 22 nt, Homo sapiens
cuuuaauuucaugaaaagauua

SEQ ID NO: 28295 - RNA, 12 nt, Homo sapiens
uuauuaccucug

SEQ ID NO: 28296 - RNA, 16 nt, Homo sapiens
gagacucugucucagu

SEQ ID NO: 28297 - RNA, 15 nt, Homo sapiens
uugcaccaacuuuga

SEQ ID NO: 28298 - RNA, 17 nt, Homo sapiens
caucuuggucacauaca

SEQ ID NO: 28299 - RNA, 15 nt, Homo sapiens
aaauggagugacuua

SEQ ID NO: 28300 - RNA, 16 nt, Homo sapiens
guaccgcaaugugacu

SEQ ID NO: 28301 - RNA, 23 nt, Homo sapiens
aaacugauacccuuugaaaaagu

SEQ ID NO: 28302 - RNA, 18 nt, Homo sapiens
augcuuguauuuuacuuu

SEQ ID NO: 28303 - RNA, 14 nt, Homo sapiens
auggagugacuuag

SEQ ID NO: 28304 - RNA, 16 nt, Homo sapiens
uuuauuaccucugaua

SEQ ID NO: 28305 - RNA, 14 nt, Homo sapiens
auuugagacaggga

SEQ ID NO: 28306 - RNA, 19 nt, Homo sapiens
uggaucucacaagcacuuu

SEQ ID NO: 28307 - RNA, 15 nt, Homo sapiens
gaauuaacacaugau

SEQ ID NO: 28308 - RNA, 18 nt, Homo sapiens
cuucuggguucaagcgau

SEQ ID NO: 28309 - RNA, 16 nt, Homo sapiens
agaagaaugacuaugc

SEQ ID NO: 28310 - RNA, 15 nt, Homo sapiens
cuuugaagucugauu

SEQ ID NO: 28311 - RNA, 13 nt, Homo sapiens
aauuuucuuccaa

SEQ ID NO: 28312 - RNA, 12 nt, Homo sapiens
gaaaauaugccu

SEQ ID NO: 28313 - RNA, 19 nt, Homo sapiens
uguaaucacagcuacuugg

SEQ ID NO: 28314 - RNA, 13 nt, Homo sapiens
gacaacugugacu

SEQ ID NO: 28315 - RNA, 20 nt, Homo sapiens
cugcauugagaacugcauau

SEQ ID NO: 28316 - RNA, 22 nt, Homo sapiens
cugaggcaagagaauugcuuga

SEQ ID NO: 28317 - RNA, 14 nt, Homo sapiens
ucucaucugugauu

SEQ ID NO: 28318 - RNA, 16 nt, Homo sapiens
gaggagaaacuggaac

SEQ ID NO: 28319 - RNA, 15 nt, Homo sapiens
guuuuuaagcuguuu

SEQ ID NO: 28320 - RNA, 14 nt, Homo sapiens
gggucucagugucc

SEQ ID NO: 28321 - RNA, 13 nt, Homo sapiens
cuugaugauacaa

SEQ ID NO: 28322 - RNA, 16 nt, Homo sapiens
uaagcaaagacuauga

SEQ ID NO: 28323 - RNA, 14 nt, Homo sapiens
acugcauacaaucu

SEQ ID NO: 28324 - RNA, 18 nt, Homo sapiens
ccacugcagaagacagua

SEQ ID NO: 28325 - RNA, 13 nt, Homo sapiens
uguuuuuaagcug

SEQ ID NO: 28326 - RNA, 20 nt, Homo sapiens
gaaaaucuacacuccaguga

SEQ ID NO: 28327 - RNA, 16 nt, Homo sapiens
gaguggguuucacaag

SEQ ID NO: 28328 - RNA, 18 nt, Homo sapiens
cagccaggcggcuggaau

SEQ ID NO: 28329 - RNA, 21 nt, Homo sapiens
accagcccuacaccauuccuu

SEQ ID NO: 28330 - RNA, 14 nt, Homo sapiens
ccucaugcugccaa

SEQ ID NO: 28331 - RNA, 13 nt, Homo sapiens
cagcuuauucaca

SEQ ID NO: 28332 - RNA, 13 nt, Homo sapiens
cuuaugaaccuuu

SEQ ID NO: 28333 - RNA, 23 nt, Homo sapiens
agauuaagagauggguuugacaa

SEQ ID NO: 28334 - RNA, 22 nt, Homo sapiens
aagucuuccauagagacuuugu

SEQ ID NO: 28335 - RNA, 16 nt, Homo sapiens
ucugcuuuaauuucau

SEQ ID NO: 28336 - RNA, 21 nt, Homo sapiens
uguaaugaaaaugaauaucua

SEQ ID NO: 28337 - RNA, 18 nt, Homo sapiens
cagugucuggcacuuggg

SEQ ID NO: 28338 - RNA, 23 nt, Homo sapiens
gagaaaccagggagccccuuuga

SEQ ID NO: 28339 - RNA, 20 nt, Homo sapiens
aguuuucugcuuuaauuuca

SEQ ID NO: 28340 - RNA, 15 nt, Homo sapiens
aucucacaagcacuu

SEQ ID NO: 28341 - RNA, 15 nt, Homo sapiens
cuggggccuguugaa

SEQ ID NO: 28342 - RNA, 22 nt, Homo sapiens
uucucugccuugguauagcaua

SEQ ID NO: 28343 - RNA, 17 nt, Homo sapiens
ugcuggauucaagugau

SEQ ID NO: 28344 - RNA, 17 nt, Homo sapiens
augugauauguaccuaa

SEQ ID NO: 28345 - RNA, 18 nt, Homo sapiens
auuuaaaaaaaaaccuga

SEQ ID NO: 28346 - RNA, 14 nt, Homo sapiens
ucauacauguuaca

SEQ ID NO: 28347 - RNA, 16 nt, Homo sapiens
agaauucuuacauguu

SEQ ID NO: 28348 - RNA, 17 nt, Homo sapiens
uaugauuccaccuacau

SEQ ID NO: 28349 - RNA, 19 nt, Homo sapiens
accaccacccuugccaugg

SEQ ID NO: 28350 - RNA, 10 nt, Homo sapiens
augugcaaua

SEQ ID NO: 28351 - RNA, 15 nt, Homo sapiens
gacaguuuucugcuu

SEQ ID NO: 28352 - RNA, 19 nt, Homo sapiens
cugccuugguauagcauau

SEQ ID NO: 28353 - RNA, 15 nt, Homo sapiens
aaccucauuccccaa

SEQ ID NO: 28354 - RNA, 16 nt, Homo sapiens
gacaacugugacugua

SEQ ID NO: 28355 - RNA, 20 nt, Homo sapiens
ucugggcuuggggcuuccua

SEQ ID NO: 28356 - RNA, 22 nt, Homo sapiens
ucccauggguuguguguuuauu

SEQ ID NO: 28357 - RNA, 22 nt, Homo sapiens
auaacuaggcguggacuuacua

SEQ ID NO: 28358 - RNA, 20 nt, Homo sapiens
gugcugggaauuacaggcgu

SEQ ID NO: 28359 - RNA, 15 nt, Homo sapiens
agcccauggcacucu

SEQ ID NO: 28360 - RNA, 14 nt, Homo sapiens
uuaacacagugucu

SEQ ID NO: 28361 - RNA, 21 nt, Homo sapiens
uuucaccuguuuuuaagcugu

SEQ ID NO: 28362 - RNA, 16 nt, Homo sapiens
gagauuucaugccugg

SEQ ID NO: 28363 - RNA, 18 nt, Homo sapiens
cuucucuucacagucaca

SEQ ID NO: 28364 - RNA, 23 nt, Homo sapiens
cuauuauagaauggaacucaagg

SEQ ID NO: 28365 - RNA, 15 nt, Homo sapiens
aguguaaguucacaa

SEQ ID NO: 28366 - RNA, 20 nt, Homo sapiens
gugaaauaaaaguagaauaa

SEQ ID NO: 28367 - RNA, 21 nt, Homo sapiens
uuguguguuuauuucacuuga

SEQ ID NO: 28368 - RNA, 20 nt, Homo sapiens
uccguggcacugcauacaau

SEQ ID NO: 28369 - RNA, 21 nt, Homo sapiens
aagcaaagacuaugaggaaua

SEQ ID NO: 28370 - RNA, 23 nt, Homo sapiens
acaccgaguggcccuucauguac

SEQ ID NO: 28371 - RNA, 13 nt, Homo sapiens
agcaaaaugugau

SEQ ID NO: 28372 - RNA, 22 nt, Homo sapiens
uacaauuauuuuuacaguucuc

SEQ ID NO: 28373 - RNA, 14 nt, Homo sapiens
uguaauugcuuguu

SEQ ID NO: 28374 - RNA, 22 nt, Homo sapiens
cuuuuggcuuguaaaguacaga

SEQ ID NO: 28375 - RNA, 22 nt, Homo sapiens
gagaaaccuuauuguaccucuc

SEQ ID NO: 28376 - RNA, 17 nt, Homo sapiens
acagagaaaagacauaa

SEQ ID NO: 28377 - RNA, 15 nt, Homo sapiens
uaaugaaaaugaaua

SEQ ID NO: 28378 - RNA, 14 nt, Homo sapiens
uguauagugcaugu

SEQ ID NO: 28379 - RNA, 20 nt, Homo sapiens
uccuagcgcagccaugugau

SEQ ID NO: 28380 - RNA, 18 nt, Homo sapiens
uuuguuauuuuuccccaa

SEQ ID NO: 28381 - RNA, 19 nt, Homo sapiens
aauuauuuuuacaguucuc

SEQ ID NO: 28382 - RNA, 24 nt, Homo sapiens
aucuuguuuuuccacuacugcuac

SEQ ID NO: 28383 - RNA, 17 nt, Homo sapiens
uacaauugaaaugacua

SEQ ID NO: 28384 - RNA, 16 nt, Homo sapiens
uucagccugaaagagg

SEQ ID NO: 28385 - RNA, 15 nt, Homo sapiens
acagaggaucugcuu

SEQ ID NO: 28386 - RNA, 14 nt, Homo sapiens
agaaucacuugaac

SEQ ID NO: 28387 - RNA, 18 nt, Homo sapiens
ugucuucauagcagauuu

SEQ ID NO: 28388 - RNA, 14 nt, Homo sapiens
uccacuacugcuac

SEQ ID NO: 28389 - RNA, 21 nt, Homo sapiens
aauuuuucucuaacucagaaa

SEQ ID NO: 28390 - RNA, 23 nt, Homo sapiens
caaacaaacgaaaaacauuucaa

SEQ ID NO: 28391 - RNA, 20 nt, Homo sapiens
aguaauuuuaaguaauuuca

SEQ ID NO: 28392 - RNA, 22 nt, Homo sapiens
uaauggaauauguaaauagaaa

SEQ ID NO: 28393 - RNA, 14 nt, Homo sapiens
ucaugcauuugcac

SEQ ID NO: 28394 - RNA, 17 nt, Homo sapiens
uagagaaauuugccaau

SEQ ID NO: 28395 - RNA, 15 nt, Homo sapiens
uggaacucaaggaaa

SEQ ID NO: 28396 - RNA, 22 nt, Homo sapiens
aagcagggacuugaacccauau

SEQ ID NO: 28397 - RNA, 13 nt, Homo sapiens
acagaacuaugga

SEQ ID NO: 28398 - RNA, 14 nt, Homo sapiens
ggcacuugggacaa

SEQ ID NO: 28399 - RNA, 20 nt, Homo sapiens
ggucaauuuuguuauguaua

SEQ ID NO: 28400 - RNA, 20 nt, Homo sapiens
caaccaaauggagugacuua

SEQ ID NO: 28401 - RNA, 14 nt, Homo sapiens
auauaauaugcaca

SEQ ID NO: 28402 - RNA, 16 nt, Homo sapiens
gaaaauaaaagcacuu

SEQ ID NO: 28403 - RNA, 20 nt, Homo sapiens
ugcugggaauuacaggcgug

SEQ ID NO: 28404 - RNA, 12 nt, Homo sapiens
uacaucuuucac

SEQ ID NO: 28405 - RNA, 15 nt, Homo sapiens
ugcagcugugccaua

SEQ ID NO: 28406 - RNA, 13 nt, Homo sapiens
cagggacuugaac

SEQ ID NO: 28407 - RNA, 17 nt, Homo sapiens
aguuuauauacaauuau

SEQ ID NO: 28408 - RNA, 17 nt, Homo sapiens
ccuuuuacauacugcug

SEQ ID NO: 28409 - RNA, 16 nt, Homo sapiens
uggcacuugggacaaa

SEQ ID NO: 28410 - RNA, 19 nt, Homo sapiens
caaucuuaacucauugcaa

SEQ ID NO: 28411 - RNA, 23 nt, Homo sapiens
agaaauuccaggaaaaucugcac

SEQ ID NO: 28412 - RNA, 20 nt, Homo sapiens
gcuguuuccauagggugaca

SEQ ID NO: 28413 - RNA, 15 nt, Homo sapiens
agaauuaacacauga

SEQ ID NO: 28414 - RNA, 16 nt, Homo sapiens
cacagaggaucugcuu

SEQ ID NO: 28415 - RNA, 17 nt, Homo sapiens
ugccaugcuggccaggc

SEQ ID NO: 28416 - RNA, 15 nt, Homo sapiens
aacauagcaucucag

SEQ ID NO: 28417 - RNA, 19 nt, Homo sapiens
uugaugauuaauucaccuu

SEQ ID NO: 28418 - RNA, 17 nt, Homo sapiens
aaaucaaauuccagaau

SEQ ID NO: 28419 - RNA, 22 nt, Homo sapiens
ggaauauuugcaagacauagaa

SEQ ID NO: 28420 - RNA, 15 nt, Homo sapiens
ucaucaaucaaauaa

SEQ ID NO: 28421 - RNA, 21 nt, Homo sapiens
uugccaaggcuggagugcagu

SEQ ID NO: 28422 - RNA, 22 nt, Homo sapiens
gaccuuuguagccacuucacuu

SEQ ID NO: 28423 - RNA, 17 nt, Homo sapiens
uccuguacuuuuuccag

SEQ ID NO: 28424 - RNA, 22 nt, Homo sapiens
agaaauuccaggaaaaucugca

SEQ ID NO: 28425 - RNA, 16 nt, Homo sapiens
ugucucaguccaugaa

SEQ ID NO: 28426 - RNA, 19 nt, Homo sapiens
uguuggaaaaugugcaaua

SEQ ID NO: 28427 - RNA, 16 nt, Homo sapiens
ccucucuuauagaaua

SEQ ID NO: 28428 - RNA, 22 nt, Homo sapiens
gugugaccacugcagaagacag

SEQ ID NO: 28429 - RNA, 20 nt, Homo sapiens
uccagccugagcgacaguga

SEQ ID NO: 28430 - RNA, 21 nt, Homo sapiens
uuguguaaugaaaaugaauau

SEQ ID NO: 28431 - RNA, 15 nt, Homo sapiens
aacccaaauguucau

SEQ ID NO: 28432 - RNA, 15 nt, Homo sapiens
gauuacccucugggu

SEQ ID NO: 28433 - RNA, 17 nt, Homo sapiens
aaauagugucugaugaa

SEQ ID NO: 28434 - RNA, 22 nt, Homo sapiens
agcaagaucccauggguugugu

SEQ ID NO: 28435 - RNA, 13 nt, Homo sapiens
gcacucuauguuc

SEQ ID NO: 28436 - RNA, 20 nt, Homo sapiens
cagagcaagacucugucuca

SEQ ID NO: 28437 - RNA, 23 nt, Homo sapiens
uauaagugaagugauacuaucca

SEQ ID NO: 28438 - RNA, 17 nt, Homo sapiens
auaugccugcaaucuga

SEQ ID NO: 28439 - RNA, 22 nt, Homo sapiens
auuacaaggcuuuaucucaggg

SEQ ID NO: 28440 - RNA, 15 nt, Homo sapiens
uagaauuaauggaau

SEQ ID NO: 28441 - RNA, 14 nt, Homo sapiens
ugaaugugucaggu

SEQ ID NO: 28442 - RNA, 14 nt, Homo sapiens
ggcuuuuauugcca

SEQ ID NO: 28443 - RNA, 10 nt, Homo sapiens
aggcugcaaa

SEQ ID NO: 28444 - RNA, 12 nt, Homo sapiens
uacauacugcug

SEQ ID NO: 28445 - RNA, 15 nt, Homo sapiens
cuauuacgugcaaua

SEQ ID NO: 28446 - RNA, 22 nt, Homo sapiens
auguugaaaaaguucugcagau

SEQ ID NO: 28447 - RNA, 13 nt, Homo sapiens
uccacuacugcua

SEQ ID NO: 28448 - RNA, 18 nt, Homo sapiens
aguugauuuuacaauuga

SEQ ID NO: 28449 - RNA, 21 nt, Homo sapiens
gauagguuaccaguaacggaa

SEQ ID NO: 28450 - RNA, 18 nt, Homo sapiens
cucugucucaguccauga

SEQ ID NO: 28451 - RNA, 17 nt, Homo sapiens
aaagcauuguaacuuau

SEQ ID NO: 28452 - RNA, 16 nt, Homo sapiens
uuaugcauaaagucag

SEQ ID NO: 28453 - RNA, 23 nt, Homo sapiens
ugaaaaucuacacuccagugaga

SEQ ID NO: 28454 - RNA, 20 nt, Homo sapiens
ucccuuuuacauacugcugu

SEQ ID NO: 28455 - RNA, 17 nt, Homo sapiens
gguggcucacgccugua

SEQ ID NO: 28456 - RNA, 21 nt, Homo sapiens
agacccucaugcugccaauau

SEQ ID NO: 28457 - RNA, 21 nt, Homo sapiens
cuucuuggucucagugucaau

SEQ ID NO: 28458 - RNA, 22 nt, Homo sapiens
agcuugaaauagugucugauga

SEQ ID NO: 28459 - RNA, 15 nt, Homo sapiens
cucaguguccucauc

SEQ ID NO: 28460 - RNA, 13 nt, Homo sapiens
augauccugcaau

SEQ ID NO: 28461 - RNA, 12 nt, Homo sapiens
acagaacuugaa

SEQ ID NO: 28462 - RNA, 21 nt, Homo sapiens
cuuagacccucaugcugccaa

SEQ ID NO: 28463 - RNA, 16 nt, Homo sapiens
agaguggguuucacaa

SEQ ID NO: 28464 - RNA, 21 nt, Homo sapiens
agaguucugucuggacuuucc

SEQ ID NO: 28465 - RNA, 23 nt, Homo sapiens
caagccagccuugcuccuggcug

SEQ ID NO: 28466 - RNA, 15 nt, Homo sapiens
aguucugucuggacu

SEQ ID NO: 28467 - RNA, 16 nt, Homo sapiens
cugucuggacuuucca

SEQ ID NO: 28468 - RNA, 23 nt, Homo sapiens
cuuguuuuuccacuacugcuacc

SEQ ID NO: 28469 - RNA, 23 nt, Homo sapiens
acucauugcaaccuccaccuucu

SEQ ID NO: 28470 - RNA, 15 nt, Homo sapiens
ucacuuaauccuuug

SEQ ID NO: 28471 - RNA, 18 nt, Homo sapiens
uguuacugccuaucagca

SEQ ID NO: 28472 - RNA, 19 nt, Homo sapiens
cacuuugggaggcugaggc

SEQ ID NO: 28473 - RNA, 13 nt, Homo sapiens
auuuucacuuuug

SEQ ID NO: 28474 - RNA, 12 nt, Homo sapiens
auugagcaccug

SEQ ID NO: 28475 - RNA, 22 nt, Homo sapiens
cucugaagaguggguuucacaa

SEQ ID NO: 28476 - RNA, 14 nt, Homo sapiens
aguugauuuuacaa

SEQ ID NO: 28477 - RNA, 17 nt, Homo sapiens
agaaucagaucauuuca

SEQ ID NO: 28478 - RNA, 12 nt, Homo sapiens
uuauaaucuuuu

SEQ ID NO: 28479 - RNA, 17 nt, Homo sapiens
caaguuguguuugauau

SEQ ID NO: 28480 - RNA, 15 nt, Homo sapiens
auacuauccaguuac

SEQ ID NO: 28481 - RNA, 15 nt, Homo sapiens
ggcuuuaucucaggg

SEQ ID NO: 28482 - RNA, 17 nt, Homo sapiens
aaagcagggacuugaac

SEQ ID NO: 28483 - RNA, 14 nt, Homo sapiens
caguccucuuucaa

SEQ ID NO: 28484 - RNA, 13 nt, Homo sapiens
uuuaugugcaaua

SEQ ID NO: 28485 - RNA, 23 nt, Homo sapiens
acuaauuaggcaaggcuauguga

SEQ ID NO: 28486 - RNA, 16 nt, Homo sapiens
acuauccaguuacugc

SEQ ID NO: 28487 - RNA, 21 nt, Homo sapiens
cuggauguggagggggcgcgu

SEQ ID NO: 28488 - RNA, 13 nt, Homo sapiens
agguuaagcacuu

SEQ ID NO: 28489 - RNA, 19 nt, Homo sapiens
auuacaaggcuuuaucuca

SEQ ID NO: 28490 - RNA, 14 nt, Homo sapiens
uggaaaaugugcaa

SEQ ID NO: 28491 - RNA, 12 nt, Homo sapiens
gugucaggugac

SEQ ID NO: 28492 - RNA, 19 nt, Homo sapiens
uucaaaaucaaauuccaga

SEQ ID NO: 28493 - RNA, 14 nt, Homo sapiens
cuuaaacacuaaaa

SEQ ID NO: 28494 - RNA, 23 nt, Homo sapiens
ucagaaauuuaauucauguuucu

SEQ ID NO: 28495 - RNA, 16 nt, Homo sapiens
ugcaccaacuuugaag

SEQ ID NO: 28496 - RNA, 13 nt, Homo sapiens
augauacaaugaa

SEQ ID NO: 28497 - RNA, 20 nt, Homo sapiens
augaacacuuauaagugaag

SEQ ID NO: 28498 - RNA, 17 nt, Homo sapiens
uuuauuauuuucaccug

SEQ ID NO: 28499 - RNA, 15 nt, Homo sapiens
cuauguggcuguauc

SEQ ID NO: 28500 - RNA, 16 nt, Homo sapiens
augcauuugcacuauu

SEQ ID NO: 28501 - RNA, 15 nt, Homo sapiens
caaucuuaacucauu

SEQ ID NO: 28502 - RNA, 16 nt, Homo sapiens
cuuaaagaauuuucaa

SEQ ID NO: 28503 - RNA, 15 nt, Homo sapiens
augguuccauucucu

SEQ ID NO: 28504 - RNA, 19 nt, Homo sapiens
guuauuuagggaacugcuu

SEQ ID NO: 28505 - RNA, 14 nt, Homo sapiens
uuccaaauucacaa

SEQ ID NO: 28506 - RNA, 16 nt, Homo sapiens
gccuugguauagcaua

SEQ ID NO: 28507 - RNA, 17 nt, Homo sapiens
auagcagcuuauucaca

SEQ ID NO: 28508 - RNA, 21 nt, Homo sapiens
ugugacuuaaugccacuaaau

SEQ ID NO: 28509 - RNA, 13 nt, Homo sapiens
ggcgacaguuuuc

SEQ ID NO: 28510 - RNA, 22 nt, Homo sapiens
ccuggacaguuuucugcuuuaa

SEQ ID NO: 28511 - RNA, 20 nt, Homo sapiens
uagagugggacaguuccuga

SEQ ID NO: 28512 - RNA, 13 nt, Homo sapiens
ccugcagacauga

SEQ ID NO: 28513 - RNA, 21 nt, Homo sapiens
acaauuauuuuuacaguucuc

SEQ ID NO: 28514 - RNA, 20 nt, Homo sapiens
ucuuuuuuuuaauaaaccau

SEQ ID NO: 28515 - RNA, 22 nt, Homo sapiens
caggauagagugggacaguucc

SEQ ID NO: 28516 - RNA, 17 nt, Homo sapiens
cuguaaucccagcacuu

SEQ ID NO: 28517 - RNA, 12 nt, Homo sapiens
cucauucaaaag

SEQ ID NO: 28518 - RNA, 18 nt, Homo sapiens
gaaaagauuaugaucuca

SEQ ID NO: 28519 - RNA, 13 nt, Homo sapiens
ccucuguugccaa

SEQ ID NO: 28520 - RNA, 11 nt, Homo sapiens
augcuggccag

SEQ ID NO: 28521 - RNA, 16 nt, Homo sapiens
uuugugacuuuccuaa

SEQ ID NO: 28522 - RNA, 18 nt, Homo sapiens
auuuauugagcaccugca

SEQ ID NO: 28523 - RNA, 21 nt, Homo sapiens
aaauaacuaggcguggacuua

SEQ ID NO: 28524 - RNA, 15 nt, Homo sapiens
agugacauguuuaca

SEQ ID NO: 28525 - RNA, 22 nt, Homo sapiens
ccgcaaugugacuuaaugccac

SEQ ID NO: 28526 - RNA, 14 nt, Homo sapiens
ucuauguggcugua

SEQ ID NO: 28527 - RNA, 19 nt, Homo sapiens
caacccaaauguucaucaa

SEQ ID NO: 28528 - RNA, 14 nt, Homo sapiens
gaaugagaagaaug

SEQ ID NO: 28529 - RNA, 21 nt, Homo sapiens
cuugaaauagugucugaugaa

SEQ ID NO: 28530 - RNA, 13 nt, Homo sapiens
ggaugauguuucg

SEQ ID NO: 28531 - RNA, 13 nt, Homo sapiens
uggccugcuggau

SEQ ID NO: 28532 - RNA, 17 nt, Homo sapiens
uacugcuaccacaacua

SEQ ID NO: 28533 - RNA, 13 nt, Homo sapiens
uuuaugcauacag

SEQ ID NO: 28534 - RNA, 22 nt, Homo sapiens
ccuggcugggaguggcauguau

SEQ ID NO: 28535 - RNA, 16 nt, Homo sapiens
uggaaaaugugcaaua

SEQ ID NO: 28536 - RNA, 12 nt, Homo sapiens
uggucucagugu

SEQ ID NO: 28537 - RNA, 13 nt, Homo sapiens
cugauuaaaccaa

SEQ ID NO: 28538 - RNA, 20 nt, Homo sapiens
aguguuggaaaaugugcaau

SEQ ID NO: 28539 - RNA, 13 nt, Homo sapiens
aaaaugugcaaua

SEQ ID NO: 28540 - RNA, 20 nt, Homo sapiens
gacuauuauagaauggaacu

SEQ ID NO: 28541 - RNA, 20 nt, Homo sapiens
auauaauaugcacacagugc

SEQ ID NO: 28542 - RNA, 16 nt, Homo sapiens
uagauaaacucagaaa

SEQ ID NO: 28543 - RNA, 16 nt, Homo sapiens
cacagucacauuccaa

SEQ ID NO: 28544 - RNA, 16 nt, Homo sapiens
uucacaagacccaaaa

SEQ ID NO: 28545 - RNA, 15 nt, Homo sapiens
cagaaauuguaucuu

SEQ ID NO: 28546 - RNA, 14 nt, Homo sapiens
aauauuguugacaa

SEQ ID NO: 28547 - RNA, 21 nt, Homo sapiens
ccacaacuauauuaucaugca

SEQ ID NO: 28548 - RNA, 15 nt, Homo sapiens
agacaucaacagaua

SEQ ID NO: 28549 - RNA, 14 nt, Homo sapiens
acaugauccugcaa

SEQ ID NO: 28550 - RNA, 19 nt, Homo sapiens
uauaucaguccucuuucaa

SEQ ID NO: 28551 - RNA, 14 nt, Homo sapiens
uaggcuauucacaa

SEQ ID NO: 28552 - RNA, 23 nt, Homo sapiens
uuaaguguaacuggcaguuuucc

SEQ ID NO: 28553 - RNA, 16 nt, Homo sapiens
aaugguuccauucucu

SEQ ID NO: 28554 - RNA, 14 nt, Homo sapiens
agacagaaagcaga

SEQ ID NO: 28555 - RNA, 22 nt, Homo sapiens
gagacagaaagcagaacaguga

SEQ ID NO: 28556 - RNA, 15 nt, Homo sapiens
cuuuccagagaccag

SEQ ID NO: 28557 - RNA, 16 nt, Homo sapiens
aacccggccugauuaa

SEQ ID NO: 28558 - RNA, 17 nt, Homo sapiens
caagugaaaaacaucca

SEQ ID NO: 28559 - RNA, 15 nt, Homo sapiens
uccgaagucuuccau

SEQ ID NO: 28560 - RNA, 13 nt, Homo sapiens
agauguagaggag

SEQ ID NO: 28561 - RNA, 23 nt, Homo sapiens
auggaaguugcagugagcugaua

SEQ ID NO: 28562 - RNA, 19 nt, Homo sapiens
uguaaucccagcacuuugg

SEQ ID NO: 28563 - RNA, 21 nt, Homo sapiens
uuuuuaaacaaaaaaagcauu

SEQ ID NO: 28564 - RNA, 17 nt, Homo sapiens
caguggcgcaaucuuaa

SEQ ID NO: 28565 - RNA, 17 nt, Homo sapiens
ucuuggucucaguguca

SEQ ID NO: 28566 - RNA, 17 nt, Homo sapiens
ucugucuggacuuucca

SEQ ID NO: 28567 - RNA, 15 nt, Homo sapiens
uuccauuccaagccu

SEQ ID NO: 28568 - RNA, 22 nt, Homo sapiens
ugugauauguaccuaacgaagu

SEQ ID NO: 28569 - RNA, 14 nt, Homo sapiens
acuuuaacacagug

SEQ ID NO: 28570 - RNA, 16 nt, Homo sapiens
aauaauacaccagaga

SEQ ID NO: 28571 - RNA, 15 nt, Homo sapiens
uaucuuaguugguau

SEQ ID NO: 28572 - RNA, 15 nt, Homo sapiens
ucccagcuacuuggg

SEQ ID NO: 28573 - RNA, 19 nt, Homo sapiens
acaaggcuuuaucucaggg

SEQ ID NO: 28574 - RNA, 17 nt, Homo sapiens
uguuggaaaaugugcaa

SEQ ID NO: 28575 - RNA, 20 nt, Homo sapiens
caccagagauaauaugagaa

SEQ ID NO: 28576 - RNA, 16 nt, Homo sapiens
aacagaagcuuccauu

SEQ ID NO: 28577 - RNA, 21 nt, Homo sapiens
ugucucggagggauuccccua

SEQ ID NO: 28578 - RNA, 22 nt, Homo sapiens
guuaccaguaacggaacaguau

SEQ ID NO: 28579 - RNA, 18 nt, Homo sapiens
aagcaacccaaauguuca

SEQ ID NO: 28580 - RNA, 20 nt, Homo sapiens
ccaaaguaucaggacgagaa

SEQ ID NO: 28581 - RNA, 20 nt, Homo sapiens
agagacgggguuugccaugc

SEQ ID NO: 28582 - RNA, 20 nt, Homo sapiens
cgaguggcccuucauguaca

SEQ ID NO: 28583 - RNA, 23 nt, Homo sapiens
ucacauuggcuauuuaaagacaa

SEQ ID NO: 28584 - RNA, 11 nt, Homo sapiens
acuuuuuccag

SEQ ID NO: 28585 - RNA, 15 nt, Homo sapiens
gacccaaaaggcaga

SEQ ID NO: 28586 - RNA, 23 nt, Homo sapiens
ucacaggaaguagaggaggccac

SEQ ID NO: 28587 - RNA, 15 nt, Homo sapiens
uuuaauggcauguca

SEQ ID NO: 28588 - RNA, 16 nt, Homo sapiens
ucuauuacgugcaaua

SEQ ID NO: 28589 - RNA, 15 nt, Homo sapiens
uggcauuuucacuuu

SEQ ID NO: 28590 - RNA, 15 nt, Homo sapiens
ucuuggucacauaca

SEQ ID NO: 28591 - RNA, 21 nt, Homo sapiens
uauagugucuugggaauuuuc

SEQ ID NO: 28592 - RNA, 14 nt, Homo sapiens
gaagaaauucugca

SEQ ID NO: 28593 - RNA, 16 nt, Homo sapiens
guauuuuacuuuucca

SEQ ID NO: 28594 - RNA, 11 nt, Homo sapiens
acauacugcug

SEQ ID NO: 28595 - RNA, 20 nt, Homo sapiens
aaaugggcuacuuuguccuu

SEQ ID NO: 28596 - RNA, 14 nt, Homo sapiens
ugagaacugcauau

SEQ ID NO: 28597 - RNA, 19 nt, Homo sapiens
aauucuauuacgugcaaua

SEQ ID NO: 28598 - RNA, 17 nt, Homo sapiens
gcagaagcaacccaaau

SEQ ID NO: 28599 - RNA, 13 nt, Homo sapiens
ucaguuacucuga

SEQ ID NO: 28600 - RNA, 20 nt, Homo sapiens
aagauuguauagugcauguu

SEQ ID NO: 28601 - RNA, 19 nt, Homo sapiens
aaauugaaaggcauucucu

SEQ ID NO: 28602 - RNA, 15 nt, Homo sapiens
uacucauacauguua

SEQ ID NO: 28603 - RNA, 17 nt, Homo sapiens
cugaagggcaucaugca

SEQ ID NO: 28604 - RNA, 17 nt, Homo sapiens
agacagcaggucucaug

SEQ ID NO: 28605 - RNA, 23 nt, Homo sapiens
aaaucggaucuggggcucuggga

SEQ ID NO: 28606 - RNA, 13 nt, Homo sapiens
cagcuaaguugca

SEQ ID NO: 28607 - RNA, 15 nt, Homo sapiens
cccauuucuauuuau

SEQ ID NO: 28608 - RNA, 16 nt, Homo sapiens
ugauucccuccugcua

SEQ ID NO: 28609 - RNA, 15 nt, Homo sapiens
cuuaugaaacuaaga

SEQ ID NO: 28610 - RNA, 23 nt, Homo sapiens
auuucacuugaugauacaaugaa

SEQ ID NO: 28611 - RNA, 12 nt, Homo sapiens
aggcauguaauu

SEQ ID NO: 28612 - RNA, 18 nt, Homo sapiens
augaaaagauuaugaucu

SEQ ID NO: 28613 - RNA, 18 nt, Homo sapiens
cacaggcuccaaacugga

SEQ ID NO: 28614 - RNA, 12 nt, Homo sapiens
uugaauccagaa

SEQ ID NO: 28615 - RNA, 22 nt, Homo sapiens
aaagggucucccucuguugcca

SEQ ID NO: 28616 - RNA, 18 nt, Homo sapiens
acuaaauugacacuuaaa

SEQ ID NO: 28617 - RNA, 16 nt, Homo sapiens
guuggaaaaugugcaa

SEQ ID NO: 28618 - RNA, 12 nt, Homo sapiens
gaagucuuccau

SEQ ID NO: 28619 - RNA, 16 nt, Homo sapiens
aacacuaaaaaggcau

SEQ ID NO: 28620 - RNA, 20 nt, Homo sapiens
gaugggagaaucacuugaac

SEQ ID NO: 28621 - RNA, 22 nt, Homo sapiens
agaagugaaaaucuacacucca

SEQ ID NO: 28622 - RNA, 19 nt, Homo sapiens
auauuuuuaugugcaauaa

SEQ ID NO: 28623 - RNA, 14 nt, Homo sapiens
ggcuggagugcagu

SEQ ID NO: 28624 - RNA, 22 nt, Homo sapiens
ggaaaaugugcaauaugugaug

SEQ ID NO: 28625 - RNA, 21 nt, Homo sapiens
aauuuucaaaaucaaauucca

SEQ ID NO: 28626 - RNA, 18 nt, Homo sapiens
uauuguugacaacuguga

SEQ ID NO: 28627 - RNA, 17 nt, Homo sapiens
aaauaagccagacauca

SEQ ID NO: 28628 - RNA, 23 nt, Homo sapiens
acaccauuccuucugcccugcuu

SEQ ID NO: 28629 - RNA, 17 nt, Homo sapiens
auucugcaagcuuuuca

SEQ ID NO: 28630 - RNA, 12 nt, Homo sapiens
aaauuggacuua

SEQ ID NO: 28631 - RNA, 23 nt, Homo sapiens
uaaaauauuuuuaugugcaauaa

SEQ ID NO: 28632 - RNA, 15 nt, Homo sapiens
gcauuuucacuuuug

SEQ ID NO: 28633 - RNA, 15 nt, Homo sapiens
uugcaagacauagaa

SEQ ID NO: 28634 - RNA, 13 nt, Homo sapiens
uccugugacuguc

SEQ ID NO: 28635 - RNA, 11 nt, Homo sapiens
ucucagugucc

SEQ ID NO: 28636 - RNA, 20 nt, Homo sapiens
aauauuuauuauuuucaccu

SEQ ID NO: 28637 - RNA, 17 nt, Homo sapiens
agugcccaacuguuaua

SEQ ID NO: 28638 - RNA, 13 nt, Homo sapiens
cucaucugugauu

SEQ ID NO: 28639 - RNA, 20 nt, Homo sapiens
gaggcaagagaauugcuuga

SEQ ID NO: 28640 - RNA, 23 nt, Homo sapiens
uggacuuuccagagaccaguauu

SEQ ID NO: 28641 - RNA, 19 nt, Homo sapiens
guuuucugcuuuaauuuca

SEQ ID NO: 28642 - RNA, 22 nt, Homo sapiens
cacgccuguaaucccagcacuu

SEQ ID NO: 28643 - RNA, 22 nt, Homo sapiens
cuggagcuugaaauagugucug

SEQ ID NO: 28644 - RNA, 21 nt, Homo sapiens
uccuguacuuuuuccagacac

SEQ ID NO: 28645 - RNA, 16 nt, Homo sapiens
auaguguuggaaaaug

SEQ ID NO: 28646 - RNA, 19 nt, Homo sapiens
agaaauuugccaauuuacu

SEQ ID NO: 28647 - RNA, 14 nt, Homo sapiens
acaucuuucacauu

SEQ ID NO: 28648 - RNA, 16 nt, Homo sapiens
uaaaguacagacuuuu

SEQ ID NO: 28649 - RNA, 15 nt, Homo sapiens
auguguuuuucacau

SEQ ID NO: 28650 - RNA, 16 nt, Homo sapiens
uauucccuuuugcugc

SEQ ID NO: 28651 - RNA, 18 nt, Homo sapiens
uguuggaaaaugugcaau

SEQ ID NO: 28652 - RNA, 15 nt, Homo sapiens
uaauucaaacuaaua

SEQ ID NO: 28653 - RNA, 12 nt, Homo sapiens
aaaaaaagccaa

SEQ ID NO: 28654 - RNA, 16 nt, Homo sapiens
ggacacaggcuccaaa

SEQ ID NO: 28655 - RNA, 20 nt, Homo sapiens
agaaaccuuauuguaccucu

SEQ ID NO: 28656 - RNA, 22 nt, Homo sapiens
cauuucaaaagguauuuauuga

SEQ ID NO: 28657 - RNA, 9 nt, Homo sapiens
cgugcaaua

SEQ ID NO: 28658 - RNA, 23 nt, Homo sapiens
uaguguuggaaaaugugcaauau

SEQ ID NO: 28659 - RNA, 21 nt, Homo sapiens
agacaccaccacccuugccau

SEQ ID NO: 28660 - RNA, 15 nt, Homo sapiens
cagaaauuuaauuca

SEQ ID NO: 28661 - RNA, 17 nt, Homo sapiens
ugaguggaugauguuuc

SEQ ID NO: 28662 - RNA, 15 nt, Homo sapiens
uaucaauaucuaaua

SEQ ID NO: 28663 - RNA, 19 nt, Homo sapiens
uggaaauaaaagauuguau

SEQ ID NO: 28664 - RNA, 19 nt, Homo sapiens
aaccuccaccuucuggguu

SEQ ID NO: 28665 - RNA, 13 nt, Homo sapiens
aauugacacuuaa

SEQ ID NO: 28666 - RNA, 13 nt, Homo sapiens
cugaauacauucu

SEQ ID NO: 28667 - RNA, 17 nt, Homo sapiens
cuucucuucacagucac

SEQ ID NO: 28668 - RNA, 15 nt, Homo sapiens
uagaagcaucacagg

SEQ ID NO: 28669 - RNA, 18 nt, Homo sapiens
agcaagacucugucucaa

SEQ ID NO: 28670 - RNA, 22 nt, Homo sapiens
caguaacggaacaguauccagu

SEQ ID NO: 28671 - RNA, 16 nt, Homo sapiens
cacugugggcuuuuau

SEQ ID NO: 28672 - RNA, 19 nt, Homo sapiens
accagagauaauaugagaa

SEQ ID NO: 28673 - RNA, 18 nt, Homo sapiens
auuuuaaguaauuucaga

SEQ ID NO: 28674 - RNA, 21 nt, Homo sapiens
auucgcugcaaccuguugaua

SEQ ID NO: 28675 - RNA, 12 nt, Homo sapiens
uuaugugcaaua

SEQ ID NO: 28676 - RNA, 20 nt, Homo sapiens
ucaaaacuucagacauagaa

SEQ ID NO: 28677 - RNA, 21 nt, Homo sapiens
gacacaggcuccaaacuggag

SEQ ID NO: 28678 - RNA, 15 nt, Homo sapiens
acuugaugauacaau

SEQ ID NO: 28679 - RNA, 23 nt, Homo sapiens
ugaaaaaguauaaauaaaaugag

SEQ ID NO: 28680 - RNA, 19 nt, Homo sapiens
ggacuugggcgggacacag

SEQ ID NO: 28681 - RNA, 14 nt, Homo sapiens
auuacaucuuucac

SEQ ID NO: 28682 - RNA, 18 nt, Homo sapiens
agcaaauguuaugcauaa

SEQ ID NO: 28683 - RNA, 13 nt, Homo sapiens
uauuuauuuacug

SEQ ID NO: 28684 - RNA, 16 nt, Homo sapiens
caaauguuaugcauaa

SEQ ID NO: 28685 - RNA, 16 nt, Homo sapiens
uccaagccucaugucc

SEQ ID NO: 28686 - RNA, 19 nt, Homo sapiens
ugucuggcacuugggacaa

SEQ ID NO: 28687 - RNA, 22 nt, Homo sapiens
ugagaugggagaaucacuugaa

SEQ ID NO: 28688 - RNA, 23 nt, Homo sapiens
cuccuggcuggggccuguugaag

SEQ ID NO: 28689 - RNA, 13 nt, Homo sapiens
cacuggcucccug

SEQ ID NO: 28690 - RNA, 23 nt, Homo sapiens
uccuagcgcagccaugugauuac

SEQ ID NO: 28691 - RNA, 16 nt, Homo sapiens
cuggcacuugggacaa

SEQ ID NO: 28692 - RNA, 16 nt, Homo sapiens
auaauaugagaaucag

SEQ ID NO: 28693 - RNA, 20 nt, Homo sapiens
ccucaucuguaaaauggaga

SEQ ID NO: 28694 - RNA, 18 nt, Homo sapiens
gcccuucauguacaucca

SEQ ID NO: 28695 - RNA, 17 nt, Homo sapiens
uuguaccgcaaugugac

SEQ ID NO: 28696 - RNA, 13 nt, Homo sapiens
uagcaucucagga

SEQ ID NO: 28697 - RNA, 19 nt, Homo sapiens
caucuuggucacauacaau

SEQ ID NO: 28698 - RNA, 22 nt, Homo sapiens
ggcagcaggauagagugggaca

SEQ ID NO: 28699 - RNA, 20 nt, Homo sapiens
acggagauaucccaggaaaa

SEQ ID NO: 28700 - RNA, 17 nt, Homo sapiens
aucaaauuccagaauga

SEQ ID NO: 28701 - RNA, 13 nt, Homo sapiens
auuauagaaugga

SEQ ID NO: 28702 - RNA, 16 nt, Homo sapiens
uuccuuaucacugaca

SEQ ID NO: 28703 - RNA, 13 nt, Homo sapiens
augcauacaguaa

SEQ ID NO: 28704 - RNA, 13 nt, Homo sapiens
uuaaaauguaauu

SEQ ID NO: 28705 - RNA, 16 nt, Homo sapiens
ggacuuacuauuuauu

SEQ ID NO: 28706 - RNA, 20 nt, Homo sapiens
cugucuggacuuuccagaga

SEQ ID NO: 28707 - RNA, 15 nt, Homo sapiens
uggaaaaugugcaau

SEQ ID NO: 28708 - RNA, 13 nt, Homo sapiens
aagcaacaucuag

SEQ ID NO: 28709 - RNA, 14 nt, Homo sapiens
cuaugugauuacaa

SEQ ID NO: 28710 - RNA, 15 nt, Homo sapiens
gcgugagccaccaaa

SEQ ID NO: 28711 - RNA, 15 nt, Homo sapiens
cuugggcgggacaca

SEQ ID NO: 28712 - RNA, 16 nt, Homo sapiens
auucccuccugcuacu

SEQ ID NO: 28713 - RNA, 17 nt, Homo sapiens
acacaggcuccaaacug

SEQ ID NO: 28714 - RNA, 16 nt, Homo sapiens
uucaaaauuggacuua

SEQ ID NO: 28715 - RNA, 16 nt, Homo sapiens
uaaaugauuucauuca

SEQ ID NO: 28716 - RNA, 14 nt, Homo sapiens
aagacaaauucugu

SEQ ID NO: 28717 - RNA, 17 nt, Homo sapiens
ugggaauuuucuuccaa

SEQ ID NO: 28718 - RNA, 14 nt, Homo sapiens
ugcauacaguaauu

SEQ ID NO: 28719 - RNA, 14 nt, Homo sapiens
cgggguuugccaug

SEQ ID NO: 28720 - RNA, 16 nt, Homo sapiens
aaauggaaaguaacuc

SEQ ID NO: 28721 - RNA, 19 nt, Homo sapiens
agugaacaaauuuacagag

SEQ ID NO: 28722 - RNA, 19 nt, Homo sapiens
aauauaauaugcacacagu

SEQ ID NO: 28723 - RNA, 14 nt, Homo sapiens
aaaccaaggcuaga

SEQ ID NO: 28724 - RNA, 14 nt, Homo sapiens
aaacauagcaucuc

SEQ ID NO: 28725 - RNA, 12 nt, Homo sapiens
acauacaauuau

SEQ ID NO: 28726 - RNA, 19 nt, Homo sapiens
gaaaaucugcacugugggc

SEQ ID NO: 28727 - RNA, 20 nt, Homo sapiens
cgcgcaccuguaaucccagc

SEQ ID NO: 28728 - RNA, 20 nt, Homo sapiens
uuugaugauuaauucaccuu

SEQ ID NO: 28729 - RNA, 21 nt, Homo sapiens
uaaacaguagugauaguugua

SEQ ID NO: 28730 - RNA, 13 nt, Homo sapiens
agaauggaacuca

SEQ ID NO: 28731 - RNA, 23 nt, Homo sapiens
aauauguaaauagaaacguguau

SEQ ID NO: 28732 - RNA, 17 nt, Homo sapiens
uucugcaagcuuuucaa

SEQ ID NO: 28733 - RNA, 17 nt, Homo sapiens
gaaaauaaaagcacuua

SEQ ID NO: 28734 - RNA, 17 nt, Homo sapiens
uauugcugaaugacuac

SEQ ID NO: 28735 - RNA, 16 nt, Homo sapiens
ucuccgucucccaaag

SEQ ID NO: 28736 - RNA, 15 nt, Homo sapiens
gggucucaguguccu

SEQ ID NO: 28737 - RNA, 19 nt, Homo sapiens
guaauuuuaaguaauuuca

SEQ ID NO: 28738 - RNA, 17 nt, Homo sapiens
uucaaaauuggacuuaa

SEQ ID NO: 28739 - RNA, 13 nt, Homo sapiens
augacacaucucu

SEQ ID NO: 28740 - RNA, 21 nt, Homo sapiens
gugauuacccucugggucuca

SEQ ID NO: 28741 - RNA, 15 nt, Homo sapiens
agguuaagcacuuua

SEQ ID NO: 28742 - RNA, 21 nt, Homo sapiens
cagaacuugaaugugucaggu

SEQ ID NO: 28743 - RNA, 23 nt, Homo sapiens
uaaugaaaaugaauaucuauuaa

SEQ ID NO: 28744 - RNA, 15 nt, Homo sapiens
aagagaucaagccau

SEQ ID NO: 28745 - RNA, 17 nt, Homo sapiens
aacauagcaucucagga

SEQ ID NO: 28746 - RNA, 15 nt, Homo sapiens
ccucuguugccaagg

SEQ ID NO: 28747 - RNA, 19 nt, Homo sapiens
uuaucaugcaaaugcugua

SEQ ID NO: 28748 - RNA, 16 nt, Homo sapiens
caccagggccuggcug

SEQ ID NO: 28749 - RNA, 11 nt, Homo sapiens
uaaaagcacuu

SEQ ID NO: 28750 - RNA, 18 nt, Homo sapiens
agccaaguuuauauacaa

SEQ ID NO: 28751 - RNA, 14 nt, Homo sapiens
gaaagggucucccu

SEQ ID NO: 28752 - RNA, 16 nt, Homo sapiens
uaggaacgguaaauuu

SEQ ID NO: 28753 - RNA, 17 nt, Homo sapiens
uaaacaaaggaauuaug

SEQ ID NO: 28754 - RNA, 17 nt, Homo sapiens
cuaaaucaauucuauua

SEQ ID NO: 28755 - RNA, 15 nt, Homo sapiens
aaccuuuacauccag

SEQ ID NO: 28756 - RNA, 21 nt, Homo sapiens
caucacagcugaacuuguuga

SEQ ID NO: 28757 - RNA, 18 nt, Homo sapiens
guauuuauugagcaccug

SEQ ID NO: 28758 - RNA, 22 nt, Homo sapiens
cugcaagcuuuucaaaauugga

SEQ ID NO: 28759 - RNA, 14 nt, Homo sapiens
acccaaaaggcaga

SEQ ID NO: 28760 - RNA, 18 nt, Homo sapiens
auaaacaguagugauagu

SEQ ID NO: 28761 - RNA, 13 nt, Homo sapiens
guuuucugacuaa

SEQ ID NO: 28762 - RNA, 13 nt, Homo sapiens
uaacacagugucu

SEQ ID NO: 28763 - RNA, 18 nt, Homo sapiens
uuguacaccaauauucau

SEQ ID NO: 28764 - RNA, 14 nt, Homo sapiens
ugaccugacagccc

SEQ ID NO: 28765 - RNA, 18 nt, Homo sapiens
acuuaugaaccuuuacau

SEQ ID NO: 28766 - RNA, 19 nt, Homo sapiens
agguauuuauugagcaccu

SEQ ID NO: 28767 - RNA, 18 nt, Homo sapiens
agcaggauagagugggac

SEQ ID NO: 28768 - RNA, 16 nt, Homo sapiens
ucugcaagcuuuucaa

SEQ ID NO: 28769 - RNA, 13 nt, Homo sapiens
acaucuuucacau

SEQ ID NO: 28770 - RNA, 16 nt, Homo sapiens
guagccacuucacuuu

SEQ ID NO: 28771 - RNA, 23 nt, Homo sapiens
agagcccuucaugcauuugcacu

SEQ ID NO: 28772 - RNA, 16 nt, Homo sapiens
caccaaacccggccug

SEQ ID NO: 28773 - RNA, 19 nt, Homo sapiens
uaaauguaucuuauucaca

SEQ ID NO: 28774 - RNA, 10 nt, Homo sapiens
aaaauaugcc

SEQ ID NO: 28775 - RNA, 18 nt, Homo sapiens
acaauuauaucaguccuc

SEQ ID NO: 28776 - RNA, 14 nt, Homo sapiens
caccuguaauccca

SEQ ID NO: 28777 - RNA, 13 nt, Homo sapiens
acuagauacugaa

SEQ ID NO: 28778 - RNA, 23 nt, Homo sapiens
uacauuguuugucugucuucaua

SEQ ID NO: 28779 - RNA, 15 nt, Homo sapiens
cugcaagcuuuucaa

SEQ ID NO: 28780 - RNA, 15 nt, Homo sapiens
auuguaacuuaugaa

SEQ ID NO: 28781 - RNA, 13 nt, Homo sapiens
ucuugaaagcugu

SEQ ID NO: 28782 - RNA, 13 nt, Homo sapiens
gaauuaauggaau

SEQ ID NO: 28783 - RNA, 21 nt, Homo sapiens
ccaggagauggaaguugcagu

SEQ ID NO: 28784 - RNA, 22 nt, Homo sapiens
uuacuauuuauugcugaaugac

SEQ ID NO: 28785 - RNA, 17 nt, Homo sapiens
auuacaggcgugagcca

SEQ ID NO: 28786 - RNA, 17 nt, Homo sapiens
aauauuuuuaugugcaa

SEQ ID NO: 28787 - RNA, 20 nt, Homo sapiens
uaguuucccuugcaugguuu

SEQ ID NO: 28788 - RNA, 15 nt, Homo sapiens
cuguacuuuuuccag

SEQ ID NO: 28789 - RNA, 21 nt, Homo sapiens
ucaauuuaaaaaaaaaccuga

SEQ ID NO: 28790 - RNA, 20 nt, Homo sapiens
gcuggucucgaacugcugga

SEQ ID NO: 28791 - RNA, 15 nt, Homo sapiens
ugacugucucacuua

SEQ ID NO: 28792 - RNA, 20 nt, Homo sapiens
ggcuggagugcaguggcgca

SEQ ID NO: 28793 - RNA, 23 nt, Homo sapiens
ucuucccuuuuacauacugcugu

SEQ ID NO: 28794 - RNA, 14 nt, Homo sapiens
cacaaaauugggaa

SEQ ID NO: 28795 - RNA, 17 nt, Homo sapiens
cuuaaaaucuaauucaa

SEQ ID NO: 28796 - RNA, 14 nt, Homo sapiens
uauuacgugcaaua

SEQ ID NO: 28797 - RNA, 17 nt, Homo sapiens
aguacucauacauguua

SEQ ID NO: 28798 - RNA, 16 nt, Homo sapiens
gugacuuaguguacau

SEQ ID NO: 28799 - RNA, 13 nt, Homo sapiens
uaauuucaugaaa

SEQ ID NO: 28800 - RNA, 20 nt, Homo sapiens
uacaaggcuuuaucucaggg

SEQ ID NO: 28801 - RNA, 19 nt, Homo sapiens
ccugcaggcgugaccugac

SEQ ID NO: 28802 - RNA, 23 nt, Homo sapiens
aaaaggccugucccugcagacau

SEQ ID NO: 28803 - RNA, 18 nt, Homo sapiens
gauggaaguugcagugag

SEQ ID NO: 28804 - RNA, 16 nt, Homo sapiens
uccuucucaucuguga

SEQ ID NO: 28805 - RNA, 18 nt, Homo sapiens
uaugacgugacuggccug

SEQ ID NO: 28806 - RNA, 15 nt, Homo sapiens
aauucugcaagcuuu

SEQ ID NO: 28807 - RNA, 19 nt, Homo sapiens
cacuaaaaaggcauguaau

SEQ ID NO: 28808 - RNA, 14 nt, Homo sapiens
gaaauagugucuga

SEQ ID NO: 28809 - RNA, 11 nt, Homo sapiens
acagcucugca

SEQ ID NO: 28810 - RNA, 23 nt, Homo sapiens
uauaaauuuucccaaaacugaua

SEQ ID NO: 28811 - RNA, 15 nt, Homo sapiens
uuuauugcugaauga

SEQ ID NO: 28812 - RNA, 21 nt, Homo sapiens
gauaccucaacccccauuucu

SEQ ID NO: 28813 - RNA, 13 nt, Homo sapiens
ugcauuugcacua

SEQ ID NO: 28814 - RNA, 20 nt, Homo sapiens
auuuuguguucaguacaauu

SEQ ID NO: 28815 - RNA, 15 nt, Homo sapiens
auaugacacaucucu

SEQ ID NO: 28816 - RNA, 17 nt, Homo sapiens
gaacugcauauguuucg

SEQ ID NO: 28817 - RNA, 22 nt, Homo sapiens
aaaggccugucccugcagacau

SEQ ID NO: 28818 - RNA, 13 nt, Homo sapiens
accaaauuuguau

SEQ ID NO: 28819 - RNA, 20 nt, Homo sapiens
aggccgggcgcgguggcuca

SEQ ID NO: 28820 - RNA, 21 nt, Homo sapiens
uaaaauggagacaccaccacc

SEQ ID NO: 28821 - RNA, 16 nt, Homo sapiens
auacauucugcuuuca

SEQ ID NO: 28822 - RNA, 16 nt, Homo sapiens
aacggaacaguaucca

SEQ ID NO: 28823 - RNA, 18 nt, Homo sapiens
auggcuaguaucaaaaga

SEQ ID NO: 28824 - RNA, 14 nt, Homo sapiens
ccacccuugccaug

SEQ ID NO: 28825 - RNA, 21 nt, Homo sapiens
guuucgugaaguauacuguau

SEQ ID NO: 28826 - RNA, 13 nt, Homo sapiens
caugaaagcguaa

SEQ ID NO: 28827 - RNA, 12 nt, Homo sapiens
gcuuccuaacug

SEQ ID NO: 28828 - RNA, 15 nt, Homo sapiens
gaccugacagcccaa

SEQ ID NO: 28829 - RNA, 13 nt, Homo sapiens
ccaagccugacca

SEQ ID NO: 28830 - RNA, 23 nt, Homo sapiens
acagaagagugacauguuuacaa

SEQ ID NO: 28831 - RNA, 16 nt, Homo sapiens
auucacaagacccaaa

SEQ ID NO: 28832 - RNA, 18 nt, Homo sapiens
acaucaguuacucugaag

SEQ ID NO: 28833 - RNA, 18 nt, Homo sapiens
uaaguugcaccaacuuug

SEQ ID NO: 28834 - RNA, 14 nt, Homo sapiens
aaaaugagcaaaag

SEQ ID NO: 28835 - RNA, 13 nt, Homo sapiens
ucaccaaggcuga

SEQ ID NO: 28836 - RNA, 11 nt, Homo sapiens
ccuugagaaac

SEQ ID NO: 28837 - RNA, 18 nt, Homo sapiens
ucugccuugguauagcau

SEQ ID NO: 28838 - RNA, 14 nt, Homo sapiens
agagaaauuugcca

SEQ ID NO: 28839 - RNA, 16 nt, Homo sapiens
gcgcagccaugugauu

SEQ ID NO: 28840 - RNA, 23 nt, Homo sapiens
aaagcagggacuugaacccauau

SEQ ID NO: 28841 - RNA, 13 nt, Homo sapiens
ucugauaccucaa

SEQ ID NO: 28842 - RNA, 17 nt, Homo sapiens
cugggucucaguguccu

SEQ ID NO: 28843 - RNA, 16 nt, Homo sapiens
cugccccugagcccau

SEQ ID NO: 28844 - RNA, 12 nt, Homo sapiens
cgacaguuuucc

SEQ ID NO: 28845 - RNA, 18 nt, Homo sapiens
gaauauuuauuaccucug

SEQ ID NO: 28846 - RNA, 19 nt, Homo sapiens
uuccagagaccaguauucc

SEQ ID NO: 28847 - RNA, 15 nt, Homo sapiens
gaggagaaacuggaa

SEQ ID NO: 28848 - RNA, 16 nt, Homo sapiens
agugucugaugaaugu

SEQ ID NO: 28849 - RNA, 14 nt, Homo sapiens
acuaauuaggcaag

SEQ ID NO: 28850 - RNA, 13 nt, Homo sapiens
gauaaacucagaa

SEQ ID NO: 28851 - RNA, 16 nt, Homo sapiens
acaucaguuacucuga

SEQ ID NO: 28852 - RNA, 21 nt, Homo sapiens
aauggcuaagcaaaaugugau

SEQ ID NO: 28853 - RNA, 23 nt, Homo sapiens
ucucuuuuuagagaaauuugcca

SEQ ID NO: 28854 - RNA, 15 nt, Homo sapiens
ucugcuuuaauuuca

SEQ ID NO: 28855 - RNA, 22 nt, Homo sapiens
ugcagauaaacaguagugauag

SEQ ID NO: 28856 - RNA, 14 nt, Homo sapiens
aacuggcaguuuuc

SEQ ID NO: 28857 - RNA, 20 nt, Homo sapiens
uucugucuggacuuuccaga

SEQ ID NO: 28858 - RNA, 16 nt, Homo sapiens
aauguucaucaaugaa

SEQ ID NO: 28859 - RNA, 15 nt, Homo sapiens
auguuucgcugauau

SEQ ID NO: 28860 - RNA, 11 nt, Homo sapiens
cuuuucucugc

SEQ ID NO: 28861 - RNA, 19 nt, Homo sapiens
gguaucaaccaaauggagu

SEQ ID NO: 28862 - RNA, 18 nt, Homo sapiens
gccauaauuacuauguca

SEQ ID NO: 28863 - RNA, 21 nt, Homo sapiens
auaaauaguuuaugauuccac

SEQ ID NO: 28864 - RNA, 21 nt, Homo sapiens
aacacuaaaaaggcauguaau

SEQ ID NO: 28865 - RNA, 23 nt, Homo sapiens
aaggcuucucuuaaacacuaaaa

SEQ ID NO: 28866 - RNA, 16 nt, Homo sapiens
gugaaguauacuguau

SEQ ID NO: 28867 - RNA, 11 nt, Homo sapiens
ccugugacugu

SEQ ID NO: 28868 - RNA, 18 nt, Homo sapiens
acuugaugauacaaugaa

SEQ ID NO: 28869 - RNA, 21 nt, Homo sapiens
gagaugggagaaucacuugaa

SEQ ID NO: 28870 - RNA, 23 nt, Homo sapiens
ugagaaaccuuauuguaccucuc

SEQ ID NO: 28871 - RNA, 18 nt, Homo sapiens
cugccaauauccuaauaa

SEQ ID NO: 28872 - RNA, 19 nt, Homo sapiens
aaguugcaccaacuuugaa

SEQ ID NO: 28873 - RNA, 19 nt, Homo sapiens
gcauguaugacgugacugg

SEQ ID NO: 28874 - RNA, 19 nt, Homo sapiens
ucacaaccacucauucaaa

SEQ ID NO: 28875 - RNA, 17 nt, Homo sapiens
ggcuuuagggaccugcu

SEQ ID NO: 28876 - RNA, 15 nt, Homo sapiens
cacgcccagcuaauu

SEQ ID NO: 28877 - RNA, 19 nt, Homo sapiens
auuuguuaaaauuaucaau

SEQ ID NO: 28878 - RNA, 14 nt, Homo sapiens
guggcgacucuaua

SEQ ID NO: 28879 - RNA, 20 nt, Homo sapiens
gcccaucuccgucucccaaa

SEQ ID NO: 28880 - RNA, 21 nt, Homo sapiens
aaccucauuccccaaccacuu

SEQ ID NO: 28881 - RNA, 21 nt, Homo sapiens
cacauuccaagccucaugucc

SEQ ID NO: 28882 - RNA, 12 nt, Homo sapiens
aaaugugcaaua

SEQ ID NO: 28883 - RNA, 13 nt, Homo sapiens
ugcugggaauuac

SEQ ID NO: 28884 - RNA, 12 nt, Homo sapiens
ccugugacuguc

SEQ ID NO: 28885 - RNA, 18 nt, Homo sapiens
uaaaauuaucaauaucua

SEQ ID NO: 28886 - RNA, 21 nt, Homo sapiens
ccaaaagguauuuuaaucacc

SEQ ID NO: 28887 - RNA, 18 nt, Homo sapiens
auaucuaauauauaugaa

SEQ ID NO: 28888 - RNA, 17 nt, Homo sapiens
auuguugacaacuguga

SEQ ID NO: 28889 - RNA, 17 nt, Homo sapiens
aacuggcaguuuuccau

SEQ ID NO: 28890 - RNA, 19 nt, Homo sapiens
accuuuggaugcacuuuau

SEQ ID NO: 28891 - RNA, 17 nt, Homo sapiens
ugaggaauauuugcaag

SEQ ID NO: 28892 - RNA, 20 nt, Homo sapiens
acuaauagaauuaauggaau

SEQ ID NO: 28893 - RNA, 19 nt, Homo sapiens
guuuuuccacuacugcuac

SEQ ID NO: 28894 - RNA, 17 nt, Homo sapiens
auuuccaaauucacaag

SEQ ID NO: 28895 - RNA, 18 nt, Homo sapiens
ugccuugguauagcauau

SEQ ID NO: 28896 - RNA, 23 nt, Homo sapiens
gcaaaugcuguauucuucuuugg

SEQ ID NO: 28897 - RNA, 20 nt, Homo sapiens
ggcgacaguuuuccuucuca

SEQ ID NO: 28898 - RNA, 18 nt, Homo sapiens
gagaaucagaucauuuca

SEQ ID NO: 28899 - RNA, 17 nt, Homo sapiens
cuuguuagcaaaaugga

SEQ ID NO: 28900 - RNA, 19 nt, Homo sapiens
gucacagaggaucugcuug

SEQ ID NO: 28901 - RNA, 21 nt, Homo sapiens
auugaaaggcauucucugaag

SEQ ID NO: 28902 - RNA, 19 nt, Homo sapiens
agcuugaaauagugucuga

SEQ ID NO: 28903 - RNA, 13 nt, Homo sapiens
agauaaacaguag

SEQ ID NO: 28904 - RNA, 20 nt, Homo sapiens
augagaaucagaucauuuca

SEQ ID NO: 28905 - RNA, 21 nt, Homo sapiens
ugaaaacauagcaucucagga

SEQ ID NO: 28906 - RNA, 18 nt, Homo sapiens
aguagauaugaggcauuu

SEQ ID NO: 28907 - RNA, 11 nt, Homo sapiens
uuaugugcaau

SEQ ID NO: 28908 - RNA, 17 nt, Homo sapiens
gagauggguuugacaag

SEQ ID NO: 28909 - RNA, 23 nt, Homo sapiens
aagauguagaggagaaacuggaa

SEQ ID NO: 28910 - RNA, 21 nt, Homo sapiens
aagcacuuuaacacagugucu

SEQ ID NO: 28911 - RNA, 16 nt, Homo sapiens
cacugcagaagacagu

SEQ ID NO: 28912 - RNA, 19 nt, Homo sapiens
aaauaguuuaugauuccac

SEQ ID NO: 28913 - RNA, 21 nt, Homo sapiens
uacauauuucuuugccuuuau

SEQ ID NO: 28914 - RNA, 11 nt, Homo sapiens
augugcaauaa

SEQ ID NO: 28915 - RNA, 22 nt, Homo sapiens
uauuuuuuaugaaacauuacag

SEQ ID NO: 28916 - RNA, 20 nt, Homo sapiens
uaaucccagcuacuugggag

SEQ ID NO: 28917 - RNA, 16 nt, Homo sapiens
gaauuaacacaugauc

SEQ ID NO: 28918 - RNA, 23 nt, Homo sapiens
aucacuugaacccgggaggcaga

SEQ ID NO: 28919 - RNA, 22 nt, Homo sapiens
uaaaauauuuuuaugugcaaua

SEQ ID NO: 28920 - RNA, 14 nt, Homo sapiens
auuuauuaccucug

SEQ ID NO: 28921 - RNA, 19 nt, Homo sapiens
auucacaagacccaaaagg

SEQ ID NO: 28922 - RNA, 15 nt, Homo sapiens
uggauucaagugauc

SEQ ID NO: 28923 - RNA, 19 nt, Homo sapiens
uggagcuugaaauaguguc

SEQ ID NO: 28924 - RNA, 14 nt, Homo sapiens
ccuuauuguaccuc

SEQ ID NO: 28925 - RNA, 18 nt, Homo sapiens
gaauaaauaaauguaucu

SEQ ID NO: 28926 - RNA, 19 nt, Homo sapiens
aaguuuaugcauacaguaa

SEQ ID NO: 28927 - RNA, 20 nt, Homo sapiens
cuuguugagauccccguguu

SEQ ID NO: 28928 - RNA, 16 nt, Homo sapiens
gaucucacaagcacuu

SEQ ID NO: 28929 - RNA, 19 nt, Homo sapiens
ggcuaagcaaaaugugaua

SEQ ID NO: 28930 - RNA, 18 nt, Homo sapiens
ucaguccaugaagaugua

SEQ ID NO: 28931 - RNA, 19 nt, Homo sapiens
aaguauccuucagccugaa

SEQ ID NO: 28932 - RNA, 19 nt, Homo sapiens
cuacuugggaggcugaggc

SEQ ID NO: 28933 - RNA, 22 nt, Homo sapiens
uccugagaccagccaaccuggg

SEQ ID NO: 28934 - RNA, 23 nt, Homo sapiens
gagcuugaaauagugucugauga

SEQ ID NO: 28935 - RNA, 19 nt, Homo sapiens
cugagcagucagaagaccu

SEQ ID NO: 28936 - RNA, 14 nt, Homo sapiens
acagucacauucca

SEQ ID NO: 28937 - RNA, 23 nt, Homo sapiens
aagaaauucugcaagcuuuucaa

SEQ ID NO: 28938 - RNA, 22 nt, Homo sapiens
aaauauuuuuaugugcaauaaa

SEQ ID NO: 28939 - RNA, 23 nt, Homo sapiens
uuaaaauauuuuuaugugcaaua

SEQ ID NO: 28940 - RNA, 21 nt, Homo sapiens
uuauuaccucugauaccucaa

SEQ ID NO: 28941 - RNA, 12 nt, Homo sapiens
gcagaacaguga

SEQ ID NO: 28942 - RNA, 15 nt, Homo sapiens
caggaaaaucugcac

SEQ ID NO: 28943 - RNA, 22 nt, Homo sapiens
uacucugaagggcaucaugcau

SEQ ID NO: 28944 - RNA, 15 nt, Homo sapiens
auuaaggcuucucuu

SEQ ID NO: 28945 - RNA, 18 nt, Homo sapiens
gagaagaaugacuaugca

SEQ ID NO: 28946 - RNA, 18 nt, Homo sapiens
uguucacuuauugacuau

SEQ ID NO: 28947 - RNA, 13 nt, Homo sapiens
ccuuaaacucagg

SEQ ID NO: 28948 - RNA, 22 nt, Homo sapiens
cuuagacccucaugcugccaau

SEQ ID NO: 28949 - RNA, 21 nt, Homo sapiens
uaagcacuuuaacacaguguc

SEQ ID NO: 28950 - RNA, 20 nt, Homo sapiens
cuggagugcaguggcgcaau

SEQ ID NO: 28951 - RNA, 23 nt, Homo sapiens
cuguaaucccagcacuuugggag

SEQ ID NO: 28952 - RNA, 12 nt, Homo sapiens
ccacuacugcua

SEQ ID NO: 28953 - RNA, 14 nt, Homo sapiens
uaugugauguggca

SEQ ID NO: 28954 - RNA, 12 nt, Homo sapiens
auacagugucuu

SEQ ID NO: 28955 - RNA, 22 nt, Homo sapiens
agacagaaagcagaacagugau

SEQ ID NO: 28956 - RNA, 20 nt, Homo sapiens
ugagagcccuucaugcauuu

SEQ ID NO: 28957 - RNA, 21 nt, Homo sapiens
guuauuuagggaacugcuuga

SEQ ID NO: 28958 - RNA, 16 nt, Homo sapiens
acagugucuggcacuu

SEQ ID NO: 28959 - RNA, 16 nt, Homo sapiens
ugcuaucgccaucaca

SEQ ID NO: 28960 - RNA, 17 nt, Homo sapiens
cuggcacuugggacaaa

SEQ ID NO: 28961 - RNA, 23 nt, Homo sapiens
agaauuuucaaaaucaaauucca

SEQ ID NO: 28962 - RNA, 22 nt, Homo sapiens
augaaaacauagcaucucagga

SEQ ID NO: 28963 - RNA, 13 nt, Homo sapiens
uuacaucuuucac

SEQ ID NO: 28964 - RNA, 17 nt, Homo sapiens
gccugcuggauguggag

SEQ ID NO: 28965 - RNA, 22 nt, Homo sapiens
augugucaggugacccugauga

SEQ ID NO: 28966 - RNA, 18 nt, Homo sapiens
aagguauuuauugagcac

SEQ ID NO: 28967 - RNA, 16 nt, Homo sapiens
caguggcgcaaucuua

SEQ ID NO: 28968 - RNA, 22 nt, Homo sapiens
uuaauaaaccauuuuuacuugg

SEQ ID NO: 28969 - RNA, 17 nt, Homo sapiens
auucacaagacccaaaa

SEQ ID NO: 28970 - RNA, 16 nt, Homo sapiens
cuuuuacauacugcug

SEQ ID NO: 28971 - RNA, 14 nt, Homo sapiens
ugacuggccugcug

SEQ ID NO: 28972 - RNA, 15 nt, Homo sapiens
aucuuguuuuuccac

SEQ ID NO: 28973 - RNA, 18 nt, Homo sapiens
gguauauaaauuuuccca

SEQ ID NO: 28974 - RNA, 17 nt, Homo sapiens
aauauuugcaagacaua

SEQ ID NO: 28975 - RNA, 20 nt, Homo sapiens
cagagaaaauaaaagcacuu

SEQ ID NO: 28976 - RNA, 14 nt, Homo sapiens
ugagcgacagugag

SEQ ID NO: 28977 - RNA, 14 nt, Homo sapiens
aauuaacacaugau

SEQ ID NO: 28978 - RNA, 23 nt, Homo sapiens
cuacucuguuccuucacauccug

SEQ ID NO: 28979 - RNA, 19 nt, Homo sapiens
uccauugguuuaccuguga

SEQ ID NO: 28980 - RNA, 20 nt, Homo sapiens
aggcuggagugcaguggcgc

SEQ ID NO: 28981 - RNA, 14 nt, Homo sapiens
cucuucacagucac

SEQ ID NO: 28982 - RNA, 13 nt, Homo sapiens
aaugaauggcuaa

SEQ ID NO: 28983 - RNA, 22 nt, Homo sapiens
uguuagcaaaauggauaugaca

SEQ ID NO: 28984 - RNA, 22 nt, Homo sapiens
cccccauuguggucacaggaag

SEQ ID NO: 28985 - RNA, 13 nt, Homo sapiens
gcgugcaggcagc

SEQ ID NO: 28986 - RNA, 18 nt, Homo sapiens
uucugucuggacuuucca

SEQ ID NO: 28987 - RNA, 21 nt, Homo sapiens
uuauaagugaagugauacuau

SEQ ID NO: 28988 - RNA, 15 nt, Homo sapiens
uauuacgugcaauac

SEQ ID NO: 28989 - RNA, 12 nt, Homo sapiens
gggcgcgguggc

SEQ ID NO: 28990 - RNA, 19 nt, Homo sapiens
acaagacccaaaaggcaga

SEQ ID NO: 28991 - RNA, 18 nt, Homo sapiens
uucccugaccucccucua

SEQ ID NO: 28992 - RNA, 13 nt, Homo sapiens
uccaaauucacaa

SEQ ID NO: 28993 - RNA, 20 nt, Homo sapiens
aaaacucauuuccuauguaa

SEQ ID NO: 28994 - RNA, 15 nt, Homo sapiens
uuuccaaauucacaa

SEQ ID NO: 28995 - RNA, 14 nt, Homo sapiens
uaaaguacagacuu

SEQ ID NO: 28996 - RNA, 20 nt, Homo sapiens
uucugcccugcuuuugcuag

SEQ ID NO: 28997 - RNA, 21 nt, Homo sapiens
ugaauaaaguguaaguucaca

SEQ ID NO: 28998 - RNA, 17 nt, Homo sapiens
uaucuuguuuuuccacu

SEQ ID NO: 28999 - RNA, 16 nt, Homo sapiens
cugacuaauuaggcaa

SEQ ID NO: 29000 - RNA, 12 nt, Homo sapiens
cagccaaccugg

SEQ ID NO: 29001 - RNA, 21 nt, Homo sapiens
ccucaguuuccugaccuauga

SEQ ID NO: 29002 - RNA, 17 nt, Homo sapiens
uggguuguguguuuauu

SEQ ID NO: 29003 - RNA, 15 nt, Homo sapiens
gaagcuuccauucca

SEQ ID NO: 29004 - RNA, 22 nt, Homo sapiens
acaguuuucugcuuuaauuuca

SEQ ID NO: 29005 - RNA, 20 nt, Homo sapiens
aguuaggcuauucacaacca

SEQ ID NO: 29006 - RNA, 16 nt, Homo sapiens
aaagcagaacagugau

SEQ ID NO: 29007 - RNA, 21 nt, Homo sapiens
acaaaaaaagcauuguaacuu

SEQ ID NO: 29008 - RNA, 15 nt, Homo sapiens
auaagcuguuuuuau

SEQ ID NO: 29009 - RNA, 21 nt, Homo sapiens
agaaugauuuuacggagauau

SEQ ID NO: 29010 - RNA, 19 nt, Homo sapiens
cacuuuaacacagugucug

SEQ ID NO: 29011 - RNA, 21 nt, Homo sapiens
ucaauucuauuacgugcaaua

SEQ ID NO: 29012 - RNA, 16 nt, Homo sapiens
gaggcugaggcaagag

SEQ ID NO: 29013 - RNA, 14 nt, Homo sapiens
uauauccugugacu

SEQ ID NO: 29014 - RNA, 12 nt, Homo sapiens
aaagccaaaaac

SEQ ID NO: 29015 - RNA, 17 nt, Homo sapiens
gacgggguuugccaugc

SEQ ID NO: 29016 - RNA, 16 nt, Homo sapiens
uccugagaccagccaa

SEQ ID NO: 29017 - RNA, 17 nt, Homo sapiens
gcucugggauagcugac

SEQ ID NO: 29018 - RNA, 16 nt, Homo sapiens
auggcuaguaucaaaa

SEQ ID NO: 29019 - RNA, 14 nt, Homo sapiens
caucuuggucacau

SEQ ID NO: 29020 - RNA, 16 nt, Homo sapiens
aucuaauauauaugaa

SEQ ID NO: 29021 - RNA, 19 nt, Homo sapiens
agaauugcuugaacccagg

SEQ ID NO: 29022 - RNA, 21 nt, Homo sapiens
uuaaacucagggagcauuuau

SEQ ID NO: 29023 - RNA, 16 nt, Homo sapiens
uuaugaaacauuacag

SEQ ID NO: 29024 - RNA, 14 nt, Homo sapiens
aucaccaaggcuga

SEQ ID NO: 29025 - RNA, 14 nt, Homo sapiens
ugcagaagacagua

SEQ ID NO: 29026 - RNA, 20 nt, Homo sapiens
agacaccaccacccuugcca

SEQ ID NO: 29027 - RNA, 21 nt, Homo sapiens
cuaagaagugaaaaucuacac

SEQ ID NO: 29028 - RNA, 16 nt, Homo sapiens
uuauuuuuacaguucu

SEQ ID NO: 29029 - RNA, 14 nt, Homo sapiens
auaaauggacaaau

SEQ ID NO: 29030 - RNA, 13 nt, Homo sapiens
caaaucucuauua

SEQ ID NO: 29031 - RNA, 16 nt, Homo sapiens
gucucaguccaugaag

SEQ ID NO: 29032 - RNA, 17 nt, Homo sapiens
cucuggcgacaguuuuc

SEQ ID NO: 29033 - RNA, 22 nt, Homo sapiens
gaagaguggguuucacaaguga

SEQ ID NO: 29034 - RNA, 16 nt, Homo sapiens
caaaauggauaugaca

SEQ ID NO: 29035 - RNA, 19 nt, Homo sapiens
uaagugaaauaagccagac

SEQ ID NO: 29036 - RNA, 19 nt, Homo sapiens
acagccaggcggcuggaau

SEQ ID NO: 29037 - RNA, 21 nt, Homo sapiens
cuugagaaaccuuauuguacc

SEQ ID NO: 29038 - RNA, 16 nt, Homo sapiens
gaaucccuuaaacuca

SEQ ID NO: 29039 - RNA, 18 nt, Homo sapiens
acugaauguaaacaaagg

SEQ ID NO: 29040 - RNA, 14 nt, Homo sapiens
cucacaagcacuuu

SEQ ID NO: 29041 - RNA, 15 nt, Homo sapiens
auauccugugacugu

SEQ ID NO: 29042 - RNA, 17 nt, Homo sapiens
gaaugagaagaaugacu

SEQ ID NO: 29043 - RNA, 14 nt, Homo sapiens
uacaucuuucacau

SEQ ID NO: 29044 - RNA, 20 nt, Homo sapiens
aggaaauauucuguaaucuu

SEQ ID NO: 29045 - RNA, 14 nt, Homo sapiens
gcagggacuugaac

SEQ ID NO: 29046 - RNA, 17 nt, Homo sapiens
aggauagagugggacag

SEQ ID NO: 29047 - RNA, 22 nt, Homo sapiens
gagacaccaccacccuugccau

SEQ ID NO: 29048 - RNA, 19 nt, Homo sapiens
gaagaaauuccaggaaaau

SEQ ID NO: 29049 - RNA, 17 nt, Homo sapiens
agaggagaaacuggaac

SEQ ID NO: 29050 - RNA, 21 nt, Homo sapiens
uccugguuccuaggugagcag

SEQ ID NO: 29051 - RNA, 12 nt, Homo sapiens
uuucugcuuuaa

SEQ ID NO: 29052 - RNA, 19 nt, Homo sapiens
uaguuguaccgcaauguga

SEQ ID NO: 29053 - RNA, 18 nt, Homo sapiens
guucuucuuggucucagu

SEQ ID NO: 29054 - RNA, 20 nt, Homo sapiens
cuagcaaauguuaugcauaa

SEQ ID NO: 29055 - RNA, 17 nt, Homo sapiens
ucacauuccaagccuca

SEQ ID NO: 29056 - RNA, 17 nt, Homo sapiens
cuguaaaauggagacac

SEQ ID NO: 29057 - RNA, 21 nt, Homo sapiens
gugaccugacagcccaagggu

SEQ ID NO: 29058 - RNA, 22 nt, Homo sapiens
gccuggaucucacaagcacuuu

SEQ ID NO: 29059 - RNA, 17 nt, Homo sapiens
augaggaauauuugcaa

SEQ ID NO: 29060 - RNA, 13 nt, Homo sapiens
uagaauuuauuca

SEQ ID NO: 29061 - RNA, 15 nt, Homo sapiens
gacuggccugcugga

SEQ ID NO: 29062 - RNA, 19 nt, Homo sapiens
acagugagacucugucuca

SEQ ID NO: 29063 - RNA, 17 nt, Homo sapiens
caaggcuggagugcagu

SEQ ID NO: 29064 - RNA, 18 nt, Homo sapiens
uauuuaaagacaaagaca

SEQ ID NO: 29065 - RNA, 14 nt, Homo sapiens
cacccuugccaugg

SEQ ID NO: 29066 - RNA, 21 nt, Homo sapiens
gaggcauuugcagcugugcca

SEQ ID NO: 29067 - RNA, 13 nt, Homo sapiens
uaaguaauuucag

SEQ ID NO: 29068 - RNA, 19 nt, Homo sapiens
cuuuucaaaauuggacuua

SEQ ID NO: 29069 - RNA, 14 nt, Homo sapiens
cuuauuguaccucu

SEQ ID NO: 29070 - RNA, 15 nt, Homo sapiens
acaaugaacacuuau

SEQ ID NO: 29071 - RNA, 16 nt, Homo sapiens
aauagugucugaugaa

SEQ ID NO: 29072 - RNA, 16 nt, Homo sapiens
cuucaugcauuugcac

SEQ ID NO: 29073 - RNA, 11 nt, Homo sapiens
aaaagacauaa

SEQ ID NO: 29074 - RNA, 20 nt, Homo sapiens
cauauguuuuuguaaguuua

SEQ ID NO: 29075 - RNA, 12 nt, Homo sapiens
agcgacagugag

SEQ ID NO: 29076 - RNA, 18 nt, Homo sapiens
ugauuccaccuacaugag

SEQ ID NO: 29077 - RNA, 12 nt, Homo sapiens
cggaacaguauc

SEQ ID NO: 29078 - RNA, 18 nt, Homo sapiens
accaccacccuugccaug

SEQ ID NO: 29079 - RNA, 16 nt, Homo sapiens
aguuaagcaacaucua

SEQ ID NO: 29080 - RNA, 22 nt, Homo sapiens
gagcaagacucugucucaaaaa

SEQ ID NO: 29081 - RNA, 12 nt, Homo sapiens
ugacaacuguga

SEQ ID NO: 29082 - RNA, 19 nt, Homo sapiens
ugaaaagauuaugaucuca

SEQ ID NO: 29083 - RNA, 19 nt, Homo sapiens
ccagugagacagcucugca

SEQ ID NO: 29084 - RNA, 23 nt, Homo sapiens
aauauuguugacaacugugacug

SEQ ID NO: 29085 - RNA, 16 nt, Homo sapiens
cacagcugaacuuguu

SEQ ID NO: 29086 - RNA, 15 nt, Homo sapiens
agcagaacagugauu

SEQ ID NO: 29087 - RNA, 18 nt, Homo sapiens
cucugggucucagugucc

SEQ ID NO: 29088 - RNA, 12 nt, Homo sapiens
uaacuagaauuu

SEQ ID NO: 29089 - RNA, 21 nt, Homo sapiens
ucaucuguaaaauggagacac

SEQ ID NO: 29090 - RNA, 20 nt, Homo sapiens
aaucugagccagugcuuuaa

SEQ ID NO: 29091 - RNA, 14 nt, Homo sapiens
accagccaaccugg

SEQ ID NO: 29092 - RNA, 17 nt, Homo sapiens
aguaacggaacaguauc

SEQ ID NO: 29093 - RNA, 21 nt, Homo sapiens
gccuggaucucacaagcacuu

SEQ ID NO: 29094 - RNA, 12 nt, Homo sapiens
aacccugucucu

SEQ ID NO: 29095 - RNA, 18 nt, Homo sapiens
caagugaaaaacauccag

SEQ ID NO: 29096 - RNA, 15 nt, Homo sapiens
cuugggcaggucaca

SEQ ID NO: 29097 - RNA, 17 nt, Homo sapiens
gaaauagugucugauga

SEQ ID NO: 29098 - RNA, 22 nt, Homo sapiens
gaccaauaaccaugcccaagaa

SEQ ID NO: 29099 - RNA, 22 nt, Homo sapiens
auucaccuuccagugucucgga

SEQ ID NO: 29100 - RNA, 15 nt, Homo sapiens
ucagacagaacuuga

SEQ ID NO: 29101 - RNA, 22 nt, Homo sapiens
aagagaauauuagcuuuacugu

SEQ ID NO: 29102 - RNA, 15 nt, Homo sapiens
cuucauguacaucca

SEQ ID NO: 29103 - RNA, 12 nt, Homo sapiens
ucccuuuuacau

SEQ ID NO: 29104 - RNA, 13 nt, Homo sapiens
aguacagacuuuu

SEQ ID NO: 29105 - RNA, 17 nt, Homo sapiens
auccugugacugucuca

SEQ ID NO: 29106 - RNA, 13 nt, Homo sapiens
uccuucagccuga

SEQ ID NO: 29107 - RNA, 23 nt, Homo sapiens
gaggauguguggcauuuucacuu

SEQ ID NO: 29108 - RNA, 18 nt, Homo sapiens
cgaaugguuccauucucu

SEQ ID NO: 29109 - RNA, 18 nt, Homo sapiens
gcaggauagagugggaca

SEQ ID NO: 29110 - RNA, 14 nt, Homo sapiens
aaacaguagugaua

SEQ ID NO: 29111 - RNA, 16 nt, Homo sapiens
auuuuucucuaacuca

SEQ ID NO: 29112 - RNA, 15 nt, Homo sapiens
ggagaaucacuugaa

SEQ ID NO: 29113 - RNA, 16 nt, Homo sapiens
ggaguggcauguauga

SEQ ID NO: 29114 - RNA, 10 nt, Homo sapiens
cauacugcug

SEQ ID NO: 29115 - RNA, 17 nt, Homo sapiens
cuggacuuuccagagac

SEQ ID NO: 29116 - RNA, 21 nt, Homo sapiens
gaugccccagggaccuuugua

SEQ ID NO: 29117 - RNA, 15 nt, Homo sapiens
aaucccagcuacuug

SEQ ID NO: 29118 - RNA, 21 nt, Homo sapiens
gugcuuuccguggcacugcau

SEQ ID NO: 29119 - RNA, 15 nt, Homo sapiens
uauccugugacuguc

SEQ ID NO: 29120 - RNA, 21 nt, Homo sapiens
uaaauaaauguaucuuauuca

SEQ ID NO: 29121 - RNA, 18 nt, Homo sapiens
ggaguuaggcuauucaca

SEQ ID NO: 29122 - RNA, 11 nt, Homo sapiens
aaugugcaaua

SEQ ID NO: 29123 - RNA, 15 nt, Homo sapiens
auaguuguaccgcaa

SEQ ID NO: 29124 - RNA, 17 nt, Homo sapiens
auuuauuaccucugaua

SEQ ID NO: 29125 - RNA, 23 nt, Homo sapiens
aggcuggucucgaacugcuggau

SEQ ID NO: 29126 - RNA, 16 nt, Homo sapiens
uuuuuaugugcaauaa

SEQ ID NO: 29127 - RNA, 15 nt, Homo sapiens
ucucacaagcacuuu

SEQ ID NO: 29128 - RNA, 20 nt, Homo sapiens
gugauuacccucugggucuc

SEQ ID NO: 29129 - RNA, 23 nt, Homo sapiens
gaugaaaacauagcaucucagga

SEQ ID NO: 29130 - RNA, 14 nt, Homo sapiens
gugaaauaagccag

SEQ ID NO: 29131 - RNA, 18 nt, Homo sapiens
caagugauccgcccaucu

SEQ ID NO: 29132 - RNA, 14 nt, Homo sapiens
aaauaaaagcacuu

SEQ ID NO: 29133 - RNA, 20 nt, Homo sapiens
cuggaucucacaagcacuuu

SEQ ID NO: 29134 - RNA, 22 nt, Homo sapiens
gaaagcuguggccagcuuguua

SEQ ID NO: 29135 - RNA, 15 nt, Homo sapiens
agccaccaaacccgg

SEQ ID NO: 29136 - RNA, 14 nt, Homo sapiens
acccaaaguaucag

SEQ ID NO: 29137 - RNA, 16 nt, Homo sapiens
auuuuaaguaauuuca

SEQ ID NO: 29138 - RNA, 13 nt, Homo sapiens
aggucuccaaaau

SEQ ID NO: 29139 - RNA, 14 nt, Homo sapiens
auuuauugagcacc

SEQ ID NO: 29140 - RNA, 21 nt, Homo sapiens
gaacugcuggauucaagugau

SEQ ID NO: 29141 - RNA, 15 nt, Homo sapiens
caggcuccaaacugg

SEQ ID NO: 29142 - RNA, 15 nt, Homo sapiens
gcaggcgugaccuga

SEQ ID NO: 29143 - RNA, 14 nt, Homo sapiens
gcugcucugugguc

SEQ ID NO: 29144 - RNA, 19 nt, Homo sapiens
gguauuuauugagcaccug

SEQ ID NO: 29145 - RNA, 18 nt, Homo sapiens
guuuaaugggcacagggu

SEQ ID NO: 29146 - RNA, 18 nt, Homo sapiens
ccaaacuggagcuugaaa

SEQ ID NO: 29147 - RNA, 18 nt, Homo sapiens
uaauuuuaaguaauuuca

SEQ ID NO: 29148 - RNA, 16 nt, Homo sapiens
uuccuuaucacugaca

SEQ ID NO: 29149 - RNA, 13 nt, Homo sapiens
uuuaaagggaugg

SEQ ID NO: 29150 - RNA, 20 nt, Homo sapiens
uuguucccaaauuucauacc

SEQ ID NO: 29151 - RNA, 16 nt, Homo sapiens
uuguuuaaaaucauuu

SEQ ID NO: 29152 - RNA, 14 nt, Homo sapiens
uuguuuucauuauc

SEQ ID NO: 29153 - RNA, 18 nt, Homo sapiens
uggaauauguaaauagaa

SEQ ID NO: 29154 - RNA, 16 nt, Homo sapiens
uggacuuaaaaucuaa

SEQ ID NO: 29155 - RNA, 21 nt, Homo sapiens
uguuaaaagaugaaaauauuu

SEQ ID NO: 29156 - RNA, 17 nt, Homo sapiens
uguacauuuccaaauuc

SEQ ID NO: 29157 - RNA, 18 nt, Homo sapiens
uguacauuuccaaauuca

SEQ ID NO: 29158 - RNA, 23 nt, Homo sapiens
uggggguaauaagagcaguagca

SEQ ID NO: 29159 - RNA, 21 nt, Homo sapiens
ucuggaaaccacauggcuuca

SEQ ID NO: 29160 - RNA, 23 nt, Homo sapiens
ucugcccugcuuuugcuagguca

SEQ ID NO: 29161 - RNA, 22 nt, Homo sapiens
ucugaagaguggguuucacaag

SEQ ID NO: 29162 - RNA, 15 nt, Homo sapiens
ucuaaguaaaaccac

SEQ ID NO: 29163 - RNA, 13 nt, Homo sapiens
ucucuaacucaga

SEQ ID NO: 29164 - RNA, 13 nt, Homo sapiens
uccuuccuuauca

SEQ ID NO: 29165 - RNA, 15 nt, Homo sapiens
uccuucugcccugcu

SEQ ID NO: 29166 - RNA, 16 nt, Homo sapiens
uccuucugcccugcuu

SEQ ID NO: 29167 - RNA, 12 nt, Homo sapiens
ucccugagcagg

SEQ ID NO: 29168 - RNA, 13 nt, Homo sapiens
ucccugagcagga

SEQ ID NO: 29169 - RNA, 16 nt, Homo sapiens
ugcuacaaaaacacag

SEQ ID NO: 29170 - RNA, 17 nt, Homo sapiens
ugaacacaucagcuugc

SEQ ID NO: 29171 - RNA, 22 nt, Homo sapiens
uccaaagcugaauacauucugc

SEQ ID NO: 29172 - RNA, 14 nt, Homo sapiens
uccaaauucacaag

SEQ ID NO: 29173 - RNA, 17 nt, Homo sapiens
ucaguccucuuucaaag

SEQ ID NO: 29174 - RNA, 18 nt, Homo sapiens
ucaguccucuuucaaagg

SEQ ID NO: 29175 - RNA, 17 nt, Homo sapiens
ucccaaauuucauaccu

SEQ ID NO: 29176 - RNA, 17 nt, Homo sapiens
ucagaucauuucaaaac

SEQ ID NO: 29177 - RNA, 21 nt, Homo sapiens
uaaaaaaaaaaaaaaagccaa

SEQ ID NO: 29178 - RNA, 15 nt, Homo sapiens
guuuaaaaucauuuc

SEQ ID NO: 29179 - RNA, 20 nt, Homo sapiens
uaucuuguuuuuccacuacu

SEQ ID NO: 29180 - RNA, 17 nt, Homo sapiens
uacucuguuccuucaca

SEQ ID NO: 29181 - RNA, 21 nt, Homo sapiens
uaccugugaaauaguucaaag

SEQ ID NO: 29182 - RNA, 16 nt, Homo sapiens
gugggagaauucuuac

SEQ ID NO: 29183 - RNA, 15 nt, Homo sapiens
gucacuagggcaggg

SEQ ID NO: 29184 - RNA, 15 nt, Homo sapiens
guccaagcauaccaa

SEQ ID NO: 29185 - RNA, 15 nt, Homo sapiens
gugaacacaucagcu

SEQ ID NO: 29186 - RNA, 22 nt, Homo sapiens
gucugaaauuuucuagaauacu

SEQ ID NO: 29187 - RNA, 21 nt, Homo sapiens
gucuuaauuaaaagaauauuu

SEQ ID NO: 29188 - RNA, 13 nt, Homo sapiens
ggucggguuuuau

SEQ ID NO: 29189 - RNA, 20 nt, Homo sapiens
gcuacucuguuccuucacau

SEQ ID NO: 29190 - RNA, 13 nt, Homo sapiens
gcucccuggaaga

SEQ ID NO: 29191 - RNA, 14 nt, Homo sapiens
gcucaacauaacau

SEQ ID NO: 29192 - RNA, 12 nt, Homo sapiens
gcuguauucuuc

SEQ ID NO: 29193 - RNA, 19 nt, Homo sapiens
gcugauugucugaaauuuu

SEQ ID NO: 29194 - RNA, 10 nt, Homo sapiens
ggcaucaugc

SEQ ID NO: 29195 - RNA, 21 nt, Homo sapiens
ggcaguuuuccauugguuuac

SEQ ID NO: 29196 - RNA, 15 nt, Homo sapiens
ggaacauaaaauaca

SEQ ID NO: 29197 - RNA, 16 nt, Homo sapiens
ggauaugagauguagc

SEQ ID NO: 29198 - RNA, 16 nt, Homo sapiens
gcaucucugaacauuu

SEQ ID NO: 29199 - RNA, 13 nt, Homo sapiens
gcauaaagucagu

SEQ ID NO: 29200 - RNA, 13 nt, Homo sapiens
gcaguagcagcag

SEQ ID NO: 29201 - RNA, 12 nt, Homo sapiens
gccagcaaauuc

SEQ ID NO: 29202 - RNA, 13 nt, Homo sapiens
gccagcaaauucg

SEQ ID NO: 29203 - RNA, 17 nt, Homo sapiens
gccuugguauagcauau

SEQ ID NO: 29204 - RNA, 17 nt, Homo sapiens
gccuugcuccuggcugg

SEQ ID NO: 29205 - RNA, 16 nt, Homo sapiens
gccuagcccacuggcu

SEQ ID NO: 29206 - RNA, 19 nt, Homo sapiens
gccuagcccacuggcuccc

SEQ ID NO: 29207 - RNA, 18 nt, Homo sapiens
gaucauuucaaaacucau

SEQ ID NO: 29208 - RNA, 21 nt, Homo sapiens
gauccccguguuacugccuau

SEQ ID NO: 29209 - RNA, 14 nt, Homo sapiens
gauaucccaggaaa

SEQ ID NO: 29210 - RNA, 10 nt, Homo sapiens
gagcaaaagu

SEQ ID NO: 29211 - RNA, 12 nt, Homo sapiens
gagcaguagcag

SEQ ID NO: 29212 - RNA, 14 nt, Homo sapiens
gcaaaugagccgga

SEQ ID NO: 29213 - RNA, 19 nt, Homo sapiens
gcaaaugagccggagcccc

SEQ ID NO: 29214 - RNA, 17 nt, Homo sapiens
gcaaauuccaauacauu

SEQ ID NO: 29215 - RNA, 22 nt, Homo sapiens
gauucccugagcaggauuuuaa

SEQ ID NO: 29216 - RNA, 23 nt, Homo sapiens
gauggguuugacaagguucuucc

SEQ ID NO: 29217 - RNA, 15 nt, Homo sapiens
gcacacagugcuuuc

SEQ ID NO: 29218 - RNA, 16 nt, Homo sapiens
gcacacagugcuuucc

SEQ ID NO: 29219 - RNA, 16 nt, Homo sapiens
gcacuaaucaauacuu

SEQ ID NO: 29220 - RNA, 13 nt, Homo sapiens
gaacacaucagcu

SEQ ID NO: 29221 - RNA, 14 nt, Homo sapiens
gaacacaucagcuu

SEQ ID NO: 29222 - RNA, 21 nt, Homo sapiens
gaaaugacuaaaaaacaaaga

SEQ ID NO: 29223 - RNA, 20 nt, Homo sapiens
gaauuuuucucuaacucaga

SEQ ID NO: 29224 - RNA, 14 nt, Homo sapiens
gagacagcaggucu

SEQ ID NO: 29225 - RNA, 15 nt, Homo sapiens
gacccccaucccaug

SEQ ID NO: 29226 - RNA, 16 nt, Homo sapiens
gacccccaucccaugg

SEQ ID NO: 29227 - RNA, 22 nt, Homo sapiens
gacauguuuacaaaccucaagc

SEQ ID NO: 29228 - RNA, 18 nt, Homo sapiens
auguagauaaacucagaa

SEQ ID NO: 29229 - RNA, 19 nt, Homo sapiens
auguagauaaacucagaaa

SEQ ID NO: 29230 - RNA, 14 nt, Homo sapiens
auucaaaaguugaa

SEQ ID NO: 29231 - RNA, 18 nt, Homo sapiens
auucaaacuaauagaauu

SEQ ID NO: 29232 - RNA, 23 nt, Homo sapiens
auggggguaauaagagcaguagc

SEQ ID NO: 29233 - RNA, 16 nt, Homo sapiens
caaaugacccccaucc

SEQ ID NO: 29234 - RNA, 13 nt, Homo sapiens
caacacgagcagg

SEQ ID NO: 29235 - RNA, 14 nt, Homo sapiens
caacacgagcaggc

SEQ ID NO: 29236 - RNA, 16 nt, Homo sapiens
caacauuaaaacaaua

SEQ ID NO: 29237 - RNA, 18 nt, Homo sapiens
caaccacucauucaaaag

SEQ ID NO: 29238 - RNA, 13 nt, Homo sapiens
caaucaucaaccc

SEQ ID NO: 29239 - RNA, 14 nt, Homo sapiens
caaagacaaauucu

SEQ ID NO: 29240 - RNA, 19 nt, Homo sapiens
auuuuccuggacaguuuuc

SEQ ID NO: 29241 - RNA, 22 nt, Homo sapiens
caaaaacacagcaagggugaug

SEQ ID NO: 29242 - RNA, 23 nt, Homo sapiens
caaaaacacagcaagggugaugg

SEQ ID NO: 29243 - RNA, 24 nt, Homo sapiens
caaaaacacagcaagggugauggg

SEQ ID NO: 29244 - RNA, 13 nt, Homo sapiens
cacaucagcuugc

SEQ ID NO: 29245 - RNA, 20 nt, Homo sapiens
cacuagcuaauaucaauaga

SEQ ID NO: 29246 - RNA, 13 nt, Homo sapiens
cacuagggcaggg

SEQ ID NO: 29247 - RNA, 13 nt, Homo sapiens
auacuaauaaaau

SEQ ID NO: 29248 - RNA, 12 nt, Homo sapiens
auacaaucauca

SEQ ID NO: 29249 - RNA, 13 nt, Homo sapiens
auaaauuuuccca

SEQ ID NO: 29250 - RNA, 13 nt, Homo sapiens
auacaaucaucaa

SEQ ID NO: 29251 - RNA, 13 nt, Homo sapiens
auccaaagcugaa

SEQ ID NO: 29252 - RNA, 20 nt, Homo sapiens
auccccguguuacugccuau

SEQ ID NO: 29253 - RNA, 13 nt, Homo sapiens
aucauaugggaua

SEQ ID NO: 29254 - RNA, 19 nt, Homo sapiens
agcuugaaacugagaugug

SEQ ID NO: 29255 - RNA, 20 nt, Homo sapiens
agcuugaaacugagauguga

SEQ ID NO: 29256 - RNA, 20 nt, Homo sapiens
aggucacagaggaucugcuu

SEQ ID NO: 29257 - RNA, 17 nt, Homo sapiens
agggauggcaagaugug

SEQ ID NO: 29258 - RNA, 19 nt, Homo sapiens
agggauggcaagauguggg

SEQ ID NO: 29259 - RNA, 14 nt, Homo sapiens
aguagauuaagaga

SEQ ID NO: 29260 - RNA, 12 nt, Homo sapiens
aguagcagcagc

SEQ ID NO: 29261 - RNA, 15 nt, Homo sapiens
aguagcagcagcauc

SEQ ID NO: 29262 - RNA, 15 nt, Homo sapiens
acugcacugucaaga

SEQ ID NO: 29263 - RNA, 20 nt, Homo sapiens
acugcacugucaagaugaug

SEQ ID NO: 29264 - RNA, 18 nt, Homo sapiens
uuuaaaauuaaagcuaaa

SEQ ID NO: 29265 - RNA, 11 nt, Homo sapiens
agauagcaggg

SEQ ID NO: 29266 - RNA, 22 nt, Homo sapiens
agcauuguaaaugugcuuuuaa

SEQ ID NO: 29267 - RNA, 12 nt, Homo sapiens
agccaaaaacca

SEQ ID NO: 29268 - RNA, 15 nt, Homo sapiens
agcaucucugaacau

SEQ ID NO: 29269 - RNA, 17 nt, Homo sapiens
agcaugggccuagccca

SEQ ID NO: 29270 - RNA, 12 nt, Homo sapiens
agaagagaauau

SEQ ID NO: 29271 - RNA, 19 nt, Homo sapiens
acuguuuggauaugagaug

SEQ ID NO: 29272 - RNA, 12 nt, Homo sapiens
agaggcagcuug

SEQ ID NO: 29273 - RNA, 12 nt, Homo sapiens
acacgagcaggc

SEQ ID NO: 29274 - RNA, 16 nt, Homo sapiens
acacucaaaucaagaa

SEQ ID NO: 29275 - RNA, 12 nt, Homo sapiens
uugcaaccccau

SEQ ID NO: 29276 - RNA, 15 nt, Homo sapiens
acagaagagugacau

SEQ ID NO: 29277 - RNA, 14 nt, Homo sapiens
accccaucauccuc

SEQ ID NO: 29278 - RNA, 14 nt, Homo sapiens
acauuggcuauuua

SEQ ID NO: 29279 - RNA, 20 nt, Homo sapiens
accacagcaguugaaaagac

SEQ ID NO: 29280 - RNA, 19 nt, Homo sapiens
uguacauuuccaaauucac

SEQ ID NO: 29281 - RNA, 20 nt, Homo sapiens
uguuaaaagaugaaaauauu

SEQ ID NO: 29282 - RNA, 21 nt, Homo sapiens
uggcgacaguuuuccuucuca

SEQ ID NO: 29283 - RNA, 20 nt, Homo sapiens
cgcaggcccccaggugccag

SEQ ID NO: 29284 - RNA, 17 nt, Homo sapiens
cuaaaaaacaaagaaga

SEQ ID NO: 29285 - RNA, 11 nt, Homo sapiens
cggagauaucc

SEQ ID NO: 29286 - RNA, 21 nt, Homo sapiens
cggagccccuugggcagguca

SEQ ID NO: 29287 - RNA, 16 nt, Homo sapiens
cuacucuguuccuuca

SEQ ID NO: 29288 - RNA, 13 nt, Homo sapiens
cuauauuaucaug

SEQ ID NO: 29289 - RNA, 19 nt, Homo sapiens
cuaauaaaauacauacuau

SEQ ID NO: 29290 - RNA, 16 nt, Homo sapiens
cuacaaaaacacagca

SEQ ID NO: 29291 - RNA, 11 nt, Homo sapiens
cucaaaacugc

SEQ ID NO: 29292 - RNA, 18 nt, Homo sapiens
cucaaaauaccaugccau

SEQ ID NO: 29293 - RNA, 17 nt, Homo sapiens
cucagaaacaucaguua

SEQ ID NO: 29294 - RNA, 17 nt, Homo sapiens
cuuccauuuggaaucau

SEQ ID NO: 29295 - RNA, 15 nt, Homo sapiens
cuuggacucauuuua

SEQ ID NO: 29296 - RNA, 13 nt, Homo sapiens
cuuauuucauuuc

SEQ ID NO: 29297 - RNA, 16 nt, Homo sapiens
cuuccuuaucacugac

SEQ ID NO: 29298 - RNA, 21 nt, Homo sapiens
cuucuaaguaaaaccacagca

SEQ ID NO: 29299 - RNA, 19 nt, Homo sapiens
cugucccugcagacaugag

SEQ ID NO: 29300 - RNA, 15 nt, Homo sapiens
cugugaaauaguuca

SEQ ID NO: 29301 - RNA, 14 nt, Homo sapiens
cuguuaaaagauga

SEQ ID NO: 29302 - RNA, 15 nt, Homo sapiens
cuguuaaaagaugaa

SEQ ID NO: 29303 - RNA, 23 nt, Homo sapiens
cugucccagcgagggacaccgag

SEQ ID NO: 29304 - RNA, 16 nt, Homo sapiens
cuggauuugcaacccc

SEQ ID NO: 29305 - RNA, 20 nt, Homo sapiens
cuggauuugcaaccccauca

SEQ ID NO: 29306 - RNA, 21 nt, Homo sapiens
cuggcucccuggaagagauca

SEQ ID NO: 29307 - RNA, 17 nt, Homo sapiens
cugcacugucaagauga

SEQ ID NO: 29308 - RNA, 18 nt, Homo sapiens
cugcacugucaagaugau

SEQ ID NO: 29309 - RNA, 16 nt, Homo sapiens
cugauuuuccuggaca

SEQ ID NO: 29310 - RNA, 11 nt, Homo sapiens
cugcaucagcu

SEQ ID NO: 29311 - RNA, 12 nt, Homo sapiens
cugcaucagcug

SEQ ID NO: 29312 - RNA, 21 nt, Homo sapiens
cugcuacucuguuccuucaca

SEQ ID NO: 29313 - RNA, 14 nt, Homo sapiens
cugcuuucaucuug

SEQ ID NO: 29314 - RNA, 11 nt, Homo sapiens
cucgaaucacu

SEQ ID NO: 29315 - RNA, 21 nt, Homo sapiens
cucauuuuuguuuucauuauc

SEQ ID NO: 29316 - RNA, 21 nt, Homo sapiens
ccuguuaaaagaugaaaauau

SEQ ID NO: 29317 - RNA, 22 nt, Homo sapiens
ccguguuacugccuaucagcau

SEQ ID NO: 29318 - RNA, 16 nt, Homo sapiens
ccuaaguuucaguuga

SEQ ID NO: 29319 - RNA, 11 nt, Homo sapiens
ccacucauuca

SEQ ID NO: 29320 - RNA, 15 nt, Homo sapiens
ccagccuugcuccug

SEQ ID NO: 29321 - RNA, 16 nt, Homo sapiens
ccagccuugcuccugg

SEQ ID NO: 29322 - RNA, 21 nt, Homo sapiens
ccauggggguaauaagagcag

SEQ ID NO: 29323 - RNA, 22 nt, Homo sapiens
cccaagggaguuaggcuauuca

SEQ ID NO: 29324 - RNA, 11 nt, Homo sapiens
cccucaagaca

SEQ ID NO: 29325 - RNA, 12 nt, Homo sapiens
cccucaagacaa

SEQ ID NO: 29326 - RNA, 14 nt, Homo sapiens
ccgaaacuaccagc

SEQ ID NO: 29327 - RNA, 15 nt, Homo sapiens
ccgaaacuaccagcc

SEQ ID NO: 29328 - RNA, 19 nt, Homo sapiens
cauguuuucuuugcuuuaa

SEQ ID NO: 29329 - RNA, 13 nt, Homo sapiens
cauuccauuugcu

SEQ ID NO: 29330 - RNA, 21 nt, Homo sapiens
cauuauuggacuuccauuugg

SEQ ID NO: 29331 - RNA, 20 nt, Homo sapiens
cauuugcgaaugguuccauu

SEQ ID NO: 29332 - RNA, 20 nt, Homo sapiens
ccacaacuauauuaucaugc

SEQ ID NO: 29333 - RNA, 23 nt, Homo sapiens
cauggggguaauaagagcaguag

SEQ ID NO: 29334 - RNA, 12 nt, Homo sapiens
caucuuucacau

SEQ ID NO: 29335 - RNA, 19 nt, Homo sapiens
cauccagauacacccaaag

SEQ ID NO: 29336 - RNA, 13 nt, Homo sapiens
caguugaaaagac

SEQ ID NO: 29337 - RNA, 19 nt, Homo sapiens
cauagauucccugagcagg

SEQ ID NO: 29338 - RNA, 19 nt, Homo sapiens
caguuuuccuucucaucug

SEQ ID NO: 29339 - RNA, 23 nt, Homo sapiens
caguuacucugaagggcaucaug

SEQ ID NO: 29340 - RNA, 12 nt, Homo sapiens
caggucacacaa

SEQ ID NO: 29341 - RNA, 14 nt, Homo sapiens
cagcuugaaacuga

SEQ ID NO: 29342 - RNA, 19 nt, Homo sapiens
guuuugugaagaaacauuu

SEQ ID NO: 29343 - RNA, 11 nt, Homo sapiens
guuuuucacau

SEQ ID NO: 29344 - RNA, 12 nt, Homo sapiens
guuuuucacauu

SEQ ID NO: 29345 - RNA, 13 nt, Homo sapiens
guuuuucacauuu

SEQ ID NO: 29346 - RNA, 22 nt, Homo sapiens
uaaaaaaaaaaaaaaagccaaa

SEQ ID NO: 29347 - RNA, 23 nt, Homo sapiens
uaaaaaaaaaaaaaaagccaaaa

SEQ ID NO: 29348 - RNA, 15 nt, Homo sapiens
guuauggcuuaauga

SEQ ID NO: 29349 - RNA, 12 nt, Homo sapiens
guugaaaagacu

SEQ ID NO: 29350 - RNA, 12 nt, Homo sapiens
guucaaauguug

SEQ ID NO: 29351 - RNA, 21 nt, Homo sapiens
gugcuuuuaaaaaaaaauacu

SEQ ID NO: 29352 - RNA, 22 nt, Homo sapiens
gucuucacaacagauuauuacc

SEQ ID NO: 29353 - RNA, 23 nt, Homo sapiens
uaggugcuacaaaaacacagcaa

SEQ ID NO: 29354 - RNA, 18 nt, Homo sapiens
uagauucccugagcagga

SEQ ID NO: 29355 - RNA, 19 nt, Homo sapiens
uagauucccugagcaggau

SEQ ID NO: 29356 - RNA, 15 nt, Homo sapiens
uaccuuuuuccuucc

SEQ ID NO: 29357 - RNA, 16 nt, Homo sapiens
uacaccagagauaaua

SEQ ID NO: 29358 - RNA, 20 nt, Homo sapiens
uaaguuuaugcauacaguaa

SEQ ID NO: 29359 - RNA, 16 nt, Homo sapiens
uaugagaaucagauca

SEQ ID NO: 29360 - RNA, 21 nt, Homo sapiens
uaugagaaucagaucauuuca

SEQ ID NO: 29361 - RNA, 16 nt, Homo sapiens
ucacaaacucauccau

SEQ ID NO: 29362 - RNA, 19 nt, Homo sapiens
ucccaaauuucauaccuau

SEQ ID NO: 29363 - RNA, 23 nt, Homo sapiens
uccuagugaaagaggcagcuuga

SEQ ID NO: 29364 - RNA, 12 nt, Homo sapiens
ucuacauacuau

SEQ ID NO: 29365 - RNA, 19 nt, Homo sapiens
ugauauccaaagcugaaua

SEQ ID NO: 29366 - RNA, 14 nt, Homo sapiens
ugcauacaaucuga

SEQ ID NO: 29367 - RNA, 14 nt, Homo sapiens
ucucuaacucagaa

SEQ ID NO: 29368 - RNA, 15 nt, Homo sapiens
ucucuaacucagaaa

SEQ ID NO: 29369 - RNA, 14 nt, Homo sapiens
ucuggaaaccacau

SEQ ID NO: 29370 - RNA, 15 nt, Homo sapiens
ugacacuagcuaaua

SEQ ID NO: 29371 - RNA, 12 nt, Homo sapiens
ggucggguuuua

SEQ ID NO: 29372 - RNA, 15 nt, Homo sapiens
ggguaauaagagcag

SEQ ID NO: 29373 - RNA, 22 nt, Homo sapiens
ggguaauaagagcaguagcagc

SEQ ID NO: 29374 - RNA, 13 nt, Homo sapiens
guagcagcagcau

SEQ ID NO: 29375 - RNA, 15 nt, Homo sapiens
guagauaaacucaga

SEQ ID NO: 29376 - RNA, 10 nt, Homo sapiens
gggaaacugc

SEQ ID NO: 29377 - RNA, 11 nt, Homo sapiens
gggaaacugcc

SEQ ID NO: 29378 - RNA, 12 nt, Homo sapiens
ggcuacugucag

SEQ ID NO: 29379 - RNA, 13 nt, Homo sapiens
ggcagggacagga

SEQ ID NO: 29380 - RNA, 17 nt, Homo sapiens
ggcagggacaggauaag

SEQ ID NO: 29381 - RNA, 21 nt, Homo sapiens
gcuacucuguuccuucacauc

SEQ ID NO: 29382 - RNA, 13 nt, Homo sapiens
ggaacugcuugac

SEQ ID NO: 29383 - RNA, 13 nt, Homo sapiens
gcuguauucuucu

SEQ ID NO: 29384 - RNA, 17 nt, Homo sapiens
ggagaagagcuguucac

SEQ ID NO: 29385 - RNA, 18 nt, Homo sapiens
ggagagaagauagcaggg

SEQ ID NO: 29386 - RNA, 12 nt, Homo sapiens
ggauuugcaacc

SEQ ID NO: 29387 - RNA, 13 nt, Homo sapiens
ggauuugcaaccc

SEQ ID NO: 29388 - RNA, 14 nt, Homo sapiens
ggauuugcaacccc

SEQ ID NO: 29389 - RNA, 21 nt, Homo sapiens
gaaaucaaauaugcaaagcac

SEQ ID NO: 29390 - RNA, 19 nt, Homo sapiens
gaaaugacuaaaaaacaaa

SEQ ID NO: 29391 - RNA, 23 nt, Homo sapiens
cuuuaaaaaaaaaaaaaaagcca

SEQ ID NO: 29392 - RNA, 24 nt, Homo sapiens
cuuuaaaaaaaaaaaaaaagccaa

SEQ ID NO: 29393 - RNA, 19 nt, Homo sapiens
gaaacugccagcaacgcag

SEQ ID NO: 29394 - RNA, 16 nt, Homo sapiens
cuguuaaaagaugaaa

SEQ ID NO: 29395 - RNA, 19 nt, Homo sapiens
cuuauuaaaacucauuuuu

SEQ ID NO: 29396 - RNA, 19 nt, Homo sapiens
cuucccuuuuacauacugc

SEQ ID NO: 29397 - RNA, 11 nt, Homo sapiens
cuuccuuauca

SEQ ID NO: 29398 - RNA, 15 nt, Homo sapiens
cuuccuuaucacuga

SEQ ID NO: 29399 - RNA, 23 nt, Homo sapiens
cugagaugugaacacaucagcuu

SEQ ID NO: 29400 - RNA, 15 nt, Homo sapiens
cuggauuugcaaccc

SEQ ID NO: 29401 - RNA, 20 nt, Homo sapiens
cuggcgacaguuuuccuucu

SEQ ID NO: 29402 - RNA, 22 nt, Homo sapiens
cuggcgacaguuuuccuucuca

SEQ ID NO: 29403 - RNA, 16 nt, Homo sapiens
cuauuuaaagacaaag

SEQ ID NO: 29404 - RNA, 16 nt, Homo sapiens
cuaccagcccuacacc

SEQ ID NO: 29405 - RNA, 17 nt, Homo sapiens
gaauacauucugcuuuc

SEQ ID NO: 29406 - RNA, 19 nt, Homo sapiens
gaauacuaauaaaauacau

SEQ ID NO: 29407 - RNA, 20 nt, Homo sapiens
gaauuguuuuuauggaggcu

SEQ ID NO: 29408 - RNA, 15 nt, Homo sapiens
gacaaagacaaauuc

SEQ ID NO: 29409 - RNA, 16 nt, Homo sapiens
gacaaagacaaauucu

SEQ ID NO: 29410 - RNA, 16 nt, Homo sapiens
gacaaaugacccccau

SEQ ID NO: 29411 - RNA, 23 nt, Homo sapiens
gacauguuuacaaaccucaagcc

SEQ ID NO: 29412 - RNA, 20 nt, Homo sapiens
gacaggauaagagggauuag

SEQ ID NO: 29413 - RNA, 21 nt, Homo sapiens
gacaggauaagagggauuagg

SEQ ID NO: 29414 - RNA, 18 nt, Homo sapiens
acaacauuaaaacaauau

SEQ ID NO: 29415 - RNA, 17 nt, Homo sapiens
aauugcuaucgccauca

SEQ ID NO: 29416 - RNA, 14 nt, Homo sapiens
aauuaaagcuaaag

SEQ ID NO: 29417 - RNA, 20 nt, Homo sapiens
gaagagaauauuagcuuuac

SEQ ID NO: 29418 - RNA, 11 nt, Homo sapiens
gagcaaaaguu

SEQ ID NO: 29419 - RNA, 14 nt, Homo sapiens
gagcaguagcagca

SEQ ID NO: 29420 - RNA, 15 nt, Homo sapiens
gagcaguagcagcag

SEQ ID NO: 29421 - RNA, 17 nt, Homo sapiens
gagcaguagcagcagca

SEQ ID NO: 29422 - RNA, 14 nt, Homo sapiens
gagcagucagaaga

SEQ ID NO: 29423 - RNA, 19 nt, Homo sapiens
gaucauuucaaaacucauu

SEQ ID NO: 29424 - RNA, 15 nt, Homo sapiens
gaucuuuaaaauaca

SEQ ID NO: 29425 - RNA, 20 nt, Homo sapiens
gauaauaaaauucauuccau

SEQ ID NO: 29426 - RNA, 17 nt, Homo sapiens
gauagcagggcauggcu

SEQ ID NO: 29427 - RNA, 15 nt, Homo sapiens
gauaucccaggaaaa

SEQ ID NO: 29428 - RNA, 11 nt, Homo sapiens
gauaaaucagu

SEQ ID NO: 29429 - RNA, 13 nt, Homo sapiens
gccuccucucuca

SEQ ID NO: 29430 - RNA, 13 nt, Homo sapiens
gccggagccccuu

SEQ ID NO: 29431 - RNA, 14 nt, Homo sapiens
gccggagccccuug

SEQ ID NO: 29432 - RNA, 16 nt, Homo sapiens
gccuugcuccuggcug

SEQ ID NO: 29433 - RNA, 15 nt, Homo sapiens
gccuugguauagcau

SEQ ID NO: 29434 - RNA, 16 nt, Homo sapiens
gccuugguauagcaua

SEQ ID NO: 29435 - RNA, 13 nt, Homo sapiens
gcaguuuuccauu

SEQ ID NO: 29436 - RNA, 19 nt, Homo sapiens
gcaugggccuagcccacug

SEQ ID NO: 29437 - RNA, 15 nt, Homo sapiens
gcaucucugaacauu

SEQ ID NO: 29438 - RNA, 14 nt, Homo sapiens
gccagcaaauucgc

SEQ ID NO: 29439 - RNA, 23 nt, Homo sapiens
gcagauuucuuuccauugugggc

SEQ ID NO: 29440 - RNA, 16 nt, Homo sapiens
gauucccugagcagga

SEQ ID NO: 29441 - RNA, 15 nt, Homo sapiens
gcacuaaucaauacu

SEQ ID NO: 29442 - RNA, 16 nt, Homo sapiens
gcaaauuccaauacau

SEQ ID NO: 29443 - RNA, 21 nt, Homo sapiens
agcauaccaacacgagcaggc

SEQ ID NO: 29444 - RNA, 22 nt, Homo sapiens
agcauaccaacacgagcaggcu

SEQ ID NO: 29445 - RNA, 16 nt, Homo sapiens
agcaucucugaacauu

SEQ ID NO: 29446 - RNA, 12 nt, Homo sapiens
agcccuacacca

SEQ ID NO: 29447 - RNA, 13 nt, Homo sapiens
agaggcagcuuga

SEQ ID NO: 29448 - RNA, 23 nt, Homo sapiens
agcuaaaguaucuguauugcauu

SEQ ID NO: 29449 - RNA, 22 nt, Homo sapiens
agcugaauacauucugcuuuca

SEQ ID NO: 29450 - RNA, 12 nt, Homo sapiens
acuucacuuuuu

SEQ ID NO: 29451 - RNA, 17 nt, Homo sapiens
acuuaugaaccuuuaca

SEQ ID NO: 29452 - RNA, 9 nt, Homo sapiens
acuuuucca

SEQ ID NO: 29453 - RNA, 21 nt, Homo sapiens
acucauccauuaauguagaua

SEQ ID NO: 29454 - RNA, 14 nt, Homo sapiens
acugccuaucagca

SEQ ID NO: 29455 - RNA, 15 nt, Homo sapiens
acugccuaucagcau

SEQ ID NO: 29456 - RNA, 16 nt, Homo sapiens
acugcacugucaagau

SEQ ID NO: 29457 - RNA, 14 nt, Homo sapiens
acaaaaaaagcauu

SEQ ID NO: 29458 - RNA, 23 nt, Homo sapiens
aaugauuuuacggagauauccca

SEQ ID NO: 29459 - RNA, 17 nt, Homo sapiens
aauaguucaaagccaag

SEQ ID NO: 29460 - RNA, 12 nt, Homo sapiens
aaguccaagcau

SEQ ID NO: 29461 - RNA, 19 nt, Homo sapiens
acaguuuucugagaaagac

SEQ ID NO: 29462 - RNA, 16 nt, Homo sapiens
acaaagaagacaacau

SEQ ID NO: 29463 - RNA, 12 nt, Homo sapiens
acaaagacaaau

SEQ ID NO: 29464 - RNA, 11 nt, Homo sapiens
aagagcaguag

SEQ ID NO: 29465 - RNA, 16 nt, Homo sapiens
aacuggaaauaaaaga

SEQ ID NO: 29466 - RNA, 21 nt, Homo sapiens
aagaggauguguggcauuuuc

SEQ ID NO: 29467 - RNA, 17 nt, Homo sapiens
aaguaaaaccacagcag

SEQ ID NO: 29468 - RNA, 18 nt, Homo sapiens
aaguaaaaccacagcagu

SEQ ID NO: 29469 - RNA, 15 nt, Homo sapiens
aagccuguguuacug

SEQ ID NO: 29470 - RNA, 16 nt, Homo sapiens
aaggccagcaaauucg

SEQ ID NO: 29471 - RNA, 23 nt, Homo sapiens
aagcuagaaaaauuagaugacug

SEQ ID NO: 29472 - RNA, 20 nt, Homo sapiens
aagguaaaauugaaaggcau

SEQ ID NO: 29473 - RNA, 17 nt, Homo sapiens
aacucagaaacaucagu

SEQ ID NO: 29474 - RNA, 16 nt, Homo sapiens
aaagccaaaaaccaaa

SEQ ID NO: 29475 - RNA, 17 nt, Homo sapiens
aaagccaaaaaccaaau

SEQ ID NO: 29476 - RNA, 20 nt, Homo sapiens
aaacacuaaaaaggcaugua

SEQ ID NO: 29477 - RNA, 18 nt, Homo sapiens
aaaucacaaacucaucca

SEQ ID NO: 29478 - RNA, 17 nt, Homo sapiens
aaauggauaugacacau

SEQ ID NO: 29479 - RNA, 12 nt, Homo sapiens
aaagggauggca

SEQ ID NO: 29480 - RNA, 20 nt, Homo sapiens
aaaauucauuccauuugcug

SEQ ID NO: 29481 - RNA, 16 nt, Homo sapiens
aaagccuguguuacug

SEQ ID NO: 29482 - RNA, 16 nt, Homo sapiens
aucaaauaugcaaagc

SEQ ID NO: 29483 - RNA, 18 nt, Homo sapiens
aucaaauaugcaaagcac

SEQ ID NO: 29484 - RNA, 16 nt, Homo sapiens
auauugauaauaaaau

SEQ ID NO: 29485 - RNA, 19 nt, Homo sapiens
auccaaagcugaauacauu

SEQ ID NO: 29486 - RNA, 15 nt, Homo sapiens
aucaguuacucugaa

SEQ ID NO: 29487 - RNA, 21 nt, Homo sapiens
aucaguuacucugaagggcau

SEQ ID NO: 29488 - RNA, 17 nt, Homo sapiens
auccugucccuccucca

SEQ ID NO: 29489 - RNA, 17 nt, Homo sapiens
augugaacacaucagcu

SEQ ID NO: 29490 - RNA, 17 nt, Homo sapiens
auguagauaaacucaga

SEQ ID NO: 29491 - RNA, 13 nt, Homo sapiens
auggcaagaugug

SEQ ID NO: 29492 - RNA, 14 nt, Homo sapiens
auggcaagaugugg

SEQ ID NO: 29493 - RNA, 14 nt, Homo sapiens
auaaauuuucccaa

SEQ ID NO: 29494 - RNA, 15 nt, Homo sapiens
auagguuaccaguaa

SEQ ID NO: 29495 - RNA, 18 nt, Homo sapiens
auacaccagagauaauau

SEQ ID NO: 29496 - RNA, 19 nt, Homo sapiens
aggucacagaggaucugcu

SEQ ID NO: 29497 - RNA, 14 nt, Homo sapiens
agguagccaucaug

SEQ ID NO: 29498 - RNA, 18 nt, Homo sapiens
agggauggcaagaugugg

SEQ ID NO: 29499 - RNA, 12 nt, Homo sapiens
caaucaucaacc

SEQ ID NO: 29500 - RNA, 12 nt, Homo sapiens
cacaucagcuug

SEQ ID NO: 29501 - RNA, 19 nt, Homo sapiens
cacauuggcuauuuaaaga

SEQ ID NO: 29502 - RNA, 13 nt, Homo sapiens
auuuucacuuuug

SEQ ID NO: 29503 - RNA, 19 nt, Homo sapiens
caagccaucggagcugcua

SEQ ID NO: 29504 - RNA, 23 nt, Homo sapiens
caaguuguguuugauauccaaag

SEQ ID NO: 29505 - RNA, 14 nt, Homo sapiens
caaucaucaacccc

SEQ ID NO: 29506 - RNA, 16 nt, Homo sapiens
auugucugaaauuuuc

SEQ ID NO: 29507 - RNA, 11 nt, Homo sapiens
auuaauuugua

SEQ ID NO: 29508 - RNA, 13 nt, Homo sapiens
cauuaauguagau

SEQ ID NO: 29509 - RNA, 19 nt, Homo sapiens
caugcugccaauauccuaa

SEQ ID NO: 29510 - RNA, 13 nt, Homo sapiens
caucuuucacauu

SEQ ID NO: 29511 - RNA, 20 nt, Homo sapiens
cauagauucccugagcagga

SEQ ID NO: 29512 - RNA, 18 nt, Homo sapiens
caguuuucugagaaagac

SEQ ID NO: 29513 - RNA, 15 nt, Homo sapiens
caguuuuuauauaga

SEQ ID NO: 29514 - RNA, 19 nt, Homo sapiens
caggauuuuaaucuuuuuc

SEQ ID NO: 29515 - RNA, 14 nt, Homo sapiens
ccaacacgagcagg

SEQ ID NO: 29516 - RNA, 15 nt, Homo sapiens
ccaacacgagcaggc

SEQ ID NO: 29517 - RNA, 14 nt, Homo sapiens
cauuuccaaauuca

SEQ ID NO: 29518 - RNA, 14 nt, Homo sapiens
cauuccauuugcug

SEQ ID NO: 29519 - RNA, 16 nt, Homo sapiens
cauuucugcaucagcu

SEQ ID NO: 29520 - RNA, 15 nt, Homo sapiens
ccacauggcuucacc

SEQ ID NO: 29521 - RNA, 23 nt, Homo sapiens
ccguguuacugccuaucagcauu

SEQ ID NO: 29522 - RNA, 11 nt, Homo sapiens
ccuucauuuuu

SEQ ID NO: 29523 - RNA, 22 nt, Homo sapiens
ccuguuaaaagaugaaaauauu

SEQ ID NO: 29524 - RNA, 19 nt, Homo sapiens
uucacagccagacuggcac

SEQ ID NO: 29525 - RNA, 20 nt, Homo sapiens
gagcaggcuacugucagcuc

SEQ ID NO: 29526 - RNA, 22 nt, Homo sapiens
uuucaugaaaagauuaugaucu

SEQ ID NO: 29527 - RNA, 16 nt, Homo sapiens
acaguuuucugagaaa

SEQ ID NO: 29528 - RNA, 20 nt, Homo sapiens
caccagagauaauaugagaa

SEQ ID NO: 29529 - RNA, 16 nt, Homo sapiens
uuaucucaaaacugca

SEQ ID NO: 29530 - RNA, 13 nt, Homo sapiens
auguaacugcauu

SEQ ID NO: 29531 - RNA, 20 nt, Homo sapiens
ggccuccucucucaguuuuu

SEQ ID NO: 29532 - RNA, 21 nt, Homo sapiens
ccugucccugcagacaugaga

SEQ ID NO: 29533 - RNA, 21 nt, Homo sapiens
cuuugcuuuaaguguaacugg

SEQ ID NO: 29534 - RNA, 13 nt, Homo sapiens
uggcacugcauac

SEQ ID NO: 29535 - RNA, 17 nt, Homo sapiens
agcauuguaaaugugcu

SEQ ID NO: 29536 - RNA, 19 nt, Homo sapiens
gguaucaaccaaauggagu

SEQ ID NO: 29537 - RNA, 14 nt, Homo sapiens
aacugcacugucaa

SEQ ID NO: 29538 - RNA, 19 nt, Homo sapiens
uaaaaucauuucugcauca

SEQ ID NO: 29539 - RNA, 16 nt, Homo sapiens
auucccuccugcuacu

SEQ ID NO: 29540 - RNA, 20 nt, Homo sapiens
acagccagacuggcacaguu

SEQ ID NO: 29541 - RNA, 14 nt, Homo sapiens
aacuggcaguuuuc

SEQ ID NO: 29542 - RNA, 23 nt, Homo sapiens
auucccuuuugcugccucuaaaa

SEQ ID NO: 29543 - RNA, 19 nt, Homo sapiens
aaguugcaccaacuuugaa

SEQ ID NO: 29544 - RNA, 21 nt, Homo sapiens
agcaaauuccaauacauuauu

SEQ ID NO: 29545 - RNA, 20 nt, Homo sapiens
agcaaauuccaauacauuau

SEQ ID NO: 29546 - RNA, 18 nt, Homo sapiens
guaaguuuaugcauacag

SEQ ID NO: 29547 - RNA, 19 nt, Homo sapiens
cauuugcgaaugguuccau

SEQ ID NO: 29548 - RNA, 22 nt, Homo sapiens
auacaauuauuuuuacaguucu

SEQ ID NO: 29549 - RNA, 22 nt, Homo sapiens
aauucgcugcaaccuguugaua

SEQ ID NO: 29550 - RNA, 18 nt, Homo sapiens
uacauuuccaaauucaca

SEQ ID NO: 29551 - RNA, 22 nt, Homo sapiens
aaacugagaugugaacacauca

SEQ ID NO: 29552 - RNA, 16 nt, Homo sapiens
aacaaaaaaagcauug

SEQ ID NO: 29553 - RNA, 14 nt, Homo sapiens
ugaacacaucagcu

SEQ ID NO: 29554 - RNA, 17 nt, Homo sapiens
acucauuuuuguuuuca

SEQ ID NO: 29555 - RNA, 19 nt, Homo sapiens
aaaucaaauaugcaaagca

SEQ ID NO: 29556 - RNA, 14 nt, Homo sapiens
acuaaaaaggcaug

SEQ ID NO: 29557 - RNA, 21 nt, Homo sapiens
auuuaauaaaugugccuucau

SEQ ID NO: 29558 - RNA, 14 nt, Homo sapiens
agaagagcuguuca

SEQ ID NO: 29559 - RNA, 17 nt, Homo sapiens
uguauuuuauuacaucu

SEQ ID NO: 29560 - RNA, 14 nt, Homo sapiens
uguauagugcaugu

SEQ ID NO: 29561 - RNA, 22 nt, Homo sapiens
gagaagagcuguucacagccag

SEQ ID NO: 29562 - RNA, 17 nt, Homo sapiens
auauaaauuuucccaaa

SEQ ID NO: 29563 - RNA, 19 nt, Homo sapiens
aaaaucacaaacucaucca

SEQ ID NO: 29564 - RNA, 21 nt, Homo sapiens
uugaagaugcuuguauuuuac

SEQ ID NO: 29565 - RNA, 17 nt, Homo sapiens
gagauggguuugacaag

SEQ ID NO: 29566 - RNA, 13 nt, Homo sapiens
gauaauaugagaa

SEQ ID NO: 29567 - RNA, 14 nt, Homo sapiens
auaugcaaagcacu

SEQ ID NO: 29568 - RNA, 15 nt, Homo sapiens
ugcugaaacaacaaa

SEQ ID NO: 29569 - RNA, 15 nt, Homo sapiens
acuucugucuucaca

SEQ ID NO: 29570 - RNA, 16 nt, Homo sapiens
auaaaauucauuccau

SEQ ID NO: 29571 - RNA, 19 nt, Homo sapiens
uagugaaguaugcacuaau

SEQ ID NO: 29572 - RNA, 20 nt, Homo sapiens
acacgagcaggcuacuguca

SEQ ID NO: 29573 - RNA, 21 nt, Homo sapiens
uccugguuccuaggugagcag

SEQ ID NO: 29574 - RNA, 16 nt, Homo sapiens
acaacucgaaucacuc

SEQ ID NO: 29575 - RNA, 18 nt, Homo sapiens
ucuaacucagaaacauca

SEQ ID NO: 29576 - RNA, 16 nt, Homo sapiens
agaauucuuacauguu

SEQ ID NO: 29577 - RNA, 16 nt, Homo sapiens
ugaaacauuacaguua

SEQ ID NO: 29578 - RNA, 15 nt, Homo sapiens
cuguacuuuuuccag

SEQ ID NO: 29579 - RNA, 18 nt, Homo sapiens
aggcauguaauugcuugu

SEQ ID NO: 29580 - RNA, 20 nt, Homo sapiens
uccuuccuuaucacugacac

SEQ ID NO: 29581 - RNA, 13 nt, Homo sapiens
gcuuuaauuucau

SEQ ID NO: 29582 - RNA, 23 nt, Homo sapiens
uuaaguguaacuggcaguuuucc

SEQ ID NO: 29583 - RNA, 18 nt, Homo sapiens
aaaaccacagcaguugaa

SEQ ID NO: 29584 - RNA, 14 nt, Homo sapiens
agauaauaugagaa

SEQ ID NO: 29585 - RNA, 20 nt, Homo sapiens
cugaagggcaucaugcaucu

SEQ ID NO: 29586 - RNA, 19 nt, Homo sapiens
aagcaccuuuagaauauua

SEQ ID NO: 29587 - RNA, 20 nt, Homo sapiens
ccuggcuggggccuguugaa

SEQ ID NO: 29588 - RNA, 21 nt, Homo sapiens
uucauuaucucaaaacugcac

SEQ ID NO: 29589 - RNA, 18 nt, Homo sapiens
guaucaaccaaauggagu

SEQ ID NO: 29590 - RNA, 22 nt, Homo sapiens
cugcaagcuuuucaaaauugga

SEQ ID NO: 29591 - RNA, 23 nt, Homo sapiens
gagcaguagcagcagcaucucug

SEQ ID NO: 29592 - RNA, 14 nt, Homo sapiens
uaugcauacaguaa

SEQ ID NO: 29593 - RNA, 14 nt, Homo sapiens
caucuuggucacau

SEQ ID NO: 29594 - RNA, 19 nt, Homo sapiens
auuuuuacaguucucccaa

SEQ ID NO: 29595 - RNA, 17 nt, Homo sapiens
uucaaaauuggacuuaa

SEQ ID NO: 29596 - RNA, 17 nt, Homo sapiens
auuguaacuuaugaacc

SEQ ID NO: 29597 - RNA, 17 nt, Homo sapiens
uucugcaagcuuuucaa

SEQ ID NO: 29598 - RNA, 21 nt, Homo sapiens
uccuguacuuuuuccagacac

SEQ ID NO: 29599 - RNA, 19 nt, Homo sapiens
auacauuauuggacuucca

SEQ ID NO: 29600 - RNA, 22 nt, Homo sapiens
cccaaaacugauacccuuugaa

SEQ ID NO: 29601 - RNA, 18 nt, Homo sapiens
cuauauuaucaugcaaau

SEQ ID NO: 29602 - RNA, 23 nt, Homo sapiens
augugcuuuuaaaaaaaaauacu

SEQ ID NO: 29603 - RNA, 12 nt, Homo sapiens
cggaacaguauc

SEQ ID NO: 29604 - RNA, 22 nt, Homo sapiens
uguuagcaaaauggauaugaca

SEQ ID NO: 29605 - RNA, 13 nt, Homo sapiens
guaaaauugaaag

SEQ ID NO: 29606 - RNA, 14 nt, Homo sapiens
uaagggaaacugcc

SEQ ID NO: 29607 - RNA, 15 nt, Homo sapiens
aaaucuuaacuugaa

SEQ ID NO: 29608 - RNA, 19 nt, Homo sapiens
caucuuggucacauacaau

SEQ ID NO: 29609 - RNA, 13 nt, Homo sapiens
cauuuucacuuuu

SEQ ID NO: 29610 - RNA, 14 nt, Homo sapiens
aagaaauucugcaa

SEQ ID NO: 29611 - RNA, 23 nt, Homo sapiens
uuuaaaaaaaaaaaaaaagccaa

SEQ ID NO: 29612 - RNA, 19 nt, Homo sapiens
augcacuaaucaauacuuu

SEQ ID NO: 29613 - RNA, 20 nt, Homo sapiens
uugaaggaguccuugcauca

SEQ ID NO: 29614 - RNA, 14 nt, Homo sapiens
aaaccucaagccag

SEQ ID NO: 29615 - RNA, 17 nt, Homo sapiens
uguggcauuuucacuuu

SEQ ID NO: 29616 - RNA, 20 nt, Homo sapiens
ucccuuuuacauacugcugu

SEQ ID NO: 29617 - RNA, 14 nt, Homo sapiens
accaguauucccuu

SEQ ID NO: 29618 - RNA, 13 nt, Homo sapiens
uaaaaaauggaac

SEQ ID NO: 29619 - RNA, 20 nt, Homo sapiens
uuaugaaccuuuacauccag

SEQ ID NO: 29620 - RNA, 15 nt, Homo sapiens
aaauggagugacuua

SEQ ID NO: 29621 - RNA, 16 nt, Homo sapiens
cacagaggaucugcuu

SEQ ID NO: 29622 - RNA, 15 nt, Homo sapiens
gagaaagacuauuca

SEQ ID NO: 29623 - RNA, 21 nt, Homo sapiens
agauguagcaaauuccaauac

SEQ ID NO: 29624 - RNA, 21 nt, Homo sapiens
uuuaaaaaaaaauacugaugu

SEQ ID NO: 29625 - RNA, 19 nt, Homo sapiens
guuuuccuucucaucugug

SEQ ID NO: 29626 - RNA, 23 nt, Homo sapiens
uccucuuucaaagguagccauca

SEQ ID NO: 29627 - RNA, 16 nt, Homo sapiens
cucaaaacugcacugu

SEQ ID NO: 29628 - RNA, 14 nt, Homo sapiens
auacuccuaguaau

SEQ ID NO: 29629 - RNA, 22 nt, Homo sapiens
augaaaagauuaugaucucaga

SEQ ID NO: 29630 - RNA, 11 nt, Homo sapiens
aauacugaugu

SEQ ID NO: 29631 - RNA, 23 nt, Homo sapiens
gguuaccaguaacggaacaguau

SEQ ID NO: 29632 - RNA, 11 nt, Homo sapiens
acaucuuucac

SEQ ID NO: 29633 - RNA, 16 nt, Homo sapiens
aacaacucgaaucacu

SEQ ID NO: 29634 - RNA, 17 nt, Homo sapiens
aucagcauuuuacuacu

SEQ ID NO: 29635 - RNA, 15 nt, Homo sapiens
ugcaucagcugcuga

SEQ ID NO: 29636 - RNA, 21 nt, Homo sapiens
gcuacucuguuccuucacauc

SEQ ID NO: 29637 - RNA, 22 nt, Homo sapiens
aaaauauuuguaucacaaaucu

SEQ ID NO: 29638 - RNA, 15 nt, Homo sapiens
caaauaugcaaagca

SEQ ID NO: 29639 - RNA, 22 nt, Homo sapiens
aauacugauguuccuagugaaa

SEQ ID NO: 29640 - RNA, 20 nt, Homo sapiens
auauaauaugcacacagugc

SEQ ID NO: 29641 - RNA, 23 nt, Homo sapiens
ucacauuggcuauuuaaagacaa

SEQ ID NO: 29642 - RNA, 18 nt, Homo sapiens
cagaaauuuaauucaugu

SEQ ID NO: 29643 - RNA, 17 nt, Homo sapiens
caaaacugcacugucaa

SEQ ID NO: 29644 - RNA, 16 nt, Homo sapiens
uuauuacaucuuucac

SEQ ID NO: 29645 - RNA, 12 nt, Homo sapiens
cauuuucacuuu

SEQ ID NO: 29646 - RNA, 16 nt, Homo sapiens
uaaaguacagacuuuu

SEQ ID NO: 29647 - RNA, 14 nt, Homo sapiens
cuguuccuucacau

SEQ ID NO: 29648 - RNA, 12 nt, Homo sapiens
caggaaaauuaa

SEQ ID NO: 29649 - RNA, 18 nt, Homo sapiens
auaaaauucauuccauuu

SEQ ID NO: 29650 - RNA, 16 nt, Homo sapiens
caaaucuuaacuugaa

SEQ ID NO: 29651 - RNA, 14 nt, Homo sapiens
ucuauguggcugua

SEQ ID NO: 29652 - RNA, 14 nt, Homo sapiens
aagacaaauucugu

SEQ ID NO: 29653 - RNA, 20 nt, Homo sapiens
uccguggcacugcauacaau

SEQ ID NO: 29654 - RNA, 15 nt, Homo sapiens
aggcauucucugaag

SEQ ID NO: 29655 - RNA, 20 nt, Homo sapiens
caaaaauuauauuuugaaca

SEQ ID NO: 29656 - RNA, 16 nt, Homo sapiens
guggcauuuucacuuu

SEQ ID NO: 29657 - RNA, 22 nt, Homo sapiens
auuuuuguuuucauuaucucaa

SEQ ID NO: 29658 - RNA, 18 nt, Homo sapiens
acuuaaaaucuaauucaa

SEQ ID NO: 29659 - RNA, 19 nt, Homo sapiens
ugacacuagcuaauaucaa

SEQ ID NO: 29660 - RNA, 19 nt, Homo sapiens
ucccagcgagggacaccga

SEQ ID NO: 29661 - RNA, 15 nt, Homo sapiens
guaagggaaacugcc

SEQ ID NO: 29662 - RNA, 20 nt, Homo sapiens
ccaacuuugaagucugauuu

SEQ ID NO: 29663 - RNA, 16 nt, Homo sapiens
agccagccuugcuccu

SEQ ID NO: 29664 - RNA, 19 nt, Homo sapiens
uuaucaugcaaaugcugua

SEQ ID NO: 29665 - RNA, 17 nt, Homo sapiens
aacuggaaauaaaagau

SEQ ID NO: 29666 - RNA, 19 nt, Homo sapiens
uucgugaaguauacuguau

SEQ ID NO: 29667 - RNA, 16 nt, Homo sapiens
aucacaaacucaucca

SEQ ID NO: 29668 - RNA, 15 nt, Homo sapiens
ucucugccuugguau

SEQ ID NO: 29669 - RNA, 17 nt, Homo sapiens
uuacaaaccucaagcca

SEQ ID NO: 29670 - RNA, 19 nt, Homo sapiens
uuuguagccacuucacuuu

SEQ ID NO: 29671 - RNA, 13 nt, Homo sapiens
cucaucugugauu

SEQ ID NO: 29672 - RNA, 11 nt, Homo sapiens
ucauuaucuca

SEQ ID NO: 29673 - RNA, 12 nt, Homo sapiens
auuagaugacug

SEQ ID NO: 29674 - RNA, 16 nt, Homo sapiens
auaaaauacauacuau

SEQ ID NO: 29675 - RNA, 16 nt, Homo sapiens
uuaugaaccuuuacau

SEQ ID NO: 29676 - RNA, 20 nt, Homo sapiens
cucuaacucagaaacaucag

SEQ ID NO: 29677 - RNA, 19 nt, Homo sapiens
uuccagagaccaguauucc

SEQ ID NO: 29678 - RNA, 21 nt, Homo sapiens
guauauaaauuuucccaaaac

SEQ ID NO: 29679 - RNA, 24 nt, Homo sapiens
uuucaaaaucaaauuccagaauga

SEQ ID NO: 29680 - RNA, 19 nt, Homo sapiens
augaugaucuuuaaaauac

SEQ ID NO: 29681 - RNA, 21 nt, Homo sapiens
cuuguuuuuccacuacugcua

SEQ ID NO: 29682 - RNA, 12 nt, Homo sapiens
cauguacaucca

SEQ ID NO: 29683 - RNA, 18 nt, Homo sapiens
caaguccaagcauaccaa

SEQ ID NO: 29684 - RNA, 17 nt, Homo sapiens
gacuucugucuucacaa

SEQ ID NO: 29685 - RNA, 18 nt, Homo sapiens
ggacaggauaagagggau

SEQ ID NO: 29686 - RNA, 14 nt, Homo sapiens
uucauuccauuugc

SEQ ID NO: 29687 - RNA, 19 nt, Homo sapiens
ugaaggaguccuugcauca

SEQ ID NO: 29688 - RNA, 22 nt, Homo sapiens
uugcuccuggcuggggccuguu

SEQ ID NO: 29689 - RNA, 17 nt, Homo sapiens
aaggaguccuugcauca

SEQ ID NO: 29690 - RNA, 20 nt, Homo sapiens
ucacaaacucauccauuaau

SEQ ID NO: 29691 - RNA, 15 nt, Homo sapiens
auguuucgcugauau

SEQ ID NO: 29692 - RNA, 20 nt, Homo sapiens
uguucacagccagacuggca

SEQ ID NO: 29693 - RNA, 12 nt, Homo sapiens
cacuucacuuuu

SEQ ID NO: 29694 - RNA, 14 nt, Homo sapiens
guuuucauuaucuc

SEQ ID NO: 29695 - RNA, 14 nt, Homo sapiens
aucucaaaacugca

SEQ ID NO: 29696 - RNA, 18 nt, Homo sapiens
uauauguguuuuucacau

SEQ ID NO: 29697 - RNA, 20 nt, Homo sapiens
uaaaaucacaaacucaucca

SEQ ID NO: 29698 - RNA, 16 nt, Homo sapiens
agcaggcuacugucag

SEQ ID NO: 29699 - RNA, 22 nt, Homo sapiens
aagucagugcccaacuguuaua

SEQ ID NO: 29700 - RNA, 21 nt, Homo sapiens
cuuaguguacaugaaagcgua

SEQ ID NO: 29701 - RNA, 16 nt, Homo sapiens
cacucauuuauuucca

SEQ ID NO: 29702 - RNA, 15 nt, Homo sapiens
gccacuucacuuuuu

SEQ ID NO: 29703 - RNA, 22 nt, Homo sapiens
agaguucugucuggacuuucca

SEQ ID NO: 29704 - RNA, 16 nt, Homo sapiens
ugccccagggaccuuu

SEQ ID NO: 29705 - RNA, 14 nt, Homo sapiens
aaauacauacuaua

SEQ ID NO: 29706 - RNA, 13 nt, Homo sapiens
uccccucggagaa

SEQ ID NO: 29707 - RNA, 15 nt, Homo sapiens
ucacaaacucaucca

SEQ ID NO: 29708 - RNA, 17 nt, Homo sapiens
acuaaucaauacuuuga

SEQ ID NO: 29709 - RNA, 16 nt, Homo sapiens
aaugguuccauucucu

SEQ ID NO: 29710 - RNA, 20 nt, Homo sapiens
ccagguagagagaccacaag

SEQ ID NO: 29711 - RNA, 21 nt, Homo sapiens
ggccuguugaagaugcuugua

SEQ ID NO: 29712 - RNA, 15 nt, Homo sapiens
agaauucuuacaugu

SEQ ID NO: 29713 - RNA, 16 nt, Homo sapiens
caaacagucucaggaa

SEQ ID NO: 29714 - RNA, 23 nt, Homo sapiens
caauuauaucaguccucuuucaa

SEQ ID NO: 29715 - RNA, 23 nt, Homo sapiens
ucacaaaucuuaacuugaaggag

SEQ ID NO: 29716 - RNA, 20 nt, Homo sapiens
caucagcuugcccuguuaaa

SEQ ID NO: 29717 - RNA, 19 nt, Homo sapiens
uguguggcauuuucacuuu

SEQ ID NO: 29718 - RNA, 20 nt, Homo sapiens
ccuggacaguuuucugcuuu

SEQ ID NO: 29719 - RNA, 19 nt, Homo sapiens
uucaaacagucucaggaaa

SEQ ID NO: 29720 - RNA, 16 nt, Homo sapiens
acaucaguuacucuga

SEQ ID NO: 29721 - RNA, 20 nt, Homo sapiens
ggcgacaguuuuccuucuca

SEQ ID NO: 29722 - RNA, 20 nt, Homo sapiens
uuaaagcuuauuaaaacuca

SEQ ID NO: 29723 - RNA, 14 nt, Homo sapiens
cuagaauacuaaua

SEQ ID NO: 29724 - RNA, 20 nt, Homo sapiens
gagugacuuaguguacauga

SEQ ID NO: 29725 - RNA, 14 nt, Homo sapiens
uucccaaaacugau

SEQ ID NO: 29726 - RNA, 15 nt, Homo sapiens
ccuguguuacugauu

SEQ ID NO: 29727 - RNA, 13 nt, Homo sapiens
aagacuccaaaga

SEQ ID NO: 29728 - RNA, 12 nt, Homo sapiens
aaaaaagccaaa

SEQ ID NO: 29729 - RNA, 17 nt, Homo sapiens
ccuggacaguuuucugc

SEQ ID NO: 29730 - RNA, 20 nt, Homo sapiens
cugucuggacuuuccagaga

SEQ ID NO: 29731 - RNA, 13 nt, Homo sapiens
aagaaauucugca

SEQ ID NO: 29732 - RNA, 17 nt, Homo sapiens
uaaaguacagacuuuuu

SEQ ID NO: 29733 - RNA, 20 nt, Homo sapiens
cauuaaauauaauaugcaca

SEQ ID NO: 29734 - RNA, 19 nt, Homo sapiens
gagaacugcauauguuucg

SEQ ID NO: 29735 - RNA, 20 nt, Homo sapiens
uucugucuggacuuuccaga

SEQ ID NO: 29736 - RNA, 19 nt, Homo sapiens
guuuucugcuuuaauuuca

SEQ ID NO: 29737 - RNA, 20 nt, Homo sapiens
aggugcuacaaaaacacagc

SEQ ID NO: 29738 - RNA, 13 nt, Homo sapiens
cccuuuuacauac

SEQ ID NO: 29739 - RNA, 14 nt, Homo sapiens
uguguuuuucacau

SEQ ID NO: 29740 - RNA, 13 nt, Homo sapiens
ucauuuauuucca

SEQ ID NO: 29741 - RNA, 15 nt, Homo sapiens
gaaucauaugggaua

SEQ ID NO: 29742 - RNA, 13 nt, Homo sapiens
uuuuucauuauug

SEQ ID NO: 29743 - RNA, 22 nt, Homo sapiens
aucuuguuuuuccacuacugcu

SEQ ID NO: 29744 - RNA, 15 nt, Homo sapiens
aaagaggcagcuuga

SEQ ID NO: 29745 - RNA, 23 nt, Homo sapiens
guaaaauugaaaggcauucucug

SEQ ID NO: 29746 - RNA, 18 nt, Homo sapiens
acaucagcuugcccuguu

SEQ ID NO: 29747 - RNA, 15 nt, Homo sapiens
agugaaaaacaucca

SEQ ID NO: 29748 - RNA, 21 nt, Homo sapiens
gacaaaugacccccaucccau

SEQ ID NO: 29749 - RNA, 16 nt, Homo sapiens
auaaacucagaaauuu

SEQ ID NO: 29750 - RNA, 17 nt, Homo sapiens
uucugagaaagacuauu

SEQ ID NO: 29751 - RNA, 18 nt, Homo sapiens
cucaacauaacauaagcu

SEQ ID NO: 29752 - RNA, 19 nt, Homo sapiens
uggaaauaaaagauuguau

SEQ ID NO: 29753 - RNA, 20 nt, Homo sapiens
gacuucugucuucacaacag

SEQ ID NO: 29754 - RNA, 19 nt, Homo sapiens
augaauuuuuuucaucuuc

SEQ ID NO: 29755 - RNA, 20 nt, Homo sapiens
auuuucacuuuuggcuugua

SEQ ID NO: 29756 - RNA, 18 nt, Homo sapiens
auuauuggacuuccauuu

SEQ ID NO: 29757 - RNA, 11 nt, Homo sapiens
aagcauuguaa

SEQ ID NO: 29758 - RNA, 15 nt, Homo sapiens
ccuuuuuguuauuag

SEQ ID NO: 29759 - RNA, 14 nt, Homo sapiens
uauuuguaucacaa

SEQ ID NO: 29760 - RNA, 23 nt, Homo sapiens
aaagucagugcccaacuguuaua

SEQ ID NO: 29761 - RNA, 15 nt, Homo sapiens
auuucugcaucagcu

SEQ ID NO: 29762 - RNA, 23 nt, Homo sapiens
guagaaaaagcaguaacugacaa

SEQ ID NO: 29763 - RNA, 16 nt, Homo sapiens
aagaugaugaugaucu

SEQ ID NO: 29764 - RNA, 18 nt, Homo sapiens
uacucuguuccuucacau

SEQ ID NO: 29765 - RNA, 17 nt, Homo sapiens
acccucaagacaaauga

SEQ ID NO: 29766 - RNA, 14 nt, Homo sapiens
gcaccaacuuugaa

SEQ ID NO: 29767 - RNA, 14 nt, Homo sapiens
aacugcauugagaa

SEQ ID NO: 29768 - RNA, 21 nt, Homo sapiens
ccauucuacauacuauggaau

SEQ ID NO: 29769 - RNA, 13 nt, Homo sapiens
auuaucaugcaaa

SEQ ID NO: 29770 - RNA, 13 nt, Homo sapiens
auuauuuuuacag

SEQ ID NO: 29771 - RNA, 20 nt, Homo sapiens
auauauguguuuuucacauu

SEQ ID NO: 29772 - RNA, 20 nt, Homo sapiens
aaauugggaaaggaguagaa

SEQ ID NO: 29773 - RNA, 19 nt, Homo sapiens
aacaacucgaaucacucau

SEQ ID NO: 29774 - RNA, 20 nt, Homo sapiens
uuaaaaucuaauucaaacua

SEQ ID NO: 29775 - RNA, 15 nt, Homo sapiens
gccaguuauggcuau

SEQ ID NO: 29776 - RNA, 20 nt, Homo sapiens
agaaggauguacauuuccaa

SEQ ID NO: 29777 - RNA, 13 nt, Homo sapiens
auguuaugcauaa

SEQ ID NO: 29778 - RNA, 17 nt, Homo sapiens
aaagcuaaaguaucugu

SEQ ID NO: 29779 - RNA, 13 nt, Homo sapiens
uucacagccagac

SEQ ID NO: 29780 - RNA, 20 nt, Homo sapiens
aauuucucccagucauuuaa

SEQ ID NO: 29781 - RNA, 16 nt, Homo sapiens
acuccuaguaauuuaa

SEQ ID NO: 29782 - RNA, 22 nt, Homo sapiens
agaccuggucgucgucuugacu

SEQ ID NO: 29783 - RNA, 16 nt, Homo sapiens
caggcucaacauaaca

SEQ ID NO: 29784 - RNA, 21 nt, Homo sapiens
ccacaacuauauuaucaugca

SEQ ID NO: 29785 - RNA, 22 nt, Homo sapiens
aguauaaauaaaaugagcaaaa

SEQ ID NO: 29786 - RNA, 20 nt, Homo sapiens
augagaaucagaucauuuca

SEQ ID NO: 29787 - RNA, 18 nt, Homo sapiens
agaauacuaauaaaauac

SEQ ID NO: 29788 - RNA, 21 nt, Homo sapiens
aucauuucaaaacucauuucc

SEQ ID NO: 29789 - RNA, 16 nt, Homo sapiens
aacacuaaaaaggcau

SEQ ID NO: 29790 - RNA, 21 nt, Homo sapiens
uuuacauacugcugucuaugu

SEQ ID NO: 29791 - RNA, 18 nt, Homo sapiens
cuguuccuucacauccug

SEQ ID NO: 29792 - RNA, 14 nt, Homo sapiens
ugauuuuacaauug

SEQ ID NO: 29793 - RNA, 23 nt, Homo sapiens
acuuaagguuaccuuuguuccca

SEQ ID NO: 29794 - RNA, 19 nt, Homo sapiens
uaaacacuaaaaaggcaug

SEQ ID NO: 29795 - RNA, 15 nt, Homo sapiens
acucauuuauuucca

SEQ ID NO: 29796 - RNA, 21 nt, Homo sapiens
ucaaauaugcaaagcacugac

SEQ ID NO: 29797 - RNA, 22 nt, Homo sapiens
ucaaaauaccaugccauuuaaa

SEQ ID NO: 29798 - RNA, 23 nt, Homo sapiens
gcaucagcugcugaaacaacaaa

SEQ ID NO: 29799 - RNA, 16 nt, Homo sapiens
aagaggcagcuugaaa

SEQ ID NO: 29800 - RNA, 14 nt, Homo sapiens
uauguggcuguauc

SEQ ID NO: 29801 - RNA, 23 nt, Homo sapiens
aaucugaggccuccucucucagu

SEQ ID NO: 29802 - RNA, 21 nt, Homo sapiens
auugcuuguuagcaaaaugga

SEQ ID NO: 29803 - RNA, 15 nt, Homo sapiens
aauucugcaagcuuu

SEQ ID NO: 29804 - RNA, 23 nt, Homo sapiens
auauuuuuuaugaaacauuacag

SEQ ID NO: 29805 - RNA, 19 nt, Homo sapiens
agaugugggcagugauguc

SEQ ID NO: 29806 - RNA, 14 nt, Homo sapiens
ggcauucucugaag

SEQ ID NO: 29807 - RNA, 17 nt, Homo sapiens
cauuauuggacuuccau

SEQ ID NO: 29808 - RNA, 23 nt, Homo sapiens
auguuucgugaaguauacuguau

SEQ ID NO: 29809 - RNA, 21 nt, Homo sapiens
cugugauucccuccugcuacu

SEQ ID NO: 29810 - RNA, 23 nt, Homo sapiens
ucaacaagagacuggaaggacca

SEQ ID NO: 29811 - RNA, 13 nt, Homo sapiens
acaaaaacacagc

SEQ ID NO: 29812 - RNA, 22 nt, Homo sapiens
caauacauuauuggacuuccau

SEQ ID NO: 29813 - RNA, 19 nt, Homo sapiens
accagagauaauaugagaa

SEQ ID NO: 29814 - RNA, 20 nt, Homo sapiens
aauuauauuuugaacaacuc

SEQ ID NO: 29815 - RNA, 13 nt, Homo sapiens
aaaacucauuucc

SEQ ID NO: 29816 - RNA, 15 nt, Homo sapiens
gugaaagaggcagcu

SEQ ID NO: 29817 - RNA, 21 nt, Homo sapiens
ucauuuccuauguaacugcau

SEQ ID NO: 29818 - RNA, 14 nt, Homo sapiens
cucgaaucacucau

SEQ ID NO: 29819 - RNA, 20 nt, Homo sapiens
aguucugucuggacuuucca

SEQ ID NO: 29820 - RNA, 23 nt, Homo sapiens
ucuucccuuuuacauacugcugu

SEQ ID NO: 29821 - RNA, 14 nt, Homo sapiens
aaaaugagcaaaag

SEQ ID NO: 29822 - RNA, 18 nt, Homo sapiens
guguuuuucacauuugcg

SEQ ID NO: 29823 - RNA, 19 nt, Homo sapiens
ucauuaucucaaaacugca

SEQ ID NO: 29824 - RNA, 16 nt, Homo sapiens
aacucagaaacaucag

SEQ ID NO: 29825 - RNA, 14 nt, Homo sapiens
ucacauccuguguu

SEQ ID NO: 29826 - RNA, 17 nt, Homo sapiens
gaacgguaaauuucugu

SEQ ID NO: 29827 - RNA, 15 nt, Homo sapiens
aucagcauuuuacua

SEQ ID NO: 29828 - RNA, 19 nt, Homo sapiens
guaauuuuaaguaauuuca

SEQ ID NO: 29829 - RNA, 23 nt, Homo sapiens
cuaucagcauuuuacuacuuuaa

SEQ ID NO: 29830 - RNA, 20 nt, Homo sapiens
ucuggacuuuccagagacca

SEQ ID NO: 29831 - RNA, 14 nt, Homo sapiens
agccacuucacuuu

SEQ ID NO: 29832 - RNA, 13 nt, Homo sapiens
uagauucuuuauu

SEQ ID NO: 29833 - RNA, 14 nt, Homo sapiens
gaacacaucagcuu

SEQ ID NO: 29834 - RNA, 16 nt, Homo sapiens
ggcauuuucacuuuug

SEQ ID NO: 29835 - RNA, 22 nt, Homo sapiens
aauuuucaaaaucaaauuccag

SEQ ID NO: 29836 - RNA, 16 nt, Homo sapiens
ucauaccuaucaucuu

SEQ ID NO: 29837 - RNA, 16 nt, Homo sapiens
uaagggaaacugccag

SEQ ID NO: 29838 - RNA, 20 nt, Homo sapiens
cuuuaaagggauggcaagau

SEQ ID NO: 29839 - RNA, 17 nt, Homo sapiens
gugccaguuauggcuau

SEQ ID NO: 29840 - RNA, 19 nt, Homo sapiens
auaggugcuacaaaaacac

SEQ ID NO: 29841 - RNA, 16 nt, Homo sapiens
guaaaaccacagcagu

SEQ ID NO: 29842 - RNA, 14 nt, Homo sapiens
gcaaaugcuguauu

SEQ ID NO: 29843 - RNA, 21 nt, Homo sapiens
uagaaaaauuagaugacugaa

SEQ ID NO: 29844 - RNA, 20 nt, Homo sapiens
auaauaugcacacagugcuu

SEQ ID NO: 29845 - RNA, 22 nt, Homo sapiens
aguaugcacuaaucaauacuuu

SEQ ID NO: 29846 - RNA, 13 nt, Homo sapiens
agaucaagccauc

SEQ ID NO: 29847 - RNA, 15 nt, Homo sapiens
agcugaauacauucu

SEQ ID NO: 29848 - RNA, 19 nt, Homo sapiens
acuucuaaguaaaaccaca

SEQ ID NO: 29849 - RNA, 15 nt, Homo sapiens
aaugguuccauucuc

SEQ ID NO: 29850 - RNA, 12 nt, Homo sapiens
uauuuugaacaa

SEQ ID NO: 29851 - RNA, 18 nt, Homo sapiens
aaguagggacuucugucu

SEQ ID NO: 29852 - RNA, 13 nt, Homo sapiens
uaagcaacaucua

SEQ ID NO: 29853 - RNA, 19 nt, Homo sapiens
caggaaaucaaauaugcaa

SEQ ID NO: 29854 - RNA, 15 nt, Homo sapiens
caaaaucaaauucca

SEQ ID NO: 29855 - RNA, 21 nt, Homo sapiens
uggacaguuuucugcuuuaau

SEQ ID NO: 29856 - RNA, 9 nt, Homo sapiens
agagaagau

SEQ ID NO: 29857 - RNA, 23 nt, Homo sapiens
ugaaacugagaugugaacacauc

SEQ ID NO: 29858 - RNA, 17 nt, Homo sapiens
aauucuuacauguuuuc

SEQ ID NO: 29859 - RNA, 20 nt, Homo sapiens
ugcaaccccaucauccucag

SEQ ID NO: 29860 - RNA, 15 nt, Homo sapiens
auucugcaagcuuuu

SEQ ID NO: 29861 - RNA, 17 nt, Homo sapiens
aguuuauauacaauuau

SEQ ID NO: 29862 - RNA, 15 nt, Homo sapiens
cuauguggcuguauc

SEQ ID NO: 29863 - RNA, 20 nt, Homo sapiens
caaaacugauacccuuugaa

SEQ ID NO: 29864 - RNA, 19 nt, Homo sapiens
aauagaaggauguacauuu

SEQ ID NO: 29865 - RNA, 19 nt, Homo sapiens
auacaauuauuuuuacagu

SEQ ID NO: 29866 - RNA, 19 nt, Homo sapiens
auaauaaaauucauuccau

SEQ ID NO: 29867 - RNA, 19 nt, Homo sapiens
caaaauaccaugccauuua

SEQ ID NO: 29868 - RNA, 12 nt, Homo sapiens
aaauuggacuua

SEQ ID NO: 29869 - RNA, 17 nt, Homo sapiens
caaguuguguuugauau

SEQ ID NO: 29870 - RNA, 12 nt, Homo sapiens
ggauaugagaug

SEQ ID NO: 29871 - RNA, 23 nt, Homo sapiens
gaauucuuacauguuuucuuugc

SEQ ID NO: 29872 - RNA, 19 nt, Homo sapiens
ccaaagaaauguaagggaa

SEQ ID NO: 29873 - RNA, 18 nt, Homo sapiens
cuaaaaaggcauguaauu

SEQ ID NO: 29874 - RNA, 13 nt, Homo sapiens
augacacaucucu

SEQ ID NO: 29875 - RNA, 14 nt, Homo sapiens
uaaaaucuaauuca

SEQ ID NO: 29876 - RNA, 15 nt, Homo sapiens
uguagauaaagcacu

SEQ ID NO: 29877 - RNA, 21 nt, Homo sapiens
agcugcugaaacaacaaauag

SEQ ID NO: 29878 - RNA, 17 nt, Homo sapiens
uacugcuaccacaacua

SEQ ID NO: 29879 - RNA, 13 nt, Homo sapiens
aauuccaauacau

SEQ ID NO: 29880 - RNA, 20 nt, Homo sapiens
acuaauagaauuaauggaau

SEQ ID NO: 29881 - RNA, 23 nt, Homo sapiens
aauauguaaauagaaacguguau

SEQ ID NO: 29882 - RNA, 12 nt, Homo sapiens
cucauucaaaag

SEQ ID NO: 29883 - RNA, 16 nt, Homo sapiens
ucugcuuuaauuucau

SEQ ID NO: 29884 - RNA, 22 nt, Homo sapiens
cauuaucucaaaacugcacugu

SEQ ID NO: 29885 - RNA, 15 nt, Homo sapiens
aagagaucaagccau

SEQ ID NO: 29886 - RNA, 22 nt, Homo sapiens
aaugacacuagcuaauaucaau

SEQ ID NO: 29887 - RNA, 19 nt, Homo sapiens
cuguaucuuguuuuuccac

SEQ ID NO: 29888 - RNA, 18 nt, Homo sapiens
agcauuguaaaugugcuu

SEQ ID NO: 29889 - RNA, 23 nt, Homo sapiens
ccacagcaguugaaaagacucca

SEQ ID NO: 29890 - RNA, 14 nt, Homo sapiens
uguaauugcuuguu

SEQ ID NO: 29891 - RNA, 20 nt, Homo sapiens
uuugcugccucuaaaaggcc

SEQ ID NO: 29892 - RNA, 15 nt, Homo sapiens
ucugcuuuaauuuca

SEQ ID NO: 29893 - RNA, 14 nt, Homo sapiens
cacaaaauugggaa

SEQ ID NO: 29894 - RNA, 15 nt, Homo sapiens
aaguaaaaccacagc

SEQ ID NO: 29895 - RNA, 22 nt, Homo sapiens
ucaggaaaucaaauaugcaaag

SEQ ID NO: 29896 - RNA, 13 nt, Homo sapiens
auggaacauaaaa

SEQ ID NO: 29897 - RNA, 17 nt, Homo sapiens
gaacugcauauguuucg

SEQ ID NO: 29898 - RNA, 19 nt, Homo sapiens
uaauaaaauacauacuaua

SEQ ID NO: 29899 - RNA, 21 nt, Homo sapiens
ugucuuaauuaaaagaauauu

SEQ ID NO: 29900 - RNA, 14 nt, Homo sapiens
ugcauacaguaauu

SEQ ID NO: 29901 - RNA, 14 nt, Homo sapiens
aacagucucaggaa

SEQ ID NO: 29902 - RNA, 20 nt, Homo sapiens
cggagaagagcuguucacag

SEQ ID NO: 29903 - RNA, 21 nt, Homo sapiens
ucuagcaaauguuaugcauaa

SEQ ID NO: 29904 - RNA, 14 nt, Homo sapiens
aaaauacauacuau

SEQ ID NO: 29905 - RNA, 16 nt, Homo sapiens
uacauuuccaaauuca

SEQ ID NO: 29906 - RNA, 16 nt, Homo sapiens
ccagacuggcacaguu

SEQ ID NO: 29907 - RNA, 18 nt, Homo sapiens
ugacuuaguguacaugaa

SEQ ID NO: 29908 - RNA, 13 nt, Homo sapiens
uuuaaaaaaugga

SEQ ID NO: 29909 - RNA, 12 nt, Homo sapiens
ccacagcaguug

SEQ ID NO: 29910 - RNA, 15 nt, Homo sapiens
aguucugucuggacu

SEQ ID NO: 29911 - RNA, 14 nt, Homo sapiens
gaagaaauucugca

SEQ ID NO: 29912 - RNA, 13 nt, Homo sapiens
aauguuguucucu

SEQ ID NO: 29913 - RNA, 16 nt, Homo sapiens
guagccacuucacuuu

SEQ ID NO: 29914 - RNA, 22 nt, Homo sapiens
auguacauccauggugugcugg

SEQ ID NO: 29915 - RNA, 16 nt, Homo sapiens
auuggacuuccauuug

SEQ ID NO: 29916 - RNA, 17 nt, Homo sapiens
cuuaaaaucuaauucaa

SEQ ID NO: 29917 - RNA, 15 nt, Homo sapiens
aauaaaauacauacu

SEQ ID NO: 29918 - RNA, 18 nt, Homo sapiens
augaaaagauuaugaucu

SEQ ID NO: 29919 - RNA, 15 nt, Homo sapiens
uuuccacuacugcua

SEQ ID NO: 29920 - RNA, 21 nt, Homo sapiens
guuucgugaaguauacuguau

SEQ ID NO: 29921 - RNA, 20 nt, Homo sapiens
gaaauuuaauucauguuucu

SEQ ID NO: 29922 - RNA, 22 nt, Homo sapiens
caguaacggaacaguauccagu

SEQ ID NO: 29923 - RNA, 16 nt, Homo sapiens
agaguggguuucacaa

SEQ ID NO: 29924 - RNA, 16 nt, Homo sapiens
acuggcaguuuuccau

SEQ ID NO: 29925 - RNA, 15 nt, Homo sapiens
cagaaauuguaucuu

SEQ ID NO: 29926 - RNA, 19 nt, Homo sapiens
guuauuuagggaacugcuu

SEQ ID NO: 29927 - RNA, 13 nt, Homo sapiens
uaauuucaugaaa

SEQ ID NO: 29928 - RNA, 13 nt, Homo sapiens
uacauuuccaaau

SEQ ID NO: 29929 - RNA, 17 nt, Homo sapiens
uguagauaaagcacugu

SEQ ID NO: 29930 - RNA, 15 nt, Homo sapiens
uagaauuaauggaau

SEQ ID NO: 29931 - RNA, 14 nt, Homo sapiens
ucucuucuuuaaag

SEQ ID NO: 29932 - RNA, 18 nt, Homo sapiens
aacaacucgaaucacuca

SEQ ID NO: 29933 - RNA, 14 nt, Homo sapiens
uccacuacugcuac

SEQ ID NO: 29934 - RNA, 23 nt, Homo sapiens
auuucaaaacucauuuccuaugu

SEQ ID NO: 29935 - RNA, 18 nt, Homo sapiens
aguuuaugcauacaguaa

SEQ ID NO: 29936 - RNA, 18 nt, Homo sapiens
ugcauugagaacugcaua

SEQ ID NO: 29937 - RNA, 14 nt, Homo sapiens
aaaauucauuccau

SEQ ID NO: 29938 - RNA, 14 nt, Homo sapiens
ccuuuagaauauua

SEQ ID NO: 29939 - RNA, 17 nt, Homo sapiens
aaagcauuguaacuuau

SEQ ID NO: 29940 - RNA, 23 nt, Homo sapiens
aaacauuuaucuuuguacguucu

SEQ ID NO: 29941 - RNA, 13 nt, Homo sapiens
ggaugauguuucg

SEQ ID NO: 29942 - RNA, 19 nt, Homo sapiens
cacucauuuauuuccauau

SEQ ID NO: 29943 - RNA, 13 nt, Homo sapiens
caugaaagcguaa

SEQ ID NO: 29944 - RNA, 15 nt, Homo sapiens
auuuaaagacaaaga

SEQ ID NO: 29945 - RNA, 22 nt, Homo sapiens
uuugaacaacucgaaucacuca

SEQ ID NO: 29946 - RNA, 19 nt, Homo sapiens
uucaaaaucaaauuccaga

SEQ ID NO: 29947 - RNA, 20 nt, Homo sapiens
aucaaauaugcaaagcacug

SEQ ID NO: 29948 - RNA, 11 nt, Homo sapiens
cuuuucucugc

SEQ ID NO: 29949 - RNA, 11 nt, Homo sapiens
aggcauucucu

SEQ ID NO: 29950 - RNA, 16 nt, Homo sapiens
aacggaacaguaucca

SEQ ID NO: 29951 - RNA, 15 nt, Homo sapiens
ucuuggucacauaca

SEQ ID NO: 29952 - RNA, 23 nt, Homo sapiens
gaauacuaauaaaauacauacua

SEQ ID NO: 29953 - RNA, 16 nt, Homo sapiens
uuuuacauacugcugu

SEQ ID NO: 29954 - RNA, 18 nt, Homo sapiens
auuuuauuacaucuuuca

SEQ ID NO: 29955 - RNA, 22 nt, Homo sapiens
uagaauacuaauaaaauacaua

SEQ ID NO: 29956 - RNA, 16 nt, Homo sapiens
uagauaaacucagaaa

SEQ ID NO: 29957 - RNA, 23 nt, Homo sapiens
cuauaggugcuacaaaaacacag

SEQ ID NO: 29958 - RNA, 21 nt, Homo sapiens
uuuuuaaacaaaaaaagcauu

SEQ ID NO: 29959 - RNA, 13 nt, Homo sapiens
ucaguuacucuga

SEQ ID NO: 29960 - RNA, 16 nt, Homo sapiens
acuggcucccuggaag

SEQ ID NO: 29961 - RNA, 20 nt, Homo sapiens
aauguaagggaaacugccag

SEQ ID NO: 29962 - RNA, 14 nt, Homo sapiens
uuaguguacaugaa

SEQ ID NO: 29963 - RNA, 16 nt, Homo sapiens
agcuuauuaaaacuca

SEQ ID NO: 29964 - RNA, 16 nt, Homo sapiens
cccaaauuucauaccu

SEQ ID NO: 29965 - RNA, 17 nt, Homo sapiens
cugaagggcaucaugca

SEQ ID NO: 29966 - RNA, 13 nt, Homo sapiens
uugaaaaaguaua

SEQ ID NO: 29967 - RNA, 15 nt, Homo sapiens
cuggcacaguuuucu

SEQ ID NO: 29968 - RNA, 18 nt, Homo sapiens
gccagacuggcacaguuu

SEQ ID NO: 29969 - RNA, 13 nt, Homo sapiens
gauaaagcacugu

SEQ ID NO: 29970 - RNA, 13 nt, Homo sapiens
uuaaaauguaauu

SEQ ID NO: 29971 - RNA, 20 nt, Homo sapiens
ccaaaguaucaggacgagaa

SEQ ID NO: 29972 - RNA, 14 nt, Homo sapiens
uagauaaagcacug

SEQ ID NO: 29973 - RNA, 16 nt, Homo sapiens
ucaugcaaaugcugua

SEQ ID NO: 29974 - RNA, 19 nt, Homo sapiens
aaucacucauuuauuucca

SEQ ID NO: 29975 - RNA, 17 nt, Homo sapiens
cccuucauguacaucca

SEQ ID NO: 29976 - RNA, 23 nt, Homo sapiens
uucaaaaauuauauuuugaacaa

SEQ ID NO: 29977 - RNA, 16 nt, Homo sapiens
uucaaaauuggacuua

SEQ ID NO: 29978 - RNA, 16 nt, Homo sapiens
uccuucucaucuguga

SEQ ID NO: 29979 - RNA, 21 nt, Homo sapiens
aauuuucaaaaucaaauucca

SEQ ID NO: 29980 - RNA, 23 nt, Homo sapiens
auuaucucaaaacugcacuguca

SEQ ID NO: 29981 - RNA, 18 nt, Homo sapiens
ggagaagagcuguucaca

SEQ ID NO: 29982 - RNA, 13 nt, Homo sapiens
uaauuucagaaga

SEQ ID NO: 29983 - RNA, 22 nt, Homo sapiens
gaccuuuguagccacuucacuu

SEQ ID NO: 29984 - RNA, 12 nt, Homo sapiens
uguguuacugau

SEQ ID NO: 29985 - RNA, 15 nt, Homo sapiens
aaagcacugacuucu

SEQ ID NO: 29986 - RNA, 23 nt, Homo sapiens
aaacugauacccuuugaaaaagu

SEQ ID NO: 29987 - RNA, 12 nt, Homo sapiens
acauacaauuau

SEQ ID NO: 29988 - RNA, 17 nt, Homo sapiens
agacagcaggucucaug

SEQ ID NO: 29989 - RNA, 15 nt, Homo sapiens
ugcuuucuaucuaau

SEQ ID NO: 29990 - RNA, 17 nt, Homo sapiens
acuuaaaaucuaauuca

SEQ ID NO: 29991 - RNA, 15 nt, Homo sapiens
uaaaauacacacuca

SEQ ID NO: 29992 - RNA, 16 nt, Homo sapiens
auuuccaaauucacaa

SEQ ID NO: 29993 - RNA, 23 nt, Homo sapiens
aaccaaauuuguauuuaagguau

SEQ ID NO: 29994 - RNA, 21 nt, Homo sapiens
caucacagcugaacuuguuga

SEQ ID NO: 29995 - RNA, 18 nt, Homo sapiens
agccaaguuuauauacaa

SEQ ID NO: 29996 - RNA, 17 nt, Homo sapiens
ucuggacuuuccagaga

SEQ ID NO: 29997 - RNA, 21 nt, Homo sapiens
cuggcucccuggaagagauca

SEQ ID NO: 29998 - RNA, 15 nt, Homo sapiens
cuuuccagagaccag

SEQ ID NO: 29999 - RNA, 15 nt, Homo sapiens
gcaggcuacugucag

SEQ ID NO: 30000 - RNA, 11 nt, Homo sapiens
acuuuuuccag

SEQ ID NO: 30001 - RNA, 18 nt, Homo sapiens
gaguuaggcuauucacaa

SEQ ID NO: 30002 - RNA, 12 nt, Homo sapiens
cauuccauuugc

SEQ ID NO: 30003 - RNA, 17 nt, Homo sapiens
uaaaauacacacucaaa

SEQ ID NO: 30004 - RNA, 17 nt, Homo sapiens
ucuauggcauauugaua

SEQ ID NO: 30005 - RNA, 23 nt, Homo sapiens
gugaauuuuucucuaacucagaa

SEQ ID NO: 30006 - RNA, 14 nt, Homo sapiens
uaggcuauucacaa

SEQ ID NO: 30007 - RNA, 22 nt, Homo sapiens
cuuuaauuucaugaaaagauua

SEQ ID NO: 30008 - RNA, 15 nt, Homo sapiens
gacaguuuucugcuu

SEQ ID NO: 30009 - RNA, 17 nt, Homo sapiens
ugcuacaaaaacacagc

SEQ ID NO: 30010 - RNA, 14 nt, Homo sapiens
agagaccacaagca

SEQ ID NO: 30011 - RNA, 16 nt, Homo sapiens
gugacuuaguguacau

SEQ ID NO: 30012 - RNA, 19 nt, Homo sapiens
aucacucauuuauuuccau

SEQ ID NO: 30013 - RNA, 15 nt, Homo sapiens
auguguuuuucacau

SEQ ID NO: 30014 - RNA, 13 nt, Homo sapiens
ucaaauuccagaa

SEQ ID NO: 30015 - RNA, 17 nt, Homo sapiens
acaacucgaaucacuca

SEQ ID NO: 30016 - RNA, 15 nt, Homo sapiens
agcaaauuccaauac

SEQ ID NO: 30017 - RNA, 21 nt, Homo sapiens
acaauuauuuuuacaguucuc

SEQ ID NO: 30018 - RNA, 19 nt, Homo sapiens
ucuucccuuuuacauacug

SEQ ID NO: 30019 - RNA, 14 nt, Homo sapiens
uuccacuacugcua

SEQ ID NO: 30020 - RNA, 13 nt, Homo sapiens
cacuggcucccug

SEQ ID NO: 30021 - RNA, 22 nt, Homo sapiens
uaugagauguagcaaauuccaa

SEQ ID NO: 30022 - RNA, 15 nt, Homo sapiens
acuauucaaacaguc

SEQ ID NO: 30023 - RNA, 22 nt, Homo sapiens
aauagaaggauguacauuucca

SEQ ID NO: 30024 - RNA, 23 nt, Homo sapiens
uaacucagaaacaucaguuacuc

SEQ ID NO: 30025 - RNA, 15 nt, Homo sapiens
uacaaaaacacagca

SEQ ID NO: 30026 - RNA, 23 nt, Homo sapiens
ccaauacauuauuggacuuccau

SEQ ID NO: 30027 - RNA, 10 nt, Homo sapiens
aaagggaugg

SEQ ID NO: 30028 - RNA, 14 nt, Homo sapiens
uacaaaaacacagc

SEQ ID NO: 30029 - RNA, 18 nt, Homo sapiens
acuuaugaaccuuuacau

SEQ ID NO: 30030 - RNA, 18 nt, Homo sapiens
auuuuaaguaauuucaga

SEQ ID NO: 30031 - RNA, 21 nt, Homo sapiens
uuaucaugcaaaugcuguauu

SEQ ID NO: 30032 - RNA, 13 nt, Homo sapiens
augcauacaguaa

SEQ ID NO: 30033 - RNA, 23 nt, Homo sapiens
ugaaaaaguauaaauaaaaugag

SEQ ID NO: 30034 - RNA, 15 nt, Homo sapiens
guacuuuuuccagac

SEQ ID NO: 30035 - RNA, 20 nt, Homo sapiens
aaucauuucugcaucagcug

SEQ ID NO: 30036 - RNA, 14 nt, Homo sapiens
cuuaaacacuaaaa

SEQ ID NO: 30037 - RNA, 16 nt, Homo sapiens
aauaaaugugccuuca

SEQ ID NO: 30038 - RNA, 20 nt, Homo sapiens
aaaugggcuacuuuguccuu

SEQ ID NO: 30039 - RNA, 14 nt, Homo sapiens
uuccaaauucacaa

SEQ ID NO: 30040 - RNA, 21 nt, Homo sapiens
accuguugauagcaagugaau

SEQ ID NO: 30041 - RNA, 14 nt, Homo sapiens
augaugaugaucuu

SEQ ID NO: 30042 - RNA, 22 nt, Homo sapiens
cuuuuggcuuguaaaguacaga

SEQ ID NO: 30043 - RNA, 16 nt, Homo sapiens
ucuaaguaaaaccaca

SEQ ID NO: 30044 - RNA, 19 nt, Homo sapiens
ugugaacacaucagcuugc

SEQ ID NO: 30045 - RNA, 23 nt, Homo sapiens
uggacuuuccagagaccaguauu

SEQ ID NO: 30046 - RNA, 17 nt, Homo sapiens
ugaguggaugauguuuc

SEQ ID NO: 30047 - RNA, 22 nt, Homo sapiens
uugaacaacucgaaucacucau

SEQ ID NO: 30048 - RNA, 15 nt, Homo sapiens
uaccuaucaucuuaa

SEQ ID NO: 30049 - RNA, 19 nt, Homo sapiens
aauuucauaccuaucaucu

SEQ ID NO: 30050 - RNA, 21 nt, Homo sapiens
agaguucugucuggacuuucc

SEQ ID NO: 30051 - RNA, 17 nt, Homo sapiens
ccuuuuacauacugcug

SEQ ID NO: 30052 - RNA, 13 nt, Homo sapiens
ggcgacaguuuuc

SEQ ID NO: 30053 - RNA, 14 nt, Homo sapiens
gagcaggcuacugu

SEQ ID NO: 30054 - RNA, 18 nt, Homo sapiens
augcuuguauuuuacuuu

SEQ ID NO: 30055 - RNA, 19 nt, Homo sapiens
acacuaaaaaggcauguaa

SEQ ID NO: 30056 - RNA, 13 nt, Homo sapiens
accaaauuuguau

SEQ ID NO: 30057 - RNA, 13 nt, Homo sapiens
cugaauacauucu

SEQ ID NO: 30058 - RNA, 23 nt, Homo sapiens
caagccagccuugcuccuggcug

SEQ ID NO: 30059 - RNA, 17 nt, Homo sapiens
ugaaaauauuuguauca

SEQ ID NO: 30060 - RNA, 21 nt, Homo sapiens
gugguuauuuagggaacugcu

SEQ ID NO: 30061 - RNA, 16 nt, Homo sapiens
aaucauuucugcauca

SEQ ID NO: 30062 - RNA, 16 nt, Homo sapiens
auaauaugagaaucag

SEQ ID NO: 30063 - RNA, 15 nt, Homo sapiens
ucccugcagacauga

SEQ ID NO: 30064 - RNA, 14 nt, Homo sapiens
uaacugcauugaga

SEQ ID NO: 30065 - RNA, 14 nt, Homo sapiens
agaaagacuauuca

SEQ ID NO: 30066 - RNA, 21 nt, Homo sapiens
caaauaugcaaagcacugacu

SEQ ID NO: 30067 - RNA, 17 nt, Homo sapiens
caagugaaaaacaucca

SEQ ID NO: 30068 - RNA, 20 nt, Homo sapiens
aagauuguauagugcauguu

SEQ ID NO: 30069 - RNA, 13 nt, Homo sapiens
gugcuacaaaaac

SEQ ID NO: 30070 - RNA, 14 nt, Homo sapiens
cagccagacuggca

SEQ ID NO: 30071 - RNA, 18 nt, Homo sapiens
gcccuucauguacaucca

SEQ ID NO: 30072 - RNA, 14 nt, Homo sapiens
auucuuuaucacau

SEQ ID NO: 30073 - RNA, 22 nt, Homo sapiens
ugcuggcuuaaaauguaauuaa

SEQ ID NO: 30074 - RNA, 17 nt, Homo sapiens
caacuauauuaucaugc

SEQ ID NO: 30075 - RNA, 20 nt, Homo sapiens
aauacauuauuggacuucca

SEQ ID NO: 30076 - RNA, 22 nt, Homo sapiens
ccguuuugugaagaaacauuua

SEQ ID NO: 30077 - RNA, 22 nt, Homo sapiens
ccuggacaguuuucugcuuuaa

SEQ ID NO: 30078 - RNA, 18 nt, Homo sapiens
aguugauuuuacaauuga

SEQ ID NO: 30079 - RNA, 20 nt, Homo sapiens
aguuuucugcuuuaauuuca

SEQ ID NO: 30080 - RNA, 21 nt, Homo sapiens
uacuuugaacacaaagccugu

SEQ ID NO: 30081 - RNA, 23 nt, Homo sapiens
aagaaauguaagggaaacugcca

SEQ ID NO: 30082 - RNA, 23 nt, Homo sapiens
cuuguuuuuccacuacugcuacc

SEQ ID NO: 30083 - RNA, 12 nt, Homo sapiens
uacauacugcug

SEQ ID NO: 30084 - RNA, 18 nt, Homo sapiens
acacuaaaaaggcaugua

SEQ ID NO: 30085 - RNA, 17 nt, Homo sapiens
aagugaaaaacauccag

SEQ ID NO: 30086 - RNA, 18 nt, Homo sapiens
auuucauaccuaucaucu

SEQ ID NO: 30087 - RNA, 16 nt, Homo sapiens
cauuuccaaauucaca

SEQ ID NO: 30088 - RNA, 23 nt, Homo sapiens
cacugacuucuaaguaaaaccac

SEQ ID NO: 30089 - RNA, 13 nt, Homo sapiens
uauuggacuucca

SEQ ID NO: 30090 - RNA, 17 nt, Homo sapiens
uccuguacuuuuuccag

SEQ ID NO: 30091 - RNA, 22 nt, Homo sapiens
cuagugaaagaggcagcuugaa

SEQ ID NO: 30092 - RNA, 11 nt, Homo sapiens
uuaaaaucaca

SEQ ID NO: 30093 - RNA, 17 nt, Homo sapiens
guaagggaaacugccag

SEQ ID NO: 30094 - RNA, 18 nt, Homo sapiens
cuaauaaaauacauacua

SEQ ID NO: 30095 - RNA, 18 nt, Homo sapiens
cugcugaaacaacaaaua

SEQ ID NO: 30096 - RNA, 16 nt, Homo sapiens
gccuugguauagcaua

SEQ ID NO: 30097 - RNA, 14 nt, Homo sapiens
uggucacauacaau

SEQ ID NO: 30098 - RNA, 16 nt, Homo sapiens
uuguuuuuaaacugga

SEQ ID NO: 30099 - RNA, 20 nt, Homo sapiens
gcuaaguugcaccaacuuug

SEQ ID NO: 30100 - RNA, 20 nt, Homo sapiens
ugaacaacucgaaucacuca

SEQ ID NO: 30101 - RNA, 17 nt, Homo sapiens
uugaaauuaaccauaga

SEQ ID NO: 30102 - RNA, 21 nt, Homo sapiens
guucucuucuuuaaagggaug

SEQ ID NO: 30103 - RNA, 17 nt, Homo sapiens
gagcaggcuacugucag

SEQ ID NO: 30104 - RNA, 13 nt, Homo sapiens
cuuugaagucuga

SEQ ID NO: 30105 - RNA, 17 nt, Homo sapiens
gcagcuugaaacugaga

SEQ ID NO: 30106 - RNA, 18 nt, Homo sapiens
gaaaagauuaugaucuca

SEQ ID NO: 30107 - RNA, 15 nt, Homo sapiens
aaaaucauuucugca

SEQ ID NO: 30108 - RNA, 22 nt, Homo sapiens
aacuuccuuggacucauuuuaa

SEQ ID NO: 30109 - RNA, 22 nt, Homo sapiens
uaauggaauauguaaauagaaa

SEQ ID NO: 30110 - RNA, 15 nt, Homo sapiens
augguuccauucucu

SEQ ID NO: 30111 - RNA, 16 nt, Homo sapiens
guauuuuacuuuucca

SEQ ID NO: 30112 - RNA, 19 nt, Homo sapiens
cugccuugguauagcauau

SEQ ID NO: 30113 - RNA, 14 nt, Homo sapiens
ucucaucugugauu

SEQ ID NO: 30114 - RNA, 13 nt, Homo sapiens
aauuagaugacug

SEQ ID NO: 30115 - RNA, 22 nt, Homo sapiens
uucucugccuugguauagcaua

SEQ ID NO: 30116 - RNA, 21 nt, Homo sapiens
cagcaguugaaaagacuccaa

SEQ ID NO: 30117 - RNA, 23 nt, Homo sapiens
agauuaagagauggguuugacaa

SEQ ID NO: 30118 - RNA, 20 nt, Homo sapiens
agcaaaauggauaugacaca

SEQ ID NO: 30119 - RNA, 13 nt, Homo sapiens
cuuaugaaccuuu

SEQ ID NO: 30120 - RNA, 15 nt, Homo sapiens
gcauuuucacuuuug

SEQ ID NO: 30121 - RNA, 21 nt, Homo sapiens
auuauucccauucuacauacu

SEQ ID NO: 30122 - RNA, 13 nt, Homo sapiens
aagcaacaucuag

SEQ ID NO: 30123 - RNA, 17 nt, Homo sapiens
agaaucagaucauuuca

SEQ ID NO: 30124 - RNA, 16 nt, Homo sapiens
uuccuauguaacugca

SEQ ID NO: 30125 - RNA, 16 nt, Homo sapiens
uauggcuuaaugacac

SEQ ID NO: 30126 - RNA, 17 nt, Homo sapiens
guaaaguacagacuuuu

SEQ ID NO: 30127 - RNA, 20 nt, Homo sapiens
auaggugcuacaaaaacaca

SEQ ID NO: 30128 - RNA, 16 nt, Homo sapiens
uuaccuuuguucccaa

SEQ ID NO: 30129 - RNA, 14 nt, Homo sapiens
ugagaacugcauau

SEQ ID NO: 30130 - RNA, 14 nt, Homo sapiens
uccuagugaaagag

SEQ ID NO: 30131 - RNA, 23 nt, Homo sapiens
uguauuuuauuacaucuuucaca

SEQ ID NO: 30132 - RNA, 22 nt, Homo sapiens
agaugugggcagugaugucacu

SEQ ID NO: 30133 - RNA, 22 nt, Homo sapiens
aggaaaucaaauaugcaaagca

SEQ ID NO: 30134 - RNA, 22 nt, Homo sapiens
aauguaagggaaacugccagca

SEQ ID NO: 30135 - RNA, 15 nt, Homo sapiens
aaaagacuccaaaga

SEQ ID NO: 30136 - RNA, 12 nt, Homo sapiens
ucgaaucacuca

SEQ ID NO: 30137 - RNA, 21 nt, Homo sapiens
auuucauaccuaucaucuuaa

SEQ ID NO: 30138 - RNA, 18 nt, Homo sapiens
acaauuauaucaguccuc

SEQ ID NO: 30139 - RNA, 19 nt, Homo sapiens
ugagagacagcaggucuca

SEQ ID NO: 30140 - RNA, 19 nt, Homo sapiens
acugagaugugaacacauc

SEQ ID NO: 30141 - RNA, 13 nt, Homo sapiens
acaaacucaucca

SEQ ID NO: 30142 - RNA, 14 nt, Homo sapiens
uuauuggacuucca

SEQ ID NO: 30143 - RNA, 15 nt, Homo sapiens
cuuugaagucugauu

SEQ ID NO: 30144 - RNA, 21 nt, Homo sapiens
accagcccuacaccauuccuu

SEQ ID NO: 30145 - RNA, 14 nt, Homo sapiens
acugcauacaaucu

SEQ ID NO: 30146 - RNA, 20 nt, Homo sapiens
cugcauugagaacugcauau

SEQ ID NO: 30147 - RNA, 23 nt, Homo sapiens
aaauucgcugcaaccuguugaua

SEQ ID NO: 30148 - RNA, 21 nt, Homo sapiens
ucucaaaacugcacugucaag

SEQ ID NO: 30149 - RNA, 19 nt, Homo sapiens
agagacagcaggucucaug

SEQ ID NO: 30150 - RNA, 22 nt, Homo sapiens
cucugaagaguggguuucacaa

SEQ ID NO: 30151 - RNA, 13 nt, Homo sapiens
uuuaugcauacag

SEQ ID NO: 30152 - RNA, 21 nt, Homo sapiens
uauggcuauaggugcuacaaa

SEQ ID NO: 30153 - RNA, 22 nt, Homo sapiens
agggacuucugucuucacaaca

SEQ ID NO: 30154 - RNA, 18 nt, Homo sapiens
uuuuaugaaacauuacag

SEQ ID NO: 30155 - RNA, 20 nt, Homo sapiens
uaauguagauaaagcacugu

SEQ ID NO: 30156 - RNA, 18 nt, Homo sapiens
uguuacugccuaucagca

SEQ ID NO: 30157 - RNA, 17 nt, Homo sapiens
aauugaaaggcauucuc

SEQ ID NO: 30158 - RNA, 16 nt, Homo sapiens
ugcaccaacuuugaag

SEQ ID NO: 30159 - RNA, 16 nt, Homo sapiens
uaaaauacacacucaa

SEQ ID NO: 30160 - RNA, 21 nt, Homo sapiens
gauagguuaccaguaacggaa

SEQ ID NO: 30161 - RNA, 16 nt, Homo sapiens
uuaugcauaaagucag

SEQ ID NO: 30162 - RNA, 20 nt, Homo sapiens
aaucaaauaugcaaagcacu

SEQ ID NO: 30163 - RNA, 12 nt, Homo sapiens
uacaucuuucac

SEQ ID NO: 30164 - RNA, 19 nt, Homo sapiens
cacuaaaaaggcauguaau

SEQ ID NO: 30165 - RNA, 19 nt, Homo sapiens
aauaauacaccagagauaa

SEQ ID NO: 30166 - RNA, 17 nt, Homo sapiens
ucaaaacugcacuguca

SEQ ID NO: 30167 - RNA, 18 nt, Homo sapiens
auucccuuuugcugccuc

SEQ ID NO: 30168 - RNA, 14 nt, Homo sapiens
auauaauaugcaca

SEQ ID NO: 30169 - RNA, 22 nt, Homo sapiens
cuaaguaaaaccacagcaguug

SEQ ID NO: 30170 - RNA, 13 nt, Homo sapiens
ugcagacaugaga

SEQ ID NO: 30171 - RNA, 15 nt, Homo sapiens
uaauucaaacuaaua

SEQ ID NO: 30172 - RNA, 14 nt, Homo sapiens
ccagacuggcacag

SEQ ID NO: 30173 - RNA, 16 nt, Homo sapiens
uaggaacgguaaauuu

SEQ ID NO: 30174 - RNA, 18 nt, Homo sapiens
gcaggcccccaggugcca

SEQ ID NO: 30175 - RNA, 16 nt, Homo sapiens
cuuaaagaauuuucaa

SEQ ID NO: 30176 - RNA, 21 nt, Homo sapiens
acauacuauagauucuuuauu

SEQ ID NO: 30177 - RNA, 15 nt, Homo sapiens
gugaacacaucagcu

SEQ ID NO: 30178 - RNA, 12 nt, Homo sapiens
aaacucauccau

SEQ ID NO: 30179 - RNA, 12 nt, Homo sapiens
cgacaguuuucc

SEQ ID NO: 30180 - RNA, 18 nt, Homo sapiens
aaguuuaugcauacagua

SEQ ID NO: 30181 - RNA, 14 nt, Homo sapiens
uaaguaaaaccaca

SEQ ID NO: 30182 - RNA, 14 nt, Homo sapiens
cuuaaaaucuaauu

SEQ ID NO: 30183 - RNA, 19 nt, Homo sapiens
uuucauaccuaucaucuua

SEQ ID NO: 30184 - RNA, 15 nt, Homo sapiens
aauucgcugcaaccu

SEQ ID NO: 30185 - RNA, 16 nt, Homo sapiens
uacauacuauggaauu

SEQ ID NO: 30186 - RNA, 16 nt, Homo sapiens
gcaaauguuaugcaua

SEQ ID NO: 30187 - RNA, 24 nt, Homo sapiens
aucuuguuuuuccacuacugcuac

SEQ ID NO: 30188 - RNA, 13 nt, Homo sapiens
acaucuuucacau

SEQ ID NO: 30189 - RNA, 16 nt, Homo sapiens
uauuacaucuuucaca

SEQ ID NO: 30190 - RNA, 13 nt, Homo sapiens
auuuucacuuuug

SEQ ID NO: 30191 - RNA, 11 nt, Homo sapiens
uuugaacacaa

SEQ ID NO: 30192 - RNA, 14 nt, Homo sapiens
caggaaaucaaaua

SEQ ID NO: 30193 - RNA, 22 nt, Homo sapiens
uccaagcauaccaacacgagca

SEQ ID NO: 30194 - RNA, 18 nt, Homo sapiens
gugcuacaaaaacacagc

SEQ ID NO: 30195 - RNA, 18 nt, Homo sapiens
caaaucuuaacuugaagg

SEQ ID NO: 30196 - RNA, 13 nt, Homo sapiens
gaauuaauggaau

SEQ ID NO: 30197 - RNA, 14 nt, Homo sapiens
cuucacaacagauu

SEQ ID NO: 30198 - RNA, 20 nt, Homo sapiens
gugcuuuuaaaaaaaaauac

SEQ ID NO: 30199 - RNA, 14 nt, Homo sapiens
aaguagggacuucu

SEQ ID NO: 30200 - RNA, 19 nt, Homo sapiens
aauauaauaugcacacagu

SEQ ID NO: 30201 - RNA, 20 nt, Homo sapiens
aguaauuuuaaguaauuuca

SEQ ID NO: 30202 - RNA, 19 nt, Homo sapiens
aaacugcacugucaagaug

SEQ ID NO: 30203 - RNA, 21 nt, Homo sapiens
uuaaaaucacaaacucaucca

SEQ ID NO: 30204 - RNA, 18 nt, Homo sapiens
uacauuauuggacuucca

SEQ ID NO: 30205 - RNA, 21 nt, Homo sapiens
cucauuuauuuccauauuaaa

SEQ ID NO: 30206 - RNA, 15 nt, Homo sapiens
uugcaccaacuuuga

SEQ ID NO: 30207 - RNA, 19 nt, Homo sapiens
uuaaauggagaaaggaccc

SEQ ID NO: 30208 - RNA, 19 nt, Homo sapiens
ccaaguuuauauacaauua

SEQ ID NO: 30209 - RNA, 14 nt, Homo sapiens
ugaagaaacauuua

SEQ ID NO: 30210 - RNA, 15 nt, Homo sapiens
auuguaacuuaugaa

SEQ ID NO: 30211 - RNA, 23 nt, Homo sapiens
acaccgaguggcccuucauguac

SEQ ID NO: 30212 - RNA, 16 nt, Homo sapiens
aaguugcaccaacuuu

SEQ ID NO: 30213 - RNA, 18 nt, Homo sapiens
uagcaaauuccaauacau

SEQ ID NO: 30214 - RNA, 23 nt, Homo sapiens
ucagaaauuuaauucauguuucu

SEQ ID NO: 30215 - RNA, 17 nt, Homo sapiens
auccaaagcugaauaca

SEQ ID NO: 30216 - RNA, 15 nt, Homo sapiens
acagaggaucugcuu

SEQ ID NO: 30217 - RNA, 17 nt, Homo sapiens
aaugacccccaucccau

SEQ ID NO: 30218 - RNA, 14 nt, Homo sapiens
caguccucuuucaa

SEQ ID NO: 30219 - RNA, 21 nt, Homo sapiens
uauguaaauagaaacguguau

SEQ ID NO: 30220 - RNA, 22 nt, Homo sapiens
uacaauuauuuuuacaguucuc

SEQ ID NO: 30221 - RNA, 13 nt, Homo sapiens
uacauacugcugu

SEQ ID NO: 30222 - RNA, 15 nt, Homo sapiens
aaccuuuacauccag

SEQ ID NO: 30223 - RNA, 18 nt, Homo sapiens
uacaguuagagauuuuua

SEQ ID NO: 30224 - RNA, 16 nt, Homo sapiens
uaauucuuuaucacau

SEQ ID NO: 30225 - RNA, 12 nt, Homo sapiens
aaaaagccaaaa

SEQ ID NO: 30226 - RNA, 22 nt, Homo sapiens
agcuuuucaaaauuggacuuaa

SEQ ID NO: 30227 - RNA, 17 nt, Homo sapiens
auuaaaaucacaaacuc

SEQ ID NO: 30228 - RNA, 13 nt, Homo sapiens
aaguaaaaccaca

SEQ ID NO: 30229 - RNA, 15 nt, Homo sapiens
auaugacacaucucu

SEQ ID NO: 30230 - RNA, 15 nt, Homo sapiens
uaaaaccacagcagu

SEQ ID NO: 30231 - RNA, 20 nt, Homo sapiens
agguauauaaauuuucccaa

SEQ ID NO: 30232 - RNA, 16 nt, Homo sapiens
gagcaggcuacuguca

SEQ ID NO: 30233 - RNA, 20 nt, Homo sapiens
uuugaacaacucgaaucacu

SEQ ID NO: 30234 - RNA, 16 nt, Homo sapiens
auacauucugcuuuca

SEQ ID NO: 30235 - RNA, 21 nt, Homo sapiens
uaaaaucacaaacucauccau

SEQ ID NO: 30236 - RNA, 18 nt, Homo sapiens
ugagaaagacuauucaaa

SEQ ID NO: 30237 - RNA, 20 nt, Homo sapiens
aagacuauucaaacagucuc

SEQ ID NO: 30238 - RNA, 13 nt, Homo sapiens
uguaaaugugcuu

SEQ ID NO: 30239 - RNA, 14 nt, Homo sapiens
uugugaagaaacau

SEQ ID NO: 30240 - RNA, 20 nt, Homo sapiens
cuuuccagagaccaguauuc

SEQ ID NO: 30241 - RNA, 19 nt, Homo sapiens
cucauuuauuuccauauua

SEQ ID NO: 30242 - RNA, 12 nt, Homo sapiens
caaguccaagca

SEQ ID NO: 30243 - RNA, 18 nt, Homo sapiens
ugaaagaggcagcuugaa

SEQ ID NO: 30244 - RNA, 21 nt, Homo sapiens
uuuaaagcuuauuaaaacuca

SEQ ID NO: 30245 - RNA, 15 nt, Homo sapiens
ugaacacaucagcuu

SEQ ID NO: 30246 - RNA, 19 nt, Homo sapiens
ucaucuuggucacauacaa

SEQ ID NO: 30247 - RNA, 15 nt, Homo sapiens
cacaaacucauccau

SEQ ID NO: 30248 - RNA, 13 nt, Homo sapiens
cugagcaggauuu

SEQ ID NO: 30249 - RNA, 18 nt, Homo sapiens
agcaaauguuaugcauaa

SEQ ID NO: 30250 - RNA, 23 nt, Homo sapiens
uauugauaauaaaauucauucca

SEQ ID NO: 30251 - RNA, 21 nt, Homo sapiens
aaacugagaugugaacacauc

SEQ ID NO: 30252 - RNA, 22 nt, Homo sapiens
uacucugaagggcaucaugcau

SEQ ID NO: 30253 - RNA, 22 nt, Homo sapiens
aagaugugggcagugaugucac

SEQ ID NO: 30254 - RNA, 14 nt, Homo sapiens
aaagacuccaaaga

SEQ ID NO: 30255 - RNA, 20 nt, Homo sapiens
cgaguggcccuucauguaca

SEQ ID NO: 30256 - RNA, 18 nt, Homo sapiens
guuccuucacauccugug

SEQ ID NO: 30257 - RNA, 19 nt, Homo sapiens
guuuuuccacuacugcuac

SEQ ID NO: 30258 - RNA, 21 nt, Homo sapiens
ucacaagugaaaaacauccag

SEQ ID NO: 30259 - RNA, 13 nt, Homo sapiens
cagcuaaguugca

SEQ ID NO: 30260 - RNA, 13 nt, Homo sapiens
caaccaaauggag

SEQ ID NO: 30261 - RNA, 13 nt, Homo sapiens
augcacacagugc

SEQ ID NO: 30262 - RNA, 16 nt, Homo sapiens
ucugcaagcuuuucaa

SEQ ID NO: 30263 - RNA, 16 nt, Homo sapiens
gaguggguuucacaag

SEQ ID NO: 30264 - RNA, 20 nt, Homo sapiens
caagcuuuucaaaauuggac

SEQ ID NO: 30265 - RNA, 23 nt, Homo sapiens
gacuccaaagaaauguaagggaa

SEQ ID NO: 30266 - RNA, 16 nt, Homo sapiens
cuugaaacugagaugu

SEQ ID NO: 30267 - RNA, 22 nt, Homo sapiens
uucugugggagaauucuuacau

SEQ ID NO: 30268 - RNA, 21 nt, Homo sapiens
acuucugucuucacaacagau

SEQ ID NO: 30269 - RNA, 15 nt, Homo sapiens
cugcaagcuuuucaa

SEQ ID NO: 30270 - RNA, 23 nt, Homo sapiens
aucuuguuuuuccacuacugcua

SEQ ID NO: 30271 - RNA, 15 nt, Homo sapiens
cagaaauuuaauuca

SEQ ID NO: 30272 - RNA, 18 nt, Homo sapiens
aggugagcaggugaugcc

SEQ ID NO: 30273 - RNA, 22 nt, Homo sapiens
caacacgagcaggcuacuguca

SEQ ID NO: 30274 - RNA, 16 nt, Homo sapiens
ucuacauacuauggaa

SEQ ID NO: 30275 - RNA, 21 nt, Homo sapiens
aauuuuucucuaacucagaaa

SEQ ID NO: 30276 - RNA, 20 nt, Homo sapiens
caaaugagccggagccccuu

SEQ ID NO: 30277 - RNA, 11 nt, Homo sapiens
augauguuucg

SEQ ID NO: 30278 - RNA, 17 nt, Homo sapiens
uguagccacuucacuuu

SEQ ID NO: 30279 - RNA, 16 nt, Homo sapiens
caaauguuaugcauaa

SEQ ID NO: 30280 - RNA, 16 nt, Homo sapiens
acacacucaaaucaag

SEQ ID NO: 30281 - RNA, 13 nt, Homo sapiens
uccacuacugcua

SEQ ID NO: 30282 - RNA, 23 nt, Homo sapiens
caacacgagcaggcuacugucag

SEQ ID NO: 30283 - RNA, 13 nt, Homo sapiens
ucauguacaucca

SEQ ID NO: 30284 - RNA, 20 nt, Homo sapiens
cuaaucaauacuuugaacac

SEQ ID NO: 30285 - RNA, 15 nt, Homo sapiens
cuggggccuguugaa

SEQ ID NO: 30286 - RNA, 15 nt, Homo sapiens
uuaaagaauuuucaa

SEQ ID NO: 30287 - RNA, 23 nt, Homo sapiens
uccugcuacucuguuccuucaca

SEQ ID NO: 30288 - RNA, 22 nt, Homo sapiens
acgagcaggcuacugucagcuc

SEQ ID NO: 30289 - RNA, 13 nt, Homo sapiens
cacugcauacaau

SEQ ID NO: 30290 - RNA, 19 nt, Homo sapiens
gguuaccuuuguucccaaa

SEQ ID NO: 30291 - RNA, 17 nt, Homo sapiens
acacucaaaucaagaaa

SEQ ID NO: 30292 - RNA, 15 nt, Homo sapiens
auuauucccauucua

SEQ ID NO: 30293 - RNA, 14 nt, Homo sapiens
auucauuccauuug

SEQ ID NO: 30294 - RNA, 23 nt, Homo sapiens
gcuguucacagccagacuggcac

SEQ ID NO: 30295 - RNA, 19 nt, Homo sapiens
uuaaaaaaaaauacugaug

SEQ ID NO: 30296 - RNA, 13 nt, Homo sapiens
gcagugaugucac

SEQ ID NO: 30297 - RNA, 22 nt, Homo sapiens
guuaccaguaacggaacaguau

SEQ ID NO: 30298 - RNA, 15 nt, Homo sapiens
uugaaacugagaugu

SEQ ID NO: 30299 - RNA, 15 nt, Homo sapiens
agaagacaacauuaa

SEQ ID NO: 30300 - RNA, 18 nt, Homo sapiens
ucacuuuuuuucuuuucu

SEQ ID NO: 30301 - RNA, 20 nt, Homo sapiens
acauuacaguuagagauuuu

SEQ ID NO: 30302 - RNA, 15 nt, Homo sapiens
uuuccaaauucacaa

SEQ ID NO: 30303 - RNA, 17 nt, Homo sapiens
uacaaaaacacagcaag

SEQ ID NO: 30304 - RNA, 22 nt, Homo sapiens
acuccaaagaaauguaagggaa

SEQ ID NO: 30305 - RNA, 16 nt, Homo sapiens
ugaaaagacuccaaag

SEQ ID NO: 30306 - RNA, 20 nt, Homo sapiens
acggagauaucccaggaaaa

SEQ ID NO: 30307 - RNA, 19 nt, Homo sapiens
gcucccuggaagagaucaa

SEQ ID NO: 30308 - RNA, 13 nt, Homo sapiens
gcuauaggugcua

SEQ ID NO: 30309 - RNA, 18 nt, Homo sapiens
cauuuuaaaaaauggaac

SEQ ID NO: 30310 - RNA, 15 nt, Homo sapiens
agugacauguuuaca

SEQ ID NO: 30311 - RNA, 11 nt, Homo sapiens
ucacauuugcg

SEQ ID NO: 30312 - RNA, 13 nt, Homo sapiens
uauaucaguccuc

SEQ ID NO: 30313 - RNA, 19 nt, Homo sapiens
aauuauuuuuacaguucuc

SEQ ID NO: 30314 - RNA, 19 nt, Homo sapiens
gucagugcccaacuguuau

SEQ ID NO: 30315 - RNA, 18 nt, Homo sapiens
auaucaguccucuuucaa

SEQ ID NO: 30316 - RNA, 15 nt, Homo sapiens
uuuuaaguaauuuca

SEQ ID NO: 30317 - RNA, 14 nt, Homo sapiens
aagggauggcaaga

SEQ ID NO: 30318 - RNA, 17 nt, Homo sapiens
ucugucuggacuuucca

SEQ ID NO: 30319 - RNA, 18 nt, Homo sapiens
cuaaguaaaaccacagca

SEQ ID NO: 30320 - RNA, 19 nt, Homo sapiens
aaauugaaaggcauucucu

SEQ ID NO: 30321 - RNA, 18 nt, Homo sapiens
aaaagcaguaacugacaa

SEQ ID NO: 30322 - RNA, 17 nt, Homo sapiens
uacaauugaaaugacua

SEQ ID NO: 30323 - RNA, 18 nt, Homo sapiens
uucccaaauuucauaccu

SEQ ID NO: 30324 - RNA, 22 nt, Homo sapiens
uuucugagaaagacuauucaaa

SEQ ID NO: 30325 - RNA, 16 nt, Homo sapiens
aauaauacaccagaga

SEQ ID NO: 30326 - RNA, 16 nt, Homo sapiens
uacaaaaacacagcaa

SEQ ID NO: 30327 - RNA, 23 nt, Homo sapiens
gugauucccuccugcuacucugu

SEQ ID NO: 30328 - RNA, 18 nt, Homo sapiens
ucuucacaacagauuauu

SEQ ID NO: 30329 - RNA, 16 nt, Homo sapiens
auaauaaaauucauuc

SEQ ID NO: 30330 - RNA, 20 nt, Homo sapiens
gcugucuauguggcuguauc

SEQ ID NO: 30331 - RNA, 18 nt, Homo sapiens
accauaaauuuaaaugga

SEQ ID NO: 30332 - RNA, 14 nt, Homo sapiens
ucaaauaugcaaag

SEQ ID NO: 30333 - RNA, 20 nt, Homo sapiens
ucuuauuucauuucuuugag

SEQ ID NO: 30334 - RNA, 12 nt, Homo sapiens
aacugccagcaa

SEQ ID NO: 30335 - RNA, 16 nt, Homo sapiens
ucagaagaaauucugc

SEQ ID NO: 30336 - RNA, 20 nt, Homo sapiens
cugaauacauucugcuuuca

SEQ ID NO: 30337 - RNA, 20 nt, Homo sapiens
ucaggaaaucaaauaugcaa

SEQ ID NO: 30338 - RNA, 16 nt, Homo sapiens
aauuucauaccuauca

SEQ ID NO: 30339 - RNA, 15 nt, Homo sapiens
ccccucggagaagag

SEQ ID NO: 30340 - RNA, 18 nt, Homo sapiens
aagaaaggccagcaaauu

SEQ ID NO: 30341 - RNA, 14 nt, Homo sapiens
acaucuuucacauu

SEQ ID NO: 30342 - RNA, 13 nt, Homo sapiens
ucuucacaacaga

SEQ ID NO: 30343 - RNA, 16 nt, Homo sapiens
cugucuggacuuucca

SEQ ID NO: 30344 - RNA, 19 nt, Homo sapiens
uucuacauacuauggaauu

SEQ ID NO: 30345 - RNA, 17 nt, Homo sapiens
aaaucaaauuccagaau

SEQ ID NO: 30346 - RNA, 17 nt, Homo sapiens
agugcccaacuguuaua

SEQ ID NO: 30347 - RNA, 13 nt, Homo sapiens
ggacuuccauuug

SEQ ID NO: 30348 - RNA, 17 nt, Homo sapiens
uuguaacuuaugaaccu

SEQ ID NO: 30349 - RNA, 15 nt, Homo sapiens
cucccagucauuuaa

SEQ ID NO: 30350 - RNA, 13 nt, Homo sapiens
ucuuaacuugaag

SEQ ID NO: 30351 - RNA, 17 nt, Homo sapiens
auucugcaagcuuuuca

SEQ ID NO: 30352 - RNA, 14 nt, Homo sapiens
guagcaaauuccaa

SEQ ID NO: 30353 - RNA, 13 nt, Homo sapiens
uaaguaaaaccac

SEQ ID NO: 30354 - RNA, 21 nt, Homo sapiens
aggugcuacaaaaacacagca

SEQ ID NO: 30355 - RNA, 20 nt, Homo sapiens
caaccaaauggagugacuua

SEQ ID NO: 30356 - RNA, 14 nt, Homo sapiens
aaaauaccaugcca

SEQ ID NO: 30357 - RNA, 19 nt, Homo sapiens
ucuaaguaaaaccacagca

SEQ ID NO: 30358 - RNA, 19 nt, Homo sapiens
aguaugcacuaaucaauac

SEQ ID NO: 30359 - RNA, 19 nt, Homo sapiens
uggcacaguuuucugagaa

SEQ ID NO: 30360 - RNA, 14 nt, Homo sapiens
aguugauuuuacaa

SEQ ID NO: 30361 - RNA, 13 nt, Homo sapiens
uuuuccuucucau

SEQ ID NO: 30362 - RNA, 20 nt, Homo sapiens
aagcaacaucuagcaaaugu

SEQ ID NO: 30363 - RNA, 15 nt, Homo sapiens
aaucagaucauuuca

SEQ ID NO: 30364 - RNA, 12 nt, Homo sapiens
uaauucuuuauc

SEQ ID NO: 30365 - RNA, 19 nt, Homo sapiens
auuagugaaguaugcacua

SEQ ID NO: 30366 - RNA, 16 nt, Homo sapiens
gaaaggcauucucuga

SEQ ID NO: 30367 - RNA, 14 nt, Homo sapiens
caugaaaagauuau

SEQ ID NO: 30368 - RNA, 14 nt, Homo sapiens
acauaacauaagcu

SEQ ID NO: 30369 - RNA, 22 nt, Homo sapiens
auuuuguuuuuaaacuggaaau

SEQ ID NO: 30370 - RNA, 19 nt, Homo sapiens
uacauuauuggacuuccau

SEQ ID NO: 30371 - RNA, 16 nt, Homo sapiens
aaacauuuaucuuugu

SEQ ID NO: 30372 - RNA, 17 nt, Homo sapiens
uuccguggcacugcaua

SEQ ID NO: 30373 - RNA, 18 nt, Homo sapiens
agauuguauagugcaugu

SEQ ID NO: 30374 - RNA, 21 nt, Homo sapiens
auucgcugcaaccuguugaua

SEQ ID NO: 30375 - RNA, 15 nt, Homo sapiens
acuuuuggcuuguaa

SEQ ID NO: 30376 - RNA, 18 nt, Homo sapiens
uuguagccacuucacuuu

SEQ ID NO: 30377 - RNA, 21 nt, Homo sapiens
uuuaaaaucauuucugcauca

SEQ ID NO: 30378 - RNA, 23 nt, Homo sapiens
agauuuuguuuuuaaacuggaaa

SEQ ID NO: 30379 - RNA, 16 nt, Homo sapiens
guaacuggcaguuuuc

SEQ ID NO: 30380 - RNA, 17 nt, Homo sapiens
uuguaaguuuaugcaua

SEQ ID NO: 30381 - RNA, 20 nt, Homo sapiens
aaaagauuguauagugcaug

SEQ ID NO: 30382 - RNA, 19 nt, Homo sapiens
aguuauggcuauaggugcu

SEQ ID NO: 30383 - RNA, 20 nt, Homo sapiens
guaugcacuaaucaauacuu

SEQ ID NO: 30384 - RNA, 12 nt, Homo sapiens
uaugcacuaauc

SEQ ID NO: 30385 - RNA, 19 nt, Homo sapiens
ggagaaaggacccucaaga

SEQ ID NO: 30386 - RNA, 17 nt, Homo sapiens
gguuaccuuuguuccca

SEQ ID NO: 30387 - RNA, 19 nt, Homo sapiens
aaguuuaugcauacaguaa

SEQ ID NO: 30388 - RNA, 14 nt, Homo sapiens
cugcuuuaauuuca

SEQ ID NO: 30389 - RNA, 15 nt, Homo sapiens
guggcauuuucacuu

SEQ ID NO: 30390 - RNA, 17 nt, Homo sapiens
aaauauaauaugcacac

SEQ ID NO: 30391 - RNA, 14 nt, Homo sapiens
uaaaaccacagcag

SEQ ID NO: 30392 - RNA, 15 nt, Homo sapiens
uguuuuuaaacugga

SEQ ID NO: 30393 - RNA, 21 nt, Homo sapiens
aacacgagcaggcuacuguca

SEQ ID NO: 30394 - RNA, 12 nt, Homo sapiens
aggcauguaauu

SEQ ID NO: 30395 - RNA, 13 nt, Homo sapiens
ccugcagacauga

SEQ ID NO: 30396 - RNA, 14 nt, Homo sapiens
uccuuccuuaucac

SEQ ID NO: 30397 - RNA, 18 nt, Homo sapiens
ucugccuugguauagcau

SEQ ID NO: 30398 - RNA, 18 nt, Homo sapiens
uacuauagauucuuuauu

SEQ ID NO: 30399 - RNA, 20 nt, Homo sapiens
guucucuucuuuaaagggau

SEQ ID NO: 30400 - RNA, 13 nt, Homo sapiens
uucugcaagcuuu

SEQ ID NO: 30401 - RNA, 20 nt, Homo sapiens
auaaagcacuguuuggauau

SEQ ID NO: 30402 - RNA, 18 nt, Homo sapiens
cuggcuggggccuguuga

SEQ ID NO: 30403 - RNA, 16 nt, Homo sapiens
gcuacaaaaacacagc

SEQ ID NO: 30404 - RNA, 15 nt, Homo sapiens
uuccuggacaguuuu

SEQ ID NO: 30405 - RNA, 16 nt, Homo sapiens
ugauucccuccugcua

SEQ ID NO: 30406 - RNA, 20 nt, Homo sapiens
acuucuaaguaaaaccacag

SEQ ID NO: 30407 - RNA, 19 nt, Homo sapiens
uauaucaguccucuuucaa

SEQ ID NO: 30408 - RNA, 19 nt, Homo sapiens
aaugacuaaaaaacaaaga

SEQ ID NO: 30409 - RNA, 17 nt, Homo sapiens
uggaaucauaugggaua

SEQ ID NO: 30410 - RNA, 20 nt, Homo sapiens
uaaguugcaccaacuuugaa

SEQ ID NO: 30411 - RNA, 18 nt, Homo sapiens
cuggcuuaaaauguaauu

SEQ ID NO: 30412 - RNA, 18 nt, Homo sapiens
cacaaacucauccauuaa

SEQ ID NO: 30413 - RNA, 13 nt, Homo sapiens
uguugauagcaag

SEQ ID NO: 30414 - RNA, 21 nt, Homo sapiens
cacagcaagggugaugggaaa

SEQ ID NO: 30415 - RNA, 17 nt, Homo sapiens
uguagauaaacucagaa

SEQ ID NO: 30416 - RNA, 23 nt, Homo sapiens
guauuuuauuacaucuuucacau

SEQ ID NO: 30417 - RNA, 13 nt, Homo sapiens
gacaaauucuguu

SEQ ID NO: 30418 - RNA, 17 nt, Homo sapiens
ugaaaggcauucucuga

SEQ ID NO: 30419 - RNA, 15 nt, Homo sapiens
uggcauuuucacuuu

SEQ ID NO: 30420 - RNA, 17 nt, Homo sapiens
agacuauucaaacaguc

SEQ ID NO: 30421 - RNA, 18 nt, Homo sapiens
uaaguugcaccaacuuug

SEQ ID NO: 30422 - RNA, 17 nt, Homo sapiens
gcauuguaacuuaugaa

SEQ ID NO: 30423 - RNA, 19 nt, Homo sapiens
aucaugcaaaugcuguauu

SEQ ID NO: 30424 - RNA, 16 nt, Homo sapiens
aauaaaaugagcaaaa

SEQ ID NO: 30425 - RNA, 16 nt, Homo sapiens
ucucuaacucagaaac

SEQ ID NO: 30426 - RNA, 15 nt, Homo sapiens
uggacuuccauuugg

SEQ ID NO: 30427 - RNA, 21 nt, Homo sapiens
uauucacaaccacucauucaa

SEQ ID NO: 30428 - RNA, 20 nt, Homo sapiens
ucauuaucucaaaacugcac

SEQ ID NO: 30429 - RNA, 14 nt, Homo sapiens
aaaucauuucugca

SEQ ID NO: 30430 - RNA, 15 nt, Homo sapiens
guagccacuucacuu

SEQ ID NO: 30431 - RNA, 23 nt, Homo sapiens
agcuaaguugcaccaacuuugaa

SEQ ID NO: 30432 - RNA, 12 nt, Homo sapiens
aaaaaaagccaa

SEQ ID NO: 30433 - RNA, 21 nt, Homo sapiens
ucuuaaacacuaaaaaggcau

SEQ ID NO: 30434 - RNA, 19 nt, Homo sapiens
accaguaacggaacaguau

SEQ ID NO: 30435 - RNA, 15 nt, Homo sapiens
uccuauguaacugca

SEQ ID NO: 30436 - RNA, 20 nt, Homo sapiens
gcuacucuguuccuucacau

SEQ ID NO: 30437 - RNA, 20 nt, Homo sapiens
cugucccugcagacaugaga

SEQ ID NO: 30438 - RNA, 15 nt, Homo sapiens
uaucuuaguugguau

SEQ ID NO: 30439 - RNA, 20 nt, Homo sapiens
cuuguugagauccccguguu

SEQ ID NO: 30440 - RNA, 24 nt, Homo sapiens
aaugauuuuacggagauaucccag

SEQ ID NO: 30441 - RNA, 19 nt, Homo sapiens
aaguaugcacuaaucaaua

SEQ ID NO: 30442 - RNA, 20 nt, Homo sapiens
caagcauaccaacacgagca

SEQ ID NO: 30443 - RNA, 14 nt, Homo sapiens
gugaacacaucagc

SEQ ID NO: 30444 - RNA, 22 nt, Homo sapiens
uauuuccauauuaaaaucacaa

SEQ ID NO: 30445 - RNA, 17 nt, Homo sapiens
uucccauucuacauacu

SEQ ID NO: 30446 - RNA, 15 nt, Homo sapiens
cucuggcgacaguuu

SEQ ID NO: 30447 - RNA, 13 nt, Homo sapiens
cuuaaaauguaau

SEQ ID NO: 30448 - RNA, 20 nt, Homo sapiens
gccuguugaagaugcuugua

SEQ ID NO: 30449 - RNA, 23 nt, Homo sapiens
ucacuuuuuuucuuuucucugcc

SEQ ID NO: 30450 - RNA, 14 nt, Homo sapiens
aucaaccaaaugga

SEQ ID NO: 30451 - RNA, 19 nt, Homo sapiens
gucacagaggaucugcuug

SEQ ID NO: 30452 - RNA, 19 nt, Homo sapiens
gcuuuccguggcacugcau

SEQ ID NO: 30453 - RNA, 18 nt, Homo sapiens
cugagaaagacuauucaa

SEQ ID NO: 30454 - RNA, 16 nt, Homo sapiens
auguagauaaagcacu

SEQ ID NO: 30455 - RNA, 22 nt, Homo sapiens
gaccuggucgucgucuugacuu

SEQ ID NO: 30456 - RNA, 22 nt, Homo sapiens
cggagaagagcuguucacagcc

SEQ ID NO: 30457 - RNA, 16 nt, Homo sapiens
gcaaauuccaauacau

SEQ ID NO: 30458 - RNA, 14 nt, Homo sapiens
aaucagaucauuuc

SEQ ID NO: 30459 - RNA, 22 nt, Homo sapiens
caaauucgcugcaaccuguuga

SEQ ID NO: 30460 - RNA, 22 nt, Homo sapiens
aaaggccugucccugcagacau

SEQ ID NO: 30461 - RNA, 19 nt, Homo sapiens
ugcuuguuagcaaaaugga

SEQ ID NO: 30462 - RNA, 19 nt, Homo sapiens
caagcuuuucaaaauugga

SEQ ID NO: 30463 - RNA, 14 nt, Homo sapiens
auuacaucuuucac

SEQ ID NO: 30464 - RNA, 23 nt, Homo sapiens
gcaacgcaggcccccaggugcca

SEQ ID NO: 30465 - RNA, 19 nt, Homo sapiens
ucacaaaucuuaacuugaa

SEQ ID NO: 30466 - RNA, 16 nt, Homo sapiens
uauucccuuuugcugc

SEQ ID NO: 30467 - RNA, 17 nt, Homo sapiens
auuuccaaauucacaag

SEQ ID NO: 30468 - RNA, 23 nt, Homo sapiens
acagaagagugacauguuuacaa

SEQ ID NO: 30469 - RNA, 19 nt, Homo sapiens
uucucuggcgacaguuuuc

SEQ ID NO: 30470 - RNA, 18 nt, Homo sapiens
ugccuugguauagcauau

SEQ ID NO: 30471 - RNA, 11 nt, Homo sapiens
guauauucaaa

SEQ ID NO: 30472 - RNA, 15 nt, Homo sapiens
uagccacuucacuuu

SEQ ID NO: 30473 - RNA, 16 nt, Homo sapiens
ucacaaacucauccau

SEQ ID NO: 30474 - RNA, 21 nt, Homo sapiens
uucaaaaucaaauuccagaau

SEQ ID NO: 30475 - RNA, 16 nt, Homo sapiens
uacauucugcuuucau

SEQ ID NO: 30476 - RNA, 14 nt, Homo sapiens
aguacagacuuuuu

SEQ ID NO: 30477 - RNA, 18 nt, Homo sapiens
cucaaaauaccaugccau

SEQ ID NO: 30478 - RNA, 19 nt, Homo sapiens
ugauacuuuuuucauuauu

SEQ ID NO: 30479 - RNA, 16 nt, Homo sapiens
uuccuuaucacugaca

SEQ ID NO: 30480 - RNA, 13 nt, Homo sapiens
gcugagcagucag

SEQ ID NO: 30481 - RNA, 15 nt, Homo sapiens
caguauccaguacuc

SEQ ID NO: 30482 - RNA, 21 nt, Homo sapiens
aucuuuaaaauacacacucaa

SEQ ID NO: 30483 - RNA, 11 nt, Homo sapiens
acauacugcug

SEQ ID NO: 30484 - RNA, 16 nt, Homo sapiens
gugaaguauacuguau

SEQ ID NO: 30485 - RNA, 21 nt, Homo sapiens
aacacuaaaaaggcauguaau

SEQ ID NO: 30486 - RNA, 21 nt, Homo sapiens
auugaaaggcauucucugaag

SEQ ID NO: 30487 - RNA, 21 nt, Homo sapiens
ucccaaauuucauaccuauca

SEQ ID NO: 30488 - RNA, 18 nt, Homo sapiens
gagaaucagaucauuuca

SEQ ID NO: 30489 - RNA, 19 nt, Homo sapiens
ucaagaugaugaugaucuu

SEQ ID NO: 30490 - RNA, 17 nt, Homo sapiens
cuuguuagcaaaaugga

SEQ ID NO: 30491 - RNA, 23 nt, Homo sapiens
uuuuuccuuccuuaucacugaca

SEQ ID NO: 30492 - RNA, 18 nt, Homo sapiens
aaguccaagcauaccaac

SEQ ID NO: 30493 - RNA, 23 nt, Homo sapiens
uauaaauuuucccaaaacugaua

SEQ ID NO: 30494 - RNA, 23 nt, Homo sapiens
auuggacuuaaaaucuaauucaa

SEQ ID NO: 30495 - RNA, 23 nt, Homo sapiens
aaaaggccugucccugcagacau

SEQ ID NO: 30496 - RNA, 21 nt, Homo sapiens
gcaucaauuuuucuuauuuca

SEQ ID NO: 30497 - RNA, 23 nt, Homo sapiens
gcaaaugcuguauucuucuuugg

SEQ ID NO: 30498 - RNA, 17 nt, Homo sapiens
uaaaaaggcauguaauu

SEQ ID NO: 30499 - RNA, 15 nt, Homo sapiens
ucuacauacuaugga

SEQ ID NO: 30500 - RNA, 19 nt, Homo sapiens
uauuagugaaguaugcacu

SEQ ID NO: 30501 - RNA, 20 nt, Homo sapiens
caacuugaauaauacaccag

SEQ ID NO: 30502 - RNA, 19 nt, Homo sapiens
ccaaauuucauaccuauca

SEQ ID NO: 30503 - RNA, 18 nt, Homo sapiens
acaacuugaauaauacac

SEQ ID NO: 30504 - RNA, 17 nt, Homo sapiens
caaagcugaauacauuc

SEQ ID NO: 30505 - RNA, 17 nt, Homo sapiens
aacuggcaguuuuccau

SEQ ID NO: 30506 - RNA, 12 nt, Homo sapiens
auacacacucaa

SEQ ID NO: 30507 - RNA, 19 nt, Homo sapiens
aaucaaauuccagaaugau

SEQ ID NO: 30508 - RNA, 15 nt, Homo sapiens
guggaugauguuucg

SEQ ID NO: 30509 - RNA, 23 nt, Homo sapiens
acaccauuccuucugcccugcuu

SEQ ID NO: 30510 - RNA, 15 nt, Homo sapiens
gcuuaaaauguaauu

SEQ ID NO: 30511 - RNA, 21 nt, Homo sapiens
uuguuuuaaaauuaaagcuaa

SEQ ID NO: 30512 - RNA, 14 nt, Homo sapiens
agccagacuggcac

SEQ ID NO: 30513 - RNA, 17 nt, Homo sapiens
acauuauuggacuucca

SEQ ID NO: 30514 - RNA, 13 nt, Homo sapiens
gauaaacucagaa

SEQ ID NO: 30515 - RNA, 14 nt, Homo sapiens
ucaguccucuuuca

SEQ ID NO: 30516 - RNA, 19 nt, Homo sapiens
uacauuuccaaauucacaa

SEQ ID NO: 30517 - RNA, 23 nt, Homo sapiens
cucauuuuuguuuucauuaucuc

SEQ ID NO: 30518 - RNA, 17 nt, Homo sapiens
auacauacuauagauuc

SEQ ID NO: 30519 - RNA, 16 nt, Homo sapiens
caacagauuauuaccu

SEQ ID NO: 30520 - RNA, 18 nt, Homo sapiens
aaauuauauuuugaacaa

SEQ ID NO: 30521 - RNA, 19 nt, Homo sapiens
ucacaaccacucauucaaa

SEQ ID NO: 30522 - RNA, 16 nt, Homo sapiens
uuccguggcacugcau

SEQ ID NO: 30523 - RNA, 21 nt, Homo sapiens
ucugauuuuccuggacaguuu

SEQ ID NO: 30524 - RNA, 23 nt, Homo sapiens
aaggcuucucuuaaacacuaaaa

SEQ ID NO: 30525 - RNA, 11 nt, Homo sapiens
aaaagccaaaa

SEQ ID NO: 30526 - RNA, 12 nt, Homo sapiens
aauucauguuuc

SEQ ID NO: 30527 - RNA, 13 nt, Homo sapiens
agacuccaaagaa

SEQ ID NO: 30528 - RNA, 19 nt, Homo sapiens
uguagauaaacucagaaau

SEQ ID NO: 30529 - RNA, 17 nt, Homo sapiens
agaugugggcagugaug

SEQ ID NO: 30530 - RNA, 18 nt, Homo sapiens
uauuuaaagacaaagaca

SEQ ID NO: 30531 - RNA, 20 nt, Homo sapiens
gaaucacucauuuauuucca

SEQ ID NO: 30532 - RNA, 13 nt, Homo sapiens
uccuggacaguuu

SEQ ID NO: 30533 - RNA, 14 nt, Homo sapiens
uuuucauuaucuca

SEQ ID NO: 30534 - RNA, 16 nt, Homo sapiens
auacuguauuuuuacc

SEQ ID NO: 30535 - RNA, 19 nt, Homo sapiens
cugucuggacuuuccagag

SEQ ID NO: 30536 - RNA, 21 nt, Homo sapiens
agcaagugaauuuuucucuaa

SEQ ID NO: 30537 - RNA, 20 nt, Homo sapiens
aauuucauaccuaucaucuu

SEQ ID NO: 30538 - RNA, 21 nt, Homo sapiens
acaaaaaaagcauuguaacuu

SEQ ID NO: 30539 - RNA, 19 nt, Homo sapiens
agaugugaacacaucagcu

SEQ ID NO: 30540 - RNA, 17 nt, Homo sapiens
gaguucugucuggacuu

SEQ ID NO: 30541 - RNA, 23 nt, Homo sapiens
auguagcaaauuccaauacauua

SEQ ID NO: 30542 - RNA, 17 nt, Homo sapiens
ucauguacauccauggu

SEQ ID NO: 30543 - RNA, 23 nt, Homo sapiens
agaaagacuauucaaacagucuc

SEQ ID NO: 30544 - RNA, 17 nt, Homo sapiens
uguaaguuuaugcauac

SEQ ID NO: 30545 - RNA, 22 nt, Homo sapiens
gcacuaaucaauacuuugaaca

SEQ ID NO: 30546 - RNA, 15 nt, Homo sapiens
cauaaagucagugcc

SEQ ID NO: 30547 - RNA, 16 nt, Homo sapiens
ccuucauguacaucca

SEQ ID NO: 30548 - RNA, 16 nt, Homo sapiens
aaaaucacaaacucau

SEQ ID NO: 30549 - RNA, 15 nt, Homo sapiens
augacacaucucuga

SEQ ID NO: 30550 - RNA, 23 nt, Homo sapiens
aauaaaagauuguauagugcaug

SEQ ID NO: 30551 - RNA, 16 nt, Homo sapiens
ucaaauguuguucucu

SEQ ID NO: 30552 - RNA, 21 nt, Homo sapiens
uaacugcauugagaacugcau

SEQ ID NO: 30553 - RNA, 16 nt, Homo sapiens
ugcuaucgccaucaca

SEQ ID NO: 30554 - RNA, 17 nt, Homo sapiens
cuauucaaacagucuca

SEQ ID NO: 30555 - RNA, 20 nt, Homo sapiens
cccaaauuucauaccuauca

SEQ ID NO: 30556 - RNA, 15 nt, Homo sapiens
aagauuaugaucuca

SEQ ID NO: 30557 - RNA, 18 nt, Homo sapiens
cuuggucacauacaauua

SEQ ID NO: 30558 - RNA, 17 nt, Homo sapiens
auugaaaggcauucucu

SEQ ID NO: 30559 - RNA, 14 nt, Homo sapiens
uaguguacaugaaa

SEQ ID NO: 30560 - RNA, 15 nt, Homo sapiens
gacuuaaaaucuaau

SEQ ID NO: 30561 - RNA, 14 nt, Homo sapiens
uuuaaguaauuuca

SEQ ID NO: 30562 - RNA, 22 nt, Homo sapiens
acaagcaggcucaacauaacau

SEQ ID NO: 30563 - RNA, 13 nt, Homo sapiens
aaguacagacuuu

SEQ ID NO: 30564 - RNA, 17 nt, Homo sapiens
gcauuguaaaugugcuu

SEQ ID NO: 30565 - RNA, 17 nt, Homo sapiens
gaauauguaaauagaaa

SEQ ID NO: 30566 - RNA, 15 nt, Homo sapiens
aauucauuccauuug

SEQ ID NO: 30567 - RNA, 18 nt, Homo sapiens
ucaucuuggucacauaca

SEQ ID NO: 30568 - RNA, 23 nt, Homo sapiens
cuccuggcuggggccuguugaag

SEQ ID NO: 30569 - RNA, 15 nt, Homo sapiens
ccuuuacauccagau

SEQ ID NO: 30570 - RNA, 23 nt, Homo sapiens
ucaucugugauucccuccugcua

SEQ ID NO: 30571 - RNA, 18 nt, Homo sapiens
guuuuuccacuacugcua

SEQ ID NO: 30572 - RNA, 17 nt, Homo sapiens
uaacuuaugaaccuuua

SEQ ID NO: 30573 - RNA, 16 nt, Homo sapiens
cuaaaguaucuguauu

SEQ ID NO: 30574 - RNA, 12 nt, Homo sapiens
gauagcaaguga

SEQ ID NO: 30575 - RNA, 12 nt, Homo sapiens
accacauggcuu

SEQ ID NO: 30576 - RNA, 16 nt, Homo sapiens
uucucuaacucagaaa

SEQ ID NO: 30577 - RNA, 18 nt, Homo sapiens
uaauguagauaaagcacu

SEQ ID NO: 30578 - RNA, 19 nt, Homo sapiens
uuauuuagggaacugcuug

SEQ ID NO: 30579 - RNA, 13 nt, Homo sapiens
aucaggacgagaa

SEQ ID NO: 30580 - RNA, 14 nt, Homo sapiens
ugggaaagcauugu

SEQ ID NO: 30581 - RNA, 19 nt, Homo sapiens
acauccagauagguuacca

SEQ ID NO: 30582 - RNA, 14 nt, Homo sapiens
augcaaagcacuga

SEQ ID NO: 30583 - RNA, 19 nt, Homo sapiens
gcuuguuagcaaaauggau

SEQ ID NO: 30584 - RNA, 22 nt, Homo sapiens
acuucuaaguaaaaccacagca

SEQ ID NO: 30585 - RNA, 17 nt, Homo sapiens
caucuuggucacauaca

SEQ ID NO: 30586 - RNA, 16 nt, Homo sapiens
aucaaccaaauggagu

SEQ ID NO: 30587 - RNA, 18 nt, Homo sapiens
cuuuuaaaaaaaaauacu

SEQ ID NO: 30588 - RNA, 18 nt, Homo sapiens
gacaaagacaaauucugu

SEQ ID NO: 30589 - RNA, 12 nt, Homo sapiens
auauuagcuuua

SEQ ID NO: 30590 - RNA, 15 nt, Homo sapiens
auuaaggcuucucuu

SEQ ID NO: 30591 - RNA, 19 nt, Homo sapiens
caggugccaguuauggcua

SEQ ID NO: 30592 - RNA, 15 nt, Homo sapiens
cuugguauagcauau

SEQ ID NO: 30593 - RNA, 20 nt, Homo sapiens
auggaauuucucccagucau

SEQ ID NO: 30594 - RNA, 19 nt, Homo sapiens
ugcuggcuuaaaauguaau

SEQ ID NO: 30595 - RNA, 20 nt, Homo sapiens
cuagcaaauguuaugcauaa

SEQ ID NO: 30596 - RNA, 23 nt, Homo sapiens
gaggauguguggcauuuucacuu

SEQ ID NO: 30597 - RNA, 17 nt, Homo sapiens
caggauaagagggauua

SEQ ID NO: 30598 - RNA, 18 nt, Homo sapiens
cuaauagaauuaauggaa

SEQ ID NO: 30599 - RNA, 20 nt, Homo sapiens
ucauuuuaaaaaauggaaca

SEQ ID NO: 30600 - RNA, 19 nt, Homo sapiens
gcaguugaaaagacuccaa

SEQ ID NO: 30601 - RNA, 20 nt, Homo sapiens
acagcaagggugaugggaaa

SEQ ID NO: 30602 - RNA, 17 nt, Homo sapiens
cucuggcgacaguuuuc

SEQ ID NO: 30603 - RNA, 21 nt, Homo sapiens
agaaaggacccucaagacaaa

SEQ ID NO: 30604 - RNA, 20 nt, Homo sapiens
uucugcccugcuuuugcuag

SEQ ID NO: 30605 - RNA, 22 nt, Homo sapiens
aagaguggguuucacaagugaa

SEQ ID NO: 30606 - RNA, 14 nt, Homo sapiens
aucaguuacucuga

SEQ ID NO: 30607 - RNA, 19 nt, Homo sapiens
augguuccauucucucucc

SEQ ID NO: 30608 - RNA, 13 nt, Homo sapiens
gaaauuaaccaua

SEQ ID NO: 30609 - RNA, 18 nt, Homo sapiens
cccuuuuacauacugcug

SEQ ID NO: 30610 - RNA, 14 nt, Homo sapiens
uaugacacaucucu

SEQ ID NO: 30611 - RNA, 20 nt, Homo sapiens
auuucauaccuaucaucuua

SEQ ID NO: 30612 - RNA, 12 nt, Homo sapiens
caguaacugaca

SEQ ID NO: 30613 - RNA, 22 nt, Homo sapiens
uauuuuuuaugaaacauuacag

SEQ ID NO: 30614 - RNA, 17 nt, Homo sapiens
agaaggauguacauuuc

SEQ ID NO: 30615 - RNA, 12 nt, Homo sapiens
aaaagccaaaaa

SEQ ID NO: 30616 - RNA, 15 nt, Homo sapiens
aucagcuaaguugca

SEQ ID NO: 30617 - RNA, 14 nt, Homo sapiens
aucauaugggauac

SEQ ID NO: 30618 - RNA, 22 nt, Homo sapiens
acacagcaagggugaugggaaa

SEQ ID NO: 30619 - RNA, 20 nt, Homo sapiens
aaagauuucuugaguuuugu

SEQ ID NO: 30620 - RNA, 19 nt, Homo sapiens
auccagauagguuaccagu

SEQ ID NO: 30621 - RNA, 23 nt, Homo sapiens
uuuuauggaggcuuugcauagau

SEQ ID NO: 30622 - RNA, 18 nt, Homo sapiens
ucugauuuuccuggacag

SEQ ID NO: 30623 - RNA, 16 nt, Homo sapiens
auucucucuccuguac

SEQ ID NO: 30624 - RNA, 21 nt, Homo sapiens
aaacuaccagcccuacaccau

SEQ ID NO: 30625 - RNA, 18 nt, Homo sapiens
aucuuuaaaauacacacu

SEQ ID NO: 30626 - RNA, 13 nt, Homo sapiens
uccaaauucacaa

SEQ ID NO: 30627 - RNA, 15 nt, Homo sapiens
aaauauaauaugcac

SEQ ID NO: 30628 - RNA, 19 nt, Homo sapiens
uucuaaguaaaaccacagc

SEQ ID NO: 30629 - RNA, 16 nt, Homo sapiens
auuuuucucuaacuca

SEQ ID NO: 30630 - RNA, 21 nt, Homo sapiens
cuauugugcuuucuaucuaau

SEQ ID NO: 30631 - RNA, 20 nt, Homo sapiens
cacagcugaacuuguugaga

SEQ ID NO: 30632 - RNA, 20 nt, Homo sapiens
caacuauauuaucaugcaaa

SEQ ID NO: 30633 - RNA, 21 nt, Homo sapiens
agaaugauuuuacggagauau

SEQ ID NO: 30634 - RNA, 20 nt, Homo sapiens
agaauauuaaaaauuaauuc

SEQ ID NO: 30635 - RNA, 14 nt, Homo sapiens
aaaugugccuucau

SEQ ID NO: 30636 - RNA, 14 nt, Homo sapiens
acucauccauuaau

SEQ ID NO: 30637 - RNA, 13 nt, Homo sapiens
auucccauucuac

SEQ ID NO: 30638 - RNA, 18 nt, Homo sapiens
aucacucauuuauuucca

SEQ ID NO: 30639 - RNA, 16 nt, Homo sapiens
ucuuaaguagggacuu

SEQ ID NO: 30640 - RNA, 16 nt, Homo sapiens
gcacuuuaaacauuua

SEQ ID NO: 30641 - RNA, 19 nt, Homo sapiens
gcaaccccaucauccucag

SEQ ID NO: 30642 - RNA, 20 nt, Homo sapiens
aaccaaauggagugacuuag

SEQ ID NO: 30643 - RNA, 20 nt, Homo sapiens
uuuuuauggaggcuuugcau

SEQ ID NO: 30644 - RNA, 18 nt, Homo sapiens
aggugcuacaaaaacaca

SEQ ID NO: 30645 - RNA, 19 nt, Homo sapiens
aacaucaguuacucugaag

SEQ ID NO: 30646 - RNA, 14 nt, Homo sapiens
ccaaguuuauauac

SEQ ID NO: 30647 - RNA, 20 nt, Homo sapiens
aaaaccaaauuuguauuuaa

SEQ ID NO: 30648 - RNA, 10 nt, Homo sapiens
cauacugcug

SEQ ID NO: 30649 - RNA, 18 nt, Homo sapiens
gacaggauaagagggauu

SEQ ID NO: 30650 - RNA, 14 nt, Homo sapiens
cacaaaucuuaacu

SEQ ID NO: 30651 - RNA, 20 nt, Homo sapiens
agagaagauagcagggcaug

SEQ ID NO: 30652 - RNA, 14 nt, Homo sapiens
aucuuacugaaggu

SEQ ID NO: 30653 - RNA, 21 nt, Homo sapiens
uucaugaaaagauuaugaucu

SEQ ID NO: 30654 - RNA, 16 nt, Homo sapiens
acuuaguguacaugaa

SEQ ID NO: 30655 - RNA, 15 nt, Homo sapiens
cauccagauagguua

SEQ ID NO: 30656 - RNA, 18 nt, Homo sapiens
ggaguuaggcuauucaca

SEQ ID NO: 30657 - RNA, 22 nt, Homo sapiens
aaacaucaguuacucugaaggg

SEQ ID NO: 30658 - RNA, 22 nt, Homo sapiens
ccagguagagagaccacaagca

SEQ ID NO: 30659 - RNA, 15 nt, Homo sapiens
auugagaacugcaua

SEQ ID NO: 30660 - RNA, 19 nt, Homo sapiens
ucacaaaaguauauucaaa

SEQ ID NO: 30661 - RNA, 16 nt, Homo sapiens
gacuuuggcaaaugag

SEQ ID NO: 30662 - RNA, 22 nt, Homo sapiens
auauuuguaucacaaaucuuaa

SEQ ID NO: 30663 - RNA, 23 nt, Homo sapiens
auuaaaacucauuuuuguuuuca

SEQ ID NO: 30664 - RNA, 15 nt, Homo sapiens
cucaagacaaaugac

SEQ ID NO: 30665 - RNA, 20 nt, Homo sapiens
augaaaagauuaugaucuca

SEQ ID NO: 30666 - RNA, 16 nt, Homo sapiens
aauuccaauacauuau

SEQ ID NO: 30667 - RNA, 23 nt, Homo sapiens
cagaagaaauucugcaagcuuuu

SEQ ID NO: 30668 - RNA, 21 nt, Homo sapiens
caguaauuuuaaguaauuuca

SEQ ID NO: 30669 - RNA, 20 nt, Homo sapiens
aagaccuggucgucgucuug

SEQ ID NO: 30670 - RNA, 20 nt, Homo sapiens
auacauuauuggacuuccau

SEQ ID NO: 30671 - RNA, 15 nt, Homo sapiens
caaccacucauucaa

SEQ ID NO: 30672 - RNA, 16 nt, Homo sapiens
cugauacccuuugaaa

SEQ ID NO: 30673 - RNA, 18 nt, Homo sapiens
acaucaguuacucugaag

SEQ ID NO: 30674 - RNA, 20 nt, Homo sapiens
acagucucaggaaaucaaau

SEQ ID NO: 30675 - RNA, 21 nt, Homo sapiens
caauagaaggauguacauuuc

SEQ ID NO: 30676 - RNA, 16 nt, Homo sapiens
auaugacacaucucug

SEQ ID NO: 30677 - RNA, 13 nt, Homo sapiens
agauuaugaucuc

SEQ ID NO: 30678 - RNA, 12 nt, Homo sapiens
ucccuuuuacau

SEQ ID NO: 30679 - RNA, 16 nt, Homo sapiens
acuaauaaaauacaua

SEQ ID NO: 30680 - RNA, 23 nt, Homo sapiens
gaagagaauauuagcuuuacugu

SEQ ID NO: 30681 - RNA, 17 nt, Homo sapiens
aucaaauuccagaauga

SEQ ID NO: 30682 - RNA, 21 nt, Homo sapiens
agauguagauaaacucagaaa

SEQ ID NO: 30683 - RNA, 17 nt, Homo sapiens
cauuuccaaauucacaa

SEQ ID NO: 30684 - RNA, 18 nt, Homo sapiens
uggaauauguaaauagaa

SEQ ID NO: 30685 - RNA, 20 nt, Homo sapiens
caaucacaaaaguauauuca

SEQ ID NO: 30686 - RNA, 16 nt, Homo sapiens
agauccccguguuacu

SEQ ID NO: 30687 - RNA, 12 nt, Homo sapiens
ugacacaucucu

SEQ ID NO: 30688 - RNA, 18 nt, Homo sapiens
aauuaauggaauauguaa

SEQ ID NO: 30689 - RNA, 22 nt, Homo sapiens
uaaguagggacuucugucuuca

SEQ ID NO: 30690 - RNA, 16 nt, Homo sapiens
auguguggcauuuuca

SEQ ID NO: 30691 - RNA, 22 nt, Homo sapiens
acuucugucuucacaacagauu

SEQ ID NO: 30692 - RNA, 16 nt, Homo sapiens
ucccugcagacaugag

SEQ ID NO: 30693 - RNA, 20 nt, Homo sapiens
aauacugauguuccuaguga

SEQ ID NO: 30694 - RNA, 21 nt, Homo sapiens
uccaaagaaauguaagggaaa

SEQ ID NO: 30695 - RNA, 22 nt, Homo sapiens
aagagaauauuagcuuuacugu

SEQ ID NO: 30696 - RNA, 15 nt, Homo sapiens
cuugggcaggucaca

SEQ ID NO: 30697 - RNA, 21 nt, Homo sapiens
gaugccccagggaccuuugua

SEQ ID NO: 30698 - RNA, 14 nt, Homo sapiens
aauacuuugaacac

SEQ ID NO: 30699 - RNA, 15 nt, Homo sapiens
uaacuggcaguuuuc

SEQ ID NO: 30700 - RNA, 19 nt, Homo sapiens
ugaaaagauuaugaucuca

SEQ ID NO: 30701 - RNA, 23 nt, Homo sapiens
aagaaauucugcaagcuuuucaa

SEQ ID NO: 30702 - RNA, 15 nt, Homo sapiens
aggauaagagggauu

SEQ ID NO: 30703 - RNA, 17 nt, Homo sapiens
cuggacuuuccagagac

SEQ ID NO: 30704 - RNA, 21 nt, Homo sapiens
guuauuuagggaacugcuuga

SEQ ID NO: 30705 - RNA, 14 nt, Homo sapiens
uuucugagaaagac

SEQ ID NO: 30706 - RNA, 19 nt, Homo sapiens
auguuucgcugauauaugu

SEQ ID NO: 30707 - RNA, 12 nt, Homo sapiens
aaguuuaugcau

SEQ ID NO: 30708 - RNA, 18 nt, Homo sapiens
aguaaaaccacagcaguu

SEQ ID NO: 30709 - RNA, 13 nt, Homo sapiens
acagucucaggaa

SEQ ID NO: 30710 - RNA, 15 nt, Homo sapiens
uccuuaucacugaca

SEQ ID NO: 30711 - RNA, 14 nt, Homo sapiens
gaugugaacacauc

SEQ ID NO: 30712 - RNA, 20 nt, Homo sapiens
uuaaaaaaaaauacugaugu

SEQ ID NO: 30713 - RNA, 22 nt, Homo sapiens
uguaaguuuaugcauacaguaa

SEQ ID NO: 30714 - RNA, 21 nt, Homo sapiens
cucggagaagagcuguucaca

SEQ ID NO: 30715 - RNA, 14 nt, Homo sapiens
agaugaugaugauc

SEQ ID NO: 30716 - RNA, 21 nt, Homo sapiens
ugucaagaugaugaugaucuu

SEQ ID NO: 30717 - RNA, 21 nt, Homo sapiens
uauaggugcuacaaaaacaca

SEQ ID NO: 30718 - RNA, 22 nt, Homo sapiens
uagauaaagcacuguuuggaua

SEQ ID NO: 30719 - RNA, 15 nt, Homo sapiens
uuaggcuauucacaa

SEQ ID NO: 30720 - RNA, 15 nt, Homo sapiens
uuccuauguaacugc

SEQ ID NO: 30721 - RNA, 11 nt, Homo sapiens
ugcaagcuuuu

SEQ ID NO: 30722 - RNA, 16 nt, Homo sapiens
aguuaagcaacaucua

SEQ ID NO: 30723 - RNA, 19 nt, Homo sapiens
uaauguagauaaagcacug

SEQ ID NO: 30724 - RNA, 23 nt, Homo sapiens
aguuuuccuucucaucugugauu

SEQ ID NO: 30725 - RNA, 14 nt, Homo sapiens
aaaugagcaaaagu

SEQ ID NO: 30726 - RNA, 14 nt, Homo sapiens
aucacucauuuauu

SEQ ID NO: 30727 - RNA, 16 nt, Homo sapiens
uuguuggauaaaucag

SEQ ID NO: 30728 - RNA, 17 nt, Homo sapiens
auaauaaaauucauucc

SEQ ID NO: 30729 - RNA, 14 nt, Homo sapiens
aagacuauucaaac

SEQ ID NO: 30730 - RNA, 14 nt, Homo sapiens
auaccuaucaucuu

SEQ ID NO: 30731 - RNA, 23 nt, Homo sapiens
cauugagaacugcauauguuucg

SEQ ID NO: 30732 - RNA, 22 nt, Homo sapiens
agcauauguuuuuguaaguuua

SEQ ID NO: 30733 - RNA, 13 nt, Homo sapiens
caagacaaaugac

SEQ ID NO: 30734 - RNA, 18 nt, Homo sapiens
uaauaaaauucauuccau

SEQ ID NO: 30735 - RNA, 18 nt, Homo sapiens
uaauuuuaaguaauuuca

SEQ ID NO: 30736 - RNA, 23 nt, Homo sapiens
guucuucccuuuuacauacugcu

SEQ ID NO: 30737 - RNA, 21 nt, Homo sapiens
auuuuuuaugaaacauuacag

SEQ ID NO: 30738 - RNA, 22 nt, Homo sapiens
aaucugaggccuccucucucag

SEQ ID NO: 30739 - RNA, 21 nt, Homo sapiens
gugcuuuccguggcacugcau

SEQ ID NO: 30740 - RNA, 14 nt, Homo sapiens
auggagugacuuag

SEQ ID NO: 30741 - RNA, 21 nt, Homo sapiens
ucugucuggacuuuccagaga

SEQ ID NO: 30742 - RNA, 20 nt, Homo sapiens
cauauguuuuuguaaguuua

SEQ ID NO: 30743 - RNA, 23 nt, Homo sapiens
guuguucucuucuuuaaagggau

SEQ ID NO: 30744 - RNA, 14 nt, Homo sapiens
gagaaguuaagcaa

SEQ ID NO: 30745 - RNA, 18 nt, Homo sapiens
gggacuucugucuucaca

SEQ ID NO: 30746 - RNA, 19 nt, Homo sapiens
gaagaguggguuucacaag

SEQ ID NO: 30747 - RNA, 21 nt, Homo sapiens
caagguucuucccuuuuacau

SEQ ID NO: 30748 - RNA, 18 nt, Homo sapiens
cgaaugguuccauucucu

SEQ ID NO: 30749 - RNA, 18 nt, Homo sapiens
uuguuuucauuaucucaa

SEQ ID NO: 30750 - RNA, 18 nt, Homo sapiens
gaaagacuauucaaacag

SEQ ID NO: 30751 - RNA, 22 nt, Homo sapiens
ugauucccuccugcuacucugu

SEQ ID NO: 30752 - RNA, 23 nt, Homo sapiens
ucacaacagauuauuaccuuaca

SEQ ID NO: 30753 - RNA, 15 nt, Homo sapiens
auauuaaaaucacaa

SEQ ID NO: 30754 - RNA, 16 nt, Homo sapiens
cuuuuacauacugcug

SEQ ID NO: 30755 - RNA, 15 nt, Homo sapiens
aucuuguuuuuccac

SEQ ID NO: 30756 - RNA, 19 nt, Homo sapiens
uuccuucucaucugugauu

SEQ ID NO: 30757 - RNA, 15 nt, Homo sapiens
uaaucaauacuuuga

SEQ ID NO: 30758 - RNA, 19 nt, Homo sapiens
ucugagaaagacuauucaa

SEQ ID NO: 30759 - RNA, 18 nt, Homo sapiens
uucugucuggacuuucca

SEQ ID NO: 30760 - RNA, 18 nt, Homo sapiens
uuuccacuacugcuacca

SEQ ID NO: 30761 - RNA, 24 nt, Homo sapiens
auauuaaaaucacaaacucaucca

SEQ ID NO: 30762 - RNA, 12 nt, Homo sapiens
aaagccaaaaac

SEQ ID NO: 30763 - RNA, 21 nt, Homo sapiens
uguuuaaaaucauuucugcau

SEQ ID NO: 30764 - RNA, 15 nt, Homo sapiens
aggaauuguuuuuau

SEQ ID NO: 30765 - RNA, 23 nt, Homo sapiens
aagaggcagcuugaaacugagau

SEQ ID NO: 30766 - RNA, 16 nt, Homo sapiens
ucaauacuuugaacac

SEQ ID NO: 30767 - RNA, 18 nt, Homo sapiens
uuaugaaacauuacaguu

SEQ ID NO: 30768 - RNA, 21 nt, Homo sapiens
auucuucuuugguggagauaa

SEQ ID NO: 30769 - RNA, 16 nt, Homo sapiens
aaacauccagauacac

SEQ ID NO: 30770 - RNA, 15 nt, Homo sapiens
cuucauguacaucca

SEQ ID NO: 30771 - RNA, 23 nt, Homo sapiens
cauacaauuauuuuuacaguucu

SEQ ID NO: 30772 - RNA, 18 nt, Homo sapiens
uucaaacuaauagaauua

SEQ ID NO: 30773 - RNA, 22 nt, Homo sapiens
auuuuaacuuccuuggacucau

SEQ ID NO: 30774 - RNA, 23 nt, Homo sapiens
augcuuguauuuuacuuuuccau

SEQ ID NO: 30775 - RNA, 12 nt, Homo sapiens
uuucugcuuuaa

SEQ ID NO: 30776 - RNA, 22 nt, Homo sapiens
acaguuuucugcuuuaauuuca

SEQ ID NO: 30777 - RNA, 21 nt, Homo sapiens
guaaguuuaugcauacaguaa

SEQ ID NO: 30778 - RNA, 16 nt, Homo sapiens
ccaaauuuguauuuaa

SEQ ID NO: 30779 - RNA, 18 nt, Homo sapiens
uuuaaaauacacacucaa

SEQ ID NO: 30780 - RNA, 13 nt, Homo sapiens
aacaaagaagaca

SEQ ID NO: 30781 - RNA, 22 nt, Homo sapiens
acuccugguuccuaggugagca

SEQ ID NO: 30782 - RNA, 23 nt, Homo sapiens
cuacucuguuccuucacauccug

SEQ ID NO: 30783 - RNA, 20 nt, Homo sapiens
aguuaggcuauucacaacca

SEQ ID NO: 30784 - RNA, 12 nt, Homo sapiens
ccaauacauuau

SEQ ID NO: 30785 - RNA, 21 nt, Homo sapiens
gcuugcccuguuaaaagauga

SEQ ID NO: 30786 - RNA, 18 nt, Homo sapiens
caagaugugggcagugau

SEQ ID NO: 30787 - RNA, 16 nt, Homo sapiens
cagagaccaguauucc

SEQ ID NO: 30788 - RNA, 13 nt, Homo sapiens
ccuuuuacauacu

SEQ ID NO: 30789 - RNA, 15 nt, Homo sapiens
aauuucucccaguca

SEQ ID NO: 30790 - RNA, 16 nt, Homo sapiens
cacagcugaacuuguu

SEQ ID NO: 30791 - RNA, 16 nt, Homo sapiens
gcuuuaauuucaugaa

SEQ ID NO: 30792 - RNA, 17 nt, Homo sapiens
aggugcuacaaaaacac

SEQ ID NO: 30793 - RNA, 13 nt, Homo sapiens
accuuuguuccca

SEQ ID NO: 30794 - RNA, 23 nt, Homo sapiens
acucauuuuuguuuucauuaucu

SEQ ID NO: 30795 - RNA, 16 nt, Homo sapiens
auggcuauaggugcua

SEQ ID NO: 30796 - RNA, 13 nt, Homo sapiens
cuguucacagcca

SEQ ID NO: 30797 - RNA, 16 nt, Homo sapiens
agccacuucacuuuuu

SEQ ID NO: 30798 - RNA, 14 nt, Homo sapiens
uacaucuuucacau

SEQ ID NO: 30799 - RNA, 19 nt, Homo sapiens
aucaauagaaggauguaca

SEQ ID NO: 30800 - RNA, 12 nt, Homo sapiens
caucuuucacau

SEQ ID NO: 30801 - RNA, 11 nt, Homo sapiens
aggcauguaau

SEQ ID NO: 30802 - RNA, 14 nt, Homo sapiens
uaaaguacagacuu

SEQ ID NO: 30803 - RNA, 16 nt, Homo sapiens
uuaugaaacauuacag

SEQ ID NO: 30804 - RNA, 16 nt, Homo sapiens
auuuuaaguaauuuca

SEQ ID NO: 30805 - RNA, 20 nt, Homo sapiens
uuuuauggaggcuuugcaua

SEQ ID NO: 30806 - RNA, 19 nt, Homo sapiens
caaauucuguuucuugaga

SEQ ID NO: 30807 - RNA, 20 nt, Homo sapiens
caucagcugcugaaacaaca

SEQ ID NO: 30808 - RNA, 22 nt, Homo sapiens
gaagaguggguuucacaaguga

SEQ ID NO: 30809 - RNA, 15 nt, Homo sapiens
ucuagaauacuaaua

SEQ ID NO: 30810 - RNA, 20 nt, Homo sapiens
uuucacuuuuggcuuguaaa

SEQ ID NO: 30811 - RNA, 14 nt, Homo sapiens
uccaagcauaccaa

SEQ ID NO: 30812 - RNA, 18 nt, Homo sapiens
caagugaaaaacauccag

SEQ ID NO: 30813 - RNA, 17 nt, Homo sapiens
aagaugaugaugaucuu

SEQ ID NO: 30814 - RNA, 12 nt, Homo sapiens
ccacuacugcua

SEQ ID NO: 30815 - RNA, 16 nt, Homo sapiens
uguguggcauuuucac

SEQ ID NO: 30816 - RNA, 17 nt, Homo sapiens
caggcuacugucagcuc

SEQ ID NO: 30817 - RNA, 14 nt, Homo sapiens
accaugccauuuaa

SEQ ID NO: 30818 - RNA, 16 nt, Homo sapiens
cacaaccacucauuca

SEQ ID NO: 30819 - RNA, 21 nt, Homo sapiens
aauuucauaccuaucaucuua

SEQ ID NO: 30820 - RNA, 17 nt, Homo sapiens
cgagcaggcuacuguca

SEQ ID NO: 30821 - RNA, 21 nt, Homo sapiens
ucuuauccugucccuccucca

SEQ ID NO: 30822 - RNA, 24 nt, Homo sapiens
gccggagccccuugggcaggucac

SEQ ID NO: 30823 - RNA, 23 nt, Homo sapiens
aaggaccauaaauuuaaauggag

SEQ ID NO: 30824 - RNA, 20 nt, Homo sapiens
uauuagugaaguaugcacua

SEQ ID NO: 30825 - RNA, 22 nt, Homo sapiens
cuccaaagaaauguaagggaaa

SEQ ID NO: 30826 - RNA, 18 nt, Homo sapiens
aagccaucggagcugcua

SEQ ID NO: 30827 - RNA, 15 nt, Homo sapiens
ugugaacacaucagc

SEQ ID NO: 30828 - RNA, 19 nt, Homo sapiens
auuuucaaaaucaaauucc

SEQ ID NO: 30829 - RNA, 23 nt, Homo sapiens
aaacauuuaaauuauacaaucau

SEQ ID NO: 30830 - RNA, 18 nt, Homo sapiens
cucaaaacugcacuguca

SEQ ID NO: 30831 - RNA, 19 nt, Homo sapiens
cugagcagucagaagaccu

SEQ ID NO: 30832 - RNA, 19 nt, Homo sapiens
cuuuucaaaauuggacuua

SEQ ID NO: 30833 - RNA, 17 nt, Homo sapiens
agauagguuaccaguaa

SEQ ID NO: 30834 - RNA, 21 nt, Homo sapiens
acuuccuuggacucauuuuaa

SEQ ID NO: 30835 - RNA, 14 nt, Homo sapiens
acccaaaguaucag

SEQ ID NO: 30836 - RNA, 12 nt, Homo sapiens
auagcaagugaa

SEQ ID NO: 30837 - RNA, 15 nt, Homo sapiens
ugaacacaaagccug

SEQ ID NO: 30838 - RNA, 17 nt, Homo sapiens
uugaaaagacuccaaag

SEQ ID NO: 30839 - RNA, 21 nt, Homo sapiens
uaagguauauaaauuuuccca

SEQ ID NO: 30840 - RNA, 20 nt, Homo sapiens
cagcauuuuacuacuuuaaa

SEQ ID NO: 30841 - RNA, 17 nt, Homo sapiens
aguaacggaacaguauc

SEQ ID NO: 30842 - RNA, 12 nt, Homo sapiens
aaguaaaaccac

SEQ ID NO: 30843 - RNA, 17 nt, Homo sapiens
augugaacacaucagcu

SEQ ID NO: 30844 - RNA, 12 nt, Homo sapiens
caaauuccagaa

SEQ ID NO: 30845 - RNA, 18 nt, Homo sapiens
cugagaugugaacacauc

SEQ ID NO: 30846 - RNA, 17 nt, Homo sapiens
cucauuuuuguuuucau

SEQ ID NO: 30847 - RNA, 16 nt, Homo sapiens
uuggacuuccauuugg

SEQ ID NO: 30848 - RNA, 17 nt, Homo sapiens
acaaaccucaagccagc

SEQ ID NO: 30849 - RNA, 16 nt, Homo sapiens
uaacugacaacuugaa

SEQ ID NO: 30850 - RNA, 11 nt, Homo sapiens
uuacucugaag

SEQ ID NO: 30851 - RNA, 13 nt, Homo sapiens
aguacagacuuuu

SEQ ID NO: 30852 - RNA, 19 nt, Homo sapiens
uaaaaggccugucccugca

SEQ ID NO: 30853 - RNA, 18 nt, Homo sapiens
gguauauaaauuuuccca

SEQ ID NO: 30854 - RNA, 17 nt, Homo sapiens
aaauucacaaguugugu

SEQ ID NO: 30855 - RNA, 13 nt, Homo sapiens
cuacaaaaacaca

SEQ ID NO: 30856 - RNA, 19 nt, Homo sapiens
aaauacacacucaaaucaa

SEQ ID NO: 30857 - RNA, 13 nt, Homo sapiens
uaaguaauuucag

SEQ ID NO: 30858 - RNA, 22 nt, Homo sapiens
gaugaucuuuaaaauacacacu

SEQ ID NO: 30859 - RNA, 23 nt, Homo sapiens
agaauuuucaaaaucaaauucca

SEQ ID NO: 30860 - RNA, 18 nt, Homo sapiens
agcauaccaacacgagca

SEQ ID NO: 30861 - RNA, 21 nt, Homo sapiens
gacucauuuuaaaaaauggaa

SEQ ID NO: 30862 - RNA, 13 nt, Homo sapiens
ugcaaagcacuga

SEQ ID NO: 30863 - RNA, 13 nt, Homo sapiens
uuacaucuuucac

SEQ ID NO: 30864 - RNA, 15 nt, Homo sapiens
aagauagcagggcau

SEQ ID NO: 30865 - RNA, 16 nt, Homo sapiens
ugaacacaaagccugu

SEQ ID NO: 30866 - RNA, 22 nt, Homo sapiens
cucaaaauaccaugccauuuaa

SEQ ID NO: 30867 - RNA, 19 nt, Homo sapiens
uccauugguuuaccuguga

SEQ ID NO: 30868 - RNA, 16 nt, Homo sapiens
gccuaucagcauuuua

SEQ ID NO: 30869 - RNA, 23 nt, Homo sapiens
uagaguucugucuggacuuucca

SEQ ID NO: 30870 - RNA, 10 nt, Homo sapiens
caguaacuga

SEQ ID NO: 30871 - RNA, 16 nt, Homo sapiens
uuauuuuuacaguucu

SEQ ID NO: 30872 - RNA, 17 nt, Homo sapiens
uaucuuguuuuuccacu

SEQ ID NO: 30873 - RNA, 18 nt, Homo sapiens
aucauuucugcaucagcu

SEQ ID NO: 30874 - RNA, 20 nt, Homo sapiens
aaaacucauuuccuauguaa

SEQ ID NO: 30875 - RNA, 17 nt, Homo sapiens
auguagauaaagcacug

SEQ ID NO: 30876 - RNA, 17 nt, Homo sapiens
gaaucagaucauuucaa

SEQ ID NO: 30877 - RNA, 22 nt, Homo sapiens
acuggcacaguuuucugagaaa

SEQ ID NO: 30878 - RNA, 18 nt, Homo sapiens
ugcuacaaaaacacagca

SEQ ID NO: 30879 - RNA, 21 nt, Homo sapiens
uauagauucuuuauuagugaa

SEQ ID NO: 30880 - RNA, 17 nt, Homo sapiens
aauacacacucaaauca

SEQ ID NO: 30881 - RNA, 16 nt, Homo sapiens
agucucaggaaaucaa

SEQ ID NO: 30882 - RNA, 16 nt, Homo sapiens
caaaauggauaugaca

SEQ ID NO: 30883 - RNA, 23 nt, Homo sapiens
ucucaggaaaucaaauaugcaaa

SEQ ID NO: 30884 - RNA, 16 nt, Homo sapiens
caaguuguguuugaua

SEQ ID NO: 30885 - RNA, 14 nt, Homo sapiens
aaauuuaaauggag

SEQ ID NO: 30886 - RNA, 18 nt, Homo sapiens
uggggcagugcuuggccc

SEQ ID NO: 30887 - RNA, 19 nt, Homo sapiens
uggggcagugcuuggccca

SEQ ID NO: 30888 - RNA, 23 nt, Homo sapiens
ugggacaguuccugagaccagcc

SEQ ID NO: 30889 - RNA, 24 nt, Homo sapiens
ugggacaguuccugagaccagcca

SEQ ID NO: 30890 - RNA, 14 nt, Homo sapiens
ugggagaaucacuu

SEQ ID NO: 30891 - RNA, 17 nt, Homo sapiens
ugggaguggcauguaug

SEQ ID NO: 30892 - RNA, 15 nt, Homo sapiens
uguggcaaaucucua

SEQ ID NO: 30893 - RNA, 23 nt, Homo sapiens
uguggcuguaucuuguuuuucca

SEQ ID NO: 30894 - RNA, 14 nt, Homo sapiens
ugucaaugcagccc

SEQ ID NO: 30895 - RNA, 15 nt, Homo sapiens
ugucaaugcagcccc

SEQ ID NO: 30896 - RNA, 11 nt, Homo sapiens
uggagacacca

SEQ ID NO: 30897 - RNA, 12 nt, Homo sapiens
uggagacaccac

SEQ ID NO: 30898 - RNA, 17 nt, Homo sapiens
uggagacaccaccaccc

SEQ ID NO: 30899 - RNA, 14 nt, Homo sapiens
ugcuuggcccagga

SEQ ID NO: 30900 - RNA, 19 nt, Homo sapiens
ugcuguuuccuagcgcagc

SEQ ID NO: 30901 - RNA, 13 nt, Homo sapiens
uggcaguuuucca

SEQ ID NO: 30902 - RNA, 22 nt, Homo sapiens
uggauguggagggggcgcgugc

SEQ ID NO: 30903 - RNA, 21 nt, Homo sapiens
uggcccaggaguuuggccaga

SEQ ID NO: 30904 - RNA, 14 nt, Homo sapiens
uggccagaagucaa

SEQ ID NO: 30905 - RNA, 15 nt, Homo sapiens
uggcgcgcgccacca

SEQ ID NO: 30906 - RNA, 22 nt, Homo sapiens
uggcccaggaguuuggccagaa

SEQ ID NO: 30907 - RNA, 21 nt, Homo sapiens
uggcgcgcgccaccacgccca

SEQ ID NO: 30908 - RNA, 22 nt, Homo sapiens
uuggcccaggaguuuggccaga

SEQ ID NO: 30909 - RNA, 12 nt, Homo sapiens
uugggcagguca

SEQ ID NO: 30910 - RNA, 21 nt, Homo sapiens
uuuaaaaaaaaaccugagccc

SEQ ID NO: 30911 - RNA, 17 nt, Homo sapiens
uuugguucuaggccggg

SEQ ID NO: 30912 - RNA, 23 nt, Homo sapiens
uugcaugguuuagaaagcuugcc

SEQ ID NO: 30913 - RNA, 17 nt, Homo sapiens
uguugacaugggacauu

SEQ ID NO: 30914 - RNA, 16 nt, Homo sapiens
uguugacaugggacau

SEQ ID NO: 30915 - RNA, 18 nt, Homo sapiens
uguuuccuagcgcagcca

SEQ ID NO: 30916 - RNA, 18 nt, Homo sapiens
uuaaaaaaaaaccugagc

SEQ ID NO: 30917 - RNA, 19 nt, Homo sapiens
uuaaaaaaaaaccugagcc

SEQ ID NO: 30918 - RNA, 20 nt, Homo sapiens
uuaaaaaaaaaccugagccc

SEQ ID NO: 30919 - RNA, 15 nt, Homo sapiens
uuccuagcgcagcca

SEQ ID NO: 30920 - RNA, 17 nt, Homo sapiens
uacucauuaggauggcu

SEQ ID NO: 30921 - RNA, 15 nt, Homo sapiens
uagauaaacucagaa

SEQ ID NO: 30922 - RNA, 16 nt, Homo sapiens
uagauaaacucagaaa

SEQ ID NO: 30923 - RNA, 14 nt, Homo sapiens
uagggaccugcugu

SEQ ID NO: 30924 - RNA, 13 nt, Homo sapiens
uacccaaauggaa

SEQ ID NO: 30925 - RNA, 16 nt, Homo sapiens
guuuagaaagcuugcc

SEQ ID NO: 30926 - RNA, 16 nt, Homo sapiens
guuuccuagcgcagcc

SEQ ID NO: 30927 - RNA, 17 nt, Homo sapiens
guuuccuagcgcagcca

SEQ ID NO: 30928 - RNA, 19 nt, Homo sapiens
guuguuggauaaaucagug

SEQ ID NO: 30929 - RNA, 21 nt, Homo sapiens
uaaccaugcccaagaaugaga

SEQ ID NO: 30930 - RNA, 19 nt, Homo sapiens
ucaaggcuuagacccucau

SEQ ID NO: 30931 - RNA, 17 nt, Homo sapiens
ucaggaguuccuaacca

SEQ ID NO: 30932 - RNA, 15 nt, Homo sapiens
ucagaagaccugguc

SEQ ID NO: 30933 - RNA, 20 nt, Homo sapiens
ucagaccuagaauaauacua

SEQ ID NO: 30934 - RNA, 11 nt, Homo sapiens
ucacuugauga

SEQ ID NO: 30935 - RNA, 10 nt, Homo sapiens
ucaccuguuu

SEQ ID NO: 30936 - RNA, 21 nt, Homo sapiens
ucacauacaauuauuuuuaca

SEQ ID NO: 30937 - RNA, 10 nt, Homo sapiens
ucaagccagc

SEQ ID NO: 30938 - RNA, 11 nt, Homo sapiens
ucaagccagcc

SEQ ID NO: 30939 - RNA, 14 nt, Homo sapiens
uccaagccugacca

SEQ ID NO: 30940 - RNA, 14 nt, Homo sapiens
uccagccugagcga

SEQ ID NO: 30941 - RNA, 18 nt, Homo sapiens
ucagugucaaugcagccc

SEQ ID NO: 30942 - RNA, 16 nt, Homo sapiens
ucauugcaaccuccac

SEQ ID NO: 30943 - RNA, 11 nt, Homo sapiens
ucaggcuggcc

SEQ ID NO: 30944 - RNA, 19 nt, Homo sapiens
ugaaaacuuuaugcuaagu

SEQ ID NO: 30945 - RNA, 19 nt, Homo sapiens
ugaauucccugccuggauc

SEQ ID NO: 30946 - RNA, 18 nt, Homo sapiens
ugagugccuguaaucaca

SEQ ID NO: 30947 - RNA, 21 nt, Homo sapiens
ugagccagugcuuuaauggca

SEQ ID NO: 30948 - RNA, 10 nt, Homo sapiens
ugagcccaug

SEQ ID NO: 30949 - RNA, 11 nt, Homo sapiens
ugagcccaugg

SEQ ID NO: 30950 - RNA, 18 nt, Homo sapiens
ugaccugacagcccaagg

SEQ ID NO: 30951 - RNA, 16 nt, Homo sapiens
ugccuaagugcagccc

SEQ ID NO: 30952 - RNA, 17 nt, Homo sapiens
ugccuaagugcagcccc

SEQ ID NO: 30953 - RNA, 14 nt, Homo sapiens
ugccccugagccca

SEQ ID NO: 30954 - RNA, 12 nt, Homo sapiens
ugcagugagccg

SEQ ID NO: 30955 - RNA, 11 nt, Homo sapiens
ugcaggcguga

SEQ ID NO: 30956 - RNA, 13 nt, Homo sapiens
ugcagugagccga

SEQ ID NO: 30957 - RNA, 12 nt, Homo sapiens
ugccaugcuggc

SEQ ID NO: 30958 - RNA, 14 nt, Homo sapiens
ucccucuuggugcc

SEQ ID NO: 30959 - RNA, 13 nt, Homo sapiens
ucccucuuggugc

SEQ ID NO: 30960 - RNA, 12 nt, Homo sapiens
uccuagcgcagc

SEQ ID NO: 30961 - RNA, 15 nt, Homo sapiens
uccugagaccagcca

SEQ ID NO: 30962 - RNA, 16 nt, Homo sapiens
ucuccgucucccaaag

SEQ ID NO: 30963 - RNA, 13 nt, Homo sapiens
ucuaacucagaaa

SEQ ID NO: 30964 - RNA, 22 nt, Homo sapiens
ucgcugauauauguguuuuuca

SEQ ID NO: 30965 - RNA, 23 nt, Homo sapiens
ucugcccauccugccccugagcc

SEQ ID NO: 30966 - RNA, 16 nt, Homo sapiens
ucugggucucaguguc

SEQ ID NO: 30967 - RNA, 17 nt, Homo sapiens
ucugggucucagugucc

SEQ ID NO: 30968 - RNA, 16 nt, Homo sapiens
gacccucaugcugcca

SEQ ID NO: 30969 - RNA, 17 nt, Homo sapiens
gacccucaugcugccaa

SEQ ID NO: 30970 - RNA, 21 nt, Homo sapiens
gacgggguuugccaugcuggc

SEQ ID NO: 30971 - RNA, 15 nt, Homo sapiens
gagacaccaccaccc

SEQ ID NO: 30972 - RNA, 12 nt, Homo sapiens
gagacaccacca

SEQ ID NO: 30973 - RNA, 16 nt, Homo sapiens
gagacucugucucagu

SEQ ID NO: 30974 - RNA, 22 nt, Homo sapiens
gagacgggguuugccaugcugg

SEQ ID NO: 30975 - RNA, 22 nt, Homo sapiens
gaauuacaggcgugagccacca

SEQ ID NO: 30976 - RNA, 23 nt, Homo sapiens
gaauuacaggcgugagccaccaa

SEQ ID NO: 30977 - RNA, 22 nt, Homo sapiens
gacacaggcuccaaacuggagc

SEQ ID NO: 30978 - RNA, 13 nt, Homo sapiens
gacaccaccaccc

SEQ ID NO: 30979 - RNA, 18 nt, Homo sapiens
gacauguuuacaaaccuc

SEQ ID NO: 30980 - RNA, 19 nt, Homo sapiens
gacagaaagcagaacagug

SEQ ID NO: 30981 - RNA, 22 nt, Homo sapiens
gacaugagagacagcaggucuc

SEQ ID NO: 30982 - RNA, 22 nt, Homo sapiens
gcacagccucuuagaugcaguu

SEQ ID NO: 30983 - RNA, 22 nt, Homo sapiens
gcacuuuaacacagugucuggc

SEQ ID NO: 30984 - RNA, 17 nt, Homo sapiens
gcacuuugggaggcuga

SEQ ID NO: 30985 - RNA, 18 nt, Homo sapiens
gcacuuuaacacaguguc

SEQ ID NO: 30986 - RNA, 12 nt, Homo sapiens
gcaaccuccacc

SEQ ID NO: 30987 - RNA, 15 nt, Homo sapiens
gcaccaaucaugaau

SEQ ID NO: 30988 - RNA, 16 nt, Homo sapiens
gaggacuugggcggga

SEQ ID NO: 30989 - RNA, 15 nt, Homo sapiens
gaggcggguggauca

SEQ ID NO: 30990 - RNA, 18 nt, Homo sapiens
gauaucaugccccuguac

SEQ ID NO: 30991 - RNA, 14 nt, Homo sapiens
gauccuggaaauca

SEQ ID NO: 30992 - RNA, 17 nt, Homo sapiens
gaguggcgcgcgccacc

SEQ ID NO: 30993 - RNA, 18 nt, Homo sapiens
gagugcaguggcgcaauc

SEQ ID NO: 30994 - RNA, 12 nt, Homo sapiens
gccucaguuucc

SEQ ID NO: 30995 - RNA, 18 nt, Homo sapiens
gccugaaagaggaaugaa

SEQ ID NO: 30996 - RNA, 14 nt, Homo sapiens
gccugggugacaga

SEQ ID NO: 30997 - RNA, 20 nt, Homo sapiens
gccuggucaacauggugaaa

SEQ ID NO: 30998 - RNA, 15 nt, Homo sapiens
gccucuuagaugcag

SEQ ID NO: 30999 - RNA, 17 nt, Homo sapiens
gccuggcugggaguggc

SEQ ID NO: 31000 - RNA, 16 nt, Homo sapiens
gcgcagccaugugauu

SEQ ID NO: 31001 - RNA, 15 nt, Homo sapiens
gcgcgcaccuguaau

SEQ ID NO: 31002 - RNA, 18 nt, Homo sapiens
gcgugaccugacagccca

SEQ ID NO: 31003 - RNA, 13 nt, Homo sapiens
gcgugagccacca

SEQ ID NO: 31004 - RNA, 14 nt, Homo sapiens
gcgugagccaccaa

SEQ ID NO: 31005 - RNA, 14 nt, Homo sapiens
gcgcgccaccacgc

SEQ ID NO: 31006 - RNA, 19 nt, Homo sapiens
gccaugcuggccaggcugg

SEQ ID NO: 31007 - RNA, 14 nt, Homo sapiens
gcccaagggugggu

SEQ ID NO: 31008 - RNA, 19 nt, Homo sapiens
gcccaaggguggguggggu

SEQ ID NO: 31009 - RNA, 21 nt, Homo sapiens
gcccaagggugggugggguga

SEQ ID NO: 31010 - RNA, 21 nt, Homo sapiens
gccccugcacuccagccugag

SEQ ID NO: 31011 - RNA, 24 nt, Homo sapiens
gcauuauauuuauuacuguaagaa

SEQ ID NO: 31012 - RNA, 22 nt, Homo sapiens
gccaaggcuggagugcaguggc

SEQ ID NO: 31013 - RNA, 23 nt, Homo sapiens
gccaaggcuggagugcaguggcg

SEQ ID NO: 31014 - RNA, 11 nt, Homo sapiens
gccaaggcugg

SEQ ID NO: 31015 - RNA, 15 nt, Homo sapiens
gccaaccugggggcu

SEQ ID NO: 31016 - RNA, 17 nt, Homo sapiens
ggagcucgugggacagu

SEQ ID NO: 31017 - RNA, 15 nt, Homo sapiens
ggacuugggcgggac

SEQ ID NO: 31018 - RNA, 18 nt, Homo sapiens
ggacauuugcucauggaa

SEQ ID NO: 31019 - RNA, 19 nt, Homo sapiens
ggacauuugcucauggaau

SEQ ID NO: 31020 - RNA, 14 nt, Homo sapiens
ggagacaccaccac

SEQ ID NO: 31021 - RNA, 15 nt, Homo sapiens
ggagacaccaccacc

SEQ ID NO: 31022 - RNA, 15 nt, Homo sapiens
ggaaagggucucccu

SEQ ID NO: 31023 - RNA, 16 nt, Homo sapiens
ggaaagggucucccuc

SEQ ID NO: 31024 - RNA, 19 nt, Homo sapiens
gcuuuugcuaggucacaga

SEQ ID NO: 31025 - RNA, 15 nt, Homo sapiens
ggccagaagucaagg

SEQ ID NO: 31026 - RNA, 16 nt, Homo sapiens
ggccagaagucaaggc

SEQ ID NO: 31027 - RNA, 14 nt, Homo sapiens
ggcgcgcgccacca

SEQ ID NO: 31028 - RNA, 13 nt, Homo sapiens
ggcagugcuuggc

SEQ ID NO: 31029 - RNA, 15 nt, Homo sapiens
ggcagugcuuggccc

SEQ ID NO: 31030 - RNA, 18 nt, Homo sapiens
ggcagugcuuggcccagg

SEQ ID NO: 31031 - RNA, 19 nt, Homo sapiens
ggcagugcuuggcccagga

SEQ ID NO: 31032 - RNA, 13 nt, Homo sapiens
gcuggagcucugc

SEQ ID NO: 31033 - RNA, 14 nt, Homo sapiens
gcuggagcucugcc

SEQ ID NO: 31034 - RNA, 13 nt, Homo sapiens
gcuuagacccuca

SEQ ID NO: 31035 - RNA, 14 nt, Homo sapiens
gcuuagacccucau

SEQ ID NO: 31036 - RNA, 21 nt, Homo sapiens
gcuuagacccucaugcugcca

SEQ ID NO: 31037 - RNA, 22 nt, Homo sapiens
gcuuagacccucaugcugccaa

SEQ ID NO: 31038 - RNA, 19 nt, Homo sapiens
gcuggauucaagugauccg

SEQ ID NO: 31039 - RNA, 20 nt, Homo sapiens
gcugggaauuacaggcguga

SEQ ID NO: 31040 - RNA, 22 nt, Homo sapiens
gcugggaauuacaggcgugagc

SEQ ID NO: 31041 - RNA, 17 nt, Homo sapiens
gcuucaccuguccccga

SEQ ID NO: 31042 - RNA, 22 nt, Homo sapiens
gcuugaggacuugggcgggaca

SEQ ID NO: 31043 - RNA, 13 nt, Homo sapiens
gcuugaacccagg

SEQ ID NO: 31044 - RNA, 16 nt, Homo sapiens
gcucacgccuguaauc

SEQ ID NO: 31045 - RNA, 18 nt, Homo sapiens
gcucccuggaagagauca

SEQ ID NO: 31046 - RNA, 20 nt, Homo sapiens
gcuaucgccaucacagcuga

SEQ ID NO: 31047 - RNA, 14 nt, Homo sapiens
gguggggcagugcu

SEQ ID NO: 31048 - RNA, 19 nt, Homo sapiens
gguucuucuuggucucagu

SEQ ID NO: 31049 - RNA, 16 nt, Homo sapiens
guaacuggcaguuuuc

SEQ ID NO: 31050 - RNA, 21 nt, Homo sapiens
guaaaauugaaaggcauucuc

SEQ ID NO: 31051 - RNA, 15 nt, Homo sapiens
gguggcucacgccug

SEQ ID NO: 31052 - RNA, 15 nt, Homo sapiens
guaaggggaauugag

SEQ ID NO: 31053 - RNA, 15 nt, Homo sapiens
gggucucaguguccu

SEQ ID NO: 31054 - RNA, 13 nt, Homo sapiens
ggguggguggggc

SEQ ID NO: 31055 - RNA, 14 nt, Homo sapiens
ggggcugaugcagu

SEQ ID NO: 31056 - RNA, 22 nt, Homo sapiens
gggcgggacacaggcuccaaac

SEQ ID NO: 31057 - RNA, 15 nt, Homo sapiens
gggcagugcuuggcc

SEQ ID NO: 31058 - RNA, 17 nt, Homo sapiens
ggcgcgcgccaccacgc

SEQ ID NO: 31059 - RNA, 17 nt, Homo sapiens
ggcgcgugcaggcagca

SEQ ID NO: 31060 - RNA, 15 nt, Homo sapiens
ggcuggagugcagug

SEQ ID NO: 31061 - RNA, 15 nt, Homo sapiens
ggcugaggcgggugg

SEQ ID NO: 31062 - RNA, 18 nt, Homo sapiens
gucucccaaagugcuggg

SEQ ID NO: 31063 - RNA, 16 nt, Homo sapiens
gugauuaccagggacu

SEQ ID NO: 31064 - RNA, 13 nt, Homo sapiens
gugggugggguga

SEQ ID NO: 31065 - RNA, 20 nt, Homo sapiens
guggggcagugcuuggccca

SEQ ID NO: 31066 - RNA, 17 nt, Homo sapiens
gugccucaccccuugcc

SEQ ID NO: 31067 - RNA, 21 nt, Homo sapiens
gugcugggaauuacaggcgug

SEQ ID NO: 31068 - RNA, 12 nt, Homo sapiens
guggcgcgcgcc

SEQ ID NO: 31069 - RNA, 13 nt, Homo sapiens
guggcgcgcgcca

SEQ ID NO: 31070 - RNA, 16 nt, Homo sapiens
guggcauuuucacuuu

SEQ ID NO: 31071 - RNA, 17 nt, Homo sapiens
guuccugagaccagcca

SEQ ID NO: 31072 - RNA, 17 nt, Homo sapiens
guucccuugaugaagaa

SEQ ID NO: 31073 - RNA, 21 nt, Homo sapiens
gcaaauugucacaggacagcc

SEQ ID NO: 31074 - RNA, 22 nt, Homo sapiens
gauggaaguugcagugagcuga

SEQ ID NO: 31075 - RNA, 21 nt, Homo sapiens
gcacagccucuuagaugcagu

SEQ ID NO: 31076 - RNA, 16 nt, Homo sapiens
gcaccugcaggcguga

SEQ ID NO: 31077 - RNA, 18 nt, Homo sapiens
gcacuccagccugagcga

SEQ ID NO: 31078 - RNA, 18 nt, Homo sapiens
gccagacaucaacagaua

SEQ ID NO: 31079 - RNA, 18 nt, Homo sapiens
gccagauuuuccugaaaa

SEQ ID NO: 31080 - RNA, 15 nt, Homo sapiens
gccagaagucaaggc

SEQ ID NO: 31081 - RNA, 18 nt, Homo sapiens
gccaugcuggccaggcug

SEQ ID NO: 31082 - RNA, 21 nt, Homo sapiens
gccaaggcuggagugcagugg

SEQ ID NO: 31083 - RNA, 13 nt, Homo sapiens
gccacuucacuuu

SEQ ID NO: 31084 - RNA, 21 nt, Homo sapiens
gcaugaauuuuuuucaucuuc

SEQ ID NO: 31085 - RNA, 20 nt, Homo sapiens
gcaugggccuagcccacugg

SEQ ID NO: 31086 - RNA, 15 nt, Homo sapiens
gcauguaugacguga

SEQ ID NO: 31087 - RNA, 20 nt, Homo sapiens
gcauguaugacgugacuggc

SEQ ID NO: 31088 - RNA, 12 nt, Homo sapiens
gcaucaugcauc

SEQ ID NO: 31089 - RNA, 19 nt, Homo sapiens
gcagugcuuggcccaggag

SEQ ID NO: 31090 - RNA, 13 nt, Homo sapiens
gcaguucugaaga

SEQ ID NO: 31091 - RNA, 14 nt, Homo sapiens
gcaguucugaagaa

SEQ ID NO: 31092 - RNA, 13 nt, Homo sapiens
gcaggcgugaccu

SEQ ID NO: 31093 - RNA, 15 nt, Homo sapiens
gcaggcgugaccuga

SEQ ID NO: 31094 - RNA, 14 nt, Homo sapiens
gcagugcuuggccc

SEQ ID NO: 31095 - RNA, 12 nt, Homo sapiens
gcagugagcuga

SEQ ID NO: 31096 - RNA, 21 nt, Homo sapiens
gcgacaguuuuccuucucauc

SEQ ID NO: 31097 - RNA, 18 nt, Homo sapiens
gccuuggggcugaugcag

SEQ ID NO: 31098 - RNA, 13 nt, Homo sapiens
gccugggugacag

SEQ ID NO: 31099 - RNA, 12 nt, Homo sapiens
gccugggugaca

SEQ ID NO: 31100 - RNA, 15 nt, Homo sapiens
gccggagccccuugg

SEQ ID NO: 31101 - RNA, 18 nt, Homo sapiens
gccgggcgcgguggcuca

SEQ ID NO: 31102 - RNA, 19 nt, Homo sapiens
gccugaaagaggaaugaag

SEQ ID NO: 31103 - RNA, 18 nt, Homo sapiens
gccccuugggcaggucac

SEQ ID NO: 31104 - RNA, 12 nt, Homo sapiens
gccccugagccc

SEQ ID NO: 31105 - RNA, 13 nt, Homo sapiens
gccccugagccca

SEQ ID NO: 31106 - RNA, 11 nt, Homo sapiens
gcccagcuaau

SEQ ID NO: 31107 - RNA, 14 nt, Homo sapiens
gccccgggaguggc

SEQ ID NO: 31108 - RNA, 19 nt, Homo sapiens
gcccaggaguuuggccaga

SEQ ID NO: 31109 - RNA, 22 nt, Homo sapiens
gauccgcccaucuccgucuccc

SEQ ID NO: 31110 - RNA, 23 nt, Homo sapiens
gauccgcccaucuccgucuccca

SEQ ID NO: 31111 - RNA, 16 nt, Homo sapiens
gaucugcuuggucuug

SEQ ID NO: 31112 - RNA, 23 nt, Homo sapiens
gauuccaccuacaugagguacug

SEQ ID NO: 31113 - RNA, 16 nt, Homo sapiens
gaggaaugaaguacuc

SEQ ID NO: 31114 - RNA, 16 nt, Homo sapiens
gagcugcuagaguucu

SEQ ID NO: 31115 - RNA, 20 nt, Homo sapiens
gagcaccugcaggcgugacc

SEQ ID NO: 31116 - RNA, 14 nt, Homo sapiens
gagacaccaccacc

SEQ ID NO: 31117 - RNA, 14 nt, Homo sapiens
gagacagcucugca

SEQ ID NO: 31118 - RNA, 13 nt, Homo sapiens
gagacaccaccac

SEQ ID NO: 31119 - RNA, 11 nt, Homo sapiens
gagacaccacc

SEQ ID NO: 31120 - RNA, 23 nt, Homo sapiens
gagacgggguuugccaugcuggc

SEQ ID NO: 31121 - RNA, 17 nt, Homo sapiens
gagacucugucucaguc

SEQ ID NO: 31122 - RNA, 15 nt, Homo sapiens
gacgugacuggccug

SEQ ID NO: 31123 - RNA, 13 nt, Homo sapiens
gacuugggcggga

SEQ ID NO: 31124 - RNA, 15 nt, Homo sapiens
gacuggccugcugga

SEQ ID NO: 31125 - RNA, 12 nt, Homo sapiens
gacucuuaagaa

SEQ ID NO: 31126 - RNA, 12 nt, Homo sapiens
gaacugcuggau

SEQ ID NO: 31127 - RNA, 14 nt, Homo sapiens
gaacugcuggauuc

SEQ ID NO: 31128 - RNA, 13 nt, Homo sapiens
gaacucucgagcg

SEQ ID NO: 31129 - RNA, 16 nt, Homo sapiens
gaacccgggaggcaga

SEQ ID NO: 31130 - RNA, 13 nt, Homo sapiens
aauugcuaucgcc

SEQ ID NO: 31131 - RNA, 12 nt, Homo sapiens
aauuagccgggc

SEQ ID NO: 31132 - RNA, 17 nt, Homo sapiens
acaaaaauuagccgggc

SEQ ID NO: 31133 - RNA, 19 nt, Homo sapiens
gacaugagagacagcaggu

SEQ ID NO: 31134 - RNA, 12 nt, Homo sapiens
gacaccaccacc

SEQ ID NO: 31135 - RNA, 14 nt, Homo sapiens
gacacacugaagaa

SEQ ID NO: 31136 - RNA, 11 nt, Homo sapiens
gacaccaccac

SEQ ID NO: 31137 - RNA, 19 nt, Homo sapiens
gaccagccaaccugggggc

SEQ ID NO: 31138 - RNA, 13 nt, Homo sapiens
gacacacugaaga

SEQ ID NO: 31139 - RNA, 14 nt, Homo sapiens
gaauuggagcucgu

SEQ ID NO: 31140 - RNA, 20 nt, Homo sapiens
gaaguauccuucagccugaa

SEQ ID NO: 31141 - RNA, 15 nt, Homo sapiens
gaagucaaggcuuag

SEQ ID NO: 31142 - RNA, 11 nt, Homo sapiens
gaagaaugacu

SEQ ID NO: 31143 - RNA, 12 nt, Homo sapiens
gaagaaugacua

SEQ ID NO: 31144 - RNA, 16 nt, Homo sapiens
cuaccaaaaaucucaa

SEQ ID NO: 31145 - RNA, 18 nt, Homo sapiens
cuacagccaggcggcugg

SEQ ID NO: 31146 - RNA, 20 nt, Homo sapiens
cuacacuaagagagaaugag

SEQ ID NO: 31147 - RNA, 14 nt, Homo sapiens
cuacacuccaguga

SEQ ID NO: 31148 - RNA, 24 nt, Homo sapiens
cuaacucagaaacaucaguuacuc

SEQ ID NO: 31149 - RNA, 17 nt, Homo sapiens
cuaaaaggccugucccu

SEQ ID NO: 31150 - RNA, 18 nt, Homo sapiens
cuaaaaggccugucccug

SEQ ID NO: 31151 - RNA, 12 nt, Homo sapiens
cgugagccacca

SEQ ID NO: 31152 - RNA, 19 nt, Homo sapiens
cgucucccaaagugcuggg

SEQ ID NO: 31153 - RNA, 21 nt, Homo sapiens
cgggguuugccaugcuggcca

SEQ ID NO: 31154 - RNA, 16 nt, Homo sapiens
cgcgguggcucacgcc

SEQ ID NO: 31155 - RNA, 13 nt, Homo sapiens
cggguggaucacu

SEQ ID NO: 31156 - RNA, 21 nt, Homo sapiens
cuauuuauugcugaaugacua

SEQ ID NO: 31157 - RNA, 11 nt, Homo sapiens
cucaagccagc

SEQ ID NO: 31158 - RNA, 11 nt, Homo sapiens
cuaggccgggc

SEQ ID NO: 31159 - RNA, 13 nt, Homo sapiens
cuaggccgggcgc

SEQ ID NO: 31160 - RNA, 14 nt, Homo sapiens
cuaucgccaucaca

SEQ ID NO: 31161 - RNA, 13 nt, Homo sapiens
cuccagccugagc

SEQ ID NO: 31162 - RNA, 15 nt, Homo sapiens
cuccagccugagcga

SEQ ID NO: 31163 - RNA, 23 nt, Homo sapiens
cucauuuccuauguaacugcauu

SEQ ID NO: 31164 - RNA, 14 nt, Homo sapiens
cucagaaacaucag

SEQ ID NO: 31165 - RNA, 14 nt, Homo sapiens
cucauggaauugga

SEQ ID NO: 31166 - RNA, 13 nt, Homo sapiens
cgcgcgccaccac

SEQ ID NO: 31167 - RNA, 14 nt, Homo sapiens
cgcgcgccaccacg

SEQ ID NO: 31168 - RNA, 15 nt, Homo sapiens
cgcgccaccacgccc

SEQ ID NO: 31169 - RNA, 19 nt, Homo sapiens
cgcgccaccacgcccagcu

SEQ ID NO: 31170 - RNA, 13 nt, Homo sapiens
cgccuguaauccc

SEQ ID NO: 31171 - RNA, 12 nt, Homo sapiens
cgcgcaccugua

SEQ ID NO: 31172 - RNA, 13 nt, Homo sapiens
cgcgccaccacgc

SEQ ID NO: 31173 - RNA, 13 nt, Homo sapiens
cuggccugcugga

SEQ ID NO: 31174 - RNA, 20 nt, Homo sapiens
cugggaauuacaggcgugag

SEQ ID NO: 31175 - RNA, 19 nt, Homo sapiens
cugggguggguggggcagu

SEQ ID NO: 31176 - RNA, 16 nt, Homo sapiens
cuggaacucucgagcg

SEQ ID NO: 31177 - RNA, 18 nt, Homo sapiens
cuggacuuuccagagacc

SEQ ID NO: 31178 - RNA, 16 nt, Homo sapiens
cuggaaaccacauggc

SEQ ID NO: 31179 - RNA, 18 nt, Homo sapiens
cugcuguuuccuagcgca

SEQ ID NO: 31180 - RNA, 13 nt, Homo sapiens
cugcaauuccacu

SEQ ID NO: 31181 - RNA, 22 nt, Homo sapiens
cugcacaucaaaauaugcccca

SEQ ID NO: 31182 - RNA, 17 nt, Homo sapiens
cugccuaagugcagccc

SEQ ID NO: 31183 - RNA, 12 nt, Homo sapiens
cugccccugagc

SEQ ID NO: 31184 - RNA, 13 nt, Homo sapiens
cugccccugagcc

SEQ ID NO: 31185 - RNA, 13 nt, Homo sapiens
cucguggaacagu

SEQ ID NO: 31186 - RNA, 13 nt, Homo sapiens
cucuaaaugucaa

SEQ ID NO: 31187 - RNA, 13 nt, Homo sapiens
cucgugggacagu

SEQ ID NO: 31188 - RNA, 19 nt, Homo sapiens
cuucucaucugugauuccc

SEQ ID NO: 31189 - RNA, 20 nt, Homo sapiens
cuucucaucugugauucccu

SEQ ID NO: 31190 - RNA, 18 nt, Homo sapiens
cuuccuggcaauagucaa

SEQ ID NO: 31191 - RNA, 13 nt, Homo sapiens
cuuauaauagguu

SEQ ID NO: 31192 - RNA, 19 nt, Homo sapiens
cuucaugcauuugcacuau

SEQ ID NO: 31193 - RNA, 22 nt, Homo sapiens
cuguccccgaaacuaccagccc

SEQ ID NO: 31194 - RNA, 20 nt, Homo sapiens
cuguauuuuaaaagaaugau

SEQ ID NO: 31195 - RNA, 21 nt, Homo sapiens
cuguauuuuaaaagaaugauu

SEQ ID NO: 31196 - RNA, 19 nt, Homo sapiens
cugggauagcugacccagc

SEQ ID NO: 31197 - RNA, 17 nt, Homo sapiens
cuuucacaggggacagg

SEQ ID NO: 31198 - RNA, 22 nt, Homo sapiens
cuugggacaaaaacaaacaaac

SEQ ID NO: 31199 - RNA, 13 nt, Homo sapiens
gaaagcagggacu

SEQ ID NO: 31200 - RNA, 11 nt, Homo sapiens
aaucaggguua

SEQ ID NO: 31201 - RNA, 14 nt, Homo sapiens
ggaguuuggccaga

SEQ ID NO: 31202 - RNA, 15 nt, Homo sapiens
ggaguuuggccagaa

SEQ ID NO: 31203 - RNA, 20 nt, Homo sapiens
ggaguuccuaaccagccugg

SEQ ID NO: 31204 - RNA, 18 nt, Homo sapiens
ggagggggcgcgugcagg

SEQ ID NO: 31205 - RNA, 13 nt, Homo sapiens
ggagacaccacca

SEQ ID NO: 31206 - RNA, 12 nt, Homo sapiens
ggagacaccacc

SEQ ID NO: 31207 - RNA, 16 nt, Homo sapiens
ggagacaccaccaccc

SEQ ID NO: 31208 - RNA, 14 nt, Homo sapiens
gcuguuuucccuga

SEQ ID NO: 31209 - RNA, 15 nt, Homo sapiens
gcuggagcucugccc

SEQ ID NO: 31210 - RNA, 15 nt, Homo sapiens
ggaauugaggacacu

SEQ ID NO: 31211 - RNA, 12 nt, Homo sapiens
ggaaaggcagcu

SEQ ID NO: 31212 - RNA, 14 nt, Homo sapiens
ggaaagggucuccc

SEQ ID NO: 31213 - RNA, 21 nt, Homo sapiens
gcuuggcccaggaguuuggcc

SEQ ID NO: 31214 - RNA, 21 nt, Homo sapiens
gcuacucuguuccuucacauc

SEQ ID NO: 31215 - RNA, 21 nt, Homo sapiens
gcuaucgccaucacagcugaa

SEQ ID NO: 31216 - RNA, 15 nt, Homo sapiens
gcucacgccuguaau

SEQ ID NO: 31217 - RNA, 19 nt, Homo sapiens
gcugagcagucagaagacc

SEQ ID NO: 31218 - RNA, 12 nt, Homo sapiens
gcugaggcgggu

SEQ ID NO: 31219 - RNA, 13 nt, Homo sapiens
gcucuggaaacca

SEQ ID NO: 31220 - RNA, 15 nt, Homo sapiens
gcucuggaaaccaca

SEQ ID NO: 31221 - RNA, 14 nt, Homo sapiens
gcuacucuguuccu

SEQ ID NO: 31222 - RNA, 12 nt, Homo sapiens
gcgcgugcaggc

SEQ ID NO: 31223 - RNA, 14 nt, Homo sapiens
gcgcgcgccaccac

SEQ ID NO: 31224 - RNA, 11 nt, Homo sapiens
gccugcuggau

SEQ ID NO: 31225 - RNA, 16 nt, Homo sapiens
gcgcgcaccuguaauc

SEQ ID NO: 31226 - RNA, 13 nt, Homo sapiens
gcgcgcgccacca

SEQ ID NO: 31227 - RNA, 12 nt, Homo sapiens
gcgcgccaccac

SEQ ID NO: 31228 - RNA, 13 nt, Homo sapiens
gcgcgccaccacg

SEQ ID NO: 31229 - RNA, 13 nt, Homo sapiens
ggaguuuggccag

SEQ ID NO: 31230 - RNA, 19 nt, Homo sapiens
ggcagcaggauagaguggg

SEQ ID NO: 31231 - RNA, 18 nt, Homo sapiens
ggcggguggaucacuuga

SEQ ID NO: 31232 - RNA, 17 nt, Homo sapiens
ggcgugagccaccaaac

SEQ ID NO: 31233 - RNA, 12 nt, Homo sapiens
ggccuggcuggg

SEQ ID NO: 31234 - RNA, 14 nt, Homo sapiens
ggcgugagccacca

SEQ ID NO: 31235 - RNA, 15 nt, Homo sapiens
ggcgugagccaccaa

SEQ ID NO: 31236 - RNA, 18 nt, Homo sapiens
ggcgcgcgccaccacgcc

SEQ ID NO: 31237 - RNA, 16 nt, Homo sapiens
ggcuuagacccucaug

SEQ ID NO: 31238 - RNA, 17 nt, Homo sapiens
ggcuuagacccucaugc

SEQ ID NO: 31239 - RNA, 17 nt, Homo sapiens
gggaguggcgcgcgcca

SEQ ID NO: 31240 - RNA, 17 nt, Homo sapiens
ggcuggagugcaguggc

SEQ ID NO: 31241 - RNA, 23 nt, Homo sapiens
ggcuuagacccucaugcugccaa

SEQ ID NO: 31242 - RNA, 17 nt, Homo sapiens
guaucaaaagaaagaaa

SEQ ID NO: 31243 - RNA, 13 nt, Homo sapiens
gucccagcgaggg

SEQ ID NO: 31244 - RNA, 14 nt, Homo sapiens
guacuccagccugg

SEQ ID NO: 31245 - RNA, 22 nt, Homo sapiens
gguucuaggccgggcgcggugg

SEQ ID NO: 31246 - RNA, 16 nt, Homo sapiens
gguucuaggccgggcg

SEQ ID NO: 31247 - RNA, 14 nt, Homo sapiens
ggugggugggguga

SEQ ID NO: 31248 - RNA, 16 nt, Homo sapiens
gguggcucacgccugu

SEQ ID NO: 31249 - RNA, 15 nt, Homo sapiens
gguggggcagugcuu

SEQ ID NO: 31250 - RNA, 15 nt, Homo sapiens
ggggcugaugcaguu

SEQ ID NO: 31251 - RNA, 21 nt, Homo sapiens
gggcgcgugcaggcagcagga

SEQ ID NO: 31252 - RNA, 20 nt, Homo sapiens
gggcagugcuuggcccagga

SEQ ID NO: 31253 - RNA, 21 nt, Homo sapiens
ggggcagugcuuggcccagga

SEQ ID NO: 31254 - RNA, 19 nt, Homo sapiens
ugaccugacagcccaaggg

SEQ ID NO: 31255 - RNA, 15 nt, Homo sapiens
ugagaagaaugacua

SEQ ID NO: 31256 - RNA, 17 nt, Homo sapiens
ugagacucugucucagu

SEQ ID NO: 31257 - RNA, 16 nt, Homo sapiens
ugagagacagcagguc

SEQ ID NO: 31258 - RNA, 17 nt, Homo sapiens
ugagagacagcaggucu

SEQ ID NO: 31259 - RNA, 18 nt, Homo sapiens
ugaauucccugccuggau

SEQ ID NO: 31260 - RNA, 12 nt, Homo sapiens
ucuaacucagaa

SEQ ID NO: 31261 - RNA, 22 nt, Homo sapiens
ugagccagugcuuuaauggcau

SEQ ID NO: 31262 - RNA, 13 nt, Homo sapiens
ugcugaaugacua

SEQ ID NO: 31263 - RNA, 14 nt, Homo sapiens
ugccauaauuacua

SEQ ID NO: 31264 - RNA, 24 nt, Homo sapiens
ucgcugauauauguguuuuucaca

SEQ ID NO: 31265 - RNA, 13 nt, Homo sapiens
ucgaacugcugga

SEQ ID NO: 31266 - RNA, 17 nt, Homo sapiens
uccugagaccagccaac

SEQ ID NO: 31267 - RNA, 13 nt, Homo sapiens
uccugagaccagc

SEQ ID NO: 31268 - RNA, 20 nt, Homo sapiens
uccuaauaaaaaggugacca

SEQ ID NO: 31269 - RNA, 13 nt, Homo sapiens
uccuagcgcagcc

SEQ ID NO: 31270 - RNA, 14 nt, Homo sapiens
uccuagcgcagcca

SEQ ID NO: 31271 - RNA, 18 nt, Homo sapiens
uccuaggugagcagguga

SEQ ID NO: 31272 - RNA, 22 nt, Homo sapiens
uccagaaauaaugaaauaacua

SEQ ID NO: 31273 - RNA, 12 nt, Homo sapiens
ucaugcugccaa

SEQ ID NO: 31274 - RNA, 12 nt, Homo sapiens
ucaugaauuagu

SEQ ID NO: 31275 - RNA, 21 nt, Homo sapiens
ucaggcuggccaacgggguga

SEQ ID NO: 31276 - RNA, 12 nt, Homo sapiens
ucacuugaugau

SEQ ID NO: 31277 - RNA, 13 nt, Homo sapiens
ucacuugaugaua

SEQ ID NO: 31278 - RNA, 8 nt, Homo sapiens
ucaccugu

SEQ ID NO: 31279 - RNA, 9 nt, Homo sapiens
ucaccuguu

SEQ ID NO: 31280 - RNA, 13 nt, Homo sapiens
uaugccccauuca

SEQ ID NO: 31281 - RNA, 14 nt, Homo sapiens
uaugccccauucaa

SEQ ID NO: 31282 - RNA, 24 nt, Homo sapiens
uaugucauuugcuggagcucugcc

SEQ ID NO: 31283 - RNA, 14 nt, Homo sapiens
uaucgccaucacag

SEQ ID NO: 31284 - RNA, 14 nt, Homo sapiens
uacccaaauggaaa

SEQ ID NO: 31285 - RNA, 12 nt, Homo sapiens
uagggaccugcu

SEQ ID NO: 31286 - RNA, 15 nt, Homo sapiens
gucucgaacugcugg

SEQ ID NO: 31287 - RNA, 16 nt, Homo sapiens
gucucgaacugcugga

SEQ ID NO: 31288 - RNA, 14 nt, Homo sapiens
gugacccugaugaa

SEQ ID NO: 31289 - RNA, 17 nt, Homo sapiens
gucucccaaagugcugg

SEQ ID NO: 31290 - RNA, 16 nt, Homo sapiens
gucucccaaagugcug

SEQ ID NO: 31291 - RNA, 17 nt, Homo sapiens
gugauuaccagggacug

SEQ ID NO: 31292 - RNA, 22 nt, Homo sapiens
gugggacagucaccucauggaa

SEQ ID NO: 31293 - RNA, 23 nt, Homo sapiens
gugggacagucaccucauggaau

SEQ ID NO: 31294 - RNA, 16 nt, Homo sapiens
guggguggggcagugc

SEQ ID NO: 31295 - RNA, 23 nt, Homo sapiens
guguguuuauuucacuugaugau

SEQ ID NO: 31296 - RNA, 19 nt, Homo sapiens
guuaugauuaaguaaugau

SEQ ID NO: 31297 - RNA, 19 nt, Homo sapiens
guuaugcauaaagucagug

SEQ ID NO: 31298 - RNA, 15 nt, Homo sapiens
guuacaacacggacg

SEQ ID NO: 31299 - RNA, 14 nt, Homo sapiens
guuuaaauggucaa

SEQ ID NO: 31300 - RNA, 20 nt, Homo sapiens
guuuagaaagcuugcccugg

SEQ ID NO: 31301 - RNA, 19 nt, Homo sapiens
guugccaaggcuggagugc

SEQ ID NO: 31302 - RNA, 19 nt, Homo sapiens
cagcuacuugggaggcuga

SEQ ID NO: 31303 - RNA, 15 nt, Homo sapiens
cagccaggcggcugg

SEQ ID NO: 31304 - RNA, 16 nt, Homo sapiens
cagccaggcggcugga

SEQ ID NO: 31305 - RNA, 18 nt, Homo sapiens
cagccccuugagaaaccu

SEQ ID NO: 31306 - RNA, 15 nt, Homo sapiens
cagcauuuuacuacu

SEQ ID NO: 31307 - RNA, 16 nt, Homo sapiens
cagcauuuuacuacuu

SEQ ID NO: 31308 - RNA, 17 nt, Homo sapiens
cagcauuuuacuacuuu

SEQ ID NO: 31309 - RNA, 11 nt, Homo sapiens
cagaacaguga

SEQ ID NO: 31310 - RNA, 13 nt, Homo sapiens
cagaagcaaccca

SEQ ID NO: 31311 - RNA, 15 nt, Homo sapiens
cagugcuuuaauggc

SEQ ID NO: 31312 - RNA, 17 nt, Homo sapiens
cagugucaaugcagccc

SEQ ID NO: 31313 - RNA, 14 nt, Homo sapiens
cagugcuuggccca

SEQ ID NO: 31314 - RNA, 15 nt, Homo sapiens
cagugcuuggcccag

SEQ ID NO: 31315 - RNA, 16 nt, Homo sapiens
cagugcuuggcccagg

SEQ ID NO: 31316 - RNA, 11 nt, Homo sapiens
caggcuggcca

SEQ ID NO: 31317 - RNA, 23 nt, Homo sapiens
caggcuggucucgaacugcugga

SEQ ID NO: 31318 - RNA, 18 nt, Homo sapiens
caggaguuccuaaccagc

SEQ ID NO: 31319 - RNA, 19 nt, Homo sapiens
caggcgugagccaccaaac

SEQ ID NO: 31320 - RNA, 15 nt, Homo sapiens
caggcuagauguaug

SEQ ID NO: 31321 - RNA, 18 nt, Homo sapiens
cagugucaaugcagcccc

SEQ ID NO: 31322 - RNA, 13 nt, Homo sapiens
caguguccucauc

SEQ ID NO: 31323 - RNA, 22 nt, Homo sapiens
caguuccugagaccagccaacc

SEQ ID NO: 31324 - RNA, 16 nt, Homo sapiens
caguucugaagaagau

SEQ ID NO: 31325 - RNA, 13 nt, Homo sapiens
cauagaauagugu

SEQ ID NO: 31326 - RNA, 14 nt, Homo sapiens
cauagaauaguguu

SEQ ID NO: 31327 - RNA, 17 nt, Homo sapiens
cauagaauuaacacaug

SEQ ID NO: 31328 - RNA, 14 nt, Homo sapiens
caucaaugaaugaa

SEQ ID NO: 31329 - RNA, 18 nt, Homo sapiens
caugguggcgcgcaccug

SEQ ID NO: 31330 - RNA, 21 nt, Homo sapiens
caugcuggccaggcuggucuc

SEQ ID NO: 31331 - RNA, 13 nt, Homo sapiens
caugcugccaaua

SEQ ID NO: 31332 - RNA, 19 nt, Homo sapiens
ccaccaaacccggccugau

SEQ ID NO: 31333 - RNA, 15 nt, Homo sapiens
ccaccaaacccggcc

SEQ ID NO: 31334 - RNA, 14 nt, Homo sapiens
ccaccaaacccggc

SEQ ID NO: 31335 - RNA, 15 nt, Homo sapiens
cauugcaaccuccac

SEQ ID NO: 31336 - RNA, 22 nt, Homo sapiens
cauggaucugguagggggaaaa

SEQ ID NO: 31337 - RNA, 12 nt, Homo sapiens
cccuacaccauu

SEQ ID NO: 31338 - RNA, 11 nt, Homo sapiens
cccuguacucc

SEQ ID NO: 31339 - RNA, 12 nt, Homo sapiens
cccuguacucca

SEQ ID NO: 31340 - RNA, 22 nt, Homo sapiens
cccucuguugccaaggcuggag

SEQ ID NO: 31341 - RNA, 20 nt, Homo sapiens
ccccugcacuccagccugag

SEQ ID NO: 31342 - RNA, 22 nt, Homo sapiens
ccccugcacuccagccugagcg

SEQ ID NO: 31343 - RNA, 19 nt, Homo sapiens
ccccugcacuccagccuga

SEQ ID NO: 31344 - RNA, 24 nt, Homo sapiens
cccacaccagggccuggcugggag

SEQ ID NO: 31345 - RNA, 16 nt, Homo sapiens
cccaaaacugauaccc

SEQ ID NO: 31346 - RNA, 20 nt, Homo sapiens
cccagcuacuugggaggcug

SEQ ID NO: 31347 - RNA, 20 nt, Homo sapiens
cccagcacuuugggaggcug

SEQ ID NO: 31348 - RNA, 14 nt, Homo sapiens
ccauagggugacac

SEQ ID NO: 31349 - RNA, 23 nt, Homo sapiens
ccaggaguuuggccagaagucaa

SEQ ID NO: 31350 - RNA, 18 nt, Homo sapiens
ccaggaguuuggccagaa

SEQ ID NO: 31351 - RNA, 23 nt, Homo sapiens
ccgggaguggcgcgcgccaccac

SEQ ID NO: 31352 - RNA, 22 nt, Homo sapiens
ccgggaguggcgcgcgccacca

SEQ ID NO: 31353 - RNA, 16 nt, Homo sapiens
ccgggcguggugguga

SEQ ID NO: 31354 - RNA, 18 nt, Homo sapiens
ccgggaguggcgcgcgcc

SEQ ID NO: 31355 - RNA, 21 nt, Homo sapiens
ccuguguuucuagggaaauga

SEQ ID NO: 31356 - RNA, 14 nt, Homo sapiens
ccuuugggaaagga

SEQ ID NO: 31357 - RNA, 22 nt, Homo sapiens
ccugcuguuuccuagcgcagcc

SEQ ID NO: 31358 - RNA, 15 nt, Homo sapiens
ccugccccugagccc

SEQ ID NO: 31359 - RNA, 20 nt, Homo sapiens
ccucaugcugccaauauccu

SEQ ID NO: 31360 - RNA, 21 nt, Homo sapiens
ccucccuucucuucacaguca

SEQ ID NO: 31361 - RNA, 12 nt, Homo sapiens
ccugcaggcgug

SEQ ID NO: 31362 - RNA, 8 nt, Homo sapiens
ccugagcc

SEQ ID NO: 31363 - RNA, 20 nt, Homo sapiens
cuccagugagacagcucugc

SEQ ID NO: 31364 - RNA, 21 nt, Homo sapiens
cuccagugagacagcucugca

SEQ ID NO: 31365 - RNA, 15 nt, Homo sapiens
cuccaccuucugggu

SEQ ID NO: 31366 - RNA, 14 nt, Homo sapiens
cuccagccugagcg

SEQ ID NO: 31367 - RNA, 14 nt, Homo sapiens
cuccgucucccaaa

SEQ ID NO: 31368 - RNA, 22 nt, Homo sapiens
cucggagggauuccccuaaccu

SEQ ID NO: 31369 - RNA, 17 nt, Homo sapiens
cuggaaaccacauggcu

SEQ ID NO: 31370 - RNA, 15 nt, Homo sapiens
cuggaacucucgagc

SEQ ID NO: 31371 - RNA, 18 nt, Homo sapiens
cugccuaagugcagcccc

SEQ ID NO: 31372 - RNA, 15 nt, Homo sapiens
cugccccugagccca

SEQ ID NO: 31373 - RNA, 14 nt, Homo sapiens
cugccccugagccc

SEQ ID NO: 31374 - RNA, 12 nt, Homo sapiens
cugagaccagcc

SEQ ID NO: 31375 - RNA, 13 nt, Homo sapiens
cugagaccagcca

SEQ ID NO: 31376 - RNA, 12 nt, Homo sapiens
cugaggcgggug

SEQ ID NO: 31377 - RNA, 19 nt, Homo sapiens
cuggagugcaguggcgcaa

SEQ ID NO: 31378 - RNA, 18 nt, Homo sapiens
cuggagugcaguggcgca

SEQ ID NO: 31379 - RNA, 15 nt, Homo sapiens
cugucccagcgaggg

SEQ ID NO: 31380 - RNA, 21 nt, Homo sapiens
cuguccccgaaacuaccagcc

SEQ ID NO: 31381 - RNA, 16 nt, Homo sapiens
cuggcugggaguggca

SEQ ID NO: 31382 - RNA, 19 nt, Homo sapiens
cuguaaaauggagacacca

SEQ ID NO: 31383 - RNA, 20 nt, Homo sapiens
cuuagacccucaugcugcca

SEQ ID NO: 31384 - RNA, 17 nt, Homo sapiens
cuuccuggcaauaguca

SEQ ID NO: 31385 - RNA, 20 nt, Homo sapiens
cuuggcccaggaguuuggcc

SEQ ID NO: 31386 - RNA, 15 nt, Homo sapiens
cuugaacccgggagg

SEQ ID NO: 31387 - RNA, 21 nt, Homo sapiens
cuuugggaggcugaggcgggu

SEQ ID NO: 31388 - RNA, 22 nt, Homo sapiens
cucauuuccuauguaacugcau

SEQ ID NO: 31389 - RNA, 20 nt, Homo sapiens
cucauggaauuggagcucgu

SEQ ID NO: 31390 - RNA, 12 nt, Homo sapiens
cucaagccagcc

SEQ ID NO: 31391 - RNA, 20 nt, Homo sapiens
cuauuuauugcugaaugacu

SEQ ID NO: 31392 - RNA, 22 nt, Homo sapiens
cuauuuauugcugaaugacuac

SEQ ID NO: 31393 - RNA, 16 nt, Homo sapiens
cuauuacgugcaauac

SEQ ID NO: 31394 - RNA, 12 nt, Homo sapiens
cuaggccgggcg

SEQ ID NO: 31395 - RNA, 11 nt, Homo sapiens
cgcgccaccac

SEQ ID NO: 31396 - RNA, 15 nt, Homo sapiens
cgcgcgccaccacgc

SEQ ID NO: 31397 - RNA, 21 nt, Homo sapiens
cgggaguggcgcgcgccacca

SEQ ID NO: 31398 - RNA, 16 nt, Homo sapiens
cgggaguggcgcgcgc

SEQ ID NO: 31399 - RNA, 18 nt, Homo sapiens
cgggaguggcgcgcgcca

SEQ ID NO: 31400 - RNA, 20 nt, Homo sapiens
cuaaccucauuccccaacca

SEQ ID NO: 31401 - RNA, 13 nt, Homo sapiens
cgugacuggccug

SEQ ID NO: 31402 - RNA, 14 nt, Homo sapiens
cgugacuggccugc

SEQ ID NO: 31403 - RNA, 18 nt, Homo sapiens
cgucucccaaagugcugg

SEQ ID NO: 31404 - RNA, 16 nt, Homo sapiens
cgguuuaaugggcaca

SEQ ID NO: 31405 - RNA, 14 nt, Homo sapiens
cgcgccaccacgcc

SEQ ID NO: 31406 - RNA, 16 nt, Homo sapiens
cgcgccaccacgccca

SEQ ID NO: 31407 - RNA, 11 nt, Homo sapiens
cgcgcaccugu

SEQ ID NO: 31408 - RNA, 18 nt, Homo sapiens
cgcaccuguaaucccagc

SEQ ID NO: 31409 - RNA, 22 nt, Homo sapiens
cgaacugcuggauucaagugau

SEQ ID NO: 31410 - RNA, 17 nt, Homo sapiens
cgaaugguuccauucuc

SEQ ID NO: 31411 - RNA, 17 nt, Homo sapiens
cgccaccacgcccagcu

SEQ ID NO: 31412 - RNA, 12 nt, Homo sapiens
uggcgcgcgcca

SEQ ID NO: 31413 - RNA, 20 nt, Homo sapiens
ugggaauuacaggcgugagc

SEQ ID NO: 31414 - RNA, 16 nt, Homo sapiens
uggggcagugcuuggc

SEQ ID NO: 31415 - RNA, 17 nt, Homo sapiens
uggccagaagucaaggc

SEQ ID NO: 31416 - RNA, 18 nt, Homo sapiens
uggcgcgcgccaccacgc

SEQ ID NO: 31417 - RNA, 15 nt, Homo sapiens
uggagacaccaccac

SEQ ID NO: 31418 - RNA, 14 nt, Homo sapiens
uggagacaccacca

SEQ ID NO: 31419 - RNA, 16 nt, Homo sapiens
uggagacaccaccacc

SEQ ID NO: 31420 - RNA, 22 nt, Homo sapiens
ugcuguuuccuagcgcagccau

SEQ ID NO: 31421 - RNA, 18 nt, Homo sapiens
uguuaaaacugggacagg

SEQ ID NO: 31422 - RNA, 13 nt, Homo sapiens
uguacuuuuucca

SEQ ID NO: 31423 - RNA, 20 nt, Homo sapiens
ugguucuucuuggucucagu

SEQ ID NO: 31424 - RNA, 15 nt, Homo sapiens
ugggguggguggggc

SEQ ID NO: 31425 - RNA, 20 nt, Homo sapiens
uggggcagugcuuggcccag

SEQ ID NO: 31426 - RNA, 15 nt, Homo sapiens
accacccuugccaug

SEQ ID NO: 31427 - RNA, 11 nt, Homo sapiens
accagccuggu

SEQ ID NO: 31428 - RNA, 12 nt, Homo sapiens
accagccugguc

SEQ ID NO: 31429 - RNA, 15 nt, Homo sapiens
acaugagagacagca

SEQ ID NO: 31430 - RNA, 10 nt, Homo sapiens
acaggcguga

SEQ ID NO: 31431 - RNA, 22 nt, Homo sapiens
acagucacauuccaagccucau

SEQ ID NO: 31432 - RNA, 11 nt, Homo sapiens
uuagccgggcg

SEQ ID NO: 31433 - RNA, 12 nt, Homo sapiens
uuagccgggcgu

SEQ ID NO: 31434 - RNA, 13 nt, Homo sapiens
uuagccgggcgug

SEQ ID NO: 31435 - RNA, 15 nt, Homo sapiens
acuuugggaggcuga

SEQ ID NO: 31436 - RNA, 14 nt, Homo sapiens
acuugggaggcuga

SEQ ID NO: 31437 - RNA, 20 nt, Homo sapiens
agcagucagaagaccugguc

SEQ ID NO: 31438 - RNA, 21 nt, Homo sapiens
agcaccugcaggcgugaccug

SEQ ID NO: 31439 - RNA, 15 nt, Homo sapiens
agccuggucaacaug

SEQ ID NO: 31440 - RNA, 16 nt, Homo sapiens
agccuggucaacaugg

SEQ ID NO: 31441 - RNA, 15 nt, Homo sapiens
agccccgggaguggc

SEQ ID NO: 31442 - RNA, 17 nt, Homo sapiens
uuggugccucaguuucc

SEQ ID NO: 31443 - RNA, 14 nt, Homo sapiens
acccucaugcugcc

SEQ ID NO: 31444 - RNA, 16 nt, Homo sapiens
uuugcuaagcauucca

SEQ ID NO: 31445 - RNA, 9 nt, Homo sapiens
accugagcc

SEQ ID NO: 31446 - RNA, 10 nt, Homo sapiens
accugagccc

SEQ ID NO: 31447 - RNA, 11 nt, Homo sapiens
accugagcccc

SEQ ID NO: 31448 - RNA, 17 nt, Homo sapiens
acugggguggguggggc

SEQ ID NO: 31449 - RNA, 13 nt, Homo sapiens
acuccagccuggg

SEQ ID NO: 31450 - RNA, 19 nt, Homo sapiens
acucuuaggaagagaaacc

SEQ ID NO: 31451 - RNA, 11 nt, Homo sapiens
acgugacuggc

SEQ ID NO: 31452 - RNA, 15 nt, Homo sapiens
accuguccccgaaac

SEQ ID NO: 31453 - RNA, 22 nt, Homo sapiens
agucaaggcuuagacccucaug

SEQ ID NO: 31454 - RNA, 22 nt, Homo sapiens
agggucucccucuguugccaag

SEQ ID NO: 31455 - RNA, 20 nt, Homo sapiens
aggcuuagacccucaugcug

SEQ ID NO: 31456 - RNA, 14 nt, Homo sapiens
agcuguugagcugu

SEQ ID NO: 31457 - RNA, 20 nt, Homo sapiens
aggcgugaccugacagccca

SEQ ID NO: 31458 - RNA, 21 nt, Homo sapiens
agccgggcaugguggcgcgca

SEQ ID NO: 31459 - RNA, 16 nt, Homo sapiens
auccuucagccugaaa

SEQ ID NO: 31460 - RNA, 14 nt, Homo sapiens
aucucaauauuuca

SEQ ID NO: 31461 - RNA, 13 nt, Homo sapiens
auacaaucaucaa

SEQ ID NO: 31462 - RNA, 15 nt, Homo sapiens
auaccacaggaacca

SEQ ID NO: 31463 - RNA, 16 nt, Homo sapiens
aguugcagugagcuga

SEQ ID NO: 31464 - RNA, 16 nt, Homo sapiens
aguggcgcgcgccacc

SEQ ID NO: 31465 - RNA, 17 nt, Homo sapiens
agugcuuggcccaggag

SEQ ID NO: 31466 - RNA, 21 nt, Homo sapiens
caccugcaggcgugaccugac

SEQ ID NO: 31467 - RNA, 13 nt, Homo sapiens
caccuguaauccc

SEQ ID NO: 31468 - RNA, 11 nt, Homo sapiens
caccugcaggc

SEQ ID NO: 31469 - RNA, 17 nt, Homo sapiens
caccaaacccggccuga

SEQ ID NO: 31470 - RNA, 12 nt, Homo sapiens
caccaaggcuga

SEQ ID NO: 31471 - RNA, 20 nt, Homo sapiens
cacaagugaaaaacauccag

SEQ ID NO: 31472 - RNA, 17 nt, Homo sapiens
caauuauaucaguccuc

SEQ ID NO: 31473 - RNA, 15 nt, Homo sapiens
cacaaccugucccag

SEQ ID NO: 31474 - RNA, 15 nt, Homo sapiens
caaaauugggaaagg

SEQ ID NO: 31475 - RNA, 12 nt, Homo sapiens
caaagugcuggg

SEQ ID NO: 31476 - RNA, 13 nt, Homo sapiens
caaagugcuggga

SEQ ID NO: 31477 - RNA, 17 nt, Homo sapiens
caagugauccgcccauc

SEQ ID NO: 31478 - RNA, 18 nt, Homo sapiens
caagugauccgcccaucu

SEQ ID NO: 31479 - RNA, 21 nt, Homo sapiens
caaggcuuagacccucaugcu

SEQ ID NO: 31480 - RNA, 11 nt, Homo sapiens
caagcacuuuc

SEQ ID NO: 31481 - RNA, 13 nt, Homo sapiens
caagcacuuuccc

SEQ ID NO: 31482 - RNA, 15 nt, Homo sapiens
auuacaggcgugagc

SEQ ID NO: 31483 - RNA, 20 nt, Homo sapiens
auuacuguaagaaaauauca

SEQ ID NO: 31484 - RNA, 21 nt, Homo sapiens
auuacuguaagaaaauaucac

SEQ ID NO: 31485 - RNA, 12 nt, Homo sapiens
auuagccgggcg

SEQ ID NO: 31486 - RNA, 21 nt, Homo sapiens
auuccaagccucauguccacu

SEQ ID NO: 31487 - RNA, 14 nt, Homo sapiens
auuccaagccugac

SEQ ID NO: 31488 - RNA, 18 nt, Homo sapiens
auggagacaccaccaccc

SEQ ID NO: 31489 - RNA, 23 nt, Homo sapiens
augugucaggugacccugaugaa

SEQ ID NO: 31490 - RNA, 20 nt, Homo sapiens
augugauuacccucuggguc

SEQ ID NO: 31491 - RNA, 22 nt, Homo sapiens
augacgugacuggccugcugga

SEQ ID NO: 31492 - RNA, 15 nt, Homo sapiens
auggaauuggagcuc

SEQ ID NO: 31493 - RNA, 14 nt, Homo sapiens
auggagacaccacc

SEQ ID NO: 31494 - RNA, 17 nt, Homo sapiens
auggagacaccaccacc

SEQ ID NO: 31495 - RNA, 14 nt, Homo sapiens
augcuggccaggcu

SEQ ID NO: 31496 - RNA, 11 nt, Homo sapiens
cgacaguuuuc

SEQ ID NO: 31497 - RNA, 16 nt, Homo sapiens
cgccuguaaucccagc

SEQ ID NO: 31498 - RNA, 13 nt, Homo sapiens
ccuuugggaaagg

SEQ ID NO: 31499 - RNA, 10 nt, Homo sapiens
ccuuuuuccu

SEQ ID NO: 31500 - RNA, 14 nt, Homo sapiens
ccgggaguggcgcg

SEQ ID NO: 31501 - RNA, 19 nt, Homo sapiens
ccgggcgcgguggcucacg

SEQ ID NO: 31502 - RNA, 14 nt, Homo sapiens
ccucaugcugccaa

SEQ ID NO: 31503 - RNA, 15 nt, Homo sapiens
ccucaugcugccaau

SEQ ID NO: 31504 - RNA, 11 nt, Homo sapiens
ccgggcgcggu

SEQ ID NO: 31505 - RNA, 16 nt, Homo sapiens
ccugccccugagccca

SEQ ID NO: 31506 - RNA, 14 nt, Homo sapiens
ccugcacuccagcc

SEQ ID NO: 31507 - RNA, 14 nt, Homo sapiens
ccugcaggcgugac

SEQ ID NO: 31508 - RNA, 14 nt, Homo sapiens
ccugccccugagcc

SEQ ID NO: 31509 - RNA, 11 nt, Homo sapiens
cccuacaccau

SEQ ID NO: 31510 - RNA, 14 nt, Homo sapiens
cccaggaguuuggc

SEQ ID NO: 31511 - RNA, 14 nt, Homo sapiens
ccccgggaguggcg

SEQ ID NO: 31512 - RNA, 16 nt, Homo sapiens
ccccgggaguggcgcg

SEQ ID NO: 31513 - RNA, 20 nt, Homo sapiens
cccccauuguggucacagga

SEQ ID NO: 31514 - RNA, 15 nt, Homo sapiens
ccacauggcuucacc

SEQ ID NO: 31515 - RNA, 12 nt, Homo sapiens
ccacuucacuuu

SEQ ID NO: 31516 - RNA, 22 nt, Homo sapiens
ccaaggcuggagugcaguggcg

SEQ ID NO: 31517 - RNA, 14 nt, Homo sapiens
ccacauggcuucac

SEQ ID NO: 31518 - RNA, 16 nt, Homo sapiens
cauugcaaccuccacc

SEQ ID NO: 31519 - RNA, 12 nt, Homo sapiens
cauuuucacuuu

SEQ ID NO: 31520 - RNA, 15 nt, Homo sapiens
cauugagaacugcau

SEQ ID NO: 31521 - RNA, 19 nt, Homo sapiens
ccagccugagcgacaguga

SEQ ID NO: 31522 - RNA, 15 nt, Homo sapiens
cccaaaacugauacc

SEQ ID NO: 31523 - RNA, 15 nt, Homo sapiens
cccaaagugcuggga

SEQ ID NO: 31524 - RNA, 16 nt, Homo sapiens
cccacaagaaaugaaa

SEQ ID NO: 31525 - RNA, 19 nt, Homo sapiens
cccagccccuugagaaacc

SEQ ID NO: 31526 - RNA, 20 nt, Homo sapiens
cccagccccuugagaaaccu

SEQ ID NO: 31527 - RNA, 13 nt, Homo sapiens
cccaggaguuugg

SEQ ID NO: 31528 - RNA, 15 nt, Homo sapiens
ccauagggugacaca

SEQ ID NO: 31529 - RNA, 12 nt, Homo sapiens
ccaugcuggcca

SEQ ID NO: 31530 - RNA, 13 nt, Homo sapiens
ccauagggugaca

SEQ ID NO: 31531 - RNA, 14 nt, Homo sapiens
caggcuggucucga

SEQ ID NO: 31532 - RNA, 15 nt, Homo sapiens
cagucacauuccaag

SEQ ID NO: 31533 - RNA, 23 nt, Homo sapiens
cagugcuuuccguggcacugcau

SEQ ID NO: 31534 - RNA, 14 nt, Homo sapiens
caggauagaguggg

SEQ ID NO: 31535 - RNA, 20 nt, Homo sapiens
caggcgugaccugacagccc

SEQ ID NO: 31536 - RNA, 18 nt, Homo sapiens
caggcgugagccaccaaa

SEQ ID NO: 31537 - RNA, 16 nt, Homo sapiens
caggcgugagccacca

SEQ ID NO: 31538 - RNA, 18 nt, Homo sapiens
caucaaugaaugaaugaa

SEQ ID NO: 31539 - RNA, 19 nt, Homo sapiens
caucaaugaaugaaugaau

SEQ ID NO: 31540 - RNA, 15 nt, Homo sapiens
caucaaugaaugaau

SEQ ID NO: 31541 - RNA, 17 nt, Homo sapiens
caugagagacagcaggu

SEQ ID NO: 31542 - RNA, 15 nt, Homo sapiens
cauuauuuauauggg

SEQ ID NO: 31543 - RNA, 18 nt, Homo sapiens
caugugauuacccucugg

SEQ ID NO: 31544 - RNA, 16 nt, Homo sapiens
auuacaggcgugagcc

SEQ ID NO: 31545 - RNA, 17 nt, Homo sapiens
auucccuccugcuacuc

SEQ ID NO: 31546 - RNA, 11 nt, Homo sapiens
augauuccacc

SEQ ID NO: 31547 - RNA, 12 nt, Homo sapiens
auuagccgggca

SEQ ID NO: 31548 - RNA, 13 nt, Homo sapiens
auuagccgggcgu

SEQ ID NO: 31549 - RNA, 14 nt, Homo sapiens
auuagccgggcgug

SEQ ID NO: 31550 - RNA, 22 nt, Homo sapiens
auuguaaaauggugugaccacu

SEQ ID NO: 31551 - RNA, 17 nt, Homo sapiens
auugagcaccugcaggc

SEQ ID NO: 31552 - RNA, 14 nt, Homo sapiens
caaucaugaauuag

SEQ ID NO: 31553 - RNA, 23 nt, Homo sapiens
caauauuuauuauuuucaccugu

SEQ ID NO: 31554 - RNA, 16 nt, Homo sapiens
caaggcuuagacccuc

SEQ ID NO: 31555 - RNA, 15 nt, Homo sapiens
caaggcuggagugca

SEQ ID NO: 31556 - RNA, 16 nt, Homo sapiens
caaaauugggaaagga

SEQ ID NO: 31557 - RNA, 23 nt, Homo sapiens
caaauaaguauuuauaauagcaa

SEQ ID NO: 31558 - RNA, 20 nt, Homo sapiens
caacuugaauaauacaccag

SEQ ID NO: 31559 - RNA, 12 nt, Homo sapiens
caagcacuuucc

SEQ ID NO: 31560 - RNA, 20 nt, Homo sapiens
caauuauuuuuacaguucuc

SEQ ID NO: 31561 - RNA, 21 nt, Homo sapiens
caauuauuuuuacaguucucc

SEQ ID NO: 31562 - RNA, 14 nt, Homo sapiens
cacaaccuguccca

SEQ ID NO: 31563 - RNA, 24 nt, Homo sapiens
cacucuauguucuaagaagugaaa

SEQ ID NO: 31564 - RNA, 21 nt, Homo sapiens
caccuucuggguucaagcgau

SEQ ID NO: 31565 - RNA, 22 nt, Homo sapiens
caccuucuggguucaagcgauu

SEQ ID NO: 31566 - RNA, 19 nt, Homo sapiens
caccagggccuggcuggga

SEQ ID NO: 31567 - RNA, 20 nt, Homo sapiens
cacuugggacaaaaacaaac

SEQ ID NO: 31568 - RNA, 17 nt, Homo sapiens
cacuugaacccgggagg

SEQ ID NO: 31569 - RNA, 21 nt, Homo sapiens
cacugguucuucuuggucuca

SEQ ID NO: 31570 - RNA, 19 nt, Homo sapiens
cagagaaaauaaaagcacu

SEQ ID NO: 31571 - RNA, 18 nt, Homo sapiens
cagagaaaauaaaagcac

SEQ ID NO: 31572 - RNA, 13 nt, Homo sapiens
cagaagucaaggc

SEQ ID NO: 31573 - RNA, 22 nt, Homo sapiens
cagaaaacaaggaugaauuaag

SEQ ID NO: 31574 - RNA, 22 nt, Homo sapiens
cagacauagaauuaacacauga

SEQ ID NO: 31575 - RNA, 20 nt, Homo sapiens
cagaucauuucaaaacucau

SEQ ID NO: 31576 - RNA, 17 nt, Homo sapiens
cagauccuggaaaucag

SEQ ID NO: 31577 - RNA, 20 nt, Homo sapiens
cagcccccauuguggucaca

SEQ ID NO: 31578 - RNA, 15 nt, Homo sapiens
cagcucuaaauguca

SEQ ID NO: 31579 - RNA, 20 nt, Homo sapiens
agggccuggcugggaguggc

SEQ ID NO: 31580 - RNA, 17 nt, Homo sapiens
aggcuuagacccucaug

SEQ ID NO: 31581 - RNA, 17 nt, Homo sapiens
agguauuuuaaucacca

SEQ ID NO: 31582 - RNA, 17 nt, Homo sapiens
aggucacacaaccuguc

SEQ ID NO: 31583 - RNA, 13 nt, Homo sapiens
agugauccgccca

SEQ ID NO: 31584 - RNA, 22 nt, Homo sapiens
agugguuauuuagggaacugcu

SEQ ID NO: 31585 - RNA, 23 nt, Homo sapiens
agugguuauuuagggaacugcuu

SEQ ID NO: 31586 - RNA, 18 nt, Homo sapiens
auaugaggcauuugcagc

SEQ ID NO: 31587 - RNA, 12 nt, Homo sapiens
auacaaucauca

SEQ ID NO: 31588 - RNA, 15 nt, Homo sapiens
aguugcagugagcug

SEQ ID NO: 31589 - RNA, 16 nt, Homo sapiens
auggagacaccaccac

SEQ ID NO: 31590 - RNA, 16 nt, Homo sapiens
auggaauuggagcucg

SEQ ID NO: 31591 - RNA, 18 nt, Homo sapiens
augugacuuaaugccacu

SEQ ID NO: 31592 - RNA, 19 nt, Homo sapiens
auguuagugcaaauuguca

SEQ ID NO: 31593 - RNA, 22 nt, Homo sapiens
aucuguaaaauggagacaccac

SEQ ID NO: 31594 - RNA, 19 nt, Homo sapiens
augacgugacuggccugcu

SEQ ID NO: 31595 - RNA, 21 nt, Homo sapiens
augacgugacuggccugcugg

SEQ ID NO: 31596 - RNA, 19 nt, Homo sapiens
augccacuaaauugacacu

SEQ ID NO: 31597 - RNA, 14 nt, Homo sapiens
auccuucagccuga

SEQ ID NO: 31598 - RNA, 15 nt, Homo sapiens
auccuucagccugaa

SEQ ID NO: 31599 - RNA, 22 nt, Homo sapiens
auccgcccaucuccgucuccca

SEQ ID NO: 31600 - RNA, 15 nt, Homo sapiens
aaauuuuauaguguc

SEQ ID NO: 31601 - RNA, 16 nt, Homo sapiens
aaauuuuauagugucu

SEQ ID NO: 31602 - RNA, 14 nt, Homo sapiens
aaauggagacacca

SEQ ID NO: 31603 - RNA, 14 nt, Homo sapiens
aaauuuuauagugu

SEQ ID NO: 31604 - RNA, 10 nt, Homo sapiens
aacauagguu

SEQ ID NO: 31605 - RNA, 16 nt, Homo sapiens
aaaagccaaaaaccaa

SEQ ID NO: 31606 - RNA, 11 nt, Homo sapiens
aaaaggugacc

SEQ ID NO: 31607 - RNA, 14 nt, Homo sapiens
aacuucagcgguuu

SEQ ID NO: 31608 - RNA, 15 nt, Homo sapiens
aacuucagcgguuua

SEQ ID NO: 31609 - RNA, 18 nt, Homo sapiens
aagggaguuaggcuauuc

SEQ ID NO: 31610 - RNA, 12 nt, Homo sapiens
aaggcuggagug

SEQ ID NO: 31611 - RNA, 13 nt, Homo sapiens
aaggcuggagugc

SEQ ID NO: 31612 - RNA, 13 nt, Homo sapiens
acacagugucugg

SEQ ID NO: 31613 - RNA, 11 nt, Homo sapiens
acagaagcucc

SEQ ID NO: 31614 - RNA, 11 nt, Homo sapiens
acaggcgugag

SEQ ID NO: 31615 - RNA, 18 nt, Homo sapiens
acaggcgugagccaccaa

SEQ ID NO: 31616 - RNA, 12 nt, Homo sapiens
accaaggcugau

SEQ ID NO: 31617 - RNA, 15 nt, Homo sapiens
aagucaaggcuuaga

SEQ ID NO: 31618 - RNA, 23 nt, Homo sapiens
aauacucuuaggaagagaaacca

SEQ ID NO: 31619 - RNA, 24 nt, Homo sapiens
aauacucuuaggaagagaaaccag

SEQ ID NO: 31620 - RNA, 12 nt, Homo sapiens
aaugggcuacuu

SEQ ID NO: 31621 - RNA, 13 nt, Homo sapiens
aauuagccgggca

SEQ ID NO: 31622 - RNA, 21 nt, Homo sapiens
aauuugguucuaggccgggcg

SEQ ID NO: 31623 - RNA, 12 nt, Homo sapiens
aauugcuaucgc

SEQ ID NO: 31624 - RNA, 15 nt, Homo sapiens
acugccuaucagcau

SEQ ID NO: 31625 - RNA, 18 nt, Homo sapiens
acugggguggguggggca

SEQ ID NO: 31626 - RNA, 18 nt, Homo sapiens
acucauugcaaccuccac

SEQ ID NO: 31627 - RNA, 14 nt, Homo sapiens
acuucuuaggguua

SEQ ID NO: 31628 - RNA, 18 nt, Homo sapiens
acgugacuggccugcugg

SEQ ID NO: 31629 - RNA, 15 nt, Homo sapiens
acgggguuugccaug

SEQ ID NO: 31630 - RNA, 13 nt, Homo sapiens
acccucaugcugc

SEQ ID NO: 31631 - RNA, 11 nt, Homo sapiens
acccucugggu

SEQ ID NO: 31632 - RNA, 19 nt, Homo sapiens
agcugauaucaugccccug

SEQ ID NO: 31633 - RNA, 15 nt, Homo sapiens
agcgagggacaccga

SEQ ID NO: 31634 - RNA, 13 nt, Homo sapiens
aggcuggucucga

SEQ ID NO: 31635 - RNA, 13 nt, Homo sapiens
agcuguugagcug

SEQ ID NO: 31636 - RNA, 22 nt, Homo sapiens
agacaccaccacccuugccaug

SEQ ID NO: 31637 - RNA, 13 nt, Homo sapiens
agcaccugcaggc

SEQ ID NO: 31638 - RNA, 22 nt, Homo sapiens
agcagagacgggguuugccaug

SEQ ID NO: 31639 - RNA, 21 nt, Homo sapiens
ucacaagugaaaaacauccag

SEQ ID NO: 31640 - RNA, 18 nt, Homo sapiens
uuguacaccaauauucau

SEQ ID NO: 31641 - RNA, 14 nt, Homo sapiens
ggacuugggcggga

SEQ ID NO: 31642 - RNA, 15 nt, Homo sapiens
uugaacccaggagau

SEQ ID NO: 31643 - RNA, 14 nt, Homo sapiens
agagaaauuugcca

SEQ ID NO: 31644 - RNA, 11 nt, Homo sapiens
augauguuucg

SEQ ID NO: 31645 - RNA, 16 nt, Homo sapiens
uuaugcuaagugaaau

SEQ ID NO: 31646 - RNA, 15 nt, Homo sapiens
acgaaaaacauuuca

SEQ ID NO: 31647 - RNA, 17 nt, Homo sapiens
ucacauuccaagccuca

SEQ ID NO: 31648 - RNA, 21 nt, Homo sapiens
auugcuuguuagcaaaaugga

SEQ ID NO: 31649 - RNA, 21 nt, Homo sapiens
ucugauuuuccuggacaguuu

SEQ ID NO: 31650 - RNA, 15 nt, Homo sapiens
guggaugauguuucg

SEQ ID NO: 31651 - RNA, 18 nt, Homo sapiens
acugaauguaaacaaagg

SEQ ID NO: 31652 - RNA, 21 nt, Homo sapiens
agcccccauuguggucacagg

SEQ ID NO: 31653 - RNA, 20 nt, Homo sapiens
aggaaauauucuguaaucuu

SEQ ID NO: 31654 - RNA, 17 nt, Homo sapiens
caguggcgcaaucuuaa

SEQ ID NO: 31655 - RNA, 12 nt, Homo sapiens
cucugauaccuc

SEQ ID NO: 31656 - RNA, 13 nt, Homo sapiens
aaaacucauuucc

SEQ ID NO: 31657 - RNA, 19 nt, Homo sapiens
cagagacgggguuugccau

SEQ ID NO: 31658 - RNA, 14 nt, Homo sapiens
aaaaugagcaaaag

SEQ ID NO: 31659 - RNA, 18 nt, Homo sapiens
uaaguugcaccaacuuug

SEQ ID NO: 31660 - RNA, 12 nt, Homo sapiens
cugauaccucaa

SEQ ID NO: 31661 - RNA, 12 nt, Homo sapiens
aaaaagccaaaa

SEQ ID NO: 31662 - RNA, 19 nt, Homo sapiens
agagacagcaggucucaug

SEQ ID NO: 31663 - RNA, 23 nt, Homo sapiens
uaguguuggaaaaugugcaauau

SEQ ID NO: 31664 - RNA, 20 nt, Homo sapiens
cuuuccagagaccaguauuc

SEQ ID NO: 31665 - RNA, 14 nt, Homo sapiens
ugcagaagacagua

SEQ ID NO: 31666 - RNA, 14 nt, Homo sapiens
uauauccugugacu

SEQ ID NO: 31667 - RNA, 15 nt, Homo sapiens
aauucgcugcaaccu

SEQ ID NO: 31668 - RNA, 16 nt, Homo sapiens
auacuauccaguuacu

SEQ ID NO: 31669 - RNA, 16 nt, Homo sapiens
cgcaaugugacuuaau

SEQ ID NO: 31670 - RNA, 20 nt, Homo sapiens
guucuucuuggucucagugu

SEQ ID NO: 31671 - RNA, 16 nt, Homo sapiens
guaaaauggagacacc

SEQ ID NO: 31672 - RNA, 21 nt, Homo sapiens
auagcagcuuauucacaagac

SEQ ID NO: 31673 - RNA, 18 nt, Homo sapiens
auuuaaaaaaaaaccuga

SEQ ID NO: 31674 - RNA, 22 nt, Homo sapiens
aaaauauuuuuaugugcaauaa

SEQ ID NO: 31675 - RNA, 20 nt, Homo sapiens
gcuacucuguuccuucacau

SEQ ID NO: 31676 - RNA, 12 nt, Homo sapiens
caggaaaauuaa

SEQ ID NO: 31677 - RNA, 21 nt, Homo sapiens
uuguguaaugaaaaugaauau

SEQ ID NO: 31678 - RNA, 19 nt, Homo sapiens
auccugcaauuccacuuau

SEQ ID NO: 31679 - RNA, 14 nt, Homo sapiens
ccuuauuguaccuc

SEQ ID NO: 31680 - RNA, 15 nt, Homo sapiens
agcaugggaagugac

SEQ ID NO: 31681 - RNA, 15 nt, Homo sapiens
aaccucauuccccaa

SEQ ID NO: 31682 - RNA, 14 nt, Homo sapiens
aaaccaaggcuaga

SEQ ID NO: 31683 - RNA, 16 nt, Homo sapiens
cuuaaagaauuuucaa

SEQ ID NO: 31684 - RNA, 19 nt, Homo sapiens
ucccucuaauuuaucuugu

SEQ ID NO: 31685 - RNA, 23 nt, Homo sapiens
aagauguagaggagaaacuggaa

SEQ ID NO: 31686 - RNA, 13 nt, Homo sapiens
cuuuaucucaggg

SEQ ID NO: 31687 - RNA, 20 nt, Homo sapiens
gugauuacccucugggucuc

SEQ ID NO: 31688 - RNA, 18 nt, Homo sapiens
ucaucuuggucacauaca

SEQ ID NO: 31689 - RNA, 23 nt, Homo sapiens
ugauccugcaauuccacuuauag

SEQ ID NO: 31690 - RNA, 23 nt, Homo sapiens
uaaaauauuuuuaugugcaauaa

SEQ ID NO: 31691 - RNA, 18 nt, Homo sapiens
agauuguauagugcaugu

SEQ ID NO: 31692 - RNA, 20 nt, Homo sapiens
aggccgggcgcgguggcuca

SEQ ID NO: 31693 - RNA, 15 nt, Homo sapiens
ggagaaucacuugaa

SEQ ID NO: 31694 - RNA, 22 nt, Homo sapiens
ugcuggcuuaaaauguaauuaa

SEQ ID NO: 31695 - RNA, 14 nt, Homo sapiens
ucucacaagcacuu

SEQ ID NO: 31696 - RNA, 22 nt, Homo sapiens
aaucugaggccuccucucucag

SEQ ID NO: 31697 - RNA, 12 nt, Homo sapiens
ucuuggugccuc

SEQ ID NO: 31698 - RNA, 18 nt, Homo sapiens
uaauuuuaaguaauuuca

SEQ ID NO: 31699 - RNA, 13 nt, Homo sapiens
uaauuucaugaaa

SEQ ID NO: 31700 - RNA, 20 nt, Homo sapiens
ucucaggggccaacuaggca

SEQ ID NO: 31701 - RNA, 17 nt, Homo sapiens
accuuuggaugcacuuu

SEQ ID NO: 31702 - RNA, 13 nt, Homo sapiens
augcacacagugc

SEQ ID NO: 31703 - RNA, 16 nt, Homo sapiens
aagcagaacagugauu

SEQ ID NO: 31704 - RNA, 17 nt, Homo sapiens
aaaucaaauuccagaau

SEQ ID NO: 31705 - RNA, 21 nt, Homo sapiens
gcaugucagacagaacuugaa

SEQ ID NO: 31706 - RNA, 15 nt, Homo sapiens
acaucaacagauaaa

SEQ ID NO: 31707 - RNA, 19 nt, Homo sapiens
cugugucaguggaugcugc

SEQ ID NO: 31708 - RNA, 16 nt, Homo sapiens
cagacaucaacagaua

SEQ ID NO: 31709 - RNA, 19 nt, Homo sapiens
acagugagacucugucuca

SEQ ID NO: 31710 - RNA, 16 nt, Homo sapiens
auacuguauuuuuacc

SEQ ID NO: 31711 - RNA, 20 nt, Homo sapiens
cauauguuuuuguaaguuua

SEQ ID NO: 31712 - RNA, 19 nt, Homo sapiens
aaguuuaugcauacaguaa

SEQ ID NO: 31713 - RNA, 19 nt, Homo sapiens
auucacaagacccaaaagg

SEQ ID NO: 31714 - RNA, 16 nt, Homo sapiens
aaauggaaaguaacuc

SEQ ID NO: 31715 - RNA, 12 nt, Homo sapiens
gagcgacaguga

SEQ ID NO: 31716 - RNA, 23 nt, Homo sapiens
gagcaccugcaggcgugaccuga

SEQ ID NO: 31717 - RNA, 19 nt, Homo sapiens
gacauaagcaaagacuaug

SEQ ID NO: 31718 - RNA, 21 nt, Homo sapiens
uucaaaaucaaauuccagaau

SEQ ID NO: 31719 - RNA, 21 nt, Homo sapiens
ugaaauaagccagacaucaac

SEQ ID NO: 31720 - RNA, 14 nt, Homo sapiens
auagcaucucagga

SEQ ID NO: 31721 - RNA, 15 nt, Homo sapiens
cuauuacgugcaaua

SEQ ID NO: 31722 - RNA, 23 nt, Homo sapiens
aaucugagccagugcuuuaaugg

SEQ ID NO: 31723 - RNA, 17 nt, Homo sapiens
ccagugcuuuaauggca

SEQ ID NO: 31724 - RNA, 15 nt, Homo sapiens
ccuuuacauccagau

SEQ ID NO: 31725 - RNA, 14 nt, Homo sapiens
agcuucucugugaa

SEQ ID NO: 31726 - RNA, 21 nt, Homo sapiens
gaaguauccuucagccugaaa

SEQ ID NO: 31727 - RNA, 14 nt, Homo sapiens
aguggcauguauga

SEQ ID NO: 31728 - RNA, 12 nt, Homo sapiens
cucauucaaaag

SEQ ID NO: 31729 - RNA, 16 nt, Homo sapiens
aacauuucaaaaggua

SEQ ID NO: 31730 - RNA, 20 nt, Homo sapiens
aagcaacaucuagcaaaugu

SEQ ID NO: 31731 - RNA, 17 nt, Homo sapiens
uuuaauggcaugucaga

SEQ ID NO: 31732 - RNA, 21 nt, Homo sapiens
uauucacaaccacucauucaa

SEQ ID NO: 31733 - RNA, 14 nt, Homo sapiens
gcagaagacaguau

SEQ ID NO: 31734 - RNA, 17 nt, Homo sapiens
gguccgaagucuuccau

SEQ ID NO: 31735 - RNA, 22 nt, Homo sapiens
aacccggccugauuaaaguuaa

SEQ ID NO: 31736 - RNA, 15 nt, Homo sapiens
agguuaagcacuuua

SEQ ID NO: 31737 - RNA, 14 nt, Homo sapiens
ucaguccucuuuca

SEQ ID NO: 31738 - RNA, 23 nt, Homo sapiens
cuaagugaaauaagccagacauc

SEQ ID NO: 31739 - RNA, 15 nt, Homo sapiens
uuccauuccaagccu

SEQ ID NO: 31740 - RNA, 21 nt, Homo sapiens
aaugagaagaaugacuaugca

SEQ ID NO: 31741 - RNA, 19 nt, Homo sapiens
augucagacagaacuugaa

SEQ ID NO: 31742 - RNA, 14 nt, Homo sapiens
uauagacucuagga

SEQ ID NO: 31743 - RNA, 17 nt, Homo sapiens
aaauaagccagacauca

SEQ ID NO: 31744 - RNA, 15 nt, Homo sapiens
caguauccaguacuc

SEQ ID NO: 31745 - RNA, 13 nt, Homo sapiens
gcugagcagucag

SEQ ID NO: 31746 - RNA, 14 nt, Homo sapiens
cgcagccaugugau

SEQ ID NO: 31747 - RNA, 22 nt, Homo sapiens
gaccuggucgucgucuugacuu

SEQ ID NO: 31748 - RNA, 20 nt, Homo sapiens
caauucuauuacgugcaaua

SEQ ID NO: 31749 - RNA, 17 nt, Homo sapiens
gggcuuuagggaccugc

SEQ ID NO: 31750 - RNA, 20 nt, Homo sapiens
guaaucccagcuacuuggga

SEQ ID NO: 31751 - RNA, 20 nt, Homo sapiens
aacccaggagauggaaguug

SEQ ID NO: 31752 - RNA, 17 nt, Homo sapiens
uuugcagcugugccaua

SEQ ID NO: 31753 - RNA, 16 nt, Homo sapiens
cugauacccuuugaaa

SEQ ID NO: 31754 - RNA, 23 nt, Homo sapiens
auuggacuuaaaaucuaauucaa

SEQ ID NO: 31755 - RNA, 21 nt, Homo sapiens
cacauuccaagccucaugucc

SEQ ID NO: 31756 - RNA, 18 nt, Homo sapiens
acaacuugaauaauacac

SEQ ID NO: 31757 - RNA, 19 nt, Homo sapiens
uuauuuagggaacugcuug

SEQ ID NO: 31758 - RNA, 19 nt, Homo sapiens
uacauuuccaaauucacaa

SEQ ID NO: 31759 - RNA, 23 nt, Homo sapiens
auaauuccuauauccugugacug

SEQ ID NO: 31760 - RNA, 14 nt, Homo sapiens
aaacaguagugaua

SEQ ID NO: 31761 - RNA, 20 nt, Homo sapiens
aaccaaauggagugacuuag

SEQ ID NO: 31762 - RNA, 17 nt, Homo sapiens
uaacuuaugaaccuuua

SEQ ID NO: 31763 - RNA, 19 nt, Homo sapiens
guuuucugcuuuaauuuca

SEQ ID NO: 31764 - RNA, 18 nt, Homo sapiens
cugaaagaggaaugaagu

SEQ ID NO: 31765 - RNA, 13 nt, Homo sapiens
cucacaagcacuu

SEQ ID NO: 31766 - RNA, 19 nt, Homo sapiens
aaucaaauuccagaaugau

SEQ ID NO: 31767 - RNA, 16 nt, Homo sapiens
ucucgaacugcuggau

SEQ ID NO: 31768 - RNA, 20 nt, Homo sapiens
uagaauauuuauuaccucug

SEQ ID NO: 31769 - RNA, 15 nt, Homo sapiens
auuuuuaugugcaau

SEQ ID NO: 31770 - RNA, 13 nt, Homo sapiens
aaguacagacuuu

SEQ ID NO: 31771 - RNA, 14 nt, Homo sapiens
caccacgcccagcu

SEQ ID NO: 31772 - RNA, 22 nt, Homo sapiens
acccucugggucucaguguccu

SEQ ID NO: 31773 - RNA, 21 nt, Homo sapiens
cauuucuauuuauuuacugag

SEQ ID NO: 31774 - RNA, 14 nt, Homo sapiens
acuaaaaaggcaug

SEQ ID NO: 31775 - RNA, 22 nt, Homo sapiens
ccucaucuguaaaauggagaca

SEQ ID NO: 31776 - RNA, 18 nt, Homo sapiens
gauggaaguugcagugag

SEQ ID NO: 31777 - RNA, 20 nt, Homo sapiens
ccuggcuggggccuguugaa

SEQ ID NO: 31778 - RNA, 23 nt, Homo sapiens
uccugcuacucuguuccuucaca

SEQ ID NO: 31779 - RNA, 11 nt, Homo sapiens
aaaagccaaaa

SEQ ID NO: 31780 - RNA, 11 nt, Homo sapiens
uaugugcaaua

SEQ ID NO: 31781 - RNA, 9 nt, Homo sapiens
cgugcaaua

SEQ ID NO: 31782 - RNA, 21 nt, Homo sapiens
agggucucccucuguugccaa

SEQ ID NO: 31783 - RNA, 12 nt, Homo sapiens
aaaaaaagccaa

SEQ ID NO: 31784 - RNA, 15 nt, Homo sapiens
acaggcgugagccac

SEQ ID NO: 31785 - RNA, 14 nt, Homo sapiens
agacagaaagcaga

SEQ ID NO: 31786 - RNA, 19 nt, Homo sapiens
cacuaaauugacacuuaaa

SEQ ID NO: 31787 - RNA, 14 nt, Homo sapiens
aaacauagcaucuc

SEQ ID NO: 31788 - RNA, 18 nt, Homo sapiens
cacaggcuccaaacugga

SEQ ID NO: 31789 - RNA, 19 nt, Homo sapiens
accuuuggaugcacuuuau

SEQ ID NO: 31790 - RNA, 21 nt, Homo sapiens
uacauauuucuuugccuuuau

SEQ ID NO: 31791 - RNA, 18 nt, Homo sapiens
gcccaucuccgucuccca

SEQ ID NO: 31792 - RNA, 19 nt, Homo sapiens
aaagcagggacuugaaccc

SEQ ID NO: 31793 - RNA, 21 nt, Homo sapiens
cggaucuggggcucugggaua

SEQ ID NO: 31794 - RNA, 19 nt, Homo sapiens
gagcauuuauaaauggaca

SEQ ID NO: 31795 - RNA, 14 nt, Homo sapiens
uaaauguaucuuau

SEQ ID NO: 31796 - RNA, 15 nt, Homo sapiens
augacacaucucuga

SEQ ID NO: 31797 - RNA, 18 nt, Homo sapiens
cuguuccuucacauccug

SEQ ID NO: 31798 - RNA, 18 nt, Homo sapiens
ucugccuugguauagcau

SEQ ID NO: 31799 - RNA, 14 nt, Homo sapiens
ucaccuuccagugu

SEQ ID NO: 31800 - RNA, 18 nt, Homo sapiens
gaauauuuauuaccucug

SEQ ID NO: 31801 - RNA, 16 nt, Homo sapiens
auucacaagacccaaa

SEQ ID NO: 31802 - RNA, 15 nt, Homo sapiens
auugagaacugcaua

SEQ ID NO: 31803 - RNA, 12 nt, Homo sapiens
gauagcaaguga

SEQ ID NO: 31804 - RNA, 15 nt, Homo sapiens
auaguuguaccgcaa

SEQ ID NO: 31805 - RNA, 17 nt, Homo sapiens
auuguugacaacuguga

SEQ ID NO: 31806 - RNA, 16 nt, Homo sapiens
ccugugacugucucac

SEQ ID NO: 31807 - RNA, 21 nt, Homo sapiens
aauggcuaagcaaaaugugau

SEQ ID NO: 31808 - RNA, 17 nt, Homo sapiens
auuuuuagacucaucaa

SEQ ID NO: 31809 - RNA, 13 nt, Homo sapiens
gaaauuaaccaua

SEQ ID NO: 31810 - RNA, 19 nt, Homo sapiens
gagaaaauaaaagcacuua

SEQ ID NO: 31811 - RNA, 16 nt, Homo sapiens
aauaaaaugagcaaaa

SEQ ID NO: 31812 - RNA, 18 nt, Homo sapiens
uuguagccacuucacuuu

SEQ ID NO: 31813 - RNA, 17 nt, Homo sapiens
caaacagaacuauggaa

SEQ ID NO: 31814 - RNA, 16 nt, Homo sapiens
gaucucacaagcacuu

SEQ ID NO: 31815 - RNA, 23 nt, Homo sapiens
agcuaaguugcaccaacuuugaa

SEQ ID NO: 31816 - RNA, 13 nt, Homo sapiens
uguugauagcaag

SEQ ID NO: 31817 - RNA, 18 nt, Homo sapiens
cagaaauuuaauucaugu

SEQ ID NO: 31818 - RNA, 17 nt, Homo sapiens
uuccguggcacugcaua

SEQ ID NO: 31819 - RNA, 19 nt, Homo sapiens
aaugacuaaaaaacaaaga

SEQ ID NO: 31820 - RNA, 19 nt, Homo sapiens
aucaugcaaaugcuguauu

SEQ ID NO: 31821 - RNA, 14 nt, Homo sapiens
ggugugaccacugc

SEQ ID NO: 31822 - RNA, 18 nt, Homo sapiens
cucugucucaguccauga

SEQ ID NO: 31823 - RNA, 11 nt, Homo sapiens
uuaugugcaau

SEQ ID NO: 31824 - RNA, 20 nt, Homo sapiens
aauauuuauuaccucugaua

SEQ ID NO: 31825 - RNA, 17 nt, Homo sapiens
ccuggucaacaugguga

SEQ ID NO: 31826 - RNA, 17 nt, Homo sapiens
gagauggguuugacaag

SEQ ID NO: 31827 - RNA, 20 nt, Homo sapiens
agagcaagacucugucucaa

SEQ ID NO: 31828 - RNA, 12 nt, Homo sapiens
ugcaauuccacu

SEQ ID NO: 31829 - RNA, 22 nt, Homo sapiens
cauuucaaaagguauuuauuga

SEQ ID NO: 31830 - RNA, 18 nt, Homo sapiens
agacgggguuugccaugc

SEQ ID NO: 31831 - RNA, 14 nt, Homo sapiens
uccuuccuuaucac

SEQ ID NO: 31832 - RNA, 22 nt, Homo sapiens
agcuuuucaaaauuggacuuaa

SEQ ID NO: 31833 - RNA, 18 nt, Homo sapiens
aaccuuauuguaccucuc

SEQ ID NO: 31834 - RNA, 23 nt, Homo sapiens
gguuaccaguaacggaacaguau

SEQ ID NO: 31835 - RNA, 15 nt, Homo sapiens
uagaauuaauggaau

SEQ ID NO: 31836 - RNA, 14 nt, Homo sapiens
acuuuaacacagug

SEQ ID NO: 31837 - RNA, 15 nt, Homo sapiens
uauuuuuaugugcaa

SEQ ID NO: 31838 - RNA, 19 nt, Homo sapiens
gucacagaggaucugcuug

SEQ ID NO: 31839 - RNA, 14 nt, Homo sapiens
ucaugcauuugcac

SEQ ID NO: 31840 - RNA, 20 nt, Homo sapiens
caaccaaauggagugacuua

SEQ ID NO: 31841 - RNA, 17 nt, Homo sapiens
uaaauuugguucuaggc

SEQ ID NO: 31842 - RNA, 13 nt, Homo sapiens
uucugcaagcuuu

SEQ ID NO: 31843 - RNA, 19 nt, Homo sapiens
gcuuguuagcaaaauggau

SEQ ID NO: 31844 - RNA, 17 nt, Homo sapiens
gaauauguaaauagaaa

SEQ ID NO: 31845 - RNA, 14 nt, Homo sapiens
gcaaaugcuguauu

SEQ ID NO: 31846 - RNA, 16 nt, Homo sapiens
uauucccuuuugcugc

SEQ ID NO: 31847 - RNA, 17 nt, Homo sapiens
auucugcaagcuuuuca

SEQ ID NO: 31848 - RNA, 15 nt, Homo sapiens
gacaucaacagauaa

SEQ ID NO: 31849 - RNA, 22 nt, Homo sapiens
aauuccuauauccugugacugu

SEQ ID NO: 31850 - RNA, 17 nt, Homo sapiens
guaaaguacagacuuuu

SEQ ID NO: 31851 - RNA, 11 nt, Homo sapiens
ugcaagcuuuu

SEQ ID NO: 31852 - RNA, 20 nt, Homo sapiens
uuuuagucuaauugaauccc

SEQ ID NO: 31853 - RNA, 22 nt, Homo sapiens
uaguguuggaaaaugugcaaua

SEQ ID NO: 31854 - RNA, 21 nt, Homo sapiens
ccaggagauggaaguugcagu

SEQ ID NO: 31855 - RNA, 14 nt, Homo sapiens
aucaaccaaaugga

SEQ ID NO: 31856 - RNA, 24 nt, Homo sapiens
aaugauuuuacggagauaucccag

SEQ ID NO: 31857 - RNA, 10 nt, Homo sapiens
aaaauaugcc

SEQ ID NO: 31858 - RNA, 15 nt, Homo sapiens
cugcaagcuuuucaa

SEQ ID NO: 31859 - RNA, 20 nt, Homo sapiens
cacuuauaggaauugaccca

SEQ ID NO: 31860 - RNA, 15 nt, Homo sapiens
ucacuuaauccuuug

SEQ ID NO: 31861 - RNA, 21 nt, Homo sapiens
uaaacaguagugauaguugua

SEQ ID NO: 31862 - RNA, 22 nt, Homo sapiens
cugccuaagugcagccccgugg

SEQ ID NO: 31863 - RNA, 14 nt, Homo sapiens
aauaaaagcacuua

SEQ ID NO: 31864 - RNA, 17 nt, Homo sapiens
agaaaauaaaagcacuu

SEQ ID NO: 31865 - RNA, 21 nt, Homo sapiens
ccuuauuguaccucucuuaua

SEQ ID NO: 31866 - RNA, 14 nt, Homo sapiens
gagaaaagacauaa

SEQ ID NO: 31867 - RNA, 13 nt, Homo sapiens
cauacauguuaca

SEQ ID NO: 31868 - RNA, 15 nt, Homo sapiens
agugacauguuuaca

SEQ ID NO: 31869 - RNA, 17 nt, Homo sapiens
gcauuguaacuuaugaa

SEQ ID NO: 31870 - RNA, 17 nt, Homo sapiens
gugagacagcucugcau

SEQ ID NO: 31871 - RNA, 22 nt, Homo sapiens
cccccauuguggucacaggaag

SEQ ID NO: 31872 - RNA, 22 nt, Homo sapiens
ugccuggaucucacaagcacuu

SEQ ID NO: 31873 - RNA, 15 nt, Homo sapiens
gcgugagccaccaaa

SEQ ID NO: 31874 - RNA, 15 nt, Homo sapiens
cucuggcgacaguuu

SEQ ID NO: 31875 - RNA, 20 nt, Homo sapiens
ugcuacaaauacucuuagga

SEQ ID NO: 31876 - RNA, 15 nt, Homo sapiens
uaugcuaagugaaau

SEQ ID NO: 31877 - RNA, 13 nt, Homo sapiens
uauaucaguccuc

SEQ ID NO: 31878 - RNA, 14 nt, Homo sapiens
aguugauuuuacaa

SEQ ID NO: 31879 - RNA, 21 nt, Homo sapiens
uuuaacuagaauuuauucaau

SEQ ID NO: 31880 - RNA, 16 nt, Homo sapiens
gugaaguauacuguau

SEQ ID NO: 31881 - RNA, 18 nt, Homo sapiens
guauuuauugagcaccug

SEQ ID NO: 31882 - RNA, 16 nt, Homo sapiens
uagauaaacucagaaa

SEQ ID NO: 31883 - RNA, 18 nt, Homo sapiens
uuuuaugaaacauuacag

SEQ ID NO: 31884 - RNA, 24 nt, Homo sapiens
aucuuguuuuuccacuacugcuac

SEQ ID NO: 31885 - RNA, 16 nt, Homo sapiens
uaggaagagaaaccag

SEQ ID NO: 31886 - RNA, 18 nt, Homo sapiens
guucuucuuggucucagu

SEQ ID NO: 31887 - RNA, 15 nt, Homo sapiens
agacaucaacagaua

SEQ ID NO: 31888 - RNA, 20 nt, Homo sapiens
gacuauuauagaauggaacu

SEQ ID NO: 31889 - RNA, 13 nt, Homo sapiens
uuuaugugcaaua

SEQ ID NO: 31890 - RNA, 16 nt, Homo sapiens
gcgcagccaugugauu

SEQ ID NO: 31891 - RNA, 16 nt, Homo sapiens
cacagcugaacuuguu

SEQ ID NO: 31892 - RNA, 21 nt, Homo sapiens
caguaauuuuaaguaauuuca

SEQ ID NO: 31893 - RNA, 16 nt, Homo sapiens
caggcuccaaacugga

SEQ ID NO: 31894 - RNA, 15 nt, Homo sapiens
aaucccagcuacuug

SEQ ID NO: 31895 - RNA, 21 nt, Homo sapiens
uugguacuagauacugaaugu

SEQ ID NO: 31896 - RNA, 13 nt, Homo sapiens
aucuauuuauuaa

SEQ ID NO: 31897 - RNA, 23 nt, Homo sapiens
aucacuugaacccgggaggcaga

SEQ ID NO: 31898 - RNA, 15 nt, Homo sapiens
accuguaaucccagc

SEQ ID NO: 31899 - RNA, 16 nt, Homo sapiens
auucucucuccuguac

SEQ ID NO: 31900 - RNA, 20 nt, Homo sapiens
gcugucuauguggcuguauc

SEQ ID NO: 31901 - RNA, 20 nt, Homo sapiens
cugaauacauucugcuuuca

SEQ ID NO: 31902 - RNA, 18 nt, Homo sapiens
agcaaauguuaugcauaa

SEQ ID NO: 31903 - RNA, 12 nt, Homo sapiens
ugacacaucucu

SEQ ID NO: 31904 - RNA, 18 nt, Homo sapiens
caagugauccgcccaucu

SEQ ID NO: 31905 - RNA, 15 nt, Homo sapiens
uucuauuuauuuacu

SEQ ID NO: 31906 - RNA, 19 nt, Homo sapiens
gcuuuccguggcacugcau

SEQ ID NO: 31907 - RNA, 16 nt, Homo sapiens
uuccguggcacugcau

SEQ ID NO: 31908 - RNA, 20 nt, Homo sapiens
augugauuacccucuggguc

SEQ ID NO: 31909 - RNA, 23 nt, Homo sapiens
ucucuuuuuagagaaauuugcca

SEQ ID NO: 31910 - RNA, 16 nt, Homo sapiens
uggguucaagcgauuc

SEQ ID NO: 31911 - RNA, 17 nt, Homo sapiens
uuguaacuuaugaaccu

SEQ ID NO: 31912 - RNA, 13 nt, Homo sapiens
uaacacagugucu

SEQ ID NO: 31913 - RNA, 12 nt, Homo sapiens
auagcaagugaa

SEQ ID NO: 31914 - RNA, 16 nt, Homo sapiens
gaguggguuucacaag

SEQ ID NO: 31915 - RNA, 21 nt, Homo sapiens
auauuguugacaacugugacu

SEQ ID NO: 31916 - RNA, 14 nt, Homo sapiens
gaguuuggccagaa

SEQ ID NO: 31917 - RNA, 19 nt, Homo sapiens
ugaacacuuauaagugaag

SEQ ID NO: 31918 - RNA, 16 nt, Homo sapiens
ucugcaagcuuuucaa

SEQ ID NO: 31919 - RNA, 14 nt, Homo sapiens
aagccagacaucaa

SEQ ID NO: 31920 - RNA, 20 nt, Homo sapiens
auggagguuaagcacuuuaa

SEQ ID NO: 31921 - RNA, 14 nt, Homo sapiens
agcaaaaugugaua

SEQ ID NO: 31922 - RNA, 23 nt, Homo sapiens
auaucaugccccuguacuccagc

SEQ ID NO: 31923 - RNA, 22 nt, Homo sapiens
auuuuguuuuuaaacuggaaau

SEQ ID NO: 31924 - RNA, 22 nt, Homo sapiens
gagacagaaagcagaacaguga

SEQ ID NO: 31925 - RNA, 17 nt, Homo sapiens
auacuucaauacuucau

SEQ ID NO: 31926 - RNA, 15 nt, Homo sapiens
ucccugcagacauga

SEQ ID NO: 31927 - RNA, 20 nt, Homo sapiens
uugacuauuauagaauggaa

SEQ ID NO: 31928 - RNA, 20 nt, Homo sapiens
ucaaaacuucagacauagaa

SEQ ID NO: 31929 - RNA, 23 nt, Homo sapiens
caagccagccuugcuccuggcug

SEQ ID NO: 31930 - RNA, 19 nt, Homo sapiens
acuugggcgggacacaggc

SEQ ID NO: 31931 - RNA, 20 nt, Homo sapiens
cuuguugagauccccguguu

SEQ ID NO: 31932 - RNA, 15 nt, Homo sapiens
guaaacaaaggaauu

SEQ ID NO: 31933 - RNA, 21 nt, Homo sapiens
uaguguuggaaaaugugcaau

SEQ ID NO: 31934 - RNA, 12 nt, Homo sapiens
aaaaugugcaau

SEQ ID NO: 31935 - RNA, 13 nt, Homo sapiens
agguuaagcacuu

SEQ ID NO: 31936 - RNA, 15 nt, Homo sapiens
uugcaagacauagaa

SEQ ID NO: 31937 - RNA, 13 nt, Homo sapiens
cagcuaaguugca

SEQ ID NO: 31938 - RNA, 15 nt, Homo sapiens
augguuccauucucu

SEQ ID NO: 31939 - RNA, 16 nt, Homo sapiens
agggauuccccuaacc

SEQ ID NO: 31940 - RNA, 23 nt, Homo sapiens
auucccuuuugcugccucuaaaa

SEQ ID NO: 31941 - RNA, 16 nt, Homo sapiens
ccuuauuguaccucuc

SEQ ID NO: 31942 - RNA, 16 nt, Homo sapiens
uucaaaauuggacuua

SEQ ID NO: 31943 - RNA, 14 nt, Homo sapiens
gcugcucugugguc

SEQ ID NO: 31944 - RNA, 23 nt, Homo sapiens
ugagaugggagaaucacuugaac

SEQ ID NO: 31945 - RNA, 13 nt, Homo sapiens
caugaaagcguaa

SEQ ID NO: 31946 - RNA, 20 nt, Homo sapiens
cgaguggcccuucauguaca

SEQ ID NO: 31947 - RNA, 12 nt, Homo sapiens
cagccaaccugg

SEQ ID NO: 31948 - RNA, 16 nt, Homo sapiens
uuguuuuuaaacugga

SEQ ID NO: 31949 - RNA, 16 nt, Homo sapiens
augaauaaaguguaag

SEQ ID NO: 31950 - RNA, 22 nt, Homo sapiens
uccugagaccagccaaccuggg

SEQ ID NO: 31951 - RNA, 17 nt, Homo sapiens
aaaguguaaguucacaa

SEQ ID NO: 31952 - RNA, 18 nt, Homo sapiens
uauuguugacaacuguga

SEQ ID NO: 31953 - RNA, 18 nt, Homo sapiens
auaucaguccucuuucaa

SEQ ID NO: 31954 - RNA, 20 nt, Homo sapiens
aagauuguauagugcauguu

SEQ ID NO: 31955 - RNA, 18 nt, Homo sapiens
guuuaaugggcacagggu

SEQ ID NO: 31956 - RNA, 21 nt, Homo sapiens
aucaauucuauuacgugcaau

SEQ ID NO: 31957 - RNA, 17 nt, Homo sapiens
uucugcaagcuuuucaa

SEQ ID NO: 31958 - RNA, 12 nt, Homo sapiens
gcuuccuaacug

SEQ ID NO: 31959 - RNA, 15 nt, Homo sapiens
uuuccaaauucacaa

SEQ ID NO: 31960 - RNA, 15 nt, Homo sapiens
agaagacaacauuaa

SEQ ID NO: 31961 - RNA, 23 nt, Homo sapiens
ucacuuuuuuucuuuucucugcc

SEQ ID NO: 31962 - RNA, 16 nt, Homo sapiens
aacggaacaguaucca

SEQ ID NO: 31963 - RNA, 12 nt, Homo sapiens
cgacaguuuucc

SEQ ID NO: 31964 - RNA, 15 nt, Homo sapiens
aggcuccaaacugga

SEQ ID NO: 31965 - RNA, 16 nt, Homo sapiens
gcaaauguuaugcaua

SEQ ID NO: 31966 - RNA, 14 nt, Homo sapiens
uuaacacagugucu

SEQ ID NO: 31967 - RNA, 13 nt, Homo sapiens
ugcuaagugaaau

SEQ ID NO: 31968 - RNA, 21 nt, Homo sapiens
gaacucaaggaaaucuguguc

SEQ ID NO: 31969 - RNA, 16 nt, Homo sapiens
caaaauggauaugaca

SEQ ID NO: 31970 - RNA, 19 nt, Homo sapiens
gcucccuggaagagaucaa

SEQ ID NO: 31971 - RNA, 11 nt, Homo sapiens
acauacugcug

SEQ ID NO: 31972 - RNA, 20 nt, Homo sapiens
uuugaugauuaauucaccuu

SEQ ID NO: 31973 - RNA, 13 nt, Homo sapiens
ucaccaaggcuga

SEQ ID NO: 31974 - RNA, 14 nt, Homo sapiens
caauauccuaauaa

SEQ ID NO: 31975 - RNA, 19 nt, Homo sapiens
ccugcaggcgugaccugac

SEQ ID NO: 31976 - RNA, 16 nt, Homo sapiens
cugucuggacuuucca

SEQ ID NO: 31977 - RNA, 16 nt, Homo sapiens
aucaaccaaauggagu

SEQ ID NO: 31978 - RNA, 23 nt, Homo sapiens
agauuuuguuuuuaaacuggaaa

SEQ ID NO: 31979 - RNA, 14 nt, Homo sapiens
ccaauuuacuuugu

SEQ ID NO: 31980 - RNA, 19 nt, Homo sapiens
caagacucugucucaaaaa

SEQ ID NO: 31981 - RNA, 15 nt, Homo sapiens
gagugcaguggcgca

SEQ ID NO: 31982 - RNA, 14 nt, Homo sapiens
cucuucacagucac

SEQ ID NO: 31983 - RNA, 13 nt, Homo sapiens
gauaaacucagaa

SEQ ID NO: 31984 - RNA, 16 nt, Homo sapiens
agugucugaugaaugu

SEQ ID NO: 31985 - RNA, 15 nt, Homo sapiens
uuuaugcuaagugaa

SEQ ID NO: 31986 - RNA, 17 nt, Homo sapiens
uuguaaguuuaugcaua

SEQ ID NO: 31987 - RNA, 18 nt, Homo sapiens
uccaagccucauguccac

SEQ ID NO: 31988 - RNA, 23 nt, Homo sapiens
acaccauuccuucugcccugcuu

SEQ ID NO: 31989 - RNA, 16 nt, Homo sapiens
acagagaaaagacaua

SEQ ID NO: 31990 - RNA, 14 nt, Homo sapiens
uauuuuuaugugca

SEQ ID NO: 31991 - RNA, 18 nt, Homo sapiens
gccauaauuacuauguca

SEQ ID NO: 31992 - RNA, 21 nt, Homo sapiens
caauagaaggauguacauuuc

SEQ ID NO: 31993 - RNA, 14 nt, Homo sapiens
acaucuuucacauu

SEQ ID NO: 31994 - RNA, 15 nt, Homo sapiens
uaaucccagcacuuu

SEQ ID NO: 31995 - RNA, 17 nt, Homo sapiens
gagacgggguuugccau

SEQ ID NO: 31996 - RNA, 13 nt, Homo sapiens
auuaucaugcaaa

SEQ ID NO: 31997 - RNA, 16 nt, Homo sapiens
uccuucucaucuguga

SEQ ID NO: 31998 - RNA, 13 nt, Homo sapiens
aacaaagaagaca

SEQ ID NO: 31999 - RNA, 15 nt, Homo sapiens
aagugauacuaucca

SEQ ID NO: 32000 - RNA, 11 nt, Homo sapiens
augcuggccag

SEQ ID NO: 32001 - RNA, 19 nt, Homo sapiens
uugaugauuaauucaccuu

SEQ ID NO: 32002 - RNA, 23 nt, Homo sapiens
ugaaaaucuacacuccagugaga

SEQ ID NO: 32003 - RNA, 17 nt, Homo sapiens
aguuacugccgguuuga

SEQ ID NO: 32004 - RNA, 13 nt, Homo sapiens
cucuuggugccuc

SEQ ID NO: 32005 - RNA, 18 nt, Homo sapiens
gaauaaauaaauguaucu

SEQ ID NO: 32006 - RNA, 22 nt, Homo sapiens
cacgccuguaaucccagcacuu

SEQ ID NO: 32007 - RNA, 14 nt, Homo sapiens
auaaauuugguucu

SEQ ID NO: 32008 - RNA, 16 nt, Homo sapiens
uacauucugcuuucau

SEQ ID NO: 32009 - RNA, 18 nt, Homo sapiens
cuucuggguucaagcgau

SEQ ID NO: 32010 - RNA, 20 nt, Homo sapiens
cucuaacucagaaacaucag

SEQ ID NO: 32011 - RNA, 20 nt, Homo sapiens
aaaagauuguauagugcaug

SEQ ID NO: 32012 - RNA, 18 nt, Homo sapiens
ccaaggcuggagugcagu

SEQ ID NO: 32013 - RNA, 16 nt, Homo sapiens
guaacuggcaguuuuc

SEQ ID NO: 32014 - RNA, 15 nt, Homo sapiens
gauaucaugccccug

SEQ ID NO: 32015 - RNA, 19 nt, Homo sapiens
aauaauacaccagagauaa

SEQ ID NO: 32016 - RNA, 22 nt, Homo sapiens
cuggagcuugaaauagugucug

SEQ ID NO: 32017 - RNA, 22 nt, Homo sapiens
uuacuauuuauugcugaaugac

SEQ ID NO: 32018 - RNA, 11 nt, Homo sapiens
cuuuaucucag

SEQ ID NO: 32019 - RNA, 17 nt, Homo sapiens
agugcccaacuguuaua

SEQ ID NO: 32020 - RNA, 20 nt, Homo sapiens
cuggagugcaguggcgcaau

SEQ ID NO: 32021 - RNA, 21 nt, Homo sapiens
aaaauuagccgggcauggugg

SEQ ID NO: 32022 - RNA, 19 nt, Homo sapiens
uuccuucucaucugugauu

SEQ ID NO: 32023 - RNA, 18 nt, Homo sapiens
cagugucuggcacuuggg

SEQ ID NO: 32024 - RNA, 23 nt, Homo sapiens
gugauucccuccugcuacucugu

SEQ ID NO: 32025 - RNA, 19 nt, Homo sapiens
aaauugaaaggcauucucu

SEQ ID NO: 32026 - RNA, 21 nt, Homo sapiens
ccacaacuauauuaucaugca

SEQ ID NO: 32027 - RNA, 18 nt, Homo sapiens
gagacgggguuugccaug

SEQ ID NO: 32028 - RNA, 18 nt, Homo sapiens
gagccaccaaacccggcc

SEQ ID NO: 32029 - RNA, 16 nt, Homo sapiens
agauuucaugccuggu

SEQ ID NO: 32030 - RNA, 19 nt, Homo sapiens
ucaucuuggucacauacaa

SEQ ID NO: 32031 - RNA, 12 nt, Homo sapiens
ccaacuaggcag

SEQ ID NO: 32032 - RNA, 17 nt, Homo sapiens
uguguuuauuucacuug

SEQ ID NO: 32033 - RNA, 17 nt, Homo sapiens
aacuggaaauaaaagau

SEQ ID NO: 32034 - RNA, 17 nt, Homo sapiens
aauggaaaguaacucau

SEQ ID NO: 32035 - RNA, 14 nt, Homo sapiens
aaauaaaagcacuu

SEQ ID NO: 32036 - RNA, 11 nt, Homo sapiens
acagcucugca

SEQ ID NO: 32037 - RNA, 14 nt, Homo sapiens
ccacccuugccaug

SEQ ID NO: 32038 - RNA, 20 nt, Homo sapiens
auuuuguguucaguacaauu

SEQ ID NO: 32039 - RNA, 17 nt, Homo sapiens
ucugucuggacuuucca

SEQ ID NO: 32040 - RNA, 15 nt, Homo sapiens
agcaucucaggagau

SEQ ID NO: 32041 - RNA, 22 nt, Homo sapiens
caggauagagugggacaguucc

SEQ ID NO: 32042 - RNA, 21 nt, Homo sapiens
auucgcugcaaccuguugaua

SEQ ID NO: 32043 - RNA, 19 nt, Homo sapiens
aauuauuuuuacaguucuc

SEQ ID NO: 32044 - RNA, 23 nt, Homo sapiens
aaggcuuagacccucaugcugcc

SEQ ID NO: 32045 - RNA, 13 nt, Homo sapiens
acauagcaucuca

SEQ ID NO: 32046 - RNA, 14 nt, Homo sapiens
ggcacuugggacaa

SEQ ID NO: 32047 - RNA, 19 nt, Homo sapiens
auuguugacaacugugacu

SEQ ID NO: 32048 - RNA, 13 nt, Homo sapiens
aauugacacuuaa

SEQ ID NO: 32049 - RNA, 18 nt, Homo sapiens
gaggcugaggcgggugga

SEQ ID NO: 32050 - RNA, 21 nt, Homo sapiens
ccucaguuuccugaccuauga

SEQ ID NO: 32051 - RNA, 23 nt, Homo sapiens
agaaauuccaggaaaaucugcac

SEQ ID NO: 32052 - RNA, 13 nt, Homo sapiens
agacucugucuca

SEQ ID NO: 32053 - RNA, 21 nt, Homo sapiens
uuaaaaaaaaaccugagcccc

SEQ ID NO: 32054 - RNA, 19 nt, Homo sapiens
aauauuuuuaugugcaaua

SEQ ID NO: 32055 - RNA, 21 nt, Homo sapiens
ugcaagacauagaauaguguu

SEQ ID NO: 32056 - RNA, 14 nt, Homo sapiens
uuguaaaauggugu

SEQ ID NO: 32057 - RNA, 21 nt, Homo sapiens
uuguuuuaaaauuaaagcuaa

SEQ ID NO: 32058 - RNA, 12 nt, Homo sapiens
uacauacugcug

SEQ ID NO: 32059 - RNA, 17 nt, Homo sapiens
cacuuuaacacaguguc

SEQ ID NO: 32060 - RNA, 21 nt, Homo sapiens
auaaauaguuuaugauuccac

SEQ ID NO: 32061 - RNA, 12 nt, Homo sapiens
ccugugacuguc

SEQ ID NO: 32062 - RNA, 22 nt, Homo sapiens
aggcagcaggauagagugggac

SEQ ID NO: 32063 - RNA, 12 nt, Homo sapiens
cauuuucacuuu

SEQ ID NO: 32064 - RNA, 15 nt, Homo sapiens
auaugacacaucucu

SEQ ID NO: 32065 - RNA, 22 nt, Homo sapiens
auuacaaggcuuuaucucaggg

SEQ ID NO: 32066 - RNA, 22 nt, Homo sapiens
aaagggucucccucuguugcca

SEQ ID NO: 32067 - RNA, 12 nt, Homo sapiens
aggcauguaauu

SEQ ID NO: 32068 - RNA, 14 nt, Homo sapiens
cuuaaacacuaaaa

SEQ ID NO: 32069 - RNA, 19 nt, Homo sapiens
aaccuccaccuucuggguu

SEQ ID NO: 32070 - RNA, 19 nt, Homo sapiens
agaauauuuauuaccucug

SEQ ID NO: 32071 - RNA, 13 nt, Homo sapiens
aaauagugucuga

SEQ ID NO: 32072 - RNA, 19 nt, Homo sapiens
gcuggagugcaguggcgca

SEQ ID NO: 32073 - RNA, 19 nt, Homo sapiens
aauauaauaugcacacagu

SEQ ID NO: 32074 - RNA, 20 nt, Homo sapiens
gugcugggaauuacaggcgu

SEQ ID NO: 32075 - RNA, 19 nt, Homo sapiens
agagcaagacucugucuca

SEQ ID NO: 32076 - RNA, 19 nt, Homo sapiens
ccuuuggaugcacuuuaua

SEQ ID NO: 32077 - RNA, 13 nt, Homo sapiens
uuaaaauguaauu

SEQ ID NO: 32078 - RNA, 13 nt, Homo sapiens
ucaaauuccagaa

SEQ ID NO: 32079 - RNA, 10 nt, Homo sapiens
aggcugcaaa

SEQ ID NO: 32080 - RNA, 11 nt, Homo sapiens
cucaugcugcc

SEQ ID NO: 32081 - RNA, 16 nt, Homo sapiens
ggacuuacuauuuauu

SEQ ID NO: 32082 - RNA, 17 nt, Homo sapiens
ugaaaggcauucucuga

SEQ ID NO: 32083 - RNA, 16 nt, Homo sapiens
aauaauacaccagaga

SEQ ID NO: 32084 - RNA, 19 nt, Homo sapiens
cugccuugguauagcauau

SEQ ID NO: 32085 - RNA, 13 nt, Homo sapiens
gcacucuauguuc

SEQ ID NO: 32086 - RNA, 20 nt, Homo sapiens
agagacgggguuugccaugc

SEQ ID NO: 32087 - RNA, 18 nt, Homo sapiens
ugaaaacauagcaucuca

SEQ ID NO: 32088 - RNA, 21 nt, Homo sapiens
uauguaaauagaaacguguau

SEQ ID NO: 32089 - RNA, 23 nt, Homo sapiens
uccuagcgcagccaugugauuac

SEQ ID NO: 32090 - RNA, 14 nt, Homo sapiens
uuccaaauucacaa

SEQ ID NO: 32091 - RNA, 18 nt, Homo sapiens
cuucucuucacagucaca

SEQ ID NO: 32092 - RNA, 16 nt, Homo sapiens
guuggaaaaugugcaa

SEQ ID NO: 32093 - RNA, 17 nt, Homo sapiens
caaguuguguuugauau

SEQ ID NO: 32094 - RNA, 18 nt, Homo sapiens
cuguaaucccagcuacuu

SEQ ID NO: 32095 - RNA, 18 nt, Homo sapiens
ccacugcagaagacagua

SEQ ID NO: 32096 - RNA, 15 nt, Homo sapiens
aucucacaagcacuu

SEQ ID NO: 32097 - RNA, 23 nt, Homo sapiens
guauuuuauuacaucuuucacau

SEQ ID NO: 32098 - RNA, 14 nt, Homo sapiens
cgggguuugccaug

SEQ ID NO: 32099 - RNA, 14 nt, Homo sapiens
uaaaaucuaauuca

SEQ ID NO: 32100 - RNA, 16 nt, Homo sapiens
ccucucuuauagaaua

SEQ ID NO: 32101 - RNA, 21 nt, Homo sapiens
accagcccuacaccauuccuu

SEQ ID NO: 32102 - RNA, 19 nt, Homo sapiens
accaccacccuugccaugg

SEQ ID NO: 32103 - RNA, 22 nt, Homo sapiens
aucaauucuauuacgugcaaua

SEQ ID NO: 32104 - RNA, 19 nt, Homo sapiens
uauaucaguccucuuucaa

SEQ ID NO: 32105 - RNA, 19 nt, Homo sapiens
uguaaucccagcacuuugg

SEQ ID NO: 32106 - RNA, 15 nt, Homo sapiens
aacccaaauguucau

SEQ ID NO: 32107 - RNA, 19 nt, Homo sapiens
caucuuggucacauacaau

SEQ ID NO: 32108 - RNA, 17 nt, Homo sapiens
aauauuuauuaccucug

SEQ ID NO: 32109 - RNA, 15 nt, Homo sapiens
cgugagccaccaaac

SEQ ID NO: 32110 - RNA, 13 nt, Homo sapiens
ccugcagacauga

SEQ ID NO: 32111 - RNA, 15 nt, Homo sapiens
cugguaacauagguu

SEQ ID NO: 32112 - RNA, 16 nt, Homo sapiens
ggagaaucacuugaac

SEQ ID NO: 32113 - RNA, 15 nt, Homo sapiens
agacgggguuugcca

SEQ ID NO: 32114 - RNA, 13 nt, Homo sapiens
ggcgacaguuuuc

SEQ ID NO: 32115 - RNA, 18 nt, Homo sapiens
cuaaaaaggcauguaauu

SEQ ID NO: 32116 - RNA, 16 nt, Homo sapiens
acuggcucccuggaag

SEQ ID NO: 32117 - RNA, 22 nt, Homo sapiens
ggaaaaugugcaauaugugaug

SEQ ID NO: 32118 - RNA, 13 nt, Homo sapiens
uuuuccuucucau

SEQ ID NO: 32119 - RNA, 15 nt, Homo sapiens
aaauggagugacuua

SEQ ID NO: 32120 - RNA, 19 nt, Homo sapiens
agcuugaaauagugucuga

SEQ ID NO: 32121 - RNA, 20 nt, Homo sapiens
ugcacuccagccugagcgac

SEQ ID NO: 32122 - RNA, 22 nt, Homo sapiens
uucucugccuugguauagcaua

SEQ ID NO: 32123 - RNA, 16 nt, Homo sapiens
cauuuccaaauucaca

SEQ ID NO: 32124 - RNA, 17 nt, Homo sapiens
aaagcauuguaacuuau

SEQ ID NO: 32125 - RNA, 21 nt, Homo sapiens
auaccucaacccccauuucua

SEQ ID NO: 32126 - RNA, 20 nt, Homo sapiens
auuuauuuuuuuacuuccuc

SEQ ID NO: 32127 - RNA, 16 nt, Homo sapiens
aucucacaagcacuuu

SEQ ID NO: 32128 - RNA, 12 nt, Homo sapiens
auugagcaccug

SEQ ID NO: 32129 - RNA, 20 nt, Homo sapiens
ucuuuuuuuuaauaaaccau

SEQ ID NO: 32130 - RNA, 18 nt, Homo sapiens
ugggucucaguguccuca

SEQ ID NO: 32131 - RNA, 23 nt, Homo sapiens
uagaauauuuauuaccucugaua

SEQ ID NO: 32132 - RNA, 11 nt, Homo sapiens
aggcauucucu

SEQ ID NO: 32133 - RNA, 23 nt, Homo sapiens
uccaagccugaccacgcuuucua

SEQ ID NO: 32134 - RNA, 19 nt, Homo sapiens
agcuguggccagcuuguua

SEQ ID NO: 32135 - RNA, 18 nt, Homo sapiens
aagaaaggccagcaaauu

SEQ ID NO: 32136 - RNA, 18 nt, Homo sapiens
uacauuuccaaauucaca

SEQ ID NO: 32137 - RNA, 19 nt, Homo sapiens
accaguaacggaacaguau

SEQ ID NO: 32138 - RNA, 16 nt, Homo sapiens
auaguguuggaaaaug

SEQ ID NO: 32139 - RNA, 19 nt, Homo sapiens
cuguaucuuguuuuuccac

SEQ ID NO: 32140 - RNA, 12 nt, Homo sapiens
acuagucuuaua

SEQ ID NO: 32141 - RNA, 20 nt, Homo sapiens
acauuguuugucugucuuca

SEQ ID NO: 32142 - RNA, 13 nt, Homo sapiens
acaacugugacug

SEQ ID NO: 32143 - RNA, 15 nt, Homo sapiens
aguucugucuggacu

SEQ ID NO: 32144 - RNA, 14 nt, Homo sapiens
cuuggucucagugu

SEQ ID NO: 32145 - RNA, 15 nt, Homo sapiens
acuugaugauacaau

SEQ ID NO: 32146 - RNA, 17 nt, Homo sapiens
uccuguacuuuuuccag

SEQ ID NO: 32147 - RNA, 15 nt, Homo sapiens
uccgaagucuuccau

SEQ ID NO: 32148 - RNA, 23 nt, Homo sapiens
auggaaguugcagugagcugaua

SEQ ID NO: 32149 - RNA, 13 nt, Homo sapiens
cugaauacauucu

SEQ ID NO: 32150 - RNA, 20 nt, Homo sapiens
cagagcaagacucugucuca

SEQ ID NO: 32151 - RNA, 15 nt, Homo sapiens
uuuauugcugaauga

SEQ ID NO: 32152 - RNA, 23 nt, Homo sapiens
acuccagccugagcgacagugag

SEQ ID NO: 32153 - RNA, 13 nt, Homo sapiens
auuuucacuuuug

SEQ ID NO: 32154 - RNA, 17 nt, Homo sapiens
uguuggaaaaugugcaa

SEQ ID NO: 32155 - RNA, 20 nt, Homo sapiens
ccucauuccccaaccacuuc

SEQ ID NO: 32156 - RNA, 15 nt, Homo sapiens
guacuuuuuccagac

SEQ ID NO: 32157 - RNA, 17 nt, Homo sapiens
ucuuggucucaguguca

SEQ ID NO: 32158 - RNA, 18 nt, Homo sapiens
ccugaugaaaacauagca

SEQ ID NO: 32159 - RNA, 22 nt, Homo sapiens
gccaugugauuacccucugggu

SEQ ID NO: 32160 - RNA, 17 nt, Homo sapiens
ccucccuucucuucaca

SEQ ID NO: 32161 - RNA, 16 nt, Homo sapiens
auaauaugagaaucag

SEQ ID NO: 32162 - RNA, 16 nt, Homo sapiens
agcccauggcacucua

SEQ ID NO: 32163 - RNA, 13 nt, Homo sapiens
uagcaucucagga

SEQ ID NO: 32164 - RNA, 16 nt, Homo sapiens
uuuauaaauggacaaa

SEQ ID NO: 32165 - RNA, 21 nt, Homo sapiens
agacaccaccacccuugccau

SEQ ID NO: 32166 - RNA, 23 nt, Homo sapiens
aaaucggaucuggggcucuggga

SEQ ID NO: 32167 - RNA, 22 nt, Homo sapiens
aagcagggacuugaacccauau

SEQ ID NO: 32168 - RNA, 17 nt, Homo sapiens
aaucuucagaccuagaa

SEQ ID NO: 32169 - RNA, 17 nt, Homo sapiens
gaacugcauauguuucg

SEQ ID NO: 32170 - RNA, 20 nt, Homo sapiens
gaggcaagagaauugcuuga

SEQ ID NO: 32171 - RNA, 13 nt, Homo sapiens
uuuauuaccucug

SEQ ID NO: 32172 - RNA, 17 nt, Homo sapiens
ugccaugcuggccaggc

SEQ ID NO: 32173 - RNA, 22 nt, Homo sapiens
cacccuugccauggagguuaag

SEQ ID NO: 32174 - RNA, 13 nt, Homo sapiens
accaaauuuguau

SEQ ID NO: 32175 - RNA, 12 nt, Homo sapiens
aaguacucauac

SEQ ID NO: 32176 - RNA, 18 nt, Homo sapiens
uuauaauuccuauauccu

SEQ ID NO: 32177 - RNA, 14 nt, Homo sapiens
gggucucagugucc

SEQ ID NO: 32178 - RNA, 15 nt, Homo sapiens
aacauagcaucucag

SEQ ID NO: 32179 - RNA, 16 nt, Homo sapiens
gcugaggcaagagaau

SEQ ID NO: 32180 - RNA, 22 nt, Homo sapiens
aagucuuccauagagacuuugu

SEQ ID NO: 32181 - RNA, 15 nt, Homo sapiens
ucaucaaucaaauaa

SEQ ID NO: 32182 - RNA, 15 nt, Homo sapiens
agaauucuuacaugu

SEQ ID NO: 32183 - RNA, 22 nt, Homo sapiens
auaacuaggcguggacuuacua

SEQ ID NO: 32184 - RNA, 20 nt, Homo sapiens
gaggcagagguugcagugag

SEQ ID NO: 32185 - RNA, 17 nt, Homo sapiens
uuguaccgcaaugugac

SEQ ID NO: 32186 - RNA, 15 nt, Homo sapiens
cuggggccuguugaa

SEQ ID NO: 32187 - RNA, 21 nt, Homo sapiens
auagugucugaugaauguuaa

SEQ ID NO: 32188 - RNA, 21 nt, Homo sapiens
agacccucaugcugccaauau

SEQ ID NO: 32189 - RNA, 17 nt, Homo sapiens
ugcuggauucaagugau

SEQ ID NO: 32190 - RNA, 16 nt, Homo sapiens
cuggcacuugggacaa

SEQ ID NO: 32191 - RNA, 21 nt, Homo sapiens
aauuuuucucuaacucagaaa

SEQ ID NO: 32192 - RNA, 23 nt, Homo sapiens
ucacaggaaguagaggaggccac

SEQ ID NO: 32193 - RNA, 15 nt, Homo sapiens
aaggcuuuaucucag

SEQ ID NO: 32194 - RNA, 16 nt, Homo sapiens
uagaauuaacacauga

SEQ ID NO: 32195 - RNA, 23 nt, Homo sapiens
caaacaaacgaaaaacauuucaa

SEQ ID NO: 32196 - RNA, 17 nt, Homo sapiens
augugauauguaccuaa

SEQ ID NO: 32197 - RNA, 17 nt, Homo sapiens
cuguaaucccagcacuu

SEQ ID NO: 32198 - RNA, 16 nt, Homo sapiens
agaauucuuacauguu

SEQ ID NO: 32199 - RNA, 15 nt, Homo sapiens
cuuuccagagaccag

SEQ ID NO: 32200 - RNA, 11 nt, Homo sapiens
uuaaucaccaa

SEQ ID NO: 32201 - RNA, 22 nt, Homo sapiens
uccuagcgcagccaugugauua

SEQ ID NO: 32202 - RNA, 19 nt, Homo sapiens
acacuaaaaaggcauguaa

SEQ ID NO: 32203 - RNA, 17 nt, Homo sapiens
uuacaaaccucaagcca

SEQ ID NO: 32204 - RNA, 19 nt, Homo sapiens
gaagcaacccaaauguuca

SEQ ID NO: 32205 - RNA, 13 nt, Homo sapiens
uacauuuccaaau

SEQ ID NO: 32206 - RNA, 17 nt, Homo sapiens
gaaagcagggacuugaa

SEQ ID NO: 32207 - RNA, 14 nt, Homo sapiens
aucuacacuccagu

SEQ ID NO: 32208 - RNA, 16 nt, Homo sapiens
cagcccaagggugggu

SEQ ID NO: 32209 - RNA, 13 nt, Homo sapiens
agaucaagccauc

SEQ ID NO: 32210 - RNA, 20 nt, Homo sapiens
caaaacugauacccuuugaa

SEQ ID NO: 32211 - RNA, 16 nt, Homo sapiens
uucacaagacccaaaa

SEQ ID NO: 32212 - RNA, 21 nt, Homo sapiens
agaauuuauucaauuccucug

SEQ ID NO: 32213 - RNA, 21 nt, Homo sapiens
gugguuauuuagggaacugcu

SEQ ID NO: 32214 - RNA, 13 nt, Homo sapiens
gacaaauucuguu

SEQ ID NO: 32215 - RNA, 15 nt, Homo sapiens
agaauuaacacauga

SEQ ID NO: 32216 - RNA, 17 nt, Homo sapiens
aagcagaacagugauua

SEQ ID NO: 32217 - RNA, 18 nt, Homo sapiens
uguuacugccuaucagca

SEQ ID NO: 32218 - RNA, 20 nt, Homo sapiens
acagagcaagacucugucuc

SEQ ID NO: 32219 - RNA, 16 nt, Homo sapiens
acuggcaguuuuccau

SEQ ID NO: 32220 - RNA, 16 nt, Homo sapiens
agaguggguuucacaa

SEQ ID NO: 32221 - RNA, 23 nt, Homo sapiens
aaacugauacccuuugaaaaagu

SEQ ID NO: 32222 - RNA, 22 nt, Homo sapiens
agcuugaaauagugucugauga

SEQ ID NO: 32223 - RNA, 23 nt, Homo sapiens
aaucugaggccuccucucucagu

SEQ ID NO: 32224 - RNA, 15 nt, Homo sapiens
ggaaaaugugcaaua

SEQ ID NO: 32225 - RNA, 23 nt, Homo sapiens
cuuguuuuuccacuacugcuacc

SEQ ID NO: 32226 - RNA, 16 nt, Homo sapiens
uggaaaaugugcaaua

SEQ ID NO: 32227 - RNA, 17 nt, Homo sapiens
uauagaauggaacucaa

SEQ ID NO: 32228 - RNA, 13 nt, Homo sapiens
aaaaugugcaaua

SEQ ID NO: 32229 - RNA, 13 nt, Homo sapiens
cucaucaaucaaa

SEQ ID NO: 32230 - RNA, 15 nt, Homo sapiens
auuuaaagacaaaga

SEQ ID NO: 32231 - RNA, 23 nt, Homo sapiens
gaauucuuacauguuuucuuugc

SEQ ID NO: 32232 - RNA, 20 nt, Homo sapiens
gaaguugcagugagcugaua

SEQ ID NO: 32233 - RNA, 14 nt, Homo sapiens
uaggcuauucacaa

SEQ ID NO: 32234 - RNA, 14 nt, Homo sapiens
aauauuguugacaa

SEQ ID NO: 32235 - RNA, 17 nt, Homo sapiens
aaagacuaugaggaaua

SEQ ID NO: 32236 - RNA, 16 nt, Homo sapiens
auuuccaaauucacaa

SEQ ID NO: 32237 - RNA, 13 nt, Homo sapiens
ucaguuacucuga

SEQ ID NO: 32238 - RNA, 15 nt, Homo sapiens
cagaaauuguaucuu

SEQ ID NO: 32239 - RNA, 22 nt, Homo sapiens
gaaagaaaaucaggcuggccaa

SEQ ID NO: 32240 - RNA, 13 nt, Homo sapiens
acagaacuaugga

SEQ ID NO: 32241 - RNA, 20 nt, Homo sapiens
gcuaaguugcaccaacuuug

SEQ ID NO: 32242 - RNA, 19 nt, Homo sapiens
aaaacuuuaugcuaaguga

SEQ ID NO: 32243 - RNA, 15 nt, Homo sapiens
ccuaaccucauuccc

SEQ ID NO: 32244 - RNA, 21 nt, Homo sapiens
cuguaaucccagcacuuuggg

SEQ ID NO: 32245 - RNA, 16 nt, Homo sapiens
ucucuuauagaauauu

SEQ ID NO: 32246 - RNA, 23 nt, Homo sapiens
cuugccauggagguuaagcacuu

SEQ ID NO: 32247 - RNA, 13 nt, Homo sapiens
ugcugggaauuac

SEQ ID NO: 32248 - RNA, 17 nt, Homo sapiens
uacugcuaccacaacua

SEQ ID NO: 32249 - RNA, 13 nt, Homo sapiens
augauccugcaau

SEQ ID NO: 32250 - RNA, 16 nt, Homo sapiens
aaugguuccauucucu

SEQ ID NO: 32251 - RNA, 14 nt, Homo sapiens
guaccucucuuaua

SEQ ID NO: 32252 - RNA, 17 nt, Homo sapiens
uggcgcgcgccaccacg

SEQ ID NO: 32253 - RNA, 14 nt, Homo sapiens
gauuucaugccugg

SEQ ID NO: 32254 - RNA, 17 nt, Homo sapiens
uagagaaauuugccaau

SEQ ID NO: 32255 - RNA, 19 nt, Homo sapiens
ugagagacagcaggucuca

SEQ ID NO: 32256 - RNA, 16 nt, Homo sapiens
acuauccaguuacugc

SEQ ID NO: 32257 - RNA, 19 nt, Homo sapiens
aucuccgucucccaaagug

SEQ ID NO: 32258 - RNA, 23 nt, Homo sapiens
auaguguuggaaaaugugcaaua

SEQ ID NO: 32259 - RNA, 18 nt, Homo sapiens
aagcaacccaaauguuca

SEQ ID NO: 32260 - RNA, 17 nt, Homo sapiens
caacuauauuaucaugc

SEQ ID NO: 32261 - RNA, 22 nt, Homo sapiens
caaauucgcugcaaccuguuga

SEQ ID NO: 32262 - RNA, 17 nt, Homo sapiens
cccuucauguacaucca

SEQ ID NO: 32263 - RNA, 15 nt, Homo sapiens
ucccagcuacuuggg

SEQ ID NO: 32264 - RNA, 20 nt, Homo sapiens
aguuuucugcuuuaauuuca

SEQ ID NO: 32265 - RNA, 20 nt, Homo sapiens
uucugucuggacuuuccaga

SEQ ID NO: 32266 - RNA, 21 nt, Homo sapiens
agaggaaugaaguacucauac

SEQ ID NO: 32267 - RNA, 17 nt, Homo sapiens
uagagacuuugugaaaa

SEQ ID NO: 32268 - RNA, 18 nt, Homo sapiens
cuggcuuaaaauguaauu

SEQ ID NO: 32269 - RNA, 13 nt, Homo sapiens
augacacaucucu

SEQ ID NO: 32270 - RNA, 18 nt, Homo sapiens
gcccuucauguacaucca

SEQ ID NO: 32271 - RNA, 18 nt, Homo sapiens
uguaaugaaaaugaauau

SEQ ID NO: 32272 - RNA, 22 nt, Homo sapiens
ucgaacugcuggauucaaguga

SEQ ID NO: 32273 - RNA, 14 nt, Homo sapiens
ugagaagaaugacu

SEQ ID NO: 32274 - RNA, 20 nt, Homo sapiens
cgguuugaaaauaugccugc

SEQ ID NO: 32275 - RNA, 23 nt, Homo sapiens
caauuauaucaguccucuuucaa

SEQ ID NO: 32276 - RNA, 14 nt, Homo sapiens
caugaaaagauuau

SEQ ID NO: 32277 - RNA, 21 nt, Homo sapiens
gugauuacccucugggucuca

SEQ ID NO: 32278 - RNA, 18 nt, Homo sapiens
guaaguuuaugcauacag

SEQ ID NO: 32279 - RNA, 15 nt, Homo sapiens
aaccaugcccaagaa

SEQ ID NO: 32280 - RNA, 13 nt, Homo sapiens
ggaugauguuucg

SEQ ID NO: 32281 - RNA, 11 nt, Homo sapiens
augugcaauau

SEQ ID NO: 32282 - RNA, 15 nt, Homo sapiens
acuuuuggcuuguaa

SEQ ID NO: 32283 - RNA, 20 nt, Homo sapiens
agcccuucaugcauuugcac

SEQ ID NO: 32284 - RNA, 18 nt, Homo sapiens
aaacuuuaugcuaaguga

SEQ ID NO: 32285 - RNA, 13 nt, Homo sapiens
uaauuucagaaga

SEQ ID NO: 32286 - RNA, 18 nt, Homo sapiens
gaguuaggcuauucacaa

SEQ ID NO: 32287 - RNA, 21 nt, Homo sapiens
agcacuuuaacacagugucug

SEQ ID NO: 32288 - RNA, 19 nt, Homo sapiens
uucaaaaucaaauuccaga

SEQ ID NO: 32289 - RNA, 19 nt, Homo sapiens
cccuuugaugauuaauuca

SEQ ID NO: 32290 - RNA, 21 nt, Homo sapiens
ugaaaaucuacacuccaguga

SEQ ID NO: 32291 - RNA, 16 nt, Homo sapiens
ugugucaguggaugcu

SEQ ID NO: 32292 - RNA, 13 nt, Homo sapiens
aggaauauuugca

SEQ ID NO: 32293 - RNA, 17 nt, Homo sapiens
aggaaaaucugcacugu

SEQ ID NO: 32294 - RNA, 22 nt, Homo sapiens
aaugacacuagcuaauaucaau

SEQ ID NO: 32295 - RNA, 14 nt, Homo sapiens
cuuauugacuauua

SEQ ID NO: 32296 - RNA, 19 nt, Homo sapiens
caaccugggggcuuuaggg

SEQ ID NO: 32297 - RNA, 14 nt, Homo sapiens
ugagaacugcauau

SEQ ID NO: 32298 - RNA, 18 nt, Homo sapiens
aauauuugcaagacauag

SEQ ID NO: 32299 - RNA, 18 nt, Homo sapiens
aguuuaugcauacaguaa

SEQ ID NO: 32300 - RNA, 22 nt, Homo sapiens
agcagagacgggguuugccaug

SEQ ID NO: 32301 - RNA, 19 nt, Homo sapiens
caaacgaaaaacauuucaa

SEQ ID NO: 32302 - RNA, 20 nt, Homo sapiens
aaauugggaaaggaguagaa

SEQ ID NO: 32303 - RNA, 16 nt, Homo sapiens
cuuauaggaauugacc

SEQ ID NO: 32304 - RNA, 23 nt, Homo sapiens
agauuaagagauggguuugacaa

SEQ ID NO: 32305 - RNA, 21 nt, Homo sapiens
uauagugucuugggaauuuuc

SEQ ID NO: 32306 - RNA, 20 nt, Homo sapiens
ggccagaagucaaggcuuag

SEQ ID NO: 32307 - RNA, 19 nt, Homo sapiens
guuauuuagggaacugcuu

SEQ ID NO: 32308 - RNA, 13 nt, Homo sapiens
uauuuauuuacug

SEQ ID NO: 32309 - RNA, 23 nt, Homo sapiens
ccuuaaacucagggagcauuuau

SEQ ID NO: 32310 - RNA, 15 nt, Homo sapiens
uggauucaagugauc

SEQ ID NO: 32311 - RNA, 17 nt, Homo sapiens
gguggcucacgccugua

SEQ ID NO: 32312 - RNA, 20 nt, Homo sapiens
uagaauaauacuagucuuau

SEQ ID NO: 32313 - RNA, 17 nt, Homo sapiens
ugaaaaucuacacucca

SEQ ID NO: 32314 - RNA, 17 nt, Homo sapiens
aaagcagggacuugaac

SEQ ID NO: 32315 - RNA, 14 nt, Homo sapiens
cuguuccuucacau

SEQ ID NO: 32316 - RNA, 21 nt, Homo sapiens
aguguuggaaaaugugcaaua

SEQ ID NO: 32317 - RNA, 21 nt, Homo sapiens
gacacaggcuccaaacuggag

SEQ ID NO: 32318 - RNA, 22 nt, Homo sapiens
ccuggacaguuuucugcuuuaa

SEQ ID NO: 32319 - RNA, 21 nt, Homo sapiens
guuucgugaaguauacuguau

SEQ ID NO: 32320 - RNA, 15 nt, Homo sapiens
auucugcaagcuuuu

SEQ ID NO: 32321 - RNA, 15 nt, Homo sapiens
gcuaauuuguguauu

SEQ ID NO: 32322 - RNA, 17 nt, Homo sapiens
ucuggacuuuccagaga

SEQ ID NO: 32323 - RNA, 13 nt, Homo sapiens
ugcauuugcacua

SEQ ID NO: 32324 - RNA, 15 nt, Homo sapiens
cuagauacugaaugu

SEQ ID NO: 32325 - RNA, 14 nt, Homo sapiens
ggucucgaacugcu

SEQ ID NO: 32326 - RNA, 15 nt, Homo sapiens
cuaaauuugguucua

SEQ ID NO: 32327 - RNA, 21 nt, Homo sapiens
gagauugugccccugcacucc

SEQ ID NO: 32328 - RNA, 16 nt, Homo sapiens
acaucaguuacucuga

SEQ ID NO: 32329 - RNA, 19 nt, Homo sapiens
cuucuuggucucaguguca

SEQ ID NO: 32330 - RNA, 10 nt, Homo sapiens
augacuaugc

SEQ ID NO: 32331 - RNA, 16 nt, Homo sapiens
agcuguuuucccugac

SEQ ID NO: 32332 - RNA, 16 nt, Homo sapiens
cugccccugagcccau

SEQ ID NO: 32333 - RNA, 11 nt, Homo sapiens
ccuugagaaac

SEQ ID NO: 32334 - RNA, 19 nt, Homo sapiens
uauuuauugagcaccugca

SEQ ID NO: 32335 - RNA, 17 nt, Homo sapiens
uauuuuauaucaauuua

SEQ ID NO: 32336 - RNA, 20 nt, Homo sapiens
uuaaaaucuaauucaaacua

SEQ ID NO: 32337 - RNA, 21 nt, Homo sapiens
uuguguguuuauuucacuuga

SEQ ID NO: 32338 - RNA, 14 nt, Homo sapiens
aguacagacuuuuu

SEQ ID NO: 32339 - RNA, 23 nt, Homo sapiens
auuucaaaacucauuuccuaugu

SEQ ID NO: 32340 - RNA, 14 nt, Homo sapiens
cuguaaucacagcu

SEQ ID NO: 32341 - RNA, 22 nt, Homo sapiens
agcacuuucccucuuggugccu

SEQ ID NO: 32342 - RNA, 15 nt, Homo sapiens
aaugauuucauucaa

SEQ ID NO: 32343 - RNA, 11 nt, Homo sapiens
cccuugccaug

SEQ ID NO: 32344 - RNA, 18 nt, Homo sapiens
auuagaggucuccaaaau

SEQ ID NO: 32345 - RNA, 13 nt, Homo sapiens
ugcagacaugaga

SEQ ID NO: 32346 - RNA, 18 nt, Homo sapiens
acaauuauaucaguccuc

SEQ ID NO: 32347 - RNA, 13 nt, Homo sapiens
gggaguggcgcgc

SEQ ID NO: 32348 - RNA, 16 nt, Homo sapiens
ucuccgucucccaaag

SEQ ID NO: 32349 - RNA, 19 nt, Homo sapiens
ucuucccuuuuacauacug

SEQ ID NO: 32350 - RNA, 14 nt, Homo sapiens
gaaugagaagaaug

SEQ ID NO: 32351 - RNA, 18 nt, Homo sapiens
acuuaugaaccuuuacau

SEQ ID NO: 32352 - RNA, 14 nt, Homo sapiens
uccacuacugcuac

SEQ ID NO: 32353 - RNA, 22 nt, Homo sapiens
aauagaaggauguacauuucca

SEQ ID NO: 32354 - RNA, 22 nt, Homo sapiens
auguacauccauggugugcugg

SEQ ID NO: 32355 - RNA, 15 nt, Homo sapiens
gggucucaguguccu

SEQ ID NO: 32356 - RNA, 23 nt, Homo sapiens
uaacucagaaacaucaguuacuc

SEQ ID NO: 32357 - RNA, 13 nt, Homo sapiens
agcaaaaugugau

SEQ ID NO: 32358 - RNA, 20 nt, Homo sapiens
uccguggcacugcauacaau

SEQ ID NO: 32359 - RNA, 17 nt, Homo sapiens
uugaaauuaaccauaga

SEQ ID NO: 32360 - RNA, 23 nt, Homo sapiens
gcaaaugcuguauucuucuuugg

SEQ ID NO: 32361 - RNA, 17 nt, Homo sapiens
ugaugauuaauucaccu

SEQ ID NO: 32362 - RNA, 23 nt, Homo sapiens
ugaaaaaguauaaauaaaaugag

SEQ ID NO: 32363 - RNA, 14 nt, Homo sapiens
uugaaugugucagg

SEQ ID NO: 32364 - RNA, 21 nt, Homo sapiens
aauuuucaaaaucaaauucca

SEQ ID NO: 32365 - RNA, 21 nt, Homo sapiens
ccaacagaagcuuccauucca

SEQ ID NO: 32366 - RNA, 14 nt, Homo sapiens
agcagggacuugaa

SEQ ID NO: 32367 - RNA, 13 nt, Homo sapiens
cacuggcucccug

SEQ ID NO: 32368 - RNA, 14 nt, Homo sapiens
auuucacuugauga

SEQ ID NO: 32369 - RNA, 15 nt, Homo sapiens
gcccuucaugcauuu

SEQ ID NO: 32370 - RNA, 22 nt, Homo sapiens
uaaaauauuuuuaugugcaaua

SEQ ID NO: 32371 - RNA, 15 nt, Homo sapiens
uaaacaguagugaua

SEQ ID NO: 32372 - RNA, 14 nt, Homo sapiens
gaagcaacccaaau

SEQ ID NO: 32373 - RNA, 16 nt, Homo sapiens
gugacuuaguguacau

SEQ ID NO: 32374 - RNA, 15 nt, Homo sapiens
auuguaacuuaugaa

SEQ ID NO: 32375 - RNA, 14 nt, Homo sapiens
uggucacauacaau

SEQ ID NO: 32376 - RNA, 13 nt, Homo sapiens
augauacaaugaa

SEQ ID NO: 32377 - RNA, 18 nt, Homo sapiens
auuuuaaguaauuucaga

SEQ ID NO: 32378 - RNA, 18 nt, Homo sapiens
aaauauuuuuaugugcaa

SEQ ID NO: 32379 - RNA, 19 nt, Homo sapiens
uucucuggcgacaguuuuc

SEQ ID NO: 32380 - RNA, 14 nt, Homo sapiens
ggcuuuuauugcca

SEQ ID NO: 32381 - RNA, 20 nt, Homo sapiens
augaacacuuauaagugaag

SEQ ID NO: 32382 - RNA, 15 nt, Homo sapiens
gacaguuuucugcuu

SEQ ID NO: 32383 - RNA, 14 nt, Homo sapiens
gacgaaccuugaaa

SEQ ID NO: 32384 - RNA, 13 nt, Homo sapiens
aauaaaagcacuu

SEQ ID NO: 32385 - RNA, 14 nt, Homo sapiens
ugaaugugucaggu

SEQ ID NO: 32386 - RNA, 16 nt, Homo sapiens
uucagccugaaagagg

SEQ ID NO: 32387 - RNA, 14 nt, Homo sapiens
uaauuacuauguca

SEQ ID NO: 32388 - RNA, 12 nt, Homo sapiens
agccccaaaagg

SEQ ID NO: 32389 - RNA, 16 nt, Homo sapiens
uauggcuuaaugacac

SEQ ID NO: 32390 - RNA, 16 nt, Homo sapiens
ucugcuuuaauuucau

SEQ ID NO: 32391 - RNA, 21 nt, Homo sapiens
cuggcucccuggaagagauca

SEQ ID NO: 32392 - RNA, 19 nt, Homo sapiens
uguuggaaaaugugcaaua

SEQ ID NO: 32393 - RNA, 13 nt, Homo sapiens
acaucuuucacau

SEQ ID NO: 32394 - RNA, 17 nt, Homo sapiens
uagugucugaugaaugu

SEQ ID NO: 32395 - RNA, 17 nt, Homo sapiens
cuuaaaaucuaauucaa

SEQ ID NO: 32396 - RNA, 16 nt, Homo sapiens
gacaacugugacugua

SEQ ID NO: 32397 - RNA, 21 nt, Homo sapiens
gauaccucaacccccauuucu

SEQ ID NO: 32398 - RNA, 22 nt, Homo sapiens
ucccauggguuguguguuuauu

SEQ ID NO: 32399 - RNA, 21 nt, Homo sapiens
cucugcccauccugccccuga

SEQ ID NO: 32400 - RNA, 20 nt, Homo sapiens
uccagccugagcgacaguga

SEQ ID NO: 32401 - RNA, 14 nt, Homo sapiens
gaagaaauucugca

SEQ ID NO: 32402 - RNA, 19 nt, Homo sapiens
uugaaucccuuaaacucag

SEQ ID NO: 32403 - RNA, 19 nt, Homo sapiens
uagagaaauuugccaauuu

SEQ ID NO: 32404 - RNA, 15 nt, Homo sapiens
aaaaugugcaauaug

SEQ ID NO: 32405 - RNA, 16 nt, Homo sapiens
uuugugacuuuccuaa

SEQ ID NO: 32406 - RNA, 18 nt, Homo sapiens
aguagauaugaggcauuu

SEQ ID NO: 32407 - RNA, 15 nt, Homo sapiens
ugcagcugugccaua

SEQ ID NO: 32408 - RNA, 17 nt, Homo sapiens
caaagcugaauacauuc

SEQ ID NO: 32409 - RNA, 13 nt, Homo sapiens
gcgcagccaugug

SEQ ID NO: 32410 - RNA, 12 nt, Homo sapiens
gaaaauaugccu

SEQ ID NO: 32411 - RNA, 24 nt, Homo sapiens
augcaaccuuuggaugcacuuuau

SEQ ID NO: 32412 - RNA, 13 nt, Homo sapiens
aauuuucuuccaa

SEQ ID NO: 32413 - RNA, 15 nt, Homo sapiens
gauuacccucugggu

SEQ ID NO: 32414 - RNA, 20 nt, Homo sapiens
auugagcaccugcaggcgug

SEQ ID NO: 32415 - RNA, 13 nt, Homo sapiens
uuuuucauuauug

SEQ ID NO: 32416 - RNA, 21 nt, Homo sapiens
uugaagaugcuuguauuuuac

SEQ ID NO: 32417 - RNA, 18 nt, Homo sapiens
caacagaagcuuccauuc

SEQ ID NO: 32418 - RNA, 14 nt, Homo sapiens
uaugcauacaguaa

SEQ ID NO: 32419 - RNA, 20 nt, Homo sapiens
ucugggcuuggggcuuccua

SEQ ID NO: 32420 - RNA, 13 nt, Homo sapiens
ucugauaccucaa

SEQ ID NO: 32421 - RNA, 19 nt, Homo sapiens
gaaaaaguucugcagauaa

SEQ ID NO: 32422 - RNA, 20 nt, Homo sapiens
acauagaauuaacacaugau

SEQ ID NO: 32423 - RNA, 20 nt, Homo sapiens
accacugcagaagacaguau

SEQ ID NO: 32424 - RNA, 14 nt, Homo sapiens
auauccugugacug

SEQ ID NO: 32425 - RNA, 16 nt, Homo sapiens
ugccccagggaccuuu

SEQ ID NO: 32426 - RNA, 22 nt, Homo sapiens
cccaaaacugauacccuuugaa

SEQ ID NO: 32427 - RNA, 18 nt, Homo sapiens
cuaauagaauuaauggaa

SEQ ID NO: 32428 - RNA, 18 nt, Homo sapiens
cuauauuaucaugcaaau

SEQ ID NO: 32429 - RNA, 17 nt, Homo sapiens
aguacucauacauguua

SEQ ID NO: 32430 - RNA, 23 nt, Homo sapiens
cuaucagcauuuuacuacuuuaa

SEQ ID NO: 32431 - RNA, 21 nt, Homo sapiens
auauuugaauuuuaaaucuaa

SEQ ID NO: 32432 - RNA, 16 nt, Homo sapiens
ugaaacauuacaguua

SEQ ID NO: 32433 - RNA, 19 nt, Homo sapiens
gcauguaugacgugacugg

SEQ ID NO: 32434 - RNA, 21 nt, Homo sapiens
uaaaauggagacaccaccacc

SEQ ID NO: 32435 - RNA, 17 nt, Homo sapiens
agaaggauguacauuuc

SEQ ID NO: 32436 - RNA, 19 nt, Homo sapiens
augaauuuuuuucaucuuc

SEQ ID NO: 32437 - RNA, 18 nt, Homo sapiens
cuggcuggggccuguuga

SEQ ID NO: 32438 - RNA, 13 nt, Homo sapiens
cuuaaaauguaau

SEQ ID NO: 32439 - RNA, 20 nt, Homo sapiens
uacaaggcuuuaucucaggg

SEQ ID NO: 32440 - RNA, 16 nt, Homo sapiens
uguaucuuauucacau

SEQ ID NO: 32441 - RNA, 19 nt, Homo sapiens
uuccagagaccaguauucc

SEQ ID NO: 32442 - RNA, 23 nt, Homo sapiens
guaaaauugaaaggcauucucug

SEQ ID NO: 32443 - RNA, 13 nt, Homo sapiens
auguaacugcauu

SEQ ID NO: 32444 - RNA, 17 nt, Homo sapiens
auauaaauuuucccaaa

SEQ ID NO: 32445 - RNA, 13 nt, Homo sapiens
aacacagugucug

SEQ ID NO: 32446 - RNA, 17 nt, Homo sapiens
aauucuuacauguuuuc

SEQ ID NO: 32447 - RNA, 23 nt, Homo sapiens
aagucuuccauagagacuuugug

SEQ ID NO: 32448 - RNA, 12 nt, Homo sapiens
aauuuacuuugu

SEQ ID NO: 32449 - RNA, 13 nt, Homo sapiens
gaaauaagccaga

SEQ ID NO: 32450 - RNA, 13 nt, Homo sapiens
auuauuuuuacag

SEQ ID NO: 32451 - RNA, 18 nt, Homo sapiens
uaaaauuaucaauaucua

SEQ ID NO: 32452 - RNA, 12 nt, Homo sapiens
cacuucacuuuu

SEQ ID NO: 32453 - RNA, 19 nt, Homo sapiens
aaauaguuuaugauuccac

SEQ ID NO: 32454 - RNA, 22 nt, Homo sapiens
uugcuccuggcuggggccuguu

SEQ ID NO: 32455 - RNA, 22 nt, Homo sapiens
acacaugauccugcaauuccac

SEQ ID NO: 32456 - RNA, 19 nt, Homo sapiens
aaguugcaccaacuuugaa

SEQ ID NO: 32457 - RNA, 16 nt, Homo sapiens
uuuuacauacugcugu

SEQ ID NO: 32458 - RNA, 19 nt, Homo sapiens
aaucaccaaggcugauuaa

SEQ ID NO: 32459 - RNA, 16 nt, Homo sapiens
guagccacuucacuuu

SEQ ID NO: 32460 - RNA, 24 nt, Homo sapiens
uuucaaaaucaaauuccagaauga

SEQ ID NO: 32461 - RNA, 20 nt, Homo sapiens
gacauagaauuaacacauga

SEQ ID NO: 32462 - RNA, 13 nt, Homo sapiens
ccugcaauuccac

SEQ ID NO: 32463 - RNA, 14 nt, Homo sapiens
ccgaagucuuccau

SEQ ID NO: 32464 - RNA, 21 nt, Homo sapiens
caaucugagccagugcuuuaa

SEQ ID NO: 32465 - RNA, 16 nt, Homo sapiens
uaagcaaagacuauga

SEQ ID NO: 32466 - RNA, 22 nt, Homo sapiens
gcuugaaauagugucugaugaa

SEQ ID NO: 32467 - RNA, 20 nt, Homo sapiens
agcuacuugggaggcugaga

SEQ ID NO: 32468 - RNA, 16 nt, Homo sapiens
accuaaauuugguucu

SEQ ID NO: 32469 - RNA, 16 nt, Homo sapiens
acuuuuguguaaugaa

SEQ ID NO: 32470 - RNA, 14 nt, Homo sapiens
gaaagggucucccu

SEQ ID NO: 32471 - RNA, 18 nt, Homo sapiens
auggcuaguaucaaaaga

SEQ ID NO: 32472 - RNA, 18 nt, Homo sapiens
ugacuuaguguacaugaa

SEQ ID NO: 32473 - RNA, 19 nt, Homo sapiens
uaaauguaucuuauucaca

SEQ ID NO: 32474 - RNA, 15 nt, Homo sapiens
uaauucaaacuaaua

SEQ ID NO: 32475 - RNA, 16 nt, Homo sapiens
agaagaaugacuaugc

SEQ ID NO: 32476 - RNA, 12 nt, Homo sapiens
agcaucucagga

SEQ ID NO: 32477 - RNA, 18 nt, Homo sapiens
agcaggauagagugggac

SEQ ID NO: 32478 - RNA, 21 nt, Homo sapiens
ugugguccgaagucuuccaua

SEQ ID NO: 32479 - RNA, 15 nt, Homo sapiens
uugcaccaacuuuga

SEQ ID NO: 32480 - RNA, 21 nt, Homo sapiens
gaccacgcuuucuagcuguug

SEQ ID NO: 32481 - RNA, 14 nt, Homo sapiens
ccauuguggucaca

SEQ ID NO: 32482 - RNA, 21 nt, Homo sapiens
caucacagcugaacuuguuga

SEQ ID NO: 32483 - RNA, 17 nt, Homo sapiens
gccagacaucaacagau

SEQ ID NO: 32484 - RNA, 16 nt, Homo sapiens
auccagaaauaaugaa

SEQ ID NO: 32485 - RNA, 18 nt, Homo sapiens
ugucuucauagcagauuu

SEQ ID NO: 32486 - RNA, 20 nt, Homo sapiens
agcaaaauggauaugacaca

SEQ ID NO: 32487 - RNA, 13 nt, Homo sapiens
uugaaaaaguaua

SEQ ID NO: 32488 - RNA, 21 nt, Homo sapiens
uuuuuaaacaaaaaaagcauu

SEQ ID NO: 32489 - RNA, 17 nt, Homo sapiens
ggaucucacaagcacuu

SEQ ID NO: 32490 - RNA, 21 nt, Homo sapiens
aagggucucccucuguugcca

SEQ ID NO: 32491 - RNA, 19 nt, Homo sapiens
gagccaccaaacccggccu

SEQ ID NO: 32492 - RNA, 10 nt, Homo sapiens
augugcaaua

SEQ ID NO: 32493 - RNA, 13 nt, Homo sapiens
cuuaugaaccuuu

SEQ ID NO: 32494 - RNA, 12 nt, Homo sapiens
aaguauccuuca

SEQ ID NO: 32495 - RNA, 15 nt, Homo sapiens
agcccauggcacucu

SEQ ID NO: 32496 - RNA, 20 nt, Homo sapiens
gcuguuuccauagggugaca

SEQ ID NO: 32497 - RNA, 18 nt, Homo sapiens
ucucgaacugcuggauuc

SEQ ID NO: 32498 - RNA, 21 nt, Homo sapiens
uuaucaugcaaaugcuguauu

SEQ ID NO: 32499 - RNA, 16 nt, Homo sapiens
gaggagaaacuggaac

SEQ ID NO: 32500 - RNA, 13 nt, Homo sapiens
aucaggacgagaa

SEQ ID NO: 32501 - RNA, 22 nt, Homo sapiens
agcaagaucccauggguugugu

SEQ ID NO: 32502 - RNA, 19 nt, Homo sapiens
gaggcggguggaucacuug

SEQ ID NO: 32503 - RNA, 15 nt, Homo sapiens
aaccuuuacauccag

SEQ ID NO: 32504 - RNA, 13 nt, Homo sapiens
gaauuaauggaau

SEQ ID NO: 32505 - RNA, 14 nt, Homo sapiens
ugaccugacagccc

SEQ ID NO: 32506 - RNA, 17 nt, Homo sapiens
aguuuauauacaauuau

SEQ ID NO: 32507 - RNA, 14 nt, Homo sapiens
caccuguaauccca

SEQ ID NO: 32508 - RNA, 23 nt, Homo sapiens
acaccgaguggcccuucauguac

SEQ ID NO: 32509 - RNA, 21 nt, Homo sapiens
cuuugcuuuaaguguaacugg

SEQ ID NO: 32510 - RNA, 22 nt, Homo sapiens
uugggaggcugaggcaagagaa

SEQ ID NO: 32511 - RNA, 19 nt, Homo sapiens
aauagaaggauguacauuu

SEQ ID NO: 32512 - RNA, 20 nt, Homo sapiens
cagugagcugauaucaugcc

SEQ ID NO: 32513 - RNA, 13 nt, Homo sapiens
cccuuuuacauac

SEQ ID NO: 32514 - RNA, 16 nt, Homo sapiens
aauguucaucaaugaa

SEQ ID NO: 32515 - RNA, 18 nt, Homo sapiens
guguuuuucacauuugcg

SEQ ID NO: 32516 - RNA, 18 nt, Homo sapiens
auaucuaauauauaugaa

SEQ ID NO: 32517 - RNA, 13 nt, Homo sapiens
aagaaauucugca

SEQ ID NO: 32518 - RNA, 19 nt, Homo sapiens
ccuggucaacauggugaaa

SEQ ID NO: 32519 - RNA, 14 nt, Homo sapiens
agcuguuuccauag

SEQ ID NO: 32520 - RNA, 20 nt, Homo sapiens
gaaauuuaauucauguuucu

SEQ ID NO: 32521 - RNA, 12 nt, Homo sapiens
aaauuggacuua

SEQ ID NO: 32522 - RNA, 16 nt, Homo sapiens
auaaacucagaaauuu

SEQ ID NO: 32523 - RNA, 14 nt, Homo sapiens
aacagaacuaugga

SEQ ID NO: 32524 - RNA, 18 nt, Homo sapiens
gagaaucagaucauuuca

SEQ ID NO: 32525 - RNA, 18 nt, Homo sapiens
ugaaagcagggacuugaa

SEQ ID NO: 32526 - RNA, 9 nt, Homo sapiens
ugugcaaua

SEQ ID NO: 32527 - RNA, 21 nt, Homo sapiens
cucugugaacgauuuagaaag

SEQ ID NO: 32528 - RNA, 22 nt, Homo sapiens
auacaauuauuuuuacaguucu

SEQ ID NO: 32529 - RNA, 18 nt, Homo sapiens
ugcauugagaacugcaua

SEQ ID NO: 32530 - RNA, 22 nt, Homo sapiens
uuucaugaaaagauuaugaucu

SEQ ID NO: 32531 - RNA, 17 nt, Homo sapiens
agagacgggguuugcca

SEQ ID NO: 32532 - RNA, 15 nt, Homo sapiens
uaucaauaucuaaua

SEQ ID NO: 32533 - RNA, 15 nt, Homo sapiens
ugaauaaaguguaag

SEQ ID NO: 32534 - RNA, 15 nt, Homo sapiens
guagccacuucacuu

SEQ ID NO: 32535 - RNA, 12 nt, Homo sapiens
uauauccuguga

SEQ ID NO: 32536 - RNA, 13 nt, Homo sapiens
gugacuggccugc

SEQ ID NO: 32537 - RNA, 18 nt, Homo sapiens
ucaggaguuccuaaccag

SEQ ID NO: 32538 - RNA, 16 nt, Homo sapiens
cuaaaguaucuguauu

SEQ ID NO: 32539 - RNA, 17 nt, Homo sapiens
accuuauuguaccucuc

SEQ ID NO: 32540 - RNA, 14 nt, Homo sapiens
agugggacaguucc

SEQ ID NO: 32541 - RNA, 16 nt, Homo sapiens
aacucagaaacaucag

SEQ ID NO: 32542 - RNA, 20 nt, Homo sapiens
aaggcuuagacccucaugcu

SEQ ID NO: 32543 - RNA, 20 nt, Homo sapiens
gcaaccuccaccuucugggu

SEQ ID NO: 32544 - RNA, 14 nt, Homo sapiens
agacagaacuugaa

SEQ ID NO: 32545 - RNA, 21 nt, Homo sapiens
cugugauucccuccugcuacu

SEQ ID NO: 32546 - RNA, 20 nt, Homo sapiens
ccucaucuguaaaauggaga

SEQ ID NO: 32547 - RNA, 12 nt, Homo sapiens
aaucuacacucc

SEQ ID NO: 32548 - RNA, 22 nt, Homo sapiens
aacccaaauguucaucaaugaa

SEQ ID NO: 32549 - RNA, 20 nt, Homo sapiens
agaaggauguacauuuccaa

SEQ ID NO: 32550 - RNA, 23 nt, Homo sapiens
aucggaucuggggcucugggaua

SEQ ID NO: 32551 - RNA, 21 nt, Homo sapiens
uggacaguuuucugcuuuaau

SEQ ID NO: 32552 - RNA, 15 nt, Homo sapiens
cagcagagacggggu

SEQ ID NO: 32553 - RNA, 21 nt, Homo sapiens
caccaaacccggccugauuaa

SEQ ID NO: 32554 - RNA, 14 nt, Homo sapiens
ggcuggagugcagu

SEQ ID NO: 32555 - RNA, 13 nt, Homo sapiens
uauuuuaaucacc

SEQ ID NO: 32556 - RNA, 19 nt, Homo sapiens
auacaauuauuuuuacagu

SEQ ID NO: 32557 - RNA, 22 nt, Homo sapiens
uucucuucacagucacauucca

SEQ ID NO: 32558 - RNA, 21 nt, Homo sapiens
ucauuuccuauguaacugcau

SEQ ID NO: 32559 - RNA, 16 nt, Homo sapiens
uggcugggaguggcau

SEQ ID NO: 32560 - RNA, 22 nt, Homo sapiens
guuaagcacuuuaacacagugu

SEQ ID NO: 32561 - RNA, 14 nt, Homo sapiens
augaaaaugaauau

SEQ ID NO: 32562 - RNA, 21 nt, Homo sapiens
aauuacaggcgugagccacca

SEQ ID NO: 32563 - RNA, 17 nt, Homo sapiens
uaccucugauaccucaa

SEQ ID NO: 32564 - RNA, 14 nt, Homo sapiens
cagaacuugaaugu

SEQ ID NO: 32565 - RNA, 17 nt, Homo sapiens
aaagcuaaaguaucugu

SEQ ID NO: 32566 - RNA, 15 nt, Homo sapiens
agcugaauacauucu

SEQ ID NO: 32567 - RNA, 13 nt, Homo sapiens
ucacaagcacuuu

SEQ ID NO: 32568 - RNA, 17 nt, Homo sapiens
uguggcauuuucacuuu

SEQ ID NO: 32569 - RNA, 16 nt, Homo sapiens
gacugucucacuuaau

SEQ ID NO: 32570 - RNA, 14 nt, Homo sapiens
aaaccucaagccag

SEQ ID NO: 32571 - RNA, 17 nt, Homo sapiens
caagugauccgcccauc

SEQ ID NO: 32572 - RNA, 18 nt, Homo sapiens
agccaaguuuauauacaa

SEQ ID NO: 32573 - RNA, 23 nt, Homo sapiens
uaucucaggggccaacuaggcag

SEQ ID NO: 32574 - RNA, 14 nt, Homo sapiens
cuaugugauuacaa

SEQ ID NO: 32575 - RNA, 15 nt, Homo sapiens
ugcagauaaacagua

SEQ ID NO: 32576 - RNA, 23 nt, Homo sapiens
ugucuuacagagaaaagacauaa

SEQ ID NO: 32577 - RNA, 19 nt, Homo sapiens
ugaacaaauuuacagagac

SEQ ID NO: 32578 - RNA, 19 nt, Homo sapiens
gcagagacgggguuugcca

SEQ ID NO: 32579 - RNA, 14 nt, Homo sapiens
uucccaaaacugau

SEQ ID NO: 32580 - RNA, 20 nt, Homo sapiens
aauuuaucuugucucugggc

SEQ ID NO: 32581 - RNA, 17 nt, Homo sapiens
aacauagcaucucagga

SEQ ID NO: 32582 - RNA, 15 nt, Homo sapiens
uuuccacuacugcua

SEQ ID NO: 32583 - RNA, 15 nt, Homo sapiens
gcugggaguggcaug

SEQ ID NO: 32584 - RNA, 18 nt, Homo sapiens
guuuuuccacuacugcua

SEQ ID NO: 32585 - RNA, 23 nt, Homo sapiens
ugaaauaagccagacaucaacag

SEQ ID NO: 32586 - RNA, 16 nt, Homo sapiens
uguacaccaauauuca

SEQ ID NO: 32587 - RNA, 15 nt, Homo sapiens
ccauagagacuuugu

SEQ ID NO: 32588 - RNA, 14 nt, Homo sapiens
cagucacauuccaa

SEQ ID NO: 32589 - RNA, 13 nt, Homo sapiens
gauaauaugagaa

SEQ ID NO: 32590 - RNA, 14 nt, Homo sapiens
aacugcauugagaa

SEQ ID NO: 32591 - RNA, 23 nt, Homo sapiens
ucaucugugauucccuccugcua

SEQ ID NO: 32592 - RNA, 19 nt, Homo sapiens
cugcaaucugagccagugc

SEQ ID NO: 32593 - RNA, 15 nt, Homo sapiens
ugacccugaugaaaa

SEQ ID NO: 32594 - RNA, 17 nt, Homo sapiens
gaaaccuuauuguaccu

SEQ ID NO: 32595 - RNA, 18 nt, Homo sapiens
aacucauugcaaccucca

SEQ ID NO: 32596 - RNA, 14 nt, Homo sapiens
ggcauucucugaag

SEQ ID NO: 32597 - RNA, 14 nt, Homo sapiens
uauguggcuguauc

SEQ ID NO: 32598 - RNA, 15 nt, Homo sapiens
uauguucuaagaagu

SEQ ID NO: 32599 - RNA, 12 nt, Homo sapiens
acucauugcaac

SEQ ID NO: 32600 - RNA, 17 nt, Homo sapiens
gagggggcgcgugcagg

SEQ ID NO: 32601 - RNA, 16 nt, Homo sapiens
ggacacaggcuccaaa

SEQ ID NO: 32602 - RNA, 22 nt, Homo sapiens
cuauauccugugacugucucac

SEQ ID NO: 32603 - RNA, 18 nt, Homo sapiens
ugagacagcucugcauac

SEQ ID NO: 32604 - RNA, 15 nt, Homo sapiens
ggcugggaguggcau

SEQ ID NO: 32605 - RNA, 15 nt, Homo sapiens
caaucuuaacucauu

SEQ ID NO: 32606 - RNA, 17 nt, Homo sapiens
uuggaaaaugugcaaua

SEQ ID NO: 32607 - RNA, 14 nt, Homo sapiens
ucuauguggcugua

SEQ ID NO: 32608 - RNA, 13 nt, Homo sapiens
uagggaccugcug

SEQ ID NO: 32609 - RNA, 15 nt, Homo sapiens
ggaauuuucuuccaa

SEQ ID NO: 32610 - RNA, 17 nt, Homo sapiens
caaauguucaucaauga

SEQ ID NO: 32611 - RNA, 18 nt, Homo sapiens
cugcuggauucaagugau

SEQ ID NO: 32612 - RNA, 23 nt, Homo sapiens
aaggcuucucuuaaacacuaaaa

SEQ ID NO: 32613 - RNA, 11 nt, Homo sapiens
acuuuuuccag

SEQ ID NO: 32614 - RNA, 23 nt, Homo sapiens
cacuccagccugagcgacaguga

SEQ ID NO: 32615 - RNA, 17 nt, Homo sapiens
agccccgggaguggcgc

SEQ ID NO: 32616 - RNA, 22 nt, Homo sapiens
uauuuuuuaugaaacauuacag

SEQ ID NO: 32617 - RNA, 18 nt, Homo sapiens
auuuauugagcaccugca

SEQ ID NO: 32618 - RNA, 15 nt, Homo sapiens
agugaaaaacaucca

SEQ ID NO: 32619 - RNA, 12 nt, Homo sapiens
uuaccucugaua

SEQ ID NO: 32620 - RNA, 23 nt, Homo sapiens
aucaauucuauuacgugcaauac

SEQ ID NO: 32621 - RNA, 16 nt, Homo sapiens
gaauuaacacaugauc

SEQ ID NO: 32622 - RNA, 15 nt, Homo sapiens
gucucaguccaugaa

SEQ ID NO: 32623 - RNA, 14 nt, Homo sapiens
aagccucaugucca

SEQ ID NO: 32624 - RNA, 17 nt, Homo sapiens
acacaggcuccaaacug

SEQ ID NO: 32625 - RNA, 13 nt, Homo sapiens
uccugugacuguc

SEQ ID NO: 32626 - RNA, 17 nt, Homo sapiens
uaaaguacagacuuuuu

SEQ ID NO: 32627 - RNA, 19 nt, Homo sapiens
auuccuauauccugugacu

SEQ ID NO: 32628 - RNA, 11 nt, Homo sapiens
ccugugacugu

SEQ ID NO: 32629 - RNA, 12 nt, Homo sapiens
aacugugacugu

SEQ ID NO: 32630 - RNA, 13 nt, Homo sapiens
gaaauagugucug

SEQ ID NO: 32631 - RNA, 15 nt, Homo sapiens
aagauuaugaucuca

SEQ ID NO: 32632 - RNA, 18 nt, Homo sapiens
aaccacuucauucuugaa

SEQ ID NO: 32633 - RNA, 22 nt, Homo sapiens
ccuggcugggaguggcauguau

SEQ ID NO: 32634 - RNA, 19 nt, Homo sapiens
cauuugcuggagcucugcc

SEQ ID NO: 32635 - RNA, 14 nt, Homo sapiens
uucacuuauugacu

SEQ ID NO: 32636 - RNA, 17 nt, Homo sapiens
uuuauuauuuucaccug

SEQ ID NO: 32637 - RNA, 15 nt, Homo sapiens
agugagcugauauca

SEQ ID NO: 32638 - RNA, 19 nt, Homo sapiens
gagaacugcauauguuucg

SEQ ID NO: 32639 - RNA, 13 nt, Homo sapiens
gugcaauauguga

SEQ ID NO: 32640 - RNA, 18 nt, Homo sapiens
uuacagagaaaagacaua

SEQ ID NO: 32641 - RNA, 21 nt, Homo sapiens
gugcuuuccguggcacugcau

SEQ ID NO: 32642 - RNA, 15 nt, Homo sapiens
uuuagggaccugcug

SEQ ID NO: 32643 - RNA, 15 nt, Homo sapiens
gcuuaaaauguaauu

SEQ ID NO: 32644 - RNA, 13 nt, Homo sapiens
cuaugugauuaca

SEQ ID NO: 32645 - RNA, 19 nt, Homo sapiens
augguuccauucucucucc

SEQ ID NO: 32646 - RNA, 14 nt, Homo sapiens
agccacuucacuuu

SEQ ID NO: 32647 - RNA, 22 nt, Homo sapiens
auucaccuuccagugucucgga

SEQ ID NO: 32648 - RNA, 21 nt, Homo sapiens
uguuuucugacuaauuaggca

SEQ ID NO: 32649 - RNA, 15 nt, Homo sapiens
uuuaauggcauguca

SEQ ID NO: 32650 - RNA, 22 nt, Homo sapiens
auaauuccuauauccugugacu

SEQ ID NO: 32651 - RNA, 14 nt, Homo sapiens
agcagaacagugau

SEQ ID NO: 32652 - RNA, 19 nt, Homo sapiens
uguguggcauuuucacuuu

SEQ ID NO: 32653 - RNA, 17 nt, Homo sapiens
aggcuagaaccaccugc

SEQ ID NO: 32654 - RNA, 20 nt, Homo sapiens
uaaauggacaaaugcuuaug

SEQ ID NO: 32655 - RNA, 22 nt, Homo sapiens
uucugugggagaauucuuacau

SEQ ID NO: 32656 - RNA, 16 nt, Homo sapiens
uucucuaacucagaaa

SEQ ID NO: 32657 - RNA, 11 nt, Homo sapiens
cuuuucucugc

SEQ ID NO: 32658 - RNA, 15 nt, Homo sapiens
auuugcaagacauag

SEQ ID NO: 32659 - RNA, 22 nt, Homo sapiens
uaucucaggggccaacuaggca

SEQ ID NO: 32660 - RNA, 15 nt, Homo sapiens
uacucauacauguua

SEQ ID NO: 32661 - RNA, 16 nt, Homo sapiens
auacauucugcuuuca

SEQ ID NO: 32662 - RNA, 21 nt, Homo sapiens
ucaauuuaaaaaaaaaccuga

SEQ ID NO: 32663 - RNA, 23 nt, Homo sapiens
ugagaaaccuuauuguaccucuc

SEQ ID NO: 32664 - RNA, 18 nt, Homo sapiens
ggacuugggcgggacaca

SEQ ID NO: 32665 - RNA, 15 nt, Homo sapiens
cuugguauagcauau

SEQ ID NO: 32666 - RNA, 20 nt, Homo sapiens
ugaggacuugggcgggacac

SEQ ID NO: 32667 - RNA, 13 nt, Homo sapiens
aucaaaagaaaga

SEQ ID NO: 32668 - RNA, 13 nt, Homo sapiens
cugauuaaaccaa

SEQ ID NO: 32669 - RNA, 21 nt, Homo sapiens
aagcacuuuaacacagugucu

SEQ ID NO: 32670 - RNA, 21 nt, Homo sapiens
ucugucuggacuuuccagaga

SEQ ID NO: 32671 - RNA, 20 nt, Homo sapiens
ccaacuuugaagucugauuu

SEQ ID NO: 32672 - RNA, 20 nt, Homo sapiens
auaauaugcacacagugcuu

SEQ ID NO: 32673 - RNA, 18 nt, Homo sapiens
auuacaggcgugagccac

SEQ ID NO: 32674 - RNA, 20 nt, Homo sapiens
gcuggucucgaacugcugga

SEQ ID NO: 32675 - RNA, 12 nt, Homo sapiens
aauucauguuuc

SEQ ID NO: 32676 - RNA, 20 nt, Homo sapiens
acagcuacuugggaggcuga

SEQ ID NO: 32677 - RNA, 18 nt, Homo sapiens
auuuguuaaaauuaucaa

SEQ ID NO: 32678 - RNA, 18 nt, Homo sapiens
ccuggcugggaguggcau

SEQ ID NO: 32679 - RNA, 22 nt, Homo sapiens
aauucgcugcaaccuguugaua

SEQ ID NO: 32680 - RNA, 16 nt, Homo sapiens
ggcauuuucacuuuug

SEQ ID NO: 32681 - RNA, 12 nt, Homo sapiens
accacauggcuu

SEQ ID NO: 32682 - RNA, 15 nt, Homo sapiens
gccacuucacuuuuu

SEQ ID NO: 32683 - RNA, 18 nt, Homo sapiens
auauuuuuaugugcaaua

SEQ ID NO: 32684 - RNA, 18 nt, Homo sapiens
aaaucuacacuccaguga

SEQ ID NO: 32685 - RNA, 12 nt, Homo sapiens
uaacuagaauuu

SEQ ID NO: 32686 - RNA, 12 nt, Homo sapiens
ugcaagacauag

SEQ ID NO: 32687 - RNA, 20 nt, Homo sapiens
uuugcugccucuaaaaggcc

SEQ ID NO: 32688 - RNA, 22 nt, Homo sapiens
guuaccaguaacggaacaguau

SEQ ID NO: 32689 - RNA, 23 nt, Homo sapiens
auguuucgugaaguauacuguau

SEQ ID NO: 32690 - RNA, 22 nt, Homo sapiens
aagucagugcccaacuguuaua

SEQ ID NO: 32691 - RNA, 22 nt, Homo sapiens
agaguucugucuggacuuucca

SEQ ID NO: 32692 - RNA, 17 nt, Homo sapiens
auuuauuuuuuuacuuc

SEQ ID NO: 32693 - RNA, 23 nt, Homo sapiens
aaggaagaaauuccaggaaaauc

SEQ ID NO: 32694 - RNA, 15 nt, Homo sapiens
cccugcacuccagcc

SEQ ID NO: 32695 - RNA, 15 nt, Homo sapiens
auguguuuuucacau

SEQ ID NO: 32696 - RNA, 23 nt, Homo sapiens
ucacauuccaagccucaugucca

SEQ ID NO: 32697 - RNA, 17 nt, Homo sapiens
auuguaacuuaugaacc

SEQ ID NO: 32698 - RNA, 12 nt, Homo sapiens
ucuguaaucuuc

SEQ ID NO: 32699 - RNA, 17 nt, Homo sapiens
aucuacacuccagugag

SEQ ID NO: 32700 - RNA, 14 nt, Homo sapiens
aacauguucacuua

SEQ ID NO: 32701 - RNA, 21 nt, Homo sapiens
cuuaguguacaugaaagcgua

SEQ ID NO: 32702 - RNA, 22 nt, Homo sapiens
ugagaugggagaaucacuugaa

SEQ ID NO: 32703 - RNA, 23 nt, Homo sapiens
uauaaauuuucccaaaacugaua

SEQ ID NO: 32704 - RNA, 19 nt, Homo sapiens
gccaaggcuggagugcagu

SEQ ID NO: 32705 - RNA, 15 nt, Homo sapiens
cagaaauuuaauuca

SEQ ID NO: 32706 - RNA, 16 nt, Homo sapiens
cuucaugcauuugcac

SEQ ID NO: 32707 - RNA, 14 nt, Homo sapiens
ccucuguugccaag

SEQ ID NO: 32708 - RNA, 21 nt, Homo sapiens
cuuguuuuuccacuacugcua

SEQ ID NO: 32709 - RNA, 22 nt, Homo sapiens
ugagacagcucugcauacucau

SEQ ID NO: 32710 - RNA, 20 nt, Homo sapiens
gacaccaccacccuugccau

SEQ ID NO: 32711 - RNA, 11 nt, Homo sapiens
uuuacuuuguu

SEQ ID NO: 32712 - RNA, 18 nt, Homo sapiens
guuccuucacauccugug

SEQ ID NO: 32713 - RNA, 23 nt, Homo sapiens
aaagucagugcccaacuguuaua

SEQ ID NO: 32714 - RNA, 14 nt, Homo sapiens
uuauuguaccucuc

SEQ ID NO: 32715 - RNA, 21 nt, Homo sapiens
caagguucuucccuuuuacau

SEQ ID NO: 32716 - RNA, 19 nt, Homo sapiens
gggucucccucuguugcca

SEQ ID NO: 32717 - RNA, 23 nt, Homo sapiens
aaccaaauuuguauuuaagguau

SEQ ID NO: 32718 - RNA, 20 nt, Homo sapiens
ggaggcagagguugcaguga

SEQ ID NO: 32719 - RNA, 12 nt, Homo sapiens
cagaacagugau

SEQ ID NO: 32720 - RNA, 16 nt, Homo sapiens
uccccaaccacuucau

SEQ ID NO: 32721 - RNA, 15 nt, Homo sapiens
ucugcuuuaauuuca

SEQ ID NO: 32722 - RNA, 20 nt, Homo sapiens
gagugacuuaguguacauga

SEQ ID NO: 32723 - RNA, 17 nt, Homo sapiens
ugggaauuuucuuccaa

SEQ ID NO: 32724 - RNA, 23 nt, Homo sapiens
uggacuuuccagagaccaguauu

SEQ ID NO: 32725 - RNA, 20 nt, Homo sapiens
aucaugccccuguacuccag

SEQ ID NO: 32726 - RNA, 16 nt, Homo sapiens
ucagaagaaauucugc

SEQ ID NO: 32727 - RNA, 20 nt, Homo sapiens
cagagguugcagugagccga

SEQ ID NO: 32728 - RNA, 21 nt, Homo sapiens
gagacaccaccacccuugcca

SEQ ID NO: 32729 - RNA, 20 nt, Homo sapiens
augagaaucagaucauuuca

SEQ ID NO: 32730 - RNA, 20 nt, Homo sapiens
aguguuggaaaaugugcaau

SEQ ID NO: 32731 - RNA, 18 nt, Homo sapiens
auaaaguguaaguucaca

SEQ ID NO: 32732 - RNA, 20 nt, Homo sapiens
cugucuggacuuuccagaga

SEQ ID NO: 32733 - RNA, 18 nt, Homo sapiens
auuagccgggcauggugg

SEQ ID NO: 32734 - RNA, 12 nt, Homo sapiens
aaaaaagccaaa

SEQ ID NO: 32735 - RNA, 21 nt, Homo sapiens
gaauauuuauuaccucugaua

SEQ ID NO: 32736 - RNA, 16 nt, Homo sapiens
aacacuaaaaaggcau

SEQ ID NO: 32737 - RNA, 18 nt, Homo sapiens
cauagcagcuuauucaca

SEQ ID NO: 32738 - RNA, 19 nt, Homo sapiens
cuguuuccauagggugaca

SEQ ID NO: 32739 - RNA, 13 nt, Homo sapiens
auuacgugcaaua

SEQ ID NO: 32740 - RNA, 11 nt, Homo sapiens
ucucagugucc

SEQ ID NO: 32741 - RNA, 16 nt, Homo sapiens
aagaaugacuaugcaa

SEQ ID NO: 32742 - RNA, 14 nt, Homo sapiens
gaaaaugugcaaua

SEQ ID NO: 32743 - RNA, 19 nt, Homo sapiens
accuacaugagguacugag

SEQ ID NO: 32744 - RNA, 15 nt, Homo sapiens
cccauuucuauuuau

SEQ ID NO: 32745 - RNA, 21 nt, Homo sapiens
ucaucuguaaaauggagacac

SEQ ID NO: 32746 - RNA, 13 nt, Homo sapiens
ugaaauagugucu

SEQ ID NO: 32747 - RNA, 13 nt, Homo sapiens
uguuuuuaagcug

SEQ ID NO: 32748 - RNA, 21 nt, Homo sapiens
aaacuaccagcccuacaccau

SEQ ID NO: 32749 - RNA, 14 nt, Homo sapiens
cuuaaaaucuaauu

SEQ ID NO: 32750 - RNA, 22 nt, Homo sapiens
ugucuugggaauuuucuuccaa

SEQ ID NO: 32751 - RNA, 17 nt, Homo sapiens
augaaguacucauacau

SEQ ID NO: 32752 - RNA, 16 nt, Homo sapiens
uucaugcauuugcacu

SEQ ID NO: 32753 - RNA, 15 nt, Homo sapiens
gacccaaaaggcaga

SEQ ID NO: 32754 - RNA, 20 nt, Homo sapiens
gagauggaaguugcagugag

SEQ ID NO: 32755 - RNA, 22 nt, Homo sapiens
cugaggcaagagaauugcuuga

SEQ ID NO: 32756 - RNA, 22 nt, Homo sapiens
cuauguucuaagaagugaaaau

SEQ ID NO: 32757 - RNA, 21 nt, Homo sapiens
cuugaaauagugucugaugaa

SEQ ID NO: 32758 - RNA, 20 nt, Homo sapiens
aauauuuauuauuuucaccu

SEQ ID NO: 32759 - RNA, 19 nt, Homo sapiens
gguaucaaccaaauggagu

SEQ ID NO: 32760 - RNA, 18 nt, Homo sapiens
uaaauaguuuaugauucc

SEQ ID NO: 32761 - RNA, 23 nt, Homo sapiens
aagaaauucugcaagcuuuucaa

SEQ ID NO: 32762 - RNA, 15 nt, Homo sapiens
cuuuuauugccauga

SEQ ID NO: 32763 - RNA, 19 nt, Homo sapiens
acaaggcuuuaucucaggg

SEQ ID NO: 32764 - RNA, 17 nt, Homo sapiens
ugauuacaaggcuuuau

SEQ ID NO: 32765 - RNA, 20 nt, Homo sapiens
ugagagcccuucaugcauuu

SEQ ID NO: 32766 - RNA, 15 nt, Homo sapiens
cuugggcgggacaca

SEQ ID NO: 32767 - RNA, 13 nt, Homo sapiens
cacuccagccuga

SEQ ID NO: 32768 - RNA, 17 nt, Homo sapiens
auggcagcuuuccucaa

SEQ ID NO: 32769 - RNA, 16 nt, Homo sapiens
ugaaaaugaauaucua

SEQ ID NO: 32770 - RNA, 14 nt, Homo sapiens
aagacaaauucugu

SEQ ID NO: 32771 - RNA, 18 nt, Homo sapiens
auuguugacaacugugac

SEQ ID NO: 32772 - RNA, 18 nt, Homo sapiens
gaaaagauuaugaucuca

SEQ ID NO: 32773 - RNA, 13 nt, Homo sapiens
augcauacaguaa

SEQ ID NO: 32774 - RNA, 14 nt, Homo sapiens
aacuggcaguuuuc

SEQ ID NO: 32775 - RNA, 12 nt, Homo sapiens
cauguacaucca

SEQ ID NO: 32776 - RNA, 18 nt, Homo sapiens
augcaaccuuuggaugca

SEQ ID NO: 32777 - RNA, 11 nt, Homo sapiens
uuuaugugcaa

SEQ ID NO: 32778 - RNA, 21 nt, Homo sapiens
uucaugaaaagauuaugaucu

SEQ ID NO: 32779 - RNA, 22 nt, Homo sapiens
ggcagcaggauagagugggaca

SEQ ID NO: 32780 - RNA, 21 nt, Homo sapiens
uccuguacuuuuuccagacac

SEQ ID NO: 32781 - RNA, 13 nt, Homo sapiens
uggccugcuggau

SEQ ID NO: 32782 - RNA, 13 nt, Homo sapiens
ugugacuuuccua

SEQ ID NO: 32783 - RNA, 17 nt, Homo sapiens
aagugaaaaacauccag

SEQ ID NO: 32784 - RNA, 18 nt, Homo sapiens
guaucaaccaaauggagu

SEQ ID NO: 32785 - RNA, 18 nt, Homo sapiens
uuguaaaauggugugacc

SEQ ID NO: 32786 - RNA, 12 nt, Homo sapiens
aaguuuaugcau

SEQ ID NO: 32787 - RNA, 22 nt, Homo sapiens
aguauaaauaaaaugagcaaaa

SEQ ID NO: 32788 - RNA, 13 nt, Homo sapiens
ucaugcauuugca

SEQ ID NO: 32789 - RNA, 17 nt, Homo sapiens
cuggacuuuccagagac

SEQ ID NO: 32790 - RNA, 16 nt, Homo sapiens
aacccggccugauuaa

SEQ ID NO: 32791 - RNA, 23 nt, Homo sapiens
ucacauuggcuauuuaaagacaa

SEQ ID NO: 32792 - RNA, 18 nt, Homo sapiens
aauuuauucaauuccucu

SEQ ID NO: 32793 - RNA, 13 nt, Homo sapiens
cauuuucacuuuu

SEQ ID NO: 32794 - RNA, 18 nt, Homo sapiens
augaaaagauuaugaucu

SEQ ID NO: 32795 - RNA, 15 nt, Homo sapiens
gaagcuuccauucca

SEQ ID NO: 32796 - RNA, 17 nt, Homo sapiens
aaugaaugaauggcuaa

SEQ ID NO: 32797 - RNA, 18 nt, Homo sapiens
uacagagaaaagacauaa

SEQ ID NO: 32798 - RNA, 20 nt, Homo sapiens
auauaauaugcacacagugc

SEQ ID NO: 32799 - RNA, 21 nt, Homo sapiens
gacaccaccacccuugccaug

SEQ ID NO: 32800 - RNA, 17 nt, Homo sapiens
gcagaagcaacccaaau

SEQ ID NO: 32801 - RNA, 13 nt, Homo sapiens
auguuaugcauaa

SEQ ID NO: 32802 - RNA, 22 nt, Homo sapiens
aauuuucaaaaucaaauuccag

SEQ ID NO: 32803 - RNA, 23 nt, Homo sapiens
acuaauuaggcaaggcuauguga

SEQ ID NO: 32804 - RNA, 20 nt, Homo sapiens
cgucucuacuaaaaauacaa

SEQ ID NO: 32805 - RNA, 19 nt, Homo sapiens
acagccaggcggcuggaau

SEQ ID NO: 32806 - RNA, 12 nt, Homo sapiens
aucuacacucca

SEQ ID NO: 32807 - RNA, 23 nt, Homo sapiens
aguguccucaucuguaaaaugga

SEQ ID NO: 32808 - RNA, 22 nt, Homo sapiens
ugugauauguaccuaacgaagu

SEQ ID NO: 32809 - RNA, 17 nt, Homo sapiens
caaaacuucagacauag

SEQ ID NO: 32810 - RNA, 19 nt, Homo sapiens
uuaucaugcaaaugcugua

SEQ ID NO: 32811 - RNA, 23 nt, Homo sapiens
guagaaaaagcaguaacugacaa

SEQ ID NO: 32812 - RNA, 20 nt, Homo sapiens
aaaugggcuacuuuguccuu

SEQ ID NO: 32813 - RNA, 15 nt, Homo sapiens
uaucuuaguugguau

SEQ ID NO: 32814 - RNA, 13 nt, Homo sapiens
uaaguaauuucag

SEQ ID NO: 32815 - RNA, 14 nt, Homo sapiens
gcaggcgugaccug

SEQ ID NO: 32816 - RNA, 16 nt, Homo sapiens
uggaaaaaaaggaaga

SEQ ID NO: 32817 - RNA, 22 nt, Homo sapiens
ggaauauuugcaagacauagaa

SEQ ID NO: 32818 - RNA, 23 nt, Homo sapiens
uuaaguguaacuggcaguuuucc

SEQ ID NO: 32819 - RNA, 21 nt, Homo sapiens
cuggauguggagggggcgcgu

SEQ ID NO: 32820 - RNA, 11 nt, Homo sapiens
acaucuuucac

SEQ ID NO: 32821 - RNA, 17 nt, Homo sapiens
uaugauuccaccuacau

SEQ ID NO: 32822 - RNA, 22 nt, Homo sapiens
cucugaagaguggguuucacaa

SEQ ID NO: 32823 - RNA, 17 nt, Homo sapiens
cuucucuucacagucac

SEQ ID NO: 32824 - RNA, 20 nt, Homo sapiens
gaaaacauagcaucucagga

SEQ ID NO: 32825 - RNA, 15 nt, Homo sapiens
cuucuuggucucagu

SEQ ID NO: 32826 - RNA, 15 nt, Homo sapiens
ugugauuacaaggcu

SEQ ID NO: 32827 - RNA, 15 nt, Homo sapiens
caaaaucaaauucca

SEQ ID NO: 32828 - RNA, 17 nt, Homo sapiens
aauauuugcaagacaua

SEQ ID NO: 32829 - RNA, 17 nt, Homo sapiens
uuccucaaaacuucaga

SEQ ID NO: 32830 - RNA, 13 nt, Homo sapiens
cagggacuugaac

SEQ ID NO: 32831 - RNA, 21 nt, Homo sapiens
ugucucggagggauuccccua

SEQ ID NO: 32832 - RNA, 12 nt, Homo sapiens
ucaucaaugaau

SEQ ID NO: 32833 - RNA, 16 nt, Homo sapiens
uuaugcauaaagucag

SEQ ID NO: 32834 - RNA, 15 nt, Homo sapiens
uagaagcaucacagg

SEQ ID NO: 32835 - RNA, 15 nt, Homo sapiens
ggauagagugggaca

SEQ ID NO: 32836 - RNA, 23 nt, Homo sapiens
uuuaaaaaaaaaaaaaaagccaa

SEQ ID NO: 32837 - RNA, 16 nt, Homo sapiens
gcuuuaauuucaugaa

SEQ ID NO: 32838 - RNA, 10 nt, Homo sapiens
caagacauag

SEQ ID NO: 32839 - RNA, 17 nt, Homo sapiens
cugaagggcaucaugca

SEQ ID NO: 32840 - RNA, 17 nt, Homo sapiens
auaagcaaagacuauga

SEQ ID NO: 32841 - RNA, 20 nt, Homo sapiens
auuuucacuuuuggcuugua

SEQ ID NO: 32842 - RNA, 23 nt, Homo sapiens
gauuucaugccuggugcuuccaa

SEQ ID NO: 32843 - RNA, 19 nt, Homo sapiens
uucgugaaguauacuguau

SEQ ID NO: 32844 - RNA, 13 nt, Homo sapiens
uaagcaacaucua

SEQ ID NO: 32845 - RNA, 13 nt, Homo sapiens
guaaaauugaaag

SEQ ID NO: 32846 - RNA, 16 nt, Homo sapiens
cacagucacauuccaa

SEQ ID NO: 32847 - RNA, 16 nt, Homo sapiens
cacagaggaucugcuu

SEQ ID NO: 32848 - RNA, 12 nt, Homo sapiens
acaacugugacu

SEQ ID NO: 32849 - RNA, 19 nt, Homo sapiens
aggcaaggcuaugugauua

SEQ ID NO: 32850 - RNA, 22 nt, Homo sapiens
cugcaagcuuuucaaaauugga

SEQ ID NO: 32851 - RNA, 17 nt, Homo sapiens
aacuagaauuuauucaa

SEQ ID NO: 32852 - RNA, 22 nt, Homo sapiens
agagcccuucaugcauuugcac

SEQ ID NO: 32853 - RNA, 19 nt, Homo sapiens
cacuuugggaggcugaggc

SEQ ID NO: 32854 - RNA, 16 nt, Homo sapiens
uuaugaaacauuacag

SEQ ID NO: 32855 - RNA, 23 nt, Homo sapiens
aaugugucaggugacccugauga

SEQ ID NO: 32856 - RNA, 21 nt, Homo sapiens
cagaacuugaaugugucaggu

SEQ ID NO: 32857 - RNA, 21 nt, Homo sapiens
gcuuauucacaagacccaaaa

SEQ ID NO: 32858 - RNA, 16 nt, Homo sapiens
acuuaguguacaugaa

SEQ ID NO: 32859 - RNA, 22 nt, Homo sapiens
uggcaaaucucuauuaggaaau

SEQ ID NO: 32860 - RNA, 12 nt, Homo sapiens
uuauaaucuuuu

SEQ ID NO: 32861 - RNA, 18 nt, Homo sapiens
ugggagaaucacuugaac

SEQ ID NO: 32862 - RNA, 17 nt, Homo sapiens
uaaacaaaggaauuaug

SEQ ID NO: 32863 - RNA, 12 nt, Homo sapiens
caaacagaacua

SEQ ID NO: 32864 - RNA, 17 nt, Homo sapiens
uauugcugaaugacuac

SEQ ID NO: 32865 - RNA, 22 nt, Homo sapiens
agaaauuccaggaaaaucugca

SEQ ID NO: 32866 - RNA, 23 nt, Homo sapiens
guuuccuagcgcagccaugugau

SEQ ID NO: 32867 - RNA, 14 nt, Homo sapiens
auaaauggacaaau

SEQ ID NO: 32868 - RNA, 18 nt, Homo sapiens
gaaagcagggacuugaac

SEQ ID NO: 32869 - RNA, 22 nt, Homo sapiens
ugaauaaaguguaaguucacaa

SEQ ID NO: 32870 - RNA, 18 nt, Homo sapiens
ugguccgaagucuuccau

SEQ ID NO: 32871 - RNA, 12 nt, Homo sapiens
caguaacugaca

SEQ ID NO: 32872 - RNA, 17 nt, Homo sapiens
uucaaaauuggacuuaa

SEQ ID NO: 32873 - RNA, 19 nt, Homo sapiens
gcaacccaaauguucauca

SEQ ID NO: 32874 - RNA, 12 nt, Homo sapiens
gccaauuuacuu

SEQ ID NO: 32875 - RNA, 22 nt, Homo sapiens
ugucuuacagagaaaagacaua

SEQ ID NO: 32876 - RNA, 19 nt, Homo sapiens
ugucuggcacuugggacaa

SEQ ID NO: 32877 - RNA, 20 nt, Homo sapiens
ucccuuuuacauacugcugu

SEQ ID NO: 32878 - RNA, 12 nt, Homo sapiens
acugugacugua

SEQ ID NO: 32879 - RNA, 17 nt, Homo sapiens
aaggcuuuaucucaggg

SEQ ID NO: 32880 - RNA, 14 nt, Homo sapiens
uuccacuacugcua

SEQ ID NO: 32881 - RNA, 19 nt, Homo sapiens
cauggcacucuauguucua

SEQ ID NO: 32882 - RNA, 19 nt, Homo sapiens
gacuaugaggaauauuugc

SEQ ID NO: 32883 - RNA, 22 nt, Homo sapiens
gauagagugggacaguuccuga

SEQ ID NO: 32884 - RNA, 21 nt, Homo sapiens
uuuacauacugcugucuaugu

SEQ ID NO: 32885 - RNA, 21 nt, Homo sapiens
uuacuauuuauugcugaauga

SEQ ID NO: 32886 - RNA, 14 nt, Homo sapiens
accaguauucccuu

SEQ ID NO: 32887 - RNA, 13 nt, Homo sapiens
caauuccucuggg

SEQ ID NO: 32888 - RNA, 13 nt, Homo sapiens
uuacaucuuucac

SEQ ID NO: 32889 - RNA, 21 nt, Homo sapiens
aaauaacuaggcguggacuua

SEQ ID NO: 32890 - RNA, 19 nt, Homo sapiens
agaaauuugccaauuuacu

SEQ ID NO: 32891 - RNA, 21 nt, Homo sapiens
ggagcuugaaauagugucuga

SEQ ID NO: 32892 - RNA, 21 nt, Homo sapiens
guuuucccugaccucccucua

SEQ ID NO: 32893 - RNA, 13 nt, Homo sapiens
ucuugaaagcugu

SEQ ID NO: 32894 - RNA, 13 nt, Homo sapiens
cucaucugugauu

SEQ ID NO: 32895 - RNA, 20 nt, Homo sapiens
gccuguaaucccagcacuuu

SEQ ID NO: 32896 - RNA, 14 nt, Homo sapiens
aagaaauucugcaa

SEQ ID NO: 32897 - RNA, 18 nt, Homo sapiens
aagccaucggagcugcua

SEQ ID NO: 32898 - RNA, 17 nt, Homo sapiens
uacaauugaaaugacua

SEQ ID NO: 32899 - RNA, 20 nt, Homo sapiens
aguucugucuggacuuucca

SEQ ID NO: 32900 - RNA, 16 nt, Homo sapiens
uaaaugauuucauuca

SEQ ID NO: 32901 - RNA, 21 nt, Homo sapiens
guauauaaauuuucccaaaac

SEQ ID NO: 32902 - RNA, 13 nt, Homo sapiens
ugagcgacaguga

SEQ ID NO: 32903 - RNA, 16 nt, Homo sapiens
ugauucccuccugcua

SEQ ID NO: 32904 - RNA, 22 nt, Homo sapiens
aagauguagaggagaaacugga

SEQ ID NO: 32905 - RNA, 15 nt, Homo sapiens
cuguacuuuuuccag

SEQ ID NO: 32906 - RNA, 12 nt, Homo sapiens
aacccugucucu

SEQ ID NO: 32907 - RNA, 15 nt, Homo sapiens
caagccucaugucca

SEQ ID NO: 32908 - RNA, 22 nt, Homo sapiens
aaauauuuuuaugugcaauaaa

SEQ ID NO: 32909 - RNA, 16 nt, Homo sapiens
auggcuaguaucaaaa

SEQ ID NO: 32910 - RNA, 20 nt, Homo sapiens
caccagagauaauaugagaa

SEQ ID NO: 32911 - RNA, 22 nt, Homo sapiens
auguugaaaaaguucugcagau

SEQ ID NO: 32912 - RNA, 16 nt, Homo sapiens
gugccuguaaucacag

SEQ ID NO: 32913 - RNA, 17 nt, Homo sapiens
gccugcuggauguggag

SEQ ID NO: 32914 - RNA, 15 nt, Homo sapiens
uauuucacuugauga

SEQ ID NO: 32915 - RNA, 14 nt, Homo sapiens
aaaaugaauaucua

SEQ ID NO: 32916 - RNA, 15 nt, Homo sapiens
aauucugcaagcuuu

SEQ ID NO: 32917 - RNA, 14 nt, Homo sapiens
uggaaaaugugcaa

SEQ ID NO: 32918 - RNA, 16 nt, Homo sapiens
agauccccguguuacu

SEQ ID NO: 32919 - RNA, 14 nt, Homo sapiens
auacuccuaguaau

SEQ ID NO: 32920 - RNA, 18 nt, Homo sapiens
guuggaaaaugugcaaua

SEQ ID NO: 32921 - RNA, 23 nt, Homo sapiens
uuaaaauauuuuuaugugcaaua

SEQ ID NO: 32922 - RNA, 22 nt, Homo sapiens
aucuuguuuuuccacuacugcu

SEQ ID NO: 32923 - RNA, 16 nt, Homo sapiens
ugcaccaacuuugaag

SEQ ID NO: 32924 - RNA, 15 nt, Homo sapiens
uuaucuugucucugg

SEQ ID NO: 32925 - RNA, 16 nt, Homo sapiens
auuuuuaugugcaaua

SEQ ID NO: 32926 - RNA, 23 nt, Homo sapiens
aaauucgcugcaaccuguugaua

SEQ ID NO: 32927 - RNA, 14 nt, Homo sapiens
uguggucacaggaa

SEQ ID NO: 32928 - RNA, 15 nt, Homo sapiens
acaguuccugagacc

SEQ ID NO: 32929 - RNA, 15 nt, Homo sapiens
acauagcaucucagg

SEQ ID NO: 32930 - RNA, 17 nt, Homo sapiens
caucuuggucacauaca

SEQ ID NO: 32931 - RNA, 18 nt, Homo sapiens
gagcuugaaauagugucu

SEQ ID NO: 32932 - RNA, 16 nt, Homo sapiens
auucccuccugcuacu

SEQ ID NO: 32933 - RNA, 23 nt, Homo sapiens
ucuucccuuuuacauacugcugu

SEQ ID NO: 32934 - RNA, 22 nt, Homo sapiens
ugcagcccccauuguggucaca

SEQ ID NO: 32935 - RNA, 13 nt, Homo sapiens
acuagauacugaa

SEQ ID NO: 32936 - RNA, 20 nt, Homo sapiens
acggagauaucccaggaaaa

SEQ ID NO: 32937 - RNA, 18 nt, Homo sapiens
aagguauuuauugagcac

SEQ ID NO: 32938 - RNA, 16 nt, Homo sapiens
gagauuucaugccugg

SEQ ID NO: 32939 - RNA, 20 nt, Homo sapiens
aguaauuuuaaguaauuuca

SEQ ID NO: 32940 - RNA, 15 nt, Homo sapiens
caaggcuuuaucuca

SEQ ID NO: 32941 - RNA, 14 nt, Homo sapiens
auuugagacaggga

SEQ ID NO: 32942 - RNA, 17 nt, Homo sapiens
gaaucagaucauuucaa

SEQ ID NO: 32943 - RNA, 20 nt, Homo sapiens
gugaaauaaaaguagaauaa

SEQ ID NO: 32944 - RNA, 20 nt, Homo sapiens
cauuaaauauaauaugcaca

SEQ ID NO: 32945 - RNA, 20 nt, Homo sapiens
gagaaaccuuauuguaccuc

SEQ ID NO: 32946 - RNA, 15 nt, Homo sapiens
agcagggacuugaac

SEQ ID NO: 32947 - RNA, 16 nt, Homo sapiens
gccuugguauagcaua

SEQ ID NO: 32948 - RNA, 12 nt, Homo sapiens
uugaauccagaa

SEQ ID NO: 32949 - RNA, 16 nt, Homo sapiens
aaguugcaccaacuuu

SEQ ID NO: 32950 - RNA, 14 nt, Homo sapiens
gcuuccuaacugcu

SEQ ID NO: 32951 - RNA, 17 nt, Homo sapiens
aaauauaauaugcacac

SEQ ID NO: 32952 - RNA, 22 nt, Homo sapiens
uuuccuagcgcagccaugugau

SEQ ID NO: 32953 - RNA, 19 nt, Homo sapiens
guuuuccuucucaucugug

SEQ ID NO: 32954 - RNA, 23 nt, Homo sapiens
aggcuggucucgaacugcuggau

SEQ ID NO: 32955 - RNA, 20 nt, Homo sapiens
uaguuucccuugcaugguuu

SEQ ID NO: 32956 - RNA, 14 nt, Homo sapiens
uacaaggcuuuauc

SEQ ID NO: 32957 - RNA, 17 nt, Homo sapiens
auucacaagacccaaaa

SEQ ID NO: 32958 - RNA, 17 nt, Homo sapiens
ugaguggaugauguuuc

SEQ ID NO: 32959 - RNA, 21 nt, Homo sapiens
aaaaaaauuuuauagugucuu

SEQ ID NO: 32960 - RNA, 13 nt, Homo sapiens
gccccugcacucc

SEQ ID NO: 32961 - RNA, 20 nt, Homo sapiens
uccuuccuuaucacugacac

SEQ ID NO: 32962 - RNA, 16 nt, Homo sapiens
gagacucugucucagu

SEQ ID NO: 32963 - RNA, 13 nt, Homo sapiens
gacagaaagcaga

SEQ ID NO: 32964 - RNA, 18 nt, Homo sapiens
aggcauguaauugcuugu

SEQ ID NO: 32965 - RNA, 18 nt, Homo sapiens
uacucuguuccuucacau

SEQ ID NO: 32966 - RNA, 12 nt, Homo sapiens
uaaaagcacuua

SEQ ID NO: 32967 - RNA, 20 nt, Homo sapiens
aagcagaacagugauuacca

SEQ ID NO: 32968 - RNA, 12 nt, Homo sapiens
uuauuaccucug

SEQ ID NO: 32969 - RNA, 13 nt, Homo sapiens
uggcacugcauac

SEQ ID NO: 32970 - RNA, 16 nt, Homo sapiens
guaccgcaaugugacu

SEQ ID NO: 32971 - RNA, 16 nt, Homo sapiens
uuccuuaucacugaca

SEQ ID NO: 32972 - RNA, 13 nt, Homo sapiens
agauguagaggag

SEQ ID NO: 32973 - RNA, 16 nt, Homo sapiens
uuggaugcacuuuaua

SEQ ID NO: 32974 - RNA, 15 nt, Homo sapiens
uuauuaccucugaua

SEQ ID NO: 32975 - RNA, 19 nt, Homo sapiens
uaguguuggaaaaugugca

SEQ ID NO: 32976 - RNA, 15 nt, Homo sapiens
uggcauuuucacuuu

SEQ ID NO: 32977 - RNA, 17 nt, Homo sapiens
ccuggacaguuuucugc

SEQ ID NO: 32978 - RNA, 16 nt, Homo sapiens
caaguuguguuugaua

SEQ ID NO: 32979 - RNA, 20 nt, Homo sapiens
cuggaucucacaagcacuuu

SEQ ID NO: 32980 - RNA, 16 nt, Homo sapiens
cacuuauugacuauua

SEQ ID NO: 32981 - RNA, 19 nt, Homo sapiens
gaaaaucugcacugugggc

SEQ ID NO: 32982 - RNA, 19 nt, Homo sapiens
gguauuuauugagcaccug

SEQ ID NO: 32983 - RNA, 16 nt, Homo sapiens
caaauauuguugacaa

SEQ ID NO: 32984 - RNA, 14 nt, Homo sapiens
ucucaucugugauu

SEQ ID NO: 32985 - RNA, 22 nt, Homo sapiens
augaaaagauuaugaucucaga

SEQ ID NO: 32986 - RNA, 15 nt, Homo sapiens
uuuuaaguaauuuca

SEQ ID NO: 32987 - RNA, 21 nt, Homo sapiens
gcuacucuguuccuucacauc

SEQ ID NO: 32988 - RNA, 12 nt, Homo sapiens
gacuugaaccca

SEQ ID NO: 32989 - RNA, 17 nt, Homo sapiens
uguauuuuauuacaucu

SEQ ID NO: 32990 - RNA, 19 nt, Homo sapiens
agugaacaaauuuacagag

SEQ ID NO: 32991 - RNA, 17 nt, Homo sapiens
uuauuuuuuuacuuccu

SEQ ID NO: 32992 - RNA, 20 nt, Homo sapiens
ccuggacaguuuucugcuuu

SEQ ID NO: 32993 - RNA, 17 nt, Homo sapiens
gaucucacaagcacuuu

SEQ ID NO: 32994 - RNA, 11 nt, Homo sapiens
uacgugcaaua

SEQ ID NO: 32995 - RNA, 16 nt, Homo sapiens
gaaaauaaaagcacuu

SEQ ID NO: 32996 - RNA, 15 nt, Homo sapiens
uauccugugacuguc

SEQ ID NO: 32997 - RNA, 20 nt, Homo sapiens
gaacugcuggauucaaguga

SEQ ID NO: 32998 - RNA, 18 nt, Homo sapiens
uauauguguuuuucacau

SEQ ID NO: 32999 - RNA, 16 nt, Homo sapiens
acuccuaguaauuuaa

SEQ ID NO: 33000 - RNA, 19 nt, Homo sapiens
acuuuaacacagugucugg

SEQ ID NO: 33001 - RNA, 14 nt, Homo sapiens
acccaaaaggcaga

SEQ ID NO: 33002 - RNA, 15 nt, Homo sapiens
gcacuugggacaaaa

SEQ ID NO: 33003 - RNA, 12 nt, Homo sapiens
ccacuacugcua

SEQ ID NO: 33004 - RNA, 16 nt, Homo sapiens
ugcuaucgccaucaca

SEQ ID NO: 33005 - RNA, 15 nt, Homo sapiens
uaacuggcaguuuuc

SEQ ID NO: 33006 - RNA, 18 nt, Homo sapiens
gcaggauagagugggaca

SEQ ID NO: 33007 - RNA, 14 nt, Homo sapiens
auuuauugagcacc

SEQ ID NO: 33008 - RNA, 15 nt, Homo sapiens
gcaggcgugaccuga

SEQ ID NO: 33009 - RNA, 16 nt, Homo sapiens
acuaaaaauacaaaaa

SEQ ID NO: 33010 - RNA, 21 nt, Homo sapiens
uccuagcgcagccaugugauu

SEQ ID NO: 33011 - RNA, 18 nt, Homo sapiens
cgaaugguuccauucucu

SEQ ID NO: 33012 - RNA, 16 nt, Homo sapiens
cuuuuacauacugcug

SEQ ID NO: 33013 - RNA, 22 nt, Homo sapiens
acuccugguuccuaggugagca

SEQ ID NO: 33014 - RNA, 19 nt, Homo sapiens
uuaaaauuaucaauaucua

SEQ ID NO: 33015 - RNA, 13 nt, Homo sapiens
gcgugcaggcagc

SEQ ID NO: 33016 - RNA, 16 nt, Homo sapiens
caguggcgcaaucuua

SEQ ID NO: 33017 - RNA, 19 nt, Homo sapiens
cuacuugggaggcugaggc

SEQ ID NO: 33018 - RNA, 19 nt, Homo sapiens
agaauugcuugaacccagg

SEQ ID NO: 33019 - RNA, 21 nt, Homo sapiens
acaaaaaaagcauuguaacuu

SEQ ID NO: 33020 - RNA, 20 nt, Homo sapiens
aggagauggaaguugcagug

SEQ ID NO: 33021 - RNA, 18 nt, Homo sapiens
uuuccacuacugcuacca

SEQ ID NO: 33022 - RNA, 21 nt, Homo sapiens
uuauuaccucugauaccucaa

SEQ ID NO: 33023 - RNA, 14 nt, Homo sapiens
uugaaauagugucu

SEQ ID NO: 33024 - RNA, 17 nt, Homo sapiens
uaucuuguuuuuccacu

SEQ ID NO: 33025 - RNA, 19 nt, Homo sapiens
uccauugguuuaccuguga

SEQ ID NO: 33026 - RNA, 23 nt, Homo sapiens
agacauagaauuaacacaugauc

SEQ ID NO: 33027 - RNA, 20 nt, Homo sapiens
aaaacucauuuccuauguaa

SEQ ID NO: 33028 - RNA, 17 nt, Homo sapiens
gaauuuauucaauuccu

SEQ ID NO: 33029 - RNA, 12 nt, Homo sapiens
gggcgcgguggc

SEQ ID NO: 33030 - RNA, 11 nt, Homo sapiens
aaaggugacca

SEQ ID NO: 33031 - RNA, 18 nt, Homo sapiens
gcuugaaauagugucuga

SEQ ID NO: 33032 - RNA, 16 nt, Homo sapiens
uccugagaccagccaa

SEQ ID NO: 33033 - RNA, 20 nt, Homo sapiens
aggcuggagugcaguggcgc

SEQ ID NO: 33034 - RNA, 15 nt, Homo sapiens
aaauauaauaugcac

SEQ ID NO: 33035 - RNA, 18 nt, Homo sapiens
uucccugaccucccucua

SEQ ID NO: 33036 - RNA, 20 nt, Homo sapiens
aaucugagccagugcuuuaa

SEQ ID NO: 33037 - RNA, 15 nt, Homo sapiens
cacuugaugauacaa

SEQ ID NO: 33038 - RNA, 14 nt, Homo sapiens
aucuuacugaaggu

SEQ ID NO: 33039 - RNA, 20 nt, Homo sapiens
uaucuaauauauaugaauaa

SEQ ID NO: 33040 - RNA, 21 nt, Homo sapiens
acagcucugcauacucauuag

SEQ ID NO: 33041 - RNA, 18 nt, Homo sapiens
aaguuuaugcauacagua

SEQ ID NO: 33042 - RNA, 16 nt, Homo sapiens
uuuauuaccucugaua

SEQ ID NO: 33043 - RNA, 18 nt, Homo sapiens
acuuaaaaucuaauucaa

SEQ ID NO: 33044 - RNA, 16 nt, Homo sapiens
gucucaguccaugaag

SEQ ID NO: 33045 - RNA, 23 nt, Homo sapiens
aaacauuuaaauuauacaaucau

SEQ ID NO: 33046 - RNA, 15 nt, Homo sapiens
cuucauguacaucca

SEQ ID NO: 33047 - RNA, 22 nt, Homo sapiens
gagacaccaccacccuugccau

SEQ ID NO: 33048 - RNA, 15 nt, Homo sapiens
ucagggagcauuuau

SEQ ID NO: 33049 - RNA, 17 nt, Homo sapiens
uccaaauauuguugaca

SEQ ID NO: 33050 - RNA, 11 nt, Homo sapiens
uuacucugaag

SEQ ID NO: 33051 - RNA, 16 nt, Homo sapiens
caccagggccuggcug

SEQ ID NO: 33052 - RNA, 13 nt, Homo sapiens
auuauagaaugga

SEQ ID NO: 33053 - RNA, 22 nt, Homo sapiens
cuuuuggcuuguaaaguacaga

SEQ ID NO: 33054 - RNA, 18 nt, Homo sapiens
cucugggucucagugucc

SEQ ID NO: 33055 - RNA, 17 nt, Homo sapiens
auagaauuaacacauga

SEQ ID NO: 33056 - RNA, 12 nt, Homo sapiens
cggaacaguauc

SEQ ID NO: 33057 - RNA, 18 nt, Homo sapiens
agguacugagagugaaca

SEQ ID NO: 33058 - RNA, 12 nt, Homo sapiens
auuaauucaccu

SEQ ID NO: 33059 - RNA, 21 nt, Homo sapiens
uuaaacucagggagcauuuau

SEQ ID NO: 33060 - RNA, 17 nt, Homo sapiens
uaguuuaugauuccacc

SEQ ID NO: 33061 - RNA, 20 nt, Homo sapiens
cugcagaagacaguauggca

SEQ ID NO: 33062 - RNA, 14 nt, Homo sapiens
uguauagugcaugu

SEQ ID NO: 33063 - RNA, 19 nt, Homo sapiens
ggacuugggcgggacacag

SEQ ID NO: 33064 - RNA, 20 nt, Homo sapiens
uugacacuuaaaaaugguuu

SEQ ID NO: 33065 - RNA, 16 nt, Homo sapiens
aacaaaaaaagcauug

SEQ ID NO: 33066 - RNA, 21 nt, Homo sapiens
auccuaauaaaaaggugacca

SEQ ID NO: 33067 - RNA, 20 nt, Homo sapiens
ggccuccucucucaguuuuu

SEQ ID NO: 33068 - RNA, 22 nt, Homo sapiens
cuuagacccucaugcugccaau

SEQ ID NO: 33069 - RNA, 17 nt, Homo sapiens
aauauuuuuaugugcaa

SEQ ID NO: 33070 - RNA, 12 nt, Homo sapiens
uuucugcuuuaa

SEQ ID NO: 33071 - RNA, 19 nt, Homo sapiens
auauuuuuaugugcaauaa

SEQ ID NO: 33072 - RNA, 15 nt, Homo sapiens
aucuuguuuuuccac

SEQ ID NO: 33073 - RNA, 22 nt, Homo sapiens
agacagaaagcagaacagugau

SEQ ID NO: 33074 - RNA, 18 nt, Homo sapiens
caagugaaaaacauccag

SEQ ID NO: 33075 - RNA, 18 nt, Homo sapiens
gagaagaaugacuaugca

SEQ ID NO: 33076 - RNA, 23 nt, Homo sapiens
cuacucuguuccuucacauccug

SEQ ID NO: 33077 - RNA, 18 nt, Homo sapiens
uucugucuggacuuucca

SEQ ID NO: 33078 - RNA, 20 nt, Homo sapiens
agugaacaaauuuacagaga

SEQ ID NO: 33079 - RNA, 19 nt, Homo sapiens
uggaucucacaagcacuuu

SEQ ID NO: 33080 - RNA, 15 nt, Homo sapiens
auuaaggcuucucuu

SEQ ID NO: 33081 - RNA, 13 nt, Homo sapiens
caaccaaauggag

SEQ ID NO: 33082 - RNA, 12 nt, Homo sapiens
aaaagccaaaaa

SEQ ID NO: 33083 - RNA, 19 nt, Homo sapiens
uaagugaaauaagccagac

SEQ ID NO: 33084 - RNA, 20 nt, Homo sapiens
cagagaaaauaaaagcacuu

SEQ ID NO: 33085 - RNA, 17 nt, Homo sapiens
cuaaccagccuggucaa

SEQ ID NO: 33086 - RNA, 19 nt, Homo sapiens
caaauucuguuucuugaga

SEQ ID NO: 33087 - RNA, 16 nt, Homo sapiens
uguguggcauuuucac

SEQ ID NO: 33088 - RNA, 17 nt, Homo sapiens
uuuaucuugucucuggg

SEQ ID NO: 33089 - RNA, 20 nt, Homo sapiens
uucugcccugcuuuugcuag

SEQ ID NO: 33090 - RNA, 14 nt, Homo sapiens
ugacuggccugcug

SEQ ID NO: 33091 - RNA, 14 nt, Homo sapiens
uacaucuuucacau

SEQ ID NO: 33092 - RNA, 15 nt, Homo sapiens
auauccugugacugu

SEQ ID NO: 33093 - RNA, 23 nt, Homo sapiens
agagacagaaagcagaacaguga

SEQ ID NO: 33094 - RNA, 22 nt, Homo sapiens
augaaaacauagcaucucagga

SEQ ID NO: 33095 - RNA, 18 nt, Homo sapiens
cccuuuuacauacugcug

SEQ ID NO: 33096 - RNA, 21 nt, Homo sapiens
auugaaucccuuaaacucagg

SEQ ID NO: 33097 - RNA, 19 nt, Homo sapiens
auucuauuacgugcaauac

SEQ ID NO: 33098 - RNA, 20 nt, Homo sapiens
cagcauuuuacuacuuuaaa

SEQ ID NO: 33099 - RNA, 12 nt, Homo sapiens
auuuucuuccaa

SEQ ID NO: 33100 - RNA, 16 nt, Homo sapiens
gcaauaaaauguauuu

SEQ ID NO: 33101 - RNA, 14 nt, Homo sapiens
acagucacauucca

SEQ ID NO: 33102 - RNA, 13 nt, Homo sapiens
caacugugacugu

SEQ ID NO: 33103 - RNA, 22 nt, Homo sapiens
augcaaccuuuggaugcacuuu

SEQ ID NO: 33104 - RNA, 16 nt, Homo sapiens
uagagugggacaguuc

SEQ ID NO: 33105 - RNA, 21 nt, Homo sapiens
uaacugcauugagaacugcau

SEQ ID NO: 33106 - RNA, 17 nt, Homo sapiens
caguguccucaucugua

SEQ ID NO: 33107 - RNA, 14 nt, Homo sapiens
uaugugauguggca

SEQ ID NO: 33108 - RNA, 17 nt, Homo sapiens
gaaauagugucugauga

SEQ ID NO: 33109 - RNA, 16 nt, Homo sapiens
aaacauccagauacac

SEQ ID NO: 33110 - RNA, 19 nt, Homo sapiens
aucaauagaaggauguaca

SEQ ID NO: 33111 - RNA, 12 nt, Homo sapiens
auacagugucuu

SEQ ID NO: 33112 - RNA, 20 nt, Homo sapiens
uugaaauagugucugaugaa

SEQ ID NO: 33113 - RNA, 19 nt, Homo sapiens
cuggaucucacaagcacuu

SEQ ID NO: 33114 - RNA, 20 nt, Homo sapiens
cuacuugggaggcugaggca

SEQ ID NO: 33115 - RNA, 23 nt, Homo sapiens
aauauuguugacaacugugacug

SEQ ID NO: 33116 - RNA, 20 nt, Homo sapiens
aguuaggcuauucacaacca

SEQ ID NO: 33117 - RNA, 15 nt, Homo sapiens
agacucugucucagu

SEQ ID NO: 33118 - RNA, 21 nt, Homo sapiens
uuauagaauauuuauuaccuc

SEQ ID NO: 33119 - RNA, 17 nt, Homo sapiens
aaauucacaaguugugu

SEQ ID NO: 33120 - RNA, 24 nt, Homo sapiens
gccggagccccuugggcaggucac

SEQ ID NO: 33121 - RNA, 20 nt, Homo sapiens
ccuccaccuucuggguucaa

SEQ ID NO: 33122 - RNA, 18 nt, Homo sapiens
uacaguuagagauuuuua

SEQ ID NO: 33123 - RNA, 20 nt, Homo sapiens
aggcggguggaucacuugag

SEQ ID NO: 33124 - RNA, 18 nt, Homo sapiens
ucacuuuuuuucuuuucu

SEQ ID NO: 33125 - RNA, 14 nt, Homo sapiens
aaaugagcaaaagu

SEQ ID NO: 33126 - RNA, 20 nt, Homo sapiens
gugucuggcacuugggacaa

SEQ ID NO: 33127 - RNA, 19 nt, Homo sapiens
auuuuuacaguucucccaa

SEQ ID NO: 33128 - RNA, 13 nt, Homo sapiens
auagcaucucagg

SEQ ID NO: 33129 - RNA, 23 nt, Homo sapiens
caauaucuaauauauaugaauaa

SEQ ID NO: 33130 - RNA, 21 nt, Homo sapiens
uccugguuccuaggugagcag

SEQ ID NO: 33131 - RNA, 13 nt, Homo sapiens
aucauguauuuau

SEQ ID NO: 33132 - RNA, 16 nt, Homo sapiens
ccacgcccagcuaauu

SEQ ID NO: 33133 - RNA, 20 nt, Homo sapiens
ugccaaggcuggagugcagu

SEQ ID NO: 33134 - RNA, 19 nt, Homo sapiens
uaaaaggccugucccugca

SEQ ID NO: 33135 - RNA, 16 nt, Homo sapiens
gaagucuuccauagag

SEQ ID NO: 33136 - RNA, 18 nt, Homo sapiens
ccuuuggaugcacuuuau

SEQ ID NO: 33137 - RNA, 17 nt, Homo sapiens
aaacccggccugauuaa

SEQ ID NO: 33138 - RNA, 15 nt, Homo sapiens
cuaugugauuacaag

SEQ ID NO: 33139 - RNA, 11 nt, Homo sapiens
aggcauguaau

SEQ ID NO: 33140 - RNA, 20 nt, Homo sapiens
uuucacuuuuggcuuguaaa

SEQ ID NO: 33141 - RNA, 14 nt, Homo sapiens
gcagggacuugaac

SEQ ID NO: 33142 - RNA, 19 nt, Homo sapiens
ucccagcgagggacaccga

SEQ ID NO: 33143 - RNA, 19 nt, Homo sapiens
auguuucgcugauauaugu

SEQ ID NO: 33144 - RNA, 19 nt, Homo sapiens
ucccuucucuucacaguca

SEQ ID NO: 33145 - RNA, 16 nt, Homo sapiens
uuuuuaugugcaauaa

SEQ ID NO: 33146 - RNA, 23 nt, Homo sapiens
uagaguucugucuggacuuucca

SEQ ID NO: 33147 - RNA, 20 nt, Homo sapiens
gcuaagugaaauaagccaga

SEQ ID NO: 33148 - RNA, 14 nt, Homo sapiens
aucaccaaggcuga

SEQ ID NO: 33149 - RNA, 21 nt, Homo sapiens
uauuuacugagcuucucugug

SEQ ID NO: 33150 - RNA, 12 nt, Homo sapiens
agcgacagugag

SEQ ID NO: 33151 - RNA, 16 nt, Homo sapiens
cugacuaauuaggcaa

SEQ ID NO: 33152 - RNA, 17 nt, Homo sapiens
gcucugggauagcugac

SEQ ID NO: 33153 - RNA, 21 nt, Homo sapiens
uaagguauauaaauuuuccca

SEQ ID NO: 33154 - RNA, 11 nt, Homo sapiens
aaugugcaaua

SEQ ID NO: 33155 - RNA, 18 nt, Homo sapiens
aauuaauggaauauguaa

SEQ ID NO: 33156 - RNA, 22 nt, Homo sapiens
acaguauggcagcuuuccucaa

SEQ ID NO: 33157 - RNA, 13 nt, Homo sapiens
uccaaauucacaa

SEQ ID NO: 33158 - RNA, 21 nt, Homo sapiens
ucccaaagugcugggaauuac

SEQ ID NO: 33159 - RNA, 16 nt, Homo sapiens
aaagcagaacagugau

SEQ ID NO: 33160 - RNA, 16 nt, Homo sapiens
uuuaaucaccaaggcu

SEQ ID NO: 33161 - RNA, 16 nt, Homo sapiens
aucuaauauauaugaa

SEQ ID NO: 33162 - RNA, 23 nt, Homo sapiens
augcuuguauuuuacuuuuccau

SEQ ID NO: 33163 - RNA, 16 nt, Homo sapiens
auuuuaaguaauuuca

SEQ ID NO: 33164 - RNA, 20 nt, Homo sapiens
uaaugaaaaugaauaucuau

SEQ ID NO: 33165 - RNA, 20 nt, Homo sapiens
agguauauaaauuuucccaa

SEQ ID NO: 33166 - RNA, 22 nt, Homo sapiens
ugauucccuccugcuacucugu

SEQ ID NO: 33167 - RNA, 19 nt, Homo sapiens
cauuugcgaaugguuccau

SEQ ID NO: 33168 - RNA, 19 nt, Homo sapiens
ccagugagacagcucugca

SEQ ID NO: 33169 - RNA, 14 nt, Homo sapiens
aauuaacacaugau

SEQ ID NO: 33170 - RNA, 16 nt, Homo sapiens
gccuaucagcauuuua

SEQ ID NO: 33171 - RNA, 19 nt, Homo sapiens
caccacccuugccauggag

SEQ ID NO: 33172 - RNA, 16 nt, Homo sapiens
uaacugacaacuugaa

SEQ ID NO: 33173 - RNA, 22 nt, Homo sapiens
aaacaucaguuacucugaaggg

SEQ ID NO: 33174 - RNA, 17 nt, Homo sapiens
auccugugacugucuca

SEQ ID NO: 33175 - RNA, 21 nt, Homo sapiens
agaaugauuuuacggagauau

SEQ ID NO: 33176 - RNA, 19 nt, Homo sapiens
caggauagagugggacagu

SEQ ID NO: 33177 - RNA, 15 nt, Homo sapiens
caggcuccaaacugg

SEQ ID NO: 33178 - RNA, 18 nt, Homo sapiens
ccaaacuggagcuugaaa

SEQ ID NO: 33179 - RNA, 20 nt, Homo sapiens
cccucugggucucagugucc

SEQ ID NO: 33180 - RNA, 17 nt, Homo sapiens
caaggcuggagugcagu

SEQ ID NO: 33181 - RNA, 18 nt, Homo sapiens
acaaggcuuuaucucagg

SEQ ID NO: 33182 - RNA, 18 nt, Homo sapiens
gugagacagcucugcaua

SEQ ID NO: 33183 - RNA, 21 nt, Homo sapiens
auucuucuuugguggagauaa

SEQ ID NO: 33184 - RNA, 21 nt, Homo sapiens
gccuggaucucacaagcacuu

SEQ ID NO: 33185 - RNA, 14 nt, Homo sapiens
uccuauauccugug

SEQ ID NO: 33186 - RNA, 15 nt, Homo sapiens
gguggcgcgcaccug

SEQ ID NO: 33187 - RNA, 10 nt, Homo sapiens
auagugucuu

SEQ ID NO: 33188 - RNA, 20 nt, Homo sapiens
cucaggggccaacuaggcag

SEQ ID NO: 33189 - RNA, 12 nt, Homo sapiens
gauuucauucaa

SEQ ID NO: 33190 - RNA, 21 nt, Homo sapiens
gaggcauuugcagcugugcca

SEQ ID NO: 33191 - RNA, 19 nt, Homo sapiens
aaaauauuuuuaugugcaa

SEQ ID NO: 33192 - RNA, 21 nt, Homo sapiens
aggaauauuugcaagacauag

SEQ ID NO: 33193 - RNA, 17 nt, Homo sapiens
uauuugcaagacauaga

SEQ ID NO: 33194 - RNA, 16 nt, Homo sapiens
cauuguggucacagga

SEQ ID NO: 33195 - RNA, 21 nt, Homo sapiens
auuuuuuaugaaacauuacag

SEQ ID NO: 33196 - RNA, 18 nt, Homo sapiens
uguucacuuauugacuau

SEQ ID NO: 33197 - RNA, 22 nt, Homo sapiens
uacucugaagggcaucaugcau

SEQ ID NO: 33198 - RNA, 16 nt, Homo sapiens
cacaaccacucauuca

SEQ ID NO: 33199 - RNA, 16 nt, Homo sapiens
aaagcagggacuugaa

SEQ ID NO: 33200 - RNA, 14 nt, Homo sapiens
uggagacaccacca

SEQ ID NO: 33201 - RNA, 16 nt, Homo sapiens
agccagccuugcuccu

SEQ ID NO: 33202 - RNA, 14 nt, Homo sapiens
acccaaaguaucag

SEQ ID NO: 33203 - RNA, 15 nt, Homo sapiens
caggaaaaucugcac

SEQ ID NO: 33204 - RNA, 15 nt, Homo sapiens
aaauaaaagcacuua

SEQ ID NO: 33205 - RNA, 19 nt, Homo sapiens
gcaaccuuuggaugcacuu

SEQ ID NO: 33206 - RNA, 21 nt, Homo sapiens
gaacugcuggauucaagugau

SEQ ID NO: 33207 - RNA, 17 nt, Homo sapiens
ccaugugauuacccucu

SEQ ID NO: 33208 - RNA, 15 nt, Homo sapiens
gacuaauuaggcaag

SEQ ID NO: 33209 - RNA, 23 nt, Homo sapiens
ugaacaaauuuacagagacagaa

SEQ ID NO: 33210 - RNA, 12 nt, Homo sapiens
acuuugugaaaa

SEQ ID NO: 33211 - RNA, 15 nt, Homo sapiens
guugacaacugugac

SEQ ID NO: 33212 - RNA, 17 nt, Homo sapiens
acccaaauguucaucaa

SEQ ID NO: 33213 - RNA, 16 nt, Homo sapiens
uucacuuauugacuau

SEQ ID NO: 33214 - RNA, 18 nt, Homo sapiens
cauaagcaaagacuauga

SEQ ID NO: 33215 - RNA, 13 nt, Homo sapiens
uggauucaaguga

SEQ ID NO: 33216 - RNA, 14 nt, Homo sapiens
auggagugacuuag

SEQ ID NO: 33217 - RNA, 17 nt, Homo sapiens
cucuggcgacaguuuuc

SEQ ID NO: 33218 - RNA, 14 nt, Homo sapiens
cacccuugccaugg

SEQ ID NO: 33219 - RNA, 20 nt, Homo sapiens
agacaccaccacccuugcca

SEQ ID NO: 33220 - RNA, 15 nt, Homo sapiens
uuccuauguaacugc

SEQ ID NO: 33221 - RNA, 15 nt, Homo sapiens
ucucugccuugguau

SEQ ID NO: 33222 - RNA, 21 nt, Homo sapiens
ugaauaaaguguaaguucaca

SEQ ID NO: 33223 - RNA, 19 nt, Homo sapiens
auuuucaaaaucaaauucc

SEQ ID NO: 33224 - RNA, 13 nt, Homo sapiens
ccuuuuacauacu

SEQ ID NO: 33225 - RNA, 13 nt, Homo sapiens
auauauuuuuaga

SEQ ID NO: 33226 - RNA, 21 nt, Homo sapiens
cagagaaaauaaaagcacuua

SEQ ID NO: 33227 - RNA, 14 nt, Homo sapiens
gaauuuucuuccaa

SEQ ID NO: 33228 - RNA, 16 nt, Homo sapiens
ugagugccuguaauca

SEQ ID NO: 33229 - RNA, 21 nt, Homo sapiens
cagagacgggguuugccaugc

SEQ ID NO: 33230 - RNA, 15 nt, Homo sapiens
ucagacagaacuuga

SEQ ID NO: 33231 - RNA, 13 nt, Homo sapiens
aaugaauggcuaa

SEQ ID NO: 33232 - RNA, 15 nt, Homo sapiens
acaaugaacacuuau

SEQ ID NO: 33233 - RNA, 20 nt, Homo sapiens
cuagcaaauguuaugcauaa

SEQ ID NO: 33234 - RNA, 19 nt, Homo sapiens
ugaaaagauuaugaucuca

SEQ ID NO: 33235 - RNA, 20 nt, Homo sapiens
guguuggaaaaugugcaaua

SEQ ID NO: 33236 - RNA, 21 nt, Homo sapiens
guuauuuagggaacugcuuga

SEQ ID NO: 33237 - RNA, 16 nt, Homo sapiens
acagugucuggcacuu

SEQ ID NO: 33238 - RNA, 15 nt, Homo sapiens
uuaggcuauucacaa

SEQ ID NO: 33239 - RNA, 14 nt, Homo sapiens
caucuuggucacau

SEQ ID NO: 33240 - RNA, 19 nt, Homo sapiens
uaguuguaccgcaauguga

SEQ ID NO: 33241 - RNA, 20 nt, Homo sapiens
uccugugacugucucacuua

SEQ ID NO: 33242 - RNA, 10 nt, Homo sapiens
acgugcaaua

SEQ ID NO: 33243 - RNA, 14 nt, Homo sapiens
ugagcgacagugag

SEQ ID NO: 33244 - RNA, 10 nt, Homo sapiens
uaugugcaau

SEQ ID NO: 33245 - RNA, 12 nt, Homo sapiens
uagcaucucagg

SEQ ID NO: 33246 - RNA, 23 nt, Homo sapiens
aaauauuguugacaacugugacu

SEQ ID NO: 33247 - RNA, 15 nt, Homo sapiens
ucaucaaugaaugaa

SEQ ID NO: 33248 - RNA, 20 nt, Homo sapiens
uaagcaaaaugugauaugua

SEQ ID NO: 33249 - RNA, 15 nt, Homo sapiens
cuauauccugugacu

SEQ ID NO: 33250 - RNA, 17 nt, Homo sapiens
cuggcacuugggacaaa

SEQ ID NO: 33251 - RNA, 15 nt, Homo sapiens
uuccuggacaguuuu

SEQ ID NO: 33252 - RNA, 22 nt, Homo sapiens
augugucaggugacccugauga

SEQ ID NO: 33253 - RNA, 18 nt, Homo sapiens
uuaugaaacauuacaguu

SEQ ID NO: 33254 - RNA, 20 nt, Homo sapiens
ccagccugggugacagagca

SEQ ID NO: 33255 - RNA, 22 nt, Homo sapiens
gccuggaucucacaagcacuuu

SEQ ID NO: 33256 - RNA, 22 nt, Homo sapiens
acaguuuucugcuuuaauuuca

SEQ ID NO: 33257 - RNA, 21 nt, Homo sapiens
uaaaauauuuuuaugugcaau

SEQ ID NO: 33258 - RNA, 21 nt, Homo sapiens
cuugagaaaccuuauuguacc

SEQ ID NO: 33259 - RNA, 12 nt, Homo sapiens
aaauagugucug

SEQ ID NO: 33260 - RNA, 12 nt, Homo sapiens
ugacaacuguga

SEQ ID NO: 33261 - RNA, 16 nt, Homo sapiens
uuaugaaccuuuacau

SEQ ID NO: 33262 - RNA, 21 nt, Homo sapiens
guaaguuuaugcauacaguaa

SEQ ID NO: 33263 - RNA, 15 nt, Homo sapiens
cuugggcaggucaca

SEQ ID NO: 33264 - RNA, 19 nt, Homo sapiens
uuuguagccacuucacuuu

SEQ ID NO: 33265 - RNA, 17 nt, Homo sapiens
ucauguacauccauggu

SEQ ID NO: 33266 - RNA, 18 nt, Homo sapiens
ccaagaaugagaagaaug

SEQ ID NO: 33267 - RNA, 19 nt, Homo sapiens
ugacacuagcuaauaucaa

SEQ ID NO: 33268 - RNA, 20 nt, Homo sapiens
uucaccuuccagugucucgg

SEQ ID NO: 33269 - RNA, 13 nt, Homo sapiens
uccuucagccuga

SEQ ID NO: 33270 - RNA, 20 nt, Homo sapiens
aagaccuggucgucgucuug

SEQ ID NO: 33271 - RNA, 13 nt, Homo sapiens
aggucuccaaaau

SEQ ID NO: 33272 - RNA, 15 nt, Homo sapiens
gaaaaugugcaauau

SEQ ID NO: 33273 - RNA, 18 nt, Homo sapiens
uauuuaaagacaaagaca

SEQ ID NO: 33274 - RNA, 19 nt, Homo sapiens
cugcuggauucaagugauc

SEQ ID NO: 33275 - RNA, 15 nt, Homo sapiens
ucucacaagcacuuu

SEQ ID NO: 33276 - RNA, 18 nt, Homo sapiens
uucacuugaugauacaau

SEQ ID NO: 33277 - RNA, 16 nt, Homo sapiens
gacuuuggcaaaugag

SEQ ID NO: 33278 - RNA, 15 nt, Homo sapiens
aauagugucugauga

SEQ ID NO: 33279 - RNA, 19 nt, Homo sapiens
cugagcagucagaagaccu

SEQ ID NO: 33280 - RNA, 21 nt, Homo sapiens
gaugccccagggaccuuugua

SEQ ID NO: 33281 - RNA, 16 nt, Homo sapiens
ggaguggcauguauga

SEQ ID NO: 33282 - RNA, 17 nt, Homo sapiens
aguaacggaacaguauc

SEQ ID NO: 33283 - RNA, 23 nt, Homo sapiens
agaauuuucaaaaucaaauucca

SEQ ID NO: 33284 - RNA, 20 nt, Homo sapiens
aaccuccaccuucuggguuc

SEQ ID NO: 33285 - RNA, 19 nt, Homo sapiens
caugugauuacccucuggg

SEQ ID NO: 33286 - RNA, 22 nt, Homo sapiens
uguuagcaaaauggauaugaca

SEQ ID NO: 33287 - RNA, 21 nt, Homo sapiens
ucuuuuuagagaaauuugcca

SEQ ID NO: 33288 - RNA, 22 nt, Homo sapiens
aagagaauauuagcuuuacugu

SEQ ID NO: 33289 - RNA, 23 nt, Homo sapiens
gaugaaaacauagcaucucagga

SEQ ID NO: 33290 - RNA, 15 nt, Homo sapiens
aucagcuaaguugca

SEQ ID NO: 33291 - RNA, 14 nt, Homo sapiens
gagaaguuaagcaa

SEQ ID NO: 33292 - RNA, 21 nt, Homo sapiens
uaaauaaauguaucuuauuca

SEQ ID NO: 33293 - RNA, 16 nt, Homo sapiens
aguuaagcaacaucua

SEQ ID NO: 33294 - RNA, 16 nt, Homo sapiens
uuauuuuuacaguucu

SEQ ID NO: 33295 - RNA, 18 nt, Homo sapiens
ggaguuaggcuauucaca

SEQ ID NO: 33296 - RNA, 19 nt, Homo sapiens
cacuuuaacacagugucug

SEQ ID NO: 33297 - RNA, 22 nt, Homo sapiens
uguaaguuuaugcauacaguaa

SEQ ID NO: 33298 - RNA, 19 nt, Homo sapiens
gaagaguggguuucacaag

SEQ ID NO: 33299 - RNA, 10 nt, Homo sapiens
caguaacuga

SEQ ID NO: 33300 - RNA, 18 nt, Homo sapiens
auucuauuacgugcaaua

SEQ ID NO: 33301 - RNA, 21 nt, Homo sapiens
cuaagaagugaaaaucuacac

SEQ ID NO: 33302 - RNA, 20 nt, Homo sapiens
ggaauauuugcaagacauag

SEQ ID NO: 33303 - RNA, 17 nt, Homo sapiens
auuaccucugauaccuc

SEQ ID NO: 33304 - RNA, 14 nt, Homo sapiens
uggaacucaaggaa

SEQ ID NO: 33305 - RNA, 11 nt, Homo sapiens
ucacauuugcg

SEQ ID NO: 33306 - RNA, 17 nt, Homo sapiens
uguagauaaacucagaa

SEQ ID NO: 33307 - RNA, 14 nt, Homo sapiens
augccugcaaucug

SEQ ID NO: 33308 - RNA, 11 nt, Homo sapiens
aaaagacauaa

SEQ ID NO: 33309 - RNA, 23 nt, Homo sapiens
cuguaaucccagcacuuugggag

SEQ ID NO: 33310 - RNA, 22 nt, Homo sapiens
gagcaagacucugucucaaaaa

SEQ ID NO: 33311 - RNA, 19 nt, Homo sapiens
cuuuucaaaauuggacuua

SEQ ID NO: 33312 - RNA, 14 nt, Homo sapiens
gugaaauaagccag

SEQ ID NO: 33313 - RNA, 13 nt, Homo sapiens
ugacccacaagaa

SEQ ID NO: 33314 - RNA, 15 nt, Homo sapiens
aggcauucucugaag

SEQ ID NO: 33315 - RNA, 21 nt, Homo sapiens
ucuuaaacacuaaaaaggcau

SEQ ID NO: 33316 - RNA, 22 nt, Homo sapiens
gaaguacucauacauguuacaa

SEQ ID NO: 33317 - RNA, 13 nt, Homo sapiens
accgcaaugugac

SEQ ID NO: 33318 - RNA, 15 nt, Homo sapiens
auaagcuguuuuuau

SEQ ID NO: 33319 - RNA, 17 nt, Homo sapiens
uucuauuacgugcaaua

SEQ ID NO: 33320 - RNA, 14 nt, Homo sapiens
agacucugucucag

SEQ ID NO: 33321 - RNA, 23 nt, Homo sapiens
aauaaaagauuguauagugcaug

SEQ ID NO: 33322 - RNA, 13 nt, Homo sapiens
acccuugccaugg

SEQ ID NO: 33323 - RNA, 15 nt, Homo sapiens
aagugcugggaauua

SEQ ID NO: 33324 - RNA, 23 nt, Homo sapiens
gauuacaaggcuuuaucucaggg

SEQ ID NO: 33325 - RNA, 21 nt, Homo sapiens
uguauauuuuauaucaauuua

SEQ ID NO: 33326 - RNA, 20 nt, Homo sapiens
uaaguugcaccaacuuugaa

SEQ ID NO: 33327 - RNA, 16 nt, Homo sapiens
aggugacccugaugaa

SEQ ID NO: 33328 - RNA, 18 nt, Homo sapiens
aacuugaaugugucaggu

SEQ ID NO: 33329 - RNA, 14 nt, Homo sapiens
uggccagaagucaa

SEQ ID NO: 33330 - RNA, 13 nt, Homo sapiens
agauuaugaucuc

SEQ ID NO: 33331 - RNA, 13 nt, Homo sapiens
aauggcaugucag

SEQ ID NO: 33332 - RNA, 14 nt, Homo sapiens
aaugaaguacucau

SEQ ID NO: 33333 - RNA, 14 nt, Homo sapiens
aagucuuccauaga

SEQ ID NO: 33334 - RNA, 17 nt, Homo sapiens
ccaaacagaacuaugga

SEQ ID NO: 33335 - RNA, 16 nt, Homo sapiens
agccacuucacuuuuu

SEQ ID NO: 33336 - RNA, 22 nt, Homo sapiens
uucugcagauaaacaguaguga

SEQ ID NO: 33337 - RNA, 18 nt, Homo sapiens
uaagugaagugauacuau

SEQ ID NO: 33338 - RNA, 12 nt, Homo sapiens
auauuagcuuua

SEQ ID NO: 33339 - RNA, 16 nt, Homo sapiens
aggagauuucaugccu

SEQ ID NO: 33340 - RNA, 17 nt, Homo sapiens
ggaagaaauuccaggaa

SEQ ID NO: 33341 - RNA, 22 nt, Homo sapiens
aucuuuuauacagugucuuaca

SEQ ID NO: 33342 - RNA, 12 nt, Homo sapiens
gggaguggcgcg

SEQ ID NO: 33343 - RNA, 17 nt, Homo sapiens
cauuuccaaauucacaa

SEQ ID NO: 33344 - RNA, 22 nt, Homo sapiens
aagaguggguuucacaagugaa

SEQ ID NO: 33345 - RNA, 13 nt, Homo sapiens
augauuucauuca

SEQ ID NO: 33346 - RNA, 14 nt, Homo sapiens
aaucccagcacuuu

SEQ ID NO: 33347 - RNA, 21 nt, Homo sapiens
gagaugggagaaucacuugaa

SEQ ID NO: 33348 - RNA, 17 nt, Homo sapiens
uaaaaaggcauguaauu

SEQ ID NO: 33349 - RNA, 15 nt, Homo sapiens
gcagauaaacaguag

SEQ ID NO: 33350 - RNA, 21 nt, Homo sapiens
ggccuguugaagaugcuugua

SEQ ID NO: 33351 - RNA, 19 nt, Homo sapiens
acauccagauagguuacca

SEQ ID NO: 33352 - RNA, 15 nt, Homo sapiens
aaucagaucauuuca

SEQ ID NO: 33353 - RNA, 18 nt, Homo sapiens
gcagcuuauucacaagac

SEQ ID NO: 33354 - RNA, 19 nt, Homo sapiens
acauaagcaaagacuauga

SEQ ID NO: 33355 - RNA, 17 nt, Homo sapiens
auuuccaaauucacaag

SEQ ID NO: 33356 - RNA, 16 nt, Homo sapiens
cuaaccagccugguca

SEQ ID NO: 33357 - RNA, 21 nt, Homo sapiens
cuguaaucccagcuacuuggg

SEQ ID NO: 33358 - RNA, 16 nt, Homo sapiens
auuuuucucuaacuca

SEQ ID NO: 33359 - RNA, 14 nt, Homo sapiens
accagccaaccugg

SEQ ID NO: 33360 - RNA, 23 nt, Homo sapiens
agacaccaccacccuugccaugg

SEQ ID NO: 33361 - RNA, 23 nt, Homo sapiens
auuuuuccccaaaaagaauggga

SEQ ID NO: 33362 - RNA, 23 nt, Homo sapiens
gaaagcuugcccuggugccucac

SEQ ID NO: 33363 - RNA, 13 nt, Homo sapiens
caaaucucuauua

SEQ ID NO: 33364 - RNA, 14 nt, Homo sapiens
ugaugaauguuaaa

SEQ ID NO: 33365 - RNA, 16 nt, Homo sapiens
ccauagagacuuugug

SEQ ID NO: 33366 - RNA, 19 nt, Homo sapiens
cuucuggguucaagcgauu

SEQ ID NO: 33367 - RNA, 19 nt, Homo sapiens
augauuccaccuacaugag

SEQ ID NO: 33368 - RNA, 17 nt, Homo sapiens
uuuaaugggcacagggu

SEQ ID NO: 33369 - RNA, 20 nt, Homo sapiens
gccauaauuacuaugucauu

SEQ ID NO: 33370 - RNA, 17 nt, Homo sapiens
ugaggaauauuugcaag

SEQ ID NO: 33371 - RNA, 18 nt, Homo sapiens
ucaguccaugaagaugua

SEQ ID NO: 33372 - RNA, 12 nt, Homo sapiens
aaagccaaaaac

SEQ ID NO: 33373 - RNA, 17 nt, Homo sapiens
cugggucucaguguccu

SEQ ID NO: 33374 - RNA, 12 nt, Homo sapiens
gaaaaugugcaa

SEQ ID NO: 33375 - RNA, 16 nt, Homo sapiens
auaugacacaucucug

SEQ ID NO: 33376 - RNA, 20 nt, Homo sapiens
ucuugggaauuuucuuccaa

SEQ ID NO: 33377 - RNA, 14 nt, Homo sapiens
auccugcaauucca

SEQ ID NO: 33378 - RNA, 13 nt, Homo sapiens
gcuuuaauuucau

SEQ ID NO: 33379 - RNA, 21 nt, Homo sapiens
agcaagugaauuuuucucuaa

SEQ ID NO: 33380 - RNA, 22 nt, Homo sapiens
gucucaguguccucaucuguaa

SEQ ID NO: 33381 - RNA, 18 nt, Homo sapiens
aaaagcaguaacugacaa

SEQ ID NO: 33382 - RNA, 16 nt, Homo sapiens
aauagugucugaugaa

SEQ ID NO: 33383 - RNA, 13 nt, Homo sapiens
aauuccucuggga

SEQ ID NO: 33384 - RNA, 14 nt, Homo sapiens
ccaaggcuggagug

SEQ ID NO: 33385 - RNA, 23 nt, Homo sapiens
aguuguaccgcaaugugacuuaa

SEQ ID NO: 33386 - RNA, 23 nt, Homo sapiens
cauugagaacugcauauguuucg

SEQ ID NO: 33387 - RNA, 23 nt, Homo sapiens
cauacaauuauuuuuacaguucu

SEQ ID NO: 33388 - RNA, 21 nt, Homo sapiens
uuauaagugaagugauacuau

SEQ ID NO: 33389 - RNA, 21 nt, Homo sapiens
aacacuaaaaaggcauguaau

SEQ ID NO: 33390 - RNA, 16 nt, Homo sapiens
aagcaaaaugugauau

SEQ ID NO: 33391 - RNA, 22 nt, Homo sapiens
auaagugaagugauacuaucca

SEQ ID NO: 33392 - RNA, 19 nt, Homo sapiens
ugcuuguuagcaaaaugga

SEQ ID NO: 33393 - RNA, 22 nt, Homo sapiens
gaccaauaaccaugcccaagaa

SEQ ID NO: 33394 - RNA, 21 nt, Homo sapiens
cccccauuguggucacaggaa

SEQ ID NO: 33395 - RNA, 22 nt, Homo sapiens
cauaaauuagaggucuccaaaa

SEQ ID NO: 33396 - RNA, 14 nt, Homo sapiens
gcuggagugcagug

SEQ ID NO: 33397 - RNA, 22 nt, Homo sapiens
ugaaaaaaaauuuuauaguguc

SEQ ID NO: 33398 - RNA, 20 nt, Homo sapiens
aaacuuuaugcuaagugaaa

SEQ ID NO: 33399 - RNA, 17 nt, Homo sapiens
uguaaguuuaugcauac

SEQ ID NO: 33400 - RNA, 15 nt, Homo sapiens
cacgcccagcuaauu

SEQ ID NO: 33401 - RNA, 12 nt, Homo sapiens
uuacgugcaaua

SEQ ID NO: 33402 - RNA, 14 nt, Homo sapiens
ugcauuugcacuau

SEQ ID NO: 33403 - RNA, 22 nt, Homo sapiens
gaaagcuguggccagcuuguua

SEQ ID NO: 33404 - RNA, 23 nt, Homo sapiens
gaaauuugccaauuuacuuuguu

SEQ ID NO: 33405 - RNA, 16 nt, Homo sapiens
cagagaaaagacauaa

SEQ ID NO: 33406 - RNA, 16 nt, Homo sapiens
gaaucccuuaaacuca

SEQ ID NO: 33407 - RNA, 19 nt, Homo sapiens
gaaguacucauacauguua

SEQ ID NO: 33408 - RNA, 15 nt, Homo sapiens
caauuccucugggaa

SEQ ID NO: 33409 - RNA, 17 nt, Homo sapiens
gaguucugucuggacuu

SEQ ID NO: 33410 - RNA, 22 nt, Homo sapiens
caaauaaguauuuauaauagca

SEQ ID NO: 33411 - RNA, 16 nt, Homo sapiens
caucuguaaaauggag

SEQ ID NO: 33412 - RNA, 15 nt, Homo sapiens
uauuuauugcugaau

SEQ ID NO: 33413 - RNA, 19 nt, Homo sapiens
ugcuggccaggcuggucuc

SEQ ID NO: 33414 - RNA, 17 nt, Homo sapiens
aucaaauuccagaauga

SEQ ID NO: 33415 - RNA, 21 nt, Homo sapiens
agaaaccuuauuguaccucuc

SEQ ID NO: 33416 - RNA, 19 nt, Homo sapiens
cagccugggugacagagca

SEQ ID NO: 33417 - RNA, 14 nt, Homo sapiens
auuuauuaccucug

SEQ ID NO: 33418 - RNA, 18 nt, Homo sapiens
cuuggucacauacaauua

SEQ ID NO: 33419 - RNA, 21 nt, Homo sapiens
agauguagauaaacucagaaa

SEQ ID NO: 33420 - RNA, 18 nt, Homo sapiens
uggaauauguaaauagaa

SEQ ID NO: 33421 - RNA, 12 nt, Homo sapiens
caucuuucacau

SEQ ID NO: 33422 - RNA, 14 nt, Homo sapiens
gguacauauuucuu

SEQ ID NO: 33423 - RNA, 20 nt, Homo sapiens
acaugauccugcaauuccac

SEQ ID NO: 33424 - RNA, 17 nt, Homo sapiens
uaacuagaauuuauuca

SEQ ID NO: 33425 - RNA, 11 nt, Homo sapiens
aagucuuccau

SEQ ID NO: 33426 - RNA, 18 nt, Homo sapiens
ucuaacucagaaacauca

SEQ ID NO: 33427 - RNA, 18 nt, Homo sapiens
gacaaagacaaauucugu

SEQ ID NO: 33428 - RNA, 16 nt, Homo sapiens
gcacuuuaaacauuua

SEQ ID NO: 33429 - RNA, 17 nt, Homo sapiens
aaacauagcaucucagg

SEQ ID NO: 33430 - RNA, 20 nt, Homo sapiens
aaauauuuuuaugugcaaua

SEQ ID NO: 33431 - RNA, 12 nt, Homo sapiens
ccaaacuggagc

SEQ ID NO: 33432 - RNA, 12 nt, Homo sapiens
caaauuccagaa

SEQ ID NO: 33433 - RNA, 15 nt, Homo sapiens
ccucuguugccaagg

SEQ ID NO: 33434 - RNA, 20 nt, Homo sapiens
augguggcgcgcaccuguaa

SEQ ID NO: 33435 - RNA, 12 nt, Homo sapiens
accagggacuga

SEQ ID NO: 33436 - RNA, 13 nt, Homo sapiens
uccuggacaguuu

SEQ ID NO: 33437 - RNA, 18 nt, Homo sapiens
uggaucucacaagcacuu

SEQ ID NO: 33438 - RNA, 17 nt, Homo sapiens
aggauagagugggacag

SEQ ID NO: 33439 - RNA, 20 nt, Homo sapiens
guacuccagccugggugaca

SEQ ID NO: 33440 - RNA, 22 nt, Homo sapiens
gaagaguggguuucacaaguga

SEQ ID NO: 33441 - RNA, 21 nt, Homo sapiens
aacucaaggaaaucuguguca

SEQ ID NO: 33442 - RNA, 15 nt, Homo sapiens
aagcagaacagugau

SEQ ID NO: 33443 - RNA, 23 nt, Homo sapiens
uuuuuccuuccuuaucacugaca

SEQ ID NO: 33444 - RNA, 17 nt, Homo sapiens
agaggagaaacuggaac

SEQ ID NO: 33445 - RNA, 19 nt, Homo sapiens
ugacuaauuaggcaaggcu

SEQ ID NO: 33446 - RNA, 23 nt, Homo sapiens
cagaagaaauucugcaagcuuuu

SEQ ID NO: 33447 - RNA, 16 nt, Homo sapiens
gaggcugaggcaagag

SEQ ID NO: 33448 - RNA, 18 nt, Homo sapiens
uucaaacuaauagaauua

SEQ ID NO: 33449 - RNA, 19 nt, Homo sapiens
uguagauaaacucagaaau

SEQ ID NO: 33450 - RNA, 13 nt, Homo sapiens
cauuugcacuauu

SEQ ID NO: 33451 - RNA, 16 nt, Homo sapiens
uggaacucaaggaaau

SEQ ID NO: 33452 - RNA, 14 nt, Homo sapiens
aaucagaucauuuc

SEQ ID NO: 33453 - RNA, 15 nt, Homo sapiens
cugagcgacagugag

SEQ ID NO: 33454 - RNA, 16 nt, Homo sapiens
cuauuacgugcaauac

SEQ ID NO: 33455 - RNA, 14 nt, Homo sapiens
guggcgacucuaua

SEQ ID NO: 33456 - RNA, 14 nt, Homo sapiens
gauagagugggaca

SEQ ID NO: 33457 - RNA, 15 nt, Homo sapiens
aagcccaauauuaua

SEQ ID NO: 33458 - RNA, 19 nt, Homo sapiens
auuuguuaaaauuaucaau

SEQ ID NO: 33459 - RNA, 19 nt, Homo sapiens
augggagaaucacuugaac

SEQ ID NO: 33460 - RNA, 23 nt, Homo sapiens
cuggcugggaguggcauguauga

SEQ ID NO: 33461 - RNA, 20 nt, Homo sapiens
agugaaaaucuacacuccag

SEQ ID NO: 33462 - RNA, 16 nt, Homo sapiens
cuuccucagcuguaga

SEQ ID NO: 33463 - RNA, 16 nt, Homo sapiens
uauugagcaccugcag

SEQ ID NO: 33464 - RNA, 16 nt, Homo sapiens
ucccugcagacaugag

SEQ ID NO: 33465 - RNA, 17 nt, Homo sapiens
uggguuguguguuuauu

SEQ ID NO: 33466 - RNA, 20 nt, Homo sapiens
aaaaccaaauuuguauuuaa

SEQ ID NO: 33467 - RNA, 23 nt, Homo sapiens
gaagagaauauuagcuuuacugu

SEQ ID NO: 33468 - RNA, 16 nt, Homo sapiens
aggcuuuaucucaggg

SEQ ID NO: 33469 - RNA, 15 nt, Homo sapiens
uguguucaguacaau

SEQ ID NO: 33470 - RNA, 15 nt, Homo sapiens
aucagcauuuuacua

SEQ ID NO: 33471 - RNA, 20 nt, Homo sapiens
uaaaauuaucaauaucuaau

SEQ ID NO: 33472 - RNA, 19 nt, Homo sapiens
gguuugccaugcuggccag

SEQ ID NO: 33473 - RNA, 19 nt, Homo sapiens
uggaaauaaaagauuguau

SEQ ID NO: 33474 - RNA, 15 nt, Homo sapiens
agagaaaagacauaa

SEQ ID NO: 33475 - RNA, 22 nt, Homo sapiens
agacuaugaggaauauuugcaa

SEQ ID NO: 33476 - RNA, 20 nt, Homo sapiens
cucuacuaaaaauacaaaaa

SEQ ID NO: 33477 - RNA, 16 nt, Homo sapiens
uuguuggauaaaucag

SEQ ID NO: 33478 - RNA, 20 nt, Homo sapiens
augaaaagauuaugaucuca

SEQ ID NO: 33479 - RNA, 14 nt, Homo sapiens
auuugcaagacaua

SEQ ID NO: 33480 - RNA, 14 nt, Homo sapiens
uuacagagacagaa

SEQ ID NO: 33481 - RNA, 11 nt, Homo sapiens
auuugagacag

SEQ ID NO: 33482 - RNA, 23 nt, Homo sapiens
guucuucccuuuuacauacugcu

SEQ ID NO: 33483 - RNA, 19 nt, Homo sapiens
accagagauaauaugagaa

SEQ ID NO: 33484 - RNA, 14 nt, Homo sapiens
uuuaaguaauuuca

SEQ ID NO: 33485 - RNA, 20 nt, Homo sapiens
cacagcugaacuuguugaga

SEQ ID NO: 33486 - RNA, 18 nt, Homo sapiens
cucaaaacuucagacaua

SEQ ID NO: 33487 - RNA, 13 nt, Homo sapiens
gagcgacagugag

SEQ ID NO: 33488 - RNA, 20 nt, Homo sapiens
uaagcacuuuaacacagugu

SEQ ID NO: 33489 - RNA, 23 nt, Homo sapiens
agccaaccugggggcuuuaggga

SEQ ID NO: 33490 - RNA, 16 nt, Homo sapiens
auaauacuagucuuau

SEQ ID NO: 33491 - RNA, 23 nt, Homo sapiens
aguuuuccuucucaucugugauu

SEQ ID NO: 33492 - RNA, 19 nt, Homo sapiens
aggagaaacuggaacucuc

SEQ ID NO: 33493 - RNA, 16 nt, Homo sapiens
auguguggcauuuuca

SEQ ID NO: 33494 - RNA, 20 nt, Homo sapiens
ggcgacaguuuuccuucuca

SEQ ID NO: 33495 - RNA, 13 nt, Homo sapiens
ccuuaaacucagg

SEQ ID NO: 33496 - RNA, 12 nt, Homo sapiens
gcagaacaguga

SEQ ID NO: 33497 - RNA, 17 nt, Homo sapiens
agauagguuaccaguaa

SEQ ID NO: 33498 - RNA, 22 nt, Homo sapiens
agaccuggucgucgucuugacu

SEQ ID NO: 33499 - RNA, 13 nt, Homo sapiens
cccaaaaggcaga

SEQ ID NO: 33500 - RNA, 18 nt, Homo sapiens
agcaacccaaauguucau

SEQ ID NO: 33501 - RNA, 18 nt, Homo sapiens
gguauauaaauuuuccca

SEQ ID NO: 33502 - RNA, 22 nt, Homo sapiens
ugacaacugugacuguacccaa

SEQ ID NO: 33503 - RNA, 17 nt, Homo sapiens
cuuguuagcaaaaugga

SEQ ID NO: 33504 - RNA, 17 nt, Homo sapiens
auuuauuaccucugaua

SEQ ID NO: 33505 - RNA, 17 nt, Homo sapiens
gaaugagaagaaugacu

SEQ ID NO: 33506 - RNA, 21 nt, Homo sapiens
cuuccaaacagaacuauggaa

SEQ ID NO: 33507 - RNA, 18 nt, Homo sapiens
cagaaagcagaacaguga

SEQ ID NO: 33508 - RNA, 20 nt, Homo sapiens
uuacugagcuucucugugaa

SEQ ID NO: 33509 - RNA, 15 nt, Homo sapiens
uauuacgugcaauac

SEQ ID NO: 33510 - RNA, 21 nt, Homo sapiens
gauaucaugccccuguacucc

SEQ ID NO: 33511 - RNA, 19 nt, Homo sapiens
aagcuguuuccauagggug

SEQ ID NO: 33512 - RNA, 18 nt, Homo sapiens
acaucaguuacucugaag

SEQ ID NO: 33513 - RNA, 14 nt, Homo sapiens
uguguuuuucacau

SEQ ID NO: 33514 - RNA, 21 nt, Homo sapiens
uaagcacuuuaacacaguguc

SEQ ID NO: 33515 - RNA, 21 nt, Homo sapiens
gcagugagcugauaucaugcc

SEQ ID NO: 33516 - RNA, 18 nt, Homo sapiens
ugauuccaccuacaugag

SEQ ID NO: 33517 - RNA, 18 nt, Homo sapiens
cugccaauauccuaauaa

SEQ ID NO: 33518 - RNA, 14 nt, Homo sapiens
cucacaagcacuuu

SEQ ID NO: 33519 - RNA, 15 nt, Homo sapiens
uccuuaucacugaca

SEQ ID NO: 33520 - RNA, 19 nt, Homo sapiens
aacaucaguuacucugaag

SEQ ID NO: 33521 - RNA, 15 nt, Homo sapiens
cuuaacucauugcaa

SEQ ID NO: 33522 - RNA, 20 nt, Homo sapiens
uuagacccucaugcugccaa

SEQ ID NO: 33523 - RNA, 15 nt, Homo sapiens
gacuuaaaaucuaau

SEQ ID NO: 33524 - RNA, 15 nt, Homo sapiens
aaacauguucacuua

SEQ ID NO: 33525 - RNA, 21 nt, Homo sapiens
auugaaaggcauucucugaag

SEQ ID NO: 33526 - RNA, 20 nt, Homo sapiens
ucucuacuaaaaauacaaaa

SEQ ID NO: 33527 - RNA, 15 nt, Homo sapiens
cauccagauagguua

SEQ ID NO: 33528 - RNA, 14 nt, Homo sapiens
aucaguuacucuga

SEQ ID NO: 33529 - RNA, 15 nt, Homo sapiens
ggaggcugaggcaag

SEQ ID NO: 33530 - RNA, 19 nt, Homo sapiens
auccagauagguuaccagu

SEQ ID NO: 33531 - RNA, 20 nt, Homo sapiens
accaaacccggccugauuaa

SEQ ID NO: 33532 - RNA, 13 nt, Homo sapiens
aguacagacuuuu

SEQ ID NO: 33533 - RNA, 12 nt, Homo sapiens
aaaugugcaaua

SEQ ID NO: 33534 - RNA, 15 nt, Homo sapiens
agcagaacagugauu

SEQ ID NO: 33535 - RNA, 17 nt, Homo sapiens
aucagcauuuuacuacu

SEQ ID NO: 33536 - RNA, 23 nt, Homo sapiens
auauuuuuuaugaaacauuacag

SEQ ID NO: 33537 - RNA, 22 nt, Homo sapiens
uucuauuacgugcaauacuuca

SEQ ID NO: 33538 - RNA, 19 nt, Homo sapiens
uacaaggcuuuaucucagg

SEQ ID NO: 33539 - RNA, 17 nt, Homo sapiens
aaaguucugcagauaaa

SEQ ID NO: 33540 - RNA, 18 nt, Homo sapiens
accaccacccuugccaug

SEQ ID NO: 33541 - RNA, 12 nt, Homo sapiens
cacuugaacccg

SEQ ID NO: 33542 - RNA, 17 nt, Homo sapiens
gaacgguaaauuucugu

SEQ ID NO: 33543 - RNA, 20 nt, Homo sapiens
gggaggcagagguugcagug

SEQ ID NO: 33544 - RNA, 21 nt, Homo sapiens
cugcaaucugagccagugcuu

SEQ ID NO: 33545 - RNA, 19 nt, Homo sapiens
gaagaaauuccaggaaaau

SEQ ID NO: 33546 - RNA, 17 nt, Homo sapiens
gcacuuuaacacagugu

SEQ ID NO: 33547 - RNA, 20 nt, Homo sapiens
ccuggaucucacaagcacuu

SEQ ID NO: 33548 - RNA, 22 nt, Homo sapiens
agcauauguuuuuguaaguuua

SEQ ID NO: 33549 - RNA, 23 nt, Homo sapiens
uccucuuucaaagguagccauca

SEQ ID NO: 33550 - RNA, 21 nt, Homo sapiens
cagccuggucaacauggugaa

SEQ ID NO: 33551 - RNA, 23 nt, Homo sapiens
gaauaguguuggaaaaugugcaa

SEQ ID NO: 33552 - RNA, 17 nt, Homo sapiens
cuguaaaauggagacac

SEQ ID NO: 33553 - RNA, 18 nt, Homo sapiens
cuuuaacacagugucugg

SEQ ID NO: 33554 - RNA, 13 nt, Homo sapiens
aauauuguugaca

SEQ ID NO: 33555 - RNA, 20 nt, Homo sapiens
caacuauauuaucaugcaaa

SEQ ID NO: 33556 - RNA, 13 nt, Homo sapiens
uagaauuuauuca

SEQ ID NO: 33557 - RNA, 21 nt, Homo sapiens
aauucuauuacgugcaauacu

SEQ ID NO: 33558 - RNA, 9 nt, Homo sapiens
uaugugcaa

SEQ ID NO: 33559 - RNA, 21 nt, Homo sapiens
gugaccugacagcccaagggu

SEQ ID NO: 33560 - RNA, 19 nt, Homo sapiens
ugcuggcuuaaaauguaau

SEQ ID NO: 33561 - RNA, 22 nt, Homo sapiens
ugcagauaaacaguagugauag

SEQ ID NO: 33562 - RNA, 14 nt, Homo sapiens
uuuaugauuccacc

SEQ ID NO: 33563 - RNA, 14 nt, Homo sapiens
uaguguacaugaaa

SEQ ID NO: 33564 - RNA, 16 nt, Homo sapiens
ccaaauuuguauuuaa

SEQ ID NO: 33565 - RNA, 14 nt, Homo sapiens
ucacauccuguguu

SEQ ID NO: 33566 - RNA, 21 nt, Homo sapiens
ucaauucuauuacgugcaaua

SEQ ID NO: 33567 - RNA, 21 nt, Homo sapiens
aaaaaugguuuaaauggucaa

SEQ ID NO: 33568 - RNA, 23 nt, Homo sapiens
uacauuguuugucugucuucaua

SEQ ID NO: 33569 - RNA, 16 nt, Homo sapiens
ccuucauguacaucca

SEQ ID NO: 33570 - RNA, 19 nt, Homo sapiens
cugucuggacuuuccagag

SEQ ID NO: 33571 - RNA, 20 nt, Homo sapiens
ggcuggagugcaguggcgca

SEQ ID NO: 33572 - RNA, 14 nt, Homo sapiens
gaaagaggaaugaa

SEQ ID NO: 33573 - RNA, 15 nt, Homo sapiens
gacuggccugcugga

SEQ ID NO: 33574 - RNA, 15 nt, Homo sapiens
ucacagguugaccaa

SEQ ID NO: 33575 - RNA, 15 nt, Homo sapiens
cauaaagucagugcc

SEQ ID NO: 33576 - RNA, 15 nt, Homo sapiens
agccaccaaacccgg

SEQ ID NO: 33577 - RNA, 14 nt, Homo sapiens
ccaaguuuauauac

SEQ ID NO: 33578 - RNA, 16 nt, Homo sapiens
cagagaccaguauucc

SEQ ID NO: 33579 - RNA, 14 nt, Homo sapiens
ggugacagagcaag

SEQ ID NO: 33580 - RNA, 14 nt, Homo sapiens
ugauuuuacaauug

SEQ ID NO: 33581 - RNA, 20 nt, Homo sapiens
acgugacuggccugcuggau

SEQ ID NO: 33582 - RNA, 17 nt, Homo sapiens
augaggaauauuugcaa

SEQ ID NO: 33583 - RNA, 20 nt, Homo sapiens
ucuggacuuuccagagacca

SEQ ID NO: 33584 - RNA, 20 nt, Homo sapiens
uaaaauauuuuuaugugcaa

SEQ ID NO: 33585 - RNA, 17 nt, Homo sapiens
auuugccaauuuacuuu

SEQ ID NO: 33586 - RNA, 20 nt, Homo sapiens
auauauguguuuuucacauu

SEQ ID NO: 33587 - RNA, 19 nt, Homo sapiens
gucagugcccaacuguuau

SEQ ID NO: 33588 - RNA, 19 nt, Homo sapiens
acaagacccaaaaggcaga

SEQ ID NO: 33589 - RNA, 14 nt, Homo sapiens
gaaauagugucuga

SEQ ID NO: 33590 - RNA, 22 nt, Homo sapiens
aagcuuccauuccaagccugac

SEQ ID NO: 33591 - RNA, 23 nt, Homo sapiens
cuccuggcuggggccuguugaag

SEQ ID NO: 33592 - RNA, 18 nt, Homo sapiens
ccaaaaucggaucugggg

SEQ ID NO: 33593 - RNA, 19 nt, Homo sapiens
guaauuuuaaguaauuuca

SEQ ID NO: 33594 - RNA, 19 nt, Homo sapiens
ugaaagcagggacuugaac

SEQ ID NO: 33595 - RNA, 23 nt, Homo sapiens
gaggauguguggcauuuucacuu

SEQ ID NO: 33596 - RNA, 18 nt, Homo sapiens
gcccccauuguggucaca

SEQ ID NO: 33597 - RNA, 13 nt, Homo sapiens
uuuauugccauga

SEQ ID NO: 33598 - RNA, 16 nt, Homo sapiens
uuguaccgcaauguga

SEQ ID NO: 33599 - RNA, 20 nt, Homo sapiens
cucaguguccucaucuguaa

SEQ ID NO: 33600 - RNA, 17 nt, Homo sapiens
gacgggguuugccaugc

SEQ ID NO: 33601 - RNA, 20 nt, Homo sapiens
acuaauagaauuaauggaau

SEQ ID NO: 33602 - RNA, 16 nt, Homo sapiens
cacugcagaagacagu

SEQ ID NO: 33603 - RNA, 20 nt, Homo sapiens
gccauggagguuaagcacuu

SEQ ID NO: 33604 - RNA, 18 nt, Homo sapiens
uguuggaaaaugugcaau

SEQ ID NO: 33605 - RNA, 10 nt, Homo sapiens
cauacugcug

SEQ ID NO: 33606 - RNA, 23 nt, Homo sapiens
gccagugcuuuaauggcauguca

SEQ ID NO: 33607 - RNA, 20 nt, Homo sapiens
cugucccugcagacaugaga

SEQ ID NO: 33608 - RNA, 19 nt, Homo sapiens
guugaaaaaguucugcaga

SEQ ID NO: 33609 - RNA, 13 nt, Homo sapiens
uuuacuuccucag

SEQ ID NO: 33610 - RNA, 11 nt, Homo sapiens
aaaagcacuua

SEQ ID NO: 33611 - RNA, 14 nt, Homo sapiens
cugcuuuaauuuca

SEQ ID NO: 33612 - RNA, 15 nt, Homo sapiens
uugacaacugugacu

SEQ ID NO: 33613 - RNA, 17 nt, Homo sapiens
aagugaaauaagccaga

SEQ ID NO: 33614 - RNA, 17 nt, Homo sapiens
aagugauacuauccagu

SEQ ID NO: 33615 - RNA, 12 nt, Homo sapiens
cacaagcacuuu

SEQ ID NO: 33616 - RNA, 15 nt, Homo sapiens
caaccacucauucaa

SEQ ID NO: 33617 - RNA, 13 nt, Homo sapiens
ggagaaacuggaa

SEQ ID NO: 33618 - RNA, 23 nt, Homo sapiens
gagcuugaaauagugucugauga

SEQ ID NO: 33619 - RNA, 14 nt, Homo sapiens
augaaugaauggcu

SEQ ID NO: 33620 - RNA, 20 nt, Homo sapiens
auugugccccugcacuccag

SEQ ID NO: 33621 - RNA, 19 nt, Homo sapiens
aaguauccuucagccugaa

SEQ ID NO: 33622 - RNA, 15 nt, Homo sapiens
guggcauuuucacuu

SEQ ID NO: 33623 - RNA, 18 nt, Homo sapiens
cucauuccccaaccacuu

SEQ ID NO: 33624 - RNA, 14 nt, Homo sapiens
uauuacgugcaaua

SEQ ID NO: 33625 - RNA, 17 nt, Homo sapiens
auggagguuaagcacuu

SEQ ID NO: 33626 - RNA, 12 nt, Homo sapiens
ucccuuuuacau

SEQ ID NO: 33627 - RNA, 16 nt, Homo sapiens
guaaucccagcacuuu

SEQ ID NO: 33628 - RNA, 14 nt, Homo sapiens
cuuauuguaccucu

SEQ ID NO: 33629 - RNA, 15 nt, Homo sapiens
ccuuuuuguuauuag

SEQ ID NO: 33630 - RNA, 11 nt, Homo sapiens
gcaacccaaau

SEQ ID NO: 33631 - RNA, 17 nt, Homo sapiens
auugaaaggcauucucu

SEQ ID NO: 33632 - RNA, 21 nt, Homo sapiens
aaagaaaaucaggcuggccaa

SEQ ID NO: 33633 - RNA, 17 nt, Homo sapiens
acaaaccucaagccagc

SEQ ID NO: 33634 - RNA, 15 nt, Homo sapiens
uuggaaaaugugcaa

SEQ ID NO: 33635 - RNA, 14 nt, Homo sapiens
uaaaguacagacuu

SEQ ID NO: 33636 - RNA, 19 nt, Homo sapiens
auuacgugcaauacuucaa

SEQ ID NO: 33637 - RNA, 16 nt, Homo sapiens
cuggagugcaguggcg

SEQ ID NO: 33638 - RNA, 18 nt, Homo sapiens
ugauccugcaauuccacu

SEQ ID NO: 33639 - RNA, 14 nt, Homo sapiens
acugucucacuuaa

SEQ ID NO: 33640 - RNA, 13 nt, Homo sapiens
cuaauuaggcaag

SEQ ID NO: 33641 - RNA, 22 nt, Homo sapiens
uuaauaaaccauuuuuacuugg

SEQ ID NO: 33642 - RNA, 20 nt, Homo sapiens
gauacaaugaacacuuauaa

SEQ ID NO: 33643 - RNA, 22 nt, Homo sapiens
cuguacuccagccugggugaca

SEQ ID NO: 33644 - RNA, 16 nt, Homo sapiens
uauuacgugcaauacu

SEQ ID NO: 33645 - RNA, 21 nt, Homo sapiens
aucauuucaaaacucauuucc

SEQ ID NO: 33646 - RNA, 19 nt, Homo sapiens
gccauaauuacuaugucau

SEQ ID NO: 33647 - RNA, 13 nt, Homo sapiens
agauaaacaguag

SEQ ID NO: 33648 - RNA, 21 nt, Homo sapiens
gacagaaagcagaacagugau

SEQ ID NO: 33649 - RNA, 19 nt, Homo sapiens
guuuuuccacuacugcuac

SEQ ID NO: 33650 - RNA, 21 nt, Homo sapiens
cucuauagacucuaggacaua

SEQ ID NO: 33651 - RNA, 20 nt, Homo sapiens
aaagauuucuugaguuuugu

SEQ ID NO: 33652 - RNA, 18 nt, Homo sapiens
ugccuugguauagcauau

SEQ ID NO: 33653 - RNA, 19 nt, Homo sapiens
cuuccaaacagaacuaugg

SEQ ID NO: 33654 - RNA, 20 nt, Homo sapiens
acauuacaguuagagauuuu

SEQ ID NO: 33655 - RNA, 14 nt, Homo sapiens
auuacaucuuucac

SEQ ID NO: 33656 - RNA, 16 nt, Homo sapiens
agaaucacuugaaccc

SEQ ID NO: 33657 - RNA, 16 nt, Homo sapiens
ucucuaacucagaaac

SEQ ID NO: 33658 - RNA, 18 nt, Homo sapiens
ucugauuuuccuggacag

SEQ ID NO: 33659 - RNA, 15 nt, Homo sapiens
gacaacugugacugu

SEQ ID NO: 33660 - RNA, 16 nt, Homo sapiens
ucuauuacgugcaaua

SEQ ID NO: 33661 - RNA, 18 nt, Homo sapiens
auuuuauuacaucuuuca

SEQ ID NO: 33662 - RNA, 16 nt, Homo sapiens
guggcauuuucacuuu

SEQ ID NO: 33663 - RNA, 20 nt, Homo sapiens
uauuuguacaccaauauuca

SEQ ID NO: 33664 - RNA, 11 nt, Homo sapiens
auuugcacuau

SEQ ID NO: 33665 - RNA, 15 nt, Homo sapiens
uagccacuucacuuu

SEQ ID NO: 33666 - RNA, 22 nt, Homo sapiens
aaaggccugucccugcagacau

SEQ ID NO: 33667 - RNA, 15 nt, Homo sapiens
auguuucgcugauau

SEQ ID NO: 33668 - RNA, 16 nt, Homo sapiens
cacgccuguaauccca

SEQ ID NO: 33669 - RNA, 22 nt, Homo sapiens
cugaugaaaacauagcaucuca

SEQ ID NO: 33670 - RNA, 20 nt, Homo sapiens
gccuguugaagaugcuugua

SEQ ID NO: 33671 - RNA, 21 nt, Homo sapiens
augaaaacauagcaucucagg

SEQ ID NO: 33672 - RNA, 19 nt, Homo sapiens
caagcuuuucaaaauugga

SEQ ID NO: 33673 - RNA, 14 nt, Homo sapiens
aacagaagcuucca

SEQ ID NO: 33674 - RNA, 15 nt, Homo sapiens
uccuauguaacugca

SEQ ID NO: 33675 - RNA, 20 nt, Homo sapiens
gccaaggcuggagugcagug

SEQ ID NO: 33676 - RNA, 17 nt, Homo sapiens
aacuggcaguuuuccau

SEQ ID NO: 33677 - RNA, 14 nt, Homo sapiens
gcaccaacuuugaa

SEQ ID NO: 33678 - RNA, 21 nt, Homo sapiens
ugaaaacauagcaucucagga

SEQ ID NO: 33679 - RNA, 19 nt, Homo sapiens
ggcuaagcaaaaugugaua

SEQ ID NO: 33680 - RNA, 12 nt, Homo sapiens
cacagugucugg

SEQ ID NO: 33681 - RNA, 22 nt, Homo sapiens
accagccuggucaacaugguga

SEQ ID NO: 33682 - RNA, 13 nt, Homo sapiens
ucauguacaucca

SEQ ID NO: 33683 - RNA, 12 nt, Homo sapiens
auagaauuaaca

SEQ ID NO: 33684 - RNA, 20 nt, Homo sapiens
gcccaucuccgucucccaaa

SEQ ID NO: 33685 - RNA, 19 nt, Homo sapiens
uguaaucccagcuacuugg

SEQ ID NO: 33686 - RNA, 13 nt, Homo sapiens
uuugcaagacaua

SEQ ID NO: 33687 - RNA, 21 nt, Homo sapiens
aaccucauuccccaaccacuu

SEQ ID NO: 33688 - RNA, 17 nt, Homo sapiens
ggcuuuagggaccugcu

SEQ ID NO: 33689 - RNA, 14 nt, Homo sapiens
gucucccaaagugc

SEQ ID NO: 33690 - RNA, 20 nt, Homo sapiens
gagcuguuuucccugaccuc

SEQ ID NO: 33691 - RNA, 23 nt, Homo sapiens
aaagcagggacuugaacccauau

SEQ ID NO: 33692 - RNA, 14 nt, Homo sapiens
uuaguguacaugaa

SEQ ID NO: 33693 - RNA, 17 nt, Homo sapiens
auuacaggcgugagcca

SEQ ID NO: 33694 - RNA, 14 nt, Homo sapiens
uaugacacaucucu

SEQ ID NO: 33695 - RNA, 23 nt, Homo sapiens
acagaagagugacauguuuacaa

SEQ ID NO: 33696 - RNA, 19 nt, Homo sapiens
gcacuuuaacacagugucu

SEQ ID NO: 33697 - RNA, 17 nt, Homo sapiens
uagaauauuuauuaccu

SEQ ID NO: 33698 - RNA, 13 nt, Homo sapiens
cuggagcucugcc

SEQ ID NO: 33699 - RNA, 18 nt, Homo sapiens
caguuccugagaccagcc

SEQ ID NO: 33700 - RNA, 15 nt, Homo sapiens
gaccugacagcccaa

SEQ ID NO: 33701 - RNA, 19 nt, Homo sapiens
aauauauuuuuagacucau

SEQ ID NO: 33702 - RNA, 17 nt, Homo sapiens
ugccccugcacuccagc

SEQ ID NO: 33703 - RNA, 19 nt, Homo sapiens
agguauuuauugagcaccu

SEQ ID NO: 33704 - RNA, 21 nt, Homo sapiens
auuacaaggcuuuaucucagg

SEQ ID NO: 33705 - RNA, 14 nt, Homo sapiens
aauugacacuuaaa

SEQ ID NO: 33706 - RNA, 18 nt, Homo sapiens
uaugacgugacuggccug

SEQ ID NO: 33707 - RNA, 10 nt, Homo sapiens
uuugccaugc

SEQ ID NO: 33708 - RNA, 15 nt, Homo sapiens
uuaaagaauuuucaa

SEQ ID NO: 33709 - RNA, 15 nt, Homo sapiens
aaugguuccauucuc

SEQ ID NO: 33710 - RNA, 15 nt, Homo sapiens
cuuaugaaacuaaga

SEQ ID NO: 33711 - RNA, 18 nt, Homo sapiens
acuugaugauacaaugaa

SEQ ID NO: 33712 - RNA, 19 nt, Homo sapiens
aagguauuuuaaucaccaa

SEQ ID NO: 33713 - RNA, 21 nt, Homo sapiens
uauuuauaauuccuauauccu

SEQ ID NO: 33714 - RNA, 13 nt, Homo sapiens
cacugcauacaau

SEQ ID NO: 33715 - RNA, 14 nt, Homo sapiens
ugccuguaaucaca

SEQ ID NO: 33716 - RNA, 20 nt, Homo sapiens
caacuugaauaauacaccag

SEQ ID NO: 33717 - RNA, 19 nt, Homo sapiens
ucacaaccacucauucaaa

SEQ ID NO: 33718 - RNA, 21 nt, Homo sapiens
gcgcaaucuuaacucauugca

SEQ ID NO: 33719 - RNA, 15 nt, Homo sapiens
gaggagaaacuggaa

SEQ ID NO: 33720 - RNA, 21 nt, Homo sapiens
ccaaaagguauuuuaaucacc

SEQ ID NO: 33721 - RNA, 19 nt, Homo sapiens
uggagcuugaaauaguguc

SEQ ID NO: 33722 - RNA, 13 nt, Homo sapiens
cgaagucuuccau

SEQ ID NO: 33723 - RNA, 20 nt, Homo sapiens
uaaucccagcuacuugggag

SEQ ID NO: 33724 - RNA, 20 nt, Homo sapiens
caagcuuuucaaaauuggac

SEQ ID NO: 33725 - RNA, 18 nt, Homo sapiens
agcaagacucugucucaa

SEQ ID NO: 33726 - RNA, 13 nt, Homo sapiens
ccaagccugacca

SEQ ID NO: 33727 - RNA, 17 nt, Homo sapiens
aaaauuaucaauaucua

SEQ ID NO: 33728 - RNA, 11 nt, Homo sapiens
caagaaugaga

SEQ ID NO: 33729 - RNA, 17 nt, Homo sapiens
cagucacauuccaagcc

SEQ ID NO: 33730 - RNA, 19 nt, Homo sapiens
ugauacuuuuuucauuauu

SEQ ID NO: 33731 - RNA, 14 nt, Homo sapiens
acuaauuaggcaag

SEQ ID NO: 33732 - RNA, 23 nt, Homo sapiens
aaaaggccugucccugcagacau

SEQ ID NO: 33733 - RNA, 11 nt, Homo sapiens
augugcaauaa

SEQ ID NO: 33734 - RNA, 19 nt, Homo sapiens
uaaacacuaaaaaggcaug

SEQ ID NO: 33735 - RNA, 16 nt, Homo sapiens
aacagaagcuuccauu

SEQ ID NO: 33736 - RNA, 14 nt, Homo sapiens
ccucaugcugccaa

SEQ ID NO: 33737 - RNA, 21 nt, Homo sapiens
uaauuuaucuugucucugggc

SEQ ID NO: 33738 - RNA, 21 nt, Homo sapiens
aagcaaagacuaugaggaaua

SEQ ID NO: 33739 - RNA, 23 nt, Homo sapiens
agagcccuucaugcauuugcacu

SEQ ID NO: 33740 - RNA, 17 nt, Homo sapiens
gagguacugagagugaa

SEQ ID NO: 33741 - RNA, 16 nt, Homo sapiens
augcauuugcacuauu

SEQ ID NO: 33742 - RNA, 20 nt, Homo sapiens
gaaaaucuacacuccaguga

SEQ ID NO: 33743 - RNA, 16 nt, Homo sapiens
uauuacaucuuucaca

SEQ ID NO: 33744 - RNA, 19 nt, Homo sapiens
uagcgcagccaugugauua

SEQ ID NO: 33745 - RNA, 16 nt, Homo sapiens
ucaugcaaaugcugua

SEQ ID NO: 33746 - RNA, 18 nt, Homo sapiens
guuugaaaauaugccugc

SEQ ID NO: 33747 - RNA, 22 nt, Homo sapiens
gaccuuuguagccacuucacuu

SEQ ID NO: 33748 - RNA, 16 nt, Homo sapiens
cacugugggcuuuuau

SEQ ID NO: 33749 - RNA, 21 nt, Homo sapiens
ucuagcaaauguuaugcauaa

SEQ ID NO: 33750 - RNA, 21 nt, Homo sapiens
ccugucccugcagacaugaga

SEQ ID NO: 33751 - RNA, 21 nt, Homo sapiens
uugccaaggcuggagugcagu

SEQ ID NO: 33752 - RNA, 13 nt, Homo sapiens
cuuugaagucuga

SEQ ID NO: 33753 - RNA, 17 nt, Homo sapiens
auccaaagcugaauaca

SEQ ID NO: 33754 - RNA, 15 nt, Homo sapiens
guuuuuaagcuguuu

SEQ ID NO: 33755 - RNA, 15 nt, Homo sapiens
uggaaaaugugcaau

SEQ ID NO: 33756 - RNA, 12 nt, Homo sapiens
uuaugugcaaua

SEQ ID NO: 33757 - RNA, 20 nt, Homo sapiens
caaaugagccggagccccuu

SEQ ID NO: 33758 - RNA, 21 nt, Homo sapiens
uguaaugaaaaugaauaucua

SEQ ID NO: 33759 - RNA, 15 nt, Homo sapiens
cuuugaagucugauu

SEQ ID NO: 33760 - RNA, 16 nt, Homo sapiens
uuccuauguaacugca

SEQ ID NO: 33761 - RNA, 13 nt, Homo sapiens
aaucugcacugug

SEQ ID NO: 33762 - RNA, 21 nt, Homo sapiens
accuguugauagcaagugaau

SEQ ID NO: 33763 - RNA, 17 nt, Homo sapiens
cuaaaucaauucuauua

SEQ ID NO: 33764 - RNA, 15 nt, Homo sapiens
uggaacucaaggaaa

SEQ ID NO: 33765 - RNA, 11 nt, Homo sapiens
uaaaagcacuu

SEQ ID NO: 33766 - RNA, 18 nt, Homo sapiens
auaaacaguagugauagu

SEQ ID NO: 33767 - RNA, 12 nt, Homo sapiens
gaagucuuccau

SEQ ID NO: 33768 - RNA, 14 nt, Homo sapiens
gcagcuuauucaca

SEQ ID NO: 33769 - RNA, 16 nt, Homo sapiens
uacauuuccaaauuca

SEQ ID NO: 33770 - RNA, 10 nt, Homo sapiens
ggggcuuccu

SEQ ID NO: 33771 - RNA, 20 nt, Homo sapiens
cugaagggcaucaugcaucu

SEQ ID NO: 33772 - RNA, 19 nt, Homo sapiens
caaucuuaacucauugcaa

SEQ ID NO: 33773 - RNA, 16 nt, Homo sapiens
caaauguuaugcauaa

SEQ ID NO: 33774 - RNA, 21 nt, Homo sapiens
gagccaccaaacccggccuga

SEQ ID NO: 33775 - RNA, 21 nt, Homo sapiens
acgccuguaaucccagcacuu

SEQ ID NO: 33776 - RNA, 22 nt, Homo sapiens
gaauaguguuggaaaaugugca

SEQ ID NO: 33777 - RNA, 17 nt, Homo sapiens
agacagcaggucucaug

SEQ ID NO: 33778 - RNA, 17 nt, Homo sapiens
ccuuuuacauacugcug

SEQ ID NO: 33779 - RNA, 17 nt, Homo sapiens
agaaucagaucauuuca

SEQ ID NO: 33780 - RNA, 19 nt, Homo sapiens
cacuaaaaaggcauguaau

SEQ ID NO: 33781 - RNA, 19 nt, Homo sapiens
ccaaguuuauauacaauua

SEQ ID NO: 33782 - RNA, 18 nt, Homo sapiens
acuaaauugacacuuaaa

SEQ ID NO: 33783 - RNA, 13 nt, Homo sapiens
gacaacugugacu

SEQ ID NO: 33784 - RNA, 18 nt, Homo sapiens
cagccaggcggcuggaau

SEQ ID NO: 33785 - RNA, 14 nt, Homo sapiens
agaacuugaaugug

SEQ ID NO: 33786 - RNA, 20 nt, Homo sapiens
cugcauugagaacugcauau

SEQ ID NO: 33787 - RNA, 15 nt, Homo sapiens
gaauuaacacaugau

SEQ ID NO: 33788 - RNA, 13 nt, Homo sapiens
aaucugagccagu

SEQ ID NO: 33789 - RNA, 12 nt, Homo sapiens
acauacaauuau

SEQ ID NO: 33790 - RNA, 14 nt, Homo sapiens
acugcauacaaucu

SEQ ID NO: 33791 - RNA, 15 nt, Homo sapiens
ggcuuuaucucaggg

SEQ ID NO: 33792 - RNA, 23 nt, Homo sapiens
uuacuauuuauugcugaaugacu

SEQ ID NO: 33793 - RNA, 19 nt, Homo sapiens
ugagugccuguaaucacag

SEQ ID NO: 33794 - RNA, 17 nt, Homo sapiens
auaugccugcaaucuga

SEQ ID NO: 33795 - RNA, 21 nt, Homo sapiens
gauagguuaccaguaacggaa

SEQ ID NO: 33796 - RNA, 22 nt, Homo sapiens
aauaguguuggaaaaugugcaa

SEQ ID NO: 33797 - RNA, 16 nt, Homo sapiens
uaaaguacagacuuuu

SEQ ID NO: 33798 - RNA, 17 nt, Homo sapiens
caagugaaaaacaucca

SEQ ID NO: 33799 - RNA, 13 nt, Homo sapiens
aagcaacaucuag

SEQ ID NO: 33800 - RNA, 20 nt, Homo sapiens
gaugggagaaucacuugaac

SEQ ID NO: 33801 - RNA, 24 nt, Homo sapiens
ggacuugggcgggacacaggcucc

SEQ ID NO: 33802 - RNA, 19 nt, Homo sapiens
cagugagccgagauugugc

SEQ ID NO: 33803 - RNA, 17 nt, Homo sapiens
uguagccacuucacuuu

SEQ ID NO: 33804 - RNA, 16 nt, Homo sapiens
uggcacuugggacaaa

SEQ ID NO: 33805 - RNA, 14 nt, Homo sapiens
ggccaacuaggcag

SEQ ID NO: 33806 - RNA, 18 nt, Homo sapiens
augcuuguauuuuacuuu

SEQ ID NO: 33807 - RNA, 23 nt, Homo sapiens
aauauguaaauagaaacguguau

SEQ ID NO: 33808 - RNA, 22 nt, Homo sapiens
auguucacuuauugacuauuau

SEQ ID NO: 33809 - RNA, 19 nt, Homo sapiens
aauucuauuacgugcaaua

SEQ ID NO: 33810 - RNA, 14 nt, Homo sapiens
auauaauaugcaca

SEQ ID NO: 33811 - RNA, 15 nt, Homo sapiens
cuauguggcuguauc

SEQ ID NO: 33812 - RNA, 13 nt, Homo sapiens
uacauacugcugu

SEQ ID NO: 33813 - RNA, 14 nt, Homo sapiens
ucauacauguuaca

SEQ ID NO: 33814 - RNA, 20 nt, Homo sapiens
uccuagcgcagccaugugau

SEQ ID NO: 33815 - RNA, 12 nt, Homo sapiens
gugucaggugac

SEQ ID NO: 33816 - RNA, 22 nt, Homo sapiens
uacaauuauuuuuacaguucuc

SEQ ID NO: 33817 - RNA, 14 nt, Homo sapiens
agauaauaugagaa

SEQ ID NO: 33818 - RNA, 16 nt, Homo sapiens
guauuuuacuuuucca

SEQ ID NO: 33819 - RNA, 14 nt, Homo sapiens
uguaauugcuuguu

SEQ ID NO: 33820 - RNA, 13 nt, Homo sapiens
cauagagacuuug

SEQ ID NO: 33821 - RNA, 15 nt, Homo sapiens
cucaguguccucauc

SEQ ID NO: 33822 - RNA, 17 nt, Homo sapiens
acagagaaaagacauaa

SEQ ID NO: 33823 - RNA, 22 nt, Homo sapiens
aauauuguugacaacugugacu

SEQ ID NO: 33824 - RNA, 22 nt, Homo sapiens
cugcauacucauuaggauggcu

SEQ ID NO: 33825 - RNA, 15 nt, Homo sapiens
uaaugaaaaugaaua

SEQ ID NO: 33826 - RNA, 21 nt, Homo sapiens
uuucaccuguuuuuaagcugu

SEQ ID NO: 33827 - RNA, 15 nt, Homo sapiens
gagguuaagcacuuu

SEQ ID NO: 33828 - RNA, 22 nt, Homo sapiens
ccgcaaugugacuuaaugccac

SEQ ID NO: 33829 - RNA, 23 nt, Homo sapiens
aucuuguuuuuccacuacugcua

SEQ ID NO: 33830 - RNA, 16 nt, Homo sapiens
caccaaacccggccug

SEQ ID NO: 33831 - RNA, 17 nt, Homo sapiens
ugacaacugugacugua

SEQ ID NO: 33832 - RNA, 15 nt, Homo sapiens
ugacugucucacuua

SEQ ID NO: 33833 - RNA, 20 nt, Homo sapiens
uagagugggacaguuccuga

SEQ ID NO: 33834 - RNA, 14 nt, Homo sapiens
agaaucacuugaac

SEQ ID NO: 33835 - RNA, 13 nt, Homo sapiens
ucuucacagucac

SEQ ID NO: 33836 - RNA, 20 nt, Homo sapiens
uaaauguaucuuauucacau

SEQ ID NO: 33837 - RNA, 17 nt, Homo sapiens
aaauagugucugaugaa

SEQ ID NO: 33838 - RNA, 19 nt, Homo sapiens
accuguuuuuaagcuguuu

SEQ ID NO: 33839 - RNA, 13 nt, Homo sapiens
ccuguaaucacag

SEQ ID NO: 33840 - RNA, 18 nt, Homo sapiens
caaccuccaccuucuggg

SEQ ID NO: 33841 - RNA, 21 nt, Homo sapiens
agaguucugucuggacuuucc

SEQ ID NO: 33842 - RNA, 16 nt, Homo sapiens
ucccaaagugcuggga

SEQ ID NO: 33843 - RNA, 23 nt, Homo sapiens
acucauugcaaccuccaccuucu

SEQ ID NO: 33844 - RNA, 15 nt, Homo sapiens
ucuuggucacauaca

SEQ ID NO: 33845 - RNA, 15 nt, Homo sapiens
aagagaucaagccau

SEQ ID NO: 33846 - RNA, 17 nt, Homo sapiens
auagcagcuuauucaca

SEQ ID NO: 33847 - RNA, 23 nt, Homo sapiens
uaaugaaaaugaauaucuauuaa

SEQ ID NO: 33848 - RNA, 12 nt, Homo sapiens
acagaacuugaa

SEQ ID NO: 33849 - RNA, 17 nt, Homo sapiens
acuuaaaaucuaauuca

SEQ ID NO: 33850 - RNA, 13 nt, Homo sapiens
uccacuacugcua

SEQ ID NO: 33851 - RNA, 14 nt, Homo sapiens
acaugauccugcaa

SEQ ID NO: 33852 - RNA, 23 nt, Homo sapiens
uguauuuuauuacaucuuucaca

SEQ ID NO: 33853 - RNA, 21 nt, Homo sapiens
caauucuauuacgugcaauac

SEQ ID NO: 33854 - RNA, 13 nt, Homo sapiens
guuuucugacuaa

SEQ ID NO: 33855 - RNA, 16 nt, Homo sapiens
uccaagccucaugucc

SEQ ID NO: 33856 - RNA, 13 nt, Homo sapiens
auaaaagcacuua

SEQ ID NO: 33857 - RNA, 18 nt, Homo sapiens
aguugauuuuacaauuga

SEQ ID NO: 33858 - RNA, 21 nt, Homo sapiens
cuucuuggucucagugucaau

SEQ ID NO: 33859 - RNA, 12 nt, Homo sapiens
uggucucagugu

SEQ ID NO: 33860 - RNA, 20 nt, Homo sapiens
gauugugccccugcacucca

SEQ ID NO: 33861 - RNA, 13 nt, Homo sapiens
cuugaugauacaa

SEQ ID NO: 33862 - RNA, 21 nt, Homo sapiens
uucuucuuggucucaguguca

SEQ ID NO: 33863 - RNA, 13 nt, Homo sapiens
uuuaugcauacag

SEQ ID NO: 33864 - RNA, 14 nt, Homo sapiens
ugcauacaguaauu

SEQ ID NO: 33865 - RNA, 15 nt, Homo sapiens
gcaaugugacuuaau

SEQ ID NO: 33866 - RNA, 19 nt, Homo sapiens
gcuguuuuuauauauguga

SEQ ID NO: 33867 - RNA, 16 nt, Homo sapiens
uaggaacgguaaauuu

SEQ ID NO: 33868 - RNA, 12 nt, Homo sapiens
uacaucuuucac

SEQ ID NO: 33869 - RNA, 15 nt, Homo sapiens
caucuguaaaaugga

SEQ ID NO: 33870 - RNA, 17 nt, Homo sapiens
aauugaaaggcauucuc

SEQ ID NO: 33871 - RNA, 18 nt, Homo sapiens
auucccuuuugcugccuc

SEQ ID NO: 33872 - RNA, 19 nt, Homo sapiens
auuacaaggcuuuaucuca

SEQ ID NO: 33873 - RNA, 14 nt, Homo sapiens
uaacugcauugaga

SEQ ID NO: 33874 - RNA, 22 nt, Homo sapiens
gagaaaccuuauuguaccucuc

SEQ ID NO: 33875 - RNA, 23 nt, Homo sapiens
uauaagugaagugauacuaucca

SEQ ID NO: 33876 - RNA, 23 nt, Homo sapiens
cuauuauagaauggaacucaagg

SEQ ID NO: 33877 - RNA, 19 nt, Homo sapiens
caacccaaauguucaucaa

SEQ ID NO: 33878 - RNA, 15 nt, Homo sapiens
aguguaaguucacaa

SEQ ID NO: 33879 - RNA, 13 nt, Homo sapiens
agaaucacuugaa

SEQ ID NO: 33880 - RNA, 16 nt, Homo sapiens
uuauuacaucuuucac

SEQ ID NO: 33881 - RNA, 22 nt, Homo sapiens
gugugaccacugcagaagacag

SEQ ID NO: 33882 - RNA, 22 nt, Homo sapiens
cuuuaauuucaugaaaagauua

SEQ ID NO: 33883 - RNA, 18 nt, Homo sapiens
aggugagcaggugaugcc

SEQ ID NO: 33884 - RNA, 21 nt, Homo sapiens
acaauuauuuuuacaguucuc

SEQ ID NO: 33885 - RNA, 17 nt, Homo sapiens
gaaaauaaaagcacuua

SEQ ID NO: 33886 - RNA, 20 nt, Homo sapiens
cgcgcaccuguaaucccagc

SEQ ID NO: 33887 - RNA, 19 nt, Homo sapiens
acaaauuuacagagacaga

SEQ ID NO: 33888 - RNA, 15 nt, Homo sapiens
gcauuuucacuuuug

SEQ ID NO: 33889 - RNA, 23 nt, Homo sapiens
gagaaaccagggagccccuuuga

SEQ ID NO: 33890 - RNA, 13 nt, Homo sapiens
agaauggaacuca

SEQ ID NO: 33891 - RNA, 14 nt, Homo sapiens
caguccucuuucaa

SEQ ID NO: 33892 - RNA, 15 nt, Homo sapiens
auacuauccaguuac

SEQ ID NO: 33893 - RNA, 16 nt, Homo sapiens
aauugacccacaagaa

SEQ ID NO: 33894 - RNA, 20 nt, Homo sapiens
ugcugggaauuacaggcgug

SEQ ID NO: 33895 - RNA, 13 nt, Homo sapiens
cagcuuauucaca

SEQ ID NO: 33896 - RNA, 23 nt, Homo sapiens
auaauagguuugugacuuuccua

SEQ ID NO: 33897 - RNA, 20 nt, Homo sapiens
gugaaauaagccagacauca

SEQ ID NO: 33898 - RNA, 13 nt, Homo sapiens
gaaaaacauuuca

SEQ ID NO: 33899 - RNA, 15 nt, Homo sapiens
acagaggaucugcuu

SEQ ID NO: 33900 - RNA, 15 nt, Homo sapiens
acagucacauuccaa

SEQ ID NO: 33901 - RNA, 16 nt, Homo sapiens
cauaauuacuauguca

SEQ ID NO: 33902 - RNA, 19 nt, Homo sapiens
uuccaggaaaaucugcacu

SEQ ID NO: 33903 - RNA, 16 nt, Homo sapiens
gaaaggcauucucuga

SEQ ID NO: 33904 - RNA, 18 nt, Homo sapiens
uuuguuauuuuuccccaa

SEQ ID NO: 33905 - RNA, 15 nt, Homo sapiens
uguuuuuaaacugga

SEQ ID NO: 33906 - RNA, 16 nt, Homo sapiens
ugucucaguccaugaa

SEQ ID NO: 33907 - RNA, 22 nt, Homo sapiens
caguaacggaacaguauccagu

SEQ ID NO: 33908 - RNA, 18 nt, Homo sapiens
acacuaaaaaggcaugua

SEQ ID NO: 33909 - RNA, 20 nt, Homo sapiens
agaaaccuuauuguaccucu

SEQ ID NO: 33910 - RNA, 20 nt, Homo sapiens
ccaaaguaucaggacgagaa

SEQ ID NO: 33911 - RNA, 16 nt, Homo sapiens
uguaaaauggagacac

SEQ ID NO: 33912 - RNA, 21 nt, Homo sapiens
cuuagacccucaugcugccaa

SEQ ID NO: 33913 - RNA, 21 nt, Homo sapiens
ugugacuuaaugccacuaaau

SEQ ID NO: 33914 - RNA, 13 nt, Homo sapiens
ccucuguugccaa

SEQ ID NO: 33915 - RNA, 20 nt, Homo sapiens
gaaaccuuauuguaccucuc

SEQ ID NO: 33916 - RNA, 18 nt, Homo sapiens
caggauagagugggacag

SEQ ID NO: 33917 - RNA, 23 nt, Homo sapiens
ucagaaauuuaauucauguuucu

SEQ ID NO: 33918 - RNA, 20 nt, Homo sapiens
ggucaauuuuguuauguaua

SEQ ID NO: 33919 - RNA, 23 nt, Homo sapiens
gugaauuuuucucuaacucagaa

SEQ ID NO: 33920 - RNA, 14 nt, Homo sapiens
cacaaaauugggaa

SEQ ID NO: 33921 - RNA, 22 nt, Homo sapiens
agaagugaaaaucuacacucca

SEQ ID NO: 33922 - RNA, 19 nt, Homo sapiens
uguaaucacagcuacuugg

SEQ ID NO: 33923 - RNA, 21 nt, Homo sapiens
ugaggcggguggaucacuuga

SEQ ID NO: 33924 - RNA, 23 nt, Homo sapiens
auuucacuugaugauacaaugaa

SEQ ID NO: 33925 - RNA, 20 nt, Homo sapiens
uuaugaaccuuuacauccag

SEQ ID NO: 33926 - RNA, 23 nt, Homo sapiens
uaugcaaccuuuggaugcacuuu

SEQ ID NO: 33927 - RNA, 22 nt, Homo sapiens
uaauggaauauguaaauagaaa

SEQ ID NO: 33928 - RNA, 21 nt, Homo sapiens
uggcuaagcaaaaugugauau

SEQ ID NO: 33929 - RNA, 18 nt, Homo sapiens
uucccuugaugaagaagu

SEQ ID NO: 33930 - RNA, 11 nt, Homo sapiens
uuccgcauccu

SEQ ID NO: 33931 - RNA, 18 nt, Homo sapiens
uucccgcuguuccucgcc

SEQ ID NO: 33932 - RNA, 17 nt, Homo sapiens
uuccaucaaggguacac

SEQ ID NO: 33933 - RNA, 22 nt, Homo sapiens
uucaugaaggggcggcggcccu

SEQ ID NO: 33934 - RNA, 13 nt, Homo sapiens
uuagaaacacaac

SEQ ID NO: 33935 - RNA, 13 nt, Homo sapiens
uguuccucgccac

SEQ ID NO: 33936 - RNA, 14 nt, Homo sapiens
uguuccucgccacg

SEQ ID NO: 33937 - RNA, 12 nt, Homo sapiens
uguucgcgcgcc

SEQ ID NO: 33938 - RNA, 16 nt, Homo sapiens
uguuuagaaacacaac

SEQ ID NO: 33939 - RNA, 12 nt, Homo sapiens
uuggagaagaac

SEQ ID NO: 33940 - RNA, 15 nt, Homo sapiens
uucgcgcgccuccgc

SEQ ID NO: 33941 - RNA, 12 nt, Homo sapiens
uuccucccggcc

SEQ ID NO: 33942 - RNA, 16 nt, Homo sapiens
uuccucccggccgcgc

SEQ ID NO: 33943 - RNA, 12 nt, Homo sapiens
uucugaagaaga

SEQ ID NO: 33944 - RNA, 18 nt, Homo sapiens
uuucaugaaggggcggcg

SEQ ID NO: 33945 - RNA, 14 nt, Homo sapiens
uuucccaacuccag

SEQ ID NO: 33946 - RNA, 12 nt, Homo sapiens
uggcgcuggcug

SEQ ID NO: 33947 - RNA, 13 nt, Homo sapiens
uggcgcuggcugc

SEQ ID NO: 33948 - RNA, 15 nt, Homo sapiens
uggcgcuggcugcgc

SEQ ID NO: 33949 - RNA, 23 nt, Homo sapiens
uggcaccgcuguacgcgagcgcg

SEQ ID NO: 33950 - RNA, 18 nt, Homo sapiens
ugcucauggaauuggagc

SEQ ID NO: 33951 - RNA, 12 nt, Homo sapiens
ugcugguggcgc

SEQ ID NO: 33952 - RNA, 13 nt, Homo sapiens
ugcugguggcgcu

SEQ ID NO: 33953 - RNA, 17 nt, Homo sapiens
ugcugguggcgcuggcu

SEQ ID NO: 33954 - RNA, 22 nt, Homo sapiens
ugcugguggcgcuggcugcgcu

SEQ ID NO: 33955 - RNA, 14 nt, Homo sapiens
uggaauuggagcuc

SEQ ID NO: 33956 - RNA, 18 nt, Homo sapiens
uggaauuggagcucgugg

SEQ ID NO: 33957 - RNA, 21 nt, Homo sapiens
uggucuaccuguucgcgcgcc

SEQ ID NO: 33958 - RNA, 10 nt, Homo sapiens
ugugaagcaa

SEQ ID NO: 33959 - RNA, 11 nt, Homo sapiens
ugugaagcaaa

SEQ ID NO: 33960 - RNA, 11 nt, Homo sapiens
ugugacucauu

SEQ ID NO: 33961 - RNA, 12 nt, Homo sapiens
ugugcggccugg

SEQ ID NO: 33962 - RNA, 13 nt, Homo sapiens
ugguggcgcuggc

SEQ ID NO: 33963 - RNA, 15 nt, Homo sapiens
uggcugcgcucggcc

SEQ ID NO: 33964 - RNA, 17 nt, Homo sapiens
uggcugcgcucggccug

SEQ ID NO: 33965 - RNA, 23 nt, Homo sapiens
uggcugcgcucggccugcucgcc

SEQ ID NO: 33966 - RNA, 18 nt, Homo sapiens
uggcugcugguggcgcug

SEQ ID NO: 33967 - RNA, 23 nt, Homo sapiens
uggcugcugguggcgcuggcugc

SEQ ID NO: 33968 - RNA, 18 nt, Homo sapiens
uggcgcuggcugcgcucg

SEQ ID NO: 33969 - RNA, 19 nt, Homo sapiens
uggcgcuggcugcgcucgg

SEQ ID NO: 33970 - RNA, 20 nt, Homo sapiens
uggcgcuggcugcgcucggc

SEQ ID NO: 33971 - RNA, 21 nt, Homo sapiens
uggcgcuggcugcgcucggcc

SEQ ID NO: 33972 - RNA, 16 nt, Homo sapiens
ugggccugagaccaag

SEQ ID NO: 33973 - RNA, 17 nt, Homo sapiens
ugggccugagaccaagg

SEQ ID NO: 33974 - RNA, 18 nt, Homo sapiens
ugggccugagaccaaggc

SEQ ID NO: 33975 - RNA, 19 nt, Homo sapiens
ugggccugagaccaaggcc

SEQ ID NO: 33976 - RNA, 17 nt, Homo sapiens
uggggcugaugcaguug

SEQ ID NO: 33977 - RNA, 11 nt, Homo sapiens
ugggucgccgg

SEQ ID NO: 33978 - RNA, 14 nt, Homo sapiens
ugggucgccggcau

SEQ ID NO: 33979 - RNA, 18 nt, Homo sapiens
ugggucgccggcaucuuc

SEQ ID NO: 33980 - RNA, 21 nt, Homo sapiens
ucuucuuucaugaaggggcgg

SEQ ID NO: 33981 - RNA, 17 nt, Homo sapiens
ucuggcugcugguggcg

SEQ ID NO: 33982 - RNA, 12 nt, Homo sapiens
ucugggucgccg

SEQ ID NO: 33983 - RNA, 15 nt, Homo sapiens
ucugggucgccggca

SEQ ID NO: 33984 - RNA, 16 nt, Homo sapiens
ucugggucgccggcau

SEQ ID NO: 33985 - RNA, 17 nt, Homo sapiens
ucugggucgccggcauc

SEQ ID NO: 33986 - RNA, 22 nt, Homo sapiens
uccucggacggcuccggacgcu

SEQ ID NO: 33987 - RNA, 14 nt, Homo sapiens
ucggacggcuccgg

SEQ ID NO: 33988 - RNA, 15 nt, Homo sapiens
ucggccugcucgccc

SEQ ID NO: 33989 - RNA, 16 nt, Homo sapiens
ucggccugcucgccca

SEQ ID NO: 33990 - RNA, 17 nt, Homo sapiens
ucggccugcucgcccac

SEQ ID NO: 33991 - RNA, 12 nt, Homo sapiens
ucuagugagcag

SEQ ID NO: 33992 - RNA, 12 nt, Homo sapiens
uccucccggccg

SEQ ID NO: 33993 - RNA, 14 nt, Homo sapiens
uccucccggccgcg

SEQ ID NO: 33994 - RNA, 20 nt, Homo sapiens
uccucccggccgcgcugcgc

SEQ ID NO: 33995 - RNA, 21 nt, Homo sapiens
uccucccggccgcgcugcgcg

SEQ ID NO: 33996 - RNA, 13 nt, Homo sapiens
uccucgccacgcu

SEQ ID NO: 33997 - RNA, 18 nt, Homo sapiens
ucgcaggaccaucccggc

SEQ ID NO: 33998 - RNA, 20 nt, Homo sapiens
ucgcaggaccaucccggccg

SEQ ID NO: 33999 - RNA, 22 nt, Homo sapiens
ucgcaggaccaucccggccggc

SEQ ID NO: 34000 - RNA, 23 nt, Homo sapiens
ucgcaggaccaucccggccggcg

SEQ ID NO: 34001 - RNA, 12 nt, Homo sapiens
ucgccacgcucu

SEQ ID NO: 34002 - RNA, 18 nt, Homo sapiens
ucgccacgcucugggucg

SEQ ID NO: 34003 - RNA, 22 nt, Homo sapiens
ucgccacgcucugggucgccgg

SEQ ID NO: 34004 - RNA, 23 nt, Homo sapiens
ucgccacgcucugggucgccggc

SEQ ID NO: 34005 - RNA, 19 nt, Homo sapiens
ucgcuuccgcauccuaguc

SEQ ID NO: 34006 - RNA, 16 nt, Homo sapiens
ucgcccacuuccuccc

SEQ ID NO: 34007 - RNA, 19 nt, Homo sapiens
ucgcccacuuccucccggc

SEQ ID NO: 34008 - RNA, 20 nt, Homo sapiens
ucgcccacuuccucccggcc

SEQ ID NO: 34009 - RNA, 22 nt, Homo sapiens
ucgcccacuuccucccggccgc

SEQ ID NO: 34010 - RNA, 23 nt, Homo sapiens
ucgcccacuuccucccggccgcg

SEQ ID NO: 34011 - RNA, 11 nt, Homo sapiens
ucgcgcgccuc

SEQ ID NO: 34012 - RNA, 15 nt, Homo sapiens
ucgcgcgccuccgcu

SEQ ID NO: 34013 - RNA, 19 nt, Homo sapiens
uccgcuacuuccagggcua

SEQ ID NO: 34014 - RNA, 13 nt, Homo sapiens
uccggacgcugcu

SEQ ID NO: 34015 - RNA, 14 nt, Homo sapiens
uccggacgcugcug

SEQ ID NO: 34016 - RNA, 17 nt, Homo sapiens
uccggacgcugcugccg

SEQ ID NO: 34017 - RNA, 12 nt, Homo sapiens
uccgggucgcag

SEQ ID NO: 34018 - RNA, 14 nt, Homo sapiens
ucccuuaccuggga

SEQ ID NO: 34019 - RNA, 15 nt, Homo sapiens
uccgcauccuagucu

SEQ ID NO: 34020 - RNA, 12 nt, Homo sapiens
uccgcgcagcuc

SEQ ID NO: 34021 - RNA, 16 nt, Homo sapiens
uccgcgcagcucaggc

SEQ ID NO: 34022 - RNA, 18 nt, Homo sapiens
uccgcgcagcucaggcug

SEQ ID NO: 34023 - RNA, 19 nt, Homo sapiens
uccgcgcagcucaggcugg

SEQ ID NO: 34024 - RNA, 20 nt, Homo sapiens
uccgcgcagcucaggcuggc

SEQ ID NO: 34025 - RNA, 21 nt, Homo sapiens
uccgcgcagcucaggcuggca

SEQ ID NO: 34026 - RNA, 17 nt, Homo sapiens
ugcaguucugaagaaga

SEQ ID NO: 34027 - RNA, 11 nt, Homo sapiens
ugccccgggga

SEQ ID NO: 34028 - RNA, 12 nt, Homo sapiens
ugccccggggag

SEQ ID NO: 34029 - RNA, 13 nt, Homo sapiens
ugccccggggagg

SEQ ID NO: 34030 - RNA, 11 nt, Homo sapiens
ugcacaucaaa

SEQ ID NO: 34031 - RNA, 21 nt, Homo sapiens
ugcagcgaguacuucccgcug

SEQ ID NO: 34032 - RNA, 19 nt, Homo sapiens
ugccccggggaggggcgcu

SEQ ID NO: 34033 - RNA, 22 nt, Homo sapiens
ugccccggggaggggcgcucgc

SEQ ID NO: 34034 - RNA, 13 nt, Homo sapiens
ugccgugggccug

SEQ ID NO: 34035 - RNA, 14 nt, Homo sapiens
ugccgugggccuga

SEQ ID NO: 34036 - RNA, 19 nt, Homo sapiens
ugccgugggccugagacca

SEQ ID NO: 34037 - RNA, 12 nt, Homo sapiens
ugcgcgccgcgc

SEQ ID NO: 34038 - RNA, 13 nt, Homo sapiens
ugcgcgccgcgcu

SEQ ID NO: 34039 - RNA, 14 nt, Homo sapiens
ugcgcgccgcgcuc

SEQ ID NO: 34040 - RNA, 15 nt, Homo sapiens
ugcgcgccgcgcucc

SEQ ID NO: 34041 - RNA, 16 nt, Homo sapiens
ugcgcgccgcgcuccu

SEQ ID NO: 34042 - RNA, 17 nt, Homo sapiens
ugcgcgccgcgcuccuc

SEQ ID NO: 34043 - RNA, 18 nt, Homo sapiens
ugcgcgccgcgcuccucg

SEQ ID NO: 34044 - RNA, 14 nt, Homo sapiens
ugcgcucggccugc

SEQ ID NO: 34045 - RNA, 16 nt, Homo sapiens
ugcgcucggccugcuc

SEQ ID NO: 34046 - RNA, 12 nt, Homo sapiens
ugcggccugguc

SEQ ID NO: 34047 - RNA, 15 nt, Homo sapiens
ugcucgcccacuucc

SEQ ID NO: 34048 - RNA, 17 nt, Homo sapiens
ugcucgcccacuuccuc

SEQ ID NO: 34049 - RNA, 21 nt, Homo sapiens
ugcucgcccacuuccucccgg

SEQ ID NO: 34050 - RNA, 19 nt, Homo sapiens
ugauaugggucuugauaaa

SEQ ID NO: 34051 - RNA, 13 nt, Homo sapiens
ugagaccaaggcc

SEQ ID NO: 34052 - RNA, 20 nt, Homo sapiens
ugagaccaaggcccccgggc

SEQ ID NO: 34053 - RNA, 23 nt, Homo sapiens
ugaauuaaguuuuuuuuuaaaaa

SEQ ID NO: 34054 - RNA, 20 nt, Homo sapiens
ucuuucaugaaggggcggcg

SEQ ID NO: 34055 - RNA, 23 nt, Homo sapiens
ucuuucaugaaggggcggcggcc

SEQ ID NO: 34056 - RNA, 13 nt, Homo sapiens
ugaaggggcggcg

SEQ ID NO: 34057 - RNA, 14 nt, Homo sapiens
ugaaggggcggcgg

SEQ ID NO: 34058 - RNA, 17 nt, Homo sapiens
ugaaggggcggcggccc

SEQ ID NO: 34059 - RNA, 21 nt, Homo sapiens
ugaacuagaguuuagcuggaa

SEQ ID NO: 34060 - RNA, 13 nt, Homo sapiens
ugaacugcagcga

SEQ ID NO: 34061 - RNA, 19 nt, Homo sapiens
uccaacuaucucauuucca

SEQ ID NO: 34062 - RNA, 21 nt, Homo sapiens
ucaggcuggcaccgcuguacg

SEQ ID NO: 34063 - RNA, 18 nt, Homo sapiens
ucaucccacccgcccacc

SEQ ID NO: 34064 - RNA, 14 nt, Homo sapiens
ucaugaaggggcgg

SEQ ID NO: 34065 - RNA, 18 nt, Homo sapiens
ucaugaaggggcggcggc

SEQ ID NO: 34066 - RNA, 13 nt, Homo sapiens
uccagcugccccg

SEQ ID NO: 34067 - RNA, 14 nt, Homo sapiens
uccagcugccccgg

SEQ ID NO: 34068 - RNA, 15 nt, Homo sapiens
uccagcugccccggg

SEQ ID NO: 34069 - RNA, 22 nt, Homo sapiens
uccagcugccccggggaggggc

SEQ ID NO: 34070 - RNA, 17 nt, Homo sapiens
uccagggcuacgcgcgc

SEQ ID NO: 34071 - RNA, 19 nt, Homo sapiens
uccagggcuacgcgcgcuc

SEQ ID NO: 34072 - RNA, 13 nt, Homo sapiens
ucccacccgccca

SEQ ID NO: 34073 - RNA, 20 nt, Homo sapiens
ucccgcuguuccucgccacg

SEQ ID NO: 34074 - RNA, 12 nt, Homo sapiens
ucccggccgcgc

SEQ ID NO: 34075 - RNA, 16 nt, Homo sapiens
ucccggccgcgcugcg

SEQ ID NO: 34076 - RNA, 17 nt, Homo sapiens
ucccggccgcgcugcgc

SEQ ID NO: 34077 - RNA, 19 nt, Homo sapiens
ucccggccgcgcugcgcgc

SEQ ID NO: 34078 - RNA, 22 nt, Homo sapiens
ucccggccgcgcugcgcgccgc

SEQ ID NO: 34079 - RNA, 23 nt, Homo sapiens
ucccggccgcgcugcgcgccgcg

SEQ ID NO: 34080 - RNA, 12 nt, Homo sapiens
ucccggccggcg

SEQ ID NO: 34081 - RNA, 13 nt, Homo sapiens
ucccggccggcgc

SEQ ID NO: 34082 - RNA, 14 nt, Homo sapiens
ucccggccggcgcg

SEQ ID NO: 34083 - RNA, 15 nt, Homo sapiens
ucccggccggcgcgc

SEQ ID NO: 34084 - RNA, 17 nt, Homo sapiens
ucccggccggcgcgcuc

SEQ ID NO: 34085 - RNA, 13 nt, Homo sapiens
uauauuugaaaua

SEQ ID NO: 34086 - RNA, 22 nt, Homo sapiens
ucaccucauggaauuggagcuc

SEQ ID NO: 34087 - RNA, 15 nt, Homo sapiens
uaaugauaacuggaa

SEQ ID NO: 34088 - RNA, 14 nt, Homo sapiens
uaaugauaacugga

SEQ ID NO: 34089 - RNA, 20 nt, Homo sapiens
uacuucccgcuguuccucgc

SEQ ID NO: 34090 - RNA, 16 nt, Homo sapiens
uacgcgcgcuccgcgc

SEQ ID NO: 34091 - RNA, 21 nt, Homo sapiens
uacgcgcgcuccgcgcagcuc

SEQ ID NO: 34092 - RNA, 16 nt, Homo sapiens
uaccuguucgcgcgcc

SEQ ID NO: 34093 - RNA, 17 nt, Homo sapiens
uaccuguucgcgcgccu

SEQ ID NO: 34094 - RNA, 19 nt, Homo sapiens
uaccuguucgcgcgccucc

SEQ ID NO: 34095 - RNA, 13 nt, Homo sapiens
uacgcgcgcuccg

SEQ ID NO: 34096 - RNA, 13 nt, Homo sapiens
uacgcgagcgcgc

SEQ ID NO: 34097 - RNA, 18 nt, Homo sapiens
uacgcgagcgcgcgcgcc

SEQ ID NO: 34098 - RNA, 19 nt, Homo sapiens
uacgcgagcgcgcgcgccc

SEQ ID NO: 34099 - RNA, 10 nt, Homo sapiens
guucgcgcgc

SEQ ID NO: 34100 - RNA, 14 nt, Homo sapiens
guucgcgcgccucc

SEQ ID NO: 34101 - RNA, 15 nt, Homo sapiens
guucgcgcgccuccg

SEQ ID NO: 34102 - RNA, 14 nt, Homo sapiens
guuccucgccacgc

SEQ ID NO: 34103 - RNA, 15 nt, Homo sapiens
guuccucgccacgcu

SEQ ID NO: 34104 - RNA, 11 nt, Homo sapiens
guggcgcuggc

SEQ ID NO: 34105 - RNA, 15 nt, Homo sapiens
guggcgcuggcugcg

SEQ ID NO: 34106 - RNA, 20 nt, Homo sapiens
guggcgcuggcugcgcucgg

SEQ ID NO: 34107 - RNA, 16 nt, Homo sapiens
guccgggucgcaggac

SEQ ID NO: 34108 - RNA, 20 nt, Homo sapiens
guccgggucgcaggaccauc

SEQ ID NO: 34109 - RNA, 15 nt, Homo sapiens
gucuaccuguucgcg

SEQ ID NO: 34110 - RNA, 16 nt, Homo sapiens
gucuaccuguucgcgc

SEQ ID NO: 34111 - RNA, 21 nt, Homo sapiens
gucuaccuguucgcgcgccuc

SEQ ID NO: 34112 - RNA, 22 nt, Homo sapiens
gucuaccuguucgcgcgccucc

SEQ ID NO: 34113 - RNA, 17 nt, Homo sapiens
gucgcaggaccaucccg

SEQ ID NO: 34114 - RNA, 19 nt, Homo sapiens
gucgcaggaccaucccggc

SEQ ID NO: 34115 - RNA, 20 nt, Homo sapiens
gucgcaggaccaucccggcc

SEQ ID NO: 34116 - RNA, 22 nt, Homo sapiens
gucgcaggaccaucccggccgg

SEQ ID NO: 34117 - RNA, 24 nt, Homo sapiens
gucgcaggaccaucccggccggcg

SEQ ID NO: 34118 - RNA, 13 nt, Homo sapiens
gucgccggcaucu

SEQ ID NO: 34119 - RNA, 14 nt, Homo sapiens
gucgccggcaucuu

SEQ ID NO: 34120 - RNA, 12 nt, Homo sapiens
ggcugcgcucgg

SEQ ID NO: 34121 - RNA, 15 nt, Homo sapiens
ggcugcgcucggccu

SEQ ID NO: 34122 - RNA, 16 nt, Homo sapiens
ggcugcgcucggccug

SEQ ID NO: 34123 - RNA, 17 nt, Homo sapiens
ggcugcgcucggccugc

SEQ ID NO: 34124 - RNA, 18 nt, Homo sapiens
ggcugcgcucggccugcu

SEQ ID NO: 34125 - RNA, 20 nt, Homo sapiens
ggcugcgcucggccugcucg

SEQ ID NO: 34126 - RNA, 21 nt, Homo sapiens
ggcugcgcucggccugcucgc

SEQ ID NO: 34127 - RNA, 22 nt, Homo sapiens
ggcugcgcucggccugcucgcc

SEQ ID NO: 34128 - RNA, 14 nt, Homo sapiens
ggcugcugguggcg

SEQ ID NO: 34129 - RNA, 17 nt, Homo sapiens
ggcugcugguggcgcug

SEQ ID NO: 34130 - RNA, 19 nt, Homo sapiens
ggcugcugguggcgcuggc

SEQ ID NO: 34131 - RNA, 20 nt, Homo sapiens
ggcugcugguggcgcuggcu

SEQ ID NO: 34132 - RNA, 16 nt, Homo sapiens
ggcuccggacgcugcu

SEQ ID NO: 34133 - RNA, 20 nt, Homo sapiens
ggcuccggacgcugcugccg

SEQ ID NO: 34134 - RNA, 16 nt, Homo sapiens
ggcuacgcgcgcuccg

SEQ ID NO: 34135 - RNA, 20 nt, Homo sapiens
ggcuacgcgcgcuccgcgca

SEQ ID NO: 34136 - RNA, 21 nt, Homo sapiens
ggcuacgcgcgcuccgcgcag

SEQ ID NO: 34137 - RNA, 19 nt, Homo sapiens
ggccuggucuaccuguucg

SEQ ID NO: 34138 - RNA, 13 nt, Homo sapiens
ggcggggagcgag

SEQ ID NO: 34139 - RNA, 14 nt, Homo sapiens
ggcggggagcgagc

SEQ ID NO: 34140 - RNA, 14 nt, Homo sapiens
ggcggguccggguc

SEQ ID NO: 34141 - RNA, 18 nt, Homo sapiens
ggcggguccgggucgcag

SEQ ID NO: 34142 - RNA, 19 nt, Homo sapiens
ggcggguccgggucgcagg

SEQ ID NO: 34143 - RNA, 11 nt, Homo sapiens
gggcuacgcgc

SEQ ID NO: 34144 - RNA, 16 nt, Homo sapiens
gggcuacgcgcgcucc

SEQ ID NO: 34145 - RNA, 18 nt, Homo sapiens
gggccgacggagccggga

SEQ ID NO: 34146 - RNA, 14 nt, Homo sapiens
gggcgcggggcggg

SEQ ID NO: 34147 - RNA, 14 nt, Homo sapiens
ggcuggcaccgcug

SEQ ID NO: 34148 - RNA, 15 nt, Homo sapiens
ggcuggcaccgcugu

SEQ ID NO: 34149 - RNA, 16 nt, Homo sapiens
ggcuggcaccgcugua

SEQ ID NO: 34150 - RNA, 17 nt, Homo sapiens
ggcuggcaccgcuguac

SEQ ID NO: 34151 - RNA, 17 nt, Homo sapiens
gggaaagaagagccgga

SEQ ID NO: 34152 - RNA, 20 nt, Homo sapiens
gggaaagaagagccggagcc

SEQ ID NO: 34153 - RNA, 13 nt, Homo sapiens
gggaaagggcugu

SEQ ID NO: 34154 - RNA, 18 nt, Homo sapiens
gggagaaccuagggugau

SEQ ID NO: 34155 - RNA, 20 nt, Homo sapiens
gggagcgagccccaggcggg

SEQ ID NO: 34156 - RNA, 12 nt, Homo sapiens
ggggaggggcgc

SEQ ID NO: 34157 - RNA, 15 nt, Homo sapiens
ggggaggggcgcucg

SEQ ID NO: 34158 - RNA, 11 nt, Homo sapiens
ggggcgcucgc

SEQ ID NO: 34159 - RNA, 14 nt, Homo sapiens
ggggcgcucgcuuc

SEQ ID NO: 34160 - RNA, 23 nt, Homo sapiens
gggucgcaggaccaucccggccg

SEQ ID NO: 34161 - RNA, 16 nt, Homo sapiens
gggugaacugcagcga

SEQ ID NO: 34162 - RNA, 21 nt, Homo sapiens
ggucuaccaaaaaucucaaua

SEQ ID NO: 34163 - RNA, 19 nt, Homo sapiens
ggucuaccuguucgcgcgc

SEQ ID NO: 34164 - RNA, 20 nt, Homo sapiens
ggucuaccuguucgcgcgcc

SEQ ID NO: 34165 - RNA, 21 nt, Homo sapiens
ggucuaccuguucgcgcgccu

SEQ ID NO: 34166 - RNA, 20 nt, Homo sapiens
ggucgcaggaccaucccggc

SEQ ID NO: 34167 - RNA, 21 nt, Homo sapiens
ggucgcaggaccaucccggcc

SEQ ID NO: 34168 - RNA, 23 nt, Homo sapiens
ggucgcaggaccaucccggccgg

SEQ ID NO: 34169 - RNA, 11 nt, Homo sapiens
ggucgccggca

SEQ ID NO: 34170 - RNA, 14 nt, Homo sapiens
guacgcgagcgcgc

SEQ ID NO: 34171 - RNA, 15 nt, Homo sapiens
guacgcgagcgcgcg

SEQ ID NO: 34172 - RNA, 16 nt, Homo sapiens
guacgcgagcgcgcgc

SEQ ID NO: 34173 - RNA, 17 nt, Homo sapiens
guacgcgagcgcgcgcg

SEQ ID NO: 34174 - RNA, 19 nt, Homo sapiens
guacgcgagcgcgcgcgcc

SEQ ID NO: 34175 - RNA, 21 nt, Homo sapiens
guacgcgagcgcgcgcgcccu

SEQ ID NO: 34176 - RNA, 13 nt, Homo sapiens
gguggcgcuggcu

SEQ ID NO: 34177 - RNA, 15 nt, Homo sapiens
gguggcgcuggcugc

SEQ ID NO: 34178 - RNA, 20 nt, Homo sapiens
gguggcgcuggcugcgcucg

SEQ ID NO: 34179 - RNA, 20 nt, Homo sapiens
ggucuugauaaauggcuucc

SEQ ID NO: 34180 - RNA, 20 nt, Homo sapiens
gcucauggaauuggagcucg

SEQ ID NO: 34181 - RNA, 22 nt, Homo sapiens
gcucauggaauuggagcucgug

SEQ ID NO: 34182 - RNA, 13 nt, Homo sapiens
gcucugggucgcc

SEQ ID NO: 34183 - RNA, 16 nt, Homo sapiens
gcucugggucgccggc

SEQ ID NO: 34184 - RNA, 17 nt, Homo sapiens
gcucugggucgccggca

SEQ ID NO: 34185 - RNA, 10 nt, Homo sapiens
gcugcgcgcc

SEQ ID NO: 34186 - RNA, 12 nt, Homo sapiens
gcugcgcgccgc

SEQ ID NO: 34187 - RNA, 13 nt, Homo sapiens
gcugcgcgccgcg

SEQ ID NO: 34188 - RNA, 15 nt, Homo sapiens
gcugcgcgccgcgcu

SEQ ID NO: 34189 - RNA, 16 nt, Homo sapiens
gcugcgcgccgcgcuc

SEQ ID NO: 34190 - RNA, 17 nt, Homo sapiens
gcugcgcgccgcgcucc

SEQ ID NO: 34191 - RNA, 12 nt, Homo sapiens
gcugccccgggg

SEQ ID NO: 34192 - RNA, 13 nt, Homo sapiens
gcugccccgggga

SEQ ID NO: 34193 - RNA, 20 nt, Homo sapiens
gcugccccggggaggggcgc

SEQ ID NO: 34194 - RNA, 24 nt, Homo sapiens
gcugccccggggaggggcgcucgc

SEQ ID NO: 34195 - RNA, 15 nt, Homo sapiens
gcugccgugggccug

SEQ ID NO: 34196 - RNA, 18 nt, Homo sapiens
gcugccgugggccugaga

SEQ ID NO: 34197 - RNA, 20 nt, Homo sapiens
gcuccgcgcagcucaggcug

SEQ ID NO: 34198 - RNA, 16 nt, Homo sapiens
gcuccggacgcugcug

SEQ ID NO: 34199 - RNA, 19 nt, Homo sapiens
gcuccggacgcugcugccg

SEQ ID NO: 34200 - RNA, 21 nt, Homo sapiens
gcuccggacgcugcugccgug

SEQ ID NO: 34201 - RNA, 22 nt, Homo sapiens
gcuccggacgcugcugccgugg

SEQ ID NO: 34202 - RNA, 13 nt, Homo sapiens
gcuccucggacgg

SEQ ID NO: 34203 - RNA, 16 nt, Homo sapiens
gcuccucggacggcuc

SEQ ID NO: 34204 - RNA, 17 nt, Homo sapiens
gcuccucggacggcucc

SEQ ID NO: 34205 - RNA, 19 nt, Homo sapiens
gcuccucggacggcuccgg

SEQ ID NO: 34206 - RNA, 20 nt, Homo sapiens
gcuccucggacggcuccgga

SEQ ID NO: 34207 - RNA, 18 nt, Homo sapiens
gcucgcccacuuccuccc

SEQ ID NO: 34208 - RNA, 19 nt, Homo sapiens
gcucgcccacuuccucccg

SEQ ID NO: 34209 - RNA, 23 nt, Homo sapiens
gcucgcccacuuccucccggccg

SEQ ID NO: 34210 - RNA, 13 nt, Homo sapiens
gcucgcuuccgca

SEQ ID NO: 34211 - RNA, 15 nt, Homo sapiens
gcucgcuuccgcauc

SEQ ID NO: 34212 - RNA, 18 nt, Homo sapiens
gcucgcuuccgcauccua

SEQ ID NO: 34213 - RNA, 20 nt, Homo sapiens
gcucgcuuccgcauccuagu

SEQ ID NO: 34214 - RNA, 14 nt, Homo sapiens
gcucggccugcucg

SEQ ID NO: 34215 - RNA, 17 nt, Homo sapiens
gcucggccugcucgccc

SEQ ID NO: 34216 - RNA, 18 nt, Homo sapiens
gcucggccugcucgccca

SEQ ID NO: 34217 - RNA, 12 nt, Homo sapiens
gcucaggcuggc

SEQ ID NO: 34218 - RNA, 23 nt, Homo sapiens
gcucaggcuggcaccgcuguacg

SEQ ID NO: 34219 - RNA, 20 nt, Homo sapiens
gcucaucccacccgcccacc

SEQ ID NO: 34220 - RNA, 21 nt, Homo sapiens
gcucaucccacccgcccaccg

SEQ ID NO: 34221 - RNA, 23 nt, Homo sapiens
gcucaucccacccgcccaccgca

SEQ ID NO: 34222 - RNA, 11 nt, Homo sapiens
gcuacgcgcgc

SEQ ID NO: 34223 - RNA, 19 nt, Homo sapiens
gcuacgcgcgcuccgcgca

SEQ ID NO: 34224 - RNA, 20 nt, Homo sapiens
gcuacuuccagggcuacgcg

SEQ ID NO: 34225 - RNA, 21 nt, Homo sapiens
gcuacuuccagggcuacgcgc

SEQ ID NO: 34226 - RNA, 14 nt, Homo sapiens
gcuuccgcauccua

SEQ ID NO: 34227 - RNA, 13 nt, Homo sapiens
gcuguuccucgcc

SEQ ID NO: 34228 - RNA, 18 nt, Homo sapiens
gcuguuccucgccacgcu

SEQ ID NO: 34229 - RNA, 22 nt, Homo sapiens
gcuguuccucgccacgcucugg

SEQ ID NO: 34230 - RNA, 12 nt, Homo sapiens
gcugcgcucggc

SEQ ID NO: 34231 - RNA, 14 nt, Homo sapiens
gcugcgcucggccu

SEQ ID NO: 34232 - RNA, 16 nt, Homo sapiens
gcugcgcucggccugc

SEQ ID NO: 34233 - RNA, 17 nt, Homo sapiens
gcugcgcucggccugcu

SEQ ID NO: 34234 - RNA, 19 nt, Homo sapiens
gcugcgcucggccugcucg

SEQ ID NO: 34235 - RNA, 20 nt, Homo sapiens
gcugcgcucggccugcucgc

SEQ ID NO: 34236 - RNA, 23 nt, Homo sapiens
gcugcgcucggccugcucgccca

SEQ ID NO: 34237 - RNA, 14 nt, Homo sapiens
gcugcugccguggg

SEQ ID NO: 34238 - RNA, 14 nt, Homo sapiens
gcugcugguggcgc

SEQ ID NO: 34239 - RNA, 16 nt, Homo sapiens
gcugcugguggcgcug

SEQ ID NO: 34240 - RNA, 18 nt, Homo sapiens
gcugcugguggcgcuggc

SEQ ID NO: 34241 - RNA, 22 nt, Homo sapiens
gcugcugguggcgcuggcugcg

SEQ ID NO: 34242 - RNA, 12 nt, Homo sapiens
gcugguggcgcu

SEQ ID NO: 34243 - RNA, 14 nt, Homo sapiens
gcugguggcgcugg

SEQ ID NO: 34244 - RNA, 15 nt, Homo sapiens
gcugguggcgcuggc

SEQ ID NO: 34245 - RNA, 19 nt, Homo sapiens
gcugguggcgcuggcugcg

SEQ ID NO: 34246 - RNA, 22 nt, Homo sapiens
gcugguggcgcuggcugcgcuc

SEQ ID NO: 34247 - RNA, 14 nt, Homo sapiens
gcuguacgcgagcg

SEQ ID NO: 34248 - RNA, 15 nt, Homo sapiens
gcuguacgcgagcgc

SEQ ID NO: 34249 - RNA, 16 nt, Homo sapiens
gcuguacgcgagcgcg

SEQ ID NO: 34250 - RNA, 18 nt, Homo sapiens
gcuguacgcgagcgcgcg

SEQ ID NO: 34251 - RNA, 19 nt, Homo sapiens
gcuguacgcgagcgcgcgc

SEQ ID NO: 34252 - RNA, 22 nt, Homo sapiens
gcuguacgcgagcgcgcgcgcc

SEQ ID NO: 34253 - RNA, 12 nt, Homo sapiens
gcuggcugcgcu

SEQ ID NO: 34254 - RNA, 19 nt, Homo sapiens
gcuggcugcgcucggccug

SEQ ID NO: 34255 - RNA, 20 nt, Homo sapiens
gcuggcugcgcucggccugc

SEQ ID NO: 34256 - RNA, 22 nt, Homo sapiens
gcuggcugcgcucggccugcuc

SEQ ID NO: 34257 - RNA, 19 nt, Homo sapiens
gcuggcaccgcuguacgcg

SEQ ID NO: 34258 - RNA, 23 nt, Homo sapiens
gcuggcaccgcuguacgcgagcg

SEQ ID NO: 34259 - RNA, 24 nt, Homo sapiens
gcuggcaccgcuguacgcgagcgc

SEQ ID NO: 34260 - RNA, 11 nt, Homo sapiens
ggcaccgcugu

SEQ ID NO: 34261 - RNA, 14 nt, Homo sapiens
ggcccugugcggcc

SEQ ID NO: 34262 - RNA, 18 nt, Homo sapiens
ggcccugugcggccuggu

SEQ ID NO: 34263 - RNA, 19 nt, Homo sapiens
ggcccugugcggccugguc

SEQ ID NO: 34264 - RNA, 20 nt, Homo sapiens
ggcccugugcggccuggucu

SEQ ID NO: 34265 - RNA, 12 nt, Homo sapiens
ggccgacggagc

SEQ ID NO: 34266 - RNA, 13 nt, Homo sapiens
ggccgacggagcc

SEQ ID NO: 34267 - RNA, 15 nt, Homo sapiens
ggccgacggagccgg

SEQ ID NO: 34268 - RNA, 19 nt, Homo sapiens
ggccgacggagccgggaaa

SEQ ID NO: 34269 - RNA, 11 nt, Homo sapiens
ggccgcgcugc

SEQ ID NO: 34270 - RNA, 12 nt, Homo sapiens
ggccgcgcugcg

SEQ ID NO: 34271 - RNA, 14 nt, Homo sapiens
ggccgcgcugcgcg

SEQ ID NO: 34272 - RNA, 16 nt, Homo sapiens
ggccgcgcugcgcgcc

SEQ ID NO: 34273 - RNA, 17 nt, Homo sapiens
ggccgcgcugcgcgccg

SEQ ID NO: 34274 - RNA, 19 nt, Homo sapiens
ggccgcgcugcgcgccgcg

SEQ ID NO: 34275 - RNA, 13 nt, Homo sapiens
ggccggcgcgcuc

SEQ ID NO: 34276 - RNA, 14 nt, Homo sapiens
ggccggcgcgcuca

SEQ ID NO: 34277 - RNA, 16 nt, Homo sapiens
ggccggcgcgcucauc

SEQ ID NO: 34278 - RNA, 23 nt, Homo sapiens
ggccugagaccaaggcccccggg

SEQ ID NO: 34279 - RNA, 14 nt, Homo sapiens
ggccugcucgccca

SEQ ID NO: 34280 - RNA, 21 nt, Homo sapiens
ggccugcucgcccacuuccuc

SEQ ID NO: 34281 - RNA, 14 nt, Homo sapiens
ggcccccgggccga

SEQ ID NO: 34282 - RNA, 16 nt, Homo sapiens
ggcccccgggccgacg

SEQ ID NO: 34283 - RNA, 14 nt, Homo sapiens
ggcgcgcucauccc

SEQ ID NO: 34284 - RNA, 22 nt, Homo sapiens
ggcgcgcucaucccacccgccc

SEQ ID NO: 34285 - RNA, 21 nt, Homo sapiens
ggcgcggcgggagggcgcggg

SEQ ID NO: 34286 - RNA, 21 nt, Homo sapiens
ggcgcggggcggggagcgagc

SEQ ID NO: 34287 - RNA, 23 nt, Homo sapiens
ggcgcggggcggggagcgagccc

SEQ ID NO: 34288 - RNA, 13 nt, Homo sapiens
ggcgcucgcuucc

SEQ ID NO: 34289 - RNA, 18 nt, Homo sapiens
ggcgcucgcuuccgcauc

SEQ ID NO: 34290 - RNA, 20 nt, Homo sapiens
ggcgcucgcuuccgcauccu

SEQ ID NO: 34291 - RNA, 12 nt, Homo sapiens
ggcgcuggcugc

SEQ ID NO: 34292 - RNA, 20 nt, Homo sapiens
ggcgcuggcugcgcucggcc

SEQ ID NO: 34293 - RNA, 21 nt, Homo sapiens
ggcgcuggcugcgcucggccu

SEQ ID NO: 34294 - RNA, 21 nt, Homo sapiens
ggcggcccugugcggccuggu

SEQ ID NO: 34295 - RNA, 11 nt, Homo sapiens
ggcggcggccc

SEQ ID NO: 34296 - RNA, 13 nt, Homo sapiens
ggcggcggcccug

SEQ ID NO: 34297 - RNA, 21 nt, Homo sapiens
ggcggcggcccugugcggccu

SEQ ID NO: 34298 - RNA, 15 nt, Homo sapiens
ggaaagaagagccgg

SEQ ID NO: 34299 - RNA, 13 nt, Homo sapiens
ggaaaggcagcuc

SEQ ID NO: 34300 - RNA, 16 nt, Homo sapiens
ggaauuggagcucgug

SEQ ID NO: 34301 - RNA, 18 nt, Homo sapiens
ggacagucaccucaugga

SEQ ID NO: 34302 - RNA, 17 nt, Homo sapiens
ggacauuugcucaugga

SEQ ID NO: 34303 - RNA, 13 nt, Homo sapiens
ggaccaucccggc

SEQ ID NO: 34304 - RNA, 14 nt, Homo sapiens
ggaccaucccggcc

SEQ ID NO: 34305 - RNA, 15 nt, Homo sapiens
ggaccaucccggccg

SEQ ID NO: 34306 - RNA, 18 nt, Homo sapiens
ggaccaucccggccggcg

SEQ ID NO: 34307 - RNA, 23 nt, Homo sapiens
ggaccaucccggccggcgcgcuc

SEQ ID NO: 34308 - RNA, 11 nt, Homo sapiens
ggacgcugcug

SEQ ID NO: 34309 - RNA, 14 nt, Homo sapiens
ggacgcugcugccg

SEQ ID NO: 34310 - RNA, 15 nt, Homo sapiens
ggacgcugcugccgu

SEQ ID NO: 34311 - RNA, 12 nt, Homo sapiens
ggacggcuccgg

SEQ ID NO: 34312 - RNA, 13 nt, Homo sapiens
ggacggcuccgga

SEQ ID NO: 34313 - RNA, 19 nt, Homo sapiens
ggacggcuccggacgcugc

SEQ ID NO: 34314 - RNA, 20 nt, Homo sapiens
ggacggcuccggacgcugcu

SEQ ID NO: 34315 - RNA, 21 nt, Homo sapiens
ggacggcuccggacgcugcug

SEQ ID NO: 34316 - RNA, 19 nt, Homo sapiens
ggagccgggaaagaagagc

SEQ ID NO: 34317 - RNA, 16 nt, Homo sapiens
ggagccuccagcugcc

SEQ ID NO: 34318 - RNA, 18 nt, Homo sapiens
ggagcgagccccaggcgg

SEQ ID NO: 34319 - RNA, 22 nt, Homo sapiens
ggagcgagccccaggcgggucc

SEQ ID NO: 34320 - RNA, 10 nt, Homo sapiens
ggagcucgug

SEQ ID NO: 34321 - RNA, 22 nt, Homo sapiens
ggagggaagccuuggggcugau

SEQ ID NO: 34322 - RNA, 15 nt, Homo sapiens
ggagggcgcggggcg

SEQ ID NO: 34323 - RNA, 13 nt, Homo sapiens
ggaggggcgcucg

SEQ ID NO: 34324 - RNA, 18 nt, Homo sapiens
gccagauuuuccugaaaa

SEQ ID NO: 34325 - RNA, 11 nt, Homo sapiens
gccacgcucug

SEQ ID NO: 34326 - RNA, 16 nt, Homo sapiens
gccacgcucugggucg

SEQ ID NO: 34327 - RNA, 22 nt, Homo sapiens
gccacgcucugggucgccggca

SEQ ID NO: 34328 - RNA, 23 nt, Homo sapiens
gccacgcucugggucgccggcau

SEQ ID NO: 34329 - RNA, 24 nt, Homo sapiens
gcauuauauuuauuacuguaagaa

SEQ ID NO: 34330 - RNA, 13 nt, Homo sapiens
gcaguucugaaga

SEQ ID NO: 34331 - RNA, 17 nt, Homo sapiens
gcaguucugaagaagau

SEQ ID NO: 34332 - RNA, 18 nt, Homo sapiens
gcaggaccaucccggccg

SEQ ID NO: 34333 - RNA, 19 nt, Homo sapiens
gcaggaccaucccggccgg

SEQ ID NO: 34334 - RNA, 22 nt, Homo sapiens
gcaggaccaucccggccggcgc

SEQ ID NO: 34335 - RNA, 17 nt, Homo sapiens
gcagcgaguacuucccg

SEQ ID NO: 34336 - RNA, 18 nt, Homo sapiens
gcagcgaguacuucccgc

SEQ ID NO: 34337 - RNA, 21 nt, Homo sapiens
gcagcgaguacuucccgcugu

SEQ ID NO: 34338 - RNA, 22 nt, Homo sapiens
gcagcgaguacuucccgcuguu

SEQ ID NO: 34339 - RNA, 20 nt, Homo sapiens
gcagcucaggcuggcaccgc

SEQ ID NO: 34340 - RNA, 14 nt, Homo sapiens
gcccucuggcugcu

SEQ ID NO: 34341 - RNA, 16 nt, Homo sapiens
gcccucuggcugcugg

SEQ ID NO: 34342 - RNA, 14 nt, Homo sapiens
gcccugugcggccu

SEQ ID NO: 34343 - RNA, 17 nt, Homo sapiens
gcccugugcggccuggu

SEQ ID NO: 34344 - RNA, 18 nt, Homo sapiens
gcccugugcggccugguc

SEQ ID NO: 34345 - RNA, 19 nt, Homo sapiens
gcccugugcggccuggucu

SEQ ID NO: 34346 - RNA, 13 nt, Homo sapiens
gccgacggagccg

SEQ ID NO: 34347 - RNA, 15 nt, Homo sapiens
gccgacggagccggg

SEQ ID NO: 34348 - RNA, 16 nt, Homo sapiens
gccgacggagccggga

SEQ ID NO: 34349 - RNA, 11 nt, Homo sapiens
gccggagccuc

SEQ ID NO: 34350 - RNA, 12 nt, Homo sapiens
gccggagccucc

SEQ ID NO: 34351 - RNA, 13 nt, Homo sapiens
gccggagccucca

SEQ ID NO: 34352 - RNA, 14 nt, Homo sapiens
gccggagccuccag

SEQ ID NO: 34353 - RNA, 15 nt, Homo sapiens
gccggagccuccagc

SEQ ID NO: 34354 - RNA, 16 nt, Homo sapiens
gccggagccuccagcu

SEQ ID NO: 34355 - RNA, 17 nt, Homo sapiens
gccggagccuccagcug

SEQ ID NO: 34356 - RNA, 18 nt, Homo sapiens
gccggagccuccagcugc

SEQ ID NO: 34357 - RNA, 21 nt, Homo sapiens
gccggagccuccagcugcccc

SEQ ID NO: 34358 - RNA, 12 nt, Homo sapiens
gccggcgcgcuc

SEQ ID NO: 34359 - RNA, 13 nt, Homo sapiens
gccggcgcgcuca

SEQ ID NO: 34360 - RNA, 15 nt, Homo sapiens
gccggcgcgcucauc

SEQ ID NO: 34361 - RNA, 19 nt, Homo sapiens
gccgggaaagaagagccgg

SEQ ID NO: 34362 - RNA, 20 nt, Homo sapiens
gccgggaaagaagagccgga

SEQ ID NO: 34363 - RNA, 23 nt, Homo sapiens
gccgggaaagaagagccggagcc

SEQ ID NO: 34364 - RNA, 22 nt, Homo sapiens
gcccacagcuguaugauuccca

SEQ ID NO: 34365 - RNA, 16 nt, Homo sapiens
gcccaccgcaggguga

SEQ ID NO: 34366 - RNA, 19 nt, Homo sapiens
gcccacuuccucccggccg

SEQ ID NO: 34367 - RNA, 20 nt, Homo sapiens
gcccacuuccucccggccgc

SEQ ID NO: 34368 - RNA, 14 nt, Homo sapiens
gccaugaaucaccu

SEQ ID NO: 34369 - RNA, 14 nt, Homo sapiens
gcccccgggccgac

SEQ ID NO: 34370 - RNA, 19 nt, Homo sapiens
gcccccgggccgacggagc

SEQ ID NO: 34371 - RNA, 20 nt, Homo sapiens
gcccccgggccgacggagcc

SEQ ID NO: 34372 - RNA, 21 nt, Homo sapiens
gcccccgggccgacggagccg

SEQ ID NO: 34373 - RNA, 22 nt, Homo sapiens
gcccccgggccgacggagccgg

SEQ ID NO: 34374 - RNA, 15 nt, Homo sapiens
gccccaggcgggucc

SEQ ID NO: 34375 - RNA, 16 nt, Homo sapiens
gccccaggcggguccg

SEQ ID NO: 34376 - RNA, 17 nt, Homo sapiens
gccccaggcggguccgg

SEQ ID NO: 34377 - RNA, 22 nt, Homo sapiens
gccccaggcggguccgggucgc

SEQ ID NO: 34378 - RNA, 14 nt, Homo sapiens
gcgcgcccucuggc

SEQ ID NO: 34379 - RNA, 21 nt, Homo sapiens
gcgcgcccucuggcugcuggu

SEQ ID NO: 34380 - RNA, 11 nt, Homo sapiens
gcgcgccgcgc

SEQ ID NO: 34381 - RNA, 12 nt, Homo sapiens
gcgcgccgcgcu

SEQ ID NO: 34382 - RNA, 13 nt, Homo sapiens
gcgcgccgcgcuc

SEQ ID NO: 34383 - RNA, 13 nt, Homo sapiens
gcgcgccuccgcu

SEQ ID NO: 34384 - RNA, 11 nt, Homo sapiens
gcgccuccgcu

SEQ ID NO: 34385 - RNA, 19 nt, Homo sapiens
gcgccuccgcuacuuccag

SEQ ID NO: 34386 - RNA, 20 nt, Homo sapiens
gcgccuccgcuacuuccagg

SEQ ID NO: 34387 - RNA, 22 nt, Homo sapiens
gcgccuccgcuacuuccagggc

SEQ ID NO: 34388 - RNA, 23 nt, Homo sapiens
gcgccuccgcuacuuccagggcu

SEQ ID NO: 34389 - RNA, 12 nt, Homo sapiens
gcgcgcgcgccc

SEQ ID NO: 34390 - RNA, 14 nt, Homo sapiens
gcgcgcgcgcccuc

SEQ ID NO: 34391 - RNA, 22 nt, Homo sapiens
gcgcgcucaucccacccgccca

SEQ ID NO: 34392 - RNA, 23 nt, Homo sapiens
gcgcgcucaucccacccgcccac

SEQ ID NO: 34393 - RNA, 14 nt, Homo sapiens
gcgcgcuccgcgca

SEQ ID NO: 34394 - RNA, 16 nt, Homo sapiens
gcgcgcuccgcgcagc

SEQ ID NO: 34395 - RNA, 17 nt, Homo sapiens
gcgcgcuccgcgcagcu

SEQ ID NO: 34396 - RNA, 19 nt, Homo sapiens
gcgcgcuccgcgcagcuca

SEQ ID NO: 34397 - RNA, 23 nt, Homo sapiens
gcgcggcgggagggcgcggggcg

SEQ ID NO: 34398 - RNA, 20 nt, Homo sapiens
gcgcggggcggggagcgagc

SEQ ID NO: 34399 - RNA, 21 nt, Homo sapiens
gcgcggggcggggagcgagcc

SEQ ID NO: 34400 - RNA, 23 nt, Homo sapiens
gcgcggggcggggagcgagcccc

SEQ ID NO: 34401 - RNA, 14 nt, Homo sapiens
gcgcucaucccacc

SEQ ID NO: 34402 - RNA, 16 nt, Homo sapiens
gcgcucaucccacccg

SEQ ID NO: 34403 - RNA, 17 nt, Homo sapiens
gcgcucaucccacccgc

SEQ ID NO: 34404 - RNA, 18 nt, Homo sapiens
gcgcucaucccacccgcc

SEQ ID NO: 34405 - RNA, 20 nt, Homo sapiens
gcgcucaucccacccgccca

SEQ ID NO: 34406 - RNA, 13 nt, Homo sapiens
gcgcuccgcgcag

SEQ ID NO: 34407 - RNA, 15 nt, Homo sapiens
gcgcuccgcgcagcu

SEQ ID NO: 34408 - RNA, 18 nt, Homo sapiens
gcgcuccgcgcagcucag

SEQ ID NO: 34409 - RNA, 20 nt, Homo sapiens
gcgcuccucggacggcuccg

SEQ ID NO: 34410 - RNA, 12 nt, Homo sapiens
gcgcucgcuucc

SEQ ID NO: 34411 - RNA, 14 nt, Homo sapiens
gcgggagggcgcgg

SEQ ID NO: 34412 - RNA, 15 nt, Homo sapiens
gcgggagggcgcggg

SEQ ID NO: 34413 - RNA, 14 nt, Homo sapiens
gcggggagcgagcc

SEQ ID NO: 34414 - RNA, 23 nt, Homo sapiens
gcggggagcgagccccaggcggg

SEQ ID NO: 34415 - RNA, 17 nt, Homo sapiens
gcgcucgcuuccgcauc

SEQ ID NO: 34416 - RNA, 19 nt, Homo sapiens
gcgcucgcuuccgcauccu

SEQ ID NO: 34417 - RNA, 13 nt, Homo sapiens
gcgcucggccugc

SEQ ID NO: 34418 - RNA, 15 nt, Homo sapiens
gcgcucggccugcuc

SEQ ID NO: 34419 - RNA, 16 nt, Homo sapiens
gcgcucggccugcucg

SEQ ID NO: 34420 - RNA, 17 nt, Homo sapiens
gcgcucggccugcucgc

SEQ ID NO: 34421 - RNA, 21 nt, Homo sapiens
gcgcucggccugcucgcccac

SEQ ID NO: 34422 - RNA, 23 nt, Homo sapiens
gcgcucggccugcucgcccacuu

SEQ ID NO: 34423 - RNA, 14 nt, Homo sapiens
gcgcugcgcgccgc

SEQ ID NO: 34424 - RNA, 19 nt, Homo sapiens
gcgcugcgcgccgcgcucc

SEQ ID NO: 34425 - RNA, 15 nt, Homo sapiens
gcggcccugugcggc

SEQ ID NO: 34426 - RNA, 16 nt, Homo sapiens
gcggcccugugcggcc

SEQ ID NO: 34427 - RNA, 22 nt, Homo sapiens
gcggcccugugcggccuggucu

SEQ ID NO: 34428 - RNA, 13 nt, Homo sapiens
gcggccuggucua

SEQ ID NO: 34429 - RNA, 22 nt, Homo sapiens
gcggccuggucuaccuguucgc

SEQ ID NO: 34430 - RNA, 17 nt, Homo sapiens
gcggcggcccugugcgg

SEQ ID NO: 34431 - RNA, 17 nt, Homo sapiens
gcggcgggagggcgcgg

SEQ ID NO: 34432 - RNA, 18 nt, Homo sapiens
gcgcagcucaggcuggca

SEQ ID NO: 34433 - RNA, 19 nt, Homo sapiens
gcgaguacuucccgcuguu

SEQ ID NO: 34434 - RNA, 21 nt, Homo sapiens
gcgaguacuucccgcuguucc

SEQ ID NO: 34435 - RNA, 23 nt, Homo sapiens
gcgaguacuucccgcuguuccuc

SEQ ID NO: 34436 - RNA, 13 nt, Homo sapiens
gcgagccccaggc

SEQ ID NO: 34437 - RNA, 15 nt, Homo sapiens
gcgagcgcgcgcgcc

SEQ ID NO: 34438 - RNA, 17 nt, Homo sapiens
gcgagcgcgcgcgcccu

SEQ ID NO: 34439 - RNA, 12 nt, Homo sapiens
gcgaguacuucc

SEQ ID NO: 34440 - RNA, 16 nt, Homo sapiens
gcgcccucuggcugcu

SEQ ID NO: 34441 - RNA, 18 nt, Homo sapiens
gcgcccucuggcugcugg

SEQ ID NO: 34442 - RNA, 19 nt, Homo sapiens
gcgcccucuggcugcuggu

SEQ ID NO: 34443 - RNA, 20 nt, Homo sapiens
gcgcccucuggcugcuggug

SEQ ID NO: 34444 - RNA, 18 nt, Homo sapiens
gcgccgcgcuccucggac

SEQ ID NO: 34445 - RNA, 21 nt, Homo sapiens
gccuggucuaccuguucgcgc

SEQ ID NO: 34446 - RNA, 20 nt, Homo sapiens
gccugagaccaaggcccccg

SEQ ID NO: 34447 - RNA, 21 nt, Homo sapiens
gccugagaccaaggcccccgg

SEQ ID NO: 34448 - RNA, 23 nt, Homo sapiens
gccugagaccaaggcccccgggc

SEQ ID NO: 34449 - RNA, 13 nt, Homo sapiens
gccugcucgccca

SEQ ID NO: 34450 - RNA, 15 nt, Homo sapiens
gccugcucgcccacu

SEQ ID NO: 34451 - RNA, 23 nt, Homo sapiens
gccugcucgcccacuuccucccg

SEQ ID NO: 34452 - RNA, 11 nt, Homo sapiens
gccuccagcug

SEQ ID NO: 34453 - RNA, 15 nt, Homo sapiens
gccuccagcugcccc

SEQ ID NO: 34454 - RNA, 16 nt, Homo sapiens
gccuccagcugccccg

SEQ ID NO: 34455 - RNA, 19 nt, Homo sapiens
gccuccagcugccccgggg

SEQ ID NO: 34456 - RNA, 20 nt, Homo sapiens
gccuccagcugccccgggga

SEQ ID NO: 34457 - RNA, 21 nt, Homo sapiens
gccuccgcuacuuccagggcu

SEQ ID NO: 34458 - RNA, 14 nt, Homo sapiens
gccgcgcuccucgg

SEQ ID NO: 34459 - RNA, 19 nt, Homo sapiens
gccgcgcuccucggacggc

SEQ ID NO: 34460 - RNA, 12 nt, Homo sapiens
gccgcgcugcgc

SEQ ID NO: 34461 - RNA, 13 nt, Homo sapiens
gccgcgcugcgcg

SEQ ID NO: 34462 - RNA, 17 nt, Homo sapiens
gccgcgcugcgcgccgc

SEQ ID NO: 34463 - RNA, 19 nt, Homo sapiens
gccgcgcugcgcgccgcgc

SEQ ID NO: 34464 - RNA, 20 nt, Homo sapiens
gccgcgcugcgcgccgcgcu

SEQ ID NO: 34465 - RNA, 23 nt, Homo sapiens
gccgcgcugcgcgccgcgcuccu

SEQ ID NO: 34466 - RNA, 14 nt, Homo sapiens
gccccggggagggg

SEQ ID NO: 34467 - RNA, 12 nt, Homo sapiens
gccgugggccug

SEQ ID NO: 34468 - RNA, 11 nt, Homo sapiens
gaggggcgcuc

SEQ ID NO: 34469 - RNA, 12 nt, Homo sapiens
gaggggcgcucg

SEQ ID NO: 34470 - RNA, 13 nt, Homo sapiens
gaggggcgcucgc

SEQ ID NO: 34471 - RNA, 15 nt, Homo sapiens
gaggggcgcucgcuu

SEQ ID NO: 34472 - RNA, 18 nt, Homo sapiens
gaggggcgcucgcuuccg

SEQ ID NO: 34473 - RNA, 19 nt, Homo sapiens
gaggggcgcucgcuuccgc

SEQ ID NO: 34474 - RNA, 11 nt, Homo sapiens
gagcucguggg

SEQ ID NO: 34475 - RNA, 12 nt, Homo sapiens
gagcagucagga

SEQ ID NO: 34476 - RNA, 13 nt, Homo sapiens
gagcgagccccag

SEQ ID NO: 34477 - RNA, 15 nt, Homo sapiens
gagcgagccccaggc

SEQ ID NO: 34478 - RNA, 12 nt, Homo sapiens
gagcgcgcgcgc

SEQ ID NO: 34479 - RNA, 15 nt, Homo sapiens
gagcgcgcgcgcccu

SEQ ID NO: 34480 - RNA, 20 nt, Homo sapiens
gagcgcgcgcgcccucuggc

SEQ ID NO: 34481 - RNA, 14 nt, Homo sapiens
gagccggagccucc

SEQ ID NO: 34482 - RNA, 15 nt, Homo sapiens
gagccggagccucca

SEQ ID NO: 34483 - RNA, 16 nt, Homo sapiens
gagccggagccuccag

SEQ ID NO: 34484 - RNA, 17 nt, Homo sapiens
gagccggagccuccagc

SEQ ID NO: 34485 - RNA, 18 nt, Homo sapiens
gagccggagccuccagcu

SEQ ID NO: 34486 - RNA, 20 nt, Homo sapiens
gagccggagccuccagcugc

SEQ ID NO: 34487 - RNA, 22 nt, Homo sapiens
gagccggagccuccagcugccc

SEQ ID NO: 34488 - RNA, 13 nt, Homo sapiens
gagccgggaaaga

SEQ ID NO: 34489 - RNA, 17 nt, Homo sapiens
gagccgggaaagaagag

SEQ ID NO: 34490 - RNA, 22 nt, Homo sapiens
gcaccgcuguacgcgagcgcgc

SEQ ID NO: 34491 - RNA, 18 nt, Homo sapiens
gcagcauaaauguugaca

SEQ ID NO: 34492 - RNA, 21 nt, Homo sapiens
gaugguucccuugaugaagaa

SEQ ID NO: 34493 - RNA, 16 nt, Homo sapiens
gaugcaguucugaaga

SEQ ID NO: 34494 - RNA, 15 nt, Homo sapiens
gauguauagguugau

SEQ ID NO: 34495 - RNA, 22 nt, Homo sapiens
gcaaauugucacaggacagccc

SEQ ID NO: 34496 - RNA, 14 nt, Homo sapiens
gaccaaggcccccg

SEQ ID NO: 34497 - RNA, 15 nt, Homo sapiens
gaccaaggcccccgg

SEQ ID NO: 34498 - RNA, 17 nt, Homo sapiens
gaccaaggcccccgggc

SEQ ID NO: 34499 - RNA, 21 nt, Homo sapiens
gaccaaggcccccgggccgac

SEQ ID NO: 34500 - RNA, 22 nt, Homo sapiens
gaccaaggcccccgggccgacg

SEQ ID NO: 34501 - RNA, 24 nt, Homo sapiens
gaccaaggcccccgggccgacgga

SEQ ID NO: 34502 - RNA, 13 nt, Homo sapiens
gacacacaugaag

SEQ ID NO: 34503 - RNA, 14 nt, Homo sapiens
gacacacugaagaa

SEQ ID NO: 34504 - RNA, 12 nt, Homo sapiens
gaauuggagcuc

SEQ ID NO: 34505 - RNA, 18 nt, Homo sapiens
gaacaguuaccucugccu

SEQ ID NO: 34506 - RNA, 11 nt, Homo sapiens
gaagaacugaa

SEQ ID NO: 34507 - RNA, 18 nt, Homo sapiens
gaagaagcaccaaucaug

SEQ ID NO: 34508 - RNA, 20 nt, Homo sapiens
gaagagccggagccuccagc

SEQ ID NO: 34509 - RNA, 22 nt, Homo sapiens
gaagagccggagccuccagcug

SEQ ID NO: 34510 - RNA, 12 nt, Homo sapiens
gaaggggcggcg

SEQ ID NO: 34511 - RNA, 13 nt, Homo sapiens
gaaggggcggcgg

SEQ ID NO: 34512 - RNA, 14 nt, Homo sapiens
gaaggggcggcggc

SEQ ID NO: 34513 - RNA, 16 nt, Homo sapiens
gaaggggcggcggccc

SEQ ID NO: 34514 - RNA, 13 nt, Homo sapiens
gacgcugcugccg

SEQ ID NO: 34515 - RNA, 14 nt, Homo sapiens
gacgcugcugccgu

SEQ ID NO: 34516 - RNA, 15 nt, Homo sapiens
gacgcugcugccgug

SEQ ID NO: 34517 - RNA, 16 nt, Homo sapiens
gacgcugcugccgugg

SEQ ID NO: 34518 - RNA, 15 nt, Homo sapiens
gacggcuccggacgc

SEQ ID NO: 34519 - RNA, 19 nt, Homo sapiens
gacggcuccggacgcugcu

SEQ ID NO: 34520 - RNA, 20 nt, Homo sapiens
gacggcuccggacgcugcug

SEQ ID NO: 34521 - RNA, 12 nt, Homo sapiens
gaccaucccggc

SEQ ID NO: 34522 - RNA, 13 nt, Homo sapiens
gaccaucccggcc

SEQ ID NO: 34523 - RNA, 14 nt, Homo sapiens
gaccaucccggccg

SEQ ID NO: 34524 - RNA, 15 nt, Homo sapiens
gaccaucccggccgg

SEQ ID NO: 34525 - RNA, 19 nt, Homo sapiens
gaccaucccggccggcgcg

SEQ ID NO: 34526 - RNA, 22 nt, Homo sapiens
gaccaucccggccggcgcgcuc

SEQ ID NO: 34527 - RNA, 23 nt, Homo sapiens
gaccaucccggccggcgcgcuca

SEQ ID NO: 34528 - RNA, 12 nt, Homo sapiens
auggcuuccugg

SEQ ID NO: 34529 - RNA, 21 nt, Homo sapiens
augggacauuugcucauggaa

SEQ ID NO: 34530 - RNA, 16 nt, Homo sapiens
auuauagucacuaguu

SEQ ID NO: 34531 - RNA, 15 nt, Homo sapiens
caaggcccccgggcc

SEQ ID NO: 34532 - RNA, 16 nt, Homo sapiens
caaggcccccgggccg

SEQ ID NO: 34533 - RNA, 17 nt, Homo sapiens
caaggcccccgggccga

SEQ ID NO: 34534 - RNA, 14 nt, Homo sapiens
cacaggggacagga

SEQ ID NO: 34535 - RNA, 12 nt, Homo sapiens
cacacugaagaa

SEQ ID NO: 34536 - RNA, 13 nt, Homo sapiens
cacacugaagaag

SEQ ID NO: 34537 - RNA, 13 nt, Homo sapiens
cacccgcccaccg

SEQ ID NO: 34538 - RNA, 15 nt, Homo sapiens
cacccgcccaccgca

SEQ ID NO: 34539 - RNA, 18 nt, Homo sapiens
cacccgcccaccgcaggg

SEQ ID NO: 34540 - RNA, 22 nt, Homo sapiens
caccgcagggugaacugcagcg

SEQ ID NO: 34541 - RNA, 23 nt, Homo sapiens
caccgcagggugaacugcagcga

SEQ ID NO: 34542 - RNA, 20 nt, Homo sapiens
caccgcuguacgcgagcgcg

SEQ ID NO: 34543 - RNA, 23 nt, Homo sapiens
caccgcuguacgcgagcgcgcgc

SEQ ID NO: 34544 - RNA, 19 nt, Homo sapiens
cacgcucugggucgccggc

SEQ ID NO: 34545 - RNA, 20 nt, Homo sapiens
cacgcucugggucgccggca

SEQ ID NO: 34546 - RNA, 12 nt, Homo sapiens
aguguuggagaa

SEQ ID NO: 34547 - RNA, 24 nt, Homo sapiens
aguucugaagaagaugguaccacc

SEQ ID NO: 34548 - RNA, 13 nt, Homo sapiens
augaauaucaguu

SEQ ID NO: 34549 - RNA, 12 nt, Homo sapiens
augaaggggcgg

SEQ ID NO: 34550 - RNA, 13 nt, Homo sapiens
augaaggggcggc

SEQ ID NO: 34551 - RNA, 17 nt, Homo sapiens
augaaggggcggcggcc

SEQ ID NO: 34552 - RNA, 20 nt, Homo sapiens
augaaggggcggcggcccug

SEQ ID NO: 34553 - RNA, 16 nt, Homo sapiens
aucauuaaaguucuag

SEQ ID NO: 34554 - RNA, 12 nt, Homo sapiens
aucccggccggc

SEQ ID NO: 34555 - RNA, 13 nt, Homo sapiens
aucccggccggcg

SEQ ID NO: 34556 - RNA, 14 nt, Homo sapiens
aucccggccggcgc

SEQ ID NO: 34557 - RNA, 21 nt, Homo sapiens
aucagccuaguugaucagcuu

SEQ ID NO: 34558 - RNA, 12 nt, Homo sapiens
auauuugaaaua

SEQ ID NO: 34559 - RNA, 10 nt, Homo sapiens
aggaugguuc

SEQ ID NO: 34560 - RNA, 11 nt, Homo sapiens
aggaugguucc

SEQ ID NO: 34561 - RNA, 18 nt, Homo sapiens
aggaccaucccggccggc

SEQ ID NO: 34562 - RNA, 20 nt, Homo sapiens
aggaccaucccggccggcgc

SEQ ID NO: 34563 - RNA, 14 nt, Homo sapiens
aggcuggcaccgcu

SEQ ID NO: 34564 - RNA, 15 nt, Homo sapiens
aggcuggcaccgcug

SEQ ID NO: 34565 - RNA, 17 nt, Homo sapiens
aggcggguccgggucgc

SEQ ID NO: 34566 - RNA, 20 nt, Homo sapiens
aggcggguccgggucgcagg

SEQ ID NO: 34567 - RNA, 22 nt, Homo sapiens
aggcggguccgggucgcaggac

SEQ ID NO: 34568 - RNA, 13 nt, Homo sapiens
aggcccccgggcc

SEQ ID NO: 34569 - RNA, 15 nt, Homo sapiens
aggcccccgggccga

SEQ ID NO: 34570 - RNA, 17 nt, Homo sapiens
aggcccccgggccgacg

SEQ ID NO: 34571 - RNA, 19 nt, Homo sapiens
aggcccccgggccgacgga

SEQ ID NO: 34572 - RNA, 20 nt, Homo sapiens
aggcccccgggccgacggag

SEQ ID NO: 34573 - RNA, 15 nt, Homo sapiens
agcugccccggggag

SEQ ID NO: 34574 - RNA, 23 nt, Homo sapiens
agcugccccggggaggggcgcuc

SEQ ID NO: 34575 - RNA, 11 nt, Homo sapiens
agcgcgcgcgc

SEQ ID NO: 34576 - RNA, 13 nt, Homo sapiens
agcgcgcgcgccc

SEQ ID NO: 34577 - RNA, 15 nt, Homo sapiens
agcgcgcgcgcccuc

SEQ ID NO: 34578 - RNA, 14 nt, Homo sapiens
agcgagccccaggc

SEQ ID NO: 34579 - RNA, 21 nt, Homo sapiens
agcgagccccaggcggguccg

SEQ ID NO: 34580 - RNA, 14 nt, Homo sapiens
agcgaguacuuccc

SEQ ID NO: 34581 - RNA, 13 nt, Homo sapiens
agcucaggcuggc

SEQ ID NO: 34582 - RNA, 16 nt, Homo sapiens
agcucaggcuggcacc

SEQ ID NO: 34583 - RNA, 19 nt, Homo sapiens
agcucaggcuggcaccgcu

SEQ ID NO: 34584 - RNA, 20 nt, Homo sapiens
agcucaggcuggcaccgcug

SEQ ID NO: 34585 - RNA, 23 nt, Homo sapiens
agcucaggcuggcaccgcuguac

SEQ ID NO: 34586 - RNA, 13 nt, Homo sapiens
agcucgugggaca

SEQ ID NO: 34587 - RNA, 11 nt, Homo sapiens
aggggcgcucg

SEQ ID NO: 34588 - RNA, 12 nt, Homo sapiens
aggggcgcucgc

SEQ ID NO: 34589 - RNA, 15 nt, Homo sapiens
agggcgcggggcggg

SEQ ID NO: 34590 - RNA, 16 nt, Homo sapiens
agggcgcggggcgggg

SEQ ID NO: 34591 - RNA, 18 nt, Homo sapiens
agggcgcggggcggggag

SEQ ID NO: 34592 - RNA, 15 nt, Homo sapiens
agggcuacgcgcgcu

SEQ ID NO: 34593 - RNA, 16 nt, Homo sapiens
agggcuacgcgcgcuc

SEQ ID NO: 34594 - RNA, 17 nt, Homo sapiens
agggcuacgcgcgcucc

SEQ ID NO: 34595 - RNA, 20 nt, Homo sapiens
agggcuacgcgcgcuccgcg

SEQ ID NO: 34596 - RNA, 21 nt, Homo sapiens
agggcuacgcgcgcuccgcgc

SEQ ID NO: 34597 - RNA, 15 nt, Homo sapiens
agggugaacugcagc

SEQ ID NO: 34598 - RNA, 13 nt, Homo sapiens
aggggcgcucgcu

SEQ ID NO: 34599 - RNA, 14 nt, Homo sapiens
aggggcgcucgcuu

SEQ ID NO: 34600 - RNA, 17 nt, Homo sapiens
aggggcgcucgcuuccg

SEQ ID NO: 34601 - RNA, 18 nt, Homo sapiens
aggggcgcucgcuuccgc

SEQ ID NO: 34602 - RNA, 22 nt, Homo sapiens
aggggcgcucgcuuccgcaucc

SEQ ID NO: 34603 - RNA, 14 nt, Homo sapiens
aggggcggcggccc

SEQ ID NO: 34604 - RNA, 20 nt, Homo sapiens
aggggcggcggcccugugcg

SEQ ID NO: 34605 - RNA, 15 nt, Homo sapiens
agucaccucauggaa

SEQ ID NO: 34606 - RNA, 22 nt, Homo sapiens
agucucuaucauuaaaguucua

SEQ ID NO: 34607 - RNA, 23 nt, Homo sapiens
agucucuaucauuaaaguucuag

SEQ ID NO: 34608 - RNA, 22 nt, Homo sapiens
aguacuucccgcuguuccucgc

SEQ ID NO: 34609 - RNA, 23 nt, Homo sapiens
aguacuucccgcuguuccucgcc

SEQ ID NO: 34610 - RNA, 13 nt, Homo sapiens
accuguucgcgcg

SEQ ID NO: 34611 - RNA, 14 nt, Homo sapiens
accuguucgcgcgc

SEQ ID NO: 34612 - RNA, 22 nt, Homo sapiens
uuugaacuagaguuuagcugga

SEQ ID NO: 34613 - RNA, 14 nt, Homo sapiens
acgcgagcgcgcgc

SEQ ID NO: 34614 - RNA, 15 nt, Homo sapiens
acgcgagcgcgcgcg

SEQ ID NO: 34615 - RNA, 16 nt, Homo sapiens
acgcgagcgcgcgcgc

SEQ ID NO: 34616 - RNA, 17 nt, Homo sapiens
acgcgagcgcgcgcgcc

SEQ ID NO: 34617 - RNA, 19 nt, Homo sapiens
acgcgagcgcgcgcgcccu

SEQ ID NO: 34618 - RNA, 14 nt, Homo sapiens
acgcgcgcuccgcg

SEQ ID NO: 34619 - RNA, 15 nt, Homo sapiens
acgcgcgcuccgcgc

SEQ ID NO: 34620 - RNA, 16 nt, Homo sapiens
acgcgcgcuccgcgca

SEQ ID NO: 34621 - RNA, 17 nt, Homo sapiens
acgcgcgcuccgcgcag

SEQ ID NO: 34622 - RNA, 18 nt, Homo sapiens
acgcgcgcuccgcgcagc

SEQ ID NO: 34623 - RNA, 20 nt, Homo sapiens
acgcgcgcuccgcgcagcuc

SEQ ID NO: 34624 - RNA, 16 nt, Homo sapiens
acgcucugggucgccg

SEQ ID NO: 34625 - RNA, 17 nt, Homo sapiens
acgcucugggucgccgg

SEQ ID NO: 34626 - RNA, 19 nt, Homo sapiens
acgcucugggucgccggca

SEQ ID NO: 34627 - RNA, 20 nt, Homo sapiens
acgcucugggucgccggcau

SEQ ID NO: 34628 - RNA, 21 nt, Homo sapiens
acgcucugggucgccggcauc

SEQ ID NO: 34629 - RNA, 13 nt, Homo sapiens
acgcugcugccgu

SEQ ID NO: 34630 - RNA, 13 nt, Homo sapiens
acggagccgggaa

SEQ ID NO: 34631 - RNA, 12 nt, Homo sapiens
acggcuccggac

SEQ ID NO: 34632 - RNA, 14 nt, Homo sapiens
acggcuccggacgc

SEQ ID NO: 34633 - RNA, 18 nt, Homo sapiens
acggcuccggacgcugcu

SEQ ID NO: 34634 - RNA, 15 nt, Homo sapiens
acuccaaacugacuc

SEQ ID NO: 34635 - RNA, 17 nt, Homo sapiens
acuccaaacugacucuu

SEQ ID NO: 34636 - RNA, 9 nt, Homo sapiens
acugggaca

SEQ ID NO: 34637 - RNA, 11 nt, Homo sapiens
uuugugaagca

SEQ ID NO: 34638 - RNA, 12 nt, Homo sapiens
uuugugaagcaa

SEQ ID NO: 34639 - RNA, 23 nt, Homo sapiens
accgcuguacgcgagcgcgcgcg

SEQ ID NO: 34640 - RNA, 22 nt, Homo sapiens
accgcagggugaacugcagcga

SEQ ID NO: 34641 - RNA, 17 nt, Homo sapiens
accgcuguacgcgagcg

SEQ ID NO: 34642 - RNA, 20 nt, Homo sapiens
accgcuguacgcgagcgcgc

SEQ ID NO: 34643 - RNA, 22 nt, Homo sapiens
accgcuguacgcgagcgcgcgc

SEQ ID NO: 34644 - RNA, 15 nt, Homo sapiens
uuggggcugaugcag

SEQ ID NO: 34645 - RNA, 16 nt, Homo sapiens
uuucaugaaggggcgg

SEQ ID NO: 34646 - RNA, 19 nt, Homo sapiens
uuucaugaaggggcggcgg

SEQ ID NO: 34647 - RNA, 12 nt, Homo sapiens
agccggagccuc

SEQ ID NO: 34648 - RNA, 16 nt, Homo sapiens
agccggagccuccagc

SEQ ID NO: 34649 - RNA, 17 nt, Homo sapiens
agccggagccuccagcu

SEQ ID NO: 34650 - RNA, 18 nt, Homo sapiens
agccggagccuccagcug

SEQ ID NO: 34651 - RNA, 19 nt, Homo sapiens
agccggagccuccagcugc

SEQ ID NO: 34652 - RNA, 20 nt, Homo sapiens
agccggagccuccagcugcc

SEQ ID NO: 34653 - RNA, 23 nt, Homo sapiens
agccggagccuccagcugccccg

SEQ ID NO: 34654 - RNA, 13 nt, Homo sapiens
agccgggaaagaa

SEQ ID NO: 34655 - RNA, 23 nt, Homo sapiens
agccuuggggcugaugcaguugu

SEQ ID NO: 34656 - RNA, 21 nt, Homo sapiens
agccgggaaagaagagccgga

SEQ ID NO: 34657 - RNA, 23 nt, Homo sapiens
agccgggaaagaagagccggagc

SEQ ID NO: 34658 - RNA, 15 nt, Homo sapiens
agccuaguugaucag

SEQ ID NO: 34659 - RNA, 14 nt, Homo sapiens
agccuccagcugcc

SEQ ID NO: 34660 - RNA, 16 nt, Homo sapiens
agccuccagcugcccc

SEQ ID NO: 34661 - RNA, 17 nt, Homo sapiens
agccuccagcugccccg

SEQ ID NO: 34662 - RNA, 18 nt, Homo sapiens
agccuccagcugccccgg

SEQ ID NO: 34663 - RNA, 16 nt, Homo sapiens
agauguauguacuuca

SEQ ID NO: 34664 - RNA, 10 nt, Homo sapiens
agccccaggc

SEQ ID NO: 34665 - RNA, 11 nt, Homo sapiens
agccccaggcg

SEQ ID NO: 34666 - RNA, 12 nt, Homo sapiens
agccccaggcgg

SEQ ID NO: 34667 - RNA, 22 nt, Homo sapiens
agccccaggcggguccgggucg

SEQ ID NO: 34668 - RNA, 15 nt, Homo sapiens
agccagcacagccuc

SEQ ID NO: 34669 - RNA, 12 nt, Homo sapiens
agaagagccgga

SEQ ID NO: 34670 - RNA, 14 nt, Homo sapiens
agaagagccggagc

SEQ ID NO: 34671 - RNA, 15 nt, Homo sapiens
agaagagccggagcc

SEQ ID NO: 34672 - RNA, 21 nt, Homo sapiens
agaagaugguaccaccagucu

SEQ ID NO: 34673 - RNA, 20 nt, Homo sapiens
acuuccagggcuacgcgcgc

SEQ ID NO: 34674 - RNA, 21 nt, Homo sapiens
acuuccagggcuacgcgcgcu

SEQ ID NO: 34675 - RNA, 20 nt, Homo sapiens
acuucccgcuguuccucgcc

SEQ ID NO: 34676 - RNA, 21 nt, Homo sapiens
acuucccgcuguuccucgcca

SEQ ID NO: 34677 - RNA, 13 nt, Homo sapiens
acuuccucccggc

SEQ ID NO: 34678 - RNA, 14 nt, Homo sapiens
acuuccucccggcc

SEQ ID NO: 34679 - RNA, 17 nt, Homo sapiens
acuuccucccggccgcg

SEQ ID NO: 34680 - RNA, 18 nt, Homo sapiens
acuuccucccggccgcgc

SEQ ID NO: 34681 - RNA, 19 nt, Homo sapiens
acuuccucccggccgcgcu

SEQ ID NO: 34682 - RNA, 23 nt, Homo sapiens
acuuccucccggccgcgcugcgc

SEQ ID NO: 34683 - RNA, 15 nt, Homo sapiens
agagaaugagagaca

SEQ ID NO: 34684 - RNA, 12 nt, Homo sapiens
agagccggagcc

SEQ ID NO: 34685 - RNA, 18 nt, Homo sapiens
agagccggagccuccagc

SEQ ID NO: 34686 - RNA, 14 nt, Homo sapiens
agauccuggaaauc

SEQ ID NO: 34687 - RNA, 21 nt, Homo sapiens
uuagaugcaguucugaagaag

SEQ ID NO: 34688 - RNA, 12 nt, Homo sapiens
uuagcuggaaaa

SEQ ID NO: 34689 - RNA, 15 nt, Homo sapiens
uucaugaaggggcgg

SEQ ID NO: 34690 - RNA, 17 nt, Homo sapiens
uucaugaaggggcggcg

SEQ ID NO: 34691 - RNA, 18 nt, Homo sapiens
uucaugaaggggcggcgg

SEQ ID NO: 34692 - RNA, 19 nt, Homo sapiens
uucaugaaggggcggcggc

SEQ ID NO: 34693 - RNA, 14 nt, Homo sapiens
uuccagauccugga

SEQ ID NO: 34694 - RNA, 17 nt, Homo sapiens
uuccagggcuacgcgcg

SEQ ID NO: 34695 - RNA, 18 nt, Homo sapiens
uuccagggcuacgcgcgc

SEQ ID NO: 34696 - RNA, 19 nt, Homo sapiens
uuccagggcuacgcgcgcu

SEQ ID NO: 34697 - RNA, 20 nt, Homo sapiens
uuccagggcuacgcgcgcuc

SEQ ID NO: 34698 - RNA, 18 nt, Homo sapiens
uuccaucaaggguacacu

SEQ ID NO: 34699 - RNA, 12 nt, Homo sapiens
uuccgcauccua

SEQ ID NO: 34700 - RNA, 14 nt, Homo sapiens
uuccucccggccgc

SEQ ID NO: 34701 - RNA, 15 nt, Homo sapiens
uuccucccggccgcg

SEQ ID NO: 34702 - RNA, 12 nt, Homo sapiens
uucgcgcgccuc

SEQ ID NO: 34703 - RNA, 13 nt, Homo sapiens
uucgcgcgccucc

SEQ ID NO: 34704 - RNA, 17 nt, Homo sapiens
acaguuaccucugccuc

SEQ ID NO: 34705 - RNA, 13 nt, Homo sapiens
uucuagugaccga

SEQ ID NO: 34706 - RNA, 18 nt, Homo sapiens
acagcccuucuuuccaca

SEQ ID NO: 34707 - RNA, 11 nt, Homo sapiens
accaucccggc

SEQ ID NO: 34708 - RNA, 12 nt, Homo sapiens
accaucccggcc

SEQ ID NO: 34709 - RNA, 15 nt, Homo sapiens
accaucccggccggc

SEQ ID NO: 34710 - RNA, 21 nt, Homo sapiens
accaucccggccggcgcgcuc

SEQ ID NO: 34711 - RNA, 15 nt, Homo sapiens
acccgcccaccgcag

SEQ ID NO: 34712 - RNA, 17 nt, Homo sapiens
accaaaccagagccuga

SEQ ID NO: 34713 - RNA, 19 nt, Homo sapiens
accaaggcccccgggccga

SEQ ID NO: 34714 - RNA, 20 nt, Homo sapiens
accaaggcccccgggccgac

SEQ ID NO: 34715 - RNA, 22 nt, Homo sapiens
accaaggcccccgggccgacgg

SEQ ID NO: 34716 - RNA, 16 nt, Homo sapiens
uggggcugaugcaguu

SEQ ID NO: 34717 - RNA, 18 nt, Homo sapiens
uggggcugaugcaguugu

SEQ ID NO: 34718 - RNA, 12 nt, Homo sapiens
ugggucgccggc

SEQ ID NO: 34719 - RNA, 13 nt, Homo sapiens
ugggucgccggca

SEQ ID NO: 34720 - RNA, 20 nt, Homo sapiens
uggucuaccuguucgcgcgc

SEQ ID NO: 34721 - RNA, 20 nt, Homo sapiens
uguacgcgagcgcgcgcgcc

SEQ ID NO: 34722 - RNA, 21 nt, Homo sapiens
uguacgcgagcgcgcgcgccc

SEQ ID NO: 34723 - RNA, 23 nt, Homo sapiens
uguacgcgagcgcgcgcgcccuc

SEQ ID NO: 34724 - RNA, 19 nt, Homo sapiens
ugugggcaauguucccccu

SEQ ID NO: 34725 - RNA, 11 nt, Homo sapiens
ugugcggccug

SEQ ID NO: 34726 - RNA, 14 nt, Homo sapiens
ugugcggccugguc

SEQ ID NO: 34727 - RNA, 15 nt, Homo sapiens
uguuccucgccacgc

SEQ ID NO: 34728 - RNA, 17 nt, Homo sapiens
uguucgcgcgccuccgc

SEQ ID NO: 34729 - RNA, 19 nt, Homo sapiens
uguucgcgcgccuccgcua

SEQ ID NO: 34730 - RNA, 15 nt, Homo sapiens
ugcugguggcgcugg

SEQ ID NO: 34731 - RNA, 16 nt, Homo sapiens
ugcugguggcgcuggc

SEQ ID NO: 34732 - RNA, 20 nt, Homo sapiens
ugcugguggcgcuggcugcg

SEQ ID NO: 34733 - RNA, 21 nt, Homo sapiens
ugcugguggcgcuggcugcgc

SEQ ID NO: 34734 - RNA, 11 nt, Homo sapiens
ugcugccgugg

SEQ ID NO: 34735 - RNA, 12 nt, Homo sapiens
ugcugccguggg

SEQ ID NO: 34736 - RNA, 14 nt, Homo sapiens
ugcugccgugggcc

SEQ ID NO: 34737 - RNA, 16 nt, Homo sapiens
ugcugccgugggccug

SEQ ID NO: 34738 - RNA, 19 nt, Homo sapiens
ugcugccgugggccugaga

SEQ ID NO: 34739 - RNA, 17 nt, Homo sapiens
uggaauuggagcucgug

SEQ ID NO: 34740 - RNA, 14 nt, Homo sapiens
uggcgcuggcugcg

SEQ ID NO: 34741 - RNA, 16 nt, Homo sapiens
uggcgcuggcugcgcu

SEQ ID NO: 34742 - RNA, 14 nt, Homo sapiens
uggcugcgcucggc

SEQ ID NO: 34743 - RNA, 18 nt, Homo sapiens
uggcugcgcucggccugc

SEQ ID NO: 34744 - RNA, 15 nt, Homo sapiens
uggcugcugguggcg

SEQ ID NO: 34745 - RNA, 19 nt, Homo sapiens
uggcugcugguggcgcugg

SEQ ID NO: 34746 - RNA, 22 nt, Homo sapiens
uggcugcugguggcgcuggcug

SEQ ID NO: 34747 - RNA, 15 nt, Homo sapiens
ugggacagucaccuc

SEQ ID NO: 34748 - RNA, 13 nt, Homo sapiens
cgccacgcucugg

SEQ ID NO: 34749 - RNA, 14 nt, Homo sapiens
cgccacgcucuggg

SEQ ID NO: 34750 - RNA, 18 nt, Homo sapiens
cgccacgcucugggucgc

SEQ ID NO: 34751 - RNA, 19 nt, Homo sapiens
cgccacgcucugggucgcc

SEQ ID NO: 34752 - RNA, 20 nt, Homo sapiens
cgccacgcucugggucgccg

SEQ ID NO: 34753 - RNA, 23 nt, Homo sapiens
cgccacgcucugggucgccggca

SEQ ID NO: 34754 - RNA, 13 nt, Homo sapiens
cgcccaccgcagg

SEQ ID NO: 34755 - RNA, 14 nt, Homo sapiens
cgcccacuuccucc

SEQ ID NO: 34756 - RNA, 17 nt, Homo sapiens
cgcccacuuccucccgg

SEQ ID NO: 34757 - RNA, 18 nt, Homo sapiens
cgcccacuuccucccggc

SEQ ID NO: 34758 - RNA, 19 nt, Homo sapiens
cgcccacuuccucccggcc

SEQ ID NO: 34759 - RNA, 21 nt, Homo sapiens
cgcccacuuccucccggccgc

SEQ ID NO: 34760 - RNA, 23 nt, Homo sapiens
cgcccacuuccucccggccgcgc

SEQ ID NO: 34761 - RNA, 11 nt, Homo sapiens
cgcccucuggc

SEQ ID NO: 34762 - RNA, 12 nt, Homo sapiens
cgcccucuggcu

SEQ ID NO: 34763 - RNA, 14 nt, Homo sapiens
cgcccucuggcugc

SEQ ID NO: 34764 - RNA, 17 nt, Homo sapiens
cgcccucuggcugcugg

SEQ ID NO: 34765 - RNA, 18 nt, Homo sapiens
cgcccucuggcugcuggu

SEQ ID NO: 34766 - RNA, 19 nt, Homo sapiens
cgcccucuggcugcuggug

SEQ ID NO: 34767 - RNA, 21 nt, Homo sapiens
cgcccucuggcugcugguggc

SEQ ID NO: 34768 - RNA, 16 nt, Homo sapiens
cgccgcgcuccucgga

SEQ ID NO: 34769 - RNA, 22 nt, Homo sapiens
cgccgcgcuccucggacggcuc

SEQ ID NO: 34770 - RNA, 14 nt, Homo sapiens
cgccggcaucuucu

SEQ ID NO: 34771 - RNA, 14 nt, Homo sapiens
cgacggagccggga

SEQ ID NO: 34772 - RNA, 16 nt, Homo sapiens
cgacggagccgggaaa

SEQ ID NO: 34773 - RNA, 23 nt, Homo sapiens
cgacggagccgggaaagaagagc

SEQ ID NO: 34774 - RNA, 15 nt, Homo sapiens
cgcagcucaggcugg

SEQ ID NO: 34775 - RNA, 17 nt, Homo sapiens
cgcagcucaggcuggca

SEQ ID NO: 34776 - RNA, 19 nt, Homo sapiens
cgcagcucaggcuggcacc

SEQ ID NO: 34777 - RNA, 22 nt, Homo sapiens
cgcaggaccaucccggccggcg

SEQ ID NO: 34778 - RNA, 12 nt, Homo sapiens
cgagccccaggc

SEQ ID NO: 34779 - RNA, 18 nt, Homo sapiens
cgagccccaggcgggucc

SEQ ID NO: 34780 - RNA, 13 nt, Homo sapiens
cgagcgcgcgcgc

SEQ ID NO: 34781 - RNA, 14 nt, Homo sapiens
cgagcgcgcgcgcc

SEQ ID NO: 34782 - RNA, 15 nt, Homo sapiens
cgagcgcgcgcgccc

SEQ ID NO: 34783 - RNA, 18 nt, Homo sapiens
cgagcgcgcgcgcccucu

SEQ ID NO: 34784 - RNA, 13 nt, Homo sapiens
cgcgcagcucagg

SEQ ID NO: 34785 - RNA, 14 nt, Homo sapiens
cgcgcagcucaggc

SEQ ID NO: 34786 - RNA, 19 nt, Homo sapiens
cgcgcagcucaggcuggca

SEQ ID NO: 34787 - RNA, 19 nt, Homo sapiens
cgcagggugaacugcagcg

SEQ ID NO: 34788 - RNA, 14 nt, Homo sapiens
cgcgagcgcgcgcg

SEQ ID NO: 34789 - RNA, 15 nt, Homo sapiens
cgcgagcgcgcgcgc

SEQ ID NO: 34790 - RNA, 16 nt, Homo sapiens
cgcgagcgcgcgcgcc

SEQ ID NO: 34791 - RNA, 17 nt, Homo sapiens
cgcgagcgcgcgcgccc

SEQ ID NO: 34792 - RNA, 18 nt, Homo sapiens
cgcgagcgcgcgcgcccu

SEQ ID NO: 34793 - RNA, 20 nt, Homo sapiens
cgcgagcgcgcgcgcccucu

SEQ ID NO: 34794 - RNA, 21 nt, Homo sapiens
cgcgcgcccucuggcugcugg

SEQ ID NO: 34795 - RNA, 10 nt, Homo sapiens
cgcgcgccuc

SEQ ID NO: 34796 - RNA, 13 nt, Homo sapiens
cgcgcgccuccgc

SEQ ID NO: 34797 - RNA, 17 nt, Homo sapiens
cgcgcgccuccgcuacu

SEQ ID NO: 34798 - RNA, 23 nt, Homo sapiens
cgcgcgccuccgcuacuuccagg

SEQ ID NO: 34799 - RNA, 11 nt, Homo sapiens
cgcgcgcuccg

SEQ ID NO: 34800 - RNA, 15 nt, Homo sapiens
cgcgcgcuccgcgca

SEQ ID NO: 34801 - RNA, 18 nt, Homo sapiens
cgcgcucaucccacccgc

SEQ ID NO: 34802 - RNA, 20 nt, Homo sapiens
cgcgcucaucccacccgccc

SEQ ID NO: 34803 - RNA, 21 nt, Homo sapiens
cgcgcucaucccacccgccca

SEQ ID NO: 34804 - RNA, 22 nt, Homo sapiens
cgcgcucaucccacccgcccac

SEQ ID NO: 34805 - RNA, 11 nt, Homo sapiens
cgcgcuccgcg

SEQ ID NO: 34806 - RNA, 15 nt, Homo sapiens
cgcgcuccgcgcagc

SEQ ID NO: 34807 - RNA, 17 nt, Homo sapiens
cgcgcuccgcgcagcuc

SEQ ID NO: 34808 - RNA, 15 nt, Homo sapiens
cgcgcuccucggacg

SEQ ID NO: 34809 - RNA, 16 nt, Homo sapiens
cgcgcuccucggacgg

SEQ ID NO: 34810 - RNA, 17 nt, Homo sapiens
cgcgcuccucggacggc

SEQ ID NO: 34811 - RNA, 12 nt, Homo sapiens
cgcgcugcgcgc

SEQ ID NO: 34812 - RNA, 14 nt, Homo sapiens
cgcgcugcgcgccg

SEQ ID NO: 34813 - RNA, 17 nt, Homo sapiens
cgcgcugcgcgccgcgc

SEQ ID NO: 34814 - RNA, 18 nt, Homo sapiens
cgcgcugcgcgccgcgcu

SEQ ID NO: 34815 - RNA, 19 nt, Homo sapiens
cgcgcugcgcgccgcgcuc

SEQ ID NO: 34816 - RNA, 20 nt, Homo sapiens
cgcgcugcgcgccgcgcucc

SEQ ID NO: 34817 - RNA, 19 nt, Homo sapiens
cgcggcgggagggcgcggg

SEQ ID NO: 34818 - RNA, 22 nt, Homo sapiens
cgcggcgggagggcgcggggcg

SEQ ID NO: 34819 - RNA, 12 nt, Homo sapiens
cgcggggcgggg

SEQ ID NO: 34820 - RNA, 15 nt, Homo sapiens
cgcggggcggggagc

SEQ ID NO: 34821 - RNA, 23 nt, Homo sapiens
cgcggggcggggagcgagcccca

SEQ ID NO: 34822 - RNA, 16 nt, Homo sapiens
cgcuacuuccagggcu

SEQ ID NO: 34823 - RNA, 22 nt, Homo sapiens
cgcuacuuccagggcuacgcgc

SEQ ID NO: 34824 - RNA, 13 nt, Homo sapiens
cgcgcccucuggc

SEQ ID NO: 34825 - RNA, 18 nt, Homo sapiens
cgcgcccucuggcugcug

SEQ ID NO: 34826 - RNA, 12 nt, Homo sapiens
cgcgccgcgcuc

SEQ ID NO: 34827 - RNA, 15 nt, Homo sapiens
cgcgccgcgcuccuc

SEQ ID NO: 34828 - RNA, 18 nt, Homo sapiens
cgcgccgcgcuccucgga

SEQ ID NO: 34829 - RNA, 22 nt, Homo sapiens
cgcgccgcgcuccucggacggc

SEQ ID NO: 34830 - RNA, 17 nt, Homo sapiens
cgcucaucccacccgcc

SEQ ID NO: 34831 - RNA, 18 nt, Homo sapiens
cgcucaucccacccgccc

SEQ ID NO: 34832 - RNA, 14 nt, Homo sapiens
cgcuccgcgcagcu

SEQ ID NO: 34833 - RNA, 19 nt, Homo sapiens
cgcuccgcgcagcucaggc

SEQ ID NO: 34834 - RNA, 20 nt, Homo sapiens
cgcuccgcgcagcucaggcu

SEQ ID NO: 34835 - RNA, 13 nt, Homo sapiens
cgcuccucggacg

SEQ ID NO: 34836 - RNA, 15 nt, Homo sapiens
cgcuccucggacggc

SEQ ID NO: 34837 - RNA, 20 nt, Homo sapiens
cgcuccucggacggcuccgg

SEQ ID NO: 34838 - RNA, 14 nt, Homo sapiens
cgcucgcuuccgca

SEQ ID NO: 34839 - RNA, 13 nt, Homo sapiens
cgcucugggucgc

SEQ ID NO: 34840 - RNA, 18 nt, Homo sapiens
cgcucugggucgccggca

SEQ ID NO: 34841 - RNA, 19 nt, Homo sapiens
cgcucugggucgccggcau

SEQ ID NO: 34842 - RNA, 20 nt, Homo sapiens
cgcucugggucgccggcauc

SEQ ID NO: 34843 - RNA, 13 nt, Homo sapiens
cgcugcgcgccgc

SEQ ID NO: 34844 - RNA, 16 nt, Homo sapiens
cgcugcgcgccgcgcu

SEQ ID NO: 34845 - RNA, 13 nt, Homo sapiens
cgcugcugccgug

SEQ ID NO: 34846 - RNA, 19 nt, Homo sapiens
cgcugcugccgugggccug

SEQ ID NO: 34847 - RNA, 11 nt, Homo sapiens
cgcuggcugcg

SEQ ID NO: 34848 - RNA, 12 nt, Homo sapiens
cgcuggcugcgc

SEQ ID NO: 34849 - RNA, 15 nt, Homo sapiens
cgcuggcugcgcucg

SEQ ID NO: 34850 - RNA, 18 nt, Homo sapiens
cgcuggcugcgcucggcc

SEQ ID NO: 34851 - RNA, 19 nt, Homo sapiens
cgcuggcugcgcucggccu

SEQ ID NO: 34852 - RNA, 20 nt, Homo sapiens
cgcuggcugcgcucggccug

SEQ ID NO: 34853 - RNA, 16 nt, Homo sapiens
cgcuguacgcgagcgc

SEQ ID NO: 34854 - RNA, 18 nt, Homo sapiens
cgcuguacgcgagcgcgc

SEQ ID NO: 34855 - RNA, 20 nt, Homo sapiens
cgcuguacgcgagcgcgcgc

SEQ ID NO: 34856 - RNA, 22 nt, Homo sapiens
cgcuguacgcgagcgcgcgcgc

SEQ ID NO: 34857 - RNA, 16 nt, Homo sapiens
cgcuguuccucgccac

SEQ ID NO: 34858 - RNA, 15 nt, Homo sapiens
cgcucgcuuccgcau

SEQ ID NO: 34859 - RNA, 16 nt, Homo sapiens
cgcucgcuuccgcauc

SEQ ID NO: 34860 - RNA, 17 nt, Homo sapiens
cgcucgcuuccgcaucc

SEQ ID NO: 34861 - RNA, 10 nt, Homo sapiens
cgcucggccu

SEQ ID NO: 34862 - RNA, 14 nt, Homo sapiens
cgcucggccugcuc

SEQ ID NO: 34863 - RNA, 16 nt, Homo sapiens
cgcucggccugcucgc

SEQ ID NO: 34864 - RNA, 18 nt, Homo sapiens
cgcucggccugcucgccc

SEQ ID NO: 34865 - RNA, 12 nt, Homo sapiens
cggacgcugcug

SEQ ID NO: 34866 - RNA, 13 nt, Homo sapiens
cggacgcugcugc

SEQ ID NO: 34867 - RNA, 16 nt, Homo sapiens
cggacgcugcugccgu

SEQ ID NO: 34868 - RNA, 20 nt, Homo sapiens
cggacgcugcugccgugggc

SEQ ID NO: 34869 - RNA, 21 nt, Homo sapiens
cggacgcugcugccgugggcc

SEQ ID NO: 34870 - RNA, 15 nt, Homo sapiens
cggacggcuccggac

SEQ ID NO: 34871 - RNA, 16 nt, Homo sapiens
cggacggcuccggacg

SEQ ID NO: 34872 - RNA, 12 nt, Homo sapiens
cggcccugugcg

SEQ ID NO: 34873 - RNA, 15 nt, Homo sapiens
cggcccugugcggcc

SEQ ID NO: 34874 - RNA, 17 nt, Homo sapiens
cggcccugugcggccug

SEQ ID NO: 34875 - RNA, 21 nt, Homo sapiens
cggcccugugcggccuggucu

SEQ ID NO: 34876 - RNA, 11 nt, Homo sapiens
cggccgcgcug

SEQ ID NO: 34877 - RNA, 12 nt, Homo sapiens
cggccgcgcugc

SEQ ID NO: 34878 - RNA, 13 nt, Homo sapiens
cggccgcgcugcg

SEQ ID NO: 34879 - RNA, 14 nt, Homo sapiens
cggccgcgcugcgc

SEQ ID NO: 34880 - RNA, 19 nt, Homo sapiens
cggccgcgcugcgcgccgc

SEQ ID NO: 34881 - RNA, 22 nt, Homo sapiens
cggccgcgcugcgcgccgcgcu

SEQ ID NO: 34882 - RNA, 14 nt, Homo sapiens
cggccggcgcgcuc

SEQ ID NO: 34883 - RNA, 16 nt, Homo sapiens
cggccggcgcgcucau

SEQ ID NO: 34884 - RNA, 22 nt, Homo sapiens
cggccuggucuaccuguucgcg

SEQ ID NO: 34885 - RNA, 23 nt, Homo sapiens
cggccuggucuaccuguucgcgc

SEQ ID NO: 34886 - RNA, 24 nt, Homo sapiens
cggccuggucuaccuguucgcgcg

SEQ ID NO: 34887 - RNA, 16 nt, Homo sapiens
cggcgcgcucauccca

SEQ ID NO: 34888 - RNA, 15 nt, Homo sapiens
cggcggcccugugcg

SEQ ID NO: 34889 - RNA, 16 nt, Homo sapiens
cggcggcccugugcgg

SEQ ID NO: 34890 - RNA, 17 nt, Homo sapiens
cggcggcccugugcggc

SEQ ID NO: 34891 - RNA, 18 nt, Homo sapiens
cggcggcccugugcggcc

SEQ ID NO: 34892 - RNA, 20 nt, Homo sapiens
cggcggcccugugcggccug

SEQ ID NO: 34893 - RNA, 23 nt, Homo sapiens
cggcggcccugugcggccugguc

SEQ ID NO: 34894 - RNA, 13 nt, Homo sapiens
cggcgggagggcg

SEQ ID NO: 34895 - RNA, 19 nt, Homo sapiens
cggcgggagggcgcggggc

SEQ ID NO: 34896 - RNA, 20 nt, Homo sapiens
cggcgggagggcgcggggcg

SEQ ID NO: 34897 - RNA, 17 nt, Homo sapiens
cggcuccggacgcugcu

SEQ ID NO: 34898 - RNA, 13 nt, Homo sapiens
cgggaaagaagag

SEQ ID NO: 34899 - RNA, 13 nt, Homo sapiens
cggguccgggucg

SEQ ID NO: 34900 - RNA, 14 nt, Homo sapiens
cggggagcgagccc

SEQ ID NO: 34901 - RNA, 15 nt, Homo sapiens
cggggagcgagcccc

SEQ ID NO: 34902 - RNA, 13 nt, Homo sapiens
cggggaggggcgc

SEQ ID NO: 34903 - RNA, 16 nt, Homo sapiens
cggggaggggcgcucg

SEQ ID NO: 34904 - RNA, 14 nt, Homo sapiens
cggggcggggagcg

SEQ ID NO: 34905 - RNA, 16 nt, Homo sapiens
cggggcggggagcgag

SEQ ID NO: 34906 - RNA, 17 nt, Homo sapiens
cggggcggggagcgagc

SEQ ID NO: 34907 - RNA, 18 nt, Homo sapiens
cggggcggggagcgagcc

SEQ ID NO: 34908 - RNA, 13 nt, Homo sapiens
cgugggccugaga

SEQ ID NO: 34909 - RNA, 14 nt, Homo sapiens
cgugggccugagac

SEQ ID NO: 34910 - RNA, 11 nt, Homo sapiens
cgggccgacgg

SEQ ID NO: 34911 - RNA, 12 nt, Homo sapiens
cgggccgacgga

SEQ ID NO: 34912 - RNA, 14 nt, Homo sapiens
cgggccgacggagc

SEQ ID NO: 34913 - RNA, 15 nt, Homo sapiens
cgggccgacggagcc

SEQ ID NO: 34914 - RNA, 18 nt, Homo sapiens
cgggccgacggagccggg

SEQ ID NO: 34915 - RNA, 19 nt, Homo sapiens
cgggccgacggagccggga

SEQ ID NO: 34916 - RNA, 13 nt, Homo sapiens
cgggagggcgcgg

SEQ ID NO: 34917 - RNA, 14 nt, Homo sapiens
cgggagggcgcggg

SEQ ID NO: 34918 - RNA, 17 nt, Homo sapiens
cgggagggcgcggggcg

SEQ ID NO: 34919 - RNA, 18 nt, Homo sapiens
cgggagggcgcggggcgg

SEQ ID NO: 34920 - RNA, 20 nt, Homo sapiens
cggagccgggaaagaagagc

SEQ ID NO: 34921 - RNA, 13 nt, Homo sapiens
cggagccuccagc

SEQ ID NO: 34922 - RNA, 15 nt, Homo sapiens
cggagccuccagcug

SEQ ID NO: 34923 - RNA, 17 nt, Homo sapiens
cggagccuccagcugcc

SEQ ID NO: 34924 - RNA, 18 nt, Homo sapiens
cggagccuccagcugccc

SEQ ID NO: 34925 - RNA, 22 nt, Homo sapiens
cggagccuccagcugccccggg

SEQ ID NO: 34926 - RNA, 18 nt, Homo sapiens
cgcuguuccucgccacgc

SEQ ID NO: 34927 - RNA, 22 nt, Homo sapiens
cgcuguuccucgccacgcucug

SEQ ID NO: 34928 - RNA, 15 nt, Homo sapiens
cgcuuccgcauccua

SEQ ID NO: 34929 - RNA, 16 nt, Homo sapiens
cgggaaagaagagccg

SEQ ID NO: 34930 - RNA, 20 nt, Homo sapiens
cgggaaagaagagccggagc

SEQ ID NO: 34931 - RNA, 21 nt, Homo sapiens
cgggaaagaagagccggagcc

SEQ ID NO: 34932 - RNA, 23 nt, Homo sapiens
cgggaaagaagagccggagccuc

SEQ ID NO: 34933 - RNA, 17 nt, Homo sapiens
cuaguaauuggaaaggc

SEQ ID NO: 34934 - RNA, 16 nt, Homo sapiens
cuacuuccagggcuac

SEQ ID NO: 34935 - RNA, 22 nt, Homo sapiens
cuacuuccagggcuacgcgcgc

SEQ ID NO: 34936 - RNA, 16 nt, Homo sapiens
cuaccuguucgcgcgc

SEQ ID NO: 34937 - RNA, 18 nt, Homo sapiens
cuaccuguucgcgcgccu

SEQ ID NO: 34938 - RNA, 19 nt, Homo sapiens
cuaccuguucgcgcgccuc

SEQ ID NO: 34939 - RNA, 22 nt, Homo sapiens
cuaccuguucgcgcgccuccgc

SEQ ID NO: 34940 - RNA, 10 nt, Homo sapiens
cuacgcgcgc

SEQ ID NO: 34941 - RNA, 12 nt, Homo sapiens
cuacgcgcgcuc

SEQ ID NO: 34942 - RNA, 18 nt, Homo sapiens
cuacgcgcgcuccgcgca

SEQ ID NO: 34943 - RNA, 21 nt, Homo sapiens
cuacgcgcgcuccgcgcagcu

SEQ ID NO: 34944 - RNA, 23 nt, Homo sapiens
cuacgcgcgcuccgcgcagcuca

SEQ ID NO: 34945 - RNA, 13 nt, Homo sapiens
cuaucucauuucc

SEQ ID NO: 34946 - RNA, 22 nt, Homo sapiens
cucauggaauuggagcucgugg

SEQ ID NO: 34947 - RNA, 23 nt, Homo sapiens
cucauggaauuggagcucgugga

SEQ ID NO: 34948 - RNA, 17 nt, Homo sapiens
cucaggcuggcaccgcu

SEQ ID NO: 34949 - RNA, 21 nt, Homo sapiens
cucaggcuggcaccgcuguac

SEQ ID NO: 34950 - RNA, 23 nt, Homo sapiens
cucaggcuggcaccgcuguacgc

SEQ ID NO: 34951 - RNA, 15 nt, Homo sapiens
cucaucccacccgcc

SEQ ID NO: 34952 - RNA, 16 nt, Homo sapiens
cucaucccacccgccc

SEQ ID NO: 34953 - RNA, 18 nt, Homo sapiens
cuugucaauaaaauccau

SEQ ID NO: 34954 - RNA, 17 nt, Homo sapiens
cuuuaaaacuuauccuc

SEQ ID NO: 34955 - RNA, 21 nt, Homo sapiens
cuuucaugaaggggcggcggc

SEQ ID NO: 34956 - RNA, 22 nt, Homo sapiens
cuuucaugaaggggcggcggcc

SEQ ID NO: 34957 - RNA, 13 nt, Homo sapiens
gaaagguacuuca

SEQ ID NO: 34958 - RNA, 14 nt, Homo sapiens
gaaagguacuucaa

SEQ ID NO: 34959 - RNA, 23 nt, Homo sapiens
gaaagggcuguuauaaucuuuca

SEQ ID NO: 34960 - RNA, 14 nt, Homo sapiens
gaaagaagagccgg

SEQ ID NO: 34961 - RNA, 13 nt, Homo sapiens
gaaaacaaggaug

SEQ ID NO: 34962 - RNA, 13 nt, Homo sapiens
cuugaugaagaag

SEQ ID NO: 34963 - RNA, 21 nt, Homo sapiens
cuucuuucaugaaggggcggc

SEQ ID NO: 34964 - RNA, 12 nt, Homo sapiens
cuucccgcuguu

SEQ ID NO: 34965 - RNA, 13 nt, Homo sapiens
cuucccgcuguuc

SEQ ID NO: 34966 - RNA, 14 nt, Homo sapiens
cuuccucccggccg

SEQ ID NO: 34967 - RNA, 15 nt, Homo sapiens
cuuccucccggccgc

SEQ ID NO: 34968 - RNA, 16 nt, Homo sapiens
cuuccucccggccgcg

SEQ ID NO: 34969 - RNA, 19 nt, Homo sapiens
cuuccucccggccgcgcug

SEQ ID NO: 34970 - RNA, 21 nt, Homo sapiens
cuuccagauccuggaaaucag

SEQ ID NO: 34971 - RNA, 16 nt, Homo sapiens
cuuccagggcuacgcg

SEQ ID NO: 34972 - RNA, 17 nt, Homo sapiens
cuuccagggcuacgcgc

SEQ ID NO: 34973 - RNA, 19 nt, Homo sapiens
cuuccagggcuacgcgcgc

SEQ ID NO: 34974 - RNA, 20 nt, Homo sapiens
cuuccagggcuacgcgcgcu

SEQ ID NO: 34975 - RNA, 22 nt, Homo sapiens
cuuccagggcuacgcgcgcucc

SEQ ID NO: 34976 - RNA, 23 nt, Homo sapiens
cuuccagggcuacgcgcgcuccg

SEQ ID NO: 34977 - RNA, 13 nt, Homo sapiens
cuguuccucgcca

SEQ ID NO: 34978 - RNA, 17 nt, Homo sapiens
cuguuccucgccacgcu

SEQ ID NO: 34979 - RNA, 22 nt, Homo sapiens
cuguuccucgccacgcucuggg

SEQ ID NO: 34980 - RNA, 13 nt, Homo sapiens
cuguucgcgcgcc

SEQ ID NO: 34981 - RNA, 19 nt, Homo sapiens
cuguucgcgcgccuccgcu

SEQ ID NO: 34982 - RNA, 11 nt, Homo sapiens
cugugcggccu

SEQ ID NO: 34983 - RNA, 12 nt, Homo sapiens
cugugcggccug

SEQ ID NO: 34984 - RNA, 13 nt, Homo sapiens
cugugcggccugg

SEQ ID NO: 34985 - RNA, 21 nt, Homo sapiens
cugguggcgcuggcugcgcuc

SEQ ID NO: 34986 - RNA, 22 nt, Homo sapiens
cugguggcgcuggcugcgcucg

SEQ ID NO: 34987 - RNA, 14 nt, Homo sapiens
cuguacgcgagcgc

SEQ ID NO: 34988 - RNA, 18 nt, Homo sapiens
cuguacgcgagcgcgcgc

SEQ ID NO: 34989 - RNA, 19 nt, Homo sapiens
cuguacgcgagcgcgcgcg

SEQ ID NO: 34990 - RNA, 22 nt, Homo sapiens
cuguacgcgagcgcgcgcgccc

SEQ ID NO: 34991 - RNA, 12 nt, Homo sapiens
cuggcaccgcug

SEQ ID NO: 34992 - RNA, 21 nt, Homo sapiens
cuggcaccgcuguacgcgagc

SEQ ID NO: 34993 - RNA, 12 nt, Homo sapiens
cuggcugcgcuc

SEQ ID NO: 34994 - RNA, 14 nt, Homo sapiens
cuggcugcgcucgg

SEQ ID NO: 34995 - RNA, 15 nt, Homo sapiens
cuggcugcgcucggc

SEQ ID NO: 34996 - RNA, 16 nt, Homo sapiens
cuggcugcgcucggcc

SEQ ID NO: 34997 - RNA, 17 nt, Homo sapiens
cuggcugcgcucggccu

SEQ ID NO: 34998 - RNA, 22 nt, Homo sapiens
cuggcugcgcucggccugcucg

SEQ ID NO: 34999 - RNA, 24 nt, Homo sapiens
cuggcugcgcucggccugcucgcc

SEQ ID NO: 35000 - RNA, 11 nt, Homo sapiens
cuggcugcugg

SEQ ID NO: 35001 - RNA, 14 nt, Homo sapiens
cuggcugcuggugg

SEQ ID NO: 35002 - RNA, 21 nt, Homo sapiens
cuggcugcugguggcgcuggc

SEQ ID NO: 35003 - RNA, 11 nt, Homo sapiens
cugggacaggg

SEQ ID NO: 35004 - RNA, 14 nt, Homo sapiens
cugggucgccggca

SEQ ID NO: 35005 - RNA, 15 nt, Homo sapiens
cugggucgccggcau

SEQ ID NO: 35006 - RNA, 18 nt, Homo sapiens
cuggucuaccuguucgcg

SEQ ID NO: 35007 - RNA, 21 nt, Homo sapiens
cuggucuaccuguucgcgcgc

SEQ ID NO: 35008 - RNA, 14 nt, Homo sapiens
cugacucuuaagaa

SEQ ID NO: 35009 - RNA, 19 nt, Homo sapiens
cugagaccaaggcccccgg

SEQ ID NO: 35010 - RNA, 22 nt, Homo sapiens
cugccccggggaggggcgcucg

SEQ ID NO: 35011 - RNA, 13 nt, Homo sapiens
cugccgugggccu

SEQ ID NO: 35012 - RNA, 17 nt, Homo sapiens
cugccgugggccugaga

SEQ ID NO: 35013 - RNA, 18 nt, Homo sapiens
cugccgugggccugagac

SEQ ID NO: 35014 - RNA, 12 nt, Homo sapiens
cugcgcgccgcg

SEQ ID NO: 35015 - RNA, 13 nt, Homo sapiens
cugcgcgccgcgc

SEQ ID NO: 35016 - RNA, 15 nt, Homo sapiens
cugcgcgccgcgcuc

SEQ ID NO: 35017 - RNA, 16 nt, Homo sapiens
cugcgcgccgcgcucc

SEQ ID NO: 35018 - RNA, 20 nt, Homo sapiens
cugcgcgccgcgcuccucgg

SEQ ID NO: 35019 - RNA, 12 nt, Homo sapiens
cugcgcucggcc

SEQ ID NO: 35020 - RNA, 14 nt, Homo sapiens
cugcgcucggccug

SEQ ID NO: 35021 - RNA, 18 nt, Homo sapiens
cugcgcucggccugcucg

SEQ ID NO: 35022 - RNA, 19 nt, Homo sapiens
cugcgcucggccugcucgc

SEQ ID NO: 35023 - RNA, 14 nt, Homo sapiens
cugcugguggcgcu

SEQ ID NO: 35024 - RNA, 16 nt, Homo sapiens
cugcugguggcgcugg

SEQ ID NO: 35025 - RNA, 17 nt, Homo sapiens
cugcugguggcgcuggc

SEQ ID NO: 35026 - RNA, 19 nt, Homo sapiens
cugcugguggcgcuggcug

SEQ ID NO: 35027 - RNA, 21 nt, Homo sapiens
cugcugguggcgcuggcugcg

SEQ ID NO: 35028 - RNA, 22 nt, Homo sapiens
cugcugguggcgcuggcugcgc

SEQ ID NO: 35029 - RNA, 22 nt, Homo sapiens
cugcucgcccacuuccucccgg

SEQ ID NO: 35030 - RNA, 14 nt, Homo sapiens
cugcugccgugggc

SEQ ID NO: 35031 - RNA, 18 nt, Homo sapiens
cugcugccgugggccuga

SEQ ID NO: 35032 - RNA, 12 nt, Homo sapiens
cucggccugcuc

SEQ ID NO: 35033 - RNA, 13 nt, Homo sapiens
cucggccugcucg

SEQ ID NO: 35034 - RNA, 14 nt, Homo sapiens
cucggccugcucgc

SEQ ID NO: 35035 - RNA, 15 nt, Homo sapiens
cucggccugcucgcc

SEQ ID NO: 35036 - RNA, 17 nt, Homo sapiens
cucggccugcucgccca

SEQ ID NO: 35037 - RNA, 14 nt, Homo sapiens
cucgcuuccgcauc

SEQ ID NO: 35038 - RNA, 22 nt, Homo sapiens
cucgcuuccgcauccuagucuc

SEQ ID NO: 35039 - RNA, 18 nt, Homo sapiens
cucggacggcuccggacg

SEQ ID NO: 35040 - RNA, 19 nt, Homo sapiens
cucggacggcuccggacgc

SEQ ID NO: 35041 - RNA, 13 nt, Homo sapiens
cucgccacgcucu

SEQ ID NO: 35042 - RNA, 19 nt, Homo sapiens
cucgccacgcucugggucg

SEQ ID NO: 35043 - RNA, 20 nt, Homo sapiens
cucgcccacuuccucccggc

SEQ ID NO: 35044 - RNA, 11 nt, Homo sapiens
cucgcuuccgc

SEQ ID NO: 35045 - RNA, 13 nt, Homo sapiens
cucuuaagaagac

SEQ ID NO: 35046 - RNA, 16 nt, Homo sapiens
cucuuaagaagacugc

SEQ ID NO: 35047 - RNA, 12 nt, Homo sapiens
cucuggcugcug

SEQ ID NO: 35048 - RNA, 13 nt, Homo sapiens
cucuggcugcugg

SEQ ID NO: 35049 - RNA, 20 nt, Homo sapiens
cucuggcugcugguggcgcu

SEQ ID NO: 35050 - RNA, 23 nt, Homo sapiens
cucuggcugcugguggcgcuggc

SEQ ID NO: 35051 - RNA, 14 nt, Homo sapiens
cucugggucgccgg

SEQ ID NO: 35052 - RNA, 16 nt, Homo sapiens
cucugggucgccggca

SEQ ID NO: 35053 - RNA, 14 nt, Homo sapiens
cucucuuccucccu

SEQ ID NO: 35054 - RNA, 13 nt, Homo sapiens
cuccucggacggc

SEQ ID NO: 35055 - RNA, 14 nt, Homo sapiens
cuccucggacggcu

SEQ ID NO: 35056 - RNA, 16 nt, Homo sapiens
cuccucggacggcucc

SEQ ID NO: 35057 - RNA, 14 nt, Homo sapiens
cuccgcgcagcuca

SEQ ID NO: 35058 - RNA, 19 nt, Homo sapiens
cuccgcgcagcucaggcug

SEQ ID NO: 35059 - RNA, 20 nt, Homo sapiens
cuccgcgcagcucaggcugg

SEQ ID NO: 35060 - RNA, 16 nt, Homo sapiens
cuccgcuacuuccagg

SEQ ID NO: 35061 - RNA, 21 nt, Homo sapiens
cuccgcuacuuccagggcuac

SEQ ID NO: 35062 - RNA, 13 nt, Homo sapiens
cucccggccgcgc

SEQ ID NO: 35063 - RNA, 14 nt, Homo sapiens
cucccggccgcgcu

SEQ ID NO: 35064 - RNA, 19 nt, Homo sapiens
cucccggccgcgcugcgcg

SEQ ID NO: 35065 - RNA, 23 nt, Homo sapiens
cucccggccgcgcugcgcgccgc

SEQ ID NO: 35066 - RNA, 12 nt, Homo sapiens
cuccagcugccc

SEQ ID NO: 35067 - RNA, 13 nt, Homo sapiens
cuccagcugcccc

SEQ ID NO: 35068 - RNA, 18 nt, Homo sapiens
cuccagcugccccgggga

SEQ ID NO: 35069 - RNA, 19 nt, Homo sapiens
ccugagaccaaggcccccg

SEQ ID NO: 35070 - RNA, 10 nt, Homo sapiens
ccucuggcug

SEQ ID NO: 35071 - RNA, 22 nt, Homo sapiens
ccucuggcugcugguggcgcug

SEQ ID NO: 35072 - RNA, 12 nt, Homo sapiens
ccucgccacgcu

SEQ ID NO: 35073 - RNA, 16 nt, Homo sapiens
ccucgccacgcucugg

SEQ ID NO: 35074 - RNA, 15 nt, Homo sapiens
ccucggacggcuccg

SEQ ID NO: 35075 - RNA, 17 nt, Homo sapiens
ccucggacggcuccgga

SEQ ID NO: 35076 - RNA, 19 nt, Homo sapiens
ccucggacggcuccggacg

SEQ ID NO: 35077 - RNA, 11 nt, Homo sapiens
ccucccggccg

SEQ ID NO: 35078 - RNA, 14 nt, Homo sapiens
ccucccggccgcgc

SEQ ID NO: 35079 - RNA, 15 nt, Homo sapiens
ccucccggccgcgcu

SEQ ID NO: 35080 - RNA, 16 nt, Homo sapiens
ccucccggccgcgcug

SEQ ID NO: 35081 - RNA, 22 nt, Homo sapiens
ccucccggccgcgcugcgcgcc

SEQ ID NO: 35082 - RNA, 19 nt, Homo sapiens
ccucauggaauuggagcuc

SEQ ID NO: 35083 - RNA, 22 nt, Homo sapiens
ccucauggaauuggagcucgug

SEQ ID NO: 35084 - RNA, 16 nt, Homo sapiens
ccuccagcugccccgg

SEQ ID NO: 35085 - RNA, 12 nt, Homo sapiens
ccugcucgccca

SEQ ID NO: 35086 - RNA, 13 nt, Homo sapiens
ccugcucgcccac

SEQ ID NO: 35087 - RNA, 18 nt, Homo sapiens
ccuggucuaccuguucgc

SEQ ID NO: 35088 - RNA, 20 nt, Homo sapiens
ccuggucuaccuguucgcgc

SEQ ID NO: 35089 - RNA, 23 nt, Homo sapiens
ccuggucuaccuguucgcgcgcc

SEQ ID NO: 35090 - RNA, 11 nt, Homo sapiens
ccugugcggcc

SEQ ID NO: 35091 - RNA, 13 nt, Homo sapiens
ccugugcggccug

SEQ ID NO: 35092 - RNA, 16 nt, Homo sapiens
ccugugcggccugguc

SEQ ID NO: 35093 - RNA, 13 nt, Homo sapiens
ccuguucgcgcgc

SEQ ID NO: 35094 - RNA, 17 nt, Homo sapiens
ccuguucgcgcgccucc

SEQ ID NO: 35095 - RNA, 16 nt, Homo sapiens
cccuugaugaagaagu

SEQ ID NO: 35096 - RNA, 12 nt, Homo sapiens
ccgggccgacgg

SEQ ID NO: 35097 - RNA, 14 nt, Homo sapiens
ccgggccgacggag

SEQ ID NO: 35098 - RNA, 16 nt, Homo sapiens
ccgggccgacggagcc

SEQ ID NO: 35099 - RNA, 17 nt, Homo sapiens
ccgggccgacggagccg

SEQ ID NO: 35100 - RNA, 18 nt, Homo sapiens
ccgggccgacggagccgg

SEQ ID NO: 35101 - RNA, 19 nt, Homo sapiens
ccgggccgacggagccggg

SEQ ID NO: 35102 - RNA, 20 nt, Homo sapiens
ccgggccgacggagccggga

SEQ ID NO: 35103 - RNA, 21 nt, Homo sapiens
ccgggccgacggagccgggaa

SEQ ID NO: 35104 - RNA, 17 nt, Homo sapiens
ccgcuguacgcgagcgc

SEQ ID NO: 35105 - RNA, 21 nt, Homo sapiens
ccgcuguacgcgagcgcgcgc

SEQ ID NO: 35106 - RNA, 22 nt, Homo sapiens
ccgcuguacgcgagcgcgcgcg

SEQ ID NO: 35107 - RNA, 23 nt, Homo sapiens
ccgcuguacgcgagcgcgcgcgc

SEQ ID NO: 35108 - RNA, 14 nt, Homo sapiens
ccgcuguuccucgc

SEQ ID NO: 35109 - RNA, 17 nt, Homo sapiens
ccgcuguuccucgccac

SEQ ID NO: 35110 - RNA, 20 nt, Homo sapiens
ccgcuguuccucgccacgcu

SEQ ID NO: 35111 - RNA, 14 nt, Homo sapiens
ccggacgcugcugc

SEQ ID NO: 35112 - RNA, 16 nt, Homo sapiens
ccggacgcugcugccg

SEQ ID NO: 35113 - RNA, 19 nt, Homo sapiens
ccggacgcugcugccgugg

SEQ ID NO: 35114 - RNA, 13 nt, Homo sapiens
ccggagccuccag

SEQ ID NO: 35115 - RNA, 14 nt, Homo sapiens
ccggagccuccagc

SEQ ID NO: 35116 - RNA, 17 nt, Homo sapiens
ccggagccuccagcugc

SEQ ID NO: 35117 - RNA, 21 nt, Homo sapiens
ccggagccuccagcugccccg

SEQ ID NO: 35118 - RNA, 22 nt, Homo sapiens
ccggagccuccagcugccccgg

SEQ ID NO: 35119 - RNA, 11 nt, Homo sapiens
ccggccgcgcu

SEQ ID NO: 35120 - RNA, 13 nt, Homo sapiens
ccggccgcgcugc

SEQ ID NO: 35121 - RNA, 17 nt, Homo sapiens
ccggccgcgcugcgcgc

SEQ ID NO: 35122 - RNA, 19 nt, Homo sapiens
ccggccgcgcugcgcgccg

SEQ ID NO: 35123 - RNA, 23 nt, Homo sapiens
ccggccgcgcugcgcgccgcgcu

SEQ ID NO: 35124 - RNA, 12 nt, Homo sapiens
ccggccggcgcg

SEQ ID NO: 35125 - RNA, 14 nt, Homo sapiens
ccggccggcgcgcu

SEQ ID NO: 35126 - RNA, 15 nt, Homo sapiens
ccggcgcgcucaucc

SEQ ID NO: 35127 - RNA, 18 nt, Homo sapiens
ccggcgcgcucaucccac

SEQ ID NO: 35128 - RNA, 17 nt, Homo sapiens
ccgggaaagaagagccg

SEQ ID NO: 35129 - RNA, 18 nt, Homo sapiens
ccgggaaagaagagccgg

SEQ ID NO: 35130 - RNA, 20 nt, Homo sapiens
ccgggaaagaagagccggag

SEQ ID NO: 35131 - RNA, 21 nt, Homo sapiens
ccgggaaagaagagccggagc

SEQ ID NO: 35132 - RNA, 23 nt, Homo sapiens
ccgggaaagaagagccggagccu

SEQ ID NO: 35133 - RNA, 13 nt, Homo sapiens
ccggggaggggcg

SEQ ID NO: 35134 - RNA, 15 nt, Homo sapiens
ccggggaggggcgcu

SEQ ID NO: 35135 - RNA, 19 nt, Homo sapiens
ccggggaggggcgcucgcu

SEQ ID NO: 35136 - RNA, 23 nt, Homo sapiens
ccggggaggggcgcucgcuuccg

SEQ ID NO: 35137 - RNA, 14 nt, Homo sapiens
ccgggucgcaggac

SEQ ID NO: 35138 - RNA, 11 nt, Homo sapiens
ccgugggccug

SEQ ID NO: 35139 - RNA, 12 nt, Homo sapiens
ccgugggccuga

SEQ ID NO: 35140 - RNA, 13 nt, Homo sapiens
ccgugggccugag

SEQ ID NO: 35141 - RNA, 11 nt, Homo sapiens
ccuagggugau

SEQ ID NO: 35142 - RNA, 21 nt, Homo sapiens
ccaacuaucucauuuccaagc

SEQ ID NO: 35143 - RNA, 22 nt, Homo sapiens
ccaucaaggguacacugccuuc

SEQ ID NO: 35144 - RNA, 12 nt, Homo sapiens
ccaucccggccg

SEQ ID NO: 35145 - RNA, 13 nt, Homo sapiens
ccaucccggccgg

SEQ ID NO: 35146 - RNA, 18 nt, Homo sapiens
ccaucccggccggcgcgc

SEQ ID NO: 35147 - RNA, 20 nt, Homo sapiens
ccaucccggccggcgcgcuc

SEQ ID NO: 35148 - RNA, 17 nt, Homo sapiens
ccaggcggguccggguc

SEQ ID NO: 35149 - RNA, 18 nt, Homo sapiens
ccaggcggguccgggucg

SEQ ID NO: 35150 - RNA, 20 nt, Homo sapiens
ccaggcggguccgggucgca

SEQ ID NO: 35151 - RNA, 11 nt, Homo sapiens
ccagggcuacg

SEQ ID NO: 35152 - RNA, 18 nt, Homo sapiens
ccagggcuacgcgcgcuc

SEQ ID NO: 35153 - RNA, 19 nt, Homo sapiens
ccagggcuacgcgcgcucc

SEQ ID NO: 35154 - RNA, 20 nt, Homo sapiens
ccagggcuacgcgcgcuccg

SEQ ID NO: 35155 - RNA, 22 nt, Homo sapiens
ccagggcuacgcgcgcuccgcg

SEQ ID NO: 35156 - RNA, 23 nt, Homo sapiens
ccagggcuacgcgcgcuccgcgc

SEQ ID NO: 35157 - RNA, 24 nt, Homo sapiens
ccagggcuacgcgcgcuccgcgca

SEQ ID NO: 35158 - RNA, 22 nt, Homo sapiens
ccaggucuaccaaaaaucucaa

SEQ ID NO: 35159 - RNA, 17 nt, Homo sapiens
ccagcugccccggggag

SEQ ID NO: 35160 - RNA, 15 nt, Homo sapiens
ccacuuccucccggc

SEQ ID NO: 35161 - RNA, 16 nt, Homo sapiens
ccacuuccucccggcc

SEQ ID NO: 35162 - RNA, 17 nt, Homo sapiens
ccacuuccucccggccg

SEQ ID NO: 35163 - RNA, 18 nt, Homo sapiens
ccacuuccucccggccgc

SEQ ID NO: 35164 - RNA, 19 nt, Homo sapiens
ccacuuccucccggccgcg

SEQ ID NO: 35165 - RNA, 16 nt, Homo sapiens
cccacuuccucccggc

SEQ ID NO: 35166 - RNA, 18 nt, Homo sapiens
cccacuuccucccggccg

SEQ ID NO: 35167 - RNA, 14 nt, Homo sapiens
cccaggcggguccg

SEQ ID NO: 35168 - RNA, 16 nt, Homo sapiens
ccaugggcacuguggg

SEQ ID NO: 35169 - RNA, 12 nt, Homo sapiens
cccacccgccca

SEQ ID NO: 35170 - RNA, 14 nt, Homo sapiens
cccacccgcccacc

SEQ ID NO: 35171 - RNA, 12 nt, Homo sapiens
cccgggccgacg

SEQ ID NO: 35172 - RNA, 13 nt, Homo sapiens
cccgggccgacgg

SEQ ID NO: 35173 - RNA, 14 nt, Homo sapiens
cccgggccgacgga

SEQ ID NO: 35174 - RNA, 18 nt, Homo sapiens
cccgggccgacggagccg

SEQ ID NO: 35175 - RNA, 20 nt, Homo sapiens
cccgggccgacggagccggg

SEQ ID NO: 35176 - RNA, 21 nt, Homo sapiens
cccgggccgacggagccggga

SEQ ID NO: 35177 - RNA, 13 nt, Homo sapiens
cccggggaggggc

SEQ ID NO: 35178 - RNA, 14 nt, Homo sapiens
cccggggaggggcg

SEQ ID NO: 35179 - RNA, 17 nt, Homo sapiens
cccggggaggggcgcuc

SEQ ID NO: 35180 - RNA, 18 nt, Homo sapiens
cccggggaggggcgcucg

SEQ ID NO: 35181 - RNA, 19 nt, Homo sapiens
cccggggaggggcgcucgc

SEQ ID NO: 35182 - RNA, 13 nt, Homo sapiens
cccgcccaccgca

SEQ ID NO: 35183 - RNA, 15 nt, Homo sapiens
cccgcuguuccucgc

SEQ ID NO: 35184 - RNA, 17 nt, Homo sapiens
cccgcuguuccucgcca

SEQ ID NO: 35185 - RNA, 17 nt, Homo sapiens
cccggccgcgcugcgcg

SEQ ID NO: 35186 - RNA, 22 nt, Homo sapiens
cccggccgcgcugcgcgccgcg

SEQ ID NO: 35187 - RNA, 24 nt, Homo sapiens
cccggccgcgcugcgcgccgcgcu

SEQ ID NO: 35188 - RNA, 11 nt, Homo sapiens
cccggccggcg

SEQ ID NO: 35189 - RNA, 12 nt, Homo sapiens
cccggccggcgc

SEQ ID NO: 35190 - RNA, 13 nt, Homo sapiens
cccggccggcgcg

SEQ ID NO: 35191 - RNA, 15 nt, Homo sapiens
cccggccggcgcgcu

SEQ ID NO: 35192 - RNA, 17 nt, Homo sapiens
ccccgggccgacggagc

SEQ ID NO: 35193 - RNA, 20 nt, Homo sapiens
ccccggggaggggcgcucgc

SEQ ID NO: 35194 - RNA, 23 nt, Homo sapiens
ccccaggcggguccgggucgcag

SEQ ID NO: 35195 - RNA, 11 nt, Homo sapiens
cccccgggccg

SEQ ID NO: 35196 - RNA, 18 nt, Homo sapiens
cccucuggcugcuggugg

SEQ ID NO: 35197 - RNA, 13 nt, Homo sapiens
ccgacggagccgg

SEQ ID NO: 35198 - RNA, 15 nt, Homo sapiens
ccgacggagccggga

SEQ ID NO: 35199 - RNA, 19 nt, Homo sapiens
ccgcagggugaacugcagc

SEQ ID NO: 35200 - RNA, 20 nt, Homo sapiens
ccgcagggugaacugcagcg

SEQ ID NO: 35201 - RNA, 20 nt, Homo sapiens
ccgcauccuagucucuauca

SEQ ID NO: 35202 - RNA, 15 nt, Homo sapiens
ccgcccaccgcaggg

SEQ ID NO: 35203 - RNA, 18 nt, Homo sapiens
ccgcccaccgcaggguga

SEQ ID NO: 35204 - RNA, 15 nt, Homo sapiens
ccgcgcagcucaggc

SEQ ID NO: 35205 - RNA, 17 nt, Homo sapiens
ccgcgcagcucaggcug

SEQ ID NO: 35206 - RNA, 19 nt, Homo sapiens
ccgcgcagcucaggcuggc

SEQ ID NO: 35207 - RNA, 20 nt, Homo sapiens
ccgcgcagcucaggcuggca

SEQ ID NO: 35208 - RNA, 21 nt, Homo sapiens
ccgcgcagcucaggcuggcac

SEQ ID NO: 35209 - RNA, 13 nt, Homo sapiens
ccgcgcuccucgg

SEQ ID NO: 35210 - RNA, 18 nt, Homo sapiens
ccgcgcuccucggacggc

SEQ ID NO: 35211 - RNA, 22 nt, Homo sapiens
ccgcgcuccucggacggcuccg

SEQ ID NO: 35212 - RNA, 13 nt, Homo sapiens
ccgcgcugcgcgc

SEQ ID NO: 35213 - RNA, 14 nt, Homo sapiens
ccgcgcugcgcgcc

SEQ ID NO: 35214 - RNA, 17 nt, Homo sapiens
ccgcgcugcgcgccgcg

SEQ ID NO: 35215 - RNA, 18 nt, Homo sapiens
ccgcgcugcgcgccgcgc

SEQ ID NO: 35216 - RNA, 21 nt, Homo sapiens
ccgcgcugcgcgccgcgcucc

SEQ ID NO: 35217 - RNA, 23 nt, Homo sapiens
ccgcgcugcgcgccgcgcuccuc

SEQ ID NO: 35218 - RNA, 14 nt, Homo sapiens
ccgcuacuuccagg

SEQ ID NO: 35219 - RNA, 17 nt, Homo sapiens
cauggaauuggagcucg

SEQ ID NO: 35220 - RNA, 15 nt, Homo sapiens
cauuugcucauggaa

SEQ ID NO: 35221 - RNA, 24 nt, Homo sapiens
cauuauauuuauuacuguaagaaa

SEQ ID NO: 35222 - RNA, 20 nt, Homo sapiens
cauuaaaguucuagugaccg

SEQ ID NO: 35223 - RNA, 18 nt, Homo sapiens
ccacagcuguaugauucc

SEQ ID NO: 35224 - RNA, 19 nt, Homo sapiens
ccacagcuguaugauuccc

SEQ ID NO: 35225 - RNA, 12 nt, Homo sapiens
ccacccgcccac

SEQ ID NO: 35226 - RNA, 15 nt, Homo sapiens
ccacccgcccaccgc

SEQ ID NO: 35227 - RNA, 18 nt, Homo sapiens
ccacgcucugggucgccg

SEQ ID NO: 35228 - RNA, 19 nt, Homo sapiens
ccacgcucugggucgccgg

SEQ ID NO: 35229 - RNA, 20 nt, Homo sapiens
ccacgcucugggucgccggc

SEQ ID NO: 35230 - RNA, 20 nt, Homo sapiens
ccaagcauuuagauguauag

SEQ ID NO: 35231 - RNA, 14 nt, Homo sapiens
ccaaggcccccggg

SEQ ID NO: 35232 - RNA, 15 nt, Homo sapiens
ccaaggcccccgggc

SEQ ID NO: 35233 - RNA, 16 nt, Homo sapiens
ccaaggcccccgggcc

SEQ ID NO: 35234 - RNA, 19 nt, Homo sapiens
ccaaggcccccgggccgac

SEQ ID NO: 35235 - RNA, 13 nt, Homo sapiens
caugaaggggcgg

SEQ ID NO: 35236 - RNA, 20 nt, Homo sapiens
caugaaggggcggcggcccu

SEQ ID NO: 35237 - RNA, 21 nt, Homo sapiens
caugaaggggcggcggcccug

SEQ ID NO: 35238 - RNA, 12 nt, Homo sapiens
caucccacccgc

SEQ ID NO: 35239 - RNA, 15 nt, Homo sapiens
caucccacccgccca

SEQ ID NO: 35240 - RNA, 12 nt, Homo sapiens
caucccggccgg

SEQ ID NO: 35241 - RNA, 19 nt, Homo sapiens
caucaaggguacacugccu

SEQ ID NO: 35242 - RNA, 20 nt, Homo sapiens
caucaaggguacacugccuu

SEQ ID NO: 35243 - RNA, 15 nt, Homo sapiens
caguucugaagaaga

SEQ ID NO: 35244 - RNA, 19 nt, Homo sapiens
caggcggguccgggucgca

SEQ ID NO: 35245 - RNA, 22 nt, Homo sapiens
caggcggguccgggucgcagga

SEQ ID NO: 35246 - RNA, 23 nt, Homo sapiens
caggaaagagaacuuccagaucc

SEQ ID NO: 35247 - RNA, 24 nt, Homo sapiens
caggaaagagaacuuccagauccu

SEQ ID NO: 35248 - RNA, 18 nt, Homo sapiens
caggaaccacaagacugc

SEQ ID NO: 35249 - RNA, 18 nt, Homo sapiens
caggaccaucccggccgg

SEQ ID NO: 35250 - RNA, 19 nt, Homo sapiens
caggaccaucccggccggc

SEQ ID NO: 35251 - RNA, 20 nt, Homo sapiens
caggaccaucccggccggcg

SEQ ID NO: 35252 - RNA, 21 nt, Homo sapiens
caggaccaucccggccggcgc

SEQ ID NO: 35253 - RNA, 22 nt, Homo sapiens
caggaccaucccggccggcgcg

SEQ ID NO: 35254 - RNA, 24 nt, Homo sapiens
caggaccaucccggccggcgcgcu

SEQ ID NO: 35255 - RNA, 14 nt, Homo sapiens
caggcuggcaccgc

SEQ ID NO: 35256 - RNA, 16 nt, Homo sapiens
caggcuggcaccgcug

SEQ ID NO: 35257 - RNA, 13 nt, Homo sapiens
cagggcuacgcgc

SEQ ID NO: 35258 - RNA, 15 nt, Homo sapiens
cagggcuacgcgcgc

SEQ ID NO: 35259 - RNA, 16 nt, Homo sapiens
cagggcuacgcgcgcu

SEQ ID NO: 35260 - RNA, 19 nt, Homo sapiens
cagggcuacgcgcgcuccg

SEQ ID NO: 35261 - RNA, 21 nt, Homo sapiens
cagggcuacgcgcgcuccgcg

SEQ ID NO: 35262 - RNA, 22 nt, Homo sapiens
cagggcuacgcgcgcuccgcgc

SEQ ID NO: 35263 - RNA, 16 nt, Homo sapiens
cagggugaacugcagc

SEQ ID NO: 35264 - RNA, 20 nt, Homo sapiens
cagggugaacugcagcgagu

SEQ ID NO: 35265 - RNA, 23 nt, Homo sapiens
caggguuaguauuguccaggucu

SEQ ID NO: 35266 - RNA, 18 nt, Homo sapiens
cagaagcuccagguagag

SEQ ID NO: 35267 - RNA, 12 nt, Homo sapiens
cacuugucaaua

SEQ ID NO: 35268 - RNA, 14 nt, Homo sapiens
cacuuccucccggc

SEQ ID NO: 35269 - RNA, 15 nt, Homo sapiens
cacuuccucccggcc

SEQ ID NO: 35270 - RNA, 18 nt, Homo sapiens
cacuuccucccggccgcg

SEQ ID NO: 35271 - RNA, 19 nt, Homo sapiens
cacuuccucccggccgcgc

SEQ ID NO: 35272 - RNA, 20 nt, Homo sapiens
cacuuccucccggccgcgcu

SEQ ID NO: 35273 - RNA, 14 nt, Homo sapiens
cagcacagccucuu

SEQ ID NO: 35274 - RNA, 17 nt, Homo sapiens
cagcgaguacuucccgc

SEQ ID NO: 35275 - RNA, 23 nt, Homo sapiens
cagcgaguacuucccgcuguucc

SEQ ID NO: 35276 - RNA, 20 nt, Homo sapiens
cagccucuuagaugcaguuc

SEQ ID NO: 35277 - RNA, 21 nt, Homo sapiens
cagccucuuagaugcaguucu

SEQ ID NO: 35278 - RNA, 16 nt, Homo sapiens
cagcccuucuuuccac

SEQ ID NO: 35279 - RNA, 19 nt, Homo sapiens
cagcucaggcuggcaccgc

SEQ ID NO: 35280 - RNA, 18 nt, Homo sapiens
cagcucuaaaugucaauc

SEQ ID NO: 35281 - RNA, 13 nt, Homo sapiens
cagcugccccggg

SEQ ID NO: 35282 - RNA, 15 nt, Homo sapiens
cagcugccccgggga

SEQ ID NO: 35283 - RNA, 21 nt, Homo sapiens
cagcugccccggggaggggcg

SEQ ID NO: 35284 - RNA, 13 nt, Homo sapiens
guucgcgcgccuc

SEQ ID NO: 35285 - RNA, 17 nt, Homo sapiens
guucgcgcgccuccgcu

SEQ ID NO: 35286 - RNA, 11 nt, Homo sapiens
guucugaagaa

SEQ ID NO: 35287 - RNA, 12 nt, Homo sapiens
guucugaagaag

SEQ ID NO: 35288 - RNA, 13 nt, Homo sapiens
guucugaagaaga

SEQ ID NO: 35289 - RNA, 20 nt, Homo sapiens
gugggccugagaccaaggcc

SEQ ID NO: 35290 - RNA, 12 nt, Homo sapiens
gugcggccuggu

SEQ ID NO: 35291 - RNA, 13 nt, Homo sapiens
gugcggccugguc

SEQ ID NO: 35292 - RNA, 23 nt, Homo sapiens
gugcggccuggucuaccuguucg

SEQ ID NO: 35293 - RNA, 16 nt, Homo sapiens
guggaacaguuaccuc

SEQ ID NO: 35294 - RNA, 12 nt, Homo sapiens
guggcgcuggcu

SEQ ID NO: 35295 - RNA, 13 nt, Homo sapiens
guggcgcuggcug

SEQ ID NO: 35296 - RNA, 16 nt, Homo sapiens
guggcgcuggcugcgc

SEQ ID NO: 35297 - RNA, 23 nt, Homo sapiens
guggcgcuggcugcgcucggccu

SEQ ID NO: 35298 - RNA, 17 nt, Homo sapiens
guccgggucgcaggacc

SEQ ID NO: 35299 - RNA, 18 nt, Homo sapiens
guccgggucgcaggacca

SEQ ID NO: 35300 - RNA, 21 nt, Homo sapiens
guccgggucgcaggaccaucc

SEQ ID NO: 35301 - RNA, 18 nt, Homo sapiens
gucgcaggaccaucccgg

SEQ ID NO: 35302 - RNA, 21 nt, Homo sapiens
gucgcaggaccaucccggccg

SEQ ID NO: 35303 - RNA, 23 nt, Homo sapiens
gucgcaggaccaucccggccggc

SEQ ID NO: 35304 - RNA, 12 nt, Homo sapiens
gucgccggcauc

SEQ ID NO: 35305 - RNA, 17 nt, Homo sapiens
gucuaccuguucgcgcg

SEQ ID NO: 35306 - RNA, 19 nt, Homo sapiens
gucuaccuguucgcgcgcc

SEQ ID NO: 35307 - RNA, 20 nt, Homo sapiens
gucuaccuguucgcgcgccu

SEQ ID NO: 35308 - RNA, 12 nt, Homo sapiens
uacuguaagaaa

SEQ ID NO: 35309 - RNA, 12 nt, Homo sapiens
uacuuccagggc

SEQ ID NO: 35310 - RNA, 13 nt, Homo sapiens
uacuuccagggcu

SEQ ID NO: 35311 - RNA, 18 nt, Homo sapiens
uaccuguucgcgcgccuc

SEQ ID NO: 35312 - RNA, 21 nt, Homo sapiens
uaccuguucgcgcgccuccgc

SEQ ID NO: 35313 - RNA, 22 nt, Homo sapiens
uaccuguucgcgcgccuccgcu

SEQ ID NO: 35314 - RNA, 18 nt, Homo sapiens
uaccacaggaaccacaag

SEQ ID NO: 35315 - RNA, 14 nt, Homo sapiens
uacgcgagcgcgcg

SEQ ID NO: 35316 - RNA, 15 nt, Homo sapiens
uacgcgagcgcgcgc

SEQ ID NO: 35317 - RNA, 16 nt, Homo sapiens
uacgcgagcgcgcgcg

SEQ ID NO: 35318 - RNA, 17 nt, Homo sapiens
uacgcgagcgcgcgcgc

SEQ ID NO: 35319 - RNA, 20 nt, Homo sapiens
uacgcgagcgcgcgcgcccu

SEQ ID NO: 35320 - RNA, 14 nt, Homo sapiens
uacgcgcgcuccgc

SEQ ID NO: 35321 - RNA, 16 nt, Homo sapiens
uaaugauaacuggaaa

SEQ ID NO: 35322 - RNA, 11 nt, Homo sapiens
uaaaacuggga

SEQ ID NO: 35323 - RNA, 20 nt, Homo sapiens
ucaccucauggaauuggagc

SEQ ID NO: 35324 - RNA, 16 nt, Homo sapiens
uauuguuugcuaagca

SEQ ID NO: 35325 - RNA, 15 nt, Homo sapiens
ucaggcuggcaccgc

SEQ ID NO: 35326 - RNA, 13 nt, Homo sapiens
ucaucccacccgc

SEQ ID NO: 35327 - RNA, 14 nt, Homo sapiens
ucaucccacccgcc

SEQ ID NO: 35328 - RNA, 15 nt, Homo sapiens
ucaucccacccgccc

SEQ ID NO: 35329 - RNA, 15 nt, Homo sapiens
ucaugaaggggcggc

SEQ ID NO: 35330 - RNA, 20 nt, Homo sapiens
ucaugaaggggcggcggccc

SEQ ID NO: 35331 - RNA, 19 nt, Homo sapiens
ucauuaaaguucuagugac

SEQ ID NO: 35332 - RNA, 11 nt, Homo sapiens
uccagcugccc

SEQ ID NO: 35333 - RNA, 17 nt, Homo sapiens
uccagcugccccgggga

SEQ ID NO: 35334 - RNA, 20 nt, Homo sapiens
uccagggcuacgcgcgcucc

SEQ ID NO: 35335 - RNA, 21 nt, Homo sapiens
uccagggcuacgcgcgcuccg

SEQ ID NO: 35336 - RNA, 22 nt, Homo sapiens
uccagggcuacgcgcgcuccgc

SEQ ID NO: 35337 - RNA, 13 nt, Homo sapiens
ucauuuccaagca

SEQ ID NO: 35338 - RNA, 17 nt, Homo sapiens
ucccacccgcccaccgc

SEQ ID NO: 35339 - RNA, 18 nt, Homo sapiens
ucccacccgcccaccgca

SEQ ID NO: 35340 - RNA, 16 nt, Homo sapiens
ucccgcuguuccucgc

SEQ ID NO: 35341 - RNA, 17 nt, Homo sapiens
ucccgcuguuccucgcc

SEQ ID NO: 35342 - RNA, 19 nt, Homo sapiens
ucccgcuguuccucgccac

SEQ ID NO: 35343 - RNA, 11 nt, Homo sapiens
ucccggccgcg

SEQ ID NO: 35344 - RNA, 13 nt, Homo sapiens
ucccggccgcgcu

SEQ ID NO: 35345 - RNA, 14 nt, Homo sapiens
ucccggccgcgcug

SEQ ID NO: 35346 - RNA, 15 nt, Homo sapiens
ucccggccgcgcugc

SEQ ID NO: 35347 - RNA, 18 nt, Homo sapiens
ucccggccgcgcugcgcg

SEQ ID NO: 35348 - RNA, 20 nt, Homo sapiens
ucccggccgcgcugcgcgcc

SEQ ID NO: 35349 - RNA, 21 nt, Homo sapiens
ucccggccgcgcugcgcgccg

SEQ ID NO: 35350 - RNA, 24 nt, Homo sapiens
ucccggccgcgcugcgcgccgcgc

SEQ ID NO: 35351 - RNA, 16 nt, Homo sapiens
ucccggccggcgcgcu

SEQ ID NO: 35352 - RNA, 13 nt, Homo sapiens
ucccuuaccuggg

SEQ ID NO: 35353 - RNA, 12 nt, Homo sapiens
uccgcuacuucc

SEQ ID NO: 35354 - RNA, 17 nt, Homo sapiens
uccgcuacuuccagggc

SEQ ID NO: 35355 - RNA, 18 nt, Homo sapiens
uccgcuacuuccagggcu

SEQ ID NO: 35356 - RNA, 12 nt, Homo sapiens
uccggacgcugc

SEQ ID NO: 35357 - RNA, 13 nt, Homo sapiens
uccgggucgcagg

SEQ ID NO: 35358 - RNA, 12 nt, Homo sapiens
uccucgccacgc

SEQ ID NO: 35359 - RNA, 18 nt, Homo sapiens
uccucgccacgcucuggg

SEQ ID NO: 35360 - RNA, 12 nt, Homo sapiens
uccucggacggc

SEQ ID NO: 35361 - RNA, 11 nt, Homo sapiens
uccucccggcc

SEQ ID NO: 35362 - RNA, 13 nt, Homo sapiens
uccucccggccgc

SEQ ID NO: 35363 - RNA, 15 nt, Homo sapiens
uccucccggccgcgc

SEQ ID NO: 35364 - RNA, 16 nt, Homo sapiens
uccucccggccgcgcu

SEQ ID NO: 35365 - RNA, 17 nt, Homo sapiens
uccucccggccgcgcug

SEQ ID NO: 35366 - RNA, 17 nt, Homo sapiens
uccuugaagauuuacca

SEQ ID NO: 35367 - RNA, 12 nt, Homo sapiens
ucgcccacuucc

SEQ ID NO: 35368 - RNA, 21 nt, Homo sapiens
ucgcccacuuccucccggccg

SEQ ID NO: 35369 - RNA, 19 nt, Homo sapiens
ucgcaggaccaucccggcc

SEQ ID NO: 35370 - RNA, 21 nt, Homo sapiens
ucgcaggaccaucccggccgg

SEQ ID NO: 35371 - RNA, 13 nt, Homo sapiens
ucgccacgcucug

SEQ ID NO: 35372 - RNA, 14 nt, Homo sapiens
ucgccacgcucugg

SEQ ID NO: 35373 - RNA, 15 nt, Homo sapiens
ucgccacgcucuggg

SEQ ID NO: 35374 - RNA, 21 nt, Homo sapiens
ucgccacgcucugggucgccg

SEQ ID NO: 35375 - RNA, 13 nt, Homo sapiens
ucgcuuccgcauc

SEQ ID NO: 35376 - RNA, 14 nt, Homo sapiens
ucgcgcgccuccgc

SEQ ID NO: 35377 - RNA, 17 nt, Homo sapiens
ucuaccuguucgcgcgc

SEQ ID NO: 35378 - RNA, 18 nt, Homo sapiens
ucuaccuguucgcgcgcc

SEQ ID NO: 35379 - RNA, 19 nt, Homo sapiens
ucuaccuguucgcgcgccu

SEQ ID NO: 35380 - RNA, 23 nt, Homo sapiens
ucuaccuguucgcgcgccuccgc

SEQ ID NO: 35381 - RNA, 18 nt, Homo sapiens
ugccccggggaggggcgc

SEQ ID NO: 35382 - RNA, 20 nt, Homo sapiens
ugccccggggaggggcgcuc

SEQ ID NO: 35383 - RNA, 21 nt, Homo sapiens
ugccccggggaggggcgcucg

SEQ ID NO: 35384 - RNA, 23 nt, Homo sapiens
ugccccggggaggggcgcucgcu

SEQ ID NO: 35385 - RNA, 16 nt, Homo sapiens
ugccucagaaaacaag

SEQ ID NO: 35386 - RNA, 22 nt, Homo sapiens
ugcucgcccacuuccucccggc

SEQ ID NO: 35387 - RNA, 20 nt, Homo sapiens
ugcucauggaauuggagcuc

SEQ ID NO: 35388 - RNA, 11 nt, Homo sapiens
ugcgcgccgcg

SEQ ID NO: 35389 - RNA, 20 nt, Homo sapiens
ugcgcgccgcgcuccucgga

SEQ ID NO: 35390 - RNA, 21 nt, Homo sapiens
ugcgcgccgcgcuccucggac

SEQ ID NO: 35391 - RNA, 13 nt, Homo sapiens
ugcgcucggccug

SEQ ID NO: 35392 - RNA, 17 nt, Homo sapiens
ugcgcucggccugcucg

SEQ ID NO: 35393 - RNA, 19 nt, Homo sapiens
ugcgcucggccugcucgcc

SEQ ID NO: 35394 - RNA, 20 nt, Homo sapiens
ugcgcucggccugcucgccc

SEQ ID NO: 35395 - RNA, 15 nt, Homo sapiens
ugcuaguaauuggaa

SEQ ID NO: 35396 - RNA, 15 nt, Homo sapiens
ugcaguucugaagaa

SEQ ID NO: 35397 - RNA, 16 nt, Homo sapiens
ugcaguucugaagaag

SEQ ID NO: 35398 - RNA, 18 nt, Homo sapiens
ugcagcgaguacuucccg

SEQ ID NO: 35399 - RNA, 19 nt, Homo sapiens
ugcagcgaguacuucccgc

SEQ ID NO: 35400 - RNA, 15 nt, Homo sapiens
ugaaggggcggcggc

SEQ ID NO: 35401 - RNA, 16 nt, Homo sapiens
ugaaggggcggcggcc

SEQ ID NO: 35402 - RNA, 20 nt, Homo sapiens
ugagagacacacugaagaag

SEQ ID NO: 35403 - RNA, 12 nt, Homo sapiens
ugagaccaaggc

SEQ ID NO: 35404 - RNA, 22 nt, Homo sapiens
ucuggcugcugguggcgcuggc

SEQ ID NO: 35405 - RNA, 14 nt, Homo sapiens
ucugggucgccggc

SEQ ID NO: 35406 - RNA, 22 nt, Homo sapiens
ucuucuuucaugaaggggcggc

SEQ ID NO: 35407 - RNA, 13 nt, Homo sapiens
ucucuaggaaaua

SEQ ID NO: 35408 - RNA, 12 nt, Homo sapiens
ucggccugcucg

SEQ ID NO: 35409 - RNA, 14 nt, Homo sapiens
ucggccugcucgcc

SEQ ID NO: 35410 - RNA, 13 nt, Homo sapiens
ucggacggcuccg

SEQ ID NO: 35411 - RNA, 18 nt, Homo sapiens
ucggacggcuccggacgc

SEQ ID NO: 35412 - RNA, 20 nt, Homo sapiens
ucggacggcuccggacgcug

SEQ ID NO: 35413 - RNA, 17 nt, Homo sapiens
ggggcgcucgcuuccgc

SEQ ID NO: 35414 - RNA, 10 nt, Homo sapiens
ggggcggcgg

SEQ ID NO: 35415 - RNA, 11 nt, Homo sapiens
ggggcggcggc

SEQ ID NO: 35416 - RNA, 15 nt, Homo sapiens
ggggcggcggcccug

SEQ ID NO: 35417 - RNA, 17 nt, Homo sapiens
ggggcggggagcgagcc

SEQ ID NO: 35418 - RNA, 12 nt, Homo sapiens
ggggagcgagcc

SEQ ID NO: 35419 - RNA, 10 nt, Homo sapiens
gggcggcggc

SEQ ID NO: 35420 - RNA, 11 nt, Homo sapiens
gggcggcggcc

SEQ ID NO: 35421 - RNA, 12 nt, Homo sapiens
gggcggcggccc

SEQ ID NO: 35422 - RNA, 13 nt, Homo sapiens
gggcggcggcccu

SEQ ID NO: 35423 - RNA, 16 nt, Homo sapiens
gggcggggagcgagcc

SEQ ID NO: 35424 - RNA, 12 nt, Homo sapiens
gggcuacgcgcg

SEQ ID NO: 35425 - RNA, 13 nt, Homo sapiens
gggcuacgcgcgc

SEQ ID NO: 35426 - RNA, 14 nt, Homo sapiens
gggcuacgcgcgcu

SEQ ID NO: 35427 - RNA, 20 nt, Homo sapiens
gggcuacgcgcgcuccgcgc

SEQ ID NO: 35428 - RNA, 15 nt, Homo sapiens
gggcgcucgcuuccg

SEQ ID NO: 35429 - RNA, 20 nt, Homo sapiens
gggcgcucgcuuccgcaucc

SEQ ID NO: 35430 - RNA, 21 nt, Homo sapiens
gggcgcucgcuuccgcauccu

SEQ ID NO: 35431 - RNA, 12 nt, Homo sapiens
gggcgcggggcg

SEQ ID NO: 35432 - RNA, 13 nt, Homo sapiens
gggcgcggggcgg

SEQ ID NO: 35433 - RNA, 12 nt, Homo sapiens
gggccgacggag

SEQ ID NO: 35434 - RNA, 14 nt, Homo sapiens
gggccgacggagcc

SEQ ID NO: 35435 - RNA, 15 nt, Homo sapiens
gggccgacggagccg

SEQ ID NO: 35436 - RNA, 19 nt, Homo sapiens
gggccgacggagccgggaa

SEQ ID NO: 35437 - RNA, 11 nt, Homo sapiens
gggucgccggc

SEQ ID NO: 35438 - RNA, 12 nt, Homo sapiens
gggucgccggca

SEQ ID NO: 35439 - RNA, 11 nt, Homo sapiens
gggugaacugc

SEQ ID NO: 35440 - RNA, 15 nt, Homo sapiens
gggugaacugcagcg

SEQ ID NO: 35441 - RNA, 16 nt, Homo sapiens
ggucuaccuguucgcg

SEQ ID NO: 35442 - RNA, 23 nt, Homo sapiens
ggucuaccuguucgcgcgccucc

SEQ ID NO: 35443 - RNA, 17 nt, Homo sapiens
ggugaacugcagcgagu

SEQ ID NO: 35444 - RNA, 14 nt, Homo sapiens
gguccgggucgcag

SEQ ID NO: 35445 - RNA, 15 nt, Homo sapiens
gguccgggucgcagg

SEQ ID NO: 35446 - RNA, 19 nt, Homo sapiens
gguccgggucgcaggacca

SEQ ID NO: 35447 - RNA, 13 nt, Homo sapiens
ggucgcaggacca

SEQ ID NO: 35448 - RNA, 18 nt, Homo sapiens
ggucgcaggaccaucccg

SEQ ID NO: 35449 - RNA, 22 nt, Homo sapiens
ggucgcaggaccaucccggccg

SEQ ID NO: 35450 - RNA, 16 nt, Homo sapiens
ggucgccggcaucuuc

SEQ ID NO: 35451 - RNA, 12 nt, Homo sapiens
gguggcgcuggc

SEQ ID NO: 35452 - RNA, 14 nt, Homo sapiens
gguggcgcuggcug

SEQ ID NO: 35453 - RNA, 19 nt, Homo sapiens
gguggcgcuggcugcgcuc

SEQ ID NO: 35454 - RNA, 22 nt, Homo sapiens
gguggcgcuggcugcgcucggc

SEQ ID NO: 35455 - RNA, 23 nt, Homo sapiens
gguggcgcuggcugcgcucggcc

SEQ ID NO: 35456 - RNA, 13 nt, Homo sapiens
guacgcgagcgcg

SEQ ID NO: 35457 - RNA, 18 nt, Homo sapiens
guacgcgagcgcgcgcgc

SEQ ID NO: 35458 - RNA, 20 nt, Homo sapiens
guacgcgagcgcgcgcgccc

SEQ ID NO: 35459 - RNA, 15 nt, Homo sapiens
ggcuuccuggcaaua

SEQ ID NO: 35460 - RNA, 13 nt, Homo sapiens
ggcuggcaccgcu

SEQ ID NO: 35461 - RNA, 19 nt, Homo sapiens
ggcugcgcucggccugcuc

SEQ ID NO: 35462 - RNA, 13 nt, Homo sapiens
ggcugcugguggc

SEQ ID NO: 35463 - RNA, 15 nt, Homo sapiens
ggcugcugguggcgc

SEQ ID NO: 35464 - RNA, 14 nt, Homo sapiens
ggcuccggacgcug

SEQ ID NO: 35465 - RNA, 18 nt, Homo sapiens
ggcuccggacgcugcugc

SEQ ID NO: 35466 - RNA, 19 nt, Homo sapiens
ggcuccggacgcugcugcc

SEQ ID NO: 35467 - RNA, 19 nt, Homo sapiens
gggagcgagccccaggcgg

SEQ ID NO: 35468 - RNA, 14 nt, Homo sapiens
gggaggggcgcucg

SEQ ID NO: 35469 - RNA, 15 nt, Homo sapiens
gggaggggcgcucgc

SEQ ID NO: 35470 - RNA, 16 nt, Homo sapiens
gggaggggcgcucgcu

SEQ ID NO: 35471 - RNA, 19 nt, Homo sapiens
gggacagucaccucaugga

SEQ ID NO: 35472 - RNA, 18 nt, Homo sapiens
gggacauuugcucaugga

SEQ ID NO: 35473 - RNA, 16 nt, Homo sapiens
gggaaagaagagccgg

SEQ ID NO: 35474 - RNA, 14 nt, Homo sapiens
gggaaagggcuguu

SEQ ID NO: 35475 - RNA, 21 nt, Homo sapiens
gggaaauccacacugagcuga

SEQ ID NO: 35476 - RNA, 23 nt, Homo sapiens
ggcgcggcgggagggcgcggggc

SEQ ID NO: 35477 - RNA, 11 nt, Homo sapiens
ggcgcggggcg

SEQ ID NO: 35478 - RNA, 12 nt, Homo sapiens
ggcgcggggcgg

SEQ ID NO: 35479 - RNA, 13 nt, Homo sapiens
ggcgcggggcggg

SEQ ID NO: 35480 - RNA, 15 nt, Homo sapiens
ggcgcggggcgggga

SEQ ID NO: 35481 - RNA, 22 nt, Homo sapiens
ggcgcggggcggggagcgagcc

SEQ ID NO: 35482 - RNA, 18 nt, Homo sapiens
ggccuggucuaccuguuc

SEQ ID NO: 35483 - RNA, 20 nt, Homo sapiens
ggccuggucuaccuguucgc

SEQ ID NO: 35484 - RNA, 21 nt, Homo sapiens
ggccuggucuaccuguucgcg

SEQ ID NO: 35485 - RNA, 12 nt, Homo sapiens
ggcuacgcgcgc

SEQ ID NO: 35486 - RNA, 13 nt, Homo sapiens
ggcuacgcgcgcu

SEQ ID NO: 35487 - RNA, 14 nt, Homo sapiens
ggcuacgcgcgcuc

SEQ ID NO: 35488 - RNA, 15 nt, Homo sapiens
ggcuacgcgcgcucc

SEQ ID NO: 35489 - RNA, 17 nt, Homo sapiens
ggcuacgcgcgcuccgc

SEQ ID NO: 35490 - RNA, 18 nt, Homo sapiens
ggcuacgcgcgcuccgcg

SEQ ID NO: 35491 - RNA, 22 nt, Homo sapiens
ggcuacgcgcgcuccgcgcagc

SEQ ID NO: 35492 - RNA, 15 nt, Homo sapiens
ggcaccgcuguacgc

SEQ ID NO: 35493 - RNA, 16 nt, Homo sapiens
ggcaccgcuguacgcg

SEQ ID NO: 35494 - RNA, 20 nt, Homo sapiens
ggcaccgcuguacgcgagcg

SEQ ID NO: 35495 - RNA, 21 nt, Homo sapiens
ggcaccgcuguacgcgagcgc

SEQ ID NO: 35496 - RNA, 11 nt, Homo sapiens
ggcccugugcg

SEQ ID NO: 35497 - RNA, 12 nt, Homo sapiens
ggcccugugcgg

SEQ ID NO: 35498 - RNA, 16 nt, Homo sapiens
ggcccugugcggccug

SEQ ID NO: 35499 - RNA, 17 nt, Homo sapiens
ggcccugugcggccugg

SEQ ID NO: 35500 - RNA, 14 nt, Homo sapiens
ggccgacggagccg

SEQ ID NO: 35501 - RNA, 17 nt, Homo sapiens
ggccgacggagccggga

SEQ ID NO: 35502 - RNA, 18 nt, Homo sapiens
ggccgacggagccgggaa

SEQ ID NO: 35503 - RNA, 10 nt, Homo sapiens
ggccgcgcug

SEQ ID NO: 35504 - RNA, 13 nt, Homo sapiens
ggccgcgcugcgc

SEQ ID NO: 35505 - RNA, 15 nt, Homo sapiens
ggccgcgcugcgcgc

SEQ ID NO: 35506 - RNA, 18 nt, Homo sapiens
ggccgcgcugcgcgccgc

SEQ ID NO: 35507 - RNA, 20 nt, Homo sapiens
ggccgcgcugcgcgccgcgc

SEQ ID NO: 35508 - RNA, 21 nt, Homo sapiens
ggccgcgcugcgcgccgcgcu

SEQ ID NO: 35509 - RNA, 11 nt, Homo sapiens
ggccggcgcgc

SEQ ID NO: 35510 - RNA, 12 nt, Homo sapiens
ggccggcgcgcu

SEQ ID NO: 35511 - RNA, 13 nt, Homo sapiens
ggcccccgggccg

SEQ ID NO: 35512 - RNA, 15 nt, Homo sapiens
ggcccccgggccgac

SEQ ID NO: 35513 - RNA, 20 nt, Homo sapiens
ggcccccgggccgacggagc

SEQ ID NO: 35514 - RNA, 17 nt, Homo sapiens
ggccugagaccaaggcc

SEQ ID NO: 35515 - RNA, 21 nt, Homo sapiens
ggccugagaccaaggcccccg

SEQ ID NO: 35516 - RNA, 15 nt, Homo sapiens
ggccugcucgcccac

SEQ ID NO: 35517 - RNA, 14 nt, Homo sapiens
ggcgcucgcuuccg

SEQ ID NO: 35518 - RNA, 16 nt, Homo sapiens
ggcgcucgcuuccgca

SEQ ID NO: 35519 - RNA, 17 nt, Homo sapiens
ggcgcucgcuuccgcau

SEQ ID NO: 35520 - RNA, 19 nt, Homo sapiens
ggcgcucgcuuccgcaucc

SEQ ID NO: 35521 - RNA, 14 nt, Homo sapiens
ggcgcuggcugcgc

SEQ ID NO: 35522 - RNA, 16 nt, Homo sapiens
ggcgcuggcugcgcuc

SEQ ID NO: 35523 - RNA, 17 nt, Homo sapiens
ggcgcuggcugcgcucg

SEQ ID NO: 35524 - RNA, 22 nt, Homo sapiens
ggcgcuggcugcgcucggccug

SEQ ID NO: 35525 - RNA, 23 nt, Homo sapiens
ggcgcuggcugcgcucggccugc

SEQ ID NO: 35526 - RNA, 13 nt, Homo sapiens
ggcggcccugugc

SEQ ID NO: 35527 - RNA, 16 nt, Homo sapiens
ggcggcccugugcggc

SEQ ID NO: 35528 - RNA, 19 nt, Homo sapiens
ggcggcccugugcggccug

SEQ ID NO: 35529 - RNA, 20 nt, Homo sapiens
ggcggcccugugcggccugg

SEQ ID NO: 35530 - RNA, 10 nt, Homo sapiens
ggcggcggcc

SEQ ID NO: 35531 - RNA, 20 nt, Homo sapiens
ggcgggagggcgcggggcgg

SEQ ID NO: 35532 - RNA, 11 nt, Homo sapiens
ggcggguccgg

SEQ ID NO: 35533 - RNA, 15 nt, Homo sapiens
ggcggguccgggucg

SEQ ID NO: 35534 - RNA, 20 nt, Homo sapiens
ggcggguccgggucgcagga

SEQ ID NO: 35535 - RNA, 21 nt, Homo sapiens
ggcggguccgggucgcaggac

SEQ ID NO: 35536 - RNA, 22 nt, Homo sapiens
gccuggucuaccuguucgcgcg

SEQ ID NO: 35537 - RNA, 13 nt, Homo sapiens
gcgcgcgcccucu

SEQ ID NO: 35538 - RNA, 13 nt, Homo sapiens
gcgcgcgcgcccu

SEQ ID NO: 35539 - RNA, 15 nt, Homo sapiens
gcgcgcgcgcccucu

SEQ ID NO: 35540 - RNA, 20 nt, Homo sapiens
gcgcgcucaucccacccgcc

SEQ ID NO: 35541 - RNA, 21 nt, Homo sapiens
gcgcgcucaucccacccgccc

SEQ ID NO: 35542 - RNA, 11 nt, Homo sapiens
gcgcgcuccgc

SEQ ID NO: 35543 - RNA, 12 nt, Homo sapiens
gcgcgcuccgcg

SEQ ID NO: 35544 - RNA, 13 nt, Homo sapiens
gcgcgcuccgcgc

SEQ ID NO: 35545 - RNA, 15 nt, Homo sapiens
gcgcgcuccgcgcag

SEQ ID NO: 35546 - RNA, 22 nt, Homo sapiens
gcgcgcuccgcgcagcucaggc

SEQ ID NO: 35547 - RNA, 12 nt, Homo sapiens
gcgcggggcggg

SEQ ID NO: 35548 - RNA, 14 nt, Homo sapiens
gcgcggggcgggga

SEQ ID NO: 35549 - RNA, 15 nt, Homo sapiens
gcgcggggcggggag

SEQ ID NO: 35550 - RNA, 16 nt, Homo sapiens
gcgcggggcggggagc

SEQ ID NO: 35551 - RNA, 19 nt, Homo sapiens
gcgcucaucccacccgccc

SEQ ID NO: 35552 - RNA, 21 nt, Homo sapiens
gcgcucaucccacccgcccac

SEQ ID NO: 35553 - RNA, 12 nt, Homo sapiens
gcgcuccgcgca

SEQ ID NO: 35554 - RNA, 14 nt, Homo sapiens
gcgcuccgcgcagc

SEQ ID NO: 35555 - RNA, 16 nt, Homo sapiens
gcgcuccucggacggc

SEQ ID NO: 35556 - RNA, 17 nt, Homo sapiens
gcgcuccucggacggcu

SEQ ID NO: 35557 - RNA, 13 nt, Homo sapiens
gcgcucgcuuccg

SEQ ID NO: 35558 - RNA, 14 nt, Homo sapiens
gcgcucgcuuccgc

SEQ ID NO: 35559 - RNA, 18 nt, Homo sapiens
gcgcucgcuuccgcaucc

SEQ ID NO: 35560 - RNA, 14 nt, Homo sapiens
gcgcucggccugcu

SEQ ID NO: 35561 - RNA, 18 nt, Homo sapiens
gcgcucggccugcucgcc

SEQ ID NO: 35562 - RNA, 19 nt, Homo sapiens
gcgcucggccugcucgccc

SEQ ID NO: 35563 - RNA, 11 nt, Homo sapiens
gcgcugcgcgc

SEQ ID NO: 35564 - RNA, 12 nt, Homo sapiens
gcgcugcgcgcc

SEQ ID NO: 35565 - RNA, 13 nt, Homo sapiens
gcgcugcgcgccg

SEQ ID NO: 35566 - RNA, 15 nt, Homo sapiens
gcgcugcgcgccgcg

SEQ ID NO: 35567 - RNA, 16 nt, Homo sapiens
gcgcugcgcgccgcgc

SEQ ID NO: 35568 - RNA, 17 nt, Homo sapiens
gcgcugcgcgccgcgcu

SEQ ID NO: 35569 - RNA, 22 nt, Homo sapiens
gcgcugcgcgccgcgcuccucg

SEQ ID NO: 35570 - RNA, 12 nt, Homo sapiens
gcgcuggcugcg

SEQ ID NO: 35571 - RNA, 13 nt, Homo sapiens
gcgcuggcugcgc

SEQ ID NO: 35572 - RNA, 14 nt, Homo sapiens
gcgcuggcugcgcu

SEQ ID NO: 35573 - RNA, 16 nt, Homo sapiens
gcgcuggcugcgcucg

SEQ ID NO: 35574 - RNA, 23 nt, Homo sapiens
gcgcuggcugcgcucggccugcu

SEQ ID NO: 35575 - RNA, 17 nt, Homo sapiens
gcgggagggcgcggggc

SEQ ID NO: 35576 - RNA, 13 nt, Homo sapiens
gcggggagcgagc

SEQ ID NO: 35577 - RNA, 21 nt, Homo sapiens
gcggggagcgagccccaggcg

SEQ ID NO: 35578 - RNA, 22 nt, Homo sapiens
gcggggagcgagccccaggcgg

SEQ ID NO: 35579 - RNA, 11 nt, Homo sapiens
gcggguccggg

SEQ ID NO: 35580 - RNA, 22 nt, Homo sapiens
gcggguccgggucgcaggacca

SEQ ID NO: 35581 - RNA, 13 nt, Homo sapiens
gcggcccugugcg

SEQ ID NO: 35582 - RNA, 17 nt, Homo sapiens
gcggcccugugcggccu

SEQ ID NO: 35583 - RNA, 18 nt, Homo sapiens
gcggcccugugcggccug

SEQ ID NO: 35584 - RNA, 19 nt, Homo sapiens
gcggcccugugcggccugg

SEQ ID NO: 35585 - RNA, 21 nt, Homo sapiens
gcggcccugugcggccugguc

SEQ ID NO: 35586 - RNA, 21 nt, Homo sapiens
gcggccuggucuaccuguucg

SEQ ID NO: 35587 - RNA, 11 nt, Homo sapiens
gcggcggcccu

SEQ ID NO: 35588 - RNA, 12 nt, Homo sapiens
gcggcggcccug

SEQ ID NO: 35589 - RNA, 13 nt, Homo sapiens
gcggcggcccugu

SEQ ID NO: 35590 - RNA, 14 nt, Homo sapiens
gcggcggcccugug

SEQ ID NO: 35591 - RNA, 22 nt, Homo sapiens
gcggcggcccugugcggccugg

SEQ ID NO: 35592 - RNA, 23 nt, Homo sapiens
gcggcggcccugugcggccuggu

SEQ ID NO: 35593 - RNA, 18 nt, Homo sapiens
gcggcgggagggcgcggg

SEQ ID NO: 35594 - RNA, 14 nt, Homo sapiens
gcuaagcauuccaa

SEQ ID NO: 35595 - RNA, 12 nt, Homo sapiens
gcuacgcgcgcu

SEQ ID NO: 35596 - RNA, 14 nt, Homo sapiens
gcuacgcgcgcucc

SEQ ID NO: 35597 - RNA, 15 nt, Homo sapiens
gcuacgcgcgcuccg

SEQ ID NO: 35598 - RNA, 16 nt, Homo sapiens
gcuacgcgcgcuccgc

SEQ ID NO: 35599 - RNA, 17 nt, Homo sapiens
gcuacgcgcgcuccgcg

SEQ ID NO: 35600 - RNA, 18 nt, Homo sapiens
gcuacgcgcgcuccgcgc

SEQ ID NO: 35601 - RNA, 21 nt, Homo sapiens
gcuacgcgcgcuccgcgcagc

SEQ ID NO: 35602 - RNA, 14 nt, Homo sapiens
gcucugggucgccg

SEQ ID NO: 35603 - RNA, 15 nt, Homo sapiens
gcucugggucgccgg

SEQ ID NO: 35604 - RNA, 18 nt, Homo sapiens
gcucugggucgccggcau

SEQ ID NO: 35605 - RNA, 19 nt, Homo sapiens
gcucugggucgccggcauc

SEQ ID NO: 35606 - RNA, 19 nt, Homo sapiens
gcucauggaauuggagcuc

SEQ ID NO: 35607 - RNA, 14 nt, Homo sapiens
gcugccccggggag

SEQ ID NO: 35608 - RNA, 15 nt, Homo sapiens
gcugccccggggagg

SEQ ID NO: 35609 - RNA, 19 nt, Homo sapiens
gcugccccggggaggggcg

SEQ ID NO: 35610 - RNA, 22 nt, Homo sapiens
gcugccccggggaggggcgcuc

SEQ ID NO: 35611 - RNA, 23 nt, Homo sapiens
gcugccccggggaggggcgcucg

SEQ ID NO: 35612 - RNA, 14 nt, Homo sapiens
gcugccgugggccu

SEQ ID NO: 35613 - RNA, 16 nt, Homo sapiens
gcugccgugggccuga

SEQ ID NO: 35614 - RNA, 20 nt, Homo sapiens
gcugcgcgccgcgcuccucg

SEQ ID NO: 35615 - RNA, 11 nt, Homo sapiens
gcugcgcucgg

SEQ ID NO: 35616 - RNA, 13 nt, Homo sapiens
gcugcgcucggcc

SEQ ID NO: 35617 - RNA, 15 nt, Homo sapiens
gcugcgcucggccug

SEQ ID NO: 35618 - RNA, 14 nt, Homo sapiens
gcuacuuccagggc

SEQ ID NO: 35619 - RNA, 13 nt, Homo sapiens
gcucaggcuggca

SEQ ID NO: 35620 - RNA, 14 nt, Homo sapiens
gcucaggcuggcac

SEQ ID NO: 35621 - RNA, 15 nt, Homo sapiens
gcucaggcuggcacc

SEQ ID NO: 35622 - RNA, 19 nt, Homo sapiens
gcucaggcuggcaccgcug

SEQ ID NO: 35623 - RNA, 20 nt, Homo sapiens
gcucaggcuggcaccgcugu

SEQ ID NO: 35624 - RNA, 15 nt, Homo sapiens
gcucaucccacccgc

SEQ ID NO: 35625 - RNA, 16 nt, Homo sapiens
gcucaucccacccgcc

SEQ ID NO: 35626 - RNA, 17 nt, Homo sapiens
gcucaucccacccgccc

SEQ ID NO: 35627 - RNA, 18 nt, Homo sapiens
gcucaucccacccgccca

SEQ ID NO: 35628 - RNA, 19 nt, Homo sapiens
gcucaucccacccgcccac

SEQ ID NO: 35629 - RNA, 13 nt, Homo sapiens
gcuccgcgcagcu

SEQ ID NO: 35630 - RNA, 18 nt, Homo sapiens
gcuccgcgcagcucaggc

SEQ ID NO: 35631 - RNA, 15 nt, Homo sapiens
gcuccggacgcugcu

SEQ ID NO: 35632 - RNA, 17 nt, Homo sapiens
gcuccggacgcugcugc

SEQ ID NO: 35633 - RNA, 18 nt, Homo sapiens
gcuccggacgcugcugcc

SEQ ID NO: 35634 - RNA, 24 nt, Homo sapiens
gcuccggacgcugcugccgugggc

SEQ ID NO: 35635 - RNA, 18 nt, Homo sapiens
gcuccucggacggcuccg

SEQ ID NO: 35636 - RNA, 14 nt, Homo sapiens
gcucgcccacuucc

SEQ ID NO: 35637 - RNA, 16 nt, Homo sapiens
gcucgcccacuuccuc

SEQ ID NO: 35638 - RNA, 17 nt, Homo sapiens
gcucgcccacuuccucc

SEQ ID NO: 35639 - RNA, 21 nt, Homo sapiens
gcucgcccacuuccucccggc

SEQ ID NO: 35640 - RNA, 22 nt, Homo sapiens
gcucgcccacuuccucccggcc

SEQ ID NO: 35641 - RNA, 14 nt, Homo sapiens
gcucgcuuccgcau

SEQ ID NO: 35642 - RNA, 16 nt, Homo sapiens
gcucgcuuccgcaucc

SEQ ID NO: 35643 - RNA, 19 nt, Homo sapiens
gcucgcuuccgcauccuag

SEQ ID NO: 35644 - RNA, 11 nt, Homo sapiens
gcucggccugc

SEQ ID NO: 35645 - RNA, 12 nt, Homo sapiens
gcucggccugcu

SEQ ID NO: 35646 - RNA, 15 nt, Homo sapiens
gcucggccugcucgc

SEQ ID NO: 35647 - RNA, 16 nt, Homo sapiens
gcucggccugcucgcc

SEQ ID NO: 35648 - RNA, 20 nt, Homo sapiens
gcucggccugcucgcccacu

SEQ ID NO: 35649 - RNA, 21 nt, Homo sapiens
gcucuaaaugucaaucagccu

SEQ ID NO: 35650 - RNA, 12 nt, Homo sapiens
gcuguuccucgc

SEQ ID NO: 35651 - RNA, 16 nt, Homo sapiens
gcuguuccucgccacg

SEQ ID NO: 35652 - RNA, 17 nt, Homo sapiens
gcuguuccucgccacgc

SEQ ID NO: 35653 - RNA, 18 nt, Homo sapiens
ggaaagaagagccggagc

SEQ ID NO: 35654 - RNA, 20 nt, Homo sapiens
ggaaagaagagccggagccu

SEQ ID NO: 35655 - RNA, 14 nt, Homo sapiens
gcugcgcgccgcgc

SEQ ID NO: 35656 - RNA, 13 nt, Homo sapiens
gcugcugguggcg

SEQ ID NO: 35657 - RNA, 17 nt, Homo sapiens
gcugcugguggcgcugg

SEQ ID NO: 35658 - RNA, 19 nt, Homo sapiens
gcugcugguggcgcuggcu

SEQ ID NO: 35659 - RNA, 20 nt, Homo sapiens
gcugcugguggcgcuggcug

SEQ ID NO: 35660 - RNA, 23 nt, Homo sapiens
gcugcugguggcgcuggcugcgc

SEQ ID NO: 35661 - RNA, 22 nt, Homo sapiens
gcuggcaccgcuguacgcgagc

SEQ ID NO: 35662 - RNA, 14 nt, Homo sapiens
gcuggcugcgcucg

SEQ ID NO: 35663 - RNA, 15 nt, Homo sapiens
gcuggcugcgcucgg

SEQ ID NO: 35664 - RNA, 16 nt, Homo sapiens
gcuggcugcgcucggc

SEQ ID NO: 35665 - RNA, 17 nt, Homo sapiens
gcuggcugcgcucggcc

SEQ ID NO: 35666 - RNA, 18 nt, Homo sapiens
gcuggcugcgcucggccu

SEQ ID NO: 35667 - RNA, 21 nt, Homo sapiens
gcuggcugcgcucggccugcu

SEQ ID NO: 35668 - RNA, 19 nt, Homo sapiens
gcugucuacacuaagagag

SEQ ID NO: 35669 - RNA, 13 nt, Homo sapiens
gcugguggcgcug

SEQ ID NO: 35670 - RNA, 17 nt, Homo sapiens
gcugguggcgcuggcug

SEQ ID NO: 35671 - RNA, 18 nt, Homo sapiens
gcugguggcgcuggcugc

SEQ ID NO: 35672 - RNA, 13 nt, Homo sapiens
gcuguacgcgagc

SEQ ID NO: 35673 - RNA, 17 nt, Homo sapiens
gcuguacgcgagcgcgc

SEQ ID NO: 35674 - RNA, 21 nt, Homo sapiens
gcuguacgcgagcgcgcgcgc

SEQ ID NO: 35675 - RNA, 16 nt, Homo sapiens
ggacauuugcucaugg

SEQ ID NO: 35676 - RNA, 16 nt, Homo sapiens
ggaccaucccggccgg

SEQ ID NO: 35677 - RNA, 17 nt, Homo sapiens
ggaccaucccggccggc

SEQ ID NO: 35678 - RNA, 19 nt, Homo sapiens
ggaccaucccggccggcgc

SEQ ID NO: 35679 - RNA, 20 nt, Homo sapiens
ggaccaucccggccggcgcg

SEQ ID NO: 35680 - RNA, 21 nt, Homo sapiens
ggaccaucccggccggcgcgc

SEQ ID NO: 35681 - RNA, 10 nt, Homo sapiens
ggagaagaac

SEQ ID NO: 35682 - RNA, 19 nt, Homo sapiens
ggacgcugcugccgugggc

SEQ ID NO: 35683 - RNA, 11 nt, Homo sapiens
ggacggcuccg

SEQ ID NO: 35684 - RNA, 14 nt, Homo sapiens
ggacggcuccggac

SEQ ID NO: 35685 - RNA, 12 nt, Homo sapiens
ggagggcgcggg

SEQ ID NO: 35686 - RNA, 14 nt, Homo sapiens
ggagggcgcggggc

SEQ ID NO: 35687 - RNA, 14 nt, Homo sapiens
ggaggggcgcucgc

SEQ ID NO: 35688 - RNA, 17 nt, Homo sapiens
ggagccgggaaagaaga

SEQ ID NO: 35689 - RNA, 21 nt, Homo sapiens
ggagccgggaaagaagagccg

SEQ ID NO: 35690 - RNA, 12 nt, Homo sapiens
ggagccuccagc

SEQ ID NO: 35691 - RNA, 13 nt, Homo sapiens
ggagccuccagcu

SEQ ID NO: 35692 - RNA, 15 nt, Homo sapiens
ggagccuccagcugc

SEQ ID NO: 35693 - RNA, 17 nt, Homo sapiens
ggagccuccagcugccc

SEQ ID NO: 35694 - RNA, 18 nt, Homo sapiens
ggagccuccagcugcccc

SEQ ID NO: 35695 - RNA, 19 nt, Homo sapiens
ggagccuccagcugccccg

SEQ ID NO: 35696 - RNA, 16 nt, Homo sapiens
ggagcgagccccaggc

SEQ ID NO: 35697 - RNA, 17 nt, Homo sapiens
ggagcgagccccaggcg

SEQ ID NO: 35698 - RNA, 19 nt, Homo sapiens
ggagcgagccccaggcggg

SEQ ID NO: 35699 - RNA, 11 nt, Homo sapiens
ggagcucgugg

SEQ ID NO: 35700 - RNA, 15 nt, Homo sapiens
ggagcucguggaaca

SEQ ID NO: 35701 - RNA, 12 nt, Homo sapiens
ggagcucguggg

SEQ ID NO: 35702 - RNA, 15 nt, Homo sapiens
gaaagagaacuucca

SEQ ID NO: 35703 - RNA, 22 nt, Homo sapiens
cuuugugcagauucuuuacccc

SEQ ID NO: 35704 - RNA, 23 nt, Homo sapiens
cuuugugcagauucuuuaccccc

SEQ ID NO: 35705 - RNA, 17 nt, Homo sapiens
gaaagaagagccggagc

SEQ ID NO: 35706 - RNA, 19 nt, Homo sapiens
gaaagaagagccggagccu

SEQ ID NO: 35707 - RNA, 19 nt, Homo sapiens
cuuucaugaaggggcggcg

SEQ ID NO: 35708 - RNA, 16 nt, Homo sapiens
cuggucuaccuguucg

SEQ ID NO: 35709 - RNA, 22 nt, Homo sapiens
cuggucuaccuguucgcgcgcc

SEQ ID NO: 35710 - RNA, 12 nt, Homo sapiens
cugguggcgcug

SEQ ID NO: 35711 - RNA, 13 nt, Homo sapiens
cugguggcgcugg

SEQ ID NO: 35712 - RNA, 14 nt, Homo sapiens
cugguggcgcuggc

SEQ ID NO: 35713 - RNA, 15 nt, Homo sapiens
cugguggcgcuggcu

SEQ ID NO: 35714 - RNA, 16 nt, Homo sapiens
cugguggcgcuggcug

SEQ ID NO: 35715 - RNA, 18 nt, Homo sapiens
cugguggcgcuggcugcg

SEQ ID NO: 35716 - RNA, 19 nt, Homo sapiens
cugguggcgcuggcugcgc

SEQ ID NO: 35717 - RNA, 20 nt, Homo sapiens
cugguggcgcuggcugcgcu

SEQ ID NO: 35718 - RNA, 12 nt, Homo sapiens
cuguacgcgagc

SEQ ID NO: 35719 - RNA, 16 nt, Homo sapiens
cuguacgcgagcgcgc

SEQ ID NO: 35720 - RNA, 17 nt, Homo sapiens
cuguacgcgagcgcgcg

SEQ ID NO: 35721 - RNA, 20 nt, Homo sapiens
cuguacgcgagcgcgcgcgc

SEQ ID NO: 35722 - RNA, 21 nt, Homo sapiens
cuguacgcgagcgcgcgcgcc

SEQ ID NO: 35723 - RNA, 23 nt, Homo sapiens
cuguacgcgagcgcgcgcgcccu

SEQ ID NO: 35724 - RNA, 14 nt, Homo sapiens
cuguucgcgcgccu

SEQ ID NO: 35725 - RNA, 15 nt, Homo sapiens
cuguucgcgcgccuc

SEQ ID NO: 35726 - RNA, 18 nt, Homo sapiens
cuguucgcgcgccuccgc

SEQ ID NO: 35727 - RNA, 21 nt, Homo sapiens
cuuccagggcuacgcgcgcuc

SEQ ID NO: 35728 - RNA, 24 nt, Homo sapiens
cuuccagggcuacgcgcgcuccgc

SEQ ID NO: 35729 - RNA, 14 nt, Homo sapiens
cuucccgcuguucc

SEQ ID NO: 35730 - RNA, 15 nt, Homo sapiens
cuucccgcuguuccu

SEQ ID NO: 35731 - RNA, 19 nt, Homo sapiens
cuucccgcuguuccucgcc

SEQ ID NO: 35732 - RNA, 17 nt, Homo sapiens
cuuccucccggccgcgc

SEQ ID NO: 35733 - RNA, 18 nt, Homo sapiens
cuuccucccggccgcgcu

SEQ ID NO: 35734 - RNA, 22 nt, Homo sapiens
cuuccucccggccgcgcugcgc

SEQ ID NO: 35735 - RNA, 20 nt, Homo sapiens
cuucuuucaugaaggggcgg

SEQ ID NO: 35736 - RNA, 14 nt, Homo sapiens
cucgugggacaguc

SEQ ID NO: 35737 - RNA, 14 nt, Homo sapiens
cuccagcugccccg

SEQ ID NO: 35738 - RNA, 15 nt, Homo sapiens
cuccagcugccccgg

SEQ ID NO: 35739 - RNA, 12 nt, Homo sapiens
cucgccacgcuc

SEQ ID NO: 35740 - RNA, 15 nt, Homo sapiens
cucgccacgcucugg

SEQ ID NO: 35741 - RNA, 22 nt, Homo sapiens
cucgccacgcucugggucgccg

SEQ ID NO: 35742 - RNA, 21 nt, Homo sapiens
cucgcccacuuccucccggcc

SEQ ID NO: 35743 - RNA, 22 nt, Homo sapiens
cucgcccacuuccucccggccg

SEQ ID NO: 35744 - RNA, 12 nt, Homo sapiens
cucgcuuccgca

SEQ ID NO: 35745 - RNA, 14 nt, Homo sapiens
cucggacggcuccg

SEQ ID NO: 35746 - RNA, 15 nt, Homo sapiens
cucggacggcuccgg

SEQ ID NO: 35747 - RNA, 16 nt, Homo sapiens
cucggccugcucgccc

SEQ ID NO: 35748 - RNA, 18 nt, Homo sapiens
cucggccugcucgcccac

SEQ ID NO: 35749 - RNA, 21 nt, Homo sapiens
cucggccugcucgcccacuuc

SEQ ID NO: 35750 - RNA, 22 nt, Homo sapiens
cucggccugcucgcccacuucc

SEQ ID NO: 35751 - RNA, 13 nt, Homo sapiens
cucucuuccuccc

SEQ ID NO: 35752 - RNA, 14 nt, Homo sapiens
cucuggcugcuggu

SEQ ID NO: 35753 - RNA, 21 nt, Homo sapiens
cucuggcugcugguggcgcug

SEQ ID NO: 35754 - RNA, 22 nt, Homo sapiens
cucuggcugcugguggcgcugg

SEQ ID NO: 35755 - RNA, 15 nt, Homo sapiens
cucugggucgccggc

SEQ ID NO: 35756 - RNA, 18 nt, Homo sapiens
cucugggucgccggcauc

SEQ ID NO: 35757 - RNA, 15 nt, Homo sapiens
cugccgugggccuga

SEQ ID NO: 35758 - RNA, 20 nt, Homo sapiens
cugcagcgaguacuucccgc

SEQ ID NO: 35759 - RNA, 22 nt, Homo sapiens
cugcagcgaguacuucccgcug

SEQ ID NO: 35760 - RNA, 11 nt, Homo sapiens
cugccccgggg

SEQ ID NO: 35761 - RNA, 16 nt, Homo sapiens
cugccccggggagggg

SEQ ID NO: 35762 - RNA, 20 nt, Homo sapiens
cugccccggggaggggcgcu

SEQ ID NO: 35763 - RNA, 23 nt, Homo sapiens
cugccccggggaggggcgcucgc

SEQ ID NO: 35764 - RNA, 24 nt, Homo sapiens
cugccccggggaggggcgcucgcu

SEQ ID NO: 35765 - RNA, 18 nt, Homo sapiens
cugagaccaaggcccccg

SEQ ID NO: 35766 - RNA, 20 nt, Homo sapiens
cugagaccaaggcccccggg

SEQ ID NO: 35767 - RNA, 21 nt, Homo sapiens
cugagaccaaggcccccgggc

SEQ ID NO: 35768 - RNA, 22 nt, Homo sapiens
cugagaccaaggcccccgggcc

SEQ ID NO: 35769 - RNA, 23 nt, Homo sapiens
cugagaccaaggcccccgggccg

SEQ ID NO: 35770 - RNA, 13 nt, Homo sapiens
cugcugguggcgc

SEQ ID NO: 35771 - RNA, 15 nt, Homo sapiens
cugcugguggcgcug

SEQ ID NO: 35772 - RNA, 24 nt, Homo sapiens
cugcugguggcgcuggcugcgcuc

SEQ ID NO: 35773 - RNA, 14 nt, Homo sapiens
cugcgcgccgcgcu

SEQ ID NO: 35774 - RNA, 17 nt, Homo sapiens
cugcgcgccgcgcuccu

SEQ ID NO: 35775 - RNA, 18 nt, Homo sapiens
cugcgcgccgcgcuccuc

SEQ ID NO: 35776 - RNA, 15 nt, Homo sapiens
cugcgcucggccugc

SEQ ID NO: 35777 - RNA, 19 nt, Homo sapiens
cugcucgcccacuuccucc

SEQ ID NO: 35778 - RNA, 20 nt, Homo sapiens
cugcucgcccacuuccuccc

SEQ ID NO: 35779 - RNA, 23 nt, Homo sapiens
cugcucgcccacuuccucccggc

SEQ ID NO: 35780 - RNA, 15 nt, Homo sapiens
cugcugccgugggcc

SEQ ID NO: 35781 - RNA, 17 nt, Homo sapiens
cugcugccgugggccug

SEQ ID NO: 35782 - RNA, 19 nt, Homo sapiens
cugcugccgugggccugag

SEQ ID NO: 35783 - RNA, 13 nt, Homo sapiens
cugggucgccggc

SEQ ID NO: 35784 - RNA, 16 nt, Homo sapiens
cugggucgccggcauc

SEQ ID NO: 35785 - RNA, 13 nt, Homo sapiens
cuggcugcgcucg

SEQ ID NO: 35786 - RNA, 18 nt, Homo sapiens
cuggcugcgcucggccug

SEQ ID NO: 35787 - RNA, 19 nt, Homo sapiens
cuggcugcgcucggccugc

SEQ ID NO: 35788 - RNA, 20 nt, Homo sapiens
cuggcugcgcucggccugcu

SEQ ID NO: 35789 - RNA, 23 nt, Homo sapiens
cuggcugcgcucggccugcucgc

SEQ ID NO: 35790 - RNA, 15 nt, Homo sapiens
cuggcugcugguggc

SEQ ID NO: 35791 - RNA, 16 nt, Homo sapiens
cuggcugcugguggcg

SEQ ID NO: 35792 - RNA, 17 nt, Homo sapiens
cuggcugcugguggcgc

SEQ ID NO: 35793 - RNA, 18 nt, Homo sapiens
cuggcugcugguggcgcu

SEQ ID NO: 35794 - RNA, 19 nt, Homo sapiens
cuggcugcugguggcgcug

SEQ ID NO: 35795 - RNA, 20 nt, Homo sapiens
cuggcugcugguggcgcugg

SEQ ID NO: 35796 - RNA, 22 nt, Homo sapiens
cuggcugcugguggcgcuggcu

SEQ ID NO: 35797 - RNA, 24 nt, Homo sapiens
cuggcugcugguggcgcuggcugc

SEQ ID NO: 35798 - RNA, 20 nt, Homo sapiens
cgcgcagcucaggcuggcac

SEQ ID NO: 35799 - RNA, 21 nt, Homo sapiens
cgcgcagcucaggcuggcacc

SEQ ID NO: 35800 - RNA, 17 nt, Homo sapiens
cgcauccuagucucuau

SEQ ID NO: 35801 - RNA, 12 nt, Homo sapiens
cgcgcccucugg

SEQ ID NO: 35802 - RNA, 15 nt, Homo sapiens
cgcgcccucuggcug

SEQ ID NO: 35803 - RNA, 16 nt, Homo sapiens
cgcgcccucuggcugc

SEQ ID NO: 35804 - RNA, 19 nt, Homo sapiens
cgcgcccucuggcugcugg

SEQ ID NO: 35805 - RNA, 20 nt, Homo sapiens
cgcgcccucuggcugcuggu

SEQ ID NO: 35806 - RNA, 22 nt, Homo sapiens
cgcgcccucuggcugcuggugg

SEQ ID NO: 35807 - RNA, 23 nt, Homo sapiens
cgcgcccucuggcugcugguggc

SEQ ID NO: 35808 - RNA, 24 nt, Homo sapiens
cgcgcccucuggcugcugguggcg

SEQ ID NO: 35809 - RNA, 13 nt, Homo sapiens
cgcgccgcgcucc

SEQ ID NO: 35810 - RNA, 14 nt, Homo sapiens
cgcgccgcgcuccu

SEQ ID NO: 35811 - RNA, 16 nt, Homo sapiens
cgcgccgcgcuccucg

SEQ ID NO: 35812 - RNA, 19 nt, Homo sapiens
cgcgccgcgcuccucggac

SEQ ID NO: 35813 - RNA, 13 nt, Homo sapiens
cgcgccuccgcua

SEQ ID NO: 35814 - RNA, 11 nt, Homo sapiens
cgcucggccug

SEQ ID NO: 35815 - RNA, 12 nt, Homo sapiens
cgcucggccugc

SEQ ID NO: 35816 - RNA, 15 nt, Homo sapiens
cgcucggccugcucg

SEQ ID NO: 35817 - RNA, 14 nt, Homo sapiens
cgcucugggucgcc

SEQ ID NO: 35818 - RNA, 17 nt, Homo sapiens
cgcucugggucgccggc

SEQ ID NO: 35819 - RNA, 11 nt, Homo sapiens
cgcugcgcgcc

SEQ ID NO: 35820 - RNA, 12 nt, Homo sapiens
cgcugcgcgccg

SEQ ID NO: 35821 - RNA, 14 nt, Homo sapiens
cgcugcgcgccgcg

SEQ ID NO: 35822 - RNA, 15 nt, Homo sapiens
cgcugcgcgccgcgc

SEQ ID NO: 35823 - RNA, 17 nt, Homo sapiens
cgcugcgcgccgcgcuc

SEQ ID NO: 35824 - RNA, 19 nt, Homo sapiens
cgcugcgcgccgcgcuccu

SEQ ID NO: 35825 - RNA, 15 nt, Homo sapiens
cgcugcugccguggg

SEQ ID NO: 35826 - RNA, 13 nt, Homo sapiens
cgcuggcugcgcu

SEQ ID NO: 35827 - RNA, 14 nt, Homo sapiens
cgcuggcugcgcuc

SEQ ID NO: 35828 - RNA, 16 nt, Homo sapiens
cgcuggcugcgcucgg

SEQ ID NO: 35829 - RNA, 17 nt, Homo sapiens
cgcuggcugcgcucggc

SEQ ID NO: 35830 - RNA, 21 nt, Homo sapiens
cgcuggcugcgcucggccugc

SEQ ID NO: 35831 - RNA, 22 nt, Homo sapiens
cgcuggcugcgcucggccugcu

SEQ ID NO: 35832 - RNA, 14 nt, Homo sapiens
cgcuguacgcgagc

SEQ ID NO: 35833 - RNA, 12 nt, Homo sapiens
cgcuguuccucg

SEQ ID NO: 35834 - RNA, 13 nt, Homo sapiens
cgcuguuccucgc

SEQ ID NO: 35835 - RNA, 14 nt, Homo sapiens
cgcuguuccucgcc

SEQ ID NO: 35836 - RNA, 15 nt, Homo sapiens
cgcuguuccucgcca

SEQ ID NO: 35837 - RNA, 17 nt, Homo sapiens
cgcuguuccucgccacg

SEQ ID NO: 35838 - RNA, 19 nt, Homo sapiens
cgcuguuccucgccacgcu

SEQ ID NO: 35839 - RNA, 20 nt, Homo sapiens
cgcuguuccucgccacgcuc

SEQ ID NO: 35840 - RNA, 21 nt, Homo sapiens
cgcuguuccucgccacgcucu

SEQ ID NO: 35841 - RNA, 23 nt, Homo sapiens
cgcuguuccucgccacgcucugg

SEQ ID NO: 35842 - RNA, 16 nt, Homo sapiens
cgcuuccgcauccuag

SEQ ID NO: 35843 - RNA, 11 nt, Homo sapiens
cgcgcgcccuc

SEQ ID NO: 35844 - RNA, 13 nt, Homo sapiens
cgcgcgcccucug

SEQ ID NO: 35845 - RNA, 14 nt, Homo sapiens
cgcgcgcccucugg

SEQ ID NO: 35846 - RNA, 16 nt, Homo sapiens
cgcgcgcccucuggcu

SEQ ID NO: 35847 - RNA, 11 nt, Homo sapiens
cgcgcgccucc

SEQ ID NO: 35848 - RNA, 14 nt, Homo sapiens
cgcgcgccuccgcu

SEQ ID NO: 35849 - RNA, 18 nt, Homo sapiens
cgcgcgccuccgcuacuu

SEQ ID NO: 35850 - RNA, 12 nt, Homo sapiens
cgcgcgcgcccu

SEQ ID NO: 35851 - RNA, 13 nt, Homo sapiens
cgcgcgcgcccuc

SEQ ID NO: 35852 - RNA, 12 nt, Homo sapiens
cgcgcgcuccgc

SEQ ID NO: 35853 - RNA, 13 nt, Homo sapiens
cgcgcgcuccgcg

SEQ ID NO: 35854 - RNA, 14 nt, Homo sapiens
cgcgcgcuccgcgc

SEQ ID NO: 35855 - RNA, 17 nt, Homo sapiens
cgcgcgcuccgcgcagc

SEQ ID NO: 35856 - RNA, 18 nt, Homo sapiens
cgcgcgcuccgcgcagcu

SEQ ID NO: 35857 - RNA, 12 nt, Homo sapiens
cgcgcucauccc

SEQ ID NO: 35858 - RNA, 15 nt, Homo sapiens
cgcgcucaucccacc

SEQ ID NO: 35859 - RNA, 12 nt, Homo sapiens
cgcgcuccgcgc

SEQ ID NO: 35860 - RNA, 13 nt, Homo sapiens
cgcgcuccgcgca

SEQ ID NO: 35861 - RNA, 16 nt, Homo sapiens
cgcgcuccgcgcagcu

SEQ ID NO: 35862 - RNA, 20 nt, Homo sapiens
cgcgcuccucggacggcucc

SEQ ID NO: 35863 - RNA, 11 nt, Homo sapiens
cgcgcugcgcg

SEQ ID NO: 35864 - RNA, 13 nt, Homo sapiens
cgcgcugcgcgcc

SEQ ID NO: 35865 - RNA, 15 nt, Homo sapiens
cgcgcugcgcgccgc

SEQ ID NO: 35866 - RNA, 16 nt, Homo sapiens
cgcgcugcgcgccgcg

SEQ ID NO: 35867 - RNA, 18 nt, Homo sapiens
cgcggcgggagggcgcgg

SEQ ID NO: 35868 - RNA, 20 nt, Homo sapiens
cgcggcgggagggcgcgggg

SEQ ID NO: 35869 - RNA, 21 nt, Homo sapiens
cgcggcgggagggcgcggggc

SEQ ID NO: 35870 - RNA, 23 nt, Homo sapiens
cgcggcgggagggcgcggggcgg

SEQ ID NO: 35871 - RNA, 11 nt, Homo sapiens
cgcggggcggg

SEQ ID NO: 35872 - RNA, 16 nt, Homo sapiens
cgcggggcggggagcg

SEQ ID NO: 35873 - RNA, 14 nt, Homo sapiens
cggacgcugcugcc

SEQ ID NO: 35874 - RNA, 18 nt, Homo sapiens
cggacgcugcugccgugg

SEQ ID NO: 35875 - RNA, 23 nt, Homo sapiens
cggacgcugcugccgugggccug

SEQ ID NO: 35876 - RNA, 13 nt, Homo sapiens
cggacggcuccgg

SEQ ID NO: 35877 - RNA, 17 nt, Homo sapiens
cggacggcuccggacgc

SEQ ID NO: 35878 - RNA, 17 nt, Homo sapiens
cgcuacuuccagggcua

SEQ ID NO: 35879 - RNA, 22 nt, Homo sapiens
cgcucaucccacccgcccaccg

SEQ ID NO: 35880 - RNA, 23 nt, Homo sapiens
cgcucaucccacccgcccaccgc

SEQ ID NO: 35881 - RNA, 13 nt, Homo sapiens
cgcuccgcgcagc

SEQ ID NO: 35882 - RNA, 12 nt, Homo sapiens
cgcuccucggac

SEQ ID NO: 35883 - RNA, 16 nt, Homo sapiens
cgcuccucggacggcu

SEQ ID NO: 35884 - RNA, 18 nt, Homo sapiens
cgcuccucggacggcucc

SEQ ID NO: 35885 - RNA, 13 nt, Homo sapiens
cgcucgcuuccgc

SEQ ID NO: 35886 - RNA, 16 nt, Homo sapiens
cgggccgacggagccg

SEQ ID NO: 35887 - RNA, 17 nt, Homo sapiens
cgggccgacggagccgg

SEQ ID NO: 35888 - RNA, 20 nt, Homo sapiens
cgggccgacggagccgggaa

SEQ ID NO: 35889 - RNA, 21 nt, Homo sapiens
cgggccgacggagccgggaaa

SEQ ID NO: 35890 - RNA, 12 nt, Homo sapiens
cggggagcgagc

SEQ ID NO: 35891 - RNA, 13 nt, Homo sapiens
cggggagcgagcc

SEQ ID NO: 35892 - RNA, 19 nt, Homo sapiens
cggggagcgagccccaggc

SEQ ID NO: 35893 - RNA, 21 nt, Homo sapiens
cggggagcgagccccaggcgg

SEQ ID NO: 35894 - RNA, 22 nt, Homo sapiens
cggggagcgagccccaggcggg

SEQ ID NO: 35895 - RNA, 14 nt, Homo sapiens
cggggaggggcgcu

SEQ ID NO: 35896 - RNA, 15 nt, Homo sapiens
cggggaggggcgcuc

SEQ ID NO: 35897 - RNA, 17 nt, Homo sapiens
cggggaggggcgcucgc

SEQ ID NO: 35898 - RNA, 18 nt, Homo sapiens
cggggaggggcgcucgcu

SEQ ID NO: 35899 - RNA, 19 nt, Homo sapiens
cggggaggggcgcucgcuu

SEQ ID NO: 35900 - RNA, 20 nt, Homo sapiens
cggggaggggcgcucgcuuc

SEQ ID NO: 35901 - RNA, 21 nt, Homo sapiens
cggggaggggcgcucgcuucc

SEQ ID NO: 35902 - RNA, 22 nt, Homo sapiens
cggggaggggcgcucgcuuccg

SEQ ID NO: 35903 - RNA, 19 nt, Homo sapiens
cggggcggggagcgagccc

SEQ ID NO: 35904 - RNA, 20 nt, Homo sapiens
cggggcggggagcgagcccc

SEQ ID NO: 35905 - RNA, 17 nt, Homo sapiens
cggagccgggaaagaag

SEQ ID NO: 35906 - RNA, 14 nt, Homo sapiens
cggagccuccagcu

SEQ ID NO: 35907 - RNA, 16 nt, Homo sapiens
cggagccuccagcugc

SEQ ID NO: 35908 - RNA, 19 nt, Homo sapiens
cggagccuccagcugcccc

SEQ ID NO: 35909 - RNA, 20 nt, Homo sapiens
cggagccuccagcugccccg

SEQ ID NO: 35910 - RNA, 21 nt, Homo sapiens
cggagccuccagcugccccgg

SEQ ID NO: 35911 - RNA, 14 nt, Homo sapiens
cggcccugugcggc

SEQ ID NO: 35912 - RNA, 16 nt, Homo sapiens
cggcccugugcggccu

SEQ ID NO: 35913 - RNA, 18 nt, Homo sapiens
cggcccugugcggccugg

SEQ ID NO: 35914 - RNA, 19 nt, Homo sapiens
cggcccugugcggccuggu

SEQ ID NO: 35915 - RNA, 15 nt, Homo sapiens
cggccgcgcugcgcg

SEQ ID NO: 35916 - RNA, 16 nt, Homo sapiens
cggccgcgcugcgcgc

SEQ ID NO: 35917 - RNA, 17 nt, Homo sapiens
cggccgcgcugcgcgcc

SEQ ID NO: 35918 - RNA, 18 nt, Homo sapiens
cggccgcgcugcgcgccg

SEQ ID NO: 35919 - RNA, 20 nt, Homo sapiens
cggccgcgcugcgcgccgcg

SEQ ID NO: 35920 - RNA, 21 nt, Homo sapiens
cggccgcgcugcgcgccgcgc

SEQ ID NO: 35921 - RNA, 11 nt, Homo sapiens
cggccggcgcg

SEQ ID NO: 35922 - RNA, 12 nt, Homo sapiens
cggccggcgcgc

SEQ ID NO: 35923 - RNA, 13 nt, Homo sapiens
cggccggcgcgcu

SEQ ID NO: 35924 - RNA, 15 nt, Homo sapiens
cggccggcgcgcuca

SEQ ID NO: 35925 - RNA, 12 nt, Homo sapiens
cggccugcucgc

SEQ ID NO: 35926 - RNA, 13 nt, Homo sapiens
cggccugcucgcc

SEQ ID NO: 35927 - RNA, 14 nt, Homo sapiens
cggccugcucgccc

SEQ ID NO: 35928 - RNA, 15 nt, Homo sapiens
cggccugcucgccca

SEQ ID NO: 35929 - RNA, 21 nt, Homo sapiens
cggccugcucgcccacuuccu

SEQ ID NO: 35930 - RNA, 20 nt, Homo sapiens
cggccuggucuaccuguucg

SEQ ID NO: 35931 - RNA, 21 nt, Homo sapiens
cggccuggucuaccuguucgc

SEQ ID NO: 35932 - RNA, 21 nt, Homo sapiens
cggcgcgcucaucccacccgc

SEQ ID NO: 35933 - RNA, 10 nt, Homo sapiens
cggcggcccu

SEQ ID NO: 35934 - RNA, 11 nt, Homo sapiens
cggcggcccug

SEQ ID NO: 35935 - RNA, 12 nt, Homo sapiens
cggcggcccugu

SEQ ID NO: 35936 - RNA, 13 nt, Homo sapiens
cggcggcccugug

SEQ ID NO: 35937 - RNA, 14 nt, Homo sapiens
cggcggcccugugc

SEQ ID NO: 35938 - RNA, 21 nt, Homo sapiens
cggcggcccugugcggccugg

SEQ ID NO: 35939 - RNA, 22 nt, Homo sapiens
cggcggcccugugcggccuggu

SEQ ID NO: 35940 - RNA, 16 nt, Homo sapiens
cggcgggagggcgcgg

SEQ ID NO: 35941 - RNA, 17 nt, Homo sapiens
cggcgggagggcgcggg

SEQ ID NO: 35942 - RNA, 18 nt, Homo sapiens
cggcgggagggcgcgggg

SEQ ID NO: 35943 - RNA, 22 nt, Homo sapiens
cggcgggagggcgcggggcggg

SEQ ID NO: 35944 - RNA, 14 nt, Homo sapiens
cggcuccggacgcu

SEQ ID NO: 35945 - RNA, 16 nt, Homo sapiens
cggcuccggacgcugc

SEQ ID NO: 35946 - RNA, 18 nt, Homo sapiens
cggcuccggacgcugcug

SEQ ID NO: 35947 - RNA, 19 nt, Homo sapiens
cggcuccggacgcugcugc

SEQ ID NO: 35948 - RNA, 20 nt, Homo sapiens
cggcuccggacgcugcugcc

SEQ ID NO: 35949 - RNA, 21 nt, Homo sapiens
cggcuccggacgcugcugccg

SEQ ID NO: 35950 - RNA, 15 nt, Homo sapiens
cgggaaagaagagcc

SEQ ID NO: 35951 - RNA, 17 nt, Homo sapiens
cgggaaagaagagccgg

SEQ ID NO: 35952 - RNA, 22 nt, Homo sapiens
cgggaaagaagagccggagccu

SEQ ID NO: 35953 - RNA, 20 nt, Homo sapiens
cuaggaaauauuuauuuuaa

SEQ ID NO: 35954 - RNA, 23 nt, Homo sapiens
cucauggaauuggagcucguggg

SEQ ID NO: 35955 - RNA, 12 nt, Homo sapiens
cuccgcgcagcu

SEQ ID NO: 35956 - RNA, 17 nt, Homo sapiens
cuccgcuacuuccaggg

SEQ ID NO: 35957 - RNA, 13 nt, Homo sapiens
cuccggacgcugc

SEQ ID NO: 35958 - RNA, 14 nt, Homo sapiens
cuccggacgcugcu

SEQ ID NO: 35959 - RNA, 15 nt, Homo sapiens
cuccggacgcugcug

SEQ ID NO: 35960 - RNA, 16 nt, Homo sapiens
cuccggacgcugcugc

SEQ ID NO: 35961 - RNA, 17 nt, Homo sapiens
cuccggacgcugcugcc

SEQ ID NO: 35962 - RNA, 18 nt, Homo sapiens
cuccggacgcugcugccg

SEQ ID NO: 35963 - RNA, 19 nt, Homo sapiens
cuccggacgcugcugccgu

SEQ ID NO: 35964 - RNA, 20 nt, Homo sapiens
cuccggacgcugcugccgug

SEQ ID NO: 35965 - RNA, 23 nt, Homo sapiens
cuccggacgcugcugccgugggc

SEQ ID NO: 35966 - RNA, 22 nt, Homo sapiens
cuccucggacggcuccggacgc

SEQ ID NO: 35967 - RNA, 11 nt, Homo sapiens
cucccggccgc

SEQ ID NO: 35968 - RNA, 12 nt, Homo sapiens
cucccggccgcg

SEQ ID NO: 35969 - RNA, 16 nt, Homo sapiens
cucccggccgcgcugc

SEQ ID NO: 35970 - RNA, 17 nt, Homo sapiens
cucccggccgcgcugcg

SEQ ID NO: 35971 - RNA, 18 nt, Homo sapiens
cucccggccgcgcugcgc

SEQ ID NO: 35972 - RNA, 20 nt, Homo sapiens
cucccggccgcgcugcgcgc

SEQ ID NO: 35973 - RNA, 15 nt, Homo sapiens
cuaucucauuuccaa

SEQ ID NO: 35974 - RNA, 13 nt, Homo sapiens
cuagugaccgaga

SEQ ID NO: 35975 - RNA, 12 nt, Homo sapiens
cuaguauuucua

SEQ ID NO: 35976 - RNA, 13 nt, Homo sapiens
cuaguauuucuau

SEQ ID NO: 35977 - RNA, 14 nt, Homo sapiens
cucaucccacccgc

SEQ ID NO: 35978 - RNA, 13 nt, Homo sapiens
cucaggcuggcac

SEQ ID NO: 35979 - RNA, 15 nt, Homo sapiens
cucaggcuggcaccg

SEQ ID NO: 35980 - RNA, 20 nt, Homo sapiens
cucaggcuggcaccgcugua

SEQ ID NO: 35981 - RNA, 22 nt, Homo sapiens
cucaggcuggcaccgcuguacg

SEQ ID NO: 35982 - RNA, 16 nt, Homo sapiens
cgggagggcgcggggc

SEQ ID NO: 35983 - RNA, 19 nt, Homo sapiens
cgggagggcgcggggcggg

SEQ ID NO: 35984 - RNA, 21 nt, Homo sapiens
cgggagggcgcggggcgggga

SEQ ID NO: 35985 - RNA, 14 nt, Homo sapiens
cggguccgggucgc

SEQ ID NO: 35986 - RNA, 15 nt, Homo sapiens
cggguccgggucgca

SEQ ID NO: 35987 - RNA, 19 nt, Homo sapiens
cggguccgggucgcaggac

SEQ ID NO: 35988 - RNA, 21 nt, Homo sapiens
cggguccgggucgcaggacca

SEQ ID NO: 35989 - RNA, 22 nt, Homo sapiens
cgggucgcaggaccaucccggc

SEQ ID NO: 35990 - RNA, 17 nt, Homo sapiens
cuaccuguucgcgcgcc

SEQ ID NO: 35991 - RNA, 20 nt, Homo sapiens
cuaccuguucgcgcgccucc

SEQ ID NO: 35992 - RNA, 11 nt, Homo sapiens
cuacgcgcgcu

SEQ ID NO: 35993 - RNA, 13 nt, Homo sapiens
cuacgcgcgcucc

SEQ ID NO: 35994 - RNA, 14 nt, Homo sapiens
cuacgcgcgcuccg

SEQ ID NO: 35995 - RNA, 15 nt, Homo sapiens
cuacgcgcgcuccgc

SEQ ID NO: 35996 - RNA, 16 nt, Homo sapiens
cuacgcgcgcuccgcg

SEQ ID NO: 35997 - RNA, 17 nt, Homo sapiens
cuacgcgcgcuccgcgc

SEQ ID NO: 35998 - RNA, 20 nt, Homo sapiens
cuacgcgcgcuccgcgcagc

SEQ ID NO: 35999 - RNA, 19 nt, Homo sapiens
cuacuuccagggcuacgcg

SEQ ID NO: 36000 - RNA, 9 nt, Homo sapiens
gaaggggcg

SEQ ID NO: 36001 - RNA, 15 nt, Homo sapiens
gaaggggcggcggcc

SEQ ID NO: 36002 - RNA, 17 nt, Homo sapiens
gaaggggcggcggcccu

SEQ ID NO: 36003 - RNA, 13 nt, Homo sapiens
gacacacugaaga

SEQ ID NO: 36004 - RNA, 18 nt, Homo sapiens
gaccaaggcccccgggcc

SEQ ID NO: 36005 - RNA, 20 nt, Homo sapiens
gaccaaggcccccgggccga

SEQ ID NO: 36006 - RNA, 23 nt, Homo sapiens
gaccaaggcccccgggccgacgg

SEQ ID NO: 36007 - RNA, 16 nt, Homo sapiens
gaccaucccggccggc

SEQ ID NO: 36008 - RNA, 17 nt, Homo sapiens
gaccaucccggccggcg

SEQ ID NO: 36009 - RNA, 18 nt, Homo sapiens
gaccaucccggccggcgc

SEQ ID NO: 36010 - RNA, 20 nt, Homo sapiens
gaccaucccggccggcgcgc

SEQ ID NO: 36011 - RNA, 21 nt, Homo sapiens
gaccaucccggccggcgcgcu

SEQ ID NO: 36012 - RNA, 15 nt, Homo sapiens
gacacacugaagaag

SEQ ID NO: 36013 - RNA, 19 nt, Homo sapiens
gacagucaccucauggaau

SEQ ID NO: 36014 - RNA, 12 nt, Homo sapiens
gaagaacugaaa

SEQ ID NO: 36015 - RNA, 12 nt, Homo sapiens
gaagagccggag

SEQ ID NO: 36016 - RNA, 14 nt, Homo sapiens
gaagagccggagcc

SEQ ID NO: 36017 - RNA, 15 nt, Homo sapiens
gaagagccggagccu

SEQ ID NO: 36018 - RNA, 19 nt, Homo sapiens
gaagagccggagccuccag

SEQ ID NO: 36019 - RNA, 21 nt, Homo sapiens
gaagagccggagccuccagcu

SEQ ID NO: 36020 - RNA, 11 nt, Homo sapiens
gacggcuccgg

SEQ ID NO: 36021 - RNA, 13 nt, Homo sapiens
gacggcuccggac

SEQ ID NO: 36022 - RNA, 14 nt, Homo sapiens
gacggcuccggacg

SEQ ID NO: 36023 - RNA, 17 nt, Homo sapiens
gacggcuccggacgcug

SEQ ID NO: 36024 - RNA, 17 nt, Homo sapiens
gacgcugcugccguggg

SEQ ID NO: 36025 - RNA, 13 nt, Homo sapiens
gacggagccggga

SEQ ID NO: 36026 - RNA, 14 nt, Homo sapiens
gacggagccgggaa

SEQ ID NO: 36027 - RNA, 13 nt, Homo sapiens
gagagaaugagag

SEQ ID NO: 36028 - RNA, 17 nt, Homo sapiens
gagagacacacugaaga

SEQ ID NO: 36029 - RNA, 18 nt, Homo sapiens
gagagacacacugaagaa

SEQ ID NO: 36030 - RNA, 16 nt, Homo sapiens
gagaccaaggcccccg

SEQ ID NO: 36031 - RNA, 19 nt, Homo sapiens
gagaccaaggcccccgggc

SEQ ID NO: 36032 - RNA, 11 nt, Homo sapiens
gagcucgugga

SEQ ID NO: 36033 - RNA, 14 nt, Homo sapiens
gaggggcgcucgcu

SEQ ID NO: 36034 - RNA, 23 nt, Homo sapiens
gaggggcgcucgcuuccgcaucc

SEQ ID NO: 36035 - RNA, 19 nt, Homo sapiens
gagggaagccuuggggcug

SEQ ID NO: 36036 - RNA, 16 nt, Homo sapiens
gagggcgcggggcggg

SEQ ID NO: 36037 - RNA, 18 nt, Homo sapiens
gagggcgcggggcgggga

SEQ ID NO: 36038 - RNA, 11 nt, Homo sapiens
gagccggagcc

SEQ ID NO: 36039 - RNA, 13 nt, Homo sapiens
gagccggagccuc

SEQ ID NO: 36040 - RNA, 21 nt, Homo sapiens
gagccggagccuccagcugcc

SEQ ID NO: 36041 - RNA, 18 nt, Homo sapiens
gagccgggaaagaagagc

SEQ ID NO: 36042 - RNA, 21 nt, Homo sapiens
gagccgggaaagaagagccgg

SEQ ID NO: 36043 - RNA, 23 nt, Homo sapiens
gagccgggaaagaagagccggag

SEQ ID NO: 36044 - RNA, 13 nt, Homo sapiens
gagccuccagcug

SEQ ID NO: 36045 - RNA, 16 nt, Homo sapiens
gagccuccagcugccc

SEQ ID NO: 36046 - RNA, 18 nt, Homo sapiens
gagccuccagcugccccg

SEQ ID NO: 36047 - RNA, 19 nt, Homo sapiens
gagccuccagcugccccgg

SEQ ID NO: 36048 - RNA, 20 nt, Homo sapiens
gagccuccagcugccccggg

SEQ ID NO: 36049 - RNA, 22 nt, Homo sapiens
gagccuccagcugccccgggga

SEQ ID NO: 36050 - RNA, 14 nt, Homo sapiens
gagcgagccccagg

SEQ ID NO: 36051 - RNA, 16 nt, Homo sapiens
gagcgagccccaggcg

SEQ ID NO: 36052 - RNA, 20 nt, Homo sapiens
gagcgagccccaggcggguc

SEQ ID NO: 36053 - RNA, 13 nt, Homo sapiens
gagcgcgcgcgcc

SEQ ID NO: 36054 - RNA, 14 nt, Homo sapiens
gagcgcgcgcgccc

SEQ ID NO: 36055 - RNA, 16 nt, Homo sapiens
gagcgcgcgcgcccuc

SEQ ID NO: 36056 - RNA, 18 nt, Homo sapiens
gagcgcgcgcgcccucug

SEQ ID NO: 36057 - RNA, 19 nt, Homo sapiens
gagcgcgcgcgcccucugg

SEQ ID NO: 36058 - RNA, 21 nt, Homo sapiens
gauucccagccagcacagccu

SEQ ID NO: 36059 - RNA, 11 nt, Homo sapiens
gaguacuuccc

SEQ ID NO: 36060 - RNA, 16 nt, Homo sapiens
gaguacuucccgcugu

SEQ ID NO: 36061 - RNA, 22 nt, Homo sapiens
gaguacuucccgcuguuccucg

SEQ ID NO: 36062 - RNA, 14 nt, Homo sapiens
gccccaggcggguc

SEQ ID NO: 36063 - RNA, 15 nt, Homo sapiens
gcccacuuccucccg

SEQ ID NO: 36064 - RNA, 17 nt, Homo sapiens
gcccacuuccucccggc

SEQ ID NO: 36065 - RNA, 18 nt, Homo sapiens
gcccacuuccucccggcc

SEQ ID NO: 36066 - RNA, 21 nt, Homo sapiens
gcccacuuccucccggccgcg

SEQ ID NO: 36067 - RNA, 22 nt, Homo sapiens
gcccacuuccucccggccgcgc

SEQ ID NO: 36068 - RNA, 23 nt, Homo sapiens
gcccacuuccucccggccgcgcu

SEQ ID NO: 36069 - RNA, 11 nt, Homo sapiens
gcccccgggcc

SEQ ID NO: 36070 - RNA, 12 nt, Homo sapiens
gcccccgggccg

SEQ ID NO: 36071 - RNA, 13 nt, Homo sapiens
gcccccgggccga

SEQ ID NO: 36072 - RNA, 15 nt, Homo sapiens
gcccccgggccgacg

SEQ ID NO: 36073 - RNA, 16 nt, Homo sapiens
gcccccgggccgacgg

SEQ ID NO: 36074 - RNA, 17 nt, Homo sapiens
gcccccgggccgacgga

SEQ ID NO: 36075 - RNA, 12 nt, Homo sapiens
gccccggggagg

SEQ ID NO: 36076 - RNA, 13 nt, Homo sapiens
gccccggggaggg

SEQ ID NO: 36077 - RNA, 17 nt, Homo sapiens
gccccggggaggggcgc

SEQ ID NO: 36078 - RNA, 18 nt, Homo sapiens
gccccggggaggggcgcu

SEQ ID NO: 36079 - RNA, 19 nt, Homo sapiens
gccccggggaggggcgcuc

SEQ ID NO: 36080 - RNA, 20 nt, Homo sapiens
gccccggggaggggcgcucg

SEQ ID NO: 36081 - RNA, 21 nt, Homo sapiens
gccccggggaggggcgcucgc

SEQ ID NO: 36082 - RNA, 22 nt, Homo sapiens
gccccggggaggggcgcucgcu

SEQ ID NO: 36083 - RNA, 12 nt, Homo sapiens
gccgacggagcc

SEQ ID NO: 36084 - RNA, 14 nt, Homo sapiens
gccgacggagccgg

SEQ ID NO: 36085 - RNA, 17 nt, Homo sapiens
gccgacggagccgggaa

SEQ ID NO: 36086 - RNA, 21 nt, Homo sapiens
gccgacggagccgggaaagaa

SEQ ID NO: 36087 - RNA, 12 nt, Homo sapiens
gcccugugcggc

SEQ ID NO: 36088 - RNA, 13 nt, Homo sapiens
gcccugugcggcc

SEQ ID NO: 36089 - RNA, 15 nt, Homo sapiens
gcccugugcggccug

SEQ ID NO: 36090 - RNA, 16 nt, Homo sapiens
gcccugugcggccugg

SEQ ID NO: 36091 - RNA, 15 nt, Homo sapiens
gcccucuggcugcug

SEQ ID NO: 36092 - RNA, 20 nt, Homo sapiens
gcccucuggcugcugguggc

SEQ ID NO: 36093 - RNA, 22 nt, Homo sapiens
gcccucuggcugcugguggcgc

SEQ ID NO: 36094 - RNA, 19 nt, Homo sapiens
gccggagccuccagcugcc

SEQ ID NO: 36095 - RNA, 20 nt, Homo sapiens
gccggagccuccagcugccc

SEQ ID NO: 36096 - RNA, 22 nt, Homo sapiens
gccggagccuccagcugccccg

SEQ ID NO: 36097 - RNA, 23 nt, Homo sapiens
gccggagccuccagcugccccgg

SEQ ID NO: 36098 - RNA, 14 nt, Homo sapiens
gccggcgcgcucau

SEQ ID NO: 36099 - RNA, 16 nt, Homo sapiens
gccggcgcgcucaucc

SEQ ID NO: 36100 - RNA, 22 nt, Homo sapiens
gccggcgcgcucaucccacccg

SEQ ID NO: 36101 - RNA, 23 nt, Homo sapiens
gccggcgcgcucaucccacccgc

SEQ ID NO: 36102 - RNA, 16 nt, Homo sapiens
gccgggaaagaagagc

SEQ ID NO: 36103 - RNA, 17 nt, Homo sapiens
gccgggaaagaagagcc

SEQ ID NO: 36104 - RNA, 18 nt, Homo sapiens
gccgggaaagaagagccg

SEQ ID NO: 36105 - RNA, 21 nt, Homo sapiens
gccgggaaagaagagccggag

SEQ ID NO: 36106 - RNA, 22 nt, Homo sapiens
gccgggaaagaagagccggagc

SEQ ID NO: 36107 - RNA, 13 nt, Homo sapiens
gccgcgcuccucg

SEQ ID NO: 36108 - RNA, 21 nt, Homo sapiens
gccgcgcuccucggacggcuc

SEQ ID NO: 36109 - RNA, 22 nt, Homo sapiens
gccgcgcuccucggacggcucc

SEQ ID NO: 36110 - RNA, 11 nt, Homo sapiens
gccgcgcugcg

SEQ ID NO: 36111 - RNA, 14 nt, Homo sapiens
gccgcgcugcgcgc

SEQ ID NO: 36112 - RNA, 15 nt, Homo sapiens
gccgcgcugcgcgcc

SEQ ID NO: 36113 - RNA, 16 nt, Homo sapiens
gccgcgcugcgcgccg

SEQ ID NO: 36114 - RNA, 18 nt, Homo sapiens
gccgcgcugcgcgccgcg

SEQ ID NO: 36115 - RNA, 15 nt, Homo sapiens
gccugagaccaaggc

SEQ ID NO: 36116 - RNA, 16 nt, Homo sapiens
gccugagaccaaggcc

SEQ ID NO: 36117 - RNA, 12 nt, Homo sapiens
gccuccgcuacu

SEQ ID NO: 36118 - RNA, 20 nt, Homo sapiens
gccuccgcuacuuccagggc

SEQ ID NO: 36119 - RNA, 12 nt, Homo sapiens
gccugcucgccc

SEQ ID NO: 36120 - RNA, 14 nt, Homo sapiens
gccugcucgcccac

SEQ ID NO: 36121 - RNA, 21 nt, Homo sapiens
gccugcucgcccacuuccucc

SEQ ID NO: 36122 - RNA, 22 nt, Homo sapiens
gccugcucgcccacuuccuccc

SEQ ID NO: 36123 - RNA, 13 nt, Homo sapiens
gccuccagcugcc

SEQ ID NO: 36124 - RNA, 17 nt, Homo sapiens
gccuccagcugccccgg

SEQ ID NO: 36125 - RNA, 18 nt, Homo sapiens
gccuccagcugccccggg

SEQ ID NO: 36126 - RNA, 14 nt, Homo sapiens
gccgugggccugag

SEQ ID NO: 36127 - RNA, 23 nt, Homo sapiens
gccgugggccugagaccaaggcc

SEQ ID NO: 36128 - RNA, 18 nt, Homo sapiens
gcgcgcccucuggcugcu

SEQ ID NO: 36129 - RNA, 19 nt, Homo sapiens
gcgcgcccucuggcugcug

SEQ ID NO: 36130 - RNA, 20 nt, Homo sapiens
gcgcgcccucuggcugcugg

SEQ ID NO: 36131 - RNA, 14 nt, Homo sapiens
gcgcgccgcgcucc

SEQ ID NO: 36132 - RNA, 15 nt, Homo sapiens
gcgcgccgcgcuccu

SEQ ID NO: 36133 - RNA, 16 nt, Homo sapiens
gcgcgccgcgcuccuc

SEQ ID NO: 36134 - RNA, 18 nt, Homo sapiens
gcgcgccgcgcuccucgg

SEQ ID NO: 36135 - RNA, 11 nt, Homo sapiens
gcgcgccuccg

SEQ ID NO: 36136 - RNA, 12 nt, Homo sapiens
gcgcgccuccgc

SEQ ID NO: 36137 - RNA, 14 nt, Homo sapiens
gcgcgccuccgcua

SEQ ID NO: 36138 - RNA, 17 nt, Homo sapiens
gcgcgccuccgcuacuu

SEQ ID NO: 36139 - RNA, 14 nt, Homo sapiens
gcgagccccaggcg

SEQ ID NO: 36140 - RNA, 15 nt, Homo sapiens
gcgagccccaggcgg

SEQ ID NO: 36141 - RNA, 16 nt, Homo sapiens
gcgagccccaggcggg

SEQ ID NO: 36142 - RNA, 11 nt, Homo sapiens
gcgagcgcgcg

SEQ ID NO: 36143 - RNA, 12 nt, Homo sapiens
gcgagcgcgcgc

SEQ ID NO: 36144 - RNA, 13 nt, Homo sapiens
gcgagcgcgcgcg

SEQ ID NO: 36145 - RNA, 14 nt, Homo sapiens
gcgagcgcgcgcgc

SEQ ID NO: 36146 - RNA, 16 nt, Homo sapiens
gcgagcgcgcgcgccc

SEQ ID NO: 36147 - RNA, 19 nt, Homo sapiens
gcgagcgcgcgcgcccucu

SEQ ID NO: 36148 - RNA, 16 nt, Homo sapiens
gcgaguacuucccgcu

SEQ ID NO: 36149 - RNA, 18 nt, Homo sapiens
gcgaguacuucccgcugu

SEQ ID NO: 36150 - RNA, 22 nt, Homo sapiens
gcgaguacuucccgcuguuccu

SEQ ID NO: 36151 - RNA, 13 nt, Homo sapiens
gcgcagcucaggc

SEQ ID NO: 36152 - RNA, 16 nt, Homo sapiens
gcgcagcucaggcugg

SEQ ID NO: 36153 - RNA, 14 nt, Homo sapiens
gcgcccucuggcug

SEQ ID NO: 36154 - RNA, 17 nt, Homo sapiens
gcgcccucuggcugcug

SEQ ID NO: 36155 - RNA, 23 nt, Homo sapiens
gcgcccucuggcugcugguggcg

SEQ ID NO: 36156 - RNA, 12 nt, Homo sapiens
gcgccgcgcucc

SEQ ID NO: 36157 - RNA, 13 nt, Homo sapiens
gcgccgcgcuccu

SEQ ID NO: 36158 - RNA, 20 nt, Homo sapiens
gcgccgcgcuccucggacgg

SEQ ID NO: 36159 - RNA, 23 nt, Homo sapiens
gcgccgcgcuccucggacggcuc

SEQ ID NO: 36160 - RNA, 17 nt, Homo sapiens
gcgccuccgcuacuucc

SEQ ID NO: 36161 - RNA, 14 nt, Homo sapiens
gcaguucugaagaa

SEQ ID NO: 36162 - RNA, 18 nt, Homo sapiens
gcaguucugaagaagaug

SEQ ID NO: 36163 - RNA, 17 nt, Homo sapiens
gccacgcucugggucgc

SEQ ID NO: 36164 - RNA, 18 nt, Homo sapiens
gccacgcucugggucgcc

SEQ ID NO: 36165 - RNA, 19 nt, Homo sapiens
gccacgcucugggucgccg

SEQ ID NO: 36166 - RNA, 20 nt, Homo sapiens
gccacgcucugggucgccgg

SEQ ID NO: 36167 - RNA, 21 nt, Homo sapiens
gccacgcucugggucgccggc

SEQ ID NO: 36168 - RNA, 15 nt, Homo sapiens
gcagcgaguacuucc

SEQ ID NO: 36169 - RNA, 20 nt, Homo sapiens
gcagcgaguacuucccgcug

SEQ ID NO: 36170 - RNA, 13 nt, Homo sapiens
gcagcucaggcug

SEQ ID NO: 36171 - RNA, 14 nt, Homo sapiens
gcagcucaggcugg

SEQ ID NO: 36172 - RNA, 15 nt, Homo sapiens
gcagcucaggcuggc

SEQ ID NO: 36173 - RNA, 16 nt, Homo sapiens
gcagcucaggcuggca

SEQ ID NO: 36174 - RNA, 17 nt, Homo sapiens
gcagcucaggcuggcac

SEQ ID NO: 36175 - RNA, 16 nt, Homo sapiens
gcaggaccaucccggc

SEQ ID NO: 36176 - RNA, 17 nt, Homo sapiens
gcaggaccaucccggcc

SEQ ID NO: 36177 - RNA, 20 nt, Homo sapiens
gcaggaccaucccggccggc

SEQ ID NO: 36178 - RNA, 21 nt, Homo sapiens
gcaggaccaucccggccggcg

SEQ ID NO: 36179 - RNA, 23 nt, Homo sapiens
gcaggaccaucccggccggcgcg

SEQ ID NO: 36180 - RNA, 18 nt, Homo sapiens
gcagggugaacugcagcg

SEQ ID NO: 36181 - RNA, 20 nt, Homo sapiens
gcaccgcuguacgcgagcgc

SEQ ID NO: 36182 - RNA, 23 nt, Homo sapiens
gcaccgcuguacgcgagcgcgcg

SEQ ID NO: 36183 - RNA, 17 nt, Homo sapiens
gaugcaguucugaagaa

SEQ ID NO: 36184 - RNA, 20 nt, Homo sapiens
gcaaaauuuuuucucuagga

SEQ ID NO: 36185 - RNA, 21 nt, Homo sapiens
agcacagccucuuagaugcag

SEQ ID NO: 36186 - RNA, 15 nt, Homo sapiens
agcaccaaucaugaa

SEQ ID NO: 36187 - RNA, 11 nt, Homo sapiens
agccggagccu

SEQ ID NO: 36188 - RNA, 15 nt, Homo sapiens
agccggagccuccag

SEQ ID NO: 36189 - RNA, 17 nt, Homo sapiens
agccgggaaagaagagc

SEQ ID NO: 36190 - RNA, 18 nt, Homo sapiens
agccgggaaagaagagcc

SEQ ID NO: 36191 - RNA, 19 nt, Homo sapiens
agccgggaaagaagagccg

SEQ ID NO: 36192 - RNA, 20 nt, Homo sapiens
agccgggaaagaagagccgg

SEQ ID NO: 36193 - RNA, 22 nt, Homo sapiens
agccgggaaagaagagccggag

SEQ ID NO: 36194 - RNA, 15 nt, Homo sapiens
agccuccagcugccc

SEQ ID NO: 36195 - RNA, 20 nt, Homo sapiens
agccccaggcggguccgggu

SEQ ID NO: 36196 - RNA, 23 nt, Homo sapiens
agccccaggcggguccgggucgc

SEQ ID NO: 36197 - RNA, 11 nt, Homo sapiens
agagccggagc

SEQ ID NO: 36198 - RNA, 19 nt, Homo sapiens
agagccggagccuccagcu

SEQ ID NO: 36199 - RNA, 23 nt, Homo sapiens
agagccggagccuccagcugccc

SEQ ID NO: 36200 - RNA, 15 nt, Homo sapiens
agauccuggaaauca

SEQ ID NO: 36201 - RNA, 14 nt, Homo sapiens
aggaccaucccggc

SEQ ID NO: 36202 - RNA, 15 nt, Homo sapiens
aggaccaucccggcc

SEQ ID NO: 36203 - RNA, 22 nt, Homo sapiens
aggaccaucccggccggcgcgc

SEQ ID NO: 36204 - RNA, 12 nt, Homo sapiens
aggaugguuccc

SEQ ID NO: 36205 - RNA, 12 nt, Homo sapiens
aggcggguccgg

SEQ ID NO: 36206 - RNA, 14 nt, Homo sapiens
aggcggguccgggu

SEQ ID NO: 36207 - RNA, 18 nt, Homo sapiens
aggcggguccgggucgca

SEQ ID NO: 36208 - RNA, 21 nt, Homo sapiens
aggcggguccgggucgcagga

SEQ ID NO: 36209 - RNA, 14 nt, Homo sapiens
aggcccccgggccg

SEQ ID NO: 36210 - RNA, 16 nt, Homo sapiens
aggcccccgggccgac

SEQ ID NO: 36211 - RNA, 18 nt, Homo sapiens
aggcccccgggccgacgg

SEQ ID NO: 36212 - RNA, 23 nt, Homo sapiens
aggcccccgggccgacggagccg

SEQ ID NO: 36213 - RNA, 18 nt, Homo sapiens
agcgaguacuucccgcug

SEQ ID NO: 36214 - RNA, 12 nt, Homo sapiens
agcgcgcgcgcc

SEQ ID NO: 36215 - RNA, 14 nt, Homo sapiens
agcgcgcgcgcccu

SEQ ID NO: 36216 - RNA, 24 nt, Homo sapiens
agccuuggggcugaugcaguuguu

SEQ ID NO: 36217 - RNA, 16 nt, Homo sapiens
agcgagccccaggcgg

SEQ ID NO: 36218 - RNA, 17 nt, Homo sapiens
agcgagccccaggcggg

SEQ ID NO: 36219 - RNA, 16 nt, Homo sapiens
agcugccccggggagg

SEQ ID NO: 36220 - RNA, 19 nt, Homo sapiens
agcugccccggggaggggc

SEQ ID NO: 36221 - RNA, 22 nt, Homo sapiens
agcugccccggggaggggcgcu

SEQ ID NO: 36222 - RNA, 11 nt, Homo sapiens
agcucaggcug

SEQ ID NO: 36223 - RNA, 14 nt, Homo sapiens
agcucaggcuggca

SEQ ID NO: 36224 - RNA, 15 nt, Homo sapiens
agcucaggcuggcac

SEQ ID NO: 36225 - RNA, 13 nt, Homo sapiens
agcucguggaaca

SEQ ID NO: 36226 - RNA, 14 nt, Homo sapiens
agcuguaugauucc

SEQ ID NO: 36227 - RNA, 21 nt, Homo sapiens
accgcagggugaacugcagcg

SEQ ID NO: 36228 - RNA, 13 nt, Homo sapiens
accgcuguacgcg

SEQ ID NO: 36229 - RNA, 16 nt, Homo sapiens
accgcuguacgcgagc

SEQ ID NO: 36230 - RNA, 18 nt, Homo sapiens
accgcuguacgcgagcgc

SEQ ID NO: 36231 - RNA, 21 nt, Homo sapiens
accgcuguacgcgagcgcgcg

SEQ ID NO: 36232 - RNA, 15 nt, Homo sapiens
accuguucgcgcgcc

SEQ ID NO: 36233 - RNA, 16 nt, Homo sapiens
accuguucgcgcgccu

SEQ ID NO: 36234 - RNA, 17 nt, Homo sapiens
accuguucgcgcgccuc

SEQ ID NO: 36235 - RNA, 18 nt, Homo sapiens
accuguucgcgcgccucc

SEQ ID NO: 36236 - RNA, 20 nt, Homo sapiens
accuguucgcgcgccuccgc

SEQ ID NO: 36237 - RNA, 21 nt, Homo sapiens
acggcuccggacgcugcugcc

SEQ ID NO: 36238 - RNA, 22 nt, Homo sapiens
acggcuccggacgcugcugccg

SEQ ID NO: 36239 - RNA, 18 nt, Homo sapiens
acgcgagcgcgcgcgccc

SEQ ID NO: 36240 - RNA, 20 nt, Homo sapiens
acgcgagcgcgcgcgcccuc

SEQ ID NO: 36241 - RNA, 12 nt, Homo sapiens
acgcgcgcuccg

SEQ ID NO: 36242 - RNA, 13 nt, Homo sapiens
acgcgcgcuccgc

SEQ ID NO: 36243 - RNA, 19 nt, Homo sapiens
acgcgcgcuccgcgcagcu

SEQ ID NO: 36244 - RNA, 18 nt, Homo sapiens
acgcucugggucgccggc

SEQ ID NO: 36245 - RNA, 12 nt, Homo sapiens
acgcugcugccg

SEQ ID NO: 36246 - RNA, 12 nt, Homo sapiens
acggagccggga

SEQ ID NO: 36247 - RNA, 11 nt, Homo sapiens
acggcuccgga

SEQ ID NO: 36248 - RNA, 13 nt, Homo sapiens
agaagagccggag

SEQ ID NO: 36249 - RNA, 16 nt, Homo sapiens
agaagagccggagccu

SEQ ID NO: 36250 - RNA, 23 nt, Homo sapiens
agaagagccggagccuccagcug

SEQ ID NO: 36251 - RNA, 22 nt, Homo sapiens
acuuccagggcuacgcgcgcuc

SEQ ID NO: 36252 - RNA, 23 nt, Homo sapiens
acuuccagggcuacgcgcgcucc

SEQ ID NO: 36253 - RNA, 18 nt, Homo sapiens
acuucccgcuguuccucg

SEQ ID NO: 36254 - RNA, 22 nt, Homo sapiens
acuuccucccggccgcgcugcg

SEQ ID NO: 36255 - RNA, 21 nt, Homo sapiens
acugcagcgaguacuucccgc

SEQ ID NO: 36256 - RNA, 15 nt, Homo sapiens
acugacucuuaagaa

SEQ ID NO: 36257 - RNA, 17 nt, Homo sapiens
aaguucuagugaccgag

SEQ ID NO: 36258 - RNA, 18 nt, Homo sapiens
accaaggcccccgggccg

SEQ ID NO: 36259 - RNA, 21 nt, Homo sapiens
accaaggcccccgggccgacg

SEQ ID NO: 36260 - RNA, 23 nt, Homo sapiens
accaaggcccccgggccgacgga

SEQ ID NO: 36261 - RNA, 22 nt, Homo sapiens
accagucugacuguuuccauca

SEQ ID NO: 36262 - RNA, 16 nt, Homo sapiens
accaucccggccggcg

SEQ ID NO: 36263 - RNA, 17 nt, Homo sapiens
accaucccggccggcgc

SEQ ID NO: 36264 - RNA, 19 nt, Homo sapiens
accaucccggccggcgcgc

SEQ ID NO: 36265 - RNA, 20 nt, Homo sapiens
accaucccggccggcgcgcu

SEQ ID NO: 36266 - RNA, 15 nt, Homo sapiens
acaucuagugagcag

SEQ ID NO: 36267 - RNA, 10 nt, Homo sapiens
acaugggaca

SEQ ID NO: 36268 - RNA, 23 nt, Homo sapiens
acaggaugguucccuugaugaag

SEQ ID NO: 36269 - RNA, 14 nt, Homo sapiens
acaauacaucccuu

SEQ ID NO: 36270 - RNA, 21 nt, Homo sapiens
aaggggcggcggcccugugcg

SEQ ID NO: 36271 - RNA, 16 nt, Homo sapiens
aaguucuagugaccga

SEQ ID NO: 36272 - RNA, 20 nt, Homo sapiens
aaggcccccgggccgacgga

SEQ ID NO: 36273 - RNA, 15 nt, Homo sapiens
aacugcagcgaguac

SEQ ID NO: 36274 - RNA, 23 nt, Homo sapiens
aacugcagcgaguacuucccgcu

SEQ ID NO: 36275 - RNA, 11 nt, Homo sapiens
aagagccggag

SEQ ID NO: 36276 - RNA, 12 nt, Homo sapiens
aagagccggagc

SEQ ID NO: 36277 - RNA, 13 nt, Homo sapiens
aagagccggagcc

SEQ ID NO: 36278 - RNA, 15 nt, Homo sapiens
aagagaacuuccaga

SEQ ID NO: 36279 - RNA, 15 nt, Homo sapiens
aagaagagccggagc

SEQ ID NO: 36280 - RNA, 16 nt, Homo sapiens
aacuaucucauuucca

SEQ ID NO: 36281 - RNA, 20 nt, Homo sapiens
aacuaucucauuuccaagca

SEQ ID NO: 36282 - RNA, 20 nt, Homo sapiens
aagagccggagccuccagcu

SEQ ID NO: 36283 - RNA, 21 nt, Homo sapiens
aagagccggagccuccagcug

SEQ ID NO: 36284 - RNA, 23 nt, Homo sapiens
aagagccggagccuccagcugcc

SEQ ID NO: 36285 - RNA, 14 nt, Homo sapiens
aaggggcggcggcc

SEQ ID NO: 36286 - RNA, 15 nt, Homo sapiens
aaggggcggcggccc

SEQ ID NO: 36287 - RNA, 22 nt, Homo sapiens
aaggggcggcggcccugugcgg

SEQ ID NO: 36288 - RNA, 10 nt, Homo sapiens
aaggcccccg

SEQ ID NO: 36289 - RNA, 18 nt, Homo sapiens
aaggcccccgggccgacg

SEQ ID NO: 36290 - RNA, 19 nt, Homo sapiens
aaggcccccgggccgacgg

SEQ ID NO: 36291 - RNA, 23 nt, Homo sapiens
aaggcccccgggccgacggagcc

SEQ ID NO: 36292 - RNA, 24 nt, Homo sapiens
aaggcccccgggccgacggagccg

SEQ ID NO: 36293 - RNA, 17 nt, Homo sapiens
aucccacccgcccaccg

SEQ ID NO: 36294 - RNA, 15 nt, Homo sapiens
aucccggccggcgcg

SEQ ID NO: 36295 - RNA, 16 nt, Homo sapiens
aucccggccggcgcgc

SEQ ID NO: 36296 - RNA, 17 nt, Homo sapiens
aucccggccggcgcgcu

SEQ ID NO: 36297 - RNA, 18 nt, Homo sapiens
aucccggccggcgcgcuc

SEQ ID NO: 36298 - RNA, 19 nt, Homo sapiens
aucccggccggcgcgcuca

SEQ ID NO: 36299 - RNA, 21 nt, Homo sapiens
augaagaaguugauaugccuu

SEQ ID NO: 36300 - RNA, 16 nt, Homo sapiens
augaaggggcggcggc

SEQ ID NO: 36301 - RNA, 17 nt, Homo sapiens
auggcuuccuggcaaua

SEQ ID NO: 36302 - RNA, 15 nt, Homo sapiens
aguucuagugaccga

SEQ ID NO: 36303 - RNA, 21 nt, Homo sapiens
aguucugaagaagaugguacc

SEQ ID NO: 36304 - RNA, 14 nt, Homo sapiens
aguacuucccgcug

SEQ ID NO: 36305 - RNA, 19 nt, Homo sapiens
agugacaagcucacagacc

SEQ ID NO: 36306 - RNA, 20 nt, Homo sapiens
agugacaagcucacagaccu

SEQ ID NO: 36307 - RNA, 15 nt, Homo sapiens
aggguacacugccuu

SEQ ID NO: 36308 - RNA, 16 nt, Homo sapiens
aggggcgcucgcuucc

SEQ ID NO: 36309 - RNA, 11 nt, Homo sapiens
aggggcggcgg

SEQ ID NO: 36310 - RNA, 12 nt, Homo sapiens
aggggcggcggc

SEQ ID NO: 36311 - RNA, 13 nt, Homo sapiens
aggggcggcggcc

SEQ ID NO: 36312 - RNA, 15 nt, Homo sapiens
aggggcggcggcccu

SEQ ID NO: 36313 - RNA, 21 nt, Homo sapiens
aggggcggcggcccugugcgg

SEQ ID NO: 36314 - RNA, 9 nt, Homo sapiens
agggcgcgg

SEQ ID NO: 36315 - RNA, 12 nt, Homo sapiens
agggcgcggggc

SEQ ID NO: 36316 - RNA, 14 nt, Homo sapiens
agggcgcggggcgg

SEQ ID NO: 36317 - RNA, 14 nt, Homo sapiens
agggcuacgcgcgc

SEQ ID NO: 36318 - RNA, 18 nt, Homo sapiens
agggcuacgcgcgcuccg

SEQ ID NO: 36319 - RNA, 19 nt, Homo sapiens
cagcucuaaaugucaauca

SEQ ID NO: 36320 - RNA, 14 nt, Homo sapiens
cagcucaggcuggc

SEQ ID NO: 36321 - RNA, 16 nt, Homo sapiens
cagcucaggcuggcac

SEQ ID NO: 36322 - RNA, 20 nt, Homo sapiens
cagcucaggcuggcaccgcu

SEQ ID NO: 36323 - RNA, 12 nt, Homo sapiens
cagcugccccgg

SEQ ID NO: 36324 - RNA, 22 nt, Homo sapiens
cagcugccccggggaggggcgc

SEQ ID NO: 36325 - RNA, 15 nt, Homo sapiens
cagccuaguugauca

SEQ ID NO: 36326 - RNA, 19 nt, Homo sapiens
cagccucuuagaugcaguu

SEQ ID NO: 36327 - RNA, 16 nt, Homo sapiens
cacuuccucccggccg

SEQ ID NO: 36328 - RNA, 17 nt, Homo sapiens
cacuuccucccggccgc

SEQ ID NO: 36329 - RNA, 22 nt, Homo sapiens
cacuuccucccggccgcgcugc

SEQ ID NO: 36330 - RNA, 13 nt, Homo sapiens
cacuugucaauaa

SEQ ID NO: 36331 - RNA, 19 nt, Homo sapiens
cacuuguguuuugcaagcc

SEQ ID NO: 36332 - RNA, 20 nt, Homo sapiens
cacuuguguuuugcaagcca

SEQ ID NO: 36333 - RNA, 17 nt, Homo sapiens
caccgcagggugaacug

SEQ ID NO: 36334 - RNA, 14 nt, Homo sapiens
caccgcuguacgcg

SEQ ID NO: 36335 - RNA, 18 nt, Homo sapiens
caccgcuguacgcgagcg

SEQ ID NO: 36336 - RNA, 19 nt, Homo sapiens
caccgcuguacgcgagcgc

SEQ ID NO: 36337 - RNA, 21 nt, Homo sapiens
caccgcuguacgcgagcgcgc

SEQ ID NO: 36338 - RNA, 22 nt, Homo sapiens
caccgcuguacgcgagcgcgcg

SEQ ID NO: 36339 - RNA, 16 nt, Homo sapiens
caccuuuuggucugga

SEQ ID NO: 36340 - RNA, 15 nt, Homo sapiens
cacgcucugggucgc

SEQ ID NO: 36341 - RNA, 17 nt, Homo sapiens
cacgcucugggucgccg

SEQ ID NO: 36342 - RNA, 22 nt, Homo sapiens
cacgcucugggucgccggcauc

SEQ ID NO: 36343 - RNA, 14 nt, Homo sapiens
cacacugaagaagc

SEQ ID NO: 36344 - RNA, 16 nt, Homo sapiens
caaugcuguauuuuaa

SEQ ID NO: 36345 - RNA, 11 nt, Homo sapiens
cacaggacagc

SEQ ID NO: 36346 - RNA, 12 nt, Homo sapiens
cacaggacagcc

SEQ ID NO: 36347 - RNA, 23 nt, Homo sapiens
caacuaucucauuuccaagcaag

SEQ ID NO: 36348 - RNA, 11 nt, Homo sapiens
caagccagauu

SEQ ID NO: 36349 - RNA, 12 nt, Homo sapiens
caagccagauuu

SEQ ID NO: 36350 - RNA, 14 nt, Homo sapiens
caaggcccccgggc

SEQ ID NO: 36351 - RNA, 18 nt, Homo sapiens
caaggcccccgggccgac

SEQ ID NO: 36352 - RNA, 19 nt, Homo sapiens
caaggcccccgggccgacg

SEQ ID NO: 36353 - RNA, 20 nt, Homo sapiens
caaggcccccgggccgacgg

SEQ ID NO: 36354 - RNA, 21 nt, Homo sapiens
caaggcccccgggccgacgga

SEQ ID NO: 36355 - RNA, 22 nt, Homo sapiens
caaggcccccgggccgacggag

SEQ ID NO: 36356 - RNA, 23 nt, Homo sapiens
caaggcccccgggccgacggagc

SEQ ID NO: 36357 - RNA, 22 nt, Homo sapiens
caaggguacacugccuucucaa

SEQ ID NO: 36358 - RNA, 14 nt, Homo sapiens
auuucuaugaaaua

SEQ ID NO: 36359 - RNA, 15 nt, Homo sapiens
auuugcucauggaau

SEQ ID NO: 36360 - RNA, 21 nt, Homo sapiens
auuaaguuuuuuuuuaaaaaa

SEQ ID NO: 36361 - RNA, 20 nt, Homo sapiens
cauggaauuggagcucgugg

SEQ ID NO: 36362 - RNA, 17 nt, Homo sapiens
caugaaguccaagcauu

SEQ ID NO: 36363 - RNA, 16 nt, Homo sapiens
cauggaauuggagcuc

SEQ ID NO: 36364 - RNA, 14 nt, Homo sapiens
caugaaggggcggc

SEQ ID NO: 36365 - RNA, 15 nt, Homo sapiens
caugaaggggcggcg

SEQ ID NO: 36366 - RNA, 16 nt, Homo sapiens
caugaaggggcggcgg

SEQ ID NO: 36367 - RNA, 17 nt, Homo sapiens
caugaaggggcggcggc

SEQ ID NO: 36368 - RNA, 18 nt, Homo sapiens
caugaaggggcggcggcc

SEQ ID NO: 36369 - RNA, 15 nt, Homo sapiens
caugaaguccaagca

SEQ ID NO: 36370 - RNA, 16 nt, Homo sapiens
caucccacccgcccac

SEQ ID NO: 36371 - RNA, 17 nt, Homo sapiens
caucccacccgcccacc

SEQ ID NO: 36372 - RNA, 13 nt, Homo sapiens
caucccggccggc

SEQ ID NO: 36373 - RNA, 14 nt, Homo sapiens
caucccggccggcg

SEQ ID NO: 36374 - RNA, 15 nt, Homo sapiens
caucccggccggcgc

SEQ ID NO: 36375 - RNA, 16 nt, Homo sapiens
caucccggccggcgcg

SEQ ID NO: 36376 - RNA, 17 nt, Homo sapiens
caucccggccggcgcgc

SEQ ID NO: 36377 - RNA, 18 nt, Homo sapiens
caucccggccggcgcgcu

SEQ ID NO: 36378 - RNA, 20 nt, Homo sapiens
caucccggccggcgcgcuca

SEQ ID NO: 36379 - RNA, 22 nt, Homo sapiens
caucccggccggcgcgcucauc

SEQ ID NO: 36380 - RNA, 19 nt, Homo sapiens
caggcuggcaccgcuguac

SEQ ID NO: 36381 - RNA, 20 nt, Homo sapiens
caggcuggcaccgcuguacg

SEQ ID NO: 36382 - RNA, 13 nt, Homo sapiens
caggcuggcaccg

SEQ ID NO: 36383 - RNA, 15 nt, Homo sapiens
caggcuggcaccgcu

SEQ ID NO: 36384 - RNA, 15 nt, Homo sapiens
caggaccaucccggc

SEQ ID NO: 36385 - RNA, 16 nt, Homo sapiens
caggaccaucccggcc

SEQ ID NO: 36386 - RNA, 17 nt, Homo sapiens
caggaccaucccggccg

SEQ ID NO: 36387 - RNA, 23 nt, Homo sapiens
caggaccaucccggccggcgcgc

SEQ ID NO: 36388 - RNA, 18 nt, Homo sapiens
caggcggguccgggucgc

SEQ ID NO: 36389 - RNA, 16 nt, Homo sapiens
cagucaccucauggaa

SEQ ID NO: 36390 - RNA, 14 nt, Homo sapiens
cagggcuacgcgcg

SEQ ID NO: 36391 - RNA, 17 nt, Homo sapiens
cagggcuacgcgcgcuc

SEQ ID NO: 36392 - RNA, 18 nt, Homo sapiens
cagggcuacgcgcgcucc

SEQ ID NO: 36393 - RNA, 20 nt, Homo sapiens
cagggcuacgcgcgcuccgc

SEQ ID NO: 36394 - RNA, 17 nt, Homo sapiens
cagggugaacugcagcg

SEQ ID NO: 36395 - RNA, 22 nt, Homo sapiens
cagggugaacugcagcgaguac

SEQ ID NO: 36396 - RNA, 21 nt, Homo sapiens
ccaucaaggguacacugccuu

SEQ ID NO: 36397 - RNA, 11 nt, Homo sapiens
ccaucccggcc

SEQ ID NO: 36398 - RNA, 14 nt, Homo sapiens
ccaucccggccggc

SEQ ID NO: 36399 - RNA, 15 nt, Homo sapiens
ccaucccggccggcg

SEQ ID NO: 36400 - RNA, 16 nt, Homo sapiens
ccaucccggccggcgc

SEQ ID NO: 36401 - RNA, 17 nt, Homo sapiens
ccaucccggccggcgcg

SEQ ID NO: 36402 - RNA, 21 nt, Homo sapiens
ccaucccggccggcgcgcuca

SEQ ID NO: 36403 - RNA, 22 nt, Homo sapiens
ccaucccggccggcgcgcucau

SEQ ID NO: 36404 - RNA, 17 nt, Homo sapiens
cccacuuccucccggcc

SEQ ID NO: 36405 - RNA, 19 nt, Homo sapiens
cccacuuccucccggccgc

SEQ ID NO: 36406 - RNA, 20 nt, Homo sapiens
cccacuuccucccggccgcg

SEQ ID NO: 36407 - RNA, 21 nt, Homo sapiens
cccacuuccucccggccgcgc

SEQ ID NO: 36408 - RNA, 17 nt, Homo sapiens
ccagauuuuccugaaaa

SEQ ID NO: 36409 - RNA, 14 nt, Homo sapiens
ccagcugccccggg

SEQ ID NO: 36410 - RNA, 13 nt, Homo sapiens
ccaggcggguccg

SEQ ID NO: 36411 - RNA, 14 nt, Homo sapiens
ccaggcggguccgg

SEQ ID NO: 36412 - RNA, 15 nt, Homo sapiens
ccaggcggguccggg

SEQ ID NO: 36413 - RNA, 19 nt, Homo sapiens
ccaggcggguccgggucgc

SEQ ID NO: 36414 - RNA, 21 nt, Homo sapiens
ccaggcggguccgggucgcag

SEQ ID NO: 36415 - RNA, 22 nt, Homo sapiens
ccaggcggguccgggucgcagg

SEQ ID NO: 36416 - RNA, 17 nt, Homo sapiens
ccagguagagggugugu

SEQ ID NO: 36417 - RNA, 20 nt, Homo sapiens
ccagucugacuguuuccauc

SEQ ID NO: 36418 - RNA, 12 nt, Homo sapiens
ccagggcuacgc

SEQ ID NO: 36419 - RNA, 13 nt, Homo sapiens
ccagggcuacgcg

SEQ ID NO: 36420 - RNA, 14 nt, Homo sapiens
ccagggcuacgcgc

SEQ ID NO: 36421 - RNA, 15 nt, Homo sapiens
ccagggcuacgcgcg

SEQ ID NO: 36422 - RNA, 16 nt, Homo sapiens
ccagggcuacgcgcgc

SEQ ID NO: 36423 - RNA, 17 nt, Homo sapiens
ccagggcuacgcgcgcu

SEQ ID NO: 36424 - RNA, 17 nt, Homo sapiens
ccaaggcccccgggccg

SEQ ID NO: 36425 - RNA, 18 nt, Homo sapiens
ccaaggcccccgggccga

SEQ ID NO: 36426 - RNA, 20 nt, Homo sapiens
ccaaggcccccgggccgacg

SEQ ID NO: 36427 - RNA, 21 nt, Homo sapiens
ccaaggcccccgggccgacgg

SEQ ID NO: 36428 - RNA, 22 nt, Homo sapiens
ccacagcuguaugauucccagc

SEQ ID NO: 36429 - RNA, 20 nt, Homo sapiens
ccaccagucugacuguuucc

SEQ ID NO: 36430 - RNA, 21 nt, Homo sapiens
ccaccagucugacuguuucca

SEQ ID NO: 36431 - RNA, 13 nt, Homo sapiens
ccacccgcccacc

SEQ ID NO: 36432 - RNA, 14 nt, Homo sapiens
ccacccgcccaccg

SEQ ID NO: 36433 - RNA, 23 nt, Homo sapiens
ccaccgcagggugaacugcagcg

SEQ ID NO: 36434 - RNA, 14 nt, Homo sapiens
ccacgcucuggguc

SEQ ID NO: 36435 - RNA, 16 nt, Homo sapiens
ccacgcucugggucgc

SEQ ID NO: 36436 - RNA, 17 nt, Homo sapiens
ccacgcucugggucgcc

SEQ ID NO: 36437 - RNA, 21 nt, Homo sapiens
ccacgcucugggucgccggca

SEQ ID NO: 36438 - RNA, 23 nt, Homo sapiens
ccacgcucugggucgccggcauc

SEQ ID NO: 36439 - RNA, 20 nt, Homo sapiens
ccacuuccucccggccgcgc

SEQ ID NO: 36440 - RNA, 21 nt, Homo sapiens
ccacuuccucccggccgcgcu

SEQ ID NO: 36441 - RNA, 22 nt, Homo sapiens
ccacuuccucccggccgcgcug

SEQ ID NO: 36442 - RNA, 12 nt, Homo sapiens
cccccgggccga

SEQ ID NO: 36443 - RNA, 13 nt, Homo sapiens
cccccgggccgac

SEQ ID NO: 36444 - RNA, 18 nt, Homo sapiens
cccccgggccgacggagc

SEQ ID NO: 36445 - RNA, 19 nt, Homo sapiens
cccccgggccgacggagcc

SEQ ID NO: 36446 - RNA, 21 nt, Homo sapiens
cccccgggccgacggagccgg

SEQ ID NO: 36447 - RNA, 23 nt, Homo sapiens
cccccgggccgacggagccggga

SEQ ID NO: 36448 - RNA, 13 nt, Homo sapiens
cccaggcgggucc

SEQ ID NO: 36449 - RNA, 19 nt, Homo sapiens
cccaggcggguccgggucg

SEQ ID NO: 36450 - RNA, 20 nt, Homo sapiens
cccaggcggguccgggucgc

SEQ ID NO: 36451 - RNA, 12 nt, Homo sapiens
cccgcccaccgc

SEQ ID NO: 36452 - RNA, 16 nt, Homo sapiens
cccgcuguuccucgcc

SEQ ID NO: 36453 - RNA, 18 nt, Homo sapiens
cccgcuguuccucgccac

SEQ ID NO: 36454 - RNA, 19 nt, Homo sapiens
cccgcuguuccucgccacg

SEQ ID NO: 36455 - RNA, 20 nt, Homo sapiens
cccgcuguuccucgccacgc

SEQ ID NO: 36456 - RNA, 21 nt, Homo sapiens
cccgcuguuccucgccacgcu

SEQ ID NO: 36457 - RNA, 11 nt, Homo sapiens
cccggccgcgc

SEQ ID NO: 36458 - RNA, 12 nt, Homo sapiens
cccggccgcgcu

SEQ ID NO: 36459 - RNA, 13 nt, Homo sapiens
cccggccgcgcug

SEQ ID NO: 36460 - RNA, 14 nt, Homo sapiens
cccggccgcgcugc

SEQ ID NO: 36461 - RNA, 15 nt, Homo sapiens
cccggccgcgcugcg

SEQ ID NO: 36462 - RNA, 16 nt, Homo sapiens
cccggccgcgcugcgc

SEQ ID NO: 36463 - RNA, 18 nt, Homo sapiens
cccggccgcgcugcgcgc

SEQ ID NO: 36464 - RNA, 20 nt, Homo sapiens
cccggccgcgcugcgcgccg

SEQ ID NO: 36465 - RNA, 21 nt, Homo sapiens
cccggccgcgcugcgcgccgc

SEQ ID NO: 36466 - RNA, 14 nt, Homo sapiens
cccggccggcgcgc

SEQ ID NO: 36467 - RNA, 17 nt, Homo sapiens
cccggccggcgcgcuca

SEQ ID NO: 36468 - RNA, 19 nt, Homo sapiens
cccggccggcgcgcucauc

SEQ ID NO: 36469 - RNA, 13 nt, Homo sapiens
cccucuggcugcu

SEQ ID NO: 36470 - RNA, 15 nt, Homo sapiens
cccucuggcugcugg

SEQ ID NO: 36471 - RNA, 17 nt, Homo sapiens
cccucuggcugcuggug

SEQ ID NO: 36472 - RNA, 11 nt, Homo sapiens
ccccgggccga

SEQ ID NO: 36473 - RNA, 14 nt, Homo sapiens
ccccgggccgacgg

SEQ ID NO: 36474 - RNA, 18 nt, Homo sapiens
ccccgggccgacggagcc

SEQ ID NO: 36475 - RNA, 18 nt, Homo sapiens
ccccggggaggggcgcuc

SEQ ID NO: 36476 - RNA, 19 nt, Homo sapiens
ccccggggaggggcgcucg

SEQ ID NO: 36477 - RNA, 21 nt, Homo sapiens
ccccggggaggggcgcucgcu

SEQ ID NO: 36478 - RNA, 16 nt, Homo sapiens
cccgggccgacggagc

SEQ ID NO: 36479 - RNA, 17 nt, Homo sapiens
cccgggccgacggagcc

SEQ ID NO: 36480 - RNA, 19 nt, Homo sapiens
cccgggccgacggagccgg

SEQ ID NO: 36481 - RNA, 15 nt, Homo sapiens
cccggggaggggcgc

SEQ ID NO: 36482 - RNA, 15 nt, Homo sapiens
ccggagccuccagcu

SEQ ID NO: 36483 - RNA, 16 nt, Homo sapiens
ccggagccuccagcug

SEQ ID NO: 36484 - RNA, 18 nt, Homo sapiens
ccggagccuccagcugcc

SEQ ID NO: 36485 - RNA, 12 nt, Homo sapiens
ccggccgcgcug

SEQ ID NO: 36486 - RNA, 14 nt, Homo sapiens
ccggccgcgcugcg

SEQ ID NO: 36487 - RNA, 15 nt, Homo sapiens
ccggccgcgcugcgc

SEQ ID NO: 36488 - RNA, 16 nt, Homo sapiens
ccggccgcgcugcgcg

SEQ ID NO: 36489 - RNA, 20 nt, Homo sapiens
ccggccgcgcugcgcgccgc

SEQ ID NO: 36490 - RNA, 21 nt, Homo sapiens
ccggccgcgcugcgcgccgcg

SEQ ID NO: 36491 - RNA, 22 nt, Homo sapiens
ccggccgcgcugcgcgccgcgc

SEQ ID NO: 36492 - RNA, 13 nt, Homo sapiens
ccggccggcgcgc

SEQ ID NO: 36493 - RNA, 15 nt, Homo sapiens
ccggccggcgcgcuc

SEQ ID NO: 36494 - RNA, 16 nt, Homo sapiens
ccggccggcgcgcuca

SEQ ID NO: 36495 - RNA, 11 nt, Homo sapiens
ccggcgcgcuc

SEQ ID NO: 36496 - RNA, 12 nt, Homo sapiens
ccggcgcgcuca

SEQ ID NO: 36497 - RNA, 11 nt, Homo sapiens
ccgggccgacg

SEQ ID NO: 36498 - RNA, 13 nt, Homo sapiens
ccgggccgacgga

SEQ ID NO: 36499 - RNA, 15 nt, Homo sapiens
ccgggccgacggagc

SEQ ID NO: 36500 - RNA, 19 nt, Homo sapiens
ccggcgcgcucaucccacc

SEQ ID NO: 36501 - RNA, 20 nt, Homo sapiens
ccggcgcgcucaucccaccc

SEQ ID NO: 36502 - RNA, 22 nt, Homo sapiens
ccggcgcgcucaucccacccgc

SEQ ID NO: 36503 - RNA, 16 nt, Homo sapiens
ccgggaaagaagagcc

SEQ ID NO: 36504 - RNA, 19 nt, Homo sapiens
ccgggaaagaagagccgga

SEQ ID NO: 36505 - RNA, 22 nt, Homo sapiens
ccgggaaagaagagccggagcc

SEQ ID NO: 36506 - RNA, 12 nt, Homo sapiens
cccugugcggcc

SEQ ID NO: 36507 - RNA, 14 nt, Homo sapiens
cccugugcggccug

SEQ ID NO: 36508 - RNA, 15 nt, Homo sapiens
cccugugcggccugg

SEQ ID NO: 36509 - RNA, 12 nt, Homo sapiens
ccggacgcugcu

SEQ ID NO: 36510 - RNA, 15 nt, Homo sapiens
ccggacgcugcugcc

SEQ ID NO: 36511 - RNA, 22 nt, Homo sapiens
ccggacgcugcugccgugggcc

SEQ ID NO: 36512 - RNA, 18 nt, Homo sapiens
ccgcgcagcucaggcugg

SEQ ID NO: 36513 - RNA, 22 nt, Homo sapiens
ccgcgcagcucaggcuggcacc

SEQ ID NO: 36514 - RNA, 23 nt, Homo sapiens
ccgcgcagcucaggcuggcaccg

SEQ ID NO: 36515 - RNA, 11 nt, Homo sapiens
ccgcgcuccuc

SEQ ID NO: 36516 - RNA, 21 nt, Homo sapiens
ccgcgcuccucggacggcucc

SEQ ID NO: 36517 - RNA, 23 nt, Homo sapiens
ccgcgcuccucggacggcuccgg

SEQ ID NO: 36518 - RNA, 11 nt, Homo sapiens
ccgcgcugcgc

SEQ ID NO: 36519 - RNA, 12 nt, Homo sapiens
ccgcgcugcgcg

SEQ ID NO: 36520 - RNA, 15 nt, Homo sapiens
ccgcgcugcgcgccg

SEQ ID NO: 36521 - RNA, 16 nt, Homo sapiens
ccgcgcugcgcgccgc

SEQ ID NO: 36522 - RNA, 19 nt, Homo sapiens
ccgcgcugcgcgccgcgcu

SEQ ID NO: 36523 - RNA, 20 nt, Homo sapiens
ccgcgcugcgcgccgcgcuc

SEQ ID NO: 36524 - RNA, 22 nt, Homo sapiens
ccgcgcugcgcgccgcgcuccu

SEQ ID NO: 36525 - RNA, 13 nt, Homo sapiens
ccgcuacuuccag

SEQ ID NO: 36526 - RNA, 15 nt, Homo sapiens
ccgcuacuuccaggg

SEQ ID NO: 36527 - RNA, 15 nt, Homo sapiens
ccgcuguacgcgagc

SEQ ID NO: 36528 - RNA, 16 nt, Homo sapiens
ccgcuguacgcgagcg

SEQ ID NO: 36529 - RNA, 18 nt, Homo sapiens
ccgcuguacgcgagcgcg

SEQ ID NO: 36530 - RNA, 19 nt, Homo sapiens
ccgcuguacgcgagcgcgc

SEQ ID NO: 36531 - RNA, 20 nt, Homo sapiens
ccgcuguacgcgagcgcgcg

SEQ ID NO: 36532 - RNA, 24 nt, Homo sapiens
ccgcuguacgcgagcgcgcgcgcc

SEQ ID NO: 36533 - RNA, 15 nt, Homo sapiens
ccgcuguuccucgcc

SEQ ID NO: 36534 - RNA, 16 nt, Homo sapiens
ccgcuguuccucgcca

SEQ ID NO: 36535 - RNA, 18 nt, Homo sapiens
ccgcuguuccucgccacg

SEQ ID NO: 36536 - RNA, 19 nt, Homo sapiens
ccgcuguuccucgccacgc

SEQ ID NO: 36537 - RNA, 21 nt, Homo sapiens
ccgcuguuccucgccacgcuc

SEQ ID NO: 36538 - RNA, 23 nt, Homo sapiens
ccgcuguuccucgccacgcucug

SEQ ID NO: 36539 - RNA, 12 nt, Homo sapiens
ccgacggagccg

SEQ ID NO: 36540 - RNA, 14 nt, Homo sapiens
ccgacggagccggg

SEQ ID NO: 36541 - RNA, 16 nt, Homo sapiens
ccgacggagccgggaa

SEQ ID NO: 36542 - RNA, 17 nt, Homo sapiens
ccgacggagccgggaaa

SEQ ID NO: 36543 - RNA, 19 nt, Homo sapiens
ccgacggagccgggaaaga

SEQ ID NO: 36544 - RNA, 20 nt, Homo sapiens
ccuggaaaucaggguuagua

SEQ ID NO: 36545 - RNA, 15 nt, Homo sapiens
ccucgccacgcucug

SEQ ID NO: 36546 - RNA, 23 nt, Homo sapiens
ccucgccacgcucugggucgccg

SEQ ID NO: 36547 - RNA, 16 nt, Homo sapiens
ccucggacggcuccgg

SEQ ID NO: 36548 - RNA, 20 nt, Homo sapiens
ccucggacggcuccggacgc

SEQ ID NO: 36549 - RNA, 22 nt, Homo sapiens
ccucggacggcuccggacgcug

SEQ ID NO: 36550 - RNA, 12 nt, Homo sapiens
ccucccggccgc

SEQ ID NO: 36551 - RNA, 13 nt, Homo sapiens
ccucccggccgcg

SEQ ID NO: 36552 - RNA, 20 nt, Homo sapiens
ccucccggccgcgcugcgcg

SEQ ID NO: 36553 - RNA, 21 nt, Homo sapiens
ccucccggccgcgcugcgcgc

SEQ ID NO: 36554 - RNA, 23 nt, Homo sapiens
ccucccggccgcgcugcgcgccg

SEQ ID NO: 36555 - RNA, 13 nt, Homo sapiens
ccuccgcuacuuc

SEQ ID NO: 36556 - RNA, 15 nt, Homo sapiens
ccugagaccaaggcc

SEQ ID NO: 36557 - RNA, 18 nt, Homo sapiens
ccugagaccaaggccccc

SEQ ID NO: 36558 - RNA, 23 nt, Homo sapiens
ccugagaccaaggcccccgggcc

SEQ ID NO: 36559 - RNA, 13 nt, Homo sapiens
ccucuggcugcug

SEQ ID NO: 36560 - RNA, 14 nt, Homo sapiens
ccucuggcugcugg

SEQ ID NO: 36561 - RNA, 17 nt, Homo sapiens
ccucuggcugcuggugg

SEQ ID NO: 36562 - RNA, 12 nt, Homo sapiens
ccuccagcugcc

SEQ ID NO: 36563 - RNA, 13 nt, Homo sapiens
ccuccagcugccc

SEQ ID NO: 36564 - RNA, 15 nt, Homo sapiens
ccuccagcugccccg

SEQ ID NO: 36565 - RNA, 17 nt, Homo sapiens
ccuccagcugccccggg

SEQ ID NO: 36566 - RNA, 12 nt, Homo sapiens
ccggggaggggc

SEQ ID NO: 36567 - RNA, 14 nt, Homo sapiens
ccggggaggggcgc

SEQ ID NO: 36568 - RNA, 16 nt, Homo sapiens
ccggggaggggcgcuc

SEQ ID NO: 36569 - RNA, 17 nt, Homo sapiens
ccggggaggggcgcucg

SEQ ID NO: 36570 - RNA, 18 nt, Homo sapiens
ccggggaggggcgcucgc

SEQ ID NO: 36571 - RNA, 15 nt, Homo sapiens
ccgggucgcaggacc

SEQ ID NO: 36572 - RNA, 22 nt, Homo sapiens
ccgggucgcaggaccaucccgg

SEQ ID NO: 36573 - RNA, 11 nt, Homo sapiens
ccgcccaccgc

SEQ ID NO: 36574 - RNA, 13 nt, Homo sapiens
cgcgagcgcgcgc

SEQ ID NO: 36575 - RNA, 21 nt, Homo sapiens
cgcgagcgcgcgcgcccucug

SEQ ID NO: 36576 - RNA, 13 nt, Homo sapiens
cgcagcucaggcu

SEQ ID NO: 36577 - RNA, 16 nt, Homo sapiens
cgcagcucaggcuggc

SEQ ID NO: 36578 - RNA, 18 nt, Homo sapiens
cgcagcucaggcuggcac

SEQ ID NO: 36579 - RNA, 20 nt, Homo sapiens
cgcagcucaggcuggcaccg

SEQ ID NO: 36580 - RNA, 18 nt, Homo sapiens
cgcaggaccaucccggcc

SEQ ID NO: 36581 - RNA, 19 nt, Homo sapiens
cgcaggaccaucccggccg

SEQ ID NO: 36582 - RNA, 20 nt, Homo sapiens
cgcaggaccaucccggccgg

SEQ ID NO: 36583 - RNA, 21 nt, Homo sapiens
cgcaggaccaucccggccggc

SEQ ID NO: 36584 - RNA, 23 nt, Homo sapiens
cgcaggaccaucccggccggcgc

SEQ ID NO: 36585 - RNA, 17 nt, Homo sapiens
cgccacgcucugggucg

SEQ ID NO: 36586 - RNA, 21 nt, Homo sapiens
cgccacgcucugggucgccgg

SEQ ID NO: 36587 - RNA, 22 nt, Homo sapiens
cgccacgcucugggucgccggc

SEQ ID NO: 36588 - RNA, 14 nt, Homo sapiens
cgcccaccgcaggg

SEQ ID NO: 36589 - RNA, 15 nt, Homo sapiens
cgcccacuuccuccc

SEQ ID NO: 36590 - RNA, 16 nt, Homo sapiens
cgcccacuuccucccg

SEQ ID NO: 36591 - RNA, 20 nt, Homo sapiens
cgcccacuuccucccggccg

SEQ ID NO: 36592 - RNA, 22 nt, Homo sapiens
cgcccacuuccucccggccgcg

SEQ ID NO: 36593 - RNA, 13 nt, Homo sapiens
cgcccucuggcug

SEQ ID NO: 36594 - RNA, 16 nt, Homo sapiens
cgcccucuggcugcug

SEQ ID NO: 36595 - RNA, 22 nt, Homo sapiens
cgcccucuggcugcugguggcg

SEQ ID NO: 36596 - RNA, 14 nt, Homo sapiens
cgccgcgcuccucg

SEQ ID NO: 36597 - RNA, 15 nt, Homo sapiens
cgccgcgcuccucgg

SEQ ID NO: 36598 - RNA, 18 nt, Homo sapiens
cgccgcgcuccucggacg

SEQ ID NO: 36599 - RNA, 20 nt, Homo sapiens
cgccgcgcuccucggacggc

SEQ ID NO: 36600 - RNA, 23 nt, Homo sapiens
cgccgcgcuccucggacggcucc

SEQ ID NO: 36601 - RNA, 17 nt, Homo sapiens
ccuuggggcugaugcag

SEQ ID NO: 36602 - RNA, 13 nt, Homo sapiens
cgacggagccggg

SEQ ID NO: 36603 - RNA, 15 nt, Homo sapiens
cgacggagccgggaa

SEQ ID NO: 36604 - RNA, 13 nt, Homo sapiens
cgagccccaggcg

SEQ ID NO: 36605 - RNA, 14 nt, Homo sapiens
cgagccccaggcgg

SEQ ID NO: 36606 - RNA, 15 nt, Homo sapiens
cgagccccaggcggg

SEQ ID NO: 36607 - RNA, 17 nt, Homo sapiens
cgagccccaggcggguc

SEQ ID NO: 36608 - RNA, 19 nt, Homo sapiens
cgagccccaggcggguccg

SEQ ID NO: 36609 - RNA, 22 nt, Homo sapiens
cgagccccaggcggguccgggu

SEQ ID NO: 36610 - RNA, 11 nt, Homo sapiens
cgagcgcgcgc

SEQ ID NO: 36611 - RNA, 17 nt, Homo sapiens
cgagcgcgcgcgcccuc

SEQ ID NO: 36612 - RNA, 14 nt, Homo sapiens
ccuguucgcgcgcc

SEQ ID NO: 36613 - RNA, 15 nt, Homo sapiens
ccuguucgcgcgccu

SEQ ID NO: 36614 - RNA, 16 nt, Homo sapiens
ccuguucgcgcgccuc

SEQ ID NO: 36615 - RNA, 18 nt, Homo sapiens
ccuguucgcgcgccuccg

SEQ ID NO: 36616 - RNA, 20 nt, Homo sapiens
ccuguucgcgcgccuccgcu

SEQ ID NO: 36617 - RNA, 13 nt, Homo sapiens
ccuugaugaagaa

SEQ ID NO: 36618 - RNA, 14 nt, Homo sapiens
ccuugaugaagaag

SEQ ID NO: 36619 - RNA, 14 nt, Homo sapiens
ccugugcggccugg

SEQ ID NO: 36620 - RNA, 17 nt, Homo sapiens
ccuggucuaccuguucg

SEQ ID NO: 36621 - RNA, 22 nt, Homo sapiens
ccuggucuaccuguucgcgcgc

SEQ ID NO: 36622 - RNA, 17 nt, Homo sapiens
uccagcugccccgggga

SEQ ID NO: 36623 - RNA, 15 nt, Homo sapiens
gccccaauucgaucc

SEQ ID NO: 36624 - RNA, 20 nt, Homo sapiens
agccggagccuccagcugcc

SEQ ID NO: 36625 - RNA, 21 nt, Homo sapiens
agagccugaguguugccuaau

SEQ ID NO: 36626 - RNA, 13 nt, Homo sapiens
uaucaguccaaag

SEQ ID NO: 36627 - RNA, 19 nt, Homo sapiens
auugaggcuuuaaaacuua

SEQ ID NO: 36628 - RNA, 12 nt, Homo sapiens
aaagaagagccg

SEQ ID NO: 36629 - RNA, 23 nt, Homo sapiens
uccccugucacgugugggcaaug

SEQ ID NO: 36630 - RNA, 21 nt, Homo sapiens
aaccagagccugaguguugcc

SEQ ID NO: 36631 - RNA, 16 nt, Homo sapiens
gccuccgcuacuucca

SEQ ID NO: 36632 - RNA, 21 nt, Homo sapiens
cauuguucuugugaacccaaa

SEQ ID NO: 36633 - RNA, 19 nt, Homo sapiens
accauuuuugaaaccaaac

SEQ ID NO: 36634 - RNA, 12 nt, Homo sapiens
accucauuauca

SEQ ID NO: 36635 - RNA, 13 nt, Homo sapiens
cgcgcuccgcgca

SEQ ID NO: 36636 - RNA, 12 nt, Homo sapiens
augcauucugag

SEQ ID NO: 36637 - RNA, 15 nt, Homo sapiens
cagcgaguacuuccc

SEQ ID NO: 36638 - RNA, 18 nt, Homo sapiens
ucuaucauuaaaguucua

SEQ ID NO: 36639 - RNA, 17 nt, Homo sapiens
gaauacauaaaguaugu

SEQ ID NO: 36640 - RNA, 20 nt, Homo sapiens
cauuguucuugugaacccaa

SEQ ID NO: 36641 - RNA, 22 nt, Homo sapiens
uaaaaaaaaaacguauugcauu

SEQ ID NO: 36642 - RNA, 17 nt, Homo sapiens
aaccagagccugagugu

SEQ ID NO: 36643 - RNA, 18 nt, Homo sapiens
gcccacuuccucccggcc

SEQ ID NO: 36644 - RNA, 14 nt, Homo sapiens
cuccgcuacuucca

SEQ ID NO: 36645 - RNA, 18 nt, Homo sapiens
aguaugaaaaugucauug

SEQ ID NO: 36646 - RNA, 22 nt, Homo sapiens
cauccuagucucuaucauuaaa

SEQ ID NO: 36647 - RNA, 14 nt, Homo sapiens
uaaaguucuaguga

SEQ ID NO: 36648 - RNA, 23 nt, Homo sapiens
gggcgcucgcuuccgcauccuag

SEQ ID NO: 36649 - RNA, 22 nt, Homo sapiens
cuaauuuguuuucccuucuuac

SEQ ID NO: 36650 - RNA, 16 nt, Homo sapiens
cucaggcuggcaccgc

SEQ ID NO: 36651 - RNA, 11 nt, Homo sapiens
gcauccuaguc

SEQ ID NO: 36652 - RNA, 15 nt, Homo sapiens
gacgcugcugccgug

SEQ ID NO: 36653 - RNA, 19 nt, Homo sapiens
ggcuuuaaaacuuauccuc

SEQ ID NO: 36654 - RNA, 19 nt, Homo sapiens
gcauccuagucucuaucau

SEQ ID NO: 36655 - RNA, 16 nt, Homo sapiens
ccggagccuccagcug

SEQ ID NO: 36656 - RNA, 15 nt, Homo sapiens
cggagccuccagcug

SEQ ID NO: 36657 - RNA, 17 nt, Homo sapiens
cccaaagugugacucau

SEQ ID NO: 36658 - RNA, 11 nt, Homo sapiens
cgcaggaccau

SEQ ID NO: 36659 - RNA, 15 nt, Homo sapiens
uacauaaaguaugug

SEQ ID NO: 36660 - RNA, 23 nt, Homo sapiens
cuaguuguaauuuuuuuguggga

SEQ ID NO: 36661 - RNA, 14 nt, Homo sapiens
cucaucccacccgc

SEQ ID NO: 36662 - RNA, 16 nt, Homo sapiens
uaaagcuuugugcaga

SEQ ID NO: 36663 - RNA, 17 nt, Homo sapiens
cacacugagcugagggg

SEQ ID NO: 36664 - RNA, 19 nt, Homo sapiens
aggaauacauaaaguaugu

SEQ ID NO: 36665 - RNA, 20 nt, Homo sapiens
uuacaaugcauucugaggua

SEQ ID NO: 36666 - RNA, 22 nt, Homo sapiens
uccuccaugaauaucaguuauu

SEQ ID NO: 36667 - RNA, 18 nt, Homo sapiens
cugcagcgaguacuuccc

SEQ ID NO: 36668 - RNA, 20 nt, Homo sapiens
ugcauauuuuauuauaguca

SEQ ID NO: 36669 - RNA, 23 nt, Homo sapiens
uaaaaaaaaaacguauugcauuu

SEQ ID NO: 36670 - RNA, 17 nt, Homo sapiens
caggaccaucccggccg

SEQ ID NO: 36671 - RNA, 19 nt, Homo sapiens
agccgggaaagaagagccg

SEQ ID NO: 36672 - RNA, 13 nt, Homo sapiens
ggggaggggcgcu

SEQ ID NO: 36673 - RNA, 14 nt, Homo sapiens
ggagccuccagcug

SEQ ID NO: 36674 - RNA, 12 nt, Homo sapiens
ucucuaucauua

SEQ ID NO: 36675 - RNA, 15 nt, Homo sapiens
cuuuaaaacuuaucc

SEQ ID NO: 36676 - RNA, 16 nt, Homo sapiens
caugaauaucaguuau

SEQ ID NO: 36677 - RNA, 13 nt, Homo sapiens
augaaaaugucau

SEQ ID NO: 36678 - RNA, 21 nt, Homo sapiens
aagagccggagccuccagcug

SEQ ID NO: 36679 - RNA, 17 nt, Homo sapiens
ucauuaaaguucuagug

SEQ ID NO: 36680 - RNA, 13 nt, Homo sapiens
gaccaucccggcc

SEQ ID NO: 36681 - RNA, 15 nt, Homo sapiens
uaugaaaaugucauu

SEQ ID NO: 36682 - RNA, 19 nt, Homo sapiens
cuuuaaaacuuauccucca

SEQ ID NO: 36683 - RNA, 15 nt, Homo sapiens
gcgcgcucaucccac

SEQ ID NO: 36684 - RNA, 24 nt, Homo sapiens
aauacauaaaguaugugcauauuu

SEQ ID NO: 36685 - RNA, 17 nt, Homo sapiens
uuugaaaccaaaccaga

SEQ ID NO: 36686 - RNA, 20 nt, Homo sapiens
ccgcagggugaacugcagcg

SEQ ID NO: 36687 - RNA, 19 nt, Homo sapiens
auauuuuauuauagucacu

SEQ ID NO: 36688 - RNA, 14 nt, Homo sapiens
aaagguccuggcaa

SEQ ID NO: 36689 - RNA, 16 nt, Homo sapiens
cgugugggcaauguuc

SEQ ID NO: 36690 - RNA, 17 nt, Homo sapiens
uuugugggaaauccaca

SEQ ID NO: 36691 - RNA, 18 nt, Homo sapiens
cuaucauuaaaguucuag

SEQ ID NO: 36692 - RNA, 17 nt, Homo sapiens
ugcauuuaauuuauuga

SEQ ID NO: 36693 - RNA, 17 nt, Homo sapiens
cauccuagucucuauca

SEQ ID NO: 36694 - RNA, 17 nt, Homo sapiens
ccauuuuugaaaccaaa

SEQ ID NO: 36695 - RNA, 15 nt, Homo sapiens
uaaaguucuagugac

SEQ ID NO: 36696 - RNA, 14 nt, Homo sapiens
aaagcuuugugcag

SEQ ID NO: 36697 - RNA, 16 nt, Homo sapiens
aaagcuuugugcagau

SEQ ID NO: 36698 - RNA, 17 nt, Homo sapiens
cgugggccugagaccaa

SEQ ID NO: 36699 - RNA, 13 nt, Homo sapiens
gccgacggagccg

SEQ ID NO: 36700 - RNA, 14 nt, Homo sapiens
gugugacucauuaa

SEQ ID NO: 36701 - RNA, 17 nt, Homo sapiens
caguaugaaaaugucau

SEQ ID NO: 36702 - RNA, 19 nt, Homo sapiens
ccuccaugaauaucaguua

SEQ ID NO: 36703 - RNA, 14 nt, Homo sapiens
cacugagcugaggg

SEQ ID NO: 36704 - RNA, 15 nt, Homo sapiens
aaaaacguauugcau

SEQ ID NO: 36705 - RNA, 16 nt, Homo sapiens
ccuucuuacaaugcau

SEQ ID NO: 36706 - RNA, 15 nt, Homo sapiens
ccuccgcuacuucca

SEQ ID NO: 36707 - RNA, 20 nt, Homo sapiens
uuaauuuauugaggcuuuaa

SEQ ID NO: 36708 - RNA, 20 nt, Homo sapiens
cucgcuuccgcauccuaguc

SEQ ID NO: 36709 - RNA, 18 nt, Homo sapiens
agagccggagccuccagc

SEQ ID NO: 36710 - RNA, 19 nt, Homo sapiens
gccugcucgcccacuuccu

SEQ ID NO: 36711 - RNA, 20 nt, Homo sapiens
aaacuuauccuccaugaaua

SEQ ID NO: 36712 - RNA, 22 nt, Homo sapiens
gagggcgcggggcggggagcga

SEQ ID NO: 36713 - RNA, 24 nt, Homo sapiens
ggcuuuaaaacuuauccuccauga

SEQ ID NO: 36714 - RNA, 18 nt, Homo sapiens
agucacuaguuguaauuu

SEQ ID NO: 36715 - RNA, 15 nt, Homo sapiens
cuuccagggcuacgc

SEQ ID NO: 36716 - RNA, 12 nt, Homo sapiens
uguucuugugaa

SEQ ID NO: 36717 - RNA, 20 nt, Homo sapiens
aacugcagcgaguacuuccc

SEQ ID NO: 36718 - RNA, 12 nt, Homo sapiens
aaaaaaacguau

SEQ ID NO: 36719 - RNA, 16 nt, Homo sapiens
ccauuuuugaaaccaa

SEQ ID NO: 36720 - RNA, 15 nt, Homo sapiens
cuccgcuacuuccag

SEQ ID NO: 36721 - RNA, 15 nt, Homo sapiens
ucauuaaaguucuag

SEQ ID NO: 36722 - RNA, 15 nt, Homo sapiens
cuugugaacccaaag

SEQ ID NO: 36723 - RNA, 20 nt, Homo sapiens
aaaaaacguauugcauuuaa

SEQ ID NO: 36724 - RNA, 15 nt, Homo sapiens
cagcugccccgggga

SEQ ID NO: 36725 - RNA, 14 nt, Homo sapiens
ucuuccucccugga

SEQ ID NO: 36726 - RNA, 13 nt, Homo sapiens
uagucucuaucau

SEQ ID NO: 36727 - RNA, 13 nt, Homo sapiens
cauuaucagucca

SEQ ID NO: 36728 - RNA, 16 nt, Homo sapiens
guaaagcuuugugcag

SEQ ID NO: 36729 - RNA, 21 nt, Homo sapiens
acuguaaagcuuugugcagau

SEQ ID NO: 36730 - RNA, 17 nt, Homo sapiens
uaaagcuuugugcagau

SEQ ID NO: 36731 - RNA, 17 nt, Homo sapiens
auccuagucucuaucau

SEQ ID NO: 36732 - RNA, 22 nt, Homo sapiens
cucuaucauuaaaguucuagug

SEQ ID NO: 36733 - RNA, 16 nt, Homo sapiens
uuaaaguucuagugac

SEQ ID NO: 36734 - RNA, 22 nt, Homo sapiens
gcucgcuuccgcauccuagucu

SEQ ID NO: 36735 - RNA, 14 nt, Homo sapiens
auuuuugaaaccaa

SEQ ID NO: 36736 - RNA, 16 nt, Homo sapiens
ugugaacccaaagugu

SEQ ID NO: 36737 - RNA, 16 nt, Homo sapiens
auucgauccccuguca

SEQ ID NO: 36738 - RNA, 23 nt, Homo sapiens
uacuucccgcuguuccucgccac

SEQ ID NO: 36739 - RNA, 20 nt, Homo sapiens
uguuguuuuaggaauacaua

SEQ ID NO: 36740 - RNA, 18 nt, Homo sapiens
auucuuuacccccuggga

SEQ ID NO: 36741 - RNA, 16 nt, Homo sapiens
ucuuccucccuggaau

SEQ ID NO: 36742 - RNA, 19 nt, Homo sapiens
cggcgggagggcgcggggc

SEQ ID NO: 36743 - RNA, 20 nt, Homo sapiens
gcgcgccuccgcuacuucca

SEQ ID NO: 36744 - RNA, 15 nt, Homo sapiens
cucgcccacuuccuc

SEQ ID NO: 36745 - RNA, 19 nt, Homo sapiens
cagcgaguacuucccgcug

SEQ ID NO: 36746 - RNA, 13 nt, Homo sapiens
uuguucuugugaa

SEQ ID NO: 36747 - RNA, 16 nt, Homo sapiens
cuucuuacaaugcauu

SEQ ID NO: 36748 - RNA, 22 nt, Homo sapiens
gcugccgugggccugagaccaa

SEQ ID NO: 36749 - RNA, 14 nt, Homo sapiens
agccccaauucgau

SEQ ID NO: 36750 - RNA, 15 nt, Homo sapiens
ugugggaaauccaca

SEQ ID NO: 36751 - RNA, 15 nt, Homo sapiens
caggcggguccgggu

SEQ ID NO: 36752 - RNA, 17 nt, Homo sapiens
ugcagcgaguacuuccc

SEQ ID NO: 36753 - RNA, 15 nt, Homo sapiens
cuuauccuccaugaa

SEQ ID NO: 36754 - RNA, 23 nt, Homo sapiens
aacccaaagugugacucauuaaa

SEQ ID NO: 36755 - RNA, 14 nt, Homo sapiens
aaaguucuagugac

SEQ ID NO: 36756 - RNA, 17 nt, Homo sapiens
ucaguccaaagggcaug

SEQ ID NO: 36757 - RNA, 20 nt, Homo sapiens
ggcggguccgggucgcagga

SEQ ID NO: 36758 - RNA, 19 nt, Homo sapiens
cccucuccucucuuccucc

SEQ ID NO: 36759 - RNA, 13 nt, Homo sapiens
aaaguucuaguga

SEQ ID NO: 36760 - RNA, 14 nt, Homo sapiens
uggcgcuggcugcg

SEQ ID NO: 36761 - RNA, 16 nt, Homo sapiens
gggugaacugcagcga

SEQ ID NO: 36762 - RNA, 22 nt, Homo sapiens
aauguuguuuuaggaauacaua

SEQ ID NO: 36763 - RNA, 20 nt, Homo sapiens
ugcgcucggccugcucgccc

SEQ ID NO: 36764 - RNA, 11 nt, Homo sapiens
acaaugcauuc

SEQ ID NO: 36765 - RNA, 19 nt, Homo sapiens
ucuuacaaugcauucugag

SEQ ID NO: 36766 - RNA, 15 nt, Homo sapiens
gcucgcccacuuccu

SEQ ID NO: 36767 - RNA, 16 nt, Homo sapiens
ggcugcugguggcgcu

SEQ ID NO: 36768 - RNA, 17 nt, Homo sapiens
cgccuccgcuacuucca

SEQ ID NO: 36769 - RNA, 19 nt, Homo sapiens
aaauguuguuuuaggaaua

SEQ ID NO: 36770 - RNA, 15 nt, Homo sapiens
agccgggaaagaaga

SEQ ID NO: 36771 - RNA, 18 nt, Homo sapiens
accauuuuugaaaccaaa

SEQ ID NO: 36772 - RNA, 17 nt, Homo sapiens
cauaaaguaugugcaua

SEQ ID NO: 36773 - RNA, 13 nt, Homo sapiens
uccgcuacuucca

SEQ ID NO: 36774 - RNA, 21 nt, Homo sapiens
uccaaagggcauggguuuuau

SEQ ID NO: 36775 - RNA, 21 nt, Homo sapiens
cgccuccgcuacuuccagggc

SEQ ID NO: 36776 - RNA, 16 nt, Homo sapiens
uuccgcauccuagucu

SEQ ID NO: 36777 - RNA, 14 nt, Homo sapiens
agcugccccgggga

SEQ ID NO: 36778 - RNA, 18 nt, Homo sapiens
uagucucuaucauuaaag

SEQ ID NO: 36779 - RNA, 12 nt, Homo sapiens
gcauccuagucu

SEQ ID NO: 36780 - RNA, 16 nt, Homo sapiens
auccacacugagcuga

SEQ ID NO: 36781 - RNA, 22 nt, Homo sapiens
gagaccaaggcccccgggccga

SEQ ID NO: 36782 - RNA, 14 nt, Homo sapiens
augaucaguaugaa

SEQ ID NO: 36783 - RNA, 16 nt, Homo sapiens
ccgcauccuagucucu

SEQ ID NO: 36784 - RNA, 16 nt, Homo sapiens
caaugcauucugaggu

SEQ ID NO: 36785 - RNA, 15 nt, Homo sapiens
aaccucauuaucagu

SEQ ID NO: 36786 - RNA, 23 nt, Homo sapiens
ugcauucugagguaaccucauua

SEQ ID NO: 36787 - RNA, 23 nt, Homo sapiens
agcgcgcgcgcccucuggcugcu

SEQ ID NO: 36788 - RNA, 16 nt, Homo sapiens
ucuaucauuaaaguuc

SEQ ID NO: 36789 - RNA, 20 nt, Homo sapiens
uuacccccugggagccccaa

SEQ ID NO: 36790 - RNA, 17 nt, Homo sapiens
agagccggagccuccag

SEQ ID NO: 36791 - RNA, 13 nt, Homo sapiens
uuccucgccacgc

SEQ ID NO: 36792 - RNA, 19 nt, Homo sapiens
gcuuuaaaacuuauccucc

SEQ ID NO: 36793 - RNA, 13 nt, Homo sapiens
gccccaauucgau

SEQ ID NO: 36794 - RNA, 17 nt, Homo sapiens
aucaguccaaagggcau

SEQ ID NO: 36795 - RNA, 21 nt, Homo sapiens
uguuguuuuaggaauacauaa

SEQ ID NO: 36796 - RNA, 16 nt, Homo sapiens
ugcauauuuuauuaua

SEQ ID NO: 36797 - RNA, 15 nt, Homo sapiens
uccgcauccuagucu

SEQ ID NO: 36798 - RNA, 20 nt, Homo sapiens
uacauaaaguaugugcauau

SEQ ID NO: 36799 - RNA, 23 nt, Homo sapiens
gugaacugcagcgaguacuuccc

SEQ ID NO: 36800 - RNA, 15 nt, Homo sapiens
agugugacucauuaa

SEQ ID NO: 36801 - RNA, 21 nt, Homo sapiens
ugugcggccuggucuaccugu

SEQ ID NO: 36802 - RNA, 14 nt, Homo sapiens
aaaacguauugcau

SEQ ID NO: 36803 - RNA, 21 nt, Homo sapiens
gcucgcuuccgcauccuaguc

SEQ ID NO: 36804 - RNA, 16 nt, Homo sapiens
agucucuaucauuaaa

SEQ ID NO: 36805 - RNA, 16 nt, Homo sapiens
gcauccuagucucuau

SEQ ID NO: 36806 - RNA, 22 nt, Homo sapiens
ucuaucauuaaaguucuaguga

SEQ ID NO: 36807 - RNA, 21 nt, Homo sapiens
auucugagguaaccucauuau

SEQ ID NO: 36808 - RNA, 14 nt, Homo sapiens
uaaaguaugugcau

SEQ ID NO: 36809 - RNA, 22 nt, Homo sapiens
ugaggcuuuaaaacuuauccuc

SEQ ID NO: 36810 - RNA, 21 nt, Homo sapiens
cuggcugcgcucggccugcuc

SEQ ID NO: 36811 - RNA, 13 nt, Homo sapiens
aucaguccaaagg

SEQ ID NO: 36812 - RNA, 18 nt, Homo sapiens
ugaucaguaugaaaaugu

SEQ ID NO: 36813 - RNA, 18 nt, Homo sapiens
uauccuccaugaauauca

SEQ ID NO: 36814 - RNA, 11 nt, Homo sapiens
aacccaaagug

SEQ ID NO: 36815 - RNA, 18 nt, Homo sapiens
aagagccggagccuccag

SEQ ID NO: 36816 - RNA, 17 nt, Homo sapiens
uauagucacuaguugua

SEQ ID NO: 36817 - RNA, 17 nt, Homo sapiens
aaacguauugcauuuaa

SEQ ID NO: 36818 - RNA, 23 nt, Homo sapiens
uugcauuuaauuuauugaggcuu

SEQ ID NO: 36819 - RNA, 19 nt, Homo sapiens
cauauuuuauuauagucac

SEQ ID NO: 36820 - RNA, 23 nt, Homo sapiens
auucugagguaaccucauuauca

SEQ ID NO: 36821 - RNA, 13 nt, Homo sapiens
uccgcauccuagu

SEQ ID NO: 36822 - RNA, 17 nt, Homo sapiens
guaaagcuuugugcaga

SEQ ID NO: 36823 - RNA, 23 nt, Homo sapiens
uaauuuuuuugugggaaauccac

SEQ ID NO: 36824 - RNA, 12 nt, Homo sapiens
uuaucaguccaa

SEQ ID NO: 36825 - RNA, 19 nt, Homo sapiens
uacaaugcauucugaggua

SEQ ID NO: 36826 - RNA, 17 nt, Homo sapiens
ucauuguucuugugaac

SEQ ID NO: 36827 - RNA, 21 nt, Homo sapiens
ccuggcaaagaugaucaguau

SEQ ID NO: 36828 - RNA, 22 nt, Homo sapiens
ugaacugcagcgaguacuuccc

SEQ ID NO: 36829 - RNA, 22 nt, Homo sapiens
ucauuguucuugugaacccaaa

SEQ ID NO: 36830 - RNA, 17 nt, Homo sapiens
cggagccuccagcugcc

SEQ ID NO: 36831 - RNA, 14 nt, Homo sapiens
aaaaacguauugca

SEQ ID NO: 36832 - RNA, 11 nt, Homo sapiens
cgcuacuucca

SEQ ID NO: 36833 - RNA, 21 nt, Homo sapiens
ucgauccccugucacgugugg

SEQ ID NO: 36834 - RNA, 14 nt, Homo sapiens
cgauccccugucac

SEQ ID NO: 36835 - RNA, 20 nt, Homo sapiens
caguuauuuuuaaacuguaa

SEQ ID NO: 36836 - RNA, 16 nt, Homo sapiens
cauaaaguaugugcau

SEQ ID NO: 36837 - RNA, 12 nt, Homo sapiens
caucuucuuuca

SEQ ID NO: 36838 - RNA, 23 nt, Homo sapiens
uucgcgcgccuccgcuacuucca

SEQ ID NO: 36839 - RNA, 16 nt, Homo sapiens
uaaaguaugugcauau

SEQ ID NO: 36840 - RNA, 19 nt, Homo sapiens
cccuucuuacaaugcauuc

SEQ ID NO: 36841 - RNA, 12 nt, Homo sapiens
ugagguaaccuc

SEQ ID NO: 36842 - RNA, 16 nt, Homo sapiens
aucuucuuucaugaag

SEQ ID NO: 36843 - RNA, 22 nt, Homo sapiens
auuuuuuugugggaaauccaca

SEQ ID NO: 36844 - RNA, 18 nt, Homo sapiens
gaagagccggagccucca

SEQ ID NO: 36845 - RNA, 23 nt, Homo sapiens
agguccuggcaaagaugaucagu

SEQ ID NO: 36846 - RNA, 20 nt, Homo sapiens
ugcauucugagguaaccuca

SEQ ID NO: 36847 - RNA, 19 nt, Homo sapiens
cgcucaucccacccgccca

SEQ ID NO: 36848 - RNA, 18 nt, Homo sapiens
gcuuccgcauccuagucu

SEQ ID NO: 36849 - RNA, 22 nt, Homo sapiens
aaaugucauuguucuugugaac

SEQ ID NO: 36850 - RNA, 19 nt, Homo sapiens
cuuugugcagauucuuuac

SEQ ID NO: 36851 - RNA, 12 nt, Homo sapiens
ccgcuacuucca

SEQ ID NO: 36852 - RNA, 15 nt, Homo sapiens
gaauacauaaaguau

SEQ ID NO: 36853 - RNA, 17 nt, Homo sapiens
gguccgggucgcaggac

SEQ ID NO: 36854 - RNA, 15 nt, Homo sapiens
ugaauaucaguuauu

SEQ ID NO: 36855 - RNA, 18 nt, Homo sapiens
ugugaacccaaaguguga

SEQ ID NO: 36856 - RNA, 13 nt, Homo sapiens
uuuauuauauaua

SEQ ID NO: 36857 - RNA, 11 nt, Homo sapiens
agccggagccu

SEQ ID NO: 36858 - RNA, 23 nt, Homo sapiens
uccuggcaaagaugaucaguaug

SEQ ID NO: 36859 - RNA, 13 nt, Homo sapiens
agccuccagcugc

SEQ ID NO: 36860 - RNA, 17 nt, Homo sapiens
gcaaagaugaucaguau

SEQ ID NO: 36861 - RNA, 15 nt, Homo sapiens
uaaaguaugugcaua

SEQ ID NO: 36862 - RNA, 21 nt, Homo sapiens
ggcaauguucccccucuccuc

SEQ ID NO: 36863 - RNA, 20 nt, Homo sapiens
ggccugcucgcccacuuccu

SEQ ID NO: 36864 - RNA, 13 nt, Homo sapiens
uggaaucuuguaa

SEQ ID NO: 36865 - RNA, 23 nt, Homo sapiens
agaagagccggagccuccagcug

SEQ ID NO: 36866 - RNA, 22 nt, Homo sapiens
agucucuaucauuaaaguucua

SEQ ID NO: 36867 - RNA, 21 nt, Homo sapiens
gcuccucggacggcuccggac

SEQ ID NO: 36868 - RNA, 15 nt, Homo sapiens
agccuccagcugccc

SEQ ID NO: 36869 - RNA, 13 nt, Homo sapiens
aguaugugcauau

SEQ ID NO: 36870 - RNA, 14 nt, Homo sapiens
cuagucucuaucau

SEQ ID NO: 36871 - RNA, 16 nt, Homo sapiens
auuaaaguucuaguga

SEQ ID NO: 36872 - RNA, 16 nt, Homo sapiens
cauuuuugaaaccaaa

SEQ ID NO: 36873 - RNA, 19 nt, Homo sapiens
uuucccuucuuacaaugca

SEQ ID NO: 36874 - RNA, 13 nt, Homo sapiens
gagccuccagcug

SEQ ID NO: 36875 - RNA, 16 nt, Homo sapiens
aguaugaaaaugucau

SEQ ID NO: 36876 - RNA, 19 nt, Homo sapiens
uggcaaagaugaucaguau

SEQ ID NO: 36877 - RNA, 23 nt, Homo sapiens
aaaaugucauuguucuugugaac

SEQ ID NO: 36878 - RNA, 22 nt, Homo sapiens
auccuagucucuaucauuaaag

SEQ ID NO: 36879 - RNA, 17 nt, Homo sapiens
cuuccgcauccuagucu

SEQ ID NO: 36880 - RNA, 17 nt, Homo sapiens
uaaagguccuggcaaag

SEQ ID NO: 36881 - RNA, 15 nt, Homo sapiens
cggccugcucgccca

SEQ ID NO: 36882 - RNA, 22 nt, Homo sapiens
uaguuguaauuuuuuuguggga

SEQ ID NO: 36883 - RNA, 20 nt, Homo sapiens
aauacauaaaguaugugcau

SEQ ID NO: 36884 - RNA, 14 nt, Homo sapiens
aaguaugugcauau

SEQ ID NO: 36885 - RNA, 22 nt, Homo sapiens
ucuuguaaagguccuggcaaag

SEQ ID NO: 36886 - RNA, 19 nt, Homo sapiens
caaagaugaucaguaugaa

SEQ ID NO: 36887 - RNA, 20 nt, Homo sapiens
cuguaaagcuuugugcagau

SEQ ID NO: 36888 - RNA, 15 nt, Homo sapiens
auaaaguaugugcau

SEQ ID NO: 36889 - RNA, 17 nt, Homo sapiens
ucauuaucaguccaaag

SEQ ID NO: 36890 - RNA, 15 nt, Homo sapiens
uaaagcuuugugcag

SEQ ID NO: 36891 - RNA, 19 nt, Homo sapiens
uacauaaaguaugugcaua

SEQ ID NO: 36892 - RNA, 19 nt, Homo sapiens
aacccaaagugugacucau

SEQ ID NO: 36893 - RNA, 22 nt, Homo sapiens
aauacauaaaguaugugcauau

SEQ ID NO: 36894 - RNA, 20 nt, Homo sapiens
cggggaggggcgcucgcuuc

SEQ ID NO: 36895 - RNA, 11 nt, Homo sapiens
caaagugugac

SEQ ID NO: 36896 - RNA, 16 nt, Homo sapiens
uucugagguaaccuca

SEQ ID NO: 36897 - RNA, 18 nt, Homo sapiens
cugucacgugugggcaau

SEQ ID NO: 36898 - RNA, 19 nt, Homo sapiens
augucauuguucuugugaa

SEQ ID NO: 36899 - RNA, 13 nt, Homo sapiens
uuuuauuuaaccu

SEQ ID NO: 36900 - RNA, 19 nt, Homo sapiens
ugggagcuuuuguagaagu

SEQ ID NO: 36901 - RNA, 15 nt, Homo sapiens
uguaguguuggagaa

SEQ ID NO: 36902 - RNA, 20 nt, Homo sapiens
uguauaaaauaauuuuuaua

SEQ ID NO: 36903 - RNA, 15 nt, Homo sapiens
uguauuccuuuuucu

SEQ ID NO: 36904 - RNA, 18 nt, Homo sapiens
ugugcuaguaauuggaaa

SEQ ID NO: 36905 - RNA, 19 nt, Homo sapiens
ugugcuaguaauuggaaag

SEQ ID NO: 36906 - RNA, 13 nt, Homo sapiens
ugugaagcaaaau

SEQ ID NO: 36907 - RNA, 20 nt, Homo sapiens
uguccauucuuccucccauu

SEQ ID NO: 36908 - RNA, 18 nt, Homo sapiens
uggagcugccucucucau

SEQ ID NO: 36909 - RNA, 19 nt, Homo sapiens
uggagcugccucucucauc

SEQ ID NO: 36910 - RNA, 11 nt, Homo sapiens
uuucugaaauu

SEQ ID NO: 36911 - RNA, 12 nt, Homo sapiens
uuucugaaauuu

SEQ ID NO: 36912 - RNA, 23 nt, Homo sapiens
uuucauuuuagggguagcauuug

SEQ ID NO: 36913 - RNA, 23 nt, Homo sapiens
uuuuaaagcuuccauuguugucu

SEQ ID NO: 36914 - RNA, 19 nt, Homo sapiens
uuugcucauggaauuggag

SEQ ID NO: 36915 - RNA, 13 nt, Homo sapiens
uucuagugaccga

SEQ ID NO: 36916 - RNA, 15 nt, Homo sapiens
uucuguuuuauaauu

SEQ ID NO: 36917 - RNA, 19 nt, Homo sapiens
uugaagagguuuuaaagcu

SEQ ID NO: 36918 - RNA, 21 nt, Homo sapiens
uucuaggacugaauuaugaaa

SEQ ID NO: 36919 - RNA, 16 nt, Homo sapiens
uuccugggagcuuuug

SEQ ID NO: 36920 - RNA, 17 nt, Homo sapiens
uuggacaaaauggaaua

SEQ ID NO: 36921 - RNA, 18 nt, Homo sapiens
uugauggugguauguuuu

SEQ ID NO: 36922 - RNA, 12 nt, Homo sapiens
uguuuccaucaa

SEQ ID NO: 36923 - RNA, 16 nt, Homo sapiens
uuaaaagaaugauuau

SEQ ID NO: 36924 - RNA, 19 nt, Homo sapiens
uuaaguuuuuuuuuaaaaa

SEQ ID NO: 36925 - RNA, 12 nt, Homo sapiens
uuauuguagcau

SEQ ID NO: 36926 - RNA, 15 nt, Homo sapiens
uacauuuguauaaaa

SEQ ID NO: 36927 - RNA, 20 nt, Homo sapiens
uacauuuguauaaaauaauu

SEQ ID NO: 36928 - RNA, 21 nt, Homo sapiens
uacaucccuuaccugggaaag

SEQ ID NO: 36929 - RNA, 20 nt, Homo sapiens
uacaguggggaaugaagaua

SEQ ID NO: 36930 - RNA, 13 nt, Homo sapiens
uacucuuauaucu

SEQ ID NO: 36931 - RNA, 19 nt, Homo sapiens
uacuuauuguagcauccug

SEQ ID NO: 36932 - RNA, 18 nt, Homo sapiens
uagcauccuggaauaucu

SEQ ID NO: 36933 - RNA, 18 nt, Homo sapiens
uaggaaauauuuauuuua

SEQ ID NO: 36934 - RNA, 14 nt, Homo sapiens
uagcuuuuuucucu

SEQ ID NO: 36935 - RNA, 13 nt, Homo sapiens
uaucacuugucaa

SEQ ID NO: 36936 - RNA, 18 nt, Homo sapiens
uaucacuugucaauaaaa

SEQ ID NO: 36937 - RNA, 19 nt, Homo sapiens
uaucacuugucaauaaaau

SEQ ID NO: 36938 - RNA, 22 nt, Homo sapiens
uagugaaacucguuaauuugua

SEQ ID NO: 36939 - RNA, 20 nt, Homo sapiens
uauaguuacccaaauuaaga

SEQ ID NO: 36940 - RNA, 14 nt, Homo sapiens
uauauaagcuugua

SEQ ID NO: 36941 - RNA, 12 nt, Homo sapiens
uauauauauuuu

SEQ ID NO: 36942 - RNA, 14 nt, Homo sapiens
uauaucuauauuuu

SEQ ID NO: 36943 - RNA, 11 nt, Homo sapiens
uaauuggaaag

SEQ ID NO: 36944 - RNA, 12 nt, Homo sapiens
uaauuggaaagg

SEQ ID NO: 36945 - RNA, 15 nt, Homo sapiens
uaauuugguuuucac

SEQ ID NO: 36946 - RNA, 21 nt, Homo sapiens
uaauuuguaguguuggagaag

SEQ ID NO: 36947 - RNA, 15 nt, Homo sapiens
uaaugauaacuggaa

SEQ ID NO: 36948 - RNA, 16 nt, Homo sapiens
uacacugccuucucaa

SEQ ID NO: 36949 - RNA, 17 nt, Homo sapiens
uacagaaaaguugaauu

SEQ ID NO: 36950 - RNA, 14 nt, Homo sapiens
uaagagagucuauu

SEQ ID NO: 36951 - RNA, 23 nt, Homo sapiens
uaagaagacugcauuauauuuau

SEQ ID NO: 36952 - RNA, 21 nt, Homo sapiens
uaagacaaaaagcuacuuauu

SEQ ID NO: 36953 - RNA, 14 nt, Homo sapiens
uaaaguaugugcau

SEQ ID NO: 36954 - RNA, 13 nt, Homo sapiens
uaaauagcuuuuu

SEQ ID NO: 36955 - RNA, 23 nt, Homo sapiens
uaacaaugcuguauuuuaaaaga

SEQ ID NO: 36956 - RNA, 14 nt, Homo sapiens
ucaauauuucagau

SEQ ID NO: 36957 - RNA, 16 nt, Homo sapiens
ucaaugccccugaauu

SEQ ID NO: 36958 - RNA, 17 nt, Homo sapiens
ucaaugccccugaauuu

SEQ ID NO: 36959 - RNA, 19 nt, Homo sapiens
ucacuugucaauaaaaucc

SEQ ID NO: 36960 - RNA, 14 nt, Homo sapiens
ucagcgguuuauau

SEQ ID NO: 36961 - RNA, 22 nt, Homo sapiens
uaugaaacuuuuggaagguauu

SEQ ID NO: 36962 - RNA, 13 nt, Homo sapiens
uauauuguuugcu

SEQ ID NO: 36963 - RNA, 14 nt, Homo sapiens
uauauuguuugcua

SEQ ID NO: 36964 - RNA, 15 nt, Homo sapiens
uaugcuucuguuuua

SEQ ID NO: 36965 - RNA, 14 nt, Homo sapiens
uaugugcauauuuu

SEQ ID NO: 36966 - RNA, 20 nt, Homo sapiens
uauuguagcauccuggaaua

SEQ ID NO: 36967 - RNA, 16 nt, Homo sapiens
uauugaggcuuuaaaa

SEQ ID NO: 36968 - RNA, 16 nt, Homo sapiens
ucaacucauauuuuca

SEQ ID NO: 36969 - RNA, 15 nt, Homo sapiens
ucaaauccuugaaga

SEQ ID NO: 36970 - RNA, 14 nt, Homo sapiens
ucaacucauauuuu

SEQ ID NO: 36971 - RNA, 19 nt, Homo sapiens
uauuuuaauaauguuucaa

SEQ ID NO: 36972 - RNA, 17 nt, Homo sapiens
uauuuucaugcuguuca

SEQ ID NO: 36973 - RNA, 14 nt, Homo sapiens
uauuuuuaaacugu

SEQ ID NO: 36974 - RNA, 19 nt, Homo sapiens
uauuuaaccucuaaauucu

SEQ ID NO: 36975 - RNA, 19 nt, Homo sapiens
uauuucagauaaucacaau

SEQ ID NO: 36976 - RNA, 16 nt, Homo sapiens
uccacuuuccaauaaa

SEQ ID NO: 36977 - RNA, 16 nt, Homo sapiens
ucaugaauuaguuuua

SEQ ID NO: 36978 - RNA, 13 nt, Homo sapiens
ucauccacuuucc

SEQ ID NO: 36979 - RNA, 14 nt, Homo sapiens
ucauccacuuucca

SEQ ID NO: 36980 - RNA, 13 nt, Homo sapiens
ucaguuauuuuua

SEQ ID NO: 36981 - RNA, 20 nt, Homo sapiens
ucauucagauaugauucaaa

SEQ ID NO: 36982 - RNA, 16 nt, Homo sapiens
ugaagauacugaaaua

SEQ ID NO: 36983 - RNA, 17 nt, Homo sapiens
ugaacaggauauucuca

SEQ ID NO: 36984 - RNA, 18 nt, Homo sapiens
ugaacuagaguuuagcug

SEQ ID NO: 36985 - RNA, 14 nt, Homo sapiens
ugaauuaugaaacu

SEQ ID NO: 36986 - RNA, 21 nt, Homo sapiens
ugaaguccaagcauuuagaug

SEQ ID NO: 36987 - RNA, 15 nt, Homo sapiens
ugaagcaaaauuuuu

SEQ ID NO: 36988 - RNA, 17 nt, Homo sapiens
ugaaauauugacuuuuu

SEQ ID NO: 36989 - RNA, 12 nt, Homo sapiens
ugauacagaaaa

SEQ ID NO: 36990 - RNA, 12 nt, Homo sapiens
ugacucuuaaga

SEQ ID NO: 36991 - RNA, 20 nt, Homo sapiens
ugcccuuccccuucccacac

SEQ ID NO: 36992 - RNA, 19 nt, Homo sapiens
ugauggugguauguuuuca

SEQ ID NO: 36993 - RNA, 13 nt, Homo sapiens
uccuagucucuau

SEQ ID NO: 36994 - RNA, 14 nt, Homo sapiens
uccuagucucuauc

SEQ ID NO: 36995 - RNA, 19 nt, Homo sapiens
uccuagucucuaucauuaa

SEQ ID NO: 36996 - RNA, 15 nt, Homo sapiens
ucucauccacuuucc

SEQ ID NO: 36997 - RNA, 18 nt, Homo sapiens
ucugaaggguaauuauau

SEQ ID NO: 36998 - RNA, 16 nt, Homo sapiens
ucuugauaaauggcuu

SEQ ID NO: 36999 - RNA, 18 nt, Homo sapiens
ucuuauaucuauauuuua

SEQ ID NO: 37000 - RNA, 11 nt, Homo sapiens
gacuuuuuaug

SEQ ID NO: 37001 - RNA, 23 nt, Homo sapiens
gaaugauuaugaauuacauuugu

SEQ ID NO: 37002 - RNA, 17 nt, Homo sapiens
gaaagugacaagcucac

SEQ ID NO: 37003 - RNA, 16 nt, Homo sapiens
gacaugggacauuugc

SEQ ID NO: 37004 - RNA, 20 nt, Homo sapiens
gauuauauauauuuuuuucu

SEQ ID NO: 37005 - RNA, 21 nt, Homo sapiens
gauguuuagaaacacaacuau

SEQ ID NO: 37006 - RNA, 23 nt, Homo sapiens
gauguuuagaaacacaacuauau

SEQ ID NO: 37007 - RNA, 19 nt, Homo sapiens
gcacagugaucaaguuauu

SEQ ID NO: 37008 - RNA, 17 nt, Homo sapiens
gcacuaguauuucuaug

SEQ ID NO: 37009 - RNA, 12 nt, Homo sapiens
gcaacucugaag

SEQ ID NO: 37010 - RNA, 11 nt, Homo sapiens
gauacagaaaa

SEQ ID NO: 37011 - RNA, 21 nt, Homo sapiens
gauaugccuuuucccaacucc

SEQ ID NO: 37012 - RNA, 19 nt, Homo sapiens
gccugaguguugccuaauu

SEQ ID NO: 37013 - RNA, 12 nt, Homo sapiens
gcauucaaaugu

SEQ ID NO: 37014 - RNA, 14 nt, Homo sapiens
gcauucaaauguau

SEQ ID NO: 37015 - RNA, 15 nt, Homo sapiens
gcauuccaacuaucu

SEQ ID NO: 37016 - RNA, 21 nt, Homo sapiens
gcauccuagucucuaucauua

SEQ ID NO: 37017 - RNA, 14 nt, Homo sapiens
gcauccuagucucu

SEQ ID NO: 37018 - RNA, 12 nt, Homo sapiens
ggagccccaauu

SEQ ID NO: 37019 - RNA, 19 nt, Homo sapiens
ggaaugaagauacugaaau

SEQ ID NO: 37020 - RNA, 13 nt, Homo sapiens
gcuagaauuugau

SEQ ID NO: 37021 - RNA, 14 nt, Homo sapiens
gcuagaauuugaua

SEQ ID NO: 37022 - RNA, 15 nt, Homo sapiens
gcuagaauuugauau

SEQ ID NO: 37023 - RNA, 12 nt, Homo sapiens
gguaaccucauu

SEQ ID NO: 37024 - RNA, 20 nt, Homo sapiens
gggaaugaagauacugaaau

SEQ ID NO: 37025 - RNA, 13 nt, Homo sapiens
gggccgacggagc

SEQ ID NO: 37026 - RNA, 22 nt, Homo sapiens
gucuaccaaaaaucucaauauu

SEQ ID NO: 37027 - RNA, 14 nt, Homo sapiens
guaugaaaauguca

SEQ ID NO: 37028 - RNA, 19 nt, Homo sapiens
guauuucuaugaaauauua

SEQ ID NO: 37029 - RNA, 20 nt, Homo sapiens
guauuuuaaaagaaugauua

SEQ ID NO: 37030 - RNA, 15 nt, Homo sapiens
gugaaagguacuuca

SEQ ID NO: 37031 - RNA, 15 nt, Homo sapiens
gugcagauucuuuac

SEQ ID NO: 37032 - RNA, 17 nt, Homo sapiens
guuauuuuuaaacugua

SEQ ID NO: 37033 - RNA, 18 nt, Homo sapiens
guuauuuuuaauuugguu

SEQ ID NO: 37034 - RNA, 23 nt, Homo sapiens
guuauuuuuaauuugguuuucac

SEQ ID NO: 37035 - RNA, 16 nt, Homo sapiens
guugaagagguuuuaa

SEQ ID NO: 37036 - RNA, 16 nt, Homo sapiens
gaugcaguucugaaga

SEQ ID NO: 37037 - RNA, 17 nt, Homo sapiens
gaugguucccuugauga

SEQ ID NO: 37038 - RNA, 22 nt, Homo sapiens
gauguuuagaaacacaacuaua

SEQ ID NO: 37039 - RNA, 22 nt, Homo sapiens
gcacuaguauuucuaugaaaua

SEQ ID NO: 37040 - RNA, 13 nt, Homo sapiens
gcaccaaucauga

SEQ ID NO: 37041 - RNA, 13 nt, Homo sapiens
gcauuccaacuau

SEQ ID NO: 37042 - RNA, 14 nt, Homo sapiens
gcauuccaacuauc

SEQ ID NO: 37043 - RNA, 17 nt, Homo sapiens
gaucaguaugaaaaugu

SEQ ID NO: 37044 - RNA, 15 nt, Homo sapiens
gagacacacugaaga

SEQ ID NO: 37045 - RNA, 16 nt, Homo sapiens
gaagaagcaccaauca

SEQ ID NO: 37046 - RNA, 14 nt, Homo sapiens
gaacugaaaucaua

SEQ ID NO: 37047 - RNA, 23 nt, Homo sapiens
acacacaugaaguccaagcauuu

SEQ ID NO: 37048 - RNA, 20 nt, Homo sapiens
acaaggaugaauuaaguuuu

SEQ ID NO: 37049 - RNA, 21 nt, Homo sapiens
acaaggaugaauuaaguuuuu

SEQ ID NO: 37050 - RNA, 18 nt, Homo sapiens
aauuuugugaagcaaaau

SEQ ID NO: 37051 - RNA, 16 nt, Homo sapiens
aauuuuuucucuagga

SEQ ID NO: 37052 - RNA, 22 nt, Homo sapiens
aaucaugaauuaguuuuauaug

SEQ ID NO: 37053 - RNA, 16 nt, Homo sapiens
aauuugguuuucacau

SEQ ID NO: 37054 - RNA, 17 nt, Homo sapiens
aauuuaaauagcuuuuu

SEQ ID NO: 37055 - RNA, 17 nt, Homo sapiens
aauuacauuuguauaaa

SEQ ID NO: 37056 - RNA, 15 nt, Homo sapiens
aaugauuaugaauua

SEQ ID NO: 37057 - RNA, 21 nt, Homo sapiens
aaugauuaugaauuacauuug

SEQ ID NO: 37058 - RNA, 21 nt, Homo sapiens
aauguugacaugggacauuug

SEQ ID NO: 37059 - RNA, 15 nt, Homo sapiens
gaauuaguuuuauau

SEQ ID NO: 37060 - RNA, 13 nt, Homo sapiens
gaagauacugaaa

SEQ ID NO: 37061 - RNA, 14 nt, Homo sapiens
gaauaucaguuauu

SEQ ID NO: 37062 - RNA, 21 nt, Homo sapiens
cgcucgcuuccgcauccuagu

SEQ ID NO: 37063 - RNA, 16 nt, Homo sapiens
cguauugcauuuaauu

SEQ ID NO: 37064 - RNA, 17 nt, Homo sapiens
cuagucucuaucauuaa

SEQ ID NO: 37065 - RNA, 13 nt, Homo sapiens
cuaggaaauauuu

SEQ ID NO: 37066 - RNA, 17 nt, Homo sapiens
cuaguuguaauuuuuuu

SEQ ID NO: 37067 - RNA, 18 nt, Homo sapiens
cuauaaaccgaacugaug

SEQ ID NO: 37068 - RNA, 15 nt, Homo sapiens
cuauauuguuugcua

SEQ ID NO: 37069 - RNA, 22 nt, Homo sapiens
cgcuuccgcauccuagucucua

SEQ ID NO: 37070 - RNA, 15 nt, Homo sapiens
cugggagccccaauu

SEQ ID NO: 37071 - RNA, 17 nt, Homo sapiens
cugaauuuaaauagcuu

SEQ ID NO: 37072 - RNA, 18 nt, Homo sapiens
cucuaggaaauauuuauu

SEQ ID NO: 37073 - RNA, 21 nt, Homo sapiens
cucuaggaaauauuuauuuua

SEQ ID NO: 37074 - RNA, 21 nt, Homo sapiens
cuccaugaauaucaguuauuu

SEQ ID NO: 37075 - RNA, 20 nt, Homo sapiens
cuucuguuuuauaauuuugu

SEQ ID NO: 37076 - RNA, 15 nt, Homo sapiens
cuucagcgguuuaua

SEQ ID NO: 37077 - RNA, 14 nt, Homo sapiens
cuuccucccauuca

SEQ ID NO: 37078 - RNA, 15 nt, Homo sapiens
cuuccucccauucag

SEQ ID NO: 37079 - RNA, 17 nt, Homo sapiens
gaaauauuuauuuuaau

SEQ ID NO: 37080 - RNA, 17 nt, Homo sapiens
aauaucaguuauuuuua

SEQ ID NO: 37081 - RNA, 18 nt, Homo sapiens
aauaucaguuauuuuuaa

SEQ ID NO: 37082 - RNA, 19 nt, Homo sapiens
aauaucuccgucaacucau

SEQ ID NO: 37083 - RNA, 14 nt, Homo sapiens
aauauuauguuaaa

SEQ ID NO: 37084 - RNA, 21 nt, Homo sapiens
aauauuuauuuuaauaauguu

SEQ ID NO: 37085 - RNA, 15 nt, Homo sapiens
aauccuugaagauuu

SEQ ID NO: 37086 - RNA, 14 nt, Homo sapiens
gguuuggacaaaau

SEQ ID NO: 37087 - RNA, 17 nt, Homo sapiens
guaaacggucucucacu

SEQ ID NO: 37088 - RNA, 18 nt, Homo sapiens
guaaacggucucucacuu

SEQ ID NO: 37089 - RNA, 16 nt, Homo sapiens
gucaaauugugugaaa

SEQ ID NO: 37090 - RNA, 11 nt, Homo sapiens
guauguuuuca

SEQ ID NO: 37091 - RNA, 13 nt, Homo sapiens
guaugaaaauguc

SEQ ID NO: 37092 - RNA, 16 nt, Homo sapiens
ucuaaauucuuucauu

SEQ ID NO: 37093 - RNA, 13 nt, Homo sapiens
ucucauccacuuu

SEQ ID NO: 37094 - RNA, 17 nt, Homo sapiens
ucuguuuuauaauuuug

SEQ ID NO: 37095 - RNA, 12 nt, Homo sapiens
ugaaaaugucau

SEQ ID NO: 37096 - RNA, 17 nt, Homo sapiens
ugaaaaugucauuguuc

SEQ ID NO: 37097 - RNA, 21 nt, Homo sapiens
ugaacaguuguguuugaagca

SEQ ID NO: 37098 - RNA, 19 nt, Homo sapiens
ugaacuagaguuuagcugg

SEQ ID NO: 37099 - RNA, 22 nt, Homo sapiens
ugaauuuaaauagcuuuuuucu

SEQ ID NO: 37100 - RNA, 15 nt, Homo sapiens
ugaauuaugaaacuu

SEQ ID NO: 37101 - RNA, 15 nt, Homo sapiens
ugaagauacugaaau

SEQ ID NO: 37102 - RNA, 21 nt, Homo sapiens
ugaagauacugaaauaaacgu

SEQ ID NO: 37103 - RNA, 12 nt, Homo sapiens
ugauuaaguaau

SEQ ID NO: 37104 - RNA, 13 nt, Homo sapiens
ugauuaaguaaug

SEQ ID NO: 37105 - RNA, 12 nt, Homo sapiens
ugauucaaaugu

SEQ ID NO: 37106 - RNA, 17 nt, Homo sapiens
ugcauauuuuauuauag

SEQ ID NO: 37107 - RNA, 19 nt, Homo sapiens
ugauaugggucuugauaaa

SEQ ID NO: 37108 - RNA, 20 nt, Homo sapiens
ugagguaaccucauuaucag

SEQ ID NO: 37109 - RNA, 18 nt, Homo sapiens
ugccaugugcuaguaauu

SEQ ID NO: 37110 - RNA, 18 nt, Homo sapiens
ucuaggacugaauuauga

SEQ ID NO: 37111 - RNA, 12 nt, Homo sapiens
ucggacggcucc

SEQ ID NO: 37112 - RNA, 14 nt, Homo sapiens
ucgcuuccgcaucc

SEQ ID NO: 37113 - RNA, 15 nt, Homo sapiens
uccgucaacucauau

SEQ ID NO: 37114 - RNA, 16 nt, Homo sapiens
uccccaugauguuuag

SEQ ID NO: 37115 - RNA, 22 nt, Homo sapiens
uccaaacugacucuuaagaaga

SEQ ID NO: 37116 - RNA, 14 nt, Homo sapiens
uccaagcaaguauu

SEQ ID NO: 37117 - RNA, 19 nt, Homo sapiens
ucaugaauuaguuuuauau

SEQ ID NO: 37118 - RNA, 12 nt, Homo sapiens
ucauauuuucau

SEQ ID NO: 37119 - RNA, 12 nt, Homo sapiens
ucacuuguuuua

SEQ ID NO: 37120 - RNA, 13 nt, Homo sapiens
ucacuuguuuuau

SEQ ID NO: 37121 - RNA, 17 nt, Homo sapiens
uauuuacggaacucaaa

SEQ ID NO: 37122 - RNA, 22 nt, Homo sapiens
uauuuacggaacucaaauacgu

SEQ ID NO: 37123 - RNA, 14 nt, Homo sapiens
uaguuguaauuuuu

SEQ ID NO: 37124 - RNA, 16 nt, Homo sapiens
uauuuauuuuaauaau

SEQ ID NO: 37125 - RNA, 18 nt, Homo sapiens
uauuuuaauaauguuuca

SEQ ID NO: 37126 - RNA, 12 nt, Homo sapiens
uauuuuguuuca

SEQ ID NO: 37127 - RNA, 14 nt, Homo sapiens
uaucucauuuccaa

SEQ ID NO: 37128 - RNA, 15 nt, Homo sapiens
uagucucuaucauua

SEQ ID NO: 37129 - RNA, 16 nt, Homo sapiens
uagucucuaucauuaa

SEQ ID NO: 37130 - RNA, 17 nt, Homo sapiens
uagucucuaucauuaaa

SEQ ID NO: 37131 - RNA, 20 nt, Homo sapiens
uauggcacuaguauuucuau

SEQ ID NO: 37132 - RNA, 15 nt, Homo sapiens
uaugccuuuucccaa

SEQ ID NO: 37133 - RNA, 15 nt, Homo sapiens
uaugugcauauuuua

SEQ ID NO: 37134 - RNA, 12 nt, Homo sapiens
uaauguuucaaa

SEQ ID NO: 37135 - RNA, 14 nt, Homo sapiens
uaauuugguuuuca

SEQ ID NO: 37136 - RNA, 12 nt, Homo sapiens
uaaucuuucaca

SEQ ID NO: 37137 - RNA, 13 nt, Homo sapiens
uaaucuuucacag

SEQ ID NO: 37138 - RNA, 14 nt, Homo sapiens
uaauaauguuucaa

SEQ ID NO: 37139 - RNA, 24 nt, Homo sapiens
uaacaaugcuguauuuuaaaagaa

SEQ ID NO: 37140 - RNA, 17 nt, Homo sapiens
uaaauggaaguaaaugu

SEQ ID NO: 37141 - RNA, 16 nt, Homo sapiens
uaaauucuuucauuuu

SEQ ID NO: 37142 - RNA, 22 nt, Homo sapiens
uacgugggcauucaaauguauu

SEQ ID NO: 37143 - RNA, 11 nt, Homo sapiens
uacucuuauau

SEQ ID NO: 37144 - RNA, 16 nt, Homo sapiens
uacauggcuggagcua

SEQ ID NO: 37145 - RNA, 18 nt, Homo sapiens
uaccucugccucagaaaa

SEQ ID NO: 37146 - RNA, 13 nt, Homo sapiens
uaccaaaaaucuc

SEQ ID NO: 37147 - RNA, 14 nt, Homo sapiens
uaggaaauauuuau

SEQ ID NO: 37148 - RNA, 11 nt, Homo sapiens
gucuagugaaa

SEQ ID NO: 37149 - RNA, 14 nt, Homo sapiens
gugcauauuuuauu

SEQ ID NO: 37150 - RNA, 21 nt, Homo sapiens
guuauuuuuaauuugguuuuc

SEQ ID NO: 37151 - RNA, 18 nt, Homo sapiens
guugccuaauuuguuuuc

SEQ ID NO: 37152 - RNA, 20 nt, Homo sapiens
guuuuaggaauacauaaagu

SEQ ID NO: 37153 - RNA, 22 nt, Homo sapiens
guuuuauaugcuucuguuuuau

SEQ ID NO: 37154 - RNA, 15 nt, Homo sapiens
uaaaauaauuuuuau

SEQ ID NO: 37155 - RNA, 17 nt, Homo sapiens
uaaaauaauuuuuauau

SEQ ID NO: 37156 - RNA, 19 nt, Homo sapiens
cagcuguaugauucccagc

SEQ ID NO: 37157 - RNA, 15 nt, Homo sapiens
cagauaugauucaaa

SEQ ID NO: 37158 - RNA, 21 nt, Homo sapiens
cagaccuuugaacuagaguuu

SEQ ID NO: 37159 - RNA, 19 nt, Homo sapiens
cagucauucagauaugauu

SEQ ID NO: 37160 - RNA, 17 nt, Homo sapiens
caugaauuaguuuuaua

SEQ ID NO: 37161 - RNA, 12 nt, Homo sapiens
cauggaauugga

SEQ ID NO: 37162 - RNA, 13 nt, Homo sapiens
cauggaauuggag

SEQ ID NO: 37163 - RNA, 14 nt, Homo sapiens
ccaagcaaguauua

SEQ ID NO: 37164 - RNA, 15 nt, Homo sapiens
ccacagcuguaugau

SEQ ID NO: 37165 - RNA, 22 nt, Homo sapiens
cauuaaauggaaguaaauguug

SEQ ID NO: 37166 - RNA, 10 nt, Homo sapiens
cauuugguaa

SEQ ID NO: 37167 - RNA, 11 nt, Homo sapiens
cauuuaauuua

SEQ ID NO: 37168 - RNA, 18 nt, Homo sapiens
caugugcuaguaauugga

SEQ ID NO: 37169 - RNA, 19 nt, Homo sapiens
caugugcuaguaauuggaa

SEQ ID NO: 37170 - RNA, 18 nt, Homo sapiens
cauuauauuuauuacugu

SEQ ID NO: 37171 - RNA, 16 nt, Homo sapiens
cccagagcuacaggcc

SEQ ID NO: 37172 - RNA, 12 nt, Homo sapiens
ccuuuucccaac

SEQ ID NO: 37173 - RNA, 13 nt, Homo sapiens
cgaacugauguaa

SEQ ID NO: 37174 - RNA, 20 nt, Homo sapiens
cuccaugaauaucaguuauu

SEQ ID NO: 37175 - RNA, 20 nt, Homo sapiens
cucucacuuguuuuauuuaa

SEQ ID NO: 37176 - RNA, 17 nt, Homo sapiens
cugaaaacccuugccau

SEQ ID NO: 37177 - RNA, 21 nt, Homo sapiens
cugaguguugccuaauuuguu

SEQ ID NO: 37178 - RNA, 18 nt, Homo sapiens
cugauaugggucuugaua

SEQ ID NO: 37179 - RNA, 19 nt, Homo sapiens
cuugaugaagaaguugaua

SEQ ID NO: 37180 - RNA, 13 nt, Homo sapiens
cuucuguuuuaua

SEQ ID NO: 37181 - RNA, 16 nt, Homo sapiens
gaaauauuauguuaaa

SEQ ID NO: 37182 - RNA, 14 nt, Homo sapiens
cuaguuguaauuuu

SEQ ID NO: 37183 - RNA, 15 nt, Homo sapiens
cuaguuguaauuuuu

SEQ ID NO: 37184 - RNA, 14 nt, Homo sapiens
uggaaguaaauguu

SEQ ID NO: 37185 - RNA, 13 nt, Homo sapiens
uggagcuagaauu

SEQ ID NO: 37186 - RNA, 15 nt, Homo sapiens
ugugcauauuuuauu

SEQ ID NO: 37187 - RNA, 14 nt, Homo sapiens
uguguuugaagcac

SEQ ID NO: 37188 - RNA, 14 nt, Homo sapiens
ugugaacccaaagu

SEQ ID NO: 37189 - RNA, 17 nt, Homo sapiens
uguauaaaauaauuuuu

SEQ ID NO: 37190 - RNA, 18 nt, Homo sapiens
uguauaaaauaauuuuua

SEQ ID NO: 37191 - RNA, 20 nt, Homo sapiens
ugucaauaaaauccauacau

SEQ ID NO: 37192 - RNA, 15 nt, Homo sapiens
ugggucgccggcauc

SEQ ID NO: 37193 - RNA, 16 nt, Homo sapiens
ugggucgccggcaucu

SEQ ID NO: 37194 - RNA, 19 nt, Homo sapiens
accaaaaaucucaauauuu

SEQ ID NO: 37195 - RNA, 16 nt, Homo sapiens
acaugggacauuugcu

SEQ ID NO: 37196 - RNA, 16 nt, Homo sapiens
uugcauuuaauuuauu

SEQ ID NO: 37197 - RNA, 15 nt, Homo sapiens
acaggauauucucac

SEQ ID NO: 37198 - RNA, 15 nt, Homo sapiens
uucuaggacugaauu

SEQ ID NO: 37199 - RNA, 14 nt, Homo sapiens
uugaagagguuuua

SEQ ID NO: 37200 - RNA, 18 nt, Homo sapiens
uucaugcuguucaugaaa

SEQ ID NO: 37201 - RNA, 14 nt, Homo sapiens
uuagggguagcauu

SEQ ID NO: 37202 - RNA, 15 nt, Homo sapiens
uuaugauuaaguaau

SEQ ID NO: 37203 - RNA, 13 nt, Homo sapiens
uuauuguagcauc

SEQ ID NO: 37204 - RNA, 13 nt, Homo sapiens
uucacauuggaaa

SEQ ID NO: 37205 - RNA, 14 nt, Homo sapiens
uucacauuggaaac

SEQ ID NO: 37206 - RNA, 15 nt, Homo sapiens
uucacauuggaaaca

SEQ ID NO: 37207 - RNA, 14 nt, Homo sapiens
uuaaccucuaaauu

SEQ ID NO: 37208 - RNA, 20 nt, Homo sapiens
uuaaguuuuuuuuuaaaaaa

SEQ ID NO: 37209 - RNA, 22 nt, Homo sapiens
uguuuuauuuaaccucuaaauu

SEQ ID NO: 37210 - RNA, 18 nt, Homo sapiens
uuaaauggaaguaaaugu

SEQ ID NO: 37211 - RNA, 18 nt, Homo sapiens
uuacuguaagaaaauauc

SEQ ID NO: 37212 - RNA, 20 nt, Homo sapiens
agauacugaaauaaacgucu

SEQ ID NO: 37213 - RNA, 15 nt, Homo sapiens
acuguaagaaaauau

SEQ ID NO: 37214 - RNA, 13 nt, Homo sapiens
acuuuccaauaaa

SEQ ID NO: 37215 - RNA, 15 nt, Homo sapiens
acuuuccaauaaaga

SEQ ID NO: 37216 - RNA, 21 nt, Homo sapiens
acuuuuggaagguauuuaaua

SEQ ID NO: 37217 - RNA, 16 nt, Homo sapiens
agcauuccaacuaucu

SEQ ID NO: 37218 - RNA, 21 nt, Homo sapiens
agauuuaccacuuguguuuug

SEQ ID NO: 37219 - RNA, 13 nt, Homo sapiens
agccuccagcugc

SEQ ID NO: 37220 - RNA, 18 nt, Homo sapiens
uuuaauagguuuggacaa

SEQ ID NO: 37221 - RNA, 19 nt, Homo sapiens
uuuaauagguuuggacaaa

SEQ ID NO: 37222 - RNA, 13 nt, Homo sapiens
uuuagcuggaaaa

SEQ ID NO: 37223 - RNA, 14 nt, Homo sapiens
uuguauaaaauaau

SEQ ID NO: 37224 - RNA, 17 nt, Homo sapiens
uuuaaaaaaaaaacgua

SEQ ID NO: 37225 - RNA, 22 nt, Homo sapiens
accgcagggugaacugcagcga

SEQ ID NO: 37226 - RNA, 18 nt, Homo sapiens
uuugcucauggaauugga

SEQ ID NO: 37227 - RNA, 10 nt, Homo sapiens
uuucugaaau

SEQ ID NO: 37228 - RNA, 22 nt, Homo sapiens
uuugugaagcaaaauuuuuucu

SEQ ID NO: 37229 - RNA, 13 nt, Homo sapiens
accucauggaauu

SEQ ID NO: 37230 - RNA, 11 nt, Homo sapiens
accucuaaauu

SEQ ID NO: 37231 - RNA, 21 nt, Homo sapiens
accugggaaagggcuguuaua

SEQ ID NO: 37232 - RNA, 22 nt, Homo sapiens
acugccuucucaacuccaaacu

SEQ ID NO: 37233 - RNA, 15 nt, Homo sapiens
acugcacaucaaaau

SEQ ID NO: 37234 - RNA, 12 nt, Homo sapiens
acugacucuuaa

SEQ ID NO: 37235 - RNA, 21 nt, Homo sapiens
acuagaguuuagcuggaaaag

SEQ ID NO: 37236 - RNA, 15 nt, Homo sapiens
acucuuauaucuaua

SEQ ID NO: 37237 - RNA, 14 nt, Homo sapiens
acugaaaucauacu

SEQ ID NO: 37238 - RNA, 20 nt, Homo sapiens
acguauugcauuuaauuuau

SEQ ID NO: 37239 - RNA, 14 nt, Homo sapiens
acgucuuaaauauu

SEQ ID NO: 37240 - RNA, 18 nt, Homo sapiens
aguauuucuaugaaauau

SEQ ID NO: 37241 - RNA, 18 nt, Homo sapiens
agucucuaucauuaaagu

SEQ ID NO: 37242 - RNA, 16 nt, Homo sapiens
agucauucagauauga

SEQ ID NO: 37243 - RNA, 17 nt, Homo sapiens
agucauucagauaugau

SEQ ID NO: 37244 - RNA, 20 nt, Homo sapiens
aggucuaccaaaaaucucaa

SEQ ID NO: 37245 - RNA, 21 nt, Homo sapiens
agggagccgguccuugcugca

SEQ ID NO: 37246 - RNA, 17 nt, Homo sapiens
agcuacuuauuguagca

SEQ ID NO: 37247 - RNA, 13 nt, Homo sapiens
agcgguuuauaua

SEQ ID NO: 37248 - RNA, 16 nt, Homo sapiens
agcuggaaaaguaugu

SEQ ID NO: 37249 - RNA, 17 nt, Homo sapiens
agcuggaaaaguauguu

SEQ ID NO: 37250 - RNA, 20 nt, Homo sapiens
agcuuuuuucucugauacag

SEQ ID NO: 37251 - RNA, 14 nt, Homo sapiens
aggaaauauuuauu

SEQ ID NO: 37252 - RNA, 17 nt, Homo sapiens
aggaauacauaaaguau

SEQ ID NO: 37253 - RNA, 15 nt, Homo sapiens
auauuuuuuuuuuua

SEQ ID NO: 37254 - RNA, 16 nt, Homo sapiens
auauuuuuuuuuuuaa

SEQ ID NO: 37255 - RNA, 17 nt, Homo sapiens
auauuuuuuuuuuuaaa

SEQ ID NO: 37256 - RNA, 18 nt, Homo sapiens
auauuuuuuuuuuuaaaa

SEQ ID NO: 37257 - RNA, 20 nt, Homo sapiens
auaugcuucuguuuuauaau

SEQ ID NO: 37258 - RNA, 23 nt, Homo sapiens
auauucucacagcuccaagaauu

SEQ ID NO: 37259 - RNA, 16 nt, Homo sapiens
aucaguaugaaaaugu

SEQ ID NO: 37260 - RNA, 17 nt, Homo sapiens
aucaguaugaaaauguc

SEQ ID NO: 37261 - RNA, 18 nt, Homo sapiens
aucaguuauuuuuaaacu

SEQ ID NO: 37262 - RNA, 23 nt, Homo sapiens
aucauacuucuuaggguuaugau

SEQ ID NO: 37263 - RNA, 21 nt, Homo sapiens
augaauuaaguuuuuuuuuaa

SEQ ID NO: 37264 - RNA, 15 nt, Homo sapiens
augaauuacauuugu

SEQ ID NO: 37265 - RNA, 14 nt, Homo sapiens
aucucaauauuuca

SEQ ID NO: 37266 - RNA, 13 nt, Homo sapiens
aucuauauuuuac

SEQ ID NO: 37267 - RNA, 12 nt, Homo sapiens
aucucaauauuu

SEQ ID NO: 37268 - RNA, 11 nt, Homo sapiens
aucucaauauu

SEQ ID NO: 37269 - RNA, 19 nt, Homo sapiens
auccacuuuccaauaaaga

SEQ ID NO: 37270 - RNA, 16 nt, Homo sapiens
auccuggaauaucucc

SEQ ID NO: 37271 - RNA, 12 nt, Homo sapiens
aguugaucagcu

SEQ ID NO: 37272 - RNA, 17 nt, Homo sapiens
aguuuuauaugcuucug

SEQ ID NO: 37273 - RNA, 21 nt, Homo sapiens
aguuuuauaugcuucuguuuu

SEQ ID NO: 37274 - RNA, 19 nt, Homo sapiens
auaaaauccauacauuugu

SEQ ID NO: 37275 - RNA, 17 nt, Homo sapiens
aguuauuuuuaauuugg

SEQ ID NO: 37276 - RNA, 21 nt, Homo sapiens
agugaucaaguuauuuuuaau

SEQ ID NO: 37277 - RNA, 14 nt, Homo sapiens
auacauaaaguaug

SEQ ID NO: 37278 - RNA, 20 nt, Homo sapiens
auaaauguugacaugggaca

SEQ ID NO: 37279 - RNA, 21 nt, Homo sapiens
auacuucuuaggguuaugauu

SEQ ID NO: 37280 - RNA, 18 nt, Homo sapiens
auacugaaauaaacgucu

SEQ ID NO: 37281 - RNA, 13 nt, Homo sapiens
auaugauucaaau

SEQ ID NO: 37282 - RNA, 15 nt, Homo sapiens
auaugauucaaaugu

SEQ ID NO: 37283 - RNA, 11 nt, Homo sapiens
cacuaguauuu

SEQ ID NO: 37284 - RNA, 14 nt, Homo sapiens
cacuaguauuucua

SEQ ID NO: 37285 - RNA, 21 nt, Homo sapiens
cacaucaaaauaugccccauu

SEQ ID NO: 37286 - RNA, 21 nt, Homo sapiens
cacauuccugaacaggauauu

SEQ ID NO: 37287 - RNA, 17 nt, Homo sapiens
cacaagacugcacauca

SEQ ID NO: 37288 - RNA, 15 nt, Homo sapiens
caaugcuguauuuua

SEQ ID NO: 37289 - RNA, 17 nt, Homo sapiens
caagcauuuagauguau

SEQ ID NO: 37290 - RNA, 21 nt, Homo sapiens
caauagucaaauugugugaaa

SEQ ID NO: 37291 - RNA, 20 nt, Homo sapiens
caaauacgugggcauucaaa

SEQ ID NO: 37292 - RNA, 23 nt, Homo sapiens
caaauccuugaagauuuaccacu

SEQ ID NO: 37293 - RNA, 22 nt, Homo sapiens
caaaccagagccugaguguugc

SEQ ID NO: 37294 - RNA, 21 nt, Homo sapiens
auuuuuaaacuguaaagcuuu

SEQ ID NO: 37295 - RNA, 16 nt, Homo sapiens
auuuuuuucugaaauu

SEQ ID NO: 37296 - RNA, 15 nt, Homo sapiens
auuaugaauuacauu

SEQ ID NO: 37297 - RNA, 13 nt, Homo sapiens
auuaaguaaugau

SEQ ID NO: 37298 - RNA, 20 nt, Homo sapiens
auuaaauggaaguaaauguu

SEQ ID NO: 37299 - RNA, 15 nt, Homo sapiens
auucuuccucccauu

SEQ ID NO: 37300 - RNA, 17 nt, Homo sapiens
auuccaacuaucucauu

SEQ ID NO: 37301 - RNA, 16 nt, Homo sapiens
auucaacaucuaguga

SEQ ID NO: 37302 - RNA, 20 nt, Homo sapiens
auucaaugccccugaauuua

SEQ ID NO: 37303 - RNA, 17 nt, Homo sapiens
auugaggcuuuaaaacu

SEQ ID NO: 37304 - RNA, 17 nt, Homo sapiens
auugcauuuaauuuauu

SEQ ID NO: 37305 - RNA, 18 nt, Homo sapiens
auugcauuuaauuuauug

SEQ ID NO: 37306 - RNA, 23 nt, Homo sapiens
auuguuugcuaagcauuccaacu

SEQ ID NO: 37307 - RNA, 22 nt, Homo sapiens
auuuaaccucuaaauucuuuca

SEQ ID NO: 37308 - RNA, 13 nt, Homo sapiens
auuucuaugaaau

SEQ ID NO: 37309 - RNA, 11 nt, Homo sapiens
auuuauuuuaa

SEQ ID NO: 37310 - RNA, 14 nt, Homo sapiens
auuuuacauaaauu

SEQ ID NO: 37311 - RNA, 22 nt, Homo sapiens
auuuuagggguagcauuugugu

SEQ ID NO: 37312 - RNA, 21 nt, Homo sapiens
auuugaaauauugacuuuuua

SEQ ID NO: 37313 - RNA, 19 nt, Homo sapiens
auuuacggaacucaaauac

SEQ ID NO: 37314 - RNA, 22 nt, Homo sapiens
auguauuacaguggggaaugaa

SEQ ID NO: 37315 - RNA, 17 nt, Homo sapiens
auggcacuaguauuucu

SEQ ID NO: 37316 - RNA, 18 nt, Homo sapiens
auggcacuaguauuucua

SEQ ID NO: 37317 - RNA, 23 nt, Homo sapiens
auguuucaaacauauauaacaau

SEQ ID NO: 37318 - RNA, 19 nt, Homo sapiens
auguuuucaggcuagaugu

SEQ ID NO: 37319 - RNA, 14 nt, Homo sapiens
auuaaaguucuagu

SEQ ID NO: 37320 - RNA, 14 nt, Homo sapiens
augcuguauuuuaa

SEQ ID NO: 37321 - RNA, 17 nt, Homo sapiens
augcuucuguuuuauaa

SEQ ID NO: 37322 - RNA, 13 nt, Homo sapiens
auggaauuggagc

SEQ ID NO: 37323 - RNA, 20 nt, Homo sapiens
augauguuuagaaacacaac

SEQ ID NO: 37324 - RNA, 14 nt, Homo sapiens
ccuugaugaagaag

SEQ ID NO: 37325 - RNA, 11 nt, Homo sapiens
cgacggagccg

SEQ ID NO: 37326 - RNA, 15 nt, Homo sapiens
cgcauccuagucucu

SEQ ID NO: 37327 - RNA, 15 nt, Homo sapiens
ccgguccuugcugca

SEQ ID NO: 37328 - RNA, 16 nt, Homo sapiens
ccgguccuugcugcac

SEQ ID NO: 37329 - RNA, 16 nt, Homo sapiens
cccugaauuuaaauag

SEQ ID NO: 37330 - RNA, 13 nt, Homo sapiens
ccaagcaaguauu

SEQ ID NO: 37331 - RNA, 21 nt, Homo sapiens
ccaaagugugacucauuaaau

SEQ ID NO: 37332 - RNA, 11 nt, Homo sapiens
cauuugguaag

SEQ ID NO: 37333 - RNA, 18 nt, Homo sapiens
cauuuccaagcaaguauu

SEQ ID NO: 37334 - RNA, 16 nt, Homo sapiens
ccauucaggaugccca

SEQ ID NO: 37335 - RNA, 17 nt, Homo sapiens
ccauucaggaugcccac

SEQ ID NO: 37336 - RNA, 17 nt, Homo sapiens
cagucugacuguuucca

SEQ ID NO: 37337 - RNA, 19 nt, Homo sapiens
cagucugacuguuuccauc

SEQ ID NO: 37338 - RNA, 21 nt, Homo sapiens
caguaugaaaaugucauuguu

SEQ ID NO: 37339 - RNA, 23 nt, Homo sapiens
cagugaucaaguuauuuuuaauu

SEQ ID NO: 37340 - RNA, 14 nt, Homo sapiens
caggcuagauguau

SEQ ID NO: 37341 - RNA, 22 nt, Homo sapiens
cauccuagucucuaucauuaaa

SEQ ID NO: 37342 - RNA, 13 nt, Homo sapiens
cauacauuugugu

SEQ ID NO: 37343 - RNA, 16 nt, Homo sapiens
caugcugucuacacua

SEQ ID NO: 37344 - RNA, 18 nt, Homo sapiens
caugaaguccaagcauuu

SEQ ID NO: 37345 - RNA, 20 nt, Homo sapiens
caugugcuaguaauuggaaa

SEQ ID NO: 37346 - RNA, 22 nt, Homo sapiens
auuaaguuuuuuuuuaaaaaag

SEQ ID NO: 37347 - RNA, 12 nt, Homo sapiens
auuaguuuuaua

SEQ ID NO: 37348 - RNA, 14 nt, Homo sapiens
auucuuccucccau

SEQ ID NO: 37349 - RNA, 18 nt, Homo sapiens
auuacauuuguauaaaau

SEQ ID NO: 37350 - RNA, 15 nt, Homo sapiens
auuauauuuauuacu

SEQ ID NO: 37351 - RNA, 22 nt, Homo sapiens
auucagauaugauucaaauguc

SEQ ID NO: 37352 - RNA, 19 nt, Homo sapiens
auuaugaauuacauuugua

SEQ ID NO: 37353 - RNA, 16 nt, Homo sapiens
auuuccaagcaaguau

SEQ ID NO: 37354 - RNA, 15 nt, Homo sapiens
auuugguuuucacau

SEQ ID NO: 37355 - RNA, 13 nt, Homo sapiens
auuuguauaaaau

SEQ ID NO: 37356 - RNA, 18 nt, Homo sapiens
auuuacggaacucaaaua

SEQ ID NO: 37357 - RNA, 18 nt, Homo sapiens
auuuaguauuuuguuuca

SEQ ID NO: 37358 - RNA, 15 nt, Homo sapiens
auuuauugaggcuuu

SEQ ID NO: 37359 - RNA, 13 nt, Homo sapiens
auugcauuuaauu

SEQ ID NO: 37360 - RNA, 14 nt, Homo sapiens
auugucuagugaaa

SEQ ID NO: 37361 - RNA, 16 nt, Homo sapiens
auuuucaugcuguuca

SEQ ID NO: 37362 - RNA, 13 nt, Homo sapiens
auuuuacauaaau

SEQ ID NO: 37363 - RNA, 23 nt, Homo sapiens
cacauuccugaacaggauauucu

SEQ ID NO: 37364 - RNA, 20 nt, Homo sapiens
caaugccccugaauuuaaau

SEQ ID NO: 37365 - RNA, 21 nt, Homo sapiens
caaugccccugaauuuaaaua

SEQ ID NO: 37366 - RNA, 17 nt, Homo sapiens
cacagaccuuugaacua

SEQ ID NO: 37367 - RNA, 15 nt, Homo sapiens
cacuaguauuucuau

SEQ ID NO: 37368 - RNA, 22 nt, Homo sapiens
cacuguggguagacacacauga

SEQ ID NO: 37369 - RNA, 23 nt, Homo sapiens
cacuguggguagacacacaugaa

SEQ ID NO: 37370 - RNA, 22 nt, Homo sapiens
cagcacagccucuuagaugcag

SEQ ID NO: 37371 - RNA, 23 nt, Homo sapiens
cagcacagccucuuagaugcagu

SEQ ID NO: 37372 - RNA, 19 nt, Homo sapiens
agugaucaaguuauuuuua

SEQ ID NO: 37373 - RNA, 13 nt, Homo sapiens
aguauuucuauga

SEQ ID NO: 37374 - RNA, 14 nt, Homo sapiens
auaaaauaauuuuu

SEQ ID NO: 37375 - RNA, 13 nt, Homo sapiens
aguuuuauaugcu

SEQ ID NO: 37376 - RNA, 22 nt, Homo sapiens
auaauuuugugaagcaaaauuu

SEQ ID NO: 37377 - RNA, 23 nt, Homo sapiens
auaauuuugugaagcaaaauuuu

SEQ ID NO: 37378 - RNA, 14 nt, Homo sapiens
auaauuuuuauauu

SEQ ID NO: 37379 - RNA, 23 nt, Homo sapiens
auaacuggaaacuucagcgguuu

SEQ ID NO: 37380 - RNA, 19 nt, Homo sapiens
auaaacgucuuaaauauuc

SEQ ID NO: 37381 - RNA, 19 nt, Homo sapiens
auauaguuacccaaauuaa

SEQ ID NO: 37382 - RNA, 17 nt, Homo sapiens
auaucaguuauuuuuaa

SEQ ID NO: 37383 - RNA, 18 nt, Homo sapiens
auaucaguuauuuuuaaa

SEQ ID NO: 37384 - RNA, 17 nt, Homo sapiens
auaucuauauuuuacau

SEQ ID NO: 37385 - RNA, 20 nt, Homo sapiens
auaucuccgucaacucauau

SEQ ID NO: 37386 - RNA, 21 nt, Homo sapiens
auaucuccgucaacucauauu

SEQ ID NO: 37387 - RNA, 18 nt, Homo sapiens
auacgugggcauucaaau

SEQ ID NO: 37388 - RNA, 20 nt, Homo sapiens
auacgugggcauucaaaugu

SEQ ID NO: 37389 - RNA, 22 nt, Homo sapiens
auggcuuccuggcaauagucaa

SEQ ID NO: 37390 - RNA, 14 nt, Homo sapiens
auguauguacuuca

SEQ ID NO: 37391 - RNA, 18 nt, Homo sapiens
auguauguacuucaugcu

SEQ ID NO: 37392 - RNA, 20 nt, Homo sapiens
augugcauauuuuauuauag

SEQ ID NO: 37393 - RNA, 16 nt, Homo sapiens
augcuucuguuuuaua

SEQ ID NO: 37394 - RNA, 18 nt, Homo sapiens
auggcuggagcuagaauu

SEQ ID NO: 37395 - RNA, 20 nt, Homo sapiens
augaauuaaguuuuuuuuua

SEQ ID NO: 37396 - RNA, 22 nt, Homo sapiens
augaauuaaguuuuuuuuuaaa

SEQ ID NO: 37397 - RNA, 12 nt, Homo sapiens
augaauuacauu

SEQ ID NO: 37398 - RNA, 14 nt, Homo sapiens
augaagauacugaa

SEQ ID NO: 37399 - RNA, 14 nt, Homo sapiens
augaaaaugucauu

SEQ ID NO: 37400 - RNA, 14 nt, Homo sapiens
augaaauauuaugu

SEQ ID NO: 37401 - RNA, 18 nt, Homo sapiens
augccccauucaacaucu

SEQ ID NO: 37402 - RNA, 13 nt, Homo sapiens
augcuguauuuua

SEQ ID NO: 37403 - RNA, 17 nt, Homo sapiens
augaucaguaugaaaau

SEQ ID NO: 37404 - RNA, 15 nt, Homo sapiens
auccuggaauaucuc

SEQ ID NO: 37405 - RNA, 21 nt, Homo sapiens
auccuagucucuaucauuaaa

SEQ ID NO: 37406 - RNA, 14 nt, Homo sapiens
aucuccgucaacuc

SEQ ID NO: 37407 - RNA, 17 nt, Homo sapiens
aucaugaauuaguuuua

SEQ ID NO: 37408 - RNA, 13 nt, Homo sapiens
aucauuaaaguuc

SEQ ID NO: 37409 - RNA, 13 nt, Homo sapiens
auauuuauuuuaa

SEQ ID NO: 37410 - RNA, 16 nt, Homo sapiens
auauuauguuaaaacu

SEQ ID NO: 37411 - RNA, 21 nt, Homo sapiens
auaugcuucuguuuuauaauu

SEQ ID NO: 37412 - RNA, 10 nt, Homo sapiens
auauuuuuuu

SEQ ID NO: 37413 - RNA, 13 nt, Homo sapiens
auauuugaaauau

SEQ ID NO: 37414 - RNA, 15 nt, Homo sapiens
auauuuuacauaaau

SEQ ID NO: 37415 - RNA, 14 nt, Homo sapiens
aaggguaauuauau

SEQ ID NO: 37416 - RNA, 19 nt, Homo sapiens
aaggcagcucuaaauguca

SEQ ID NO: 37417 - RNA, 14 nt, Homo sapiens
aagcaaguauuaga

SEQ ID NO: 37418 - RNA, 17 nt, Homo sapiens
aagagguuuuaaagcuu

SEQ ID NO: 37419 - RNA, 16 nt, Homo sapiens
aagaguuccuucugcu

SEQ ID NO: 37420 - RNA, 17 nt, Homo sapiens
aagagccggagccucca

SEQ ID NO: 37421 - RNA, 18 nt, Homo sapiens
aagagccggagccuccag

SEQ ID NO: 37422 - RNA, 14 nt, Homo sapiens
aagaaguugauaug

SEQ ID NO: 37423 - RNA, 13 nt, Homo sapiens
aagacaaaaagcu

SEQ ID NO: 37424 - RNA, 14 nt, Homo sapiens
aagacaaaaagcua

SEQ ID NO: 37425 - RNA, 16 nt, Homo sapiens
aagacugcacaucaaa

SEQ ID NO: 37426 - RNA, 15 nt, Homo sapiens
aacucauauuuucau

SEQ ID NO: 37427 - RNA, 24 nt, Homo sapiens
aacguauugcauuuaauuuauuga

SEQ ID NO: 37428 - RNA, 14 nt, Homo sapiens
aacucaaauacgug

SEQ ID NO: 37429 - RNA, 14 nt, Homo sapiens
aagaaugauuauga

SEQ ID NO: 37430 - RNA, 12 nt, Homo sapiens
aagacaaaaagc

SEQ ID NO: 37431 - RNA, 13 nt, Homo sapiens
aagaagacugcau

SEQ ID NO: 37432 - RNA, 17 nt, Homo sapiens
aagauacugaaauaaac

SEQ ID NO: 37433 - RNA, 14 nt, Homo sapiens
aagauuuaccacuu

SEQ ID NO: 37434 - RNA, 20 nt, Homo sapiens
aaguaaacggucucucacuu

SEQ ID NO: 37435 - RNA, 20 nt, Homo sapiens
aaggcagcucuaaaugucaa

SEQ ID NO: 37436 - RNA, 19 nt, Homo sapiens
aagccuuggggcugaugca

SEQ ID NO: 37437 - RNA, 13 nt, Homo sapiens
aagcauuuagaug

SEQ ID NO: 37438 - RNA, 12 nt, Homo sapiens
aaguucuaguga

SEQ ID NO: 37439 - RNA, 15 nt, Homo sapiens
aaguccaagcauuua

SEQ ID NO: 37440 - RNA, 20 nt, Homo sapiens
aaguccaagcauuuagaugu

SEQ ID NO: 37441 - RNA, 14 nt, Homo sapiens
aaguaaugauaacu

SEQ ID NO: 37442 - RNA, 14 nt, Homo sapiens
aagguacuucaaau

SEQ ID NO: 37443 - RNA, 11 nt, Homo sapiens
acagaaaaguu

SEQ ID NO: 37444 - RNA, 16 nt, Homo sapiens
acagccucuuagaugc

SEQ ID NO: 37445 - RNA, 17 nt, Homo sapiens
acagccucuuagaugca

SEQ ID NO: 37446 - RNA, 20 nt, Homo sapiens
acaugaaguccaagcauuua

SEQ ID NO: 37447 - RNA, 22 nt, Homo sapiens
acauauauaacaaugcuguauu

SEQ ID NO: 37448 - RNA, 18 nt, Homo sapiens
acauuugcucauggaauu

SEQ ID NO: 37449 - RNA, 15 nt, Homo sapiens
aauaauuuuuauauu

SEQ ID NO: 37450 - RNA, 22 nt, Homo sapiens
aauaauuuuuauauuugaaaua

SEQ ID NO: 37451 - RNA, 16 nt, Homo sapiens
aaguuauuuuuaauuu

SEQ ID NO: 37452 - RNA, 17 nt, Homo sapiens
aauauuauguuaaaacu

SEQ ID NO: 37453 - RNA, 12 nt, Homo sapiens
aaucaugaauua

SEQ ID NO: 37454 - RNA, 19 nt, Homo sapiens
aauacucuuauaucuauau

SEQ ID NO: 37455 - RNA, 20 nt, Homo sapiens
aauacucuuauaucuauauu

SEQ ID NO: 37456 - RNA, 18 nt, Homo sapiens
aauagguuuggacaaaau

SEQ ID NO: 37457 - RNA, 19 nt, Homo sapiens
aagucacauuccugaacag

SEQ ID NO: 37458 - RNA, 16 nt, Homo sapiens
aaguccaagcauuuag

SEQ ID NO: 37459 - RNA, 14 nt, Homo sapiens
aauuggagcucgug

SEQ ID NO: 37460 - RNA, 15 nt, Homo sapiens
aauuuaguauuuugu

SEQ ID NO: 37461 - RNA, 19 nt, Homo sapiens
aauuuccugggagcuuuug

SEQ ID NO: 37462 - RNA, 18 nt, Homo sapiens
aauuugauaugugaacag

SEQ ID NO: 37463 - RNA, 23 nt, Homo sapiens
aauuugguuuucacauuggaaac

SEQ ID NO: 37464 - RNA, 17 nt, Homo sapiens
aauuuuuauauuugaaa

SEQ ID NO: 37465 - RNA, 13 nt, Homo sapiens
aauguuucaaaca

SEQ ID NO: 37466 - RNA, 14 nt, Homo sapiens
aauguuucaaacau

SEQ ID NO: 37467 - RNA, 16 nt, Homo sapiens
aauuacauuuguauaa

SEQ ID NO: 37468 - RNA, 19 nt, Homo sapiens
aaugccccugaauuuaaau

SEQ ID NO: 37469 - RNA, 12 nt, Homo sapiens
aauggaauacuc

SEQ ID NO: 37470 - RNA, 22 nt, Homo sapiens
aaugagagacacacugaagaag

SEQ ID NO: 37471 - RNA, 22 nt, Homo sapiens
aaugauaacuggaaacuucagc

SEQ ID NO: 37472 - RNA, 17 nt, Homo sapiens
aaugaagauacugaaau

SEQ ID NO: 37473 - RNA, 18 nt, Homo sapiens
acugauaugggucuugau

SEQ ID NO: 37474 - RNA, 17 nt, Homo sapiens
acugcauuauauuuauu

SEQ ID NO: 37475 - RNA, 18 nt, Homo sapiens
acugcauuauauuuauua

SEQ ID NO: 37476 - RNA, 17 nt, Homo sapiens
acugccuucucaacucc

SEQ ID NO: 37477 - RNA, 15 nt, Homo sapiens
acuaucucauuucca

SEQ ID NO: 37478 - RNA, 20 nt, Homo sapiens
acucuuauaucuauauuuua

SEQ ID NO: 37479 - RNA, 15 nt, Homo sapiens
acugaaauaaacguc

SEQ ID NO: 37480 - RNA, 19 nt, Homo sapiens
acucugaaggguaauuaua

SEQ ID NO: 37481 - RNA, 21 nt, Homo sapiens
acucuuaagaagacugcauua

SEQ ID NO: 37482 - RNA, 15 nt, Homo sapiens
acuugucaauaaaau

SEQ ID NO: 37483 - RNA, 14 nt, Homo sapiens
acuuuccaauaaag

SEQ ID NO: 37484 - RNA, 17 nt, Homo sapiens
agaagaugguaccacca

SEQ ID NO: 37485 - RNA, 19 nt, Homo sapiens
acuuuuggaagguauuuaa

SEQ ID NO: 37486 - RNA, 13 nt, Homo sapiens
acuucaaauccuu

SEQ ID NO: 37487 - RNA, 20 nt, Homo sapiens
agaaaaguugaauuuuacau

SEQ ID NO: 37488 - RNA, 13 nt, Homo sapiens
acgucuuaaauau

SEQ ID NO: 37489 - RNA, 20 nt, Homo sapiens
accugggaaagggcuguuau

SEQ ID NO: 37490 - RNA, 17 nt, Homo sapiens
agcuuauugucuaguga

SEQ ID NO: 37491 - RNA, 18 nt, Homo sapiens
agcuuauugucuagugaa

SEQ ID NO: 37492 - RNA, 12 nt, Homo sapiens
agcuuuuguaga

SEQ ID NO: 37493 - RNA, 13 nt, Homo sapiens
agcuuuuguagaa

SEQ ID NO: 37494 - RNA, 13 nt, Homo sapiens
agcuagaauuuga

SEQ ID NO: 37495 - RNA, 19 nt, Homo sapiens
agaugcaguucugaagaag

SEQ ID NO: 37496 - RNA, 21 nt, Homo sapiens
agcaaguauuagaauaccaca

SEQ ID NO: 37497 - RNA, 20 nt, Homo sapiens
agagcuacaggccccaucug

SEQ ID NO: 37498 - RNA, 21 nt, Homo sapiens
agagcuacaggccccaucugg

SEQ ID NO: 37499 - RNA, 15 nt, Homo sapiens
agauacugaaauaaa

SEQ ID NO: 37500 - RNA, 21 nt, Homo sapiens
agauacugaaauaaacgucuu

SEQ ID NO: 37501 - RNA, 19 nt, Homo sapiens
agauaugauucaaaugucu

SEQ ID NO: 37502 - RNA, 13 nt, Homo sapiens
agagccggagccu

SEQ ID NO: 37503 - RNA, 15 nt, Homo sapiens
agacugcauuauauu

SEQ ID NO: 37504 - RNA, 15 nt, Homo sapiens
aaaaguugaauuuua

SEQ ID NO: 37505 - RNA, 20 nt, Homo sapiens
aaaauaauuuuuauauuuga

SEQ ID NO: 37506 - RNA, 19 nt, Homo sapiens
aaaaucucaauauuucaga

SEQ ID NO: 37507 - RNA, 15 nt, Homo sapiens
aaagaagagccggag

SEQ ID NO: 37508 - RNA, 14 nt, Homo sapiens
aaacuuuuggaagg

SEQ ID NO: 37509 - RNA, 13 nt, Homo sapiens
aaagaaacauuug

SEQ ID NO: 37510 - RNA, 17 nt, Homo sapiens
aaacgucuuaaauauuc

SEQ ID NO: 37511 - RNA, 14 nt, Homo sapiens
aaacauuugguaag

SEQ ID NO: 37512 - RNA, 14 nt, Homo sapiens
aaacguauugcauu

SEQ ID NO: 37513 - RNA, 22 nt, Homo sapiens
aaauuuuuucucuaggaaauau

SEQ ID NO: 37514 - RNA, 15 nt, Homo sapiens
aaauccauacauuug

SEQ ID NO: 37515 - RNA, 18 nt, Homo sapiens
aaauggaauacucuuaua

SEQ ID NO: 37516 - RNA, 20 nt, Homo sapiens
aaaguauguuagugcaaauu

SEQ ID NO: 37517 - RNA, 18 nt, Homo sapiens
aaagggcuguuauaaucu

SEQ ID NO: 37518 - RNA, 21 nt, Homo sapiens
aaauaauuuuuauauuugaaa

SEQ ID NO: 37519 - RNA, 23 nt, Homo sapiens
aaauauugacuuuuuauggcacu

SEQ ID NO: 37520 - RNA, 24 nt, Homo sapiens
aaauauugacuuuuuauggcacua

SEQ ID NO: 37521 - RNA, 15 nt, Homo sapiens
aacaaggaugaauua

SEQ ID NO: 37522 - RNA, 16 nt, Homo sapiens
aaagggcuguuauaau

SEQ ID NO: 37523 - RNA, 20 nt, Homo sapiens
aaaguaugugcauauuuuau

SEQ ID NO: 37524 - RNA, 20 nt, Homo sapiens
aaagcuuugugcagauucuu

SEQ ID NO: 37525 - RNA, 13 nt, Homo sapiens
aaacuuuuggaag

SEQ ID NO: 37526 - RNA, 16 nt, Homo sapiens
aaaaguugaauuuuac

SEQ ID NO: 37527 - RNA, 16 nt, Homo sapiens
aaaauaauuuuuauau

SEQ ID NO: 37528 - RNA, 14 nt, Homo sapiens
aaaacguauugcau

SEQ ID NO: 37529 - RNA, 19 nt, Homo sapiens
aaaacguauugcauuuaau

SEQ ID NO: 37530 - RNA, 20 nt, Homo sapiens
aaaacguauugcauuuaauu

SEQ ID NO: 37531 - RNA, 22 nt, Homo sapiens
aaaacuuauccuccaugaauau

SEQ ID NO: 37532 - RNA, 15 nt, Homo sapiens
aaaagaaacauuugg

SEQ ID NO: 37533 - RNA, 17 nt, Homo sapiens
aacaaugcuguauuuua

SEQ ID NO: 37534 - RNA, 17 nt, Homo sapiens
aaaauccauacauuugu

SEQ ID NO: 37535 - RNA, 14 nt, Homo sapiens
aaaauggaauacuc

SEQ ID NO: 37536 - RNA, 23 nt, Homo sapiens
aaaacguauugcauuuaauuuau

SEQ ID NO: 37537 - RNA, 20 nt, Homo sapiens
aauacauaaaguaugugcau

SEQ ID NO: 37538 - RNA, 21 nt, Homo sapiens
ccucucucauccacuuuccaa

SEQ ID NO: 37539 - RNA, 16 nt, Homo sapiens
gcauccuagucucuau

SEQ ID NO: 37540 - RNA, 14 nt, Homo sapiens
cucucucauccacu

SEQ ID NO: 37541 - RNA, 13 nt, Homo sapiens
aucaguccaaagg

SEQ ID NO: 37542 - RNA, 12 nt, Homo sapiens
gauaugauucaa

SEQ ID NO: 37543 - RNA, 15 nt, Homo sapiens
uaaaguaugugcaua

SEQ ID NO: 37544 - RNA, 13 nt, Homo sapiens
agcuagaauuuga

SEQ ID NO: 37545 - RNA, 17 nt, Homo sapiens
gguccgggucgcaggac

SEQ ID NO: 37546 - RNA, 23 nt, Homo sapiens
uaauuuuuuugugggaaauccac

SEQ ID NO: 37547 - RNA, 17 nt, Homo sapiens
ucaguccaaagggcaug

SEQ ID NO: 37548 - RNA, 15 nt, Homo sapiens
auccuggaauaucuc

SEQ ID NO: 37549 - RNA, 13 nt, Homo sapiens
cugcaacucugaa

SEQ ID NO: 37550 - RNA, 17 nt, Homo sapiens
cggagccuccagcugcc

SEQ ID NO: 37551 - RNA, 15 nt, Homo sapiens
aguuccuucugcucc

SEQ ID NO: 37552 - RNA, 15 nt, Homo sapiens
uccccagagcuacag

SEQ ID NO: 37553 - RNA, 12 nt, Homo sapiens
gcauccuagucu

SEQ ID NO: 37554 - RNA, 19 nt, Homo sapiens
agccgggaaagaagagccg

SEQ ID NO: 37555 - RNA, 17 nt, Homo sapiens
aaacguauugcauuuaa

SEQ ID NO: 37556 - RNA, 21 nt, Homo sapiens
gagcuuuuguagaagucacau

SEQ ID NO: 37557 - RNA, 17 nt, Homo sapiens
guccccagagcuacagg

SEQ ID NO: 37558 - RNA, 13 nt, Homo sapiens
cccacacugucca

SEQ ID NO: 37559 - RNA, 19 nt, Homo sapiens
cauauuuuauuauagucac

SEQ ID NO: 37560 - RNA, 16 nt, Homo sapiens
ccuuccccuucccaca

SEQ ID NO: 37561 - RNA, 14 nt, Homo sapiens
uaaaguaugugcau

SEQ ID NO: 37562 - RNA, 21 nt, Homo sapiens
ggcaauguucccccucuccuc

SEQ ID NO: 37563 - RNA, 17 nt, Homo sapiens
ugcagcgaguacuuccc

SEQ ID NO: 37564 - RNA, 15 nt, Homo sapiens
uccgcauccuagucu

SEQ ID NO: 37565 - RNA, 15 nt, Homo sapiens
caggcggguccgggu

SEQ ID NO: 37566 - RNA, 12 nt, Homo sapiens
ucucuaucauua

SEQ ID NO: 37567 - RNA, 20 nt, Homo sapiens
ugcauucugagguaaccuca

SEQ ID NO: 37568 - RNA, 17 nt, Homo sapiens
uuuaauuugguuuucac

SEQ ID NO: 37569 - RNA, 19 nt, Homo sapiens
cuuuaaaacuuauccucca

SEQ ID NO: 37570 - RNA, 20 nt, Homo sapiens
aaacuuauccuccaugaaua

SEQ ID NO: 37571 - RNA, 17 nt, Homo sapiens
uucagauaugauucaaa

SEQ ID NO: 37572 - RNA, 17 nt, Homo sapiens
cauaaaguaugugcaua

SEQ ID NO: 37573 - RNA, 17 nt, Homo sapiens
caguaugaaaaugucau

SEQ ID NO: 37574 - RNA, 16 nt, Homo sapiens
ucuaucauuaaaguuc

SEQ ID NO: 37575 - RNA, 13 nt, Homo sapiens
augaaaaugucau

SEQ ID NO: 37576 - RNA, 13 nt, Homo sapiens
gccgacggagccg

SEQ ID NO: 37577 - RNA, 14 nt, Homo sapiens
gaagcacagugauc

SEQ ID NO: 37578 - RNA, 23 nt, Homo sapiens
uaaaaaaaaaacguauugcauuu

SEQ ID NO: 37579 - RNA, 23 nt, Homo sapiens
cuaaauucuuucauuuuaggggu

SEQ ID NO: 37580 - RNA, 15 nt, Homo sapiens
cagcgaguacuuccc

SEQ ID NO: 37581 - RNA, 17 nt, Homo sapiens
uuguuucagugcacuaa

SEQ ID NO: 37582 - RNA, 18 nt, Homo sapiens
gaagagccggagccucca

SEQ ID NO: 37583 - RNA, 23 nt, Homo sapiens
agauucaaugccccugaauuuaa

SEQ ID NO: 37584 - RNA, 12 nt, Homo sapiens
ugagguaaccuc

SEQ ID NO: 37585 - RNA, 11 nt, Homo sapiens
aacccaaagug

SEQ ID NO: 37586 - RNA, 15 nt, Homo sapiens
acgugggcauucaaa

SEQ ID NO: 37587 - RNA, 18 nt, Homo sapiens
cuaucauuaaaguucuag

SEQ ID NO: 37588 - RNA, 18 nt, Homo sapiens
uuucaugcuguucaugaa

SEQ ID NO: 37589 - RNA, 22 nt, Homo sapiens
uuuguagaagucacauuccuga

SEQ ID NO: 37590 - RNA, 23 nt, Homo sapiens
uucgcgcgccuccgcuacuucca

SEQ ID NO: 37591 - RNA, 19 nt, Homo sapiens
uagaagucacauuccugaa

SEQ ID NO: 37592 - RNA, 17 nt, Homo sapiens
cauccuggaauaucucc

SEQ ID NO: 37593 - RNA, 17 nt, Homo sapiens
ccucuaaauucuuucau

SEQ ID NO: 37594 - RNA, 14 nt, Homo sapiens
aaaaacguauugca

SEQ ID NO: 37595 - RNA, 20 nt, Homo sapiens
cggggaggggcgcucgcuuc

SEQ ID NO: 37596 - RNA, 18 nt, Homo sapiens
cuauuuacggaacucaaa

SEQ ID NO: 37597 - RNA, 14 nt, Homo sapiens
cugauguaaguaaa

SEQ ID NO: 37598 - RNA, 17 nt, Homo sapiens
uuugaaaccaaaccaga

SEQ ID NO: 37599 - RNA, 16 nt, Homo sapiens
aaagcuuugugcagau

SEQ ID NO: 37600 - RNA, 17 nt, Homo sapiens
ucauuaucaguccaaag

SEQ ID NO: 37601 - RNA, 16 nt, Homo sapiens
caugaauaucaguuau

SEQ ID NO: 37602 - RNA, 20 nt, Homo sapiens
caguuauuuuuaaacuguaa

SEQ ID NO: 37603 - RNA, 17 nt, Homo sapiens
uccagcugccccgggga

SEQ ID NO: 37604 - RNA, 13 nt, Homo sapiens
aacggucucucac

SEQ ID NO: 37605 - RNA, 16 nt, Homo sapiens
cauaaaguaugugcau

SEQ ID NO: 37606 - RNA, 23 nt, Homo sapiens
gagagucuauuuacggaacucaa

SEQ ID NO: 37607 - RNA, 14 nt, Homo sapiens
aaaauggaauacuc

SEQ ID NO: 37608 - RNA, 16 nt, Homo sapiens
aauguguaagacaaaa

SEQ ID NO: 37609 - RNA, 22 nt, Homo sapiens
acuuauuguagcauccuggaau

SEQ ID NO: 37610 - RNA, 16 nt, Homo sapiens
cuucuuacaaugcauu

SEQ ID NO: 37611 - RNA, 18 nt, Homo sapiens
gcuuccgcauccuagucu

SEQ ID NO: 37612 - RNA, 23 nt, Homo sapiens
cucaaauacgugggcauucaaau

SEQ ID NO: 37613 - RNA, 17 nt, Homo sapiens
ugaacaggauauucuca

SEQ ID NO: 37614 - RNA, 23 nt, Homo sapiens
agagucuauuuacggaacucaaa

SEQ ID NO: 37615 - RNA, 20 nt, Homo sapiens
ggccugcucgcccacuuccu

SEQ ID NO: 37616 - RNA, 18 nt, Homo sapiens
aguaugaaaaugucauug

SEQ ID NO: 37617 - RNA, 16 nt, Homo sapiens
auucgauccccuguca

SEQ ID NO: 37618 - RNA, 19 nt, Homo sapiens
auauuuuauuauagucacu

SEQ ID NO: 37619 - RNA, 21 nt, Homo sapiens
aaguugaauuuuacauggcug

SEQ ID NO: 37620 - RNA, 14 nt, Homo sapiens
agcuuuuguagaag

SEQ ID NO: 37621 - RNA, 18 nt, Homo sapiens
ugugaacccaaaguguga

SEQ ID NO: 37622 - RNA, 21 nt, Homo sapiens
gggaaugaagauacugaaaua

SEQ ID NO: 37623 - RNA, 13 nt, Homo sapiens
ucucauccacuuu

SEQ ID NO: 37624 - RNA, 15 nt, Homo sapiens
gcgcgcucaucccac

SEQ ID NO: 37625 - RNA, 14 nt, Homo sapiens
cacugagcugaggg

SEQ ID NO: 37626 - RNA, 16 nt, Homo sapiens
ccuucuuacaaugcau

SEQ ID NO: 37627 - RNA, 20 nt, Homo sapiens
uuaauuugguuuucacauug

SEQ ID NO: 37628 - RNA, 13 nt, Homo sapiens
uuguucuugugaa

SEQ ID NO: 37629 - RNA, 22 nt, Homo sapiens
ugaggcuuuaaaacuuauccuc

SEQ ID NO: 37630 - RNA, 22 nt, Homo sapiens
gcucgcuuccgcauccuagucu

SEQ ID NO: 37631 - RNA, 22 nt, Homo sapiens
gcugccgugggccugagaccaa

SEQ ID NO: 37632 - RNA, 22 nt, Homo sapiens
uuaaauagcuuuuuucucugau

SEQ ID NO: 37633 - RNA, 19 nt, Homo sapiens
ccuccaugaauaucaguua

SEQ ID NO: 37634 - RNA, 22 nt, Homo sapiens
gagggcgcggggcggggagcga

SEQ ID NO: 37635 - RNA, 13 nt, Homo sapiens
aaaaagcuacuua

SEQ ID NO: 37636 - RNA, 14 nt, Homo sapiens
aaagcuuugugcag

SEQ ID NO: 37637 - RNA, 20 nt, Homo sapiens
uuacaaugcauucugaggua

SEQ ID NO: 37638 - RNA, 21 nt, Homo sapiens
aaaagcuacuuauuguagcau

SEQ ID NO: 37639 - RNA, 21 nt, Homo sapiens
auucugagguaaccucauuau

SEQ ID NO: 37640 - RNA, 16 nt, Homo sapiens
uuguguuugaagcaca

SEQ ID NO: 37641 - RNA, 14 nt, Homo sapiens
uagguuuggacaaa

SEQ ID NO: 37642 - RNA, 22 nt, Homo sapiens
gaucaaguuauuuuuaauuugg

SEQ ID NO: 37643 - RNA, 12 nt, Homo sapiens
auccuggaauau

SEQ ID NO: 37644 - RNA, 17 nt, Homo sapiens
gaauacauaaaguaugu

SEQ ID NO: 37645 - RNA, 22 nt, Homo sapiens
cuaauuuguuuucccuucuuac

SEQ ID NO: 37646 - RNA, 15 nt, Homo sapiens
agccgggaaagaaga

SEQ ID NO: 37647 - RNA, 14 nt, Homo sapiens
gugcacuaaugugu

SEQ ID NO: 37648 - RNA, 13 nt, Homo sapiens
ugcugcaccugug

SEQ ID NO: 37649 - RNA, 22 nt, Homo sapiens
ugaacugcagcgaguacuuccc

SEQ ID NO: 37650 - RNA, 20 nt, Homo sapiens
uacauaaaguaugugcauau

SEQ ID NO: 37651 - RNA, 22 nt, Homo sapiens
cucuaucauuaaaguucuagug

SEQ ID NO: 37652 - RNA, 22 nt, Homo sapiens
aauguuguuuuaggaauacaua

SEQ ID NO: 37653 - RNA, 17 nt, Homo sapiens
auccuagucucuaucau

SEQ ID NO: 37654 - RNA, 13 nt, Homo sapiens
cauuaucagucca

SEQ ID NO: 37655 - RNA, 14 nt, Homo sapiens
agauaugauucaaa

SEQ ID NO: 37656 - RNA, 18 nt, Homo sapiens
ugaucaguaugaaaaugu

SEQ ID NO: 37657 - RNA, 14 nt, Homo sapiens
cucaucccacccgc

SEQ ID NO: 37658 - RNA, 19 nt, Homo sapiens
ucuuacaaugcauucugag

SEQ ID NO: 37659 - RNA, 17 nt, Homo sapiens
uucaaugccccugaauu

SEQ ID NO: 37660 - RNA, 23 nt, Homo sapiens
agcgcgcgcgcccucuggcugcu

SEQ ID NO: 37661 - RNA, 21 nt, Homo sapiens
gcucgcuuccgcauccuaguc

SEQ ID NO: 37662 - RNA, 17 nt, Homo sapiens
cacacugagcugagggg

SEQ ID NO: 37663 - RNA, 14 nt, Homo sapiens
ucuuccucccugga

SEQ ID NO: 37664 - RNA, 20 nt, Homo sapiens
aaaaaacguauugcauuuaa

SEQ ID NO: 37665 - RNA, 14 nt, Homo sapiens
agguuuggacaaaa

SEQ ID NO: 37666 - RNA, 17 nt, Homo sapiens
aucaguccaaagggcau

SEQ ID NO: 37667 - RNA, 22 nt, Homo sapiens
uggaaacaagucagucauucag

SEQ ID NO: 37668 - RNA, 17 nt, Homo sapiens
agagccggagccuccag

SEQ ID NO: 37669 - RNA, 23 nt, Homo sapiens
auucugagguaaccucauuauca

SEQ ID NO: 37670 - RNA, 16 nt, Homo sapiens
ugcauauuuuauuaua

SEQ ID NO: 37671 - RNA, 23 nt, Homo sapiens
ugcauucugagguaaccucauua

SEQ ID NO: 37672 - RNA, 17 nt, Homo sapiens
uauuuuuuucugaaauu

SEQ ID NO: 37673 - RNA, 20 nt, Homo sapiens
gggagcuuuuguagaaguca

SEQ ID NO: 37674 - RNA, 17 nt, Homo sapiens
uaaagcuuugugcagau

SEQ ID NO: 37675 - RNA, 23 nt, Homo sapiens
gugaacugcagcgaguacuuccc

SEQ ID NO: 37676 - RNA, 17 nt, Homo sapiens
augaagauacugaaaua

SEQ ID NO: 37677 - RNA, 15 nt, Homo sapiens
cuuccagggcuacgc

SEQ ID NO: 37678 - RNA, 23 nt, Homo sapiens
uagguuuggacaaaauggaauac

SEQ ID NO: 37679 - RNA, 17 nt, Homo sapiens
cugcaacucugaagggu

SEQ ID NO: 37680 - RNA, 11 nt, Homo sapiens
cgcuacuucca

SEQ ID NO: 37681 - RNA, 15 nt, Homo sapiens
uuggaagguauuuaa

SEQ ID NO: 37682 - RNA, 13 nt, Homo sapiens
uucccacacuguc

SEQ ID NO: 37683 - RNA, 19 nt, Homo sapiens
cagcgaguacuucccgcug

SEQ ID NO: 37684 - RNA, 15 nt, Homo sapiens
aaccucauuaucagu

SEQ ID NO: 37685 - RNA, 14 nt, Homo sapiens
augaucaguaugaa

SEQ ID NO: 37686 - RNA, 15 nt, Homo sapiens
ugugggaaauccaca

SEQ ID NO: 37687 - RNA, 21 nt, Homo sapiens
cuggcugcgcucggccugcuc

SEQ ID NO: 37688 - RNA, 21 nt, Homo sapiens
gucuauuuacggaacucaaau

SEQ ID NO: 37689 - RNA, 23 nt, Homo sapiens
agcauccuggaauaucuccguca

SEQ ID NO: 37690 - RNA, 15 nt, Homo sapiens
agugugacucauuaa

SEQ ID NO: 37691 - RNA, 20 nt, Homo sapiens
ucuauaaaccgaacugaugu

SEQ ID NO: 37692 - RNA, 18 nt, Homo sapiens
guucaugaaagauucaau

SEQ ID NO: 37693 - RNA, 18 nt, Homo sapiens
auauuuuuuucugaaauu

SEQ ID NO: 37694 - RNA, 22 nt, Homo sapiens
auauuuuuuucugaaauuuccu

SEQ ID NO: 37695 - RNA, 14 nt, Homo sapiens
aaaacguauugcau

SEQ ID NO: 37696 - RNA, 17 nt, Homo sapiens
aaccagagccugagugu

SEQ ID NO: 37697 - RNA, 17 nt, Homo sapiens
gaacaggauauucucac

SEQ ID NO: 37698 - RNA, 15 nt, Homo sapiens
agauacugaaauaaa

SEQ ID NO: 37699 - RNA, 21 nt, Homo sapiens
ugugcggccuggucuaccugu

SEQ ID NO: 37700 - RNA, 22 nt, Homo sapiens
ucauuguucuugugaacccaaa

SEQ ID NO: 37701 - RNA, 22 nt, Homo sapiens
uaaaccgaacugauguaaguaa

SEQ ID NO: 37702 - RNA, 20 nt, Homo sapiens
uuacccccugggagccccaa

SEQ ID NO: 37703 - RNA, 13 nt, Homo sapiens
aagacaaaaagcu

SEQ ID NO: 37704 - RNA, 19 nt, Homo sapiens
auuuucaugcuguucauga

SEQ ID NO: 37705 - RNA, 13 nt, Homo sapiens
ugcccuuccccuu

SEQ ID NO: 37706 - RNA, 17 nt, Homo sapiens
uuguagaagucacauuc

SEQ ID NO: 37707 - RNA, 19 nt, Homo sapiens
cucugaaggguaauuauau

SEQ ID NO: 37708 - RNA, 16 nt, Homo sapiens
uuccgcauccuagucu

SEQ ID NO: 37709 - RNA, 13 nt, Homo sapiens
auguguaagacaa

SEQ ID NO: 37710 - RNA, 17 nt, Homo sapiens
guucaugaaagauucaa

SEQ ID NO: 37711 - RNA, 15 nt, Homo sapiens
gacgcugcugccgug

SEQ ID NO: 37712 - RNA, 16 nt, Homo sapiens
agucucuaucauuaaa

SEQ ID NO: 37713 - RNA, 16 nt, Homo sapiens
caaugcauucugaggu

SEQ ID NO: 37714 - RNA, 14 nt, Homo sapiens
augauucaaauguc

SEQ ID NO: 37715 - RNA, 19 nt, Homo sapiens
gccugcucgcccacuuccu

SEQ ID NO: 37716 - RNA, 14 nt, Homo sapiens
ucccacacugucca

SEQ ID NO: 37717 - RNA, 22 nt, Homo sapiens
cauccuagucucuaucauuaaa

SEQ ID NO: 37718 - RNA, 15 nt, Homo sapiens
uaaaguucuagugac

SEQ ID NO: 37719 - RNA, 17 nt, Homo sapiens
ccauuuuugaaaccaaa

SEQ ID NO: 37720 - RNA, 21 nt, Homo sapiens
uccaaagggcauggguuuuau

SEQ ID NO: 37721 - RNA, 17 nt, Homo sapiens
aaacgucuuaaauauuc

SEQ ID NO: 37722 - RNA, 15 nt, Homo sapiens
ucaaugccccugaau

SEQ ID NO: 37723 - RNA, 19 nt, Homo sapiens
uacaaugcauucugaggua

SEQ ID NO: 37724 - RNA, 20 nt, Homo sapiens
uacagaaaaguugaauuuua

SEQ ID NO: 37725 - RNA, 23 nt, Homo sapiens
gcccuuccccuucccacacuguc

SEQ ID NO: 37726 - RNA, 23 nt, Homo sapiens
cuaguuguaauuuuuuuguggga

SEQ ID NO: 37727 - RNA, 17 nt, Homo sapiens
gcccuuccccuucccac

SEQ ID NO: 37728 - RNA, 12 nt, Homo sapiens
augcauucugag

SEQ ID NO: 37729 - RNA, 18 nt, Homo sapiens
accauuuuugaaaccaaa

SEQ ID NO: 37730 - RNA, 16 nt, Homo sapiens
uuaaaguucuagugac

SEQ ID NO: 37731 - RNA, 20 nt, Homo sapiens
ccgcagggugaacugcagcg

SEQ ID NO: 37732 - RNA, 19 nt, Homo sapiens
cuuugugcagauucuuuac

SEQ ID NO: 37733 - RNA, 17 nt, Homo sapiens
uccccagagcuacaggc

SEQ ID NO: 37734 - RNA, 19 nt, Homo sapiens
acaaaauggaauacucuua

SEQ ID NO: 37735 - RNA, 20 nt, Homo sapiens
ugcauauuuuauuauaguca

SEQ ID NO: 37736 - RNA, 12 nt, Homo sapiens
ccgcuacuucca

SEQ ID NO: 37737 - RNA, 15 nt, Homo sapiens
gccccaauucgaucc

SEQ ID NO: 37738 - RNA, 13 nt, Homo sapiens
uagucucuaucau

SEQ ID NO: 37739 - RNA, 15 nt, Homo sapiens
aguugaauuuuacau

SEQ ID NO: 37740 - RNA, 21 nt, Homo sapiens
ccuggcaaagaugaucaguau

SEQ ID NO: 37741 - RNA, 18 nt, Homo sapiens
cugcagcgaguacuuccc

SEQ ID NO: 37742 - RNA, 15 nt, Homo sapiens
cggccugcucgccca

SEQ ID NO: 37743 - RNA, 13 nt, Homo sapiens
uccgcauccuagu

SEQ ID NO: 37744 - RNA, 12 nt, Homo sapiens
aaaaaaacguau

SEQ ID NO: 37745 - RNA, 18 nt, Homo sapiens
accucuaaauucuuucau

SEQ ID NO: 37746 - RNA, 16 nt, Homo sapiens
gaguuccuucugcucc

SEQ ID NO: 37747 - RNA, 21 nt, Homo sapiens
aagagccggagccuccagcug

SEQ ID NO: 37748 - RNA, 18 nt, Homo sapiens
gcccacuuccucccggcc

SEQ ID NO: 37749 - RNA, 20 nt, Homo sapiens
ugcgcucggccugcucgccc

SEQ ID NO: 37750 - RNA, 22 nt, Homo sapiens
auuuuuuugugggaaauccaca

SEQ ID NO: 37751 - RNA, 18 nt, Homo sapiens
uuaagagagucuauuuac

SEQ ID NO: 37752 - RNA, 16 nt, Homo sapiens
guaaagcuuugugcag

SEQ ID NO: 37753 - RNA, 16 nt, Homo sapiens
uaaaguaugugcauau

SEQ ID NO: 37754 - RNA, 9 nt, Homo sapiens
acacugucc

SEQ ID NO: 37755 - RNA, 18 nt, Homo sapiens
uauccuccaugaauauca

SEQ ID NO: 37756 - RNA, 11 nt, Homo sapiens
gcauccuaguc

SEQ ID NO: 37757 - RNA, 19 nt, Homo sapiens
gcauccuagucucuaucau

SEQ ID NO: 37758 - RNA, 12 nt, Homo sapiens
uguucuugugaa

SEQ ID NO: 37759 - RNA, 17 nt, Homo sapiens
cgugggccugagaccaa

SEQ ID NO: 37760 - RNA, 18 nt, Homo sapiens
auucuuuacccccuggga

SEQ ID NO: 37761 - RNA, 12 nt, Homo sapiens
ucccacacuguc

SEQ ID NO: 37762 - RNA, 17 nt, Homo sapiens
cauaaauuuaguauuuu

SEQ ID NO: 37763 - RNA, 16 nt, Homo sapiens
auuucuaggacugaau

SEQ ID NO: 37764 - RNA, 14 nt, Homo sapiens
cuuccucccauuca

SEQ ID NO: 37765 - RNA, 23 nt, Homo sapiens
aaaaugucauuguucuugugaac

SEQ ID NO: 37766 - RNA, 13 nt, Homo sapiens
cacagugaucaag

SEQ ID NO: 37767 - RNA, 20 nt, Homo sapiens
ggcggguccgggucgcagga

SEQ ID NO: 37768 - RNA, 15 nt, Homo sapiens
auuucuaggacugaa

SEQ ID NO: 37769 - RNA, 16 nt, Homo sapiens
uucugagguaaccuca

SEQ ID NO: 37770 - RNA, 15 nt, Homo sapiens
acaaaaagcuacuua

SEQ ID NO: 37771 - RNA, 24 nt, Homo sapiens
aauacauaaaguaugugcauauuu

SEQ ID NO: 37772 - RNA, 11 nt, Homo sapiens
uccuugcugca

SEQ ID NO: 37773 - RNA, 12 nt, Homo sapiens
ccuugcugcacc

SEQ ID NO: 37774 - RNA, 19 nt, Homo sapiens
acuaauguguaagacaaaa

SEQ ID NO: 37775 - RNA, 20 nt, Homo sapiens
uuucucugauacagaaaagu

SEQ ID NO: 37776 - RNA, 23 nt, Homo sapiens
cugccucucucauccacuuucca

SEQ ID NO: 37777 - RNA, 14 nt, Homo sapiens
ggagccuccagcug

SEQ ID NO: 37778 - RNA, 19 nt, Homo sapiens
uauuuaauagguuuggaca

SEQ ID NO: 37779 - RNA, 15 nt, Homo sapiens
aucuauauuuuacau

SEQ ID NO: 37780 - RNA, 21 nt, Homo sapiens
ucgauccccugucacgugugg

SEQ ID NO: 37781 - RNA, 15 nt, Homo sapiens
aauuuaaauagcuuu

SEQ ID NO: 37782 - RNA, 17 nt, Homo sapiens
ccuucccacacugucca

SEQ ID NO: 37783 - RNA, 15 nt, Homo sapiens
uucccacacugucca

SEQ ID NO: 37784 - RNA, 15 nt, Homo sapiens
caagucagucauuca

SEQ ID NO: 37785 - RNA, 16 nt, Homo sapiens
ugaacaggauauucuc

SEQ ID NO: 37786 - RNA, 23 nt, Homo sapiens
aagauucaaugccccugaauuua

SEQ ID NO: 37787 - RNA, 15 nt, Homo sapiens
gaauacauaaaguau

SEQ ID NO: 37788 - RNA, 15 nt, Homo sapiens
cauauuuucaugcug

SEQ ID NO: 37789 - RNA, 19 nt, Homo sapiens
ccugaauuuaaauagcuuu

SEQ ID NO: 37790 - RNA, 17 nt, Homo sapiens
caggaccaucccggccg

SEQ ID NO: 37791 - RNA, 19 nt, Homo sapiens
cggcgggagggcgcggggc

SEQ ID NO: 37792 - RNA, 19 nt, Homo sapiens
aacccaaagugugacucau

SEQ ID NO: 37793 - RNA, 19 nt, Homo sapiens
guaaguaaacggucucuca

SEQ ID NO: 37794 - RNA, 13 nt, Homo sapiens
gccccaauucgau

SEQ ID NO: 37795 - RNA, 21 nt, Homo sapiens
uguaaguaaacggucucucac

SEQ ID NO: 37796 - RNA, 13 nt, Homo sapiens
cauccacuuucca

SEQ ID NO: 37797 - RNA, 15 nt, Homo sapiens
cccuucccacacugu

SEQ ID NO: 37798 - RNA, 16 nt, Homo sapiens
cuagaauuugauaugu

SEQ ID NO: 37799 - RNA, 13 nt, Homo sapiens
gaccaucccggcc

SEQ ID NO: 37800 - RNA, 16 nt, Homo sapiens
cccagagcuacaggcc

SEQ ID NO: 37801 - RNA, 16 nt, Homo sapiens
ccauuuuugaaaccaa

SEQ ID NO: 37802 - RNA, 24 nt, Homo sapiens
acauuccugaacaggauauucuca

SEQ ID NO: 37803 - RNA, 15 nt, Homo sapiens
ucauuaaaguucuag

SEQ ID NO: 37804 - RNA, 19 nt, Homo sapiens
ucugguccuaagucccugc

SEQ ID NO: 37805 - RNA, 19 nt, Homo sapiens
aggaauacauaaaguaugu

SEQ ID NO: 37806 - RNA, 15 nt, Homo sapiens
cucgcccacuuccuc

SEQ ID NO: 37807 - RNA, 20 nt, Homo sapiens
uuaauuuauugaggcuuuaa

SEQ ID NO: 37808 - RNA, 17 nt, Homo sapiens
ucauuaaaguucuagug

SEQ ID NO: 37809 - RNA, 19 nt, Homo sapiens
guccccagagcuacaggcc

SEQ ID NO: 37810 - RNA, 13 nt, Homo sapiens
ggggaggggcgcu

SEQ ID NO: 37811 - RNA, 23 nt, Homo sapiens
uccuggcaaagaugaucaguaug

SEQ ID NO: 37812 - RNA, 15 nt, Homo sapiens
aaaaacguauugcau

SEQ ID NO: 37813 - RNA, 20 nt, Homo sapiens
aacugcagcgaguacuuccc

SEQ ID NO: 37814 - RNA, 14 nt, Homo sapiens
ccccaucugguccu

SEQ ID NO: 37815 - RNA, 23 nt, Homo sapiens
uacuucccgcuguuccucgccac

SEQ ID NO: 37816 - RNA, 19 nt, Homo sapiens
aauuucuaggacugaauua

SEQ ID NO: 37817 - RNA, 20 nt, Homo sapiens
gucauucagauaugauucaa

SEQ ID NO: 37818 - RNA, 14 nt, Homo sapiens
uggaauacucuuau

SEQ ID NO: 37819 - RNA, 14 nt, Homo sapiens
uuuuacauggcugg

SEQ ID NO: 37820 - RNA, 16 nt, Homo sapiens
ggagcuagaauuugau

SEQ ID NO: 37821 - RNA, 13 nt, Homo sapiens
aguaugugcauau

SEQ ID NO: 37822 - RNA, 17 nt, Homo sapiens
cuuccgcauccuagucu

SEQ ID NO: 37823 - RNA, 13 nt, Homo sapiens
uuuauuauauaua

SEQ ID NO: 37824 - RNA, 21 nt, Homo sapiens
cuucccacacuguccauucuu

SEQ ID NO: 37825 - RNA, 16 nt, Homo sapiens
cucaggcuggcaccgc

SEQ ID NO: 37826 - RNA, 14 nt, Homo sapiens
uucaaauguauuac

SEQ ID NO: 37827 - RNA, 21 nt, Homo sapiens
ucccacacuguccauucuucc

SEQ ID NO: 37828 - RNA, 15 nt, Homo sapiens
aaaauggaauacucu

SEQ ID NO: 37829 - RNA, 11 nt, Homo sapiens
agccggagccu

SEQ ID NO: 37830 - RNA, 19 nt, Homo sapiens
uuucccuucuuacaaugca

SEQ ID NO: 37831 - RNA, 23 nt, Homo sapiens
uccccugucacgugugggcaaug

SEQ ID NO: 37832 - RNA, 18 nt, Homo sapiens
ggaaacaagucagucauu

SEQ ID NO: 37833 - RNA, 19 nt, Homo sapiens
gaaacaagucagucauuca

SEQ ID NO: 37834 - RNA, 16 nt, Homo sapiens
aucuucuuucaugaag

SEQ ID NO: 37835 - RNA, 23 nt, Homo sapiens
agguccuggcaaagaugaucagu

SEQ ID NO: 37836 - RNA, 19 nt, Homo sapiens
cccuucuuacaaugcauuc

SEQ ID NO: 37837 - RNA, 22 nt, Homo sapiens
ucuuguaaagguccuggcaaag

SEQ ID NO: 37838 - RNA, 12 nt, Homo sapiens
caucuucuuuca

SEQ ID NO: 37839 - RNA, 16 nt, Homo sapiens
ggcugcugguggcgcu

SEQ ID NO: 37840 - RNA, 14 nt, Homo sapiens
cgauccccugucac

SEQ ID NO: 37841 - RNA, 19 nt, Homo sapiens
gcuggagcugccucucuca

SEQ ID NO: 37842 - RNA, 21 nt, Homo sapiens
gcuccucggacggcuccggac

SEQ ID NO: 37843 - RNA, 23 nt, Homo sapiens
agaagagccggagccuccagcug

SEQ ID NO: 37844 - RNA, 17 nt, Homo sapiens
gcaaagaugaucaguau

SEQ ID NO: 37845 - RNA, 18 nt, Homo sapiens
uuccccuucccacacugu

SEQ ID NO: 37846 - RNA, 17 nt, Homo sapiens
uuucagugcacuaaugu

SEQ ID NO: 37847 - RNA, 17 nt, Homo sapiens
cagucauucagauauga

SEQ ID NO: 37848 - RNA, 12 nt, Homo sapiens
uuaucaguccaa

SEQ ID NO: 37849 - RNA, 14 nt, Homo sapiens
cuucccacacuguc

SEQ ID NO: 37850 - RNA, 20 nt, Homo sapiens
acaaaauggaauacucuuau

SEQ ID NO: 37851 - RNA, 15 nt, Homo sapiens
ggaagguauuuaaua

SEQ ID NO: 37852 - RNA, 12 nt, Homo sapiens
aaagaagagccg

SEQ ID NO: 37853 - RNA, 17 nt, Homo sapiens
guaaagcuuugugcaga

SEQ ID NO: 37854 - RNA, 21 nt, Homo sapiens
ugaagcacagugaucaaguua

SEQ ID NO: 37855 - RNA, 22 nt, Homo sapiens
aauacauaaaguaugugcauau

SEQ ID NO: 37856 - RNA, 14 nt, Homo sapiens
agcugccucucuca

SEQ ID NO: 37857 - RNA, 16 nt, Homo sapiens
auuaaaguucuaguga

SEQ ID NO: 37858 - RNA, 19 nt, Homo sapiens
ggcuuuaaaacuuauccuc

SEQ ID NO: 37859 - RNA, 14 nt, Homo sapiens
ucauccacuuucca

SEQ ID NO: 37860 - RNA, 19 nt, Homo sapiens
cgcucaucccacccgccca

SEQ ID NO: 37861 - RNA, 14 nt, Homo sapiens
cucugaaggguaau

SEQ ID NO: 37862 - RNA, 13 nt, Homo sapiens
uccgcuacuucca

SEQ ID NO: 37863 - RNA, 22 nt, Homo sapiens
uguaagacaaaaagcuacuuau

SEQ ID NO: 37864 - RNA, 17 nt, Homo sapiens
cgccuccgcuacuucca

SEQ ID NO: 37865 - RNA, 15 nt, Homo sapiens
auaaaguaugugcau

SEQ ID NO: 37866 - RNA, 19 nt, Homo sapiens
aauaucuccgucaacucau

SEQ ID NO: 37867 - RNA, 14 nt, Homo sapiens
aaguaugugcauau

SEQ ID NO: 37868 - RNA, 23 nt, Homo sapiens
auuuaaauagcuuuuuucucuga

SEQ ID NO: 37869 - RNA, 19 nt, Homo sapiens
caaagaugaucaguaugaa

SEQ ID NO: 37870 - RNA, 16 nt, Homo sapiens
ccgcauccuagucucu

SEQ ID NO: 37871 - RNA, 13 nt, Homo sapiens
ugaagauacugaa

SEQ ID NO: 37872 - RNA, 16 nt, Homo sapiens
uggagcuagaauuuga

SEQ ID NO: 37873 - RNA, 19 nt, Homo sapiens
uacauaaaguaugugcaua

SEQ ID NO: 37874 - RNA, 11 nt, Homo sapiens
caaagugugac

SEQ ID NO: 37875 - RNA, 19 nt, Homo sapiens
uggcaaagaugaucaguau

SEQ ID NO: 37876 - RNA, 16 nt, Homo sapiens
caagucagucauucag

SEQ ID NO: 37877 - RNA, 22 nt, Homo sapiens
aaaugucauuguucuugugaac

SEQ ID NO: 37878 - RNA, 15 nt, Homo sapiens
uaaagcuuugugcag

SEQ ID NO: 37879 - RNA, 16 nt, Homo sapiens
aauuucuaggacugaa

SEQ ID NO: 37880 - RNA, 17 nt, Homo sapiens
uaaagguccuggcaaag

SEQ ID NO: 37881 - RNA, 16 nt, Homo sapiens
uccauucuuccuccca

SEQ ID NO: 37882 - RNA, 18 nt, Homo sapiens
cugucacgugugggcaau

SEQ ID NO: 37883 - RNA, 20 nt, Homo sapiens
cuguaaagcuuugugcagau

SEQ ID NO: 37884 - RNA, 17 nt, Homo sapiens
cuaauguguaagacaaa

SEQ ID NO: 37885 - RNA, 16 nt, Homo sapiens
cauuuuugaaaccaaa

SEQ ID NO: 37886 - RNA, 17 nt, Homo sapiens
ugcccuuccccuuccca

SEQ ID NO: 37887 - RNA, 11 nt, Homo sapiens
cgcaggaccau

SEQ ID NO: 37888 - RNA, 22 nt, Homo sapiens
ucuaucauuaaaguucuaguga

SEQ ID NO: 37889 - RNA, 16 nt, Homo sapiens
aguaugaaaaugucau

SEQ ID NO: 37890 - RNA, 12 nt, Homo sapiens
cugaaauuuccu

SEQ ID NO: 37891 - RNA, 13 nt, Homo sapiens
agccuccagcugc

SEQ ID NO: 37892 - RNA, 14 nt, Homo sapiens
cuagucucuaucau

SEQ ID NO: 37893 - RNA, 18 nt, Homo sapiens
ugccucucucauccacuu

SEQ ID NO: 37894 - RNA, 21 nt, Homo sapiens
cauuguucuugugaacccaaa

SEQ ID NO: 37895 - RNA, 17 nt, Homo sapiens
agucagucauucagaua

SEQ ID NO: 37896 - RNA, 18 nt, Homo sapiens
uccaauaaagaguuccuu

SEQ ID NO: 37897 - RNA, 19 nt, Homo sapiens
accauuuuugaaaccaaac

SEQ ID NO: 37898 - RNA, 16 nt, Homo sapiens
gggugaacugcagcga

SEQ ID NO: 37899 - RNA, 22 nt, Homo sapiens
auccuagucucuaucauuaaag

SEQ ID NO: 37900 - RNA, 23 nt, Homo sapiens
aaugccccugaauuuaaauagcu

SEQ ID NO: 37901 - RNA, 15 nt, Homo sapiens
cuuuaaaacuuaucc

SEQ ID NO: 37902 - RNA, 21 nt, Homo sapiens
aaccagagccugaguguugcc

SEQ ID NO: 37903 - RNA, 16 nt, Homo sapiens
uaaagcuuugugcaga

SEQ ID NO: 37904 - RNA, 17 nt, Homo sapiens
aaguaaacggucucuca

SEQ ID NO: 37905 - RNA, 16 nt, Homo sapiens
uguagcauccuggaau

SEQ ID NO: 37906 - RNA, 20 nt, Homo sapiens
agccggagccuccagcugcc

SEQ ID NO: 37907 - RNA, 12 nt, Homo sapiens
accucauuauca

SEQ ID NO: 37908 - RNA, 17 nt, Homo sapiens
ucauuguucuugugaac

SEQ ID NO: 37909 - RNA, 14 nt, Homo sapiens
cuguccauucuucc

SEQ ID NO: 37910 - RNA, 13 nt, Homo sapiens
ggcuggagcugcc

SEQ ID NO: 37911 - RNA, 22 nt, Homo sapiens
ugccucucucauccacuuucca

SEQ ID NO: 37912 - RNA, 16 nt, Homo sapiens
uuucuaggacugaauu

SEQ ID NO: 37913 - RNA, 13 nt, Homo sapiens
cgcgcuccgcgca

SEQ ID NO: 37914 - RNA, 21 nt, Homo sapiens
auucuuccucccauucaggau

SEQ ID NO: 37915 - RNA, 15 nt, Homo sapiens
agccuccagcugccc

SEQ ID NO: 37916 - RNA, 16 nt, Homo sapiens
aauacucuuauaucua

SEQ ID NO: 37917 - RNA, 13 nt, Homo sapiens
uaucaguccaaag

SEQ ID NO: 37918 - RNA, 20 nt, Homo sapiens
agguuuggacaaaauggaau

SEQ ID NO: 37919 - RNA, 22 nt, Homo sapiens
agucucuaucauuaaaguucua

SEQ ID NO: 37920 - RNA, 14 nt, Homo sapiens
agcugccccgggga

SEQ ID NO: 37921 - RNA, 23 nt, Homo sapiens
uugcauuuaauuuauugaggcuu

SEQ ID NO: 37922 - RNA, 19 nt, Homo sapiens
uguuugaagcacagugauc

SEQ ID NO: 37923 - RNA, 18 nt, Homo sapiens
uagucucuaucauuaaag

SEQ ID NO: 37924 - RNA, 20 nt, Homo sapiens
cauuguucuugugaacccaa

SEQ ID NO: 37925 - RNA, 19 nt, Homo sapiens
auugaggcuuuaaaacuua

SEQ ID NO: 37926 - RNA, 22 nt, Homo sapiens
guaauuauauaguuacccaaau

SEQ ID NO: 37927 - RNA, 11 nt, Homo sapiens
acacuguccau

SEQ ID NO: 37928 - RNA, 18 nt, Homo sapiens
aagagccggagccuccag

SEQ ID NO: 37929 - RNA, 18 nt, Homo sapiens
cauuggaaacaagucagu

SEQ ID NO: 37930 - RNA, 21 nt, Homo sapiens
uguuguuuuaggaauacauaa

SEQ ID NO: 37931 - RNA, 15 nt, Homo sapiens
cuuauccuccaugaa

SEQ ID NO: 37932 - RNA, 15 nt, Homo sapiens
ugaauaucaguuauu

SEQ ID NO: 37933 - RNA, 15 nt, Homo sapiens
auguguaagacaaaa

SEQ ID NO: 37934 - RNA, 23 nt, Homo sapiens
aacccaaagugugacucauuaaa

SEQ ID NO: 37935 - RNA, 15 nt, Homo sapiens
ucauccacuuuccaa

SEQ ID NO: 37936 - RNA, 17 nt, Homo sapiens
aacaagucagucauuca

SEQ ID NO: 37937 - RNA, 18 nt, Homo sapiens
ucuaucauuaaaguucua

SEQ ID NO: 37938 - RNA, 22 nt, Homo sapiens
uuaagagagucuauuuacggaa

SEQ ID NO: 37939 - RNA, 19 nt, Homo sapiens
augucauuguucuugugaa

SEQ ID NO: 37940 - RNA, 15 nt, Homo sapiens
auuugauaugugaac

SEQ ID NO: 37941 - RNA, 13 nt, Homo sapiens
aauuauauaguua

SEQ ID NO: 37942 - RNA, 19 nt, Homo sapiens
aaauguuguuuuaggaaua

SEQ ID NO: 37943 - RNA, 12 nt, Homo sapiens
ggaaacaaguca

SEQ ID NO: 37944 - RNA, 22 nt, Homo sapiens
uaguuguaauuuuuuuguggga

SEQ ID NO: 37945 - RNA, 18 nt, Homo sapiens
ccaauaaagaguuccuuc

SEQ ID NO: 37946 - RNA, 13 nt, Homo sapiens
gagccuccagcug

SEQ ID NO: 37947 - RNA, 15 nt, Homo sapiens
cucauccacuuucca

SEQ ID NO: 37948 - RNA, 13 nt, Homo sapiens
uuccucgccacgc

SEQ ID NO: 37949 - RNA, 14 nt, Homo sapiens
uaaaguucuaguga

SEQ ID NO: 37950 - RNA, 14 nt, Homo sapiens
uggcgcuggcugcg

SEQ ID NO: 37951 - RNA, 24 nt, Homo sapiens
ggcuuuaaaacuuauccuccauga

SEQ ID NO: 37952 - RNA, 17 nt, Homo sapiens
uauagucacuaguugua

SEQ ID NO: 37953 - RNA, 13 nt, Homo sapiens
uggaaucuuguaa

SEQ ID NO: 37954 - RNA, 11 nt, Homo sapiens
acaaugcauuc

SEQ ID NO: 37955 - RNA, 15 nt, Homo sapiens
ccuccgcuacuucca

SEQ ID NO: 37956 - RNA, 18 nt, Homo sapiens
ucuaggacugaauuauga

SEQ ID NO: 37957 - RNA, 13 nt, Homo sapiens
cggaacucaaaua

SEQ ID NO: 37958 - RNA, 17 nt, Homo sapiens
uuugugggaaauccaca

SEQ ID NO: 37959 - RNA, 13 nt, Homo sapiens
gaaagauucaaug

SEQ ID NO: 37960 - RNA, 19 nt, Homo sapiens
acagcuccaagaauuucua

SEQ ID NO: 37961 - RNA, 17 nt, Homo sapiens
agucauucagauaugau

SEQ ID NO: 37962 - RNA, 13 nt, Homo sapiens
aaaguucuaguga

SEQ ID NO: 37963 - RNA, 15 nt, Homo sapiens
uacauaaaguaugug

SEQ ID NO: 37964 - RNA, 15 nt, Homo sapiens
guaaacggucucuca

SEQ ID NO: 37965 - RNA, 22 nt, Homo sapiens
uccuccaugaauaucaguuauu

SEQ ID NO: 37966 - RNA, 18 nt, Homo sapiens
agagccggagccuccagc

SEQ ID NO: 37967 - RNA, 22 nt, Homo sapiens
uggacaaaauggaauacucuua

SEQ ID NO: 37968 - RNA, 20 nt, Homo sapiens
cucgcuuccgcauccuaguc

SEQ ID NO: 37969 - RNA, 21 nt, Homo sapiens
acuguaaagcuuugugcagau

SEQ ID NO: 37970 - RNA, 23 nt, Homo sapiens
gggcgcucgcuuccgcauccuag

SEQ ID NO: 37971 - RNA, 16 nt, Homo sapiens
ucuuccucccuggaau

SEQ ID NO: 37972 - RNA, 22 nt, Homo sapiens
uaaaaaaaaaacguauugcauu

SEQ ID NO: 37973 - RNA, 14 nt, Homo sapiens
cuccgcuacuucca

SEQ ID NO: 37974 - RNA, 21 nt, Homo sapiens
agagccugaguguugccuaau

SEQ ID NO: 37975 - RNA, 18 nt, Homo sapiens
agcuagaauuugauaugu

SEQ ID NO: 37976 - RNA, 18 nt, Homo sapiens
agucacuaguuguaauuu

SEQ ID NO: 37977 - RNA, 21 nt, Homo sapiens
gagccgguccuugcugcaccu

SEQ ID NO: 37978 - RNA, 17 nt, Homo sapiens
gguccuugcugcaccug

SEQ ID NO: 37979 - RNA, 16 nt, Homo sapiens
auccacacugagcuga

SEQ ID NO: 37980 - RNA, 14 nt, Homo sapiens
auuuuugaaaccaa

SEQ ID NO: 37981 - RNA, 16 nt, Homo sapiens
cgugugggcaauguuc

SEQ ID NO: 37982 - RNA, 15 nt, Homo sapiens
cagcugccccgggga

SEQ ID NO: 37983 - RNA, 14 nt, Homo sapiens
aaagguccuggcaa

SEQ ID NO: 37984 - RNA, 22 nt, Homo sapiens
gaagagguuuuaaagcuuccau

SEQ ID NO: 37985 - RNA, 12 nt, Homo sapiens
uucccacacugu

SEQ ID NO: 37986 - RNA, 11 nt, Homo sapiens
auucaaaugua

SEQ ID NO: 37987 - RNA, 16 nt, Homo sapiens
ccggagccuccagcug

SEQ ID NO: 37988 - RNA, 21 nt, Homo sapiens
cgccuccgcuacuuccagggc

SEQ ID NO: 37989 - RNA, 22 nt, Homo sapiens
gagaccaaggcccccgggccga

SEQ ID NO: 37990 - RNA, 21 nt, Homo sapiens
acauggcuggagcuagaauuu

SEQ ID NO: 37991 - RNA, 19 nt, Homo sapiens
cccucuccucucuuccucc

SEQ ID NO: 37992 - RNA, 15 nt, Homo sapiens
gcucgcccacuuccu

SEQ ID NO: 37993 - RNA, 23 nt, Homo sapiens
uuaaauagcuuuuuucucugaua

SEQ ID NO: 37994 - RNA, 16 nt, Homo sapiens
gccuccgcuacuucca

SEQ ID NO: 37995 - RNA, 16 nt, Homo sapiens
uagaagucacauuccu

SEQ ID NO: 37996 - RNA, 15 nt, Homo sapiens
cuugugaacccaaag

SEQ ID NO: 37997 - RNA, 20 nt, Homo sapiens
uguuguuuuaggaauacaua

SEQ ID NO: 37998 - RNA, 20 nt, Homo sapiens
cuuauuguagcauccuggaa

SEQ ID NO: 37999 - RNA, 14 nt, Homo sapiens
aaaguucuagugac

SEQ ID NO: 38000 - RNA, 15 nt, Homo sapiens
cggagccuccagcug

SEQ ID NO: 38001 - RNA, 14 nt, Homo sapiens
gcuccaagaauuuc

SEQ ID NO: 38002 - RNA, 15 nt, Homo sapiens
cuccaagaauuucua

SEQ ID NO: 38003 - RNA, 16 nt, Homo sapiens
ugugaacccaaagugu

SEQ ID NO: 38004 - RNA, 17 nt, Homo sapiens
cauccuagucucuauca

SEQ ID NO: 38005 - RNA, 15 nt, Homo sapiens
cuccgcuacuuccag

SEQ ID NO: 38006 - RNA, 20 nt, Homo sapiens
gcgcgccuccgcuacuucca

SEQ ID NO: 38007 - RNA, 21 nt, Homo sapiens
ggcuggagcugccucucucau

SEQ ID NO: 38008 - RNA, 13 nt, Homo sapiens
aggacugaauuau

SEQ ID NO: 38009 - RNA, 17 nt, Homo sapiens
ugcauuuaauuuauuga

SEQ ID NO: 38010 - RNA, 19 nt, Homo sapiens
gcuuuaaaacuuauccucc

SEQ ID NO: 38011 - RNA, 16 nt, Homo sapiens
ggcuggagcugccucu

SEQ ID NO: 38012 - RNA, 19 nt, Homo sapiens
uaaccucuaaauucuuuca

SEQ ID NO: 38013 - RNA, 14 nt, Homo sapiens
uauuuucaugcugu

SEQ ID NO: 38014 - RNA, 14 nt, Homo sapiens
gugugacucauuaa

SEQ ID NO: 38015 - RNA, 16 nt, Homo sapiens
acaagucagucauuca

SEQ ID NO: 38016 - RNA, 17 nt, Homo sapiens
uguguaagacaaaaagc

SEQ ID NO: 38017 - RNA, 15 nt, Homo sapiens
cggcuggagcugccu

SEQ ID NO: 38018 - RNA, 22 nt, Homo sapiens
agagucuauuuacggaacucaa

SEQ ID NO: 38019 - RNA, 15 nt, Homo sapiens
uaugaaaaugucauu

SEQ ID NO: 38020 - RNA, 14 nt, Homo sapiens
agccccaauucgau

SEQ ID NO: 38021 - RNA, 17 nt, Homo sapiens
cccaaagugugacucau

SEQ ID NO: 38022 - RNA, 22 nt, Homo sapiens
uucaauaaaacuuuuccaauga

SEQ ID NO: 38023 - RNA, 17 nt, Homo sapiens
uuccucccuggaaucuu

SEQ ID NO: 38024 - RNA, 17 nt, Homo sapiens
uggaaguaaauguuguu

SEQ ID NO: 38025 - RNA, 16 nt, Homo sapiens
uggcgcuggcugcgcu

SEQ ID NO: 38026 - RNA, 21 nt, Homo sapiens
ucuugugaacccaaaguguga

SEQ ID NO: 38027 - RNA, 20 nt, Homo sapiens
uccgggucgcaggaccaucc

SEQ ID NO: 38028 - RNA, 21 nt, Homo sapiens
uccgggucgcaggaccauccc

SEQ ID NO: 38029 - RNA, 13 nt, Homo sapiens
uccgcuacuucca

SEQ ID NO: 38030 - RNA, 17 nt, Homo sapiens
uccccugucacgugugg

SEQ ID NO: 38031 - RNA, 13 nt, Homo sapiens
uccucggacggcu

SEQ ID NO: 38032 - RNA, 18 nt, Homo sapiens
uccuccaugaauaucagu

SEQ ID NO: 38033 - RNA, 20 nt, Homo sapiens
ugcuauugggguuggggggg

SEQ ID NO: 38034 - RNA, 22 nt, Homo sapiens
ugaguguugccuaauuuguuuu

SEQ ID NO: 38035 - RNA, 20 nt, Homo sapiens
ugagcggaccuucccagcua

SEQ ID NO: 38036 - RNA, 16 nt, Homo sapiens
ugaaagucccagauca

SEQ ID NO: 38037 - RNA, 12 nt, Homo sapiens
uccagcugcccc

SEQ ID NO: 38038 - RNA, 17 nt, Homo sapiens
ucacuaguuguaauuuu

SEQ ID NO: 38039 - RNA, 18 nt, Homo sapiens
guuguggggaugaacuuu

SEQ ID NO: 38040 - RNA, 14 nt, Homo sapiens
uaugaaaaugucau

SEQ ID NO: 38041 - RNA, 13 nt, Homo sapiens
uacgcgcgcuccg

SEQ ID NO: 38042 - RNA, 14 nt, Homo sapiens
uacgcgcgcuccgc

SEQ ID NO: 38043 - RNA, 12 nt, Homo sapiens
uacgcgcgcucc

SEQ ID NO: 38044 - RNA, 23 nt, Homo sapiens
guugcuaucaauccaagaacuua

SEQ ID NO: 38045 - RNA, 15 nt, Homo sapiens
gucucuaucauuaaa

SEQ ID NO: 38046 - RNA, 21 nt, Homo sapiens
guauugcauuuaauuuauuga

SEQ ID NO: 38047 - RNA, 17 nt, Homo sapiens
gcugcgcgccgcgcucc

SEQ ID NO: 38048 - RNA, 19 nt, Homo sapiens
gcugcgcgccgcgcuccuc

SEQ ID NO: 38049 - RNA, 14 nt, Homo sapiens
ggagccuccagcug

SEQ ID NO: 38050 - RNA, 19 nt, Homo sapiens
gcauggguuuuauuauaua

SEQ ID NO: 38051 - RNA, 14 nt, Homo sapiens
gcaggaggcaucca

SEQ ID NO: 38052 - RNA, 21 nt, Homo sapiens
gccuuuguugcuaucaaucca

SEQ ID NO: 38053 - RNA, 17 nt, Homo sapiens
gcgaguacuucccgcug

SEQ ID NO: 38054 - RNA, 16 nt, Homo sapiens
gagccuccagcugccc

SEQ ID NO: 38055 - RNA, 17 nt, Homo sapiens
gaacuuuuuguuuuguu

SEQ ID NO: 38056 - RNA, 18 nt, Homo sapiens
gaacuuuuuguuuuguuu

SEQ ID NO: 38057 - RNA, 15 nt, Homo sapiens
auuaaaguucuagug

SEQ ID NO: 38058 - RNA, 17 nt, Homo sapiens
auuaaaguucuagugac

SEQ ID NO: 38059 - RNA, 18 nt, Homo sapiens
auucugagguaaccucau

SEQ ID NO: 38060 - RNA, 12 nt, Homo sapiens
caagaacuuauu

SEQ ID NO: 38061 - RNA, 18 nt, Homo sapiens
caaccucucccaacuaua

SEQ ID NO: 38062 - RNA, 17 nt, Homo sapiens
auaucaguuauuuuuaa

SEQ ID NO: 38063 - RNA, 18 nt, Homo sapiens
auaucaguuauuuuuaaa

SEQ ID NO: 38064 - RNA, 14 nt, Homo sapiens
auaaaacuuuucca

SEQ ID NO: 38065 - RNA, 18 nt, Homo sapiens
aguucuucaaagauaggg

SEQ ID NO: 38066 - RNA, 22 nt, Homo sapiens
aucccggccggcgcgcucaucc

SEQ ID NO: 38067 - RNA, 15 nt, Homo sapiens
aucaguaugaaaaug

SEQ ID NO: 38068 - RNA, 11 nt, Homo sapiens
aggaccauccc

SEQ ID NO: 38069 - RNA, 13 nt, Homo sapiens
aggaggggcuucu

SEQ ID NO: 38070 - RNA, 22 nt, Homo sapiens
agcuaggggggucagccagccc

SEQ ID NO: 38071 - RNA, 12 nt, Homo sapiens
aggggcgcucgc

SEQ ID NO: 38072 - RNA, 16 nt, Homo sapiens
agucauucugccugcc

SEQ ID NO: 38073 - RNA, 17 nt, Homo sapiens
agucauucugccugccc

SEQ ID NO: 38074 - RNA, 20 nt, Homo sapiens
agucccagaucaagccugcc

SEQ ID NO: 38075 - RNA, 21 nt, Homo sapiens
agucccagaucaagccugccu

SEQ ID NO: 38076 - RNA, 22 nt, Homo sapiens
agucccagaucaagccugccuc

SEQ ID NO: 38077 - RNA, 19 nt, Homo sapiens
accucucccaacuauaaaa

SEQ ID NO: 38078 - RNA, 18 nt, Homo sapiens
agccgggaaagaagagcc

SEQ ID NO: 38079 - RNA, 23 nt, Homo sapiens
agcccucuucugacacuaaaaca

SEQ ID NO: 38080 - RNA, 16 nt, Homo sapiens
agccagcccucuucug

SEQ ID NO: 38081 - RNA, 23 nt, Homo sapiens
agaacuuauuuguacauuuuuuu

SEQ ID NO: 38082 - RNA, 18 nt, Homo sapiens
acuuauuuguacauuuuu

SEQ ID NO: 38083 - RNA, 15 nt, Homo sapiens
uugagcuaggggggu

SEQ ID NO: 38084 - RNA, 13 nt, Homo sapiens
acauuuuuuuuuu

SEQ ID NO: 38085 - RNA, 22 nt, Homo sapiens
uguaaagcuuugugcagauucu

SEQ ID NO: 38086 - RNA, 16 nt, Homo sapiens
uguuuuaggaauacau

SEQ ID NO: 38087 - RNA, 19 nt, Homo sapiens
uggaaguaaauguuguuuu

SEQ ID NO: 38088 - RNA, 22 nt, Homo sapiens
cuagucucuaucauuaaaguuc

SEQ ID NO: 38089 - RNA, 22 nt, Homo sapiens
cgcuuccgcauccuagucucua

SEQ ID NO: 38090 - RNA, 17 nt, Homo sapiens
cuaaaacaccucagcug

SEQ ID NO: 38091 - RNA, 15 nt, Homo sapiens
cgggaaagaagagcc

SEQ ID NO: 38092 - RNA, 19 nt, Homo sapiens
cgcucggccugcucgccca

SEQ ID NO: 38093 - RNA, 17 nt, Homo sapiens
cgcuguuccucgccacg

SEQ ID NO: 38094 - RNA, 15 nt, Homo sapiens
cuuccgcauccuagu

SEQ ID NO: 38095 - RNA, 22 nt, Homo sapiens
cuuauccuccaugaauaucagu

SEQ ID NO: 38096 - RNA, 15 nt, Homo sapiens
cuuacaaugcauucu

SEQ ID NO: 38097 - RNA, 12 nt, Homo sapiens
cucgcuuccgca

SEQ ID NO: 38098 - RNA, 10 nt, Homo sapiens
ccucucccaa

SEQ ID NO: 38099 - RNA, 15 nt, Homo sapiens
ccgugugccugagcg

SEQ ID NO: 38100 - RNA, 15 nt, Homo sapiens
cauuaaaguucuagu

SEQ ID NO: 38101 - RNA, 23 nt, Homo sapiens
caggauggcaggaggcauccaaa

SEQ ID NO: 38102 - RNA, 22 nt, Homo sapiens
cacuccacuuggacaugggccc

SEQ ID NO: 38103 - RNA, 23 nt, Homo sapiens
cacuccacuuggacaugggcccc

SEQ ID NO: 38104 - RNA, 17 nt, Homo sapiens
uaaacuguaaagcuuug

SEQ ID NO: 38105 - RNA, 16 nt, Homo sapiens
guucuugugaacccaa

SEQ ID NO: 38106 - RNA, 20 nt, Homo sapiens
uacgcgagcgcgcgcgcccu

SEQ ID NO: 38107 - RNA, 10 nt, Homo sapiens
uaguucuuca

SEQ ID NO: 38108 - RNA, 11 nt, Homo sapiens
uaguucuucaa

SEQ ID NO: 38109 - RNA, 16 nt, Homo sapiens
ucacuaguuguaauuu

SEQ ID NO: 38110 - RNA, 20 nt, Homo sapiens
ucagcugccuccccagcucu

SEQ ID NO: 38111 - RNA, 21 nt, Homo sapiens
ucagcugccuccccagcucua

SEQ ID NO: 38112 - RNA, 22 nt, Homo sapiens
ucauuaaaguucuagugaccga

SEQ ID NO: 38113 - RNA, 16 nt, Homo sapiens
uccauggggugggggu

SEQ ID NO: 38114 - RNA, 17 nt, Homo sapiens
uccuccaugaauaucag

SEQ ID NO: 38115 - RNA, 18 nt, Homo sapiens
ugaaggggcggcggcccu

SEQ ID NO: 38116 - RNA, 20 nt, Homo sapiens
ucuugugaacccaaagugug

SEQ ID NO: 38117 - RNA, 22 nt, Homo sapiens
ucucuaucauuaaaguucuagu

SEQ ID NO: 38118 - RNA, 18 nt, Homo sapiens
guaugaaaaugucauugu

SEQ ID NO: 38119 - RNA, 14 nt, Homo sapiens
gucauuguucuugu

SEQ ID NO: 38120 - RNA, 11 nt, Homo sapiens
gucagccagcc

SEQ ID NO: 38121 - RNA, 20 nt, Homo sapiens
guacgcgagcgcgcgcgccc

SEQ ID NO: 38122 - RNA, 15 nt, Homo sapiens
ggagccuccagcugc

SEQ ID NO: 38123 - RNA, 18 nt, Homo sapiens
gcugcgcgccgcgcuccu

SEQ ID NO: 38124 - RNA, 11 nt, Homo sapiens
gcuuccgcauc

SEQ ID NO: 38125 - RNA, 16 nt, Homo sapiens
cuaaaacaccucagcu

SEQ ID NO: 38126 - RNA, 18 nt, Homo sapiens
acaccucagcugccuccc

SEQ ID NO: 38127 - RNA, 19 nt, Homo sapiens
acaccucagcugccucccc

SEQ ID NO: 38128 - RNA, 23 nt, Homo sapiens
gaacuuauuuguacauuuuuuuu

SEQ ID NO: 38129 - RNA, 14 nt, Homo sapiens
gacgcugcugccgu

SEQ ID NO: 38130 - RNA, 22 nt, Homo sapiens
gagcucccaggaggggcuucug

SEQ ID NO: 38131 - RNA, 13 nt, Homo sapiens
aaacaccucagcu

SEQ ID NO: 38132 - RNA, 18 nt, Homo sapiens
aaacuaggugcugcagcc

SEQ ID NO: 38133 - RNA, 14 nt, Homo sapiens
aaauugagcuaggg

SEQ ID NO: 38134 - RNA, 16 nt, Homo sapiens
aaaguucuagugaccg

SEQ ID NO: 38135 - RNA, 14 nt, Homo sapiens
aaacaccucagcug

SEQ ID NO: 38136 - RNA, 15 nt, Homo sapiens
agccuccagcugccc

SEQ ID NO: 38137 - RNA, 17 nt, Homo sapiens
agccuccagcugccccg

SEQ ID NO: 38138 - RNA, 21 nt, Homo sapiens
aggaggcauccaaaggcuccu

SEQ ID NO: 38139 - RNA, 18 nt, Homo sapiens
accucucccaacuauaaa

SEQ ID NO: 38140 - RNA, 15 nt, Homo sapiens
acggcuccggacgcu

SEQ ID NO: 38141 - RNA, 17 nt, Homo sapiens
acuuauuuguacauuuu

SEQ ID NO: 38142 - RNA, 22 nt, Homo sapiens
acucauuaaauggaaguaaaug

SEQ ID NO: 38143 - RNA, 19 nt, Homo sapiens
acugcagcgaguacuuccc

SEQ ID NO: 38144 - RNA, 17 nt, Homo sapiens
aagagccggagccucca

SEQ ID NO: 38145 - RNA, 23 nt, Homo sapiens
aacuuauuuguacauuuuuuuuu

SEQ ID NO: 38146 - RNA, 20 nt, Homo sapiens
aacuuuuccaaugacauuuu

SEQ ID NO: 38147 - RNA, 23 nt, Homo sapiens
aacuuuuuguuuuguuucuuccu

SEQ ID NO: 38148 - RNA, 22 nt, Homo sapiens
aagagccggagccuccagcugc

SEQ ID NO: 38149 - RNA, 15 nt, Homo sapiens
aucaguuauuuuuaa

SEQ ID NO: 38150 - RNA, 16 nt, Homo sapiens
aucaguuauuuuuaaa

SEQ ID NO: 38151 - RNA, 22 nt, Homo sapiens
auccuagucucuaucauuaaag

SEQ ID NO: 38152 - RNA, 23 nt, Homo sapiens
aucccggccggcgcgcucauccc

SEQ ID NO: 38153 - RNA, 13 nt, Homo sapiens
augaccuggccgc

SEQ ID NO: 38154 - RNA, 23 nt, Homo sapiens
auagccagguaccuucucaccug

SEQ ID NO: 38155 - RNA, 18 nt, Homo sapiens
auauauuuuuuuuuuuaa

SEQ ID NO: 38156 - RNA, 19 nt, Homo sapiens
auauauuuuuuuuuuuaaa

SEQ ID NO: 38157 - RNA, 20 nt, Homo sapiens
auauauuuuuuuuuuuaaaa

SEQ ID NO: 38158 - RNA, 23 nt, Homo sapiens
aguaugaaaaugucauuguucuu

SEQ ID NO: 38159 - RNA, 14 nt, Homo sapiens
aggggcgcucgcuu

SEQ ID NO: 38160 - RNA, 23 nt, Homo sapiens
caccgcagggugaacugcagcga

SEQ ID NO: 38161 - RNA, 17 nt, Homo sapiens
auucugagguaaccuca

SEQ ID NO: 38162 - RNA, 14 nt, Homo sapiens
auuaaaguucuagu

SEQ ID NO: 38163 - RNA, 16 nt, Homo sapiens
cauauuuuauuauagu

SEQ ID NO: 38164 - RNA, 17 nt, Homo sapiens
caggcuggcaccgcugu

SEQ ID NO: 38165 - RNA, 22 nt, Homo sapiens
caggcggguccgggucgcagga

SEQ ID NO: 38166 - RNA, 22 nt, Homo sapiens
caggauggcaggaggcauccaa

SEQ ID NO: 38167 - RNA, 15 nt, Homo sapiens
ccagcucuaucccaa

SEQ ID NO: 38168 - RNA, 22 nt, Homo sapiens
ccaaaccagagccugaguguug

SEQ ID NO: 38169 - RNA, 23 nt, Homo sapiens
ccagaucaagccugccucaauca

SEQ ID NO: 38170 - RNA, 19 nt, Homo sapiens
ccgcauccuagucucuauc

SEQ ID NO: 38171 - RNA, 17 nt, Homo sapiens
ccggcgcgcucauccca

SEQ ID NO: 38172 - RNA, 18 nt, Homo sapiens
ccggcgcgcucaucccac

SEQ ID NO: 38173 - RNA, 22 nt, Homo sapiens
ccuccaugaauaucaguuauuu

SEQ ID NO: 38174 - RNA, 23 nt, Homo sapiens
ccuccaugaauaucaguuauuuu

SEQ ID NO: 38175 - RNA, 17 nt, Homo sapiens
cgaguacuucccgcugu

SEQ ID NO: 38176 - RNA, 18 nt, Homo sapiens
cuauaaaacuaggugcug

SEQ ID NO: 38177 - RNA, 15 nt, Homo sapiens
agccgggaaagaaga

SEQ ID NO: 38178 - RNA, 21 nt, Homo sapiens
ccugagcggaccuucccagcu

SEQ ID NO: 38179 - RNA, 18 nt, Homo sapiens
cagcuagaauucacucca

SEQ ID NO: 38180 - RNA, 15 nt, Homo sapiens
gccccaauucgaucc

SEQ ID NO: 38181 - RNA, 13 nt, Homo sapiens
ccggaaacuccac

SEQ ID NO: 38182 - RNA, 18 nt, Homo sapiens
cugcagcgaguacuuccc

SEQ ID NO: 38183 - RNA, 23 nt, Homo sapiens
aagccugccucaaucaguauuca

SEQ ID NO: 38184 - RNA, 22 nt, Homo sapiens
aauguuguuuuaggaauacaua

SEQ ID NO: 38185 - RNA, 21 nt, Homo sapiens
cauuguucuugugaacccaaa

SEQ ID NO: 38186 - RNA, 16 nt, Homo sapiens
ccucucccaacuauaa

SEQ ID NO: 38187 - RNA, 14 nt, Homo sapiens
ucacuccacuugga

SEQ ID NO: 38188 - RNA, 13 nt, Homo sapiens
cgcgcuccgcgca

SEQ ID NO: 38189 - RNA, 13 nt, Homo sapiens
uccugugggaccu

SEQ ID NO: 38190 - RNA, 20 nt, Homo sapiens
guaccuucucaccugugaga

SEQ ID NO: 38191 - RNA, 14 nt, Homo sapiens
agcccucuucugac

SEQ ID NO: 38192 - RNA, 15 nt, Homo sapiens
cggagccuccagcug

SEQ ID NO: 38193 - RNA, 18 nt, Homo sapiens
ccacauccugugggaccu

SEQ ID NO: 38194 - RNA, 19 nt, Homo sapiens
ggcuuuaaaacuuauccuc

SEQ ID NO: 38195 - RNA, 16 nt, Homo sapiens
ucaaucaguauucaua

SEQ ID NO: 38196 - RNA, 17 nt, Homo sapiens
uggcaggaggcauccaa

SEQ ID NO: 38197 - RNA, 21 nt, Homo sapiens
agagccugaguguugccuaau

SEQ ID NO: 38198 - RNA, 19 nt, Homo sapiens
auugaggcuuuaaaacuua

SEQ ID NO: 38199 - RNA, 12 nt, Homo sapiens
augcauucugag

SEQ ID NO: 38200 - RNA, 20 nt, Homo sapiens
agcucuaucccaaccucucc

SEQ ID NO: 38201 - RNA, 20 nt, Homo sapiens
cugagcccggaaacuccaca

SEQ ID NO: 38202 - RNA, 21 nt, Homo sapiens
acuuggacaugggccccagau

SEQ ID NO: 38203 - RNA, 18 nt, Homo sapiens
gcccacuuccucccggcc

SEQ ID NO: 38204 - RNA, 14 nt, Homo sapiens
cuccgcuacuucca

SEQ ID NO: 38205 - RNA, 16 nt, Homo sapiens
auuaaaguucuaguga

SEQ ID NO: 38206 - RNA, 15 nt, Homo sapiens
gacgcugcugccgug

SEQ ID NO: 38207 - RNA, 21 nt, Homo sapiens
caacuauaaaacuaggugcug

SEQ ID NO: 38208 - RNA, 21 nt, Homo sapiens
ugugcggccuggucuaccugu

SEQ ID NO: 38209 - RNA, 23 nt, Homo sapiens
gggcgcucgcuuccgcauccuag

SEQ ID NO: 38210 - RNA, 16 nt, Homo sapiens
accaggcacccccaga

SEQ ID NO: 38211 - RNA, 22 nt, Homo sapiens
uaguuguaauuuuuuuguggga

SEQ ID NO: 38212 - RNA, 20 nt, Homo sapiens
ugcauauuuuauuauaguca

SEQ ID NO: 38213 - RNA, 18 nt, Homo sapiens
aagagccggagccuccag

SEQ ID NO: 38214 - RNA, 20 nt, Homo sapiens
agccggagccuccagcugcc

SEQ ID NO: 38215 - RNA, 17 nt, Homo sapiens
agcccggaaacuccaca

SEQ ID NO: 38216 - RNA, 22 nt, Homo sapiens
cuaauuuguuuucccuucuuac

SEQ ID NO: 38217 - RNA, 21 nt, Homo sapiens
ugaaagucccagaucaagccu

SEQ ID NO: 38218 - RNA, 22 nt, Homo sapiens
cauccuagucucuaucauuaaa

SEQ ID NO: 38219 - RNA, 14 nt, Homo sapiens
aaguaugugcauau

SEQ ID NO: 38220 - RNA, 21 nt, Homo sapiens
aagagccggagccuccagcug

SEQ ID NO: 38221 - RNA, 15 nt, Homo sapiens
cugagacacaugggu

SEQ ID NO: 38222 - RNA, 17 nt, Homo sapiens
aaccagagccugagugu

SEQ ID NO: 38223 - RNA, 12 nt, Homo sapiens
aaagaagagccg

SEQ ID NO: 38224 - RNA, 16 nt, Homo sapiens
aagaacuuauuuguac

SEQ ID NO: 38225 - RNA, 13 nt, Homo sapiens
gagccuccagcug

SEQ ID NO: 38226 - RNA, 13 nt, Homo sapiens
gagacacaugggu

SEQ ID NO: 38227 - RNA, 21 nt, Homo sapiens
agaucaagccugccucaauca

SEQ ID NO: 38228 - RNA, 17 nt, Homo sapiens
uucacuccacuuggaca

SEQ ID NO: 38229 - RNA, 17 nt, Homo sapiens
gacacuaaaacaccuca

SEQ ID NO: 38230 - RNA, 23 nt, Homo sapiens
gaccuucccagcuagaauucacu

SEQ ID NO: 38231 - RNA, 14 nt, Homo sapiens
cugccugcccugaa

SEQ ID NO: 38232 - RNA, 17 nt, Homo sapiens
ugcagccccugggacca

SEQ ID NO: 38233 - RNA, 17 nt, Homo sapiens
cacacugagcugagggg

SEQ ID NO: 38234 - RNA, 16 nt, Homo sapiens
aacuauaaaacuaggu

SEQ ID NO: 38235 - RNA, 16 nt, Homo sapiens
cucaggcuggcaccgc

SEQ ID NO: 38236 - RNA, 18 nt, Homo sapiens
accuucucaccugugaga

SEQ ID NO: 38237 - RNA, 16 nt, Homo sapiens
ccggagccuccagcug

SEQ ID NO: 38238 - RNA, 11 nt, Homo sapiens
gcauccuaguc

SEQ ID NO: 38239 - RNA, 16 nt, Homo sapiens
gccuccgcuacuucca

SEQ ID NO: 38240 - RNA, 22 nt, Homo sapiens
aaagucccagaucaagccugcc

SEQ ID NO: 38241 - RNA, 15 nt, Homo sapiens
cuagaauucacucca

SEQ ID NO: 38242 - RNA, 23 nt, Homo sapiens
uccccugucacgugugggcaaug

SEQ ID NO: 38243 - RNA, 19 nt, Homo sapiens
uuucccuucuuacaaugca

SEQ ID NO: 38244 - RNA, 22 nt, Homo sapiens
uaaaaaaaaaacguauugcauu

SEQ ID NO: 38245 - RNA, 17 nt, Homo sapiens
gaauacauaaaguaugu

SEQ ID NO: 38246 - RNA, 17 nt, Homo sapiens
gaccugggccauaguca

SEQ ID NO: 38247 - RNA, 19 nt, Homo sapiens
cggcgggagggcgcggggc

SEQ ID NO: 38248 - RNA, 19 nt, Homo sapiens
acucuggucaagaagcauc

SEQ ID NO: 38249 - RNA, 19 nt, Homo sapiens
agguaccagccuuggauac

SEQ ID NO: 38250 - RNA, 23 nt, Homo sapiens
aaaaugucauuguucuugugaac

SEQ ID NO: 38251 - RNA, 22 nt, Homo sapiens
auccuagucucuaucauuaaag

SEQ ID NO: 38252 - RNA, 15 nt, Homo sapiens
ugugggaaauccaca

SEQ ID NO: 38253 - RNA, 22 nt, Homo sapiens
uccuccaugaauaucaguuauu

SEQ ID NO: 38254 - RNA, 14 nt, Homo sapiens
uaaaguucuaguga

SEQ ID NO: 38255 - RNA, 17 nt, Homo sapiens
uaaagcuuugugcagau

SEQ ID NO: 38256 - RNA, 16 nt, Homo sapiens
ugugaacccaaagugu

SEQ ID NO: 38257 - RNA, 13 nt, Homo sapiens
cauuaucagucca

SEQ ID NO: 38258 - RNA, 14 nt, Homo sapiens
cuagucucuaucau

SEQ ID NO: 38259 - RNA, 15 nt, Homo sapiens
gaauacauaaaguau

SEQ ID NO: 38260 - RNA, 20 nt, Homo sapiens
ggccugcucgcccacuuccu

SEQ ID NO: 38261 - RNA, 21 nt, Homo sapiens
uuuucaauaaaacuuuuccaa

SEQ ID NO: 38262 - RNA, 16 nt, Homo sapiens
uuauagccagguaccu

SEQ ID NO: 38263 - RNA, 23 nt, Homo sapiens
ucccagcuagaauucacuccacu

SEQ ID NO: 38264 - RNA, 17 nt, Homo sapiens
cagauaccaugaugcug

SEQ ID NO: 38265 - RNA, 15 nt, Homo sapiens
cagacucuggucaag

SEQ ID NO: 38266 - RNA, 19 nt, Homo sapiens
ugggccccagauaccauga

SEQ ID NO: 38267 - RNA, 16 nt, Homo sapiens
guaaagcuuugugcag

SEQ ID NO: 38268 - RNA, 21 nt, Homo sapiens
ccaugaugcugagcccggaaa

SEQ ID NO: 38269 - RNA, 16 nt, Homo sapiens
aaacaccucagcugcc

SEQ ID NO: 38270 - RNA, 18 nt, Homo sapiens
aggcacccccagaaugac

SEQ ID NO: 38271 - RNA, 15 nt, Homo sapiens
ucuaucccaaccucu

SEQ ID NO: 38272 - RNA, 20 nt, Homo sapiens
uuaauuuauugaggcuuuaa

SEQ ID NO: 38273 - RNA, 20 nt, Homo sapiens
ccugagacacaugggugcua

SEQ ID NO: 38274 - RNA, 16 nt, Homo sapiens
ccauuuuugaaaccaa

SEQ ID NO: 38275 - RNA, 15 nt, Homo sapiens
cuuccagggcuacgc

SEQ ID NO: 38276 - RNA, 17 nt, Homo sapiens
cagccuuggauacucca

SEQ ID NO: 38277 - RNA, 19 nt, Homo sapiens
uacauaaaguaugugcaua

SEQ ID NO: 38278 - RNA, 18 nt, Homo sapiens
cuccacuuggacaugggc

SEQ ID NO: 38279 - RNA, 14 nt, Homo sapiens
acacuaaaacaccu

SEQ ID NO: 38280 - RNA, 19 nt, Homo sapiens
cuuuaaaacuuauccucca

SEQ ID NO: 38281 - RNA, 21 nt, Homo sapiens
gaaacuccacauccuguggga

SEQ ID NO: 38282 - RNA, 12 nt, Homo sapiens
gcggaccuuccc

SEQ ID NO: 38283 - RNA, 22 nt, Homo sapiens
cucuaucauuaaaguucuagug

SEQ ID NO: 38284 - RNA, 19 nt, Homo sapiens
gcauccuagucucuaucau

SEQ ID NO: 38285 - RNA, 18 nt, Homo sapiens
gaagagccggagccucca

SEQ ID NO: 38286 - RNA, 10 nt, Homo sapiens
ggacaugggc

SEQ ID NO: 38287 - RNA, 20 nt, Homo sapiens
ugcauucugagguaaccuca

SEQ ID NO: 38288 - RNA, 16 nt, Homo sapiens
ugagccuuuguugcua

SEQ ID NO: 38289 - RNA, 18 nt, Homo sapiens
cugccuccccagcucuau

SEQ ID NO: 38290 - RNA, 13 nt, Homo sapiens
uuguucuugugaa

SEQ ID NO: 38291 - RNA, 17 nt, Homo sapiens
caguaugaaaaugucau

SEQ ID NO: 38292 - RNA, 21 nt, Homo sapiens
ugagcuaggggggucagccag

SEQ ID NO: 38293 - RNA, 16 nt, Homo sapiens
ggaacaugagccuuug

SEQ ID NO: 38294 - RNA, 12 nt, Homo sapiens
ugagguaaccuc

SEQ ID NO: 38295 - RNA, 13 nt, Homo sapiens
gccgacggagccg

SEQ ID NO: 38296 - RNA, 20 nt, Homo sapiens
aacugcagcgaguacuuccc

SEQ ID NO: 38297 - RNA, 17 nt, Homo sapiens
aauucacuccacuugga

SEQ ID NO: 38298 - RNA, 19 nt, Homo sapiens
cugagacacaugggugcua

SEQ ID NO: 38299 - RNA, 18 nt, Homo sapiens
auggcaggaggcauccaa

SEQ ID NO: 38300 - RNA, 16 nt, Homo sapiens
ugcagccccugggacc

SEQ ID NO: 38301 - RNA, 23 nt, Homo sapiens
uucgcgcgccuccgcuacuucca

SEQ ID NO: 38302 - RNA, 20 nt, Homo sapiens
uucccagcuagaauucacuc

SEQ ID NO: 38303 - RNA, 17 nt, Homo sapiens
gccugagcggaccuucc

SEQ ID NO: 38304 - RNA, 23 nt, Homo sapiens
agguaccuucucaccugugagac

SEQ ID NO: 38305 - RNA, 16 nt, Homo sapiens
uucugagguaaccuca

SEQ ID NO: 38306 - RNA, 15 nt, Homo sapiens
auaaaguaugugcau

SEQ ID NO: 38307 - RNA, 18 nt, Homo sapiens
cuaucauuaaaguucuag

SEQ ID NO: 38308 - RNA, 13 nt, Homo sapiens
uuccucgccacgc

SEQ ID NO: 38309 - RNA, 16 nt, Homo sapiens
uuaaaguucuagugac

SEQ ID NO: 38310 - RNA, 19 nt, Homo sapiens
caaagaugaucaguaugaa

SEQ ID NO: 38311 - RNA, 12 nt, Homo sapiens
uguucuugugaa

SEQ ID NO: 38312 - RNA, 21 nt, Homo sapiens
uagaauucacuccacuuggac

SEQ ID NO: 38313 - RNA, 19 nt, Homo sapiens
auaaaacuuuuccaaugac

SEQ ID NO: 38314 - RNA, 16 nt, Homo sapiens
cauaaaguaugugcau

SEQ ID NO: 38315 - RNA, 15 nt, Homo sapiens
uaaaguucuagugac

SEQ ID NO: 38316 - RNA, 19 nt, Homo sapiens
uaaaacuaggugcugcagc

SEQ ID NO: 38317 - RNA, 17 nt, Homo sapiens
uugagcuagggggguca

SEQ ID NO: 38318 - RNA, 14 nt, Homo sapiens
accugugagaccaa

SEQ ID NO: 38319 - RNA, 12 nt, Homo sapiens
aaaaaaacguau

SEQ ID NO: 38320 - RNA, 23 nt, Homo sapiens
cuaguuguaauuuuuuuguggga

SEQ ID NO: 38321 - RNA, 14 nt, Homo sapiens
cagaccgggguucc

SEQ ID NO: 38322 - RNA, 21 nt, Homo sapiens
ccuggcaaagaugaucaguau

SEQ ID NO: 38323 - RNA, 20 nt, Homo sapiens
caguuauuuuuaaacuguaa

SEQ ID NO: 38324 - RNA, 15 nt, Homo sapiens
uaaagcuuugugcag

SEQ ID NO: 38325 - RNA, 13 nt, Homo sapiens
ugagacacauggg

SEQ ID NO: 38326 - RNA, 12 nt, Homo sapiens
uuaucaguccaa

SEQ ID NO: 38327 - RNA, 19 nt, Homo sapiens
uacaaugcauucugaggua

SEQ ID NO: 38328 - RNA, 12 nt, Homo sapiens
acuccacauccu

SEQ ID NO: 38329 - RNA, 18 nt, Homo sapiens
agagccggagccuccagc

SEQ ID NO: 38330 - RNA, 20 nt, Homo sapiens
acuccacuuggacaugggcc

SEQ ID NO: 38331 - RNA, 17 nt, Homo sapiens
cuuccgcauccuagucu

SEQ ID NO: 38332 - RNA, 19 nt, Homo sapiens
aacuauaaaacuaggugcu

SEQ ID NO: 38333 - RNA, 11 nt, Homo sapiens
caaagugugac

SEQ ID NO: 38334 - RNA, 19 nt, Homo sapiens
aacccaaagugugacucau

SEQ ID NO: 38335 - RNA, 16 nt, Homo sapiens
aggagcucccaggagg

SEQ ID NO: 38336 - RNA, 15 nt, Homo sapiens
ccuccgcuacuucca

SEQ ID NO: 38337 - RNA, 17 nt, Homo sapiens
uaaagguccuggcaaag

SEQ ID NO: 38338 - RNA, 15 nt, Homo sapiens
cugccugcccugaaa

SEQ ID NO: 38339 - RNA, 16 nt, Homo sapiens
aucuucuuucaugaag

SEQ ID NO: 38340 - RNA, 20 nt, Homo sapiens
cuguaaagcuuugugcagau

SEQ ID NO: 38341 - RNA, 17 nt, Homo sapiens
ccauuuuugaaaccaaa

SEQ ID NO: 38342 - RNA, 16 nt, Homo sapiens
caugaauaucaguuau

SEQ ID NO: 38343 - RNA, 18 nt, Homo sapiens
cugacacuaaaacaccuc

SEQ ID NO: 38344 - RNA, 14 nt, Homo sapiens
cagauaccaugaug

SEQ ID NO: 38345 - RNA, 15 nt, Homo sapiens
ucauuaaaguucuag

SEQ ID NO: 38346 - RNA, 15 nt, Homo sapiens
cagccccugggacca

SEQ ID NO: 38347 - RNA, 12 nt, Homo sapiens
caucuucuuuca

SEQ ID NO: 38348 - RNA, 21 nt, Homo sapiens
aaccagagccugaguguugcc

SEQ ID NO: 38349 - RNA, 20 nt, Homo sapiens
cccagaucaagccugccuca

SEQ ID NO: 38350 - RNA, 13 nt, Homo sapiens
acuaggugcugca

SEQ ID NO: 38351 - RNA, 16 nt, Homo sapiens
uagccagguaccuucu

SEQ ID NO: 38352 - RNA, 17 nt, Homo sapiens
gaauucacuccacuugg

SEQ ID NO: 38353 - RNA, 16 nt, Homo sapiens
aaagcuuugugcagau

SEQ ID NO: 38354 - RNA, 16 nt, Homo sapiens
aacuuuuccaaugaca

SEQ ID NO: 38355 - RNA, 21 nt, Homo sapiens
ucgauccccugucacgugugg

SEQ ID NO: 38356 - RNA, 23 nt, Homo sapiens
uaaaaaaaaaacguauugcauuu

SEQ ID NO: 38357 - RNA, 13 nt, Homo sapiens
aguaugugcauau

SEQ ID NO: 38358 - RNA, 19 nt, Homo sapiens
cccuucuuacaaugcauuc

SEQ ID NO: 38359 - RNA, 13 nt, Homo sapiens
uuuauuauauaua

SEQ ID NO: 38360 - RNA, 19 nt, Homo sapiens
auauuuuauuauagucacu

SEQ ID NO: 38361 - RNA, 17 nt, Homo sapiens
uuugugggaaauccaca

SEQ ID NO: 38362 - RNA, 17 nt, Homo sapiens
guaaagcuuugugcaga

SEQ ID NO: 38363 - RNA, 20 nt, Homo sapiens
ccgcagggugaacugcagcg

SEQ ID NO: 38364 - RNA, 15 nt, Homo sapiens
uaaaguaugugcaua

SEQ ID NO: 38365 - RNA, 17 nt, Homo sapiens
ccaggcacccccagaau

SEQ ID NO: 38366 - RNA, 15 nt, Homo sapiens
uacauaaaguaugug

SEQ ID NO: 38367 - RNA, 21 nt, Homo sapiens
gcccugaaagucccagaucaa

SEQ ID NO: 38368 - RNA, 14 nt, Homo sapiens
gaacaugagccuuu

SEQ ID NO: 38369 - RNA, 14 nt, Homo sapiens
cgauccccugucac

SEQ ID NO: 38370 - RNA, 15 nt, Homo sapiens
cccagcuagaauuca

SEQ ID NO: 38371 - RNA, 11 nt, Homo sapiens
uaccuucucac

SEQ ID NO: 38372 - RNA, 19 nt, Homo sapiens
uggcaaagaugaucaguau

SEQ ID NO: 38373 - RNA, 13 nt, Homo sapiens
augaaaaugucau

SEQ ID NO: 38374 - RNA, 23 nt, Homo sapiens
agguccuggcaaagaugaucagu

SEQ ID NO: 38375 - RNA, 17 nt, Homo sapiens
ucauuaaaguucuagug

SEQ ID NO: 38376 - RNA, 17 nt, Homo sapiens
cagaucaagccugccuc

SEQ ID NO: 38377 - RNA, 13 nt, Homo sapiens
aauucacuccacu

SEQ ID NO: 38378 - RNA, 20 nt, Homo sapiens
gugagaccaaauugagcuag

SEQ ID NO: 38379 - RNA, 20 nt, Homo sapiens
aaacuuauccuccaugaaua

SEQ ID NO: 38380 - RNA, 19 nt, Homo sapiens
gccugcucgcccacuuccu

SEQ ID NO: 38381 - RNA, 22 nt, Homo sapiens
cccaacuauaaaacuaggugcu

SEQ ID NO: 38382 - RNA, 16 nt, Homo sapiens
ugagguaccagccuug

SEQ ID NO: 38383 - RNA, 11 nt, Homo sapiens
cgcaggaccau

SEQ ID NO: 38384 - RNA, 21 nt, Homo sapiens
uguuguuuuaggaauacauaa

SEQ ID NO: 38385 - RNA, 16 nt, Homo sapiens
acaccucagcugccuc

SEQ ID NO: 38386 - RNA, 22 nt, Homo sapiens
caggauggcaggaggcauccaa

SEQ ID NO: 38387 - RNA, 23 nt, Homo sapiens
ggaacaugagccuuuguugcuau

SEQ ID NO: 38388 - RNA, 23 nt, Homo sapiens
agaagagccggagccuccagcug

SEQ ID NO: 38389 - RNA, 16 nt, Homo sapiens
uaaagcuuugugcaga

SEQ ID NO: 38390 - RNA, 16 nt, Homo sapiens
agguaccuucucaccu

SEQ ID NO: 38391 - RNA, 24 nt, Homo sapiens
ggcuuuaaaacuuauccuccauga

SEQ ID NO: 38392 - RNA, 13 nt, Homo sapiens
gaccaucccggcc

SEQ ID NO: 38393 - RNA, 17 nt, Homo sapiens
uugcuaucaauccaaga

SEQ ID NO: 38394 - RNA, 14 nt, Homo sapiens
gcuaucaauccaag

SEQ ID NO: 38395 - RNA, 13 nt, Homo sapiens
acuccacuuggac

SEQ ID NO: 38396 - RNA, 13 nt, Homo sapiens
gccccaauucgau

SEQ ID NO: 38397 - RNA, 15 nt, Homo sapiens
gaccuucccagcuag

SEQ ID NO: 38398 - RNA, 14 nt, Homo sapiens
aaaaacguauugca

SEQ ID NO: 38399 - RNA, 21 nt, Homo sapiens
gcuccucggacggcuccggac

SEQ ID NO: 38400 - RNA, 14 nt, Homo sapiens
caagccugccucaa

SEQ ID NO: 38401 - RNA, 22 nt, Homo sapiens
aaaugucauuguucuugugaac

SEQ ID NO: 38402 - RNA, 15 nt, Homo sapiens
cuuuaaaacuuaucc

SEQ ID NO: 38403 - RNA, 22 nt, Homo sapiens
ucccaggaggggcuucugggca

SEQ ID NO: 38404 - RNA, 23 nt, Homo sapiens
uucccagcuagaauucacuccac

SEQ ID NO: 38405 - RNA, 16 nt, Homo sapiens
ucauauuuauagccag

SEQ ID NO: 38406 - RNA, 13 nt, Homo sapiens
ggggaggggcgcu

SEQ ID NO: 38407 - RNA, 19 nt, Homo sapiens
cagccuuggauacuccaug

SEQ ID NO: 38408 - RNA, 11 nt, Homo sapiens
agccggagccu

SEQ ID NO: 38409 - RNA, 16 nt, Homo sapiens
uaaaguaugugcauau

SEQ ID NO: 38410 - RNA, 21 nt, Homo sapiens
cuucugacacuaaaacaccuc

SEQ ID NO: 38411 - RNA, 16 nt, Homo sapiens
cugagacacaugggug

SEQ ID NO: 38412 - RNA, 20 nt, Homo sapiens
gcccugaaagucccagauca

SEQ ID NO: 38413 - RNA, 22 nt, Homo sapiens
ucuaucauuaaaguucuaguga

SEQ ID NO: 38414 - RNA, 16 nt, Homo sapiens
cauccugugggaccug

SEQ ID NO: 38415 - RNA, 22 nt, Homo sapiens
cuccugagacacaugggugcua

SEQ ID NO: 38416 - RNA, 13 nt, Homo sapiens
uaucaguccaaag

SEQ ID NO: 38417 - RNA, 18 nt, Homo sapiens
ucuaucauuaaaguucua

SEQ ID NO: 38418 - RNA, 20 nt, Homo sapiens
cuucccagcuagaauucacu

SEQ ID NO: 38419 - RNA, 17 nt, Homo sapiens
cgccuccgcuacuucca

SEQ ID NO: 38420 - RNA, 15 nt, Homo sapiens
ccuggccgcagugag

SEQ ID NO: 38421 - RNA, 19 nt, Homo sapiens
aaauguuguuuuaggaaua

SEQ ID NO: 38422 - RNA, 20 nt, Homo sapiens
cauuguucuugugaacccaa

SEQ ID NO: 38423 - RNA, 16 nt, Homo sapiens
gcauccuagucucuau

SEQ ID NO: 38424 - RNA, 15 nt, Homo sapiens
ugaauaucaguuauu

SEQ ID NO: 38425 - RNA, 13 nt, Homo sapiens
uccgcuacuucca

SEQ ID NO: 38426 - RNA, 22 nt, Homo sapiens
uugggggggaggugagguacca

SEQ ID NO: 38427 - RNA, 19 nt, Homo sapiens
cgcucaucccacccgccca

SEQ ID NO: 38428 - RNA, 20 nt, Homo sapiens
gccucagggugcacacagga

SEQ ID NO: 38429 - RNA, 21 nt, Homo sapiens
ucaauaaaacuuuuccaauga

SEQ ID NO: 38430 - RNA, 19 nt, Homo sapiens
accauuuuugaaaccaaac

SEQ ID NO: 38431 - RNA, 12 nt, Homo sapiens
accucauuauca

SEQ ID NO: 38432 - RNA, 14 nt, Homo sapiens
ugccugcccugaaa

SEQ ID NO: 38433 - RNA, 22 nt, Homo sapiens
aauacauaaaguaugugcauau

SEQ ID NO: 38434 - RNA, 17 nt, Homo sapiens
uauagucacuaguugua

SEQ ID NO: 38435 - RNA, 20 nt, Homo sapiens
ggcggguccgggucgcagga

SEQ ID NO: 38436 - RNA, 19 nt, Homo sapiens
gcuuuaaaacuuauccucc

SEQ ID NO: 38437 - RNA, 15 nt, Homo sapiens
aagucccagaucaag

SEQ ID NO: 38438 - RNA, 20 nt, Homo sapiens
ugagccuuuguugcuaucaa

SEQ ID NO: 38439 - RNA, 23 nt, Homo sapiens
ccugaaagucccagaucaagccu

SEQ ID NO: 38440 - RNA, 20 nt, Homo sapiens
cuccauggggugggggugga

SEQ ID NO: 38441 - RNA, 17 nt, Homo sapiens
ugcagcgaguacuuccc

SEQ ID NO: 38442 - RNA, 17 nt, Homo sapiens
gcuucugggcagacucu

SEQ ID NO: 38443 - RNA, 21 nt, Homo sapiens
aauccaagaacuuauuuguac

SEQ ID NO: 38444 - RNA, 14 nt, Homo sapiens
uuccaaugacauuu

SEQ ID NO: 38445 - RNA, 17 nt, Homo sapiens
caauaaaacuuuuccaa

SEQ ID NO: 38446 - RNA, 15 nt, Homo sapiens
cuuauccuccaugaa

SEQ ID NO: 38447 - RNA, 17 nt, Homo sapiens
aaacguauugcauuuaa

SEQ ID NO: 38448 - RNA, 11 nt, Homo sapiens
acaaugcauuc

SEQ ID NO: 38449 - RNA, 22 nt, Homo sapiens
gcucgcuuccgcauccuagucu

SEQ ID NO: 38450 - RNA, 17 nt, Homo sapiens
ucaguccaaagggcaug

SEQ ID NO: 38451 - RNA, 23 nt, Homo sapiens
aacccaaagugugacucauuaaa

SEQ ID NO: 38452 - RNA, 14 nt, Homo sapiens
aaaguucuagugac

SEQ ID NO: 38453 - RNA, 18 nt, Homo sapiens
cugucacgugugggcaau

SEQ ID NO: 38454 - RNA, 20 nt, Homo sapiens
uaaaacaccucagcugccuc

SEQ ID NO: 38455 - RNA, 23 nt, Homo sapiens
uugagcuaggggggucagccagc

SEQ ID NO: 38456 - RNA, 21 nt, Homo sapiens
uccaaagggcauggguuuuau

SEQ ID NO: 38457 - RNA, 20 nt, Homo sapiens
auggcaggaggcauccaaag

SEQ ID NO: 38458 - RNA, 22 nt, Homo sapiens
ugaacugcagcgaguacuuccc

SEQ ID NO: 38459 - RNA, 22 nt, Homo sapiens
ucugccugcccugaaaguccca

SEQ ID NO: 38460 - RNA, 17 nt, Homo sapiens
ucauuguucuugugaac

SEQ ID NO: 38461 - RNA, 16 nt, Homo sapiens
accuucucaccuguga

SEQ ID NO: 38462 - RNA, 16 nt, Homo sapiens
ccgcauccuagucucu

SEQ ID NO: 38463 - RNA, 16 nt, Homo sapiens
ucuaucauuaaaguuc

SEQ ID NO: 38464 - RNA, 20 nt, Homo sapiens
acauuuuuuuuuucaauaaa

SEQ ID NO: 38465 - RNA, 14 nt, Homo sapiens
uaaaguaugugcau

SEQ ID NO: 38466 - RNA, 17 nt, Homo sapiens
cauccuagucucuauca

SEQ ID NO: 38467 - RNA, 11 nt, Homo sapiens
cgcuacuucca

SEQ ID NO: 38468 - RNA, 18 nt, Homo sapiens
gacaugggccccagauac

SEQ ID NO: 38469 - RNA, 17 nt, Homo sapiens
cggagccuccagcugcc

SEQ ID NO: 38470 - RNA, 22 nt, Homo sapiens
gagaccaaggcccccgggccga

SEQ ID NO: 38471 - RNA, 23 nt, Homo sapiens
uugcauuuaauuuauugaggcuu

SEQ ID NO: 38472 - RNA, 20 nt, Homo sapiens
aauaaaacuuuuccaaugac

SEQ ID NO: 38473 - RNA, 16 nt, Homo sapiens
caaugcauucugaggu

SEQ ID NO: 38474 - RNA, 12 nt, Homo sapiens
augggccccaga

SEQ ID NO: 38475 - RNA, 19 nt, Homo sapiens
uuggauacuccauggggug

SEQ ID NO: 38476 - RNA, 22 nt, Homo sapiens
cuuuguugcuaucaauccaaga

SEQ ID NO: 38477 - RNA, 19 nt, Homo sapiens
augucauuguucuugugaa

SEQ ID NO: 38478 - RNA, 11 nt, Homo sapiens
aacccaaagug

SEQ ID NO: 38479 - RNA, 15 nt, Homo sapiens
aaggcuccugagaca

SEQ ID NO: 38480 - RNA, 14 nt, Homo sapiens
caccugugagacca

SEQ ID NO: 38481 - RNA, 14 nt, Homo sapiens
uggcgcuggcugcg

SEQ ID NO: 38482 - RNA, 19 nt, Homo sapiens
cccucuccucucuuccucc

SEQ ID NO: 38483 - RNA, 21 nt, Homo sapiens
uuucuuccuuuuuuaguucuu

SEQ ID NO: 38484 - RNA, 21 nt, Homo sapiens
cgccuccgcuacuuccagggc

SEQ ID NO: 38485 - RNA, 16 nt, Homo sapiens
auccacacugagcuga

SEQ ID NO: 38486 - RNA, 23 nt, Homo sapiens
agcccucuucugacacuaaaaca

SEQ ID NO: 38487 - RNA, 13 nt, Homo sapiens
aaaguucuaguga

SEQ ID NO: 38488 - RNA, 17 nt, Homo sapiens
ugggccauagucauucu

SEQ ID NO: 38489 - RNA, 18 nt, Homo sapiens
gauugagaaggagcuccc

SEQ ID NO: 38490 - RNA, 20 nt, Homo sapiens
ugcgcucggccugcucgccc

SEQ ID NO: 38491 - RNA, 17 nt, Homo sapiens
cucuaucccaaccucuc

SEQ ID NO: 38492 - RNA, 21 nt, Homo sapiens
gagcuaggggggucagccagc

SEQ ID NO: 38493 - RNA, 15 nt, Homo sapiens
uuaguucuucaaaga

SEQ ID NO: 38494 - RNA, 12 nt, Homo sapiens
caugagccuuug

SEQ ID NO: 38495 - RNA, 18 nt, Homo sapiens
uaucccaaccucucccaa

SEQ ID NO: 38496 - RNA, 22 nt, Homo sapiens
agcucuaucccaaccucuccca

SEQ ID NO: 38497 - RNA, 15 nt, Homo sapiens
ucccaggaggggcuu

SEQ ID NO: 38498 - RNA, 22 nt, Homo sapiens
ucuuguaaagguccuggcaaag

SEQ ID NO: 38499 - RNA, 15 nt, Homo sapiens
ucucaccugugagac

SEQ ID NO: 38500 - RNA, 15 nt, Homo sapiens
caggcggguccgggu

SEQ ID NO: 38501 - RNA, 16 nt, Homo sapiens
ggcugcugguggcgcu

SEQ ID NO: 38502 - RNA, 17 nt, Homo sapiens
agcuagaauucacucca

SEQ ID NO: 38503 - RNA, 13 nt, Homo sapiens
cccagauaccaug

SEQ ID NO: 38504 - RNA, 18 nt, Homo sapiens
accauuuuugaaaccaaa

SEQ ID NO: 38505 - RNA, 15 nt, Homo sapiens
gcucgcccacuuccu

SEQ ID NO: 38506 - RNA, 16 nt, Homo sapiens
agucucuaucauuaaa

SEQ ID NO: 38507 - RNA, 17 nt, Homo sapiens
gcaaagaugaucaguau

SEQ ID NO: 38508 - RNA, 14 nt, Homo sapiens
aaaacguauugcau

SEQ ID NO: 38509 - RNA, 18 nt, Homo sapiens
agcucuaucccaaccucu

SEQ ID NO: 38510 - RNA, 16 nt, Homo sapiens
agggaagggggaacau

SEQ ID NO: 38511 - RNA, 13 nt, Homo sapiens
agccuccagcugc

SEQ ID NO: 38512 - RNA, 20 nt, Homo sapiens
acacuaaaacaccucagcug

SEQ ID NO: 38513 - RNA, 13 nt, Homo sapiens
ugagguaccagcc

SEQ ID NO: 38514 - RNA, 16 nt, Homo sapiens
cauuuuugaaaccaaa

SEQ ID NO: 38515 - RNA, 16 nt, Homo sapiens
auucgauccccuguca

SEQ ID NO: 38516 - RNA, 15 nt, Homo sapiens
aaagucccagaucaa

SEQ ID NO: 38517 - RNA, 15 nt, Homo sapiens
agccuccagcugccc

SEQ ID NO: 38518 - RNA, 15 nt, Homo sapiens
agugugacucauuaa

SEQ ID NO: 38519 - RNA, 20 nt, Homo sapiens
aaaaaacguauugcauuuaa

SEQ ID NO: 38520 - RNA, 14 nt, Homo sapiens
ucuuccucccugga

SEQ ID NO: 38521 - RNA, 10 nt, Homo sapiens
acccccagaa

SEQ ID NO: 38522 - RNA, 17 nt, Homo sapiens
auccuagucucuaucau

SEQ ID NO: 38523 - RNA, 22 nt, Homo sapiens
agucucuaucauuaaaguucua

SEQ ID NO: 38524 - RNA, 19 nt, Homo sapiens
cagcgaguacuucccgcug

SEQ ID NO: 38525 - RNA, 20 nt, Homo sapiens
uuacccccugggagccccaa

SEQ ID NO: 38526 - RNA, 18 nt, Homo sapiens
agcuagaauucacuccac

SEQ ID NO: 38527 - RNA, 15 nt, Homo sapiens
uccgcauccuagucu

SEQ ID NO: 38528 - RNA, 20 nt, Homo sapiens
aauacauaaaguaugugcau

SEQ ID NO: 38529 - RNA, 16 nt, Homo sapiens
cuagaauucacuccac

SEQ ID NO: 38530 - RNA, 17 nt, Homo sapiens
ucauuaucaguccaaag

SEQ ID NO: 38531 - RNA, 14 nt, Homo sapiens
gcagacucugguca

SEQ ID NO: 38532 - RNA, 20 nt, Homo sapiens
accuucccagcuagaauuca

SEQ ID NO: 38533 - RNA, 20 nt, Homo sapiens
gagcggaccuucccagcuag

SEQ ID NO: 38534 - RNA, 14 nt, Homo sapiens
auccugugggaccu

SEQ ID NO: 38535 - RNA, 20 nt, Homo sapiens
cggggaggggcgcucgcuuc

SEQ ID NO: 38536 - RNA, 21 nt, Homo sapiens
gaacaugagccuuuguugcua

SEQ ID NO: 38537 - RNA, 23 nt, Homo sapiens
uccuggcaaagaugaucaguaug

SEQ ID NO: 38538 - RNA, 17 nt, Homo sapiens
gccuuggauacuccaug

SEQ ID NO: 38539 - RNA, 17 nt, Homo sapiens
augagccuuuguugcua

SEQ ID NO: 38540 - RNA, 15 nt, Homo sapiens
cggccugcucgccca

SEQ ID NO: 38541 - RNA, 22 nt, Homo sapiens
ucagccagcccucuucugacac

SEQ ID NO: 38542 - RNA, 15 nt, Homo sapiens
cagcgaguacuuccc

SEQ ID NO: 38543 - RNA, 14 nt, Homo sapiens
agcugccccgggga

SEQ ID NO: 38544 - RNA, 18 nt, Homo sapiens
ugugaacccaaaguguga

SEQ ID NO: 38545 - RNA, 19 nt, Homo sapiens
gcuccugagacacaugggu

SEQ ID NO: 38546 - RNA, 17 nt, Homo sapiens
ucaauccaagaacuuau

SEQ ID NO: 38547 - RNA, 17 nt, Homo sapiens
caaaggcuccugagaca

SEQ ID NO: 38548 - RNA, 16 nt, Homo sapiens
aguaugaaaaugucau

SEQ ID NO: 38549 - RNA, 17 nt, Homo sapiens
uccagcugccccgggga

SEQ ID NO: 38550 - RNA, 22 nt, Homo sapiens
agccuuggauacuccauggggu

SEQ ID NO: 38551 - RNA, 17 nt, Homo sapiens
agagccggagccuccag

SEQ ID NO: 38552 - RNA, 17 nt, Homo sapiens
gcuccugagacacaugg

SEQ ID NO: 38553 - RNA, 20 nt, Homo sapiens
ccccagauaccaugaugcug

SEQ ID NO: 38554 - RNA, 16 nt, Homo sapiens
gggugaacugcagcga

SEQ ID NO: 38555 - RNA, 13 nt, Homo sapiens
accuucccagcua

SEQ ID NO: 38556 - RNA, 16 nt, Homo sapiens
cugggccauagucauu

SEQ ID NO: 38557 - RNA, 17 nt, Homo sapiens
cgugggccugagaccaa

SEQ ID NO: 38558 - RNA, 19 nt, Homo sapiens
cuuugugcagauucuuuac

SEQ ID NO: 38559 - RNA, 13 nt, Homo sapiens
uagucucuaucau

SEQ ID NO: 38560 - RNA, 21 nt, Homo sapiens
cugugagaccaaauugagcua

SEQ ID NO: 38561 - RNA, 18 nt, Homo sapiens
agccagguaccuucucac

SEQ ID NO: 38562 - RNA, 12 nt, Homo sapiens
gcauccuagucu

SEQ ID NO: 38563 - RNA, 14 nt, Homo sapiens
ugcuaucaauccaa

SEQ ID NO: 38564 - RNA, 19 nt, Homo sapiens
agccgggaaagaagagccg

SEQ ID NO: 38565 - RNA, 13 nt, Homo sapiens
ccgugugccugag

SEQ ID NO: 38566 - RNA, 16 nt, Homo sapiens
ggcuccugagacacau

SEQ ID NO: 38567 - RNA, 19 nt, Homo sapiens
ccagccuuggauacuccau

SEQ ID NO: 38568 - RNA, 20 nt, Homo sapiens
acaggauggcaggaggcauc

SEQ ID NO: 38569 - RNA, 13 nt, Homo sapiens
uccgcauccuagu

SEQ ID NO: 38570 - RNA, 15 nt, Homo sapiens
uaugaaaaugucauu

SEQ ID NO: 38571 - RNA, 14 nt, Homo sapiens
aaagguccuggcaa

SEQ ID NO: 38572 - RNA, 22 nt, Homo sapiens
cacuaaaacaccucagcugccu

SEQ ID NO: 38573 - RNA, 12 nt, Homo sapiens
ccgcuacuucca

SEQ ID NO: 38574 - RNA, 18 nt, Homo sapiens
uagucucuaucauuaaag

SEQ ID NO: 38575 - RNA, 22 nt, Homo sapiens
aaggcuccugagacacaugggu

SEQ ID NO: 38576 - RNA, 20 nt, Homo sapiens
auucauauuuauagccaggu

SEQ ID NO: 38577 - RNA, 17 nt, Homo sapiens
cauaaaguaugugcaua

SEQ ID NO: 38578 - RNA, 14 nt, Homo sapiens
augaucaguaugaa

SEQ ID NO: 38579 - RNA, 17 nt, Homo sapiens
ucagcugccuccccagc

SEQ ID NO: 38580 - RNA, 15 nt, Homo sapiens
cuccgcuacuuccag

SEQ ID NO: 38581 - RNA, 20 nt, Homo sapiens
aaacuuuuccaaugacauuu

SEQ ID NO: 38582 - RNA, 10 nt, Homo sapiens
cauccaaagg

SEQ ID NO: 38583 - RNA, 12 nt, Homo sapiens
cgugugccugag

SEQ ID NO: 38584 - RNA, 18 nt, Homo sapiens
auucuuuacccccuggga

SEQ ID NO: 38585 - RNA, 18 nt, Homo sapiens
ugagacacaugggugcua

SEQ ID NO: 38586 - RNA, 13 nt, Homo sapiens
agaucaagccugc

SEQ ID NO: 38587 - RNA, 14 nt, Homo sapiens
uaaaacuaggugcu

SEQ ID NO: 38588 - RNA, 22 nt, Homo sapiens
agccuuuguugcuaucaaucca

SEQ ID NO: 38589 - RNA, 24 nt, Homo sapiens
aauacauaaaguaugugcauauuu

SEQ ID NO: 38590 - RNA, 14 nt, Homo sapiens
ugagcggaccuucc

SEQ ID NO: 38591 - RNA, 20 nt, Homo sapiens
gcgcgccuccgcuacuucca

SEQ ID NO: 38592 - RNA, 17 nt, Homo sapiens
ugcauuuaauuuauuga

SEQ ID NO: 38593 - RNA, 20 nt, Homo sapiens
cucgcuuccgcauccuaguc

SEQ ID NO: 38594 - RNA, 19 nt, Homo sapiens
cuaggggggucagccagcc

SEQ ID NO: 38595 - RNA, 21 nt, Homo sapiens
cagcccucuucugacacuaaa

SEQ ID NO: 38596 - RNA, 16 nt, Homo sapiens
ccuucuuacaaugcau

SEQ ID NO: 38597 - RNA, 16 nt, Homo sapiens
cgugugggcaauguuc

SEQ ID NO: 38598 - RNA, 16 nt, Homo sapiens
cuucuuacaaugcauu

SEQ ID NO: 38599 - RNA, 20 nt, Homo sapiens
aaacuccacauccuguggga

SEQ ID NO: 38600 - RNA, 18 nt, Homo sapiens
gacucuggucaagaagca

SEQ ID NO: 38601 - RNA, 14 nt, Homo sapiens
ucccaacuauaaaa

SEQ ID NO: 38602 - RNA, 19 nt, Homo sapiens
acuccacuuggacaugggc

SEQ ID NO: 38603 - RNA, 15 nt, Homo sapiens
agacacaugggugcu

SEQ ID NO: 38604 - RNA, 14 nt, Homo sapiens
gagccuuuguugcu

SEQ ID NO: 38605 - RNA, 19 nt, Homo sapiens
ccuccaugaauaucaguua

SEQ ID NO: 38606 - RNA, 19 nt, Homo sapiens
uccacauccugugggaccu

SEQ ID NO: 38607 - RNA, 13 nt, Homo sapiens
uggaaucuuguaa

SEQ ID NO: 38608 - RNA, 23 nt, Homo sapiens
uaccaugaugcugagcccggaaa

SEQ ID NO: 38609 - RNA, 17 nt, Homo sapiens
cuaggggggucagccag

SEQ ID NO: 38610 - RNA, 21 nt, Homo sapiens
ggcaauguucccccucuccuc

SEQ ID NO: 38611 - RNA, 17 nt, Homo sapiens
agccagguaccuucuca

SEQ ID NO: 38612 - RNA, 14 nt, Homo sapiens
agccccaauucgau

SEQ ID NO: 38613 - RNA, 19 nt, Homo sapiens
gaaacuccacauccugugg

SEQ ID NO: 38614 - RNA, 21 nt, Homo sapiens
aggauggcaggaggcauccaa

SEQ ID NO: 38615 - RNA, 22 nt, Homo sapiens
gagggcgcggggcggggagcga

SEQ ID NO: 38616 - RNA, 23 nt, Homo sapiens
uggcguuguggggaugaacuuuu

SEQ ID NO: 38617 - RNA, 13 nt, Homo sapiens
cccgugugccuga

SEQ ID NO: 38618 - RNA, 15 nt, Homo sapiens
cucgcccacuuccuc

SEQ ID NO: 38619 - RNA, 23 nt, Homo sapiens
cuccugagacacaugggugcuau

SEQ ID NO: 38620 - RNA, 22 nt, Homo sapiens
uaccagccuuggauacuccaug

SEQ ID NO: 38621 - RNA, 22 nt, Homo sapiens
gcugccgugggccugagaccaa

SEQ ID NO: 38622 - RNA, 17 nt, Homo sapiens
gccucaaucaguauuca

SEQ ID NO: 38623 - RNA, 16 nt, Homo sapiens
uucucaccugugagac

SEQ ID NO: 38624 - RNA, 19 nt, Homo sapiens
aggaauacauaaaguaugu

SEQ ID NO: 38625 - RNA, 14 nt, Homo sapiens
aaagcuuugugcag

SEQ ID NO: 38626 - RNA, 18 nt, Homo sapiens
uauccuccaugaauauca

SEQ ID NO: 38627 - RNA, 23 nt, Homo sapiens
uacuucccgcuguuccucgccac

SEQ ID NO: 38628 - RNA, 17 nt, Homo sapiens
ugaaagucccagaucaa

SEQ ID NO: 38629 - RNA, 19 nt, Homo sapiens
gagcuaggggggucagcca

SEQ ID NO: 38630 - RNA, 17 nt, Homo sapiens
gguccgggucgcaggac

SEQ ID NO: 38631 - RNA, 21 nt, Homo sapiens
acuguaaagcuuugugcagau

SEQ ID NO: 38632 - RNA, 20 nt, Homo sapiens
ccaggcacccccagaaugac

SEQ ID NO: 38633 - RNA, 19 nt, Homo sapiens
ccugagcggaccuucccag

SEQ ID NO: 38634 - RNA, 23 nt, Homo sapiens
uaauuuuuuugugggaaauccac

SEQ ID NO: 38635 - RNA, 19 nt, Homo sapiens
uggacaugggccccagaua

SEQ ID NO: 38636 - RNA, 14 nt, Homo sapiens
cacugagcugaggg

SEQ ID NO: 38637 - RNA, 12 nt, Homo sapiens
uaaaacaccuca

SEQ ID NO: 38638 - RNA, 16 nt, Homo sapiens
agccuuggauacucca

SEQ ID NO: 38639 - RNA, 12 nt, Homo sapiens
ucucuaucauua

SEQ ID NO: 38640 - RNA, 19 nt, Homo sapiens
ccucagggugcacacagga

SEQ ID NO: 38641 - RNA, 21 nt, Homo sapiens
ggccccagauaccaugaugcu

SEQ ID NO: 38642 - RNA, 15 nt, Homo sapiens
uccugagacacaugg

SEQ ID NO: 38643 - RNA, 18 nt, Homo sapiens
agucacuaguuguaauuu

SEQ ID NO: 38644 - RNA, 16 nt, Homo sapiens
ugcauauuuuauuaua

SEQ ID NO: 38645 - RNA, 20 nt, Homo sapiens
caugaugcugagcccggaaa

SEQ ID NO: 38646 - RNA, 15 nt, Homo sapiens
cuugugaacccaaag

SEQ ID NO: 38647 - RNA, 21 nt, Homo sapiens
cuggcugcgcucggccugcuc

SEQ ID NO: 38648 - RNA, 17 nt, Homo sapiens
uguugcuaucaauccaa

SEQ ID NO: 38649 - RNA, 15 nt, Homo sapiens
cagcugccccgggga

SEQ ID NO: 38650 - RNA, 23 nt, Homo sapiens
auucugagguaaccucauuauca

SEQ ID NO: 38651 - RNA, 14 nt, Homo sapiens
auuuuugaaaccaa

SEQ ID NO: 38652 - RNA, 17 nt, Homo sapiens
caggaccaucccggccg

SEQ ID NO: 38653 - RNA, 18 nt, Homo sapiens
gcuuccgcauccuagucu

SEQ ID NO: 38654 - RNA, 15 nt, Homo sapiens
gcccggaaacuccac

SEQ ID NO: 38655 - RNA, 13 nt, Homo sapiens
aucaguccaaagg

SEQ ID NO: 38656 - RNA, 22 nt, Homo sapiens
auuuuuuugugggaaauccaca

SEQ ID NO: 38657 - RNA, 16 nt, Homo sapiens
ucuuccucccuggaau

SEQ ID NO: 38658 - RNA, 21 nt, Homo sapiens
gcucgcuuccgcauccuaguc

SEQ ID NO: 38659 - RNA, 15 nt, Homo sapiens
gauaccaugaugcug

SEQ ID NO: 38660 - RNA, 23 nt, Homo sapiens
agcgcgcgcgcccucuggcugcu

SEQ ID NO: 38661 - RNA, 20 nt, Homo sapiens
uguuguuuuaggaauacaua

SEQ ID NO: 38662 - RNA, 15 nt, Homo sapiens
agcccggaaacucca

SEQ ID NO: 38663 - RNA, 23 nt, Homo sapiens
gugaacugcagcgaguacuuccc

SEQ ID NO: 38664 - RNA, 16 nt, Homo sapiens
caagccugccucaauc

SEQ ID NO: 38665 - RNA, 18 nt, Homo sapiens
cugagcccggaaacucca

SEQ ID NO: 38666 - RNA, 19 nt, Homo sapiens
uccaaaggcuccugagaca

SEQ ID NO: 38667 - RNA, 18 nt, Homo sapiens
cugcagccccugggacca

SEQ ID NO: 38668 - RNA, 16 nt, Homo sapiens
cagaucaagccugccu

SEQ ID NO: 38669 - RNA, 22 nt, Homo sapiens
ucauuguucuugugaacccaaa

SEQ ID NO: 38670 - RNA, 19 nt, Homo sapiens
cauauuuuauuauagucac

SEQ ID NO: 38671 - RNA, 15 nt, Homo sapiens
gcgcgcucaucccac

SEQ ID NO: 38672 - RNA, 15 nt, Homo sapiens
aaaaacguauugcau

SEQ ID NO: 38673 - RNA, 19 nt, Homo sapiens
cugcagccccugggaccag

SEQ ID NO: 38674 - RNA, 14 nt, Homo sapiens
ggagccuccagcug

SEQ ID NO: 38675 - RNA, 15 nt, Homo sapiens
gaaagucccagauca

SEQ ID NO: 38676 - RNA, 13 nt, Homo sapiens
ugcuaucaaucca

SEQ ID NO: 38677 - RNA, 15 nt, Homo sapiens
aaccucauuaucagu

SEQ ID NO: 38678 - RNA, 23 nt, Homo sapiens
agcuaggggggucagccagcccu

SEQ ID NO: 38679 - RNA, 15 nt, Homo sapiens
ccugagacacauggg

SEQ ID NO: 38680 - RNA, 18 nt, Homo sapiens
aguaugaaaaugucauug

SEQ ID NO: 38681 - RNA, 18 nt, Homo sapiens
cagugaggcggauugaga

SEQ ID NO: 38682 - RNA, 18 nt, Homo sapiens
ggugagguaccagccuug

SEQ ID NO: 38683 - RNA, 22 nt, Homo sapiens
ugaggcuuuaaaacuuauccuc

SEQ ID NO: 38684 - RNA, 14 nt, Homo sapiens
gugugacucauuaa

SEQ ID NO: 38685 - RNA, 16 nt, Homo sapiens
caaucaguauucauau

SEQ ID NO: 38686 - RNA, 17 nt, Homo sapiens
cccaaagugugacucau

SEQ ID NO: 38687 - RNA, 18 nt, Homo sapiens
ugaucaguaugaaaaugu

SEQ ID NO: 38688 - RNA, 18 nt, Homo sapiens
gagacacaugggugcuau

SEQ ID NO: 38689 - RNA, 14 nt, Homo sapiens
cucaucccacccgc

SEQ ID NO: 38690 - RNA, 21 nt, Homo sapiens
cccagcuagaauucacuccac

SEQ ID NO: 38691 - RNA, 17 nt, Homo sapiens
uuugaaaccaaaccaga

SEQ ID NO: 38692 - RNA, 16 nt, Homo sapiens
gcuagaauucacucca

SEQ ID NO: 38693 - RNA, 16 nt, Homo sapiens
uuccgcauccuagucu

SEQ ID NO: 38694 - RNA, 21 nt, Homo sapiens
auucugagguaaccucauuau

SEQ ID NO: 38695 - RNA, 15 nt, Homo sapiens
agccccugggaccag

SEQ ID NO: 38696 - RNA, 17 nt, Homo sapiens
aucaguccaaagggcau

SEQ ID NO: 38697 - RNA, 19 nt, Homo sapiens
acaugagccuuuguugcua

SEQ ID NO: 38698 - RNA, 14 nt, Homo sapiens
gccagguaccuucu

SEQ ID NO: 38699 - RNA, 16 nt, Homo sapiens
uaucaauccaagaacu

SEQ ID NO: 38700 - RNA, 20 nt, Homo sapiens
uacauaaaguaugugcauau

SEQ ID NO: 38701 - RNA, 17 nt, Homo sapiens
ccugaaagucccagauc

SEQ ID NO: 38702 - RNA, 23 nt, Homo sapiens
ugcauucugagguaaccucauua

SEQ ID NO: 38703 - RNA, 19 nt, Homo sapiens
ucuuacaaugcauucugag

SEQ ID NO: 38704 - RNA, 20 nt, Homo sapiens
uuacaaugcauucugaggua

SEQ ID NO: 38705 - RNA, 14 nt, Homo sapiens
ucugccugcccuga

SEQ ID NO: 38706 - RNA, 22 nt, Homo sapiens
cagcugccuccccagcucuauc

SEQ ID NO: 38707 - RNA, 18 nt, Homo sapiens
uagccagguaccuucuca

SEQ ID NO: 38708 - RNA, 14 nt, Homo sapiens
ucaagccugccuca

SEQ ID NO: 38709 - RNA, 21 nt, Homo sapiens
ugacacuaaaacaccucagcu

SEQ ID NO: 38710 - RNA, 19 nt, Homo sapiens
ugagcggaccuucccagcu

SEQ ID NO: 38711 - RNA, 13 nt, Homo sapiens
ugccuccccagcu

SEQ ID NO: 38712 - RNA, 14 nt, Homo sapiens
gaccuucccagcua

SEQ ID NO: 38713 - RNA, 20 nt, Homo sapiens
gccucagggugcacacagga

SEQ ID NO: 38714 - RNA, 13 nt, Homo sapiens
gcggaccuuccca

SEQ ID NO: 38715 - RNA, 19 nt, Homo sapiens
gcguuguggggaugaacuu

SEQ ID NO: 38716 - RNA, 14 nt, Homo sapiens
gcggaccuucccag

SEQ ID NO: 38717 - RNA, 13 nt, Homo sapiens
gcuaucaauccaa

SEQ ID NO: 38718 - RNA, 18 nt, Homo sapiens
gccagcccucuucugaca

SEQ ID NO: 38719 - RNA, 18 nt, Homo sapiens
gccauagucauucugccu

SEQ ID NO: 38720 - RNA, 13 nt, Homo sapiens
gccuccccagcuc

SEQ ID NO: 38721 - RNA, 12 nt, Homo sapiens
cgugugccugag

SEQ ID NO: 38722 - RNA, 14 nt, Homo sapiens
cucuucugacacua

SEQ ID NO: 38723 - RNA, 13 nt, Homo sapiens
cugccucaaucag

SEQ ID NO: 38724 - RNA, 24 nt, Homo sapiens
gcugccuccccagcucuaucccaa

SEQ ID NO: 38725 - RNA, 22 nt, Homo sapiens
gcugcagccccugggaccaggc

SEQ ID NO: 38726 - RNA, 23 nt, Homo sapiens
guacauuuuuuuuuucaauaaaa

SEQ ID NO: 38727 - RNA, 22 nt, Homo sapiens
guacauuuuuuuuuucaauaaa

SEQ ID NO: 38728 - RNA, 17 nt, Homo sapiens
ucccagcuagaauucac

SEQ ID NO: 38729 - RNA, 23 nt, Homo sapiens
ucaccugugagaccaaauugagc

SEQ ID NO: 38730 - RNA, 20 nt, Homo sapiens
uacauuuuuuuuuucaauaa

SEQ ID NO: 38731 - RNA, 21 nt, Homo sapiens
uacauuuuuuuuuucaauaaa

SEQ ID NO: 38732 - RNA, 19 nt, Homo sapiens
cagcuagaauucacuccac

SEQ ID NO: 38733 - RNA, 12 nt, Homo sapiens
caugaugcugag

SEQ ID NO: 38734 - RNA, 13 nt, Homo sapiens
cucuucugacacu

SEQ ID NO: 38735 - RNA, 12 nt, Homo sapiens
cugccucaauca

SEQ ID NO: 38736 - RNA, 14 nt, Homo sapiens
gaaagucccagauc

SEQ ID NO: 38737 - RNA, 19 nt, Homo sapiens
cuaucccaaccucucccaa

SEQ ID NO: 38738 - RNA, 16 nt, Homo sapiens
uguugcuaucaaucca

SEQ ID NO: 38739 - RNA, 17 nt, Homo sapiens
uguugcuaucaauccaa

SEQ ID NO: 38740 - RNA, 15 nt, Homo sapiens
agcccucuucugaca

SEQ ID NO: 38741 - RNA, 23 nt, Homo sapiens
agccuuuguugcuaucaauccaa

SEQ ID NO: 38742 - RNA, 22 nt, Homo sapiens
aggcauccaaaggcuccugaga

SEQ ID NO: 38743 - RNA, 22 nt, Homo sapiens
caagaacuuauuuguacauuuu

SEQ ID NO: 38744 - RNA, 10 nt, Homo sapiens
caaagauagg

SEQ ID NO: 38745 - RNA, 14 nt, Homo sapiens
caaaggcuccugag

SEQ ID NO: 38746 - RNA, 20 nt, Homo sapiens
ccugagcggaccuucccagc

SEQ ID NO: 38747 - RNA, 16 nt, Homo sapiens
cccugaaagucccaga

SEQ ID NO: 38748 - RNA, 14 nt, Homo sapiens
caggaggcauccaa

SEQ ID NO: 38749 - RNA, 14 nt, Homo sapiens
cagguaccuucuca

SEQ ID NO: 38750 - RNA, 18 nt, Homo sapiens
cagcuagaauucacucca

SEQ ID NO: 38751 - RNA, 23 nt, Homo sapiens
cagcucuaucccaaccucuccca

SEQ ID NO: 38752 - RNA, 19 nt, Homo sapiens
cagacucuggucaagaagc

SEQ ID NO: 38753 - RNA, 17 nt, Homo sapiens
aguucuucaaagauagg

SEQ ID NO: 38754 - RNA, 18 nt, Homo sapiens
aacuuuuuguuuuguuuc

SEQ ID NO: 38755 - RNA, 16 nt, Homo sapiens
aaugacauuuuguugg

SEQ ID NO: 38756 - RNA, 16 nt, Homo sapiens
accaaauugagcuagg

SEQ ID NO: 38757 - RNA, 17 nt, Homo sapiens
acuuuuccaaugacauu

SEQ ID NO: 38758 - RNA, 18 nt, Homo sapiens
acuuuuccaaugacauuu

SEQ ID NO: 38759 - RNA, 14 nt, Homo sapiens
acuauaaaacuagg

SEQ ID NO: 38760 - RNA, 21 nt, Homo sapiens
aaacuuuuccaaugacauuuu

SEQ ID NO: 38761 - RNA, 18 nt, Homo sapiens
aacaugagccuuuguugc

SEQ ID NO: 38762 - RNA, 17 nt, Homo sapiens
aauucacuccacuugga

SEQ ID NO: 38763 - RNA, 18 nt, Homo sapiens
cuccacuuggacaugggc

SEQ ID NO: 38764 - RNA, 18 nt, Homo sapiens
auggcaggaggcauccaa

SEQ ID NO: 38765 - RNA, 18 nt, Homo sapiens
aggcacccccagaaugac

SEQ ID NO: 38766 - RNA, 17 nt, Homo sapiens
uucacuccacuuggaca

SEQ ID NO: 38767 - RNA, 16 nt, Homo sapiens
uagccagguaccuucu

SEQ ID NO: 38768 - RNA, 17 nt, Homo sapiens
uugagcuagggggguca

SEQ ID NO: 38769 - RNA, 18 nt, Homo sapiens
accuucucaccugugaga

SEQ ID NO: 38770 - RNA, 17 nt, Homo sapiens
gcuucugggcagacucu

SEQ ID NO: 38771 - RNA, 21 nt, Homo sapiens
cuucugacacuaaaacaccuc

SEQ ID NO: 38772 - RNA, 19 nt, Homo sapiens
uaaaacuaggugcugcagc

SEQ ID NO: 38773 - RNA, 22 nt, Homo sapiens
cuccugagacacaugggugcua

SEQ ID NO: 38774 - RNA, 20 nt, Homo sapiens
agcucuaucccaaccucucc

SEQ ID NO: 38775 - RNA, 18 nt, Homo sapiens
gacucuggucaagaagca

SEQ ID NO: 38776 - RNA, 18 nt, Homo sapiens
cuauaaaacuaggugcug

SEQ ID NO: 38777 - RNA, 22 nt, Homo sapiens
aaagucccagaucaagccugcc

SEQ ID NO: 38778 - RNA, 22 nt, Homo sapiens
agccuuuguugcuaucaaucca

SEQ ID NO: 38779 - RNA, 17 nt, Homo sapiens
ccugaaagucccagauc

SEQ ID NO: 38780 - RNA, 12 nt, Homo sapiens
uaaaacaccuca

SEQ ID NO: 38781 - RNA, 15 nt, Homo sapiens
gaaagucccagauca

SEQ ID NO: 38782 - RNA, 21 nt, Homo sapiens
ccugagcggaccuucccagcu

SEQ ID NO: 38783 - RNA, 14 nt, Homo sapiens
ucugccugcccuga

SEQ ID NO: 38784 - RNA, 19 nt, Homo sapiens
cuaggggggucagccagcc

SEQ ID NO: 38785 - RNA, 20 nt, Homo sapiens
acaggauggcaggaggcauc

SEQ ID NO: 38786 - RNA, 17 nt, Homo sapiens
gacacuaaaacaccuca

SEQ ID NO: 38787 - RNA, 15 nt, Homo sapiens
cagacucuggucaag

SEQ ID NO: 38788 - RNA, 20 nt, Homo sapiens
ccaggcacccccagaaugac

SEQ ID NO: 38789 - RNA, 16 nt, Homo sapiens
accuucucaccuguga

SEQ ID NO: 38790 - RNA, 16 nt, Homo sapiens
cugggccauagucauu

SEQ ID NO: 38791 - RNA, 15 nt, Homo sapiens
cccagcuagaauuca

SEQ ID NO: 38792 - RNA, 20 nt, Homo sapiens
guaccuucucaccugugaga

SEQ ID NO: 38793 - RNA, 13 nt, Homo sapiens
acuccacuuggac

SEQ ID NO: 38794 - RNA, 18 nt, Homo sapiens
agcuagaauucacuccac

SEQ ID NO: 38795 - RNA, 16 nt, Homo sapiens
ucauauuuauagccag

SEQ ID NO: 38796 - RNA, 16 nt, Homo sapiens
uucucaccugugagac

SEQ ID NO: 38797 - RNA, 13 nt, Homo sapiens
ugagguaccagcc

SEQ ID NO: 38798 - RNA, 14 nt, Homo sapiens
gcuaucaauccaag

SEQ ID NO: 38799 - RNA, 15 nt, Homo sapiens
ccuggccgcagugag

SEQ ID NO: 38800 - RNA, 16 nt, Homo sapiens
caaucaguauucauau

SEQ ID NO: 38801 - RNA, 16 nt, Homo sapiens
cugagacacaugggug

SEQ ID NO: 38802 - RNA, 17 nt, Homo sapiens
ugcagccccugggacca

SEQ ID NO: 38803 - RNA, 17 nt, Homo sapiens
uugcuaucaauccaaga

SEQ ID NO: 38804 - RNA, 19 nt, Homo sapiens
agguaccagccuuggauac

SEQ ID NO: 38805 - RNA, 23 nt, Homo sapiens
uugagcuaggggggucagccagc

SEQ ID NO: 38806 - RNA, 18 nt, Homo sapiens
uaucccaaccucucccaa

SEQ ID NO: 38807 - RNA, 17 nt, Homo sapiens
ccaggcacccccagaau

SEQ ID NO: 38808 - RNA, 20 nt, Homo sapiens
gugagaccaaauugagcuag

SEQ ID NO: 38809 - RNA, 22 nt, Homo sapiens
agcucuaucccaaccucuccca

SEQ ID NO: 38810 - RNA, 15 nt, Homo sapiens
cugagacacaugggu

SEQ ID NO: 38811 - RNA, 15 nt, Homo sapiens
cuagaauucacucca

SEQ ID NO: 38812 - RNA, 14 nt, Homo sapiens
accugugagaccaa

SEQ ID NO: 38813 - RNA, 23 nt, Homo sapiens
aagccugccucaaucaguauuca

SEQ ID NO: 38814 - RNA, 11 nt, Homo sapiens
uaccuucucac

SEQ ID NO: 38815 - RNA, 18 nt, Homo sapiens
ugagacacaugggugcua

SEQ ID NO: 38816 - RNA, 16 nt, Homo sapiens
ggaacaugagccuuug

SEQ ID NO: 38817 - RNA, 17 nt, Homo sapiens
cagccuuggauacucca

SEQ ID NO: 38818 - RNA, 21 nt, Homo sapiens
aauccaagaacuuauuuguac

SEQ ID NO: 38819 - RNA, 16 nt, Homo sapiens
caagccugccucaauc

SEQ ID NO: 38820 - RNA, 13 nt, Homo sapiens
agaucaagccugc

SEQ ID NO: 38821 - RNA, 16 nt, Homo sapiens
aagaacuuauuuguac

SEQ ID NO: 38822 - RNA, 18 nt, Homo sapiens
ccacauccugugggaccu

SEQ ID NO: 38823 - RNA, 17 nt, Homo sapiens
gccugagcggaccuucc

SEQ ID NO: 38824 - RNA, 23 nt, Homo sapiens
uggcguuguggggaugaacuuuu

SEQ ID NO: 38825 - RNA, 20 nt, Homo sapiens
acuccacuuggacaugggcc

SEQ ID NO: 38826 - RNA, 16 nt, Homo sapiens
agguaccuucucaccu

SEQ ID NO: 38827 - RNA, 15 nt, Homo sapiens
aaggcuccugagaca

SEQ ID NO: 38828 - RNA, 12 nt, Homo sapiens
caugagccuuug

SEQ ID NO: 38829 - RNA, 15 nt, Homo sapiens
cugccugcccugaaa

SEQ ID NO: 38830 - RNA, 15 nt, Homo sapiens
ucucaccugugagac

SEQ ID NO: 38831 - RNA, 19 nt, Homo sapiens
ccugagcggaccuucccag

SEQ ID NO: 38832 - RNA, 13 nt, Homo sapiens
ugagacacauggg

SEQ ID NO: 38833 - RNA, 13 nt, Homo sapiens
gagacacaugggu

SEQ ID NO: 38834 - RNA, 19 nt, Homo sapiens
uccaaaggcuccugagaca

SEQ ID NO: 38835 - RNA, 23 nt, Homo sapiens
agcuaggggggucagccagcccu

SEQ ID NO: 38836 - RNA, 17 nt, Homo sapiens
cuaggggggucagccag

SEQ ID NO: 38837 - RNA, 16 nt, Homo sapiens
aaacaccucagcugcc

SEQ ID NO: 38838 - RNA, 19 nt, Homo sapiens
ccucagggugcacacagga

SEQ ID NO: 38839 - RNA, 14 nt, Homo sapiens
gagccuuuguugcu

SEQ ID NO: 38840 - RNA, 13 nt, Homo sapiens
cccagauaccaug

SEQ ID NO: 38841 - RNA, 14 nt, Homo sapiens
caagccugccucaa

SEQ ID NO: 38842 - RNA, 15 nt, Homo sapiens
gaccuucccagcuag

SEQ ID NO: 38843 - RNA, 21 nt, Homo sapiens
ugaaagucccagaucaagccu

SEQ ID NO: 38844 - RNA, 21 nt, Homo sapiens
ucaauaaaacuuuuccaauga

SEQ ID NO: 38845 - RNA, 15 nt, Homo sapiens
agccccugggaccag

SEQ ID NO: 38846 - RNA, 20 nt, Homo sapiens
gccucagggugcacacagga

SEQ ID NO: 38847 - RNA, 16 nt, Homo sapiens
acaccucagcugccuc

SEQ ID NO: 38848 - RNA, 22 nt, Homo sapiens
cacuaaaacaccucagcugccu

SEQ ID NO: 38849 - RNA, 13 nt, Homo sapiens
cccgugugccuga

SEQ ID NO: 38850 - RNA, 22 nt, Homo sapiens
caggauggcaggaggcauccaa

SEQ ID NO: 38851 - RNA, 15 nt, Homo sapiens
ucuaucccaaccucu

SEQ ID NO: 38852 - RNA, 19 nt, Homo sapiens
uggacaugggccccagaua

SEQ ID NO: 38853 - RNA, 19 nt, Homo sapiens
gagcuaggggggucagcca

SEQ ID NO: 38854 - RNA, 23 nt, Homo sapiens
ccugaaagucccagaucaagccu

SEQ ID NO: 38855 - RNA, 18 nt, Homo sapiens
cugacacuaaaacaccuc

SEQ ID NO: 38856 - RNA, 21 nt, Homo sapiens
gagcuaggggggucagccagc

SEQ ID NO: 38857 - RNA, 15 nt, Homo sapiens
agacacaugggugcu

SEQ ID NO: 38858 - RNA, 14 nt, Homo sapiens
ucccaacuauaaaa

SEQ ID NO: 38859 - RNA, 13 nt, Homo sapiens
uccugugggaccu

SEQ ID NO: 38860 - RNA, 20 nt, Homo sapiens
aauaaaacuuuuccaaugac

SEQ ID NO: 38861 - RNA, 20 nt, Homo sapiens
auggcaggaggcauccaaag

SEQ ID NO: 38862 - RNA, 20 nt, Homo sapiens
caugaugcugagcccggaaa

SEQ ID NO: 38863 - RNA, 16 nt, Homo sapiens
gcuagaauucacucca

SEQ ID NO: 38864 - RNA, 14 nt, Homo sapiens
gccagguaccuucu

SEQ ID NO: 38865 - RNA, 14 nt, Homo sapiens
ugccugcccugaaa

SEQ ID NO: 38866 - RNA, 13 nt, Homo sapiens
acuaggugcugca

SEQ ID NO: 38867 - RNA, 15 nt, Homo sapiens
ccugagacacauggg

SEQ ID NO: 38868 - RNA, 22 nt, Homo sapiens
ucugccugcccugaaaguccca

SEQ ID NO: 38869 - RNA, 23 nt, Homo sapiens
uaccaugaugcugagcccggaaa

SEQ ID NO: 38870 - RNA, 19 nt, Homo sapiens
aacuauaaaacuaggugcu

SEQ ID NO: 38871 - RNA, 20 nt, Homo sapiens
uaaaacaccucagcugccuc

SEQ ID NO: 38872 - RNA, 19 nt, Homo sapiens
acuccacuuggacaugggc

SEQ ID NO: 38873 - RNA, 21 nt, Homo sapiens
gcccugaaagucccagaucaa

SEQ ID NO: 38874 - RNA, 18 nt, Homo sapiens
cugagcccggaaacucca

SEQ ID NO: 38875 - RNA, 14 nt, Homo sapiens
uuccaaugacauuu

SEQ ID NO: 38876 - RNA, 16 nt, Homo sapiens
cagaucaagccugccu

SEQ ID NO: 38877 - RNA, 16 nt, Homo sapiens
agggaagggggaacau

SEQ ID NO: 38878 - RNA, 17 nt, Homo sapiens
caauaaaacuuuuccaa

SEQ ID NO: 38879 - RNA, 20 nt, Homo sapiens
ugagccuuuguugcuaucaa

SEQ ID NO: 38880 - RNA, 14 nt, Homo sapiens
gcagacucugguca

SEQ ID NO: 38881 - RNA, 16 nt, Homo sapiens
aggagcucccaggagg

SEQ ID NO: 38882 - RNA, 21 nt, Homo sapiens
uagaauucacuccacuuggac

SEQ ID NO: 38883 - RNA, 18 nt, Homo sapiens
agcucuaucccaaccucu

SEQ ID NO: 38884 - RNA, 12 nt, Homo sapiens
acuccacauccu

SEQ ID NO: 38885 - RNA, 12 nt, Homo sapiens
augggccccaga

SEQ ID NO: 38886 - RNA, 21 nt, Homo sapiens
uuucuuccuuuuuuaguucuu

SEQ ID NO: 38887 - RNA, 15 nt, Homo sapiens
ucccaggaggggcuu

SEQ ID NO: 38888 - RNA, 23 nt, Homo sapiens
cuccugagacacaugggugcuau

SEQ ID NO: 38889 - RNA, 15 nt, Homo sapiens
gcccggaaacuccac

SEQ ID NO: 38890 - RNA, 17 nt, Homo sapiens
caaaggcuccugagaca

SEQ ID NO: 38891 - RNA, 23 nt, Homo sapiens
uucccagcuagaauucacuccac

SEQ ID NO: 38892 - RNA, 16 nt, Homo sapiens
accaggcacccccaga

SEQ ID NO: 38893 - RNA, 15 nt, Homo sapiens
agcccggaaacucca

SEQ ID NO: 38894 - RNA, 19 nt, Homo sapiens
uuggauacuccauggggug

SEQ ID NO: 38895 - RNA, 19 nt, Homo sapiens
cagccuuggauacuccaug

SEQ ID NO: 38896 - RNA, 17 nt, Homo sapiens
gccuuggauacuccaug

SEQ ID NO: 38897 - RNA, 20 nt, Homo sapiens
gcccugaaagucccagauca

SEQ ID NO: 38898 - RNA, 22 nt, Homo sapiens
cuuuguugcuaucaauccaaga

SEQ ID NO: 38899 - RNA, 16 nt, Homo sapiens
uaucaauccaagaacu

SEQ ID NO: 38900 - RNA, 21 nt, Homo sapiens
acuuggacaugggccccagau

SEQ ID NO: 38901 - RNA, 20 nt, Homo sapiens
auucauauuuauagccaggu

SEQ ID NO: 38902 - RNA, 14 nt, Homo sapiens
caccugugagacca

SEQ ID NO: 38903 - RNA, 20 nt, Homo sapiens
acacuaaaacaccucagcug

SEQ ID NO: 38904 - RNA, 20 nt, Homo sapiens
cccagaucaagccugccuca

SEQ ID NO: 38905 - RNA, 18 nt, Homo sapiens
cagcuagaauucacucca

SEQ ID NO: 38906 - RNA, 14 nt, Homo sapiens
ugagcggaccuucc

SEQ ID NO: 38907 - RNA, 14 nt, Homo sapiens
cugccugcccugaa

SEQ ID NO: 38908 - RNA, 18 nt, Homo sapiens
cagugaggcggauugaga

SEQ ID NO: 38909 - RNA, 16 nt, Homo sapiens
ugagguaccagccuug

SEQ ID NO: 38910 - RNA, 10 nt, Homo sapiens
ggacaugggc

SEQ ID NO: 38911 - RNA, 20 nt, Homo sapiens
aaacuuuuccaaugacauuu

SEQ ID NO: 38912 - RNA, 21 nt, Homo sapiens
caacuauaaaacuaggugcug

SEQ ID NO: 38913 - RNA, 10 nt, Homo sapiens
cauccaaagg

SEQ ID NO: 38914 - RNA, 16 nt, Homo sapiens
ugagccuuuguugcua

SEQ ID NO: 38915 - RNA, 17 nt, Homo sapiens
gcuccugagacacaugg

SEQ ID NO: 38916 - RNA, 20 nt, Homo sapiens
cugagcccggaaacuccaca

SEQ ID NO: 38917 - RNA, 16 nt, Homo sapiens
uuauagccagguaccu

SEQ ID NO: 38918 - RNA, 13 nt, Homo sapiens
accuucccagcua

SEQ ID NO: 38919 - RNA, 19 nt, Homo sapiens
acucuggucaagaagcauc

SEQ ID NO: 38920 - RNA, 21 nt, Homo sapiens
gaacaugagccuuuguugcua

SEQ ID NO: 38921 - RNA, 21 nt, Homo sapiens
cugugagaccaaauugagcua

SEQ ID NO: 38922 - RNA, 16 nt, Homo sapiens
cuagaauucacuccac

SEQ ID NO: 38923 - RNA, 23 nt, Homo sapiens
agcccucuucugacacuaaaaca

SEQ ID NO: 38924 - RNA, 14 nt, Homo sapiens
acacuaaaacaccu

SEQ ID NO: 38925 - RNA, 14 nt, Homo sapiens
uaaaacuaggugcu

SEQ ID NO: 38926 - RNA, 21 nt, Homo sapiens
agaucaagccugccucaauca

SEQ ID NO: 38927 - RNA, 19 nt, Homo sapiens
gcuccugagacacaugggu

SEQ ID NO: 38928 - RNA, 16 nt, Homo sapiens
ugcagccccugggacc

SEQ ID NO: 38929 - RNA, 21 nt, Homo sapiens
gaaacuccacauccuguggga

SEQ ID NO: 38930 - RNA, 17 nt, Homo sapiens
agccagguaccuucuca

SEQ ID NO: 38931 - RNA, 20 nt, Homo sapiens
gagcggaccuucccagcuag

SEQ ID NO: 38932 - RNA, 17 nt, Homo sapiens
cagauaccaugaugcug

SEQ ID NO: 38933 - RNA, 17 nt, Homo sapiens
gaccugggccauaguca

SEQ ID NO: 38934 - RNA, 20 nt, Homo sapiens
accuucccagcuagaauuca

SEQ ID NO: 38935 - RNA, 21 nt, Homo sapiens
ugagcuaggggggucagccag

SEQ ID NO: 38936 - RNA, 19 nt, Homo sapiens
ccagccuuggauacuccau

SEQ ID NO: 38937 - RNA, 18 nt, Homo sapiens
gauugagaaggagcuccc

SEQ ID NO: 38938 - RNA, 19 nt, Homo sapiens
auaaaacuuuuccaaugac

SEQ ID NO: 38939 - RNA, 23 nt, Homo sapiens
agguaccuucucaccugugagac

SEQ ID NO: 38940 - RNA, 20 nt, Homo sapiens
uucccagcuagaauucacuc

SEQ ID NO: 38941 - RNA, 20 nt, Homo sapiens
cuccauggggugggggugga

SEQ ID NO: 38942 - RNA, 18 nt, Homo sapiens
cugcagccccugggacca

SEQ ID NO: 38943 - RNA, 17 nt, Homo sapiens
gccucaaucaguauuca

SEQ ID NO: 38944 - RNA, 17 nt, Homo sapiens
ugaaagucccagaucaa

SEQ ID NO: 38945 - RNA, 10 nt, Homo sapiens
acccccagaa

SEQ ID NO: 38946 - RNA, 13 nt, Homo sapiens
aauucacuccacu

SEQ ID NO: 38947 - RNA, 14 nt, Homo sapiens
agcccucuucugac

SEQ ID NO: 38948 - RNA, 15 nt, Homo sapiens
uuaguucuucaaaga

SEQ ID NO: 38949 - RNA, 23 nt, Homo sapiens
gaccuucccagcuagaauucacu

SEQ ID NO: 38950 - RNA, 16 nt, Homo sapiens
agccuuggauacucca

SEQ ID NO: 38951 - RNA, 19 nt, Homo sapiens
gaaacuccacauccugugg

SEQ ID NO: 38952 - RNA, 14 nt, Homo sapiens
auccugugggaccu

SEQ ID NO: 38953 - RNA, 23 nt, Homo sapiens
ucccagcuagaauucacuccacu

SEQ ID NO: 38954 - RNA, 13 nt, Homo sapiens
ccgugugccugag

SEQ ID NO: 38955 - RNA, 15 nt, Homo sapiens
gauaccaugaugcug

SEQ ID NO: 38956 - RNA, 14 nt, Homo sapiens
cagaccgggguucc

SEQ ID NO: 38957 - RNA, 21 nt, Homo sapiens
aggauggcaggaggcauccaa

SEQ ID NO: 38958 - RNA, 17 nt, Homo sapiens
agcuagaauucacucca

SEQ ID NO: 38959 - RNA, 13 nt, Homo sapiens
ugcuaucaaucca

SEQ ID NO: 38960 - RNA, 20 nt, Homo sapiens
aaacuccacauccuguggga

SEQ ID NO: 38961 - RNA, 14 nt, Homo sapiens
cagauaccaugaug

SEQ ID NO: 38962 - RNA, 17 nt, Homo sapiens
ucaauccaagaacuuau

SEQ ID NO: 38963 - RNA, 21 nt, Homo sapiens
ggccccagauaccaugaugcu

SEQ ID NO: 38964 - RNA, 15 nt, Homo sapiens
cagccccugggacca

SEQ ID NO: 38965 - RNA, 17 nt, Homo sapiens
cucuaucccaaccucuc

SEQ ID NO: 38966 - RNA, 20 nt, Homo sapiens
acauuuuuuuuuucaauaaa

SEQ ID NO: 38967 - RNA, 17 nt, Homo sapiens
ugggccauagucauucu

SEQ ID NO: 38968 - RNA, 15 nt, Homo sapiens
uccugagacacaugg

SEQ ID NO: 38969 - RNA, 22 nt, Homo sapiens
cccaacuauaaaacuaggugcu

SEQ ID NO: 38970 - RNA, 18 nt, Homo sapiens
gacaugggccccagauac

SEQ ID NO: 38971 - RNA, 18 nt, Homo sapiens
agccagguaccuucucac

SEQ ID NO: 38972 - RNA, 19 nt, Homo sapiens
cugcagccccugggaccag

SEQ ID NO: 38973 - RNA, 17 nt, Homo sapiens
cagaucaagccugccuc

SEQ ID NO: 38974 - RNA, 23 nt, Homo sapiens
ggaacaugagccuuuguugcuau

SEQ ID NO: 38975 - RNA, 19 nt, Homo sapiens
acaugagccuuuguugcua

SEQ ID NO: 38976 - RNA, 22 nt, Homo sapiens
cagcugccuccccagcucuauc

SEQ ID NO: 38977 - RNA, 15 nt, Homo sapiens
aagucccagaucaag

SEQ ID NO: 38978 - RNA, 17 nt, Homo sapiens
uguugcuaucaauccaa

SEQ ID NO: 38979 - RNA, 22 nt, Homo sapiens
uaccagccuuggauacuccaug

SEQ ID NO: 38980 - RNA, 18 nt, Homo sapiens
cugccuccccagcucuau

SEQ ID NO: 38981 - RNA, 22 nt, Homo sapiens
uugggggggaggugagguacca

SEQ ID NO: 38982 - RNA, 22 nt, Homo sapiens
ucccaggaggggcuucugggca

SEQ ID NO: 38983 - RNA, 21 nt, Homo sapiens
uuuucaauaaaacuuuuccaa

SEQ ID NO: 38984 - RNA, 17 nt, Homo sapiens
uggcaggaggcauccaa

SEQ ID NO: 38985 - RNA, 19 nt, Homo sapiens
uccacauccugugggaccu

SEQ ID NO: 38986 - RNA, 18 nt, Homo sapiens
ggugagguaccagccuug

SEQ ID NO: 38987 - RNA, 14 nt, Homo sapiens
gaacaugagccuuu

SEQ ID NO: 38988 - RNA, 16 nt, Homo sapiens
cauccugugggaccug

SEQ ID NO: 38989 - RNA, 21 nt, Homo sapiens
cccagcuagaauucacuccac

SEQ ID NO: 38990 - RNA, 18 nt, Homo sapiens
gagacacaugggugcuau

SEQ ID NO: 38991 - RNA, 20 nt, Homo sapiens
cuucccagcuagaauucacu

SEQ ID NO: 38992 - RNA, 13 nt, Homo sapiens
ccggaaacuccac

SEQ ID NO: 38993 - RNA, 19 nt, Homo sapiens
cugagacacaugggugcua

SEQ ID NO: 38994 - RNA, 15 nt, Homo sapiens
aaagucccagaucaa

SEQ ID NO: 38995 - RNA, 20 nt, Homo sapiens
ccccagauaccaugaugcug

SEQ ID NO: 38996 - RNA, 20 nt, Homo sapiens
ccugagacacaugggugcua

SEQ ID NO: 38997 - RNA, 17 nt, Homo sapiens
augagccuuuguugcua

SEQ ID NO: 38998 - RNA, 16 nt, Homo sapiens
ccucucccaacuauaa

SEQ ID NO: 38999 - RNA, 12 nt, Homo sapiens
cgugugccugag

SEQ ID NO: 39000 - RNA, 14 nt, Homo sapiens
ugcuaucaauccaa

SEQ ID NO: 39001 - RNA, 17 nt, Homo sapiens
ucagcugccuccccagc

SEQ ID NO: 39002 - RNA, 22 nt, Homo sapiens
aaggcuccugagacacaugggu

SEQ ID NO: 39003 - RNA, 21 nt, Homo sapiens
ccaugaugcugagcccggaaa

SEQ ID NO: 39004 - RNA, 21 nt, Homo sapiens
cagcccucuucugacacuaaa

SEQ ID NO: 39005 - RNA, 12 nt, Homo sapiens
gcggaccuuccc

SEQ ID NO: 39006 - RNA, 14 nt, Homo sapiens
ucacuccacuugga

SEQ ID NO: 39007 - RNA, 16 nt, Homo sapiens
ucaaucaguauucaua

SEQ ID NO: 39008 - RNA, 22 nt, Homo sapiens
ucagccagcccucuucugacac

SEQ ID NO: 39009 - RNA, 16 nt, Homo sapiens
ggcuccugagacacau

SEQ ID NO: 39010 - RNA, 16 nt, Homo sapiens
aacuauaaaacuaggu

SEQ ID NO: 39011 - RNA, 22 nt, Homo sapiens
agccuuggauacuccauggggu

SEQ ID NO: 39012 - RNA, 17 nt, Homo sapiens
agcccggaaacuccaca

SEQ ID NO: 39013 - RNA, 17 nt, Homo sapiens
gaauucacuccacuugg

SEQ ID NO: 39014 - RNA, 16 nt, Homo sapiens
aacuuuuccaaugaca

SEQ ID NO: 39015 - RNA, 19 nt, Homo sapiens
ugggccccagauaccauga

SEQ ID NO: 39016 - RNA, 18 nt, Homo sapiens
uggagaaaggacccucaa

SEQ ID NO: 39017 - RNA, 14 nt, Homo sapiens
ugugccuucauuuu

SEQ ID NO: 39018 - RNA, 19 nt, Homo sapiens
uucuuaagacgugauuuug

SEQ ID NO: 39019 - RNA, 14 nt, Homo sapiens
uuccaauacauuau

SEQ ID NO: 39020 - RNA, 15 nt, Homo sapiens
uuacuuaguguuaug

SEQ ID NO: 39021 - RNA, 18 nt, Homo sapiens
uuaaauggagaaaggacc

SEQ ID NO: 39022 - RNA, 14 nt, Homo sapiens
uguuuucauuaucu

SEQ ID NO: 39023 - RNA, 16 nt, Homo sapiens
uccccagcuguuuaug

SEQ ID NO: 39024 - RNA, 17 nt, Homo sapiens
guaagggaaacugccag

SEQ ID NO: 39025 - RNA, 19 nt, Homo sapiens
gguuuuucaguuuucagga

SEQ ID NO: 39026 - RNA, 12 nt, Homo sapiens
gcagggacagga

SEQ ID NO: 39027 - RNA, 18 nt, Homo sapiens
gcauauugauaauaaaau

SEQ ID NO: 39028 - RNA, 11 nt, Homo sapiens
gaacauaaaau

SEQ ID NO: 39029 - RNA, 15 nt, Homo sapiens
gaauacuaauaaaau

SEQ ID NO: 39030 - RNA, 19 nt, Homo sapiens
gaacguuuuuccuguucuu

SEQ ID NO: 39031 - RNA, 21 nt, Homo sapiens
gcaccuuuagaauauuaaaaa

SEQ ID NO: 39032 - RNA, 11 nt, Homo sapiens
caacacgagca

SEQ ID NO: 39033 - RNA, 13 nt, Homo sapiens
aguaaaaccacag

SEQ ID NO: 39034 - RNA, 19 nt, Homo sapiens
aggugcuacaaaaacacag

SEQ ID NO: 39035 - RNA, 20 nt, Homo sapiens
augacccccaucccaugggg

SEQ ID NO: 39036 - RNA, 21 nt, Homo sapiens
augacccccaucccauggggg

SEQ ID NO: 39037 - RNA, 17 nt, Homo sapiens
agcaaauuccaauacau

SEQ ID NO: 39038 - RNA, 19 nt, Homo sapiens
uuugugaagaaacauuuau

SEQ ID NO: 39039 - RNA, 13 nt, Homo sapiens
uuggacucauuuu

SEQ ID NO: 39040 - RNA, 15 nt, Homo sapiens
ugugccuucauuuuu

SEQ ID NO: 39041 - RNA, 17 nt, Homo sapiens
uggagaaaggacccuca

SEQ ID NO: 39042 - RNA, 18 nt, Homo sapiens
acaguuuuuauugcuugu

SEQ ID NO: 39043 - RNA, 17 nt, Homo sapiens
uucuauggcauauugau

SEQ ID NO: 39044 - RNA, 17 nt, Homo sapiens
uuaaauggagaaaggac

SEQ ID NO: 39045 - RNA, 22 nt, Homo sapiens
cuagaauacuaauaaaauacau

SEQ ID NO: 39046 - RNA, 19 nt, Homo sapiens
cuacaguguacagucuugu

SEQ ID NO: 39047 - RNA, 16 nt, Homo sapiens
cuacaaaaacacagca

SEQ ID NO: 39048 - RNA, 21 nt, Homo sapiens
cuuaguugcuguaugucucgu

SEQ ID NO: 39049 - RNA, 11 nt, Homo sapiens
cauauuaaaau

SEQ ID NO: 39050 - RNA, 15 nt, Homo sapiens
ccaacacgagcaggc

SEQ ID NO: 39051 - RNA, 12 nt, Homo sapiens
ucaaaacugcac

SEQ ID NO: 39052 - RNA, 12 nt, Homo sapiens
uauuucauuucu

SEQ ID NO: 39053 - RNA, 13 nt, Homo sapiens
uauuucauuucuu

SEQ ID NO: 39054 - RNA, 20 nt, Homo sapiens
uauuguuuaaaaucauuucu

SEQ ID NO: 39055 - RNA, 20 nt, Homo sapiens
guucacagccagacuggcac

SEQ ID NO: 39056 - RNA, 13 nt, Homo sapiens
uaaaacucauuuu

SEQ ID NO: 39057 - RNA, 14 nt, Homo sapiens
uaaaacucauuuuu

SEQ ID NO: 39058 - RNA, 16 nt, Homo sapiens
gugucuuaauuaaaag

SEQ ID NO: 39059 - RNA, 21 nt, Homo sapiens
gucuuguguuucuuuaguuuu

SEQ ID NO: 39060 - RNA, 22 nt, Homo sapiens
gucuuguguuucuuuaguuuuu

SEQ ID NO: 39061 - RNA, 18 nt, Homo sapiens
guaagggaaacugccagc

SEQ ID NO: 39062 - RNA, 13 nt, Homo sapiens
gguugauuucagc

SEQ ID NO: 39063 - RNA, 23 nt, Homo sapiens
ggucggguuuuauuguuuaaaau

SEQ ID NO: 39064 - RNA, 23 nt, Homo sapiens
gcucaacaagagacuggaaggac

SEQ ID NO: 39065 - RNA, 14 nt, Homo sapiens
aauguagauaaagc

SEQ ID NO: 39066 - RNA, 18 nt, Homo sapiens
aaucauaugggauacugc

SEQ ID NO: 39067 - RNA, 21 nt, Homo sapiens
cuuguuggauuuuugucuugu

SEQ ID NO: 39068 - RNA, 21 nt, Homo sapiens
cuucuaaguaaaaccacagca

SEQ ID NO: 39069 - RNA, 16 nt, Homo sapiens
cuacauacuauggaau

SEQ ID NO: 39070 - RNA, 20 nt, Homo sapiens
cucauuuuaaaaaauggaac

SEQ ID NO: 39071 - RNA, 22 nt, Homo sapiens
gcaccuuuagaauauuaaaaau

SEQ ID NO: 39072 - RNA, 15 nt, Homo sapiens
gaugaucuuuaaaau

SEQ ID NO: 39073 - RNA, 19 nt, Homo sapiens
gaccuguggccaaguucuu

SEQ ID NO: 39074 - RNA, 15 nt, Homo sapiens
acaacucgaaucacu

SEQ ID NO: 39075 - RNA, 15 nt, Homo sapiens
aaccccaucauccuc

SEQ ID NO: 39076 - RNA, 14 nt, Homo sapiens
aacaacucgaauca

SEQ ID NO: 39077 - RNA, 15 nt, Homo sapiens
aaauauuuguaucac

SEQ ID NO: 39078 - RNA, 19 nt, Homo sapiens
aaaaucauuucugcaucag

SEQ ID NO: 39079 - RNA, 20 nt, Homo sapiens
aaaaucauuucugcaucagc

SEQ ID NO: 39080 - RNA, 12 nt, Homo sapiens
aaaauacauacu

SEQ ID NO: 39081 - RNA, 14 nt, Homo sapiens
aaaauacauacuau

SEQ ID NO: 39082 - RNA, 15 nt, Homo sapiens
aacaacucgaaucac

SEQ ID NO: 39083 - RNA, 15 nt, Homo sapiens
acuaauaaaauacau

SEQ ID NO: 39084 - RNA, 18 nt, Homo sapiens
agcaaauuccaauacauu

SEQ ID NO: 39085 - RNA, 19 nt, Homo sapiens
acaguuuuuauugcuuguu

SEQ ID NO: 39086 - RNA, 14 nt, Homo sapiens
aagcuuauuaaaac

SEQ ID NO: 39087 - RNA, 15 nt, Homo sapiens
aagcuuauuaaaacu

SEQ ID NO: 39088 - RNA, 11 nt, Homo sapiens
aagaugaaaau

SEQ ID NO: 39089 - RNA, 17 nt, Homo sapiens
aaguaugcacuaaucaa

SEQ ID NO: 39090 - RNA, 23 nt, Homo sapiens
aagggaacugaacauuccagagc

SEQ ID NO: 39091 - RNA, 22 nt, Homo sapiens
aagugguauagaaaugcugguu

SEQ ID NO: 39092 - RNA, 18 nt, Homo sapiens
aaggaguccuugcaucaa

SEQ ID NO: 39093 - RNA, 15 nt, Homo sapiens
caaauuccaauacau

SEQ ID NO: 39094 - RNA, 21 nt, Homo sapiens
caagcaggcucaacauaacau

SEQ ID NO: 39095 - RNA, 14 nt, Homo sapiens
caacaaauaggaau

SEQ ID NO: 39096 - RNA, 20 nt, Homo sapiens
cauagauucccugagcagga

SEQ ID NO: 39097 - RNA, 20 nt, Homo sapiens
aauacugauguuccuaguga

SEQ ID NO: 39098 - RNA, 14 nt, Homo sapiens
uaaaaccacagcag

SEQ ID NO: 39099 - RNA, 14 nt, Homo sapiens
ucucuucuuuaaag

SEQ ID NO: 39100 - RNA, 16 nt, Homo sapiens
aagaggcagcuugaaa

SEQ ID NO: 39101 - RNA, 23 nt, Homo sapiens
gcaacgcaggcccccaggugcca

SEQ ID NO: 39102 - RNA, 14 nt, Homo sapiens
aaaugugccuucau

SEQ ID NO: 39103 - RNA, 16 nt, Homo sapiens
guaaaaccacagcagu

SEQ ID NO: 39104 - RNA, 17 nt, Homo sapiens
acaacucgaaucacuca

SEQ ID NO: 39105 - RNA, 12 nt, Homo sapiens
aaacucauccau

SEQ ID NO: 39106 - RNA, 21 nt, Homo sapiens
cuauugugcuuucuaucuaau

SEQ ID NO: 39107 - RNA, 14 nt, Homo sapiens
augaugaugaucuu

SEQ ID NO: 39108 - RNA, 14 nt, Homo sapiens
gaugugaacacauc

SEQ ID NO: 39109 - RNA, 19 nt, Homo sapiens
caggaaaucaaauaugcaa

SEQ ID NO: 39110 - RNA, 15 nt, Homo sapiens
cuggcacaguuuucu

SEQ ID NO: 39111 - RNA, 19 nt, Homo sapiens
caaaauaccaugccauuua

SEQ ID NO: 39112 - RNA, 14 nt, Homo sapiens
aagacuauucaaac

SEQ ID NO: 39113 - RNA, 20 nt, Homo sapiens
acagcaagggugaugggaaa

SEQ ID NO: 39114 - RNA, 19 nt, Homo sapiens
ucauuaucucaaaacugca

SEQ ID NO: 39115 - RNA, 21 nt, Homo sapiens
agcugcugaaacaacaaauag

SEQ ID NO: 39116 - RNA, 21 nt, Homo sapiens
agacgugauuuugcuguagaa

SEQ ID NO: 39117 - RNA, 14 nt, Homo sapiens
caggaaaucaaaua

SEQ ID NO: 39118 - RNA, 20 nt, Homo sapiens
guaugcacuaaucaauacuu

SEQ ID NO: 39119 - RNA, 22 nt, Homo sapiens
uauuuccauauuaaaaucacaa

SEQ ID NO: 39120 - RNA, 23 nt, Homo sapiens
aagaggcagcuugaaacugagau

SEQ ID NO: 39121 - RNA, 20 nt, Homo sapiens
ucauauugaugugugucuag

SEQ ID NO: 39122 - RNA, 22 nt, Homo sapiens
uaaguagggacuucugucuuca

SEQ ID NO: 39123 - RNA, 14 nt, Homo sapiens
uuuucauuaucuca

SEQ ID NO: 39124 - RNA, 20 nt, Homo sapiens
caucagcugcugaaacaaca

SEQ ID NO: 39125 - RNA, 22 nt, Homo sapiens
gcacuaaucaauacuuugaaca

SEQ ID NO: 39126 - RNA, 22 nt, Homo sapiens
aguaugcacuaaucaauacuuu

SEQ ID NO: 39127 - RNA, 23 nt, Homo sapiens
agaaagacuauucaaacagucuc

SEQ ID NO: 39128 - RNA, 16 nt, Homo sapiens
ucacguaaagcuagaa

SEQ ID NO: 39129 - RNA, 20 nt, Homo sapiens
auuucauaccuaucaucuua

SEQ ID NO: 39130 - RNA, 23 nt, Homo sapiens
uuuuauggaggcuuugcauagau

SEQ ID NO: 39131 - RNA, 21 nt, Homo sapiens
uacuuugaacacaaagccugu

SEQ ID NO: 39132 - RNA, 19 nt, Homo sapiens
ucacaaaucuuaacuugaa

SEQ ID NO: 39133 - RNA, 23 nt, Homo sapiens
uaaaaguacauguuaaacuuacu

SEQ ID NO: 39134 - RNA, 13 nt, Homo sapiens
uucacagccagac

SEQ ID NO: 39135 - RNA, 11 nt, Homo sapiens
uuugcuguaga

SEQ ID NO: 39136 - RNA, 23 nt, Homo sapiens
cuauaggugcuacaaaaacacag

SEQ ID NO: 39137 - RNA, 20 nt, Homo sapiens
aauuucucccagucauuuaa

SEQ ID NO: 39138 - RNA, 13 nt, Homo sapiens
ucauuuauuucca

SEQ ID NO: 39139 - RNA, 14 nt, Homo sapiens
uagauaaagcacug

SEQ ID NO: 39140 - RNA, 19 nt, Homo sapiens
uucuaaguaaaaccacagc

SEQ ID NO: 39141 - RNA, 15 nt, Homo sapiens
caaauaugcaaagca

SEQ ID NO: 39142 - RNA, 13 nt, Homo sapiens
ugcaaagcacuga

SEQ ID NO: 39143 - RNA, 13 nt, Homo sapiens
gauaaagcacugu

SEQ ID NO: 39144 - RNA, 16 nt, Homo sapiens
ucuuaaguagggacuu

SEQ ID NO: 39145 - RNA, 22 nt, Homo sapiens
uaugagauguagcaaauuccaa

SEQ ID NO: 39146 - RNA, 18 nt, Homo sapiens
aggugcuacaaaaacaca

SEQ ID NO: 39147 - RNA, 15 nt, Homo sapiens
ugcuuucuaucuaau

SEQ ID NO: 39148 - RNA, 16 nt, Homo sapiens
cccaaauuucauaccu

SEQ ID NO: 39149 - RNA, 18 nt, Homo sapiens
acgugauuuugcuguaga

SEQ ID NO: 39150 - RNA, 21 nt, Homo sapiens
gcuugcccuguuaaaagauga

SEQ ID NO: 39151 - RNA, 19 nt, Homo sapiens
auuagugaaguaugcacua

SEQ ID NO: 39152 - RNA, 22 nt, Homo sapiens
uagaauacuaauaaaauacaua

SEQ ID NO: 39153 - RNA, 12 nt, Homo sapiens
ggauaugagaug

SEQ ID NO: 39154 - RNA, 22 nt, Homo sapiens
uuaaguuacacauuuuucagau

SEQ ID NO: 39155 - RNA, 14 nt, Homo sapiens
gaacacaucagcuu

SEQ ID NO: 39156 - RNA, 15 nt, Homo sapiens
acuauucaaacaguc

SEQ ID NO: 39157 - RNA, 15 nt, Homo sapiens
cuuacuuaguguuau

SEQ ID NO: 39158 - RNA, 14 nt, Homo sapiens
guagcaaauuccaa

SEQ ID NO: 39159 - RNA, 22 nt, Homo sapiens
aauguaagggaaacugccagca

SEQ ID NO: 39160 - RNA, 12 nt, Homo sapiens
aggacuguagaa

SEQ ID NO: 39161 - RNA, 14 nt, Homo sapiens
ccuuuagaauauua

SEQ ID NO: 39162 - RNA, 20 nt, Homo sapiens
uacacauuuuucagauauaa

SEQ ID NO: 39163 - RNA, 14 nt, Homo sapiens
aucucaaaacugca

SEQ ID NO: 39164 - RNA, 17 nt, Homo sapiens
uggcacuuauaaccaaa

SEQ ID NO: 39165 - RNA, 14 nt, Homo sapiens
aauacuuugaacac

SEQ ID NO: 39166 - RNA, 23 nt, Homo sapiens
auguagcaaauuccaauacauua

SEQ ID NO: 39167 - RNA, 15 nt, Homo sapiens
aauaaaauacauacu

SEQ ID NO: 39168 - RNA, 23 nt, Homo sapiens
aagaaauguaagggaaacugcca

SEQ ID NO: 39169 - RNA, 19 nt, Homo sapiens
aaaucaaauaugcaaagca

SEQ ID NO: 39170 - RNA, 11 nt, Homo sapiens
aguugcuguau

SEQ ID NO: 39171 - RNA, 18 nt, Homo sapiens
ugaaguuuaauugacuua

SEQ ID NO: 39172 - RNA, 13 nt, Homo sapiens
aagacuccaaaga

SEQ ID NO: 39173 - RNA, 19 nt, Homo sapiens
ggagaaaggacccucaaga

SEQ ID NO: 39174 - RNA, 17 nt, Homo sapiens
uguagauaaagcacugu

SEQ ID NO: 39175 - RNA, 16 nt, Homo sapiens
ccagacuggcacaguu

SEQ ID NO: 39176 - RNA, 16 nt, Homo sapiens
ugaaguuuaauugacu

SEQ ID NO: 39177 - RNA, 22 nt, Homo sapiens
uuugaacaacucgaaucacuca

SEQ ID NO: 39178 - RNA, 18 nt, Homo sapiens
cugagaaagacuauucaa

SEQ ID NO: 39179 - RNA, 19 nt, Homo sapiens
ugaccaauauuguacaguu

SEQ ID NO: 39180 - RNA, 12 nt, Homo sapiens
uguguuacugau

SEQ ID NO: 39181 - RNA, 18 nt, Homo sapiens
aucuuuaaaauacacacu

SEQ ID NO: 39182 - RNA, 16 nt, Homo sapiens
gaacugaacauuccag

SEQ ID NO: 39183 - RNA, 23 nt, Homo sapiens
aagacgugauuuugcuguagaag

SEQ ID NO: 39184 - RNA, 16 nt, Homo sapiens
caauauuguacaguuu

SEQ ID NO: 39185 - RNA, 19 nt, Homo sapiens
gcaaccccaucauccucag

SEQ ID NO: 39186 - RNA, 19 nt, Homo sapiens
uaauaaaauacauacuaua

SEQ ID NO: 39187 - RNA, 21 nt, Homo sapiens
agaaaggacccucaagacaaa

SEQ ID NO: 39188 - RNA, 18 nt, Homo sapiens
cuaaguaaaaccacagca

SEQ ID NO: 39189 - RNA, 15 nt, Homo sapiens
ucacaaacucaucca

SEQ ID NO: 39190 - RNA, 16 nt, Homo sapiens
aauuccaauacauuau

SEQ ID NO: 39191 - RNA, 14 nt, Homo sapiens
uacaaaaacacagc

SEQ ID NO: 39192 - RNA, 21 nt, Homo sapiens
auaacuuuuuuuuaaguuaca

SEQ ID NO: 39193 - RNA, 14 nt, Homo sapiens
accuacaguguaca

SEQ ID NO: 39194 - RNA, 13 nt, Homo sapiens
aggacuguagaaa

SEQ ID NO: 39195 - RNA, 21 nt, Homo sapiens
uauagauucuuuauuagugaa

SEQ ID NO: 39196 - RNA, 18 nt, Homo sapiens
ggagaagagcuguucaca

SEQ ID NO: 39197 - RNA, 22 nt, Homo sapiens
uaaccaaagcccaaagugguau

SEQ ID NO: 39198 - RNA, 22 nt, Homo sapiens
auuuuaacuuccuuggacucau

SEQ ID NO: 39199 - RNA, 20 nt, Homo sapiens
cagcuguuuaugcauagaua

SEQ ID NO: 39200 - RNA, 13 nt, Homo sapiens
uaaaaaauggaac

SEQ ID NO: 39201 - RNA, 14 nt, Homo sapiens
acucauccauuaau

SEQ ID NO: 39202 - RNA, 21 nt, Homo sapiens
cucggagaagagcuguucaca

SEQ ID NO: 39203 - RNA, 18 nt, Homo sapiens
uuuaaaauacacacucaa

SEQ ID NO: 39204 - RNA, 14 nt, Homo sapiens
gagcaggcuacugu

SEQ ID NO: 39205 - RNA, 23 nt, Homo sapiens
guugauuucagcaccuacagugu

SEQ ID NO: 39206 - RNA, 18 nt, Homo sapiens
cugagaugugaacacauc

SEQ ID NO: 39207 - RNA, 22 nt, Homo sapiens
ccguuuugugaagaaacauuua

SEQ ID NO: 39208 - RNA, 12 nt, Homo sapiens
ugaacauuccag

SEQ ID NO: 39209 - RNA, 18 nt, Homo sapiens
cuaauaaaauacauacua

SEQ ID NO: 39210 - RNA, 15 nt, Homo sapiens
aggauaagagggauu

SEQ ID NO: 39211 - RNA, 23 nt, Homo sapiens
acucauuuuuguuuucauuaucu

SEQ ID NO: 39212 - RNA, 14 nt, Homo sapiens
cagccagacuggca

SEQ ID NO: 39213 - RNA, 18 nt, Homo sapiens
auuucauaccuaucaucu

SEQ ID NO: 39214 - RNA, 17 nt, Homo sapiens
auuaaaaucacaaacuc

SEQ ID NO: 39215 - RNA, 16 nt, Homo sapiens
aauaaaugugccuuca

SEQ ID NO: 39216 - RNA, 16 nt, Homo sapiens
ugaacacaaagccugu

SEQ ID NO: 39217 - RNA, 17 nt, Homo sapiens
guaagggaaacugccag

SEQ ID NO: 39218 - RNA, 23 nt, Homo sapiens
caacacgagcaggcuacugucag

SEQ ID NO: 39219 - RNA, 14 nt, Homo sapiens
aaaauacauacuau

SEQ ID NO: 39220 - RNA, 12 nt, Homo sapiens
ccaauacauuau

SEQ ID NO: 39221 - RNA, 20 nt, Homo sapiens
cugaccaauauuguacaguu

SEQ ID NO: 39222 - RNA, 15 nt, Homo sapiens
uaaucaauacuuuga

SEQ ID NO: 39223 - RNA, 15 nt, Homo sapiens
ccuguguuacugauu

SEQ ID NO: 39224 - RNA, 15 nt, Homo sapiens
cugaccaauauugua

SEQ ID NO: 39225 - RNA, 15 nt, Homo sapiens
aauuucucccaguca

SEQ ID NO: 39226 - RNA, 17 nt, Homo sapiens
acucauuuuuguuuuca

SEQ ID NO: 39227 - RNA, 20 nt, Homo sapiens
gugcuuuuaaaaaaaaauac

SEQ ID NO: 39228 - RNA, 18 nt, Homo sapiens
uguagaagauggcacuua

SEQ ID NO: 39229 - RNA, 14 nt, Homo sapiens
aaguagggacuucu

SEQ ID NO: 39230 - RNA, 21 nt, Homo sapiens
auuauucccauucuacauacu

SEQ ID NO: 39231 - RNA, 24 nt, Homo sapiens
auauuaaaaucacaaacucaucca

SEQ ID NO: 39232 - RNA, 21 nt, Homo sapiens
cucauuuauuuccauauuaaa

SEQ ID NO: 39233 - RNA, 15 nt, Homo sapiens
aagauagcagggcau

SEQ ID NO: 39234 - RNA, 19 nt, Homo sapiens
uaauguagauaaagcacug

SEQ ID NO: 39235 - RNA, 18 nt, Homo sapiens
ugguuuuucaguuuucag

SEQ ID NO: 39236 - RNA, 14 nt, Homo sapiens
agaaagacuauuca

SEQ ID NO: 39237 - RNA, 13 nt, Homo sapiens
aauuagaugacug

SEQ ID NO: 39238 - RNA, 14 nt, Homo sapiens
ccaaagugguauag

SEQ ID NO: 39239 - RNA, 16 nt, Homo sapiens
ucaauacuuugaacac

SEQ ID NO: 39240 - RNA, 11 nt, Homo sapiens
uugcuguagaa

SEQ ID NO: 39241 - RNA, 20 nt, Homo sapiens
aauguaagggaaacugccag

SEQ ID NO: 39242 - RNA, 16 nt, Homo sapiens
uuaccuuuguucccaa

SEQ ID NO: 39243 - RNA, 14 nt, Homo sapiens
uaagggaaacugcc

SEQ ID NO: 39244 - RNA, 17 nt, Homo sapiens
gcagcuugaaacugaga

SEQ ID NO: 39245 - RNA, 20 nt, Homo sapiens
uuuuauggaggcuuugcaua

SEQ ID NO: 39246 - RNA, 13 nt, Homo sapiens
cuguucacagcca

SEQ ID NO: 39247 - RNA, 13 nt, Homo sapiens
accuuuguuccca

SEQ ID NO: 39248 - RNA, 12 nt, Homo sapiens
aaguaaaaccac

SEQ ID NO: 39249 - RNA, 19 nt, Homo sapiens
agcaccuacaguguacagu

SEQ ID NO: 39250 - RNA, 14 nt, Homo sapiens
ccagacuggcacag

SEQ ID NO: 39251 - RNA, 17 nt, Homo sapiens
augugaacacaucagcu

SEQ ID NO: 39252 - RNA, 20 nt, Homo sapiens
aaucauuucugcaucagcug

SEQ ID NO: 39253 - RNA, 21 nt, Homo sapiens
ugucaagaugaugaugaucuu

SEQ ID NO: 39254 - RNA, 22 nt, Homo sapiens
acagucuuguauuaaguuguua

SEQ ID NO: 39255 - RNA, 23 nt, Homo sapiens
aaggaccauaaauuuaaauggag

SEQ ID NO: 39256 - RNA, 20 nt, Homo sapiens
agcuguuuaugcauagauaa

SEQ ID NO: 39257 - RNA, 14 nt, Homo sapiens
uuucugagaaagac

SEQ ID NO: 39258 - RNA, 19 nt, Homo sapiens
aaauacacacucaaaucaa

SEQ ID NO: 39259 - RNA, 17 nt, Homo sapiens
agaugugggcagugaug

SEQ ID NO: 39260 - RNA, 22 nt, Homo sapiens
uagauaaagcacuguuuggaua

SEQ ID NO: 39261 - RNA, 20 nt, Homo sapiens
uauuagugaaguaugcacua

SEQ ID NO: 39262 - RNA, 22 nt, Homo sapiens
cuaaguaaaaccacagcaguug

SEQ ID NO: 39263 - RNA, 13 nt, Homo sapiens
gugcuacaaaaac

SEQ ID NO: 39264 - RNA, 14 nt, Homo sapiens
caguguacagucuu

SEQ ID NO: 39265 - RNA, 22 nt, Homo sapiens
uugaacaacucgaaucacucau

SEQ ID NO: 39266 - RNA, 22 nt, Homo sapiens
gaugaucuuuaaaauacacacu

SEQ ID NO: 39267 - RNA, 17 nt, Homo sapiens
aggugcuacaaaaacac

SEQ ID NO: 39268 - RNA, 19 nt, Homo sapiens
guuguuaauaaaaguacau

SEQ ID NO: 39269 - RNA, 16 nt, Homo sapiens
ucaaauguuguucucu

SEQ ID NO: 39270 - RNA, 22 nt, Homo sapiens
ccagguagagagaccacaagca

SEQ ID NO: 39271 - RNA, 16 nt, Homo sapiens
uaaaauacacacucaa

SEQ ID NO: 39272 - RNA, 18 nt, Homo sapiens
cugcugaaacaacaaaua

SEQ ID NO: 39273 - RNA, 14 nt, Homo sapiens
ucuuaguugcugua

SEQ ID NO: 39274 - RNA, 18 nt, Homo sapiens
gugcuacaaaaacacagc

SEQ ID NO: 39275 - RNA, 14 nt, Homo sapiens
uuauuggacuucca

SEQ ID NO: 39276 - RNA, 19 nt, Homo sapiens
uuaaauggagaaaggaccc

SEQ ID NO: 39277 - RNA, 22 nt, Homo sapiens
agggacuucugucuucacaaca

SEQ ID NO: 39278 - RNA, 20 nt, Homo sapiens
uacaguuuuuauugcuuguu

SEQ ID NO: 39279 - RNA, 14 nt, Homo sapiens
accaugccauuuaa

SEQ ID NO: 39280 - RNA, 12 nt, Homo sapiens
caaguccaagca

(The sequence listing continues in the following parts.)

1. A bioinformatically detectable isolated oligonucleotide which is endogenously processed from a hairpin-shaped precursor, and anneals to a portion of a mRNA transcript of a target gene, wherein binding of said oligonucleotide to said mRNA transcript represses expression of said target gene, and wherein said oligonucleotide has at least 80% sequence identity with a nucleotide sequence selected from the group consisting of SEQ ID NOs: 1-6456.

2. A bioinformatically detectable isolated oligonucleotide having a nucleotide sequence selected from the group consisting of SEQ ID NOs: 1-6456.

3. A bioinformatically detectable first oligonucleotide which is a portion of a mRNA transcript of a target gene, and anneals to a second oligonucleotide that is endogenously processed from a hairpin precursor, wherein binding of said first oligonucleotide to said second oligonucleotide represses expression of said target gene, and wherein nucleotide sequence of said second nucleotide is selected from the group consisting of SEQ ID NOs: 1-6456.

4. A bioinformatically detectable oligonucleotide having a nucleotide sequence selected from the group consisting of SEQ ID NOs: 1-6456.

5. A bioinformatically detectable isolated oligonucleotide which anneals to a portion of a mRNA transcript of a target gene associated with Escherichia coli CFT073 infection, wherein binding of said oligonucleotide to said mRNA transcript represses expression of said target gene, and wherein said oligonucleotide has at least 80% sequence identity with a nucleotide sequence selected from the group consisting of: (a) a sequence selected from the group consisting of SEQ ID NOs: 6 and 7044-8222; and (b) the complement of a sequence selected from the group consisting of SEQ ID NOs: 19991 and 18424-21435.

6. A bioinformatically detectable first oligonucleotide which is a portion of a mRNA transcript of a target gene associated with Escherichia coli CFT073, and anneals to a second oligonucleotide that is endogenously processed from a hairpin precursor, wherein binding of said first oligonucleotide to said second oligonucleotide represses expression of said target gene, and wherein nucleotide sequence of said second nucleotide is selected from the group consisting of SEQ ID NOs: 6 and 7044-8222.

7. A bioinformatically detectable isolated oligonucleotide which anneals to a portion of a mRNA transcript of a target gene associated with Mycobacterium avium subsp. paratuberculosis infection, wherein binding of said oligonucleotide to said mRNA transcript represses expression of said target gene, and wherein said oligonucleotide has at least 80% sequence identity with a nucleotide sequence selected from the group consisting of: (a) a sequence selected from the group consisting of SEQ ID NOs: 1, 2, 3, 4, 5 and 8468-10252; and (b) the complement of a sequence selected from the group consisting of SEQ ID NOs: 24070, 24503, 24604, 24799, 24951 and 21948-25640.

8. A bioinformatically detectable first oligonucleotide which is a portion of a mRNA transcript of a target gene associated with Mycobacterium avium subsp. paratuberculosis, and anneals to a second oligonucleotide that is endogenously processed from a hairpin precursor, wherein binding of said first oligonucleotide to said second oligonucleotide represses expression of said target gene, and wherein nucleotide sequence of said second nucleotide is selected from the group consisting of SEQ ID NOs: 1, 2, 3, 4, 5 and 8468-10252.

9. A bioinformatically detectable isolated oligonucleotide which anneals to a portion of a mRNA transcript of a target gene associated with Mycobacterium bovis subsp bovis AF2122/97 infection, wherein binding of said oligonucleotide to said mRNA transcript represses expression of said target gene, and wherein said oligonucleotide has at least 80% sequence identity with a nucleotide sequence selected from the group consisting of: (a) a sequence selected from the group consisting of SEQ ID NOs: 1, 2, 3, 4, 5 and 10253-11953; and (b) the complement of a sequence selected from the group consisting of SEQ ID NOs: 26741, 27115, 27315, 27443, 27664, 28350 and 25641-29147.

10. A bioinformatically detectable first oligonucleotide which is a portion of a mRNA transcript of a target gene associated with Mycobacterium bovis subsp bovis AF2122/97, and anneals to a second oligonucleotide that is endogenously processed from a hairpin precursor, wherein binding of said first oligonucleotide to said second oligonucleotide represses expression of said target gene, and wherein nucleotide sequence of said second nucleotide is selected from the group consisting of SEQ ID NOs: 1, 2, 3, 4, 5 and 10253-11953.

11. A bioinformatically detectable isolated oligonucleotide which anneals to a portion of a mRNA transcript of a target gene associated with Mycobacterium tuberculosis CDC1551 infection, wherein binding of said oligonucleotide to said mRNA transcript represses expression of said target gene, and wherein said oligonucleotide has at least 80% sequence identity with a nucleotide sequence selected from the group consisting of: (a) a sequence selected from the group consisting of SEQ ID NOs: 1, 2, 3, 4, 5 and 12752-14275; and (b) the complement of a sequence selected from the group consisting of SEQ ID NOs: 32492, 33020, 33133, 33366, 33675 and 30886-33928.

12. A bioinformatically detectable first oligonucleotide which is a portion of a mRNA transcript of a target gene associated with Mycobacterium tuberculosis CDC1551, and anneals to a second oligonucleotide that is endogenously processed from a hairpin precursor, wherein binding of said first oligonucleotide to said second oligonucleotide represses expression of said target gene, and wherein nucleotide sequence of said second nucleotide is selected from the group consisting of SEQ ID NOs: 1, 2, 3, 4, 5 and 12752-14275.

13. A method for bioinformatic detection of microRNA oligonucleotides, the method comprising: bioinformatically detecting a hairpin shaped precursor oligonucleotide; bioinformatically detecting an oligonucleotide which is endogenously processed from said hairpin shaped precursor oligonucleotide; and bioinformatically detecting a target gene of said oligonucleotide wherein said oligonucleotide anneals to at least one portion of a mRNA transcript of said target gene, and wherein said binding represses expression of said target gene, and said target gene is associated with a disease.
